United States Patent Application Publication US 2005/0244851 A1 - sequence listing, part 102

SEQ ID NO: 3976318 - DNA, 25 bp, Homo sapien
tcattcccatattctagtgtgctct

SEQ ID NO: 3976319 - DNA, 25 bp, Homo sapien
gctcattcccatattctagtgtgct

SEQ ID NO: 3976320 - DNA, 25 bp, Homo sapien
attcccatattctagtgtgctctcc

SEQ ID NO: 3976321 - DNA, 25 bp, Homo sapien
atggtgtcttagctcctctacacca

SEQ ID NO: 3976322 - DNA, 25 bp, Homo sapien
tcgatggcctagtgttccgtgctcc

SEQ ID NO: 3976323 - DNA, 25 bp, Homo sapien
tgtcccgtgcagctgcaacatcgat

SEQ ID NO: 3976324 - DNA, 25 bp, Homo sapien
gaactcatccgactgtgtcccgtgc

SEQ ID NO: 3976325 - DNA, 25 bp, Homo sapien
aacttcttggagaggctttagcatc

SEQ ID NO: 3976326 - DNA, 25 bp, Homo sapien
gagaacttcttggagaggctttagc

SEQ ID NO: 3976327 - DNA, 25 bp, Homo sapien
tggccagagagaacttcttggagag

SEQ ID NO: 3976328 - DNA, 25 bp, Homo sapien
ctggccagagagaacttcttggaga

SEQ ID NO: 3976329 - DNA, 25 bp, Homo sapien
cggttcagccaactgcccttgggtt

SEQ ID NO: 3976330 - DNA, 25 bp, Homo sapien
tgggcacctcggttcagccaactgc

SEQ ID NO: 3976331 - DNA, 25 bp, Homo sapien
ctcggttcagccaactgcccttggg

SEQ ID NO: 3976332 - DNA, 25 bp, Homo sapien
gcctgggcacctcggttcagccaac

SEQ ID NO: 3976333 - DNA, 25 bp, Homo sapien
ttagcgagactttttcatcgcccat

SEQ ID NO: 3976334 - DNA, 25 bp, Homo sapien
gggaattagcgagactttttcatcg

SEQ ID NO: 3976335 - DNA, 25 bp, Homo sapien
gaattagcgagactttttcatcgcc

SEQ ID NO: 3976336 - DNA, 25 bp, Homo sapien
cctgggaattagcgagactttttca

SEQ ID NO: 3976337 - DNA, 25 bp, Homo sapien
gatccttggttggatgcagagacag

SEQ ID NO: 3976338 - DNA, 25 bp, Homo sapien
tagatccttggttggatgcagagac

SEQ ID NO: 3976339 - DNA, 25 bp, Homo sapien
atccttggttggatgcagagacaga

SEQ ID NO: 3976340 - DNA, 25 bp, Homo sapien
tttagatccttggttggatgcagag

SEQ ID NO: 3976341 - DNA, 25 bp, Homo sapien
tgtggacaggagtccattcttccct

SEQ ID NO: 3976342 - DNA, 25 bp, Homo sapien
gttccatcccatctattgccctaag

SEQ ID NO: 3976343 - DNA, 25 bp, Homo sapien
cctaagttgggccagtgaatccctc

SEQ ID NO: 3976344 - DNA, 25 bp, Homo sapien
gccagagactagagaacactttgcc

SEQ ID NO: 3976345 - DNA, 25 bp, Homo sapien
ggtgttctcagggcagtggtttcca

SEQ ID NO: 3976346 - DNA, 25 bp, Homo sapien
gagccaccatggtacctttcctctg

SEQ ID NO: 3976347 - DNA, 25 bp, Homo sapien
tgtgatctgccttgagctcggccca

SEQ ID NO: 3976348 - DNA, 25 bp, Homo sapien
gtttgctggttaagctggtttaagc

SEQ ID NO: 3976349 - DNA, 25 bp, Homo sapien
gcagtgagggcggagtgctcccttt

SEQ ID NO: 3976350 - DNA, 25 bp, Homo sapien
ctgcagtgagggcggagtgctccct

SEQ ID NO: 3976351 - DNA, 25 bp, Homo sapien
agtgagggcggagtgctccctttgc

SEQ ID NO: 3976352 - DNA, 25 bp, Homo sapien
gatctgcagtgagggcggagtgctc

SEQ ID NO: 3976353 - DNA, 25 bp, Homo sapien
gataggctcttgtggcttagccaag

SEQ ID NO: 3976354 - DNA, 25 bp, Homo sapien
tgctgtctggataggctcttgtggc

SEQ ID NO: 3976355 - DNA, 25 bp, Homo sapien
tccagacctccctagctctgctcag

SEQ ID NO: 3976356 - DNA, 25 bp, Homo sapien
tgagggctgccaccgggttgccccg

SEQ ID NO: 3976357 - DNA, 25 bp, Homo sapien
tccctgcatgtattgaggacacttg

SEQ ID NO: 3976358 - DNA, 25 bp, Homo sapien
ggacacttgtgtcaggcaccactgt

SEQ ID NO: 3976359 - DNA, 25 bp, Homo sapien
aaggccctttatgaaggcgctgtcc

SEQ ID NO: 3976360 - DNA, 25 bp, Homo sapien
tcttgtcagagtccgttggcctcac

SEQ ID NO: 3976361 - DNA, 25 bp, Homo sapien
aaggactggaggcaagaggccatct

SEQ ID NO: 3976362 - DNA, 25 bp, Homo sapien
gaaacggcagaaggaggatgccctt

SEQ ID NO: 3976363 - DNA, 25 bp, Homo sapien
ggatgagggccgtgggaaggtccac

SEQ ID NO: 3976364 - DNA, 25 bp, Homo sapien
ttgtcttgagtctctgggtgtatgg

SEQ ID NO: 3976365 - DNA, 25 bp, Homo sapien
gctggacacatggttctcgatcaat

SEQ ID NO: 3976366 - DNA, 25 bp, Homo sapien
tccatgggcccgtcagctctcctgt

SEQ ID NO: 3976367 - DNA, 25 bp, Homo sapien
cagcatgacgctggacacatggttc

SEQ ID NO: 3976368 - DNA, 25 bp, Homo sapien
ctcgatcaatgtgagttggttggaa

SEQ ID NO: 3976369 - DNA, 25 bp, Homo sapien
tctccgtgccttcaaagtcaggctg

SEQ ID NO: 3976370 - DNA, 25 bp, Homo sapien
cttctccgtgccttcaaagtcaggc

SEQ ID NO: 3976371 - DNA, 25 bp, Homo sapien
tgttgaatgaggaaatcgttcagat

SEQ ID NO: 3976372 - DNA, 25 bp, Homo sapien
aaatcgttcagatgtcgaactgcca

SEQ ID NO: 3976373 - DNA, 25 bp, Homo sapien
gaagggtcgggagggcctccagctg

SEQ ID NO: 3976374 - DNA, 25 bp, Homo sapien
ctgtggagtgcgagaggccaaggaa

SEQ ID NO: 3976375 - DNA, 25 bp, Homo sapien
cgagaggccaaggaagggtcgggag

SEQ ID NO: 3976376 - DNA, 25 bp, Homo sapien
gtgcgagaggccaaggaagggtcgg

SEQ ID NO: 3976377 - DNA, 25 bp, Homo sapien
gtacattcccatccctcgagcccca

SEQ ID NO: 3976378 - DNA, 25 bp, Homo sapien
cagtaaggctccctgcgtacattcc

SEQ ID NO: 3976379 - DNA, 25 bp, Homo sapien
attcccatccctcgagccccaggtt

SEQ ID NO: 3976380 - DNA, 25 bp, Homo sapien
gtaaggctccctgcgtacattccca

SEQ ID NO: 3976381 - DNA, 25 bp, Homo sapien
ggggtcccagacactggccctggac

SEQ ID NO: 3976382 - DNA, 25 bp, Homo sapien
gacactggccctggacccggctctt

SEQ ID NO: 3976383 - DNA, 25 bp, Homo sapien
cccagacactggccctggacccggc

SEQ ID NO: 3976384 - DNA, 25 bp, Homo sapien
ggtcccagacactggccctggaccc

SEQ ID NO: 3976385 - DNA, 25 bp, Homo sapien
gagctggctgcatgcaaaccactgg

SEQ ID NO: 3976386 - DNA, 25 bp, Homo sapien
ctttattttgcagcccgaagggatg

SEQ ID NO: 3976387 - DNA, 25 bp, Homo sapien
tcctggctcgtaggagattcctgcc

SEQ ID NO: 3976388 - DNA, 25 bp, Homo sapien
cacgcacaaagaatgagggacactc

SEQ ID NO: 3976389 - DNA, 25 bp, Homo sapien
tgaactcctgccattggccaacaga

SEQ ID NO: 3976390 - DNA, 25 bp, Homo sapien
cagggaacccgtatggctgatggac

SEQ ID NO: 3976391 - DNA, 25 bp, Homo sapien
agctttccgactggtcactggagca

SEQ ID NO: 3976392 - DNA, 25 bp, Homo sapien
gctgatggaccccagctgaagaagc

SEQ ID NO: 3976393 - DNA, 25 bp, Homo sapien
ctgtgcccaccttcatgggaaacgg

SEQ ID NO: 3976394 - DNA, 25 bp, Homo sapien
ccttcatgggaaacggtgagcatca

SEQ ID NO: 3976395 - DNA, 25 bp, Homo sapien
tgggaaacggtgagcatcaccttcc

SEQ ID NO: 3976396 - DNA, 25 bp, Homo sapien
tcagatccgcttctgattggaggct

SEQ ID NO: 3976397 - DNA, 25 bp, Homo sapien
ttgtggacggcctgcttcatgggcc

SEQ ID NO: 3976398 - DNA, 25 bp, Homo sapien
ggcaccaccttgtggacggcctgct

SEQ ID NO: 3976399 - DNA, 25 bp, Homo sapien
ccgttggggtgaaggagcataggga

SEQ ID NO: 3976400 - DNA, 25 bp, Homo sapien
ccaccttgtggacggcctgcttcat

SEQ ID NO: 3976401 - DNA, 25 bp, Homo sapien
gcctgcccttgtgcttgggtcccta

SEQ ID NO: 3976402 - DNA, 25 bp, Homo sapien
gggctgtcgcctgcccttgtgcttg

SEQ ID NO: 3976403 - DNA, 25 bp, Homo sapien
gggttgggctgtcgcctgcccttgt

SEQ ID NO: 3976404 - DNA, 25 bp, Homo sapien
gttgggctgtcgcctgcccttgtgc

SEQ ID NO: 3976405 - DNA, 25 bp, Homo sapien
catcagcctcgggtgtggtgggtga

SEQ ID NO: 3976406 - DNA, 25 bp, Homo sapien
gagggtgggtgtctgagcatcagcc

SEQ ID NO: 3976407 - DNA, 25 bp, Homo sapien
acgtgcttcccggattcagtgctga

SEQ ID NO: 3976408 - DNA, 25 bp, Homo sapien
tggtgggtgatccacacgtgcttcc

SEQ ID NO: 3976409 - DNA, 25 bp, Homo sapien
tgagcagttaagaccaaggccacag

SEQ ID NO: 3976410 - DNA, 25 bp, Homo sapien
aaggccacagctgcgagtcacagat

SEQ ID NO: 3976411 - DNA, 25 bp, Homo sapien
gcttgctactactgccagatctggg

SEQ ID NO: 3976412 - DNA, 25 bp, Homo sapien
acacatgaacctcgaggctgggcag

SEQ ID NO: 3976413 - DNA, 25 bp, Homo sapien
ggcgtgtggcagctcttccctttgg

SEQ ID NO: 3976414 - DNA, 25 bp, Homo sapien
ttctcctccatgcatcgtaaactgt

SEQ ID NO: 3976415 - DNA, 25 bp, Homo sapien
aggcgggccgccttcatgtggtttc

SEQ ID NO: 3976416 - DNA, 25 bp, Homo sapien
tctgcggagatgtcaaccaaccgtt

SEQ ID NO: 3976417 - DNA, 25 bp, Homo sapien
gactgaaggctccctggtcatcctc

SEQ ID NO: 3976418 - DNA, 25 bp, Homo sapien
gaagactcattcgttcaagagctgc

SEQ ID NO: 3976419 - DNA, 25 bp, Homo sapien
ctcagagtgcggctgtggtgccaca

SEQ ID NO: 3976420 - DNA, 25 bp, Homo sapien
gacccagttctttggcccagttctg

SEQ ID NO: 3976421 - DNA, 25 bp, Homo sapien
tccaatccgatcttggcaggcagga

SEQ ID NO: 3976422 - DNA, 25 bp, Homo sapien
ttagtccaaaaagtgccatcatgcc

SEQ ID NO: 3976423 - DNA, 25 bp, Homo sapien
agacgcgaggtgatcattacttcca

SEQ ID NO: 3976424 - DNA, 25 bp, Homo sapien
tggctttggctcattaaaacgagga

SEQ ID NO: 3976425 - DNA, 25 bp, Homo sapien
tcaagctttctgagcaagcgaggct

SEQ ID NO: 3976426 - DNA, 25 bp, Homo sapien
gggcttgggatttgaacactcagct

SEQ ID NO: 3976427 - DNA, 25 bp, Homo sapien
ctctgcactcaggtttttcaagctt

SEQ ID NO: 3976428 - DNA, 25 bp, Homo sapien
tcagactaagtcctcgaaggtccag

SEQ ID NO: 3976429 - DNA, 25 bp, Homo sapien
cagtggcagcgctgagctacagaaa

SEQ ID NO: 3976430 - DNA, 25 bp, Homo sapien
tcctcgagaaggtcaacagtcagtt

SEQ ID NO: 3976431 - DNA, 25 bp, Homo sapien
ttcgggccacgggtaaaatgtatgc

SEQ ID NO: 3976432 - DNA, 25 bp, Homo sapien
aaatgtatgcctgcaagcgcttgga

SEQ ID NO: 3976433 - DNA, 25 bp, Homo sapien
agccttgtctctgaagggacagtgc

SEQ ID NO: 3976434 - DNA, 25 bp, Homo sapien
cctggatgctgcctatggagccttg

SEQ ID NO: 3976435 - DNA, 25 bp, Homo sapien
tgcgggccttcttgagtccgaaacc

SEQ ID NO: 3976436 - DNA, 25 bp, Homo sapien
tcagctgcgggccttcttgagtccg

SEQ ID NO: 3976437 - DNA, 25 bp, Homo sapien
ctcggtgatcacctgggcagatgtg

SEQ ID NO: 3976438 - DNA, 25 bp, Homo sapien
aagcacagtccccatgagcttgctc

SEQ ID NO: 3976439 - DNA, 25 bp, Homo sapien
ggatccctttctcggtgatcacctg

SEQ ID NO: 3976440 - DNA, 25 bp, Homo sapien
ccggcagggagttcccacgatgtca

SEQ ID NO: 3976441 - DNA, 25 bp, Homo sapien
gagacggaggaggtgtactcccaca

SEQ ID NO: 3976442 - DNA, 25 bp, Homo sapien
tggagacggaggaggtgtactccca

SEQ ID NO: 3976443 - DNA, 25 bp, Homo sapien
gacggaggaggtgtactcccacaag

SEQ ID NO: 3976444 - DNA, 25 bp, Homo sapien
cggaggaggtgtactcccacaagtt

SEQ ID NO: 3976445 - DNA, 25 bp, Homo sapien
cagatgccaccctcaagctggtggc

SEQ ID NO: 3976446 - DNA, 25 bp, Homo sapien
gtgggggttgcagcccaccaagcta

SEQ ID NO: 3976447 - DNA, 25 bp, Homo sapien
acagcaaacaggctgaagggacagg

SEQ ID NO: 3976448 - DNA, 25 bp, Homo sapien
accaagctagagttgagggcactcc

SEQ ID NO: 3976449 - DNA, 25 bp, Homo sapien
caatgctgtgccctctagctggcag

SEQ ID NO: 3976450 - DNA, 25 bp, Homo sapien
gaaatgacacttagagcctggccct

SEQ ID NO: 3976451 - DNA, 25 bp, Homo sapien
ccataaaggagccagacattgctga

SEQ ID NO: 3976452 - DNA, 25 bp, Homo sapien
cccagtcgtgagagcccataaagga

SEQ ID NO: 3976453 - DNA, 25 bp, Homo sapien
tttttaacagaagcataggaccgta

SEQ ID NO: 3976454 - DNA, 25 bp, Homo sapien
agccagtcatttgcaagaggtttgc

SEQ ID NO: 3976455 - DNA, 25 bp, Homo sapien
gcagtgcgctcatcctgacggagca

SEQ ID NO: 3976456 - DNA, 25 bp, Homo sapien
gatgtgtcatgaaaccccaagtgtc

SEQ ID NO: 3976457 - DNA, 25 bp, Homo sapien
atgccacagcaacccattctcgcct

SEQ ID NO: 3976458 - DNA, 25 bp, Homo sapien
tgaaaggcattgctcggaggggcgg

SEQ ID NO: 3976459 - DNA, 25 bp, Homo sapien
acccggggctctagggctgctcgct

SEQ ID NO: 3976460 - DNA, 25 bp, Homo sapien
cagcaacccattctcgcctcttcct

SEQ ID NO: 3976461 - DNA, 25 bp, Homo sapien
gcatgcacgtcctcctgaatacctg

SEQ ID NO: 3976462 - DNA, 25 bp, Homo sapien
tcataacccaacactctgagatagg

SEQ ID NO: 3976463 - DNA, 25 bp, Homo sapien
gaagaggaaacacctgagtgacact

SEQ ID NO: 3976464 - DNA, 25 bp, Homo sapien
tccaagaggtggtctcctgttttca

SEQ ID NO: 3976465 - DNA, 25 bp, Homo sapien
ggaaagatagtgagtatgaagtctt

SEQ ID NO: 3976466 - DNA, 25 bp, Homo sapien
ctgtgtggattatgaatacagagag

SEQ ID NO: 3976467 - DNA, 25 bp, Homo sapien
agcaccatgacaccaaacggcgcat

SEQ ID NO: 3976468 - DNA, 25 bp, Homo sapien
agctgggtgacaagggctcgagcca

SEQ ID NO: 3976469 - DNA, 25 bp, Homo sapien
ccaaacggcgcatttgcaggtccca

SEQ ID NO: 3976470 - DNA, 25 bp, Homo sapien
agatggttctagaagtgctctggcc

SEQ ID NO: 3976471 - DNA, 25 bp, Homo sapien
ttggtgaggggaccaaaagagcctc

SEQ ID NO: 3976472 - DNA, 25 bp, Homo sapien
tcctgtccacaccagacaaccgtgg

SEQ ID NO: 3976473 - DNA, 25 bp, Homo sapien
ccagacaaccgtggatttggtgagg

SEQ ID NO: 3976474 - DNA, 25 bp, Homo sapien
cacaccagacaaccgtggatttggt

SEQ ID NO: 3976475 - DNA, 25 bp, Homo sapien
cagctcttgatatggcagcccctga

SEQ ID NO: 3976476 - DNA, 25 bp, Homo sapien
acagctcttgatatggcagcccctg

SEQ ID NO: 3976477 - DNA, 25 bp, Homo sapien
aagggttgggtcaatgctggtcacc

SEQ ID NO: 3976478 - DNA, 25 bp, Homo sapien
aatgcaatgatgtgggacagagcgc

SEQ ID NO: 3976479 - DNA, 25 bp, Homo sapien
aagcacttctgtgtggcagtgccca

SEQ ID NO: 3976480 - DNA, 25 bp, Homo sapien
tctggtaaagacactcgggatggaa

SEQ ID NO: 3976481 - DNA, 25 bp, Homo sapien
tatgccgtccagacctggctcaggg

SEQ ID NO: 3976482 - DNA, 25 bp, Homo sapien
cgccaccacttgtggactccccaag

SEQ ID NO: 3976483 - DNA, 25 bp, Homo sapien
ccatgacctagctgccagctctgct

SEQ ID NO: 3976484 - DNA, 25 bp, Homo sapien
cagacacagactggtccctgagcga

SEQ ID NO: 3976485 - DNA, 25 bp, Homo sapien
gtgaaacttccctaggcggcccaga

SEQ ID NO: 3976486 - DNA, 25 bp, Homo sapien
agttccagttgttactacatggtgc

SEQ ID NO: 3976487 - DNA, 25 bp, Homo sapien
cagaaaccgactagcagcggggcct

SEQ ID NO: 3976488 - DNA, 25 bp, Homo sapien
gaaactttcctgctggacgccatcg

SEQ ID NO: 3976489 - DNA, 25 bp, Homo sapien
tctctcttgggtccacggcggtgga

SEQ ID NO: 3976490 - DNA, 25 bp, Homo sapien
gtccacggcggtggataggcctctt

SEQ ID NO: 3976491 - DNA, 25 bp, Homo sapien
tttctcatctctcttgggtccacgg

SEQ ID NO: 3976492 - DNA, 25 bp, Homo sapien
tggataggcctcttgagtttctcca

SEQ ID NO: 3976493 - DNA, 25 bp, Homo sapien
cctgcatctgggaatggctttccct

SEQ ID NO: 3976494 - DNA, 25 bp, Homo sapien
gcatctgggaatggctttccctgct

SEQ ID NO: 3976495 - DNA, 25 bp, Homo sapien
gtcctgcatctgggaatggctttcc

SEQ ID NO: 3976496 - DNA, 25 bp, Homo sapien
tgcatctgggaatggctttccctgc

SEQ ID NO: 3976497 - DNA, 25 bp, Homo sapien
cgagaagtcctaggccagcaagtat

SEQ ID NO: 3976498 - DNA, 25 bp, Homo sapien
aagtcgtgccctgaagatgcgttgc

SEQ ID NO: 3976499 - DNA, 25 bp, Homo sapien
taggactggtcccaaattctagggc

SEQ ID NO: 3976500 - DNA, 25 bp, Homo sapien
tcagtgactgtcacacgagaagtcc

SEQ ID NO: 3976501 - DNA, 25 bp, Homo sapien
tagtcaaaaacgtcagcgcaagccc

SEQ ID NO: 3976502 - DNA, 25 bp, Homo sapien
ccagcagaggccaaactagagagtg

SEQ ID NO: 3976503 - DNA, 25 bp, Homo sapien
cgcaagcccaggaagtacctcgaaa

SEQ ID NO: 3976504 - DNA, 25 bp, Homo sapien
tcctgcccgaagatgaactgcctga

SEQ ID NO: 3976505 - DNA, 25 bp, Homo sapien
tacaaaatgctcgacgtgtccagtg

SEQ ID NO: 3976506 - DNA, 25 bp, Homo sapien
caaagcaatgataaacccggcacgg

SEQ ID NO: 3976507 - DNA, 25 bp, Homo sapien
caagtgacctgtggacatgcgtcca

SEQ ID NO: 3976508 - DNA, 25 bp, Homo sapien
ccttgtggccttacatgaggtttaa

SEQ ID NO: 3976509 - DNA, 25 bp, Homo sapien
tgagcatcaggcaaatcttcttcct

SEQ ID NO: 3976510 - DNA, 25 bp, Homo sapien
gctgtcgtacttcatgagattaaag

SEQ ID NO: 3976511 - DNA, 25 bp, Homo sapien
cagactttaagaagcggctgtagct

SEQ ID NO: 3976512 - DNA, 25 bp, Homo sapien
tcctcttcctcggttcgcttgtgtt

SEQ ID NO: 3976513 - DNA, 25 bp, Homo sapien
cctaccatgtgccaaagaatactaa

SEQ ID NO: 3976514 - DNA, 25 bp, Homo sapien
caggccataaatcatcccatcagat

SEQ ID NO: 3976515 - DNA, 25 bp, Homo sapien
tgaaggctgaggctaatccaggcca

SEQ ID NO: 3976516 - DNA, 25 bp, Homo sapien
gaaagctcaaataagtcatctgcta

SEQ ID NO: 3976517 - DNA, 25 bp, Homo sapien
ccttgtgaccagcattcattctccc

SEQ ID NO: 3976518 - DNA, 25 bp, Homo sapien
tcaagggctatgatctctttcccac

SEQ ID NO: 3976519 - DNA, 25 bp, Homo sapien
cccactgctacccaatcctgtgcca

SEQ ID NO: 3976520 - DNA, 25 bp, Homo sapien
ctgctacccaatcctgtgccatctg

SEQ ID NO: 3976521 - DNA, 25 bp, Homo sapien
cagagatgtctagaatgtcactgac

SEQ ID NO: 3976522 - DNA, 25 bp, Homo sapien
tccacatggttcaccctggtacacg

SEQ ID NO: 3976523 - DNA, 25 bp, Homo sapien
ttgtcaagtggatggtaaaaccctg

SEQ ID NO: 3976524 - DNA, 25 bp, Homo sapien
ctggtacacggaacaaccaagtgga

SEQ ID NO: 3976525 - DNA, 25 bp, Homo sapien
caggctagagtttagcaccagatcc

SEQ ID NO: 3976526 - DNA, 25 bp, Homo sapien
cagacgcaaactctgcttgtgtatt

SEQ ID NO: 3976527 - DNA, 25 bp, Homo sapien
cagatccaaagcctcgggaaggcac

SEQ ID NO: 3976528 - DNA, 25 bp, Homo sapien
agtggagaaggccacctcatctctg

SEQ ID NO: 3976529 - DNA, 25 bp, Homo sapien
ccattcttcaatgtttgagtacagc

SEQ ID NO: 3976530 - DNA, 25 bp, Homo sapien
gaaaggaccaataacgtcatcgatt

SEQ ID NO: 3976531 - DNA, 25 bp, Homo sapien
gagtacagcctgaaaggaccaataa

SEQ ID NO: 3976532 - DNA, 25 bp, Homo sapien
tcactgagcagacttcaatgtgttc

SEQ ID NO: 3976533 - DNA, 25 bp, Homo sapien
taaatttgtccaacggcagcctttg

SEQ ID NO: 3976534 - DNA, 25 bp, Homo sapien
tcccaggtagcaaagctttaagccc

SEQ ID NO: 3976535 - DNA, 25 bp, Homo sapien
gctaacgtactagggaaatgcccac

SEQ ID NO: 3976536 - DNA, 25 bp, Homo sapien
cacgcccggccgtaatacatgtttt

SEQ ID NO: 3976537 - DNA, 25 bp, Homo sapien
aagctcagagagcagcggagccgca

SEQ ID NO: 3976538 - DNA, 25 bp, Homo sapien
ctagaagctcagagagcagcggagc

SEQ ID NO: 3976539 - DNA, 25 bp, Homo sapien
agaagctcagagagcagcggagccg

SEQ ID NO: 3976540 - DNA, 25 bp, Homo sapien
agctcagagagcagcggagccgcac

SEQ ID NO: 3976541 - DNA, 25 bp, Homo sapien
gtgctgaacacaggaaagcggctgc

SEQ ID NO: 3976542 - DNA, 25 bp, Homo sapien
aatcttgtggctccaaacatgttcc

SEQ ID NO: 3976543 - DNA, 25 bp, Homo sapien
caaagccgcgggagaggcttttgaa

SEQ ID NO: 3976544 - DNA, 25 bp, Homo sapien
cttttgaaagttccgtgaaatcttg

SEQ ID NO: 3976545 - DNA, 25 bp, Homo sapien
aaagcctttccaatccctctgctcc

SEQ ID NO: 3976546 - DNA, 25 bp, Homo sapien
aagcctttccaatccctctgctcca

SEQ ID NO: 3976547 - DNA, 25 bp, Homo sapien
ctcaccgagctttgagaaacagcaa

SEQ ID NO: 3976548 - DNA, 25 bp, Homo sapien
ctcggtctgcccggccgtatgagat

SEQ ID NO: 3976549 - DNA, 25 bp, Homo sapien
cagggagtctaacatcgggtgtttc

SEQ ID NO: 3976550 - DNA, 25 bp, Homo sapien
cccggccgtatgagatggtttccag

SEQ ID NO: 3976551 - DNA, 25 bp, Homo sapien
taacatcgggtgtttcagtaaattc

SEQ ID NO: 3976552 - DNA, 25 bp, Homo sapien
tgacctgtgatgaggccttgctgga

SEQ ID NO: 3976553 - DNA, 25 bp, Homo sapien
tctggaacatcagagggtgcggttc

SEQ ID NO: 3976554 - DNA, 25 bp, Homo sapien
gagggtgcggttcttccaggatctt

SEQ ID NO: 3976555 - DNA, 25 bp, Homo sapien
tctcgttgagccgagactgcccctc

SEQ ID NO: 3976556 - DNA, 25 bp, Homo sapien
gcattttcctgttagccccactttc

SEQ ID NO: 3976557 - DNA, 25 bp, Homo sapien
tggacatgcagcaaagggcattttc

SEQ ID NO: 3976558 - DNA, 25 bp, Homo sapien
tggcttatctgagagcttccgggag

SEQ ID NO: 3976559 - DNA, 25 bp, Homo sapien
ccctggacatgcagcaaagggcatt

SEQ ID NO: 3976560 - DNA, 25 bp, Homo sapien
ggagacggcccaggttgggtgaaca

SEQ ID NO: 3976561 - DNA, 25 bp, Homo sapien
gagacggcccaggttgggtgaacac

SEQ ID NO: 3976562 - DNA, 25 bp, Homo sapien
ctctctgtaggatgtggacagggca

SEQ ID NO: 3976563 - DNA, 25 bp, Homo sapien
aagaagtcctatgctggatgtcagg

SEQ ID NO: 3976564 - DNA, 25 bp, Homo sapien
gctgcccattcggaagctctctctg

SEQ ID NO: 3976565 - DNA, 25 bp, Homo sapien
cctgacctgaaaggctggaagaggc

SEQ ID NO: 3976566 - DNA, 25 bp, Homo sapien
acatgacttactggctcctgcaggc

SEQ ID NO: 3976567 - DNA, 25 bp, Homo sapien
tgcaggcagacagaacgtccttagc

SEQ ID NO: 3976568 - DNA, 25 bp, Homo sapien
catcagtaagctggcggagacggaa

SEQ ID NO: 3976569 - DNA, 25 bp, Homo sapien
tcctgcaggcatttagccagcagcc

SEQ ID NO: 3976570 - DNA, 25 bp, Homo sapien
ttttcttaaaatcttcacatgctag

SEQ ID NO: 3976571 - DNA, 25 bp, Homo sapien
gcgtcttatcttgcattttcttaaa

SEQ ID NO: 3976572 - DNA, 25 bp, Homo sapien
ctgcgtcttatcttgcattttctta

SEQ ID NO: 3976573 - DNA, 25 bp, Homo sapien
cttcacatgctagccaaaacaaaac

SEQ ID NO: 3976574 - DNA, 25 bp, Homo sapien
tgctcttgaggctctggtggctgct

SEQ ID NO: 3976575 - DNA, 25 bp, Homo sapien
tgctggaactgccatcgctgtcgtg

SEQ ID NO: 3976576 - DNA, 25 bp, Homo sapien
taaatcttttcacgccttctgggtc

SEQ ID NO: 3976577 - DNA, 25 bp, Homo sapien
agggatgccgcccatttggctgtgc

SEQ ID NO: 3976578 - DNA, 25 bp, Homo sapien
ccactggccaattcagaggcagccc

SEQ ID NO: 3976579 - DNA, 25 bp, Homo sapien
actggccaattcagaggcagccctc

SEQ ID NO: 3976580 - DNA, 25 bp, Homo sapien
ccttcccctactcttgtgtccactg

SEQ ID NO: 3976581 - DNA, 25 bp, Homo sapien
caccaaatccttcccctactcttgt

SEQ ID NO: 3976582 - DNA, 25 bp, Homo sapien
gaggaacagggaatctccaaataac

SEQ ID NO: 3976583 - DNA, 25 bp, Homo sapien
ggaggaacagggaatctccaaataa

SEQ ID NO: 3976584 - DNA, 25 bp, Homo sapien
acactgagaagtctcctgggaggaa

SEQ ID NO: 3976585 - DNA, 25 bp, Homo sapien
ggaacagggaatctccaaataacac

SEQ ID NO: 3976586 - DNA, 25 bp, Homo sapien
taccaggattttagacattcaccag

SEQ ID NO: 3976587 - DNA, 25 bp, Homo sapien
agagcacactggacttacttaatag

SEQ ID NO: 3976588 - DNA, 25 bp, Homo sapien
acatgttgacttcttgatcccctgg

SEQ ID NO: 3976589 - DNA, 25 bp, Homo sapien
tgagctaaattagaaccaggccagc

SEQ ID NO: 3976590 - DNA, 25 bp, Homo sapien
ctgtatgggaggtcagctgtcctca

SEQ ID NO: 3976591 - DNA, 25 bp, Homo sapien
tgtatgggaggtcagctgtcctcac

SEQ ID NO: 3976592 - DNA, 25 bp, Homo sapien
cagagacgccttgtgtgagaaaggc

SEQ ID NO: 3976593 - DNA, 25 bp, Homo sapien
gaagttccacgcagaccaacaatcc

SEQ ID NO: 3976594 - DNA, 25 bp, Homo sapien
tcccagagacgccttgtgtgagaaa

SEQ ID NO: 3976595 - DNA, 25 bp, Homo sapien
tctggtgtccacctgagaagttcca

SEQ ID NO: 3976596 - DNA, 25 bp, Homo sapien
tcaggctggcccaaagtgacggcca

SEQ ID NO: 3976597 - DNA, 25 bp, Homo sapien
gctttcggaatctggagccccatgt

SEQ ID NO: 3976598 - DNA, 25 bp, Homo sapien
aaggcgaatccttcgtaacgtcaga

SEQ ID NO: 3976599 - DNA, 25 bp, Homo sapien
taacgtcagaacttcgctggctcgg

SEQ ID NO: 3976600 - DNA, 25 bp, Homo sapien
tcagccggctcacggcgcggttgaa

SEQ ID NO: 3976601 - DNA, 25 bp, Homo sapien
ctgacggcggccgcttcctgctcag

SEQ ID NO: 3976602 - DNA, 25 bp, Homo sapien
cgcttcctgctcagccggctcacgg

SEQ ID NO: 3976603 - DNA, 25 bp, Homo sapien
ctgctcagccggctcacggcgcggt

SEQ ID NO: 3976604 - DNA, 25 bp, Homo sapien
ccgcgggcgcccgaggaggaagaag

SEQ ID NO: 3976605 - DNA, 25 bp, Homo sapien
cgcgggcgcccgaggaggaagaagg

SEQ ID NO: 3976606 - DNA, 25 bp, Homo sapien
agccccagttgcaccccaagtgtgg

SEQ ID NO: 3976607 - DNA, 25 bp, Homo sapien
cttctgctgccaaaagaggatttcc

SEQ ID NO: 3976608 - DNA, 25 bp, Homo sapien
tggccggtggttgcttgttgtttcc

SEQ ID NO: 3976609 - DNA, 25 bp, Homo sapien
ccaaaagtcgttttcctccgagcat

SEQ ID NO: 3976610 - DNA, 25 bp, Homo sapien
gccaccgtgcccagtcaaagatatt

SEQ ID NO: 3976611 - DNA, 25 bp, Homo sapien
caccgtgcccagtcaaagatatttt

SEQ ID NO: 3976612 - DNA, 25 bp, Homo sapien
agccaccgtgcccagtcaaagatat

SEQ ID NO: 3976613 - DNA, 25 bp, Homo sapien
ccgtgcccagtcaaagatatttttt

SEQ ID NO: 3976614 - DNA, 25 bp, Homo sapien
gcacagatcacaatcaatgtcctta

SEQ ID NO: 3976615 - DNA, 25 bp, Homo sapien
taagaggtatctgtattaacatcct

SEQ ID NO: 3976616 - DNA, 25 bp, Homo sapien
aggcaataactgcagtcacatttga

SEQ ID NO: 3976617 - DNA, 25 bp, Homo sapien
tgtaagatctgtcctgctgttggag

SEQ ID NO: 3976618 - DNA, 25 bp, Homo sapien
gtcaagttactaagatcctttacca

SEQ ID NO: 3976619 - DNA, 25 bp, Homo sapien
agcagacgggatgacaggctgctga

SEQ ID NO: 3976620 - DNA, 25 bp, Homo sapien
atttctgagcagacgggatgacagg

SEQ ID NO: 3976621 - DNA, 25 bp, Homo sapien
tcaagttactaagatcctttaccaa

SEQ ID NO: 3976622 - DNA, 25 bp, Homo sapien
acagctctaagctcctcttggatcg

SEQ ID NO: 3976623 - DNA, 25 bp, Homo sapien
ggcctagtcacagctctaagctcct

SEQ ID NO: 3976624 - DNA, 25 bp, Homo sapien
cagctctaagctcctcttggatcgt

SEQ ID NO: 3976625 - DNA, 25 bp, Homo sapien
gtcacagctctaagctcctcttgga

SEQ ID NO: 3976626 - DNA, 25 bp, Homo sapien
tcactcccagaggaacatctcagag

SEQ ID NO: 3976627 - DNA, 25 bp, Homo sapien
cgttattagatgtggatcactccca

SEQ ID NO: 3976628 - DNA, 25 bp, Homo sapien
cacttgggcaagttatggtatctgc

SEQ ID NO: 3976629 - DNA, 25 bp, Homo sapien
caagctaagcctcgctggaagatca

SEQ ID NO: 3976630 - DNA, 25 bp, Homo sapien
agtaaaattagttcccgtatctgag

SEQ ID NO: 3976631 - DNA, 25 bp, Homo sapien
cagcaaagctaatggacttgttaac

SEQ ID NO: 3976632 - DNA, 25 bp, Homo sapien
tactaccaaagagcaacctagacag

SEQ ID NO: 3976633 - DNA, 25 bp, Homo sapien
catacatactccacataactactga

SEQ ID NO: 3976634 - DNA, 25 bp, Homo sapien
tccttgcatgcccaaaaagtctctg

SEQ ID NO: 3976635 - DNA, 25 bp, Homo sapien
ggccattttagcctctcactgccag

SEQ ID NO: 3976636 - DNA, 25 bp, Homo sapien
gggagcaacgattcttaggcttaag

SEQ ID NO: 3976637 - DNA, 25 bp, Homo sapien
tggatcaagatagcattgggtcatg

SEQ ID NO: 3976638 - DNA, 25 bp, Homo sapien
gtggcaatataactagtctggataa

SEQ ID NO: 3976639 - DNA, 25 bp, Homo sapien
gaaggacacttcagtcacatgttta

SEQ ID NO: 3976640 - DNA, 25 bp, Homo sapien
catagaatatacagtcaggaaacac

SEQ ID NO: 3976641 - DNA, 25 bp, Homo sapien
taatttactggcagaccaaaacagg

SEQ ID NO: 3976642 - DNA, 25 bp, Homo sapien
gcaaattttacccacacagcctgaa

SEQ ID NO: 3976643 - DNA, 25 bp, Homo sapien
aaacatttgcactccctagctctga

SEQ ID NO: 3976644 - DNA, 25 bp, Homo sapien
ccattatggtaaaactaaggtgcca

SEQ ID NO: 3976645 - DNA, 25 bp, Homo sapien
tgcacacatacaacttaagcctctg

SEQ ID NO: 3976646 - DNA, 25 bp, Homo sapien
gatgaacttatatgtgattcccagg

SEQ ID NO: 3976647 - DNA, 25 bp, Homo sapien
gctcaagtaactcaaacaatgctgt

SEQ ID NO: 3976648 - DNA, 25 bp, Homo sapien
ttagggtgcaaaacttcagtctggc

SEQ ID NO: 3976649 - DNA, 25 bp, Homo sapien
aaatatgtcttaacgtggaccacca

SEQ ID NO: 3976650 - DNA, 25 bp, Homo sapien
gaaaaatcatgttcatatccatcat

SEQ ID NO: 3976651 - DNA, 25 bp, Homo sapien
aaaatcatgttcatatccatcatga

SEQ ID NO: 3976652 - DNA, 25 bp, Homo sapien
cataaagaaaaatcatgttcatatc

SEQ ID NO: 3976653 - DNA, 25 bp, Homo sapien
aagaaaaatcatgttcatatccatc

SEQ ID NO: 3976654 - DNA, 25 bp, Homo sapien
cagagtgtcacaggaaatcgaagcc

SEQ ID NO: 3976655 - DNA, 25 bp, Homo sapien
aagcaaatctgtgctaaaggttcca

SEQ ID NO: 3976656 - DNA, 25 bp, Homo sapien
tagaagacacgtgtccttcaccaaa

SEQ ID NO: 3976657 - DNA, 25 bp, Homo sapien
aatcgaagcctatcatgaattacaa

SEQ ID NO: 3976658 - DNA, 25 bp, Homo sapien
ccatatccggcttggttaggaggag

SEQ ID NO: 3976659 - DNA, 25 bp, Homo sapien
gggaggctgagcaccaaatccaccc

SEQ ID NO: 3976660 - DNA, 25 bp, Homo sapien
tggtaacttgccataccatatccgg

SEQ ID NO: 3976661 - DNA, 25 bp, Homo sapien
gccataccatatccggcttggttag

SEQ ID NO: 3976662 - DNA, 25 bp, Homo sapien
aaatcaagcagagcctaatcacaga

SEQ ID NO: 3976663 - DNA, 25 bp, Homo sapien
ttcaacacatcatctattacataag

SEQ ID NO: 3976664 - DNA, 25 bp, Homo sapien
aatcaacacacctacaacaaataga

SEQ ID NO: 3976665 - DNA, 25 bp, Homo sapien
caacacatcatctattacataagaa

SEQ ID NO: 3976666 - DNA, 25 bp, Homo sapien
agaaccatacgtttctatactggaa

SEQ ID NO: 3976667 - DNA, 25 bp, Homo sapien
gagaagtaatttcttagcctcataa

SEQ ID NO: 3976668 - DNA, 25 bp, Homo sapien
tattttgtcagaaccatacgtttct

SEQ ID NO: 3976669 - DNA, 25 bp, Homo sapien
tttgttagattagtttctataatgc

SEQ ID NO: 3976670 - DNA, 25 bp, Homo sapien
taaggcggtacttgccacccatttg

SEQ ID NO: 3976671 - DNA, 25 bp, Homo sapien
ccattggccccattgactatagtca

SEQ ID NO: 3976672 - DNA, 25 bp, Homo sapien
tccttgttgattccatggttgcccg

SEQ ID NO: 3976673 - DNA, 25 bp, Homo sapien
ggttgcccgtatactccataaggcg

SEQ ID NO: 3976674 - DNA, 25 bp, Homo sapien
taagaaacaccgtatatgaagaaag

SEQ ID NO: 3976675 - DNA, 25 bp, Homo sapien
ccgtatatgaagaaagagtgggaga

SEQ ID NO: 3976676 - DNA, 25 bp, Homo sapien
aacacataagaaacaccgtatatga

SEQ ID NO: 3976677 - DNA, 25 bp, Homo sapien
gaaacaccgtatatgaagaaagagt

SEQ ID NO: 3976678 - DNA, 25 bp, Homo sapien
ccttatgtgaataggactctgttat

SEQ ID NO: 3976679 - DNA, 25 bp, Homo sapien
tctaagtttattggggtggtgacac

SEQ ID NO: 3976680 - DNA, 25 bp, Homo sapien
taggactctgttatttatcattgtc

SEQ ID NO: 3976681 - DNA, 25 bp, Homo sapien
tcattgtctaagtttattggggtgg

SEQ ID NO: 3976682 - DNA, 25 bp, Homo sapien
taagattcagttaataccgcaaata

SEQ ID NO: 3976683 - DNA, 25 bp, Homo sapien
taataccgcaaataatcaattttga

SEQ ID NO: 3976684 - DNA, 25 bp, Homo sapien
taatcaattttgaaatacaatcaac

SEQ ID NO: 3976685 - DNA, 25 bp, Homo sapien
cagttaataccgcaaataatcaatt

SEQ ID NO: 3976686 - DNA, 25 bp, Homo sapien
gaaagtagctatatgctttatttta

SEQ ID NO: 3976687 - DNA, 25 bp, Homo sapien
gttcattttacagagtttccaaagc

SEQ ID NO: 3976688 - DNA, 25 bp, Homo sapien
ttgttcattttacagagtttccaaa

SEQ ID NO: 3976689 - DNA, 25 bp, Homo sapien
tcattttacagagtttccaaagctt

SEQ ID NO: 3976690 - DNA, 25 bp, Homo sapien
agaatgctatgaaaaatcgaattac

SEQ ID NO: 3976691 - DNA, 25 bp, Homo sapien
ttatgtgacatgtaagatggaaacc

SEQ ID NO: 3976692 - DNA, 25 bp, Homo sapien
ttaaagaatgctatgaaaaatcgaa

SEQ ID NO: 3976693 - DNA, 25 bp, Homo sapien
taagatggaaaccttaaagaatgct

SEQ ID NO: 3976694 - DNA, 25 bp, Homo sapien
cccaatagcatttaaccacatgtcc

SEQ ID NO: 3976695 - DNA, 25 bp, Homo sapien
cacatgtccttcaatcgtagtaccg

SEQ ID NO: 3976696 - DNA, 25 bp, Homo sapien
tcaccgaaacaatggcatgggctgc

SEQ ID NO: 3976697 - DNA, 25 bp, Homo sapien
caggagattctttaccccaatagca

SEQ ID NO: 3976698 - DNA, 25 bp, Homo sapien
caaatggtgagaatgtctgtctcat

SEQ ID NO: 3976699 - DNA, 25 bp, Homo sapien
ccaaatggtgagaatgtctgtctca

SEQ ID NO: 3976700 - DNA, 25 bp, Homo sapien
tcctcagaggtgattagaaaaccaa

SEQ ID NO: 3976701 - DNA, 25 bp, Homo sapien
catatgaacagtgatgaagctcctc

SEQ ID NO: 3976702 - DNA, 25 bp, Homo sapien
gaaattcatatgaacagtgatgaag

SEQ ID NO: 3976703 - DNA, 25 bp, Homo sapien
taaaacatggctgatgtgtatcatg

SEQ ID NO: 3976704 - DNA, 25 bp, Homo sapien
tgttaacccagacgcaattcctcca

SEQ ID NO: 3976705 - DNA, 25 bp, Homo sapien
ggacttgactggtttactacatctt

SEQ ID NO: 3976706 - DNA, 25 bp, Homo sapien
cagtacacagtacaattttttggac

SEQ ID NO: 3976707 - DNA, 25 bp, Homo sapien
acttgactggtttactacatcttca

SEQ ID NO: 3976708 - DNA, 25 bp, Homo sapien
aacacacacagtggacatatcttac

SEQ ID NO: 3976709 - DNA, 25 bp, Homo sapien
gcaggtggtttacgagtggcccaat

SEQ ID NO: 3976710 - DNA, 25 bp, Homo sapien
tgaccgcccatatgcacaatcgcat

SEQ ID NO: 3976711 - DNA, 25 bp, Homo sapien
tggttcggatttgacgaccacccaa

SEQ ID NO: 3976712 - DNA, 25 bp, Homo sapien
tcttgtgtacttttaggtgcaggtg

SEQ ID NO: 3976713 - DNA, 25 bp, Homo sapien
catacaaatcagtagatgaatttac

SEQ ID NO: 3976714 - DNA, 25 bp, Homo sapien
tgaaataaaatatcggcgctgctgg

SEQ ID NO: 3976715 - DNA, 25 bp, Homo sapien
gtgataaataagactctgtaagatg

SEQ ID NO: 3976716 - DNA, 25 bp, Homo sapien
cgaaactgaactattaccaattaga

SEQ ID NO: 3976717 - DNA, 25 bp, Homo sapien
catgtctttaactacccgggcatcc

SEQ ID NO: 3976718 - DNA, 25 bp, Homo sapien
agttgccatgtctttaactacccgg

SEQ ID NO: 3976719 - DNA, 25 bp, Homo sapien
attttccagttgccatgtctttaac

SEQ ID NO: 3976720 - DNA, 25 bp, Homo sapien
tccagttgccatgtctttaactacc

SEQ ID NO: 3976721 - DNA, 25 bp, Homo sapien
tactagtgtcctctaaggtttactg

SEQ ID NO: 3976722 - DNA, 25 bp, Homo sapien
aaatagttaaatgtcttctgcctag

SEQ ID NO: 3976723 - DNA, 25 bp, Homo sapien
taccatgcaatctctaaatagttaa

SEQ ID NO: 3976724 - DNA, 25 bp, Homo sapien
gagggaagtaagagccaccctcaaa

SEQ ID NO: 3976725 - DNA, 25 bp, Homo sapien
tttcttggtcaattctctaccatca

SEQ ID NO: 3976726 - DNA, 25 bp, Homo sapien
ttcttggtcaattctctaccatcat

SEQ ID NO: 3976727 - DNA, 25 bp, Homo sapien
tttttcttggtcaattctctaccat

SEQ ID NO: 3976728 - DNA, 25 bp, Homo sapien
tgattggaaatatagaactccactg

SEQ ID NO: 3976729 - DNA, 25 bp, Homo sapien
gcagttagccttcaagatcctgtcc

SEQ ID NO: 3976730 - DNA, 25 bp, Homo sapien
caatgctaagcacaccagtacgaaa

SEQ ID NO: 3976731 - DNA, 25 bp, Homo sapien
gatcctgtccattcttatgagcaat

SEQ ID NO: 3976732 - DNA, 25 bp, Homo sapien
gattagatgaaaacgagaccccaag

SEQ ID NO: 3976733 - DNA, 25 bp, Homo sapien
cacatttgcctcttaactagtagaa

SEQ ID NO: 3976734 - DNA, 25 bp, Homo sapien
gaaaaactgcaggtctcaggtataa

SEQ ID NO: 3976735 - DNA, 25 bp, Homo sapien
tacaattctgcctatcatgactgag

SEQ ID NO: 3976736 - DNA, 25 bp, Homo sapien
aatccccaacaaacacatggaagtg

SEQ ID NO: 3976737 - DNA, 25 bp, Homo sapien
tcaaatccccaacaaacacatggaa

SEQ ID NO: 3976738 - DNA, 25 bp, Homo sapien
taccaaagggggcaaatgctgattt

SEQ ID NO: 3976739 - DNA, 25 bp, Homo sapien
tccccaacaaacacatggaagtgat

SEQ ID NO: 3976740 - DNA, 25 bp, Homo sapien
gaaatcagagcatttggtaatcaaa

SEQ ID NO: 3976741 - DNA, 25 bp, Homo sapien
atcagagcatttggtaatcaaatac

SEQ ID NO: 3976742 - DNA, 25 bp, Homo sapien
aaatcagagcatttggtaatcaaat

SEQ ID NO: 3976743 - DNA, 25 bp, Homo sapien
ctgaaatcagagcatttggtaatca

SEQ ID NO: 3976744 - DNA, 25 bp, Homo sapien
aaacctatttaagctggtaatgcct

SEQ ID NO: 3976745 - DNA, 25 bp, Homo sapien
agctggtaatgcctcctggataatt

SEQ ID NO: 3976746 - DNA, 25 bp, Homo sapien
ctggataatttcagaactcttccac

SEQ ID NO: 3976747 - DNA, 25 bp, Homo sapien
aactcttccacagtaaaatgcagca

SEQ ID NO: 3976748 - DNA, 25 bp, Homo sapien
gtgtggttgcccagtttactttgac

SEQ ID NO: 3976749 - DNA, 25 bp, Homo sapien
tggtgtggttgcccagtttactttg

SEQ ID NO: 3976750 - DNA, 25 bp, Homo sapien
ggtgtggttgcccagtttactttga

SEQ ID NO: 3976751 - DNA, 25 bp, Homo sapien
catttatcaagcagggttatttttg

SEQ ID NO: 3976752 - DNA, 25 bp, Homo sapien
tttttgtaaaagcactaagctgaat

SEQ ID NO: 3976753 - DNA, 25 bp, Homo sapien
tattaggcatgtcatgagttacaac

SEQ ID NO: 3976754 - DNA, 25 bp, Homo sapien
agcactaagctgaataaagcaaaac

SEQ ID NO: 3976755 - DNA, 25 bp, Homo sapien
acaaagcaatatgggtcattgcttg

SEQ ID NO: 3976756 - DNA, 25 bp, Homo sapien
agcaatatgggtcattgcttgtatg

SEQ ID NO: 3976757 - DNA, 25 bp, Homo sapien
tccacaaagcaatatgggtcattgc

SEQ ID NO: 3976758 - DNA, 25 bp, Homo sapien
aaagcaatatgggtcattgcttgta

SEQ ID NO: 3976759 - DNA, 25 bp, Homo sapien
agttgacccttctgctatcgggttg

SEQ ID NO: 3976760 - DNA, 25 bp, Homo sapien
aatccaacagaagagttgacccttc

SEQ ID NO: 3976761 - DNA, 25 bp, Homo sapien
gaaaatccaacagaagagttgaccc

SEQ ID NO: 3976762 - DNA, 25 bp, Homo sapien
agagttgacccttctgctatcgggt

SEQ ID NO: 3976763 - DNA, 25 bp, Homo sapien
tgagaagaaaatccaggaaaaaaca

SEQ ID NO: 3976764 - DNA, 25 bp, Homo sapien
tacagggtccaatctgactgaacaa

SEQ ID NO: 3976765 - DNA, 25 bp, Homo sapien
gggtccaatctgactgaacaactga

SEQ ID NO: 3976766 - DNA, 25 bp, Homo sapien
tacagcttttacagggtccaatctg

SEQ ID NO: 3976767 - DNA, 25 bp, Homo sapien
caatctgactgaacaactgaagtat

SEQ ID NO: 3976768 - DNA, 25 bp, Homo sapien
taaactggtctcaagataactacaa

SEQ ID NO: 3976769 - DNA, 25 bp, Homo sapien
gatcctatgaaagtaagattaaccc

SEQ ID NO: 3976770 - DNA, 25 bp, Homo sapien
tgtgatcttgtataccccaatggca

SEQ ID NO: 3976771 - DNA, 25 bp, Homo sapien
agcaacaattgttcttaggccacta

SEQ ID NO: 3976772 - DNA, 25 bp, Homo sapien
gccaaacactaaagtctttctggta

SEQ ID NO: 3976773 - DNA, 25 bp, Homo sapien
caaagttcattctggaaagtagatt

SEQ ID NO: 3976774 - DNA, 25 bp, Homo sapien
caaatttgcatctgttatgaacaac

SEQ ID NO: 3976775 - DNA, 25 bp, Homo sapien
tcacacagagaggaccaccttggtt

SEQ ID NO: 3976776 - DNA, 25 bp, Homo sapien
agtgggctgagatcgcgccatggca

SEQ ID NO: 3976777 - DNA, 25 bp, Homo sapien
tgggctgagatcgcgccatggcact

SEQ ID NO: 3976778 - DNA, 25 bp, Homo sapien
ccagcctgggcaacaagagcgaaac

SEQ ID NO: 3976779 - DNA, 25 bp, Homo sapien
gcagtgggctgagatcgcgccatgg

SEQ ID NO: 3976780 - DNA, 25 bp, Homo sapien
tattcgttccaaattatagcttcta

SEQ ID NO: 3976781 - DNA, 25 bp, Homo sapien
catctttattcgttccaaattatag

SEQ ID NO: 3976782 - DNA, 25 bp, Homo sapien
ccaaattatagcttctacacttcac

SEQ ID NO: 3976783 - DNA, 25 bp, Homo sapien
ctaaagatccaagtctttaaatata

SEQ ID NO: 3976784 - DNA, 25 bp, Homo sapien
ttagagtctattttgtcttctaaga

SEQ ID NO: 3976785 - DNA, 25 bp, Homo sapien
cttagagtctattttgtcttctaag

SEQ ID NO: 3976786 - DNA, 25 bp, Homo sapien
tttctgaagatagaaccatatgtct

SEQ ID NO: 3976787 - DNA, 25 bp, Homo sapien
tctgaagatagaaccatatgtctta

SEQ ID NO: 3976788 - DNA, 25 bp, Homo sapien
gaagatagaaccatatgtcttagct

SEQ ID NO: 3976789 - DNA, 25 bp, Homo sapien
gatagaaccatatgtcttagcttgt

SEQ ID NO: 3976790 - DNA, 25 bp, Homo sapien
ccggggctgcccgtcgtcttccatc

SEQ ID NO: 3976791 - DNA, 25 bp, Homo sapien
gtccggggctgcccgtcgtcttcca

SEQ ID NO: 3976792 - DNA, 25 bp, Homo sapien
agagtccggggctgcccgtcgtctt

SEQ ID NO: 3976793 - DNA, 25 bp, Homo sapien
gagtccggggctgcccgtcgtcttc

SEQ ID NO: 3976794 - DNA, 25 bp, Homo sapien
gtgggtgcgacggagcgatcccggg

SEQ ID NO: 3976795 - DNA, 25 bp, Homo sapien
cgacggagcgatcccgggacaaggg

SEQ ID NO: 3976796 - DNA, 25 bp, Homo sapien
gggtgcgacggagcgatcccgggac

SEQ ID NO: 3976797 - DNA, 25 bp, Homo sapien
gtgcgacggagcgatcccgggacaa

SEQ ID NO: 3976798 - DNA, 25 bp, Homo sapien
tctgggcaccggctggggacagagg

SEQ ID NO: 3976799 - DNA, 25 bp, Homo sapien
gcgacccgccaggtcaccgctcagg

SEQ ID NO: 3976800 - DNA, 25 bp, Homo sapien
cactgcgctccaaccaggaggagca

SEQ ID NO: 3976801 - DNA, 25 bp, Homo sapien
cggacactgcgctccaaccaggagg

SEQ ID NO: 3976802 - DNA, 25 bp, Homo sapien
agcgcaggcgcgacccgccaggtca

SEQ ID NO: 3976803 - DNA, 25 bp, Homo sapien
acggatcacgtcgtcgctgtgggcc

SEQ ID NO: 3976804 - DNA, 25 bp, Homo sapien
cagctccgggagagatcgggcaaaa

SEQ ID NO: 3976805 - DNA, 25 bp, Homo sapien
gaacctgtggttaagaggagccgcc

SEQ ID NO: 3976806 - DNA, 25 bp, Homo sapien
gaaacgtcgtgaagccgaagtctct

SEQ ID NO: 3976807 - DNA, 25 bp, Homo sapien
cgtgctaatcataagctgatatggt

SEQ ID NO: 3976808 - DNA, 25 bp, Homo sapien
ttctttctttcacgtgctaatcata

SEQ ID NO: 3976809 - DNA, 25 bp, Homo sapien
tggcagtttcccagttagctgggcg

SEQ ID NO: 3976810 - DNA, 25 bp, Homo sapien
tctcatctcggactgtaattctcac

SEQ ID NO: 3976811 - DNA, 25 bp, Homo sapien
tcagaatttcaactggtcccagcag

SEQ ID NO: 3976812 - DNA, 25 bp, Homo sapien
aatgcagagctagcaacagtttacc

SEQ ID NO: 3976813 - DNA, 25 bp, Homo sapien
tcccagcagccgaaaggagtggaaa

SEQ ID NO: 3976814 - DNA, 25 bp, Homo sapien
cataaattcgactccctgttgctcc

SEQ ID NO: 3976815 - DNA, 25 bp, Homo sapien
gagaatcgcttgagggtgagagttc

SEQ ID NO: 3976816 - DNA, 25 bp, Homo sapien
agaaagatcgtgtgagctgtggagt

SEQ ID NO: 3976817 - DNA, 25 bp, Homo sapien
agaatcgcttgagggtgagagttca

SEQ ID NO: 3976818 - DNA, 25 bp, Homo sapien
gaggcagaaagatcgtgtgagctgt

SEQ ID NO: 3976819 - DNA, 25 bp, Homo sapien
tggctctgtccagcgattatattct

SEQ ID NO: 3976820 - DNA, 25 bp, Homo sapien
tctgtccagcgattatattctcagc

SEQ ID NO: 3976821 - DNA, 25 bp, Homo sapien
gctctgtccagcgattatattctca

SEQ ID NO: 3976822 - DNA, 25 bp, Homo sapien
tgtggctctgtccagcgattatatt

SEQ ID NO: 3976823 - DNA, 25 bp, Homo sapien
tctgaggttcatctgcaagaagctg

SEQ ID NO: 3976824 - DNA, 25 bp, Homo sapien
gcctcttccttgtagcatggccagg

SEQ ID NO: 3976825 - DNA, 25 bp, Homo sapien
taattgaaacagcttccaggatgga

SEQ ID NO: 3976826 - DNA, 25 bp, Homo sapien
gactcattacatccgtgccagggct

SEQ ID NO: 3976827 - DNA, 25 bp, Homo sapien
aaacggttgcagtgctggtgctccc

SEQ ID NO: 3976828 - DNA, 25 bp, Homo sapien
tacaggaaacggttgcagtgctggt

SEQ ID NO: 3976829 - DNA, 25 bp, Homo sapien
caagccgattacaggaaacggttgc

SEQ ID NO: 3976830 - DNA, 25 bp, Homo sapien
ctggatcgttcaagccgattacagg

SEQ ID NO: 3976831 - DNA, 25 bp, Homo sapien
gccttgctccgcctcagggaatttg

SEQ ID NO: 3976832 - DNA, 25 bp, Homo sapien
ccgaatgtgcagtgggcgatgcccc

SEQ ID NO: 3976833 - DNA, 25 bp, Homo sapien
gaagtggaaggctgatctgaagagt

SEQ ID NO: 3976834 - DNA, 25 bp, Homo sapien
gtttcgcgatctgcaggaacaggcc

SEQ ID NO: 3976835 - DNA, 25 bp, Homo sapien
cccttgaatagcaatccctccaaat

SEQ ID NO: 3976836 - DNA, 25 bp, Homo sapien
ccaaattaagcaaagctttattaag

SEQ ID NO: 3976837 - DNA, 25 bp, Homo sapien
aattaagcaaagctttattaagcac

SEQ ID NO: 3976838 - DNA, 25 bp, Homo sapien
tccactggttcccttgaatagcaat

SEQ ID NO: 3976839 - DNA, 25 bp, Homo sapien
cctgtggactccttatcgaataacc

SEQ ID NO: 3976840 - DNA, 25 bp, Homo sapien
ccttatcgaataacccctcatcctc

SEQ ID NO: 3976841 - DNA, 25 bp, Homo sapien
tgtggactccttatcgaataacccc

SEQ ID NO: 3976842 - DNA, 25 bp, Homo sapien
ctccttatcgaataacccctcatcc

SEQ ID NO: 3976843 - DNA, 25 bp, Homo sapien
acagtgagctgccactaactagcaa

SEQ ID NO: 3976844 - DNA, 25 bp, Homo sapien
tttgtgtttggacttgcctgccatt

SEQ ID NO: 3976845 - DNA, 25 bp, Homo sapien
taactagcaaatgctttccccagtt

SEQ ID NO: 3976846 - DNA, 25 bp, Homo sapien
tctttgtgtttggacttgcctgcca

SEQ ID NO: 3976847 - DNA, 25 bp, Homo sapien
gctgcctcgccaggtatagagccct

SEQ ID NO: 3976848 - DNA, 25 bp, Homo sapien
ggctaccagtcctaaccctgagggc

SEQ ID NO: 3976849 - DNA, 25 bp, Homo sapien
cctgctccagttcaagagtaggtct

SEQ ID NO: 3976850 - DNA, 25 bp, Homo sapien
cagcctagtgttgaggcctgaaata

SEQ ID NO: 3976851 - DNA, 25 bp, Homo sapien
ggagagagcgactatgaaagccgaa

SEQ ID NO: 3976852 - DNA, 25 bp, Homo sapien
ggaacactcactcggcgcaaaggag

SEQ ID NO: 3976853 - DNA, 25 bp, Homo sapien
cagggtcctcggctatcatatatgg

SEQ ID NO: 3976854 - DNA, 25 bp, Homo sapien
ccttccggtgtcagatgagagtccc

SEQ ID NO: 3976855 - DNA, 25 bp, Homo sapien
gaggcccgtctgagcatcatcatct

SEQ ID NO: 3976856 - DNA, 25 bp, Homo sapien
tgtgagttacaccttactggagact

SEQ ID NO: 3976857 - DNA, 25 bp, Homo sapien
cagctagtaccaacaacagggagag

SEQ ID NO: 3976858 - DNA, 25 bp, Homo sapien
caatatcaggttgcacttgtgtgag

SEQ ID NO: 3976859 - DNA, 25 bp, Homo sapien
gccggatgttctggagtgctgttcc

SEQ ID NO: 3976860 - DNA, 25 bp, Homo sapien
ctccctgaataaacagaggccggat

SEQ ID NO: 3976861 - DNA, 25 bp, Homo sapien
gcagggccgctctagctccatggat

SEQ ID NO: 3976862 - DNA, 25 bp, Homo sapien
tggcaagttcataccagtccaggcc

SEQ ID NO: 3976863 - DNA, 25 bp, Homo sapien
tgcacctccgagaacatcatttgtc

SEQ ID NO: 3976864 - DNA, 25 bp, Homo sapien
gcaagttcctgtgcgactgcatgaa

SEQ ID NO: 3976865 - DNA, 25 bp, Homo sapien
gcaagctgttatgcctcttagcaga

SEQ ID NO: 3976866 - DNA, 25 bp, Homo sapien
cagaggcggagcacaatcaggaaat

SEQ ID NO: 3976867 - DNA, 25 bp, Homo sapien
gtctgtgtgcttcatcgctgcctct

SEQ ID NO: 3976868 - DNA, 25 bp, Homo sapien
tgactgtggagaagggtagaacatg

SEQ ID NO: 3976869 - DNA, 25 bp, Homo sapien
gcctcttgatgcctggcagggtcca

SEQ ID NO: 3976870 - DNA, 25 bp, Homo sapien
caggctcagaaaagatggaacgagt

SEQ ID NO: 3976871 - DNA, 25 bp, Homo sapien
taacaggcacttgtagggtcgtgtc

SEQ ID NO: 3976872 - DNA, 25 bp, Homo sapien
ctgtggaccgaatgcttgagaagcc

SEQ ID NO: 3976873 - DNA, 25 bp, Homo sapien
ggtctcaccgtccatcagagagggt

SEQ ID NO: 3976874 - DNA, 25 bp, Homo sapien
tagcagttgagagaggtccttttcc

SEQ ID NO: 3976875 - DNA, 25 bp, Homo sapien
ttttcgggtttcagtgaccactcag

SEQ ID NO: 3976876 - DNA, 25 bp, Homo sapien
caaggtagattcttctccacggctc

SEQ ID NO: 3976877 - DNA, 25 bp, Homo sapien
ttctccacggctctttcatgaacat

SEQ ID NO: 3976878 - DNA, 25 bp, Homo sapien
ggtgcccattttcgggtttcagtga

SEQ ID NO: 3976879 - DNA, 25 bp, Homo sapien
ctgacgtccttcttcacttcccagc

SEQ ID NO: 3976880 - DNA, 25 bp, Homo sapien
ccctgctttgtgctcatctcctcct

SEQ ID NO: 3976881 - DNA, 25 bp, Homo sapien
ctctgccctgctttgtgctcatctc

SEQ ID NO: 3976882 - DNA, 25 bp, Homo sapien
ccctgacgtccttcttcacttccca

SEQ ID NO: 3976883 - DNA, 25 bp, Homo sapien
taatcctgaagccaaacatctcagg

SEQ ID NO: 3976884 - DNA, 25 bp, Homo sapien
catcatcctgtggtgtgtgccagcg

SEQ ID NO: 3976885 - DNA, 25 bp, Homo sapien
gattcctaagcagtaagtcctctca

SEQ ID NO: 3976886 - DNA, 25 bp, Homo sapien
gagatttgaggcattcctagtagga

SEQ ID NO: 3976887 - DNA, 25 bp, Homo sapien
ggtccactcacctaggcctcccaaa

SEQ ID NO: 3976888 - DNA, 25 bp, Homo sapien
gtggtccactcacctaggcctccca

SEQ ID NO: 3976889 - DNA, 25 bp, Homo sapien
tccactcacctaggcctcccaaagt

SEQ ID NO: 3976890 - DNA, 25 bp, Homo sapien
cctcaggtggtccactcacctaggc

SEQ ID NO: 3976891 - DNA, 25 bp, Homo sapien
cagccattgctgttagaacctagga

SEQ ID NO: 3976892 - DNA, 25 bp, Homo sapien
gaaacaaggatcatgagcaccgcat

SEQ ID NO: 3976893 - DNA, 25 bp, Homo sapien
taagggccaaagttgcgaatgtctg

SEQ ID NO: 3976894 - DNA, 25 bp, Homo sapien
cagctacatcgatccatacttgggt

SEQ ID NO: 3976895 - DNA, 25 bp, Homo sapien
aagtccaggtctatgaactccagcc

SEQ ID NO: 3976896 - DNA, 25 bp, Homo sapien
taacttgggtggaggcaaaacacta

SEQ ID NO: 3976897 - DNA, 25 bp, Homo sapien
caggctgtagacaactttgaaggca

SEQ ID NO: 3976898 - DNA, 25 bp, Homo sapien
gtaaaaatcagactcggaaccgatg

SEQ ID NO: 3976899 - DNA, 25 bp, Homo sapien
caaatgtaatcgaatgccaacggac

SEQ ID NO: 3976900 - DNA, 25 bp, Homo sapien
cccctgtgtgagtgtggctggccgg

SEQ ID NO: 3976901 - DNA, 25 bp, Homo sapien
cggcctgcccactgtctgtaacatt

SEQ ID NO: 3976902 - DNA, 25 bp, Homo sapien
ggaagcatagcgtggagctccatta

SEQ ID NO: 3976903 - DNA, 25 bp, Homo sapien
atcttggctgctagggtctgaggag

SEQ ID NO: 3976904 - DNA, 25 bp, Homo sapien
tcagccacatgtacttcaaagaata

SEQ ID NO: 3976905 - DNA, 25 bp, Homo sapien
gacaaatttatcacctgcagcctcc

SEQ ID NO: 3976906 - DNA, 25 bp, Homo sapien
atgacaaatttatcacctgcagcct

SEQ ID NO: 3976907 - DNA, 25 bp, Homo sapien
taaacaatcaatctgaaaccgatgg

SEQ ID NO: 3976908 - DNA, 25 bp, Homo sapien
tatagcttcattaccttctttctcc

SEQ ID NO: 3976909 - DNA, 25 bp, Homo sapien
gcaggatacaatgtcttcataggat

SEQ ID NO: 3976910 - DNA, 25 bp, Homo sapien
gatttgatagagtaaccacctccct

SEQ ID NO: 3976911 - DNA, 25 bp, Homo sapien
cagaagttctgggttcgaattccga

SEQ ID NO: 3976912 - DNA, 25 bp, Homo sapien
tactgtggttacctcataggcactc

SEQ ID NO: 3976913 - DNA, 25 bp, Homo sapien
gagtagttcttacatggccttcgcc

SEQ ID NO: 3976914 - DNA, 25 bp, Homo sapien
aattccgatctggagcggttgcgcc

SEQ ID NO: 3976915 - DNA, 25 bp, Homo sapien
tcccaaaagtgctggcattacaggc

SEQ ID NO: 3976916 - DNA, 25 bp, Homo sapien
cgtgagccaccgcaactggcctgta

SEQ ID NO: 3976917 - DNA, 25 bp, Homo sapien
ggcgtgagccaccgcaactggcctg

SEQ ID NO: 3976918 - DNA, 25 bp, Homo sapien
tttcgccgtattggccaggttggtc

SEQ ID NO: 3976919 - DNA, 25 bp, Homo sapien
ctgttgtcccgctgagtgggttcct

SEQ ID NO: 3976920 - DNA, 25 bp, Homo sapien
tgttgtcccgctgagtgggttcctg

SEQ ID NO: 3976921 - DNA, 25 bp, Homo sapien
gagtgggttcctgtttagttcttca

SEQ ID NO: 3976922 - DNA, 25 bp, Homo sapien
tgagtgggttcctgtttagttcttc

SEQ ID NO: 3976923 - DNA, 25 bp, Homo sapien
cagaagagcctaactgggtggagct

SEQ ID NO: 3976924 - DNA, 25 bp, Homo sapien
ccggttcttggcagagtacgcagct

SEQ ID NO: 3976925 - DNA, 25 bp, Homo sapien
gatggaaagcatctcacacggacag

SEQ ID NO: 3976926 - DNA, 25 bp, Homo sapien
tagttcttggcggagtatgcagctg

SEQ ID NO: 3976927 - DNA, 25 bp, Homo sapien
aaccttccagtgaaggtgtttccat

SEQ ID NO: 3976928 - DNA, 25 bp, Homo sapien
tggaaggcctgttatgtgccacttg

SEQ ID NO: 3976929 - DNA, 25 bp, Homo sapien
ggaatagccaaatctctgaggccat

SEQ ID NO: 3976930 - DNA, 25 bp, Homo sapien
gccacttgtcttttagacattaaac

SEQ ID NO: 3976931 - DNA, 25 bp, Homo sapien
gctgtactaccagtatttgataggg

SEQ ID NO: 3976932 - DNA, 25 bp, Homo sapien
aatacttcccatatggcaggcactg

SEQ ID NO: 3976933 - DNA, 25 bp, Homo sapien
ttttcacaattcatgaagtagttgt

SEQ ID NO: 3976934 - DNA, 25 bp, Homo sapien
actgtgctaaacactacgtgtatta

SEQ ID NO: 3976935 - DNA, 25 bp, Homo sapien
aattgggagttgagaatcataatca

SEQ ID NO: 3976936 - DNA, 25 bp, Homo sapien
ttccatttattctatccacacacat

SEQ ID NO: 3976937 - DNA, 25 bp, Homo sapien
gggatacacccaactgataacagga

SEQ ID NO: 3976938 - DNA, 25 bp, Homo sapien
gataacaggagttacctccagggag

SEQ ID NO: 3976939 - DNA, 25 bp, Homo sapien
gtagatataaagaatagagcctgtc

SEQ ID NO: 3976940 - DNA, 25 bp, Homo sapien
taaagcaacagtaggagctagtgcc

SEQ ID NO: 3976941 - DNA, 25 bp, Homo sapien
cagtgcggtctgtgtttagtattca

SEQ ID NO: 3976942 - DNA, 25 bp, Homo sapien
tcctcacatattgaccagtgcggtc

SEQ ID NO: 3976943 - DNA, 25 bp, Homo sapien
gtattcacgtttgcctaggtatagg

SEQ ID NO: 3976944 - DNA, 25 bp, Homo sapien
catagggaaacatcccatgatatta

SEQ ID NO: 3976945 - DNA, 25 bp, Homo sapien
cattttgggaaattgtagcccaagc

SEQ ID NO: 3976946 - DNA, 25 bp, Homo sapien
aacgttgactgtggattcataggga

SEQ ID NO: 3976947 - DNA, 25 bp, Homo sapien
tatccactagattgaatgcttgcct

SEQ ID NO: 3976948 - DNA, 25 bp, Homo sapien
cattcagtgcgttatcaggttttca

SEQ ID NO: 3976949 - DNA, 25 bp, Homo sapien
ggctacccctaaagatgacccagat

SEQ ID NO: 3976950 - DNA, 25 bp, Homo sapien
tgacacgtgttagacagcaagggcc

SEQ ID NO: 3976951 - DNA, 25 bp, Homo sapien
cctttagatgctaacctggtccagg

SEQ ID NO: 3976952 - DNA, 25 bp, Homo sapien
tgatgtcccctgaagacagcggctt

SEQ ID NO: 3976953 - DNA, 25 bp, Homo sapien
cgggcttcatgtggtgctggcaatt

SEQ ID NO: 3976954 - DNA, 25 bp, Homo sapien
agggcgttgtggctatgactttcaa

SEQ ID NO: 3976955 - DNA, 25 bp, Homo sapien
gcaattttcgtcttcatagtgtgga

SEQ ID NO: 3976956 - DNA, 25 bp, Homo sapien
ccactctgatgaattccttacaaat

SEQ ID NO: 3976957 - DNA, 25 bp, Homo sapien
tggcaacctccgaaagctaggaaac

SEQ ID NO: 3976958 - DNA, 25 bp, Homo sapien
tctaagtctgatgaagacaggcagc

SEQ ID NO: 3976959 - DNA, 25 bp, Homo sapien
gataatgactcataccactctgatg

SEQ ID NO: 3976960 - DNA, 25 bp, Homo sapien
tgtcagttgagccagcgcattcagt

SEQ ID NO: 3976961 - DNA, 25 bp, Homo sapien
gaaaagtccttctgctggcgacgta

SEQ ID NO: 3976962 - DNA, 25 bp, Homo sapien
catgcttgaacttgagacagggctt

SEQ ID NO: 3976963 - DNA, 25 bp, Homo sapien
tggcgacgtacacatattgactggc

SEQ ID NO: 3976964 - DNA, 25 bp, Homo sapien
taagaacacccatattggctactgg

SEQ ID NO: 3976965 - DNA, 25 bp, Homo sapien
caaaatttagtctgggcctagtgca

SEQ ID NO: 3976966 - DNA, 25 bp, Homo sapien
taaacggagtcggaacctgagtaga

SEQ ID NO: 3976967 - DNA, 25 bp, Homo sapien
taattgtactgtctgaacccaggga

SEQ ID NO: 3976968 - DNA, 25 bp, Homo sapien
ttagagcaacaaacttgactgtccg

SEQ ID NO: 3976969 - DNA, 25 bp, Homo sapien
tccacacagatcacatgggatggtg

SEQ ID NO: 3976970 - DNA, 25 bp, Homo sapien
taacgctgtgccttacgttagagca

SEQ ID NO: 3976971 - DNA, 25 bp, Homo sapien
cagggttacacaggagtctactcag

SEQ ID NO: 3976972 - DNA, 25 bp, Homo sapien
tgaatcaatggcaagtacgcctccg

SEQ ID NO: 3976973 - DNA, 25 bp, Homo sapien
gtttctgtggccaaacatctgggaa

SEQ ID NO: 3976974 - DNA, 25 bp, Homo sapien
gaaaacctacctgcagttgtacgag

SEQ ID NO: 3976975 - DNA, 25 bp, Homo sapien
tcagctgaagctaaggaaatggtac

SEQ ID NO: 3976976 - DNA, 25 bp, Homo sapien
gtttgcccattactcttcataggta

SEQ ID NO: 3976977 - DNA, 25 bp, Homo sapien
catgaaatcagtaaggtaaaagtcc

SEQ ID NO: 3976978 - DNA, 25 bp, Homo sapien
ggtgttaccaggcttgatttcagga

SEQ ID NO: 3976979 - DNA, 25 bp, Homo sapien
cactggtttgtgatagaaattacct

SEQ ID NO: 3976980 - DNA, 25 bp, Homo sapien
gctgaagcctcgttcttcttaaaga

SEQ ID NO: 3976981 - DNA, 25 bp, Homo sapien
tcttgacagcgttgtctgaccagca

SEQ ID NO: 3976982 - DNA, 25 bp, Homo sapien
aagactctagctgctttgctctcag

SEQ ID NO: 3976983 - DNA, 25 bp, Homo sapien
tcagccatcgttctcttgacagcgt

SEQ ID NO: 3976984 - DNA, 25 bp, Homo sapien
taagtctagagctgggatagtaagt

SEQ ID NO: 3976985 - DNA, 25 bp, Homo sapien
caaatttaagtctagagctgggata

SEQ ID NO: 3976986 - DNA, 25 bp, Homo sapien
agaaacaaatttaagtctagagctg

SEQ ID NO: 3976987 - DNA, 25 bp, Homo sapien
tttaagtctagagctgggatagtaa

SEQ ID NO: 3976988 - DNA, 25 bp, Homo sapien
ctgagggtcgttcttccgcatttcc

SEQ ID NO: 3976989 - DNA, 25 bp, Homo sapien
cagctggtgaagatcatcagcagtg

SEQ ID NO: 3976990 - DNA, 25 bp, Homo sapien
agctggtgaagatcatcagcagtga

SEQ ID NO: 3976991 - DNA, 25 bp, Homo sapien
gatgctctgagggtcgttcttccgc

SEQ ID NO: 3976992 - DNA, 25 bp, Homo sapien
tttatcaaaagagtaaatgtaaatg

SEQ ID NO: 3976993 - DNA, 25 bp, Homo sapien
ttatcaaaagagtaaatgtaaatga

SEQ ID NO: 3976994 - DNA, 25 bp, Homo sapien
ctttatcaaaagagtaaatgtaaat

SEQ ID NO: 3976995 - DNA, 25 bp, Homo sapien
tatcaaaagagtaaatgtaaatgat

SEQ ID NO: 3976996 - DNA, 25 bp, Homo sapien
tacttgcagcaatccagagagcatt

SEQ ID NO: 3976997 - DNA, 25 bp, Homo sapien
ggtaagaatgttgagcctggcagca

SEQ ID NO: 3976998 - DNA, 25 bp, Homo sapien
gagaagggaccgcagaaaactgtct

SEQ ID NO: 3976999 - DNA, 25 bp, Homo sapien
gagagaacagggctagggctccttc

SEQ ID NO: 3977000 - DNA, 25 bp, Homo sapien
gactcagtgtgtacaaaggatcctt

SEQ ID NO: 3977001 - DNA, 25 bp, Homo sapien
tagttggcttctcagtagaaaccag

SEQ ID NO: 3977002 - DNA, 25 bp, Homo sapien
tatgaattattctgcacctccaaga

SEQ ID NO: 3977003 - DNA, 25 bp, Homo sapien
ggatccttatcagaaactagttggc

SEQ ID NO: 3977004 - DNA, 25 bp, Homo sapien
caaaagagttagataaatgcggaat

SEQ ID NO: 3977005 - DNA, 25 bp, Homo sapien
catgtactcctccatgtttggtgga

SEQ ID NO: 3977006 - DNA, 25 bp, Homo sapien
cggaatttgttcagcacggaaggca

SEQ ID NO: 3977007 - DNA, 25 bp, Homo sapien
gctgtaagtgaatctggcagtctgc

SEQ ID NO: 3977008 - DNA, 25 bp, Homo sapien
caaaggcggtttctcatcaatcgca

SEQ ID NO: 3977009 - DNA, 25 bp, Homo sapien
tacacaccatttgacaactgggagc

SEQ ID NO: 3977010 - DNA, 25 bp, Homo sapien
tcctcaatggtatcagtaagcacac

SEQ ID NO: 3977011 - DNA, 25 bp, Homo sapien
taataagcggtaccaagaaacagca

SEQ ID NO: 3977012 - DNA, 25 bp, Homo sapien
cttctgccacgttatgaggttgctc

SEQ ID NO: 3977013 - DNA, 25 bp, Homo sapien
gtgacctcccctccgaagtaatgaa

SEQ ID NO: 3977014 - DNA, 25 bp, Homo sapien
tggtagctgaagtcataatccacct

SEQ ID NO: 3977015 - DNA, 25 bp, Homo sapien
gggaattccatctgatggtagctga

SEQ ID NO: 3977016 - DNA, 25 bp, Homo sapien
cagttttgctgacaccgatgatgag

SEQ ID NO: 3977017 - DNA, 25 bp, Homo sapien
taggcttacaacagtcttggtcaag

SEQ ID NO: 3977018 - DNA, 25 bp, Homo sapien
ggcgctgtccagtttactaagctaa

SEQ ID NO: 3977019 - DNA, 25 bp, Homo sapien
taataaagggtatgaggcgctgtcc

SEQ ID NO: 3977020 - DNA, 25 bp, Homo sapien
gaatttgtccatagatactcttcta

SEQ ID NO: 3977021 - DNA, 25 bp, Homo sapien
tgtgaatttgtccatagatactctt

SEQ ID NO: 3977022 - DNA, 25 bp, Homo sapien
tctaaaagttattcctagatctggc

SEQ ID NO: 3977023 - DNA, 25 bp, Homo sapien
atctggctttagtgcgaaggaagtc

SEQ ID NO: 3977024 - DNA, 25 bp, Homo sapien
tcaaatggttcatgttctctatagt

SEQ ID NO: 3977025 - DNA, 25 bp, Homo sapien
gagagtctcatcgattacaagggaa

SEQ ID NO: 3977026 - DNA, 25 bp, Homo sapien
tacaagggaagtattgctgggcagc

SEQ ID NO: 3977027 - DNA, 25 bp, Homo sapien
aggagcccactgaccaagcgattgg

SEQ ID NO: 3977028 - DNA, 25 bp, Homo sapien
tcggttcaataaagatctagtgcac

SEQ ID NO: 3977029 - DNA, 25 bp, Homo sapien
tctgcaaaggctatcgaaaccatcc

SEQ ID NO: 3977030 - DNA, 25 bp, Homo sapien
gaccaccacccagttatctgcaaag

SEQ ID NO: 3977031 - DNA, 25 bp, Homo sapien
cctggacgagtgttagcactgagac

SEQ ID NO: 3977032 - DNA, 25 bp, Homo sapien
tgggcaaccactcaagttaactgta

SEQ ID NO: 3977033 - DNA, 25 bp, Homo sapien
taaattttcctagtggaaggacatc

SEQ ID NO: 3977034 - DNA, 25 bp, Homo sapien
gaataattcgatacaagtgttctgt

SEQ ID NO: 3977035 - DNA, 25 bp, Homo sapien
gaaggtactattccgtgggcaacca

SEQ ID NO: 3977036 - DNA, 25 bp, Homo sapien
aaatgacaccagcaatcttcccgct

SEQ ID NO: 3977037 - DNA, 25 bp, Homo sapien
ggtataacagttaacactggacaga

SEQ ID NO: 3977038 - DNA, 25 bp, Homo sapien
catgaaatgggtccttggtgcctaa

SEQ ID NO: 3977039 - DNA, 25 bp, Homo sapien
tgatgaagcccaataaggaaaacac

SEQ ID NO: 3977040 - DNA, 25 bp, Homo sapien
gctctgactggagacaattcggaca

SEQ ID NO: 3977041 - DNA, 25 bp, Homo sapien
aatataaggtattcagcagccaaac

SEQ ID NO: 3977042 - DNA, 25 bp, Homo sapien
cccagaagggcatgagtaaggaacc

SEQ ID NO: 3977043 - DNA, 25 bp, Homo sapien
taaggaacccaagaagttctgctct

SEQ ID NO: 3977044 - DNA, 25 bp, Homo sapien
taactacgtgagcaaagcacaattc

SEQ ID NO: 3977045 - DNA, 25 bp, Homo sapien
aaagcacaattcagtcgacagtagg

SEQ ID NO: 3977046 - DNA, 25 bp, Homo sapien
tcgacagtaggtaaagcttaacata

SEQ ID NO: 3977047 - DNA, 25 bp, Homo sapien
tccgtcagtaagtgatgctaatctt

SEQ ID NO: 3977048 - DNA, 25 bp, Homo sapien
gacacactgaggctaacagtcgata

SEQ ID NO: 3977049 - DNA, 25 bp, Homo sapien
tccactatgagcacgttacaggcag

SEQ ID NO: 3977050 - DNA, 25 bp, Homo sapien
tagttgactaggctgtaacacttac

SEQ ID NO: 3977051 - DNA, 25 bp, Homo sapien
tgtgaggaatgaagacctgactctc

SEQ ID NO: 3977052 - DNA, 25 bp, Homo sapien
ggctaagatcacatgaattctcggc

SEQ ID NO: 3977053 - DNA, 25 bp, Homo sapien
tgtgcactccatcggatccagcagt

SEQ ID NO: 3977054 - DNA, 25 bp, Homo sapien
caggaggactgtgtactctctgctc

SEQ ID NO: 3977055 - DNA, 25 bp, Homo sapien
tcggcactaatgaagcaggaggact

SEQ ID NO: 3977056 - DNA, 25 bp, Homo sapien
ttacaactggtacatctgggagaaa

SEQ ID NO: 3977057 - DNA, 25 bp, Homo sapien
gcagaacgacacctgtggtgctgaa

SEQ ID NO: 3977058 - DNA, 25 bp, Homo sapien
tagagaatgagcgagcttctgaacc

SEQ ID NO: 3977059 - DNA, 25 bp, Homo sapien
gaaagtcagtactcttaggaaatgt

SEQ ID NO: 3977060 - DNA, 25 bp, Homo sapien
ttcatcattattcagtatactcagc

SEQ ID NO: 3977061 - DNA, 25 bp, Homo sapien
atgccatatagctcaagaatgtcat

SEQ ID NO: 3977062 - DNA, 25 bp, Homo sapien
tcagtatactcagcacaggatccac

SEQ ID NO: 3977063 - DNA, 25 bp, Homo sapien
caggatccacagacagtatgccata

SEQ ID NO: 3977064 - DNA, 25 bp, Homo sapien
ctaacaagagaccacatgaaatcac

SEQ ID NO: 3977065 - DNA, 25 bp, Homo sapien
taagatattagtcttgaagtaccaa

SEQ ID NO: 3977066 - DNA, 25 bp, Homo sapien
cacaaagcttaagatattagtcttg

SEQ ID NO: 3977067 - DNA, 25 bp, Homo sapien
caagagaccacatgaaatcacactg

SEQ ID NO: 3977068 - DNA, 25 bp, Homo sapien
cttcacaaggcatgcagggcccttc

SEQ ID NO: 3977069 - DNA, 25 bp, Homo sapien
tctaaacgttttggctctccacacc

SEQ ID NO: 3977070 - DNA, 25 bp, Homo sapien
tctccacaccattgaagaccaccaa

SEQ ID NO: 3977071 - DNA, 25 bp, Homo sapien
aaaaggagaagacaagttcagagag

SEQ ID NO: 3977072 - DNA, 25 bp, Homo sapien
tctggcacctgcatgttggtctttc

SEQ ID NO: 3977073 - DNA, 25 bp, Homo sapien
gcacctgcatgttggtctttctgct

SEQ ID NO: 3977074 - DNA, 25 bp, Homo sapien
tttctgcttattgggctgtaggtcc

SEQ ID NO: 3977075 - DNA, 25 bp, Homo sapien
tgtaggtccatatcgtcatcatctt

SEQ ID NO: 3977076 - DNA, 25 bp, Homo sapien
tgtaggatgttgagggactgactcg

SEQ ID NO: 3977077 - DNA, 25 bp, Homo sapien
gtaggatgttgagggactgactcga

SEQ ID NO: 3977078 - DNA, 25 bp, Homo sapien
agtgtaggatgttgagggactgact

SEQ ID NO: 3977079 - DNA, 25 bp, Homo sapien
taggatgttgagggactgactcgag

SEQ ID NO: 3977080 - DNA, 25 bp, Homo sapien
ccccaggcaccggaacacaatagaa

SEQ ID NO: 3977081 - DNA, 25 bp, Homo sapien
tgtctttccaaagtggtatttcgtg

SEQ ID NO: 3977082 - DNA, 25 bp, Homo sapien
caggcaccggaacacaatagaaagt

SEQ ID NO: 3977083 - DNA, 25 bp, Homo sapien
tatttcgtggagagtttaaatcaag

SEQ ID NO: 3977084 - DNA, 25 bp, Homo sapien
tctggagtgacttataatctgggtc

SEQ ID NO: 3977085 - DNA, 25 bp, Homo sapien
tgtgccaagcctaatggatcaactg

SEQ ID NO: 3977086 - DNA, 25 bp, Homo sapien
tttatcaaaccccaatatcagtccg

SEQ ID NO: 3977087 - DNA, 25 bp, Homo sapien
tcagtccgttaattcacaacagaag

SEQ ID NO: 3977088 - DNA, 25 bp, Homo sapien
actctgctacatctctatattttcc

SEQ ID NO: 3977089 - DNA, 25 bp, Homo sapien
cacactctgctacatctctatattt

SEQ ID NO: 3977090 - DNA, 25 bp, Homo sapien
cactctgctacatctctatattttc

SEQ ID NO: 3977091 - DNA, 25 bp, Homo sapien
cccacactctgctacatctctatat

SEQ ID NO: 3977092 - DNA, 25 bp, Homo sapien
taaccgtttcataaactcccatgta

SEQ ID NO: 3977093 - DNA, 25 bp, Homo sapien
ggggaacttcgttcagtgatggtac

SEQ ID NO: 3977094 - DNA, 25 bp, Homo sapien
aactcagggtcaaacatatcctgaa

SEQ ID NO: 3977095 - DNA, 25 bp, Homo sapien
tcatgcaacgaaatttcacaaaact

SEQ ID NO: 3977096 - DNA, 25 bp, Homo sapien
cacttaggagcattattttccttca

SEQ ID NO: 3977097 - DNA, 25 bp, Homo sapien
cagtcaggattaactccattttggg

SEQ ID NO: 3977098 - DNA, 25 bp, Homo sapien
tcaattactttcttctcccagtcag

SEQ ID NO: 3977099 - DNA, 25 bp, Homo sapien
cttctcccagtcaggattaactcca

SEQ ID NO: 3977100 - DNA, 25 bp, Homo sapien
tacaaggccacctagattcagcagc

SEQ ID NO: 3977101 - DNA, 25 bp, Homo sapien
aggctctctagcacccacagtgtag

SEQ ID NO: 3977102 - DNA, 25 bp, Homo sapien
gaagcactgcttgtaaagcattctg

SEQ ID NO: 3977103 - DNA, 25 bp, Homo sapien
acacctacagaatgtgctacaaggc

SEQ ID NO: 3977104 - DNA, 25 bp, Homo sapien
taagttaactccagacaagtcaggt

SEQ ID NO: 3977105 - DNA, 25 bp, Homo sapien
ccattagttacagcctgggaagcca

SEQ ID NO: 3977106 - DNA, 25 bp, Homo sapien
gaatggaacggttgtcaaaatgccc

SEQ ID NO: 3977107 - DNA, 25 bp, Homo sapien
cactggctaagttcggacgtctatc

SEQ ID NO: 3977108 - DNA, 25 bp, Homo sapien
gaaccaacttctgtgcaagcgagca

SEQ ID NO: 3977109 - DNA, 25 bp, Homo sapien
ccttcgcagtaaagtagcaacagca

SEQ ID NO: 3977110 - DNA, 25 bp, Homo sapien
tcgaggacctccgagtttgctgcgc

SEQ ID NO: 3977111 - DNA, 25 bp, Homo sapien
aaaatttactaagctcgcctgcagg

SEQ ID NO: 3977112 - DNA, 25 bp, Homo sapien
tgcacgattcccagcgggtggctga

SEQ ID NO: 3977113 - DNA, 25 bp, Homo sapien
ccagcgggtggctgagccaatcctc

SEQ ID NO: 3977114 - DNA, 25 bp, Homo sapien
ccctgcacgattcccagcgggtggc

SEQ ID NO: 3977115 - DNA, 25 bp, Homo sapien
gattcccagcgggtggctgagccaa

SEQ ID NO: 3977116 - DNA, 25 bp, Homo sapien
tcctcgcccgcgttcgctcgcgccc

SEQ ID NO: 3977117 - DNA, 25 bp, Homo sapien
ctcctcgcccgcgttcgctcgcgcc

SEQ ID NO: 3977118 - DNA, 25 bp, Homo sapien
gctcctcgcccgcgttcgctcgcgc

SEQ ID NO: 3977119 - DNA, 25 bp, Homo sapien
cgctcctcgcccgcgttcgctcgcg

SEQ ID NO: 3977120 - DNA, 25 bp, Homo sapien
aatggcgggaaatagccgccgccga

SEQ ID NO: 3977121 - DNA, 25 bp, Homo sapien
tgcgacctgggtggagctcgcgtgg

SEQ ID NO: 3977122 - DNA, 25 bp, Homo sapien
ctggcgacagtcaggcgggcgcgta

SEQ ID NO: 3977123 - DNA, 25 bp, Homo sapien
tagccttcacttcgcacaatggcgg

SEQ ID NO: 3977124 - DNA, 25 bp, Homo sapien
gcgaacaccgggtcggcgtctgtct

SEQ ID NO: 3977125 - DNA, 25 bp, Homo sapien
cggcctgcgccctggttgcgaacac

SEQ ID NO: 3977126 - DNA, 25 bp, Homo sapien
cgccctggttgcgaacaccgggtcg

SEQ ID NO: 3977127 - DNA, 25 bp, Homo sapien
tcggcgtctgtctggaagctggcag

SEQ ID NO: 3977128 - DNA, 25 bp, Homo sapien
gaccgactacagcagccttttgctg

SEQ ID NO: 3977129 - DNA, 25 bp, Homo sapien
gaaggaagctacgaagaccgactac

SEQ ID NO: 3977130 - DNA, 25 bp, Homo sapien
ctggagaaggaagctacgaagaccg

SEQ ID NO: 3977131 - DNA, 25 bp, Homo sapien
tacgaagaccgactacagcagcctt

SEQ ID NO: 3977132 - DNA, 25 bp, Homo sapien
gcatcaaaaggggaaatcccatatt

SEQ ID NO: 3977133 - DNA, 25 bp, Homo sapien
tggcatcaaaaggggaaatcccata

SEQ ID NO: 3977134 - DNA, 25 bp, Homo sapien
ctggcatcaaaaggggaaatcccat

SEQ ID NO: 3977135 - DNA, 25 bp, Homo sapien
cctggcatcaaaaggggaaatccca

SEQ ID NO: 3977136 - DNA, 25 bp, Homo sapien
ccagaaagacaagtgggttttggag

SEQ ID NO: 3977137 - DNA, 25 bp, Homo sapien
agagggtgtttggttccgcctagca

SEQ ID NO: 3977138 - DNA, 25 bp, Homo sapien
tagcatgcgaattcccattcccgca

SEQ ID NO: 3977139 - DNA, 25 bp, Homo sapien
cacaatgttcggttccatccagaaa

SEQ ID NO: 3977140 - DNA, 25 bp, Homo sapien
gcaggattccgctgttcctccaaaa

SEQ ID NO: 3977141 - DNA, 25 bp, Homo sapien
agcaggattccgctgttcctccaaa

SEQ ID NO: 3977142 - DNA, 25 bp, Homo sapien
ccttcctccttccggtagcgtccag

SEQ ID NO: 3977143 - DNA, 25 bp, Homo sapien
ctccttccggtagcgtccagcagga

SEQ ID NO: 3977144 - DNA, 25 bp, Homo sapien
ctttgtcaggagagccatcctgacg

SEQ ID NO: 3977145 - DNA, 25 bp, Homo sapien
tttgtcaggagagccatcctgacgg

SEQ ID NO: 3977146 - DNA, 25 bp, Homo sapien
tgtcaggagagccatcctgacggta

SEQ ID NO: 3977147 - DNA, 25 bp, Homo sapien
gtcaggagagccatcctgacggtac

SEQ ID NO: 3977148 - DNA, 25 bp, Homo sapien
gactttcagggtcaattgcgtctca

SEQ ID NO: 3977149 - DNA, 25 bp, Homo sapien
tcagggtcaattgcgtctcaattcg

SEQ ID NO: 3977150 - DNA, 25 bp, Homo sapien
ctttcagggtcaattgcgtctcaat

SEQ ID NO: 3977151 - DNA, 25 bp, Homo sapien
gggtcaattgcgtctcaattcgcac

SEQ ID NO: 3977152 - DNA, 25 bp, Homo sapien
catgttgatatctggcgtcgccgtg

SEQ ID NO: 3977153 - DNA, 25 bp, Homo sapien
caggagcgtgatcggtttccggtca

SEQ ID NO: 3977154 - DNA, 25 bp, Homo sapien
tccgagggtgtcacgtgctagacgc

SEQ ID NO: 3977155 - DNA, 25 bp, Homo sapien
taatttcggctcctgtgcgcaagtg

SEQ ID NO: 3977156 - DNA, 25 bp, Homo sapien
tggatagcttgccaggatcattact

SEQ ID NO: 3977157 - DNA, 25 bp, Homo sapien
cctgttccgagttgtccagagtgct

SEQ ID NO: 3977158 - DNA, 25 bp, Homo sapien
taccctggcattccgcaaatctttg

SEQ ID NO: 3977159 - DNA, 25 bp, Homo sapien
tgaatacccgttgttggtacgccag

SEQ ID NO: 3977160 - DNA, 25 bp, Homo sapien
gctgtctttggtgaagaaccagcat

SEQ ID NO: 3977161 - DNA, 25 bp, Homo sapien
aaggttaggtgttgctgtctttggt

SEQ ID NO: 3977162 - DNA, 25 bp, Homo sapien
ctgtggttgaaaggttaggtgttgc

SEQ ID NO: 3977163 - DNA, 25 bp, Homo sapien
tgctgtctttggtgaagaaccagca

SEQ ID NO: 3977164 - DNA, 25 bp, Homo sapien
tcagagcactaagacaaaacaacgg

SEQ ID NO: 3977165 - DNA, 25 bp, Homo sapien
ggttggagacagagaacacctttaa

SEQ ID NO: 3977166 - DNA, 25 bp, Homo sapien
aaatgatacgtattgctcagcatcc

SEQ ID NO: 3977167 - DNA, 25 bp, Homo sapien
tacgtggaaaatcaggagaacctct

SEQ ID NO: 3977168 - DNA, 25 bp, Homo sapien
tccacagatcagtttagttgtatag

SEQ ID NO: 3977169 - DNA, 25 bp, Homo sapien
cacaattctcggatatagggattca

SEQ ID NO: 3977170 - DNA, 25 bp, Homo sapien
gaaagtcccagtacaacttccattg

SEQ ID NO: 3977171 - DNA, 25 bp, Homo sapien
gattcattaacaattgctcagccac

SEQ ID NO: 3977172 - DNA, 25 bp, Homo sapien
ttgattccctttcagccttcatttc

SEQ ID NO: 3977173 - DNA, 25 bp, Homo sapien
gaaaaatgagggttatttatataca

SEQ ID NO: 3977174 - DNA, 25 bp, Homo sapien
tctctctcaggactactacttttta

SEQ ID NO: 3977175 - DNA, 25 bp, Homo sapien
cacttaatttcccaatactgatgaa

SEQ ID NO: 3977176 - DNA, 25 bp, Homo sapien
ttcctctatgagctggggtgctgac

SEQ ID NO: 3977177 - DNA, 25 bp, Homo sapien
cagaggagagtggatagaattcagt

SEQ ID NO: 3977178 - DNA, 25 bp, Homo sapien
cagttcctctatgagctggggtgct

SEQ ID NO: 3977179 - DNA, 25 bp, Homo sapien
ttcagttcctctatgagctggggtg

SEQ ID NO: 3977180 - DNA, 25 bp, Homo sapien
ggacacatcagtgcaaatctgttta

SEQ ID NO: 3977181 - DNA, 25 bp, Homo sapien
caataaaatcccgtggacacatcag

SEQ ID NO: 3977182 - DNA, 25 bp, Homo sapien
caactcaaatgaacgctgttattgg

SEQ ID NO: 3977183 - DNA, 25 bp, Homo sapien
aacgctgttattggcagctttgcag

SEQ ID NO: 3977184 - DNA, 25 bp, Homo sapien
agaccagtggatgcgcagacgtgta

SEQ ID NO: 3977185 - DNA, 25 bp, Homo sapien
tgtccacctcgagtccaaaactgat

SEQ ID NO: 3977186 - DNA, 25 bp, Homo sapien
cgtgtatagtttgaaccgtggctgg

SEQ ID NO: 3977187 - DNA, 25 bp, Homo sapien
gccagaactagggtctcagtctcct

SEQ ID NO: 3977188 - DNA, 25 bp, Homo sapien
ccttcacataatgggcagacaccat

SEQ ID NO: 3977189 - DNA, 25 bp, Homo sapien
gtcttgtactgaacaggccttcaca

SEQ ID NO: 3977190 - DNA, 25 bp, Homo sapien
caaagatgtcttgtactgaacaggc

SEQ ID NO: 3977191 - DNA, 25 bp, Homo sapien
gaacaggccttcacataatgggcag

SEQ ID NO: 3977192 - DNA, 25 bp, Homo sapien
agaacgtggaggcctgaagtgctgc

SEQ ID NO: 3977193 - DNA, 25 bp, Homo sapien
gaacgtggaggcctgaagtgctgcc

SEQ ID NO: 3977194 - DNA, 25 bp, Homo sapien
caagaacgtggaggcctgaagtgct

SEQ ID NO: 3977195 - DNA, 25 bp, Homo sapien
aggggacgcagaagtcacgagcagg

SEQ ID NO: 3977196 - DNA, 25 bp, Homo sapien
cacacggttaccctggctcgaaaag

SEQ ID NO: 3977197 - DNA, 25 bp, Homo sapien
tctatagcgattctgttcacacgag

SEQ ID NO: 3977198 - DNA, 25 bp, Homo sapien
taaatcagggagtcgtctatagcga

SEQ ID NO: 3977199 - DNA, 25 bp, Homo sapien
tgttcacacgagactgaacgctgca

SEQ ID NO: 3977200 - DNA, 25 bp, Homo sapien
cgtcagtacccgagggataggtaat

SEQ ID NO: 3977201 - DNA, 25 bp, Homo sapien
ttcctctctaccaaggagccgtcag

SEQ ID NO: 3977202 - DNA, 25 bp, Homo sapien
taaacactaggctctttcctctcta

SEQ ID NO: 3977203 - DNA, 25 bp, Homo sapien
taccaaggagccgtcagtacccgag

SEQ ID NO: 3977204 - DNA, 25 bp, Homo sapien
ttccaaatcacagccaggctgtgtt

SEQ ID NO: 3977205 - DNA, 25 bp, Homo sapien
cttgtcacgttccaaatcacagcca

SEQ ID NO: 3977206 - DNA, 25 bp, Homo sapien
aaatcacagccaggctgtgttctgc

SEQ ID NO: 3977207 - DNA, 25 bp, Homo sapien
ccaaatcacagccaggctgtgttct

SEQ ID NO: 3977208 - DNA, 25 bp, Homo sapien
tcctttcgggattactcttgagcat

SEQ ID NO: 3977209 - DNA, 25 bp, Homo sapien
ataaacgtgacatttgggaaccagc

SEQ ID NO: 3977210 - DNA, 25 bp, Homo sapien
ttctgaacattgtgggtgtgggcaa

SEQ ID NO: 3977211 - DNA, 25 bp, Homo sapien
gggcacaaagggagcttgataaacg

SEQ ID NO: 3977212 - DNA, 25 bp, Homo sapien
gctcttgtctgaaggtttgtggtcc

SEQ ID NO: 3977213 - DNA, 25 bp, Homo sapien
ttgtctgaaggtttgtggtcccagc

SEQ ID NO: 3977214 - DNA, 25 bp, Homo sapien
tcttgtctgaaggtttgtggtccca

SEQ ID NO: 3977215 - DNA, 25 bp, Homo sapien
tctgaaggtttgtggtcccagcaag

SEQ ID NO: 3977216 - DNA, 25 bp, Homo sapien
catgcccttaacttccacacctgtt

SEQ ID NO: 3977217 - DNA, 25 bp, Homo sapien
cttgtgacatgaccagttccatgcc

SEQ ID NO: 3977218 - DNA, 25 bp, Homo sapien
tgtgacatgaccagttccatgccct

SEQ ID NO: 3977219 - DNA, 25 bp, Homo sapien
catgaccagttccatgcccttaact

SEQ ID NO: 3977220 - DNA, 25 bp, Homo sapien
ttcactctcctcttgtacagttggg

SEQ ID NO: 3977221 - DNA, 25 bp, Homo sapien
tcctcttcactctcctcttgtacag

SEQ ID NO: 3977222 - DNA, 25 bp, Homo sapien
ctcttcactctcctcttgtacagtt

SEQ ID NO: 3977223 - DNA, 25 bp, Homo sapien
cttcactctcctcttgtacagttgg

SEQ ID NO: 3977224 - DNA, 25 bp, Homo sapien
cccaaaactatgtaggtatccaaag

SEQ ID NO: 3977225 - DNA, 25 bp, Homo sapien
tctagtaacccctgtaacctgttga

SEQ ID NO: 3977226 - DNA, 25 bp, Homo sapien
tgtaggtatccaaagcagggcgctt

SEQ ID NO: 3977227 - DNA, 25 bp, Homo sapien
agggcgcttgtagacatctgctttt

SEQ ID NO: 3977228 - DNA, 25 bp, Homo sapien
gctttgctgactggttctttattaa

SEQ ID NO: 3977229 - DNA, 25 bp, Homo sapien
ctttgctgactggttctttattaat

SEQ ID NO: 3977230 - DNA, 25 bp, Homo sapien
ttgctttgctgactggttctttatt

SEQ ID NO: 3977231 - DNA, 25 bp, Homo sapien
tgctttgctgactggttctttatta

SEQ ID NO: 3977232 - DNA, 25 bp, Homo sapien
gatggtttctgtggctttgctggac

SEQ ID NO: 3977233 - DNA, 25 bp, Homo sapien
tccacagcagggatggtttctgtgg

SEQ ID NO: 3977234 - DNA, 25 bp, Homo sapien
ctgttccacagcagggatggtttct

SEQ ID NO: 3977235 - DNA, 25 bp, Homo sapien
atggtttctgtggctttgctggaca

SEQ ID NO: 3977236 - DNA, 25 bp, Homo sapien
tctgtgtcaccctaactcaggggta

SEQ ID NO: 3977237 - DNA, 25 bp, Homo sapien
tctattttgggattaagcctacaat

SEQ ID NO: 3977238 - DNA, 25 bp, Homo sapien
gggtacctctgtatttagggataca

SEQ ID NO: 3977239 - DNA, 25 bp, Homo sapien
agtttctctataaggttgcttctag

SEQ ID NO: 3977240 - DNA, 25 bp, Homo sapien
tctgatcttgtagataggaaaaggc

SEQ ID NO: 3977241 - DNA, 25 bp, Homo sapien
cttgtagataggaaaaggcagaaag

SEQ ID NO: 3977242 - DNA, 25 bp, Homo sapien
gatcttgtagataggaaaaggcaga

SEQ ID NO: 3977243 - DNA, 25 bp, Homo sapien
tcttgtagataggaaaaggcagaaa

SEQ ID NO: 3977244 - DNA, 25 bp, Homo sapien
tggagaagattcctggctgctcaag

SEQ ID NO: 3977245 - DNA, 25 bp, Homo sapien
tttgctgtccacgtgcaaggcgtgc

SEQ ID NO: 3977246 - DNA, 25 bp, Homo sapien
cacgtgcaaggcgtgcatactgaaa

SEQ ID NO: 3977247 - DNA, 25 bp, Homo sapien
caaggcgtgcatactgaaagtgaat

SEQ ID NO: 3977248 - DNA, 25 bp, Homo sapien
gtggttcattagaattctaactgca

SEQ ID NO: 3977249 - DNA, 25 bp, Homo sapien
tcattagaattctaactgcagtggg

SEQ ID NO: 3977250 - DNA, 25 bp, Homo sapien
ggttcattagaattctaactgcagt

SEQ ID NO: 3977251 - DNA, 25 bp, Homo sapien
ttcattagaattctaactgcagtgg

SEQ ID NO: 3977252 - DNA, 25 bp, Homo sapien
cttttctggggtacagctcgttctt

SEQ ID NO: 3977253 - DNA, 25 bp, Homo sapien
ttttctggggtacagctcgttcttc

SEQ ID NO: 3977254 - DNA, 25 bp, Homo sapien
tcctcttcctctaccgctgccttgg

SEQ ID NO: 3977255 - DNA, 25 bp, Homo sapien
tcttcctctaccgctgccttggttt

SEQ ID NO: 3977256 - DNA, 25 bp, Homo sapien
tcctctaccgctgccttggtttctt

SEQ ID NO: 3977257 - DNA, 25 bp, Homo sapien
ttcctctaccgctgccttggtttct

SEQ ID NO: 3977258 - DNA, 25 bp, Homo sapien
agagttgttagaagaaaccggatag

SEQ ID NO: 3977259 - DNA, 25 bp, Homo sapien
gaaaccggataggatagaaatagca

SEQ ID NO: 3977260 - DNA, 25 bp, Homo sapien
tagctgtgtgcttttgtgtagtgaa

SEQ ID NO: 3977261 - DNA, 25 bp, Homo sapien
tgcagtgaggtcttgtgattccagg

SEQ ID NO: 3977262 - DNA, 25 bp, Homo sapien
tagaggacactgacgctgaacactg

SEQ ID NO: 3977263 - DNA, 25 bp, Homo sapien
gaattcggaaggtgcagtgtgaccc

SEQ ID NO: 3977264 - DNA, 25 bp, Homo sapien
gaagctgtactgctaagatgcgtgc

SEQ ID NO: 3977265 - DNA, 25 bp, Homo sapien
tggcacaggagggacaaggatcccc

SEQ ID NO: 3977266 - DNA, 25 bp, Homo sapien
tctgctttctgagtttgtgtggatg

SEQ ID NO: 3977267 - DNA, 25 bp, Homo sapien
cccatgtggatctgacatctgcttt

SEQ ID NO: 3977268 - DNA, 25 bp, Homo sapien
ctgagtttgtgtggatgagacacac

SEQ ID NO: 3977269 - DNA, 25 bp, Homo sapien
tttttaaacgaagtgcccatgtgga

SEQ ID NO: 3977270 - DNA, 25 bp, Homo sapien
cacaagtgtagctttcagacttgca

SEQ ID NO: 3977271 - DNA, 25 bp, Homo sapien
agtatcgaggaatttctgggtgaag

SEQ ID NO: 3977272 - DNA, 25 bp, Homo sapien
agacagctgtcaatccagttttcct

SEQ ID NO: 3977273 - DNA, 25 bp, Homo sapien
acagctgtcaatccagttttccttt

SEQ ID NO: 3977274 - DNA, 25 bp, Homo sapien
gacagctgtcaatccagttttcctt

SEQ ID NO: 3977275 - DNA, 25 bp, Homo sapien
aagacagctgtcaatccagttttcc

SEQ ID NO: 3977276 - DNA, 25 bp, Homo sapien
gtgggagttgagggttgtgctgtgt

SEQ ID NO: 3977277 - DNA, 25 bp, Homo sapien
gtgtgaatgtggtcattcccactgt

SEQ ID NO: 3977278 - DNA, 25 bp, Homo sapien
tgtgaatgtggtcattcccactgta

SEQ ID NO: 3977279 - DNA, 25 bp, Homo sapien
tgaatgtggtcattcccactgtaag

SEQ ID NO: 3977280 - DNA, 25 bp, Homo sapien
aagagcctggattgaggaggacaac

SEQ ID NO: 3977281 - DNA, 25 bp, Homo sapien
gacaacagggctcatgccttgcacg

SEQ ID NO: 3977282 - DNA, 25 bp, Homo sapien
caagaacttgatctgagtcctagag

SEQ ID NO: 3977283 - DNA, 25 bp, Homo sapien
gcattggtgctgacgaaaagagcct

SEQ ID NO: 3977284 - DNA, 25 bp, Homo sapien
cagtgcgtgagtccttgctgactgt

SEQ ID NO: 3977285 - DNA, 25 bp, Homo sapien
cttctagggctgttaaagtggtggt

SEQ ID NO: 3977286 - DNA, 25 bp, Homo sapien
tggcagcgggttgaacgtggagtga

SEQ ID NO: 3977287 - DNA, 25 bp, Homo sapien
tggtatgagctggaacttcagtgcg

SEQ ID NO: 3977288 - DNA, 25 bp, Homo sapien
aacacactctttgatggtaagggct

SEQ ID NO: 3977289 - DNA, 25 bp, Homo sapien
agctcctgtgatatctatggtgatt

SEQ ID NO: 3977290 - DNA, 25 bp, Homo sapien
actctttgatggtaagggcttgtcc

SEQ ID NO: 3977291 - DNA, 25 bp, Homo sapien
ggagacagcctgctgttaaatggtt

SEQ ID NO: 3977292 - DNA, 25 bp, Homo sapien
tctctgatggtggaaaccctaattc

SEQ ID NO: 3977293 - DNA, 25 bp, Homo sapien
gggcaagggccttgacagaaagcat

SEQ ID NO: 3977294 - DNA, 25 bp, Homo sapien
aacagacttagttggccctctctca

SEQ ID NO: 3977295 - DNA, 25 bp, Homo sapien
aattccttatcgctaagttccctga

SEQ ID NO: 3977296 - DNA, 25 bp, Homo sapien
gatgttgccgtgagctcctgctgtg

SEQ ID NO: 3977297 - DNA, 25 bp, Homo sapien
ccggcatcggggcaggggtgatgtt

SEQ ID NO: 3977298 - DNA, 25 bp, Homo sapien
tggtctggagctcccccttgcccat

SEQ ID NO: 3977299 - DNA, 25 bp, Homo sapien
ggtgatgttgccgtgagctcctgct

SEQ ID NO: 3977300 - DNA, 25 bp, Homo sapien
taaacccaagagtggtcttagtgac

SEQ ID NO: 3977301 - DNA, 25 bp, Homo sapien
aaatcctcagataccaagactcagc

SEQ ID NO: 3977302 - DNA, 25 bp, Homo sapien
tagccaaccatgttcgcgactgagc

SEQ ID NO: 3977303 - DNA, 25 bp, Homo sapien
gactgagccgcggtaaaatcctcag

SEQ ID NO: 3977304 - DNA, 25 bp, Homo sapien
cctgtgtagtttagctcttcacatc

SEQ ID NO: 3977305 - DNA, 25 bp, Homo sapien
caaaagtcccctgtgtagtttagct

SEQ ID NO: 3977306 - DNA, 25 bp, Homo sapien
aagtcccctgtgtagtttagctctt

SEQ ID NO: 3977307 - DNA, 25 bp, Homo sapien
gtagtttagctcttcacatcctctc

SEQ ID NO: 3977308 - DNA, 25 bp, Homo sapien
tcctttctgggggcctggtccagct

SEQ ID NO: 3977309 - DNA, 25 bp, Homo sapien
gcctggtccagctgtcttcagctgc

SEQ ID NO: 3977310 - DNA, 25 bp, Homo sapien
ttcctttctgggggcctggtccagc

SEQ ID NO: 3977311 - DNA, 25 bp, Homo sapien
tgggggcctggtccagctgtcttca

SEQ ID NO: 3977312 - DNA, 25 bp, Homo sapien
gcagaaagtctgacaggtccttccc

SEQ ID NO: 3977313 - DNA, 25 bp, Homo sapien
gaaaagccattgaggaccatggagt

SEQ ID NO: 3977314 - DNA, 25 bp, Homo sapien
cccttgcctggctgaaggttgtctg

SEQ ID NO: 3977315 - DNA, 25 bp, Homo sapien
ccacaggtacattgggtgtaactcg

SEQ ID NO: 3977316 - DNA, 25 bp, Homo sapien
cacagtagcgtgtggcagcagcttc

SEQ ID NO: 3977317 - DNA, 25 bp, Homo sapien
cacacagtagcgtgtggcagcagct

SEQ ID NO: 3977318 - DNA, 25 bp, Homo sapien
acacagtagcgtgtggcagcagctt

SEQ ID NO: 3977319 - DNA, 25 bp, Homo sapien
tcccaggatgcctgccgctacactt

SEQ ID NO: 3977320 - DNA, 25 bp, Homo sapien
cggggccccctgtctgggagtggag

SEQ ID NO: 3977321 - DNA, 25 bp, Homo sapien
ccctgtctgggagtggagaacttcc

SEQ ID NO: 3977322 - DNA, 25 bp, Homo sapien
gccccctgtctgggagtggagaact

SEQ ID NO: 3977323 - DNA, 25 bp, Homo sapien
gggccccctgtctgggagtggagaa

SEQ ID NO: 3977324 - DNA, 25 bp, Homo sapien
gtgactgttaagtgcattgtcatct

SEQ ID NO: 3977325 - DNA, 25 bp, Homo sapien
ttagtgactgttaagtgcattgtca

SEQ ID NO: 3977326 - DNA, 25 bp, Homo sapien
tagtgactgttaagtgcattgtcat

SEQ ID NO: 3977327 - DNA, 25 bp, Homo sapien
agtgactgttaagtgcattgtcatc

SEQ ID NO: 3977328 - DNA, 25 bp, Homo sapien
tgctgctgccagattgttgttacaa

SEQ ID NO: 3977329 - DNA, 25 bp, Homo sapien
tactgtaggaataagctctgcctgc

SEQ ID NO: 3977330 - DNA, 25 bp, Homo sapien
attgttgttacaataacatgcacct

SEQ ID NO: 3977331 - DNA, 25 bp, Homo sapien
tgcacctttgacaatttgtggcggc

SEQ ID NO: 3977332 - DNA, 25 bp, Homo sapien
gtgtggaaatcgctgactttgtact

SEQ ID NO: 3977333 - DNA, 25 bp, Homo sapien
catatggtgtggaaatcgctgactt

SEQ ID NO: 3977334 - DNA, 25 bp, Homo sapien
acagcatatggtgtggaaatcgctg

SEQ ID NO: 3977335 - DNA, 25 bp, Homo sapien
ggaaatcgctgactttgtactgaat

SEQ ID NO: 3977336 - DNA, 25 bp, Homo sapien
catgtaaaagcaagcgcggctcttt

SEQ ID NO: 3977337 - DNA, 25 bp, Homo sapien
gctctttgggacctacaggactcac

SEQ ID NO: 3977338 - DNA, 25 bp, Homo sapien
cggctctttgggacctacaggactc

SEQ ID NO: 3977339 - DNA, 25 bp, Homo sapien
tctgcagagagacctgtggacatgt

SEQ ID NO: 3977340 - DNA, 25 bp, Homo sapien
gaagcagagcagaaccagcagccat

SEQ ID NO: 3977341 - DNA, 25 bp, Homo sapien
gcctccttcctcagggtcagaagca

SEQ ID NO: 3977342 - DNA, 25 bp, Homo sapien
tccagggctggccatccagttgcca

SEQ ID NO: 3977343 - DNA, 25 bp, Homo sapien
ccagttgccacttgtggggagagcc

SEQ ID NO: 3977344 - DNA, 25 bp, Homo sapien
gagcagagaccaagcccggctggag

SEQ ID NO: 3977345 - DNA, 25 bp, Homo sapien
agcagagaccaagcccggctggagg

SEQ ID NO: 3977346 - DNA, 25 bp, Homo sapien
ggagcagagaccaagcccggctgga

SEQ ID NO: 3977347 - DNA, 25 bp, Homo sapien
gcttcaagacaacagcagcataaat

SEQ ID NO: 3977348 - DNA, 25 bp, Homo sapien
gaatgctgagaaacgctcctaggac

SEQ ID NO: 3977349 - DNA, 25 bp, Homo sapien
taatgttcaaatggtgaggacactg

SEQ ID NO: 3977350 - DNA, 25 bp, Homo sapien
ggacttgcatcctaggttgcttcaa

SEQ ID NO: 3977351 - DNA, 25 bp, Homo sapien
cttctccaggtaggcaaaccataag

SEQ ID NO: 3977352 - DNA, 25 bp, Homo sapien
gttcgtgcccattgggttaatgaag

SEQ ID NO: 3977353 - DNA, 25 bp, Homo sapien
ccaggtaggcaaaccataaggcctt

SEQ ID NO: 3977354 - DNA, 25 bp, Homo sapien
cccattgggttaatgaagctgatta

SEQ ID NO: 3977355 - DNA, 25 bp, Homo sapien
gacttttcagcgtttgtctaatctg

SEQ ID NO: 3977356 - DNA, 25 bp, Homo sapien
gagctgacttttcagcgtttgtcta

SEQ ID NO: 3977357 - DNA, 25 bp, Homo sapien
cttttcagcgtttgtctaatctggg

SEQ ID NO: 3977358 - DNA, 25 bp, Homo sapien
cgtttgtctaatctggggagtcact

SEQ ID NO: 3977359 - DNA, 25 bp, Homo sapien
tcagccaaagttcatgctgtaggct

SEQ ID NO: 3977360 - DNA, 25 bp, Homo sapien
agttcatgctgtaggctgttagcac

SEQ ID NO: 3977361 - DNA, 25 bp, Homo sapien
ggctgttagcacatctgggttgttt

SEQ ID NO: 3977362 - DNA, 25 bp, Homo sapien
cttggcttcatcagccaaagttcat

SEQ ID NO: 3977363 - DNA, 25 bp, Homo sapien
cagttgatgccacatgtaggacacc

SEQ ID NO: 3977364 - DNA, 25 bp, Homo sapien
tgatgccacatgtaggacaccttaa

SEQ ID NO: 3977365 - DNA, 25 bp, Homo sapien
tgcagctgggtggactttgccagtt

SEQ ID NO: 3977366 - DNA, 25 bp, Homo sapien
ggactttgccagttgatgccacatg

SEQ ID NO: 3977367 - DNA, 25 bp, Homo sapien
tggcatgagcccttctaggatggct

SEQ ID NO: 3977368 - DNA, 25 bp, Homo sapien
gagactggcatgagcccttctagga

SEQ ID NO: 3977369 - DNA, 25 bp, Homo sapien
aagccggggctctgcaaccaagaga

SEQ ID NO: 3977370 - DNA, 25 bp, Homo sapien
caaccaagagactggcatgagccct

SEQ ID NO: 3977371 - DNA, 25 bp, Homo sapien
gccaagtccactgtgggttcatcca

SEQ ID NO: 3977372 - DNA, 25 bp, Homo sapien
cactctccaaggaaactttgctcac

SEQ ID NO: 3977373 - DNA, 25 bp, Homo sapien
caagccactctccaaggaaactttg

SEQ ID NO: 3977374 - DNA, 25 bp, Homo sapien
agtccactgtgggttcatccaagcc

SEQ ID NO: 3977375 - DNA, 25 bp, Homo sapien
tgttgtgagggatttcacgtaagtt

SEQ ID NO: 3977376 - DNA, 25 bp, Homo sapien
gatgttgtgagggatttcacgtaag

SEQ ID NO: 3977377 - DNA, 25 bp, Homo sapien
aggatgttgtgagggatttcacgta

SEQ ID NO: 3977378 - DNA, 25 bp, Homo sapien
atgttgtgagggatttcacgtaagt

SEQ ID NO: 3977379 - DNA, 25 bp, Homo sapien
tgtaacccgcaaggcagacggcatg

SEQ ID NO: 3977380 - DNA, 25 bp, Homo sapien
ctgtaacccgcaaggcagacggcat

SEQ ID NO: 3977381 - DNA, 25 bp, Homo sapien
gtaacccgcaaggcagacggcatgg

SEQ ID NO: 3977382 - DNA, 25 bp, Homo sapien
taacccgcaaggcagacggcatgga

SEQ ID NO: 3977383 - DNA, 25 bp, Homo sapien
tgttttgtggttaactgtgtgtacc

SEQ ID NO: 3977384 - DNA, 25 bp, Homo sapien
agtccatggcaatggctttttcaga

SEQ ID NO: 3977385 - DNA, 25 bp, Homo sapien
tgtctggcagtccatggcaatggct

SEQ ID NO: 3977386 - DNA, 25 bp, Homo sapien
tatttgtgtcttgtcattgtctgtc

SEQ ID NO: 3977387 - DNA, 25 bp, Homo sapien
aaaaatccaattatgtccttcttga

SEQ ID NO: 3977388 - DNA, 25 bp, Homo sapien
tccaattatgtccttcttgagtctg

SEQ ID NO: 3977389 - DNA, 25 bp, Homo sapien
aatccaattatgtccttcttgagtc

SEQ ID NO: 3977390 - DNA, 25 bp, Homo sapien
caattatgtccttcttgagtctgtg

SEQ ID NO: 3977391 - DNA, 25 bp, Homo sapien
tagttgctgtgaggctctagacacc

SEQ ID NO: 3977392 - DNA, 25 bp, Homo sapien
agacaccgaccatacagggcgtggg

SEQ ID NO: 3977393 - DNA, 25 bp, Homo sapien
taatccaacgctaggctttgtgcag

SEQ ID NO: 3977394 - DNA, 25 bp, Homo sapien
gaaaggcaactttgtcagtggagag

SEQ ID NO: 3977395 - DNA, 25 bp, Homo sapien
tccacacaggcagagattcgctaca

SEQ ID NO: 3977396 - DNA, 25 bp, Homo sapien
agattcgctacatctggaacttggc

SEQ ID NO: 3977397 - DNA, 25 bp, Homo sapien
ctcctcccagcttgaagtagcatga

SEQ ID NO: 3977398 - DNA, 25 bp, Homo sapien
cttgaagtagcatgaagatgtggtt

SEQ ID NO: 3977399 - DNA, 25 bp, Homo sapien
agtgtctgcaaccagcacaaaaggc

SEQ ID NO: 3977400 - DNA, 25 bp, Homo sapien
ttctaagctgatgccaatctgctcc

SEQ ID NO: 3977401 - DNA, 25 bp, Homo sapien
tctgcaaccagcacaaaaggcactt

SEQ ID NO: 3977402 - DNA, 25 bp, Homo sapien
agcacacttctaagctgatgccaat

SEQ ID NO: 3977403 - DNA, 25 bp, Homo sapien
tgcaggctgaataagcctatcatcc

SEQ ID NO: 3977404 - DNA, 25 bp, Homo sapien
tgtctgttgaacacataaggaggtg

SEQ ID NO: 3977405 - DNA, 25 bp, Homo sapien
ccaaaacaacttcgaagactagtgg

SEQ ID NO: 3977406 - DNA, 25 bp, Homo sapien
ctcctgagagaataaggtaggtgca

SEQ ID NO: 3977407 - DNA, 25 bp, Homo sapien
cctattggaaaaccagtgcatggcc

SEQ ID NO: 3977408 - DNA, 25 bp, Homo sapien
agtctgcctcactgacccttgggag

SEQ ID NO: 3977409 - DNA, 25 bp, Homo sapien
gaataatcactctatcgaagcaggg

SEQ ID NO: 3977410 - DNA, 25 bp, Homo sapien
gaacagaacactaggtgacatcagg

SEQ ID NO: 3977411 - DNA, 25 bp, Homo sapien
tcatttggccgttcagtgattcttc

SEQ ID NO: 3977412 - DNA, 25 bp, Homo sapien
tttctttcatttggccgttcagtga

SEQ ID NO: 3977413 - DNA, 25 bp, Homo sapien
acctcgaccattgttttccatgcct

SEQ ID NO: 3977414 - DNA, 25 bp, Homo sapien
cactgtcttcaagacccctcttcga

SEQ ID NO: 3977415 - DNA, 25 bp, Homo sapien
gcaaggcctgcatgctttgttttat

SEQ ID NO: 3977416 - DNA, 25 bp, Homo sapien
tgttgtaggactttgtcattgtcag

SEQ ID NO: 3977417 - DNA, 25 bp, Homo sapien
tttgggcaaggcctgcatgctttgt

SEQ ID NO: 3977418 - DNA, 25 bp, Homo sapien
tgtcattgtcagtttgggcaaggcc

SEQ ID NO: 3977419 - DNA, 25 bp, Homo sapien
ccctctcctgtggttaattctgctt

SEQ ID NO: 3977420 - DNA, 25 bp, Homo sapien
gaaaacaaatccaccttgagcaagg

SEQ ID NO: 3977421 - DNA, 25 bp, Homo sapien
tccctgccttcccttactgattgta

SEQ ID NO: 3977422 - DNA, 25 bp, Homo sapien
tggttaattctgcttggtagtgtcc

SEQ ID NO: 3977423 - DNA, 25 bp, Homo sapien
ttgcactggagccagctcctgtggg

SEQ ID NO: 3977424 - DNA, 25 bp, Homo sapien
ctcctgtgggtgcttgcagtggtga

SEQ ID NO: 3977425 - DNA, 25 bp, Homo sapien
tcactcttctgggttgtgcctgctt

SEQ ID NO: 3977426 - DNA, 25 bp, Homo sapien
cttgcagtggtgagctgtctgcatg

SEQ ID NO: 3977427 - DNA, 25 bp, Homo sapien
aatacagaaatgatcgaatctcccc

SEQ ID NO: 3977428 - DNA, 25 bp, Homo sapien
atgatcgaatctccccaaagcctac

SEQ ID NO: 3977429 - DNA, 25 bp, Homo sapien
ggaagcatctatacctattatttga

SEQ ID NO: 3977430 - DNA, 25 bp, Homo sapien
cacagcttggaagcatctataccta

SEQ ID NO: 3977431 - DNA, 25 bp, Homo sapien
ggacttccggtcagttgatccacca

SEQ ID NO: 3977432 - DNA, 25 bp, Homo sapien
tccttctggacttccggtcagttga

SEQ ID NO: 3977433 - DNA, 25 bp, Homo sapien
tccggtcagttgatccaccatggct

SEQ ID NO: 3977434 - DNA, 25 bp, Homo sapien
cagttgatccaccatggctgttgtt

SEQ ID NO: 3977435 - DNA, 25 bp, Homo sapien
gctgtgaattttactggccctagtc

SEQ ID NO: 3977436 - DNA, 25 bp, Homo sapien
caaagacccttggagacctatgcat

SEQ ID NO: 3977437 - DNA, 25 bp, Homo sapien
gcctgtggccgaagtgttagatgtt

SEQ ID NO: 3977438 - DNA, 25 bp, Homo sapien
attctttgggtaggacttgctgcac

SEQ ID NO: 3977439 - DNA, 25 bp, Homo sapien
tttggatccgagagctcaaaaggac

SEQ ID NO: 3977440 - DNA, 25 bp, Homo sapien
ggactctccccatccttgaaggctt

SEQ ID NO: 3977441 - DNA, 25 bp, Homo sapien
tattgaatatacacaccgcattggc

SEQ ID NO: 3977442 - DNA, 25 bp, Homo sapien
tctgggtactgtaataggctggacc

SEQ ID NO: 3977443 - DNA, 25 bp, Homo sapien
tgattaggtcattgtaggcagccaa

SEQ ID NO: 3977444 - DNA, 25 bp, Homo sapien
gactgtgtgcactcggcatatagag

SEQ ID NO: 3977445 - DNA, 25 bp, Homo sapien
gccaatgtgggcaatctgatccggt

SEQ ID NO: 3977446 - DNA, 25 bp, Homo sapien
gaagtgctgaatagctatccagttg

SEQ ID NO: 3977447 - DNA, 25 bp, Homo sapien
ccgaatgagattgtcagctggtttg

SEQ ID NO: 3977448 - DNA, 25 bp, Homo sapien
ttaggtcttcgtgggcattctgatc

SEQ ID NO: 3977449 - DNA, 25 bp, Homo sapien
tgagagttgccctggagtgccaccg

SEQ ID NO: 3977450 - DNA, 25 bp, Homo sapien
gccttaggtcttcgtgggcattctg

SEQ ID NO: 3977451 - DNA, 25 bp, Homo sapien
ttgattgatggattgattgatcatt

SEQ ID NO: 3977452 - DNA, 25 bp, Homo sapien
tattgattgatggattgattgatca

SEQ ID NO: 3977453 - DNA, 25 bp, Homo sapien
tgatggattgattgatcattcttgg

SEQ ID NO: 3977454 - DNA, 25 bp, Homo sapien
gattgatggattgattgatcattct

SEQ ID NO: 3977455 - DNA, 25 bp, Homo sapien
ttactggaccgagccaagtctcctt

SEQ ID NO: 3977456 - DNA, 25 bp, Homo sapien
tgagcccttcaacgtctccagagga

SEQ ID NO: 3977457 - DNA, 25 bp, Homo sapien
ggttgcatttgtttactggaccgag

SEQ ID NO: 3977458 - DNA, 25 bp, Homo sapien
atatgcagcttttcatctattgcca

SEQ ID NO: 3977459 - DNA, 25 bp, Homo sapien
aactagggatatggcaaactcagga

SEQ ID NO: 3977460 - DNA, 25 bp, Homo sapien
tctgggccagaccatataatcacta

SEQ ID NO: 3977461 - DNA, 25 bp, Homo sapien
taataaggcccacatgttgcagtaa

SEQ ID NO: 3977462 - DNA, 25 bp, Homo sapien
tgtccagtgtgaggatgccccatta

SEQ ID NO: 3977463 - DNA, 25 bp, Homo sapien
aatccgtggaagaaatgtgagaggc

SEQ ID NO: 3977464 - DNA, 25 bp, Homo sapien
tatctgcagcacgatagaatccgtg

SEQ ID NO: 3977465 - DNA, 25 bp, Homo sapien
tagtcagaggttgattgttcatccc

SEQ ID NO: 3977466 - DNA, 25 bp, Homo sapien
cacacttgggtagcaacattctgga

SEQ ID NO: 3977467 - DNA, 25 bp, Homo sapien
tgataaacctctagtcagactggtc

SEQ ID NO: 3977468 - DNA, 25 bp, Homo sapien
cccagagtaagtttatgacgtgaaa

SEQ ID NO: 3977469 - DNA, 25 bp, Homo sapien
tcagaacagaactcaattaaatagg

SEQ ID NO: 3977470 - DNA, 25 bp, Homo sapien
tattcagaaaattagagaggtgaca

SEQ ID NO: 3977471 - DNA, 25 bp, Homo sapien
tcagcaatccacctgaagcagtgct

SEQ ID NO: 3977472 - DNA, 25 bp, Homo sapien
tttacaggggaaatcagcaatccac

SEQ ID NO: 3977473 - DNA, 25 bp, Homo sapien
gctctggtatctggactattatcaa

SEQ ID NO: 3977474 - DNA, 25 bp, Homo sapien
tatctggactattatcaaagaaggg

SEQ ID NO: 3977475 - DNA, 25 bp, Homo sapien
atagccatcgagtccctggtcaaag

SEQ ID NO: 3977476 - DNA, 25 bp, Homo sapien
tatcacgtcgaggtcggaatagcca

SEQ ID NO: 3977477 - DNA, 25 bp, Homo sapien
gccagctgatgggactttgatgtgg

SEQ ID NO: 3977478 - DNA, 25 bp, Homo sapien
ggaatagccagaatagccatcgagt

SEQ ID NO: 3977479 - DNA, 25 bp, Homo sapien
tgatccacaatgcaccttaaagctc

SEQ ID NO: 3977480 - DNA, 25 bp, Homo sapien
tccacagctgtaggggacccgtgct

SEQ ID NO: 3977481 - DNA, 25 bp, Homo sapien
tcatctcggcgcattctgtttccca

SEQ ID NO: 3977482 - DNA, 25 bp, Homo sapien
gctcctgcatagagagtgatccaca

SEQ ID NO: 3977483 - DNA, 25 bp, Homo sapien
gttatatcttctctgggggcaaaag

SEQ ID NO: 3977484 - DNA, 25 bp, Homo sapien
tggttaagccttaaggtgaactctc

SEQ ID NO: 3977485 - DNA, 25 bp, Homo sapien
atatcttctctgggggcaaaagcct

SEQ ID NO: 3977486 - DNA, 25 bp, Homo sapien
tgtggttaagccttaaggtgaactc

SEQ ID NO: 3977487 - DNA, 25 bp, Homo sapien
ggagttgtagcaggagtggctgaag

SEQ ID NO: 3977488 - DNA, 25 bp, Homo sapien
agaattctctcggagttgtagcagg

SEQ ID NO: 3977489 - DNA, 25 bp, Homo sapien
gagttgtagcaggagtggctgaagc

SEQ ID NO: 3977490 - DNA, 25 bp, Homo sapien
tctctcacttggtatgtgctgcagg

SEQ ID NO: 3977491 - DNA, 25 bp, Homo sapien
ctctcttgtctaggaggtagctcca

SEQ ID NO: 3977492 - DNA, 25 bp, Homo sapien
tacctgctgaaggtatgagcctctc

SEQ ID NO: 3977493 - DNA, 25 bp, Homo sapien
agacctgggcctgtgcgaagcactt

SEQ ID NO: 3977494 - DNA, 25 bp, Homo sapien
tatattaacgtgactgcccacagcc

SEQ ID NO: 3977495 - DNA, 25 bp, Homo sapien
tactcttatattcctgaaggtgaca

SEQ ID NO: 3977496 - DNA, 25 bp, Homo sapien
gaaggtgacaaatagttttctgaca

SEQ ID NO: 3977497 - DNA, 25 bp, Homo sapien
tattcttggccgaaattgctgtttg

SEQ ID NO: 3977498 - DNA, 25 bp, Homo sapien
gtcacaacaattcctccagaggcag

SEQ ID NO: 3977499 - DNA, 25 bp, Homo sapien
cagtgttacacagcttaaggaagga

SEQ ID NO: 3977500 - DNA, 25 bp, Homo sapien
ttacacatgttctaggtccaaacag

SEQ ID NO: 3977501 - DNA, 25 bp, Homo sapien
cactcccatagctgattgatgcagg

SEQ ID NO: 3977502 - DNA, 25 bp, Homo sapien
tgcctttcctggagttgcctctggt

SEQ ID NO: 3977503 - DNA, 25 bp, Homo sapien
ccaagccctgactgctcagtcccat

SEQ ID NO: 3977504 - DNA, 25 bp, Homo sapien
tggttctgtccttcccaagccctga

SEQ ID NO: 3977505 - DNA, 25 bp, Homo sapien
ctgctgcctttcctggagttgcctc

SEQ ID NO: 3977506 - DNA, 25 bp, Homo sapien
atcaaatggaaccacttcagccatg

SEQ ID NO: 3977507 - DNA, 25 bp, Homo sapien
aagagattaatattactgaggcagg

SEQ ID NO: 3977508 - DNA, 25 bp, Homo sapien
taaatcaaatggaaccacttcagcc

SEQ ID NO: 3977509 - DNA, 25 bp, Homo sapien
aaatcaaatggaaccacttcagcca

SEQ ID NO: 3977510 - DNA, 25 bp, Homo sapien
tctcaaacaggcttactgaattgtc

SEQ ID NO: 3977511 - DNA, 25 bp, Homo sapien
tccgaccaatttatagtcaggctga

SEQ ID NO: 3977512 - DNA, 25 bp, Homo sapien
gaataacttgctcttctaattggcc

SEQ ID NO: 3977513 - DNA, 25 bp, Homo sapien
taagtaattatttgagctccgacca

SEQ ID NO: 3977514 - DNA, 25 bp, Homo sapien
cgggccccataaagtccaccagaga

SEQ ID NO: 3977515 - DNA, 25 bp, Homo sapien
taggcaacgggccccataaagtcca

SEQ ID NO: 3977516 - DNA, 25 bp, Homo sapien
gacaggaggagattggacaggagag

SEQ ID NO: 3977517 - DNA, 25 bp, Homo sapien
caggagaggtccgtaggcaacgggc

SEQ ID NO: 3977518 - DNA, 25 bp, Homo sapien
gactgggacacgacaattgcaaagg

SEQ ID NO: 3977519 - DNA, 25 bp, Homo sapien
ctgggacacgacaattgcaaaggat

SEQ ID NO: 3977520 - DNA, 25 bp, Homo sapien
gacacgacaattgcaaaggatcatc

SEQ ID NO: 3977521 - DNA, 25 bp, Homo sapien
cgtggactgggacacgacaattgca

SEQ ID NO: 3977522 - DNA, 25 bp, Homo sapien
accagagtccagctcatatcgagga

SEQ ID NO: 3977523 - DNA, 25 bp, Homo sapien
cagagtccagctcatatcgaggaaa

SEQ ID NO: 3977524 - DNA, 25 bp, Homo sapien
ccagagtccagctcatatcgaggaa

SEQ ID NO: 3977525 - DNA, 25 bp, Homo sapien
gaaggaaaccctgagtccccacagc

SEQ ID NO: 3977526 - DNA, 25 bp, Homo sapien
ctgctgctggaaggaaaccctgagt

SEQ ID NO: 3977527 - DNA, 25 bp, Homo sapien
cttgcattttagcctcactgagctc

SEQ ID NO: 3977528 - DNA, 25 bp, Homo sapien
ctgctggaaggaaaccctgagtccc

SEQ ID NO: 3977529 - DNA, 25 bp, Homo sapien
cctccatccaagacgatgtaggacc

SEQ ID NO: 3977530 - DNA, 25 bp, Homo sapien
taggaccttggctcaagatgggcca

SEQ ID NO: 3977531 - DNA, 25 bp, Homo sapien
ttctttggtatattggaactggaag

SEQ ID NO: 3977532 - DNA, 25 bp, Homo sapien
caagatgggccaagtaatgtcttct

SEQ ID NO: 3977533 - DNA, 25 bp, Homo sapien
ggatgaggtggaatttcttcccgta

SEQ ID NO: 3977534 - DNA, 25 bp, Homo sapien
gtgtgaacccaaaatcccgaatatg

SEQ ID NO: 3977535 - DNA, 25 bp, Homo sapien
gctttcatcacggttgagaacccag

SEQ ID NO: 3977536 - DNA, 25 bp, Homo sapien
cccgaatatgttgagacttcttcag

SEQ ID NO: 3977537 - DNA, 25 bp, Homo sapien
gaacccagatgtctgccgtgtgaac

SEQ ID NO: 3977538 - DNA, 25 bp, Homo sapien
tgtgagaaccaatgggaaggagcct

SEQ ID NO: 3977539 - DNA, 25 bp, Homo sapien
ttgtgagaaccaatgggaaggagcc

SEQ ID NO: 3977540 - DNA, 25 bp, Homo sapien
ccaatgggaaggagcctgagctgct

SEQ ID NO: 3977541 - DNA, 25 bp, Homo sapien
gaacctattccctatgaattcatgg

SEQ ID NO: 3977542 - DNA, 25 bp, Homo sapien
tgagaaccaatgggaaggagcctga

SEQ ID NO: 3977543 - DNA, 25 bp, Homo sapien
gaaccaatgggaaggagcctgagct

SEQ ID NO: 3977544 - DNA, 25 bp, Homo sapien
aggctccttcccattggttctcaca

SEQ ID NO: 3977545 - DNA, 25 bp, Homo sapien
ggctccttcccattggttctcacaa

SEQ ID NO: 3977546 - DNA, 25 bp, Homo sapien
agcagctcaggctccttcccattgg

SEQ ID NO: 3977547 - DNA, 25 bp, Homo sapien
agctcaggctccttcccattggttc

SEQ ID NO: 3977548 - DNA, 25 bp, Homo sapien
tcaggctccttcccattggttctca

SEQ ID NO: 3977549 - DNA, 25 bp, Homo sapien
ccatgaattcatagggaataggttc

SEQ ID NO: 3977550 - DNA, 25 bp, Homo sapien
atagcttcctgaaacgtgtgaagga

SEQ ID NO: 3977551 - DNA, 25 bp, Homo sapien
gtacctgggttcaactaaagcgcca

SEQ ID NO: 3977552 - DNA, 25 bp, Homo sapien
ctgaaacgtgtgaaggaaaatgatc

SEQ ID NO: 3977553 - DNA, 25 bp, Homo sapien
tacctgggttcaactaaagcgccag

SEQ ID NO: 3977554 - DNA, 25 bp, Homo sapien
ggttcaactaaagcgccagcctgct

SEQ ID NO: 3977555 - DNA, 25 bp, Homo sapien
cctgggttcaactaaagcgccagcc

SEQ ID NO: 3977556 - DNA, 25 bp, Homo sapien
ggctggcgctttagttgaacccagg

SEQ ID NO: 3977557 - DNA, 25 bp, Homo sapien
tccttcacacgtttcaggaagctat

SEQ ID NO: 3977558 - DNA, 25 bp, Homo sapien
gatcattttccttcacacgtttcag

SEQ ID NO: 3977559 - DNA, 25 bp, Homo sapien
tggcgctttagttgaacccaggtac

SEQ ID NO: 3977560 - DNA, 25 bp, Homo sapien
agcaggctggcgctttagttgaacc

SEQ ID NO: 3977561 - DNA, 25 bp, Homo sapien
ctggcgctttagttgaacccaggta

SEQ ID NO: 3977562 - DNA, 25 bp, Homo sapien
ccacatatatgcgaatctataagaa

SEQ ID NO: 3977563 - DNA, 25 bp, Homo sapien
ggccacatatatgcgaatctataag

SEQ ID NO: 3977564 - DNA, 25 bp, Homo sapien
cacccgatatatgttctctaggcct

SEQ ID NO: 3977565 - DNA, 25 bp, Homo sapien
agaggcacccgatatatgttctcta

SEQ ID NO: 3977566 - DNA, 25 bp, Homo sapien
ttggccacatatatgcgaatctata

SEQ ID NO: 3977567 - DNA, 25 bp, Homo sapien
gcacccgatatatgttctctaggcc

SEQ ID NO: 3977568 - DNA, 25 bp, Homo sapien
cttatagattcgcatatatgtggcc

SEQ ID NO: 3977569 - DNA, 25 bp, Homo sapien
tagagaacatatatcgggtgcctct

SEQ ID NO: 3977570 - DNA, 25 bp, Homo sapien
aggcctagagaacatatatcgggtg

SEQ ID NO: 3977571 - DNA, 25 bp, Homo sapien
ggcctagagaacatatatcgggtgc

SEQ ID NO: 3977572 - DNA, 25 bp, Homo sapien
tatagattcgcatatatgtggccaa

SEQ ID NO: 3977573 - DNA, 25 bp, Homo sapien
ttcttatagattcgcatatatgtgg

SEQ ID NO: 3977574 - DNA, 25 bp, Homo sapien
gaaccgccatcttccagtaattcgc

SEQ ID NO: 3977575 - DNA, 25 bp, Homo sapien
ccgccatcttccagtaattcgccaa

SEQ ID NO: 3977576 - DNA, 25 bp, Homo sapien
accgccatcttccagtaattcgcca

SEQ ID NO: 3977577 - DNA, 25 bp, Homo sapien
ggaaccgccatcttccagtaattcg

SEQ ID NO: 3977578 - DNA, 25 bp, Homo sapien
cgccatcttccagtaattcgccaaa

SEQ ID NO: 3977579 - DNA, 25 bp, Homo sapien
aaccgccatcttccagtaattcgcc

SEQ ID NO: 3977580 - DNA, 25 bp, Homo sapien
gcgaattactggaagatggcggttc

SEQ ID NO: 3977581 - DNA, 25 bp, Homo sapien
tggcgaattactggaagatggcggt

SEQ ID NO: 3977582 - DNA, 25 bp, Homo sapien
ttggcgaattactggaagatggcgg

SEQ ID NO: 3977583 - DNA, 25 bp, Homo sapien
cgaattactggaagatggcggttcc

SEQ ID NO: 3977584 - DNA, 25 bp, Homo sapien
tttggcgaattactggaagatggcg

SEQ ID NO: 3977585 - DNA, 25 bp, Homo sapien
ggcgaattactggaagatggcggtt

SEQ ID NO: 3977586 - DNA, 25 bp, Homo sapien
gattcccccaaaatggacggataga

SEQ ID NO: 3977587 - DNA, 25 bp, Homo sapien
ttctgattcccccaaaatggacgga

SEQ ID NO: 3977588 - DNA, 25 bp, Homo sapien
ttcagctcactttgccagtcttgtg

SEQ ID NO: 3977589 - DNA, 25 bp, Homo sapien
agtcttgtgataagcctgctcttgg

SEQ ID NO: 3977590 - DNA, 25 bp, Homo sapien
cactcatacaggctacagttcctag

SEQ ID NO: 3977591 - DNA, 25 bp, Homo sapien
catacaggctacagttcctagcttg

SEQ ID NO: 3977592 - DNA, 25 bp, Homo sapien
ggaagatgggcataccaaggcctag

SEQ ID NO: 3977593 - DNA, 25 bp, Homo sapien
tcctagcttgaagagacgccctggc

SEQ ID NO: 3977594 - DNA, 25 bp, Homo sapien
gaattcaacactcaaactttcttgg

SEQ ID NO: 3977595 - DNA, 25 bp, Homo sapien
tgctgctggtgaagccgtgatcacc

SEQ ID NO: 3977596 - DNA, 25 bp, Homo sapien
ctttcttggtcaaaggaagccgtga

SEQ ID NO: 3977597 - DNA, 25 bp, Homo sapien
tgttgcctcaacagacaaaacggag

SEQ ID NO: 3977598 - DNA, 25 bp, Homo sapien
cttaggagaatgattgggcaggaag

SEQ ID NO: 3977599 - DNA, 25 bp, Homo sapien
ttaggagaatgattgggcaggaagg

SEQ ID NO: 3977600 - DNA, 25 bp, Homo sapien
taggagaatgattgggcaggaagga

SEQ ID NO: 3977601 - DNA, 25 bp, Homo sapien
cagtccgtgtgcacatatgtctggc

SEQ ID NO: 3977602 - DNA, 25 bp, Homo sapien
acagtccgtgtgcacatatgtctgg

SEQ ID NO: 3977603 - DNA, 25 bp, Homo sapien
gtctggctctggctatcatgtgcca

SEQ ID NO: 3977604 - DNA, 25 bp, Homo sapien
acatatgtctggctctggctatcat

SEQ ID NO: 3977605 - DNA, 25 bp, Homo sapien
ccctcggttctcaatgtgggagccc

SEQ ID NO: 3977606 - DNA, 25 bp, Homo sapien
caggagctccagagagacgaaggaa

SEQ ID NO: 3977607 - DNA, 25 bp, Homo sapien
tagccaactgctatcatgcttcagg

SEQ ID NO: 3977608 - DNA, 25 bp, Homo sapien
acagggcagacgctgccttagccaa

SEQ ID NO: 3977609 - DNA, 25 bp, Homo sapien
caagaccacattctgtgctctcttc

SEQ ID NO: 3977610 - DNA, 25 bp, Homo sapien
ggaaacgcttcccttctcaagacca

SEQ ID NO: 3977611 - DNA, 25 bp, Homo sapien
ctctctcctgcagtcagtgtgtgct

SEQ ID NO: 3977612 - DNA, 25 bp, Homo sapien
agtgcctggacaggtcacagttgct

SEQ ID NO: 3977613 - DNA, 25 bp, Homo sapien
tttttctttcgatatgagatttttc

SEQ ID NO: 3977614 - DNA, 25 bp, Homo sapien
ctttttctttcgatatgagattttt

SEQ ID NO: 3977615 - DNA, 25 bp, Homo sapien
ttttctttcgatatgagatttttca

SEQ ID NO: 3977616 - DNA, 25 bp, Homo sapien
tttctttcgatatgagatttttcat

SEQ ID NO: 3977617 - DNA, 25 bp, Homo sapien
gcaactgtgggcaaagttctcaacc

SEQ ID NO: 3977618 - DNA, 25 bp, Homo sapien
taaaagcaatgaaagagcagagatg

SEQ ID NO: 3977619 - DNA, 25 bp, Homo sapien
aattaggaagacagactgccttggc

SEQ ID NO: 3977620 - DNA, 25 bp, Homo sapien
tggtgttctggcaatctgaggctgt

SEQ ID NO: 3977621 - DNA, 25 bp, Homo sapien
tagtcagaacagagcacctgcttca

SEQ ID NO: 3977622 - DNA, 25 bp, Homo sapien
tgcagaagccctcccatggagtgcc

SEQ ID NO: 3977623 - DNA, 25 bp, Homo sapien
tcactaggtagtgatgacctgcacc

SEQ ID NO: 3977624 - DNA, 25 bp, Homo sapien
gccccatgccacttaatctgtagga

SEQ ID NO: 3977625 - DNA, 25 bp, Homo sapien
tggctggcatctcctgagagcaaag

SEQ ID NO: 3977626 - DNA, 25 bp, Homo sapien
tgtcagcgacgagcgaccctgactt

SEQ ID NO: 3977627 - DNA, 25 bp, Homo sapien
tggcaggagctttttcatattccac

SEQ ID NO: 3977628 - DNA, 25 bp, Homo sapien
cctggctgacggctggttgaatgct

SEQ ID NO: 3977629 - DNA, 25 bp, Homo sapien
taggcccaaggacattcctgcaggg

SEQ ID NO: 3977630 - DNA, 25 bp, Homo sapien
attttgggtggagatgaggtcacca

SEQ ID NO: 3977631 - DNA, 25 bp, Homo sapien
gatgaggtcaccaagtgtggcctca

SEQ ID NO: 3977632 - DNA, 25 bp, Homo sapien
gaggtgtggaggcatattttgggtg

SEQ ID NO: 3977633 - DNA, 25 bp, Homo sapien
caggacaagtactgtctgcactgcg

SEQ ID NO: 3977634 - DNA, 25 bp, Homo sapien
cagctccccaggacaagtactgtct

SEQ ID NO: 3977635 - DNA, 25 bp, Homo sapien
tctgcactgcgttgtggtcagccat

SEQ ID NO: 3977636 - DNA, 25 bp, Homo sapien
tgactgcacactgcttcgtggccgc

SEQ ID NO: 3977637 - DNA, 25 bp, Homo sapien
ccctgctcccagcctagccttggca

SEQ ID NO: 3977638 - DNA, 25 bp, Homo sapien
ttaacttctttgctttcccctgctc

SEQ ID NO: 3977639 - DNA, 25 bp, Homo sapien
cccagcctagccttggcacaagcat

SEQ ID NO: 3977640 - DNA, 25 bp, Homo sapien
tgctcccagcctagccttggcacaa

SEQ ID NO: 3977641 - DNA, 25 bp, Homo sapien
taatccctattgcatacatgtagtg

SEQ ID NO: 3977642 - DNA, 25 bp, Homo sapien
acatgtagtgtctaagaatggcagc

SEQ ID NO: 3977643 - DNA, 25 bp, Homo sapien
tacaactgtggcctttggcgtcagg

SEQ ID NO: 3977644 - DNA, 25 bp, Homo sapien
gagctataacaaaagacctcgggct

SEQ ID NO: 3977645 - DNA, 25 bp, Homo sapien
ctcctgggcctgagtacagcagaca

SEQ ID NO: 3977646 - DNA, 25 bp, Homo sapien
ggcttgtctggccgacatgcagaga

SEQ ID NO: 3977647 - DNA, 25 bp, Homo sapien
cttgtctggccgacatgcagagaat

SEQ ID NO: 3977648 - DNA, 25 bp, Homo sapien
gcttgtctggccgacatgcagagaa

SEQ ID NO: 3977649 - DNA, 25 bp, Homo sapien
gaggggtccttggtggagtctggcc

SEQ ID NO: 3977650 - DNA, 25 bp, Homo sapien
agcttccaggcccagatacttggca

SEQ ID NO: 3977651 - DNA, 25 bp, Homo sapien
tggagtctggcctgtttccccaggt

SEQ ID NO: 3977652 - DNA, 25 bp, Homo sapien
ttccaggcccagatacttggcacat

SEQ ID NO: 3977653 - DNA, 25 bp, Homo sapien
ggaccatgtcccaagatggccttgt

SEQ ID NO: 3977654 - DNA, 25 bp, Homo sapien
cccagaggcacctggaaatccaaga

SEQ ID NO: 3977655 - DNA, 25 bp, Homo sapien
gatggagaccatgatgagaaaaggc

SEQ ID NO: 3977656 - DNA, 25 bp, Homo sapien
gtccttgactgtttcccatgccagc

SEQ ID NO: 3977657 - DNA, 25 bp, Homo sapien
cgagggagcagcagaaaggcctgat

SEQ ID NO: 3977658 - DNA, 25 bp, Homo sapien
tgccagaccattctagaacacagcc

SEQ ID NO: 3977659 - DNA, 25 bp, Homo sapien
acagccttgttcctccatgggggaa

SEQ ID NO: 3977660 - DNA, 25 bp, Homo sapien
agaaatggtcatgggtgtcaggtca

SEQ ID NO: 3977661 - DNA, 25 bp, Homo sapien
tgtgatgttcactttcgccagtacc

SEQ ID NO: 3977662 - DNA, 25 bp, Homo sapien
tgaattctgcagatttccctgggtc

SEQ ID NO: 3977663 - DNA, 25 bp, Homo sapien
gaagccagtaggaggtgaattctgc

SEQ ID NO: 3977664 - DNA, 25 bp, Homo sapien
tgtgctaaggtgcatctgagctctg

SEQ ID NO: 3977665 - DNA, 25 bp, Homo sapien
ccggagtatgcatgtttgggaagaa

SEQ ID NO: 3977666 - DNA, 25 bp, Homo sapien
gccacaggtaaagaatgcaagttag

SEQ ID NO: 3977667 - DNA, 25 bp, Homo sapien
cctgttgggtctaagggtttgatga

SEQ ID NO: 3977668 - DNA, 25 bp, Homo sapien
tgctcagtgggatgccatggccgtc

SEQ ID NO: 3977669 - DNA, 25 bp, Homo sapien
gctggatagatggatgacatctcca

SEQ ID NO: 3977670 - DNA, 25 bp, Homo sapien
gctgccttccatgccctgggagctg

SEQ ID NO: 3977671 - DNA, 25 bp, Homo sapien
gatgacatctccaggcttgggccac

SEQ ID NO: 3977672 - DNA, 25 bp, Homo sapien
cctgggagctggatagatggatgac

SEQ ID NO: 3977673 - DNA, 25 bp, Homo sapien
ggaagcagcttgctccacagcatgg

SEQ ID NO: 3977674 - DNA, 25 bp, Homo sapien
ttgaagtctctgatttagttcagcc

SEQ ID NO: 3977675 - DNA, 25 bp, Homo sapien
cacagcatggagtagctcagttggt

SEQ ID NO: 3977676 - DNA, 25 bp, Homo sapien
taggtctgtggtagggtgttttcta

SEQ ID NO: 3977677 - DNA, 25 bp, Homo sapien
ggcagagagcagaggggcagagagc

SEQ ID NO: 3977678 - DNA, 25 bp, Homo sapien
gcagagagcagaggggcagagagca

SEQ ID NO: 3977679 - DNA, 25 bp, Homo sapien
cagagagcagaggggcagagagcag

SEQ ID NO: 3977680 - DNA, 25 bp, Homo sapien
ggctggtgaagggttgactgggttc

SEQ ID NO: 3977681 - DNA, 25 bp, Homo sapien
agaagtgacttgcaccccagtgagg

SEQ ID NO: 3977682 - DNA, 25 bp, Homo sapien
aggggatgcaatagggattctgtaa

SEQ ID NO: 3977683 - DNA, 25 bp, Homo sapien
tgatagcagaagtgacttgcacccc

SEQ ID NO: 3977684 - DNA, 25 bp, Homo sapien
agtctctcttgtagggacagctgcc

SEQ ID NO: 3977685 - DNA, 25 bp, Homo sapien
tctcttgtagggacagctgccgcaa

SEQ ID NO: 3977686 - DNA, 25 bp, Homo sapien
tgcccacaggttctccatgccatcc

SEQ ID NO: 3977687 - DNA, 25 bp, Homo sapien
tcttgtagggacagctgccgcaacc

SEQ ID NO: 3977688 - DNA, 25 bp, Homo sapien
tcccactttgccttctcttctctcc

SEQ ID NO: 3977689 - DNA, 25 bp, Homo sapien
tctctcctctgagtcccatcctcac

SEQ ID NO: 3977690 - DNA, 25 bp, Homo sapien
ctcttctctcctctgagtcccatcc

SEQ ID NO: 3977691 - DNA, 25 bp, Homo sapien
tcttctctcctctgagtcccatcct

SEQ ID NO: 3977692 - DNA, 25 bp, Homo sapien
tccatgctcctctgccaaacctctc

SEQ ID NO: 3977693 - DNA, 25 bp, Homo sapien
acttagttcctcaggtaaagattgg

SEQ ID NO: 3977694 - DNA, 25 bp, Homo sapien
aagtcctctagcctggcactcacag

SEQ ID NO: 3977695 - DNA, 25 bp, Homo sapien
atggccagggccgccattttgaatt

SEQ ID NO: 3977696 - DNA, 25 bp, Homo sapien
cctgatggctgagatctgaaaaagc

SEQ ID NO: 3977697 - DNA, 25 bp, Homo sapien
tggcctgatggctgagatctgaaaa

SEQ ID NO: 3977698 - DNA, 25 bp, Homo sapien
aggtggcctgatggctgagatctga

SEQ ID NO: 3977699 - DNA, 25 bp, Homo sapien
gggaggtggcctgatggctgagatc

SEQ ID NO: 3977700 - DNA, 25 bp, Homo sapien
tcaggggacattttcagggagcctg

SEQ ID NO: 3977701 - DNA, 25 bp, Homo sapien
ttctctttttgcttcgaccgtgata

SEQ ID NO: 3977702 - DNA, 25 bp, Homo sapien
gaccgtgatatgtccagaagataca

SEQ ID NO: 3977703 - DNA, 25 bp, Homo sapien
tagactattactgatagatactgtg

SEQ ID NO: 3977704 - DNA, 25 bp, Homo sapien
gtgttgatttgataccagggttttc

SEQ ID NO: 3977705 - DNA, 25 bp, Homo sapien
gtggaggtacaagggagcatcccca

SEQ ID NO: 3977706 - DNA, 25 bp, Homo sapien
ccatgtgtggaggtacaagggagca

SEQ ID NO: 3977707 - DNA, 25 bp, Homo sapien
ctctgcccatgtgtggaggtacaag

SEQ ID NO: 3977708 - DNA, 25 bp, Homo sapien
tctgcccatgtgtggaggtacaagg

SEQ ID NO: 3977709 - DNA, 25 bp, Homo sapien
tatgcactggtttcaattcagtctg

SEQ ID NO: 3977710 - DNA, 25 bp, Homo sapien
tctgctttgctgagtgaaagtgagg

SEQ ID NO: 3977711 - DNA, 25 bp, Homo sapien
tcgaaagagtggaatgcttatgcac

SEQ ID NO: 3977712 - DNA, 25 bp, Homo sapien
gcagaactgcagctaccaatggcct

SEQ ID NO: 3977713 - DNA, 25 bp, Homo sapien
tcctcctttacccagttcagaggtg

SEQ ID NO: 3977714 - DNA, 25 bp, Homo sapien
ttacccagttcagaggtgttttgcc

SEQ ID NO: 3977715 - DNA, 25 bp, Homo sapien
ctttacccagttcagaggtgttttg

SEQ ID NO: 3977716 - DNA, 25 bp, Homo sapien
ctcctttacccagttcagaggtgtt

SEQ ID NO: 3977717 - DNA, 25 bp, Homo sapien
taaccagtagcgtcctgagtacagg

SEQ ID NO: 3977718 - DNA, 25 bp, Homo sapien
tgcttataaccagtagcgtcctgag

SEQ ID NO: 3977719 - DNA, 25 bp, Homo sapien
tggaatgcttataaccagtagcgtc

SEQ ID NO: 3977720 - DNA, 25 bp, Homo sapien
agcgtcctgagtacaggctgcttac

SEQ ID NO: 3977721 - DNA, 25 bp, Homo sapien
tatcagacacagtatggtttgtctt

SEQ ID NO: 3977722 - DNA, 25 bp, Homo sapien
cacgggacatgttgctttgagattt

SEQ ID NO: 3977723 - DNA, 25 bp, Homo sapien
attttttatcagacacagtatggtt

SEQ ID NO: 3977724 - DNA, 25 bp, Homo sapien
aagccgactcacgggacatgttgct

SEQ ID NO: 3977725 - DNA, 25 bp, Homo sapien
attcctcctgtaagttcatggctgg

SEQ ID NO: 3977726 - DNA, 25 bp, Homo sapien
atctggtgtccgagggccgcaaaag

SEQ ID NO: 3977727 - DNA, 25 bp, Homo sapien
gagtgatgaactcggaaatgcattg

SEQ ID NO: 3977728 - DNA, 25 bp, Homo sapien
aatgcattgcacaggtgaccccgat

SEQ ID NO: 3977729 - DNA, 25 bp, Homo sapien
ttctgctttgagaaggcattgctga

SEQ ID NO: 3977730 - DNA, 25 bp, Homo sapien
gggctgccagtttgcctgcatggca

SEQ ID NO: 3977731 - DNA, 25 bp, Homo sapien
agagttctggcaccatctgtaggtc

SEQ ID NO: 3977732 - DNA, 25 bp, Homo sapien
catctgtaggtctctgaaggtgagg

SEQ ID NO: 3977733 - DNA, 25 bp, Homo sapien
ttgtgtccctccagcatttgggaag

SEQ ID NO: 3977734 - DNA, 25 bp, Homo sapien
tttgggaagctagggtgatgcttct

SEQ ID NO: 3977735 - DNA, 25 bp, Homo sapien
caggcccagaaaagggctttggctc

SEQ ID NO: 3977736 - DNA, 25 bp, Homo sapien
gtgtccctccagcatttgggaagct

SEQ ID NO: 3977737 - DNA, 25 bp, Homo sapien
cacatgtatacattcctaagcaaat

SEQ ID NO: 3977738 - DNA, 25 bp, Homo sapien
cttactgtggccattatcttgagat

SEQ ID NO: 3977739 - DNA, 25 bp, Homo sapien
actatacccttagaaatcctacatt

SEQ ID NO: 3977740 - DNA, 25 bp, Homo sapien
taccctcctggtggctgatccttct

SEQ ID NO: 3977741 - DNA, 25 bp, Homo sapien
tctgcacttcttgtgcgttgagcct

SEQ ID NO: 3977742 - DNA, 25 bp, Homo sapien
gttgattctttttctcagaacaaaa

SEQ ID NO: 3977743 - DNA, 25 bp, Homo sapien
tgcgttgagcctgagttgattcttt

SEQ ID NO: 3977744 - DNA, 25 bp, Homo sapien
tccagccagttgacaaaaggacagc

SEQ ID NO: 3977745 - DNA, 25 bp, Homo sapien
gataatttggaaaagctgcaggttg

SEQ ID NO: 3977746 - DNA, 25 bp, Homo sapien
aatttggaaaagctgcaggttgttc

SEQ ID NO: 3977747 - DNA, 25 bp, Homo sapien
aggcacattcttatcagagataatt

SEQ ID NO: 3977748 - DNA, 25 bp, Homo sapien
cattcttatcagagataatttggaa

SEQ ID NO: 3977749 - DNA, 25 bp, Homo sapien
gcaagctgcactgcttcaccgagag

SEQ ID NO: 3977750 - DNA, 25 bp, Homo sapien
tggcagttgccttttcgggccttgg

SEQ ID NO: 3977751 - DNA, 25 bp, Homo sapien
tgatgattgccctgtcccgcatgtg

SEQ ID NO: 3977752 - DNA, 25 bp, Homo sapien
cacgacgttctacttggcgggcaag

SEQ ID NO: 3977753 - DNA, 25 bp, Homo sapien
tgaatgggcttccatgataggtctg

SEQ ID NO: 3977754 - DNA, 25 bp, Homo sapien
tcttgttttccgactgttgctgggc

SEQ ID NO: 3977755 - DNA, 25 bp, Homo sapien
gataggtctgtgacccaaacctcct

SEQ ID NO: 3977756 - DNA, 25 bp, Homo sapien
tgctgggcattgttcacctccttcc

SEQ ID NO: 3977757 - DNA, 25 bp, Homo sapien
gcatatcctgctttcagcctcaaga

SEQ ID NO: 3977758 - DNA, 25 bp, Homo sapien
ctgctttcagcctcaagagaggcat

SEQ ID NO: 3977759 - DNA, 25 bp, Homo sapien
ccctccctccggtcaaagtccactg

SEQ ID NO: 3977760 - DNA, 25 bp, Homo sapien
cggtcaaagtccactgcatatcctg

SEQ ID NO: 3977761 - DNA, 25 bp, Homo sapien
ggagcccagtcatgtgacaagataa

SEQ ID NO: 3977762 - DNA, 25 bp, Homo sapien
tcccatcatgctcaaacgaagaaag

SEQ ID NO: 3977763 - DNA, 25 bp, Homo sapien
gcacccctgagaaatatccccttta

SEQ ID NO: 3977764 - DNA, 25 bp, Homo sapien
tagaatgatgttggatggccacccc

SEQ ID NO: 3977765 - DNA, 25 bp, Homo sapien
gcctttcacttgcatgaactccggg

SEQ ID NO: 3977766 - DNA, 25 bp, Homo sapien
ttcacttgcatgaactccgggctgc

SEQ ID NO: 3977767 - DNA, 25 bp, Homo sapien
ctccctggctactatatcttttgac

SEQ ID NO: 3977768 - DNA, 25 bp, Homo sapien
tccctggctactatatcttttgact

SEQ ID NO: 3977769 - DNA, 25 bp, Homo sapien
ctcctgagtggggtctatctgagcc

SEQ ID NO: 3977770 - DNA, 25 bp, Homo sapien
ctggcatttccttcgtgacagtttc

SEQ ID NO: 3977771 - DNA, 25 bp, Homo sapien
tgctcctggacggttcccttgctca

SEQ ID NO: 3977772 - DNA, 25 bp, Homo sapien
gtggggtctatctgagcctggcatt

SEQ ID NO: 3977773 - DNA, 25 bp, Homo sapien
tttaactatagctggagtcagtgcc

SEQ ID NO: 3977774 - DNA, 25 bp, Homo sapien
gaaacgtctaagttcggtggcagaa

SEQ ID NO: 3977775 - DNA, 25 bp, Homo sapien
gaagtcacagccagagtgtaccctg

SEQ ID NO: 3977776 - DNA, 25 bp, Homo sapien
tatagattgctatgaagtcaggccc

SEQ ID NO: 3977777 - DNA, 25 bp, Homo sapien
tttgctgtgtggctcatcgggaaga

SEQ ID NO: 3977778 - DNA, 25 bp, Homo sapien
aagagggcaggtgtcgtattagcca

SEQ ID NO: 3977779 - DNA, 25 bp, Homo sapien
caacttgtgcttatctcctttgctg

SEQ ID NO: 3977780 - DNA, 25 bp, Homo sapien
ggtcagtgggtacagccggacacac

SEQ ID NO: 3977781 - DNA, 25 bp, Homo sapien
tctgctttgagcacaagctcagaga

SEQ ID NO: 3977782 - DNA, 25 bp, Homo sapien
caagctctccttgaagtgtaataaa

SEQ ID NO: 3977783 - DNA, 25 bp, Homo sapien
tctacattagatgttgaacccctca

SEQ ID NO: 3977784 - DNA, 25 bp, Homo sapien
gcccctctcccaaatgtgacttaga

SEQ ID NO: 3977785 - DNA, 25 bp, Homo sapien
tccctgtttagtggtcaagctctcc

SEQ ID NO: 3977786 - DNA, 25 bp, Homo sapien
tacccaatggtcaactctttgagaa

SEQ ID NO: 3977787 - DNA, 25 bp, Homo sapien
ctattatccgattgcaaatggtacc

SEQ ID NO: 3977788 - DNA, 25 bp, Homo sapien
tccagtaggtctagagcggagtctg

SEQ ID NO: 3977789 - DNA, 25 bp, Homo sapien
gatttgggtaattctgactctcttc

SEQ ID NO: 3977790 - DNA, 25 bp, Homo sapien
aactgttcttacagttgtgacctcc

SEQ ID NO: 3977791 - DNA, 25 bp, Homo sapien
tagctccaccgctggctcttcccct

SEQ ID NO: 3977792 - DNA, 25 bp, Homo sapien
tgttcttacagttgtgacctccttc

SEQ ID NO: 3977793 - DNA, 25 bp, Homo sapien
ttcttacagttgtgacctccttccc

SEQ ID NO: 3977794 - DNA, 25 bp, Homo sapien
tctgcccctgtatcccaagaagaga

SEQ ID NO: 3977795 - DNA, 25 bp, Homo sapien
gcttccgtcattctggtgtgcacat

SEQ ID NO: 3977796 - DNA, 25 bp, Homo sapien
agcacgtgggtgttccggcttccaa

SEQ ID NO: 3977797 - DNA, 25 bp, Homo sapien
tgtagcatgaagtaatgaggactct

SEQ ID NO: 3977798 - DNA, 25 bp, Homo sapien
ccatgaagctgccagatgttggagc

SEQ ID NO: 3977799 - DNA, 25 bp, Homo sapien
cattcgacgtctttgcttttcagcg

SEQ ID NO: 3977800 - DNA, 25 bp, Homo sapien
cactgttgcaggactattgtactta

SEQ ID NO: 3977801 - DNA, 25 bp, Homo sapien
ttttgacgttgctgagcattcgacg

SEQ ID NO: 3977802 - DNA, 25 bp, Homo sapien
cccacaagacgaggtcttgtttctg

SEQ ID NO: 3977803 - DNA, 25 bp, Homo sapien
caagcccaagcacaggagatagaca

SEQ ID NO: 3977804 - DNA, 25 bp, Homo sapien
tgtgctttgcttacacctaggtggc

SEQ ID NO: 3977805 - DNA, 25 bp, Homo sapien
gtatcttgggctacatgtttcctca

SEQ ID NO: 3977806 - DNA, 25 bp, Homo sapien
ccacctcactacagctgctggtgct

SEQ ID NO: 3977807 - DNA, 25 bp, Homo sapien
tccacctcactacagctgctggtgc

SEQ ID NO: 3977808 - DNA, 25 bp, Homo sapien
gtccacctcactacagctgctggtg

SEQ ID NO: 3977809 - DNA, 25 bp, Homo sapien
cgccttcagagttgccccacctaac

SEQ ID NO: 3977810 - DNA, 25 bp, Homo sapien
ggtgtcgccttcagagttgccccac

SEQ ID NO: 3977811 - DNA, 25 bp, Homo sapien
ctggtgtcgccttcagagttgcccc

SEQ ID NO: 3977812 - DNA, 25 bp, Homo sapien
tgtcgccttcagagttgccccacct

SEQ ID NO: 3977813 - DNA, 25 bp, Homo sapien
tggtcttggacctctagaaacaaca

SEQ ID NO: 3977814 - DNA, 25 bp, Homo sapien
tctccagctgtgtgcattatggtcc

SEQ ID NO: 3977815 - DNA, 25 bp, Homo sapien
ggccatagatgggtcaagaaacaca

SEQ ID NO: 3977816 - DNA, 25 bp, Homo sapien
gggagaaggaatctatattaatctt

SEQ ID NO: 3977817 - DNA, 25 bp, Homo sapien
ctaataacacgggaagatgttcacg

SEQ ID NO: 3977818 - DNA, 25 bp, Homo sapien
cgggaagatgttcacgatttataaa

SEQ ID NO: 3977819 - DNA, 25 bp, Homo sapien
taacacgggaagatgttcacgattt

SEQ ID NO: 3977820 - DNA, 25 bp, Homo sapien
cacgggaagatgttcacgatttata

SEQ ID NO: 3977821 - DNA, 25 bp, Homo sapien
atttccaagattctctgtgtttcag

SEQ ID NO: 3977822 - DNA, 25 bp, Homo sapien
catcagcttcttggtgcttcctgct

SEQ ID NO: 3977823 - DNA, 25 bp, Homo sapien
ctccatcagcttcttggtgcttcct

SEQ ID NO: 3977824 - DNA, 25 bp, Homo sapien
cagcttcttggtgcttcctgcttcc

SEQ ID NO: 3977825 - DNA, 25 bp, Homo sapien
ttccaaaacccgattctccatcagc

SEQ ID NO: 3977826 - DNA, 25 bp, Homo sapien
tggaaccagtgtcagccaatgggct

SEQ ID NO: 3977827 - DNA, 25 bp, Homo sapien
tgaagagcatgagtctccgtgccct

SEQ ID NO: 3977828 - DNA, 25 bp, Homo sapien
caggtgttacttccgatctgaggca

SEQ ID NO: 3977829 - DNA, 25 bp, Homo sapien
caatgggctctcacaggaaatggca

SEQ ID NO: 3977830 - DNA, 25 bp, Homo sapien
gatagatgaacttgatgcctccttt

SEQ ID NO: 3977831 - DNA, 25 bp, Homo sapien
tatgtaataatgcacggactctgat

SEQ ID NO: 3977832 - DNA, 25 bp, Homo sapien
ttactgagctttgctgtgccaagca

SEQ ID NO: 3977833 - DNA, 25 bp, Homo sapien
catacttggatgagggctcagccac

SEQ ID NO: 3977834 - DNA, 25 bp, Homo sapien
cgggggccatgctttgggaaaagct

SEQ ID NO: 3977835 - DNA, 25 bp, Homo sapien
caggacttccaggtactgtttgatt

SEQ ID NO: 3977836 - DNA, 25 bp, Homo sapien
tctcctcttgctgattcctgtagca

SEQ ID NO: 3977837 - DNA, 25 bp, Homo sapien
tgtatctctaaattcacttgatctc

SEQ ID NO: 3977838 - DNA, 25 bp, Homo sapien
aaagccatgtcttctactgagcctc

SEQ ID NO: 3977839 - DNA, 25 bp, Homo sapien
ttcttggtccacagatctaaagcca

SEQ ID NO: 3977840 - DNA, 25 bp, Homo sapien
ccttcttggtccacagatctaaagc

SEQ ID NO: 3977841 - DNA, 25 bp, Homo sapien
cagatctaaagccatgtcttctact

SEQ ID NO: 3977842 - DNA, 25 bp, Homo sapien
agttgacacggagagtaatgtatac

SEQ ID NO: 3977843 - DNA, 25 bp, Homo sapien
cagttgacacggagagtaatgtata

SEQ ID NO: 3977844 - DNA, 25 bp, Homo sapien
tcagttgacacggagagtaatgtat

SEQ ID NO: 3977845 - DNA, 25 bp, Homo sapien
tcaaacaataggagatcaatagccc

SEQ ID NO: 3977846 - DNA, 25 bp, Homo sapien
cagctctgtgccgatgttggctaac

SEQ ID NO: 3977847 - DNA, 25 bp, Homo sapien
cagagagccccggtaacttctctct

SEQ ID NO: 3977848 - DNA, 25 bp, Homo sapien
cacacttattctcactccagagggt

SEQ ID NO: 3977849 - DNA, 25 bp, Homo sapien
ttctctgcacattcaaccatccttt

SEQ ID NO: 3977850 - DNA, 25 bp, Homo sapien
tcaaccatcctttctccctacagct

SEQ ID NO: 3977851 - DNA, 25 bp, Homo sapien
tctccctacagctgcaggggttcct

SEQ ID NO: 3977852 - DNA, 25 bp, Homo sapien
ttctccctacagctgcaggggttcc

SEQ ID NO: 3977853 - DNA, 25 bp, Homo sapien
tacacacccgtgtggaagtcagcgg

SEQ ID NO: 3977854 - DNA, 25 bp, Homo sapien
aaataagtaagagtgagggatgccc

SEQ ID NO: 3977855 - DNA, 25 bp, Homo sapien
ggatgccctggatacacttgctgag

SEQ ID NO: 3977856 - DNA, 25 bp, Homo sapien
taatacctatcatcattgggagcaa

SEQ ID NO: 3977857 - DNA, 25 bp, Homo sapien
gactccctgtggttctagacaatta

SEQ ID NO: 3977858 - DNA, 25 bp, Homo sapien
catcttgtgagcagaggcattctcc

SEQ ID NO: 3977859 - DNA, 25 bp, Homo sapien
gatggcagtgctagtgttacctggc

SEQ ID NO: 3977860 - DNA, 25 bp, Homo sapien
ggtagcgtctcccttcagaacaatg

SEQ ID NO: 3977861 - DNA, 25 bp, Homo sapien
gagcaagcgtcattgtctatttgaa

SEQ ID NO: 3977862 - DNA, 25 bp, Homo sapien
cagccacaggttgactgagcaagcg

SEQ ID NO: 3977863 - DNA, 25 bp, Homo sapien
gaattcaccattaggagatgaagag

SEQ ID NO: 3977864 - DNA, 25 bp, Homo sapien
tgtcggctgcttttggaattcacca

SEQ ID NO: 3977865 - DNA, 25 bp, Homo sapien
catgttacaacatcatatttaagga

SEQ ID NO: 3977866 - DNA, 25 bp, Homo sapien
catatttaaggatgtataagagttc

SEQ ID NO: 3977867 - DNA, 25 bp, Homo sapien
aagagttctttatcactggcaataa

SEQ ID NO: 3977868 - DNA, 25 bp, Homo sapien
ctgtacacgcccaaggatgacgctg

SEQ ID NO: 3977869 - DNA, 25 bp, Homo sapien
gcaaacagctgttggttaatggccc

SEQ ID NO: 3977870 - DNA, 25 bp, Homo sapien
aacagctgttggttaatggccctgg

SEQ ID NO: 3977871 - DNA, 25 bp, Homo sapien
cacaggcaaacagctgttggttaat

SEQ ID NO: 3977872 - DNA, 25 bp, Homo sapien
ctgttggttaatggccctggagatc

SEQ ID NO: 3977873 - DNA, 25 bp, Homo sapien
tgacacccctaatcaaaaaggaaga

SEQ ID NO: 3977874 - DNA, 25 bp, Homo sapien
gggagatctgctctgttataagggt

SEQ ID NO: 3977875 - DNA, 25 bp, Homo sapien
tgtcaatctattcccctaaccgtaa

SEQ ID NO: 3977876 - DNA, 25 bp, Homo sapien
gctgatgatgcctttaggacaaagg

SEQ ID NO: 3977877 - DNA, 25 bp, Homo sapien
gattcatagctcttgggcaccacag

SEQ ID NO: 3977878 - DNA, 25 bp, Homo sapien
gaaggtaccctctgtgttgatgata

SEQ ID NO: 3977879 - DNA, 25 bp, Homo sapien
gttgatgatagcagattcatagctc

SEQ ID NO: 3977880 - DNA, 25 bp, Homo sapien
tcggggatcccagacacttcgggca

SEQ ID NO: 3977881 - DNA, 25 bp, Homo sapien
gacacacaactttgggacaataact

SEQ ID NO: 3977882 - DNA, 25 bp, Homo sapien
cacacaactttgggacaataacttc

SEQ ID NO: 3977883 - DNA, 25 bp, Homo sapien
cacaactttgggacaataacttcct

SEQ ID NO: 3977884 - DNA, 25 bp, Homo sapien
acacacaactttgggacaataactt

SEQ ID NO: 3977885 - DNA, 25 bp, Homo sapien
gatgtcaccccattcaaaaatcttt

SEQ ID NO: 3977886 - DNA, 25 bp, Homo sapien
aatctttcagcttcacagtagatta

SEQ ID NO: 3977887 - DNA, 25 bp, Homo sapien
atgcaatagatgtcaccccattcaa

SEQ ID NO: 3977888 - DNA, 25 bp, Homo sapien
agcttcacagtagattatttttccg

SEQ ID NO: 3977889 - DNA, 25 bp, Homo sapien
aaacactggcaagggttctacgaag

SEQ ID NO: 3977890 - DNA, 25 bp, Homo sapien
gggagaagcaattctacagcctctg

SEQ ID NO: 3977891 - DNA, 25 bp, Homo sapien
cgaaggactgggctactaaggaact

SEQ ID NO: 3977892 - DNA, 25 bp, Homo sapien
gctctgtagggcactgtggaaacac

SEQ ID NO: 3977893 - DNA, 25 bp, Homo sapien
tgaacagcctgtaaacagccagcct

SEQ ID NO: 3977894 - DNA, 25 bp, Homo sapien
tgagcatgtccctcaagggcaaagc

SEQ ID NO: 3977895 - DNA, 25 bp, Homo sapien
cagggcccgagtgggtgagcatgtc

SEQ ID NO: 3977896 - DNA, 25 bp, Homo sapien
tagagcataggaggttgaacagcct

SEQ ID NO: 3977897 - DNA, 25 bp, Homo sapien
tggggtgagggctgtccacattcct

SEQ ID NO: 3977898 - DNA, 25 bp, Homo sapien
gggctgtccacattcctagctgcca

SEQ ID NO: 3977899 - DNA, 25 bp, Homo sapien
acattcctagctgccacttcactgt

SEQ ID NO: 3977900 - DNA, 25 bp, Homo sapien
ttcctagctgccacttcactgtgac

SEQ ID NO: 3977901 - DNA, 25 bp, Homo sapien
tccagcagtaagaggagttaggcat

SEQ ID NO: 3977902 - DNA, 25 bp, Homo sapien
tctccagcagtaagaggagttaggc

SEQ ID NO: 3977903 - DNA, 25 bp, Homo sapien
gatatgtctccagcagtaagaggag

SEQ ID NO: 3977904 - DNA, 25 bp, Homo sapien
aggggaagataagatatgtctccag

SEQ ID NO: 3977905 - DNA, 25 bp, Homo sapien
gaaacttctggcactcactgacatg

SEQ ID NO: 3977906 - DNA, 25 bp, Homo sapien
aaggccagcttcttttggcgggtca

SEQ ID NO: 3977907 - DNA, 25 bp, Homo sapien
tttgtaggagtagcagaaacttctg

SEQ ID NO: 3977908 - DNA, 25 bp, Homo sapien
tactgaggatgattagaagtgtatt

SEQ ID NO: 3977909 - DNA, 25 bp, Homo sapien
catgtagaaatattgcctgggtctc

SEQ ID NO: 3977910 - DNA, 25 bp, Homo sapien
ccactgtcagtcaccttaagggagg

SEQ ID NO: 3977911 - DNA, 25 bp, Homo sapien
catcccggtgtcatttgaggctgga

SEQ ID NO: 3977912 - DNA, 25 bp, Homo sapien
gatcagtccacatccctgtaggtga

SEQ ID NO: 3977913 - DNA, 25 bp, Homo sapien
tgagctgggcatcagctcatctctt

SEQ ID NO: 3977914 - DNA, 25 bp, Homo sapien
cagaatttcctggttgtgtgtgctc

SEQ ID NO: 3977915 - DNA, 25 bp, Homo sapien
cttcagaatttcctggttgtgtgtg

SEQ ID NO: 3977916 - DNA, 25 bp, Homo sapien
ttcagaatttcctggttgtgtgtgc

SEQ ID NO: 3977917 - DNA, 25 bp, Homo sapien
tcagaatttcctggttgtgtgtgct

SEQ ID NO: 3977918 - DNA, 25 bp, Homo sapien
gcatcctttggaggtcactaaaaac

SEQ ID NO: 3977919 - DNA, 25 bp, Homo sapien
tctgtcagaatttatgatgtagcat

SEQ ID NO: 3977920 - DNA, 25 bp, Homo sapien
tgtcagaatttatgatgtagcatcc

SEQ ID NO: 3977921 - DNA, 25 bp, Homo sapien
gatgtagcatcctttggaggtcact

SEQ ID NO: 3977922 - DNA, 25 bp, Homo sapien
agtcaaagaagcctcttaaaacaag

SEQ ID NO: 3977923 - DNA, 25 bp, Homo sapien
tgtgggtgctagaagggcttgcaaa

SEQ ID NO: 3977924 - DNA, 25 bp, Homo sapien
aaacctgctgtgtgtaaaaggtggc

SEQ ID NO: 3977925 - DNA, 25 bp, Homo sapien
tgaaatggctgtgtccaactggttg

SEQ ID NO: 3977926 - DNA, 25 bp, Homo sapien
tgggttggccaacactgtactgtta

SEQ ID NO: 3977927 - DNA, 25 bp, Homo sapien
cctgctgtagcatgctagagggcaa

SEQ ID NO: 3977928 - DNA, 25 bp, Homo sapien
gggcaatgctgatgacgtattctct

SEQ ID NO: 3977929 - DNA, 25 bp, Homo sapien
tgacgaagtaaaagctgggttggcc

SEQ ID NO: 3977930 - DNA, 25 bp, Homo sapien
tggaagatgttctcaacggattctt

SEQ ID NO: 3977931 - DNA, 25 bp, Homo sapien
cggattcttattgatgataggagga

SEQ ID NO: 3977932 - DNA, 25 bp, Homo sapien
tgatgataggaggatcaatgggtaa

SEQ ID NO: 3977933 - DNA, 25 bp, Homo sapien
tgttctcaacggattcttattgatg

SEQ ID NO: 3977934 - DNA, 25 bp, Homo sapien
gagtcaatgcctggaccttaatgaa

SEQ ID NO: 3977935 - DNA, 25 bp, Homo sapien
tggagtcaatgcctggaccttaatg

SEQ ID NO: 3977936 - DNA, 25 bp, Homo sapien
tagagaataaactctggagtcaatg

SEQ ID NO: 3977937 - DNA, 25 bp, Homo sapien
ccttaatgaacagtggatgacatgt

SEQ ID NO: 3977938 - DNA, 25 bp, Homo sapien
cagcgccctccaagcctaatgtgct

SEQ ID NO: 3977939 - DNA, 25 bp, Homo sapien
caaagagcagccagcgccctccaag

SEQ ID NO: 3977940 - DNA, 25 bp, Homo sapien
cacgcagctcttggccacctcgctt

SEQ ID NO: 3977941 - DNA, 25 bp, Homo sapien
tgctccttctcaccacgcagctctt

SEQ ID NO: 3977942 - DNA, 25 bp, Homo sapien
tggtagcaactaaaaaacatagtag

SEQ ID NO: 3977943 - DNA, 25 bp, Homo sapien
cggcctaaacatagttttccaagca

SEQ ID NO: 3977944 - DNA, 25 bp, Homo sapien
tcactcgataggtgaggatttgcca

SEQ ID NO: 3977945 - DNA, 25 bp, Homo sapien
gaaccactggatgctggacttccag

SEQ ID NO: 3977946 - DNA, 25 bp, Homo sapien
ttccacatttgtcccatagcccaaa

SEQ ID NO: 3977947 - DNA, 25 bp, Homo sapien
ttccaagagtcaccactctgtccac

SEQ ID NO: 3977948 - DNA, 25 bp, Homo sapien
catttgtcccatagcccaaatctga

SEQ ID NO: 3977949 - DNA, 25 bp, Homo sapien
ccacatttgtcccatagcccaaatc

SEQ ID NO: 3977950 - DNA, 25 bp, Homo sapien
cactagtccgtctttccatgattgg

SEQ ID NO: 3977951 - DNA, 25 bp, Homo sapien
gattggtttgcacacggccacttca

SEQ ID NO: 3977952 - DNA, 25 bp, Homo sapien
gcctctttatccttcacgtgtgtgt

SEQ ID NO: 3977953 - DNA, 25 bp, Homo sapien
cgtgtgtgtcctgtccactagtccg

SEQ ID NO: 3977954 - DNA, 25 bp, Homo sapien
gatccaaatgagtgagttcaagttc

SEQ ID NO: 3977955 - DNA, 25 bp, Homo sapien
cacatggctatatgagatctctggc

SEQ ID NO: 3977956 - DNA, 25 bp, Homo sapien
tgattctcctacatagtcaaggctc

SEQ ID NO: 3977957 - DNA, 25 bp, Homo sapien
gattgtctgtgaaccctttccttcc

SEQ ID NO: 3977958 - DNA, 25 bp, Homo sapien
cagggagttcctccatggtatataa

SEQ ID NO: 3977959 - DNA, 25 bp, Homo sapien
ttcagcttctgttgcaacaagcttt

SEQ ID NO: 3977960 - DNA, 25 bp, Homo sapien
acagggagttcctccatggtatata

SEQ ID NO: 3977961 - DNA, 25 bp, Homo sapien
caacaagcttttatcgcaagggaaa

SEQ ID NO: 3977962 - DNA, 25 bp, Homo sapien
tctagcagctgggagtagaaagcct

SEQ ID NO: 3977963 - DNA, 25 bp, Homo sapien
ggacagtgttgttccagtcagcaga

SEQ ID NO: 3977964 - DNA, 25 bp, Homo sapien
caatattagtgaagtcccatggagg

SEQ ID NO: 3977965 - DNA, 25 bp, Homo sapien
caagcatgcccagagacaagggtct

SEQ ID NO: 3977966 - DNA, 25 bp, Homo sapien
gccagcagcagtgagtgtccagctg

SEQ ID NO: 3977967 - DNA, 25 bp, Homo sapien
gcagcagtgagtgtccagctgggag

SEQ ID NO: 3977968 - DNA, 25 bp, Homo sapien
gcaggatgttcaggggcagcaaggc

SEQ ID NO: 3977969 - DNA, 25 bp, Homo sapien
ctgggagcagtgggatcttgagcat

SEQ ID NO: 3977970 - DNA, 25 bp, Homo sapien
cttttcacgatttccagcagggcac

SEQ ID NO: 3977971 - DNA, 25 bp, Homo sapien
tgtaaactccacgagagcggagact

SEQ ID NO: 3977972 - DNA, 25 bp, Homo sapien
tcctcaagtgcgaagggagtattgc

SEQ ID NO: 3977973 - DNA, 25 bp, Homo sapien
gaaaggtacccagcaacagacaaag

SEQ ID NO: 3977974 - DNA, 25 bp, Homo sapien
tttggtcagctcaagttcaggactg

SEQ ID NO: 3977975 - DNA, 25 bp, Homo sapien
tgccagcagaatggtactggccctg

SEQ ID NO: 3977976 - DNA, 25 bp, Homo sapien
tgctgctctagtctcattggaagtg

SEQ ID NO: 3977977 - DNA, 25 bp, Homo sapien
gaatcattcccgtctttagtccagt

SEQ ID NO: 3977978 - DNA, 25 bp, Homo sapien
atctctactaggagtacaaaaatga

SEQ ID NO: 3977979 - DNA, 25 bp, Homo sapien
ctactcgggatgctaaggcaagaaa

SEQ ID NO: 3977980 - DNA, 25 bp, Homo sapien
ctactaggagtacaaaaatgagctg

SEQ ID NO: 3977981 - DNA, 25 bp, Homo sapien
tcgggatgctaaggcaagaaaatca

SEQ ID NO: 3977982 - DNA, 25 bp, Homo sapien
gaagaacccattgaagagtgacagc

SEQ ID NO: 3977983 - DNA, 25 bp, Homo sapien
tctaagactatgtgtgcccaaaagc

SEQ ID NO: 3977984 - DNA, 25 bp, Homo sapien
tggccaccgtcacagtccaggatga

SEQ ID NO: 3977985 - DNA, 25 bp, Homo sapien
tatgcccggagtttgaagaacctcg

SEQ ID NO: 3977986 - DNA, 25 bp, Homo sapien
acagtcggcgcaggtcagtgggtgc

SEQ ID NO: 3977987 - DNA, 25 bp, Homo sapien
agtcggcgcaggtcagtgggtgcgt

SEQ ID NO: 3977988 - DNA, 25 bp, Homo sapien
tcggcgcaggtcagtgggtgcgtgc

SEQ ID NO: 3977989 - DNA, 25 bp, Homo sapien
cggcgcaggtcagtgggtgcgtgca

SEQ ID NO: 3977990 - DNA, 25 bp, Homo sapien
tagggtctcccgataatagggtctc

SEQ ID NO: 3977991 - DNA, 25 bp, Homo sapien
tggacaagttatcacctgagcctca

SEQ ID NO: 3977992 - DNA, 25 bp, Homo sapien
tctgagcagaaaggacttgatccgg

SEQ ID NO: 3977993 - DNA, 25 bp, Homo sapien
tcagtaactgtcagccaagccttgg

SEQ ID NO: 3977994 - DNA, 25 bp, Homo sapien
cagttacaaaggctgcctgtgaccc

SEQ ID NO: 3977995 - DNA, 25 bp, Homo sapien
cctggaaatgggtggatgagaacag

SEQ ID NO: 3977996 - DNA, 25 bp, Homo sapien
ctgtgacccagcactacactcccta

SEQ ID NO: 3977997 - DNA, 25 bp, Homo sapien
ttagaaggggcaccggggaatcaca

SEQ ID NO: 3977998 - DNA, 25 bp, Homo sapien
gccttgtggtcaaaagccgagtcca

SEQ ID NO: 3977999 - DNA, 25 bp, Homo sapien
cttgccctggatgggttgccccaag

SEQ ID NO: 3978000 - DNA, 25 bp, Homo sapien
tgcaaaatcaagtggcttcagggcc

SEQ ID NO: 3978001 - DNA, 25 bp, Homo sapien
gaggctgacctggacttcccggatt

SEQ ID NO: 3978002 - DNA, 25 bp, Homo sapien
gtggccgtgggtccacgtccatgga

SEQ ID NO: 3978003 - DNA, 25 bp, Homo sapien
tggccgtgggtccacgtccatggac

SEQ ID NO: 3978004 - DNA, 25 bp, Homo sapien
gccgtgggtccacgtccatggaccc

SEQ ID NO: 3978005 - DNA, 25 bp, Homo sapien
cgtgggtccacgtccatggacccac

SEQ ID NO: 3978006 - DNA, 25 bp, Homo sapien
agcttctgtctgtgcgacatccaca

SEQ ID NO: 3978007 - DNA, 25 bp, Homo sapien
cagaagtttccacgaccctttgcca

SEQ ID NO: 3978008 - DNA, 25 bp, Homo sapien
ctaagaacagtaggaacagctcaga

SEQ ID NO: 3978009 - DNA, 25 bp, Homo sapien
cacactacccaccaggagagacggg

SEQ ID NO: 3978010 - DNA, 25 bp, Homo sapien
ccggccgcggagcccctgcacgtcc

SEQ ID NO: 3978011 - DNA, 25 bp, Homo sapien
agcccctgcacgtccggctcccgct

SEQ ID NO: 3978012 - DNA, 25 bp, Homo sapien
cgctcgcgctctcggctcgagctcc

SEQ ID NO: 3978013 - DNA, 25 bp, Homo sapien
caggctcggagcaggggttcgggct

SEQ ID NO: 3978014 - DNA, 25 bp, Homo sapien
ggctgtagttcagaggccaagcccg

SEQ ID NO: 3978015 - DNA, 25 bp, Homo sapien
gggcccaggctttgagaccctctaa

SEQ ID NO: 3978016 - DNA, 25 bp, Homo sapien
gaacagagcgggttctccatcccct

SEQ ID NO: 3978017 - DNA, 25 bp, Homo sapien
catcccttccgcatcagttgcgtgg

SEQ ID NO: 3978018 - DNA, 25 bp, Homo sapien
tgtacttgcggcatctgcgtgtggt

SEQ ID NO: 3978019 - DNA, 25 bp, Homo sapien
tgcgtgtggtggaactgaccgaaac

SEQ ID NO: 3978020 - DNA, 25 bp, Homo sapien
tccgctgcctgtccgatactagtca

SEQ ID NO: 3978021 - DNA, 25 bp, Homo sapien
tgaccgaaacgcttgcggagctgcg

SEQ ID NO: 3978022 - DNA, 25 bp, Homo sapien
atgggacccacgccaagccaaggtc

SEQ ID NO: 3978023 - DNA, 25 bp, Homo sapien
tgccatccttgttgacagggctcat

SEQ ID NO: 3978024 - DNA, 25 bp, Homo sapien
tccttgttgacagggctcatagagg

SEQ ID NO: 3978025 - DNA, 25 bp, Homo sapien
ctctttctaaacttcgtaaatctat

SEQ ID NO: 3978026 - DNA, 25 bp, Homo sapien
aacttcgtaaatctatttcctgcca

SEQ ID NO: 3978027 - DNA, 25 bp, Homo sapien
tgctaagggcattggtacactgtgc

SEQ ID NO: 3978028 - DNA, 25 bp, Homo sapien
gaatgatgctaagggcattggtaca

SEQ ID NO: 3978029 - DNA, 25 bp, Homo sapien
cacctgaatgatgctaagggcattg

SEQ ID NO: 3978030 - DNA, 25 bp, Homo sapien
ggcattggtacactgtgctgcaagg

SEQ ID NO: 3978031 - DNA, 25 bp, Homo sapien
caagcagccaaattctctaagagtg

SEQ ID NO: 3978032 - DNA, 25 bp, Homo sapien
aagagtggtgtaaatgtcagtttca

SEQ ID NO: 3978033 - DNA, 25 bp, Homo sapien
tccattctaaaagccccgatcaact

SEQ ID NO: 3978034 - DNA, 25 bp, Homo sapien
tttgtggttcttttcaagcagccaa

SEQ ID NO: 3978035 - DNA, 25 bp, Homo sapien
aaggcacctggagttaaagggtgct

SEQ ID NO: 3978036 - DNA, 25 bp, Homo sapien
agggaccggtcattgaaggcacctg

SEQ ID NO: 3978037 - DNA, 25 bp, Homo sapien
gcagggaccggtcattgaaggcacc

SEQ ID NO: 3978038 - DNA, 25 bp, Homo sapien
agttaaagggtgctgtctgatacca

SEQ ID NO: 3978039 - DNA, 25 bp, Homo sapien
cttgagggttcctctcaaggaaaag

SEQ ID NO: 3978040 - DNA, 25 bp, Homo sapien
tgagggttcctctcaaggaaaagcg

SEQ ID NO: 3978041 - DNA, 25 bp, Homo sapien
ttgagggttcctctcaaggaaaagc

SEQ ID NO: 3978042 - DNA, 25 bp, Homo sapien
ctgtaagctgatttctcggtcctca

SEQ ID NO: 3978043 - DNA, 25 bp, Homo sapien
tgtaagctgatttctcggtcctcat

SEQ ID NO: 3978044 - DNA, 25 bp, Homo sapien
gtcaatgagtttccagcttgcagtg

SEQ ID NO: 3978045 - DNA, 25 bp, Homo sapien
tccctggtggcttaaggcttgggct

SEQ ID NO: 3978046 - DNA, 25 bp, Homo sapien
ggcttaaggcttgggctgtcaatga

SEQ ID NO: 3978047 - DNA, 25 bp, Homo sapien
cagtgtgtgactctaccctagagga

SEQ ID NO: 3978048 - DNA, 25 bp, Homo sapien
aggaacatgaatctgttcagtcaca

SEQ ID NO: 3978049 - DNA, 25 bp, Homo sapien
caaaagcaccgaggcatctcaggga

SEQ ID NO: 3978050 - DNA, 25 bp, Homo sapien
catgaatctgttcagtcacaaaagc

SEQ ID NO: 3978051 - DNA, 25 bp, Homo sapien
accacagctccggtctggggccagc

SEQ ID NO: 3978052 - DNA, 25 bp, Homo sapien
ctggcgaggaagccatgtggtccat

SEQ ID NO: 3978053 - DNA, 25 bp, Homo sapien
cattcctggaccaaaagtggccact

SEQ ID NO: 3978054 - DNA, 25 bp, Homo sapien
cagagccatgtgtgacttcctaagc

SEQ ID NO: 3978055 - DNA, 25 bp, Homo sapien
caatgtgacctgaaggatggaccct

SEQ ID NO: 3978056 - DNA, 25 bp, Homo sapien
ggttctaagcaaggcttcagcttca

SEQ ID NO: 3978057 - DNA, 25 bp, Homo sapien
tcttttcatttggccccagagaagg

SEQ ID NO: 3978058 - DNA, 25 bp, Homo sapien
ttcttttcatttggccccagagaag

SEQ ID NO: 3978059 - DNA, 25 bp, Homo sapien
ggtggtcctctccatatagaacacc

SEQ ID NO: 3978060 - DNA, 25 bp, Homo sapien
catggtgtagtggaaatggatggca

SEQ ID NO: 3978061 - DNA, 25 bp, Homo sapien
gaagactctcagttattccttccat

SEQ ID NO: 3978062 - DNA, 25 bp, Homo sapien
aggggggcatttatgaagactctca

SEQ ID NO: 3978063 - DNA, 25 bp, Homo sapien
caacttgagctgataggacaactct

SEQ ID NO: 3978064 - DNA, 25 bp, Homo sapien
caagagagtggacgggtagcacctt

SEQ ID NO: 3978065 - DNA, 25 bp, Homo sapien
aacttgagctgataggacaactctc

SEQ ID NO: 3978066 - DNA, 25 bp, Homo sapien
ccacatacaagagagtggacgggta

SEQ ID NO: 3978067 - DNA, 25 bp, Homo sapien
accagtggggtgggggagtgtctgc

SEQ ID NO: 3978068 - DNA, 25 bp, Homo sapien
agtggggtgggggagtgtctgcttt

SEQ ID NO: 3978069 - DNA, 25 bp, Homo sapien
ggtgggggagtgtctgcttttcctc

SEQ ID NO: 3978070 - DNA, 25 bp, Homo sapien
tggggtgggggagtgtctgcttttc

SEQ ID NO: 3978071 - DNA, 25 bp, Homo sapien
tggtgttatcccgagagaccttggg

SEQ ID NO: 3978072 - DNA, 25 bp, Homo sapien
gtttggctggtgttatcccgagaga

SEQ ID NO: 3978073 - DNA, 25 bp, Homo sapien
ccgagagaccttgggatatgggaac

SEQ ID NO: 3978074 - DNA, 25 bp, Homo sapien
cacttacctccgagggtttggctgg

SEQ ID NO: 3978075 - DNA, 25 bp, Homo sapien
attgcaactccttccgccgcgtgga

SEQ ID NO: 3978076 - DNA, 25 bp, Homo sapien
gccgcgtggacaggttcagcactct

SEQ ID NO: 3978077 - DNA, 25 bp, Homo sapien
tcagcactctcggagtcgatgtcat

SEQ ID NO: 3978078 - DNA, 25 bp, Homo sapien
gatgtcattattcgccatcgacgcg

SEQ ID NO: 3978079 - DNA, 25 bp, Homo sapien
tctgccagggttgtgacatgggcat

SEQ ID NO: 3978080 - DNA, 25 bp, Homo sapien
ccttctgccagggttgtgacatggg

SEQ ID NO: 3978081 - DNA, 25 bp, Homo sapien
gcctgtggtcccctgcgaatgtggg

SEQ ID NO: 3978082 - DNA, 25 bp, Homo sapien
aatgtggggcctccgcagtgcttcc

SEQ ID NO: 3978083 - DNA, 25 bp, Homo sapien
tggagctgggaataagctgcctcct

SEQ ID NO: 3978084 - DNA, 25 bp, Homo sapien
ctggagctgggaataagctgcctcc

SEQ ID NO: 3978085 - DNA, 25 bp, Homo sapien
gagctgggaataagctgcctcctca

SEQ ID NO: 3978086 - DNA, 25 bp, Homo sapien
agctgggaataagctgcctcctcat

SEQ ID NO: 3978087 - DNA, 25 bp, Homo sapien
tcagctcaagcacacaagatggaac

SEQ ID NO: 3978088 - DNA, 25 bp, Homo sapien
aaggcattggcagggctagtttctc

SEQ ID NO: 3978089 - DNA, 25 bp, Homo sapien
gcaaaatgtccagctctagtcccag

SEQ ID NO: 3978090 - DNA, 25 bp, Homo sapien
tgtataaggctcaggatgggatcca

SEQ ID NO: 3978091 - DNA, 25 bp, Homo sapien
taacctcaaaaaggtatcatatgga

SEQ ID NO: 3978092 - DNA, 25 bp, Homo sapien
taaaatgacttacagtaatctggaa

SEQ ID NO: 3978093 - DNA, 25 bp, Homo sapien
aggttttattaaggcactgacttgc

SEQ ID NO: 3978094 - DNA, 25 bp, Homo sapien
tgtgtgtgaacatattgactaacct

SEQ ID NO: 3978095 - DNA, 25 bp, Homo sapien
gcaaacacagcattcatggctgtga

SEQ ID NO: 3978096 - DNA, 25 bp, Homo sapien
tcctgcaaacacagcattcatggct

SEQ ID NO: 3978097 - DNA, 25 bp, Homo sapien
gaaatgtgggagaagccacggcact

SEQ ID NO: 3978098 - DNA, 25 bp, Homo sapien
atgtgggagaagccacggcactctc

SEQ ID NO: 3978099 - DNA, 25 bp, Homo sapien
cctcaggttggtgcctaggaggacc

SEQ ID NO: 3978100 - DNA, 25 bp, Homo sapien
ggctcttggaactttcccagaacaa

SEQ ID NO: 3978101 - DNA, 25 bp, Homo sapien
gaagtggccgactaaggctcttgga

SEQ ID NO: 3978102 - DNA, 25 bp, Homo sapien
agaacaacgatctaactccccactg

SEQ ID NO: 3978103 - DNA, 25 bp, Homo sapien
tgcctcccactttgctgctgagcca

SEQ ID NO: 3978104 - DNA, 25 bp, Homo sapien
caggcagctgtagaatttacaactg

SEQ ID NO: 3978105 - DNA, 25 bp, Homo sapien
tttggagtcgtggacactggcccag

SEQ ID NO: 3978106 - DNA, 25 bp, Homo sapien
ccatcagttccctgctttggagtcg

SEQ ID NO: 3978107 - DNA, 25 bp, Homo sapien
ggagtgattagaactgcttccctcc

SEQ ID NO: 3978108 - DNA, 25 bp, Homo sapien
cggagtgattagaactgcttccctc

SEQ ID NO: 3978109 - DNA, 25 bp, Homo sapien
gagtgattagaactgcttccctcca

SEQ ID NO: 3978110 - DNA, 25 bp, Homo sapien
gtgattagaactgcttccctccaca

SEQ ID NO: 3978111 - DNA, 25 bp, Homo sapien
tttgtggtgagtagacactggcctt

SEQ ID NO: 3978112 - DNA, 25 bp, Homo sapien
ttttgtggtgagtagacactggcct

SEQ ID NO: 3978113 - DNA, 25 bp, Homo sapien
tttttgtggtgagtagacactggcc

SEQ ID NO: 3978114 - DNA, 25 bp, Homo sapien
ggcaacttgcacttccaactcgggt

SEQ ID NO: 3978115 - DNA, 25 bp, Homo sapien
agctctagatcattcgcctcccaag

SEQ ID NO: 3978116 - DNA, 25 bp, Homo sapien
tgactgaaggtttagctagttccaa

SEQ ID NO: 3978117 - DNA, 25 bp, Homo sapien
tatcactgcttaacccactagggtc

SEQ ID NO: 3978118 - DNA, 25 bp, Homo sapien
ttggtggaggtcctgaacctccctg

SEQ ID NO: 3978119 - DNA, 25 bp, Homo sapien
tggtggaggtcctgaacctccctgt

SEQ ID NO: 3978120 - DNA, 25 bp, Homo sapien
ctgctaggtttctggagcgtctctc

SEQ ID NO: 3978121 - DNA, 25 bp, Homo sapien
gcgtctctctctccataggtcttct

SEQ ID NO: 3978122 - DNA, 25 bp, Homo sapien
ctctctccataggtcttctgtgctt

SEQ ID NO: 3978123 - DNA, 25 bp, Homo sapien
actgaggtggcaattataggactat

SEQ ID NO: 3978124 - DNA, 25 bp, Homo sapien
caaggacttgacacatggcagaggc

SEQ ID NO: 3978125 - DNA, 25 bp, Homo sapien
agagagctcaggaatcaaggacttg

SEQ ID NO: 3978126 - DNA, 25 bp, Homo sapien
actccttcgttttctgtaactcaag

SEQ ID NO: 3978127 - DNA, 25 bp, Homo sapien
cttcgttttctgtaactcaagagag

SEQ ID NO: 3978128 - DNA, 25 bp, Homo sapien
gggaggcagcgggaactccccatgg

SEQ ID NO: 3978129 - DNA, 25 bp, Homo sapien
cagcgggaactccccatggagcagc

SEQ ID NO: 3978130 - DNA, 25 bp, Homo sapien
gcagcgggaactccccatggagcag

SEQ ID NO: 3978131 - DNA, 25 bp, Homo sapien
aggcagcgggaactccccatggagc

SEQ ID NO: 3978132 - DNA, 25 bp, Homo sapien
ctgccaagctggtagtgggtgtaag

SEQ ID NO: 3978133 - DNA, 25 bp, Homo sapien
agcagggaggctctcggggtccaaa

SEQ ID NO: 3978134 - DNA, 25 bp, Homo sapien
gccagtgtccgtgattccaaaggag

SEQ ID NO: 3978135 - DNA, 25 bp, Homo sapien
ggaggctctcggggtccaaaagcca

SEQ ID NO: 3978136 - DNA, 25 bp, Homo sapien
gggagtggagagatagagcactatt

SEQ ID NO: 3978137 - DNA, 25 bp, Homo sapien
aagggagtggagagatagagcacta

SEQ ID NO: 3978138 - DNA, 25 bp, Homo sapien
ggaagggagtggagagatagagcac

SEQ ID NO: 3978139 - DNA, 25 bp, Homo sapien
ctgccggggaggaagggagtggaga

SEQ ID NO: 3978140 - DNA, 25 bp, Homo sapien
ttcctcctgcgtatgtctgaggcat

SEQ ID NO: 3978141 - DNA, 25 bp, Homo sapien
taaccacacataagcagtagctggg

SEQ ID NO: 3978142 - DNA, 25 bp, Homo sapien
aattaaccacacataagcagtagct

SEQ ID NO: 3978143 - DNA, 25 bp, Homo sapien
acagatgttcctcctgcgtatgtct

SEQ ID NO: 3978144 - DNA, 25 bp, Homo sapien
cacggcagtcaaaggggttggtgtt

SEQ ID NO: 3978145 - DNA, 25 bp, Homo sapien
aaattgtttcaacatcccaagtcac

SEQ ID NO: 3978146 - DNA, 25 bp, Homo sapien
tcccaagtcacacctgatagaagtc

SEQ ID NO: 3978147 - DNA, 25 bp, Homo sapien
tctctggggtgtcacggcagtcaaa

SEQ ID NO: 3978148 - DNA, 25 bp, Homo sapien
gcacagccaaaactactagagggct

SEQ ID NO: 3978149 - DNA, 25 bp, Homo sapien
ttgacttgcacagccaaaactacta

SEQ ID NO: 3978150 - DNA, 25 bp, Homo sapien
agccaaaactactagagggctggcc

SEQ ID NO: 3978151 - DNA, 25 bp, Homo sapien
ttgcacagccaaaactactagaggg

SEQ ID NO: 3978152 - DNA, 25 bp, Homo sapien
tagattctttcggtgcagactccac

SEQ ID NO: 3978153 - DNA, 25 bp, Homo sapien
acctggccgagtgggccagattgct

SEQ ID NO: 3978154 - DNA, 25 bp, Homo sapien
cacagaacgtggtacatgccagcaa

SEQ ID NO: 3978155 - DNA, 25 bp, Homo sapien
tccagatatagagcgaggtttgcct

SEQ ID NO: 3978156 - DNA, 25 bp, Homo sapien
tgtcgcagaccttcacgtgctgagg

SEQ ID NO: 3978157 - DNA, 25 bp, Homo sapien
caatacggagccctgacaggaaata

SEQ ID NO: 3978158 - DNA, 25 bp, Homo sapien
gggtcggctcagtcaacagcagttt

SEQ ID NO: 3978159 - DNA, 25 bp, Homo sapien
cagcattgtgctgggcttgcaacat

SEQ ID NO: 3978160 - DNA, 25 bp, Homo sapien
ggattcttgccagtggccataaaaa

SEQ ID NO: 3978161 - DNA, 25 bp, Homo sapien
ttctttgccactcagtaaggttatg

SEQ ID NO: 3978162 - DNA, 25 bp, Homo sapien
tcactccgctgaaatatcttgtggg

SEQ ID NO: 3978163 - DNA, 25 bp, Homo sapien
tgttatagccatgtaggaactctgg

SEQ ID NO: 3978164 - DNA, 25 bp, Homo sapien
acgtctggtccacagtaggtactta

SEQ ID NO: 3978165 - DNA, 25 bp, Homo sapien
cataagcagaaaccggataccctta

SEQ ID NO: 3978166 - DNA, 25 bp, Homo sapien
ccggatacccttagaatcagaagta

SEQ ID NO: 3978167 - DNA, 25 bp, Homo sapien
agaaaccggatacccttagaatcag

SEQ ID NO: 3978168 - DNA, 25 bp, Homo sapien
tacccttagaatcagaagtatctcc

SEQ ID NO: 3978169 - DNA, 25 bp, Homo sapien
gacctatgaacgttggtcccagcag

SEQ ID NO: 3978170 - DNA, 25 bp, Homo sapien
agatacatcccttacctggaggcag

SEQ ID NO: 3978171 - DNA, 25 bp, Homo sapien
ccattggtcctaagaagcagtctca

SEQ ID NO: 3978172 - DNA, 25 bp, Homo sapien
ccatcaggatgggagcactacttcc

SEQ ID NO: 3978173 - DNA, 25 bp, Homo sapien
ttgttcaattccagtggaatacagg

SEQ ID NO: 3978174 - DNA, 25 bp, Homo sapien
ttatccccactaattgcaagtctcc

SEQ ID NO: 3978175 - DNA, 25 bp, Homo sapien
cttcttcctttatccccactaattg

SEQ ID NO: 3978176 - DNA, 25 bp, Homo sapien
aattccagtggaatacaggaattgg

SEQ ID NO: 3978177 - DNA, 25 bp, Homo sapien
ttcgcacattcctgggcttagatcc

SEQ ID NO: 3978178 - DNA, 25 bp, Homo sapien
tcttcatcattccagacgcaaagac

SEQ ID NO: 3978179 - DNA, 25 bp, Homo sapien
cattccagacgcaaagacctgatct

SEQ ID NO: 3978180 - DNA, 25 bp, Homo sapien
tagatccacattccctgggtcttca

SEQ ID NO: 3978181 - DNA, 25 bp, Homo sapien
tgtagtactttccacaggcactgcc

SEQ ID NO: 3978182 - DNA, 25 bp, Homo sapien
aaatgagcccatccacagggctaag

SEQ ID NO: 3978183 - DNA, 25 bp, Homo sapien
ggaacctgacaactgtctcctcggg

SEQ ID NO: 3978184 - DNA, 25 bp, Homo sapien
gatgggtatgcagttcagctgagca

SEQ ID NO: 3978185 - DNA, 25 bp, Homo sapien
tctgaattgcatgcccctctgtggc

SEQ ID NO: 3978186 - DNA, 25 bp, Homo sapien
catccgctgttctctactggtgcct

SEQ ID NO: 3978187 - DNA, 25 bp, Homo sapien
gagcagcatccgctgttctctactg

SEQ ID NO: 3978188 - DNA, 25 bp, Homo sapien
cattttggcatctcatgttgagcag

SEQ ID NO: 3978189 - DNA, 25 bp, Homo sapien
agcagtggacgctgaaaatgcgaac

SEQ ID NO: 3978190 - DNA, 25 bp, Homo sapien
ctgctgagtgaaaatgagaaccacg

SEQ ID NO: 3978191 - DNA, 25 bp, Homo sapien
gtgaaaatgagaaccacgctgcccg

SEQ ID NO: 3978192 - DNA, 25 bp, Homo sapien
tggacgctgaaaatgcgaactgctg

SEQ ID NO: 3978193 - DNA, 25 bp, Homo sapien
agacaaggcccgacgactgtggcga

SEQ ID NO: 3978194 - DNA, 25 bp, Homo sapien
gtaaccaagagttctctgctcctgt

SEQ ID NO: 3978195 - DNA, 25 bp, Homo sapien
gataacaggaaaccataaataaggc

SEQ ID NO: 3978196 - DNA, 25 bp, Homo sapien
gacaatgaatgatgagacctgggtt

SEQ ID NO: 3978197 - DNA, 25 bp, Homo sapien
gagacagcttctgattgatccaggt

SEQ ID NO: 3978198 - DNA, 25 bp, Homo sapien
tctgattgatccaggtgggtcacat

SEQ ID NO: 3978199 - DNA, 25 bp, Homo sapien
catgctcgctcttggtcagataaag

SEQ ID NO: 3978200 - DNA, 25 bp, Homo sapien
ggtgggtcacatgctcgctcttggt

SEQ ID NO: 3978201 - DNA, 25 bp, Homo sapien
tgggtcccttggaactgggtagctc

SEQ ID NO: 3978202 - DNA, 25 bp, Homo sapien
cttgatgggcagttctgccaacact

SEQ ID NO: 3978203 - DNA, 25 bp, Homo sapien
gatgggcagttctgccaacactggg

SEQ ID NO: 3978204 - DNA, 25 bp, Homo sapien
gccaacactgggtcccttggaactg

SEQ ID NO: 3978205 - DNA, 25 bp, Homo sapien
ctgggaatacttgtattctgacttc

SEQ ID NO: 3978206 - DNA, 25 bp, Homo sapien
ggtcttgatctgaagtaatcaggct

SEQ ID NO: 3978207 - DNA, 25 bp, Homo sapien
ctgacttctggtcttgatctgaagt

SEQ ID NO: 3978208 - DNA, 25 bp, Homo sapien
agtaatcaggcttttgactctgtgc

SEQ ID NO: 3978209 - DNA, 25 bp, Homo sapien
ccaaataggtttttatgatcctgga

SEQ ID NO: 3978210 - DNA, 25 bp, Homo sapien
gggtttagaactcttctgttcagct

SEQ ID NO: 3978211 - DNA, 25 bp, Homo sapien
tttttctcagttggcatggctaacc

SEQ ID NO: 3978212 - DNA, 25 bp, Homo sapien
caaatgacatcatctgtgggtttag

SEQ ID NO: 3978213 - DNA, 25 bp, Homo sapien
aatgactgctttccacatctagtgg

SEQ ID NO: 3978214 - DNA, 25 bp, Homo sapien
cttgtagctaggcatgatgccacag

SEQ ID NO: 3978215 - DNA, 25 bp, Homo sapien
tctagtgggctagactgcacttcca

SEQ ID NO: 3978216 - DNA, 25 bp, Homo sapien
ggcatgatgccacagtaatgactgc

SEQ ID NO: 3978217 - DNA, 25 bp, Homo sapien
tgacccagtttcagaaccgagactg

SEQ ID NO: 3978218 - DNA, 25 bp, Homo sapien
gcattaatcatgcagctcctgagtg

SEQ ID NO: 3978219 - DNA, 25 bp, Homo sapien
ccgagactgtccaattgtgttcgca

SEQ ID NO: 3978220 - DNA, 25 bp, Homo sapien
tgtgttcgcattggtgcattaatca

SEQ ID NO: 3978221 - DNA, 25 bp, Homo sapien
taaatggtgtgcacaagatcacagg

SEQ ID NO: 3978222 - DNA, 25 bp, Homo sapien
tcacgaacgtagaaatagccagaaa

SEQ ID NO: 3978223 - DNA, 25 bp, Homo sapien
caagacctaacttttgctgttgaga

SEQ ID NO: 3978224 - DNA, 25 bp, Homo sapien
caaaagactacatgtgcaaggatcg

SEQ ID NO: 3978225 - DNA, 25 bp, Homo sapien
gcacacacaggaatctgggcttcat

SEQ ID NO: 3978226 - DNA, 25 bp, Homo sapien
cacacacaggaatctgggcttcatc

SEQ ID NO: 3978227 - DNA, 25 bp, Homo sapien
agcaaaggagcggatgtagcgtttt

SEQ ID NO: 3978228 - DNA, 25 bp, Homo sapien
ttctagcaaaggagcggatgtagcg

SEQ ID NO: 3978229 - DNA, 25 bp, Homo sapien
caaaggagcggatgtagcgtttttc

SEQ ID NO: 3978230 - DNA, 25 bp, Homo sapien
ggagcggatgtagcgtttttcagct

SEQ ID NO: 3978231 - DNA, 25 bp, Homo sapien
gttggccacaactgagacagggctt

SEQ ID NO: 3978232 - DNA, 25 bp, Homo sapien
ctgagagttggccacaactgagaca

SEQ ID NO: 3978233 - DNA, 25 bp, Homo sapien
ctgcaccacctacatctctgagagt

SEQ ID NO: 3978234 - DNA, 25 bp, Homo sapien
gcaccacctacatctctgagagttg

SEQ ID NO: 3978235 - DNA, 25 bp, Homo sapien
catccaatgcccaaacatctctccc

SEQ ID NO: 3978236 - DNA, 25 bp, Homo sapien
atccaatgcccaaacatctctccca

SEQ ID NO: 3978237 - DNA, 25 bp, Homo sapien
acatctctgattcacgtttgttgaa

SEQ ID NO: 3978238 - DNA, 25 bp, Homo sapien
ggccatggcctgaaatctccgatgt

SEQ ID NO: 3978239 - DNA, 25 bp, Homo sapien
aggcaaatgggccaacacttgttgg

SEQ ID NO: 3978240 - DNA, 25 bp, Homo sapien
gagctgggcataaagagccctcact

SEQ ID NO: 3978241 - DNA, 25 bp, Homo sapien
tatccattagggttgattccgctgg

SEQ ID NO: 3978242 - DNA, 25 bp, Homo sapien
ttagggttgattccgctggttggcc

SEQ ID NO: 3978243 - DNA, 25 bp, Homo sapien
cattagggttgattccgctggttgg

SEQ ID NO: 3978244 - DNA, 25 bp, Homo sapien
tccattagggttgattccgctggtt

SEQ ID NO: 3978245 - DNA, 25 bp, Homo sapien
ttatttgaatggctgatctgtgtaa

SEQ ID NO: 3978246 - DNA, 25 bp, Homo sapien
atttgaatggctgatctgtgtaatc

SEQ ID NO: 3978247 - DNA, 25 bp, Homo sapien
ttttatttgaatggctgatctgtgt

SEQ ID NO: 3978248 - DNA, 25 bp, Homo sapien
tgatctgtgtaatcacagaggccag

SEQ ID NO: 3978249 - DNA, 25 bp, Homo sapien
aggtgctcttcacggtgcttgcgtg

SEQ ID NO: 3978250 - DNA, 25 bp, Homo sapien
tggaggtgctcttcacggtgcttgc

SEQ ID NO: 3978251 - DNA, 25 bp, Homo sapien
gaggtgctcttcacggtgcttgcgt

SEQ ID NO: 3978252 - DNA, 25 bp, Homo sapien
tgctcttcacggtgcttgcgtgctt

SEQ ID NO: 3978253 - DNA, 25 bp, Homo sapien
caggttgtggatgtgttccatgagg

SEQ ID NO: 3978254 - DNA, 25 bp, Homo sapien
tgtgatacatgtggcgatcaacctt

SEQ ID NO: 3978255 - DNA, 25 bp, Homo sapien
gatgtgttccatgaggatccgcttg

SEQ ID NO: 3978256 - DNA, 25 bp, Homo sapien
gttccatgaggatccgcttgttttt

SEQ ID NO: 3978257 - DNA, 25 bp, Homo sapien
tagaatcacagtatcttctgagaag

SEQ ID NO: 3978258 - DNA, 25 bp, Homo sapien
catgtggtgatcaatcttcttagaa

SEQ ID NO: 3978259 - DNA, 25 bp, Homo sapien
cttagaatcacagtatcttctgaga

SEQ ID NO: 3978260 - DNA, 25 bp, Homo sapien
tcaatcttcttagaatcacagtatc

SEQ ID NO: 3978261 - DNA, 25 bp, Homo sapien
ctggcatagaatcctcatcccctca

SEQ ID NO: 3978262 - DNA, 25 bp, Homo sapien
gtgttttccggtatcaagccaggaa

SEQ ID NO: 3978263 - DNA, 25 bp, Homo sapien
gttttccggtatcaagccaggaatg

SEQ ID NO: 3978264 - DNA, 25 bp, Homo sapien
tgttttccggtatcaagccaggaat

SEQ ID NO: 3978265 - DNA, 25 bp, Homo sapien
ctttgatcagctttcggatccactg

SEQ ID NO: 3978266 - DNA, 25 bp, Homo sapien
gatcagctttcggatccactgatgg

SEQ ID NO: 3978267 - DNA, 25 bp, Homo sapien
gatttcactggtctccttggggtcc

SEQ ID NO: 3978268 - DNA, 25 bp, Homo sapien
ttcggatccactgatgggagttggc

SEQ ID NO: 3978269 - DNA, 25 bp, Homo sapien
aggacaagagcaagggacaagatgc

SEQ ID NO: 3978270 - DNA, 25 bp, Homo sapien
gccaggacaagagcaagggacaaga

SEQ ID NO: 3978271 - DNA, 25 bp, Homo sapien
ccaggacaagagcaagggacaagat

SEQ ID NO: 3978272 - DNA, 25 bp, Homo sapien
caggacaagagcaagggacaagatg

SEQ ID NO: 3978273 - DNA, 25 bp, Homo sapien
gtaattaatgtctgattccagccag

SEQ ID NO: 3978274 - DNA, 25 bp, Homo sapien
tccctgtctaacttcctgcagaagg

SEQ ID NO: 3978275 - DNA, 25 bp, Homo sapien
tctccggtgaggatatccctgtcta

SEQ ID NO: 3978276 - DNA, 25 bp, Homo sapien
agccagacagaagctcagactcaaa

SEQ ID NO: 3978277 - DNA, 25 bp, Homo sapien
catacatgagctatttttatccaga

SEQ ID NO: 3978278 - DNA, 25 bp, Homo sapien
gagccaaacaccatcagcagagaaa

SEQ ID NO: 3978279 - DNA, 25 bp, Homo sapien
tgagtaaccatcctcggcgcccact

SEQ ID NO: 3978280 - DNA, 25 bp, Homo sapien
tttatccagagcactcccttttctc

SEQ ID NO: 3978281 - DNA, 25 bp, Homo sapien
cccttccggccatgttccactggct

SEQ ID NO: 3978282 - DNA, 25 bp, Homo sapien
tgagctgggtacagtcaggcaggtg

SEQ ID NO: 3978283 - DNA, 25 bp, Homo sapien
tctgctctccatggagggaatgacc

SEQ ID NO: 3978284 - DNA, 25 bp, Homo sapien
caggtgccactgctgaaggtgctct

SEQ ID NO: 3978285 - DNA, 25 bp, Homo sapien
tgatatcatcggagacaacacagca

SEQ ID NO: 3978286 - DNA, 25 bp, Homo sapien
tgttcaaagataaggttggagtcgg

SEQ ID NO: 3978287 - DNA, 25 bp, Homo sapien
aagcagctcgatgatgtgcagagga

SEQ ID NO: 3978288 - DNA, 25 bp, Homo sapien
ggcggtcagttgatatcatcggaga

SEQ ID NO: 3978289 - DNA, 25 bp, Homo sapien
ggtgatgaatcactccaggtccaat

SEQ ID NO: 3978290 - DNA, 25 bp, Homo sapien
tggaatgttaaatgcgatttctccc

SEQ ID NO: 3978291 - DNA, 25 bp, Homo sapien
cagcacaactatggagatgtcaaca

SEQ ID NO: 3978292 - DNA, 25 bp, Homo sapien
gatgtcaacaaatggccatgaagag

SEQ ID NO: 3978293 - DNA, 25 bp, Homo sapien
gaaatgattacgagcttgagctatg

SEQ ID NO: 3978294 - DNA, 25 bp, Homo sapien
ttatcggaaatgattacgagcttga

SEQ ID NO: 3978295 - DNA, 25 bp, Homo sapien
ttgagctatgaccaggtcgtggaaa

SEQ ID NO: 3978296 - DNA, 25 bp, Homo sapien
agcttgagctatgaccaggtcgtgg

SEQ ID NO: 3978297 - DNA, 25 bp, Homo sapien
ggtcaatggctaccagccatgaggg

SEQ ID NO: 3978298 - DNA, 25 bp, Homo sapien
caaaatacagggcaaggactggctc

SEQ ID NO: 3978299 - DNA, 25 bp, Homo sapien
tggagaactagatcccaagtgagac

SEQ ID NO: 3978300 - DNA, 25 bp, Homo sapien
cgctgaatctgctggtcaaggtcaa

SEQ ID NO: 3978301 - DNA, 25 bp, Homo sapien
tcttcccaaatcacggtcaggcctg

SEQ ID NO: 3978302 - DNA, 25 bp, Homo sapien
cataactcagaaccccatgactggg

SEQ ID NO: 3978303 - DNA, 25 bp, Homo sapien
tcatcctggataccctttcctgtag

SEQ ID NO: 3978304 - DNA, 25 bp, Homo sapien
ctgctcaggagaccggacctccact

SEQ ID NO: 3978305 - DNA, 25 bp, Homo sapien
ctgggtcgcagaggccgagcagctg

SEQ ID NO: 3978306 - DNA, 25 bp, Homo sapien
cccactgggtcgcagaggccgagca

SEQ ID NO: 3978307 - DNA, 25 bp, Homo sapien
ctgttcccactgggtcgcagaggcc

SEQ ID NO: 3978308 - DNA, 25 bp, Homo sapien
ttcccactgggtcgcagaggccgag

SEQ ID NO: 3978309 - DNA, 25 bp, Homo sapien
tgggtaagtaaatgcggcgctcaga

SEQ ID NO: 3978310 - DNA, 25 bp, Homo sapien
gaaagtcattactgtgcctgcagga

SEQ ID NO: 3978311 - DNA, 25 bp, Homo sapien
tgcctctgacagtgcaacaggtaag

SEQ ID NO: 3978312 - DNA, 25 bp, Homo sapien
ccagctgcagatggtgtcttagagc

SEQ ID NO: 3978313 - DNA, 25 bp, Homo sapien
gtttggagaactattgtcatcaact

SEQ ID NO: 3978314 - DNA, 25 bp, Homo sapien
ggagaactattgtcatcaactgcct

SEQ ID NO: 3978315 - DNA, 25 bp, Homo sapien
gagccacagctgaccgggaaacctg

SEQ ID NO: 3978316 - DNA, 25 bp, Homo sapien
gctgaccgggaaacctgccaccttg

SEQ ID NO: 3978317 - DNA, 25 bp, Homo sapien
tttgtacgcctttatttctcagaaa

SEQ ID NO: 3978318 - DNA, 25 bp, Homo sapien
tggttctgcattcgggtcagtgtcc

SEQ ID NO: 3978319 - DNA, 25 bp, Homo sapien
ttctgcattcgggtcagtgtccacc

SEQ ID NO: 3978320 - DNA, 25 bp, Homo sapien
tccttcctaactcgggtgtctcttc

SEQ ID NO: 3978321 - DNA, 25 bp, Homo sapien
tgactttgttggccctgtttcttgg

SEQ ID NO: 3978322 - DNA, 25 bp, Homo sapien
aagaggctccacatgagaactagtg

SEQ ID NO: 3978323 - DNA, 25 bp, Homo sapien
tccacatgagaactagtggcattga

SEQ ID NO: 3978324 - DNA, 25 bp, Homo sapien
ggctccacatgagaactagtggcat

SEQ ID NO: 3978325 - DNA, 25 bp, Homo sapien
ccaacatcattgagagcacaagtgc

SEQ ID NO: 3978326 - DNA, 25 bp, Homo sapien
aaagtaggattctgtccaacatcat

SEQ ID NO: 3978327 - DNA, 25 bp, Homo sapien
acaactgctattgacctgtggccag

SEQ ID NO: 3978328 - DNA, 25 bp, Homo sapien
ttctctcctaagtcttgggttggga

SEQ ID NO: 3978329 - DNA, 25 bp, Homo sapien
tcagcacacagcttacatgcaaacg

SEQ ID NO: 3978330 - DNA, 25 bp, Homo sapien
cactcaagagagacttcagcacaca

SEQ ID NO: 3978331 - DNA, 25 bp, Homo sapien
tccttatggaggcatcttaatcgtc

SEQ ID NO: 3978332 - DNA, 25 bp, Homo sapien
tgctgggagtcacacttaagccact

SEQ ID NO: 3978333 - DNA, 25 bp, Homo sapien
cgggatacggaacaagaacagcaat

SEQ ID NO: 3978334 - DNA, 25 bp, Homo sapien
tgagtggcacttccaagtccaggca

SEQ ID NO: 3978335 - DNA, 25 bp, Homo sapien
tctctgttagggtgactttggaagc

SEQ ID NO: 3978336 - DNA, 25 bp, Homo sapien
caggcagataactggaagcgtactt

SEQ ID NO: 3978337 - DNA, 25 bp, Homo sapien
gagcacatttacgaggaagcacggg

SEQ ID NO: 3978338 - DNA, 25 bp, Homo sapien
gcccaaggcgttatgggtgagacta

SEQ ID NO: 3978339 - DNA, 25 bp, Homo sapien
tcatatcgagcttgtaactgagaaa

SEQ ID NO: 3978340 - DNA, 25 bp, Homo sapien
tattcagaacaggtggatagggcag

SEQ ID NO: 3978341 - DNA, 25 bp, Homo sapien
cttccacaaagccaggaatgtctgc

SEQ ID NO: 3978342 - DNA, 25 bp, Homo sapien
catttgtatagagatcgctttgttc

SEQ ID NO: 3978343 - DNA, 25 bp, Homo sapien
tcactttaagggaatacgtccctga

SEQ ID NO: 3978344 - DNA, 25 bp, Homo sapien
actgtatagcaaagatcaggaagca

SEQ ID NO: 3978345 - DNA, 25 bp, Homo sapien
tgtcctttccaacacccctagacag

SEQ ID NO: 3978346 - DNA, 25 bp, Homo sapien
tctttcaagatccttacagatgagg

SEQ ID NO: 3978347 - DNA, 25 bp, Homo sapien
caagatccttacagatgaggtcatc

SEQ ID NO: 3978348 - DNA, 25 bp, Homo sapien
gaggtcatctccttccacaaacctg

SEQ ID NO: 3978349 - DNA, 25 bp, Homo sapien
caagaggaagaaggactaaagccgg

SEQ ID NO: 3978350 - DNA, 25 bp, Homo sapien
aaagccggggctagactgtcttgca

SEQ ID NO: 3978351 - DNA, 25 bp, Homo sapien
ggacaagtcaagtggcccatggaga

SEQ ID NO: 3978352 - DNA, 25 bp, Homo sapien
ctccaggacaagtcaagtggcccat

SEQ ID NO: 3978353 - DNA, 25 bp, Homo sapien
ggcaaacaccttgtagtaggctcta

SEQ ID NO: 3978354 - DNA, 25 bp, Homo sapien
tcaaaatccagactagggtaacatc

SEQ ID NO: 3978355 - DNA, 25 bp, Homo sapien
tatcgaatatgtcctagaaccacgg

SEQ ID NO: 3978356 - DNA, 25 bp, Homo sapien
catgaaattccaagaaggcgtggca

SEQ ID NO: 3978357 - DNA, 25 bp, Homo sapien
tggacctgtcctctactgtgtgctg

SEQ ID NO: 3978358 - DNA, 25 bp, Homo sapien
gacgtggtacggcacttggagcaca

SEQ ID NO: 3978359 - DNA, 25 bp, Homo sapien
tgcttgaagcgcagacattcactgt

SEQ ID NO: 3978360 - DNA, 25 bp, Homo sapien
tgtactacacgaattcagcccctta

SEQ ID NO: 3978361 - DNA, 25 bp, Homo sapien
tgtcacggggcttggctcaatgtca

SEQ ID NO: 3978362 - DNA, 25 bp, Homo sapien
ttgcacttgccattccctgtcacgg

SEQ ID NO: 3978363 - DNA, 25 bp, Homo sapien
ctttctctatcaccctctaccacgg

SEQ ID NO: 3978364 - DNA, 25 bp, Homo sapien
cctctaccacggcaccctctactag

SEQ ID NO: 3978365 - DNA, 25 bp, Homo sapien
tagattttggcattcccacaattcc

SEQ ID NO: 3978366 - DNA, 25 bp, Homo sapien
ggcattcccacaattccattgtttg

SEQ ID NO: 3978367 - DNA, 25 bp, Homo sapien
aagctgttagattttggcattccca

SEQ ID NO: 3978368 - DNA, 25 bp, Homo sapien
cctggcaaagctgttagattttggc

SEQ ID NO: 3978369 - DNA, 25 bp, Homo sapien
aaggctcaggcatccgcttcacata

SEQ ID NO: 3978370 - DNA, 25 bp, Homo sapien
gctcaggcatccgcttcacataatg

SEQ ID NO: 3978371 - DNA, 25 bp, Homo sapien
aggctcaggcatccgcttcacataa

SEQ ID NO: 3978372 - DNA, 25 bp, Homo sapien
ggctcaggcatccgcttcacataat

SEQ ID NO: 3978373 - DNA, 25 bp, Homo sapien
cccctcttgcccagagttacaaatc

SEQ ID NO: 3978374 - DNA, 25 bp, Homo sapien
ctcccctcttgcccagagttacaaa

SEQ ID NO: 3978375 - DNA, 25 bp, Homo sapien
tcccctcttgcccagagttacaaat

SEQ ID NO: 3978376 - DNA, 25 bp, Homo sapien
ttccccttgcccactgcatctctac

SEQ ID NO: 3978377 - DNA, 25 bp, Homo sapien
ccttgcccactgcatctctaccgcc

SEQ ID NO: 3978378 - DNA, 25 bp, Homo sapien
ccccttgcccactgcatctctaccg

SEQ ID NO: 3978379 - DNA, 25 bp, Homo sapien
tgcccactgcatctctaccgcccat

SEQ ID NO: 3978380 - DNA, 25 bp, Homo sapien
catgctggagtggtgacaaggtttc

SEQ ID NO: 3978381 - DNA, 25 bp, Homo sapien
tcctgagcactgtttaccattaaag

SEQ ID NO: 3978382 - DNA, 25 bp, Homo sapien
tcaaaaaagtcatgccgaggtctgt

SEQ ID NO: 3978383 - DNA, 25 bp, Homo sapien
catcatgttcattacgcagcactgt

SEQ ID NO: 3978384 - DNA, 25 bp, Homo sapien
tgcattataagctataagctcattt

SEQ ID NO: 3978385 - DNA, 25 bp, Homo sapien
cattataagctataagctcatttag

SEQ ID NO: 3978386 - DNA, 25 bp, Homo sapien
gcattataagctataagctcattta

SEQ ID NO: 3978387 - DNA, 25 bp, Homo sapien
cagacttaggtctagatcagcacaa

SEQ ID NO: 3978388 - DNA, 25 bp, Homo sapien
tgcgtctgaccatctccagacttag

SEQ ID NO: 3978389 - DNA, 25 bp, Homo sapien
aggcactgctgtggccgaggacaga

SEQ ID NO: 3978390 - DNA, 25 bp, Homo sapien
cagagcaggatcgaggtcaactcca

SEQ ID NO: 3978391 - DNA, 25 bp, Homo sapien
tagtcatagtcgcaatactttcaga

SEQ ID NO: 3978392 - DNA, 25 bp, Homo sapien
gcctttgaattccagcaaattcacg

SEQ ID NO: 3978393 - DNA, 25 bp, Homo sapien
cgcaatactttcagatagcctttga

SEQ ID NO: 3978394 - DNA, 25 bp, Homo sapien
taaacgtcactaccttgtgctgagc

SEQ ID NO: 3978395 - DNA, 25 bp, Homo sapien
ttataatggaccagaagagtctgag

SEQ ID NO: 3978396 - DNA, 25 bp, Homo sapien
gagtactgttcttgatttatctgag

SEQ ID NO: 3978397 - DNA, 25 bp, Homo sapien
gggatgactgaccactctgtttttc

SEQ ID NO: 3978398 - DNA, 25 bp, Homo sapien
taatgccgtcagcagggatgactga

SEQ ID NO: 3978399 - DNA, 25 bp, Homo sapien
gtcatcatgggctgcgcaggtcctg

SEQ ID NO: 3978400 - DNA, 25 bp, Homo sapien
catgtattctggtgccggagtcatc

SEQ ID NO: 3978401 - DNA, 25 bp, Homo sapien
catgtacctttggaacagcatggcc

SEQ ID NO: 3978402 - DNA, 25 bp, Homo sapien
caagacaacttctctagctggagtg

SEQ ID NO: 3978403 - DNA, 25 bp, Homo sapien
cttccaactgcaattacatggctca

SEQ ID NO: 3978404 - DNA, 25 bp, Homo sapien
gttttcgagccagtcatgcacaagg

SEQ ID NO: 3978405 - DNA, 25 bp, Homo sapien
tgttttcgagccagtcatgcacaag

SEQ ID NO: 3978406 - DNA, 25 bp, Homo sapien
catgcacaagggcttgcattggggt

SEQ ID NO: 3978407 - DNA, 25 bp, Homo sapien
gcacaagggcttgcattggggtcat

SEQ ID NO: 3978408 - DNA, 25 bp, Homo sapien
tatggactccagttctaatgcttgg

SEQ ID NO: 3978409 - DNA, 25 bp, Homo sapien
ccaggatatggactccagttctaat

SEQ ID NO: 3978410 - DNA, 25 bp, Homo sapien
ggactccagttctaatgcttgggct

SEQ ID NO: 3978411 - DNA, 25 bp, Homo sapien
ccagttctaatgcttgggcttccaa

SEQ ID NO: 3978412 - DNA, 25 bp, Homo sapien
gtctgccctgagtgaactcataacc

SEQ ID NO: 3978413 - DNA, 25 bp, Homo sapien
tttggatggcaaattgtctgccctg

SEQ ID NO: 3978414 - DNA, 25 bp, Homo sapien
aaattgtctgccctgagtgaactca

SEQ ID NO: 3978415 - DNA, 25 bp, Homo sapien
gatggcaaattgtctgccctgagtg

SEQ ID NO: 3978416 - DNA, 25 bp, Homo sapien
cacattggacctctgagctgtgcta

SEQ ID NO: 3978417 - DNA, 25 bp, Homo sapien
tgagctgtgctaacagcaccttcac

SEQ ID NO: 3978418 - DNA, 25 bp, Homo sapien
cacagctgtctaggctcagtgagtg

SEQ ID NO: 3978419 - DNA, 25 bp, Homo sapien
cttcctggcacatgtccacattgga

SEQ ID NO: 3978420 - DNA, 25 bp, Homo sapien
caggactggctccttgaaccacgct

SEQ ID NO: 3978421 - DNA, 25 bp, Homo sapien
ggctccttgaaccacgctggaagca

SEQ ID NO: 3978422 - DNA, 25 bp, Homo sapien
tgaggcccgagaagcaggcagccac

SEQ ID NO: 3978423 - DNA, 25 bp, Homo sapien
actggctccttgaaccacgctggaa

SEQ ID NO: 3978424 - DNA, 25 bp, Homo sapien
gcctgcgaagctgcctgattctaca

SEQ ID NO: 3978425 - DNA, 25 bp, Homo sapien
cctgcctgtttcaacattctctggg

SEQ ID NO: 3978426 - DNA, 25 bp, Homo sapien
gacacctgcataatttgatctcctg

SEQ ID NO: 3978427 - DNA, 25 bp, Homo sapien
tgctgcatgaagtgccatttgcctg

SEQ ID NO: 3978428 - DNA, 25 bp, Homo sapien
ttacccaagccaagctcagcgttct

SEQ ID NO: 3978429 - DNA, 25 bp, Homo sapien
gcaggtgaattccaattttacccaa

SEQ ID NO: 3978430 - DNA, 25 bp, Homo sapien
aaagcaccaggcaggtgaattccaa

SEQ ID NO: 3978431 - DNA, 25 bp, Homo sapien
tccaattttacccaagccaagctca

SEQ ID NO: 3978432 - DNA, 25 bp, Homo sapien
tcttcctgaaactagtgaccccaca

SEQ ID NO: 3978433 - DNA, 25 bp, Homo sapien
cttcccactatctctacctgcatgg

SEQ ID NO: 3978434 - DNA, 25 bp, Homo sapien
gtctggcccttataacagtttctct

SEQ ID NO: 3978435 - DNA, 25 bp, Homo sapien
tgcatggaccatggtacattcctca

SEQ ID NO: 3978436 - DNA, 25 bp, Homo sapien
agagaccatggttggacaaggcaga

SEQ ID NO: 3978437 - DNA, 25 bp, Homo sapien
cagtgcctccaaccaggagggaccc

SEQ ID NO: 3978438 - DNA, 25 bp, Homo sapien
aagagtcttacttcccacccagtgc

SEQ ID NO: 3978439 - DNA, 25 bp, Homo sapien
tcatatttattgggtgtcagagacc

SEQ ID NO: 3978440 - DNA, 25 bp, Homo sapien
aaagcaagacgatatgcacccaggc

SEQ ID NO: 3978441 - DNA, 25 bp, Homo sapien
gatgaaaactattcccccagcaaaa

SEQ ID NO: 3978442 - DNA, 25 bp, Homo sapien
aaacgatgcaaaatcgaactatggg

SEQ ID NO: 3978443 - DNA, 25 bp, Homo sapien
gaaatcatcaaagcaagacgatatg

SEQ ID NO: 3978444 - DNA, 25 bp, Homo sapien
tctgaattgtgtcatcccttatctg

SEQ ID NO: 3978445 - DNA, 25 bp, Homo sapien
gacatcaggcttaagtggtacaggg

SEQ ID NO: 3978446 - DNA, 25 bp, Homo sapien
ccaaaccacaagaatttgactctct

SEQ ID NO: 3978447 - DNA, 25 bp, Homo sapien
caaaggtcacaaaataactgaaagt

SEQ ID NO: 3978448 - DNA, 25 bp, Homo sapien
tagctacaaagttgtaaccctgaag

SEQ ID NO: 3978449 - DNA, 25 bp, Homo sapien
agctacaaagttgtaaccctgaagg

SEQ ID NO: 3978450 - DNA, 25 bp, Homo sapien
ttagctacaaagttgtaaccctgaa

SEQ ID NO: 3978451 - DNA, 25 bp, Homo sapien
tgctccagcacaggctcccatgatc

SEQ ID NO: 3978452 - DNA, 25 bp, Homo sapien
taagcttccacggttgccaagaggg

SEQ ID NO: 3978453 - DNA, 25 bp, Homo sapien
tgttcttgggcagagttgctggcac

SEQ ID NO: 3978454 - DNA, 25 bp, Homo sapien
tggcaatcccaggtggataagcttc

SEQ ID NO: 3978455 - DNA, 25 bp, Homo sapien
ctgcaacacaaggaatcctgactac

SEQ ID NO: 3978456 - DNA, 25 bp, Homo sapien
caacacaaggaatcctgactaccat

SEQ ID NO: 3978457 - DNA, 25 bp, Homo sapien
tgcaacacaaggaatcctgactacc

SEQ ID NO: 3978458 - DNA, 25 bp, Homo sapien
gcaacacaaggaatcctgactacca

SEQ ID NO: 3978459 - DNA, 25 bp, Homo sapien
attggtgagaatagctccccatggc

SEQ ID NO: 3978460 - DNA, 25 bp, Homo sapien
tcccattcattatctgccagcattt

SEQ ID NO: 3978461 - DNA, 25 bp, Homo sapien
cagtaacggagttgtcataattggt

SEQ ID NO: 3978462 - DNA, 25 bp, Homo sapien
atggctggccctgcggatcccacag

SEQ ID NO: 3978463 - DNA, 25 bp, Homo sapien
cagagcctcggggtggcaacccaaa

SEQ ID NO: 3978464 - DNA, 25 bp, Homo sapien
tcctggtatgccctggttcttgggc

SEQ ID NO: 3978465 - DNA, 25 bp, Homo sapien
ggaaccagctgagagactagcagct

SEQ ID NO: 3978466 - DNA, 25 bp, Homo sapien
tcggggtggcaacccaaactgagtg

SEQ ID NO: 3978467 - DNA, 25 bp, Homo sapien
ggagcctgtgatacggcacatgagc

SEQ ID NO: 3978468 - DNA, 25 bp, Homo sapien
tgactccaaattctcctaaatgcag

SEQ ID NO: 3978469 - DNA, 25 bp, Homo sapien
acactgtgtggtcctcgctgactcc

SEQ ID NO: 3978470 - DNA, 25 bp, Homo sapien
ctcctaaatgcagcctccgtggagc

SEQ ID NO: 3978471 - DNA, 25 bp, Homo sapien
taacctcagagcacgtgtcgtttat

SEQ ID NO: 3978472 - DNA, 25 bp, Homo sapien
aggcttcgcccggtgtaacctcaga

SEQ ID NO: 3978473 - DNA, 25 bp, Homo sapien
gagcacgtgtcgtttatttttaggc

SEQ ID NO: 3978474 - DNA, 25 bp, Homo sapien
ctgggagtaagagggaggcttcgcc

SEQ ID NO: 3978475 - DNA, 25 bp, Homo sapien
tcctgagtggtgttcctgagggaac

SEQ ID NO: 3978476 - DNA, 25 bp, Homo sapien
acttcagcaacaccgtgtcattcat

SEQ ID NO: 3978477 - DNA, 25 bp, Homo sapien
ctgggttctcctgagtggtgttcct

SEQ ID NO: 3978478 - DNA, 25 bp, Homo sapien
tctcctgagtggtgttcctgaggga

SEQ ID NO: 3978479 - DNA, 25 bp, Homo sapien
ccaggactcacgtcctcgtgctgaa

SEQ ID NO: 3978480 - DNA, 25 bp, Homo sapien
acatgtgcttggagcagcggcagcc

SEQ ID NO: 3978481 - DNA, 25 bp, Homo sapien
cgtgcgtgccgggtcccaggactca

SEQ ID NO: 3978482 - DNA, 25 bp, Homo sapien
gcctctcctgcccacggcgtgcgtg

SEQ ID NO: 3978483 - DNA, 25 bp, Homo sapien
tagggatgatctggactcccctcct

SEQ ID NO: 3978484 - DNA, 25 bp, Homo sapien
gatgatctggactcccctcctaagc

SEQ ID NO: 3978485 - DNA, 25 bp, Homo sapien
gctgtagggatgatctggactcccc

SEQ ID NO: 3978486 - DNA, 25 bp, Homo sapien
ccctcctaagctgcttttgacgcat

SEQ ID NO: 3978487 - DNA, 25 bp, Homo sapien
tcaggtgaacggcgctaattttaca

SEQ ID NO: 3978488 - DNA, 25 bp, Homo sapien
tacaattcccagaaattccgcagcc

SEQ ID NO: 3978489 - DNA, 25 bp, Homo sapien
aggtgaacggcgctaattttacaat

SEQ ID NO: 3978490 - DNA, 25 bp, Homo sapien
cagaaattccgcagcccctgaacca

SEQ ID NO: 3978491 - DNA, 25 bp, Homo sapien
ctttgtaacaccacccatttcaatt

SEQ ID NO: 3978492 - DNA, 25 bp, Homo sapien
tcctccgtttttcccatgtgatatt

SEQ ID NO: 3978493 - DNA, 25 bp, Homo sapien
gagaccttgccgtgcagaaaccatc

SEQ ID NO: 3978494 - DNA, 25 bp, Homo sapien
cgtttttcccatgtgatatttccct

SEQ ID NO: 3978495 - DNA, 25 bp, Homo sapien
ctttgagatcgtggtacttcaccat

SEQ ID NO: 3978496 - DNA, 25 bp, Homo sapien
cagtgtagaaaccaagctgattaat

SEQ ID NO: 3978497 - DNA, 25 bp, Homo sapien
accaagctgattaattgaagtatct

SEQ ID NO: 3978498 - DNA, 25 bp, Homo sapien
catttcatcagtgtagaaaccaagc

SEQ ID NO: 3978499 - DNA, 25 bp, Homo sapien
ttggccatttcatcagtgtagaaac

SEQ ID NO: 3978500 - DNA, 25 bp, Homo sapien
gtgccagtaagcaaccgagccaggg

SEQ ID NO: 3978501 - DNA, 25 bp, Homo sapien
cagggctccaaccaactgattcaga

SEQ ID NO: 3978502 - DNA, 25 bp, Homo sapien
cgatgattccattgaggtgccagta

SEQ ID NO: 3978503 - DNA, 25 bp, Homo sapien
gggctcagaaaggaacgatgattcc

SEQ ID NO: 3978504 - DNA, 25 bp, Homo sapien
ttgcgtgacatttattttgtcttgt

SEQ ID NO: 3978505 - DNA, 25 bp, Homo sapien
catttattttgtcttgttaacatta

SEQ ID NO: 3978506 - DNA, 25 bp, Homo sapien
gacatttattttgtcttgttaacat

SEQ ID NO: 3978507 - DNA, 25 bp, Homo sapien
gtgacatttattttgtcttgttaac

SEQ ID NO: 3978508 - DNA, 25 bp, Homo sapien
gacgtaatgacagggttgcacacca

SEQ ID NO: 3978509 - DNA, 25 bp, Homo sapien
catcttttaagaggacgctggtacc

SEQ ID NO: 3978510 - DNA, 25 bp, Homo sapien
tacagaaggaacaacggcgatattt

SEQ ID NO: 3978511 - DNA, 25 bp, Homo sapien
gcaactcagaagcagaaggccagct

SEQ ID NO: 3978512 - DNA, 25 bp, Homo sapien
ttttctaggtgcattgggacatcca

SEQ ID NO: 3978513 - DNA, 25 bp, Homo sapien
tatacaagtggagacaacaagctct

SEQ ID NO: 3978514 - DNA, 25 bp, Homo sapien
ttacatggtggcttgtggcagtcca

SEQ ID NO: 3978515 - DNA, 25 bp, Homo sapien
aattaacaaggaaggcagaacgcac

SEQ ID NO: 3978516 - DNA, 25 bp, Homo sapien
aagaacttcttgtgtcagggtaact

SEQ ID NO: 3978517 - DNA, 25 bp, Homo sapien
cagggtaactaggtgaatactgttc

SEQ ID NO: 3978518 - DNA, 25 bp, Homo sapien
actgccgtttatgtgtggatactga

SEQ ID NO: 3978519 - DNA, 25 bp, Homo sapien
aatactgttcgagaggttggctgag

SEQ ID NO: 3978520 - DNA, 25 bp, Homo sapien
ctgaaagaagggaagagagacgttt

SEQ ID NO: 3978521 - DNA, 25 bp, Homo sapien
gaatacggttcgagaggctgactga

SEQ ID NO: 3978522 - DNA, 25 bp, Homo sapien
acaaggtgaatacggttcgagaggc

SEQ ID NO: 3978523 - DNA, 25 bp, Homo sapien
caggataacaaggtgaatacggttc

SEQ ID NO: 3978524 - DNA, 25 bp, Homo sapien
atcttgggtcaggataacaaggtga

SEQ ID NO: 3978525 - DNA, 25 bp, Homo sapien
gagatgtgggtattggacgtgggac

SEQ ID NO: 3978526 - DNA, 25 bp, Homo sapien
gacaggacaggagacccctagaagg

SEQ ID NO: 3978527 - DNA, 25 bp, Homo sapien
ttgagatgtgggtattggacgtggg

SEQ ID NO: 3978528 - DNA, 25 bp, Homo sapien
agatgtgggtattggacgtgggaca

SEQ ID NO: 3978529 - DNA, 25 bp, Homo sapien
gaaagtgtcctttgctccccaaggc

SEQ ID NO: 3978530 - DNA, 25 bp, Homo sapien
taaataacccgctgagtctacacca

SEQ ID NO: 3978531 - DNA, 25 bp, Homo sapien
ctagttgagctataggtgctgggca

SEQ ID NO: 3978532 - DNA, 25 bp, Homo sapien
gagaccacgtctgatgtaccccagg

SEQ ID NO: 3978533 - DNA, 25 bp, Homo sapien
actgcgcctgaccaacttttcccag

SEQ ID NO: 3978534 - DNA, 25 bp, Homo sapien
tgcgcctgaccaacttttcccagtt

SEQ ID NO: 3978535 - DNA, 25 bp, Homo sapien
ttcccagtttctcaatgaagccata

SEQ ID NO: 3978536 - DNA, 25 bp, Homo sapien
cccagtttctcaatgaagccataaa

SEQ ID NO: 3978537 - DNA, 25 bp, Homo sapien
caagtctacagttaaaggaacttat

SEQ ID NO: 3978538 - DNA, 25 bp, Homo sapien
aaaaacagggatatcagtagattcc

SEQ ID NO: 3978539 - DNA, 25 bp, Homo sapien
aggaacttatactagaaacaacaat

SEQ ID NO: 3978540 - DNA, 25 bp, Homo sapien
tagaaacaacaattttggcagaaga

SEQ ID NO: 3978541 - DNA, 25 bp, Homo sapien
cgatccaagtcttctaccaactgct

SEQ ID NO: 3978542 - DNA, 25 bp, Homo sapien
aactgcttgaacgttggtctctggg

SEQ ID NO: 3978543 - DNA, 25 bp, Homo sapien
tgtgagagtgagaattcgatccaag

SEQ ID NO: 3978544 - DNA, 25 bp, Homo sapien
tctaccaactgcttgaacgttggtc

SEQ ID NO: 3978545 - DNA, 25 bp, Homo sapien
tttgggtttcgacagatcctctacg

SEQ ID NO: 3978546 - DNA, 25 bp, Homo sapien
cacaatagaccgcagtttctgggac

SEQ ID NO: 3978547 - DNA, 25 bp, Homo sapien
cttaatcctacaccctgcagggcgg

SEQ ID NO: 3978548 - DNA, 25 bp, Homo sapien
ggccattcatcagacatccacggta

SEQ ID NO: 3978549 - DNA, 25 bp, Homo sapien
tctctcagacaagtaatggttgtcg

SEQ ID NO: 3978550 - DNA, 25 bp, Homo sapien
gggccttcaaaaacgagatacatca

SEQ ID NO: 3978551 - DNA, 25 bp, Homo sapien
gtgtcgctatgtatcccagctctgg

SEQ ID NO: 3978552 - DNA, 25 bp, Homo sapien
tacatcaggagaggtattactggtg

SEQ ID NO: 3978553 - DNA, 25 bp, Homo sapien
tgaagatctcccacattaacacccc

SEQ ID NO: 3978554 - DNA, 25 bp, Homo sapien
tggtgcagttggctggcttatccat

SEQ ID NO: 3978555 - DNA, 25 bp, Homo sapien
gaagatctcccacattaacaccccg

SEQ ID NO: 3978556 - DNA, 25 bp, Homo sapien
tgtggctggcggaacatctgctgca

SEQ ID NO: 3978557 - DNA, 25 bp, Homo sapien
agccaactccgcaggatcacagctg

SEQ ID NO: 3978558 - DNA, 25 bp, Homo sapien
gctctggaacttactaagatcgcaa

SEQ ID NO: 3978559 - DNA, 25 bp, Homo sapien
ttgacagaataaggccagcaagcca

SEQ ID NO: 3978560 - DNA, 25 bp, Homo sapien
atcactctgatgagtgtatactcta

SEQ ID NO: 3978561 - DNA, 25 bp, Homo sapien
atactctatcaaacagggcttctgg

SEQ ID NO: 3978562 - DNA, 25 bp, Homo sapien
gagtgtatactctatcaaacagggc

SEQ ID NO: 3978563 - DNA, 25 bp, Homo sapien
gatgagtgtatactctatcaaacag

SEQ ID NO: 3978564 - DNA, 25 bp, Homo sapien
gtctatattgttgatatctctggcg

SEQ ID NO: 3978565 - DNA, 25 bp, Homo sapien
acatttctggctgctaaatctcgat

SEQ ID NO: 3978566 - DNA, 25 bp, Homo sapien
atttctggctgctaaatctcgatga

SEQ ID NO: 3978567 - DNA, 25 bp, Homo sapien
gtggtctttttgtaatagtctatat

SEQ ID NO: 3978568 - DNA, 25 bp, Homo sapien
gaagaatgtgcttcccacgcactgg

SEQ ID NO: 3978569 - DNA, 25 bp, Homo sapien
tacacacacaactgaaagctgctgg

SEQ ID NO: 3978570 - DNA, 25 bp, Homo sapien
ggcaagctacgtgatccctgaaata

SEQ ID NO: 3978571 - DNA, 25 bp, Homo sapien
gatgacatcgaattcctgcggcaac

SEQ ID NO: 3978572 - DNA, 25 bp, Homo sapien
tccttgaaggtcatctgctcctcag

SEQ ID NO: 3978573 - DNA, 25 bp, Homo sapien
ataggagtactccatcccgggtggc

SEQ ID NO: 3978574 - DNA, 25 bp, Homo sapien
tgctcctcaggaacacggttaatgt

SEQ ID NO: 3978575 - DNA, 25 bp, Homo sapien
ttctcggaggttgcctttagaggca

SEQ ID NO: 3978576 - DNA, 25 bp, Homo sapien
gaaaggtctttctctgtggcatcat

SEQ ID NO: 3978577 - DNA, 25 bp, Homo sapien
gcaggctccaagaagatttatgata

SEQ ID NO: 3978578 - DNA, 25 bp, Homo sapien
ctgtgtgcaggctccaagaagattt

SEQ ID NO: 3978579 - DNA, 25 bp, Homo sapien
tgacaccagatcagaaaggtctttc

SEQ ID NO: 3978580 - DNA, 25 bp, Homo sapien
gggctgcctcagtcagtggtgccat

SEQ ID NO: 3978581 - DNA, 25 bp, Homo sapien
gcctcagtcagtggtgccatgacac

SEQ ID NO: 3978582 - DNA, 25 bp, Homo sapien
gctgcctcagtcagtggtgccatga

SEQ ID NO: 3978583 - DNA, 25 bp, Homo sapien
ctggccctggtacgcagccaggggc

SEQ ID NO: 3978584 - DNA, 25 bp, Homo sapien
tttcttgataagactctccacccag

SEQ ID NO: 3978585 - DNA, 25 bp, Homo sapien
tagtctgtccgagatgctgatttat

SEQ ID NO: 3978586 - DNA, 25 bp, Homo sapien
tctcaacccctaggtcaactatgtg

SEQ ID NO: 3978587 - DNA, 25 bp, Homo sapien
gaccccgtgccatgatagagttcac

SEQ ID NO: 3978588 - DNA, 25 bp, Homo sapien
tctttgtcaattcccactgcttccg

SEQ ID NO: 3978589 - DNA, 25 bp, Homo sapien
ttcaacatcttcacggccacggtga

SEQ ID NO: 3978590 - DNA, 25 bp, Homo sapien
ttgggcttgtctttgtcaattccca

SEQ ID NO: 3978591 - DNA, 25 bp, Homo sapien
acggtgaccgcctccttgggcttgt

SEQ ID NO: 3978592 - DNA, 25 bp, Homo sapien
cacttgcccaaagcaaccttctccc

SEQ ID NO: 3978593 - DNA, 25 bp, Homo sapien
tctcccaggggcttgcccagtgtca

SEQ ID NO: 3978594 - DNA, 25 bp, Homo sapien
gaccacttgcccaaagcaaccttct

SEQ ID NO: 3978595 - DNA, 25 bp, Homo sapien
acttgcccaaagcaaccttctccca

SEQ ID NO: 3978596 - DNA, 25 bp, Homo sapien
gaatgtcaattactggtggaacggc

SEQ ID NO: 3978597 - DNA, 25 bp, Homo sapien
tatccttgctagtgcggtggtcagc

SEQ ID NO: 3978598 - DNA, 25 bp, Homo sapien
cttagggtacacacgcgcctgagta

SEQ ID NO: 3978599 - DNA, 25 bp, Homo sapien
tcagcggcttactaaagcatggagt

SEQ ID NO: 3978600 - DNA, 25 bp, Homo sapien
tgtatgtgatgcagaagtagtcagc

SEQ ID NO: 3978601 - DNA, 25 bp, Homo sapien
gcatttccaccttcccgtactctca

SEQ ID NO: 3978602 - DNA, 25 bp, Homo sapien
tgtgatgcagaagtagtcagcattt

SEQ ID NO: 3978603 - DNA, 25 bp, Homo sapien
ccagtgtatgtgatgcagaagtagt

SEQ ID NO: 3978604 - DNA, 25 bp, Homo sapien
gaaaatgttaatccaatatccccat

SEQ ID NO: 3978605 - DNA, 25 bp, Homo sapien
gaaatacaatcttactcctgctgac

SEQ ID NO: 3978606 - DNA, 25 bp, Homo sapien
tgacatcatcacaccaagacctttg

SEQ ID NO: 3978607 - DNA, 25 bp, Homo sapien
ctttgtggctaagggtcataaaaag

SEQ ID NO: 3978608 - DNA, 25 bp, Homo sapien
tcctctggaagttcatactcggaga

SEQ ID NO: 3978609 - DNA, 25 bp, Homo sapien
gcgtgttgttatcctcaccagcggg

SEQ ID NO: 3978610 - DNA, 25 bp, Homo sapien
gttcatactcggagacccctgccag

SEQ ID NO: 3978611 - DNA, 25 bp, Homo sapien
ccgttgaagagaggcgtgttgttat

SEQ ID NO: 3978612 - DNA, 25 bp, Homo sapien
cgaatcttagaaaggaatgggttgg

SEQ ID NO: 3978613 - DNA, 25 bp, Homo sapien
accactggaatctaactcctctgcc

SEQ ID NO: 3978614 - DNA, 25 bp, Homo sapien
gcaaagacacagatgtaatcctggc

SEQ ID NO: 3978615 - DNA, 25 bp, Homo sapien
gcccagccagagtatcgaatcttag

SEQ ID NO: 3978616 - DNA, 25 bp, Homo sapien
gtagctccgagtccctttaactcaa

SEQ ID NO: 3978617 - DNA, 25 bp, Homo sapien
tgtggaagacattcagtagctccga

SEQ ID NO: 3978618 - DNA, 25 bp, Homo sapien
gaaattggctctaccatatttcctc

SEQ ID NO: 3978619 - DNA, 25 bp, Homo sapien
aatgtaaagtggaatatctcaagga

SEQ ID NO: 3978620 - DNA, 25 bp, Homo sapien
ggccacttttgaggatgactacgca

SEQ ID NO: 3978621 - DNA, 25 bp, Homo sapien
taaaccatgaacaagactttggccc

SEQ ID NO: 3978622 - DNA, 25 bp, Homo sapien
tgactgcccaggtggatagtactcc

SEQ ID NO: 3978623 - DNA, 25 bp, Homo sapien
cagacttccctcaaagcaggctgga

SEQ ID NO: 3978624 - DNA, 25 bp, Homo sapien
gacttccagtttgcattggtccaca

SEQ ID NO: 3978625 - DNA, 25 bp, Homo sapien
ggatatcatgggcaagaagctccag

SEQ ID NO: 3978626 - DNA, 25 bp, Homo sapien
tcaggagcgggtttaacggccaatg

SEQ ID NO: 3978627 - DNA, 25 bp, Homo sapien
taattcattctgcatcagggccgtg

SEQ ID NO: 3978628 - DNA, 25 bp, Homo sapien
tttttagaataataaggatctgagc

SEQ ID NO: 3978629 - DNA, 25 bp, Homo sapien
gagctgaggcatgaacaacggaaaa

SEQ ID NO: 3978630 - DNA, 25 bp, Homo sapien
gaaatatgctgacttctaaaatgag

SEQ ID NO: 3978631 - DNA, 25 bp, Homo sapien
gaaaacgaagggcatatgcttgaaa

SEQ ID NO: 3978632 - DNA, 25 bp, Homo sapien
gctaccaggctaggttttgtggcat

SEQ ID NO: 3978633 - DNA, 25 bp, Homo sapien
tcatcattcacaacatgaggccccg

SEQ ID NO: 3978634 - DNA, 25 bp, Homo sapien
gcaataacatgggactgtgcggtca

SEQ ID NO: 3978635 - DNA, 25 bp, Homo sapien
gatgtgggcaacagccaatcccgtt

SEQ ID NO: 3978636 - DNA, 25 bp, Homo sapien
tgtgtgtttactccccaggactgac

SEQ ID NO: 3978637 - DNA, 25 bp, Homo sapien
tcgagagatcgcatcagccaaggtc

SEQ ID NO: 3978638 - DNA, 25 bp, Homo sapien
ggatcactaacactggacctgagaa

SEQ ID NO: 3978639 - DNA, 25 bp, Homo sapien
gagtaaacctatcagagccatgacg

SEQ ID NO: 3978640 - DNA, 25 bp, Homo sapien
tttatttgtgtgagacggagtatca

SEQ ID NO: 3978641 - DNA, 25 bp, Homo sapien
acggcacccagtctgctcttgattt

SEQ ID NO: 3978642 - DNA, 25 bp, Homo sapien
tattttatttgtgtgagacggagta

SEQ ID NO: 3978643 - DNA, 25 bp, Homo sapien
agccacggcacccagtctgctcttg

SEQ ID NO: 3978644 - DNA, 25 bp, Homo sapien
agcctcttgtaccatgctgacggca

SEQ ID NO: 3978645 - DNA, 25 bp, Homo sapien
gaaactgatgtgctcgatgtaaaac

SEQ ID NO: 3978646 - DNA, 25 bp, Homo sapien
catcctaccctatggaagcttcaag

SEQ ID NO: 3978647 - DNA, 25 bp, Homo sapien
gaatttatctggacggagccaacca

SEQ ID NO: 3978648 - DNA, 25 bp, Homo sapien
tggctgtccagcatacctgtaccag

SEQ ID NO: 3978649 - DNA, 25 bp, Homo sapien
aagccctgacactgaatgtgacatg

SEQ ID NO: 3978650 - DNA, 25 bp, Homo sapien
tgtgacatgagcctccatcaaagga

SEQ ID NO: 3978651 - DNA, 25 bp, Homo sapien
tggtctcatttaactcgctgggcac

SEQ ID NO: 3978652 - DNA, 25 bp, Homo sapien
tgcatctacatctgccttccgcttc

SEQ ID NO: 3978653 - DNA, 25 bp, Homo sapien
ttgtaaacgttctgcatctacatct

SEQ ID NO: 3978654 - DNA, 25 bp, Homo sapien
cttttgtaaacgttctgcatctaca

SEQ ID NO: 3978655 - DNA, 25 bp, Homo sapien
tgcttttgtaaacgttctgcatcta

SEQ ID NO: 3978656 - DNA, 25 bp, Homo sapien
tcttcattcggcacaggatgactgt

SEQ ID NO: 3978657 - DNA, 25 bp, Homo sapien
gaagacccctatgcagtaaatggct

SEQ ID NO: 3978658 - DNA, 25 bp, Homo sapien
catacaggcgattaagaagacccct

SEQ ID NO: 3978659 - DNA, 25 bp, Homo sapien
gatgactgttaccaccatacaggcg

SEQ ID NO: 3978660 - DNA, 25 bp, Homo sapien
tgcagagtgaaaggatatcccaata

SEQ ID NO: 3978661 - DNA, 25 bp, Homo sapien
tggcagaactgtcaaccatgcagag

SEQ ID NO: 3978662 - DNA, 25 bp, Homo sapien
gagtgaaaggatatcccaatagaat

SEQ ID NO: 3978663 - DNA, 25 bp, Homo sapien
ctggcagaactgtcaaccatgcaga

SEQ ID NO: 3978664 - DNA, 25 bp, Homo sapien
aagttacattccgaatatagagaac

SEQ ID NO: 3978665 - DNA, 25 bp, Homo sapien
gttacattccgaatatagagaacct

SEQ ID NO: 3978666 - DNA, 25 bp, Homo sapien
tcaaaagttacattccgaatataga

SEQ ID NO: 3978667 - DNA, 25 bp, Homo sapien
aaaagttacattccgaatatagaga

SEQ ID NO: 3978668 - DNA, 25 bp, Homo sapien
tcaaacgcatggaaaaaatcaaccc

SEQ ID NO: 3978669 - DNA, 25 bp, Homo sapien
gaaaaggctagacgacacaggaatg

SEQ ID NO: 3978670 - DNA, 25 bp, Homo sapien
caaccgagagacacggagcaacact

SEQ ID NO: 3978671 - DNA, 25 bp, Homo sapien
tggccactgggagattccgactgca

SEQ ID NO: 3978672 - DNA, 25 bp, Homo sapien
ttgctgttttggcaggacagtgagc

SEQ ID NO: 3978673 - DNA, 25 bp, Homo sapien
ggcagactggttggcctgccctata

SEQ ID NO: 3978674 - DNA, 25 bp, Homo sapien
gactggttggcctgccctatataat

SEQ ID NO: 3978675 - DNA, 25 bp, Homo sapien
gccaggcagactggttggcctgccc

SEQ ID NO: 3978676 - DNA, 25 bp, Homo sapien
cctcggtcacattgaacagagccag

SEQ ID NO: 3978677 - DNA, 25 bp, Homo sapien
cttctgcattggaactatttatccc

SEQ ID NO: 3978678 - DNA, 25 bp, Homo sapien
cattggaactatttatccccgagtg

SEQ ID NO: 3978679 - DNA, 25 bp, Homo sapien
ccgcctcggtcacattgaacagagc

SEQ ID NO: 3978680 - DNA, 25 bp, Homo sapien
aagaacaaaatcagtccagtggtgg

SEQ ID NO: 3978681 - DNA, 25 bp, Homo sapien
taaacagcggcattaaagggctgcg

SEQ ID NO: 3978682 - DNA, 25 bp, Homo sapien
ccattacgtctaaacagcggcatta

SEQ ID NO: 3978683 - DNA, 25 bp, Homo sapien
cattaaagggctgcggattttaaag

SEQ ID NO: 3978684 - DNA, 25 bp, Homo sapien
cagcccgtcgggcccgtatttactg

SEQ ID NO: 3978685 - DNA, 25 bp, Homo sapien
cttttccacgtgcttgatccactgg

SEQ ID NO: 3978686 - DNA, 25 bp, Homo sapien
cgttcttttccacgtgcttgatcca

SEQ ID NO: 3978687 - DNA, 25 bp, Homo sapien
atttactgccgttcttttccacgtg

SEQ ID NO: 3978688 - DNA, 25 bp, Homo sapien
tccggcttggaggatgggccggtga

SEQ ID NO: 3978689 - DNA, 25 bp, Homo sapien
catttgccggcagtccggcttggag

SEQ ID NO: 3978690 - DNA, 25 bp, Homo sapien
ccactgtggaggcatttgccggcag

SEQ ID NO: 3978691 - DNA, 25 bp, Homo sapien
ctgtggaggcatttgccggcagtcc

SEQ ID NO: 3978692 - DNA, 25 bp, Homo sapien
gaatgagagaccaataaataagctg

SEQ ID NO: 3978693 - DNA, 25 bp, Homo sapien
caataaataagctgtgttgtccaga

SEQ ID NO: 3978694 - DNA, 25 bp, Homo sapien
ggatgggagaatgagagaccaataa

SEQ ID NO: 3978695 - DNA, 25 bp, Homo sapien
tgagagaccaataaataagctgtgt

SEQ ID NO: 3978696 - DNA, 25 bp, Homo sapien
ctttgaaataacactgtggccccat

SEQ ID NO: 3978697 - DNA, 25 bp, Homo sapien
aagagacttcacagcacgaggggaa

SEQ ID NO: 3978698 - DNA, 25 bp, Homo sapien
tgccagacaaggtcacaaactatgc

SEQ ID NO: 3978699 - DNA, 25 bp, Homo sapien
gtcctctgggctagatcctgccaga

SEQ ID NO: 3978700 - DNA, 25 bp, Homo sapien
ggtcacaaactatgctcctatgcac

SEQ ID NO: 3978701 - DNA, 25 bp, Homo sapien
atggcagtctcttagcaacgccaaa

SEQ ID NO: 3978702 - DNA, 25 bp, Homo sapien
ggcagtctcttagcaacgccaaaga

SEQ ID NO: 3978703 - DNA, 25 bp, Homo sapien
tggcagtctcttagcaacgccaaag

SEQ ID NO: 3978704 - DNA, 25 bp, Homo sapien
gcagtctcttagcaacgccaaagag

SEQ ID NO: 3978705 - DNA, 25 bp, Homo sapien
ttaaacacatttctgtggaaggtca

SEQ ID NO: 3978706 - DNA, 25 bp, Homo sapien
taaacacatttctgtggaaggtcac

SEQ ID NO: 3978707 - DNA, 25 bp, Homo sapien
tctgactctcggaagtcttgcagaa

SEQ ID NO: 3978708 - DNA, 25 bp, Homo sapien
tctgtctggatatctgactctcgga

SEQ ID NO: 3978709 - DNA, 25 bp, Homo sapien
aggcttggcacatgctcgttttgtt

SEQ ID NO: 3978710 - DNA, 25 bp, Homo sapien
tcggaagtcttgcagaatcggctgg

SEQ ID NO: 3978711 - DNA, 25 bp, Homo sapien
aaacacacacgtctctttgcagaga

SEQ ID NO: 3978712 - DNA, 25 bp, Homo sapien
acgtctctttgcagagagagtgaag

SEQ ID NO: 3978713 - DNA, 25 bp, Homo sapien
ctaaaacacacacgtctctttgcag

SEQ ID NO: 3978714 - DNA, 25 bp, Homo sapien
cacgtctctttgcagagagagtgaa

SEQ ID NO: 3978715 - DNA, 25 bp, Homo sapien
tcccgaggagctgaggtaaacacag

SEQ ID NO: 3978716 - DNA, 25 bp, Homo sapien
taaacacagctgagagcgttcatgc

SEQ ID NO: 3978717 - DNA, 25 bp, Homo sapien
gatgtaaaactcaggcgtcagtctc

SEQ ID NO: 3978718 - DNA, 25 bp, Homo sapien
tcatgcctgggagtcacgtcagagc

SEQ ID NO: 3978719 - DNA, 25 bp, Homo sapien
aacaagagttggcaggccaggtgcg

SEQ ID NO: 3978720 - DNA, 25 bp, Homo sapien
ttaacaagagttggcaggccaggtg

SEQ ID NO: 3978721 - DNA, 25 bp, Homo sapien
tcttaacaagagttggcaggccagg

SEQ ID NO: 3978722 - DNA, 25 bp, Homo sapien
atcttaacaagagttggcaggccag

SEQ ID NO: 3978723 - DNA, 25 bp, Homo sapien
tcgaaagcaatcaataaggcttcct

SEQ ID NO: 3978724 - DNA, 25 bp, Homo sapien
cctgcaagaatcgaaagcaatcaat

SEQ ID NO: 3978725 - DNA, 25 bp, Homo sapien
aggccccctgcaagaatcgaaagca

SEQ ID NO: 3978726 - DNA, 25 bp, Homo sapien
agcaatcaataaggcttccttcctc

SEQ ID NO: 3978727 - DNA, 25 bp, Homo sapien
ggcttcttgctggggtcagttctgc

SEQ ID NO: 3978728 - DNA, 25 bp, Homo sapien
caaaggcttcttgctggggtcagtt

SEQ ID NO: 3978729 - DNA, 25 bp, Homo sapien
aaggcttcttgctggggtcagttct

SEQ ID NO: 3978730 - DNA, 25 bp, Homo sapien
cttcttgctggggtcagttctgcgg

SEQ ID NO: 3978731 - DNA, 25 bp, Homo sapien
caccaagtcttacactcagagcaag

SEQ ID NO: 3978732 - DNA, 25 bp, Homo sapien
cagagcccgtgtcagggtaggacac

SEQ ID NO: 3978733 - DNA, 25 bp, Homo sapien
tctagagctggcatgcagagcccgt

SEQ ID NO: 3978734 - DNA, 25 bp, Homo sapien
gtgagatttcgcaactctagagctg

SEQ ID NO: 3978735 - DNA, 25 bp, Homo sapien
caggtgtcaactccacattcgagct

SEQ ID NO: 3978736 - DNA, 25 bp, Homo sapien
cgagcttatcagtcagtgcttggaa

SEQ ID NO: 3978737 - DNA, 25 bp, Homo sapien
ggatgggctgccaaaagctcccaaa

SEQ ID NO: 3978738 - DNA, 25 bp, Homo sapien
tactttgttcccaacccaggagaca

SEQ ID NO: 3978739 - DNA, 25 bp, Homo sapien
tacatggttccctttgcacagagga

SEQ ID NO: 3978740 - DNA, 25 bp, Homo sapien
gctcatatacatggttccctttgca

SEQ ID NO: 3978741 - DNA, 25 bp, Homo sapien
gtatttataagctcatatacatggt

SEQ ID NO: 3978742 - DNA, 25 bp, Homo sapien
ttgcacagaggaaatagatgccagg

SEQ ID NO: 3978743 - DNA, 25 bp, Homo sapien
ttcttgtgatggaagtgaagggccc

SEQ ID NO: 3978744 - DNA, 25 bp, Homo sapien
ttttcctttactcttcagctggcct

SEQ ID NO: 3978745 - DNA, 25 bp, Homo sapien
gccctgttggggaaatgatgcttct

SEQ ID NO: 3978746 - DNA, 25 bp, Homo sapien
tggccttctacagttgccctgttgg

SEQ ID NO: 3978747 - DNA, 25 bp, Homo sapien
ttgggaaccatgaggatcatgcaaa

SEQ ID NO: 3978748 - DNA, 25 bp, Homo sapien
tgtcagacatttcataccacgtcca

SEQ ID NO: 3978749 - DNA, 25 bp, Homo sapien
cattttcagagtaatctcagcttcc

SEQ ID NO: 3978750 - DNA, 25 bp, Homo sapien
cactttacacagatgacgcttggga

SEQ ID NO: 3978751 - DNA, 25 bp, Homo sapien
tcaagcaagaatgggctggtatgca

SEQ ID NO: 3978752 - DNA, 25 bp, Homo sapien
cagccgccacacgaggagaggcaaa

SEQ ID NO: 3978753 - DNA, 25 bp, Homo sapien
gccgccacacgaggagaggcaaact

SEQ ID NO: 3978754 - DNA, 25 bp, Homo sapien
caagcaagaatgggctggtatgcag

SEQ ID NO: 3978755 - DNA, 25 bp, Homo sapien
cccttgtcagatgggaccacacttt

SEQ ID NO: 3978756 - DNA, 25 bp, Homo sapien
tcattctccactacacaggtataat

SEQ ID NO: 3978757 - DNA, 25 bp, Homo sapien
tttccataatgaggctccagtgctg

SEQ ID NO: 3978758 - DNA, 25 bp, Homo sapien
tggtacgtgtgattgatggacccgt

SEQ ID NO: 3978759 - DNA, 25 bp, Homo sapien
ctgcaagcacatgagtgatataaga

SEQ ID NO: 3978760 - DNA, 25 bp, Homo sapien
cactataaaaacaggagggcagagc

SEQ ID NO: 3978761 - DNA, 25 bp, Homo sapien
cttagctatcatttcaggaatttca

SEQ ID NO: 3978762 - DNA, 25 bp, Homo sapien
caggaatttcaactgaccttctgag

SEQ ID NO: 3978763 - DNA, 25 bp, Homo sapien
ccccaggggatatggtcagctcaag

SEQ ID NO: 3978764 - DNA, 25 bp, Homo sapien
ttaaccccaggggatatggtcagct

SEQ ID NO: 3978765 - DNA, 25 bp, Homo sapien
gatatggtcagctcaagtctctcac

SEQ ID NO: 3978766 - DNA, 25 bp, Homo sapien
gggccatggcattccatacaagatc

SEQ ID NO: 3978767 - DNA, 25 bp, Homo sapien
tactcaggtgttcgataacaagcag

SEQ ID NO: 3978768 - DNA, 25 bp, Homo sapien
caggtgttcgataacaagcagaata

SEQ ID NO: 3978769 - DNA, 25 bp, Homo sapien
agcagaataaacatgcagaaggtga

SEQ ID NO: 3978770 - DNA, 25 bp, Homo sapien
ccaaatactcaggtgttcgataaca

SEQ ID NO: 3978771 - DNA, 25 bp, Homo sapien
cgtaggtaacgaagaaaatatcaga

SEQ ID NO: 3978772 - DNA, 25 bp, Homo sapien
cattctccccaaagtctgccttggt

SEQ ID NO: 3978773 - DNA, 25 bp, Homo sapien
tccccaaagtctgccttggtcaggc

SEQ ID NO: 3978774 - DNA, 25 bp, Homo sapien
tacgtaggtaacgaagaaaatatca

SEQ ID NO: 3978775 - DNA, 25 bp, Homo sapien
gaatctcatcgtatctggtctaagg

SEQ ID NO: 3978776 - DNA, 25 bp, Homo sapien
ttcccagatgggttccggtgatccc

SEQ ID NO: 3978777 - DNA, 25 bp, Homo sapien
aatttcagaaaagggttgcagggca

SEQ ID NO: 3978778 - DNA, 25 bp, Homo sapien
gaaacttactcataggctgtcccca

SEQ ID NO: 3978779 - DNA, 25 bp, Homo sapien
cagccaccgcatggttggcattggg

SEQ ID NO: 3978780 - DNA, 25 bp, Homo sapien
tgtagcctccaatgcgatgctcctg

SEQ ID NO: 3978781 - DNA, 25 bp, Homo sapien
tcccgtttttcagccaccgcatggt

SEQ ID NO: 3978782 - DNA, 25 bp, Homo sapien
cggctgggcagcgaaacttgacagt

SEQ ID NO: 3978783 - DNA, 25 bp, Homo sapien
ttctgtgttggtccagtatggtgct

SEQ ID NO: 3978784 - DNA, 25 bp, Homo sapien
tttctgtgttggtccagtatggtgc

SEQ ID NO: 3978785 - DNA, 25 bp, Homo sapien
tctgtgttggtccagtatggtgctc

SEQ ID NO: 3978786 - DNA, 25 bp, Homo sapien
cttttctgtgttggtccagtatggt

SEQ ID NO: 3978787 - DNA, 25 bp, Homo sapien
gagatttctttacaaggccatgctg

SEQ ID NO: 3978788 - DNA, 25 bp, Homo sapien
taggtgcacccatatgatgctgaaa

SEQ ID NO: 3978789 - DNA, 25 bp, Homo sapien
gggcctggcatatactgaaacaatt

SEQ ID NO: 3978790 - DNA, 25 bp, Homo sapien
caaaactatcgaagccaggagagaa

SEQ ID NO: 3978791 - DNA, 25 bp, Homo sapien
tgcagtgctgctcatctaggtctca

SEQ ID NO: 3978792 - DNA, 25 bp, Homo sapien
gctttatgtgaaccttgaatctgta

SEQ ID NO: 3978793 - DNA, 25 bp, Homo sapien
gcgcccggctggaactcttttataa

SEQ ID NO: 3978794 - DNA, 25 bp, Homo sapien
ccatacagcagggtacgggtgcagt

SEQ ID NO: 3978795 - DNA, 25 bp, Homo sapien
cgtgtggtataaacttccaatggca

SEQ ID NO: 3978796 - DNA, 25 bp, Homo sapien
gaagagcgggcttaaagtcagctaa

SEQ ID NO: 3978797 - DNA, 25 bp, Homo sapien
taccttagaggtgtatgaagagcgg

SEQ ID NO: 3978798 - DNA, 25 bp, Homo sapien
gaatgacactaatccacctgtaaag

SEQ ID NO: 3978799 - DNA, 25 bp, Homo sapien
tcaggaaagtagacacagcggggaa

SEQ ID NO: 3978800 - DNA, 25 bp, Homo sapien
acagcatggcgcagaagagtcgaca

SEQ ID NO: 3978801 - DNA, 25 bp, Homo sapien
tctcaggtttgaaagtcaggaaagt

SEQ ID NO: 3978802 - DNA, 25 bp, Homo sapien
gggaccatcggagccgggcagttac

SEQ ID NO: 3978803 - DNA, 25 bp, Homo sapien
tcatcatctccggatgagatggcat

SEQ ID NO: 3978804 - DNA, 25 bp, Homo sapien
tgacaaaatcttccgcaccatcggt

SEQ ID NO: 3978805 - DNA, 25 bp, Homo sapien
aatcttccgcaccatcggtgtcatc

SEQ ID NO: 3978806 - DNA, 25 bp, Homo sapien
tcactgacaaaatcttccgcaccat

SEQ ID NO: 3978807 - DNA, 25 bp, Homo sapien
gagaccttctccatagcaaagtcaa

SEQ ID NO: 3978808 - DNA, 25 bp, Homo sapien
acaacccaggaaccctcgcaaagag

SEQ ID NO: 3978809 - DNA, 25 bp, Homo sapien
tcgcaaagagcctgggattgttttc

SEQ ID NO: 3978810 - DNA, 25 bp, Homo sapien
tccatggatgtgttttttgcaaagc

SEQ ID NO: 3978811 - DNA, 25 bp, Homo sapien
agcagaactttaaactcggccacaa

SEQ ID NO: 3978812 - DNA, 25 bp, Homo sapien
cagaactttaaactcggccacaaag

SEQ ID NO: 3978813 - DNA, 25 bp, Homo sapien
gcagaactttaaactcggccacaaa

SEQ ID NO: 3978814 - DNA, 25 bp, Homo sapien
aagcagaactttaaactcggccaca

SEQ ID NO: 3978815 - DNA, 25 bp, Homo sapien
tactggcagtacaagcatagaggcc

SEQ ID NO: 3978816 - DNA, 25 bp, Homo sapien
gcgtggcgccctttatctgcaagta

SEQ ID NO: 3978817 - DNA, 25 bp, Homo sapien
cttagtccaactgatcacggcggca

SEQ ID NO: 3978818 - DNA, 25 bp, Homo sapien
cacggcggcatctttcaacaggcag

SEQ ID NO: 3978819 - DNA, 25 bp, Homo sapien
ggcctgcttattcccaggagaagct

SEQ ID NO: 3978820 - DNA, 25 bp, Homo sapien
gtcagtggaggcctgcttattccca

SEQ ID NO: 3978821 - DNA, 25 bp, Homo sapien
gaacgtccaacaaaggtcagtggag

SEQ ID NO: 3978822 - DNA, 25 bp, Homo sapien
ggagaggagagaacgtccaacaaag

SEQ ID NO: 3978823 - DNA, 25 bp, Homo sapien
acagttgtactgacctggccccagg

SEQ ID NO: 3978824 - DNA, 25 bp, Homo sapien
ttgccgtccacagggcttagcttct

SEQ ID NO: 3978825 - DNA, 25 bp, Homo sapien
tgctgcaggtgacctgacccgctgc

SEQ ID NO: 3978826 - DNA, 25 bp, Homo sapien
gtccttgggtccatttgccgtccac

SEQ ID NO: 3978827 - DNA, 25 bp, Homo sapien
tttttcccattgctgtggcatactt

SEQ ID NO: 3978828 - DNA, 25 bp, Homo sapien
cccattgctgtggcatacttttcac

SEQ ID NO: 3978829 - DNA, 25 bp, Homo sapien
ttcccattgctgtggcatacttttc

SEQ ID NO: 3978830 - DNA, 25 bp, Homo sapien
ttttcccattgctgtggcatacttt

SEQ ID NO: 3978831 - DNA, 25 bp, Homo sapien
ctgtgcgaatccaccaggggtgcac

SEQ ID NO: 3978832 - DNA, 25 bp, Homo sapien
tgtgcgaatccaccaggggtgcaca

SEQ ID NO: 3978833 - DNA, 25 bp, Homo sapien
cctgtgcgaatccaccaggggtgca

SEQ ID NO: 3978834 - DNA, 25 bp, Homo sapien
gccttgctatgcacaaatgctcttt

SEQ ID NO: 3978835 - DNA, 25 bp, Homo sapien
tgccaaaacgcaatggggagaaggt

SEQ ID NO: 3978836 - DNA, 25 bp, Homo sapien
agaagccgccttgctatgcacaaat

SEQ ID NO: 3978837 - DNA, 25 bp, Homo sapien
gccgccttgctatgcacaaatgctc

SEQ ID NO: 3978838 - DNA, 25 bp, Homo sapien
aatggcgcccaaatgcaaacagaga

SEQ ID NO: 3978839 - DNA, 25 bp, Homo sapien
aatcacttcacggagaatggacgac

SEQ ID NO: 3978840 - DNA, 25 bp, Homo sapien
tcccgtgtggtttttgaaatggcgc

SEQ ID NO: 3978841 - DNA, 25 bp, Homo sapien
gagtcttgccccgtccaatcacttc

SEQ ID NO: 3978842 - DNA, 25 bp, Homo sapien
ggaggcatgtcctgtcagggttgtg

SEQ ID NO: 3978843 - DNA, 25 bp, Homo sapien
ccgggaggcatgtcctgtcagggtt

SEQ ID NO: 3978844 - DNA, 25 bp, Homo sapien
cgggaggcatgtcctgtcagggttg

SEQ ID NO: 3978845 - DNA, 25 bp, Homo sapien
gaggcatgtcctgtcagggttgtgg

SEQ ID NO: 3978846 - DNA, 25 bp, Homo sapien
taaatgtcacggctgtagggctgta

SEQ ID NO: 3978847 - DNA, 25 bp, Homo sapien
ctcctgccaccttgtacagagtaaa

SEQ ID NO: 3978848 - DNA, 25 bp, Homo sapien
cactgtaacaggagcgctgcgggaa

SEQ ID NO: 3978849 - DNA, 25 bp, Homo sapien
gctgggactcccacaagcactgtaa

SEQ ID NO: 3978850 - DNA, 25 bp, Homo sapien
tctggtagacacaagtcgggactga

SEQ ID NO: 3978851 - DNA, 25 bp, Homo sapien
tcgggactgaaacctccctggtcgc

SEQ ID NO: 3978852 - DNA, 25 bp, Homo sapien
caaggatgccggtaacaacagctaa

SEQ ID NO: 3978853 - DNA, 25 bp, Homo sapien
tctgcagcggtagctggatttctcc

SEQ ID NO: 3978854 - DNA, 25 bp, Homo sapien
tgccactcaagtccctgcttgtagg

SEQ ID NO: 3978855 - DNA, 25 bp, Homo sapien
cctgcttgtaggttcatatttccac

SEQ ID NO: 3978856 - DNA, 25 bp, Homo sapien
tctggtcctttccctgcattccagt

SEQ ID NO: 3978857 - DNA, 25 bp, Homo sapien
tttccctgcattccagtctcctggg

SEQ ID NO: 3978858 - DNA, 25 bp, Homo sapien
tattaggcctatccctgatagaaag

SEQ ID NO: 3978859 - DNA, 25 bp, Homo sapien
cttcacctattaggcctatccctga

SEQ ID NO: 3978860 - DNA, 25 bp, Homo sapien
cctcttctcttacacgatgaaggga

SEQ ID NO: 3978861 - DNA, 25 bp, Homo sapien
agggagtcacaccactgaactgccg

SEQ ID NO: 3978862 - DNA, 25 bp, Homo sapien
gccccacagcatgccgagaataacc

SEQ ID NO: 3978863 - DNA, 25 bp, Homo sapien
ctagccccacagcatgccgagaata

SEQ ID NO: 3978864 - DNA, 25 bp, Homo sapien
agccccacagcatgccgagaataac

SEQ ID NO: 3978865 - DNA, 25 bp, Homo sapien
tagccccacagcatgccgagaataa

SEQ ID NO: 3978866 - DNA, 25 bp, Homo sapien
ccacagagctaagggcctgcgttac

SEQ ID NO: 3978867 - DNA, 25 bp, Homo sapien
taagggcctgcgttactgcgagttg

SEQ ID NO: 3978868 - DNA, 25 bp, Homo sapien
ccacagctgtgcctcacgcagtcca

SEQ ID NO: 3978869 - DNA, 25 bp, Homo sapien
ctcacgcagtccacagagctaaggg

SEQ ID NO: 3978870 - DNA, 25 bp, Homo sapien
ctgtggctcctagaagctgctgctg

SEQ ID NO: 3978871 - DNA, 25 bp, Homo sapien
tgtggctcctagaagctgctgctgg

SEQ ID NO: 3978872 - DNA, 25 bp, Homo sapien
ctagaagctgctgctgggacaagct

SEQ ID NO: 3978873 - DNA, 25 bp, Homo sapien
gaagctgctgctgggacaagctcac

SEQ ID NO: 3978874 - DNA, 25 bp, Homo sapien
tccagatcccgtttgacattttccc

SEQ ID NO: 3978875 - DNA, 25 bp, Homo sapien
tggtgcatactccagcggatacgtt

SEQ ID NO: 3978876 - DNA, 25 bp, Homo sapien
agcggatacgtttgccctgtatggc

SEQ ID NO: 3978877 - DNA, 25 bp, Homo sapien
cctgaaaggtcagatagatgtccag

SEQ ID NO: 3978878 - DNA, 25 bp, Homo sapien
ccgtgcagacgcctgaaggcacaga

SEQ ID NO: 3978879 - DNA, 25 bp, Homo sapien
tcgaaacccgtgcagacgcctgaag

SEQ ID NO: 3978880 - DNA, 25 bp, Homo sapien
tggccagcatctcgaaacccgtgca

SEQ ID NO: 3978881 - DNA, 25 bp, Homo sapien
agcatctcgaaacccgtgcagacgc

SEQ ID NO: 3978882 - DNA, 25 bp, Homo sapien
cagcaatcagctgaatgggaatgac

SEQ ID NO: 3978883 - DNA, 25 bp, Homo sapien
cggcagcaatcagctgaatgggaat

SEQ ID NO: 3978884 - DNA, 25 bp, Homo sapien
gagccggcagcaatcagctgaatgg

SEQ ID NO: 3978885 - DNA, 25 bp, Homo sapien
gggagccggcagcaatcagctgaat

SEQ ID NO: 3978886 - DNA, 25 bp, Homo sapien
ctggaggaaaggttccccacactgc

SEQ ID NO: 3978887 - DNA, 25 bp, Homo sapien
cactaggacaaaccagcagaggcat

SEQ ID NO: 3978888 - DNA, 25 bp, Homo sapien
gagatggctcatgcatcaacgggca

SEQ ID NO: 3978889 - DNA, 25 bp, Homo sapien
tatggactcctacggtgtggcgcag

SEQ ID NO: 3978890 - DNA, 25 bp, Homo sapien
caacagctgagggttagcaggcact

SEQ ID NO: 3978891 - DNA, 25 bp, Homo sapien
caggtttaatagtcaaacgacagat

SEQ ID NO: 3978892 - DNA, 25 bp, Homo sapien
taatatatgttaaagtacctagcac

SEQ ID NO: 3978893 - DNA, 25 bp, Homo sapien
gaatcaaccagcagtgtccctaaca

SEQ ID NO: 3978894 - DNA, 25 bp, Homo sapien
tacctagcacagagtccaaccatga

SEQ ID NO: 3978895 - DNA, 25 bp, Homo sapien
ctccataggggtatcatgtgcaaat

SEQ ID NO: 3978896 - DNA, 25 bp, Homo sapien
cctccataggggtatcatgtgcaaa

SEQ ID NO: 3978897 - DNA, 25 bp, Homo sapien
ctcctgtccacttcagtactgtggg

SEQ ID NO: 3978898 - DNA, 25 bp, Homo sapien
ctgtccacttcagtactgtgggtcc

SEQ ID NO: 3978899 - DNA, 25 bp, Homo sapien
ttccaaagtggagtaaattacacat

SEQ ID NO: 3978900 - DNA, 25 bp, Homo sapien
gtaaattacacattcagcatctgaa

SEQ ID NO: 3978901 - DNA, 25 bp, Homo sapien
gagtaaattacacattcagcatctg

SEQ ID NO: 3978902 - DNA, 25 bp, Homo sapien
gtattccaaagtggagtaaattaca

SEQ ID NO: 3978903 - DNA, 25 bp, Homo sapien
taatcacctctgacaccaaagcgaa

SEQ ID NO: 3978904 - DNA, 25 bp, Homo sapien
ctaatcacctctgacaccaaagcga

SEQ ID NO: 3978905 - DNA, 25 bp, Homo sapien
aatcacctctgacaccaaagcgaac

SEQ ID NO: 3978906 - DNA, 25 bp, Homo sapien
tcacctctgacaccaaagcgaactc

SEQ ID NO: 3978907 - DNA, 25 bp, Homo sapien
caatacccacattgttggatgtaaa

SEQ ID NO: 3978908 - DNA, 25 bp, Homo sapien
agcaggcctgcttccaacaataccc

SEQ ID NO: 3978909 - DNA, 25 bp, Homo sapien
attcttacacaaagactcactcggg

SEQ ID NO: 3978910 - DNA, 25 bp, Homo sapien
tccttcctgatccataagtgcatcc

SEQ ID NO: 3978911 - DNA, 25 bp, Homo sapien
cgctgccctgaaaagccaaaatgaa

SEQ ID NO: 3978912 - DNA, 25 bp, Homo sapien
aaagccaaaatgaaaaatgacagtt

SEQ ID NO: 3978913 - DNA, 25 bp, Homo sapien
gaaaagccaaaatgaaaaatgacag

SEQ ID NO: 3978914 - DNA, 25 bp, Homo sapien
aacgctgccctgaaaagccaaaatg

SEQ ID NO: 3978915 - DNA, 25 bp, Homo sapien
aagcccacaccgtaggaaatcccag

SEQ ID NO: 3978916 - DNA, 25 bp, Homo sapien
ccacaccgtaggaaatcccagctca

SEQ ID NO: 3978917 - DNA, 25 bp, Homo sapien
ttcctcagtttttgccgagccacgc

SEQ ID NO: 3978918 - DNA, 25 bp, Homo sapien
tcctcagtttttgccgagccacgca

SEQ ID NO: 3978919 - DNA, 25 bp, Homo sapien
aatgtggtatcctcaactaaactga

SEQ ID NO: 3978920 - DNA, 25 bp, Homo sapien
cttctggctctaatgtggtatcctc

SEQ ID NO: 3978921 - DNA, 25 bp, Homo sapien
aggcagatgaaacgaccccagctga

SEQ ID NO: 3978922 - DNA, 25 bp, Homo sapien
tggtgaccacgaccaggcagatgaa

SEQ ID NO: 3978923 - DNA, 25 bp, Homo sapien
catatctccatgtggacgttaatcc

SEQ ID NO: 3978924 - DNA, 25 bp, Homo sapien
cttccatatctccatgtggacgtta

SEQ ID NO: 3978925 - DNA, 25 bp, Homo sapien
atctccatgtggacgttaatcccat

SEQ ID NO: 3978926 - DNA, 25 bp, Homo sapien
tccatatctccatgtggacgttaat

SEQ ID NO: 3978927 - DNA, 25 bp, Homo sapien
tacgggcatggactacgcgcaatgc

SEQ ID NO: 3978928 - DNA, 25 bp, Homo sapien
tacgcgcaatgccttcagcctgcgg

SEQ ID NO: 3978929 - DNA, 25 bp, Homo sapien
tgcacacttcctctacgggcatgga

SEQ ID NO: 3978930 - DNA, 25 bp, Homo sapien
ctcaggaaccgaggcgctgccgctg

SEQ ID NO: 3978931 - DNA, 25 bp, Homo sapien
gcctctcaaatgtgcgcaaacagag

SEQ ID NO: 3978932 - DNA, 25 bp, Homo sapien
tttcattatctgctaaatccttcca

SEQ ID NO: 3978933 - DNA, 25 bp, Homo sapien
ttcagcctctcaaatgtgcgcaaac

SEQ ID NO: 3978934 - DNA, 25 bp, Homo sapien
aatgtgcgcaaacagagttcttttt

SEQ ID NO: 3978935 - DNA, 25 bp, Homo sapien
caagttaaaaatgctcgggttggca

SEQ ID NO: 3978936 - DNA, 25 bp, Homo sapien
tcaatgagcagaagcaacgtgacct

SEQ ID NO: 3978937 - DNA, 25 bp, Homo sapien
tcaacgcagctgatccaaaaaggac

SEQ ID NO: 3978938 - DNA, 25 bp, Homo sapien
tagctacaggactcagatacgtgca

SEQ ID NO: 3978939 - DNA, 25 bp, Homo sapien
tttctacctctaacacgacttcagg

SEQ ID NO: 3978940 - DNA, 25 bp, Homo sapien
ctacatacatgtgggaggaaagtac

SEQ ID NO: 3978941 - DNA, 25 bp, Homo sapien
caagagcctcagaagataatttcgg

SEQ ID NO: 3978942 - DNA, 25 bp, Homo sapien
ggaacaatcctaagtcctcgcagag

SEQ ID NO: 3978943 - DNA, 25 bp, Homo sapien
caggataattaggtccccaggctcg

SEQ ID NO: 3978944 - DNA, 25 bp, Homo sapien
tgaaaatgagtcgagcccggtggaa

SEQ ID NO: 3978945 - DNA, 25 bp, Homo sapien
tcaggaaagtcaacagtgtccggct

SEQ ID NO: 3978946 - DNA, 25 bp, Homo sapien
tatggtgcgacctcctaggcaggat

SEQ ID NO: 3978947 - DNA, 25 bp, Homo sapien
cactgaaacccgagccgtttcctgg

SEQ ID NO: 3978948 - DNA, 25 bp, Homo sapien
tgctcgcgagttgcgaaggctcaga

SEQ ID NO: 3978949 - DNA, 25 bp, Homo sapien
caactccaaacgcagaagagtggtc

SEQ ID NO: 3978950 - DNA, 25 bp, Homo sapien
aagagtggtccttgggtcttcgccg

SEQ ID NO: 3978951 - DNA, 25 bp, Homo sapien
aactgaatattaatggaggccctac

SEQ ID NO: 3978952 - DNA, 25 bp, Homo sapien
aaaatgcgcctgcttgatactgcgg

SEQ ID NO: 3978953 - DNA, 25 bp, Homo sapien
cctactatgggagggtcacactaca

SEQ ID NO: 3978954 - DNA, 25 bp, Homo sapien
ttagaaaacaaatgaccgaaggctc

SEQ ID NO: 3978955 - DNA, 25 bp, Homo sapien
caagttctcagaaaagggatgcagc

SEQ ID NO: 3978956 - DNA, 25 bp, Homo sapien
cacacgggttgttctgatagcagta

SEQ ID NO: 3978957 - DNA, 25 bp, Homo sapien
tcagcccaggttgacacttagccat

SEQ ID NO: 3978958 - DNA, 25 bp, Homo sapien
cccaccaatgggaaactcgagtgtc

SEQ ID NO: 3978959 - DNA, 25 bp, Homo sapien
tgatctccggcctatctctgaacat

SEQ ID NO: 3978960 - DNA, 25 bp, Homo sapien
tttgcataactgaagtgtccccctt

SEQ ID NO: 3978961 - DNA, 25 bp, Homo sapien
aaatttatctatgatctccggccta

SEQ ID NO: 3978962 - DNA, 25 bp, Homo sapien
gcataactgaagtgtcccccttcta

SEQ ID NO: 3978963 - DNA, 25 bp, Homo sapien
gtgagggcctcagccgtcattccgt

SEQ ID NO: 3978964 - DNA, 25 bp, Homo sapien
gccttccaaacacttcagcatgctg

SEQ ID NO: 3978965 - DNA, 25 bp, Homo sapien
catttaataaatgcgaacacgtgca

SEQ ID NO: 3978966 - DNA, 25 bp, Homo sapien
atgctgacctctcctcgtttccgga

SEQ ID NO: 3978967 - DNA, 25 bp, Homo sapien
cctggcatcatcagagtgtaaccca

SEQ ID NO: 3978968 - DNA, 25 bp, Homo sapien
gcatcatcagagtgtaacccaaggc

SEQ ID NO: 3978969 - DNA, 25 bp, Homo sapien
ggctggtctgattatcctggcatca

SEQ ID NO: 3978970 - DNA, 25 bp, Homo sapien
ctcccagaggctggtctgattatcc

SEQ ID NO: 3978971 - DNA, 25 bp, Homo sapien
tcaggtgagctgtcgatagaagcac

SEQ ID NO: 3978972 - DNA, 25 bp, Homo sapien
agctgtcgatagaagcacctcattt

SEQ ID NO: 3978973 - DNA, 25 bp, Homo sapien
gctcaggtgagctgtcgatagaagc

SEQ ID NO: 3978974 - DNA, 25 bp, Homo sapien
ggtgagctgtcgatagaagcacctc

SEQ ID NO: 3978975 - DNA, 25 bp, Homo sapien
tgcgtggagcaaaccagttgtacct

SEQ ID NO: 3978976 - DNA, 25 bp, Homo sapien
gcgagtctcccgactttctttggca

SEQ ID NO: 3978977 - DNA, 25 bp, Homo sapien
tctttggcatcagaattgggcatct

SEQ ID NO: 3978978 - DNA, 25 bp, Homo sapien
tgtctctttaagtccctcgcgagtc

SEQ ID NO: 3978979 - DNA, 25 bp, Homo sapien
ttttctgatgactcaggggcctcct

SEQ ID NO: 3978980 - DNA, 25 bp, Homo sapien
gggcctccttgagatcatagtcatt

SEQ ID NO: 3978981 - DNA, 25 bp, Homo sapien
caggggcctccttgagatcatagtc

SEQ ID NO: 3978982 - DNA, 25 bp, Homo sapien
cctccttgagatcatagtcattact

SEQ ID NO: 3978983 - DNA, 25 bp, Homo sapien
tagtcctccaaagcaatgccaagtt

SEQ ID NO: 3978984 - DNA, 25 bp, Homo sapien
agagaaggtctgatcggcccatgct

SEQ ID NO: 3978985 - DNA, 25 bp, Homo sapien
aagaccttggaaagatagtcctcca

SEQ ID NO: 3978986 - DNA, 25 bp, Homo sapien
gagaaggtctgatcggcccatgctt

SEQ ID NO: 3978987 - DNA, 25 bp, Homo sapien
ggtgggaacgctgtggtccatggcc

SEQ ID NO: 3978988 - DNA, 25 bp, Homo sapien
gaacgctgtggtccatggccaggta

SEQ ID NO: 3978989 - DNA, 25 bp, Homo sapien
ggaacgctgtggtccatggccaggt

SEQ ID NO: 3978990 - DNA, 25 bp, Homo sapien
tgggaacgctgtggtccatggccag

SEQ ID NO: 3978991 - DNA, 25 bp, Homo sapien
gttttccataaacacggcaacatgc

SEQ ID NO: 3978992 - DNA, 25 bp, Homo sapien
cacaagagtgtctccgttttccata

SEQ ID NO: 3978993 - DNA, 25 bp, Homo sapien
agttccatgtagcagtccttaatca

SEQ ID NO: 3978994 - DNA, 25 bp, Homo sapien
aaacacggcaacatgcttttcattc

SEQ ID NO: 3978995 - DNA, 25 bp, Homo sapien
tacgagcagtttagcccttcagcat

SEQ ID NO: 3978996 - DNA, 25 bp, Homo sapien
gctcatttagaacgacccacttggt

SEQ ID NO: 3978997 - DNA, 25 bp, Homo sapien
taagcctgagaaatcctacgagcag

SEQ ID NO: 3978998 - DNA, 25 bp, Homo sapien
cagactcgaatgaaaggcagctaga

SEQ ID NO: 3978999 - DNA, 25 bp, Homo sapien
acaggtcagcaacaacacccatgga

SEQ ID NO: 3979000 - DNA, 25 bp, Homo sapien
aacacccatggaagcaatagcagga

SEQ ID NO: 3979001 - DNA, 25 bp, Homo sapien
ctggagggagcgtggagggccacat

SEQ ID NO: 3979002 - DNA, 25 bp, Homo sapien
gaggagcatcggaatccacactcgg

SEQ ID NO: 3979003 - DNA, 25 bp, Homo sapien
caaatgctaagcgagccaagtacca

SEQ ID NO: 3979004 - DNA, 25 bp, Homo sapien
cagcagccaagtagaaggatctcca

SEQ ID NO: 3979005 - DNA, 25 bp, Homo sapien
cactatcagtattcactcagctggg

SEQ ID NO: 3979006 - DNA, 25 bp, Homo sapien
gctggtcaagtaacaaggtgggtca

SEQ ID NO: 3979007 - DNA, 25 bp, Homo sapien
taaaaacggcttgctggccaaatag

SEQ ID NO: 3979008 - DNA, 25 bp, Homo sapien
tgaaggcagttccaagtaagtctct

SEQ ID NO: 3979009 - DNA, 25 bp, Homo sapien
tctgaatgaagaaatgcggctgact

SEQ ID NO: 3979010 - DNA, 25 bp, Homo sapien
gttagcagagtacgcagcaccttgg

SEQ ID NO: 3979011 - DNA, 25 bp, Homo sapien
taaggtttcctagcataagttcagt

SEQ ID NO: 3979012 - DNA, 25 bp, Homo sapien
gcacaaatcatcagcacaacacagg

SEQ ID NO: 3979013 - DNA, 25 bp, Homo sapien
ggtactgaatatgtatcctggcaca

SEQ ID NO: 3979014 - DNA, 25 bp, Homo sapien
cctgaacaaatggatacctgatgct

SEQ ID NO: 3979015 - DNA, 25 bp, Homo sapien
agcagcctcctcacttgggtctttc

SEQ ID NO: 3979016 - DNA, 25 bp, Homo sapien
caatcggtcaggttccgtactgcga

SEQ ID NO: 3979017 - DNA, 25 bp, Homo sapien
catgatggctctcttgtgaaacacc

SEQ ID NO: 3979018 - DNA, 25 bp, Homo sapien
accaggctggcgtactgcagaacag

SEQ ID NO: 3979019 - DNA, 25 bp, Homo sapien
ttttctggcacatgataaagtttac

SEQ ID NO: 3979020 - DNA, 25 bp, Homo sapien
catgataaagtttacaactctccgg

SEQ ID NO: 3979021 - DNA, 25 bp, Homo sapien
ggcacatgataaagtttacaactct

SEQ ID NO: 3979022 - DNA, 25 bp, Homo sapien
gataaagtttacaactctccggcat

SEQ ID NO: 3979023 - DNA, 25 bp, Homo sapien
cagtcgttgctttctctaaagggac

SEQ ID NO: 3979024 - DNA, 25 bp, Homo sapien
ggctctatgctctgaatacttaagt

SEQ ID NO: 3979025 - DNA, 25 bp, Homo sapien
aatcaacgggactgttttaggagat

SEQ ID NO: 3979026 - DNA, 25 bp, Homo sapien
tggatgtccacttcatacaaggctc

SEQ ID NO: 3979027 - DNA, 25 bp, Homo sapien
taactgcttccctgggttaatgttc

SEQ ID NO: 3979028 - DNA, 25 bp, Homo sapien
acctaactgcttccctgggttaatg

SEQ ID NO: 3979029 - DNA, 25 bp, Homo sapien
cttcaaacctaactgcttccctggg

SEQ ID NO: 3979030 - DNA, 25 bp, Homo sapien
tccttcaaacctaactgcttccctg

SEQ ID NO: 3979031 - DNA, 25 bp, Homo sapien
atgcccaatacaccaggttctaaca

SEQ ID NO: 3979032 - DNA, 25 bp, Homo sapien
tgcccaatacaccaggttctaacat

SEQ ID NO: 3979033 - DNA, 25 bp, Homo sapien
aatgcccaatacaccaggttctaac

SEQ ID NO: 3979034 - DNA, 25 bp, Homo sapien
agtcaacatactgaagaactgccag

SEQ ID NO: 3979035 - DNA, 25 bp, Homo sapien
gctattagctgctttctaggttgca

SEQ ID NO: 3979036 - DNA, 25 bp, Homo sapien
cagccttcttagtcggtgcatagca

SEQ ID NO: 3979037 - DNA, 25 bp, Homo sapien
cacatcctcatgagcactgctatta

SEQ ID NO: 3979038 - DNA, 25 bp, Homo sapien
gagacagaaactgtgttctttacta

SEQ ID NO: 3979039 - DNA, 25 bp, Homo sapien
tctggaagagacagaaactgtgttc

SEQ ID NO: 3979040 - DNA, 25 bp, Homo sapien
tggaagagacagaaactgtgttctt

SEQ ID NO: 3979041 - DNA, 25 bp, Homo sapien
cagaaactgtgttctttactaaggg

SEQ ID NO: 3979042 - DNA, 25 bp, Homo sapien
aggctggagttgatctcactctctg

SEQ ID NO: 3979043 - DNA, 25 bp, Homo sapien
ggctggagttgatctcactctctgg

SEQ ID NO: 3979044 - DNA, 25 bp, Homo sapien
caggctggagttgatctcactctct

SEQ ID NO: 3979045 - DNA, 25 bp, Homo sapien
ctcatgccgcaactatggtgccgtc

SEQ ID NO: 3979046 - DNA, 25 bp, Homo sapien
tgactcatgccgcaactatggtgcc

SEQ ID NO: 3979047 - DNA, 25 bp, Homo sapien
cttctgactcatgccgcaactatgg

SEQ ID NO: 3979048 - DNA, 25 bp, Homo sapien
tcacttctgactcatgccgcaacta

SEQ ID NO: 3979049 - DNA, 25 bp, Homo sapien
taaacaggatgcaggaagaccatta

SEQ ID NO: 3979050 - DNA, 25 bp, Homo sapien
gcaggaagaccattaatgtttacag

SEQ ID NO: 3979051 - DNA, 25 bp, Homo sapien
tataaacaggatgcaggaagaccat

SEQ ID NO: 3979052 - DNA, 25 bp, Homo sapien
caggatgcaggaagaccattaatgt

SEQ ID NO: 3979053 - DNA, 25 bp, Homo sapien
aatatacaaagctacctggaccctg

SEQ ID NO: 3979054 - DNA, 25 bp, Homo sapien
gctaggtcagtaagtgcacgagcac

SEQ ID NO: 3979055 - DNA, 25 bp, Homo sapien
gccaatgatttccagctgagctcag

SEQ ID NO: 3979056 - DNA, 25 bp, Homo sapien
tggaccctgttaagagccacagcca

SEQ ID NO: 3979057 - DNA, 25 bp, Homo sapien
caaacatatgtctcagggcacagca

SEQ ID NO: 3979058 - DNA, 25 bp, Homo sapien
gcacagcaaatcagaaggtctatac

SEQ ID NO: 3979059 - DNA, 25 bp, Homo sapien
caggcattgctcaatgggtacccaa

SEQ ID NO: 3979060 - DNA, 25 bp, Homo sapien
tcctggttgaaacggcagtacttgg

SEQ ID NO: 3979061 - DNA, 25 bp, Homo sapien
gaagaggaggcagttggccccaata

SEQ ID NO: 3979062 - DNA, 25 bp, Homo sapien
ggccccaataacgttcacagccatg

SEQ ID NO: 3979063 - DNA, 25 bp, Homo sapien
tacagaagcacgaaggagctggagc

SEQ ID NO: 3979064 - DNA, 25 bp, Homo sapien
cagccatgatcaagaacgggtggtg

SEQ ID NO: 3979065 - DNA, 25 bp, Homo sapien
caaacgaactttcctttgaactctg

SEQ ID NO: 3979066 - DNA, 25 bp, Homo sapien
ggggtactcacaggctatcttctgc

SEQ ID NO: 3979067 - DNA, 25 bp, Homo sapien
cccggggtactcacaggctatcttc

SEQ ID NO: 3979068 - DNA, 25 bp, Homo sapien
ggtactcacaggctatcttctgcct

SEQ ID NO: 3979069 - DNA, 25 bp, Homo sapien
gtactcacaggctatcttctgcctg

SEQ ID NO: 3979070 - DNA, 25 bp, Homo sapien
gctgtactactgaaagggaacttct

SEQ ID NO: 3979071 - DNA, 25 bp, Homo sapien
actccacagttttgattcgtaccac

SEQ ID NO: 3979072 - DNA, 25 bp, Homo sapien
caagctgtatatgtaagattggcac

SEQ ID NO: 3979073 - DNA, 25 bp, Homo sapien
ggtaggtaagagacacgaattcaca

SEQ ID NO: 3979074 - DNA, 25 bp, Homo sapien
tgttttataggagaggccctccata

SEQ ID NO: 3979075 - DNA, 25 bp, Homo sapien
gaggccctccataaacactgactca

SEQ ID NO: 3979076 - DNA, 25 bp, Homo sapien
tcacgatgttttataggagaggccc

SEQ ID NO: 3979077 - DNA, 25 bp, Homo sapien
ataaacactgactcatcatatacac

SEQ ID NO: 3979078 - DNA, 25 bp, Homo sapien
tcagtccagtagtagcaaagtcacc

SEQ ID NO: 3979079 - DNA, 25 bp, Homo sapien
catggcaagtgctttaggatactcc

SEQ ID NO: 3979080 - DNA, 25 bp, Homo sapien
tgactctggtgtggcaaaattcccc

SEQ ID NO: 3979081 - DNA, 25 bp, Homo sapien
tatcataatagtaaggccaagcacc

SEQ ID NO: 3979082 - DNA, 25 bp, Homo sapien
gacagaggagagaaaattcttttct

SEQ ID NO: 3979083 - DNA, 25 bp, Homo sapien
accatggccatctaaattttgtact

SEQ ID NO: 3979084 - DNA, 25 bp, Homo sapien
gtgcgccaccatggccatctaaatt

SEQ ID NO: 3979085 - DNA, 25 bp, Homo sapien
ttttaaaaagaggagacagaggaga

SEQ ID NO: 3979086 - DNA, 25 bp, Homo sapien
tttgtcagcatgttaagatacctcg

SEQ ID NO: 3979087 - DNA, 25 bp, Homo sapien
tagtgctcaccattagcaaggcaag

SEQ ID NO: 3979088 - DNA, 25 bp, Homo sapien
gatacctcgtaagctcatgtcagga

SEQ ID NO: 3979089 - DNA, 25 bp, Homo sapien
taagcccaatgagcacatctctagg

SEQ ID NO: 3979090 - DNA, 25 bp, Homo sapien
agtcaccaggtcagtccaatctagg

SEQ ID NO: 3979091 - DNA, 25 bp, Homo sapien
tgaaaaccatctaccaaaacatggg

SEQ ID NO: 3979092 - DNA, 25 bp, Homo sapien
gccctgacggtggacagctttgaaa

SEQ ID NO: 3979093 - DNA, 25 bp, Homo sapien
caggctacccatcagtcagtgtaag

SEQ ID NO: 3979094 - DNA, 25 bp, Homo sapien
gactgattagacgacgactgctccc

SEQ ID NO: 3979095 - DNA, 25 bp, Homo sapien
ttaactgtcagctccgcaagtcagg

SEQ ID NO: 3979096 - DNA, 25 bp, Homo sapien
tgctctaaagatctacagtcacagt

SEQ ID NO: 3979097 - DNA, 25 bp, Homo sapien
actcgtgtcctgcttcctgcgaatg

SEQ ID NO: 3979098 - DNA, 25 bp, Homo sapien
taaaccagaaggcaagcaggcatgg

SEQ ID NO: 3979099 - DNA, 25 bp, Homo sapien
caactaaaggctaggcagtgctaca

SEQ ID NO: 3979100 - DNA, 25 bp, Homo sapien
tgaagatatggcctaagcacaggtc

SEQ ID NO: 3979101 - DNA, 25 bp, Homo sapien
gagaggaccctctgactacacaatc

SEQ ID NO: 3979102 - DNA, 25 bp, Homo sapien
aggtagactgaaaagcacatagggt

SEQ ID NO: 3979103 - DNA, 25 bp, Homo sapien
taattaaggtagactgaaaagcaca

SEQ ID NO: 3979104 - DNA, 25 bp, Homo sapien
atataattaaggtagactgaaaagc

SEQ ID NO: 3979105 - DNA, 25 bp, Homo sapien
ttaaggtagactgaaaagcacatag

SEQ ID NO: 3979106 - DNA, 25 bp, Homo sapien
aaactatacacaggctggcttgaac

SEQ ID NO: 3979107 - DNA, 25 bp, Homo sapien
ggctggcttgaacttccaagcaggg

SEQ ID NO: 3979108 - DNA, 25 bp, Homo sapien
ctggcttgaacttccaagcagggct

SEQ ID NO: 3979109 - DNA, 25 bp, Homo sapien
taacttaaaactatacacaggctgg

SEQ ID NO: 3979110 - DNA, 25 bp, Homo sapien
taaaaaatatttagtctggactaga

SEQ ID NO: 3979111 - DNA, 25 bp, Homo sapien
tatttagtctggactagagtcaaca

SEQ ID NO: 3979112 - DNA, 25 bp, Homo sapien
catttccacgaatggaaaagaagaa

SEQ ID NO: 3979113 - DNA, 25 bp, Homo sapien
aaaatatttagtctggactagagtc

SEQ ID NO: 3979114 - DNA, 25 bp, Homo sapien
caatgtaaaaccagcaaggcactgc

SEQ ID NO: 3979115 - DNA, 25 bp, Homo sapien
tgtcaatgtaaaaccagcaaggcac

SEQ ID NO: 3979116 - DNA, 25 bp, Homo sapien
ctggactgtcaatgtaaaaccagca

SEQ ID NO: 3979117 - DNA, 25 bp, Homo sapien
taaaaccagcaaggcactgcttttt

SEQ ID NO: 3979118 - DNA, 25 bp, Homo sapien
gatccatgcaacttcagagctgaaa

SEQ ID NO: 3979119 - DNA, 25 bp, Homo sapien
cctggtttgatgtaaaatgccccta

SEQ ID NO: 3979120 - DNA, 25 bp, Homo sapien
tttaggtaccttagcctggccttca

SEQ ID NO: 3979121 - DNA, 25 bp, Homo sapien
tctacaactgttgatgactcccagg

SEQ ID NO: 3979122 - DNA, 25 bp, Homo sapien
cttatatttcatcttgggacatgaa

SEQ ID NO: 3979123 - DNA, 25 bp, Homo sapien
gaagttttctcatgaagctgcctag

SEQ ID NO: 3979124 - DNA, 25 bp, Homo sapien
tataataatagctgagttgagaagt

SEQ ID NO: 3979125 - DNA, 25 bp, Homo sapien
gaatgaatgtagaaacccatataat

SEQ ID NO: 3979126 - DNA, 25 bp, Homo sapien
gagccatagccacaatctggcccat

SEQ ID NO: 3979127 - DNA, 25 bp, Homo sapien
tagtgcagagtagacgcccaaagac

SEQ ID NO: 3979128 - DNA, 25 bp, Homo sapien
tgatctttccgtcaagccagtactg

SEQ ID NO: 3979129 - DNA, 25 bp, Homo sapien
ccagtactgctggtgaaaggagcca

SEQ ID NO: 3979130 - DNA, 25 bp, Homo sapien
ccagcttgggcaacagagcaagacc

SEQ ID NO: 3979131 - DNA, 25 bp, Homo sapien
ggttgcggtgaagcgagatcgtgcc

SEQ ID NO: 3979132 - DNA, 25 bp, Homo sapien
actccagcttgggcaacagagcaag

SEQ ID NO: 3979133 - DNA, 25 bp, Homo sapien
actgcactccagcttgggcaacaga

SEQ ID NO: 3979134 - DNA, 25 bp, Homo sapien
caacacccaggtagttaagcctagt

SEQ ID NO: 3979135 - DNA, 25 bp, Homo sapien
tacacgggtatgttgtatgatacta

SEQ ID NO: 3979136 - DNA, 25 bp, Homo sapien
cgggtatgttgtatgatactaaggt

SEQ ID NO: 3979137 - DNA, 25 bp, Homo sapien
cacgggtatgttgtatgatactaag

SEQ ID NO: 3979138 - DNA, 25 bp, Homo sapien
taggacttatttgccggtcccaaca

SEQ ID NO: 3979139 - DNA, 25 bp, Homo sapien
ttacaaagaccatggcaacacccgg

SEQ ID NO: 3979140 - DNA, 25 bp, Homo sapien
tgagctaacgcgccaggcctctttt

SEQ ID NO: 3979141 - DNA, 25 bp, Homo sapien
tctagttgcccttgctgttcattgg

SEQ ID NO: 3979142 - DNA, 25 bp, Homo sapien
tatctagcctgacaatctctgactt

SEQ ID NO: 3979143 - DNA, 25 bp, Homo sapien
ttagctaatgtatgacagcagtccc

SEQ ID NO: 3979144 - DNA, 25 bp, Homo sapien
ccacatgtggccacttagccttaag

SEQ ID NO: 3979145 - DNA, 25 bp, Homo sapien
ggaatgttccaatctgccctaatag

SEQ ID NO: 3979146 - DNA, 25 bp, Homo sapien
gctacagagccacccgaaattaggg

SEQ ID NO: 3979147 - DNA, 25 bp, Homo sapien
caccagaggtgctaacttatcagta

SEQ ID NO: 3979148 - DNA, 25 bp, Homo sapien
gaaggaacagaaggacacacctgaa

SEQ ID NO: 3979149 - DNA, 25 bp, Homo sapien
cctactggactagctggcaaagttt

SEQ ID NO: 3979150 - DNA, 25 bp, Homo sapien
tgaccaaacctggatgggactaccc

SEQ ID NO: 3979151 - DNA, 25 bp, Homo sapien
ttttcaatgcgccagtgtaggccac

SEQ ID NO: 3979152 - DNA, 25 bp, Homo sapien
ggctggctaccacacgttttcaatg

SEQ ID NO: 3979153 - DNA, 25 bp, Homo sapien
gagtcaatgacttgcccgtgggcta

SEQ ID NO: 3979154 - DNA, 25 bp, Homo sapien
gaatgaagaacccagaatattgcct

SEQ ID NO: 3979155 - DNA, 25 bp, Homo sapien
gaggcaataacctgtcatgaaagtg

SEQ ID NO: 3979156 - DNA, 25 bp, Homo sapien
tgcaaatgcagctcataacgatatc

SEQ ID NO: 3979157 - DNA, 25 bp, Homo sapien
taaagtggtctctctaactgaaact

SEQ ID NO: 3979158 - DNA, 25 bp, Homo sapien
agggtgaactgcaaaggaatcttgt

SEQ ID NO: 3979159 - DNA, 25 bp, Homo sapien
ggtgaactgcaaaggaatcttgtga

SEQ ID NO: 3979160 - DNA, 25 bp, Homo sapien
ctccaagggtgaactgcaaaggaat

SEQ ID NO: 3979161 - DNA, 25 bp, Homo sapien
ccaagggtgaactgcaaaggaatct

SEQ ID NO: 3979162 - DNA, 25 bp, Homo sapien
cttagtgaattgcaggctacactga

SEQ ID NO: 3979163 - DNA, 25 bp, Homo sapien
gaattgcaggctacactgatatatt

SEQ ID NO: 3979164 - DNA, 25 bp, Homo sapien
ttgcaggctacactgatatattaaa

SEQ ID NO: 3979165 - DNA, 25 bp, Homo sapien
tagtgaattgcaggctacactgata

SEQ ID NO: 3979166 - DNA, 25 bp, Homo sapien
cactgaaattacactaggctaggca

SEQ ID NO: 3979167 - DNA, 25 bp, Homo sapien
caaaactaggtatcactgaaattac

SEQ ID NO: 3979168 - DNA, 25 bp, Homo sapien
ggctaggcaaaatctttcaaattaa

SEQ ID NO: 3979169 - DNA, 25 bp, Homo sapien
caaaaccaagaaatcaaaattagca

SEQ ID NO: 3979170 - DNA, 25 bp, Homo sapien
cacactgaaatacgacaagagcaga

SEQ ID NO: 3979171 - DNA, 25 bp, Homo sapien
tgaaatacgacaagagcagaagaat

SEQ ID NO: 3979172 - DNA, 25 bp, Homo sapien
atacgacaagagcagaagaatattc

SEQ ID NO: 3979173 - DNA, 25 bp, Homo sapien
tggcacactgaaatacgacaagagc

SEQ ID NO: 3979174 - DNA, 25 bp, Homo sapien
agcttcccgagtagcaatttcttaa

SEQ ID NO: 3979175 - DNA, 25 bp, Homo sapien
taagcgattttcccgctttagcttc

SEQ ID NO: 3979176 - DNA, 25 bp, Homo sapien
cagagtctcattctgcatccagtct

SEQ ID NO: 3979177 - DNA, 25 bp, Homo sapien
cattctgcatccagtctggagttca

SEQ ID NO: 3979178 - DNA, 25 bp, Homo sapien
ctgctaagcagggaggtagaaaggc

SEQ ID NO: 3979179 - DNA, 25 bp, Homo sapien
agcagggaggtagaaaggcatcatc

SEQ ID NO: 3979180 - DNA, 25 bp, Homo sapien
ctaagcagggaggtagaaaggcatc

SEQ ID NO: 3979181 - DNA, 25 bp, Homo sapien
gggaggtagaaaggcatcatctcca

SEQ ID NO: 3979182 - DNA, 25 bp, Homo sapien
cccacattcatcgggtggatcctgg

SEQ ID NO: 3979183 - DNA, 25 bp, Homo sapien
tggccacttgatacttgacatacaa

SEQ ID NO: 3979184 - DNA, 25 bp, Homo sapien
caaaggagacaggtactaacctcac

SEQ ID NO: 3979185 - DNA, 25 bp, Homo sapien
gaaagacgacttgaactctgggtcc

SEQ ID NO: 3979186 - DNA, 25 bp, Homo sapien
gctattgaaacatctctgatgatat

SEQ ID NO: 3979187 - DNA, 25 bp, Homo sapien
tattgaaacatctctgatgatatgc

SEQ ID NO: 3979188 - DNA, 25 bp, Homo sapien
caagcaaatgctattgaaacatctc

SEQ ID NO: 3979189 - DNA, 25 bp, Homo sapien
tgaaacatctctgatgatatgcttc

SEQ ID NO: 3979190 - DNA, 25 bp, Homo sapien
tggctttgaactgcgaacttggtgg

SEQ ID NO: 3979191 - DNA, 25 bp, Homo sapien
ctggctttcggttggcgtatcaggt

SEQ ID NO: 3979192 - DNA, 25 bp, Homo sapien
catctggtaacgtttatagacctgg

SEQ ID NO: 3979193 - DNA, 25 bp, Homo sapien
tgggttcttgtgaataaccatctgg

SEQ ID NO: 3979194 - DNA, 25 bp, Homo sapien
gacatggaggcttactcaaatcagc

SEQ ID NO: 3979195 - DNA, 25 bp, Homo sapien
ctaacttgtgtgatgcattctctgg

SEQ ID NO: 3979196 - DNA, 25 bp, Homo sapien
cttcgagtgattttggctggttgga

SEQ ID NO: 3979197 - DNA, 25 bp, Homo sapien
gtgaccttgagcctggaaaccctca

SEQ ID NO: 3979198 - DNA, 25 bp, Homo sapien
tcttacctgattaaaggcaaagtta

SEQ ID NO: 3979199 - DNA, 25 bp, Homo sapien
ttaattaggatgaaatctcagacca

SEQ ID NO: 3979200 - DNA, 25 bp, Homo sapien
tacctactcaggaacctaaggcaag

SEQ ID NO: 3979201 - DNA, 25 bp, Homo sapien
tttaaaagaactaggcatggtgaca

SEQ ID NO: 3979202 - DNA, 25 bp, Homo sapien
aacttctctcctacgaaatcttgtg

SEQ ID NO: 3979203 - DNA, 25 bp, Homo sapien
gaatgtgacggttcaccagagccca

SEQ ID NO: 3979204 - DNA, 25 bp, Homo sapien
gtgactgaagtaattcctgaggttc

SEQ ID NO: 3979205 - DNA, 25 bp, Homo sapien
ctggcttaggaactgtgtgaacttt

SEQ ID NO: 3979206 - DNA, 25 bp, Homo sapien
aagtcacccgcaacagcatcatcca

SEQ ID NO: 3979207 - DNA, 25 bp, Homo sapien
ttatttatcaatgcaaagtcacccg

SEQ ID NO: 3979208 - DNA, 25 bp, Homo sapien
tccattgtggaatccatgggctcat

SEQ ID NO: 3979209 - DNA, 25 bp, Homo sapien
gtttatttatcaatgcaaagtcacc

SEQ ID NO: 3979210 - DNA, 25 bp, Homo sapien
tcttgtgagattttgaaggctgaaa

SEQ ID NO: 3979211 - DNA, 25 bp, Homo sapien
cttcttgtgagattttgaaggctga

SEQ ID NO: 3979212 - DNA, 25 bp, Homo sapien
ttcttgtgagattttgaaggctgaa

SEQ ID NO: 3979213 - DNA, 25 bp, Homo sapien
accttcttgtgagattttgaaggct

SEQ ID NO: 3979214 - DNA, 25 bp, Homo sapien
aaggttcaggtgcagtagtagctca

SEQ ID NO: 3979215 - DNA, 25 bp, Homo sapien
aaaaaatgtaatttgccaggcctgg

SEQ ID NO: 3979216 - DNA, 25 bp, Homo sapien
catggtgagatctgcctaggaaaca

SEQ ID NO: 3979217 - DNA, 25 bp, Homo sapien
cctaggaaacatggcgagatcagcc

SEQ ID NO: 3979218 - DNA, 25 bp, Homo sapien
gattcatgacaggtttgtacacata

SEQ ID NO: 3979219 - DNA, 25 bp, Homo sapien
gacaacatgtttgattcatgacagg

SEQ ID NO: 3979220 - DNA, 25 bp, Homo sapien
attgtgtactgaggacaacatgttt

SEQ ID NO: 3979221 - DNA, 25 bp, Homo sapien
ttgtgtactgaggacaacatgtttg

SEQ ID NO: 3979222 - DNA, 25 bp, Homo sapien
cttcgccatcctcggtctatgagat

SEQ ID NO: 3979223 - DNA, 25 bp, Homo sapien
taatcctgtactgtcatggaatgtg

SEQ ID NO: 3979224 - DNA, 25 bp, Homo sapien
cggtctatgagatcctgataatcct

SEQ ID NO: 3979225 - DNA, 25 bp, Homo sapien
tcctgtactgtcatggaatgtgccc

SEQ ID NO: 3979226 - DNA, 25 bp, Homo sapien
tcgttcttgcagtagccgcagcggt

SEQ ID NO: 3979227 - DNA, 25 bp, Homo sapien
gcggctgcccgactcgttcttgcag

SEQ ID NO: 3979228 - DNA, 25 bp, Homo sapien
aaatagtccacgacgctgggcgaac

SEQ ID NO: 3979229 - DNA, 25 bp, Homo sapien
ggtagaagtcctcgctagggaaata

SEQ ID NO: 3979230 - DNA, 25 bp, Homo sapien
gccccgcgtcgctagcgcggccgcc

SEQ ID NO: 3979231 - DNA, 25 bp, Homo sapien
tcggccccgcgaacgctcagccgcc

SEQ ID NO: 3979232 - DNA, 25 bp, Homo sapien
cgccaccccacaatgcagcgcgccg

SEQ ID NO: 3979233 - DNA, 25 bp, Homo sapien
cccggccccgcgtcgctagcgcggc

SEQ ID NO: 3979234 - DNA, 25 bp, Homo sapien
gccctccttggaatcgcagtagccg

SEQ ID NO: 3979235 - DNA, 25 bp, Homo sapien
tccttggaatcgcagtagccgcagt

SEQ ID NO: 3979236 - DNA, 25 bp, Homo sapien
tttgccctccttggaatcgcagtag

SEQ ID NO: 3979237 - DNA, 25 bp, Homo sapien
tggaatcgcagtagccgcagtggta

SEQ ID NO: 3979238 - DNA, 25 bp, Homo sapien
tccgctcgggccgaccacgcctctt

SEQ ID NO: 3979239 - DNA, 25 bp, Homo sapien
gcgagggtccgctcgggccgaccac

SEQ ID NO: 3979240 - DNA, 25 bp, Homo sapien
ccgaccacgcctcttggcgcccggg

SEQ ID NO: 3979241 - DNA, 25 bp, Homo sapien
gccgccgcgagggtccgctcgggcc

SEQ ID NO: 3979242 - DNA, 25 bp, Homo sapien
cacagctgtgcgttatcagccccat

SEQ ID NO: 3979243 - DNA, 25 bp, Homo sapien
caagccctgcgtttgggccggtgct

SEQ ID NO: 3979244 - DNA, 25 bp, Homo sapien
gaccggaggttgtgattatcccaaa

SEQ ID NO: 3979245 - DNA, 25 bp, Homo sapien
tctcggattgaaagtcaggccgccc

SEQ ID NO: 3979246 - DNA, 25 bp, Homo sapien
tctcatcaaagctaagttctttgtc

SEQ ID NO: 3979247 - DNA, 25 bp, Homo sapien
accgcatccggtgtgagttatattt

SEQ ID NO: 3979248 - DNA, 25 bp, Homo sapien
ccaccgcatccggtgtgagttatat

SEQ ID NO: 3979249 - DNA, 25 bp, Homo sapien
cgcatccggtgtgagttatatttca

SEQ ID NO: 3979250 - DNA, 25 bp, Homo sapien
tccggtgtgagttatatttcactaa

SEQ ID NO: 3979251 - DNA, 25 bp, Homo sapien
cacaagctgtccagtgagcaactga

SEQ ID NO: 3979252 - DNA, 25 bp, Homo sapien
taaagtcgtaaaagtgccagtatag

SEQ ID NO: 3979253 - DNA, 25 bp, Homo sapien
gccagtataggtcttctagggagat

SEQ ID NO: 3979254 - DNA, 25 bp, Homo sapien
gaagggctgttttgtacatgtctaa

SEQ ID NO: 3979255 - DNA, 25 bp, Homo sapien
atgccgctttccgttttggacttca

SEQ ID NO: 3979256 - DNA, 25 bp, Homo sapien
gcggtgagtttcctttaatcaaaga

SEQ ID NO: 3979257 - DNA, 25 bp, Homo sapien
gaatatggcggtgagtttcctttaa

SEQ ID NO: 3979258 - DNA, 25 bp, Homo sapien
tacaatatgtacgatacatgccgct

SEQ ID NO: 3979259 - DNA, 25 bp, Homo sapien
cctcagtgagtagggcccaggttaa

SEQ ID NO: 3979260 - DNA, 25 bp, Homo sapien
ccaggttaatccacattatatatct

SEQ ID NO: 3979261 - DNA, 25 bp, Homo sapien
ggaagaatagctggttaacagttta

SEQ ID NO: 3979262 - DNA, 25 bp, Homo sapien
aaatccaacaattagccctcctcag

SEQ ID NO: 3979263 - DNA, 25 bp, Homo sapien
catattaagtgcttacattaagtac

SEQ ID NO: 3979264 - DNA, 25 bp, Homo sapien
agaagttgggtgagattaagtgact

SEQ ID NO: 3979265 - DNA, 25 bp, Homo sapien
taaagtaaggggcatagccgataga

SEQ ID NO: 3979266 - DNA, 25 bp, Homo sapien
gcatagccgatagaatctaggtctt

SEQ ID NO: 3979267 - DNA, 25 bp, Homo sapien
gtaaggggcatagccgatagaatct

SEQ ID NO: 3979268 - DNA, 25 bp, Homo sapien
agcacttggcttctgctgcctctga

SEQ ID NO: 3979269 - DNA, 25 bp, Homo sapien
ctgaaatctcaaaggtcttcacaat

SEQ ID NO: 3979270 - DNA, 25 bp, Homo sapien
ggagtaatcacaggctctgaaatct

SEQ ID NO: 3979271 - DNA, 25 bp, Homo sapien
tgctgcctctgacttggagtaatca

SEQ ID NO: 3979272 - DNA, 25 bp, Homo sapien
ttactgcaagtgaaggcagagtcag

SEQ ID NO: 3979273 - DNA, 25 bp, Homo sapien
ctcccagtcacggtaactcaaagct

SEQ ID NO: 3979274 - DNA, 25 bp, Homo sapien
cggtaactcaaagctataattcctt

SEQ ID NO: 3979275 - DNA, 25 bp, Homo sapien
taacttgtgtgttatgttcaaatcc

SEQ ID NO: 3979276 - DNA, 25 bp, Homo sapien
ttgtgtgttatgttcaaatccctca

SEQ ID NO: 3979277 - DNA, 25 bp, Homo sapien
tcaaaattttagacgctggccatgt

SEQ ID NO: 3979278 - DNA, 25 bp, Homo sapien
cagagctaagccctagtgagtccaa

SEQ ID NO: 3979279 - DNA, 25 bp, Homo sapien
ggtgccggcatctgacaaaacgtga

SEQ ID NO: 3979280 - DNA, 25 bp, Homo sapien
tgtagtagagtaacacattccagac

SEQ ID NO: 3979281 - DNA, 25 bp, Homo sapien
agtcggtcttggtcaagtcttattc

SEQ ID NO: 3979282 - DNA, 25 bp, Homo sapien
ctggcagtcggtcttggtcaagtct

SEQ ID NO: 3979283 - DNA, 25 bp, Homo sapien
cttggtcaagtcttattcttgcaaa

SEQ ID NO: 3979284 - DNA, 25 bp, Homo sapien
ctattactggcagtcggtcttggtc

SEQ ID NO: 3979285 - DNA, 25 bp, Homo sapien
gaatgaggatcaaccacaaagtcaa

SEQ ID NO: 3979286 - DNA, 25 bp, Homo sapien
tcaaagaaggacattggggtatcag

SEQ ID NO: 3979287 - DNA, 25 bp, Homo sapien
gggaaagaatgaggatcaaccacaa

SEQ ID NO: 3979288 - DNA, 25 bp, Homo sapien
tacgggggaaagaatgaggatcaac

SEQ ID NO: 3979289 - DNA, 25 bp, Homo sapien
atttatacaagagtaaaatgctata

SEQ ID NO: 3979290 - DNA, 25 bp, Homo sapien
taaagaacttaatcatccagctggg

SEQ ID NO: 3979291 - DNA, 25 bp, Homo sapien
gaacttaatcatccagctgggcatg

SEQ ID NO: 3979292 - DNA, 25 bp, Homo sapien
tgctataaagaacttaatcatccag

SEQ ID NO: 3979293 - DNA, 25 bp, Homo sapien
tagccagatgtggtggcgcgtgcgc

SEQ ID NO: 3979294 - DNA, 25 bp, Homo sapien
ccagatgtggtggcgcgtgcgcctg

SEQ ID NO: 3979295 - DNA, 25 bp, Homo sapien
agccagatgtggtggcgcgtgcgcc

SEQ ID NO: 3979296 - DNA, 25 bp, Homo sapien
attagccagatgtggtggcgcgtgc

SEQ ID NO: 3979297 - DNA, 25 bp, Homo sapien
agtctgggcgaaagagtgagactgt

SEQ ID NO: 3979298 - DNA, 25 bp, Homo sapien
gtctgggcgaaagagtgagactgtc

SEQ ID NO: 3979299 - DNA, 25 bp, Homo sapien
actgcattccagtctgggcgaaaga

SEQ ID NO: 3979300 - DNA, 25 bp, Homo sapien
gcattccagtctgggcgaaagagtg

SEQ ID NO: 3979301 - DNA, 25 bp, Homo sapien
aaaatatgtctgcaacaatcccaag

SEQ ID NO: 3979302 - DNA, 25 bp, Homo sapien
ctgttgcttcttgatgagattcttc

SEQ ID NO: 3979303 - DNA, 25 bp, Homo sapien
aaatatgtctgcaacaatcccaaga

SEQ ID NO: 3979304 - DNA, 25 bp, Homo sapien
aatatgtctgcaacaatcccaagat

SEQ ID NO: 3979305 - DNA, 25 bp, Homo sapien
ttctcgagtgggtgtgactttcccc

SEQ ID NO: 3979306 - DNA, 25 bp, Homo sapien
ccctggcttcggagaactgatcaaa

SEQ ID NO: 3979307 - DNA, 25 bp, Homo sapien
cagtgctgaggttgaccctggcttc

SEQ ID NO: 3979308 - DNA, 25 bp, Homo sapien
tatccagccgtaaatgttgacagtg

SEQ ID NO: 3979309 - DNA, 25 bp, Homo sapien
ggcacagggcactctccgtatattg

SEQ ID NO: 3979310 - DNA, 25 bp, Homo sapien
caggaacttttcttggacgatcaac

SEQ ID NO: 3979311 - DNA, 25 bp, Homo sapien
tctcctcttgtatcacaggaacttt

SEQ ID NO: 3979312 - DNA, 25 bp, Homo sapien
cgatcaactcgtggctttggcacag

SEQ ID NO: 3979313 - DNA, 25 bp, Homo sapien
gcaaagccaacttctaagagcaggg

SEQ ID NO: 3979314 - DNA, 25 bp, Homo sapien
cagggcaagtcacagccatgggatt

SEQ ID NO: 3979315 - DNA, 25 bp, Homo sapien
tactgccctgtaaagtaggccagtg

SEQ ID NO: 3979316 - DNA, 25 bp, Homo sapien
cctcatgcagacttgggttacagta

SEQ ID NO: 3979317 - DNA, 25 bp, Homo sapien
cactgctaacacctctgtctggaga

SEQ ID NO: 3979318 - DNA, 25 bp, Homo sapien
gctctgggcacctgagttacctgaa

SEQ ID NO: 3979319 - DNA, 25 bp, Homo sapien
caggagctataccacttaaagaagg

SEQ ID NO: 3979320 - DNA, 25 bp, Homo sapien
taatttctccataggaccatgccag

SEQ ID NO: 3979321 - DNA, 25 bp, Homo sapien
agcaatttaaggttcacaaataact

SEQ ID NO: 3979322 - DNA, 25 bp, Homo sapien
agatgatctacctgcatccacctgc

SEQ ID NO: 3979323 - DNA, 25 bp, Homo sapien
cacacccggcctagtgtttatgaac

SEQ ID NO: 3979324 - DNA, 25 bp, Homo sapien
atctttgtccctacaagaaaaagca

SEQ ID NO: 3979325 - DNA, 25 bp, Homo sapien
caggactatcttcatcacggatgag

SEQ ID NO: 3979326 - DNA, 25 bp, Homo sapien
cagcttctagcggatttacacccat

SEQ ID NO: 3979327 - DNA, 25 bp, Homo sapien
tcttccaggagtcatagactatgaa

SEQ ID NO: 3979328 - DNA, 25 bp, Homo sapien
atagactatgaattcaaaatcagga

SEQ ID NO: 3979329 - DNA, 25 bp, Homo sapien
ctgctttgctttctctttgcccaaa

SEQ ID NO: 3979330 - DNA, 25 bp, Homo sapien
aggtctgagcgcagctgctttgctt

SEQ ID NO: 3979331 - DNA, 25 bp, Homo sapien
caaaggagctcaggtctgagcgcag

SEQ ID NO: 3979332 - DNA, 25 bp, Homo sapien
gtcaaaggagctcaggtctgagcgc

SEQ ID NO: 3979333 - DNA, 25 bp, Homo sapien
tgggcatccaggactgcttctcttg

SEQ ID NO: 3979334 - DNA, 25 bp, Homo sapien
aaagtgggcatccaggactgcttct

SEQ ID NO: 3979335 - DNA, 25 bp, Homo sapien
gtgggcatccaggactgcttctctt

SEQ ID NO: 3979336 - DNA, 25 bp, Homo sapien
aagtgggcatccaggactgcttctc

SEQ ID NO: 3979337 - DNA, 25 bp, Homo sapien
ttcattaaacagagtgttagcctct

SEQ ID NO: 3979338 - DNA, 25 bp, Homo sapien
acctctgttaatttgtcaccggcat

SEQ ID NO: 3979339 - DNA, 25 bp, Homo sapien
gcattcagtatgtcctcacggtttt

SEQ ID NO: 3979340 - DNA, 25 bp, Homo sapien
gagtgttagcctcttcaaggacctc

SEQ ID NO: 3979341 - DNA, 25 bp, Homo sapien
tatcacctgcaacagtaaagccaag

SEQ ID NO: 3979342 - DNA, 25 bp, Homo sapien
taagcagttgacaaggttatcacct

SEQ ID NO: 3979343 - DNA, 25 bp, Homo sapien
ccggcccctgcgctctgagtaatta

SEQ ID NO: 3979344 - DNA, 25 bp, Homo sapien
caccctaccctttatgcagcatgaa

SEQ ID NO: 3979345 - DNA, 25 bp, Homo sapien
cctctgagtgctccataactgagtg

SEQ ID NO: 3979346 - DNA, 25 bp, Homo sapien
agcctctgagtgctccataactgag

SEQ ID NO: 3979347 - DNA, 25 bp, Homo sapien
gctgcagcctctgagtgctccataa

SEQ ID NO: 3979348 - DNA, 25 bp, Homo sapien
gcagcctctgagtgctccataactg

SEQ ID NO: 3979349 - DNA, 25 bp, Homo sapien
ggtccgagaacgtgcatttgacagc

SEQ ID NO: 3979350 - DNA, 25 bp, Homo sapien
atttgacagctctcgcgtgccgctg

SEQ ID NO: 3979351 - DNA, 25 bp, Homo sapien
cgggcgcaatcaaagcacgcggagt

SEQ ID NO: 3979352 - DNA, 25 bp, Homo sapien
agagattcgaattccgcgggtccgg

SEQ ID NO: 3979353 - DNA, 25 bp, Homo sapien
tactgatggcggatctggcggcaca

SEQ ID NO: 3979354 - DNA, 25 bp, Homo sapien
gacggagttgatgagcgcccggtac

SEQ ID NO: 3979355 - DNA, 25 bp, Homo sapien
cggaatccgacggctctgtgtcctc

SEQ ID NO: 3979356 - DNA, 25 bp, Homo sapien
gggtccatcatctcgtccccggaat

SEQ ID NO: 3979357 - DNA, 25 bp, Homo sapien
gagcgggtgcgatcccgatgcgggt

SEQ ID NO: 3979358 - DNA, 25 bp, Homo sapien
ctgggcgacaaaggggaccgcgagc

SEQ ID NO: 3979359 - DNA, 25 bp, Homo sapien
tgcgatcccgatgcgggtcgcggcc

SEQ ID NO: 3979360 - DNA, 25 bp, Homo sapien
cgacaaaggggaccgcgagcgggag

SEQ ID NO: 3979361 - DNA, 25 bp, Homo sapien
agcgccaattcaccgtgcaacttcg

SEQ ID NO: 3979362 - DNA, 25 bp, Homo sapien
ttcggaacggcggaagttcgcgcca

SEQ ID NO: 3979363 - DNA, 25 bp, Homo sapien
aactgaaacccctgctctgcgccag

SEQ ID NO: 3979364 - DNA, 25 bp, Homo sapien
ggaagttcgcgccagaaactgaaac

SEQ ID NO: 3979365 - DNA, 25 bp, Homo sapien
tacatctgttatcccttgggtgcct

SEQ ID NO: 3979366 - DNA, 25 bp, Homo sapien
cagtcgcctggtctgtctgtacaca

SEQ ID NO: 3979367 - DNA, 25 bp, Homo sapien
tgtccgtttttatggcactgaggtg

SEQ ID NO: 3979368 - DNA, 25 bp, Homo sapien
catagttggtctcagggtgtaagga

SEQ ID NO: 3979369 - DNA, 25 bp, Homo sapien
actggccaaatggtacttaacaaag

SEQ ID NO: 3979370 - DNA, 25 bp, Homo sapien
gagactccctctcaacaaaagccca

SEQ ID NO: 3979371 - DNA, 25 bp, Homo sapien
caaatggtacttaacaaagtcttat

SEQ ID NO: 3979372 - DNA, 25 bp, Homo sapien
gactccctctcaacaaaagcccaca

SEQ ID NO: 3979373 - DNA, 25 bp, Homo sapien
gtttcttccagcactaacaatctaa

SEQ ID NO: 3979374 - DNA, 25 bp, Homo sapien
ttcttccagcactaacaatctaaat

SEQ ID NO: 3979375 - DNA, 25 bp, Homo sapien
caagtttcttccagcactaacaatc

SEQ ID NO: 3979376 - DNA, 25 bp, Homo sapien
ttccagcactaacaatctaaattat

SEQ ID NO: 3979377 - DNA, 25 bp, Homo sapien
tccccagttatgctcttggtcatct

SEQ ID NO: 3979378 - DNA, 25 bp, Homo sapien
ccagttatgctcttggtcatcttgg

SEQ ID NO: 3979379 - DNA, 25 bp, Homo sapien
tgcccatagggcccaagtccccagt

SEQ ID NO: 3979380 - DNA, 25 bp, Homo sapien
caagtccccagttatgctcttggtc

SEQ ID NO: 3979381 - DNA, 25 bp, Homo sapien
tgtgggccgcagagttgacagtttc

SEQ ID NO: 3979382 - DNA, 25 bp, Homo sapien
ccgaatctgtggtggtgttacagca

SEQ ID NO: 3979383 - DNA, 25 bp, Homo sapien
gatgagacaataacttgctgaagcc

SEQ ID NO: 3979384 - DNA, 25 bp, Homo sapien
agcagcgcacacagatggaagattg

SEQ ID NO: 3979385 - DNA, 25 bp, Homo sapien
ggctctgccctacacaaaaatagaa

SEQ ID NO: 3979386 - DNA, 25 bp, Homo sapien
taactggaggaactgcggacagccg

SEQ ID NO: 3979387 - DNA, 25 bp, Homo sapien
ggtaaggcgcttccatttgcctgaa

SEQ ID NO: 3979388 - DNA, 25 bp, Homo sapien
caaaggatggctgagtggtaataac

SEQ ID NO: 3979389 - DNA, 25 bp, Homo sapien
cacaatgatcaaggggcagagcccc

SEQ ID NO: 3979390 - DNA, 25 bp, Homo sapien
gcagagccccttagcagtgtttggc

SEQ ID NO: 3979391 - DNA, 25 bp, Homo sapien
gagccccttagcagtgtttggctca

SEQ ID NO: 3979392 - DNA, 25 bp, Homo sapien
tacacaatgatcaaggggcagagcc

SEQ ID NO: 3979393 - DNA, 25 bp, Homo sapien
tgaatccttttagggtaatggccac

SEQ ID NO: 3979394 - DNA, 25 bp, Homo sapien
ggccaccgcttgtgacccaaatgct

SEQ ID NO: 3979395 - DNA, 25 bp, Homo sapien
tcagaacatgtcacctcttacatct

SEQ ID NO: 3979396 - DNA, 25 bp, Homo sapien
catgtcacctcttacatctttgagg

SEQ ID NO: 3979397 - DNA, 25 bp, Homo sapien
ttttctctgcctgcgagctctgcca

SEQ ID NO: 3979398 - DNA, 25 bp, Homo sapien
tagggcagaatgaggccttggcccc

SEQ ID NO: 3979399 - DNA, 25 bp, Homo sapien
gcctcatcatagagctcccagatgg

SEQ ID NO: 3979400 - DNA, 25 bp, Homo sapien
aaagggcaatgcatgcggcctcatc

SEQ ID NO: 3979401 - DNA, 25 bp, Homo sapien
tctcagagtggttaggatcccaagt

SEQ ID NO: 3979402 - DNA, 25 bp, Homo sapien
taaccggtggacaagcttatcctgg

SEQ ID NO: 3979403 - DNA, 25 bp, Homo sapien
gaaaaggtgaccaactctcagagtg

SEQ ID NO: 3979404 - DNA, 25 bp, Homo sapien
tctggtatgtgaagccatcggtggt

SEQ ID NO: 3979405 - DNA, 25 bp, Homo sapien
cgctttggataattcgcatacagac

SEQ ID NO: 3979406 - DNA, 25 bp, Homo sapien
ttttgtttgcgctttggataattcg

SEQ ID NO: 3979407 - DNA, 25 bp, Homo sapien
ttggataattcgcatacagactcat

SEQ ID NO: 3979408 - DNA, 25 bp, Homo sapien
tacccccaggccaataaggatagct

SEQ ID NO: 3979409 - DNA, 25 bp, Homo sapien
gaacaagctaaatgccctaggtggg

SEQ ID NO: 3979410 - DNA, 25 bp, Homo sapien
tacacactacaggtcaagctctggg

SEQ ID NO: 3979411 - DNA, 25 bp, Homo sapien
gaccagaggcacgaagatgagcaag

SEQ ID NO: 3979412 - DNA, 25 bp, Homo sapien
caagatgtccagtccagtctagaga

SEQ ID NO: 3979413 - DNA, 25 bp, Homo sapien
agtacagtggcacagtctcagctta

SEQ ID NO: 3979414 - DNA, 25 bp, Homo sapien
aggtgcaagtgattctcctgcctca

SEQ ID NO: 3979415 - DNA, 25 bp, Homo sapien
acagagtctctgtcgcacaggctgg

SEQ ID NO: 3979416 - DNA, 25 bp, Homo sapien
ctgcaacctccacctcccaggtgca

SEQ ID NO: 3979417 - DNA, 25 bp, Homo sapien
ttgagaactccatgtgttcagagac

SEQ ID NO: 3979418 - DNA, 25 bp, Homo sapien
cacatcttcctggttgacaagcaga

SEQ ID NO: 3979419 - DNA, 25 bp, Homo sapien
gttcagagacctgatttggcttttg

SEQ ID NO: 3979420 - DNA, 25 bp, Homo sapien
cttgggaaggtttgagaactccatg

SEQ ID NO: 3979421 - DNA, 25 bp, Homo sapien
tttaatgtaaggctgtgctttccac

SEQ ID NO: 3979422 - DNA, 25 bp, Homo sapien
cttttaatgtaaggctgtgctttcc

SEQ ID NO: 3979423 - DNA, 25 bp, Homo sapien
ttaatgtaaggctgtgctttccaca

SEQ ID NO: 3979424 - DNA, 25 bp, Homo sapien
ttcttttaatgtaaggctgtgcttt

SEQ ID NO: 3979425 - DNA, 25 bp, Homo sapien
tacactctagctggtgagagctgca

SEQ ID NO: 3979426 - DNA, 25 bp, Homo sapien
tctagggtgtgacaagcacaggcct

SEQ ID NO: 3979427 - DNA, 25 bp, Homo sapien
tctcattatggccaccggtagaagc

SEQ ID NO: 3979428 - DNA, 25 bp, Homo sapien
tgcacttgaacccacagcatggaag

SEQ ID NO: 3979429 - DNA, 25 bp, Homo sapien
tgtgcttacgcagacctagacggta

SEQ ID NO: 3979430 - DNA, 25 bp, Homo sapien
cagagtctcaggtgcttacccgagg

SEQ ID NO: 3979431 - DNA, 25 bp, Homo sapien
ttacccgaggcctgctgagttggaa

SEQ ID NO: 3979432 - DNA, 25 bp, Homo sapien
gcagaagcagatcaaaccaactcgg

SEQ ID NO: 3979433 - DNA, 25 bp, Homo sapien
tcagctgagatcttgatcccagagg

SEQ ID NO: 3979434 - DNA, 25 bp, Homo sapien
tcccagaggggctggtccgttcagc

SEQ ID NO: 3979435 - DNA, 25 bp, Homo sapien
ggctggtccgttcagctggctttgt

SEQ ID NO: 3979436 - DNA, 25 bp, Homo sapien
ttggtgcactggctttgggcatcct

SEQ ID NO: 3979437 - DNA, 25 bp, Homo sapien
tgaaaaggatgccctgtgtgttccg

SEQ ID NO: 3979438 - DNA, 25 bp, Homo sapien
aaaggatgccctgtgtgttccgcat

SEQ ID NO: 3979439 - DNA, 25 bp, Homo sapien
tctgaaaaggatgccctgtgtgttc

SEQ ID NO: 3979440 - DNA, 25 bp, Homo sapien
cagaggaatgccaagggtggctctg

SEQ ID NO: 3979441 - DNA, 25 bp, Homo sapien
ttatagcctcttacagttgttctga

SEQ ID NO: 3979442 - DNA, 25 bp, Homo sapien
gaacttagaagccatttatagcctc

SEQ ID NO: 3979443 - DNA, 25 bp, Homo sapien
caccaccagcagaacttagaagcca

SEQ ID NO: 3979444 - DNA, 25 bp, Homo sapien
cagatcgttacaaagtcagaaaggg

SEQ ID NO: 3979445 - DNA, 25 bp, Homo sapien
tccttggatgtggtcacagggcttc

SEQ ID NO: 3979446 - DNA, 25 bp, Homo sapien
tctgactccttggatgtggtcacag

SEQ ID NO: 3979447 - DNA, 25 bp, Homo sapien
tgactccttggatgtggtcacaggg

SEQ ID NO: 3979448 - DNA, 25 bp, Homo sapien
ccttggatgtggtcacagggcttca

SEQ ID NO: 3979449 - DNA, 25 bp, Homo sapien
gcagctggcggctgaagtttctgat

SEQ ID NO: 3979450 - DNA, 25 bp, Homo sapien
agcagctggcggctgaagtttctga

SEQ ID NO: 3979451 - DNA, 25 bp, Homo sapien
ggaggtgggatagcccctgctgagt

SEQ ID NO: 3979452 - DNA, 25 bp, Homo sapien
gaggtgggatagcccctgctgagtg

SEQ ID NO: 3979453 - DNA, 25 bp, Homo sapien
tatccactggtgaaaggatcaacaa

SEQ ID NO: 3979454 - DNA, 25 bp, Homo sapien
catgcaactaaattgatgaatcgca

SEQ ID NO: 3979455 - DNA, 25 bp, Homo sapien
gattcagtctagatgagattctggg

SEQ ID NO: 3979456 - DNA, 25 bp, Homo sapien
gaacaagctattgattcatgcaact

SEQ ID NO: 3979457 - DNA, 25 bp, Homo sapien
gcttttctcatgattggactgggcc

SEQ ID NO: 3979458 - DNA, 25 bp, Homo sapien
tataggataccctgaaccacctctg

SEQ ID NO: 3979459 - DNA, 25 bp, Homo sapien
taggatgccccactattggaatttg

SEQ ID NO: 3979460 - DNA, 25 bp, Homo sapien
gaaagacccgagctagcttactcag

SEQ ID NO: 3979461 - DNA, 25 bp, Homo sapien
gctgctttcaaccatgcggccatgg

SEQ ID NO: 3979462 - DNA, 25 bp, Homo sapien
ggatccagggatccaatcaaccgtg

SEQ ID NO: 3979463 - DNA, 25 bp, Homo sapien
caaagcaagtttcgaaaatgtaagg

SEQ ID NO: 3979464 - DNA, 25 bp, Homo sapien
tccctttggatgagttcctggaggt

SEQ ID NO: 3979465 - DNA, 25 bp, Homo sapien
cggccggtgagacgcgcggaggcat

SEQ ID NO: 3979466 - DNA, 25 bp, Homo sapien
tggttcccgctcagtctccgaaatg

SEQ ID NO: 3979467 - DNA, 25 bp, Homo sapien
acgcgcggaggcattgatgggtccc

SEQ ID NO: 3979468 - DNA, 25 bp, Homo sapien
tccgaaatgtgagctgccgcggagt

SEQ ID NO: 3979469 - DNA, 25 bp, Homo sapien
ttccattccataaacgcgtgttgac

SEQ ID NO: 3979470 - DNA, 25 bp, Homo sapien
gggctgcagtgatactctattccat

SEQ ID NO: 3979471 - DNA, 25 bp, Homo sapien
ttggtgggctgcagtgatactctat

SEQ ID NO: 3979472 - DNA, 25 bp, Homo sapien
taaacgcgtgttgacacggctgact

SEQ ID NO: 3979473 - DNA, 25 bp, Homo sapien
cggatgctatttctggcccggcttt

SEQ ID NO: 3979474 - DNA, 25 bp, Homo sapien
tctgcccacggactttatgctatca

SEQ ID NO: 3979475 - DNA, 25 bp, Homo sapien
gatgctcacggatgctatttctggc

SEQ ID NO: 3979476 - DNA, 25 bp, Homo sapien
tatgctatcaatagatgctcacgga

SEQ ID NO: 3979477 - DNA, 25 bp, Homo sapien
tcaaagctacacaatgcgggcggtc

SEQ ID NO: 3979478 - DNA, 25 bp, Homo sapien
tcatcgtgtcacacacaggagccgg

SEQ ID NO: 3979479 - DNA, 25 bp, Homo sapien
tcctaggaagaacccatgagcgtgg

SEQ ID NO: 3979480 - DNA, 25 bp, Homo sapien
gagctgagccgatgcatgtcacgga

SEQ ID NO: 3979481 - DNA, 25 bp, Homo sapien
ttagggaaaacatctgcgcacattt

SEQ ID NO: 3979482 - DNA, 25 bp, Homo sapien
tgcatggaacttcccagctgagcct

SEQ ID NO: 3979483 - DNA, 25 bp, Homo sapien
tgaggagcatccctcacagcaccag

SEQ ID NO: 3979484 - DNA, 25 bp, Homo sapien
tcatgaatggccctaagacgccgtc

SEQ ID NO: 3979485 - DNA, 25 bp, Homo sapien
tctcaccttggaggcgagcaagctc

SEQ ID NO: 3979486 - DNA, 25 bp, Homo sapien
tcttcctggtatcaattatagcgca

SEQ ID NO: 3979487 - DNA, 25 bp, Homo sapien
ttatgtgtgacacaaacccggccac

SEQ ID NO: 3979488 - DNA, 25 bp, Homo sapien
caaaagtacatgctgggatctcaga

SEQ ID NO: 3979489 - DNA, 25 bp, Homo sapien
tattgctggaataagcgggattctc

SEQ ID NO: 3979490 - DNA, 25 bp, Homo sapien
ttgctggaataagcgggattctcat

SEQ ID NO: 3979491 - DNA, 25 bp, Homo sapien
aattattgctggaataagcgggatt

SEQ ID NO: 3979492 - DNA, 25 bp, Homo sapien
tggaataagcgggattctcatcagc

SEQ ID NO: 3979493 - DNA, 25 bp, Homo sapien
tggacaaggttggtttacactatag

SEQ ID NO: 3979494 - DNA, 25 bp, Homo sapien
tcaaacagccggtgggaattgtgct

SEQ ID NO: 3979495 - DNA, 25 bp, Homo sapien
ggtggactgccgaaatccttgctct

SEQ ID NO: 3979496 - DNA, 25 bp, Homo sapien
tgtgcttatacactgggcctccaaa

SEQ ID NO: 3979497 - DNA, 25 bp, Homo sapien
tcgtggcacgttcatttctcggatg

SEQ ID NO: 3979498 - DNA, 25 bp, Homo sapien
gatgcatttccctgcggtttgccca

SEQ ID NO: 3979499 - DNA, 25 bp, Homo sapien
tgtggaaaccattgacgtctgtctt

SEQ ID NO: 3979500 - DNA, 25 bp, Homo sapien
gagcgcgtgtttttcccgagtgcct

SEQ ID NO: 3979501 - DNA, 25 bp, Homo sapien
cttgtactcccgcatcgggaccgct

SEQ ID NO: 3979502 - DNA, 25 bp, Homo sapien
ctcccgcatcgggaccgctgaggtg

SEQ ID NO: 3979503 - DNA, 25 bp, Homo sapien
catcgggaccgctgaggtggagaaa

SEQ ID NO: 3979504 - DNA, 25 bp, Homo sapien
gtactcccgcatcgggaccgctgag

SEQ ID NO: 3979505 - DNA, 25 bp, Homo sapien
caagcatatggatgtatgagtcaca

SEQ ID NO: 3979506 - DNA, 25 bp, Homo sapien
gcagaccacgctttatgtgtccaag

SEQ ID NO: 3979507 - DNA, 25 bp, Homo sapien
tgaagaggccaacaattgagtgctt

SEQ ID NO: 3979508 - DNA, 25 bp, Homo sapien
tgagtcacatcacacctctagcttg

SEQ ID NO: 3979509 - DNA, 25 bp, Homo sapien
agatcggtcgtgctgttgaacttga

SEQ ID NO: 3979510 - DNA, 25 bp, Homo sapien
cgtccatgatggagggatcgtcccg

SEQ ID NO: 3979511 - DNA, 25 bp, Homo sapien
gaaagcaaagccacacgtccatgat

SEQ ID NO: 3979512 - DNA, 25 bp, Homo sapien
tccccagtatgctggagggatccag

SEQ ID NO: 3979513 - DNA, 25 bp, Homo sapien
gaaaagctaactctgaaccgaatgt

SEQ ID NO: 3979514 - DNA, 25 bp, Homo sapien
catgtacagcgtgcatagggactct

SEQ ID NO: 3979515 - DNA, 25 bp, Homo sapien
tgttgcgtgcaatatgaccgtcggc

SEQ ID NO: 3979516 - DNA, 25 bp, Homo sapien
tttgtacacaagttcccagggtgag

SEQ ID NO: 3979517 - DNA, 25 bp, Homo sapien
gatatatctttgtgtgagcctcttg

SEQ ID NO: 3979518 - DNA, 25 bp, Homo sapien
gcctcttgggtttagcctagttgga

SEQ ID NO: 3979519 - DNA, 25 bp, Homo sapien
tgtaacagttcgattttgatatatc

SEQ ID NO: 3979520 - DNA, 25 bp, Homo sapien
ctttctgaagctctcataatatgta

SEQ ID NO: 3979521 - DNA, 25 bp, Homo sapien
tgttagatgcgttggagtggacttc

SEQ ID NO: 3979522 - DNA, 25 bp, Homo sapien
ctagggtgtacattgttagatgcgt

SEQ ID NO: 3979523 - DNA, 25 bp, Homo sapien
tacattgttagatgcgttggagtgg

SEQ ID NO: 3979524 - DNA, 25 bp, Homo sapien
ggtgtacattgttagatgcgttgga

SEQ ID NO: 3979525 - DNA, 25 bp, Homo sapien
gtgtctagactcatcagcttggcag

SEQ ID NO: 3979526 - DNA, 25 bp, Homo sapien
aagtgtctagactcatcagcttggc

SEQ ID NO: 3979527 - DNA, 25 bp, Homo sapien
tgtctagactcatcagcttggcaga

SEQ ID NO: 3979528 - DNA, 25 bp, Homo sapien
tcaagtgtctagactcatcagcttg

SEQ ID NO: 3979529 - DNA, 25 bp, Homo sapien
gtggaagtaaagatgcttcatttct

SEQ ID NO: 3979530 - DNA, 25 bp, Homo sapien
tgtgagtttagcagataaacacgtc

SEQ ID NO: 3979531 - DNA, 25 bp, Homo sapien
caagcatgacgaggcgagtttaagg

SEQ ID NO: 3979532 - DNA, 25 bp, Homo sapien
tttcttttgcatgtgtgagtttagc

SEQ ID NO: 3979533 - DNA, 25 bp, Homo sapien
tgcagggagtcacggacagcctggg

SEQ ID NO: 3979534 - DNA, 25 bp, Homo sapien
actgcagggagtcacggacagcctg

SEQ ID NO: 3979535 - DNA, 25 bp, Homo sapien
gactgcagggagtcacggacagcct

SEQ ID NO: 3979536 - DNA, 25 bp, Homo sapien
cagggagtcacggacagcctgggcc

SEQ ID NO: 3979537 - DNA, 25 bp, Homo sapien
tcaggagtgtcccaagtcttctatg

SEQ ID NO: 3979538 - DNA, 25 bp, Homo sapien
cattcttacgtgttcagttcagtgg

SEQ ID NO: 3979539 - DNA, 25 bp, Homo sapien
tacctcatagagtagaatcatccag

SEQ ID NO: 3979540 - DNA, 25 bp, Homo sapien
tctcattgtgagttattgccctaaa

SEQ ID NO: 3979541 - DNA, 25 bp, Homo sapien
actgcttagggcagcacccggctgt

SEQ ID NO: 3979542 - DNA, 25 bp, Homo sapien
gcagccttgccatgccaaggcacat

SEQ ID NO: 3979543 - DNA, 25 bp, Homo sapien
gcagaaccggcgtctggagcttcct

SEQ ID NO: 3979544 - DNA, 25 bp, Homo sapien
ctgaatggccttcgagtctgagtgc

SEQ ID NO: 3979545 - DNA, 25 bp, Homo sapien
gagtcaaaggtggtgatcaggcttc

SEQ ID NO: 3979546 - DNA, 25 bp, Homo sapien
tgtttaggagtcagaattggcagga

SEQ ID NO: 3979547 - DNA, 25 bp, Homo sapien
caggcttctgtatgggtgactagga

SEQ ID NO: 3979548 - DNA, 25 bp, Homo sapien
ttggctttgccaggtgctaccctca

SEQ ID NO: 3979549 - DNA, 25 bp, Homo sapien
gactagcattcaggagctttctgcg

SEQ ID NO: 3979550 - DNA, 25 bp, Homo sapien
catacttctgttgtaggcactaagg

SEQ ID NO: 3979551 - DNA, 25 bp, Homo sapien
tgatgctggctctgtccataaaggg

SEQ ID NO: 3979552 - DNA, 25 bp, Homo sapien
tgacgtctgtctggaagccccagag

SEQ ID NO: 3979553 - DNA, 25 bp, Homo sapien
gggtcagaagggcaaagtgtcactc

SEQ ID NO: 3979554 - DNA, 25 bp, Homo sapien
tgattcagataacaggtaggcttcc

SEQ ID NO: 3979555 - DNA, 25 bp, Homo sapien
gagcgcccagacttctaacccagtt

SEQ ID NO: 3979556 - DNA, 25 bp, Homo sapien
caaagtagatagattccagcctgtc

SEQ ID NO: 3979557 - DNA, 25 bp, Homo sapien
tattaagagcctagagtggcatgcg

SEQ ID NO: 3979558 - DNA, 25 bp, Homo sapien
tgctagtttgcggacgagtttcccc

SEQ ID NO: 3979559 - DNA, 25 bp, Homo sapien
ccaagctgcaggctccataagggca

SEQ ID NO: 3979560 - DNA, 25 bp, Homo sapien
tgaatgccgggttgcctatcgcgta

SEQ ID NO: 3979561 - DNA, 25 bp, Homo sapien
tccggaatctcagccgccgtctgag

SEQ ID NO: 3979562 - DNA, 25 bp, Homo sapien
aggaagacgccagaaactcggcccg

SEQ ID NO: 3979563 - DNA, 25 bp, Homo sapien
actacgaataccaggaagcaccgcg

SEQ ID NO: 3979564 - DNA, 25 bp, Homo sapien
gcctgccgggactcgtagtctctgc

SEQ ID NO: 3979565 - DNA, 25 bp, Homo sapien
gcagtgcgcgggctggccgtcgcgg

SEQ ID NO: 3979566 - DNA, 25 bp, Homo sapien
agtgcgcgggctggccgtcgcggac

SEQ ID NO: 3979567 - DNA, 25 bp, Homo sapien
gcgtgcgcagtgcgcgggctggccg

SEQ ID NO: 3979568 - DNA, 25 bp, Homo sapien
tgcgcagtgcgcgggctggccgtcg

SEQ ID NO: 3979569 - DNA, 25 bp, Homo sapien
gggctgccgggctgctggagcgcgg

SEQ ID NO: 3979570 - DNA, 25 bp, Homo sapien
ccgggctgctggagcgcggttcccg

SEQ ID NO: 3979571 - DNA, 25 bp, Homo sapien
ctgccgggctgctggagcgcggttc

SEQ ID NO: 3979572 - DNA, 25 bp, Homo sapien
agccggggccaggcgcgaggtggcg

SEQ ID NO: 3979573 - DNA, 25 bp, Homo sapien
gggtgctggtgagtgcggagccggc

SEQ ID NO: 3979574 - DNA, 25 bp, Homo sapien
acgtccgcgccacgcgccacagcac

SEQ ID NO: 3979575 - DNA, 25 bp, Homo sapien
cccctctgcgcacgtccgcgccacg

SEQ ID NO: 3979576 - DNA, 25 bp, Homo sapien
tgtggcgagcggggaggcgtccgca

SEQ ID NO: 3979577 - DNA, 25 bp, Homo sapien
tcctcggcgtctccgccccccgaga

SEQ ID NO: 3979578 - DNA, 25 bp, Homo sapien
agctgcccggggattcccggtggcg

SEQ ID NO: 3979579 - DNA, 25 bp, Homo sapien
ggtggcgccggtcggagcgcctccc

SEQ ID NO: 3979580 - DNA, 25 bp, Homo sapien
agaaatcccgctcggggcgcggtgc

SEQ ID NO: 3979581 - DNA, 25 bp, Homo sapien
tcacaatgccgttatcacaccaaaa

SEQ ID NO: 3979582 - DNA, 25 bp, Homo sapien
taggcttgaattgctgagctcacac

SEQ ID NO: 3979583 - DNA, 25 bp, Homo sapien
aatccacatgtcgtgattggtccag

SEQ ID NO: 3979584 - DNA, 25 bp, Homo sapien
aaatttccgattttaagtatgtcag

SEQ ID NO: 3979585 - DNA, 25 bp, Homo sapien
tccttgatgtcagctagatcttcct

SEQ ID NO: 3979586 - DNA, 25 bp, Homo sapien
aacttgtggaagcttctatatcagc

SEQ ID NO: 3979587 - DNA, 25 bp, Homo sapien
aaagtcatgaaccaacaacctctgc

SEQ ID NO: 3979588 - DNA, 25 bp, Homo sapien
tttactgtacccacctccttgatgt

SEQ ID NO: 3979589 - DNA, 25 bp, Homo sapien
aaattggaatcccagccttaagagg

SEQ ID NO: 3979590 - DNA, 25 bp, Homo sapien
gagtcagtcattgtaatgccatcca

SEQ ID NO: 3979591 - DNA, 25 bp, Homo sapien
gacttaaccacatgatactcttgca

SEQ ID NO: 3979592 - DNA, 25 bp, Homo sapien
tattgttgccttgcaaaacacaggg

SEQ ID NO: 3979593 - DNA, 25 bp, Homo sapien
ctagtagacttggacgatgcgagcc

SEQ ID NO: 3979594 - DNA, 25 bp, Homo sapien
tggccctcaggaaaaagattgtgac

SEQ ID NO: 3979595 - DNA, 25 bp, Homo sapien
caacctttaccatggagaagcgagg

SEQ ID NO: 3979596 - DNA, 25 bp, Homo sapien
taaaccaagaatctagggagtggcc

SEQ ID NO: 3979597 - DNA, 25 bp, Homo sapien
tatgttagagataccagaatgctgg

SEQ ID NO: 3979598 - DNA, 25 bp, Homo sapien
tatggatagaccaacagtaagggtt

SEQ ID NO: 3979599 - DNA, 25 bp, Homo sapien
tgtgcttaaaagtcctacgtgactg

SEQ ID NO: 3979600 - DNA, 25 bp, Homo sapien
tatttggattggtgaaagacctcaa

SEQ ID NO: 3979601 - DNA, 25 bp, Homo sapien
cagcagtgcagtccagaggttaaga

SEQ ID NO: 3979602 - DNA, 25 bp, Homo sapien
cacccgagaaatcttaaatagacac

SEQ ID NO: 3979603 - DNA, 25 bp, Homo sapien
cctttttcatgaacacacccgagaa

SEQ ID NO: 3979604 - DNA, 25 bp, Homo sapien
tttggtacagcttccacattgcatg

SEQ ID NO: 3979605 - DNA, 25 bp, Homo sapien
cagccatgggaggtgataatagcct

SEQ ID NO: 3979606 - DNA, 25 bp, Homo sapien
caaaagtgccattgcgtgtgtaagc

SEQ ID NO: 3979607 - DNA, 25 bp, Homo sapien
cattgcgtgtgtaagccatgttttc

SEQ ID NO: 3979608 - DNA, 25 bp, Homo sapien
ggtgataatagcctgggtaacaatt

SEQ ID NO: 3979609 - DNA, 25 bp, Homo sapien
tcagtcatacttgtccaggagcctg

SEQ ID NO: 3979610 - DNA, 25 bp, Homo sapien
tgtccaggagcctgcttccttgaaa

SEQ ID NO: 3979611 - DNA, 25 bp, Homo sapien
ggtcttggacacctgattgttacca

SEQ ID NO: 3979612 - DNA, 25 bp, Homo sapien
aaagtgactgatgttccggtgttcc

SEQ ID NO: 3979613 - DNA, 25 bp, Homo sapien
tgctgctatggtcttgttgatgctg

SEQ ID NO: 3979614 - DNA, 25 bp, Homo sapien
ctgctgctatggtcttgttgatgct

SEQ ID NO: 3979615 - DNA, 25 bp, Homo sapien
actgctgctatggtcttgttgatgc

SEQ ID NO: 3979616 - DNA, 25 bp, Homo sapien
cactgctgctatggtcttgttgatg

SEQ ID NO: 3979617 - DNA, 25 bp, Homo sapien
gctatagggcctggttataaagata

SEQ ID NO: 3979618 - DNA, 25 bp, Homo sapien
cagctatagggcctggttataaaga

SEQ ID NO: 3979619 - DNA, 25 bp, Homo sapien
atagggcctggttataaagataatc

SEQ ID NO: 3979620 - DNA, 25 bp, Homo sapien
agggcctggttataaagataatcac

SEQ ID NO: 3979621 - DNA, 25 bp, Homo sapien
ttttttccatgtggagaagctttga

SEQ ID NO: 3979622 - DNA, 25 bp, Homo sapien
tttttccatgtggagaagctttgac

SEQ ID NO: 3979623 - DNA, 25 bp, Homo sapien
gttttttccatgtggagaagctttg

SEQ ID NO: 3979624 - DNA, 25 bp, Homo sapien
aggttttttccatgtggagaagctt

SEQ ID NO: 3979625 - DNA, 25 bp, Homo sapien
tcttcagtgtacgacatgcagcaca

SEQ ID NO: 3979626 - DNA, 25 bp, Homo sapien
gacgacaaagatgtccacgaggaat

SEQ ID NO: 3979627 - DNA, 25 bp, Homo sapien
gcacacaggagacctaagaagacga

SEQ ID NO: 3979628 - DNA, 25 bp, Homo sapien
gagttgggtcaattggtgtcttcag

SEQ ID NO: 3979629 - DNA, 25 bp, Homo sapien
tacacatagacattggcaagttgac

SEQ ID NO: 3979630 - DNA, 25 bp, Homo sapien
catgtagcagtatgttacagacacc

SEQ ID NO: 3979631 - DNA, 25 bp, Homo sapien
caagttgacatatttgggaccatgc

SEQ ID NO: 3979632 - DNA, 25 bp, Homo sapien
ctagtaatacactcccaggcatggg

SEQ ID NO: 3979633 - DNA, 25 bp, Homo sapien
tttggaggaaggagatttgccttga

SEQ ID NO: 3979634 - DNA, 25 bp, Homo sapien
ttggtgctctgaagatagagaaggc

SEQ ID NO: 3979635 - DNA, 25 bp, Homo sapien
tagggaagacaagaagtcctgttct

SEQ ID NO: 3979636 - DNA, 25 bp, Homo sapien
tgttcttcaggacaatggtggcaga

SEQ ID NO: 3979637 - DNA, 25 bp, Homo sapien
catttcacttgagatagccacaaac

SEQ ID NO: 3979638 - DNA, 25 bp, Homo sapien
cgtgttcttgatatgtgccaggctc

SEQ ID NO: 3979639 - DNA, 25 bp, Homo sapien
gctcacatgattgtcggccaaattc

SEQ ID NO: 3979640 - DNA, 25 bp, Homo sapien
tgtctcaataaaaatgtgccgtgtt

SEQ ID NO: 3979641 - DNA, 25 bp, Homo sapien
atgctccgttggtgccaggccatca

SEQ ID NO: 3979642 - DNA, 25 bp, Homo sapien
ctcgaccatgattcatcagggtaat

SEQ ID NO: 3979643 - DNA, 25 bp, Homo sapien
ttcatcagggtaatgctccgttggt

SEQ ID NO: 3979644 - DNA, 25 bp, Homo sapien
tcagggtaatgctccgttggtgcca

SEQ ID NO: 3979645 - DNA, 25 bp, Homo sapien
ctgggagtgcagacagctgacagct

SEQ ID NO: 3979646 - DNA, 25 bp, Homo sapien
agctgaaagtcacatcaagaatgga

SEQ ID NO: 3979647 - DNA, 25 bp, Homo sapien
gctgacagctgaaagtcacatcaag

SEQ ID NO: 3979648 - DNA, 25 bp, Homo sapien
agtcacatcaagaatggaatcaatt

SEQ ID NO: 3979649 - DNA, 25 bp, Homo sapien
cccaggaccgatggtaactgaggcg

SEQ ID NO: 3979650 - DNA, 25 bp, Homo sapien
actctgcgagagtctgtgctggacc

SEQ ID NO: 3979651 - DNA, 25 bp, Homo sapien
tgcgcctatacccaggaccgatggt

SEQ ID NO: 3979652 - DNA, 25 bp, Homo sapien
ggcaagtctgtcctcctcggtggtt

SEQ ID NO: 3979653 - DNA, 25 bp, Homo sapien
actgatggacacacgtaggcacacg

SEQ ID NO: 3979654 - DNA, 25 bp, Homo sapien
aacagcctcccatgtggacagtcca

SEQ ID NO: 3979655 - DNA, 25 bp, Homo sapien
tccttcttcgtgcatccactgatgg

SEQ ID NO: 3979656 - DNA, 25 bp, Homo sapien
tctgtttcgaaggatttcttgaggc

SEQ ID NO: 3979657 - DNA, 25 bp, Homo sapien
actcacagctgggaggtgagtctgt

SEQ ID NO: 3979658 - DNA, 25 bp, Homo sapien
ctgggaggtgagtctgtgatctcat

SEQ ID NO: 3979659 - DNA, 25 bp, Homo sapien
tgagctgcactcacagctgggaggt

SEQ ID NO: 3979660 - DNA, 25 bp, Homo sapien
aggtggggtgagctgcactcacagc

SEQ ID NO: 3979661 - DNA, 25 bp, Homo sapien
cagggacatatgtggtcactgccat

SEQ ID NO: 3979662 - DNA, 25 bp, Homo sapien
tccagggacatatgtggtcactgcc

SEQ ID NO: 3979663 - DNA, 25 bp, Homo sapien
gtcactccagggacatatgtggtca

SEQ ID NO: 3979664 - DNA, 25 bp, Homo sapien
cactccagggacatatgtggtcact

SEQ ID NO: 3979665 - DNA, 25 bp, Homo sapien
gtcatcgtcctgcagcgcggagcct

SEQ ID NO: 3979666 - DNA, 25 bp, Homo sapien
ccgcagccggagcactgcgagggcg

SEQ ID NO: 3979667 - DNA, 25 bp, Homo sapien
agcagcgagccggtgtgcggcagcg

SEQ ID NO: 3979668 - DNA, 25 bp, Homo sapien
agagtcgccatgcagatcccgcgcg

SEQ ID NO: 3979669 - DNA, 25 bp, Homo sapien
taacgggcttctgtctcttagcata

SEQ ID NO: 3979670 - DNA, 25 bp, Homo sapien
tggaatcaaagaatacgtaacgggc

SEQ ID NO: 3979671 - DNA, 25 bp, Homo sapien
gaaactgtagcacctgactcaggaa

SEQ ID NO: 3979672 - DNA, 25 bp, Homo sapien
cttttaagggatacagggagaccag

SEQ ID NO: 3979673 - DNA, 25 bp, Homo sapien
tttcctttagacctcagctggctgc

SEQ ID NO: 3979674 - DNA, 25 bp, Homo sapien
ttaacaagagtaggtctgagggccg

SEQ ID NO: 3979675 - DNA, 25 bp, Homo sapien
tctgagggccgttggccgtgtcttt

SEQ ID NO: 3979676 - DNA, 25 bp, Homo sapien
cagacagcggccctgatggtgcata

SEQ ID NO: 3979677 - DNA, 25 bp, Homo sapien
cagaattcgaggaaatccagtcgca

SEQ ID NO: 3979678 - DNA, 25 bp, Homo sapien
ttctttgcagaattcgaggaaatcc

SEQ ID NO: 3979679 - DNA, 25 bp, Homo sapien
ttcgaggaaatccagtcgcacaggc

SEQ ID NO: 3979680 - DNA, 25 bp, Homo sapien
agcaatgccattgtccttcctgtgc

SEQ ID NO: 3979681 - DNA, 25 bp, Homo sapien
agcgattagaatgggggtctggttt

SEQ ID NO: 3979682 - DNA, 25 bp, Homo sapien
ctggaatgtgcagtaccagcagcag

SEQ ID NO: 3979683 - DNA, 25 bp, Homo sapien
ggtttcccggaatgtgcaaggtctg

SEQ ID NO: 3979684 - DNA, 25 bp, Homo sapien
gtttcccggaatgtgcaaggtctgg

SEQ ID NO: 3979685 - DNA, 25 bp, Homo sapien
gggaccctgcatttagtgtaaagat

SEQ ID NO: 3979686 - DNA, 25 bp, Homo sapien
tcctgacaggtaaagttcagtggcg

SEQ ID NO: 3979687 - DNA, 25 bp, Homo sapien
tggccgtttgcaggcactcggtccc

SEQ ID NO: 3979688 - DNA, 25 bp, Homo sapien
tcaggtgcctgtggctcgtccagag

SEQ ID NO: 3979689 - DNA, 25 bp, Homo sapien
tcccaacagtttgcgccataaatat

SEQ ID NO: 3979690 - DNA, 25 bp, Homo sapien
gaagatcccaacagtttgcgccata

SEQ ID NO: 3979691 - DNA, 25 bp, Homo sapien
gatcccaacagtttgcgccataaat

SEQ ID NO: 3979692 - DNA, 25 bp, Homo sapien
caggaagatcccaacagtttgcgcc

SEQ ID NO: 3979693 - DNA, 25 bp, Homo sapien
agtgaagctggtgagactgcctgcc

SEQ ID NO: 3979694 - DNA, 25 bp, Homo sapien
tgaaaatcacctacacggctccttg

SEQ ID NO: 3979695 - DNA, 25 bp, Homo sapien
ctaactcggtggcttatcatctggg

SEQ ID NO: 3979696 - DNA, 25 bp, Homo sapien
tccgtgggcccagtgactaactcgg

SEQ ID NO: 3979697 - DNA, 25 bp, Homo sapien
aggcaaattcgcagggtccaatgca

SEQ ID NO: 3979698 - DNA, 25 bp, Homo sapien
ggcaaattcgcagggtccaatgcag

SEQ ID NO: 3979699 - DNA, 25 bp, Homo sapien
caggcaaattcgcagggtccaatgc

SEQ ID NO: 3979700 - DNA, 25 bp, Homo sapien
tcaggcaaattcgcagggtccaatg

SEQ ID NO: 3979701 - DNA, 25 bp, Homo sapien
tgcttgattggatactgccgatgac

SEQ ID NO: 3979702 - DNA, 25 bp, Homo sapien
gctgaggtcgctgcttgattggata

SEQ ID NO: 3979703 - DNA, 25 bp, Homo sapien
tccctcctccaacgagtgctgaggt

SEQ ID NO: 3979704 - DNA, 25 bp, Homo sapien
tccaacgagtgctgaggtcgctgct

SEQ ID NO: 3979705 - DNA, 25 bp, Homo sapien
cctgtggccggtgccgctttaaagg

SEQ ID NO: 3979706 - DNA, 25 bp, Homo sapien
tgtgttcaggtgaggactggttcct

SEQ ID NO: 3979707 - DNA, 25 bp, Homo sapien
ttcctcgtctgtgttcaggtgagga

SEQ ID NO: 3979708 - DNA, 25 bp, Homo sapien
cctgggtttgcatcacgggtgtcca

SEQ ID NO: 3979709 - DNA, 25 bp, Homo sapien
tttgcatcacgggtgtccatcttgt

SEQ ID NO: 3979710 - DNA, 25 bp, Homo sapien
tggcttctcaaacggccgaagttgc

SEQ ID NO: 3979711 - DNA, 25 bp, Homo sapien
aatgtaatgttgcagatccgcaggc

SEQ ID NO: 3979712 - DNA, 25 bp, Homo sapien
ctttggaattgggagcacgatgact

SEQ ID NO: 3979713 - DNA, 25 bp, Homo sapien
caatgcgtagatagaagaagcccca

SEQ ID NO: 3979714 - DNA, 25 bp, Homo sapien
agcttgtggcccgttgcaacactgg

SEQ ID NO: 3979715 - DNA, 25 bp, Homo sapien
aacactggcacgtctcttcgctctc

SEQ ID NO: 3979716 - DNA, 25 bp, Homo sapien
tgctcggcggctgagcagcttgtgg

SEQ ID NO: 3979717 - DNA, 25 bp, Homo sapien
ggtccagttgagcacagccctcatc

SEQ ID NO: 3979718 - DNA, 25 bp, Homo sapien
aagacctccagaatagttgtttctt

SEQ ID NO: 3979719 - DNA, 25 bp, Homo sapien
ggctgcttgtcctggaacccccacc

SEQ ID NO: 3979720 - DNA, 25 bp, Homo sapien
tggaacccccacctcacatttgaag

SEQ ID NO: 3979721 - DNA, 25 bp, Homo sapien
cctcacatttgaagacctccagaat

SEQ ID NO: 3979722 - DNA, 25 bp, Homo sapien
gtgcctcttccaatcccagcaccct

SEQ ID NO: 3979723 - DNA, 25 bp, Homo sapien
tgcctcttccaatcccagcaccctc

SEQ ID NO: 3979724 - DNA, 25 bp, Homo sapien
tgattagcattctggagcccaacag

SEQ ID NO: 3979725 - DNA, 25 bp, Homo sapien
ctttgtgagcgttctagccttggag

SEQ ID NO: 3979726 - DNA, 25 bp, Homo sapien
tggaggcttccttgccgtggtaaag

SEQ ID NO: 3979727 - DNA, 25 bp, Homo sapien
ggacaggtgcgtgcattgattagca

SEQ ID NO: 3979728 - DNA, 25 bp, Homo sapien
tgaggtcaggaagcctcgtcaggta

SEQ ID NO: 3979729 - DNA, 25 bp, Homo sapien
ggtcttaccttgaggccctcctgga

SEQ ID NO: 3979730 - DNA, 25 bp, Homo sapien
gatagccaagagttgcctgaggtca

SEQ ID NO: 3979731 - DNA, 25 bp, Homo sapien
cagctgacgggaataataaggacta

SEQ ID NO: 3979732 - DNA, 25 bp, Homo sapien
gattcattagcattaagtcaccagg

SEQ ID NO: 3979733 - DNA, 25 bp, Homo sapien
ggagttgctttacgcatgcgctctt

SEQ ID NO: 3979734 - DNA, 25 bp, Homo sapien
taggtcttgaccagatcactgaagt

SEQ ID NO: 3979735 - DNA, 25 bp, Homo sapien
cactgaagtggtctctccgtgatat

SEQ ID NO: 3979736 - DNA, 25 bp, Homo sapien
catagttgtcttcctttcgtctggc

SEQ ID NO: 3979737 - DNA, 25 bp, Homo sapien
gacagaaatgaggagcgtgtaaacc

SEQ ID NO: 3979738 - DNA, 25 bp, Homo sapien
ttttttgccattggacccaggccca

SEQ ID NO: 3979739 - DNA, 25 bp, Homo sapien
aagatttcggtttgttaggcctgcg

SEQ ID NO: 3979740 - DNA, 25 bp, Homo sapien
ctccaggggcgcaatcacctttgct

SEQ ID NO: 3979741 - DNA, 25 bp, Homo sapien
tccaggggcgcaatcacctttgctg

SEQ ID NO: 3979742 - DNA, 25 bp, Homo sapien
tgcctccaggggcgcaatcaccttt

SEQ ID NO: 3979743 - DNA, 25 bp, Homo sapien
aatgcctccaggggcgcaatcacct

SEQ ID NO: 3979744 - DNA, 25 bp, Homo sapien
gtagttccttgagcattctgcattc

SEQ ID NO: 3979745 - DNA, 25 bp, Homo sapien
tgtagtccggagacagcaactgtag

SEQ ID NO: 3979746 - DNA, 25 bp, Homo sapien
taggggtacacaaatagcacaagga

SEQ ID NO: 3979747 - DNA, 25 bp, Homo sapien
gagaggaatgtttctttttatactc

SEQ ID NO: 3979748 - DNA, 25 bp, Homo sapien
gagtatttcccaagggcaatccgtg

SEQ ID NO: 3979749 - DNA, 25 bp, Homo sapien
ttcccaagggcaatccgtgggtctg

SEQ ID NO: 3979750 - DNA, 25 bp, Homo sapien
ggtctgatctgtagaatttgctcca

SEQ ID NO: 3979751 - DNA, 25 bp, Homo sapien
caagggcaatccgtgggtctgatct

SEQ ID NO: 3979752 - DNA, 25 bp, Homo sapien
ccattgtgtcactagccctctgttt

SEQ ID NO: 3979753 - DNA, 25 bp, Homo sapien
tcagatcctcttggcaacacgttgg

SEQ ID NO: 3979754 - DNA, 25 bp, Homo sapien
caacggtgaagcagaactcagatcc

SEQ ID NO: 3979755 - DNA, 25 bp, Homo sapien
tctctgatcatactccggcaataag

SEQ ID NO: 3979756 - DNA, 25 bp, Homo sapien
ctgggggctattgtgaggtctgagt

SEQ ID NO: 3979757 - DNA, 25 bp, Homo sapien
gtctgagtttaagacattgaatgat

SEQ ID NO: 3979758 - DNA, 25 bp, Homo sapien
ggggctattgtgaggtctgagttta

SEQ ID NO: 3979759 - DNA, 25 bp, Homo sapien
tgagtttaagacattgaatgatccc

SEQ ID NO: 3979760 - DNA, 25 bp, Homo sapien
atgcttgatcaacgccacactatcc

SEQ ID NO: 3979761 - DNA, 25 bp, Homo sapien
ctcatgcttgatcaacgccacacta

SEQ ID NO: 3979762 - DNA, 25 bp, Homo sapien
gctttcactagtctcttcagcctta

SEQ ID NO: 3979763 - DNA, 25 bp, Homo sapien
tggctttcactagtctcttcagcct

SEQ ID NO: 3979764 - DNA, 25 bp, Homo sapien
tggaccatctgtgagcctggacatc

SEQ ID NO: 3979765 - DNA, 25 bp, Homo sapien
tccctctggtggatcttgcagaggc

SEQ ID NO: 3979766 - DNA, 25 bp, Homo sapien
ccctctggtggatcttgcagaggct

SEQ ID NO: 3979767 - DNA, 25 bp, Homo sapien
gctccctctggtggatcttgcagag

SEQ ID NO: 3979768 - DNA, 25 bp, Homo sapien
ctctggtggatcttgcagaggctgg

SEQ ID NO: 3979769 - DNA, 25 bp, Homo sapien
gaaacatttgaccaaggaatccaac

SEQ ID NO: 3979770 - DNA, 25 bp, Homo sapien
agccctgccacctctgtcagttgta

SEQ ID NO: 3979771 - DNA, 25 bp, Homo sapien
gttaggcattcttgcaacaaggaag

SEQ ID NO: 3979772 - DNA, 25 bp, Homo sapien
agttgtatcacctcagcagcagcca

SEQ ID NO: 3979773 - DNA, 25 bp, Homo sapien
gaaacatgtctcacttagggttgga

SEQ ID NO: 3979774 - DNA, 25 bp, Homo sapien
tgtagccacgaggtagcatttcctt

SEQ ID NO: 3979775 - DNA, 25 bp, Homo sapien
tccatcgtcttgtaatgaaacacac

SEQ ID NO: 3979776 - DNA, 25 bp, Homo sapien
accgacacagtgacatgcaggcctg

SEQ ID NO: 3979777 - DNA, 25 bp, Homo sapien
gtcgctacagtcaccacattcagag

SEQ ID NO: 3979778 - DNA, 25 bp, Homo sapien
gcttctggtatttgtagtctgcccg

SEQ ID NO: 3979779 - DNA, 25 bp, Homo sapien
tctgcccgttgatttacaaaatgcc

SEQ ID NO: 3979780 - DNA, 25 bp, Homo sapien
gatgcacactgttgaaaggctggtt

SEQ ID NO: 3979781 - DNA, 25 bp, Homo sapien
ccttttcagacgaatgggtcctatg

SEQ ID NO: 3979782 - DNA, 25 bp, Homo sapien
ctgaattgccacttgcacttcgatc

SEQ ID NO: 3979783 - DNA, 25 bp, Homo sapien
gaatgggtcctatgatggaatctgt

SEQ ID NO: 3979784 - DNA, 25 bp, Homo sapien
ttgcacttcgatcccttttcagacg

SEQ ID NO: 3979785 - DNA, 25 bp, Homo sapien
taaactggaatctcccatagtgtcc

SEQ ID NO: 3979786 - DNA, 25 bp, Homo sapien
tggagacacaaccttgattgcagcg

SEQ ID NO: 3979787 - DNA, 25 bp, Homo sapien
tacacagagctcatacttctcaaga

SEQ ID NO: 3979788 - DNA, 25 bp, Homo sapien
gattgcagcgagactggtggtcact

SEQ ID NO: 3979789 - DNA, 25 bp, Homo sapien
gaggctctacaggtatcaagaaaca

SEQ ID NO: 3979790 - DNA, 25 bp, Homo sapien
cgtaggttggagatgcaaagtcaga

SEQ ID NO: 3979791 - DNA, 25 bp, Homo sapien
accaaatttggatctgaggtgtgca

SEQ ID NO: 3979792 - DNA, 25 bp, Homo sapien
cactcttgattaggtcgtaggttgg

SEQ ID NO: 3979793 - DNA, 25 bp, Homo sapien
tggagttgtttctgacgggtgatca

SEQ ID NO: 3979794 - DNA, 25 bp, Homo sapien
gtttctgacgggtgatcacttcaga

SEQ ID NO: 3979795 - DNA, 25 bp, Homo sapien
agttgtttctgacgggtgatcactt

SEQ ID NO: 3979796 - DNA, 25 bp, Homo sapien
tgtttctgacgggtgatcacttcag

SEQ ID NO: 3979797 - DNA, 25 bp, Homo sapien
gatgtggataacatttgcaggtaca

SEQ ID NO: 3979798 - DNA, 25 bp, Homo sapien
cagtaatattttagagcatagatgt

SEQ ID NO: 3979799 - DNA, 25 bp, Homo sapien
ctgcagaacgagatagaattcaatt

SEQ ID NO: 3979800 - DNA, 25 bp, Homo sapien
ttttagagcatagatgtggataaca

SEQ ID NO: 3979801 - DNA, 25 bp, Homo sapien
taccttctgggaaagataactatcc

SEQ ID NO: 3979802 - DNA, 25 bp, Homo sapien
taagccaactgcatatagatgttcg

SEQ ID NO: 3979803 - DNA, 25 bp, Homo sapien
ccaaaatatatgtagaccaagggtc

SEQ ID NO: 3979804 - DNA, 25 bp, Homo sapien
cacttatcctgaaaatgaatgcagc

SEQ ID NO: 3979805 - DNA, 25 bp, Homo sapien
tgataattttggtctgcaagttggg

SEQ ID NO: 3979806 - DNA, 25 bp, Homo sapien
caagttgggtcttttagttgcaagt

SEQ ID NO: 3979807 - DNA, 25 bp, Homo sapien
tgattgtaccacatccattaagagg

SEQ ID NO: 3979808 - DNA, 25 bp, Homo sapien
tattcccattagagttaaaagcctc

SEQ ID NO: 3979809 - DNA, 25 bp, Homo sapien
ctgtcagaagagcaagttaaagatg

SEQ ID NO: 3979810 - DNA, 25 bp, Homo sapien
ttctgcataaattgaggtgtaggaa

SEQ ID NO: 3979811 - DNA, 25 bp, Homo sapien
aatccccggtaagaattggcataat

SEQ ID NO: 3979812 - DNA, 25 bp, Homo sapien
agcagaaaatccccggtaagaattg

SEQ ID NO: 3979813 - DNA, 25 bp, Homo sapien
tgcataaattgaggtgtaggaagca

SEQ ID NO: 3979814 - DNA, 25 bp, Homo sapien
tcgaaggtgggagtcacacggccac

SEQ ID NO: 3979815 - DNA, 25 bp, Homo sapien
tttgcactgtttgtctatttctagg

SEQ ID NO: 3979816 - DNA, 25 bp, Homo sapien
cagagagtttgatgacgattcgaag

SEQ ID NO: 3979817 - DNA, 25 bp, Homo sapien
tggcaagaaaatcaaatttgcactg

SEQ ID NO: 3979818 - DNA, 25 bp, Homo sapien
caggtaaccgccacagtttggaata

SEQ ID NO: 3979819 - DNA, 25 bp, Homo sapien
tatcttgtaatctttctccacttgt

SEQ ID NO: 3979820 - DNA, 25 bp, Homo sapien
gatccttccaaggtatccaggtaac

SEQ ID NO: 3979821 - DNA, 25 bp, Homo sapien
gccacacacaataagccagctcagg

SEQ ID NO: 3979822 - DNA, 25 bp, Homo sapien
gcgtgggaaaaccttgactgctgca

SEQ ID NO: 3979823 - DNA, 25 bp, Homo sapien
ggagagactcccattacctgaattg

SEQ ID NO: 3979824 - DNA, 25 bp, Homo sapien
taacatgtgttgcatctggagagac

SEQ ID NO: 3979825 - DNA, 25 bp, Homo sapien
cccagtaagtacataaggaagcagc

SEQ ID NO: 3979826 - DNA, 25 bp, Homo sapien
tcagactgaagattataagaacccg

SEQ ID NO: 3979827 - DNA, 25 bp, Homo sapien
gatcatgtgctccatccagaaccaa

SEQ ID NO: 3979828 - DNA, 25 bp, Homo sapien
taagaacccggacagaagagtgtgt

SEQ ID NO: 3979829 - DNA, 25 bp, Homo sapien
gcattgcagaagataccagggttac

SEQ ID NO: 3979830 - DNA, 25 bp, Homo sapien
agaagacaaagacagttctttgaat

SEQ ID NO: 3979831 - DNA, 25 bp, Homo sapien
gaagacaaagacagttctttgaatt

SEQ ID NO: 3979832 - DNA, 25 bp, Homo sapien
agacaaagacagttctttgaattct

SEQ ID NO: 3979833 - DNA, 25 bp, Homo sapien
aagacaaagacagttctttgaattc

SEQ ID NO: 3979834 - DNA, 25 bp, Homo sapien
tagtcgtttttactgcagacttgcc

SEQ ID NO: 3979835 - DNA, 25 bp, Homo sapien
cattgctggaggttccgtcaaagac

SEQ ID NO: 3979836 - DNA, 25 bp, Homo sapien
gacttgccctagcagaggcccattg

SEQ ID NO: 3979837 - DNA, 25 bp, Homo sapien
gattcaaatacaggaacatagtcgt

SEQ ID NO: 3979838 - DNA, 25 bp, Homo sapien
catctgcccagagcgttgttgagag

SEQ ID NO: 3979839 - DNA, 25 bp, Homo sapien
ggatgtgtgaaagctcctccactga

SEQ ID NO: 3979840 - DNA, 25 bp, Homo sapien
tgcagggcggagtcatgttctcagc

SEQ ID NO: 3979841 - DNA, 25 bp, Homo sapien
aagtgtggtacttggacctgcagca

SEQ ID NO: 3979842 - DNA, 25 bp, Homo sapien
tgcagttctcactgggattgagttg

SEQ ID NO: 3979843 - DNA, 25 bp, Homo sapien
tattggcaccccctagactgactgt

SEQ ID NO: 3979844 - DNA, 25 bp, Homo sapien
tgagttgcaggatcatggctttgtg

SEQ ID NO: 3979845 - DNA, 25 bp, Homo sapien
agactgactgtgcagcttgcattgc

SEQ ID NO: 3979846 - DNA, 25 bp, Homo sapien
atggcatgagccttcttacaagctc

SEQ ID NO: 3979847 - DNA, 25 bp, Homo sapien
cagcctccgccattgtcagctccgc

SEQ ID NO: 3979848 - DNA, 25 bp, Homo sapien
ggcatgagccttcttacaagctcca

SEQ ID NO: 3979849 - DNA, 25 bp, Homo sapien
tcagctccgccaaacaggagagaat

SEQ ID NO: 3979850 - DNA, 25 bp, Homo sapien
tacatcagctttctggacacctcca

SEQ ID NO: 3979851 - DNA, 25 bp, Homo sapien
ggaaacgtcagttccagccacgcaa

SEQ ID NO: 3979852 - DNA, 25 bp, Homo sapien
ccagtggaagctctctgtagggatc

SEQ ID NO: 3979853 - DNA, 25 bp, Homo sapien
taaggaccgacagcttttataggct

SEQ ID NO: 3979854 - DNA, 25 bp, Homo sapien
aaatctgggtccagctgggacattc

SEQ ID NO: 3979855 - DNA, 25 bp, Homo sapien
ctgggcaaaatctgggtccagctgg

SEQ ID NO: 3979856 - DNA, 25 bp, Homo sapien
tgggacattcagatgccctgccagg

SEQ ID NO: 3979857 - DNA, 25 bp, Homo sapien
cattcagatgccctgccaggtggct

SEQ ID NO: 3979858 - DNA, 25 bp, Homo sapien
gtaatccacgcaggagccacatgct

SEQ ID NO: 3979859 - DNA, 25 bp, Homo sapien
cctttggctggtggttcgtgttaca

SEQ ID NO: 3979860 - DNA, 25 bp, Homo sapien
gatggctggatcaacacacatcact

SEQ ID NO: 3979861 - DNA, 25 bp, Homo sapien
tttgaggtcactgagctcaggccta

SEQ ID NO: 3979862 - DNA, 25 bp, Homo sapien
tcacgagagctaaacgagcgactcc

SEQ ID NO: 3979863 - DNA, 25 bp, Homo sapien
gagcgactccagctggacaagatca

SEQ ID NO: 3979864 - DNA, 25 bp, Homo sapien
gacaacaggacaggtatcaggacat

SEQ ID NO: 3979865 - DNA, 25 bp, Homo sapien
cattttctgcggtggatgtcaacca

SEQ ID NO: 3979866 - DNA, 25 bp, Homo sapien
gaataacaaaacaatctactaagaa

SEQ ID NO: 3979867 - DNA, 25 bp, Homo sapien
tactaagaagtattgctcatgaaga

SEQ ID NO: 3979868 - DNA, 25 bp, Homo sapien
atataatctcacataaaaacactag

SEQ ID NO: 3979869 - DNA, 25 bp, Homo sapien
aaaacaatctactaagaagtattgc

SEQ ID NO: 3979870 - DNA, 25 bp, Homo sapien
ggcacacattctatatccttcacag

SEQ ID NO: 3979871 - DNA, 25 bp, Homo sapien
gcactgcagggcaggacaagactcc

SEQ ID NO: 3979872 - DNA, 25 bp, Homo sapien
tccgtggcaatggttttggcctggc

SEQ ID NO: 3979873 - DNA, 25 bp, Homo sapien
tcaaaactggcacacattctatatc

SEQ ID NO: 3979874 - DNA, 25 bp, Homo sapien
cacagcttcaggttcctttgcagct

SEQ ID NO: 3979875 - DNA, 25 bp, Homo sapien
tacagccacagcttcaggttccttt

SEQ ID NO: 3979876 - DNA, 25 bp, Homo sapien
tgtctgggttgtgattttttacagc

SEQ ID NO: 3979877 - DNA, 25 bp, Homo sapien
gggttgtgattttttacagccacag

SEQ ID NO: 3979878 - DNA, 25 bp, Homo sapien
tagtgaggtccagtgacagccaagc

SEQ ID NO: 3979879 - DNA, 25 bp, Homo sapien
gagagctcccaattcaggcaagaag

SEQ ID NO: 3979880 - DNA, 25 bp, Homo sapien
tttgcaagcaaggtcacccaactgg

SEQ ID NO: 3979881 - DNA, 25 bp, Homo sapien
gaagcccaggtatcccactgaggaa

SEQ ID NO: 3979882 - DNA, 25 bp, Homo sapien
tagcgcgttgtgtattttgaagtaa

SEQ ID NO: 3979883 - DNA, 25 bp, Homo sapien
gagcacgacaactatcagcaggagc

SEQ ID NO: 3979884 - DNA, 25 bp, Homo sapien
aaggccgccaggataccaccagcga

SEQ ID NO: 3979885 - DNA, 25 bp, Homo sapien
cagcaggagcaaggccgccaggata

SEQ ID NO: 3979886 - DNA, 25 bp, Homo sapien
tggaggtcaaaagacttcgatgtac

SEQ ID NO: 3979887 - DNA, 25 bp, Homo sapien
ctgtatggaggtcaaaagacttcga

SEQ ID NO: 3979888 - DNA, 25 bp, Homo sapien
tatggaggtcaaaagacttcgatgt

SEQ ID NO: 3979889 - DNA, 25 bp, Homo sapien
tgtatggaggtcaaaagacttcgat

SEQ ID NO: 3979890 - DNA, 25 bp, Homo sapien
ctaggcagataagtgcaagcaagca

SEQ ID NO: 3979891 - DNA, 25 bp, Homo sapien
ggcctaggatcccaagctggcccag

SEQ ID NO: 3979892 - DNA, 25 bp, Homo sapien
gatatgcggctggaaataacaagca

SEQ ID NO: 3979893 - DNA, 25 bp, Homo sapien
acacaaccactaagcaatgccaatg

SEQ ID NO: 3979894 - DNA, 25 bp, Homo sapien
gttactgtcccaacaatactgagaa

SEQ ID NO: 3979895 - DNA, 25 bp, Homo sapien
aagctcttctgtggaaatgactgtt

SEQ ID NO: 3979896 - DNA, 25 bp, Homo sapien
gaaatgaccccccactggatatcag

SEQ ID NO: 3979897 - DNA, 25 bp, Homo sapien
gggcctcctgagctatactcatttt

SEQ ID NO: 3979898 - DNA, 25 bp, Homo sapien
tctgacaactggcatttttcctcct

SEQ ID NO: 3979899 - DNA, 25 bp, Homo sapien
ttcctctgacaactggcatttttcc

SEQ ID NO: 3979900 - DNA, 25 bp, Homo sapien
cctctgacaactggcatttttcctc

SEQ ID NO: 3979901 - DNA, 25 bp, Homo sapien
tgacaactggcatttttcctcctaa

SEQ ID NO: 3979902 - DNA, 25 bp, Homo sapien
aaaattcactagaagggctttcata

SEQ ID NO: 3979903 - DNA, 25 bp, Homo sapien
atccaaactgcaatacagaaagaaa

SEQ ID NO: 3979904 - DNA, 25 bp, Homo sapien
tcatagcagattgggattgacagaa

SEQ ID NO: 3979905 - DNA, 25 bp, Homo sapien
tatgtcattggaaactacaataact

SEQ ID NO: 3979906 - DNA, 25 bp, Homo sapien
caaatcaacctctcatttcttggga

SEQ ID NO: 3979907 - DNA, 25 bp, Homo sapien
tatcagtgcctgtctaggtgatcca

SEQ ID NO: 3979908 - DNA, 25 bp, Homo sapien
tgggatttgccctctaactcacagg

SEQ ID NO: 3979909 - DNA, 25 bp, Homo sapien
tgaggaagatcacaatctgccacgc

SEQ ID NO: 3979910 - DNA, 25 bp, Homo sapien
gctccaatcatgtgtcagacatccc

SEQ ID NO: 3979911 - DNA, 25 bp, Homo sapien
aagagctccaatcatgtgtcagaca

SEQ ID NO: 3979912 - DNA, 25 bp, Homo sapien
aaaaagagctccaatcatgtgtcag

SEQ ID NO: 3979913 - DNA, 25 bp, Homo sapien
aatcatgtgtcagacatccccttgt

SEQ ID NO: 3979914 - DNA, 25 bp, Homo sapien
atccgcccagcaaccgtggtccatg

SEQ ID NO: 3979915 - DNA, 25 bp, Homo sapien
gtggtgcccgcgcacagtgcaccgc

SEQ ID NO: 3979916 - DNA, 25 bp, Homo sapien
cagcgtcgaaaaaccgccgtggtgc

SEQ ID NO: 3979917 - DNA, 25 bp, Homo sapien
cgcctgcgcatggtctccaaaggct

SEQ ID NO: 3979918 - DNA, 25 bp, Homo sapien
agtgcgcatgctccgctctttagcg

SEQ ID NO: 3979919 - DNA, 25 bp, Homo sapien
gccagtgcgcatgctccgctcttta

SEQ ID NO: 3979920 - DNA, 25 bp, Homo sapien
tgccagtgcgcatgctccgctcttt

SEQ ID NO: 3979921 - DNA, 25 bp, Homo sapien
cgcatgctccgctctttagcgcttc

SEQ ID NO: 3979922 - DNA, 25 bp, Homo sapien
tgaaatgatgtaagccgggagtcgc

SEQ ID NO: 3979923 - DNA, 25 bp, Homo sapien
ccaaatccagaagcggcgggcattt

SEQ ID NO: 3979924 - DNA, 25 bp, Homo sapien
tgcgctgcactggccgacacttaag

SEQ ID NO: 3979925 - DNA, 25 bp, Homo sapien
tatgcgcatgcgtttctctggtgca

SEQ ID NO: 3979926 - DNA, 25 bp, Homo sapien
gtctgcgcccgcgacttcgactggg

SEQ ID NO: 3979927 - DNA, 25 bp, Homo sapien
gggtcgctgcgctcggcgactgccg

SEQ ID NO: 3979928 - DNA, 25 bp, Homo sapien
ggtctgagtccgggatccaggagag

SEQ ID NO: 3979929 - DNA, 25 bp, Homo sapien
ccaggagagcagttggtgtcgggtc

SEQ ID NO: 3979930 - DNA, 25 bp, Homo sapien
ccccgaggcatgagcgggggaaggt

SEQ ID NO: 3979931 - DNA, 25 bp, Homo sapien
ggccccgaggcatgagcgggggaag

SEQ ID NO: 3979932 - DNA, 25 bp, Homo sapien
gaaggtgaccaggacttggaatttc

SEQ ID NO: 3979933 - DNA, 25 bp, Homo sapien
ccgaggcatgagcgggggaaggtga

SEQ ID NO: 3979934 - DNA, 25 bp, Homo sapien
tgatggaggtgaagaaatcgcttct

SEQ ID NO: 3979935 - DNA, 25 bp, Homo sapien
gtgaagaaatcgcttctattggcat

SEQ ID NO: 3979936 - DNA, 25 bp, Homo sapien
aggtgaagaaatcgcttctattggc

SEQ ID NO: 3979937 - DNA, 25 bp, Homo sapien
tggaggtgaagaaatcgcttctatt

SEQ ID NO: 3979938 - DNA, 25 bp, Homo sapien
aaagaaagaagccacgtctgattca

SEQ ID NO: 3979939 - DNA, 25 bp, Homo sapien
aacagacagaccgaaaatgagaaga

SEQ ID NO: 3979940 - DNA, 25 bp, Homo sapien
cagaccgaaaatgagaagagtccag

SEQ ID NO: 3979941 - DNA, 25 bp, Homo sapien
gaaaacagacagaccgaaaatgaga

SEQ ID NO: 3979942 - DNA, 25 bp, Homo sapien
tcagtctacttgatacagggcagag

SEQ ID NO: 3979943 - DNA, 25 bp, Homo sapien
ggaagttaggactgacaaatgcacc

SEQ ID NO: 3979944 - DNA, 25 bp, Homo sapien
ggtaaccactgcagtttgaaatggc

SEQ ID NO: 3979945 - DNA, 25 bp, Homo sapien
gtcatactgaggctttcaccactgg

SEQ ID NO: 3979946 - DNA, 25 bp, Homo sapien
caactttcatgaggtaaccgttggt

SEQ ID NO: 3979947 - DNA, 25 bp, Homo sapien
cagatgcaactttcatgaggtaacc

SEQ ID NO: 3979948 - DNA, 25 bp, Homo sapien
ttcatgaggtaaccgttggtccctc

SEQ ID NO: 3979949 - DNA, 25 bp, Homo sapien
ctcagctcagatgcaactttcatga

SEQ ID NO: 3979950 - DNA, 25 bp, Homo sapien
tagcaggagcgttatttagcacaga

SEQ ID NO: 3979951 - DNA, 25 bp, Homo sapien
tgaacttcctaaaaccagagtgctg

SEQ ID NO: 3979952 - DNA, 25 bp, Homo sapien
caactgtcatggagctagcaggagc

SEQ ID NO: 3979953 - DNA, 25 bp, Homo sapien
tggtcactgtcatggcgattgtcaa

SEQ ID NO: 3979954 - DNA, 25 bp, Homo sapien
cacgcaggaattacatcaggtaaca

SEQ ID NO: 3979955 - DNA, 25 bp, Homo sapien
tatgtcacgcaggaattacatcagg

SEQ ID NO: 3979956 - DNA, 25 bp, Homo sapien
aattcagctatgtcacgcaggaatt

SEQ ID NO: 3979957 - DNA, 25 bp, Homo sapien
atgagtatgagataccctttttcta

SEQ ID NO: 3979958 - DNA, 25 bp, Homo sapien
taatcgtaacaaggactaggctagt

SEQ ID NO: 3979959 - DNA, 25 bp, Homo sapien
taaaggctccaagtcttaagtatcc

SEQ ID NO: 3979960 - DNA, 25 bp, Homo sapien
taatattaacaaccccagagtgaac

SEQ ID NO: 3979961 - DNA, 25 bp, Homo sapien
cagagagaattgcaatcccttgact

SEQ ID NO: 3979962 - DNA, 25 bp, Homo sapien
tggagttcatgtattcgctgatcaa

SEQ ID NO: 3979963 - DNA, 25 bp, Homo sapien
ccaagtaggagcaaatagattgctc

SEQ ID NO: 3979964 - DNA, 25 bp, Homo sapien
tatcatcaatgtgctcctggagttc

SEQ ID NO: 3979965 - DNA, 25 bp, Homo sapien
tgtcttagaggtatcccagtgggcg

SEQ ID NO: 3979966 - DNA, 25 bp, Homo sapien
agcagccaacatatattgctgagat

SEQ ID NO: 3979967 - DNA, 25 bp, Homo sapien
aaaacaagcagccaacatatattgc

SEQ ID NO: 3979968 - DNA, 25 bp, Homo sapien
acaagcagccaacatatattgctga

SEQ ID NO: 3979969 - DNA, 25 bp, Homo sapien
ttataaaacaagcagccaacatata

SEQ ID NO: 3979970 - DNA, 25 bp, Homo sapien
cagaatttaactagaatgggcaaac

SEQ ID NO: 3979971 - DNA, 25 bp, Homo sapien
ggaaccctcaaagagcaagtcttta

SEQ ID NO: 3979972 - DNA, 25 bp, Homo sapien
acattagaacagtaagtctcagggc

SEQ ID NO: 3979973 - DNA, 25 bp, Homo sapien
tcaaaactgatctggcccaattttc

SEQ ID NO: 3979974 - DNA, 25 bp, Homo sapien
tactaagatgttattcgactttctc

SEQ ID NO: 3979975 - DNA, 25 bp, Homo sapien
actgaggtcagaagtatgtttatac

SEQ ID NO: 3979976 - DNA, 25 bp, Homo sapien
aaccttggggtctccatgattcttt

SEQ ID NO: 3979977 - DNA, 25 bp, Homo sapien
aatgtggtccacagaaccttggggt

SEQ ID NO: 3979978 - DNA, 25 bp, Homo sapien
tcagcactgcgtgatatggaggtac

SEQ ID NO: 3979979 - DNA, 25 bp, Homo sapien
agttgggacttctgggatattacaa

SEQ ID NO: 3979980 - DNA, 25 bp, Homo sapien
caatcctcccaatggtcacatctta

SEQ ID NO: 3979981 - DNA, 25 bp, Homo sapien
tacctggtaaccatcaatatgttgt

SEQ ID NO: 3979982 - DNA, 25 bp, Homo sapien
taatccatttctcctaagttgtcaa

SEQ ID NO: 3979983 - DNA, 25 bp, Homo sapien
aacggccttaggatcagtagtgaca

SEQ ID NO: 3979984 - DNA, 25 bp, Homo sapien
tcaatcctcttgaatttggtcagat

SEQ ID NO: 3979985 - DNA, 25 bp, Homo sapien
gtagtgacatctcattacattccgg

SEQ ID NO: 3979986 - DNA, 25 bp, Homo sapien
tgtgacccttccacaaaatgcctgg

SEQ ID NO: 3979987 - DNA, 25 bp, Homo sapien
aactgtgaactaatacttgtgaccc

SEQ ID NO: 3979988 - DNA, 25 bp, Homo sapien
taaagattataattcccacagctcc

SEQ ID NO: 3979989 - DNA, 25 bp, Homo sapien
tgcctgggaagtgtgcaaaacctcc

SEQ ID NO: 3979990 - DNA, 25 bp, Homo sapien
gcgttcaccatgcttggtgatgttt

SEQ ID NO: 3979991 - DNA, 25 bp, Homo sapien
gatgttttcctgacactcggtctta

SEQ ID NO: 3979992 - DNA, 25 bp, Homo sapien
caagaatgcgttcaccatgcttggt

SEQ ID NO: 3979993 - DNA, 25 bp, Homo sapien
tcctgacactcggtcttatttccca

SEQ ID NO: 3979994 - DNA, 25 bp, Homo sapien
ggcagcaactcggagttgggtatat

SEQ ID NO: 3979995 - DNA, 25 bp, Homo sapien
tgggtatatttgagttgtcacttac

SEQ ID NO: 3979996 - DNA, 25 bp, Homo sapien
gagaaaaggcagcaactcggagttg

SEQ ID NO: 3979997 - DNA, 25 bp, Homo sapien
cggagttgggtatatttgagttgtc

SEQ ID NO: 3979998 - DNA, 25 bp, Homo sapien
tttggtaagaaagaggccattgcat

SEQ ID NO: 3979999 - DNA, 25 bp, Homo sapien
gaggcataactttacactcatcaag

SEQ ID NO: 3980000 - DNA, 25 bp, Homo sapien
tggtaagaaagaggccattgcattt

SEQ ID NO: 3980001 - DNA, 25 bp, Homo sapien
gttttgaggcataactttacactca

SEQ ID NO: 3980002 - DNA, 25 bp, Homo sapien
tgaggattgtagtccaatcatatgc

SEQ ID NO: 3980003 - DNA, 25 bp, Homo sapien
gatgaggattgtagtccaatcatat

SEQ ID NO: 3980004 - DNA, 25 bp, Homo sapien
aaggtagatgaggattgtagtccaa

SEQ ID NO: 3980005 - DNA, 25 bp, Homo sapien
tagatgaggattgtagtccaatcat

SEQ ID NO: 3980006 - DNA, 25 bp, Homo sapien
aaaggtctggaggtgggaacatatc

SEQ ID NO: 3980007 - DNA, 25 bp, Homo sapien
tacatgctactttacactggttggc

SEQ ID NO: 3980008 - DNA, 25 bp, Homo sapien
taagtacaaagggaggcaagcagtc

SEQ ID NO: 3980009 - DNA, 25 bp, Homo sapien
gatgagatccaattatcctttgagg

SEQ ID NO: 3980010 - DNA, 25 bp, Homo sapien
ggaccttgtcaaggtctatccttga

SEQ ID NO: 3980011 - DNA, 25 bp, Homo sapien
gctgctgacacctaaccatatccat

SEQ ID NO: 3980012 - DNA, 25 bp, Homo sapien
ccattatggtttggaccttgtcaag

SEQ ID NO: 3980013 - DNA, 25 bp, Homo sapien
acctaaccatatccatcaactgctg

SEQ ID NO: 3980014 - DNA, 25 bp, Homo sapien
tttgcaaaaactgatctcatgtgta

SEQ ID NO: 3980015 - DNA, 25 bp, Homo sapien
tgcaaaaactgatctcatgtgtacc

SEQ ID NO: 3980016 - DNA, 25 bp, Homo sapien
gcaaaaactgatctcatgtgtacca

SEQ ID NO: 3980017 - DNA, 25 bp, Homo sapien
ttgcaaaaactgatctcatgtgtac

SEQ ID NO: 3980018 - DNA, 25 bp, Homo sapien
tgtacatgtttactaagtatttctg

SEQ ID NO: 3980019 - DNA, 25 bp, Homo sapien
taaacatgtaccactgcacgtggct

SEQ ID NO: 3980020 - DNA, 25 bp, Homo sapien
cgtggctcatggttaaattttaaga

SEQ ID NO: 3980021 - DNA, 25 bp, Homo sapien
ggactaattgtattactaatccaaa

SEQ ID NO: 3980022 - DNA, 25 bp, Homo sapien
ttttacaagcatgtgtggaggactc

SEQ ID NO: 3980023 - DNA, 25 bp, Homo sapien
catgtgtggaggactccaattttag

SEQ ID NO: 3980024 - DNA, 25 bp, Homo sapien
tgtggaggactccaattttagattt

SEQ ID NO: 3980025 - DNA, 25 bp, Homo sapien
tacaagcatgtgtggaggactccaa

SEQ ID NO: 3980026 - DNA, 25 bp, Homo sapien
agagttgggctccataactgaagca

SEQ ID NO: 3980027 - DNA, 25 bp, Homo sapien
gaagcacactgcctatgattacatc

SEQ ID NO: 3980028 - DNA, 25 bp, Homo sapien
tgaggcatgaagagttgggctccat

SEQ ID NO: 3980029 - DNA, 25 bp, Homo sapien
tcagttttcctggtgaggcatgaag

SEQ ID NO: 3980030 - DNA, 25 bp, Homo sapien
gggccacacctcaggtaaaggaagc

SEQ ID NO: 3980031 - DNA, 25 bp, Homo sapien
tctcctaagtacacttccatatttc

SEQ ID NO: 3980032 - DNA, 25 bp, Homo sapien
cagggccacacctcaggtaaaggaa

SEQ ID NO: 3980033 - DNA, 25 bp, Homo sapien
atcagggccacacctcaggtaaagg

SEQ ID NO: 3980034 - DNA, 25 bp, Homo sapien
cctactgggtgcagggcacaatgaa

SEQ ID NO: 3980035 - DNA, 25 bp, Homo sapien
taagtcgacagcgatcatctatagc

SEQ ID NO: 3980036 - DNA, 25 bp, Homo sapien
ttcccaagcatccaagaagcgctca

SEQ ID NO: 3980037 - DNA, 25 bp, Homo sapien
cgttatatgaaattccgagtccggg

SEQ ID NO: 3980038 - DNA, 25 bp, Homo sapien
tcccagtcgaagtcaccggggccga

SEQ ID NO: 3980039 - DNA, 25 bp, Homo sapien
cagtcgaagtcaccggggccgagac

SEQ ID NO: 3980040 - DNA, 25 bp, Homo sapien
ccccgtcctcggtccgcgtctccat

SEQ ID NO: 3980041 - DNA, 25 bp, Homo sapien
cgagaccggcccgggtgaggaggag

SEQ ID NO: 3980042 - DNA, 25 bp, Homo sapien
gaatttccgccggtacagcgtggaa

SEQ ID NO: 3980043 - DNA, 25 bp, Homo sapien
tacagcgtggaaatgggcaggcaaa

SEQ ID NO: 3980044 - DNA, 25 bp, Homo sapien
aggcaaagcgacttccggctcactc

SEQ ID NO: 3980045 - DNA, 25 bp, Homo sapien
ggctcactccgcttcaagtacccgc

SEQ ID NO: 3980046 - DNA, 25 bp, Homo sapien
aggcaccagagacacgcatgcgcat

SEQ ID NO: 3980047 - DNA, 25 bp, Homo sapien
gacacgcatgcgcatgtgccagctg

SEQ ID NO: 3980048 - DNA, 25 bp, Homo sapien
cagagacacgcatgcgcatgtgcca

SEQ ID NO: 3980049 - DNA, 25 bp, Homo sapien
gcatgcgcatgtgccagctggcctc

SEQ ID NO: 3980050 - DNA, 25 bp, Homo sapien
cctctccatagcttagtattacttt

SEQ ID NO: 3980051 - DNA, 25 bp, Homo sapien
caatttttctacaacacacccccag

SEQ ID NO: 3980052 - DNA, 25 bp, Homo sapien
tttctacaacacacccccagacaaa

SEQ ID NO: 3980053 - DNA, 25 bp, Homo sapien
tacctctccatagcttagtattact

SEQ ID NO: 3980054 - DNA, 25 bp, Homo sapien
caaatacatctctttaagccctcct

SEQ ID NO: 3980055 - DNA, 25 bp, Homo sapien
tgggctctccagcaaggtgtatcta

SEQ ID NO: 3980056 - DNA, 25 bp, Homo sapien
catgctcactcttgagtaaatactc

SEQ ID NO: 3980057 - DNA, 25 bp, Homo sapien
tacattcgtgtttctcatgctcact

SEQ ID NO: 3980058 - DNA, 25 bp, Homo sapien
tatttgccttagagctcaccatagt

SEQ ID NO: 3980059 - DNA, 25 bp, Homo sapien
tctagcagaaacttcgctggcgatg

SEQ ID NO: 3980060 - DNA, 25 bp, Homo sapien
gactattgagcccttaaaagtagct

SEQ ID NO: 3980061 - DNA, 25 bp, Homo sapien
aaagagtgcaacaggtactgggtcc

SEQ ID NO: 3980062 - DNA, 25 bp, Homo sapien
catccatggtcagttgttagaaaaa

SEQ ID NO: 3980063 - DNA, 25 bp, Homo sapien
gcttagactggatgctaaactgcaa

SEQ ID NO: 3980064 - DNA, 25 bp, Homo sapien
caagttctagaaagcatataccctc

SEQ ID NO: 3980065 - DNA, 25 bp, Homo sapien
taaaatgaaatagccctggaaacac

SEQ ID NO: 3980066 - DNA, 25 bp, Homo sapien
tcttgtaagattatgactgcactcc

SEQ ID NO: 3980067 - DNA, 25 bp, Homo sapien
tacatgaagactggtaaaactgcaa

SEQ ID NO: 3980068 - DNA, 25 bp, Homo sapien
gaaaaaggcatctagcactctagtg

SEQ ID NO: 3980069 - DNA, 25 bp, Homo sapien
aaatggctaattctgaagaggagac

SEQ ID NO: 3980070 - DNA, 25 bp, Homo sapien
ccactgacaaatttatattctataa

SEQ ID NO: 3980071 - DNA, 25 bp, Homo sapien
ttattccactgacaaatttatattc

SEQ ID NO: 3980072 - DNA, 25 bp, Homo sapien
tattccactgacaaatttatattct

SEQ ID NO: 3980073 - DNA, 25 bp, Homo sapien
attttattccactgacaaatttata

SEQ ID NO: 3980074 - DNA, 25 bp, Homo sapien
cactttattagggatgaccaaaaca

SEQ ID NO: 3980075 - DNA, 25 bp, Homo sapien
tgaattagcagacactttattaggg

SEQ ID NO: 3980076 - DNA, 25 bp, Homo sapien
gcagacactttattagggatgacca

SEQ ID NO: 3980077 - DNA, 25 bp, Homo sapien
tagcagacactttattagggatgac

SEQ ID NO: 3980078 - DNA, 25 bp, Homo sapien
tctgaggaatacttgctgatacggc

SEQ ID NO: 3980079 - DNA, 25 bp, Homo sapien
tatgcttgcgccttcgatgatggga

SEQ ID NO: 3980080 - DNA, 25 bp, Homo sapien
atcagggcagggaactacatcaggg

SEQ ID NO: 3980081 - DNA, 25 bp, Homo sapien
catatgggcttccagatgacgctca

SEQ ID NO: 3980082 - DNA, 25 bp, Homo sapien
gagatctgggattagcagtaccatc

SEQ ID NO: 3980083 - DNA, 25 bp, Homo sapien
gagaggatctacaaagggcatcact

SEQ ID NO: 3980084 - DNA, 25 bp, Homo sapien
atttggatcaagagggaaacacggc

SEQ ID NO: 3980085 - DNA, 25 bp, Homo sapien
gacgtctgacctggtcttgggcaga

SEQ ID NO: 3980086 - DNA, 25 bp, Homo sapien
gctggcatagttgcagtaccgacac

SEQ ID NO: 3980087 - DNA, 25 bp, Homo sapien
aaacccgtctactaacattcctgag

SEQ ID NO: 3980088 - DNA, 25 bp, Homo sapien
ccgggctgttcctttgctggcatag

SEQ ID NO: 3980089 - DNA, 25 bp, Homo sapien
ttcaacagatgggtgatcaagtcca

SEQ ID NO: 3980090 - DNA, 25 bp, Homo sapien
tactctccagcagaagtctgatatg

SEQ ID NO: 3980091 - DNA, 25 bp, Homo sapien
tgcgcagtggtcttcacagtaacag

SEQ ID NO: 3980092 - DNA, 25 bp, Homo sapien
cagtaacagctacacgcaatcatag

SEQ ID NO: 3980093 - DNA, 25 bp, Homo sapien
taatgcatctccagaccatgttaag

SEQ ID NO: 3980094 - DNA, 25 bp, Homo sapien
tctttgtccccactaactgatccag

SEQ ID NO: 3980095 - DNA, 25 bp, Homo sapien
tcatgttcacgtgatgggtctgctg

SEQ ID NO: 3980096 - DNA, 25 bp, Homo sapien
tctttcacgaagtccaaaggctctg

SEQ ID NO: 3980097 - DNA, 25 bp, Homo sapien
tgggtctgctgagtcaggtattcct

SEQ ID NO: 3980098 - DNA, 25 bp, Homo sapien
tacagtttgttagacctagaaaaca

SEQ ID NO: 3980099 - DNA, 25 bp, Homo sapien
tcgtgtacccttccaatgctaggac

SEQ ID NO: 3980100 - DNA, 25 bp, Homo sapien
gaaaatccctgaccgtagtgtagaa

SEQ ID NO: 3980101 - DNA, 25 bp, Homo sapien
aataagatgaagtctagcacctggg

SEQ ID NO: 3980102 - DNA, 25 bp, Homo sapien
ccatctttagtagccagtggtagac

SEQ ID NO: 3980103 - DNA, 25 bp, Homo sapien
tggtggcagaagaattgattgaacc

SEQ ID NO: 3980104 - DNA, 25 bp, Homo sapien
cccgcaaattttgctatctacaggg

SEQ ID NO: 3980105 - DNA, 25 bp, Homo sapien
tttatataaaggactggagcacccg

SEQ ID NO: 3980106 - DNA, 25 bp, Homo sapien
gcttaaagtatgcaagaggatgaga

SEQ ID NO: 3980107 - DNA, 25 bp, Homo sapien
aggatgagattgtgagttatatgca

SEQ ID NO: 3980108 - DNA, 25 bp, Homo sapien
gctacagtacaacgtgacagtgcag

SEQ ID NO: 3980109 - DNA, 25 bp, Homo sapien
tccttgccataaattgtgtgctgct

SEQ ID NO: 3980110 - DNA, 25 bp, Homo sapien
gacagtcttggctattatcacattg

SEQ ID NO: 3980111 - DNA, 25 bp, Homo sapien
ttttgtgcccacttgacctgtatgg

SEQ ID NO: 3980112 - DNA, 25 bp, Homo sapien
attgaaatttacttcggagatacag

SEQ ID NO: 3980113 - DNA, 25 bp, Homo sapien
tgtagagtaattgaaatttacttcg

SEQ ID NO: 3980114 - DNA, 25 bp, Homo sapien
ttgccactccaacattgatgaaatg

SEQ ID NO: 3980115 - DNA, 25 bp, Homo sapien
tgatgaaatgtagagtaattgaaat

SEQ ID NO: 3980116 - DNA, 25 bp, Homo sapien
taagggtgcccatgcagtagagacg

SEQ ID NO: 3980117 - DNA, 25 bp, Homo sapien
gatctaaaccccgaatgaacctgaa

SEQ ID NO: 3980118 - DNA, 25 bp, Homo sapien
gagctcctgctcgaaggcaatgaca

SEQ ID NO: 3980119 - DNA, 25 bp, Homo sapien
gattcgaaacacctaggagacccgc

SEQ ID NO: 3980120 - DNA, 25 bp, Homo sapien
gcatggagtaaaccacaccgccttg

SEQ ID NO: 3980121 - DNA, 25 bp, Homo sapien
tttacccgcgggcagtctatgaccc

SEQ ID NO: 3980122 - DNA, 25 bp, Homo sapien
gctggcagagccttctaacgggcct

SEQ ID NO: 3980123 - DNA, 25 bp, Homo sapien
ggtcgcgtccgcaagatgtcctttg

SEQ ID NO: 3980124 - DNA, 25 bp, Homo sapien
gggagggcagctatcctcagtcact

SEQ ID NO: 3980125 - DNA, 25 bp, Homo sapien
ccacctggctggctaaccaaactat

SEQ ID NO: 3980126 - DNA, 25 bp, Homo sapien
ggcagctatcctcagtcactccttg

SEQ ID NO: 3980127 - DNA, 25 bp, Homo sapien
tatgctaccagtgtagggtgtccag

SEQ ID NO: 3980128 - DNA, 25 bp, Homo sapien
tagattcaactctaagttgcaagcg

SEQ ID NO: 3980129 - DNA, 25 bp, Homo sapien
acagaagtttcatcccatcatttgg

SEQ ID NO: 3980130 - DNA, 25 bp, Homo sapien
gttgcaagcgaagtcaaaactgatg

SEQ ID NO: 3980131 - DNA, 25 bp, Homo sapien
ggcttctggatatcgcccaccttgg

SEQ ID NO: 3980132 - DNA, 25 bp, Homo sapien
cagtgattctcaagaaaaagatctc

SEQ ID NO: 3980133 - DNA, 25 bp, Homo sapien
catggttattgcactttatcctgaa

SEQ ID NO: 3980134 - DNA, 25 bp, Homo sapien
gatctcttgcccattaagaagtgta

SEQ ID NO: 3980135 - DNA, 25 bp, Homo sapien
ggctgtagagtttgaaaaagcatat

SEQ ID NO: 3980136 - DNA, 25 bp, Homo sapien
aatctctaaggcaagggaaagatgc

SEQ ID NO: 3980137 - DNA, 25 bp, Homo sapien
ccacgtctcacaatcatctctctca

SEQ ID NO: 3980138 - DNA, 25 bp, Homo sapien
actccacgtctcacaatcatctctc

SEQ ID NO: 3980139 - DNA, 25 bp, Homo sapien
caaatctctaaggcaagggaaagat

SEQ ID NO: 3980140 - DNA, 25 bp, Homo sapien
ttgctatcagcattttgggcaaagc

SEQ ID NO: 3980141 - DNA, 25 bp, Homo sapien
attgctatcagcattttgggcaaag

SEQ ID NO: 3980142 - DNA, 25 bp, Homo sapien
tttgggcaaagccattcagcaagta

SEQ ID NO: 3980143 - DNA, 25 bp, Homo sapien
gggcaaagccattcagcaagtatct

SEQ ID NO: 3980144 - DNA, 25 bp, Homo sapien
gaagtggactaatttctataatgca

SEQ ID NO: 3980145 - DNA, 25 bp, Homo sapien
tggacaacagagaaatgagagtttt

SEQ ID NO: 3980146 - DNA, 25 bp, Homo sapien
catgtgttagagatgaagaatcttc

SEQ ID NO: 3980147 - DNA, 25 bp, Homo sapien
taatcattactgttatatgagaaac

SEQ ID NO: 3980148 - DNA, 25 bp, Homo sapien
gatcatccaggaacgaagacaagaa

SEQ ID NO: 3980149 - DNA, 25 bp, Homo sapien
aagagagtgttgtaggttttccctg

SEQ ID NO: 3980150 - DNA, 25 bp, Homo sapien
gagagcttcccatttgcatctagac

SEQ ID NO: 3980151 - DNA, 25 bp, Homo sapien
tctggcggagaactagccatcagcc

SEQ ID NO: 3980152 - DNA, 25 bp, Homo sapien
tgttaggattagtcagtgtcatcgc

SEQ ID NO: 3980153 - DNA, 25 bp, Homo sapien
cattgcccctttcgacaaattttgg

SEQ ID NO: 3980154 - DNA, 25 bp, Homo sapien
tagtattaaacattgcccctttcga

SEQ ID NO: 3980155 - DNA, 25 bp, Homo sapien
tcgcttatgtatatgaatcacttgc

SEQ ID NO: 3980156 - DNA, 25 bp, Homo sapien
catgtagtgagtggtcgctatgtcc

SEQ ID NO: 3980157 - DNA, 25 bp, Homo sapien
taacagtaagcgctgacatctcttg

SEQ ID NO: 3980158 - DNA, 25 bp, Homo sapien
tcagatactttgaggcagagaaact

SEQ ID NO: 3980159 - DNA, 25 bp, Homo sapien
gagaatgggaccttcgagacgaacg

SEQ ID NO: 3980160 - DNA, 25 bp, Homo sapien
tcccaaagtactgcccgctgtctcc

SEQ ID NO: 3980161 - DNA, 25 bp, Homo sapien
caaagtactgcccgctgtctccttg

SEQ ID NO: 3980162 - DNA, 25 bp, Homo sapien
gtactgcccgctgtctccttgaggc

SEQ ID NO: 3980163 - DNA, 25 bp, Homo sapien
ctggaagaccactggtgcttgatga

SEQ ID NO: 3980164 - DNA, 25 bp, Homo sapien
agtcttctggccctcgaagctgtgt

SEQ ID NO: 3980165 - DNA, 25 bp, Homo sapien
tcttctggccctcgaagctgtgtac

SEQ ID NO: 3980166 - DNA, 25 bp, Homo sapien
gtcttctggccctcgaagctgtgta

SEQ ID NO: 3980167 - DNA, 25 bp, Homo sapien
ctgccacctggtcccggccacagcc

SEQ ID NO: 3980168 - DNA, 25 bp, Homo sapien
gagtagatgcactcccctgtgacgg

SEQ ID NO: 3980169 - DNA, 25 bp, Homo sapien
tgaatccatgaagggtaatgcccca

SEQ ID NO: 3980170 - DNA, 25 bp, Homo sapien
cctgtgacggccacatcgagggact

SEQ ID NO: 3980171 - DNA, 25 bp, Homo sapien
taatgccccaaacactcctgagtag

SEQ ID NO: 3980172 - DNA, 25 bp, Homo sapien
ccagccaggttctgctgtccaggca

SEQ ID NO: 3980173 - DNA, 25 bp, Homo sapien
catcgaccgccgcccctctccccag

SEQ ID NO: 3980174 - DNA, 25 bp, Homo sapien
tcatcgaccgccgcccctctcccca

SEQ ID NO: 3980175 - DNA, 25 bp, Homo sapien
tccccagccaggttctgctgtccag

SEQ ID NO: 3980176 - DNA, 25 bp, Homo sapien
ctccttgatctcactaactgccaag

SEQ ID NO: 3980177 - DNA, 25 bp, Homo sapien
tcctcatctggctcgcagccaccct

SEQ ID NO: 3980178 - DNA, 25 bp, Homo sapien
caagtcaccctctatgatatcatcc

SEQ ID NO: 3980179 - DNA, 25 bp, Homo sapien
actaactgccaagtcaccctctatg

SEQ ID NO: 3980180 - DNA, 25 bp, Homo sapien
ttcagatgccatgagacgggcctgg

SEQ ID NO: 3980181 - DNA, 25 bp, Homo sapien
gggcccaccgagagaagccttgatg

SEQ ID NO: 3980182 - DNA, 25 bp, Homo sapien
ccatcgtcctgttgaacactctggg

SEQ ID NO: 3980183 - DNA, 25 bp, Homo sapien
gttggaatatgaccagggcccaccg

SEQ ID NO: 3980184 - DNA, 25 bp, Homo sapien
gagtggaaagaattgagctagagat

SEQ ID NO: 3980185 - DNA, 25 bp, Homo sapien
agaattgagctagagatgtccagta

SEQ ID NO: 3980186 - DNA, 25 bp, Homo sapien
cgaccctgtccagcaccatggtcct

SEQ ID NO: 3980187 - DNA, 25 bp, Homo sapien
catggtcctgaacctctgacacggg

SEQ ID NO: 3980188 - DNA, 25 bp, Homo sapien
actgctgtggcattgccattggctc

SEQ ID NO: 3980189 - DNA, 25 bp, Homo sapien
tgatgctattaggtggactgctgtg

SEQ ID NO: 3980190 - DNA, 25 bp, Homo sapien
ttgatgctattaggtggactgctgt

SEQ ID NO: 3980191 - DNA, 25 bp, Homo sapien
attgccattggctctgtgtttcaga

SEQ ID NO: 3980192 - DNA, 25 bp, Homo sapien
gaaggatgctaagatcattgccact

SEQ ID NO: 3980193 - DNA, 25 bp, Homo sapien
tcggcaaggctgtgccggtgaagga

SEQ ID NO: 3980194 - DNA, 25 bp, Homo sapien
tcatgcgtctccctgggctcggcaa

SEQ ID NO: 3980195 - DNA, 25 bp, Homo sapien
ggagtccttcacgtcttcatgcgtc

SEQ ID NO: 3980196 - DNA, 25 bp, Homo sapien
ggaaagacttgaccgctgaggcatg

SEQ ID NO: 3980197 - DNA, 25 bp, Homo sapien
tgaccgctgaggcatgtcctgagag

SEQ ID NO: 3980198 - DNA, 25 bp, Homo sapien
ctgtctggaaagacttgaccgctga

SEQ ID NO: 3980199 - DNA, 25 bp, Homo sapien
tgtgaaagcccctcgagagagaaag

SEQ ID NO: 3980200 - DNA, 25 bp, Homo sapien
cacaaggccttggagacgcaggctg

SEQ ID NO: 3980201 - DNA, 25 bp, Homo sapien
agggcacaaggccttggagacgcag

SEQ ID NO: 3980202 - DNA, 25 bp, Homo sapien
tgggcagcgtcgtgaaagccagtgc

SEQ ID NO: 3980203 - DNA, 25 bp, Homo sapien
tttcctggtaggaccggagggcaca

SEQ ID NO: 3980204 - DNA, 25 bp, Homo sapien
aggttctagatgaagcaggaacaga

SEQ ID NO: 3980205 - DNA, 25 bp, Homo sapien
tgaggttctagatgaagcaggaaca

SEQ ID NO: 3980206 - DNA, 25 bp, Homo sapien
gaggttctagatgaagcaggaacag

SEQ ID NO: 3980207 - DNA, 25 bp, Homo sapien
tttgttacaaacttcacccacagcc

SEQ ID NO: 3980208 - DNA, 25 bp, Homo sapien
catgggttgtggttctgtgtatctg

SEQ ID NO: 3980209 - DNA, 25 bp, Homo sapien
ggtctgtttcatgggttgtggttct

SEQ ID NO: 3980210 - DNA, 25 bp, Homo sapien
tatctgtttgtgaagacgagtctca

SEQ ID NO: 3980211 - DNA, 25 bp, Homo sapien
cccaaacggagtgttggatggatcg

SEQ ID NO: 3980212 - DNA, 25 bp, Homo sapien
gaagcacgccccaaacggagtgttg

SEQ ID NO: 3980213 - DNA, 25 bp, Homo sapien
agtgactgcttcaccaccagagccg

SEQ ID NO: 3980214 - DNA, 25 bp, Homo sapien
ggatggatcgggacattcgaagtca

SEQ ID NO: 3980215 - DNA, 25 bp, Homo sapien
cgctcttagtgagcagcctgcggag

SEQ ID NO: 3980216 - DNA, 25 bp, Homo sapien
gtctgcacgtacaattcctggcggg

SEQ ID NO: 3980217 - DNA, 25 bp, Homo sapien
aagaccttgtctcttccgtgccagg

SEQ ID NO: 3980218 - DNA, 25 bp, Homo sapien
tgtcctggcagacgccgagaagcgt

SEQ ID NO: 3980219 - DNA, 25 bp, Homo sapien
gccgctgagccctgaagaggttaat

SEQ ID NO: 3980220 - DNA, 25 bp, Homo sapien
tccttccgggttaatgagctgacac

SEQ ID NO: 3980221 - DNA, 25 bp, Homo sapien
ttgtaatgtgtctcgaccctgccgc

SEQ ID NO: 3980222 - DNA, 25 bp, Homo sapien
caaattgtatttcagcgccaggtcc

SEQ ID NO: 3980223 - DNA, 25 bp, Homo sapien
cgcgttcgggtaacctctatgcaaa

SEQ ID NO: 3980224 - DNA, 25 bp, Homo sapien
tgtgcctggccggagcgttttgaaa

SEQ ID NO: 3980225 - DNA, 25 bp, Homo sapien
ctgcgattggccgcgttcgggtaac

SEQ ID NO: 3980226 - DNA, 25 bp, Homo sapien
tatgcaaatgaggccgcgccgcctc

SEQ ID NO: 3980227 - DNA, 25 bp, Homo sapien
aggaacccctgcgcagccatccggt

SEQ ID NO: 3980228 - DNA, 25 bp, Homo sapien
gcaggaacccctgcgcagccatccg

SEQ ID NO: 3980229 - DNA, 25 bp, Homo sapien
gggcaggaacccctgcgcagccatc

SEQ ID NO: 3980230 - DNA, 25 bp, Homo sapien
gaacccctgcgcagccatccggtgc

SEQ ID NO: 3980231 - DNA, 25 bp, Homo sapien
tacaacaagctcgactactgaccgg

SEQ ID NO: 3980232 - DNA, 25 bp, Homo sapien
cagactctggtgagcatgccgctgg

SEQ ID NO: 3980233 - DNA, 25 bp, Homo sapien
tcacggagacccaggtaaagacttg

SEQ ID NO: 3980234 - DNA, 25 bp, Homo sapien
cgtcttttcgcgcagccaggtgtac

SEQ ID NO: 3980235 - DNA, 25 bp, Homo sapien
ttctaacgagttcaagctgaaccag

SEQ ID NO: 3980236 - DNA, 25 bp, Homo sapien
tgtctcctcctgggacacgtccgtg

SEQ ID NO: 3980237 - DNA, 25 bp, Homo sapien
aaccagccacccgaggatggcatct

SEQ ID NO: 3980238 - DNA, 25 bp, Homo sapien
ctcctgggacacgtccgtgcgtctc

SEQ ID NO: 3980239 - DNA, 25 bp, Homo sapien
caagaagtagtatgactgagatgga

SEQ ID NO: 3980240 - DNA, 25 bp, Homo sapien
acagttgttcgcgatgaagaggcac

SEQ ID NO: 3980241 - DNA, 25 bp, Homo sapien
agttgatttggattattgatgcccc

SEQ ID NO: 3980242 - DNA, 25 bp, Homo sapien
cctgaaagtctttgtgcaaacctga

SEQ ID NO: 3980243 - DNA, 25 bp, Homo sapien
aataatattgagcagatttacccag

SEQ ID NO: 3980244 - DNA, 25 bp, Homo sapien
gccttcaaatgtcacagactaaaag

SEQ ID NO: 3980245 - DNA, 25 bp, Homo sapien
aagtatgccttcaaatgtcacagac

SEQ ID NO: 3980246 - DNA, 25 bp, Homo sapien
ccgagtggcagttgagtatttggac

SEQ ID NO: 3980247 - DNA, 25 bp, Homo sapien
gcccttaaaggaagttctcgataca

SEQ ID NO: 3980248 - DNA, 25 bp, Homo sapien
tactccaagtatctgcccagttcct

SEQ ID NO: 3980249 - DNA, 25 bp, Homo sapien
taaaatggatatggtacccttgctg

SEQ ID NO: 3980250 - DNA, 25 bp, Homo sapien
tgctgattggttgagcccctaagag

SEQ ID NO: 3980251 - DNA, 25 bp, Homo sapien
ccagccgctggtgattaaagttaaa

SEQ ID NO: 3980252 - DNA, 25 bp, Homo sapien
tatgtccatttcagttgaccagccg

SEQ ID NO: 3980253 - DNA, 25 bp, Homo sapien
tgtcccctagtaagcccagttgctg

SEQ ID NO: 3980254 - DNA, 25 bp, Homo sapien
aacaattcgtactccccaatggtgg

SEQ ID NO: 3980255 - DNA, 25 bp, Homo sapien
gctttcattttcgaaggatgcccac

SEQ ID NO: 3980256 - DNA, 25 bp, Homo sapien
ccccttgatcagtggtgtgttgtaa

SEQ ID NO: 3980257 - DNA, 25 bp, Homo sapien
taccaattgcgccattgagtacaaa

SEQ ID NO: 3980258 - DNA, 25 bp, Homo sapien
ggatgcccacagaacttgtcctggg

SEQ ID NO: 3980259 - DNA, 25 bp, Homo sapien
tatatgggctttggtaggggaggtg

SEQ ID NO: 3980260 - DNA, 25 bp, Homo sapien
ttgcgggcttcacaagattgattcc

SEQ ID NO: 3980261 - DNA, 25 bp, Homo sapien
tccttgcgggcttcacaagattgat

SEQ ID NO: 3980262 - DNA, 25 bp, Homo sapien
ggtccttgcgggcttcacaagattg

SEQ ID NO: 3980263 - DNA, 25 bp, Homo sapien
cattgggcacagttagtgcagcaaa

SEQ ID NO: 3980264 - DNA, 25 bp, Homo sapien
cgcattgggcacagttagtgcagca

SEQ ID NO: 3980265 - DNA, 25 bp, Homo sapien
ggcatcgaagatgcccgcttcagaa

SEQ ID NO: 3980266 - DNA, 25 bp, Homo sapien
cataggcatcgaagatgcccgcttc

SEQ ID NO: 3980267 - DNA, 25 bp, Homo sapien
ggctggttttagcttcctcattgct

SEQ ID NO: 3980268 - DNA, 25 bp, Homo sapien
cttggctggttttagcttcctcatt

SEQ ID NO: 3980269 - DNA, 25 bp, Homo sapien
gggtgttgctgttgatggtggcttg

SEQ ID NO: 3980270 - DNA, 25 bp, Homo sapien
tgttgctgttgatggtggcttgaag

SEQ ID NO: 3980271 - DNA, 25 bp, Homo sapien
gtgcatgcccaaaatgccttttaca

SEQ ID NO: 3980272 - DNA, 25 bp, Homo sapien
ttttacattctgaagcccggggcca

SEQ ID NO: 3980273 - DNA, 25 bp, Homo sapien
ctagagggcgataaatgagtgcatg

SEQ ID NO: 3980274 - DNA, 25 bp, Homo sapien
gcatgcccaaaatgccttttacatt

SEQ ID NO: 3980275 - DNA, 25 bp, Homo sapien
gccaaaggcgatgcccacgtgccat

SEQ ID NO: 3980276 - DNA, 25 bp, Homo sapien
cacactgttccctttgtgagcgtgg

SEQ ID NO: 3980277 - DNA, 25 bp, Homo sapien
gtgccatccctttgttcttggctct

SEQ ID NO: 3980278 - DNA, 25 bp, Homo sapien
gatgcccacgtgccatccctttgtt

SEQ ID NO: 3980279 - DNA, 25 bp, Homo sapien
cccattacggaaggacagcacaaac

SEQ ID NO: 3980280 - DNA, 25 bp, Homo sapien
aactgcaagcccagtgagtggcaga

SEQ ID NO: 3980281 - DNA, 25 bp, Homo sapien
caaactgcaagcccagtgagtggca

SEQ ID NO: 3980282 - DNA, 25 bp, Homo sapien
cacaaactgcaagcccagtgagtgg

SEQ ID NO: 3980283 - DNA, 25 bp, Homo sapien
tcccaaaggagtgttagcttgacag

SEQ ID NO: 3980284 - DNA, 25 bp, Homo sapien
gggcaaccagctcgaattaaatagt

SEQ ID NO: 3980285 - DNA, 25 bp, Homo sapien
gaatgagcttcaaaaacaggcaact

SEQ ID NO: 3980286 - DNA, 25 bp, Homo sapien
cagggcaaactgcttctaaggaagg

SEQ ID NO: 3980287 - DNA, 25 bp, Homo sapien
agcctctgggctatcgtcctggaca

SEQ ID NO: 3980288 - DNA, 25 bp, Homo sapien
cattggtgagtccagccacagtgtg

SEQ ID NO: 3980289 - DNA, 25 bp, Homo sapien
tgacgaggagcctctgggctatcgt

SEQ ID NO: 3980290 - DNA, 25 bp, Homo sapien
tttctcccctggtgacgaggagcct

SEQ ID NO: 3980291 - DNA, 25 bp, Homo sapien
tctcatgcgttgcagtaaagaggtc

SEQ ID NO: 3980292 - DNA, 25 bp, Homo sapien
caatgtactggttatctgttgctgc

SEQ ID NO: 3980293 - DNA, 25 bp, Homo sapien
aaatggctcacatgaggtgggcaag

SEQ ID NO: 3980294 - DNA, 25 bp, Homo sapien
aatgaacgttctttatgtctcacag

SEQ ID NO: 3980295 - DNA, 25 bp, Homo sapien
aaatagtgcagggtttgcgccatgg

SEQ ID NO: 3980296 - DNA, 25 bp, Homo sapien
ggaaacaatccagtcctctgatagg

SEQ ID NO: 3980297 - DNA, 25 bp, Homo sapien
tatatacggtatggctccatggagc

SEQ ID NO: 3980298 - DNA, 25 bp, Homo sapien
tgcctggtggaatgatctgtgtgcc

SEQ ID NO: 3980299 - DNA, 25 bp, Homo sapien
tgggggcatcacgaggggcttcttg

SEQ ID NO: 3980300 - DNA, 25 bp, Homo sapien
gggcttcttgttacagaagggctgg

SEQ ID NO: 3980301 - DNA, 25 bp, Homo sapien
ttatgtggatctgacgccaggctcg

SEQ ID NO: 3980302 - DNA, 25 bp, Homo sapien
tctgacgccaggctcggagagtggg

SEQ ID NO: 3980303 - DNA, 25 bp, Homo sapien
ctgtttccttgtccgtcccattctt

SEQ ID NO: 3980304 - DNA, 25 bp, Homo sapien
ccgtcccattcttgtcttctgaaaa

SEQ ID NO: 3980305 - DNA, 25 bp, Homo sapien
caaggtgaagttcgggagatgttcc

SEQ ID NO: 3980306 - DNA, 25 bp, Homo sapien
aatatctgtcaaggtgaagttcggg

SEQ ID NO: 3980307 - DNA, 25 bp, Homo sapien
cttagagcactagatggagtatggc

SEQ ID NO: 3980308 - DNA, 25 bp, Homo sapien
tcttgcaagtgtatgtcacagcagc

SEQ ID NO: 3980309 - DNA, 25 bp, Homo sapien
tatgatggaggccatagggccctgt

SEQ ID NO: 3980310 - DNA, 25 bp, Homo sapien
tatgaactgcgaatcctgaccaggt

SEQ ID NO: 3980311 - DNA, 25 bp, Homo sapien
ctagatctttaggtgccactgaagc

SEQ ID NO: 3980312 - DNA, 25 bp, Homo sapien
tccggactgctctgcgtgtcatgtg

SEQ ID NO: 3980313 - DNA, 25 bp, Homo sapien
ctctgcgtgtcatgtggttctggct

SEQ ID NO: 3980314 - DNA, 25 bp, Homo sapien
tagtcgcagactccggactgctctg

SEQ ID NO: 3980315 - DNA, 25 bp, Homo sapien
ctggttagtcgcagactccggactg

SEQ ID NO: 3980316 - DNA, 25 bp, Homo sapien
atagcagcatgctttttggcttgac

SEQ ID NO: 3980317 - DNA, 25 bp, Homo sapien
cattccatgaattctccacgtaatt

SEQ ID NO: 3980318 - DNA, 25 bp, Homo sapien
gaaacattccatgaattctccacgt

SEQ ID NO: 3980319 - DNA, 25 bp, Homo sapien
ttttggcttgacagctgtcaaactg

SEQ ID NO: 3980320 - DNA, 25 bp, Homo sapien
taaattgaagcagccgcaacatctt

SEQ ID NO: 3980321 - DNA, 25 bp, Homo sapien
gcggttaaattgaagcagccgcaac

SEQ ID NO: 3980322 - DNA, 25 bp, Homo sapien
ggttaaattgaagcagccgcaacat

SEQ ID NO: 3980323 - DNA, 25 bp, Homo sapien
ccagcggttaaattgaagcagccgc

SEQ ID NO: 3980324 - DNA, 25 bp, Homo sapien
ccagagttcatgacggcatttgcac

SEQ ID NO: 3980325 - DNA, 25 bp, Homo sapien
gggtgtgagtacatttcctccaaat

SEQ ID NO: 3980326 - DNA, 25 bp, Homo sapien
caagctcccaggttcttccgtgatt

SEQ ID NO: 3980327 - DNA, 25 bp, Homo sapien
caggtgtttgggagactgaaataaa

SEQ ID NO: 3980328 - DNA, 25 bp, Homo sapien
agggttgtaggcattgtcaaccccg

SEQ ID NO: 3980329 - DNA, 25 bp, Homo sapien
gatgagggttgtaggcattgtcaac

SEQ ID NO: 3980330 - DNA, 25 bp, Homo sapien
gggatgagggttgtaggcattgtca

SEQ ID NO: 3980331 - DNA, 25 bp, Homo sapien
ttgtaggcattgtcaaccccgggcc

SEQ ID NO: 3980332 - DNA, 25 bp, Homo sapien
actgttagaatattaaggagccggc

SEQ ID NO: 3980333 - DNA, 25 bp, Homo sapien
ggcctctaggtaagactttgttcca

SEQ ID NO: 3980334 - DNA, 25 bp, Homo sapien
tgactcaaatgaacaatcctcagtg

SEQ ID NO: 3980335 - DNA, 25 bp, Homo sapien
gcaattagtaatgaagaagacgatg

SEQ ID NO: 3980336 - DNA, 25 bp, Homo sapien
gaaatggcctggcattaatctccac

SEQ ID NO: 3980337 - DNA, 25 bp, Homo sapien
tgacaaagagtataacaagcacagg

SEQ ID NO: 3980338 - DNA, 25 bp, Homo sapien
gcatgaagatttggccggtgctctg

SEQ ID NO: 3980339 - DNA, 25 bp, Homo sapien
tctcagtgtacatgagatgctcaaa

SEQ ID NO: 3980340 - DNA, 25 bp, Homo sapien
tcagcagaaagcttgtggaaaaagc

SEQ ID NO: 3980341 - DNA, 25 bp, Homo sapien
aagcaaaagaaaatccaggagcacg

SEQ ID NO: 3980342 - DNA, 25 bp, Homo sapien
gaaagcttgtggaaaaagcaaaaga

SEQ ID NO: 3980343 - DNA, 25 bp, Homo sapien
caaaagaaaatccaggagcacgtac

SEQ ID NO: 3980344 - DNA, 25 bp, Homo sapien
caaactttgcaaagagcgaggttgt

SEQ ID NO: 3980345 - DNA, 25 bp, Homo sapien
ggagatttgtacagtcttctaggca

SEQ ID NO: 3980346 - DNA, 25 bp, Homo sapien
ttcacttttcagcaccgagaagcat

SEQ ID NO: 3980347 - DNA, 25 bp, Homo sapien
gcgaggttgtcggtcagcgtcttca

SEQ ID NO: 3980348 - DNA, 25 bp, Homo sapien
cagtcaagttggcagccagtgttgg

SEQ ID NO: 3980349 - DNA, 25 bp, Homo sapien
tccatgtactcatagttggtcagca

SEQ ID NO: 3980350 - DNA, 25 bp, Homo sapien
agcagcgcagagtgcccgaggactc

SEQ ID NO: 3980351 - DNA, 25 bp, Homo sapien
tggctgttgggtggataccaagatc

SEQ ID NO: 3980352 - DNA, 25 bp, Homo sapien
cagtctgggcagaattggaggtgac

SEQ ID NO: 3980353 - DNA, 25 bp, Homo sapien
ccttgtgcaccccacgatagtggta

SEQ ID NO: 3980354 - DNA, 25 bp, Homo sapien
gaagggcttttccttgtgcacccca

SEQ ID NO: 3980355 - DNA, 25 bp, Homo sapien
accccacgatagtggtaagcagtct

SEQ ID NO: 3980356 - DNA, 25 bp, Homo sapien
tgagcacggaagccagaatccaatt

SEQ ID NO: 3980357 - DNA, 25 bp, Homo sapien
gagcacggaagccagaatccaattc

SEQ ID NO: 3980358 - DNA, 25 bp, Homo sapien
agcacggaagccagaatccaattcc

SEQ ID NO: 3980359 - DNA, 25 bp, Homo sapien
ttaaatgttggcgaatagcaacact

SEQ ID NO: 3980360 - DNA, 25 bp, Homo sapien
gcagccgccaccagaccatcatctg

SEQ ID NO: 3980361 - DNA, 25 bp, Homo sapien
acgttccacacatggatccgagtcc

SEQ ID NO: 3980362 - DNA, 25 bp, Homo sapien
gttccacacatggatccgagtcccg

SEQ ID NO: 3980363 - DNA, 25 bp, Homo sapien
ggcacgttccacacatggatccgag

SEQ ID NO: 3980364 - DNA, 25 bp, Homo sapien
gccagtggtggctccactaggcctg

SEQ ID NO: 3980365 - DNA, 25 bp, Homo sapien
ctgggcccccatggtcctcaccagg

SEQ ID NO: 3980366 - DNA, 25 bp, Homo sapien
gctccactaggcctggggaacagcc

SEQ ID NO: 3980367 - DNA, 25 bp, Homo sapien
tctcttcagcccgcatgagctgggc

SEQ ID NO: 3980368 - DNA, 25 bp, Homo sapien
gcaaatgttcattagtgtgcacact

SEQ ID NO: 3980369 - DNA, 25 bp, Homo sapien
tgtgcacactttttcgagcagacat

SEQ ID NO: 3980370 - DNA, 25 bp, Homo sapien
ttttctcgttcctctagttccacgc

SEQ ID NO: 3980371 - DNA, 25 bp, Homo sapien
tccgcttctccctaccaagcaaatg

SEQ ID NO: 3980372 - DNA, 25 bp, Homo sapien
catttgccaagatgttccgcagcca

SEQ ID NO: 3980373 - DNA, 25 bp, Homo sapien
tactgagatttgtggattctggccc

SEQ ID NO: 3980374 - DNA, 25 bp, Homo sapien
acaaaattgaaagcatattatactg

SEQ ID NO: 3980375 - DNA, 25 bp, Homo sapien
cgcagccaaaccagttaaatagaga

SEQ ID NO: 3980376 - DNA, 25 bp, Homo sapien
tatggtggtaccaagagctggcttc

SEQ ID NO: 3980377 - DNA, 25 bp, Homo sapien
ctatggtggtaccaagagctggctt

SEQ ID NO: 3980378 - DNA, 25 bp, Homo sapien
ggcatgacttggtaatactgctgag

SEQ ID NO: 3980379 - DNA, 25 bp, Homo sapien
ggaggcatgacttggtaatactgct

SEQ ID NO: 3980380 - DNA, 25 bp, Homo sapien
aggctgggagtctctgggaaattct

SEQ ID NO: 3980381 - DNA, 25 bp, Homo sapien
catgacttggtaatactgctgaggc

SEQ ID NO: 3980382 - DNA, 25 bp, Homo sapien
tgtgaccctcgttccaggaagaaga

SEQ ID NO: 3980383 - DNA, 25 bp, Homo sapien
caaggaccgtagcaaggccctgatt

SEQ ID NO: 3980384 - DNA, 25 bp, Homo sapien
cttcttgacgtatgtctgtgaccct

SEQ ID NO: 3980385 - DNA, 25 bp, Homo sapien
gaagagcccaaggaccgtagcaagg

SEQ ID NO: 3980386 - DNA, 25 bp, Homo sapien
ctcgaaactggagcccaccagggtt

SEQ ID NO: 3980387 - DNA, 25 bp, Homo sapien
cagggttttcccatcaccttcacct

SEQ ID NO: 3980388 - DNA, 25 bp, Homo sapien
cttcaccttctctcttgccaatgtg

SEQ ID NO: 3980389 - DNA, 25 bp, Homo sapien
accttcaccttctctcttgccaatg

SEQ ID NO: 3980390 - DNA, 25 bp, Homo sapien
ggccactattacagcacccagttgg

SEQ ID NO: 3980391 - DNA, 25 bp, Homo sapien
catctggaaggtcattaccacaggc

SEQ ID NO: 3980392 - DNA, 25 bp, Homo sapien
caactttgatggacgttcatctgga

SEQ ID NO: 3980393 - DNA, 25 bp, Homo sapien
gccttggtgacgtatggccactatt

SEQ ID NO: 3980394 - DNA, 25 bp, Homo sapien
taattcagtgttataccgagaggca

SEQ ID NO: 3980395 - DNA, 25 bp, Homo sapien
cctaggtaatgatgacaaagtgtcc

SEQ ID NO: 3980396 - DNA, 25 bp, Homo sapien
tcaattctagcattaacgtctggtt

SEQ ID NO: 3980397 - DNA, 25 bp, Homo sapien
tatgtgacagaagatagggtttagc

SEQ ID NO: 3980398 - DNA, 25 bp, Homo sapien
gtcagcgttggtgtcactcttaggg

SEQ ID NO: 3980399 - DNA, 25 bp, Homo sapien
ctcttaaagtcctggagtgctctgg

SEQ ID NO: 3980400 - DNA, 25 bp, Homo sapien
tgctctggtgtcagcgttggtgtca

SEQ ID NO: 3980401 - DNA, 25 bp, Homo sapien
tcctctcttaaagtcctggagtgct

SEQ ID NO: 3980402 - DNA, 25 bp, Homo sapien
ggcatggcagagtcacacgtgtaga

SEQ ID NO: 3980403 - DNA, 25 bp, Homo sapien
catggcagagtcacacgtgtagaag

SEQ ID NO: 3980404 - DNA, 25 bp, Homo sapien
gaaggtgcccgcctgagaaggtgag

SEQ ID NO: 3980405 - DNA, 25 bp, Homo sapien
tgtagaagaaggtgcccgcctgaga

SEQ ID NO: 3980406 - DNA, 25 bp, Homo sapien
ttgggaaggcctcgcaaggcacatg

SEQ ID NO: 3980407 - DNA, 25 bp, Homo sapien
gcttgggaaggcctcgcaaggcaca

SEQ ID NO: 3980408 - DNA, 25 bp, Homo sapien
tgatgctctcgatgcttgggaaggc

SEQ ID NO: 3980409 - DNA, 25 bp, Homo sapien
cagtgtgatgctctcgatgcttggg

SEQ ID NO: 3980410 - DNA, 25 bp, Homo sapien
ggacagaagcttggagcatctagta

SEQ ID NO: 3980411 - DNA, 25 bp, Homo sapien
tctagtatcagtcttgggctgtctc

SEQ ID NO: 3980412 - DNA, 25 bp, Homo sapien
aacaggaggattctgtagccttcgg

SEQ ID NO: 3980413 - DNA, 25 bp, Homo sapien
agatcttccccttatgatgaacagg

SEQ ID NO: 3980414 - DNA, 25 bp, Homo sapien
ttgggtcccaagccctgattgcttc

SEQ ID NO: 3980415 - DNA, 25 bp, Homo sapien
ctttttgggtcccaagccctgattg

SEQ ID NO: 3980416 - DNA, 25 bp, Homo sapien
ttttgggtcccaagccctgattgct

SEQ ID NO: 3980417 - DNA, 25 bp, Homo sapien
cattggggagtctccgtggttcttt

SEQ ID NO: 3980418 - DNA, 25 bp, Homo sapien
agtcctcgtaaggagccaaggttcg

SEQ ID NO: 3980419 - DNA, 25 bp, Homo sapien
cagcagtcctcgtaaggagccaagg

SEQ ID NO: 3980420 - DNA, 25 bp, Homo sapien
ccagcagtcctcgtaaggagccaag

SEQ ID NO: 3980421 - DNA, 25 bp, Homo sapien
gcagtcctcgtaaggagccaaggtt

SEQ ID NO: 3980422 - DNA, 25 bp, Homo sapien
tctgcgatgttatccatgcttcttt

SEQ ID NO: 3980423 - DNA, 25 bp, Homo sapien
tggtattctgcgatgttatccatgc

SEQ ID NO: 3980424 - DNA, 25 bp, Homo sapien
tagggtgtggtattctgcgatgtta

SEQ ID NO: 3980425 - DNA, 25 bp, Homo sapien
ctgggtagggtgtggtattctgcga

SEQ ID NO: 3980426 - DNA, 25 bp, Homo sapien
gcatttatctggttcgacaccaggt

SEQ ID NO: 3980427 - DNA, 25 bp, Homo sapien
tgcatttatctggttcgacaccagg

SEQ ID NO: 3980428 - DNA, 25 bp, Homo sapien
atttatctggttcgacaccaggtac

SEQ ID NO: 3980429 - DNA, 25 bp, Homo sapien
caccaggtacttttcgacaccaggt

SEQ ID NO: 3980430 - DNA, 25 bp, Homo sapien
tgacagcataaagatggcacaggat

SEQ ID NO: 3980431 - DNA, 25 bp, Homo sapien
taaagatggcacaggatgtgcataa

SEQ ID NO: 3980432 - DNA, 25 bp, Homo sapien
cagcataaagatggcacaggatgtg

SEQ ID NO: 3980433 - DNA, 25 bp, Homo sapien
gttaatgacagcataaagatggcac

SEQ ID NO: 3980434 - DNA, 25 bp, Homo sapien
ttgggtgtcccatccaaggtgcagt

SEQ ID NO: 3980435 - DNA, 25 bp, Homo sapien
gctttgggtgtcccatccaaggtgc

SEQ ID NO: 3980436 - DNA, 25 bp, Homo sapien
cctggggacaagcagctttgggtgt

SEQ ID NO: 3980437 - DNA, 25 bp, Homo sapien
tggggacaagcagctttgggtgtcc

SEQ ID NO: 3980438 - DNA, 25 bp, Homo sapien
aatcttggggaatagctgtgcgacc

SEQ ID NO: 3980439 - DNA, 25 bp, Homo sapien
ggattctgcaaatgtcctctgcctt

SEQ ID NO: 3980440 - DNA, 25 bp, Homo sapien
aaaagccacaccgaataatcttggg

SEQ ID NO: 3980441 - DNA, 25 bp, Homo sapien
tgtgcgaccatcctttcccagcatg

SEQ ID NO: 3980442 - DNA, 25 bp, Homo sapien
ctgaagtctgcaacatttcccaaca

SEQ ID NO: 3980443 - DNA, 25 bp, Homo sapien
tgaagtctgcaacatttcccaacat

SEQ ID NO: 3980444 - DNA, 25 bp, Homo sapien
ccttctctttcggtctgaccacttg

SEQ ID NO: 3980445 - DNA, 25 bp, Homo sapien
ctctttcggtctgaccacttgtctg

SEQ ID NO: 3980446 - DNA, 25 bp, Homo sapien
gggcccttctctttcggtctgacca

SEQ ID NO: 3980447 - DNA, 25 bp, Homo sapien
ttctctttcggtctgaccacttgtc

SEQ ID NO: 3980448 - DNA, 25 bp, Homo sapien
tccttgttccactcgtcctgaagct

SEQ ID NO: 3980449 - DNA, 25 bp, Homo sapien
gttccactcgtcctgaagcttcttg

SEQ ID NO: 3980450 - DNA, 25 bp, Homo sapien
tgggtccttgttccactcgtcctga

SEQ ID NO: 3980451 - DNA, 25 bp, Homo sapien
tgggtgggtccttgttccactcgtc

SEQ ID NO: 3980452 - DNA, 25 bp, Homo sapien
catgcctgaacgttgtttcttccgg

SEQ ID NO: 3980453 - DNA, 25 bp, Homo sapien
tttcttccggaaatgtcagctctct

SEQ ID NO: 3980454 - DNA, 25 bp, Homo sapien
gagtcggagcgctggtcttttctgt

SEQ ID NO: 3980455 - DNA, 25 bp, Homo sapien
gctgtcagcatcgaaagcagatact

SEQ ID NO: 3980456 - DNA, 25 bp, Homo sapien
gacaaggaggctccgttcccctgac

SEQ ID NO: 3980457 - DNA, 25 bp, Homo sapien
agatgccaacgtggaagaggggttg

SEQ ID NO: 3980458 - DNA, 25 bp, Homo sapien
gagacaaggaggctccgttcccctg

SEQ ID NO: 3980459 - DNA, 25 bp, Homo sapien
gaagaggggttggagacaaggaggc

SEQ ID NO: 3980460 - DNA, 25 bp, Homo sapien
gagccctgcaggagaagatcgcaca

SEQ ID NO: 3980461 - DNA, 25 bp, Homo sapien
tgccctctctgttggcatattcagg

SEQ ID NO: 3980462 - DNA, 25 bp, Homo sapien
gatcgcacactgcaaattgagcaag

SEQ ID NO: 3980463 - DNA, 25 bp, Homo sapien
gagcaagtcgctgtgatttcgcaac

SEQ ID NO: 3980464 - DNA, 25 bp, Homo sapien
tatgcagctaattcacctacacagt

SEQ ID NO: 3980465 - DNA, 25 bp, Homo sapien
gatatattgtcagccttgtacctac

SEQ ID NO: 3980466 - DNA, 25 bp, Homo sapien
cacagtcctgtcagttttaggttca

SEQ ID NO: 3980467 - DNA, 25 bp, Homo sapien
tataacaaagcttgacatatgcagc

SEQ ID NO: 3980468 - DNA, 25 bp, Homo sapien
tatatgggtaatgaaacacgtgctc

SEQ ID NO: 3980469 - DNA, 25 bp, Homo sapien
gcttattacagacgcagaggctgct

SEQ ID NO: 3980470 - DNA, 25 bp, Homo sapien
aatgctggcccatcagttccgtagc

SEQ ID NO: 3980471 - DNA, 25 bp, Homo sapien
gatttatggtgctcaactctggagg

SEQ ID NO: 3980472 - DNA, 25 bp, Homo sapien
tagttgaatagcacagtctcattaa

SEQ ID NO: 3980473 - DNA, 25 bp, Homo sapien
agttgaatagcacagtctcattaaa

SEQ ID NO: 3980474 - DNA, 25 bp, Homo sapien
gttgaatagcacagtctcattaaaa

SEQ ID NO: 3980475 - DNA, 25 bp, Homo sapien
ttagttgaatagcacagtctcatta

SEQ ID NO: 3980476 - DNA, 25 bp, Homo sapien
tctgccggctctcgtaagaagaaaa

SEQ ID NO: 3980477 - DNA, 25 bp, Homo sapien
cctcatgcctgaagcgccgagggta

SEQ ID NO: 3980478 - DNA, 25 bp, Homo sapien
taactaaatgacagccaaaggactg

SEQ ID NO: 3980479 - DNA, 25 bp, Homo sapien
aaaggactgagtgctaatagccacg

SEQ ID NO: 3980480 - DNA, 25 bp, Homo sapien
aatgtattgtaatgcttatccgaga

SEQ ID NO: 3980481 - DNA, 25 bp, Homo sapien
gactctggcgggcttccgtaatgta

SEQ ID NO: 3980482 - DNA, 25 bp, Homo sapien
cccgtggtgtttgggttggcagtct

SEQ ID NO: 3980483 - DNA, 25 bp, Homo sapien
tgcttatccgagatgcccgtggtgt

SEQ ID NO: 3980484 - DNA, 25 bp, Homo sapien
ggcatcgctttcaagactttgcggg

SEQ ID NO: 3980485 - DNA, 25 bp, Homo sapien
gttccactgaggttagccatgcgca

SEQ ID NO: 3980486 - DNA, 25 bp, Homo sapien
gactttgcgggctcctgattcttga

SEQ ID NO: 3980487 - DNA, 25 bp, Homo sapien
tcctcttaggaaccagtgttaatgg

SEQ ID NO: 3980488 - DNA, 25 bp, Homo sapien
gagttatgcaaagtgtataatactt

SEQ ID NO: 3980489 - DNA, 25 bp, Homo sapien
cctgttttgcaaaattgcatttcat

SEQ ID NO: 3980490 - DNA, 25 bp, Homo sapien
gagagttatgcaaagtgtataatac

SEQ ID NO: 3980491 - DNA, 25 bp, Homo sapien
agagagagttatgcaaagtgtataa

SEQ ID NO: 3980492 - DNA, 25 bp, Homo sapien
ggcaggagtagtctcgggtgacttt

SEQ ID NO: 3980493 - DNA, 25 bp, Homo sapien
ctgggcaggagtagtctcgggtgac

SEQ ID NO: 3980494 - DNA, 25 bp, Homo sapien
tgggcaggagtagtctcgggtgact

SEQ ID NO: 3980495 - DNA, 25 bp, Homo sapien
caggagtagtctcgggtgacttttt

SEQ ID NO: 3980496 - DNA, 25 bp, Homo sapien
gcagacattcaaatttgatcttcct

SEQ ID NO: 3980497 - DNA, 25 bp, Homo sapien
agacattcaaatttgatcttccttt

SEQ ID NO: 3980498 - DNA, 25 bp, Homo sapien
agcagacattcaaatttgatcttcc

SEQ ID NO: 3980499 - DNA, 25 bp, Homo sapien
cagcagacattcaaatttgatcttc

SEQ ID NO: 3980500 - DNA, 25 bp, Homo sapien
ctagtggtaggtcatggtcagtcca

SEQ ID NO: 3980501 - DNA, 25 bp, Homo sapien
cactttgaatgatgaagatgtggca

SEQ ID NO: 3980502 - DNA, 25 bp, Homo sapien
gacactttgaatgatgaagatgtgg

SEQ ID NO: 3980503 - DNA, 25 bp, Homo sapien
actttgaatgatgaagatgtggcag

SEQ ID NO: 3980504 - DNA, 25 bp, Homo sapien
ggtcactaacgttgctgccagtgta

SEQ ID NO: 3980505 - DNA, 25 bp, Homo sapien
gcttggttggaggtcactaacgttg

SEQ ID NO: 3980506 - DNA, 25 bp, Homo sapien
ggttggaggtcactaacgttgctgc

SEQ ID NO: 3980507 - DNA, 25 bp, Homo sapien
taacgttgctgccagtgtaatacag

SEQ ID NO: 3980508 - DNA, 25 bp, Homo sapien
acaaccctacagtcttgccaaagga

SEQ ID NO: 3980509 - DNA, 25 bp, Homo sapien
ccctacagtcttgccaaaggaactc

SEQ ID NO: 3980510 - DNA, 25 bp, Homo sapien
cagtcttgccaaaggaactctgggc

SEQ ID NO: 3980511 - DNA, 25 bp, Homo sapien
tcttgccaaaggaactctgggctcc

SEQ ID NO: 3980512 - DNA, 25 bp, Homo sapien
gaaacatccaggagtggaagctcag

SEQ ID NO: 3980513 - DNA, 25 bp, Homo sapien
ctccgtgctgctaggagatccaggc

SEQ ID NO: 3980514 - DNA, 25 bp, Homo sapien
tccgtgctgctaggagatccaggca

SEQ ID NO: 3980515 - DNA, 25 bp, Homo sapien
gacgggtctccaaagaatcattacg

SEQ ID NO: 3980516 - DNA, 25 bp, Homo sapien
tgttcactctgatctaaattggcga

SEQ ID NO: 3980517 - DNA, 25 bp, Homo sapien
cagtttgcagtgattgacgggtctc

SEQ ID NO: 3980518 - DNA, 25 bp, Homo sapien
caaattccccggcagttgtgataat

SEQ ID NO: 3980519 - DNA, 25 bp, Homo sapien
caaatttggtggtggcacactgcag

SEQ ID NO: 3980520 - DNA, 25 bp, Homo sapien
ctttgctctccaatatgaacgaaat

SEQ ID NO: 3980521 - DNA, 25 bp, Homo sapien
gctctccaatatgaacgaaatgggc

SEQ ID NO: 3980522 - DNA, 25 bp, Homo sapien
ggttgagttgttcaccagtgatctt

SEQ ID NO: 3980523 - DNA, 25 bp, Homo sapien
ggctgatctctgcatgatccataga

SEQ ID NO: 3980524 - DNA, 25 bp, Homo sapien
tgcatgatccatagattatgaacag

SEQ ID NO: 3980525 - DNA, 25 bp, Homo sapien
cataggctgatctctgcatgatcca

SEQ ID NO: 3980526 - DNA, 25 bp, Homo sapien
tctctgcatgatccatagattatga

SEQ ID NO: 3980527 - DNA, 25 bp, Homo sapien
attactgcctgtttcagaatgtcca

SEQ ID NO: 3980528 - DNA, 25 bp, Homo sapien
cagcattactgcctgtttcagaatg

SEQ ID NO: 3980529 - DNA, 25 bp, Homo sapien
tttcagaatgtccagccagccacgt

SEQ ID NO: 3980530 - DNA, 25 bp, Homo sapien
ctgtttcagaatgtccagccagcca

SEQ ID NO: 3980531 - DNA, 25 bp, Homo sapien
attttttagagattgaaaatgaatc

SEQ ID NO: 3980532 - DNA, 25 bp, Homo sapien
cataatgactataattttttagaga

SEQ ID NO: 3980533 - DNA, 25 bp, Homo sapien
taattttttagagattgaaaatgaa

SEQ ID NO: 3980534 - DNA, 25 bp, Homo sapien
ttttagagattgaaaatgaatctga

SEQ ID NO: 3980535 - DNA, 25 bp, Homo sapien
tataaatcaagctgcgtaattaagg

SEQ ID NO: 3980536 - DNA, 25 bp, Homo sapien
atcaagctgcgtaattaaggacaca

SEQ ID NO: 3980537 - DNA, 25 bp, Homo sapien
aggccggcagcttttgcttctcaag

SEQ ID NO: 3980538 - DNA, 25 bp, Homo sapien
ttaatagagtataaatcaagctgcg

SEQ ID NO: 3980539 - DNA, 25 bp, Homo sapien
tctcagtccctggtcaggtttctct

SEQ ID NO: 3980540 - DNA, 25 bp, Homo sapien
ctctttcttcttctctgctgcctcc

SEQ ID NO: 3980541 - DNA, 25 bp, Homo sapien
tcttcttctctgctgcctcctccat

SEQ ID NO: 3980542 - DNA, 25 bp, Homo sapien
ctctcagtccctggtcaggtttctc

SEQ ID NO: 3980543 - DNA, 25 bp, Homo sapien
cagctggcaataccaagccggcaat

SEQ ID NO: 3980544 - DNA, 25 bp, Homo sapien
ctgggaagtaaggaacccaacaatg

SEQ ID NO: 3980545 - DNA, 25 bp, Homo sapien
aatgaaaacccggttcatgagttca

SEQ ID NO: 3980546 - DNA, 25 bp, Homo sapien
gccggcaataccaagctgggaagta

SEQ ID NO: 3980547 - DNA, 25 bp, Homo sapien
agtgtctctgcgacactgggcacag

SEQ ID NO: 3980548 - DNA, 25 bp, Homo sapien
aaccagggatgagtgtgcttcctct

SEQ ID NO: 3980549 - DNA, 25 bp, Homo sapien
gaagtgcagctgaatttcttcaacc

SEQ ID NO: 3980550 - DNA, 25 bp, Homo sapien
tcaggaccaggaatggaagtgcagc

SEQ ID NO: 3980551 - DNA, 25 bp, Homo sapien
tgaatttcttcaacctggaaaccag

SEQ ID NO: 3980552 - DNA, 25 bp, Homo sapien
tgtgtggcatctccaaccaggtagc

SEQ ID NO: 3980553 - DNA, 25 bp, Homo sapien
gtggcatctccaaccaggtagcaac

SEQ ID NO: 3980554 - DNA, 25 bp, Homo sapien
ctgtgtggcatctccaaccaggtag

SEQ ID NO: 3980555 - DNA, 25 bp, Homo sapien
tgtggcatctccaaccaggtagcaa

SEQ ID NO: 3980556 - DNA, 25 bp, Homo sapien
tggctctggctattggaggtcccca

SEQ ID NO: 3980557 - DNA, 25 bp, Homo sapien
ggctctggctattggaggtccccag

SEQ ID NO: 3980558 - DNA, 25 bp, Homo sapien
cttggctctggctattggaggtccc

SEQ ID NO: 3980559 - DNA, 25 bp, Homo sapien
ctctggctattggaggtccccagcc

SEQ ID NO: 3980560 - DNA, 25 bp, Homo sapien
ctaggcacagggacagagttcccat

SEQ ID NO: 3980561 - DNA, 25 bp, Homo sapien
gagcctgttttgcccttaatatagc

SEQ ID NO: 3980562 - DNA, 25 bp, Homo sapien
ttgcccttaatatagcacctgccct

SEQ ID NO: 3980563 - DNA, 25 bp, Homo sapien
tgttttgcccttaatatagcacctg

SEQ ID NO: 3980564 - DNA, 25 bp, Homo sapien
gcctgttttgcccttaatatagcac

SEQ ID NO: 3980565 - DNA, 25 bp, Homo sapien
ctagaacattgctcgctgtggctct

SEQ ID NO: 3980566 - DNA, 25 bp, Homo sapien
tgcgctagaacattgctcgctgtgg

SEQ ID NO: 3980567 - DNA, 25 bp, Homo sapien
ctgctggttgcgctagaacattgct

SEQ ID NO: 3980568 - DNA, 25 bp, Homo sapien
ggttgcgctagaacattgctcgctg

SEQ ID NO: 3980569 - DNA, 25 bp, Homo sapien
ccaggctccaacagatgccaggctt

SEQ ID NO: 3980570 - DNA, 25 bp, Homo sapien
gccaggcttggaggtttgggcagca

SEQ ID NO: 3980571 - DNA, 25 bp, Homo sapien
ggctccaacagatgccaggcttgga

SEQ ID NO: 3980572 - DNA, 25 bp, Homo sapien
caacagatgccaggcttggaggttt

SEQ ID NO: 3980573 - DNA, 25 bp, Homo sapien
tcttgccatcaccctccacctccat

SEQ ID NO: 3980574 - DNA, 25 bp, Homo sapien
catcttgccatcaccctccacctcc

SEQ ID NO: 3980575 - DNA, 25 bp, Homo sapien
atcttgccatcaccctccacctcca

SEQ ID NO: 3980576 - DNA, 25 bp, Homo sapien
tctggatgttaccatgtggtgtcac

SEQ ID NO: 3980577 - DNA, 25 bp, Homo sapien
gaaccccaggtattgcaggaaatgt

SEQ ID NO: 3980578 - DNA, 25 bp, Homo sapien
tgctgcgattcaagaagggacccag

SEQ ID NO: 3980579 - DNA, 25 bp, Homo sapien
tccatgcagggctgactgctgcgat

SEQ ID NO: 3980580 - DNA, 25 bp, Homo sapien
gatggttttgatactagcttattaa

SEQ ID NO: 3980581 - DNA, 25 bp, Homo sapien
aaaatagtcggatataatgaggtgc

SEQ ID NO: 3980582 - DNA, 25 bp, Homo sapien
agctccaagcctagatggttttgat

SEQ ID NO: 3980583 - DNA, 25 bp, Homo sapien
gtcttaaatctttgaaagctccaag

SEQ ID NO: 3980584 - DNA, 25 bp, Homo sapien
tcagacgcagagcaatggagtattc

SEQ ID NO: 3980585 - DNA, 25 bp, Homo sapien
agaggagcgtctgcctatgtccaca

SEQ ID NO: 3980586 - DNA, 25 bp, Homo sapien
tgtgcaaatccactccaacagtgaa

SEQ ID NO: 3980587 - DNA, 25 bp, Homo sapien
tacccgtaaacttaggcatttgtgc

SEQ ID NO: 3980588 - DNA, 25 bp, Homo sapien
gtccacactatttactccataccgg

SEQ ID NO: 3980589 - DNA, 25 bp, Homo sapien
ccatgtccaattggcctgtgcaagc

SEQ ID NO: 3980590 - DNA, 25 bp, Homo sapien
actccataccggctgagaaagaatt

SEQ ID NO: 3980591 - DNA, 25 bp, Homo sapien
caaagactgacacctgaattccatc

SEQ ID NO: 3980592 - DNA, 25 bp, Homo sapien
ctggaaaatattggtgcacgtgcaa

SEQ ID NO: 3980593 - DNA, 25 bp, Homo sapien
gtcagaggacccctggaaaatattg

SEQ ID NO: 3980594 - DNA, 25 bp, Homo sapien
cctggaaaatattggtgcacgtgca

SEQ ID NO: 3980595 - DNA, 25 bp, Homo sapien
ggaaaatattggtgcacgtgcaaac

SEQ ID NO: 3980596 - DNA, 25 bp, Homo sapien
tagacagcacaacagtaactgccaa

SEQ ID NO: 3980597 - DNA, 25 bp, Homo sapien
ggcttagacagcacaacagtaactg

SEQ ID NO: 3980598 - DNA, 25 bp, Homo sapien
gcttagacagcacaacagtaactgc

SEQ ID NO: 3980599 - DNA, 25 bp, Homo sapien
cttagacagcacaacagtaactgcc

SEQ ID NO: 3980600 - DNA, 25 bp, Homo sapien
tttcacattcgagtagatttgcctt

SEQ ID NO: 3980601 - DNA, 25 bp, Homo sapien
tctcctctcacagctatctcaattt

SEQ ID NO: 3980602 - DNA, 25 bp, Homo sapien
tggctcccgtcctgtgctccttact

SEQ ID NO: 3980603 - DNA, 25 bp, Homo sapien
cagggctccattgattacccccttg

SEQ ID NO: 3980604 - DNA, 25 bp, Homo sapien
tcttgaacttccttctccaaggagc

SEQ ID NO: 3980605 - DNA, 25 bp, Homo sapien
ctgggccacttcctccttcttgaac

SEQ ID NO: 3980606 - DNA, 25 bp, Homo sapien
tgggccacttcctccttcttgaact

SEQ ID NO: 3980607 - DNA, 25 bp, Homo sapien
ccttcttgaacttccttctccaagg

SEQ ID NO: 3980608 - DNA, 25 bp, Homo sapien
tcctcagtccaaacacatccaatat

SEQ ID NO: 3980609 - DNA, 25 bp, Homo sapien
gtccaaacacatccaatatactcaa

SEQ ID NO: 3980610 - DNA, 25 bp, Homo sapien
catccaatatactcaatagatggag

SEQ ID NO: 3980611 - DNA, 25 bp, Homo sapien
tatactcaatagatggagcccaggt

SEQ ID NO: 3980612 - DNA, 25 bp, Homo sapien
ttgaggttgcagctgatagagatga

SEQ ID NO: 3980613 - DNA, 25 bp, Homo sapien
gtgggtgccctcccatgtcagagat

SEQ ID NO: 3980614 - DNA, 25 bp, Homo sapien
tgctggtggctagagcacagttgag

SEQ ID NO: 3980615 - DNA, 25 bp, Homo sapien
atgtcagagatggtgctggtggcta

SEQ ID NO: 3980616 - DNA, 25 bp, Homo sapien
tgtggttacacggtgagcatctccc

SEQ ID NO: 3980617 - DNA, 25 bp, Homo sapien
cacggtgagcatctccctttagcct

SEQ ID NO: 3980618 - DNA, 25 bp, Homo sapien
aggaaatgagacgacactgtggtta

SEQ ID NO: 3980619 - DNA, 25 bp, Homo sapien
ttagcctccattccaaaaggaccag

SEQ ID NO: 3980620 - DNA, 25 bp, Homo sapien
tcactaagcccgtagagaatggaca

SEQ ID NO: 3980621 - DNA, 25 bp, Homo sapien
gccaggtatttgagcaagaagatcc

SEQ ID NO: 3980622 - DNA, 25 bp, Homo sapien
gcacccacctgggactaatgcagct

SEQ ID NO: 3980623 - DNA, 25 bp, Homo sapien
gaagatccagacgtgatgcagccgg

SEQ ID NO: 3980624 - DNA, 25 bp, Homo sapien
taaaaatagctgtgcggtgtagaag

SEQ ID NO: 3980625 - DNA, 25 bp, Homo sapien
tcattaggtgtctccttataattgc

SEQ ID NO: 3980626 - DNA, 25 bp, Homo sapien
tgggtaacctgtcatgcattgcaga

SEQ ID NO: 3980627 - DNA, 25 bp, Homo sapien
atggagatccccctgtttgacattt

SEQ ID NO: 3980628 - DNA, 25 bp, Homo sapien
tactgattgtgcttcagaataatcc

SEQ ID NO: 3980629 - DNA, 25 bp, Homo sapien
gaaaccatgtacttggaatactgat

SEQ ID NO: 3980630 - DNA, 25 bp, Homo sapien
ggcagccaattatcccattacagaa

SEQ ID NO: 3980631 - DNA, 25 bp, Homo sapien
tgttgtctaggaccaggggcagcca

SEQ ID NO: 3980632 - DNA, 25 bp, Homo sapien
cctggcaatagaatttcaatagcga

SEQ ID NO: 3980633 - DNA, 25 bp, Homo sapien
tagaatttcaatagcgaagagtctc

SEQ ID NO: 3980634 - DNA, 25 bp, Homo sapien
ggatgcgcctggcaatagaatttca

SEQ ID NO: 3980635 - DNA, 25 bp, Homo sapien
aatagcgaagagtctcagtttatcc

SEQ ID NO: 3980636 - DNA, 25 bp, Homo sapien
tatattcactagaagttcctcagtg

SEQ ID NO: 3980637 - DNA, 25 bp, Homo sapien
aatatattcactagaagttcctcag

SEQ ID NO: 3980638 - DNA, 25 bp, Homo sapien
atatattcactagaagttcctcagt

SEQ ID NO: 3980639 - DNA, 25 bp, Homo sapien
aaatatattcactagaagttcctca

SEQ ID NO: 3980640 - DNA, 25 bp, Homo sapien
gaaagcttctgcagggaaactctgc

SEQ ID NO: 3980641 - DNA, 25 bp, Homo sapien
agcacatctcacacggcggcaggca

SEQ ID NO: 3980642 - DNA, 25 bp, Homo sapien
aagcacatctcacacggcggcaggc

SEQ ID NO: 3980643 - DNA, 25 bp, Homo sapien
cggcaggcaagagaaagcttctgca

SEQ ID NO: 3980644 - DNA, 25 bp, Homo sapien
atgccaatggtgaccagcgccagtc

SEQ ID NO: 3980645 - DNA, 25 bp, Homo sapien
gatgccaatggtgaccagcgccagt

SEQ ID NO: 3980646 - DNA, 25 bp, Homo sapien
cagatgccaatggtgaccagcgcca

SEQ ID NO: 3980647 - DNA, 25 bp, Homo sapien
tacagatgccaatggtgaccagcgc

SEQ ID NO: 3980648 - DNA, 25 bp, Homo sapien
gccagaggctctgaacggacaggct

SEQ ID NO: 3980649 - DNA, 25 bp, Homo sapien
gattctcttaggacgcctgggagca

SEQ ID NO: 3980650 - DNA, 25 bp, Homo sapien
aatgcacgtggaacccttgctgcca

SEQ ID NO: 3980651 - DNA, 25 bp, Homo sapien
gaatccttttctatgcagccagagg

SEQ ID NO: 3980652 - DNA, 25 bp, Homo sapien
tgcatgggtcccagacgagtctcaa

SEQ ID NO: 3980653 - DNA, 25 bp, Homo sapien
ccagacgagtctcaagggcccagga

SEQ ID NO: 3980654 - DNA, 25 bp, Homo sapien
ggtttaatttgcatgggtcccagac

SEQ ID NO: 3980655 - DNA, 25 bp, Homo sapien
tggagctactaccaggttggtttaa

SEQ ID NO: 3980656 - DNA, 25 bp, Homo sapien
gtgtgaagtcacaccttgtggcccc

SEQ ID NO: 3980657 - DNA, 25 bp, Homo sapien
tagccaaccatacagttcttggtgg

SEQ ID NO: 3980658 - DNA, 25 bp, Homo sapien
tggatgcagtgaaaccttcggcctt

SEQ ID NO: 3980659 - DNA, 25 bp, Homo sapien
tcctggccatgttggttttgctaag

SEQ ID NO: 3980660 - DNA, 25 bp, Homo sapien
cagggttcaggaggcgccagtaatc

SEQ ID NO: 3980661 - DNA, 25 bp, Homo sapien
ctccagggttcaggaggcgccagta

SEQ ID NO: 3980662 - DNA, 25 bp, Homo sapien
tccagggttcaggaggcgccagtaa

SEQ ID NO: 3980663 - DNA, 25 bp, Homo sapien
agggttcaggaggcgccagtaatcc

SEQ ID NO: 3980664 - DNA, 25 bp, Homo sapien
gggttcaccccattcagataagggc

SEQ ID NO: 3980665 - DNA, 25 bp, Homo sapien
taagccctctaatttttgaggagaa

SEQ ID NO: 3980666 - DNA, 25 bp, Homo sapien
tgtggccctgtcagataagccctct

SEQ ID NO: 3980667 - DNA, 25 bp, Homo sapien
gagaaatagacaagcaggtggagac

SEQ ID NO: 3980668 - DNA, 25 bp, Homo sapien
tccgaagttttgcaaaacgtcctga

SEQ ID NO: 3980669 - DNA, 25 bp, Homo sapien
catctcctatacgtgggcagaaggg

SEQ ID NO: 3980670 - DNA, 25 bp, Homo sapien
gtcagttcagtacccaccaagcaaa

SEQ ID NO: 3980671 - DNA, 25 bp, Homo sapien
tccacacaggagcaggtcagttcag

SEQ ID NO: 3980672 - DNA, 25 bp, Homo sapien
cagcggggaggtgtgccatgctcat

SEQ ID NO: 3980673 - DNA, 25 bp, Homo sapien
gacccccgtgtagtgtcagtccacg

SEQ ID NO: 3980674 - DNA, 25 bp, Homo sapien
acagaggcgccgcagtgatgacccc

SEQ ID NO: 3980675 - DNA, 25 bp, Homo sapien
gagagggtgacgtctgagcaaagac

SEQ ID NO: 3980676 - DNA, 25 bp, Homo sapien
gcatgtatgagcgttctttgagaac

SEQ ID NO: 3980677 - DNA, 25 bp, Homo sapien
aaagaatggcctgtctccctcaaag

SEQ ID NO: 3980678 - DNA, 25 bp, Homo sapien
caactgagagaaagcatgtatgagc

SEQ ID NO: 3980679 - DNA, 25 bp, Homo sapien
ggaaagaatggcctgtctccctcaa

SEQ ID NO: 3980680 - DNA, 25 bp, Homo sapien
ccaagcctttaatgccacgatgaac

SEQ ID NO: 3980681 - DNA, 25 bp, Homo sapien
tctcaccaagcctttaatgccacga

SEQ ID NO: 3980682 - DNA, 25 bp, Homo sapien
gagataatggcgtttgggattcctt

SEQ ID NO: 3980683 - DNA, 25 bp, Homo sapien
gtcatggttaatgccttctacggag

SEQ ID NO: 3980684 - DNA, 25 bp, Homo sapien
tgaaggtagctgaaatcgttcagac

SEQ ID NO: 3980685 - DNA, 25 bp, Homo sapien
cacgtagatggacagttcgaagcag

SEQ ID NO: 3980686 - DNA, 25 bp, Homo sapien
gtatttatcacagcccacgtagatg

SEQ ID NO: 3980687 - DNA, 25 bp, Homo sapien
ccatgaacacgatcagagattcccg

SEQ ID NO: 3980688 - DNA, 25 bp, Homo sapien
atgtttaagaacattcggaaggcct

SEQ ID NO: 3980689 - DNA, 25 bp, Homo sapien
gccaaccggacaacactttaactga

SEQ ID NO: 3980690 - DNA, 25 bp, Homo sapien
gccaagccaaccggacaacacttta

SEQ ID NO: 3980691 - DNA, 25 bp, Homo sapien
ctgccaagccaaccggacaacactt

SEQ ID NO: 3980692 - DNA, 25 bp, Homo sapien
ctttcacacgtcatcagcaacgggc

SEQ ID NO: 3980693 - DNA, 25 bp, Homo sapien
ttcacacgtcatcagcaacgggcct

SEQ ID NO: 3980694 - DNA, 25 bp, Homo sapien
acacgtcatcagcaacgggcctctg

SEQ ID NO: 3980695 - DNA, 25 bp, Homo sapien
cgtcatcagcaacgggcctctgatc

SEQ ID NO: 3980696 - DNA, 25 bp, Homo sapien
tgaaaccgacaataaggatgtgctc

SEQ ID NO: 3980697 - DNA, 25 bp, Homo sapien
tcccaagggtgggaacatacttcaa

SEQ ID NO: 3980698 - DNA, 25 bp, Homo sapien
aatgcctccgcttggtctgtaaaag

SEQ ID NO: 3980699 - DNA, 25 bp, Homo sapien
cacagcagccgtgttactgcagagg

SEQ ID NO: 3980700 - DNA, 25 bp, Homo sapien
ataggagtaggccagccagcggaac

SEQ ID NO: 3980701 - DNA, 25 bp, Homo sapien
tcatgaggcggtgtgtggaggcata

SEQ ID NO: 3980702 - DNA, 25 bp, Homo sapien
tctggaagtcctccgtgtggcacac

SEQ ID NO: 3980703 - DNA, 25 bp, Homo sapien
ggttgccgcccagcacaaaagggat

SEQ ID NO: 3980704 - DNA, 25 bp, Homo sapien
ttttccgacagaaaccactcaggga

SEQ ID NO: 3980705 - DNA, 25 bp, Homo sapien
gcctcccagagcagcgtgtttaaat

SEQ ID NO: 3980706 - DNA, 25 bp, Homo sapien
gatgtcaattccatcgtgggtccag

SEQ ID NO: 3980707 - DNA, 25 bp, Homo sapien
ccactcagggattgcaatatagtga

SEQ ID NO: 3980708 - DNA, 25 bp, Homo sapien
gcccatgtcctattgggtgagatgg

SEQ ID NO: 3980709 - DNA, 25 bp, Homo sapien
gcctcgctgcccatgtcctattggg

SEQ ID NO: 3980710 - DNA, 25 bp, Homo sapien
gctgcccatgtcctattgggtgaga

SEQ ID NO: 3980711 - DNA, 25 bp, Homo sapien
tcgctgcccatgtcctattgggtga

SEQ ID NO: 3980712 - DNA, 25 bp, Homo sapien
gggccaagtactcctgacacacgaa

SEQ ID NO: 3980713 - DNA, 25 bp, Homo sapien
tccaccaggtggacgatgcgcgcat

SEQ ID NO: 3980714 - DNA, 25 bp, Homo sapien
cgtaggccttctcgtagccatcggg

SEQ ID NO: 3980715 - DNA, 25 bp, Homo sapien
gggaggacgtgaatccgcgtctcct

SEQ ID NO: 3980716 - DNA, 25 bp, Homo sapien
cccaaaaggtggaggttgtaatgag

SEQ ID NO: 3980717 - DNA, 25 bp, Homo sapien
ccaagactgtgccactgtactccag

SEQ ID NO: 3980718 - DNA, 25 bp, Homo sapien
agcccaaaaggtggaggttgtaatg

SEQ ID NO: 3980719 - DNA, 25 bp, Homo sapien
ccagcctgggagacggaatgagacc

SEQ ID NO: 3980720 - DNA, 25 bp, Homo sapien
aggccctggtggctttttccaatgt

SEQ ID NO: 3980721 - DNA, 25 bp, Homo sapien
tgggacacatttcattcacaacttt

SEQ ID NO: 3980722 - DNA, 25 bp, Homo sapien
gatctccacagcatacagcttcagg

SEQ ID NO: 3980723 - DNA, 25 bp, Homo sapien
taaattctggtgatattgggacaca

SEQ ID NO: 3980724 - DNA, 25 bp, Homo sapien
aaaactctaagcattgatgacgatg

SEQ ID NO: 3980725 - DNA, 25 bp, Homo sapien
aactctaagcattgatgacgatgca

SEQ ID NO: 3980726 - DNA, 25 bp, Homo sapien
caaaaactctaagcattgatgacga

SEQ ID NO: 3980727 - DNA, 25 bp, Homo sapien
atcaaaaactctaagcattgatgac

SEQ ID NO: 3980728 - DNA, 25 bp, Homo sapien
tgactgtggctatcacctccctggt

SEQ ID NO: 3980729 - DNA, 25 bp, Homo sapien
gttatggtgacatcttccctgactg

SEQ ID NO: 3980730 - DNA, 25 bp, Homo sapien
tatagctatcgctaccctggttgtg

SEQ ID NO: 3980731 - DNA, 25 bp, Homo sapien
tctggttatcactgccctgggtgta

SEQ ID NO: 3980732 - DNA, 25 bp, Homo sapien
ggtgtagttgtcacctccctggtca

SEQ ID NO: 3980733 - DNA, 25 bp, Homo sapien
ggttgtggttatcacctccattgct

SEQ ID NO: 3980734 - DNA, 25 bp, Homo sapien
acctcctccattgtggtcatcactc

SEQ ID NO: 3980735 - DNA, 25 bp, Homo sapien
cattacctcctccattgtggtcatc

SEQ ID NO: 3980736 - DNA, 25 bp, Homo sapien
attacctcctccattgtggtcatca

SEQ ID NO: 3980737 - DNA, 25 bp, Homo sapien
tacctcctccattgtggtcatcact

SEQ ID NO: 3980738 - DNA, 25 bp, Homo sapien
ggtcatggttatcactttcctgatt

SEQ ID NO: 3980739 - DNA, 25 bp, Homo sapien
tggtcatggttatcactttcctgat

SEQ ID NO: 3980740 - DNA, 25 bp, Homo sapien
tcccctggtcatggttatcactttc

SEQ ID NO: 3980741 - DNA, 25 bp, Homo sapien
ctcccctggtcatggttatcacttt

SEQ ID NO: 3980742 - DNA, 25 bp, Homo sapien
gtcaccacctcccttgttgtggttc

SEQ ID NO: 3980743 - DNA, 25 bp, Homo sapien
tcttgtttgtggtcaccacctccct

SEQ ID NO: 3980744 - DNA, 25 bp, Homo sapien
tttgtggtcaccacctcccttgttg

SEQ ID NO: 3980745 - DNA, 25 bp, Homo sapien
ctctcttgtttgtggtcaccacctc

SEQ ID NO: 3980746 - DNA, 25 bp, Homo sapien
gatctcacttccctcgttgtggttc

SEQ ID NO: 3980747 - DNA, 25 bp, Homo sapien
ccctccctcattgtggttatcagct

SEQ ID NO: 3980748 - DNA, 25 bp, Homo sapien
attgtggttatcacttccctggtcg

SEQ ID NO: 3980749 - DNA, 25 bp, Homo sapien
tctggttgtggttcttatcgctgtt

SEQ ID NO: 3980750 - DNA, 25 bp, Homo sapien
aattgtggtgcttaaaatccaggtc

SEQ ID NO: 3980751 - DNA, 25 bp, Homo sapien
ggtcatcagtggtggtcatctcgtt

SEQ ID NO: 3980752 - DNA, 25 bp, Homo sapien
cgttccggcggtgataataattatt

SEQ ID NO: 3980753 - DNA, 25 bp, Homo sapien
catttccttataattgtggtgctta

SEQ ID NO: 3980754 - DNA, 25 bp, Homo sapien
tccatcccatttcctatgtccccat

SEQ ID NO: 3980755 - DNA, 25 bp, Homo sapien
tctcacgacttctccactgtgggag

SEQ ID NO: 3980756 - DNA, 25 bp, Homo sapien
cagggccaatttgcagcttgactgg

SEQ ID NO: 3980757 - DNA, 25 bp, Homo sapien
gcagaagtccaggaaaccctctggt

SEQ ID NO: 3980758 - DNA, 25 bp, Homo sapien
tcatgcacacaaatcggcatcagtg

SEQ ID NO: 3980759 - DNA, 25 bp, Homo sapien
tcagtggagactgctgttctagcac

SEQ ID NO: 3980760 - DNA, 25 bp, Homo sapien
catacaaatcggcatcagaaggtct

SEQ ID NO: 3980761 - DNA, 25 bp, Homo sapien
catcagtggagactgctgttctagc

SEQ ID NO: 3980762 - DNA, 25 bp, Homo sapien
agcatgtaatgcagtgctgtttgca

SEQ ID NO: 3980763 - DNA, 25 bp, Homo sapien
cagcatgtaatgcagtgctgtttgc

SEQ ID NO: 3980764 - DNA, 25 bp, Homo sapien
gcccacagtcgccctgtgctggaga

SEQ ID NO: 3980765 - DNA, 25 bp, Homo sapien
cgggaccagtcctgaggcagttcct

SEQ ID NO: 3980766 - DNA, 25 bp, Homo sapien
tgctggagagcccagcgggtccagg

SEQ ID NO: 3980767 - DNA, 25 bp, Homo sapien
acatccacgatcaggccttccacat

SEQ ID NO: 3980768 - DNA, 25 bp, Homo sapien
tccattctcatgcagatgctcccat

SEQ ID NO: 3980769 - DNA, 25 bp, Homo sapien
tgctcccattatcaaaccaggactg

SEQ ID NO: 3980770 - DNA, 25 bp, Homo sapien
gggtttatgcggatgtagcgggcca

SEQ ID NO: 3980771 - DNA, 25 bp, Homo sapien
aaccaggactgagggtttatgcgga

SEQ ID NO: 3980772 - DNA, 25 bp, Homo sapien
attgagaacagggatctccttctca

SEQ ID NO: 3980773 - DNA, 25 bp, Homo sapien
ctcattgagaacagggatctccttc

SEQ ID NO: 3980774 - DNA, 25 bp, Homo sapien
gaacagggatctccttctcactgtt

SEQ ID NO: 3980775 - DNA, 25 bp, Homo sapien
ggggacgggtagctcattgagaaca

SEQ ID NO: 3980776 - DNA, 25 bp, Homo sapien
ccatgaccttataggatgtcaccca

SEQ ID NO: 3980777 - DNA, 25 bp, Homo sapien
cacgtgtggctgtcattgctcacca

SEQ ID NO: 3980778 - DNA, 25 bp, Homo sapien
cttataggatgtcacccagtcactc

SEQ ID NO: 3980779 - DNA, 25 bp, Homo sapien
ttcttaacagtgacccacgtgtggc

SEQ ID NO: 3980780 - DNA, 25 bp, Homo sapien
tttttcagctgataaggcccgaggg

SEQ ID NO: 3980781 - DNA, 25 bp, Homo sapien
tgtagctgccgttcctttgctgcct

SEQ ID NO: 3980782 - DNA, 25 bp, Homo sapien
tatccacacccaaaatagcaacctg

SEQ ID NO: 3980783 - DNA, 25 bp, Homo sapien
aagacagacaacagaggcgggagct

SEQ ID NO: 3980784 - DNA, 25 bp, Homo sapien
gagaagtgcctactcaagttttccc

SEQ ID NO: 3980785 - DNA, 25 bp, Homo sapien
atatattgcaaacatctcctccaat

SEQ ID NO: 3980786 - DNA, 25 bp, Homo sapien
tcattgggtatttgaacaccatctt

SEQ ID NO: 3980787 - DNA, 25 bp, Homo sapien
tacttggtgactaatgaagttcgat

SEQ ID NO: 3980788 - DNA, 25 bp, Homo sapien
tacatggttttctatatgggcttcc

SEQ ID NO: 3980789 - DNA, 25 bp, Homo sapien
tccagctgacctagaaccatttata

SEQ ID NO: 3980790 - DNA, 25 bp, Homo sapien
taccatatagtgtgacgggtcaaga

SEQ ID NO: 3980791 - DNA, 25 bp, Homo sapien
ggtctacttcttatcctatcctaaa

SEQ ID NO: 3980792 - DNA, 25 bp, Homo sapien
tgcttagctctattgtgggagttat

SEQ ID NO: 3980793 - DNA, 25 bp, Homo sapien
gaaacattgttttgtgtgcttagct

SEQ ID NO: 3980794 - DNA, 25 bp, Homo sapien
tttgtgtgcttagctctattgtggg

SEQ ID NO: 3980795 - DNA, 25 bp, Homo sapien
gctctattgtgggagttatttttcc

SEQ ID NO: 3980796 - DNA, 25 bp, Homo sapien
ctttggagcagatgtgttgtgcagc

SEQ ID NO: 3980797 - DNA, 25 bp, Homo sapien
acctttggagcagatgtgttgtgca

SEQ ID NO: 3980798 - DNA, 25 bp, Homo sapien
ttggagcagatgtgttgtgcagcat

SEQ ID NO: 3980799 - DNA, 25 bp, Homo sapien
cacctttggagcagatgtgttgtgc

SEQ ID NO: 3980800 - DNA, 25 bp, Homo sapien
cagactgcatcgatagcctcatggg

SEQ ID NO: 3980801 - DNA, 25 bp, Homo sapien
gggcagctcctaaagacacaagtaa

SEQ ID NO: 3980802 - DNA, 25 bp, Homo sapien
tggcaggccctcataagtaaatcac

SEQ ID NO: 3980803 - DNA, 25 bp, Homo sapien
cttgaggcgtcagcagaagataggc

SEQ ID NO: 3980804 - DNA, 25 bp, Homo sapien
ttggtgtgaattccacttctgcctg

SEQ ID NO: 3980805 - DNA, 25 bp, Homo sapien
ctgggaagcggcaacaggcaccagg

SEQ ID NO: 3980806 - DNA, 25 bp, Homo sapien
aggatagtaacctgcgcagaccacc

SEQ ID NO: 3980807 - DNA, 25 bp, Homo sapien
tgcctgcgaccctgcagaacctggg

SEQ ID NO: 3980808 - DNA, 25 bp, Homo sapien
gatacttctaccaatttgtcctcca

SEQ ID NO: 3980809 - DNA, 25 bp, Homo sapien
acacagatacttctaccaatttgtc

SEQ ID NO: 3980810 - DNA, 25 bp, Homo sapien
cacagatacttctaccaatttgtcc

SEQ ID NO: 3980811 - DNA, 25 bp, Homo sapien
cagatacttctaccaatttgtcctc

SEQ ID NO: 3980812 - DNA, 25 bp, Homo sapien
tttctctccactcctgtacaggggg

SEQ ID NO: 3980813 - DNA, 25 bp, Homo sapien
tctctccactcctgtacagggggag

SEQ ID NO: 3980814 - DNA, 25 bp, Homo sapien
tctccactcctgtacagggggaggg

SEQ ID NO: 3980815 - DNA, 25 bp, Homo sapien
ctttctctccactcctgtacagggg

SEQ ID NO: 3980816 - DNA, 25 bp, Homo sapien
agtgaatctggtcaggcgccgagca

SEQ ID NO: 3980817 - DNA, 25 bp, Homo sapien
tgagtgatgacaccagtgaatctgg

SEQ ID NO: 3980818 - DNA, 25 bp, Homo sapien
catccacttcaatccactgctggag

SEQ ID NO: 3980819 - DNA, 25 bp, Homo sapien
gccagagggagttcctcccttgagt

SEQ ID NO: 3980820 - DNA, 25 bp, Homo sapien
cacgctccgtcataaaaatcatttt

SEQ ID NO: 3980821 - DNA, 25 bp, Homo sapien
aaaaatcattttcattaatgcccgc

SEQ ID NO: 3980822 - DNA, 25 bp, Homo sapien
ataaaaatcattttcattaatgccc

SEQ ID NO: 3980823 - DNA, 25 bp, Homo sapien
tcataaaaatcattttcattaatgc

SEQ ID NO: 3980824 - DNA, 25 bp, Homo sapien
atctgacctgtgtgtagcagggcag

SEQ ID NO: 3980825 - DNA, 25 bp, Homo sapien
tgattcccaaccatgcacctccagg

SEQ ID NO: 3980826 - DNA, 25 bp, Homo sapien
catctgacctgtgtgtagcagggca

SEQ ID NO: 3980827 - DNA, 25 bp, Homo sapien
ctccaggagacggtcatctgacctg

SEQ ID NO: 3980828 - DNA, 25 bp, Homo sapien
tagcgcttcaccgtggaggcatgga

SEQ ID NO: 3980829 - DNA, 25 bp, Homo sapien
cgcttcaccgtggaggcatggagct

SEQ ID NO: 3980830 - DNA, 25 bp, Homo sapien
gccatagcgcttcaccgtggaggca

SEQ ID NO: 3980831 - DNA, 25 bp, Homo sapien
caggccatagcgcttcaccgtggag

SEQ ID NO: 3980832 - DNA, 25 bp, Homo sapien
atcagggtgctgttagcaaaacaag

SEQ ID NO: 3980833 - DNA, 25 bp, Homo sapien
gatcagggtgctgttagcaaaacaa

SEQ ID NO: 3980834 - DNA, 25 bp, Homo sapien
gggacgccaaattcacaaccgacat

SEQ ID NO: 3980835 - DNA, 25 bp, Homo sapien
gcaaaacaaggggacgccaaattca

SEQ ID NO: 3980836 - DNA, 25 bp, Homo sapien
tgtagttaacatcgcctgtactgcc

SEQ ID NO: 3980837 - DNA, 25 bp, Homo sapien
gtagttgtcacgtacaccagcccaa

SEQ ID NO: 3980838 - DNA, 25 bp, Homo sapien
ccccgccttgcaaatgaagtggctg

SEQ ID NO: 3980839 - DNA, 25 bp, Homo sapien
tgcctgccaccttgaacataatgta

SEQ ID NO: 3980840 - DNA, 25 bp, Homo sapien
ggccacacggacactgtgatcatcg

SEQ ID NO: 3980841 - DNA, 25 bp, Homo sapien
gtgatcatcgttggcagccttctca

SEQ ID NO: 3980842 - DNA, 25 bp, Homo sapien
tctgacatcttcacgggccacacgg

SEQ ID NO: 3980843 - DNA, 25 bp, Homo sapien
gacactgtgatcatcgttggcagcc

SEQ ID NO: 3980844 - DNA, 25 bp, Homo sapien
cataaccctgggagaatgaaaactg

SEQ ID NO: 3980845 - DNA, 25 bp, Homo sapien
tgaggacctgagattcactcccgtg

SEQ ID NO: 3980846 - DNA, 25 bp, Homo sapien
tggaattagagagcagaacgttgtc

SEQ ID NO: 3980847 - DNA, 25 bp, Homo sapien
caactgcagggatctagaaactgtc

SEQ ID NO: 3980848 - DNA, 25 bp, Homo sapien
ctccatgaatgtcagcatgtcacac

SEQ ID NO: 3980849 - DNA, 25 bp, Homo sapien
tccatgaatgtcagcatgtcacacc

SEQ ID NO: 3980850 - DNA, 25 bp, Homo sapien
ctccaagcatctccatgaatgtcag

SEQ ID NO: 3980851 - DNA, 25 bp, Homo sapien
tccaagcatctccatgaatgtcagc

SEQ ID NO: 3980852 - DNA, 25 bp, Homo sapien
ccagggctgcggtgaactgggcaat

SEQ ID NO: 3980853 - DNA, 25 bp, Homo sapien
gatgtgagtctctagatcttccgaa

SEQ ID NO: 3980854 - DNA, 25 bp, Homo sapien
ggagatcccggtggatgccagggct

SEQ ID NO: 3980855 - DNA, 25 bp, Homo sapien
ttcagtatggggcttggagatcccg

SEQ ID NO: 3980856 - DNA, 25 bp, Homo sapien
ttcaggttacactctgatttctcct

SEQ ID NO: 3980857 - DNA, 25 bp, Homo sapien
caggttacactctgatttctcctcc

SEQ ID NO: 3980858 - DNA, 25 bp, Homo sapien
tcaggttacactctgatttctcctc

SEQ ID NO: 3980859 - DNA, 25 bp, Homo sapien
aaccaaatgagctttttcttgcaaa

SEQ ID NO: 3980860 - DNA, 25 bp, Homo sapien
agtggcaagagctgtttctccaagg

SEQ ID NO: 3980861 - DNA, 25 bp, Homo sapien
agagtggcaagagctgtttctccaa

SEQ ID NO: 3980862 - DNA, 25 bp, Homo sapien
tccaagagtggcaagagctgtttct

SEQ ID NO: 3980863 - DNA, 25 bp, Homo sapien
caagagtggcaagagctgtttctcc

SEQ ID NO: 3980864 - DNA, 25 bp, Homo sapien
gaaatctccgcccattcaaagttgt

SEQ ID NO: 3980865 - DNA, 25 bp, Homo sapien
tgtgttcagggttgtcacacaactc

SEQ ID NO: 3980866 - DNA, 25 bp, Homo sapien
tgaattcccataactctccctgaaa

SEQ ID NO: 3980867 - DNA, 25 bp, Homo sapien
cacaaatggaagcatgccagggcct

SEQ ID NO: 3980868 - DNA, 25 bp, Homo sapien
cactcttgaaataccaggcctgcag

SEQ ID NO: 3980869 - DNA, 25 bp, Homo sapien
tcaggaaaggccattgcgaggccag

SEQ ID NO: 3980870 - DNA, 25 bp, Homo sapien
gactttcgtgagcagtttaaccaaa

SEQ ID NO: 3980871 - DNA, 25 bp, Homo sapien
aagacgatgccttccatacccggag

SEQ ID NO: 3980872 - DNA, 25 bp, Homo sapien
agagaaggtctcgagctcgggctcc

SEQ ID NO: 3980873 - DNA, 25 bp, Homo sapien
gctccggagccgacttctccctctt

SEQ ID NO: 3980874 - DNA, 25 bp, Homo sapien
ccgtaataatcagggtcctcgaggg

SEQ ID NO: 3980875 - DNA, 25 bp, Homo sapien
tccgggcgcgcgtagtagggctccc

SEQ ID NO: 3980876 - DNA, 25 bp, Homo sapien
gggcacagcagagcggcgcgcttgg

SEQ ID NO: 3980877 - DNA, 25 bp, Homo sapien
tccttggaggcaggtgttccaagca

SEQ ID NO: 3980878 - DNA, 25 bp, Homo sapien
ggctggctgcgcgtgtgaccggccc

SEQ ID NO: 3980879 - DNA, 25 bp, Homo sapien
gagcggcgcgcttgggcgcgggagg

SEQ ID NO: 3980880 - DNA, 25 bp, Homo sapien
cttactcccataccctgtacatttg

SEQ ID NO: 3980881 - DNA, 25 bp, Homo sapien
ctcccataccctgtacatttggcat

SEQ ID NO: 3980882 - DNA, 25 bp, Homo sapien
tcttactcccataccctgtacattt

SEQ ID NO: 3980883 - DNA, 25 bp, Homo sapien
tactcccataccctgtacatttggc

SEQ ID NO: 3980884 - DNA, 25 bp, Homo sapien
caggcagcgcccgaacccacagaga

SEQ ID NO: 3980885 - DNA, 25 bp, Homo sapien
cagccaccatagacaggtggggcca

SEQ ID NO: 3980886 - DNA, 25 bp, Homo sapien
tgggtgcagccaggcagcgcccgaa

SEQ ID NO: 3980887 - DNA, 25 bp, Homo sapien
agcgcccgaacccacagagacagtg

SEQ ID NO: 3980888 - DNA, 25 bp, Homo sapien
tgagtagggagtgagaatgacagat

SEQ ID NO: 3980889 - DNA, 25 bp, Homo sapien
tctgaaattgagtgagattggatgg

SEQ ID NO: 3980890 - DNA, 25 bp, Homo sapien
ccacgcccagctctgatcctcatct

SEQ ID NO: 3980891 - DNA, 25 bp, Homo sapien
tggatggaggcatagacattcagct

SEQ ID NO: 3980892 - DNA, 25 bp, Homo sapien
gcccttggaggtccctggtctcatc

SEQ ID NO: 3980893 - DNA, 25 bp, Homo sapien
tagcagtccacgtatgcgtacttgg

SEQ ID NO: 3980894 - DNA, 25 bp, Homo sapien
gactcagggaccgtggctgctttgc

SEQ ID NO: 3980895 - DNA, 25 bp, Homo sapien
caggcatagcagtccacgtaggcat

SEQ ID NO: 3980896 - DNA, 25 bp, Homo sapien
ggacgactgggcacggcctcctcat

SEQ ID NO: 3980897 - DNA, 25 bp, Homo sapien
tcggaggacgactgggcacggcctc

SEQ ID NO: 3980898 - DNA, 25 bp, Homo sapien
ctggctcggaggacgactgggcacg

SEQ ID NO: 3980899 - DNA, 25 bp, Homo sapien
aggacgactgggcacggcctcctca

SEQ ID NO: 3980900 - DNA, 25 bp, Homo sapien
cattagttgccatgggtgctgagca

SEQ ID NO: 3980901 - DNA, 25 bp, Homo sapien
tgtgaaccctgcaaaaagcagctcg

SEQ ID NO: 3980902 - DNA, 25 bp, Homo sapien
gagatgaagcctccggcaataaaga

SEQ ID NO: 3980903 - DNA, 25 bp, Homo sapien
tatgacctcagggtggactgtagct

SEQ ID NO: 3980904 - DNA, 25 bp, Homo sapien
tcaggaatgacccttcggtggcatg

SEQ ID NO: 3980905 - DNA, 25 bp, Homo sapien
catgtagtctacagttaacggagca

SEQ ID NO: 3980906 - DNA, 25 bp, Homo sapien
tcttcagcccagagtcagtggagtc

SEQ ID NO: 3980907 - DNA, 25 bp, Homo sapien
ccacttctggttgcttcgaggaaga

SEQ ID NO: 3980908 - DNA, 25 bp, Homo sapien
gcggaagcaaaacacgccgggccaa

SEQ ID NO: 3980909 - DNA, 25 bp, Homo sapien
cagccttcccgggatgcaaaaatac

SEQ ID NO: 3980910 - DNA, 25 bp, Homo sapien
aaatacaacagagggcgccgaactc

SEQ ID NO: 3980911 - DNA, 25 bp, Homo sapien
gcaaaaatacaacagagggcgccga

SEQ ID NO: 3980912 - DNA, 25 bp, Homo sapien
gaatattaatgtacgggctggctcc

SEQ ID NO: 3980913 - DNA, 25 bp, Homo sapien
agcgctgtggccttgaatattaatg

SEQ ID NO: 3980914 - DNA, 25 bp, Homo sapien
gaccgccaagttccttaaagatgtc

SEQ ID NO: 3980915 - DNA, 25 bp, Homo sapien
gctccagaccgccaagttccttaaa

SEQ ID NO: 3980916 - DNA, 25 bp, Homo sapien
ccccagcccctctttatcagctgca

SEQ ID NO: 3980917 - DNA, 25 bp, Homo sapien
tgagtgttgtgggatgcctcggtgg

SEQ ID NO: 3980918 - DNA, 25 bp, Homo sapien
cctctgggcgccctagcagtgcccc

SEQ ID NO: 3980919 - DNA, 25 bp, Homo sapien
tagccacccagcgttggggcagaaa

SEQ ID NO: 3980920 - DNA, 25 bp, Homo sapien
ctccttggaccttcctggaccatta

SEQ ID NO: 3980921 - DNA, 25 bp, Homo sapien
tagagatttgcccagcgtttctcct

SEQ ID NO: 3980922 - DNA, 25 bp, Homo sapien
gatttgcccagcgtttctcctggac

SEQ ID NO: 3980923 - DNA, 25 bp, Homo sapien
tggaccttcctggaccattatccat

SEQ ID NO: 3980924 - DNA, 25 bp, Homo sapien
caaagtccagctccggaggagagcc

SEQ ID NO: 3980925 - DNA, 25 bp, Homo sapien
cacacagagctggtgaggtaaagtg

SEQ ID NO: 3980926 - DNA, 25 bp, Homo sapien
agtccaaccctgtctttgcggctct

SEQ ID NO: 3980927 - DNA, 25 bp, Homo sapien
gcttgttatggccttcctgtgggca

SEQ ID NO: 3980928 - DNA, 25 bp, Homo sapien
tcccttttgtaacccctggcagctc

SEQ ID NO: 3980929 - DNA, 25 bp, Homo sapien
ccttttgtaacccctggcagctcac

SEQ ID NO: 3980930 - DNA, 25 bp, Homo sapien
cttttgtaacccctggcagctcact

SEQ ID NO: 3980931 - DNA, 25 bp, Homo sapien
cccttttgtaacccctggcagctca

SEQ ID NO: 3980932 - DNA, 25 bp, Homo sapien
gctgatggcggtaagttcacctgta

SEQ ID NO: 3980933 - DNA, 25 bp, Homo sapien
tgtaccttcacgtttcttgtcagcc

SEQ ID NO: 3980934 - DNA, 25 bp, Homo sapien
ggcggtaagttcacctgtaccttca

SEQ ID NO: 3980935 - DNA, 25 bp, Homo sapien
tatttggcgcccgtgacacggaagc

SEQ ID NO: 3980936 - DNA, 25 bp, Homo sapien
actgccttcaggaagcgtttgccag

SEQ ID NO: 3980937 - DNA, 25 bp, Homo sapien
gccttcaggaagcgtttgccagtca

SEQ ID NO: 3980938 - DNA, 25 bp, Homo sapien
tgccttcaggaagcgtttgccagtc

SEQ ID NO: 3980939 - DNA, 25 bp, Homo sapien
ccttcaggaagcgtttgccagtcat

SEQ ID NO: 3980940 - DNA, 25 bp, Homo sapien
acacttctgatggttctgcctggta

SEQ ID NO: 3980941 - DNA, 25 bp, Homo sapien
agttttggccgagatcttgtgggta

SEQ ID NO: 3980942 - DNA, 25 bp, Homo sapien
ggctgacctctgtgtcacgtaacca

SEQ ID NO: 3980943 - DNA, 25 bp, Homo sapien
accagacgcttgactttggagttgc

SEQ ID NO: 3980944 - DNA, 25 bp, Homo sapien
gcttgttcctaaggctctctgggca

SEQ ID NO: 3980945 - DNA, 25 bp, Homo sapien
tggcctcggcctgttctcggtagtg

SEQ ID NO: 3980946 - DNA, 25 bp, Homo sapien
ccctggtatgggggagcttgttcct

SEQ ID NO: 3980947 - DNA, 25 bp, Homo sapien
ggagcttgttcctaaggctctctgg

SEQ ID NO: 3980948 - DNA, 25 bp, Homo sapien
ggctctaacggagaaggttgggcca

SEQ ID NO: 3980949 - DNA, 25 bp, Homo sapien
ctggcccaaaggctctaacggagaa

SEQ ID NO: 3980950 - DNA, 25 bp, Homo sapien
tctggcccaaaggctctaacggaga

SEQ ID NO: 3980951 - DNA, 25 bp, Homo sapien
ctcgcctgtggtcatctccagcctg

SEQ ID NO: 3980952 - DNA, 25 bp, Homo sapien
cacttcctcgcctgtggtcatctcc

SEQ ID NO: 3980953 - DNA, 25 bp, Homo sapien
tcgcctgtggtcatctccagcctga

SEQ ID NO: 3980954 - DNA, 25 bp, Homo sapien
ttcctcgcctgtggtcatctccagc

SEQ ID NO: 3980955 - DNA, 25 bp, Homo sapien
tgggtgaagaacacctgtccgatgc

SEQ ID NO: 3980956 - DNA, 25 bp, Homo sapien
tctctgggtgaagaacacctgtccg

SEQ ID NO: 3980957 - DNA, 25 bp, Homo sapien
gaacacctgtccgatgctcgctggc

SEQ ID NO: 3980958 - DNA, 25 bp, Homo sapien
tccccgtcccgtctctgggtgaaga

SEQ ID NO: 3980959 - DNA, 25 bp, Homo sapien
gggagtgggccccaggctgcctctc

SEQ ID NO: 3980960 - DNA, 25 bp, Homo sapien
ctgcgagggagtgggccccaggctg

SEQ ID NO: 3980961 - DNA, 25 bp, Homo sapien
agtgggccccaggctgcctctccat

SEQ ID NO: 3980962 - DNA, 25 bp, Homo sapien
agggagtgggccccaggctgcctct

SEQ ID NO: 3980963 - DNA, 25 bp, Homo sapien
ttgcagttgggtggcacactgttta

SEQ ID NO: 3980964 - DNA, 25 bp, Homo sapien
acactgtttagtgtctcctgctcac

SEQ ID NO: 3980965 - DNA, 25 bp, Homo sapien
gcatcagtgcaagggttcggtgtct

SEQ ID NO: 3980966 - DNA, 25 bp, Homo sapien
aagtagaaactgtctaatggcatca

SEQ ID NO: 3980967 - DNA, 25 bp, Homo sapien
gcaagggttcggtgtctttcccagc

SEQ ID NO: 3980968 - DNA, 25 bp, Homo sapien
gaaactgtctaatggcatcagtgca

SEQ ID NO: 3980969 - DNA, 25 bp, Homo sapien
gactcgcaggtgagcctggtagtgg

SEQ ID NO: 3980970 - DNA, 25 bp, Homo sapien
ggcagggactcgcaggtgagcctgg

SEQ ID NO: 3980971 - DNA, 25 bp, Homo sapien
agtgggtcggcgggttctcatccat

SEQ ID NO: 3980972 - DNA, 25 bp, Homo sapien
ctggtagtgggtcggcgggttctca

SEQ ID NO: 3980973 - DNA, 25 bp, Homo sapien
ctcttggcaggcttagtaagggctg

SEQ ID NO: 3980974 - DNA, 25 bp, Homo sapien
cttggcaggcttagtaagggctggg

SEQ ID NO: 3980975 - DNA, 25 bp, Homo sapien
caggcttagtaagggctgggtctgt

SEQ ID NO: 3980976 - DNA, 25 bp, Homo sapien
ggcaggcttagtaagggctgggtct

SEQ ID NO: 3980977 - DNA, 25 bp, Homo sapien
gcaatgtgtccggtcgtacaggcct

SEQ ID NO: 3980978 - DNA, 25 bp, Homo sapien
aagtgtgtccggtcgtataggcctg

SEQ ID NO: 3980979 - DNA, 25 bp, Homo sapien
tcagagtgtccggtcgtacgggccc

SEQ ID NO: 3980980 - DNA, 25 bp, Homo sapien
agtgtccggtcgtacaggcagggct

SEQ ID NO: 3980981 - DNA, 25 bp, Homo sapien
gtgcatggggccagttccattcctg

SEQ ID NO: 3980982 - DNA, 25 bp, Homo sapien
gttccattcctgtccattgtctcag

SEQ ID NO: 3980983 - DNA, 25 bp, Homo sapien
gcctgggccgcagcgtgtccaactg

SEQ ID NO: 3980984 - DNA, 25 bp, Homo sapien
gggccgcagcgtgtccaactgcaca

SEQ ID NO: 3980985 - DNA, 25 bp, Homo sapien
caggtttgtactggcaagctgatga

SEQ ID NO: 3980986 - DNA, 25 bp, Homo sapien
ccgcaggtttgtactggcaagctga

SEQ ID NO: 3980987 - DNA, 25 bp, Homo sapien
tactggcaagctgatgatttgctgg

SEQ ID NO: 3980988 - DNA, 25 bp, Homo sapien
ttgtactggcaagctgatgatttgc

SEQ ID NO: 3980989 - DNA, 25 bp, Homo sapien
tgccctgggtctgagtgtacccacc

SEQ ID NO: 3980990 - DNA, 25 bp, Homo sapien
ggtctgagtgtacccaccatcattg

SEQ ID NO: 3980991 - DNA, 25 bp, Homo sapien
tgagtgtacccaccatcattgttga

SEQ ID NO: 3980992 - DNA, 25 bp, Homo sapien
cctgggtctgagtgtacccaccatc

SEQ ID NO: 3980993 - DNA, 25 bp, Homo sapien
ttgggtgttacttcctgcatctgtg

SEQ ID NO: 3980994 - DNA, 25 bp, Homo sapien
tactgtagaacttgggtgttacttc

SEQ ID NO: 3980995 - DNA, 25 bp, Homo sapien
agaacttgggtgttacttcctgcat

SEQ ID NO: 3980996 - DNA, 25 bp, Homo sapien
ttctactgtagaacttgggtgttac

SEQ ID NO: 3980997 - DNA, 25 bp, Homo sapien
acatgagtgtgtccccatctcgggt

SEQ ID NO: 3980998 - DNA, 25 bp, Homo sapien
cactgcaagatgttgttgagggtga

SEQ ID NO: 3980999 - DNA, 25 bp, Homo sapien
attggaggacatgagtgtgtcccca

SEQ ID NO: 3981000 - DNA, 25 bp, Homo sapien
ggccacagcactgcaagatgttgtt

SEQ ID NO: 3981001 - DNA, 25 bp, Homo sapien
catacgtggagcagtaactggagga

SEQ ID NO: 3981002 - DNA, 25 bp, Homo sapien
caccagcttgggatcttttctcaaa

SEQ ID NO: 3981003 - DNA, 25 bp, Homo sapien
ggccctctgagaagtcccatacgtg

SEQ ID NO: 3981004 - DNA, 25 bp, Homo sapien
tcagcaccagcttgggatcttttct

SEQ ID NO: 3981005 - DNA, 25 bp, Homo sapien
tctcgccgtgttgcacagactgtct

SEQ ID NO: 3981006 - DNA, 25 bp, Homo sapien
gatgtaaaccctgttaacgtcactg

SEQ ID NO: 3981007 - DNA, 25 bp, Homo sapien
tgttgcgatcgctaacctcactggg

SEQ ID NO: 3981008 - DNA, 25 bp, Homo sapien
gagaaccgcagtctttcgagaatgg

SEQ ID NO: 3981009 - DNA, 25 bp, Homo sapien
cccagcaagggactatagatactcg

SEQ ID NO: 3981010 - DNA, 25 bp, Homo sapien
cactgcgtgtggtcaaagttcctca

SEQ ID NO: 3981011 - DNA, 25 bp, Homo sapien
ccaaagttctcaggccaaggtctcg

SEQ ID NO: 3981012 - DNA, 25 bp, Homo sapien
tcaagtattgtcaagggaagcttcc

SEQ ID NO: 3981013 - DNA, 25 bp, Homo sapien
acagcccgttcgaaggtgtgcagag

SEQ ID NO: 3981014 - DNA, 25 bp, Homo sapien
ctctatagccggcactgggagcagc

SEQ ID NO: 3981015 - DNA, 25 bp, Homo sapien
tgaactcccacttgcagggacagtc

SEQ ID NO: 3981016 - DNA, 25 bp, Homo sapien
ttttgctactgaaggagcgtgtgtc

SEQ ID NO: 3981017 - DNA, 25 bp, Homo sapien
cttgcattgggtcctatgtgtccca

SEQ ID NO: 3981018 - DNA, 25 bp, Homo sapien
ttgcattgggtcctatgtgtcccat

SEQ ID NO: 3981019 - DNA, 25 bp, Homo sapien
atcttcagtcgcagtgaccagccca

SEQ ID NO: 3981020 - DNA, 25 bp, Homo sapien
agtcgcagtgaccagcccatgcagg

SEQ ID NO: 3981021 - DNA, 25 bp, Homo sapien
ggaacccatcttgccggccgtcctg

SEQ ID NO: 3981022 - DNA, 25 bp, Homo sapien
gccatgtcactgagctctacccggg

SEQ ID NO: 3981023 - DNA, 25 bp, Homo sapien
tggctatgctgacctcaccgccatg

SEQ ID NO: 3981024 - DNA, 25 bp, Homo sapien
ctcacctcagccctggctatgctga

SEQ ID NO: 3981025 - DNA, 25 bp, Homo sapien
tcagccctggctatgctgacctcac

SEQ ID NO: 3981026 - DNA, 25 bp, Homo sapien
cctggctatgctgacctcaccgcca

SEQ ID NO: 3981027 - DNA, 25 bp, Homo sapien
tgaagccacccaggtaagtgggcac

SEQ ID NO: 3981028 - DNA, 25 bp, Homo sapien
tcaggcacgattgttgtagcagtag

SEQ ID NO: 3981029 - DNA, 25 bp, Homo sapien
taaatgcctttggttgaactagtgg

SEQ ID NO: 3981030 - DNA, 25 bp, Homo sapien
gaactagtggtgtattgagcttccc

SEQ ID NO: 3981031 - DNA, 25 bp, Homo sapien
agcccactgattggagctctgggtc

SEQ ID NO: 3981032 - DNA, 25 bp, Homo sapien
gtacagcacatctatttgtctgcct

SEQ ID NO: 3981033 - DNA, 25 bp, Homo sapien
gagcccactgattggagctctgggt

SEQ ID NO: 3981034 - DNA, 25 bp, Homo sapien
caaatatgtgaagtacagcacatct

SEQ ID NO: 3981035 - DNA, 25 bp, Homo sapien
ttggctgggcttggtatcactgtcc

SEQ ID NO: 3981036 - DNA, 25 bp, Homo sapien
ccaccttccatggtaggctgctggg

SEQ ID NO: 3981037 - DNA, 25 bp, Homo sapien
tggctgggcttggtatcactgtccc

SEQ ID NO: 3981038 - DNA, 25 bp, Homo sapien
tgtccccaccttccatggtaggctg

SEQ ID NO: 3981039 - DNA, 25 bp, Homo sapien
aatctgggcggggggacccactcat

SEQ ID NO: 3981040 - DNA, 25 bp, Homo sapien
tctgggcggggggacccactcatct

SEQ ID NO: 3981041 - DNA, 25 bp, Homo sapien
gcggggggacccactcatctccctg

SEQ ID NO: 3981042 - DNA, 25 bp, Homo sapien
tgggcggggggacccactcatctcc

SEQ ID NO: 3981043 - DNA, 25 bp, Homo sapien
tgtctgtttggttctaccccatcag

SEQ ID NO: 3981044 - DNA, 25 bp, Homo sapien
gggctgtctgtttggttctacccca

SEQ ID NO: 3981045 - DNA, 25 bp, Homo sapien
tgtttggttctaccccatcagtgcc

SEQ ID NO: 3981046 - DNA, 25 bp, Homo sapien
caatggggctgtctgtttggttcta

SEQ ID NO: 3981047 - DNA, 25 bp, Homo sapien
tgtcccccgagaggggatctctgcc

SEQ ID NO: 3981048 - DNA, 25 bp, Homo sapien
cgctccccttcgccgccaggttctg

SEQ ID NO: 3981049 - DNA, 25 bp, Homo sapien
tcttcggcccgctccccttcgccgc

SEQ ID NO: 3981050 - DNA, 25 bp, Homo sapien
caggttctgtcccccgagaggggat

SEQ ID NO: 3981051 - DNA, 25 bp, Homo sapien
ggaggccggggatgaatcagcggaa

SEQ ID NO: 3981052 - DNA, 25 bp, Homo sapien
gggaggccggggatgaatcagcgga

SEQ ID NO: 3981053 - DNA, 25 bp, Homo sapien
gaggccggggatgaatcagcggaac

SEQ ID NO: 3981054 - DNA, 25 bp, Homo sapien
ccaggcaggactcgggttgccagca

SEQ ID NO: 3981055 - DNA, 25 bp, Homo sapien
ctccggacgttgaaccgtttggcag

SEQ ID NO: 3981056 - DNA, 25 bp, Homo sapien
gggcataacggtgcccttcatgggc

SEQ ID NO: 3981057 - DNA, 25 bp, Homo sapien
tgaaccgtttggcagtgcccaggca

SEQ ID NO: 3981058 - DNA, 25 bp, Homo sapien
ctttctgcggctcccctgcgggcac

SEQ ID NO: 3981059 - DNA, 25 bp, Homo sapien
ggcaccggtaccaccaccgctacca

SEQ ID NO: 3981060 - DNA, 25 bp, Homo sapien
gtcgcgggcaccgtcgccgcgggga

SEQ ID NO: 3981061 - DNA, 25 bp, Homo sapien
tcccctgcgggcaccggtaccacca

SEQ ID NO: 3981062 - DNA, 25 bp, Homo sapien
gcctcgcccggacgcccaatgtctt

SEQ ID NO: 3981063 - DNA, 25 bp, Homo sapien
cccgagcctcgcccggacgcccaat

SEQ ID NO: 3981064 - DNA, 25 bp, Homo sapien
cagttgccagaactcgatctgtgtc

SEQ ID NO: 3981065 - DNA, 25 bp, Homo sapien
gttgccagaactcgatctgtgtccc

SEQ ID NO: 3981066 - DNA, 25 bp, Homo sapien
ttcagttgccagaactcgatctgtg

SEQ ID NO: 3981067 - DNA, 25 bp, Homo sapien
atttcagttgccagaactcgatctg

SEQ ID NO: 3981068 - DNA, 25 bp, Homo sapien
tgtgagacggccagtctgccttggc

SEQ ID NO: 3981069 - DNA, 25 bp, Homo sapien
cagctgtgagacggccagtctgcct

SEQ ID NO: 3981070 - DNA, 25 bp, Homo sapien
gctgtgagacggccagtctgccttg

SEQ ID NO: 3981071 - DNA, 25 bp, Homo sapien
ctgtgagacggccagtctgccttgg

SEQ ID NO: 3981072 - DNA, 25 bp, Homo sapien
tgttctctttaagaagattggtcct

SEQ ID NO: 3981073 - DNA, 25 bp, Homo sapien
tgttttttggtatgccatcagcgtt

SEQ ID NO: 3981074 - DNA, 25 bp, Homo sapien
aagaagattggtcctctgcaagctc

SEQ ID NO: 3981075 - DNA, 25 bp, Homo sapien
ggtatgccatcagcgttcttgttct

SEQ ID NO: 3981076 - DNA, 25 bp, Homo sapien
ccgtcgggctgtccgccagctattt

SEQ ID NO: 3981077 - DNA, 25 bp, Homo sapien
aaagtctgctgcataagcccgagcc

SEQ ID NO: 3981078 - DNA, 25 bp, Homo sapien
agacacccatggctgggttcgcccg

SEQ ID NO: 3981079 - DNA, 25 bp, Homo sapien
cctgcaaatctcagggagacagcgc

SEQ ID NO: 3981080 - DNA, 25 bp, Homo sapien
gtttaagcacaggtgcgatgtcagc

SEQ ID NO: 3981081 - DNA, 25 bp, Homo sapien
agagagtttaagcacaggtgcgatg

SEQ ID NO: 3981082 - DNA, 25 bp, Homo sapien
gatgtcagctgagtcgtgctcagga

SEQ ID NO: 3981083 - DNA, 25 bp, Homo sapien
ttaaccgggataggcaataagagag

SEQ ID NO: 3981084 - DNA, 25 bp, Homo sapien
cctgggaatgcaccggagcggctcc

SEQ ID NO: 3981085 - DNA, 25 bp, Homo sapien
gacctgggaatgcaccggagcggct

SEQ ID NO: 3981086 - DNA, 25 bp, Homo sapien
tggacctgggaatgcaccggagcgg

SEQ ID NO: 3981087 - DNA, 25 bp, Homo sapien
ggctggacctgggaatgcaccggag

SEQ ID NO: 3981088 - DNA, 25 bp, Homo sapien
agtggccctcaatcggcagaggtga

SEQ ID NO: 3981089 - DNA, 25 bp, Homo sapien
gaaatttgcagtggccctcaatcgg

SEQ ID NO: 3981090 - DNA, 25 bp, Homo sapien
tgaaatttgcagtggccctcaatcg

SEQ ID NO: 3981091 - DNA, 25 bp, Homo sapien
tttgcagtggccctcaatcggcaga

SEQ ID NO: 3981092 - DNA, 25 bp, Homo sapien
agagacagagccggcaacgccggcc

SEQ ID NO: 3981093 - DNA, 25 bp, Homo sapien
cgccggcccctcctagatccactgg

SEQ ID NO: 3981094 - DNA, 25 bp, Homo sapien
aacgccggcccctcctagatccact

SEQ ID NO: 3981095 - DNA, 25 bp, Homo sapien
agcccagagacagagccggcaacgc

SEQ ID NO: 3981096 - DNA, 25 bp, Homo sapien
tgtatacagatccagaccattccag

SEQ ID NO: 3981097 - DNA, 25 bp, Homo sapien
gacacgcgatcctccacttggttct

SEQ ID NO: 3981098 - DNA, 25 bp, Homo sapien
ccgatgcaagcagtgggcgctcagt

SEQ ID NO: 3981099 - DNA, 25 bp, Homo sapien
gaagcccctggagatatgcaaggcg

SEQ ID NO: 3981100 - DNA, 25 bp, Homo sapien
ggccgtggcacaggctggggtgtct

SEQ ID NO: 3981101 - DNA, 25 bp, Homo sapien
tgagcagtggccgtggcacaggctg

SEQ ID NO: 3981102 - DNA, 25 bp, Homo sapien
cctgagcagtggccgtggcacaggc

SEQ ID NO: 3981103 - DNA, 25 bp, Homo sapien
agcagtggccgtggcacaggctggg

SEQ ID NO: 3981104 - DNA, 25 bp, Homo sapien
gagcaaactgagaaggtccttccag

SEQ ID NO: 3981105 - DNA, 25 bp, Homo sapien
acctgctcttgccagagagtccgcc

SEQ ID NO: 3981106 - DNA, 25 bp, Homo sapien
aacctgctcttgccagagagtccgc

SEQ ID NO: 3981107 - DNA, 25 bp, Homo sapien
tgctcttgccagagagtccgcccag

SEQ ID NO: 3981108 - DNA, 25 bp, Homo sapien
atggggcagcaggggttgtctgctc

SEQ ID NO: 3981109 - DNA, 25 bp, Homo sapien
gggcagcaggggttgtctgctccat

SEQ ID NO: 3981110 - DNA, 25 bp, Homo sapien
tattccatggggcagcaggggttgt

SEQ ID NO: 3981111 - DNA, 25 bp, Homo sapien
ttccatggggcagcaggggttgtct

SEQ ID NO: 3981112 - DNA, 25 bp, Homo sapien
gcagtgatgcttttaggacctcgtt

SEQ ID NO: 3981113 - DNA, 25 bp, Homo sapien
gatgcttttaggacctcgtttgtta

SEQ ID NO: 3981114 - DNA, 25 bp, Homo sapien
gctctacaggtagcagtgatgcttt

SEQ ID NO: 3981115 - DNA, 25 bp, Homo sapien
tggctcagctctacaggtagcagtg

SEQ ID NO: 3981116 - DNA, 25 bp, Homo sapien
tattttataagcatgtactgttttg

SEQ ID NO: 3981117 - DNA, 25 bp, Homo sapien
gaaaaatatgagtgttgctaggtga

SEQ ID NO: 3981118 - DNA, 25 bp, Homo sapien
aaatatgagtgttgctaggtgagca

SEQ ID NO: 3981119 - DNA, 25 bp, Homo sapien
ttgctaggtgagcatggaaattgga

SEQ ID NO: 3981120 - DNA, 25 bp, Homo sapien
caccatcttcacacgcctctggcat

SEQ ID NO: 3981121 - DNA, 25 bp, Homo sapien
ctccaccatcttcacacgcctctgg

SEQ ID NO: 3981122 - DNA, 25 bp, Homo sapien
aaagccccagccgatcttctttact

SEQ ID NO: 3981123 - DNA, 25 bp, Homo sapien
cccaaagccccagccgatcttcttt

SEQ ID NO: 3981124 - DNA, 25 bp, Homo sapien
catcccagagacacatctctgctcc

SEQ ID NO: 3981125 - DNA, 25 bp, Homo sapien
atcccagagacacatctctgctcct

SEQ ID NO: 3981126 - DNA, 25 bp, Homo sapien
tcaatctggatcaggggccacatgt

SEQ ID NO: 3981127 - DNA, 25 bp, Homo sapien
gggccaggggcgcatctgattctgc

SEQ ID NO: 3981128 - DNA, 25 bp, Homo sapien
caggggcgcatctgattctgcagtt

SEQ ID NO: 3981129 - DNA, 25 bp, Homo sapien
ggccaggggcgcatctgattctgca

SEQ ID NO: 3981130 - DNA, 25 bp, Homo sapien
gggcgcatctgattctgcagttgac

SEQ ID NO: 3981131 - DNA, 25 bp, Homo sapien
tcaatgccacacttgcaggccctgt

SEQ ID NO: 3981132 - DNA, 25 bp, Homo sapien
ggccctgtagcacccttcggagtgt

SEQ ID NO: 3981133 - DNA, 25 bp, Homo sapien
gatcgtccagtccacaccatcaatg

SEQ ID NO: 3981134 - DNA, 25 bp, Homo sapien
aaatgcagagcttcctatgcccaag

SEQ ID NO: 3981135 - DNA, 25 bp, Homo sapien
gacgctaagtgctgagagtgcacac

SEQ ID NO: 3981136 - DNA, 25 bp, Homo sapien
gctaagtgctgagagtgcacacagg

SEQ ID NO: 3981137 - DNA, 25 bp, Homo sapien
cgacgctaagtgctgagagtgcaca

SEQ ID NO: 3981138 - DNA, 25 bp, Homo sapien
ctcgacgctaagtgctgagagtgca

SEQ ID NO: 3981139 - DNA, 25 bp, Homo sapien
ctggtgaccggctccatcccctggg

SEQ ID NO: 3981140 - DNA, 25 bp, Homo sapien
catccctggtgaccggctccatccc

SEQ ID NO: 3981141 - DNA, 25 bp, Homo sapien
tcccatccctggtgaccggctccat

SEQ ID NO: 3981142 - DNA, 25 bp, Homo sapien
cctggtgaccggctccatcccctgg

SEQ ID NO: 3981143 - DNA, 25 bp, Homo sapien
acatcagcgtttcctctgaaatgga

SEQ ID NO: 3981144 - DNA, 25 bp, Homo sapien
tagatgatagcaacttgggcaggca

SEQ ID NO: 3981145 - DNA, 25 bp, Homo sapien
tgctttcttcaagggagtattaagg

SEQ ID NO: 3981146 - DNA, 25 bp, Homo sapien
cattctagcttctaccagcctggca

SEQ ID NO: 3981147 - DNA, 25 bp, Homo sapien
tcttgataatcatcctggcaccgaa

SEQ ID NO: 3981148 - DNA, 25 bp, Homo sapien
tcataaaggtttggctaccttgtat

SEQ ID NO: 3981149 - DNA, 25 bp, Homo sapien
ccttgtatatctggaggaaggatac

SEQ ID NO: 3981150 - DNA, 25 bp, Homo sapien
tggcaccgaagtgcatggaaaacag

SEQ ID NO: 3981151 - DNA, 25 bp, Homo sapien
agacaggggcaaaagaattaggtat

SEQ ID NO: 3981152 - DNA, 25 bp, Homo sapien
gcaagctctgcatcacaacatgttt

SEQ ID NO: 3981153 - DNA, 25 bp, Homo sapien
aaatccgttttacttgcaaattctg

SEQ ID NO: 3981154 - DNA, 25 bp, Homo sapien
cagcggtgagctgattcgaattcca

SEQ ID NO: 3981155 - DNA, 25 bp, Homo sapien
attctgaaccgtgcgcaggaaccca

SEQ ID NO: 3981156 - DNA, 25 bp, Homo sapien
taagccattttctccctccaataaa

SEQ ID NO: 3981157 - DNA, 25 bp, Homo sapien
gccattttctccctccaataaaatc

SEQ ID NO: 3981158 - DNA, 25 bp, Homo sapien
tttaagccattttctccctccaata

SEQ ID NO: 3981159 - DNA, 25 bp, Homo sapien
tctttaagccattttctccctccaa

SEQ ID NO: 3981160 - DNA, 25 bp, Homo sapien
ccattcccttaagggtgacctctgc

SEQ ID NO: 3981161 - DNA, 25 bp, Homo sapien
ctctgccctcagagtacagaaatat

SEQ ID NO: 3981162 - DNA, 25 bp, Homo sapien
cagagtacagaaatatgcaatagca

SEQ ID NO: 3981163 - DNA, 25 bp, Homo sapien
gatctccattcccttaagggtgacc

SEQ ID NO: 3981164 - DNA, 25 bp, Homo sapien
ggctcgaagtcagggctctgcccgc

SEQ ID NO: 3981165 - DNA, 25 bp, Homo sapien
gggctcgaagtcagggctctgcccg

SEQ ID NO: 3981166 - DNA, 25 bp, Homo sapien
aagagaaggtctgagaggagtggct

SEQ ID NO: 3981167 - DNA, 25 bp, Homo sapien
gagaaggtctgagaggagtggctgg

SEQ ID NO: 3981168 - DNA, 25 bp, Homo sapien
acctagaagagaaggtctgagagga

SEQ ID NO: 3981169 - DNA, 25 bp, Homo sapien
cgtacctagaagagaaggtctgaga

SEQ ID NO: 3981170 - DNA, 25 bp, Homo sapien
tgcgcttgcggatgtgcagtaattc

SEQ ID NO: 3981171 - DNA, 25 bp, Homo sapien
cgcttgcggatgtgcagtaattctt

SEQ ID NO: 3981172 - DNA, 25 bp, Homo sapien
gcgcttgcggatgtgcagtaattct

SEQ ID NO: 3981173 - DNA, 25 bp, Homo sapien
ctgcgcttgcggatgtgcagtaatt

SEQ ID NO: 3981174 - DNA, 25 bp, Homo sapien
cacagtcaggacagccaaggaagaa

SEQ ID NO: 3981175 - DNA, 25 bp, Homo sapien
ccaaggaagaatggcacactttgca

SEQ ID NO: 3981176 - DNA, 25 bp, Homo sapien
caggacagccaaggaagaatggcac

SEQ ID NO: 3981177 - DNA, 25 bp, Homo sapien
gacagccaaggaagaatggcacact

SEQ ID NO: 3981178 - DNA, 25 bp, Homo sapien
gaattcatctcgtagacattaaggg

SEQ ID NO: 3981179 - DNA, 25 bp, Homo sapien
gatttccgtagccaggcaagagctg

SEQ ID NO: 3981180 - DNA, 25 bp, Homo sapien
tttaagcatcatcggtgtggtggcc

SEQ ID NO: 3981181 - DNA, 25 bp, Homo sapien
cacaggtgaccagttcagagatttc

SEQ ID NO: 3981182 - DNA, 25 bp, Homo sapien
tcgtggtcccgcgtgttcaggctct

SEQ ID NO: 3981183 - DNA, 25 bp, Homo sapien
gtggtcccgcgtgttcaggctctgc

SEQ ID NO: 3981184 - DNA, 25 bp, Homo sapien
caggctctgcagagcaactccctct

SEQ ID NO: 3981185 - DNA, 25 bp, Homo sapien
cagctccagaaagtatgcacggggc

SEQ ID NO: 3981186 - DNA, 25 bp, Homo sapien
ctgcaaagccctgtggtatccacca

SEQ ID NO: 3981187 - DNA, 25 bp, Homo sapien
gcaaagccctgtggtatccaccaga

SEQ ID NO: 3981188 - DNA, 25 bp, Homo sapien
aaagccctgtggtatccaccagatg

SEQ ID NO: 3981189 - DNA, 25 bp, Homo sapien
gccctgtggtatccaccagatgctg

SEQ ID NO: 3981190 - DNA, 25 bp, Homo sapien
gcacagctgagcgtgcttccatgct

SEQ ID NO: 3981191 - DNA, 25 bp, Homo sapien
tgggggttgtgcacggagaaggtcc

SEQ ID NO: 3981192 - DNA, 25 bp, Homo sapien
ccacagctatgctcgccgtgcccat

SEQ ID NO: 3981193 - DNA, 25 bp, Homo sapien
ccatgcttgggggttgtgcacggag

SEQ ID NO: 3981194 - DNA, 25 bp, Homo sapien
agtgaggctgtgatgcatcgtcctc

SEQ ID NO: 3981195 - DNA, 25 bp, Homo sapien
ccctcagccagtgaggctgtgatgc

SEQ ID NO: 3981196 - DNA, 25 bp, Homo sapien
ttgaccctcagccagtgaggctgtg

SEQ ID NO: 3981197 - DNA, 25 bp, Homo sapien
ggctgtgatgcatcgtcctctttca

SEQ ID NO: 3981198 - DNA, 25 bp, Homo sapien
gctcacaacatggagggtcacagaa

SEQ ID NO: 3981199 - DNA, 25 bp, Homo sapien
aggaaggcaggacactgcctctgcg

SEQ ID NO: 3981200 - DNA, 25 bp, Homo sapien
gtcacagaagagaggtgcaaatgct

SEQ ID NO: 3981201 - DNA, 25 bp, Homo sapien
cctctgcgcgggatttcagctggaa

SEQ ID NO: 3981202 - DNA, 25 bp, Homo sapien
gatttgacccaatgtgcttgctgca

SEQ ID NO: 3981203 - DNA, 25 bp, Homo sapien
aaagctgtgtttaatctcgccctga

SEQ ID NO: 3981204 - DNA, 25 bp, Homo sapien
cacagctgagcatcctgttctcgag

SEQ ID NO: 3981205 - DNA, 25 bp, Homo sapien
gtgaatctttgctccacagtggcca

SEQ ID NO: 3981206 - DNA, 25 bp, Homo sapien
gacttttggcctcaatctctggatg

SEQ ID NO: 3981207 - DNA, 25 bp, Homo sapien
tgctgccggcagagacggagatctc

SEQ ID NO: 3981208 - DNA, 25 bp, Homo sapien
cccaggactttatgtggatcgactt

SEQ ID NO: 3981209 - DNA, 25 bp, Homo sapien
ggtagggctgtctacactggctaca

SEQ ID NO: 3981210 - DNA, 25 bp, Homo sapien
tcatcaaggcaaacgccccagagaa

SEQ ID NO: 3981211 - DNA, 25 bp, Homo sapien
gaagagactgatttcatcaaggcaa

SEQ ID NO: 3981212 - DNA, 25 bp, Homo sapien
tgatttcatcaaggcaaacgcccca

SEQ ID NO: 3981213 - DNA, 25 bp, Homo sapien
cagcagaagagactgatttcatcaa

SEQ ID NO: 3981214 - DNA, 25 bp, Homo sapien
ttacagggcccactttagcttgttc

SEQ ID NO: 3981215 - DNA, 25 bp, Homo sapien
tacagggcccactttagcttgttcc

SEQ ID NO: 3981216 - DNA, 25 bp, Homo sapien
ctgcctctttctgacccccagtcca

SEQ ID NO: 3981217 - DNA, 25 bp, Homo sapien
ctctttctgacccccagtccagaag

SEQ ID NO: 3981218 - DNA, 25 bp, Homo sapien
ccaggcccagctcaaagatggcgga

SEQ ID NO: 3981219 - DNA, 25 bp, Homo sapien
cagctcaaagatggcggaaccacaa

SEQ ID NO: 3981220 - DNA, 25 bp, Homo sapien
gctgggcctcttttggactccccag

SEQ ID NO: 3981221 - DNA, 25 bp, Homo sapien
gcccagctcaaagatggcggaacca

SEQ ID NO: 3981222 - DNA, 25 bp, Homo sapien
tcaactggtcaaaaagcgttattca

SEQ ID NO: 3981223 - DNA, 25 bp, Homo sapien
tcccctttgtgatacagccaggcta

SEQ ID NO: 3981224 - DNA, 25 bp, Homo sapien
gtttcatccagaaccaacagttcag

SEQ ID NO: 3981225 - DNA, 25 bp, Homo sapien
taagcgacaaaacagctctcagcag

SEQ ID NO: 3981226 - DNA, 25 bp, Homo sapien
tatgagatgaaattacagtataccc

SEQ ID NO: 3981227 - DNA, 25 bp, Homo sapien
tggtcccaatatgagatgaaattac

SEQ ID NO: 3981228 - DNA, 25 bp, Homo sapien
cagtatacccatatatgatgaaata

SEQ ID NO: 3981229 - DNA, 25 bp, Homo sapien
caagttttattcaagtcaaatggtc

SEQ ID NO: 3981230 - DNA, 25 bp, Homo sapien
aaccctggtgttggccaatatgaag

SEQ ID NO: 3981231 - DNA, 25 bp, Homo sapien
tatagatgcatttcaccttaggaag

SEQ ID NO: 3981232 - DNA, 25 bp, Homo sapien
cgttacaaagcaaacggcaggttca

SEQ ID NO: 3981233 - DNA, 25 bp, Homo sapien
tgacatccatagaatacaaccctgg

SEQ ID NO: 3981234 - DNA, 25 bp, Homo sapien
gttggcttggccagaagtccattat

SEQ ID NO: 3981235 - DNA, 25 bp, Homo sapien
tcagaaagacaagatggtcttgtta

SEQ ID NO: 3981236 - DNA, 25 bp, Homo sapien
ggttggcttggccagaagtccatta

SEQ ID NO: 3981237 - DNA, 25 bp, Homo sapien
tcaagataatgcccaatttgtctgc

SEQ ID NO: 3981238 - DNA, 25 bp, Homo sapien
tttctcaagataatgcccaatttgt

SEQ ID NO: 3981239 - DNA, 25 bp, Homo sapien
ttctcaagataatgcccaatttgtc

SEQ ID NO: 3981240 - DNA, 25 bp, Homo sapien
aagataatgcccaatttgtctgcat

SEQ ID NO: 3981241 - DNA, 25 bp, Homo sapien
catgatgtcatcatcacacagcact

SEQ ID NO: 3981242 - DNA, 25 bp, Homo sapien
atgatgtcatcatcacacagcactg

SEQ ID NO: 3981243 - DNA, 25 bp, Homo sapien
tgatgtcatcatcacacagcactgc

SEQ ID NO: 3981244 - DNA, 25 bp, Homo sapien
ggaggactatatcaggtctgacatt

SEQ ID NO: 3981245 - DNA, 25 bp, Homo sapien
tatcaggtctgacattttcataatc

SEQ ID NO: 3981246 - DNA, 25 bp, Homo sapien
tccaaggaggactatatcaggtctg

SEQ ID NO: 3981247 - DNA, 25 bp, Homo sapien
cattttcataatcaacagccagcca

SEQ ID NO: 3981248 - DNA, 25 bp, Homo sapien
tgccctgctctacatagtgaaaagg

SEQ ID NO: 3981249 - DNA, 25 bp, Homo sapien
tctgatgtgccctcaaatttgtaaa

SEQ ID NO: 3981250 - DNA, 25 bp, Homo sapien
tttccacagggaaaatagccatcct

SEQ ID NO: 3981251 - DNA, 25 bp, Homo sapien
gtagactcaccaactatttcctttg

SEQ ID NO: 3981252 - DNA, 25 bp, Homo sapien
tatcacaaacagctaacgtgacaac

SEQ ID NO: 3981253 - DNA, 25 bp, Homo sapien
cattcagccttatcacaaacagcta

SEQ ID NO: 3981254 - DNA, 25 bp, Homo sapien
gccttatcacaaacagctaacgtga

SEQ ID NO: 3981255 - DNA, 25 bp, Homo sapien
tcgacattcagccttatcacaaaca

SEQ ID NO: 3981256 - DNA, 25 bp, Homo sapien
ggatccggaacaacaacgcctgctt

SEQ ID NO: 3981257 - DNA, 25 bp, Homo sapien
acctggatccggaacaacaacgcct

SEQ ID NO: 3981258 - DNA, 25 bp, Homo sapien
taacctggatccggaacaacaacgc

SEQ ID NO: 3981259 - DNA, 25 bp, Homo sapien
atccggaacaacaacgcctgcttca

SEQ ID NO: 3981260 - DNA, 25 bp, Homo sapien
agtgcgggcagatcattatagggaa

SEQ ID NO: 3981261 - DNA, 25 bp, Homo sapien
aaccatcgtaactggttgggtctgt

SEQ ID NO: 3981262 - DNA, 25 bp, Homo sapien
cattatagggaatgatgtcgaatcc

SEQ ID NO: 3981263 - DNA, 25 bp, Homo sapien
tcgaatcccggcataaatggtccaa

SEQ ID NO: 3981264 - DNA, 25 bp, Homo sapien
tggagaaaagatcctcaagcaatcc

SEQ ID NO: 3981265 - DNA, 25 bp, Homo sapien
tatgatgctaaatgacagacgtctc

SEQ ID NO: 3981266 - DNA, 25 bp, Homo sapien
aaaactccaatactgcaggctaaca

SEQ ID NO: 3981267 - DNA, 25 bp, Homo sapien
cttgactggaatatatagcccctga

SEQ ID NO: 3981268 - DNA, 25 bp, Homo sapien
tgtgagctgagatcgcaccactgca

SEQ ID NO: 3981269 - DNA, 25 bp, Homo sapien
tcagcaggctaagacacaagaatcg

SEQ ID NO: 3981270 - DNA, 25 bp, Homo sapien
cttgaacccaggaagcagaggttgc

SEQ ID NO: 3981271 - DNA, 25 bp, Homo sapien
tactcagcaggctaagacacaagaa

SEQ ID NO: 3981272 - DNA, 25 bp, Homo sapien
tactcaggtgaaaacatctttgcac

SEQ ID NO: 3981273 - DNA, 25 bp, Homo sapien
tgtttgcaagagacagttatgttgt

SEQ ID NO: 3981274 - DNA, 25 bp, Homo sapien
cttctttcaatactcaggtgaaaac

SEQ ID NO: 3981275 - DNA, 25 bp, Homo sapien
tgcaccctttgctattaagaaagag

SEQ ID NO: 3981276 - DNA, 25 bp, Homo sapien
tgcctggccacagtaaattatattg

SEQ ID NO: 3981277 - DNA, 25 bp, Homo sapien
tatattgtatgtttcaatcatagaa

SEQ ID NO: 3981278 - DNA, 25 bp, Homo sapien
catgcctggccacagtaaattatat

SEQ ID NO: 3981279 - DNA, 25 bp, Homo sapien
tgtttcaatcatagaagttaatatt

SEQ ID NO: 3981280 - DNA, 25 bp, Homo sapien
ggtatagccccacttacgagctagt

SEQ ID NO: 3981281 - DNA, 25 bp, Homo sapien
cacttacgagctagtttacaggcag

SEQ ID NO: 3981282 - DNA, 25 bp, Homo sapien
tgaatgcccttcacggtatagcccc

SEQ ID NO: 3981283 - DNA, 25 bp, Homo sapien
tgcaaaaacaatctttgctttgtat

SEQ ID NO: 3981284 - DNA, 25 bp, Homo sapien
ttaaggtcaatttgtccacttgact

SEQ ID NO: 3981285 - DNA, 25 bp, Homo sapien
tcaatttgtccacttgactcttcag

SEQ ID NO: 3981286 - DNA, 25 bp, Homo sapien
ggtcaatttgtccacttgactcttc

SEQ ID NO: 3981287 - DNA, 25 bp, Homo sapien
tgttaaggtcaatttgtccacttga

SEQ ID NO: 3981288 - DNA, 25 bp, Homo sapien
aggatggtagttgtgtgcaccatac

SEQ ID NO: 3981289 - DNA, 25 bp, Homo sapien
gatggtagttgtgtgcaccatactt

SEQ ID NO: 3981290 - DNA, 25 bp, Homo sapien
aaaggatggtagttgtgtgcaccat

SEQ ID NO: 3981291 - DNA, 25 bp, Homo sapien
tggtagttgtgtgcaccatacttat

SEQ ID NO: 3981292 - DNA, 25 bp, Homo sapien
tgcaaatgtgctagtttggaaaaca

SEQ ID NO: 3981293 - DNA, 25 bp, Homo sapien
gcaaatgtgctagtttggaaaacat

SEQ ID NO: 3981294 - DNA, 25 bp, Homo sapien
ctgcaaatgtgctagtttggaaaac

SEQ ID NO: 3981295 - DNA, 25 bp, Homo sapien
tccttcaagtagaaaaaccacagat

SEQ ID NO: 3981296 - DNA, 25 bp, Homo sapien
tgtgtccttcaagtagaaaaaccac

SEQ ID NO: 3981297 - DNA, 25 bp, Homo sapien
gtccttcaagtagaaaaaccacaga

SEQ ID NO: 3981298 - DNA, 25 bp, Homo sapien
tgtccttcaagtagaaaaaccacag

SEQ ID NO: 3981299 - DNA, 25 bp, Homo sapien
cgccccatcacataagtcagagcca

SEQ ID NO: 3981300 - DNA, 25 bp, Homo sapien
tgccgccccatcacataagtcagag

SEQ ID NO: 3981301 - DNA, 25 bp, Homo sapien
gccccatcacataagtcagagccat

SEQ ID NO: 3981302 - DNA, 25 bp, Homo sapien
gccgccccatcacataagtcagagc

SEQ ID NO: 3981303 - DNA, 25 bp, Homo sapien
agggacagtctgcagagagtccaaa

SEQ ID NO: 3981304 - DNA, 25 bp, Homo sapien
tttcttcccacggttcagtctagaa

SEQ ID NO: 3981305 - DNA, 25 bp, Homo sapien
cagtctgcagagagtccaaaatctc

SEQ ID NO: 3981306 - DNA, 25 bp, Homo sapien
cccacggttcagtctagaatacaga

SEQ ID NO: 3981307 - DNA, 25 bp, Homo sapien
tacttaggagactaagactaaggtg

SEQ ID NO: 3981308 - DNA, 25 bp, Homo sapien
taggagactaagactaaggtggaaa

SEQ ID NO: 3981309 - DNA, 25 bp, Homo sapien
gactaagactaaggtggaaagatct

SEQ ID NO: 3981310 - DNA, 25 bp, Homo sapien
tggtacttaggagactaagactaag

SEQ ID NO: 3981311 - DNA, 25 bp, Homo sapien
ttctttatttcgacagaggctggag

SEQ ID NO: 3981312 - DNA, 25 bp, Homo sapien
ccgcagagtaaacgggccgctgaag

SEQ ID NO: 3981313 - DNA, 25 bp, Homo sapien
ggagcgatgggcaggccgatctgca

SEQ ID NO: 3981314 - DNA, 25 bp, Homo sapien
actccggcctgcaagccgtgggtcg

SEQ ID NO: 3981315 - DNA, 25 bp, Homo sapien
tgacgccggagagtcactgcaactt

SEQ ID NO: 3981316 - DNA, 25 bp, Homo sapien
tatgaagcgcaacagtgacgccgga

SEQ ID NO: 3981317 - DNA, 25 bp, Homo sapien
agcgcctgaggacaaccgggtacac

SEQ ID NO: 3981318 - DNA, 25 bp, Homo sapien
tacacgcggcgtctatgaagcgcaa

SEQ ID NO: 3981319 - DNA, 25 bp, Homo sapien
ctctggcgggacgagaagagtcctt

SEQ ID NO: 3981320 - DNA, 25 bp, Homo sapien
gacgagaagagtccttgtccgccct

SEQ ID NO: 3981321 - DNA, 25 bp, Homo sapien
ctcctctggcgggacgagaagagtc

SEQ ID NO: 3981322 - DNA, 25 bp, Homo sapien
tccttgtccgcccttgctgacgaga

SEQ ID NO: 3981323 - DNA, 25 bp, Homo sapien
tgagagcagaacattgccttttatt

SEQ ID NO: 3981324 - DNA, 25 bp, Homo sapien
tgattctggtacctgagaagactgg

SEQ ID NO: 3981325 - DNA, 25 bp, Homo sapien
cgtgctgggccacgaacagatcagc

SEQ ID NO: 3981326 - DNA, 25 bp, Homo sapien
ccagaagggtcaggaattacagcac

SEQ ID NO: 3981327 - DNA, 25 bp, Homo sapien
ttaatctcatctggcaccaactgtc

SEQ ID NO: 3981328 - DNA, 25 bp, Homo sapien
tccattaggaatatgacggctcttc

SEQ ID NO: 3981329 - DNA, 25 bp, Homo sapien
atatggtatccacacagatctcggc

SEQ ID NO: 3981330 - DNA, 25 bp, Homo sapien
gtttctgagacgtgggctacaagat

SEQ ID NO: 3981331 - DNA, 25 bp, Homo sapien
tccaagcaaaagtggcaagggaatt

SEQ ID NO: 3981332 - DNA, 25 bp, Homo sapien
gacccgtgtctactttagcaggtga

SEQ ID NO: 3981333 - DNA, 25 bp, Homo sapien
catgatattagttgagccatcgctg

SEQ ID NO: 3981334 - DNA, 25 bp, Homo sapien
aacctgcagtgcaacagacccgtgt

SEQ ID NO: 3981335 - DNA, 25 bp, Homo sapien
tagtgtgtgctgatggagctagctc

SEQ ID NO: 3981336 - DNA, 25 bp, Homo sapien
cccagcctcgttcaggatttggaag

SEQ ID NO: 3981337 - DNA, 25 bp, Homo sapien
tgggctgaaccatcgagcacgagga

SEQ ID NO: 3981338 - DNA, 25 bp, Homo sapien
tagtccgtttcagagcggccgtctg

SEQ ID NO: 3981339 - DNA, 25 bp, Homo sapien
taaaaatagtccgtttcagagcggc

SEQ ID NO: 3981340 - DNA, 25 bp, Homo sapien
gcaaggtccagaaacggcaaggctt

SEQ ID NO: 3981341 - DNA, 25 bp, Homo sapien
ctctgatgagccagcacctttaaag

SEQ ID NO: 3981342 - DNA, 25 bp, Homo sapien
tcctggcatcttggttagccccgcg

SEQ ID NO: 3981343 - DNA, 25 bp, Homo sapien
cggacactttgaaggacggcagatc

SEQ ID NO: 3981344 - DNA, 25 bp, Homo sapien
gacgatgccaatccctcgtgaatcc

SEQ ID NO: 3981345 - DNA, 25 bp, Homo sapien
tccctcgtgaatcccgcgaaagagg

SEQ ID NO: 3981346 - DNA, 25 bp, Homo sapien
gagccgagggcacacgacgatgcca

SEQ ID NO: 3981347 - DNA, 25 bp, Homo sapien
cgagggcacacgacgatgccaatcc

SEQ ID NO: 3981348 - DNA, 25 bp, Homo sapien
ggcggcagccgtcagcgggaaggag

SEQ ID NO: 3981349 - DNA, 25 bp, Homo sapien
taggaaggcccaaggaacggcgcga

SEQ ID NO: 3981350 - DNA, 25 bp, Homo sapien
gaagaggacattggccgcggagtag

SEQ ID NO: 3981351 - DNA, 25 bp, Homo sapien
gcggcggacgggaagaggacattgg

SEQ ID NO: 3981352 - DNA, 25 bp, Homo sapien
cccacctgcgccgcgccgtcggcac

SEQ ID NO: 3981353 - DNA, 25 bp, Homo sapien
tgcagagcgccggtgccgggagggc

SEQ ID NO: 3981354 - DNA, 25 bp, Homo sapien
cagagcgccggtgccgggagggcca

SEQ ID NO: 3981355 - DNA, 25 bp, Homo sapien
ctggaagtgcagagcgccggtgccg

SEQ ID NO: 3981356 - DNA, 25 bp, Homo sapien
ttccacttggtcctgcgattctgga

SEQ ID NO: 3981357 - DNA, 25 bp, Homo sapien
ccgggttctgcttcttccacttggt

SEQ ID NO: 3981358 - DNA, 25 bp, Homo sapien
tcttccacttggtcctgcgattctg

SEQ ID NO: 3981359 - DNA, 25 bp, Homo sapien
cttcttccacttggtcctgcgattc

SEQ ID NO: 3981360 - DNA, 25 bp, Homo sapien
gcccggaacttgttctccaaggcca

SEQ ID NO: 3981361 - DNA, 25 bp, Homo sapien
gaggttcaggcgctcgcacactgac

SEQ ID NO: 3981362 - DNA, 25 bp, Homo sapien
cgtggcccggaacttgttctccaag

SEQ ID NO: 3981363 - DNA, 25 bp, Homo sapien
ggctgagagacagcgcgaggttcag

SEQ ID NO: 3981364 - DNA, 25 bp, Homo sapien
cccagacgccaatgccccggccggg

SEQ ID NO: 3981365 - DNA, 25 bp, Homo sapien
aatgccccggccggggcgtcaggtg

SEQ ID NO: 3981366 - DNA, 25 bp, Homo sapien
tccccagacgccaatgccccggccg

SEQ ID NO: 3981367 - DNA, 25 bp, Homo sapien
gctccccagacgccaatgccccggc

SEQ ID NO: 3981368 - DNA, 25 bp, Homo sapien
agccgcggcctcctcggatcctccg

SEQ ID NO: 3981369 - DNA, 25 bp, Homo sapien
tcctcttccgcctcggaaccctcca

SEQ ID NO: 3981370 - DNA, 25 bp, Homo sapien
aggggggacgcctggccggcgcctg

SEQ ID NO: 3981371 - DNA, 25 bp, Homo sapien
tccaggggggacgcctggccggcgc

SEQ ID NO: 3981372 - DNA, 25 bp, Homo sapien
gggccggatcgatagatgtcatcta

SEQ ID NO: 3981373 - DNA, 25 bp, Homo sapien
ccgtgttaatagagtttcagatttg

SEQ ID NO: 3981374 - DNA, 25 bp, Homo sapien
taatagagtttcagatttgtgcggg

SEQ ID NO: 3981375 - DNA, 25 bp, Homo sapien
cggggccggatcgatagatgtcatc

SEQ ID NO: 3981376 - DNA, 25 bp, Homo sapien
cccaggcaatcaccgccaaacttgg

SEQ ID NO: 3981377 - DNA, 25 bp, Homo sapien
ccgggccccaggcaatcaccgccaa

SEQ ID NO: 3981378 - DNA, 25 bp, Homo sapien
ctgggcccaagtgcggccgccagag

SEQ ID NO: 3981379 - DNA, 25 bp, Homo sapien
cctgggcccaagtgcggccgccaga

SEQ ID NO: 3981380 - DNA, 25 bp, Homo sapien
gagccgggcgcacggcagggagcgc

SEQ ID NO: 3981381 - DNA, 25 bp, Homo sapien
gctggcatctttccccgcttcgacc

SEQ ID NO: 3981382 - DNA, 25 bp, Homo sapien
gcagggagcgctgcgcgggtgaatt

SEQ ID NO: 3981383 - DNA, 25 bp, Homo sapien
tccagctgtcggacagggtccctgg

SEQ ID NO: 3981384 - DNA, 25 bp, Homo sapien
gggtccaggatgtccaggacagaga

SEQ ID NO: 3981385 - DNA, 25 bp, Homo sapien
tccaggatgtccaggacagagaaag

SEQ ID NO: 3981386 - DNA, 25 bp, Homo sapien
ccaggatgtccaggacagagaaaga

SEQ ID NO: 3981387 - DNA, 25 bp, Homo sapien
ctgtgggtccaggatgtccaggaca

SEQ ID NO: 3981388 - DNA, 25 bp, Homo sapien
tggtgggagggagccgccttggccc

SEQ ID NO: 3981389 - DNA, 25 bp, Homo sapien
ccccgccgtcctgccatgccagcat

SEQ ID NO: 3981390 - DNA, 25 bp, Homo sapien
ttggccccgccgtcctgccatgcca

SEQ ID NO: 3981391 - DNA, 25 bp, Homo sapien
gtggtgggagggagccgccttggcc

SEQ ID NO: 3981392 - DNA, 25 bp, Homo sapien
cacgggccggcggtcggcggcgcgg

SEQ ID NO: 3981393 - DNA, 25 bp, Homo sapien
tgtggcttggcggtagctttccagc

SEQ ID NO: 3981394 - DNA, 25 bp, Homo sapien
ggcggtagctttccagccaggagcc

SEQ ID NO: 3981395 - DNA, 25 bp, Homo sapien
tcggctgtggcttggcggtagcttt

SEQ ID NO: 3981396 - DNA, 25 bp, Homo sapien
tactgtaatagcttcagacccggtt

SEQ ID NO: 3981397 - DNA, 25 bp, Homo sapien
aagatttccccagggtcactgtgag

SEQ ID NO: 3981398 - DNA, 25 bp, Homo sapien
tgattatttgagcatccctgtgaga

SEQ ID NO: 3981399 - DNA, 25 bp, Homo sapien
tttagcgttcacaaagccctgaggc

SEQ ID NO: 3981400 - DNA, 25 bp, Homo sapien
tattgaagaggcatccttagaagcc

SEQ ID NO: 3981401 - DNA, 25 bp, Homo sapien
gctaatcccatctgttattgaagag

SEQ ID NO: 3981402 - DNA, 25 bp, Homo sapien
gaaaccttctcattaaagtgctggg

SEQ ID NO: 3981403 - DNA, 25 bp, Homo sapien
cccatctgttattgaagaggcatcc

SEQ ID NO: 3981404 - DNA, 25 bp, Homo sapien
gcggactttaaagcctgcggaaatc

SEQ ID NO: 3981405 - DNA, 25 bp, Homo sapien
ttccctgcggactttaaagcctgcg

SEQ ID NO: 3981406 - DNA, 25 bp, Homo sapien
tcactgtattccctgcggactttaa

SEQ ID NO: 3981407 - DNA, 25 bp, Homo sapien
taaagcctgcggaaatcaagccagc

SEQ ID NO: 3981408 - DNA, 25 bp, Homo sapien
ctgtcctgatagcaagtgatgcctg

SEQ ID NO: 3981409 - DNA, 25 bp, Homo sapien
taacaagctcgggatcaatattcat

SEQ ID NO: 3981410 - DNA, 25 bp, Homo sapien
gcctgtaacaagctcgggatcaata

SEQ ID NO: 3981411 - DNA, 25 bp, Homo sapien
caagtgatgcctgtaacaagctcgg

SEQ ID NO: 3981412 - DNA, 25 bp, Homo sapien
acattgtttctggggcacgctgcca

SEQ ID NO: 3981413 - DNA, 25 bp, Homo sapien
ccacgcggactggagcactccttcc

SEQ ID NO: 3981414 - DNA, 25 bp, Homo sapien
acgctgccatcatagcccttgatgg

SEQ ID NO: 3981415 - DNA, 25 bp, Homo sapien
gctgccatcatagcccttgatggac

SEQ ID NO: 3981416 - DNA, 25 bp, Homo sapien
ataaccctcaccagttttactgagg

SEQ ID NO: 3981417 - DNA, 25 bp, Homo sapien
aataaccctcaccagttttactgag

SEQ ID NO: 3981418 - DNA, 25 bp, Homo sapien
tgcaaaataaccctcaccagtttta

SEQ ID NO: 3981419 - DNA, 25 bp, Homo sapien
ttcaatgcaaaataaccctcaccag

SEQ ID NO: 3981420 - DNA, 25 bp, Homo sapien
gcctcagctttctcactggcaccag

SEQ ID NO: 3981421 - DNA, 25 bp, Homo sapien
tgacccattcccagcctcagctttc

SEQ ID NO: 3981422 - DNA, 25 bp, Homo sapien
cagcctcagctttctcactggcacc

SEQ ID NO: 3981423 - DNA, 25 bp, Homo sapien
ctcagctttctcactggcaccaggg

SEQ ID NO: 3981424 - DNA, 25 bp, Homo sapien
ggcatggggtagcagacacgctctc

SEQ ID NO: 3981425 - DNA, 25 bp, Homo sapien
cagagattctggatccccatgtggg

SEQ ID NO: 3981426 - DNA, 25 bp, Homo sapien
ccatgtgggtgaggtaccagtagaa

SEQ ID NO: 3981427 - DNA, 25 bp, Homo sapien
cagatggtggtaatcgcagagattc

SEQ ID NO: 3981428 - DNA, 25 bp, Homo sapien
tgctgatggcatctagattgttcct

SEQ ID NO: 3981429 - DNA, 25 bp, Homo sapien
ggctgtgatgagcatcttggtgcat

SEQ ID NO: 3981430 - DNA, 25 bp, Homo sapien
tccggggctggaaagcatgattttt

SEQ ID NO: 3981431 - DNA, 25 bp, Homo sapien
ttttcaccataccagggctgtgatg

SEQ ID NO: 3981432 - DNA, 25 bp, Homo sapien
cctaacatggccaacaggcatacaa

SEQ ID NO: 3981433 - DNA, 25 bp, Homo sapien
aatcacgatttttggatgtaaatac

SEQ ID NO: 3981434 - DNA, 25 bp, Homo sapien
atacattaaaactcctaacatggcc

SEQ ID NO: 3981435 - DNA, 25 bp, Homo sapien
gacaccccattatatccatcatcca

SEQ ID NO: 3981436 - DNA, 25 bp, Homo sapien
aaggctgtggattcgctttggaaca

SEQ ID NO: 3981437 - DNA, 25 bp, Homo sapien
agagtgtttcctgttacgagaaggc

SEQ ID NO: 3981438 - DNA, 25 bp, Homo sapien
tgggtcttcccagacttcgcagtga

SEQ ID NO: 3981439 - DNA, 25 bp, Homo sapien
cgcagtgacggatttcagagtgttt

SEQ ID NO: 3981440 - DNA, 25 bp, Homo sapien
tcacacgtgctcttctcccaagaca

SEQ ID NO: 3981441 - DNA, 25 bp, Homo sapien
ctagagccgctcaacacgtgttgca

SEQ ID NO: 3981442 - DNA, 25 bp, Homo sapien
gttgcaaggcacgtgctctggacct

SEQ ID NO: 3981443 - DNA, 25 bp, Homo sapien
acactccctgaagcgcgttccccag

SEQ ID NO: 3981444 - DNA, 25 bp, Homo sapien
gctggcctctgcctttccgctgctg

SEQ ID NO: 3981445 - DNA, 25 bp, Homo sapien
gctgctctgcggctcggggacacgg

SEQ ID NO: 3981446 - DNA, 25 bp, Homo sapien
gagccctctcgctgcccacagggct

SEQ ID NO: 3981447 - DNA, 25 bp, Homo sapien
ggggacacggccagggctggtggcg

SEQ ID NO: 3981448 - DNA, 25 bp, Homo sapien
tgctgctgtgttctgatgcatcagg

SEQ ID NO: 3981449 - DNA, 25 bp, Homo sapien
cctttgattgctacatcttttccag

SEQ ID NO: 3981450 - DNA, 25 bp, Homo sapien
atctgcatttttgaccctttgattg

SEQ ID NO: 3981451 - DNA, 25 bp, Homo sapien
tgctgtgttctgatgcatcagggaa

SEQ ID NO: 3981452 - DNA, 25 bp, Homo sapien
cgcacagggccgagggccaccatca

SEQ ID NO: 3981453 - DNA, 25 bp, Homo sapien
gagaacaccacagcgcacagggccg

SEQ ID NO: 3981454 - DNA, 25 bp, Homo sapien
tggagaacaccacagcgcacagggc

SEQ ID NO: 3981455 - DNA, 25 bp, Homo sapien
agcgcacagggccgagggccaccat

SEQ ID NO: 3981456 - DNA, 25 bp, Homo sapien
tggtaagggtgtagcaggacagtgc

SEQ ID NO: 3981457 - DNA, 25 bp, Homo sapien
gcatcacccagctggtaagggtgta

SEQ ID NO: 3981458 - DNA, 25 bp, Homo sapien
atcacccagctggtaagggtgtagc

SEQ ID NO: 3981459 - DNA, 25 bp, Homo sapien
ccagcatcacccagctggtaagggt

SEQ ID NO: 3981460 - DNA, 25 bp, Homo sapien
tctgtcccaactgtccctatggccc

SEQ ID NO: 3981461 - DNA, 25 bp, Homo sapien
gtctgtcccaactgtccctatggcc

SEQ ID NO: 3981462 - DNA, 25 bp, Homo sapien
ttgccgtgtgctccgcagtgtgcag

SEQ ID NO: 3981463 - DNA, 25 bp, Homo sapien
ttctgccacccgcactatatccaag

SEQ ID NO: 3981464 - DNA, 25 bp, Homo sapien
caggcacttgccgtgtgctccgcag

SEQ ID NO: 3981465 - DNA, 25 bp, Homo sapien
cacccgcactatatccaagacacag

SEQ ID NO: 3981466 - DNA, 25 bp, Homo sapien
cctggcctagtctggtgggtgttta

SEQ ID NO: 3981467 - DNA, 25 bp, Homo sapien
catgctgtgaagacctgtgggccag

SEQ ID NO: 3981468 - DNA, 25 bp, Homo sapien
aaccttgctggcctttaggggtgca

SEQ ID NO: 3981469 - DNA, 25 bp, Homo sapien
tgcctggcctagtctggtgggtgtt

SEQ ID NO: 3981470 - DNA, 25 bp, Homo sapien
gttctgctgctttaaaaccactgga

SEQ ID NO: 3981471 - DNA, 25 bp, Homo sapien
gcctgttgaatcagctcagtgccac

SEQ ID NO: 3981472 - DNA, 25 bp, Homo sapien
ctgcttcaggctcctcaggccgtgg

SEQ ID NO: 3981473 - DNA, 25 bp, Homo sapien
cagagaagctctcatctcttccggg

SEQ ID NO: 3981474 - DNA, 25 bp, Homo sapien
gagtattttgcccagaggccttgtg

SEQ ID NO: 3981475 - DNA, 25 bp, Homo sapien
ccctgccgcgtgtgcgtgcagactg

SEQ ID NO: 3981476 - DNA, 25 bp, Homo sapien
ttttggcttgctcccgagtattttg

SEQ ID NO: 3981477 - DNA, 25 bp, Homo sapien
ccgcgtgtgcgtgcagactggccct

SEQ ID NO: 3981478 - DNA, 25 bp, Homo sapien
ggctggatggaagctccccggctgg

SEQ ID NO: 3981479 - DNA, 25 bp, Homo sapien
aagaggaagcggtagtgttcccgca

SEQ ID NO: 3981480 - DNA, 25 bp, Homo sapien
gcatgcagtcccaaatagactcctg

SEQ ID NO: 3981481 - DNA, 25 bp, Homo sapien
gaagctccccggctgggccattgtt

SEQ ID NO: 3981482 - DNA, 25 bp, Homo sapien
tgcagctgctatgaagagtgtgctg

SEQ ID NO: 3981483 - DNA, 25 bp, Homo sapien
cagctgctatgaagagtgtgctgct

SEQ ID NO: 3981484 - DNA, 25 bp, Homo sapien
gctgctatgaagagtgtgctgctga

SEQ ID NO: 3981485 - DNA, 25 bp, Homo sapien
ctatgaagagtgtgctgctgagacc

SEQ ID NO: 3981486 - DNA, 25 bp, Homo sapien
aatgactcccctcgtcctgagctct

SEQ ID NO: 3981487 - DNA, 25 bp, Homo sapien
aaaatgactcccctcgtcctgagct

SEQ ID NO: 3981488 - DNA, 25 bp, Homo sapien
tgactcccctcgtcctgagctctcc

SEQ ID NO: 3981489 - DNA, 25 bp, Homo sapien
aaatgactcccctcgtcctgagctc

SEQ ID NO: 3981490 - DNA, 25 bp, Homo sapien
catgcagcgccgtgctgtttctgtg

SEQ ID NO: 3981491 - DNA, 25 bp, Homo sapien
ttctgtgtctgtgcgcttcggtgga

SEQ ID NO: 3981492 - DNA, 25 bp, Homo sapien
tggcccagccgttcatgcagcgccg

SEQ ID NO: 3981493 - DNA, 25 bp, Homo sapien
gccgttcatgcagcgccgtgctgtt

SEQ ID NO: 3981494 - DNA, 25 bp, Homo sapien
ggtttctcccgctttgcttcgtggc

SEQ ID NO: 3981495 - DNA, 25 bp, Homo sapien
ggcggcagggacttgcggccgggga

SEQ ID NO: 3981496 - DNA, 25 bp, Homo sapien
tctcccgctttgcttcgtggccagg

SEQ ID NO: 3981497 - DNA, 25 bp, Homo sapien
tttctcccgctttgcttcgtggcca

SEQ ID NO: 3981498 - DNA, 25 bp, Homo sapien
agaaagagcatcttctccagccggc

SEQ ID NO: 3981499 - DNA, 25 bp, Homo sapien
gaaagagcatcttctccagccggcc

SEQ ID NO: 3981500 - DNA, 25 bp, Homo sapien
agagaaagagcatcttctccagccg

SEQ ID NO: 3981501 - DNA, 25 bp, Homo sapien
cagagagaaagagcatcttctccag

SEQ ID NO: 3981502 - DNA, 25 bp, Homo sapien
gacatctggtcattcgcagagtgcc

SEQ ID NO: 3981503 - DNA, 25 bp, Homo sapien
tggtcattcgcagagtgccctgtgc

SEQ ID NO: 3981504 - DNA, 25 bp, Homo sapien
agatgctgacatctggtcattcgca

SEQ ID NO: 3981505 - DNA, 25 bp, Homo sapien
tgctgacatctggtcattcgcagag

SEQ ID NO: 3981506 - DNA, 25 bp, Homo sapien
ggcgcaggtggctgtaccgtggctg

SEQ ID NO: 3981507 - DNA, 25 bp, Homo sapien
gtagacactgcctgtcctccagacc

SEQ ID NO: 3981508 - DNA, 25 bp, Homo sapien
ccgtggctgcggtgatgtgctgact

SEQ ID NO: 3981509 - DNA, 25 bp, Homo sapien
cagccatctttccagcgaggacagt

SEQ ID NO: 3981510 - DNA, 25 bp, Homo sapien
ctgcgaggcccctcggatggctgat

SEQ ID NO: 3981511 - DNA, 25 bp, Homo sapien
gacagtgattgtgccttcccagagc

SEQ ID NO: 3981512 - DNA, 25 bp, Homo sapien
ctctcctgggacagtgattgtgcct

SEQ ID NO: 3981513 - DNA, 25 bp, Homo sapien
tggcctcgcagccaagcctggtgac

SEQ ID NO: 3981514 - DNA, 25 bp, Homo sapien
ccggcatcacccaccggggaggcct

SEQ ID NO: 3981515 - DNA, 25 bp, Homo sapien
gcctcatcatccgtgctccccacct

SEQ ID NO: 3981516 - DNA, 25 bp, Homo sapien
gatgtagttcacaatctcgcagacc

SEQ ID NO: 3981517 - DNA, 25 bp, Homo sapien
ctcagcagaatgagccgggaggagc

SEQ ID NO: 3981518 - DNA, 25 bp, Homo sapien
ttagatgtagttcacaatctcgcag

SEQ ID NO: 3981519 - DNA, 25 bp, Homo sapien
agttcacaatctcgcagacccacgg

SEQ ID NO: 3981520 - DNA, 25 bp, Homo sapien
ccagggcgcggcagcccgccaggag

SEQ ID NO: 3981521 - DNA, 25 bp, Homo sapien
tccagggcgcggcagcccgccagga

SEQ ID NO: 3981522 - DNA, 25 bp, Homo sapien
cgtccagggcgcggcagcccgccag

SEQ ID NO: 3981523 - DNA, 25 bp, Homo sapien
gtccagggcgcggcagcccgccagg

SEQ ID NO: 3981524 - DNA, 25 bp, Homo sapien
gtgatgacgttgcagctatgattga

SEQ ID NO: 3981525 - DNA, 25 bp, Homo sapien
cagtttatgaggtgatgacgttgca

SEQ ID NO: 3981526 - DNA, 25 bp, Homo sapien
tgacagtttatgaggtgatgacgtt

SEQ ID NO: 3981527 - DNA, 25 bp, Homo sapien
tggcctcagtcggcgtttcggggaa

SEQ ID NO: 3981528 - DNA, 25 bp, Homo sapien
cagtttctttgcctactgggctgaa

SEQ ID NO: 3981529 - DNA, 25 bp, Homo sapien
tgtcaccacccaggatagcaagtcc

SEQ ID NO: 3981530 - DNA, 25 bp, Homo sapien
actgggctgaatattggtgtcacca

SEQ ID NO: 3981531 - DNA, 25 bp, Homo sapien
tgggctgaatattggtgtcaccacc

SEQ ID NO: 3981532 - DNA, 25 bp, Homo sapien
agcccctgcggtgcccgcagtcagt

SEQ ID NO: 3981533 - DNA, 25 bp, Homo sapien
tgagaaccgcgcaggaaatagctgg

SEQ ID NO: 3981534 - DNA, 25 bp, Homo sapien
gggcagtgagaaccgcgcaggaaat

SEQ ID NO: 3981535 - DNA, 25 bp, Homo sapien
cagtggggcagtgagaaccgcgcag

SEQ ID NO: 3981536 - DNA, 25 bp, Homo sapien
tcactggatttgagggagggccatt

SEQ ID NO: 3981537 - DNA, 25 bp, Homo sapien
gttggaaaatatgcagatggctggc

SEQ ID NO: 3981538 - DNA, 25 bp, Homo sapien
gcaaggccgcccattaaatcaggat

SEQ ID NO: 3981539 - DNA, 25 bp, Homo sapien
cacatgaaggtggacgataagaaag

SEQ ID NO: 3981540 - DNA, 25 bp, Homo sapien
ctgtgtgtgatgccgggtttgtgtg

SEQ ID NO: 3981541 - DNA, 25 bp, Homo sapien
gtgatgccgggtttgtgtgtgatgc

SEQ ID NO: 3981542 - DNA, 25 bp, Homo sapien
gtgtgtgatgccgggtttgtgtgtg

SEQ ID NO: 3981543 - DNA, 25 bp, Homo sapien
gtgtgatgccgggtttgtgtgtgat

SEQ ID NO: 3981544 - DNA, 25 bp, Homo sapien
tgatgccggtttgtttgtaggtctt

SEQ ID NO: 3981545 - DNA, 25 bp, Homo sapien
tgtttaatggggaagcttcccgcca

SEQ ID NO: 3981546 - DNA, 25 bp, Homo sapien
gggaagcttcccgccaagacagcaa

SEQ ID NO: 3981547 - DNA, 25 bp, Homo sapien
gctgtgcgtgatgccggtttgtttg

SEQ ID NO: 3981548 - DNA, 25 bp, Homo sapien
tgagctcttctgaggggtgaggtcc

SEQ ID NO: 3981549 - DNA, 25 bp, Homo sapien
tcttctgaggggtgaggtccagcca

SEQ ID NO: 3981550 - DNA, 25 bp, Homo sapien
ctagagatgagctcttctgaggggt

SEQ ID NO: 3981551 - DNA, 25 bp, Homo sapien
tctagagatgagctcttctgagggg

SEQ ID NO: 3981552 - DNA, 25 bp, Homo sapien
gtggtgtagcccgagcctgttaccc

SEQ ID NO: 3981553 - DNA, 25 bp, Homo sapien
tggtgtagcccgagcctgttacccc

SEQ ID NO: 3981554 - DNA, 25 bp, Homo sapien
tcatctgtcagatacggaggcaggg

SEQ ID NO: 3981555 - DNA, 25 bp, Homo sapien
taaccagagagaacacggcacgttg

SEQ ID NO: 3981556 - DNA, 25 bp, Homo sapien
gactggcagagacttaggcggacca

SEQ ID NO: 3981557 - DNA, 25 bp, Homo sapien
ccagagtgcgtgtcaacagttccag

SEQ ID NO: 3981558 - DNA, 25 bp, Homo sapien
cagcgctgtcgaaggctgagctgct

SEQ ID NO: 3981559 - DNA, 25 bp, Homo sapien
tgctcggaagggcagactcctccat

SEQ ID NO: 3981560 - DNA, 25 bp, Homo sapien
tgagctgctgtgctcggaagggcag

SEQ ID NO: 3981561 - DNA, 25 bp, Homo sapien
tcccagcgctgtcgaaggctgagct

SEQ ID NO: 3981562 - DNA, 25 bp, Homo sapien
tgagagactagagcggctggagtgc

SEQ ID NO: 3981563 - DNA, 25 bp, Homo sapien
ctgagagactagagcggctggagtg

SEQ ID NO: 3981564 - DNA, 25 bp, Homo sapien
cctgagagactagagcggctggagt

SEQ ID NO: 3981565 - DNA, 25 bp, Homo sapien
tcctgagagactagagcggctggag

SEQ ID NO: 3981566 - DNA, 25 bp, Homo sapien
gcctatgtgctatctgtcgccccag

SEQ ID NO: 3981567 - DNA, 25 bp, Homo sapien
ggtctacgctttctggtcgccacac

SEQ ID NO: 3981568 - DNA, 25 bp, Homo sapien
ctgggccccgggtctacgctttctg

SEQ ID NO: 3981569 - DNA, 25 bp, Homo sapien
cacacttcctgaagcacggcaacac

SEQ ID NO: 3981570 - DNA, 25 bp, Homo sapien
tctaggctacaagatctccacttcg

SEQ ID NO: 3981571 - DNA, 25 bp, Homo sapien
tagggaagcttgctcagacaggcag

SEQ ID NO: 3981572 - DNA, 25 bp, Homo sapien
ggagtgaccgtcattccagtgacca

SEQ ID NO: 3981573 - DNA, 25 bp, Homo sapien
ggtttgaccaacagcgtggacatgg

SEQ ID NO: 3981574 - DNA, 25 bp, Homo sapien
caaaagtgctttgaacgcgcgtgtc

SEQ ID NO: 3981575 - DNA, 25 bp, Homo sapien
cggacatggcttaccctctggaggg

SEQ ID NO: 3981576 - DNA, 25 bp, Homo sapien
gactcaacctgcagaagcgaggcgt

SEQ ID NO: 3981577 - DNA, 25 bp, Homo sapien
taagaagtgccacccacatattggg

SEQ ID NO: 3981578 - DNA, 25 bp, Homo sapien
ggcgcagctgtctgactcctcacag

SEQ ID NO: 3981579 - DNA, 25 bp, Homo sapien
ctggtgttgctgacgtggcgggcga

SEQ ID NO: 3981580 - DNA, 25 bp, Homo sapien
caatgtccaactcgccgtccaggga

SEQ ID NO: 3981581 - DNA, 25 bp, Homo sapien
gttcttctctatctgctcaatgtcc

SEQ ID NO: 3981582 - DNA, 25 bp, Homo sapien
gatttcaagggtacgcaggccagtt

SEQ ID NO: 3981583 - DNA, 25 bp, Homo sapien
tgtggcaagaccaatcaagtcccgg

SEQ ID NO: 3981584 - DNA, 25 bp, Homo sapien
tctagaagggagtggtcctgtgccc

SEQ ID NO: 3981585 - DNA, 25 bp, Homo sapien
gctgcggtgaaacaggaatgctcct

SEQ ID NO: 3981586 - DNA, 25 bp, Homo sapien
gccatggtgggattcgatgcagccc

SEQ ID NO: 3981587 - DNA, 25 bp, Homo sapien
gctctgcacgggaactcaggagagt

SEQ ID NO: 3981588 - DNA, 25 bp, Homo sapien
tggagacggcgacccctgcacaaca

SEQ ID NO: 3981589 - DNA, 25 bp, Homo sapien
ccattagactggagatgctggcccc

SEQ ID NO: 3981590 - DNA, 25 bp, Homo sapien
tcccaaagcgaacctgccgcttgtg

SEQ ID NO: 3981591 - DNA, 25 bp, Homo sapien
cttgtgaggtggaagccccagtgct

SEQ ID NO: 3981592 - DNA, 25 bp, Homo sapien
ccaggcctggacgatggatcggcaa

SEQ ID NO: 3981593 - DNA, 25 bp, Homo sapien
tcagccaccctcttgactggcctag

SEQ ID NO: 3981594 - DNA, 25 bp, Homo sapien
gaaaccttgagaattccgttgactc

SEQ ID NO: 3981595 - DNA, 25 bp, Homo sapien
aagccagcgaaaccttgagaattcc

SEQ ID NO: 3981596 - DNA, 25 bp, Homo sapien
gagaattccgttgactcaaaacagc

SEQ ID NO: 3981597 - DNA, 25 bp, Homo sapien
gaattccgttgactcaaaacagcca

SEQ ID NO: 3981598 - DNA, 25 bp, Homo sapien
acacggtggcgacgtttctgcacca

SEQ ID NO: 3981599 - DNA, 25 bp, Homo sapien
ggaggcccagagccacgcgtgtcct

SEQ ID NO: 3981600 - DNA, 25 bp, Homo sapien
ccacacggtggcgacgtttctgcac

SEQ ID NO: 3981601 - DNA, 25 bp, Homo sapien
gtggcgacgtttctgcaccaggccc

SEQ ID NO: 3981602 - DNA, 25 bp, Homo sapien
aaggtatgtccaaggctctcagagg

SEQ ID NO: 3981603 - DNA, 25 bp, Homo sapien
gcttctgagcaggactagcgatgca

SEQ ID NO: 3981604 - DNA, 25 bp, Homo sapien
tggtgggcactcgttcgcattcagc

SEQ ID NO: 3981605 - DNA, 25 bp, Homo sapien
tagcgatgcagaaggtatgtccaag

SEQ ID NO: 3981606 - DNA, 25 bp, Homo sapien
actgctgagcacggcctctgggctc

SEQ ID NO: 3981607 - DNA, 25 bp, Homo sapien
aggactgctgagcacggcctctggg

SEQ ID NO: 3981608 - DNA, 25 bp, Homo sapien
gactgctgagcacggcctctgggct

SEQ ID NO: 3981609 - DNA, 25 bp, Homo sapien
ccaccccagcagctcacaactctgt

SEQ ID NO: 3981610 - DNA, 25 bp, Homo sapien
ggtgctttcacagaacaacaggaag

SEQ ID NO: 3981611 - DNA, 25 bp, Homo sapien
ttagccgggtggcttttcacatggc

SEQ ID NO: 3981612 - DNA, 25 bp, Homo sapien
ttttgctgtacagaggttcaggtgg

SEQ ID NO: 3981613 - DNA, 25 bp, Homo sapien
accctgggattgctttgcacctgca

SEQ ID NO: 3981614 - DNA, 25 bp, Homo sapien
ctgtcttgtccacagaggcccacgt

SEQ ID NO: 3981615 - DNA, 25 bp, Homo sapien
tgtccacagaggcccacgttggcca

SEQ ID NO: 3981616 - DNA, 25 bp, Homo sapien
cttgtccacagaggcccacgttggc

SEQ ID NO: 3981617 - DNA, 25 bp, Homo sapien
gtcttgtccacagaggcccacgttg

SEQ ID NO: 3981618 - DNA, 25 bp, Homo sapien
tttggctccagccgccttgtgctgg

SEQ ID NO: 3981619 - DNA, 25 bp, Homo sapien
gatcttaacaaaggcacgggctcca

SEQ ID NO: 3981620 - DNA, 25 bp, Homo sapien
caaaagcaagccagtttcaagggtg

SEQ ID NO: 3981621 - DNA, 25 bp, Homo sapien
tgagaggctttacgggcaagctgcc

SEQ ID NO: 3981622 - DNA, 25 bp, Homo sapien
aacgcctctccggtggttgtgacaa

SEQ ID NO: 3981623 - DNA, 25 bp, Homo sapien
aagatgaggcacagcggtgcacgct

SEQ ID NO: 3981624 - DNA, 25 bp, Homo sapien
attgtgtccactggcagcggattcc

SEQ ID NO: 3981625 - DNA, 25 bp, Homo sapien
cgccatcccgaaccaggctaattaa

SEQ ID NO: 3981626 - DNA, 25 bp, Homo sapien
attcacggcccggagctttagagcc

SEQ ID NO: 3981627 - DNA, 25 bp, Homo sapien
ccctcggcataggatggggtagccg

SEQ ID NO: 3981628 - DNA, 25 bp, Homo sapien
tggagccctcggcataggatggggt

SEQ ID NO: 3981629 - DNA, 25 bp, Homo sapien
taggatggggtagccggggcaactc

SEQ ID NO: 3981630 - DNA, 25 bp, Homo sapien
ggcaactcgggccctccctggaggc

SEQ ID NO: 3981631 - DNA, 25 bp, Homo sapien
tccagggactgcttaatggcagagc

SEQ ID NO: 3981632 - DNA, 25 bp, Homo sapien
ggaggtctctcattccacgcagaag

SEQ ID NO: 3981633 - DNA, 25 bp, Homo sapien
gacgataccagcaggaaacacggga

SEQ ID NO: 3981634 - DNA, 25 bp, Homo sapien
cattcaggtgacaaggctagcttca

SEQ ID NO: 3981635 - DNA, 25 bp, Homo sapien
tgggcactttggcagcatcttggtt

SEQ ID NO: 3981636 - DNA, 25 bp, Homo sapien
tgctgttagccctgagcatgagaca

SEQ ID NO: 3981637 - DNA, 25 bp, Homo sapien
tgctccaaaggccttgcttgcagcc

SEQ ID NO: 3981638 - DNA, 25 bp, Homo sapien
gcttgcttttctacgcggccactga

SEQ ID NO: 3981639 - DNA, 25 bp, Homo sapien
gagtattcttcaccccttctaggag

SEQ ID NO: 3981640 - DNA, 25 bp, Homo sapien
gccatattcggtgctgccatacaca

SEQ ID NO: 3981641 - DNA, 25 bp, Homo sapien
atagggatcccgcttggcaaatgcg

SEQ ID NO: 3981642 - DNA, 25 bp, Homo sapien
caatgccacccaaggaggtttcagg

SEQ ID NO: 3981643 - DNA, 25 bp, Homo sapien
cagaacaggcccaatccgtccccag

SEQ ID NO: 3981644 - DNA, 25 bp, Homo sapien
ctctgcagaacaggcccaatccgtc

SEQ ID NO: 3981645 - DNA, 25 bp, Homo sapien
ctgcagaacaggcccaatccgtccc

SEQ ID NO: 3981646 - DNA, 25 bp, Homo sapien
gcagaacaggcccaatccgtcccca

SEQ ID NO: 3981647 - DNA, 25 bp, Homo sapien
gctgctcgatccaggactgttgcct

SEQ ID NO: 3981648 - DNA, 25 bp, Homo sapien
tcggctcctgatttctgactcaggt

SEQ ID NO: 3981649 - DNA, 25 bp, Homo sapien
ctgctgctcgatccaggactgttgc

SEQ ID NO: 3981650 - DNA, 25 bp, Homo sapien
tgttgcctctggctttctcggctcc

SEQ ID NO: 3981651 - DNA, 25 bp, Homo sapien
cttaataactggctactaggaattt

SEQ ID NO: 3981652 - DNA, 25 bp, Homo sapien
ttatatatgtggcttgagttctggt

SEQ ID NO: 3981653 - DNA, 25 bp, Homo sapien
tacttacatcgatgacatgtggaaa

SEQ ID NO: 3981654 - DNA, 25 bp, Homo sapien
taagactcagccaccgcctgtaaaa

SEQ ID NO: 3981655 - DNA, 25 bp, Homo sapien
tggtcagaggctgccctctgagcct

SEQ ID NO: 3981656 - DNA, 25 bp, Homo sapien
tggcactccacctgtgtggtcagag

SEQ ID NO: 3981657 - DNA, 25 bp, Homo sapien
caacagtcagcagcccacagctgtg

SEQ ID NO: 3981658 - DNA, 25 bp, Homo sapien
gtggcctggcactccacctgtgtgg

SEQ ID NO: 3981659 - DNA, 25 bp, Homo sapien
gccagcaagtacatggcctcggcac

SEQ ID NO: 3981660 - DNA, 25 bp, Homo sapien
agccagcaagtacatggcctcggca

SEQ ID NO: 3981661 - DNA, 25 bp, Homo sapien
aaaatggtacataaatgggctcctg

SEQ ID NO: 3981662 - DNA, 25 bp, Homo sapien
caaagggtttgttcttcgtgtggca

SEQ ID NO: 3981663 - DNA, 25 bp, Homo sapien
aattctctactgatgcagtgcctgg

SEQ ID NO: 3981664 - DNA, 25 bp, Homo sapien
gtaattccggatggctgataccaca

SEQ ID NO: 3981665 - DNA, 25 bp, Homo sapien
aaggcccggtcaggcaccagccgtg

SEQ ID NO: 3981666 - DNA, 25 bp, Homo sapien
cctgcatggtgtcgggaaaaggccc

SEQ ID NO: 3981667 - DNA, 25 bp, Homo sapien
ggaaaaggcccggtcaggcaccagc

SEQ ID NO: 3981668 - DNA, 25 bp, Homo sapien
cagcagcctgcatggtgtcgggaaa

SEQ ID NO: 3981669 - DNA, 25 bp, Homo sapien
gcagagcacctcagcgctgcagaga

SEQ ID NO: 3981670 - DNA, 25 bp, Homo sapien
cggcagagcacctcagcgctgcaga

SEQ ID NO: 3981671 - DNA, 25 bp, Homo sapien
tgcgccctcaggtgaggccttcttc

SEQ ID NO: 3981672 - DNA, 25 bp, Homo sapien
agcagcaccgctcaacaactcagct

SEQ ID NO: 3981673 - DNA, 25 bp, Homo sapien
tgcaatgggctttctagggctttcc

SEQ ID NO: 3981674 - DNA, 25 bp, Homo sapien
ctttcattgcaatgggctttctagg

SEQ ID NO: 3981675 - DNA, 25 bp, Homo sapien
tttcattgcaatgggctttctaggg

SEQ ID NO: 3981676 - DNA, 25 bp, Homo sapien
cattgcaatgggctttctagggctt

SEQ ID NO: 3981677 - DNA, 25 bp, Homo sapien
attcctctacttgccgtcagcacag

SEQ ID NO: 3981678 - DNA, 25 bp, Homo sapien
tcttcacactgtctgcagtctgtgt

SEQ ID NO: 3981679 - DNA, 25 bp, Homo sapien
tctctcactagatcttcacactgtc

SEQ ID NO: 3981680 - DNA, 25 bp, Homo sapien
ctgaattcctctacttgccgtcagc

SEQ ID NO: 3981681 - DNA, 25 bp, Homo sapien
gtcattgtgcaaaaggaaggctgca

SEQ ID NO: 3981682 - DNA, 25 bp, Homo sapien
tcaatggcagacattgtcattgtgc

SEQ ID NO: 3981683 - DNA, 25 bp, Homo sapien
ttgtcattgtgcaaaaggaaggctg

SEQ ID NO: 3981684 - DNA, 25 bp, Homo sapien
aatggcagacattgtcattgtgcaa

SEQ ID NO: 3981685 - DNA, 25 bp, Homo sapien
gcgcagggatcgcagcatagccagt

SEQ ID NO: 3981686 - DNA, 25 bp, Homo sapien
ggatcgcagcatagccagtcctctg

SEQ ID NO: 3981687 - DNA, 25 bp, Homo sapien
gcttgcgcagggatcgcagcatagc

SEQ ID NO: 3981688 - DNA, 25 bp, Homo sapien
gccgggcttgcgcagggatcgcagc

SEQ ID NO: 3981689 - DNA, 25 bp, Homo sapien
agatctgctctaggccccagtcggg

SEQ ID NO: 3981690 - DNA, 25 bp, Homo sapien
cctcaagatctgctctaggccccag

SEQ ID NO: 3981691 - DNA, 25 bp, Homo sapien
aagatctgctctaggccccagtcgg

SEQ ID NO: 3981692 - DNA, 25 bp, Homo sapien
tcaagatctgctctaggccccagtc

SEQ ID NO: 3981693 - DNA, 25 bp, Homo sapien
ggtctaactgaaaaggccctctgca

SEQ ID NO: 3981694 - DNA, 25 bp, Homo sapien
agctttaacccgaggctctcacaca

SEQ ID NO: 3981695 - DNA, 25 bp, Homo sapien
tctgcagctttaacccgaggctctc

SEQ ID NO: 3981696 - DNA, 25 bp, Homo sapien
aaggtctaactgaaaaggccctctg

SEQ ID NO: 3981697 - DNA, 25 bp, Homo sapien
acaggggcgtgtggccagatacttc

SEQ ID NO: 3981698 - DNA, 25 bp, Homo sapien
agagacgctcctgatgacagagtat

SEQ ID NO: 3981699 - DNA, 25 bp, Homo sapien
ataaagtccaagtgacaggggcgtg

SEQ ID NO: 3981700 - DNA, 25 bp, Homo sapien
acgctcctgatgacagagtattaac

SEQ ID NO: 3981701 - DNA, 25 bp, Homo sapien
ttctgaaactggcaatctatgcttg

SEQ ID NO: 3981702 - DNA, 25 bp, Homo sapien
tatgcttgtctaggacggcccagaa

SEQ ID NO: 3981703 - DNA, 25 bp, Homo sapien
aactggcaatctatgcttgtctagg

SEQ ID NO: 3981704 - DNA, 25 bp, Homo sapien
aatctatgcttgtctaggacggccc

SEQ ID NO: 3981705 - DNA, 25 bp, Homo sapien
tgatcagactggtcacagcgcaggc

SEQ ID NO: 3981706 - DNA, 25 bp, Homo sapien
ggcaactggacatctcatcggagaa

SEQ ID NO: 3981707 - DNA, 25 bp, Homo sapien
tagcagcgtctcttttccacgggag

SEQ ID NO: 3981708 - DNA, 25 bp, Homo sapien
cagatgctggtgctcggttggtcaa

SEQ ID NO: 3981709 - DNA, 25 bp, Homo sapien
ggtggtactccttcctcttgggcat

SEQ ID NO: 3981710 - DNA, 25 bp, Homo sapien
caggtaagtccaaccaggactgtgc

SEQ ID NO: 3981711 - DNA, 25 bp, Homo sapien
gaaccgtctgccctacctgggccat

SEQ ID NO: 3981712 - DNA, 25 bp, Homo sapien
ggactgtgccctgaaccgtctgccc

SEQ ID NO: 3981713 - DNA, 25 bp, Homo sapien
ttggcaaaggtgagtcttccttggc

SEQ ID NO: 3981714 - DNA, 25 bp, Homo sapien
tggattcggggacagcaacacagga

SEQ ID NO: 3981715 - DNA, 25 bp, Homo sapien
ggacagcaacacaggacaccaagtt

SEQ ID NO: 3981716 - DNA, 25 bp, Homo sapien
cacacaaggcacaaggaacaaggga

SEQ ID NO: 3981717 - DNA, 25 bp, Homo sapien
ctgggatggactgtaaaatggcagc

SEQ ID NO: 3981718 - DNA, 25 bp, Homo sapien
gacctggcccaaagatcacattcaa

SEQ ID NO: 3981719 - DNA, 25 bp, Homo sapien
ctagtacacgtgtgaccctgggtcc

SEQ ID NO: 3981720 - DNA, 25 bp, Homo sapien
tctcctcctcgcctgagtgctgagg

SEQ ID NO: 3981721 - DNA, 25 bp, Homo sapien
ttgtccctgcaatacaaatgcactg

SEQ ID NO: 3981722 - DNA, 25 bp, Homo sapien
cacttgccctgtttcaccaaaaaag

SEQ ID NO: 3981723 - DNA, 25 bp, Homo sapien
ctcccaccagtacaacggctccccg

SEQ ID NO: 3981724 - DNA, 25 bp, Homo sapien
ccagtacaacggctccccgcttctc

SEQ ID NO: 3981725 - DNA, 25 bp, Homo sapien
ccaccagtacaacggctccccgctt

SEQ ID NO: 3981726 - DNA, 25 bp, Homo sapien
tcccaccagtacaacggctccccgc

SEQ ID NO: 3981727 - DNA, 25 bp, Homo sapien
ctgagtccaactccgcttactgagg

SEQ ID NO: 3981728 - DNA, 25 bp, Homo sapien
ctgagggaccttgcagagggccacc

SEQ ID NO: 3981729 - DNA, 25 bp, Homo sapien
aactccgcttactgagggaccttgc

SEQ ID NO: 3981730 - DNA, 25 bp, Homo sapien
agggaccttgcagagggccacctca

SEQ ID NO: 3981731 - DNA, 25 bp, Homo sapien
gcacagtgctcaatctgacacatca

SEQ ID NO: 3981732 - DNA, 25 bp, Homo sapien
ccgtatgtgaatgatgccactggca

SEQ ID NO: 3981733 - DNA, 25 bp, Homo sapien
gcccagcatgtaaggagcctggcac

SEQ ID NO: 3981734 - DNA, 25 bp, Homo sapien
tagacctcagttctcccgtatgtga

SEQ ID NO: 3981735 - DNA, 25 bp, Homo sapien
gtgtaggtccttgactcatcttctt

SEQ ID NO: 3981736 - DNA, 25 bp, Homo sapien
agtgtaggtccttgactcatcttct

SEQ ID NO: 3981737 - DNA, 25 bp, Homo sapien
gtaggtccttgactcatcttctttg

SEQ ID NO: 3981738 - DNA, 25 bp, Homo sapien
tgtaggtccttgactcatcttcttt

SEQ ID NO: 3981739 - DNA, 25 bp, Homo sapien
gggttactaagggtccatgctgacc

SEQ ID NO: 3981740 - DNA, 25 bp, Homo sapien
acctctgcacaaggtcaacgccgtg

SEQ ID NO: 3981741 - DNA, 25 bp, Homo sapien
gtcaacgccgtgttcatcccacggg

SEQ ID NO: 3981742 - DNA, 25 bp, Homo sapien
ttactaagggtccatgctgaccaac

SEQ ID NO: 3981743 - DNA, 25 bp, Homo sapien
ctctcatctggagccaaggggagag

SEQ ID NO: 3981744 - DNA, 25 bp, Homo sapien
ctcatctggagccaaggggagagaa

SEQ ID NO: 3981745 - DNA, 25 bp, Homo sapien
tctcatctggagccaaggggagaga

SEQ ID NO: 3981746 - DNA, 25 bp, Homo sapien
agcacagattctaatctgtgtggcc

SEQ ID NO: 3981747 - DNA, 25 bp, Homo sapien
agattctaatctgtgtggccacaag

SEQ ID NO: 3981748 - DNA, 25 bp, Homo sapien
tgggcccggacaggccagtaacaaa

SEQ ID NO: 3981749 - DNA, 25 bp, Homo sapien
gttctgggcccggacaggccagtaa

SEQ ID NO: 3981750 - DNA, 25 bp, Homo sapien
acctgactgagggagggccaccaag

SEQ ID NO: 3981751 - DNA, 25 bp, Homo sapien
gcagaggcctgaatgcaggcccagg

SEQ ID NO: 3981752 - DNA, 25 bp, Homo sapien
gggccaccaagactggcgtccagac

SEQ ID NO: 3981753 - DNA, 25 bp, Homo sapien
aagactggcgtccagacaccaggca

SEQ ID NO: 3981754 - DNA, 25 bp, Homo sapien
cacatgcaatggagtcagctccccg

SEQ ID NO: 3981755 - DNA, 25 bp, Homo sapien
aatggagtcagctccccgggtgctg

SEQ ID NO: 3981756 - DNA, 25 bp, Homo sapien
agctccccgggtgctgaggctttca

SEQ ID NO: 3981757 - DNA, 25 bp, Homo sapien
acggctgaaggtcccacatgcaatg

SEQ ID NO: 3981758 - DNA, 25 bp, Homo sapien
ggtgagtacctcctggggaattgat

SEQ ID NO: 3981759 - DNA, 25 bp, Homo sapien
ccagggtgggtatcagccatcttca

SEQ ID NO: 3981760 - DNA, 25 bp, Homo sapien
agggtgggtatcagccatcttcact

SEQ ID NO: 3981761 - DNA, 25 bp, Homo sapien
ctcctggggaattgatgtcagcaga

SEQ ID NO: 3981762 - DNA, 25 bp, Homo sapien
tgggaaatggccaaatgtggtcaac

SEQ ID NO: 3981763 - DNA, 25 bp, Homo sapien
tggggcccttctgggaaatggccaa

SEQ ID NO: 3981764 - DNA, 25 bp, Homo sapien
gaaatggccaaatgtggtcaactcc

SEQ ID NO: 3981765 - DNA, 25 bp, Homo sapien
ctgggaaatggccaaatgtggtcaa

SEQ ID NO: 3981766 - DNA, 25 bp, Homo sapien
gaaatactccacagacgctttgctg

SEQ ID NO: 3981767 - DNA, 25 bp, Homo sapien
tgagcctccagagactcatgcagag

SEQ ID NO: 3981768 - DNA, 25 bp, Homo sapien
tactcggcaataagaaggaaccaac

SEQ ID NO: 3981769 - DNA, 25 bp, Homo sapien
agacacacgccacaacctggatgag

SEQ ID NO: 3981770 - DNA, 25 bp, Homo sapien
agtggccacagagctagatgccgcc

SEQ ID NO: 3981771 - DNA, 25 bp, Homo sapien
ggccacagagctagatgccgccttc

SEQ ID NO: 3981772 - DNA, 25 bp, Homo sapien
acagagctagatgccgccttctgct

SEQ ID NO: 3981773 - DNA, 25 bp, Homo sapien
cgagtggccacagagctagatgccg

SEQ ID NO: 3981774 - DNA, 25 bp, Homo sapien
cagtaggtgagaaagaggcagatga

SEQ ID NO: 3981775 - DNA, 25 bp, Homo sapien
ggcagatgaggatgccatgtttctg

SEQ ID NO: 3981776 - DNA, 25 bp, Homo sapien
gaggcagatgaggatgccatgtttc

SEQ ID NO: 3981777 - DNA, 25 bp, Homo sapien
aaagaggcagatgaggatgccatgt

SEQ ID NO: 3981778 - DNA, 25 bp, Homo sapien
taagacgttgagctctactagttcc

SEQ ID NO: 3981779 - DNA, 25 bp, Homo sapien
tccagtgaggtgtggcatgctagac

SEQ ID NO: 3981780 - DNA, 25 bp, Homo sapien
ctggaacacctctcacaaggcggct

SEQ ID NO: 3981781 - DNA, 25 bp, Homo sapien
ttccagggccctaagacaccagtgg

SEQ ID NO: 3981782 - DNA, 25 bp, Homo sapien
gcatagtggcacacgcccatagtcc

SEQ ID NO: 3981783 - DNA, 25 bp, Homo sapien
ggaggcccaggcgggggcatcacct

SEQ ID NO: 3981784 - DNA, 25 bp, Homo sapien
tgggcatagtggcacacgcccatag

SEQ ID NO: 3981785 - DNA, 25 bp, Homo sapien
gcccaggcgggggcatcacctgagg

SEQ ID NO: 3981786 - DNA, 25 bp, Homo sapien
taaaggtgactcagccatccagaaa

SEQ ID NO: 3981787 - DNA, 25 bp, Homo sapien
taagcaagtctcagggtacatcagc

SEQ ID NO: 3981788 - DNA, 25 bp, Homo sapien
tcactgtaagaagaaccctagggaa

SEQ ID NO: 3981789 - DNA, 25 bp, Homo sapien
gaatatggacttttcagtggcgcag

SEQ ID NO: 3981790 - DNA, 25 bp, Homo sapien
tcaactgaacaatctgaaggtgggc

SEQ ID NO: 3981791 - DNA, 25 bp, Homo sapien
ttcaatcaagggtcaggcgcctgct

SEQ ID NO: 3981792 - DNA, 25 bp, Homo sapien
tgtcaattaagcgtaaccaccacgg

SEQ ID NO: 3981793 - DNA, 25 bp, Homo sapien
ttttaaaagagctccgcagcgtccc

SEQ ID NO: 3981794 - DNA, 25 bp, Homo sapien
taagcagcacaagacgcttgcctgg

SEQ ID NO: 3981795 - DNA, 25 bp, Homo sapien
catcttttaaacgagtccaggatct

SEQ ID NO: 3981796 - DNA, 25 bp, Homo sapien
tgttgaacaaccgtcagcctggctc

SEQ ID NO: 3981797 - DNA, 25 bp, Homo sapien
ctgggaacacatatgctagcatgtc

SEQ ID NO: 3981798 - DNA, 25 bp, Homo sapien
ttcctaacaccaccgagtccggaga

SEQ ID NO: 3981799 - DNA, 25 bp, Homo sapien
agacccggaatgcaagccattccgg

SEQ ID NO: 3981800 - DNA, 25 bp, Homo sapien
tgtaccgtatggaagactcggagtg

SEQ ID NO: 3981801 - DNA, 25 bp, Homo sapien
cggcgaaggcgacggcacaaatgcc

SEQ ID NO: 3981802 - DNA, 25 bp, Homo sapien
attcatcaaacgctgcaaagagctt

SEQ ID NO: 3981803 - DNA, 25 bp, Homo sapien
cccattcatcaaacgctgcaaagag

SEQ ID NO: 3981804 - DNA, 25 bp, Homo sapien
tcatcaaacgctgcaaagagctttt

SEQ ID NO: 3981805 - DNA, 25 bp, Homo sapien
atcccattcatcaaacgctgcaaag

SEQ ID NO: 3981806 - DNA, 25 bp, Homo sapien
tacgtgttaatgagcccgggcggtc

SEQ ID NO: 3981807 - DNA, 25 bp, Homo sapien
catcgtcctaagtacagtacgtgtt

SEQ ID NO: 3981808 - DNA, 25 bp, Homo sapien
gcccgggcggtcagatggaaggagc

SEQ ID NO: 3981809 - DNA, 25 bp, Homo sapien
taagtacagtacgtgttaatgagcc

SEQ ID NO: 3981810 - DNA, 25 bp, Homo sapien
tgtccgcgcggttcgtcgctgctgc

SEQ ID NO: 3981811 - DNA, 25 bp, Homo sapien
cccggcccgtactacaagcattgtt

SEQ ID NO: 3981812 - DNA, 25 bp, Homo sapien
cattgttccccaagtccgaaaatgg

SEQ ID NO: 3981813 - DNA, 25 bp, Homo sapien
cgggcaaacctgtccgcgcggttcg

SEQ ID NO: 3981814 - DNA, 25 bp, Homo sapien
gggtggcgggtgcaaacttccgcga

SEQ ID NO: 3981815 - DNA, 25 bp, Homo sapien
gcgggtgcaaacttccgcgaacaaa

SEQ ID NO: 3981816 - DNA, 25 bp, Homo sapien
tgcaaacttccgcgaacaaaagagt

SEQ ID NO: 3981817 - DNA, 25 bp, Homo sapien
tggcgggtgcaaacttccgcgaaca

SEQ ID NO: 3981818 - DNA, 25 bp, Homo sapien
gcgctttgtacgagcgactcccggg

SEQ ID NO: 3981819 - DNA, 25 bp, Homo sapien
cctgaagtgtttgcaactcgtccct

SEQ ID NO: 3981820 - DNA, 25 bp, Homo sapien
gctgcgtgaactcggcccggcgctt

SEQ ID NO: 3981821 - DNA, 25 bp, Homo sapien
gaggaggaaatcgacttgtcacttc

SEQ ID NO: 3981822 - DNA, 25 bp, Homo sapien
taacctgattaagccggagaacacc

SEQ ID NO: 3981823 - DNA, 25 bp, Homo sapien
taaaaaacaagatgcagggtcccag

SEQ ID NO: 3981824 - DNA, 25 bp, Homo sapien
aagagtcagtgtttccctaaagcca

SEQ ID NO: 3981825 - DNA, 25 bp, Homo sapien
tcaagaccaatatatgacggcccgg

SEQ ID NO: 3981826 - DNA, 25 bp, Homo sapien
cacgtgtattcacccctttatttgg

SEQ ID NO: 3981827 - DNA, 25 bp, Homo sapien
tatgcagatgcacgtgtattcaccc

SEQ ID NO: 3981828 - DNA, 25 bp, Homo sapien
ttgtcacaacccttgtattaaaagc

SEQ ID NO: 3981829 - DNA, 25 bp, Homo sapien
tgcctctttgtcacaacccttgtat

SEQ ID NO: 3981830 - DNA, 25 bp, Homo sapien
aactgactgtctagcaccattgagg

SEQ ID NO: 3981831 - DNA, 25 bp, Homo sapien
tgagcctaagtcctgaacacaaacc

SEQ ID NO: 3981832 - DNA, 25 bp, Homo sapien
tgagatcagcgcatgtgaagccaca

SEQ ID NO: 3981833 - DNA, 25 bp, Homo sapien
cattgaggtacgaaagcatgccagc

SEQ ID NO: 3981834 - DNA, 25 bp, Homo sapien
ataagcagttacagagacaaactga

SEQ ID NO: 3981835 - DNA, 25 bp, Homo sapien
gggaaataagcagttacagagacaa

SEQ ID NO: 3981836 - DNA, 25 bp, Homo sapien
taagcagttacagagacaaactgac

SEQ ID NO: 3981837 - DNA, 25 bp, Homo sapien
ggggaaataagcagttacagagaca

SEQ ID NO: 3981838 - DNA, 25 bp, Homo sapien
caaattacctgctgttataaaatga

SEQ ID NO: 3981839 - DNA, 25 bp, Homo sapien
caggataccttagctcactaactga

SEQ ID NO: 3981840 - DNA, 25 bp, Homo sapien
gatctcacttctgctacataatgtc

SEQ ID NO: 3981841 - DNA, 25 bp, Homo sapien
gaagacagcttatttcgtagtgagc

SEQ ID NO: 3981842 - DNA, 25 bp, Homo sapien
tgggcctaaactatagtgacagctc

SEQ ID NO: 3981843 - DNA, 25 bp, Homo sapien
tgcaaatactttagggctcaactga

SEQ ID NO: 3981844 - DNA, 25 bp, Homo sapien
tacccgtcgcttttcagagttccat

SEQ ID NO: 3981845 - DNA, 25 bp, Homo sapien
gaatgatcgttcaacaacactccag

SEQ ID NO: 3981846 - DNA, 25 bp, Homo sapien
ttcttctatggacatctctgtttcc

SEQ ID NO: 3981847 - DNA, 25 bp, Homo sapien
cttcttctatggacatctctgtttc

SEQ ID NO: 3981848 - DNA, 25 bp, Homo sapien
tcaggctgccaagagtgatatcagg

SEQ ID NO: 3981849 - DNA, 25 bp, Homo sapien
tcaggaacctggtgacacttgctgg

SEQ ID NO: 3981850 - DNA, 25 bp, Homo sapien
gctccacagagaaatcgcgtttgca

SEQ ID NO: 3981851 - DNA, 25 bp, Homo sapien
gcagcaattccgtgaaggctccaca

SEQ ID NO: 3981852 - DNA, 25 bp, Homo sapien
tatcaactttaccaaggcacaaaaa

SEQ ID NO: 3981853 - DNA, 25 bp, Homo sapien
tttgcttattattctgatgctggaa

SEQ ID NO: 3981854 - DNA, 25 bp, Homo sapien
cataaatagttatcaactttaccaa

SEQ ID NO: 3981855 - DNA, 25 bp, Homo sapien
ataaccgccatccaacacaaaatag

SEQ ID NO: 3981856 - DNA, 25 bp, Homo sapien
tccagtatactctattcaacatgtg

SEQ ID NO: 3981857 - DNA, 25 bp, Homo sapien
tcttgattgatctctaaaacccaac

SEQ ID NO: 3981858 - DNA, 25 bp, Homo sapien
cccaaccacttagatgctcattatt

SEQ ID NO: 3981859 - DNA, 25 bp, Homo sapien
caacatgtgcatcctgtgtacttac

SEQ ID NO: 3981860 - DNA, 25 bp, Homo sapien
ctttgctgtgtagattctgtgtagc

SEQ ID NO: 3981861 - DNA, 25 bp, Homo sapien
tgcacaaggattttctgtgtcaggt

SEQ ID NO: 3981862 - DNA, 25 bp, Homo sapien
taagcatttatttgcacaaggattt

SEQ ID NO: 3981863 - DNA, 25 bp, Homo sapien
tgtgtcaggttaactttgctgtgta

SEQ ID NO: 3981864 - DNA, 25 bp, Homo sapien
tgaattcgtccaagaaaaagtctca

SEQ ID NO: 3981865 - DNA, 25 bp, Homo sapien
ctgaattcgtccaagaaaaagtctc

SEQ ID NO: 3981866 - DNA, 25 bp, Homo sapien
gaattcgtccaagaaaaagtctcac

SEQ ID NO: 3981867 - DNA, 25 bp, Homo sapien
gctgaacttgggtgttggtagctct

SEQ ID NO: 3981868 - DNA, 25 bp, Homo sapien
ttgggtgttggtagctcttcgagaa

SEQ ID NO: 3981869 - DNA, 25 bp, Homo sapien
tggtagctcttcgagaagttcaaat

SEQ ID NO: 3981870 - DNA, 25 bp, Homo sapien
caaagctgaacttgggtgttggtag

SEQ ID NO: 3981871 - DNA, 25 bp, Homo sapien
aattatccaggcatgatgatgtgtg

SEQ ID NO: 3981872 - DNA, 25 bp, Homo sapien
taaaatgccaacgagggcctggcat

SEQ ID NO: 3981873 - DNA, 25 bp, Homo sapien
ttatccaggcatgatgatgtgtgcc

SEQ ID NO: 3981874 - DNA, 25 bp, Homo sapien
agggcctggcatggtataatcccag

SEQ ID NO: 3981875 - DNA, 25 bp, Homo sapien
gctgaagtggaaaagatcgcttgag

SEQ ID NO: 3981876 - DNA, 25 bp, Homo sapien
cccaggaagtcaaggctgcagtgag

SEQ ID NO: 3981877 - DNA, 25 bp, Homo sapien
caaaatcctgccactgtactccaac

SEQ ID NO: 3981878 - DNA, 25 bp, Homo sapien
aggctgaagtggaaaagatcgcttg

SEQ ID NO: 3981879 - DNA, 25 bp, Homo sapien
gaattcatttagcaactcttccttg

SEQ ID NO: 3981880 - DNA, 25 bp, Homo sapien
cttcactgaattcatttagcaactc

SEQ ID NO: 3981881 - DNA, 25 bp, Homo sapien
attcatttagcaactcttccttggt

SEQ ID NO: 3981882 - DNA, 25 bp, Homo sapien
cactgaattcatttagcaactcttc

SEQ ID NO: 3981883 - DNA, 25 bp, Homo sapien
attaaggcttatggcatcaaaagtc

SEQ ID NO: 3981884 - DNA, 25 bp, Homo sapien
cattgtcaggattaaggcttatggc

SEQ ID NO: 3981885 - DNA, 25 bp, Homo sapien
tctcaattgcattgtcaggattaag

SEQ ID NO: 3981886 - DNA, 25 bp, Homo sapien
caggattaaggcttatggcatcaaa

SEQ ID NO: 3981887 - DNA, 25 bp, Homo sapien
ctttgtcaatacaaatatgaaatcc

SEQ ID NO: 3981888 - DNA, 25 bp, Homo sapien
caatacaaatatgaaatccagacag

SEQ ID NO: 3981889 - DNA, 25 bp, Homo sapien
tgtcaatacaaatatgaaatccaga

SEQ ID NO: 3981890 - DNA, 25 bp, Homo sapien
ttgtcaatacaaatatgaaatccag

SEQ ID NO: 3981891 - DNA, 25 bp, Homo sapien
ctgtgtggagagattcaaaaagtct

SEQ ID NO: 3981892 - DNA, 25 bp, Homo sapien
tgtggagagattcaaaaagtcttct

SEQ ID NO: 3981893 - DNA, 25 bp, Homo sapien
gtgtggagagattcaaaaagtcttc

SEQ ID NO: 3981894 - DNA, 25 bp, Homo sapien
tggagagattcaaaaagtcttctac

SEQ ID NO: 3981895 - DNA, 25 bp, Homo sapien
catattttcaactttatagctaact

SEQ ID NO: 3981896 - DNA, 25 bp, Homo sapien
aaaggacccattaattataatggca

SEQ ID NO: 3981897 - DNA, 25 bp, Homo sapien
aatgtaagtgacaacctgtaaaagg

SEQ ID NO: 3981898 - DNA, 25 bp, Homo sapien
aactttatagctaacttttatgagc

SEQ ID NO: 3981899 - DNA, 25 bp, Homo sapien
gatcatgaggtcaggagatcaagac

SEQ ID NO: 3981900 - DNA, 25 bp, Homo sapien
acacttagggaggccaaggcagacg

SEQ ID NO: 3981901 - DNA, 25 bp, Homo sapien
ctaacacggtgaaaccctgtctcta

SEQ ID NO: 3981902 - DNA, 25 bp, Homo sapien
catcctggctaacacggtgaaaccc

SEQ ID NO: 3981903 - DNA, 25 bp, Homo sapien
tggtcgtccaccataagaagcaact

SEQ ID NO: 3981904 - DNA, 25 bp, Homo sapien
tagcaactcagttacaccttctggc

SEQ ID NO: 3981905 - DNA, 25 bp, Homo sapien
ggccttgcctcaataaggatgcctg

SEQ ID NO: 3981906 - DNA, 25 bp, Homo sapien
gaacatccttcgatattggaggcaa

SEQ ID NO: 3981907 - DNA, 25 bp, Homo sapien
aattaagctcaccatcttacgtggg

SEQ ID NO: 3981908 - DNA, 25 bp, Homo sapien
caatgatcatgaatcaccataacag

SEQ ID NO: 3981909 - DNA, 25 bp, Homo sapien
gaagataggagaccagccagtaggt

SEQ ID NO: 3981910 - DNA, 25 bp, Homo sapien
catctcacagatcataggacacaaa

SEQ ID NO: 3981911 - DNA, 25 bp, Homo sapien
ggagagtaatcaattccagtaatat

SEQ ID NO: 3981912 - DNA, 25 bp, Homo sapien
agctgaattgcagaaggagagtaat

SEQ ID NO: 3981913 - DNA, 25 bp, Homo sapien
cagaaggagagtaatcaattccagt

SEQ ID NO: 3981914 - DNA, 25 bp, Homo sapien
ttccagtaatattagagaaaccaaa

SEQ ID NO: 3981915 - DNA, 25 bp, Homo sapien
taatattcctttaggactggtgatg

SEQ ID NO: 3981916 - DNA, 25 bp, Homo sapien
ttataatattcctttaggactggtg

SEQ ID NO: 3981917 - DNA, 25 bp, Homo sapien
tataatattcctttaggactggtga

SEQ ID NO: 3981918 - DNA, 25 bp, Homo sapien
aatattcctttaggactggtgatgt

SEQ ID NO: 3981919 - DNA, 25 bp, Homo sapien
ggctgtgtagtgtctatggcaaaag

SEQ ID NO: 3981920 - DNA, 25 bp, Homo sapien
gtgggcaggtatcagtatccccaag

SEQ ID NO: 3981921 - DNA, 25 bp, Homo sapien
ggaagcttctggtctttacacaccc

SEQ ID NO: 3981922 - DNA, 25 bp, Homo sapien
gctagccattaacccatctaggctg

SEQ ID NO: 3981923 - DNA, 25 bp, Homo sapien
ttttagctgtatccctccttattcc

SEQ ID NO: 3981924 - DNA, 25 bp, Homo sapien
cccttttagctgtatccctccttat

SEQ ID NO: 3981925 - DNA, 25 bp, Homo sapien
acaggtagattgctccctttatttt

SEQ ID NO: 3981926 - DNA, 25 bp, Homo sapien
cacccttttagctgtatccctcctt

SEQ ID NO: 3981927 - DNA, 25 bp, Homo sapien
gcaatttcactcctaagtaaatacc

SEQ ID NO: 3981928 - DNA, 25 bp, Homo sapien
tacaggtgcacttgccaccaaccaa

SEQ ID NO: 3981929 - DNA, 25 bp, Homo sapien
tcactcctaagtaaatacccaagag

SEQ ID NO: 3981930 - DNA, 25 bp, Homo sapien
gcttaactggcgtatgacccagcaa

SEQ ID NO: 3981931 - DNA, 25 bp, Homo sapien
aggtctaaatgtaaaaggtaggctg

SEQ ID NO: 3981932 - DNA, 25 bp, Homo sapien
cggtggctcacccctgcacccccag

SEQ ID NO: 3981933 - DNA, 25 bp, Homo sapien
gtggctcacccctgcacccccagca

SEQ ID NO: 3981934 - DNA, 25 bp, Homo sapien
ctaaatgtaaaaggtaggctgggcg

SEQ ID NO: 3981935 - DNA, 25 bp, Homo sapien
cgtggtgttgcgctcctgtagcccc

SEQ ID NO: 3981936 - DNA, 25 bp, Homo sapien
ggcgtggtgttgcgctcctgtagcc

SEQ ID NO: 3981937 - DNA, 25 bp, Homo sapien
aggcgtggtgttgcgctcctgtagc

SEQ ID NO: 3981938 - DNA, 25 bp, Homo sapien
caagcactgaagcatccagtggaat

SEQ ID NO: 3981939 - DNA, 25 bp, Homo sapien
ccttattagtcgattcatactctct

SEQ ID NO: 3981940 - DNA, 25 bp, Homo sapien
gtttctgcatccaccttattagtcg

SEQ ID NO: 3981941 - DNA, 25 bp, Homo sapien
tagtcgattcatactctcttctcca

SEQ ID NO: 3981942 - DNA, 25 bp, Homo sapien
gatttcacctgtatctccatattct

SEQ ID NO: 3981943 - DNA, 25 bp, Homo sapien
ttctcggaaagtttgcagttctctc

SEQ ID NO: 3981944 - DNA, 25 bp, Homo sapien
cacctgtatctccatattctcggaa

SEQ ID NO: 3981945 - DNA, 25 bp, Homo sapien
tccatattctcggaaagtttgcagt

SEQ ID NO: 3981946 - DNA, 25 bp, Homo sapien
tcagatcgctttctttcaccccaag

SEQ ID NO: 3981947 - DNA, 25 bp, Homo sapien
gcctcgggtcatccgctattcccac

SEQ ID NO: 3981948 - DNA, 25 bp, Homo sapien
ctgtttgaggtcagatcgctttctt

SEQ ID NO: 3981949 - DNA, 25 bp, Homo sapien
taataattcctgagcgtctgtttga

SEQ ID NO: 3981950 - DNA, 25 bp, Homo sapien
tgcccttgtccgaccgcgccgccac

SEQ ID NO: 3981951 - DNA, 25 bp, Homo sapien
ggactgcccttgtccgaccgcgccg

SEQ ID NO: 3981952 - DNA, 25 bp, Homo sapien
ctgcccttgtccgaccgcgccgcca

SEQ ID NO: 3981953 - DNA, 25 bp, Homo sapien
ccgggactgcccttgtccgaccgcg

SEQ ID NO: 3981954 - DNA, 25 bp, Homo sapien
tcctggacggccgttggggccgcca

SEQ ID NO: 3981955 - DNA, 25 bp, Homo sapien
cctggacggccgttggggccgccat

SEQ ID NO: 3981956 - DNA, 25 bp, Homo sapien
caagttcatttcgatctgcagcttt

SEQ ID NO: 3981957 - DNA, 25 bp, Homo sapien
aagttcatttcgatctgcagctttt

SEQ ID NO: 3981958 - DNA, 25 bp, Homo sapien
ctgtcagttaaggtgtcctccaagt

SEQ ID NO: 3981959 - DNA, 25 bp, Homo sapien
agataactctacctgcagaccaacc

SEQ ID NO: 3981960 - DNA, 25 bp, Homo sapien
ttagtctgtaaccataaacaatcaa

SEQ ID NO: 3981961 - DNA, 25 bp, Homo sapien
aattgagataactctacctgcagac

SEQ ID NO: 3981962 - DNA, 25 bp, Homo sapien
ttgagataactctacctgcagacca

SEQ ID NO: 3981963 - DNA, 25 bp, Homo sapien
aaaaaatagctgtagccaaaagagg

SEQ ID NO: 3981964 - DNA, 25 bp, Homo sapien
caaaatacttgtgctagacatgctc

SEQ ID NO: 3981965 - DNA, 25 bp, Homo sapien
taaaggagtaagtacatcgatgtcc

SEQ ID NO: 3981966 - DNA, 25 bp, Homo sapien
gaaaataagtagtcccaactgtgcc

SEQ ID NO: 3981967 - DNA, 25 bp, Homo sapien
gatggacaatgtcttggcaaaactc

SEQ ID NO: 3981968 - DNA, 25 bp, Homo sapien
gagcgatggacaatgtcttggcaaa

SEQ ID NO: 3981969 - DNA, 25 bp, Homo sapien
ggacaatgtcttggcaaaactcttc

SEQ ID NO: 3981970 - DNA, 25 bp, Homo sapien
ttaaagagcgatggacaatgtcttg

SEQ ID NO: 3981971 - DNA, 25 bp, Homo sapien
cctagcctgttacattgcattttct

SEQ ID NO: 3981972 - DNA, 25 bp, Homo sapien
cgcacctagcctgttacattgcatt

SEQ ID NO: 3981973 - DNA, 25 bp, Homo sapien
cacctagcctgttacattgcatttt

SEQ ID NO: 3981974 - DNA, 25 bp, Homo sapien
accgcacctagcctgttacattgca

SEQ ID NO: 3981975 - DNA, 25 bp, Homo sapien
taaggcagccataagaaggtcggat

SEQ ID NO: 3981976 - DNA, 25 bp, Homo sapien
gctaaacgccctttggcagtagtga

SEQ ID NO: 3981977 - DNA, 25 bp, Homo sapien
gaacctgaggtatccaactgctaaa

SEQ ID NO: 3981978 - DNA, 25 bp, Homo sapien
taagtaatgttgctctgggcagaca

SEQ ID NO: 3981979 - DNA, 25 bp, Homo sapien
gctgacgtcaccctgtgtcgaccag

SEQ ID NO: 3981980 - DNA, 25 bp, Homo sapien
agcccggaaagaggcggtcgctcat

SEQ ID NO: 3981981 - DNA, 25 bp, Homo sapien
agagaagaggcaaagcgcgcgtcca

SEQ ID NO: 3981982 - DNA, 25 bp, Homo sapien
ttaacttaaaactctggcgcatctg

SEQ ID NO: 3981983 - DNA, 25 bp, Homo sapien
ttttctgtaactccgtagactatcg

SEQ ID NO: 3981984 - DNA, 25 bp, Homo sapien
taaatctaatgtgcaaaaataccgt

SEQ ID NO: 3981985 - DNA, 25 bp, Homo sapien
agcgccgccccatcttaccagtatt

SEQ ID NO: 3981986 - DNA, 25 bp, Homo sapien
agtcagttgattacccttttctgta

SEQ ID NO: 3981987 - DNA, 25 bp, Homo sapien
ccccctggggttcacgccatcctct

SEQ ID NO: 3981988 - DNA, 25 bp, Homo sapien
cccctggggttcacgccatcctctt

SEQ ID NO: 3981989 - DNA, 25 bp, Homo sapien
ccctggggttcacgccatcctcttg

SEQ ID NO: 3981990 - DNA, 25 bp, Homo sapien
gggacttgtttaggaggtagtatca

SEQ ID NO: 3981991 - DNA, 25 bp, Homo sapien
gcagtaatccaagtgacaaataatg

SEQ ID NO: 3981992 - DNA, 25 bp, Homo sapien
gggagtctggaatgaagcaaacttt

SEQ ID NO: 3981993 - DNA, 25 bp, Homo sapien
tagtatcagtggtagctagctaatc

SEQ ID NO: 3981994 - DNA, 25 bp, Homo sapien
ccttgcagttactaaacaacattcc

SEQ ID NO: 3981995 - DNA, 25 bp, Homo sapien
atgaattttaccttgcagttactaa

SEQ ID NO: 3981996 - DNA, 25 bp, Homo sapien
gtactcaaatgatactccttccttg

SEQ ID NO: 3981997 - DNA, 25 bp, Homo sapien
tgagcacctagccactcttcaatga

SEQ ID NO: 3981998 - DNA, 25 bp, Homo sapien
gtatttaggaaaagtggccagtgtc

SEQ ID NO: 3981999 - DNA, 25 bp, Homo sapien
aaaaataggtgttgggatgatactg

SEQ ID NO: 3982000 - DNA, 25 bp, Homo sapien
caaagcttctatactctgcctagga

SEQ ID NO: 3982001 - DNA, 25 bp, Homo sapien
tgttagcccattgttgaatcctaga

SEQ ID NO: 3982002 - DNA, 25 bp, Homo sapien
caagtcagtggatctcaggataaga

SEQ ID NO: 3982003 - DNA, 25 bp, Homo sapien
gacggttcttaacctcacagtgaag

SEQ ID NO: 3982004 - DNA, 25 bp, Homo sapien
tactacttttgactagacgactagc

SEQ ID NO: 3982005 - DNA, 25 bp, Homo sapien
taggaatcagggcttcatttcaacc

SEQ ID NO: 3982006 - DNA, 25 bp, Homo sapien
caaaaccgttgcaaaatgtaatctt

SEQ ID NO: 3982007 - DNA, 25 bp, Homo sapien
agtttctactgttgaaatatgtgcc

SEQ ID NO: 3982008 - DNA, 25 bp, Homo sapien
gaaagggaggttgtacaataatcca

SEQ ID NO: 3982009 - DNA, 25 bp, Homo sapien
tatgtgcctggtgtaatgaaaggga

SEQ ID NO: 3982010 - DNA, 25 bp, Homo sapien
tcactcagatggtagaaaaatggct

SEQ ID NO: 3982011 - DNA, 25 bp, Homo sapien
gagataatgcctctgctgcgtgagg

SEQ ID NO: 3982012 - DNA, 25 bp, Homo sapien
tgtggtgctccaagcagagtcgaca

SEQ ID NO: 3982013 - DNA, 25 bp, Homo sapien
aaaaatggcttgaccgctaccgaca

SEQ ID NO: 3982014 - DNA, 25 bp, Homo sapien
tcagatctggaaacgttttgtaccg

SEQ ID NO: 3982015 - DNA, 25 bp, Homo sapien
cttgtgcccaatcaaatcttttagg

SEQ ID NO: 3982016 - DNA, 25 bp, Homo sapien
gagggttcttattccagattctggg

SEQ ID NO: 3982017 - DNA, 25 bp, Homo sapien
aataatttcgttcctcttgtgccca

SEQ ID NO: 3982018 - DNA, 25 bp, Homo sapien
tgcattgcagccagcgttgtccaga

SEQ ID NO: 3982019 - DNA, 25 bp, Homo sapien
tcagtgaccctgaccacatagtgtg

SEQ ID NO: 3982020 - DNA, 25 bp, Homo sapien
gattatacgtggctaggtgacagac

SEQ ID NO: 3982021 - DNA, 25 bp, Homo sapien
catagtgtgataggtgcagcattct

SEQ ID NO: 3982022 - DNA, 25 bp, Homo sapien
tcatcgtgtcccagacttcttcaca

SEQ ID NO: 3982023 - DNA, 25 bp, Homo sapien
tggcctccttttcacgcatatttca

SEQ ID NO: 3982024 - DNA, 25 bp, Homo sapien
cattgcctctttgatgagtggttac

SEQ ID NO: 3982025 - DNA, 25 bp, Homo sapien
gatattctgtgtgcgcttggcctcc

SEQ ID NO: 3982026 - DNA, 25 bp, Homo sapien
tgttggacttaattgacacttgcaa

SEQ ID NO: 3982027 - DNA, 25 bp, Homo sapien
aaggaagagctcagagggagtttca

SEQ ID NO: 3982028 - DNA, 25 bp, Homo sapien
cctggaattgttggacttaattgac

SEQ ID NO: 3982029 - DNA, 25 bp, Homo sapien
cagagggagtttcatacctggaatt

SEQ ID NO: 3982030 - DNA, 25 bp, Homo sapien
cacaggtaattaattgtcagcggtc

SEQ ID NO: 3982031 - DNA, 25 bp, Homo sapien
cctgtagtaacaagagctggaaatt

SEQ ID NO: 3982032 - DNA, 25 bp, Homo sapien
taactcatgggactatttgcaacac

SEQ ID NO: 3982033 - DNA, 25 bp, Homo sapien
gatttagcactaacccaccattgca

SEQ ID NO: 3982034 - DNA, 25 bp, Homo sapien
aactagttgatacaaatctaatagg

SEQ ID NO: 3982035 - DNA, 25 bp, Homo sapien
ctagttgatacaaatctaataggat

SEQ ID NO: 3982036 - DNA, 25 bp, Homo sapien
agtgggtttgttcatagacaatctg

SEQ ID NO: 3982037 - DNA, 25 bp, Homo sapien
gtttgttcatagacaatctgacaag

SEQ ID NO: 3982038 - DNA, 25 bp, Homo sapien
cagttcagatgtgagaggcgcttct

SEQ ID NO: 3982039 - DNA, 25 bp, Homo sapien
ctattagcaaaaagaggtcaccagc

SEQ ID NO: 3982040 - DNA, 25 bp, Homo sapien
gacttgcccgctcagtatgcagttc

SEQ ID NO: 3982041 - DNA, 25 bp, Homo sapien
ggcgcttctctgtacagcagcctgt

SEQ ID NO: 3982042 - DNA, 25 bp, Homo sapien
aacattgtagagcagggtgttcagg

SEQ ID NO: 3982043 - DNA, 25 bp, Homo sapien
caacattgtagagcagggtgttcag

SEQ ID NO: 3982044 - DNA, 25 bp, Homo sapien
ttgaactcttgatgcaacattgtag

SEQ ID NO: 3982045 - DNA, 25 bp, Homo sapien
tttgaactcttgatgcaacattgta

SEQ ID NO: 3982046 - DNA, 25 bp, Homo sapien
tggtcccaagtgtatctgagtgatt

SEQ ID NO: 3982047 - DNA, 25 bp, Homo sapien
gaatcagttacaaagaccatccgat

SEQ ID NO: 3982048 - DNA, 25 bp, Homo sapien
cgcttccgtaagcagacgacatctt

SEQ ID NO: 3982049 - DNA, 25 bp, Homo sapien
tcctagtctttcagcgcttccgtaa

SEQ ID NO: 3982050 - DNA, 25 bp, Homo sapien
ctattgctcgttggggtgctctcga

SEQ ID NO: 3982051 - DNA, 25 bp, Homo sapien
gccactgtcgggaggttgtgagtca

SEQ ID NO: 3982052 - DNA, 25 bp, Homo sapien
cacacccacgatgcctggcggatat

SEQ ID NO: 3982053 - DNA, 25 bp, Homo sapien
ccttccatggctgcaggaagtcctc

SEQ ID NO: 3982054 - DNA, 25 bp, Homo sapien
ggaagaagctgacggtctgctgcct

SEQ ID NO: 3982055 - DNA, 25 bp, Homo sapien
aatgggatcagtgcctttacacaag

SEQ ID NO: 3982056 - DNA, 25 bp, Homo sapien
gagtctagtcagtgctctggccctc

SEQ ID NO: 3982057 - DNA, 25 bp, Homo sapien
ctgccatatgaggatgtgggaagaa

SEQ ID NO: 3982058 - DNA, 25 bp, Homo sapien
gcatctgcgggaggttaagcttccg

SEQ ID NO: 3982059 - DNA, 25 bp, Homo sapien
ccacacgtgactgggaagccttctg

SEQ ID NO: 3982060 - DNA, 25 bp, Homo sapien
tctgaccctgacttagcatctgcgg

SEQ ID NO: 3982061 - DNA, 25 bp, Homo sapien
gaaaggcagttcctagcacctgtgg

SEQ ID NO: 3982062 - DNA, 25 bp, Homo sapien
tatgtggcaccattgagctcaggat

SEQ ID NO: 3982063 - DNA, 25 bp, Homo sapien
tgtggcaccattgagctcaggatga

SEQ ID NO: 3982064 - DNA, 25 bp, Homo sapien
ctgtatgtggcaccattgagctcag

SEQ ID NO: 3982065 - DNA, 25 bp, Homo sapien
gaattccttgttcacacaatttctt

SEQ ID NO: 3982066 - DNA, 25 bp, Homo sapien
gattcggggcatctttcaacggacc

SEQ ID NO: 3982067 - DNA, 25 bp, Homo sapien
tccagtgacgcctgctcactgtacc

SEQ ID NO: 3982068 - DNA, 25 bp, Homo sapien
agtgacgcctgctcactgtaccagg

SEQ ID NO: 3982069 - DNA, 25 bp, Homo sapien
tgacgcctgctcactgtaccaggca

SEQ ID NO: 3982070 - DNA, 25 bp, Homo sapien
tgactcatgcacgtcgagggctgcc

SEQ ID NO: 3982071 - DNA, 25 bp, Homo sapien
ggctctgactcatgcacgtcgaggg

SEQ ID NO: 3982072 - DNA, 25 bp, Homo sapien
ctgaagggctctgactcatgcacgt

SEQ ID NO: 3982073 - DNA, 25 bp, Homo sapien
aagggctctgactcatgcacgtcga

SEQ ID NO: 3982074 - DNA, 25 bp, Homo sapien
aagtgctaccacctttcgacagaag

SEQ ID NO: 3982075 - DNA, 25 bp, Homo sapien
tcttgtgcccacaagcaagtgctac

SEQ ID NO: 3982076 - DNA, 25 bp, Homo sapien
gctggcctctttaaaggttctggga

SEQ ID NO: 3982077 - DNA, 25 bp, Homo sapien
ccgttgctgctgatcctgagaggaa

SEQ ID NO: 3982078 - DNA, 25 bp, Homo sapien
tcgctctgatacagcaaatcctgca

SEQ ID NO: 3982079 - DNA, 25 bp, Homo sapien
attgcagtgcaaggagacgcagtcg

SEQ ID NO: 3982080 - DNA, 25 bp, Homo sapien
tgcaaggagacgcagtcgctctgat

SEQ ID NO: 3982081 - DNA, 25 bp, Homo sapien
tgttcgttgagattgcagtgcaagg

SEQ ID NO: 3982082 - DNA, 25 bp, Homo sapien
tgcacgcccagggaccgctcgatcc

SEQ ID NO: 3982083 - DNA, 25 bp, Homo sapien
cacgcccagggaccgctcgatccca

SEQ ID NO: 3982084 - DNA, 25 bp, Homo sapien
ctctgcacgcccagggaccgctcga

SEQ ID NO: 3982085 - DNA, 25 bp, Homo sapien
ccagggaccgctcgatcccatcctg

SEQ ID NO: 3982086 - DNA, 25 bp, Homo sapien
gggtcataaaatatgacgctgaatc

SEQ ID NO: 3982087 - DNA, 25 bp, Homo sapien
gtaggggtcataaaatatgacgctg

SEQ ID NO: 3982088 - DNA, 25 bp, Homo sapien
caagtaggggtcataaaatatgacg

SEQ ID NO: 3982089 - DNA, 25 bp, Homo sapien
taggggtcataaaatatgacgctga

SEQ ID NO: 3982090 - DNA, 25 bp, Homo sapien
actgcaaccgcctgccccgtgcgac

SEQ ID NO: 3982091 - DNA, 25 bp, Homo sapien
aggccttggctcgaactgcaaccgc

SEQ ID NO: 3982092 - DNA, 25 bp, Homo sapien
ttggctcgaactgcaaccgcctgcc

SEQ ID NO: 3982093 - DNA, 25 bp, Homo sapien
caaaggccttggctcgaactgcaac

SEQ ID NO: 3982094 - DNA, 25 bp, Homo sapien
tacagtctcgagaaaacagggcggc

SEQ ID NO: 3982095 - DNA, 25 bp, Homo sapien
cactggcaacatgaaactgaggacc

SEQ ID NO: 3982096 - DNA, 25 bp, Homo sapien
catctaaccgatggcctggctagga

SEQ ID NO: 3982097 - DNA, 25 bp, Homo sapien
caactagtatagcaaggcacgaacc

SEQ ID NO: 3982098 - DNA, 25 bp, Homo sapien
gatgtggcagatggtagagtccgct

SEQ ID NO: 3982099 - DNA, 25 bp, Homo sapien
caaagccaatgaggcccagcgtctc

SEQ ID NO: 3982100 - DNA, 25 bp, Homo sapien
ccacggctgcagacgggatgttgca

SEQ ID NO: 3982101 - DNA, 25 bp, Homo sapien
ggtagagtccgctgtctcttccacg

SEQ ID NO: 3982102 - DNA, 25 bp, Homo sapien
ggccttgagagtgacccgcttagca

SEQ ID NO: 3982103 - DNA, 25 bp, Homo sapien
caattttcattcctcgggcaggcta

SEQ ID NO: 3982104 - DNA, 25 bp, Homo sapien
aagaaaatctttggcggctgggaca

SEQ ID NO: 3982105 - DNA, 25 bp, Homo sapien
gcttcttcggctctactggacagga

SEQ ID NO: 3982106 - DNA, 25 bp, Homo sapien
ttgttccaacagaggggctcggaag

SEQ ID NO: 3982107 - DNA, 25 bp, Homo sapien
ggagtgtctttgttccaacagaggg

SEQ ID NO: 3982108 - DNA, 25 bp, Homo sapien
atcttctggagtgtctttgttccaa

SEQ ID NO: 3982109 - DNA, 25 bp, Homo sapien
agaggggctcggaaggacgccgtgg

SEQ ID NO: 3982110 - DNA, 25 bp, Homo sapien
gaaggattcaactaagattctgacc

SEQ ID NO: 3982111 - DNA, 25 bp, Homo sapien
agtgcttccggtacctgggtgctgc

SEQ ID NO: 3982112 - DNA, 25 bp, Homo sapien
tccctgaaaacgtggccggtggtgc

SEQ ID NO: 3982113 - DNA, 25 bp, Homo sapien
actgcgtcctgacccctgtgagtgt

SEQ ID NO: 3982114 - DNA, 25 bp, Homo sapien
tgctacagccagaagcggctgctcc

SEQ ID NO: 3982115 - DNA, 25 bp, Homo sapien
cgcaaggtgctccacagcccggcct

SEQ ID NO: 3982116 - DNA, 25 bp, Homo sapien
acagagctccggacaactccaggca

SEQ ID NO: 3982117 - DNA, 25 bp, Homo sapien
ccttgctacagccagaagcggctgc

SEQ ID NO: 3982118 - DNA, 25 bp, Homo sapien
tggcgcccacggcttcgtttagaac

SEQ ID NO: 3982119 - DNA, 25 bp, Homo sapien
gttgtcatagccactgcctatccgc

SEQ ID NO: 3982120 - DNA, 25 bp, Homo sapien
tccacgttgtcatagccactgccta

SEQ ID NO: 3982121 - DNA, 25 bp, Homo sapien
tgtggtacatcatggcgcccacggc

SEQ ID NO: 3982122 - DNA, 25 bp, Homo sapien
ctccacagtgcagtcgcggccgtcc

SEQ ID NO: 3982123 - DNA, 25 bp, Homo sapien
ggtgaggagaaatggcgggtctggg

SEQ ID NO: 3982124 - DNA, 25 bp, Homo sapien
cagcgagagcctcagggcctctttt

SEQ ID NO: 3982125 - DNA, 25 bp, Homo sapien
gggcccgcccaggatgcagcgagag

SEQ ID NO: 3982126 - DNA, 25 bp, Homo sapien
gcttgcgccccgtgcacatacaggg

SEQ ID NO: 3982127 - DNA, 25 bp, Homo sapien
agcaggctccgaagacctcagagac

SEQ ID NO: 3982128 - DNA, 25 bp, Homo sapien
agctcatccgcgagatccgcaacag

SEQ ID NO: 3982129 - DNA, 25 bp, Homo sapien
cagcccacgacctgtatgagtggac

SEQ ID NO: 3982130 - DNA, 25 bp, Homo sapien
aggaagcgtgcagcacaaagctgga

SEQ ID NO: 3982131 - DNA, 25 bp, Homo sapien
gcaacagcaccgtcacctgacgagg

SEQ ID NO: 3982132 - DNA, 25 bp, Homo sapien
tctggcccctacttgaggtctgagc

SEQ ID NO: 3982133 - DNA, 25 bp, Homo sapien
aggtctgagcgcacaaccctgtggg

SEQ ID NO: 3982134 - DNA, 25 bp, Homo sapien
tctgtttcagtacactcttctggcc

SEQ ID NO: 3982135 - DNA, 25 bp, Homo sapien
gtacactcttctggcccctacttga

SEQ ID NO: 3982136 - DNA, 25 bp, Homo sapien
gattataagaaatccaagctgttcg

SEQ ID NO: 3982137 - DNA, 25 bp, Homo sapien
gctgttcgttaaatggtagccacac

SEQ ID NO: 3982138 - DNA, 25 bp, Homo sapien
aggaaaaccacgctgggcgcaaggt

SEQ ID NO: 3982139 - DNA, 25 bp, Homo sapien
tgggaatccagagccgctgatgcgt

SEQ ID NO: 3982140 - DNA, 25 bp, Homo sapien
caggtccttcatggcaaggcgggaa

SEQ ID NO: 3982141 - DNA, 25 bp, Homo sapien
catgctgggaaaagatgccgggcac

SEQ ID NO: 3982142 - DNA, 25 bp, Homo sapien
aagccaacgggttctcatgctggga

SEQ ID NO: 3982143 - DNA, 25 bp, Homo sapien
tgtccaaggtctgaggctcgaatcc

SEQ ID NO: 3982144 - DNA, 25 bp, Homo sapien
gcagtacgtaatgagggcttccgaa

SEQ ID NO: 3982145 - DNA, 25 bp, Homo sapien
gatggaacacgaccctttcagggac

SEQ ID NO: 3982146 - DNA, 25 bp, Homo sapien
caaccacgaggtatgaggagacact

SEQ ID NO: 3982147 - DNA, 25 bp, Homo sapien
aatttgcgaggagaaagcccaaggc

SEQ ID NO: 3982148 - DNA, 25 bp, Homo sapien
gggttgccccatgaagtccctgcag

SEQ ID NO: 3982149 - DNA, 25 bp, Homo sapien
gagtcacagtagtggccttgcagga

SEQ ID NO: 3982150 - DNA, 25 bp, Homo sapien
tgcaggttgcagtcttagagctgac

SEQ ID NO: 3982151 - DNA, 25 bp, Homo sapien
gaccgagctatcacattcatgagaa

SEQ ID NO: 3982152 - DNA, 25 bp, Homo sapien
ctctgcataccccactcgtgtggcc

SEQ ID NO: 3982153 - DNA, 25 bp, Homo sapien
tgcctctgcataccccactcgtgtg

SEQ ID NO: 3982154 - DNA, 25 bp, Homo sapien
gcctctgcataccccactcgtgtgg

SEQ ID NO: 3982155 - DNA, 25 bp, Homo sapien
tctgcataccccactcgtgtggccg

SEQ ID NO: 3982156 - DNA, 25 bp, Homo sapien
ggttcaactcaacaagctctggaca

SEQ ID NO: 3982157 - DNA, 25 bp, Homo sapien
gattgttcgatctatcaaccaggca

SEQ ID NO: 3982158 - DNA, 25 bp, Homo sapien
catttagaaggatggtcacggccac

SEQ ID NO: 3982159 - DNA, 25 bp, Homo sapien
aacacacagggagtcaagtttctgg

SEQ ID NO: 3982160 - DNA, 25 bp, Homo sapien
gcttgcagcacactctcgtttttcg

SEQ ID NO: 3982161 - DNA, 25 bp, Homo sapien
cagcacactctcgtttttcgagtgg

SEQ ID NO: 3982162 - DNA, 25 bp, Homo sapien
agaagcctcatgcttgcagcacact

SEQ ID NO: 3982163 - DNA, 25 bp, Homo sapien
tcatgcttgcagcacactctcgttt

SEQ ID NO: 3982164 - DNA, 25 bp, Homo sapien
actggcatcccacacaactgcattg

SEQ ID NO: 3982165 - DNA, 25 bp, Homo sapien
cacaactgcattgggggaccaggaa

SEQ ID NO: 3982166 - DNA, 25 bp, Homo sapien
aggcaccgtgttcatatctagctgg

SEQ ID NO: 3982167 - DNA, 25 bp, Homo sapien
agctggtattgcaggacgcgctccc

SEQ ID NO: 3982168 - DNA, 25 bp, Homo sapien
tcctccatggacagaatgaaatcca

SEQ ID NO: 3982169 - DNA, 25 bp, Homo sapien
cacacccacggggtcagaggaagtg

SEQ ID NO: 3982170 - DNA, 25 bp, Homo sapien
acagaatgaaatccacacccacggg

SEQ ID NO: 3982171 - DNA, 25 bp, Homo sapien
cagaggaagtgctgtgaaggcggca

SEQ ID NO: 3982172 - DNA, 25 bp, Homo sapien
gggtccccgcagcatacgccttcct

SEQ ID NO: 3982173 - DNA, 25 bp, Homo sapien
acgttgtcactctggactgcttggc

SEQ ID NO: 3982174 - DNA, 25 bp, Homo sapien
agcatacgccttcctcacgttgtca

SEQ ID NO: 3982175 - DNA, 25 bp, Homo sapien
gctggtgggccgcactggggtcccc

SEQ ID NO: 3982176 - DNA, 25 bp, Homo sapien
caaaaaggtagatcttattgtttca

SEQ ID NO: 3982177 - DNA, 25 bp, Homo sapien
gctattttcaaaaaggtagatctta

SEQ ID NO: 3982178 - DNA, 25 bp, Homo sapien
agatcttattgtttcatcctgattt

SEQ ID NO: 3982179 - DNA, 25 bp, Homo sapien
ctattttcaaaaaggtagatcttat

SEQ ID NO: 3982180 - DNA, 25 bp, Homo sapien
tctacaaccccgcacccccctgctc

SEQ ID NO: 3982181 - DNA, 25 bp, Homo sapien
gttctggtgcaagcatggtggacac

SEQ ID NO: 3982182 - DNA, 25 bp, Homo sapien
caccttctggtacggtgagtgaggc

SEQ ID NO: 3982183 - DNA, 25 bp, Homo sapien
tccatgggcaccgtgtatgccgtgg

SEQ ID NO: 3982184 - DNA, 25 bp, Homo sapien
tggacacgatgatgggtgcccctgt

SEQ ID NO: 3982185 - DNA, 25 bp, Homo sapien
ctgcagggggtacgtggggctcaga

SEQ ID NO: 3982186 - DNA, 25 bp, Homo sapien
ggttagtcaaggccacccctgcctg

SEQ ID NO: 3982187 - DNA, 25 bp, Homo sapien
cagggggtacgtggggctcagacgc

SEQ ID NO: 3982188 - DNA, 25 bp, Homo sapien
acccctgcctgcagggggtacgtgg

SEQ ID NO: 3982189 - DNA, 25 bp, Homo sapien
gaataggtggctgccgtctccagga

SEQ ID NO: 3982190 - DNA, 25 bp, Homo sapien
ggcagaataggtggctgccgtctcc

SEQ ID NO: 3982191 - DNA, 25 bp, Homo sapien
gtcagggcgcaaggggtgggagagc

SEQ ID NO: 3982192 - DNA, 25 bp, Homo sapien
tgggagagctgtacccggagttgga

SEQ ID NO: 3982193 - DNA, 25 bp, Homo sapien
gccgggtctccagctcggggggatg

SEQ ID NO: 3982194 - DNA, 25 bp, Homo sapien
gagggacggcgagccgggtctccag

SEQ ID NO: 3982195 - DNA, 25 bp, Homo sapien
tggagggacggcgagccgggtctcc

SEQ ID NO: 3982196 - DNA, 25 bp, Homo sapien
cgggtctccagctcggggggatgct

SEQ ID NO: 3982197 - DNA, 25 bp, Homo sapien
agccaagtcaccatggagcagttcg

SEQ ID NO: 3982198 - DNA, 25 bp, Homo sapien
catggagcagttcgcttcggtggct

SEQ ID NO: 3982199 - DNA, 25 bp, Homo sapien
agttcgcttcggtggctgaagctgc

SEQ ID NO: 3982200 - DNA, 25 bp, Homo sapien
tcaccatggagcagttcgcttcggt

SEQ ID NO: 3982201 - DNA, 25 bp, Homo sapien
tgcctccgcagctgcatttcggtcc

SEQ ID NO: 3982202 - DNA, 25 bp, Homo sapien
gcctccgcagctgcatttcggtcct

SEQ ID NO: 3982203 - DNA, 25 bp, Homo sapien
cctccgcagctgcatttcggtcctg

SEQ ID NO: 3982204 - DNA, 25 bp, Homo sapien
tccgcagctgcatttcggtcctgca

SEQ ID NO: 3982205 - DNA, 25 bp, Homo sapien
cctggcccaggttgggtgcgacaga

SEQ ID NO: 3982206 - DNA, 25 bp, Homo sapien
gcctggcccaggttgggtgcgacag

SEQ ID NO: 3982207 - DNA, 25 bp, Homo sapien
ctggcccaggttgggtgcgacagac

SEQ ID NO: 3982208 - DNA, 25 bp, Homo sapien
gacaggtcagcttcgtaagtctcgt

SEQ ID NO: 3982209 - DNA, 25 bp, Homo sapien
tcttggatgggatgctttcccgggc

SEQ ID NO: 3982210 - DNA, 25 bp, Homo sapien
ttgatatccgcgtcctccagggtag

SEQ ID NO: 3982211 - DNA, 25 bp, Homo sapien
taagtctcgtaagccatcttggatg

SEQ ID NO: 3982212 - DNA, 25 bp, Homo sapien
gggtctttcgctgatgtcgctgaag

SEQ ID NO: 3982213 - DNA, 25 bp, Homo sapien
tttcgctgatgtcgctgaagacctg

SEQ ID NO: 3982214 - DNA, 25 bp, Homo sapien
cacgtcggggccacctgtctggcag

SEQ ID NO: 3982215 - DNA, 25 bp, Homo sapien
tgaactggggtccacaaccaggcac

SEQ ID NO: 3982216 - DNA, 25 bp, Homo sapien
gtaggcaggcacctccgccccatac

SEQ ID NO: 3982217 - DNA, 25 bp, Homo sapien
gatcactgtagtactcccgtggcag

SEQ ID NO: 3982218 - DNA, 25 bp, Homo sapien
gaccggccttgcattggatcccatg

SEQ ID NO: 3982219 - DNA, 25 bp, Homo sapien
tgtgccatacgtcagggagcttctc

SEQ ID NO: 3982220 - DNA, 25 bp, Homo sapien
cactgagttataaacggcctcccgg

SEQ ID NO: 3982221 - DNA, 25 bp, Homo sapien
gaacgaccaatatttatatgcctgc

SEQ ID NO: 3982222 - DNA, 25 bp, Homo sapien
cgaccaatatttatatgcctgctgg

SEQ ID NO: 3982223 - DNA, 25 bp, Homo sapien
accaatatttatatgcctgctggga

SEQ ID NO: 3982224 - DNA, 25 bp, Homo sapien
ctgagaacgaccaatatttatatgc

SEQ ID NO: 3982225 - DNA, 25 bp, Homo sapien
gagaggtctgttccttacagctcag

SEQ ID NO: 3982226 - DNA, 25 bp, Homo sapien
tcactccccaacgatagccagagag

SEQ ID NO: 3982227 - DNA, 25 bp, Homo sapien
taagactcacggtaactttgcctca

SEQ ID NO: 3982228 - DNA, 25 bp, Homo sapien
tggctgtgtgctaacccttccgaga

SEQ ID NO: 3982229 - DNA, 25 bp, Homo sapien
tactgtgaaacacagatgggctcat

SEQ ID NO: 3982230 - DNA, 25 bp, Homo sapien
ttactgtgaaacacagatgggctca

SEQ ID NO: 3982231 - DNA, 25 bp, Homo sapien
tattactgtgaaacacagatgggct

SEQ ID NO: 3982232 - DNA, 25 bp, Homo sapien
cttattactgtgaaacacagatggg

SEQ ID NO: 3982233 - DNA, 25 bp, Homo sapien
tagaagaatgtttacccggtagcgc

SEQ ID NO: 3982234 - DNA, 25 bp, Homo sapien
caaggccttctcagggaatagctca

SEQ ID NO: 3982235 - DNA, 25 bp, Homo sapien
ggtaacacggttttctggcagacac

SEQ ID NO: 3982236 - DNA, 25 bp, Homo sapien
taatctaacgcaaagggtgggaggc

SEQ ID NO: 3982237 - DNA, 25 bp, Homo sapien
gacacccgggctgtaaatcaaactg

SEQ ID NO: 3982238 - DNA, 25 bp, Homo sapien
tgagcaatgctcctaatcagggctg

SEQ ID NO: 3982239 - DNA, 25 bp, Homo sapien
tagtagcaagcgagccaagtggtag

SEQ ID NO: 3982240 - DNA, 25 bp, Homo sapien
actcaatggtgatggacggctggcc

SEQ ID NO: 3982241 - DNA, 25 bp, Homo sapien
gtctcttgactttgtgcttatccac

SEQ ID NO: 3982242 - DNA, 25 bp, Homo sapien
attctgtccaatcgctgtctcttga

SEQ ID NO: 3982243 - DNA, 25 bp, Homo sapien
caaattctgtccaatcgctgtctct

SEQ ID NO: 3982244 - DNA, 25 bp, Homo sapien
tcacaaattctgtccaatcgctgtc

SEQ ID NO: 3982245 - DNA, 25 bp, Homo sapien
gaactttgcaactctcagatcaaaa

SEQ ID NO: 3982246 - DNA, 25 bp, Homo sapien
aaagcagtcctctaagaacttaggg

SEQ ID NO: 3982247 - DNA, 25 bp, Homo sapien
aactttgcaactctcagatcaaaag

SEQ ID NO: 3982248 - DNA, 25 bp, Homo sapien
actttgcaactctcagatcaaaagg

SEQ ID NO: 3982249 - DNA, 25 bp, Homo sapien
caccttcccgaggaagacacaaggg

SEQ ID NO: 3982250 - DNA, 25 bp, Homo sapien
ggttctctccgagggacctgttgag

SEQ ID NO: 3982251 - DNA, 25 bp, Homo sapien
tctgggttgggctccgttccccatg

SEQ ID NO: 3982252 - DNA, 25 bp, Homo sapien
gatcagagcatgtatccacaggcag

SEQ ID NO: 3982253 - DNA, 25 bp, Homo sapien
tctttggtcagctgaacgcaggcaa

SEQ ID NO: 3982254 - DNA, 25 bp, Homo sapien
tgtcgatcagtaaatgcctcagggt

SEQ ID NO: 3982255 - DNA, 25 bp, Homo sapien
caaactgcagtagagggacaatcca

SEQ ID NO: 3982256 - DNA, 25 bp, Homo sapien
tgtgaaactgccaccgccatgtggg

SEQ ID NO: 3982257 - DNA, 25 bp, Homo sapien
gagcatttgcgggaaggcccaagaa

SEQ ID NO: 3982258 - DNA, 25 bp, Homo sapien
gcaaagccggctaacaaattggtca

SEQ ID NO: 3982259 - DNA, 25 bp, Homo sapien
aaaatgccccgtatgcggtgattgc

SEQ ID NO: 3982260 - DNA, 25 bp, Homo sapien
cattggtacagtgagcctgagccca

SEQ ID NO: 3982261 - DNA, 25 bp, Homo sapien
ggtcaattcatctgcccggttggat

SEQ ID NO: 3982262 - DNA, 25 bp, Homo sapien
ctaaagtacacggaggacacagggc

SEQ ID NO: 3982263 - DNA, 25 bp, Homo sapien
tgtgtgacgctcctgctctaaagta

SEQ ID NO: 3982264 - DNA, 25 bp, Homo sapien
gctacagaatattcaccaccggtca

SEQ ID NO: 3982265 - DNA, 25 bp, Homo sapien
gcaggcctcggcattaccttctact

SEQ ID NO: 3982266 - DNA, 25 bp, Homo sapien
caccaagcaagatttaagtgccctc

SEQ ID NO: 3982267 - DNA, 25 bp, Homo sapien
cagaagccaatgctccaggagaggg

SEQ ID NO: 3982268 - DNA, 25 bp, Homo sapien
gaattttcacaggacatatgtccag

SEQ ID NO: 3982269 - DNA, 25 bp, Homo sapien
gaaaagtagagaaaagccgccaaca

SEQ ID NO: 3982270 - DNA, 25 bp, Homo sapien
agatctctgccaatgtgtgcctgcc

SEQ ID NO: 3982271 - DNA, 25 bp, Homo sapien
aatgaggcggattgcaaacagctgc

SEQ ID NO: 3982272 - DNA, 25 bp, Homo sapien
tcatgaccatgggactgcgacagaa

SEQ ID NO: 3982273 - DNA, 25 bp, Homo sapien
aacacaagttcagtgggagcgcggc

SEQ ID NO: 3982274 - DNA, 25 bp, Homo sapien
tctgttgctatgagccacctgctta

SEQ ID NO: 3982275 - DNA, 25 bp, Homo sapien
ttccacatagcgagagagtaccgtc

SEQ ID NO: 3982276 - DNA, 25 bp, Homo sapien
gggctccgcctctagaacacaagtt

SEQ ID NO: 3982277 - DNA, 25 bp, Homo sapien
gaggacgaatgtccacacctgccag

SEQ ID NO: 3982278 - DNA, 25 bp, Homo sapien
tccttttgtcattctactggcccaa

SEQ ID NO: 3982279 - DNA, 25 bp, Homo sapien
cagccaagggacattacttcttaag

SEQ ID NO: 3982280 - DNA, 25 bp, Homo sapien
tgggccgtcctccacaggttattat

SEQ ID NO: 3982281 - DNA, 25 bp, Homo sapien
tacagatgataaccatgaccccaaa

SEQ ID NO: 3982282 - DNA, 25 bp, Homo sapien
taatacccgccatgcaaactgaggg

SEQ ID NO: 3982283 - DNA, 25 bp, Homo sapien
tctttaccactcaaacgatgacagg

SEQ ID NO: 3982284 - DNA, 25 bp, Homo sapien
tcaaggcagccacttctaatacccg

SEQ ID NO: 3982285 - DNA, 25 bp, Homo sapien
tgctgtcaagtaacaccataactaa

SEQ ID NO: 3982286 - DNA, 25 bp, Homo sapien
tactaggtcaaagagcatggtttcc

SEQ ID NO: 3982287 - DNA, 25 bp, Homo sapien
taatcactatgaactgctcctcatc

SEQ ID NO: 3982288 - DNA, 25 bp, Homo sapien
tcccactgttggatgcttgagtcat

SEQ ID NO: 3982289 - DNA, 25 bp, Homo sapien
taggctaaagatgaccccactcagg

SEQ ID NO: 3982290 - DNA, 25 bp, Homo sapien
tacgctgaaagggacaagtaagtgc

SEQ ID NO: 3982291 - DNA, 25 bp, Homo sapien
taacgcagccgtttctaggaagccc

SEQ ID NO: 3982292 - DNA, 25 bp, Homo sapien
tctgggaggaagtttgacacacacc

SEQ ID NO: 3982293 - DNA, 25 bp, Homo sapien
gataaggatgagaggaaaaacgcga

SEQ ID NO: 3982294 - DNA, 25 bp, Homo sapien
gccctagggtacaaaggtattgcat

SEQ ID NO: 3982295 - DNA, 25 bp, Homo sapien
aaattaatagatgcagagttgtcct

SEQ ID NO: 3982296 - DNA, 25 bp, Homo sapien
tattgcattcaggatctatgggcac

SEQ ID NO: 3982297 - DNA, 25 bp, Homo sapien
cggcgtgattatctcagaacatgca

SEQ ID NO: 3982298 - DNA, 25 bp, Homo sapien
cctacttgcacaaaggagaggcggg

SEQ ID NO: 3982299 - DNA, 25 bp, Homo sapien
gatgtagtcaggttggctgaaccac

SEQ ID NO: 3982300 - DNA, 25 bp, Homo sapien
tacctgcatgggtttagactccccg

SEQ ID NO: 3982301 - DNA, 25 bp, Homo sapien
gaaggttctaagttcgtagtcagag

SEQ ID NO: 3982302 - DNA, 25 bp, Homo sapien
ctaagttcgtagtcagagtcctgct

SEQ ID NO: 3982303 - DNA, 25 bp, Homo sapien
gcttcagggagctgcggaaatcact

SEQ ID NO: 3982304 - DNA, 25 bp, Homo sapien
ggaaatcactctggaaggttctaag

SEQ ID NO: 3982305 - DNA, 25 bp, Homo sapien
ccaccaccgcggaagtgggtgatag

SEQ ID NO: 3982306 - DNA, 25 bp, Homo sapien
atacaggaatcagaaggctcaggga

SEQ ID NO: 3982307 - DNA, 25 bp, Homo sapien
tggctgctgcactaagagggactga

SEQ ID NO: 3982308 - DNA, 25 bp, Homo sapien
ggtacagacgcttctgcgacatgca

SEQ ID NO: 3982309 - DNA, 25 bp, Homo sapien
gaaaatgcatccaattatctgctcc

SEQ ID NO: 3982310 - DNA, 25 bp, Homo sapien
gccctccttggcctaaatcattact

SEQ ID NO: 3982311 - DNA, 25 bp, Homo sapien
aatgcccctttacacttgaacctgg

SEQ ID NO: 3982312 - DNA, 25 bp, Homo sapien
ttcaacaatggtcaaaattcagatc

SEQ ID NO: 3982313 - DNA, 25 bp, Homo sapien
gaaggctgaagtgtttgacgtcaag

SEQ ID NO: 3982314 - DNA, 25 bp, Homo sapien
cattacctctgatggtgtcacgtga

SEQ ID NO: 3982315 - DNA, 25 bp, Homo sapien
gcacgtcactattcattactgagag

SEQ ID NO: 3982316 - DNA, 25 bp, Homo sapien
tgtataaatggctctagggcctcac

SEQ ID NO: 3982317 - DNA, 25 bp, Homo sapien
gcagagctggatacaactccctggg

SEQ ID NO: 3982318 - DNA, 25 bp, Homo sapien
aggcagagctggatacaactccctg

SEQ ID NO: 3982319 - DNA, 25 bp, Homo sapien
atcccacatgacctccttgtgttgc

SEQ ID NO: 3982320 - DNA, 25 bp, Homo sapien
gagctggatacaactccctgggcat

SEQ ID NO: 3982321 - DNA, 25 bp, Homo sapien
cataagggtaagtgtcttgagtctg

SEQ ID NO: 3982322 - DNA, 25 bp, Homo sapien
gagtctgcttagcactcaggaaaca

SEQ ID NO: 3982323 - DNA, 25 bp, Homo sapien
cactcaggaaacatttgttaacagg

SEQ ID NO: 3982324 - DNA, 25 bp, Homo sapien
cacaccaagtctcttaagctcttcc

SEQ ID NO: 3982325 - DNA, 25 bp, Homo sapien
tctatagttcacacgatgggctgtc

SEQ ID NO: 3982326 - DNA, 25 bp, Homo sapien
tatagttcacacgatgggctgtccg

SEQ ID NO: 3982327 - DNA, 25 bp, Homo sapien
agttcacacgatgggctgtccgtct

SEQ ID NO: 3982328 - DNA, 25 bp, Homo sapien
tcaaaaccatttaaggtgatgaaac

SEQ ID NO: 3982329 - DNA, 25 bp, Homo sapien
gaattcaatgagtcctccgacagcc

SEQ ID NO: 3982330 - DNA, 25 bp, Homo sapien
taatctcctaggatccaatcccgtg

SEQ ID NO: 3982331 - DNA, 25 bp, Homo sapien
taaagaagaactgctacactcatgg

SEQ ID NO: 3982332 - DNA, 25 bp, Homo sapien
gaagaactactcaggaaaagcatgg

SEQ ID NO: 3982333 - DNA, 25 bp, Homo sapien
tgtgtccacaaaaccatcccttagg

SEQ ID NO: 3982334 - DNA, 25 bp, Homo sapien
tcatggtttccacgggtctggctga

SEQ ID NO: 3982335 - DNA, 25 bp, Homo sapien
gaagcaccgttcacgtttactgcta

SEQ ID NO: 3982336 - DNA, 25 bp, Homo sapien
tctggctgaacggagcaccactgtg

SEQ ID NO: 3982337 - DNA, 25 bp, Homo sapien
cgggtagtgtgcaggtcacagtgcc

SEQ ID NO: 3982338 - DNA, 25 bp, Homo sapien
gtagtgtgcaggtcacagtgcccca

SEQ ID NO: 3982339 - DNA, 25 bp, Homo sapien
tagagacgggtagtgtgcaggtcac

SEQ ID NO: 3982340 - DNA, 25 bp, Homo sapien
tgcaggtcacagtgccccacagctg

SEQ ID NO: 3982341 - DNA, 25 bp, Homo sapien
gtgtctgttaggacgagtgaacgcc

SEQ ID NO: 3982342 - DNA, 25 bp, Homo sapien
tctgttaggacgagtgaacgccctc

SEQ ID NO: 3982343 - DNA, 25 bp, Homo sapien
gagtgaacgccctctgcctcacaga

SEQ ID NO: 3982344 - DNA, 25 bp, Homo sapien
gttaggacgagtgaacgccctctgc

SEQ ID NO: 3982345 - DNA, 25 bp, Homo sapien
taaaattaaggtggccagatatcgg

SEQ ID NO: 3982346 - DNA, 25 bp, Homo sapien
gactacatgtgcaatactgactggg

SEQ ID NO: 3982347 - DNA, 25 bp, Homo sapien
ccaaccaaatggtaaggagcccttg

SEQ ID NO: 3982348 - DNA, 25 bp, Homo sapien
cagatatcggttccttgaccctgac

SEQ ID NO: 3982349 - DNA, 25 bp, Homo sapien
ctttccaaaatcagccaagccaact

SEQ ID NO: 3982350 - DNA, 25 bp, Homo sapien
cttcaaaaggggatggcagtttcct

SEQ ID NO: 3982351 - DNA, 25 bp, Homo sapien
aatatgcaattccaaacagtgcctt

SEQ ID NO: 3982352 - DNA, 25 bp, Homo sapien
taaatatgcaattccaaacagtgcc

SEQ ID NO: 3982353 - DNA, 25 bp, Homo sapien
ttttaaatatgcaattccaaacagt

SEQ ID NO: 3982354 - DNA, 25 bp, Homo sapien
gacgcacggcactcagatgtgtttc

SEQ ID NO: 3982355 - DNA, 25 bp, Homo sapien
tatctcgatgaagtatcgccctctg

SEQ ID NO: 3982356 - DNA, 25 bp, Homo sapien
taacccaatgttggcggagcatcaa

SEQ ID NO: 3982357 - DNA, 25 bp, Homo sapien
tgatagatatgtacagacgcacggc

SEQ ID NO: 3982358 - DNA, 25 bp, Homo sapien
tagccgtgcacgtcagttcctggga

SEQ ID NO: 3982359 - DNA, 25 bp, Homo sapien
gtgtcactggaaccaacaggcctgc

SEQ ID NO: 3982360 - DNA, 25 bp, Homo sapien
agaaacagccgagtgttacacgaag

SEQ ID NO: 3982361 - DNA, 25 bp, Homo sapien
ttacacgaagtaggcacggacgaag

SEQ ID NO: 3982362 - DNA, 25 bp, Homo sapien
gaaccctggatgatctgaccactga

SEQ ID NO: 3982363 - DNA, 25 bp, Homo sapien
tgtactgccagacaagactagcgga

SEQ ID NO: 3982364 - DNA, 25 bp, Homo sapien
catggagcctccgacagatacttga

SEQ ID NO: 3982365 - DNA, 25 bp, Homo sapien
tatttagagaccgactgtactgcca

SEQ ID NO: 3982366 - DNA, 25 bp, Homo sapien
gcgctggtggggtactctgcagcca

SEQ ID NO: 3982367 - DNA, 25 bp, Homo sapien
gcagtccttcaatctgaatcctttg

SEQ ID NO: 3982368 - DNA, 25 bp, Homo sapien
gtgtctgagcagtccttcaatctga

SEQ ID NO: 3982369 - DNA, 25 bp, Homo sapien
ggccacctcttcggagggtgtctga

SEQ ID NO: 3982370 - DNA, 25 bp, Homo sapien
tacttggaaagacaataaattggaa

SEQ ID NO: 3982371 - DNA, 25 bp, Homo sapien
tggaaagacaataaattggaaaggc

SEQ ID NO: 3982372 - DNA, 25 bp, Homo sapien
cttacttggaaagacaataaattgg

SEQ ID NO: 3982373 - DNA, 25 bp, Homo sapien
agacaataaattggaaaggcttcat

SEQ ID NO: 3982374 - DNA, 25 bp, Homo sapien
taaagaactttgctctcaccatccg

SEQ ID NO: 3982375 - DNA, 25 bp, Homo sapien
gctactaaccccatgtacccaagtg

SEQ ID NO: 3982376 - DNA, 25 bp, Homo sapien
caagtgtcctcacactacactggga

SEQ ID NO: 3982377 - DNA, 25 bp, Homo sapien
tgaacccttaataaagacacgatgg

SEQ ID NO: 3982378 - DNA, 25 bp, Homo sapien
caagtgcatctgaatacggaactag

SEQ ID NO: 3982379 - DNA, 25 bp, Homo sapien
acggaactagctccaattttatcag

SEQ ID NO: 3982380 - DNA, 25 bp, Homo sapien
atctcaatacacactgctgcccggt

SEQ ID NO: 3982381 - DNA, 25 bp, Homo sapien
tcaagagtgaaatgtcaagtgcatc

SEQ ID NO: 3982382 - DNA, 25 bp, Homo sapien
tctacaaaatcaatttctccaaaac

SEQ ID NO: 3982383 - DNA, 25 bp, Homo sapien
ccatgcccggccctaagtgagattt

SEQ ID NO: 3982384 - DNA, 25 bp, Homo sapien
ttctccaaaactaattagaagagac

SEQ ID NO: 3982385 - DNA, 25 bp, Homo sapien
catgcccggccctaagtgagatttt

SEQ ID NO: 3982386 - DNA, 25 bp, Homo sapien
ccttgtagctggctactcagaaact

SEQ ID NO: 3982387 - DNA, 25 bp, Homo sapien
tgtacacgaccagattaacaatggc

SEQ ID NO: 3982388 - DNA, 25 bp, Homo sapien
taccgtttcatcttgtgtacacgac

SEQ ID NO: 3982389 - DNA, 25 bp, Homo sapien
acagatagcaagttttaccgtttca

SEQ ID NO: 3982390 - DNA, 25 bp, Homo sapien
tccaacagaattgcaaataaggcgt

SEQ ID NO: 3982391 - DNA, 25 bp, Homo sapien
caatcttaggtactgaacacgaggt

SEQ ID NO: 3982392 - DNA, 25 bp, Homo sapien
tatttcgcccaagttagaaaggcag

SEQ ID NO: 3982393 - DNA, 25 bp, Homo sapien
ggaaaaccctcgaggcaaaacagca

SEQ ID NO: 3982394 - DNA, 25 bp, Homo sapien
cagagcggggatttctacgaaaaat

SEQ ID NO: 3982395 - DNA, 25 bp, Homo sapien
aatcctaaacgtggggtcctctgca

SEQ ID NO: 3982396 - DNA, 25 bp, Homo sapien
caaggaagcccggtatgacgacgta

SEQ ID NO: 3982397 - DNA, 25 bp, Homo sapien
tatgacgacgtaggccattgccagc

SEQ ID NO: 3982398 - DNA, 25 bp, Homo sapien
cccgcggtgaccgagctgagctctt

SEQ ID NO: 3982399 - DNA, 25 bp, Homo sapien
gaaagcgagccacgggagggagtgt

SEQ ID NO: 3982400 - DNA, 25 bp, Homo sapien
accgagctgagctcttgggcccgcg

SEQ ID NO: 3982401 - DNA, 25 bp, Homo sapien
cgcgtgtgtgtctcggcgcggcccg

SEQ ID NO: 3982402 - DNA, 25 bp, Homo sapien
agatccggccgtattgtccccgcgg

SEQ ID NO: 3982403 - DNA, 25 bp, Homo sapien
ggcgcgctcggactcctgttccccg

SEQ ID NO: 3982404 - DNA, 25 bp, Homo sapien
gctcggactcctgttccccggagat

SEQ ID NO: 3982405 - DNA, 25 bp, Homo sapien
ctgttccccggagatccggccgtat

SEQ ID NO: 3982406 - DNA, 25 bp, Homo sapien
cggcgtccacggcgaaaggcgccca

SEQ ID NO: 3982407 - DNA, 25 bp, Homo sapien
gcgtccacggcgaaaggcgcccacc

SEQ ID NO: 3982408 - DNA, 25 bp, Homo sapien
cggtcggcgtccacggcgaaaggcg

SEQ ID NO: 3982409 - DNA, 25 bp, Homo sapien
tccacggcgaaaggcgcccaccctg

SEQ ID NO: 3982410 - DNA, 25 bp, Homo sapien
atggctcccggttcggtccctcgct

SEQ ID NO: 3982411 - DNA, 25 bp, Homo sapien
gcatggctcccggttcggtccctcg

SEQ ID NO: 3982412 - DNA, 25 bp, Homo sapien
tcagcgcggcatggctcccggttcg

SEQ ID NO: 3982413 - DNA, 25 bp, Homo sapien
cgcggcatggctcccggttcggtcc

SEQ ID NO: 3982414 - DNA, 25 bp, Homo sapien
tggctgcgcaggagctaggcgggag

SEQ ID NO: 3982415 - DNA, 25 bp, Homo sapien
gatgccgagcgcctcccggctattt

SEQ ID NO: 3982416 - DNA, 25 bp, Homo sapien
gatgctaattccaacttggatcggg

SEQ ID NO: 3982417 - DNA, 25 bp, Homo sapien
ccccgagaggatgctaattccaact

SEQ ID NO: 3982418 - DNA, 25 bp, Homo sapien
acagggggcacttgcgctccccaaa

SEQ ID NO: 3982419 - DNA, 25 bp, Homo sapien
accgctgtgggtgcgcagggaaggg

SEQ ID NO: 3982420 - DNA, 25 bp, Homo sapien
gaccgtgccggagaggcggcgaccg

SEQ ID NO: 3982421 - DNA, 25 bp, Homo sapien
ccctctgtgctgcaagttgcagcag

SEQ ID NO: 3982422 - DNA, 25 bp, Homo sapien
agttcggcgtgcgtcctccaagaat

SEQ ID NO: 3982423 - DNA, 25 bp, Homo sapien
ccctattgagatattaggagctgga

SEQ ID NO: 3982424 - DNA, 25 bp, Homo sapien
ctggattgagatgtcgagcaggaaa

SEQ ID NO: 3982425 - DNA, 25 bp, Homo sapien
gaactgagcccttaggatcgatttg

SEQ ID NO: 3982426 - DNA, 25 bp, Homo sapien
ggagaggccaccgagctgcacgacc

SEQ ID NO: 3982427 - DNA, 25 bp, Homo sapien
aggccaccgagctgcacgacccttt

SEQ ID NO: 3982428 - DNA, 25 bp, Homo sapien
agaggccaccgagctgcacgaccct

SEQ ID NO: 3982429 - DNA, 25 bp, Homo sapien
gaggccaccgagctgcacgaccctt

SEQ ID NO: 3982430 - DNA, 25 bp, Homo sapien
cccaaagagcgttgctccaggcctc

SEQ ID NO: 3982431 - DNA, 25 bp, Homo sapien
gcccgccgcggggcttgtttgccaa

SEQ ID NO: 3982432 - DNA, 25 bp, Homo sapien
aaacatttcttaaatcctgccccag

SEQ ID NO: 3982433 - DNA, 25 bp, Homo sapien
tccaggcctcccagtcttcattaaa

SEQ ID NO: 3982434 - DNA, 25 bp, Homo sapien
gggcagcgccgaccaggcttttctt

SEQ ID NO: 3982435 - DNA, 25 bp, Homo sapien
ttttcttgcccgctagtccacgtaa

SEQ ID NO: 3982436 - DNA, 25 bp, Homo sapien
taatgcggtcgctaagaagcccgca

SEQ ID NO: 3982437 - DNA, 25 bp, Homo sapien
cagcagggttttcgcgtgaccttca

SEQ ID NO: 3982438 - DNA, 25 bp, Homo sapien
tgcgcaagattgaaagttgtctggt

SEQ ID NO: 3982439 - DNA, 25 bp, Homo sapien
aagttgtctggtttaggctctaggt

SEQ ID NO: 3982440 - DNA, 25 bp, Homo sapien
cttctttgcgcaagattgaaagttg

SEQ ID NO: 3982441 - DNA, 25 bp, Homo sapien
ctggctaaacttctttgcgcaagat

SEQ ID NO: 3982442 - DNA, 25 bp, Homo sapien
acagcaaacaccttcagcacgggca

SEQ ID NO: 3982443 - DNA, 25 bp, Homo sapien
gcacgggcagcacaactttccgcat

SEQ ID NO: 3982444 - DNA, 25 bp, Homo sapien
cagcaaacaccttcagcacgggcag

SEQ ID NO: 3982445 - DNA, 25 bp, Homo sapien
agcacgggcagcacaactttccgca

SEQ ID NO: 3982446 - DNA, 25 bp, Homo sapien
ttcttgtaggttaatggtctcagtg

SEQ ID NO: 3982447 - DNA, 25 bp, Homo sapien
gtctgagtcagacccatgtctttca

SEQ ID NO: 3982448 - DNA, 25 bp, Homo sapien
tgttcttgtaggttaatggtctcag

SEQ ID NO: 3982449 - DNA, 25 bp, Homo sapien
ctgagtcagacccatgtctttcaac

SEQ ID NO: 3982450 - DNA, 25 bp, Homo sapien
atctttgtccactctgcaggtgaag

SEQ ID NO: 3982451 - DNA, 25 bp, Homo sapien
gaaacctgaatctttgtccactctg

SEQ ID NO: 3982452 - DNA, 25 bp, Homo sapien
tgaatctttgtccactctgcaggtg

SEQ ID NO: 3982453 - DNA, 25 bp, Homo sapien
aggccagaaacctgaatctttgtcc

SEQ ID NO: 3982454 - DNA, 25 bp, Homo sapien
gagctggccccagggatcaggggca

SEQ ID NO: 3982455 - DNA, 25 bp, Homo sapien
taggcagggatggagctggccccag

SEQ ID NO: 3982456 - DNA, 25 bp, Homo sapien
ggcataggcagggatggagctggcc

SEQ ID NO: 3982457 - DNA, 25 bp, Homo sapien
atggagctggccccagggatcaggg

SEQ ID NO: 3982458 - DNA, 25 bp, Homo sapien
caaacccatgctgttttttggcaaa

SEQ ID NO: 3982459 - DNA, 25 bp, Homo sapien
cgggtacgtttctggtgcccagata

SEQ ID NO: 3982460 - DNA, 25 bp, Homo sapien
tattgtagctgtcataatcgttgtt

SEQ ID NO: 3982461 - DNA, 25 bp, Homo sapien
cagattcaccctcgtttgtctctgg

SEQ ID NO: 3982462 - DNA, 25 bp, Homo sapien
tattaggaaggcatattgttgacag

SEQ ID NO: 3982463 - DNA, 25 bp, Homo sapien
aggaaggcatattgttgacaggaaa

SEQ ID NO: 3982464 - DNA, 25 bp, Homo sapien
ctattaggaaggcatattgttgaca

SEQ ID NO: 3982465 - DNA, 25 bp, Homo sapien
ttaggaaggcatattgttgacagga

SEQ ID NO: 3982466 - DNA, 25 bp, Homo sapien
tggattgtgcaaacgcccggggtat

SEQ ID NO: 3982467 - DNA, 25 bp, Homo sapien
gcccgaaaatgacagtaagtggccc

SEQ ID NO: 3982468 - DNA, 25 bp, Homo sapien
ttatggattgtgcaaacgcccgggg

SEQ ID NO: 3982469 - DNA, 25 bp, Homo sapien
gggtatgcccgaaaatgacagtaag

SEQ ID NO: 3982470 - DNA, 25 bp, Homo sapien
agctctggtttgaccgagttctggg

SEQ ID NO: 3982471 - DNA, 25 bp, Homo sapien
acaaacttgtgaagctctggtttga

SEQ ID NO: 3982472 - DNA, 25 bp, Homo sapien
aggacaaacttgtgaagctctggtt

SEQ ID NO: 3982473 - DNA, 25 bp, Homo sapien
aagctctggtttgaccgagttctgg

SEQ ID NO: 3982474 - DNA, 25 bp, Homo sapien
ttatccggaaggttatttcatgtac

SEQ ID NO: 3982475 - DNA, 25 bp, Homo sapien
ctcccccaatgtcgtgggttatccg

SEQ ID NO: 3982476 - DNA, 25 bp, Homo sapien
gttatccggaaggttatttcatgta

SEQ ID NO: 3982477 - DNA, 25 bp, Homo sapien
ttacagctcccccaatgtcgtgggt

SEQ ID NO: 3982478 - DNA, 25 bp, Homo sapien
acttggcagttccagctcagggaca

SEQ ID NO: 3982479 - DNA, 25 bp, Homo sapien
ctggggattttggattgtgggcagg

SEQ ID NO: 3982480 - DNA, 25 bp, Homo sapien
tggggattttggattgtgggcaggg

SEQ ID NO: 3982481 - DNA, 25 bp, Homo sapien
cttggcagttccagctcagggacag

SEQ ID NO: 3982482 - DNA, 25 bp, Homo sapien
gtttaggcagtaaatcaaaaatgta

SEQ ID NO: 3982483 - DNA, 25 bp, Homo sapien
tatctttgtttaggcagtaaatcaa

SEQ ID NO: 3982484 - DNA, 25 bp, Homo sapien
aacaacaattcattagcatctgtca

SEQ ID NO: 3982485 - DNA, 25 bp, Homo sapien
gtaaacaacaattcattagcatctg

SEQ ID NO: 3982486 - DNA, 25 bp, Homo sapien
tctttttgctcaccaatgtgcaagc

SEQ ID NO: 3982487 - DNA, 25 bp, Homo sapien
tagttggaaatcacactggcttttc

SEQ ID NO: 3982488 - DNA, 25 bp, Homo sapien
gtgacagaagaacaacttctctgct

SEQ ID NO: 3982489 - DNA, 25 bp, Homo sapien
caccaatgtgcaagcagtgacagaa

SEQ ID NO: 3982490 - DNA, 25 bp, Homo sapien
tgaaggcagctctgggcaccctcat

SEQ ID NO: 3982491 - DNA, 25 bp, Homo sapien
ctgaaggcagctctgggcaccctca

SEQ ID NO: 3982492 - DNA, 25 bp, Homo sapien
cctgaaggcagctctgggcaccctc

SEQ ID NO: 3982493 - DNA, 25 bp, Homo sapien
actgttcctcccctcgctggctgct

SEQ ID NO: 3982494 - DNA, 25 bp, Homo sapien
acagactgttcctcccctcgctggc

SEQ ID NO: 3982495 - DNA, 25 bp, Homo sapien
agactgttcctcccctcgctggctg

SEQ ID NO: 3982496 - DNA, 25 bp, Homo sapien
cagactgttcctcccctcgctggct

SEQ ID NO: 3982497 - DNA, 25 bp, Homo sapien
atgttctcccctgaaatatcaatct

SEQ ID NO: 3982498 - DNA, 25 bp, Homo sapien
gcattctagaaaggtcagcgcacac

SEQ ID NO: 3982499 - DNA, 25 bp, Homo sapien
tccaatagtgcaaacgaaaggcgca

SEQ ID NO: 3982500 - DNA, 25 bp, Homo sapien
tttgagggcccttttgatcagcacc

SEQ ID NO: 3982501 - DNA, 25 bp, Homo sapien
cagctggcgttctgatggtccggcc

SEQ ID NO: 3982502 - DNA, 25 bp, Homo sapien
tcttggaggcactgccacttcttga

SEQ ID NO: 3982503 - DNA, 25 bp, Homo sapien
gagccttcggcttttcttgggcgcc

SEQ ID NO: 3982504 - DNA, 25 bp, Homo sapien
cagaggagtagattgacaagtaacc

SEQ ID NO: 3982505 - DNA, 25 bp, Homo sapien
cagggcgccccatcattgtaaggtg

SEQ ID NO: 3982506 - DNA, 25 bp, Homo sapien
cacagaaaggttacgtcctgggcag

SEQ ID NO: 3982507 - DNA, 25 bp, Homo sapien
tgtgtctgcactaacgggcctcagg

SEQ ID NO: 3982508 - DNA, 25 bp, Homo sapien
cagagaggaaactcagcggaagcca

SEQ ID NO: 3982509 - DNA, 25 bp, Homo sapien
tctttggcgagaaagcataacgtgc

SEQ ID NO: 3982510 - DNA, 25 bp, Homo sapien
ggaattcgggaactgcccggagcac

SEQ ID NO: 3982511 - DNA, 25 bp, Homo sapien
gacacattggctatttcggaattcg

SEQ ID NO: 3982512 - DNA, 25 bp, Homo sapien
tgtgaggacacattggctatttcgg

SEQ ID NO: 3982513 - DNA, 25 bp, Homo sapien
gctatttcggaattcgggaactgcc

SEQ ID NO: 3982514 - DNA, 25 bp, Homo sapien
cccaggatgggacaggttgatgccc

SEQ ID NO: 3982515 - DNA, 25 bp, Homo sapien
aggttgatgcccagggcacctctct

SEQ ID NO: 3982516 - DNA, 25 bp, Homo sapien
cagcaatacccaggatgggacaggt

SEQ ID NO: 3982517 - DNA, 25 bp, Homo sapien
ggttctctcttgctaacgagccagc

SEQ ID NO: 3982518 - DNA, 25 bp, Homo sapien
taactgtgcgctttgacagacctga

SEQ ID NO: 3982519 - DNA, 25 bp, Homo sapien
gatgtgccacgtcaacgtaatgagg

SEQ ID NO: 3982520 - DNA, 25 bp, Homo sapien
gagctgactgttgaaagatgtgcca

SEQ ID NO: 3982521 - DNA, 25 bp, Homo sapien
tagctccgctgaaccaaaggagaaa

SEQ ID NO: 3982522 - DNA, 25 bp, Homo sapien
ggagggagtggcacgatgagaacca

SEQ ID NO: 3982523 - DNA, 25 bp, Homo sapien
tcacctggcgagcagcagggaacca

SEQ ID NO: 3982524 - DNA, 25 bp, Homo sapien
ggagtggcacgatgagaaccagctg

SEQ ID NO: 3982525 - DNA, 25 bp, Homo sapien
ctaaggaatcacctggcgagcagca

SEQ ID NO: 3982526 - DNA, 25 bp, Homo sapien
gaggcagacacttctcaatgggccg

SEQ ID NO: 3982527 - DNA, 25 bp, Homo sapien
tgggaggcagacacttctcaatggg

SEQ ID NO: 3982528 - DNA, 25 bp, Homo sapien
atgggaggcagacacttctcaatgg

SEQ ID NO: 3982529 - DNA, 25 bp, Homo sapien
gggaggcagacacttctcaatgggc

SEQ ID NO: 3982530 - DNA, 25 bp, Homo sapien
cctgcttctggtgttagtggctcac

SEQ ID NO: 3982531 - DNA, 25 bp, Homo sapien
taaacacttggccatgttctgggaa

SEQ ID NO: 3982532 - DNA, 25 bp, Homo sapien
tgtaagacacttaagatccagctct

SEQ ID NO: 3982533 - DNA, 25 bp, Homo sapien
taatgttttggctctttactctgag

SEQ ID NO: 3982534 - DNA, 25 bp, Homo sapien
ttgaaaaaataaaaccatatgtcat

SEQ ID NO: 3982535 - DNA, 25 bp, Homo sapien
gataaaacacgaaggcagttgaaaa

SEQ ID NO: 3982536 - DNA, 25 bp, Homo sapien
ttgataaaacacgaaggcagttgaa

SEQ ID NO: 3982537 - DNA, 25 bp, Homo sapien
atttgataaaacacgaaggcagttg

SEQ ID NO: 3982538 - DNA, 25 bp, Homo sapien
taaggatcttgaaatgtggcacagc

SEQ ID NO: 3982539 - DNA, 25 bp, Homo sapien
ctgtaaggatcttgaaatgtggcac

SEQ ID NO: 3982540 - DNA, 25 bp, Homo sapien
gtaaggatcttgaaatgtggcacag

SEQ ID NO: 3982541 - DNA, 25 bp, Homo sapien
aggctgtaaggatcttgaaatgtgg

SEQ ID NO: 3982542 - DNA, 25 bp, Homo sapien
gggacaattgatcccagccagcaaa

SEQ ID NO: 3982543 - DNA, 25 bp, Homo sapien
ccagcaaaggcgatgggaaacaggc

SEQ ID NO: 3982544 - DNA, 25 bp, Homo sapien
taatttgctggttgaactcccttcc

SEQ ID NO: 3982545 - DNA, 25 bp, Homo sapien
tctagtgagtgcagtccaagtgctg

SEQ ID NO: 3982546 - DNA, 25 bp, Homo sapien
tttcctcctaggtaatgatgtctgg

SEQ ID NO: 3982547 - DNA, 25 bp, Homo sapien
gttttcctcctaggtaatgatgtct

SEQ ID NO: 3982548 - DNA, 25 bp, Homo sapien
ctcctaggtaatgatgtctggctga

SEQ ID NO: 3982549 - DNA, 25 bp, Homo sapien
tcctcctaggtaatgatgtctggct

SEQ ID NO: 3982550 - DNA, 25 bp, Homo sapien
ccccgtgtaaatgcgctgtgagctg

SEQ ID NO: 3982551 - DNA, 25 bp, Homo sapien
tagaagtgagatcaatcagaaagcc

SEQ ID NO: 3982552 - DNA, 25 bp, Homo sapien
taatgtggttccgagaggcgtcctc

SEQ ID NO: 3982553 - DNA, 25 bp, Homo sapien
ctgtgagctgctgttagtgacgcta

SEQ ID NO: 3982554 - DNA, 25 bp, Homo sapien
ggattcaacctgctgataactgatg

SEQ ID NO: 3982555 - DNA, 25 bp, Homo sapien
ttaagtgcaggttaaaaacttgctc

SEQ ID NO: 3982556 - DNA, 25 bp, Homo sapien
gagctgtgaattgtctagattcact

SEQ ID NO: 3982557 - DNA, 25 bp, Homo sapien
gaatttaccaacgttgcagtctgtt

SEQ ID NO: 3982558 - DNA, 25 bp, Homo sapien
gcagcttgggatgtgctgaatcaca

SEQ ID NO: 3982559 - DNA, 25 bp, Homo sapien
gaggaccttaggaatctacttgatg

SEQ ID NO: 3982560 - DNA, 25 bp, Homo sapien
tgaagtcagcatggcccaatgcctg

SEQ ID NO: 3982561 - DNA, 25 bp, Homo sapien
tgccatccagaagctatggcctgga

SEQ ID NO: 3982562 - DNA, 25 bp, Homo sapien
gcctattggagattactgtgatatt

SEQ ID NO: 3982563 - DNA, 25 bp, Homo sapien
ctttttaaagcccatgtactgccta

SEQ ID NO: 3982564 - DNA, 25 bp, Homo sapien
tactgcctattggagattactgtga

SEQ ID NO: 3982565 - DNA, 25 bp, Homo sapien
aaagcccatgtactgcctattggag

SEQ ID NO: 3982566 - DNA, 25 bp, Homo sapien
tgtcccgcaaggtgattccagtctc

SEQ ID NO: 3982567 - DNA, 25 bp, Homo sapien
tgagtttgaacgtggtggtctgcca

SEQ ID NO: 3982568 - DNA, 25 bp, Homo sapien
gcatttaatcacgtcggcctcactg

SEQ ID NO: 3982569 - DNA, 25 bp, Homo sapien
tccactgttgggcaaacttcacggt

SEQ ID NO: 3982570 - DNA, 25 bp, Homo sapien
tgatgtgggcgtccatcccaaaact

SEQ ID NO: 3982571 - DNA, 25 bp, Homo sapien
gatgtgggcgtccatcccaaaactc

SEQ ID NO: 3982572 - DNA, 25 bp, Homo sapien
tttctttggcttcacaagaccccga

SEQ ID NO: 3982573 - DNA, 25 bp, Homo sapien
ggcttcacaagaccccgaggagcca

SEQ ID NO: 3982574 - DNA, 25 bp, Homo sapien
gaattccctcgttatctgcgttgaa

SEQ ID NO: 3982575 - DNA, 25 bp, Homo sapien
tgaatcagtgccagcataacccatg

SEQ ID NO: 3982576 - DNA, 25 bp, Homo sapien
tatgccacgtcttgctctgtgagtg

SEQ ID NO: 3982577 - DNA, 25 bp, Homo sapien
ctgggcctggatagcctggctcaaa

SEQ ID NO: 3982578 - DNA, 25 bp, Homo sapien
atccagcatcgttgaaaatctgaag

SEQ ID NO: 3982579 - DNA, 25 bp, Homo sapien
aatccagcatcgttgaaaatctgaa

SEQ ID NO: 3982580 - DNA, 25 bp, Homo sapien
aaatccagcatcgttgaaaatctga

SEQ ID NO: 3982581 - DNA, 25 bp, Homo sapien
agcaaagcccatctggttgagtctg

SEQ ID NO: 3982582 - DNA, 25 bp, Homo sapien
tgttctaacgtgtagagcatggtct

SEQ ID NO: 3982583 - DNA, 25 bp, Homo sapien
gtctggacagcaaagcccatctggt

SEQ ID NO: 3982584 - DNA, 25 bp, Homo sapien
gaccacactcactctttgggctgtc

SEQ ID NO: 3982585 - DNA, 25 bp, Homo sapien
aataatggataatggagatccaagc

SEQ ID NO: 3982586 - DNA, 25 bp, Homo sapien
acaatggcttaagtgtatttctgtg

SEQ ID NO: 3982587 - DNA, 25 bp, Homo sapien
aaataacacagtcacctatgttaaa

SEQ ID NO: 3982588 - DNA, 25 bp, Homo sapien
taaacaatatggcatcaggaaatgt

SEQ ID NO: 3982589 - DNA, 25 bp, Homo sapien
ggggaggcattgatctttcctagct

SEQ ID NO: 3982590 - DNA, 25 bp, Homo sapien
gggaggcattgatctttcctagctg

SEQ ID NO: 3982591 - DNA, 25 bp, Homo sapien
catttccttgctggtcgaaagcaca

SEQ ID NO: 3982592 - DNA, 25 bp, Homo sapien
gtcgaaagcacacaggggaggcatt

SEQ ID NO: 3982593 - DNA, 25 bp, Homo sapien
tgtccctagatgtggtccgggctct

SEQ ID NO: 3982594 - DNA, 25 bp, Homo sapien
gtcaacgtcgcagggttcacagtca

SEQ ID NO: 3982595 - DNA, 25 bp, Homo sapien
cctcagtgcggctgttgtcaacgtc

SEQ ID NO: 3982596 - DNA, 25 bp, Homo sapien
ggctgttgtcaacgtcgcagggttc

SEQ ID NO: 3982597 - DNA, 25 bp, Homo sapien
tgtgtcacgtcactcagtgccaccg

SEQ ID NO: 3982598 - DNA, 25 bp, Homo sapien
gtcagtctgtgtcacgtcactcagt

SEQ ID NO: 3982599 - DNA, 25 bp, Homo sapien
ttacgtggctccgtagttgtcagtc

SEQ ID NO: 3982600 - DNA, 25 bp, Homo sapien
ggctccgtagttgtcagtctgtgtc

SEQ ID NO: 3982601 - DNA, 25 bp, Homo sapien
tgcatgcctcgtcccaagtgaccaa

SEQ ID NO: 3982602 - DNA, 25 bp, Homo sapien
caagtgaccaaaatgcaggtttgct

SEQ ID NO: 3982603 - DNA, 25 bp, Homo sapien
gaccaaaatgcaggtttgctgcctg

SEQ ID NO: 3982604 - DNA, 25 bp, Homo sapien
tcgtcccaagtgaccaaaatgcagg

SEQ ID NO: 3982605 - DNA, 25 bp, Homo sapien
aggtcagctcttcatcgccagccag

SEQ ID NO: 3982606 - DNA, 25 bp, Homo sapien
atcccaccttctggactcgctccag

SEQ ID NO: 3982607 - DNA, 25 bp, Homo sapien
taaccactgtgctaagtcagaggtc

SEQ ID NO: 3982608 - DNA, 25 bp, Homo sapien
gccaggaggtgaccactctttaacc

SEQ ID NO: 3982609 - DNA, 25 bp, Homo sapien
tccctttgcagccgagcttcgtgta

SEQ ID NO: 3982610 - DNA, 25 bp, Homo sapien
tttgcagccgagcttcgtgtaagca

SEQ ID NO: 3982611 - DNA, 25 bp, Homo sapien
cctttgcagccgagcttcgtgtaag

SEQ ID NO: 3982612 - DNA, 25 bp, Homo sapien
ttgcagccgagcttcgtgtaagcat

SEQ ID NO: 3982613 - DNA, 25 bp, Homo sapien
gctccgtctcacaggtatgagggtg

SEQ ID NO: 3982614 - DNA, 25 bp, Homo sapien
acactcggtggggtctttgctcctc

SEQ ID NO: 3982615 - DNA, 25 bp, Homo sapien
gtctcacaggtatgagggtgtcctt

SEQ ID NO: 3982616 - DNA, 25 bp, Homo sapien
tccatagcatcagccgcaaacctga

SEQ ID NO: 3982617 - DNA, 25 bp, Homo sapien
cgggcaacacgaatggctgagccat

SEQ ID NO: 3982618 - DNA, 25 bp, Homo sapien
tctggtagttgatggctacgggcaa

SEQ ID NO: 3982619 - DNA, 25 bp, Homo sapien
tggctacgggcaacacgaatggctg

SEQ ID NO: 3982620 - DNA, 25 bp, Homo sapien
tagttgatggctacgggcaacacga

SEQ ID NO: 3982621 - DNA, 25 bp, Homo sapien
aggcacctcgcacagggctgtcact

SEQ ID NO: 3982622 - DNA, 25 bp, Homo sapien
ctgaccccggttgggaaggatgtct

SEQ ID NO: 3982623 - DNA, 25 bp, Homo sapien
aaggatgtctttctgttcaaatggc

SEQ ID NO: 3982624 - DNA, 25 bp, Homo sapien
atgtaaagaaggcagccggagcaag

SEQ ID NO: 3982625 - DNA, 25 bp, Homo sapien
gatggtcattagaggtgcctgtcct

SEQ ID NO: 3982626 - DNA, 25 bp, Homo sapien
ctgatggtcattagaggtgcctgtc

SEQ ID NO: 3982627 - DNA, 25 bp, Homo sapien
gtcattagaggtgcctgtccttgaa

SEQ ID NO: 3982628 - DNA, 25 bp, Homo sapien
tggtcattagaggtgcctgtccttg

SEQ ID NO: 3982629 - DNA, 25 bp, Homo sapien
gctcttgatgaccagccagccagtg

SEQ ID NO: 3982630 - DNA, 25 bp, Homo sapien
tgggctattcctgagcaaagctctt

SEQ ID NO: 3982631 - DNA, 25 bp, Homo sapien
cacaccacgaaggtgaatggaatta

SEQ ID NO: 3982632 - DNA, 25 bp, Homo sapien
tgcccaggacacaccacgaaggtga

SEQ ID NO: 3982633 - DNA, 25 bp, Homo sapien
ggttgaaaaagctattgtcagtaga

SEQ ID NO: 3982634 - DNA, 25 bp, Homo sapien
ctgcagacacatgctcaagatggtt

SEQ ID NO: 3982635 - DNA, 25 bp, Homo sapien
tttatgcatgttagggagacacgag

SEQ ID NO: 3982636 - DNA, 25 bp, Homo sapien
caactcaaagggagcagggcacttc

SEQ ID NO: 3982637 - DNA, 25 bp, Homo sapien
tcccctgttaagatgatacataagc

SEQ ID NO: 3982638 - DNA, 25 bp, Homo sapien
gacaggaagcagaagggcgtttccc

SEQ ID NO: 3982639 - DNA, 25 bp, Homo sapien
cctatcgtgtgtccatataaacccc

SEQ ID NO: 3982640 - DNA, 25 bp, Homo sapien
tataaaccccaagctccatgagcag

SEQ ID NO: 3982641 - DNA, 25 bp, Homo sapien
ttggataggggcgaaggtgatggtg

SEQ ID NO: 3982642 - DNA, 25 bp, Homo sapien
gaattggataggggcgaaggtgatg

SEQ ID NO: 3982643 - DNA, 25 bp, Homo sapien
ctagaattggataggggcgaaggtg

SEQ ID NO: 3982644 - DNA, 25 bp, Homo sapien
tagaattggataggggcgaaggtga

SEQ ID NO: 3982645 - DNA, 25 bp, Homo sapien
ctccctgtgggtccgttgctgtcat

SEQ ID NO: 3982646 - DNA, 25 bp, Homo sapien
ttgtctcttgtctggttctccctgt

SEQ ID NO: 3982647 - DNA, 25 bp, Homo sapien
tcttgtctcttgtctggttctccct

SEQ ID NO: 3982648 - DNA, 25 bp, Homo sapien
tggttctccctgtgggtccgttgct

SEQ ID NO: 3982649 - DNA, 25 bp, Homo sapien
acttcacatcaaactctactgtgtc

SEQ ID NO: 3982650 - DNA, 25 bp, Homo sapien
gacttcacatcaaactctactgtgt

SEQ ID NO: 3982651 - DNA, 25 bp, Homo sapien
ttgtaacaggtgtctttcagtatca

SEQ ID NO: 3982652 - DNA, 25 bp, Homo sapien
tctttattgacgttcattcctttca

SEQ ID NO: 3982653 - DNA, 25 bp, Homo sapien
cttcctttgtaacaggtgtctttca

SEQ ID NO: 3982654 - DNA, 25 bp, Homo sapien
actctctttattgacgttcattcct

SEQ ID NO: 3982655 - DNA, 25 bp, Homo sapien
ccgacctgctaaccagttggaggga

SEQ ID NO: 3982656 - DNA, 25 bp, Homo sapien
gcaggcagtccctggcttcagtttt

SEQ ID NO: 3982657 - DNA, 25 bp, Homo sapien
tatctgagttgtgaccctgggacga

SEQ ID NO: 3982658 - DNA, 25 bp, Homo sapien
ttggcaagcctccacacattgtgca

SEQ ID NO: 3982659 - DNA, 25 bp, Homo sapien
gcggggtgtcttccttgtccctgct

SEQ ID NO: 3982660 - DNA, 25 bp, Homo sapien
cggggtgtcttccttgtccctgctc

SEQ ID NO: 3982661 - DNA, 25 bp, Homo sapien
tgtcttccttgtccctgctcttgct

SEQ ID NO: 3982662 - DNA, 25 bp, Homo sapien
cttccttgtccctgctcttgctgct

SEQ ID NO: 3982663 - DNA, 25 bp, Homo sapien
cctccagcacgacctcctggaggct

SEQ ID NO: 3982664 - DNA, 25 bp, Homo sapien
tcagagacgtctaatggccttgcac

SEQ ID NO: 3982665 - DNA, 25 bp, Homo sapien
acgtctaatggccttgcacttccct

SEQ ID NO: 3982666 - DNA, 25 bp, Homo sapien
cttccctccagcacgacctcctgga

SEQ ID NO: 3982667 - DNA, 25 bp, Homo sapien
taaaccattggcctgttagaatatt

SEQ ID NO: 3982668 - DNA, 25 bp, Homo sapien
taatgcctaagtttttctgatcaat

SEQ ID NO: 3982669 - DNA, 25 bp, Homo sapien
ctaaagacaaatgggattcctaggg

SEQ ID NO: 3982670 - DNA, 25 bp, Homo sapien
ttctgatcaataaaccattggcctg

SEQ ID NO: 3982671 - DNA, 25 bp, Homo sapien
tagaagtgcttcttgagatcgtgca

SEQ ID NO: 3982672 - DNA, 25 bp, Homo sapien
tgatttttctctcccgatgatgata

SEQ ID NO: 3982673 - DNA, 25 bp, Homo sapien
aatggagcatcgttttggaggaatc

SEQ ID NO: 3982674 - DNA, 25 bp, Homo sapien
ttagatttccggacacaggaaggaa

SEQ ID NO: 3982675 - DNA, 25 bp, Homo sapien
tcattccggagagggtaggttgtta

SEQ ID NO: 3982676 - DNA, 25 bp, Homo sapien
gtttttagtcttgatccgagtactg

SEQ ID NO: 3982677 - DNA, 25 bp, Homo sapien
tagtcttgatccgagtactgatggg

SEQ ID NO: 3982678 - DNA, 25 bp, Homo sapien
tgacaagttcttctgtgagcccact

SEQ ID NO: 3982679 - DNA, 25 bp, Homo sapien
taccattgcctgatccacattgaca

SEQ ID NO: 3982680 - DNA, 25 bp, Homo sapien
taccactcatgcttgtaccccagaa

SEQ ID NO: 3982681 - DNA, 25 bp, Homo sapien
cctgacagtctatgctggatgcact

SEQ ID NO: 3982682 - DNA, 25 bp, Homo sapien
catagtacttaacacagagttaggg

SEQ ID NO: 3982683 - DNA, 25 bp, Homo sapien
cctgttagagactgttggtgtttgg

SEQ ID NO: 3982684 - DNA, 25 bp, Homo sapien
tgtcactcctgttagagactgttgg

SEQ ID NO: 3982685 - DNA, 25 bp, Homo sapien
taagtggaattatgtgtcactcctg

SEQ ID NO: 3982686 - DNA, 25 bp, Homo sapien
gaattatgtgtcactcctgttagag

SEQ ID NO: 3982687 - DNA, 25 bp, Homo sapien
ttattcatagaggttctctgccaag

SEQ ID NO: 3982688 - DNA, 25 bp, Homo sapien
tctgtgcaaagtgatgaactagatc

SEQ ID NO: 3982689 - DNA, 25 bp, Homo sapien
ctgtgcaaagtgatgaactagatcc

SEQ ID NO: 3982690 - DNA, 25 bp, Homo sapien
tctctgtgcaaagtgatgaactaga

SEQ ID NO: 3982691 - DNA, 25 bp, Homo sapien
aaaattaaatagtggtgctggatca

SEQ ID NO: 3982692 - DNA, 25 bp, Homo sapien
catatacttttaggatgtctgatga

SEQ ID NO: 3982693 - DNA, 25 bp, Homo sapien
gatttgaatgttttttgaccttata

SEQ ID NO: 3982694 - DNA, 25 bp, Homo sapien
gcgtatgtcatcacaaattcatttc

SEQ ID NO: 3982695 - DNA, 25 bp, Homo sapien
gaaacaacctttttgtcaacagtga

SEQ ID NO: 3982696 - DNA, 25 bp, Homo sapien
cagtgaagaaacaacctttttgtca

SEQ ID NO: 3982697 - DNA, 25 bp, Homo sapien
ctccagtgaagaaacaacctttttg

SEQ ID NO: 3982698 - DNA, 25 bp, Homo sapien
ttaggactccagtgaagaaacaacc

SEQ ID NO: 3982699 - DNA, 25 bp, Homo sapien
tcaaaacctctgtatagcttctctc

SEQ ID NO: 3982700 - DNA, 25 bp, Homo sapien
ttcaaaacctctgtatagcttctct

SEQ ID NO: 3982701 - DNA, 25 bp, Homo sapien
tctgtatagcttctctcaggaagaa

SEQ ID NO: 3982702 - DNA, 25 bp, Homo sapien
caaaacctctgtatagcttctctca

SEQ ID NO: 3982703 - DNA, 25 bp, Homo sapien
gagagatcttcttacgtcccaggcc

SEQ ID NO: 3982704 - DNA, 25 bp, Homo sapien
caagatggaacatagtcacatgccc

SEQ ID NO: 3982705 - DNA, 25 bp, Homo sapien
aaagcgtctgaagcttgagaccacc

SEQ ID NO: 3982706 - DNA, 25 bp, Homo sapien
tttatagcatcgtggaaagcgtctg

SEQ ID NO: 3982707 - DNA, 25 bp, Homo sapien
gagtcaaggtagcatccagagttct

SEQ ID NO: 3982708 - DNA, 25 bp, Homo sapien
catccagagttctccaagctgtgcc

SEQ ID NO: 3982709 - DNA, 25 bp, Homo sapien
gaaggggaactggttattcactgct

SEQ ID NO: 3982710 - DNA, 25 bp, Homo sapien
tgtgccgattgtcatgcacggagaa

SEQ ID NO: 3982711 - DNA, 25 bp, Homo sapien
gactttgtatatgggcggcagcttc

SEQ ID NO: 3982712 - DNA, 25 bp, Homo sapien
tcttttgcgttagcccgatgtgagg

SEQ ID NO: 3982713 - DNA, 25 bp, Homo sapien
cttgccgaggcaagtgtggactctg

SEQ ID NO: 3982714 - DNA, 25 bp, Homo sapien
tcttttgacgtagcactggtgatgg

SEQ ID NO: 3982715 - DNA, 25 bp, Homo sapien
cagttcttggagcaaaggcgttcaa

SEQ ID NO: 3982716 - DNA, 25 bp, Homo sapien
ttacggatttgtgtgtgtcgaagca

SEQ ID NO: 3982717 - DNA, 25 bp, Homo sapien
tgtcgaagcatccttgcgtccctgc

SEQ ID NO: 3982718 - DNA, 25 bp, Homo sapien
gagaaggcccgctcttcaagagagt

SEQ ID NO: 3982719 - DNA, 25 bp, Homo sapien
atgaagagggactctctagcagcag

SEQ ID NO: 3982720 - DNA, 25 bp, Homo sapien
gagatgaagagggactctctagcag

SEQ ID NO: 3982721 - DNA, 25 bp, Homo sapien
ttagagatgaagagggactctctag

SEQ ID NO: 3982722 - DNA, 25 bp, Homo sapien
tagtaggtatggttagagatgaaga

SEQ ID NO: 3982723 - DNA, 25 bp, Homo sapien
gccacggctcacttgactcctcctg

SEQ ID NO: 3982724 - DNA, 25 bp, Homo sapien
ggctcacttgactcctcctgggcag

SEQ ID NO: 3982725 - DNA, 25 bp, Homo sapien
ctgttggccacggctcacttgactc

SEQ ID NO: 3982726 - DNA, 25 bp, Homo sapien
gttggccacggctcacttgactcct

SEQ ID NO: 3982727 - DNA, 25 bp, Homo sapien
cactgtgcggtgcagcgttgtgaca

SEQ ID NO: 3982728 - DNA, 25 bp, Homo sapien
tgcggtgcagcgttgtgacagtcac

SEQ ID NO: 3982729 - DNA, 25 bp, Homo sapien
cggtgcagcgttgtgacagtcacca

SEQ ID NO: 3982730 - DNA, 25 bp, Homo sapien
tgcagcgttgtgacagtcaccatgg

SEQ ID NO: 3982731 - DNA, 25 bp, Homo sapien
gatagatgtgttgatcactcagagc

SEQ ID NO: 3982732 - DNA, 25 bp, Homo sapien
agatagatgtgttgatcactcagag

SEQ ID NO: 3982733 - DNA, 25 bp, Homo sapien
tcatggtccccattaggggggatct

SEQ ID NO: 3982734 - DNA, 25 bp, Homo sapien
cacactggcagtgcttcaagtcatg

SEQ ID NO: 3982735 - DNA, 25 bp, Homo sapien
tcacacactggcagtgcttcaagtc

SEQ ID NO: 3982736 - DNA, 25 bp, Homo sapien
gctccgcaatgggcacaatgccact

SEQ ID NO: 3982737 - DNA, 25 bp, Homo sapien
ctagcagatgctggcatgacaggcc

SEQ ID NO: 3982738 - DNA, 25 bp, Homo sapien
agatgctggcatgacaggccaggac

SEQ ID NO: 3982739 - DNA, 25 bp, Homo sapien
agcagatgctggcatgacaggccag

SEQ ID NO: 3982740 - DNA, 25 bp, Homo sapien
cagatgctggcatgacaggccagga

SEQ ID NO: 3982741 - DNA, 25 bp, Homo sapien
gggtgtgttccccaatcttcagaac

SEQ ID NO: 3982742 - DNA, 25 bp, Homo sapien
ttccccaatcttcagaacacaatgc

SEQ ID NO: 3982743 - DNA, 25 bp, Homo sapien
gctgagggggtgtgttccccaatct

SEQ ID NO: 3982744 - DNA, 25 bp, Homo sapien
gcaagggctgagggggtgtgttccc

SEQ ID NO: 3982745 - DNA, 25 bp, Homo sapien
cacagcactcagacagcccatacaa

SEQ ID NO: 3982746 - DNA, 25 bp, Homo sapien
tccttcttgtactgggcacagcact

SEQ ID NO: 3982747 - DNA, 25 bp, Homo sapien
tcagacagcccatacaacccttggg

SEQ ID NO: 3982748 - DNA, 25 bp, Homo sapien
caacccttgggtggtggtctcgcca

SEQ ID NO: 3982749 - DNA, 25 bp, Homo sapien
caagggagaccacgcccttgtctac

SEQ ID NO: 3982750 - DNA, 25 bp, Homo sapien
gcccttgtctaccttgctgccccca

SEQ ID NO: 3982751 - DNA, 25 bp, Homo sapien
cccttgtctaccttgctgcccccaa

SEQ ID NO: 3982752 - DNA, 25 bp, Homo sapien
ctgcaagggagaccacgcccttgtc

SEQ ID NO: 3982753 - DNA, 25 bp, Homo sapien
tgttctcggcgttaagggactgcag

SEQ ID NO: 3982754 - DNA, 25 bp, Homo sapien
gcagctgacagtagaagcgccagtt

SEQ ID NO: 3982755 - DNA, 25 bp, Homo sapien
aagaggatgacgtccccgatgcagg

SEQ ID NO: 3982756 - DNA, 25 bp, Homo sapien
cagggtcaatgctggatatcggtag

SEQ ID NO: 3982757 - DNA, 25 bp, Homo sapien
ttccttggaaatccagacggaggcc

SEQ ID NO: 3982758 - DNA, 25 bp, Homo sapien
tcttccttggaaatccagacggagg

SEQ ID NO: 3982759 - DNA, 25 bp, Homo sapien
ttcttccttggaaatccagacggag

SEQ ID NO: 3982760 - DNA, 25 bp, Homo sapien
cttccttggaaatccagacggaggc

SEQ ID NO: 3982761 - DNA, 25 bp, Homo sapien
ccagggatctcctaaaataactgag

SEQ ID NO: 3982762 - DNA, 25 bp, Homo sapien
actgagagtctgtggacagagtgtg

SEQ ID NO: 3982763 - DNA, 25 bp, Homo sapien
tgtggttggggcacctctgcatacc

SEQ ID NO: 3982764 - DNA, 25 bp, Homo sapien
ggcacctctgcataccctgtagttg

SEQ ID NO: 3982765 - DNA, 25 bp, Homo sapien
taatgtggcaattacggtcctccca

SEQ ID NO: 3982766 - DNA, 25 bp, Homo sapien
tgactgtcacctctaatgtggcaat

SEQ ID NO: 3982767 - DNA, 25 bp, Homo sapien
tggcaatagctagattgcaaccagc

SEQ ID NO: 3982768 - DNA, 25 bp, Homo sapien
ccagcaaggtcaactgcaaaatgac

SEQ ID NO: 3982769 - DNA, 25 bp, Homo sapien
gggttgaagcgtcgccctttggtca

SEQ ID NO: 3982770 - DNA, 25 bp, Homo sapien
aggtgggttgaagcgtcgccctttg

SEQ ID NO: 3982771 - DNA, 25 bp, Homo sapien
tgaaggtgggttgaagcgtcgccct

SEQ ID NO: 3982772 - DNA, 25 bp, Homo sapien
tctgaaggtgggttgaagcgtcgcc

SEQ ID NO: 3982773 - DNA, 25 bp, Homo sapien
ggaagctgcttcctaaacttcataa

SEQ ID NO: 3982774 - DNA, 25 bp, Homo sapien
gctctacacgtctgggaagctcctc

SEQ ID NO: 3982775 - DNA, 25 bp, Homo sapien
tcacctctccataagctctacatgt

SEQ ID NO: 3982776 - DNA, 25 bp, Homo sapien
tctccataagctctacatgtctggg

SEQ ID NO: 3982777 - DNA, 25 bp, Homo sapien
ttgctgtagtagtgatagaggacct

SEQ ID NO: 3982778 - DNA, 25 bp, Homo sapien
ttatccactgccagcactgaagggc

SEQ ID NO: 3982779 - DNA, 25 bp, Homo sapien
atgtgacaccggagatgcacaggtc

SEQ ID NO: 3982780 - DNA, 25 bp, Homo sapien
gaggtggcccttagatgtgacaccg

SEQ ID NO: 3982781 - DNA, 25 bp, Homo sapien
taccgtaacggagagctgatagggc

SEQ ID NO: 3982782 - DNA, 25 bp, Homo sapien
actcagctgagtaaacgataccgta

SEQ ID NO: 3982783 - DNA, 25 bp, Homo sapien
taaacgataccgtaacggagagctg

SEQ ID NO: 3982784 - DNA, 25 bp, Homo sapien
taacggagagctgatagggctgcca

SEQ ID NO: 3982785 - DNA, 25 bp, Homo sapien
gcacagaagcaaacgacctctcttt

SEQ ID NO: 3982786 - DNA, 25 bp, Homo sapien
aagcacagaagcaaacgacctctct

SEQ ID NO: 3982787 - DNA, 25 bp, Homo sapien
cacagaagcaaacgacctctctttg

SEQ ID NO: 3982788 - DNA, 25 bp, Homo sapien
agaagcaaacgacctctctttgtat

SEQ ID NO: 3982789 - DNA, 25 bp, Homo sapien
ctgtaacaacaatgatcagaatgat

SEQ ID NO: 3982790 - DNA, 25 bp, Homo sapien
gtaacaacaatgatcagaatgatac

SEQ ID NO: 3982791 - DNA, 25 bp, Homo sapien
tgtaacaacaatgatcagaatgata

SEQ ID NO: 3982792 - DNA, 25 bp, Homo sapien
tatacagctccatatagtcagaggt

SEQ ID NO: 3982793 - DNA, 25 bp, Homo sapien
ttaagagaccagctcctttgacatg

SEQ ID NO: 3982794 - DNA, 25 bp, Homo sapien
cattgagagggtaaatcaagcttcc

SEQ ID NO: 3982795 - DNA, 25 bp, Homo sapien
gagtcgatttgcaccacctactgga

SEQ ID NO: 3982796 - DNA, 25 bp, Homo sapien
cctgggcagagtgaccaactgatcc

SEQ ID NO: 3982797 - DNA, 25 bp, Homo sapien
gatatctttacaaatacacggcaca

SEQ ID NO: 3982798 - DNA, 25 bp, Homo sapien
gtaggcaggcaggtacctttcccca

SEQ ID NO: 3982799 - DNA, 25 bp, Homo sapien
gacaagcaggtttacagtgacaaat

SEQ ID NO: 3982800 - DNA, 25 bp, Homo sapien
tagatatgcctggtacctactttgc

SEQ ID NO: 3982801 - DNA, 25 bp, Homo sapien
catggttcatccaactagatatgcc

SEQ ID NO: 3982802 - DNA, 25 bp, Homo sapien
tcctctccgctactattccaaagaa

SEQ ID NO: 3982803 - DNA, 25 bp, Homo sapien
tgcccaccaatgacagatcggattt

SEQ ID NO: 3982804 - DNA, 25 bp, Homo sapien
gtgttcccagcacccagcacatgac

SEQ ID NO: 3982805 - DNA, 25 bp, Homo sapien
ctttgtgttcccagcacccagcaca

SEQ ID NO: 3982806 - DNA, 25 bp, Homo sapien
tttgtgttcccagcacccagcacat

SEQ ID NO: 3982807 - DNA, 25 bp, Homo sapien
ttgtgttcccagcacccagcacatg

SEQ ID NO: 3982808 - DNA, 25 bp, Homo sapien
tgttaccattcccagcccagtgtgt

SEQ ID NO: 3982809 - DNA, 25 bp, Homo sapien
gctgatctgcagactccaaggaggt

SEQ ID NO: 3982810 - DNA, 25 bp, Homo sapien
catccctcgcgtgaaagcagtgcta

SEQ ID NO: 3982811 - DNA, 25 bp, Homo sapien
ttgacagacagaagaacgtggccag

SEQ ID NO: 3982812 - DNA, 25 bp, Homo sapien
tcacagaagccatgttagtggacat

SEQ ID NO: 3982813 - DNA, 25 bp, Homo sapien
ggaggccagtgcagaccatcctctg

SEQ ID NO: 3982814 - DNA, 25 bp, Homo sapien
tctggaagccttcctgcgtggtgga

SEQ ID NO: 3982815 - DNA, 25 bp, Homo sapien
cattctaaatgacccctcagagagc

SEQ ID NO: 3982816 - DNA, 25 bp, Homo sapien
cttgtgctgggtgtccttttcctac

SEQ ID NO: 3982817 - DNA, 25 bp, Homo sapien
acccacaccaattatgtccaatcag

SEQ ID NO: 3982818 - DNA, 25 bp, Homo sapien
ggataaagaagcctgagactctcca

SEQ ID NO: 3982819 - DNA, 25 bp, Homo sapien
aatcataaacccacaccaattatgt

SEQ ID NO: 3982820 - DNA, 25 bp, Homo sapien
ccagaatctcaaagctctccaggaa

SEQ ID NO: 3982821 - DNA, 25 bp, Homo sapien
gctttgaatgggactttcactcggg

SEQ ID NO: 3982822 - DNA, 25 bp, Homo sapien
ggagaaatgccgcagcagcaaatga

SEQ ID NO: 3982823 - DNA, 25 bp, Homo sapien
cccaatgttgacagacaagaggaag

SEQ ID NO: 3982824 - DNA, 25 bp, Homo sapien
aggatcacttcagccgaggaaggag

SEQ ID NO: 3982825 - DNA, 25 bp, Homo sapien
cacttcagccgaggaaggagttcaa

SEQ ID NO: 3982826 - DNA, 25 bp, Homo sapien
ggatcacttcagccgaggaaggagt

SEQ ID NO: 3982827 - DNA, 25 bp, Homo sapien
tcacttcagccgaggaaggagttca

SEQ ID NO: 3982828 - DNA, 25 bp, Homo sapien
aacctctcaccagaagctagagcca

SEQ ID NO: 3982829 - DNA, 25 bp, Homo sapien
tgccatattatgacgcagcctgaaa

SEQ ID NO: 3982830 - DNA, 25 bp, Homo sapien
acacatgtccatttacccattgatc

SEQ ID NO: 3982831 - DNA, 25 bp, Homo sapien
gagccatgtgcttgaacttcccagc

SEQ ID NO: 3982832 - DNA, 25 bp, Homo sapien
caccgcgctaggctgcatattggct

SEQ ID NO: 3982833 - DNA, 25 bp, Homo sapien
aaagcttgcaaacggcccgggctat

SEQ ID NO: 3982834 - DNA, 25 bp, Homo sapien
aaagcgctggcatcgtttcctggga

SEQ ID NO: 3982835 - DNA, 25 bp, Homo sapien
tgcgtttgacagtttgagatgacac

SEQ ID NO: 3982836 - DNA, 25 bp, Homo sapien
cacatgggcactaaaaggcgggcag

SEQ ID NO: 3982837 - DNA, 25 bp, Homo sapien
agagcgcccgaatggaaacctaggc

SEQ ID NO: 3982838 - DNA, 25 bp, Homo sapien
taggcgttacgaggccccaggttca

SEQ ID NO: 3982839 - DNA, 25 bp, Homo sapien
aggagcgcccagtctcgagatggct

SEQ ID NO: 3982840 - DNA, 25 bp, Homo sapien
cccgtgtgaaaagatgtgacactga

SEQ ID NO: 3982841 - DNA, 25 bp, Homo sapien
ggtgcccgtgtgaaaagatgtgaca

SEQ ID NO: 3982842 - DNA, 25 bp, Homo sapien
gggaagaagtttgaacctctcacta

SEQ ID NO: 3982843 - DNA, 25 bp, Homo sapien
ctaattcacgtaacgggagccgccg

SEQ ID NO: 3982844 - DNA, 25 bp, Homo sapien
atcggacgacccccagaactgtttg

SEQ ID NO: 3982845 - DNA, 25 bp, Homo sapien
aggatcggacgacccccagaactgt

SEQ ID NO: 3982846 - DNA, 25 bp, Homo sapien
gcaggatcggacgacccccagaact

SEQ ID NO: 3982847 - DNA, 25 bp, Homo sapien
tgcaggatcggacgacccccagaac

SEQ ID NO: 3982848 - DNA, 25 bp, Homo sapien
gcggcgtgcagagggcggagcctag

SEQ ID NO: 3982849 - DNA, 25 bp, Homo sapien
tgcagagggcggagcctaggagtca

SEQ ID NO: 3982850 - DNA, 25 bp, Homo sapien
gcggagcctaggagtcagataccgc

SEQ ID NO: 3982851 - DNA, 25 bp, Homo sapien
ctaggagtcagataccgcgagaagt

SEQ ID NO: 3982852 - DNA, 25 bp, Homo sapien
tgactcgccgagaatgagaccgaac

SEQ ID NO: 3982853 - DNA, 25 bp, Homo sapien
taaatatgtcgttccaaaacgtggc

SEQ ID NO: 3982854 - DNA, 25 bp, Homo sapien
agttgaagtccatgctccagtcggc

SEQ ID NO: 3982855 - DNA, 25 bp, Homo sapien
aaacggtgccaggtagtgactcgcc

SEQ ID NO: 3982856 - DNA, 25 bp, Homo sapien
gctggcaagaaatagttcatggtca

SEQ ID NO: 3982857 - DNA, 25 bp, Homo sapien
tgttgcagtttctcaagaactaccc

SEQ ID NO: 3982858 - DNA, 25 bp, Homo sapien
catgtgagtatgagcctaggcacgg

SEQ ID NO: 3982859 - DNA, 25 bp, Homo sapien
gaccaccgtttagttcatcatgtga

SEQ ID NO: 3982860 - DNA, 25 bp, Homo sapien
gagggttatacttaagtgttgtaca

SEQ ID NO: 3982861 - DNA, 25 bp, Homo sapien
tacttaagtgttgtacagtagaccc

SEQ ID NO: 3982862 - DNA, 25 bp, Homo sapien
acagtagaccccacttatccttgga

SEQ ID NO: 3982863 - DNA, 25 bp, Homo sapien
tggttaatagtgaagagggttatac

SEQ ID NO: 3982864 - DNA, 25 bp, Homo sapien
gagtttttcagtgctttttcctata

SEQ ID NO: 3982865 - DNA, 25 bp, Homo sapien
gagagtttttcagtgctttttccta

SEQ ID NO: 3982866 - DNA, 25 bp, Homo sapien
ctggagagtttttcagtgctttttc

SEQ ID NO: 3982867 - DNA, 25 bp, Homo sapien
gtttttcagtgctttttcctataca

SEQ ID NO: 3982868 - DNA, 25 bp, Homo sapien
tcttatctcatcaagagacagtgct

SEQ ID NO: 3982869 - DNA, 25 bp, Homo sapien
gagcaatgagccgtggttgactgca

SEQ ID NO: 3982870 - DNA, 25 bp, Homo sapien
caatgagccgtggttgactgcaggt

SEQ ID NO: 3982871 - DNA, 25 bp, Homo sapien
gctaaggtttacactgatgtctgct

SEQ ID NO: 3982872 - DNA, 25 bp, Homo sapien
cagtccaagttaagtacagtgccac

SEQ ID NO: 3982873 - DNA, 25 bp, Homo sapien
gacagcccctttgtcagtatcgagc

SEQ ID NO: 3982874 - DNA, 25 bp, Homo sapien
tgagcatgggaaaacgaatccgctg

SEQ ID NO: 3982875 - DNA, 25 bp, Homo sapien
tgacgtccactcaggtgaactgctg

SEQ ID NO: 3982876 - DNA, 25 bp, Homo sapien
aacaccgggtgctggcagatcttca

SEQ ID NO: 3982877 - DNA, 25 bp, Homo sapien
gaaagatgctccctgcgaactgctt

SEQ ID NO: 3982878 - DNA, 25 bp, Homo sapien
ttcattacagcaaggccgcaaagct

SEQ ID NO: 3982879 - DNA, 25 bp, Homo sapien
tctaggttggtgatgaacaccttag

SEQ ID NO: 3982880 - DNA, 25 bp, Homo sapien
tattctcctctcccgcagaggagtc

SEQ ID NO: 3982881 - DNA, 25 bp, Homo sapien
ttctcctctcccgcagaggagtctt

SEQ ID NO: 3982882 - DNA, 25 bp, Homo sapien
ctattctcctctcccgcagaggagt

SEQ ID NO: 3982883 - DNA, 25 bp, Homo sapien
ctcctctcccgcagaggagtctttt

SEQ ID NO: 3982884 - DNA, 25 bp, Homo sapien
tagacatggttgactgccacgtggc

SEQ ID NO: 3982885 - DNA, 25 bp, Homo sapien
ttggaacttggtcagatagacatgg

SEQ ID NO: 3982886 - DNA, 25 bp, Homo sapien
tgcctccagaggtcaagctgttacc

SEQ ID NO: 3982887 - DNA, 25 bp, Homo sapien
ggtgtccagagttttcattggaact

SEQ ID NO: 3982888 - DNA, 25 bp, Homo sapien
cactgtcactggtccttcggtgcct

SEQ ID NO: 3982889 - DNA, 25 bp, Homo sapien
caggcttcaagttttcctagcagtc

SEQ ID NO: 3982890 - DNA, 25 bp, Homo sapien
cctgctacggctttagtgtgggaag

SEQ ID NO: 3982891 - DNA, 25 bp, Homo sapien
tcggtgccttttcgcctgtttggga

SEQ ID NO: 3982892 - DNA, 25 bp, Homo sapien
tgtatttaatgcatgttctgaaagg

SEQ ID NO: 3982893 - DNA, 25 bp, Homo sapien
tgacagttgatcaagaacaggtact

SEQ ID NO: 3982894 - DNA, 25 bp, Homo sapien
atgttctgaaaggattcacttttga

SEQ ID NO: 3982895 - DNA, 25 bp, Homo sapien
gatttttcaaagacgagctgttgtg

SEQ ID NO: 3982896 - DNA, 25 bp, Homo sapien
cattgggttttaacttacagtgcca

SEQ ID NO: 3982897 - DNA, 25 bp, Homo sapien
tcagctactgaaaatccggttttct

SEQ ID NO: 3982898 - DNA, 25 bp, Homo sapien
tagcgaagtcctatgaccctccatt

SEQ ID NO: 3982899 - DNA, 25 bp, Homo sapien
cagtatcagaattttagcgaagtcc

SEQ ID NO: 3982900 - DNA, 25 bp, Homo sapien
gtccttgtcattaactaccttccag

SEQ ID NO: 3982901 - DNA, 25 bp, Homo sapien
tgttcagtgtggagatatggacgtc

SEQ ID NO: 3982902 - DNA, 25 bp, Homo sapien
tgcataggagtaataagcggaatct

SEQ ID NO: 3982903 - DNA, 25 bp, Homo sapien
taccttccagtatgcattgcctttg

SEQ ID NO: 3982904 - DNA, 25 bp, Homo sapien
aacttctgtcttcggtcataaaacg

SEQ ID NO: 3982905 - DNA, 25 bp, Homo sapien
tgtcactgtcatatctccagtattg

SEQ ID NO: 3982906 - DNA, 25 bp, Homo sapien
ttctgaaatcaatttgggatagctt

SEQ ID NO: 3982907 - DNA, 25 bp, Homo sapien
tcggtcataaaacgccgtgtctagg

SEQ ID NO: 3982908 - DNA, 25 bp, Homo sapien
tttgcgaatccagtcaaacgcagta

SEQ ID NO: 3982909 - DNA, 25 bp, Homo sapien
gccagtaccagctgttacggaagaa

SEQ ID NO: 3982910 - DNA, 25 bp, Homo sapien
gatagggtccccatagcgtgtccta

SEQ ID NO: 3982911 - DNA, 25 bp, Homo sapien
agtatcaaatgatccctcacaggag

SEQ ID NO: 3982912 - DNA, 25 bp, Homo sapien
tgtctgaccagtccaactcaaaggc

SEQ ID NO: 3982913 - DNA, 25 bp, Homo sapien
tatggatcccgtcctgtaggtgtga

SEQ ID NO: 3982914 - DNA, 25 bp, Homo sapien
tcctgtaggtgtgaggcaagcccag

SEQ ID NO: 3982915 - DNA, 25 bp, Homo sapien
taatttggttgcattatggatcccg

SEQ ID NO: 3982916 - DNA, 25 bp, Homo sapien
aggtgtgaagtgctcgtcgtcgtca

SEQ ID NO: 3982917 - DNA, 25 bp, Homo sapien
ttgagaaggctgatgcccgtgtcac

SEQ ID NO: 3982918 - DNA, 25 bp, Homo sapien
ggcgccaggcgtgtgcaaactcctg

SEQ ID NO: 3982919 - DNA, 25 bp, Homo sapien
aagtgaatgtcacctaggcgccagg

SEQ ID NO: 3982920 - DNA, 25 bp, Homo sapien
cagcttgatgtcgaccgcggccccg

SEQ ID NO: 3982921 - DNA, 25 bp, Homo sapien
gctcagcgtcctcttggagaaggcc

SEQ ID NO: 3982922 - DNA, 25 bp, Homo sapien
tcggccacggacagttggctgctca

SEQ ID NO: 3982923 - DNA, 25 bp, Homo sapien
acaatgcgccgctggtcggccacgg

SEQ ID NO: 3982924 - DNA, 25 bp, Homo sapien
gggggcggtgggcgcatgtccggga

SEQ ID NO: 3982925 - DNA, 25 bp, Homo sapien
tgccaaccccgccgggacaaggaca

SEQ ID NO: 3982926 - DNA, 25 bp, Homo sapien
ggggcggtgggcgcatgtccgggac

SEQ ID NO: 3982927 - DNA, 25 bp, Homo sapien
ctgaccagccgtatctggacaggaa

SEQ ID NO: 3982928 - DNA, 25 bp, Homo sapien
cggcagcgcgttcgcccgctggaac

SEQ ID NO: 3982929 - DNA, 25 bp, Homo sapien
cagcgcggccggttcatggccgcta

SEQ ID NO: 3982930 - DNA, 25 bp, Homo sapien
ccgctggaacctgcgcaccgcctcg

SEQ ID NO: 3982931 - DNA, 25 bp, Homo sapien
tcggcaatgggcttggcctggcgca

SEQ ID NO: 3982932 - DNA, 25 bp, Homo sapien
gctccaggtccgagcggtcccggct

SEQ ID NO: 3982933 - DNA, 25 bp, Homo sapien
gagcagcgtggaggtcggcaatggg

SEQ ID NO: 3982934 - DNA, 25 bp, Homo sapien
gcctggcgcagtggggacggctcca

SEQ ID NO: 3982935 - DNA, 25 bp, Homo sapien
cagcagtgtcggacggaagatggag

SEQ ID NO: 3982936 - DNA, 25 bp, Homo sapien
cagtgtcggacggaagatggaggcg

SEQ ID NO: 3982937 - DNA, 25 bp, Homo sapien
gacggaagatggaggcggcgagcat

SEQ ID NO: 3982938 - DNA, 25 bp, Homo sapien
cagagcagcagtgtcggacggaaga

SEQ ID NO: 3982939 - DNA, 25 bp, Homo sapien
cacagccgtccatgggaatattgag

SEQ ID NO: 3982940 - DNA, 25 bp, Homo sapien
tgcagactgactgggtcacagccgt

SEQ ID NO: 3982941 - DNA, 25 bp, Homo sapien
tttgggatcctgaagacagagcccc

SEQ ID NO: 3982942 - DNA, 25 bp, Homo sapien
aattagcttggcatcggccgggcgt

SEQ ID NO: 3982943 - DNA, 25 bp, Homo sapien
attcctcattgggcccacaccgaat

SEQ ID NO: 3982944 - DNA, 25 bp, Homo sapien
ttcctcattgggcccacaccgaatg

SEQ ID NO: 3982945 - DNA, 25 bp, Homo sapien
acccaccacgatccttgttctgttt

SEQ ID NO: 3982946 - DNA, 25 bp, Homo sapien
ccaccacgatccttgttctgtttga

SEQ ID NO: 3982947 - DNA, 25 bp, Homo sapien
cccaccacgatccttgttctgtttg

SEQ ID NO: 3982948 - DNA, 25 bp, Homo sapien
cacccaccacgatccttgttctgtt

SEQ ID NO: 3982949 - DNA, 25 bp, Homo sapien
gaattatgctcatcgttgctggtgg

SEQ ID NO: 3982950 - DNA, 25 bp, Homo sapien
tggtggtatccctcagaaagctccc

SEQ ID NO: 3982951 - DNA, 25 bp, Homo sapien
gaaagctcccaactggttctgctct

SEQ ID NO: 3982952 - DNA, 25 bp, Homo sapien
tgatgaggagatgcccgcagtctgc

SEQ ID NO: 3982953 - DNA, 25 bp, Homo sapien
agaacgaaagaaactgtccaagcaa

SEQ ID NO: 3982954 - DNA, 25 bp, Homo sapien
taagaacgaaagaaactgtccaagc

SEQ ID NO: 3982955 - DNA, 25 bp, Homo sapien
agcagtagggtgcttaccagtaaga

SEQ ID NO: 3982956 - DNA, 25 bp, Homo sapien
tccaagcagtagggtgcttaccagt

SEQ ID NO: 3982957 - DNA, 25 bp, Homo sapien
agggcccaagatgcccactggagct

SEQ ID NO: 3982958 - DNA, 25 bp, Homo sapien
gaaaaaatctcgtagtaatagtggc

SEQ ID NO: 3982959 - DNA, 25 bp, Homo sapien
ttctttccccaatgtcatctcaggg

SEQ ID NO: 3982960 - DNA, 25 bp, Homo sapien
taaacaagatagaagtcgatatgtc

SEQ ID NO: 3982961 - DNA, 25 bp, Homo sapien
ttcacagggaagttgtattaacgct

SEQ ID NO: 3982962 - DNA, 25 bp, Homo sapien
catcaatgagctgtggccggaaggt

SEQ ID NO: 3982963 - DNA, 25 bp, Homo sapien
gagtgaccacgtgtaactcatgagt

SEQ ID NO: 3982964 - DNA, 25 bp, Homo sapien
cacaaaacttacaacactgtctgag

SEQ ID NO: 3982965 - DNA, 25 bp, Homo sapien
gcagctcccgagagcccttgccgat

SEQ ID NO: 3982966 - DNA, 25 bp, Homo sapien
tcacgtgcacgtgggcctgaggcca

SEQ ID NO: 3982967 - DNA, 25 bp, Homo sapien
ttgaggcaggagtctgacggcagca

SEQ ID NO: 3982968 - DNA, 25 bp, Homo sapien
cagggctagggtttaagctggcttc

SEQ ID NO: 3982969 - DNA, 25 bp, Homo sapien
atggggccagcgctaggtggctgac

SEQ ID NO: 3982970 - DNA, 25 bp, Homo sapien
catggggccagcgctaggtggctga

SEQ ID NO: 3982971 - DNA, 25 bp, Homo sapien
tgcatggggccagcgctaggtggct

SEQ ID NO: 3982972 - DNA, 25 bp, Homo sapien
agccttcctgatgccagtggccagg

SEQ ID NO: 3982973 - DNA, 25 bp, Homo sapien
gccagggcttgtggcgtggggctct

SEQ ID NO: 3982974 - DNA, 25 bp, Homo sapien
gctggagagccttcctgatgccagt

SEQ ID NO: 3982975 - DNA, 25 bp, Homo sapien
catggggctggagagccttcctgat

SEQ ID NO: 3982976 - DNA, 25 bp, Homo sapien
gcgcgagccgtagtggggccgatgg

SEQ ID NO: 3982977 - DNA, 25 bp, Homo sapien
ccagcgcgcgagccgtagtggggcc

SEQ ID NO: 3982978 - DNA, 25 bp, Homo sapien
gcgcgcgagccgtagtggggccgat

SEQ ID NO: 3982979 - DNA, 25 bp, Homo sapien
agcgcgcgagccgtagtggggccga

SEQ ID NO: 3982980 - DNA, 25 bp, Homo sapien
cccagcttctgagcgtgcaaaatac

SEQ ID NO: 3982981 - DNA, 25 bp, Homo sapien
agaaaacagggcttcagcacaccag

SEQ ID NO: 3982982 - DNA, 25 bp, Homo sapien
tataaaaatgacaacactgcccgat

SEQ ID NO: 3982983 - DNA, 25 bp, Homo sapien
ctttgcggttggacgttactgctca

SEQ ID NO: 3982984 - DNA, 25 bp, Homo sapien
tctgccaccctgagcgactgtcgcc

SEQ ID NO: 3982985 - DNA, 25 bp, Homo sapien
aggggcagggacttgaaggccccag

SEQ ID NO: 3982986 - DNA, 25 bp, Homo sapien
ccctgagcgactgtcgccaggctca

SEQ ID NO: 3982987 - DNA, 25 bp, Homo sapien
gccaccctgagcgactgtcgccagg

SEQ ID NO: 3982988 - DNA, 25 bp, Homo sapien
cagtgcagtccttcctcagaggctc

SEQ ID NO: 3982989 - DNA, 25 bp, Homo sapien
tccttcctcagaggctctagctgca

SEQ ID NO: 3982990 - DNA, 25 bp, Homo sapien
agacagttcttcttcgggtgttggg

SEQ ID NO: 3982991 - DNA, 25 bp, Homo sapien
catcacggctgtgtcagtgcagtcc

SEQ ID NO: 3982992 - DNA, 25 bp, Homo sapien
tccccaagaaagtagagccatcaag

SEQ ID NO: 3982993 - DNA, 25 bp, Homo sapien
gggcagtgactgaatccccaagaaa

SEQ ID NO: 3982994 - DNA, 25 bp, Homo sapien
gactgaatccccaagaaagtagagc

SEQ ID NO: 3982995 - DNA, 25 bp, Homo sapien
caagaaagtagagccatcaaggtca

SEQ ID NO: 3982996 - DNA, 25 bp, Homo sapien
cctgtttgggagcaagtgagcatcc

SEQ ID NO: 3982997 - DNA, 25 bp, Homo sapien
cataacctcggatgctgcgggactg

SEQ ID NO: 3982998 - DNA, 25 bp, Homo sapien
tctgcattgagactgtggaccccaa

SEQ ID NO: 3982999 - DNA, 25 bp, Homo sapien
tgaacaagcaccacaggctcgatgg

SEQ ID NO: 3983000 - DNA, 25 bp, Homo sapien
tagggaaatcgaaatcaaatacatg

SEQ ID NO: 3983001 - DNA, 25 bp, Homo sapien
aaggatggccataatcagagacaga

SEQ ID NO: 3983002 - DNA, 25 bp, Homo sapien
aacccttacacattgctagtgacaa

SEQ ID NO: 3983003 - DNA, 25 bp, Homo sapien
cagaataaggaattctggcaattca

SEQ ID NO: 3983004 - DNA, 25 bp, Homo sapien
taaagtttacatattgggctgggcg

SEQ ID NO: 3983005 - DNA, 25 bp, Homo sapien
gagcactaggtgtgaagatacccac

SEQ ID NO: 3983006 - DNA, 25 bp, Homo sapien
tactggtaccagctacagcatggat

SEQ ID NO: 3983007 - DNA, 25 bp, Homo sapien
tgaatgctcacatgatgctgcccca

SEQ ID NO: 3983008 - DNA, 25 bp, Homo sapien
caagtgcgtggtcttcccaagtcaa

SEQ ID NO: 3983009 - DNA, 25 bp, Homo sapien
ctttgatcttttgtggtgcgcctgc

SEQ ID NO: 3983010 - DNA, 25 bp, Homo sapien
aatgctgtacaaacagtgggcccta

SEQ ID NO: 3983011 - DNA, 25 bp, Homo sapien
gcaagttcaggtcggaagtcacccc

SEQ ID NO: 3983012 - DNA, 25 bp, Homo sapien
tgttaggcttataccaccaggcatc

SEQ ID NO: 3983013 - DNA, 25 bp, Homo sapien
caactcacgggctaggactgtgtcc

SEQ ID NO: 3983014 - DNA, 25 bp, Homo sapien
taatcaatcactgtagtaagaggcg

SEQ ID NO: 3983015 - DNA, 25 bp, Homo sapien
gatacaggataggaacacgcactca

SEQ ID NO: 3983016 - DNA, 25 bp, Homo sapien
cttcctcggtgacctgtgtgagtcc

SEQ ID NO: 3983017 - DNA, 25 bp, Homo sapien
cctgtaatgaggaacactgacctct

SEQ ID NO: 3983018 - DNA, 25 bp, Homo sapien
tcctcacctgtaatgaggaacactg

SEQ ID NO: 3983019 - DNA, 25 bp, Homo sapien
ggaactcaaaacatgactttggcaa

SEQ ID NO: 3983020 - DNA, 25 bp, Homo sapien
taaaactgggagagcggtgcatact

SEQ ID NO: 3983021 - DNA, 25 bp, Homo sapien
tcagcagtgtgacctacagacaggc

SEQ ID NO: 3983022 - DNA, 25 bp, Homo sapien
gagaattgtatcagttactgcccag

SEQ ID NO: 3983023 - DNA, 25 bp, Homo sapien
gacaatgtggaatcagtcttcccag

SEQ ID NO: 3983024 - DNA, 25 bp, Homo sapien
aatttgatcgatattgtcaccagat

SEQ ID NO: 3983025 - DNA, 25 bp, Homo sapien
ccagataactcctgaatgtgcttga

SEQ ID NO: 3983026 - DNA, 25 bp, Homo sapien
tgtgcttgagactgtatgtgaggcc

SEQ ID NO: 3983027 - DNA, 25 bp, Homo sapien
tgaggccagagggactaaaaaatgt

SEQ ID NO: 3983028 - DNA, 25 bp, Homo sapien
gagagacaacattcctccggcttca

SEQ ID NO: 3983029 - DNA, 25 bp, Homo sapien
gccaccaaggcggttttagcacagg

SEQ ID NO: 3983030 - DNA, 25 bp, Homo sapien
ttagcacaggagtggttcccggctg

SEQ ID NO: 3983031 - DNA, 25 bp, Homo sapien
tgccatcagaaagctggtgctgccc

SEQ ID NO: 3983032 - DNA, 25 bp, Homo sapien
ctgtctgatacacagttatgctttc

SEQ ID NO: 3983033 - DNA, 25 bp, Homo sapien
ttcctgggtgtgcaactgtctgata

SEQ ID NO: 3983034 - DNA, 25 bp, Homo sapien
tagtagctgttcaggttcccttgga

SEQ ID NO: 3983035 - DNA, 25 bp, Homo sapien
agctgttcaggttcccttggattcc

SEQ ID NO: 3983036 - DNA, 25 bp, Homo sapien
caaaagcaggaaagactttaccgca

SEQ ID NO: 3983037 - DNA, 25 bp, Homo sapien
ttggtgaaacctcccaatacagcac

SEQ ID NO: 3983038 - DNA, 25 bp, Homo sapien
ctttaccgcactgggcacacaatgg

SEQ ID NO: 3983039 - DNA, 25 bp, Homo sapien
gcacagttggtgaaacctcccaata

SEQ ID NO: 3983040 - DNA, 25 bp, Homo sapien
tttcagtcagatattgacttatgag

SEQ ID NO: 3983041 - DNA, 25 bp, Homo sapien
tcagtcagatattgacttatgaggg

SEQ ID NO: 3983042 - DNA, 25 bp, Homo sapien
ggcagccagatggtaggtgaaaagt

SEQ ID NO: 3983043 - DNA, 25 bp, Homo sapien
tattgacttatgaggggcagccaga

SEQ ID NO: 3983044 - DNA, 25 bp, Homo sapien
tattagagcttcaaaaccctgggag

SEQ ID NO: 3983045 - DNA, 25 bp, Homo sapien
gcaaaaggtgcgcaggtgacagcta

SEQ ID NO: 3983046 - DNA, 25 bp, Homo sapien
cctcttggtgaaggactggagacac

SEQ ID NO: 3983047 - DNA, 25 bp, Homo sapien
tgctgacagtcttgggagccacggc

SEQ ID NO: 3983048 - DNA, 25 bp, Homo sapien
tttgtccttgagcgcttttggcagg

SEQ ID NO: 3983049 - DNA, 25 bp, Homo sapien
ccttgagcgcttttggcaggatttc

SEQ ID NO: 3983050 - DNA, 25 bp, Homo sapien
tgtccttgagcgcttttggcaggat

SEQ ID NO: 3983051 - DNA, 25 bp, Homo sapien
ttgagcgcttttggcaggatttctc

SEQ ID NO: 3983052 - DNA, 25 bp, Homo sapien
ccaatgggatggttaaggctgacac

SEQ ID NO: 3983053 - DNA, 25 bp, Homo sapien
tacctgggcatcctcgtgtgcgtgc

SEQ ID NO: 3983054 - DNA, 25 bp, Homo sapien
tagtgaactgtggagctcaaaggct

SEQ ID NO: 3983055 - DNA, 25 bp, Homo sapien
actaggattcgcaccttacgcaggg

SEQ ID NO: 3983056 - DNA, 25 bp, Homo sapien
catcttactgaaggacgtgcacaca

SEQ ID NO: 3983057 - DNA, 25 bp, Homo sapien
aatcagttcgagcagacagtgggcg

SEQ ID NO: 3983058 - DNA, 25 bp, Homo sapien
ggcgcctgagtgctgataataagga

SEQ ID NO: 3983059 - DNA, 25 bp, Homo sapien
tgtgccaggctgcagagattttccc

SEQ ID NO: 3983060 - DNA, 25 bp, Homo sapien
tattaggacccatagatatgctggt

SEQ ID NO: 3983061 - DNA, 25 bp, Homo sapien
cagtattctcccagataaggtcaga

SEQ ID NO: 3983062 - DNA, 25 bp, Homo sapien
tatctatccaaccaagccttgagtc

SEQ ID NO: 3983063 - DNA, 25 bp, Homo sapien
gtcagttaactgaaacaccaatgtg

SEQ ID NO: 3983064 - DNA, 25 bp, Homo sapien
gaactcccagcggtacagactgagg

SEQ ID NO: 3983065 - DNA, 25 bp, Homo sapien
gatgtgtggctccatgacctgagga

SEQ ID NO: 3983066 - DNA, 25 bp, Homo sapien
gggccaaccgtctttactagcagca

SEQ ID NO: 3983067 - DNA, 25 bp, Homo sapien
tcatcagcataagggcacgtccaaa

SEQ ID NO: 3983068 - DNA, 25 bp, Homo sapien
ttggactaagtatcttttagaagca

SEQ ID NO: 3983069 - DNA, 25 bp, Homo sapien
gagtcagccagtcctaggcttgagc

SEQ ID NO: 3983070 - DNA, 25 bp, Homo sapien
gagcatattttggacttggactaag

SEQ ID NO: 3983071 - DNA, 25 bp, Homo sapien
ttgagccccagcctaccactattag

SEQ ID NO: 3983072 - DNA, 25 bp, Homo sapien
ggcagcccaatcatgagtcagttct

SEQ ID NO: 3983073 - DNA, 25 bp, Homo sapien
tgctaacacccctagaacaagtgcc

SEQ ID NO: 3983074 - DNA, 25 bp, Homo sapien
gagaagggaaaggacagtcctcagt

SEQ ID NO: 3983075 - DNA, 25 bp, Homo sapien
aattcagagacagaagtagctcctg

SEQ ID NO: 3983076 - DNA, 25 bp, Homo sapien
caccaccaagaatgcactgaggaaa

SEQ ID NO: 3983077 - DNA, 25 bp, Homo sapien
ccagagtgggttatacgatgctcac

SEQ ID NO: 3983078 - DNA, 25 bp, Homo sapien
aaataggctatgctcccagagtggg

SEQ ID NO: 3983079 - DNA, 25 bp, Homo sapien
gaagtgggctaaacctcacaaagta

SEQ ID NO: 3983080 - DNA, 25 bp, Homo sapien
acaggtttctccttctgtatccagg

SEQ ID NO: 3983081 - DNA, 25 bp, Homo sapien
gaacaaatatattctgcaagctttt

SEQ ID NO: 3983082 - DNA, 25 bp, Homo sapien
tccttctgtatccaggccaatttta

SEQ ID NO: 3983083 - DNA, 25 bp, Homo sapien
catttccacaggtttctccttctgt

SEQ ID NO: 3983084 - DNA, 25 bp, Homo sapien
accacatacactgacttggcattcc

SEQ ID NO: 3983085 - DNA, 25 bp, Homo sapien
agaagcagtagcatttccaaccaca

SEQ ID NO: 3983086 - DNA, 25 bp, Homo sapien
tagcatttccaaccacatacactga

SEQ ID NO: 3983087 - DNA, 25 bp, Homo sapien
tttccaaccacatacactgacttgg

SEQ ID NO: 3983088 - DNA, 25 bp, Homo sapien
tatatcataaagctactgggcattc

SEQ ID NO: 3983089 - DNA, 25 bp, Homo sapien
gagagggttcatttatccattacac

SEQ ID NO: 3983090 - DNA, 25 bp, Homo sapien
tgccccttaacgtgtgtgtcccagg

SEQ ID NO: 3983091 - DNA, 25 bp, Homo sapien
caagcctcacagcagaacaactgga

SEQ ID NO: 3983092 - DNA, 25 bp, Homo sapien
tgcctccgctcatcagtgtaactgt

SEQ ID NO: 3983093 - DNA, 25 bp, Homo sapien
cagggtctgacatacaacaggcact

SEQ ID NO: 3983094 - DNA, 25 bp, Homo sapien
gatcatagcaatgtgtgcctctgga

SEQ ID NO: 3983095 - DNA, 25 bp, Homo sapien
gaagtattcattacacagggtctga

SEQ ID NO: 3983096 - DNA, 25 bp, Homo sapien
atgggcactgccattttcatactgt

SEQ ID NO: 3983097 - DNA, 25 bp, Homo sapien
tgggcactgccattttcatactgtt

SEQ ID NO: 3983098 - DNA, 25 bp, Homo sapien
aatgggcactgccattttcatactg

SEQ ID NO: 3983099 - DNA, 25 bp, Homo sapien
ttaatgggcactgccattttcatac

SEQ ID NO: 3983100 - DNA, 25 bp, Homo sapien
tgggaagacaagtcaaagaggtgac

SEQ ID NO: 3983101 - DNA, 25 bp, Homo sapien
gaagacaagtcaaagaggtgactgg

SEQ ID NO: 3983102 - DNA, 25 bp, Homo sapien
ctgggtcactaagtgcctgacatgg

SEQ ID NO: 3983103 - DNA, 25 bp, Homo sapien
cactaagtgcctgacatggtggcac

SEQ ID NO: 3983104 - DNA, 25 bp, Homo sapien
aatgagtcccccgtaatcttcagga

SEQ ID NO: 3983105 - DNA, 25 bp, Homo sapien
tctggggctggtaaaaatgagtccc

SEQ ID NO: 3983106 - DNA, 25 bp, Homo sapien
gtcccccgtaatcttcaggatgaga

SEQ ID NO: 3983107 - DNA, 25 bp, Homo sapien
tgctctggggctggtaaaaatgagt

SEQ ID NO: 3983108 - DNA, 25 bp, Homo sapien
aactcaaacgataaaacagggatca

SEQ ID NO: 3983109 - DNA, 25 bp, Homo sapien
ggatcaaagtggcttcaagtccata

SEQ ID NO: 3983110 - DNA, 25 bp, Homo sapien
taaaacagggatcaaagtggcttca

SEQ ID NO: 3983111 - DNA, 25 bp, Homo sapien
ggaagagacaaaaactcaaacgata

SEQ ID NO: 3983112 - DNA, 25 bp, Homo sapien
cctgatatacggatcctggccacag

SEQ ID NO: 3983113 - DNA, 25 bp, Homo sapien
cagtcatcttccttcgcatccttca

SEQ ID NO: 3983114 - DNA, 25 bp, Homo sapien
ccacagtcatcttccttcgcatcct

SEQ ID NO: 3983115 - DNA, 25 bp, Homo sapien
cacagtcatcttccttcgcatcctt

SEQ ID NO: 3983116 - DNA, 25 bp, Homo sapien
tattgcctggcagtccttatagggc

SEQ ID NO: 3983117 - DNA, 25 bp, Homo sapien
attgcctggcagtccttatagggca

SEQ ID NO: 3983118 - DNA, 25 bp, Homo sapien
aagactcttcctaagcaatttccga

SEQ ID NO: 3983119 - DNA, 25 bp, Homo sapien
ctcttcctaagcaatttccgatggg

SEQ ID NO: 3983120 - DNA, 25 bp, Homo sapien
attagatctcaaagactcttcctaa

SEQ ID NO: 3983121 - DNA, 25 bp, Homo sapien
cgatggggacggtacacaagaagaa

SEQ ID NO: 3983122 - DNA, 25 bp, Homo sapien
actaagggccaacggacctgagctc

SEQ ID NO: 3983123 - DNA, 25 bp, Homo sapien
tattgaacttactgcctcccaggca

SEQ ID NO: 3983124 - DNA, 25 bp, Homo sapien
ggtgtcacagaataagcacaggact

SEQ ID NO: 3983125 - DNA, 25 bp, Homo sapien
ccaagccttagggttgctgagtgac

SEQ ID NO: 3983126 - DNA, 25 bp, Homo sapien
cttgtgggaaaacaacaatttcaat

SEQ ID NO: 3983127 - DNA, 25 bp, Homo sapien
caacaatttcaattttacccagcat

SEQ ID NO: 3983128 - DNA, 25 bp, Homo sapien
acaacaatttcaattttacccagca

SEQ ID NO: 3983129 - DNA, 25 bp, Homo sapien
tcgcgtgggtggctgcgcgcagcta

SEQ ID NO: 3983130 - DNA, 25 bp, Homo sapien
gcaatgacaacaggggcggaagccc

SEQ ID NO: 3983131 - DNA, 25 bp, Homo sapien
gcagctaggcgctcgcgcatgcgca

SEQ ID NO: 3983132 - DNA, 25 bp, Homo sapien
cgcagtcccagcgaaaaggctgcag

SEQ ID NO: 3983133 - DNA, 25 bp, Homo sapien
agaggaaaaagaagtcgaaaatgag

SEQ ID NO: 3983134 - DNA, 25 bp, Homo sapien
atgaagaggacgaggtcattgacga

SEQ ID NO: 3983135 - DNA, 25 bp, Homo sapien
tgaagaggacgaggtcattgacgag

SEQ ID NO: 3983136 - DNA, 25 bp, Homo sapien
tccctatcagataatgattatgacg

SEQ ID NO: 3983137 - DNA, 25 bp, Homo sapien
gaatttgaagcttattccctatcag

SEQ ID NO: 3983138 - DNA, 25 bp, Homo sapien
gattatgacggaattaagaaattac

SEQ ID NO: 3983139 - DNA, 25 bp, Homo sapien
aatattgaatttgaagcttattccc

SEQ ID NO: 3983140 - DNA, 25 bp, Homo sapien
ccatattgggagtgtgattaaggta

SEQ ID NO: 3983141 - DNA, 25 bp, Homo sapien
ctgcagaactaacagatctcttaat

SEQ ID NO: 3983142 - DNA, 25 bp, Homo sapien
gtagtctttttacccaggtggctga

SEQ ID NO: 3983143 - DNA, 25 bp, Homo sapien
gattaaggtaagtaggataattgtg

SEQ ID NO: 3983144 - DNA, 25 bp, Homo sapien
agcaatgatgatatggatgaagatg

SEQ ID NO: 3983145 - DNA, 25 bp, Homo sapien
atggatgaagatgaggtttttggtt

SEQ ID NO: 3983146 - DNA, 25 bp, Homo sapien
tatggatgaagatgaggtttttggt

SEQ ID NO: 3983147 - DNA, 25 bp, Homo sapien
acagcaatgatgatatggatgaaga

SEQ ID NO: 3983148 - DNA, 25 bp, Homo sapien
gcctgtgggccttctcctaagtgaa

SEQ ID NO: 3983149 - DNA, 25 bp, Homo sapien
aattcaagagttggttctacgcttc

SEQ ID NO: 3983150 - DNA, 25 bp, Homo sapien
acagatcgctctgcccatgtaccag

SEQ ID NO: 3983151 - DNA, 25 bp, Homo sapien
aaagagcatggttgaacagctggac

SEQ ID NO: 3983152 - DNA, 25 bp, Homo sapien
ttaggcacgaaaatcgtgtgaacct

SEQ ID NO: 3983153 - DNA, 25 bp, Homo sapien
gaggcttaggcacgaaaatcgtgtg

SEQ ID NO: 3983154 - DNA, 25 bp, Homo sapien
ggcttaggcacgaaaatcgtgtgaa

SEQ ID NO: 3983155 - DNA, 25 bp, Homo sapien
cttaggcacgaaaatcgtgtgaacc

SEQ ID NO: 3983156 - DNA, 25 bp, Homo sapien
tgtgggaagtgctacttttaccttc

SEQ ID NO: 3983157 - DNA, 25 bp, Homo sapien
gggcacacagaaccaataagccatg

SEQ ID NO: 3983158 - DNA, 25 bp, Homo sapien
agctgcgttaatgtttgcaaatgca

SEQ ID NO: 3983159 - DNA, 25 bp, Homo sapien
tctgattagtaagacatttgtggaa

SEQ ID NO: 3983160 - DNA, 25 bp, Homo sapien
tgatgacgtaccaatgacgcccttg

SEQ ID NO: 3983161 - DNA, 25 bp, Homo sapien
gacgcccttgcgaactgtgatgtta

SEQ ID NO: 3983162 - DNA, 25 bp, Homo sapien
cacttgtctgggaggcaaatggtct

SEQ ID NO: 3983163 - DNA, 25 bp, Homo sapien
tcaagttcaactactcagtgcagga

SEQ ID NO: 3983164 - DNA, 25 bp, Homo sapien
tcagactttattcagattaagttcc

SEQ ID NO: 3983165 - DNA, 25 bp, Homo sapien
cagactttattcagattaagttcct

SEQ ID NO: 3983166 - DNA, 25 bp, Homo sapien
ctcagactttattcagattaagttc

SEQ ID NO: 3983167 - DNA, 25 bp, Homo sapien
attatgagtggttgatttaaaaact

SEQ ID NO: 3983168 - DNA, 25 bp, Homo sapien
cgtcttcgcgtcatgtatctcccat

SEQ ID NO: 3983169 - DNA, 25 bp, Homo sapien
gcgtcatgtatctcccatatccagc

SEQ ID NO: 3983170 - DNA, 25 bp, Homo sapien
tggatgtgaaatccgtcttcgcgtc

SEQ ID NO: 3983171 - DNA, 25 bp, Homo sapien
ttcttcaagaccgtcctgtggatgt

SEQ ID NO: 3983172 - DNA, 25 bp, Homo sapien
gaatgtccttactttcactaggagg

SEQ ID NO: 3983173 - DNA, 25 bp, Homo sapien
gggataggtgatccactacttgctg

SEQ ID NO: 3983174 - DNA, 25 bp, Homo sapien
tgaaatagtattgtggtaccagctg

SEQ ID NO: 3983175 - DNA, 25 bp, Homo sapien
cactaggaggcagattactgaaata

SEQ ID NO: 3983176 - DNA, 25 bp, Homo sapien
tgagcaacctgcttatgtgtcagca

SEQ ID NO: 3983177 - DNA, 25 bp, Homo sapien
cagcattaagtagttacctgatcca

SEQ ID NO: 3983178 - DNA, 25 bp, Homo sapien
ctgatccatcaacatcccgagcaat

SEQ ID NO: 3983179 - DNA, 25 bp, Homo sapien
aggacccactctggcatcttcttgg

SEQ ID NO: 3983180 - DNA, 25 bp, Homo sapien
tctgcatagggaagctcgattcgct

SEQ ID NO: 3983181 - DNA, 25 bp, Homo sapien
ttgaggaagtaatcacgacaccact

SEQ ID NO: 3983182 - DNA, 25 bp, Homo sapien
tgcataaagtaaccggacagaagag

SEQ ID NO: 3983183 - DNA, 25 bp, Homo sapien
tccttggagccaaaagcaggttctg

SEQ ID NO: 3983184 - DNA, 25 bp, Homo sapien
ccaagcaagcttgctctgaaggctg

SEQ ID NO: 3983185 - DNA, 25 bp, Homo sapien
gccaggatacggaaggtgcacagca

SEQ ID NO: 3983186 - DNA, 25 bp, Homo sapien
gacccatgtacgagtctgtgtcccc

SEQ ID NO: 3983187 - DNA, 25 bp, Homo sapien
gcacgtagaggtggctgttcttgtc

SEQ ID NO: 3983188 - DNA, 25 bp, Homo sapien
tagggcctcaagtgccattgcattc

SEQ ID NO: 3983189 - DNA, 25 bp, Homo sapien
gctggcgaagaatgtttgatgaata

SEQ ID NO: 3983190 - DNA, 25 bp, Homo sapien
gcagatgcctgtgggtgcgtttagg

SEQ ID NO: 3983191 - DNA, 25 bp, Homo sapien
ccagtagggctggcgaagaatgttt

SEQ ID NO: 3983192 - DNA, 25 bp, Homo sapien
gctagaattcagagttgtgtcttgg

SEQ ID NO: 3983193 - DNA, 25 bp, Homo sapien
ctccttcgggatgtaaaaatgtctt

SEQ ID NO: 3983194 - DNA, 25 bp, Homo sapien
tgtaaatgctgatgagggtaaagtg

SEQ ID NO: 3983195 - DNA, 25 bp, Homo sapien
aatgtcttccaacaagtcaaggcag

SEQ ID NO: 3983196 - DNA, 25 bp, Homo sapien
taccatggctgcgattgttagcact

SEQ ID NO: 3983197 - DNA, 25 bp, Homo sapien
cgagagttgtggatcaagaggaaac

SEQ ID NO: 3983198 - DNA, 25 bp, Homo sapien
caggacgctaagatagacttcgaga

SEQ ID NO: 3983199 - DNA, 25 bp, Homo sapien
tccagtgctgccagataatctaagt

SEQ ID NO: 3983200 - DNA, 25 bp, Homo sapien
gcggagccagcaccagatataactt

SEQ ID NO: 3983201 - DNA, 25 bp, Homo sapien
accctggagttgagttggccgcaca

SEQ ID NO: 3983202 - DNA, 25 bp, Homo sapien
tggccgcacacagggttagtaacat

SEQ ID NO: 3983203 - DNA, 25 bp, Homo sapien
catccgctggagtactgaagcaagg

SEQ ID NO: 3983204 - DNA, 25 bp, Homo sapien
tcttggcccttctagcatggatggt

SEQ ID NO: 3983205 - DNA, 25 bp, Homo sapien
tcattaactagtacccatcgcggcc

SEQ ID NO: 3983206 - DNA, 25 bp, Homo sapien
gctattggcactggcaaggctctgg

SEQ ID NO: 3983207 - DNA, 25 bp, Homo sapien
gaatcaatggctccctttcttgggc

SEQ ID NO: 3983208 - DNA, 25 bp, Homo sapien
gctcctacgagaatccagtgctgcc

SEQ ID NO: 3983209 - DNA, 25 bp, Homo sapien
gtacccatcactgcctaggggttgg

SEQ ID NO: 3983210 - DNA, 25 bp, Homo sapien
ttcgagctcctacgagaatccagtg

SEQ ID NO: 3983211 - DNA, 25 bp, Homo sapien
agggttcgagctcctacgagaatcc

SEQ ID NO: 3983212 - DNA, 25 bp, Homo sapien
gatgcctaggaaatcaacaggtggt

SEQ ID NO: 3983213 - DNA, 25 bp, Homo sapien
gattcctgggcttatgagatgaaca

SEQ ID NO: 3983214 - DNA, 25 bp, Homo sapien
cacagagggtgactattgagagaac

SEQ ID NO: 3983215 - DNA, 25 bp, Homo sapien
ggaggagactagaatatgccacccc

SEQ ID NO: 3983216 - DNA, 25 bp, Homo sapien
cctaatgcctggctgacatgggagc

SEQ ID NO: 3983217 - DNA, 25 bp, Homo sapien
cgcatcatgtgaactcaggacagag

SEQ ID NO: 3983218 - DNA, 25 bp, Homo sapien
tgtgtgcattgctgcgcatcatgtg

SEQ ID NO: 3983219 - DNA, 25 bp, Homo sapien
agaaggtgaatctcagcctaatgcc

SEQ ID NO: 3983220 - DNA, 25 bp, Homo sapien
tcagtggcgtcatgtctttggaggc

SEQ ID NO: 3983221 - DNA, 25 bp, Homo sapien
gcaatgtctatcctcttcataaaaa

SEQ ID NO: 3983222 - DNA, 25 bp, Homo sapien
caccatgcttgttaggttggcttcc

SEQ ID NO: 3983223 - DNA, 25 bp, Homo sapien
agtcacagtggcctaggcccgcaat

SEQ ID NO: 3983224 - DNA, 25 bp, Homo sapien
ttgctcttattctcgggttgtacac

SEQ ID NO: 3983225 - DNA, 25 bp, Homo sapien
tgcttgcgtatctctgcctggctct

SEQ ID NO: 3983226 - DNA, 25 bp, Homo sapien
tgatgggctgcatgacgagcgagtt

SEQ ID NO: 3983227 - DNA, 25 bp, Homo sapien
tgagccaagaatctgcttgcgtatc

SEQ ID NO: 3983228 - DNA, 25 bp, Homo sapien
tctgtttcatcgagtggcttgaaca

SEQ ID NO: 3983229 - DNA, 25 bp, Homo sapien
caagatctgggtttaggttagatcc

SEQ ID NO: 3983230 - DNA, 25 bp, Homo sapien
tttggatacaaaggaacaaccacca

SEQ ID NO: 3983231 - DNA, 25 bp, Homo sapien
tctccagagctagtagttaacacca

SEQ ID NO: 3983232 - DNA, 25 bp, Homo sapien
aatagcaaggtatcacaggtcactg

SEQ ID NO: 3983233 - DNA, 25 bp, Homo sapien
gatcctaatgagtgaaaacttgcca

SEQ ID NO: 3983234 - DNA, 25 bp, Homo sapien
tcagctggtacacaggtacggtccc

SEQ ID NO: 3983235 - DNA, 25 bp, Homo sapien
ctgctaagtggctcccaggaagctg

SEQ ID NO: 3983236 - DNA, 25 bp, Homo sapien
tgtggctcagcctacatcaaataat

SEQ ID NO: 3983237 - DNA, 25 bp, Homo sapien
ggatgttcaagaaaaggctctgaca

SEQ ID NO: 3983238 - DNA, 25 bp, Homo sapien
tatatgggtcatggtctaaaaactc

SEQ ID NO: 3983239 - DNA, 25 bp, Homo sapien
cagtcatattgaggttctagaaaca

SEQ ID NO: 3983240 - DNA, 25 bp, Homo sapien
ggcatgcacctactgtaccaagaga

SEQ ID NO: 3983241 - DNA, 25 bp, Homo sapien
tactccactgactatcacaggactg

SEQ ID NO: 3983242 - DNA, 25 bp, Homo sapien
gagatgaccttttcgggtgggctat

SEQ ID NO: 3983243 - DNA, 25 bp, Homo sapien
caagcataaatagagccagctgtgc

SEQ ID NO: 3983244 - DNA, 25 bp, Homo sapien
caaagataaggcgtaaaatagactc

SEQ ID NO: 3983245 - DNA, 25 bp, Homo sapien
taaggtacacaacctccacagggtg

SEQ ID NO: 3983246 - DNA, 25 bp, Homo sapien
agatgatgaccccatagctacccaa

SEQ ID NO: 3983247 - DNA, 25 bp, Homo sapien
cacttctatgacaggcacgtttcca

SEQ ID NO: 3983248 - DNA, 25 bp, Homo sapien
aaaaggtgaggcgtgtctaacagta

SEQ ID NO: 3983249 - DNA, 25 bp, Homo sapien
tatagtatttcctttgggtgtcaga

SEQ ID NO: 3983250 - DNA, 25 bp, Homo sapien
cagcaaactgcctcagctaaggagt

SEQ ID NO: 3983251 - DNA, 25 bp, Homo sapien
tcctaagcctaacatgtgatagatg

SEQ ID NO: 3983252 - DNA, 25 bp, Homo sapien
attatgggcattagccactgtgccc

SEQ ID NO: 3983253 - DNA, 25 bp, Homo sapien
ggattatgggcattagccactgtgc

SEQ ID NO: 3983254 - DNA, 25 bp, Homo sapien
gggattatgggcattagccactgtg

SEQ ID NO: 3983255 - DNA, 25 bp, Homo sapien
tatgggcattagccactgtgcccag

SEQ ID NO: 3983256 - DNA, 25 bp, Homo sapien
gaagcacacgcttgaaggttctgag

SEQ ID NO: 3983257 - DNA, 25 bp, Homo sapien
gaaacactgtcgaagctgctatgat

SEQ ID NO: 3983258 - DNA, 25 bp, Homo sapien
tgaagctaagcacagaagagatacc

SEQ ID NO: 3983259 - DNA, 25 bp, Homo sapien
tgaggcatagctccagaagcacacg

SEQ ID NO: 3983260 - DNA, 25 bp, Homo sapien
caggattgtttcgttggtacagcag

SEQ ID NO: 3983261 - DNA, 25 bp, Homo sapien
gcagttctcgaaagggatcacgtag

SEQ ID NO: 3983262 - DNA, 25 bp, Homo sapien
ctgcttgtggacctgtgtgcatatc

SEQ ID NO: 3983263 - DNA, 25 bp, Homo sapien
agacaatattcagcacaccactgag

SEQ ID NO: 3983264 - DNA, 25 bp, Homo sapien
aaaaatgagacaggatcagcttctg

SEQ ID NO: 3983265 - DNA, 25 bp, Homo sapien
caggaaaaaatgagacaggatcagc

SEQ ID NO: 3983266 - DNA, 25 bp, Homo sapien
ctgtagcaggaaaaaatgagacagg

SEQ ID NO: 3983267 - DNA, 25 bp, Homo sapien
gaaaaaatgagacaggatcagcttc

SEQ ID NO: 3983268 - DNA, 25 bp, Homo sapien
caacctcaactgtgtttctgaaaag

SEQ ID NO: 3983269 - DNA, 25 bp, Homo sapien
tgtatgctacaatcttaaggcattg

SEQ ID NO: 3983270 - DNA, 25 bp, Homo sapien
tgagataatcaaccaacccatctgg

SEQ ID NO: 3983271 - DNA, 25 bp, Homo sapien
ttagaaggcccatcaaaaatatggc

SEQ ID NO: 3983272 - DNA, 25 bp, Homo sapien
gctgtttgttcctagttccccacta

SEQ ID NO: 3983273 - DNA, 25 bp, Homo sapien
ccactacctaacggcccctcaaatg

SEQ ID NO: 3983274 - DNA, 25 bp, Homo sapien
tgctgtttgttcctagttccccact

SEQ ID NO: 3983275 - DNA, 25 bp, Homo sapien
ctacctaacggcccctcaaatgagc

SEQ ID NO: 3983276 - DNA, 25 bp, Homo sapien
aaaatgcctagcctgagtatgcccc

SEQ ID NO: 3983277 - DNA, 25 bp, Homo sapien
aggcagctatcccacccaaagtgag

SEQ ID NO: 3983278 - DNA, 25 bp, Homo sapien
gatcatcaggacgtccatcagggcc

SEQ ID NO: 3983279 - DNA, 25 bp, Homo sapien
cacgtatccgtgtatggtctcatca

SEQ ID NO: 3983280 - DNA, 25 bp, Homo sapien
tagcatctcctgaaacaatcacgat

SEQ ID NO: 3983281 - DNA, 25 bp, Homo sapien
gatgaatatggcaatccatcaaagg

SEQ ID NO: 3983282 - DNA, 25 bp, Homo sapien
ggaagagtttggacactccagccct

SEQ ID NO: 3983283 - DNA, 25 bp, Homo sapien
tccagggattcaggaaaatagcgtt

SEQ ID NO: 3983284 - DNA, 25 bp, Homo sapien
ggctcactacagcactcttcggcat

SEQ ID NO: 3983285 - DNA, 25 bp, Homo sapien
ccattgcaaacagggcttaaaagcc

SEQ ID NO: 3983286 - DNA, 25 bp, Homo sapien
ctgttctccgttgctgtgttaccca

SEQ ID NO: 3983287 - DNA, 25 bp, Homo sapien
gcaagtttctcctatcagtaaccca

SEQ ID NO: 3983288 - DNA, 25 bp, Homo sapien
aagaacaggaataatttaggctggt

SEQ ID NO: 3983289 - DNA, 25 bp, Homo sapien
tctgttaacgggtttctgtcatttc

SEQ ID NO: 3983290 - DNA, 25 bp, Homo sapien
caggaataatttaggctggtgttta

SEQ ID NO: 3983291 - DNA, 25 bp, Homo sapien
tgattctgcactgggcctcgtgctc

SEQ ID NO: 3983292 - DNA, 25 bp, Homo sapien
gacctaactagaggagttgggccca

SEQ ID NO: 3983293 - DNA, 25 bp, Homo sapien
gagtctgaggcgcaaaactatgaca

SEQ ID NO: 3983294 - DNA, 25 bp, Homo sapien
tcctaaccggtgcattagaagccag

SEQ ID NO: 3983295 - DNA, 25 bp, Homo sapien
ggactcagaacccatgccactgtgt

SEQ ID NO: 3983296 - DNA, 25 bp, Homo sapien
caaagatgtgcatgtaggaatccct

SEQ ID NO: 3983297 - DNA, 25 bp, Homo sapien
tgcaactgagctcccaacatgtacc

SEQ ID NO: 3983298 - DNA, 25 bp, Homo sapien
gaaactcagactttacacgcctgca

SEQ ID NO: 3983299 - DNA, 25 bp, Homo sapien
tgatgtggtatgtagaatggcctcc

SEQ ID NO: 3983300 - DNA, 25 bp, Homo sapien
gatgtgagtgacctctaggagctag

SEQ ID NO: 3983301 - DNA, 25 bp, Homo sapien
cctggacgatcctggtgagcccaat

SEQ ID NO: 3983302 - DNA, 25 bp, Homo sapien
agtgagaccgacaaccgacttctga

SEQ ID NO: 3983303 - DNA, 25 bp, Homo sapien
gccacggccgaagaatgatgtgagt

SEQ ID NO: 3983304 - DNA, 25 bp, Homo sapien
ctgttaagacaataaattaccactc

SEQ ID NO: 3983305 - DNA, 25 bp, Homo sapien
tgttaagacaataaattaccactca

SEQ ID NO: 3983306 - DNA, 25 bp, Homo sapien
tattaataacaacagatactacagt

SEQ ID NO: 3983307 - DNA, 25 bp, Homo sapien
tattatattaataacaacagatact

SEQ ID NO: 3983308 - DNA, 25 bp, Homo sapien
ttaataacaacagatactacagttg

SEQ ID NO: 3983309 - DNA, 25 bp, Homo sapien
aataacaacagatactacagttgat

SEQ ID NO: 3983310 - DNA, 25 bp, Homo sapien
gaccgctttgtgattttgctaatga

SEQ ID NO: 3983311 - DNA, 25 bp, Homo sapien
tatcttgaatgaaaagaccgctttg

SEQ ID NO: 3983312 - DNA, 25 bp, Homo sapien
tactttagcatagagacctgcactg

SEQ ID NO: 3983313 - DNA, 25 bp, Homo sapien
taaccagtcttctttcacaggtacc

SEQ ID NO: 3983314 - DNA, 25 bp, Homo sapien
ctggccgctaccctcgctcagtgtc

SEQ ID NO: 3983315 - DNA, 25 bp, Homo sapien
gcgaccgcctgaccgggcttcagga

SEQ ID NO: 3983316 - DNA, 25 bp, Homo sapien
gcagtgtcctcagccggtgacctgg

SEQ ID NO: 3983317 - DNA, 25 bp, Homo sapien
gcgacgcgcgggtcctcacgcgctc

SEQ ID NO: 3983318 - DNA, 25 bp, Homo sapien
aaggggcaaaacgacttgaggcttg

SEQ ID NO: 3983319 - DNA, 25 bp, Homo sapien
tgtgtttacgattatagatttcccc

SEQ ID NO: 3983320 - DNA, 25 bp, Homo sapien
ccagagttagtcacatcccacaagt

SEQ ID NO: 3983321 - DNA, 25 bp, Homo sapien
ttctaatacctgaagcacttgtggg

SEQ ID NO: 3983322 - DNA, 25 bp, Homo sapien
gaatctctgtaactagcaccaagat

SEQ ID NO: 3983323 - DNA, 25 bp, Homo sapien
tctgaattcgtcattaggtagtagc

SEQ ID NO: 3983324 - DNA, 25 bp, Homo sapien
cttctctgaattcgtcattaggtag

SEQ ID NO: 3983325 - DNA, 25 bp, Homo sapien
tgaattcgtcattaggtagtagcat

SEQ ID NO: 3983326 - DNA, 25 bp, Homo sapien
tctctgaattcgtcattaggtagta

SEQ ID NO: 3983327 - DNA, 25 bp, Homo sapien
caggcgctgcagggcactcttgctg

SEQ ID NO: 3983328 - DNA, 25 bp, Homo sapien
agctgcctgagagaccttgatcctc

SEQ ID NO: 3983329 - DNA, 25 bp, Homo sapien
acgccgacctgcagcttgagctgct

SEQ ID NO: 3983330 - DNA, 25 bp, Homo sapien
tcaggcattctgcatgcagtactgt

SEQ ID NO: 3983331 - DNA, 25 bp, Homo sapien
tccaagggtggttgagccacgctag

SEQ ID NO: 3983332 - DNA, 25 bp, Homo sapien
agcagtgtgctccaagggtggttga

SEQ ID NO: 3983333 - DNA, 25 bp, Homo sapien
ttgagccacgctaggcgggtcagcc

SEQ ID NO: 3983334 - DNA, 25 bp, Homo sapien
tgtgctccaagggtggttgagccac

SEQ ID NO: 3983335 - DNA, 25 bp, Homo sapien
tttgtttggtgtccaatgttccctg

SEQ ID NO: 3983336 - DNA, 25 bp, Homo sapien
tatttgtttggtgtccaatgttccc

SEQ ID NO: 3983337 - DNA, 25 bp, Homo sapien
ttgtttggtgtccaatgttccctgc

SEQ ID NO: 3983338 - DNA, 25 bp, Homo sapien
gtatttgtttggtgtccaatgttcc

SEQ ID NO: 3983339 - DNA, 25 bp, Homo sapien
tctgctccattgtcatagtaatgtt

SEQ ID NO: 3983340 - DNA, 25 bp, Homo sapien
tgtcggctcttaccaaggctcggtg

SEQ ID NO: 3983341 - DNA, 25 bp, Homo sapien
cagttctcctcagtgacggcctgtg

SEQ ID NO: 3983342 - DNA, 25 bp, Homo sapien
taagtgttgccgcattgcagttctc

SEQ ID NO: 3983343 - DNA, 25 bp, Homo sapien
tggcatttctgagcaacgtgttgcg

SEQ ID NO: 3983344 - DNA, 25 bp, Homo sapien
gtgtgttcactgaggcttcactcac

SEQ ID NO: 3983345 - DNA, 25 bp, Homo sapien
tgcgtagttgtgtgatttggcagca

SEQ ID NO: 3983346 - DNA, 25 bp, Homo sapien
gctggtccattgctgacacgtgtgt

SEQ ID NO: 3983347 - DNA, 25 bp, Homo sapien
ctagaagtgagggtttttgctccat

SEQ ID NO: 3983348 - DNA, 25 bp, Homo sapien
ggctctgtaccagatctggaggggt

SEQ ID NO: 3983349 - DNA, 25 bp, Homo sapien
tccgggctctgtaccagatctggag

SEQ ID NO: 3983350 - DNA, 25 bp, Homo sapien
gctagaagtgagggtttttgctcca

SEQ ID NO: 3983351 - DNA, 25 bp, Homo sapien
ctggaagtgggcctgtgcccagctc

SEQ ID NO: 3983352 - DNA, 25 bp, Homo sapien
tctggtggcagtgggccacctgtgg

SEQ ID NO: 3983353 - DNA, 25 bp, Homo sapien
cacctgtggctggtgccaagctcac

SEQ ID NO: 3983354 - DNA, 25 bp, Homo sapien
ggccacctgtggctggtgccaagct

SEQ ID NO: 3983355 - DNA, 25 bp, Homo sapien
actgtcaaactggagatgcatcggc

SEQ ID NO: 3983356 - DNA, 25 bp, Homo sapien
gcttagtaaacatcagtggcgaggg

SEQ ID NO: 3983357 - DNA, 25 bp, Homo sapien
ttttagcaccgtggagaccataggc

SEQ ID NO: 3983358 - DNA, 25 bp, Homo sapien
tgtgtgaaactcctagcctgagagc

SEQ ID NO: 3983359 - DNA, 25 bp, Homo sapien
gtcatcagccatggcccctaagtgg

SEQ ID NO: 3983360 - DNA, 25 bp, Homo sapien
tagagataagaatgtgtcatcagcc

SEQ ID NO: 3983361 - DNA, 25 bp, Homo sapien
cccctaagtggccattgatgacatg

SEQ ID NO: 3983362 - DNA, 25 bp, Homo sapien
gacatggcataagatcacagtttta

SEQ ID NO: 3983363 - DNA, 25 bp, Homo sapien
gacaatgcccacgtaatgcaccata

SEQ ID NO: 3983364 - DNA, 25 bp, Homo sapien
taattggaggaagggctaacatgcc

SEQ ID NO: 3983365 - DNA, 25 bp, Homo sapien
gaaatagaagcataggaattacagc

SEQ ID NO: 3983366 - DNA, 25 bp, Homo sapien
ggatttgggcatctaaaaagacaat

SEQ ID NO: 3983367 - DNA, 25 bp, Homo sapien
gaggatgccccatagagaaggttct

SEQ ID NO: 3983368 - DNA, 25 bp, Homo sapien
taaagaccttgtgaaacatggctcc

SEQ ID NO: 3983369 - DNA, 25 bp, Homo sapien
aatagttgtggtcccatggaaagcc

SEQ ID NO: 3983370 - DNA, 25 bp, Homo sapien
tacctgagcaagtagacagagcacc

SEQ ID NO: 3983371 - DNA, 25 bp, Homo sapien
cttcactgttgaaaaaaggtgtcgg

SEQ ID NO: 3983372 - DNA, 25 bp, Homo sapien
tcactgttgaaaaaaggtgtcggct

SEQ ID NO: 3983373 - DNA, 25 bp, Homo sapien
ttcactgttgaaaaaaggtgtcggc

SEQ ID NO: 3983374 - DNA, 25 bp, Homo sapien
tcttcactgttgaaaaaaggtgtcg

SEQ ID NO: 3983375 - DNA, 25 bp, Homo sapien
gatctgggcacttggtgtggatatt

SEQ ID NO: 3983376 - DNA, 25 bp, Homo sapien
gtggatctgggcacttggtgtggat

SEQ ID NO: 3983377 - DNA, 25 bp, Homo sapien
ggatctgggcacttggtgtggatat

SEQ ID NO: 3983378 - DNA, 25 bp, Homo sapien
tctgggcacttggtgtggatattgt

SEQ ID NO: 3983379 - DNA, 25 bp, Homo sapien
gccgagttgttctggccagaggatc

SEQ ID NO: 3983380 - DNA, 25 bp, Homo sapien
catgagtgagccgagttgttctggc

SEQ ID NO: 3983381 - DNA, 25 bp, Homo sapien
tcctggccaaggcatgagtgagccg

SEQ ID NO: 3983382 - DNA, 25 bp, Homo sapien
gttgttctggccagaggatctgcag

SEQ ID NO: 3983383 - DNA, 25 bp, Homo sapien
aagcagggcctgccgcttggcacag

SEQ ID NO: 3983384 - DNA, 25 bp, Homo sapien
tggcacaggccctgcttcctgaata

SEQ ID NO: 3983385 - DNA, 25 bp, Homo sapien
acaggccctgcttcctgaatatcat

SEQ ID NO: 3983386 - DNA, 25 bp, Homo sapien
cagaggcccctgagaagcagggcct

SEQ ID NO: 3983387 - DNA, 25 bp, Homo sapien
gccaacatcacatagcaggactcgt

SEQ ID NO: 3983388 - DNA, 25 bp, Homo sapien
ttttgccaacatcacatagcaggac

SEQ ID NO: 3983389 - DNA, 25 bp, Homo sapien
acatcacatagcaggactcgttcat

SEQ ID NO: 3983390 - DNA, 25 bp, Homo sapien
ttgccaacatcacatagcaggactc

SEQ ID NO: 3983391 - DNA, 25 bp, Homo sapien
cctgcatggaattaatttccgttcc

SEQ ID NO: 3983392 - DNA, 25 bp, Homo sapien
cacctgcatggaattaatttccgtt

SEQ ID NO: 3983393 - DNA, 25 bp, Homo sapien
acctgcatggaattaatttccgttc

SEQ ID NO: 3983394 - DNA, 25 bp, Homo sapien
ctaggtgcacgtggagcccggtgga

SEQ ID NO: 3983395 - DNA, 25 bp, Homo sapien
ctgggcctgcctaagtgcaggcttg

SEQ ID NO: 3983396 - DNA, 25 bp, Homo sapien
acattcaggccgttgaggggtctgc

SEQ ID NO: 3983397 - DNA, 25 bp, Homo sapien
ggaggaagcactcgctgagttgact

SEQ ID NO: 3983398 - DNA, 25 bp, Homo sapien
gacactgcagcaatctcctgggatt

SEQ ID NO: 3983399 - DNA, 25 bp, Homo sapien
ctgacactgcagcaatctcctggga

SEQ ID NO: 3983400 - DNA, 25 bp, Homo sapien
cactgcagcaatctcctgggattgt

SEQ ID NO: 3983401 - DNA, 25 bp, Homo sapien
actgcagcaatctcctgggattgtc

SEQ ID NO: 3983402 - DNA, 25 bp, Homo sapien
aagatgtgcttttggctaccacaca

SEQ ID NO: 3983403 - DNA, 25 bp, Homo sapien
tggctaccacacaaagccgttctcg

SEQ ID NO: 3983404 - DNA, 25 bp, Homo sapien
ttacgaaaatgaagatgtgcttttg

SEQ ID NO: 3983405 - DNA, 25 bp, Homo sapien
aagccgttctcgcttatggttccac

SEQ ID NO: 3983406 - DNA, 25 bp, Homo sapien
tgggtacatcagaaaaactcggtgg

SEQ ID NO: 3983407 - DNA, 25 bp, Homo sapien
cgtgaggtactctgggttaaggatc

SEQ ID NO: 3983408 - DNA, 25 bp, Homo sapien
tcaccagggtagcaagagggttaag

SEQ ID NO: 3983409 - DNA, 25 bp, Homo sapien
gaactctagctgtaattcaccaggg

SEQ ID NO: 3983410 - DNA, 25 bp, Homo sapien
tgctgacctagtgaggctgactcag

SEQ ID NO: 3983411 - DNA, 25 bp, Homo sapien
gcatttcacaggcagcgcctctagg

SEQ ID NO: 3983412 - DNA, 25 bp, Homo sapien
gagcactcacatctactcaagactc

SEQ ID NO: 3983413 - DNA, 25 bp, Homo sapien
tcagtctcgtattgaaaacctcatg

SEQ ID NO: 3983414 - DNA, 25 bp, Homo sapien
tcctcatcaggccttttccaaggtg

SEQ ID NO: 3983415 - DNA, 25 bp, Homo sapien
cttcggtgggtaggaatctggcggc

SEQ ID NO: 3983416 - DNA, 25 bp, Homo sapien
gtgagcctgacagggttggaagcca

SEQ ID NO: 3983417 - DNA, 25 bp, Homo sapien
ccaaggtggccgaggtgagcctgac

SEQ ID NO: 3983418 - DNA, 25 bp, Homo sapien
caagtcccaggtttatgatccagaa

SEQ ID NO: 3983419 - DNA, 25 bp, Homo sapien
tatttggatcaaaagctaccccatc

SEQ ID NO: 3983420 - DNA, 25 bp, Homo sapien
gaagatgatttgtatgaagctggca

SEQ ID NO: 3983421 - DNA, 25 bp, Homo sapien
cagatgacaagctaaacccagggta

SEQ ID NO: 3983422 - DNA, 25 bp, Homo sapien
cagcagtcgtatcaaggtcttcctt

SEQ ID NO: 3983423 - DNA, 25 bp, Homo sapien
ggatggtcaccagaattcctatggt

SEQ ID NO: 3983424 - DNA, 25 bp, Homo sapien
tgagataaaccacaaatccggcagc

SEQ ID NO: 3983425 - DNA, 25 bp, Homo sapien
cttagtttttcaatggtggtcttct

SEQ ID NO: 3983426 - DNA, 25 bp, Homo sapien
cacccgtgagtgatgtactaataaa

SEQ ID NO: 3983427 - DNA, 25 bp, Homo sapien
cagatgccatgtttgaggttcaatc

SEQ ID NO: 3983428 - DNA, 25 bp, Homo sapien
gaaatgaagagagtacacccgtgag

SEQ ID NO: 3983429 - DNA, 25 bp, Homo sapien
ggctcacagaaggaggcagttacaa

SEQ ID NO: 3983430 - DNA, 25 bp, Homo sapien
gaccagcacgagcaccgtgtcctgt

SEQ ID NO: 3983431 - DNA, 25 bp, Homo sapien
gatcttcgcacagccagctatctcg

SEQ ID NO: 3983432 - DNA, 25 bp, Homo sapien
tggcccagtccgcactctagaatct

SEQ ID NO: 3983433 - DNA, 25 bp, Homo sapien
gctatctcggcttcagaatgcatgt

SEQ ID NO: 3983434 - DNA, 25 bp, Homo sapien
tttctgcagacgtgcctggtaggct

SEQ ID NO: 3983435 - DNA, 25 bp, Homo sapien
tcaaacctgagtactgctggtcacg

SEQ ID NO: 3983436 - DNA, 25 bp, Homo sapien
tattttatgcagtaatggccacggg

SEQ ID NO: 3983437 - DNA, 25 bp, Homo sapien
tcctgagccccgagaactgtgttgt

SEQ ID NO: 3983438 - DNA, 25 bp, Homo sapien
cctggccgcgctccctgttggactc

SEQ ID NO: 3983439 - DNA, 25 bp, Homo sapien
gtagacgcatgctcctgcgatccca

SEQ ID NO: 3983440 - DNA, 25 bp, Homo sapien
tgaggcagtagacgcatgctcctgc

SEQ ID NO: 3983441 - DNA, 25 bp, Homo sapien
tgtcagtgaggcagtagacgcatgc

SEQ ID NO: 3983442 - DNA, 25 bp, Homo sapien
ctcgaaaagaggcatcatttagact

SEQ ID NO: 3983443 - DNA, 25 bp, Homo sapien
aagaggcatcatttagacttgcccc

SEQ ID NO: 3983444 - DNA, 25 bp, Homo sapien
gaggcatcatttagacttgcccctg

SEQ ID NO: 3983445 - DNA, 25 bp, Homo sapien
gaaaagaggcatcatttagacttgc

SEQ ID NO: 3983446 - DNA, 25 bp, Homo sapien
gcctcgcagtggcagttcttcctgt

SEQ ID NO: 3983447 - DNA, 25 bp, Homo sapien
ccaaacttgtcacagaagggaggtg

SEQ ID NO: 3983448 - DNA, 25 bp, Homo sapien
tgcttgccggatggggccgctgtct

SEQ ID NO: 3983449 - DNA, 25 bp, Homo sapien
ttcctccaaagccaaacttgtcaca

SEQ ID NO: 3983450 - DNA, 25 bp, Homo sapien
ccccatcttcctttttcaatctgga

SEQ ID NO: 3983451 - DNA, 25 bp, Homo sapien
catcttcctttttcaatctggaaaa

SEQ ID NO: 3983452 - DNA, 25 bp, Homo sapien
cttcctttttcaatctggaaaactg

SEQ ID NO: 3983453 - DNA, 25 bp, Homo sapien
tctccccatcttcctttttcaatct

SEQ ID NO: 3983454 - DNA, 25 bp, Homo sapien
cctttatggttccagcatgatggta

SEQ ID NO: 3983455 - DNA, 25 bp, Homo sapien
catgcacccggtaattctgtgtaag

SEQ ID NO: 3983456 - DNA, 25 bp, Homo sapien
cagcatgatggtaatttacaacccc

SEQ ID NO: 3983457 - DNA, 25 bp, Homo sapien
tctgaggtgacactgtgatccttta

SEQ ID NO: 3983458 - DNA, 25 bp, Homo sapien
ctctgccgtggcactgcattgcaca

SEQ ID NO: 3983459 - DNA, 25 bp, Homo sapien
tcgtgaaccccaaagacactaatat

SEQ ID NO: 3983460 - DNA, 25 bp, Homo sapien
tgcattgcacactcgtgaaccccaa

SEQ ID NO: 3983461 - DNA, 25 bp, Homo sapien
ttttgacattgacgattcaggcaga

SEQ ID NO: 3983462 - DNA, 25 bp, Homo sapien
tttctatggaaacggcattggtacc

SEQ ID NO: 3983463 - DNA, 25 bp, Homo sapien
acagaatccggcctccttgctgcag

SEQ ID NO: 3983464 - DNA, 25 bp, Homo sapien
catgtcatcgcccaagtacacgtgg

SEQ ID NO: 3983465 - DNA, 25 bp, Homo sapien
cattggtaccaatgactggccggct

SEQ ID NO: 3983466 - DNA, 25 bp, Homo sapien
gaattgactctctcaaagcagatcc

SEQ ID NO: 3983467 - DNA, 25 bp, Homo sapien
tcatctcgcatttggcaaaggaact

SEQ ID NO: 3983468 - DNA, 25 bp, Homo sapien
tcttcgagactttgccacagttgcc

SEQ ID NO: 3983469 - DNA, 25 bp, Homo sapien
tgcagaattgactctctcaaagcag

SEQ ID NO: 3983470 - DNA, 25 bp, Homo sapien
ctgatttgtccgcattctgccttct

SEQ ID NO: 3983471 - DNA, 25 bp, Homo sapien
tgatttgtccgcattctgccttctt

SEQ ID NO: 3983472 - DNA, 25 bp, Homo sapien
acgattcatgatcacgtcagtaggg

SEQ ID NO: 3983473 - DNA, 25 bp, Homo sapien
cctgtaacgattcatgatcacgtca

SEQ ID NO: 3983474 - DNA, 25 bp, Homo sapien
cacacctgtaacgattcatgatcac

SEQ ID NO: 3983475 - DNA, 25 bp, Homo sapien
cagtaggggctttacatccatctcc

SEQ ID NO: 3983476 - DNA, 25 bp, Homo sapien
ttggagcagcaacagcactttgtga

SEQ ID NO: 3983477 - DNA, 25 bp, Homo sapien
tgtggtaggaggttgctctgggagc

SEQ ID NO: 3983478 - DNA, 25 bp, Homo sapien
gagcttggagcagcaacagcacttt

SEQ ID NO: 3983479 - DNA, 25 bp, Homo sapien
agcaacagcactttgtgaaaacgga

SEQ ID NO: 3983480 - DNA, 25 bp, Homo sapien
tcgggccagcgcatagcagatgtgt

SEQ ID NO: 3983481 - DNA, 25 bp, Homo sapien
tccaagaacgaatgagtgaaaagcc

SEQ ID NO: 3983482 - DNA, 25 bp, Homo sapien
gctgcctcgggccagcgcatagcag

SEQ ID NO: 3983483 - DNA, 25 bp, Homo sapien
gcatagcagatgtgttccaagaacg

SEQ ID NO: 3983484 - DNA, 25 bp, Homo sapien
cttgggagcagatgcagctccagca

SEQ ID NO: 3983485 - DNA, 25 bp, Homo sapien
gggccaacagagtgcttcccgtggc

SEQ ID NO: 3983486 - DNA, 25 bp, Homo sapien
tgtccagaacctgctgatcccggtc

SEQ ID NO: 3983487 - DNA, 25 bp, Homo sapien
cgtggcttttgtgcgttagctgcca

SEQ ID NO: 3983488 - DNA, 25 bp, Homo sapien
tcaaaggcacggagcccgcagacaa

SEQ ID NO: 3983489 - DNA, 25 bp, Homo sapien
tatcaggtttccctcccgctagaga

SEQ ID NO: 3983490 - DNA, 25 bp, Homo sapien
gctgcccaatgaggccttggatctc

SEQ ID NO: 3983491 - DNA, 25 bp, Homo sapien
caaaagtctgacaaaggtcctatca

SEQ ID NO: 3983492 - DNA, 25 bp, Homo sapien
gactcaaccacattatcataaggga

SEQ ID NO: 3983493 - DNA, 25 bp, Homo sapien
gagcatcatcttctgtaaagcttca

SEQ ID NO: 3983494 - DNA, 25 bp, Homo sapien
tcagaagagacaaagtgtgccaagt

SEQ ID NO: 3983495 - DNA, 25 bp, Homo sapien
aagcttcatagtccccacttcaggg

SEQ ID NO: 3983496 - DNA, 25 bp, Homo sapien
gaaatggtgaactgatggtctcttg

SEQ ID NO: 3983497 - DNA, 25 bp, Homo sapien
ggagtccctgcacgctgttcctgca

SEQ ID NO: 3983498 - DNA, 25 bp, Homo sapien
tgacacactgctgctcgtgagtctg

SEQ ID NO: 3983499 - DNA, 25 bp, Homo sapien
gccattgtagcagtagccgtccaca

SEQ ID NO: 3983500 - DNA, 25 bp, Homo sapien
gacatgagtgcccatcgtgcaggta

SEQ ID NO: 3983501 - DNA, 25 bp, Homo sapien
gaagatctggaagtcgaaagcaatt

SEQ ID NO: 3983502 - DNA, 25 bp, Homo sapien
ctggaagtcgaaagcaattgttaaa

SEQ ID NO: 3983503 - DNA, 25 bp, Homo sapien
tctggaagtcgaaagcaattgttaa

SEQ ID NO: 3983504 - DNA, 25 bp, Homo sapien
agatctggaagtcgaaagcaattgt

SEQ ID NO: 3983505 - DNA, 25 bp, Homo sapien
tgaacctgttggcgacctgggggtc

SEQ ID NO: 3983506 - DNA, 25 bp, Homo sapien
tcaagttgtagctccggtgactcac

SEQ ID NO: 3983507 - DNA, 25 bp, Homo sapien
cctgggggtcaagttgtagctccgg

SEQ ID NO: 3983508 - DNA, 25 bp, Homo sapien
gggtcaagttgtagctccggtgact

SEQ ID NO: 3983509 - DNA, 25 bp, Homo sapien
ccggcttcagggtacaggtggtggc

SEQ ID NO: 3983510 - DNA, 25 bp, Homo sapien
cagtcttcacagcacagcccatgtg

SEQ ID NO: 3983511 - DNA, 25 bp, Homo sapien
cattgcagcagcgattcatacattc

SEQ ID NO: 3983512 - DNA, 25 bp, Homo sapien
acagcgtccggcttcagggtacagg

SEQ ID NO: 3983513 - DNA, 25 bp, Homo sapien
tgcaaacatcacaccttaaatggct

SEQ ID NO: 3983514 - DNA, 25 bp, Homo sapien
gagtatgcactcactgaatgcaaac

SEQ ID NO: 3983515 - DNA, 25 bp, Homo sapien
aacatcacaccttaaatggctgcaa

SEQ ID NO: 3983516 - DNA, 25 bp, Homo sapien
tttgacagggtcttatggagtatgc

SEQ ID NO: 3983517 - DNA, 25 bp, Homo sapien
ggatgcgccagtctcaacacgattt

SEQ ID NO: 3983518 - DNA, 25 bp, Homo sapien
attcctcctggtatggaaaacctca

SEQ ID NO: 3983519 - DNA, 25 bp, Homo sapien
ttccagcgttcttgcagaaactgtc

SEQ ID NO: 3983520 - DNA, 25 bp, Homo sapien
tgtgatgaacacaggaatataccgg

SEQ ID NO: 3983521 - DNA, 25 bp, Homo sapien
aagtcatgcatacagaggcgtctgc

SEQ ID NO: 3983522 - DNA, 25 bp, Homo sapien
gattcccctctggtagcacacctta

SEQ ID NO: 3983523 - DNA, 25 bp, Homo sapien
tgaaagctacaagctcgagaggcag

SEQ ID NO: 3983524 - DNA, 25 bp, Homo sapien
tgtgctagataaaaacgttccctgc

SEQ ID NO: 3983525 - DNA, 25 bp, Homo sapien
gataggactcttccttcctgagttc

SEQ ID NO: 3983526 - DNA, 25 bp, Homo sapien
gatacaagtcttcttgtatccttgt

SEQ ID NO: 3983527 - DNA, 25 bp, Homo sapien
caggatgggcagataggactcttcc

SEQ ID NO: 3983528 - DNA, 25 bp, Homo sapien
tcttctttgcctagccgaggataca

SEQ ID NO: 3983529 - DNA, 25 bp, Homo sapien
ctgacttccggcaggttaaacaggc

SEQ ID NO: 3983530 - DNA, 25 bp, Homo sapien
acttccggcaggttaaacaggcaca

SEQ ID NO: 3983531 - DNA, 25 bp, Homo sapien
gacttccggcaggttaaacaggcac

SEQ ID NO: 3983532 - DNA, 25 bp, Homo sapien
ccctgacttccggcaggttaaacag

SEQ ID NO: 3983533 - DNA, 25 bp, Homo sapien
tatgtaggtagactgcatgttagcg

SEQ ID NO: 3983534 - DNA, 25 bp, Homo sapien
caacctcgggctattaactctggag

SEQ ID NO: 3983535 - DNA, 25 bp, Homo sapien
cacagggagtcttttgatcctctcc

SEQ ID NO: 3983536 - DNA, 25 bp, Homo sapien
ataaatgaaagtgctcctctgtgga

SEQ ID NO: 3983537 - DNA, 25 bp, Homo sapien
caggcgacccagcaaggtcaatggg

SEQ ID NO: 3983538 - DNA, 25 bp, Homo sapien
ttgctcaggcgacccagcaaggtca

SEQ ID NO: 3983539 - DNA, 25 bp, Homo sapien
ccagcaaggtcaatggggagtccag

SEQ ID NO: 3983540 - DNA, 25 bp, Homo sapien
gctcaggcgacccagcaaggtcaat

SEQ ID NO: 3983541 - DNA, 25 bp, Homo sapien
gtgcaaatttgtcacatggatatat

SEQ ID NO: 3983542 - DNA, 25 bp, Homo sapien
attagcaatgaaggggtacatgtgc

SEQ ID NO: 3983543 - DNA, 25 bp, Homo sapien
tcagctcttgctcccctcccatcct

SEQ ID NO: 3983544 - DNA, 25 bp, Homo sapien
acccaataggtggtttttcagctct

SEQ ID NO: 3983545 - DNA, 25 bp, Homo sapien
aggtgccaatgctcagcaaggccag

SEQ ID NO: 3983546 - DNA, 25 bp, Homo sapien
caggtgccaatgctcagcaaggcca

SEQ ID NO: 3983547 - DNA, 25 bp, Homo sapien
agcaggtgccaatgctcagcaaggc

SEQ ID NO: 3983548 - DNA, 25 bp, Homo sapien
aagcaggtgccaatgctcagcaagg

SEQ ID NO: 3983549 - DNA, 25 bp, Homo sapien
tattccccggagcatccatgaaaag

SEQ ID NO: 3983550 - DNA, 25 bp, Homo sapien
ttaacagctttattccccggagcat

SEQ ID NO: 3983551 - DNA, 25 bp, Homo sapien
tgacatcaaagatctcatacagccc

SEQ ID NO: 3983552 - DNA, 25 bp, Homo sapien
ccaggtagttgctcatgacatcaaa

SEQ ID NO: 3983553 - DNA, 25 bp, Homo sapien
caactacctcattgcactgaagtgg

SEQ ID NO: 3983554 - DNA, 25 bp, Homo sapien
caacaagagcatgtagttaggagca

SEQ ID NO: 3983555 - DNA, 25 bp, Homo sapien
gctagctcctagtactgacaggcaa

SEQ ID NO: 3983556 - DNA, 25 bp, Homo sapien
caagtccgaagcctatgtctgagca

SEQ ID NO: 3983557 - DNA, 25 bp, Homo sapien
ttatgtggagtttcgctctgtagcc

SEQ ID NO: 3983558 - DNA, 25 bp, Homo sapien
caggttggagttcagtggtgcgatc

SEQ ID NO: 3983559 - DNA, 25 bp, Homo sapien
ttttatgtggagtttcgctctgtag

SEQ ID NO: 3983560 - DNA, 25 bp, Homo sapien
tttatgtggagtttcgctctgtagc

SEQ ID NO: 3983561 - DNA, 25 bp, Homo sapien
ttctgagctacgatggctatttctt

SEQ ID NO: 3983562 - DNA, 25 bp, Homo sapien
acttctgagctacgatggctatttc

SEQ ID NO: 3983563 - DNA, 25 bp, Homo sapien
cacttctgagctacgatggctattt

SEQ ID NO: 3983564 - DNA, 25 bp, Homo sapien
tcacttctgagctacgatggctatt

SEQ ID NO: 3983565 - DNA, 25 bp, Homo sapien
gaactgttttcaagaatccctcctg

SEQ ID NO: 3983566 - DNA, 25 bp, Homo sapien
gcctcccgagcttgacctctatttt

SEQ ID NO: 3983567 - DNA, 25 bp, Homo sapien
caggctgcatattgatgcgcccttc

SEQ ID NO: 3983568 - DNA, 25 bp, Homo sapien
tcaaggatcagtggccacacagaat

SEQ ID NO: 3983569 - DNA, 25 bp, Homo sapien
cctcattctgtagctgttcctcctt

SEQ ID NO: 3983570 - DNA, 25 bp, Homo sapien
gagttcctcattctgtagctgttcc

SEQ ID NO: 3983571 - DNA, 25 bp, Homo sapien
cagagttcctcattctgtagctgtt

SEQ ID NO: 3983572 - DNA, 25 bp, Homo sapien
gttcctcattctgtagctgttcctc

SEQ ID NO: 3983573 - DNA, 25 bp, Homo sapien
gaaagcaagttctacagagtgtgga

SEQ ID NO: 3983574 - DNA, 25 bp, Homo sapien
caacagcaccccaaagttcgaggga

SEQ ID NO: 3983575 - DNA, 25 bp, Homo sapien
tatgtattgtccactgattttcagg

SEQ ID NO: 3983576 - DNA, 25 bp, Homo sapien
agtgtggactttcccgctacattga

SEQ ID NO: 3983577 - DNA, 25 bp, Homo sapien
gatgaggtaccctgcagtgaggtcc

SEQ ID NO: 3983578 - DNA, 25 bp, Homo sapien
tctagatggtgcttgatacccggac

SEQ ID NO: 3983579 - DNA, 25 bp, Homo sapien
ggcctctagagggtacacagtaaat

SEQ ID NO: 3983580 - DNA, 25 bp, Homo sapien
tacccggactgtgtaagcagatttg

SEQ ID NO: 3983581 - DNA, 25 bp, Homo sapien
aaagcagttactgattcatctctga

SEQ ID NO: 3983582 - DNA, 25 bp, Homo sapien
taagccatctacaatacttggttct

SEQ ID NO: 3983583 - DNA, 25 bp, Homo sapien
ggagctgagactgaatttaactgac

SEQ ID NO: 3983584 - DNA, 25 bp, Homo sapien
tatatgaagggatatacttttctcc

SEQ ID NO: 3983585 - DNA, 25 bp, Homo sapien
aggaagttgctttccatctgagaaa

SEQ ID NO: 3983586 - DNA, 25 bp, Homo sapien
gtgattaattcacctacttgcttag

SEQ ID NO: 3983587 - DNA, 25 bp, Homo sapien
tttgtgattaattcacctacttgct

SEQ ID NO: 3983588 - DNA, 25 bp, Homo sapien
cctacttgcttaggaagttgctttc

SEQ ID NO: 3983589 - DNA, 25 bp, Homo sapien
tgtcaaagcagatggaagcaatggt

SEQ ID NO: 3983590 - DNA, 25 bp, Homo sapien
ctgtcaaagcagatggaagcaatgg

SEQ ID NO: 3983591 - DNA, 25 bp, Homo sapien
actgtcaaagcagatggaagcaatg

SEQ ID NO: 3983592 - DNA, 25 bp, Homo sapien
tcaaagcagatggaagcaatggtac

SEQ ID NO: 3983593 - DNA, 25 bp, Homo sapien
tttgacagctacagcccctgtccag

SEQ ID NO: 3983594 - DNA, 25 bp, Homo sapien
tgtccagtgtgtcatgattcatccc

SEQ ID NO: 3983595 - DNA, 25 bp, Homo sapien
tgtgccagggtcacggctgcaccaa

SEQ ID NO: 3983596 - DNA, 25 bp, Homo sapien
ccggtggaagcgttcatgatgcagc

SEQ ID NO: 3983597 - DNA, 25 bp, Homo sapien
tgaaaaggcctgtataccatggagt

SEQ ID NO: 3983598 - DNA, 25 bp, Homo sapien
taacttagtggagtgcctggatggc

SEQ ID NO: 3983599 - DNA, 25 bp, Homo sapien
ggaaaataccctgtttgaatcttgc

SEQ ID NO: 3983600 - DNA, 25 bp, Homo sapien
gcttggctcaaacagatactagaaa

SEQ ID NO: 3983601 - DNA, 25 bp, Homo sapien
cagaaatggtactacaatcctgttt

SEQ ID NO: 3983602 - DNA, 25 bp, Homo sapien
gcaaggctgttttaggccagttaga

SEQ ID NO: 3983603 - DNA, 25 bp, Homo sapien
caattttatgaggatctctgcttcc

SEQ ID NO: 3983604 - DNA, 25 bp, Homo sapien
gccagttagataaaaaggaatgact

SEQ ID NO: 3983605 - DNA, 25 bp, Homo sapien
tcctcttagatttgtggtcctctaa

SEQ ID NO: 3983606 - DNA, 25 bp, Homo sapien
gatttgtggtcctctaatgaagcac

SEQ ID NO: 3983607 - DNA, 25 bp, Homo sapien
ttccttcctcttagatttgtggtcc

SEQ ID NO: 3983608 - DNA, 25 bp, Homo sapien
tctaatgaagcacagtcacacggga

SEQ ID NO: 3983609 - DNA, 25 bp, Homo sapien
ggttacaggcccatttcagcaccgc

SEQ ID NO: 3983610 - DNA, 25 bp, Homo sapien
tgtagaaatcaaaggtgctgaggca

SEQ ID NO: 3983611 - DNA, 25 bp, Homo sapien
tactctggtgagatgggttacaggc

SEQ ID NO: 3983612 - DNA, 25 bp, Homo sapien
tggaataagggacacgagctgaaga

SEQ ID NO: 3983613 - DNA, 25 bp, Homo sapien
tgcttatgaagaattgagttccagc

SEQ ID NO: 3983614 - DNA, 25 bp, Homo sapien
gcttatgaagaattgagttccagct

SEQ ID NO: 3983615 - DNA, 25 bp, Homo sapien
catgcttatgaagaattgagttcca

SEQ ID NO: 3983616 - DNA, 25 bp, Homo sapien
atgcttatgaagaattgagttccag

SEQ ID NO: 3983617 - DNA, 25 bp, Homo sapien
acttgaagtgaacctggcatcacaa

SEQ ID NO: 3983618 - DNA, 25 bp, Homo sapien
gatgccaacttgaagtggcaaagtc

SEQ ID NO: 3983619 - DNA, 25 bp, Homo sapien
gtagcaactgaccatggaaccatga

SEQ ID NO: 3983620 - DNA, 25 bp, Homo sapien
caaacttgccaaggacctgccatgg

SEQ ID NO: 3983621 - DNA, 25 bp, Homo sapien
tgacaattcccccagactggtctgc

SEQ ID NO: 3983622 - DNA, 25 bp, Homo sapien
gccgatggtggtcccttggaaataa

SEQ ID NO: 3983623 - DNA, 25 bp, Homo sapien
tgccgtgcacatgctcatgattggg

SEQ ID NO: 3983624 - DNA, 25 bp, Homo sapien
aattcccccagactggtctgccgtg

SEQ ID NO: 3983625 - DNA, 25 bp, Homo sapien
ccctgtgaaaatggccgaagtaaat

SEQ ID NO: 3983626 - DNA, 25 bp, Homo sapien
tctttggttcctaacgggtgatgca

SEQ ID NO: 3983627 - DNA, 25 bp, Homo sapien
caaccacaaatatccaagggtaggg

SEQ ID NO: 3983628 - DNA, 25 bp, Homo sapien
ggagatttacagtgttggtcaccac

SEQ ID NO: 3983629 - DNA, 25 bp, Homo sapien
ggtcctgacttacagagcatttgtc

SEQ ID NO: 3983630 - DNA, 25 bp, Homo sapien
catggaggctggtgaatgggtcctg

SEQ ID NO: 3983631 - DNA, 25 bp, Homo sapien
cattgtcatgggatttgcgaggtag

SEQ ID NO: 3983632 - DNA, 25 bp, Homo sapien
gagcatttgtccatgtcattccaca

SEQ ID NO: 3983633 - DNA, 25 bp, Homo sapien
taccaacacgatccgaatgttcagt

SEQ ID NO: 3983634 - DNA, 25 bp, Homo sapien
ccaacacgatccgaatgttcagtgg

SEQ ID NO: 3983635 - DNA, 25 bp, Homo sapien
ctaccaacacgatccgaatgttcag

SEQ ID NO: 3983636 - DNA, 25 bp, Homo sapien
caacacgatccgaatgttcagtggt

SEQ ID NO: 3983637 - DNA, 25 bp, Homo sapien
taactaggttctcgaagattgacca

SEQ ID NO: 3983638 - DNA, 25 bp, Homo sapien
cagatttgcgttatttgagggtcac

SEQ ID NO: 3983639 - DNA, 25 bp, Homo sapien
ggcattggagttgggatcacgttaa

SEQ ID NO: 3983640 - DNA, 25 bp, Homo sapien
gccagttaatatccactgcaagtga

SEQ ID NO: 3983641 - DNA, 25 bp, Homo sapien
gtgtcatggaaaggtctgttaaatg

SEQ ID NO: 3983642 - DNA, 25 bp, Homo sapien
ctgactacacctacaggcaggtcgt

SEQ ID NO: 3983643 - DNA, 25 bp, Homo sapien
tgactacacctacaggcaggtcgtt

SEQ ID NO: 3983644 - DNA, 25 bp, Homo sapien
agacaagcagatggctttgtactca

SEQ ID NO: 3983645 - DNA, 25 bp, Homo sapien
attgtcctcataggcatcacataga

SEQ ID NO: 3983646 - DNA, 25 bp, Homo sapien
catagacaagcagatggctttgtac

SEQ ID NO: 3983647 - DNA, 25 bp, Homo sapien
gtcctcataggcatcacatagacaa

SEQ ID NO: 3983648 - DNA, 25 bp, Homo sapien
gctgacgggttccttttgattcttc

SEQ ID NO: 3983649 - DNA, 25 bp, Homo sapien
agggctgctgacgggttccttttga

SEQ ID NO: 3983650 - DNA, 25 bp, Homo sapien
ctgcctgctctaaaagttctttcca

SEQ ID NO: 3983651 - DNA, 25 bp, Homo sapien
gctgctgacgggttccttttgattc

SEQ ID NO: 3983652 - DNA, 25 bp, Homo sapien
gcactccccgggctcctgtgggaat

SEQ ID NO: 3983653 - DNA, 25 bp, Homo sapien
cgatagctccatgggcaggtgcact

SEQ ID NO: 3983654 - DNA, 25 bp, Homo sapien
ggaaaattctcagcgtctggcctag

SEQ ID NO: 3983655 - DNA, 25 bp, Homo sapien
gaagatgcaaactccacgatagctc

SEQ ID NO: 3983656 - DNA, 25 bp, Homo sapien
cactggcacagtcgttgttttctgg

SEQ ID NO: 3983657 - DNA, 25 bp, Homo sapien
tgttttccagtctaggatgtcctct

SEQ ID NO: 3983658 - DNA, 25 bp, Homo sapien
cagcaaatgaggaagttgccactgg

SEQ ID NO: 3983659 - DNA, 25 bp, Homo sapien
tattaagttagaatggtccaggaga

SEQ ID NO: 3983660 - DNA, 25 bp, Homo sapien
tgtgtgctcagcaaatcggctctct

SEQ ID NO: 3983661 - DNA, 25 bp, Homo sapien
acttggaagcaccaagtctcccagg

SEQ ID NO: 3983662 - DNA, 25 bp, Homo sapien
tcatctgttcatagacttggaagca

SEQ ID NO: 3983663 - DNA, 25 bp, Homo sapien
tccaaggtctttggcgtctgctggg

SEQ ID NO: 3983664 - DNA, 25 bp, Homo sapien
gcaatctctattaatcgctgcttaa

SEQ ID NO: 3983665 - DNA, 25 bp, Homo sapien
ctattaatcgctgcttaactttttc

SEQ ID NO: 3983666 - DNA, 25 bp, Homo sapien
gattagcaatctctattaatcgctg

SEQ ID NO: 3983667 - DNA, 25 bp, Homo sapien
cttgtcaacgtgattagcaatctct

SEQ ID NO: 3983668 - DNA, 25 bp, Homo sapien
ccacatacttagttgccttgagggt

SEQ ID NO: 3983669 - DNA, 25 bp, Homo sapien
gctccacatacttagttgccttgag

SEQ ID NO: 3983670 - DNA, 25 bp, Homo sapien
tccacatacttagttgccttgaggg

SEQ ID NO: 3983671 - DNA, 25 bp, Homo sapien
ctccacatacttagttgccttgagg

SEQ ID NO: 3983672 - DNA, 25 bp, Homo sapien
tatctaccagggatgctgtttgcac

SEQ ID NO: 3983673 - DNA, 25 bp, Homo sapien
cagcctgcaatgaggactctggcaa

SEQ ID NO: 3983674 - DNA, 25 bp, Homo sapien
caaaagtctccgttcccaggtggag

SEQ ID NO: 3983675 - DNA, 25 bp, Homo sapien
tctggcaatgggaacttaactcaag

SEQ ID NO: 3983676 - DNA, 25 bp, Homo sapien
aatattgagaactgagttgaccggc

SEQ ID NO: 3983677 - DNA, 25 bp, Homo sapien
ccgtaggtgctaaccaaaacaatct

SEQ ID NO: 3983678 - DNA, 25 bp, Homo sapien
caaagcaccgttgttattcccattc

SEQ ID NO: 3983679 - DNA, 25 bp, Homo sapien
tccctttcatatttaccgtaggtgc

SEQ ID NO: 3983680 - DNA, 25 bp, Homo sapien
gattaggatacagtgttctgccacc

SEQ ID NO: 3983681 - DNA, 25 bp, Homo sapien
gcagccatgtcaaggtgagccacag

SEQ ID NO: 3983682 - DNA, 25 bp, Homo sapien
tccttgggattaggatacagtgttc

SEQ ID NO: 3983683 - DNA, 25 bp, Homo sapien
acagtaccagatgggagagttcctc

SEQ ID NO: 3983684 - DNA, 25 bp, Homo sapien
tgatgtgatccacatgatccccgga

SEQ ID NO: 3983685 - DNA, 25 bp, Homo sapien
gaaacacattctttgcagcgaggtt

SEQ ID NO: 3983686 - DNA, 25 bp, Homo sapien
gatccccggacgcttttcagcttct

SEQ ID NO: 3983687 - DNA, 25 bp, Homo sapien
aagagtttgtatctgttggttgcac

SEQ ID NO: 3983688 - DNA, 25 bp, Homo sapien
tgtcatcgagtcaaaacgcttagcc

SEQ ID NO: 3983689 - DNA, 25 bp, Homo sapien
gaagtgccagtctcaacgctgcaag

SEQ ID NO: 3983690 - DNA, 25 bp, Homo sapien
ttctggaatcaagaacactacaggg

SEQ ID NO: 3983691 - DNA, 25 bp, Homo sapien
cttctcagggttgctatgtcatcga

SEQ ID NO: 3983692 - DNA, 25 bp, Homo sapien
ttcaaacgatgggaacctcggcctg

SEQ ID NO: 3983693 - DNA, 25 bp, Homo sapien
tgggctgtcgggttccttcaaacga

SEQ ID NO: 3983694 - DNA, 25 bp, Homo sapien
tggagctcacagctaaggccacatc

SEQ ID NO: 3983695 - DNA, 25 bp, Homo sapien
ggaaatgagtaatgctagccttggg

SEQ ID NO: 3983696 - DNA, 25 bp, Homo sapien
tagcgaggtgaccactatctctcca

SEQ ID NO: 3983697 - DNA, 25 bp, Homo sapien
agaaatgacaatttgggtaacagca

SEQ ID NO: 3983698 - DNA, 25 bp, Homo sapien
cccatgtgtctagtaccttatgtta

SEQ ID NO: 3983699 - DNA, 25 bp, Homo sapien
aattcatctgactggaaatggaccc

SEQ ID NO: 3983700 - DNA, 25 bp, Homo sapien
catgtgaactactcaggtacagtca

SEQ ID NO: 3983701 - DNA, 25 bp, Homo sapien
tatgcgcgagacactaggctagaca

SEQ ID NO: 3983702 - DNA, 25 bp, Homo sapien
tttgataaacagtcgtggcagcagt

SEQ ID NO: 3983703 - DNA, 25 bp, Homo sapien
tacttaacacatacgcaccacaggg

SEQ ID NO: 3983704 - DNA, 25 bp, Homo sapien
cacatgtccttagaagagaccgaag

SEQ ID NO: 3983705 - DNA, 25 bp, Homo sapien
gggattcttccgtagactctgctga

SEQ ID NO: 3983706 - DNA, 25 bp, Homo sapien
ccgaagaggagacacacagacgtag

SEQ ID NO: 3983707 - DNA, 25 bp, Homo sapien
tcaaggcatagcagggatggccaga

SEQ ID NO: 3983708 - DNA, 25 bp, Homo sapien
caaaaccaccgtggctggtggccag

SEQ ID NO: 3983709 - DNA, 25 bp, Homo sapien
gatgccacctggcaaaaccaccgtg

SEQ ID NO: 3983710 - DNA, 25 bp, Homo sapien
gcatgcacgtcaaagcttcttgctg

SEQ ID NO: 3983711 - DNA, 25 bp, Homo sapien
ggatccctgtggcatgcacgtcaaa

SEQ ID NO: 3983712 - DNA, 25 bp, Homo sapien
gacctatacgttgcaggcacctcgt

SEQ ID NO: 3983713 - DNA, 25 bp, Homo sapien
tctgggtgttagacctatacgttgc

SEQ ID NO: 3983714 - DNA, 25 bp, Homo sapien
cgtagaatgaggtatggcagttacc

SEQ ID NO: 3983715 - DNA, 25 bp, Homo sapien
ttaccaaggcatgggcaaggaagga

SEQ ID NO: 3983716 - DNA, 25 bp, Homo sapien
tgagcagttgatcagatacagcttc

SEQ ID NO: 3983717 - DNA, 25 bp, Homo sapien
cagtgagcagttgatcagatacagc

SEQ ID NO: 3983718 - DNA, 25 bp, Homo sapien
tgtcagtgagcagttgatcagatac

SEQ ID NO: 3983719 - DNA, 25 bp, Homo sapien
gcagttgatcagatacagcttcccc

SEQ ID NO: 3983720 - DNA, 25 bp, Homo sapien
tgatgcacggtctgctgcttttgta

SEQ ID NO: 3983721 - DNA, 25 bp, Homo sapien
ttcttgacttgaaagatcataaagt

SEQ ID NO: 3983722 - DNA, 25 bp, Homo sapien
cataaagttgactgtacagctgcgg

SEQ ID NO: 3983723 - DNA, 25 bp, Homo sapien
aatttctctgttgatgcacggtctg

SEQ ID NO: 3983724 - DNA, 25 bp, Homo sapien
cagagtctggccagcgaggtcgtca

SEQ ID NO: 3983725 - DNA, 25 bp, Homo sapien
gcccacagtgaggagttcattagac

SEQ ID NO: 3983726 - DNA, 25 bp, Homo sapien
tcaaaattctcagaagcgcccacag

SEQ ID NO: 3983727 - DNA, 25 bp, Homo sapien
accatgcggaaggaactggcaaccc

SEQ ID NO: 3983728 - DNA, 25 bp, Homo sapien
gatgagatcatgagggaagccccat

SEQ ID NO: 3983729 - DNA, 25 bp, Homo sapien
cctggtccaggatatagggccataa

SEQ ID NO: 3983730 - DNA, 25 bp, Homo sapien
tgtacacgcacaaagagaggtcacg

SEQ ID NO: 3983731 - DNA, 25 bp, Homo sapien
tgtttcacagatgagccagtggcct

SEQ ID NO: 3983732 - DNA, 25 bp, Homo sapien
tggagagagggcctccgtgttctct

SEQ ID NO: 3983733 - DNA, 25 bp, Homo sapien
cctgcagtagatggctgaagactag

SEQ ID NO: 3983734 - DNA, 25 bp, Homo sapien
tctcttgcctaggtggaggtgtagc

SEQ ID NO: 3983735 - DNA, 25 bp, Homo sapien
tcagtgctttagcacgagcaggaaa

SEQ ID NO: 3983736 - DNA, 25 bp, Homo sapien
aatcagaatatccccgtacatgtcc

SEQ ID NO: 3983737 - DNA, 25 bp, Homo sapien
tcagaatatccccgtacatgtccat

SEQ ID NO: 3983738 - DNA, 25 bp, Homo sapien
tgaatcagaatatccccgtacatgt

SEQ ID NO: 3983739 - DNA, 25 bp, Homo sapien
gaatcagaatatccccgtacatgtc

SEQ ID NO: 3983740 - DNA, 25 bp, Homo sapien
cattcttcggcatgtggacagctag

SEQ ID NO: 3983741 - DNA, 25 bp, Homo sapien
caggcctcttcttttaatacggtca

SEQ ID NO: 3983742 - DNA, 25 bp, Homo sapien
taaaccgcttgcctattcatgtaca

SEQ ID NO: 3983743 - DNA, 25 bp, Homo sapien
tgtagcttgaagtacaagtccaact

SEQ ID NO: 3983744 - DNA, 25 bp, Homo sapien
aaagcatgtgcaaagatagtgggcg

SEQ ID NO: 3983745 - DNA, 25 bp, Homo sapien
tctctgattgcctcaagggcgctaa

SEQ ID NO: 3983746 - DNA, 25 bp, Homo sapien
agctgtggccacaaccctctgcaga

SEQ ID NO: 3983747 - DNA, 25 bp, Homo sapien
attcctgttcctctctctgattgcc

SEQ ID NO: 3983748 - DNA, 25 bp, Homo sapien
caagggcgctaaactgtatagcctc

SEQ ID NO: 3983749 - DNA, 25 bp, Homo sapien
ctcccatgtccataacaagaaccat

SEQ ID NO: 3983750 - DNA, 25 bp, Homo sapien
tgctcccatgtccataacaagaacc

SEQ ID NO: 3983751 - DNA, 25 bp, Homo sapien
gctcccatgtccataacaagaacca

SEQ ID NO: 3983752 - DNA, 25 bp, Homo sapien
gtccaagagctagccaggcctgatc

SEQ ID NO: 3983753 - DNA, 25 bp, Homo sapien
tcctgtccaagagctagccaggcct

SEQ ID NO: 3983754 - DNA, 25 bp, Homo sapien
caagagctagccaggcctgatcctg

SEQ ID NO: 3983755 - DNA, 25 bp, Homo sapien
ctgtccaagagctagccaggcctga

SEQ ID NO: 3983756 - DNA, 25 bp, Homo sapien
gagacaattttgctagcatatacag

SEQ ID NO: 3983757 - DNA, 25 bp, Homo sapien
ctaaagcttagttctagatgaatct

SEQ ID NO: 3983758 - DNA, 25 bp, Homo sapien
gaaatcctttaattaggagctgggc

SEQ ID NO: 3983759 - DNA, 25 bp, Homo sapien
tacagaattactccctttatgccta

SEQ ID NO: 3983760 - DNA, 25 bp, Homo sapien
taaaattgcaggacacactcttatc

SEQ ID NO: 3983761 - DNA, 25 bp, Homo sapien
atacttaaaattgcaggacacactc

SEQ ID NO: 3983762 - DNA, 25 bp, Homo sapien
aaatctaaagttaatcagcgtgtct

SEQ ID NO: 3983763 - DNA, 25 bp, Homo sapien
taatcagcgtgtctattattctcca

SEQ ID NO: 3983764 - DNA, 25 bp, Homo sapien
ttcgagcgagggagacatcagtacc

SEQ ID NO: 3983765 - DNA, 25 bp, Homo sapien
catcagtaccgtcttgcagatagtg

SEQ ID NO: 3983766 - DNA, 25 bp, Homo sapien
cgtgaaactgctggcaatgagacct

SEQ ID NO: 3983767 - DNA, 25 bp, Homo sapien
tcttgcagatagtgggtttccgtga

SEQ ID NO: 3983768 - DNA, 25 bp, Homo sapien
gaatcaggaactgcgtaacagactg

SEQ ID NO: 3983769 - DNA, 25 bp, Homo sapien
tttatcctgtgccatgcagagccgc

SEQ ID NO: 3983770 - DNA, 25 bp, Homo sapien
gatgtcaacagagatgggtcactca

SEQ ID NO: 3983771 - DNA, 25 bp, Homo sapien
gggacctgagcagacacaagcttca

SEQ ID NO: 3983772 - DNA, 25 bp, Homo sapien
taagacactattcccgtaccagaca

SEQ ID NO: 3983773 - DNA, 25 bp, Homo sapien
agtcggcaaatgtcacatccaggca

SEQ ID NO: 3983774 - DNA, 25 bp, Homo sapien
gcagatattctcctacgcatcatgg

SEQ ID NO: 3983775 - DNA, 25 bp, Homo sapien
tggcccggctatccaagtcggcaaa

SEQ ID NO: 3983776 - DNA, 25 bp, Homo sapien
taagtagcaattgaaacattacaca

SEQ ID NO: 3983777 - DNA, 25 bp, Homo sapien
tgctcttggaggtactttgtagaaa

SEQ ID NO: 3983778 - DNA, 25 bp, Homo sapien
ttaatgagattgaaagtactagaac

SEQ ID NO: 3983779 - DNA, 25 bp, Homo sapien
tacacaaattgtcaaactctctttc

SEQ ID NO: 3983780 - DNA, 25 bp, Homo sapien
catgtgatctctgtacgtgggtggc

SEQ ID NO: 3983781 - DNA, 25 bp, Homo sapien
tctgcattcaagagctcgagagcca

SEQ ID NO: 3983782 - DNA, 25 bp, Homo sapien
gcttcctggatgtggtgaccgcaca

SEQ ID NO: 3983783 - DNA, 25 bp, Homo sapien
cagatcaagaatgtccggaaggtca

SEQ ID NO: 3983784 - DNA, 25 bp, Homo sapien
tatggcgcaaagcttgttaatcctg

SEQ ID NO: 3983785 - DNA, 25 bp, Homo sapien
gcagatggcattttctagactagaa

SEQ ID NO: 3983786 - DNA, 25 bp, Homo sapien
aatttagtatttgggcaccttcaca

SEQ ID NO: 3983787 - DNA, 25 bp, Homo sapien
tgatgaagtggcaaaagctgtgccg

SEQ ID NO: 3983788 - DNA, 25 bp, Homo sapien
atgaaagcacgggttggagtttcat

SEQ ID NO: 3983789 - DNA, 25 bp, Homo sapien
catctaatgaaagcacgggttggag

SEQ ID NO: 3983790 - DNA, 25 bp, Homo sapien
ctaatgaaagcacgggttggagttt

SEQ ID NO: 3983791 - DNA, 25 bp, Homo sapien
ccatctaatgaaagcacgggttgga

SEQ ID NO: 3983792 - DNA, 25 bp, Homo sapien
gccagggaaatgaactagatgacca

SEQ ID NO: 3983793 - DNA, 25 bp, Homo sapien
aagtcactgacctctatccggaatg

SEQ ID NO: 3983794 - DNA, 25 bp, Homo sapien
ggaatgacaaccactcaggccaatg

SEQ ID NO: 3983795 - DNA, 25 bp, Homo sapien
tgagagtctattgccggagaacagc

SEQ ID NO: 3983796 - DNA, 25 bp, Homo sapien
tggactggttcagcgcagggtcact

SEQ ID NO: 3983797 - DNA, 25 bp, Homo sapien
caggtgaccgcatgagtccagatga

SEQ ID NO: 3983798 - DNA, 25 bp, Homo sapien
tttgagaaagtagaactcgggagcc

SEQ ID NO: 3983799 - DNA, 25 bp, Homo sapien
cgggagccagcaagctcgaatttaa

SEQ ID NO: 3983800 - DNA, 25 bp, Homo sapien
aaataatacatatgttggtcaggtg

SEQ ID NO: 3983801 - DNA, 25 bp, Homo sapien
tctactgtgcaatatggtaactaca

SEQ ID NO: 3983802 - DNA, 25 bp, Homo sapien
taactacagttaataccagtgtatc

SEQ ID NO: 3983803 - DNA, 25 bp, Homo sapien
taaaagcagagcttaccaggggtgg

SEQ ID NO: 3983804 - DNA, 25 bp, Homo sapien
tcagtcagggaaaatcagggaatgt

SEQ ID NO: 3983805 - DNA, 25 bp, Homo sapien
agtcagggaaaatcagggaatgtcg

SEQ ID NO: 3983806 - DNA, 25 bp, Homo sapien
cagggaatgtcgtttggcttcagtg

SEQ ID NO: 3983807 - DNA, 25 bp, Homo sapien
atcagggaatgtcgtttggcttcag

SEQ ID NO: 3983808 - DNA, 25 bp, Homo sapien
agatggacagccactacgggccttg

SEQ ID NO: 3983809 - DNA, 25 bp, Homo sapien
tggacagccactacgggccttgctc

SEQ ID NO: 3983810 - DNA, 25 bp, Homo sapien
cagccactacgggccttgctctcct

SEQ ID NO: 3983811 - DNA, 25 bp, Homo sapien
ctcccttgagtccacggccctccct

SEQ ID NO: 3983812 - DNA, 25 bp, Homo sapien
gagccattgggaggggccatatgtt

SEQ ID NO: 3983813 - DNA, 25 bp, Homo sapien
ggagccattgggaggggccatatgt

SEQ ID NO: 3983814 - DNA, 25 bp, Homo sapien
agggccagtgtagcctttagctcgt

SEQ ID NO: 3983815 - DNA, 25 bp, Homo sapien
tatctggtttgtggacgcaaaatgt

SEQ ID NO: 3983816 - DNA, 25 bp, Homo sapien
gtttgtggacgcaaaatgtgcaacc

SEQ ID NO: 3983817 - DNA, 25 bp, Homo sapien
caaaatgtgcaaccagggccagtgt

SEQ ID NO: 3983818 - DNA, 25 bp, Homo sapien
cacataaagaacgtccagggaaaga

SEQ ID NO: 3983819 - DNA, 25 bp, Homo sapien
gcaacgttgtcgttcacataaagaa

SEQ ID NO: 3983820 - DNA, 25 bp, Homo sapien
tttgcaaggtcagagctcgtccagt

SEQ ID NO: 3983821 - DNA, 25 bp, Homo sapien
cagagagaggcagcaggctagttca

SEQ ID NO: 3983822 - DNA, 25 bp, Homo sapien
gcaacgcacaggatgtacagcacca

SEQ ID NO: 3983823 - DNA, 25 bp, Homo sapien
caacgcacaggatgtacagcaccag

SEQ ID NO: 3983824 - DNA, 25 bp, Homo sapien
aacgcacaggatgtacagcaccagt

SEQ ID NO: 3983825 - DNA, 25 bp, Homo sapien
acgcacaggatgtacagcaccagtg

SEQ ID NO: 3983826 - DNA, 25 bp, Homo sapien
gcacacttctttaaatcatatccat

SEQ ID NO: 3983827 - DNA, 25 bp, Homo sapien
gcccaatggagtaagcacacttctt

SEQ ID NO: 3983828 - DNA, 25 bp, Homo sapien
tgctatgaagcccaatggagtaagc

SEQ ID NO: 3983829 - DNA, 25 bp, Homo sapien
aatgatcatttgacacttgcaggaa

SEQ ID NO: 3983830 - DNA, 25 bp, Homo sapien
caaaattgagaccagcaagagagca

SEQ ID NO: 3983831 - DNA, 25 bp, Homo sapien
tcccctagcctatacaaattgagct

SEQ ID NO: 3983832 - DNA, 25 bp, Homo sapien
tgagctttttcctcagttacgtgcc

SEQ ID NO: 3983833 - DNA, 25 bp, Homo sapien
gaacgctgtcaattcactgttggga

SEQ ID NO: 3983834 - DNA, 25 bp, Homo sapien
gagagcccaggatgagattcagcca

SEQ ID NO: 3983835 - DNA, 25 bp, Homo sapien
gccatatgcctagggaaaggttcct

SEQ ID NO: 3983836 - DNA, 25 bp, Homo sapien
tatggacgatgatgactgggccacg

SEQ ID NO: 3983837 - DNA, 25 bp, Homo sapien
tgagtgagtcctcctgactgttgaa

SEQ ID NO: 3983838 - DNA, 25 bp, Homo sapien
ccatgccaggtaccgcactggtgat

SEQ ID NO: 3983839 - DNA, 25 bp, Homo sapien
cattgccatgccaggtaccgcactg

SEQ ID NO: 3983840 - DNA, 25 bp, Homo sapien
ccgcactggtgattaagattcaggg

SEQ ID NO: 3983841 - DNA, 25 bp, Homo sapien
gccaggtaccgcactggtgattaag

SEQ ID NO: 3983842 - DNA, 25 bp, Homo sapien
tcattcattgttcgcatccaacacc

SEQ ID NO: 3983843 - DNA, 25 bp, Homo sapien
ttcgcatccaacaccgaggagacag

SEQ ID NO: 3983844 - DNA, 25 bp, Homo sapien
ttgttcgcatccaacaccgaggaga

SEQ ID NO: 3983845 - DNA, 25 bp, Homo sapien
catccaacaccgaggagacagaggt

SEQ ID NO: 3983846 - DNA, 25 bp, Homo sapien
gcacgccagctggtatacaacagac

SEQ ID NO: 3983847 - DNA, 25 bp, Homo sapien
gctggtatacaacagactcactggg

SEQ ID NO: 3983848 - DNA, 25 bp, Homo sapien
actcactgggggtcctttggtggct

SEQ ID NO: 3983849 - DNA, 25 bp, Homo sapien
ccagaaccgagcacgccagctggta

SEQ ID NO: 3983850 - DNA, 25 bp, Homo sapien
tgggagcttgcagctgctggactct

SEQ ID NO: 3983851 - DNA, 25 bp, Homo sapien
atctccttccaccagggccctgtct

SEQ ID NO: 3983852 - DNA, 25 bp, Homo sapien
agctgctggactctttccccagggc

SEQ ID NO: 3983853 - DNA, 25 bp, Homo sapien
cagggccctgtcttgccttcctgga

SEQ ID NO: 3983854 - DNA, 25 bp, Homo sapien
tggaaagggtcgtctccacgtggca

SEQ ID NO: 3983855 - DNA, 25 bp, Homo sapien
tggcatgaacaaggcatcacactgc

SEQ ID NO: 3983856 - DNA, 25 bp, Homo sapien
tcagaacttgcctggcgagaaacag

SEQ ID NO: 3983857 - DNA, 25 bp, Homo sapien
tgctgagccagtgatccggaaaaca

SEQ ID NO: 3983858 - DNA, 25 bp, Homo sapien
ggtgaccacggccttgagggagagt

SEQ ID NO: 3983859 - DNA, 25 bp, Homo sapien
tgtgtcggaggaggctccattgcct

SEQ ID NO: 3983860 - DNA, 25 bp, Homo sapien
agagtgggcttagtcaccggatgaa

SEQ ID NO: 3983861 - DNA, 25 bp, Homo sapien
ttagtcaccggatgaacctcaggcc

SEQ ID NO: 3983862 - DNA, 25 bp, Homo sapien
aacttgctgcaggagcgtgcctgca

SEQ ID NO: 3983863 - DNA, 25 bp, Homo sapien
gaaagggctccattgtttacaaatc

SEQ ID NO: 3983864 - DNA, 25 bp, Homo sapien
tgtgaggcgggctcgagctatctca

SEQ ID NO: 3983865 - DNA, 25 bp, Homo sapien
gaacaaaagggccaaatcgcagggc

SEQ ID NO: 3983866 - DNA, 25 bp, Homo sapien
ctcacaggaaggagcacctacagga

SEQ ID NO: 3983867 - DNA, 25 bp, Homo sapien
aaggagcacctacaggaaggagcat

SEQ ID NO: 3983868 - DNA, 25 bp, Homo sapien
ggagcacctacaggaaggagcatca

SEQ ID NO: 3983869 - DNA, 25 bp, Homo sapien
gagcacctacaggaaggagcatcac

SEQ ID NO: 3983870 - DNA, 25 bp, Homo sapien
ggctgtgccacttcaaataatattt

SEQ ID NO: 3983871 - DNA, 25 bp, Homo sapien
taggtagagcctaaatgaaaatcat

SEQ ID NO: 3983872 - DNA, 25 bp, Homo sapien
gcaaaacgttcccaatcacacgctg

SEQ ID NO: 3983873 - DNA, 25 bp, Homo sapien
gcaaatcccagatatcttcactgga

SEQ ID NO: 3983874 - DNA, 25 bp, Homo sapien
tgattttcagttggcagcagatcct

SEQ ID NO: 3983875 - DNA, 25 bp, Homo sapien
ttccatgagattgtgcgaaggcagc

SEQ ID NO: 3983876 - DNA, 25 bp, Homo sapien
taaggcttttctaccagcagggaat

SEQ ID NO: 3983877 - DNA, 25 bp, Homo sapien
aattctggcccaagacaggagtagg

SEQ ID NO: 3983878 - DNA, 25 bp, Homo sapien
tagagaaccagccaaatggaagcag

SEQ ID NO: 3983879 - DNA, 25 bp, Homo sapien
ttcacaatggaactagaccatggct

SEQ ID NO: 3983880 - DNA, 25 bp, Homo sapien
ttctgattgtcgtgggatggcacag

SEQ ID NO: 3983881 - DNA, 25 bp, Homo sapien
tactaatgagacagcataccctgct

SEQ ID NO: 3983882 - DNA, 25 bp, Homo sapien
tgcttgggtccgtgaccacacagtg

SEQ ID NO: 3983883 - DNA, 25 bp, Homo sapien
actgccggtatttgaaggcaaccac

SEQ ID NO: 3983884 - DNA, 25 bp, Homo sapien
gaccacacagtgcactgccggtatt

SEQ ID NO: 3983885 - DNA, 25 bp, Homo sapien
tcatgcttgggtccgtgaccacaca

SEQ ID NO: 3983886 - DNA, 25 bp, Homo sapien
tctgttctcgtccttggtggccaaa

SEQ ID NO: 3983887 - DNA, 25 bp, Homo sapien
catgtgacaggttcatcaacaagca

SEQ ID NO: 3983888 - DNA, 25 bp, Homo sapien
acccctcgaggcaacgtgacttttg

SEQ ID NO: 3983889 - DNA, 25 bp, Homo sapien
tatcgaatgcataccatgagctagg

SEQ ID NO: 3983890 - DNA, 25 bp, Homo sapien
gactcatacacaataagtaggccac

SEQ ID NO: 3983891 - DNA, 25 bp, Homo sapien
gcacagggactcatacacaataagt

SEQ ID NO: 3983892 - DNA, 25 bp, Homo sapien
cagggactcatacacaataagtagg

SEQ ID NO: 3983893 - DNA, 25 bp, Homo sapien
gggactcatacacaataagtaggcc

SEQ ID NO: 3983894 - DNA, 25 bp, Homo sapien
tcaaagtggcttgttctcctctggc

SEQ ID NO: 3983895 - DNA, 25 bp, Homo sapien
cctgctgagcgtgtccatcggttct

SEQ ID NO: 3983896 - DNA, 25 bp, Homo sapien
ctaggcatggtgctaagaacttgac

SEQ ID NO: 3983897 - DNA, 25 bp, Homo sapien
ggaacatgaccagatgacacaagga

SEQ ID NO: 3983898 - DNA, 25 bp, Homo sapien
tgtgccaaaatatgcttagcactca

SEQ ID NO: 3983899 - DNA, 25 bp, Homo sapien
caaaatatgcttagcactcactgat

SEQ ID NO: 3983900 - DNA, 25 bp, Homo sapien
gatttgaagtattcttccaaaccca

SEQ ID NO: 3983901 - DNA, 25 bp, Homo sapien
gaaggactgtgccaaaatatgctta

SEQ ID NO: 3983902 - DNA, 25 bp, Homo sapien
ccaatgtggcatgtgtcctaatgac

SEQ ID NO: 3983903 - DNA, 25 bp, Homo sapien
tgagctcagcccacatagaaatagc

SEQ ID NO: 3983904 - DNA, 25 bp, Homo sapien
taatggcagtgtccacgaatcatcc

SEQ ID NO: 3983905 - DNA, 25 bp, Homo sapien
tagaaatagccactaagcagctgtc

SEQ ID NO: 3983906 - DNA, 25 bp, Homo sapien
ctgaatgatactctgaaggggggat

SEQ ID NO: 3983907 - DNA, 25 bp, Homo sapien
ctttctttgaatccccaacaaagca

SEQ ID NO: 3983908 - DNA, 25 bp, Homo sapien
tgaatccccaacaaagcacctggct

SEQ ID NO: 3983909 - DNA, 25 bp, Homo sapien
gggatggcaaagctaactggcccca

SEQ ID NO: 3983910 - DNA, 25 bp, Homo sapien
agcagacagccgaggcacacgcctg

SEQ ID NO: 3983911 - DNA, 25 bp, Homo sapien
tttggtacccatgaggggttctgga

SEQ ID NO: 3983912 - DNA, 25 bp, Homo sapien
tccttcagataccaaggcacgactg

SEQ ID NO: 3983913 - DNA, 25 bp, Homo sapien
tattagggacatgagcatatttgaa

SEQ ID NO: 3983914 - DNA, 25 bp, Homo sapien
ggggttctggagctaatctccttca

SEQ ID NO: 3983915 - DNA, 25 bp, Homo sapien
aaaatgagtcattgcattctaagca

SEQ ID NO: 3983916 - DNA, 25 bp, Homo sapien
cataagccatgtttgtactgcagta

SEQ ID NO: 3983917 - DNA, 25 bp, Homo sapien
catcaatagtataggttgaactaac

SEQ ID NO: 3983918 - DNA, 25 bp, Homo sapien
agcctcccaggatagtatttttaat

SEQ ID NO: 3983919 - DNA, 25 bp, Homo sapien
cctgcagtcgtaatgctccataaaa

SEQ ID NO: 3983920 - DNA, 25 bp, Homo sapien
tcaggattagcctcccctcatgctg

SEQ ID NO: 3983921 - DNA, 25 bp, Homo sapien
cctcatgctgtgcaccacgtttctt

SEQ ID NO: 3983922 - DNA, 25 bp, Homo sapien
gcctaacaatgggagcaggtgcaat

SEQ ID NO: 3983923 - DNA, 25 bp, Homo sapien
tgcctagcttcttccattgagatat

SEQ ID NO: 3983924 - DNA, 25 bp, Homo sapien
gaatgcctagcttcttccattgaga

SEQ ID NO: 3983925 - DNA, 25 bp, Homo sapien
tttcagggaatgcctagcttcttcc

SEQ ID NO: 3983926 - DNA, 25 bp, Homo sapien
agggaatgcctagcttcttccattg

SEQ ID NO: 3983927 - DNA, 25 bp, Homo sapien
tgcccctcgatattcttatgtaaag

SEQ ID NO: 3983928 - DNA, 25 bp, Homo sapien
tacaaaaatgtgtgcccctcgatat

SEQ ID NO: 3983929 - DNA, 25 bp, Homo sapien
tgtactttgctaagggagacggatc

SEQ ID NO: 3983930 - DNA, 25 bp, Homo sapien
ctaagggagacggatcaaaagcaat

SEQ ID NO: 3983931 - DNA, 25 bp, Homo sapien
cccgttgtagtcgaatattcagcac

SEQ ID NO: 3983932 - DNA, 25 bp, Homo sapien
tttgctttcccgttgtagtcgaata

SEQ ID NO: 3983933 - DNA, 25 bp, Homo sapien
cgttgtagtcgaatattcagcactt

SEQ ID NO: 3983934 - DNA, 25 bp, Homo sapien
ctttcccgttgtagtcgaatattca

SEQ ID NO: 3983935 - DNA, 25 bp, Homo sapien
ctcgagtccataaatgtagctttgc

SEQ ID NO: 3983936 - DNA, 25 bp, Homo sapien
ttccctgaaggacgggatgacacac

SEQ ID NO: 3983937 - DNA, 25 bp, Homo sapien
cataaatgtagctttgcatggttgt

SEQ ID NO: 3983938 - DNA, 25 bp, Homo sapien
tgacacacagcatcaggtccttggt

SEQ ID NO: 3983939 - DNA, 25 bp, Homo sapien
tctgcagcatgatagagtcttggtt

SEQ ID NO: 3983940 - DNA, 25 bp, Homo sapien
ttctgcagcatgatagagtcttggt

SEQ ID NO: 3983941 - DNA, 25 bp, Homo sapien
tttctgcagcatgatagagtcttgg

SEQ ID NO: 3983942 - DNA, 25 bp, Homo sapien
caaagaatttgtcagcgtgctccac

SEQ ID NO: 3983943 - DNA, 25 bp, Homo sapien
tcccctgaggaggtataacagtggc

SEQ ID NO: 3983944 - DNA, 25 bp, Homo sapien
cagggccaccgagatgcctctgtag

SEQ ID NO: 3983945 - DNA, 25 bp, Homo sapien
tgacctgcgggctgtctgcttgcct

SEQ ID NO: 3983946 - DNA, 25 bp, Homo sapien
tgggacacaagtggctgtacaagga

SEQ ID NO: 3983947 - DNA, 25 bp, Homo sapien
cacaagtggctgtacaaggatccct

SEQ ID NO: 3983948 - DNA, 25 bp, Homo sapien
caaggatccctgtacaaggagcagg

SEQ ID NO: 3983949 - DNA, 25 bp, Homo sapien
gtacaaggatccctgtacaaggagc

SEQ ID NO: 3983950 - DNA, 25 bp, Homo sapien
atacaaatgaccaatgaatgcatgt

SEQ ID NO: 3983951 - DNA, 25 bp, Homo sapien
gaggagagtaggcagggcttgccct

SEQ ID NO: 3983952 - DNA, 25 bp, Homo sapien
tttgtacttgggactatacaaatga

SEQ ID NO: 3983953 - DNA, 25 bp, Homo sapien
tacttgggactatacaaatgaccaa

SEQ ID NO: 3983954 - DNA, 25 bp, Homo sapien
tacagtgactctaaggacctgacca

SEQ ID NO: 3983955 - DNA, 25 bp, Homo sapien
catggtggccctaaggacaggatca

SEQ ID NO: 3983956 - DNA, 25 bp, Homo sapien
ccgtgtggtgacatagtggccctag

SEQ ID NO: 3983957 - DNA, 25 bp, Homo sapien
gcatgatgacatggtagccctgagg

SEQ ID NO: 3983958 - DNA, 25 bp, Homo sapien
cacctgggctcataaggaccactgg

SEQ ID NO: 3983959 - DNA, 25 bp, Homo sapien
ttgcaacgttcagtgtcgatgccag

SEQ ID NO: 3983960 - DNA, 25 bp, Homo sapien
gggtaccagccccttgcaacgttca

SEQ ID NO: 3983961 - DNA, 25 bp, Homo sapien
tggcatccacatccacgggtaccag

SEQ ID NO: 3983962 - DNA, 25 bp, Homo sapien
taatcctgctatcgatcacagaggc

SEQ ID NO: 3983963 - DNA, 25 bp, Homo sapien
cactatgtactgaggccgaatgcaa

SEQ ID NO: 3983964 - DNA, 25 bp, Homo sapien
cagtcctgggttgatagctgaaagc

SEQ ID NO: 3983965 - DNA, 25 bp, Homo sapien
cagaggcaccgcaagtcactatgta

SEQ ID NO: 3983966 - DNA, 25 bp, Homo sapien
ccgagtgcattcctcattttgtgac

SEQ ID NO: 3983967 - DNA, 25 bp, Homo sapien
tcccccgagtgcattcctcattttg

SEQ ID NO: 3983968 - DNA, 25 bp, Homo sapien
acatttctcccgactcccccgagtg

SEQ ID NO: 3983969 - DNA, 25 bp, Homo sapien
gactcccccgagtgcattcctcatt

SEQ ID NO: 3983970 - DNA, 25 bp, Homo sapien
gcctcaggcaactttgaagacccat

SEQ ID NO: 3983971 - DNA, 25 bp, Homo sapien
ttaaaactctccatgaaggcccagg

SEQ ID NO: 3983972 - DNA, 25 bp, Homo sapien
taaaatgcgctcatcccttcatcag

SEQ ID NO: 3983973 - DNA, 25 bp, Homo sapien
gaagacccatcaatgtgcctcaagc

SEQ ID NO: 3983974 - DNA, 25 bp, Homo sapien
cactgtgctaagtacgggctgtcca

SEQ ID NO: 3983975 - DNA, 25 bp, Homo sapien
agtggatatactagaattttggctg

SEQ ID NO: 3983976 - DNA, 25 bp, Homo sapien
tagaaaatgtagtccttgctgagga

SEQ ID NO: 3983977 - DNA, 25 bp, Homo sapien
ttaaattcacccttaacacagatga

SEQ ID NO: 3983978 - DNA, 25 bp, Homo sapien
tcagaagtgtgtgatcaccaaaacc

SEQ ID NO: 3983979 - DNA, 25 bp, Homo sapien
tgaaactaaaccacaggagtgaaaa

SEQ ID NO: 3983980 - DNA, 25 bp, Homo sapien
tggatgatcccaactgaaactaaac

SEQ ID NO: 3983981 - DNA, 25 bp, Homo sapien
aaccttagcgtattttcagccttcg

SEQ ID NO: 3983982 - DNA, 25 bp, Homo sapien
gaacagtccatgaagggcagtaact

SEQ ID NO: 3983983 - DNA, 25 bp, Homo sapien
catgaagggcagtaactggagagaa

SEQ ID NO: 3983984 - DNA, 25 bp, Homo sapien
aaccaattccaagttctggcaggaa

SEQ ID NO: 3983985 - DNA, 25 bp, Homo sapien
tggcaggaacagtccatgaagggca

SEQ ID NO: 3983986 - DNA, 25 bp, Homo sapien
ggaattacttgcatgagccagcgtg

SEQ ID NO: 3983987 - DNA, 25 bp, Homo sapien
gcgtgcctggccctcatgcctgctt

SEQ ID NO: 3983988 - DNA, 25 bp, Homo sapien
tgcctggccctcatgcctgcttttg

SEQ ID NO: 3983989 - DNA, 25 bp, Homo sapien
tggaattacttgcatgagccagcgt

SEQ ID NO: 3983990 - DNA, 25 bp, Homo sapien
tagtaaggctcatcctcaaggatgg

SEQ ID NO: 3983991 - DNA, 25 bp, Homo sapien
cacttgccaggaattgagctgggtc

SEQ ID NO: 3983992 - DNA, 25 bp, Homo sapien
gcacttctagtaaggctcagtccaa

SEQ ID NO: 3983993 - DNA, 25 bp, Homo sapien
gacggtgaccatcctaggcttttaa

SEQ ID NO: 3983994 - DNA, 25 bp, Homo sapien
gaatgatgtatgtgtcagctgtcat

SEQ ID NO: 3983995 - DNA, 25 bp, Homo sapien
gtccaagaatgatgtatgtgtcagc

SEQ ID NO: 3983996 - DNA, 25 bp, Homo sapien
ccaagaatgatgtatgtgtcagctg

SEQ ID NO: 3983997 - DNA, 25 bp, Homo sapien
cagtccaagaatgatgtatgtgtca

SEQ ID NO: 3983998 - DNA, 25 bp, Homo sapien
aagctcctgccacctatgtagccag

SEQ ID NO: 3983999 - DNA, 25 bp, Homo sapien
aatgcagctagggtgagaaccagta

SEQ ID NO: 3984000 - DNA, 25 bp, Homo sapien
tctcaacaactggaggttgaacact

SEQ ID NO: 3984001 - DNA, 25 bp, Homo sapien
taagtcaatgacgtggtgaacacca

SEQ ID NO: 3984002 - DNA, 25 bp, Homo sapien
cttggagtcgaagctcttcactggg

SEQ ID NO: 3984003 - DNA, 25 bp, Homo sapien
ttggagtcgaagctcttcactggga

SEQ ID NO: 3984004 - DNA, 25 bp, Homo sapien
agaggcactgacaacttcatcagct

SEQ ID NO: 3984005 - DNA, 25 bp, Homo sapien
gaggcactgacaacttcatcagctc

SEQ ID NO: 3984006 - DNA, 25 bp, Homo sapien
tactggtgagtgagatactaatccc

SEQ ID NO: 3984007 - DNA, 25 bp, Homo sapien
tatagagttgtataggtttttctca

SEQ ID NO: 3984008 - DNA, 25 bp, Homo sapien
tacactgtgagactaaactatagag

SEQ ID NO: 3984009 - DNA, 25 bp, Homo sapien
tctcaaagttgcctaataatataaa

SEQ ID NO: 3984010 - DNA, 25 bp, Homo sapien
cgttctagggcttttaagcaggcta

SEQ ID NO: 3984011 - DNA, 25 bp, Homo sapien
taagcaattgctatgcaaggaagcc

SEQ ID NO: 3984012 - DNA, 25 bp, Homo sapien
gagaactattcataaggcaaacatg

SEQ ID NO: 3984013 - DNA, 25 bp, Homo sapien
ggctaactctgacccataatggaca

SEQ ID NO: 3984014 - DNA, 25 bp, Homo sapien
ctttcggcgtctgatcacacagtgt

SEQ ID NO: 3984015 - DNA, 25 bp, Homo sapien
taaatcaacaaggtgaatccgctga

SEQ ID NO: 3984016 - DNA, 25 bp, Homo sapien
cacagtgtagcaccataaatcaaca

SEQ ID NO: 3984017 - DNA, 25 bp, Homo sapien
tttttctcctttcggcgtctgatca

SEQ ID NO: 3984018 - DNA, 25 bp, Homo sapien
agggtgtttgtgttgaggaatttat

SEQ ID NO: 3984019 - DNA, 25 bp, Homo sapien
atttttgcattgattttatcaggga

SEQ ID NO: 3984020 - DNA, 25 bp, Homo sapien
ggtgtttgtgttgaggaatttatcc

SEQ ID NO: 3984021 - DNA, 25 bp, Homo sapien
tttgcattgattttatcagggatat

SEQ ID NO: 3984022 - DNA, 25 bp, Homo sapien
tgattcttttctcttttcttattag

SEQ ID NO: 3984023 - DNA, 25 bp, Homo sapien
caaccgagcccaatcagaagtgcag

SEQ ID NO: 3984024 - DNA, 25 bp, Homo sapien
tgtgccacgtggacttgcaaactca

SEQ ID NO: 3984025 - DNA, 25 bp, Homo sapien
tgaatggtttacaggcccgcaaagc

SEQ ID NO: 3984026 - DNA, 25 bp, Homo sapien
cagtcactgtttatgagagcgaacc

SEQ ID NO: 3984027 - DNA, 25 bp, Homo sapien
cattctaggaagttcctgctccaga

SEQ ID NO: 3984028 - DNA, 25 bp, Homo sapien
gagcattttccgcagtgacctgcat

SEQ ID NO: 3984029 - DNA, 25 bp, Homo sapien
tcttggagcattttccgcagtgacc

SEQ ID NO: 3984030 - DNA, 25 bp, Homo sapien
gcctgactctgtccatctcttggag

SEQ ID NO: 3984031 - DNA, 25 bp, Homo sapien
gttagtttaacgcaattggctccag

SEQ ID NO: 3984032 - DNA, 25 bp, Homo sapien
aaggttggcaaccacaggactgagt

SEQ ID NO: 3984033 - DNA, 25 bp, Homo sapien
gaatatagtactgcagttccaggag

SEQ ID NO: 3984034 - DNA, 25 bp, Homo sapien
tatctggcatgcagtagaacgtctg

SEQ ID NO: 3984035 - DNA, 25 bp, Homo sapien
gcaaaaatagtggaacaggtggccc

SEQ ID NO: 3984036 - DNA, 25 bp, Homo sapien
gaataagcctgagagacctgcctag

SEQ ID NO: 3984037 - DNA, 25 bp, Homo sapien
gacaggaacatgtgggtcaaaaccc

SEQ ID NO: 3984038 - DNA, 25 bp, Homo sapien
tcattcagcatggtgccacacagag

SEQ ID NO: 3984039 - DNA, 25 bp, Homo sapien
tctaacctagaagacaaaccgttga

SEQ ID NO: 3984040 - DNA, 25 bp, Homo sapien
tagaaggagtcatttcattccccaa

SEQ ID NO: 3984041 - DNA, 25 bp, Homo sapien
tatccaaacccaagcaaatgcatag

SEQ ID NO: 3984042 - DNA, 25 bp, Homo sapien
gcagcacaccaagtgggactattta

SEQ ID NO: 3984043 - DNA, 25 bp, Homo sapien
tctataaccaatggcttagtcttca

SEQ ID NO: 3984044 - DNA, 25 bp, Homo sapien
tcactgagcctctataaccaatggc

SEQ ID NO: 3984045 - DNA, 25 bp, Homo sapien
accaatggcttagtcttcagcagca

SEQ ID NO: 3984046 - DNA, 25 bp, Homo sapien
tgagcctctataaccaatggcttag

SEQ ID NO: 3984047 - DNA, 25 bp, Homo sapien
gatgggaacagctgatggcttcacc

SEQ ID NO: 3984048 - DNA, 25 bp, Homo sapien
tgttctcattttgcctccgccagag

SEQ ID NO: 3984049 - DNA, 25 bp, Homo sapien
gaattcactatacactcctggaagg

SEQ ID NO: 3984050 - DNA, 25 bp, Homo sapien
ggatgttggccttgcttcccagctg

SEQ ID NO: 3984051 - DNA, 25 bp, Homo sapien
gaatttctatgacgtcaatctacag

SEQ ID NO: 3984052 - DNA, 25 bp, Homo sapien
tgaactggcacttgttgaaactgag

SEQ ID NO: 3984053 - DNA, 25 bp, Homo sapien
tcattgtaatggatatgctacccaa

SEQ ID NO: 3984054 - DNA, 25 bp, Homo sapien
aaaattgagcaaacacctacctatg

SEQ ID NO: 3984055 - DNA, 25 bp, Homo sapien
tgaggtataatgtagaccctaaatc

SEQ ID NO: 3984056 - DNA, 25 bp, Homo sapien
tgtagaccctaaatcctaatgcagg

SEQ ID NO: 3984057 - DNA, 25 bp, Homo sapien
tttccataggcggacaacagctgca

SEQ ID NO: 3984058 - DNA, 25 bp, Homo sapien
ccataggcggacaacagctgcattt

SEQ ID NO: 3984059 - DNA, 25 bp, Homo sapien
gaagacatgtcaaggtgtttcaaca

SEQ ID NO: 3984060 - DNA, 25 bp, Homo sapien
tcaaggcttccaggagtaggtaaac

SEQ ID NO: 3984061 - DNA, 25 bp, Homo sapien
gctgagctcttaatgtagccttgga

SEQ ID NO: 3984062 - DNA, 25 bp, Homo sapien
aaaacgttatccaatgaagctgtcc

SEQ ID NO: 3984063 - DNA, 25 bp, Homo sapien
gggggtgtggctcactatattaccc

SEQ ID NO: 3984064 - DNA, 25 bp, Homo sapien
tttgttgagatgtggtggggttggg

SEQ ID NO: 3984065 - DNA, 25 bp, Homo sapien
ttttgttgagatgtggtggggttgg

SEQ ID NO: 3984066 - DNA, 25 bp, Homo sapien
tggggggtgtggctcactatattac

SEQ ID NO: 3984067 - DNA, 25 bp, Homo sapien
cgccccgggcggcagaaagaaggcg

SEQ ID NO: 3984068 - DNA, 25 bp, Homo sapien
taaaaaggcacctgctgggtgagtc

SEQ ID NO: 3984069 - DNA, 25 bp, Homo sapien
tttaaaaaggcacctgctgggtgag

SEQ ID NO: 3984070 - DNA, 25 bp, Homo sapien
agcgccccgggcggcagaaagaagg

SEQ ID NO: 3984071 - DNA, 25 bp, Homo sapien
ggagaattccgctaaagtttgcctg

SEQ ID NO: 3984072 - DNA, 25 bp, Homo sapien
tttacggcggagaaactgagtggag

SEQ ID NO: 3984073 - DNA, 25 bp, Homo sapien
ctaagtaagttctcgctgtgcacca

SEQ ID NO: 3984074 - DNA, 25 bp, Homo sapien
ctgcgactgacagctagggagtgac

SEQ ID NO: 3984075 - DNA, 25 bp, Homo sapien
ctcgcagggcgcgagcagagcaccg

SEQ ID NO: 3984076 - DNA, 25 bp, Homo sapien
ctcgggcctcgcagggcgcgagcag

SEQ ID NO: 3984077 - DNA, 25 bp, Homo sapien
gagcaccggccagggcgagcaggag

SEQ ID NO: 3984078 - DNA, 25 bp, Homo sapien
gggacacgggcagcgggcgcgctgc

SEQ ID NO: 3984079 - DNA, 25 bp, Homo sapien
caagccagccttgaccgttgcaata

SEQ ID NO: 3984080 - DNA, 25 bp, Homo sapien
cgtcgcgaccggagggatttcctgc

SEQ ID NO: 3984081 - DNA, 25 bp, Homo sapien
gatttcctgcctcggcgagtcagct

SEQ ID NO: 3984082 - DNA, 25 bp, Homo sapien
tgagcaaactgtccgagttggcccg

SEQ ID NO: 3984083 - DNA, 25 bp, Homo sapien
tacgttgcaagtggatcattcagcc

SEQ ID NO: 3984084 - DNA, 25 bp, Homo sapien
tgctcgctctggaggcaaccagctg

SEQ ID NO: 3984085 - DNA, 25 bp, Homo sapien
caaaacgcagcctaagtgagcagtg

SEQ ID NO: 3984086 - DNA, 25 bp, Homo sapien
gcagccttatgagaagaccccaggg

SEQ ID NO: 3984087 - DNA, 25 bp, Homo sapien
gacatttttcacctcctgccaaagt

SEQ ID NO: 3984088 - DNA, 25 bp, Homo sapien
cttgaatgcatccaagagaagatgt

SEQ ID NO: 3984089 - DNA, 25 bp, Homo sapien
agatgtgatgaaaggtcatgcttgc

SEQ ID NO: 3984090 - DNA, 25 bp, Homo sapien
tgccgtttccggaagttgtaagaca

SEQ ID NO: 3984091 - DNA, 25 bp, Homo sapien
ccaaatgtggctacagagttccaag

SEQ ID NO: 3984092 - DNA, 25 bp, Homo sapien
tttggaggcctgacctagtttctac

SEQ ID NO: 3984093 - DNA, 25 bp, Homo sapien
tctcctacattaagctctggtctgg

SEQ ID NO: 3984094 - DNA, 25 bp, Homo sapien
tggcaaataactagacactggtccc

SEQ ID NO: 3984095 - DNA, 25 bp, Homo sapien
taaaataacctgagtgcctgtggag

SEQ ID NO: 3984096 - DNA, 25 bp, Homo sapien
cctgtggagataattgtaaccacca

SEQ ID NO: 3984097 - DNA, 25 bp, Homo sapien
aataacctgagtgcctgtggagata

SEQ ID NO: 3984098 - DNA, 25 bp, Homo sapien
tggagataattgtaaccaccagcaa

SEQ ID NO: 3984099 - DNA, 25 bp, Homo sapien
tgcaactctggttgtgaatgactta

SEQ ID NO: 3984100 - DNA, 25 bp, Homo sapien
gacttatgagcttttctatatgcag

SEQ ID NO: 3984101 - DNA, 25 bp, Homo sapien
gcaaaatgatttcaaccagcggact

SEQ ID NO: 3984102 - DNA, 25 bp, Homo sapien
ctttcattgaacttccgcaaaatga

SEQ ID NO: 3984103 - DNA, 25 bp, Homo sapien
gggttaagtggatacaggtacacag

SEQ ID NO: 3984104 - DNA, 25 bp, Homo sapien
caagatggggatccacgcagcagag

SEQ ID NO: 3984105 - DNA, 25 bp, Homo sapien
tacaggtacacagaagaagaatcac

SEQ ID NO: 3984106 - DNA, 25 bp, Homo sapien
tcttcctgttcactctggccgggtc

SEQ ID NO: 3984107 - DNA, 25 bp, Homo sapien
agaaggagaagtgtggagctgggtc

SEQ ID NO: 3984108 - DNA, 25 bp, Homo sapien
cgcagatgaccttcaccaccgccat

SEQ ID NO: 3984109 - DNA, 25 bp, Homo sapien
aaatggtactctagtggctctcaga

SEQ ID NO: 3984110 - DNA, 25 bp, Homo sapien
gaagcacctagcatagggcaccaag

SEQ ID NO: 3984111 - DNA, 25 bp, Homo sapien
ccctttttggatgcacctggaagca

SEQ ID NO: 3984112 - DNA, 25 bp, Homo sapien
ggcaccaagtggacgctcaatcagt

SEQ ID NO: 3984113 - DNA, 25 bp, Homo sapien
gggagataactcaagtaatttttgc

SEQ ID NO: 3984114 - DNA, 25 bp, Homo sapien
cgtgtcccattacttttgacttcgg

SEQ ID NO: 3984115 - DNA, 25 bp, Homo sapien
gattcaaatgtagcagcaatttctg

SEQ ID NO: 3984116 - DNA, 25 bp, Homo sapien
ggagggtctgcgtgtcccattactt

SEQ ID NO: 3984117 - DNA, 25 bp, Homo sapien
ccatccatgccaacttcatctggtg

SEQ ID NO: 3984118 - DNA, 25 bp, Homo sapien
catccatgccaacttcatctggtgc

SEQ ID NO: 3984119 - DNA, 25 bp, Homo sapien
ttcatctggtgctcagtcgatctgt

SEQ ID NO: 3984120 - DNA, 25 bp, Homo sapien
ggtgctcagtcgatctgtttcagag

SEQ ID NO: 3984121 - DNA, 25 bp, Homo sapien
agcttggtcctccagcaggtttcca

SEQ ID NO: 3984122 - DNA, 25 bp, Homo sapien
ctccagcaggtttccatgtccttcc

SEQ ID NO: 3984123 - DNA, 25 bp, Homo sapien
aggcgcatgcaggaaggtgtcagga

SEQ ID NO: 3984124 - DNA, 25 bp, Homo sapien
gtccttccatgcaggaaggcgcatg

SEQ ID NO: 3984125 - DNA, 25 bp, Homo sapien
cagagctctcacacaccgtcagata

SEQ ID NO: 3984126 - DNA, 25 bp, Homo sapien
agagctctcacacaccgtcagatac

SEQ ID NO: 3984127 - DNA, 25 bp, Homo sapien
cattatttcattaccggccggcaga

SEQ ID NO: 3984128 - DNA, 25 bp, Homo sapien
tgggagaacctcagacatcaaagtc

SEQ ID NO: 3984129 - DNA, 25 bp, Homo sapien
caaagagccctgttacatcggagca

SEQ ID NO: 3984130 - DNA, 25 bp, Homo sapien
gatgtgcctcatactcagaccgttg

SEQ ID NO: 3984131 - DNA, 25 bp, Homo sapien
caaagagatgggctgattgttccac

SEQ ID NO: 3984132 - DNA, 25 bp, Homo sapien
tgatgtaaaagattccccagggatg

SEQ ID NO: 3984133 - DNA, 25 bp, Homo sapien
caagtcagcctctagcattgggtgg

SEQ ID NO: 3984134 - DNA, 25 bp, Homo sapien
ggttagaccgcattcctttgaagga

SEQ ID NO: 3984135 - DNA, 25 bp, Homo sapien
gaagacttcggcacggagtctgtta

SEQ ID NO: 3984136 - DNA, 25 bp, Homo sapien
cggcacggagtctgttactttgtaa

SEQ ID NO: 3984137 - DNA, 25 bp, Homo sapien
gacttcggcacggagtctgttactt

SEQ ID NO: 3984138 - DNA, 25 bp, Homo sapien
ctttttgaagacttcggcacggagt

SEQ ID NO: 3984139 - DNA, 25 bp, Homo sapien
aacttccggcaagttatcatagatt

SEQ ID NO: 3984140 - DNA, 25 bp, Homo sapien
ctgaagccatcaaaccaccctactc

SEQ ID NO: 3984141 - DNA, 25 bp, Homo sapien
tttgcacaccatacaataaccaagt

SEQ ID NO: 3984142 - DNA, 25 bp, Homo sapien
gaagccatcaaaccaccctactccc

SEQ ID NO: 3984143 - DNA, 25 bp, Homo sapien
tgcacaccatacaataaccaagtac

SEQ ID NO: 3984144 - DNA, 25 bp, Homo sapien
tagatcgcatatgcatctccttctc

SEQ ID NO: 3984145 - DNA, 25 bp, Homo sapien
cttctctgaaatgcaccgttctttg

SEQ ID NO: 3984146 - DNA, 25 bp, Homo sapien
tgcaccgttctttgggtttgaacaa

SEQ ID NO: 3984147 - DNA, 25 bp, Homo sapien
ctcttagatcgcatatgcatctcct

SEQ ID NO: 3984148 - DNA, 25 bp, Homo sapien
ttatggagaacaatgcctttgaatg

SEQ ID NO: 3984149 - DNA, 25 bp, Homo sapien
gaacaatgcctttgaatgcttcttt

SEQ ID NO: 3984150 - DNA, 25 bp, Homo sapien
gaatgcttctttttagcaacagaat

SEQ ID NO: 3984151 - DNA, 25 bp, Homo sapien
gcttctttttagcaacagaatcatg

SEQ ID NO: 3984152 - DNA, 25 bp, Homo sapien
aaacaagcaggactgtgtccaaggg

SEQ ID NO: 3984153 - DNA, 25 bp, Homo sapien
gcccagcagcccatgttaggtgcaa

SEQ ID NO: 3984154 - DNA, 25 bp, Homo sapien
aacaacagcaaatgtgagctctctg

SEQ ID NO: 3984155 - DNA, 25 bp, Homo sapien
gtttcctcaactcggctcagcctgc

SEQ ID NO: 3984156 - DNA, 25 bp, Homo sapien
gggaagtatttgcaggttgattgct

SEQ ID NO: 3984157 - DNA, 25 bp, Homo sapien
gcaggttgattgcttctgactttga

SEQ ID NO: 3984158 - DNA, 25 bp, Homo sapien
tgataaatagcagggtctttcctag

SEQ ID NO: 3984159 - DNA, 25 bp, Homo sapien
ctgactttgagttttcctaatggtt

SEQ ID NO: 3984160 - DNA, 25 bp, Homo sapien
aagtggtttgaaatagagcaagtgc

SEQ ID NO: 3984161 - DNA, 25 bp, Homo sapien
tgagtgagaggaacacaactcactg

SEQ ID NO: 3984162 - DNA, 25 bp, Homo sapien
cagctcccaacctcacttgagtgag

SEQ ID NO: 3984163 - DNA, 25 bp, Homo sapien
agtgcattgcaaacagctcccaacc

SEQ ID NO: 3984164 - DNA, 25 bp, Homo sapien
tggtgaagagaacgccccaccatga

SEQ ID NO: 3984165 - DNA, 25 bp, Homo sapien
tggatttcataaagggtctgcaccc

SEQ ID NO: 3984166 - DNA, 25 bp, Homo sapien
gagctcagagtcaggtcaccatctt

SEQ ID NO: 3984167 - DNA, 25 bp, Homo sapien
gagagacccctgatacaatatggca

SEQ ID NO: 3984168 - DNA, 25 bp, Homo sapien
aagtacagcgggtcccctgactcaa

SEQ ID NO: 3984169 - DNA, 25 bp, Homo sapien
tcagaattcactagctaccatgaag

SEQ ID NO: 3984170 - DNA, 25 bp, Homo sapien
gctcccacttgaacctttcaggttc

SEQ ID NO: 3984171 - DNA, 25 bp, Homo sapien
ttctctggcattgtcagctgccggg

SEQ ID NO: 3984172 - DNA, 25 bp, Homo sapien
tgcttgacaagccccgatcagaggc

SEQ ID NO: 3984173 - DNA, 25 bp, Homo sapien
cttgacaagccccgatcagaggcag

SEQ ID NO: 3984174 - DNA, 25 bp, Homo sapien
attgcttgacaagccccgatcagag

SEQ ID NO: 3984175 - DNA, 25 bp, Homo sapien
gattgcttgacaagccccgatcaga

SEQ ID NO: 3984176 - DNA, 25 bp, Homo sapien
gaggcttacgaacttccagtgcttc

SEQ ID NO: 3984177 - DNA, 25 bp, Homo sapien
tcttcagccgttcttgtgagcgaga

SEQ ID NO: 3984178 - DNA, 25 bp, Homo sapien
ccatgtgttcaagcttcttcagccg

SEQ ID NO: 3984179 - DNA, 25 bp, Homo sapien
ttgtgagcgagaaatgaactgaggc

SEQ ID NO: 3984180 - DNA, 25 bp, Homo sapien
aaaatacgtcatttttaagagcagt

SEQ ID NO: 3984181 - DNA, 25 bp, Homo sapien
cgtcatttttaagagcagtgacaca

SEQ ID NO: 3984182 - DNA, 25 bp, Homo sapien
tacgtcatttttaagagcagtgaca

SEQ ID NO: 3984183 - DNA, 25 bp, Homo sapien
aatacgtcatttttaagagcagtga

SEQ ID NO: 3984184 - DNA, 25 bp, Homo sapien
taggagtcctgcatgtatatgctca

SEQ ID NO: 3984185 - DNA, 25 bp, Homo sapien
ctgcatgtatatgctcagcaaaggc

SEQ ID NO: 3984186 - DNA, 25 bp, Homo sapien
gagtcctgcatgtatatgctcagca

SEQ ID NO: 3984187 - DNA, 25 bp, Homo sapien
acagtaggagtcctgcatgtatatg

SEQ ID NO: 3984188 - DNA, 25 bp, Homo sapien
tcttgcaggcgtttgctgagactca

SEQ ID NO: 3984189 - DNA, 25 bp, Homo sapien
acagtcttcggacaggccagggctc

SEQ ID NO: 3984190 - DNA, 25 bp, Homo sapien
ggtggggtcctcactcttcttacat

SEQ ID NO: 3984191 - DNA, 25 bp, Homo sapien
gagactcagaacagtcttcggacag

SEQ ID NO: 3984192 - DNA, 25 bp, Homo sapien
cacagtgactccacgctctccttgc

SEQ ID NO: 3984193 - DNA, 25 bp, Homo sapien
tggatcctgagcgtctctgcagccg

SEQ ID NO: 3984194 - DNA, 25 bp, Homo sapien
actccacgctctccttgccggctgg

SEQ ID NO: 3984195 - DNA, 25 bp, Homo sapien
actgctcaaagacccatccctggat

SEQ ID NO: 3984196 - DNA, 25 bp, Homo sapien
gctttctatctgaacaccattgtct

SEQ ID NO: 3984197 - DNA, 25 bp, Homo sapien
ctttctatctgaacaccattgtctt

SEQ ID NO: 3984198 - DNA, 25 bp, Homo sapien
tttggggaacttgctttctatctga

SEQ ID NO: 3984199 - DNA, 25 bp, Homo sapien
tttgatgtcgtctctctgtgggctc

SEQ ID NO: 3984200 - DNA, 25 bp, Homo sapien
cagtcatacatacttctccttgttg

SEQ ID NO: 3984201 - DNA, 25 bp, Homo sapien
gacagacagtcatcgcttggagagc

SEQ ID NO: 3984202 - DNA, 25 bp, Homo sapien
tcagaaaggtctctagacagacagt

SEQ ID NO: 3984203 - DNA, 25 bp, Homo sapien
ttcatgtgagtttatgggacctgat

SEQ ID NO: 3984204 - DNA, 25 bp, Homo sapien
ctttcatgtgagtttatgggacctg

SEQ ID NO: 3984205 - DNA, 25 bp, Homo sapien
tcatgtgagtttatgggacctgatt

SEQ ID NO: 3984206 - DNA, 25 bp, Homo sapien
tttcatgtgagtttatgggacctga

SEQ ID NO: 3984207 - DNA, 25 bp, Homo sapien
cagtctcataactgtggcaattttg

SEQ ID NO: 3984208 - DNA, 25 bp, Homo sapien
tgcacacagtctcataactgtggca

SEQ ID NO: 3984209 - DNA, 25 bp, Homo sapien
gcaattttggcacagtagaaaatca

SEQ ID NO: 3984210 - DNA, 25 bp, Homo sapien
cataactgtggcaattttggcacag

SEQ ID NO: 3984211 - DNA, 25 bp, Homo sapien
tgggccatcttacaaccaactgtgt

SEQ ID NO: 3984212 - DNA, 25 bp, Homo sapien
ggcggtgacgttttctccctgcaga

SEQ ID NO: 3984213 - DNA, 25 bp, Homo sapien
acatgctgatgttctgggcggtgac

SEQ ID NO: 3984214 - DNA, 25 bp, Homo sapien
tcaacacctttgcaaagctctcggg

SEQ ID NO: 3984215 - DNA, 25 bp, Homo sapien
taaatacgttgcatgctgcggaggc

SEQ ID NO: 3984216 - DNA, 25 bp, Homo sapien
gtcctgcagtggagggaaaggcatt

SEQ ID NO: 3984217 - DNA, 25 bp, Homo sapien
ggcttgggtgtctgttgaacaccca

SEQ ID NO: 3984218 - DNA, 25 bp, Homo sapien
tccagcaagctctataactacagca

SEQ ID NO: 3984219 - DNA, 25 bp, Homo sapien
ggtctctgcccatcatggtcattca

SEQ ID NO: 3984220 - DNA, 25 bp, Homo sapien
tacatggcctgtgcaagcccggggg

SEQ ID NO: 3984221 - DNA, 25 bp, Homo sapien
gttacatggcctgtgcaagcccggg

SEQ ID NO: 3984222 - DNA, 25 bp, Homo sapien
ctgttacatggcctgtgcaagcccg

SEQ ID NO: 3984223 - DNA, 25 bp, Homo sapien
gtcctctgtcagcaagtaagccaag

SEQ ID NO: 3984224 - DNA, 25 bp, Homo sapien
aacatcatcggctcatttgctttgt

SEQ ID NO: 3984225 - DNA, 25 bp, Homo sapien
taagccaagggcaagccgcagagat

SEQ ID NO: 3984226 - DNA, 25 bp, Homo sapien
gcctcccccaacatcatcggctcat

SEQ ID NO: 3984227 - DNA, 25 bp, Homo sapien
atgcccttaaacaccttggtcagat

SEQ ID NO: 3984228 - DNA, 25 bp, Homo sapien
cttcaaagatgcccttaaacacctt

SEQ ID NO: 3984229 - DNA, 25 bp, Homo sapien
ccttaaacaccttggtcagattcat

SEQ ID NO: 3984230 - DNA, 25 bp, Homo sapien
gcccttaaacaccttggtcagattc

SEQ ID NO: 3984231 - DNA, 25 bp, Homo sapien
atagtgagatttgtgctgaactccc

SEQ ID NO: 3984232 - DNA, 25 bp, Homo sapien
tagtgagatttgtgctgaactcccg

SEQ ID NO: 3984233 - DNA, 25 bp, Homo sapien
ggggctgagaagcatatagtgagat

SEQ ID NO: 3984234 - DNA, 25 bp, Homo sapien
tggccagcagattctgaaccaggca

SEQ ID NO: 3984235 - DNA, 25 bp, Homo sapien
cttgccaaaggcaaaccaagagcat

SEQ ID NO: 3984236 - DNA, 25 bp, Homo sapien
ggacttgccaaaggcaaaccaagag

SEQ ID NO: 3984237 - DNA, 25 bp, Homo sapien
cctgtggccagcagattctgaacca

SEQ ID NO: 3984238 - DNA, 25 bp, Homo sapien
gttacaaggtacagagactagcacc

SEQ ID NO: 3984239 - DNA, 25 bp, Homo sapien
aaattttggccttgatgagttcacg

SEQ ID NO: 3984240 - DNA, 25 bp, Homo sapien
taagatctgcgtgcacaagggaaag

SEQ ID NO: 3984241 - DNA, 25 bp, Homo sapien
gagtataactcccaactatcacaga

SEQ ID NO: 3984242 - DNA, 25 bp, Homo sapien
cctaaatgcaagatggcatcctgga

SEQ ID NO: 3984243 - DNA, 25 bp, Homo sapien
tgcctaaatgcaagatggcatcctg

SEQ ID NO: 3984244 - DNA, 25 bp, Homo sapien
aacagatatgatgcctaaatgcaag

SEQ ID NO: 3984245 - DNA, 25 bp, Homo sapien
tatgatgcctaaatgcaagatggca

SEQ ID NO: 3984246 - DNA, 25 bp, Homo sapien
ctcttggcggtgagtctttcatcgc

SEQ ID NO: 3984247 - DNA, 25 bp, Homo sapien
gcggtgagtctttcatcgctcctca

SEQ ID NO: 3984248 - DNA, 25 bp, Homo sapien
tcgctcctcaccctttccttgccag

SEQ ID NO: 3984249 - DNA, 25 bp, Homo sapien
tcctcaccctttccttgccagagag

SEQ ID NO: 3984250 - DNA, 25 bp, Homo sapien
aaaggctttgcgtctagtggtggaa

SEQ ID NO: 3984251 - DNA, 25 bp, Homo sapien
ccatgcacccaattcattaggaaga

SEQ ID NO: 3984252 - DNA, 25 bp, Homo sapien
aagctctgcagggtagaggcggctc

SEQ ID NO: 3984253 - DNA, 25 bp, Homo sapien
gcagcagaaaggctttgcgtctagt

SEQ ID NO: 3984254 - DNA, 25 bp, Homo sapien
tagtgatgctaaactccaccgagga

SEQ ID NO: 3984255 - DNA, 25 bp, Homo sapien
acatgggcccaccatagaacgcgaa

SEQ ID NO: 3984256 - DNA, 25 bp, Homo sapien
caaagcctgtgaactgactgaggga

SEQ ID NO: 3984257 - DNA, 25 bp, Homo sapien
gcagaccataccatctaagtgtgag

SEQ ID NO: 3984258 - DNA, 25 bp, Homo sapien
ggaatcatcatcaataaggaagacg

SEQ ID NO: 3984259 - DNA, 25 bp, Homo sapien
gacgaagtgcttagcttgagcaatc

SEQ ID NO: 3984260 - DNA, 25 bp, Homo sapien
tatctttggaacattgatagctgct

SEQ ID NO: 3984261 - DNA, 25 bp, Homo sapien
tggggtaacatacaacaatgcagtg

SEQ ID NO: 3984262 - DNA, 25 bp, Homo sapien
atctgaaagccatgccaaaattgcc

SEQ ID NO: 3984263 - DNA, 25 bp, Homo sapien
cgtaaaattatgatgcatatcctgc

SEQ ID NO: 3984264 - DNA, 25 bp, Homo sapien
gcattttcaattgtatactaatatc

SEQ ID NO: 3984265 - DNA, 25 bp, Homo sapien
atagaaagtaattcataaaccagag

SEQ ID NO: 3984266 - DNA, 25 bp, Homo sapien
aaaagatctctgatgccgacctgga

SEQ ID NO: 3984267 - DNA, 25 bp, Homo sapien
ctttgtcgtctgcatgggtgaccca

SEQ ID NO: 3984268 - DNA, 25 bp, Homo sapien
ggaactgaacaccagcgggctcttt

SEQ ID NO: 3984269 - DNA, 25 bp, Homo sapien
tacaattgaggttgagcgacaggac

SEQ ID NO: 3984270 - DNA, 25 bp, Homo sapien
tctgtgaatgttgactccgctgcgg

SEQ ID NO: 3984271 - DNA, 25 bp, Homo sapien
gcccggaagtaacgcaaatgctctg

SEQ ID NO: 3984272 - DNA, 25 bp, Homo sapien
cgagactgagcaatggcacacggta

SEQ ID NO: 3984273 - DNA, 25 bp, Homo sapien
tcatctgacggtgccgggattccta

SEQ ID NO: 3984274 - DNA, 25 bp, Homo sapien
ttgtgttttgtgatgccagggtctc

SEQ ID NO: 3984275 - DNA, 25 bp, Homo sapien
tttgtgttttgtgatgccagggtct

SEQ ID NO: 3984276 - DNA, 25 bp, Homo sapien
ttttgtgttttgtgatgccagggtc

SEQ ID NO: 3984277 - DNA, 25 bp, Homo sapien
ggaaaagtgatcaatctcgtatggg

SEQ ID NO: 3984278 - DNA, 25 bp, Homo sapien
aaaagtgatcaatctcgtatgggcc

SEQ ID NO: 3984279 - DNA, 25 bp, Homo sapien
aggaaaagtgatcaatctcgtatgg

SEQ ID NO: 3984280 - DNA, 25 bp, Homo sapien
gaaaagtgatcaatctcgtatgggc

SEQ ID NO: 3984281 - DNA, 25 bp, Homo sapien
tctagcgcacgcccagggacaagct

SEQ ID NO: 3984282 - DNA, 25 bp, Homo sapien
tcatcttatggcagccttctagcgc

SEQ ID NO: 3984283 - DNA, 25 bp, Homo sapien
ttatggcagccttctagcgcacgcc

SEQ ID NO: 3984284 - DNA, 25 bp, Homo sapien
tcatcatcttatggcagccttctag

SEQ ID NO: 3984285 - DNA, 25 bp, Homo sapien
ctactgtggtagctgtcccgtaatc

SEQ ID NO: 3984286 - DNA, 25 bp, Homo sapien
tgcctctgtgacatcagactggaga

SEQ ID NO: 3984287 - DNA, 25 bp, Homo sapien
tctcttctactgtggtagctgtccc

SEQ ID NO: 3984288 - DNA, 25 bp, Homo sapien
ttgcctctgtgacatcagactggag

SEQ ID NO: 3984289 - DNA, 25 bp, Homo sapien
catccaactgaaagccaaggctggt

SEQ ID NO: 3984290 - DNA, 25 bp, Homo sapien
tccaacatccaactgaaagccaagg

SEQ ID NO: 3984291 - DNA, 25 bp, Homo sapien
ggctctgctccattgcgtcagttca

SEQ ID NO: 3984292 - DNA, 25 bp, Homo sapien
tttgctcctgagacaaaggctctgc

SEQ ID NO: 3984293 - DNA, 25 bp, Homo sapien
gtcacaatcaagctggtgaccccac

SEQ ID NO: 3984294 - DNA, 25 bp, Homo sapien
ggtcacaatcaagctggtgacccca

SEQ ID NO: 3984295 - DNA, 25 bp, Homo sapien
tcttgacattgccagtttgtgaccg

SEQ ID NO: 3984296 - DNA, 25 bp, Homo sapien
gacattgccagtttgtgaccgtgaa

SEQ ID NO: 3984297 - DNA, 25 bp, Homo sapien
agcctcatctcccagccggtcctgc

SEQ ID NO: 3984298 - DNA, 25 bp, Homo sapien
cagtttgtgaccgtgaaggccacat

SEQ ID NO: 3984299 - DNA, 25 bp, Homo sapien
tcttagaaggaagtcccgatccgct

SEQ ID NO: 3984300 - DNA, 25 bp, Homo sapien
ggattggtgcctgcgttcgttccca

SEQ ID NO: 3984301 - DNA, 25 bp, Homo sapien
cagtgtcccgtggtgtctggcatcc

SEQ ID NO: 3984302 - DNA, 25 bp, Homo sapien
aatccaggtgtcaggaccgtgctcc

SEQ ID NO: 3984303 - DNA, 25 bp, Homo sapien
ccggagtttacctctgtggctaggc

SEQ ID NO: 3984304 - DNA, 25 bp, Homo sapien
tctccagacagtttgagcatattct

SEQ ID NO: 3984305 - DNA, 25 bp, Homo sapien
taatgacaaggatgtatttggcgac

SEQ ID NO: 3984306 - DNA, 25 bp, Homo sapien
gagcatattctactgaggtttcaaa

SEQ ID NO: 3984307 - DNA, 25 bp, Homo sapien
taatgctgtctagccttggacgagc

SEQ ID NO: 3984308 - DNA, 25 bp, Homo sapien
ggtgtcacccctccagtaagactaa

SEQ ID NO: 3984309 - DNA, 25 bp, Homo sapien
taagactaaagctgcgagtttgcaa

SEQ ID NO: 3984310 - DNA, 25 bp, Homo sapien
ttcctctgtaagagagaggctggca

SEQ ID NO: 3984311 - DNA, 25 bp, Homo sapien
tatttttccatgcattgcggatctg

SEQ ID NO: 3984312 - DNA, 25 bp, Homo sapien
ttttctctcatgagttgtctcattt

SEQ ID NO: 3984313 - DNA, 25 bp, Homo sapien
gcattgcggatctgaccattttctt

SEQ ID NO: 3984314 - DNA, 25 bp, Homo sapien
tttccatgcattgcggatctgacca

SEQ ID NO: 3984315 - DNA, 25 bp, Homo sapien
ggcttaggcagcaagaaggtgcact

SEQ ID NO: 3984316 - DNA, 25 bp, Homo sapien
agacggcaaggacactaggctccag

SEQ ID NO: 3984317 - DNA, 25 bp, Homo sapien
ttagtaggacacagcatgatatgct

SEQ ID NO: 3984318 - DNA, 25 bp, Homo sapien
tgtccccattttgggagccttagta

SEQ ID NO: 3984319 - DNA, 25 bp, Homo sapien
catgagggcttgtcctacaagagct

SEQ ID NO: 3984320 - DNA, 25 bp, Homo sapien
aggagtgcacgcacctgtatggccc

SEQ ID NO: 3984321 - DNA, 25 bp, Homo sapien
tagggtgccatctagctctgccatg

SEQ ID NO: 3984322 - DNA, 25 bp, Homo sapien
catcttcctcatccgcgaggcaagg

SEQ ID NO: 3984323 - DNA, 25 bp, Homo sapien
caactagacactcaaaggccaaaaa

SEQ ID NO: 3984324 - DNA, 25 bp, Homo sapien
aaatctttggaatctaaggctaggc

SEQ ID NO: 3984325 - DNA, 25 bp, Homo sapien
ggaggaaagctagccttttcagcaa

SEQ ID NO: 3984326 - DNA, 25 bp, Homo sapien
gagggacagacccaaatattaatag

SEQ ID NO: 3984327 - DNA, 25 bp, Homo sapien
ggaggacttatgttaccagatatca

SEQ ID NO: 3984328 - DNA, 25 bp, Homo sapien
tccaggtaatcttgaataacaaagc

SEQ ID NO: 3984329 - DNA, 25 bp, Homo sapien
tcaaattcaggtggaaaatccaggt

SEQ ID NO: 3984330 - DNA, 25 bp, Homo sapien
catggattagaagacctgactttgt

SEQ ID NO: 3984331 - DNA, 25 bp, Homo sapien
aaactaaccagtagaaatcaataga

SEQ ID NO: 3984332 - DNA, 25 bp, Homo sapien
gcaataccgtaatgtaatgaggaaa

SEQ ID NO: 3984333 - DNA, 25 bp, Homo sapien
acagaccctctcctaatttatgaca

SEQ ID NO: 3984334 - DNA, 25 bp, Homo sapien
tgacaaatgcaataccgtaatgtaa

SEQ ID NO: 3984335 - DNA, 25 bp, Homo sapien
gacaatgtgattcggcgggtggcag

SEQ ID NO: 3984336 - DNA, 25 bp, Homo sapien
cagttgcagaaggacaatgtgattc

SEQ ID NO: 3984337 - DNA, 25 bp, Homo sapien
agctgtggtgacaatttctgatgct

SEQ ID NO: 3984338 - DNA, 25 bp, Homo sapien
tgctagcagggacagtgggctccca

SEQ ID NO: 3984339 - DNA, 25 bp, Homo sapien
gagacaccagcgttcactgtgaaaa

SEQ ID NO: 3984340 - DNA, 25 bp, Homo sapien
cggcgagaaggagttggtgtttcca

SEQ ID NO: 3984341 - DNA, 25 bp, Homo sapien
actgtgaaaatgtcggctgtgatct

SEQ ID NO: 3984342 - DNA, 25 bp, Homo sapien
tgctgagacaccagcgttcactgtg

SEQ ID NO: 3984343 - DNA, 25 bp, Homo sapien
ccagcagctgtggcctggaaaccca

SEQ ID NO: 3984344 - DNA, 25 bp, Homo sapien
cagcagctgtggcctggaaacccat

SEQ ID NO: 3984345 - DNA, 25 bp, Homo sapien
tccccagcagctgtggcctggaaac

SEQ ID NO: 3984346 - DNA, 25 bp, Homo sapien
gctggggctccccagcagctgtggc

SEQ ID NO: 3984347 - DNA, 25 bp, Homo sapien
gcttcagcatcagcccgtctgacat

SEQ ID NO: 3984348 - DNA, 25 bp, Homo sapien
aggcttcagcatcagcccgtctgac

SEQ ID NO: 3984349 - DNA, 25 bp, Homo sapien
tctgcacaccaagtagacctctctt

SEQ ID NO: 3984350 - DNA, 25 bp, Homo sapien
aacagagaaacttgaggatatttct

SEQ ID NO: 3984351 - DNA, 25 bp, Homo sapien
taaatgctgcgactgtcctaaagat

SEQ ID NO: 3984352 - DNA, 25 bp, Homo sapien
cgctctcgtttatagctagtctcag

SEQ ID NO: 3984353 - DNA, 25 bp, Homo sapien
catgcaagtaccctacgttaggaaa

SEQ ID NO: 3984354 - DNA, 25 bp, Homo sapien
gtctcagatctaaatgctgcgactg

SEQ ID NO: 3984355 - DNA, 25 bp, Homo sapien
tagatgctgacacgggcacagagga

SEQ ID NO: 3984356 - DNA, 25 bp, Homo sapien
gaagatttcgagagtcagagacgcc

SEQ ID NO: 3984357 - DNA, 25 bp, Homo sapien
gagcattgctaccaaatagctccag

SEQ ID NO: 3984358 - DNA, 25 bp, Homo sapien
cattgaatcttccagagagcattgc

SEQ ID NO: 3984359 - DNA, 25 bp, Homo sapien
caactgagtcaggaccattttcccc

SEQ ID NO: 3984360 - DNA, 25 bp, Homo sapien
gattcatccttaggacacagtcttg

SEQ ID NO: 3984361 - DNA, 25 bp, Homo sapien
ggtgactacacctgcaagtctgtgg

SEQ ID NO: 3984362 - DNA, 25 bp, Homo sapien
ctgcgtcattgctgtggcccctgtg

SEQ ID NO: 3984363 - DNA, 25 bp, Homo sapien
ttttatatgcatagtttgtcactgt

SEQ ID NO: 3984364 - DNA, 25 bp, Homo sapien
tccaactagctcaacaactatggat

SEQ ID NO: 3984365 - DNA, 25 bp, Homo sapien
aaaaagctagaaaggtgcactgcta

SEQ ID NO: 3984366 - DNA, 25 bp, Homo sapien
gaagggaggatgatctatagttcca

SEQ ID NO: 3984367 - DNA, 25 bp, Homo sapien
gttgcattgattggagatactctta

SEQ ID NO: 3984368 - DNA, 25 bp, Homo sapien
tgatttttgattggagaagttgcat

SEQ ID NO: 3984369 - DNA, 25 bp, Homo sapien
ttggagatactcttataaattgttg

SEQ ID NO: 3984370 - DNA, 25 bp, Homo sapien
gattggagaagttgcattgattgga

SEQ ID NO: 3984371 - DNA, 25 bp, Homo sapien
ctgcattggaaagactttcatttct

SEQ ID NO: 3984372 - DNA, 25 bp, Homo sapien
gggatgagaagagtcgactgtggat

SEQ ID NO: 3984373 - DNA, 25 bp, Homo sapien
ccaggcagaatgatctttgggggat

SEQ ID NO: 3984374 - DNA, 25 bp, Homo sapien
catttctttcccaggcagaatgatc

SEQ ID NO: 3984375 - DNA, 25 bp, Homo sapien
ctgtacatctctggtgtccagcacc

SEQ ID NO: 3984376 - DNA, 25 bp, Homo sapien
gtacatctctggtgtccagcaccat

SEQ ID NO: 3984377 - DNA, 25 bp, Homo sapien
tgtacatctctggtgtccagcacca

SEQ ID NO: 3984378 - DNA, 25 bp, Homo sapien
ttcatgtttacatctggtttaactt

SEQ ID NO: 3984379 - DNA, 25 bp, Homo sapien
catgtttacatctggtttaactttt

SEQ ID NO: 3984380 - DNA, 25 bp, Homo sapien
tcttcatgtttacatctggtttaac

SEQ ID NO: 3984381 - DNA, 25 bp, Homo sapien
atctcttcatgtttacatctggttt

SEQ ID NO: 3984382 - DNA, 25 bp, Homo sapien
tgtttccatgacatgcatgccctgg

SEQ ID NO: 3984383 - DNA, 25 bp, Homo sapien
gtttccatgacatgcatgccctggg

SEQ ID NO: 3984384 - DNA, 25 bp, Homo sapien
tttccatgacatgcatgccctgggc

SEQ ID NO: 3984385 - DNA, 25 bp, Homo sapien
ctgtttccatgacatgcatgccctg

SEQ ID NO: 3984386 - DNA, 25 bp, Homo sapien
aaggtgagcgcattctgtcccagaa

SEQ ID NO: 3984387 - DNA, 25 bp, Homo sapien
gaaaaacatgagtgatcagtagccc

SEQ ID NO: 3984388 - DNA, 25 bp, Homo sapien
tgaaatgccgacagccatgaggtcc

SEQ ID NO: 3984389 - DNA, 25 bp, Homo sapien
ccagaacaaggacgttgaaatgccg

SEQ ID NO: 3984390 - DNA, 25 bp, Homo sapien
tctacattccaggtggtaaaggacc

SEQ ID NO: 3984391 - DNA, 25 bp, Homo sapien
cttaagagggcctgaagcaaacttc

SEQ ID NO: 3984392 - DNA, 25 bp, Homo sapien
tattatgggtggatctagggtagcc

SEQ ID NO: 3984393 - DNA, 25 bp, Homo sapien
tcagctcagagagactactgggttc

SEQ ID NO: 3984394 - DNA, 25 bp, Homo sapien
aaaacagagggtggtaagaacacat

SEQ ID NO: 3984395 - DNA, 25 bp, Homo sapien
tggcaaaaacagagggtggtaagaa

SEQ ID NO: 3984396 - DNA, 25 bp, Homo sapien
aaacagagggtggtaagaacacatg

SEQ ID NO: 3984397 - DNA, 25 bp, Homo sapien
ctagagtggcaaaaacagagggtgg

SEQ ID NO: 3984398 - DNA, 25 bp, Homo sapien
agcagcagcacccataaatcactgg

SEQ ID NO: 3984399 - DNA, 25 bp, Homo sapien
tcttggtgccgtggctctgtgtcac

SEQ ID NO: 3984400 - DNA, 25 bp, Homo sapien
aatcactggttacaattcgcctgca

SEQ ID NO: 3984401 - DNA, 25 bp, Homo sapien
cccagcaacgctataaggcagatat

SEQ ID NO: 3984402 - DNA, 25 bp, Homo sapien
ttgccaatgccttcacgctgctctg

SEQ ID NO: 3984403 - DNA, 25 bp, Homo sapien
tgtcattgccaatgccttcacgctg

SEQ ID NO: 3984404 - DNA, 25 bp, Homo sapien
gctctgggcccactgagtcacaatg

SEQ ID NO: 3984405 - DNA, 25 bp, Homo sapien
gttcttccttgtttgtcattgccaa

SEQ ID NO: 3984406 - DNA, 25 bp, Homo sapien
gtcaatagtagcagcgtattgggcc

SEQ ID NO: 3984407 - DNA, 25 bp, Homo sapien
ttagtggctcggttgttggctgtca

SEQ ID NO: 3984408 - DNA, 25 bp, Homo sapien
ggatctggcattcattttaacatta

SEQ ID NO: 3984409 - DNA, 25 bp, Homo sapien
gggtgcaaatcccatctgatggttt

SEQ ID NO: 3984410 - DNA, 25 bp, Homo sapien
caactcagtagtctttggagcacca

SEQ ID NO: 3984411 - DNA, 25 bp, Homo sapien
tctctctgagtcaagcgtgtaccca

SEQ ID NO: 3984412 - DNA, 25 bp, Homo sapien
tattttaactcgatgaaggcacgtc

SEQ ID NO: 3984413 - DNA, 25 bp, Homo sapien
tcccttagggaagtctacaaacaca

SEQ ID NO: 3984414 - DNA, 25 bp, Homo sapien
ttatctggaaagtccgatgcacggc

SEQ ID NO: 3984415 - DNA, 25 bp, Homo sapien
caagccttgacacatatggatgata

SEQ ID NO: 3984416 - DNA, 25 bp, Homo sapien
tctgctcagccgtcttcaagccttg

SEQ ID NO: 3984417 - DNA, 25 bp, Homo sapien
gatacaaactttggctcttctctgg

SEQ ID NO: 3984418 - DNA, 25 bp, Homo sapien
aaatggcaagccttggatcaagggt

SEQ ID NO: 3984419 - DNA, 25 bp, Homo sapien
gatccatggtatatgcctcacttta

SEQ ID NO: 3984420 - DNA, 25 bp, Homo sapien
cttggatcaagggtgtgtgccaaga

SEQ ID NO: 3984421 - DNA, 25 bp, Homo sapien
tgacagcatcgtggctgtgctccaa

SEQ ID NO: 3984422 - DNA, 25 bp, Homo sapien
tcgaagctttgcatgtcacactcag

SEQ ID NO: 3984423 - DNA, 25 bp, Homo sapien
ctgtgggtcgaagctttgcatgtca

SEQ ID NO: 3984424 - DNA, 25 bp, Homo sapien
gacttgggggctaaaatgctgaact

SEQ ID NO: 3984425 - DNA, 25 bp, Homo sapien
ccttcggagcaatggaagtattgaa

SEQ ID NO: 3984426 - DNA, 25 bp, Homo sapien
ctacaatgaaggaggagacagaaaa

SEQ ID NO: 3984427 - DNA, 25 bp, Homo sapien
caatgaaggaggagacagaaaagac

SEQ ID NO: 3984428 - DNA, 25 bp, Homo sapien
atgaaggaggagacagaaaagactt

SEQ ID NO: 3984429 - DNA, 25 bp, Homo sapien
tacaatgaaggaggagacagaaaag

SEQ ID NO: 3984430 - DNA, 25 bp, Homo sapien
tattgccaaggacactgaacgcttt

SEQ ID NO: 3984431 - DNA, 25 bp, Homo sapien
ttggtttgccaagagtcccgctctt

SEQ ID NO: 3984432 - DNA, 25 bp, Homo sapien
catatggtgcccatagaagctggcc

SEQ ID NO: 3984433 - DNA, 25 bp, Homo sapien
gaagcctcccatatggtgcccatag

SEQ ID NO: 3984434 - DNA, 25 bp, Homo sapien
tggcaggttcgggagtgtcatcatc

SEQ ID NO: 3984435 - DNA, 25 bp, Homo sapien
tggtggcaggttcgggagtgtcatc

SEQ ID NO: 3984436 - DNA, 25 bp, Homo sapien
ggttcgggagtgtcatcatccaaga

SEQ ID NO: 3984437 - DNA, 25 bp, Homo sapien
gagggtggtggcaggttcgggagtg

SEQ ID NO: 3984438 - DNA, 25 bp, Homo sapien
ctctgcaagtgtgccgatggggtca

SEQ ID NO: 3984439 - DNA, 25 bp, Homo sapien
ggtccaatacaccaccacgcagacc

SEQ ID NO: 3984440 - DNA, 25 bp, Homo sapien
aggtgtgaaccaatggagcccttgg

SEQ ID NO: 3984441 - DNA, 25 bp, Homo sapien
gtgaaccaatggagcccttggccat

SEQ ID NO: 3984442 - DNA, 25 bp, Homo sapien
taggagcaagattgggtttagaaac

SEQ ID NO: 3984443 - DNA, 25 bp, Homo sapien
gctgctgtgaccagatacaaggtca

SEQ ID NO: 3984444 - DNA, 25 bp, Homo sapien
ttccagtggtttagcagggcagagt

SEQ ID NO: 3984445 - DNA, 25 bp, Homo sapien
atacaaggtcaaacaggcagtgatg

SEQ ID NO: 3984446 - DNA, 25 bp, Homo sapien
tgcctctgttcttgaagacacctga

SEQ ID NO: 3984447 - DNA, 25 bp, Homo sapien
actgcctctgttcttgaagacacct

SEQ ID NO: 3984448 - DNA, 25 bp, Homo sapien
gacccactgcctctgttcttgaaga

SEQ ID NO: 3984449 - DNA, 25 bp, Homo sapien
cagacccactgcctctgttcttgaa

SEQ ID NO: 3984450 - DNA, 25 bp, Homo sapien
tgcaaggggtcatagagaggaggac

SEQ ID NO: 3984451 - DNA, 25 bp, Homo sapien
tgcctctctatgtggggtgggagca

SEQ ID NO: 3984452 - DNA, 25 bp, Homo sapien
gtgggagcagctgacacagggaccg

SEQ ID NO: 3984453 - DNA, 25 bp, Homo sapien
agaggaggacctgccagctgcctct

SEQ ID NO: 3984454 - DNA, 25 bp, Homo sapien
gggagtcctggaatatgaagttcat

SEQ ID NO: 3984455 - DNA, 25 bp, Homo sapien
cgggagtcctggaatatgaagttca

SEQ ID NO: 3984456 - DNA, 25 bp, Homo sapien
tcgggagtcctggaatatgaagttc

SEQ ID NO: 3984457 - DNA, 25 bp, Homo sapien
ctcgggagtcctggaatatgaagtt

SEQ ID NO: 3984458 - DNA, 25 bp, Homo sapien
gaggtagaacccagtaggaacagtc

SEQ ID NO: 3984459 - DNA, 25 bp, Homo sapien
gaagacacccaggaggtagaaccca

SEQ ID NO: 3984460 - DNA, 25 bp, Homo sapien
tttagattccatgtggtcggtgcca

SEQ ID NO: 3984461 - DNA, 25 bp, Homo sapien
agtccctgcccgtgggaaccagagt

SEQ ID NO: 3984462 - DNA, 25 bp, Homo sapien
ccatgccacagacctcactttccag

SEQ ID NO: 3984463 - DNA, 25 bp, Homo sapien
cactttccagctgtatggcaaaccc

SEQ ID NO: 3984464 - DNA, 25 bp, Homo sapien
agctgtttcacttggacctccagga

SEQ ID NO: 3984465 - DNA, 25 bp, Homo sapien
gctgtatggcaaacccagtgctcct

SEQ ID NO: 3984466 - DNA, 25 bp, Homo sapien
ggtgttggacatcgcctgagtacca

SEQ ID NO: 3984467 - DNA, 25 bp, Homo sapien
agcaggtgttggacatcgcctgagt

SEQ ID NO: 3984468 - DNA, 25 bp, Homo sapien
caggtgttggacatcgcctgagtac

SEQ ID NO: 3984469 - DNA, 25 bp, Homo sapien
gttggacatcgcctgagtaccaacc

SEQ ID NO: 3984470 - DNA, 25 bp, Homo sapien
tcaaagccaatcaaagtcgcctctt

SEQ ID NO: 3984471 - DNA, 25 bp, Homo sapien
cttgtctgagatttttccggtgtgt

SEQ ID NO: 3984472 - DNA, 25 bp, Homo sapien
aatcaaagtcgcctcttgtctgaga

SEQ ID NO: 3984473 - DNA, 25 bp, Homo sapien
tgtctgagatttttccggtgtgttc

SEQ ID NO: 3984474 - DNA, 25 bp, Homo sapien
tggtggatttgctctagggagagct

SEQ ID NO: 3984475 - DNA, 25 bp, Homo sapien
ggtggatttgctctagggagagctc

SEQ ID NO: 3984476 - DNA, 25 bp, Homo sapien
cctggtggatttgctctagggagag

SEQ ID NO: 3984477 - DNA, 25 bp, Homo sapien
ctggtggatttgctctagggagagc

SEQ ID NO: 3984478 - DNA, 25 bp, Homo sapien
taattagatctatcatattctcatt

SEQ ID NO: 3984479 - DNA, 25 bp, Homo sapien
cttacacacgctaattagatctatc

SEQ ID NO: 3984480 - DNA, 25 bp, Homo sapien
ctcaccgtccttgaccctgctgacc

SEQ ID NO: 3984481 - DNA, 25 bp, Homo sapien
tcaggtggtctttcgccctcaccgt

SEQ ID NO: 3984482 - DNA, 25 bp, Homo sapien
catgaagcaccctgtgctcccctct

SEQ ID NO: 3984483 - DNA, 25 bp, Homo sapien
tcctcatcaggtggtctttcgccct

SEQ ID NO: 3984484 - DNA, 25 bp, Homo sapien
tttcattctttttgctgcgaatcat

SEQ ID NO: 3984485 - DNA, 25 bp, Homo sapien
cattctttgccagccctggaaatta

SEQ ID NO: 3984486 - DNA, 25 bp, Homo sapien
tccttgcattctttgccagccctgg

SEQ ID NO: 3984487 - DNA, 25 bp, Homo sapien
ctgcggtcctccttgcattctttgc

SEQ ID NO: 3984488 - DNA, 25 bp, Homo sapien
cacccactggtacactctaaaatca

SEQ ID NO: 3984489 - DNA, 25 bp, Homo sapien
gagatgatgaccaagtccatttcac

SEQ ID NO: 3984490 - DNA, 25 bp, Homo sapien
tcctctacatttctggatggttcct

SEQ ID NO: 3984491 - DNA, 25 bp, Homo sapien
ctggatggttcctctctctagggtc

SEQ ID NO: 3984492 - DNA, 25 bp, Homo sapien
cagcgctgcaagtatgttcttagag

SEQ ID NO: 3984493 - DNA, 25 bp, Homo sapien
gagcaactgttggaccatgaggatg

SEQ ID NO: 3984494 - DNA, 25 bp, Homo sapien
atgttcttagagcaactgttggacc

SEQ ID NO: 3984495 - DNA, 25 bp, Homo sapien
attctttcgtgtcttacagcgctgc

SEQ ID NO: 3984496 - DNA, 25 bp, Homo sapien
gaactaaatagctgaaggaccttga

SEQ ID NO: 3984497 - DNA, 25 bp, Homo sapien
ccaaaggcaatagctgctgagtcca

SEQ ID NO: 3984498 - DNA, 25 bp, Homo sapien
taagcttcttgtctgggcaaatcgc

SEQ ID NO: 3984499 - DNA, 25 bp, Homo sapien
ttgggtgcctcgaagcaatgcagct

SEQ ID NO: 3984500 - DNA, 25 bp, Homo sapien
gcatctgcaggtatcctgtggacat

SEQ ID NO: 3984501 - DNA, 25 bp, Homo sapien
ggcatctgcaggtatcctgtggaca

SEQ ID NO: 3984502 - DNA, 25 bp, Homo sapien
ggttggcatctgcaggtatcctgtg

SEQ ID NO: 3984503 - DNA, 25 bp, Homo sapien
ttggcatctgcaggtatcctgtgga

SEQ ID NO: 3984504 - DNA, 25 bp, Homo sapien
tacacaaagtattgccagttaggga

SEQ ID NO: 3984505 - DNA, 25 bp, Homo sapien
tactgggactccatcgtgtaggcat

SEQ ID NO: 3984506 - DNA, 25 bp, Homo sapien
gaatttctgttgtcctcgccctgtg

SEQ ID NO: 3984507 - DNA, 25 bp, Homo sapien
cagaggtagccaactgagagctgga

SEQ ID NO: 3984508 - DNA, 25 bp, Homo sapien
gatggctaactagagacacctggca

SEQ ID NO: 3984509 - DNA, 25 bp, Homo sapien
tgtgcaaatgtgctaagaccccaaa

SEQ ID NO: 3984510 - DNA, 25 bp, Homo sapien
gcacccgtggtgattggaagttcag

SEQ ID NO: 3984511 - DNA, 25 bp, Homo sapien
ggaagcatttaacctacagctggca

SEQ ID NO: 3984512 - DNA, 25 bp, Homo sapien
tgttggagccatactctggggatgc

SEQ ID NO: 3984513 - DNA, 25 bp, Homo sapien
tggttgaccatacaggtccagggca

SEQ ID NO: 3984514 - DNA, 25 bp, Homo sapien
ctgaagggaaagaccgacaccctgt

SEQ ID NO: 3984515 - DNA, 25 bp, Homo sapien
caggtccagggcagacagaagtgtc

SEQ ID NO: 3984516 - DNA, 25 bp, Homo sapien
gagggcaggggtcctggtgtctgcc

SEQ ID NO: 3984517 - DNA, 25 bp, Homo sapien
tcagcccatagagggcaggggtcct

SEQ ID NO: 3984518 - DNA, 25 bp, Homo sapien
tagagggcaggggtcctggtgtctg

SEQ ID NO: 3984519 - DNA, 25 bp, Homo sapien
gcccatagagggcaggggtcctggt

SEQ ID NO: 3984520 - DNA, 25 bp, Homo sapien
gaagatagggatgtgccttgtagca

SEQ ID NO: 3984521 - DNA, 25 bp, Homo sapien
tagggatgtgccttgtagcaccaag

SEQ ID NO: 3984522 - DNA, 25 bp, Homo sapien
ccttgagaagatagggatgtgcctt

SEQ ID NO: 3984523 - DNA, 25 bp, Homo sapien
tggtaaccttgagaagatagggatg

SEQ ID NO: 3984524 - DNA, 25 bp, Homo sapien
ctccgcatcctcatggggtctctta

SEQ ID NO: 3984525 - DNA, 25 bp, Homo sapien
gaatctccgcatcctcatggggtct

SEQ ID NO: 3984526 - DNA, 25 bp, Homo sapien
cagtggagaatctccgcatcctcat

SEQ ID NO: 3984527 - DNA, 25 bp, Homo sapien
tggagaatctccgcatcctcatggg

SEQ ID NO: 3984528 - DNA, 25 bp, Homo sapien
tgtccactgtttctaaggcctggcc

SEQ ID NO: 3984529 - DNA, 25 bp, Homo sapien
cttgtccactgtttctaaggcctgg

SEQ ID NO: 3984530 - DNA, 25 bp, Homo sapien
gaacttgtccactgtttctaaggcc

SEQ ID NO: 3984531 - DNA, 25 bp, Homo sapien
acttgtccactgtttctaaggcctg

SEQ ID NO: 3984532 - DNA, 25 bp, Homo sapien
ctggtcgcagtcacgttcttctctg

SEQ ID NO: 3984533 - DNA, 25 bp, Homo sapien
agttcttgcacctggtcgcagtcac

SEQ ID NO: 3984534 - DNA, 25 bp, Homo sapien
tcttgcacctggtcgcagtcacgtt

SEQ ID NO: 3984535 - DNA, 25 bp, Homo sapien
tgcacctggtcgcagtcacgttctt

SEQ ID NO: 3984536 - DNA, 25 bp, Homo sapien
tttccgcagttctcatccacctgat

SEQ ID NO: 3984537 - DNA, 25 bp, Homo sapien
tcaggcccattttccgcagttctca

SEQ ID NO: 3984538 - DNA, 25 bp, Homo sapien
caggcccattttccgcagttctcat

SEQ ID NO: 3984539 - DNA, 25 bp, Homo sapien
cattttccgcagttctcatccacct

SEQ ID NO: 3984540 - DNA, 25 bp, Homo sapien
ccggccagtaaactcagatacactg

SEQ ID NO: 3984541 - DNA, 25 bp, Homo sapien
ccagtaaactcagatacactgtcac

SEQ ID NO: 3984542 - DNA, 25 bp, Homo sapien
cggccagtaaactcagatacactgt

SEQ ID NO: 3984543 - DNA, 25 bp, Homo sapien
ggccagtaaactcagatacactgtc

SEQ ID NO: 3984544 - DNA, 25 bp, Homo sapien
cctcccatgctccaaatggaactgg

SEQ ID NO: 3984545 - DNA, 25 bp, Homo sapien
ggtgcgtgtggaccctccaccacat

SEQ ID NO: 3984546 - DNA, 25 bp, Homo sapien
cttcatctttaaccctctgactctc

SEQ ID NO: 3984547 - DNA, 25 bp, Homo sapien
gggcaaggggtctcatcttcaggct

SEQ ID NO: 3984548 - DNA, 25 bp, Homo sapien
ttgtgggcagggtttgtgccgaaca

SEQ ID NO: 3984549 - DNA, 25 bp, Homo sapien
tccttgtgggcagggtttgtgccga

SEQ ID NO: 3984550 - DNA, 25 bp, Homo sapien
tgtgggcagggtttgtgccgaacat

SEQ ID NO: 3984551 - DNA, 25 bp, Homo sapien
cttgtgggcagggtttgtgccgaac

SEQ ID NO: 3984552 - DNA, 25 bp, Homo sapien
agatgatgcttgggcttgttgttta

SEQ ID NO: 3984553 - DNA, 25 bp, Homo sapien
atgatgcttgggcttgttgtttaac

SEQ ID NO: 3984554 - DNA, 25 bp, Homo sapien
gatgatgcttgggcttgttgtttaa

SEQ ID NO: 3984555 - DNA, 25 bp, Homo sapien
cagatgatgcttgggcttgttgttt

SEQ ID NO: 3984556 - DNA, 25 bp, Homo sapien
tacactgacctcttccactttgcgg

SEQ ID NO: 3984557 - DNA, 25 bp, Homo sapien
gctcagcatgctattcacacctcag

SEQ ID NO: 3984558 - DNA, 25 bp, Homo sapien
acacctcagtaaagggcgcagcaca

SEQ ID NO: 3984559 - DNA, 25 bp, Homo sapien
taaactaagctgtattagcaagtcc

SEQ ID NO: 3984560 - DNA, 25 bp, Homo sapien
taaatcgtaagcagatctcaatcag

SEQ ID NO: 3984561 - DNA, 25 bp, Homo sapien
catacatgtataatctgtccactaa

SEQ ID NO: 3984562 - DNA, 25 bp, Homo sapien
aatcagagtgcggagaaatgttcta

SEQ ID NO: 3984563 - DNA, 25 bp, Homo sapien
tatagaacacagatacatacatgta

SEQ ID NO: 3984564 - DNA, 25 bp, Homo sapien
gggtgtctcgtgcacctgtttctga

SEQ ID NO: 3984565 - DNA, 25 bp, Homo sapien
taaagggtgtctcgtgcacctgttt

SEQ ID NO: 3984566 - DNA, 25 bp, Homo sapien
ggtaaagggtgtctcgtgcacctgt

SEQ ID NO: 3984567 - DNA, 25 bp, Homo sapien
gaggtaaagggtgtctcgtgcacct

SEQ ID NO: 3984568 - DNA, 25 bp, Homo sapien
caacacctggatgaccaagaagaca

SEQ ID NO: 3984569 - DNA, 25 bp, Homo sapien
ccagcccaacacctggatgaccaag

SEQ ID NO: 3984570 - DNA, 25 bp, Homo sapien
cctggatgaccaagaagacattatt

SEQ ID NO: 3984571 - DNA, 25 bp, Homo sapien
cagcccaacacctggatgaccaaga

SEQ ID NO: 3984572 - DNA, 25 bp, Homo sapien
ataagttccatttggatacatacag

SEQ ID NO: 3984573 - DNA, 25 bp, Homo sapien
ttctttcataagttccatttggata

SEQ ID NO: 3984574 - DNA, 25 bp, Homo sapien
gttccatttggatacatacagtgac

SEQ ID NO: 3984575 - DNA, 25 bp, Homo sapien
tctttcataagttccatttggatac

SEQ ID NO: 3984576 - DNA, 25 bp, Homo sapien
actgactggtctgtatagccgcaca

SEQ ID NO: 3984577 - DNA, 25 bp, Homo sapien
tcttgagggagcatggcctgacact

SEQ ID NO: 3984578 - DNA, 25 bp, Homo sapien
ctggtctgtatagccgcacactcca

SEQ ID NO: 3984579 - DNA, 25 bp, Homo sapien
caaatggcaggcctcttgagggagc

SEQ ID NO: 3984580 - DNA, 25 bp, Homo sapien
ctgtgtgatgtcaagataaggacaa

SEQ ID NO: 3984581 - DNA, 25 bp, Homo sapien
gatgtcaagataaggacaaatgtgg

SEQ ID NO: 3984582 - DNA, 25 bp, Homo sapien
tgtgtgatgtcaagataaggacaaa

SEQ ID NO: 3984583 - DNA, 25 bp, Homo sapien
tgtgatgtcaagataaggacaaatg

SEQ ID NO: 3984584 - DNA, 25 bp, Homo sapien
gccaggagccaggagggcacaggca

SEQ ID NO: 3984585 - DNA, 25 bp, Homo sapien
tgcagccaggtcagaggggcagcca

SEQ ID NO: 3984586 - DNA, 25 bp, Homo sapien
ctgcagccaggtcagaggggcagcc

SEQ ID NO: 3984587 - DNA, 25 bp, Homo sapien
aggagccaggagggcacaggcacca

SEQ ID NO: 3984588 - DNA, 25 bp, Homo sapien
catttcctgtggtccggtcctggtt

SEQ ID NO: 3984589 - DNA, 25 bp, Homo sapien
ggctgtggtcctgcctcagatgttc

SEQ ID NO: 3984590 - DNA, 25 bp, Homo sapien
tgcatctggctgtggtcctgcctca

SEQ ID NO: 3984591 - DNA, 25 bp, Homo sapien
atctggctgtggtcctgcctcagat

SEQ ID NO: 3984592 - DNA, 25 bp, Homo sapien
gtggtcctgcctcagatgttctcat

SEQ ID NO: 3984593 - DNA, 25 bp, Homo sapien
gacacggtgggggccagacaacaca

SEQ ID NO: 3984594 - DNA, 25 bp, Homo sapien
ccaggacctgacagggggccaaggg

SEQ ID NO: 3984595 - DNA, 25 bp, Homo sapien
acacacacaccaggacctgacaggg

SEQ ID NO: 3984596 - DNA, 25 bp, Homo sapien
aatgggagatgaacaataggaacac

SEQ ID NO: 3984597 - DNA, 25 bp, Homo sapien
tcctgtaagcacgaagttgggtcta

SEQ ID NO: 3984598 - DNA, 25 bp, Homo sapien
gcctggtcatccagtatgatgccca

SEQ ID NO: 3984599 - DNA, 25 bp, Homo sapien
tgcattgtgactacatgcctggtca

SEQ ID NO: 3984600 - DNA, 25 bp, Homo sapien
tattgaagagaccagactactacct

SEQ ID NO: 3984601 - DNA, 25 bp, Homo sapien
aattcctagcacgaccaataaggcc

SEQ ID NO: 3984602 - DNA, 25 bp, Homo sapien
tgttccctatgcttcggccatcctg

SEQ ID NO: 3984603 - DNA, 25 bp, Homo sapien
ggccaccatgtcctttaccgtagag

SEQ ID NO: 3984604 - DNA, 25 bp, Homo sapien
gagcaccctacttgtcctggacagc

SEQ ID NO: 3984605 - DNA, 25 bp, Homo sapien
ggtcctccccaggccctgtggccat

SEQ ID NO: 3984606 - DNA, 25 bp, Homo sapien
tggtcctccccaggccctgtggcca

SEQ ID NO: 3984607 - DNA, 25 bp, Homo sapien
ctggtcctccccaggccctgtggcc

SEQ ID NO: 3984608 - DNA, 25 bp, Homo sapien
gctgcggtacaggagaaggcagccc

SEQ ID NO: 3984609 - DNA, 25 bp, Homo sapien
ggagccagcgtgcagctccctgtgc

SEQ ID NO: 3984610 - DNA, 25 bp, Homo sapien
agcgctgtatgagcgggtccactga

SEQ ID NO: 3984611 - DNA, 25 bp, Homo sapien
gtgctggtgggagcgctgtatgagc

SEQ ID NO: 3984612 - DNA, 25 bp, Homo sapien
tggagaccacggttaacaccaggtg

SEQ ID NO: 3984613 - DNA, 25 bp, Homo sapien
ttttcaaacccttcagtgcatccgg

SEQ ID NO: 3984614 - DNA, 25 bp, Homo sapien
gatgcggttgtcaagatgttcactt

SEQ ID NO: 3984615 - DNA, 25 bp, Homo sapien
accaggtggtcgcttgtcaagatgc

SEQ ID NO: 3984616 - DNA, 25 bp, Homo sapien
taggatattcacacatcctgcttgg

SEQ ID NO: 3984617 - DNA, 25 bp, Homo sapien
acatcctgcttggacttaattccag

SEQ ID NO: 3984618 - DNA, 25 bp, Homo sapien
agctgcatttagcattaggatattc

SEQ ID NO: 3984619 - DNA, 25 bp, Homo sapien
ctgggcttaagctgcatttagcatt

SEQ ID NO: 3984620 - DNA, 25 bp, Homo sapien
ggtgctggtgtcacacacttggtga

SEQ ID NO: 3984621 - DNA, 25 bp, Homo sapien
cagtgatggcaaaacccgggctttg

SEQ ID NO: 3984622 - DNA, 25 bp, Homo sapien
tatgtttttgtagcatgagtagggc

SEQ ID NO: 3984623 - DNA, 25 bp, Homo sapien
ttggctctggaatcccagttggaca

SEQ ID NO: 3984624 - DNA, 25 bp, Homo sapien
cactctgcagttatccacatgccca

SEQ ID NO: 3984625 - DNA, 25 bp, Homo sapien
acgtgggaaactgagtatccacgca

SEQ ID NO: 3984626 - DNA, 25 bp, Homo sapien
gaaactgagtatccacgcaggcact

SEQ ID NO: 3984627 - DNA, 25 bp, Homo sapien
gagtatccacgcaggcactccctgt

SEQ ID NO: 3984628 - DNA, 25 bp, Homo sapien
gagttagggcatatcctagcacatc

SEQ ID NO: 3984629 - DNA, 25 bp, Homo sapien
tagggcatatcctagcacatctgtg

SEQ ID NO: 3984630 - DNA, 25 bp, Homo sapien
ctggagttagggcatatcctagcac

SEQ ID NO: 3984631 - DNA, 25 bp, Homo sapien
gggcatatcctagcacatctgtgca

SEQ ID NO: 3984632 - DNA, 25 bp, Homo sapien
tgtgagtagatgaacatcttgcata

SEQ ID NO: 3984633 - DNA, 25 bp, Homo sapien
ttgtgagtagatgaacatcttgcat

SEQ ID NO: 3984634 - DNA, 25 bp, Homo sapien
tgagtagatgaacatcttgcataag

SEQ ID NO: 3984635 - DNA, 25 bp, Homo sapien
gagtagatgaacatcttgcataagc

SEQ ID NO: 3984636 - DNA, 25 bp, Homo sapien
agtggcttcaacacaaagaagggac

SEQ ID NO: 3984637 - DNA, 25 bp, Homo sapien
tgcagtggggctccgctgatgctca

SEQ ID NO: 3984638 - DNA, 25 bp, Homo sapien
gaggctgcccgggattgccagtgca

SEQ ID NO: 3984639 - DNA, 25 bp, Homo sapien
gggctccgctgatgctcaggatcac

SEQ ID NO: 3984640 - DNA, 25 bp, Homo sapien
tgtgcccagctggtgtgcttgtcca

SEQ ID NO: 3984641 - DNA, 25 bp, Homo sapien
ggtgatgacggtactttttattgca

SEQ ID NO: 3984642 - DNA, 25 bp, Homo sapien
gctgatgcccggtatccaccagcgt

SEQ ID NO: 3984643 - DNA, 25 bp, Homo sapien
cgctgccgctgcctactggtgcgtg

SEQ ID NO: 3984644 - DNA, 25 bp, Homo sapien
ccgatgacggtctgtgctatttcca

SEQ ID NO: 3984645 - DNA, 25 bp, Homo sapien
tcaggctctgtggccgtcagcccgt

SEQ ID NO: 3984646 - DNA, 25 bp, Homo sapien
cgatcccgcgttgctctctgcagtt

SEQ ID NO: 3984647 - DNA, 25 bp, Homo sapien
gtcagcccgttgctctgagggacaa

SEQ ID NO: 3984648 - DNA, 25 bp, Homo sapien
ggcctctgcgtggaagccagtgcag

SEQ ID NO: 3984649 - DNA, 25 bp, Homo sapien
cagacctactaacagatccatgttc

SEQ ID NO: 3984650 - DNA, 25 bp, Homo sapien
cagccccagtccttaagcggatgag

SEQ ID NO: 3984651 - DNA, 25 bp, Homo sapien
aaaatcgactttagtggcctctgcg

SEQ ID NO: 3984652 - DNA, 25 bp, Homo sapien
tagaatccttatacagggcagactg

SEQ ID NO: 3984653 - DNA, 25 bp, Homo sapien
tagagtcacacctaaccagacaggc

SEQ ID NO: 3984654 - DNA, 25 bp, Homo sapien
cccactgtgggcaaatgcatagagc

SEQ ID NO: 3984655 - DNA, 25 bp, Homo sapien
ccgttcgggttccatagttccatga

SEQ ID NO: 3984656 - DNA, 25 bp, Homo sapien
tgtgggatggctaaatcaaactatg

SEQ ID NO: 3984657 - DNA, 25 bp, Homo sapien
tgtctaacagaaactcggtgtccct

SEQ ID NO: 3984658 - DNA, 25 bp, Homo sapien
gataggaggcctgttgaacttattc

SEQ ID NO: 3984659 - DNA, 25 bp, Homo sapien
catagctattgtagtcaccttggtg

SEQ ID NO: 3984660 - DNA, 25 bp, Homo sapien
tgaacctgcgtgaacctttatgaac

SEQ ID NO: 3984661 - DNA, 25 bp, Homo sapien
gtgtgaacctgcgtgaacctttatg

SEQ ID NO: 3984662 - DNA, 25 bp, Homo sapien
aacctgtgtgaacctgcgtgaacct

SEQ ID NO: 3984663 - DNA, 25 bp, Homo sapien
acctgtgtgaacctgcgtgaacctt

SEQ ID NO: 3984664 - DNA, 25 bp, Homo sapien
tctgtgggaagatttcaggcctgca

SEQ ID NO: 3984665 - DNA, 25 bp, Homo sapien
cattataagtaagaaactggctggg

SEQ ID NO: 3984666 - DNA, 25 bp, Homo sapien
gcttcagagatacccataggcattt

SEQ ID NO: 3984667 - DNA, 25 bp, Homo sapien
tcacagttgcctagcagttgctggt

SEQ ID NO: 3984668 - DNA, 25 bp, Homo sapien
tgaaattggaggaatggccataaac

SEQ ID NO: 3984669 - DNA, 25 bp, Homo sapien
gaggaatggccataaacattctttg

SEQ ID NO: 3984670 - DNA, 25 bp, Homo sapien
tgacctatgctatgttcagaattaa

SEQ ID NO: 3984671 - DNA, 25 bp, Homo sapien
tccctttagatcaacctgccccttg

SEQ ID NO: 3984672 - DNA, 25 bp, Homo sapien
gggaaagaggaccagaagcctgcct

SEQ ID NO: 3984673 - DNA, 25 bp, Homo sapien
tgtggccaggatctttgaagccggc

SEQ ID NO: 3984674 - DNA, 25 bp, Homo sapien
tgccaggctcactggtgtgtggcca

SEQ ID NO: 3984675 - DNA, 25 bp, Homo sapien
ggccagcaggaaatcactgggaaag

SEQ ID NO: 3984676 - DNA, 25 bp, Homo sapien
tcatcaaccaggtgagtagggagat

SEQ ID NO: 3984677 - DNA, 25 bp, Homo sapien
tgagaaactcttagctgcatcctgg

SEQ ID NO: 3984678 - DNA, 25 bp, Homo sapien
gagccacggtgccagttcctcaggc

SEQ ID NO: 3984679 - DNA, 25 bp, Homo sapien
agaccagctccctgtgagccacggt

SEQ ID NO: 3984680 - DNA, 25 bp, Homo sapien
cttttgtggtcacttgtctagtgaa

SEQ ID NO: 3984681 - DNA, 25 bp, Homo sapien
gtgccatccccgatacctctttggg

SEQ ID NO: 3984682 - DNA, 25 bp, Homo sapien
cctctttggggaccgctttctattg

SEQ ID NO: 3984683 - DNA, 25 bp, Homo sapien
tcctgtctgggtgccatccccgata

SEQ ID NO: 3984684 - DNA, 25 bp, Homo sapien
tgtgctcaggacttctcccgtgaga

SEQ ID NO: 3984685 - DNA, 25 bp, Homo sapien
tgaggacaggcctgcagttccctca

SEQ ID NO: 3984686 - DNA, 25 bp, Homo sapien
ccgtgagaacttcgcagttgcatat

SEQ ID NO: 3984687 - DNA, 25 bp, Homo sapien
caggatgccttgcagtgtgctcagg

SEQ ID NO: 3984688 - DNA, 25 bp, Homo sapien
tgttctgtagctctgatatggtgcc

SEQ ID NO: 3984689 - DNA, 25 bp, Homo sapien
gatggagtaaacaccgtctcaccgc

SEQ ID NO: 3984690 - DNA, 25 bp, Homo sapien
taggacgttcatggagacaaatgac

SEQ ID NO: 3984691 - DNA, 25 bp, Homo sapien
gccttttcataatgcagcgtgctca

SEQ ID NO: 3984692 - DNA, 25 bp, Homo sapien
gctgttacgctggatgatattgata

SEQ ID NO: 3984693 - DNA, 25 bp, Homo sapien
cacaggactgtgagtagtcaagcac

SEQ ID NO: 3984694 - DNA, 25 bp, Homo sapien
tcccatcgaggacgttaaccgcagt

SEQ ID NO: 3984695 - DNA, 25 bp, Homo sapien
caattcttgaaggtggccattccca

SEQ ID NO: 3984696 - DNA, 25 bp, Homo sapien
aatatacgtgcgcttttcacatgga

SEQ ID NO: 3984697 - DNA, 25 bp, Homo sapien
aagcagtgctaagtacttctccagc

SEQ ID NO: 3984698 - DNA, 25 bp, Homo sapien
agcactgcttcatgtcggttggctt

SEQ ID NO: 3984699 - DNA, 25 bp, Homo sapien
ctttgtggatgttattggaaagggt

SEQ ID NO: 3984700 - DNA, 25 bp, Homo sapien
tgtacagtggaagatgttggattct

SEQ ID NO: 3984701 - DNA, 25 bp, Homo sapien
ttatttggtgccagttatggactcg

SEQ ID NO: 3984702 - DNA, 25 bp, Homo sapien
tactgggcagatgccatgaggaatg

SEQ ID NO: 3984703 - DNA, 25 bp, Homo sapien
tatggactcgtactgggcagatgcc

SEQ ID NO: 3984704 - DNA, 25 bp, Homo sapien
gagattctggggttggtacctcctc

SEQ ID NO: 3984705 - DNA, 25 bp, Homo sapien
actcagctgcctgggagattctggg

SEQ ID NO: 3984706 - DNA, 25 bp, Homo sapien
tctggggttggtacctcctctgcat

SEQ ID NO: 3984707 - DNA, 25 bp, Homo sapien
ggttggtacctcctctgcattcagg

SEQ ID NO: 3984708 - DNA, 25 bp, Homo sapien
tgtttataattgcaggtgtctaatg

SEQ ID NO: 3984709 - DNA, 25 bp, Homo sapien
cataattagttaattcttggttggt

SEQ ID NO: 3984710 - DNA, 25 bp, Homo sapien
tatccttaaatccttcacccataat

SEQ ID NO: 3984711 - DNA, 25 bp, Homo sapien
tcttggttggtgagtgattgtttca

SEQ ID NO: 3984712 - DNA, 25 bp, Homo sapien
cattcaatctaagcatgttgaaaaa

SEQ ID NO: 3984713 - DNA, 25 bp, Homo sapien
cagcaagcggttctcattcaatcta

SEQ ID NO: 3984714 - DNA, 25 bp, Homo sapien
ggttctcattcaatctaagcatgtt

SEQ ID NO: 3984715 - DNA, 25 bp, Homo sapien
gcaagcggttctcattcaatctaag

SEQ ID NO: 3984716 - DNA, 25 bp, Homo sapien
ggtgtctgagcgcttctttggtagt

SEQ ID NO: 3984717 - DNA, 25 bp, Homo sapien
taaatgggcttgggagcaatactgg

SEQ ID NO: 3984718 - DNA, 25 bp, Homo sapien
aatactggggtcgtggctgtcctca

SEQ ID NO: 3984719 - DNA, 25 bp, Homo sapien
tcctcagggtgtctgagcgcttctt

SEQ ID NO: 3984720 - DNA, 25 bp, Homo sapien
tctgagtattggtagggtgggctag

SEQ ID NO: 3984721 - DNA, 25 bp, Homo sapien
gcagtgagtctgagtattggtaggg

SEQ ID NO: 3984722 - DNA, 25 bp, Homo sapien
ctgtgagtgtctgtgtaccctggcc

SEQ ID NO: 3984723 - DNA, 25 bp, Homo sapien
ccctggccatcctcgatggcagtga

SEQ ID NO: 3984724 - DNA, 25 bp, Homo sapien
tcgaggggcaccaattggcagaact

SEQ ID NO: 3984725 - DNA, 25 bp, Homo sapien
caccaattggcagaactggtcttgg

SEQ ID NO: 3984726 - DNA, 25 bp, Homo sapien
tgatcaagtccgcagagtgggtcga

SEQ ID NO: 3984727 - DNA, 25 bp, Homo sapien
atcacgtccagccatctgtcctgtt

SEQ ID NO: 3984728 - DNA, 25 bp, Homo sapien
tcaacagttaaactggagggaagag

SEQ ID NO: 3984729 - DNA, 25 bp, Homo sapien
gacttgtagcccactggtcaacagt

SEQ ID NO: 3984730 - DNA, 25 bp, Homo sapien
tgtgtgttcacttgacttgtagccc

SEQ ID NO: 3984731 - DNA, 25 bp, Homo sapien
tatttagggtctttatgctaggtgt

SEQ ID NO: 3984732 - DNA, 25 bp, Homo sapien
tgtgaatacctagcacatgcccaga

SEQ ID NO: 3984733 - DNA, 25 bp, Homo sapien
gtaagaagcactccaggctgagatg

SEQ ID NO: 3984734 - DNA, 25 bp, Homo sapien
gattggaatgcgtctcgtgcctagg

SEQ ID NO: 3984735 - DNA, 25 bp, Homo sapien
tctcctgtgatacgcgctgctgttg

SEQ ID NO: 3984736 - DNA, 25 bp, Homo sapien
tctgtaggtcaaagaagacgtgctg

SEQ ID NO: 3984737 - DNA, 25 bp, Homo sapien
tctttaggtgacactgctgcagcca

SEQ ID NO: 3984738 - DNA, 25 bp, Homo sapien
gatatttgcaaaaccagactgcctt

SEQ ID NO: 3984739 - DNA, 25 bp, Homo sapien
gaatgagtccaccagtgacaggttt

SEQ ID NO: 3984740 - DNA, 25 bp, Homo sapien
gatgtggtcacttggcttagcgcta

SEQ ID NO: 3984741 - DNA, 25 bp, Homo sapien
tgtacatctacataagggaaccctg

SEQ ID NO: 3984742 - DNA, 25 bp, Homo sapien
taacgtctggctgcacttaccatgg

SEQ ID NO: 3984743 - DNA, 25 bp, Homo sapien
tccagtgggttctaaagacggcctc

SEQ ID NO: 3984744 - DNA, 25 bp, Homo sapien
aaccagagtttccatcttccgtgct

SEQ ID NO: 3984745 - DNA, 25 bp, Homo sapien
catcttccgtgctttttagattcag

SEQ ID NO: 3984746 - DNA, 25 bp, Homo sapien
cttgggagttgaggagtaagtctcc

SEQ ID NO: 3984747 - DNA, 25 bp, Homo sapien
tcctgagagtaaggcgaaggtatga

SEQ ID NO: 3984748 - DNA, 25 bp, Homo sapien
tcttagaaccggctggagtttgtct

SEQ ID NO: 3984749 - DNA, 25 bp, Homo sapien
tcctcaatagggtggagttttctta

SEQ ID NO: 3984750 - DNA, 25 bp, Homo sapien
ttagaaccggctggagtttgtcttc

SEQ ID NO: 3984751 - DNA, 25 bp, Homo sapien
ttcttagaaccggctggagtttgtc

SEQ ID NO: 3984752 - DNA, 25 bp, Homo sapien
gacacaccgagtctctgggttgagt

SEQ ID NO: 3984753 - DNA, 25 bp, Homo sapien
aagtctctgggttgagtttgacaca

SEQ ID NO: 3984754 - DNA, 25 bp, Homo sapien
gttgagtttgacacaccaagtctct

SEQ ID NO: 3984755 - DNA, 25 bp, Homo sapien
caagtctctcggttgagtttgacac

SEQ ID NO: 3984756 - DNA, 25 bp, Homo sapien
gccacatctttgtccggtgctgcca

SEQ ID NO: 3984757 - DNA, 25 bp, Homo sapien
tttctgggctcatggcatggctggc

SEQ ID NO: 3984758 - DNA, 25 bp, Homo sapien
tggcccactgtttctcaggtccaca

SEQ ID NO: 3984759 - DNA, 25 bp, Homo sapien
tgctgccagcttcatgattatcact

SEQ ID NO: 3984760 - DNA, 25 bp, Homo sapien
tgggtgatgtttgttctgagcacca

SEQ ID NO: 3984761 - DNA, 25 bp, Homo sapien
tgttctgagcaccatcacggtccca

SEQ ID NO: 3984762 - DNA, 25 bp, Homo sapien
ggtggaggtctagctggatgttttc

SEQ ID NO: 3984763 - DNA, 25 bp, Homo sapien
ccaccagacgtgctgtgtgcacctg

SEQ ID NO: 3984764 - DNA, 25 bp, Homo sapien
ccagataagggaaccatccacccaa

SEQ ID NO: 3984765 - DNA, 25 bp, Homo sapien
tccagataagggaaccatccaccca

SEQ ID NO: 3984766 - DNA, 25 bp, Homo sapien
ggggacctgagcttgcttggctgtg

SEQ ID NO: 3984767 - DNA, 25 bp, Homo sapien
cttggggacctgagcttgcttggct

SEQ ID NO: 3984768 - DNA, 25 bp, Homo sapien
gtgatggctgagatgtgctcccact

SEQ ID NO: 3984769 - DNA, 25 bp, Homo sapien
atggctgagatgtgctcccacttct

SEQ ID NO: 3984770 - DNA, 25 bp, Homo sapien
tgtagctttgggtaggaccagccat

SEQ ID NO: 3984771 - DNA, 25 bp, Homo sapien
gtgtagctttgggtaggaccagcca

SEQ ID NO: 3984772 - DNA, 25 bp, Homo sapien
tgtcaactgacattggcgccaactt

SEQ ID NO: 3984773 - DNA, 25 bp, Homo sapien
acatctccgtgtgcatatctgaggg

SEQ ID NO: 3984774 - DNA, 25 bp, Homo sapien
cccttgcatgggaggtgaattcagg

SEQ ID NO: 3984775 - DNA, 25 bp, Homo sapien
cggttttatgtgagtgccatgggca

SEQ ID NO: 3984776 - DNA, 25 bp, Homo sapien
caaatggcccattggttcagaacct

SEQ ID NO: 3984777 - DNA, 25 bp, Homo sapien
catggacggccaggtctaggctttc

SEQ ID NO: 3984778 - DNA, 25 bp, Homo sapien
ctctgtctggatcggaggcatggac

SEQ ID NO: 3984779 - DNA, 25 bp, Homo sapien
gaagattgtgtagcctcaagcctct

SEQ ID NO: 3984780 - DNA, 25 bp, Homo sapien
caattagctgtgtcttgccccgtcc

SEQ ID NO: 3984781 - DNA, 25 bp, Homo sapien
gtcttgccccgtccgatatgaaagc

SEQ ID NO: 3984782 - DNA, 25 bp, Homo sapien
tgcatgtgtcacaattagctgtgtc

SEQ ID NO: 3984783 - DNA, 25 bp, Homo sapien
ctatagataatacatgcactgttcc

SEQ ID NO: 3984784 - DNA, 25 bp, Homo sapien
tgctgaccaaggtcattttgcacag

SEQ ID NO: 3984785 - DNA, 25 bp, Homo sapien
tgaccaaggtcattttgcacagtga

SEQ ID NO: 3984786 - DNA, 25 bp, Homo sapien
accaaggtcattttgcacagtgaag

SEQ ID NO: 3984787 - DNA, 25 bp, Homo sapien
tcagtgctgaccaaggtcattttgc

SEQ ID NO: 3984788 - DNA, 25 bp, Homo sapien
caatggcacggtccacgctgaatgt

SEQ ID NO: 3984789 - DNA, 25 bp, Homo sapien
gaatgtgttgttaaactgttggctt

SEQ ID NO: 3984790 - DNA, 25 bp, Homo sapien
ttgttaaactgttggcttgggtggc

SEQ ID NO: 3984791 - DNA, 25 bp, Homo sapien
cttgggtggcagatgaggtactgct

SEQ ID NO: 3984792 - DNA, 25 bp, Homo sapien
tggtgttctgcaccacatgtaattg

SEQ ID NO: 3984793 - DNA, 25 bp, Homo sapien
tggcagcttgggataggcaatgaac

SEQ ID NO: 3984794 - DNA, 25 bp, Homo sapien
tgtaattggcagcttgggataggca

SEQ ID NO: 3984795 - DNA, 25 bp, Homo sapien
tgcaccacatgtaattggcagcttg

SEQ ID NO: 3984796 - DNA, 25 bp, Homo sapien
gtggcagggactccgaggagcaggg

SEQ ID NO: 3984797 - DNA, 25 bp, Homo sapien
cctgggtggcagggactccgaggag

SEQ ID NO: 3984798 - DNA, 25 bp, Homo sapien
tgggtggcagggactccgaggagca

SEQ ID NO: 3984799 - DNA, 25 bp, Homo sapien
ggtggcagggactccgaggagcagg

SEQ ID NO: 3984800 - DNA, 25 bp, Homo sapien
gataggacccatctgtcagccagca

SEQ ID NO: 3984801 - DNA, 25 bp, Homo sapien
caaattgtgaccctccatactggca

SEQ ID NO: 3984802 - DNA, 25 bp, Homo sapien
tcattagtcaaaggcggtactggct

SEQ ID NO: 3984803 - DNA, 25 bp, Homo sapien
gttatgagatccttgctggccttgg

SEQ ID NO: 3984804 - DNA, 25 bp, Homo sapien
tacctgctggtcatgtttaagggcc

SEQ ID NO: 3984805 - DNA, 25 bp, Homo sapien
cctgaatgccgatgaactgtgaacc

SEQ ID NO: 3984806 - DNA, 25 bp, Homo sapien
tctgccatgtaggagctgaccctga

SEQ ID NO: 3984807 - DNA, 25 bp, Homo sapien
tgtcttgaacaccaccgtaagcggc

SEQ ID NO: 3984808 - DNA, 25 bp, Homo sapien
cctttcttgtgttcgtgggtgttca

SEQ ID NO: 3984809 - DNA, 25 bp, Homo sapien
gaaggcgctcccatatatcgtacgg

SEQ ID NO: 3984810 - DNA, 25 bp, Homo sapien
tgtgttcgtgggtgttcagccctct

SEQ ID NO: 3984811 - DNA, 25 bp, Homo sapien
ccatacttgttctaagaggagtgta

SEQ ID NO: 3984812 - DNA, 25 bp, Homo sapien
ctaagacatgggtgaacatacatac

SEQ ID NO: 3984813 - DNA, 25 bp, Homo sapien
ttgtgctttgaggtcgaccacttcc

SEQ ID NO: 3984814 - DNA, 25 bp, Homo sapien
ttgaggtcgaccacttccgtatgag

SEQ ID NO: 3984815 - DNA, 25 bp, Homo sapien
gctttgaggtcgaccacttccgtat

SEQ ID NO: 3984816 - DNA, 25 bp, Homo sapien
ggtcgaccacttccgtatgaggcac

SEQ ID NO: 3984817 - DNA, 25 bp, Homo sapien
cacttcttaaggtcgggcgaggtct

SEQ ID NO: 3984818 - DNA, 25 bp, Homo sapien
gggtccagggcgtatttcatctcca

SEQ ID NO: 3984819 - DNA, 25 bp, Homo sapien
gatatccttaaaccgcacctgcagg

SEQ ID NO: 3984820 - DNA, 25 bp, Homo sapien
cagagtctgacaaaccaggctcggg

SEQ ID NO: 3984821 - DNA, 25 bp, Homo sapien
tctcagatattaaagcctgcttgct

SEQ ID NO: 3984822 - DNA, 25 bp, Homo sapien
ttttccaggtgggatacactcgctt

SEQ ID NO: 3984823 - DNA, 25 bp, Homo sapien
tggcagcacagcttgaaatgcttct

SEQ ID NO: 3984824 - DNA, 25 bp, Homo sapien
catgtttccccattagacaaacctg

SEQ ID NO: 3984825 - DNA, 25 bp, Homo sapien
tggagctgccacgtctcgagcagat

SEQ ID NO: 3984826 - DNA, 25 bp, Homo sapien
taaatgtggagagccctccgaggag

SEQ ID NO: 3984827 - DNA, 25 bp, Homo sapien
gccacgtctcgagcagataaatgtg

SEQ ID NO: 3984828 - DNA, 25 bp, Homo sapien
agcagataaatgtggagagccctcc

SEQ ID NO: 3984829 - DNA, 25 bp, Homo sapien
ggtttccctgcatctacaaaggcca

SEQ ID NO: 3984830 - DNA, 25 bp, Homo sapien
gaaccgtgaaggagaagtcgtcgag

SEQ ID NO: 3984831 - DNA, 25 bp, Homo sapien
ggtggtcgcttctcatgggttaaca

SEQ ID NO: 3984832 - DNA, 25 bp, Homo sapien
tttgcgtgagccgttatggattccg

SEQ ID NO: 3984833 - DNA, 25 bp, Homo sapien
ttattccatggagagtggtactgga

SEQ ID NO: 3984834 - DNA, 25 bp, Homo sapien
tttattccatggagagtggtactgg

SEQ ID NO: 3984835 - DNA, 25 bp, Homo sapien
tattccatggagagtggtactggaa

SEQ ID NO: 3984836 - DNA, 25 bp, Homo sapien
tattctaggtcttggacgcaaccat

SEQ ID NO: 3984837 - DNA, 25 bp, Homo sapien
aattttcttacatcagttggctggg

SEQ ID NO: 3984838 - DNA, 25 bp, Homo sapien
tagagattcttatcccagcaggtta

SEQ ID NO: 3984839 - DNA, 25 bp, Homo sapien
caccatttgctagggactgcactga

SEQ ID NO: 3984840 - DNA, 25 bp, Homo sapien
gtaatggtcactacaatggaagtca

SEQ ID NO: 3984841 - DNA, 25 bp, Homo sapien
tggtcttcggttcactgcagaggta

SEQ ID NO: 3984842 - DNA, 25 bp, Homo sapien
tcaactcgaccatcagaatggatcc

SEQ ID NO: 3984843 - DNA, 25 bp, Homo sapien
gatatctgcttggaggtaatggtca

SEQ ID NO: 3984844 - DNA, 25 bp, Homo sapien
atgacccctgtatgctttcgccttc

SEQ ID NO: 3984845 - DNA, 25 bp, Homo sapien
tatcctgccacgtagaagaaaatcc

SEQ ID NO: 3984846 - DNA, 25 bp, Homo sapien
taggtgtggatgaaatggagtcttt

SEQ ID NO: 3984847 - DNA, 25 bp, Homo sapien
cgccttcttgaagctttggaggaga

SEQ ID NO: 3984848 - DNA, 25 bp, Homo sapien
aaaggacttgaatttggagccagga

SEQ ID NO: 3984849 - DNA, 25 bp, Homo sapien
tggagataccttagttagtgccttc

SEQ ID NO: 3984850 - DNA, 25 bp, Homo sapien
gtctctgaagttatggtttttctca

SEQ ID NO: 3984851 - DNA, 25 bp, Homo sapien
agatccttggttgcctggagatacc

SEQ ID NO: 3984852 - DNA, 25 bp, Homo sapien
ccaagccggtttggggccgagtgtg

SEQ ID NO: 3984853 - DNA, 25 bp, Homo sapien
ggagccgccgagtttccggccaagc

SEQ ID NO: 3984854 - DNA, 25 bp, Homo sapien
tgtgcgcccgaatcggggtcggcgc

SEQ ID NO: 3984855 - DNA, 25 bp, Homo sapien
cggtttggggccgagtgtgtgcgcc

SEQ ID NO: 3984856 - DNA, 25 bp, Homo sapien
cctggctcgggcatgtctcgctgcg

SEQ ID NO: 3984857 - DNA, 25 bp, Homo sapien
cttccgctgcttacagataagtcga

SEQ ID NO: 3984858 - DNA, 25 bp, Homo sapien
tgcagcgcctggctcgggcatgtct

SEQ ID NO: 3984859 - DNA, 25 bp, Homo sapien
taagtcgaggtcgatgcagcgcctg

SEQ ID NO: 3984860 - DNA, 25 bp, Homo sapien
agactcgccgcgctcacgcggagga

SEQ ID NO: 3984861 - DNA, 25 bp, Homo sapien
tcacgcggaggaagcctcggctccg

SEQ ID NO: 3984862 - DNA, 25 bp, Homo sapien
ggacttggcccgctgcgcgcctgct

SEQ ID NO: 3984863 - DNA, 25 bp, Homo sapien
gcacggagcactccggacagggcat

SEQ ID NO: 3984864 - DNA, 25 bp, Homo sapien
tgcggatgctgccttgtagaagcag

SEQ ID NO: 3984865 - DNA, 25 bp, Homo sapien
gagttcggggatcctttcagtgctg

SEQ ID NO: 3984866 - DNA, 25 bp, Homo sapien
tagaagcaggagttcggggatcctt

SEQ ID NO: 3984867 - DNA, 25 bp, Homo sapien
tggctccaacctggtgtcagcctct

SEQ ID NO: 3984868 - DNA, 25 bp, Homo sapien
tctagaatgagtcaatatgctcggc

SEQ ID NO: 3984869 - DNA, 25 bp, Homo sapien
ctaagcaaaatatccacgtctctct

SEQ ID NO: 3984870 - DNA, 25 bp, Homo sapien
ggaattccacccctatggtatagtg

SEQ ID NO: 3984871 - DNA, 25 bp, Homo sapien
gttcaagacggctaactaagcaaaa

SEQ ID NO: 3984872 - DNA, 25 bp, Homo sapien
cttcagattcatacgttattggctc

SEQ ID NO: 3984873 - DNA, 25 bp, Homo sapien
tttggtccgtgggtgttaatgaaca

SEQ ID NO: 3984874 - DNA, 25 bp, Homo sapien
tgaacattttcactctggagctttc

SEQ ID NO: 3984875 - DNA, 25 bp, Homo sapien
gattcatacgttattggctctttcc

SEQ ID NO: 3984876 - DNA, 25 bp, Homo sapien
tggacttcggcggtgccacataagg

SEQ ID NO: 3984877 - DNA, 25 bp, Homo sapien
ggtgccacataaggtggccccagtg

SEQ ID NO: 3984878 - DNA, 25 bp, Homo sapien
tgtctcggcaaatgactcccacgga

SEQ ID NO: 3984879 - DNA, 25 bp, Homo sapien
tgctgccatcagcatgcgctctgga

SEQ ID NO: 3984880 - DNA, 25 bp, Homo sapien
tctgcaggatgtagaaccgtgtgca

SEQ ID NO: 3984881 - DNA, 25 bp, Homo sapien
tcttctgcaggatgtagaaccgtgt

SEQ ID NO: 3984882 - DNA, 25 bp, Homo sapien
cattagaggggctgtaaagggaccg

SEQ ID NO: 3984883 - DNA, 25 bp, Homo sapien
ggaccgatgcctgagaatttcttct

SEQ ID NO: 3984884 - DNA, 25 bp, Homo sapien
ttggatgataatgcagtcagaggag

SEQ ID NO: 3984885 - DNA, 25 bp, Homo sapien
gataatgcagtcagaggagggcttc

SEQ ID NO: 3984886 - DNA, 25 bp, Homo sapien
gatgataatgcagtcagaggagggc

SEQ ID NO: 3984887 - DNA, 25 bp, Homo sapien
tgataatgcagtcagaggagggctt

SEQ ID NO: 3984888 - DNA, 25 bp, Homo sapien
agagttatttaaccccagttcactg

SEQ ID NO: 3984889 - DNA, 25 bp, Homo sapien
tacaaggcggctttccgtgatgtgt

SEQ ID NO: 3984890 - DNA, 25 bp, Homo sapien
tctgcttgggtaaggcattaaatta

SEQ ID NO: 3984891 - DNA, 25 bp, Homo sapien
aggatgatatcctcacggaagcaga

SEQ ID NO: 3984892 - DNA, 25 bp, Homo sapien
caaagcctttgattcagcgggcagg

SEQ ID NO: 3984893 - DNA, 25 bp, Homo sapien
gtgatttcccgatgcccagcaaggc

SEQ ID NO: 3984894 - DNA, 25 bp, Homo sapien
ggactgtgcttctcgcttgcagaca

SEQ ID NO: 3984895 - DNA, 25 bp, Homo sapien
taattacacctgaccatgatggcag

SEQ ID NO: 3984896 - DNA, 25 bp, Homo sapien
caaaaagtgcatcaacgctcaaggt

SEQ ID NO: 3984897 - DNA, 25 bp, Homo sapien
tcatccttgtgacatcccttcagtg

SEQ ID NO: 3984898 - DNA, 25 bp, Homo sapien
cagagctgtccggtgcaactcaggg

SEQ ID NO: 3984899 - DNA, 25 bp, Homo sapien
ttgctccagggctcataatacatga

SEQ ID NO: 3984900 - DNA, 25 bp, Homo sapien
gcttgcgagccttgatgttttccgt

SEQ ID NO: 3984901 - DNA, 25 bp, Homo sapien
gagcaggtaacccatgacatgacct

SEQ ID NO: 3984902 - DNA, 25 bp, Homo sapien
ttcctgaagcaaagcacggaggaga

SEQ ID NO: 3984903 - DNA, 25 bp, Homo sapien
catgacctggcttgcgagccttgat

SEQ ID NO: 3984904 - DNA, 25 bp, Homo sapien
ctggtaagaccctgccagtgcgggc

SEQ ID NO: 3984905 - DNA, 25 bp, Homo sapien
gctgcatcccagtgtgtcctgagca

SEQ ID NO: 3984906 - DNA, 25 bp, Homo sapien
cagtgccttggaacgaggtattccc

SEQ ID NO: 3984907 - DNA, 25 bp, Homo sapien
atggaggataggctggtaagaccct

SEQ ID NO: 3984908 - DNA, 25 bp, Homo sapien
ggctgaattccacgtctgcattatg

SEQ ID NO: 3984909 - DNA, 25 bp, Homo sapien
aggcacagtctgtggcttggtcgta

SEQ ID NO: 3984910 - DNA, 25 bp, Homo sapien
cagcagagagcactgagcggactgt

SEQ ID NO: 3984911 - DNA, 25 bp, Homo sapien
tgcattatgcttgctgggtgggtac

SEQ ID NO: 3984912 - DNA, 25 bp, Homo sapien
gtgtgtacccgtgctcatgtgtgtg

SEQ ID NO: 3984913 - DNA, 25 bp, Homo sapien
tgtgtgtacccgtgctcatgtgtgt

SEQ ID NO: 3984914 - DNA, 25 bp, Homo sapien
tgtgtgtgtgtacccatgctcatct

SEQ ID NO: 3984915 - DNA, 25 bp, Homo sapien
tgggtgtgtgtgtgtacccatgctc

SEQ ID NO: 3984916 - DNA, 25 bp, Homo sapien
ggtgtgtgtgtgtacccatgctcat

SEQ ID NO: 3984917 - DNA, 25 bp, Homo sapien
gtgtgtgtgtacccatgctcatctg

SEQ ID NO: 3984918 - DNA, 25 bp, Homo sapien
gaatttgagtcgttgaccacactga

SEQ ID NO: 3984919 - DNA, 25 bp, Homo sapien
gccatttgctttcgttgccgtgaag

SEQ ID NO: 3984920 - DNA, 25 bp, Homo sapien
cagaaggcaaatttgcagggtaggc

SEQ ID NO: 3984921 - DNA, 25 bp, Homo sapien
gtaggctgtttgtaggtactttgcc

SEQ ID NO: 3984922 - DNA, 25 bp, Homo sapien
atttctggcaagtcacccagagaaa

SEQ ID NO: 3984923 - DNA, 25 bp, Homo sapien
catttctggcaagtcacccagagaa

SEQ ID NO: 3984924 - DNA, 25 bp, Homo sapien
aaatagccctcatcagacttgctcc

SEQ ID NO: 3984925 - DNA, 25 bp, Homo sapien
aaaatagccctcatcagacttgctc

SEQ ID NO: 3984926 - DNA, 25 bp, Homo sapien
ccacatgcttgcgtcatggctgggt

SEQ ID NO: 3984927 - DNA, 25 bp, Homo sapien
cttgcgtcatggctgggtggccact

SEQ ID NO: 3984928 - DNA, 25 bp, Homo sapien
tcctctgtctttgagtgcagttctg

SEQ ID NO: 3984929 - DNA, 25 bp, Homo sapien
gatgtcttccagaactatcggctgt

SEQ ID NO: 3984930 - DNA, 25 bp, Homo sapien
gttctgtgatactcagatgtcttcc

SEQ ID NO: 3984931 - DNA, 25 bp, Homo sapien
tctcgccacccgtgctttttgtctt

SEQ ID NO: 3984932 - DNA, 25 bp, Homo sapien
ccacaaagcagggactcggacactg

SEQ ID NO: 3984933 - DNA, 25 bp, Homo sapien
gaccacaaagcagggactcggacac

SEQ ID NO: 3984934 - DNA, 25 bp, Homo sapien
actcggacactggtgacacggacat

SEQ ID NO: 3984935 - DNA, 25 bp, Homo sapien
caaagcagggactcggacactggtg

SEQ ID NO: 3984936 - DNA, 25 bp, Homo sapien
atgtccaggccctaaggtgcctacc

SEQ ID NO: 3984937 - DNA, 25 bp, Homo sapien
tgtccaggccctaaggtgcctacca

SEQ ID NO: 3984938 - DNA, 25 bp, Homo sapien
gtccaggccctaaggtgcctaccat

SEQ ID NO: 3984939 - DNA, 25 bp, Homo sapien
acttagcctcttgccgagcacttta

SEQ ID NO: 3984940 - DNA, 25 bp, Homo sapien
cattgttcttgcaagcacttagcct

SEQ ID NO: 3984941 - DNA, 25 bp, Homo sapien
tcatccttgacaactgctggggaca

SEQ ID NO: 3984942 - DNA, 25 bp, Homo sapien
gacaaagttggcaatttgttcattg

SEQ ID NO: 3984943 - DNA, 25 bp, Homo sapien
gtaacaagcattcagttgactgcat

SEQ ID NO: 3984944 - DNA, 25 bp, Homo sapien
gttgggtaacaagcattcagttgac

SEQ ID NO: 3984945 - DNA, 25 bp, Homo sapien
cctcttggttgggtaacaagcattc

SEQ ID NO: 3984946 - DNA, 25 bp, Homo sapien
tcttggttgggtaacaagcattcag

SEQ ID NO: 3984947 - DNA, 25 bp, Homo sapien
gccttgaataatgaaccatcaattc

SEQ ID NO: 3984948 - DNA, 25 bp, Homo sapien
ccctcactcttggatgggactgctg

SEQ ID NO: 3984949 - DNA, 25 bp, Homo sapien
ggaagttctgctcggctgccttgaa

SEQ ID NO: 3984950 - DNA, 25 bp, Homo sapien
ggccttgaaggccagttggaagttc

SEQ ID NO: 3984951 - DNA, 25 bp, Homo sapien
ctgaatgtccctttgggtcctatgt

SEQ ID NO: 3984952 - DNA, 25 bp, Homo sapien
atgtctagttctgtccctggtggcc

SEQ ID NO: 3984953 - DNA, 25 bp, Homo sapien
ggtcctatgtctagttctgtccctg

SEQ ID NO: 3984954 - DNA, 25 bp, Homo sapien
cctttgggtcctatgtctagttctg

SEQ ID NO: 3984955 - DNA, 25 bp, Homo sapien
acagccccatgtgttgggagcgcca

SEQ ID NO: 3984956 - DNA, 25 bp, Homo sapien
tgtcgggtcagttccgtgtgagaac

SEQ ID NO: 3984957 - DNA, 25 bp, Homo sapien
ccatgtgttgggagcgccagctttg

SEQ ID NO: 3984958 - DNA, 25 bp, Homo sapien
ggtaattgtcatagacagtagcgcc

SEQ ID NO: 3984959 - DNA, 25 bp, Homo sapien
cgctggctgtgtactgtttattata

SEQ ID NO: 3984960 - DNA, 25 bp, Homo sapien
gttgcgctggctgtgtactgtttat

SEQ ID NO: 3984961 - DNA, 25 bp, Homo sapien
tgctctcctgttgcgctggctgtgt

SEQ ID NO: 3984962 - DNA, 25 bp, Homo sapien
tcctgttgcgctggctgtgtactgt

SEQ ID NO: 3984963 - DNA, 25 bp, Homo sapien
tgggaagagcgctgctgctagccca

SEQ ID NO: 3984964 - DNA, 25 bp, Homo sapien
tagggtgccgtggaggactcataca

SEQ ID NO: 3984965 - DNA, 25 bp, Homo sapien
cagggccacaaagcgtcaaggacgt

SEQ ID NO: 3984966 - DNA, 25 bp, Homo sapien
cctgtgcatgctcctgtagccttgt

SEQ ID NO: 3984967 - DNA, 25 bp, Homo sapien
aggtcagcccgttgtttttcacata

SEQ ID NO: 3984968 - DNA, 25 bp, Homo sapien
gaagcaggtcagcccgttgtttttc

SEQ ID NO: 3984969 - DNA, 25 bp, Homo sapien
gccattcgattttgttatcgaagca

SEQ ID NO: 3984970 - DNA, 25 bp, Homo sapien
ctgactgtgccgcatgccattcgat

SEQ ID NO: 3984971 - DNA, 25 bp, Homo sapien
gctcagaagcaagcggtatctgcag

SEQ ID NO: 3984972 - DNA, 25 bp, Homo sapien
gaatgtggagggacgaatccatagc

SEQ ID NO: 3984973 - DNA, 25 bp, Homo sapien
tatctgcaggaatggattatactgg

SEQ ID NO: 3984974 - DNA, 25 bp, Homo sapien
ggagggacgaatccatagctcagaa

SEQ ID NO: 3984975 - DNA, 25 bp, Homo sapien
ggatcatagggggtcagtgagtcat

SEQ ID NO: 3984976 - DNA, 25 bp, Homo sapien
ctggatcatagggggtcagtgagtc

SEQ ID NO: 3984977 - DNA, 25 bp, Homo sapien
gatcatagggggtcagtgagtcatg

SEQ ID NO: 3984978 - DNA, 25 bp, Homo sapien
atcatagggggtcagtgagtcatga

SEQ ID NO: 3984979 - DNA, 25 bp, Homo sapien
ggggacgcatcgtcatggggaccat

SEQ ID NO: 3984980 - DNA, 25 bp, Homo sapien
ctaattgtagagagtaggatgtgtg

SEQ ID NO: 3984981 - DNA, 25 bp, Homo sapien
tagagagtaggatgtgtgatgagag

SEQ ID NO: 3984982 - DNA, 25 bp, Homo sapien
gagagaagtggggacgcatcgtcat

SEQ ID NO: 3984983 - DNA, 25 bp, Homo sapien
ttctgcattttgacgtaggaggata

SEQ ID NO: 3984984 - DNA, 25 bp, Homo sapien
tctgcattttgacgtaggaggatac

SEQ ID NO: 3984985 - DNA, 25 bp, Homo sapien
tttctgcattttgacgtaggaggat

SEQ ID NO: 3984986 - DNA, 25 bp, Homo sapien
ctttctgggaagttccgcaggccag

SEQ ID NO: 3984987 - DNA, 25 bp, Homo sapien
tttctgggaagttccgcaggccagc

SEQ ID NO: 3984988 - DNA, 25 bp, Homo sapien
ttctgggaagttccgcaggccagct

SEQ ID NO: 3984989 - DNA, 25 bp, Homo sapien
tagaaggcttctttcgcgctgcctc

SEQ ID NO: 3984990 - DNA, 25 bp, Homo sapien
attgccgcctagagaccaccatgca

SEQ ID NO: 3984991 - DNA, 25 bp, Homo sapien
tgaactcttgggaattgccgcctag

SEQ ID NO: 3984992 - DNA, 25 bp, Homo sapien
ctgtgcggcttctctccgttgtctg

SEQ ID NO: 3984993 - DNA, 25 bp, Homo sapien
gtcatgctagtatcaaaaattatat

SEQ ID NO: 3984994 - DNA, 25 bp, Homo sapien
ggaggtgtcacatagtcatgatcct

SEQ ID NO: 3984995 - DNA, 25 bp, Homo sapien
tccgaggaggtgtcacatagtcatg

SEQ ID NO: 3984996 - DNA, 25 bp, Homo sapien
tccccgatccgaggaggtgtcacat

SEQ ID NO: 3984997 - DNA, 25 bp, Homo sapien
tcatttctccccgatccgaggaggt

SEQ ID NO: 3984998 - DNA, 25 bp, Homo sapien
caaagacctggggatccgaataatg

SEQ ID NO: 3984999 - DNA, 25 bp, Homo sapien
gctcatggcatgactttcctccaaa

SEQ ID NO: 3985000 - DNA, 25 bp, Homo sapien
agacctggggatccgaataatgcct

SEQ ID NO: 3985001 - DNA, 25 bp, Homo sapien
cctggggatccgaataatgcctatt

SEQ ID NO: 3985002 - DNA, 25 bp, Homo sapien
caagttctggatgattgatcaatgc

SEQ ID NO: 3985003 - DNA, 25 bp, Homo sapien
tgatcaatgctcgatcaatgcgagc

SEQ ID NO: 3985004 - DNA, 25 bp, Homo sapien
agtctgtttcacaagttctggatga

SEQ ID NO: 3985005 - DNA, 25 bp, Homo sapien
catgctgtagaggatagcgtgtgct

SEQ ID NO: 3985006 - DNA, 25 bp, Homo sapien
tcaggcacatacagtgcctagaaat

SEQ ID NO: 3985007 - DNA, 25 bp, Homo sapien
cataaaagggattcagtgcccactc

SEQ ID NO: 3985008 - DNA, 25 bp, Homo sapien
tctgtgctcagtcgggccatggtcc

SEQ ID NO: 3985009 - DNA, 25 bp, Homo sapien
caaagacacagacctcgtgacgaag

SEQ ID NO: 3985010 - DNA, 25 bp, Homo sapien
gggagtggcctaggctccagttcct

SEQ ID NO: 3985011 - DNA, 25 bp, Homo sapien
gtggcctaggctccagttccttttc

SEQ ID NO: 3985012 - DNA, 25 bp, Homo sapien
cttagagctagcgtgtcctggtagg

SEQ ID NO: 3985013 - DNA, 25 bp, Homo sapien
tggtttagggctgcgcttagagcta

SEQ ID NO: 3985014 - DNA, 25 bp, Homo sapien
accagagtcttctctaataaggtgg

SEQ ID NO: 3985015 - DNA, 25 bp, Homo sapien
agagtcttctctaataaggtggcag

SEQ ID NO: 3985016 - DNA, 25 bp, Homo sapien
aggtgcttagggcaccagagtcttc

SEQ ID NO: 3985017 - DNA, 25 bp, Homo sapien
cagctggccgcggttgttgatttac

SEQ ID NO: 3985018 - DNA, 25 bp, Homo sapien
caggatcttcgcctcaagaaccaca

SEQ ID NO: 3985019 - DNA, 25 bp, Homo sapien
gcagagcaggctcgatgacacagct

SEQ ID NO: 3985020 - DNA, 25 bp, Homo sapien
cagtgcgctcttctgtaatcagtgc

SEQ ID NO: 3985021 - DNA, 25 bp, Homo sapien
catctcctgacacgaggatgagcag

SEQ ID NO: 3985022 - DNA, 25 bp, Homo sapien
aaagaagcagaacccagcgagccac

SEQ ID NO: 3985023 - DNA, 25 bp, Homo sapien
aagaaagaagcagaacccagcgagc

SEQ ID NO: 3985024 - DNA, 25 bp, Homo sapien
agcgagccacgcttcacttctagct

SEQ ID NO: 3985025 - DNA, 25 bp, Homo sapien
aagcagaacccagcgagccacgctt

SEQ ID NO: 3985026 - DNA, 25 bp, Homo sapien
ccagttaggttctcaggaatggaaa

SEQ ID NO: 3985027 - DNA, 25 bp, Homo sapien
gacatgaggcccagttaggttctca

SEQ ID NO: 3985028 - DNA, 25 bp, Homo sapien
gaggcccagttaggttctcaggaat

SEQ ID NO: 3985029 - DNA, 25 bp, Homo sapien
tctttggtttgacatgaggcccagt

SEQ ID NO: 3985030 - DNA, 25 bp, Homo sapien
tcctttctgcgtgtcagtcctggag

SEQ ID NO: 3985031 - DNA, 25 bp, Homo sapien
aggactcctcgaggaagctctgtgc

SEQ ID NO: 3985032 - DNA, 25 bp, Homo sapien
taggtctctgcacatgattttgctg

SEQ ID NO: 3985033 - DNA, 25 bp, Homo sapien
agtcagtggaggactcctcgaggaa

SEQ ID NO: 3985034 - DNA, 25 bp, Homo sapien
aattaataaactgtcacttgagcag

SEQ ID NO: 3985035 - DNA, 25 bp, Homo sapien
attaataaactgtcacttgagcaga

SEQ ID NO: 3985036 - DNA, 25 bp, Homo sapien
ttaataaactgtcacttgagcagac

SEQ ID NO: 3985037 - DNA, 25 bp, Homo sapien
gctgaatgctccatgagtctcctcc

SEQ ID NO: 3985038 - DNA, 25 bp, Homo sapien
ctgaatgctccatgagtctcctcct

SEQ ID NO: 3985039 - DNA, 25 bp, Homo sapien
cttcagtctttccaatagtatgcat

SEQ ID NO: 3985040 - DNA, 25 bp, Homo sapien
ccttcagtctttccaatagtatgca

SEQ ID NO: 3985041 - DNA, 25 bp, Homo sapien
ccttaactaaggttcgcagccccat

SEQ ID NO: 3985042 - DNA, 25 bp, Homo sapien
tagaaaggagtcttccaggagcttc

SEQ ID NO: 3985043 - DNA, 25 bp, Homo sapien
tggttaattcgggatacattgctgg

SEQ ID NO: 3985044 - DNA, 25 bp, Homo sapien
gataggacctgcctctgagtttcat

SEQ ID NO: 3985045 - DNA, 25 bp, Homo sapien
tatagattttcattggtcatcttca

SEQ ID NO: 3985046 - DNA, 25 bp, Homo sapien
ttatagattttcattggtcatcttc

SEQ ID NO: 3985047 - DNA, 25 bp, Homo sapien
atccacgaagaatgattttgctgtt

SEQ ID NO: 3985048 - DNA, 25 bp, Homo sapien
tcacatgaaggcggtatccacgaag

SEQ ID NO: 3985049 - DNA, 25 bp, Homo sapien
atgaaggcggtatccacgaagaatg

SEQ ID NO: 3985050 - DNA, 25 bp, Homo sapien
catgaaggcggtatccacgaagaat

SEQ ID NO: 3985051 - DNA, 25 bp, Homo sapien
tctgtgttgtcatctgcttgaacct

SEQ ID NO: 3985052 - DNA, 25 bp, Homo sapien
gtttctctgtgttgtcatctgcttg

SEQ ID NO: 3985053 - DNA, 25 bp, Homo sapien
ctctgtgttgtcatctgcttgaacc

SEQ ID NO: 3985054 - DNA, 25 bp, Homo sapien
ttctctgtgttgtcatctgcttgaa

SEQ ID NO: 3985055 - DNA, 25 bp, Homo sapien
tgacaggaaggcgttcccagcgact

SEQ ID NO: 3985056 - DNA, 25 bp, Homo sapien
cgttcccagcgactggacgctgcat

SEQ ID NO: 3985057 - DNA, 25 bp, Homo sapien
tcactgtgggctgggtccatagcca

SEQ ID NO: 3985058 - DNA, 25 bp, Homo sapien
tagccatagagctccggtccgttga

SEQ ID NO: 3985059 - DNA, 25 bp, Homo sapien
caaaggctatggcaaagtgatcatt

SEQ ID NO: 3985060 - DNA, 25 bp, Homo sapien
ggccttgaatcagaatgagttttag

SEQ ID NO: 3985061 - DNA, 25 bp, Homo sapien
gaatcagaatgagttttaggaggat

SEQ ID NO: 3985062 - DNA, 25 bp, Homo sapien
gtgatcattggctggccttgaatca

SEQ ID NO: 3985063 - DNA, 25 bp, Homo sapien
gcatctggccttctgaacatgccct

SEQ ID NO: 3985064 - DNA, 25 bp, Homo sapien
ggcgtggaccggctgcttcttgctg

SEQ ID NO: 3985065 - DNA, 25 bp, Homo sapien
gaatcgagcctccagatgtaccctc

SEQ ID NO: 3985066 - DNA, 25 bp, Homo sapien
gaggccccttagagtaggaatcgag

SEQ ID NO: 3985067 - DNA, 25 bp, Homo sapien
tgagcgtgtgcccacagcccttgga

SEQ ID NO: 3985068 - DNA, 25 bp, Homo sapien
gaacttaccgacctgactgagagcg

SEQ ID NO: 3985069 - DNA, 25 bp, Homo sapien
gacctcagttaagcttggagaccag

SEQ ID NO: 3985070 - DNA, 25 bp, Homo sapien
aatttccttggttcgatcttacatg

SEQ ID NO: 3985071 - DNA, 25 bp, Homo sapien
caagcttgcctctggacaaggctga

SEQ ID NO: 3985072 - DNA, 25 bp, Homo sapien
aaatgtctacagcttcctacgggaa

SEQ ID NO: 3985073 - DNA, 25 bp, Homo sapien
ttccagaatccaggacaagcttgcc

SEQ ID NO: 3985074 - DNA, 25 bp, Homo sapien
tactctgtgggaaggatatacaccc

SEQ ID NO: 3985075 - DNA, 25 bp, Homo sapien
ccacggaatcattcttctgtttttg

SEQ ID NO: 3985076 - DNA, 25 bp, Homo sapien
tcttccccacggaatcattcttctg

SEQ ID NO: 3985077 - DNA, 25 bp, Homo sapien
ccccacggaatcattcttctgtttt

SEQ ID NO: 3985078 - DNA, 25 bp, Homo sapien
ttccccacggaatcattcttctgtt

SEQ ID NO: 3985079 - DNA, 25 bp, Homo sapien
gacagtcagtattagccaacaccag

SEQ ID NO: 3985080 - DNA, 25 bp, Homo sapien
agtacttgactgaaaattaccaggc

SEQ ID NO: 3985081 - DNA, 25 bp, Homo sapien
ttgtagcccaagtgatatatgaagc

SEQ ID NO: 3985082 - DNA, 25 bp, Homo sapien
cagcctggcaggttgacaaatgcga

SEQ ID NO: 3985083 - DNA, 25 bp, Homo sapien
ttcatcacggcacccagaggataca

SEQ ID NO: 3985084 - DNA, 25 bp, Homo sapien
gacagcggttgatcagaagcacaga

SEQ ID NO: 3985085 - DNA, 25 bp, Homo sapien
cagttgggagattcccctggttcca

SEQ ID NO: 3985086 - DNA, 25 bp, Homo sapien
tcatcgtgcagcaaagacagcggtt

SEQ ID NO: 3985087 - DNA, 25 bp, Homo sapien
caatagatgccaggttgtgccagga

SEQ ID NO: 3985088 - DNA, 25 bp, Homo sapien
tatgtaggcaccaactctggatccg

SEQ ID NO: 3985089 - DNA, 25 bp, Homo sapien
gagcagcctgcgtggaatattatgt

SEQ ID NO: 3985090 - DNA, 25 bp, Homo sapien
gatccgtgcaggatggttatcccag

SEQ ID NO: 3985091 - DNA, 25 bp, Homo sapien
ttataataggcgtccaccaatgatt

SEQ ID NO: 3985092 - DNA, 25 bp, Homo sapien
taatttttaactgctggaagtgtta

SEQ ID NO: 3985093 - DNA, 25 bp, Homo sapien
aagttaatcattgacaacgaaaaat

SEQ ID NO: 3985094 - DNA, 25 bp, Homo sapien
catgatactcttctaatagacttaa

SEQ ID NO: 3985095 - DNA, 25 bp, Homo sapien
agggtcagcaggggttgtaaagcac

SEQ ID NO: 3985096 - DNA, 25 bp, Homo sapien
taaacacagaagcacaggatgcccc

SEQ ID NO: 3985097 - DNA, 25 bp, Homo sapien
agaagcacaggatgcccccactgct

SEQ ID NO: 3985098 - DNA, 25 bp, Homo sapien
acaggatgcccccactgcttcctac

SEQ ID NO: 3985099 - DNA, 25 bp, Homo sapien
ctaaacacagaagcacaggatgccc

SEQ ID NO: 3985100 - DNA, 25 bp, Homo sapien
catgggtccggcatccttgtcgttc

SEQ ID NO: 3985101 - DNA, 25 bp, Homo sapien
tgtcgttcccgttcttggatctccg

SEQ ID NO: 3985102 - DNA, 25 bp, Homo sapien
tttcacttctcacttcataccctag

SEQ ID NO: 3985103 - DNA, 25 bp, Homo sapien
tcataccctagactactgtttttca

SEQ ID NO: 3985104 - DNA, 25 bp, Homo sapien
cgtcagagggcagctccgagcccat

SEQ ID NO: 3985105 - DNA, 25 bp, Homo sapien
gccgtcagagggcagctccgagccc

SEQ ID NO: 3985106 - DNA, 25 bp, Homo sapien
cctggccgtcagagggcagctccga

SEQ ID NO: 3985107 - DNA, 25 bp, Homo sapien
tggccgtcagagggcagctccgagc

SEQ ID NO: 3985108 - DNA, 25 bp, Homo sapien
cagtggccctggcaaagcgtcagtt

SEQ ID NO: 3985109 - DNA, 25 bp, Homo sapien
ggaaactgccgcaaggagctgtcta

SEQ ID NO: 3985110 - DNA, 25 bp, Homo sapien
gctgattctgtatgcaccgtcactg

SEQ ID NO: 3985111 - DNA, 25 bp, Homo sapien
tgttttatgtaacgatccggcactg

SEQ ID NO: 3985112 - DNA, 25 bp, Homo sapien
gcatattgtgaaggtttccagaggg

SEQ ID NO: 3985113 - DNA, 25 bp, Homo sapien
gcgaacgcacatggccctcaggcag

SEQ ID NO: 3985114 - DNA, 25 bp, Homo sapien
ccatgcttgctgagcccgagcatat

SEQ ID NO: 3985115 - DNA, 25 bp, Homo sapien
gagaccatctgtctgctcgcgaacg

SEQ ID NO: 3985116 - DNA, 25 bp, Homo sapien
gcagtcaagggcacaggcgcccaca

SEQ ID NO: 3985117 - DNA, 25 bp, Homo sapien
aggcgcccacagtgaagacccctga

SEQ ID NO: 3985118 - DNA, 25 bp, Homo sapien
tgctgtttgcatcccaagtgcaaga

SEQ ID NO: 3985119 - DNA, 25 bp, Homo sapien
caagtgcaagaatgcaagtggaaac

SEQ ID NO: 3985120 - DNA, 25 bp, Homo sapien
ttgcttctttgacccctgctacctg

SEQ ID NO: 3985121 - DNA, 25 bp, Homo sapien
gcttctttgacccctgctacctggg

SEQ ID NO: 3985122 - DNA, 25 bp, Homo sapien
tctttgacccctgctacctggggca

SEQ ID NO: 3985123 - DNA, 25 bp, Homo sapien
ctgttgcttctttgacccctgctac

SEQ ID NO: 3985124 - DNA, 25 bp, Homo sapien
taattatgttcttgagttggtacag

SEQ ID NO: 3985125 - DNA, 25 bp, Homo sapien
cagcaataattatgttcttgagttg

SEQ ID NO: 3985126 - DNA, 25 bp, Homo sapien
tccttacagcttagtgcaaagtaat

SEQ ID NO: 3985127 - DNA, 25 bp, Homo sapien
cagctccttacagcttagtgcaaag

SEQ ID NO: 3985128 - DNA, 25 bp, Homo sapien
ttctgtggggaagaccttgctcagg

SEQ ID NO: 3985129 - DNA, 25 bp, Homo sapien
cttatcctccttagcaccagatcac

SEQ ID NO: 3985130 - DNA, 25 bp, Homo sapien
gccttgtctgagttttcaagacagc

SEQ ID NO: 3985131 - DNA, 25 bp, Homo sapien
tgagttttcaagacagcttgctgtc

SEQ ID NO: 3985132 - DNA, 25 bp, Homo sapien
gaaccgtggccttgtctgagttttc

SEQ ID NO: 3985133 - DNA, 25 bp, Homo sapien
ctctgaactccagggccacgtttct

SEQ ID NO: 3985134 - DNA, 25 bp, Homo sapien
ctaagggtcccattgagatgatgaa

SEQ ID NO: 3985135 - DNA, 25 bp, Homo sapien
tgtatgagaaggtatctttgcatct

SEQ ID NO: 3985136 - DNA, 25 bp, Homo sapien
gatgaaatggttgtaagagaatcca

SEQ ID NO: 3985137 - DNA, 25 bp, Homo sapien
tgttcatctgtgtcggatgaaatgg

SEQ ID NO: 3985138 - DNA, 25 bp, Homo sapien
tttggaaaagccgcttcctgtttca

SEQ ID NO: 3985139 - DNA, 25 bp, Homo sapien
agagccagctgtgggcgggactgcc

SEQ ID NO: 3985140 - DNA, 25 bp, Homo sapien
gaagagccagctgtgggcgggactg

SEQ ID NO: 3985141 - DNA, 25 bp, Homo sapien
ctatcgagagaagagccagctgtgg

SEQ ID NO: 3985142 - DNA, 25 bp, Homo sapien
agccagctgtgggcgggactgccac

SEQ ID NO: 3985143 - DNA, 25 bp, Homo sapien
ccctggtctggttgaatgagcccat

SEQ ID NO: 3985144 - DNA, 25 bp, Homo sapien
gcagagttgctaagtggtctatcac

SEQ ID NO: 3985145 - DNA, 25 bp, Homo sapien
gtttctgctaccaagatccctgggt

SEQ ID NO: 3985146 - DNA, 25 bp, Homo sapien
ggtctatcaccttgctgcatccatg

SEQ ID NO: 3985147 - DNA, 25 bp, Homo sapien
gcctcaatcttgtagttagcaatct

SEQ ID NO: 3985148 - DNA, 25 bp, Homo sapien
agggcagacattggcggtttcactt

SEQ ID NO: 3985149 - DNA, 25 bp, Homo sapien
tagcaatctctaaaatatggtacac

SEQ ID NO: 3985150 - DNA, 25 bp, Homo sapien
ggtttcacttctcccatgccggtat

SEQ ID NO: 3985151 - DNA, 25 bp, Homo sapien
aggttggagccccgcaggcgaatcc

SEQ ID NO: 3985152 - DNA, 25 bp, Homo sapien
atctgtagatcacagtgacacatcc

SEQ ID NO: 3985153 - DNA, 25 bp, Homo sapien
caggcgaatcctccacatatctttt

SEQ ID NO: 3985154 - DNA, 25 bp, Homo sapien
cgcaggcgaatcctccacatatctt

SEQ ID NO: 3985155 - DNA, 25 bp, Homo sapien
actccagatgatgcctgggtgtcca

SEQ ID NO: 3985156 - DNA, 25 bp, Homo sapien
ggctccgcaggctccggttcttcct

SEQ ID NO: 3985157 - DNA, 25 bp, Homo sapien
ctatctgcattgccatgcttaggga

SEQ ID NO: 3985158 - DNA, 25 bp, Homo sapien
ctggatgtctaagccggactccaga

SEQ ID NO: 3985159 - DNA, 25 bp, Homo sapien
tctccattgtaagcctcagcaacat

SEQ ID NO: 3985160 - DNA, 25 bp, Homo sapien
gcagaaagcacctcccttggtgttt

SEQ ID NO: 3985161 - DNA, 25 bp, Homo sapien
tagagctcctgaatccatttattaa

SEQ ID NO: 3985162 - DNA, 25 bp, Homo sapien
tattaatgcagatgcccattgaagt

SEQ ID NO: 3985163 - DNA, 25 bp, Homo sapien
ctcccgtgggccagcattttgtttt

SEQ ID NO: 3985164 - DNA, 25 bp, Homo sapien
tttggggtcaggtatccactgctgg

SEQ ID NO: 3985165 - DNA, 25 bp, Homo sapien
cctttggggtcaggtatccactgct

SEQ ID NO: 3985166 - DNA, 25 bp, Homo sapien
aggtccagcacctcccgtgggccag

SEQ ID NO: 3985167 - DNA, 25 bp, Homo sapien
tgttccctggatccaaaaggacaca

SEQ ID NO: 3985168 - DNA, 25 bp, Homo sapien
tggatccaaaaggacacacgtggcc

SEQ ID NO: 3985169 - DNA, 25 bp, Homo sapien
cacgtggccttccggtctggtcctt

SEQ ID NO: 3985170 - DNA, 25 bp, Homo sapien
gccttccggtctggtccttctttca

SEQ ID NO: 3985171 - DNA, 25 bp, Homo sapien
tcatttcccttatccaagtggtgcc

SEQ ID NO: 3985172 - DNA, 25 bp, Homo sapien
caagtggtgcctattatttttcctc

SEQ ID NO: 3985173 - DNA, 25 bp, Homo sapien
gttgattaagaatgttaaacatctg

SEQ ID NO: 3985174 - DNA, 25 bp, Homo sapien
aaacatattccatttcgccttgcaa

SEQ ID NO: 3985175 - DNA, 25 bp, Homo sapien
tggaaggtgttgatccagtaactga

SEQ ID NO: 3985176 - DNA, 25 bp, Homo sapien
tttgtaaggaatgggtcagggatcc

SEQ ID NO: 3985177 - DNA, 25 bp, Homo sapien
cagtaactgacccatttgtaaggaa

SEQ ID NO: 3985178 - DNA, 25 bp, Homo sapien
taaggaatgggtcagggatccttcc

SEQ ID NO: 3985179 - DNA, 25 bp, Homo sapien
aagccgtcgggatgctgccctgagt

SEQ ID NO: 3985180 - DNA, 25 bp, Homo sapien
accagcaaagccgtcgggatgctgc

SEQ ID NO: 3985181 - DNA, 25 bp, Homo sapien
cagcaaagccgtcgggatgctgccc

SEQ ID NO: 3985182 - DNA, 25 bp, Homo sapien
caaagccgtcgggatgctgccctga

SEQ ID NO: 3985183 - DNA, 25 bp, Homo sapien
caactcagcagtccttaaaaacaca

SEQ ID NO: 3985184 - DNA, 25 bp, Homo sapien
caggcaactcgatgctgtgaagcct

SEQ ID NO: 3985185 - DNA, 25 bp, Homo sapien
tcagcagtccttaaaaacacaggca

SEQ ID NO: 3985186 - DNA, 25 bp, Homo sapien
aaaacacaggcaactcgatgctgtg

SEQ ID NO: 3985187 - DNA, 25 bp, Homo sapien
cagaaagcagtttggaaggaaatgc

SEQ ID NO: 3985188 - DNA, 25 bp, Homo sapien
aaatttggtccagaaagcagtttgg

SEQ ID NO: 3985189 - DNA, 25 bp, Homo sapien
cagaggtgaaatttggtccagaaag

SEQ ID NO: 3985190 - DNA, 25 bp, Homo sapien
gtttggaaggaaatgcactgggcat

SEQ ID NO: 3985191 - DNA, 25 bp, Homo sapien
gaaacaactgaactgacgagagcct

SEQ ID NO: 3985192 - DNA, 25 bp, Homo sapien
tgctcagggaaatcgacaccagaaa

SEQ ID NO: 3985193 - DNA, 25 bp, Homo sapien
agcgacatcgggaaggacacatcaa

SEQ ID NO: 3985194 - DNA, 25 bp, Homo sapien
catgacgtcgtcttgctcagggaaa

SEQ ID NO: 3985195 - DNA, 25 bp, Homo sapien
cggatcccgtgcccattgccatcct

SEQ ID NO: 3985196 - DNA, 25 bp, Homo sapien
ggagctgtcttctgccggctgccac

SEQ ID NO: 3985197 - DNA, 25 bp, Homo sapien
tgccacctttgcaggaagaatccca

SEQ ID NO: 3985198 - DNA, 25 bp, Homo sapien
tgccggctgccacctttgcaggaag

SEQ ID NO: 3985199 - DNA, 25 bp, Homo sapien
gcggcttcgtaaaaggcacctggga

SEQ ID NO: 3985200 - DNA, 25 bp, Homo sapien
tttgtccagtacttcacgtcagccg

SEQ ID NO: 3985201 - DNA, 25 bp, Homo sapien
gcttcacttctaaggcgagaggcca

SEQ ID NO: 3985202 - DNA, 25 bp, Homo sapien
taagtcgctgactcaaatgggccct

SEQ ID NO: 3985203 - DNA, 25 bp, Homo sapien
ttagatccacaggcccgcgtaacgc

SEQ ID NO: 3985204 - DNA, 25 bp, Homo sapien
ctggggaatacccagggcgaggcca

SEQ ID NO: 3985205 - DNA, 25 bp, Homo sapien
caggcccgcgtaacgctggggaata

SEQ ID NO: 3985206 - DNA, 25 bp, Homo sapien
ccagcttccaggaggtcagcgccaa

SEQ ID NO: 3985207 - DNA, 25 bp, Homo sapien
gtgtcggacgcactgcagagacgtc

SEQ ID NO: 3985208 - DNA, 25 bp, Homo sapien
cagagacgtccctgttttcggcgcg

SEQ ID NO: 3985209 - DNA, 25 bp, Homo sapien
ggcctgaattttcgcctctttcgca

SEQ ID NO: 3985210 - DNA, 25 bp, Homo sapien
tttcgcacaggtgcccgactcggag

SEQ ID NO: 3985211 - DNA, 25 bp, Homo sapien
actgctggggcgttcgaaatttcca

SEQ ID NO: 3985212 - DNA, 25 bp, Homo sapien
gcgatgactgccctgaactgctggg

SEQ ID NO: 3985213 - DNA, 25 bp, Homo sapien
gcccgaggtcacagcgcggagaaac

SEQ ID NO: 3985214 - DNA, 25 bp, Homo sapien
actccccggcttgggaaaagcgatg

SEQ ID NO: 3985215 - DNA, 25 bp, Homo sapien
gcgacttcggcgcagatgtcagtcc

SEQ ID NO: 3985216 - DNA, 25 bp, Homo sapien
cagtccgctgccttccgggttgagg

SEQ ID NO: 3985217 - DNA, 25 bp, Homo sapien
ccgggttgagggagcgaggactcca

SEQ ID NO: 3985218 - DNA, 25 bp, Homo sapien
gcagatgtcagtccgctgccttccg

SEQ ID NO: 3985219 - DNA, 25 bp, Homo sapien
cgagatgtcccgagccgagcaaagg

SEQ ID NO: 3985220 - DNA, 25 bp, Homo sapien
aagaccgcgagcgactgtggactcg

SEQ ID NO: 3985221 - DNA, 25 bp, Homo sapien
ccagacgaggctacggacttagggt

SEQ ID NO: 3985222 - DNA, 25 bp, Homo sapien
gatctcttgcgcagtgtagtcgccc

SEQ ID NO: 3985223 - DNA, 25 bp, Homo sapien
ccacgtgttggcgttgaaggccttg

SEQ ID NO: 3985224 - DNA, 25 bp, Homo sapien
cgccctgggcgtctagaacctgtgc

SEQ ID NO: 3985225 - DNA, 25 bp, Homo sapien
tggtgacagccccacgtgttggcgt

SEQ ID NO: 3985226 - DNA, 25 bp, Homo sapien
gctgactccaaagagccttagagca

SEQ ID NO: 3985227 - DNA, 25 bp, Homo sapien
ctgtccccttagctgtttctgggca

SEQ ID NO: 3985228 - DNA, 25 bp, Homo sapien
actcagagacttccgggtgctttgc

SEQ ID NO: 3985229 - DNA, 25 bp, Homo sapien
ggagaatggaaagtccagtacccac

SEQ ID NO: 3985230 - DNA, 25 bp, Homo sapien
cagtacccactcagagacttccggg

SEQ ID NO: 3985231 - DNA, 25 bp, Homo sapien
ccaggaaagtcacgaaaattggtca

SEQ ID NO: 3985232 - DNA, 25 bp, Homo sapien
caggaaagtcacgaaaattggtcat

SEQ ID NO: 3985233 - DNA, 25 bp, Homo sapien
ctctggttgtcccagtcagccagag

SEQ ID NO: 3985234 - DNA, 25 bp, Homo sapien
tccaggaaagtcacgaaaattggtc

SEQ ID NO: 3985235 - DNA, 25 bp, Homo sapien
atgtgaaagtcgagtaggaagtcgc

SEQ ID NO: 3985236 - DNA, 25 bp, Homo sapien
caggccccagtttagtatcagactg

SEQ ID NO: 3985237 - DNA, 25 bp, Homo sapien
aagtcgagtaggaagtcgcattgag

SEQ ID NO: 3985238 - DNA, 25 bp, Homo sapien
tagtatcagactgacaatcctgtaa

SEQ ID NO: 3985239 - DNA, 25 bp, Homo sapien
ctgctccgttcgtaggttgccacct

SEQ ID NO: 3985240 - DNA, 25 bp, Homo sapien
tccatctccccccagtaagcagctg

SEQ ID NO: 3985241 - DNA, 25 bp, Homo sapien
tccgttcgtaggttgccacctgtat

SEQ ID NO: 3985242 - DNA, 25 bp, Homo sapien
tcgtaggttgccacctgtatgtctc

SEQ ID NO: 3985243 - DNA, 25 bp, Homo sapien
aaggccatgttttgtccagccatca

SEQ ID NO: 3985244 - DNA, 25 bp, Homo sapien
ggaaggccatgttttgtccagccat

SEQ ID NO: 3985245 - DNA, 25 bp, Homo sapien
ggtgttggtattgccataatttcca

SEQ ID NO: 3985246 - DNA, 25 bp, Homo sapien
cttttctgaggtgttggtattgcca

SEQ ID NO: 3985247 - DNA, 25 bp, Homo sapien
cacactcgaaatggttgagagagat

SEQ ID NO: 3985248 - DNA, 25 bp, Homo sapien
gaaagtttctgagcacaacaggaaa

SEQ ID NO: 3985249 - DNA, 25 bp, Homo sapien
gattatttctaccagaggagttggc

SEQ ID NO: 3985250 - DNA, 25 bp, Homo sapien
gaaggccaatatcacactcgaaatg

SEQ ID NO: 3985251 - DNA, 25 bp, Homo sapien
gagagtccacatcacacccaatgag

SEQ ID NO: 3985252 - DNA, 25 bp, Homo sapien
gaggtccctgggcacaccctttatg

SEQ ID NO: 3985253 - DNA, 25 bp, Homo sapien
gagtaatacctgagccagagagtcc

SEQ ID NO: 3985254 - DNA, 25 bp, Homo sapien
catggaagcttctcgatgcaccaag

SEQ ID NO: 3985255 - DNA, 25 bp, Homo sapien
tgagctctgctcaaatgccgaggtg

SEQ ID NO: 3985256 - DNA, 25 bp, Homo sapien
gccgaggtgaataaatgcagcgctt

SEQ ID NO: 3985257 - DNA, 25 bp, Homo sapien
tctcccaaattgtgaaacgtagttc

SEQ ID NO: 3985258 - DNA, 25 bp, Homo sapien
tgtgcttgtgaaatgtacacccacc

SEQ ID NO: 3985259 - DNA, 25 bp, Homo sapien
gaattgtccagagaagctaaccagt

SEQ ID NO: 3985260 - DNA, 25 bp, Homo sapien
tatttcagatcgtgagaccaggtca

SEQ ID NO: 3985261 - DNA, 25 bp, Homo sapien
caggtcagaagggtcgttacgctca

SEQ ID NO: 3985262 - DNA, 25 bp, Homo sapien
tttgaataccacacagaccagcgac

SEQ ID NO: 3985263 - DNA, 25 bp, Homo sapien
tgagccagaacgagtatccgtaact

SEQ ID NO: 3985264 - DNA, 25 bp, Homo sapien
cagaataaaattccgtcccttggag

SEQ ID NO: 3985265 - DNA, 25 bp, Homo sapien
gaatgacgagcagtatgagccagaa

SEQ ID NO: 3985266 - DNA, 25 bp, Homo sapien
tggactgcgtgttcgccacaaacag

SEQ ID NO: 3985267 - DNA, 25 bp, Homo sapien
tacactcttttaagcactagggaga

SEQ ID NO: 3985268 - DNA, 25 bp, Homo sapien
cacttcctaggtggtgaatgcagta

SEQ ID NO: 3985269 - DNA, 25 bp, Homo sapien
gaatgtgctgactcaaacgctttca

SEQ ID NO: 3985270 - DNA, 25 bp, Homo sapien
tgtgcagggctgtgtatgaccaata

SEQ ID NO: 3985271 - DNA, 25 bp, Homo sapien
caccgagcccgttccaggtgtacac

SEQ ID NO: 3985272 - DNA, 25 bp, Homo sapien
aggaatgtctggtaagggttgctga

SEQ ID NO: 3985273 - DNA, 25 bp, Homo sapien
aatgtctggtaagggttgctgatgc

SEQ ID NO: 3985274 - DNA, 25 bp, Homo sapien
ccaggaatgtctggtaagggttgct

SEQ ID NO: 3985275 - DNA, 25 bp, Homo sapien
gatagtcaccgaatgcagagttttt

SEQ ID NO: 3985276 - DNA, 25 bp, Homo sapien
ggaccaggaacaggatagtcaccga

SEQ ID NO: 3985277 - DNA, 25 bp, Homo sapien
caggaacaggatagtcaccgaatgc

SEQ ID NO: 3985278 - DNA, 25 bp, Homo sapien
aacaggatagtcaccgaatgcagag

SEQ ID NO: 3985279 - DNA, 25 bp, Homo sapien
catgcaagaacaagacccgcattcc

SEQ ID NO: 3985280 - DNA, 25 bp, Homo sapien
tgctgattttgaagtctcctaggaa

SEQ ID NO: 3985281 - DNA, 25 bp, Homo sapien
taaccgcgacactacagataactgg

SEQ ID NO: 3985282 - DNA, 25 bp, Homo sapien
acaatgttttgtgagtgcatagcac

SEQ ID NO: 3985283 - DNA, 25 bp, Homo sapien
gccttcccattactgagctcgggct

SEQ ID NO: 3985284 - DNA, 25 bp, Homo sapien
ttcctggataccggcagcagggctg

SEQ ID NO: 3985285 - DNA, 25 bp, Homo sapien
gcttttcccagtttcatcagtgccc

SEQ ID NO: 3985286 - DNA, 25 bp, Homo sapien
ggctccgtccttgccaaggtgcttt

SEQ ID NO: 3985287 - DNA, 25 bp, Homo sapien
tgtgcactgtgagaatcccacaagc

SEQ ID NO: 3985288 - DNA, 25 bp, Homo sapien
gcatctggggtaattgcatgagtca

SEQ ID NO: 3985289 - DNA, 25 bp, Homo sapien
gagaatcccacaagccctgtggcat

SEQ ID NO: 3985290 - DNA, 25 bp, Homo sapien
ggtcaccctgaaaacctgtgcactg

SEQ ID NO: 3985291 - DNA, 25 bp, Homo sapien
tacttcagactccacttccctgggg

SEQ ID NO: 3985292 - DNA, 25 bp, Homo sapien
tctgttggtgcaaatcgagttgtgg

SEQ ID NO: 3985293 - DNA, 25 bp, Homo sapien
gaaggctgacataagaaaatgactt

SEQ ID NO: 3985294 - DNA, 25 bp, Homo sapien
tcgagttgtgggtcctacttcagac

SEQ ID NO: 3985295 - DNA, 25 bp, Homo sapien
ccagcccagccacgggctgacaggg

SEQ ID NO: 3985296 - DNA, 25 bp, Homo sapien
cagccacgggctgacagggtgtgtg

SEQ ID NO: 3985297 - DNA, 25 bp, Homo sapien
cccagccacgggctgacagggtgtg

SEQ ID NO: 3985298 - DNA, 25 bp, Homo sapien
gccacgggctgacagggtgtgtgag

SEQ ID NO: 3985299 - DNA, 25 bp, Homo sapien
cagtggataatgggcgcccatgaga

SEQ ID NO: 3985300 - DNA, 25 bp, Homo sapien
gagagccatccggacatctgggctc

SEQ ID NO: 3985301 - DNA, 25 bp, Homo sapien
ataatgggcgcccatgagagccatc

SEQ ID NO: 3985302 - DNA, 25 bp, Homo sapien
aaacgtgctgttgggcagtggataa

SEQ ID NO: 3985303 - DNA, 25 bp, Homo sapien
cgctgtaggcaacgtgattgctcaa

SEQ ID NO: 3985304 - DNA, 25 bp, Homo sapien
tgtaggcaacgtgattgctcaaagt

SEQ ID NO: 3985305 - DNA, 25 bp, Homo sapien
aggcaacgtgattgctcaaagtccc

SEQ ID NO: 3985306 - DNA, 25 bp, Homo sapien
ttccgctgtaggcaacgtgattgct

SEQ ID NO: 3985307 - DNA, 25 bp, Homo sapien
tgttgtagtgtattcctgtaatccc

SEQ ID NO: 3985308 - DNA, 25 bp, Homo sapien
gtgttgtagtgtattcctgtaatcc

SEQ ID NO: 3985309 - DNA, 25 bp, Homo sapien
ctccagtctgggtgtgaagcagcct

SEQ ID NO: 3985310 - DNA, 25 bp, Homo sapien
gaagcagcctgggtgatgaaaaaac

SEQ ID NO: 3985311 - DNA, 25 bp, Homo sapien
ccttcagggctctccttgacaagtg

SEQ ID NO: 3985312 - DNA, 25 bp, Homo sapien
ggtcccctgacatcaccatgctcac

SEQ ID NO: 3985313 - DNA, 25 bp, Homo sapien
gctctccttgacaagtgcctgctct

SEQ ID NO: 3985314 - DNA, 25 bp, Homo sapien
gctctggtcccctgacatcaccatg

SEQ ID NO: 3985315 - DNA, 25 bp, Homo sapien
gagtctctaacagcaattgtactgg

SEQ ID NO: 3985316 - DNA, 25 bp, Homo sapien
gacccaaggctggtgaaaaagcttg

SEQ ID NO: 3985317 - DNA, 25 bp, Homo sapien
gaaaatgctcccatttgaagcagag

SEQ ID NO: 3985318 - DNA, 25 bp, Homo sapien
tagagcaaattacaatgaaggaccc

SEQ ID NO: 3985319 - DNA, 25 bp, Homo sapien
ttgaagtctggtatttagaaatgga

SEQ ID NO: 3985320 - DNA, 25 bp, Homo sapien
tcttcctgaggaagggttatgctaa

SEQ ID NO: 3985321 - DNA, 25 bp, Homo sapien
ttagaaatggagtctaacactttat

SEQ ID NO: 3985322 - DNA, 25 bp, Homo sapien
tcttataacacttttgaaccttatc

SEQ ID NO: 3985323 - DNA, 25 bp, Homo sapien
gagggtgttattgtctttacgtgtg

SEQ ID NO: 3985324 - DNA, 25 bp, Homo sapien
ttgagggaagtcgatgagggtgtta

SEQ ID NO: 3985325 - DNA, 25 bp, Homo sapien
ttattgtctttacgtgtgatgcttc

SEQ ID NO: 3985326 - DNA, 25 bp, Homo sapien
aagtcgatgagggtgttattgtctt

SEQ ID NO: 3985327 - DNA, 25 bp, Homo sapien
ggcattcattcttcaatatgcacca

SEQ ID NO: 3985328 - DNA, 25 bp, Homo sapien
tatgcaccattgactccagtgatcg

SEQ ID NO: 3985329 - DNA, 25 bp, Homo sapien
cagtgatcgatgaggcagaaatgca

SEQ ID NO: 3985330 - DNA, 25 bp, Homo sapien
caacttgctgtgcacattaaccagg

SEQ ID NO: 3985331 - DNA, 25 bp, Homo sapien
atgtgggctaggagacccctggttt

SEQ ID NO: 3985332 - DNA, 25 bp, Homo sapien
gtttggggattatgaaggcagcctc

SEQ ID NO: 3985333 - DNA, 25 bp, Homo sapien
ctgaggcaataagagttggtcgaat

SEQ ID NO: 3985334 - DNA, 25 bp, Homo sapien
agagttggtcgaatgttaccaatcc

SEQ ID NO: 3985335 - DNA, 25 bp, Homo sapien
tagttaccgccctcaagaatctgct

SEQ ID NO: 3985336 - DNA, 25 bp, Homo sapien
tacctggtccaggtacagaggacac

SEQ ID NO: 3985337 - DNA, 25 bp, Homo sapien
ccagttccctgttgggcgtaggcag

SEQ ID NO: 3985338 - DNA, 25 bp, Homo sapien
tgagtgtgacgtttccagagggttc

SEQ ID NO: 3985339 - DNA, 25 bp, Homo sapien
cagccttttgcgcatggcacgcagg

SEQ ID NO: 3985340 - DNA, 25 bp, Homo sapien
ggcacgcaggctcatcattgcagct

SEQ ID NO: 3985341 - DNA, 25 bp, Homo sapien
tgaaaattaacatgccgcgttgaag

SEQ ID NO: 3985342 - DNA, 25 bp, Homo sapien
tacacaggtggaacggtaagaacag

SEQ ID NO: 3985343 - DNA, 25 bp, Homo sapien
cattgtattgcttcaccgttgagag

SEQ ID NO: 3985344 - DNA, 25 bp, Homo sapien
cctttcagtaagtaagacgctatcc

SEQ ID NO: 3985345 - DNA, 25 bp, Homo sapien
gctgggctacctctctacatgggaa

SEQ ID NO: 3985346 - DNA, 25 bp, Homo sapien
gagcaccaaccatgtctgcagagga

SEQ ID NO: 3985347 - DNA, 25 bp, Homo sapien
tgccagcaggcaatatcttcatcct

SEQ ID NO: 3985348 - DNA, 25 bp, Homo sapien
tggatgtgtgttaccagatcttcgc

SEQ ID NO: 3985349 - DNA, 25 bp, Homo sapien
aatcccagggcgctctgcgttggaa

SEQ ID NO: 3985350 - DNA, 25 bp, Homo sapien
cagatcttcgctgaagcagggcact

SEQ ID NO: 3985351 - DNA, 25 bp, Homo sapien
taaaacttcccgttctgctgtagca

SEQ ID NO: 3985352 - DNA, 25 bp, Homo sapien
taaaagggaatcattcccgcagtta

SEQ ID NO: 3985353 - DNA, 25 bp, Homo sapien
ggtttttcatcatgctttactttta

SEQ ID NO: 3985354 - DNA, 25 bp, Homo sapien
ttcccgcagttaaagaattcatctt

SEQ ID NO: 3985355 - DNA, 25 bp, Homo sapien
ctgtggcaaacacgagtgcatatta

SEQ ID NO: 3985356 - DNA, 25 bp, Homo sapien
tggcaaacacgagtgcatattagtt

SEQ ID NO: 3985357 - DNA, 25 bp, Homo sapien
caaacacgagtgcatattagttttc

SEQ ID NO: 3985358 - DNA, 25 bp, Homo sapien
tgtggcaaacacgagtgcatattag

SEQ ID NO: 3985359 - DNA, 25 bp, Homo sapien
tgtacatccaggcttccttggtttg

SEQ ID NO: 3985360 - DNA, 25 bp, Homo sapien
taaagctcccactgatgctcctgaa

SEQ ID NO: 3985361 - DNA, 25 bp, Homo sapien
gtggccacaaaccccgaatccctca

SEQ ID NO: 3985362 - DNA, 25 bp, Homo sapien
gaagccttgatctgtacatccaggc

SEQ ID NO: 3985363 - DNA, 25 bp, Homo sapien
acaggcagactggaatgaccgtgcc

SEQ ID NO: 3985364 - DNA, 25 bp, Homo sapien
agactggaatgaccgtgcccactgc

SEQ ID NO: 3985365 - DNA, 25 bp, Homo sapien
ggcagactggaatgaccgtgcccac

SEQ ID NO: 3985366 - DNA, 25 bp, Homo sapien
actggaatgaccgtgcccactgctg

SEQ ID NO: 3985367 - DNA, 25 bp, Homo sapien
gatgttctgcctttgacctactatg

SEQ ID NO: 3985368 - DNA, 25 bp, Homo sapien
tccatggagtatcccctacagagct

SEQ ID NO: 3985369 - DNA, 25 bp, Homo sapien
tggtcgtgcatattgtagctcatga

SEQ ID NO: 3985370 - DNA, 25 bp, Homo sapien
caccttgaggtgaagatgggccagg

SEQ ID NO: 3985371 - DNA, 25 bp, Homo sapien
tatgtggccgatcctgctcaagggc

SEQ ID NO: 3985372 - DNA, 25 bp, Homo sapien
tgaacccagcataactgcagtccgt

SEQ ID NO: 3985373 - DNA, 25 bp, Homo sapien
gattgctcttgaagttgaacccagc

SEQ ID NO: 3985374 - DNA, 25 bp, Homo sapien
tcctgttgagaccactccttgcaaa

SEQ ID NO: 3985375 - DNA, 25 bp, Homo sapien
tgagccacaggattagtgctggccc

SEQ ID NO: 3985376 - DNA, 25 bp, Homo sapien
tcctggtgtcggcgttctgctgctg

SEQ ID NO: 3985377 - DNA, 25 bp, Homo sapien
catcagcgggctcctggtgtcggcg

SEQ ID NO: 3985378 - DNA, 25 bp, Homo sapien
ctggaccccacggaagaagctgtct

SEQ ID NO: 3985379 - DNA, 25 bp, Homo sapien
gaccccacggaagaagctgtctcca

SEQ ID NO: 3985380 - DNA, 25 bp, Homo sapien
gaaaaggagcttctccggattgcat

SEQ ID NO: 3985381 - DNA, 25 bp, Homo sapien
tgatctgctctagagaaaactgctg

SEQ ID NO: 3985382 - DNA, 25 bp, Homo sapien
tctgaccagcgttcaggagcgcagg

SEQ ID NO: 3985383 - DNA, 25 bp, Homo sapien
aaagcagtgtcagtggtgtcgcata

SEQ ID NO: 3985384 - DNA, 25 bp, Homo sapien
tcagacccggcggtgcatcaggatg

SEQ ID NO: 3985385 - DNA, 25 bp, Homo sapien
tgccaaatgcaagggccgtgggtgg

SEQ ID NO: 3985386 - DNA, 25 bp, Homo sapien
aggatgaggtctcgtgccaaatgca

SEQ ID NO: 3985387 - DNA, 25 bp, Homo sapien
tgcaagggccgtgggtggaccagtc

SEQ ID NO: 3985388 - DNA, 25 bp, Homo sapien
ggaactcaccctcaactgcagcacc

SEQ ID NO: 3985389 - DNA, 25 bp, Homo sapien
aggaactcaccctcaactgcagcac

SEQ ID NO: 3985390 - DNA, 25 bp, Homo sapien
gaactcaccctcaactgcagcacca

SEQ ID NO: 3985391 - DNA, 25 bp, Homo sapien
tcaggaaacacccgagttaccctca

SEQ ID NO: 3985392 - DNA, 25 bp, Homo sapien
caggaaacacccgagttaccctcag

SEQ ID NO: 3985393 - DNA, 25 bp, Homo sapien
atcagtaaaccccatgaccctttgg

SEQ ID NO: 3985394 - DNA, 25 bp, Homo sapien
gctgttctgtcgctggctctgctcg

SEQ ID NO: 3985395 - DNA, 25 bp, Homo sapien
ccgctgacagccagagcctatgtgt

SEQ ID NO: 3985396 - DNA, 25 bp, Homo sapien
gatggcagtgttgcctctcgcctga

SEQ ID NO: 3985397 - DNA, 25 bp, Homo sapien
gggcctgctcctggctgctggagcc

SEQ ID NO: 3985398 - DNA, 25 bp, Homo sapien
cagaaggatggatacaggaagggcc

SEQ ID NO: 3985399 - DNA, 25 bp, Homo sapien
aaggatggatacaggaagggccagg

SEQ ID NO: 3985400 - DNA, 25 bp, Homo sapien
aagggccagggcctgctcctggctg

SEQ ID NO: 3985401 - DNA, 25 bp, Homo sapien
ttattgcaaacttcaccacgtggag

SEQ ID NO: 3985402 - DNA, 25 bp, Homo sapien
ttgatacagagttccgtctttattg

SEQ ID NO: 3985403 - DNA, 25 bp, Homo sapien
gctatgttgatacagagttccgtct

SEQ ID NO: 3985404 - DNA, 25 bp, Homo sapien
tggagctggaagacgtctgagttca

SEQ ID NO: 3985405 - DNA, 25 bp, Homo sapien
ggctggtagtcagcttcctccagga

SEQ ID NO: 3985406 - DNA, 25 bp, Homo sapien
tccaggaagaaggcatctctcacca

SEQ ID NO: 3985407 - DNA, 25 bp, Homo sapien
ttgcactggggctggtagtcagctt

SEQ ID NO: 3985408 - DNA, 25 bp, Homo sapien
ctgctgcttacaggggttgcactgg

SEQ ID NO: 3985409 - DNA, 25 bp, Homo sapien
gcgcatgcgcggaagcgtccccgta

SEQ ID NO: 3985410 - DNA, 25 bp, Homo sapien
ccgggcttcaagcttggcgcatgcg

SEQ ID NO: 3985411 - DNA, 25 bp, Homo sapien
gcatgcgcggaagcgtccccgtagc

SEQ ID NO: 3985412 - DNA, 25 bp, Homo sapien
cttctggtcacctctggcatagcac

SEQ ID NO: 3985413 - DNA, 25 bp, Homo sapien
ccctctgcatttgacgagccactat

SEQ ID NO: 3985414 - DNA, 25 bp, Homo sapien
tgcatttgacgagccactataaacc

SEQ ID NO: 3985415 - DNA, 25 bp, Homo sapien
tggctgggcgtccatttgtggaact

SEQ ID NO: 3985416 - DNA, 25 bp, Homo sapien
cttggcttgttggcgctcccagtga

SEQ ID NO: 3985417 - DNA, 25 bp, Homo sapien
gacatccactgggcgtccttccaca

SEQ ID NO: 3985418 - DNA, 25 bp, Homo sapien
cagacatccactgggcgtccttcca

SEQ ID NO: 3985419 - DNA, 25 bp, Homo sapien
acatccactgggcgtccttccacaa

SEQ ID NO: 3985420 - DNA, 25 bp, Homo sapien
agacatccactgggcgtccttccac

SEQ ID NO: 3985421 - DNA, 25 bp, Homo sapien
caggtgagggataaagtacccggca

SEQ ID NO: 3985422 - DNA, 25 bp, Homo sapien
actcgggcatcctgcatgcttcgca

SEQ ID NO: 3985423 - DNA, 25 bp, Homo sapien
ttctcggagctccactcggactcca

SEQ ID NO: 3985424 - DNA, 25 bp, Homo sapien
gcatgcttcgcatcacacacaggga

SEQ ID NO: 3985425 - DNA, 25 bp, Homo sapien
acgcccacaacagatccagtgcctg

SEQ ID NO: 3985426 - DNA, 25 bp, Homo sapien
gctgggcttctcacgcccacaacag

SEQ ID NO: 3985427 - DNA, 25 bp, Homo sapien
acaggagggtctggcacaaactcgc

SEQ ID NO: 3985428 - DNA, 25 bp, Homo sapien
gggtctggcacaaactcgctgggct

SEQ ID NO: 3985429 - DNA, 25 bp, Homo sapien
catcctgctgcatcctgagcgggca

SEQ ID NO: 3985430 - DNA, 25 bp, Homo sapien
tcctgctgcatcctgagcgggcagt

SEQ ID NO: 3985431 - DNA, 25 bp, Homo sapien
tgccatcctgctgcatcctgagcgg

SEQ ID NO: 3985432 - DNA, 25 bp, Homo sapien
atcctgagcgggcagtgggtttcca

SEQ ID NO: 3985433 - DNA, 25 bp, Homo sapien
agacagggaggcacacagcgcagtg

SEQ ID NO: 3985434 - DNA, 25 bp, Homo sapien
gcacacagcgcagtggatggccagc

SEQ ID NO: 3985435 - DNA, 25 bp, Homo sapien
aggcacacagcgcagtggatggcca

SEQ ID NO: 3985436 - DNA, 25 bp, Homo sapien
cagggaggcacacagcgcagtggat

SEQ ID NO: 3985437 - DNA, 25 bp, Homo sapien
gctgagtttgcagtttcccgcagca

SEQ ID NO: 3985438 - DNA, 25 bp, Homo sapien
tggcagagaccgtgtccactcagca

SEQ ID NO: 3985439 - DNA, 25 bp, Homo sapien
ccttcccaggaagacttggtggcag

SEQ ID NO: 3985440 - DNA, 25 bp, Homo sapien
aaacaccaccgttcgctttgctgag

SEQ ID NO: 3985441 - DNA, 25 bp, Homo sapien
gacccaaagtcaggatcacggagcc

SEQ ID NO: 3985442 - DNA, 25 bp, Homo sapien
tcaaaatgaatacaggcagtccctg

SEQ ID NO: 3985443 - DNA, 25 bp, Homo sapien
tcacggagcctgatcctgtgtctgg

SEQ ID NO: 3985444 - DNA, 25 bp, Homo sapien
tggccatgtcctgagtccacgttga

SEQ ID NO: 3985445 - DNA, 25 bp, Homo sapien
gataactgatcgcaccctcatgttg

SEQ ID NO: 3985446 - DNA, 25 bp, Homo sapien
cctcatgttgcagtgttcgtcccct

SEQ ID NO: 3985447 - DNA, 25 bp, Homo sapien
ttcgtcccctattcattaacagtgt

SEQ ID NO: 3985448 - DNA, 25 bp, Homo sapien
cagtgtgtgcaaatgcaaccccagg

SEQ ID NO: 3985449 - DNA, 25 bp, Homo sapien
tccaagggcaagacttggtgcccag

SEQ ID NO: 3985450 - DNA, 25 bp, Homo sapien
agggaatcaagcttctcgcccactc

SEQ ID NO: 3985451 - DNA, 25 bp, Homo sapien
gcccagctggaaggacgaaagcaca

SEQ ID NO: 3985452 - DNA, 25 bp, Homo sapien
tccttctctgtacaatgattcagca

SEQ ID NO: 3985453 - DNA, 25 bp, Homo sapien
gaggaaaatggagctttttgaggct

SEQ ID NO: 3985454 - DNA, 25 bp, Homo sapien
ggagctttttgaggctcgccaggtc

SEQ ID NO: 3985455 - DNA, 25 bp, Homo sapien
tgaggctcgccaggtcccttttgtt

SEQ ID NO: 3985456 - DNA, 25 bp, Homo sapien
aatggagctttttgaggctcgccag

SEQ ID NO: 3985457 - DNA, 25 bp, Homo sapien
tcagcacctgaaccctagaaaaaga

SEQ ID NO: 3985458 - DNA, 25 bp, Homo sapien
ccagtttgctacgatgaaggtgaca

SEQ ID NO: 3985459 - DNA, 25 bp, Homo sapien
ctttggttcatgtctaggagccctc

SEQ ID NO: 3985460 - DNA, 25 bp, Homo sapien
tgaagccctttaatggtctaactgg

SEQ ID NO: 3985461 - DNA, 25 bp, Homo sapien
tctgatctgtgtgtgatctggtcac

SEQ ID NO: 3985462 - DNA, 25 bp, Homo sapien
gtgtttcagcatttggagacatccc

SEQ ID NO: 3985463 - DNA, 25 bp, Homo sapien
catgcagttgggttcaaatgccaaa

SEQ ID NO: 3985464 - DNA, 25 bp, Homo sapien
ccaaatagtgattagaagacgacca

SEQ ID NO: 3985465 - DNA, 25 bp, Homo sapien
tcttccaacaggctcgtgtgggtga

SEQ ID NO: 3985466 - DNA, 25 bp, Homo sapien
attgcttccccgaccaacctggaat

SEQ ID NO: 3985467 - DNA, 25 bp, Homo sapien
tccatatggctgtcgtcttccaaca

SEQ ID NO: 3985468 - DNA, 25 bp, Homo sapien
gcacagacggtgcacacacatggcc

SEQ ID NO: 3985469 - DNA, 25 bp, Homo sapien
tgtttgttcttcaggtgacatcgag

SEQ ID NO: 3985470 - DNA, 25 bp, Homo sapien
agggagcctgtccagtcacggagcc

SEQ ID NO: 3985471 - DNA, 25 bp, Homo sapien
catacacaggtgtatcacgcaggga

SEQ ID NO: 3985472 - DNA, 25 bp, Homo sapien
tcttcaggtgacatcgagagctccc

SEQ ID NO: 3985473 - DNA, 25 bp, Homo sapien
gcccttgcagggcaacacacaacaa

SEQ ID NO: 3985474 - DNA, 25 bp, Homo sapien
caattacccggctcagggcttgaca

SEQ ID NO: 3985475 - DNA, 25 bp, Homo sapien
tgacatcacagatgtgggacttgcc

SEQ ID NO: 3985476 - DNA, 25 bp, Homo sapien
gaaagatgagtcaagcaggtatcca

SEQ ID NO: 3985477 - DNA, 25 bp, Homo sapien
gccgtttgccatgttaattcttgat

SEQ ID NO: 3985478 - DNA, 25 bp, Homo sapien
tacagtttactttatggagtcgccg

SEQ ID NO: 3985479 - DNA, 25 bp, Homo sapien
cagtaggatctcagccacacgaaat

SEQ ID NO: 3985480 - DNA, 25 bp, Homo sapien
ctgggagcacctggacagcacagaa

SEQ ID NO: 3985481 - DNA, 25 bp, Homo sapien
cagtttgaggtcgtgatggcccaca

SEQ ID NO: 3985482 - DNA, 25 bp, Homo sapien
catggatgacgctgtgagaacccta

SEQ ID NO: 3985483 - DNA, 25 bp, Homo sapien
ggtccctaaagatgtgctcacgagt

SEQ ID NO: 3985484 - DNA, 25 bp, Homo sapien
tgttctcaaatccagtcagcctagg

SEQ ID NO: 3985485 - DNA, 25 bp, Homo sapien
aagctccattcatccgtgcgctcat

SEQ ID NO: 3985486 - DNA, 25 bp, Homo sapien
ccccggccattggaaagacagatct

SEQ ID NO: 3985487 - DNA, 25 bp, Homo sapien
gacatcaaaaataggactgtcctgt

SEQ ID NO: 3985488 - DNA, 25 bp, Homo sapien
tgtgcagatgtccaatagccttaat

SEQ ID NO: 3985489 - DNA, 25 bp, Homo sapien
gggacagacgaggatagttgttcct

SEQ ID NO: 3985490 - DNA, 25 bp, Homo sapien
gtttaccgagtgcctgctcagtgtt

SEQ ID NO: 3985491 - DNA, 25 bp, Homo sapien
cagtgttgggacagacgaggatagt

SEQ ID NO: 3985492 - DNA, 25 bp, Homo sapien
tgttgggacagacgaggatagttgt

SEQ ID NO: 3985493 - DNA, 25 bp, Homo sapien
tgaagccgattcagacccagcaaat

SEQ ID NO: 3985494 - DNA, 25 bp, Homo sapien
aactattctcagtccaggagcccag

SEQ ID NO: 3985495 - DNA, 25 bp, Homo sapien
ggaggacataggcaaacaaacgacg

SEQ ID NO: 3985496 - DNA, 25 bp, Homo sapien
tcccagtggagtttatgaagccgat

SEQ ID NO: 3985497 - DNA, 25 bp, Homo sapien
caaatatcttcactgtccctatgac

SEQ ID NO: 3985498 - DNA, 25 bp, Homo sapien
ctgtccctatgacttctggttctta

SEQ ID NO: 3985499 - DNA, 25 bp, Homo sapien
tattttcttgacacacacattgtcc

SEQ ID NO: 3985500 - DNA, 25 bp, Homo sapien
gttcttattttcttgacacacacat

SEQ ID NO: 3985501 - DNA, 25 bp, Homo sapien
cagttgaagcttcctagtttgtgcc

SEQ ID NO: 3985502 - DNA, 25 bp, Homo sapien
gctacatgagtttcgtttgctgaac

SEQ ID NO: 3985503 - DNA, 25 bp, Homo sapien
ccgaagagggtctgtctggacagct

SEQ ID NO: 3985504 - DNA, 25 bp, Homo sapien
cagaattctgtatctgaagaggtta

SEQ ID NO: 3985505 - DNA, 25 bp, Homo sapien
ttgacactccgcgttactctctgca

SEQ ID NO: 3985506 - DNA, 25 bp, Homo sapien
gcatgagaaccttcgcactcttctg

SEQ ID NO: 3985507 - DNA, 25 bp, Homo sapien
ttcttgatctcaggcacatggagtc

SEQ ID NO: 3985508 - DNA, 25 bp, Homo sapien
cctttctgattctgcatgagaacct

SEQ ID NO: 3985509 - DNA, 25 bp, Homo sapien
ctttgtctctaggtatgggtttccg

SEQ ID NO: 3985510 - DNA, 25 bp, Homo sapien
tctctaggtatgggtttccgggctc

SEQ ID NO: 3985511 - DNA, 25 bp, Homo sapien
tgtctctaggtatgggtttccgggc

SEQ ID NO: 3985512 - DNA, 25 bp, Homo sapien
attttggcgtctggagcgcagggat

SEQ ID NO: 3985513 - DNA, 25 bp, Homo sapien
ttttggcgtctggagcgcagggata

SEQ ID NO: 3985514 - DNA, 25 bp, Homo sapien
caaggtaatgccttggtactttgct

SEQ ID NO: 3985515 - DNA, 25 bp, Homo sapien
aaggtaatgccttggtactttgctc

SEQ ID NO: 3985516 - DNA, 25 bp, Homo sapien
tcaaggtaatgccttggtactttgc

SEQ ID NO: 3985517 - DNA, 25 bp, Homo sapien
ggttcggatgatttgcctcttgccc

SEQ ID NO: 3985518 - DNA, 25 bp, Homo sapien
cagggaccgagtcttgtaatttgtg

SEQ ID NO: 3985519 - DNA, 25 bp, Homo sapien
gtgctggcatgcagcgcagcctctt

SEQ ID NO: 3985520 - DNA, 25 bp, Homo sapien
ggttttcatgtcgttgctgttcagc

SEQ ID NO: 3985521 - DNA, 25 bp, Homo sapien
tacagggtctctggtgcttaccacg

SEQ ID NO: 3985522 - DNA, 25 bp, Homo sapien
tcaaccaggtcttctagagcacggg

SEQ ID NO: 3985523 - DNA, 25 bp, Homo sapien
gctttgccagcagtcagtgattcct

SEQ ID NO: 3985524 - DNA, 25 bp, Homo sapien
tgtctgcatccgtggtttcccctga

SEQ ID NO: 3985525 - DNA, 25 bp, Homo sapien
gattcctgcacgctaagagttctcc

SEQ ID NO: 3985526 - DNA, 25 bp, Homo sapien
gatatcttgagtcgttgcttggagc

SEQ ID NO: 3985527 - DNA, 25 bp, Homo sapien
ttctttgaagccaaccaggtcctct

SEQ ID NO: 3985528 - DNA, 25 bp, Homo sapien
cagttccatagtttgctgggtccag

SEQ ID NO: 3985529 - DNA, 25 bp, Homo sapien
cccagggatgccttcaactgttgtt

SEQ ID NO: 3985530 - DNA, 25 bp, Homo sapien
cttaaacgttctgatgctcttgcca

SEQ ID NO: 3985531 - DNA, 25 bp, Homo sapien
gagacttctcttaggccattgcttt

SEQ ID NO: 3985532 - DNA, 25 bp, Homo sapien
tggtctcccctgacgtccgtgtgaa

SEQ ID NO: 3985533 - DNA, 25 bp, Homo sapien
tgtagaccttcctgacctgtttgca

SEQ ID NO: 3985534 - DNA, 25 bp, Homo sapien
gccacgtgccgtgtctttcatgagt

SEQ ID NO: 3985535 - DNA, 25 bp, Homo sapien
gtcaggtcagacattggtgcacatt

SEQ ID NO: 3985536 - DNA, 25 bp, Homo sapien
taatacactgccgtcttaagggagg

SEQ ID NO: 3985537 - DNA, 25 bp, Homo sapien
tgcttgtcaactgcggttgctcctt

SEQ ID NO: 3985538 - DNA, 25 bp, Homo sapien
caactgcggttgctccttcactggg

SEQ ID NO: 3985539 - DNA, 25 bp, Homo sapien
tctctgaatttgaaatagcgatgtg

SEQ ID NO: 3985540 - DNA, 25 bp, Homo sapien
gcgatgtgacatgtgcttgtcaact

SEQ ID NO: 3985541 - DNA, 25 bp, Homo sapien
ctctggagcacggaggctggtgacg

SEQ ID NO: 3985542 - DNA, 25 bp, Homo sapien
taacaagaccccacacgtgagctct

SEQ ID NO: 3985543 - DNA, 25 bp, Homo sapien
tctgggtcctcctaacaagacccca

SEQ ID NO: 3985544 - DNA, 25 bp, Homo sapien
cctccctgctaggatctagaggcca

SEQ ID NO: 3985545 - DNA, 25 bp, Homo sapien
cagcagataaacaaagttagcaaaa

SEQ ID NO: 3985546 - DNA, 25 bp, Homo sapien
tataagatctaagactacgttttta

SEQ ID NO: 3985547 - DNA, 25 bp, Homo sapien
ttgagcactctgtagggtcgagcag

SEQ ID NO: 3985548 - DNA, 25 bp, Homo sapien
gagctttccctattattatggtaca

SEQ ID NO: 3985549 - DNA, 25 bp, Homo sapien
tattatggtacaaggagagtttgcg

SEQ ID NO: 3985550 - DNA, 25 bp, Homo sapien
tagggtcgagcaggcacatgtactt

SEQ ID NO: 3985551 - DNA, 25 bp, Homo sapien
tgactgtgaacttcgcccacaggct

SEQ ID NO: 3985552 - DNA, 25 bp, Homo sapien
ttgactgtgaacttcgcccacaggc

SEQ ID NO: 3985553 - DNA, 25 bp, Homo sapien
accaagttttactacatctgcccat

SEQ ID NO: 3985554 - DNA, 25 bp, Homo sapien
ccaagttttactacatctgcccatg

SEQ ID NO: 3985555 - DNA, 25 bp, Homo sapien
gacctttgaggaccatgttttatga

SEQ ID NO: 3985556 - DNA, 25 bp, Homo sapien
cctttgaggaccatgttttatgact

SEQ ID NO: 3985557 - DNA, 25 bp, Homo sapien
cttcttttggaacatatcatctgta

SEQ ID NO: 3985558 - DNA, 25 bp, Homo sapien
atttgcttccgaagcaccacttctt

SEQ ID NO: 3985559 - DNA, 25 bp, Homo sapien
gacttcggctgatagacactctctt

SEQ ID NO: 3985560 - DNA, 25 bp, Homo sapien
tgtaaaatatcatgttgacttcggc

SEQ ID NO: 3985561 - DNA, 25 bp, Homo sapien
agttttcctaggactaggagctgga

SEQ ID NO: 3985562 - DNA, 25 bp, Homo sapien
gacctacggcgttgatcactggcaa

SEQ ID NO: 3985563 - DNA, 25 bp, Homo sapien
ggatttctgaacctgactcttgttt

SEQ ID NO: 3985564 - DNA, 25 bp, Homo sapien
ggagctggagggcttataaccaagc

SEQ ID NO: 3985565 - DNA, 25 bp, Homo sapien
ggcttctccccttttgagaggcgta

SEQ ID NO: 3985566 - DNA, 25 bp, Homo sapien
aggacacacgccttcttttcaaagg

SEQ ID NO: 3985567 - DNA, 25 bp, Homo sapien
ggagtgtgcattaccagagactttc

SEQ ID NO: 3985568 - DNA, 25 bp, Homo sapien
ttaggtgcccaccaaaggacacacg

SEQ ID NO: 3985569 - DNA, 25 bp, Homo sapien
caggtaacccagagcacatctgtcc

SEQ ID NO: 3985570 - DNA, 25 bp, Homo sapien
aatggaatcaccaaagttgttgata

SEQ ID NO: 3985571 - DNA, 25 bp, Homo sapien
actgaactaagaccaggtaacccag

SEQ ID NO: 3985572 - DNA, 25 bp, Homo sapien
ccaaagttgttgatatcaactgaac

SEQ ID NO: 3985573 - DNA, 25 bp, Homo sapien
gggaatccttttggatcttcctctc

SEQ ID NO: 3985574 - DNA, 25 bp, Homo sapien
ctgagggaatccttttggatcttcc

SEQ ID NO: 3985575 - DNA, 25 bp, Homo sapien
gagggaatccttttggatcttcctc

SEQ ID NO: 3985576 - DNA, 25 bp, Homo sapien
gaatccttttggatcttcctctcaa

SEQ ID NO: 3985577 - DNA, 25 bp, Homo sapien
gctcattgtgaatttcagtttccgt

SEQ ID NO: 3985578 - DNA, 25 bp, Homo sapien
ctttagctggtgttcgatttctagt

SEQ ID NO: 3985579 - DNA, 25 bp, Homo sapien
tgttcgatttctagttgaaagcttc

SEQ ID NO: 3985580 - DNA, 25 bp, Homo sapien
ttcagtttccgtaggcagaacttcc

SEQ ID NO: 3985581 - DNA, 25 bp, Homo sapien
ttgttcaggtgaagcaggctctgcc

SEQ ID NO: 3985582 - DNA, 25 bp, Homo sapien
gacttacgcgagaccaacagttggg

SEQ ID NO: 3985583 - DNA, 25 bp, Homo sapien
taacggctcactaatttaacgctgg

SEQ ID NO: 3985584 - DNA, 25 bp, Homo sapien
cattttagccggctcatagagagga

SEQ ID NO: 3985585 - DNA, 25 bp, Homo sapien
gctagatcttgagacacgacgtgct

SEQ ID NO: 3985586 - DNA, 25 bp, Homo sapien
gatcttgagacacgacgtgctggct

SEQ ID NO: 3985587 - DNA, 25 bp, Homo sapien
tagatcttgagacacgacgtgctgg

SEQ ID NO: 3985588 - DNA, 25 bp, Homo sapien
agaagctagatcttgagacacgacg

SEQ ID NO: 3985589 - DNA, 25 bp, Homo sapien
gatacttagggtggatctgagagcc

SEQ ID NO: 3985590 - DNA, 25 bp, Homo sapien
tcagaactactgactgcgtcatcag

SEQ ID NO: 3985591 - DNA, 25 bp, Homo sapien
tcataaatgggccataggacctgtc

SEQ ID NO: 3985592 - DNA, 25 bp, Homo sapien
tgtcgatgaactgaggctccacttg

SEQ ID NO: 3985593 - DNA, 25 bp, Homo sapien
attcagttgacttccttccattctg

SEQ ID NO: 3985594 - DNA, 25 bp, Homo sapien
gaaattcagttgacttccttccatt

SEQ ID NO: 3985595 - DNA, 25 bp, Homo sapien
tcagttgacttccttccattctgaa

SEQ ID NO: 3985596 - DNA, 25 bp, Homo sapien
aaattcagttgacttccttccattc

SEQ ID NO: 3985597 - DNA, 25 bp, Homo sapien
ctgaaggaacgatcaataatagtta

SEQ ID NO: 3985598 - DNA, 25 bp, Homo sapien
gccgtacaggctcatcaataacaga

SEQ ID NO: 3985599 - DNA, 25 bp, Homo sapien
catctccatgttttagccgtacagg

SEQ ID NO: 3985600 - DNA, 25 bp, Homo sapien
taacagacccatttacttgtgttgg

SEQ ID NO: 3985601 - DNA, 25 bp, Homo sapien
caggaagctggatacggatgtcaca

SEQ ID NO: 3985602 - DNA, 25 bp, Homo sapien
gttgttttgacacaacaggaagctg

SEQ ID NO: 3985603 - DNA, 25 bp, Homo sapien
aatgttgttttgacacaacaggaag

SEQ ID NO: 3985604 - DNA, 25 bp, Homo sapien
caacaggaagctggatacggatgtc

SEQ ID NO: 3985605 - DNA, 25 bp, Homo sapien
cattttcctattgccacaaggagcc

SEQ ID NO: 3985606 - DNA, 25 bp, Homo sapien
ccaccaaacaggacagcaatataag

SEQ ID NO: 3985607 - DNA, 25 bp, Homo sapien
tgtcccattttcctattgccacaag

SEQ ID NO: 3985608 - DNA, 25 bp, Homo sapien
tataagaggaaacgttctcgaattc

SEQ ID NO: 3985609 - DNA, 25 bp, Homo sapien
caaacaagcaggtgctgaggctcag

SEQ ID NO: 3985610 - DNA, 25 bp, Homo sapien
tccaaacaagcaggtgctgaggctc

SEQ ID NO: 3985611 - DNA, 25 bp, Homo sapien
cttccaaacaagcaggtgctgaggc

SEQ ID NO: 3985612 - DNA, 25 bp, Homo sapien
aaacaagcaggtgctgaggctcagg

SEQ ID NO: 3985613 - DNA, 25 bp, Homo sapien
ttgatagtaaccaggcgtctcgtgg

SEQ ID NO: 3985614 - DNA, 25 bp, Homo sapien
tgatagtaaccaggcgtctcgtggg

SEQ ID NO: 3985615 - DNA, 25 bp, Homo sapien
tccgtaggggaaggccagaagcaaa

SEQ ID NO: 3985616 - DNA, 25 bp, Homo sapien
tctaaacagtaagttgagtataatc

SEQ ID NO: 3985617 - DNA, 25 bp, Homo sapien
gtataatccgtaggggaaggccaga

SEQ ID NO: 3985618 - DNA, 25 bp, Homo sapien
cagtaagttgagtataatccgtagg

SEQ ID NO: 3985619 - DNA, 25 bp, Homo sapien
cggctctagcggctcccaccgagtc

SEQ ID NO: 3985620 - DNA, 25 bp, Homo sapien
ctcgtcaagtcgcacccaaagtccg

SEQ ID NO: 3985621 - DNA, 25 bp, Homo sapien
acttgtcgaaccaccgctcgtcaag

SEQ ID NO: 3985622 - DNA, 25 bp, Homo sapien
atccggcccgcaaggccacttgtcg

SEQ ID NO: 3985623 - DNA, 25 bp, Homo sapien
gttattgcctgtgttgaatgcagac

SEQ ID NO: 3985624 - DNA, 25 bp, Homo sapien
tgcagttattgcctgtgttgaatgc

SEQ ID NO: 3985625 - DNA, 25 bp, Homo sapien
cagttattgcctgtgttgaatgcag

SEQ ID NO: 3985626 - DNA, 25 bp, Homo sapien
tattgcctgtgttgaatgcagacat

SEQ ID NO: 3985627 - DNA, 25 bp, Homo sapien
caatgtgatgtaacgatttggccgg

SEQ ID NO: 3985628 - DNA, 25 bp, Homo sapien
atttggccggaagaagggcatgtct

SEQ ID NO: 3985629 - DNA, 25 bp, Homo sapien
cttcttgggcggtgaaatattcaga

SEQ ID NO: 3985630 - DNA, 25 bp, Homo sapien
ttagagtgcattgaaccgggacaat

SEQ ID NO: 3985631 - DNA, 25 bp, Homo sapien
tccataggaccccatattctagcaa

SEQ ID NO: 3985632 - DNA, 25 bp, Homo sapien
cataggaccccatattctagcaagg

SEQ ID NO: 3985633 - DNA, 25 bp, Homo sapien
ataggaccccatattctagcaagga

SEQ ID NO: 3985634 - DNA, 25 bp, Homo sapien
aatccataggaccccatattctagc

SEQ ID NO: 3985635 - DNA, 25 bp, Homo sapien
acacattgacagtgacagcgaacat

SEQ ID NO: 3985636 - DNA, 25 bp, Homo sapien
ctgggtgttaggcagcgcccccaga

SEQ ID NO: 3985637 - DNA, 25 bp, Homo sapien
tatgcaaggtgctcacacattgaca

SEQ ID NO: 3985638 - DNA, 25 bp, Homo sapien
cagtgacagcgaacatttgctgagt

SEQ ID NO: 3985639 - DNA, 25 bp, Homo sapien
ccctgccttgtcagcagagagagct

SEQ ID NO: 3985640 - DNA, 25 bp, Homo sapien
tgccttgtcagcagagagagctacc

SEQ ID NO: 3985641 - DNA, 25 bp, Homo sapien
gccaccgcatctggtgtggttacag

SEQ ID NO: 3985642 - DNA, 25 bp, Homo sapien
ggtgtggttacagcccttcccatcc

SEQ ID NO: 3985643 - DNA, 25 bp, Homo sapien
ggatgatgcccccatagacatccat

SEQ ID NO: 3985644 - DNA, 25 bp, Homo sapien
tgggaagcttctggataaagttcaa

SEQ ID NO: 3985645 - DNA, 25 bp, Homo sapien
aagttccaaaatgacaagttgggtg

SEQ ID NO: 3985646 - DNA, 25 bp, Homo sapien
tccaaaatgacaagttgggtgtttc

SEQ ID NO: 3985647 - DNA, 25 bp, Homo sapien
tgttcctcagtaagcactcaagcct

SEQ ID NO: 3985648 - DNA, 25 bp, Homo sapien
catttccctagtactgagacatggg

SEQ ID NO: 3985649 - DNA, 25 bp, Homo sapien
tgtccttgaggatcaatgaccgtct

SEQ ID NO: 3985650 - DNA, 25 bp, Homo sapien
ggcctgacagtaacacaccatgttg

SEQ ID NO: 3985651 - DNA, 25 bp, Homo sapien
gaatcaggtcgctcatgacagaggc

SEQ ID NO: 3985652 - DNA, 25 bp, Homo sapien
ccatgagggcggagttctgtctgca

SEQ ID NO: 3985653 - DNA, 25 bp, Homo sapien
gctgtaactagcatccagggagaga

SEQ ID NO: 3985654 - DNA, 25 bp, Homo sapien
agatatgtccgagtcctaagccagc

SEQ ID NO: 3985655 - DNA, 25 bp, Homo sapien
gatacacagaaacttaccatcgtgt

SEQ ID NO: 3985656 - DNA, 25 bp, Homo sapien
gaaacttaccatcgtgttccagctg

SEQ ID NO: 3985657 - DNA, 25 bp, Homo sapien
cacgatagaggtaccccattaacaa

SEQ ID NO: 3985658 - DNA, 25 bp, Homo sapien
tctgtttgtaataagtgcacgatag

SEQ ID NO: 3985659 - DNA, 25 bp, Homo sapien
gctgcagaacactaaatattgctgc

SEQ ID NO: 3985660 - DNA, 25 bp, Homo sapien
ggaggctgcagaacactaaatattg

SEQ ID NO: 3985661 - DNA, 25 bp, Homo sapien
gcagaacactaaatattgctgcctg

SEQ ID NO: 3985662 - DNA, 25 bp, Homo sapien
ggctgcagaacactaaatattgctg

SEQ ID NO: 3985663 - DNA, 25 bp, Homo sapien
agtgtccttcaagaaagcaaatgac

SEQ ID NO: 3985664 - DNA, 25 bp, Homo sapien
aattaaagtggcaaagtagtgtcct

SEQ ID NO: 3985665 - DNA, 25 bp, Homo sapien
cagccaaaatcatggttggtttgga

SEQ ID NO: 3985666 - DNA, 25 bp, Homo sapien
tggtttggattctggtataagaaat

SEQ ID NO: 3985667 - DNA, 25 bp, Homo sapien
tttgggattccagctgatttcacaa

SEQ ID NO: 3985668 - DNA, 25 bp, Homo sapien
tgggattccagctgatttcacaaca

SEQ ID NO: 3985669 - DNA, 25 bp, Homo sapien
ggattccagctgatttcacaacaaa

SEQ ID NO: 3985670 - DNA, 25 bp, Homo sapien
gctttgggattccagctgatttcac

SEQ ID NO: 3985671 - DNA, 25 bp, Homo sapien
gttcatcctgagcaacggtgtgctg

SEQ ID NO: 3985672 - DNA, 25 bp, Homo sapien
tcgttcatcctgagcaacggtgtgc

SEQ ID NO: 3985673 - DNA, 25 bp, Homo sapien
tcctcgttcatcctgagcaacggtg

SEQ ID NO: 3985674 - DNA, 25 bp, Homo sapien
cttttcctcgttcatcctgagcaac

SEQ ID NO: 3985675 - DNA, 25 bp, Homo sapien
ttccacaggctcgatatttgctctg

SEQ ID NO: 3985676 - DNA, 25 bp, Homo sapien
tattccacaggctcgatatttgctc

SEQ ID NO: 3985677 - DNA, 25 bp, Homo sapien
tccacaggctcgatatttgctctgc

SEQ ID NO: 3985678 - DNA, 25 bp, Homo sapien
ttattccacaggctcgatatttgct

SEQ ID NO: 3985679 - DNA, 25 bp, Homo sapien
tgtgcgtccctgcactagagcaaag

SEQ ID NO: 3985680 - DNA, 25 bp, Homo sapien
aactgcctgtagttttgggtggaat

SEQ ID NO: 3985681 - DNA, 25 bp, Homo sapien
gattttatagggttcatatgggcgt

SEQ ID NO: 3985682 - DNA, 25 bp, Homo sapien
gagtgactgcatccaaactgcctgt

SEQ ID NO: 3985683 - DNA, 25 bp, Homo sapien
ttgatttgatttggccccaccaggg

SEQ ID NO: 3985684 - DNA, 25 bp, Homo sapien
aacttgtttaggctccgagtgtgcc

SEQ ID NO: 3985685 - DNA, 25 bp, Homo sapien
gcagatgatctgtaaaatgtcccct

SEQ ID NO: 3985686 - DNA, 25 bp, Homo sapien
ctggacttttggctggaaagatgca

SEQ ID NO: 3985687 - DNA, 25 bp, Homo sapien
ataatgcattggctccagcagcgga

SEQ ID NO: 3985688 - DNA, 25 bp, Homo sapien
taatgcattggctccagcagcggac

SEQ ID NO: 3985689 - DNA, 25 bp, Homo sapien
ttataatgcattggctccagcagcg

SEQ ID NO: 3985690 - DNA, 25 bp, Homo sapien
tataatgcattggctccagcagcgg

SEQ ID NO: 3985691 - DNA, 25 bp, Homo sapien
gccttggcgactgggggcgcatcgt

SEQ ID NO: 3985692 - DNA, 25 bp, Homo sapien
aggaaccgccgaccatagcagaggg

SEQ ID NO: 3985693 - DNA, 25 bp, Homo sapien
tgggggcgcatcgtggggactcggc

SEQ ID NO: 3985694 - DNA, 25 bp, Homo sapien
agcgcgtgggaagtcgccccgcggg

SEQ ID NO: 3985695 - DNA, 25 bp, Homo sapien
taggaattgcccgtggggtcctcac

SEQ ID NO: 3985696 - DNA, 25 bp, Homo sapien
ctgctgctttccaacttaggaattg

SEQ ID NO: 3985697 - DNA, 25 bp, Homo sapien
ctttccaacttaggaattgcccgtg

SEQ ID NO: 3985698 - DNA, 25 bp, Homo sapien
agagaccccgctgcccttctgagct

SEQ ID NO: 3985699 - DNA, 25 bp, Homo sapien
cgtgcagctggactctcgagctttg

SEQ ID NO: 3985700 - DNA, 25 bp, Homo sapien
cagctggactctcgagctttgtttc

SEQ ID NO: 3985701 - DNA, 25 bp, Homo sapien
tgcagctggactctcgagctttgtt

SEQ ID NO: 3985702 - DNA, 25 bp, Homo sapien
cccgtgcagctggactctcgagctt

SEQ ID NO: 3985703 - DNA, 25 bp, Homo sapien
gacactgagcacatctgcgcccttt

SEQ ID NO: 3985704 - DNA, 25 bp, Homo sapien
ggctaggacactgagcacatctgcg

SEQ ID NO: 3985705 - DNA, 25 bp, Homo sapien
gtcctctccagtgggctaggacact

SEQ ID NO: 3985706 - DNA, 25 bp, Homo sapien
gcacatctgcgccctttccttggag

SEQ ID NO: 3985707 - DNA, 25 bp, Homo sapien
gtcatcactcattgatcgtctcttg

SEQ ID NO: 3985708 - DNA, 25 bp, Homo sapien
gtctgtattactggtttggataggg

SEQ ID NO: 3985709 - DNA, 25 bp, Homo sapien
ataacctggtgtctccaaatgaggc

SEQ ID NO: 3985710 - DNA, 25 bp, Homo sapien
cttgcaagggtctgtattactggtt

SEQ ID NO: 3985711 - DNA, 25 bp, Homo sapien
ccgcccggtggcgtctgataaggtt

SEQ ID NO: 3985712 - DNA, 25 bp, Homo sapien
cagtgggcagaacccgctgtcgagc

SEQ ID NO: 3985713 - DNA, 25 bp, Homo sapien
cccggtggcgtctgataaggtttct

SEQ ID NO: 3985714 - DNA, 25 bp, Homo sapien
gagagagtgacatggtcggccagtg

SEQ ID NO: 3985715 - DNA, 25 bp, Homo sapien
tgagcaggactcacacggaaatggc

SEQ ID NO: 3985716 - DNA, 25 bp, Homo sapien
gaaatggctgtctacagctgccgca

SEQ ID NO: 3985717 - DNA, 25 bp, Homo sapien
gctgccgcaaattgatttatcccca

SEQ ID NO: 3985718 - DNA, 25 bp, Homo sapien
ttttaacacgcttctccagttaagc

SEQ ID NO: 3985719 - DNA, 25 bp, Homo sapien
actctctgctaagttctctcggcca

SEQ ID NO: 3985720 - DNA, 25 bp, Homo sapien
gcactctctgctaagttctctcggc

SEQ ID NO: 3985721 - DNA, 25 bp, Homo sapien
cactctctgctaagttctctcggcc

SEQ ID NO: 3985722 - DNA, 25 bp, Homo sapien
tttcagcacaaagagtcttgtgcag

SEQ ID NO: 3985723 - DNA, 25 bp, Homo sapien
ttcagcacaaagagtcttgtgcaga

SEQ ID NO: 3985724 - DNA, 25 bp, Homo sapien
ctttcagcacaaagagtcttgtgca

SEQ ID NO: 3985725 - DNA, 25 bp, Homo sapien
gaagactgaataggactttactgga

SEQ ID NO: 3985726 - DNA, 25 bp, Homo sapien
agactgaataggactttactggaag

SEQ ID NO: 3985727 - DNA, 25 bp, Homo sapien
gactgaataggactttactggaagg

SEQ ID NO: 3985728 - DNA, 25 bp, Homo sapien
aagactgaataggactttactggaa

SEQ ID NO: 3985729 - DNA, 25 bp, Homo sapien
ttctgtaaagaaatgccagtgcatg

SEQ ID NO: 3985730 - DNA, 25 bp, Homo sapien
gctgggtgcaggacaattctgtaaa

SEQ ID NO: 3985731 - DNA, 25 bp, Homo sapien
tgccagtgcatgtcggcgtcttcag

SEQ ID NO: 3985732 - DNA, 25 bp, Homo sapien
taggctgggtgcaggacaattctgt

SEQ ID NO: 3985733 - DNA, 25 bp, Homo sapien
tttgtgccattctggtgtgtgttgg

SEQ ID NO: 3985734 - DNA, 25 bp, Homo sapien
cctgtttgtgccattctggtgtgtg

SEQ ID NO: 3985735 - DNA, 25 bp, Homo sapien
cctgcgggtcagtgggttcctgttt

SEQ ID NO: 3985736 - DNA, 25 bp, Homo sapien
agcctgcgggtcagtgggttcctgt

SEQ ID NO: 3985737 - DNA, 25 bp, Homo sapien
taatcatgtaggaaggcttgcaaca

SEQ ID NO: 3985738 - DNA, 25 bp, Homo sapien
atgtaggaaggcttgcaacaccacc

SEQ ID NO: 3985739 - DNA, 25 bp, Homo sapien
cttcgagtctgcacaaagtagataa

SEQ ID NO: 3985740 - DNA, 25 bp, Homo sapien
gcacaaagtagataatcatgtagga

SEQ ID NO: 3985741 - DNA, 25 bp, Homo sapien
cagtcaattaggagagcagcactca

SEQ ID NO: 3985742 - DNA, 25 bp, Homo sapien
taaccaacgcctgtagcctggatgc

SEQ ID NO: 3985743 - DNA, 25 bp, Homo sapien
cagaggccctcgatctgtcctgagg

SEQ ID NO: 3985744 - DNA, 25 bp, Homo sapien
caggtagcatggtaaccaacgcctg

SEQ ID NO: 3985745 - DNA, 25 bp, Homo sapien
ttgtccctcttctcccgctcacccc

SEQ ID NO: 3985746 - DNA, 25 bp, Homo sapien
tcccgagtcctgcaagccacccttg

SEQ ID NO: 3985747 - DNA, 25 bp, Homo sapien
cgagtcctgcaagccacccttgtcc

SEQ ID NO: 3985748 - DNA, 25 bp, Homo sapien
agctcctcccgagtcctgcaagcca

SEQ ID NO: 3985749 - DNA, 25 bp, Homo sapien
atgacttcgccttcgcggtcgcggg

SEQ ID NO: 3985750 - DNA, 25 bp, Homo sapien
ggccacgcagggtgcaacccggacg

SEQ ID NO: 3985751 - DNA, 25 bp, Homo sapien
tgctattccggggaaggccacgcag

SEQ ID NO: 3985752 - DNA, 25 bp, Homo sapien
ggaagcccgcgacgcagcagccaca

SEQ ID NO: 3985753 - DNA, 25 bp, Homo sapien
gatccccagacaggttctcagagct

SEQ ID NO: 3985754 - DNA, 25 bp, Homo sapien
ttttccataaaatgatccccagaca

SEQ ID NO: 3985755 - DNA, 25 bp, Homo sapien
gagctgtcacgaagctttttgaaat

SEQ ID NO: 3985756 - DNA, 25 bp, Homo sapien
caggttctcagagctgtcacgaagc

SEQ ID NO: 3985757 - DNA, 25 bp, Homo sapien
tccttgatggactctcagacgctct

SEQ ID NO: 3985758 - DNA, 25 bp, Homo sapien
ttttgcgggaaaaccagatgtggac

SEQ ID NO: 3985759 - DNA, 25 bp, Homo sapien
ggcttgtttcgatgtcctccacgtc

SEQ ID NO: 3985760 - DNA, 25 bp, Homo sapien
tcttcaggtgattacacaggttctt

SEQ ID NO: 3985761 - DNA, 25 bp, Homo sapien
aggggccactggttcttgcatcttt

SEQ ID NO: 3985762 - DNA, 25 bp, Homo sapien
tcaggggccactggttcttgcatct

SEQ ID NO: 3985763 - DNA, 25 bp, Homo sapien
cactcaggggccactggttcttgca

SEQ ID NO: 3985764 - DNA, 25 bp, Homo sapien
gggccactggttcttgcatcttttt

SEQ ID NO: 3985765 - DNA, 25 bp, Homo sapien
tggggcttgttaggccatcgccttg

SEQ ID NO: 3985766 - DNA, 25 bp, Homo sapien
cttgggggccggctgatcagcggca

SEQ ID NO: 3985767 - DNA, 25 bp, Homo sapien
ttgttaggccatcgccttgggggcc

SEQ ID NO: 3985768 - DNA, 25 bp, Homo sapien
ttcggcaggcaggaacaaggacagc

SEQ ID NO: 3985769 - DNA, 25 bp, Homo sapien
gtgtattcagaaagacgaagcaccc

SEQ ID NO: 3985770 - DNA, 25 bp, Homo sapien
ggctccatgggtgtattcagaaaga

SEQ ID NO: 3985771 - DNA, 25 bp, Homo sapien
aagcaccctgtgtgatgcacctgca

SEQ ID NO: 3985772 - DNA, 25 bp, Homo sapien
ggagagtctctggataccatgaggc

SEQ ID NO: 3985773 - DNA, 25 bp, Homo sapien
gatgtgtgctgaaaatgactccctg

SEQ ID NO: 3985774 - DNA, 25 bp, Homo sapien
atccatgggcttcccgctgggctct

SEQ ID NO: 3985775 - DNA, 25 bp, Homo sapien
gtagcaacaagtccgcgagcttcct

SEQ ID NO: 3985776 - DNA, 25 bp, Homo sapien
tggctggtgctgtagcaacaagtcc

SEQ ID NO: 3985777 - DNA, 25 bp, Homo sapien
tgtcataatcagattctagaaattg

SEQ ID NO: 3985778 - DNA, 25 bp, Homo sapien
gaaagtttgtgctagccttgtggat

SEQ ID NO: 3985779 - DNA, 25 bp, Homo sapien
aattgaacttgcagaaagtttgtgc

SEQ ID NO: 3985780 - DNA, 25 bp, Homo sapien
cagattctagaaattgaacttgcag

SEQ ID NO: 3985781 - DNA, 25 bp, Homo sapien
cttttaatgcgactctggattgctt

SEQ ID NO: 3985782 - DNA, 25 bp, Homo sapien
ttaatgcgactctggattgcttttt

SEQ ID NO: 3985783 - DNA, 25 bp, Homo sapien
ctcttttaatgcgactctggattgc

SEQ ID NO: 3985784 - DNA, 25 bp, Homo sapien
ttctctcttttaatgcgactctgga

SEQ ID NO: 3985785 - DNA, 25 bp, Homo sapien
catggctccggaatggtccatgagg

SEQ ID NO: 3985786 - DNA, 25 bp, Homo sapien
taattttctggcatggctccggaat

SEQ ID NO: 3985787 - DNA, 25 bp, Homo sapien
tctggcatggctccggaatggtcca

SEQ ID NO: 3985788 - DNA, 25 bp, Homo sapien
tttctggcatggctccggaatggtc

SEQ ID NO: 3985789 - DNA, 25 bp, Homo sapien
gctctgagggaactacatctaatta

SEQ ID NO: 3985790 - DNA, 25 bp, Homo sapien
tggtgcatcacaggctgcccagatg

SEQ ID NO: 3985791 - DNA, 25 bp, Homo sapien
ctggccgatgcctgcttttttaaga

SEQ ID NO: 3985792 - DNA, 25 bp, Homo sapien
gatgcagaggaaggctcggccattt

SEQ ID NO: 3985793 - DNA, 25 bp, Homo sapien
gccaagactgtagatgtcttctgaa

SEQ ID NO: 3985794 - DNA, 25 bp, Homo sapien
ttggagccaagactgtagatgtctt

SEQ ID NO: 3985795 - DNA, 25 bp, Homo sapien
tcaacgccgattgggtttggagcca

SEQ ID NO: 3985796 - DNA, 25 bp, Homo sapien
tgtcttctgaaatgcggttataagg

SEQ ID NO: 3985797 - DNA, 25 bp, Homo sapien
ctgccaggagccgaaccagaggtgc

SEQ ID NO: 3985798 - DNA, 25 bp, Homo sapien
tgttggctcatagcaaagctctttt

SEQ ID NO: 3985799 - DNA, 25 bp, Homo sapien
ccagaggtgccaaaatgctgtaaga

SEQ ID NO: 3985800 - DNA, 25 bp, Homo sapien
taagaaatcagatctccaagagtgc

SEQ ID NO: 3985801 - DNA, 25 bp, Homo sapien
tcgctgatgtactggaatggcttaa

SEQ ID NO: 3985802 - DNA, 25 bp, Homo sapien
cacggctcgcctctctgtggctgtg

SEQ ID NO: 3985803 - DNA, 25 bp, Homo sapien
ttggcaccatactgatcctcgctga

SEQ ID NO: 3985804 - DNA, 25 bp, Homo sapien
ggagatctgcacagtgttcctgaga

SEQ ID NO: 3985805 - DNA, 25 bp, Homo sapien
gctccttaggggtagagccaatccg

SEQ ID NO: 3985806 - DNA, 25 bp, Homo sapien
tttgaagaggaatctatgagatact

SEQ ID NO: 3985807 - DNA, 25 bp, Homo sapien
gagccaatccgaaaacacgttctct

SEQ ID NO: 3985808 - DNA, 25 bp, Homo sapien
tgaagaggaatctatgagatactga

SEQ ID NO: 3985809 - DNA, 25 bp, Homo sapien
caggctggaggccaatactcatctg

SEQ ID NO: 3985810 - DNA, 25 bp, Homo sapien
atctgagagcttgtgcacggacccc

SEQ ID NO: 3985811 - DNA, 25 bp, Homo sapien
catctgagagcttgtgcacggaccc

SEQ ID NO: 3985812 - DNA, 25 bp, Homo sapien
tggaggccaatactcatctgagagc

SEQ ID NO: 3985813 - DNA, 25 bp, Homo sapien
tgccttttccagtagtaaacgacat

SEQ ID NO: 3985814 - DNA, 25 bp, Homo sapien
tgaaacactgaccacgattcccaat

SEQ ID NO: 3985815 - DNA, 25 bp, Homo sapien
tagcagcatatccattcctgtcagg

SEQ ID NO: 3985816 - DNA, 25 bp, Homo sapien
tttctatgctctctcactgactggt

SEQ ID NO: 3985817 - DNA, 25 bp, Homo sapien
catgaaagctatcagttttgagttg

SEQ ID NO: 3985818 - DNA, 25 bp, Homo sapien
tcagttttgagttgtagcggctttc

SEQ ID NO: 3985819 - DNA, 25 bp, Homo sapien
ttttgagttgtagcggctttctgga

SEQ ID NO: 3985820 - DNA, 25 bp, Homo sapien
gctatcagttttgagttgtagcggc

SEQ ID NO: 3985821 - DNA, 25 bp, Homo sapien
gagcagtgctcccacatggtgaaga

SEQ ID NO: 3985822 - DNA, 25 bp, Homo sapien
ttccatgaggcccaatgtggctgct

SEQ ID NO: 3985823 - DNA, 25 bp, Homo sapien
cacagtgtgaatagtgctctcgcag

SEQ ID NO: 3985824 - DNA, 25 bp, Homo sapien
cagcctgagctgtaagttccatgag

SEQ ID NO: 3985825 - DNA, 25 bp, Homo sapien
tcaattttggaagcgttgttgcgga

SEQ ID NO: 3985826 - DNA, 25 bp, Homo sapien
tgggaaagagtcagagagaacagct

SEQ ID NO: 3985827 - DNA, 25 bp, Homo sapien
tgccaaggcctaaatgagcctccag

SEQ ID NO: 3985828 - DNA, 25 bp, Homo sapien
tgctcgagaatccaacctggttcca

SEQ ID NO: 3985829 - DNA, 25 bp, Homo sapien
gcacacacgatggaaacttgatcgg

SEQ ID NO: 3985830 - DNA, 25 bp, Homo sapien
tgcagcgccaactggctgccagtgc

SEQ ID NO: 3985831 - DNA, 25 bp, Homo sapien
aaacttgatcggtcaagtttctgat

SEQ ID NO: 3985832 - DNA, 25 bp, Homo sapien
tcagtgcagcgccaactggctgcca

SEQ ID NO: 3985833 - DNA, 25 bp, Homo sapien
tggatctaaaggatccgtcagtgtt

SEQ ID NO: 3985834 - DNA, 25 bp, Homo sapien
gccactggatctaaaggatccgtca

SEQ ID NO: 3985835 - DNA, 25 bp, Homo sapien
tctaaaggatccgtcagtgttggct

SEQ ID NO: 3985836 - DNA, 25 bp, Homo sapien
tgaggccactggatctaaaggatcc

SEQ ID NO: 3985837 - DNA, 25 bp, Homo sapien
gatgatgtctgaatcagcgctcatc

SEQ ID NO: 3985838 - DNA, 25 bp, Homo sapien
cgattgcatggtcccaaaaccaggg

SEQ ID NO: 3985839 - DNA, 25 bp, Homo sapien
gcaccaggcctcttgagatgatgtc

SEQ ID NO: 3985840 - DNA, 25 bp, Homo sapien
cagcgctcatcgaatgggtggtgaa

SEQ ID NO: 3985841 - DNA, 25 bp, Homo sapien
ctgtgagtcccaaggtaggctgcat

SEQ ID NO: 3985842 - DNA, 25 bp, Homo sapien
gacctgtgacagttcccatagaaga

SEQ ID NO: 3985843 - DNA, 25 bp, Homo sapien
cagatgcctattttcagacctgtga

SEQ ID NO: 3985844 - DNA, 25 bp, Homo sapien
ggttacagatgcctattttcagacc

SEQ ID NO: 3985845 - DNA, 25 bp, Homo sapien
cctttccactcacgcagccttccat

SEQ ID NO: 3985846 - DNA, 25 bp, Homo sapien
actcatcaggatctgagtaaggcaa

SEQ ID NO: 3985847 - DNA, 25 bp, Homo sapien
tcaggatctgagtaaggcaagggca

SEQ ID NO: 3985848 - DNA, 25 bp, Homo sapien
gagactcatcaggatctgagtaagg

SEQ ID NO: 3985849 - DNA, 25 bp, Homo sapien
ggagagactcatcaggatctgagta

SEQ ID NO: 3985850 - DNA, 25 bp, Homo sapien
agcatataaggctgatgcgatgctt

SEQ ID NO: 3985851 - DNA, 25 bp, Homo sapien
ttctagagtctttgggcacccaaga

SEQ ID NO: 3985852 - DNA, 25 bp, Homo sapien
gctgatgcgatgcttctagagtctt

SEQ ID NO: 3985853 - DNA, 25 bp, Homo sapien
gagtctttgggcacccaagaccgca

SEQ ID NO: 3985854 - DNA, 25 bp, Homo sapien
ggactgggccattgactttaacgac

SEQ ID NO: 3985855 - DNA, 25 bp, Homo sapien
cttccgaatttcattgaatataatc

SEQ ID NO: 3985856 - DNA, 25 bp, Homo sapien
tataatcacgttaaggtaaaatgtg

SEQ ID NO: 3985857 - DNA, 25 bp, Homo sapien
gactgggccattgactttaacgaca

SEQ ID NO: 3985858 - DNA, 25 bp, Homo sapien
agtgacaaatgtccgatcaacttca

SEQ ID NO: 3985859 - DNA, 25 bp, Homo sapien
gacaaatgtccgatcaacttcaaag

SEQ ID NO: 3985860 - DNA, 25 bp, Homo sapien
gctgagtgacaaatgtccgatcaac

SEQ ID NO: 3985861 - DNA, 25 bp, Homo sapien
gatcagctgagtgacaaatgtccga

SEQ ID NO: 3985862 - DNA, 25 bp, Homo sapien
tattagaggtcccaggtcaacagga

SEQ ID NO: 3985863 - DNA, 25 bp, Homo sapien
ctctcccagctgactgtattagagg

SEQ ID NO: 3985864 - DNA, 25 bp, Homo sapien
cagctgactgtattagaggtcccag

SEQ ID NO: 3985865 - DNA, 25 bp, Homo sapien
gactgtattagaggtcccaggtcaa

SEQ ID NO: 3985866 - DNA, 25 bp, Homo sapien
tgatgtggcccacagtgtgaacggc

SEQ ID NO: 3985867 - DNA, 25 bp, Homo sapien
cagcggtgtgatgtgtaagctgcac

SEQ ID NO: 3985868 - DNA, 25 bp, Homo sapien
taagctgcacaacatcagggcggga

SEQ ID NO: 3985869 - DNA, 25 bp, Homo sapien
cagtgtgatgctccgcagagtcgta

SEQ ID NO: 3985870 - DNA, 25 bp, Homo sapien
atttgcaagccaattaccccctctg

SEQ ID NO: 3985871 - DNA, 25 bp, Homo sapien
tctccatctttaaacatttgcaagc

SEQ ID NO: 3985872 - DNA, 25 bp, Homo sapien
aagccaattaccccctctgcagttt

SEQ ID NO: 3985873 - DNA, 25 bp, Homo sapien
ctttaaacatttgcaagccaattac

SEQ ID NO: 3985874 - DNA, 25 bp, Homo sapien
tcttatggttctctgcgattcctgg

SEQ ID NO: 3985875 - DNA, 25 bp, Homo sapien
cttcttatggttctctgcgattcct

SEQ ID NO: 3985876 - DNA, 25 bp, Homo sapien
cttatggttctctgcgattcctgga

SEQ ID NO: 3985877 - DNA, 25 bp, Homo sapien
ttatggttctctgcgattcctggag

SEQ ID NO: 3985878 - DNA, 25 bp, Homo sapien
ctgcaggttctgctcccacctggcc

SEQ ID NO: 3985879 - DNA, 25 bp, Homo sapien
tgcaggttctgctcccacctggcca

SEQ ID NO: 3985880 - DNA, 25 bp, Homo sapien
aagagcagtgcacacagagtcgatg

SEQ ID NO: 3985881 - DNA, 25 bp, Homo sapien
gctgtccatctcaggagcttgctct

SEQ ID NO: 3985882 - DNA, 25 bp, Homo sapien
tcaccaaggacagctggaataggga

SEQ ID NO: 3985883 - DNA, 25 bp, Homo sapien
cacgacatgtcggtgtcttcaggat

SEQ ID NO: 3985884 - DNA, 25 bp, Homo sapien
cttggtcgggctggctgttagcatc

SEQ ID NO: 3985885 - DNA, 25 bp, Homo sapien
cacttggtcgggctggctgttagca

SEQ ID NO: 3985886 - DNA, 25 bp, Homo sapien
gtcccacttggtcgggctggctgtt

SEQ ID NO: 3985887 - DNA, 25 bp, Homo sapien
ttgtcccacttggtcgggctggctg

SEQ ID NO: 3985888 - DNA, 25 bp, Homo sapien
tcctgatgcttttcagtggacaaga

SEQ ID NO: 3985889 - DNA, 25 bp, Homo sapien
cacaaatgggccatggctttacaca

SEQ ID NO: 3985890 - DNA, 25 bp, Homo sapien
gtgatagttgatggccccacaaatg

SEQ ID NO: 3985891 - DNA, 25 bp, Homo sapien
agctgatggcctctgtgatagttga

SEQ ID NO: 3985892 - DNA, 25 bp, Homo sapien
ccatggcaatagttacatcctgctt

SEQ ID NO: 3985893 - DNA, 25 bp, Homo sapien
ggcaatagttacatcctgcttcatt

SEQ ID NO: 3985894 - DNA, 25 bp, Homo sapien
gaggagcatgggcttctcatgacag

SEQ ID NO: 3985895 - DNA, 25 bp, Homo sapien
catgggcttctcatgacaggagtcc

SEQ ID NO: 3985896 - DNA, 25 bp, Homo sapien
atgcagggacccacgcacagtgctg

SEQ ID NO: 3985897 - DNA, 25 bp, Homo sapien
gtgaggtgcgcagctccgcttcctg

SEQ ID NO: 3985898 - DNA, 25 bp, Homo sapien
ctcattcctgattttcggatgagga

SEQ ID NO: 3985899 - DNA, 25 bp, Homo sapien
agagtccccgatgtctgtgtgaggt

SEQ ID NO: 3985900 - DNA, 25 bp, Homo sapien
tcttttcaagttccgcgagttgatc

SEQ ID NO: 3985901 - DNA, 25 bp, Homo sapien
tgtgagcttgagcatttcctgccgc

SEQ ID NO: 3985902 - DNA, 25 bp, Homo sapien
ggcccctggtgtgagcttgagcatt

SEQ ID NO: 3985903 - DNA, 25 bp, Homo sapien
gcgagttgatcatggcccctggtgt

SEQ ID NO: 3985904 - DNA, 25 bp, Homo sapien
cacgaggtgttcaattgcttccaaa

SEQ ID NO: 3985905 - DNA, 25 bp, Homo sapien
tgctggttggttgtgcaaattcacg

SEQ ID NO: 3985906 - DNA, 25 bp, Homo sapien
ccgccgctgtggtttggaggcctgt

SEQ ID NO: 3985907 - DNA, 25 bp, Homo sapien
cactgtcaacaagccgcaggtgtgc

SEQ ID NO: 3985908 - DNA, 25 bp, Homo sapien
agcagaaggtaaaagcgccgcggat

SEQ ID NO: 3985909 - DNA, 25 bp, Homo sapien
aaagcgccgcggatggagctcagca

SEQ ID NO: 3985910 - DNA, 25 bp, Homo sapien
ggacaggcgccgtctgaggccttac

SEQ ID NO: 3985911 - DNA, 25 bp, Homo sapien
gggacaggcgccgtctgaggcctta

SEQ ID NO: 3985912 - DNA, 25 bp, Homo sapien
cacttccagccggaacttggggcgg

SEQ ID NO: 3985913 - DNA, 25 bp, Homo sapien
agccccgctccaaagctgcctgagc

SEQ ID NO: 3985914 - DNA, 25 bp, Homo sapien
ctggcagccccgctccaaagctgcc

SEQ ID NO: 3985915 - DNA, 25 bp, Homo sapien
ctgccctgaggaccacactctctcc

SEQ ID NO: 3985916 - DNA, 25 bp, Homo sapien
ccgagtaaaacctgcatctccagaa

SEQ ID NO: 3985917 - DNA, 25 bp, Homo sapien
tcacatgggtccggagtccagagct

SEQ ID NO: 3985918 - DNA, 25 bp, Homo sapien
cacatgggtccggagtccagagctt

SEQ ID NO: 3985919 - DNA, 25 bp, Homo sapien
atcacatgggtccggagtccagagc

SEQ ID NO: 3985920 - DNA, 25 bp, Homo sapien
tcaaaggtccggtggctttctcttc

SEQ ID NO: 3985921 - DNA, 25 bp, Homo sapien
caaaggtccggtggctttctcttct

SEQ ID NO: 3985922 - DNA, 25 bp, Homo sapien
tggccctgggtcatacaacattcag

SEQ ID NO: 3985923 - DNA, 25 bp, Homo sapien
tgaggcctggagcagcctcgcatat

SEQ ID NO: 3985924 - DNA, 25 bp, Homo sapien
caggacacaaagtgacaaacttgga

SEQ ID NO: 3985925 - DNA, 25 bp, Homo sapien
tgcaacccaactttgaccgtgggaa

SEQ ID NO: 3985926 - DNA, 25 bp, Homo sapien
caggtccgtgtgaggattcaaaacc

SEQ ID NO: 3985927 - DNA, 25 bp, Homo sapien
tggagggtgtggaatctgcaggccc

SEQ ID NO: 3985928 - DNA, 25 bp, Homo sapien
cgggcagtgcttctgcgctctcagt

SEQ ID NO: 3985929 - DNA, 25 bp, Homo sapien
tcacggcaaggcaaggggctttctt

SEQ ID NO: 3985930 - DNA, 25 bp, Homo sapien
cgttgagggagtgtctcagacctcc

SEQ ID NO: 3985931 - DNA, 25 bp, Homo sapien
gaatgctcgttgagggagtgtctca

SEQ ID NO: 3985932 - DNA, 25 bp, Homo sapien
cactggtgggaatgctcgttgaggg

SEQ ID NO: 3985933 - DNA, 25 bp, Homo sapien
gggagtgtctcagacctccagtctc

SEQ ID NO: 3985934 - DNA, 25 bp, Homo sapien
actctgcctcccttatccagctgca

SEQ ID NO: 3985935 - DNA, 25 bp, Homo sapien
agctgcatggcatctcaggccacac

SEQ ID NO: 3985936 - DNA, 25 bp, Homo sapien
cccactctgcctcccttatccagct

SEQ ID NO: 3985937 - DNA, 25 bp, Homo sapien
tctgcctcccttatccagctgcatg

SEQ ID NO: 3985938 - DNA, 25 bp, Homo sapien
cagatgtcgtcattgagactgggtg

SEQ ID NO: 3985939 - DNA, 25 bp, Homo sapien
gagactcctcttgggtatcgcagct

SEQ ID NO: 3985940 - DNA, 25 bp, Homo sapien
tcttgggtatcgcagctgctgcagg

SEQ ID NO: 3985941 - DNA, 25 bp, Homo sapien
gggccagatgtcgtcattgagactg

SEQ ID NO: 3985942 - DNA, 25 bp, Homo sapien
aagggccgcggcagaggcaaaccca

SEQ ID NO: 3985943 - DNA, 25 bp, Homo sapien
gccacgctgcccgtgtatctgacag

SEQ ID NO: 3985944 - DNA, 25 bp, Homo sapien
ggaccccaatcaacagatagttagt

SEQ ID NO: 3985945 - DNA, 25 bp, Homo sapien
cccagagctggaagggccgcggcag

SEQ ID NO: 3985946 - DNA, 25 bp, Homo sapien
tatcattagcgcctctctgcacgca

SEQ ID NO: 3985947 - DNA, 25 bp, Homo sapien
caggccacggtatcccgttccaaat

SEQ ID NO: 3985948 - DNA, 25 bp, Homo sapien
caaatgggctggctaatcgggccgc

SEQ ID NO: 3985949 - DNA, 25 bp, Homo sapien
atcgggccgcatccattatcattag

SEQ ID NO: 3985950 - DNA, 25 bp, Homo sapien
ctggtgatgagccgcagggtcccgg

SEQ ID NO: 3985951 - DNA, 25 bp, Homo sapien
ctggttggcccgtcccccttctgct

SEQ ID NO: 3985952 - DNA, 25 bp, Homo sapien
cagggtcccggcctggcctggttgg

SEQ ID NO: 3985953 - DNA, 25 bp, Homo sapien
agccagggctctgacccgcaggcca

SEQ ID NO: 3985954 - DNA, 25 bp, Homo sapien
gattggaagtgaagttgccttccgg

SEQ ID NO: 3985955 - DNA, 25 bp, Homo sapien
cgttctcgttcgtgaaatgactgaa

SEQ ID NO: 3985956 - DNA, 25 bp, Homo sapien
tgcctttggctattacgttctcgtt

SEQ ID NO: 3985957 - DNA, 25 bp, Homo sapien
agatgtgatctgtaggcttccttcc

SEQ ID NO: 3985958 - DNA, 25 bp, Homo sapien
tcctgtccactttcatttttggaga

SEQ ID NO: 3985959 - DNA, 25 bp, Homo sapien
actggagaaccagtgggccctgaga

SEQ ID NO: 3985960 - DNA, 25 bp, Homo sapien
tgagagcaccttcttggtcctcctg

SEQ ID NO: 3985961 - DNA, 25 bp, Homo sapien
gctcctccctgggactggagaacca

SEQ ID NO: 3985962 - DNA, 25 bp, Homo sapien
agcacctgcttagcagcagtctgct

SEQ ID NO: 3985963 - DNA, 25 bp, Homo sapien
aaccatctttccaattgtgctataa

SEQ ID NO: 3985964 - DNA, 25 bp, Homo sapien
aaaggcagatgccattttaagatct

SEQ ID NO: 3985965 - DNA, 25 bp, Homo sapien
tattattgtcaagggccggcttctc

SEQ ID NO: 3985966 - DNA, 25 bp, Homo sapien
tccggtaaacaagacaagcttcagc

SEQ ID NO: 3985967 - DNA, 25 bp, Homo sapien
tctggcagaacgttgacacagtgtg

SEQ ID NO: 3985968 - DNA, 25 bp, Homo sapien
gacacagtgtgaaaccttcatccgg

SEQ ID NO: 3985969 - DNA, 25 bp, Homo sapien
caccgatgacagtggaagccgttta

SEQ ID NO: 3985970 - DNA, 25 bp, Homo sapien
caggttggcccttaaacagtgtaca

SEQ ID NO: 3985971 - DNA, 25 bp, Homo sapien
aacatatgcacggtgggaacccagc

SEQ ID NO: 3985972 - DNA, 25 bp, Homo sapien
catctggcctcagccgagagtgcag

SEQ ID NO: 3985973 - DNA, 25 bp, Homo sapien
aaacagtgtacagcttcatctggcc

SEQ ID NO: 3985974 - DNA, 25 bp, Homo sapien
gtgctgagacatgcccgtgtgagct

SEQ ID NO: 3985975 - DNA, 25 bp, Homo sapien
ctgcggctgcaactggaagggaaca

SEQ ID NO: 3985976 - DNA, 25 bp, Homo sapien
gaccgcttgcgttgatgtgctctgc

SEQ ID NO: 3985977 - DNA, 25 bp, Homo sapien
tgagctgtggaaaaactccgaacca

SEQ ID NO: 3985978 - DNA, 25 bp, Homo sapien
tgcccacggtatacactgagtacat

SEQ ID NO: 3985979 - DNA, 25 bp, Homo sapien
ggtcccattgcccacggtatacact

SEQ ID NO: 3985980 - DNA, 25 bp, Homo sapien
tggccacgggcatccaggtcccatt

SEQ ID NO: 3985981 - DNA, 25 bp, Homo sapien
atccaggtcccattgcccacggtat

SEQ ID NO: 3985982 - DNA, 25 bp, Homo sapien
gaaggttcgctgtagccaaaccagg

SEQ ID NO: 3985983 - DNA, 25 bp, Homo sapien
ttttttggaaggttcgctgtagcca

SEQ ID NO: 3985984 - DNA, 25 bp, Homo sapien
gtgcgagctcgccttggatcccatc

SEQ ID NO: 3985985 - DNA, 25 bp, Homo sapien
accaggcagagtgcttgtctttgtc

SEQ ID NO: 3985986 - DNA, 25 bp, Homo sapien
ctggaggtaccaggaccatccttgt

SEQ ID NO: 3985987 - DNA, 25 bp, Homo sapien
taccaggaccatccttgtggagaat

SEQ ID NO: 3985988 - DNA, 25 bp, Homo sapien
catccttgtggagaatgtctgtgac

SEQ ID NO: 3985989 - DNA, 25 bp, Homo sapien
gaggtaccaggaccatccttgtgga

SEQ ID NO: 3985990 - DNA, 25 bp, Homo sapien
agagcccaagagtgaccgtgcaggc

SEQ ID NO: 3985991 - DNA, 25 bp, Homo sapien
gcggctggcggcgggtctccttcag

SEQ ID NO: 3985992 - DNA, 25 bp, Homo sapien
gcccaagagtgaccgtgcaggcagc

SEQ ID NO: 3985993 - DNA, 25 bp, Homo sapien
ggctggcggcgggtctccttcaggg

SEQ ID NO: 3985994 - DNA, 25 bp, Homo sapien
ctttacaatattggtcctcgcagca

SEQ ID NO: 3985995 - DNA, 25 bp, Homo sapien
aatattggtcctcgcagcaaggcag

SEQ ID NO: 3985996 - DNA, 25 bp, Homo sapien
attggtcctcgcagcaaggcagcac

SEQ ID NO: 3985997 - DNA, 25 bp, Homo sapien
tacaatattggtcctcgcagcaagg

SEQ ID NO: 3985998 - DNA, 25 bp, Homo sapien
tgtgaggtgtaagtgtctgtatggg

SEQ ID NO: 3985999 - DNA, 25 bp, Homo sapien
gctcccacggacttgcatagcttgg

SEQ ID NO: 3986000 - DNA, 25 bp, Homo sapien
agccatgtgcatgacctggctccca

SEQ ID NO: 3986001 - DNA, 25 bp, Homo sapien
gaagggttgtgaggtgtaagtgtct

SEQ ID NO: 3986002 - DNA, 25 bp, Homo sapien
ggactggtgtggaagagtcagacct

SEQ ID NO: 3986003 - DNA, 25 bp, Homo sapien
aggagggccgcttgccgcagggact

SEQ ID NO: 3986004 - DNA, 25 bp, Homo sapien
aagagtcagacctttccgaatggcg

SEQ ID NO: 3986005 - DNA, 25 bp, Homo sapien
aatggcggctggtcctccgtagcag

SEQ ID NO: 3986006 - DNA, 25 bp, Homo sapien
ttaaaggccagcaatcgggaggctc

SEQ ID NO: 3986007 - DNA, 25 bp, Homo sapien
ctcgtggtacagctgtttagccaca

SEQ ID NO: 3986008 - DNA, 25 bp, Homo sapien
ttagccacagtggtcctccaggcac

SEQ ID NO: 3986009 - DNA, 25 bp, Homo sapien
aacttggtagcatacaatccccagg

SEQ ID NO: 3986010 - DNA, 25 bp, Homo sapien
tcattcatacgcctccaaaagtact

SEQ ID NO: 3986011 - DNA, 25 bp, Homo sapien
tttaagtacattgggcagaatgtaa

SEQ ID NO: 3986012 - DNA, 25 bp, Homo sapien
tccagtttatcatacctgtcaacct

SEQ ID NO: 3986013 - DNA, 25 bp, Homo sapien
cagtgcatcactggctaatacttta

SEQ ID NO: 3986014 - DNA, 25 bp, Homo sapien
ggttaccacagtcaagagcgagaaa

SEQ ID NO: 3986015 - DNA, 25 bp, Homo sapien
tgaggctctgaaaggctagattttg

SEQ ID NO: 3986016 - DNA, 25 bp, Homo sapien
ttgtgaaagacgatacacagaccag

SEQ ID NO: 3986017 - DNA, 25 bp, Homo sapien
tgaactgggactctatacatatgga

SEQ ID NO: 3986018 - DNA, 25 bp, Homo sapien
aggcgcaggcgaaactcggagtttc

SEQ ID NO: 3986019 - DNA, 25 bp, Homo sapien
ttgttttttaagtgcgcggaggcgc

SEQ ID NO: 3986020 - DNA, 25 bp, Homo sapien
tatgtgcataaccttcgctgtctcg

SEQ ID NO: 3986021 - DNA, 25 bp, Homo sapien
tgtctcgctaaaggtcagcgcgccc

SEQ ID NO: 3986022 - DNA, 25 bp, Homo sapien
gctgtggccagtaattgcgtgtctt

SEQ ID NO: 3986023 - DNA, 25 bp, Homo sapien
tcttggccggcaaacagtgctcctt

SEQ ID NO: 3986024 - DNA, 25 bp, Homo sapien
tcatgctattcacattacatccctt

SEQ ID NO: 3986025 - DNA, 25 bp, Homo sapien
gagctcatcaatagggtaagcatgt

SEQ ID NO: 3986026 - DNA, 25 bp, Homo sapien
gaaaagttatactgagcccgtaaca

SEQ ID NO: 3986027 - DNA, 25 bp, Homo sapien
cgggctaagctcttggcgtacagca

SEQ ID NO: 3986028 - DNA, 25 bp, Homo sapien
gagtcactgcctgcttaatatggtg

SEQ ID NO: 3986029 - DNA, 25 bp, Homo sapien
taaataatgcaatgagcacggagat

SEQ ID NO: 3986030 - DNA, 25 bp, Homo sapien
agcacttgagatcccacattcataa

SEQ ID NO: 3986031 - DNA, 25 bp, Homo sapien
tttcacaagttccagaagcccggga

SEQ ID NO: 3986032 - DNA, 25 bp, Homo sapien
ccacattcataacgggctggagaga

SEQ ID NO: 3986033 - DNA, 25 bp, Homo sapien
ggtggagttgccgttcagcattttc

SEQ ID NO: 3986034 - DNA, 25 bp, Homo sapien
tccttaaggggcactcgtttggcaa

SEQ ID NO: 3986035 - DNA, 25 bp, Homo sapien
gcactcgtttggcaaatgaggatgc

SEQ ID NO: 3986036 - DNA, 25 bp, Homo sapien
cctcggccaaggcttttatatcctt

SEQ ID NO: 3986037 - DNA, 25 bp, Homo sapien
cggccaaggcttttatatccttaag

SEQ ID NO: 3986038 - DNA, 25 bp, Homo sapien
tggacagatcggtagtcaacacgtt

SEQ ID NO: 3986039 - DNA, 25 bp, Homo sapien
caaccacctaaaagcttcgttgtgg

SEQ ID NO: 3986040 - DNA, 25 bp, Homo sapien
cacattggtggagcacagttgagct

SEQ ID NO: 3986041 - DNA, 25 bp, Homo sapien
caacacgtttgtggacacattggtg

SEQ ID NO: 3986042 - DNA, 25 bp, Homo sapien
gaagcctgtggagtcgaacacgctc

SEQ ID NO: 3986043 - DNA, 25 bp, Homo sapien
gcctgtggagtcgaacacgctcatt

SEQ ID NO: 3986044 - DNA, 25 bp, Homo sapien
gtggagtcgaacacgctcattcttc

SEQ ID NO: 3986045 - DNA, 25 bp, Homo sapien
gagaccgggagcccagaactagaag

SEQ ID NO: 3986046 - DNA, 25 bp, Homo sapien
tttctgtcacctctgcgtgtctcct

SEQ ID NO: 3986047 - DNA, 25 bp, Homo sapien
gtcacctctgcgtgtctcctccctt

SEQ ID NO: 3986048 - DNA, 25 bp, Homo sapien
acctctgcgtgtctcctcccttgtc

SEQ ID NO: 3986049 - DNA, 25 bp, Homo sapien
ctttctgtcacctctgcgtgtctcc

SEQ ID NO: 3986050 - DNA, 25 bp, Homo sapien
caaagagcatcagagttaatggcac

SEQ ID NO: 3986051 - DNA, 25 bp, Homo sapien
gagcatcagagttaatggcacagga

SEQ ID NO: 3986052 - DNA, 25 bp, Homo sapien
cacacaaagagcatcagagttaatg

SEQ ID NO: 3986053 - DNA, 25 bp, Homo sapien
acatacacacaaagagcatcagagt

SEQ ID NO: 3986054 - DNA, 25 bp, Homo sapien
ggtactgacagacctccatcccaat

SEQ ID NO: 3986055 - DNA, 25 bp, Homo sapien
gccttctttgcggtactgacagacc

SEQ ID NO: 3986056 - DNA, 25 bp, Homo sapien
tttgcggtactgacagacctccatc

SEQ ID NO: 3986057 - DNA, 25 bp, Homo sapien
tactgacagacctccatcccaatgt

SEQ ID NO: 3986058 - DNA, 25 bp, Homo sapien
cattgtccttggagacttttactgg

SEQ ID NO: 3986059 - DNA, 25 bp, Homo sapien
tgtcctcaaaattagccgaagctgg

SEQ ID NO: 3986060 - DNA, 25 bp, Homo sapien
gagaaatcattgtcctcaaaattag

SEQ ID NO: 3986061 - DNA, 25 bp, Homo sapien
gctggaatttacattccctggaaat

SEQ ID NO: 3986062 - DNA, 25 bp, Homo sapien
cattatgcatcggtcccctgaagct

SEQ ID NO: 3986063 - DNA, 25 bp, Homo sapien
tgcggcaaacccctgaagtctcaag

SEQ ID NO: 3986064 - DNA, 25 bp, Homo sapien
catgacaatgcgctggaaaatctcc

SEQ ID NO: 3986065 - DNA, 25 bp, Homo sapien
cgattgaaagaagactcgcccgctg

SEQ ID NO: 3986066 - DNA, 25 bp, Homo sapien
ctgattaacatagctcagctgggag

SEQ ID NO: 3986067 - DNA, 25 bp, Homo sapien
gattaacatagctcagctgggaggg

SEQ ID NO: 3986068 - DNA, 25 bp, Homo sapien
tgattaacatagctcagctgggagg

SEQ ID NO: 3986069 - DNA, 25 bp, Homo sapien
gcccaaagccgaacagagctgcaat

SEQ ID NO: 3986070 - DNA, 25 bp, Homo sapien
attgggaggacacacgagagcccca

SEQ ID NO: 3986071 - DNA, 25 bp, Homo sapien
gagctgcaatctcgaagccggtgcc

SEQ ID NO: 3986072 - DNA, 25 bp, Homo sapien
cagcttcagacctactggaggcgaa

SEQ ID NO: 3986073 - DNA, 25 bp, Homo sapien
gcagtttgagtacagtgctggtctg

SEQ ID NO: 3986074 - DNA, 25 bp, Homo sapien
gcatctttccagttcagcgtctgtg

SEQ ID NO: 3986075 - DNA, 25 bp, Homo sapien
gcagaaccctagtgaatatcccagg

SEQ ID NO: 3986076 - DNA, 25 bp, Homo sapien
tctagatgttgcaaagctcgttgca

SEQ ID NO: 3986077 - DNA, 25 bp, Homo sapien
atctgcaaagccgtttccagacaca

SEQ ID NO: 3986078 - DNA, 25 bp, Homo sapien
ctgcaaagccgtttccagacacatt

SEQ ID NO: 3986079 - DNA, 25 bp, Homo sapien
ggccatctgcaaagccgtttccaga

SEQ ID NO: 3986080 - DNA, 25 bp, Homo sapien
gaggccatctgcaaagccgtttcca

SEQ ID NO: 3986081 - DNA, 25 bp, Homo sapien
ctgagaggatgtcaactctgtaatc

SEQ ID NO: 3986082 - DNA, 25 bp, Homo sapien
cacaatacctctcggctataggaca

SEQ ID NO: 3986083 - DNA, 25 bp, Homo sapien
tctggaagacggaccctgccttctt

SEQ ID NO: 3986084 - DNA, 25 bp, Homo sapien
taatctgccactgtgatctgtggac

SEQ ID NO: 3986085 - DNA, 25 bp, Homo sapien
ttaggctggatgcttggatcatgca

SEQ ID NO: 3986086 - DNA, 25 bp, Homo sapien
tggcttaggctggatgcttggatca

SEQ ID NO: 3986087 - DNA, 25 bp, Homo sapien
caggtgactgcgctttgttggctta

SEQ ID NO: 3986088 - DNA, 25 bp, Homo sapien
agactttgccatctcgccggccagg

SEQ ID NO: 3986089 - DNA, 25 bp, Homo sapien
tggttattcccctaatggctttagc

SEQ ID NO: 3986090 - DNA, 25 bp, Homo sapien
tgcctgactttggttattcccctaa

SEQ ID NO: 3986091 - DNA, 25 bp, Homo sapien
cctgactttggttattcccctaatg

SEQ ID NO: 3986092 - DNA, 25 bp, Homo sapien
tgactttggttattcccctaatggc

SEQ ID NO: 3986093 - DNA, 25 bp, Homo sapien
cttcaggtggggtcatggcagccat

SEQ ID NO: 3986094 - DNA, 25 bp, Homo sapien
ctgagctgataccaaagggatgctg

SEQ ID NO: 3986095 - DNA, 25 bp, Homo sapien
gagctgataccaaagggatgctgtg

SEQ ID NO: 3986096 - DNA, 25 bp, Homo sapien
acttcaggtggggtcatggcagcca

SEQ ID NO: 3986097 - DNA, 25 bp, Homo sapien
tccccagcagatccgcgtggaggtg

SEQ ID NO: 3986098 - DNA, 25 bp, Homo sapien
cacatacaccaggatttgtctgact

SEQ ID NO: 3986099 - DNA, 25 bp, Homo sapien
tgtctgacttgggtcaatgacccag

SEQ ID NO: 3986100 - DNA, 25 bp, Homo sapien
ggaggtgcaggatttttcaccacat

SEQ ID NO: 3986101 - DNA, 25 bp, Homo sapien
gcaatgtgcatatccttttcttgta

SEQ ID NO: 3986102 - DNA, 25 bp, Homo sapien
cccttagaagatcttgcttgtaaga

SEQ ID NO: 3986103 - DNA, 25 bp, Homo sapien
tcttcttgtagattgcacatttagc

SEQ ID NO: 3986104 - DNA, 25 bp, Homo sapien
tatctggtttatacattccttcctc

SEQ ID NO: 3986105 - DNA, 25 bp, Homo sapien
tgtccttgaccaagctggcagcagg

SEQ ID NO: 3986106 - DNA, 25 bp, Homo sapien
acagagggggtgcttgggcagtgtg

SEQ ID NO: 3986107 - DNA, 25 bp, Homo sapien
caggcgatgggcagaccacagaggg

SEQ ID NO: 3986108 - DNA, 25 bp, Homo sapien
cagtgtggacacagctgaaatcccc

SEQ ID NO: 3986109 - DNA, 25 bp, Homo sapien
aaagatgacatcatcacccggccac

SEQ ID NO: 3986110 - DNA, 25 bp, Homo sapien
gatgacatcatcacccggccactgc

SEQ ID NO: 3986111 - DNA, 25 bp, Homo sapien
tgacatcatcacccggccactgccc

SEQ ID NO: 3986112 - DNA, 25 bp, Homo sapien
aagatgacatcatcacccggccact

SEQ ID NO: 3986113 - DNA, 25 bp, Homo sapien
atggagcgccggcagtcacgcagcc

SEQ ID NO: 3986114 - DNA, 25 bp, Homo sapien
cattttcaggcctcccgggcttttg

SEQ ID NO: 3986115 - DNA, 25 bp, Homo sapien
ccaaggatatttagcaggtgagtat

SEQ ID NO: 3986116 - DNA, 25 bp, Homo sapien
gaattccgaagagcggaagagcccg

SEQ ID NO: 3986117 - DNA, 25 bp, Homo sapien
gggactgagctcctcggcatatgca

SEQ ID NO: 3986118 - DNA, 25 bp, Homo sapien
atcacccggtggtgcgtgctcctct

SEQ ID NO: 3986119 - DNA, 25 bp, Homo sapien
ttggaccgtccgcaatgatatcatc

SEQ ID NO: 3986120 - DNA, 25 bp, Homo sapien
gaaaagctggataattcttggaccg

SEQ ID NO: 3986121 - DNA, 25 bp, Homo sapien
cttcctccaacacggatgacttttt

SEQ ID NO: 3986122 - DNA, 25 bp, Homo sapien
ctccaacacggatgactttttacac

SEQ ID NO: 3986123 - DNA, 25 bp, Homo sapien
tgctgttgagtttggggacctctgt

SEQ ID NO: 3986124 - DNA, 25 bp, Homo sapien
catgtgctgttgagtttggggacct

SEQ ID NO: 3986125 - DNA, 25 bp, Homo sapien
ccgtgctggagtatgaccgagagcc

SEQ ID NO: 3986126 - DNA, 25 bp, Homo sapien
ttctgagcaagccagcggacagagc

SEQ ID NO: 3986127 - DNA, 25 bp, Homo sapien
tgtccttcctgtgtgctatgcgagg

SEQ ID NO: 3986128 - DNA, 25 bp, Homo sapien
tgcgaggacctttaatccttgttgg

SEQ ID NO: 3986129 - DNA, 25 bp, Homo sapien
acacctgcatttccggggcgaatcg

SEQ ID NO: 3986130 - DNA, 25 bp, Homo sapien
ctgcatttccggggcgaatcggcat

SEQ ID NO: 3986131 - DNA, 25 bp, Homo sapien
gtgggagaaggccacacctgcattt

SEQ ID NO: 3986132 - DNA, 25 bp, Homo sapien
agaaggccacacctgcatttccggg

SEQ ID NO: 3986133 - DNA, 25 bp, Homo sapien
tataagactggactcccaccagacg

SEQ ID NO: 3986134 - DNA, 25 bp, Homo sapien
tcctccggaggtgccgccttcaatt

SEQ ID NO: 3986135 - DNA, 25 bp, Homo sapien
caccagacgtctttgcaggagtcac

SEQ ID NO: 3986136 - DNA, 25 bp, Homo sapien
ttcaattatcagcatccaaggcccg

SEQ ID NO: 3986137 - DNA, 25 bp, Homo sapien
cccggagggaccgtgctgggttcat

SEQ ID NO: 3986138 - DNA, 25 bp, Homo sapien
tccatcagcagcatgtgcaggggcc

SEQ ID NO: 3986139 - DNA, 25 bp, Homo sapien
gctctcccgcccggagggaccgtgc

SEQ ID NO: 3986140 - DNA, 25 bp, Homo sapien
ccatcagcagcatgtgcaggggcct

SEQ ID NO: 3986141 - DNA, 25 bp, Homo sapien
accactgaggtgctgtagtccatac

SEQ ID NO: 3986142 - DNA, 25 bp, Homo sapien
tcagaggaggacagatagtggacac

SEQ ID NO: 3986143 - DNA, 25 bp, Homo sapien
gacacttgctgttgccttgttgcct

SEQ ID NO: 3986144 - DNA, 25 bp, Homo sapien
caatgaggatgagccttgatgggca

SEQ ID NO: 3986145 - DNA, 25 bp, Homo sapien
cctctagttgagtgtgggctggcag

SEQ ID NO: 3986146 - DNA, 25 bp, Homo sapien
aggggacacagagggtccttccact

SEQ ID NO: 3986147 - DNA, 25 bp, Homo sapien
ctctagttgagtgtgggctggcagg

SEQ ID NO: 3986148 - DNA, 25 bp, Homo sapien
gacacagagggtccttccactgcat

SEQ ID NO: 3986149 - DNA, 25 bp, Homo sapien
ggctggctctactgcggctgaaagc

SEQ ID NO: 3986150 - DNA, 25 bp, Homo sapien
ttctcaataagagcttgatgaacaa

SEQ ID NO: 3986151 - DNA, 25 bp, Homo sapien
gctggctctactgcggctgaaagca

SEQ ID NO: 3986152 - DNA, 25 bp, Homo sapien
ctggtgacggaagtgctgccacctg

SEQ ID NO: 3986153 - DNA, 25 bp, Homo sapien
ggcataacttggattgatacaaaga

SEQ ID NO: 3986154 - DNA, 25 bp, Homo sapien
cactggcataacttggattgataca

SEQ ID NO: 3986155 - DNA, 25 bp, Homo sapien
tgacactggcataacttggattgat

SEQ ID NO: 3986156 - DNA, 25 bp, Homo sapien
cttggattgatacaaagagacattg

SEQ ID NO: 3986157 - DNA, 25 bp, Homo sapien
cacatgtgagcacctctgcccatga

SEQ ID NO: 3986158 - DNA, 25 bp, Homo sapien
gagaaagctttgtcctgcaactact

SEQ ID NO: 3986159 - DNA, 25 bp, Homo sapien
cttgaaaagagctccccggcatgat

SEQ ID NO: 3986160 - DNA, 25 bp, Homo sapien
taatttgccgaaggtagcacagagc

SEQ ID NO: 3986161 - DNA, 25 bp, Homo sapien
ataagggtcccaggattgctcctgt

SEQ ID NO: 3986162 - DNA, 25 bp, Homo sapien
attgctcctgttcttatggaaaata

SEQ ID NO: 3986163 - DNA, 25 bp, Homo sapien
tatggaaaatatctcggaaatcccc

SEQ ID NO: 3986164 - DNA, 25 bp, Homo sapien
cggaaatccccgagctgagcatttt

SEQ ID NO: 3986165 - DNA, 25 bp, Homo sapien
tcagatctgaacagtatccacagcc

SEQ ID NO: 3986166 - DNA, 25 bp, Homo sapien
tcttgcccaggtcgatggcagaaca

SEQ ID NO: 3986167 - DNA, 25 bp, Homo sapien
ggcactgggtaatttgccccatgat

SEQ ID NO: 3986168 - DNA, 25 bp, Homo sapien
gaacagcagtctgggtcatggcact

SEQ ID NO: 3986169 - DNA, 25 bp, Homo sapien
tagcaaagggccaaacactgcattg

SEQ ID NO: 3986170 - DNA, 25 bp, Homo sapien
taaacagcataaagtgagaccatgg

SEQ ID NO: 3986171 - DNA, 25 bp, Homo sapien
ggtgaccgcaggtaacctaaacagc

SEQ ID NO: 3986172 - DNA, 25 bp, Homo sapien
tattcttgaaccgagggtgaccgca

SEQ ID NO: 3986173 - DNA, 25 bp, Homo sapien
aactggaagctaggttttactggtg

SEQ ID NO: 3986174 - DNA, 25 bp, Homo sapien
ctggaagctaggttttactggtgtc

SEQ ID NO: 3986175 - DNA, 25 bp, Homo sapien
ttttactggtgtcatcaaggatcct

SEQ ID NO: 3986176 - DNA, 25 bp, Homo sapien
cagaactggaagctaggttttactg

SEQ ID NO: 3986177 - DNA, 25 bp, Homo sapien
ttgaaaatacttcccatctgggtgg

SEQ ID NO: 3986178 - DNA, 25 bp, Homo sapien
gaaaggtcactgacaacatcagtca

SEQ ID NO: 3986179 - DNA, 25 bp, Homo sapien
gctggctacatttcacagtggatag

SEQ ID NO: 3986180 - DNA, 25 bp, Homo sapien
cagtggatagctttcaaatgggtgg

SEQ ID NO: 3986181 - DNA, 25 bp, Homo sapien
gggagttctgctacaaacattgtcc

SEQ ID NO: 3986182 - DNA, 25 bp, Homo sapien
gggtccttcaccttgtctggatcca

SEQ ID NO: 3986183 - DNA, 25 bp, Homo sapien
gaagcagtttcgctgaacccagtag

SEQ ID NO: 3986184 - DNA, 25 bp, Homo sapien
gtcctcagtttaccagggtccttca

SEQ ID NO: 3986185 - DNA, 25 bp, Homo sapien
tctccgcatgggatggctcagccat

SEQ ID NO: 3986186 - DNA, 25 bp, Homo sapien
tcccgcccacatctccgcatgggat

SEQ ID NO: 3986187 - DNA, 25 bp, Homo sapien
acatctccgcatgggatggctcagc

SEQ ID NO: 3986188 - DNA, 25 bp, Homo sapien
ccacatctccgcatgggatggctca

SEQ ID NO: 3986189 - DNA, 25 bp, Homo sapien
atggcatacatctttaatgcggccg

SEQ ID NO: 3986190 - DNA, 25 bp, Homo sapien
gtcgtatttcaccaagagctgcaaa

SEQ ID NO: 3986191 - DNA, 25 bp, Homo sapien
taatctttgttgaatacaatggcat

SEQ ID NO: 3986192 - DNA, 25 bp, Homo sapien
taatgcggccgctgtcaagtcgtat

SEQ ID NO: 3986193 - DNA, 25 bp, Homo sapien
ggagtttttgaaagcccagaagaga

SEQ ID NO: 3986194 - DNA, 25 bp, Homo sapien
gagtttttgaaagcccagaagagac

SEQ ID NO: 3986195 - DNA, 25 bp, Homo sapien
actgcagccctcctatgcggtgtaa

SEQ ID NO: 3986196 - DNA, 25 bp, Homo sapien
cagaggggatagagcctgtgggacc

SEQ ID NO: 3986197 - DNA, 25 bp, Homo sapien
ctatgcggtgtaaggctgccgtgca

SEQ ID NO: 3986198 - DNA, 25 bp, Homo sapien
cctcctatgcggtgtaaggctgccg

SEQ ID NO: 3986199 - DNA, 25 bp, Homo sapien
atgcaaagcattctcgcaggctgcc

SEQ ID NO: 3986200 - DNA, 25 bp, Homo sapien
catgcaaagcattctcgcaggctgc

SEQ ID NO: 3986201 - DNA, 25 bp, Homo sapien
aacatgcaaagcattctcgcaggct

SEQ ID NO: 3986202 - DNA, 25 bp, Homo sapien
tgcaaagcattctcgcaggctgcca

SEQ ID NO: 3986203 - DNA, 25 bp, Homo sapien
ctctggccatacctggctttgctgc

SEQ ID NO: 3986204 - DNA, 25 bp, Homo sapien
tgctctggccatacctggctttgct

SEQ ID NO: 3986205 - DNA, 25 bp, Homo sapien
ggatttccatcggatgctttctgaa

SEQ ID NO: 3986206 - DNA, 25 bp, Homo sapien
gctttctgaatttgcatgtggcagg

SEQ ID NO: 3986207 - DNA, 25 bp, Homo sapien
ttccgtgggtgtttccaatctgcca

SEQ ID NO: 3986208 - DNA, 25 bp, Homo sapien
tattctgatggtaaggaactcttag

SEQ ID NO: 3986209 - DNA, 25 bp, Homo sapien
tagcagagggctacattgacatcta

SEQ ID NO: 3986210 - DNA, 25 bp, Homo sapien
agagggctacattgacatctacacg

SEQ ID NO: 3986211 - DNA, 25 bp, Homo sapien
tattccaattgctgccccgtcacat

SEQ ID NO: 3986212 - DNA, 25 bp, Homo sapien
catagcagagggctacattgacatc

SEQ ID NO: 3986213 - DNA, 25 bp, Homo sapien
agcggagagcctgaaaatcccctcc

SEQ ID NO: 3986214 - DNA, 25 bp, Homo sapien
ctccataaaagctttcaccgtgtgt

SEQ ID NO: 3986215 - DNA, 25 bp, Homo sapien
gtgtgttcaacagccagcggagagc

SEQ ID NO: 3986216 - DNA, 25 bp, Homo sapien
gagcctgaaaatcccctccttagag

SEQ ID NO: 3986217 - DNA, 25 bp, Homo sapien
gtgttgcagagccaggagatcagcc

SEQ ID NO: 3986218 - DNA, 25 bp, Homo sapien
agagccaggagatcagccttgagag

SEQ ID NO: 3986219 - DNA, 25 bp, Homo sapien
tgcagagccaggagatcagccttga

SEQ ID NO: 3986220 - DNA, 25 bp, Homo sapien
tgttgcagagccaggagatcagcct

SEQ ID NO: 3986221 - DNA, 25 bp, Homo sapien
tggacatcgtctttgacacttgccc

SEQ ID NO: 3986222 - DNA, 25 bp, Homo sapien
ctgggttttaacgtgctggacatcg

SEQ ID NO: 3986223 - DNA, 25 bp, Homo sapien
gggttttaacgtgctggacatcgtc

SEQ ID NO: 3986224 - DNA, 25 bp, Homo sapien
ttgacacttgccctgcaagctgcat

SEQ ID NO: 3986225 - DNA, 25 bp, Homo sapien
acttgaaatctggcagtgttattgc

SEQ ID NO: 3986226 - DNA, 25 bp, Homo sapien
cacttgaaatctggcagtgttattg

SEQ ID NO: 3986227 - DNA, 25 bp, Homo sapien
gcacttgaaatctggcagtgttatt

SEQ ID NO: 3986228 - DNA, 25 bp, Homo sapien
tgttccaggccatgcggctgattca

SEQ ID NO: 3986229 - DNA, 25 bp, Homo sapien
aaagagactgctccgagggtgttcc

SEQ ID NO: 3986230 - DNA, 25 bp, Homo sapien
gctgaactgccggattgagaacttt

SEQ ID NO: 3986231 - DNA, 25 bp, Homo sapien
tgagttcaacaggtcaccaggtgaa

SEQ ID NO: 3986232 - DNA, 25 bp, Homo sapien
cacgtgttgatcatctgcgctgttc

SEQ ID NO: 3986233 - DNA, 25 bp, Homo sapien
tgatcatctgcgctgttccagctct

SEQ ID NO: 3986234 - DNA, 25 bp, Homo sapien
caaacacgtgttgatcatctgcgct

SEQ ID NO: 3986235 - DNA, 25 bp, Homo sapien
tgttgatcatctgcgctgttccagc

SEQ ID NO: 3986236 - DNA, 25 bp, Homo sapien
tcttatttgcatcaagagggagccc

SEQ ID NO: 3986237 - DNA, 25 bp, Homo sapien
ccggtgatgtctcgtgaaataatgc

SEQ ID NO: 3986238 - DNA, 25 bp, Homo sapien
tagagacttgtgcttcccggtgatg

SEQ ID NO: 3986239 - DNA, 25 bp, Homo sapien
tcgtggaaggagacgaactctggca

SEQ ID NO: 3986240 - DNA, 25 bp, Homo sapien
caggcaaaccggtcaaatatcttgg

SEQ ID NO: 3986241 - DNA, 25 bp, Homo sapien
tacaggttgacaggcaaaccggtca

SEQ ID NO: 3986242 - DNA, 25 bp, Homo sapien
agaagctgcctacaggttgacaggc

SEQ ID NO: 3986243 - DNA, 25 bp, Homo sapien
tcttggtgtaatcactcaggtaatt

SEQ ID NO: 3986244 - DNA, 25 bp, Homo sapien
actcttgcgtcaggcaaagccagca

SEQ ID NO: 3986245 - DNA, 25 bp, Homo sapien
tccgagcctgcagttcccgacgttg

SEQ ID NO: 3986246 - DNA, 25 bp, Homo sapien
cagttcccgacgttgtgtgaaggag

SEQ ID NO: 3986247 - DNA, 25 bp, Homo sapien
gctacccggtgctcaactcttgcgt

SEQ ID NO: 3986248 - DNA, 25 bp, Homo sapien
gttgctgtcattaagaatggactgg

SEQ ID NO: 3986249 - DNA, 25 bp, Homo sapien
gctgtcattaagaatggactggaat

SEQ ID NO: 3986250 - DNA, 25 bp, Homo sapien
gtcattaagaatggactggaatttc

SEQ ID NO: 3986251 - DNA, 25 bp, Homo sapien
tttgttgctgtcattaagaatggac

SEQ ID NO: 3986252 - DNA, 25 bp, Homo sapien
ggagatcctcatgacaacacgcaga

SEQ ID NO: 3986253 - DNA, 25 bp, Homo sapien
ggaagggagatcctcatgacaacac

SEQ ID NO: 3986254 - DNA, 25 bp, Homo sapien
gatcctcatgacaacacgcagacct

SEQ ID NO: 3986255 - DNA, 25 bp, Homo sapien
gggctctgagccacgtaggaggaga

SEQ ID NO: 3986256 - DNA, 25 bp, Homo sapien
ttgaggggagcacggatcacctgtt

SEQ ID NO: 3986257 - DNA, 25 bp, Homo sapien
tctactttccagtagccctctttct

SEQ ID NO: 3986258 - DNA, 25 bp, Homo sapien
ggcctcagagggagagtaatttgat

SEQ ID NO: 3986259 - DNA, 25 bp, Homo sapien
catagccagccctaggggcctcaga

SEQ ID NO: 3986260 - DNA, 25 bp, Homo sapien
tatgaagtgacggtgatttacatct

SEQ ID NO: 3986261 - DNA, 25 bp, Homo sapien
tggaagagctaacgcaaaacaaacc

SEQ ID NO: 3986262 - DNA, 25 bp, Homo sapien
caacattaccaaagcatattacaag

SEQ ID NO: 3986263 - DNA, 25 bp, Homo sapien
gattgtcaatctattttcagctcaa

SEQ ID NO: 3986264 - DNA, 25 bp, Homo sapien
tgccaggtactcactcaggaaagga

SEQ ID NO: 3986265 - DNA, 25 bp, Homo sapien
gatgactgccaggtactcactcagg

SEQ ID NO: 3986266 - DNA, 25 bp, Homo sapien
cttgatgactgccaggtactcactc

SEQ ID NO: 3986267 - DNA, 25 bp, Homo sapien
gactgccaggtactcactcaggaaa

SEQ ID NO: 3986268 - DNA, 25 bp, Homo sapien
atttgctagtaagcttatctgacat

SEQ ID NO: 3986269 - DNA, 25 bp, Homo sapien
cagcagagcacaaaggatgccgtct

SEQ ID NO: 3986270 - DNA, 25 bp, Homo sapien
catcagcagagcacaaaggatgccg

SEQ ID NO: 3986271 - DNA, 25 bp, Homo sapien
aaggatgccgtcttggggatgcaga

SEQ ID NO: 3986272 - DNA, 25 bp, Homo sapien
cccaatggcaaagtagcattggaaa

SEQ ID NO: 3986273 - DNA, 25 bp, Homo sapien
ttcacccaatggcaaagtagcattg

SEQ ID NO: 3986274 - DNA, 25 bp, Homo sapien
tttgcttcacccaatggcaaagtag

SEQ ID NO: 3986275 - DNA, 25 bp, Homo sapien
ggaagggggatgctatcagtttata

SEQ ID NO: 3986276 - DNA, 25 bp, Homo sapien
ttggaggaggagtcacaaggacaca

SEQ ID NO: 3986277 - DNA, 25 bp, Homo sapien
atgttggaggaggagtcacaaggac

SEQ ID NO: 3986278 - DNA, 25 bp, Homo sapien
gaggagtcacaaggacacaccaaca

SEQ ID NO: 3986279 - DNA, 25 bp, Homo sapien
agaaaaccttgtgccatctgcagaa

SEQ ID NO: 3986280 - DNA, 25 bp, Homo sapien
tcagcgtgcgtgtaaaagtgtgtca

SEQ ID NO: 3986281 - DNA, 25 bp, Homo sapien
tgtgggtcacaagaagtcggactcc

SEQ ID NO: 3986282 - DNA, 25 bp, Homo sapien
gcaggaaagccacgaaagtcttgtc

SEQ ID NO: 3986283 - DNA, 25 bp, Homo sapien
gaatcatttcgacagaagaggcagc

SEQ ID NO: 3986284 - DNA, 25 bp, Homo sapien
aagtcccttttccatcctcccagca

SEQ ID NO: 3986285 - DNA, 25 bp, Homo sapien
cccttttccatcctcccagcaaggg

SEQ ID NO: 3986286 - DNA, 25 bp, Homo sapien
tccatcctcccagcaagggcagcat

SEQ ID NO: 3986287 - DNA, 25 bp, Homo sapien
tttccatcctcccagcaagggcagc

SEQ ID NO: 3986288 - DNA, 25 bp, Homo sapien
gattccagtactcatctgagtaatt

SEQ ID NO: 3986289 - DNA, 25 bp, Homo sapien
tccagtactcatctgagtaattcca

SEQ ID NO: 3986290 - DNA, 25 bp, Homo sapien
cttctgattccagtactcatctgag

SEQ ID NO: 3986291 - DNA, 25 bp, Homo sapien
ctgattccagtactcatctgagtaa

SEQ ID NO: 3986292 - DNA, 25 bp, Homo sapien
ttggaagcatccaagatgaagccat

SEQ ID NO: 3986293 - DNA, 25 bp, Homo sapien
ctttgggtctggaatgggactcctc

SEQ ID NO: 3986294 - DNA, 25 bp, Homo sapien
tttgggtctggaatgggactcctct

SEQ ID NO: 3986295 - DNA, 25 bp, Homo sapien
ttgggtctggaatgggactcctctc

SEQ ID NO: 3986296 - DNA, 25 bp, Homo sapien
tccactgggaatctcgggtcatggg

SEQ ID NO: 3986297 - DNA, 25 bp, Homo sapien
tggcctcccattggagtaacggagc

SEQ ID NO: 3986298 - DNA, 25 bp, Homo sapien
gacagatagctgtgttccagcgaca

SEQ ID NO: 3986299 - DNA, 25 bp, Homo sapien
gaaaggccgtgtaaggctgttccat

SEQ ID NO: 3986300 - DNA, 25 bp, Homo sapien
cagaagccagtgcatgaaaggccgt

SEQ ID NO: 3986301 - DNA, 25 bp, Homo sapien
cacgaagggtagtcagctggaaaat

SEQ ID NO: 3986302 - DNA, 25 bp, Homo sapien
catacatggggagacaagcctggga

SEQ ID NO: 3986303 - DNA, 25 bp, Homo sapien
ctggtgggagccactccctgggatg

SEQ ID NO: 3986304 - DNA, 25 bp, Homo sapien
agacacgaagggtagtcagctggaa

SEQ ID NO: 3986305 - DNA, 25 bp, Homo sapien
ccaatgtactggatcttggtgaaga

SEQ ID NO: 3986306 - DNA, 25 bp, Homo sapien
caatgtactggatcttggtgaagag

SEQ ID NO: 3986307 - DNA, 25 bp, Homo sapien
ccatcattatccagggcttcagcac

SEQ ID NO: 3986308 - DNA, 25 bp, Homo sapien
ggaccatcattatccagggcttcag

SEQ ID NO: 3986309 - DNA, 25 bp, Homo sapien
aaggaccatcattatccagggcttc

SEQ ID NO: 3986310 - DNA, 25 bp, Homo sapien
gaccatcattatccagggcttcagc

SEQ ID NO: 3986311 - DNA, 25 bp, Homo sapien
gacagggcccatttcttcatcacct

SEQ ID NO: 3986312 - DNA, 25 bp, Homo sapien
gaggacagggcccatttcttcatca

SEQ ID NO: 3986313 - DNA, 25 bp, Homo sapien
ttgaggacagggcccatttcttcat

SEQ ID NO: 3986314 - DNA, 25 bp, Homo sapien
ctccttggatggtgggctccttgag

SEQ ID NO: 3986315 - DNA, 25 bp, Homo sapien
gagcacacgagcttccatacatgct

SEQ ID NO: 3986316 - DNA, 25 bp, Homo sapien
ccagagagcacacgagcttccatac

SEQ ID NO: 3986317 - DNA, 25 bp, Homo sapien
acacgagcttccatacatgctctgc

SEQ ID NO: 3986318 - DNA, 25 bp, Homo sapien
agccttccaggtcccgcgaccacag

SEQ ID NO: 3986319 - DNA, 25 bp, Homo sapien
ggagcctccgtgcaggaagcagcat

SEQ ID NO: 3986320 - DNA, 25 bp, Homo sapien
gccattggtggctcctaagggtcgt

SEQ ID NO: 3986321 - DNA, 25 bp, Homo sapien
tcctaagggtcgtttctggagcctc

SEQ ID NO: 3986322 - DNA, 25 bp, Homo sapien
agccgatgtcaggccattggtggct

SEQ ID NO: 3986323 - DNA, 25 bp, Homo sapien
ttggaaagaaagaatctcatgctga

SEQ ID NO: 3986324 - DNA, 25 bp, Homo sapien
ggctgcagatcttccgacttctcat

SEQ ID NO: 3986325 - DNA, 25 bp, Homo sapien
cagatcttccgacttctcatctctg

SEQ ID NO: 3986326 - DNA, 25 bp, Homo sapien
catgctgatgataggctgcagatct

SEQ ID NO: 3986327 - DNA, 25 bp, Homo sapien
cttattatgacttcctcagctggca

SEQ ID NO: 3986328 - DNA, 25 bp, Homo sapien
tactcccagaatttcaaagatacct

SEQ ID NO: 3986329 - DNA, 25 bp, Homo sapien
tacctataggaacttcagggcagag

SEQ ID NO: 3986330 - DNA, 25 bp, Homo sapien
tcctcccagccgtaggcctcagctg

SEQ ID NO: 3986331 - DNA, 25 bp, Homo sapien
accagggagatttgcattggccctg

SEQ ID NO: 3986332 - DNA, 25 bp, Homo sapien
atggcaggatgttcttaaaccaggg

SEQ ID NO: 3986333 - DNA, 25 bp, Homo sapien
agtagcgtgcttgaacctaatcacc

SEQ ID NO: 3986334 - DNA, 25 bp, Homo sapien
cagtagcgtgcttgaacctaatcac

SEQ ID NO: 3986335 - DNA, 25 bp, Homo sapien
tagcgtgcttgaacctaatcaccat

SEQ ID NO: 3986336 - DNA, 25 bp, Homo sapien
gtagcgtgcttgaacctaatcacca

SEQ ID NO: 3986337 - DNA, 25 bp, Homo sapien
gggtcactcggaatataatgtgtag

SEQ ID NO: 3986338 - DNA, 25 bp, Homo sapien
tgttccattccacaaatttaatgta

SEQ ID NO: 3986339 - DNA, 25 bp, Homo sapien
taaggctttgttatatcaatgggtt

SEQ ID NO: 3986340 - DNA, 25 bp, Homo sapien
agaaaccagtaactataaggctttg

SEQ ID NO: 3986341 - DNA, 25 bp, Homo sapien
tagatccaatttagccaagtgctcc

SEQ ID NO: 3986342 - DNA, 25 bp, Homo sapien
acacagccacaatagattgaactcc

SEQ ID NO: 3986343 - DNA, 25 bp, Homo sapien
tccatgacgttcatggcagacccta

SEQ ID NO: 3986344 - DNA, 25 bp, Homo sapien
tgtctcagctgctatgacagaagca

SEQ ID NO: 3986345 - DNA, 25 bp, Homo sapien
ccttctacttgagggctgcactggg

SEQ ID NO: 3986346 - DNA, 25 bp, Homo sapien
aaggacccattgcagcccacctggg

SEQ ID NO: 3986347 - DNA, 25 bp, Homo sapien
cccggatggactgaggggccttcta

SEQ ID NO: 3986348 - DNA, 25 bp, Homo sapien
tcgctggtgtgggcaaaggacccat

SEQ ID NO: 3986349 - DNA, 25 bp, Homo sapien
tgaaggcgtgcaatgagcacatgat

SEQ ID NO: 3986350 - DNA, 25 bp, Homo sapien
actggatggagtcaatgtcactgtc

SEQ ID NO: 3986351 - DNA, 25 bp, Homo sapien
tgtccttggcgtctgttgggatgaa

SEQ ID NO: 3986352 - DNA, 25 bp, Homo sapien
ggcgtgcaatgagcacatgattttg

SEQ ID NO: 3986353 - DNA, 25 bp, Homo sapien
tggtcacacctccttgctgggcggc

SEQ ID NO: 3986354 - DNA, 25 bp, Homo sapien
tgatggccagtgcacactccttcag

SEQ ID NO: 3986355 - DNA, 25 bp, Homo sapien
gaactcccaacacaatgtggcctgg

SEQ ID NO: 3986356 - DNA, 25 bp, Homo sapien
actccttcagcctgatgccgctgaa

SEQ ID NO: 3986357 - DNA, 25 bp, Homo sapien
gtcggcctcgcccatggaagttctg

SEQ ID NO: 3986358 - DNA, 25 bp, Homo sapien
tttcctaggcataggcagtcggcct

SEQ ID NO: 3986359 - DNA, 25 bp, Homo sapien
gaacctcagtggaggagactcctgt

SEQ ID NO: 3986360 - DNA, 25 bp, Homo sapien
ctgggttaagaaaagttcaaccatg

SEQ ID NO: 3986361 - DNA, 25 bp, Homo sapien
ctcaggatgtggggaggcttctaca

SEQ ID NO: 3986362 - DNA, 25 bp, Homo sapien
gaccagcttggtggcgtcatcatcc

SEQ ID NO: 3986363 - DNA, 25 bp, Homo sapien
ggaggcttctacagatgaccagctt

SEQ ID NO: 3986364 - DNA, 25 bp, Homo sapien
atgtggggaggcttctacagatgac

SEQ ID NO: 3986365 - DNA, 25 bp, Homo sapien
gcatttgtttttgtcccagggctgc

SEQ ID NO: 3986366 - DNA, 25 bp, Homo sapien
catttgtttttgtcccagggctgct

SEQ ID NO: 3986367 - DNA, 25 bp, Homo sapien
tcagccttccgctgctcccacttgc

SEQ ID NO: 3986368 - DNA, 25 bp, Homo sapien
ttccgctgctcccacttgctggctg

SEQ ID NO: 3986369 - DNA, 25 bp, Homo sapien
cctgattcctgcgccgcagccacca

SEQ ID NO: 3986370 - DNA, 25 bp, Homo sapien
ccctgattcctgcgccgcagccacc

SEQ ID NO: 3986371 - DNA, 25 bp, Homo sapien
cccctgattcctgcgccgcagccac

SEQ ID NO: 3986372 - DNA, 25 bp, Homo sapien
ctagaactggggacatacaagttgc

SEQ ID NO: 3986373 - DNA, 25 bp, Homo sapien
tagaactggggacatacaagttgct

SEQ ID NO: 3986374 - DNA, 25 bp, Homo sapien
tctctgtgtcccgattattgccgtt

SEQ ID NO: 3986375 - DNA, 25 bp, Homo sapien
tgtcccgattattgccgttgcctgg

SEQ ID NO: 3986376 - DNA, 25 bp, Homo sapien
tctgtgtcccgattattgccgttgc

SEQ ID NO: 3986377 - DNA, 25 bp, Homo sapien
gattattgccgttgcctggcctggg

SEQ ID NO: 3986378 - DNA, 25 bp, Homo sapien
ggccaggaacaggttattctcagga

SEQ ID NO: 3986379 - DNA, 25 bp, Homo sapien
tacagcatgtcatatccccacagca

SEQ ID NO: 3986380 - DNA, 25 bp, Homo sapien
aacaggttattctcaggaaggcaca

SEQ ID NO: 3986381 - DNA, 25 bp, Homo sapien
acagctcagactccatacctttctt

SEQ ID NO: 3986382 - DNA, 25 bp, Homo sapien
ggacacagcagttagactcaaagct

SEQ ID NO: 3986383 - DNA, 25 bp, Homo sapien
aggacacagcagttagactcaaagc

SEQ ID NO: 3986384 - DNA, 25 bp, Homo sapien
gacacagcagttagactcaaagctc

SEQ ID NO: 3986385 - DNA, 25 bp, Homo sapien
ttatttgggtatggcaccaaacgaa

SEQ ID NO: 3986386 - DNA, 25 bp, Homo sapien
ggcaccaaacgaagcattttcttta

SEQ ID NO: 3986387 - DNA, 25 bp, Homo sapien
aagcattttctttatgttccagcag

SEQ ID NO: 3986388 - DNA, 25 bp, Homo sapien
ggtatggcaccaaacgaagcatttt

SEQ ID NO: 3986389 - DNA, 25 bp, Homo sapien
gtgattgagtgagccgccgagcggt

SEQ ID NO: 3986390 - DNA, 25 bp, Homo sapien
tgagtgaggagcactgttccaacat

SEQ ID NO: 3986391 - DNA, 25 bp, Homo sapien
caggtatccaggctccggagctttc

SEQ ID NO: 3986392 - DNA, 25 bp, Homo sapien
tctcacggtgaaggtgattgagtga

SEQ ID NO: 3986393 - DNA, 25 bp, Homo sapien
tctggagtaaaacgctggcctcttt

SEQ ID NO: 3986394 - DNA, 25 bp, Homo sapien
tgaaatcattcgtctggagtaaaac

SEQ ID NO: 3986395 - DNA, 25 bp, Homo sapien
ggtattgaaatcattcgtctggagt

SEQ ID NO: 3986396 - DNA, 25 bp, Homo sapien
cattcgtctggagtaaaacgctggc

SEQ ID NO: 3986397 - DNA, 25 bp, Homo sapien
agagcgacaggacctgcactctctg

SEQ ID NO: 3986398 - DNA, 25 bp, Homo sapien
gcactctctgagaccgcccttggtt

SEQ ID NO: 3986399 - DNA, 25 bp, Homo sapien
ctgagaccgcccttggttctcagaa

SEQ ID NO: 3986400 - DNA, 25 bp, Homo sapien
ctagagcgacaggacctgcactctc

SEQ ID NO: 3986401 - DNA, 25 bp, Homo sapien
catgcatgaactgagcgaaacgtca

SEQ ID NO: 3986402 - DNA, 25 bp, Homo sapien
gacacacggcacctccgaggacatg

SEQ ID NO: 3986403 - DNA, 25 bp, Homo sapien
ttcgccgcacaagctggaacagaca

SEQ ID NO: 3986404 - DNA, 25 bp, Homo sapien
ggtgagcagatcttccttcgccgca

SEQ ID NO: 3986405 - DNA, 25 bp, Homo sapien
gaaccacattgccttccatgagagt

SEQ ID NO: 3986406 - DNA, 25 bp, Homo sapien
ccatgagagtgtcaagcgtagaata

SEQ ID NO: 3986407 - DNA, 25 bp, Homo sapien
tccagaacgggcaggttgtagacag

SEQ ID NO: 3986408 - DNA, 25 bp, Homo sapien
tctgcaagctggaatgtgattctgc

SEQ ID NO: 3986409 - DNA, 25 bp, Homo sapien
gctcccgatgaaaattaaacgcagg

SEQ ID NO: 3986410 - DNA, 25 bp, Homo sapien
catttttgacatagtaggggccaga

SEQ ID NO: 3986411 - DNA, 25 bp, Homo sapien
ggtgctttgagtttgtgtatttgaa

SEQ ID NO: 3986412 - DNA, 25 bp, Homo sapien
agcacggaagttttgcagctcagaa

SEQ ID NO: 3986413 - DNA, 25 bp, Homo sapien
cttatgcactcgttgctgaaagggt

SEQ ID NO: 3986414 - DNA, 25 bp, Homo sapien
ttatgcactcgttgctgaaagggtg

SEQ ID NO: 3986415 - DNA, 25 bp, Homo sapien
ttgagtaattggttattaagataac

SEQ ID NO: 3986416 - DNA, 25 bp, Homo sapien
gacgagccaatttaagccaatttca

SEQ ID NO: 3986417 - DNA, 25 bp, Homo sapien
agcatgacgagccaatttaagccaa

SEQ ID NO: 3986418 - DNA, 25 bp, Homo sapien
aggtaaatgtagcatgacgagccaa

SEQ ID NO: 3986419 - DNA, 25 bp, Homo sapien
tatgcagacacgcacatggctgacc

SEQ ID NO: 3986420 - DNA, 25 bp, Homo sapien
atgcagacacgcacatggctgaccc

SEQ ID NO: 3986421 - DNA, 25 bp, Homo sapien
ctatgcagacacgcacatggctgac

SEQ ID NO: 3986422 - DNA, 25 bp, Homo sapien
gttgctgatgagctttagcactgca

SEQ ID NO: 3986423 - DNA, 25 bp, Homo sapien
tgatgagctttagcactgcacacag

SEQ ID NO: 3986424 - DNA, 25 bp, Homo sapien
gctgatgagctttagcactgcacac

SEQ ID NO: 3986425 - DNA, 25 bp, Homo sapien
gatgagctttagcactgcacacagc

SEQ ID NO: 3986426 - DNA, 25 bp, Homo sapien
tgcccgctgggtaccacaggtctgc

SEQ ID NO: 3986427 - DNA, 25 bp, Homo sapien
aggtaggaacacctcctgcccgctg

SEQ ID NO: 3986428 - DNA, 25 bp, Homo sapien
cagcatctgggtgaccccatccggg

SEQ ID NO: 3986429 - DNA, 25 bp, Homo sapien
tgcctcccgttgactcctagattca

SEQ ID NO: 3986430 - DNA, 25 bp, Homo sapien
cagacttccagatccattctattcc

SEQ ID NO: 3986431 - DNA, 25 bp, Homo sapien
acttccagatccattctattccatc

SEQ ID NO: 3986432 - DNA, 25 bp, Homo sapien
gacttccagatccattctattccat

SEQ ID NO: 3986433 - DNA, 25 bp, Homo sapien
ttccagatccattctattccatctg

SEQ ID NO: 3986434 - DNA, 25 bp, Homo sapien
cttgactgccccccagactgaactg

SEQ ID NO: 3986435 - DNA, 25 bp, Homo sapien
ttgactgccccccagactgaactgc

SEQ ID NO: 3986436 - DNA, 25 bp, Homo sapien
gaagtgtcgcttcaaacaggccagt

SEQ ID NO: 3986437 - DNA, 25 bp, Homo sapien
aatcgtctttacttctctggctcag

SEQ ID NO: 3986438 - DNA, 25 bp, Homo sapien
catgcctggaacaccaacccatggt

SEQ ID NO: 3986439 - DNA, 25 bp, Homo sapien
gataccagagacatctttcagcgtg

SEQ ID NO: 3986440 - DNA, 25 bp, Homo sapien
agagaccaggtgacaagatgcaaag

SEQ ID NO: 3986441 - DNA, 25 bp, Homo sapien
ccatcacctccacattgtagcatta

SEQ ID NO: 3986442 - DNA, 25 bp, Homo sapien
cacattgtagcattaaccagcacag

SEQ ID NO: 3986443 - DNA, 25 bp, Homo sapien
gaccaggtgacaagatgcaaaggat

SEQ ID NO: 3986444 - DNA, 25 bp, Homo sapien
gagaaggcccgtgggaagtctcctc

SEQ ID NO: 3986445 - DNA, 25 bp, Homo sapien
tcccgacgcggactgtggatccagt

SEQ ID NO: 3986446 - DNA, 25 bp, Homo sapien
tgggctgataaccaggctgctgtac

SEQ ID NO: 3986447 - DNA, 25 bp, Homo sapien
ctgtggatccagtaggagaaggccc

SEQ ID NO: 3986448 - DNA, 25 bp, Homo sapien
tgtcggaacagggtgcaattggaaa

SEQ ID NO: 3986449 - DNA, 25 bp, Homo sapien
tgaaggcctgaagagccctcatgga

SEQ ID NO: 3986450 - DNA, 25 bp, Homo sapien
ttttgcatcagtgacccccaggtga

SEQ ID NO: 3986451 - DNA, 25 bp, Homo sapien
gcctgaggctatagagggaccacag

SEQ ID NO: 3986452 - DNA, 25 bp, Homo sapien
gcaggcatggcttggcatagacctg

SEQ ID NO: 3986453 - DNA, 25 bp, Homo sapien
ggcatggcttggcatagacctgcag

SEQ ID NO: 3986454 - DNA, 25 bp, Homo sapien
catggcttggcatagacctgcagac

SEQ ID NO: 3986455 - DNA, 25 bp, Homo sapien
caggcatggcttggcatagacctgc

SEQ ID NO: 3986456 - DNA, 25 bp, Homo sapien
gggaagcggctgtgcactggctgag

SEQ ID NO: 3986457 - DNA, 25 bp, Homo sapien
gagtgtcaccaagagaggaggagcc

SEQ ID NO: 3986458 - DNA, 25 bp, Homo sapien
cactgggtggcgtcctgaagaagaa

SEQ ID NO: 3986459 - DNA, 25 bp, Homo sapien
actggctgagcctgagtgtcaccaa

SEQ ID NO: 3986460 - DNA, 25 bp, Homo sapien
cagagctaggacggtgcgcacaggc

SEQ ID NO: 3986461 - DNA, 25 bp, Homo sapien
gagctaggacggtgcgcacaggcca

SEQ ID NO: 3986462 - DNA, 25 bp, Homo sapien
agctaggacggtgcgcacaggccat

SEQ ID NO: 3986463 - DNA, 25 bp, Homo sapien
agagctaggacggtgcgcacaggcc

SEQ ID NO: 3986464 - DNA, 25 bp, Homo sapien
atataaataacgtgattcccctgca

SEQ ID NO: 3986465 - DNA, 25 bp, Homo sapien
catgtgtggtttcacaacatcccat

SEQ ID NO: 3986466 - DNA, 25 bp, Homo sapien
tatgatcccctttctgcctgcaaca

SEQ ID NO: 3986467 - DNA, 25 bp, Homo sapien
gcacctgtttatgttgacgctagca

SEQ ID NO: 3986468 - DNA, 25 bp, Homo sapien
acaagagagggcaaccgtcaatcca

SEQ ID NO: 3986469 - DNA, 25 bp, Homo sapien
cagcgccgtggcgatcattacaggt

SEQ ID NO: 3986470 - DNA, 25 bp, Homo sapien
ataccgcctcatcgctgcgtgtcag

SEQ ID NO: 3986471 - DNA, 25 bp, Homo sapien
gaccaatcaaatgcaacccataccg

SEQ ID NO: 3986472 - DNA, 25 bp, Homo sapien
cacatagccacttgctcccatgctg

SEQ ID NO: 3986473 - DNA, 25 bp, Homo sapien
gctgttcatgccgctacctcaaaga

SEQ ID NO: 3986474 - DNA, 25 bp, Homo sapien
ttccacatagccacttgctcccatg

SEQ ID NO: 3986475 - DNA, 25 bp, Homo sapien
atgctgttcatgccgctacctcaaa

SEQ ID NO: 3986476 - DNA, 25 bp, Homo sapien
tggagagagaatgacttctaagtcg

SEQ ID NO: 3986477 - DNA, 25 bp, Homo sapien
tccggatttctgtgtgaccgtgcac

SEQ ID NO: 3986478 - DNA, 25 bp, Homo sapien
gaatgacttctaagtcgccctccgg

SEQ ID NO: 3986479 - DNA, 25 bp, Homo sapien
ccttcacaatgggtgccatttaagc

SEQ ID NO: 3986480 - DNA, 25 bp, Homo sapien
tagtttaagatctggcaccataaat

SEQ ID NO: 3986481 - DNA, 25 bp, Homo sapien
tagtagaagtcttagatactggcac

SEQ ID NO: 3986482 - DNA, 25 bp, Homo sapien
tggaatcattcacattagtttaaga

SEQ ID NO: 3986483 - DNA, 25 bp, Homo sapien
tcactgaagccattagtaacacctg

SEQ ID NO: 3986484 - DNA, 25 bp, Homo sapien
acagcccagagatgctcctcggaat

SEQ ID NO: 3986485 - DNA, 25 bp, Homo sapien
gatgctcctcggaataccatggaag

SEQ ID NO: 3986486 - DNA, 25 bp, Homo sapien
gactctcgccaaggcaggacccagg

SEQ ID NO: 3986487 - DNA, 25 bp, Homo sapien
ggaagcccagcaggactctcgccaa

SEQ ID NO: 3986488 - DNA, 25 bp, Homo sapien
gaagaagccccaaacacggtgggca

SEQ ID NO: 3986489 - DNA, 25 bp, Homo sapien
gagacaaatttccagccgcaaggct

SEQ ID NO: 3986490 - DNA, 25 bp, Homo sapien
gaaatgtgagaaagcgaagaagccc

SEQ ID NO: 3986491 - DNA, 25 bp, Homo sapien
ctgaatttaacccactagaggaggg

SEQ ID NO: 3986492 - DNA, 25 bp, Homo sapien
gaaggcaatgccagggggaccactc

SEQ ID NO: 3986493 - DNA, 25 bp, Homo sapien
ctcctccaccgggaggcccgcagaa

SEQ ID NO: 3986494 - DNA, 25 bp, Homo sapien
tcctccaccgggaggcccgcagaag

SEQ ID NO: 3986495 - DNA, 25 bp, Homo sapien
cagaaggcaatgccagggggaccac

SEQ ID NO: 3986496 - DNA, 25 bp, Homo sapien
acacaccgaccccaccatgtcttgg

SEQ ID NO: 3986497 - DNA, 25 bp, Homo sapien
gaccccaccatgtcttggatgcgga

SEQ ID NO: 3986498 - DNA, 25 bp, Homo sapien
accgaccccaccatgtcttggatgc

SEQ ID NO: 3986499 - DNA, 25 bp, Homo sapien
ctcctccttgaccagcccaccacac

SEQ ID NO: 3986500 - DNA, 25 bp, Homo sapien
cactgagcaggggaatcctcctgtg

SEQ ID NO: 3986501 - DNA, 25 bp, Homo sapien
tcctcctgtgtatctgcagtaggct

SEQ ID NO: 3986502 - DNA, 25 bp, Homo sapien
gtatctgcagtaggcttctgagaag

SEQ ID NO: 3986503 - DNA, 25 bp, Homo sapien
cctgtgtatctgcagtaggcttctg

SEQ ID NO: 3986504 - DNA, 25 bp, Homo sapien
gggctcctggaggcttgaccaatca

SEQ ID NO: 3986505 - DNA, 25 bp, Homo sapien
ggtttttctgctcagtgtatgccag

SEQ ID NO: 3986506 - DNA, 25 bp, Homo sapien
ttctgcagggccttgtataagctga

SEQ ID NO: 3986507 - DNA, 25 bp, Homo sapien
caagtcaggtagaggcgatggcatc

SEQ ID NO: 3986508 - DNA, 25 bp, Homo sapien
cagctcttctgtagggaccttccag

SEQ ID NO: 3986509 - DNA, 25 bp, Homo sapien
cattttctgcaagtgtaataagcaa

SEQ ID NO: 3986510 - DNA, 25 bp, Homo sapien
tacatgatgaaggtggcacatgcca

SEQ ID NO: 3986511 - DNA, 25 bp, Homo sapien
aataaatagaccatgttagaggagg

SEQ ID NO: 3986512 - DNA, 25 bp, Homo sapien
tgatctgaaatggaagttgctccat

SEQ ID NO: 3986513 - DNA, 25 bp, Homo sapien
gagggcatggtgattgggcattgct

SEQ ID NO: 3986514 - DNA, 25 bp, Homo sapien
tgattgggcattgctggaaaggtgc

SEQ ID NO: 3986515 - DNA, 25 bp, Homo sapien
ctggaaaggtgctccaagtgtgcaa

SEQ ID NO: 3986516 - DNA, 25 bp, Homo sapien
aaaggtgctccaagtgtgcaaaggc

SEQ ID NO: 3986517 - DNA, 25 bp, Homo sapien
catgcacagttgaaaacactcgatt

SEQ ID NO: 3986518 - DNA, 25 bp, Homo sapien
taaactcagattaggagaatctggc

SEQ ID NO: 3986519 - DNA, 25 bp, Homo sapien
taataagtaattgttgggtggcagc

SEQ ID NO: 3986520 - DNA, 25 bp, Homo sapien
tctaagagatcctatttttagctcc

SEQ ID NO: 3986521 - DNA, 25 bp, Homo sapien
ccttggttttggctggatgtgtggc

SEQ ID NO: 3986522 - DNA, 25 bp, Homo sapien
ccgctccaccttggttttggctgga

SEQ ID NO: 3986523 - DNA, 25 bp, Homo sapien
caccttggttttggctggatgtgtg

SEQ ID NO: 3986524 - DNA, 25 bp, Homo sapien
tggttttggctggatgtgtggccat

SEQ ID NO: 3986525 - DNA, 25 bp, Homo sapien
atcttcagccacaattgtatttgtt

SEQ ID NO: 3986526 - DNA, 25 bp, Homo sapien
cttcagccacaattgtatttgttaa

SEQ ID NO: 3986527 - DNA, 25 bp, Homo sapien
tgcgtgcccctgacatttgtcatct

SEQ ID NO: 3986528 - DNA, 25 bp, Homo sapien
tgtgcgtgcccctgacatttgtcat

SEQ ID NO: 3986529 - DNA, 25 bp, Homo sapien
ttcctgttagctgggttcaccgtta

SEQ ID NO: 3986530 - DNA, 25 bp, Homo sapien
cagactgctggaattgagatactac

SEQ ID NO: 3986531 - DNA, 25 bp, Homo sapien
ccagatttaatgctcccctagggaa

SEQ ID NO: 3986532 - DNA, 25 bp, Homo sapien
aactagtatagcctagcactccgga

SEQ ID NO: 3986533 - DNA, 25 bp, Homo sapien
ccttcaaaaggaaccggcttctgag

SEQ ID NO: 3986534 - DNA, 25 bp, Homo sapien
cagagggccgatagcagtcccttca

SEQ ID NO: 3986535 - DNA, 25 bp, Homo sapien
cttgccggtgcagggcgagggtggc

SEQ ID NO: 3986536 - DNA, 25 bp, Homo sapien
gctgtggccagcctatcttgccggt

SEQ ID NO: 3986537 - DNA, 25 bp, Homo sapien
cagatgtcaaccaggttaacattaa

SEQ ID NO: 3986538 - DNA, 25 bp, Homo sapien
gggatattactcctgcatttttcaa

SEQ ID NO: 3986539 - DNA, 25 bp, Homo sapien
taagtgcaagtgatctggaaataga

SEQ ID NO: 3986540 - DNA, 25 bp, Homo sapien
catcatatcgtgtgtctactgggat

SEQ ID NO: 3986541 - DNA, 25 bp, Homo sapien
tggattttatagtgcaggtgtacct

SEQ ID NO: 3986542 - DNA, 25 bp, Homo sapien
tatgacatgactctagaacaatggg

SEQ ID NO: 3986543 - DNA, 25 bp, Homo sapien
ataaaacaggaatggcctgcttcat

SEQ ID NO: 3986544 - DNA, 25 bp, Homo sapien
gcaggtgtacctgcatttatcgata

SEQ ID NO: 3986545 - DNA, 25 bp, Homo sapien
ggacacaatgaatttcatctgaggg

SEQ ID NO: 3986546 - DNA, 25 bp, Homo sapien
agagggcacgcatttagagcgagaa

SEQ ID NO: 3986547 - DNA, 25 bp, Homo sapien
tgctctccgttcttcctcggcgcca

SEQ ID NO: 3986548 - DNA, 25 bp, Homo sapien
gttgcatttcaatccctgctctccg

SEQ ID NO: 3986549 - DNA, 25 bp, Homo sapien
taccctcagtaaccagaccaattat

SEQ ID NO: 3986550 - DNA, 25 bp, Homo sapien
cctctaacgttgtggaatttttatg

SEQ ID NO: 3986551 - DNA, 25 bp, Homo sapien
gaacagtgtgtccttaaagcggcat

SEQ ID NO: 3986552 - DNA, 25 bp, Homo sapien
ttcatatttaatgcatccccagtct

SEQ ID NO: 3986553 - DNA, 25 bp, Homo sapien
tcaagcatgctgatggtccggggtg

SEQ ID NO: 3986554 - DNA, 25 bp, Homo sapien
catgctgatggtccggggtgcgcag

SEQ ID NO: 3986555 - DNA, 25 bp, Homo sapien
tgatggtccggggtgcgcagcgccc

SEQ ID NO: 3986556 - DNA, 25 bp, Homo sapien
atggtccggggtgcgcagcgcccgg

SEQ ID NO: 3986557 - DNA, 25 bp, Homo sapien
tctcgattctagacccaaaggaaaa

SEQ ID NO: 3986558 - DNA, 25 bp, Homo sapien
gaaaacagcgatggtcaaaactgcg

SEQ ID NO: 3986559 - DNA, 25 bp, Homo sapien
tcggccgccgggaattctctttgat

SEQ ID NO: 3986560 - DNA, 25 bp, Homo sapien
gatactttgctaattccctcctcgg

SEQ ID NO: 3986561 - DNA, 25 bp, Homo sapien
tcacagaaatattcgcattgtgaag

SEQ ID NO: 3986562 - DNA, 25 bp, Homo sapien
cctgggatgcttcttgtcacagaaa

SEQ ID NO: 3986563 - DNA, 25 bp, Homo sapien
aaatattcgcattgtgaagtgcaca

SEQ ID NO: 3986564 - DNA, 25 bp, Homo sapien
atattcgcattgtgaagtgcacaca

SEQ ID NO: 3986565 - DNA, 25 bp, Homo sapien
tgatacggcctacggtgcaaaatgc

SEQ ID NO: 3986566 - DNA, 25 bp, Homo sapien
ggaggcagacccctcggcaccagag

SEQ ID NO: 3986567 - DNA, 25 bp, Homo sapien
cgaggtaggctttcctgatacggcc

SEQ ID NO: 3986568 - DNA, 25 bp, Homo sapien
gatgactcatggagccgatctggag

SEQ ID NO: 3986569 - DNA, 25 bp, Homo sapien
ccaccaacgccaattggccatgaag

SEQ ID NO: 3986570 - DNA, 25 bp, Homo sapien
actggcttccatggggtcccaccaa

SEQ ID NO: 3986571 - DNA, 25 bp, Homo sapien
tggggtcccaccaacgccaattggc

SEQ ID NO: 3986572 - DNA, 25 bp, Homo sapien
acgccaattggccatgaagacaggg

SEQ ID NO: 3986573 - DNA, 25 bp, Homo sapien
caagtttgaagtcagctgcactgat

SEQ ID NO: 3986574 - DNA, 25 bp, Homo sapien
ggatctggcctgggtccttgcagtt

SEQ ID NO: 3986575 - DNA, 25 bp, Homo sapien
tcaagtttgaagtcagctgcactga

SEQ ID NO: 3986576 - DNA, 25 bp, Homo sapien
gtttgaagtcagctgcactgatggg

SEQ ID NO: 3986577 - DNA, 25 bp, Homo sapien
tccctgtgaggagggtagctgcccc

SEQ ID NO: 3986578 - DNA, 25 bp, Homo sapien
tatacggtatttctgcaggcatgat

SEQ ID NO: 3986579 - DNA, 25 bp, Homo sapien
tatttctgcaggcatgatttcctca

SEQ ID NO: 3986580 - DNA, 25 bp, Homo sapien
gtttatacggtatttctgcaggcat

SEQ ID NO: 3986581 - DNA, 25 bp, Homo sapien
cggtatttctgcaggcatgatttcc

SEQ ID NO: 3986582 - DNA, 25 bp, Homo sapien
cagtttgtgggtaattctggagcaa

SEQ ID NO: 3986583 - DNA, 25 bp, Homo sapien
caaggagctgccttctggcaatgga

SEQ ID NO: 3986584 - DNA, 25 bp, Homo sapien
tagtcatccctcctgttggccagtt

SEQ ID NO: 3986585 - DNA, 25 bp, Homo sapien
gcaggcatcttctgttgatggcata

SEQ ID NO: 3986586 - DNA, 25 bp, Homo sapien
tctgaagaggccaactcgtgggcat

SEQ ID NO: 3986587 - DNA, 25 bp, Homo sapien
ggtctgaagaggccaactcgtgggc

SEQ ID NO: 3986588 - DNA, 25 bp, Homo sapien
ctgaagaggccaactcgtgggcatg

SEQ ID NO: 3986589 - DNA, 25 bp, Homo sapien
gcaggtctgaagaggccaactcgtg

SEQ ID NO: 3986590 - DNA, 25 bp, Homo sapien
catctatcggaagggccgtgaggca

SEQ ID NO: 3986591 - DNA, 25 bp, Homo sapien
atgcaggcggcgttctctggaagct

SEQ ID NO: 3986592 - DNA, 25 bp, Homo sapien
cgtgaggcaagtcctgcccgatgca

SEQ ID NO: 3986593 - DNA, 25 bp, Homo sapien
gctgacactgacatgtactgtgggg

SEQ ID NO: 3986594 - DNA, 25 bp, Homo sapien
gcacttgctgctcttgcttcctgtt

SEQ ID NO: 3986595 - DNA, 25 bp, Homo sapien
catgcacttgctgctcttgcttcct

SEQ ID NO: 3986596 - DNA, 25 bp, Homo sapien
gcccagcccatgcacttgctgctct

SEQ ID NO: 3986597 - DNA, 25 bp, Homo sapien
agcccagcccatgcacttgctgctc

SEQ ID NO: 3986598 - DNA, 25 bp, Homo sapien
cactgcaggtccatcttgggcactg

SEQ ID NO: 3986599 - DNA, 25 bp, Homo sapien
actgcaggtccatcttgggcactga

SEQ ID NO: 3986600 - DNA, 25 bp, Homo sapien
tgtggtcctgccacagggtgtcggg

SEQ ID NO: 3986601 - DNA, 25 bp, Homo sapien
caagggtttgccagactggagattc

SEQ ID NO: 3986602 - DNA, 25 bp, Homo sapien
actggagattccagaagcggctgaa

SEQ ID NO: 3986603 - DNA, 25 bp, Homo sapien
agcggctgaagctgtggtcctgcca

SEQ ID NO: 3986604 - DNA, 25 bp, Homo sapien
actccagtcagctgtacgtaaaatg

SEQ ID NO: 3986605 - DNA, 25 bp, Homo sapien
tcagctgtacgtaaaatgtccatca

SEQ ID NO: 3986606 - DNA, 25 bp, Homo sapien
aaatgtccatcattttcgggatgtc

SEQ ID NO: 3986607 - DNA, 25 bp, Homo sapien
tgtccatcattttcgggatgtcaaa

SEQ ID NO: 3986608 - DNA, 25 bp, Homo sapien
tgatgctgcccaatgctcagggctg

SEQ ID NO: 3986609 - DNA, 25 bp, Homo sapien
gatgctgcccaatgctcagggctgg

SEQ ID NO: 3986610 - DNA, 25 bp, Homo sapien
cactgatgctgcccaatgctcaggg

SEQ ID NO: 3986611 - DNA, 25 bp, Homo sapien
ctggccccgagacccccctgtgact

SEQ ID NO: 3986612 - DNA, 25 bp, Homo sapien
cataagttggatcccataaagaagt

SEQ ID NO: 3986613 - DNA, 25 bp, Homo sapien
cgtgtttctgtagtagcatttgggt

SEQ ID NO: 3986614 - DNA, 25 bp, Homo sapien
atatttcataagttggatcccataa

SEQ ID NO: 3986615 - DNA, 25 bp, Homo sapien
tgggtctgtgttcgtatatttcata

SEQ ID NO: 3986616 - DNA, 25 bp, Homo sapien
tagtagcgtcccaccagagagttgt

SEQ ID NO: 3986617 - DNA, 25 bp, Homo sapien
gggtttatcaccaaggatctcagag

SEQ ID NO: 3986618 - DNA, 25 bp, Homo sapien
tatgttacgggatgaactgtctgct

SEQ ID NO: 3986619 - DNA, 25 bp, Homo sapien
tatatattacggtatgaactgtctg

SEQ ID NO: 3986620 - DNA, 25 bp, Homo sapien
acttggtctccacggatttccctcg

SEQ ID NO: 3986621 - DNA, 25 bp, Homo sapien
ggatttccctcggacaaatgtcttg

SEQ ID NO: 3986622 - DNA, 25 bp, Homo sapien
cttatgaccccacttggtctccacg

SEQ ID NO: 3986623 - DNA, 25 bp, Homo sapien
gacaaatgtcttgccttccactgat

SEQ ID NO: 3986624 - DNA, 25 bp, Homo sapien
caggacgaagttgccttttattttg

SEQ ID NO: 3986625 - DNA, 25 bp, Homo sapien
agtgacaggacgaagttgcctttta

SEQ ID NO: 3986626 - DNA, 25 bp, Homo sapien
gaagttgccttttattttgcacctg

SEQ ID NO: 3986627 - DNA, 25 bp, Homo sapien
caaaagtgacaggacgaagttgcct

SEQ ID NO: 3986628 - DNA, 25 bp, Homo sapien
tagactcttcatttgctatttgtct

SEQ ID NO: 3986629 - DNA, 25 bp, Homo sapien
tgtctgtggaccaagactgaggcca

SEQ ID NO: 3986630 - DNA, 25 bp, Homo sapien
gtctgtggaccaagactgaggccat

SEQ ID NO: 3986631 - DNA, 25 bp, Homo sapien
gagttccatatggcttagactcttc

SEQ ID NO: 3986632 - DNA, 25 bp, Homo sapien
cacctgggtgcgaaaggcctttggc

SEQ ID NO: 3986633 - DNA, 25 bp, Homo sapien
taacctgaaggacttggtcaggcca

SEQ ID NO: 3986634 - DNA, 25 bp, Homo sapien
tatggtacccgtgcttagaaagccc

SEQ ID NO: 3986635 - DNA, 25 bp, Homo sapien
tagaaagcccgaggctcatagccgg

SEQ ID NO: 3986636 - DNA, 25 bp, Homo sapien
tccttttccacaacacgaattggga

SEQ ID NO: 3986637 - DNA, 25 bp, Homo sapien
tttccacaacacgaattgggatggc

SEQ ID NO: 3986638 - DNA, 25 bp, Homo sapien
ccttttccacaacacgaattgggat

SEQ ID NO: 3986639 - DNA, 25 bp, Homo sapien
ttttccacaacacgaattgggatgg

SEQ ID NO: 3986640 - DNA, 25 bp, Homo sapien
gggccaagatgacctgaaaccgaac

SEQ ID NO: 3986641 - DNA, 25 bp, Homo sapien
taaagccgaagtagccatttgcaga

SEQ ID NO: 3986642 - DNA, 25 bp, Homo sapien
atgacttcttactttgggacagccg

SEQ ID NO: 3986643 - DNA, 25 bp, Homo sapien
gatgacctgaaaccgaacaaattta

SEQ ID NO: 3986644 - DNA, 25 bp, Homo sapien
gaaatacagctgaagccgtaagtct

SEQ ID NO: 3986645 - DNA, 25 bp, Homo sapien
tcacaacaggataaaaatgttcacc

SEQ ID NO: 3986646 - DNA, 25 bp, Homo sapien
tttggctcccaataaatcatctatc

SEQ ID NO: 3986647 - DNA, 25 bp, Homo sapien
atcacagcccagtagataatgagca

SEQ ID NO: 3986648 - DNA, 25 bp, Homo sapien
ctgcacaaggatgccaggctgcaca

SEQ ID NO: 3986649 - DNA, 25 bp, Homo sapien
gggcttcctgcacaaggatgccagg

SEQ ID NO: 3986650 - DNA, 25 bp, Homo sapien
ttcctgcacaaggatgccaggctgc

SEQ ID NO: 3986651 - DNA, 25 bp, Homo sapien
gagggcatccagccttcacattgcc

SEQ ID NO: 3986652 - DNA, 25 bp, Homo sapien
ctctctctgtccaagttggaggaca

SEQ ID NO: 3986653 - DNA, 25 bp, Homo sapien
ctctctgtccaagttggaggacaca

SEQ ID NO: 3986654 - DNA, 25 bp, Homo sapien
tattttacggccatatatttcagct

SEQ ID NO: 3986655 - DNA, 25 bp, Homo sapien
tggctagttgacatggcaagctata

SEQ ID NO: 3986656 - DNA, 25 bp, Homo sapien
tcatctaatgttcgaaaattcttgg

SEQ ID NO: 3986657 - DNA, 25 bp, Homo sapien
ttctaatccatacatctgcaatcgg

SEQ ID NO: 3986658 - DNA, 25 bp, Homo sapien
catgctcaggcatagattctaatcc

SEQ ID NO: 3986659 - DNA, 25 bp, Homo sapien
gcgtagctcctagaccatgctcagg

SEQ ID NO: 3986660 - DNA, 25 bp, Homo sapien
gatgatgtttctcttgcagttcaaa

SEQ ID NO: 3986661 - DNA, 25 bp, Homo sapien
acctcttactacagaagtcttaaca

SEQ ID NO: 3986662 - DNA, 25 bp, Homo sapien
gaatttatggctgacgttaacgaag

SEQ ID NO: 3986663 - DNA, 25 bp, Homo sapien
tcttaacattctgtctgttggaccc

SEQ ID NO: 3986664 - DNA, 25 bp, Homo sapien
ggagccatcactcgaaccgttcctt

SEQ ID NO: 3986665 - DNA, 25 bp, Homo sapien
caacttctgaaggtagaccctgggt

SEQ ID NO: 3986666 - DNA, 25 bp, Homo sapien
tacttccttgtaccctggcaagaga

SEQ ID NO: 3986667 - DNA, 25 bp, Homo sapien
tggaagcttcttctagtaaccagct

SEQ ID NO: 3986668 - DNA, 25 bp, Homo sapien
gaaatccctgactatttctcagaat

SEQ ID NO: 3986669 - DNA, 25 bp, Homo sapien
taccttacggctgtaattacacaga

SEQ ID NO: 3986670 - DNA, 25 bp, Homo sapien
gtaattacacagaaatccctgacta

SEQ ID NO: 3986671 - DNA, 25 bp, Homo sapien
cctcttgctattacatgtaccttac

SEQ ID NO: 3986672 - DNA, 25 bp, Homo sapien
ggagacttgagtgaaccctgattca

SEQ ID NO: 3986673 - DNA, 25 bp, Homo sapien
ccaaagtctgatgggaggtaggaca

SEQ ID NO: 3986674 - DNA, 25 bp, Homo sapien
gaagtttcaggatctaccccagtgg

SEQ ID NO: 3986675 - DNA, 25 bp, Homo sapien
tgtggccacttgatgacaacgaacc

SEQ ID NO: 3986676 - DNA, 25 bp, Homo sapien
taaataacactgattatctgattac

SEQ ID NO: 3986677 - DNA, 25 bp, Homo sapien
ttaaataacactgattatctgatta

SEQ ID NO: 3986678 - DNA, 25 bp, Homo sapien
taactgacactgattatctgattac

SEQ ID NO: 3986679 - DNA, 25 bp, Homo sapien
ttaactgacactgattatctgatta

SEQ ID NO: 3986680 - DNA, 25 bp, Homo sapien
tggatgtcggccttttttgaaggtc

SEQ ID NO: 3986681 - DNA, 25 bp, Homo sapien
tgaaagtggtaaacagtgttgaaga

SEQ ID NO: 3986682 - DNA, 25 bp, Homo sapien
tgtcggccttttttgaaggtccagc

SEQ ID NO: 3986683 - DNA, 25 bp, Homo sapien
tttgaaagtggtaaacagtgttgaa

SEQ ID NO: 3986684 - DNA, 25 bp, Homo sapien
aataattctggcccatgccaccatt

SEQ ID NO: 3986685 - DNA, 25 bp, Homo sapien
caccattggggcagcccaaggctcc

SEQ ID NO: 3986686 - DNA, 25 bp, Homo sapien
accattggggcagcccaaggctcca

SEQ ID NO: 3986687 - DNA, 25 bp, Homo sapien
aattctggcccatgccaccattggg

SEQ ID NO: 3986688 - DNA, 25 bp, Homo sapien
aagacagagcattagggtttgccag

SEQ ID NO: 3986689 - DNA, 25 bp, Homo sapien
caaagagtttgttgcgaggaagaaa

SEQ ID NO: 3986690 - DNA, 25 bp, Homo sapien
cattctccaagaagtacagtcagca

SEQ ID NO: 3986691 - DNA, 25 bp, Homo sapien
tagaagacatcccagacgagaaagc

SEQ ID NO: 3986692 - DNA, 25 bp, Homo sapien
cagacagccgctctagtggctggga

SEQ ID NO: 3986693 - DNA, 25 bp, Homo sapien
gagctggcagcgtctccgcagcaca

SEQ ID NO: 3986694 - DNA, 25 bp, Homo sapien
gcagcacagacagccgctctagtgg

SEQ ID NO: 3986695 - DNA, 25 bp, Homo sapien
ctgtagaggagctggcagcgtctcc

SEQ ID NO: 3986696 - DNA, 25 bp, Homo sapien
aaagggggatgcgttgctccactcc

SEQ ID NO: 3986697 - DNA, 25 bp, Homo sapien
aaattgaaaacgaaaccagcggctg

SEQ ID NO: 3986698 - DNA, 25 bp, Homo sapien
tcctcttgatgagcacggtgcggat

SEQ ID NO: 3986699 - DNA, 25 bp, Homo sapien
gtgctcccggcgacggcctcctctt

SEQ ID NO: 3986700 - DNA, 25 bp, Homo sapien
gacaatcgggcaggttttattcaca

SEQ ID NO: 3986701 - DNA, 25 bp, Homo sapien
cagcagtcgtatttgtttaggctaa

SEQ ID NO: 3986702 - DNA, 25 bp, Homo sapien
ttgtgtattcatcggcaaaagtcta

SEQ ID NO: 3986703 - DNA, 25 bp, Homo sapien
taggctaaaagaacgcctctgtggg

SEQ ID NO: 3986704 - DNA, 25 bp, Homo sapien
cctcgagtcccagcgccggaggaag

SEQ ID NO: 3986705 - DNA, 25 bp, Homo sapien
aggtggacctcgagtcccagcgccg

SEQ ID NO: 3986706 - DNA, 25 bp, Homo sapien
gcgccggaggaagcggcggcctccg

SEQ ID NO: 3986707 - DNA, 25 bp, Homo sapien
gtggacctcgagtcccagcgccgga

SEQ ID NO: 3986708 - DNA, 25 bp, Homo sapien
tgcggctgagcaaaaactagacatg

SEQ ID NO: 3986709 - DNA, 25 bp, Homo sapien
tgaatctggcagtcaaagtagccat

SEQ ID NO: 3986710 - DNA, 25 bp, Homo sapien
aagtcattctctagatgcggctgag

SEQ ID NO: 3986711 - DNA, 25 bp, Homo sapien
catgtgactgcgcatttgtgaattt

SEQ ID NO: 3986712 - DNA, 25 bp, Homo sapien
gatgcgctgtgagatcgttctgtta

SEQ ID NO: 3986713 - DNA, 25 bp, Homo sapien
ttcagagatgctcgggctgccaccg

SEQ ID NO: 3986714 - DNA, 25 bp, Homo sapien
gttacgcgacactagcgctttcccg

SEQ ID NO: 3986715 - DNA, 25 bp, Homo sapien
tcagaggcgtcgtggccttcagaga

SEQ ID NO: 3986716 - DNA, 25 bp, Homo sapien
gcactgagctcttggagacttcatt

SEQ ID NO: 3986717 - DNA, 25 bp, Homo sapien
ggcagatggtggattctggcctttc

SEQ ID NO: 3986718 - DNA, 25 bp, Homo sapien
agggatggacacacgcactgagctc

SEQ ID NO: 3986719 - DNA, 25 bp, Homo sapien
cagatggtggattctggcctttctc

SEQ ID NO: 3986720 - DNA, 25 bp, Homo sapien
ggccctttcctcttggtgacttagc

SEQ ID NO: 3986721 - DNA, 25 bp, Homo sapien
ggtgacttagcacttctttccagtc

SEQ ID NO: 3986722 - DNA, 25 bp, Homo sapien
agtcttttctggtaccactcaacct

SEQ ID NO: 3986723 - DNA, 25 bp, Homo sapien
tcctgcagggatcggggagccgcat

SEQ ID NO: 3986724 - DNA, 25 bp, Homo sapien
ctttgcccatcagatctgtccatgg

SEQ ID NO: 3986725 - DNA, 25 bp, Homo sapien
ttgcccatcagatctgtccatggag

SEQ ID NO: 3986726 - DNA, 25 bp, Homo sapien
tgcccatcagatctgtccatggaga

SEQ ID NO: 3986727 - DNA, 25 bp, Homo sapien
gcccatcagatctgtccatggagaa

SEQ ID NO: 3986728 - DNA, 25 bp, Homo sapien
agatctgcactgacactgccagtcc

SEQ ID NO: 3986729 - DNA, 25 bp, Homo sapien
cccgcatttgcacagatctgcactg

SEQ ID NO: 3986730 - DNA, 25 bp, Homo sapien
ctggcagcttggtggcccgcatttg

SEQ ID NO: 3986731 - DNA, 25 bp, Homo sapien
cttggtggcccgcatttgcacagat

SEQ ID NO: 3986732 - DNA, 25 bp, Homo sapien
gacaaggcacctggccgcatgcagg

SEQ ID NO: 3986733 - DNA, 25 bp, Homo sapien
gcaatattgattgccagctgccaga

SEQ ID NO: 3986734 - DNA, 25 bp, Homo sapien
cacttctgcaatattgattgccagc

SEQ ID NO: 3986735 - DNA, 25 bp, Homo sapien
cagtggacaaaggtgacaaggcacc

SEQ ID NO: 3986736 - DNA, 25 bp, Homo sapien
gatccacacgctttgtgcttatgca

SEQ ID NO: 3986737 - DNA, 25 bp, Homo sapien
tggcaatagaagctatactggctcc

SEQ ID NO: 3986738 - DNA, 25 bp, Homo sapien
caaggactggcaatagaagctatac

SEQ ID NO: 3986739 - DNA, 25 bp, Homo sapien
tgtgcttatgcaaggactggcaata

SEQ ID NO: 3986740 - DNA, 25 bp, Homo sapien
tctgcacttgaaacagatctctctg

SEQ ID NO: 3986741 - DNA, 25 bp, Homo sapien
aagcccacgcggagagcctccgagt

SEQ ID NO: 3986742 - DNA, 25 bp, Homo sapien
ctctgaaagaacagcgctccccaag

SEQ ID NO: 3986743 - DNA, 25 bp, Homo sapien
agtcacgaggatccaatggctccag

SEQ ID NO: 3986744 - DNA, 25 bp, Homo sapien
tggcagcattctgacaatatgattt

SEQ ID NO: 3986745 - DNA, 25 bp, Homo sapien
ttggcagcattctgacaatatgatt

SEQ ID NO: 3986746 - DNA, 25 bp, Homo sapien
ggcttcataatacgcggccacattg

SEQ ID NO: 3986747 - DNA, 25 bp, Homo sapien
ccaattccttaatcacggcttcata

SEQ ID NO: 3986748 - DNA, 25 bp, Homo sapien
gctggcagaaatcactattggactt

SEQ ID NO: 3986749 - DNA, 25 bp, Homo sapien
tattgtcatttgagatccaaagcac

SEQ ID NO: 3986750 - DNA, 25 bp, Homo sapien
catccagcgagattgcaaaggtggc

SEQ ID NO: 3986751 - DNA, 25 bp, Homo sapien
ggcatccagcgagattgcaaaggtg

SEQ ID NO: 3986752 - DNA, 25 bp, Homo sapien
cagcgagattgcaaaggtggcaggg

SEQ ID NO: 3986753 - DNA, 25 bp, Homo sapien
tccagcgagattgcaaaggtggcag

SEQ ID NO: 3986754 - DNA, 25 bp, Homo sapien
caatagatcgaaacaggaaggaaat

SEQ ID NO: 3986755 - DNA, 25 bp, Homo sapien
gggtactgtcaatagatcgaaacag

SEQ ID NO: 3986756 - DNA, 25 bp, Homo sapien
accagaggggtactgtcaatagatc

SEQ ID NO: 3986757 - DNA, 25 bp, Homo sapien
tgtcaatagatcgaaacaggaagga

SEQ ID NO: 3986758 - DNA, 25 bp, Homo sapien
cgcataacagcggactccaccagtg

SEQ ID NO: 3986759 - DNA, 25 bp, Homo sapien
gaatcagaatttgcagtcgctgcct

SEQ ID NO: 3986760 - DNA, 25 bp, Homo sapien
tggctgagtcctccgcataacagcg

SEQ ID NO: 3986761 - DNA, 25 bp, Homo sapien
gcctaggtaacacactgcagtcatc

SEQ ID NO: 3986762 - DNA, 25 bp, Homo sapien
tgagctgcccacgtatgagtctgga

SEQ ID NO: 3986763 - DNA, 25 bp, Homo sapien
gagtctggaccgtgcacatagtgtg

SEQ ID NO: 3986764 - DNA, 25 bp, Homo sapien
agtgtgctcggtggtgactccttca

SEQ ID NO: 3986765 - DNA, 25 bp, Homo sapien
tgctgccggatagaagtgcgagtct

SEQ ID NO: 3986766 - DNA, 25 bp, Homo sapien
acactgcgcatggtcagtggtggct

SEQ ID NO: 3986767 - DNA, 25 bp, Homo sapien
tccgtcagacactgcgcatggtcag

SEQ ID NO: 3986768 - DNA, 25 bp, Homo sapien
ccgtcagacactgcgcatggtcagt

SEQ ID NO: 3986769 - DNA, 25 bp, Homo sapien
tcagacactgcgcatggtcagtggt

SEQ ID NO: 3986770 - DNA, 25 bp, Homo sapien
tcaacggctgcgcagctcatgacgg

SEQ ID NO: 3986771 - DNA, 25 bp, Homo sapien
cggccagaacctgtagtttgggcga

SEQ ID NO: 3986772 - DNA, 25 bp, Homo sapien
acggcgccgggctctaacggccaga

SEQ ID NO: 3986773 - DNA, 25 bp, Homo sapien
tgtagtttgggcgagggaatattct

SEQ ID NO: 3986774 - DNA, 25 bp, Homo sapien
caggtacctacagctacaactggtg

SEQ ID NO: 3986775 - DNA, 25 bp, Homo sapien
cctgaggagctgtcatttgcattgg

SEQ ID NO: 3986776 - DNA, 25 bp, Homo sapien
tagtgaattattgtggatgagaagt

SEQ ID NO: 3986777 - DNA, 25 bp, Homo sapien
gagtgattgtgtcattgtgtcttag

SEQ ID NO: 3986778 - DNA, 25 bp, Homo sapien
gagcccttccgctggaatttgtcca

SEQ ID NO: 3986779 - DNA, 25 bp, Homo sapien
cgaggagcccttccgctggaatttg

SEQ ID NO: 3986780 - DNA, 25 bp, Homo sapien
tcacgaggagcccttccgctggaat

SEQ ID NO: 3986781 - DNA, 25 bp, Homo sapien
ggagcccttccgctggaatttgtcc

SEQ ID NO: 3986782 - DNA, 25 bp, Homo sapien
tcctgctcagcgtccttgcagtcac

SEQ ID NO: 3986783 - DNA, 25 bp, Homo sapien
tgctcagcgtccttgcagtcaccat

SEQ ID NO: 3986784 - DNA, 25 bp, Homo sapien
cagggttcaaatgttgagcccccaa

SEQ ID NO: 3986785 - DNA, 25 bp, Homo sapien
ttcaaatgttgagcccccaaatccc

SEQ ID NO: 3986786 - DNA, 25 bp, Homo sapien
gattttggctaaagatgagagcttc

SEQ ID NO: 3986787 - DNA, 25 bp, Homo sapien
gacttttcattagatgacacgatga

SEQ ID NO: 3986788 - DNA, 25 bp, Homo sapien
tagatgacacgatgaggtagaccat

SEQ ID NO: 3986789 - DNA, 25 bp, Homo sapien
gatgagagcttcgacttttcattag

SEQ ID NO: 3986790 - DNA, 25 bp, Homo sapien
atctgtgtttgcatttccagattct

SEQ ID NO: 3986791 - DNA, 25 bp, Homo sapien
tccagattctttatcagtaatatgt

SEQ ID NO: 3986792 - DNA, 25 bp, Homo sapien
gaaaatttattagatgctgtaaaac

SEQ ID NO: 3986793 - DNA, 25 bp, Homo sapien
aaccctattatagcaccgaagtgtt

SEQ ID NO: 3986794 - DNA, 25 bp, Homo sapien
agcactattagataaaggattctga

SEQ ID NO: 3986795 - DNA, 25 bp, Homo sapien
ctttgcagctgtagccaaaacaatc

SEQ ID NO: 3986796 - DNA, 25 bp, Homo sapien
gatatattgctttgcagctgtagcc

SEQ ID NO: 3986797 - DNA, 25 bp, Homo sapien
ttcagtgatatattgctttgcagct

SEQ ID NO: 3986798 - DNA, 25 bp, Homo sapien
gtgatttgcataatcaagcacagag

SEQ ID NO: 3986799 - DNA, 25 bp, Homo sapien
cgcatgttcatccttcctggaaata

SEQ ID NO: 3986800 - DNA, 25 bp, Homo sapien
tcttggaattcttcatttcggtgag

SEQ ID NO: 3986801 - DNA, 25 bp, Homo sapien
tcgcagtccaaactcatccgcatgt

SEQ ID NO: 3986802 - DNA, 25 bp, Homo sapien
cctgggatgctactgtcactgtgtt

SEQ ID NO: 3986803 - DNA, 25 bp, Homo sapien
ctgggatgctactgtcactgtgtta

SEQ ID NO: 3986804 - DNA, 25 bp, Homo sapien
cagtaaaaccctgtcctgaattcca

SEQ ID NO: 3986805 - DNA, 25 bp, Homo sapien
cacacttcagcggtcgttgcagaaa

SEQ ID NO: 3986806 - DNA, 25 bp, Homo sapien
aaattctgctcggtctttccttgca

SEQ ID NO: 3986807 - DNA, 25 bp, Homo sapien
tatcataaaacttggttaactcagt

SEQ ID NO: 3986808 - DNA, 25 bp, Homo sapien
cctgaagcctcactataaattcttc

SEQ ID NO: 3986809 - DNA, 25 bp, Homo sapien
aagcctcactataaattcttctctg

SEQ ID NO: 3986810 - DNA, 25 bp, Homo sapien
tgaagcctcactataaattcttctc

SEQ ID NO: 3986811 - DNA, 25 bp, Homo sapien
gaagcctcactataaattcttctct

SEQ ID NO: 3986812 - DNA, 25 bp, Homo sapien
tgataaattataggctgtacatcgg

SEQ ID NO: 3986813 - DNA, 25 bp, Homo sapien
cagggggtgaatccctgtcctggcc

SEQ ID NO: 3986814 - DNA, 25 bp, Homo sapien
tataggctgtacatcggtggtctgg

SEQ ID NO: 3986815 - DNA, 25 bp, Homo sapien
catcggtggtctgggactggcaggg

SEQ ID NO: 3986816 - DNA, 25 bp, Homo sapien
tgcatgccctgctgcggtggagcat

SEQ ID NO: 3986817 - DNA, 25 bp, Homo sapien
cttgtcagggctggtcctttggtgc

SEQ ID NO: 3986818 - DNA, 25 bp, Homo sapien
tccccaaagggtcaagagcttgacc

SEQ ID NO: 3986819 - DNA, 25 bp, Homo sapien
tggtgttgcccgtggatccagcatg

SEQ ID NO: 3986820 - DNA, 25 bp, Homo sapien
tattggacagagcaaataaggagca

SEQ ID NO: 3986821 - DNA, 25 bp, Homo sapien
tctatggaatggtactgatctacag

SEQ ID NO: 3986822 - DNA, 25 bp, Homo sapien
caagcactcattagctacctgtggc

SEQ ID NO: 3986823 - DNA, 25 bp, Homo sapien
gaagcggcacccatgtcattactga

SEQ ID NO: 3986824 - DNA, 25 bp, Homo sapien
gagcactgtgctactcatcgacctg

SEQ ID NO: 3986825 - DNA, 25 bp, Homo sapien
ggagcactgtgctactcatcgacct

SEQ ID NO: 3986826 - DNA, 25 bp, Homo sapien
tggagcactgtgctactcatcgacc

SEQ ID NO: 3986827 - DNA, 25 bp, Homo sapien
cagagatgcggctgaagatgccttt

SEQ ID NO: 3986828 - DNA, 25 bp, Homo sapien
caccagttttgactcaaatttggga

SEQ ID NO: 3986829 - DNA, 25 bp, Homo sapien
cagagttagcatcatagggcttgac

SEQ ID NO: 3986830 - DNA, 25 bp, Homo sapien
tcatagggcttgaccactggtgact

SEQ ID NO: 3986831 - DNA, 25 bp, Homo sapien
tagttggcagcagaccagagttagc

SEQ ID NO: 3986832 - DNA, 25 bp, Homo sapien
cagaccagagttagcatcatagggc

SEQ ID NO: 3986833 - DNA, 25 bp, Homo sapien
tgcttcctaacaccagcatccgatt

SEQ ID NO: 3986834 - DNA, 25 bp, Homo sapien
tcctaacaccagcatccgattgcag

SEQ ID NO: 3986835 - DNA, 25 bp, Homo sapien
caccagcatccgattgcagatccat

SEQ ID NO: 3986836 - DNA, 25 bp, Homo sapien
ttggtccagttcatcacctgcttcc

SEQ ID NO: 3986837 - DNA, 25 bp, Homo sapien
tgaacataatgtggttgagtctctt

SEQ ID NO: 3986838 - DNA, 25 bp, Homo sapien
tcctccttcccttgaacataatgtg

SEQ ID NO: 3986839 - DNA, 25 bp, Homo sapien
gtcaatcccattgtcattcaccttc

SEQ ID NO: 3986840 - DNA, 25 bp, Homo sapien
gctggccaggtcctttttggatcct

SEQ ID NO: 3986841 - DNA, 25 bp, Homo sapien
atcccattgtcattcaccttctgct

SEQ ID NO: 3986842 - DNA, 25 bp, Homo sapien
caatcccattgtcattcaccttctg

SEQ ID NO: 3986843 - DNA, 25 bp, Homo sapien
ctagcacggatttcctttgactcac

SEQ ID NO: 3986844 - DNA, 25 bp, Homo sapien
tcagtgctcaatgactagcacggat

SEQ ID NO: 3986845 - DNA, 25 bp, Homo sapien
tgctcaatgactagcacggatttcc

SEQ ID NO: 3986846 - DNA, 25 bp, Homo sapien
caatgactagcacggatttcctttg

SEQ ID NO: 3986847 - DNA, 25 bp, Homo sapien
gggctctgctcgacctgaagggttt

SEQ ID NO: 3986848 - DNA, 25 bp, Homo sapien
tatgaaacgctctattaggaaaact

SEQ ID NO: 3986849 - DNA, 25 bp, Homo sapien
tatcgacaaccgctttgctgctatg

SEQ ID NO: 3986850 - DNA, 25 bp, Homo sapien
tgctgctatgaaacgctctattagg

SEQ ID NO: 3986851 - DNA, 25 bp, Homo sapien
cttcagtgtgacagtgactgttgtc

SEQ ID NO: 3986852 - DNA, 25 bp, Homo sapien
gaaacggtggtgacatcgctcacac

SEQ ID NO: 3986853 - DNA, 25 bp, Homo sapien
tcacaccctggtaaaggcactcggg

SEQ ID NO: 3986854 - DNA, 25 bp, Homo sapien
gttcgggcgggcaggctctggagtg

SEQ ID NO: 3986855 - DNA, 25 bp, Homo sapien
aatggtgaattcacggctggactga

SEQ ID NO: 3986856 - DNA, 25 bp, Homo sapien
gagagaatggtaaataccaatggtg

SEQ ID NO: 3986857 - DNA, 25 bp, Homo sapien
tcctccaaaactaatgaggagagaa

SEQ ID NO: 3986858 - DNA, 25 bp, Homo sapien
tcttcctccaaaactaatgaggaga

SEQ ID NO: 3986859 - DNA, 25 bp, Homo sapien
tcaaagggaagcttggctggagttt

SEQ ID NO: 3986860 - DNA, 25 bp, Homo sapien
ccttgtttccagatgacgaagtttt

SEQ ID NO: 3986861 - DNA, 25 bp, Homo sapien
cagatgacgaagttttggaagatgt

SEQ ID NO: 3986862 - DNA, 25 bp, Homo sapien
tggaagatgtctggaagatcatagt

SEQ ID NO: 3986863 - DNA, 25 bp, Homo sapien
cttagaattgaaggtcacagaagtc

SEQ ID NO: 3986864 - DNA, 25 bp, Homo sapien
tagaattgaaggtcacagaagtcat

SEQ ID NO: 3986865 - DNA, 25 bp, Homo sapien
agaattgaaggtcacagaagtcatc

SEQ ID NO: 3986866 - DNA, 25 bp, Homo sapien
gaattgaaggtcacagaagtcatcc

SEQ ID NO: 3986867 - DNA, 25 bp, Homo sapien
tccccgatggaaggatccccggatg

SEQ ID NO: 3986868 - DNA, 25 bp, Homo sapien
gaaggatccccggatggtaccagac

SEQ ID NO: 3986869 - DNA, 25 bp, Homo sapien
atccccggatggtaccagactcaca

SEQ ID NO: 3986870 - DNA, 25 bp, Homo sapien
gatggtaccagactcacaacagggt

SEQ ID NO: 3986871 - DNA, 25 bp, Homo sapien
cgttcaatgtaagcctggtaatttc

SEQ ID NO: 3986872 - DNA, 25 bp, Homo sapien
agaggcaggcttgtcatctgagaaa

SEQ ID NO: 3986873 - DNA, 25 bp, Homo sapien
cctggtaatttcctagagaggcagg

SEQ ID NO: 3986874 - DNA, 25 bp, Homo sapien
gagaggcaggcttgtcatctgagaa

SEQ ID NO: 3986875 - DNA, 25 bp, Homo sapien
ggtggtacccttcacgaaggacaga

SEQ ID NO: 3986876 - DNA, 25 bp, Homo sapien
tcagaagcgaccgtgaatctggagg

SEQ ID NO: 3986877 - DNA, 25 bp, Homo sapien
cccttcacgaaggacagagcgggaa

SEQ ID NO: 3986878 - DNA, 25 bp, Homo sapien
ggaagcccatgaaagaaacgttgtc

SEQ ID NO: 3986879 - DNA, 25 bp, Homo sapien
tccttcagcaattctgtatcctcct

SEQ ID NO: 3986880 - DNA, 25 bp, Homo sapien
gaagaatgtattccttcagcaattc

SEQ ID NO: 3986881 - DNA, 25 bp, Homo sapien
gcagggttgcttgaaaactctctga

SEQ ID NO: 3986882 - DNA, 25 bp, Homo sapien
tgttcctggaacttctcttgacaag

SEQ ID NO: 3986883 - DNA, 25 bp, Homo sapien
aagaggtctgttggcatgagcagca

SEQ ID NO: 3986884 - DNA, 25 bp, Homo sapien
gattttgtggcaattacttccttgt

SEQ ID NO: 3986885 - DNA, 25 bp, Homo sapien
ccggtgtgaaattaatcggcatgaa

SEQ ID NO: 3986886 - DNA, 25 bp, Homo sapien
gcatgagcagcatccaaacaggcag

SEQ ID NO: 3986887 - DNA, 25 bp, Homo sapien
agcatgtccatcggtctgcactgag

SEQ ID NO: 3986888 - DNA, 25 bp, Homo sapien
tccaggggcatgcaggccttggtgg

SEQ ID NO: 3986889 - DNA, 25 bp, Homo sapien
ggcagcatgtccatcggtctgcact

SEQ ID NO: 3986890 - DNA, 25 bp, Homo sapien
cagcatgtccatcggtctgcactga

SEQ ID NO: 3986891 - DNA, 25 bp, Homo sapien
gcctatgagagcatttggcccaaac

SEQ ID NO: 3986892 - DNA, 25 bp, Homo sapien
catttggcccaaaccacgttaccag

SEQ ID NO: 3986893 - DNA, 25 bp, Homo sapien
gagcatttggcccaaaccacgttac

SEQ ID NO: 3986894 - DNA, 25 bp, Homo sapien
tatgagagcatttggcccaaaccac

SEQ ID NO: 3986895 - DNA, 25 bp, Homo sapien
gttggctccagacatagcccttttc

SEQ ID NO: 3986896 - DNA, 25 bp, Homo sapien
cctgcctgcgaccttgtggattggg

SEQ ID NO: 3986897 - DNA, 25 bp, Homo sapien
agagccctgcctgcgaccttgtgga

SEQ ID NO: 3986898 - DNA, 25 bp, Homo sapien
ttggctccagacatagcccttttcc

SEQ ID NO: 3986899 - DNA, 25 bp, Homo sapien
gacttggtgctagacccagggacag

SEQ ID NO: 3986900 - DNA, 25 bp, Homo sapien
tgggaagtcacatacagagagagca

SEQ ID NO: 3986901 - DNA, 25 bp, Homo sapien
ccagggagtttgcaacgcatcggcc

SEQ ID NO: 3986902 - DNA, 25 bp, Homo sapien
catcggccggtcagttgggaagtca

SEQ ID NO: 3986903 - DNA, 25 bp, Homo sapien
tggagctgatgcaaggggagtggct

SEQ ID NO: 3986904 - DNA, 25 bp, Homo sapien
ctggagctgatgcaaggggagtggc

SEQ ID NO: 3986905 - DNA, 25 bp, Homo sapien
atcatgcccatggttggggcttgcc

SEQ ID NO: 3986906 - DNA, 25 bp, Homo sapien
tttgacattatcatgcccatggttg

SEQ ID NO: 3986907 - DNA, 25 bp, Homo sapien
cattatcatgcccatggttggggct

SEQ ID NO: 3986908 - DNA, 25 bp, Homo sapien
tgacattatcatgcccatggttggg

SEQ ID NO: 3986909 - DNA, 25 bp, Homo sapien
cctgagacatccagtgccatgcatt

SEQ ID NO: 3986910 - DNA, 25 bp, Homo sapien
gacatccagtgccatgcattttctc

SEQ ID NO: 3986911 - DNA, 25 bp, Homo sapien
gcattttctcttgcaggtctttcct

SEQ ID NO: 3986912 - DNA, 25 bp, Homo sapien
tgcatggttctcctcccctgagaca

SEQ ID NO: 3986913 - DNA, 25 bp, Homo sapien
agaaagctggctgatcttaaaggaa

SEQ ID NO: 3986914 - DNA, 25 bp, Homo sapien
gcagattaacattgttcccagtgcc

SEQ ID NO: 3986915 - DNA, 25 bp, Homo sapien
tcccagtgcccacaagaaagctggc

SEQ ID NO: 3986916 - DNA, 25 bp, Homo sapien
aacccgaaaggtatccatttggatg

SEQ ID NO: 3986917 - DNA, 25 bp, Homo sapien
acggtggcagcctcgagtggtcctg

SEQ ID NO: 3986918 - DNA, 25 bp, Homo sapien
aagagtgcggagctctccctcggga

SEQ ID NO: 3986919 - DNA, 25 bp, Homo sapien
caggtcctcgcggtgcgcaccgttt

SEQ ID NO: 3986920 - DNA, 25 bp, Homo sapien
caccgtttgcgacttggtgagtgtc

SEQ ID NO: 3986921 - DNA, 25 bp, Homo sapien
tgatgcttgcgaagtcagcagaggc

SEQ ID NO: 3986922 - DNA, 25 bp, Homo sapien
cttgcgaagtcagcagaggctccca

SEQ ID NO: 3986923 - DNA, 25 bp, Homo sapien
tgcttgcgaagtcagcagaggctcc

SEQ ID NO: 3986924 - DNA, 25 bp, Homo sapien
tgtgatgcttgcgaagtcagcagag

SEQ ID NO: 3986925 - DNA, 25 bp, Homo sapien
tgaaaggaggtacttgttaaatcta

SEQ ID NO: 3986926 - DNA, 25 bp, Homo sapien
aggaggtacttgttaaatctatgtg

SEQ ID NO: 3986927 - DNA, 25 bp, Homo sapien
tgtgaaaggaggtacttgttaaatc

SEQ ID NO: 3986928 - DNA, 25 bp, Homo sapien
gaggtacttgttaaatctatgtgtt

SEQ ID NO: 3986929 - DNA, 25 bp, Homo sapien
ggatgaacattacttggccactaag

SEQ ID NO: 3986930 - DNA, 25 bp, Homo sapien
ttaaacacctgctctagaccaagct

SEQ ID NO: 3986931 - DNA, 25 bp, Homo sapien
tagtgtggatcatgacttctaggga

SEQ ID NO: 3986932 - DNA, 25 bp, Homo sapien
ggttcccatccccatatctgttagt

SEQ ID NO: 3986933 - DNA, 25 bp, Homo sapien
tagttggaccttccctttgagcatg

SEQ ID NO: 3986934 - DNA, 25 bp, Homo sapien
gctggacttgtgcataaaggactgt

SEQ ID NO: 3986935 - DNA, 25 bp, Homo sapien
cagggctggcctgttattttactaa

SEQ ID NO: 3986936 - DNA, 25 bp, Homo sapien
gagatcccttggttctccccttaga

SEQ ID NO: 3986937 - DNA, 25 bp, Homo sapien
cacaaaggcagagaaacgattgcat

SEQ ID NO: 3986938 - DNA, 25 bp, Homo sapien
agagcattcacaggccagagtctgg

SEQ ID NO: 3986939 - DNA, 25 bp, Homo sapien
cgtgtatggaatctggcccgtccta

SEQ ID NO: 3986940 - DNA, 25 bp, Homo sapien
gagcatcttcacgtagttcacatga

SEQ ID NO: 3986941 - DNA, 25 bp, Homo sapien
tagctgtcccgtgctctagaggttc

SEQ ID NO: 3986942 - DNA, 25 bp, Homo sapien
ctagctgtcccgtgctctagaggtt

SEQ ID NO: 3986943 - DNA, 25 bp, Homo sapien
tagccacagctcgtaccactccccc

SEQ ID NO: 3986944 - DNA, 25 bp, Homo sapien
agctcgtaccactcccccgtctctg

SEQ ID NO: 3986945 - DNA, 25 bp, Homo sapien
taacctttatatttcctagccacag

SEQ ID NO: 3986946 - DNA, 25 bp, Homo sapien
aacctttatatttcctagccacagc

SEQ ID NO: 3986947 - DNA, 25 bp, Homo sapien
ttgctcttagccagtagcagctgtc

SEQ ID NO: 3986948 - DNA, 25 bp, Homo sapien
tttcttgctcttagccagtagcagc

SEQ ID NO: 3986949 - DNA, 25 bp, Homo sapien
cctttcttgctcttagccagtagca

SEQ ID NO: 3986950 - DNA, 25 bp, Homo sapien
cttagccagtagcagctgtcctggg

SEQ ID NO: 3986951 - DNA, 25 bp, Homo sapien
atcaagataagcaactgtgggtttt

SEQ ID NO: 3986952 - DNA, 25 bp, Homo sapien
cttggtttggctaatgagcgtggcc

SEQ ID NO: 3986953 - DNA, 25 bp, Homo sapien
tccactccttcaagggtggcttggt

SEQ ID NO: 3986954 - DNA, 25 bp, Homo sapien
gatgtgcaggaggactgccccgttc

SEQ ID NO: 3986955 - DNA, 25 bp, Homo sapien
tcaagggtggcttggtcatggactt

SEQ ID NO: 3986956 - DNA, 25 bp, Homo sapien
ggtgcttcttggtagatgtgtgtgc

SEQ ID NO: 3986957 - DNA, 25 bp, Homo sapien
gtgcttcttggtagatgtgtgtgca

SEQ ID NO: 3986958 - DNA, 25 bp, Homo sapien
catccatggcatcccatcctcttgg

SEQ ID NO: 3986959 - DNA, 25 bp, Homo sapien
ttcatccatggcatcccatcctctt

SEQ ID NO: 3986960 - DNA, 25 bp, Homo sapien
tcatccatggcatcccatcctcttg

SEQ ID NO: 3986961 - DNA, 25 bp, Homo sapien
ggaaatgttcatgggatgcgccaca

SEQ ID NO: 3986962 - DNA, 25 bp, Homo sapien
gaaaacgctggaattgacacctgag

SEQ ID NO: 3986963 - DNA, 25 bp, Homo sapien
gatgagaaccctgtataccgtccgc

SEQ ID NO: 3986964 - DNA, 25 bp, Homo sapien
gagcagttgcgtcatttccgggtga

SEQ ID NO: 3986965 - DNA, 25 bp, Homo sapien
cgtccttaggattgtcttaataact

SEQ ID NO: 3986966 - DNA, 25 bp, Homo sapien
ttatgttatcattaagacttccatt

SEQ ID NO: 3986967 - DNA, 25 bp, Homo sapien
gtgttagttgaatgtttatgttatc

SEQ ID NO: 3986968 - DNA, 25 bp, Homo sapien
agtaaatagattttcacgtccttag

SEQ ID NO: 3986969 - DNA, 25 bp, Homo sapien
gagactaccaagctgtcttcgaggg

SEQ ID NO: 3986970 - DNA, 25 bp, Homo sapien
tcaaagaacctcgactatgatgtca

SEQ ID NO: 3986971 - DNA, 25 bp, Homo sapien
catttttctgtaagccctggactac

SEQ ID NO: 3986972 - DNA, 25 bp, Homo sapien
gcatgtctccgcaggaagagggact

SEQ ID NO: 3986973 - DNA, 25 bp, Homo sapien
tcctgccttgtggactagagcatcg

SEQ ID NO: 3986974 - DNA, 25 bp, Homo sapien
cctgccttgtggactagagcatcgg

SEQ ID NO: 3986975 - DNA, 25 bp, Homo sapien
ctgccttgtggactagagcatcgga

SEQ ID NO: 3986976 - DNA, 25 bp, Homo sapien
cacagccaccggagcatgttgggaa

SEQ ID NO: 3986977 - DNA, 25 bp, Homo sapien
caggagcacgagacctttacggagt

SEQ ID NO: 3986978 - DNA, 25 bp, Homo sapien
gagccgctggaacgtgtctggaaca

SEQ ID NO: 3986979 - DNA, 25 bp, Homo sapien
tacggagttcagtgccgtcaaggcc

SEQ ID NO: 3986980 - DNA, 25 bp, Homo sapien
ccatgtgtctcatgcaagaattctt

SEQ ID NO: 3986981 - DNA, 25 bp, Homo sapien
catgtgtctcatgcaagaattcttc

SEQ ID NO: 3986982 - DNA, 25 bp, Homo sapien
cccatgtgtctcatgcaagaattct

SEQ ID NO: 3986983 - DNA, 25 bp, Homo sapien
atgtgtctcatgcaagaattcttcc

SEQ ID NO: 3986984 - DNA, 25 bp, Homo sapien
tacaccatgacttagaaaattccag

SEQ ID NO: 3986985 - DNA, 25 bp, Homo sapien
ctcgtgggtgttgacttgtggctcc

SEQ ID NO: 3986986 - DNA, 25 bp, Homo sapien
tttgcattagaggatagccggcctc

SEQ ID NO: 3986987 - DNA, 25 bp, Homo sapien
tctcagtgctatgggaggattgcgt

SEQ ID NO: 3986988 - DNA, 25 bp, Homo sapien
gctagtgccagcatggtacaggagt

SEQ ID NO: 3986989 - DNA, 25 bp, Homo sapien
cggtgctagtgccagcatggtacag

SEQ ID NO: 3986990 - DNA, 25 bp, Homo sapien
tgccagcatggtacaggagtcgcag

SEQ ID NO: 3986991 - DNA, 25 bp, Homo sapien
cagcatggtacaggagtcgcagctc

SEQ ID NO: 3986992 - DNA, 25 bp, Homo sapien
ggccggctccgatgacagtaataaa

SEQ ID NO: 3986993 - DNA, 25 bp, Homo sapien
ggttttataatgtgccacgcgtcag

SEQ ID NO: 3986994 - DNA, 25 bp, Homo sapien
tgagccctttaataagacgcacgtg

SEQ ID NO: 3986995 - DNA, 25 bp, Homo sapien
tgtgcctaagccaagacatgagcag

SEQ ID NO: 3986996 - DNA, 25 bp, Homo sapien
gagaaagtgacgtctgagcatggtt

SEQ ID NO: 3986997 - DNA, 25 bp, Homo sapien
tggtatagtggccatggagagctgc

SEQ ID NO: 3986998 - DNA, 25 bp, Homo sapien
catggagagctgcagtggtatagtg

SEQ ID NO: 3986999 - DNA, 25 bp, Homo sapien
ctgcggtggtgtagttgtgcttctc

SEQ ID NO: 3987000 - DNA, 25 bp, Homo sapien
tgggcatcgcatcagagacgctgcc

SEQ ID NO: 3987001 - DNA, 25 bp, Homo sapien
atcgcatcagagacgctgccgtgct

SEQ ID NO: 3987002 - DNA, 25 bp, Homo sapien
ccctgggcatcgcatcagagacgct

SEQ ID NO: 3987003 - DNA, 25 bp, Homo sapien
gcatcgcatcagagacgctgccgtg

SEQ ID NO: 3987004 - DNA, 25 bp, Homo sapien
tatgttccgtgacgagagggtacga

SEQ ID NO: 3987005 - DNA, 25 bp, Homo sapien
tatagtgcagtgtcctttagaagcc

SEQ ID NO: 3987006 - DNA, 25 bp, Homo sapien
cagacaatggcctcgtctttcaggt

SEQ ID NO: 3987007 - DNA, 25 bp, Homo sapien
cctgcagaggtgttagcgtagcccg

SEQ ID NO: 3987008 - DNA, 25 bp, Homo sapien
agcttcggtgctcttgatgttttct

SEQ ID NO: 3987009 - DNA, 25 bp, Homo sapien
cagcttcggtgctcttgatgttttc

SEQ ID NO: 3987010 - DNA, 25 bp, Homo sapien
aaagcccccttgttggctggtcctg

SEQ ID NO: 3987011 - DNA, 25 bp, Homo sapien
gcggtgctgaaagcccccttgttgg

SEQ ID NO: 3987012 - DNA, 25 bp, Homo sapien
aagaagcggtgctgaaagccccctt

SEQ ID NO: 3987013 - DNA, 25 bp, Homo sapien
gcagcctggcgtctgctttgcctgt

SEQ ID NO: 3987014 - DNA, 25 bp, Homo sapien
aggaaagaaatgtgagtgtgtggat

SEQ ID NO: 3987015 - DNA, 25 bp, Homo sapien
gtttggcaaatatgttgaaggaaag

SEQ ID NO: 3987016 - DNA, 25 bp, Homo sapien
aagtttggcaaatatgttgaaggaa

SEQ ID NO: 3987017 - DNA, 25 bp, Homo sapien
tttggcaaatatgttgaaggaaaga

SEQ ID NO: 3987018 - DNA, 25 bp, Homo sapien
tctccggcgtctctcctgatgttgc

SEQ ID NO: 3987019 - DNA, 25 bp, Homo sapien
cgccctgcacggccgttggagagta

SEQ ID NO: 3987020 - DNA, 25 bp, Homo sapien
cgctccacaccacttttatcatctt

SEQ ID NO: 3987021 - DNA, 25 bp, Homo sapien
tgtgaaaatgtagttgctttggagc

SEQ ID NO: 3987022 - DNA, 25 bp, Homo sapien
ttcgaaaagtgtgtcagatcatttt

SEQ ID NO: 3987023 - DNA, 25 bp, Homo sapien
ctttcgaaaagtgtgtcagatcatt

SEQ ID NO: 3987024 - DNA, 25 bp, Homo sapien
tttcgaaaagtgtgtcagatcattt

SEQ ID NO: 3987025 - DNA, 25 bp, Homo sapien
catcagtcccatcgtattcatttaa

SEQ ID NO: 3987026 - DNA, 25 bp, Homo sapien
cagtcccatcgtattcatttaactc

SEQ ID NO: 3987027 - DNA, 25 bp, Homo sapien
gccatcagtcccatcgtattcattt

SEQ ID NO: 3987028 - DNA, 25 bp, Homo sapien
gtcccatcgtattcatttaactcca

SEQ ID NO: 3987029 - DNA, 25 bp, Homo sapien
tggaactctgacttgatcagcccat

SEQ ID NO: 3987030 - DNA, 25 bp, Homo sapien
cgcgtgaaagtctgattggaactct

SEQ ID NO: 3987031 - DNA, 25 bp, Homo sapien
ggaactctgacttgatcagcccatg

SEQ ID NO: 3987032 - DNA, 25 bp, Homo sapien
ctgtaacaggagccgcgtgaaagtc

SEQ ID NO: 3987033 - DNA, 25 bp, Homo sapien
tggaagaagaccctggcgccccgtc

SEQ ID NO: 3987034 - DNA, 25 bp, Homo sapien
ggattagcggccctactgtgagatc

SEQ ID NO: 3987035 - DNA, 25 bp, Homo sapien
gtctccccgtggattagcggcccta

SEQ ID NO: 3987036 - DNA, 25 bp, Homo sapien
agcggccctactgtgagatcctggt

SEQ ID NO: 3987037 - DNA, 25 bp, Homo sapien
gacccctgagtttccagaggtcctg

SEQ ID NO: 3987038 - DNA, 25 bp, Homo sapien
gcttggaccggagcgtctttagagt

SEQ ID NO: 3987039 - DNA, 25 bp, Homo sapien
ccagaagacccctgagtttccagag

SEQ ID NO: 3987040 - DNA, 25 bp, Homo sapien
gaccggagcgtctttagagtgacca

SEQ ID NO: 3987041 - DNA, 25 bp, Homo sapien
cttggctctgcctggaccctctctc

SEQ ID NO: 3987042 - DNA, 25 bp, Homo sapien
cctctctctcttccaggcctctgtc

SEQ ID NO: 3987043 - DNA, 25 bp, Homo sapien
tctctctcttccaggcctctgtccc

SEQ ID NO: 3987044 - DNA, 25 bp, Homo sapien
tggctctgcctggaccctctctctc

SEQ ID NO: 3987045 - DNA, 25 bp, Homo sapien
tcgttggctggatctcgttgaaggc

SEQ ID NO: 3987046 - DNA, 25 bp, Homo sapien
caggatgatgcctatccagagctca

SEQ ID NO: 3987047 - DNA, 25 bp, Homo sapien
atcatcatcctggtggaggtgttgc

SEQ ID NO: 3987048 - DNA, 25 bp, Homo sapien
tcccattccgtgtctctctggaggg

SEQ ID NO: 3987049 - DNA, 25 bp, Homo sapien
tgggtagcgtagcaagtgccactga

SEQ ID NO: 3987050 - DNA, 25 bp, Homo sapien
ggccttcttgcccataactcgttgg

SEQ ID NO: 3987051 - DNA, 25 bp, Homo sapien
caccctaagaagattcaggaatggg

SEQ ID NO: 3987052 - DNA, 25 bp, Homo sapien
ttcagggtgccccaacagtaggttg

SEQ ID NO: 3987053 - DNA, 25 bp, Homo sapien
tgtcacgaggcacatcccgggtcat

SEQ ID NO: 3987054 - DNA, 25 bp, Homo sapien
ggccacggtctgtgcccacgtgtca

SEQ ID NO: 3987055 - DNA, 25 bp, Homo sapien
gtctgtgcccacgtgtcacgaggca

SEQ ID NO: 3987056 - DNA, 25 bp, Homo sapien
ggcctccggccacggtctgtgccca

SEQ ID NO: 3987057 - DNA, 25 bp, Homo sapien
tcctcagagtgtcttctgagtagtt

SEQ ID NO: 3987058 - DNA, 25 bp, Homo sapien
tctgagtagttggctaccatttgca

SEQ ID NO: 3987059 - DNA, 25 bp, Homo sapien
ctgagtagttggctaccatttgcat

SEQ ID NO: 3987060 - DNA, 25 bp, Homo sapien
ttctgagtagttggctaccatttgc

SEQ ID NO: 3987061 - DNA, 25 bp, Homo sapien
acttggcatgtcagtggagccagga

SEQ ID NO: 3987062 - DNA, 25 bp, Homo sapien
ccacaggagcgaggtggcaaagtgc

SEQ ID NO: 3987063 - DNA, 25 bp, Homo sapien
agaggctgctccaccgtgcaccgaa

SEQ ID NO: 3987064 - DNA, 25 bp, Homo sapien
aggaagtctccgatgcagaagcgga

SEQ ID NO: 3987065 - DNA, 25 bp, Homo sapien
cactgtggctcggtgtggccaagac

SEQ ID NO: 3987066 - DNA, 25 bp, Homo sapien
acattcttcccactcgcacgcatgc

SEQ ID NO: 3987067 - DNA, 25 bp, Homo sapien
cggtgtggccaagacccactgtgta

SEQ ID NO: 3987068 - DNA, 25 bp, Homo sapien
catccaggaataagagcactgtggc

SEQ ID NO: 3987069 - DNA, 25 bp, Homo sapien
gtcatcatggatagtgccctcagcc

SEQ ID NO: 3987070 - DNA, 25 bp, Homo sapien
ggatagtgccctcagcccatactct

SEQ ID NO: 3987071 - DNA, 25 bp, Homo sapien
tgtactgcgagccagcactgtcatc

SEQ ID NO: 3987072 - DNA, 25 bp, Homo sapien
cagcactgtcatcatggatagtgcc

SEQ ID NO: 3987073 - DNA, 25 bp, Homo sapien
ctagttgacaggccatttggagcac

SEQ ID NO: 3987074 - DNA, 25 bp, Homo sapien
ttctcgcagtcatggagcctagtgc

SEQ ID NO: 3987075 - DNA, 25 bp, Homo sapien
caatctggctgaagaagcggtatcc

SEQ ID NO: 3987076 - DNA, 25 bp, Homo sapien
gacgtcatggtgtctgttctcgcag

SEQ ID NO: 3987077 - DNA, 25 bp, Homo sapien
aacaggccttaattctgtgttctgg

SEQ ID NO: 3987078 - DNA, 25 bp, Homo sapien
agttttgcaggcaaactcaggtcga

SEQ ID NO: 3987079 - DNA, 25 bp, Homo sapien
caggcaaactcaggtcgaatttgga

SEQ ID NO: 3987080 - DNA, 25 bp, Homo sapien
tttgcaggcaaactcaggtcgaatt

SEQ ID NO: 3987081 - DNA, 25 bp, Homo sapien
aactcaggtcgaatttggattctca

SEQ ID NO: 3987082 - DNA, 25 bp, Homo sapien
ccttccttcgggatgtatcaccaag

SEQ ID NO: 3987083 - DNA, 25 bp, Homo sapien
gcatgagcttgtgtgcaccgaggaa

SEQ ID NO: 3987084 - DNA, 25 bp, Homo sapien
cgggcagatctcatgggcatgagct

SEQ ID NO: 3987085 - DNA, 25 bp, Homo sapien
tatcaccaagatgaaggcgggcaga

SEQ ID NO: 3987086 - DNA, 25 bp, Homo sapien
ttcttgcattgagtcttatccgcca

SEQ ID NO: 3987087 - DNA, 25 bp, Homo sapien
tggatatactaggacagctaggtcg

SEQ ID NO: 3987088 - DNA, 25 bp, Homo sapien
attgagtcttatccgccacagccca

SEQ ID NO: 3987089 - DNA, 25 bp, Homo sapien
taggacagctaggtcgtgcttgcgt

SEQ ID NO: 3987090 - DNA, 25 bp, Homo sapien
gatgtggctatacaaagcatttcca

SEQ ID NO: 3987091 - DNA, 25 bp, Homo sapien
cgcatttatcatcccttcgaggcag

SEQ ID NO: 3987092 - DNA, 25 bp, Homo sapien
aacaggttgctctcgtcactaggaa

SEQ ID NO: 3987093 - DNA, 25 bp, Homo sapien
cacattcaaaacatggaaggaggca

SEQ ID NO: 3987094 - DNA, 25 bp, Homo sapien
cataattagcttaagctttgggtta

SEQ ID NO: 3987095 - DNA, 25 bp, Homo sapien
actgagcgcgttgggttgatagcat

SEQ ID NO: 3987096 - DNA, 25 bp, Homo sapien
gagattccgggcagctgtctgactg

SEQ ID NO: 3987097 - DNA, 25 bp, Homo sapien
tacctggatatgcataataatagca

SEQ ID NO: 3987098 - DNA, 25 bp, Homo sapien
cctcctccttgtttgcatgatttac

SEQ ID NO: 3987099 - DNA, 25 bp, Homo sapien
gggagggctttgtctccatcctcct

SEQ ID NO: 3987100 - DNA, 25 bp, Homo sapien
ccatcctcctccttgtttgcatgat

SEQ ID NO: 3987101 - DNA, 25 bp, Homo sapien
agagggagggctttgtctccatcct

SEQ ID NO: 3987102 - DNA, 25 bp, Homo sapien
actctctacgacgctcatcatctga

SEQ ID NO: 3987103 - DNA, 25 bp, Homo sapien
aagcactctctacgacgctcatcat

SEQ ID NO: 3987104 - DNA, 25 bp, Homo sapien
caaagcactctctacgacgctcatc

SEQ ID NO: 3987105 - DNA, 25 bp, Homo sapien
tctctacgacgctcatcatctgaag

SEQ ID NO: 3987106 - DNA, 25 bp, Homo sapien
ttggagagcacaagctagtgaagtg

SEQ ID NO: 3987107 - DNA, 25 bp, Homo sapien
ccaaagcaccagagagcctagcact

SEQ ID NO: 3987108 - DNA, 25 bp, Homo sapien
gcaccagagagcctagcacttaatt

SEQ ID NO: 3987109 - DNA, 25 bp, Homo sapien
gagagcacaagctagtgaagtggat

SEQ ID NO: 3987110 - DNA, 25 bp, Homo sapien
gactgttgagggcacattaatttct

SEQ ID NO: 3987111 - DNA, 25 bp, Homo sapien
gatgtgactgttgagggcacattaa

SEQ ID NO: 3987112 - DNA, 25 bp, Homo sapien
ttatttggccagttccattccagat

SEQ ID NO: 3987113 - DNA, 25 bp, Homo sapien
ggccagttccattccagatgtgact

SEQ ID NO: 3987114 - DNA, 25 bp, Homo sapien
gcctgtctggcgctccgttcctgtt

SEQ ID NO: 3987115 - DNA, 25 bp, Homo sapien
ggcgctccgttcctgtttatactta

SEQ ID NO: 3987116 - DNA, 25 bp, Homo sapien
gctccgttcctgtttatacttaatg

SEQ ID NO: 3987117 - DNA, 25 bp, Homo sapien
gtctggcgctccgttcctgtttata

SEQ ID NO: 3987118 - DNA, 25 bp, Homo sapien
gagagaacacggtttgggagggaga

SEQ ID NO: 3987119 - DNA, 25 bp, Homo sapien
agggagaagactccctgtcttcgtt

SEQ ID NO: 3987120 - DNA, 25 bp, Homo sapien
gagaagactccctgtcttcgttgac

SEQ ID NO: 3987121 - DNA, 25 bp, Homo sapien
tttgtctcttttggtaattggtggc

SEQ ID NO: 3987122 - DNA, 25 bp, Homo sapien
cagcagaaatggtcatagtaggcca

SEQ ID NO: 3987123 - DNA, 25 bp, Homo sapien
tccgggccagcagaaatggtcatag

SEQ ID NO: 3987124 - DNA, 25 bp, Homo sapien
cgggccagcagaaatggtcatagta

SEQ ID NO: 3987125 - DNA, 25 bp, Homo sapien
gcagtccgggccagcagaaatggtc

SEQ ID NO: 3987126 - DNA, 25 bp, Homo sapien
atggtccagtgcgaatttctgatga

SEQ ID NO: 3987127 - DNA, 25 bp, Homo sapien
tatatctgatgttgcaatacttgtg

SEQ ID NO: 3987128 - DNA, 25 bp, Homo sapien
gcaatacttgtgaagctatagcttt

SEQ ID NO: 3987129 - DNA, 25 bp, Homo sapien
ggtccagtgcgaatttctgatgaaa

SEQ ID NO: 3987130 - DNA, 25 bp, Homo sapien
tgaagaggaactcacagcagcgctg

SEQ ID NO: 3987131 - DNA, 25 bp, Homo sapien
gatacttccattcgggagcaggatg

SEQ ID NO: 3987132 - DNA, 25 bp, Homo sapien
cacctggtacattaggtttgggact

SEQ ID NO: 3987133 - DNA, 25 bp, Homo sapien
tagaactggaatcgttggcccgatc

SEQ ID NO: 3987134 - DNA, 25 bp, Homo sapien
cgagcctgcgctggttttgctgcca

SEQ ID NO: 3987135 - DNA, 25 bp, Homo sapien
tagtgatcgtctgtgggctttccga

SEQ ID NO: 3987136 - DNA, 25 bp, Homo sapien
ctgacacgtgctcggcggctggttt

SEQ ID NO: 3987137 - DNA, 25 bp, Homo sapien
ttctccttcagatcagcggccttgg

SEQ ID NO: 3987138 - DNA, 25 bp, Homo sapien
gaaatgtgctgtacaagtttgaagc

SEQ ID NO: 3987139 - DNA, 25 bp, Homo sapien
ccatgtcagatgtgacaggcaatct

SEQ ID NO: 3987140 - DNA, 25 bp, Homo sapien
gaaggatgacttttgacgagccatg

SEQ ID NO: 3987141 - DNA, 25 bp, Homo sapien
caggcaatctagttggcttgagtgg

SEQ ID NO: 3987142 - DNA, 25 bp, Homo sapien
gcatttaaattgacaccagacttca

SEQ ID NO: 3987143 - DNA, 25 bp, Homo sapien
tttctggtgttcaatgcatttaaat

SEQ ID NO: 3987144 - DNA, 25 bp, Homo sapien
ttgttcatttcaggcccagcactgt

SEQ ID NO: 3987145 - DNA, 25 bp, Homo sapien
cagacttcagtatgttgttcatttc

SEQ ID NO: 3987146 - DNA, 25 bp, Homo sapien
atgccacggtgcttaggaatcttga

SEQ ID NO: 3987147 - DNA, 25 bp, Homo sapien
gtgcttaggaatcttgaaagctgca

SEQ ID NO: 3987148 - DNA, 25 bp, Homo sapien
cctacatacatgccacacgcatgcc

SEQ ID NO: 3987149 - DNA, 25 bp, Homo sapien
cacggtgcttaggaatcttgaaagc

SEQ ID NO: 3987150 - DNA, 25 bp, Homo sapien
gaactgggtatgcaattacgtttaa

SEQ ID NO: 3987151 - DNA, 25 bp, Homo sapien
gaatgcgctgtatccacactgtcca

SEQ ID NO: 3987152 - DNA, 25 bp, Homo sapien
ccagaaatgatggaatgcgctgtat

SEQ ID NO: 3987153 - DNA, 25 bp, Homo sapien
agcacttgacatgtgactcgggcaa

SEQ ID NO: 3987154 - DNA, 25 bp, Homo sapien
ttactctgcgtagtgtagggtgctg

SEQ ID NO: 3987155 - DNA, 25 bp, Homo sapien
caaagtttacaatgaagcccttgcg

SEQ ID NO: 3987156 - DNA, 25 bp, Homo sapien
gcccttgcgcttaggagcatacagt

SEQ ID NO: 3987157 - DNA, 25 bp, Homo sapien
actctgcgtagtgtagggtgctgta

SEQ ID NO: 3987158 - DNA, 25 bp, Homo sapien
cccggggacagtttccatctcatgg

SEQ ID NO: 3987159 - DNA, 25 bp, Homo sapien
ccgggccgtgtgtctttggaggaca

SEQ ID NO: 3987160 - DNA, 25 bp, Homo sapien
ggcccactgaagaaaagcagatagc

SEQ ID NO: 3987161 - DNA, 25 bp, Homo sapien
aagaaaagcagatagcaggcactga

SEQ ID NO: 3987162 - DNA, 25 bp, Homo sapien
ttcctcacagccgtatgatttcatc

SEQ ID NO: 3987163 - DNA, 25 bp, Homo sapien
cgtatgatttcatccggaagcggcc

SEQ ID NO: 3987164 - DNA, 25 bp, Homo sapien
cacagccgtatgatttcatccggaa

SEQ ID NO: 3987165 - DNA, 25 bp, Homo sapien
gatttcatccggaagcggcctctaa

SEQ ID NO: 3987166 - DNA, 25 bp, Homo sapien
ggctcttgtataaatatctgccacg

SEQ ID NO: 3987167 - DNA, 25 bp, Homo sapien
tctgccacgtttccactgggaatta

SEQ ID NO: 3987168 - DNA, 25 bp, Homo sapien
catctaagtggcttattttattccc

SEQ ID NO: 3987169 - DNA, 25 bp, Homo sapien
tatattttatagacactcgactgtc

SEQ ID NO: 3987170 - DNA, 25 bp, Homo sapien
gaggcactgcgtgttgggctcaaac

SEQ ID NO: 3987171 - DNA, 25 bp, Homo sapien
acagcccctgaacagaatcatttgg

SEQ ID NO: 3987172 - DNA, 25 bp, Homo sapien
ccacagttcgtgtcgatgaaggagg

SEQ ID NO: 3987173 - DNA, 25 bp, Homo sapien
aacatcccagtacaaaaaccagtgg

SEQ ID NO: 3987174 - DNA, 25 bp, Homo sapien
caggtctgtggcattaggtcttccc

SEQ ID NO: 3987175 - DNA, 25 bp, Homo sapien
ctgtggcattaggtcttcccttgtg

SEQ ID NO: 3987176 - DNA, 25 bp, Homo sapien
tcttcccttgtgagtggctcgtatt

SEQ ID NO: 3987177 - DNA, 25 bp, Homo sapien
gagtggctcgtattcttttcaagat

SEQ ID NO: 3987178 - DNA, 25 bp, Homo sapien
gatcatctttaggatctttaggatc

SEQ ID NO: 3987179 - DNA, 25 bp, Homo sapien
gagtgatgccacctcggcaccttcg

SEQ ID NO: 3987180 - DNA, 25 bp, Homo sapien
acctcggcaccttcgcgttgatcat

SEQ ID NO: 3987181 - DNA, 25 bp, Homo sapien
gcaccttcgcgttgatcatctttag

SEQ ID NO: 3987182 - DNA, 25 bp, Homo sapien
cgtgctccgggcacccaaggtgctt

SEQ ID NO: 3987183 - DNA, 25 bp, Homo sapien
gatctgcccgtggagtgatgaactt

SEQ ID NO: 3987184 - DNA, 25 bp, Homo sapien
gatgaacttgtaaaagaacgtcagg

SEQ ID NO: 3987185 - DNA, 25 bp, Homo sapien
tctttgtctggttaatcgcgtgcgt

SEQ ID NO: 3987186 - DNA, 25 bp, Homo sapien
cctcatccacggtgaggttgtgttt

SEQ ID NO: 3987187 - DNA, 25 bp, Homo sapien
tcagcattgtgggaccaccagtggc

SEQ ID NO: 3987188 - DNA, 25 bp, Homo sapien
ggatgagatgctctgccttgaggca

SEQ ID NO: 3987189 - DNA, 25 bp, Homo sapien
tgggtctccaatccggactcagcat

SEQ ID NO: 3987190 - DNA, 25 bp, Homo sapien
cagaagcatggaaagccggtggatt

SEQ ID NO: 3987191 - DNA, 25 bp, Homo sapien
cattctttacttctgagtgtttggg

SEQ ID NO: 3987192 - DNA, 25 bp, Homo sapien
attctttacttctgagtgtttgggg

SEQ ID NO: 3987193 - DNA, 25 bp, Homo sapien
tttgggggcttctagcgaataatcc

SEQ ID NO: 3987194 - DNA, 25 bp, Homo sapien
ggtggagtgaaggtcctacctccag

SEQ ID NO: 3987195 - DNA, 25 bp, Homo sapien
gagtgaaggtcctacctccagatgc

SEQ ID NO: 3987196 - DNA, 25 bp, Homo sapien
tacgtgattggaataggaatgcgca

SEQ ID NO: 3987197 - DNA, 25 bp, Homo sapien
ctccagatgcctccgaaggtgccgg

SEQ ID NO: 3987198 - DNA, 25 bp, Homo sapien
tgagatagggcattccccattccca

SEQ ID NO: 3987199 - DNA, 25 bp, Homo sapien
gtgaacctcagatcgagacaccagc

SEQ ID NO: 3987200 - DNA, 25 bp, Homo sapien
catcctttgaccgtcactgtgaacc

SEQ ID NO: 3987201 - DNA, 25 bp, Homo sapien
cagggcctgtatgggtgggtaagtc

SEQ ID NO: 3987202 - DNA, 25 bp, Homo sapien
tcacttcctcttccctgtggccgcc

SEQ ID NO: 3987203 - DNA, 25 bp, Homo sapien
cacttcctcttccctgtggccgccc

SEQ ID NO: 3987204 - DNA, 25 bp, Homo sapien
taatgggacactttggccgctgtca

SEQ ID NO: 3987205 - DNA, 25 bp, Homo sapien
catttccttggtaatgggacacttt

SEQ ID NO: 3987206 - DNA, 25 bp, Homo sapien
ccttggtaatgggacactttggccg

SEQ ID NO: 3987207 - DNA, 25 bp, Homo sapien
cactttggccgctgtcatggttggc

SEQ ID NO: 3987208 - DNA, 25 bp, Homo sapien
catacaggttgatggcaacagcgct

SEQ ID NO: 3987209 - DNA, 25 bp, Homo sapien
tccttctgtgaacatacaggttgat

SEQ ID NO: 3987210 - DNA, 25 bp, Homo sapien
aacatacaggttgatggcaacagcg

SEQ ID NO: 3987211 - DNA, 25 bp, Homo sapien
tgtgaacatacaggttgatggcaac

SEQ ID NO: 3987212 - DNA, 25 bp, Homo sapien
tctctgcggcgtactctgcgagggt

SEQ ID NO: 3987213 - DNA, 25 bp, Homo sapien
caccaggctctgcacgtgacatgga

SEQ ID NO: 3987214 - DNA, 25 bp, Homo sapien
catggagcctgcagctggaagaaca

SEQ ID NO: 3987215 - DNA, 25 bp, Homo sapien
gctgagatcagcaagacgacgtgtt

SEQ ID NO: 3987216 - DNA, 25 bp, Homo sapien
aaagcggctgattctgcagcctggg

SEQ ID NO: 3987217 - DNA, 25 bp, Homo sapien
atttccaccatcagcgtgctagtag

SEQ ID NO: 3987218 - DNA, 25 bp, Homo sapien
gcgtgctagtagtaaccatccaggg

SEQ ID NO: 3987219 - DNA, 25 bp, Homo sapien
cagcctgggcatgtggtatgtgggt

SEQ ID NO: 3987220 - DNA, 25 bp, Homo sapien
tgatgaggccggttgttggccataa

SEQ ID NO: 3987221 - DNA, 25 bp, Homo sapien
tttggtgtctgtaggtcattactgg

SEQ ID NO: 3987222 - DNA, 25 bp, Homo sapien
ctggaattacaccagccagccatga

SEQ ID NO: 3987223 - DNA, 25 bp, Homo sapien
gccataagaggagcggtgataagtt

SEQ ID NO: 3987224 - DNA, 25 bp, Homo sapien
gtccacagtaactctggagggctgc

SEQ ID NO: 3987225 - DNA, 25 bp, Homo sapien
gacagattgtgaatgccgagtccac

SEQ ID NO: 3987226 - DNA, 25 bp, Homo sapien
tgcctggcatcgtccttcatcattg

SEQ ID NO: 3987227 - DNA, 25 bp, Homo sapien
ttcatcattgtccagaaacgctcct

SEQ ID NO: 3987228 - DNA, 25 bp, Homo sapien
agtggtggctgcctttgtttctgca

SEQ ID NO: 3987229 - DNA, 25 bp, Homo sapien
cagtggtggctgcctttgtttctgc

SEQ ID NO: 3987230 - DNA, 25 bp, Homo sapien
gtggtggctgcctttgtttctgcac

SEQ ID NO: 3987231 - DNA, 25 bp, Homo sapien
caagtgcccgatgctgttgctggtg

SEQ ID NO: 3987232 - DNA, 25 bp, Homo sapien
gaacaagtgcccgatgctgttgctg

SEQ ID NO: 3987233 - DNA, 25 bp, Homo sapien
cccgatgctgttgctggtgcagatt

SEQ ID NO: 3987234 - DNA, 25 bp, Homo sapien
agcaggaacaagtgcccgatgctgt

SEQ ID NO: 3987235 - DNA, 25 bp, Homo sapien
ttgccaagcttgtgtagctgcttct

SEQ ID NO: 3987236 - DNA, 25 bp, Homo sapien
tttgccaagcttgtgtagctgcttc

SEQ ID NO: 3987237 - DNA, 25 bp, Homo sapien
cagcgccatcgccactccgtgaggg

SEQ ID NO: 3987238 - DNA, 25 bp, Homo sapien
tttggagcatgctctcccctggatc

SEQ ID NO: 3987239 - DNA, 25 bp, Homo sapien
aaccagtcgtcaggtatttcctcag

SEQ ID NO: 3987240 - DNA, 25 bp, Homo sapien
gtagatgtgggtgccggccgtgtct

SEQ ID NO: 3987241 - DNA, 25 bp, Homo sapien
agcgaccccatcagtaaagcgtcgc

SEQ ID NO: 3987242 - DNA, 25 bp, Homo sapien
ctgagacaatgtggtagctgccatc

SEQ ID NO: 3987243 - DNA, 25 bp, Homo sapien
gtccttgtactgagacaatgtggta

SEQ ID NO: 3987244 - DNA, 25 bp, Homo sapien
aaagcgtcgccaccatgcaatgctg

SEQ ID NO: 3987245 - DNA, 25 bp, Homo sapien
ctgtctcctgtgctggacaggaagc

SEQ ID NO: 3987246 - DNA, 25 bp, Homo sapien
catgcaggcggcgttgtcgtccgat

SEQ ID NO: 3987247 - DNA, 25 bp, Homo sapien
tgcgctgtggactgggacacttcca

SEQ ID NO: 3987248 - DNA, 25 bp, Homo sapien
gttgtcgtccgatggtctccacctg

SEQ ID NO: 3987249 - DNA, 25 bp, Homo sapien
cacctgtggccgtagcaccgggtgc

SEQ ID NO: 3987250 - DNA, 25 bp, Homo sapien
gccccgctgtggcactgtaaatatt

SEQ ID NO: 3987251 - DNA, 25 bp, Homo sapien
gtggcactgtaaatattcatttgag

SEQ ID NO: 3987252 - DNA, 25 bp, Homo sapien
cactccacacgtgtgccccgctgtg

SEQ ID NO: 3987253 - DNA, 25 bp, Homo sapien
actccacacgtgtgccccgctgtgg

SEQ ID NO: 3987254 - DNA, 25 bp, Homo sapien
catgtgaacactgggtttcctgtca

SEQ ID NO: 3987255 - DNA, 25 bp, Homo sapien
tgtatattgacttggcttgttgaaa

SEQ ID NO: 3987256 - DNA, 25 bp, Homo sapien
taattcagcctcttattgacagtaa

SEQ ID NO: 3987257 - DNA, 25 bp, Homo sapien
tgttcacagtacatgtgaacactgg

SEQ ID NO: 3987258 - DNA, 25 bp, Homo sapien
tttaacagtacctccagcccccatc

SEQ ID NO: 3987259 - DNA, 25 bp, Homo sapien
tcatcacaaaaggaccctggcttgc

SEQ ID NO: 3987260 - DNA, 25 bp, Homo sapien
ccatcatcacaaaaggaccctggct

SEQ ID NO: 3987261 - DNA, 25 bp, Homo sapien
ctggcttgctggtagctgctcccca

SEQ ID NO: 3987262 - DNA, 25 bp, Homo sapien
tggatttgtaaaaattgcagttcat

SEQ ID NO: 3987263 - DNA, 25 bp, Homo sapien
ctggatttgtaaaaattgcagttca

SEQ ID NO: 3987264 - DNA, 25 bp, Homo sapien
tacaaaaggcactgcggcgtccatt

SEQ ID NO: 3987265 - DNA, 25 bp, Homo sapien
gtggcatgagtatgtacaaaaggca

SEQ ID NO: 3987266 - DNA, 25 bp, Homo sapien
agagatgtccaaaggtgtggcttta

SEQ ID NO: 3987267 - DNA, 25 bp, Homo sapien
actgcggcgtccattgctgtgagta

SEQ ID NO: 3987268 - DNA, 25 bp, Homo sapien
caggatggggagaccacattccagg

SEQ ID NO: 3987269 - DNA, 25 bp, Homo sapien
attccaggtacagggataagaggag

SEQ ID NO: 3987270 - DNA, 25 bp, Homo sapien
agggataagaggaggaaagtcccag

SEQ ID NO: 3987271 - DNA, 25 bp, Homo sapien
tggaaaggtgccagccgtgggtgcc

SEQ ID NO: 3987272 - DNA, 25 bp, Homo sapien
gcagtgcaggcatcgcgagtaagaa

SEQ ID NO: 3987273 - DNA, 25 bp, Homo sapien
aagagggtgttagctcggataactg

SEQ ID NO: 3987274 - DNA, 25 bp, Homo sapien
tgagcagccttcaagaggacaggtt

SEQ ID NO: 3987275 - DNA, 25 bp, Homo sapien
gggctcctgagcagccttcaagagg

SEQ ID NO: 3987276 - DNA, 25 bp, Homo sapien
ctgtctgatggtcgtgtaagtccat

SEQ ID NO: 3987277 - DNA, 25 bp, Homo sapien
cacaaactttgttattctgcagtct

SEQ ID NO: 3987278 - DNA, 25 bp, Homo sapien
actgcagagtcctatcaaagtaagc

SEQ ID NO: 3987279 - DNA, 25 bp, Homo sapien
aaattggaagtgatgcccatttcct

SEQ ID NO: 3987280 - DNA, 25 bp, Homo sapien
gcagcatttccaggttccgactgca

SEQ ID NO: 3987281 - DNA, 25 bp, Homo sapien
tgcccaaggtgccatattgtgtaat

SEQ ID NO: 3987282 - DNA, 25 bp, Homo sapien
ccaaggtgccatattgtgtaatgga

SEQ ID NO: 3987283 - DNA, 25 bp, Homo sapien
tggagatgtgacgtcgaggcgccat

SEQ ID NO: 3987284 - DNA, 25 bp, Homo sapien
catattgtgtaatggagatgtgacg

SEQ ID NO: 3987285 - DNA, 25 bp, Homo sapien
tgaggatgtgaaattgcatgacaca

SEQ ID NO: 3987286 - DNA, 25 bp, Homo sapien
agagtgaggatgtgaaattgcatga

SEQ ID NO: 3987287 - DNA, 25 bp, Homo sapien
gtgaggatgtgaaattgcatgacac

SEQ ID NO: 3987288 - DNA, 25 bp, Homo sapien
agtgaggatgtgaaattgcatgaca

SEQ ID NO: 3987289 - DNA, 25 bp, Homo sapien
aagagcaggtagcatagtttatttc

SEQ ID NO: 3987290 - DNA, 25 bp, Homo sapien
gagcaggtagcatagtttatttctt

SEQ ID NO: 3987291 - DNA, 25 bp, Homo sapien
agcaggtagcatagtttatttcttt

SEQ ID NO: 3987292 - DNA, 25 bp, Homo sapien
ttaagagcaggtagcatagtttatt

SEQ ID NO: 3987293 - DNA, 25 bp, Homo sapien
agtctccatgcagcgtggataatct

SEQ ID NO: 3987294 - DNA, 25 bp, Homo sapien
catgcagcgtggataatctttggct

SEQ ID NO: 3987295 - DNA, 25 bp, Homo sapien
cagtgatatttagcaagagtctcca

SEQ ID NO: 3987296 - DNA, 25 bp, Homo sapien
ctgctctgcccttcagtcccgaagc

SEQ ID NO: 3987297 - DNA, 25 bp, Homo sapien
tccaagctcggcaccttgccagatt

SEQ ID NO: 3987298 - DNA, 25 bp, Homo sapien
gaactcagaggagcacctgtctttg

SEQ ID NO: 3987299 - DNA, 25 bp, Homo sapien
cacctgtctttggaacgaactcttt

SEQ ID NO: 3987300 - DNA, 25 bp, Homo sapien
tggaagccttgcgtccaagctcggc

SEQ ID NO: 3987301 - DNA, 25 bp, Homo sapien
catatgagtttgtgctggaacattc

SEQ ID NO: 3987302 - DNA, 25 bp, Homo sapien
gaatagctgctgtgctcatatgagt

SEQ ID NO: 3987303 - DNA, 25 bp, Homo sapien
cttcttgcaggtagggaggacgctt

SEQ ID NO: 3987304 - DNA, 25 bp, Homo sapien
taatatcagtgtcttgaaaggaagc

SEQ ID NO: 3987305 - DNA, 25 bp, Homo sapien
aaggatggggcggaccacagggccg

SEQ ID NO: 3987306 - DNA, 25 bp, Homo sapien
atgagctggcatccgtggcagcccc

SEQ ID NO: 3987307 - DNA, 25 bp, Homo sapien
gggcttccgagcaaaggtgctcccc

SEQ ID NO: 3987308 - DNA, 25 bp, Homo sapien
catcatgagctggcatccgtggcag

SEQ ID NO: 3987309 - DNA, 25 bp, Homo sapien
ccatccctcgaaccctgaaggagat

SEQ ID NO: 3987310 - DNA, 25 bp, Homo sapien
gggcacctttgcttcggagcccaaa

SEQ ID NO: 3987311 - DNA, 25 bp, Homo sapien
tcgaaccctgaaggagatgtcagct

SEQ ID NO: 3987312 - DNA, 25 bp, Homo sapien
ggtagtgcaggagacaagaccctca

SEQ ID NO: 3987313 - DNA, 25 bp, Homo sapien
cctggagtatatcacatgggccctg

SEQ ID NO: 3987314 - DNA, 25 bp, Homo sapien
ctggagtatatcacatgggccctgg

SEQ ID NO: 3987315 - DNA, 25 bp, Homo sapien
gcctggagtatatcacatgggccct

SEQ ID NO: 3987316 - DNA, 25 bp, Homo sapien
ttggcccttgcaccacgtacagctt

SEQ ID NO: 3987317 - DNA, 25 bp, Homo sapien
ttccctaacgttgctcaaacttgca

SEQ ID NO: 3987318 - DNA, 25 bp, Homo sapien
gcgtctgttggatgcctttggccct

SEQ ID NO: 3987319 - DNA, 25 bp, Homo sapien
tccacgcttattggctggccactgg

SEQ ID NO: 3987320 - DNA, 25 bp, Homo sapien
ggattgccatgagcgttaatgaccc

SEQ ID NO: 3987321 - DNA, 25 bp, Homo sapien
catcattgactgaaaggccccttca

SEQ ID NO: 3987322 - DNA, 25 bp, Homo sapien
ttcagccggtaccagaatcagaggg

SEQ ID NO: 3987323 - DNA, 25 bp, Homo sapien
tgaaaatgtccttagggccccaata

SEQ ID NO: 3987324 - DNA, 25 bp, Homo sapien
gaagactgggattctcagctgttcc

SEQ ID NO: 3987325 - DNA, 25 bp, Homo sapien
gcatgttcccatgtcatagtcgtca

SEQ ID NO: 3987326 - DNA, 25 bp, Homo sapien
gaacttggcagttactacacctcac

SEQ ID NO: 3987327 - DNA, 25 bp, Homo sapien
tcttagactgcgtcattggtgcacg

SEQ ID NO: 3987328 - DNA, 25 bp, Homo sapien
tttatgaacttgggcacgagactcc

SEQ ID NO: 3987329 - DNA, 25 bp, Homo sapien
aacttgggcacgagactccattcgg

SEQ ID NO: 3987330 - DNA, 25 bp, Homo sapien
cgagactccattcggccggaggctg

SEQ ID NO: 3987331 - DNA, 25 bp, Homo sapien
ggcacgagactccattcggccggag

SEQ ID NO: 3987332 - DNA, 25 bp, Homo sapien
caggtacatgtgtggcagtgacaca

SEQ ID NO: 3987333 - DNA, 25 bp, Homo sapien
tcctctaaaagctcacctgaccagt

SEQ ID NO: 3987334 - DNA, 25 bp, Homo sapien
gaggtgcccaagaaatagagcttgg

SEQ ID NO: 3987335 - DNA, 25 bp, Homo sapien
gaaatcatttctctgttgagctggg

SEQ ID NO: 3987336 - DNA, 25 bp, Homo sapien
gccccaaccttgggatcctgcagaa

SEQ ID NO: 3987337 - DNA, 25 bp, Homo sapien
acgccccaaccttgggatcctgcag

SEQ ID NO: 3987338 - DNA, 25 bp, Homo sapien
ctggacacgccccaaccttgggatc

SEQ ID NO: 3987339 - DNA, 25 bp, Homo sapien
gacacgccccaaccttgggatcctg

SEQ ID NO: 3987340 - DNA, 25 bp, Homo sapien
gccttctacgtgtcgtgccagctga

SEQ ID NO: 3987341 - DNA, 25 bp, Homo sapien
tctacgtgtcgtgccagctgagaac

SEQ ID NO: 3987342 - DNA, 25 bp, Homo sapien
ccatgtgccttctacgtgtcgtgcc

SEQ ID NO: 3987343 - DNA, 25 bp, Homo sapien
ctcccatgtgccttctacgtgtcgt

SEQ ID NO: 3987344 - DNA, 25 bp, Homo sapien
tgagggcagccatccagtgtcctcg

SEQ ID NO: 3987345 - DNA, 25 bp, Homo sapien
tgtgaaacgtctggcctccatcacc

SEQ ID NO: 3987346 - DNA, 25 bp, Homo sapien
catcacccgggtcgccccgacaagg

SEQ ID NO: 3987347 - DNA, 25 bp, Homo sapien
ctgacagatgtgaaacgtctggcct

SEQ ID NO: 3987348 - DNA, 25 bp, Homo sapien
gttgcagcttaaggtggccaccctg

SEQ ID NO: 3987349 - DNA, 25 bp, Homo sapien
gggtgtgtaacatcacaactggatc

SEQ ID NO: 3987350 - DNA, 25 bp, Homo sapien
gatctttgacgaacctataactggg

SEQ ID NO: 3987351 - DNA, 25 bp, Homo sapien
taaagcattgtagggccaatgccac

SEQ ID NO: 3987352 - DNA, 25 bp, Homo sapien
tctcgaatctttgactgtgcaggtt

SEQ ID NO: 3987353 - DNA, 25 bp, Homo sapien
cgacttaaaaggcaggcggttcagg

SEQ ID NO: 3987354 - DNA, 25 bp, Homo sapien
cctgactggttgtcaaatacgcttt

SEQ ID NO: 3987355 - DNA, 25 bp, Homo sapien
agtcccctgcctgtcgccaaatttt

SEQ ID NO: 3987356 - DNA, 25 bp, Homo sapien
gggcccagcgctaactcggatgtgt

SEQ ID NO: 3987357 - DNA, 25 bp, Homo sapien
caatcaagagtctccgtggttggct

SEQ ID NO: 3987358 - DNA, 25 bp, Homo sapien
catctctggctttctacgaaggcaa

SEQ ID NO: 3987359 - DNA, 25 bp, Homo sapien
aactaatgaagtattcccaggaccg

SEQ ID NO: 3987360 - DNA, 25 bp, Homo sapien
gaaaattcagttcatactcacgtgg

SEQ ID NO: 3987361 - DNA, 25 bp, Homo sapien
tctccagcatgtgcaataaccagga

SEQ ID NO: 3987362 - DNA, 25 bp, Homo sapien
tgagacgcagctcaccgctaagact

SEQ ID NO: 3987363 - DNA, 25 bp, Homo sapien
gcatagattccctagagagctgctg

SEQ ID NO: 3987364 - DNA, 25 bp, Homo sapien
caaatcgcctttaacctcagtcaga

SEQ ID NO: 3987365 - DNA, 25 bp, Homo sapien
cacccacgcagagattctggcggca

SEQ ID NO: 3987366 - DNA, 25 bp, Homo sapien
tcagaatgccagtcttcgccaggtt

SEQ ID NO: 3987367 - DNA, 25 bp, Homo sapien
tccggagagacatgcagcctctgtt

SEQ ID NO: 3987368 - DNA, 25 bp, Homo sapien
tttctgagcacagcgtggaagctcc

SEQ ID NO: 3987369 - DNA, 25 bp, Homo sapien
taatgcagattcgttttcccactgg

SEQ ID NO: 3987370 - DNA, 25 bp, Homo sapien
ccatcacaccgaggtcatttctgag

SEQ ID NO: 3987371 - DNA, 25 bp, Homo sapien
caggtcttggaagaaaccatcacac

SEQ ID NO: 3987372 - DNA, 25 bp, Homo sapien
ttaacctttatctccaaatacatgt

SEQ ID NO: 3987373 - DNA, 25 bp, Homo sapien
ttatctccaaatacatgttcattgc

SEQ ID NO: 3987374 - DNA, 25 bp, Homo sapien
cattgcttttatttgggaaataagc

SEQ ID NO: 3987375 - DNA, 25 bp, Homo sapien
tccaaatacatgttcattgctttta

SEQ ID NO: 3987376 - DNA, 25 bp, Homo sapien
catcatgtccaaggcattgatgcag

SEQ ID NO: 3987377 - DNA, 25 bp, Homo sapien
ctgccacaaagttctgggtctccat

SEQ ID NO: 3987378 - DNA, 25 bp, Homo sapien
agttctgggtctccatcatgtccaa

SEQ ID NO: 3987379 - DNA, 25 bp, Homo sapien
caactcctctgtgagagctgccaca

SEQ ID NO: 3987380 - DNA, 25 bp, Homo sapien
cagccgcatgtgtggaccccatgtg

SEQ ID NO: 3987381 - DNA, 25 bp, Homo sapien
gccgcatgtgtggaccccatgtgga

SEQ ID NO: 3987382 - DNA, 25 bp, Homo sapien
ttccgaggtgtcctggtggcttcaa

SEQ ID NO: 3987383 - DNA, 25 bp, Homo sapien
ccagcggttccgaggtgtcctggtg

SEQ ID NO: 3987384 - DNA, 25 bp, Homo sapien
tgtgacattggttatattctgaggc

SEQ ID NO: 3987385 - DNA, 25 bp, Homo sapien
tgtgtgacattggttatattctgag

SEQ ID NO: 3987386 - DNA, 25 bp, Homo sapien
ggatgtgtgacattggttatattct

SEQ ID NO: 3987387 - DNA, 25 bp, Homo sapien
gacattggttatattctgaggcaag

SEQ ID NO: 3987388 - DNA, 25 bp, Homo sapien
aaactgacggcactccccagagaac

SEQ ID NO: 3987389 - DNA, 25 bp, Homo sapien
cgaaactgacggcactccccagaga

SEQ ID NO: 3987390 - DNA, 25 bp, Homo sapien
gaaactgacggcactccccagagaa

SEQ ID NO: 3987391 - DNA, 25 bp, Homo sapien
ctccgagcaagcgagataaggcgtg

SEQ ID NO: 3987392 - DNA, 25 bp, Homo sapien
tgcttgcgttgacccacttgatgag

SEQ ID NO: 3987393 - DNA, 25 bp, Homo sapien
gaggacttctttgggcgctccgagc

SEQ ID NO: 3987394 - DNA, 25 bp, Homo sapien
gggccggagtaagccacaaatcact

SEQ ID NO: 3987395 - DNA, 25 bp, Homo sapien
ttgcagaacgtaggcagcgcaggca

SEQ ID NO: 3987396 - DNA, 25 bp, Homo sapien
cctcttgcagaacgtaggcagcgca

SEQ ID NO: 3987397 - DNA, 25 bp, Homo sapien
gatgcccctcttgcagaacgtaggc

SEQ ID NO: 3987398 - DNA, 25 bp, Homo sapien
ggcatccgtgatgcccctcttgcag

SEQ ID NO: 3987399 - DNA, 25 bp, Homo sapien
taatcaaaaacagagaaaattacca

SEQ ID NO: 3987400 - DNA, 25 bp, Homo sapien
tatgtggcaaagtcaatgggtggca

SEQ ID NO: 3987401 - DNA, 25 bp, Homo sapien
tctactaggatttgtcacggccggg

SEQ ID NO: 3987402 - DNA, 25 bp, Homo sapien
gacagtgctgttggaactgaccaca

SEQ ID NO: 3987403 - DNA, 25 bp, Homo sapien
tgggtttggcactaagaggcacgat

SEQ ID NO: 3987404 - DNA, 25 bp, Homo sapien
taacaggaagctctagcagtgggag

SEQ ID NO: 3987405 - DNA, 25 bp, Homo sapien
gctgcggaaggtaaacagaagtccc

SEQ ID NO: 3987406 - DNA, 25 bp, Homo sapien
caattactagacatggccaagacgg

SEQ ID NO: 3987407 - DNA, 25 bp, Homo sapien
aagtccgtcctttgatgctgggtgc

SEQ ID NO: 3987408 - DNA, 25 bp, Homo sapien
attggcgggactaccagcccagaca

SEQ ID NO: 3987409 - DNA, 25 bp, Homo sapien
ggcgggactaccagcccagacatag

SEQ ID NO: 3987410 - DNA, 25 bp, Homo sapien
ttggcgggactaccagcccagacat

SEQ ID NO: 3987411 - DNA, 25 bp, Homo sapien
tggcgggactaccagcccagacata

SEQ ID NO: 3987412 - DNA, 25 bp, Homo sapien
gtttgtcttctccgcggctacgtcc

SEQ ID NO: 3987413 - DNA, 25 bp, Homo sapien
ccgcggctacgtcctcagcacccag

SEQ ID NO: 3987414 - DNA, 25 bp, Homo sapien
tgccaccgacttcacaaaagggcca

SEQ ID NO: 3987415 - DNA, 25 bp, Homo sapien
tcttctccgcggctacgtcctcagc

SEQ ID NO: 3987416 - DNA, 25 bp, Homo sapien
ccaaaggtggtgtctgaaagaggcc

SEQ ID NO: 3987417 - DNA, 25 bp, Homo sapien
tgagtcactgggaggagcatatacc

SEQ ID NO: 3987418 - DNA, 25 bp, Homo sapien
caaagggccactcgcaagttcatga

SEQ ID NO: 3987419 - DNA, 25 bp, Homo sapien
acttaatttaagtgcctgcgggcct

SEQ ID NO: 3987420 - DNA, 25 bp, Homo sapien
ttgcagtccattcccgttggcgctg

SEQ ID NO: 3987421 - DNA, 25 bp, Homo sapien
gaggagaggcttggggccggaccac

SEQ ID NO: 3987422 - DNA, 25 bp, Homo sapien
gggcgcgaaggcgctcttctgtttc

SEQ ID NO: 3987423 - DNA, 25 bp, Homo sapien
gtccattcccgttggcgctggtgca

SEQ ID NO: 3987424 - DNA, 25 bp, Homo sapien
cagtttgaagggagggtgaccgaag

SEQ ID NO: 3987425 - DNA, 25 bp, Homo sapien
agaaaatgccgtgtgtgctgctaca

SEQ ID NO: 3987426 - DNA, 25 bp, Homo sapien
gagaaaatgccgtgtgtgctgctac

SEQ ID NO: 3987427 - DNA, 25 bp, Homo sapien
gagggtgaccgaagaggctgccatg

SEQ ID NO: 3987428 - DNA, 25 bp, Homo sapien
aagcaaacacggtcagcacgcgcgg

SEQ ID NO: 3987429 - DNA, 25 bp, Homo sapien
gcaacaaagcaaacacggtcagcac

SEQ ID NO: 3987430 - DNA, 25 bp, Homo sapien
gcggcacagcgccacggcgagaggg

SEQ ID NO: 3987431 - DNA, 25 bp, Homo sapien
acggcgagagggcaccaaaggcctc

SEQ ID NO: 3987432 - DNA, 25 bp, Homo sapien
atctgcgtgatgacgtgtgacaaaa

SEQ ID NO: 3987433 - DNA, 25 bp, Homo sapien
gaatctgcgtgatgacgtgtgacaa

SEQ ID NO: 3987434 - DNA, 25 bp, Homo sapien
tcgactcggtagtgaatatgaatct

SEQ ID NO: 3987435 - DNA, 25 bp, Homo sapien
cggtagtgaatatgaatctgcgtga

SEQ ID NO: 3987436 - DNA, 25 bp, Homo sapien
gctgcttgtattgcgactgtagccg

SEQ ID NO: 3987437 - DNA, 25 bp, Homo sapien
gctgactgtgttgtaattggactgc

SEQ ID NO: 3987438 - DNA, 25 bp, Homo sapien
tatccattcatgctagtgctgactg

SEQ ID NO: 3987439 - DNA, 25 bp, Homo sapien
ttaagaaatccaggcgagccaggga

SEQ ID NO: 3987440 - DNA, 25 bp, Homo sapien
ttattatcagcgacagacacttggg

SEQ ID NO: 3987441 - DNA, 25 bp, Homo sapien
acattattatcagcgacagacactt

SEQ ID NO: 3987442 - DNA, 25 bp, Homo sapien
ataacattattatcagcgacagaca

SEQ ID NO: 3987443 - DNA, 25 bp, Homo sapien
attattatcagcgacagacacttgg

SEQ ID NO: 3987444 - DNA, 25 bp, Homo sapien
cgttgacggctagctggctgctgaa

SEQ ID NO: 3987445 - DNA, 25 bp, Homo sapien
gcttgtgacgtctctgacacgttga

SEQ ID NO: 3987446 - DNA, 25 bp, Homo sapien
cttggtcgttggcttgtgacgtctc

SEQ ID NO: 3987447 - DNA, 25 bp, Homo sapien
agttgacgcccatcatgcccgtgtg

SEQ ID NO: 3987448 - DNA, 25 bp, Homo sapien
tgcagcaggagcaagtgggagccgg

SEQ ID NO: 3987449 - DNA, 25 bp, Homo sapien
ctgcagcaggagcaagtgggagccg

SEQ ID NO: 3987450 - DNA, 25 bp, Homo sapien
gcagcaggagcaagtgggagccggc

SEQ ID NO: 3987451 - DNA, 25 bp, Homo sapien
gtataaggcttccaccaggtccgcc

SEQ ID NO: 3987452 - DNA, 25 bp, Homo sapien
gttgttgtgaggcattccgtataag

SEQ ID NO: 3987453 - DNA, 25 bp, Homo sapien
gaggcattccgtataaggcttccac

SEQ ID NO: 3987454 - DNA, 25 bp, Homo sapien
tccgccgcccgcttcagtaacacct

SEQ ID NO: 3987455 - DNA, 25 bp, Homo sapien
gacaacactgtttgtggcctttaca

SEQ ID NO: 3987456 - DNA, 25 bp, Homo sapien
gctcacagaggtgcacggacaagcg

SEQ ID NO: 3987457 - DNA, 25 bp, Homo sapien
caaggaggctgaataaaagcgtttt

SEQ ID NO: 3987458 - DNA, 25 bp, Homo sapien
ggcggagaacgagcccaatccgtgc

SEQ ID NO: 3987459 - DNA, 25 bp, Homo sapien
tctaggagagctctgctggtccacc

SEQ ID NO: 3987460 - DNA, 25 bp, Homo sapien
tgtgtctacatctgggcacctcttg

SEQ ID NO: 3987461 - DNA, 25 bp, Homo sapien
cggtctaggagagctctgcggtcta

SEQ ID NO: 3987462 - DNA, 25 bp, Homo sapien
aaagtaaggcaggtggccttcgctc

SEQ ID NO: 3987463 - DNA, 25 bp, Homo sapien
ctctgaaattggtgccgacgcttga

SEQ ID NO: 3987464 - DNA, 25 bp, Homo sapien
gtgccgacgcttgatgttgcatgca

SEQ ID NO: 3987465 - DNA, 25 bp, Homo sapien
aaagttcccggatgggtggctctga

SEQ ID NO: 3987466 - DNA, 25 bp, Homo sapien
caggaacagcacttaatccagaaag

SEQ ID NO: 3987467 - DNA, 25 bp, Homo sapien
cggcaaagccttattgagacacacg

SEQ ID NO: 3987468 - DNA, 25 bp, Homo sapien
tattcgcgtgcatccaaaacaatgt

SEQ ID NO: 3987469 - DNA, 25 bp, Homo sapien
gagacacacgctttacatctgcgga

SEQ ID NO: 3987470 - DNA, 25 bp, Homo sapien
tctcagaagcaacactattcgcgtg

SEQ ID NO: 3987471 - DNA, 25 bp, Homo sapien
tgggctgtgggctaactgatctgtc

SEQ ID NO: 3987472 - DNA, 25 bp, Homo sapien
ttaaaagagctaagtaatatggggc

SEQ ID NO: 3987473 - DNA, 25 bp, Homo sapien
aagagctaagtaatatggggcagtg

SEQ ID NO: 3987474 - DNA, 25 bp, Homo sapien
ctaactgatctgtcaccctgctgga

SEQ ID NO: 3987475 - DNA, 25 bp, Homo sapien
caggcacgcggtcacctgtggcgcc

SEQ ID NO: 3987476 - DNA, 25 bp, Homo sapien
acgcggtcacctgtggcgccaacac

SEQ ID NO: 3987477 - DNA, 25 bp, Homo sapien
gcggtcacctgtggcgccaacacca

SEQ ID NO: 3987478 - DNA, 25 bp, Homo sapien
ggcacgcggtcacctgtggcgccaa

SEQ ID NO: 3987479 - DNA, 25 bp, Homo sapien
atttcattacgcggaagtttatgtc

SEQ ID NO: 3987480 - DNA, 25 bp, Homo sapien
ctatttcattacgcggaagtttatg

SEQ ID NO: 3987481 - DNA, 25 bp, Homo sapien
tcattacgcggaagtttatgtcccc

SEQ ID NO: 3987482 - DNA, 25 bp, Homo sapien
cgcggaagtttatgtccccctcaca

SEQ ID NO: 3987483 - DNA, 25 bp, Homo sapien
gggtgccacttgctcttttactaac

SEQ ID NO: 3987484 - DNA, 25 bp, Homo sapien
agaaccagcccagtggcggccccac

SEQ ID NO: 3987485 - DNA, 25 bp, Homo sapien
gcggggtgccacttgctcttttact

SEQ ID NO: 3987486 - DNA, 25 bp, Homo sapien
tgagcggggtgccacttgctctttt

SEQ ID NO: 3987487 - DNA, 25 bp, Homo sapien
tctgcaacctctgaaagccgtaatc

SEQ ID NO: 3987488 - DNA, 25 bp, Homo sapien
acctttcgggatcacccggatgtct

SEQ ID NO: 3987489 - DNA, 25 bp, Homo sapien
gatgtcttgggatcactttctgcaa

SEQ ID NO: 3987490 - DNA, 25 bp, Homo sapien
ccgtaatctatggttggttcattaa

SEQ ID NO: 3987491 - DNA, 25 bp, Homo sapien
gggcgtcggcgcatcttgtaagcaa

SEQ ID NO: 3987492 - DNA, 25 bp, Homo sapien
ttgtaagcaacgcaggaagcctcgc

SEQ ID NO: 3987493 - DNA, 25 bp, Homo sapien
taatgcgcccgaaagttgaggacca

SEQ ID NO: 3987494 - DNA, 25 bp, Homo sapien
tacatcccggagataaaggtccgca

SEQ ID NO: 3987495 - DNA, 25 bp, Homo sapien
cagaagctgtcagcgttgacttggg

SEQ ID NO: 3987496 - DNA, 25 bp, Homo sapien
tcataatcagaccattaatcatcag

SEQ ID NO: 3987497 - DNA, 25 bp, Homo sapien
aaatgcctcggcgtatgtgacatgg

SEQ ID NO: 3987498 - DNA, 25 bp, Homo sapien
tgtcatgtctctgcctaggcccagg

SEQ ID NO: 3987499 - DNA, 25 bp, Homo sapien
cacgcagagtttacgggcgagagcc

SEQ ID NO: 3987500 - DNA, 25 bp, Homo sapien
acacatctcatgagccctccgcacg

SEQ ID NO: 3987501 - DNA, 25 bp, Homo sapien
cactggcaagttccccgacgggagg

SEQ ID NO: 3987502 - DNA, 25 bp, Homo sapien
atgagccctccgcacgcagagttta

SEQ ID NO: 3987503 - DNA, 25 bp, Homo sapien
tcttgtgacatacgtggttgtagtt

SEQ ID NO: 3987504 - DNA, 25 bp, Homo sapien
ttctttcttgtgacatacgtggttg

SEQ ID NO: 3987505 - DNA, 25 bp, Homo sapien
ctttcttgtgacatacgtggttgta

SEQ ID NO: 3987506 - DNA, 25 bp, Homo sapien
tgacatacgtggttgtagttttcat

SEQ ID NO: 3987507 - DNA, 25 bp, Homo sapien
gcagtccagggcgttgaggtccccc

SEQ ID NO: 3987508 - DNA, 25 bp, Homo sapien
tgaggtccccccaaggcctggaggc

SEQ ID NO: 3987509 - DNA, 25 bp, Homo sapien
ctggcagtccagggcgttgaggtcc

SEQ ID NO: 3987510 - DNA, 25 bp, Homo sapien
tggcagtccagggcgttgaggtccc

SEQ ID NO: 3987511 - DNA, 25 bp, Homo sapien
tccaagtgcatttcatctataagaa

SEQ ID NO: 3987512 - DNA, 25 bp, Homo sapien
ccaagtgcatttcatctataagaaa

SEQ ID NO: 3987513 - DNA, 25 bp, Homo sapien
aagaaattcagatgctcgggaaatt

SEQ ID NO: 3987514 - DNA, 25 bp, Homo sapien
tcagatgctcgggaaattaaaattt

SEQ ID NO: 3987515 - DNA, 25 bp, Homo sapien
cagccaatcggggtgcagggtgcag

SEQ ID NO: 3987516 - DNA, 25 bp, Homo sapien
tagcgtggccccgatgagagcagcc

SEQ ID NO: 3987517 - DNA, 25 bp, Homo sapien
cgtggccccgatgagagcagccaat

SEQ ID NO: 3987518 - DNA, 25 bp, Homo sapien
tggccccgatgagagcagccaatcg

SEQ ID NO: 3987519 - DNA, 25 bp, Homo sapien
aagccccctcggatgacagacaaat

SEQ ID NO: 3987520 - DNA, 25 bp, Homo sapien
caaatgtgtcttgttagcaatagcc

SEQ ID NO: 3987521 - DNA, 25 bp, Homo sapien
caatagcccaaaagcgcttgacttg

SEQ ID NO: 3987522 - DNA, 25 bp, Homo sapien
cagccacttggaaaacgaccaaagc

SEQ ID NO: 3987523 - DNA, 25 bp, Homo sapien
tggtcaccgtgggtctaaagacgaa

SEQ ID NO: 3987524 - DNA, 25 bp, Homo sapien
caaaaaggccatgctggtcaccgtg

SEQ ID NO: 3987525 - DNA, 25 bp, Homo sapien
caccgtgggtctaaagacgaagcac

SEQ ID NO: 3987526 - DNA, 25 bp, Homo sapien
ccatgctggtcaccgtgggtctaaa

SEQ ID NO: 3987527 - DNA, 25 bp, Homo sapien
tgcctggagggtgtctattcttggg

SEQ ID NO: 3987528 - DNA, 25 bp, Homo sapien
gggacacagacatccttggacacca

SEQ ID NO: 3987529 - DNA, 25 bp, Homo sapien
cttggacaccattgactggtaggtt

SEQ ID NO: 3987530 - DNA, 25 bp, Homo sapien
aggtttgaagcaggacagccagtgt

SEQ ID NO: 3987531 - DNA, 25 bp, Homo sapien
agacaacatgttgactcccagtaat

SEQ ID NO: 3987532 - DNA, 25 bp, Homo sapien
tagtaactgggttcagtctgtcgca

SEQ ID NO: 3987533 - DNA, 25 bp, Homo sapien
caatatcttgtttagtaactgggtt

SEQ ID NO: 3987534 - DNA, 25 bp, Homo sapien
tgtggtaatttctttaatcgagcaa

SEQ ID NO: 3987535 - DNA, 25 bp, Homo sapien
acgacgccaggaatgtgcctcggcg

SEQ ID NO: 3987536 - DNA, 25 bp, Homo sapien
actcggatggcatggggagttatca

SEQ ID NO: 3987537 - DNA, 25 bp, Homo sapien
ggtgtagacaaagcgcccaggagca

SEQ ID NO: 3987538 - DNA, 25 bp, Homo sapien
taggagagggtcacttcgacgacgc

SEQ ID NO: 3987539 - DNA, 25 bp, Homo sapien
gctccacaccaacatagttccgaat

SEQ ID NO: 3987540 - DNA, 25 bp, Homo sapien
tagttccgaatacaacttgcagccc

SEQ ID NO: 3987541 - DNA, 25 bp, Homo sapien
agaagttgtcgccaattatgatgac

SEQ ID NO: 3987542 - DNA, 25 bp, Homo sapien
ttgcagcccgtcaaagaagttgtcg

SEQ ID NO: 3987543 - DNA, 25 bp, Homo sapien
ctggcgtgacctctctttgtctcgg

SEQ ID NO: 3987544 - DNA, 25 bp, Homo sapien
catctaatattgtttgtcgacaggg

SEQ ID NO: 3987545 - DNA, 25 bp, Homo sapien
ctctctttgtctcgggagctctcgc

SEQ ID NO: 3987546 - DNA, 25 bp, Homo sapien
attgtttgtcgacagggatccccgc

SEQ ID NO: 3987547 - DNA, 25 bp, Homo sapien
taggcctctgtaatggttgccaggt

SEQ ID NO: 3987548 - DNA, 25 bp, Homo sapien
gctgatgtttggacacaattacacc

SEQ ID NO: 3987549 - DNA, 25 bp, Homo sapien
caggtggcctcttcgatgtacaggt

SEQ ID NO: 3987550 - DNA, 25 bp, Homo sapien
gaagaatgggccatgtaggcctctg

SEQ ID NO: 3987551 - DNA, 25 bp, Homo sapien
tggaaagccacatcatctcggaatt

SEQ ID NO: 3987552 - DNA, 25 bp, Homo sapien
tttgtagtgcttctcagcggaaaga

SEQ ID NO: 3987553 - DNA, 25 bp, Homo sapien
gcttctcagcggaaagaaaacacgg

SEQ ID NO: 3987554 - DNA, 25 bp, Homo sapien
tcatctcggaatttgtagtgcttct

SEQ ID NO: 3987555 - DNA, 25 bp, Homo sapien
aagccccgcagcctggattcagttg

SEQ ID NO: 3987556 - DNA, 25 bp, Homo sapien
gttctgcctgctaaaatgtcttgta

SEQ ID NO: 3987557 - DNA, 25 bp, Homo sapien
cttgtaattgtgcttgggatgtcca

SEQ ID NO: 3987558 - DNA, 25 bp, Homo sapien
tatacctttacctctcctagggcca

SEQ ID NO: 3987559 - DNA, 25 bp, Homo sapien
gataatgaggtgttagctaggagag

SEQ ID NO: 3987560 - DNA, 25 bp, Homo sapien
caagcacagatctgcggttttgggg

SEQ ID NO: 3987561 - DNA, 25 bp, Homo sapien
tgctggtgaatattagatgattgga

SEQ ID NO: 3987562 - DNA, 25 bp, Homo sapien
ctaggagaggctgcacgcaagcaca

SEQ ID NO: 3987563 - DNA, 25 bp, Homo sapien
cattttccagataagaaggggccgt

SEQ ID NO: 3987564 - DNA, 25 bp, Homo sapien
cagcacgtggccgtccacgttgact

SEQ ID NO: 3987565 - DNA, 25 bp, Homo sapien
cgttgactgttgtcgatacaacaac

SEQ ID NO: 3987566 - DNA, 25 bp, Homo sapien
ccgcctcccgtgtttggaattgttg

SEQ ID NO: 3987567 - DNA, 25 bp, Homo sapien
cttctgacgggtctaggcggcgggc

SEQ ID NO: 3987568 - DNA, 25 bp, Homo sapien
ctggaatctccgcatatctcgaggg

SEQ ID NO: 3987569 - DNA, 25 bp, Homo sapien
gaatctccgcatatctcgagggttg

SEQ ID NO: 3987570 - DNA, 25 bp, Homo sapien
tctccgcatatctcgagggttgcct

SEQ ID NO: 3987571 - DNA, 25 bp, Homo sapien
cgcatatctcgagggttgcctgcat

SEQ ID NO: 3987572 - DNA, 25 bp, Homo sapien
tgtttgattaaagctatccttctca

SEQ ID NO: 3987573 - DNA, 25 bp, Homo sapien
gcatagctaattacagccctgcaaa

SEQ ID NO: 3987574 - DNA, 25 bp, Homo sapien
taatcagcggtcctgacaggccatg

SEQ ID NO: 3987575 - DNA, 25 bp, Homo sapien
tgagcaatattagggccaataaagg

SEQ ID NO: 3987576 - DNA, 25 bp, Homo sapien
taaaattatcttgccagcaagtgtt

SEQ ID NO: 3987577 - DNA, 25 bp, Homo sapien
gtgttgggtaattaatacagcccat

SEQ ID NO: 3987578 - DNA, 25 bp, Homo sapien
tgccagcaagtgttgggtaattaat

SEQ ID NO: 3987579 - DNA, 25 bp, Homo sapien
caagtgttgggtaattaatacagcc

SEQ ID NO: 3987580 - DNA, 25 bp, Homo sapien
cgaggcggtggcttttgcgtcctta

SEQ ID NO: 3987581 - DNA, 25 bp, Homo sapien
ttgcgtccttagatccaaactggcg

SEQ ID NO: 3987582 - DNA, 25 bp, Homo sapien
agtcaacagactgaagggcccgagg

SEQ ID NO: 3987583 - DNA, 25 bp, Homo sapien
tggcgcgtcgaagttgctttcctcg

SEQ ID NO: 3987584 - DNA, 25 bp, Homo sapien
ccgaacaccagatccctctgagaag

SEQ ID NO: 3987585 - DNA, 25 bp, Homo sapien
gggccacgacatcggcgcagcacaa

SEQ ID NO: 3987586 - DNA, 25 bp, Homo sapien
ccagctccaatgcattgtttatgaa

SEQ ID NO: 3987587 - DNA, 25 bp, Homo sapien
ggcgcagcacaagcatccctctgtg

SEQ ID NO: 3987588 - DNA, 25 bp, Homo sapien
gatgtagcacaaagagcgccattaa

SEQ ID NO: 3987589 - DNA, 25 bp, Homo sapien
ccttaatcaaaatgcgagtggtgtc

SEQ ID NO: 3987590 - DNA, 25 bp, Homo sapien
tgaccctgaactgtggcctggactg

SEQ ID NO: 3987591 - DNA, 25 bp, Homo sapien
ggtcagacagccaaccaatcaggga

SEQ ID NO: 3987592 - DNA, 25 bp, Homo sapien
tgtaccaatacagggtccccagcag

SEQ ID NO: 3987593 - DNA, 25 bp, Homo sapien
gcaggccgcgccatcctttgtggat

SEQ ID NO: 3987594 - DNA, 25 bp, Homo sapien
gttaaatgaactatctgcaattagc

SEQ ID NO: 3987595 - DNA, 25 bp, Homo sapien
tgtcctaaggccgttcttcacgaaa

SEQ ID NO: 3987596 - DNA, 25 bp, Homo sapien
taatctggcacacacggttcggaac

SEQ ID NO: 3987597 - DNA, 25 bp, Homo sapien
tgaaaacgctttcccaatctgtgac

SEQ ID NO: 3987598 - DNA, 25 bp, Homo sapien
caatccccgggaaatggcatgggct

SEQ ID NO: 3987599 - DNA, 25 bp, Homo sapien
tctgtgacaacgcacttgaacgtcg

SEQ ID NO: 3987600 - DNA, 25 bp, Homo sapien
gcggccaccgtcagccaccctggcc

SEQ ID NO: 3987601 - DNA, 25 bp, Homo sapien
accctggcctggcgtcgcccgccat

SEQ ID NO: 3987602 - DNA, 25 bp, Homo sapien
ccgctcccggccacgcggccaccgt

SEQ ID NO: 3987603 - DNA, 25 bp, Homo sapien
ccaccctggcctggcgtcgcccgcc

SEQ ID NO: 3987604 - DNA, 25 bp, Homo sapien
caagttttgatgttatcagagtgga

SEQ ID NO: 3987605 - DNA, 25 bp, Homo sapien
tttgatgttatcagagtggaaaaac

SEQ ID NO: 3987606 - DNA, 25 bp, Homo sapien
tcaagaagtacaagttttgatgtta

SEQ ID NO: 3987607 - DNA, 25 bp, Homo sapien
ccaaatgtcaaagcctgaatatttt

SEQ ID NO: 3987608 - DNA, 25 bp, Homo sapien
tgcacatgcagccaaaagggcagag

SEQ ID NO: 3987609 - DNA, 25 bp, Homo sapien
cagagctcagcgctcctgttgggct

SEQ ID NO: 3987610 - DNA, 25 bp, Homo sapien
actttgcacatgcagccaaaagggc

SEQ ID NO: 3987611 - DNA, 25 bp, Homo sapien
tcagcgctcctgttgggctcccaga

SEQ ID NO: 3987612 - DNA, 25 bp, Homo sapien
gacagattttccacacggctacacg

SEQ ID NO: 3987613 - DNA, 25 bp, Homo sapien
ggcagcaacatgtgtgcgccggctc

SEQ ID NO: 3987614 - DNA, 25 bp, Homo sapien
taacgtgcagcctcgagtaaggaga

SEQ ID NO: 3987615 - DNA, 25 bp, Homo sapien
taattgatcaatatgctccccgttc

SEQ ID NO: 3987616 - DNA, 25 bp, Homo sapien
catttggaggaaattcagatgtgtt

SEQ ID NO: 3987617 - DNA, 25 bp, Homo sapien
cacaaaggcaaatcttatgaggctg

SEQ ID NO: 3987618 - DNA, 25 bp, Homo sapien
tctccaagatagtggaataaggtcc

SEQ ID NO: 3987619 - DNA, 25 bp, Homo sapien
taaaaatagaccatcatttggagga

SEQ ID NO: 3987620 - DNA, 25 bp, Homo sapien
aattatgacgcctaaacttaccctg

SEQ ID NO: 3987621 - DNA, 25 bp, Homo sapien
tacaaatattgatggtaactcacag

SEQ ID NO: 3987622 - DNA, 25 bp, Homo sapien
caccactctggcaatgtcataatta

SEQ ID NO: 3987623 - DNA, 25 bp, Homo sapien
caggccagaggaatgcatgattgtt

SEQ ID NO: 3987624 - DNA, 25 bp, Homo sapien
tattaaaatcgcacagcggcgccct

SEQ ID NO: 3987625 - DNA, 25 bp, Homo sapien
gatggaaaatcacaatccggcggaa

SEQ ID NO: 3987626 - DNA, 25 bp, Homo sapien
taccaattagagtagccttaggcag

SEQ ID NO: 3987627 - DNA, 25 bp, Homo sapien
ggcgccctcggtacagtttgctctg

SEQ ID NO: 3987628 - DNA, 25 bp, Homo sapien
ccttccaggatttggaatgaaaacg

SEQ ID NO: 3987629 - DNA, 25 bp, Homo sapien
gccttccaggatttggaatgaaaac

SEQ ID NO: 3987630 - DNA, 25 bp, Homo sapien
caccactgccttccaggatttggaa

SEQ ID NO: 3987631 - DNA, 25 bp, Homo sapien
cactgccttccaggatttggaatga

SEQ ID NO: 3987632 - DNA, 25 bp, Homo sapien
cgttagtggcgttgatcggatttcc

SEQ ID NO: 3987633 - DNA, 25 bp, Homo sapien
gataagccgcgttgcagttcgttag

SEQ ID NO: 3987634 - DNA, 25 bp, Homo sapien
tcagacaaagccagtgtcggcgcag

SEQ ID NO: 3987635 - DNA, 25 bp, Homo sapien
gccgctggcccagctaattgataag

SEQ ID NO: 3987636 - DNA, 25 bp, Homo sapien
tgcccagaacccatgatctccccat

SEQ ID NO: 3987637 - DNA, 25 bp, Homo sapien
ctgcccagaacccatgatctcccca

SEQ ID NO: 3987638 - DNA, 25 bp, Homo sapien
catgactaggaaatgccactgccca

SEQ ID NO: 3987639 - DNA, 25 bp, Homo sapien
agatccgccgacaccagcagacagt

SEQ ID NO: 3987640 - DNA, 25 bp, Homo sapien
cagacagtaagcaacgcgtggagag

SEQ ID NO: 3987641 - DNA, 25 bp, Homo sapien
cgggctctgctcagcgccgatgaca

SEQ ID NO: 3987642 - DNA, 25 bp, Homo sapien
gcagacagtaagcaacgcgtggaga

SEQ ID NO: 3987643 - DNA, 25 bp, Homo sapien
ttcagcacgctctagcccacactga

SEQ ID NO: 3987644 - DNA, 25 bp, Homo sapien
ccacactgagacagcaccctaaaat

SEQ ID NO: 3987645 - DNA, 25 bp, Homo sapien
acgctctagcccacactgagacagc

SEQ ID NO: 3987646 - DNA, 25 bp, Homo sapien
tgagacagcaccctaaaatccttcc

SEQ ID NO: 3987647 - DNA, 25 bp, Homo sapien
agcctggcatatccactcctggggc

SEQ ID NO: 3987648 - DNA, 25 bp, Homo sapien
tggcctctgcatggtcacgtggtcc

SEQ ID NO: 3987649 - DNA, 25 bp, Homo sapien
gcctggcatatccactcctggggca

SEQ ID NO: 3987650 - DNA, 25 bp, Homo sapien
gcctctgcatggtcacgtggtccaa

SEQ ID NO: 3987651 - DNA, 25 bp, Homo sapien
taatgcaaaccatatgcagagctgc

SEQ ID NO: 3987652 - DNA, 25 bp, Homo sapien
aatgcaaaccatatgcagagctgcc

SEQ ID NO: 3987653 - DNA, 25 bp, Homo sapien
ggccttaatgcaaaccatatgcaga

SEQ ID NO: 3987654 - DNA, 25 bp, Homo sapien
aaggccttaatgcaaaccatatgca

SEQ ID NO: 3987655 - DNA, 25 bp, Homo sapien
tctcttctgacaagtagaaatatca

SEQ ID NO: 3987656 - DNA, 25 bp, Homo sapien
ggaagaaatctgtatgcagcgtttc

SEQ ID NO: 3987657 - DNA, 25 bp, Homo sapien
taaacttctcactctgatgcgccac

SEQ ID NO: 3987658 - DNA, 25 bp, Homo sapien
ttcattacaagaaagcagtactgag

SEQ ID NO: 3987659 - DNA, 25 bp, Homo sapien
gccccgtgccaaccctgcacacagg

SEQ ID NO: 3987660 - DNA, 25 bp, Homo sapien
aggccccgtgccaaccctgcacaca

SEQ ID NO: 3987661 - DNA, 25 bp, Homo sapien
ccttcagagcaaatggaaggccccg

SEQ ID NO: 3987662 - DNA, 25 bp, Homo sapien
tgcacacaggcaggactcggccagg

SEQ ID NO: 3987663 - DNA, 25 bp, Homo sapien
tctgcatggatgaccatggtctctc

SEQ ID NO: 3987664 - DNA, 25 bp, Homo sapien
actctgcatggatgaccatggtctc

SEQ ID NO: 3987665 - DNA, 25 bp, Homo sapien
catggatgaccatggtctctcgtcc

SEQ ID NO: 3987666 - DNA, 25 bp, Homo sapien
aaaactctgcatggatgaccatggt

SEQ ID NO: 3987667 - DNA, 25 bp, Homo sapien
ggaaaaatacttcttgccacgcaat

SEQ ID NO: 3987668 - DNA, 25 bp, Homo sapien
gggcacatggtgtatgtagctccac

SEQ ID NO: 3987669 - DNA, 25 bp, Homo sapien
ggaacaattaaaaccagccgtcatc

SEQ ID NO: 3987670 - DNA, 25 bp, Homo sapien
gaaggtgcacaactcgctgacagag

SEQ ID NO: 3987671 - DNA, 25 bp, Homo sapien
aaatatagagaaagtgcgggcggca

SEQ ID NO: 3987672 - DNA, 25 bp, Homo sapien
taaatatagagaaagtgcgggcggc

SEQ ID NO: 3987673 - DNA, 25 bp, Homo sapien
tgagattgctaatcaggattacttg

SEQ ID NO: 3987674 - DNA, 25 bp, Homo sapien
tcttgactgggtacagtgagattgc

SEQ ID NO: 3987675 - DNA, 25 bp, Homo sapien
tattgtcttaagcacaagaaggttg

SEQ ID NO: 3987676 - DNA, 25 bp, Homo sapien
gggatttgtggttttctccatcatt

SEQ ID NO: 3987677 - DNA, 25 bp, Homo sapien
ttaaaagtatcgctaaaatttgatg

SEQ ID NO: 3987678 - DNA, 25 bp, Homo sapien
aagaaggttgtcttataggcttggc

SEQ ID NO: 3987679 - DNA, 25 bp, Homo sapien
ggcgctggccttcggcgcagaccca

SEQ ID NO: 3987680 - DNA, 25 bp, Homo sapien
caacgttatggagggcgctggcctt

SEQ ID NO: 3987681 - DNA, 25 bp, Homo sapien
catatgttcagcaacgttatggagg

SEQ ID NO: 3987682 - DNA, 25 bp, Homo sapien
gctctctggaaccatatgttcagca

SEQ ID NO: 3987683 - DNA, 25 bp, Homo sapien
taaaatgctcggtaaaaccagtcgc

SEQ ID NO: 3987684 - DNA, 25 bp, Homo sapien
aaaatgctcggtaaaaccagtcgct

SEQ ID NO: 3987685 - DNA, 25 bp, Homo sapien
aaatcaatttgcaaggccggtccgg

SEQ ID NO: 3987686 - DNA, 25 bp, Homo sapien
taaatagggatcaataccgctgggc

SEQ ID NO: 3987687 - DNA, 25 bp, Homo sapien
gccggtccggcatccagttacaata

SEQ ID NO: 3987688 - DNA, 25 bp, Homo sapien
gatttcaattggtgagcaaacctgc

SEQ ID NO: 3987689 - DNA, 25 bp, Homo sapien
cacacggtgaatccttgctgcaact

SEQ ID NO: 3987690 - DNA, 25 bp, Homo sapien
tcactcttagggtaggctgaaggca

SEQ ID NO: 3987691 - DNA, 25 bp, Homo sapien
gagcctgctggtccaccgagtatag

SEQ ID NO: 3987692 - DNA, 25 bp, Homo sapien
taatataggcggtgtaggacctctc

SEQ ID NO: 3987693 - DNA, 25 bp, Homo sapien
gatcgggccgatgacctcggacagt

SEQ ID NO: 3987694 - DNA, 25 bp, Homo sapien
gaccagcagcacgtccaatccaatc

SEQ ID NO: 3987695 - DNA, 25 bp, Homo sapien
catgtcttggtaactgatggcggct

SEQ ID NO: 3987696 - DNA, 25 bp, Homo sapien
tgacccaatcttcctcgtgtcaggg

SEQ ID NO: 3987697 - DNA, 25 bp, Homo sapien
cagcggtgcaggatgctttccgtca

SEQ ID NO: 3987698 - DNA, 25 bp, Homo sapien
ctgataaggctgccgcagcggtgca

SEQ ID NO: 3987699 - DNA, 25 bp, Homo sapien
ggtgcaggatgctttccgtcaacat

SEQ ID NO: 3987700 - DNA, 25 bp, Homo sapien
tgccgcagcggtgcaggatgctttc

SEQ ID NO: 3987701 - DNA, 25 bp, Homo sapien
tgcacgttcatacccggctgcatgc

SEQ ID NO: 3987702 - DNA, 25 bp, Homo sapien
agcccttgcctccacccctgcacgt

SEQ ID NO: 3987703 - DNA, 25 bp, Homo sapien
tgcctccacccctgcacgttcatac

SEQ ID NO: 3987704 - DNA, 25 bp, Homo sapien
acccctgcacgttcatacccggctg

SEQ ID NO: 3987705 - DNA, 25 bp, Homo sapien
tttatgccaggcgtaaatggagctt

SEQ ID NO: 3987706 - DNA, 25 bp, Homo sapien
taattaagacctccaaagcatttat

SEQ ID NO: 3987707 - DNA, 25 bp, Homo sapien
ccaaagcatttatgccaggcgtaaa

SEQ ID NO: 3987708 - DNA, 25 bp, Homo sapien
caggcgtaaatggagcttcaatcct

SEQ ID NO: 3987709 - DNA, 25 bp, Homo sapien
tgctgctacccattgttggaaagaa

SEQ ID NO: 3987710 - DNA, 25 bp, Homo sapien
tcaatcacacgctgggccttttgct

SEQ ID NO: 3987711 - DNA, 25 bp, Homo sapien
tttgctgctacccattgttggaaag

SEQ ID NO: 3987712 - DNA, 25 bp, Homo sapien
gctacccattgttggaaagaaagaa

SEQ ID NO: 3987713 - DNA, 25 bp, Homo sapien
caatgcacaagatgggctcgacacc

SEQ ID NO: 3987714 - DNA, 25 bp, Homo sapien
aatgcacaagatgggctcgacacca

SEQ ID NO: 3987715 - DNA, 25 bp, Homo sapien
gtgcatgataacacacgcggacaac

SEQ ID NO: 3987716 - DNA, 25 bp, Homo sapien
aacacacgcggacaacaaatggtgc

SEQ ID NO: 3987717 - DNA, 25 bp, Homo sapien
gccacaacttttcttgtcacagcac

SEQ ID NO: 3987718 - DNA, 25 bp, Homo sapien
gcgtttcgtttctattgccacaact

SEQ ID NO: 3987719 - DNA, 25 bp, Homo sapien
tctgagggcgtttcgtttctattgc

SEQ ID NO: 3987720 - DNA, 25 bp, Homo sapien
aatgattacagggtctgagggcgtt

SEQ ID NO: 3987721 - DNA, 25 bp, Homo sapien
gagcagcgggtcgcgttgatcgtca

SEQ ID NO: 3987722 - DNA, 25 bp, Homo sapien
tgagcagcgggtcgcgttgatcgtc

SEQ ID NO: 3987723 - DNA, 25 bp, Homo sapien
gcagcgggtcgcgttgatcgtcagc

SEQ ID NO: 3987724 - DNA, 25 bp, Homo sapien
cagcgggtcgcgttgatcgtcagcg

SEQ ID NO: 3987725 - DNA, 25 bp, Homo sapien
atctccgggttcttgtcctggccct

SEQ ID NO: 3987726 - DNA, 25 bp, Homo sapien
tgtcctggccctcgtagacgatggc

SEQ ID NO: 3987727 - DNA, 25 bp, Homo sapien
cacggcacatctccgggttcttgtc

SEQ ID NO: 3987728 - DNA, 25 bp, Homo sapien
agcagcacacggcacatctccgggt

SEQ ID NO: 3987729 - DNA, 25 bp, Homo sapien
gagagtggcttgtcctccgatggat

SEQ ID NO: 3987730 - DNA, 25 bp, Homo sapien
cgggcaccagcgcttctgagagagt

SEQ ID NO: 3987731 - DNA, 25 bp, Homo sapien
tggacccggctcagaaccacagaag

SEQ ID NO: 3987732 - DNA, 25 bp, Homo sapien
cacagaagtgatgggtgtcaccgca

SEQ ID NO: 3987733 - DNA, 25 bp, Homo sapien
ggcccagcagtgaaaactcgtgcag

SEQ ID NO: 3987734 - DNA, 25 bp, Homo sapien
tcgtgcagaggcataaactttctca

SEQ ID NO: 3987735 - DNA, 25 bp, Homo sapien
ggaattctcattagcatgtcaagga

SEQ ID NO: 3987736 - DNA, 25 bp, Homo sapien
ggaaaacaaatacacgagatccatt

SEQ ID NO: 3987737 - DNA, 25 bp, Homo sapien
tggtcattgaatctatgaggcgaac

SEQ ID NO: 3987738 - DNA, 25 bp, Homo sapien
ttgaatctatgaggcgaacatacag

SEQ ID NO: 3987739 - DNA, 25 bp, Homo sapien
gaggcgaacatacagatcttgctct

SEQ ID NO: 3987740 - DNA, 25 bp, Homo sapien
tctatgaggcgaacatacagatctt

SEQ ID NO: 3987741 - DNA, 25 bp, Homo sapien
tgccacggtgatgcagcagaactta

SEQ ID NO: 3987742 - DNA, 25 bp, Homo sapien
catttcaaggtgcaaggaacttgcc

SEQ ID NO: 3987743 - DNA, 25 bp, Homo sapien
gatgttctgctggagcccgtatcga

SEQ ID NO: 3987744 - DNA, 25 bp, Homo sapien
caagccccaccggttaatcatgtga

SEQ ID NO: 3987745 - DNA, 25 bp, Homo sapien
tgttggttttctcgttgtttggctc

SEQ ID NO: 3987746 - DNA, 25 bp, Homo sapien
tccgagggcgcagagaagttgccca

SEQ ID NO: 3987747 - DNA, 25 bp, Homo sapien
catttagtgcgatcggtgtcaggcg

SEQ ID NO: 3987748 - DNA, 25 bp, Homo sapien
gcaggattcctagctcgaagcagcg

SEQ ID NO: 3987749 - DNA, 25 bp, Homo sapien
cgaagcagcgcggtgatgtcacttt

SEQ ID NO: 3987750 - DNA, 25 bp, Homo sapien
ggctgcttctcgaagtgcgcccgcg

SEQ ID NO: 3987751 - DNA, 25 bp, Homo sapien
cacaaagtccacaaaagcggtcctt

SEQ ID NO: 3987752 - DNA, 25 bp, Homo sapien
cctgcctatcgtagagcgccagcac

SEQ ID NO: 3987753 - DNA, 25 bp, Homo sapien
tttcaatctccaccggctgcccctg

SEQ ID NO: 3987754 - DNA, 25 bp, Homo sapien
ggaggaaagagacagcggcccggtg

SEQ ID NO: 3987755 - DNA, 25 bp, Homo sapien
cgggaggaaagagacagcggcccgg

SEQ ID NO: 3987756 - DNA, 25 bp, Homo sapien
aggaaagagacagcggcccggtgag

SEQ ID NO: 3987757 - DNA, 25 bp, Homo sapien
tgcgggaggaaagagacagcggccc

SEQ ID NO: 3987758 - DNA, 25 bp, Homo sapien
gtgtgcatccacgagcgcaccgggt

SEQ ID NO: 3987759 - DNA, 25 bp, Homo sapien
ccccgcgcggaatattctcctgaat

SEQ ID NO: 3987760 - DNA, 25 bp, Homo sapien
cggaatattctcctgaatcccaaac

SEQ ID NO: 3987761 - DNA, 25 bp, Homo sapien
gagcgcaccgggttcatgccgctgc

SEQ ID NO: 3987762 - DNA, 25 bp, Homo sapien
cagctcccggccgaaagcgtttcct

SEQ ID NO: 3987763 - DNA, 25 bp, Homo sapien
cggccgaaagcgtttcctcgagcag

SEQ ID NO: 3987764 - DNA, 25 bp, Homo sapien
cgcagctcccggccgaaagcgtttc

SEQ ID NO: 3987765 - DNA, 25 bp, Homo sapien
ccggccgaaagcgtttcctcgagca

SEQ ID NO: 3987766 - DNA, 25 bp, Homo sapien
gaaggagcaggacgcggtggccgcg

SEQ ID NO: 3987767 - DNA, 25 bp, Homo sapien
caggcgcgctcaacgtggtgtcatc

SEQ ID NO: 3987768 - DNA, 25 bp, Homo sapien
tttgcaggcgcgctcaacgtggtgt

SEQ ID NO: 3987769 - DNA, 25 bp, Homo sapien
gcggcggcgcttcgaaggagcagga

SEQ ID NO: 3987770 - DNA, 25 bp, Homo sapien
gcgcgcgcagcggacggaggcgcac

SEQ ID NO: 3987771 - DNA, 25 bp, Homo sapien
ggcgcgcgcagcggacggaggcgca

SEQ ID NO: 3987772 - DNA, 25 bp, Homo sapien
cggcgcgcgcagcggacggaggcgc

SEQ ID NO: 3987773 - DNA, 25 bp, Homo sapien
ccgggagcggcgctgtcagagggtg

SEQ ID NO: 3987774 - DNA, 25 bp, Homo sapien
ggagcggcgctgtcagagggtgacg

SEQ ID NO: 3987775 - DNA, 25 bp, Homo sapien
ggcgctgtcagagggtgacgtcggg

SEQ ID NO: 3987776 - DNA, 25 bp, Homo sapien
agcggcgctgtcagagggtgacgtc

SEQ ID NO: 3987777 - DNA, 25 bp, Homo sapien
atgcagctgccccactattttggac

SEQ ID NO: 3987778 - DNA, 25 bp, Homo sapien
cgatattaagcgaaaatgaatgcaa

SEQ ID NO: 3987779 - DNA, 25 bp, Homo sapien
cactattttggacgatattaagcga

SEQ ID NO: 3987780 - DNA, 25 bp, Homo sapien
tattaagcgaaaatgaatgcaaatc

SEQ ID NO: 3987781 - DNA, 25 bp, Homo sapien
ttcagctcattttctagatcatctg

SEQ ID NO: 3987782 - DNA, 25 bp, Homo sapien
cgcacccaaagcgtggaaaatacgg

SEQ ID NO: 3987783 - DNA, 25 bp, Homo sapien
tcttttttgtcactccgctgctggc

SEQ ID NO: 3987784 - DNA, 25 bp, Homo sapien
tctagatcatctggtcccgcaccca

SEQ ID NO: 3987785 - DNA, 25 bp, Homo sapien
ggagtcagtcagatggccagtgccc

SEQ ID NO: 3987786 - DNA, 25 bp, Homo sapien
tccccatgtcgtgccggagcaggca

SEQ ID NO: 3987787 - DNA, 25 bp, Homo sapien
cagtgggctcccagatgtcaagccg

SEQ ID NO: 3987788 - DNA, 25 bp, Homo sapien
agtgaccttaaagagacagcgcccg

SEQ ID NO: 3987789 - DNA, 25 bp, Homo sapien
ggagagcccacgggcccggccgcga

SEQ ID NO: 3987790 - DNA, 25 bp, Homo sapien
acactgccttccaccgcgggcggcg

SEQ ID NO: 3987791 - DNA, 25 bp, Homo sapien
cactgccttccaccgcgggcggcgg

SEQ ID NO: 3987792 - DNA, 25 bp, Homo sapien
ggctggattctgaggccggggctgg

SEQ ID NO: 3987793 - DNA, 25 bp, Homo sapien
tgaggccggggctggcctccagaca

SEQ ID NO: 3987794 - DNA, 25 bp, Homo sapien
ccaggctggattctgaggccggggc

SEQ ID NO: 3987795 - DNA, 25 bp, Homo sapien
gaggccggggctggcctccagacac

SEQ ID NO: 3987796 - DNA, 25 bp, Homo sapien
tcatttaacttctagcgtgttgtgg

SEQ ID NO: 3987797 - DNA, 25 bp, Homo sapien
gggttagggttggtggatcagatcc

SEQ ID NO: 3987798 - DNA, 25 bp, Homo sapien
aacttctagcgtgttgtgggttagg

SEQ ID NO: 3987799 - DNA, 25 bp, Homo sapien
ggatcagatcctgggatcttacctt

SEQ ID NO: 3987800 - DNA, 25 bp, Homo sapien
acggcaggggctacataggggaact

SEQ ID NO: 3987801 - DNA, 25 bp, Homo sapien
cccacggcaggggctacatagggga

SEQ ID NO: 3987802 - DNA, 25 bp, Homo sapien
gcccccagcagacaccacgcggagg

SEQ ID NO: 3987803 - DNA, 25 bp, Homo sapien
aatgggggcaaggtctcccacggca

SEQ ID NO: 3987804 - DNA, 25 bp, Homo sapien
ctcgaatagtgctgagatgggccca

SEQ ID NO: 3987805 - DNA, 25 bp, Homo sapien
tgggcccacagttggctccacaagg

SEQ ID NO: 3987806 - DNA, 25 bp, Homo sapien
tccatggccgccatcaccaaggccc

SEQ ID NO: 3987807 - DNA, 25 bp, Homo sapien
tagtgctgagatgggcccacagttg

SEQ ID NO: 3987808 - DNA, 25 bp, Homo sapien
agtgttcatggagtagcccaaaacc

SEQ ID NO: 3987809 - DNA, 25 bp, Homo sapien
acagcagacggacccacgcttctga

SEQ ID NO: 3987810 - DNA, 25 bp, Homo sapien
acggacccacgcttctgagtgttca

SEQ ID NO: 3987811 - DNA, 25 bp, Homo sapien
gctgtgcaggtgagagcaggataaa

SEQ ID NO: 3987812 - DNA, 25 bp, Homo sapien
aaaataggccacataggaactttat

SEQ ID NO: 3987813 - DNA, 25 bp, Homo sapien
tagaaggggatgcattacttgtagg

SEQ ID NO: 3987814 - DNA, 25 bp, Homo sapien
aataggccacataggaactttatac

SEQ ID NO: 3987815 - DNA, 25 bp, Homo sapien
atttagaaggggatgcattacttgt

SEQ ID NO: 3987816 - DNA, 25 bp, Homo sapien
ggcgtgtctctgtcaggtcaaccgg

SEQ ID NO: 3987817 - DNA, 25 bp, Homo sapien
aatgcccgtgaatgagccaggtaga

SEQ ID NO: 3987818 - DNA, 25 bp, Homo sapien
gcactggcccgggacgtgggcgtgt

SEQ ID NO: 3987819 - DNA, 25 bp, Homo sapien
ggtagagcgccggtgagggtgaacg

SEQ ID NO: 3987820 - DNA, 25 bp, Homo sapien
agctcagggccctatcccagtgggc

SEQ ID NO: 3987821 - DNA, 25 bp, Homo sapien
tttggtcgtgcacagcagccaagct

SEQ ID NO: 3987822 - DNA, 25 bp, Homo sapien
gacaaaaatcatacggaaacctcca

SEQ ID NO: 3987823 - DNA, 25 bp, Homo sapien
tcctattatgtggtgtgctcttcga

SEQ ID NO: 3987824 - DNA, 25 bp, Homo sapien
agagctgtgtcatggccctgcagcc

SEQ ID NO: 3987825 - DNA, 25 bp, Homo sapien
tcatggccctgcagcctgtgcttga

SEQ ID NO: 3987826 - DNA, 25 bp, Homo sapien
tggccctgcagcctgtgcttgaagg

SEQ ID NO: 3987827 - DNA, 25 bp, Homo sapien
cagagctgtgtcatggccctgcagc

SEQ ID NO: 3987828 - DNA, 25 bp, Homo sapien
gccagggaggtgagctcaccatgct

SEQ ID NO: 3987829 - DNA, 25 bp, Homo sapien
gaggtgagctcaccatgctcgtcta

SEQ ID NO: 3987830 - DNA, 25 bp, Homo sapien
gtgagctcaccatgctcgtctagaa

SEQ ID NO: 3987831 - DNA, 25 bp, Homo sapien
gtgccagggaggtgagctcaccatg

SEQ ID NO: 3987832 - DNA, 25 bp, Homo sapien
tgttgacgggctcgcctgcacttga

SEQ ID NO: 3987833 - DNA, 25 bp, Homo sapien
tctctgagctgttgacgggctcgcc

SEQ ID NO: 3987834 - DNA, 25 bp, Homo sapien
aaagcatgcaggaacacgaggctgt

SEQ ID NO: 3987835 - DNA, 25 bp, Homo sapien
gctgtcatcggtgagagccagcact

SEQ ID NO: 3987836 - DNA, 25 bp, Homo sapien
gaactccgtgcccatgctgttttca

SEQ ID NO: 3987837 - DNA, 25 bp, Homo sapien
catcgatatcacatgagcctttggg

SEQ ID NO: 3987838 - DNA, 25 bp, Homo sapien
gcaaaacacttgtgatattcatcga

SEQ ID NO: 3987839 - DNA, 25 bp, Homo sapien
tcatggagaatgcaaaacacttgtg

SEQ ID NO: 3987840 - DNA, 25 bp, Homo sapien
gagccctgcttcacgaggttggaga

SEQ ID NO: 3987841 - DNA, 25 bp, Homo sapien
gagggcgcctcttttgaccatccag

SEQ ID NO: 3987842 - DNA, 25 bp, Homo sapien
agccctgcttcacgaggttggagag

SEQ ID NO: 3987843 - DNA, 25 bp, Homo sapien
ctgagccctgcttcacgaggttgga

SEQ ID NO: 3987844 - DNA, 25 bp, Homo sapien
ctcctccaaacctggcccaggccca

SEQ ID NO: 3987845 - DNA, 25 bp, Homo sapien
tctgcctcctccaaacctggcccag

SEQ ID NO: 3987846 - DNA, 25 bp, Homo sapien
tgcctcctccaaacctggcccaggc

SEQ ID NO: 3987847 - DNA, 25 bp, Homo sapien
catctgcctcctccaaacctggccc

SEQ ID NO: 3987848 - DNA, 25 bp, Homo sapien
gagccatgtgtcagctggactgctc

SEQ ID NO: 3987849 - DNA, 25 bp, Homo sapien
agaaggcacgagtccatgagggcca

SEQ ID NO: 3987850 - DNA, 25 bp, Homo sapien
gaaggcacgagtccatgagggccag

SEQ ID NO: 3987851 - DNA, 25 bp, Homo sapien
gccatgtgtcagctggactgctcat

SEQ ID NO: 3987852 - DNA, 25 bp, Homo sapien
tattgaaaatccagattccggcagg

SEQ ID NO: 3987853 - DNA, 25 bp, Homo sapien
aaaatccagattccggcaggcgtct

SEQ ID NO: 3987854 - DNA, 25 bp, Homo sapien
caggcgtctccctcaggtcaagctt

SEQ ID NO: 3987855 - DNA, 25 bp, Homo sapien
gctttgtctgcgaatacattctcat

SEQ ID NO: 3987856 - DNA, 25 bp, Homo sapien
atggctccaagctccagtggccgta

SEQ ID NO: 3987857 - DNA, 25 bp, Homo sapien
tgccgtcatgagcaggatgagggca

SEQ ID NO: 3987858 - DNA, 25 bp, Homo sapien
atgagggcagcacccctgagagccg

SEQ ID NO: 3987859 - DNA, 25 bp, Homo sapien
cagtggccgtaccagaagatcaggg

SEQ ID NO: 3987860 - DNA, 25 bp, Homo sapien
ttacacctcatccctttcgtccttg

SEQ ID NO: 3987861 - DNA, 25 bp, Homo sapien
ggtcatcaggttttgtgagctttgc

SEQ ID NO: 3987862 - DNA, 25 bp, Homo sapien
gggtcatcaggttttgtgagctttg

SEQ ID NO: 3987863 - DNA, 25 bp, Homo sapien
gtcatcaggttttgtgagctttgct

SEQ ID NO: 3987864 - DNA, 25 bp, Homo sapien
ctgggtcatcaggttttgtgagctt

SEQ ID NO: 3987865 - DNA, 25 bp, Homo sapien
ggagcacattccctgcagataacgt

SEQ ID NO: 3987866 - DNA, 25 bp, Homo sapien
tcccggctttggttgtttggcacga

SEQ ID NO: 3987867 - DNA, 25 bp, Homo sapien
taacgtgatgcggacaggagcttac

SEQ ID NO: 3987868 - DNA, 25 bp, Homo sapien
gagtcatagctctgggatcttaccc

SEQ ID NO: 3987869 - DNA, 25 bp, Homo sapien
aggacaccgggctgctatttgaaca

SEQ ID NO: 3987870 - DNA, 25 bp, Homo sapien
catttgctgcaacatgaagggttca

SEQ ID NO: 3987871 - DNA, 25 bp, Homo sapien
gagtgcccaagctcataggaagttt

SEQ ID NO: 3987872 - DNA, 25 bp, Homo sapien
gattctcctggctctcgtgcagagg

SEQ ID NO: 3987873 - DNA, 25 bp, Homo sapien
catttccagtagtgactggtacaca

SEQ ID NO: 3987874 - DNA, 25 bp, Homo sapien
taaaacagcacattgcgggaattaa

SEQ ID NO: 3987875 - DNA, 25 bp, Homo sapien
acattgcgggaattaatttaccttg

SEQ ID NO: 3987876 - DNA, 25 bp, Homo sapien
gtaagtgataacttaattcctgagg

SEQ ID NO: 3987877 - DNA, 25 bp, Homo sapien
aatgctacaggagccagggaagaca

SEQ ID NO: 3987878 - DNA, 25 bp, Homo sapien
tactgacgtcagatactgatggctc

SEQ ID NO: 3987879 - DNA, 25 bp, Homo sapien
gcctggagggattatcagacagcag

SEQ ID NO: 3987880 - DNA, 25 bp, Homo sapien
tgatggctccttcgagtgatcagaa

SEQ ID NO: 3987881 - DNA, 25 bp, Homo sapien
cacaagacaggaatctcgggtgggc

SEQ ID NO: 3987882 - DNA, 25 bp, Homo sapien
tcgggtgggccacgaaggagcaaga

SEQ ID NO: 3987883 - DNA, 25 bp, Homo sapien
cttcacacaagacaggaatctcggg

SEQ ID NO: 3987884 - DNA, 25 bp, Homo sapien
aagacaggaatctcgggtgggccac

SEQ ID NO: 3987885 - DNA, 25 bp, Homo sapien
gtaagcacagtacaaggtcagactg

SEQ ID NO: 3987886 - DNA, 25 bp, Homo sapien
acctcaagcagtaagcacagtacaa

SEQ ID NO: 3987887 - DNA, 25 bp, Homo sapien
tttggaggtgggaaggtatacctca

SEQ ID NO: 3987888 - DNA, 25 bp, Homo sapien
ggtcagactgttccaggatcggaga

SEQ ID NO: 3987889 - DNA, 25 bp, Homo sapien
cttgtggcgcacatggcagggatgg

SEQ ID NO: 3987890 - DNA, 25 bp, Homo sapien
tgtggcgcacatggcagggatggga

SEQ ID NO: 3987891 - DNA, 25 bp, Homo sapien
tggcgcacatggcagggatgggagc

SEQ ID NO: 3987892 - DNA, 25 bp, Homo sapien
acatggcagggatgggagcagctgt

SEQ ID NO: 3987893 - DNA, 25 bp, Homo sapien
gaatcacatgtgtagcaggtatccc

SEQ ID NO: 3987894 - DNA, 25 bp, Homo sapien
gctggcaaatcacggctctgggctg

SEQ ID NO: 3987895 - DNA, 25 bp, Homo sapien
ttgggagactctgaacgcaggagcc

SEQ ID NO: 3987896 - DNA, 25 bp, Homo sapien
tgcatttactcaacaggcctgcgct

SEQ ID NO: 3987897 - DNA, 25 bp, Homo sapien
cgtggggtgcgcagacccaggaggc

SEQ ID NO: 3987898 - DNA, 25 bp, Homo sapien
ccgtggggtgcgcagacccaggagg

SEQ ID NO: 3987899 - DNA, 25 bp, Homo sapien
aatgccttgcctcctgtttggtcag

SEQ ID NO: 3987900 - DNA, 25 bp, Homo sapien
tccacggagcaagagaacgatgttt

SEQ ID NO: 3987901 - DNA, 25 bp, Homo sapien
aaagagaagcctcgtactgacccca

SEQ ID NO: 3987902 - DNA, 25 bp, Homo sapien
ggtctgacgaggagcatcaggctca

SEQ ID NO: 3987903 - DNA, 25 bp, Homo sapien
tttggaagccttcctcgctgggctc

SEQ ID NO: 3987904 - DNA, 25 bp, Homo sapien
gggtttgccaccacgcatgaactcc

SEQ ID NO: 3987905 - DNA, 25 bp, Homo sapien
ctttgtggggtttgccaccacgcat

SEQ ID NO: 3987906 - DNA, 25 bp, Homo sapien
acacccttggggcacacgtgtgtgg

SEQ ID NO: 3987907 - DNA, 25 bp, Homo sapien
catctgggaccattacgtgaaacac

SEQ ID NO: 3987908 - DNA, 25 bp, Homo sapien
aggagagaactgcaccccacatctc

SEQ ID NO: 3987909 - DNA, 25 bp, Homo sapien
ctcacctctggtacatctagctgca

SEQ ID NO: 3987910 - DNA, 25 bp, Homo sapien
cgtgaaacacccagattgatgccct

SEQ ID NO: 3987911 - DNA, 25 bp, Homo sapien
taaagatgttgacgattcctgccat

SEQ ID NO: 3987912 - DNA, 25 bp, Homo sapien
gttaaagatgttgacgattcctgcc

SEQ ID NO: 3987913 - DNA, 25 bp, Homo sapien
gcagccctctgtgggttaaagatgt

SEQ ID NO: 3987914 - DNA, 25 bp, Homo sapien
cagcagccctctgtgggttaaagat

SEQ ID NO: 3987915 - DNA, 25 bp, Homo sapien
gatacatgggcgaacaggagacctc

SEQ ID NO: 3987916 - DNA, 25 bp, Homo sapien
gacctggaagggcaaacagaacaca

SEQ ID NO: 3987917 - DNA, 25 bp, Homo sapien
gaactaaagaaggtcatggccgggc

SEQ ID NO: 3987918 - DNA, 25 bp, Homo sapien
gaaagtgggcgtgcacccttctgta

SEQ ID NO: 3987919 - DNA, 25 bp, Homo sapien
gatgccggcatgctgactgcaaaca

SEQ ID NO: 3987920 - DNA, 25 bp, Homo sapien
tcatagggtgttcgagcctgacgct

SEQ ID NO: 3987921 - DNA, 25 bp, Homo sapien
tgaagtccacaaaaacccgcactgt

SEQ ID NO: 3987922 - DNA, 25 bp, Homo sapien
tcagccctgtgtcttagccaagagc

SEQ ID NO: 3987923 - DNA, 25 bp, Homo sapien
gggtagaaatgcatggagcacaact

SEQ ID NO: 3987924 - DNA, 25 bp, Homo sapien
gcatggagcacaacttgattcttac

SEQ ID NO: 3987925 - DNA, 25 bp, Homo sapien
aatgcatggagcacaacttgattct

SEQ ID NO: 3987926 - DNA, 25 bp, Homo sapien
tagaaatgcatggagcacaacttga

SEQ ID NO: 3987927 - DNA, 25 bp, Homo sapien
atgatcaatgaagttcccgttgatc

SEQ ID NO: 3987928 - DNA, 25 bp, Homo sapien
gaagttcccgttgatccctccatga

SEQ ID NO: 3987929 - DNA, 25 bp, Homo sapien
aatgaagttcccgttgatccctcca

SEQ ID NO: 3987930 - DNA, 25 bp, Homo sapien
atcaatgaagttcccgttgatccct

SEQ ID NO: 3987931 - DNA, 25 bp, Homo sapien
caccaatgcctcacgttggctggat

SEQ ID NO: 3987932 - DNA, 25 bp, Homo sapien
tctgcaggagctatgtactgcggga

SEQ ID NO: 3987933 - DNA, 25 bp, Homo sapien
ggcccagagggactactctgcagga

SEQ ID NO: 3987934 - DNA, 25 bp, Homo sapien
aatggactactacaggagccaaaca

SEQ ID NO: 3987935 - DNA, 25 bp, Homo sapien
tgtcatcagacacggtgatggctgt

SEQ ID NO: 3987936 - DNA, 25 bp, Homo sapien
cctgtcatcagacacggtgatggct

SEQ ID NO: 3987937 - DNA, 25 bp, Homo sapien
catcagacacggtgatggctgtcat

SEQ ID NO: 3987938 - DNA, 25 bp, Homo sapien
tcatcagacacggtgatggctgtca

SEQ ID NO: 3987939 - DNA, 25 bp, Homo sapien
gaagaagtctatcttttatgtcaca

SEQ ID NO: 3987940 - DNA, 25 bp, Homo sapien
tatcttttatgtcacagcaagaagg

SEQ ID NO: 3987941 - DNA, 25 bp, Homo sapien
cacagcaagaaggttaatgcactta

SEQ ID NO: 3987942 - DNA, 25 bp, Homo sapien
cacctttttatttatgttcctcatt

SEQ ID NO: 3987943 - DNA, 25 bp, Homo sapien
tcccctgcaatacatcttgggcaag

SEQ ID NO: 3987944 - DNA, 25 bp, Homo sapien
gattcccctgcaatacatcttgggc

SEQ ID NO: 3987945 - DNA, 25 bp, Homo sapien
cccctgcaatacatcttgggcaagg

SEQ ID NO: 3987946 - DNA, 25 bp, Homo sapien
agattcccctgcaatacatcttggg

SEQ ID NO: 3987947 - DNA, 25 bp, Homo sapien
ctggtggcagccacgctcatgccca

SEQ ID NO: 3987948 - DNA, 25 bp, Homo sapien
acgctcatgcccactggcttctaat

SEQ ID NO: 3987949 - DNA, 25 bp, Homo sapien
cagcctcttgatggaagctcccggt

SEQ ID NO: 3987950 - DNA, 25 bp, Homo sapien
gcttctaatctcctgcatacccgtt

SEQ ID NO: 3987951 - DNA, 25 bp, Homo sapien
tccagctggcatctggcaggtgccc

SEQ ID NO: 3987952 - DNA, 25 bp, Homo sapien
ctcatagaggagagctccagctggc

SEQ ID NO: 3987953 - DNA, 25 bp, Homo sapien
tggcaggtgcccctctgggacgaag

SEQ ID NO: 3987954 - DNA, 25 bp, Homo sapien
ggacgaagcttccagaagaaggaac

SEQ ID NO: 3987955 - DNA, 25 bp, Homo sapien
gaagaatcactcgaacctgagaggc

SEQ ID NO: 3987956 - DNA, 25 bp, Homo sapien
ccaagatcgtgcgactgtactccag

SEQ ID NO: 3987957 - DNA, 25 bp, Homo sapien
ctgagaggcagaggttgcagtgagc

SEQ ID NO: 3987958 - DNA, 25 bp, Homo sapien
ggcagaagaatcactcgaacctgag

SEQ ID NO: 3987959 - DNA, 25 bp, Homo sapien
tgcaggataaacgtaagcaaggcct

SEQ ID NO: 3987960 - DNA, 25 bp, Homo sapien
tgtaaaaagccgagcactggagttg

SEQ ID NO: 3987961 - DNA, 25 bp, Homo sapien
taagcaaggcctctactcatcgttt

SEQ ID NO: 3987962 - DNA, 25 bp, Homo sapien
tgcagagtaagcctcatcatgagtt

SEQ ID NO: 3987963 - DNA, 25 bp, Homo sapien
taaaccttccctgttcgctctgatc

SEQ ID NO: 3987964 - DNA, 25 bp, Homo sapien
caagaagtattgcaacctgaagcct

SEQ ID NO: 3987965 - DNA, 25 bp, Homo sapien
aattaagaggcaatatacaccatgc

SEQ ID NO: 3987966 - DNA, 25 bp, Homo sapien
gatcaataatgacctctggctcccc

SEQ ID NO: 3987967 - DNA, 25 bp, Homo sapien
cagtcacgtctctctagtgtcacca

SEQ ID NO: 3987968 - DNA, 25 bp, Homo sapien
gcagtatttgccacgtctccactaa

SEQ ID NO: 3987969 - DNA, 25 bp, Homo sapien
cactaaacgtctcaaagtcgcagaa

SEQ ID NO: 3987970 - DNA, 25 bp, Homo sapien
gaaaacacagcatggcctaacagga

SEQ ID NO: 3987971 - DNA, 25 bp, Homo sapien
cagcggccgagcgctaagctgtcca

SEQ ID NO: 3987972 - DNA, 25 bp, Homo sapien
gaacctgcagatcctccgccctccg

SEQ ID NO: 3987973 - DNA, 25 bp, Homo sapien
gccctccgctgtcgccagcggccga

SEQ ID NO: 3987974 - DNA, 25 bp, Homo sapien
agcggccgagcgctaagctgtccat

SEQ ID NO: 3987975 - DNA, 25 bp, Homo sapien
ccagggtcaaaccctcccggcatct

SEQ ID NO: 3987976 - DNA, 25 bp, Homo sapien
tgctcctcgctgaccacctggctgc

SEQ ID NO: 3987977 - DNA, 25 bp, Homo sapien
gctgatgggcttggtggccagcaga

SEQ ID NO: 3987978 - DNA, 25 bp, Homo sapien
ggccagcagagctgccccgttttgt

SEQ ID NO: 3987979 - DNA, 25 bp, Homo sapien
tcagggcagctgctcctcgctgacc

SEQ ID NO: 3987980 - DNA, 25 bp, Homo sapien
agtcagccagacgtggctcagcgca

SEQ ID NO: 3987981 - DNA, 25 bp, Homo sapien
tattagcatgtatcaccgagttgtg

SEQ ID NO: 3987982 - DNA, 25 bp, Homo sapien
gcaaaactgttcacgtcatcctggg

SEQ ID NO: 3987983 - DNA, 25 bp, Homo sapien
ccatccagtctggaggccgtgggaa

SEQ ID NO: 3987984 - DNA, 25 bp, Homo sapien
catttagagtagctctcgggcacgc

SEQ ID NO: 3987985 - DNA, 25 bp, Homo sapien
tctcagcagacgtgcgggtgctcat

SEQ ID NO: 3987986 - DNA, 25 bp, Homo sapien
caggcgagcaacgtggagggtcggc

SEQ ID NO: 3987987 - DNA, 25 bp, Homo sapien
cctggggttgcaagttctcagcaga

SEQ ID NO: 3987988 - DNA, 25 bp, Homo sapien
tgcaagttctcagcagacgtgcggg

SEQ ID NO: 3987989 - DNA, 25 bp, Homo sapien
agtcagcaatggtgaccttcttgct

SEQ ID NO: 3987990 - DNA, 25 bp, Homo sapien
ccacagtcagcaatggtgaccttct

SEQ ID NO: 3987991 - DNA, 25 bp, Homo sapien
gtccacagtcagcaatggtgacctt

SEQ ID NO: 3987992 - DNA, 25 bp, Homo sapien
gttgtccacagtcagcaatggtgac

SEQ ID NO: 3987993 - DNA, 25 bp, Homo sapien
agggagcggcaggctcggcgtcggc

SEQ ID NO: 3987994 - DNA, 25 bp, Homo sapien
gggagcggcaggctcggcgtcggcc

SEQ ID NO: 3987995 - DNA, 25 bp, Homo sapien
gagggagcggcaggctcggcgtcgg

SEQ ID NO: 3987996 - DNA, 25 bp, Homo sapien
gcgccggtgtccaggtcttcaatcc

SEQ ID NO: 3987997 - DNA, 25 bp, Homo sapien
gacttaacctgttgccggagacaga

SEQ ID NO: 3987998 - DNA, 25 bp, Homo sapien
tgagagtctgttcagatttggcgcc

SEQ ID NO: 3987999 - DNA, 25 bp, Homo sapien
ccatgaactggtgtagtgagagtct

SEQ ID NO: 3988000 - DNA, 25 bp, Homo sapien
tttctatggtcacggttatgtctct

SEQ ID NO: 3988001 - DNA, 25 bp, Homo sapien
tctatggtcacggttatgtctctcc

SEQ ID NO: 3988002 - DNA, 25 bp, Homo sapien
tgtttctatggtcacggttatgtct

SEQ ID NO: 3988003 - DNA, 25 bp, Homo sapien
tatggtcacggttatgtctctccat

SEQ ID NO: 3988004 - DNA, 25 bp, Homo sapien
gcttgtgaagtaaagggatcagttc

SEQ ID NO: 3988005 - DNA, 25 bp, Homo sapien
aaatagagttagaagagttagtcac

SEQ ID NO: 3988006 - DNA, 25 bp, Homo sapien
ttgtaggagctggtaaaaatagagt

SEQ ID NO: 3988007 - DNA, 25 bp, Homo sapien
tctctgtattgatgatatggtcgta

SEQ ID NO: 3988008 - DNA, 25 bp, Homo sapien
tactctgtgctcctcatgaagatgg

SEQ ID NO: 3988009 - DNA, 25 bp, Homo sapien
cagccgggctcttacttttgaatca

SEQ ID NO: 3988010 - DNA, 25 bp, Homo sapien
cagaagcactgaggtatatgtcatc

SEQ ID NO: 3988011 - DNA, 25 bp, Homo sapien
ccttgagcaggttaattatttggga

SEQ ID NO: 3988012 - DNA, 25 bp, Homo sapien
cacaagttaaattgcagtgctccta

SEQ ID NO: 3988013 - DNA, 25 bp, Homo sapien
tggccagtgtcaacctattagtaac

SEQ ID NO: 3988014 - DNA, 25 bp, Homo sapien
gagtcctcaccatgcataaagatat

SEQ ID NO: 3988015 - DNA, 25 bp, Homo sapien
gatgtgctcagtggtgaagctgtca

SEQ ID NO: 3988016 - DNA, 25 bp, Homo sapien
ttgctacagtttaaataggggcttc

SEQ ID NO: 3988017 - DNA, 25 bp, Homo sapien
tgcaatcttggctcttgggtcactg

SEQ ID NO: 3988018 - DNA, 25 bp, Homo sapien
acagtttaaataggggcttcattgg

SEQ ID NO: 3988019 - DNA, 25 bp, Homo sapien
tcttcaaccttgaaagtcacttgat

SEQ ID NO: 3988020 - DNA, 25 bp, Homo sapien
ggtgcccaactattgtaagaaatat

SEQ ID NO: 3988021 - DNA, 25 bp, Homo sapien
ggagcagttcatgatttagtcctca

SEQ ID NO: 3988022 - DNA, 25 bp, Homo sapien
taattacattgggagcagttcatga

SEQ ID NO: 3988023 - DNA, 25 bp, Homo sapien
acttggtgcccaactattgtaagaa

SEQ ID NO: 3988024 - DNA, 25 bp, Homo sapien
tgagcctgctcttgtagaaatgttt

SEQ ID NO: 3988025 - DNA, 25 bp, Homo sapien
tgtcatttggatgttgtcccacacg

SEQ ID NO: 3988026 - DNA, 25 bp, Homo sapien
gatccccaaattctagagacaaagt

SEQ ID NO: 3988027 - DNA, 25 bp, Homo sapien
gagcccagctgaacttcccctattg

SEQ ID NO: 3988028 - DNA, 25 bp, Homo sapien
ggctaggtagtttgtggaattctcc

SEQ ID NO: 3988029 - DNA, 25 bp, Homo sapien
tgggacacccaaaccttaggcttgc

SEQ ID NO: 3988030 - DNA, 25 bp, Homo sapien
cagtgaaacaggctaggtagtttgt

SEQ ID NO: 3988031 - DNA, 25 bp, Homo sapien
gaaagcagctatctcaagggcacag

SEQ ID NO: 3988032 - DNA, 25 bp, Homo sapien
tcctggtgggtaggagcgtgtccca

SEQ ID NO: 3988033 - DNA, 25 bp, Homo sapien
ccatgtgcagcacgcttggctgtcc

SEQ ID NO: 3988034 - DNA, 25 bp, Homo sapien
ttggctgtccgaagttgctgatgag

SEQ ID NO: 3988035 - DNA, 25 bp, Homo sapien
cagcataggatctggcagggacggt

SEQ ID NO: 3988036 - DNA, 25 bp, Homo sapien
ttctttgaacttgctccgaactgct

SEQ ID NO: 3988037 - DNA, 25 bp, Homo sapien
gatcttctttgaacttgctccgaac

SEQ ID NO: 3988038 - DNA, 25 bp, Homo sapien
ctttgaacttgctccgaactgctcg

SEQ ID NO: 3988039 - DNA, 25 bp, Homo sapien
tcttctttgaacttgctccgaactg

SEQ ID NO: 3988040 - DNA, 25 bp, Homo sapien
atctccaggacctcgaaagcctcag

SEQ ID NO: 3988041 - DNA, 25 bp, Homo sapien
tatgcaaaacggtccatggtgccct

SEQ ID NO: 3988042 - DNA, 25 bp, Homo sapien
tccttcgcagacgaagcggctggaa

SEQ ID NO: 3988043 - DNA, 25 bp, Homo sapien
ccgaggagagcgcaagagtaagccc

SEQ ID NO: 3988044 - DNA, 25 bp, Homo sapien
ccggctcgggcgttgcctgcacgca

SEQ ID NO: 3988045 - DNA, 25 bp, Homo sapien
ctgcggccggctcgggcgttgcctg

SEQ ID NO: 3988046 - DNA, 25 bp, Homo sapien
tgctgcggccggctcgggcgttgcc

SEQ ID NO: 3988047 - DNA, 25 bp, Homo sapien
gggcgttgcctgcacgcaccgtgct

SEQ ID NO: 3988048 - DNA, 25 bp, Homo sapien
cacctggcaggggagtatcatgtag

SEQ ID NO: 3988049 - DNA, 25 bp, Homo sapien
atcgcccggtggaggaacattggct

SEQ ID NO: 3988050 - DNA, 25 bp, Homo sapien
ctggtggaggagcatcgcccggtgg

SEQ ID NO: 3988051 - DNA, 25 bp, Homo sapien
cattggctggtgagggagcatcatc

SEQ ID NO: 3988052 - DNA, 25 bp, Homo sapien
gtagcataaccttggggggagcatc

SEQ ID NO: 3988053 - DNA, 25 bp, Homo sapien
gcatcacctggggggtagcataacc

SEQ ID NO: 3988054 - DNA, 25 bp, Homo sapien
gggagcatcgcctgggggggagcat

SEQ ID NO: 3988055 - DNA, 25 bp, Homo sapien
tagcataaccttggggggagcatcg

SEQ ID NO: 3988056 - DNA, 25 bp, Homo sapien
tcatgccctggcaggccccagtgct

SEQ ID NO: 3988057 - DNA, 25 bp, Homo sapien
aggccccagtgctcggaaggctcct

SEQ ID NO: 3988058 - DNA, 25 bp, Homo sapien
cccagtgctcggaaggctcctgcag

SEQ ID NO: 3988059 - DNA, 25 bp, Homo sapien
cctggcaggccccagtgctcggaag

SEQ ID NO: 3988060 - DNA, 25 bp, Homo sapien
acttaacatgaaattgccctcatcc

SEQ ID NO: 3988061 - DNA, 25 bp, Homo sapien
atcctttaccctcacagcctgcaca

SEQ ID NO: 3988062 - DNA, 25 bp, Homo sapien
aatacacttaacatgaaattgccct

SEQ ID NO: 3988063 - DNA, 25 bp, Homo sapien
tgaaattgccctcatcctttaccct

SEQ ID NO: 3988064 - DNA, 25 bp, Homo sapien
gccctcacagcccgcacggtgccca

SEQ ID NO: 3988065 - DNA, 25 bp, Homo sapien
gcccacacggtgccctcacagcccg

SEQ ID NO: 3988066 - DNA, 25 bp, Homo sapien
cctcacagcccgcacggtgcccaca

SEQ ID NO: 3988067 - DNA, 25 bp, Homo sapien
tcacagcccgcacggtgcccacaca

SEQ ID NO: 3988068 - DNA, 25 bp, Homo sapien
tgcttcgtccggtaaaggcatggga

SEQ ID NO: 3988069 - DNA, 25 bp, Homo sapien
gattttgactctcaatgccggtgaa

SEQ ID NO: 3988070 - DNA, 25 bp, Homo sapien
ggttttagaaccatgctttaggcag

SEQ ID NO: 3988071 - DNA, 25 bp, Homo sapien
catcagttatcacctgttggaagga

SEQ ID NO: 3988072 - DNA, 25 bp, Homo sapien
cagtgattttgatgcagggataccg

SEQ ID NO: 3988073 - DNA, 25 bp, Homo sapien
ctttggtgcatggttcaggcagtga

SEQ ID NO: 3988074 - DNA, 25 bp, Homo sapien
gacctcagagatgtcccctatgaag

SEQ ID NO: 3988075 - DNA, 25 bp, Homo sapien
gaagcacaatatccttcagccaggc

SEQ ID NO: 3988076 - DNA, 25 bp, Homo sapien
tgtctgagtgttctcacatgtcccg

SEQ ID NO: 3988077 - DNA, 25 bp, Homo sapien
tcacatgtcccgtaggccgcatggt

SEQ ID NO: 3988078 - DNA, 25 bp, Homo sapien
tcccgtaggccgcatggtctgtggc

SEQ ID NO: 3988079 - DNA, 25 bp, Homo sapien
gtgttctcacatgtcccgtaggccg

SEQ ID NO: 3988080 - DNA, 25 bp, Homo sapien
gccttcgatgtacccccgtgggctg

SEQ ID NO: 3988081 - DNA, 25 bp, Homo sapien
ctcgctggcagctctatcaaaacca

SEQ ID NO: 3988082 - DNA, 25 bp, Homo sapien
ggaggtgaggccttcgatgtacccc

SEQ ID NO: 3988083 - DNA, 25 bp, Homo sapien
aggactggtcctgctcgctggcagc

SEQ ID NO: 3988084 - DNA, 25 bp, Homo sapien
gcttccccagtcagttgcagcctgt

SEQ ID NO: 3988085 - DNA, 25 bp, Homo sapien
catcctgggtgtcctaacctggcct

SEQ ID NO: 3988086 - DNA, 25 bp, Homo sapien
gcagcctgtttgcactaaacatcag

SEQ ID NO: 3988087 - DNA, 25 bp, Homo sapien
taaacatcagcttcacgttgacagc

SEQ ID NO: 3988088 - DNA, 25 bp, Homo sapien
aggtggtgtcgcatcctgtcctggt

SEQ ID NO: 3988089 - DNA, 25 bp, Homo sapien
gaggtggtgtcgcatcctgtcctgg

SEQ ID NO: 3988090 - DNA, 25 bp, Homo sapien
ggaggtggtgtcgcatcctgtcctg

SEQ ID NO: 3988091 - DNA, 25 bp, Homo sapien
ggtggcataggatgcagtcattaga

SEQ ID NO: 3988092 - DNA, 25 bp, Homo sapien
cattcgaaaaaggaagagctggtcg

SEQ ID NO: 3988093 - DNA, 25 bp, Homo sapien
gcagtcattagaatacaacattcga

SEQ ID NO: 3988094 - DNA, 25 bp, Homo sapien
gctggtcgtttggtaaaagcttgta

SEQ ID NO: 3988095 - DNA, 25 bp, Homo sapien
cttctggttgccctgtgccctgccc

SEQ ID NO: 3988096 - DNA, 25 bp, Homo sapien
ctgcttccttttctgggtcagccat

SEQ ID NO: 3988097 - DNA, 25 bp, Homo sapien
tggttgccctgtgccctgcccaact

SEQ ID NO: 3988098 - DNA, 25 bp, Homo sapien
ctctgcttccttttctgggtcagcc

SEQ ID NO: 3988099 - DNA, 25 bp, Homo sapien
caagtagtccacccaaagtgccggg

SEQ ID NO: 3988100 - DNA, 25 bp, Homo sapien
agtcactgtgccttgtggtttttac

SEQ ID NO: 3988101 - DNA, 25 bp, Homo sapien
tcaagtagtccacccaaagtgccgg

SEQ ID NO: 3988102 - DNA, 25 bp, Homo sapien
ctcaagtagtccacccaaagtgccg

SEQ ID NO: 3988103 - DNA, 25 bp, Homo sapien
gaaatgctcgtatggacttctgtcc

SEQ ID NO: 3988104 - DNA, 25 bp, Homo sapien
tgcctggaaatgctcgtatggactt

SEQ ID NO: 3988105 - DNA, 25 bp, Homo sapien
gcagcaagcaaagccgcagcactgg

SEQ ID NO: 3988106 - DNA, 25 bp, Homo sapien
cctggaaatgctcgtatggacttct

SEQ ID NO: 3988107 - DNA, 25 bp, Homo sapien
ctggttgctttattgagtaacggca

SEQ ID NO: 3988108 - DNA, 25 bp, Homo sapien
agcaccagtgcctcgtgtgaacctg

SEQ ID NO: 3988109 - DNA, 25 bp, Homo sapien
gaacctggtttagcagaagaaaaca

SEQ ID NO: 3988110 - DNA, 25 bp, Homo sapien
tttattgagtaacggcagcaccagt

SEQ ID NO: 3988111 - DNA, 25 bp, Homo sapien
agatgtgaggacctgaccgccacca

SEQ ID NO: 3988112 - DNA, 25 bp, Homo sapien
tggagatgcagtattgggattttgt

SEQ ID NO: 3988113 - DNA, 25 bp, Homo sapien
cactggagatgcagtattgggattt

SEQ ID NO: 3988114 - DNA, 25 bp, Homo sapien
gatgtgaggacctgaccgccaccac

SEQ ID NO: 3988115 - DNA, 25 bp, Homo sapien
tgtaaataacattttggtcctcaac

SEQ ID NO: 3988116 - DNA, 25 bp, Homo sapien
ggtgtaaataacattttggtcctca

SEQ ID NO: 3988117 - DNA, 25 bp, Homo sapien
ataggtgtgggtgtaaataacattt

SEQ ID NO: 3988118 - DNA, 25 bp, Homo sapien
tgtgggtgtaaataacattttggtc

SEQ ID NO: 3988119 - DNA, 25 bp, Homo sapien
cggctgtgtccactcacttgtcccc

SEQ ID NO: 3988120 - DNA, 25 bp, Homo sapien
gagtcacttccacggctgtgtccac

SEQ ID NO: 3988121 - DNA, 25 bp, Homo sapien
ctgagtcacttccacggctgtgtcc

SEQ ID NO: 3988122 - DNA, 25 bp, Homo sapien
agtcacttccacggctgtgtccact

SEQ ID NO: 3988123 - DNA, 25 bp, Homo sapien
tgtccgtctgtccaagatcatcagg

SEQ ID NO: 3988124 - DNA, 25 bp, Homo sapien
gacgctgtccgtctgtccaagatca

SEQ ID NO: 3988125 - DNA, 25 bp, Homo sapien
aggacgctgtccgtctgtccaagat

SEQ ID NO: 3988126 - DNA, 25 bp, Homo sapien
gctgtccgtctgtccaagatcatca

SEQ ID NO: 3988127 - DNA, 25 bp, Homo sapien
caggaaggccattcacgacgttgtc

SEQ ID NO: 3988128 - DNA, 25 bp, Homo sapien
tggaggtcagtaccactgccatcat

SEQ ID NO: 3988129 - DNA, 25 bp, Homo sapien
gggccaccctcttgtgtccattggg

SEQ ID NO: 3988130 - DNA, 25 bp, Homo sapien
ttatctgacatgtaattaggtgcct

SEQ ID NO: 3988131 - DNA, 25 bp, Homo sapien
cttgtgccagattcaacacccccag

SEQ ID NO: 3988132 - DNA, 25 bp, Homo sapien
tgtgccagattcaacacccccagag

SEQ ID NO: 3988133 - DNA, 25 bp, Homo sapien
ttcaacacccccagaggggccttgc

SEQ ID NO: 3988134 - DNA, 25 bp, Homo sapien
tgccagattcaacacccccagaggg

SEQ ID NO: 3988135 - DNA, 25 bp, Homo sapien
ttattgaaaagctctcttgtcttct

SEQ ID NO: 3988136 - DNA, 25 bp, Homo sapien
tgtttggcagcgcagtatatttgga

SEQ ID NO: 3988137 - DNA, 25 bp, Homo sapien
aagtgtttggcagcgcagtatattt

SEQ ID NO: 3988138 - DNA, 25 bp, Homo sapien
ggcagcgcagtatatttggaaagtt

SEQ ID NO: 3988139 - DNA, 25 bp, Homo sapien
ttggcagcgcagtatatttggaaag

SEQ ID NO: 3988140 - DNA, 25 bp, Homo sapien
tagcctaggcgaatgttgaagctct

SEQ ID NO: 3988141 - DNA, 25 bp, Homo sapien
cccacatgtgtgaggtagcctaggc

SEQ ID NO: 3988142 - DNA, 25 bp, Homo sapien
ttaccagtccccatctgcggcagat

SEQ ID NO: 3988143 - DNA, 25 bp, Homo sapien
gaacctgagcaattggtagtttcag

SEQ ID NO: 3988144 - DNA, 25 bp, Homo sapien
gagagaagctgccatctggcgttca

SEQ ID NO: 3988145 - DNA, 25 bp, Homo sapien
gaagctgccatctggcgttcaggag

SEQ ID NO: 3988146 - DNA, 25 bp, Homo sapien
gccatctggcgttcaggagctgatg

SEQ ID NO: 3988147 - DNA, 25 bp, Homo sapien
ctgccatctggcgttcaggagctga

SEQ ID NO: 3988148 - DNA, 25 bp, Homo sapien
tagggtcatcgttccacaccagcag

SEQ ID NO: 3988149 - DNA, 25 bp, Homo sapien
tgctgcggggccacctagggtcatc

SEQ ID NO: 3988150 - DNA, 25 bp, Homo sapien
tgcggggccacctagggtcatcgtt

SEQ ID NO: 3988151 - DNA, 25 bp, Homo sapien
ggccacctagggtcatcgttccaca

SEQ ID NO: 3988152 - DNA, 25 bp, Homo sapien
gtgactggtggccactttttttcat

SEQ ID NO: 3988153 - DNA, 25 bp, Homo sapien
gggatgtgaaatggtgactggtggc

SEQ ID NO: 3988154 - DNA, 25 bp, Homo sapien
ctgataggtgtttggggatgtgaaa

SEQ ID NO: 3988155 - DNA, 25 bp, Homo sapien
ctttatctgataggtgtttggggat

SEQ ID NO: 3988156 - DNA, 25 bp, Homo sapien
gcccagggatttgcagtgataaaca

SEQ ID NO: 3988157 - DNA, 25 bp, Homo sapien
tatcttccccggtgaattgcccagg

SEQ ID NO: 3988158 - DNA, 25 bp, Homo sapien
tatggatacccaaggcgtgatgagc

SEQ ID NO: 3988159 - DNA, 25 bp, Homo sapien
caagctggcttttaagttggtccga

SEQ ID NO: 3988160 - DNA, 25 bp, Homo sapien
gctgtctgtgtgctggtgctcccag

SEQ ID NO: 3988161 - DNA, 25 bp, Homo sapien
acagcgcagcccagggggatggcac

SEQ ID NO: 3988162 - DNA, 25 bp, Homo sapien
tccgtcgtctgtggggatgtctgtg

SEQ ID NO: 3988163 - DNA, 25 bp, Homo sapien
ctccgtcgtctgtggggatgtctgt

SEQ ID NO: 3988164 - DNA, 25 bp, Homo sapien
cggccatgcagacgaatcccacaac

SEQ ID NO: 3988165 - DNA, 25 bp, Homo sapien
ccatgcagacgaatcccacaaccat

SEQ ID NO: 3988166 - DNA, 25 bp, Homo sapien
cttattctccgatggtggaggtggc

SEQ ID NO: 3988167 - DNA, 25 bp, Homo sapien
gcacggccatgcagacgaatcccac

SEQ ID NO: 3988168 - DNA, 25 bp, Homo sapien
atagcctcgtaagccacaggtgggc

SEQ ID NO: 3988169 - DNA, 25 bp, Homo sapien
atcagagccggccatagcctcgtaa

SEQ ID NO: 3988170 - DNA, 25 bp, Homo sapien
ttacatggcagttcgctgaccatca

SEQ ID NO: 3988171 - DNA, 25 bp, Homo sapien
gcagttcgctgaccatcagagccgg

SEQ ID NO: 3988172 - DNA, 25 bp, Homo sapien
tttgcagctccagaaaggcgtgagt

SEQ ID NO: 3988173 - DNA, 25 bp, Homo sapien
tactctgccgcaagccattatcagt

SEQ ID NO: 3988174 - DNA, 25 bp, Homo sapien
aaagatgagcacacagagctgttga

SEQ ID NO: 3988175 - DNA, 25 bp, Homo sapien
tgtgttattaagttggaagctgctc

SEQ ID NO: 3988176 - DNA, 25 bp, Homo sapien
gaagcagggtgtgcgctgaattctc

SEQ ID NO: 3988177 - DNA, 25 bp, Homo sapien
tctcctgatgttgatgccaagacag

SEQ ID NO: 3988178 - DNA, 25 bp, Homo sapien
tcagttcaggtgtccgctccaggag

SEQ ID NO: 3988179 - DNA, 25 bp, Homo sapien
tgtactgtgtcggtcaggccgtgat

SEQ ID NO: 3988180 - DNA, 25 bp, Homo sapien
cttgtgagttcgctgatatatagtg

SEQ ID NO: 3988181 - DNA, 25 bp, Homo sapien
ccccttgtgagttcgctgatatata

SEQ ID NO: 3988182 - DNA, 25 bp, Homo sapien
tttcccccttgtgagttcgctgata

SEQ ID NO: 3988183 - DNA, 25 bp, Homo sapien
tcatagggggttcacctctttgtga

SEQ ID NO: 3988184 - DNA, 25 bp, Homo sapien
tacacgcataggggttttctcctgt

SEQ ID NO: 3988185 - DNA, 25 bp, Homo sapien
tgagaactgacttgcagtgaaataa

SEQ ID NO: 3988186 - DNA, 25 bp, Homo sapien
cccccactgccctggtgagttctct

SEQ ID NO: 3988187 - DNA, 25 bp, Homo sapien
tgtacagtgagaactgacttgcagt

SEQ ID NO: 3988188 - DNA, 25 bp, Homo sapien
tctctcatggatttcaaggcctgac

SEQ ID NO: 3988189 - DNA, 25 bp, Homo sapien
tctgtgatggataataaggtgtgac

SEQ ID NO: 3988190 - DNA, 25 bp, Homo sapien
ttcacaggggttatcctctgtgaga

SEQ ID NO: 3988191 - DNA, 25 bp, Homo sapien
caaggcctgactatggctgaaggat

SEQ ID NO: 3988192 - DNA, 25 bp, Homo sapien
atttttgtcctgtgtttggctcctc

SEQ ID NO: 3988193 - DNA, 25 bp, Homo sapien
gaatttttgtcctgtgtttggctcc

SEQ ID NO: 3988194 - DNA, 25 bp, Homo sapien
agaatttttgtcctgtgtttggctc

SEQ ID NO: 3988195 - DNA, 25 bp, Homo sapien
aatttttgtcctgtgtttggctcct

SEQ ID NO: 3988196 - DNA, 25 bp, Homo sapien
agagccaggagatccctgagaggca

SEQ ID NO: 3988197 - DNA, 25 bp, Homo sapien
caaggagtgcgtgttagtttcagag

SEQ ID NO: 3988198 - DNA, 25 bp, Homo sapien
aaagagccaggagatccctgagagg

SEQ ID NO: 3988199 - DNA, 25 bp, Homo sapien
gcatcaggccaaggagtgcgtgtta

SEQ ID NO: 3988200 - DNA, 25 bp, Homo sapien
gtgaataatgaatcagcagcgtgct

SEQ ID NO: 3988201 - DNA, 25 bp, Homo sapien
gaggctgctgtggatgacctacaga

SEQ ID NO: 3988202 - DNA, 25 bp, Homo sapien
gcagcgtgcttggtaaatgtaccca

SEQ ID NO: 3988203 - DNA, 25 bp, Homo sapien
tgtacccatgggcactaagggacca

SEQ ID NO: 3988204 - DNA, 25 bp, Homo sapien
tttttcgtagtattttctgctatcc

SEQ ID NO: 3988205 - DNA, 25 bp, Homo sapien
attttctgctatcctaaatcttcca

SEQ ID NO: 3988206 - DNA, 25 bp, Homo sapien
cttttttcgtagtattttctgctat

SEQ ID NO: 3988207 - DNA, 25 bp, Homo sapien
agtattttctgctatcctaaatctt

SEQ ID NO: 3988208 - DNA, 25 bp, Homo sapien
cttttccctggtcagcagattgctg

SEQ ID NO: 3988209 - DNA, 25 bp, Homo sapien
ttttccctggtcagcagattgctga

SEQ ID NO: 3988210 - DNA, 25 bp, Homo sapien
tccagaatctgctgcagtgccgagg

SEQ ID NO: 3988211 - DNA, 25 bp, Homo sapien
cgatcggcacagcagagtcatggga

SEQ ID NO: 3988212 - DNA, 25 bp, Homo sapien
tctgcttttagcaatcgatcggcac

SEQ ID NO: 3988213 - DNA, 25 bp, Homo sapien
tcacaaattgagaagggaacgggct

SEQ ID NO: 3988214 - DNA, 25 bp, Homo sapien
gaagaaggtggatcgagagtcatgg

SEQ ID NO: 3988215 - DNA, 25 bp, Homo sapien
catgaagacacccacggtagggcca

SEQ ID NO: 3988216 - DNA, 25 bp, Homo sapien
gcctggctggccactactctgagag

SEQ ID NO: 3988217 - DNA, 25 bp, Homo sapien
agccccatgaagacacccacggtag

SEQ ID NO: 3988218 - DNA, 25 bp, Homo sapien
tggggggatctgtagtgttgggacc

SEQ ID NO: 3988219 - DNA, 25 bp, Homo sapien
atctgtagtgttgggaccattgtgg

SEQ ID NO: 3988220 - DNA, 25 bp, Homo sapien
gggggatctgtagtgttgggaccat

SEQ ID NO: 3988221 - DNA, 25 bp, Homo sapien
ggatctgtagtgttgggaccattgt

SEQ ID NO: 3988222 - DNA, 25 bp, Homo sapien
aagaagaaggagcatacaggtgtga

SEQ ID NO: 3988223 - DNA, 25 bp, Homo sapien
gctgatgtagcaagaagaaggagca

SEQ ID NO: 3988224 - DNA, 25 bp, Homo sapien
agaagaaggagcatacaggtgtgaa

SEQ ID NO: 3988225 - DNA, 25 bp, Homo sapien
ctgccagctgctgatgtagcaagaa

SEQ ID NO: 3988226 - DNA, 25 bp, Homo sapien
aggagggcgggccacgtgggcctcg

SEQ ID NO: 3988227 - DNA, 25 bp, Homo sapien
tgtggcacaggattctgtctttgtc

SEQ ID NO: 3988228 - DNA, 25 bp, Homo sapien
caaggtgcagtgagctttgcgtaag

SEQ ID NO: 3988229 - DNA, 25 bp, Homo sapien
ctggaccaaacctgaggccacgttg

SEQ ID NO: 3988230 - DNA, 25 bp, Homo sapien
cagttttccgagttgtggcacagga

SEQ ID NO: 3988231 - DNA, 25 bp, Homo sapien
tctcctcgaaggtttacagtgacgg

SEQ ID NO: 3988232 - DNA, 25 bp, Homo sapien
tcgaaggtttacagtgacgggtgct

SEQ ID NO: 3988233 - DNA, 25 bp, Homo sapien
ttacagtgacgggtgctgtgctggc

SEQ ID NO: 3988234 - DNA, 25 bp, Homo sapien
gcttctcctcgaaggtttacagtga

SEQ ID NO: 3988235 - DNA, 25 bp, Homo sapien
gcagggtcggcgaaggcccaagagg

SEQ ID NO: 3988236 - DNA, 25 bp, Homo sapien
acgcagggtcggcgaaggcccaaga

SEQ ID NO: 3988237 - DNA, 25 bp, Homo sapien
cgcagggtcggcgaaggcccaagag

SEQ ID NO: 3988238 - DNA, 25 bp, Homo sapien
aaggatcctcttctcatagttcact

SEQ ID NO: 3988239 - DNA, 25 bp, Homo sapien
aaaggatcctcttctcatagttcac

SEQ ID NO: 3988240 - DNA, 25 bp, Homo sapien
ggatcctcttctcatagttcactaa

SEQ ID NO: 3988241 - DNA, 25 bp, Homo sapien
aggatcctcttctcatagttcacta

SEQ ID NO: 3988242 - DNA, 25 bp, Homo sapien
gcttgtagacatcgaagaccaggtt

SEQ ID NO: 3988243 - DNA, 25 bp, Homo sapien
catgtgctgtgctcggcttgtagac

SEQ ID NO: 3988244 - DNA, 25 bp, Homo sapien
cagggaggtaggacaccagagtaca

SEQ ID NO: 3988245 - DNA, 25 bp, Homo sapien
gatctgcagtacagatgcccatgag

SEQ ID NO: 3988246 - DNA, 25 bp, Homo sapien
ggaagcatctcttctccggaccctg

SEQ ID NO: 3988247 - DNA, 25 bp, Homo sapien
tgtttgggtaagtgggaagcatctc

SEQ ID NO: 3988248 - DNA, 25 bp, Homo sapien
tgggtaagtgggaagcatctcttct

SEQ ID NO: 3988249 - DNA, 25 bp, Homo sapien
gcatctcttctccggaccctggcca

SEQ ID NO: 3988250 - DNA, 25 bp, Homo sapien
tttccttggttcaggctggtagcca

SEQ ID NO: 3988251 - DNA, 25 bp, Homo sapien
agccagggtctgtgtttcttgacct

SEQ ID NO: 3988252 - DNA, 25 bp, Homo sapien
ctggtagccagggtctgtgtttctt

SEQ ID NO: 3988253 - DNA, 25 bp, Homo sapien
ctccagagtcaaaaccacttcccag

SEQ ID NO: 3988254 - DNA, 25 bp, Homo sapien
tgctgtgacccaggatgcagagatg

SEQ ID NO: 3988255 - DNA, 25 bp, Homo sapien
tgtgacccaggatgcagagatgatg

SEQ ID NO: 3988256 - DNA, 25 bp, Homo sapien
tgaggacatggctctcggggcagga

SEQ ID NO: 3988257 - DNA, 25 bp, Homo sapien
tgacccaggatgcagagatgatgag

SEQ ID NO: 3988258 - DNA, 25 bp, Homo sapien
cttgtgctccattcggaagactgct

SEQ ID NO: 3988259 - DNA, 25 bp, Homo sapien
ttgtgctccattcggaagactgctt

SEQ ID NO: 3988260 - DNA, 25 bp, Homo sapien
tgctccattcggaagactgcttcag

SEQ ID NO: 3988261 - DNA, 25 bp, Homo sapien
gtgctccattcggaagactgcttca

SEQ ID NO: 3988262 - DNA, 25 bp, Homo sapien
tttgactataggtgaggccccttct

SEQ ID NO: 3988263 - DNA, 25 bp, Homo sapien
tcgtcacacggagcttgatgccttc

SEQ ID NO: 3988264 - DNA, 25 bp, Homo sapien
ttgtcatcgtcacacggagcttgat

SEQ ID NO: 3988265 - DNA, 25 bp, Homo sapien
cccggctggcccgaatttgactata

SEQ ID NO: 3988266 - DNA, 25 bp, Homo sapien
tcaggcattccagaaatatccgagc

SEQ ID NO: 3988267 - DNA, 25 bp, Homo sapien
aaatatccgagccacagatgcacat

SEQ ID NO: 3988268 - DNA, 25 bp, Homo sapien
ttatctcaggcattccagaaatatc

SEQ ID NO: 3988269 - DNA, 25 bp, Homo sapien
ggcattccagaaatatccgagccac

SEQ ID NO: 3988270 - DNA, 25 bp, Homo sapien
tgggctgggagcaggcttcccttta

SEQ ID NO: 3988271 - DNA, 25 bp, Homo sapien
cttgggctgggagcaggcttccctt

SEQ ID NO: 3988272 - DNA, 25 bp, Homo sapien
ctgggagcaggcttccctttagttt

SEQ ID NO: 3988273 - DNA, 25 bp, Homo sapien
ggctgggagcaggcttccctttagt

SEQ ID NO: 3988274 - DNA, 25 bp, Homo sapien
tgaccccaaaccagtaaccagattc

SEQ ID NO: 3988275 - DNA, 25 bp, Homo sapien
gaggtccatgctctggagaactttg

SEQ ID NO: 3988276 - DNA, 25 bp, Homo sapien
aggagccagccacgtcataccttgc

SEQ ID NO: 3988277 - DNA, 25 bp, Homo sapien
tgaggaaccacttgccctgtgacca

SEQ ID NO: 3988278 - DNA, 25 bp, Homo sapien
ggtgcaagggcttgaacaagctggt

SEQ ID NO: 3988279 - DNA, 25 bp, Homo sapien
cactggtaacagcacccgcaaaaca

SEQ ID NO: 3988280 - DNA, 25 bp, Homo sapien
aacatcaccggactgtgtgttcagc

SEQ ID NO: 3988281 - DNA, 25 bp, Homo sapien
acccgcaaaacatcaccggactgtg

SEQ ID NO: 3988282 - DNA, 25 bp, Homo sapien
gccaaagaagccaaggttcttttga

SEQ ID NO: 3988283 - DNA, 25 bp, Homo sapien
tcttttgaagccacagctcagcctg

SEQ ID NO: 3988284 - DNA, 25 bp, Homo sapien
agccaaggttcttttgaagccacag

SEQ ID NO: 3988285 - DNA, 25 bp, Homo sapien
aaggttcttttgaagccacagctca

SEQ ID NO: 3988286 - DNA, 25 bp, Homo sapien
atgatggctgcccagggttgtgcaa

SEQ ID NO: 3988287 - DNA, 25 bp, Homo sapien
tacttgaggacaacttcaagtaatg

SEQ ID NO: 3988288 - DNA, 25 bp, Homo sapien
agtaatgtctcttctgcaaggccct

SEQ ID NO: 3988289 - DNA, 25 bp, Homo sapien
cccagggttgtgcaattcagatgaa

SEQ ID NO: 3988290 - DNA, 25 bp, Homo sapien
ggatgcgaaactcactgccacgaag

SEQ ID NO: 3988291 - DNA, 25 bp, Homo sapien
cttctggaatgagggccatcttcag

SEQ ID NO: 3988292 - DNA, 25 bp, Homo sapien
tgccctgggccgagtctcatggaag

SEQ ID NO: 3988293 - DNA, 25 bp, Homo sapien
cattctgggttaatcctggtgccca

SEQ ID NO: 3988294 - DNA, 25 bp, Homo sapien
ttttgaataggaagcattcagaggc

SEQ ID NO: 3988295 - DNA, 25 bp, Homo sapien
tgaataggaagcattcagaggcatc

SEQ ID NO: 3988296 - DNA, 25 bp, Homo sapien
gcttttgaataggaagcattcagag

SEQ ID NO: 3988297 - DNA, 25 bp, Homo sapien
attcagaggcatcgccaccacacat

SEQ ID NO: 3988298 - DNA, 25 bp, Homo sapien
gacagctctaaagccgttcagatgt

SEQ ID NO: 3988299 - DNA, 25 bp, Homo sapien
cattcacctccacgaaatggcccca

SEQ ID NO: 3988300 - DNA, 25 bp, Homo sapien
ggggacagctctaaagccgttcaga

SEQ ID NO: 3988301 - DNA, 25 bp, Homo sapien
ccattcacctccacgaaatggcccc

SEQ ID NO: 3988302 - DNA, 25 bp, Homo sapien
tctccttgagctgaacaggtgagga

SEQ ID NO: 3988303 - DNA, 25 bp, Homo sapien
gaggaggatctcatagagcacagat

SEQ ID NO: 3988304 - DNA, 25 bp, Homo sapien
tcactagaacttccatgcacgatgg

SEQ ID NO: 3988305 - DNA, 25 bp, Homo sapien
aacttccatgcacgatgggtgagga

SEQ ID NO: 3988306 - DNA, 25 bp, Homo sapien
tactcgcgccatgatcaagtgtctg

SEQ ID NO: 3988307 - DNA, 25 bp, Homo sapien
gaataggaaacggatccagcacctg

SEQ ID NO: 3988308 - DNA, 25 bp, Homo sapien
gaatgagtgctggtcagctctccca

SEQ ID NO: 3988309 - DNA, 25 bp, Homo sapien
cccgactccagtgaagaccattgat

SEQ ID NO: 3988310 - DNA, 25 bp, Homo sapien
tgttaataagctacccaaagaccac

SEQ ID NO: 3988311 - DNA, 25 bp, Homo sapien
gctgccgcaggaatgacaattattg

SEQ ID NO: 3988312 - DNA, 25 bp, Homo sapien
tataccgcgaattggataggctgct

SEQ ID NO: 3988313 - DNA, 25 bp, Homo sapien
gggcaacagtgattaactacgggct

SEQ ID NO: 3988314 - DNA, 25 bp, Homo sapien
atcagtatttggtaataagcactgg

SEQ ID NO: 3988315 - DNA, 25 bp, Homo sapien
taatcagtatttggtaataagcact

SEQ ID NO: 3988316 - DNA, 25 bp, Homo sapien
ggtattggttgatgcctgtctttgg

SEQ ID NO: 3988317 - DNA, 25 bp, Homo sapien
gtaataagcactggccttgaagggg

SEQ ID NO: 3988318 - DNA, 25 bp, Homo sapien
aagctgctgttctcgcctttgctgc

SEQ ID NO: 3988319 - DNA, 25 bp, Homo sapien
tggtcgtcccgcaaggtctgtgcta

SEQ ID NO: 3988320 - DNA, 25 bp, Homo sapien
caggcagctggttcgctcatgggca

SEQ ID NO: 3988321 - DNA, 25 bp, Homo sapien
tgccctgccgacatgttctcttgga

SEQ ID NO: 3988322 - DNA, 25 bp, Homo sapien
ctgctccgtgaacggccgtgcgctt

SEQ ID NO: 3988323 - DNA, 25 bp, Homo sapien
ccgtgaacggccgtgcgctttcatc

SEQ ID NO: 3988324 - DNA, 25 bp, Homo sapien
aacggccgtgcgctttcatctgtgc

SEQ ID NO: 3988325 - DNA, 25 bp, Homo sapien
accttcagctgctccgtgaacggcc

SEQ ID NO: 3988326 - DNA, 25 bp, Homo sapien
ccttgggtccaaatccatgctggat

SEQ ID NO: 3988327 - DNA, 25 bp, Homo sapien
cctgagtgactttctatagctgaag

SEQ ID NO: 3988328 - DNA, 25 bp, Homo sapien
gattctatcaggtaccacagtggct

SEQ ID NO: 3988329 - DNA, 25 bp, Homo sapien
gtgattctatcaggtaccacagtgg

SEQ ID NO: 3988330 - DNA, 25 bp, Homo sapien
cgtgtgcaaccaaagcagaccaagc

SEQ ID NO: 3988331 - DNA, 25 bp, Homo sapien
aagcccgcccgactgtgcctgtctg

SEQ ID NO: 3988332 - DNA, 25 bp, Homo sapien
ccaagcccgcccgactgtgcctgtc

SEQ ID NO: 3988333 - DNA, 25 bp, Homo sapien
gtgcaaccaaagcagaccaagcccg

SEQ ID NO: 3988334 - DNA, 25 bp, Homo sapien
caagagacagtcctggagggcgcat

SEQ ID NO: 3988335 - DNA, 25 bp, Homo sapien
agtgtgggcaagagacagtcctgga

SEQ ID NO: 3988336 - DNA, 25 bp, Homo sapien
caatgctgaattggccagtgtgggc

SEQ ID NO: 3988337 - DNA, 25 bp, Homo sapien
agggctccttgcactcaatgctgaa

SEQ ID NO: 3988338 - DNA, 25 bp, Homo sapien
cagtgatgggccatgaggggtgatg

SEQ ID NO: 3988339 - DNA, 25 bp, Homo sapien
ttgaagtggacacaggtggaaggct

SEQ ID NO: 3988340 - DNA, 25 bp, Homo sapien
ctttgagtgtggagaccctgttgaa

SEQ ID NO: 3988341 - DNA, 25 bp, Homo sapien
acacaggtggaaggctccagtgatg

SEQ ID NO: 3988342 - DNA, 25 bp, Homo sapien
gcttctctcacatggtttgtgctgc

SEQ ID NO: 3988343 - DNA, 25 bp, Homo sapien
catggtttgtgctgcccataggaaa

SEQ ID NO: 3988344 - DNA, 25 bp, Homo sapien
ttactgatctgcagtgaaccccagg

SEQ ID NO: 3988345 - DNA, 25 bp, Homo sapien
gaatttgctcatacagttcatgggc

SEQ ID NO: 3988346 - DNA, 25 bp, Homo sapien
tgtccacaagcgagccgtggtggct

SEQ ID NO: 3988347 - DNA, 25 bp, Homo sapien
tatcagtatgtataagctctcagag

SEQ ID NO: 3988348 - DNA, 25 bp, Homo sapien
gctgtgtcagcctgggtgccactca

SEQ ID NO: 3988349 - DNA, 25 bp, Homo sapien
tcagaggcaaacacgaggttggtgt

SEQ ID NO: 3988350 - DNA, 25 bp, Homo sapien
agaggcagcaagtctctccctgagt

SEQ ID NO: 3988351 - DNA, 25 bp, Homo sapien
tcttggtgtcggctgcagaactggg

SEQ ID NO: 3988352 - DNA, 25 bp, Homo sapien
ttctctggagaagtcgccagccaga

SEQ ID NO: 3988353 - DNA, 25 bp, Homo sapien
gtttccaagcgtgaagcagcttccc

SEQ ID NO: 3988354 - DNA, 25 bp, Homo sapien
tcgcgagccaatgtgatgatgggaa

SEQ ID NO: 3988355 - DNA, 25 bp, Homo sapien
cagctggtagggcatcgcgagccaa

SEQ ID NO: 3988356 - DNA, 25 bp, Homo sapien
ctggtagggcatcgcgagccaatgt

SEQ ID NO: 3988357 - DNA, 25 bp, Homo sapien
tagggcatcgcgagccaatgtgatg

SEQ ID NO: 3988358 - DNA, 25 bp, Homo sapien
ttggtgtgtccgttctctcatgtgc

SEQ ID NO: 3988359 - DNA, 25 bp, Homo sapien
gtccgttctctcatgtgcttcaaag

SEQ ID NO: 3988360 - DNA, 25 bp, Homo sapien
gtgtgtccgttctctcatgtgcttc

SEQ ID NO: 3988361 - DNA, 25 bp, Homo sapien
gggttggtgtgtccgttctctcatg

SEQ ID NO: 3988362 - DNA, 25 bp, Homo sapien
gagaaaatgaacgccactgtctctg

SEQ ID NO: 3988363 - DNA, 25 bp, Homo sapien
aaaatgaacgccactgtctctgcgc

SEQ ID NO: 3988364 - DNA, 25 bp, Homo sapien
atgaacgccactgtctctgcgctgc

SEQ ID NO: 3988365 - DNA, 25 bp, Homo sapien
gaaaatgaacgccactgtctctgcg

SEQ ID NO: 3988366 - DNA, 25 bp, Homo sapien
caatggtcgcactgagaaccggtaa

SEQ ID NO: 3988367 - DNA, 25 bp, Homo sapien
gggaaccattggtactggccggcaa

SEQ ID NO: 3988368 - DNA, 25 bp, Homo sapien
tgtggctggaacaggcttgcttctg

SEQ ID NO: 3988369 - DNA, 25 bp, Homo sapien
ggctggaacaggcttgcttctgctg

SEQ ID NO: 3988370 - DNA, 25 bp, Homo sapien
ctggggccagagcttgaatggaggc

SEQ ID NO: 3988371 - DNA, 25 bp, Homo sapien
tggggccagagcttgaatggaggct

SEQ ID NO: 3988372 - DNA, 25 bp, Homo sapien
gggccagagcttgaatggaggctca

SEQ ID NO: 3988373 - DNA, 25 bp, Homo sapien
gccagagcttgaatggaggctcagc

SEQ ID NO: 3988374 - DNA, 25 bp, Homo sapien
cgaggccttcggacccattgccgtt

SEQ ID NO: 3988375 - DNA, 25 bp, Homo sapien
cattgccgtttcgaaaaggccctgg

SEQ ID NO: 3988376 - DNA, 25 bp, Homo sapien
tgagcaccaaggaggtatggacact

SEQ ID NO: 3988377 - DNA, 25 bp, Homo sapien
gaggtgtgaaaggtggtcccgaggc

SEQ ID NO: 3988378 - DNA, 25 bp, Homo sapien
ggagcttggcagaaggttgcccttt

SEQ ID NO: 3988379 - DNA, 25 bp, Homo sapien
agcagagttcctgggcttcgggaaa

SEQ ID NO: 3988380 - DNA, 25 bp, Homo sapien
tgtccacagggggagcagagttcct

SEQ ID NO: 3988381 - DNA, 25 bp, Homo sapien
gggagcagagttcctgggcttcggg

SEQ ID NO: 3988382 - DNA, 25 bp, Homo sapien
aggagaatcccgagctgttagcaca

SEQ ID NO: 3988383 - DNA, 25 bp, Homo sapien
aaaggcaggcgccatttggacagca

SEQ ID NO: 3988384 - DNA, 25 bp, Homo sapien
ggctgcggtgacataaagctcccca

SEQ ID NO: 3988385 - DNA, 25 bp, Homo sapien
tgataacttccgagggctgcggtga

SEQ ID NO: 3988386 - DNA, 25 bp, Homo sapien
ctctggaagacttggacctgggacc

SEQ ID NO: 3988387 - DNA, 25 bp, Homo sapien
ctggaagacttggacctgggaccag

SEQ ID NO: 3988388 - DNA, 25 bp, Homo sapien
aagcgtgcattcacactgttcccag

SEQ ID NO: 3988389 - DNA, 25 bp, Homo sapien
gaagcgtgcattcacactgttccca

SEQ ID NO: 3988390 - DNA, 25 bp, Homo sapien
ttctgcatgatgacttcactagtac

SEQ ID NO: 3988391 - DNA, 25 bp, Homo sapien
ctagtacacgggatggaagtaacct

SEQ ID NO: 3988392 - DNA, 25 bp, Homo sapien
accttctgcatgatgacttcactag

SEQ ID NO: 3988393 - DNA, 25 bp, Homo sapien
ccttctgcatgatgacttcactagt

SEQ ID NO: 3988394 - DNA, 25 bp, Homo sapien
tcagtgccagttagagaagggtttg

SEQ ID NO: 3988395 - DNA, 25 bp, Homo sapien
gaatgctggtaatggctcgcacttt

SEQ ID NO: 3988396 - DNA, 25 bp, Homo sapien
tatctgtcccaacctggtaggccac

SEQ ID NO: 3988397 - DNA, 25 bp, Homo sapien
gcagcgagctcgtcatccttggtgt

SEQ ID NO: 3988398 - DNA, 25 bp, Homo sapien
tttcgtgtttagactgccctgagct

SEQ ID NO: 3988399 - DNA, 25 bp, Homo sapien
agttgtaggttctctcgctggctgg

SEQ ID NO: 3988400 - DNA, 25 bp, Homo sapien
tgggtacaaattggactctctgggc

SEQ ID NO: 3988401 - DNA, 25 bp, Homo sapien
tgaaggtgaaatcctgcttagctcc

SEQ ID NO: 3988402 - DNA, 25 bp, Homo sapien
ctgatatctcttggcatagtctggg

SEQ ID NO: 3988403 - DNA, 25 bp, Homo sapien
cttctgatatctcttggcatagtct

SEQ ID NO: 3988404 - DNA, 25 bp, Homo sapien
tggaccaaagccttctgatatctct

SEQ ID NO: 3988405 - DNA, 25 bp, Homo sapien
tatctcttggcatagtctgggagct

SEQ ID NO: 3988406 - DNA, 25 bp, Homo sapien
gcaggtcaccgtatctgcagttccc

SEQ ID NO: 3988407 - DNA, 25 bp, Homo sapien
ctgcaggtcaccgtatctgcagttc

SEQ ID NO: 3988408 - DNA, 25 bp, Homo sapien
gggctgcaggtcaccgtatctgcag

SEQ ID NO: 3988409 - DNA, 25 bp, Homo sapien
ggctgcaggtcaccgtatctgcagt

SEQ ID NO: 3988410 - DNA, 25 bp, Homo sapien
cagctgcttaattgtgttggcgatc

SEQ ID NO: 3988411 - DNA, 25 bp, Homo sapien
taagggcctactgaaaatgaacaat

SEQ ID NO: 3988412 - DNA, 25 bp, Homo sapien
cctagtcacgtagcagtttccctga

SEQ ID NO: 3988413 - DNA, 25 bp, Homo sapien
tgcattggaggataaaaaacacacc

SEQ ID NO: 3988414 - DNA, 25 bp, Homo sapien
agagatgtgcgaacctggaagatga

SEQ ID NO: 3988415 - DNA, 25 bp, Homo sapien
cctgcactgaaacgggttcctgctg

SEQ ID NO: 3988416 - DNA, 25 bp, Homo sapien
tgctggcacagtgcgtcgctcctct

SEQ ID NO: 3988417 - DNA, 25 bp, Homo sapien
gaggcatttcagagatgtgcgaacc

SEQ ID NO: 3988418 - DNA, 25 bp, Homo sapien
catctgccacgtgaccgtggcggcc

SEQ ID NO: 3988419 - DNA, 25 bp, Homo sapien
cactgctggtggtcgtccatgggaa

SEQ ID NO: 3988420 - DNA, 25 bp, Homo sapien
tggctgaggaggcacagcgtgccag

SEQ ID NO: 3988421 - DNA, 25 bp, Homo sapien
ccagatgttgtacaggctttgcctt

SEQ ID NO: 3988422 - DNA, 25 bp, Homo sapien
gaattgcgagaaaggacaccgccct

SEQ ID NO: 3988423 - DNA, 25 bp, Homo sapien
tcagcagacttgcaagagaggacat

SEQ ID NO: 3988424 - DNA, 25 bp, Homo sapien
agcagggctgcaacagggacatcac

SEQ ID NO: 3988425 - DNA, 25 bp, Homo sapien
ggacgtcactctctgtacagccggc

SEQ ID NO: 3988426 - DNA, 25 bp, Homo sapien
ctgggcaattatgcccgcagcagag

SEQ ID NO: 3988427 - DNA, 25 bp, Homo sapien
cgcagcagagagcgcgccggctttc

SEQ ID NO: 3988428 - DNA, 25 bp, Homo sapien
tgggcaattatgcccgcagcagaga

SEQ ID NO: 3988429 - DNA, 25 bp, Homo sapien
gcccgcagcagagagcgcgccggct

SEQ ID NO: 3988430 - DNA, 25 bp, Homo sapien
attcgggggattccctgggtcatga

SEQ ID NO: 3988431 - DNA, 25 bp, Homo sapien
atcgtactgctctgctctattcggg

SEQ ID NO: 3988432 - DNA, 25 bp, Homo sapien
cctacacaaattaaatcgtactgct

SEQ ID NO: 3988433 - DNA, 25 bp, Homo sapien
aaattaaatcgtactgctctgctct

SEQ ID NO: 3988434 - DNA, 25 bp, Homo sapien
tccacagacgtacggccaccgatgg

SEQ ID NO: 3988435 - DNA, 25 bp, Homo sapien
ggctcggtccacagacgtacggcca

SEQ ID NO: 3988436 - DNA, 25 bp, Homo sapien
cagaggggctcggtccacagacgta

SEQ ID NO: 3988437 - DNA, 25 bp, Homo sapien
cacgggcagtcctccggccagaggg

SEQ ID NO: 3988438 - DNA, 25 bp, Homo sapien
tgaaaacgtgtcctcctgcgacagg

SEQ ID NO: 3988439 - DNA, 25 bp, Homo sapien
cacttctgtgaaaacgtgtcctcct

SEQ ID NO: 3988440 - DNA, 25 bp, Homo sapien
aacgtgtcctcctgcgacagggaca

SEQ ID NO: 3988441 - DNA, 25 bp, Homo sapien
tctgtgaaaacgtgtcctcctgcga

SEQ ID NO: 3988442 - DNA, 25 bp, Homo sapien
tggaccagtggtgataggagtaata

SEQ ID NO: 3988443 - DNA, 25 bp, Homo sapien
gtcccctggaccagtggtgatagga

SEQ ID NO: 3988444 - DNA, 25 bp, Homo sapien
cctggaccagtggtgataggagtaa

SEQ ID NO: 3988445 - DNA, 25 bp, Homo sapien
ccagtggtgataggagtaatataaa

SEQ ID NO: 3988446 - DNA, 25 bp, Homo sapien
gcaggagacgataaccctggatggc

SEQ ID NO: 3988447 - DNA, 25 bp, Homo sapien
tgagcaggagacgataaccctggat

SEQ ID NO: 3988448 - DNA, 25 bp, Homo sapien
ctctgagcaggagacgataaccctg

SEQ ID NO: 3988449 - DNA, 25 bp, Homo sapien
caggagacgataaccctggatggca

SEQ ID NO: 3988450 - DNA, 25 bp, Homo sapien
gaatttaggctcattgttggcaaag

SEQ ID NO: 3988451 - DNA, 25 bp, Homo sapien
gttggcaaagagaagagctctcagg

SEQ ID NO: 3988452 - DNA, 25 bp, Homo sapien
gagaagagctctcagggcaagcagt

SEQ ID NO: 3988453 - DNA, 25 bp, Homo sapien
ctagaatttaggctcattgttggca

SEQ ID NO: 3988454 - DNA, 25 bp, Homo sapien
gggccaggccaacgctgagcatctg

SEQ ID NO: 3988455 - DNA, 25 bp, Homo sapien
agtggggtgctgagagaaagtggaa

SEQ ID NO: 3988456 - DNA, 25 bp, Homo sapien
gcctttggggccaggccaacgctga

SEQ ID NO: 3988457 - DNA, 25 bp, Homo sapien
caggccaacgctgagcatctgggct

SEQ ID NO: 3988458 - DNA, 25 bp, Homo sapien
tctttggcccagaggagggtgctgc

SEQ ID NO: 3988459 - DNA, 25 bp, Homo sapien
gctgggagtggatgccccgtgagaa

SEQ ID NO: 3988460 - DNA, 25 bp, Homo sapien
ctggacgccggctcatgcagctggg

SEQ ID NO: 3988461 - DNA, 25 bp, Homo sapien
ttccagaaggagtccaagctcagag

SEQ ID NO: 3988462 - DNA, 25 bp, Homo sapien
catggccctgacacgagtcctcagg

SEQ ID NO: 3988463 - DNA, 25 bp, Homo sapien
ggcacagggcacagggtagcggctt

SEQ ID NO: 3988464 - DNA, 25 bp, Homo sapien
tggcacagggcacagggtagcggct

SEQ ID NO: 3988465 - DNA, 25 bp, Homo sapien
ctggcacagggcacagggtagcggc

SEQ ID NO: 3988466 - DNA, 25 bp, Homo sapien
tagcccggctcccttaacagtgata

SEQ ID NO: 3988467 - DNA, 25 bp, Homo sapien
ccttaacagtgatagtcacactggg

SEQ ID NO: 3988468 - DNA, 25 bp, Homo sapien
agtggctctttgttcggatagcccg

SEQ ID NO: 3988469 - DNA, 25 bp, Homo sapien
tctttgttcggatagcccggctccc

SEQ ID NO: 3988470 - DNA, 25 bp, Homo sapien
ctggagctccacgtcatcctggcag

SEQ ID NO: 3988471 - DNA, 25 bp, Homo sapien
tccaagtcttgttgacacggtgtca

SEQ ID NO: 3988472 - DNA, 25 bp, Homo sapien
tgacacggtgtcactctcctttgca

SEQ ID NO: 3988473 - DNA, 25 bp, Homo sapien
tcagtctccataattcacatccaag

SEQ ID NO: 3988474 - DNA, 25 bp, Homo sapien
ctagagagttccatggccgtcacac

SEQ ID NO: 3988475 - DNA, 25 bp, Homo sapien
tcacacaggtcggtacccgtgcagg

SEQ ID NO: 3988476 - DNA, 25 bp, Homo sapien
cctcgtgaacagctggaactgttct

SEQ ID NO: 3988477 - DNA, 25 bp, Homo sapien
cagaaacaggcgcttcctcgtgaac

SEQ ID NO: 3988478 - DNA, 25 bp, Homo sapien
ttccttttatgaacaggatgaagtc

SEQ ID NO: 3988479 - DNA, 25 bp, Homo sapien
attaagtgttgttcttattgagaac

SEQ ID NO: 3988480 - DNA, 25 bp, Homo sapien
tcttattgagaacataactttcctt

SEQ ID NO: 3988481 - DNA, 25 bp, Homo sapien
ttttatgaacaggatgaagtctcac

SEQ ID NO: 3988482 - DNA, 25 bp, Homo sapien
cgggggcctctgcatgacggcatga

SEQ ID NO: 3988483 - DNA, 25 bp, Homo sapien
tcgggggcctctgcatgacggcatg

SEQ ID NO: 3988484 - DNA, 25 bp, Homo sapien
taggaggccggccatccacagggct

SEQ ID NO: 3988485 - DNA, 25 bp, Homo sapien
gggcctctaggaggccggccatcca

SEQ ID NO: 3988486 - DNA, 25 bp, Homo sapien
cctctaggaggccggccatccacag

SEQ ID NO: 3988487 - DNA, 25 bp, Homo sapien
tctaggaggccggccatccacaggg

SEQ ID NO: 3988488 - DNA, 25 bp, Homo sapien
cgcaatggcggaaagcaaagcagaa

SEQ ID NO: 3988489 - DNA, 25 bp, Homo sapien
cgaacggagcgggtagaaatgagac

SEQ ID NO: 3988490 - DNA, 25 bp, Homo sapien
agcagaaatggcgtgacagccacat

SEQ ID NO: 3988491 - DNA, 25 bp, Homo sapien
caaagcagaaatggcgtgacagcca

SEQ ID NO: 3988492 - DNA, 25 bp, Homo sapien
ggacattgtcgctggaacgttgcat

SEQ ID NO: 3988493 - DNA, 25 bp, Homo sapien
tggtttttccctggacattgtcgct

SEQ ID NO: 3988494 - DNA, 25 bp, Homo sapien
tccgagttgggatgggcgatggttt

SEQ ID NO: 3988495 - DNA, 25 bp, Homo sapien
ttttccctggacattgtcgctggaa

SEQ ID NO: 3988496 - DNA, 25 bp, Homo sapien
tcacggccctggtatgtttccccat

SEQ ID NO: 3988497 - DNA, 25 bp, Homo sapien
ctcacggccctggtatgtttcccca

SEQ ID NO: 3988498 - DNA, 25 bp, Homo sapien
gcttctttggcgctttccaaacggc

SEQ ID NO: 3988499 - DNA, 25 bp, Homo sapien
ggcatctgctgagcaggttcttgct

SEQ ID NO: 3988500 - DNA, 25 bp, Homo sapien
caaacacgcgtatctggcatctgct

SEQ ID NO: 3988501 - DNA, 25 bp, Homo sapien
aaacggcagaattccagtgctgtcc

SEQ ID NO: 3988502 - DNA, 25 bp, Homo sapien
ctttctcctctcagttggtaagcta

SEQ ID NO: 3988503 - DNA, 25 bp, Homo sapien
gagacaccatacttctgcacacagg

SEQ ID NO: 3988504 - DNA, 25 bp, Homo sapien
ggtaagtaccgattcctgtacacta

SEQ ID NO: 3988505 - DNA, 25 bp, Homo sapien
gcacacaggagagccttaacatagc

SEQ ID NO: 3988506 - DNA, 25 bp, Homo sapien
gatgtgcccttatcatgctctgtgt

SEQ ID NO: 3988507 - DNA, 25 bp, Homo sapien
tccttgacaccgtcagggacgtcca

SEQ ID NO: 3988508 - DNA, 25 bp, Homo sapien
gctggtctcacgcaacaagaataaa

SEQ ID NO: 3988509 - DNA, 25 bp, Homo sapien
aaggcagcttggctctctgagtcac

SEQ ID NO: 3988510 - DNA, 25 bp, Homo sapien
tagcgcgtaataaggaaaggtaaca

SEQ ID NO: 3988511 - DNA, 25 bp, Homo sapien
aaaggtaacacaaagcattcgctgt

SEQ ID NO: 3988512 - DNA, 25 bp, Homo sapien
cattcgctgtacgatggatggcact

SEQ ID NO: 3988513 - DNA, 25 bp, Homo sapien
ccaaggactgtcaactagcgcgtaa

SEQ ID NO: 3988514 - DNA, 25 bp, Homo sapien
tgctggacaaggaggactgttgtct

SEQ ID NO: 3988515 - DNA, 25 bp, Homo sapien
tctgctgtccggtggtctcttgacc

SEQ ID NO: 3988516 - DNA, 25 bp, Homo sapien
gctggacaaggaggactgttgtctt

SEQ ID NO: 3988517 - DNA, 25 bp, Homo sapien
tgttgtcttggtgtgtgggtctgct

SEQ ID NO: 3988518 - DNA, 25 bp, Homo sapien
gatttagcagaaaccacgtgtgttt

SEQ ID NO: 3988519 - DNA, 25 bp, Homo sapien
atgatttagcagaaaccacgtgtgt

SEQ ID NO: 3988520 - DNA, 25 bp, Homo sapien
ccataatgctcagtaatactccatg

SEQ ID NO: 3988521 - DNA, 25 bp, Homo sapien
ctgtgctccataatgctcagtaata

SEQ ID NO: 3988522 - DNA, 25 bp, Homo sapien
ggtgcctctttgagtgtgactatga

SEQ ID NO: 3988523 - DNA, 25 bp, Homo sapien
gtgtgactatgaccagctgggttac

SEQ ID NO: 3988524 - DNA, 25 bp, Homo sapien
tggaaggtgcctctttgagtgtgac

SEQ ID NO: 3988525 - DNA, 25 bp, Homo sapien
tctttgagtgtgactatgaccagct

SEQ ID NO: 3988526 - DNA, 25 bp, Homo sapien
ggtctacccatgacccctggggctg

SEQ ID NO: 3988527 - DNA, 25 bp, Homo sapien
ggtggtaagtatctccagggtctac

SEQ ID NO: 3988528 - DNA, 25 bp, Homo sapien
gaaggtggtaagtatctccagggtc

SEQ ID NO: 3988529 - DNA, 25 bp, Homo sapien
ccagggtctacccatgacccctggg

SEQ ID NO: 3988530 - DNA, 25 bp, Homo sapien
gagtttctctgagagcgtctcctcc

SEQ ID NO: 3988531 - DNA, 25 bp, Homo sapien
tgtgtctcttggggggtacttctga

SEQ ID NO: 3988532 - DNA, 25 bp, Homo sapien
tcctcctgggccttgagtgtaggga

SEQ ID NO: 3988533 - DNA, 25 bp, Homo sapien
ctcctgggccttgagtgtagggatt

SEQ ID NO: 3988534 - DNA, 25 bp, Homo sapien
ctcctcttttcactgtgggtgttca

SEQ ID NO: 3988535 - DNA, 25 bp, Homo sapien
gggctctgtgggtagcctcctcctc

SEQ ID NO: 3988536 - DNA, 25 bp, Homo sapien
tcctcttttcactgtgggtgttcat

SEQ ID NO: 3988537 - DNA, 25 bp, Homo sapien
tctgtgggtagcctcctcctctttt

SEQ ID NO: 3988538 - DNA, 25 bp, Homo sapien
tcactctgagccattctgccccttt

SEQ ID NO: 3988539 - DNA, 25 bp, Homo sapien
ctctgagccattctgcccctttatg

SEQ ID NO: 3988540 - DNA, 25 bp, Homo sapien
tctgagccattctgcccctttatgc

SEQ ID NO: 3988541 - DNA, 25 bp, Homo sapien
actctgagccattctgcccctttat

SEQ ID NO: 3988542 - DNA, 25 bp, Homo sapien
ctgtcctgataagattcctgatttc

SEQ ID NO: 3988543 - DNA, 25 bp, Homo sapien
ttcctgatttcccatagtcttggct

SEQ ID NO: 3988544 - DNA, 25 bp, Homo sapien
tcctgatttcccatagtcttggctt

SEQ ID NO: 3988545 - DNA, 25 bp, Homo sapien
tcctgataagattcctgatttccca

SEQ ID NO: 3988546 - DNA, 25 bp, Homo sapien
cctgcagcgtaaggtcttcctgtgg

SEQ ID NO: 3988547 - DNA, 25 bp, Homo sapien
tgctctgttcactcctagttcttgc

SEQ ID NO: 3988548 - DNA, 25 bp, Homo sapien
tcctcctgcagcgtaaggtcttcct

SEQ ID NO: 3988549 - DNA, 25 bp, Homo sapien
tccttgcctagtgctcagagccagt

SEQ ID NO: 3988550 - DNA, 25 bp, Homo sapien
tcaccaaggctttgcgtctgtcgtt

SEQ ID NO: 3988551 - DNA, 25 bp, Homo sapien
cagcggtagcccagtagagagtgct

SEQ ID NO: 3988552 - DNA, 25 bp, Homo sapien
ccaggcgatctggtggtgagtccaa

SEQ ID NO: 3988553 - DNA, 25 bp, Homo sapien
caggtcactggagatcaaagtccgg

SEQ ID NO: 3988554 - DNA, 25 bp, Homo sapien
gcatgcccagctgctgtacggggag

SEQ ID NO: 3988555 - DNA, 25 bp, Homo sapien
tgtacggggagtagccgagtgcttc

SEQ ID NO: 3988556 - DNA, 25 bp, Homo sapien
cccagctgctgtacggggagtagcc

SEQ ID NO: 3988557 - DNA, 25 bp, Homo sapien
cggggagtagccgagtgcttcccat

SEQ ID NO: 3988558 - DNA, 25 bp, Homo sapien
gaccctggcagtgcgaggtgaggaa

SEQ ID NO: 3988559 - DNA, 25 bp, Homo sapien
ccagcacgcaggcagtggatgcaga

SEQ ID NO: 3988560 - DNA, 25 bp, Homo sapien
gcaggggcccgagcaagcctctctt

SEQ ID NO: 3988561 - DNA, 25 bp, Homo sapien
ctgagaaccccacgaaaggacggtg

SEQ ID NO: 3988562 - DNA, 25 bp, Homo sapien
gaacgagatccgacttgacctgaag

SEQ ID NO: 3988563 - DNA, 25 bp, Homo sapien
gacttgacctgaagcaggccctcag

SEQ ID NO: 3988564 - DNA, 25 bp, Homo sapien
gcaggccctcagacctcaaacgtgt

SEQ ID NO: 3988565 - DNA, 25 bp, Homo sapien
gggccaacaggaacgagatccgact

SEQ ID NO: 3988566 - DNA, 25 bp, Homo sapien
gggacctccctcctcgcctgcctgt

SEQ ID NO: 3988567 - DNA, 25 bp, Homo sapien
cagcttcttcccctttctgggacct

SEQ ID NO: 3988568 - DNA, 25 bp, Homo sapien
tgaagcccagagaaaggaaacagct

SEQ ID NO: 3988569 - DNA, 25 bp, Homo sapien
tgtctccatcctgcctcagggtcag

SEQ ID NO: 3988570 - DNA, 25 bp, Homo sapien
tcttgtccttctgatcagggtcccc

SEQ ID NO: 3988571 - DNA, 25 bp, Homo sapien
cttttatagcggaaagcccacccag

SEQ ID NO: 3988572 - DNA, 25 bp, Homo sapien
cagtagaaaaccacaagggtgggct

SEQ ID NO: 3988573 - DNA, 25 bp, Homo sapien
tttacaaatatctccctggtggcca

SEQ ID NO: 3988574 - DNA, 25 bp, Homo sapien
gagcacacattcgtccttgcagagc

SEQ ID NO: 3988575 - DNA, 25 bp, Homo sapien
acattcgtccttgcagagccggcct

SEQ ID NO: 3988576 - DNA, 25 bp, Homo sapien
gcacacattcgtccttgcagagccg

SEQ ID NO: 3988577 - DNA, 25 bp, Homo sapien
cctgcagagcacacattcgtccttg

SEQ ID NO: 3988578 - DNA, 25 bp, Homo sapien
tagatgcactccaggaatagggaac

SEQ ID NO: 3988579 - DNA, 25 bp, Homo sapien
ctgtagatgcactccaggaataggg

SEQ ID NO: 3988580 - DNA, 25 bp, Homo sapien
gatgcactccaggaatagggaacct

SEQ ID NO: 3988581 - DNA, 25 bp, Homo sapien
tgtagatgcactccaggaataggga

SEQ ID NO: 3988582 - DNA, 25 bp, Homo sapien
ctgcaggggagttaaggaaatcagg

SEQ ID NO: 3988583 - DNA, 25 bp, Homo sapien
tgcaggggagttaaggaaatcaggg

SEQ ID NO: 3988584 - DNA, 25 bp, Homo sapien
gggagttaaggaaatcagggtcagc

SEQ ID NO: 3988585 - DNA, 25 bp, Homo sapien
agttaaggaaatcagggtcagcagt

SEQ ID NO: 3988586 - DNA, 25 bp, Homo sapien
gcccaggctatccttattagagatg

SEQ ID NO: 3988587 - DNA, 25 bp, Homo sapien
ggagcacagagcgagcttggtggtc

SEQ ID NO: 3988588 - DNA, 25 bp, Homo sapien
atggtagcagggaacgagagcccag

SEQ ID NO: 3988589 - DNA, 25 bp, Homo sapien
agcacagagcgagcttggtggtccc

SEQ ID NO: 3988590 - DNA, 25 bp, Homo sapien
gtgcccttgtgggtgttgtcaaagg

SEQ ID NO: 3988591 - DNA, 25 bp, Homo sapien
tgtgcccttgtgggtgttgtcaaag

SEQ ID NO: 3988592 - DNA, 25 bp, Homo sapien
gtgtgcccttgtgggtgttgtcaaa

SEQ ID NO: 3988593 - DNA, 25 bp, Homo sapien
tatgtctccggagaccgggattctg

SEQ ID NO: 3988594 - DNA, 25 bp, Homo sapien
tgttgtatgtctccggagaccggga

SEQ ID NO: 3988595 - DNA, 25 bp, Homo sapien
aaggaatggatgttgtatgtctccg

SEQ ID NO: 3988596 - DNA, 25 bp, Homo sapien
tggatgttgtatgtctccggagacc

SEQ ID NO: 3988597 - DNA, 25 bp, Homo sapien
ttgaaaggcaggttaaagcagacag

SEQ ID NO: 3988598 - DNA, 25 bp, Homo sapien
tatctgtagcctcggagtgattgca

SEQ ID NO: 3988599 - DNA, 25 bp, Homo sapien
gacagtgcccatcgtggtaattaaa

SEQ ID NO: 3988600 - DNA, 25 bp, Homo sapien
gtaattaaattatctgtagcctcgg

SEQ ID NO: 3988601 - DNA, 25 bp, Homo sapien
ccatggcaaaagcagcccagatcgg

SEQ ID NO: 3988602 - DNA, 25 bp, Homo sapien
gcaaaagcagcccagatcgggagct

SEQ ID NO: 3988603 - DNA, 25 bp, Homo sapien
aaagcagcccagatcgggagctgca

SEQ ID NO: 3988604 - DNA, 25 bp, Homo sapien
ctgagaacccatggcaaaagcagcc

SEQ ID NO: 3988605 - DNA, 25 bp, Homo sapien
aggtgcactgtcttcgggcagttgt

SEQ ID NO: 3988606 - DNA, 25 bp, Homo sapien
gttgcgtggctataattactgtaca

SEQ ID NO: 3988607 - DNA, 25 bp, Homo sapien
tgtcttcgggcagttgttgagtttc

SEQ ID NO: 3988608 - DNA, 25 bp, Homo sapien
tggtgggttgcgtggctataattac

SEQ ID NO: 3988609 - DNA, 25 bp, Homo sapien
gacacctcatcagtgtcttaatttt

SEQ ID NO: 3988610 - DNA, 25 bp, Homo sapien
ttttttggaagcctcttgggcatct

SEQ ID NO: 3988611 - DNA, 25 bp, Homo sapien
gagtaagatgtatcatgaacactga

SEQ ID NO: 3988612 - DNA, 25 bp, Homo sapien
gatcttacacaaggtgagtgcctct

SEQ ID NO: 3988613 - DNA, 25 bp, Homo sapien
atagggattcatgccttcagtggtc

SEQ ID NO: 3988614 - DNA, 25 bp, Homo sapien
ggattcatgccttcagtggtctgca

SEQ ID NO: 3988615 - DNA, 25 bp, Homo sapien
gaatagggattcatgccttcagtgg

SEQ ID NO: 3988616 - DNA, 25 bp, Homo sapien
ctgcttccaccagtggaaacatgac

SEQ ID NO: 3988617 - DNA, 25 bp, Homo sapien
ttaaatcttgagtggcaaatgagca

SEQ ID NO: 3988618 - DNA, 25 bp, Homo sapien
gtaagatcaggtgtattctttgaga

SEQ ID NO: 3988619 - DNA, 25 bp, Homo sapien
tgagaactgccacccaatctgtggg

SEQ ID NO: 3988620 - DNA, 25 bp, Homo sapien
tggtaagatcaggtgtattctttga

SEQ ID NO: 3988621 - DNA, 25 bp, Homo sapien
ctgccacccaatctgtgggaagttg

SEQ ID NO: 3988622 - DNA, 25 bp, Homo sapien
cactccaagtgcattactgagaaca

SEQ ID NO: 3988623 - DNA, 25 bp, Homo sapien
gaacaggtctaagagggcaaggaga

SEQ ID NO: 3988624 - DNA, 25 bp, Homo sapien
ccaagtgcattactgagaacaggtc

SEQ ID NO: 3988625 - DNA, 25 bp, Homo sapien
gcaaggagagggtacttgagggcag

SEQ ID NO: 3988626 - DNA, 25 bp, Homo sapien
ccagtcacgttgctggatgctggat

SEQ ID NO: 3988627 - DNA, 25 bp, Homo sapien
ttgttttaagcaggacggtgacagc

SEQ ID NO: 3988628 - DNA, 25 bp, Homo sapien
tgcatgcactatttccacactggtt

SEQ ID NO: 3988629 - DNA, 25 bp, Homo sapien
ggttgttttaagcaggacggtgaca

SEQ ID NO: 3988630 - DNA, 25 bp, Homo sapien
gcatgcactatttccacactggttg

SEQ ID NO: 3988631 - DNA, 25 bp, Homo sapien
cactgaggcttggtgggaccattct

SEQ ID NO: 3988632 - DNA, 25 bp, Homo sapien
atttgcatggattcactgaggcttg

SEQ ID NO: 3988633 - DNA, 25 bp, Homo sapien
ttggtgggaccattcttttgctgac

SEQ ID NO: 3988634 - DNA, 25 bp, Homo sapien
ttgcatggattcactgaggcttggt

SEQ ID NO: 3988635 - DNA, 25 bp, Homo sapien
gagtggtcgttggtggccaggcgag

SEQ ID NO: 3988636 - DNA, 25 bp, Homo sapien
tggccaggcgagtttgccacaggca

SEQ ID NO: 3988637 - DNA, 25 bp, Homo sapien
tggccgagagtggtcgttggtggcc

SEQ ID NO: 3988638 - DNA, 25 bp, Homo sapien
cagcacggccagcatggggctacat

SEQ ID NO: 3988639 - DNA, 25 bp, Homo sapien
attggcttttggctgaaacgtggct

SEQ ID NO: 3988640 - DNA, 25 bp, Homo sapien
aagagcccgctctgttttttattgg

SEQ ID NO: 3988641 - DNA, 25 bp, Homo sapien
tcttctgggcaagtggagtgtgggc

SEQ ID NO: 3988642 - DNA, 25 bp, Homo sapien
tgaaacgtggctgcgctggtcttct

SEQ ID NO: 3988643 - DNA, 25 bp, Homo sapien
ggagcatgcgttgctcggaggggaa

SEQ ID NO: 3988644 - DNA, 25 bp, Homo sapien
ggagaaacagcagtgttctctgcga

SEQ ID NO: 3988645 - DNA, 25 bp, Homo sapien
tgttctctgcgaagccagcgccggg

SEQ ID NO: 3988646 - DNA, 25 bp, Homo sapien
agccccagttggccaggcagccaga

SEQ ID NO: 3988647 - DNA, 25 bp, Homo sapien
acctggcgtcggacacagctgggat

SEQ ID NO: 3988648 - DNA, 25 bp, Homo sapien
gaacaaggacctggcgtcggacaca

SEQ ID NO: 3988649 - DNA, 25 bp, Homo sapien
gacctggcgtcggacacagctggga

SEQ ID NO: 3988650 - DNA, 25 bp, Homo sapien
aaggacctggcgtcggacacagctg

SEQ ID NO: 3988651 - DNA, 25 bp, Homo sapien
tcatccacatttgagagaggctgaa

SEQ ID NO: 3988652 - DNA, 25 bp, Homo sapien
acatttgagagaggctgaaaatctt

SEQ ID NO: 3988653 - DNA, 25 bp, Homo sapien
tccacatttgagagaggctgaaaat

SEQ ID NO: 3988654 - DNA, 25 bp, Homo sapien
gtcatccacatttgagagaggctga

SEQ ID NO: 3988655 - DNA, 25 bp, Homo sapien
ggagacaattatacaggaagcccac

SEQ ID NO: 3988656 - DNA, 25 bp, Homo sapien
tgcgatcaaatgtgacggattcctc

SEQ ID NO: 3988657 - DNA, 25 bp, Homo sapien
gaagcccactgcgatcaaatgtgac

SEQ ID NO: 3988658 - DNA, 25 bp, Homo sapien
tgtgacggattcctctctactgaac

SEQ ID NO: 3988659 - DNA, 25 bp, Homo sapien
tcaggaaaggacagtggtgtgtccc

SEQ ID NO: 3988660 - DNA, 25 bp, Homo sapien
ggaaaggacagtggtgtgtccccaa

SEQ ID NO: 3988661 - DNA, 25 bp, Homo sapien
aaaggacagtggtgtgtccccaatg

SEQ ID NO: 3988662 - DNA, 25 bp, Homo sapien
aggacagtggtgtgtccccaatgtg

SEQ ID NO: 3988663 - DNA, 25 bp, Homo sapien
tgtacaagtaaggattgctgttccc

SEQ ID NO: 3988664 - DNA, 25 bp, Homo sapien
agtaaggattgctgttccctgtccc

SEQ ID NO: 3988665 - DNA, 25 bp, Homo sapien
tggacaccatctttcacgaagtgtt

SEQ ID NO: 3988666 - DNA, 25 bp, Homo sapien
tgctgatgtacaagtaaggattgct

SEQ ID NO: 3988667 - DNA, 25 bp, Homo sapien
tggcatgccgacacgtaaaagctct

SEQ ID NO: 3988668 - DNA, 25 bp, Homo sapien
gcagcgacttctgtggagctcagtt

SEQ ID NO: 3988669 - DNA, 25 bp, Homo sapien
tgagggtcacttggtcacagcagcg

SEQ ID NO: 3988670 - DNA, 25 bp, Homo sapien
gagctcagttttggccagcacaaca

SEQ ID NO: 3988671 - DNA, 25 bp, Homo sapien
ctggcaacggagggaagacagttcc

SEQ ID NO: 3988672 - DNA, 25 bp, Homo sapien
gcaacggagggaagacagttcctac

SEQ ID NO: 3988673 - DNA, 25 bp, Homo sapien
caacggagggaagacagttcctacg

SEQ ID NO: 3988674 - DNA, 25 bp, Homo sapien
tggcaacggagggaagacagttcct

SEQ ID NO: 3988675 - DNA, 25 bp, Homo sapien
tttatgggaaatagtgaggctctta

SEQ ID NO: 3988676 - DNA, 25 bp, Homo sapien
tatgagcaggtgcataaatccatgc

SEQ ID NO: 3988677 - DNA, 25 bp, Homo sapien
tgtacaaacaaacaggaacccgtgc

SEQ ID NO: 3988678 - DNA, 25 bp, Homo sapien
acaggaacccgtgcatatttatggg

SEQ ID NO: 3988679 - DNA, 25 bp, Homo sapien
ccagtgggcacgcagtgtcgggtca

SEQ ID NO: 3988680 - DNA, 25 bp, Homo sapien
acgcagtgtcgggtcagcgcgcggg

SEQ ID NO: 3988681 - DNA, 25 bp, Homo sapien
gcagggtgcccacgttcacgggctc

SEQ ID NO: 3988682 - DNA, 25 bp, Homo sapien
acttgcacactaagagctgctttgg

SEQ ID NO: 3988683 - DNA, 25 bp, Homo sapien
tgcagatatgtgaaatactaagaag

SEQ ID NO: 3988684 - DNA, 25 bp, Homo sapien
gaaatactaagaaggatggacagga

SEQ ID NO: 3988685 - DNA, 25 bp, Homo sapien
tgcttccatgtcaaggatgctgcag

SEQ ID NO: 3988686 - DNA, 25 bp, Homo sapien
gggtgatgggcagatttgcttccat

SEQ ID NO: 3988687 - DNA, 25 bp, Homo sapien
accaggtggacaggtgagtgagaag

SEQ ID NO: 3988688 - DNA, 25 bp, Homo sapien
ctgagtgcaccaggtggacaggtga

SEQ ID NO: 3988689 - DNA, 25 bp, Homo sapien
gcaccaggtggacaggtgagtgaga

SEQ ID NO: 3988690 - DNA, 25 bp, Homo sapien
gagtgcaccaggtggacaggtgagt

SEQ ID NO: 3988691 - DNA, 25 bp, Homo sapien
cagacggcactggtgacctggggca

SEQ ID NO: 3988692 - DNA, 25 bp, Homo sapien
tctgaatccggccttttcatcatct

SEQ ID NO: 3988693 - DNA, 25 bp, Homo sapien
gctggttctgaatccggccttttca

SEQ ID NO: 3988694 - DNA, 25 bp, Homo sapien
tggtgctggttctgaatccggcctt

SEQ ID NO: 3988695 - DNA, 25 bp, Homo sapien
cagagcaaatgggacccaaatccaa

SEQ ID NO: 3988696 - DNA, 25 bp, Homo sapien
ggacccaaatccaaaattgcagcaa

SEQ ID NO: 3988697 - DNA, 25 bp, Homo sapien
caaatgggacccaaatccaaaattg

SEQ ID NO: 3988698 - DNA, 25 bp, Homo sapien
cagcaaaatgagtccagttcagggg

SEQ ID NO: 3988699 - DNA, 25 bp, Homo sapien
aacgcagctgtgttccggcccatga

SEQ ID NO: 3988700 - DNA, 25 bp, Homo sapien
cctctcagactctcgtaacgactga

SEQ ID NO: 3988701 - DNA, 25 bp, Homo sapien
taacgactgaaattggaaatggcca

SEQ ID NO: 3988702 - DNA, 25 bp, Homo sapien
cagaaacgcagctgtgttccggccc

SEQ ID NO: 3988703 - DNA, 25 bp, Homo sapien
cagagtctgtggcaaaagcccctgt

SEQ ID NO: 3988704 - DNA, 25 bp, Homo sapien
cctgtgcctccctgttgctgatgct

SEQ ID NO: 3988705 - DNA, 25 bp, Homo sapien
gatgccctcctctggcagagtctgt

SEQ ID NO: 3988706 - DNA, 25 bp, Homo sapien
tcatcatctttccctgcccagatgc

SEQ ID NO: 3988707 - DNA, 25 bp, Homo sapien
tttcttctcatgaccactcaagctc

SEQ ID NO: 3988708 - DNA, 25 bp, Homo sapien
catgtccctggttgcatcccagcac

SEQ ID NO: 3988709 - DNA, 25 bp, Homo sapien
catgaccactcaagctctggaaaag

SEQ ID NO: 3988710 - DNA, 25 bp, Homo sapien
tctcatgaccactcaagctctggaa

SEQ ID NO: 3988711 - DNA, 25 bp, Homo sapien
ccctcgggagcaatgcatttggagt

SEQ ID NO: 3988712 - DNA, 25 bp, Homo sapien
tgaccagaagctcacggcggaatct

SEQ ID NO: 3988713 - DNA, 25 bp, Homo sapien
aacggctgtgtccaccctcgggagc

SEQ ID NO: 3988714 - DNA, 25 bp, Homo sapien
gtccaagcccagtgaccagaagctc

SEQ ID NO: 3988715 - DNA, 25 bp, Homo sapien
tctttccagttctctcgtgcttctc

SEQ ID NO: 3988716 - DNA, 25 bp, Homo sapien
gccttctctgaacgccagcgcttgg

SEQ ID NO: 3988717 - DNA, 25 bp, Homo sapien
tcactacagtttccaccgatattca

SEQ ID NO: 3988718 - DNA, 25 bp, Homo sapien
catcttgttttcgatttccccaggg

SEQ ID NO: 3988719 - DNA, 25 bp, Homo sapien
ctgccttgggcagtttctcatttga

SEQ ID NO: 3988720 - DNA, 25 bp, Homo sapien
gctgccttgggcagtttctcatttg

SEQ ID NO: 3988721 - DNA, 25 bp, Homo sapien
tgccttgggcagtttctcatttgac

SEQ ID NO: 3988722 - DNA, 25 bp, Homo sapien
ggctgccaacaggaatcggcacgaa

SEQ ID NO: 3988723 - DNA, 25 bp, Homo sapien
aatcggcacgaagcctcgcagggcc

SEQ ID NO: 3988724 - DNA, 25 bp, Homo sapien
gccaacaggaatcggcacgaagcct

SEQ ID NO: 3988725 - DNA, 25 bp, Homo sapien
aggaatcggcacgaagcctcgcagg

SEQ ID NO: 3988726 - DNA, 25 bp, Homo sapien
tctccattcagggcaaagtcggcca

SEQ ID NO: 3988727 - DNA, 25 bp, Homo sapien
ctccattcagggcaaagtcggccat

SEQ ID NO: 3988728 - DNA, 25 bp, Homo sapien
tctctggccagtgaccttgcacaca

SEQ ID NO: 3988729 - DNA, 25 bp, Homo sapien
acacagctgtcccacaagtcactgt

SEQ ID NO: 3988730 - DNA, 25 bp, Homo sapien
caagtcactgttgttagcattcggg

SEQ ID NO: 3988731 - DNA, 25 bp, Homo sapien
caggtcttctctggccagtgacctt

SEQ ID NO: 3988732 - DNA, 25 bp, Homo sapien
accaggaacagtgttggcctggact

SEQ ID NO: 3988733 - DNA, 25 bp, Homo sapien
ccaggaacagtgttggcctggactt

SEQ ID NO: 3988734 - DNA, 25 bp, Homo sapien
caggaacagtgttggcctggacttc

SEQ ID NO: 3988735 - DNA, 25 bp, Homo sapien
tccggatttgggatgcacagctgtg

SEQ ID NO: 3988736 - DNA, 25 bp, Homo sapien
caggatgcacagatgttaggggttc

SEQ ID NO: 3988737 - DNA, 25 bp, Homo sapien
tgtacagttgataggggttccggat

SEQ ID NO: 3988738 - DNA, 25 bp, Homo sapien
tagggattggcgattctggatgcac

SEQ ID NO: 3988739 - DNA, 25 bp, Homo sapien
ttcccaggagaatgctcttgccagc

SEQ ID NO: 3988740 - DNA, 25 bp, Homo sapien
ccagttcccaggagaatgctcttgc

SEQ ID NO: 3988741 - DNA, 25 bp, Homo sapien
cagttcccaggagaatgctcttgcc

SEQ ID NO: 3988742 - DNA, 25 bp, Homo sapien
gttcccaggagaatgctcttgccag

SEQ ID NO: 3988743 - DNA, 25 bp, Homo sapien
gtgaagcccaggatgctccaagaac

SEQ ID NO: 3988744 - DNA, 25 bp, Homo sapien
aggtgctgacggtgaagcccaggat

SEQ ID NO: 3988745 - DNA, 25 bp, Homo sapien
acagcaggtgctgacggtgaagccc

SEQ ID NO: 3988746 - DNA, 25 bp, Homo sapien
cggtgaagcccaggatgctccaaga

SEQ ID NO: 3988747 - DNA, 25 bp, Homo sapien
tagaggctggtgctccgacctctgc

SEQ ID NO: 3988748 - DNA, 25 bp, Homo sapien
aggctggtgctccgacctctgctgg

SEQ ID NO: 3988749 - DNA, 25 bp, Homo sapien
gaggctggtgctccgacctctgctg

SEQ ID NO: 3988750 - DNA, 25 bp, Homo sapien
cgtagaggctggtgctccgacctct

SEQ ID NO: 3988751 - DNA, 25 bp, Homo sapien
agggcagctgtctctggtcagtcat

SEQ ID NO: 3988752 - DNA, 25 bp, Homo sapien
cagggcagctgtctctggtcagtca

SEQ ID NO: 3988753 - DNA, 25 bp, Homo sapien
gacccagggcagctgtctctggtca

SEQ ID NO: 3988754 - DNA, 25 bp, Homo sapien
cccagggcagctgtctctggtcagt

SEQ ID NO: 3988755 - DNA, 25 bp, Homo sapien
gccgggatctccacagccttcaatt

SEQ ID NO: 3988756 - DNA, 25 bp, Homo sapien
tgcgatggtcaaggccgggatctcc

SEQ ID NO: 3988757 - DNA, 25 bp, Homo sapien
gggcaaatgcgatggtcaaggccgg

SEQ ID NO: 3988758 - DNA, 25 bp, Homo sapien
tcaaggccgggatctccacagcctt

SEQ ID NO: 3988759 - DNA, 25 bp, Homo sapien
agtctcagggaactggagtcactta

SEQ ID NO: 3988760 - DNA, 25 bp, Homo sapien
tttcaagtccggtgaaaatgcccac

SEQ ID NO: 3988761 - DNA, 25 bp, Homo sapien
ggtctccatagccactgggacgtat

SEQ ID NO: 3988762 - DNA, 25 bp, Homo sapien
ggagtcacttaaatccccacaatga

SEQ ID NO: 3988763 - DNA, 25 bp, Homo sapien
aatgatttgtatctgtcttgaacag

SEQ ID NO: 3988764 - DNA, 25 bp, Homo sapien
gatttgtatctgtcttgaacagtgg

SEQ ID NO: 3988765 - DNA, 25 bp, Homo sapien
ctgggaaatgatttgtatctgtctt

SEQ ID NO: 3988766 - DNA, 25 bp, Homo sapien
gaaatgatttgtatctgtcttgaac

SEQ ID NO: 3988767 - DNA, 25 bp, Homo sapien
gaagatcagagacagtgtgagctac

SEQ ID NO: 3988768 - DNA, 25 bp, Homo sapien
atcagagacagtgtgagctacgggc

SEQ ID NO: 3988769 - DNA, 25 bp, Homo sapien
agatcagagacagtgtgagctacgg

SEQ ID NO: 3988770 - DNA, 25 bp, Homo sapien
ctgtgaagatcagagacagtgtgag

SEQ ID NO: 3988771 - DNA, 25 bp, Homo sapien
ggagtgcaagtgaggagacgatgta

SEQ ID NO: 3988772 - DNA, 25 bp, Homo sapien
tatgagagaggccataagggacagg

SEQ ID NO: 3988773 - DNA, 25 bp, Homo sapien
ctagtgtcagtgtggcgttggttcc

SEQ ID NO: 3988774 - DNA, 25 bp, Homo sapien
gggtccgggtgctagtgtcagtgtg

SEQ ID NO: 3988775 - DNA, 25 bp, Homo sapien
cttgcacgttggtgggtgattgcgg

SEQ ID NO: 3988776 - DNA, 25 bp, Homo sapien
cacgttggtgggtgattgcggatga

SEQ ID NO: 3988777 - DNA, 25 bp, Homo sapien
tgggtgattgcggatgaggagacca

SEQ ID NO: 3988778 - DNA, 25 bp, Homo sapien
tgattgcggatgaggagaccacagc

SEQ ID NO: 3988779 - DNA, 25 bp, Homo sapien
cacgttggtgggtgattgcggatga

SEQ ID NO: 3988780 - DNA, 25 bp, Homo sapien
cttgcacgttggtgggtgattgcgg

SEQ ID NO: 3988781 - DNA, 25 bp, Homo sapien
tgggtgattgcggatgaggagacca

SEQ ID NO: 3988782 - DNA, 25 bp, Homo sapien
tgattgcggatgaggagaccacagc

SEQ ID NO: 3988783 - DNA, 25 bp, Homo sapien
gaaacggcactcaaatgacccaagg

SEQ ID NO: 3988784 - DNA, 25 bp, Homo sapien
gaagaaacggcactcaaatgaccca

SEQ ID NO: 3988785 - DNA, 25 bp, Homo sapien
gatgaagaaacggcactcaaatgac

SEQ ID NO: 3988786 - DNA, 25 bp, Homo sapien
tgaagaaacggcactcaaatgaccc

SEQ ID NO: 3988787 - DNA, 25 bp, Homo sapien
ccagctgtgacccttcacggactcc

SEQ ID NO: 3988788 - DNA, 25 bp, Homo sapien
accgccagctgtgacccttcacgga

SEQ ID NO: 3988789 - DNA, 25 bp, Homo sapien
caccgccagctgtgacccttcacgg

SEQ ID NO: 3988790 - DNA, 25 bp, Homo sapien
cgccagctgtgacccttcacggact

SEQ ID NO: 3988791 - DNA, 25 bp, Homo sapien
gatgaaggatcactcgtcaaggctg

SEQ ID NO: 3988792 - DNA, 25 bp, Homo sapien
gatgcaggcagagagccgtcactag

SEQ ID NO: 3988793 - DNA, 25 bp, Homo sapien
gatcactcgtcaaggctgaagaatg

SEQ ID NO: 3988794 - DNA, 25 bp, Homo sapien
ccgtcactagcgatgaaggatcact

SEQ ID NO: 3988795 - DNA, 25 bp, Homo sapien
ggggttctgggacaggatcactctt

SEQ ID NO: 3988796 - DNA, 25 bp, Homo sapien
ggttctgggacaggatcactcttga

SEQ ID NO: 3988797 - DNA, 25 bp, Homo sapien
cattctctttgccctcactttgctc

SEQ ID NO: 3988798 - DNA, 25 bp, Homo sapien
gttctgggacaggatcactcttgac

SEQ ID NO: 3988799 - DNA, 25 bp, Homo sapien
tgtaattctgctggcaatgcccgtc

SEQ ID NO: 3988800 - DNA, 25 bp, Homo sapien
gctggcaatgcccgtctttagaccc

SEQ ID NO: 3988801 - DNA, 25 bp, Homo sapien
cacaggcgggagctgtaattctgct

SEQ ID NO: 3988802 - DNA, 25 bp, Homo sapien
ctccaggcacacaggcgggagctgt

SEQ ID NO: 3988803 - DNA, 25 bp, Homo sapien
agtcccgggtcgtactccctctgag

SEQ ID NO: 3988804 - DNA, 25 bp, Homo sapien
gagcccaggtgccttcttggctgag

SEQ ID NO: 3988805 - DNA, 25 bp, Homo sapien
tcttggctgagccactgtctgtacc

SEQ ID NO: 3988806 - DNA, 25 bp, Homo sapien
gccactgtctgtacctgtgccgtta

SEQ ID NO: 3988807 - DNA, 25 bp, Homo sapien
gccaccctgcggatttgaggccaaa

SEQ ID NO: 3988808 - DNA, 25 bp, Homo sapien
ctttgcggagtggatttgcgctcac

SEQ ID NO: 3988809 - DNA, 25 bp, Homo sapien
ccccaagagaggtgtggttgtacgc

SEQ ID NO: 3988810 - DNA, 25 bp, Homo sapien
aaatgctgtagtctcccggaggatt

SEQ ID NO: 3988811 - DNA, 25 bp, Homo sapien
gtcaggtggtctggggagcttggct

SEQ ID NO: 3988812 - DNA, 25 bp, Homo sapien
ggtcaggtggtctggggagcttggc

SEQ ID NO: 3988813 - DNA, 25 bp, Homo sapien
ctggggagcttggctttgctgcttt

SEQ ID NO: 3988814 - DNA, 25 bp, Homo sapien
gggagcttggctttgctgctttgct

SEQ ID NO: 3988815 - DNA, 25 bp, Homo sapien
gaagggtgcggaatggcccatgagg

SEQ ID NO: 3988816 - DNA, 25 bp, Homo sapien
cacaaagggtgctccggccaggctc

SEQ ID NO: 3988817 - DNA, 25 bp, Homo sapien
tcccatggggagtccacaaagggtg

SEQ ID NO: 3988818 - DNA, 25 bp, Homo sapien
ctgagtgaagggtgcggaatggccc

SEQ ID NO: 3988819 - DNA, 25 bp, Homo sapien
tccactgagcccaagatgctgctgc

SEQ ID NO: 3988820 - DNA, 25 bp, Homo sapien
tgccacctgctccactgagcccaag

SEQ ID NO: 3988821 - DNA, 25 bp, Homo sapien
ctgctccactgagcccaagatgctg

SEQ ID NO: 3988822 - DNA, 25 bp, Homo sapien
ctccactgagcccaagatgctgctg

SEQ ID NO: 3988823 - DNA, 25 bp, Homo sapien
tgtcatcacactccactcagaccca

SEQ ID NO: 3988824 - DNA, 25 bp, Homo sapien
gtcatcacactccactcagacccac

SEQ ID NO: 3988825 - DNA, 25 bp, Homo sapien
tgggtgtcatcacactccactcaga

SEQ ID NO: 3988826 - DNA, 25 bp, Homo sapien
ggtgtcatcacactccactcagacc

SEQ ID NO: 3988827 - DNA, 25 bp, Homo sapien
ggccgggaaaatagaagtgctgtaa

SEQ ID NO: 3988828 - DNA, 25 bp, Homo sapien
acacgagtctgggttcacttcgcaa

SEQ ID NO: 3988829 - DNA, 25 bp, Homo sapien
ctggcaggacggaggtttgtggaac

SEQ ID NO: 3988830 - DNA, 25 bp, Homo sapien
agcgcacgtggatggatttattgaa

SEQ ID NO: 3988831 - DNA, 25 bp, Homo sapien
gcatgcttgtcacacggatatctgc

SEQ ID NO: 3988832 - DNA, 25 bp, Homo sapien
cacacggatatctgcacacatgagc

SEQ ID NO: 3988833 - DNA, 25 bp, Homo sapien
gcttgtcacacggatatctgcacac

SEQ ID NO: 3988834 - DNA, 25 bp, Homo sapien
cggatatctgcacacatgagctcca

SEQ ID NO: 3988835 - DNA, 25 bp, Homo sapien
agagctcccagactcttggccttca

SEQ ID NO: 3988836 - DNA, 25 bp, Homo sapien
gcagagctcccagactcttggcctt

SEQ ID NO: 3988837 - DNA, 25 bp, Homo sapien
ctgcagagctcccagactcttggcc

SEQ ID NO: 3988838 - DNA, 25 bp, Homo sapien
gagctcccagactcttggccttcat

SEQ ID NO: 3988839 - DNA, 25 bp, Homo sapien
ggcttcgccgctggtgagaaaccac

SEQ ID NO: 3988840 - DNA, 25 bp, Homo sapien
aatacgcaactgctgagctgtggag

SEQ ID NO: 3988841 - DNA, 25 bp, Homo sapien
aaaccacagccctgagatctgatct

SEQ ID NO: 3988842 - DNA, 25 bp, Homo sapien
aatgggcagcgctgctgtttggaga

SEQ ID NO: 3988843 - DNA, 25 bp, Homo sapien
tgggcccactgtgttatacaggtcc

SEQ ID NO: 3988844 - DNA, 25 bp, Homo sapien
cctgggcccactgtgttatacaggt

SEQ ID NO: 3988845 - DNA, 25 bp, Homo sapien
actgtgttatacaggtccccacaca

SEQ ID NO: 3988846 - DNA, 25 bp, Homo sapien
gtgttatacaggtccccacacagag

SEQ ID NO: 3988847 - DNA, 25 bp, Homo sapien
gccaggaggtttattttggagccca

SEQ ID NO: 3988848 - DNA, 25 bp, Homo sapien
caggttctgtcctggagttggctcc

SEQ ID NO: 3988849 - DNA, 25 bp, Homo sapien
tttggagcccaggtagctcatagca

SEQ ID NO: 3988850 - DNA, 25 bp, Homo sapien
ttagtgctcgtggtgatggtgctgt

SEQ ID NO: 3988851 - DNA, 25 bp, Homo sapien
tcaacatggcttgcaagaccatcag

SEQ ID NO: 3988852 - DNA, 25 bp, Homo sapien
tatcaacatggcttgcaagaccatc

SEQ ID NO: 3988853 - DNA, 25 bp, Homo sapien
atatcaacatggcttgcaagaccat

SEQ ID NO: 3988854 - DNA, 25 bp, Homo sapien
ggtgccttcagggtctccaaagggc

SEQ ID NO: 3988855 - DNA, 25 bp, Homo sapien
tccatccagggtgccttcagggtct

SEQ ID NO: 3988856 - DNA, 25 bp, Homo sapien
tgccttcagggtctccaaagggcat

SEQ ID NO: 3988857 - DNA, 25 bp, Homo sapien
cttccatccagggtgccttcagggt

SEQ ID NO: 3988858 - DNA, 25 bp, Homo sapien
tgaaagcccccgattgcccacaatt

SEQ ID NO: 3988859 - DNA, 25 bp, Homo sapien
tttccagatgatgccctggagtctc

SEQ ID NO: 3988860 - DNA, 25 bp, Homo sapien
gagtctcaggcttaaagcttctcta

SEQ ID NO: 3988861 - DNA, 25 bp, Homo sapien
ctccatggctgaaagcccccgattg

SEQ ID NO: 3988862 - DNA, 25 bp, Homo sapien
tggcacctctgctgcgcttcctcgg

SEQ ID NO: 3988863 - DNA, 25 bp, Homo sapien
aaagctgcagagaaaccgacttcgg

SEQ ID NO: 3988864 - DNA, 25 bp, Homo sapien
ggtgggggctgatccaaagctgcag

SEQ ID NO: 3988865 - DNA, 25 bp, Homo sapien
cagggtctggtttaagtggcacctc

SEQ ID NO: 3988866 - DNA, 25 bp, Homo sapien
gaatccatattctcggtgccatccg

SEQ ID NO: 3988867 - DNA, 25 bp, Homo sapien
catccggacagtcgagggtgccatt

SEQ ID NO: 3988868 - DNA, 25 bp, Homo sapien
tgtcagcttgtgagcagcgctgccc

SEQ ID NO: 3988869 - DNA, 25 bp, Homo sapien
cagagtgagtgcttcgctaaacgag

SEQ ID NO: 3988870 - DNA, 25 bp, Homo sapien
ttgttctcagcacccgaacacaagc

SEQ ID NO: 3988871 - DNA, 25 bp, Homo sapien
gcgggatggcctcccgtggacactg

SEQ ID NO: 3988872 - DNA, 25 bp, Homo sapien
gtttctctcgcagtattgttctcag

SEQ ID NO: 3988873 - DNA, 25 bp, Homo sapien
atgcgtgtttctctcgcagtattgt

SEQ ID NO: 3988874 - DNA, 25 bp, Homo sapien
cagtctcgccgtatgtaagtcagga

SEQ ID NO: 3988875 - DNA, 25 bp, Homo sapien
ggcctcctggcgtcttcaaattgaa

SEQ ID NO: 3988876 - DNA, 25 bp, Homo sapien
aattgaacccgagaaggatcagagc

SEQ ID NO: 3988877 - DNA, 25 bp, Homo sapien
taagtcaggacgtcctcagagcgct

SEQ ID NO: 3988878 - DNA, 25 bp, Homo sapien
gcaggtagtaccccacccgcaggga

SEQ ID NO: 3988879 - DNA, 25 bp, Homo sapien
ccgcaggtagtaccccacccgcagg

SEQ ID NO: 3988880 - DNA, 25 bp, Homo sapien
caggtagtaccccacccgcagggag

SEQ ID NO: 3988881 - DNA, 25 bp, Homo sapien
cgcaggtagtaccccacccgcaggg

SEQ ID NO: 3988882 - DNA, 25 bp, Homo sapien
gagcaccccaccagcagggagcacc

SEQ ID NO: 3988883 - DNA, 25 bp, Homo sapien
accccaccagcagggagcaccccac

SEQ ID NO: 3988884 - DNA, 25 bp, Homo sapien
gcaccccaccagcagggagcacccc

SEQ ID NO: 3988885 - DNA, 25 bp, Homo sapien
cttcagggagcaccccaccagcagg

SEQ ID NO: 3988886 - DNA, 25 bp, Homo sapien
tcacacctgcaccatctgcccttca

SEQ ID NO: 3988887 - DNA, 25 bp, Homo sapien
acctgcaccatctgcccttcaccct

SEQ ID NO: 3988888 - DNA, 25 bp, Homo sapien
cctgcaccatctgcccttcaccctg

SEQ ID NO: 3988889 - DNA, 25 bp, Homo sapien
acacctgcaccatctgcccttcacc

SEQ ID NO: 3988890 - DNA, 25 bp, Homo sapien
gggatagccatatttcgctggtcac

SEQ ID NO: 3988891 - DNA, 25 bp, Homo sapien
caccttctgtggtcgctggtaccca

SEQ ID NO: 3988892 - DNA, 25 bp, Homo sapien
tggtcgctggtacccaaggcatttg

SEQ ID NO: 3988893 - DNA, 25 bp, Homo sapien
tataaccttcatgacgaacttgatg

SEQ ID NO: 3988894 - DNA, 25 bp, Homo sapien
gcaggaagccaatgccacagcccat

SEQ ID NO: 3988895 - DNA, 25 bp, Homo sapien
tgccattattttcaaaaccaaacac

SEQ ID NO: 3988896 - DNA, 25 bp, Homo sapien
aaaccaaacacctcaggctttgtgg

SEQ ID NO: 3988897 - DNA, 25 bp, Homo sapien
accaaacacctcaggctttgtggac

SEQ ID NO: 3988898 - DNA, 25 bp, Homo sapien
caaaaccaaacacctcaggctttgt

SEQ ID NO: 3988899 - DNA, 25 bp, Homo sapien
tcctggcgaaggatgtaaatccagc

SEQ ID NO: 3988900 - DNA, 25 bp, Homo sapien
tttcgttgtgtgctgaaatgtcagc

SEQ ID NO: 3988901 - DNA, 25 bp, Homo sapien
tgtcagcattaacaaaatcacgggg

SEQ ID NO: 3988902 - DNA, 25 bp, Homo sapien
caaaatcacggggagaaactgtgca

SEQ ID NO: 3988903 - DNA, 25 bp, Homo sapien
ggagcctgagcatccttcatcgcca

SEQ ID NO: 3988904 - DNA, 25 bp, Homo sapien
aagtttaaatgtgagcccatgctca

SEQ ID NO: 3988905 - DNA, 25 bp, Homo sapien
aacccctgtgagctcttgatggaaa

SEQ ID NO: 3988906 - DNA, 25 bp, Homo sapien
ttcatcgccaacacctgggtgcaca

SEQ ID NO: 3988907 - DNA, 25 bp, Homo sapien
ccctgggaacgttgctgctcaagaa

SEQ ID NO: 3988908 - DNA, 25 bp, Homo sapien
gccttgtttcacctggtagcttcca

SEQ ID NO: 3988909 - DNA, 25 bp, Homo sapien
tcaagaaggacagtgctgctggcga

SEQ ID NO: 3988910 - DNA, 25 bp, Homo sapien
gcacgacgcgagaaagcacaggttg

SEQ ID NO: 3988911 - DNA, 25 bp, Homo sapien
gctctgctgacgatggagcggcagc

SEQ ID NO: 3988912 - DNA, 25 bp, Homo sapien
agcctggctctgctgacgatggagc

SEQ ID NO: 3988913 - DNA, 25 bp, Homo sapien
ctggctctgctgacgatggagcggc

SEQ ID NO: 3988914 - DNA, 25 bp, Homo sapien
ctctgctgacgatggagcggcagct

SEQ ID NO: 3988915 - DNA, 25 bp, Homo sapien
ggatccggcaatgcgcagagggtct

SEQ ID NO: 3988916 - DNA, 25 bp, Homo sapien
ttctgccggatccggcaatgcgcag

SEQ ID NO: 3988917 - DNA, 25 bp, Homo sapien
cggcaatgcgcagagggtctggact

SEQ ID NO: 3988918 - DNA, 25 bp, Homo sapien
tgccggatccggcaatgcgcagagg

SEQ ID NO: 3988919 - DNA, 25 bp, Homo sapien
gacccatgcagcacacaaggagaag

SEQ ID NO: 3988920 - DNA, 25 bp, Homo sapien
tcagacaagagagtgtgggacccat

SEQ ID NO: 3988921 - DNA, 25 bp, Homo sapien
ttctctgagatgacagcgggcactg

SEQ ID NO: 3988922 - DNA, 25 bp, Homo sapien
ctcaggcactacagcagctagagag

SEQ ID NO: 3988923 - DNA, 25 bp, Homo sapien
actccggaagtcaggcgggtgctct

SEQ ID NO: 3988924 - DNA, 25 bp, Homo sapien
cccattccgactccggaagtcaggc

SEQ ID NO: 3988925 - DNA, 25 bp, Homo sapien
aagtcaggcgggtgctctcctacca

SEQ ID NO: 3988926 - DNA, 25 bp, Homo sapien
attccgactccggaagtcaggcggg

SEQ ID NO: 3988927 - DNA, 25 bp, Homo sapien
acactgtcatccgaggaggccacag

SEQ ID NO: 3988928 - DNA, 25 bp, Homo sapien
gtttgattcccggaggctccctcca

SEQ ID NO: 3988929 - DNA, 25 bp, Homo sapien
agggctcgttctggcccctgggtag

SEQ ID NO: 3988930 - DNA, 25 bp, Homo sapien
ccctccagggctcgttctggcccct

SEQ ID NO: 3988931 - DNA, 25 bp, Homo sapien
cagctggcttccctgctgctggctc

SEQ ID NO: 3988932 - DNA, 25 bp, Homo sapien
gctggcttccctgctgctggctcac

SEQ ID NO: 3988933 - DNA, 25 bp, Homo sapien
tcagcagggcggcagctggcttccc

SEQ ID NO: 3988934 - DNA, 25 bp, Homo sapien
ggcagctggcttccctgctgctggc

SEQ ID NO: 3988935 - DNA, 25 bp, Homo sapien
catggactcagtgtatggctgccca

SEQ ID NO: 3988936 - DNA, 25 bp, Homo sapien
ttcctgatgggtagacagaccctct

SEQ ID NO: 3988937 - DNA, 25 bp, Homo sapien
tgggtagacagaccctctagacccc

SEQ ID NO: 3988938 - DNA, 25 bp, Homo sapien
aggccccgtggatacgtctacactc

SEQ ID NO: 3988939 - DNA, 25 bp, Homo sapien
ggctagaccgtggcagcatgcggtg

SEQ ID NO: 3988940 - DNA, 25 bp, Homo sapien
ccaggctagaccgtggcagcatgcg

SEQ ID NO: 3988941 - DNA, 25 bp, Homo sapien
cccaggctagaccgtggcagcatgc

SEQ ID NO: 3988942 - DNA, 25 bp, Homo sapien
caggctagaccgtggcagcatgcgg

SEQ ID NO: 3988943 - DNA, 25 bp, Homo sapien
ttggatttgtcccgttctccctgac

SEQ ID NO: 3988944 - DNA, 25 bp, Homo sapien
tgttggatttgtcccgttctccctg

SEQ ID NO: 3988945 - DNA, 25 bp, Homo sapien
tcagtcccgtttgttggatttgtcc

SEQ ID NO: 3988946 - DNA, 25 bp, Homo sapien
gttggatttgtcccgttctccctga

SEQ ID NO: 3988947 - DNA, 25 bp, Homo sapien
gggtgggggagactagtgacgtgtc

SEQ ID NO: 3988948 - DNA, 25 bp, Homo sapien
gggccgggtatctagcccagggcga

SEQ ID NO: 3988949 - DNA, 25 bp, Homo sapien
tcctggggccgggtatctagcccag

SEQ ID NO: 3988950 - DNA, 25 bp, Homo sapien
gggtatctagcccagggcgatgcat

SEQ ID NO: 3988951 - DNA, 25 bp, Homo sapien
gccgggtatctagcccagggcgatg

SEQ ID NO: 3988952 - DNA, 25 bp, Homo sapien
ctaggttatggtggacagttctcca

SEQ ID NO: 3988953 - DNA, 25 bp, Homo sapien
aaagcagatgctgtaggcctcagag

SEQ ID NO: 3988954 - DNA, 25 bp, Homo sapien
aaagcaggtaaagcagatgctgtag

SEQ ID NO: 3988955 - DNA, 25 bp, Homo sapien
ggcagaggggctaactgccaagttc

SEQ ID NO: 3988956 - DNA, 25 bp, Homo sapien
ggtgcggagtctggcaccaggttgt

SEQ ID NO: 3988957 - DNA, 25 bp, Homo sapien
tgcggagtctggcaccaggttgtct

SEQ ID NO: 3988958 - DNA, 25 bp, Homo sapien
ctgggtgcggagtctggcaccaggt

SEQ ID NO: 3988959 - DNA, 25 bp, Homo sapien
ggagtctggcaccaggttgtcttca

SEQ ID NO: 3988960 - DNA, 25 bp, Homo sapien
tcaaagccgccacagagcctttatc

SEQ ID NO: 3988961 - DNA, 25 bp, Homo sapien
gccacagagcctttatccgagacca

SEQ ID NO: 3988962 - DNA, 25 bp, Homo sapien
gagcctttatccgagaccatctcac

SEQ ID NO: 3988963 - DNA, 25 bp, Homo sapien
cttggcttcaaagccgccacagagc

SEQ ID NO: 3988964 - DNA, 25 bp, Homo sapien
gaactggaacctcttggttgcaaac

SEQ ID NO: 3988965 - DNA, 25 bp, Homo sapien
gaacctcttggttgcaaacagcatt

SEQ ID NO: 3988966 - DNA, 25 bp, Homo sapien
tcttggttgcaaacagcattggctg

SEQ ID NO: 3988967 - DNA, 25 bp, Homo sapien
acagcattggctgatgctgcaccca

SEQ ID NO: 3988968 - DNA, 25 bp, Homo sapien
agttgaagtctgacccgactccact

SEQ ID NO: 3988969 - DNA, 25 bp, Homo sapien
gagttgaagtctgacccgactccac

SEQ ID NO: 3988970 - DNA, 25 bp, Homo sapien
agagttgaagtctgacccgactcca

SEQ ID NO: 3988971 - DNA, 25 bp, Homo sapien
tggagggtggaggattccgtgggtg

SEQ ID NO: 3988972 - DNA, 25 bp, Homo sapien
tgtcatccacaagccttcaggcaag

SEQ ID NO: 3988973 - DNA, 25 bp, Homo sapien
ccatccatgggcgaagagaagacta

SEQ ID NO: 3988974 - DNA, 25 bp, Homo sapien
agaagactagaaggctccacatccc

SEQ ID NO: 3988975 - DNA, 25 bp, Homo sapien
ggcaaagaagatccttgggtcccca

SEQ ID NO: 3988976 - DNA, 25 bp, Homo sapien
gcggctccatgctccggggagacgt

SEQ ID NO: 3988977 - DNA, 25 bp, Homo sapien
gcaggaggctttccacgctttttgg

SEQ ID NO: 3988978 - DNA, 25 bp, Homo sapien
gagcttgcctggaaatgtctgcgaa

SEQ ID NO: 3988979 - DNA, 25 bp, Homo sapien
ggaacacggagttttgactgagctc

SEQ ID NO: 3988980 - DNA, 25 bp, Homo sapien
gagctccttgacaaacccagtcatg

SEQ ID NO: 3988981 - DNA, 25 bp, Homo sapien
acgcctggaccagccatagatgtgg

SEQ ID NO: 3988982 - DNA, 25 bp, Homo sapien
aggaccatcggcaggaggagcccac

SEQ ID NO: 3988983 - DNA, 25 bp, Homo sapien
gatgtggagacttctgttctgaaag

SEQ ID NO: 3988984 - DNA, 25 bp, Homo sapien
atggccacgcctggaccagccatag

SEQ ID NO: 3988985 - DNA, 25 bp, Homo sapien
caaacaaggaactataatggcccct

SEQ ID NO: 3988986 - DNA, 25 bp, Homo sapien
tttcatgcttaacaggacctggttc

SEQ ID NO: 3988987 - DNA, 25 bp, Homo sapien
cctggtggacgcctgtttcctcagc

SEQ ID NO: 3988988 - DNA, 25 bp, Homo sapien
gatgcatttgccaagcggtccttct

SEQ ID NO: 3988989 - DNA, 25 bp, Homo sapien
gctgtccttccgaggagcagtgggg

SEQ ID NO: 3988990 - DNA, 25 bp, Homo sapien
aagtggagattaggttgaaagattt

SEQ ID NO: 3988991 - DNA, 25 bp, Homo sapien
agtggagattaggttgaaagatttt

SEQ ID NO: 3988992 - DNA, 25 bp, Homo sapien
gtggagattaggttgaaagatttta

SEQ ID NO: 3988993 - DNA, 25 bp, Homo sapien
gctgagtcatcagataagggctcca

SEQ ID NO: 3988994 - DNA, 25 bp, Homo sapien
taagggctccaagtgtgattctggg

SEQ ID NO: 3988995 - DNA, 25 bp, Homo sapien
gtcatcagataagggctccaagtgt

SEQ ID NO: 3988996 - DNA, 25 bp, Homo sapien
gcagcagctgagtcatcagataagg

SEQ ID NO: 3988997 - DNA, 25 bp, Homo sapien
ccagaagaaggatggattccagggc

SEQ ID NO: 3988998 - DNA, 25 bp, Homo sapien
agacgttgagctccccttgtccaca

SEQ ID NO: 3988999 - DNA, 25 bp, Homo sapien
gtcaactgtgcaaggctctgtccag

SEQ ID NO: 3989000 - DNA, 25 bp, Homo sapien
ggcccagccaagaagagtgcagcat

SEQ ID NO: 3989001 - DNA, 25 bp, Homo sapien
cagggtctggaccagccgaacccag

SEQ ID NO: 3989002 - DNA, 25 bp, Homo sapien
tctggaccagccgaacccagaaaaa

SEQ ID NO: 3989003 - DNA, 25 bp, Homo sapien
gccagggtctggaccagccgaaccc

SEQ ID NO: 3989004 - DNA, 25 bp, Homo sapien
gggtctggaccagccgaacccagaa

SEQ ID NO: 3989005 - DNA, 25 bp, Homo sapien
gctgatgattgtcacaaaagtccca

SEQ ID NO: 3989006 - DNA, 25 bp, Homo sapien
agctgatgattgtcacaaaagtccc

SEQ ID NO: 3989007 - DNA, 25 bp, Homo sapien
taaaaacatttgtaaacaagctgat

SEQ ID NO: 3989008 - DNA, 25 bp, Homo sapien
tgaatactaggaacatcgatagcgg

SEQ ID NO: 3989009 - DNA, 25 bp, Homo sapien
tagatacagatgaatactaggaaca

SEQ ID NO: 3989010 - DNA, 25 bp, Homo sapien
acatcgatagcggttgctactaagt

SEQ ID NO: 3989011 - DNA, 25 bp, Homo sapien
aagatttctgtcatctagatacaga

SEQ ID NO: 3989012 - DNA, 25 bp, Homo sapien
cattcgtctgtgttgcctcgtatca

SEQ ID NO: 3989013 - DNA, 25 bp, Homo sapien
tcatgcagttcaggtaaatggactc

SEQ ID NO: 3989014 - DNA, 25 bp, Homo sapien
gaagtgagacaatttccgtccttct

SEQ ID NO: 3989015 - DNA, 25 bp, Homo sapien
ccgtccttctaatcacaaacttgca

SEQ ID NO: 3989016 - DNA, 25 bp, Homo sapien
aagccaggttgccagcgggcattaa

SEQ ID NO: 3989017 - DNA, 25 bp, Homo sapien
gccaggttgccagcgggcattaagt

SEQ ID NO: 3989018 - DNA, 25 bp, Homo sapien
ggttgccagcgggcattaagttcca

SEQ ID NO: 3989019 - DNA, 25 bp, Homo sapien
caggttgccagcgggcattaagttc

SEQ ID NO: 3989020 - DNA, 25 bp, Homo sapien
ttggttctggcttgcttgccatgtg

SEQ ID NO: 3989021 - DNA, 25 bp, Homo sapien
cctttatttgaatcacacctgcctt

SEQ ID NO: 3989022 - DNA, 25 bp, Homo sapien
cacctgccttcaaattgccattggt

SEQ ID NO: 3989023 - DNA, 25 bp, Homo sapien
tgaagtcctttatttgaatcacacc

SEQ ID NO: 3989024 - DNA, 25 bp, Homo sapien
aatacaagtgaggggtatctgggga

SEQ ID NO: 3989025 - DNA, 25 bp, Homo sapien
caatacaagtgaggggtatctgggg

SEQ ID NO: 3989026 - DNA, 25 bp, Homo sapien
atacaagtgaggggtatctggggag

SEQ ID NO: 3989027 - DNA, 25 bp, Homo sapien
tcaatacaagtgaggggtatctggg

SEQ ID NO: 3989028 - DNA, 25 bp, Homo sapien
agagagctagctcaccacggaggta

SEQ ID NO: 3989029 - DNA, 25 bp, Homo sapien
gatgcagagagctagctcaccacgg

SEQ ID NO: 3989030 - DNA, 25 bp, Homo sapien
caggtagttaccccacggagccacg

SEQ ID NO: 3989031 - DNA, 25 bp, Homo sapien
tggaaggtaaccaggaccagagacc

SEQ ID NO: 3989032 - DNA, 25 bp, Homo sapien
aaacagcccagtgtccggggaggct

SEQ ID NO: 3989033 - DNA, 25 bp, Homo sapien
caaggatggatgaatggcatgagtc

SEQ ID NO: 3989034 - DNA, 25 bp, Homo sapien
tagggctttggtgggaggagtcaag

SEQ ID NO: 3989035 - DNA, 25 bp, Homo sapien
taagtcaggtgctgaagaccccgat

SEQ ID NO: 3989036 - DNA, 25 bp, Homo sapien
tctcaagtgttgctccataaagtgg

SEQ ID NO: 3989037 - DNA, 25 bp, Homo sapien
cacagagaacccctgtggtgcctct

SEQ ID NO: 3989038 - DNA, 25 bp, Homo sapien
cataaagtggcacagagaacccctg

SEQ ID NO: 3989039 - DNA, 25 bp, Homo sapien
tcacaggttacctggtccttctcaa

SEQ ID NO: 3989040 - DNA, 25 bp, Homo sapien
gctaggtctccagtctgtggaagcc

SEQ ID NO: 3989041 - DNA, 25 bp, Homo sapien
aggtctccagtctgtggaagccgcg

SEQ ID NO: 3989042 - DNA, 25 bp, Homo sapien
gcagcctgctaggtctccagtctgt

SEQ ID NO: 3989043 - DNA, 25 bp, Homo sapien
cctgctaggtctccagtctgtggaa

SEQ ID NO: 3989044 - DNA, 25 bp, Homo sapien
atcccagatgtcagactctacccac

SEQ ID NO: 3989045 - DNA, 25 bp, Homo sapien
ggaatcccagatgtcagactctacc

SEQ ID NO: 3989046 - DNA, 25 bp, Homo sapien
ctgcccctggaatcccagatgtcag

SEQ ID NO: 3989047 - DNA, 25 bp, Homo sapien
tgcccctggaatcccagatgtcaga

SEQ ID NO: 3989048 - DNA, 25 bp, Homo sapien
tccatgttgacctctggaatccatg

SEQ ID NO: 3989049 - DNA, 25 bp, Homo sapien
gggctggctctaaccggccatcttc

SEQ ID NO: 3989050 - DNA, 25 bp, Homo sapien
tcgaggtttcttgcggctggttggt

SEQ ID NO: 3989051 - DNA, 25 bp, Homo sapien
tctaaccggccatcttccatgttga

SEQ ID NO: 3989052 - DNA, 25 bp, Homo sapien
tttcttgaggcagggagccaacacg

SEQ ID NO: 3989053 - DNA, 25 bp, Homo sapien
catgcctcaggtatgcaatgtccaa

SEQ ID NO: 3989054 - DNA, 25 bp, Homo sapien
tccatagcctaggtacatgcctcag

SEQ ID NO: 3989055 - DNA, 25 bp, Homo sapien
caacaggccaaggtaagttttcttg

SEQ ID NO: 3989056 - DNA, 25 bp, Homo sapien
ggagggctccagcagactgacaggg

SEQ ID NO: 3989057 - DNA, 25 bp, Homo sapien
gcccattcacagttgataaactgat

SEQ ID NO: 3989058 - DNA, 25 bp, Homo sapien
ccattcacagttgataaactgatca

SEQ ID NO: 3989059 - DNA, 25 bp, Homo sapien
cccattcacagttgataaactgatc

SEQ ID NO: 3989060 - DNA, 25 bp, Homo sapien
cattcacagttgataaactgatcat

SEQ ID NO: 3989061 - DNA, 25 bp, Homo sapien
ggcctggccttggtcattgctgacg

SEQ ID NO: 3989062 - DNA, 25 bp, Homo sapien
ctggcctggccttggtcattgctga

SEQ ID NO: 3989063 - DNA, 25 bp, Homo sapien
tggcctggccttggtcattgctgac

SEQ ID NO: 3989064 - DNA, 25 bp, Homo sapien
ctgcagggctcacatcccacaccct

SEQ ID NO: 3989065 - DNA, 25 bp, Homo sapien
gcccacaccccgcatccctccaggg

SEQ ID NO: 3989066 - DNA, 25 bp, Homo sapien
acaccccgcatccctccagggccca

SEQ ID NO: 3989067 - DNA, 25 bp, Homo sapien
acaccccacatccctccagggccca

SEQ ID NO: 3989068 - DNA, 25 bp, Homo sapien
accccgcatccctccagggtccaca

SEQ ID NO: 3989069 - DNA, 25 bp, Homo sapien
gcaggactccatgatcatcgtccgt

SEQ ID NO: 3989070 - DNA, 25 bp, Homo sapien
catgatcatcgtccgtggacacagg

SEQ ID NO: 3989071 - DNA, 25 bp, Homo sapien
catcgtccgtggacacaggatagga

SEQ ID NO: 3989072 - DNA, 25 bp, Homo sapien
caggataggacaccatggtcatcct

SEQ ID NO: 3989073 - DNA, 25 bp, Homo sapien
tcatggtctcgggacacaggatagg

SEQ ID NO: 3989074 - DNA, 25 bp, Homo sapien
catggtctcgggacacaggatagga

SEQ ID NO: 3989075 - DNA, 25 bp, Homo sapien
tggtggtcatcctccgggactcagg

SEQ ID NO: 3989076 - DNA, 25 bp, Homo sapien
gatgtcatggttatcatccatggac

SEQ ID NO: 3989077 - DNA, 25 bp, Homo sapien
cagggcaggagacgatggtcatcat

SEQ ID NO: 3989078 - DNA, 25 bp, Homo sapien
gagacgatggtcatcatcccaggat

SEQ ID NO: 3989079 - DNA, 25 bp, Homo sapien
ccacttctcaccgagaaagtgggtg

SEQ ID NO: 3989080 - DNA, 25 bp, Homo sapien
agaccacttctcaccgagaaagtgg

SEQ ID NO: 3989081 - DNA, 25 bp, Homo sapien
accacttctcaccgagaaagtgggt

SEQ ID NO: 3989082 - DNA, 25 bp, Homo sapien
gaccacttctcaccgagaaagtggg

SEQ ID NO: 3989083 - DNA, 25 bp, Homo sapien
gacacatcaaataaaccgatttcag

SEQ ID NO: 3989084 - DNA, 25 bp, Homo sapien
gagtctggtgccttacgactgagaa

SEQ ID NO: 3989085 - DNA, 25 bp, Homo sapien
aataaaccgatttcagagtctggtg

SEQ ID NO: 3989086 - DNA, 25 bp, Homo sapien
agagtctggtgccttacgactgaga

SEQ ID NO: 3989087 - DNA, 25 bp, Homo sapien
gctcctcctcaaagtagaggctgag

SEQ ID NO: 3989088 - DNA, 25 bp, Homo sapien
gccggctcccagaggacagatgctg

SEQ ID NO: 3989089 - DNA, 25 bp, Homo sapien
ctcctcaaagtagaggctgaggcca

SEQ ID NO: 3989090 - DNA, 25 bp, Homo sapien
tcccagaggacagatgctgtggagc

SEQ ID NO: 3989091 - DNA, 25 bp, Homo sapien
aatcagaaccaggtatcccagagcc

SEQ ID NO: 3989092 - DNA, 25 bp, Homo sapien
gctgcaaatcagaaccaggtatccc

SEQ ID NO: 3989093 - DNA, 25 bp, Homo sapien
tatggctgcaaatcagaaccaggta

SEQ ID NO: 3989094 - DNA, 25 bp, Homo sapien
accaggtatcccagagcccagatga

SEQ ID NO: 3989095 - DNA, 25 bp, Homo sapien
ccagcttccttgacacccctgtggc

SEQ ID NO: 3989096 - DNA, 25 bp, Homo sapien
gtccagcttccttgacacccctgtg

SEQ ID NO: 3989097 - DNA, 25 bp, Homo sapien
acgtccagcttccttgacacccctg

SEQ ID NO: 3989098 - DNA, 25 bp, Homo sapien
tcacgtccagcttccttgacacccc

SEQ ID NO: 3989099 - DNA, 25 bp, Homo sapien
tgctgaggcaggcgatgtccaattt

SEQ ID NO: 3989100 - DNA, 25 bp, Homo sapien
tgaggcaggcgatgtccaatttcca

SEQ ID NO: 3989101 - DNA, 25 bp, Homo sapien
gctgaggcaggcgatgtccaatttc

SEQ ID NO: 3989102 - DNA, 25 bp, Homo sapien
ctgaggcaggcgatgtccaatttcc

SEQ ID NO: 3989103 - DNA, 25 bp, Homo sapien
gtcaaggtggacggagatgacttcc

SEQ ID NO: 3989104 - DNA, 25 bp, Homo sapien
aactcacggtcaaggtggacggaga

SEQ ID NO: 3989105 - DNA, 25 bp, Homo sapien
tgggaactcacggttagggtggatg

SEQ ID NO: 3989106 - DNA, 25 bp, Homo sapien
caaggtggacggagatgacttcctg

SEQ ID NO: 3989107 - DNA, 25 bp, Homo sapien
gtcttgtttgtcacaatagtgaaaa

SEQ ID NO: 3989108 - DNA, 25 bp, Homo sapien
tcttgtttgtcacaatagtgaaaag

SEQ ID NO: 3989109 - DNA, 25 bp, Homo sapien
gtttatgcaagttttgcttcagttg

SEQ ID NO: 3989110 - DNA, 25 bp, Homo sapien
ccctgagcatttgggtttatgcaag

SEQ ID NO: 3989111 - DNA, 25 bp, Homo sapien
attaattctgggttccctcgctgca

SEQ ID NO: 3989112 - DNA, 25 bp, Homo sapien
ctgcaatcggaggatccgcaggcct

SEQ ID NO: 3989113 - DNA, 25 bp, Homo sapien
ctgacggcatggctcgcactgtaac

SEQ ID NO: 3989114 - DNA, 25 bp, Homo sapien
gcactgtaaccatcaggccctcttg

SEQ ID NO: 3989115 - DNA, 25 bp, Homo sapien
gacacaatctaaaagcaatcagaac

SEQ ID NO: 3989116 - DNA, 25 bp, Homo sapien
tttgtgttcactcgtcttccccggc

SEQ ID NO: 3989117 - DNA, 25 bp, Homo sapien
tccccggcacagacacaatctaaaa

SEQ ID NO: 3989118 - DNA, 25 bp, Homo sapien
agcaatcagaactctgaccccacag

SEQ ID NO: 3989119 - DNA, 25 bp, Homo sapien
ctgttgtccgcagagacgtcagccg

SEQ ID NO: 3989120 - DNA, 25 bp, Homo sapien
tgtgccttataaggcggagcacccc

SEQ ID NO: 3989121 - DNA, 25 bp, Homo sapien
acgtcagccgccacgctaagggcgt

SEQ ID NO: 3989122 - DNA, 25 bp, Homo sapien
ccgccacgctaagggcgtcttgtgg

SEQ ID NO: 3989123 - DNA, 25 bp, Homo sapien
ttaccagctggagagtgaaccttct

SEQ ID NO: 3989124 - DNA, 25 bp, Homo sapien
cagaaagatggaggttggctttgca

SEQ ID NO: 3989125 - DNA, 25 bp, Homo sapien
ctggatacgcagaaagatggaggtt

SEQ ID NO: 3989126 - DNA, 25 bp, Homo sapien
aaagatggaggttggctttgcacat

SEQ ID NO: 3989127 - DNA, 25 bp, Homo sapien
acgcagaaagatggaggttggcttt

SEQ ID NO: 3989128 - DNA, 25 bp, Homo sapien
ggcgctggggcaggaccaaggtgat

SEQ ID NO: 3989129 - DNA, 25 bp, Homo sapien
gctggggcaggaccaaggtgatgga

SEQ ID NO: 3989130 - DNA, 25 bp, Homo sapien
gcgctggggcaggaccaaggtgatg

SEQ ID NO: 3989131 - DNA, 25 bp, Homo sapien
ctggggcaggaccaaggtgatggag

SEQ ID NO: 3989132 - DNA, 25 bp, Homo sapien
tcacgttaaatcctctgtccagaca

SEQ ID NO: 3989133 - DNA, 25 bp, Homo sapien
gagggctgttcagatgaagtgcagc

SEQ ID NO: 3989134 - DNA, 25 bp, Homo sapien
gtactgttccagtccacttgctcct

SEQ ID NO: 3989135 - DNA, 25 bp, Homo sapien
cacagcttccctgggacccttgcca

SEQ ID NO: 3989136 - DNA, 25 bp, Homo sapien
gagcctcttggctccgtgtctttgt

SEQ ID NO: 3989137 - DNA, 25 bp, Homo sapien
tgagcctcttggctccgtgtctttg

SEQ ID NO: 3989138 - DNA, 25 bp, Homo sapien
taacatgaggtacggggcaaccagc

SEQ ID NO: 3989139 - DNA, 25 bp, Homo sapien
agtaacatgaggtacggggcaacca

SEQ ID NO: 3989140 - DNA, 25 bp, Homo sapien
tggagagtaacatgaggtacggggc

SEQ ID NO: 3989141 - DNA, 25 bp, Homo sapien
agagtaacatgaggtacggggcaac

SEQ ID NO: 3989142 - DNA, 25 bp, Homo sapien
catttgattgcctgcacttttctct

SEQ ID NO: 3989143 - DNA, 25 bp, Homo sapien
tcatttgattgcctgcacttttctc

SEQ ID NO: 3989144 - DNA, 25 bp, Homo sapien
tcttctccttatcagtgttggctgg

SEQ ID NO: 3989145 - DNA, 25 bp, Homo sapien
gagcccaatcttctccttatcagtg

SEQ ID NO: 3989146 - DNA, 25 bp, Homo sapien
caatcttctccttatcagtgttggc

SEQ ID NO: 3989147 - DNA, 25 bp, Homo sapien
acagagcccaatcttctccttatca

SEQ ID NO: 3989148 - DNA, 25 bp, Homo sapien
gaagcccttactcttggggagcacc

SEQ ID NO: 3989149 - DNA, 25 bp, Homo sapien
ggaagcccttactcttggggagcac

SEQ ID NO: 3989150 - DNA, 25 bp, Homo sapien
tcactcctggggagcgctggaagcc

SEQ ID NO: 3989151 - DNA, 25 bp, Homo sapien
agccctcctggggagcactagatgc

SEQ ID NO: 3989152 - DNA, 25 bp, Homo sapien
tcctggggagcactagatgccttca

SEQ ID NO: 3989153 - DNA, 25 bp, Homo sapien
agcactagatgccttcactcctggg

SEQ ID NO: 3989154 - DNA, 25 bp, Homo sapien
tggagatcccacgttctcacttctg

SEQ ID NO: 3989155 - DNA, 25 bp, Homo sapien
gaacctggagatcccacgttctcac

SEQ ID NO: 3989156 - DNA, 25 bp, Homo sapien
cagaacctggagatcccacgttctc

SEQ ID NO: 3989157 - DNA, 25 bp, Homo sapien
tcccacgttctcacttctgcaggaa

SEQ ID NO: 3989158 - DNA, 25 bp, Homo sapien
tgcagactctagtggtgaacggcgg

SEQ ID NO: 3989159 - DNA, 25 bp, Homo sapien
agactctagtggtgaacggcggcca

SEQ ID NO: 3989160 - DNA, 25 bp, Homo sapien
actctagtggtgaacggcggccaag

SEQ ID NO: 3989161 - DNA, 25 bp, Homo sapien
aggtgcagactctagtggtgaacgg

SEQ ID NO: 3989162 - DNA, 25 bp, Homo sapien
catgggaaatcctcaaatgagtgct

SEQ ID NO: 3989163 - DNA, 25 bp, Homo sapien
atgggaaatcctcaaatgagtgctc

SEQ ID NO: 3989164 - DNA, 25 bp, Homo sapien
ctcatgggaaatcctcaaatgagtg

SEQ ID NO: 3989165 - DNA, 25 bp, Homo sapien
tcatgggaaatcctcaaatgagtgc

SEQ ID NO: 3989166 - DNA, 25 bp, Homo sapien
gaattttctggtatcgggtgagtca

SEQ ID NO: 3989167 - DNA, 25 bp, Homo sapien
aattttctggtatcgggtgagtcac

SEQ ID NO: 3989168 - DNA, 25 bp, Homo sapien
tgaattttctggtatcgggtgagtc

SEQ ID NO: 3989169 - DNA, 25 bp, Homo sapien
gcatcaggtaggtcgcctggtgaat

SEQ ID NO: 3989170 - DNA, 25 bp, Homo sapien
ccagcatcagatgggtcgtctggtg

SEQ ID NO: 3989171 - DNA, 25 bp, Homo sapien
cattgggtgagtcgcctggtgaatt

SEQ ID NO: 3989172 - DNA, 25 bp, Homo sapien
tttgccggcatgagtgggtcatctg

SEQ ID NO: 3989173 - DNA, 25 bp, Homo sapien
ggtaactcttcctctgcgttaggag

SEQ ID NO: 3989174 - DNA, 25 bp, Homo sapien
tctctgactgtgactgggtaactct

SEQ ID NO: 3989175 - DNA, 25 bp, Homo sapien
tctcagaatgggctgccaagctccc

SEQ ID NO: 3989176 - DNA, 25 bp, Homo sapien
ctgagaagtgaaccgtggctaggcc

SEQ ID NO: 3989177 - DNA, 25 bp, Homo sapien
ggctggctagcctcctgttgtgatc

SEQ ID NO: 3989178 - DNA, 25 bp, Homo sapien
ccacggagagtatgtggatgtcttc

SEQ ID NO: 3989179 - DNA, 25 bp, Homo sapien
gaatcgtgcatgctgggaaactctt

SEQ ID NO: 3989180 - DNA, 25 bp, Homo sapien
ctctatccagatgcaagaatcgtgc

SEQ ID NO: 3989181 - DNA, 25 bp, Homo sapien
gaggctttgcctgatggatgctgct

SEQ ID NO: 3989182 - DNA, 25 bp, Homo sapien
tgctctgaatgagggcatatgggat

SEQ ID NO: 3989183 - DNA, 25 bp, Homo sapien
tagtggcgggattgtggcccaaggc

SEQ ID NO: 3989184 - DNA, 25 bp, Homo sapien
cagagcttctccgtgagtagtggcg

SEQ ID NO: 3989185 - DNA, 25 bp, Homo sapien
caagagttcagtgggcataggtgct

SEQ ID NO: 3989186 - DNA, 25 bp, Homo sapien
caggcgcagcgtctgtccgcgtttg

SEQ ID NO: 3989187 - DNA, 25 bp, Homo sapien
tctgtccgcgtttgggcaggctgcc

SEQ ID NO: 3989188 - DNA, 25 bp, Homo sapien
tttggtttcagagaccggctgccaa

SEQ ID NO: 3989189 - DNA, 25 bp, Homo sapien
tgagatgcccgtatcatcactcagg

SEQ ID NO: 3989190 - DNA, 25 bp, Homo sapien
gtctgacgatggcattttgtctgag

SEQ ID NO: 3989191 - DNA, 25 bp, Homo sapien
caggagggaggtctgacgatggcat

SEQ ID NO: 3989192 - DNA, 25 bp, Homo sapien
tttgtctgagatgcccgtatcatca

SEQ ID NO: 3989193 - DNA, 25 bp, Homo sapien
ttgtctcgctctccatgacgtacat

SEQ ID NO: 3989194 - DNA, 25 bp, Homo sapien
tctccatgacgtacattgaagggat

SEQ ID NO: 3989195 - DNA, 25 bp, Homo sapien
tcgctctccatgacgtacattgaag

SEQ ID NO: 3989196 - DNA, 25 bp, Homo sapien
ccatgacgtacattgaagggatttt

SEQ ID NO: 3989197 - DNA, 25 bp, Homo sapien
tattgctgctactcagaaacgagac

SEQ ID NO: 3989198 - DNA, 25 bp, Homo sapien
ttcttttgaagtaggaccggtggca

SEQ ID NO: 3989199 - DNA, 25 bp, Homo sapien
cacggtccaggtgtggaatgctcac

SEQ ID NO: 3989200 - DNA, 25 bp, Homo sapien
caattaagggatcgacgtatcacgg

SEQ ID NO: 3989201 - DNA, 25 bp, Homo sapien
tttttgaacaagtcggaacctctga

SEQ ID NO: 3989202 - DNA, 25 bp, Homo sapien
cggaacctctgatcccggccgtatt

SEQ ID NO: 3989203 - DNA, 25 bp, Homo sapien
ctctgcaaactccttaaacgtggtc

SEQ ID NO: 3989204 - DNA, 25 bp, Homo sapien
tcatctcattttccgcagccttagt

SEQ ID NO: 3989205 - DNA, 25 bp, Homo sapien
aggcaccgggccccgcaacttcctg

SEQ ID NO: 3989206 - DNA, 25 bp, Homo sapien
caggcaccgggccccgcaacttcct

SEQ ID NO: 3989207 - DNA, 25 bp, Homo sapien
gcaggcaccgggccccgcaacttcc

SEQ ID NO: 3989208 - DNA, 25 bp, Homo sapien
gctggcctatgcagatgcactcgct

SEQ ID NO: 3989209 - DNA, 25 bp, Homo sapien
tatgcagatgcactcgcttgtccag

SEQ ID NO: 3989210 - DNA, 25 bp, Homo sapien
ggagccgctggcctatgcagatgca

SEQ ID NO: 3989211 - DNA, 25 bp, Homo sapien
gatgcactcgcttgtccagcgacag

SEQ ID NO: 3989212 - DNA, 25 bp, Homo sapien
tggctaagccacactccaccccgac

SEQ ID NO: 3989213 - DNA, 25 bp, Homo sapien
tcctcttgtcattggtaagttccca

SEQ ID NO: 3989214 - DNA, 25 bp, Homo sapien
tcattggtaagttcccagccccaga

SEQ ID NO: 3989215 - DNA, 25 bp, Homo sapien
cagccccagaaatcatccggtatat

SEQ ID NO: 3989216 - DNA, 25 bp, Homo sapien
gaaatcatccggtatatttctctct

SEQ ID NO: 3989217 - DNA, 25 bp, Homo sapien
tttggctagcagcaatttacttttc

SEQ ID NO: 3989218 - DNA, 25 bp, Homo sapien
tggctagcagcaatttacttttctt

SEQ ID NO: 3989219 - DNA, 25 bp, Homo sapien
ttctttggctagcagcaatttactt

SEQ ID NO: 3989220 - DNA, 25 bp, Homo sapien
tctttggctagcagcaatttacttt

SEQ ID NO: 3989221 - DNA, 25 bp, Homo sapien
agttgagcaggagatagcgtgggtc

SEQ ID NO: 3989222 - DNA, 25 bp, Homo sapien
ctgctttcgttcctcagagttgagc

SEQ ID NO: 3989223 - DNA, 25 bp, Homo sapien
tagcgtgggtcaaacacgattttgt

SEQ ID NO: 3989224 - DNA, 25 bp, Homo sapien
ggtcaaacacgattttgtgtaattc

SEQ ID NO: 3989225 - DNA, 25 bp, Homo sapien
ctcacggggacctgtgcatagcccg

SEQ ID NO: 3989226 - DNA, 25 bp, Homo sapien
cacggggacctgtgcatagcccgat

SEQ ID NO: 3989227 - DNA, 25 bp, Homo sapien
gacctgtgcatagcccgatggtccc

SEQ ID NO: 3989228 - DNA, 25 bp, Homo sapien
gggacctgtgcatagcccgatggtc

SEQ ID NO: 3989229 - DNA, 25 bp, Homo sapien
tcaacacccatcttagcacaaggag

SEQ ID NO: 3989230 - DNA, 25 bp, Homo sapien
aatcgtcacagcgaagcctgcagga

SEQ ID NO: 3989231 - DNA, 25 bp, Homo sapien
tgctctgtgaatccctcactccatt

SEQ ID NO: 3989232 - DNA, 25 bp, Homo sapien
ggaaccctgctctgtgaatccctca

SEQ ID NO: 3989233 - DNA, 25 bp, Homo sapien
ctctcggggtaaacacacaacctgg

SEQ ID NO: 3989234 - DNA, 25 bp, Homo sapien
cctggtggttaccgcttcacgttca

SEQ ID NO: 3989235 - DNA, 25 bp, Homo sapien
cttcacgttcagatgattttgctga

SEQ ID NO: 3989236 - DNA, 25 bp, Homo sapien
tctctcggggtaaacacacaacctg

SEQ ID NO: 3989237 - DNA, 25 bp, Homo sapien
cagcagtaaggaccgggaaactgcc

SEQ ID NO: 3989238 - DNA, 25 bp, Homo sapien
cgtgcagtccgagggacacagcagt

SEQ ID NO: 3989239 - DNA, 25 bp, Homo sapien
ccatttccacaagggccgtgcagtc

SEQ ID NO: 3989240 - DNA, 25 bp, Homo sapien
cagaaactcagaattacggccattt

SEQ ID NO: 3989241 - DNA, 25 bp, Homo sapien
cgggggcggcgtccttgtgcctttg

SEQ ID NO: 3989242 - DNA, 25 bp, Homo sapien
tctcggaagtgggtcacacgctcct

SEQ ID NO: 3989243 - DNA, 25 bp, Homo sapien
tgggtcacacgctcctccagaggca

SEQ ID NO: 3989244 - DNA, 25 bp, Homo sapien
ggaagtgggtcacacgctcctccag

SEQ ID NO: 3989245 - DNA, 25 bp, Homo sapien
gcagggaagccaggcctcaggtgct

SEQ ID NO: 3989246 - DNA, 25 bp, Homo sapien
cagggaagccaggcctcaggtgctg

SEQ ID NO: 3989247 - DNA, 25 bp, Homo sapien
cccttggttagcacgcggctgctga

SEQ ID NO: 3989248 - DNA, 25 bp, Homo sapien
tcagggctcagctatacaaaggccc

SEQ ID NO: 3989249 - DNA, 25 bp, Homo sapien
gagggtctgagaccatcacaaggca

SEQ ID NO: 3989250 - DNA, 25 bp, Homo sapien
cagaggtctgcgaggatgcagatcc

SEQ ID NO: 3989251 - DNA, 25 bp, Homo sapien
ggctggacagctcactcccagtctt

SEQ ID NO: 3989252 - DNA, 25 bp, Homo sapien
cagctcactcccagtcttcagtgtg

SEQ ID NO: 3989253 - DNA, 25 bp, Homo sapien
actcccagtcttcagtgtgaccaca

SEQ ID NO: 3989254 - DNA, 25 bp, Homo sapien
gtggctggacagctcactcccagtc

SEQ ID NO: 3989255 - DNA, 25 bp, Homo sapien
ccgtgtgcacttgctgtccgtgtag

SEQ ID NO: 3989256 - DNA, 25 bp, Homo sapien
tcatctgtcccgtgtgcacttgctg

SEQ ID NO: 3989257 - DNA, 25 bp, Homo sapien
gtgtgcacttgctgtccgtgtagct

SEQ ID NO: 3989258 - DNA, 25 bp, Homo sapien
tgtcccgtgtgcacttgctgtccgt

SEQ ID NO: 3989259 - DNA, 25 bp, Homo sapien
gccactcagaaggtgaaacacctgc

SEQ ID NO: 3989260 - DNA, 25 bp, Homo sapien
tctcccagctgaggtttatgagcca

SEQ ID NO: 3989261 - DNA, 25 bp, Homo sapien
agtgagcagcaagctccggctctga

SEQ ID NO: 3989262 - DNA, 25 bp, Homo sapien
aacacctgctgaaaagggtttgctg

SEQ ID NO: 3989263 - DNA, 25 bp, Homo sapien
atgtggtcaaaatgatgccttttct

SEQ ID NO: 3989264 - DNA, 25 bp, Homo sapien
tctgtctagcggttgaattagctct

SEQ ID NO: 3989265 - DNA, 25 bp, Homo sapien
catctgtctagcggttgaattagct

SEQ ID NO: 3989266 - DNA, 25 bp, Homo sapien
atctgtctagcggttgaattagctc

SEQ ID NO: 3989267 - DNA, 25 bp, Homo sapien
tttcacatcttggtcttccctgttg

SEQ ID NO: 3989268 - DNA, 25 bp, Homo sapien
ttttcacatcttggtcttccctgtt

SEQ ID NO: 3989269 - DNA, 25 bp, Homo sapien
gcacctccaacaggcccacgctcag

SEQ ID NO: 3989270 - DNA, 25 bp, Homo sapien
tctgcggccactgccccagggaagg

SEQ ID NO: 3989271 - DNA, 25 bp, Homo sapien
gcagcacctccaacaggcccacgct

SEQ ID NO: 3989272 - DNA, 25 bp, Homo sapien
tccaacaggcccacgctcagctcct

SEQ ID NO: 3989273 - DNA, 25 bp, Homo sapien
cttccagcaaggctgcagtatccat

SEQ ID NO: 3989274 - DNA, 25 bp, Homo sapien
ggtgctccacccttctgaaaggatg

SEQ ID NO: 3989275 - DNA, 25 bp, Homo sapien
tgctccacccttctgaaaggatgta

SEQ ID NO: 3989276 - DNA, 25 bp, Homo sapien
tccacccttctgaaaggatgtaggc

SEQ ID NO: 3989277 - DNA, 25 bp, Homo sapien
gggtgctccacccttctgaaaggat

SEQ ID NO: 3989278 - DNA, 25 bp, Homo sapien
ctgttgaggtctccgcggtccttca

SEQ ID NO: 3989279 - DNA, 25 bp, Homo sapien
acaggtgcatcgttgggttgaagaa

SEQ ID NO: 3989280 - DNA, 25 bp, Homo sapien
caggtccatgggcttctcccagaca

SEQ ID NO: 3989281 - DNA, 25 bp, Homo sapien
gaagaagaaaactcggtcatcgccc

SEQ ID NO: 3989282 - DNA, 25 bp, Homo sapien
gcagaattaaaagggctgctgtcat

SEQ ID NO: 3989283 - DNA, 25 bp, Homo sapien
ggccacaggtcattaccctccggca

SEQ ID NO: 3989284 - DNA, 25 bp, Homo sapien
tgtcattagcaaccacagccccggt

SEQ ID NO: 3989285 - DNA, 25 bp, Homo sapien
aggtcattaccctccggcagcagca

SEQ ID NO: 3989286 - DNA, 25 bp, Homo sapien
cagcagatggacctgttgagcacca

SEQ ID NO: 3989287 - DNA, 25 bp, Homo sapien
ttcctgtgacctgggtacagcagat

SEQ ID NO: 3989288 - DNA, 25 bp, Homo sapien
tgggtacagcagatggacctgttga

SEQ ID NO: 3989289 - DNA, 25 bp, Homo sapien
aacttcctgtgacctgggtacagca

SEQ ID NO: 3989290 - DNA, 25 bp, Homo sapien
tctcaaatgcgagctaaatggcagc

SEQ ID NO: 3989291 - DNA, 25 bp, Homo sapien
gaactctcaaatgcgagctaaatgg

SEQ ID NO: 3989292 - DNA, 25 bp, Homo sapien
tcccaccagaactctcaaatgcgag

SEQ ID NO: 3989293 - DNA, 25 bp, Homo sapien
aatgcgagctaaatggcagcttccc

SEQ ID NO: 3989294 - DNA, 25 bp, Homo sapien
aactgcaagtcagaggacggtgcac

SEQ ID NO: 3989295 - DNA, 25 bp, Homo sapien
tgcacgggagaaagtgacacaggct

SEQ ID NO: 3989296 - DNA, 25 bp, Homo sapien
tcaaagaagaccgatgcgtcctccc

SEQ ID NO: 3989297 - DNA, 25 bp, Homo sapien
tcagcttagcgagtgcaactgcaag

SEQ ID NO: 3989298 - DNA, 25 bp, Homo sapien
tctcggcagcgacaacagcagagaa

SEQ ID NO: 3989299 - DNA, 25 bp, Homo sapien
taagaataactaaggatgccgcccg

SEQ ID NO: 3989300 - DNA, 25 bp, Homo sapien
tatggattcactgagctctagcagg

SEQ ID NO: 3989301 - DNA, 25 bp, Homo sapien
gctgccggcattccgtatggattca

SEQ ID NO: 3989302 - DNA, 25 bp, Homo sapien
gcctggtctctgagtgccaagcgga

SEQ ID NO: 3989303 - DNA, 25 bp, Homo sapien
aattctgggatctgacctgagctga

SEQ ID NO: 3989304 - DNA, 25 bp, Homo sapien
tggtctctgagtgccaagcggacca

SEQ ID NO: 3989305 - DNA, 25 bp, Homo sapien
gcggcctggtctctgagtgccaagc

SEQ ID NO: 3989306 - DNA, 25 bp, Homo sapien
taaagacgacatggccaggaatcca

SEQ ID NO: 3989307 - DNA, 25 bp, Homo sapien
cctcatgcttgccagttaaagacga

SEQ ID NO: 3989308 - DNA, 25 bp, Homo sapien
tgtaggtcctgtgggaccttggcca

SEQ ID NO: 3989309 - DNA, 25 bp, Homo sapien
tgcacctctgccttagtggcaccag

SEQ ID NO: 3989310 - DNA, 25 bp, Homo sapien
cattgaggttcagagtgcttccagg

SEQ ID NO: 3989311 - DNA, 25 bp, Homo sapien
aagccgcagctttcgcagtgagaag

SEQ ID NO: 3989312 - DNA, 25 bp, Homo sapien
tatacccctgtcgttaagcagcaga

SEQ ID NO: 3989313 - DNA, 25 bp, Homo sapien
agtacaaagaggtctcaccccgagg

SEQ ID NO: 3989314 - DNA, 25 bp, Homo sapien
gaggccactggcctgttgcctctgg

SEQ ID NO: 3989315 - DNA, 25 bp, Homo sapien
cgggcaccggggtggaggccactgg

SEQ ID NO: 3989316 - DNA, 25 bp, Homo sapien
gggcaccggggtggaggccactggc

SEQ ID NO: 3989317 - DNA, 25 bp, Homo sapien
gccactggcctgttgcctctggctg

SEQ ID NO: 3989318 - DNA, 25 bp, Homo sapien
gatgattaaccattcgaccaccaaa

SEQ ID NO: 3989319 - DNA, 25 bp, Homo sapien
taaatgaagtcaatgctccaaagtc

SEQ ID NO: 3989320 - DNA, 25 bp, Homo sapien
gctgtaccaaaacccagcacatgtg

SEQ ID NO: 3989321 - DNA, 25 bp, Homo sapien
gtcaatgctccaaagtcctcgtggg

SEQ ID NO: 3989322 - DNA, 25 bp, Homo sapien
tctccacgagatgcatgctggttat

SEQ ID NO: 3989323 - DNA, 25 bp, Homo sapien
tcttctccacgagatgcatgctggt

SEQ ID NO: 3989324 - DNA, 25 bp, Homo sapien
cgaggtcttctccacgagatgcatg

SEQ ID NO: 3989325 - DNA, 25 bp, Homo sapien
cgagatgcatgctggttatgatttc

SEQ ID NO: 3989326 - DNA, 25 bp, Homo sapien
tgttccacgttgaagtcataaaagt

SEQ ID NO: 3989327 - DNA, 25 bp, Homo sapien
ttccacgttgaagtcataaaagtga

SEQ ID NO: 3989328 - DNA, 25 bp, Homo sapien
gttggtgataaaaacggctaatcat

SEQ ID NO: 3989329 - DNA, 25 bp, Homo sapien
aacggctaatcatggtataaaactc

SEQ ID NO: 3989330 - DNA, 25 bp, Homo sapien
caggagggcgggccactcggccccg

SEQ ID NO: 3989331 - DNA, 25 bp, Homo sapien
agggcaggagggcgggccactcggc

SEQ ID NO: 3989332 - DNA, 25 bp, Homo sapien
gcaggagggcgggccactcggcccc

SEQ ID NO: 3989333 - DNA, 25 bp, Homo sapien
tcagcgagggatcccactaccaagt

SEQ ID NO: 3989334 - DNA, 25 bp, Homo sapien
ggaaactctcctgctactcgctgat

SEQ ID NO: 3989335 - DNA, 25 bp, Homo sapien
caggtagaaaatgcgtctccagcag

SEQ ID NO: 3989336 - DNA, 25 bp, Homo sapien
tctaagttgtgaacgggaagcccag

SEQ ID NO: 3989337 - DNA, 25 bp, Homo sapien
aacacacagtgtgcccattacataa

SEQ ID NO: 3989338 - DNA, 25 bp, Homo sapien
aacatgtggtatctgacccgcagtg

SEQ ID NO: 3989339 - DNA, 25 bp, Homo sapien
catagatagggtaatggtcaagtca

SEQ ID NO: 3989340 - DNA, 25 bp, Homo sapien
tcatggctgttagtgtatccgtcac

SEQ ID NO: 3989341 - DNA, 25 bp, Homo sapien
taaacgcccagcaactaatgagtag

SEQ ID NO: 3989342 - DNA, 25 bp, Homo sapien
caaaagccacttgtactccagaagc

SEQ ID NO: 3989343 - DNA, 25 bp, Homo sapien
tgacatataccacttgggtgacagg

SEQ ID NO: 3989344 - DNA, 25 bp, Homo sapien
ggtgacaggtggactaaaatctcca

SEQ ID NO: 3989345 - DNA, 25 bp, Homo sapien
cattattttctagtggagcttccag

SEQ ID NO: 3989346 - DNA, 25 bp, Homo sapien
gcctacggatatctgagtcccggaa

SEQ ID NO: 3989347 - DNA, 25 bp, Homo sapien
catcataaactctgtgcctacggat

SEQ ID NO: 3989348 - DNA, 25 bp, Homo sapien
gatgtgtatttcaccaggcggctgc

SEQ ID NO: 3989349 - DNA, 25 bp, Homo sapien
tttacatactgatcatatgtttttg

SEQ ID NO: 3989350 - DNA, 25 bp, Homo sapien
ctggtttcacgcgcaggcctggtgg

SEQ ID NO: 3989351 - DNA, 25 bp, Homo sapien
gacaggcgtcttgctgccgaggctt

SEQ ID NO: 3989352 - DNA, 25 bp, Homo sapien
tcttgctgccgaggctttgctgccc

SEQ ID NO: 3989353 - DNA, 25 bp, Homo sapien
aggcctggtggacaggcgtcttgct

SEQ ID NO: 3989354 - DNA, 25 bp, Homo sapien
ctggagaccttctgaacgtttgttc

SEQ ID NO: 3989355 - DNA, 25 bp, Homo sapien
tggagaccttctgaacgtttgttct

SEQ ID NO: 3989356 - DNA, 25 bp, Homo sapien
tggtaaaagcctgagtctcggcaga

SEQ ID NO: 3989357 - DNA, 25 bp, Homo sapien
tggaatccacgtaattggtaaaagc

SEQ ID NO: 3989358 - DNA, 25 bp, Homo sapien
gaatgaatccaacccgaggaaactc

SEQ ID NO: 3989359 - DNA, 25 bp, Homo sapien
gaaactcggagacctgatctgcacc

SEQ ID NO: 3989360 - DNA, 25 bp, Homo sapien
ccacgaacgcgcactgtggggcggc

SEQ ID NO: 3989361 - DNA, 25 bp, Homo sapien
gaacgcgcactgtggggcggccaca

SEQ ID NO: 3989362 - DNA, 25 bp, Homo sapien
gcccagactccccatgacacaggac

SEQ ID NO: 3989363 - DNA, 25 bp, Homo sapien
tgcccagactccccatgacacagga

SEQ ID NO: 3989364 - DNA, 25 bp, Homo sapien
tggaaccacggtgctggccaagggg

SEQ ID NO: 3989365 - DNA, 25 bp, Homo sapien
gatggaaccacggtgctggccaagg

SEQ ID NO: 3989366 - DNA, 25 bp, Homo sapien
ggggatggaaccacggtgctggcca

SEQ ID NO: 3989367 - DNA, 25 bp, Homo sapien
atggaaccacggtgctggccaaggg

SEQ ID NO: 3989368 - DNA, 25 bp, Homo sapien
ctgtccagtggtcatggctggcatg

SEQ ID NO: 3989369 - DNA, 25 bp, Homo sapien
tgtccagtggtcatggctggcatgg

SEQ ID NO: 3989370 - DNA, 25 bp, Homo sapien
cacatcgctgggctcaatacatact

SEQ ID NO: 3989371 - DNA, 25 bp, Homo sapien
ccctgtggagcctagcacatcgctg

SEQ ID NO: 3989372 - DNA, 25 bp, Homo sapien
tgtggagcctagcacatcgctgggc

SEQ ID NO: 3989373 - DNA, 25 bp, Homo sapien
caatacatacttgcaggagggctga

SEQ ID NO: 3989374 - DNA, 25 bp, Homo sapien
tggtgctggcctcgttctaactgaa

SEQ ID NO: 3989375 - DNA, 25 bp, Homo sapien
tctacaggacagataacgttggtgc

SEQ ID NO: 3989376 - DNA, 25 bp, Homo sapien
gctgcctgggcattcgctgagactg

SEQ ID NO: 3989377 - DNA, 25 bp, Homo sapien
gtttagaaaacagcccgaatggcgc

SEQ ID NO: 3989378 - DNA, 25 bp, Homo sapien
gagtaaatcctcagttcctgggagt

SEQ ID NO: 3989379 - DNA, 25 bp, Homo sapien
tcatcaaaccagcatagaaatagcg

SEQ ID NO: 3989380 - DNA, 25 bp, Homo sapien
gccgaaggtccattgttgaaaaaga

SEQ ID NO: 3989381 - DNA, 25 bp, Homo sapien
aaattggaaagtcatggaactaggc

SEQ ID NO: 3989382 - DNA, 25 bp, Homo sapien
acagttagtggatggacacgcatgc

SEQ ID NO: 3989383 - DNA, 25 bp, Homo sapien
tcacgaagcgtgcaggttacagtta

SEQ ID NO: 3989384 - DNA, 25 bp, Homo sapien
tgaagaaacacgcatttcacaagga

SEQ ID NO: 3989385 - DNA, 25 bp, Homo sapien
cacaaggatgtctgggtcacgaagc

SEQ ID NO: 3989386 - DNA, 25 bp, Homo sapien
caccagaatggccaccctccgggcc

SEQ ID NO: 3989387 - DNA, 25 bp, Homo sapien
tgagtgcctcatcaatgcatctcac

SEQ ID NO: 3989388 - DNA, 25 bp, Homo sapien
ctgtgaacacgcagggacaacagag

SEQ ID NO: 3989389 - DNA, 25 bp, Homo sapien
ggacaacagagctgcagatgggacc

SEQ ID NO: 3989390 - DNA, 25 bp, Homo sapien
tcaagcaaagcccaaacggccccag

SEQ ID NO: 3989391 - DNA, 25 bp, Homo sapien
tctaaccaggaagcctccgcgcgct

SEQ ID NO: 3989392 - DNA, 25 bp, Homo sapien
cgctcgctaaggcagcaccaggcgt

SEQ ID NO: 3989393 - DNA, 25 bp, Homo sapien
cgaatgtttccctcaaccggagccg

SEQ ID NO: 3989394 - DNA, 25 bp, Homo sapien
attttgatgggtgccaaggtcagga

SEQ ID NO: 3989395 - DNA, 25 bp, Homo sapien
aggaagtggcgcggctgcacgctgg

SEQ ID NO: 3989396 - DNA, 25 bp, Homo sapien
tccggaggggtattttgatgggtgc

SEQ ID NO: 3989397 - DNA, 25 bp, Homo sapien
gaggggtattttgatgggtgccaag

SEQ ID NO: 3989398 - DNA, 25 bp, Homo sapien
ggcgatggcaatggcggggctgctg

SEQ ID NO: 3989399 - DNA, 25 bp, Homo sapien
tctgatagataacgacgacataaac

SEQ ID NO: 3989400 - DNA, 25 bp, Homo sapien
gttctgatagataacgacgacataa

SEQ ID NO: 3989401 - DNA, 25 bp, Homo sapien
gctgttctgatagataacgacgaca

SEQ ID NO: 3989402 - DNA, 25 bp, Homo sapien
aggtgctgttctgatagataacgac

SEQ ID NO: 3989403 - DNA, 25 bp, Homo sapien
gctcccctcggagacgcctcctgag

SEQ ID NO: 3989404 - DNA, 25 bp, Homo sapien
cctcggagacgcctcctgagctgag

SEQ ID NO: 3989405 - DNA, 25 bp, Homo sapien
tagctgctcccctcggagacgcctc

SEQ ID NO: 3989406 - DNA, 25 bp, Homo sapien
ctagctgctcccctcggagacgcct

SEQ ID NO: 3989407 - DNA, 25 bp, Homo sapien
aagctgggaattatgcccgccggtg

SEQ ID NO: 3989408 - DNA, 25 bp, Homo sapien
aaatgctaagcatttgccttctgca

SEQ ID NO: 3989409 - DNA, 25 bp, Homo sapien
gacttgtcaaagactaagctgggaa

SEQ ID NO: 3989410 - DNA, 25 bp, Homo sapien
ccaaaaggagcgtgctggcgtcatg

SEQ ID NO: 3989411 - DNA, 25 bp, Homo sapien
ccggagactgaatctgacaaacacc

SEQ ID NO: 3989412 - DNA, 25 bp, Homo sapien
ggcagagggttttaggcaaagccca

SEQ ID NO: 3989413 - DNA, 25 bp, Homo sapien
cctgtgaccggagactgaatctgac

SEQ ID NO: 3989414 - DNA, 25 bp, Homo sapien
agggttttaggcaaagcccaggatg

SEQ ID NO: 3989415 - DNA, 25 bp, Homo sapien
aaggcagccagggccaacgccattc

SEQ ID NO: 3989416 - DNA, 25 bp, Homo sapien
gcagccagggccaacgccattccca

SEQ ID NO: 3989417 - DNA, 25 bp, Homo sapien
cagccagggccaacgccattcccag

SEQ ID NO: 3989418 - DNA, 25 bp, Homo sapien
ggcagccagggccaacgccattccc

SEQ ID NO: 3989419 - DNA, 25 bp, Homo sapien
tcttttgataaacagcattgatgga

SEQ ID NO: 3989420 - DNA, 25 bp, Homo sapien
tattcagtttgacgttagtggtaga

SEQ ID NO: 3989421 - DNA, 25 bp, Homo sapien
tagggctcccgtcacaaatccttgc

SEQ ID NO: 3989422 - DNA, 25 bp, Homo sapien
tagtggtagatcttccttagatgtc

SEQ ID NO: 3989423 - DNA, 25 bp, Homo sapien
tcatggtgtctattggtagaatcag

SEQ ID NO: 3989424 - DNA, 25 bp, Homo sapien
gtctattggtagaatcaggctcttt

SEQ ID NO: 3989425 - DNA, 25 bp, Homo sapien
cttcatcatctttgaatgaagagag

SEQ ID NO: 3989426 - DNA, 25 bp, Homo sapien
aatgaagagaggtacagccagtggt

SEQ ID NO: 3989427 - DNA, 25 bp, Homo sapien
aaatgctccccttgattttgtgtct

SEQ ID NO: 3989428 - DNA, 25 bp, Homo sapien
cacacttggctacttggaattgcct

SEQ ID NO: 3989429 - DNA, 25 bp, Homo sapien
ggaattgcctgattacaaaatgctc

SEQ ID NO: 3989430 - DNA, 25 bp, Homo sapien
ccttaatttggaattcattcgactc

SEQ ID NO: 3989431 - DNA, 25 bp, Homo sapien
aaatgaaacagacattgtcaatgtt

SEQ ID NO: 3989432 - DNA, 25 bp, Homo sapien
aacagacattgtcaatgttatttgg

SEQ ID NO: 3989433 - DNA, 25 bp, Homo sapien
agacattgtcaatgttatttgggca

SEQ ID NO: 3989434 - DNA, 25 bp, Homo sapien
ttgtcaatgttatttgggcaccaac

SEQ ID NO: 3989435 - DNA, 25 bp, Homo sapien
gctgaggtgctaacaccaccgtggg

SEQ ID NO: 3989436 - DNA, 25 bp, Homo sapien
gcaaacgaggcttttcatgcccatg

SEQ ID NO: 3989437 - DNA, 25 bp, Homo sapien
caggatgtatccacgttgagtccag

SEQ ID NO: 3989438 - DNA, 25 bp, Homo sapien
cttgatttgccagcaaacgaggctt

SEQ ID NO: 3989439 - DNA, 25 bp, Homo sapien
ctgtcgaaaaataatgcaagcataa

SEQ ID NO: 3989440 - DNA, 25 bp, Homo sapien
tgtcgaaaaataatgcaagcataac

SEQ ID NO: 3989441 - DNA, 25 bp, Homo sapien
gtcgaaaaataatgcaagcataaca

SEQ ID NO: 3989442 - DNA, 25 bp, Homo sapien
cttttcccaataggggttgcaagag

SEQ ID NO: 3989443 - DNA, 25 bp, Homo sapien
cagttaggaatccttttgtctatcc

SEQ ID NO: 3989444 - DNA, 25 bp, Homo sapien
ccaataggggttgcaagagcagaag

SEQ ID NO: 3989445 - DNA, 25 bp, Homo sapien
cttacagttaggaatccttttgtct

SEQ ID NO: 3989446 - DNA, 25 bp, Homo sapien
gggacggagaatggccaccaaacag

SEQ ID NO: 3989447 - DNA, 25 bp, Homo sapien
agggacggagaatggccaccaaaca

SEQ ID NO: 3989448 - DNA, 25 bp, Homo sapien
acggagaatggccaccaaacagcca

SEQ ID NO: 3989449 - DNA, 25 bp, Homo sapien
ctagggacggagaatggccaccaaa

SEQ ID NO: 3989450 - DNA, 25 bp, Homo sapien
aactttctcgccgaggcacggctgc

SEQ ID NO: 3989451 - DNA, 25 bp, Homo sapien
cacgaactttctcgccgaggcacgg

SEQ ID NO: 3989452 - DNA, 25 bp, Homo sapien
tccaagcacgaactttctcgccgag

SEQ ID NO: 3989453 - DNA, 25 bp, Homo sapien
cgggcgtccaagcacgaactttctc

SEQ ID NO: 3989454 - DNA, 25 bp, Homo sapien
gggagcaccggctcgctcggggccg

SEQ ID NO: 3989455 - DNA, 25 bp, Homo sapien
gcgggagcaccggctcgctcggggc

SEQ ID NO: 3989456 - DNA, 25 bp, Homo sapien
cggcggagtctggcgcagagggcag

SEQ ID NO: 3989457 - DNA, 25 bp, Homo sapien
ggagcaccggctcgctcggggccgg

SEQ ID NO: 3989458 - DNA, 25 bp, Homo sapien
gagcagcaccgggggaaccacgacc

SEQ ID NO: 3989459 - DNA, 25 bp, Homo sapien
ggcgagcagcaccgggggaaccacg

SEQ ID NO: 3989460 - DNA, 25 bp, Homo sapien
gggaaccacgacccccgcgctgagc

SEQ ID NO: 3989461 - DNA, 25 bp, Homo sapien
gaaccacgacccccgcgctgagccg

SEQ ID NO: 3989462 - DNA, 25 bp, Homo sapien
ccagacccagggcggcggcggcggc

SEQ ID NO: 3989463 - DNA, 25 bp, Homo sapien
ggcggcggcggcggctctgcgtcca

SEQ ID NO: 3989464 - DNA, 25 bp, Homo sapien
gcggcggcggcggctctgcgtccat

SEQ ID NO: 3989465 - DNA, 25 bp, Homo sapien
cgccgctggaacctggcgcccgcct

SEQ ID NO: 3989466 - DNA, 25 bp, Homo sapien
gccgctggaacctggcgcccgcctg

SEQ ID NO: 3989467 - DNA, 25 bp, Homo sapien
gcgcccgagatgctgggccggcggc

SEQ ID NO: 3989468 - DNA, 25 bp, Homo sapien
cctacatccccgcgctgacggcggc

SEQ ID NO: 3989469 - DNA, 25 bp, Homo sapien
ggcgcccgagatgctgggccggcgg

SEQ ID NO: 3989470 - DNA, 25 bp, Homo sapien
taggccctgcatatcacctcggagg

SEQ ID NO: 3989471 - DNA, 25 bp, Homo sapien
cacgctgccagaacttctttccaaa

SEQ ID NO: 3989472 - DNA, 25 bp, Homo sapien
cactcgccagctgcgcgatgatgag

SEQ ID NO: 3989473 - DNA, 25 bp, Homo sapien
gccaatcagaccaactcctttctga

SEQ ID NO: 3989474 - DNA, 25 bp, Homo sapien
gcaagaaccatgtgttcttccttct

SEQ ID NO: 3989475 - DNA, 25 bp, Homo sapien
gcccctctgtctggttcggtggaga

SEQ ID NO: 3989476 - DNA, 25 bp, Homo sapien
ctgtctggttcggtggagagtccct

SEQ ID NO: 3989477 - DNA, 25 bp, Homo sapien
ctgccacacatgtgcccctctgtct

SEQ ID NO: 3989478 - DNA, 25 bp, Homo sapien
tcatttgttctgcttcttagacctg

SEQ ID NO: 3989479 - DNA, 25 bp, Homo sapien
atttgttctgcttcttagacctggg

SEQ ID NO: 3989480 - DNA, 25 bp, Homo sapien
gttctgcttcttagacctgggaata

SEQ ID NO: 3989481 - DNA, 25 bp, Homo sapien
ttgttctgcttcttagacctgggaa

SEQ ID NO: 3989482 - DNA, 25 bp, Homo sapien
cggattgaagcccacccacaggcaa

SEQ ID NO: 3989483 - DNA, 25 bp, Homo sapien
ttggcttctcaacaaacccctgctg

SEQ ID NO: 3989484 - DNA, 25 bp, Homo sapien
caggacccttggcttctcaacaaac

SEQ ID NO: 3989485 - DNA, 25 bp, Homo sapien
gattgaagcccacccacaggcaagg

SEQ ID NO: 3989486 - DNA, 25 bp, Homo sapien
aaagtgcaaggctgaattggccaag

SEQ ID NO: 3989487 - DNA, 25 bp, Homo sapien
ttaaaaagtgcaaggctgaattggc

SEQ ID NO: 3989488 - DNA, 25 bp, Homo sapien
caaggctgaattggccaagaagaag

SEQ ID NO: 3989489 - DNA, 25 bp, Homo sapien
tccagtatgaaacagtttttcaatg

SEQ ID NO: 3989490 - DNA, 25 bp, Homo sapien
tgggcatgcttctccactatgacat

SEQ ID NO: 3989491 - DNA, 25 bp, Homo sapien
tgtgggtcgccaatttcatgaagag

SEQ ID NO: 3989492 - DNA, 25 bp, Homo sapien
tccactatgacatgggcctgcactg

SEQ ID NO: 3989493 - DNA, 25 bp, Homo sapien
tatgccaagcaccaagttgtcagca

SEQ ID NO: 3989494 - DNA, 25 bp, Homo sapien
cgcagggtcctagcgtcacgatggc

SEQ ID NO: 3989495 - DNA, 25 bp, Homo sapien
tcctagcgtcacgatggcgagaagg

SEQ ID NO: 3989496 - DNA, 25 bp, Homo sapien
aggagctgtcctgtccgcagggtcc

SEQ ID NO: 3989497 - DNA, 25 bp, Homo sapien
gagctgtcctgtccgcagggtccta

SEQ ID NO: 3989498 - DNA, 25 bp, Homo sapien
gacccctgcctttcttggtgcccat

SEQ ID NO: 3989499 - DNA, 25 bp, Homo sapien
cgtctggacccctgcctttcttggt

SEQ ID NO: 3989500 - DNA, 25 bp, Homo sapien
gtctggacccctgcctttcttggtg

SEQ ID NO: 3989501 - DNA, 25 bp, Homo sapien
ctggacccctgcctttcttggtgcc

SEQ ID NO: 3989502 - DNA, 25 bp, Homo sapien
ttcataacagctcccacacgacttc

SEQ ID NO: 3989503 - DNA, 25 bp, Homo sapien
cataacagctcccacacgacttctc

SEQ ID NO: 3989504 - DNA, 25 bp, Homo sapien
tttcataacagctcccacacgactt

SEQ ID NO: 3989505 - DNA, 25 bp, Homo sapien
taacagctcccacacgacttctctg

SEQ ID NO: 3989506 - DNA, 25 bp, Homo sapien
gtgttagcagcagagataggagatt

SEQ ID NO: 3989507 - DNA, 25 bp, Homo sapien
gtccacttgcagcagggtgctccgt

SEQ ID NO: 3989508 - DNA, 25 bp, Homo sapien
gcgattcacgagaaaccgcaaagcc

SEQ ID NO: 3989509 - DNA, 25 bp, Homo sapien
tcttctcagtaaacgcacactgcga

SEQ ID NO: 3989510 - DNA, 25 bp, Homo sapien
tcattgctaccaagcttctctggat

SEQ ID NO: 3989511 - DNA, 25 bp, Homo sapien
tggcccttgaggatgtaaactgcaa

SEQ ID NO: 3989512 - DNA, 25 bp, Homo sapien
gcccttgaggatgtaaactgcaata

SEQ ID NO: 3989513 - DNA, 25 bp, Homo sapien
ggcccttgaggatgtaaactgcaat

SEQ ID NO: 3989514 - DNA, 25 bp, Homo sapien
tgtttaaatcgggtcagtgtggtca

SEQ ID NO: 3989515 - DNA, 25 bp, Homo sapien
tttaaatcgggtcagtgtggtcaga

SEQ ID NO: 3989516 - DNA, 25 bp, Homo sapien
tcttctgtttaaatcgggtcagtgt

SEQ ID NO: 3989517 - DNA, 25 bp, Homo sapien
ttctgtttaaatcgggtcagtgtgg

SEQ ID NO: 3989518 - DNA, 25 bp, Homo sapien
ctgctgctctagatggaaggggcta

SEQ ID NO: 3989519 - DNA, 25 bp, Homo sapien
cttctggcctgctgctctagatgga

SEQ ID NO: 3989520 - DNA, 25 bp, Homo sapien
tgctgctctagatggaaggggctac

SEQ ID NO: 3989521 - DNA, 25 bp, Homo sapien
ctggcctgctgctctagatggaagg

SEQ ID NO: 3989522 - DNA, 25 bp, Homo sapien
tgaaccgtggaggagcaccacggat

SEQ ID NO: 3989523 - DNA, 25 bp, Homo sapien
gatcctgaaccgtggaggagcacca

SEQ ID NO: 3989524 - DNA, 25 bp, Homo sapien
tcctgaaccgtggaggagcaccacg

SEQ ID NO: 3989525 - DNA, 25 bp, Homo sapien
atcctgaaccgtggaggagcaccac

SEQ ID NO: 3989526 - DNA, 25 bp, Homo sapien
agcttcttcaagtgggtggggcctt

SEQ ID NO: 3989527 - DNA, 25 bp, Homo sapien
acctagcctgcgtgtgaggagcttc

SEQ ID NO: 3989528 - DNA, 25 bp, Homo sapien
tgaggagcttcttcaagtgggtggg

SEQ ID NO: 3989529 - DNA, 25 bp, Homo sapien
ggagcacctagcctgcgtgtgagga

SEQ ID NO: 3989530 - DNA, 25 bp, Homo sapien
taatgcaaagtccagggcaggtcct

SEQ ID NO: 3989531 - DNA, 25 bp, Homo sapien
gctcttctctgggatttcggtcttg

SEQ ID NO: 3989532 - DNA, 25 bp, Homo sapien
ccaccttggaggctcttcaggctct

SEQ ID NO: 3989533 - DNA, 25 bp, Homo sapien
ctggtgtctttgagtccccagctcc

SEQ ID NO: 3989534 - DNA, 25 bp, Homo sapien
gtctgcattggcagctgttacacgg

SEQ ID NO: 3989535 - DNA, 25 bp, Homo sapien
tgttacacggggcaggcaggttcct

SEQ ID NO: 3989536 - DNA, 25 bp, Homo sapien
tggcagctgttacacggggcaggca

SEQ ID NO: 3989537 - DNA, 25 bp, Homo sapien
ggcaggttcctgactcccactccat

SEQ ID NO: 3989538 - DNA, 25 bp, Homo sapien
tccaggcagggagaacatgaggcca

SEQ ID NO: 3989539 - DNA, 25 bp, Homo sapien
ctgaccatgggggtctgtgcacaga

SEQ ID NO: 3989540 - DNA, 25 bp, Homo sapien
gaacatgaggccagtgagatggagg

SEQ ID NO: 3989541 - DNA, 25 bp, Homo sapien
tgttccctctcaggcaggaagaccc

SEQ ID NO: 3989542 - DNA, 25 bp, Homo sapien
gaactcagagaaagtgctggtgcag

SEQ ID NO: 3989543 - DNA, 25 bp, Homo sapien
tgaactcagagaaagtgctggtgca

SEQ ID NO: 3989544 - DNA, 25 bp, Homo sapien
tgatgtaatcaacttcacccgttct

SEQ ID NO: 3989545 - DNA, 25 bp, Homo sapien
gattccagaagagtcacagatggtt

SEQ ID NO: 3989546 - DNA, 25 bp, Homo sapien
cccgttctttcatcgttggttgtat

SEQ ID NO: 3989547 - DNA, 25 bp, Homo sapien
ctatttggcttgacttaaggaattc

SEQ ID NO: 3989548 - DNA, 25 bp, Homo sapien
ctgtggagcagacagaactcatggc

SEQ ID NO: 3989549 - DNA, 25 bp, Homo sapien
gatggaaatagctcctcggctgcag

SEQ ID NO: 3989550 - DNA, 25 bp, Homo sapien
ctgcagcataaccatggcccgtggc

SEQ ID NO: 3989551 - DNA, 25 bp, Homo sapien
tcccacggtgtgctgtgtttttccc

SEQ ID NO: 3989552 - DNA, 25 bp, Homo sapien
tctgcagcggcttcccttggagacc

SEQ ID NO: 3989553 - DNA, 25 bp, Homo sapien
tcctcatcattgacaaaccactggt

SEQ ID NO: 3989554 - DNA, 25 bp, Homo sapien
gcagctatcctcatcattgacaaac

SEQ ID NO: 3989555 - DNA, 25 bp, Homo sapien
tatcctcatcattgacaaaccactg

SEQ ID NO: 3989556 - DNA, 25 bp, Homo sapien
gctatcctcatcattgacaaaccac

SEQ ID NO: 3989557 - DNA, 25 bp, Homo sapien
tcttatgagactcgcagagctctgg

SEQ ID NO: 3989558 - DNA, 25 bp, Homo sapien
gacaccgcatggctcttatgagact

SEQ ID NO: 3989559 - DNA, 25 bp, Homo sapien
gcttggtcagctcatttgacaccgc

SEQ ID NO: 3989560 - DNA, 25 bp, Homo sapien
tcacgctgtgtgttacggccgtcgg

SEQ ID NO: 3989561 - DNA, 25 bp, Homo sapien
caactccacgcagtgattcttgtat

SEQ ID NO: 3989562 - DNA, 25 bp, Homo sapien
taatcccaactccacgcagtgattc

SEQ ID NO: 3989563 - DNA, 25 bp, Homo sapien
aaacttaatcccaactccacgcagt

SEQ ID NO: 3989564 - DNA, 25 bp, Homo sapien
cacgcagtgattcttgtatcctaca

SEQ ID NO: 3989565 - DNA, 25 bp, Homo sapien
gatgatggtaattcccatgtaatta

SEQ ID NO: 3989566 - DNA, 25 bp, Homo sapien
gctttgaagaatagtcattcgactg

SEQ ID NO: 3989567 - DNA, 25 bp, Homo sapien
cattcgactggatgatggtaattcc

SEQ ID NO: 3989568 - DNA, 25 bp, Homo sapien
acccataggctgctttgaagaatag

SEQ ID NO: 3989569 - DNA, 25 bp, Homo sapien
ctggcttcagcttccggtgttccat

SEQ ID NO: 3989570 - DNA, 25 bp, Homo sapien
ctgagcaccatagtcctctggcctg

SEQ ID NO: 3989571 - DNA, 25 bp, Homo sapien
ggcctggagccccagtatctgtgag

SEQ ID NO: 3989572 - DNA, 25 bp, Homo sapien
cctggagccccagtatctgtgagct

SEQ ID NO: 3989573 - DNA, 25 bp, Homo sapien
taggaccacagtcacgactcacatt

SEQ ID NO: 3989574 - DNA, 25 bp, Homo sapien
ggttctgtagcgtgtccatcgactt

SEQ ID NO: 3989575 - DNA, 25 bp, Homo sapien
cgactcacattgtgcagatcatttt

SEQ ID NO: 3989576 - DNA, 25 bp, Homo sapien
gtccatcgacttggctgttttcatg

SEQ ID NO: 3989577 - DNA, 25 bp, Homo sapien
accaaaagccccgtcgaagctgcag

SEQ ID NO: 3989578 - DNA, 25 bp, Homo sapien
aagccccgtcgaagctgcagctttc

SEQ ID NO: 3989579 - DNA, 25 bp, Homo sapien
tgtgtcaccaaaagccccgtcgaag

SEQ ID NO: 3989580 - DNA, 25 bp, Homo sapien
tgtgtgtcaccaaaagccccgtcga

SEQ ID NO: 3989581 - DNA, 25 bp, Homo sapien
ctgcggcaggtggaattccacaccc

SEQ ID NO: 3989582 - DNA, 25 bp, Homo sapien
agctgcggcaggtggaattccacac

SEQ ID NO: 3989583 - DNA, 25 bp, Homo sapien
cacccccgtcatgtgaaggaaaagg

SEQ ID NO: 3989584 - DNA, 25 bp, Homo sapien
ttccacacccccgtcatgtgaagga

SEQ ID NO: 3989585 - DNA, 25 bp, Homo sapien
acccaccagcggaggaccagctgca

SEQ ID NO: 3989586 - DNA, 25 bp, Homo sapien
ccaactctgcgcgtgtttcaggatc

SEQ ID NO: 3989587 - DNA, 25 bp, Homo sapien
gggtgtccgcgacactgcagacact

SEQ ID NO: 3989588 - DNA, 25 bp, Homo sapien
gctctggatgtagcatcttaacatg

SEQ ID NO: 3989589 - DNA, 25 bp, Homo sapien
gtgacctccaaaaatcctccggcat

SEQ ID NO: 3989590 - DNA, 25 bp, Homo sapien
cttggattgaccaggaaagtgacct

SEQ ID NO: 3989591 - DNA, 25 bp, Homo sapien
gatcaaaagggctgcgggttccaac

SEQ ID NO: 3989592 - DNA, 25 bp, Homo sapien
cattttcagtttctagatcaaaagg

SEQ ID NO: 3989593 - DNA, 25 bp, Homo sapien
agagagcctggatgggcaccttcct

SEQ ID NO: 3989594 - DNA, 25 bp, Homo sapien
ccttcctgcaggttacatgtgtgga

SEQ ID NO: 3989595 - DNA, 25 bp, Homo sapien
agacaggctttgtgagtggcaccaa

SEQ ID NO: 3989596 - DNA, 25 bp, Homo sapien
cagcctcgctggtattttaaggcca

SEQ ID NO: 3989597 - DNA, 25 bp, Homo sapien
gggcatcagggtggtccacggctag

SEQ ID NO: 3989598 - DNA, 25 bp, Homo sapien
gcatcagggtggtccacggctagcc

SEQ ID NO: 3989599 - DNA, 25 bp, Homo sapien
ctgagcagcaagaggccccacggag

SEQ ID NO: 3989600 - DNA, 25 bp, Homo sapien
cagggtggtccacggctagccccag

SEQ ID NO: 3989601 - DNA, 25 bp, Homo sapien
tttttggaggatctgatgtaggaga

SEQ ID NO: 3989602 - DNA, 25 bp, Homo sapien
taggagaagacgtgaaccttccacg

SEQ ID NO: 3989603 - DNA, 25 bp, Homo sapien
ctgatgtaggagaagacgtgaacct

SEQ ID NO: 3989604 - DNA, 25 bp, Homo sapien
gaagacgtgaaccttccacgcaggg

SEQ ID NO: 3989605 - DNA, 25 bp, Homo sapien
ccagtgttgaggagaaagacgtgat

SEQ ID NO: 3989606 - DNA, 25 bp, Homo sapien
tgtgttacctggttccacggcctga

SEQ ID NO: 3989607 - DNA, 25 bp, Homo sapien
gactataacacatgctgatgccagc

SEQ ID NO: 3989608 - DNA, 25 bp, Homo sapien
agccagcagcggtccagatggtgac

SEQ ID NO: 3989609 - DNA, 25 bp, Homo sapien
ttttcctcaccgtagcacgtgactc

SEQ ID NO: 3989610 - DNA, 25 bp, Homo sapien
cagagattccctctttttgagtgaa

SEQ ID NO: 3989611 - DNA, 25 bp, Homo sapien
gcacagccttgacggttgtcatttt

SEQ ID NO: 3989612 - DNA, 25 bp, Homo sapien
tcaactctcatactattctcatcac

SEQ ID NO: 3989613 - DNA, 25 bp, Homo sapien
tcagttcacccctagagagcagccc

SEQ ID NO: 3989614 - DNA, 25 bp, Homo sapien
ccccacgtcacgcaaaggagaggtg

SEQ ID NO: 3989615 - DNA, 25 bp, Homo sapien
gatagagccagggacgcgagctcat

SEQ ID NO: 3989616 - DNA, 25 bp, Homo sapien
cagggcatccagtcttcagttcacc

SEQ ID NO: 3989617 - DNA, 25 bp, Homo sapien
cctggatggggatcatccccccagg

SEQ ID NO: 3989618 - DNA, 25 bp, Homo sapien
tggatggggatcatccccccaggac

SEQ ID NO: 3989619 - DNA, 25 bp, Homo sapien
tgaatctcaaagtgtccttggccct

SEQ ID NO: 3989620 - DNA, 25 bp, Homo sapien
tgctgaatctcaaagtgtccttggc

SEQ ID NO: 3989621 - DNA, 25 bp, Homo sapien
ttgtccttgagtctccacaacccga

SEQ ID NO: 3989622 - DNA, 25 bp, Homo sapien
tccttgagtctccacaacccgagaa

SEQ ID NO: 3989623 - DNA, 25 bp, Homo sapien
ctggaattgtccttgagtctccaca

SEQ ID NO: 3989624 - DNA, 25 bp, Homo sapien
tccacaacccgagaaccagcagaag

SEQ ID NO: 3989625 - DNA, 25 bp, Homo sapien
cagtgcggacagcccgatgacggca

SEQ ID NO: 3989626 - DNA, 25 bp, Homo sapien
tgcgtgcgctctgctgcagtgcgga

SEQ ID NO: 3989627 - DNA, 25 bp, Homo sapien
gggactaaagggagccactgagcat

SEQ ID NO: 3989628 - DNA, 25 bp, Homo sapien
cactgagcatgcttccgctccccac

SEQ ID NO: 3989629 - DNA, 25 bp, Homo sapien
tccttgggcttccattggtgaaaga

SEQ ID NO: 3989630 - DNA, 25 bp, Homo sapien
gcagcatccttgggcttccattggt

SEQ ID NO: 3989631 - DNA, 25 bp, Homo sapien
tggtgaaagaacacgggcttcccac

SEQ ID NO: 3989632 - DNA, 25 bp, Homo sapien
ttggtgaaagaacacgggcttccca

SEQ ID NO: 3989633 - DNA, 25 bp, Homo sapien
gggatggaagcagactctggaaaaa

SEQ ID NO: 3989634 - DNA, 25 bp, Homo sapien
ctggggatggaagcagactctggaa

SEQ ID NO: 3989635 - DNA, 25 bp, Homo sapien
gactctggaaaaaggctcttcccat

SEQ ID NO: 3989636 - DNA, 25 bp, Homo sapien
agactctggaaaaaggctcttccca

SEQ ID NO: 3989637 - DNA, 25 bp, Homo sapien
ggagccggctccagcccagccgcct

SEQ ID NO: 3989638 - DNA, 25 bp, Homo sapien
agccggctccagcccagccgcctgc

SEQ ID NO: 3989639 - DNA, 25 bp, Homo sapien
ccggctccagcccagccgcctgcac

SEQ ID NO: 3989640 - DNA, 25 bp, Homo sapien
tcaggtcacggaggagccggctcca

SEQ ID NO: 3989641 - DNA, 25 bp, Homo sapien
acagccgcttccgaagtggtcgtca

SEQ ID NO: 3989642 - DNA, 25 bp, Homo sapien
ccattgctgaggaaggtagctggga

SEQ ID NO: 3989643 - DNA, 25 bp, Homo sapien
cgaagtggtcgtcaccggtcagcag

SEQ ID NO: 3989644 - DNA, 25 bp, Homo sapien
tcctggctgagaggcgatactgcgt

SEQ ID NO: 3989645 - DNA, 25 bp, Homo sapien
gacaggttctgaactctgcagcggc

SEQ ID NO: 3989646 - DNA, 25 bp, Homo sapien
tcagccttcccctgcagacgccatg

SEQ ID NO: 3989647 - DNA, 25 bp, Homo sapien
agctgccattgtaagctctgggccc

SEQ ID NO: 3989648 - DNA, 25 bp, Homo sapien
agacgccatgaccttcacaggaccc

SEQ ID NO: 3989649 - DNA, 25 bp, Homo sapien
atcaatgcccgtgcggccgcaggga

SEQ ID NO: 3989650 - DNA, 25 bp, Homo sapien
gaactcagaagcgaagggtgtgaaa

SEQ ID NO: 3989651 - DNA, 25 bp, Homo sapien
gagagtatcagtgcaagaaccgccc

SEQ ID NO: 3989652 - DNA, 25 bp, Homo sapien
taaccacttctgacgccgctgttgt

SEQ ID NO: 3989653 - DNA, 25 bp, Homo sapien
ccatcaactccgatctgctgcacca

SEQ ID NO: 3989654 - DNA, 25 bp, Homo sapien
atcccatcaactccgatctgctgca

SEQ ID NO: 3989655 - DNA, 25 bp, Homo sapien
agacatcccatcaactccgatctgc

SEQ ID NO: 3989656 - DNA, 25 bp, Homo sapien
gacagacatcccatcaactccgatc

SEQ ID NO: 3989657 - DNA, 25 bp, Homo sapien
aagaaaagtgactgaactctcagaa

SEQ ID NO: 3989658 - DNA, 25 bp, Homo sapien
aagtgactgaactctcagaatgtac

SEQ ID NO: 3989659 - DNA, 25 bp, Homo sapien
tgactgaactctcagaatgtacaac

SEQ ID NO: 3989660 - DNA, 25 bp, Homo sapien
tgaactctcagaatgtacaactgca

SEQ ID NO: 3989661 - DNA, 25 bp, Homo sapien
gatggatgaacaccaatgagtagaa

SEQ ID NO: 3989662 - DNA, 25 bp, Homo sapien
agtggtttggtgctaatgacagagc

SEQ ID NO: 3989663 - DNA, 25 bp, Homo sapien
aacaccaatgagtagaacaaaccgt

SEQ ID NO: 3989664 - DNA, 25 bp, Homo sapien
caaaccgtgtgtagtggtttggtgc

SEQ ID NO: 3989665 - DNA, 25 bp, Homo sapien
ccttggcaataggttttgaagagcg

SEQ ID NO: 3989666 - DNA, 25 bp, Homo sapien
tctataatttgggttcgcttggttc

SEQ ID NO: 3989667 - DNA, 25 bp, Homo sapien
tcccttggcaataggttttgaagag

SEQ ID NO: 3989668 - DNA, 25 bp, Homo sapien
tctaaataggcctctataatttggg

SEQ ID NO: 3989669 - DNA, 25 bp, Homo sapien
tgcccagtgttggagcagggagatt

SEQ ID NO: 3989670 - DNA, 25 bp, Homo sapien
ctcagctgtggaatcaagccagatg

SEQ ID NO: 3989671 - DNA, 25 bp, Homo sapien
gctgtggaatcaagccagatgttcc

SEQ ID NO: 3989672 - DNA, 25 bp, Homo sapien
aacagaatgtacttgaagaggagga

SEQ ID NO: 3989673 - DNA, 25 bp, Homo sapien
caggagcagccagtgtgtcagcctg

SEQ ID NO: 3989674 - DNA, 25 bp, Homo sapien
gcctgtgattcatgaattcttgtcc

SEQ ID NO: 3989675 - DNA, 25 bp, Homo sapien
gaattcttgtccctgaaagaccaac

SEQ ID NO: 3989676 - DNA, 25 bp, Homo sapien
ggctccaggttgactatccggatac

SEQ ID NO: 3989677 - DNA, 25 bp, Homo sapien
tgtgctggcctgtgctgacaaagag

SEQ ID NO: 3989678 - DNA, 25 bp, Homo sapien
gcctgtgctgacaaagaggcccctg

SEQ ID NO: 3989679 - DNA, 25 bp, Homo sapien
gtcccactggacgtctgtgctggcc

SEQ ID NO: 3989680 - DNA, 25 bp, Homo sapien
tgggagtgatgtccgagtcccactg

SEQ ID NO: 3989681 - DNA, 25 bp, Homo sapien
ctcgctgctggagagaagcagacac

SEQ ID NO: 3989682 - DNA, 25 bp, Homo sapien
ctgctggagagaagcagacactgca

SEQ ID NO: 3989683 - DNA, 25 bp, Homo sapien
ctggagagaagcagacactgcaggg

SEQ ID NO: 3989684 - DNA, 25 bp, Homo sapien
tcgctgctggagagaagcagacact

SEQ ID NO: 3989685 - DNA, 25 bp, Homo sapien
cctcatgcagcggtggagcaacagt

SEQ ID NO: 3989686 - DNA, 25 bp, Homo sapien
cagcggtgcgaggtgaaagtcttca

SEQ ID NO: 3989687 - DNA, 25 bp, Homo sapien
tgccacgcagcggaggaagccacag

SEQ ID NO: 3989688 - DNA, 25 bp, Homo sapien
tcatagctgcggttgaacacacggc

SEQ ID NO: 3989689 - DNA, 25 bp, Homo sapien
gagaaaagtcttcacactccttctc

SEQ ID NO: 3989690 - DNA, 25 bp, Homo sapien
ctgctgggagaaaagtcttcacact

SEQ ID NO: 3989691 - DNA, 25 bp, Homo sapien
aaaagtcttcacactccttctcagt

SEQ ID NO: 3989692 - DNA, 25 bp, Homo sapien
tgctgggagaaaagtcttcacactc

SEQ ID NO: 3989693 - DNA, 25 bp, Homo sapien
gcagccttgccagctgctcagtgca

SEQ ID NO: 3989694 - DNA, 25 bp, Homo sapien
tgggggcacggggaaggcagccttg

SEQ ID NO: 3989695 - DNA, 25 bp, Homo sapien
gggcacggggaaggcagccttgcca

SEQ ID NO: 3989696 - DNA, 25 bp, Homo sapien
tgcagaatgggggcacggggaaggc

SEQ ID NO: 3989697 - DNA, 25 bp, Homo sapien
tccgctgtttatcttggaactgtaa

SEQ ID NO: 3989698 - DNA, 25 bp, Homo sapien
cctctccagaactttccgctgttta

SEQ ID NO: 3989699 - DNA, 25 bp, Homo sapien
caggtagaagcaagaacttccctct

SEQ ID NO: 3989700 - DNA, 25 bp, Homo sapien
gaactttccgctgtttatcttggaa

SEQ ID NO: 3989701 - DNA, 25 bp, Homo sapien
agcatcttcggctccctccacccac

SEQ ID NO: 3989702 - DNA, 25 bp, Homo sapien
ggcctccagcatcttcggctccctc

SEQ ID NO: 3989703 - DNA, 25 bp, Homo sapien
cttgttctcagttgtaatttgggct

SEQ ID NO: 3989704 - DNA, 25 bp, Homo sapien
tgggctttcagcacaggcatcactc

SEQ ID NO: 3989705 - DNA, 25 bp, Homo sapien
ccatgcagccatcttaacctctgaa

SEQ ID NO: 3989706 - DNA, 25 bp, Homo sapien
tgcggtcttacttttcccatgcagc

SEQ ID NO: 3989707 - DNA, 25 bp, Homo sapien
ggtcttacttttcccatgcagccat

SEQ ID NO: 3989708 - DNA, 25 bp, Homo sapien
tcttacttttcccatgcagccatct

SEQ ID NO: 3989709 - DNA, 25 bp, Homo sapien
gggaagagctgcagcccaggacgat

SEQ ID NO: 3989710 - DNA, 25 bp, Homo sapien
gaagggaagagctgcagcccaggac

SEQ ID NO: 3989711 - DNA, 25 bp, Homo sapien
ctataggcacgggaagggaagagct

SEQ ID NO: 3989712 - DNA, 25 bp, Homo sapien
tataggcacgggaagggaagagctg

SEQ ID NO: 3989713 - DNA, 25 bp, Homo sapien
cctcgataagggaggagcatgctga

SEQ ID NO: 3989714 - DNA, 25 bp, Homo sapien
tccacaaagcccctcgataagggag

SEQ ID NO: 3989715 - DNA, 25 bp, Homo sapien
gaagagacacgttcacgccattgag

SEQ ID NO: 3989716 - DNA, 25 bp, Homo sapien
attgagtcttagagcccatggcagc

SEQ ID NO: 3989717 - DNA, 25 bp, Homo sapien
aaggtcccagagcatcagcctggca

SEQ ID NO: 3989718 - DNA, 25 bp, Homo sapien
gcatttccttagcacgcgacagcag

SEQ ID NO: 3989719 - DNA, 25 bp, Homo sapien
gacgcaatggcctggaaggtcccag

SEQ ID NO: 3989720 - DNA, 25 bp, Homo sapien
gctccaaggctaggagcatgttcca

SEQ ID NO: 3989721 - DNA, 25 bp, Homo sapien
aggtagacagacctttgctccccac

SEQ ID NO: 3989722 - DNA, 25 bp, Homo sapien
ctgggcaggtagacagacctttgct

SEQ ID NO: 3989723 - DNA, 25 bp, Homo sapien
ggcaggtagacagacctttgctccc

SEQ ID NO: 3989724 - DNA, 25 bp, Homo sapien
caggtagacagacctttgctcccca

SEQ ID NO: 3989725 - DNA, 25 bp, Homo sapien
cttcctggtggaggttcagctcgag

SEQ ID NO: 3989726 - DNA, 25 bp, Homo sapien
tgcataccgccaaccacagtcaggg

SEQ ID NO: 3989727 - DNA, 25 bp, Homo sapien
agggacttcctgcataccgccaacc

SEQ ID NO: 3989728 - DNA, 25 bp, Homo sapien
aggttcagctcgagggtccgggagg

SEQ ID NO: 3989729 - DNA, 25 bp, Homo sapien
tctggggaagaccacttcccttcat

SEQ ID NO: 3989730 - DNA, 25 bp, Homo sapien
tgggtcaatgaaacagtttttaatc

SEQ ID NO: 3989731 - DNA, 25 bp, Homo sapien
tcaatgaaacagtttttaatctggg

SEQ ID NO: 3989732 - DNA, 25 bp, Homo sapien
cactgggtcaatgaaacagttttta

SEQ ID NO: 3989733 - DNA, 25 bp, Homo sapien
ggctctgagctatcaatgaacttga

SEQ ID NO: 3989734 - DNA, 25 bp, Homo sapien
tggctctgagctatcaatgaacttg

SEQ ID NO: 3989735 - DNA, 25 bp, Homo sapien
gaagcagctccgaggtacagaaacc

SEQ ID NO: 3989736 - DNA, 25 bp, Homo sapien
cagtggaagcagctccgaggtacag

SEQ ID NO: 3989737 - DNA, 25 bp, Homo sapien
cagctccgaggtacagaaacccagg

SEQ ID NO: 3989738 - DNA, 25 bp, Homo sapien
gtggaagcagctccgaggtacagaa

SEQ ID NO: 3989739 - DNA, 25 bp, Homo sapien
tgggctgctttcagcggcatctctc

SEQ ID NO: 3989740 - DNA, 25 bp, Homo sapien
tgaatccgtgccaacatggctctgg

SEQ ID NO: 3989741 - DNA, 25 bp, Homo sapien
cctctgccaaattctgggtcacgtt

SEQ ID NO: 3989742 - DNA, 25 bp, Homo sapien
tcaccgtatttagcccacacagaag

SEQ ID NO: 3989743 - DNA, 25 bp, Homo sapien
ggctctggcgtgcatgttcttccca

SEQ ID NO: 3989744 - DNA, 25 bp, Homo sapien
ttagcactaagtaaagaactatcag

SEQ ID NO: 3989745 - DNA, 25 bp, Homo sapien
cactaagtaaagaactatcagcttc

SEQ ID NO: 3989746 - DNA, 25 bp, Homo sapien
taagtaaagaactatcagcttccac

SEQ ID NO: 3989747 - DNA, 25 bp, Homo sapien
aaagaactatcagcttccacctttg

SEQ ID NO: 3989748 - DNA, 25 bp, Homo sapien
gccacggccctgaagttttgaagtc

SEQ ID NO: 3989749 - DNA, 25 bp, Homo sapien
aaatgtcctccagggtccagttcgg

SEQ ID NO: 3989750 - DNA, 25 bp, Homo sapien
ttcggcagctcgctacagaagggca

SEQ ID NO: 3989751 - DNA, 25 bp, Homo sapien
gttttgaagtctgaactgttgggct

SEQ ID NO: 3989752 - DNA, 25 bp, Homo sapien
caatggctacaactgagtgcacacc

SEQ ID NO: 3989753 - DNA, 25 bp, Homo sapien
gagtgcacaccaagctcgtatgaag

SEQ ID NO: 3989754 - DNA, 25 bp, Homo sapien
tatcccagggcgctgaggactcagc

SEQ ID NO: 3989755 - DNA, 25 bp, Homo sapien
tcgtatgaagtatcccagggcgctg

SEQ ID NO: 3989756 - DNA, 25 bp, Homo sapien
tgtgcggccacaggacaaacgccca

SEQ ID NO: 3989757 - DNA, 25 bp, Homo sapien
gttccacaatctggcaggacttcgc

SEQ ID NO: 3989758 - DNA, 25 bp, Homo sapien
aggacaaacgcccagaacctgagcc

SEQ ID NO: 3989759 - DNA, 25 bp, Homo sapien
aggacttcgcatgtgcggccacagg

SEQ ID NO: 3989760 - DNA, 25 bp, Homo sapien
gctgtgtctggttggggccgcctga

SEQ ID NO: 3989761 - DNA, 25 bp, Homo sapien
agaggaaagtccatgctggaagatt

SEQ ID NO: 3989762 - DNA, 25 bp, Homo sapien
gaaagtccatgctggaagattccca

SEQ ID NO: 3989763 - DNA, 25 bp, Homo sapien
aggagaggaaagtccatgctggaag

SEQ ID NO: 3989764 - DNA, 25 bp, Homo sapien
gcagaaggcgcatggtccaagtgcc

SEQ ID NO: 3989765 - DNA, 25 bp, Homo sapien
caggccctgcgctgagcggtgaatc

SEQ ID NO: 3989766 - DNA, 25 bp, Homo sapien
aggagccactgacacgcagaaggcg

SEQ ID NO: 3989767 - DNA, 25 bp, Homo sapien
aagaccactcgtgcctctgaggtgt

SEQ ID NO: 3989768 - DNA, 25 bp, Homo sapien
atgactccgtggcatgaagtcagca

SEQ ID NO: 3989769 - DNA, 25 bp, Homo sapien
ggaacagaatgactccgtggcatga

SEQ ID NO: 3989770 - DNA, 25 bp, Homo sapien
cacaggaacagaatgactccgtggc

SEQ ID NO: 3989771 - DNA, 25 bp, Homo sapien
cagaatgactccgtggcatgaagtc

SEQ ID NO: 3989772 - DNA, 25 bp, Homo sapien
tgctcgcagcaagtccagggacaat

SEQ ID NO: 3989773 - DNA, 25 bp, Homo sapien
gtcctggcttttcacggtccgttgc

SEQ ID NO: 3989774 - DNA, 25 bp, Homo sapien
gaccactaagaatctgtgctcgcag

SEQ ID NO: 3989775 - DNA, 25 bp, Homo sapien
tttcacggtccgttgccaggcagga

SEQ ID NO: 3989776 - DNA, 25 bp, Homo sapien
atcattttccttgagccacatccaa

SEQ ID NO: 3989777 - DNA, 25 bp, Homo sapien
tttccttgagccacatccaacacag

SEQ ID NO: 3989778 - DNA, 25 bp, Homo sapien
tcactgctctagatcatcattttcc

SEQ ID NO: 3989779 - DNA, 25 bp, Homo sapien
gccacatccaacacaggtgcatctt

SEQ ID NO: 3989780 - DNA, 25 bp, Homo sapien
taggtactcatgctcttcaggtctt

SEQ ID NO: 3989781 - DNA, 25 bp, Homo sapien
ctaggtactcatgctcttcaggtct

SEQ ID NO: 3989782 - DNA, 25 bp, Homo sapien
tcatgctcttcaggtctttcctcct

SEQ ID NO: 3989783 - DNA, 25 bp, Homo sapien
gtactcatgctcttcaggtctttcc

SEQ ID NO: 3989784 - DNA, 25 bp, Homo sapien
caatcagtagccggcaaggtgcctg

SEQ ID NO: 3989785 - DNA, 25 bp, Homo sapien
tcaatcagtagccggcaaggtgcct

SEQ ID NO: 3989786 - DNA, 25 bp, Homo sapien
ccccgaggcgagaaggcctcttcat

SEQ ID NO: 3989787 - DNA, 25 bp, Homo sapien
gctcggccaccgttggttaccatgg

SEQ ID NO: 3989788 - DNA, 25 bp, Homo sapien
tcttcatcttgccactcgggtcggc

SEQ ID NO: 3989789 - DNA, 25 bp, Homo sapien
gttaccatgggaaccatgaccgcag

SEQ ID NO: 3989790 - DNA, 25 bp, Homo sapien
ccatggccctggtcagccctcccca

SEQ ID NO: 3989791 - DNA, 25 bp, Homo sapien
gggctttccatggccctggtcagcc

SEQ ID NO: 3989792 - DNA, 25 bp, Homo sapien
ctttccatggccctggtcagccctc

SEQ ID NO: 3989793 - DNA, 25 bp, Homo sapien
ctgcggggggctttccatggccctg

SEQ ID NO: 3989794 - DNA, 25 bp, Homo sapien
actggcagaaggccgcttgctccct

SEQ ID NO: 3989795 - DNA, 25 bp, Homo sapien
tggcagaaggccgcttgctccctgg

SEQ ID NO: 3989796 - DNA, 25 bp, Homo sapien
gcagaaggccgcttgctccctgggc

SEQ ID NO: 3989797 - DNA, 25 bp, Homo sapien
tcactggcagaaggccgcttgctcc

SEQ ID NO: 3989798 - DNA, 25 bp, Homo sapien
ctgcctgctcttccgaggcagggag

SEQ ID NO: 3989799 - DNA, 25 bp, Homo sapien
gctgcctgctcttccgaggcaggga

SEQ ID NO: 3989800 - DNA, 25 bp, Homo sapien
tgcctgctcttccgaggcagggagg

SEQ ID NO: 3989801 - DNA, 25 bp, Homo sapien
gcctgctcttccgaggcagggaggc

SEQ ID NO: 3989802 - DNA, 25 bp, Homo sapien
cccgggcttcaggacaagacggctg

SEQ ID NO: 3989803 - DNA, 25 bp, Homo sapien
aactgttggcgggagggcgctggct

SEQ ID NO: 3989804 - DNA, 25 bp, Homo sapien
ggcccacccgggcttcaggacaaga

SEQ ID NO: 3989805 - DNA, 25 bp, Homo sapien
acctgggagaccaactgttggcggg

SEQ ID NO: 3989806 - DNA, 25 bp, Homo sapien
tagggcccagcgaggaaggggtgga

SEQ ID NO: 3989807 - DNA, 25 bp, Homo sapien
ctagggcccagcgaggaaggggtgg

SEQ ID NO: 3989808 - DNA, 25 bp, Homo sapien
ccagcgaggaaggggtggaaaactg

SEQ ID NO: 3989809 - DNA, 25 bp, Homo sapien
cagcgaggaaggggtggaaaactga

SEQ ID NO: 3989810 - DNA, 25 bp, Homo sapien
gagggcctggcgaatgccccagcag

SEQ ID NO: 3989811 - DNA, 25 bp, Homo sapien
cgagggcctggcgaatgccccagca

SEQ ID NO: 3989812 - DNA, 25 bp, Homo sapien
ctgggataaacaggaagtcagcctg

SEQ ID NO: 3989813 - DNA, 25 bp, Homo sapien
gggcacgttgctggggaatctggcc

SEQ ID NO: 3989814 - DNA, 25 bp, Homo sapien
ctggccctggcaaattcccaggagg

SEQ ID NO: 3989815 - DNA, 25 bp, Homo sapien
gtttgtcagactttggggcacgttg

SEQ ID NO: 3989816 - DNA, 25 bp, Homo sapien
ggaatctggccctggcaaattccca

SEQ ID NO: 3989817 - DNA, 25 bp, Homo sapien
ccagagtctctgtgtgtactttccc

SEQ ID NO: 3989818 - DNA, 25 bp, Homo sapien
tgaagaatttcttatttcaccaaca

SEQ ID NO: 3989819 - DNA, 25 bp, Homo sapien
ttccagagtctctgtgtgtactttc

SEQ ID NO: 3989820 - DNA, 25 bp, Homo sapien
tctgtgtgtactttccctaggattc

SEQ ID NO: 3989821 - DNA, 25 bp, Homo sapien
cagcccctagtcggatgcggttctc

SEQ ID NO: 3989822 - DNA, 25 bp, Homo sapien
gcccctagtcggatgcggttctcta

SEQ ID NO: 3989823 - DNA, 25 bp, Homo sapien
gatgcggttctctaagtcctcaatg

SEQ ID NO: 3989824 - DNA, 25 bp, Homo sapien
tgcggttctctaagtcctcaatgaa

SEQ ID NO: 3989825 - DNA, 25 bp, Homo sapien
aagaagctccactgctgtcctgatc

SEQ ID NO: 3989826 - DNA, 25 bp, Homo sapien
accagaagaagctccactgctgtcc

SEQ ID NO: 3989827 - DNA, 25 bp, Homo sapien
aaacagacaccagaagaagctccac

SEQ ID NO: 3989828 - DNA, 25 bp, Homo sapien
gaaacagacaccagaagaagctcca

SEQ ID NO: 3989829 - DNA, 25 bp, Homo sapien
tgagcccgagagcacgatgcagagc

SEQ ID NO: 3989830 - DNA, 25 bp, Homo sapien
gctgagcccgagagcacgatgcaga

SEQ ID NO: 3989831 - DNA, 25 bp, Homo sapien
agagcacgatgcagagccagcgtga

SEQ ID NO: 3989832 - DNA, 25 bp, Homo sapien
ccgagagcacgatgcagagccagcg

SEQ ID NO: 3989833 - DNA, 25 bp, Homo sapien
cggatgcagggaccagctctgctgc

SEQ ID NO: 3989834 - DNA, 25 bp, Homo sapien
ggagcccggatgcagggaccagctc

SEQ ID NO: 3989835 - DNA, 25 bp, Homo sapien
ctggagcccggatgcagggaccagc

SEQ ID NO: 3989836 - DNA, 25 bp, Homo sapien
cccggatgcagggaccagctctgct

SEQ ID NO: 3989837 - DNA, 25 bp, Homo sapien
ggacgttccagcatgtgagcctgcg

SEQ ID NO: 3989838 - DNA, 25 bp, Homo sapien
gacgttccagcatgtgagcctgcgg

SEQ ID NO: 3989839 - DNA, 25 bp, Homo sapien
acgttccagcatgtgagcctgcggg

SEQ ID NO: 3989840 - DNA, 25 bp, Homo sapien
ggacgttcccgcatgtgagcctgcg

SEQ ID NO: 3989841 - DNA, 25 bp, Homo sapien
ctgcgggggacgttccagcatgtga

SEQ ID NO: 3989842 - DNA, 25 bp, Homo sapien
tgcgggggacgttccagcatgtgag

SEQ ID NO: 3989843 - DNA, 25 bp, Homo sapien
gagggggacgttccagcatgtgagt

SEQ ID NO: 3989844 - DNA, 25 bp, Homo sapien
tgagggggacgttccagcatgtgag

SEQ ID NO: 3989845 - DNA, 25 bp, Homo sapien
ctgagggggacgttccagcatgtga

SEQ ID NO: 3989846 - DNA, 25 bp, Homo sapien
gtggccaagggcatggtgagagact

SEQ ID NO: 3989847 - DNA, 25 bp, Homo sapien
tggccaagggcatggtgagagactt

SEQ ID NO: 3989848 - DNA, 25 bp, Homo sapien
gccaagggcatggtgagagactttc

SEQ ID NO: 3989849 - DNA, 25 bp, Homo sapien
caagggcatggtgagagactttctc

SEQ ID NO: 3989850 - DNA, 25 bp, Homo sapien
ttcatggaataattgtcccaatcct

SEQ ID NO: 3989851 - DNA, 25 bp, Homo sapien
ctgttcatggaataattgtcccaat

SEQ ID NO: 3989852 - DNA, 25 bp, Homo sapien
cgtcatcactgctccgagggtggga

SEQ ID NO: 3989853 - DNA, 25 bp, Homo sapien
cccgtcatcactgctccgagggtgg

SEQ ID NO: 3989854 - DNA, 25 bp, Homo sapien
ggtaggaagaagctgtgggctccgc

SEQ ID NO: 3989855 - DNA, 25 bp, Homo sapien
acggtaggaagaagctgtgggctcc

SEQ ID NO: 3989856 - DNA, 25 bp, Homo sapien
tacggtaggaagaagctgtgggctc

SEQ ID NO: 3989857 - DNA, 25 bp, Homo sapien
ggtacggtaggaagaagctgtgggc

SEQ ID NO: 3989858 - DNA, 25 bp, Homo sapien
tcaagaaggccatgccgtggagcag

SEQ ID NO: 3989859 - DNA, 25 bp, Homo sapien
tttgcatttgtcagcaccgatgccc

SEQ ID NO: 3989860 - DNA, 25 bp, Homo sapien
tgctgggaactctcttggcagcctt

SEQ ID NO: 3989861 - DNA, 25 bp, Homo sapien
gctcatgttccataattcctgacaa

SEQ ID NO: 3989862 - DNA, 25 bp, Homo sapien
tggtacgcacgtccagtggtcacag

SEQ ID NO: 3989863 - DNA, 25 bp, Homo sapien
agaaggaaacggtggcactgccgcc

SEQ ID NO: 3989864 - DNA, 25 bp, Homo sapien
ctggtacgcacgtccagtggtcaca

SEQ ID NO: 3989865 - DNA, 25 bp, Homo sapien
aacagattgtttagggctcccacca

SEQ ID NO: 3989866 - DNA, 25 bp, Homo sapien
cttgggaaaggccacatcctcagca

SEQ ID NO: 3989867 - DNA, 25 bp, Homo sapien
ctacccgccatgatcccctccaggg

SEQ ID NO: 3989868 - DNA, 25 bp, Homo sapien
cagcttgggaaaggccacatcctca

SEQ ID NO: 3989869 - DNA, 25 bp, Homo sapien
gggccagcttgggaaaggccacatc

SEQ ID NO: 3989870 - DNA, 25 bp, Homo sapien
agcacctaaagggttgcacagggtg

SEQ ID NO: 3989871 - DNA, 25 bp, Homo sapien
catcccggtctccagtcagtggagc

SEQ ID NO: 3989872 - DNA, 25 bp, Homo sapien
tggagcacctaaagggttgcacagg

SEQ ID NO: 3989873 - DNA, 25 bp, Homo sapien
agtggagcacctaaagggttgcaca

SEQ ID NO: 3989874 - DNA, 25 bp, Homo sapien
aggagccacttccttgtgggaacac

SEQ ID NO: 3989875 - DNA, 25 bp, Homo sapien
cttgtgggaacacagccctgttcat

SEQ ID NO: 3989876 - DNA, 25 bp, Homo sapien
tccttgtgggaacacagccctgttc

SEQ ID NO: 3989877 - DNA, 25 bp, Homo sapien
gagccacttccttgtgggaacacag

SEQ ID NO: 3989878 - DNA, 25 bp, Homo sapien
tctttgcagagaacattgggagccc

SEQ ID NO: 3989879 - DNA, 25 bp, Homo sapien
tcagtctttgcagagaacattggga

SEQ ID NO: 3989880 - DNA, 25 bp, Homo sapien
tgcagagaacattgggagcccacat

SEQ ID NO: 3989881 - DNA, 25 bp, Homo sapien
gagaacattgggagcccacatttga

SEQ ID NO: 3989882 - DNA, 25 bp, Homo sapien
ggatgctaaaaatggtggcttcaca

SEQ ID NO: 3989883 - DNA, 25 bp, Homo sapien
tgctaaaaatggtggcttcacacag

SEQ ID NO: 3989884 - DNA, 25 bp, Homo sapien
ttcacacagtgaccccgggctgcct

SEQ ID NO: 3989885 - DNA, 25 bp, Homo sapien
gctaaaaatggtggcttcacacagt

SEQ ID NO: 3989886 - DNA, 25 bp, Homo sapien
tgccagggcggtcttaggtcccaga

SEQ ID NO: 3989887 - DNA, 25 bp, Homo sapien
caggagtccccagattttgtggact

SEQ ID NO: 3989888 - DNA, 25 bp, Homo sapien
cagactgactgtgctaacacccact

SEQ ID NO: 3989889 - DNA, 25 bp, Homo sapien
ggactgttgctggtgaaaagtgcca

SEQ ID NO: 3989890 - DNA, 25 bp, Homo sapien
gagccatcggcagggccaacttggc

SEQ ID NO: 3989891 - DNA, 25 bp, Homo sapien
ctgagccatcggcagggccaacttg

SEQ ID NO: 3989892 - DNA, 25 bp, Homo sapien
caacttggcaggagcacaagctgcc

SEQ ID NO: 3989893 - DNA, 25 bp, Homo sapien
tgagccatcggcagggccaacttgg

SEQ ID NO: 3989894 - DNA, 25 bp, Homo sapien
agtgatgttaacaccttcctcagga

SEQ ID NO: 3989895 - DNA, 25 bp, Homo sapien
agcagtgatgttaacaccttcctca

SEQ ID NO: 3989896 - DNA, 25 bp, Homo sapien
cagtgatgttaacaccttcctcagg

SEQ ID NO: 3989897 - DNA, 25 bp, Homo sapien
gtgatgttaacaccttcctcaggaa

SEQ ID NO: 3989898 - DNA, 25 bp, Homo sapien
ggtggtgtttacctttcaggcatcc

SEQ ID NO: 3989899 - DNA, 25 bp, Homo sapien
tgtttacctttcaggcatcctggaa

SEQ ID NO: 3989900 - DNA, 25 bp, Homo sapien
ctgttcatcaaggtggtgtttacct

SEQ ID NO: 3989901 - DNA, 25 bp, Homo sapien
tggtgtttacctttcaggcatcctg

SEQ ID NO: 3989902 - DNA, 25 bp, Homo sapien
agcttgcttttttgacctggactca

SEQ ID NO: 3989903 - DNA, 25 bp, Homo sapien
gggggcgaggagcttgcttttttga

SEQ ID NO: 3989904 - DNA, 25 bp, Homo sapien
gcttgcttttttgacctggactcac

SEQ ID NO: 3989905 - DNA, 25 bp, Homo sapien
ggcgaggagcttgcttttttgacct

SEQ ID NO: 3989906 - DNA, 25 bp, Homo sapien
gctcaggttcccgagatccccggct

SEQ ID NO: 3989907 - DNA, 25 bp, Homo sapien
tcaggttcccgagatccccggctgg

SEQ ID NO: 3989908 - DNA, 25 bp, Homo sapien
cggctgggccgttgtttgcaggcat

SEQ ID NO: 3989909 - DNA, 25 bp, Homo sapien
cgagatccccggctgggccgttgtt

SEQ ID NO: 3989910 - DNA, 25 bp, Homo sapien
taacgagccgactctcgtggctggg

SEQ ID NO: 3989911 - DNA, 25 bp, Homo sapien
gcaggtctcatcctaggtgccactt

SEQ ID NO: 3989912 - DNA, 25 bp, Homo sapien
ccctttgctgcaggcctttgcggac

SEQ ID NO: 3989913 - DNA, 25 bp, Homo sapien
atgcagtcgagtccccggcaggtct

SEQ ID NO: 3989914 - DNA, 25 bp, Homo sapien
cagcattccagggcccacatcgtca

SEQ ID NO: 3989915 - DNA, 25 bp, Homo sapien
tcctgtgacgccagcattccagggc

SEQ ID NO: 3989916 - DNA, 25 bp, Homo sapien
caggcccatcctgtgacgccagcat

SEQ ID NO: 3989917 - DNA, 25 bp, Homo sapien
catcctgtgacgccagcattccagg

SEQ ID NO: 3989918 - DNA, 25 bp, Homo sapien
gcggtgaccaccacgctcaggctga

SEQ ID NO: 3989919 - DNA, 25 bp, Homo sapien
aaaactcgcggtgaccaccacgctc

SEQ ID NO: 3989920 - DNA, 25 bp, Homo sapien
ccaaaactcgcggtgaccaccacgc

SEQ ID NO: 3989921 - DNA, 25 bp, Homo sapien
gaccaccacgctcaggctgacaaag

SEQ ID NO: 3989922 - DNA, 25 bp, Homo sapien
aactcctgactgccgagcacagggc

SEQ ID NO: 3989923 - DNA, 25 bp, Homo sapien
ctcctgactgccgagcacagggcag

SEQ ID NO: 3989924 - DNA, 25 bp, Homo sapien
gaactcctgactgccgagcacaggg

SEQ ID NO: 3989925 - DNA, 25 bp, Homo sapien
actcctgactgccgagcacagggca

SEQ ID NO: 3989926 - DNA, 25 bp, Homo sapien
ttccagcatccccacggagcgcagg

SEQ ID NO: 3989927 - DNA, 25 bp, Homo sapien
ccagcatccccacggagcgcaggtt

SEQ ID NO: 3989928 - DNA, 25 bp, Homo sapien
ccccacggagcgcaggttccttctg

SEQ ID NO: 3989929 - DNA, 25 bp, Homo sapien
ccacggagcgcaggttccttctgag

SEQ ID NO: 3989930 - DNA, 25 bp, Homo sapien
acattccaggtaaaggcgcatgcga

SEQ ID NO: 3989931 - DNA, 25 bp, Homo sapien
ggggcagctgcaacattccaggtaa

SEQ ID NO: 3989932 - DNA, 25 bp, Homo sapien
ctagagtgtgcagcgcacaccagag

SEQ ID NO: 3989933 - DNA, 25 bp, Homo sapien
ccaggtaaaggcgcatgcgaagacc

SEQ ID NO: 3989934 - DNA, 25 bp, Homo sapien
ggtgaacattttagggccactgaag

SEQ ID NO: 3989935 - DNA, 25 bp, Homo sapien
attttagggccactgaagctccact

SEQ ID NO: 3989936 - DNA, 25 bp, Homo sapien
tcaggtgaacattttagggccactg

SEQ ID NO: 3989937 - DNA, 25 bp, Homo sapien
tttagggccactgaagctccactct

SEQ ID NO: 3989938 - DNA, 25 bp, Homo sapien
gagccagaggactccctatataggt

SEQ ID NO: 3989939 - DNA, 25 bp, Homo sapien
agccagaggactccctatataggtc

SEQ ID NO: 3989940 - DNA, 25 bp, Homo sapien
ccagaggactccctatataggtcat

SEQ ID NO: 3989941 - DNA, 25 bp, Homo sapien
gccagaggactccctatataggtca

SEQ ID NO: 3989942 - DNA, 25 bp, Homo sapien
aaagtaaagatggtgcgatacttcc

SEQ ID NO: 3989943 - DNA, 25 bp, Homo sapien
agtaaagatggtgcgatacttccat

SEQ ID NO: 3989944 - DNA, 25 bp, Homo sapien
agtgcctagctggttccagtcgaaa

SEQ ID NO: 3989945 - DNA, 25 bp, Homo sapien
ccagtcgaaaggcaactgtttcaaa

SEQ ID NO: 3989946 - DNA, 25 bp, Homo sapien
ccctgggtatccaattgctggcaaa

SEQ ID NO: 3989947 - DNA, 25 bp, Homo sapien
tggcaaatgtgacggttttctccca

SEQ ID NO: 3989948 - DNA, 25 bp, Homo sapien
tatgtacatcataaagttagtctga

SEQ ID NO: 3989949 - DNA, 25 bp, Homo sapien
tcccatccagtacgagttgtttttc

SEQ ID NO: 3989950 - DNA, 25 bp, Homo sapien
atccccgtactgtccagagtggtca

SEQ ID NO: 3989951 - DNA, 25 bp, Homo sapien
gagccccactatctgcacaactttc

SEQ ID NO: 3989952 - DNA, 25 bp, Homo sapien
caaaacatccccgtactgtccagag

SEQ ID NO: 3989953 - DNA, 25 bp, Homo sapien
catgaccaaaacatccccgtactgt

SEQ ID NO: 3989954 - DNA, 25 bp, Homo sapien
tgatggtcacgccacaggctctttc

SEQ ID NO: 3989955 - DNA, 25 bp, Homo sapien
tccaagatgctgtcagcagacctga

SEQ ID NO: 3989956 - DNA, 25 bp, Homo sapien
tgtcagcagacctgaggtgctcctg

SEQ ID NO: 3989957 - DNA, 25 bp, Homo sapien
cgccacaggctctttccaagatgct

SEQ ID NO: 3989958 - DNA, 25 bp, Homo sapien
gctgagcagtgaaactggttcccct

SEQ ID NO: 3989959 - DNA, 25 bp, Homo sapien
gcagttggtccagccacagagttgg

SEQ ID NO: 3989960 - DNA, 25 bp, Homo sapien
caccgcaggaggcactgtctatggc

SEQ ID NO: 3989961 - DNA, 25 bp, Homo sapien
tatccagtaccagggaacgcgaagg

SEQ ID NO: 3989962 - DNA, 25 bp, Homo sapien
cacatcggcttccacataggtgttc

SEQ ID NO: 3989963 - DNA, 25 bp, Homo sapien
catcggcttccacataggtgttcat

SEQ ID NO: 3989964 - DNA, 25 bp, Homo sapien
ccacatcggcttccacataggtgtt

SEQ ID NO: 3989965 - DNA, 25 bp, Homo sapien
acccacatcggcttccacataggtg

SEQ ID NO: 3989966 - DNA, 25 bp, Homo sapien
gcgtggctccccagcgccaccagga

SEQ ID NO: 3989967 - DNA, 25 bp, Homo sapien
aggagcccacagaggctcccaggca

SEQ ID NO: 3989968 - DNA, 25 bp, Homo sapien
cccacagaggctcccaggcacctac

SEQ ID NO: 3989969 - DNA, 25 bp, Homo sapien
tcagcgtggctccccagcgccacca

SEQ ID NO: 3989970 - DNA, 25 bp, Homo sapien
gtgacgatgtcctcgctcagctggc

SEQ ID NO: 3989971 - DNA, 25 bp, Homo sapien
tacacatgtgtttcgtgctgcccac

SEQ ID NO: 3989972 - DNA, 25 bp, Homo sapien
acctggcgtcctctctacacatgtg

SEQ ID NO: 3989973 - DNA, 25 bp, Homo sapien
tctgtgctcagatggtctcgggccc

SEQ ID NO: 3989974 - DNA, 25 bp, Homo sapien
agtgagtttggcctttgactccctg

SEQ ID NO: 3989975 - DNA, 25 bp, Homo sapien
ccaagtggccatcactccttgattt

SEQ ID NO: 3989976 - DNA, 25 bp, Homo sapien
cacacgtggaggtttggccacttca

SEQ ID NO: 3989977 - DNA, 25 bp, Homo sapien
cccacacgtggaggtttggccactt

SEQ ID NO: 3989978 - DNA, 25 bp, Homo sapien
tgaaccacacggttccccaagtggc

SEQ ID NO: 3989979 - DNA, 25 bp, Homo sapien
ggagcttctcccgtactgaaggcat

SEQ ID NO: 3989980 - DNA, 25 bp, Homo sapien
tgctgggttgcctctcactgcggct

SEQ ID NO: 3989981 - DNA, 25 bp, Homo sapien
tctggtccttttctacccgggcatc

SEQ ID NO: 3989982 - DNA, 25 bp, Homo sapien
ctgcttcacagaaagccccaacaca

SEQ ID NO: 3989983 - DNA, 25 bp, Homo sapien
gcttcacagaaagccccaacacagg

SEQ ID NO: 3989984 - DNA, 25 bp, Homo sapien
caccacgtcgtaaacacagcccttt

SEQ ID NO: 3989985 - DNA, 25 bp, Homo sapien
ctctccctccaccacgtcgtaaaca

SEQ ID NO: 3989986 - DNA, 25 bp, Homo sapien
ctggggatgacacgtcacaggtgca

SEQ ID NO: 3989987 - DNA, 25 bp, Homo sapien
acaagctcgcctgtgctccggaatg

SEQ ID NO: 3989988 - DNA, 25 bp, Homo sapien
aggtgcagtgcccacaagctcgcct

SEQ ID NO: 3989989 - DNA, 25 bp, Homo sapien
tcgcctgtgctccggaatgacagca

SEQ ID NO: 3989990 - DNA, 25 bp, Homo sapien
gggtgtggtgttggaatgtgacagc

SEQ ID NO: 3989991 - DNA, 25 bp, Homo sapien
gctgtgcatgcacactcgaagcggg

SEQ ID NO: 3989992 - DNA, 25 bp, Homo sapien
cagctgcttgcagacctcagggtcc

SEQ ID NO: 3989993 - DNA, 25 bp, Homo sapien
cgaagcggggtgtggtgttggaatg

SEQ ID NO: 3989994 - DNA, 25 bp, Homo sapien
aagtttctagggaagtaacaggcat

SEQ ID NO: 3989995 - DNA, 25 bp, Homo sapien
caagtttctagggaagtaacaggca

SEQ ID NO: 3989996 - DNA, 25 bp, Homo sapien
acaatgaagcatacagcaggacaca

SEQ ID NO: 3989997 - DNA, 25 bp, Homo sapien
caatgaagcatacagcaggacacac

SEQ ID NO: 3989998 - DNA, 25 bp, Homo sapien
gctccatgagctgacccaagggttt

SEQ ID NO: 3989999 - DNA, 25 bp, Homo sapien
tgaggcctcacgactggtacatggg

SEQ ID NO: 3990000 - DNA, 25 bp, Homo sapien
tacatggggccttcatgagcgccag

SEQ ID NO: 3990001 - DNA, 25 bp, Homo sapien
ctgacccaagggtttggcctcagtg

SEQ ID NO: 3990002 - DNA, 25 bp, Homo sapien
ctgagcacccaaggatagagctgac

SEQ ID NO: 3990003 - DNA, 25 bp, Homo sapien
gagcacccaaggatagagctgacat

SEQ ID NO: 3990004 - DNA, 25 bp, Homo sapien
tgagcacccaaggatagagctgaca

SEQ ID NO: 3990005 - DNA, 25 bp, Homo sapien
tggcttttccctatagtgactgagg

SEQ ID NO: 3990006 - DNA, 25 bp, Homo sapien
cgaagccttaggtggaatctggaag

SEQ ID NO: 3990007 - DNA, 25 bp, Homo sapien
aagctttcaacagcccatggctttt

SEQ ID NO: 3990008 - DNA, 25 bp, Homo sapien
gggtaaaaatccagagtcaagagtg

SEQ ID NO: 3990009 - DNA, 25 bp, Homo sapien
gagtgggcaactccatgataaaggc

SEQ ID NO: 3990010 - DNA, 25 bp, Homo sapien
gagtgcagggaaagtccaccgaaag

SEQ ID NO: 3990011 - DNA, 25 bp, Homo sapien
accgaaagtctcagagagggcaagc

SEQ ID NO: 3990012 - DNA, 25 bp, Homo sapien
cagagtgggcaactccatgataaag

SEQ ID NO: 3990013 - DNA, 25 bp, Homo sapien
ggacaacaggcccacttttgaggct

SEQ ID NO: 3990014 - DNA, 25 bp, Homo sapien
aggctccggtcctgcgtgcacagtg

SEQ ID NO: 3990015 - DNA, 25 bp, Homo sapien
cacttttgaggctccggtcctgcgt

SEQ ID NO: 3990016 - DNA, 25 bp, Homo sapien
gccctggacaacaggcccacttttg

SEQ ID NO: 3990017 - DNA, 25 bp, Homo sapien
ctaaggagtgtggcgcatgcaaagc

SEQ ID NO: 3990018 - DNA, 25 bp, Homo sapien
taaggagtgtggcgcatgcaaagca

SEQ ID NO: 3990019 - DNA, 25 bp, Homo sapien
aaggagtgtggcgcatgcaaagcac

SEQ ID NO: 3990020 - DNA, 25 bp, Homo sapien
cccagtgccatttacgaagagaaac

SEQ ID NO: 3990021 - DNA, 25 bp, Homo sapien
tagaaccacgggcatgtgactgggc

SEQ ID NO: 3990022 - DNA, 25 bp, Homo sapien
cctgccggggatgccatggttatcc

SEQ ID NO: 3990023 - DNA, 25 bp, Homo sapien
tgactgggccatactgaggcctgac

SEQ ID NO: 3990024 - DNA, 25 bp, Homo sapien
agaggagaagcccagtgcagggccc

SEQ ID NO: 3990025 - DNA, 25 bp, Homo sapien
aggagaagcccagtgcagggcccac

SEQ ID NO: 3990026 - DNA, 25 bp, Homo sapien
atgaagggagcccagaggagaagcc

SEQ ID NO: 3990027 - DNA, 25 bp, Homo sapien
gagcccagaggagaagcccagtgca

SEQ ID NO: 3990028 - DNA, 25 bp, Homo sapien
tctgttcctcttccgatttgtcatc

SEQ ID NO: 3990029 - DNA, 25 bp, Homo sapien
ccagggcggccaccgagtgggagat

SEQ ID NO: 3990030 - DNA, 25 bp, Homo sapien
gggcaggtgctcagcggtggacacg

SEQ ID NO: 3990031 - DNA, 25 bp, Homo sapien
tccgggaagggaatgtgtgtctggg

SEQ ID NO: 3990032 - DNA, 25 bp, Homo sapien
gccccgccttcgctcgaaacagcag

SEQ ID NO: 3990033 - DNA, 25 bp, Homo sapien
ccccgccttcgctcgaaacagcagc

SEQ ID NO: 3990034 - DNA, 25 bp, Homo sapien
tcattcagcaaatgcgtatggagct

SEQ ID NO: 3990035 - DNA, 25 bp, Homo sapien
gaccatagtgcctgtcgctgtaaac

SEQ ID NO: 3990036 - DNA, 25 bp, Homo sapien
aatgcgtatggagctgccaccgcgt

SEQ ID NO: 3990037 - DNA, 25 bp, Homo sapien
tctgacactggaccttgagaccata

SEQ ID NO: 3990038 - DNA, 25 bp, Homo sapien
tcctctccacagacacgtctgggct

SEQ ID NO: 3990039 - DNA, 25 bp, Homo sapien
ctctccacagacacgtctgggctca

SEQ ID NO: 3990040 - DNA, 25 bp, Homo sapien
gacacgtctgggctcaggccctccc

SEQ ID NO: 3990041 - DNA, 25 bp, Homo sapien
cctctccacagacacgtctgggctc

SEQ ID NO: 3990042 - DNA, 25 bp, Homo sapien
tcttcagcctggaaactagcacaca

SEQ ID NO: 3990043 - DNA, 25 bp, Homo sapien
taagggggcccactcgtattcatct

SEQ ID NO: 3990044 - DNA, 25 bp, Homo sapien
cctggaaactagcacacatcagaca

SEQ ID NO: 3990045 - DNA, 25 bp, Homo sapien
gggcccactcgtattcatcttcagc

SEQ ID NO: 3990046 - DNA, 25 bp, Homo sapien
gagaagctccccagtaggattcgag

SEQ ID NO: 3990047 - DNA, 25 bp, Homo sapien
gaggacagaagttgccgctgacatt

SEQ ID NO: 3990048 - DNA, 25 bp, Homo sapien
gatgtgaagtctccttccccgagaa

SEQ ID NO: 3990049 - DNA, 25 bp, Homo sapien
gcaagttgctttctgtggtgagtct

SEQ ID NO: 3990050 - DNA, 25 bp, Homo sapien
ggagctgggcttgagcagaaatccc

SEQ ID NO: 3990051 - DNA, 25 bp, Homo sapien
accccgagcacccagggagctgggc

SEQ ID NO: 3990052 - DNA, 25 bp, Homo sapien
agcagaaatcccaggcggccgcccg

SEQ ID NO: 3990053 - DNA, 25 bp, Homo sapien
ggcttgagcagaaatcccaggcggc

SEQ ID NO: 3990054 - DNA, 25 bp, Homo sapien
tctgtatttaactcatcaagcctcg

SEQ ID NO: 3990055 - DNA, 25 bp, Homo sapien
gtatttaactcatcaagcctcgtca

SEQ ID NO: 3990056 - DNA, 25 bp, Homo sapien
tttggggtaataggatgggaagcac

SEQ ID NO: 3990057 - DNA, 25 bp, Homo sapien
tcatcaagcctcgtcacagacgctt

SEQ ID NO: 3990058 - DNA, 25 bp, Homo sapien
agtggcacagccaccgccatcacga

SEQ ID NO: 3990059 - DNA, 25 bp, Homo sapien
agtggcacagccaccgccatcacaa

SEQ ID NO: 3990060 - DNA, 25 bp, Homo sapien
cgccatcacgaaccacagggccagt

SEQ ID NO: 3990061 - DNA, 25 bp, Homo sapien
caccgccatcacaagacatgaaggg

SEQ ID NO: 3990062 - DNA, 25 bp, Homo sapien
ccccataatcgggcggcaggtcagc

SEQ ID NO: 3990063 - DNA, 25 bp, Homo sapien
ataatcgggcggcaggtcagcggtg

SEQ ID NO: 3990064 - DNA, 25 bp, Homo sapien
ggcggcaggtcagcggtgagggagc

SEQ ID NO: 3990065 - DNA, 25 bp, Homo sapien
aggtcagcggtgagggagctgcccc

SEQ ID NO: 3990066 - DNA, 25 bp, Homo sapien
tgcaaatcccatagcagggaccaac

SEQ ID NO: 3990067 - DNA, 25 bp, Homo sapien
caatggtgcaaatcccatagcaggg

SEQ ID NO: 3990068 - DNA, 25 bp, Homo sapien
gaatcaccacatccaggggcctggg

SEQ ID NO: 3990069 - DNA, 25 bp, Homo sapien
tccaccaatggtgcaaatcccatag

SEQ ID NO: 3990070 - DNA, 25 bp, Homo sapien
cgcaggggagaggtgggcaggactc

SEQ ID NO: 3990071 - DNA, 25 bp, Homo sapien
caggggagaggtgggcaggactcac

SEQ ID NO: 3990072 - DNA, 25 bp, Homo sapien
ctgcagcgcaggggagaggtgggca

SEQ ID NO: 3990073 - DNA, 25 bp, Homo sapien
agcgcaggggagaggtgggcaggac

SEQ ID NO: 3990074 - DNA, 25 bp, Homo sapien
caggggagaggtggccaggactcac

SEQ ID NO: 3990075 - DNA, 25 bp, Homo sapien
tgcagtgcaggggagaggtggccag

SEQ ID NO: 3990076 - DNA, 25 bp, Homo sapien
gggttctgcctgcagtgcaggggag

SEQ ID NO: 3990077 - DNA, 25 bp, Homo sapien
gttctgcctgcagtgcaggggagag

SEQ ID NO: 3990078 - DNA, 25 bp, Homo sapien
gtggccaggactcatgggttctcct

SEQ ID NO: 3990079 - DNA, 25 bp, Homo sapien
ggactcatgggttctcctcgcagcg

SEQ ID NO: 3990080 - DNA, 25 bp, Homo sapien
catgggttctcctcgcagcgcaggg

SEQ ID NO: 3990081 - DNA, 25 bp, Homo sapien
caggactcatgggttctcctcgcag

SEQ ID NO: 3990082 - DNA, 25 bp, Homo sapien
caggggagaggtgggcaggactcac

SEQ ID NO: 3990083 - DNA, 25 bp, Homo sapien
tgcaggggagaggtgggcaggactc

SEQ ID NO: 3990084 - DNA, 25 bp, Homo sapien
ctgcagtgcaggggagaggtgggca

SEQ ID NO: 3990085 - DNA, 25 bp, Homo sapien
agtgcaggggagaggtgggcaggac

SEQ ID NO: 3990086 - DNA, 25 bp, Homo sapien
ccctgcagcacaggggagaggtggg

SEQ ID NO: 3990087 - DNA, 25 bp, Homo sapien
tccctgcagcacaggggagaggtgg

SEQ ID NO: 3990088 - DNA, 25 bp, Homo sapien
gggttttccctgcagcacaggggag

SEQ ID NO: 3990089 - DNA, 25 bp, Homo sapien
ttttccctgcagcacaggggagagg

SEQ ID NO: 3990090 - DNA, 25 bp, Homo sapien
gagaggtgggcaggactcacgggtt

SEQ ID NO: 3990091 - DNA, 25 bp, Homo sapien
ggttctgcctgcagcgcaggggaga

SEQ ID NO: 3990092 - DNA, 25 bp, Homo sapien
ggtgggcaggactcacgggttctgc

SEQ ID NO: 3990093 - DNA, 25 bp, Homo sapien
gttctgcctgcagcgcaggggagag

SEQ ID NO: 3990094 - DNA, 25 bp, Homo sapien
gagaggtgggcaggactcacgggtt

SEQ ID NO: 3990095 - DNA, 25 bp, Homo sapien
ctgcagcgcaggggagaggtgggca

SEQ ID NO: 3990096 - DNA, 25 bp, Homo sapien
gaggtgggcaggactcacgggttct

SEQ ID NO: 3990097 - DNA, 25 bp, Homo sapien
ggtgggcaggactcacgggttctcc

SEQ ID NO: 3990098 - DNA, 25 bp, Homo sapien
cgcaggggagaggtgggcaggactc

SEQ ID NO: 3990099 - DNA, 25 bp, Homo sapien
caggggagaggtgggcaggactcac

SEQ ID NO: 3990100 - DNA, 25 bp, Homo sapien
ctgcatcgcaggggagaggtgggca

SEQ ID NO: 3990101 - DNA, 25 bp, Homo sapien
atcgcaggggagaggtgggcaggac

SEQ ID NO: 3990102 - DNA, 25 bp, Homo sapien
gcaggggagaggtgggcaggactca

SEQ ID NO: 3990103 - DNA, 25 bp, Homo sapien
caggggagaggtgggcaggactcac

SEQ ID NO: 3990104 - DNA, 25 bp, Homo sapien
ttctccctgcatcgcaggggagagg

SEQ ID NO: 3990105 - DNA, 25 bp, Homo sapien
gggttctccctgcatcgcaggggag

SEQ ID NO: 3990106 - DNA, 25 bp, Homo sapien
gagaggtgggcaggactcacgggtt

SEQ ID NO: 3990107 - DNA, 25 bp, Homo sapien
gaggtgggcaggactcacgggttct

SEQ ID NO: 3990108 - DNA, 25 bp, Homo sapien
gggttctccctgcatcacaggggag

SEQ ID NO: 3990109 - DNA, 25 bp, Homo sapien
ggtgggcaggactcacgggttctcc

SEQ ID NO: 3990110 - DNA, 25 bp, Homo sapien
ccctgcgtcacaggggagaggtggg

SEQ ID NO: 3990111 - DNA, 25 bp, Homo sapien
tcctccctgcgtcacaggggagagg

SEQ ID NO: 3990112 - DNA, 25 bp, Homo sapien
cctccctgcgtcacaggggagaggt

SEQ ID NO: 3990113 - DNA, 25 bp, Homo sapien
gggtcctccctgcgtcacaggggag

SEQ ID NO: 3990114 - DNA, 25 bp, Homo sapien
ccctgcgtcacaggggagaggtggg

SEQ ID NO: 3990115 - DNA, 25 bp, Homo sapien
tcctccctgcgtcacaggggagagg

SEQ ID NO: 3990116 - DNA, 25 bp, Homo sapien
gggtcctccctgcgtcacaggggag

SEQ ID NO: 3990117 - DNA, 25 bp, Homo sapien
cctccctgcgtcacaggggagaggt

SEQ ID NO: 3990118 - DNA, 25 bp, Homo sapien
gaggtgggcaggactcacaggttct

SEQ ID NO: 3990119 - DNA, 25 bp, Homo sapien
ggtgggcaggactcacaggttctcc

SEQ ID NO: 3990120 - DNA, 25 bp, Homo sapien
gggcaggactcacaggttctccctg

SEQ ID NO: 3990121 - DNA, 25 bp, Homo sapien
tgggcaggactcacaggttctccct

SEQ ID NO: 3990122 - DNA, 25 bp, Homo sapien
ccgaactccaggagggacattgtca

SEQ ID NO: 3990123 - DNA, 25 bp, Homo sapien
cattagtcaccagggttggatccat

SEQ ID NO: 3990124 - DNA, 25 bp, Homo sapien
tgattgggtgcttgcaggcactcag

SEQ ID NO: 3990125 - DNA, 25 bp, Homo sapien
gatatccgcagctcaagcacacaga

SEQ ID NO: 3990126 - DNA, 25 bp, Homo sapien
ggcaacgtcacacattccactcgat

SEQ ID NO: 3990127 - DNA, 25 bp, Homo sapien
tcaataacacggctgattgggtgct

SEQ ID NO: 3990128 - DNA, 25 bp, Homo sapien
gtaggcttgacccttcctggtggca

SEQ ID NO: 3990129 - DNA, 25 bp, Homo sapien
tcaggtaggcttgacccttcctggt

SEQ ID NO: 3990130 - DNA, 25 bp, Homo sapien
ggcagggccctcctccgatcagtgg

SEQ ID NO: 3990131 - DNA, 25 bp, Homo sapien
tcctccgatcagtggccagcaggat

SEQ ID NO: 3990132 - DNA, 25 bp, Homo sapien
ggttcagctgcaagccgtgggcccc

SEQ ID NO: 3990133 - DNA, 25 bp, Homo sapien
agctgcaagccgtgggccccctgtc

SEQ ID NO: 3990134 - DNA, 25 bp, Homo sapien
gctgcaagccgtgggccccctgtct

SEQ ID NO: 3990135 - DNA, 25 bp, Homo sapien
ggaggttcagctgcaagccgtgggc

SEQ ID NO: 3990136 - DNA, 25 bp, Homo sapien
gaaattccactttaagcagcgtgag

SEQ ID NO: 3990137 - DNA, 25 bp, Homo sapien
tgatctgaggaactgtgtagcccca

SEQ ID NO: 3990138 - DNA, 25 bp, Homo sapien
ctctgccgtggagcaggtgtgatct

SEQ ID NO: 3990139 - DNA, 25 bp, Homo sapien
ctttaagcagcgtgaggaacgggct

SEQ ID NO: 3990140 - DNA, 25 bp, Homo sapien
aggccctcacaaaggtcccccactg

SEQ ID NO: 3990141 - DNA, 25 bp, Homo sapien
actgtgcaaaggctgcactagccat

SEQ ID NO: 3990142 - DNA, 25 bp, Homo sapien
ccctcacaaaggtcccccactgtgc

SEQ ID NO: 3990143 - DNA, 25 bp, Homo sapien
gccctcacaaaggtcccccactgtg

SEQ ID NO: 3990144 - DNA, 25 bp, Homo sapien
caatgagtcaaaacagcggcagagg

SEQ ID NO: 3990145 - DNA, 25 bp, Homo sapien
tcagaagtcgtcgtttccccaggag

SEQ ID NO: 3990146 - DNA, 25 bp, Homo sapien
cttcgcatgagtggaagccggccat

SEQ ID NO: 3990147 - DNA, 25 bp, Homo sapien
aaacagatgcgccatgtcaggtgcc

SEQ ID NO: 3990148 - DNA, 25 bp, Homo sapien
ccatcccaggaggacaagtgatccc

SEQ ID NO: 3990149 - DNA, 25 bp, Homo sapien
tctacctggtacatcgtctcgactc

SEQ ID NO: 3990150 - DNA, 25 bp, Homo sapien
cacagtgtgctcagagtaagttgct

SEQ ID NO: 3990151 - DNA, 25 bp, Homo sapien
tctgatttgtcaagcggctcccctg

SEQ ID NO: 3990152 - DNA, 25 bp, Homo sapien
tcgggcatcaggacccatggcttct

SEQ ID NO: 3990153 - DNA, 25 bp, Homo sapien
tcgtcgccggctcgggcatcaggac

SEQ ID NO: 3990154 - DNA, 25 bp, Homo sapien
tcaggcgtcaggacccatggcctct

SEQ ID NO: 3990155 - DNA, 25 bp, Homo sapien
agtgtgctcagagtcgtcgccggct

SEQ ID NO: 3990156 - DNA, 25 bp, Homo sapien
gggaggagatatacatgcgtgattc

SEQ ID NO: 3990157 - DNA, 25 bp, Homo sapien
agggaggagatatacatgcgtgatt

SEQ ID NO: 3990158 - DNA, 25 bp, Homo sapien
gaggagatatacatgcgtgattccc

SEQ ID NO: 3990159 - DNA, 25 bp, Homo sapien
ggagatatacatgcgtgattcccag

SEQ ID NO: 3990160 - DNA, 25 bp, Homo sapien
tggtcccacctacaaacaggcaagc

SEQ ID NO: 3990161 - DNA, 25 bp, Homo sapien
tgcttgtggagaagcaaaccagcaa

SEQ ID NO: 3990162 - DNA, 25 bp, Homo sapien
gcctcagcggtcagcgaagaaaaga

SEQ ID NO: 3990163 - DNA, 25 bp, Homo sapien
ccacgtgagcaaccgagagactaga

SEQ ID NO: 3990164 - DNA, 25 bp, Homo sapien
aggacccgtggagagcatcggagcg

SEQ ID NO: 3990165 - DNA, 25 bp, Homo sapien
atcggagcggctgcgaaggaccggt

SEQ ID NO: 3990166 - DNA, 25 bp, Homo sapien
gaccggtggagagcggcagagaggc

SEQ ID NO: 3990167 - DNA, 25 bp, Homo sapien
ggcaggccccggcatggaagccgct

SEQ ID NO: 3990168 - DNA, 25 bp, Homo sapien
gggagcacttggcttctcgatggga

SEQ ID NO: 3990169 - DNA, 25 bp, Homo sapien
gagggagcacttggcttctcgatgg

SEQ ID NO: 3990170 - DNA, 25 bp, Homo sapien
cgatgggactgggtgaaaacgaggg

SEQ ID NO: 3990171 - DNA, 25 bp, Homo sapien
ggagggagcacttggcttctcgatg

SEQ ID NO: 3990172 - DNA, 25 bp, Homo sapien
tgcatttccacaggcccctccgcag

SEQ ID NO: 3990173 - DNA, 25 bp, Homo sapien
cctccgcagagaggcgagggtccca

SEQ ID NO: 3990174 - DNA, 25 bp, Homo sapien
ttctgcacagtgacggcccgcctcc

SEQ ID NO: 3990175 - DNA, 25 bp, Homo sapien
ggcttctgcacagtgacggcccgcc

SEQ ID NO: 3990176 - DNA, 25 bp, Homo sapien
tccggtggccacgactttgaggacc

SEQ ID NO: 3990177 - DNA, 25 bp, Homo sapien
tggaatggttgctgcagacaggctt

SEQ ID NO: 3990178 - DNA, 25 bp, Homo sapien
gattcagtcattcggattgttccat

SEQ ID NO: 3990179 - DNA, 25 bp, Homo sapien
tccttgggacagtcaagttcagtgt

SEQ ID NO: 3990180 - DNA, 25 bp, Homo sapien
ctgagcagaggtgtcatgacggcag

SEQ ID NO: 3990181 - DNA, 25 bp, Homo sapien
acgctcgtgccagaccctgcagaag

SEQ ID NO: 3990182 - DNA, 25 bp, Homo sapien
agaggtgtcatgacggcagaagcac

SEQ ID NO: 3990183 - DNA, 25 bp, Homo sapien
agctcccacgctcgtgccagaccct

SEQ ID NO: 3990184 - DNA, 25 bp, Homo sapien
tcagatccacagtcgtccctggaga

SEQ ID NO: 3990185 - DNA, 25 bp, Homo sapien
agatctcagttttctctgggactgg

SEQ ID NO: 3990186 - DNA, 25 bp, Homo sapien
caatgcaggtgtttcagcctcgggt

SEQ ID NO: 3990187 - DNA, 25 bp, Homo sapien
ccctggagatctcagttttctctgg

SEQ ID NO: 3990188 - DNA, 25 bp, Homo sapien
ccccaaagctgtgggcggcagatgc

SEQ ID NO: 3990189 - DNA, 25 bp, Homo sapien
ggctcttctgcacgcccatgtgggt

SEQ ID NO: 3990190 - DNA, 25 bp, Homo sapien
catgggtcagtgtgcaccatctcag

SEQ ID NO: 3990191 - DNA, 25 bp, Homo sapien
cctctggcttggatctagaagcttc

SEQ ID NO: 3990192 - DNA, 25 bp, Homo sapien
attcgcaaactggagcacggcagcc

SEQ ID NO: 3990193 - DNA, 25 bp, Homo sapien
tggagcacggcagcctgtcatagag

SEQ ID NO: 3990194 - DNA, 25 bp, Homo sapien
tggatgggcattcgcaaactggagc

SEQ ID NO: 3990195 - DNA, 25 bp, Homo sapien
agcacggcagcctgtcatagagaca

SEQ ID NO: 3990196 - DNA, 25 bp, Homo sapien
tcagtgctgacatcgtttatgcttt

SEQ ID NO: 3990197 - DNA, 25 bp, Homo sapien
tatgctccggggaccgtggccagca

SEQ ID NO: 3990198 - DNA, 25 bp, Homo sapien
ttttgggtccttgtggtctctgcca

SEQ ID NO: 3990199 - DNA, 25 bp, Homo sapien
agctcttgggcaggcgcgccctgtc

SEQ ID NO: 3990200 - DNA, 25 bp, Homo sapien
ggcgtgagggttgcccacgagaagg

SEQ ID NO: 3990201 - DNA, 25 bp, Homo sapien
cgagaaggggccaggatgtcagaga

SEQ ID NO: 3990202 - DNA, 25 bp, Homo sapien
tcacaggcgtgagggttgcccacga

SEQ ID NO: 3990203 - DNA, 25 bp, Homo sapien
cccacgagaaggggccaggatgtca

SEQ ID NO: 3990204 - DNA, 25 bp, Homo sapien
cgctaccaggtgtgggatctcccat

SEQ ID NO: 3990205 - DNA, 25 bp, Homo sapien
tcctcgctaccaggtgtgggatctc

SEQ ID NO: 3990206 - DNA, 25 bp, Homo sapien
tgctcctcgctaccaggtgtgggat

SEQ ID NO: 3990207 - DNA, 25 bp, Homo sapien
tggtgctcctcgctaccaggtgtgg

SEQ ID NO: 3990208 - DNA, 25 bp, Homo sapien
aggaggcaggatttcgaatggcctg

SEQ ID NO: 3990209 - DNA, 25 bp, Homo sapien
aggcaggatttcgaatggcctgcag

SEQ ID NO: 3990210 - DNA, 25 bp, Homo sapien
ctgaatccccctcagtgtgagtctg

SEQ ID NO: 3990211 - DNA, 25 bp, Homo sapien
gaatccccctcagtgtgagtctgca

SEQ ID NO: 3990212 - DNA, 25 bp, Homo sapien
gaaggtttgcgtaaatcaccacgca

SEQ ID NO: 3990213 - DNA, 25 bp, Homo sapien
tccaggacgactttacgtccgccca

SEQ ID NO: 3990214 - DNA, 25 bp, Homo sapien
tgcgtaaatcaccacgcaagccctg

SEQ ID NO: 3990215 - DNA, 25 bp, Homo sapien
acgtccgcccaacgcagaaggtttg

SEQ ID NO: 3990216 - DNA, 25 bp, Homo sapien
cgcatccacccacagcactgtgagc

SEQ ID NO: 3990217 - DNA, 25 bp, Homo sapien
gcagctctcaaaaccctggctggca

SEQ ID NO: 3990218 - DNA, 25 bp, Homo sapien
gcacatccagggcagctctcaaaac

SEQ ID NO: 3990219 - DNA, 25 bp, Homo sapien
agcactgtgagctcagcacatccag

SEQ ID NO: 3990220 - DNA, 25 bp, Homo sapien
gctgccagtctcccttggagagaac

SEQ ID NO: 3990221 - DNA, 25 bp, Homo sapien
catgatggagcatcgcctctggggc

SEQ ID NO: 3990222 - DNA, 25 bp, Homo sapien
atgatggagcatcgcctctggggca

SEQ ID NO: 3990223 - DNA, 25 bp, Homo sapien
tgccagtctcccttggagagaacat

SEQ ID NO: 3990224 - DNA, 25 bp, Homo sapien
agaaggctctactgggcagacggaa

SEQ ID NO: 3990225 - DNA, 25 bp, Homo sapien
cattgtgagtagaggtcagcccagc

SEQ ID NO: 3990226 - DNA, 25 bp, Homo sapien
cttcaagttgcacagctcagtggca

SEQ ID NO: 3990227 - DNA, 25 bp, Homo sapien
cacaatgaccacttgatgatggagg

SEQ ID NO: 3990228 - DNA, 25 bp, Homo sapien
cagcttttgcagaagaacggtgacc

SEQ ID NO: 3990229 - DNA, 25 bp, Homo sapien
tcggagagcagtctgtgacacattg

SEQ ID NO: 3990230 - DNA, 25 bp, Homo sapien
tgagtgtggttgtaaatgctgctct

SEQ ID NO: 3990231 - DNA, 25 bp, Homo sapien
actttgtggagtaagagtgttctgg

SEQ ID NO: 3990232 - DNA, 25 bp, Homo sapien
atggttttaggctgccattttgtca

SEQ ID NO: 3990233 - DNA, 25 bp, Homo sapien
ttaatggttttaggctgccattttg

SEQ ID NO: 3990234 - DNA, 25 bp, Homo sapien
taatggttttaggctgccattttgt

SEQ ID NO: 3990235 - DNA, 25 bp, Homo sapien
aatggttttaggctgccattttgtc

SEQ ID NO: 3990236 - DNA, 25 bp, Homo sapien
gcagttaagagttcatccgttgcca

SEQ ID NO: 3990237 - DNA, 25 bp, Homo sapien
aacccttgagctcagatgcaaatga

SEQ ID NO: 3990238 - DNA, 25 bp, Homo sapien
ggtcctaaggcttcggcagttaaga

SEQ ID NO: 3990239 - DNA, 25 bp, Homo sapien
gctctgggagtcaaaaggcttccct

SEQ ID NO: 3990240 - DNA, 25 bp, Homo sapien
tgtgcggaggtgggctggaatccat

SEQ ID NO: 3990241 - DNA, 25 bp, Homo sapien
ctgcagtgtgcggaggtgggctgga

SEQ ID NO: 3990242 - DNA, 25 bp, Homo sapien
tggctgcagtgtgcggaggtgggct

SEQ ID NO: 3990243 - DNA, 25 bp, Homo sapien
cagtgtgcggaggtgggctggaatc

SEQ ID NO: 3990244 - DNA, 25 bp, Homo sapien
tggagtatttcggagggcacccctg

SEQ ID NO: 3990245 - DNA, 25 bp, Homo sapien
gcttcactgtggttggccatgtcct

SEQ ID NO: 3990246 - DNA, 25 bp, Homo sapien
tggcagcttcactgtggttggccat

SEQ ID NO: 3990247 - DNA, 25 bp, Homo sapien
ccccagggctggagtatttcggagg

SEQ ID NO: 3990248 - DNA, 25 bp, Homo sapien
gaggaacaagaaactgtgtgctccc

SEQ ID NO: 3990249 - DNA, 25 bp, Homo sapien
tgaggaacaagaaactgtgtgctcc

SEQ ID NO: 3990250 - DNA, 25 bp, Homo sapien
ggaacaagaaactgtgtgctcccac

SEQ ID NO: 3990251 - DNA, 25 bp, Homo sapien
ctgaggaacaagaaactgtgtgctc

SEQ ID NO: 3990252 - DNA, 25 bp, Homo sapien
tgctgcccccacgtttgttaaagct

SEQ ID NO: 3990253 - DNA, 25 bp, Homo sapien
ccccacgtttgttaaagctgctcac

SEQ ID NO: 3990254 - DNA, 25 bp, Homo sapien
ctggcagggtgaatggggggcgacc

SEQ ID NO: 3990255 - DNA, 25 bp, Homo sapien
tgcccccacgtttgttaaagctgct

SEQ ID NO: 3990256 - DNA, 25 bp, Homo sapien
tgctttttctgctttcttctgacac

SEQ ID NO: 3990257 - DNA, 25 bp, Homo sapien
agatgctttttctgctttcttctga

SEQ ID NO: 3990258 - DNA, 25 bp, Homo sapien
gatgctttttctgctttcttctgac

SEQ ID NO: 3990259 - DNA, 25 bp, Homo sapien
atagatgctttttctgctttcttct

SEQ ID NO: 3990260 - DNA, 25 bp, Homo sapien
gacactttgcggatttgatgggacc

SEQ ID NO: 3990261 - DNA, 25 bp, Homo sapien
gtggctgcggacactttgcggattt

SEQ ID NO: 3990262 - DNA, 25 bp, Homo sapien
catgttcggcgggaggtctgagagg

SEQ ID NO: 3990263 - DNA, 25 bp, Homo sapien
gatttgatgggacccggatgttgaa

SEQ ID NO: 3990264 - DNA, 25 bp, Homo sapien
gccaggaggtgccaggctgtaccgt

SEQ ID NO: 3990265 - DNA, 25 bp, Homo sapien
agagacccgatgtctccatgggatg

SEQ ID NO: 3990266 - DNA, 25 bp, Homo sapien
aggctgtaccgtgggcagaagcact

SEQ ID NO: 3990267 - DNA, 25 bp, Homo sapien
cacggcaggtggagtgtgacatggc

SEQ ID NO: 3990268 - DNA, 25 bp, Homo sapien
aggtcactgcgagcccttgagttgg

SEQ ID NO: 3990269 - DNA, 25 bp, Homo sapien
gcttgtagtgttctagctgttcctg

SEQ ID NO: 3990270 - DNA, 25 bp, Homo sapien
tgcgagcccttgagttggtgcccag

SEQ ID NO: 3990271 - DNA, 25 bp, Homo sapien
gaggcgagcttgtagtgttctagct

SEQ ID NO: 3990272 - DNA, 25 bp, Homo sapien
gccacgccaggccttatcctcagtc

SEQ ID NO: 3990273 - DNA, 25 bp, Homo sapien
ccataggacaagctctgatggcccc

SEQ ID NO: 3990274 - DNA, 25 bp, Homo sapien
ggccttatcctcagtccgcacgcga

SEQ ID NO: 3990275 - DNA, 25 bp, Homo sapien
ccactgtggccataggacaagctct

SEQ ID NO: 3990276 - DNA, 25 bp, Homo sapien
gtaactgtatccagacaatgacatg

SEQ ID NO: 3990277 - DNA, 25 bp, Homo sapien
aactgtatccagacaatgacatgga

SEQ ID NO: 3990278 - DNA, 25 bp, Homo sapien
gacaatgacatggaacttctactgt

SEQ ID NO: 3990279 - DNA, 25 bp, Homo sapien
ggtggtaactgtatccagacaatga

SEQ ID NO: 3990280 - DNA, 25 bp, Homo sapien
tctgcaccagaaccaataagtggcc

SEQ ID NO: 3990281 - DNA, 25 bp, Homo sapien
cagttttgctttagtctcggagaaa

SEQ ID NO: 3990282 - DNA, 25 bp, Homo sapien
tggtattgtgactcctccccaaaac

SEQ ID NO: 3990283 - DNA, 25 bp, Homo sapien
ccgcatccggtaaatcgcttctgta

SEQ ID NO: 3990284 - DNA, 25 bp, Homo sapien
ttcttcgtatttcggttcacgtctg

SEQ ID NO: 3990285 - DNA, 25 bp, Homo sapien
gctgcaacttgacaaaccccaggca

SEQ ID NO: 3990286 - DNA, 25 bp, Homo sapien
tctgaaaggctttcacggtccatcc

SEQ ID NO: 3990287 - DNA, 25 bp, Homo sapien
cattttagagcattcggctggttgc

SEQ ID NO: 3990288 - DNA, 25 bp, Homo sapien
tcggaaggctagtgagtgagcacca

SEQ ID NO: 3990289 - DNA, 25 bp, Homo sapien
aaggagcgtggaggattcggaaggc

SEQ ID NO: 3990290 - DNA, 25 bp, Homo sapien
cgtcttagaatcgaaggagcgtgga

SEQ ID NO: 3990291 - DNA, 25 bp, Homo sapien
gtgtgcgtcttagaatcgaaggagc

SEQ ID NO: 3990292 - DNA, 25 bp, Homo sapien
aaacacagcaggctacattcgacag

SEQ ID NO: 3990293 - DNA, 25 bp, Homo sapien
attcggcagacctgctccagatgca

SEQ ID NO: 3990294 - DNA, 25 bp, Homo sapien
tcgacaggctgaattcggcagacct

SEQ ID NO: 3990295 - DNA, 25 bp, Homo sapien
cagagaacacggcaggctgcgtttg

SEQ ID NO: 3990296 - DNA, 25 bp, Homo sapien
gatacacagtgctgccgcctttgca

SEQ ID NO: 3990297 - DNA, 25 bp, Homo sapien
taacacgagttgtgcagttccatca

SEQ ID NO: 3990298 - DNA, 25 bp, Homo sapien
tatagggtcctaatttgaaccaaga

SEQ ID NO: 3990299 - DNA, 25 bp, Homo sapien
tcacttttagtgacagtaacacgag

SEQ ID NO: 3990300 - DNA, 25 bp, Homo sapien
gtttgtggggtttgcaccgagaagc

SEQ ID NO: 3990301 - DNA, 25 bp, Homo sapien
tgtggggtttgcaccgagaagcata

SEQ ID NO: 3990302 - DNA, 25 bp, Homo sapien
tttgtggggtttgcaccgagaagca

SEQ ID NO: 3990303 - DNA, 25 bp, Homo sapien
ggggtttgcaccgagaagcatagtc

SEQ ID NO: 3990304 - DNA, 25 bp, Homo sapien
agtgagaagaggtgtgtgcatctag

SEQ ID NO: 3990305 - DNA, 25 bp, Homo sapien
gcctcggtgcctgggcagtttgtta

SEQ ID NO: 3990306 - DNA, 25 bp, Homo sapien
ggagccgcaggcctcggtgcctggg

SEQ ID NO: 3990307 - DNA, 25 bp, Homo sapien
agccgcaggcctcggtgcctgggca

SEQ ID NO: 3990308 - DNA, 25 bp, Homo sapien
aggagagggagccgcaggcctcggt

SEQ ID NO: 3990309 - DNA, 25 bp, Homo sapien
ctgatcttctcttcagcaggaacat

SEQ ID NO: 3990310 - DNA, 25 bp, Homo sapien
gctgatcttctcttcagcaggaaca

SEQ ID NO: 3990311 - DNA, 25 bp, Homo sapien
cctgccagctgatcttctcttcagc

SEQ ID NO: 3990312 - DNA, 25 bp, Homo sapien
ccagctgatcttctcttcagcagga

SEQ ID NO: 3990313 - DNA, 25 bp, Homo sapien
ttagttgtttcagcttgaagggtga

SEQ ID NO: 3990314 - DNA, 25 bp, Homo sapien
gggcttgcttcgtctgcagcctctc

SEQ ID NO: 3990315 - DNA, 25 bp, Homo sapien
gactgctagtctgaattggcccaca

SEQ ID NO: 3990316 - DNA, 25 bp, Homo sapien
gagcagtgtttaatcacccatctga

SEQ ID NO: 3990317 - DNA, 25 bp, Homo sapien
ggatttaacacacgcccactacgtg

SEQ ID NO: 3990318 - DNA, 25 bp, Homo sapien
tgaccagagcttgcttccgtgggat

SEQ ID NO: 3990319 - DNA, 25 bp, Homo sapien
tacacgatgccaccagtacgttggt

SEQ ID NO: 3990320 - DNA, 25 bp, Homo sapien
tgtaccaatgctgagtgaccagagc

SEQ ID NO: 3990321 - DNA, 25 bp, Homo sapien
tgcagattgcaaagaggcgaaacct

SEQ ID NO: 3990322 - DNA, 25 bp, Homo sapien
catcacgcacgggaaacaggtttgg

SEQ ID NO: 3990323 - DNA, 25 bp, Homo sapien
taaaatacaagactagctgcccggt

SEQ ID NO: 3990324 - DNA, 25 bp, Homo sapien
tgatgacaccaaatcgagcagcggg

SEQ ID NO: 3990325 - DNA, 25 bp, Homo sapien
tgctagctgctggatcctatctgac

SEQ ID NO: 3990326 - DNA, 25 bp, Homo sapien
tctgtgctccagactgtcagcgagg

SEQ ID NO: 3990327 - DNA, 25 bp, Homo sapien
gctcagcaggttcagttcatctgtg

SEQ ID NO: 3990328 - DNA, 25 bp, Homo sapien
tttaaccttgcagtatccaccccga

SEQ ID NO: 3990329 - DNA, 25 bp, Homo sapien
tgctcttgctcaggccgtgtgcact

SEQ ID NO: 3990330 - DNA, 25 bp, Homo sapien
ggttcactgagctctgtaaggtgct

SEQ ID NO: 3990331 - DNA, 25 bp, Homo sapien
tctgtctaaagcactccagtcccag

SEQ ID NO: 3990332 - DNA, 25 bp, Homo sapien
aattcccttgaccatcgtgcttcga

SEQ ID NO: 3990333 - DNA, 25 bp, Homo sapien
aattcaccaatgcagagtgataaag

SEQ ID NO: 3990334 - DNA, 25 bp, Homo sapien
cagatttgcttagaataaagctgat

SEQ ID NO: 3990335 - DNA, 25 bp, Homo sapien
ggtgatcacctaataatcggagact

SEQ ID NO: 3990336 - DNA, 25 bp, Homo sapien
cggagacttaattccttataatgca

SEQ ID NO: 3990337 - DNA, 25 bp, Homo sapien
acaacacacatcatgactagtatat

SEQ ID NO: 3990338 - DNA, 25 bp, Homo sapien
tacaacacacatcatgactagtata

SEQ ID NO: 3990339 - DNA, 25 bp, Homo sapien
caacacacatcatgactagtatatt

SEQ ID NO: 3990340 - DNA, 25 bp, Homo sapien
tgttgcaagctcagaagtaatccac

SEQ ID NO: 3990341 - DNA, 25 bp, Homo sapien
gtggccaccccaggatctaacagct

SEQ ID NO: 3990342 - DNA, 25 bp, Homo sapien
ataaacacaagtgacgtggccaccc

SEQ ID NO: 3990343 - DNA, 25 bp, Homo sapien
tccactaacgaaccaagtcagactc

SEQ ID NO: 3990344 - DNA, 25 bp, Homo sapien
ggaggttgtcagacgccttccaata

SEQ ID NO: 3990345 - DNA, 25 bp, Homo sapien
ggtggaggttgtcagacgccttcca

SEQ ID NO: 3990346 - DNA, 25 bp, Homo sapien
gttgtcagacgccttccaatataga

SEQ ID NO: 3990347 - DNA, 25 bp, Homo sapien
tgtcagacgccttccaatatagatc

SEQ ID NO: 3990348 - DNA, 25 bp, Homo sapien
ggtgagccatcccttgagttcgaga

SEQ ID NO: 3990349 - DNA, 25 bp, Homo sapien
gacgtgagaatgtgcccaagagcta

SEQ ID NO: 3990350 - DNA, 25 bp, Homo sapien
gcttttcggcaatagagaggctcgc

SEQ ID NO: 3990351 - DNA, 25 bp, Homo sapien
gaaggatcaccaaaccgaatgctgt

SEQ ID NO: 3990352 - DNA, 25 bp, Homo sapien
ccaatccgatggccagcaaatgaga

SEQ ID NO: 3990353 - DNA, 25 bp, Homo sapien
tgcgcttcgggtgtttaaagaggaa

SEQ ID NO: 3990354 - DNA, 25 bp, Homo sapien
catgacgctcgtgttcctcatgctg

SEQ ID NO: 3990355 - DNA, 25 bp, Homo sapien
cccctttcttcatgacgctcgtgtt

SEQ ID NO: 3990356 - DNA, 25 bp, Homo sapien
tgaccaatcccatatccaatctgag

SEQ ID NO: 3990357 - DNA, 25 bp, Homo sapien
ttccttctttcaatatcatcttcct

SEQ ID NO: 3990358 - DNA, 25 bp, Homo sapien
ttcaagatgctttcaacttctttcc

SEQ ID NO: 3990359 - DNA, 25 bp, Homo sapien
tattttccggccgacttgaccaatc

SEQ ID NO: 3990360 - DNA, 25 bp, Homo sapien
aaccgtttcctgtacaaacagatca

SEQ ID NO: 3990361 - DNA, 25 bp, Homo sapien
cccgacttttctctgaggtgctcaa

SEQ ID NO: 3990362 - DNA, 25 bp, Homo sapien
ccgacttttctctgaggtgctcaat

SEQ ID NO: 3990363 - DNA, 25 bp, Homo sapien
tgtacaaacagatcacaaatacttt

SEQ ID NO: 3990364 - DNA, 25 bp, Homo sapien
cagaagctctgttggtatcttgtgg

SEQ ID NO: 3990365 - DNA, 25 bp, Homo sapien
gctctgttggtatcttgtggtgtct

SEQ ID NO: 3990366 - DNA, 25 bp, Homo sapien
tctctccaatgctatgggtatctgt

SEQ ID NO: 3990367 - DNA, 25 bp, Homo sapien
aatgctatgggtatctgtttcagaa

SEQ ID NO: 3990368 - DNA, 25 bp, Homo sapien
cttggcgatgtgaatagaatgggaa

SEQ ID NO: 3990369 - DNA, 25 bp, Homo sapien
gtgaacattctatcattagaagctc

SEQ ID NO: 3990370 - DNA, 25 bp, Homo sapien
cagaacatcatgtgaacattctatc

SEQ ID NO: 3990371 - DNA, 25 bp, Homo sapien
cagtgaaccgcctccgtgatgaggg

SEQ ID NO: 3990372 - DNA, 25 bp, Homo sapien
gtgacacgggcacttccagctgtga

SEQ ID NO: 3990373 - DNA, 25 bp, Homo sapien
cagcagcccactgtcctagaggtga

SEQ ID NO: 3990374 - DNA, 25 bp, Homo sapien
tcctatataaggacggactgcagca

SEQ ID NO: 3990375 - DNA, 25 bp, Homo sapien
cccactgaagacatcggcactgtaa

SEQ ID NO: 3990376 - DNA, 25 bp, Homo sapien
ctcttggagctactccgtccagact

SEQ ID NO: 3990377 - DNA, 25 bp, Homo sapien
cgtccagactcatgctgtgcgtcca

SEQ ID NO: 3990378 - DNA, 25 bp, Homo sapien
tactccgtccagactcatgctgtgc

SEQ ID NO: 3990379 - DNA, 25 bp, Homo sapien
atgctgtgcgtccagcagtattttt

SEQ ID NO: 3990380 - DNA, 25 bp, Homo sapien
ttctctacccactctggaatctgct

SEQ ID NO: 3990381 - DNA, 25 bp, Homo sapien
ttccaagaggtagcaatggtgccac

SEQ ID NO: 3990382 - DNA, 25 bp, Homo sapien
gggcgcagatggaattctctaccca

SEQ ID NO: 3990383 - DNA, 25 bp, Homo sapien
tcttgatatctaaccagcctgccct

SEQ ID NO: 3990384 - DNA, 25 bp, Homo sapien
taataacaccatgcaattaggggga

SEQ ID NO: 3990385 - DNA, 25 bp, Homo sapien
ctaataacaccatgcaattaggggg

SEQ ID NO: 3990386 - DNA, 25 bp, Homo sapien
aataacaccatgcaattagggggaa

SEQ ID NO: 3990387 - DNA, 25 bp, Homo sapien
acggatggtcttgcgaatctagcca

SEQ ID NO: 3990388 - DNA, 25 bp, Homo sapien
ggaacgaccctctagtgaaattgga

SEQ ID NO: 3990389 - DNA, 25 bp, Homo sapien
tgtaacgactgagtgctgcacgggc

SEQ ID NO: 3990390 - DNA, 25 bp, Homo sapien
gagcaaaggctcgtctggactctga

SEQ ID NO: 3990391 - DNA, 25 bp, Homo sapien
tcctgcatcccgggcgctccgttct

SEQ ID NO: 3990392 - DNA, 25 bp, Homo sapien
cctgcatcccgggcgctccgttctg

SEQ ID NO: 3990393 - DNA, 25 bp, Homo sapien
tcctcctgcatcccgggcgctccgt

SEQ ID NO: 3990394 - DNA, 25 bp, Homo sapien
ctcctgcatcccgggcgctccgttc

SEQ ID NO: 3990395 - DNA, 25 bp, Homo sapien
cagcccggccggaggaactcacagg

SEQ ID NO: 3990396 - DNA, 25 bp, Homo sapien
cagagtcgaaagagtctgcccgagg

SEQ ID NO: 3990397 - DNA, 25 bp, Homo sapien
gaaagtcgctttctcatttcccgct

SEQ ID NO: 3990398 - DNA, 25 bp, Homo sapien
cagcctcgggactgggaggcacttt

SEQ ID NO: 3990399 - DNA, 25 bp, Homo sapien
gactgggaggcacttttcagaggaa

SEQ ID NO: 3990400 - DNA, 25 bp, Homo sapien
tgtacgttacaggacattcaggaag

SEQ ID NO: 3990401 - DNA, 25 bp, Homo sapien
gagaggcaaggaacttgtacgttac

SEQ ID NO: 3990402 - DNA, 25 bp, Homo sapien
ttcaggaagaaaaggctgtagatac

SEQ ID NO: 3990403 - DNA, 25 bp, Homo sapien
aactgctgctaatgtggctgaaaac

SEQ ID NO: 3990404 - DNA, 25 bp, Homo sapien
agcttcctcttccgagacagcctgg

SEQ ID NO: 3990405 - DNA, 25 bp, Homo sapien
agcctggcgctctggacgcttggct

SEQ ID NO: 3990406 - DNA, 25 bp, Homo sapien
ctcttccgagacagcctggcgctct

SEQ ID NO: 3990407 - DNA, 25 bp, Homo sapien
cgctcgctggctcgccgacgccctc

SEQ ID NO: 3990408 - DNA, 25 bp, Homo sapien
tggatactctggtcatgcggcttgg

SEQ ID NO: 3990409 - DNA, 25 bp, Homo sapien
gtcccttgaagagcctgatccagaa

SEQ ID NO: 3990410 - DNA, 25 bp, Homo sapien
ctgatccagaaacagtgccgtgttt

SEQ ID NO: 3990411 - DNA, 25 bp, Homo sapien
ctgaaactgaatgcaacgaagtgcg

SEQ ID NO: 3990412 - DNA, 25 bp, Homo sapien
ccccaaggaggcgacgctgagtccg

SEQ ID NO: 3990413 - DNA, 25 bp, Homo sapien
gagaccgttcttcttcccgtgagga

SEQ ID NO: 3990414 - DNA, 25 bp, Homo sapien
gctgagtccggaacgcaggagggag

SEQ ID NO: 3990415 - DNA, 25 bp, Homo sapien
gaacgcaggagggagaccgttcttc

SEQ ID NO: 3990416 - DNA, 25 bp, Homo sapien
tctacccgtgggttcagtatagcag

SEQ ID NO: 3990417 - DNA, 25 bp, Homo sapien
cagataagcggttttctcctcggca

SEQ ID NO: 3990418 - DNA, 25 bp, Homo sapien
gagcagacactcctagtcagataag

SEQ ID NO: 3990419 - DNA, 25 bp, Homo sapien
ggagcttaattcaagtctttctgag

SEQ ID NO: 3990420 - DNA, 25 bp, Homo sapien
gaaaatattctctgcgtgtacccgc

SEQ ID NO: 3990421 - DNA, 25 bp, Homo sapien
cctctcgtggaaagccgctgggagt

SEQ ID NO: 3990422 - DNA, 25 bp, Homo sapien
tgctggaatgcacaggaggctctcc

SEQ ID NO: 3990423 - DNA, 25 bp, Homo sapien
gatgctgacgatacgggaagccaga

SEQ ID NO: 3990424 - DNA, 25 bp, Homo sapien
gggcacaacccccacggcagtcagc

SEQ ID NO: 3990425 - DNA, 25 bp, Homo sapien
gctctggggtttggtcccacaagtg

SEQ ID NO: 3990426 - DNA, 25 bp, Homo sapien
ccacggcagtcagctcatagtcagc

SEQ ID NO: 3990427 - DNA, 25 bp, Homo sapien
ctggggtttggtcccacaagtgtgc

SEQ ID NO: 3990428 - DNA, 25 bp, Homo sapien
tgcaagatctaggagtttgtggaaa

SEQ ID NO: 3990429 - DNA, 25 bp, Homo sapien
gacacttttgcaagatctaggagtt

SEQ ID NO: 3990430 - DNA, 25 bp, Homo sapien
gcatgacacttttgcaagatctagg

SEQ ID NO: 3990431 - DNA, 25 bp, Homo sapien
cacttttgcaagatctaggagtttg

SEQ ID NO: 3990432 - DNA, 25 bp, Homo sapien
ggcacagcggtaaacaccaggagcc

SEQ ID NO: 3990433 - DNA, 25 bp, Homo sapien
cacgccctaggaggtgcatcttctg

SEQ ID NO: 3990434 - DNA, 25 bp, Homo sapien
tgtatgcaggatcccggcagcatgg

SEQ ID NO: 3990435 - DNA, 25 bp, Homo sapien
tggcatcattgagcaccacggtcag

SEQ ID NO: 3990436 - DNA, 25 bp, Homo sapien
ctggaaacatagcacgctggccccg

SEQ ID NO: 3990437 - DNA, 25 bp, Homo sapien
aaacatagcacgctggccccgtggc

SEQ ID NO: 3990438 - DNA, 25 bp, Homo sapien
aacatagcacgctggccccgtggcc

SEQ ID NO: 3990439 - DNA, 25 bp, Homo sapien
ggaaacatagcacgctggccccgtg

SEQ ID NO: 3990440 - DNA, 25 bp, Homo sapien
aggagcccgtggacacaggcaagcc

SEQ ID NO: 3990441 - DNA, 25 bp, Homo sapien
agcccgtggacacaggcaagcccga

SEQ ID NO: 3990442 - DNA, 25 bp, Homo sapien
cccgtggacacaggcaagcccgagg

SEQ ID NO: 3990443 - DNA, 25 bp, Homo sapien
ccaggagcccgtggacacaggcaag

SEQ ID NO: 3990444 - DNA, 25 bp, Homo sapien
caacgagttgtcacaattctgcaag

SEQ ID NO: 3990445 - DNA, 25 bp, Homo sapien
agtgaccactgccaccaacgagttg

SEQ ID NO: 3990446 - DNA, 25 bp, Homo sapien
tcagccgtcgtgcaaacaggtcatc

SEQ ID NO: 3990447 - DNA, 25 bp, Homo sapien
aagagctcgtgacgggagctcacca

SEQ ID NO: 3990448 - DNA, 25 bp, Homo sapien
ctttgtggtggtgtccaatggaccc

SEQ ID NO: 3990449 - DNA, 25 bp, Homo sapien
tttgtggtggtgtccaatggaccct

SEQ ID NO: 3990450 - DNA, 25 bp, Homo sapien
gtggtggtgtccaatggacccttca

SEQ ID NO: 3990451 - DNA, 25 bp, Homo sapien
ttctttgtggtggtgtccaatggac

SEQ ID NO: 3990452 - DNA, 25 bp, Homo sapien
tgccaccacgagggccatcggactt

SEQ ID NO: 3990453 - DNA, 25 bp, Homo sapien
cacaggatactagggcctccttatc

SEQ ID NO: 3990454 - DNA, 25 bp, Homo sapien
ggccacaggatactagggcctcctt

SEQ ID NO: 3990455 - DNA, 25 bp, Homo sapien
ccacgagggccatcggacttgggca

SEQ ID NO: 3990456 - DNA, 25 bp, Homo sapien
cccgtctgtactttgtcccggtgca

SEQ ID NO: 3990457 - DNA, 25 bp, Homo sapien
cgtctgtactttgtcccggtgcacc

SEQ ID NO: 3990458 - DNA, 25 bp, Homo sapien
tctgtactttgtcccggtgcaccac

SEQ ID NO: 3990459 - DNA, 25 bp, Homo sapien
ctcccgtctgtactttgtcccggtg

SEQ ID NO: 3990460 - DNA, 25 bp, Homo sapien
gcagtggttggagccgtcggatgcc

SEQ ID NO: 3990461 - DNA, 25 bp, Homo sapien
gactctgaacagctgttcgcgcgga

SEQ ID NO: 3990462 - DNA, 25 bp, Homo sapien
gacgacaaacgcgacccaggatgct

SEQ ID NO: 3990463 - DNA, 25 bp, Homo sapien
cagctgccacgtccctaaaagaacg

SEQ ID NO: 3990464 - DNA, 25 bp, Homo sapien
ctgagcttcctttggacagcctctg

SEQ ID NO: 3990465 - DNA, 25 bp, Homo sapien
gagcttcctttggacagcctctggg

SEQ ID NO: 3990466 - DNA, 25 bp, Homo sapien
ttcctcccgctgagcttcctttgga

SEQ ID NO: 3990467 - DNA, 25 bp, Homo sapien
tcccgctgagcttcctttggacagc

SEQ ID NO: 3990468 - DNA, 25 bp, Homo sapien
gaatgaggtaggcaagaaattgtcc

SEQ ID NO: 3990469 - DNA, 25 bp, Homo sapien
aatgaggtaggcaagaaattgtccc

SEQ ID NO: 3990470 - DNA, 25 bp, Homo sapien
aggaatgaggtaggcaagaaattgt

SEQ ID NO: 3990471 - DNA, 25 bp, Homo sapien
tgaggtaggcaagaaattgtcccca

SEQ ID NO: 3990472 - DNA, 25 bp, Homo sapien
attcccagatataagctgactttac

SEQ ID NO: 3990473 - DNA, 25 bp, Homo sapien
gtcccttgtcactggccttgctaat

SEQ ID NO: 3990474 - DNA, 25 bp, Homo sapien
gtcactggccttgctaatttgcagg

SEQ ID NO: 3990475 - DNA, 25 bp, Homo sapien
tcaaattcccagatataagctgact

SEQ ID NO: 3990476 - DNA, 25 bp, Homo sapien
ctgccgtgatggcgcgcacacacac

SEQ ID NO: 3990477 - DNA, 25 bp, Homo sapien
tatcatcggcgttcactctgtgggc

SEQ ID NO: 3990478 - DNA, 25 bp, Homo sapien
gatgcctgccggtctcagctttggg

SEQ ID NO: 3990479 - DNA, 25 bp, Homo sapien
gaatcggacccagatggactctaag

SEQ ID NO: 3990480 - DNA, 25 bp, Homo sapien
agaagtaacccgaagtcctggcctg

SEQ ID NO: 3990481 - DNA, 25 bp, Homo sapien
ttccccaccgagaagcgtctgttcg

SEQ ID NO: 3990482 - DNA, 25 bp, Homo sapien
ctgcgtggctgtgccttcggccgcc

SEQ ID NO: 3990483 - DNA, 25 bp, Homo sapien
cccttccccaccgagaagcgtctgt

SEQ ID NO: 3990484 - DNA, 25 bp, Homo sapien
gcgtggctgtgccttcggccgcccg

SEQ ID NO: 3990485 - DNA, 25 bp, Homo sapien
gggctcagaggatgcctctgtgctt

SEQ ID NO: 3990486 - DNA, 25 bp, Homo sapien
ggctcagaggatgcctctgtgcttg

SEQ ID NO: 3990487 - DNA, 25 bp, Homo sapien
gatttgcgcaaaagccggactgagt

SEQ ID NO: 3990488 - DNA, 25 bp, Homo sapien
tctttgctgagtcatagaagctcgg

SEQ ID NO: 3990489 - DNA, 25 bp, Homo sapien
ctcacagtcgagcagagcgatggga

SEQ ID NO: 3990490 - DNA, 25 bp, Homo sapien
gacgagccgggaaagattctcacag

SEQ ID NO: 3990491 - DNA, 25 bp, Homo sapien
ctggaaagttgacagtttggggtct

SEQ ID NO: 3990492 - DNA, 25 bp, Homo sapien
gaaagttgacagtttggggtctgtc

SEQ ID NO: 3990493 - DNA, 25 bp, Homo sapien
aagttgacagtttggggtctgtcct

SEQ ID NO: 3990494 - DNA, 25 bp, Homo sapien
tggaaagttgacagtttggggtctg

SEQ ID NO: 3990495 - DNA, 25 bp, Homo sapien
gcctctgcccccgtattttggatcg

SEQ ID NO: 3990496 - DNA, 25 bp, Homo sapien
tcctatacatgttcttggaaggttg

SEQ ID NO: 3990497 - DNA, 25 bp, Homo sapien
ttttggatcgagctcctccaagaga

SEQ ID NO: 3990498 - DNA, 25 bp, Homo sapien
tccaagagaagtaagtgtcctatac

SEQ ID NO: 3990499 - DNA, 25 bp, Homo sapien
tcaggaccaatgccatatcttttta

SEQ ID NO: 3990500 - DNA, 25 bp, Homo sapien
ttcaggaccaatgccatatcttttt

SEQ ID NO: 3990501 - DNA, 25 bp, Homo sapien
tggtctccagaaaaaccgggcctca

SEQ ID NO: 3990502 - DNA, 25 bp, Homo sapien
ggcctcaaagtgaagccggaattca

SEQ ID NO: 3990503 - DNA, 25 bp, Homo sapien
tttgaccccaggacatgacatcagg

SEQ ID NO: 3990504 - DNA, 25 bp, Homo sapien
aatgtcctgtggttgccagtttcca

SEQ ID NO: 3990505 - DNA, 25 bp, Homo sapien
ccagtactatcctgatggtggtggg

SEQ ID NO: 3990506 - DNA, 25 bp, Homo sapien
tcgtgttaagctgagatccagtact

SEQ ID NO: 3990507 - DNA, 25 bp, Homo sapien
ctgtttcgtgttaagctgagatcca

SEQ ID NO: 3990508 - DNA, 25 bp, Homo sapien
taagctgagatccagtactatcctg

SEQ ID NO: 3990509 - DNA, 25 bp, Homo sapien
ggtcaacctcctgttgtgtccagcg

SEQ ID NO: 3990510 - DNA, 25 bp, Homo sapien
ggtctctgtggtcaacctcctgttg

SEQ ID NO: 3990511 - DNA, 25 bp, Homo sapien
gcaggtctctgtggtcaacctcctg

SEQ ID NO: 3990512 - DNA, 25 bp, Homo sapien
atgtaggtctggcatccccccctgc

SEQ ID NO: 3990513 - DNA, 25 bp, Homo sapien
gcagtgtcccctggtctgactgact

SEQ ID NO: 3990514 - DNA, 25 bp, Homo sapien
tgtgaggactggcctgcagtgtccc

SEQ ID NO: 3990515 - DNA, 25 bp, Homo sapien
aggtggccccgggtctgactgaggg

SEQ ID NO: 3990516 - DNA, 25 bp, Homo sapien
ctggtctgactgactgaagactggc

SEQ ID NO: 3990517 - DNA, 25 bp, Homo sapien
ggccccggatctgacagcagtgtga

SEQ ID NO: 3990518 - DNA, 25 bp, Homo sapien
tggtggccccggatctgacagcagt

SEQ ID NO: 3990519 - DNA, 25 bp, Homo sapien
cggtgtccccgggtctgactgatta

SEQ ID NO: 3990520 - DNA, 25 bp, Homo sapien
tctgactgattaagggccggactgt

SEQ ID NO: 3990521 - DNA, 25 bp, Homo sapien
ccaccccagcgtgtgagagttttct

SEQ ID NO: 3990522 - DNA, 25 bp, Homo sapien
ttcctctccttgctcgtgagcaaaa

SEQ ID NO: 3990523 - DNA, 25 bp, Homo sapien
tcgtgagcaaaagggttttgcttcc

SEQ ID NO: 3990524 - DNA, 25 bp, Homo sapien
agcctccaccccagcgtgtgagagt

SEQ ID NO: 3990525 - DNA, 25 bp, Homo sapien
tgagctgcccgtcacgagccggtgt

SEQ ID NO: 3990526 - DNA, 25 bp, Homo sapien
ggccggatgattggccgtggccgcc

SEQ ID NO: 3990527 - DNA, 25 bp, Homo sapien
tgttgtctgactgcacaggccgtca

SEQ ID NO: 3990528 - DNA, 25 bp, Homo sapien
ccgtcaggcgcagcgcagggctggt

SEQ ID NO: 3990529 - DNA, 25 bp, Homo sapien
ctgaaggctcagacaagcggcgcat

SEQ ID NO: 3990530 - DNA, 25 bp, Homo sapien
ggtctgtggaccccggtagcctcgc

SEQ ID NO: 3990531 - DNA, 25 bp, Homo sapien
ccccggtagcctcgcttctggtggt

SEQ ID NO: 3990532 - DNA, 25 bp, Homo sapien
tagcctcgcttctggtggtgggatc

SEQ ID NO: 3990533 - DNA, 25 bp, Homo sapien
ggtggtgggatctgcatttgttttc

SEQ ID NO: 3990534 - DNA, 25 bp, Homo sapien
gattcaccggcggtggaaagacatc

SEQ ID NO: 3990535 - DNA, 25 bp, Homo sapien
gacatccatcagctgtaaagctttg

SEQ ID NO: 3990536 - DNA, 25 bp, Homo sapien
cactgaggttcactgtggtgattca

SEQ ID NO: 3990537 - DNA, 25 bp, Homo sapien
tcagcgacactgaggttcactgtgg

SEQ ID NO: 3990538 - DNA, 25 bp, Homo sapien
gtcacggacggcacgttcctcggca

SEQ ID NO: 3990539 - DNA, 25 bp, Homo sapien
tgcgtgtcacggacggcacgttcct

SEQ ID NO: 3990540 - DNA, 25 bp, Homo sapien
tcaggtgcgtgtcacggacggcacg

SEQ ID NO: 3990541 - DNA, 25 bp, Homo sapien
aacccctcgcactgccacgctgtcc

SEQ ID NO: 3990542 - DNA, 25 bp, Homo sapien
tgatggtggtcttgagcagagtcca

SEQ ID NO: 3990543 - DNA, 25 bp, Homo sapien
tctggagggctcgtctgcatctgag

SEQ ID NO: 3990544 - DNA, 25 bp, Homo sapien
tgcatctgagattcacgctgcgttg

SEQ ID NO: 3990545 - DNA, 25 bp, Homo sapien
tgctgtgattcccggtgaagggaca

SEQ ID NO: 3990546 - DNA, 25 bp, Homo sapien
tctgagcttgcacccaccctggctc

SEQ ID NO: 3990547 - DNA, 25 bp, Homo sapien
ctgtgaccagactctgcccagtggg

SEQ ID NO: 3990548 - DNA, 25 bp, Homo sapien
agtgggtgtcccacagtgtgctgcc

SEQ ID NO: 3990549 - DNA, 25 bp, Homo sapien
acaggtccctcagacccgctcccac

SEQ ID NO: 3990550 - DNA, 25 bp, Homo sapien
agcccttggcatgagccggctggac

SEQ ID NO: 3990551 - DNA, 25 bp, Homo sapien
gactcagtgcagagtgtgccacgtg

SEQ ID NO: 3990552 - DNA, 25 bp, Homo sapien
ggaacgccatggtctgggactcagt

SEQ ID NO: 3990553 - DNA, 25 bp, Homo sapien
cccgttggagaactgtgggtctcct

SEQ ID NO: 3990554 - DNA, 25 bp, Homo sapien
tttcagtccgatggttaatcgatca

SEQ ID NO: 3990555 - DNA, 25 bp, Homo sapien
ggatttcagtccgatggttaatcga

SEQ ID NO: 3990556 - DNA, 25 bp, Homo sapien
tcttggatttcagtccgatggttaa

SEQ ID NO: 3990557 - DNA, 25 bp, Homo sapien
aagcgtcttggatttcagtccgatg

SEQ ID NO: 3990558 - DNA, 25 bp, Homo sapien
ctgaggaagacttgagcagactgag

SEQ ID NO: 3990559 - DNA, 25 bp, Homo sapien
gaggaagacttgagcagactgagat

SEQ ID NO: 3990560 - DNA, 25 bp, Homo sapien
tgaggaagacttgagcagactgaga

SEQ ID NO: 3990561 - DNA, 25 bp, Homo sapien
aaccgcaggggcgtgaactcggcct

SEQ ID NO: 3990562 - DNA, 25 bp, Homo sapien
gcgtgaactcggccttgtcttgagg

SEQ ID NO: 3990563 - DNA, 25 bp, Homo sapien
gagggctctcgagggaaccgcaggg

SEQ ID NO: 3990564 - DNA, 25 bp, Homo sapien
agggagggctctcgagggaaccgca

SEQ ID NO: 3990565 - DNA, 25 bp, Homo sapien
gtgcagaagaggtcagcagaggtgg

SEQ ID NO: 3990566 - DNA, 25 bp, Homo sapien
gggtgcagaagaggtcagcagaggt

SEQ ID NO: 3990567 - DNA, 25 bp, Homo sapien
gagggtgcagaagaggtcagcagag

SEQ ID NO: 3990568 - DNA, 25 bp, Homo sapien
ggtgcagaagaggtcagcagaggtg

SEQ ID NO: 3990569 - DNA, 25 bp, Homo sapien
ctacagaatccatagatttgggaca

SEQ ID NO: 3990570 - DNA, 25 bp, Homo sapien
tacagaatccatagatttgggacat

SEQ ID NO: 3990571 - DNA, 25 bp, Homo sapien
cagaatccatagatttgggacatct

SEQ ID NO: 3990572 - DNA, 25 bp, Homo sapien
gaatccatagatttgggacatctcc

SEQ ID NO: 3990573 - DNA, 25 bp, Homo sapien
ttatttactgtttcgatgcttaaac

SEQ ID NO: 3990574 - DNA, 25 bp, Homo sapien
tatttactgtttcgatgcttaaacc

SEQ ID NO: 3990575 - DNA, 25 bp, Homo sapien
cagtgggaagaccagtgttgcccgt

SEQ ID NO: 3990576 - DNA, 25 bp, Homo sapien
gaagaccagtgttgcccgtgagagc

SEQ ID NO: 3990577 - DNA, 25 bp, Homo sapien
ctgtcagtgggaagaccagtgttgc

SEQ ID NO: 3990578 - DNA, 25 bp, Homo sapien
agtgttgcccgtgagagcccctgcc

SEQ ID NO: 3990579 - DNA, 25 bp, Homo sapien
ttctggtgtgggacgctcggcctca

SEQ ID NO: 3990580 - DNA, 25 bp, Homo sapien
agcacgggccggcacctgagtccta

SEQ ID NO: 3990581 - DNA, 25 bp, Homo sapien
cctagaacattctggtgtgggacgc

SEQ ID NO: 3990582 - DNA, 25 bp, Homo sapien
ggccggcacctgagtcctagaacat

SEQ ID NO: 3990583 - DNA, 25 bp, Homo sapien
gcctctgggaggaatcgatctttgc

SEQ ID NO: 3990584 - DNA, 25 bp, Homo sapien
ggaatcgatctttgctcacggtcag

SEQ ID NO: 3990585 - DNA, 25 bp, Homo sapien
ccctgggtgaggacgtagcgggtca

SEQ ID NO: 3990586 - DNA, 25 bp, Homo sapien
tcagacattgctccctcgagagctg

SEQ ID NO: 3990587 - DNA, 25 bp, Homo sapien
ccccaggtgtgggcacattgccgtg

SEQ ID NO: 3990588 - DNA, 25 bp, Homo sapien
gtgtgggcacattgccgtggccctg

SEQ ID NO: 3990589 - DNA, 25 bp, Homo sapien
acccccaggtgtgggcacattgccg

SEQ ID NO: 3990590 - DNA, 25 bp, Homo sapien
ggcacattgccgtggccctgggagg

SEQ ID NO: 3990591 - DNA, 25 bp, Homo sapien
aggtgcgatgaccagtgccccatcc

SEQ ID NO: 3990592 - DNA, 25 bp, Homo sapien
tccgtgcatctggatggtgacaggc

SEQ ID NO: 3990593 - DNA, 25 bp, Homo sapien
ccatcctgtccgtgcatctggatgg

SEQ ID NO: 3990594 - DNA, 25 bp, Homo sapien
ctgtccgtgcatctggatggtgaca

SEQ ID NO: 3990595 - DNA, 25 bp, Homo sapien
aggtgcttgccttgcaaatgatgag

SEQ ID NO: 3990596 - DNA, 25 bp, Homo sapien
gtaaggcccacccttgagtagctgc

SEQ ID NO: 3990597 - DNA, 25 bp, Homo sapien
ggtgcttgccttgcaaatgatgagg

SEQ ID NO: 3990598 - DNA, 25 bp, Homo sapien
ggtaaggcccacccttgagtagctg

SEQ ID NO: 3990599 - DNA, 25 bp, Homo sapien
cgcatcgcacacgtccgttgccaca

SEQ ID NO: 3990600 - DNA, 25 bp, Homo sapien
ccccggcacatcacagctgagctgg

SEQ ID NO: 3990601 - DNA, 25 bp, Homo sapien
attgccacgcggtcacccatcccac

SEQ ID NO: 3990602 - DNA, 25 bp, Homo sapien
ggccagccgcatcgcacacgtccgt

SEQ ID NO: 3990603 - DNA, 25 bp, Homo sapien
cgacctgtgggatgcacggctctga

SEQ ID NO: 3990604 - DNA, 25 bp, Homo sapien
cactgcctgtgtagggtccgagtcc

SEQ ID NO: 3990605 - DNA, 25 bp, Homo sapien
ggaattggtaacaaccataccagca

SEQ ID NO: 3990606 - DNA, 25 bp, Homo sapien
cactagcaatgaagaggtgccggct

SEQ ID NO: 3990607 - DNA, 25 bp, Homo sapien
cgccagagaccaaaacgagctgctg

SEQ ID NO: 3990608 - DNA, 25 bp, Homo sapien
tcggctcagacacgaggtgcaggac

SEQ ID NO: 3990609 - DNA, 25 bp, Homo sapien
ggtgcaggacgccagagaccaaaac

SEQ ID NO: 3990610 - DNA, 25 bp, Homo sapien
agacggaagaggctcggctcagaca

SEQ ID NO: 3990611 - DNA, 25 bp, Homo sapien
gcgcggtccccatgcttatctgagg

SEQ ID NO: 3990612 - DNA, 25 bp, Homo sapien
tagtatctttgcaaaagcgcggtcc

SEQ ID NO: 3990613 - DNA, 25 bp, Homo sapien
catgccaatggtaggaaatgttcac

SEQ ID NO: 3990614 - DNA, 25 bp, Homo sapien
gaaaaaagttcactacgtgcccagc

SEQ ID NO: 3990615 - DNA, 25 bp, Homo sapien
tgctaccatggcacccgccagcata

SEQ ID NO: 3990616 - DNA, 25 bp, Homo sapien
taccatggcacccgccagcatagat

SEQ ID NO: 3990617 - DNA, 25 bp, Homo sapien
gctgctaccatggcacccgccagca

SEQ ID NO: 3990618 - DNA, 25 bp, Homo sapien
gctaccatggcacccgccagcatag

SEQ ID NO: 3990619 - DNA, 25 bp, Homo sapien
tctcttggttctcacagtagctgcc

SEQ ID NO: 3990620 - DNA, 25 bp, Homo sapien
cttggttctcacagtagctgccact

SEQ ID NO: 3990621 - DNA, 25 bp, Homo sapien
gtgcagaagcaccagccgcgggtcc

SEQ ID NO: 3990622 - DNA, 25 bp, Homo sapien
ggctctgccgacttctcgggggctt

SEQ ID NO: 3990623 - DNA, 25 bp, Homo sapien
cacctgtgtctcctgcagtgggcag

SEQ ID NO: 3990624 - DNA, 25 bp, Homo sapien
ctccgacccacaccgtgtctgagag

SEQ ID NO: 3990625 - DNA, 25 bp, Homo sapien
ggcactgttgttcccgggagatgct

SEQ ID NO: 3990626 - DNA, 25 bp, Homo sapien
caccgtgtctgagagccacctgtgt

SEQ ID NO: 3990627 - DNA, 25 bp, Homo sapien
gcagccggccgccaacgtgcagact

SEQ ID NO: 3990628 - DNA, 25 bp, Homo sapien
aacgtgcagactgtgtctcaggcct

SEQ ID NO: 3990629 - DNA, 25 bp, Homo sapien
tgtgtctcaggcctgtcggcatggc

SEQ ID NO: 3990630 - DNA, 25 bp, Homo sapien
tgcagactgtgtctcaggcctgtcg

SEQ ID NO: 3990631 - DNA, 25 bp, Homo sapien
cttcaaggtgcctcaccatgttccc

SEQ ID NO: 3990632 - DNA, 25 bp, Homo sapien
tcagccgtgtgtttgtctgatggca

SEQ ID NO: 3990633 - DNA, 25 bp, Homo sapien
gtgtttagaaacagctcacccaagt

SEQ ID NO: 3990634 - DNA, 25 bp, Homo sapien
taaaagatgaggtgtttagaaacag

SEQ ID NO: 3990635 - DNA, 25 bp, Homo sapien
catttgcatggcagaaccagcggga

SEQ ID NO: 3990636 - DNA, 25 bp, Homo sapien
tgtgtgcctcgctcttgctgctggt

SEQ ID NO: 3990637 - DNA, 25 bp, Homo sapien
tcagcacagcatcgtcctcgtgttt

SEQ ID NO: 3990638 - DNA, 25 bp, Homo sapien
gtcctcgtgtttcttggtgcacagc

SEQ ID NO: 3990639 - DNA, 25 bp, Homo sapien
taatggatccttttactagcctggc

SEQ ID NO: 3990640 - DNA, 25 bp, Homo sapien
tgaacgactgacttgaaaccatgag

SEQ ID NO: 3990641 - DNA, 25 bp, Homo sapien
taatttattcttttcagccagcagc

SEQ ID NO: 3990642 - DNA, 25 bp, Homo sapien
gggccagctgtcttgcaatctataa

SEQ ID NO: 3990643 - DNA, 25 bp, Homo sapien
tggtacccatggtggtattgatgag

SEQ ID NO: 3990644 - DNA, 25 bp, Homo sapien
tctgccctgcagcttttagcgaggt

SEQ ID NO: 3990645 - DNA, 25 bp, Homo sapien
ttttagcgaggttctggtgccttcg

SEQ ID NO: 3990646 - DNA, 25 bp, Homo sapien
tacccatggtggtattgatgagggt

SEQ ID NO: 3990647 - DNA, 25 bp, Homo sapien
ttgccacgtgaatggccaagtacgt

SEQ ID NO: 3990648 - DNA, 25 bp, Homo sapien
ccctgaaggcaattcgcagccccat

SEQ ID NO: 3990649 - DNA, 25 bp, Homo sapien
taaacatttgccacgtgaatggcca

SEQ ID NO: 3990650 - DNA, 25 bp, Homo sapien
caagtacgtaaaagaatgcgctccc

SEQ ID NO: 3990651 - DNA, 25 bp, Homo sapien
gaagtgtcaccgagggaaatccctg

SEQ ID NO: 3990652 - DNA, 25 bp, Homo sapien
tgtaaaatatgagggctggactggc

SEQ ID NO: 3990653 - DNA, 25 bp, Homo sapien
catactccaggcagttgatcacata

SEQ ID NO: 3990654 - DNA, 25 bp, Homo sapien
tctagagatcgatggttccgggaca

SEQ ID NO: 3990655 - DNA, 25 bp, Homo sapien
ccagaagagccattcgtgggattta

SEQ ID NO: 3990656 - DNA, 25 bp, Homo sapien
catgcgtttatgcatgttttcacgc

SEQ ID NO: 3990657 - DNA, 25 bp, Homo sapien
ttcacgcaaccagaagagccattcg

SEQ ID NO: 3990658 - DNA, 25 bp, Homo sapien
ttgtgtgcacaagcatgcgtttatg

SEQ ID NO: 3990659 - DNA, 25 bp, Homo sapien
ttgttgacaccagtgtgttgtttac

SEQ ID NO: 3990660 - DNA, 25 bp, Homo sapien
aaatagcagattcctttgttgacac

SEQ ID NO: 3990661 - DNA, 25 bp, Homo sapien
cacacagaacaacatagatacttta

SEQ ID NO: 3990662 - DNA, 25 bp, Homo sapien
caacatagatactttagtttgtcta

SEQ ID NO: 3990663 - DNA, 25 bp, Homo sapien
gtagccttcaggataccccgagtgc

SEQ ID NO: 3990664 - DNA, 25 bp, Homo sapien
gctggagaaggactatggctgttcc

SEQ ID NO: 3990665 - DNA, 25 bp, Homo sapien
ggctgttccttaaagtctctgccct

SEQ ID NO: 3990666 - DNA, 25 bp, Homo sapien
ggataccccgagtgccttacagggc

SEQ ID NO: 3990667 - DNA, 25 bp, Homo sapien
tctgcagtcgggtgcctggcagcac

SEQ ID NO: 3990668 - DNA, 25 bp, Homo sapien
aagctctgcagtcgggtgcctggca

SEQ ID NO: 3990669 - DNA, 25 bp, Homo sapien
ctggctccggtcgaccacctgggag

SEQ ID NO: 3990670 - DNA, 25 bp, Homo sapien
gggcaagctctgcagtcgggtgcct

SEQ ID NO: 3990671 - DNA, 25 bp, Homo sapien
gaagtctctgggttcgaattcagct

SEQ ID NO: 3990672 - DNA, 25 bp, Homo sapien
tgaaatgcggactgcggtaacaacg

SEQ ID NO: 3990673 - DNA, 25 bp, Homo sapien
gacagatggagtgacagcatcgccc

SEQ ID NO: 3990674 - DNA, 25 bp, Homo sapien
taactcggctttaagggagatcagc

SEQ ID NO: 3990675 - DNA, 25 bp, Homo sapien
gaccggattctgtcgcccgctcctg

SEQ ID NO: 3990676 - DNA, 25 bp, Homo sapien
cgctcctgccgtgaccgcgcggcag

SEQ ID NO: 3990677 - DNA, 25 bp, Homo sapien
ggaggctccgagaccggattctgtc

SEQ ID NO: 3990678 - DNA, 25 bp, Homo sapien
tcaggagcccgcgaggcctctggcc

SEQ ID NO: 3990679 - DNA, 25 bp, Homo sapien
tcagactgacggtgcgtgaaggctc

SEQ ID NO: 3990680 - DNA, 25 bp, Homo sapien
ggccggacctccctgttaaatgcag

SEQ ID NO: 3990681 - DNA, 25 bp, Homo sapien
caagaacgattcttagcctagggct

SEQ ID NO: 3990682 - DNA, 25 bp, Homo sapien
ggttgacaagtcactgggatcctga

SEQ ID NO: 3990683 - DNA, 25 bp, Homo sapien
caatctggtaagagaaggcggctgt

SEQ ID NO: 3990684 - DNA, 25 bp, Homo sapien
tgcacctgcctagccaagggagaag

SEQ ID NO: 3990685 - DNA, 25 bp, Homo sapien
tcttaccctgagtgttgccatggcg

SEQ ID NO: 3990686 - DNA, 25 bp, Homo sapien
gctgacctggtcatatggaacccca

SEQ ID NO: 3990687 - DNA, 25 bp, Homo sapien
ccaggcttcttggtgaaccggcgag

SEQ ID NO: 3990688 - DNA, 25 bp, Homo sapien
tgaggacactgtagccaggaacctg

SEQ ID NO: 3990689 - DNA, 25 bp, Homo sapien
tgctgagacttcagggacccatcag

SEQ ID NO: 3990690 - DNA, 25 bp, Homo sapien
tcgaaggtgcttggcggtcttgcct

SEQ ID NO: 3990691 - DNA, 25 bp, Homo sapien
gcaccaccacgagcctgaggtgtga

SEQ ID NO: 3990692 - DNA, 25 bp, Homo sapien
cggcctgtgctgcaagggtcacctt

SEQ ID NO: 3990693 - DNA, 25 bp, Homo sapien
gtcaccttgtgacgagggccgtgca

SEQ ID NO: 3990694 - DNA, 25 bp, Homo sapien
ttcctccatctaggcgggtctcggg

SEQ ID NO: 3990695 - DNA, 25 bp, Homo sapien
aaatggggccgcacatgggcagggc

SEQ ID NO: 3990696 - DNA, 25 bp, Homo sapien
ggagaggctccctcgggaggtcctg

SEQ ID NO: 3990697 - DNA, 25 bp, Homo sapien
gcatccctggactcaggggcgggga

SEQ ID NO: 3990698 - DNA, 25 bp, Homo sapien
agggcggagcgttccgcctcgtcct

SEQ ID NO: 3990699 - DNA, 25 bp, Homo sapien
ctccctggcctcacggtcccatgac

SEQ ID NO: 3990700 - DNA, 25 bp, Homo sapien
gtaggccatggcgtggatgcccaaa

SEQ ID NO: 3990701 - DNA, 25 bp, Homo sapien
cccacgggctcatggggtaggccat

SEQ ID NO: 3990702 - DNA, 25 bp, Homo sapien
catgctcccgatacactggcaggga

SEQ ID NO: 3990703 - DNA, 25 bp, Homo sapien
gatgcccaaacgtgggccacaggct

SEQ ID NO: 3990704 - DNA, 25 bp, Homo sapien
ttccagccagaagccgaaaggcctg

SEQ ID NO: 3990705 - DNA, 25 bp, Homo sapien
gagcatgctggcgaggctcggcgtg

SEQ ID NO: 3990706 - DNA, 25 bp, Homo sapien
gggcacgtgagcatgctggcgaggc

SEQ ID NO: 3990707 - DNA, 25 bp, Homo sapien
gcgaggctcggcgtgtttccagcca

SEQ ID NO: 3990708 - DNA, 25 bp, Homo sapien
aaaatcacgaagtcttgctggatgg

SEQ ID NO: 3990709 - DNA, 25 bp, Homo sapien
gtcttgctggatggcatcgaggcag

SEQ ID NO: 3990710 - DNA, 25 bp, Homo sapien
tctgttaaaaatcacgaagtcttgc

SEQ ID NO: 3990711 - DNA, 25 bp, Homo sapien
ttgctggatggcatcgaggcagtct

SEQ ID NO: 3990712 - DNA, 25 bp, Homo sapien
atggcttggacttgctccgtggggc

SEQ ID NO: 3990713 - DNA, 25 bp, Homo sapien
gatggcttggacttgctccgtgggg

SEQ ID NO: 3990714 - DNA, 25 bp, Homo sapien
atgggcaggcaggactacttccttc

SEQ ID NO: 3990715 - DNA, 25 bp, Homo sapien
ggactacttccttcaggcagcagga

SEQ ID NO: 3990716 - DNA, 25 bp, Homo sapien
ctacttccttcaggcagcaggacca

SEQ ID NO: 3990717 - DNA, 25 bp, Homo sapien
caggcaggactacttccttcaggca

SEQ ID NO: 3990718 - DNA, 25 bp, Homo sapien
cccacttgtgaggaccacagaacct

SEQ ID NO: 3990719 - DNA, 25 bp, Homo sapien
tgcccacttgtgaggaccacagaac

SEQ ID NO: 3990720 - DNA, 25 bp, Homo sapien
taggaagtcacccacgtcacagcca

SEQ ID NO: 3990721 - DNA, 25 bp, Homo sapien
cacagaacctcagatccataggaag

SEQ ID NO: 3990722 - DNA, 25 bp, Homo sapien
gcactttctgagtaactggaccagg

SEQ ID NO: 3990723 - DNA, 25 bp, Homo sapien
ggcagggacctcttgaaccgcaagt

SEQ ID NO: 3990724 - DNA, 25 bp, Homo sapien
ctggcatctcccatcccgagaaggg

SEQ ID NO: 3990725 - DNA, 25 bp, Homo sapien
ggaatccccatctcagggcacctgt

SEQ ID NO: 3990726 - DNA, 25 bp, Homo sapien
tccaccagcaattctgcctgaggac

SEQ ID NO: 3990727 - DNA, 25 bp, Homo sapien
ctgaggacacccagggctgccggca

SEQ ID NO: 3990728 - DNA, 25 bp, Homo sapien
gcaattctgcctgaggacacccagg

SEQ ID NO: 3990729 - DNA, 25 bp, Homo sapien
cacagtggccacctggcagacagca

SEQ ID NO: 3990730 - DNA, 25 bp, Homo sapien
gggcgagtgtgagggcttcacatgg

SEQ ID NO: 3990731 - DNA, 25 bp, Homo sapien
gggcgagtgtgagggcttcacatgg

SEQ ID NO: 3990732 - DNA, 25 bp, Homo sapien
gtgtgagggcttcacgtggccatcc

SEQ ID NO: 3990733 - DNA, 25 bp, Homo sapien
ctgggtgagtgtgagggcttcacgt

SEQ ID NO: 3990734 - DNA, 25 bp, Homo sapien
tgggtgagtgtgagggcttcacgtg

SEQ ID NO: 3990735 - DNA, 25 bp, Homo sapien
tgagtgtgagggcttcacgtggcca

SEQ ID NO: 3990736 - DNA, 25 bp, Homo sapien
acacaactgacaccgatacacctgg

SEQ ID NO: 3990737 - DNA, 25 bp, Homo sapien
ccacacacaactgatgtcgacacac

SEQ ID NO: 3990738 - DNA, 25 bp, Homo sapien
tgacaccgatacacctgggtgagtg

SEQ ID NO: 3990739 - DNA, 25 bp, Homo sapien
agggcttcacgtggccatccccgca

SEQ ID NO: 3990740 - DNA, 25 bp, Homo sapien
gtgtgagggcttcacatggccgtcc

SEQ ID NO: 3990741 - DNA, 25 bp, Homo sapien
atggccgtccccacacacacaactg

SEQ ID NO: 3990742 - DNA, 25 bp, Homo sapien
tgggtgagtgtgagggcttcacatg

SEQ ID NO: 3990743 - DNA, 25 bp, Homo sapien
acacacacaactgatgctgacgcac

SEQ ID NO: 3990744 - DNA, 25 bp, Homo sapien
gggcgagtgtgagggcttcacatgg

SEQ ID NO: 3990745 - DNA, 25 bp, Homo sapien
gtgtgagggcttcacgtggccatcc

SEQ ID NO: 3990746 - DNA, 25 bp, Homo sapien
tgggtgagtgtgagggcttcacgtg

SEQ ID NO: 3990747 - DNA, 25 bp, Homo sapien
tgagtgtgagggcttcacgtggcca

SEQ ID NO: 3990748 - DNA, 25 bp, Homo sapien
ctgggtgagtgtgagggcttcacgt

SEQ ID NO: 3990749 - DNA, 25 bp, Homo sapien
gggtgagtgtgagggcttcacatgg

SEQ ID NO: 3990750 - DNA, 25 bp, Homo sapien
tgagtgtgagggcttcacatggcca

SEQ ID NO: 3990751 - DNA, 25 bp, Homo sapien
agtgtgagggcttcacatggccatc

SEQ ID NO: 3990752 - DNA, 25 bp, Homo sapien
ctgggtgagtgtgagggcttcacat

SEQ ID NO: 3990753 - DNA, 25 bp, Homo sapien
gggcgagtgtgagggcttcacatgg

SEQ ID NO: 3990754 - DNA, 25 bp, Homo sapien
gtgtgagggcttcatgtggccatcc

SEQ ID NO: 3990755 - DNA, 25 bp, Homo sapien
ctgggcgagtgtgagggcttcatgt

SEQ ID NO: 3990756 - DNA, 25 bp, Homo sapien
ggcgagtgtgagggcttcatgtggc

SEQ ID NO: 3990757 - DNA, 25 bp, Homo sapien
agtgtgagggcttcatgtggccatc

SEQ ID NO: 3990758 - DNA, 25 bp, Homo sapien
tggctgtcccggcacacatacctga

SEQ ID NO: 3990759 - DNA, 25 bp, Homo sapien
gcacacatacctgatgctgacgcac

SEQ ID NO: 3990760 - DNA, 25 bp, Homo sapien
tgtcccggcacacatacctgatgct

SEQ ID NO: 3990761 - DNA, 25 bp, Homo sapien
agtgtgagggcttcacatggctgtc

SEQ ID NO: 3990762 - DNA, 25 bp, Homo sapien
tgagggcttcacatagccgtccccg

SEQ ID NO: 3990763 - DNA, 25 bp, Homo sapien
cgagtgtgagggcttcacatagccg

SEQ ID NO: 3990764 - DNA, 25 bp, Homo sapien
cgcacacacaaccaacaccagcaca

SEQ ID NO: 3990765 - DNA, 25 bp, Homo sapien
gggcgagtgtgagggcttcacatag

SEQ ID NO: 3990766 - DNA, 25 bp, Homo sapien
tggggtcgcagtgcagacggccttt

SEQ ID NO: 3990767 - DNA, 25 bp, Homo sapien
ccctgctgttgtcccgggacttgtt

SEQ ID NO: 3990768 - DNA, 25 bp, Homo sapien
tgtccctgctgttgtcccgggactt

SEQ ID NO: 3990769 - DNA, 25 bp, Homo sapien
ctcaaaggtggggtcgcagtgcaga

SEQ ID NO: 3990770 - DNA, 25 bp, Homo sapien
agagccggtgctcggggttcacagt

SEQ ID NO: 3990771 - DNA, 25 bp, Homo sapien
cggtgctcggggttcacagtgagga

SEQ ID NO: 3990772 - DNA, 25 bp, Homo sapien
ccggtgctcggggttcacagtgagg

SEQ ID NO: 3990773 - DNA, 25 bp, Homo sapien
gctggagagccggtgctcggggttc

SEQ ID NO: 3990774 - DNA, 25 bp, Homo sapien
ccttggaccacgtggggacatactg

SEQ ID NO: 3990775 - DNA, 25 bp, Homo sapien
ccagggactccacggcgttgctgga

SEQ ID NO: 3990776 - DNA, 25 bp, Homo sapien
gggacatactggacgctcacggtgc

SEQ ID NO: 3990777 - DNA, 25 bp, Homo sapien
ggacgctcacggtgctgaacagctg

SEQ ID NO: 3990778 - DNA, 25 bp, Homo sapien
ctggacactggggcagccaccccct

SEQ ID NO: 3990779 - DNA, 25 bp, Homo sapien
cactggggcagccaccccctcccca

SEQ ID NO: 3990780 - DNA, 25 bp, Homo sapien
tggacactggggcagccaccccctc

SEQ ID NO: 3990781 - DNA, 25 bp, Homo sapien
tggggcagccaccccctccccagca

SEQ ID NO: 3990782 - DNA, 25 bp, Homo sapien
cggtcccgccgttgacaaaagagtg

SEQ ID NO: 3990783 - DNA, 25 bp, Homo sapien
ccaccagtccacctcgaaggagtag

SEQ ID NO: 3990784 - DNA, 25 bp, Homo sapien
gacaaaagagtggaagatctccgga

SEQ ID NO: 3990785 - DNA, 25 bp, Homo sapien
ggagtagccggtcccgccgttgaca

SEQ ID NO: 3990786 - DNA, 25 bp, Homo sapien
cggacccgtgggcacagggccggca

SEQ ID NO: 3990787 - DNA, 25 bp, Homo sapien
aagaaggaaaaacagctgccacggg

SEQ ID NO: 3990788 - DNA, 25 bp, Homo sapien
aaaacagctgccacggggtcacagc

SEQ ID NO: 3990789 - DNA, 25 bp, Homo sapien
ggtcacagcccggacccgtgggcac

SEQ ID NO: 3990790 - DNA, 25 bp, Homo sapien
ggccacatcccgagaccaggctgcc

SEQ ID NO: 3990791 - DNA, 25 bp, Homo sapien
gacagagaagccaccgaggtcttgt

SEQ ID NO: 3990792 - DNA, 25 bp, Homo sapien
cacatcccgagaccaggctgcctcc

SEQ ID NO: 3990793 - DNA, 25 bp, Homo sapien
acagagaagccaccgaggtcttgtc

SEQ ID NO: 3990794 - DNA, 25 bp, Homo sapien
ccatgtacggcttggtgcctgctaa

SEQ ID NO: 3990795 - DNA, 25 bp, Homo sapien
caatgttgaagtcggtcaggtgtgc

SEQ ID NO: 3990796 - DNA, 25 bp, Homo sapien
gcttggtgcctgctaatgccgtcgc

SEQ ID NO: 3990797 - DNA, 25 bp, Homo sapien
ctccccgtccttgatgatggtggca

SEQ ID NO: 3990798 - DNA, 25 bp, Homo sapien
ctcatccaggagaatgttgtcaggc

SEQ ID NO: 3990799 - DNA, 25 bp, Homo sapien
ggagaatgttgtcaggcttgacatc

SEQ ID NO: 3990800 - DNA, 25 bp, Homo sapien
ccaggagaatgttgtcaggcttgac

SEQ ID NO: 3990801 - DNA, 25 bp, Homo sapien
atccaggagaatgttgtcaggcttg

SEQ ID NO: 3990802 - DNA, 25 bp, Homo sapien
tgacttggtccttggatgatgctag

SEQ ID NO: 3990803 - DNA, 25 bp, Homo sapien
tccttggatgatgctaggacctcac

SEQ ID NO: 3990804 - DNA, 25 bp, Homo sapien
acttggtccttggatgatgctagga

SEQ ID NO: 3990805 - DNA, 25 bp, Homo sapien
tggtccttggatgatgctaggacct

SEQ ID NO: 3990806 - DNA, 25 bp, Homo sapien
ggcagaggcgatgaagtcagccact

SEQ ID NO: 3990807 - DNA, 25 bp, Homo sapien
gatgaagtcagccacttcgttccct

SEQ ID NO: 3990808 - DNA, 25 bp, Homo sapien
tcagccacttcgttccctgtggcat

SEQ ID NO: 3990809 - DNA, 25 bp, Homo sapien
gaggcgatgaagtcagccacttcgt

SEQ ID NO: 3990810 - DNA, 25 bp, Homo sapien
ctgggacgaggtccccccagatgga

SEQ ID NO: 3990811 - DNA, 25 bp, Homo sapien
tgtccaccagggctaacagcccact

SEQ ID NO: 3990812 - DNA, 25 bp, Homo sapien
gcacacagctatggggctgacctgg

SEQ ID NO: 3990813 - DNA, 25 bp, Homo sapien
ccagggctaacagcccactgtgccc

SEQ ID NO: 3990814 - DNA, 25 bp, Homo sapien
tcaccgtgtcctcggagaactgcac

SEQ ID NO: 3990815 - DNA, 25 bp, Homo sapien
gtggtagcgcaggtccccgcccagt

SEQ ID NO: 3990816 - DNA, 25 bp, Homo sapien
tcgcagatgtacagcctcaccgtgt

SEQ ID NO: 3990817 - DNA, 25 bp, Homo sapien
aggtagtccagagccagtgccatct

SEQ ID NO: 3990818 - DNA, 25 bp, Homo sapien
gaagacgttgcggacctcgtcgcgc

SEQ ID NO: 3990819 - DNA, 25 bp, Homo sapien
tcgcgctcgatgcactgctgcttgt

SEQ ID NO: 3990820 - DNA, 25 bp, Homo sapien
aagacgtgctcgatctcctgcagga

SEQ ID NO: 3990821 - DNA, 25 bp, Homo sapien
ggttcaccaggaagacgtgctcgat

SEQ ID NO: 3990822 - DNA, 25 bp, Homo sapien
tccgtgtcccgcttctgcacaatgc

SEQ ID NO: 3990823 - DNA, 25 bp, Homo sapien
cgtgtcccgcttctgcacaatgcac

SEQ ID NO: 3990824 - DNA, 25 bp, Homo sapien
ccgtgtcccgcttctgcacaatgca

SEQ ID NO: 3990825 - DNA, 25 bp, Homo sapien
ctccgtgtcccgcttctgcacaatg

SEQ ID NO: 3990826 - DNA, 25 bp, Homo sapien
gctgttcggcaggacgcctgaggac

SEQ ID NO: 3990827 - DNA, 25 bp, Homo sapien
ggctgttcggcaggacgcctgagga

SEQ ID NO: 3990828 - DNA, 25 bp, Homo sapien
agggctgttcggcaggacgcctgag

SEQ ID NO: 3990829 - DNA, 25 bp, Homo sapien
tgttcggcaggacgcctgaggacgc

SEQ ID NO: 3990830 - DNA, 25 bp, Homo sapien
tggtggagccatcagccacagtcca

SEQ ID NO: 3990831 - DNA, 25 bp, Homo sapien
aacaaactgcctggatggtggagcc

SEQ ID NO: 3990832 - DNA, 25 bp, Homo sapien
ggatggtggagccatcagccacagt

SEQ ID NO: 3990833 - DNA, 25 bp, Homo sapien
tggagccatcagccacagtccaagc

SEQ ID NO: 3990834 - DNA, 25 bp, Homo sapien
ctgtcaggcacgttgaaggtggttt

SEQ ID NO: 3990835 - DNA, 25 bp, Homo sapien
attaagtcaatcacatcaaagtgct

SEQ ID NO: 3990836 - DNA, 25 bp, Homo sapien
ttccgttgaaatggatttgattaag

SEQ ID NO: 3990837 - DNA, 25 bp, Homo sapien
ttatcactaggacccgccctctgag

SEQ ID NO: 3990838 - DNA, 25 bp, Homo sapien
ctgtagtggccatgctgcgatggca

SEQ ID NO: 3990839 - DNA, 25 bp, Homo sapien
ggcggctgtagtggccatgctgcga

SEQ ID NO: 3990840 - DNA, 25 bp, Homo sapien
tagtggccatgctgcgatggcacca

SEQ ID NO: 3990841 - DNA, 25 bp, Homo sapien
cctgggtggcggctgtagtggccat

SEQ ID NO: 3990842 - DNA, 25 bp, Homo sapien
tgtgtcctcctgacacttcccgatg

SEQ ID NO: 3990843 - DNA, 25 bp, Homo sapien
taatccgtgatccatcttgagggcc

SEQ ID NO: 3990844 - DNA, 25 bp, Homo sapien
ggatgtgcataatccgtgatccatc

SEQ ID NO: 3990845 - DNA, 25 bp, Homo sapien
tgctgcccgagcttgacagccgctt

SEQ ID NO: 3990846 - DNA, 25 bp, Homo sapien
ctgggaggcacctccacgtcccttc

SEQ ID NO: 3990847 - DNA, 25 bp, Homo sapien
gaggcacctccacgtcccttcctct

SEQ ID NO: 3990848 - DNA, 25 bp, Homo sapien
agttctgggaggcacctccacgtcc

SEQ ID NO: 3990849 - DNA, 25 bp, Homo sapien
ccgagttctgggaggcacctccacg

SEQ ID NO: 3990850 - DNA, 25 bp, Homo sapien
ttgccatagcgaccacaggcactgt

SEQ ID NO: 3990851 - DNA, 25 bp, Homo sapien
ggtggaatccagaggccacgtacac

SEQ ID NO: 3990852 - DNA, 25 bp, Homo sapien
tacagcagccgctggcgggttgcca

SEQ ID NO: 3990853 - DNA, 25 bp, Homo sapien
caggcactgtcttctcgctgagacg

SEQ ID NO: 3990854 - DNA, 25 bp, Homo sapien
acagccagccgtgccaccgagaaat

SEQ ID NO: 3990855 - DNA, 25 bp, Homo sapien
tgtgcccactgcccaacagccagcc

SEQ ID NO: 3990856 - DNA, 25 bp, Homo sapien
ccagccgtgccaccgagaaatccat

SEQ ID NO: 3990857 - DNA, 25 bp, Homo sapien
caacagccagccgtgccaccgagaa

SEQ ID NO: 3990858 - DNA, 25 bp, Homo sapien
gaggcatccaaagaggacgccgact

SEQ ID NO: 3990859 - DNA, 25 bp, Homo sapien
agaagcacagccgtggctccaaaga

SEQ ID NO: 3990860 - DNA, 25 bp, Homo sapien
aggacgccgactgcccctttgacag

SEQ ID NO: 3990861 - DNA, 25 bp, Homo sapien
aagcacagccgtggctccaaagagg

SEQ ID NO: 3990862 - DNA, 25 bp, Homo sapien
caaggaccagctgaggatgcacgct

SEQ ID NO: 3990863 - DNA, 25 bp, Homo sapien
gtcctgtcccctgtaggtcctgagg

SEQ ID NO: 3990864 - DNA, 25 bp, Homo sapien
ggctccagttcagccaaagctgcga

SEQ ID NO: 3990865 - DNA, 25 bp, Homo sapien
aaagctgcgattttgtcctcctggt

SEQ ID NO: 3990866 - DNA, 25 bp, Homo sapien
gcctccgtggcaggagtgcccacgt

SEQ ID NO: 3990867 - DNA, 25 bp, Homo sapien
gcccagtctgatggcggcacagcca

SEQ ID NO: 3990868 - DNA, 25 bp, Homo sapien
gagcctctgcccaggtaaggctgct

SEQ ID NO: 3990869 - DNA, 25 bp, Homo sapien
ctccctaaaagacctggagcctctg

SEQ ID NO: 3990870 - DNA, 25 bp, Homo sapien
aaggatctggaagtggtcgaagttc

SEQ ID NO: 3990871 - DNA, 25 bp, Homo sapien
aggatctggaagtggtcgaagttca

SEQ ID NO: 3990872 - DNA, 25 bp, Homo sapien
tcccaatggcccgaaggatctggaa

SEQ ID NO: 3990873 - DNA, 25 bp, Homo sapien
gcccttcccaatggcccgaaggatc

SEQ ID NO: 3990874 - DNA, 25 bp, Homo sapien
agagccgttccgcaagcctgtgcga

SEQ ID NO: 3990875 - DNA, 25 bp, Homo sapien
atgagagccgttccgcaagcctgtg

SEQ ID NO: 3990876 - DNA, 25 bp, Homo sapien
cccagcatgagagccgttccgcaag

SEQ ID NO: 3990877 - DNA, 25 bp, Homo sapien
gccgttccgcaagcctgtgcgaagc

SEQ ID NO: 3990878 - DNA, 25 bp, Homo sapien
agctggcctgaaggcgcagggtggc

SEQ ID NO: 3990879 - DNA, 25 bp, Homo sapien
gctacgggtgccgtgacaaggaccc

SEQ ID NO: 3990880 - DNA, 25 bp, Homo sapien
ccgtgacaaggacccacggaggctt

SEQ ID NO: 3990881 - DNA, 25 bp, Homo sapien
tcagcctgagctacgggtgccgtga

SEQ ID NO: 3990882 - DNA, 25 bp, Homo sapien
cgggccgcggccgcacaggcaggga

SEQ ID NO: 3990883 - DNA, 25 bp, Homo sapien
cgcggccgcacaggcagggagcagc

SEQ ID NO: 3990884 - DNA, 25 bp, Homo sapien
ggccgcggccgcacaggcagggagc

SEQ ID NO: 3990885 - DNA, 25 bp, Homo sapien
ccactccaaggcagcccgggccgcg

SEQ ID NO: 3990886 - DNA, 25 bp, Homo sapien
caggacagacctcggagtctgcggg

SEQ ID NO: 3990887 - DNA, 25 bp, Homo sapien
gagatggggacaccaatgccatcca

SEQ ID NO: 3990888 - DNA, 25 bp, Homo sapien
agctgtgaaccagcacgtgggacag

SEQ ID NO: 3990889 - DNA, 25 bp, Homo sapien
atgggctgaactagtggagggagga

SEQ ID NO: 3990890 - DNA, 25 bp, Homo sapien
tcccgactgtgcgacggaggcggcg

SEQ ID NO: 3990891 - DNA, 25 bp, Homo sapien
aagcctcccgactgtgcgacggagg

SEQ ID NO: 3990892 - DNA, 25 bp, Homo sapien
caaagcctcccgactgtgcgacgga

SEQ ID NO: 3990893 - DNA, 25 bp, Homo sapien
tgcaaagcctcccgactgtgcgacg

SEQ ID NO: 3990894 - DNA, 25 bp, Homo sapien
caggtgtgtgtgaggcgcacaggac

SEQ ID NO: 3990895 - DNA, 25 bp, Homo sapien
tgaggcgcacaggacaggtcactgc

SEQ ID NO: 3990896 - DNA, 25 bp, Homo sapien
aggtgtgtgtgaggcgcacgggaca

SEQ ID NO: 3990897 - DNA, 25 bp, Homo sapien
cacaggacaggtcactgcagagaga

SEQ ID NO: 3990898 - DNA, 25 bp, Homo sapien
tgggtaccgactgctgtccacgctg

SEQ ID NO: 3990899 - DNA, 25 bp, Homo sapien
cctggaaggacaggtccaatgcgct

SEQ ID NO: 3990900 - DNA, 25 bp, Homo sapien
tctgggcacctaacgccctgggtac

SEQ ID NO: 3990901 - DNA, 25 bp, Homo sapien
agcgcgcaggccttcctctggaatt

SEQ ID NO: 3990902 - DNA, 25 bp, Homo sapien
acaccccactattctgcacccaggg

SEQ ID NO: 3990903 - DNA, 25 bp, Homo sapien
cagggccccgtgatcgagtctgtgc

SEQ ID NO: 3990904 - DNA, 25 bp, Homo sapien
agcagatacccatgaggcacacccc

SEQ ID NO: 3990905 - DNA, 25 bp, Homo sapien
tctgtgccccatgcagtgctcatgg

SEQ ID NO: 3990906 - DNA, 25 bp, Homo sapien
tgctgcaacatgagaacagtagaag

SEQ ID NO: 3990907 - DNA, 25 bp, Homo sapien
agtagaaggtgcgagcagcagacat

SEQ ID NO: 3990908 - DNA, 25 bp, Homo sapien
ctgctgcaacatgagaacagtagaa

SEQ ID NO: 3990909 - DNA, 25 bp, Homo sapien
agaacagtagaaggtgcgagcagca

SEQ ID NO: 3990910 - DNA, 25 bp, Homo sapien
ttgcctcgccttgcaaaaggtggag

SEQ ID NO: 3990911 - DNA, 25 bp, Homo sapien
aatgcctgtgggagcgctgactcca

SEQ ID NO: 3990912 - DNA, 25 bp, Homo sapien
caaacctgagcttatgagacagacc

SEQ ID NO: 3990913 - DNA, 25 bp, Homo sapien
cgttcagtgagagtccctagcctgc

SEQ ID NO: 3990914 - DNA, 25 bp, Homo sapien
cgaagacgggccgaagggagtcagg

SEQ ID NO: 3990915 - DNA, 25 bp, Homo sapien
ggagtcagggccctccacgagagcc

SEQ ID NO: 3990916 - DNA, 25 bp, Homo sapien
gagtcagggccctccacgagagccg

SEQ ID NO: 3990917 - DNA, 25 bp, Homo sapien
agggagtcagggccctccacgagag

SEQ ID NO: 3990918 - DNA, 25 bp, Homo sapien
aaatgcaagatgtgaaccaggagct

SEQ ID NO: 3990919 - DNA, 25 bp, Homo sapien
tgaaccaggagctgcacgtcggcca

SEQ ID NO: 3990920 - DNA, 25 bp, Homo sapien
ctactgggccgggtgaaaatgcaag

SEQ ID NO: 3990921 - DNA, 25 bp, Homo sapien
ctgcacgtcggccacgtgtggagaa

SEQ ID NO: 3990922 - DNA, 25 bp, Homo sapien
tccctacgggctgcaatttccaacg

SEQ ID NO: 3990923 - DNA, 25 bp, Homo sapien
gctgcaatttccaacgcaaaaagtg

SEQ ID NO: 3990924 - DNA, 25 bp, Homo sapien
tccgtcaagcgatactccctacggg

SEQ ID NO: 3990925 - DNA, 25 bp, Homo sapien
tccaacgcaaaaagtgaaaccacag

SEQ ID NO: 3990926 - DNA, 25 bp, Homo sapien
gggccacgaaagtaccaggcaaatg

SEQ ID NO: 3990927 - DNA, 25 bp, Homo sapien
gaaagtaccaggcaaatgactgcac

SEQ ID NO: 3990928 - DNA, 25 bp, Homo sapien
tgccacggggccacgaaagtaccag

SEQ ID NO: 3990929 - DNA, 25 bp, Homo sapien
gtaccaggcaaatgactgcaccaac

SEQ ID NO: 3990930 - DNA, 25 bp, Homo sapien
gggacaccgtcagccgaatctctgc

SEQ ID NO: 3990931 - DNA, 25 bp, Homo sapien
cgtcagccgaatctctgccgtccta

SEQ ID NO: 3990932 - DNA, 25 bp, Homo sapien
agccagcagcatccgtgggacaccg

SEQ ID NO: 3990933 - DNA, 25 bp, Homo sapien
agcagcatccgtgggacaccgtcag

SEQ ID NO: 3990934 - DNA, 25 bp, Homo sapien
aattttgaaggatccatcatacctc

SEQ ID NO: 3990935 - DNA, 25 bp, Homo sapien
gaggtcgtattactgtaatttccca

SEQ ID NO: 3990936 - DNA, 25 bp, Homo sapien
ttatttatcgcaagtaaatagcctg

SEQ ID NO: 3990937 - DNA, 25 bp, Homo sapien
tgagcgctgggctctaaaattttga

SEQ ID NO: 3990938 - DNA, 25 bp, Homo sapien
gactgtattacagtgcccacaggca

SEQ ID NO: 3990939 - DNA, 25 bp, Homo sapien
gcatgtgactgtattacagtgccca

SEQ ID NO: 3990940 - DNA, 25 bp, Homo sapien
acatctccctgcaggtgataattcg

SEQ ID NO: 3990941 - DNA, 25 bp, Homo sapien
cacatctccctgcaggtgataattc

SEQ ID NO: 3990942 - DNA, 25 bp, Homo sapien
acggctgcacggtcactcaggagac

SEQ ID NO: 3990943 - DNA, 25 bp, Homo sapien
gggttggcggctttatctacaggac

SEQ ID NO: 3990944 - DNA, 25 bp, Homo sapien
ttctctgctttctatggcgcccacg

SEQ ID NO: 3990945 - DNA, 25 bp, Homo sapien
tacaggactcagcagcgcactcgtt

SEQ ID NO: 3990946 - DNA, 25 bp, Homo sapien
gcaggtctttgcacaacggcctggc

SEQ ID NO: 3990947 - DNA, 25 bp, Homo sapien
agactgagcctctgagcggccgggc

SEQ ID NO: 3990948 - DNA, 25 bp, Homo sapien
agaggatggacaccgcgcggtcacc

SEQ ID NO: 3990949 - DNA, 25 bp, Homo sapien
aggagcctcactcgcactcgggcgg

SEQ ID NO: 3990950 - DNA, 25 bp, Homo sapien
ccttgtcgtcaaacaccggcctccg

SEQ ID NO: 3990951 - DNA, 25 bp, Homo sapien
tggccgccgacatggacgagcccat

SEQ ID NO: 3990952 - DNA, 25 bp, Homo sapien
tccgcgcggtggccgccgacatgga

SEQ ID NO: 3990953 - DNA, 25 bp, Homo sapien
cgtcctccttgtcgtcaaacaccgg

SEQ ID NO: 3990954 - DNA, 25 bp, Homo sapien
ctgaaacagggggcgcggctgcgag

SEQ ID NO: 3990955 - DNA, 25 bp, Homo sapien
gcggctgcgagcggacatcgcccga

SEQ ID NO: 3990956 - DNA, 25 bp, Homo sapien
tgaaacagggggcgcggctgcgagc

SEQ ID NO: 3990957 - DNA, 25 bp, Homo sapien
gctgcgagcggacatcgcccgagtc

SEQ ID NO: 3990958 - DNA, 25 bp, Homo sapien
ggccgggagcggcagtggtagcggg

SEQ ID NO: 3990959 - DNA, 25 bp, Homo sapien
gcgcggcagccggaactcggggcat

SEQ ID NO: 3990960 - DNA, 25 bp, Homo sapien
ccgtgcgctcttctgggcggtggaa

SEQ ID NO: 3990961 - DNA, 25 bp, Homo sapien
gcggcagtggtagcgggagcgctcg

SEQ ID NO: 3990962 - DNA, 25 bp, Homo sapien
ctggacatgcacccgcttaggacac

SEQ ID NO: 3990963 - DNA, 25 bp, Homo sapien
tctctgcccctctgcccttctgcat

SEQ ID NO: 3990964 - DNA, 25 bp, Homo sapien
ctgggccccgcccttctctgcccct

SEQ ID NO: 3990965 - DNA, 25 bp, Homo sapien
ccttctctgcccctctgcccttctg

SEQ ID NO: 3990966 - DNA, 25 bp, Homo sapien
tgggccccgcccttctctgcccctc

SEQ ID NO: 3990967 - DNA, 25 bp, Homo sapien
cagttaatgctgtccggagagagcg

SEQ ID NO: 3990968 - DNA, 25 bp, Homo sapien
ctgggaagcccaagagaacggcaac

SEQ ID NO: 3990969 - DNA, 25 bp, Homo sapien
cagcatatgaattccagggacccac

SEQ ID NO: 3990970 - DNA, 25 bp, Homo sapien
gcccagtccctaaagagcagcatta

SEQ ID NO: 3990971 - DNA, 25 bp, Homo sapien
aattcattacacaccccctcttgat

SEQ ID NO: 3990972 - DNA, 25 bp, Homo sapien
agcttcttgtctttccacaccattc

SEQ ID NO: 3990973 - DNA, 25 bp, Homo sapien
accccctcttgatgggccacagaac

SEQ ID NO: 3990974 - DNA, 25 bp, Homo sapien
cattaacaattcattacacaccccc

SEQ ID NO: 3990975 - DNA, 25 bp, Homo sapien
tggaatcaatcaacaggaaggagtg

SEQ ID NO: 3990976 - DNA, 25 bp, Homo sapien
tgtagagatcaagttcttagtggta

SEQ ID NO: 3990977 - DNA, 25 bp, Homo sapien
tgcaggagagtgaccttacaggtca

SEQ ID NO: 3990978 - DNA, 25 bp, Homo sapien
tggtctagaaaggaaggacaactga

SEQ ID NO: 3990979 - DNA, 25 bp, Homo sapien
gggtgcaagctactcccttttagga

SEQ ID NO: 3990980 - DNA, 25 bp, Homo sapien
tatctcaggtgagaagacacggcca

SEQ ID NO: 3990981 - DNA, 25 bp, Homo sapien
aattatgtcagggtgcagaggtgcc

SEQ ID NO: 3990982 - DNA, 25 bp, Homo sapien
gaccaatactgggaagcgcagtttg

SEQ ID NO: 3990983 - DNA, 25 bp, Homo sapien
gtagcaatgccacgggcagcaaact

SEQ ID NO: 3990984 - DNA, 25 bp, Homo sapien
gcagcagtcgctgcccggaggaagg

SEQ ID NO: 3990985 - DNA, 25 bp, Homo sapien
aacttctcggcagggtagcagcagt

SEQ ID NO: 3990986 - DNA, 25 bp, Homo sapien
aataccacagcgaaatttcagaaca

SEQ ID NO: 3990987 - DNA, 25 bp, Homo sapien
gagatactggaatgctgaaacttgt

SEQ ID NO: 3990988 - DNA, 25 bp, Homo sapien
tccccacgctcctgagaaggtactg

SEQ ID NO: 3990989 - DNA, 25 bp, Homo sapien
tctccttgctctgcccgggtggctg

SEQ ID NO: 3990990 - DNA, 25 bp, Homo sapien
acttgttagaaatagcatcgtgctg

SEQ ID NO: 3990991 - DNA, 25 bp, Homo sapien
cctggaatgaaggtgcacgggactc

SEQ ID NO: 3990992 - DNA, 25 bp, Homo sapien
gcagactccagctaaactgtccggg

SEQ ID NO: 3990993 - DNA, 25 bp, Homo sapien
ttaaaaagtggaatcaggccgggca

SEQ ID NO: 3990994 - DNA, 25 bp, Homo sapien
ccgaagctgacattaagtggcacaa

SEQ ID NO: 3990995 - DNA, 25 bp, Homo sapien
cccctcactcctccgtccagaggca

SEQ ID NO: 3990996 - DNA, 25 bp, Homo sapien
cctcactcctccgtccagaggcagc

SEQ ID NO: 3990997 - DNA, 25 bp, Homo sapien
ctcctccgtccagaggcagccttac

SEQ ID NO: 3990998 - DNA, 25 bp, Homo sapien
tcactcctccgtccagaggcagcct

SEQ ID NO: 3990999 - DNA, 25 bp, Homo sapien
caaagaggacgctctgagtctgcgt

SEQ ID NO: 3991000 - DNA, 25 bp, Homo sapien
gtctgcgttcccctggcagcaagtc

SEQ ID NO: 3991001 - DNA, 25 bp, Homo sapien
gacgctctgagtctgcgttcccctg

SEQ ID NO: 3991002 - DNA, 25 bp, Homo sapien
ttctccaaagaggacgctctgagtc

SEQ ID NO: 3991003 - DNA, 25 bp, Homo sapien
ctgaggcaagatttggggacaagca

SEQ ID NO: 3991004 - DNA, 25 bp, Homo sapien
cctgtgggaagtggctccaggaagc

SEQ ID NO: 3991005 - DNA, 25 bp, Homo sapien
cagctcctgtgggaagtggctccag

SEQ ID NO: 3991006 - DNA, 25 bp, Homo sapien
gggacaagcagctcctgtgggaagt

SEQ ID NO: 3991007 - DNA, 25 bp, Homo sapien
cagcgaggaccgctccaaaggtggt

SEQ ID NO: 3991008 - DNA, 25 bp, Homo sapien
aaggtggtgcctcagcagcaattct

SEQ ID NO: 3991009 - DNA, 25 bp, Homo sapien
gcggtctctacttgcccgtcgacca

SEQ ID NO: 3991010 - DNA, 25 bp, Homo sapien
cagcaattcttttctgctcggctgt

SEQ ID NO: 3991011 - DNA, 25 bp, Homo sapien
ctcgcgcaggcgcatcacagacaca

SEQ ID NO: 3991012 - DNA, 25 bp, Homo sapien
cagacacactcgcgctcagcgtggc

SEQ ID NO: 3991013 - DNA, 25 bp, Homo sapien
acactcgcgctcagcgtggcgcctg

SEQ ID NO: 3991014 - DNA, 25 bp, Homo sapien
gacacactcgcgctcagcgtggcgc

SEQ ID NO: 3991015 - DNA, 25 bp, Homo sapien
ccttttactggcattgagaacgaca

SEQ ID NO: 3991016 - DNA, 25 bp, Homo sapien
tactggcattgagaacgacatggtt

SEQ ID NO: 3991017 - DNA, 25 bp, Homo sapien
cattgagaacgacatggtttcaaag

SEQ ID NO: 3991018 - DNA, 25 bp, Homo sapien
ggtttcaaagctgagcactggaatc

SEQ ID NO: 3991019 - DNA, 25 bp, Homo sapien
gtgctgatatgaaggccccatatca

SEQ ID NO: 3991020 - DNA, 25 bp, Homo sapien
cagagctggtgggatgcgggtgggt

SEQ ID NO: 3991021 - DNA, 25 bp, Homo sapien
gaggaatggtgtctcccaagagcca

SEQ ID NO: 3991022 - DNA, 25 bp, Homo sapien
ggcgtggctggccacggcagggcct

SEQ ID NO: 3991023 - DNA, 25 bp, Homo sapien
cccagcgaggaggagatcaggcgct

SEQ ID NO: 3991024 - DNA, 25 bp, Homo sapien
agtctgcggactcctcagagaactg

SEQ ID NO: 3991025 - DNA, 25 bp, Homo sapien
aactcaggaagtctgcggactcctc

SEQ ID NO: 3991026 - DNA, 25 bp, Homo sapien
ggaaaagccagacctgagtgaactc

SEQ ID NO: 3991027 - DNA, 25 bp, Homo sapien
tgtgggaccaggtcttgctggccac

SEQ ID NO: 3991028 - DNA, 25 bp, Homo sapien
tgtcccaggctgtcatactgacggg

SEQ ID NO: 3991029 - DNA, 25 bp, Homo sapien
aggtgaagtcctcagaactggtccc

SEQ ID NO: 3991030 - DNA, 25 bp, Homo sapien
gactgaccgctctagggctgtccta

SEQ ID NO: 3991031 - DNA, 25 bp, Homo sapien
cgggcctcgtcccacaccttcatgg

SEQ ID NO: 3991032 - DNA, 25 bp, Homo sapien
tggatacaaagagcaagtgaactct

SEQ ID NO: 3991033 - DNA, 25 bp, Homo sapien
ccagacaacaggctcgggcctcgtc

SEQ ID NO: 3991034 - DNA, 25 bp, Homo sapien
agttcttggatacaaagagcaagtg

SEQ ID NO: 3991035 - DNA, 25 bp, Homo sapien
gtggtcagaggtgggccgtgggccg

SEQ ID NO: 3991036 - DNA, 25 bp, Homo sapien
actgggagaggacgcagccaggctc

SEQ ID NO: 3991037 - DNA, 25 bp, Homo sapien
cactgactcgggatggagccctcag

SEQ ID NO: 3991038 - DNA, 25 bp, Homo sapien
tgatcccaggcagcactgactcggg

SEQ ID NO: 3991039 - DNA, 25 bp, Homo sapien
gcctcgggatagaacccggcattcc

SEQ ID NO: 3991040 - DNA, 25 bp, Homo sapien
cacacagagcctcgggatagaaccc

SEQ ID NO: 3991041 - DNA, 25 bp, Homo sapien
gatgccttttcctcggtcactgggt

SEQ ID NO: 3991042 - DNA, 25 bp, Homo sapien
agcatcagtcactgctggcagcacc

SEQ ID NO: 3991043 - DNA, 25 bp, Homo sapien
gggacatgggatatcctgagtacca

SEQ ID NO: 3991044 - DNA, 25 bp, Homo sapien
tctggacctcgaggcaggcagtttc

SEQ ID NO: 3991045 - DNA, 25 bp, Homo sapien
agctatgggacacgggacatcttga

SEQ ID NO: 3991046 - DNA, 25 bp, Homo sapien
atgagggtcttagtccagccgggca

SEQ ID NO: 3991047 - DNA, 25 bp, Homo sapien
cccagtgactttgcggggagggctg

SEQ ID NO: 3991048 - DNA, 25 bp, Homo sapien
gaggaggggtcgatgctgccacagt

SEQ ID NO: 3991049 - DNA, 25 bp, Homo sapien
cagaggaggggtcgatgctgccaca

SEQ ID NO: 3991050 - DNA, 25 bp, Homo sapien
acccagtgactttgcggggagggct

SEQ ID NO: 3991051 - DNA, 25 bp, Homo sapien
tcagcgtggctctcacatgtgtcca

SEQ ID NO: 3991052 - DNA, 25 bp, Homo sapien
gaacacactgcaggcacccgcacag

SEQ ID NO: 3991053 - DNA, 25 bp, Homo sapien
acagtccccgggaacacactgcagg

SEQ ID NO: 3991054 - DNA, 25 bp, Homo sapien
catccgttggtttctgacagtcccc

SEQ ID NO: 3991055 - DNA, 25 bp, Homo sapien
cagcactggtcacgccgccgttggg

SEQ ID NO: 3991056 - DNA, 25 bp, Homo sapien
gcagcactggtcacgccgccgttgg

SEQ ID NO: 3991057 - DNA, 25 bp, Homo sapien
tggtcacgccgccgttggggtgcta

SEQ ID NO: 3991058 - DNA, 25 bp, Homo sapien
tcacgccgccgttggggtgctagcc

SEQ ID NO: 3991059 - DNA, 25 bp, Homo sapien
ctaggttgcacatcacagcgagtgt

SEQ ID NO: 3991060 - DNA, 25 bp, Homo sapien
agcgagtgttgggtcctcccaggtc

SEQ ID NO: 3991061 - DNA, 25 bp, Homo sapien
catcacagcgagtgttgggtcctcc

SEQ ID NO: 3991062 - DNA, 25 bp, Homo sapien
ggccatctaaggacgcctgtaggaa

SEQ ID NO: 3991063 - DNA, 25 bp, Homo sapien
cagatcccagtagggcgcgagagct

SEQ ID NO: 3991064 - DNA, 25 bp, Homo sapien
caaacagatcccagtagggcgcgag

SEQ ID NO: 3991065 - DNA, 25 bp, Homo sapien
aacagatcccagtagggcgcgagag

SEQ ID NO: 3991066 - DNA, 25 bp, Homo sapien
ccagtagggcgcgagagctagccaa

SEQ ID NO: 3991067 - DNA, 25 bp, Homo sapien
aaggaccaggctgacacggagcctc

SEQ ID NO: 3991068 - DNA, 25 bp, Homo sapien
cgttcacagcttctatagctgggtt

SEQ ID NO: 3991069 - DNA, 25 bp, Homo sapien
gacacggagcctcagtgtggacaca

SEQ ID NO: 3991070 - DNA, 25 bp, Homo sapien
cacctcctctgagccgtgtataagg

SEQ ID NO: 3991071 - DNA, 25 bp, Homo sapien
tggatcccggctgcgatgtaagaaa

SEQ ID NO: 3991072 - DNA, 25 bp, Homo sapien
ctggatcccggctgcgatgtaagaa

SEQ ID NO: 3991073 - DNA, 25 bp, Homo sapien
ggatcccggctgcgatgtaagaaac

SEQ ID NO: 3991074 - DNA, 25 bp, Homo sapien
cctggatcccggctgcgatgtaaga

SEQ ID NO: 3991075 - DNA, 25 bp, Homo sapien
ctcctggtacttggagtatcctggg

SEQ ID NO: 3991076 - DNA, 25 bp, Homo sapien
gtcaggctggtgcgagctgcatcgg

SEQ ID NO: 3991077 - DNA, 25 bp, Homo sapien
ctgcccccagagcacgcagcactgt

SEQ ID NO: 3991078 - DNA, 25 bp, Homo sapien
ctgtcacgggggaggaagcaaccct

SEQ ID NO: 3991079 - DNA, 25 bp, Homo sapien
gtgcgagctgcatcggggctgcccc

SEQ ID NO: 3991080 - DNA, 25 bp, Homo sapien
aaggcatctgcgcagtgccgcgcat

SEQ ID NO: 3991081 - DNA, 25 bp, Homo sapien
tcctcggtggcatggcgtgcgtcgg

SEQ ID NO: 3991082 - DNA, 25 bp, Homo sapien
gtggcgctggcaaggagtcctcggt

SEQ ID NO: 3991083 - DNA, 25 bp, Homo sapien
cgcgcatggcgtggcgctggcaagg

SEQ ID NO: 3991084 - DNA, 25 bp, Homo sapien
tcgcacatatggaggccagcacgat

SEQ ID NO: 3991085 - DNA, 25 bp, Homo sapien
gctggcaggtgagcccttgtcctcg

SEQ ID NO: 3991086 - DNA, 25 bp, Homo sapien
gaggccagcacgattttgcacgaag

SEQ ID NO: 3991087 - DNA, 25 bp, Homo sapien
tttgcacgaaggaagccccctagtg

SEQ ID NO: 3991088 - DNA, 25 bp, Homo sapien
tagataagctgaccaaccaggcacc

SEQ ID NO: 3991089 - DNA, 25 bp, Homo sapien
agggctgcctctagataagctgacc

SEQ ID NO: 3991090 - DNA, 25 bp, Homo sapien
gcctctagataagctgaccaaccag

SEQ ID NO: 3991091 - DNA, 25 bp, Homo sapien
aagctgaccaaccaggcaccacagt

SEQ ID NO: 3991092 - DNA, 25 bp, Homo sapien
cattgaccaagtcgcagagctgagc

SEQ ID NO: 3991093 - DNA, 25 bp, Homo sapien
gtctccggggacctgttgtgatatg

SEQ ID NO: 3991094 - DNA, 25 bp, Homo sapien
tgctctagcccacagttacgatatg

SEQ ID NO: 3991095 - DNA, 25 bp, Homo sapien
gagctgagccgtgagtgctgctcta

SEQ ID NO: 3991096 - DNA, 25 bp, Homo sapien
gaccgcgccgtgatgcggcttgcag

SEQ ID NO: 3991097 - DNA, 25 bp, Homo sapien
aggatgagtggccatgtgtgtgcct

SEQ ID NO: 3991098 - DNA, 25 bp, Homo sapien
gcaggggggaccgcgccgtgatgcg

SEQ ID NO: 3991099 - DNA, 25 bp, Homo sapien
caggatgagtggccatgtgtgtgcc

SEQ ID NO: 3991100 - DNA, 25 bp, Homo sapien
tggctggactgatggagacgtcttc

SEQ ID NO: 3991101 - DNA, 25 bp, Homo sapien
gacaggagccgctcagtcttctttc

SEQ ID NO: 3991102 - DNA, 25 bp, Homo sapien
ccggaagagcgccaggttcagtgtt

SEQ ID NO: 3991103 - DNA, 25 bp, Homo sapien
gcgcagcctgttgttttccttagac

SEQ ID NO: 3991104 - DNA, 25 bp, Homo sapien
gttgctgtgacagaccacttagtgg

SEQ ID NO: 3991105 - DNA, 25 bp, Homo sapien
tcagaatgctttgggttgaccgagc

SEQ ID NO: 3991106 - DNA, 25 bp, Homo sapien
aaaactccaagcctgttaggttgtg

SEQ ID NO: 3991107 - DNA, 25 bp, Homo sapien
gcaccagcgatctgatggccgggct

SEQ ID NO: 3991108 - DNA, 25 bp, Homo sapien
tctgtagaatgacaggcagcgacca

SEQ ID NO: 3991109 - DNA, 25 bp, Homo sapien
tctggaggccatggtatactcacca

SEQ ID NO: 3991110 - DNA, 25 bp, Homo sapien
tctttcaaaaatagcggcctctcct

SEQ ID NO: 3991111 - DNA, 25 bp, Homo sapien
tcccagacttgtggaggcgcagcct

SEQ ID NO: 3991112 - DNA, 25 bp, Homo sapien
acttctcatttttctgccgagctgc

SEQ ID NO: 3991113 - DNA, 25 bp, Homo sapien
gagcttctgggacttctcatttttc

SEQ ID NO: 3991114 - DNA, 25 bp, Homo sapien
gggacttctcatttttctgccgagc

SEQ ID NO: 3991115 - DNA, 25 bp, Homo sapien
ctgagcttctgggacttctcatttt

SEQ ID NO: 3991116 - DNA, 25 bp, Homo sapien
tggcttcttccgcatcacgggcctc

SEQ ID NO: 3991117 - DNA, 25 bp, Homo sapien
atcacgggcctcagccagataccag

SEQ ID NO: 3991118 - DNA, 25 bp, Homo sapien
caggggcagattgcacacagagcat

SEQ ID NO: 3991119 - DNA, 25 bp, Homo sapien
ggggcagattgcacacagagcatgt

SEQ ID NO: 3991120 - DNA, 25 bp, Homo sapien
tggcagaattgtcgttaaagcaggg

SEQ ID NO: 3991121 - DNA, 25 bp, Homo sapien
gtcagatgcgccgtggccttgccct

SEQ ID NO: 3991122 - DNA, 25 bp, Homo sapien
ggctgctgggagtgactccgcggct

SEQ ID NO: 3991123 - DNA, 25 bp, Homo sapien
gactccgcggctgaggtttggattc

SEQ ID NO: 3991124 - DNA, 25 bp, Homo sapien
cacaaccggcgctgttgagcgcagg

SEQ ID NO: 3991125 - DNA, 25 bp, Homo sapien
tcagggaacctgtgggtcccagcac

SEQ ID NO: 3991126 - DNA, 25 bp, Homo sapien
tgtgggtcccagcacaaccggcgct

SEQ ID NO: 3991127 - DNA, 25 bp, Homo sapien
cagagcaatcccacgggaatggcgg

SEQ ID NO: 3991128 - DNA, 25 bp, Homo sapien
gatttggggacatgcttctggttga

SEQ ID NO: 3991129 - DNA, 25 bp, Homo sapien
tgatttggggacatgcttctggttg

SEQ ID NO: 3991130 - DNA, 25 bp, Homo sapien
cttttcccgcatgctgtcctgctgt

SEQ ID NO: 3991131 - DNA, 25 bp, Homo sapien
tttcccgcatgctgtcctgctgtgg

SEQ ID NO: 3991132 - DNA, 25 bp, Homo sapien
tacagggagactgcagacgctttct

SEQ ID NO: 3991133 - DNA, 25 bp, Homo sapien
agggctacagggagactgcagacgc

SEQ ID NO: 3991134 - DNA, 25 bp, Homo sapien
taggccacaacagggtgtcctttcc

SEQ ID NO: 3991135 - DNA, 25 bp, Homo sapien
ctcatggccctggtctgtagaatgg

SEQ ID NO: 3991136 - DNA, 25 bp, Homo sapien
ctctttaggccacaacagggtgtcc

SEQ ID NO: 3991137 - DNA, 25 bp, Homo sapien
gggctgccatgtgggcatctgccat

SEQ ID NO: 3991138 - DNA, 25 bp, Homo sapien
gcccggtcatcaagatctcctacag

SEQ ID NO: 3991139 - DNA, 25 bp, Homo sapien
aagttgaaactgacacggcctgtgc

SEQ ID NO: 3991140 - DNA, 25 bp, Homo sapien
ctgaacgggtacctgcgggacagct

SEQ ID NO: 3991141 - DNA, 25 bp, Homo sapien
ggacagcgagcacgagcccgtgtac

SEQ ID NO: 3991142 - DNA, 25 bp, Homo sapien
gaggccaggcacaaacctggctgct

SEQ ID NO: 3991143 - DNA, 25 bp, Homo sapien
gcatctgccttgctctcctgaggcc

SEQ ID NO: 3991144 - DNA, 25 bp, Homo sapien
aggaaccaggcccttttctgatcag

SEQ ID NO: 3991145 - DNA, 25 bp, Homo sapien
gcaggtgccttgttggcgagtgggt

SEQ ID NO: 3991146 - DNA, 25 bp, Homo sapien
gctccacagactggctgcttgaggc

SEQ ID NO: 3991147 - DNA, 25 bp, Homo sapien
tccacagactggctgcttgaggcag

SEQ ID NO: 3991148 - DNA, 25 bp, Homo sapien
gcggggagctccacagactggctgc

SEQ ID NO: 3991149 - DNA, 25 bp, Homo sapien
ccaggacaatgcttggcggggagct

SEQ ID NO: 3991150 - DNA, 25 bp, Homo sapien
agcatgggccgcttccgaccttcag

SEQ ID NO: 3991151 - DNA, 25 bp, Homo sapien
aaaggtccgctgtgcacaggccatg

SEQ ID NO: 3991152 - DNA, 25 bp, Homo sapien
cagaaaggtccgctgtgcacaggcc

SEQ ID NO: 3991153 - DNA, 25 bp, Homo sapien
gccgcttccgaccttcagcttcata

SEQ ID NO: 3991154 - DNA, 25 bp, Homo sapien
gggcagccggtccttgccgcttcct

SEQ ID NO: 3991155 - DNA, 25 bp, Homo sapien
ccgggcagccggtccttgccgcttc

SEQ ID NO: 3991156 - DNA, 25 bp, Homo sapien
gcagccggtccttgccgcttcctcc

SEQ ID NO: 3991157 - DNA, 25 bp, Homo sapien
agccggtccttgccgcttcctccca

SEQ ID NO: 3991158 - DNA, 25 bp, Homo sapien
tggaggcagctgtctcgcagactca

SEQ ID NO: 3991159 - DNA, 25 bp, Homo sapien
tgcagatgctgctacgagtgaccag

SEQ ID NO: 3991160 - DNA, 25 bp, Homo sapien
cgggcttcaacagtacaaggaaaag

SEQ ID NO: 3991161 - DNA, 25 bp, Homo sapien
tcagaaaaacccaattgcacgtgtg

SEQ ID NO: 3991162 - DNA, 25 bp, Homo sapien
catcgctgccctcagcaaggatcgt

SEQ ID NO: 3991163 - DNA, 25 bp, Homo sapien
ggttttgctagaacattctgtgctc

SEQ ID NO: 3991164 - DNA, 25 bp, Homo sapien
ttctgtgctctaaaggcatcgctgc

SEQ ID NO: 3991165 - DNA, 25 bp, Homo sapien
cattcagaaccaagggagatctcag

SEQ ID NO: 3991166 - DNA, 25 bp, Homo sapien
ggagcggaacacctgagggaggagc

SEQ ID NO: 3991167 - DNA, 25 bp, Homo sapien
gagcggaacacctgagggaggagca

SEQ ID NO: 3991168 - DNA, 25 bp, Homo sapien
gtagacgcaggggttgtcgtggcct

SEQ ID NO: 3991169 - DNA, 25 bp, Homo sapien
ctggggtagacgcaggggttgtcgt

SEQ ID NO: 3991170 - DNA, 25 bp, Homo sapien
cgcaggggttgtcgtggcctggcgt

SEQ ID NO: 3991171 - DNA, 25 bp, Homo sapien
ctggcatgggcgctggggtagacgc

SEQ ID NO: 3991172 - DNA, 25 bp, Homo sapien
ccccaggtctgaggtgccaacggct

SEQ ID NO: 3991173 - DNA, 25 bp, Homo sapien
gccccaggtctgaggtgccaacggc

SEQ ID NO: 3991174 - DNA, 25 bp, Homo sapien
tctgcagtcctaggcaagtggaggt

SEQ ID NO: 3991175 - DNA, 25 bp, Homo sapien
gccaggttgtgctctgcagtcctag

SEQ ID NO: 3991176 - DNA, 25 bp, Homo sapien
tgtgcgtcatcttcaggagggtgcc

SEQ ID NO: 3991177 - DNA, 25 bp, Homo sapien
aggtggtcccgctgccagcttcagc

SEQ ID NO: 3991178 - DNA, 25 bp, Homo sapien
cgaggagatcagcaagggcttgagg

SEQ ID NO: 3991179 - DNA, 25 bp, Homo sapien
aggagatcagcaagggcttgaggcc

SEQ ID NO: 3991180 - DNA, 25 bp, Homo sapien
ggagatcagcaagggcttgaggccc

SEQ ID NO: 3991181 - DNA, 25 bp, Homo sapien
gcgaggagatcagcaagggcttgag

SEQ ID NO: 3991182 - DNA, 25 bp, Homo sapien
tgcatcggcactggtgccagtccag

SEQ ID NO: 3991183 - DNA, 25 bp, Homo sapien
gcttctcatacgagcatgaatccta

SEQ ID NO: 3991184 - DNA, 25 bp, Homo sapien
ctgagcatcacctcccgtcacatca

SEQ ID NO: 3991185 - DNA, 25 bp, Homo sapien
acagtgcccttatgcccgtcatttg

SEQ ID NO: 3991186 - DNA, 25 bp, Homo sapien
ggggcagcccttttaggcagcagat

SEQ ID NO: 3991187 - DNA, 25 bp, Homo sapien
cacaggtctgggcaccgccagcaga

SEQ ID NO: 3991188 - DNA, 25 bp, Homo sapien
ctggatgccctagccccaagggcag

SEQ ID NO: 3991189 - DNA, 25 bp, Homo sapien
gtgttcaccctgtaacggcccaggc

SEQ ID NO: 3991190 - DNA, 25 bp, Homo sapien
ggtggctgacctgcaagaccgtagc

SEQ ID NO: 3991191 - DNA, 25 bp, Homo sapien
aaacatgagccgcagcaggagtgtc

SEQ ID NO: 3991192 - DNA, 25 bp, Homo sapien
cctggtcacatgcatgggcccttga

SEQ ID NO: 3991193 - DNA, 25 bp, Homo sapien
tacttttgtgtcagctcgaccaggc

SEQ ID NO: 3991194 - DNA, 25 bp, Homo sapien
gcatccagagattacaaggctccta

SEQ ID NO: 3991195 - DNA, 25 bp, Homo sapien
ttggcatccagagattacaaggctc

SEQ ID NO: 3991196 - DNA, 25 bp, Homo sapien
tggcatccagagattacaaggctcc

SEQ ID NO: 3991197 - DNA, 25 bp, Homo sapien
gtttggcatccagagattacaaggc

SEQ ID NO: 3991198 - DNA, 25 bp, Homo sapien
acagctgccttaggaaaacccgcca

SEQ ID NO: 3991199 - DNA, 25 bp, Homo sapien
cagctgcccaacgacgggagaaagg

SEQ ID NO: 3991200 - DNA, 25 bp, Homo sapien
ggaagtcccagcgaatccagctgcc

SEQ ID NO: 3991201 - DNA, 25 bp, Homo sapien
gaaaggttgtttccaggcatcctgg

SEQ ID NO: 3991202 - DNA, 25 bp, Homo sapien
ggacatttggcgggacactcatctc

SEQ ID NO: 3991203 - DNA, 25 bp, Homo sapien
acatttggcgggacactcatctctg

SEQ ID NO: 3991204 - DNA, 25 bp, Homo sapien
gcggacatttggcgggacactcatc

SEQ ID NO: 3991205 - DNA, 25 bp, Homo sapien
ctgcggacatttggcgggacactca

SEQ ID NO: 3991206 - DNA, 25 bp, Homo sapien
gcctgccacaacctcggggatggta

SEQ ID NO: 3991207 - DNA, 25 bp, Homo sapien
ccaggtgggcctgtgcatagggaca

SEQ ID NO: 3991208 - DNA, 25 bp, Homo sapien
tgcatagggacagactggtgacacc

SEQ ID NO: 3991209 - DNA, 25 bp, Homo sapien
acagcctgccacaacctcggggatg

SEQ ID NO: 3991210 - DNA, 25 bp, Homo sapien
agatgcactcccgagggcagcgatg

SEQ ID NO: 3991211 - DNA, 25 bp, Homo sapien
ctgccaggtgcacccatgagatgca

SEQ ID NO: 3991212 - DNA, 25 bp, Homo sapien
agaagggacttcttccagcgcagcc

SEQ ID NO: 3991213 - DNA, 25 bp, Homo sapien
caagttcatgcctgcaacagacttc

SEQ ID NO: 3991214 - DNA, 25 bp, Homo sapien
actccaagagtgtcacgaccctctt

SEQ ID NO: 3991215 - DNA, 25 bp, Homo sapien
tgctattgctgagcagttgactctg

SEQ ID NO: 3991216 - DNA, 25 bp, Homo sapien
agtgcccagtgcaggcctctcggca

SEQ ID NO: 3991217 - DNA, 25 bp, Homo sapien
gcacccagccgtacaatacagatct

SEQ ID NO: 3991218 - DNA, 25 bp, Homo sapien
tgaacgtgaacgtggtgggctcctg

SEQ ID NO: 3991219 - DNA, 25 bp, Homo sapien
atccccgggatggctttggtgaacg

SEQ ID NO: 3991220 - DNA, 25 bp, Homo sapien
ggatggctttggtgaacgtgaacgt

SEQ ID NO: 3991221 - DNA, 25 bp, Homo sapien
gaacgtgaacgtggtgggctcctgc

SEQ ID NO: 3991222 - DNA, 25 bp, Homo sapien
ttggccaatctgagctccaaggcat

SEQ ID NO: 3991223 - DNA, 25 bp, Homo sapien
ttcagtcctgccgtcctggtggggt

SEQ ID NO: 3991224 - DNA, 25 bp, Homo sapien
cttttcagtcctgccgtcctggtgg

SEQ ID NO: 3991225 - DNA, 25 bp, Homo sapien
ggccttttcagtcctgccgtcctgg

SEQ ID NO: 3991226 - DNA, 25 bp, Homo sapien
gccttttcagtcctgccgtcctggt

SEQ ID NO: 3991227 - DNA, 25 bp, Homo sapien
ctacagcgtgtccatgggcccagtg

SEQ ID NO: 3991228 - DNA, 25 bp, Homo sapien
gcttgctggacgcatgaccaggatt

SEQ ID NO: 3991229 - DNA, 25 bp, Homo sapien
ccctgggagcttgctggacgcatga

SEQ ID NO: 3991230 - DNA, 25 bp, Homo sapien
cctggcgtgtcctccctgggagctt

SEQ ID NO: 3991231 - DNA, 25 bp, Homo sapien
cccttcttttctgcaagtacctggg

SEQ ID NO: 3991232 - DNA, 25 bp, Homo sapien
ttcttttctgcaagtacctggggac

SEQ ID NO: 3991233 - DNA, 25 bp, Homo sapien
cttcttttctgcaagtacctgggga

SEQ ID NO: 3991234 - DNA, 25 bp, Homo sapien
ccttcttttctgcaagtacctgggg

SEQ ID NO: 3991235 - DNA, 25 bp, Homo sapien
agaggcccggggtagaagcactagc

SEQ ID NO: 3991236 - DNA, 25 bp, Homo sapien
tgtgggcagtggagtaccgaaggga

SEQ ID NO: 3991237 - DNA, 25 bp, Homo sapien
agccttgagccggatggcccgtgcc

SEQ ID NO: 3991238 - DNA, 25 bp, Homo sapien
gcaggtgagctattgtgggccttgg

SEQ ID NO: 3991239 - DNA, 25 bp, Homo sapien
tcaagcctcacaggcggctggaaga

SEQ ID NO: 3991240 - DNA, 25 bp, Homo sapien
gatcaagcctcacaggcggctggaa

SEQ ID NO: 3991241 - DNA, 25 bp, Homo sapien
ctcccgtggtagatcaagcctcaca

SEQ ID NO: 3991242 - DNA, 25 bp, Homo sapien
ggcagctcccgtggtagatcaagcc

SEQ ID NO: 3991243 - DNA, 25 bp, Homo sapien
gagtctgagcgtcttagaattcctg

SEQ ID NO: 3991244 - DNA, 25 bp, Homo sapien
gggatgtccgctttggttctacagt

SEQ ID NO: 3991245 - DNA, 25 bp, Homo sapien
ttggttctacagttcgcagataggg

SEQ ID NO: 3991246 - DNA, 25 bp, Homo sapien
aggcctggcccgaggaaatgaaggg

SEQ ID NO: 3991247 - DNA, 25 bp, Homo sapien
tgagttagtgggtgaggacctgcag

SEQ ID NO: 3991248 - DNA, 25 bp, Homo sapien
gctgaatgagtgagttagtgggtga

SEQ ID NO: 3991249 - DNA, 25 bp, Homo sapien
ctgcggttgctgaatgagtgagtta

SEQ ID NO: 3991250 - DNA, 25 bp, Homo sapien
aggcagcccctggctgacactttgg

SEQ ID NO: 3991251 - DNA, 25 bp, Homo sapien
tcaggatgttcagggccagagggga

SEQ ID NO: 3991252 - DNA, 25 bp, Homo sapien
gtggaggaagaaatcaggatgttca

SEQ ID NO: 3991253 - DNA, 25 bp, Homo sapien
tggaggaagaaatcaggatgttcag

SEQ ID NO: 3991254 - DNA, 25 bp, Homo sapien
aaggtggcacggaaggcaagagggg

SEQ ID NO: 3991255 - DNA, 25 bp, Homo sapien
tggggcgtggcccttgagtggccac

SEQ ID NO: 3991256 - DNA, 25 bp, Homo sapien
ttacactgtgccttgtcacccacgc

SEQ ID NO: 3991257 - DNA, 25 bp, Homo sapien
gcagcttacactgtgccttgtcacc

SEQ ID NO: 3991258 - DNA, 25 bp, Homo sapien
ccggcagcttacactgtgccttgtc

SEQ ID NO: 3991259 - DNA, 25 bp, Homo sapien
tacactgtgccttgtcacccacgct

SEQ ID NO: 3991260 - DNA, 25 bp, Homo sapien
ggagcccgcactgtgcctagacgcc

SEQ ID NO: 3991261 - DNA, 25 bp, Homo sapien
gcgccactcaggcagaccaccctct

SEQ ID NO: 3991262 - DNA, 25 bp, Homo sapien
cccacgctgcgcctgggacctcaca

SEQ ID NO: 3991263 - DNA, 25 bp, Homo sapien
gacctcacactgcacgaggtgccgg

SEQ ID NO: 3991264 - DNA, 25 bp, Homo sapien
agggcgggacggcccgtggcaggtg

SEQ ID NO: 3991265 - DNA, 25 bp, Homo sapien
agaagacacagcgaagaccagggcg

SEQ ID NO: 3991266 - DNA, 25 bp, Homo sapien
tggagaagacacagcgaagaccagg

SEQ ID NO: 3991267 - DNA, 25 bp, Homo sapien
tggcaggtgccgcacaccgcgccgt

SEQ ID NO: 3991268 - DNA, 25 bp, Homo sapien
tgatgtgtgagcgaccgtgacagca

SEQ ID NO: 3991269 - DNA, 25 bp, Homo sapien
ggactggacgactcagaagttccgg

SEQ ID NO: 3991270 - DNA, 25 bp, Homo sapien
gcatttttgtccgttttggtggcag

SEQ ID NO: 3991271 - DNA, 25 bp, Homo sapien
acgggtcggcatctcctggcatttt

SEQ ID NO: 3991272 - DNA, 25 bp, Homo sapien
caccctgcactgaagctgattgctc

SEQ ID NO: 3991273 - DNA, 25 bp, Homo sapien
cagtcctgggtgtgcattctggtgc

SEQ ID NO: 3991274 - DNA, 25 bp, Homo sapien
gccacagtctgaggggtatagtcca

SEQ ID NO: 3991275 - DNA, 25 bp, Homo sapien
gattgctcccgctgagaccccatgt

SEQ ID NO: 3991276 - DNA, 25 bp, Homo sapien
gcctggatggagcaaggaccatgct

SEQ ID NO: 3991277 - DNA, 25 bp, Homo sapien
ggaccatgctctgtcctccgtgcag

SEQ ID NO: 3991278 - DNA, 25 bp, Homo sapien
accctgcctgggctgcgaggatgca

SEQ ID NO: 3991279 - DNA, 25 bp, Homo sapien
cccagggacaggagcgtgtgccctc

SEQ ID NO: 3991280 - DNA, 25 bp, Homo sapien
cgcggtaagcaggtgggtagcaggt

SEQ ID NO: 3991281 - DNA, 25 bp, Homo sapien
cccgcggtaagcaggtgggtagcag

SEQ ID NO: 3991282 - DNA, 25 bp, Homo sapien
gcggtaagcaggtgggtagcaggtg

SEQ ID NO: 3991283 - DNA, 25 bp, Homo sapien
ccccgcggtaagcaggtgggtagca

SEQ ID NO: 3991284 - DNA, 25 bp, Homo sapien
ccgtgctcgtggcaggagcatagaa

SEQ ID NO: 3991285 - DNA, 25 bp, Homo sapien
tccctgctggcgtggagcctatgag

SEQ ID NO: 3991286 - DNA, 25 bp, Homo sapien
ctggctggcatggaggaacgcaccc

SEQ ID NO: 3991287 - DNA, 25 bp, Homo sapien
aaatgtggaccctgatggaggcggt

SEQ ID NO: 3991288 - DNA, 25 bp, Homo sapien
gtgtggatgacaggcacccgctgag

SEQ ID NO: 3991289 - DNA, 25 bp, Homo sapien
gatgacaggcacccgctgagggggt

SEQ ID NO: 3991290 - DNA, 25 bp, Homo sapien
cttgtgtggatgacaggcacccgct

SEQ ID NO: 3991291 - DNA, 25 bp, Homo sapien
gtggatgacaggcacccgctgaggg

SEQ ID NO: 3991292 - DNA, 25 bp, Homo sapien
agccgctttgcacacagtctgggag

SEQ ID NO: 3991293 - DNA, 25 bp, Homo sapien
tgtcatcgtcatccctccaggagtc

SEQ ID NO: 3991294 - DNA, 25 bp, Homo sapien
tttaaactgggcaaggtgtgactgg

SEQ ID NO: 3991295 - DNA, 25 bp, Homo sapien
ccactagcacagttacagaggacat

SEQ ID NO: 3991296 - DNA, 25 bp, Homo sapien
tggcctccggcccatgctccatgca

SEQ ID NO: 3991297 - DNA, 25 bp, Homo sapien
tccatggcggccgatggcctccggc

SEQ ID NO: 3991298 - DNA, 25 bp, Homo sapien
ctgggattaaaccagctggccaggt

SEQ ID NO: 3991299 - DNA, 25 bp, Homo sapien
ggattaaaccagctggccaggtgag

SEQ ID NO: 3991300 - DNA, 25 bp, Homo sapien
tgggtgctccgtagccctggcccag

SEQ ID NO: 3991301 - DNA, 25 bp, Homo sapien
cctctgcagctcaagaagcatgtcc

SEQ ID NO: 3991302 - DNA, 25 bp, Homo sapien
gtcggcaggagcacaagagctttcc

SEQ ID NO: 3991303 - DNA, 25 bp, Homo sapien
gcccagcacagtgcgtgtgccatca

SEQ ID NO: 3991304 - DNA, 25 bp, Homo sapien
aaacacttttaagccatcaaatctt

SEQ ID NO: 3991305 - DNA, 25 bp, Homo sapien
atgatccagtcaccttctaccaggt

SEQ ID NO: 3991306 - DNA, 25 bp, Homo sapien
agcgcccagcctgccaaacactttt

SEQ ID NO: 3991307 - DNA, 25 bp, Homo sapien
tcaaatcttgtgagaacttactgtc

SEQ ID NO: 3991308 - DNA, 25 bp, Homo sapien
caaggagggatcgaataagttaaat

SEQ ID NO: 3991309 - DNA, 25 bp, Homo sapien
aattcaaggagggatcgaataagtt

SEQ ID NO: 3991310 - DNA, 25 bp, Homo sapien
cagaattcaaggagggatcgaataa

SEQ ID NO: 3991311 - DNA, 25 bp, Homo sapien
ttcaaggagggatcgaataagttaa

SEQ ID NO: 3991312 - DNA, 25 bp, Homo sapien
tgatagaggccatgtaagagaactt

SEQ ID NO: 3991313 - DNA, 25 bp, Homo sapien
gaaaagaagttcatgggtctgtgtg

SEQ ID NO: 3991314 - DNA, 25 bp, Homo sapien
tcatcttcccatctacggtcaacag

SEQ ID NO: 3991315 - DNA, 25 bp, Homo sapien
tacctaacacaaacactaactttga

SEQ ID NO: 3991316 - DNA, 25 bp, Homo sapien
taattctttgctactatgtaatttt

SEQ ID NO: 3991317 - DNA, 25 bp, Homo sapien
atacaattatttcaaccactgacct

SEQ ID NO: 3991318 - DNA, 25 bp, Homo sapien
taactctgttaggtaaccaaataca

SEQ ID NO: 3991319 - DNA, 25 bp, Homo sapien
tgtttttgatagttaactctgttag

SEQ ID NO: 3991320 - DNA, 25 bp, Homo sapien
caagacgcccgtcacggtgtctctg

SEQ ID NO: 3991321 - DNA, 25 bp, Homo sapien
ctctcagacccacggcgaatgcaga

SEQ ID NO: 3991322 - DNA, 25 bp, Homo sapien
gacccacggcgaatgcagattctca

SEQ ID NO: 3991323 - DNA, 25 bp, Homo sapien
aacttccaagacgcccgtcacggtg

SEQ ID NO: 3991324 - DNA, 25 bp, Homo sapien
tccttcagttgctgtcagttttggg

SEQ ID NO: 3991325 - DNA, 25 bp, Homo sapien
aggaggacattagtgtagaaacgca

SEQ ID NO: 3991326 - DNA, 25 bp, Homo sapien
agtgtagaaacgcacagccttggac

SEQ ID NO: 3991327 - DNA, 25 bp, Homo sapien
cgagagacaggctcgcctgtgaagc

SEQ ID NO: 3991328 - DNA, 25 bp, Homo sapien
tcactgccgagagacaggctcgcct

SEQ ID NO: 3991329 - DNA, 25 bp, Homo sapien
gctgaatttgctcaaacggcaaaca

SEQ ID NO: 3991330 - DNA, 25 bp, Homo sapien
acggcaaacacacgatgagagcctg

SEQ ID NO: 3991331 - DNA, 25 bp, Homo sapien
gaatcagatcaacaagcccgttcag

SEQ ID NO: 3991332 - DNA, 25 bp, Homo sapien
cacaggcagacatcgccttgggagg

SEQ ID NO: 3991333 - DNA, 25 bp, Homo sapien
ggggggcggtttctgtccatcatcc

SEQ ID NO: 3991334 - DNA, 25 bp, Homo sapien
gggggcggtttctgtccatcatcct

SEQ ID NO: 3991335 - DNA, 25 bp, Homo sapien
tgttcccaagtgaaggtggtggtca

SEQ ID NO: 3991336 - DNA, 25 bp, Homo sapien
tcccaagtgaaggtggtggtcagtc

SEQ ID NO: 3991337 - DNA, 25 bp, Homo sapien
ttcccaagtgaaggtggtggtcagt

SEQ ID NO: 3991338 - DNA, 25 bp, Homo sapien
ctgttcccaagtgaaggtggtggtc

SEQ ID NO: 3991339 - DNA, 25 bp, Homo sapien
agacagggccccgagaagctcgccc

SEQ ID NO: 3991340 - DNA, 25 bp, Homo sapien
aggtgcatccttaaacagggacttc

SEQ ID NO: 3991341 - DNA, 25 bp, Homo sapien
cagacgccacgaggtgcatccttaa

SEQ ID NO: 3991342 - DNA, 25 bp, Homo sapien
aagctcgccccagacgccacgaggt

SEQ ID NO: 3991343 - DNA, 25 bp, Homo sapien
ctgcgtggacatagaacctgcgtgg

SEQ ID NO: 3991344 - DNA, 25 bp, Homo sapien
gacatagaacctgcgtggacacata

SEQ ID NO: 3991345 - DNA, 25 bp, Homo sapien
catagaacctgcgtggacacataac

SEQ ID NO: 3991346 - DNA, 25 bp, Homo sapien
cgtggacatagaacctgcgtggaca

SEQ ID NO: 3991347 - DNA, 25 bp, Homo sapien
tagcctgcgtggacacatagcctgt

SEQ ID NO: 3991348 - DNA, 25 bp, Homo sapien
tgcatggacacggaacttgtgtgga

SEQ ID NO: 3991349 - DNA, 25 bp, Homo sapien
ttgtgtggacacaaaaccgcccaaa

SEQ ID NO: 3991350 - DNA, 25 bp, Homo sapien
gtgtggacacaaaaccgcccaaagc

SEQ ID NO: 3991351 - DNA, 25 bp, Homo sapien
catggacacggaacttgtgtggaca

SEQ ID NO: 3991352 - DNA, 25 bp, Homo sapien
gatgatctgaattgttacatcttca

SEQ ID NO: 3991353 - DNA, 25 bp, Homo sapien
gatctgaattgttacatcttcatgt

SEQ ID NO: 3991354 - DNA, 25 bp, Homo sapien
ctggatgatctgaattgttacatct

SEQ ID NO: 3991355 - DNA, 25 bp, Homo sapien
ggatgatctgaattgttacatcttc

SEQ ID NO: 3991356 - DNA, 25 bp, Homo sapien
aattatcttcgaaaattcttctacg

SEQ ID NO: 3991357 - DNA, 25 bp, Homo sapien
tcttccgtgtttcatgctctttccc

SEQ ID NO: 3991358 - DNA, 25 bp, Homo sapien
tttccccataatcctgcgagtcttc

SEQ ID NO: 3991359 - DNA, 25 bp, Homo sapien
ttctacgtcttcagaataagcctcc

SEQ ID NO: 3991360 - DNA, 25 bp, Homo sapien
gctggtttcgggaaggctgggtgct

SEQ ID NO: 3991361 - DNA, 25 bp, Homo sapien
acagtgattgatccctgcaagggcc

SEQ ID NO: 3991362 - DNA, 25 bp, Homo sapien
gggcctccgcaagagctgtcaggca

SEQ ID NO: 3991363 - DNA, 25 bp, Homo sapien
tcctgacagtgattgatccctgcaa

SEQ ID NO: 3991364 - DNA, 25 bp, Homo sapien
acagactcctcgacattgcgacggg

SEQ ID NO: 3991365 - DNA, 25 bp, Homo sapien
cgattggggaagtcagaagcacgtt

SEQ ID NO: 3991366 - DNA, 25 bp, Homo sapien
ctcttgtgaccaacaattgggtcat

SEQ ID NO: 3991367 - DNA, 25 bp, Homo sapien
ggagaagctccctgaacgaggtgca

SEQ ID NO: 3991368 - DNA, 25 bp, Homo sapien
tgccagctgtgatgtacagcattct

SEQ ID NO: 3991369 - DNA, 25 bp, Homo sapien
gtcgggctgagcgtcttctcctgtg

SEQ ID NO: 3991370 - DNA, 25 bp, Homo sapien
gctgcgtcgggctgagcgtcttctc

SEQ ID NO: 3991371 - DNA, 25 bp, Homo sapien
ctgccacacggacggctgcgtcggg

SEQ ID NO: 3991372 - DNA, 25 bp, Homo sapien
ctgagcgtgtccgtgaatgcaccga

SEQ ID NO: 3991373 - DNA, 25 bp, Homo sapien
gattccgtgaatgcaccaatgaccg

SEQ ID NO: 3991374 - DNA, 25 bp, Homo sapien
caaacgaccgctgaactgagcgtgt

SEQ ID NO: 3991375 - DNA, 25 bp, Homo sapien
caatgaccgctgaattgagcatgtc

SEQ ID NO: 3991376 - DNA, 25 bp, Homo sapien
caatgtcccaagaagggcggaaggc

SEQ ID NO: 3991377 - DNA, 25 bp, Homo sapien
tcaccccaatgtcccaagaagggcg

SEQ ID NO: 3991378 - DNA, 25 bp, Homo sapien
tgtcccaagaagggcggaaggccca

SEQ ID NO: 3991379 - DNA, 25 bp, Homo sapien
cccaatgtcccaagaagggcggaag

SEQ ID NO: 3991380 - DNA, 25 bp, Homo sapien
tggaaaacagcaagtcctgaagaag

SEQ ID NO: 3991381 - DNA, 25 bp, Homo sapien
ctgtacagagctcagctccagtgat

SEQ ID NO: 3991382 - DNA, 25 bp, Homo sapien
tgataggagtggtcactctgggacc

SEQ ID NO: 3991383 - DNA, 25 bp, Homo sapien
ggcagcgggcgcctttgtttcctcc

SEQ ID NO: 3991384 - DNA, 25 bp, Homo sapien
tttcaatttggcagggatattaaaa

SEQ ID NO: 3991385 - DNA, 25 bp, Homo sapien
ttcaatttggcagggatattaaaag

SEQ ID NO: 3991386 - DNA, 25 bp, Homo sapien
caatttggcagggatattaaaaggc

SEQ ID NO: 3991387 - DNA, 25 bp, Homo sapien
atttcaatttggcagggatattaaa

SEQ ID NO: 3991388 - DNA, 25 bp, Homo sapien
tgagaggcgcagaggtccttctctg

SEQ ID NO: 3991389 - DNA, 25 bp, Homo sapien
gtacccttcaggctcggaactcttc

SEQ ID NO: 3991390 - DNA, 25 bp, Homo sapien
ggaggaagccttctagtcacaccac

SEQ ID NO: 3991391 - DNA, 25 bp, Homo sapien
cttggctaacacaggcccagaaatg

SEQ ID NO: 3991392 - DNA, 25 bp, Homo sapien
tcagatgtggtggtcaccgtatcac

SEQ ID NO: 3991393 - DNA, 25 bp, Homo sapien
ggtgccgtgcacttttccatccagg

SEQ ID NO: 3991394 - DNA, 25 bp, Homo sapien
agtctgggccggcaagtgggccggg

SEQ ID NO: 3991395 - DNA, 25 bp, Homo sapien
ttccatccaggaatgaagccctgtc

SEQ ID NO: 3991396 - DNA, 25 bp, Homo sapien
cccaaaccctcgagccaggccaggg

SEQ ID NO: 3991397 - DNA, 25 bp, Homo sapien
tgcacggagcctgtgcctagctccg

SEQ ID NO: 3991398 - DNA, 25 bp, Homo sapien
tccgcagctaccaggatcctcctgc

SEQ ID NO: 3991399 - DNA, 25 bp, Homo sapien
ggccgtcatccaaacccttctgagt

SEQ ID NO: 3991400 - DNA, 25 bp, Homo sapien
tgcacagacccggtcgcagagcaga

SEQ ID NO: 3991401 - DNA, 25 bp, Homo sapien
ggtgcacagacccggtcgcagagca

SEQ ID NO: 3991402 - DNA, 25 bp, Homo sapien
gcacagacccggtcgcagagcagac

SEQ ID NO: 3991403 - DNA, 25 bp, Homo sapien
gcaggtgcacagacccggtcgcaga

SEQ ID NO: 3991404 - DNA, 25 bp, Homo sapien
tcaagaacattacacggagcgagga

SEQ ID NO: 3991405 - DNA, 25 bp, Homo sapien
gagggctacgtactgcaggattcca

SEQ ID NO: 3991406 - DNA, 25 bp, Homo sapien
gcagatcggcggttgcctaactcca

SEQ ID NO: 3991407 - DNA, 25 bp, Homo sapien
tggaaaaggcatacgatggaaccct

SEQ ID NO: 3991408 - DNA, 25 bp, Homo sapien
agcaggactccatgggggaagctca

SEQ ID NO: 3991409 - DNA, 25 bp, Homo sapien
caacagcaggactccatgggggaag

SEQ ID NO: 3991410 - DNA, 25 bp, Homo sapien
gcaggactccatgggggaagctcat

SEQ ID NO: 3991411 - DNA, 25 bp, Homo sapien
acagcaggactccatgggggaagct

SEQ ID NO: 3991412 - DNA, 25 bp, Homo sapien
gaagccctggctggatggagcccct

SEQ ID NO: 3991413 - DNA, 25 bp, Homo sapien
accctccggaagccctggctggatg

SEQ ID NO: 3991414 - DNA, 25 bp, Homo sapien
ctggggctggtgcaccctccggaag

SEQ ID NO: 3991415 - DNA, 25 bp, Homo sapien
cagttcccagggactccccatccat

SEQ ID NO: 3991416 - DNA, 25 bp, Homo sapien
aggcctcaacaaggcggctcctccg

SEQ ID NO: 3991417 - DNA, 25 bp, Homo sapien
tcgggccacattcctgcggaagctg

SEQ ID NO: 3991418 - DNA, 25 bp, Homo sapien
cgggaggtgaaggtcgggccacatt

SEQ ID NO: 3991419 - DNA, 25 bp, Homo sapien
ctggaattctgacatcagattttcc

SEQ ID NO: 3991420 - DNA, 25 bp, Homo sapien
gggtgtgagatacatcagggtgcag

SEQ ID NO: 3991421 - DNA, 25 bp, Homo sapien
tgtgagatacatcagggtgcagccg

SEQ ID NO: 3991422 - DNA, 25 bp, Homo sapien
aggacacctgagccgagaccctgtc

SEQ ID NO: 3991423 - DNA, 25 bp, Homo sapien
gcctgcaggggtgtgagatacatca

SEQ ID NO: 3991424 - DNA, 25 bp, Homo sapien
caggccgtggtccttggagtggtca

SEQ ID NO: 3991425 - DNA, 25 bp, Homo sapien
gccgtggtccttggagtggtcactg

SEQ ID NO: 3991426 - DNA, 25 bp, Homo sapien
aggccgtggtccttggagtggtcac

SEQ ID NO: 3991427 - DNA, 25 bp, Homo sapien
gtccaggccgtggtccttggagtgg

SEQ ID NO: 3991428 - DNA, 25 bp, Homo sapien
ccaacagctcccgtgaacctgaccc

SEQ ID NO: 3991429 - DNA, 25 bp, Homo sapien
aacagctcccgtgaacctgaccctg

SEQ ID NO: 3991430 - DNA, 25 bp, Homo sapien
gctcccgtgaacctgaccctggaga

SEQ ID NO: 3991431 - DNA, 25 bp, Homo sapien
cccccaacagctcccgtgaacctga

SEQ ID NO: 3991432 - DNA, 25 bp, Homo sapien
aaaaagacacatgaagcccctggga

SEQ ID NO: 3991433 - DNA, 25 bp, Homo sapien
gatttgaccaaccatgtggccaagg

SEQ ID NO: 3991434 - DNA, 25 bp, Homo sapien
gacccagtttagagcaggacagacc

SEQ ID NO: 3991435 - DNA, 25 bp, Homo sapien
caacatgcgtggtttggtgaaggcc

SEQ ID NO: 3991436 - DNA, 25 bp, Homo sapien
ttcattgctgggagctcgtgacccc

SEQ ID NO: 3991437 - DNA, 25 bp, Homo sapien
ccccagtgagtctgttgagggtgca

SEQ ID NO: 3991438 - DNA, 25 bp, Homo sapien
tgcattgctgggagctcgtgagccc

SEQ ID NO: 3991439 - DNA, 25 bp, Homo sapien
gggttcattgctgggagctcgtgac

SEQ ID NO: 3991440 - DNA, 25 bp, Homo sapien
cccagtgagtctgttgagggtgcat

SEQ ID NO: 3991441 - DNA, 25 bp, Homo sapien
tgcattgctgggagctcgtgacccc

SEQ ID NO: 3991442 - DNA, 25 bp, Homo sapien
ccccagtgagtctgttgagggtgca

SEQ ID NO: 3991443 - DNA, 25 bp, Homo sapien
tgcattgctgggagctcgtgagccc

SEQ ID NO: 3991444 - DNA, 25 bp, Homo sapien
aaagagcattgccaagacagacaca

SEQ ID NO: 3991445 - DNA, 25 bp, Homo sapien
tgctcatggtttgggctatttgtcc

SEQ ID NO: 3991446 - DNA, 25 bp, Homo sapien
gatgttgttttgctcatggtttggg

SEQ ID NO: 3991447 - DNA, 25 bp, Homo sapien
aggtttagcccctcaccgtgtcctg

SEQ ID NO: 3991448 - DNA, 25 bp, Homo sapien
aagatggccatggattttatggtgc

SEQ ID NO: 3991449 - DNA, 25 bp, Homo sapien
cagggttgacctcaaacctgtcggg

SEQ ID NO: 3991450 - DNA, 25 bp, Homo sapien
aaagtcaggtggaatgacaacagtg

SEQ ID NO: 3991451 - DNA, 25 bp, Homo sapien
gaggaatccgaagtcacaatttctt

SEQ ID NO: 3991452 - DNA, 25 bp, Homo sapien
tgagtgtggcttttaacacaggtga

SEQ ID NO: 3991453 - DNA, 25 bp, Homo sapien
gacacaagtggccaatgtctttctg

SEQ ID NO: 3991454 - DNA, 25 bp, Homo sapien
acataggagagccaggccccgggca

SEQ ID NO: 3991455 - DNA, 25 bp, Homo sapien
ttctgaacataggagagccaggccc

SEQ ID NO: 3991456 - DNA, 25 bp, Homo sapien
ccccggcgcagctgacgccccgcgg

SEQ ID NO: 3991457 - DNA, 25 bp, Homo sapien
cggtgctgctggtcacggccaacgt

SEQ ID NO: 3991458 - DNA, 25 bp, Homo sapien
ccggcgcagctgacgccccgcggcc

SEQ ID NO: 3991459 - DNA, 25 bp, Homo sapien
gccgcccgggcaccatggcggggaa

SEQ ID NO: 3991460 - DNA, 25 bp, Homo sapien
ccatctttgtgaccccagattggcc

SEQ ID NO: 3991461 - DNA, 25 bp, Homo sapien
actactccatctttgtgaccccaga

SEQ ID NO: 3991462 - DNA, 25 bp, Homo sapien
actccatctttgtgaccccagattg

SEQ ID NO: 3991463 - DNA, 25 bp, Homo sapien
catcactactccatctttgtgaccc

SEQ ID NO: 3991464 - DNA, 25 bp, Homo sapien
gtgggctcggcaagtgctcgctggc

SEQ ID NO: 3991465 - DNA, 25 bp, Homo sapien
agacccgggtttgcagaacggctgt

SEQ ID NO: 3991466 - DNA, 25 bp, Homo sapien
tgcagaacggctgtgagagtgggct

SEQ ID NO: 3991467 - DNA, 25 bp, Homo sapien
cctctgcccagacccgggtttgcag

SEQ ID NO: 3991468 - DNA, 25 bp, Homo sapien
gcatcatttcgggtcggtccttgat

SEQ ID NO: 3991469 - DNA, 25 bp, Homo sapien
tggcagttctccgtttgccagctct

SEQ ID NO: 3991470 - DNA, 25 bp, Homo sapien
cttagacagcatcatttcgggtcgg

SEQ ID NO: 3991471 - DNA, 25 bp, Homo sapien
ttagacttttggaataagcctggca

SEQ ID NO: 3991472 - DNA, 25 bp, Homo sapien
cccaccaggtctggttggtgctgcc

SEQ ID NO: 3991473 - DNA, 25 bp, Homo sapien
caccaggtctggttggtgctgccat

SEQ ID NO: 3991474 - DNA, 25 bp, Homo sapien
ccaggtctggttggtgctgccatgg

SEQ ID NO: 3991475 - DNA, 25 bp, Homo sapien
aggtctggttggtgctgccatgggc

SEQ ID NO: 3991476 - DNA, 25 bp, Homo sapien
ccaggccggctttcaggaaggccga

SEQ ID NO: 3991477 - DNA, 25 bp, Homo sapien
gactgcctcaatcgtggttgctgcc

SEQ ID NO: 3991478 - DNA, 25 bp, Homo sapien
tcaggaaggccgactgcctcaatcg

SEQ ID NO: 3991479 - DNA, 25 bp, Homo sapien
agatctggcgttttccaagctcccc

SEQ ID NO: 3991480 - DNA, 25 bp, Homo sapien
gaagtggctctggaggagcgtccac

SEQ ID NO: 3991481 - DNA, 25 bp, Homo sapien
tggaagccaccagtcgtcctgggtg

SEQ ID NO: 3991482 - DNA, 25 bp, Homo sapien
gtctagggtgatggcgctcccagcc

SEQ ID NO: 3991483 - DNA, 25 bp, Homo sapien
gccgtgtcacgccatgtgctcatgt

SEQ ID NO: 3991484 - DNA, 25 bp, Homo sapien
tgaccgaggacgcttccgaggatgt

SEQ ID NO: 3991485 - DNA, 25 bp, Homo sapien
tgagcccctggtgggtctcggtgac

SEQ ID NO: 3991486 - DNA, 25 bp, Homo sapien
cttcttgatccttctctccgacagg

SEQ ID NO: 3991487 - DNA, 25 bp, Homo sapien
cttctctccgacaggagtgtgagac

SEQ ID NO: 3991488 - DNA, 25 bp, Homo sapien
tgatccttctctccgacaggagtgt

SEQ ID NO: 3991489 - DNA, 25 bp, Homo sapien
cagctggttgctgtgtcggggggcc

SEQ ID NO: 3991490 - DNA, 25 bp, Homo sapien
gagtcccaagctcccttcctgtcat

SEQ ID NO: 3991491 - DNA, 25 bp, Homo sapien
ggtgtgctggcctttggcagcagcg

SEQ ID NO: 3991492 - DNA, 25 bp, Homo sapien
gactgtggcgtcacactcaggtgtg

SEQ ID NO: 3991493 - DNA, 25 bp, Homo sapien
cttcctgtcatactgtgctttaccg

SEQ ID NO: 3991494 - DNA, 25 bp, Homo sapien
gtggcccgggagtcgactctgcttc

SEQ ID NO: 3991495 - DNA, 25 bp, Homo sapien
cgtggtggtgtttgcggccacatat

SEQ ID NO: 3991496 - DNA, 25 bp, Homo sapien
tatgccatgctcaggaggtcagtgg

SEQ ID NO: 3991497 - DNA, 25 bp, Homo sapien
tctgctgcccgttgccggtggcccg

SEQ ID NO: 3991498 - DNA, 25 bp, Homo sapien
tagtgccacctgtgacactgctgtc

SEQ ID NO: 3991499 - DNA, 25 bp, Homo sapien
cagcaactctgaggttctgcatagc

SEQ ID NO: 3991500 - DNA, 25 bp, Homo sapien
tctgcatagctagtgccacctgtga

SEQ ID NO: 3991501 - DNA, 25 bp, Homo sapien
tgctgtcactccaaggtgcacctca

SEQ ID NO: 3991502 - DNA, 25 bp, Homo sapien
cctggagcagcgcccgtgagaggag

SEQ ID NO: 3991503 - DNA, 25 bp, Homo sapien
gagcagcgcccgtgagaggagggaa

SEQ ID NO: 3991504 - DNA, 25 bp, Homo sapien
tggagcagcgcccgtgagaggaggg

SEQ ID NO: 3991505 - DNA, 25 bp, Homo sapien
gcagcgcccgtgagaggagggaagc

SEQ ID NO: 3991506 - DNA, 25 bp, Homo sapien
ggctgagcttttccgtgaaccggca

SEQ ID NO: 3991507 - DNA, 25 bp, Homo sapien
gctgtgagccgcatggtacgaacct

SEQ ID NO: 3991508 - DNA, 25 bp, Homo sapien
tacgaaccttctgaatgcaagtggc

SEQ ID NO: 3991509 - DNA, 25 bp, Homo sapien
agctgtgtcccttgacgtgctgaga

SEQ ID NO: 3991510 - DNA, 25 bp, Homo sapien
tgacctcatggaagacggtggaggt

SEQ ID NO: 3991511 - DNA, 25 bp, Homo sapien
tcatggaagacggtggaggtggcag

SEQ ID NO: 3991512 - DNA, 25 bp, Homo sapien
acactagtttggtcccgcctgacct

SEQ ID NO: 3991513 - DNA, 25 bp, Homo sapien
gaaacactagtttggtcccgcctga

SEQ ID NO: 3991514 - DNA, 25 bp, Homo sapien
tctgagcggctgtcagttgccacct

SEQ ID NO: 3991515 - DNA, 25 bp, Homo sapien
tgtgaatgttagactgcagagctga

SEQ ID NO: 3991516 - DNA, 25 bp, Homo sapien
gctggcactgtgaatgttagactgc

SEQ ID NO: 3991517 - DNA, 25 bp, Homo sapien
gctgtcagttgccacctgctggcac

SEQ ID NO: 3991518 - DNA, 25 bp, Homo sapien
gggacaccgggcttctgggtcagca

SEQ ID NO: 3991519 - DNA, 25 bp, Homo sapien
tcatctgcctgcagcgtccctccag

SEQ ID NO: 3991520 - DNA, 25 bp, Homo sapien
gggtcagcaagtgtttgccatacgc

SEQ ID NO: 3991521 - DNA, 25 bp, Homo sapien
tgcctgcagcgtccctccaggtggt

SEQ ID NO: 3991522 - DNA, 25 bp, Homo sapien
ccttggtgaagttggagtgggatag

SEQ ID NO: 3991523 - DNA, 25 bp, Homo sapien
gggcgcattctcagagccttggtga

SEQ ID NO: 3991524 - DNA, 25 bp, Homo sapien
tcactcgggagcatttatgggcgca

SEQ ID NO: 3991525 - DNA, 25 bp, Homo sapien
gggagggaggattggtggcgccttc

SEQ ID NO: 3991526 - DNA, 25 bp, Homo sapien
cggctgtggtcaccggcttccctgg

SEQ ID NO: 3991527 - DNA, 25 bp, Homo sapien
tcacagggcaaaggggtagtgtact

SEQ ID NO: 3991528 - DNA, 25 bp, Homo sapien
ccagcaggagatgagggatttgtcc

SEQ ID NO: 3991529 - DNA, 25 bp, Homo sapien
tccacggctgtggtcaccggcttcc

SEQ ID NO: 3991530 - DNA, 25 bp, Homo sapien
tagggcacgcagagtccacagtgca

SEQ ID NO: 3991531 - DNA, 25 bp, Homo sapien
cttagggcacgcagagtccacagtg

SEQ ID NO: 3991532 - DNA, 25 bp, Homo sapien
ttagggcacgcagagtccacagtgc

SEQ ID NO: 3991533 - DNA, 25 bp, Homo sapien
gcagggtgttttgttgccctcagca

SEQ ID NO: 3991534 - DNA, 25 bp, Homo sapien
cttgtcacactctgcagggtgtttt

SEQ ID NO: 3991535 - DNA, 25 bp, Homo sapien
ttttgttgccctcagcacgtgtggt

SEQ ID NO: 3991536 - DNA, 25 bp, Homo sapien
actctgcagggtgttttgttgccct

SEQ ID NO: 3991537 - DNA, 25 bp, Homo sapien
aaatttgctccaccgagtgaacaca

SEQ ID NO: 3991538 - DNA, 25 bp, Homo sapien
tgtgaaatttgctccaccgagtgaa

SEQ ID NO: 3991539 - DNA, 25 bp, Homo sapien
tgaaatttgctccaccgagtgaaca

SEQ ID NO: 3991540 - DNA, 25 bp, Homo sapien
gctgtgaaatttgctccaccgagtg

SEQ ID NO: 3991541 - DNA, 25 bp, Homo sapien
ttcggctgtcacatgggctgatgcg

SEQ ID NO: 3991542 - DNA, 25 bp, Homo sapien
tttcctgttcggctgtcacatgggc

SEQ ID NO: 3991543 - DNA, 25 bp, Homo sapien
tcacatgggctgatgcggcgagccc

SEQ ID NO: 3991544 - DNA, 25 bp, Homo sapien
gctgatgcggcgagccctctccgtg

SEQ ID NO: 3991545 - DNA, 25 bp, Homo sapien
tagttttctgttgaatgcctctggg

SEQ ID NO: 3991546 - DNA, 25 bp, Homo sapien
atagttttctgttgaatgcctctgg

SEQ ID NO: 3991547 - DNA, 25 bp, Homo sapien
agttttctgttgaatgcctctgggc

SEQ ID NO: 3991548 - DNA, 25 bp, Homo sapien
catagttttctgttgaatgcctctg

SEQ ID NO: 3991549 - DNA, 25 bp, Homo sapien
ttcccgccagctgcgcatgtgatgg

SEQ ID NO: 3991550 - DNA, 25 bp, Homo sapien
gcgctgagcacgctctggggctctc

SEQ ID NO: 3991551 - DNA, 25 bp, Homo sapien
gggcgctctgtgtcctgatagcctt

SEQ ID NO: 3991552 - DNA, 25 bp, Homo sapien
gggccacgcagagccgcgacttccc

SEQ ID NO: 3991553 - DNA, 25 bp, Homo sapien
tgtggcagctctcttagggccagct

SEQ ID NO: 3991554 - DNA, 25 bp, Homo sapien
tgcctcatggtccttgatcacacac

SEQ ID NO: 3991555 - DNA, 25 bp, Homo sapien
cgtggtggtgtgctcgcctctggag

SEQ ID NO: 3991556 - DNA, 25 bp, Homo sapien
gccgtcggtggcttcggagctgtgg

SEQ ID NO: 3991557 - DNA, 25 bp, Homo sapien
gccctgctgagtgaagcgcacacgt

SEQ ID NO: 3991558 - DNA, 25 bp, Homo sapien
cctgctgagtgaagcgcacacgtgg

SEQ ID NO: 3991559 - DNA, 25 bp, Homo sapien
ggccctgctgagtgaagcgcacacg

SEQ ID NO: 3991560 - DNA, 25 bp, Homo sapien
ccctgctgagtgaagcgcacacgtg

SEQ ID NO: 3991561 - DNA, 25 bp, Homo sapien
ctgcactgtgcaccgtgaggctcac

SEQ ID NO: 3991562 - DNA, 25 bp, Homo sapien
tcctgctgcaccgccctcgcccagt

SEQ ID NO: 3991563 - DNA, 25 bp, Homo sapien
tccagggcttgatacggctgggcca

SEQ ID NO: 3991564 - DNA, 25 bp, Homo sapien
cacccagggaacctgggaggcacct

SEQ ID NO: 3991565 - DNA, 25 bp, Homo sapien
tgcgtggcccgctcgccacctctgg

SEQ ID NO: 3991566 - DNA, 25 bp, Homo sapien
cagggaacctgggaggcaccttctg

SEQ ID NO: 3991567 - DNA, 25 bp, Homo sapien
agctctgtgaagtcgcaggctcggg

SEQ ID NO: 3991568 - DNA, 25 bp, Homo sapien
ggcccctcgagagggacagagcctt

SEQ ID NO: 3991569 - DNA, 25 bp, Homo sapien
ctctggtatctcaggtcctgtctgc

SEQ ID NO: 3991570 - DNA, 25 bp, Homo sapien
tggtgcccccttccctgtatgctct

SEQ ID NO: 3991571 - DNA, 25 bp, Homo sapien
cattggcattgctgagggtcttggc

SEQ ID NO: 3991572 - DNA, 25 bp, Homo sapien
tgctctggggtgtggatagcacagc

SEQ ID NO: 3991573 - DNA, 25 bp, Homo sapien
ggtgtggatagcacagcgtctgccg

SEQ ID NO: 3991574 - DNA, 25 bp, Homo sapien
tcttggccaatctgttagggaagtg

SEQ ID NO: 3991575 - DNA, 25 bp, Homo sapien
atgtgggtcctgcaaatgtgagcac

SEQ ID NO: 3991576 - DNA, 25 bp, Homo sapien
tgtgggtcctgcaaatgtgagcacc

SEQ ID NO: 3991577 - DNA, 25 bp, Homo sapien
gatgtgggtcctgcaaatgtgagca

SEQ ID NO: 3991578 - DNA, 25 bp, Homo sapien
gggcttctcacctcacgattttttg

SEQ ID NO: 3991579 - DNA, 25 bp, Homo sapien
gataggtgtgaggatgccttctcag

SEQ ID NO: 3991580 - DNA, 25 bp, Homo sapien
gattttttgtcctgctcgttgctgt

SEQ ID NO: 3991581 - DNA, 25 bp, Homo sapien
gccatttcggcatcttttaaccaca

SEQ ID NO: 3991582 - DNA, 25 bp, Homo sapien
cgtgcgcgttgtgggtatggccacc

SEQ ID NO: 3991583 - DNA, 25 bp, Homo sapien
gaaatgtggcgtgcgcgttgtgggt

SEQ ID NO: 3991584 - DNA, 25 bp, Homo sapien
cgttgtgggtatggccaccgccatc

SEQ ID NO: 3991585 - DNA, 25 bp, Homo sapien
tgtctcggcttgtttggggaaatgt

SEQ ID NO: 3991586 - DNA, 25 bp, Homo sapien
gattggtccctggggtgacacatga

SEQ ID NO: 3991587 - DNA, 25 bp, Homo sapien
ttggtccctggggtgacacatgatc

SEQ ID NO: 3991588 - DNA, 25 bp, Homo sapien
attggtccctggggtgacacatgat

SEQ ID NO: 3991589 - DNA, 25 bp, Homo sapien
cgtgtctgttgcatgcccccgtatg

SEQ ID NO: 3991590 - DNA, 25 bp, Homo sapien
tgctggccgtgagaattccacccat

SEQ ID NO: 3991591 - DNA, 25 bp, Homo sapien
tgggcctgtgctggccgtgagaatt

SEQ ID NO: 3991592 - DNA, 25 bp, Homo sapien
ccttattcatgcagcacgtgtctgt

SEQ ID NO: 3991593 - DNA, 25 bp, Homo sapien
gaaccagatgaccatttgggctcac

SEQ ID NO: 3991594 - DNA, 25 bp, Homo sapien
ccgtgggcaccttcgtatccatcag

SEQ ID NO: 3991595 - DNA, 25 bp, Homo sapien
tgtggatgccccgtgggcaccttcg

SEQ ID NO: 3991596 - DNA, 25 bp, Homo sapien
cgtatccatcagtttcatctctggc

SEQ ID NO: 3991597 - DNA, 25 bp, Homo sapien
ggcaccttcgtatccatcagtttca

SEQ ID NO: 3991598 - DNA, 25 bp, Homo sapien
caataaaaccaagggaccaactgag

SEQ ID NO: 3991599 - DNA, 25 bp, Homo sapien
agtgcaccaacaataaaaccaaggg

SEQ ID NO: 3991600 - DNA, 25 bp, Homo sapien
aaccaagggaccaactgagccattt

SEQ ID NO: 3991601 - DNA, 25 bp, Homo sapien
agggaccaactgagccatttggaag

SEQ ID NO: 3991602 - DNA, 25 bp, Homo sapien
gtgccagtgagcttcgtgctgcgat

SEQ ID NO: 3991603 - DNA, 25 bp, Homo sapien
ggcacagcggcgcatcacacggcag

SEQ ID NO: 3991604 - DNA, 25 bp, Homo sapien
ctgctctcaggtcgcctctcatcgg

SEQ ID NO: 3991605 - DNA, 25 bp, Homo sapien
cgatgtggatagagggccgtccttc

SEQ ID NO: 3991606 - DNA, 25 bp, Homo sapien
gttcggggcgttggaacattctcca

SEQ ID NO: 3991607 - DNA, 25 bp, Homo sapien
ggatgaaaacgaggcactccctccc

SEQ ID NO: 3991608 - DNA, 25 bp, Homo sapien
ctgagggatgaaaacgaggcactcc

SEQ ID NO: 3991609 - DNA, 25 bp, Homo sapien
cacagcctactcccgtgggttcggg

SEQ ID NO: 3991610 - DNA, 25 bp, Homo sapien
gctgaatgaggtgaacagcaagagg

SEQ ID NO: 3991611 - DNA, 25 bp, Homo sapien
gagaaaaggagagatcgcctagcaa

SEQ ID NO: 3991612 - DNA, 25 bp, Homo sapien
gagatcgcctagcaaagcagcgagg

SEQ ID NO: 3991613 - DNA, 25 bp, Homo sapien
ggctcctgccgagcagaggaggagg

SEQ ID NO: 3991614 - DNA, 25 bp, Homo sapien
ggtggggcctttcgtagggctgtgc

SEQ ID NO: 3991615 - DNA, 25 bp, Homo sapien
ttgcctgggaggagtcgtggtttct

SEQ ID NO: 3991616 - DNA, 25 bp, Homo sapien
cacagcttgcctgggaggagtcgtg

SEQ ID NO: 3991617 - DNA, 25 bp, Homo sapien
cagcttgcctgggaggagtcgtggt

SEQ ID NO: 3991618 - DNA, 25 bp, Homo sapien
cagctggtaggcacggacttctggt

SEQ ID NO: 3991619 - DNA, 25 bp, Homo sapien
aggagctgtctagcctggaagcctg

SEQ ID NO: 3991620 - DNA, 25 bp, Homo sapien
cgtgaggcagctggtaggcacggac

SEQ ID NO: 3991621 - DNA, 25 bp, Homo sapien
tggtaaggagctgtctagcctggaa

SEQ ID NO: 3991622 - DNA, 25 bp, Homo sapien
ctgacgatagaaacgcaaagcacac

SEQ ID NO: 3991623 - DNA, 25 bp, Homo sapien
gaaaacacatgatgccaggtccaca

SEQ ID NO: 3991624 - DNA, 25 bp, Homo sapien
tgacaggtgacccagccttcaggct

SEQ ID NO: 3991625 - DNA, 25 bp, Homo sapien
tcagcatatggtctgcggagtcctc

SEQ ID NO: 3991626 - DNA, 25 bp, Homo sapien
tgtccagccgctgggactctgttga

SEQ ID NO: 3991627 - DNA, 25 bp, Homo sapien
gcaaccctgacctgtgtgctgaagg

SEQ ID NO: 3991628 - DNA, 25 bp, Homo sapien
ttttggcatttggacgacacctggt

SEQ ID NO: 3991629 - DNA, 25 bp, Homo sapien
aagggcggccgcctgatgtctgcct

SEQ ID NO: 3991630 - DNA, 25 bp, Homo sapien
tcttcctccgcaggctggcgtttgc

SEQ ID NO: 3991631 - DNA, 25 bp, Homo sapien
tgctgggtggcaccccgagcgggtt

SEQ ID NO: 3991632 - DNA, 25 bp, Homo sapien
gttttcctttcaggtgtggggctgc

SEQ ID NO: 3991633 - DNA, 25 bp, Homo sapien
tctctgatgcacccagcgtcttgcc

SEQ ID NO: 3991634 - DNA, 25 bp, Homo sapien
tctgatgcacccagcgtcttgcctg

SEQ ID NO: 3991635 - DNA, 25 bp, Homo sapien
ctctgatgcacccagcgtcttgcct

SEQ ID NO: 3991636 - DNA, 25 bp, Homo sapien
ctgatgcacccagcgtcttgcctgt

SEQ ID NO: 3991637 - DNA, 25 bp, Homo sapien
ctgtggtgcctctgacccatgggga

SEQ ID NO: 3991638 - DNA, 25 bp, Homo sapien
cctctgacccatggggagagggctt

SEQ ID NO: 3991639 - DNA, 25 bp, Homo sapien
tgctgggctccagaaaactctgagg

SEQ ID NO: 3991640 - DNA, 25 bp, Homo sapien
ggcttgtgctgggctccagaaaact

SEQ ID NO: 3991641 - DNA, 25 bp, Homo sapien
ttatctcgggctgcgcatgcccggc

SEQ ID NO: 3991642 - DNA, 25 bp, Homo sapien
ggaacgggacatggccatgaaaaca

SEQ ID NO: 3991643 - DNA, 25 bp, Homo sapien
ttttgttcacacgtttatctcgggc

SEQ ID NO: 3991644 - DNA, 25 bp, Homo sapien
tggcatcctacaggtggcattcctg

SEQ ID NO: 3991645 - DNA, 25 bp, Homo sapien
tgagacccaaaggaaggacaggagg

SEQ ID NO: 3991646 - DNA, 25 bp, Homo sapien
ctgagacccaaaggaaggacaggag

SEQ ID NO: 3991647 - DNA, 25 bp, Homo sapien
tgggcgctgctctcggttccagcct

SEQ ID NO: 3991648 - DNA, 25 bp, Homo sapien
ccatgggcgctgctctcggttccag

SEQ ID NO: 3991649 - DNA, 25 bp, Homo sapien
ctctcggttccagcctcgttggtta

SEQ ID NO: 3991650 - DNA, 25 bp, Homo sapien
gctgctctcggttccagcctcgttg

SEQ ID NO: 3991651 - DNA, 25 bp, Homo sapien
ctggtttgagaagggagtgtgggct

SEQ ID NO: 3991652 - DNA, 25 bp, Homo sapien
agctgtgccatttgggggtgctcca

SEQ ID NO: 3991653 - DNA, 25 bp, Homo sapien
tggcagctggacagccgtgacactg

SEQ ID NO: 3991654 - DNA, 25 bp, Homo sapien
cgaggggttcagctgtgccatttgg

SEQ ID NO: 3991655 - DNA, 25 bp, Homo sapien
ggagaggagactctcgacggtgggc

SEQ ID NO: 3991656 - DNA, 25 bp, Homo sapien
agactctcgacggtgggcagcccca

SEQ ID NO: 3991657 - DNA, 25 bp, Homo sapien
gactctcgacggtgggcagccccag

SEQ ID NO: 3991658 - DNA, 25 bp, Homo sapien
aggagactctcgacggtgggcagcc

SEQ ID NO: 3991659 - DNA, 25 bp, Homo sapien
cccagtactgtggtgaaagcagctg

SEQ ID NO: 3991660 - DNA, 25 bp, Homo sapien
gtgagggcatgaactccgttttcct

SEQ ID NO: 3991661 - DNA, 25 bp, Homo sapien
ggaagtgagggcatgaactccgttt

SEQ ID NO: 3991662 - DNA, 25 bp, Homo sapien
ccccgccccagtactgtggtgaaag

SEQ ID NO: 3991663 - DNA, 25 bp, Homo sapien
gctcccagggctgagttttcattga

SEQ ID NO: 3991664 - DNA, 25 bp, Homo sapien
tcatccttttcttgcacttcattct

SEQ ID NO: 3991665 - DNA, 25 bp, Homo sapien
cagatgtgtgtcgtcagcggctgcc

SEQ ID NO: 3991666 - DNA, 25 bp, Homo sapien
ctgtgtgacgctccccacagatgtg

SEQ ID NO: 3991667 - DNA, 25 bp, Homo sapien
cattttctgtgtgacgctccccaca

SEQ ID NO: 3991668 - DNA, 25 bp, Homo sapien
gtgtcctttcgggtgtccactgctg

SEQ ID NO: 3991669 - DNA, 25 bp, Homo sapien
cctttcgggtgtccactgctggttc

SEQ ID NO: 3991670 - DNA, 25 bp, Homo sapien
tgtcctttcgggtgtccactgctgg

SEQ ID NO: 3991671 - DNA, 25 bp, Homo sapien
tcctttcgggtgtccactgctggtt

SEQ ID NO: 3991672 - DNA, 25 bp, Homo sapien
gggtccgattgaggagcagttgggt

SEQ ID NO: 3991673 - DNA, 25 bp, Homo sapien
ttgaggagcagttgggtggcccagc

SEQ ID NO: 3991674 - DNA, 25 bp, Homo sapien
gctggtacatcctcacaggggtggc

SEQ ID NO: 3991675 - DNA, 25 bp, Homo sapien
gcagggggtccgattgaggagcagt

SEQ ID NO: 3991676 - DNA, 25 bp, Homo sapien
tgtggtcccgcgttctgtgtgtgtt

SEQ ID NO: 3991677 - DNA, 25 bp, Homo sapien
acgttctggtgtgtgtcgccatcgg

SEQ ID NO: 3991678 - DNA, 25 bp, Homo sapien
cacgttctggtgtgtgtcgccatca

SEQ ID NO: 3991679 - DNA, 25 bp, Homo sapien
tgtggggtgtggtcccgcgttctgt

SEQ ID NO: 3991680 - DNA, 25 bp, Homo sapien
gcggtccaagccgaggcactcgccc

SEQ ID NO: 3991681 - DNA, 25 bp, Homo sapien
tgccagggcctccggtaggggccgc

SEQ ID NO: 3991682 - DNA, 25 bp, Homo sapien
agccgaggcactcgcccctcctgtc

SEQ ID NO: 3991683 - DNA, 25 bp, Homo sapien
ggtccaagccgaggcactcgcccct

SEQ ID NO: 3991684 - DNA, 25 bp, Homo sapien
tccaagagacgctcctggctttcca

SEQ ID NO: 3991685 - DNA, 25 bp, Homo sapien
gaggtggcctcggactccaagagac

SEQ ID NO: 3991686 - DNA, 25 bp, Homo sapien
ccctgtgcagaccagcagtgcgagg

SEQ ID NO: 3991687 - DNA, 25 bp, Homo sapien
gacgcaggttatcccatgccaggga

SEQ ID NO: 3991688 - DNA, 25 bp, Homo sapien
gtctgtgatgatgccgttctgtgtg

SEQ ID NO: 3991689 - DNA, 25 bp, Homo sapien
cactgtccgcgctaggagtgcaggt

SEQ ID NO: 3991690 - DNA, 25 bp, Homo sapien
ccacactgtccgcgctaggagtgca

SEQ ID NO: 3991691 - DNA, 25 bp, Homo sapien
agtatcgtctccgtctgtgatgatg

SEQ ID NO: 3991692 - DNA, 25 bp, Homo sapien
cgacacgtgtaaagatgtcagtggg

SEQ ID NO: 3991693 - DNA, 25 bp, Homo sapien
cgttcgaggatgttccgaccaccat

SEQ ID NO: 3991694 - DNA, 25 bp, Homo sapien
acacaggtgtggacattgcgacacg

SEQ ID NO: 3991695 - DNA, 25 bp, Homo sapien
ggcctgcgttcgaggatgttccgac

SEQ ID NO: 3991696 - DNA, 25 bp, Homo sapien
ctgccgtgtgggtcactgtggtcat

SEQ ID NO: 3991697 - DNA, 25 bp, Homo sapien
tgtctttagggcagcctgccgtgtg

SEQ ID NO: 3991698 - DNA, 25 bp, Homo sapien
cagcctgccgtgtgggtcactgtgg

SEQ ID NO: 3991699 - DNA, 25 bp, Homo sapien
ttgtctttagggcagcctgccgtgt

SEQ ID NO: 3991700 - DNA, 25 bp, Homo sapien
agcagcgccacgcgggccagaaagt

SEQ ID NO: 3991701 - DNA, 25 bp, Homo sapien
cacagtggccccgactagtgttggg

SEQ ID NO: 3991702 - DNA, 25 bp, Homo sapien
tgttggggtgtgtgccaaaggcaag

SEQ ID NO: 3991703 - DNA, 25 bp, Homo sapien
catggtcaccgtggccgtcacagtg

SEQ ID NO: 3991704 - DNA, 25 bp, Homo sapien
ggcttgtgctgagtgctcgcgctca

SEQ ID NO: 3991705 - DNA, 25 bp, Homo sapien
ttctcctgaagcagtggcattttca

SEQ ID NO: 3991706 - DNA, 25 bp, Homo sapien
cattttcaggcttgcgcttagctcc

SEQ ID NO: 3991707 - DNA, 25 bp, Homo sapien
tggagtttccttgcgtgtgtgcacg

SEQ ID NO: 3991708 - DNA, 25 bp, Homo sapien
tcacaccaggcagtggccaggctct

SEQ ID NO: 3991709 - DNA, 25 bp, Homo sapien
acaccaggcagtggccaggctctac

SEQ ID NO: 3991710 - DNA, 25 bp, Homo sapien
cacaccaggcagtggccaggctcta

SEQ ID NO: 3991711 - DNA, 25 bp, Homo sapien
gcctcatggaggggcacgtgagccc

SEQ ID NO: 3991712 - DNA, 25 bp, Homo sapien
tcatggaggggcacgtgagccccac

SEQ ID NO: 3991713 - DNA, 25 bp, Homo sapien
ttctgcctcatggaggggcacgtga

SEQ ID NO: 3991714 - DNA, 25 bp, Homo sapien
cttctgcctcatggaggggcacgtg

SEQ ID NO: 3991715 - DNA, 25 bp, Homo sapien
aggctgggccgtggcagcttctctg

SEQ ID NO: 3991716 - DNA, 25 bp, Homo sapien
gtggcagcttctctgctctgctcct

SEQ ID NO: 3991717 - DNA, 25 bp, Homo sapien
gctgggccgtggcagcttctctgct

SEQ ID NO: 3991718 - DNA, 25 bp, Homo sapien
gcagcttctctgctctgctcctcac

SEQ ID NO: 3991719 - DNA, 25 bp, Homo sapien
agctggtgtctttgctcactaactg

SEQ ID NO: 3991720 - DNA, 25 bp, Homo sapien
tgtctttgctcactaactgaagaag

SEQ ID NO: 3991721 - DNA, 25 bp, Homo sapien
gcagatcgcttggagaacagctgag

SEQ ID NO: 3991722 - DNA, 25 bp, Homo sapien
ggatgaggatgtaggcagatcgctt

SEQ ID NO: 3991723 - DNA, 25 bp, Homo sapien
cacccgtccaggttccgtcctctct

SEQ ID NO: 3991724 - DNA, 25 bp, Homo sapien
gctcctgaactctcggaacctggaa

SEQ ID NO: 3991725 - DNA, 25 bp, Homo sapien
tcactgcgcttggtttgaccgaagg

SEQ ID NO: 3991726 - DNA, 25 bp, Homo sapien
cctgcattcgacacacagctttgcg

SEQ ID NO: 3991727 - DNA, 25 bp, Homo sapien
cagctttgcggctgcatttctgccc

SEQ ID NO: 3991728 - DNA, 25 bp, Homo sapien
agcagctgggcaggcccctttgctt

SEQ ID NO: 3991729 - DNA, 25 bp, Homo sapien
ctttgcttgagggccccgtctttgg

SEQ ID NO: 3991730 - DNA, 25 bp, Homo sapien
caggcccctttgcttgagggccccg

SEQ ID NO: 3991731 - DNA, 25 bp, Homo sapien
ggtgaagcagctgggcaggcccctt

SEQ ID NO: 3991732 - DNA, 25 bp, Homo sapien
ggcctcccctcttagtggtgatggg

SEQ ID NO: 3991733 - DNA, 25 bp, Homo sapien
caggggcctcccctcttagtggtga

SEQ ID NO: 3991734 - DNA, 25 bp, Homo sapien
ctcccctcttagtggtgatgggctt

SEQ ID NO: 3991735 - DNA, 25 bp, Homo sapien
gggcctcccctcttagtggtgatgg

SEQ ID NO: 3991736 - DNA, 25 bp, Homo sapien
tgagggatggtcgtgtgcgtcgttt

SEQ ID NO: 3991737 - DNA, 25 bp, Homo sapien
cgtcgttttaggagcatgtgtgtga

SEQ ID NO: 3991738 - DNA, 25 bp, Homo sapien
tgtagctgccggttccgggtcctgt

SEQ ID NO: 3991739 - DNA, 25 bp, Homo sapien
cctctgtagctgccggttccgggtc

SEQ ID NO: 3991740 - DNA, 25 bp, Homo sapien
gcttcttgtccttaagtcagaccgg

SEQ ID NO: 3991741 - DNA, 25 bp, Homo sapien
gggaagcttcttgtccttaagtcag

SEQ ID NO: 3991742 - DNA, 25 bp, Homo sapien
tccttgcagccactggaggggaagc

SEQ ID NO: 3991743 - DNA, 25 bp, Homo sapien
gtccttaagtcagaccgggaggcag

SEQ ID NO: 3991744 - DNA, 25 bp, Homo sapien
cgcttctgcagcttcggcatcatgt

SEQ ID NO: 3991745 - DNA, 25 bp, Homo sapien
tgcaggccgcttctgcagcttcggc

SEQ ID NO: 3991746 - DNA, 25 bp, Homo sapien
tcagatgcaggccgcttctgcagct

SEQ ID NO: 3991747 - DNA, 25 bp, Homo sapien
tgcagcttcggcatcatgtcccagc

SEQ ID NO: 3991748 - DNA, 25 bp, Homo sapien
aaacaccgcgccctggttggtggct

SEQ ID NO: 3991749 - DNA, 25 bp, Homo sapien
gccctggttggtggctgtattgatt

SEQ ID NO: 3991750 - DNA, 25 bp, Homo sapien
ggtgactcctcaaacaccgcgccct

SEQ ID NO: 3991751 - DNA, 25 bp, Homo sapien
ccgcgccctggttggtggctgtatt

SEQ ID NO: 3991752 - DNA, 25 bp, Homo sapien
gtagccaggacatccattgtgacct

SEQ ID NO: 3991753 - DNA, 25 bp, Homo sapien
aggtgaggtagccaggacatccatt

SEQ ID NO: 3991754 - DNA, 25 bp, Homo sapien
gatcttgaatcctcagactgcaggt

SEQ ID NO: 3991755 - DNA, 25 bp, Homo sapien
ccagtgcagatcttgaatcctcaga

SEQ ID NO: 3991756 - DNA, 25 bp, Homo sapien
gtgtctgcacttcccactggcgtgt

SEQ ID NO: 3991757 - DNA, 25 bp, Homo sapien
cacttggggaatgtgcatttccctt

SEQ ID NO: 3991758 - DNA, 25 bp, Homo sapien
caccggcgtgtctgcacttcccact

SEQ ID NO: 3991759 - DNA, 25 bp, Homo sapien
gctcctgtcttctgtgcggttcctc

SEQ ID NO: 3991760 - DNA, 25 bp, Homo sapien
gcctggcatgtaggccgtggtctct

SEQ ID NO: 3991761 - DNA, 25 bp, Homo sapien
tgcctggcatgtaggccgtggtctc

SEQ ID NO: 3991762 - DNA, 25 bp, Homo sapien
ctggcatgtaggccgtggtctctgc

SEQ ID NO: 3991763 - DNA, 25 bp, Homo sapien
ggcatgtaggccgtggtctctgccc

SEQ ID NO: 3991764 - DNA, 25 bp, Homo sapien
agaccggggccgggagctgctgctg

SEQ ID NO: 3991765 - DNA, 25 bp, Homo sapien
gccgggagctgctgctggctccaca

SEQ ID NO: 3991766 - DNA, 25 bp, Homo sapien
ccgggagctgctgctggctccacac

SEQ ID NO: 3991767 - DNA, 25 bp, Homo sapien
gggagaccggggccgggagctgctg

SEQ ID NO: 3991768 - DNA, 25 bp, Homo sapien
tgctgggcgcggctcccaagatgcg

SEQ ID NO: 3991769 - DNA, 25 bp, Homo sapien
tcccaagatgcgtgcagctgtccgc

SEQ ID NO: 3991770 - DNA, 25 bp, Homo sapien
cgcggctcccaagatgcgtgcagct

SEQ ID NO: 3991771 - DNA, 25 bp, Homo sapien
caagatgcgtgcagctgtccgcggt

SEQ ID NO: 3991772 - DNA, 25 bp, Homo sapien
gatgcagacgggtagatgccacagg

SEQ ID NO: 3991773 - DNA, 25 bp, Homo sapien
ttccaggaatcgtggtgaaagcagc

SEQ ID NO: 3991774 - DNA, 25 bp, Homo sapien
tcctcttccccgtgaaaagcttcag

SEQ ID NO: 3991775 - DNA, 25 bp, Homo sapien
gcagccacggacagatttgtgagga

SEQ ID NO: 3991776 - DNA, 25 bp, Homo sapien
gcgaatctgactcggtgactttgtt

SEQ ID NO: 3991777 - DNA, 25 bp, Homo sapien
gatgttgatgtcttcactggttgcc

SEQ ID NO: 3991778 - DNA, 25 bp, Homo sapien
gactcggtgactttgttgttgatgt

SEQ ID NO: 3991779 - DNA, 25 bp, Homo sapien
tgatgttgatgtcttcactggttgc

SEQ ID NO: 3991780 - DNA, 25 bp, Homo sapien
ttccacacgtgagcatccatgaggg

SEQ ID NO: 3991781 - DNA, 25 bp, Homo sapien
tatccacaagggaatggcatccacg

SEQ ID NO: 3991782 - DNA, 25 bp, Homo sapien
gaacgtcatcctcgagggaaaagca

SEQ ID NO: 3991783 - DNA, 25 bp, Homo sapien
tgcattgtgcggacagccctgtgct

SEQ ID NO: 3991784 - DNA, 25 bp, Homo sapien
gggtcccagcacccgttgcagccca

SEQ ID NO: 3991785 - DNA, 25 bp, Homo sapien
ctggttggtcacaaacaggcctctt

SEQ ID NO: 3991786 - DNA, 25 bp, Homo sapien
cccagccccgaagggacctggagag

SEQ ID NO: 3991787 - DNA, 25 bp, Homo sapien
tgggtctggttggtcacaaacaggc

SEQ ID NO: 3991788 - DNA, 25 bp, Homo sapien
tccaggcgtcgttggcaagtaactg

SEQ ID NO: 3991789 - DNA, 25 bp, Homo sapien
ggtcactccgatactcctctttgga

SEQ ID NO: 3991790 - DNA, 25 bp, Homo sapien
ctctttggagaacgcctgacagggc

SEQ ID NO: 3991791 - DNA, 25 bp, Homo sapien
tctgcgcgccttatcttggcatggg

SEQ ID NO: 3991792 - DNA, 25 bp, Homo sapien
agaggcgtgtcatctcccttggcag

SEQ ID NO: 3991793 - DNA, 25 bp, Homo sapien
agtgtgccacggagaggagtatgca

SEQ ID NO: 3991794 - DNA, 25 bp, Homo sapien
gtgaagttaggagtgccatctccct

SEQ ID NO: 3991795 - DNA, 25 bp, Homo sapien
tgttttgtagctttcgtgaagttag

SEQ ID NO: 3991796 - DNA, 25 bp, Homo sapien
tgtgttctgcaggtgtcagatgtgg

SEQ ID NO: 3991797 - DNA, 25 bp, Homo sapien
tgttctgcaggtgtcagatgtggtt

SEQ ID NO: 3991798 - DNA, 25 bp, Homo sapien
tctgtgttctgcaggtgtcagatgt

SEQ ID NO: 3991799 - DNA, 25 bp, Homo sapien
gttctgcaggtgtcagatgtggttt

SEQ ID NO: 3991800 - DNA, 25 bp, Homo sapien
gactggtgctggtccgattctttac

SEQ ID NO: 3991801 - DNA, 25 bp, Homo sapien
cacagagctcccatgtccatttggt

SEQ ID NO: 3991802 - DNA, 25 bp, Homo sapien
cattctgttgtcgtcttagtgcgta

SEQ ID NO: 3991803 - DNA, 25 bp, Homo sapien
gctttgctggataaatcgcccttgg

SEQ ID NO: 3991804 - DNA, 25 bp, Homo sapien
ttagttgatgcgtgtctctgtatac

SEQ ID NO: 3991805 - DNA, 25 bp, Homo sapien
tgtgctcagcgtgctgtctcccatt

SEQ ID NO: 3991806 - DNA, 25 bp, Homo sapien
ttgccagcacttatctgtggaaggc

SEQ ID NO: 3991807 - DNA, 25 bp, Homo sapien
tcgagatccgacgtgggttcagttt

SEQ ID NO: 3991808 - DNA, 25 bp, Homo sapien
ctggaatcggcctccgtcgagatcc

SEQ ID NO: 3991809 - DNA, 25 bp, Homo sapien
tgtggaggaacaatagcatcatctg

SEQ ID NO: 3991810 - DNA, 25 bp, Homo sapien
actgtgcgtggaggtagtttgattt

SEQ ID NO: 3991811 - DNA, 25 bp, Homo sapien
tgttccagcacagcttcgcaagggc

SEQ ID NO: 3991812 - DNA, 25 bp, Homo sapien
cgcaagggccccgtgttgtaaactg

SEQ ID NO: 3991813 - DNA, 25 bp, Homo sapien
gaagcaaaagccagcgtcggttcct

SEQ ID NO: 3991814 - DNA, 25 bp, Homo sapien
ctggtgcattcgaggtgctgtgacc

SEQ ID NO: 3991815 - DNA, 25 bp, Homo sapien
agccagcgtcggttcctgtgcccag

SEQ ID NO: 3991816 - DNA, 25 bp, Homo sapien
cattcgaggtgctgtgaccaaggcc

SEQ ID NO: 3991817 - DNA, 25 bp, Homo sapien
gagttgtgcatcaagacagctggaa

SEQ ID NO: 3991818 - DNA, 25 bp, Homo sapien
cagagttgtgcatcaagacagctgg

SEQ ID NO: 3991819 - DNA, 25 bp, Homo sapien
gttgtgcatcaagacagctggaacc

SEQ ID NO: 3991820 - DNA, 25 bp, Homo sapien
ttgtgcatcaagacagctggaacca

SEQ ID NO: 3991821 - DNA, 25 bp, Homo sapien
tcagaccaccggcaccaagggttgt

SEQ ID NO: 3991822 - DNA, 25 bp, Homo sapien
agctggcccttgggaaccacgttgg

SEQ ID NO: 3991823 - DNA, 25 bp, Homo sapien
accggaaacactcagaccaccggca

SEQ ID NO: 3991824 - DNA, 25 bp, Homo sapien
caccggcaccaagggttgtctgttt

SEQ ID NO: 3991825 - DNA, 25 bp, Homo sapien
tcaggcacggccgcccttgtctcct

SEQ ID NO: 3991826 - DNA, 25 bp, Homo sapien
gccgcccttgtctcctgctgccgct

SEQ ID NO: 3991827 - DNA, 25 bp, Homo sapien
cgcccttgtctcctgctgccgctgc

SEQ ID NO: 3991828 - DNA, 25 bp, Homo sapien
gcacggccgcccttgtctcctgctg

SEQ ID NO: 3991829 - DNA, 25 bp, Homo sapien
ggcttggttggaaccatttctgtct

SEQ ID NO: 3991830 - DNA, 25 bp, Homo sapien
cagcctgagcccgtcgtcccttgct

SEQ ID NO: 3991831 - DNA, 25 bp, Homo sapien
tgagcccgtcgtcccttgctggctg

SEQ ID NO: 3991832 - DNA, 25 bp, Homo sapien
cttggttggaaccatttctgtctcc

SEQ ID NO: 3991833 - DNA, 25 bp, Homo sapien
ttgctcagctgcgccctggaccgtg

SEQ ID NO: 3991834 - DNA, 25 bp, Homo sapien
cgccctggaccgtggccgctgggct

SEQ ID NO: 3991835 - DNA, 25 bp, Homo sapien
agctgcgccctggaccgtggccgct

SEQ ID NO: 3991836 - DNA, 25 bp, Homo sapien
tcagctgcgccctggaccgtggccg

SEQ ID NO: 3991837 - DNA, 25 bp, Homo sapien
gagcggggtcaatcagtgcctcacc

SEQ ID NO: 3991838 - DNA, 25 bp, Homo sapien
gctcgtccttttgggccctcagtgg

SEQ ID NO: 3991839 - DNA, 25 bp, Homo sapien
gcttgctccttggaagcgctgcgca

SEQ ID NO: 3991840 - DNA, 25 bp, Homo sapien
aagcgctgcgcatcctgtgttccag

SEQ ID NO: 3991841 - DNA, 25 bp, Homo sapien
gaataaacataccaacgcaggccaa

SEQ ID NO: 3991842 - DNA, 25 bp, Homo sapien
taccaggtgtcctaacacgtgtggc

SEQ ID NO: 3991843 - DNA, 25 bp, Homo sapien
gatgcttacagatgtcatggctcag

SEQ ID NO: 3991844 - DNA, 25 bp, Homo sapien
gccaaggtccgattgctgaaagcaa

SEQ ID NO: 3991845 - DNA, 25 bp, Homo sapien
tattgatccacagctccaacagcac

SEQ ID NO: 3991846 - DNA, 25 bp, Homo sapien
ccagaggacgcagggtaacggcttt

SEQ ID NO: 3991847 - DNA, 25 bp, Homo sapien
taacggctttcctgaactccgcttc

SEQ ID NO: 3991848 - DNA, 25 bp, Homo sapien
cagggagctccgagaacacatcagt

SEQ ID NO: 3991849 - DNA, 25 bp, Homo sapien
cattgggctatcaaacgggtgggaa

SEQ ID NO: 3991850 - DNA, 25 bp, Homo sapien
ttaatttcatggtcggctccgtgcg

SEQ ID NO: 3991851 - DNA, 25 bp, Homo sapien
cagtttgaaaagataggtgccgcca

SEQ ID NO: 3991852 - DNA, 25 bp, Homo sapien
tggatgcagccttgacgcgtgtcga

SEQ ID NO: 3991853 - DNA, 25 bp, Homo sapien
agatgcctaggtgggtccccagctc

SEQ ID NO: 3991854 - DNA, 25 bp, Homo sapien
cccacgccagtgttctccaaacttc

SEQ ID NO: 3991855 - DNA, 25 bp, Homo sapien
ccaggaggcgaagatgcctaggtgg

SEQ ID NO: 3991856 - DNA, 25 bp, Homo sapien
caaacttccggggagacctgtctgt

SEQ ID NO: 3991857 - DNA, 25 bp, Homo sapien
ggtctgcacggcttcatggctgcct

SEQ ID NO: 3991858 - DNA, 25 bp, Homo sapien
gaaggccagtgcctcatcacagagc

SEQ ID NO: 3991859 - DNA, 25 bp, Homo sapien
ccacaacaggatccagtgctgtcag

SEQ ID NO: 3991860 - DNA, 25 bp, Homo sapien
agcactgtcccgagtcaggtctgca

SEQ ID NO: 3991861 - DNA, 25 bp, Homo sapien
atgtgacatacaacacatgacacgc

SEQ ID NO: 3991862 - DNA, 25 bp, Homo sapien
agctcctgacacatgacatgtgaca

SEQ ID NO: 3991863 - DNA, 25 bp, Homo sapien
tgacacatgacatgtgacatacaac

SEQ ID NO: 3991864 - DNA, 25 bp, Homo sapien
gacatacaacacatgacacgcggca

SEQ ID NO: 3991865 - DNA, 25 bp, Homo sapien
tctgtcccaaggaaggtgacaagca

SEQ ID NO: 3991866 - DNA, 25 bp, Homo sapien
ggcttggcacctgttagaactgcta

SEQ ID NO: 3991867 - DNA, 25 bp, Homo sapien
caagcacgatgttttcctgggagaa

SEQ ID NO: 3991868 - DNA, 25 bp, Homo sapien
cctgttagaactgctatgtgctctt

SEQ ID NO: 3991869 - DNA, 25 bp, Homo sapien
gcgtgtactgcttgtgaggctttgt

SEQ ID NO: 3991870 - DNA, 25 bp, Homo sapien
cctgttgaccgtgctctgggtttgg

SEQ ID NO: 3991871 - DNA, 25 bp, Homo sapien
tcagcccctgttgaccgtgctctgg

SEQ ID NO: 3991872 - DNA, 25 bp, Homo sapien
accactgctggcgtttattgagcgt

SEQ ID NO: 3991873 - DNA, 25 bp, Homo sapien
ctctttgcagaaaatccctctgcag

SEQ ID NO: 3991874 - DNA, 25 bp, Homo sapien
ttgcagaaaatccctctgcagccac

SEQ ID NO: 3991875 - DNA, 25 bp, Homo sapien
cactgcacacgttctcagcccccat

SEQ ID NO: 3991876 - DNA, 25 bp, Homo sapien
tttgcagaaaatccctctgcagcca

SEQ ID NO: 3991877 - DNA, 25 bp, Homo sapien
gagcatggtttcgtgcccctgggct

SEQ ID NO: 3991878 - DNA, 25 bp, Homo sapien
cgtgaggccgcgtccttcatttggg

SEQ ID NO: 3991879 - DNA, 25 bp, Homo sapien
tggcctctccgtgatgtccttagct

SEQ ID NO: 3991880 - DNA, 25 bp, Homo sapien
ggacggaacgtcaggcttggcctct

SEQ ID NO: 3991881 - DNA, 25 bp, Homo sapien
tgcccgtgtctgcagtcctcgcaga

SEQ ID NO: 3991882 - DNA, 25 bp, Homo sapien
ttcccggctgtgccgtggcctccgg

SEQ ID NO: 3991883 - DNA, 25 bp, Homo sapien
gcttggctttgtccagtggaggccg

SEQ ID NO: 3991884 - DNA, 25 bp, Homo sapien
cccgtgtctgcagtcctcgcagaag

SEQ ID NO: 3991885 - DNA, 25 bp, Homo sapien
cgagtgcatcatggccacacgcagc

SEQ ID NO: 3991886 - DNA, 25 bp, Homo sapien
tgtcacagccgagtgcatcatggcc

SEQ ID NO: 3991887 - DNA, 25 bp, Homo sapien
cacagcagatgcctagtgagatagc

SEQ ID NO: 3991888 - DNA, 25 bp, Homo sapien
gtcgagcagtgtccatgtcacagcc

SEQ ID NO: 3991889 - DNA, 25 bp, Homo sapien
tgaggacacagccccatgtcaggca

SEQ ID NO: 3991890 - DNA, 25 bp, Homo sapien
ggacacagccccatgtcaggcacac

SEQ ID NO: 3991891 - DNA, 25 bp, Homo sapien
gaccacagagggcctgaggacacag

SEQ ID NO: 3991892 - DNA, 25 bp, Homo sapien
tggggccagggaccacagagggcct

SEQ ID NO: 3991893 - DNA, 25 bp, Homo sapien
agagatgctgcctgctgcaccctag

SEQ ID NO: 3991894 - DNA, 25 bp, Homo sapien
cttctggctttcccgtggaggcaga

SEQ ID NO: 3991895 - DNA, 25 bp, Homo sapien
ctttcccgtggaggcagagatgctg

SEQ ID NO: 3991896 - DNA, 25 bp, Homo sapien
gctgcctgctgcaccctagacccac

SEQ ID NO: 3991897 - DNA, 25 bp, Homo sapien
gaggaagtgcactgcgtccccctcg

SEQ ID NO: 3991898 - DNA, 25 bp, Homo sapien
agtgcactgcgtccccctcgggtat

SEQ ID NO: 3991899 - DNA, 25 bp, Homo sapien
gaagtgcactgcgtccccctcgggt

SEQ ID NO: 3991900 - DNA, 25 bp, Homo sapien
aggaagtgcactgcgtccccctcgg

SEQ ID NO: 3991901 - DNA, 25 bp, Homo sapien
tgcacacgccctaggagcaggagct

SEQ ID NO: 3991902 - DNA, 25 bp, Homo sapien
ctgcacacgccctaggagcaggagc

SEQ ID NO: 3991903 - DNA, 25 bp, Homo sapien
ggtcctgtccactccggatggggta

SEQ ID NO: 3991904 - DNA, 25 bp, Homo sapien
tggctgcattgctgtccagggccgt

SEQ ID NO: 3991905 - DNA, 25 bp, Homo sapien
gtaggagagcccatagggagcccca

SEQ ID NO: 3991906 - DNA, 25 bp, Homo sapien
ccatagggagccccatagctcttgg

SEQ ID NO: 3991907 - DNA, 25 bp, Homo sapien
ttgctaccatagatcacagggccgg

SEQ ID NO: 3991908 - DNA, 25 bp, Homo sapien
taattccactaatgctctgagcggg

SEQ ID NO: 3991909 - DNA, 25 bp, Homo sapien
cagtctcagataattacagccgcag

SEQ ID NO: 3991910 - DNA, 25 bp, Homo sapien
ggttgtgtggcaataacctccccgc

SEQ ID NO: 3991911 - DNA, 25 bp, Homo sapien
acctctctgggagtagaggagccaa

SEQ ID NO: 3991912 - DNA, 25 bp, Homo sapien
ctgggagtagaggagccaacacagg

SEQ ID NO: 3991913 - DNA, 25 bp, Homo sapien
aaaacctctctgggagtagaggagc

SEQ ID NO: 3991914 - DNA, 25 bp, Homo sapien
ccccacgggatgtgggtgtcatttc

SEQ ID NO: 3991915 - DNA, 25 bp, Homo sapien
ctccccaagtgagggcttcgaaggt

SEQ ID NO: 3991916 - DNA, 25 bp, Homo sapien
ctcgggagagcggagccacggccgt

SEQ ID NO: 3991917 - DNA, 25 bp, Homo sapien
ggagccacggccgtcccatctgcag

SEQ ID NO: 3991918 - DNA, 25 bp, Homo sapien
ctgagggctccccaagtgagggctt

SEQ ID NO: 3991919 - DNA, 25 bp, Homo sapien
aagggtgcatgggacgccctctgtg

SEQ ID NO: 3991920 - DNA, 25 bp, Homo sapien
cgaagggtgcatgggacgccctctg

SEQ ID NO: 3991921 - DNA, 25 bp, Homo sapien
tgcatgggacgccctctgtgaggac

SEQ ID NO: 3991922 - DNA, 25 bp, Homo sapien
gggtgcatgggacgccctctgtgag

SEQ ID NO: 3991923 - DNA, 25 bp, Homo sapien
tggcaggcggctcgtctggagtgca

SEQ ID NO: 3991924 - DNA, 25 bp, Homo sapien
agggcgtctggacaggcagcaggca

SEQ ID NO: 3991925 - DNA, 25 bp, Homo sapien
atggaggaagggcgtctggacaggt

SEQ ID NO: 3991926 - DNA, 25 bp, Homo sapien
ggtggcaggcggctcgtctggagtg

SEQ ID NO: 3991927 - DNA, 25 bp, Homo sapien
ggttcacggcgatgcattcggagca

SEQ ID NO: 3991928 - DNA, 25 bp, Homo sapien
cagctggagagttccgctggccaga

SEQ ID NO: 3991929 - DNA, 25 bp, Homo sapien
gtcactgttccctgtaagtcagaca

SEQ ID NO: 3991930 - DNA, 25 bp, Homo sapien
tgccaatggagacacagtgacggcc

SEQ ID NO: 3991931 - DNA, 25 bp, Homo sapien
aggagggcaagaccgcctgcacgca

SEQ ID NO: 3991932 - DNA, 25 bp, Homo sapien
gggtcattgtggcagctgggccaca

SEQ ID NO: 3991933 - DNA, 25 bp, Homo sapien
cctggtagggagacggccaggtctt

SEQ ID NO: 3991934 - DNA, 25 bp, Homo sapien
caggcagcgtcatcggggtcattgt

SEQ ID NO: 3991935 - DNA, 25 bp, Homo sapien
tcccctggtgagagggcacgtcctt

SEQ ID NO: 3991936 - DNA, 25 bp, Homo sapien
ctcccctggtgagagggcacgtcct

SEQ ID NO: 3991937 - DNA, 25 bp, Homo sapien
gaaagataagaaaacggtgccatgg

SEQ ID NO: 3991938 - DNA, 25 bp, Homo sapien
aagataagaaaacggtgccatgggg

SEQ ID NO: 3991939 - DNA, 25 bp, Homo sapien
ggaaagataagaaaacggtgccatg

SEQ ID NO: 3991940 - DNA, 25 bp, Homo sapien
gataagaaaacggtgccatggggtg

SEQ ID NO: 3991941 - DNA, 25 bp, Homo sapien
aggtgaataggacactgaagagtca

SEQ ID NO: 3991942 - DNA, 25 bp, Homo sapien
gtggtgggaggtgaataggacactg

SEQ ID NO: 3991943 - DNA, 25 bp, Homo sapien
aagagtcagtgggagcgtgggggcc

SEQ ID NO: 3991944 - DNA, 25 bp, Homo sapien
tgggaggtgaataggacactgaaga

SEQ ID NO: 3991945 - DNA, 25 bp, Homo sapien
ggagctggcactgacaccgaggcag

SEQ ID NO: 3991946 - DNA, 25 bp, Homo sapien
ctcccggatatctctggagctggca

SEQ ID NO: 3991947 - DNA, 25 bp, Homo sapien
aggcagggatcggtctgagcctggg

SEQ ID NO: 3991948 - DNA, 25 bp, Homo sapien
cctctgcaggggacctgtccggcct

SEQ ID NO: 3991949 - DNA, 25 bp, Homo sapien
cacattctgctgtgcggatcgggca

SEQ ID NO: 3991950 - DNA, 25 bp, Homo sapien
gggaaccgggcgcacattgtctgcc

SEQ ID NO: 3991951 - DNA, 25 bp, Homo sapien
atgccgcgcggcctctgaatggacg

SEQ ID NO: 3991952 - DNA, 25 bp, Homo sapien
ggtccatgtcccgtatcagctgcgg

SEQ ID NO: 3991953 - DNA, 25 bp, Homo sapien
gtgctcggtcatgggactcgctgcc

SEQ ID NO: 3991954 - DNA, 25 bp, Homo sapien
tgtccagcatcctgtgaacggagtc

SEQ ID NO: 3991955 - DNA, 25 bp, Homo sapien
actcgctgccggctgtctggagagc

SEQ ID NO: 3991956 - DNA, 25 bp, Homo sapien
agtctgccggacgtctccacgagct

SEQ ID NO: 3991957 - DNA, 25 bp, Homo sapien
catgatgatcctgcaggattccaga

SEQ ID NO: 3991958 - DNA, 25 bp, Homo sapien
tgctgttattaatgggctcaagctg

SEQ ID NO: 3991959 - DNA, 25 bp, Homo sapien
tgtgatccagtttagggtttcatga

SEQ ID NO: 3991960 - DNA, 25 bp, Homo sapien
gattccagacaggacgatgacgcgg

SEQ ID NO: 3991961 - DNA, 25 bp, Homo sapien
agtattgagagaggaaactcggtca

SEQ ID NO: 3991962 - DNA, 25 bp, Homo sapien
ggcggcaccccagagtattgagaga

SEQ ID NO: 3991963 - DNA, 25 bp, Homo sapien
cctgtgaggcggcaccccagagtat

SEQ ID NO: 3991964 - DNA, 25 bp, Homo sapien
ccccagagtattgagagaggaaact

SEQ ID NO: 3991965 - DNA, 25 bp, Homo sapien
gtctgttcctgcgacaccgcacaca

SEQ ID NO: 3991966 - DNA, 25 bp, Homo sapien
gttcctgcgacaccgcacacagatg

SEQ ID NO: 3991967 - DNA, 25 bp, Homo sapien
gcgtctgttcctgcgacaccgcaca

SEQ ID NO: 3991968 - DNA, 25 bp, Homo sapien
ggccgcgtctgttcctgcgacaccg

SEQ ID NO: 3991969 - DNA, 25 bp, Homo sapien
gatgaaaagtggacgaggaatccct

SEQ ID NO: 3991970 - DNA, 25 bp, Homo sapien
tgcggattcgcagcgtttccagctg

SEQ ID NO: 3991971 - DNA, 25 bp, Homo sapien
cctgtgcgtttgctatgtgggccca

SEQ ID NO: 3991972 - DNA, 25 bp, Homo sapien
cagctgggaagtatcaggaggaatt

SEQ ID NO: 3991973 - DNA, 25 bp, Homo sapien
gccttgggcaccaggagtgcccggg

SEQ ID NO: 3991974 - DNA, 25 bp, Homo sapien
ggccttgggcaccaggagtgcccgg

SEQ ID NO: 3991975 - DNA, 25 bp, Homo sapien
agtgcccggggcagtgggtttgcct

SEQ ID NO: 3991976 - DNA, 25 bp, Homo sapien
agtgggtttgcctggcggctgcctc

SEQ ID NO: 3991977 - DNA, 25 bp, Homo sapien
gatttcccaccgaagtgtctgtgca

SEQ ID NO: 3991978 - DNA, 25 bp, Homo sapien
gagtgatttcccaccgaagtgtctg

SEQ ID NO: 3991979 - DNA, 25 bp, Homo sapien
tgatttcccaccgaagtgtctgtgc

SEQ ID NO: 3991980 - DNA, 25 bp, Homo sapien
ttcccaccgaagtgtctgtgcacat

SEQ ID NO: 3991981 - DNA, 25 bp, Homo sapien
gttgggggcgttgacatccagaagg

SEQ ID NO: 3991982 - DNA, 25 bp, Homo sapien
ttgggggcgttgacatccagaagga

SEQ ID NO: 3991983 - DNA, 25 bp, Homo sapien
cctgcaggggaatggccgttggggg

SEQ ID NO: 3991984 - DNA, 25 bp, Homo sapien
tgggggcgttgacatccagaaggag

SEQ ID NO: 3991985 - DNA, 25 bp, Homo sapien
tctggttaccggctgccttgttgag

SEQ ID NO: 3991986 - DNA, 25 bp, Homo sapien
ttaccggctgccttgttgagcccct

SEQ ID NO: 3991987 - DNA, 25 bp, Homo sapien
tccctcagccgtgggcacagtgggc

SEQ ID NO: 3991988 - DNA, 25 bp, Homo sapien
ttgtgacctcatctggttaccggct

SEQ ID NO: 3991989 - DNA, 25 bp, Homo sapien
gccctcgccacgtgcccagcgtgct

SEQ ID NO: 3991990 - DNA, 25 bp, Homo sapien
cagcgtgctctggatggtgaggcag

SEQ ID NO: 3991991 - DNA, 25 bp, Homo sapien
gggcactgccctcgccacgtgccca

SEQ ID NO: 3991992 - DNA, 25 bp, Homo sapien
actgccctcgccacgtgcccagcgt

SEQ ID NO: 3991993 - DNA, 25 bp, Homo sapien
tctgacaagcatacaggggaccctg

SEQ ID NO: 3991994 - DNA, 25 bp, Homo sapien
tgacaagcatacaggggaccctggg

SEQ ID NO: 3991995 - DNA, 25 bp, Homo sapien
tgtgtcctgcgtccccctccctttg

SEQ ID NO: 3991996 - DNA, 25 bp, Homo sapien
agtggctctgacaagcatacagggg

SEQ ID NO: 3991997 - DNA, 25 bp, Homo sapien
ccagtggaaggctggggatgtccgg

SEQ ID NO: 3991998 - DNA, 25 bp, Homo sapien
ccgtgccagtggaaggctggggatg

SEQ ID NO: 3991999 - DNA, 25 bp, Homo sapien
cagccgtgccagtggaaggctgggg

SEQ ID NO: 3992000 - DNA, 25 bp, Homo sapien
ggggatgtccgggaggagccaccca

SEQ ID NO: 3992001 - DNA, 25 bp, Homo sapien
taaacctggaactttgcgtgctggt

SEQ ID NO: 3992002 - DNA, 25 bp, Homo sapien
ggcgtttgtcagaacttagcgtttg

SEQ ID NO: 3992003 - DNA, 25 bp, Homo sapien
tgcagtgacctaatagtaaacctgg

SEQ ID NO: 3992004 - DNA, 25 bp, Homo sapien
accccacgggaccagtaatgcttct

SEQ ID NO: 3992005 - DNA, 25 bp, Homo sapien
gtggcgcggcatccgggagcacaga

SEQ ID NO: 3992006 - DNA, 25 bp, Homo sapien
gttggtgtagtggcgcggcatccgg

SEQ ID NO: 3992007 - DNA, 25 bp, Homo sapien
gtagtggcgcggcatccgggagcac

SEQ ID NO: 3992008 - DNA, 25 bp, Homo sapien
acagatttatattcacgttcaccat

SEQ ID NO: 3992009 - DNA, 25 bp, Homo sapien
gcttctttccgagatgtggccgtcc

SEQ ID NO: 3992010 - DNA, 25 bp, Homo sapien
tttccgagatgtggccgtcctctgc

SEQ ID NO: 3992011 - DNA, 25 bp, Homo sapien
agcacccacgaatggcttctttccg

SEQ ID NO: 3992012 - DNA, 25 bp, Homo sapien
cacgaatggcttctttccgagatgt

SEQ ID NO: 3992013 - DNA, 25 bp, Homo sapien
agatagagctcatgcgccatgagcc

SEQ ID NO: 3992014 - DNA, 25 bp, Homo sapien
gagctcatgcgccatgagccacgct

SEQ ID NO: 3992015 - DNA, 25 bp, Homo sapien
gatggcgaagtgctcctcataggag

SEQ ID NO: 3992016 - DNA, 25 bp, Homo sapien
cacgctgcatcagatagggccgagg

SEQ ID NO: 3992017 - DNA, 25 bp, Homo sapien
attggtaaaatgtgtcttcaaggcc

SEQ ID NO: 3992018 - DNA, 25 bp, Homo sapien
tttcatgctatcagaggtctgcgtg

SEQ ID NO: 3992019 - DNA, 25 bp, Homo sapien
gatgttcctacgaacatctgtttgt

SEQ ID NO: 3992020 - DNA, 25 bp, Homo sapien
tctgtttgtggctgaaattcgaccc

SEQ ID NO: 3992021 - DNA, 25 bp, Homo sapien
gcgcagacgttaccctcccaggaaa

SEQ ID NO: 3992022 - DNA, 25 bp, Homo sapien
acagcggtcacacccttgctaagct

SEQ ID NO: 3992023 - DNA, 25 bp, Homo sapien
cttgctgacgggcagcctcactgga

SEQ ID NO: 3992024 - DNA, 25 bp, Homo sapien
agcctcactggagcgcagacgttac

SEQ ID NO: 3992025 - DNA, 25 bp, Homo sapien
cggtgtcagcggacatcccgttcat

SEQ ID NO: 3992026 - DNA, 25 bp, Homo sapien
agagcggccgctgtcaccgaggcaa

SEQ ID NO: 3992027 - DNA, 25 bp, Homo sapien
tcaccgaggcaatggccagatcagg

SEQ ID NO: 3992028 - DNA, 25 bp, Homo sapien
ggctccaccggtccctgtgtctatg

SEQ ID NO: 3992029 - DNA, 25 bp, Homo sapien
gggcctgacacggctctgcaggtct

SEQ ID NO: 3992030 - DNA, 25 bp, Homo sapien
agaccctagcggcagccgctgaggc

SEQ ID NO: 3992031 - DNA, 25 bp, Homo sapien
tgcagtccagccatacacgtatcca

SEQ ID NO: 3992032 - DNA, 25 bp, Homo sapien
aaacgtttggcacatgtacctggca

SEQ ID NO: 3992033 - DNA, 25 bp, Homo sapien
ccagtgcgatgatgtgggtccccag

SEQ ID NO: 3992034 - DNA, 25 bp, Homo sapien
agtgcaatgtcgttgggtccccagc

SEQ ID NO: 3992035 - DNA, 25 bp, Homo sapien
gctcggctgttttcctattgtcatg

SEQ ID NO: 3992036 - DNA, 25 bp, Homo sapien
gaccccatgggccagtgcgatgatg

SEQ ID NO: 3992037 - DNA, 25 bp, Homo sapien
cagagccagggtcggacgctgtgcc

SEQ ID NO: 3992038 - DNA, 25 bp, Homo sapien
gccagggtcggacgctgtgccgcac

SEQ ID NO: 3992039 - DNA, 25 bp, Homo sapien
gagccagggtcggacgctgtgccgc

SEQ ID NO: 3992040 - DNA, 25 bp, Homo sapien
cagggtcggacgctgtgccgcacgc

SEQ ID NO: 3992041 - DNA, 25 bp, Homo sapien
cggggtgactgtggcgcagcgtgtg

SEQ ID NO: 3992042 - DNA, 25 bp, Homo sapien
ccatctctggtacggggtgactgtg

SEQ ID NO: 3992043 - DNA, 25 bp, Homo sapien
tgcccatctctggtacggggtgact

SEQ ID NO: 3992044 - DNA, 25 bp, Homo sapien
tctgtgcccatctctggtacggggt

SEQ ID NO: 3992045 - DNA, 25 bp, Homo sapien
caaggcaggaggacgctcggtttcc

SEQ ID NO: 3992046 - DNA, 25 bp, Homo sapien
cctgggcggtcctttgtccactgtc

SEQ ID NO: 3992047 - DNA, 25 bp, Homo sapien
caggaggacgctcggtttcccatct

SEQ ID NO: 3992048 - DNA, 25 bp, Homo sapien
ttcctgggcggtcctttgtccactg

SEQ ID NO: 3992049 - DNA, 25 bp, Homo sapien
tccacacctgagaagccagcagggc

SEQ ID NO: 3992050 - DNA, 25 bp, Homo sapien
cgctggactggggacgctgctgcat

SEQ ID NO: 3992051 - DNA, 25 bp, Homo sapien
cagggcccacgctggactggggacg

SEQ ID NO: 3992052 - DNA, 25 bp, Homo sapien
agccagcagggcccacgctggactg

SEQ ID NO: 3992053 - DNA, 25 bp, Homo sapien
cgaagagtgggacggacactcagca

SEQ ID NO: 3992054 - DNA, 25 bp, Homo sapien
acccgatgaagagtgggacggacac

SEQ ID NO: 3992055 - DNA, 25 bp, Homo sapien
cacccgatgaagagtgggacggaca

SEQ ID NO: 3992056 - DNA, 25 bp, Homo sapien
cccgatgaagagtgggacggacact

SEQ ID NO: 3992057 - DNA, 25 bp, Homo sapien
acagctccacaagtgagtttaaagc

SEQ ID NO: 3992058 - DNA, 25 bp, Homo sapien
agtgagtttaaagccgggttgcaca

SEQ ID NO: 3992059 - DNA, 25 bp, Homo sapien
cacaagtgagtttaaagccgggttg

SEQ ID NO: 3992060 - DNA, 25 bp, Homo sapien
tttaaagccgggttgcacaggtgga

SEQ ID NO: 3992061 - DNA, 25 bp, Homo sapien
tgggccggcgcagggtgcggtgggc

SEQ ID NO: 3992062 - DNA, 25 bp, Homo sapien
cctccccggtggaggcctctgggct

SEQ ID NO: 3992063 - DNA, 25 bp, Homo sapien
gaggcctctgggctgtgggccggcg

SEQ ID NO: 3992064 - DNA, 25 bp, Homo sapien
gtgcggtgggctggtgaacacccat

SEQ ID NO: 3992065 - DNA, 25 bp, Homo sapien
cgttcacttgtggttcagggcggct

SEQ ID NO: 3992066 - DNA, 25 bp, Homo sapien
agttggcgtgaactgtcgccgttca

SEQ ID NO: 3992067 - DNA, 25 bp, Homo sapien
tcccaggcccgttggtctctcctgt

SEQ ID NO: 3992068 - DNA, 25 bp, Homo sapien
agggcggctgagcactgtggcgaag

SEQ ID NO: 3992069 - DNA, 25 bp, Homo sapien
ggtacagcggttgtgtgcagtccac

SEQ ID NO: 3992070 - DNA, 25 bp, Homo sapien
ttgtgtgcagtccacactggccttc

SEQ ID NO: 3992071 - DNA, 25 bp, Homo sapien
agcggttgtgtgcagtccacactgg

SEQ ID NO: 3992072 - DNA, 25 bp, Homo sapien
tacagcggttgtgtgcagtccacac

SEQ ID NO: 3992073 - DNA, 25 bp, Homo sapien
tgttgagtcgtctgtgaacactccc

SEQ ID NO: 3992074 - DNA, 25 bp, Homo sapien
cctgttgagtcgtctgtgaacactc

SEQ ID NO: 3992075 - DNA, 25 bp, Homo sapien
tcctcctgttgagtcgtctgtgaac

SEQ ID NO: 3992076 - DNA, 25 bp, Homo sapien
tgagtcgtctgtgaacactcccagg

SEQ ID NO: 3992077 - DNA, 25 bp, Homo sapien
ccagagcccagtctgtctgagcagc

SEQ ID NO: 3992078 - DNA, 25 bp, Homo sapien
catggacagagggcggctgtgcttc

SEQ ID NO: 3992079 - DNA, 25 bp, Homo sapien
cctggcttctctccgtgcccccagg

SEQ ID NO: 3992080 - DNA, 25 bp, Homo sapien
ccagtctgtctgagcagcaatgccc

SEQ ID NO: 3992081 - DNA, 25 bp, Homo sapien
ttcgtaaaaaacacacatggcctcg

SEQ ID NO: 3992082 - DNA, 25 bp, Homo sapien
catggcctcgccatcgtgggtaaaa

SEQ ID NO: 3992083 - DNA, 25 bp, Homo sapien
tcttgaaagctgcatcgagaacccg

SEQ ID NO: 3992084 - DNA, 25 bp, Homo sapien
cagtatgaacgcacaggagagtccc

SEQ ID NO: 3992085 - DNA, 25 bp, Homo sapien
aagtgactgctgtccgctgcggaat

SEQ ID NO: 3992086 - DNA, 25 bp, Homo sapien
cctggaccgggtgaaggcattagct

SEQ ID NO: 3992087 - DNA, 25 bp, Homo sapien
gaacactacagagttcctggaccgg

SEQ ID NO: 3992088 - DNA, 25 bp, Homo sapien
gggataaatactaccactgcaagtg

SEQ ID NO: 3992089 - DNA, 25 bp, Homo sapien
cgtggtgaaaatagtcccgtgttgc

SEQ ID NO: 3992090 - DNA, 25 bp, Homo sapien
gggagcggcctcctgtatagcctgt

SEQ ID NO: 3992091 - DNA, 25 bp, Homo sapien
aacactaagccgttcattgagagga

SEQ ID NO: 3992092 - DNA, 25 bp, Homo sapien
gatcaagctcattagaaatcctgga

SEQ ID NO: 3992093 - DNA, 25 bp, Homo sapien
tgcggtcctagttcggaagaaactg

SEQ ID NO: 3992094 - DNA, 25 bp, Homo sapien
gaaataatcagagcgaagccctcgg

SEQ ID NO: 3992095 - DNA, 25 bp, Homo sapien
ggcctatgggatccgctgatgcgca

SEQ ID NO: 3992096 - DNA, 25 bp, Homo sapien
gaaactgctttccaccgcgggaaga

SEQ ID NO: 3992097 - DNA, 25 bp, Homo sapien
cgaatccgccccgaggcgaggcggg

SEQ ID NO: 3992098 - DNA, 25 bp, Homo sapien
gcgcgtccgaatccgccccgaggcg

SEQ ID NO: 3992099 - DNA, 25 bp, Homo sapien
ccaagcgcgtccgaatccgccccga

SEQ ID NO: 3992100 - DNA, 25 bp, Homo sapien
aagcgcgtccgaatccgccccgagg

SEQ ID NO: 3992101 - DNA, 25 bp, Homo sapien
tgtcgctgcggttccttcccgcggg

SEQ ID NO: 3992102 - DNA, 25 bp, Homo sapien
ctgtcgctgcggttccttcccgcgg

SEQ ID NO: 3992103 - DNA, 25 bp, Homo sapien
ctcctggcggctgtcgctgcggttc

SEQ ID NO: 3992104 - DNA, 25 bp, Homo sapien
ggcggctgtcgctgcggttccttcc

SEQ ID NO: 3992105 - DNA, 25 bp, Homo sapien
atgatacaaagcgactcgcgcccac

SEQ ID NO: 3992106 - DNA, 25 bp, Homo sapien
ctgcaaaaatagattcgcccccacc

SEQ ID NO: 3992107 - DNA, 25 bp, Homo sapien
attgatgatacaaagcgactcgcgc

SEQ ID NO: 3992108 - DNA, 25 bp, Homo sapien
tgatgatacaaagcgactcgcgccc

SEQ ID NO: 3992109 - DNA, 25 bp, Homo sapien
ccgcgccgccgccgcacgggctgac

SEQ ID NO: 3992110 - DNA, 25 bp, Homo sapien
agcagccgcgtgatcttctcgtcgt

SEQ ID NO: 3992111 - DNA, 25 bp, Homo sapien
gccggttgtattcgtcgtcgtcctc

SEQ ID NO: 3992112 - DNA, 25 bp, Homo sapien
cagcgccaagttcgagggtttgtgc

SEQ ID NO: 3992113 - DNA, 25 bp, Homo sapien
ggtttgtgcttcttgagcagccgcg

SEQ ID NO: 3992114 - DNA, 25 bp, Homo sapien
aaggtcgggcgcgagtgcttcttct

SEQ ID NO: 3992115 - DNA, 25 bp, Homo sapien
agcgagtaggcgagacgcgcgcgct

SEQ ID NO: 3992116 - DNA, 25 bp, Homo sapien
gctctcggtcatgcccagcgagtag

SEQ ID NO: 3992117 - DNA, 25 bp, Homo sapien
gtccttgtccaggacgccgccggcc

SEQ ID NO: 3992118 - DNA, 25 bp, Homo sapien
taaacgccggcggacgacgcgagcc

SEQ ID NO: 3992119 - DNA, 25 bp, Homo sapien
cacagcggccgcgggcccgaagtaa

SEQ ID NO: 3992120 - DNA, 25 bp, Homo sapien
agcgcgggcgccttgaagccggccg

SEQ ID NO: 3992121 - DNA, 25 bp, Homo sapien
cccaggatgtcgctgatgccgtgcg

SEQ ID NO: 3992122 - DNA, 25 bp, Homo sapien
gaacagcgacgtcttcatctcggcc

SEQ ID NO: 3992123 - DNA, 25 bp, Homo sapien
acgcgcccgggcggttagtgtccat

SEQ ID NO: 3992124 - DNA, 25 bp, Homo sapien
actgctcagcacgaacgcgcccggg

SEQ ID NO: 3992125 - DNA, 25 bp, Homo sapien
ggccatgttgtgcagcgcggccagc

SEQ ID NO: 3992126 - DNA, 25 bp, Homo sapien
ccgctcctggatggcggcttggaaa

SEQ ID NO: 3992127 - DNA, 25 bp, Homo sapien
ccagcgtccgttttcgttttgtgca

SEQ ID NO: 3992128 - DNA, 25 bp, Homo sapien
tgacgtctcgtattgatttagggac

SEQ ID NO: 3992129 - DNA, 25 bp, Homo sapien
caaacgctccgacgtctgtggtgac

SEQ ID NO: 3992130 - DNA, 25 bp, Homo sapien
ttcccccgtcgactccgcactcgat

SEQ ID NO: 3992131 - DNA, 25 bp, Homo sapien
cccgtcgactccgcactcgattcga

SEQ ID NO: 3992132 - DNA, 25 bp, Homo sapien
ttcgcttcccccgtcgactccgcac

SEQ ID NO: 3992133 - DNA, 25 bp, Homo sapien
ctgaggtgcagccccgcgttcacgg

SEQ ID NO: 3992134 - DNA, 25 bp, Homo sapien
gtctttgcctgggctccgccgcccg

SEQ ID NO: 3992135 - DNA, 25 bp, Homo sapien
tctttgcctgggctccgccgcccgg

SEQ ID NO: 3992136 - DNA, 25 bp, Homo sapien
tgcctggagaggtccgcgatgccac

SEQ ID NO: 3992137 - DNA, 25 bp, Homo sapien
cagatgtcccgcgaggaaggctgcc

SEQ ID NO: 3992138 - DNA, 25 bp, Homo sapien
ctggcccgcgagcagatgtcccgcg

SEQ ID NO: 3992139 - DNA, 25 bp, Homo sapien
ccgcgagcagatgtcccgcgaggaa

SEQ ID NO: 3992140 - DNA, 25 bp, Homo sapien
aaggctgccggcatcggcgccgacg

SEQ ID NO: 3992141 - DNA, 25 bp, Homo sapien
gtccggggggtgcaccgtgaacgca

SEQ ID NO: 3992142 - DNA, 25 bp, Homo sapien
gtcagagcagcaaacgcgctccccc

SEQ ID NO: 3992143 - DNA, 25 bp, Homo sapien
gtgcaccgtgaacgcagcgggctcc

SEQ ID NO: 3992144 - DNA, 25 bp, Homo sapien
aggagagccggcctaggccccggtg

SEQ ID NO: 3992145 - DNA, 25 bp, Homo sapien
ggaggagcaggtactgtggaggtgc

SEQ ID NO: 3992146 - DNA, 25 bp, Homo sapien
agcaggtactgtggaggtgcctcca

SEQ ID NO: 3992147 - DNA, 25 bp, Homo sapien
ggagcaggtactgtggaggtgcctc

SEQ ID NO: 3992148 - DNA, 25 bp, Homo sapien
cgggaggagcaggtactgtggaggt

SEQ ID NO: 3992149 - DNA, 25 bp, Homo sapien
tgacgtgacacaacagtcccgttag

SEQ ID NO: 3992150 - DNA, 25 bp, Homo sapien
cgttctccaccgctgtgacgtgaca

SEQ ID NO: 3992151 - DNA, 25 bp, Homo sapien
tctttggacacattgcactggttga

SEQ ID NO: 3992152 - DNA, 25 bp, Homo sapien
aattctggtttaacatggctccgcg

SEQ ID NO: 3992153 - DNA, 25 bp, Homo sapien
cggtctgaatagtcttctggtctaa

SEQ ID NO: 3992154 - DNA, 25 bp, Homo sapien
caggcctgcactacccgatggcttg

SEQ ID NO: 3992155 - DNA, 25 bp, Homo sapien
ggcagcccatacaggaccaagttga

SEQ ID NO: 3992156 - DNA, 25 bp, Homo sapien
tcaaaaacaggctcacggtctgaat

SEQ ID NO: 3992157 - DNA, 25 bp, Homo sapien
tgctctttacacgataagctcctgg

SEQ ID NO: 3992158 - DNA, 25 bp, Homo sapien
gaagccttcttagtcagggcagacc

SEQ ID NO: 3992159 - DNA, 25 bp, Homo sapien
caacaagcagggatccttgggaccg

SEQ ID NO: 3992160 - DNA, 25 bp, Homo sapien
gaacttgcaggtcatcgctgagcag

SEQ ID NO: 3992161 - DNA, 25 bp, Homo sapien
caacgaggaaccgtgatgctttccc

SEQ ID NO: 3992162 - DNA, 25 bp, Homo sapien
tggagctgtcaacgaggaaccgtga

SEQ ID NO: 3992163 - DNA, 25 bp, Homo sapien
gaaccgtgatgctttccctctgggt

SEQ ID NO: 3992164 - DNA, 25 bp, Homo sapien
gtgactggagctgtcaacgaggaac

SEQ ID NO: 3992165 - DNA, 25 bp, Homo sapien
tagttaacgtctggagtcccaggtc

SEQ ID NO: 3992166 - DNA, 25 bp, Homo sapien
ggtacagagacgcaggcaacttcca

SEQ ID NO: 3992167 - DNA, 25 bp, Homo sapien
caacttccaggcaagaacaagccct

SEQ ID NO: 3992168 - DNA, 25 bp, Homo sapien
ggagaagcggagacacctgtccctg

SEQ ID NO: 3992169 - DNA, 25 bp, Homo sapien
aattggcttcccaacggccaacaga

SEQ ID NO: 3992170 - DNA, 25 bp, Homo sapien
gaaggagacgcactgtttctccaat

SEQ ID NO: 3992171 - DNA, 25 bp, Homo sapien
agacgcactgtttctccaattggct

SEQ ID NO: 3992172 - DNA, 25 bp, Homo sapien
ttggttcaccgcctcgtcgccactc

SEQ ID NO: 3992173 - DNA, 25 bp, Homo sapien
ttgctgaagggttgcgggacaggcc

SEQ ID NO: 3992174 - DNA, 25 bp, Homo sapien
ggttgcgggacaggcccgggatgcc

SEQ ID NO: 3992175 - DNA, 25 bp, Homo sapien
gagaaacgtcccctcaggagggcat

SEQ ID NO: 3992176 - DNA, 25 bp, Homo sapien
gtcccctcaggagggcatggacacc

SEQ ID NO: 3992177 - DNA, 25 bp, Homo sapien
aggatggccgcctcaacgggctcct

SEQ ID NO: 3992178 - DNA, 25 bp, Homo sapien
caggatgctcttgacgcccaccagg

SEQ ID NO: 3992179 - DNA, 25 bp, Homo sapien
tgcagcagcgtcggccactggtttg

SEQ ID NO: 3992180 - DNA, 25 bp, Homo sapien
ggatgctcttgacgcccaccaggct

SEQ ID NO: 3992181 - DNA, 25 bp, Homo sapien
acctcgccaactgctggaacgcatg

SEQ ID NO: 3992182 - DNA, 25 bp, Homo sapien
ttgtgggtcccacgcccgtctgtct

SEQ ID NO: 3992183 - DNA, 25 bp, Homo sapien
ctgctggaacgcatgtgcaccctga

SEQ ID NO: 3992184 - DNA, 25 bp, Homo sapien
agctctcaccgttcttgaaacccga

SEQ ID NO: 3992185 - DNA, 25 bp, Homo sapien
tctccatcctcagcatccctgccca

SEQ ID NO: 3992186 - DNA, 25 bp, Homo sapien
ctccatcctcagcatccctgcccac

SEQ ID NO: 3992187 - DNA, 25 bp, Homo sapien
ctctccatcctcagcatccctgccc

SEQ ID NO: 3992188 - DNA, 25 bp, Homo sapien
ggtccagcaggactgccacctggca

SEQ ID NO: 3992189 - DNA, 25 bp, Homo sapien
gctctggtaggaccgcgccaggtcc

SEQ ID NO: 3992190 - DNA, 25 bp, Homo sapien
tccatgtgcctcttcaagctctggt

SEQ ID NO: 3992191 - DNA, 25 bp, Homo sapien
cttcaagctctggtaggaccgcgcc

SEQ ID NO: 3992192 - DNA, 25 bp, Homo sapien
gccccaagggcgcagcagggcatgg

SEQ ID NO: 3992193 - DNA, 25 bp, Homo sapien
gccacagtggacctcgccagcctca

SEQ ID NO: 3992194 - DNA, 25 bp, Homo sapien
gggcatggcacgctggccactcagc

SEQ ID NO: 3992195 - DNA, 25 bp, Homo sapien
catgaccgtcaggttttttccaggg

SEQ ID NO: 3992196 - DNA, 25 bp, Homo sapien
aagttcatggcgaccaatctctcca

SEQ ID NO: 3992197 - DNA, 25 bp, Homo sapien
cttgcaagttcatggcgaccaatct

SEQ ID NO: 3992198 - DNA, 25 bp, Homo sapien
tctccactaatatatgggacaggaa

SEQ ID NO: 3992199 - DNA, 25 bp, Homo sapien
ggcgaccaatctctccactaatata

SEQ ID NO: 3992200 - DNA, 25 bp, Homo sapien
cctgcgtggtccacgcctgtcccat

SEQ ID NO: 3992201 - DNA, 25 bp, Homo sapien
cgtgcgttcttaaagcaggccacat

SEQ ID NO: 3992202 - DNA, 25 bp, Homo sapien
tcctgcgtggtccacgcctgtccca

SEQ ID NO: 3992203 - DNA, 25 bp, Homo sapien
cagagtctgcgagtggtctctggag

SEQ ID NO: 3992204 - DNA, 25 bp, Homo sapien
ctgcagtgctgctggtgaagaggca

SEQ ID NO: 3992205 - DNA, 25 bp, Homo sapien
cctgctgctggaccatgtgctatca

SEQ ID NO: 3992206 - DNA, 25 bp, Homo sapien
accatgtgctatcagtgaccctggg

SEQ ID NO: 3992207 - DNA, 25 bp, Homo sapien
ccaaaatgtcttgggtgatggagac

SEQ ID NO: 3992208 - DNA, 25 bp, Homo sapien
gtgcttgcttcccagatgtcccgcc

SEQ ID NO: 3992209 - DNA, 25 bp, Homo sapien
ttccaaaatgtcttgggtgatggag

SEQ ID NO: 3992210 - DNA, 25 bp, Homo sapien
catcgcgacgtgaatgtgtcttgga

SEQ ID NO: 3992211 - DNA, 25 bp, Homo sapien
gcctcctcgtatgggtccacgacga

SEQ ID NO: 3992212 - DNA, 25 bp, Homo sapien
ggcctcctcgtatgggtccacgacg

SEQ ID NO: 3992213 - DNA, 25 bp, Homo sapien
aggagaaacgggagcacagggcggg

SEQ ID NO: 3992214 - DNA, 25 bp, Homo sapien
gtcaaggagaaacgggagcacaggg

SEQ ID NO: 3992215 - DNA, 25 bp, Homo sapien
ccggtcaaggagaaacgggagcaca

SEQ ID NO: 3992216 - DNA, 25 bp, Homo sapien
tcccggtcaaggagaaacgggagca

SEQ ID NO: 3992217 - DNA, 25 bp, Homo sapien
ctatgatgcagtcaggggggatggt

SEQ ID NO: 3992218 - DNA, 25 bp, Homo sapien
tatgatgcagtcaggggggatggtc

SEQ ID NO: 3992219 - DNA, 25 bp, Homo sapien
ccttcttcgctaggcttctcttttt

SEQ ID NO: 3992220 - DNA, 25 bp, Homo sapien
tcttcgctaggcttctctttttggg

SEQ ID NO: 3992221 - DNA, 25 bp, Homo sapien
ttcctgcccttcttcgctaggcttc

SEQ ID NO: 3992222 - DNA, 25 bp, Homo sapien
tgcccttcttcgctaggcttctctt

SEQ ID NO: 3992223 - DNA, 25 bp, Homo sapien
ctgttggatttgattgaggtaaccg

SEQ ID NO: 3992224 - DNA, 25 bp, Homo sapien
gttggatttgattgaggtaaccggc

SEQ ID NO: 3992225 - DNA, 25 bp, Homo sapien
ttctccatgaccagctgttggattt

SEQ ID NO: 3992226 - DNA, 25 bp, Homo sapien
tggatttgattgaggtaaccggccc

SEQ ID NO: 3992227 - DNA, 25 bp, Homo sapien
ccggagggaccagccacagttccga

SEQ ID NO: 3992228 - DNA, 25 bp, Homo sapien
gcggccggagggaccagccacagtt

SEQ ID NO: 3992229 - DNA, 25 bp, Homo sapien
ggagggaccagccacagttccgaga

SEQ ID NO: 3992230 - DNA, 25 bp, Homo sapien
gggaccagccacagttccgagaagg

SEQ ID NO: 3992231 - DNA, 25 bp, Homo sapien
ggaagcttcacaaccggggcacgtc

SEQ ID NO: 3992232 - DNA, 25 bp, Homo sapien
gcgcgctccctcgtgcttttcactg

SEQ ID NO: 3992233 - DNA, 25 bp, Homo sapien
cacgtaccgcaagggtagcgctcgg

SEQ ID NO: 3992234 - DNA, 25 bp, Homo sapien
atcccagccgaggtcagggccttcc

SEQ ID NO: 3992235 - DNA, 25 bp, Homo sapien
cttgataggagctaacattgtttca

SEQ ID NO: 3992236 - DNA, 25 bp, Homo sapien
tcttgataggagctaacattgtttc

SEQ ID NO: 3992237 - DNA, 25 bp, Homo sapien
ttatttcttgataggagctaacatt

SEQ ID NO: 3992238 - DNA, 25 bp, Homo sapien
tttcttgataggagctaacattgtt

SEQ ID NO: 3992239 - DNA, 25 bp, Homo sapien
tatcttatcggcaacctcaggctgg

SEQ ID NO: 3992240 - DNA, 25 bp, Homo sapien
tctcgtgacacagaggaaattgtcc

SEQ ID NO: 3992241 - DNA, 25 bp, Homo sapien
gtctgcgaccaggactatcttatcg

SEQ ID NO: 3992242 - DNA, 25 bp, Homo sapien
gaaattgtcccttcatcgaacacag

SEQ ID NO: 3992243 - DNA, 25 bp, Homo sapien
tgaatcggcaacaaccgcaggtgtc

SEQ ID NO: 3992244 - DNA, 25 bp, Homo sapien
tcgacttccctgaatcggcaacaac

SEQ ID NO: 3992245 - DNA, 25 bp, Homo sapien
ggcaacaaccgcaggtgtctgcact

SEQ ID NO: 3992246 - DNA, 25 bp, Homo sapien
tgtctttgcccttcgacttccctga

SEQ ID NO: 3992247 - DNA, 25 bp, Homo sapien
aggcaggcggcgccgagtcctgaac

SEQ ID NO: 3992248 - DNA, 25 bp, Homo sapien
acacgtgtccatgcgtgagcgtggt

SEQ ID NO: 3992249 - DNA, 25 bp, Homo sapien
gtcctgaacaaaggcggccgagaag

SEQ ID NO: 3992250 - DNA, 25 bp, Homo sapien
tggggtgccagcctcaacgtcatcc

SEQ ID NO: 3992251 - DNA, 25 bp, Homo sapien
gggccccaggacgctactgagcctc

SEQ ID NO: 3992252 - DNA, 25 bp, Homo sapien
aggctgagcagggggaatagcggct

SEQ ID NO: 3992253 - DNA, 25 bp, Homo sapien
gcagggggaatagcggctgcagaag

SEQ ID NO: 3992254 - DNA, 25 bp, Homo sapien
gggaatagcggctgcagaagctcct

SEQ ID NO: 3992255 - DNA, 25 bp, Homo sapien
tggctcggcaacgagggccccatag

SEQ ID NO: 3992256 - DNA, 25 bp, Homo sapien
ccgtagcaaacagggcgcatggccc

SEQ ID NO: 3992257 - DNA, 25 bp, Homo sapien
agaggcccccgtagcaaacagggcg

SEQ ID NO: 3992258 - DNA, 25 bp, Homo sapien
caaacagcatggtggacaagggcac

SEQ ID NO: 3992259 - DNA, 25 bp, Homo sapien
tctgcccgcaccacggagggtcctg

SEQ ID NO: 3992260 - DNA, 25 bp, Homo sapien
ctctgcccgcaccacggagggtcct

SEQ ID NO: 3992261 - DNA, 25 bp, Homo sapien
ggagcaagttctccccccacatgga

SEQ ID NO: 3992262 - DNA, 25 bp, Homo sapien
cagtgcccgggtgttgggatggccc

SEQ ID NO: 3992263 - DNA, 25 bp, Homo sapien
gcagagtggaccaggcccctcctgt

SEQ ID NO: 3992264 - DNA, 25 bp, Homo sapien
tgcttcagggatcagacatggccaa

SEQ ID NO: 3992265 - DNA, 25 bp, Homo sapien
atgttcagggccatgtcctcactgt

SEQ ID NO: 3992266 - DNA, 25 bp, Homo sapien
cgagcctatgttcagggccatgtcc

SEQ ID NO: 3992267 - DNA, 25 bp, Homo sapien
tcagggccatgtcctcactgtacac

SEQ ID NO: 3992268 - DNA, 25 bp, Homo sapien
tgttcagggccatgtcctcactgta

SEQ ID NO: 3992269 - DNA, 25 bp, Homo sapien
gccagacgcatcaccttgcaggagc

SEQ ID NO: 3992270 - DNA, 25 bp, Homo sapien
cttatggccagacgcatcaccttgc

SEQ ID NO: 3992271 - DNA, 25 bp, Homo sapien
ggacttatggccagacgcatcacct

SEQ ID NO: 3992272 - DNA, 25 bp, Homo sapien
gcagtgggacttatggccagacgca

SEQ ID NO: 3992273 - DNA, 25 bp, Homo sapien
accgcctgcacctttcctttggctg

SEQ ID NO: 3992274 - DNA, 25 bp, Homo sapien
aacttgggtttctcgtaggcagcgc

SEQ ID NO: 3992275 - DNA, 25 bp, Homo sapien
ttctcgtaggcagcgccgtacagac

SEQ ID NO: 3992276 - DNA, 25 bp, Homo sapien
ctgcagtaatgaacttgggtttctc

SEQ ID NO: 3992277 - DNA, 25 bp, Homo sapien
aactctgcagaccatggacgcccag

SEQ ID NO: 3992278 - DNA, 25 bp, Homo sapien
caactctgcagaccatggacgccca

SEQ ID NO: 3992279 - DNA, 25 bp, Homo sapien
aagaggatccaaaaggtcggaggca

SEQ ID NO: 3992280 - DNA, 25 bp, Homo sapien
cagtgacgcagagattttgccaagc

SEQ ID NO: 3992281 - DNA, 25 bp, Homo sapien
ttcaagaggttaaaatgctgctcag

SEQ ID NO: 3992282 - DNA, 25 bp, Homo sapien
caaaaggtcggaggcatctcattca

SEQ ID NO: 3992283 - DNA, 25 bp, Homo sapien
aagagccttcgtgaaccctcggcca

SEQ ID NO: 3992284 - DNA, 25 bp, Homo sapien
aggaagagccttcgtgaaccctcgg

SEQ ID NO: 3992285 - DNA, 25 bp, Homo sapien
ggaagagccttcgtgaaccctcggc

SEQ ID NO: 3992286 - DNA, 25 bp, Homo sapien
ggaggaagagccttcgtgaaccctc

SEQ ID NO: 3992287 - DNA, 25 bp, Homo sapien
agacctgaccaaggtgtaaaatatt

SEQ ID NO: 3992288 - DNA, 25 bp, Homo sapien
cttagacctgaccaaggtgtaaaat

SEQ ID NO: 3992289 - DNA, 25 bp, Homo sapien
tagacctgaccaaggtgtaaaatat

SEQ ID NO: 3992290 - DNA, 25 bp, Homo sapien
tgaacccttagacctgaccaaggtg

SEQ ID NO: 3992291 - DNA, 25 bp, Homo sapien
ctggctgtgcgtttgtagttgtgac

SEQ ID NO: 3992292 - DNA, 25 bp, Homo sapien
cttggagaggcgacccaggtgcaca

SEQ ID NO: 3992293 - DNA, 25 bp, Homo sapien
tgtagttgtgacctcgccaacctca

SEQ ID NO: 3992294 - DNA, 25 bp, Homo sapien
ttggagaggcgacccaggtgcacat

SEQ ID NO: 3992295 - DNA, 25 bp, Homo sapien
tcttggcaccggagctggtgctgta

SEQ ID NO: 3992296 - DNA, 25 bp, Homo sapien
gagctgctggtgttggctgtggctg

SEQ ID NO: 3992297 - DNA, 25 bp, Homo sapien
gctgcaagcaggacatccctcatcg

SEQ ID NO: 3992298 - DNA, 25 bp, Homo sapien
ctcatcgtctctgaggccgagcagc

SEQ ID NO: 3992299 - DNA, 25 bp, Homo sapien
gagcaggggaggtgtaccaggggcc

SEQ ID NO: 3992300 - DNA, 25 bp, Homo sapien
gggataagcacacgaatgcatgttc

SEQ ID NO: 3992301 - DNA, 25 bp, Homo sapien
ggtctccatgtctgcccgatgcagg

SEQ ID NO: 3992302 - DNA, 25 bp, Homo sapien
aactgctgggtctccgtgtctgccc

SEQ ID NO: 3992303 - DNA, 25 bp, Homo sapien
tctgtgaggtctgcacggacagggc

SEQ ID NO: 3992304 - DNA, 25 bp, Homo sapien
aggctcccactgcttaaggaccctg

SEQ ID NO: 3992305 - DNA, 25 bp, Homo sapien
gctcccactgcttaaggaccctggc

SEQ ID NO: 3992306 - DNA, 25 bp, Homo sapien
ccaaggcgagggccccagctgaagc

SEQ ID NO: 3992307 - DNA, 25 bp, Homo sapien
aaggcgagggccccagctgaagccc

SEQ ID NO: 3992308 - DNA, 25 bp, Homo sapien
ctaatggagtccccccaaggcgagg

SEQ ID NO: 3992309 - DNA, 25 bp, Homo sapien
ggcgagggccccagctgaagcccag

SEQ ID NO: 3992310 - DNA, 25 bp, Homo sapien
cagagccaggaactggcaggtagtt

SEQ ID NO: 3992311 - DNA, 25 bp, Homo sapien
aagggccacctgtaggcactgcagc

SEQ ID NO: 3992312 - DNA, 25 bp, Homo sapien
aactggcaggtagttgcagggtcca

SEQ ID NO: 3992313 - DNA, 25 bp, Homo sapien
ccagggtgccgacacactccaccat

SEQ ID NO: 3992314 - DNA, 25 bp, Homo sapien
actgctgggccagaaccatcctcct

SEQ ID NO: 3992315 - DNA, 25 bp, Homo sapien
gtactgctgggccagaaccatcctc

SEQ ID NO: 3992316 - DNA, 25 bp, Homo sapien
aggtactgctgggccagaaccatcc

SEQ ID NO: 3992317 - DNA, 25 bp, Homo sapien
ctgagccaggtactgctgggccaga

SEQ ID NO: 3992318 - DNA, 25 bp, Homo sapien
agaggccacacgaggggcaggaggg

SEQ ID NO: 3992319 - DNA, 25 bp, Homo sapien
gaggccacacgaggggcaggagggg

SEQ ID NO: 3992320 - DNA, 25 bp, Homo sapien
ttgaggccgctcagcttggcgccca

SEQ ID NO: 3992321 - DNA, 25 bp, Homo sapien
ctacctccagctccagagacttgag

SEQ ID NO: 3992322 - DNA, 25 bp, Homo sapien
cgggtccctgctggactttgtggca

SEQ ID NO: 3992323 - DNA, 25 bp, Homo sapien
tgctggactttgtggcaccctcttc

SEQ ID NO: 3992324 - DNA, 25 bp, Homo sapien
tcccagtagcaggtagggtgcacag

SEQ ID NO: 3992325 - DNA, 25 bp, Homo sapien
tgctagagtccgcttcagcgtgaac

SEQ ID NO: 3992326 - DNA, 25 bp, Homo sapien
tgccagtgccccgtgtgctagagtc

SEQ ID NO: 3992327 - DNA, 25 bp, Homo sapien
agcccacgctcagcggctgcaggct

SEQ ID NO: 3992328 - DNA, 25 bp, Homo sapien
cttcgaaaagacagacatgttacag

SEQ ID NO: 3992329 - DNA, 25 bp, Homo sapien
gtgagacaatgcccgggagctcccc

SEQ ID NO: 3992330 - DNA, 25 bp, Homo sapien
aaatggtgagacaatgcccgggagc

SEQ ID NO: 3992331 - DNA, 25 bp, Homo sapien
tgctgcaagaggtccccagctgacc

SEQ ID NO: 3992332 - DNA, 25 bp, Homo sapien
tggtgagacaatgcccgggagctcc

SEQ ID NO: 3992333 - DNA, 25 bp, Homo sapien
ctggaacgggggtcccatcagctgc

SEQ ID NO: 3992334 - DNA, 25 bp, Homo sapien
gtggagacggctcctgctggaacgg

SEQ ID NO: 3992335 - DNA, 25 bp, Homo sapien
ctccaccgggaatctgtgaccccag

SEQ ID NO: 3992336 - DNA, 25 bp, Homo sapien
cctccaccgggaatctgtgacccca

SEQ ID NO: 3992337 - DNA, 25 bp, Homo sapien
ccgacggaagtgtagtcactggtgt

SEQ ID NO: 3992338 - DNA, 25 bp, Homo sapien
ttccacgaggccgagcttgaggcgc

SEQ ID NO: 3992339 - DNA, 25 bp, Homo sapien
actggtgttctgcagatagtccgcc

SEQ ID NO: 3992340 - DNA, 25 bp, Homo sapien
gcttgaggcgcgccagcttcctcat

SEQ ID NO: 3992341 - DNA, 25 bp, Homo sapien
tgctaggagtgtttaccaggaatgg

SEQ ID NO: 3992342 - DNA, 25 bp, Homo sapien
cacaattgtgacgttagctctagct

SEQ ID NO: 3992343 - DNA, 25 bp, Homo sapien
catgtcaacacggaacacaggtgag

SEQ ID NO: 3992344 - DNA, 25 bp, Homo sapien
ttaaaatatatagggctactcaggc

SEQ ID NO: 3992345 - DNA, 25 bp, Homo sapien
tcttgactggttgagccgtttgcac

SEQ ID NO: 3992346 - DNA, 25 bp, Homo sapien
ttcttgtaggtagcccatagttggg

SEQ ID NO: 3992347 - DNA, 25 bp, Homo sapien
gatatcacttcacgcagagcataga

SEQ ID NO: 3992348 - DNA, 25 bp, Homo sapien
tcttttttccaaaatcggctgtgtg

SEQ ID NO: 3992349 - DNA, 25 bp, Homo sapien
tccttttacatcttcaccatttcta

SEQ ID NO: 3992350 - DNA, 25 bp, Homo sapien
ttctgttgctatgtctctaagttct

SEQ ID NO: 3992351 - DNA, 25 bp, Homo sapien
gtgcccattgatcaatttgcttttg

SEQ ID NO: 3992352 - DNA, 25 bp, Homo sapien
aatacagtgataacttgtcttccaa

SEQ ID NO: 3992353 - DNA, 25 bp, Homo sapien
gaagtgacaataggccctggacgct

SEQ ID NO: 3992354 - DNA, 25 bp, Homo sapien
aataggccctggacgctgtgaagcc

SEQ ID NO: 3992355 - DNA, 25 bp, Homo sapien
tgacaataggccctggacgctgtga

SEQ ID NO: 3992356 - DNA, 25 bp, Homo sapien
cttgaagtgacaataggccctggac

SEQ ID NO: 3992357 - DNA, 25 bp, Homo sapien
tgggccaggccatacgcttccaagt

SEQ ID NO: 3992358 - DNA, 25 bp, Homo sapien
caagtaatacgcagttttttgttct

SEQ ID NO: 3992359 - DNA, 25 bp, Homo sapien
ttcttcctcagctacggcaccctgg

SEQ ID NO: 3992360 - DNA, 25 bp, Homo sapien
catacgcttccaagtaatacgcagt

SEQ ID NO: 3992361 - DNA, 25 bp, Homo sapien
gatcttcgcacgctctagttttacg

SEQ ID NO: 3992362 - DNA, 25 bp, Homo sapien
tgaccgctgagtgctgcgcaactct

SEQ ID NO: 3992363 - DNA, 25 bp, Homo sapien
agcaacgagcactctgtgggttcag

SEQ ID NO: 3992364 - DNA, 25 bp, Homo sapien
tgcagccacagtcgataaactttct

SEQ ID NO: 3992365 - DNA, 25 bp, Homo sapien
ctggcttctagatctgtgatcatga

SEQ ID NO: 3992366 - DNA, 25 bp, Homo sapien
ggcttctagatctgtgatcatgaat

SEQ ID NO: 3992367 - DNA, 25 bp, Homo sapien
cagtaaaggcaatcggtttggtctt

SEQ ID NO: 3992368 - DNA, 25 bp, Homo sapien
gtgatcatgaattccagtaaaggca

SEQ ID NO: 3992369 - DNA, 25 bp, Homo sapien
ggtgctgggcctgtgcgatcatttt

SEQ ID NO: 3992370 - DNA, 25 bp, Homo sapien
gtgctgggcctgtgcgatcattttc

SEQ ID NO: 3992371 - DNA, 25 bp, Homo sapien
cagaactcctcacttccgcccaggt

SEQ ID NO: 3992372 - DNA, 25 bp, Homo sapien
gggtcagagtggaattgtaccagaa

SEQ ID NO: 3992373 - DNA, 25 bp, Homo sapien
gggcctctgcacaaggctcatccag

SEQ ID NO: 3992374 - DNA, 25 bp, Homo sapien
gcactgggcctctgcacaaggctca

SEQ ID NO: 3992375 - DNA, 25 bp, Homo sapien
actgggcctctgcacaaggctcatc

SEQ ID NO: 3992376 - DNA, 25 bp, Homo sapien
tgggcctctgcacaaggctcatcca

SEQ ID NO: 3992377 - DNA, 25 bp, Homo sapien
tgggacagaaatacagggcagactg

SEQ ID NO: 3992378 - DNA, 25 bp, Homo sapien
cacggatgctgagcggctcagagcc

SEQ ID NO: 3992379 - DNA, 25 bp, Homo sapien
gggcagccacatgatctgggacaga

SEQ ID NO: 3992380 - DNA, 25 bp, Homo sapien
ctggacacggatgctgagcggctca

SEQ ID NO: 3992381 - DNA, 25 bp, Homo sapien
attcctggcctctggaccaagcctg

SEQ ID NO: 3992382 - DNA, 25 bp, Homo sapien
tgggcatggctgtgaccgccagacg

SEQ ID NO: 3992383 - DNA, 25 bp, Homo sapien
ctgtgaccgccagacggcgtaggca

SEQ ID NO: 3992384 - DNA, 25 bp, Homo sapien
ctgagggtaggcaggtgggcgactg

SEQ ID NO: 3992385 - DNA, 25 bp, Homo sapien
ccatcgccggcctcggggagcaggt

SEQ ID NO: 3992386 - DNA, 25 bp, Homo sapien
ccggcctcggggagcaggttcagga

SEQ ID NO: 3992387 - DNA, 25 bp, Homo sapien
tcccatcgccggcctcggggagcag

SEQ ID NO: 3992388 - DNA, 25 bp, Homo sapien
cctcggggagcaggttcaggagagg

SEQ ID NO: 3992389 - DNA, 25 bp, Homo sapien
tgaaagcaactctaaaatctggaga

SEQ ID NO: 3992390 - DNA, 25 bp, Homo sapien
aaagcaactctaaaatctggagaga

SEQ ID NO: 3992391 - DNA, 25 bp, Homo sapien
gaaagcaactctaaaatctggagag

SEQ ID NO: 3992392 - DNA, 25 bp, Homo sapien
agcaactctaaaatctggagagaag

SEQ ID NO: 3992393 - DNA, 25 bp, Homo sapien
gcaggctggtacaggttcatctcca

SEQ ID NO: 3992394 - DNA, 25 bp, Homo sapien
gtaagcctccgacaggagcagccgt

SEQ ID NO: 3992395 - DNA, 25 bp, Homo sapien
gccgtgcaggctggtacaggttcat

SEQ ID NO: 3992396 - DNA, 25 bp, Homo sapien
tggaaagccaggtaagcctccgaca

SEQ ID NO: 3992397 - DNA, 25 bp, Homo sapien
ccttggcgtccagtggtttgatctc

SEQ ID NO: 3992398 - DNA, 25 bp, Homo sapien
tctcttttttcaacgcgatctcttt

SEQ ID NO: 3992399 - DNA, 25 bp, Homo sapien
cttggcgtccagtggtttgatctcc

SEQ ID NO: 3992400 - DNA, 25 bp, Homo sapien
ctcttttttcaacgcgatctctttt

SEQ ID NO: 3992401 - DNA, 25 bp, Homo sapien
ctggccatttgccacagcacgtcca

SEQ ID NO: 3992402 - DNA, 25 bp, Homo sapien
tctcctgtgccatgaacaccaggtc

SEQ ID NO: 3992403 - DNA, 25 bp, Homo sapien
tgtgccatgaacaccaggtcctggc

SEQ ID NO: 3992404 - DNA, 25 bp, Homo sapien
atttgccacagcacgtccagagagg

SEQ ID NO: 3992405 - DNA, 25 bp, Homo sapien
cagggcgttttcgtcctctgacctc

SEQ ID NO: 3992406 - DNA, 25 bp, Homo sapien
gtcacagcagaggtcaagacccagc

SEQ ID NO: 3992407 - DNA, 25 bp, Homo sapien
gaggtgccccttgccgccgagacgt

SEQ ID NO: 3992408 - DNA, 25 bp, Homo sapien
ggccacgcgcgttccaagtcgaggt

SEQ ID NO: 3992409 - DNA, 25 bp, Homo sapien
ggttccaatgttcagccgggctgca

SEQ ID NO: 3992410 - DNA, 25 bp, Homo sapien
agtgtggacacggttccaatgttca

SEQ ID NO: 3992411 - DNA, 25 bp, Homo sapien
gacacggttccaatgttcagccggg

SEQ ID NO: 3992412 - DNA, 25 bp, Homo sapien
tcagccgggctgcacagataactca

SEQ ID NO: 3992413 - DNA, 25 bp, Homo sapien
aacagtgtctgtttcaatgtaacgg

SEQ ID NO: 3992414 - DNA, 25 bp, Homo sapien
taacggcgaaatggccggaagagca

SEQ ID NO: 3992415 - DNA, 25 bp, Homo sapien
ggccggaagagcatgagtgaaaata

SEQ ID NO: 3992416 - DNA, 25 bp, Homo sapien
gtttcaatgtaacggcgaaatggcc

SEQ ID NO: 3992417 - DNA, 25 bp, Homo sapien
tggcctgctccagctcgctgacgca

SEQ ID NO: 3992418 - DNA, 25 bp, Homo sapien
ctggcctgctccagctcgctgacgc

SEQ ID NO: 3992419 - DNA, 25 bp, Homo sapien
cctgctccagctcgctgacgcacac

SEQ ID NO: 3992420 - DNA, 25 bp, Homo sapien
ggcctgctccagctcgctgacgcac

SEQ ID NO: 3992421 - DNA, 25 bp, Homo sapien
ccgaccgcctcttcatggcgcgcgg

SEQ ID NO: 3992422 - DNA, 25 bp, Homo sapien
tgcccgaccgcctcttcatggcgcg

SEQ ID NO: 3992423 - DNA, 25 bp, Homo sapien
ctgcccgaccgcctcttcatggcgc

SEQ ID NO: 3992424 - DNA, 25 bp, Homo sapien
gcccgaccgcctcttcatggcgcgc

SEQ ID NO: 3992425 - DNA, 25 bp, Homo sapien
ttctctcagcttcagctcggagcac

SEQ ID NO: 3992426 - DNA, 25 bp, Homo sapien
cttcagctcggagcacgcgtgggcg

SEQ ID NO: 3992427 - DNA, 25 bp, Homo sapien
cagctcggagcacgcgtgggcgagg

SEQ ID NO: 3992428 - DNA, 25 bp, Homo sapien
tctctcagcttcagctcggagcacg

SEQ ID NO: 3992429 - DNA, 25 bp, Homo sapien
cactccgaaaaaggagctgtaccca

SEQ ID NO: 3992430 - DNA, 25 bp, Homo sapien
ggaaatcacactccgaaaaaggagc

SEQ ID NO: 3992431 - DNA, 25 bp, Homo sapien
tcaactacagaattaataccttaac

SEQ ID NO: 3992432 - DNA, 25 bp, Homo sapien
cacagtcaactacagaattaatacc

SEQ ID NO: 3992433 - DNA, 25 bp, Homo sapien
tagagatccgacaggcccttgcttc

SEQ ID NO: 3992434 - DNA, 25 bp, Homo sapien
gaaccgtgagttcgtgcaggcacat

SEQ ID NO: 3992435 - DNA, 25 bp, Homo sapien
ttcccaccacggagtccgaaatcag

SEQ ID NO: 3992436 - DNA, 25 bp, Homo sapien
ccaactgcaggacgggaaccgtgag

SEQ ID NO: 3992437 - DNA, 25 bp, Homo sapien
tctggatacttgaggggttcacagt

SEQ ID NO: 3992438 - DNA, 25 bp, Homo sapien
cggcttctggatacttgaggggttc

SEQ ID NO: 3992439 - DNA, 25 bp, Homo sapien
gcttctggatacttgaggggttcac

SEQ ID NO: 3992440 - DNA, 25 bp, Homo sapien
tcagtacagacagcacttcctcggg

SEQ ID NO: 3992441 - DNA, 25 bp, Homo sapien
gctcatgggtaagtcttccagttgt

SEQ ID NO: 3992442 - DNA, 25 bp, Homo sapien
ccagttgtttgataggagctgggct

SEQ ID NO: 3992443 - DNA, 25 bp, Homo sapien
ctatgctcatgggtaagtcttccag

SEQ ID NO: 3992444 - DNA, 25 bp, Homo sapien
cttccagttgtttgataggagctgg

SEQ ID NO: 3992445 - DNA, 25 bp, Homo sapien
cagtgcacgcaaagctttctgcccc

SEQ ID NO: 3992446 - DNA, 25 bp, Homo sapien
gcaaagctttctgccccgtgcacag

SEQ ID NO: 3992447 - DNA, 25 bp, Homo sapien
cgcaaagctttctgccccgtgcaca

SEQ ID NO: 3992448 - DNA, 25 bp, Homo sapien
tgcacgcaaagctttctgccccgtg

SEQ ID NO: 3992449 - DNA, 25 bp, Homo sapien
tgcttgggctccttgactttctcct

SEQ ID NO: 3992450 - DNA, 25 bp, Homo sapien
tctctttactcctctcattctcctt

SEQ ID NO: 3992451 - DNA, 25 bp, Homo sapien
cttgtccttctctttactcctctca

SEQ ID NO: 3992452 - DNA, 25 bp, Homo sapien
attctccttctctttactcctctcc

SEQ ID NO: 3992453 - DNA, 25 bp, Homo sapien
agcaggatgtgcacgcgggccagcg

SEQ ID NO: 3992454 - DNA, 25 bp, Homo sapien
ctgcaaggcagcagtcctcgtagcc

SEQ ID NO: 3992455 - DNA, 25 bp, Homo sapien
cagatgtgcctgaagaaggcgtagg

SEQ ID NO: 3992456 - DNA, 25 bp, Homo sapien
tgaagaaggcgtaggctgcaaggca

SEQ ID NO: 3992457 - DNA, 25 bp, Homo sapien
tcggcctcggacacggggctccgtg

SEQ ID NO: 3992458 - DNA, 25 bp, Homo sapien
tcctcggcctcggacacggggctcc

SEQ ID NO: 3992459 - DNA, 25 bp, Homo sapien
gctccgtgggggcatctccacagcc

SEQ ID NO: 3992460 - DNA, 25 bp, Homo sapien
cacggggctccgtgggggcatctcc

SEQ ID NO: 3992461 - DNA, 25 bp, Homo sapien
cagcggaggtggaagaccacgtcct

SEQ ID NO: 3992462 - DNA, 25 bp, Homo sapien
ccacgtcctcgagaggaaagtgtct

SEQ ID NO: 3992463 - DNA, 25 bp, Homo sapien
gcaggatctcgacagcccagcggag

SEQ ID NO: 3992464 - DNA, 25 bp, Homo sapien
tcagggacatcgccgggcggcttca

SEQ ID NO: 3992465 - DNA, 25 bp, Homo sapien
acatgcgcgccaagtagtcctcact

SEQ ID NO: 3992466 - DNA, 25 bp, Homo sapien
tctccagacacgctcggcgagttca

SEQ ID NO: 3992467 - DNA, 25 bp, Homo sapien
tcgaaaaattctgcccgagcttggc

SEQ ID NO: 3992468 - DNA, 25 bp, Homo sapien
agttcagggccaggcggtgccacat

SEQ ID NO: 3992469 - DNA, 25 bp, Homo sapien
tcgtccagcaccttgaggccgccct

SEQ ID NO: 3992470 - DNA, 25 bp, Homo sapien
gcggtgggccgtccttggcagcacc

SEQ ID NO: 3992471 - DNA, 25 bp, Homo sapien
cctggtcggcatggctgtggaagag

SEQ ID NO: 3992472 - DNA, 25 bp, Homo sapien
cgccctcccagtcgtcctggtcggc

SEQ ID NO: 3992473 - DNA, 25 bp, Homo sapien
cagcgcatgccccgcagggctgaag

SEQ ID NO: 3992474 - DNA, 25 bp, Homo sapien
aaccgcggctacagaggtgcccagg

SEQ ID NO: 3992475 - DNA, 25 bp, Homo sapien
ctcccagactaagctgcccatcaca

SEQ ID NO: 3992476 - DNA, 25 bp, Homo sapien
atcacagtgcccctgaggtggaacc

SEQ ID NO: 3992477 - DNA, 25 bp, Homo sapien
ctcctccccggaggccgtcagctcc

SEQ ID NO: 3992478 - DNA, 25 bp, Homo sapien
tcctccccggaggccgtcagctcca

SEQ ID NO: 3992479 - DNA, 25 bp, Homo sapien
cctccccggaggccgtcagctccat

SEQ ID NO: 3992480 - DNA, 25 bp, Homo sapien
tgcctccgggtgggtgagggccgtg

SEQ ID NO: 3992481 - DNA, 25 bp, Homo sapien
aatgcgatttatctgtgagcacagc

SEQ ID NO: 3992482 - DNA, 25 bp, Homo sapien
tacaccttaggactcttaacaggga

SEQ ID NO: 3992483 - DNA, 25 bp, Homo sapien
tctgaagtatgcctgaaaaacgagt

SEQ ID NO: 3992484 - DNA, 25 bp, Homo sapien
tgtgtggccctggacaaggttcatg

SEQ ID NO: 3992485 - DNA, 25 bp, Homo sapien
tggaagaaaatatccttcggtcgtc

SEQ ID NO: 3992486 - DNA, 25 bp, Homo sapien
ctggaagaaaatatccttcggtcgt

SEQ ID NO: 3992487 - DNA, 25 bp, Homo sapien
tgcagaagcagcgtctttcctttct

SEQ ID NO: 3992488 - DNA, 25 bp, Homo sapien
ggccactggtgcagaagcagcgtct

SEQ ID NO: 3992489 - DNA, 25 bp, Homo sapien
cctggaagtcggccgtgggccactg

SEQ ID NO: 3992490 - DNA, 25 bp, Homo sapien
cactggtgcagaagcagcgtctttc

SEQ ID NO: 3992491 - DNA, 25 bp, Homo sapien
agtcccccggaggaggccagcatgg

SEQ ID NO: 3992492 - DNA, 25 bp, Homo sapien
tgccttgggcatgcatctgaggatc

SEQ ID NO: 3992493 - DNA, 25 bp, Homo sapien
gaggccccgacacagccttttcaaa

SEQ ID NO: 3992494 - DNA, 25 bp, Homo sapien
cccagaggccccgacacagcctttt

SEQ ID NO: 3992495 - DNA, 25 bp, Homo sapien
gctttgggttatgcagctctgcttc

SEQ ID NO: 3992496 - DNA, 25 bp, Homo sapien
gagctttgggttatgcagctctgct

SEQ ID NO: 3992497 - DNA, 25 bp, Homo sapien
ctggagctttgggttatgcagctct

SEQ ID NO: 3992498 - DNA, 25 bp, Homo sapien
ggagctttgggttatgcagctctgc

SEQ ID NO: 3992499 - DNA, 25 bp, Homo sapien
gtcaggagccccctccagggctggt

SEQ ID NO: 3992500 - DNA, 25 bp, Homo sapien
gagtcaggagccccctccagggctg

SEQ ID NO: 3992501 - DNA, 25 bp, Homo sapien
tagaggcctcagtgggagtcaggag

SEQ ID NO: 3992502 - DNA, 25 bp, Homo sapien
aggagccccctccagggctggtgca

SEQ ID NO: 3992503 - DNA, 25 bp, Homo sapien
tgatgccgatgagcctcttcagggc

SEQ ID NO: 3992504 - DNA, 25 bp, Homo sapien
gtcttgttgatgatgccgatgagcc

SEQ ID NO: 3992505 - DNA, 25 bp, Homo sapien
tcctgtagacggctgaggacagcag

SEQ ID NO: 3992506 - DNA, 25 bp, Homo sapien
gccaggcgttccagtaatgccgcgc

SEQ ID NO: 3992507 - DNA, 25 bp, Homo sapien
gagggcaggtcatgacgcggtggct

SEQ ID NO: 3992508 - DNA, 25 bp, Homo sapien
aagagggcaggtcatgacgcggtgg

SEQ ID NO: 3992509 - DNA, 25 bp, Homo sapien
ggcaggtcatgacgcggtggctcca

SEQ ID NO: 3992510 - DNA, 25 bp, Homo sapien
gtcatgacgcggtggctccacctgg

SEQ ID NO: 3992511 - DNA, 25 bp, Homo sapien
ccttggctgccaccagtcgcagctg

SEQ ID NO: 3992512 - DNA, 25 bp, Homo sapien
ttggctgccaccagtcgcagctgct

SEQ ID NO: 3992513 - DNA, 25 bp, Homo sapien
cttggctgccaccagtcgcagctgc

SEQ ID NO: 3992514 - DNA, 25 bp, Homo sapien
tggctgccaccagtcgcagctgctt

SEQ ID NO: 3992515 - DNA, 25 bp, Homo sapien
ctctgccaccagccgggactcctcg

SEQ ID NO: 3992516 - DNA, 25 bp, Homo sapien
tcaaaattcccatgctgggcgatcc

SEQ ID NO: 3992517 - DNA, 25 bp, Homo sapien
cggagtgtccgtgtcccctcaaaat

SEQ ID NO: 3992518 - DNA, 25 bp, Homo sapien
aattcccttcgacctgccatgggcg

SEQ ID NO: 3992519 - DNA, 25 bp, Homo sapien
tgctgaggcccacgtgacttcagaa

SEQ ID NO: 3992520 - DNA, 25 bp, Homo sapien
ccgaccagttgcactcggaagccat

SEQ ID NO: 3992521 - DNA, 25 bp, Homo sapien
tgcatgggcgaagtgggtcagccgc

SEQ ID NO: 3992522 - DNA, 25 bp, Homo sapien
catggtggtctcatggtcacgcgct

SEQ ID NO: 3992523 - DNA, 25 bp, Homo sapien
caaatttcttcaggtacttgatgcc

SEQ ID NO: 3992524 - DNA, 25 bp, Homo sapien
gaggactctggtcaccgagctgaca

SEQ ID NO: 3992525 - DNA, 25 bp, Homo sapien
accgagctgacatcctcattggtgc

SEQ ID NO: 3992526 - DNA, 25 bp, Homo sapien
gagtacatttccaaggcaacgagga

SEQ ID NO: 3992527 - DNA, 25 bp, Homo sapien
cccagcccgttgcatgagtacattt

SEQ ID NO: 3992528 - DNA, 25 bp, Homo sapien
ggtcatcttctcatacaacgaggag

SEQ ID NO: 3992529 - DNA, 25 bp, Homo sapien
aacgaggagccccaagtccgtgcgg

SEQ ID NO: 3992530 - DNA, 25 bp, Homo sapien
ttttgtaactgttgacctgcaggtc

SEQ ID NO: 3992531 - DNA, 25 bp, Homo sapien
ccccatgtgtgaggcagccttgtct

SEQ ID NO: 3992532 - DNA, 25 bp, Homo sapien
gctcctcggtgcccagccgtggccc

SEQ ID NO: 3992533 - DNA, 25 bp, Homo sapien
tcctcggtgcccagccgtggcccaa

SEQ ID NO: 3992534 - DNA, 25 bp, Homo sapien
ctcggtgcccagccgtggcccaatc

SEQ ID NO: 3992535 - DNA, 25 bp, Homo sapien
ccgtggcccaatctgctgctgcagc

SEQ ID NO: 3992536 - DNA, 25 bp, Homo sapien
ggcaccgtctcctcgggcgcactcc

SEQ ID NO: 3992537 - DNA, 25 bp, Homo sapien
ggcgcactcccattggtcaggttca

SEQ ID NO: 3992538 - DNA, 25 bp, Homo sapien
ccaggtggcgataagctgctgccgg

SEQ ID NO: 3992539 - DNA, 25 bp, Homo sapien
gctgctgccgggtgccggtgggcac

SEQ ID NO: 3992540 - DNA, 25 bp, Homo sapien
ctgactccccgtgcggttgtgcaca

SEQ ID NO: 3992541 - DNA, 25 bp, Homo sapien
cctctcagcatctggatccagccat

SEQ ID NO: 3992542 - DNA, 25 bp, Homo sapien
ccaagtcggtgctggcatttcctct

SEQ ID NO: 3992543 - DNA, 25 bp, Homo sapien
tgttcccgggctgccaagtcggtgc

SEQ ID NO: 3992544 - DNA, 25 bp, Homo sapien
tgtgagcgttgtgagtgccgggccg

SEQ ID NO: 3992545 - DNA, 25 bp, Homo sapien
gggccgcaggctcaagactctccag

SEQ ID NO: 3992546 - DNA, 25 bp, Homo sapien
ctgatgccacagccggtgttcctgg

SEQ ID NO: 3992547 - DNA, 25 bp, Homo sapien
caagactctccagcccgcggtttta

SEQ ID NO: 3992548 - DNA, 25 bp, Homo sapien
gcccagaaagggtcatgcaggatga

SEQ ID NO: 3992549 - DNA, 25 bp, Homo sapien
ggcccagaaagggtcatgcaggatg

SEQ ID NO: 3992550 - DNA, 25 bp, Homo sapien
cccagaaagggtcatgcaggatgag

SEQ ID NO: 3992551 - DNA, 25 bp, Homo sapien
gggataaatgatccgcctgggccac

SEQ ID NO: 3992552 - DNA, 25 bp, Homo sapien
tccaatccgccgtttctggttctat

SEQ ID NO: 3992553 - DNA, 25 bp, Homo sapien
tggtgtggtccctgtttctcgccgt

SEQ ID NO: 3992554 - DNA, 25 bp, Homo sapien
ctgcattttactgggacggctgcat

SEQ ID NO: 3992555 - DNA, 25 bp, Homo sapien
atgatcaggcctcgcgccaaggtgt

SEQ ID NO: 3992556 - DNA, 25 bp, Homo sapien
gaatttcctggacttctcggcagcc

SEQ ID NO: 3992557 - DNA, 25 bp, Homo sapien
gctgtgaaacgcgtttggtcgcatg

SEQ ID NO: 3992558 - DNA, 25 bp, Homo sapien
gctcctgcgtccagtgggctgtgaa

SEQ ID NO: 3992559 - DNA, 25 bp, Homo sapien
gagggccatggagtgcagctgcctg

SEQ ID NO: 3992560 - DNA, 25 bp, Homo sapien
gagatgcacgggtgcccacgaccct

SEQ ID NO: 3992561 - DNA, 25 bp, Homo sapien
tcaggtcacggtaagaggcctgaga

SEQ ID NO: 3992562 - DNA, 25 bp, Homo sapien
ctgggagacatgcttgtcagaggga

SEQ ID NO: 3992563 - DNA, 25 bp, Homo sapien
gttcaggacgtagaccacggcgttc

SEQ ID NO: 3992564 - DNA, 25 bp, Homo sapien
tggatctcctgtccgatctctgcgg

SEQ ID NO: 3992565 - DNA, 25 bp, Homo sapien
tctgcggagcgcagccagttattca

SEQ ID NO: 3992566 - DNA, 25 bp, Homo sapien
ccttaacgatgctcaggaggtggta

SEQ ID NO: 3992567 - DNA, 25 bp, Homo sapien
acaccgggacagactctcgatccag

SEQ ID NO: 3992568 - DNA, 25 bp, Homo sapien
ccgggacagactctcgatccaggtt

SEQ ID NO: 3992569 - DNA, 25 bp, Homo sapien
accgggacagactctcgatccaggt

SEQ ID NO: 3992570 - DNA, 25 bp, Homo sapien
ggcacaccgggacagactctcgatc

SEQ ID NO: 3992571 - DNA, 25 bp, Homo sapien
caaagagctcggccgggtggctcca

SEQ ID NO: 3992572 - DNA, 25 bp, Homo sapien
tgcagccgtcatcgtcattgctgct

SEQ ID NO: 3992573 - DNA, 25 bp, Homo sapien
tggctccaggcgtgcatggcaagca

SEQ ID NO: 3992574 - DNA, 25 bp, Homo sapien
tctgccccaagggaccggcgagggc

SEQ ID NO: 3992575 - DNA, 25 bp, Homo sapien
ctccgggggctcaggcacgtagcca

SEQ ID NO: 3992576 - DNA, 25 bp, Homo sapien
tatgtgatccactcagcattcacct

SEQ ID NO: 3992577 - DNA, 25 bp, Homo sapien
gatggcccggtcattcagctctaca

SEQ ID NO: 3992578 - DNA, 25 bp, Homo sapien
tctgaccgcagcaaatgaaccgtgg

SEQ ID NO: 3992579 - DNA, 25 bp, Homo sapien
aacttccgcagcaggtcggggcaca

SEQ ID NO: 3992580 - DNA, 25 bp, Homo sapien
ccgcgaacttccgcagcaggtcggg

SEQ ID NO: 3992581 - DNA, 25 bp, Homo sapien
ctccgcgaacttccgcagcaggtcg

SEQ ID NO: 3992582 - DNA, 25 bp, Homo sapien
cgaacttccgcagcaggtcggggca

SEQ ID NO: 3992583 - DNA, 25 bp, Homo sapien
ccgagccgtccctacctcgcttctt

SEQ ID NO: 3992584 - DNA, 25 bp, Homo sapien
caggacgacctcaggctggctccag

SEQ ID NO: 3992585 - DNA, 25 bp, Homo sapien
gtcctgcaccgagccgtccctacct

SEQ ID NO: 3992586 - DNA, 25 bp, Homo sapien
ctgcaggacgacctcaggctggctc

SEQ ID NO: 3992587 - DNA, 25 bp, Homo sapien
ctcgccgcagcctcaacttcttcac

SEQ ID NO: 3992588 - DNA, 25 bp, Homo sapien
ttgtcatacaggaggcagaagcggc

SEQ ID NO: 3992589 - DNA, 25 bp, Homo sapien
gttgtcatacaggaggcagaagcgg

SEQ ID NO: 3992590 - DNA, 25 bp, Homo sapien
cacacgccttgtttccgggccactt

SEQ ID NO: 3992591 - DNA, 25 bp, Homo sapien
gcggctcgccgtccgacagacgtcc

SEQ ID NO: 3992592 - DNA, 25 bp, Homo sapien
ctgctcaccgagaacccaaacgagt

SEQ ID NO: 3992593 - DNA, 25 bp, Homo sapien
caaacgagtgaaaggtgagtagaca

SEQ ID NO: 3992594 - DNA, 25 bp, Homo sapien
gagaacccaaacgagtgaaaggtga

SEQ ID NO: 3992595 - DNA, 25 bp, Homo sapien
caccgagaacccaaacgagtgaaag

SEQ ID NO: 3992596 - DNA, 25 bp, Homo sapien
aagttagaaaacacctgggctggct

SEQ ID NO: 3992597 - DNA, 25 bp, Homo sapien
ctgaagttagaaaacacctgggctg

SEQ ID NO: 3992598 - DNA, 25 bp, Homo sapien
gttagaaaacacctgggctggctgc

SEQ ID NO: 3992599 - DNA, 25 bp, Homo sapien
gaagttagaaaacacctgggctggc

SEQ ID NO: 3992600 - DNA, 25 bp, Homo sapien
ctctccttgtcgttttcgttgccca

SEQ ID NO: 3992601 - DNA, 25 bp, Homo sapien
tggtgccacgccttcgcacagaggt

SEQ ID NO: 3992602 - DNA, 25 bp, Homo sapien
cagaggtaggtgaaccggcccctgt

SEQ ID NO: 3992603 - DNA, 25 bp, Homo sapien
tccacgctgacggtgtggtgccacg

SEQ ID NO: 3992604 - DNA, 25 bp, Homo sapien
cagcacaatctgaaacgcgtcaggg

SEQ ID NO: 3992605 - DNA, 25 bp, Homo sapien
gggcccgcttcttcctgacgctgtc

SEQ ID NO: 3992606 - DNA, 25 bp, Homo sapien
caggcctgcattcaccaggagggcc

SEQ ID NO: 3992607 - DNA, 25 bp, Homo sapien
tgacgctgtcctttggtgtagcttt

SEQ ID NO: 3992608 - DNA, 25 bp, Homo sapien
tctggatcctgtcccggtagaggcc

SEQ ID NO: 3992609 - DNA, 25 bp, Homo sapien
tccatgtgcacttgacagcggagaa

SEQ ID NO: 3992610 - DNA, 25 bp, Homo sapien
tgctcaacggccatgatggccttgt

SEQ ID NO: 3992611 - DNA, 25 bp, Homo sapien
tatagcgtggtgcacagacgcagcc

SEQ ID NO: 3992612 - DNA, 25 bp, Homo sapien
gtggcgcacaccacgtggatgaccc

SEQ ID NO: 3992613 - DNA, 25 bp, Homo sapien
gcttccgcaggtggtgccgcaggtt

SEQ ID NO: 3992614 - DNA, 25 bp, Homo sapien
acggctcgctgcagcgcgacgtcta

SEQ ID NO: 3992615 - DNA, 25 bp, Homo sapien
caggtgttccactgcgtggcgcaca

SEQ ID NO: 3992616 - DNA, 25 bp, Homo sapien
ctgcgtgcagggcacactgagaacg

SEQ ID NO: 3992617 - DNA, 25 bp, Homo sapien
cactgagaacgcaggccctaaattc

SEQ ID NO: 3992618 - DNA, 25 bp, Homo sapien
aaattcatcaccctgcgtggcgtca

SEQ ID NO: 3992619 - DNA, 25 bp, Homo sapien
tcaaatctgtccgtgaaaatggcca

SEQ ID NO: 3992620 - DNA, 25 bp, Homo sapien
gcacccgccgggctgtgacacgtgt

SEQ ID NO: 3992621 - DNA, 25 bp, Homo sapien
ccctgtggcacttgccgtggtacca

SEQ ID NO: 3992622 - DNA, 25 bp, Homo sapien
gcctcgcactgcctggctgacaggg

SEQ ID NO: 3992623 - DNA, 25 bp, Homo sapien
gcagtcaaaaacctcccgcgagaag

SEQ ID NO: 3992624 - DNA, 25 bp, Homo sapien
caagtcttaaagcttccgattcaca

SEQ ID NO: 3992625 - DNA, 25 bp, Homo sapien
gcttccgattcacactccagacatt

SEQ ID NO: 3992626 - DNA, 25 bp, Homo sapien
tcaacagccgctcggttgtacactt

SEQ ID NO: 3992627 - DNA, 25 bp, Homo sapien
tgtacactttcatcttactttcaag

SEQ ID NO: 3992628 - DNA, 25 bp, Homo sapien
cacgggagggtcctgagtttgccct

SEQ ID NO: 3992629 - DNA, 25 bp, Homo sapien
cggcacgggagggtcctgagtttgc

SEQ ID NO: 3992630 - DNA, 25 bp, Homo sapien
agcggcacgggagggtcctgagttt

SEQ ID NO: 3992631 - DNA, 25 bp, Homo sapien
agagcggcacgggagggtcctgagt

SEQ ID NO: 3992632 - DNA, 25 bp, Homo sapien
ggggcttgctgagctcggggaagat

SEQ ID NO: 3992633 - DNA, 25 bp, Homo sapien
gggcttgctgagctcggggaagatg

SEQ ID NO: 3992634 - DNA, 25 bp, Homo sapien
ccaggcctcggtggccttacaaaag

SEQ ID NO: 3992635 - DNA, 25 bp, Homo sapien
atcttcacaactatcagacacagac

SEQ ID NO: 3992636 - DNA, 25 bp, Homo sapien
gaagcatcttcacaactatcagaca

SEQ ID NO: 3992637 - DNA, 25 bp, Homo sapien
ctagtctgtgagcgcaggcgctgat

SEQ ID NO: 3992638 - DNA, 25 bp, Homo sapien
gcatcttcacaactatcagacacag

SEQ ID NO: 3992639 - DNA, 25 bp, Homo sapien
atggctgcaccgcagtcctgcatgt

SEQ ID NO: 3992640 - DNA, 25 bp, Homo sapien
ggtcctcggcggcagacgtccacaa

SEQ ID NO: 3992641 - DNA, 25 bp, Homo sapien
ctcgggatggctgcaccgcagtcct

SEQ ID NO: 3992642 - DNA, 25 bp, Homo sapien
agcacgggaagtacccgcagcacct

SEQ ID NO: 3992643 - DNA, 25 bp, Homo sapien
aggctgtgtgccccggcctgtccag

SEQ ID NO: 3992644 - DNA, 25 bp, Homo sapien
cctgtccagcggctgcaagcctcca

SEQ ID NO: 3992645 - DNA, 25 bp, Homo sapien
gtgtgccccggcctgtccagcggct

SEQ ID NO: 3992646 - DNA, 25 bp, Homo sapien
ccccggcctgtccagcggctgcaag

SEQ ID NO: 3992647 - DNA, 25 bp, Homo sapien
caggaggtaacaggagggctggggc

SEQ ID NO: 3992648 - DNA, 25 bp, Homo sapien
tcaggaggtaacaggagggctgggg

SEQ ID NO: 3992649 - DNA, 25 bp, Homo sapien
tgtctcctgcgccactgatggttgg

SEQ ID NO: 3992650 - DNA, 25 bp, Homo sapien
cccgtgctgagccatggccgtgtct

SEQ ID NO: 3992651 - DNA, 25 bp, Homo sapien
tgtcaaggccacgtgaactgcatct

SEQ ID NO: 3992652 - DNA, 25 bp, Homo sapien
cagccctcagcgtgactggacggct

SEQ ID NO: 3992653 - DNA, 25 bp, Homo sapien
tgaactgcgggtaacgaggcactgc

SEQ ID NO: 3992654 - DNA, 25 bp, Homo sapien
catactgtagctgtctgcaggtaac

SEQ ID NO: 3992655 - DNA, 25 bp, Homo sapien
ggcactgccggtgtgatttacacgt

SEQ ID NO: 3992656 - DNA, 25 bp, Homo sapien
tcatgaaattttacgccgtccgtaa

SEQ ID NO: 3992657 - DNA, 25 bp, Homo sapien
caggtaggaaagacggcaatgtgcc

SEQ ID NO: 3992658 - DNA, 25 bp, Homo sapien
gcaaacaccatctaactgcaactgt

SEQ ID NO: 3992659 - DNA, 25 bp, Homo sapien
gaaacgggcaggtgtaaaattgcaa

SEQ ID NO: 3992660 - DNA, 25 bp, Homo sapien
tggacccgtggccacaagaaaggta

SEQ ID NO: 3992661 - DNA, 25 bp, Homo sapien
tgccttttgtccaactgcacggtga

SEQ ID NO: 3992662 - DNA, 25 bp, Homo sapien
tgcacggtgagcagcgcctcatccc

SEQ ID NO: 3992663 - DNA, 25 bp, Homo sapien
ggggccgtggcctggtgaactgctc

SEQ ID NO: 3992664 - DNA, 25 bp, Homo sapien
tgagcagcgcctcatccccaggcag

SEQ ID NO: 3992665 - DNA, 25 bp, Homo sapien
aggcagaggagatctccatgcattt

SEQ ID NO: 3992666 - DNA, 25 bp, Homo sapien
ttcaaggtcaaggaaaaacgcgcca

SEQ ID NO: 3992667 - DNA, 25 bp, Homo sapien
caaggtcaaggaaaaacgcgccaat

SEQ ID NO: 3992668 - DNA, 25 bp, Homo sapien
gtcaaggaaaaacgcgccaattcaa

SEQ ID NO: 3992669 - DNA, 25 bp, Homo sapien
cttctgctgtttcccggggagtaat

SEQ ID NO: 3992670 - DNA, 25 bp, Homo sapien
tgtttcccggggagtaatcacagtc

SEQ ID NO: 3992671 - DNA, 25 bp, Homo sapien
gctgtttcccggggagtaatcacag

SEQ ID NO: 3992672 - DNA, 25 bp, Homo sapien
tcccggggagtaatcacagtcttac

SEQ ID NO: 3992673 - DNA, 25 bp, Homo sapien
ggaacacaattggcggctgctggca

SEQ ID NO: 3992674 - DNA, 25 bp, Homo sapien
gctgctggcagcgactcaactcggc

SEQ ID NO: 3992675 - DNA, 25 bp, Homo sapien
cgggaacacaattggcggctgctgg

SEQ ID NO: 3992676 - DNA, 25 bp, Homo sapien
agcgactcaactcggccctcagtgt

SEQ ID NO: 3992677 - DNA, 25 bp, Homo sapien
tgggcaggtcgggaagagagaatcc

SEQ ID NO: 3992678 - DNA, 25 bp, Homo sapien
ccgtaaaagtgcctgagaatgccgc

SEQ ID NO: 3992679 - DNA, 25 bp, Homo sapien
caggtcgggaagagagaatccgtaa

SEQ ID NO: 3992680 - DNA, 25 bp, Homo sapien
aagagagaatccgtaaaagtgcctg

SEQ ID NO: 3992681 - DNA, 25 bp, Homo sapien
ggccttcctcagaatgacactgatg

SEQ ID NO: 3992682 - DNA, 25 bp, Homo sapien
gaaagcgctggtggttgtaatgacc

SEQ ID NO: 3992683 - DNA, 25 bp, Homo sapien
taatgacctaagtgtctgtaggcct

SEQ ID NO: 3992684 - DNA, 25 bp, Homo sapien
gacactgatgtcacctggtaaatca

SEQ ID NO: 3992685 - DNA, 25 bp, Homo sapien
tcctttaactgaagttcgtccatta

SEQ ID NO: 3992686 - DNA, 25 bp, Homo sapien
aaagtgactgacaggctaatggaat

SEQ ID NO: 3992687 - DNA, 25 bp, Homo sapien
gactgacaggctaatggaatttttc

SEQ ID NO: 3992688 - DNA, 25 bp, Homo sapien
gaagttcgtccattaattcatgacg

SEQ ID NO: 3992689 - DNA, 25 bp, Homo sapien
cgacgataaaggcaaaagaccctgt

SEQ ID NO: 3992690 - DNA, 25 bp, Homo sapien
gctgattccccatatgtcaaaatgg

SEQ ID NO: 3992691 - DNA, 25 bp, Homo sapien
ggaaatatttaaagagcgacgataa

SEQ ID NO: 3992692 - DNA, 25 bp, Homo sapien
gtcaaaatggactgctgatgaatga

SEQ ID NO: 3992693 - DNA, 25 bp, Homo sapien
tctacgcagttttctgaacaatgac

SEQ ID NO: 3992694 - DNA, 25 bp, Homo sapien
ttatgtaatttctacgcagttttct

SEQ ID NO: 3992695 - DNA, 25 bp, Homo sapien
gtaatttctacgcagttttctgaac

SEQ ID NO: 3992696 - DNA, 25 bp, Homo sapien
tttctacgcagttttctgaacaatg

SEQ ID NO: 3992697 - DNA, 25 bp, Homo sapien
tctctatttctaatacgctgattta

SEQ ID NO: 3992698 - DNA, 25 bp, Homo sapien
gtctctatttctaatacgctgattt

SEQ ID NO: 3992699 - DNA, 25 bp, Homo sapien
ctctatttctaatacgctgatttac

SEQ ID NO: 3992700 - DNA, 25 bp, Homo sapien
tgagacttaatgaacggagctgccg

SEQ ID NO: 3992701 - DNA, 25 bp, Homo sapien
ccggcttgcagataacactccagaa

SEQ ID NO: 3992702 - DNA, 25 bp, Homo sapien
cctttcttccggcttgcagataaca

SEQ ID NO: 3992703 - DNA, 25 bp, Homo sapien
gaatatctgccggtatttctgtggc

SEQ ID NO: 3992704 - DNA, 25 bp, Homo sapien
tatccaggcttgaggaacggcctca

SEQ ID NO: 3992705 - DNA, 25 bp, Homo sapien
cagtctgactcagcacgtttatgat

SEQ ID NO: 3992706 - DNA, 25 bp, Homo sapien
gatcagatggtgacgatatccaggc

SEQ ID NO: 3992707 - DNA, 25 bp, Homo sapien
gactcagcacgtttatgatttggga

SEQ ID NO: 3992708 - DNA, 25 bp, Homo sapien
gactgatgcattgtacaccaaaaag

SEQ ID NO: 3992709 - DNA, 25 bp, Homo sapien
gccagtagaggactgatgcattgta

SEQ ID NO: 3992710 - DNA, 25 bp, Homo sapien
gtagaggactgatgcattgtacacc

SEQ ID NO: 3992711 - DNA, 25 bp, Homo sapien
catctgccagtagaggactgatgca

SEQ ID NO: 3992712 - DNA, 25 bp, Homo sapien
ggccttcatgtactcagtcacgcaa

SEQ ID NO: 3992713 - DNA, 25 bp, Homo sapien
gtttatggccttcatgtactcagtc

SEQ ID NO: 3992714 - DNA, 25 bp, Homo sapien
tactcagtcacgcaattttcaaatt

SEQ ID NO: 3992715 - DNA, 25 bp, Homo sapien
cctttggcaaagtttatggccttca

SEQ ID NO: 3992716 - DNA, 25 bp, Homo sapien
tgcacaggtgcgctcggcccagaaa

SEQ ID NO: 3992717 - DNA, 25 bp, Homo sapien
agtacatttggatgcagtcctcgct

SEQ ID NO: 3992718 - DNA, 25 bp, Homo sapien
aaactgggtgatgggcgccttcacc

SEQ ID NO: 3992719 - DNA, 25 bp, Homo sapien
gacttcggggcacacatctgggccc

SEQ ID NO: 3992720 - DNA, 25 bp, Homo sapien
ctctctgaggggtcaaactccgatt

SEQ ID NO: 3992721 - DNA, 25 bp, Homo sapien
acaggtctgggctgaagctctctga

SEQ ID NO: 3992722 - DNA, 25 bp, Homo sapien
gatttgatcaactcgtaggccttct

SEQ ID NO: 3992723 - DNA, 25 bp, Homo sapien
tttccctaggttggccgatttgatc

SEQ ID NO: 3992724 - DNA, 25 bp, Homo sapien
tgagccgggcaacgccatcccgaag

SEQ ID NO: 3992725 - DNA, 25 bp, Homo sapien
gtggttgaggaaggtttggtcactg

SEQ ID NO: 3992726 - DNA, 25 bp, Homo sapien
gagaagtgagccgggcaacgccatc

SEQ ID NO: 3992727 - DNA, 25 bp, Homo sapien
ttgaggaaggtttggtcactgggct

SEQ ID NO: 3992728 - DNA, 25 bp, Homo sapien
tcctgtacgtttgctctggtcagac

SEQ ID NO: 3992729 - DNA, 25 bp, Homo sapien
tttgctctggtcagacgatcgggag

SEQ ID NO: 3992730 - DNA, 25 bp, Homo sapien
tgtgggcgccttcctgtacgtttgc

SEQ ID NO: 3992731 - DNA, 25 bp, Homo sapien
cagggagcagcggtgtgggcgcctt

SEQ ID NO: 3992732 - DNA, 25 bp, Homo sapien
ccagctcctgcgtgatgaccaggtc

SEQ ID NO: 3992733 - DNA, 25 bp, Homo sapien
agctcctgcgtgatgaccaggtcca

SEQ ID NO: 3992734 - DNA, 25 bp, Homo sapien
cagctcctgcgtgatgaccaggtcc

SEQ ID NO: 3992735 - DNA, 25 bp, Homo sapien
gctcctgcgtgatgaccaggtccat

SEQ ID NO: 3992736 - DNA, 25 bp, Homo sapien
tgccgcccactgtcggttgggttct

SEQ ID NO: 3992737 - DNA, 25 bp, Homo sapien
ggtccgcggtgcgtcctgccgccca

SEQ ID NO: 3992738 - DNA, 25 bp, Homo sapien
gtcctgccgcccactgtcggttggg

SEQ ID NO: 3992739 - DNA, 25 bp, Homo sapien
ccactgtcggttgggttctccagcc

SEQ ID NO: 3992740 - DNA, 25 bp, Homo sapien
gagccactgaaggacttgggtcggc

SEQ ID NO: 3992741 - DNA, 25 bp, Homo sapien
aattggaggcttggcggggcgcgca

SEQ ID NO: 3992742 - DNA, 25 bp, Homo sapien
gcggggaagccggagccactgaagg

SEQ ID NO: 3992743 - DNA, 25 bp, Homo sapien
ggaagccggagccactgaaggactt

SEQ ID NO: 3992744 - DNA, 25 bp, Homo sapien
tctcatgggcggcttaaacagcggg

SEQ ID NO: 3992745 - DNA, 25 bp, Homo sapien
cagcgcaggtgaggccagtaatcaa

SEQ ID NO: 3992746 - DNA, 25 bp, Homo sapien
tggcccgtggatgtgttcagcaacc

SEQ ID NO: 3992747 - DNA, 25 bp, Homo sapien
tgtgtctcggtgtccaaatgtgccc

SEQ ID NO: 3992748 - DNA, 25 bp, Homo sapien
tgtgtatgtccgtaaaagagaactt

SEQ ID NO: 3992749 - DNA, 25 bp, Homo sapien
tgtatgtccgtaaaagagaacttag

SEQ ID NO: 3992750 - DNA, 25 bp, Homo sapien
tgtccgtaaaagagaacttagttga

SEQ ID NO: 3992751 - DNA, 25 bp, Homo sapien
tggtgtgtatgtccgtaaaagagaa

SEQ ID NO: 3992752 - DNA, 25 bp, Homo sapien
aaagcgaaaatgaagcccctggttg

SEQ ID NO: 3992753 - DNA, 25 bp, Homo sapien
gcagtgctttgtggcatcggctcca

SEQ ID NO: 3992754 - DNA, 25 bp, Homo sapien
actgacctagagtcgggagagaccc

SEQ ID NO: 3992755 - DNA, 25 bp, Homo sapien
cagctacggttggtggaaccccaga

SEQ ID NO: 3992756 - DNA, 25 bp, Homo sapien
cagctcctgaacatggagcgtatca

SEQ ID NO: 3992757 - DNA, 25 bp, Homo sapien
tttcccggtgggacagctcctgaac

SEQ ID NO: 3992758 - DNA, 25 bp, Homo sapien
ctttcccggtgggacagctcctgaa

SEQ ID NO: 3992759 - DNA, 25 bp, Homo sapien
cctgaacatggagcgtatcagcaac

SEQ ID NO: 3992760 - DNA, 25 bp, Homo sapien
tctccaggatgacggccgagggtgg

SEQ ID NO: 3992761 - DNA, 25 bp, Homo sapien
gcgtctccaggatgacggccgaggg

SEQ ID NO: 3992762 - DNA, 25 bp, Homo sapien
ctggcagccgagctcccgcgtctcc

SEQ ID NO: 3992763 - DNA, 25 bp, Homo sapien
tggcagccgagctcccgcgtctcca

SEQ ID NO: 3992764 - DNA, 25 bp, Homo sapien
ctccagcatcccaggatcccaggaa

SEQ ID NO: 3992765 - DNA, 25 bp, Homo sapien
agcatcccaggatcccaggaactca

SEQ ID NO: 3992766 - DNA, 25 bp, Homo sapien
ccagcatcccaggatcccaggaact

SEQ ID NO: 3992767 - DNA, 25 bp, Homo sapien
atcccaggatcccaggaactcagca

SEQ ID NO: 3992768 - DNA, 25 bp, Homo sapien
tcatacctgtttagcatcatggctt

SEQ ID NO: 3992769 - DNA, 25 bp, Homo sapien
taattaatgcttctacctgccttcc

SEQ ID NO: 3992770 - DNA, 25 bp, Homo sapien
accgtgcacaggtgatgtgtacatg

SEQ ID NO: 3992771 - DNA, 25 bp, Homo sapien
cagaaatggcagttgcatcatacct

SEQ ID NO: 3992772 - DNA, 25 bp, Homo sapien
atgtaagacgtacatcgtctccgtc

SEQ ID NO: 3992773 - DNA, 25 bp, Homo sapien
aaatatgagtggccaatggccccat

SEQ ID NO: 3992774 - DNA, 25 bp, Homo sapien
tgagtggccaatggccccatgacac

SEQ ID NO: 3992775 - DNA, 25 bp, Homo sapien
tattccttagtaagttgttgatgaa

SEQ ID NO: 3992776 - DNA, 25 bp, Homo sapien
acccccacacgctgagctcagcatc

SEQ ID NO: 3992777 - DNA, 25 bp, Homo sapien
cagatgttcacacccccacacgctg

SEQ ID NO: 3992778 - DNA, 25 bp, Homo sapien
tgttcacacccccacacgctgagct

SEQ ID NO: 3992779 - DNA, 25 bp, Homo sapien
ttgacagatgttcacacccccacac

SEQ ID NO: 3992780 - DNA, 25 bp, Homo sapien
gtgtgcctgcagtaccatctccgct

SEQ ID NO: 3992781 - DNA, 25 bp, Homo sapien
tgcccagtgtgcctgcagtaccatc

SEQ ID NO: 3992782 - DNA, 25 bp, Homo sapien
ccagtgtgcctgcagtaccatctcc

SEQ ID NO: 3992783 - DNA, 25 bp, Homo sapien
gtgcctgcagtaccatctccgctca

SEQ ID NO: 3992784 - DNA, 25 bp, Homo sapien
agctggtatttcaatcagggtctgg

SEQ ID NO: 3992785 - DNA, 25 bp, Homo sapien
caccacactccagggatgccggtct

SEQ ID NO: 3992786 - DNA, 25 bp, Homo sapien
cactccagggatgccggtctccctt

SEQ ID NO: 3992787 - DNA, 25 bp, Homo sapien
gtatttcaatcagggtctggaaagg

SEQ ID NO: 3992788 - DNA, 25 bp, Homo sapien
gggtgccacgaatggggttgtggac

SEQ ID NO: 3992789 - DNA, 25 bp, Homo sapien
cactgacgagggtgccacgaatggg

SEQ ID NO: 3992790 - DNA, 25 bp, Homo sapien
gccacgaatggggttgtggacaggg

SEQ ID NO: 3992791 - DNA, 25 bp, Homo sapien
tgtggacagggggtgtgaggggctc

SEQ ID NO: 3992792 - DNA, 25 bp, Homo sapien
cgtgttgaccgggttggctgtaatt

SEQ ID NO: 3992793 - DNA, 25 bp, Homo sapien
agaggatgtcaccagctaacgacgt

SEQ ID NO: 3992794 - DNA, 25 bp, Homo sapien
taacgacgtcagcaaacgtcttgga

SEQ ID NO: 3992795 - DNA, 25 bp, Homo sapien
cagcaaacgtcttggaaaatttgga

SEQ ID NO: 3992796 - DNA, 25 bp, Homo sapien
cagaatcacgttgctgatggacgtc

SEQ ID NO: 3992797 - DNA, 25 bp, Homo sapien
tatgagtgtcagtgcacggatgagc

SEQ ID NO: 3992798 - DNA, 25 bp, Homo sapien
actgggacgccatcattcgagtgag

SEQ ID NO: 3992799 - DNA, 25 bp, Homo sapien
tcactcttccgccttaggacgctgg

SEQ ID NO: 3992800 - DNA, 25 bp, Homo sapien
tgtaaaagtcacaagaatacgacaa

SEQ ID NO: 3992801 - DNA, 25 bp, Homo sapien
taaaagtcacaagaatacgacaagg

SEQ ID NO: 3992802 - DNA, 25 bp, Homo sapien
ggcgaattcaccaactgttcccact

SEQ ID NO: 3992803 - DNA, 25 bp, Homo sapien
aactgccattagagccttaggcgaa

SEQ ID NO: 3992804 - DNA, 25 bp, Homo sapien
tgtcaccttcccaccgttcccactc

SEQ ID NO: 3992805 - DNA, 25 bp, Homo sapien
cttcccaccgttcccactcctcact

SEQ ID NO: 3992806 - DNA, 25 bp, Homo sapien
cacttctcctcaacggcgttacatt

SEQ ID NO: 3992807 - DNA, 25 bp, Homo sapien
acttctcctcaacggcgttacattc

SEQ ID NO: 3992808 - DNA, 25 bp, Homo sapien
gcgttacattcctgcggttcccact

SEQ ID NO: 3992809 - DNA, 25 bp, Homo sapien
ggcgttacattcctgcggttcccac

SEQ ID NO: 3992810 - DNA, 25 bp, Homo sapien
tctggtgtgcttcatgtcgggtttg

SEQ ID NO: 3992811 - DNA, 25 bp, Homo sapien
aggacattgctctctctcccgaggg

SEQ ID NO: 3992812 - DNA, 25 bp, Homo sapien
tgtgaggaccttacaacagggcagc

SEQ ID NO: 3992813 - DNA, 25 bp, Homo sapien
tagagttaatattgagccacttctc

SEQ ID NO: 3992814 - DNA, 25 bp, Homo sapien
cccatttgcagtcagggctctttgc

SEQ ID NO: 3992815 - DNA, 25 bp, Homo sapien
catttgcagtcagggctctttgctg

SEQ ID NO: 3992816 - DNA, 25 bp, Homo sapien
ccatttgcagtcagggctctttgct

SEQ ID NO: 3992817 - DNA, 25 bp, Homo sapien
ctgggtgtcatccatgccagtcgtc

SEQ ID NO: 3992818 - DNA, 25 bp, Homo sapien
gatatgcccacttcagcgaatcacg

SEQ ID NO: 3992819 - DNA, 25 bp, Homo sapien
ccttgatatgcccacttcagcgaat

SEQ ID NO: 3992820 - DNA, 25 bp, Homo sapien
gcccacttcagcgaatcacgtgtgg

SEQ ID NO: 3992821 - DNA, 25 bp, Homo sapien
tcagcgaatcacgtgtggcctgagg

SEQ ID NO: 3992822 - DNA, 25 bp, Homo sapien
ctcaggactatttacagccacacca

SEQ ID NO: 3992823 - DNA, 25 bp, Homo sapien
aagctgagctctccaatctcaggac

SEQ ID NO: 3992824 - DNA, 25 bp, Homo sapien
caccacaggcgcggcctcttgtggg

SEQ ID NO: 3992825 - DNA, 25 bp, Homo sapien
cagcagcagtgctgactcggcacca

SEQ ID NO: 3992826 - DNA, 25 bp, Homo sapien
gaatgagtctggtcgaattccccac

SEQ ID NO: 3992827 - DNA, 25 bp, Homo sapien
gaattccccactctggacagcgagt

SEQ ID NO: 3992828 - DNA, 25 bp, Homo sapien
gtctggtcgaattccccactctgga

SEQ ID NO: 3992829 - DNA, 25 bp, Homo sapien
gacatgaatgagtctggtcgaattc

SEQ ID NO: 3992830 - DNA, 25 bp, Homo sapien
ccgtgtactgaagttgcctgcctct

SEQ ID NO: 3992831 - DNA, 25 bp, Homo sapien
ctggtagccagcgaggcccagatcc

SEQ ID NO: 3992832 - DNA, 25 bp, Homo sapien
tcttggagggaggtctcgagtgcca

SEQ ID NO: 3992833 - DNA, 25 bp, Homo sapien
agcacacaaggatgacagtatgtcc

SEQ ID NO: 3992834 - DNA, 25 bp, Homo sapien
gagggtgtgaggtctcctccggctg

SEQ ID NO: 3992835 - DNA, 25 bp, Homo sapien
gtctcctccggctgtccacggtggg

SEQ ID NO: 3992836 - DNA, 25 bp, Homo sapien
cacggtgggcccagacataggatct

SEQ ID NO: 3992837 - DNA, 25 bp, Homo sapien
ggtgggcccagacataggatcttcc

SEQ ID NO: 3992838 - DNA, 25 bp, Homo sapien
gcccaagggatcactatctttgtgg

SEQ ID NO: 3992839 - DNA, 25 bp, Homo sapien
ccaggggatttgctgtacagcccca

SEQ ID NO: 3992840 - DNA, 25 bp, Homo sapien
gacgcccaagggatcactatctttg

SEQ ID NO: 3992841 - DNA, 25 bp, Homo sapien
cacagggacgcccaagggatcacta

SEQ ID NO: 3992842 - DNA, 25 bp, Homo sapien
tgagtccacagggagggttgaggct

SEQ ID NO: 3992843 - DNA, 25 bp, Homo sapien
ggggtgtcccctggctgagtccaca

SEQ ID NO: 3992844 - DNA, 25 bp, Homo sapien
agatgccccacgggggtgtcccctg

SEQ ID NO: 3992845 - DNA, 25 bp, Homo sapien
ggagggttgaggctgcctcggccat

SEQ ID NO: 3992846 - DNA, 25 bp, Homo sapien
ctgtcctcttgcgaattcacctcgt

SEQ ID NO: 3992847 - DNA, 25 bp, Homo sapien
ccatgaagggttaatcttttccagt

SEQ ID NO: 3992848 - DNA, 25 bp, Homo sapien
cacctcgttgaggtaacctgaagac

SEQ ID NO: 3992849 - DNA, 25 bp, Homo sapien
tcttgcgaattcacctcgttgaggt

SEQ ID NO: 3992850 - DNA, 25 bp, Homo sapien
tccccacccaaggctgccctcctac

SEQ ID NO: 3992851 - DNA, 25 bp, Homo sapien
ctccccacccaaggctgccctccta

SEQ ID NO: 3992852 - DNA, 25 bp, Homo sapien
tggccctccccacccaaggctgccc

SEQ ID NO: 3992853 - DNA, 25 bp, Homo sapien
gctgctggccctccccacccaaggc

SEQ ID NO: 3992854 - DNA, 25 bp, Homo sapien
ctgagattttagaaccgaggtggaa

SEQ ID NO: 3992855 - DNA, 25 bp, Homo sapien
cagcacaagaggtttggaccaacgc

SEQ ID NO: 3992856 - DNA, 25 bp, Homo sapien
gaccaacgcgtgtgcgctactttct

SEQ ID NO: 3992857 - DNA, 25 bp, Homo sapien
tttagaaccgaggtggaacatggga

SEQ ID NO: 3992858 - DNA, 25 bp, Homo sapien
ggctttgtcaaagcggcgctcagat

SEQ ID NO: 3992859 - DNA, 25 bp, Homo sapien
cgtctcgtcaggtgccacgatgggt

SEQ ID NO: 3992860 - DNA, 25 bp, Homo sapien
tggcagccgtcagggctttgtcaaa

SEQ ID NO: 3992861 - DNA, 25 bp, Homo sapien
tcagatggagacaacgtctcgtcag

SEQ ID NO: 3992862 - DNA, 25 bp, Homo sapien
tgttactgttcctgatgtatttgat

SEQ ID NO: 3992863 - DNA, 25 bp, Homo sapien
ttactgttcctgatgtatttgatgg

SEQ ID NO: 3992864 - DNA, 25 bp, Homo sapien
gttactgttcctgatgtatttgatg

SEQ ID NO: 3992865 - DNA, 25 bp, Homo sapien
ctgcggaagtaggtctgtgcacagt

SEQ ID NO: 3992866 - DNA, 25 bp, Homo sapien
gcctgcggaagtaggtctgtgcaca

SEQ ID NO: 3992867 - DNA, 25 bp, Homo sapien
cagttgcctgcggaagtaggtctgt

SEQ ID NO: 3992868 - DNA, 25 bp, Homo sapien
ttgcctgcggaagtaggtctgtgca

SEQ ID NO: 3992869 - DNA, 25 bp, Homo sapien
cttcccgttgttcgatggagtggac

SEQ ID NO: 3992870 - DNA, 25 bp, Homo sapien
agagacacgaaacctgggagggcct

SEQ ID NO: 3992871 - DNA, 25 bp, Homo sapien
cccgttgttcgatggagtggactcc

SEQ ID NO: 3992872 - DNA, 25 bp, Homo sapien
agcttcccgttgttcgatggagtgg

SEQ ID NO: 3992873 - DNA, 25 bp, Homo sapien
tgtggtctcgctgtcctttgggaac

SEQ ID NO: 3992874 - DNA, 25 bp, Homo sapien
gcacacgtgatctgattctgcgaaa

SEQ ID NO: 3992875 - DNA, 25 bp, Homo sapien
tctgcgaaaattacccgagaatgtc

SEQ ID NO: 3992876 - DNA, 25 bp, Homo sapien
tgtcaggatacgacaaacactggtg

SEQ ID NO: 3992877 - DNA, 25 bp, Homo sapien
gcagtgcccgggttttgaatctgct

SEQ ID NO: 3992878 - DNA, 25 bp, Homo sapien
tgaatctgctggttatcaccaggat

SEQ ID NO: 3992879 - DNA, 25 bp, Homo sapien
gcccgggttttgaatctgctggtta

SEQ ID NO: 3992880 - DNA, 25 bp, Homo sapien
gttttgaatctgctggttatcacca

SEQ ID NO: 3992881 - DNA, 25 bp, Homo sapien
tcttctgccggattctgtgcgtcat

SEQ ID NO: 3992882 - DNA, 25 bp, Homo sapien
tggctttcggcaccattgcgccggg

SEQ ID NO: 3992883 - DNA, 25 bp, Homo sapien
tctgtgcgtcatgagcgccgaatgt

SEQ ID NO: 3992884 - DNA, 25 bp, Homo sapien
gagcagggtacaggattcctgctgc

SEQ ID NO: 3992885 - DNA, 25 bp, Homo sapien
tgtgtcgtgggtggatctgttcctt

SEQ ID NO: 3992886 - DNA, 25 bp, Homo sapien
gccttgtcttgtgtaggactttgtg

SEQ ID NO: 3992887 - DNA, 25 bp, Homo sapien
ctttgtggacgtggcccacacatgg

SEQ ID NO: 3992888 - DNA, 25 bp, Homo sapien
gatctgttccttcgaagcgccgtgc

SEQ ID NO: 3992889 - DNA, 25 bp, Homo sapien
cagtgacagtgaagggaaccgtcca

SEQ ID NO: 3992890 - DNA, 25 bp, Homo sapien
agtgacagtgaagggaaccgtccag

SEQ ID NO: 3992891 - DNA, 25 bp, Homo sapien
gtgacagtgaagggaaccgtccagg

SEQ ID NO: 3992892 - DNA, 25 bp, Homo sapien
ttaatcacggcaggttgtgtggtct

SEQ ID NO: 3992893 - DNA, 25 bp, Homo sapien
taatcacggcaggttgtgtggtctg

SEQ ID NO: 3992894 - DNA, 25 bp, Homo sapien
tttaatcacggcaggttgtgtggtc

SEQ ID NO: 3992895 - DNA, 25 bp, Homo sapien
tgggcacctgtttcctcagtgagcg

SEQ ID NO: 3992896 - DNA, 25 bp, Homo sapien
gggcacctgtttcctcagtgagcgt

SEQ ID NO: 3992897 - DNA, 25 bp, Homo sapien
ctgggcacctgtttcctcagtgagc

SEQ ID NO: 3992898 - DNA, 25 bp, Homo sapien
actctcagggcgaggccatccgtgg

SEQ ID NO: 3992899 - DNA, 25 bp, Homo sapien
gaggccatccgtggctgatggatct

SEQ ID NO: 3992900 - DNA, 25 bp, Homo sapien
ggatccagctgcatttgtgaagatg

SEQ ID NO: 3992901 - DNA, 25 bp, Homo sapien
ggcctctgttccagcgtggatccag

SEQ ID NO: 3992902 - DNA, 25 bp, Homo sapien
ttcacttcacgtctcagacccagag

SEQ ID NO: 3992903 - DNA, 25 bp, Homo sapien
agctcatgaaaagcatccgtgactt

SEQ ID NO: 3992904 - DNA, 25 bp, Homo sapien
aaagcatccgtgacttcacttcacg

SEQ ID NO: 3992905 - DNA, 25 bp, Homo sapien
gtgacttcacttcacgtctcagacc

SEQ ID NO: 3992906 - DNA, 25 bp, Homo sapien
gcccagcgtgtggtttccttgcact

SEQ ID NO: 3992907 - DNA, 25 bp, Homo sapien
ggctgaagctgcatccttccaggga

SEQ ID NO: 3992908 - DNA, 25 bp, Homo sapien
cttccagggagagcgttggtgtcgg

SEQ ID NO: 3992909 - DNA, 25 bp, Homo sapien
tcacattccggtgggaccaaccgag

SEQ ID NO: 3992910 - DNA, 25 bp, Homo sapien
agggccagatttgtgcttcgtactg

SEQ ID NO: 3992911 - DNA, 25 bp, Homo sapien
tgtgcttcgtactggaaatgccgcc

SEQ ID NO: 3992912 - DNA, 25 bp, Homo sapien
aaatgccgcctgtgcggcctggcgt

SEQ ID NO: 3992913 - DNA, 25 bp, Homo sapien
agctcggggacagagacctctgcct

SEQ ID NO: 3992914 - DNA, 25 bp, Homo sapien
acctgggtgcgggatcccggatgcc

SEQ ID NO: 3992915 - DNA, 25 bp, Homo sapien
tcggtaccatgagctgtttttataa

SEQ ID NO: 3992916 - DNA, 25 bp, Homo sapien
cactgggagaggtactggccactgc

SEQ ID NO: 3992917 - DNA, 25 bp, Homo sapien
tctggatgggcccattttcggtacc

SEQ ID NO: 3992918 - DNA, 25 bp, Homo sapien
gtcctctggaatggctgcgttcccc

SEQ ID NO: 3992919 - DNA, 25 bp, Homo sapien
ccgtgcgtcctctggaatggctgcg

SEQ ID NO: 3992920 - DNA, 25 bp, Homo sapien
tccatgtggggcaagctcagccgtg

SEQ ID NO: 3992921 - DNA, 25 bp, Homo sapien
caagctcagccgtgcgtcctctgga

SEQ ID NO: 3992922 - DNA, 25 bp, Homo sapien
gggcaagctcagccgtgcgtcctct

SEQ ID NO: 3992923 - DNA, 25 bp, Homo sapien
tggggcaagctcagccgtgcgtcct

SEQ ID NO: 3992924 - DNA, 25 bp, Homo sapien
ccatgtggggcaagctcagccgtgc

SEQ ID NO: 3992925 - DNA, 25 bp, Homo sapien
ctccatgtggggcaagctcagccgt

SEQ ID NO: 3992926 - DNA, 25 bp, Homo sapien
tcacggctttctacggcttttccaa

SEQ ID NO: 3992927 - DNA, 25 bp, Homo sapien
tgggctttcatagctggttcacggc

SEQ ID NO: 3992928 - DNA, 25 bp, Homo sapien
gctggttcacggctttctacggctt

SEQ ID NO: 3992929 - DNA, 25 bp, Homo sapien
ctccatgtgggctttcatagctggt

SEQ ID NO: 3992930 - DNA, 25 bp, Homo sapien
tctggcaacctagggccccatgccg

SEQ ID NO: 3992931 - DNA, 25 bp, Homo sapien
tgatgccctctggcaacctagggcc

SEQ ID NO: 3992932 - DNA, 25 bp, Homo sapien
gatgccctctggcaacctagggccc

SEQ ID NO: 3992933 - DNA, 25 bp, Homo sapien
aacctagggccccatgccgtgggct

SEQ ID NO: 3992934 - DNA, 25 bp, Homo sapien
gacacatccggcccggaggtggctt

SEQ ID NO: 3992935 - DNA, 25 bp, Homo sapien
catccggcccggaggtggcttcctt

SEQ ID NO: 3992936 - DNA, 25 bp, Homo sapien
gaggtggcttccttgaccggcacag

SEQ ID NO: 3992937 - DNA, 25 bp, Homo sapien
gtggcttccttgaccggcacagcct

SEQ ID NO: 3992938 - DNA, 25 bp, Homo sapien
tgtgggagttctccagccgtgcctg

SEQ ID NO: 3992939 - DNA, 25 bp, Homo sapien
tggatgtccagggattaagccccac

SEQ ID NO: 3992940 - DNA, 25 bp, Homo sapien
caccaccaggtgttgcggggctacg

SEQ ID NO: 3992941 - DNA, 25 bp, Homo sapien
aagccccacgaagccgggtgtcctg

SEQ ID NO: 3992942 - DNA, 25 bp, Homo sapien
tggagacacagggttttgtgggagt

SEQ ID NO: 3992943 - DNA, 25 bp, Homo sapien
gagacacagggttttgtgggagtgt

SEQ ID NO: 3992944 - DNA, 25 bp, Homo sapien
gacacagggttttgtgggagtgtca

SEQ ID NO: 3992945 - DNA, 25 bp, Homo sapien
acagggttttgtgggagtgtcagct

SEQ ID NO: 3992946 - DNA, 25 bp, Homo sapien
tcaccgggtgacaagcttcttaggg

SEQ ID NO: 3992947 - DNA, 25 bp, Homo sapien
tgccgcagaagcatctgggggtctg

SEQ ID NO: 3992948 - DNA, 25 bp, Homo sapien
ggtctggtgtggctcggggcttcct

SEQ ID NO: 3992949 - DNA, 25 bp, Homo sapien
ctgccggcagtggtgacagccagtc

SEQ ID NO: 3992950 - DNA, 25 bp, Homo sapien
tgccggcagtggtgacagccagtcc

SEQ ID NO: 3992951 - DNA, 25 bp, Homo sapien
gcagtggtgacagccagtccctggg

SEQ ID NO: 3992952 - DNA, 25 bp, Homo sapien
ccggcagtggtgacagccagtccct

SEQ ID NO: 3992953 - DNA, 25 bp, Homo sapien
tcagaggagcctactgctgcagagc

SEQ ID NO: 3992954 - DNA, 25 bp, Homo sapien
tcggtgatgcggagggaaagagggc

SEQ ID NO: 3992955 - DNA, 25 bp, Homo sapien
ctccctcggtgatgcggagggaaag

SEQ ID NO: 3992956 - DNA, 25 bp, Homo sapien
tctcagaggagcctactgctgcaga

SEQ ID NO: 3992957 - DNA, 25 bp, Homo sapien
cagttcagagccgggggtttgtgtc

SEQ ID NO: 3992958 - DNA, 25 bp, Homo sapien
gcggctcctccgccttaggaaccag

SEQ ID NO: 3992959 - DNA, 25 bp, Homo sapien
ggctcctccgccttaggaaccagag

SEQ ID NO: 3992960 - DNA, 25 bp, Homo sapien
aggtctgtgtccagggatgttccct

SEQ ID NO: 3992961 - DNA, 25 bp, Homo sapien
ttccctgtgtccagttcagagccgg

SEQ ID NO: 3992962 - DNA, 25 bp, Homo sapien
ttggagccgggggtctgtgtccgga

SEQ ID NO: 3992963 - DNA, 25 bp, Homo sapien
tctgtgtccggagatgttccctgtg

SEQ ID NO: 3992964 - DNA, 25 bp, Homo sapien
tgtgtccagtttggagccgggggtc

SEQ ID NO: 3992965 - DNA, 25 bp, Homo sapien
aggcgcgtgggccggctggaggtcc

SEQ ID NO: 3992966 - DNA, 25 bp, Homo sapien
tgtccagtgtgaggcgcgtgggccg

SEQ ID NO: 3992967 - DNA, 25 bp, Homo sapien
tctgtccagtgtgaggcgcgtgggc

SEQ ID NO: 3992968 - DNA, 25 bp, Homo sapien
tgtgaggcgcgtgggccggctggag

SEQ ID NO: 3992969 - DNA, 25 bp, Homo sapien
tgggaccaggctgcacccaccggtc

SEQ ID NO: 3992970 - DNA, 25 bp, Homo sapien
ctgtgggtgccgcagcactgggacc

SEQ ID NO: 3992971 - DNA, 25 bp, Homo sapien
tgggtgccgcagcactgggaccagg

SEQ ID NO: 3992972 - DNA, 25 bp, Homo sapien
tgcacccaccggtctgggcctcagg

SEQ ID NO: 3992973 - DNA, 25 bp, Homo sapien
tgctgttcaagtggacattagcatt

SEQ ID NO: 3992974 - DNA, 25 bp, Homo sapien
ttagcattgtcaggtggcctctgca

SEQ ID NO: 3992975 - DNA, 25 bp, Homo sapien
acattagcattgtcaggtggcctct

SEQ ID NO: 3992976 - DNA, 25 bp, Homo sapien
tgttcaagtggacattagcattgtc

SEQ ID NO: 3992977 - DNA, 25 bp, Homo sapien
tgtgtgtcctccagagatagttctc

SEQ ID NO: 3992978 - DNA, 25 bp, Homo sapien
ccagagatagttctcatggcagcac

SEQ ID NO: 3992979 - DNA, 25 bp, Homo sapien
gtgtcctccagagatagttctcatg

SEQ ID NO: 3992980 - DNA, 25 bp, Homo sapien
tcctccagagatagttctcatggca

SEQ ID NO: 3992981 - DNA, 25 bp, Homo sapien
tcagcttatctgagtgccgcgtctc

SEQ ID NO: 3992982 - DNA, 25 bp, Homo sapien
ggcaatttctcggaggcctggcacg

SEQ ID NO: 3992983 - DNA, 25 bp, Homo sapien
ccgtggcaaatgctgtccccagtag

SEQ ID NO: 3992984 - DNA, 25 bp, Homo sapien
acggcggcaccggaagcgggtactg

SEQ ID NO: 3992985 - DNA, 25 bp, Homo sapien
tttccaagctgaaaacgcgaggggc

SEQ ID NO: 3992986 - DNA, 25 bp, Homo sapien
aaggaaaacagcgtggtcggcctct

SEQ ID NO: 3992987 - DNA, 25 bp, Homo sapien
aaacagcgtggtcggcctctcgttc

SEQ ID NO: 3992988 - DNA, 25 bp, Homo sapien
acgcgaggggctcaaaactggaaag

SEQ ID NO: 3992989 - DNA, 25 bp, Homo sapien
gcgctcgtcacaataaaaaacccac

SEQ ID NO: 3992990 - DNA, 25 bp, Homo sapien
ggttgctgggcaccagcgctcgtca

SEQ ID NO: 3992991 - DNA, 25 bp, Homo sapien
aaacccacagtgaagatgggtcagg

SEQ ID NO: 3992992 - DNA, 25 bp, Homo sapien
aagccacggttttcccatcgcaggt

SEQ ID NO: 3992993 - DNA, 25 bp, Homo sapien
tgacagtccctacagtgagcgggac

SEQ ID NO: 3992994 - DNA, 25 bp, Homo sapien
gcctgacagtccctacagtgagcgg

SEQ ID NO: 3992995 - DNA, 25 bp, Homo sapien
gcgtggagggcataggcctcactct

SEQ ID NO: 3992996 - DNA, 25 bp, Homo sapien
ataggcctcactctctgactgcctg

SEQ ID NO: 3992997 - DNA, 25 bp, Homo sapien
gcggctggcagggacggacatgtcc

SEQ ID NO: 3992998 - DNA, 25 bp, Homo sapien
gaatcctccacgcttttccttgtct

SEQ ID NO: 3992999 - DNA, 25 bp, Homo sapien
agggtgaatcctccacgcttttcct

SEQ ID NO: 3993000 - DNA, 25 bp, Homo sapien
ggacggacatgtccgggccgcaggg

SEQ ID NO: 3993001 - DNA, 25 bp, Homo sapien
aatatgcagctcttctttaacgctc

SEQ ID NO: 3993002 - DNA, 25 bp, Homo sapien
ctggatgaacataaactccagggaa

SEQ ID NO: 3993003 - DNA, 25 bp, Homo sapien
ccagggaagctgcatagaatatgca

SEQ ID NO: 3993004 - DNA, 25 bp, Homo sapien
gatgaacataaactccagggaagct

SEQ ID NO: 3993005 - DNA, 25 bp, Homo sapien
ttggtacacgctggcaggggcatct

SEQ ID NO: 3993006 - DNA, 25 bp, Homo sapien
acttggtacacgctggcaggggcat

SEQ ID NO: 3993007 - DNA, 25 bp, Homo sapien
atctgggcctgcactctggaattgg

SEQ ID NO: 3993008 - DNA, 25 bp, Homo sapien
ctgggcctgcactctggaattggtg

SEQ ID NO: 3993009 - DNA, 25 bp, Homo sapien
cagaacgcctgctcagaacaccgtg

SEQ ID NO: 3993010 - DNA, 25 bp, Homo sapien
agccaccggcatcgccccatggcag

SEQ ID NO: 3993011 - DNA, 25 bp, Homo sapien
acgtgaaccaagcggctgcagccca

SEQ ID NO: 3993012 - DNA, 25 bp, Homo sapien
tcagaacaccgtgagccactgcccg

SEQ ID NO: 3993013 - DNA, 25 bp, Homo sapien
cacttccgttcacagagaccccagc

SEQ ID NO: 3993014 - DNA, 25 bp, Homo sapien
ggtagacacggatgccacatacggc

SEQ ID NO: 3993015 - DNA, 25 bp, Homo sapien
agtagacacggatgccacatggcat

SEQ ID NO: 3993016 - DNA, 25 bp, Homo sapien
gacacggatgccacatacggcgtct

SEQ ID NO: 3993017 - DNA, 25 bp, Homo sapien
ggggtctaatggacacagatgccac

SEQ ID NO: 3993018 - DNA, 25 bp, Homo sapien
ccgggggtcatcacagccagggggc

SEQ ID NO: 3993019 - DNA, 25 bp, Homo sapien
agccagagtccagaacgtgctccag

SEQ ID NO: 3993020 - DNA, 25 bp, Homo sapien
tgctgctgcataaacgttcgggggt

SEQ ID NO: 3993021 - DNA, 25 bp, Homo sapien
aggtgctcaggaagacccggcggag

SEQ ID NO: 3993022 - DNA, 25 bp, Homo sapien
gtgccccgggactgtctctggtgtc

SEQ ID NO: 3993023 - DNA, 25 bp, Homo sapien
ctggtgtccgcagctctcgtttggg

SEQ ID NO: 3993024 - DNA, 25 bp, Homo sapien
ccgcagctctcgtttggggagaaaa

SEQ ID NO: 3993025 - DNA, 25 bp, Homo sapien
gtctggtgccccgggactgtctctg

SEQ ID NO: 3993026 - DNA, 25 bp, Homo sapien
ccgggttgaagttcatcctcagaca

SEQ ID NO: 3993027 - DNA, 25 bp, Homo sapien
cagtagcaggcaacataggccagaa

SEQ ID NO: 3993028 - DNA, 25 bp, Homo sapien
tccctaagggcagctgtgacatttg

SEQ ID NO: 3993029 - DNA, 25 bp, Homo sapien
cgctgctggagatacccgggttgaa

SEQ ID NO: 3993030 - DNA, 25 bp, Homo sapien
tcaagaggtgcgaggtgcttctgcc

SEQ ID NO: 3993031 - DNA, 25 bp, Homo sapien
ccgtgtgtcttccagcgtgattagc

SEQ ID NO: 3993032 - DNA, 25 bp, Homo sapien
cattcccgtgtgtcgtgaacaacgc

SEQ ID NO: 3993033 - DNA, 25 bp, Homo sapien
cccggcgtctgctcatcaagaggtg

SEQ ID NO: 3993034 - DNA, 25 bp, Homo sapien
cggcacccagcccttgtaagggctc

SEQ ID NO: 3993035 - DNA, 25 bp, Homo sapien
ctgagccgatcaggggagccggcac

SEQ ID NO: 3993036 - DNA, 25 bp, Homo sapien
ccggcacccagcccttgtaagggct

SEQ ID NO: 3993037 - DNA, 25 bp, Homo sapien
agccgatcaggggagccggcaccca

SEQ ID NO: 3993038 - DNA, 25 bp, Homo sapien
gctctgccggacgtggagtctctga

SEQ ID NO: 3993039 - DNA, 25 bp, Homo sapien
gagtctctgaacctgctcggtgcat

SEQ ID NO: 3993040 - DNA, 25 bp, Homo sapien
tatgaccccgtcatgacttggtgcc

SEQ ID NO: 3993041 - DNA, 25 bp, Homo sapien
ccttataagggaatttgccgctggg

SEQ ID NO: 3993042 - DNA, 25 bp, Homo sapien
gggcttcctggtccgcctccgtgct

SEQ ID NO: 3993043 - DNA, 25 bp, Homo sapien
tggacgctggaacaccgtgtgcaga

SEQ ID NO: 3993044 - DNA, 25 bp, Homo sapien
ccagcccgtgtggacgctggaacac

SEQ ID NO: 3993045 - DNA, 25 bp, Homo sapien
ctggaacaccgtgtgcagaggctgc

SEQ ID NO: 3993046 - DNA, 25 bp, Homo sapien
cagccggcctcggtgaggatgacac

SEQ ID NO: 3993047 - DNA, 25 bp, Homo sapien
agcccaacagttggccacaccttgg

SEQ ID NO: 3993048 - DNA, 25 bp, Homo sapien
gtttatgtggagtgacctgcaccct

SEQ ID NO: 3993049 - DNA, 25 bp, Homo sapien
cttgaccctccaaggtctcctgtga

SEQ ID NO: 3993050 - DNA, 25 bp, Homo sapien
aagcgagccctggcagacatcctga

SEQ ID NO: 3993051 - DNA, 25 bp, Homo sapien
aaagcgagccctggcagacatcctg

SEQ ID NO: 3993052 - DNA, 25 bp, Homo sapien
caaagcgagccctggcagacatcct

SEQ ID NO: 3993053 - DNA, 25 bp, Homo sapien
tcaaagcgagccctggcagacatcc

SEQ ID NO: 3993054 - DNA, 25 bp, Homo sapien
tgacacagatcgctgtcccctgcag

SEQ ID NO: 3993055 - DNA, 25 bp, Homo sapien
tccccgatgctgacacagatcgctg

SEQ ID NO: 3993056 - DNA, 25 bp, Homo sapien
ccggagctgggtcgcgagggagatg

SEQ ID NO: 3993057 - DNA, 25 bp, Homo sapien
atggcggctccacggctccccgatg

SEQ ID NO: 3993058 - DNA, 25 bp, Homo sapien
tcttctgtccgggttcaggacaggg

SEQ ID NO: 3993059 - DNA, 25 bp, Homo sapien
aaatttgagggggagctttggcagc

SEQ ID NO: 3993060 - DNA, 25 bp, Homo sapien
aagtgaaatcttctgtccgggttca

SEQ ID NO: 3993061 - DNA, 25 bp, Homo sapien
tccagctcaactggagccctctgga

SEQ ID NO: 3993062 - DNA, 25 bp, Homo sapien
ctggtgggaagtcacggcccacgct

SEQ ID NO: 3993063 - DNA, 25 bp, Homo sapien
ggtgggaagtcacggcccacgctca

SEQ ID NO: 3993064 - DNA, 25 bp, Homo sapien
gtgggaagtcacggcccacgctcac

SEQ ID NO: 3993065 - DNA, 25 bp, Homo sapien
tggtgggaagtcacggcccacgctc

SEQ ID NO: 3993066 - DNA, 25 bp, Homo sapien
ttgatcaacacagctgaccatcctc

SEQ ID NO: 3993067 - DNA, 25 bp, Homo sapien
gtgggcgttgatcaacacagctgac

SEQ ID NO: 3993068 - DNA, 25 bp, Homo sapien
agctgaccatcctccgggtgctgtc

SEQ ID NO: 3993069 - DNA, 25 bp, Homo sapien
ggtggagctggaagacctgagggag

SEQ ID NO: 3993070 - DNA, 25 bp, Homo sapien
tgaacgggccggagacaccttgatc

SEQ ID NO: 3993071 - DNA, 25 bp, Homo sapien
agggtggaggcatgaacgggccgga

SEQ ID NO: 3993072 - DNA, 25 bp, Homo sapien
gagacaccttgatcccaggtaggag

SEQ ID NO: 3993073 - DNA, 25 bp, Homo sapien
tggaggcatgaacgggccggagaca

SEQ ID NO: 3993074 - DNA, 25 bp, Homo sapien
ccatctgagtattcggccacaagct

SEQ ID NO: 3993075 - DNA, 25 bp, Homo sapien
tctcaggcgccttttccggagaaag

SEQ ID NO: 3993076 - DNA, 25 bp, Homo sapien
gccacaagctccttggtagggaaga

SEQ ID NO: 3993077 - DNA, 25 bp, Homo sapien
tccagtcgtccttctcaggcgcctt

SEQ ID NO: 3993078 - DNA, 25 bp, Homo sapien
aagcccagatgagacacagaagctc

SEQ ID NO: 3993079 - DNA, 25 bp, Homo sapien
taagcccagatgagacacagaagct

SEQ ID NO: 3993080 - DNA, 25 bp, Homo sapien
gcccagatgagacacagaagctcat

SEQ ID NO: 3993081 - DNA, 25 bp, Homo sapien
ctaagcccagatgagacacagaagc

SEQ ID NO: 3993082 - DNA, 25 bp, Homo sapien
agcaaactggagcttctgttgttcc

SEQ ID NO: 3993083 - DNA, 25 bp, Homo sapien
cagctccagcaaactggagcttctg

SEQ ID NO: 3993084 - DNA, 25 bp, Homo sapien
tccagcaaactggagcttctgttgt

SEQ ID NO: 3993085 - DNA, 25 bp, Homo sapien
gctccagcaaactggagcttctgtt

SEQ ID NO: 3993086 - DNA, 25 bp, Homo sapien
ctcaccagggccagagcgggaactt

SEQ ID NO: 3993087 - DNA, 25 bp, Homo sapien
gagctcaccagggccagagcgggaa

SEQ ID NO: 3993088 - DNA, 25 bp, Homo sapien
gaaggagctcaccagggccagagcg

SEQ ID NO: 3993089 - DNA, 25 bp, Homo sapien
ttcttctctaagttccgaatgtcga

SEQ ID NO: 3993090 - DNA, 25 bp, Homo sapien
tggagagacttgttcacgtccttct

SEQ ID NO: 3993091 - DNA, 25 bp, Homo sapien
agctcctccaacacggcagacagtg

SEQ ID NO: 3993092 - DNA, 25 bp, Homo sapien
cttcccttgactgatggtgagggtc

SEQ ID NO: 3993093 - DNA, 25 bp, Homo sapien
cgtccttcttcccttgactgatggt

SEQ ID NO: 3993094 - DNA, 25 bp, Homo sapien
tcctgagagtcctctcggtataggc

SEQ ID NO: 3993095 - DNA, 25 bp, Homo sapien
cctgagagtcctctcggtataggct

SEQ ID NO: 3993096 - DNA, 25 bp, Homo sapien
ctcctgagagtcctctcggtatagg

SEQ ID NO: 3993097 - DNA, 25 bp, Homo sapien
tggcctccgaggcagggagggcggt

SEQ ID NO: 3993098 - DNA, 25 bp, Homo sapien
cgagggcctggcctccgaggcaggg

SEQ ID NO: 3993099 - DNA, 25 bp, Homo sapien
ggcagggagggcggtggctctgggt

SEQ ID NO: 3993100 - DNA, 25 bp, Homo sapien
agggagggcggtggctctgggtggg

SEQ ID NO: 3993101 - DNA, 25 bp, Homo sapien
gctgctccgcaggacaggcggggcc

SEQ ID NO: 3993102 - DNA, 25 bp, Homo sapien
gcaggccgcccccatatgcttttat

SEQ ID NO: 3993103 - DNA, 25 bp, Homo sapien
tatcaggctggacggcaattcagct

SEQ ID NO: 3993104 - DNA, 25 bp, Homo sapien
aattcctgcactgatatggggtccc

SEQ ID NO: 3993105 - DNA, 25 bp, Homo sapien
gtctgaatccccgcactgatttggg

SEQ ID NO: 3993106 - DNA, 25 bp, Homo sapien
gagtggccgtcatggatatccagac

SEQ ID NO: 3993107 - DNA, 25 bp, Homo sapien
gctcccttgccgctctttaggaaaa

SEQ ID NO: 3993108 - DNA, 25 bp, Homo sapien
cggtggacaacccatcagctcaggg

SEQ ID NO: 3993109 - DNA, 25 bp, Homo sapien
aggctggcttcacccgcaagtggtg

SEQ ID NO: 3993110 - DNA, 25 bp, Homo sapien
ggccaatcccctcatctctttttct

SEQ ID NO: 3993111 - DNA, 25 bp, Homo sapien
gaaggccaatcccctcatctctttt

SEQ ID NO: 3993112 - DNA, 25 bp, Homo sapien
tcagaaggccaatcccctcatctct

SEQ ID NO: 3993113 - DNA, 25 bp, Homo sapien
aaggccaatcccctcatctcttttt

SEQ ID NO: 3993114 - DNA, 25 bp, Homo sapien
gccctgtagacgcctgcacaggtcc

SEQ ID NO: 3993115 - DNA, 25 bp, Homo sapien
tgtagacgcctgcacaggtccccct

SEQ ID NO: 3993116 - DNA, 25 bp, Homo sapien
ctgtagacgcctgcacaggtccccc

SEQ ID NO: 3993117 - DNA, 25 bp, Homo sapien
tagacgcctgcacaggtccccctgg

SEQ ID NO: 3993118 - DNA, 25 bp, Homo sapien
cctgcatgatcccccgtggtctggg

SEQ ID NO: 3993119 - DNA, 25 bp, Homo sapien
ctgcacagcccccccggtccatggt

SEQ ID NO: 3993120 - DNA, 25 bp, Homo sapien
gcacaatcccgcgtggtcagtggct

SEQ ID NO: 3993121 - DNA, 25 bp, Homo sapien
gtggctccagagtcctcccgagatg

SEQ ID NO: 3993122 - DNA, 25 bp, Homo sapien
cagtggcccggatttctggtgctgc

SEQ ID NO: 3993123 - DNA, 25 bp, Homo sapien
ggtccctgtagacgcctgcacaatc

SEQ ID NO: 3993124 - DNA, 25 bp, Homo sapien
tgcccagggctccttgcaggggctg

SEQ ID NO: 3993125 - DNA, 25 bp, Homo sapien
ccagggctccttgcaggggctgtgg

SEQ ID NO: 3993126 - DNA, 25 bp, Homo sapien
cccagggctccttgcaggggctgtg

SEQ ID NO: 3993127 - DNA, 25 bp, Homo sapien
tgtgcccagggctccttgcaggggc

SEQ ID NO: 3993128 - DNA, 25 bp, Homo sapien
cattttctccaggcgagcacccttg

SEQ ID NO: 3993129 - DNA, 25 bp, Homo sapien
ccattttctccaggcgagcaccctt

SEQ ID NO: 3993130 - DNA, 25 bp, Homo sapien
attttctccaggcgagcacccttgc

SEQ ID NO: 3993131 - DNA, 25 bp, Homo sapien
ttttctccaggcgagcacccttgct

SEQ ID NO: 3993132 - DNA, 25 bp, Homo sapien
tgggaggagtggacgctcaggtctg

SEQ ID NO: 3993133 - DNA, 25 bp, Homo sapien
gtggacgctcaggtctggtccagga

SEQ ID NO: 3993134 - DNA, 25 bp, Homo sapien
gccaagcagcgagcgtgtttccctg

SEQ ID NO: 3993135 - DNA, 25 bp, Homo sapien
gggccaagcagcgagcgtgtttccc

SEQ ID NO: 3993136 - DNA, 25 bp, Homo sapien
gggcttgtgaggctctgacgaatgc

SEQ ID NO: 3993137 - DNA, 25 bp, Homo sapien
cccaggaaggtccacttgctgcttg

SEQ ID NO: 3993138 - DNA, 25 bp, Homo sapien
ttgctgcttgtacgggagccttgtt

SEQ ID NO: 3993139 - DNA, 25 bp, Homo sapien
gcacacaccgcaaccatctgtccat

SEQ ID NO: 3993140 - DNA, 25 bp, Homo sapien
agccgctgccggctctggtccccag

SEQ ID NO: 3993141 - DNA, 25 bp, Homo sapien
agggacagctcccaagccgctgccg

SEQ ID NO: 3993142 - DNA, 25 bp, Homo sapien
ggctgaccctcgaagatgctccagg

SEQ ID NO: 3993143 - DNA, 25 bp, Homo sapien
cctgggctgaccctcgaagatgctc

SEQ ID NO: 3993144 - DNA, 25 bp, Homo sapien
ggagccgcggacctgtcccacgttg

SEQ ID NO: 3993145 - DNA, 25 bp, Homo sapien
gcggacctgtcccacgttgagatca

SEQ ID NO: 3993146 - DNA, 25 bp, Homo sapien
tgtcccacgttgagatcagggtaga

SEQ ID NO: 3993147 - DNA, 25 bp, Homo sapien
cacgttgagatcagggtagacctgg

SEQ ID NO: 3993148 - DNA, 25 bp, Homo sapien
catgcatgtcgctgttaagatcggc

SEQ ID NO: 3993149 - DNA, 25 bp, Homo sapien
ttaacgggcaggagcgcatgcatgt

SEQ ID NO: 3993150 - DNA, 25 bp, Homo sapien
gagtttataagtgtcctcgccccac

SEQ ID NO: 3993151 - DNA, 25 bp, Homo sapien
tctgaattcatggacgttaacgggc

SEQ ID NO: 3993152 - DNA, 25 bp, Homo sapien
ggtcgtccacccacagaagccgtgt

SEQ ID NO: 3993153 - DNA, 25 bp, Homo sapien
gaagccgtgttctgattatcaacac

SEQ ID NO: 3993154 - DNA, 25 bp, Homo sapien
gaaggctgcgtgcttgtgggctcct

SEQ ID NO: 3993155 - DNA, 25 bp, Homo sapien
tgattatcaacacgccctctggcag

SEQ ID NO: 3993156 - DNA, 25 bp, Homo sapien
tatttggttctcaaacgaggcttca

SEQ ID NO: 3993157 - DNA, 25 bp, Homo sapien
atttggttctcaaacgaggcttcac

SEQ ID NO: 3993158 - DNA, 25 bp, Homo sapien
tatttacagcaagctcctcacgcga

SEQ ID NO: 3993159 - DNA, 25 bp, Homo sapien
tctcggcgggcttctaagttcaggc

SEQ ID NO: 3993160 - DNA, 25 bp, Homo sapien
caaatggctggaaacgaacaaacgc

SEQ ID NO: 3993161 - DNA, 25 bp, Homo sapien
ttttaattccgcacggtgagtggcg

SEQ ID NO: 3993162 - DNA, 25 bp, Homo sapien
cgtcggcctgacctccaactctgtt

SEQ ID NO: 3993163 - DNA, 25 bp, Homo sapien
ggcgtcggcctgacctccaactctg

SEQ ID NO: 3993164 - DNA, 25 bp, Homo sapien
tcggcctgacctccaactctgttaa

SEQ ID NO: 3993165 - DNA, 25 bp, Homo sapien
tcctgagcctcaggcgtcggcctga

SEQ ID NO: 3993166 - DNA, 25 bp, Homo sapien
ggtgtagatgcaatggccgtgacca

SEQ ID NO: 3993167 - DNA, 25 bp, Homo sapien
tgcagtttcccatcgagcactcgtg

SEQ ID NO: 3993168 - DNA, 25 bp, Homo sapien
gctgccctgatggagaacgtggctg

SEQ ID NO: 3993169 - DNA, 25 bp, Homo sapien
cctgggcatccgcttggcaaggctg

SEQ ID NO: 3993170 - DNA, 25 bp, Homo sapien
ctgtaggccaaggaggcctgcctgg

SEQ ID NO: 3993171 - DNA, 25 bp, Homo sapien
gccaaggaggcctgcctgggcccac

SEQ ID NO: 3993172 - DNA, 25 bp, Homo sapien
ggccaaggaggcctgcctgggccca

SEQ ID NO: 3993173 - DNA, 25 bp, Homo sapien
gtaggccaaggaggcctgcctgggc

SEQ ID NO: 3993174 - DNA, 25 bp, Homo sapien
ctggctgcagcggggagctgagcct

SEQ ID NO: 3993175 - DNA, 25 bp, Homo sapien
ggctgcagcggggagctgagcctcc

SEQ ID NO: 3993176 - DNA, 25 bp, Homo sapien
tggctgcagcggggagctgagcctc

SEQ ID NO: 3993177 - DNA, 25 bp, Homo sapien
gtgagccgcttcctcactgtaaagc

SEQ ID NO: 3993178 - DNA, 25 bp, Homo sapien
aatccgggcgatacgtggtgagaca

SEQ ID NO: 3993179 - DNA, 25 bp, Homo sapien
tgtaaacaggaacgtatcctccgcc

SEQ ID NO: 3993180 - DNA, 25 bp, Homo sapien
tagatagaccctgccgtggtgagca

SEQ ID NO: 3993181 - DNA, 25 bp, Homo sapien
tcagggaggcaggcagcaccctcac

SEQ ID NO: 3993182 - DNA, 25 bp, Homo sapien
agagtcagggaggcaggcagcaccc

SEQ ID NO: 3993183 - DNA, 25 bp, Homo sapien
ctcttggggaggtaagagtcaggga

SEQ ID NO: 3993184 - DNA, 25 bp, Homo sapien
agtcagggaggcaggcagcaccctc

SEQ ID NO: 3993185 - DNA, 25 bp, Homo sapien
ggttgagacgcttctctcctgccgg

SEQ ID NO: 3993186 - DNA, 25 bp, Homo sapien
caacatggttgagacgcttctctcc

SEQ ID NO: 3993187 - DNA, 25 bp, Homo sapien
ctctcctgccgggactggaaaggtg

SEQ ID NO: 3993188 - DNA, 25 bp, Homo sapien
ggccctgtggtcagccggtgccgca

SEQ ID NO: 3993189 - DNA, 25 bp, Homo sapien
ctgcagtccagaaagcagacgcttt

SEQ ID NO: 3993190 - DNA, 25 bp, Homo sapien
tgcagtccagaaagcagacgctttg

SEQ ID NO: 3993191 - DNA, 25 bp, Homo sapien
ctgccgggcacacggccgccggctc

SEQ ID NO: 3993192 - DNA, 25 bp, Homo sapien
gggcccggggcagtgacctctggtg

SEQ ID NO: 3993193 - DNA, 25 bp, Homo sapien
aagtgctgacatccccgggctgccg

SEQ ID NO: 3993194 - DNA, 25 bp, Homo sapien
gcaagtgctgacatccccgggctgc

SEQ ID NO: 3993195 - DNA, 25 bp, Homo sapien
ctgaatgccacccagaggcctgcgt

SEQ ID NO: 3993196 - DNA, 25 bp, Homo sapien
gctgaatgccacccagaggcctgcg

SEQ ID NO: 3993197 - DNA, 25 bp, Homo sapien
ctcatcctgccacacagcgcccgga

SEQ ID NO: 3993198 - DNA, 25 bp, Homo sapien
accgcaagtggggtctaacctgcaa

SEQ ID NO: 3993199 - DNA, 25 bp, Homo sapien
aacacacaaccgcaagtggggtcta

SEQ ID NO: 3993200 - DNA, 25 bp, Homo sapien
acaaccgcaagtggggtctaacctg

SEQ ID NO: 3993201 - DNA, 25 bp, Homo sapien
ctggaacacacaaccgcaagtgggg

SEQ ID NO: 3993202 - DNA, 25 bp, Homo sapien
tggaacacgtggcagtgccagctcc

SEQ ID NO: 3993203 - DNA, 25 bp, Homo sapien
cagcaggacattcgcaagccagtgg

SEQ ID NO: 3993204 - DNA, 25 bp, Homo sapien
catgtgggactgttcaggagacagt

SEQ ID NO: 3993205 - DNA, 25 bp, Homo sapien
aagccagtggacctgtctgcctcaa

SEQ ID NO: 3993206 - DNA, 25 bp, Homo sapien
ctgtgtgtcctacccggataccagc

SEQ ID NO: 3993207 - DNA, 25 bp, Homo sapien
ttctgtgtgtcctacccggatacca

SEQ ID NO: 3993208 - DNA, 25 bp, Homo sapien
ctggtagccttctgtgtgtcctacc

SEQ ID NO: 3993209 - DNA, 25 bp, Homo sapien
tacccggataccagcggcctccagg

SEQ ID NO: 3993210 - DNA, 25 bp, Homo sapien
ccgcaaagtccccgtgggactcagg

SEQ ID NO: 3993211 - DNA, 25 bp, Homo sapien
caaagtccccgtgggactcagggca

SEQ ID NO: 3993212 - DNA, 25 bp, Homo sapien
ccacagcaccttcgagaagttcccc

SEQ ID NO: 3993213 - DNA, 25 bp, Homo sapien
ccccacagcaccttcgagaagttcc

SEQ ID NO: 3993214 - DNA, 25 bp, Homo sapien
tccgaggctccaagggaacggtgtc

SEQ ID NO: 3993215 - DNA, 25 bp, Homo sapien
tctccagctgggaactagaccgtcg

SEQ ID NO: 3993216 - DNA, 25 bp, Homo sapien
actcagacgggttcacgacaggtgc

SEQ ID NO: 3993217 - DNA, 25 bp, Homo sapien
gaaaactggagtggacttggaccca

SEQ ID NO: 3993218 - DNA, 25 bp, Homo sapien
cgttttcgggcgagggtctggtgct

SEQ ID NO: 3993219 - DNA, 25 bp, Homo sapien
aataacacagggtcgtgcagtccgc

SEQ ID NO: 3993220 - DNA, 25 bp, Homo sapien
ctttaaatacgctctgcagtgtgac

SEQ ID NO: 3993221 - DNA, 25 bp, Homo sapien
tccacggatggagattgtctttggg

SEQ ID NO: 3993222 - DNA, 25 bp, Homo sapien
gccgcagccccgcaatctgttgata

SEQ ID NO: 3993223 - DNA, 25 bp, Homo sapien
ctgttgataactcggtcccagctcg

SEQ ID NO: 3993224 - DNA, 25 bp, Homo sapien
tttgtgcagcccgagatggttgagt

SEQ ID NO: 3993225 - DNA, 25 bp, Homo sapien
aaagcagctccgagtaactttcggc

SEQ ID NO: 3993226 - DNA, 25 bp, Homo sapien
tgaccgggcttccgggctcagtgcc

SEQ ID NO: 3993227 - DNA, 25 bp, Homo sapien
gcttccgcaactttgcagcgctcat

SEQ ID NO: 3993228 - DNA, 25 bp, Homo sapien
tggaaaagttgtggaatggcgagct

SEQ ID NO: 3993229 - DNA, 25 bp, Homo sapien
aactttgcagcgctcatggtgagta

SEQ ID NO: 3993230 - DNA, 25 bp, Homo sapien
cacctgacaaggttgcgtctccagc

SEQ ID NO: 3993231 - DNA, 25 bp, Homo sapien
gacacctgacaaggttgcgtctcca

SEQ ID NO: 3993232 - DNA, 25 bp, Homo sapien
ctttcagacacctgacaaggttgcg

SEQ ID NO: 3993233 - DNA, 25 bp, Homo sapien
tgacaaggttgcgtctccagcacca

SEQ ID NO: 3993234 - DNA, 25 bp, Homo sapien
tcccagacacagttggcgaaagcca

SEQ ID NO: 3993235 - DNA, 25 bp, Homo sapien
cccagagtagcaccctgtgtgaggc

SEQ ID NO: 3993236 - DNA, 25 bp, Homo sapien
catccggttgcatgggagacgtgac

SEQ ID NO: 3993237 - DNA, 25 bp, Homo sapien
aaacagcactcatttgcacccggag

SEQ ID NO: 3993238 - DNA, 25 bp, Homo sapien
acccagcgacggcaaggccctgctt

SEQ ID NO: 3993239 - DNA, 25 bp, Homo sapien
gcggacccagcgacggcaaggccct

SEQ ID NO: 3993240 - DNA, 25 bp, Homo sapien
acggcaaggccctgcttgcggccat

SEQ ID NO: 3993241 - DNA, 25 bp, Homo sapien
cagcgacggcaaggccctgcttgcg

SEQ ID NO: 3993242 - DNA, 25 bp, Homo sapien
agcagcacactgcccgtcatgcagt

SEQ ID NO: 3993243 - DNA, 25 bp, Homo sapien
gctggatgtgtcgatggaaagcaat

SEQ ID NO: 3993244 - DNA, 25 bp, Homo sapien
gtgtcgatggaaagcaatcagtttc

SEQ ID NO: 3993245 - DNA, 25 bp, Homo sapien
actgcccgtcatgcagtgtcaggcc

SEQ ID NO: 3993246 - DNA, 25 bp, Homo sapien
tctgtaagctatgtcggttatttgg

SEQ ID NO: 3993247 - DNA, 25 bp, Homo sapien
tgcaccaagctgtgtcagttatttg

SEQ ID NO: 3993248 - DNA, 25 bp, Homo sapien
tatttggagtctacgggctacgtcg

SEQ ID NO: 3993249 - DNA, 25 bp, Homo sapien
tctgcaggctgcgtcagttatttgg

SEQ ID NO: 3993250 - DNA, 25 bp, Homo sapien
tgttccatctggaatgcgtgcctga

SEQ ID NO: 3993251 - DNA, 25 bp, Homo sapien
gttccatctggaatgcgtgcctgag

SEQ ID NO: 3993252 - DNA, 25 bp, Homo sapien
cctgcccggtcctgttgtctactga

SEQ ID NO: 3993253 - DNA, 25 bp, Homo sapien
gttgtctactgacagcagcgctggc

SEQ ID NO: 3993254 - DNA, 25 bp, Homo sapien
tgcccggtcctgttgtctactgaca

SEQ ID NO: 3993255 - DNA, 25 bp, Homo sapien
gtcctgttgtctactgacagcagcg

SEQ ID NO: 3993256 - DNA, 25 bp, Homo sapien
ctggaatccaccgtctttcctgtga

SEQ ID NO: 3993257 - DNA, 25 bp, Homo sapien
atgacctcagtgcatcgaaggcccc

SEQ ID NO: 3993258 - DNA, 25 bp, Homo sapien
gaatccaccgtctttcctgtgaaaa

SEQ ID NO: 3993259 - DNA, 25 bp, Homo sapien
aaaatgacctcagtgcatcgaaggc

SEQ ID NO: 3993260 - DNA, 25 bp, Homo sapien
gtcacagcacaggtgagggcttcag

SEQ ID NO: 3993261 - DNA, 25 bp, Homo sapien
tcaagtcacagcacaggtgagggct

SEQ ID NO: 3993262 - DNA, 25 bp, Homo sapien
caagtcacagcacaggtgagggctt

SEQ ID NO: 3993263 - DNA, 25 bp, Homo sapien
agtcacagcacaggtgagggcttca

SEQ ID NO: 3993264 - DNA, 25 bp, Homo sapien
gtgttggtctcagaagggctgccct

SEQ ID NO: 3993265 - DNA, 25 bp, Homo sapien
cacagtgttggtctcagaagggctg

SEQ ID NO: 3993266 - DNA, 25 bp, Homo sapien
agcccagggacacagtgttggtctc

SEQ ID NO: 3993267 - DNA, 25 bp, Homo sapien
tgggtggcacctgggcccaggacct

SEQ ID NO: 3993268 - DNA, 25 bp, Homo sapien
agcatcagccatggcgggaacagag

SEQ ID NO: 3993269 - DNA, 25 bp, Homo sapien
ggaacagagccgtggcaggaccaca

SEQ ID NO: 3993270 - DNA, 25 bp, Homo sapien
ctgcaaccggtgagaggtgtgcagc

SEQ ID NO: 3993271 - DNA, 25 bp, Homo sapien
gaacagagccgtggcaggaccacac

SEQ ID NO: 3993272 - DNA, 25 bp, Homo sapien
cccagcgtgtgctgattccgaccat

SEQ ID NO: 3993273 - DNA, 25 bp, Homo sapien
caaccagcagcgggctagtgtgcca

SEQ ID NO: 3993274 - DNA, 25 bp, Homo sapien
ggctagtgtgccaggagggatcaca

SEQ ID NO: 3993275 - DNA, 25 bp, Homo sapien
cgtgtgctgattccgaccatcagct

SEQ ID NO: 3993276 - DNA, 25 bp, Homo sapien
gagactttccctttcgctgagtcag

SEQ ID NO: 3993277 - DNA, 25 bp, Homo sapien
tttgttcctcacatcagcccgagcg

SEQ ID NO: 3993278 - DNA, 25 bp, Homo sapien
tgaagcgtgtgcaggtctcttccgc

SEQ ID NO: 3993279 - DNA, 25 bp, Homo sapien
tggtttaaggtacccgtcctcatgc

SEQ ID NO: 3993280 - DNA, 25 bp, Homo sapien
ccgtgggtccgtcctgcaccactcc

SEQ ID NO: 3993281 - DNA, 25 bp, Homo sapien
cgccgtgggtccgtcctgcaccact

SEQ ID NO: 3993282 - DNA, 25 bp, Homo sapien
tgcgccgtgggtccgtcctgcacca

SEQ ID NO: 3993283 - DNA, 25 bp, Homo sapien
gtgggtccgtcctgcaccactcctg

SEQ ID NO: 3993284 - DNA, 25 bp, Homo sapien
tcagcggggaaacgctccgggccac

SEQ ID NO: 3993285 - DNA, 25 bp, Homo sapien
tgaaagacctcagcggggaaacgct

SEQ ID NO: 3993286 - DNA, 25 bp, Homo sapien
cccttccttgtgaaagacctcagcg

SEQ ID NO: 3993287 - DNA, 25 bp, Homo sapien
cttccttgtgaaagacctcagcggg

SEQ ID NO: 3993288 - DNA, 25 bp, Homo sapien
caattccgcgtgctggtcccgcaca

SEQ ID NO: 3993289 - DNA, 25 bp, Homo sapien
gcgtgctggtcccgcacacggtcat

SEQ ID NO: 3993290 - DNA, 25 bp, Homo sapien
ttatcccaattccgcgtgctggtcc

SEQ ID NO: 3993291 - DNA, 25 bp, Homo sapien
tggtcccgcacacggtcatccggtt

SEQ ID NO: 3993292 - DNA, 25 bp, Homo sapien
ggattccatcaaaggacccactgag

SEQ ID NO: 3993293 - DNA, 25 bp, Homo sapien
tataggcacttagcaacacgaaggt

SEQ ID NO: 3993294 - DNA, 25 bp, Homo sapien
tgtccttacaggtcgaccagacggg

SEQ ID NO: 3993295 - DNA, 25 bp, Homo sapien
cacacactgggtttgcattggagat

SEQ ID NO: 3993296 - DNA, 25 bp, Homo sapien
gaatccccacgctgtgctgtgtacg

SEQ ID NO: 3993297 - DNA, 25 bp, Homo sapien
catagctgatgtgaacccgaatccc

SEQ ID NO: 3993298 - DNA, 25 bp, Homo sapien
tgcagaaccgtccacacaaaaatac

SEQ ID NO: 3993299 - DNA, 25 bp, Homo sapien
tacgcactgtaggtgcagaaccgtc

SEQ ID NO: 3993300 - DNA, 25 bp, Homo sapien
ggcgtcccaccattcaaccaaagaa

SEQ ID NO: 3993301 - DNA, 25 bp, Homo sapien
agcatccccgtgtgtttttctcacc

SEQ ID NO: 3993302 - DNA, 25 bp, Homo sapien
cccggctgagcagagaggcgtccca

SEQ ID NO: 3993303 - DNA, 25 bp, Homo sapien
tgtttgttctttgtgaggctggtta

SEQ ID NO: 3993304 - DNA, 25 bp, Homo sapien
ttgacgtcgttggaaagagaacctc

SEQ ID NO: 3993305 - DNA, 25 bp, Homo sapien
gtattgacgtcgttggaaagagaac

SEQ ID NO: 3993306 - DNA, 25 bp, Homo sapien
gacgtcgttggaaagagaacctcca

SEQ ID NO: 3993307 - DNA, 25 bp, Homo sapien
tgacgtcgttggaaagagaacctcc

SEQ ID NO: 3993308 - DNA, 25 bp, Homo sapien
tccagcataactgaggtgccaggac

SEQ ID NO: 3993309 - DNA, 25 bp, Homo sapien
tctagaagacgtggggcgatgaatc

SEQ ID NO: 3993310 - DNA, 25 bp, Homo sapien
cgccctcgtccagcataactgaggt

SEQ ID NO: 3993311 - DNA, 25 bp, Homo sapien
gacgtggggcgatgaatccagaccc

SEQ ID NO: 3993312 - DNA, 25 bp, Homo sapien
cgggacaactcgcaaaacgtctgga

SEQ ID NO: 3993313 - DNA, 25 bp, Homo sapien
gcaccctccacttgggtcaaagctt

SEQ ID NO: 3993314 - DNA, 25 bp, Homo sapien
caaagctttatcactgcaggcgagt

SEQ ID NO: 3993315 - DNA, 25 bp, Homo sapien
actccccagaacaacagagaccaaa

SEQ ID NO: 3993316 - DNA, 25 bp, Homo sapien
tgcagcgggatcaggctcctggagc

SEQ ID NO: 3993317 - DNA, 25 bp, Homo sapien
ttccgcctccttccaagacagggac

SEQ ID NO: 3993318 - DNA, 25 bp, Homo sapien
ccgcctccttccaagacagggactg

SEQ ID NO: 3993319 - DNA, 25 bp, Homo sapien
gcaccagggtgcagcgggatcaggc

SEQ ID NO: 3993320 - DNA, 25 bp, Homo sapien
ctgtggggcccacagagagagagct

SEQ ID NO: 3993321 - DNA, 25 bp, Homo sapien
ctcagggacagctggctgaggccac

SEQ ID NO: 3993322 - DNA, 25 bp, Homo sapien
tgtggggcccacagagagagagctc

SEQ ID NO: 3993323 - DNA, 25 bp, Homo sapien
agagagctcagggacagctggctga

SEQ ID NO: 3993324 - DNA, 25 bp, Homo sapien
gagactcctcctctccagctccagc

SEQ ID NO: 3993325 - DNA, 25 bp, Homo sapien
cctctgtgagactcctcctctccag

SEQ ID NO: 3993326 - DNA, 25 bp, Homo sapien
agactcctcctctccagctccagcc

SEQ ID NO: 3993327 - DNA, 25 bp, Homo sapien
ctcctcctctccagctccagcccac

SEQ ID NO: 3993328 - DNA, 25 bp, Homo sapien
cctgactgctgactcggtggaccag

SEQ ID NO: 3993329 - DNA, 25 bp, Homo sapien
gactgctgactcggtggaccagggt

SEQ ID NO: 3993330 - DNA, 25 bp, Homo sapien
tgactgctgactcggtggaccaggg

SEQ ID NO: 3993331 - DNA, 25 bp, Homo sapien
ctgactgctgactcggtggaccagg

SEQ ID NO: 3993332 - DNA, 25 bp, Homo sapien
ttggtgcgcggtagctcctggtgga

SEQ ID NO: 3993333 - DNA, 25 bp, Homo sapien
cccgaatgcgcacgggacggcggcg

SEQ ID NO: 3993334 - DNA, 25 bp, Homo sapien
gcagcccctgcagaagttggtgcgc

SEQ ID NO: 3993335 - DNA, 25 bp, Homo sapien
atgcgcacgggacggcggcgggtgg

SEQ ID NO: 3993336 - DNA, 25 bp, Homo sapien
atggcctggattcggtgcagttgaa

SEQ ID NO: 3993337 - DNA, 25 bp, Homo sapien
caccgtccttctgggaaggttcagc

SEQ ID NO: 3993338 - DNA, 25 bp, Homo sapien
ttctgctgtggaagcaccgtccttc

SEQ ID NO: 3993339 - DNA, 25 bp, Homo sapien
tctgaagggaccgggagtttctgct

SEQ ID NO: 3993340 - DNA, 25 bp, Homo sapien
agctccttcgtgcatcagaggcctg

SEQ ID NO: 3993341 - DNA, 25 bp, Homo sapien
ttcgtgcatcagaggcctgagcctt

SEQ ID NO: 3993342 - DNA, 25 bp, Homo sapien
tccgcacacggaggcagcagccggt

SEQ ID NO: 3993343 - DNA, 25 bp, Homo sapien
gcgagcccacttggagccacaggct

SEQ ID NO: 3993344 - DNA, 25 bp, Homo sapien
ttcaggtgggcccttcgcagacact

SEQ ID NO: 3993345 - DNA, 25 bp, Homo sapien
tcccaccgagtttgcagcgtgcagt

SEQ ID NO: 3993346 - DNA, 25 bp, Homo sapien
ctccatcctgtgacgtccaccaagg

SEQ ID NO: 3993347 - DNA, 25 bp, Homo sapien
caggtgaactgtcatcccaccgagt

SEQ ID NO: 3993348 - DNA, 25 bp, Homo sapien
gaaagcatcgggtggtccctggccc

SEQ ID NO: 3993349 - DNA, 25 bp, Homo sapien
tgtgcccagtactgagcccaacaca

SEQ ID NO: 3993350 - DNA, 25 bp, Homo sapien
gtgcccagtactgagcccaacacac

SEQ ID NO: 3993351 - DNA, 25 bp, Homo sapien
aattcccctggcgttcagactctgc

SEQ ID NO: 3993352 - DNA, 25 bp, Homo sapien
tctgcttcccacacgtgtttggctt

SEQ ID NO: 3993353 - DNA, 25 bp, Homo sapien
cccacacgtgtttggcttggaaggt

SEQ ID NO: 3993354 - DNA, 25 bp, Homo sapien
ttcccctggcgttcagactctgctt

SEQ ID NO: 3993355 - DNA, 25 bp, Homo sapien
gcatcagcaagtgggccagcaggtc

SEQ ID NO: 3993356 - DNA, 25 bp, Homo sapien
agagcatcagcaagtgggccagcag

SEQ ID NO: 3993357 - DNA, 25 bp, Homo sapien
cagagcatcagcaagtgggccagca

SEQ ID NO: 3993358 - DNA, 25 bp, Homo sapien
agcatcagcaagtgggccagcaggt

SEQ ID NO: 3993359 - DNA, 25 bp, Homo sapien
gatcccagtacaggcaaagaaccac

SEQ ID NO: 3993360 - DNA, 25 bp, Homo sapien
cagtacacgatagacagggagatgt

SEQ ID NO: 3993361 - DNA, 25 bp, Homo sapien
gaaccaccagtacacgatagacagg

SEQ ID NO: 3993362 - DNA, 25 bp, Homo sapien
ggcaaagaaccaccagtacacgata

SEQ ID NO: 3993363 - DNA, 25 bp, Homo sapien
gcaaggagggcttcctggaggtgtc

SEQ ID NO: 3993364 - DNA, 25 bp, Homo sapien
ctgtgggggtgatgcaaggagggct

SEQ ID NO: 3993365 - DNA, 25 bp, Homo sapien
gggggtgatgcaaggagggcttcct

SEQ ID NO: 3993366 - DNA, 25 bp, Homo sapien
gtgggggtgatgcaaggagggcttc

SEQ ID NO: 3993367 - DNA, 25 bp, Homo sapien
gtcactgtggatgggggtatgggat

SEQ ID NO: 3993368 - DNA, 25 bp, Homo sapien
tcagtcactgtggatgggggtatgg

SEQ ID NO: 3993369 - DNA, 25 bp, Homo sapien
tcccatgagatttcagtcactgtgg

SEQ ID NO: 3993370 - DNA, 25 bp, Homo sapien
ccatgagatttcagtcactgtggat

SEQ ID NO: 3993371 - DNA, 25 bp, Homo sapien
ggtgctggggctccaggtgtccggc

SEQ ID NO: 3993372 - DNA, 25 bp, Homo sapien
ctggggctccaggtgtccggcttcc

SEQ ID NO: 3993373 - DNA, 25 bp, Homo sapien
ctctcatgggtgctggggctccagg

SEQ ID NO: 3993374 - DNA, 25 bp, Homo sapien
tgctggggctccaggtgtccggctt

SEQ ID NO: 3993375 - DNA, 25 bp, Homo sapien
tgtgtgcgagtggtggccctgctgg

SEQ ID NO: 3993376 - DNA, 25 bp, Homo sapien
cttcccgggtccacgtgtctcgaca

SEQ ID NO: 3993377 - DNA, 25 bp, Homo sapien
attctgtgggctggcggcaggcgcc

SEQ ID NO: 3993378 - DNA, 25 bp, Homo sapien
tgtctcgacaccattctgtgggctg

SEQ ID NO: 3993379 - DNA, 25 bp, Homo sapien
cgggtccacgtgtctcgacaccatt

SEQ ID NO: 3993380 - DNA, 25 bp, Homo sapien
gcagcacacccaagagggccttcag

SEQ ID NO: 3993381 - DNA, 25 bp, Homo sapien
cggccggggagcagcacacccaaga

SEQ ID NO: 3993382 - DNA, 25 bp, Homo sapien
tgcacatggggtgccccggccgggg

SEQ ID NO: 3993383 - DNA, 25 bp, Homo sapien
gggagcagcacacccaagagggcct

SEQ ID NO: 3993384 - DNA, 25 bp, Homo sapien
tatcccgtcgggtgaaacgctacat

SEQ ID NO: 3993385 - DNA, 25 bp, Homo sapien
tagtcatgtcataatccagctcaga

SEQ ID NO: 3993386 - DNA, 25 bp, Homo sapien
ctggtggctgtgatccctggtgcac

SEQ ID NO: 3993387 - DNA, 25 bp, Homo sapien
gacttgaggccatctgtgatcttcc

SEQ ID NO: 3993388 - DNA, 25 bp, Homo sapien
cagtccaggacagcccgagacttca

SEQ ID NO: 3993389 - DNA, 25 bp, Homo sapien
aacaccagctgggacgggttccctg

SEQ ID NO: 3993390 - DNA, 25 bp, Homo sapien
agccggaacaccagctgggacgggt

SEQ ID NO: 3993391 - DNA, 25 bp, Homo sapien
tgtgcaggccgcagcacggacaggg

SEQ ID NO: 3993392 - DNA, 25 bp, Homo sapien
tcctggcctgcactttatgactcag

SEQ ID NO: 3993393 - DNA, 25 bp, Homo sapien
agcttctgggccacgtgaaagaccc

SEQ ID NO: 3993394 - DNA, 25 bp, Homo sapien
tgactcagtccagaacatgacccgg

SEQ ID NO: 3993395 - DNA, 25 bp, Homo sapien
tgaaagacccgcatggtgctacagc

SEQ ID NO: 3993396 - DNA, 25 bp, Homo sapien
tccctctacccaagataacctccag

SEQ ID NO: 3993397 - DNA, 25 bp, Homo sapien
ggtggccgcgcatccagcagaggag

SEQ ID NO: 3993398 - DNA, 25 bp, Homo sapien
caaaacactccccgtggtctctagg

SEQ ID NO: 3993399 - DNA, 25 bp, Homo sapien
tttcagaggcctgggtaccttgccc

SEQ ID NO: 3993400 - DNA, 25 bp, Homo sapien
tccaggcatgctcttcccggcgtgt

SEQ ID NO: 3993401 - DNA, 25 bp, Homo sapien
atccaggcatgctcttcccggcgtg

SEQ ID NO: 3993402 - DNA, 25 bp, Homo sapien
tgtgtgtgtgagagcccatccaggc

SEQ ID NO: 3993403 - DNA, 25 bp, Homo sapien
gtgtgagagcccatccaggcatgct

SEQ ID NO: 3993404 - DNA, 25 bp, Homo sapien
ggcatgctcttcccggcatgtgtgt

SEQ ID NO: 3993405 - DNA, 25 bp, Homo sapien
ggcatgctcttcccggcatgtgtgt

SEQ ID NO: 3993406 - DNA, 25 bp, Homo sapien
cgccgtgcgaggcagtggctccggc

SEQ ID NO: 3993407 - DNA, 25 bp, Homo sapien
gaggagccggattagggctggaggc

SEQ ID NO: 3993408 - DNA, 25 bp, Homo sapien
gtccccgtgaggtttgggcgccaca

SEQ ID NO: 3993409 - DNA, 25 bp, Homo sapien
tcctgcgatggccccggagtgagtc

SEQ ID NO: 3993410 - DNA, 25 bp, Homo sapien
cctttgtgcctctgaatcgaaggca

SEQ ID NO: 3993411 - DNA, 25 bp, Homo sapien
accatcgcctctccattaaccaggg

SEQ ID NO: 3993412 - DNA, 25 bp, Homo sapien
aaggaggtgaccgatcccgaaccat

SEQ ID NO: 3993413 - DNA, 25 bp, Homo sapien
ggagaggagaggtcgcccggcacct

SEQ ID NO: 3993414 - DNA, 25 bp, Homo sapien
caagtccctcttaacaagaactcca

SEQ ID NO: 3993415 - DNA, 25 bp, Homo sapien
tcaagtccctcttaacaagaactcc

SEQ ID NO: 3993416 - DNA, 25 bp, Homo sapien
ttacaactggcatgtgcttttaaac

SEQ ID NO: 3993417 - DNA, 25 bp, Homo sapien
tacaactggcatgtgcttttaaaca

SEQ ID NO: 3993418 - DNA, 25 bp, Homo sapien
taagaggggaacagctgctgtacat

SEQ ID NO: 3993419 - DNA, 25 bp, Homo sapien
gtaagaggggaacagctgctgtaca

SEQ ID NO: 3993420 - DNA, 25 bp, Homo sapien
aggggaacagctgctgtacatcgtc

SEQ ID NO: 3993421 - DNA, 25 bp, Homo sapien
tcaggtaagaggggaacagctgctg

SEQ ID NO: 3993422 - DNA, 25 bp, Homo sapien
ggcacgttgtccgtgataaaagtac

SEQ ID NO: 3993423 - DNA, 25 bp, Homo sapien
gttgtccgtgataaaagtacaagtg

SEQ ID NO: 3993424 - DNA, 25 bp, Homo sapien
tgggggcacgttgtccgtgataaaa

SEQ ID NO: 3993425 - DNA, 25 bp, Homo sapien
tggacaggggctactgggtttggcc

SEQ ID NO: 3993426 - DNA, 25 bp, Homo sapien
aaccacaccgtcttggtcctgaact

SEQ ID NO: 3993427 - DNA, 25 bp, Homo sapien
tgaactctcccggtgagtaagggcc

SEQ ID NO: 3993428 - DNA, 25 bp, Homo sapien
tgctttctggtcccctgtgtggccc

SEQ ID NO: 3993429 - DNA, 25 bp, Homo sapien
cctggtggtgtctcgaggtcctgcc

SEQ ID NO: 3993430 - DNA, 25 bp, Homo sapien
ggctccatcctgcagatgaggagct

SEQ ID NO: 3993431 - DNA, 25 bp, Homo sapien
tgggcctccttagggccctggctcc

SEQ ID NO: 3993432 - DNA, 25 bp, Homo sapien
cttagggccctggctccatcctgca

SEQ ID NO: 3993433 - DNA, 25 bp, Homo sapien
ctccttagggccctggctccatcct

SEQ ID NO: 3993434 - DNA, 25 bp, Homo sapien
gggatgcagtgaccactccgctggc

SEQ ID NO: 3993435 - DNA, 25 bp, Homo sapien
ctgctgcgtcacagctggccgggat

SEQ ID NO: 3993436 - DNA, 25 bp, Homo sapien
tggctgaccgctggacgtcagtccc

SEQ ID NO: 3993437 - DNA, 25 bp, Homo sapien
gctggcctcagcgtgtttccgctct

SEQ ID NO: 3993438 - DNA, 25 bp, Homo sapien
gatcaggtgggaggtgcagtcgcta

SEQ ID NO: 3993439 - DNA, 25 bp, Homo sapien
ggccgagggctatgccggctccttc

SEQ ID NO: 3993440 - DNA, 25 bp, Homo sapien
tatgaaatagtcctgccaagaatct

SEQ ID NO: 3993441 - DNA, 25 bp, Homo sapien
gctccttccccacgggatcaggtgg

SEQ ID NO: 3993442 - DNA, 25 bp, Homo sapien
gggcggggtgcccttgatgcagagg

SEQ ID NO: 3993443 - DNA, 25 bp, Homo sapien
gcagccgcaggtgcacacatgagcc

SEQ ID NO: 3993444 - DNA, 25 bp, Homo sapien
ttggcaagcctggacagccaccttg

SEQ ID NO: 3993445 - DNA, 25 bp, Homo sapien
caagcctggacagccaccttggtgg

SEQ ID NO: 3993446 - DNA, 25 bp, Homo sapien
catgtcttggcaagcctggacagcc

SEQ ID NO: 3993447 - DNA, 25 bp, Homo sapien
gtcttggcaagcctggacagccacc

SEQ ID NO: 3993448 - DNA, 25 bp, Homo sapien
aataaaggtgttaagaagcaacagc

SEQ ID NO: 3993449 - DNA, 25 bp, Homo sapien
aagcaacagccagccgggcgctgtg

SEQ ID NO: 3993450 - DNA, 25 bp, Homo sapien
caactcatacccatgattacaaaag

SEQ ID NO: 3993451 - DNA, 25 bp, Homo sapien
aatgaaattagctctactgaaattt

SEQ ID NO: 3993452 - DNA, 25 bp, Homo sapien
gacacttccagaacccacacaaaag

SEQ ID NO: 3993453 - DNA, 25 bp, Homo sapien
agactggtcacagagcaccgcccag

SEQ ID NO: 3993454 - DNA, 25 bp, Homo sapien
ctcccggccgaggagaaaggaagca

SEQ ID NO: 3993455 - DNA, 25 bp, Homo sapien
aggaagcaggtggagtcccaagtca

SEQ ID NO: 3993456 - DNA, 25 bp, Homo sapien
cctcaaagaagtatatgcataggaa

SEQ ID NO: 3993457 - DNA, 25 bp, Homo sapien
tctttaggccagatcctcaaagaag

SEQ ID NO: 3993458 - DNA, 25 bp, Homo sapien
gggcggctctgaggcgggccggctc

SEQ ID NO: 3993459 - DNA, 25 bp, Homo sapien
tatgcataggaaaaaggaacggcgg

SEQ ID NO: 3993460 - DNA, 25 bp, Homo sapien
gagaagtcgggactgaggcctggtg

SEQ ID NO: 3993461 - DNA, 25 bp, Homo sapien
agaagtcgggactgaggcctggtgg

SEQ ID NO: 3993462 - DNA, 25 bp, Homo sapien
gaagtcgggactgaggcctggtggg

SEQ ID NO: 3993463 - DNA, 25 bp, Homo sapien
aggcaggccttgggcctcgtcttac

SEQ ID NO: 3993464 - DNA, 25 bp, Homo sapien
agagccaagccagggccgagttccc

SEQ ID NO: 3993465 - DNA, 25 bp, Homo sapien
gaggcaggccttgggcctcgtctta

SEQ ID NO: 3993466 - DNA, 25 bp, Homo sapien
aagccagggccgagttcccagaggc

SEQ ID NO: 3993467 - DNA, 25 bp, Homo sapien
gccgctggcgctgggtagcccgtga

SEQ ID NO: 3993468 - DNA, 25 bp, Homo sapien
gggccgctggcgctgggtagcccgt

SEQ ID NO: 3993469 - DNA, 25 bp, Homo sapien
tgggtagcccgtgagcctcgtgagc

SEQ ID NO: 3993470 - DNA, 25 bp, Homo sapien
ctgggccgctggcgctgggtagccc

SEQ ID NO: 3993471 - DNA, 25 bp, Homo sapien
ccttgactgttgtacgcgagagtct

SEQ ID NO: 3993472 - DNA, 25 bp, Homo sapien
cgggccttgactgttgtacgcgaga

SEQ ID NO: 3993473 - DNA, 25 bp, Homo sapien
gttgtacgcgagagtctcctgtccc

SEQ ID NO: 3993474 - DNA, 25 bp, Homo sapien
gcagcgggccttgactgttgtacgc

SEQ ID NO: 3993475 - DNA, 25 bp, Homo sapien
aagactttcatcatccacacgggtt

SEQ ID NO: 3993476 - DNA, 25 bp, Homo sapien
gctggccccatcggctggagcctgg

SEQ ID NO: 3993477 - DNA, 25 bp, Homo sapien
cactgttaacccttggtggactctc

SEQ ID NO: 3993478 - DNA, 25 bp, Homo sapien
gggtctggcagacgtgcttggcacg

SEQ ID NO: 3993479 - DNA, 25 bp, Homo sapien
gtgataacgggtggccttcaggcgg

SEQ ID NO: 3993480 - DNA, 25 bp, Homo sapien
attccattccttgtggggcccggtg

SEQ ID NO: 3993481 - DNA, 25 bp, Homo sapien
tacaacttttgtgcaccctagggtg

SEQ ID NO: 3993482 - DNA, 25 bp, Homo sapien
tacccaagattgtactccgtgaggg

SEQ ID NO: 3993483 - DNA, 25 bp, Homo sapien
ccttcccgctgagaaatgcaggccg

SEQ ID NO: 3993484 - DNA, 25 bp, Homo sapien
taaaatgcgctccttgcacctggga

SEQ ID NO: 3993485 - DNA, 25 bp, Homo sapien
gaggaagcggctgctttcagctgcc

SEQ ID NO: 3993486 - DNA, 25 bp, Homo sapien
gctgccttcgccttgcctcctgagg

SEQ ID NO: 3993487 - DNA, 25 bp, Homo sapien
tggaaccctcctgaggtttgtggcc

SEQ ID NO: 3993488 - DNA, 25 bp, Homo sapien
agtgcccctgcagggcggtgcagca

SEQ ID NO: 3993489 - DNA, 25 bp, Homo sapien
agatctggatgagctgttttctgga

SEQ ID NO: 3993490 - DNA, 25 bp, Homo sapien
tgatgtcgacatcgcggttcctgag

SEQ ID NO: 3993491 - DNA, 25 bp, Homo sapien
gttcctgagcgggtgcccagatctg

SEQ ID NO: 3993492 - DNA, 25 bp, Homo sapien
caggaaagtgacgtcattttgtggc

SEQ ID NO: 3993493 - DNA, 25 bp, Homo sapien
tcaagcctggtttacaccacagagc

SEQ ID NO: 3993494 - DNA, 25 bp, Homo sapien
tgtgcacggagagccaggtgtacac

SEQ ID NO: 3993495 - DNA, 25 bp, Homo sapien
tgtacactgcagagccgcgtgtgca

SEQ ID NO: 3993496 - DNA, 25 bp, Homo sapien
ccacagagctgggtatgcgctgaga

SEQ ID NO: 3993497 - DNA, 25 bp, Homo sapien
gccaggtgtgcacggagaatcaggt

SEQ ID NO: 3993498 - DNA, 25 bp, Homo sapien
agccaggtgtgcacggagaatcagg

SEQ ID NO: 3993499 - DNA, 25 bp, Homo sapien
gagccaggtgtgcacggagaatcag

SEQ ID NO: 3993500 - DNA, 25 bp, Homo sapien
agagccaggtgtgcacggagaatca

SEQ ID NO: 3993501 - DNA, 25 bp, Homo sapien
cggcaacaagggtgccaggtcgcct

SEQ ID NO: 3993502 - DNA, 25 bp, Homo sapien
aacaagggtgccaggtcgcctgcac

SEQ ID NO: 3993503 - DNA, 25 bp, Homo sapien
cacagggtgtcccggcaacaagggt

SEQ ID NO: 3993504 - DNA, 25 bp, Homo sapien
tgtcccggcaacaagggtgccaggt

SEQ ID NO: 3993505 - DNA, 25 bp, Homo sapien
ctgactgtctcctgcggaaaggaca

SEQ ID NO: 3993506 - DNA, 25 bp, Homo sapien
tgactgtctcctgcggaaaggacag

SEQ ID NO: 3993507 - DNA, 25 bp, Homo sapien
cggggtctgggtgctctggcgcccg

SEQ ID NO: 3993508 - DNA, 25 bp, Homo sapien
ggggtctgggtgctctggcgcccgg

SEQ ID NO: 3993509 - DNA, 25 bp, Homo sapien
gtggctgagcgggagcgcgtccagc

SEQ ID NO: 3993510 - DNA, 25 bp, Homo sapien
gctgagcgggagcgcgtccagccag

SEQ ID NO: 3993511 - DNA, 25 bp, Homo sapien
gcgggagcgcgtccagccaggcgtg

SEQ ID NO: 3993512 - DNA, 25 bp, Homo sapien
tggctgagcgggagcgcgtccagcc

SEQ ID NO: 3993513 - DNA, 25 bp, Homo sapien
tgctggaacgcatggcttctctgcc

SEQ ID NO: 3993514 - DNA, 25 bp, Homo sapien
tctgtgctgcctggaaccgggtgcc

SEQ ID NO: 3993515 - DNA, 25 bp, Homo sapien
tgctcactgacaccctctcgaagag

SEQ ID NO: 3993516 - DNA, 25 bp, Homo sapien
tagctggaccgtggaatgctggaac

SEQ ID NO: 3993517 - DNA, 25 bp, Homo sapien
ttcagggcaacctttgggccaacag

SEQ ID NO: 3993518 - DNA, 25 bp, Homo sapien
gcttcagggcaacctttgggccaac

SEQ ID NO: 3993519 - DNA, 25 bp, Homo sapien
agggcaacctttgggccaacagcac

SEQ ID NO: 3993520 - DNA, 25 bp, Homo sapien
tcagggcaacctttgggccaacagc

SEQ ID NO: 3993521 - DNA, 25 bp, Homo sapien
gcagtcacaatatatacagctcaca

SEQ ID NO: 3993522 - DNA, 25 bp, Homo sapien
caatatatacagctcacagaggaca

SEQ ID NO: 3993523 - DNA, 25 bp, Homo sapien
ggcaggtgtggcagtcacaatatat

SEQ ID NO: 3993524 - DNA, 25 bp, Homo sapien
caggtgtggcagtcacaatatatac

SEQ ID NO: 3993525 - DNA, 25 bp, Homo sapien
ggaggccgtgccgtccattgcacag

SEQ ID NO: 3993526 - DNA, 25 bp, Homo sapien
gccgtgccgtccattgcacagtgga

SEQ ID NO: 3993527 - DNA, 25 bp, Homo sapien
gaggccgtgccgtccattgcacagt

SEQ ID NO: 3993528 - DNA, 25 bp, Homo sapien
gtgccgtccattgcacagtggactc

SEQ ID NO: 3993529 - DNA, 25 bp, Homo sapien
ctggaccagggttggccgcaccagc

SEQ ID NO: 3993530 - DNA, 25 bp, Homo sapien
ctcagctggaccagggttggccgca

SEQ ID NO: 3993531 - DNA, 25 bp, Homo sapien
ggggtgcgaacgttggcttgatgac

SEQ ID NO: 3993532 - DNA, 25 bp, Homo sapien
cactgggggtgcgaacgttggcttg

SEQ ID NO: 3993533 - DNA, 25 bp, Homo sapien
gcagcttccaaaggaccctactgag

SEQ ID NO: 3993534 - DNA, 25 bp, Homo sapien
ggttttggaagctcaaaggccaata

SEQ ID NO: 3993535 - DNA, 25 bp, Homo sapien
gctctacagattgccggaatgtggg

SEQ ID NO: 3993536 - DNA, 25 bp, Homo sapien
tgcatttcagctttcccagggtagg

SEQ ID NO: 3993537 - DNA, 25 bp, Homo sapien
tagaaaatcactattagggccgggc

SEQ ID NO: 3993538 - DNA, 25 bp, Homo sapien
cacactgtggccattcgggagcagg

SEQ ID NO: 3993539 - DNA, 25 bp, Homo sapien
ctagtgggtccaagcttaaggttca

SEQ ID NO: 3993540 - DNA, 25 bp, Homo sapien
gctgctccaactaggcgctgtgtca

SEQ ID NO: 3993541 - DNA, 25 bp, Homo sapien
gaggggcttggtgggcggagcaggt

SEQ ID NO: 3993542 - DNA, 25 bp, Homo sapien
aggggcttggtgggcggagcaggtc

SEQ ID NO: 3993543 - DNA, 25 bp, Homo sapien
ggggcttggtgggcggagcaggtct

SEQ ID NO: 3993544 - DNA, 25 bp, Homo sapien
tgcagtgcacagaccccaatcccat

SEQ ID NO: 3993545 - DNA, 25 bp, Homo sapien
gacaccctcagaaggcttggccgcc

SEQ ID NO: 3993546 - DNA, 25 bp, Homo sapien
ctcagaaggcttggccgcccaatca

SEQ ID NO: 3993547 - DNA, 25 bp, Homo sapien
cggtgcagtgcacagaccccaatcc

SEQ ID NO: 3993548 - DNA, 25 bp, Homo sapien
tgcctgccgggtgtagacaggaact

SEQ ID NO: 3993549 - DNA, 25 bp, Homo sapien
ggtgcctgccgggtgtagacaggaa

SEQ ID NO: 3993550 - DNA, 25 bp, Homo sapien
ccgggtgtagacaggaactgggaag

SEQ ID NO: 3993551 - DNA, 25 bp, Homo sapien
gctttggtgcctgccgggtgtagac

SEQ ID NO: 3993552 - DNA, 25 bp, Homo sapien
cattgtggtcttgggagccacgttc

SEQ ID NO: 3993553 - DNA, 25 bp, Homo sapien
ttcagagccaccgaggaggccgggt

SEQ ID NO: 3993554 - DNA, 25 bp, Homo sapien
gttggagcgccccattgtggtcttg

SEQ ID NO: 3993555 - DNA, 25 bp, Homo sapien
cccttggccggcacgcggctggcag

SEQ ID NO: 3993556 - DNA, 25 bp, Homo sapien
ctgctcaggatgcggctccgggctt

SEQ ID NO: 3993557 - DNA, 25 bp, Homo sapien
ggctccgggctttgcggtagacgat

SEQ ID NO: 3993558 - DNA, 25 bp, Homo sapien
cgggctttgcggtagacgatgatgc

SEQ ID NO: 3993559 - DNA, 25 bp, Homo sapien
ccaccaccacgaagacggggaggct

SEQ ID NO: 3993560 - DNA, 25 bp, Homo sapien
tgatgctctggacgaccacatgctc

SEQ ID NO: 3993561 - DNA, 25 bp, Homo sapien
gctgtgcctttgaggcctgatgctc

SEQ ID NO: 3993562 - DNA, 25 bp, Homo sapien
cttgccagtgacaggttggagagct

SEQ ID NO: 3993563 - DNA, 25 bp, Homo sapien
cagtgctgtgggcacggctgtgcct

SEQ ID NO: 3993564 - DNA, 25 bp, Homo sapien
tcccgggcccgcggcttctgcctgg

SEQ ID NO: 3993565 - DNA, 25 bp, Homo sapien
tgcctgggctctgttcgggccctct

SEQ ID NO: 3993566 - DNA, 25 bp, Homo sapien
agcaaactggcaccgtgaacaccac

SEQ ID NO: 3993567 - DNA, 25 bp, Homo sapien
ctgggctctgttcgggccctctgag

SEQ ID NO: 3993568 - DNA, 25 bp, Homo sapien
tggcagtggcactcctgcttgtggt

SEQ ID NO: 3993569 - DNA, 25 bp, Homo sapien
ctcagtcagcagcttcgcgcagtgg

SEQ ID NO: 3993570 - DNA, 25 bp, Homo sapien
cagcagcttcgcgcagtggggcggg

SEQ ID NO: 3993571 - DNA, 25 bp, Homo sapien
gcagtggcactcctgcttgtggttg

SEQ ID NO: 3993572 - DNA, 25 bp, Homo sapien
tgtaagtcctggcaacgtcctttcc

SEQ ID NO: 3993573 - DNA, 25 bp, Homo sapien
gatctgtaaacgtgtaagtcctggc

SEQ ID NO: 3993574 - DNA, 25 bp, Homo sapien
tcctggcaacgtcctttccagcaaa

SEQ ID NO: 3993575 - DNA, 25 bp, Homo sapien
agttgctggatctgtaaacgtgtaa

SEQ ID NO: 3993576 - DNA, 25 bp, Homo sapien
tggttcatacgcagtgccatcctct

SEQ ID NO: 3993577 - DNA, 25 bp, Homo sapien
tgagcgcgtggcacacatccacgat

SEQ ID NO: 3993578 - DNA, 25 bp, Homo sapien
acaccgggtgccctcgggcactggt

SEQ ID NO: 3993579 - DNA, 25 bp, Homo sapien
ttgcactgcagaacgccacacatgt

SEQ ID NO: 3993580 - DNA, 25 bp, Homo sapien
tggacggcaggtcgtgggccagctt

SEQ ID NO: 3993581 - DNA, 25 bp, Homo sapien
tggatggacggcaggtcgtgggcca

SEQ ID NO: 3993582 - DNA, 25 bp, Homo sapien
atggacggcaggtcgtgggccagct

SEQ ID NO: 3993583 - DNA, 25 bp, Homo sapien
gatggacggcaggtcgtgggccagc

SEQ ID NO: 3993584 - DNA, 25 bp, Homo sapien
atgtcataggagaagcaggactcct

SEQ ID NO: 3993585 - DNA, 25 bp, Homo sapien
ggagaagcaggactcctcggcagcc

SEQ ID NO: 3993586 - DNA, 25 bp, Homo sapien
gccttgcagcctggtaggatgtcat

SEQ ID NO: 3993587 - DNA, 25 bp, Homo sapien
tcataggagaagcaggactcctcgg

SEQ ID NO: 3993588 - DNA, 25 bp, Homo sapien
cgggttagccctggcaaggcctgca

SEQ ID NO: 3993589 - DNA, 25 bp, Homo sapien
ctgtgggaccagaagcgggttagcc

SEQ ID NO: 3993590 - DNA, 25 bp, Homo sapien
gaccagaagcgggttagccctggca

SEQ ID NO: 3993591 - DNA, 25 bp, Homo sapien
ccagaagcgggttagccctggcaag

SEQ ID NO: 3993592 - DNA, 25 bp, Homo sapien
tcacagaactcctcgaggtcacaca

SEQ ID NO: 3993593 - DNA, 25 bp, Homo sapien
acaggccccgttgtagcagtagccc

SEQ ID NO: 3993594 - DNA, 25 bp, Homo sapien
tcctggaaggcgtcttccgggcact

SEQ ID NO: 3993595 - DNA, 25 bp, Homo sapien
cacatgtccttcttgggacggcaca

SEQ ID NO: 3993596 - DNA, 25 bp, Homo sapien
agcaggtaccgtgcgcacactgggc

SEQ ID NO: 3993597 - DNA, 25 bp, Homo sapien
ctggcagcaggtaccgtgcgcacac

SEQ ID NO: 3993598 - DNA, 25 bp, Homo sapien
tggcaggtggtagagttgcagcagc

SEQ ID NO: 3993599 - DNA, 25 bp, Homo sapien
gcagcaggtaccgtgcgcacactgg

SEQ ID NO: 3993600 - DNA, 25 bp, Homo sapien
ggcgacggcaaaggccttggcaggc

SEQ ID NO: 3993601 - DNA, 25 bp, Homo sapien
tggggcgacggcaaaggccttggca

SEQ ID NO: 3993602 - DNA, 25 bp, Homo sapien
ctggggcgacggcaaaggccttggc

SEQ ID NO: 3993603 - DNA, 25 bp, Homo sapien
gggcgacggcaaaggccttggcagg

SEQ ID NO: 3993604 - DNA, 25 bp, Homo sapien
caagttccacgtgtggatgtgcagt

SEQ ID NO: 3993605 - DNA, 25 bp, Homo sapien
agagccccaagttccacgtgtggat

SEQ ID NO: 3993606 - DNA, 25 bp, Homo sapien
gtggatgtgcagtggtcaccctggc

SEQ ID NO: 3993607 - DNA, 25 bp, Homo sapien
tccctccctgtgaccgctctggaca

SEQ ID NO: 3993608 - DNA, 25 bp, Homo sapien
ggccgcagtcgcactgctccccacg

SEQ ID NO: 3993609 - DNA, 25 bp, Homo sapien
cacaaacaggttcccacacacgggg

SEQ ID NO: 3993610 - DNA, 25 bp, Homo sapien
aggtcaggggcgttggcgaggcaca

SEQ ID NO: 3993611 - DNA, 25 bp, Homo sapien
cccacgctccacaaacaggttccca

SEQ ID NO: 3993612 - DNA, 25 bp, Homo sapien
ccaggtaggcctggctgcagtcact

SEQ ID NO: 3993613 - DNA, 25 bp, Homo sapien
ctgcggccgctccaaaaagctctcc

SEQ ID NO: 3993614 - DNA, 25 bp, Homo sapien
tgcggccgctccaaaaagctctcca

SEQ ID NO: 3993615 - DNA, 25 bp, Homo sapien
gtaggcctggctgcagtcactgaac

SEQ ID NO: 3993616 - DNA, 25 bp, Homo sapien
gcagcattgggggaggcggcctggc

SEQ ID NO: 3993617 - DNA, 25 bp, Homo sapien
ccacctcgtacctccagcataccct

SEQ ID NO: 3993618 - DNA, 25 bp, Homo sapien
acccacctcgtacctccagcatacc

SEQ ID NO: 3993619 - DNA, 25 bp, Homo sapien
cccacccacctcgtacctccagcat

SEQ ID NO: 3993620 - DNA, 25 bp, Homo sapien
tcatgggccatggtacaggccacgc

SEQ ID NO: 3993621 - DNA, 25 bp, Homo sapien
catcatggtccatgcccaggttgtg

SEQ ID NO: 3993622 - DNA, 25 bp, Homo sapien
tcgaagcgttcctggcagcggcagc

SEQ ID NO: 3993623 - DNA, 25 bp, Homo sapien
gcagccctggacgttctcatcatgg

SEQ ID NO: 3993624 - DNA, 25 bp, Homo sapien
cacggtagtcccggtgaagtcgaca

SEQ ID NO: 3993625 - DNA, 25 bp, Homo sapien
ccaccaggaccacacggaagttgag

SEQ ID NO: 3993626 - DNA, 25 bp, Homo sapien
ggctgacgtggaacctgtcctgact

SEQ ID NO: 3993627 - DNA, 25 bp, Homo sapien
gtgtccgttgccgtgcctgccaggt

SEQ ID NO: 3993628 - DNA, 25 bp, Homo sapien
tacgttgtcatgcaggtgccgccgt

SEQ ID NO: 3993629 - DNA, 25 bp, Homo sapien
aggggctctggcacctctgcagcca

SEQ ID NO: 3993630 - DNA, 25 bp, Homo sapien
gctctggcacctctgcagccaggac

SEQ ID NO: 3993631 - DNA, 25 bp, Homo sapien
cgccaggggctctggcacctctgca

SEQ ID NO: 3993632 - DNA, 25 bp, Homo sapien
ctcccgccaggggctctggcacctc

SEQ ID NO: 3993633 - DNA, 25 bp, Homo sapien
ggctgcttcgctccccagcatctgg

SEQ ID NO: 3993634 - DNA, 25 bp, Homo sapien
acggctgcttcgctccccagcatct

SEQ ID NO: 3993635 - DNA, 25 bp, Homo sapien
agcacccgatgacgcacggctgctt

SEQ ID NO: 3993636 - DNA, 25 bp, Homo sapien
ctccagcacccgatgacgcacggct

SEQ ID NO: 3993637 - DNA, 25 bp, Homo sapien
cgaccacatacagctccacgtagcg

SEQ ID NO: 3993638 - DNA, 25 bp, Homo sapien
tctgcattgtccacgaccacataca

SEQ ID NO: 3993639 - DNA, 25 bp, Homo sapien
tccacgtagcgggtctctcgggatg

SEQ ID NO: 3993640 - DNA, 25 bp, Homo sapien
agctccacgtagcgggtctctcggg

SEQ ID NO: 3993641 - DNA, 25 bp, Homo sapien
gccagtcagccttcccagcgccggg

SEQ ID NO: 3993642 - DNA, 25 bp, Homo sapien
tgctccaggctgcagacaatgggca

SEQ ID NO: 3993643 - DNA, 25 bp, Homo sapien
ggaacagccacaagaagccagtcag

SEQ ID NO: 3993644 - DNA, 25 bp, Homo sapien
aaacacaggagacaagggtgctcac

SEQ ID NO: 3993645 - DNA, 25 bp, Homo sapien
cctgaagacggctgccgtccggggt

SEQ ID NO: 3993646 - DNA, 25 bp, Homo sapien
agacggctgccgtccggggtcccag

SEQ ID NO: 3993647 - DNA, 25 bp, Homo sapien
tgaagacggctgccgtccggggtcc

SEQ ID NO: 3993648 - DNA, 25 bp, Homo sapien
ggcctgaagacggctgccgtccggg

SEQ ID NO: 3993649 - DNA, 25 bp, Homo sapien
catccaggggctcgatcaggtgcag

SEQ ID NO: 3993650 - DNA, 25 bp, Homo sapien
tcagcctggtacacggcgtgccgtc

SEQ ID NO: 3993651 - DNA, 25 bp, Homo sapien
aggtgctcagcctggtacacggcgt

SEQ ID NO: 3993652 - DNA, 25 bp, Homo sapien
gtgccgtccgccctcgccaccttca

SEQ ID NO: 3993653 - DNA, 25 bp, Homo sapien
cagaggctccagtttgttgcctaca

SEQ ID NO: 3993654 - DNA, 25 bp, Homo sapien
gctccagtttgttgcctacagctcc

SEQ ID NO: 3993655 - DNA, 25 bp, Homo sapien
tacaggagggtgagcctcttgggct

SEQ ID NO: 3993656 - DNA, 25 bp, Homo sapien
gtcctgccccgaaggaccagaggct

SEQ ID NO: 3993657 - DNA, 25 bp, Homo sapien
tacccctctacgtggccctggtaga

SEQ ID NO: 3993658 - DNA, 25 bp, Homo sapien
gctggcggctgagtccgggtacccc

SEQ ID NO: 3993659 - DNA, 25 bp, Homo sapien
aggctggcggctgagtccgggtacc

SEQ ID NO: 3993660 - DNA, 25 bp, Homo sapien
tgaggctggcggctgagtccgggta

SEQ ID NO: 3993661 - DNA, 25 bp, Homo sapien
agccgtataggtctctgtgtagccg

SEQ ID NO: 3993662 - DNA, 25 bp, Homo sapien
gcgaggctgctccgtcacctcggag

SEQ ID NO: 3993663 - DNA, 25 bp, Homo sapien
taggtctctgtgtagccggagccca

SEQ ID NO: 3993664 - DNA, 25 bp, Homo sapien
gagccattggcagccgtataggtct

SEQ ID NO: 3993665 - DNA, 25 bp, Homo sapien
ctggaaaagaagtgctgtgactgcc

SEQ ID NO: 3993666 - DNA, 25 bp, Homo sapien
tcggccccctcggtgcagagaggct

SEQ ID NO: 3993667 - DNA, 25 bp, Homo sapien
gaaaagaagtgctgtgactgcctcg

SEQ ID NO: 3993668 - DNA, 25 bp, Homo sapien
aaagaagtgctgtgactgcctcggc

SEQ ID NO: 3993669 - DNA, 25 bp, Homo sapien
gccccaaggacgtagctcaccctct

SEQ ID NO: 3993670 - DNA, 25 bp, Homo sapien
tgtggccccaaggacgtagctcacc

SEQ ID NO: 3993671 - DNA, 25 bp, Homo sapien
tggccccaaggacgtagctcaccct

SEQ ID NO: 3993672 - DNA, 25 bp, Homo sapien
ctgtggccccaaggacgtagctcac

SEQ ID NO: 3993673 - DNA, 25 bp, Homo sapien
agctctgggacagccttagctgtgc

SEQ ID NO: 3993674 - DNA, 25 bp, Homo sapien
ctctgggacagccttagctgtgcca

SEQ ID NO: 3993675 - DNA, 25 bp, Homo sapien
tctgggacagccttagctgtgccac

SEQ ID NO: 3993676 - DNA, 25 bp, Homo sapien
gagctctgggacagccttagctgtg

SEQ ID NO: 3993677 - DNA, 25 bp, Homo sapien
cggtagtaggttccccggatgctga

SEQ ID NO: 3993678 - DNA, 25 bp, Homo sapien
cagcgggcaggtcggtagtaggttc

SEQ ID NO: 3993679 - DNA, 25 bp, Homo sapien
tcggtagtaggttccccggatgctg

SEQ ID NO: 3993680 - DNA, 25 bp, Homo sapien
gggcagcgggcaggtcggtagtagg

SEQ ID NO: 3993681 - DNA, 25 bp, Homo sapien
cacgacctcatactgctccatgagg

SEQ ID NO: 3993682 - DNA, 25 bp, Homo sapien
agacgccacggcaacacgacctcat

SEQ ID NO: 3993683 - DNA, 25 bp, Homo sapien
cctggcagacgccacggcaacacga

SEQ ID NO: 3993684 - DNA, 25 bp, Homo sapien
cacggcaacacgacctcatactgct

SEQ ID NO: 3993685 - DNA, 25 bp, Homo sapien
ggtgcggggtgcgagcaggccaggg

SEQ ID NO: 3993686 - DNA, 25 bp, Homo sapien
gggccagggtgcggggtgcgagcag

SEQ ID NO: 3993687 - DNA, 25 bp, Homo sapien
gggtgcggggtgcgagcaggccagg

SEQ ID NO: 3993688 - DNA, 25 bp, Homo sapien
agggtgcggggtgcgagcaggccag

SEQ ID NO: 3993689 - DNA, 25 bp, Homo sapien
aggcagcatcatcgcgcccagcagc

SEQ ID NO: 3993690 - DNA, 25 bp, Homo sapien
catcatcgcgcccagcagccagagc

SEQ ID NO: 3993691 - DNA, 25 bp, Homo sapien
cagcatcatcgcgcccagcagccag

SEQ ID NO: 3993692 - DNA, 25 bp, Homo sapien
caggcagcatcatcgcgcccagcag

SEQ ID NO: 3993693 - DNA, 25 bp, Homo sapien
cgggacacggtctggttcctgcgct

SEQ ID NO: 3993694 - DNA, 25 bp, Homo sapien
aggtgacagccccgcgggacacggt

SEQ ID NO: 3993695 - DNA, 25 bp, Homo sapien
ccgcgggacacggtctggttcctgc

SEQ ID NO: 3993696 - DNA, 25 bp, Homo sapien
cagccccgcgggacacggtctggtt

SEQ ID NO: 3993697 - DNA, 25 bp, Homo sapien
ggtttgggctgacaccacagctccc

SEQ ID NO: 3993698 - DNA, 25 bp, Homo sapien
ccttggtgaccacattccccgtggt

SEQ ID NO: 3993699 - DNA, 25 bp, Homo sapien
tggccgacgtggaccaaagcctgca

SEQ ID NO: 3993700 - DNA, 25 bp, Homo sapien
ggccaagcgtgcttgcccttggtga

SEQ ID NO: 3993701 - DNA, 25 bp, Homo sapien
gaaaggcagctcagatgaccacaca

SEQ ID NO: 3993702 - DNA, 25 bp, Homo sapien
acagggcgctgctgacagatcacat

SEQ ID NO: 3993703 - DNA, 25 bp, Homo sapien
agggcgctgctgacagatcacatgg

SEQ ID NO: 3993704 - DNA, 25 bp, Homo sapien
caggaaaggcagctcagatgaccac

SEQ ID NO: 3993705 - DNA, 25 bp, Homo sapien
aatgtgaatggcatgaaaagcaaga

SEQ ID NO: 3993706 - DNA, 25 bp, Homo sapien
cctaatgtgaatggcatgaaaagca

SEQ ID NO: 3993707 - DNA, 25 bp, Homo sapien
taatgtgaatggcatgaaaagcaag

SEQ ID NO: 3993708 - DNA, 25 bp, Homo sapien
atgtgaatggcatgaaaagcaagaa

SEQ ID NO: 3993709 - DNA, 25 bp, Homo sapien
caggctgccgagaggctcccaggta

SEQ ID NO: 3993710 - DNA, 25 bp, Homo sapien
gtcccccaggctgccgagaggctcc

SEQ ID NO: 3993711 - DNA, 25 bp, Homo sapien
ctgtgtggcacaggacgaggtcccc

SEQ ID NO: 3993712 - DNA, 25 bp, Homo sapien
gggctggggatactggcctgtgcct

SEQ ID NO: 3993713 - DNA, 25 bp, Homo sapien
tactcacaggccagacctgcacagc

SEQ ID NO: 3993714 - DNA, 25 bp, Homo sapien
tttactcacaggccagacctgcaca

SEQ ID NO: 3993715 - DNA, 25 bp, Homo sapien
ttactcacaggccagacctgcacag

SEQ ID NO: 3993716 - DNA, 25 bp, Homo sapien
gcaggatcctgttctagctatcctt

SEQ ID NO: 3993717 - DNA, 25 bp, Homo sapien
gcttggccagaatgtaaccagagca

SEQ ID NO: 3993718 - DNA, 25 bp, Homo sapien
actcggcggtgctctcagtgaggca

SEQ ID NO: 3993719 - DNA, 25 bp, Homo sapien
tgagagctgaaggtgacaacaatac

SEQ ID NO: 3993720 - DNA, 25 bp, Homo sapien
tgtcacactggggatggcggtgctg

SEQ ID NO: 3993721 - DNA, 25 bp, Homo sapien
gggatggcggtgctgcccactgtag

SEQ ID NO: 3993722 - DNA, 25 bp, Homo sapien
tcccagggccctgtcacactgggga

SEQ ID NO: 3993723 - DNA, 25 bp, Homo sapien
gatggcggtgctgcccactgtagcc

SEQ ID NO: 3993724 - DNA, 25 bp, Homo sapien
gctgagtaagttctacgtaacaagg

SEQ ID NO: 3993725 - DNA, 25 bp, Homo sapien
agacagggcagatgatcgcccgagg

SEQ ID NO: 3993726 - DNA, 25 bp, Homo sapien
tgagtaagttctacgtaacaaggcg

SEQ ID NO: 3993727 - DNA, 25 bp, Homo sapien
tcgcccgagggggattgggtgtcag

SEQ ID NO: 3993728 - DNA, 25 bp, Homo sapien
tgcaaagacagaacacagagcattc

SEQ ID NO: 3993729 - DNA, 25 bp, Homo sapien
tggacccatttgcaccagtccctgc

SEQ ID NO: 3993730 - DNA, 25 bp, Homo sapien
gaacacagagcattcgatttgaaaa

SEQ ID NO: 3993731 - DNA, 25 bp, Homo sapien
cctgctttatatttaaactgcaaag

SEQ ID NO: 3993732 - DNA, 25 bp, Homo sapien
gtgcggtgactgcgaccctgggtgc

SEQ ID NO: 3993733 - DNA, 25 bp, Homo sapien
gcggtgactgcgaccctgggtgcag

SEQ ID NO: 3993734 - DNA, 25 bp, Homo sapien
tgtgcggtgactgcgaccctgggtg

SEQ ID NO: 3993735 - DNA, 25 bp, Homo sapien
tgcggtgactgcgaccctgggtgca

SEQ ID NO: 3993736 - DNA, 25 bp, Homo sapien
aggcgctccgtgtagaaaccattga

SEQ ID NO: 3993737 - DNA, 25 bp, Homo sapien
tccaggcgctccgtgtagaaaccat

SEQ ID NO: 3993738 - DNA, 25 bp, Homo sapien
aggcgctccaggcgctccgtgtaga

SEQ ID NO: 3993739 - DNA, 25 bp, Homo sapien
gcgctccaggcgctccgtgtagaaa

SEQ ID NO: 3993740 - DNA, 25 bp, Homo sapien
accccttctgcgggtgcatgctggg

SEQ ID NO: 3993741 - DNA, 25 bp, Homo sapien
tgcacaccccttctgcgggtgcatg

SEQ ID NO: 3993742 - DNA, 25 bp, Homo sapien
acaccccttctgcgggtgcatgctg

SEQ ID NO: 3993743 - DNA, 25 bp, Homo sapien
ggtgcacaccccttctgcgggtgca

SEQ ID NO: 3993744 - DNA, 25 bp, Homo sapien
tcctaactaatgtttccacaggaag

SEQ ID NO: 3993745 - DNA, 25 bp, Homo sapien
gtgttcagctacagagaccataaga

SEQ ID NO: 3993746 - DNA, 25 bp, Homo sapien
tacagagaccataagaggccctgca

SEQ ID NO: 3993747 - DNA, 25 bp, Homo sapien
gtgagggtgaggcacgctcctaact

SEQ ID NO: 3993748 - DNA, 25 bp, Homo sapien
gccgtgctcacagtcactggtgcta

SEQ ID NO: 3993749 - DNA, 25 bp, Homo sapien
tgggctgagaagttcttgtcaaact

SEQ ID NO: 3993750 - DNA, 25 bp, Homo sapien
tggccatgccgtgctcacagtcact

SEQ ID NO: 3993751 - DNA, 25 bp, Homo sapien
ggtgctatagatgctcagccgggcc

SEQ ID NO: 3993752 - DNA, 25 bp, Homo sapien
tgcgggcagccccaggacggtgctg

SEQ ID NO: 3993753 - DNA, 25 bp, Homo sapien
ctggcgagctccttccgggcccgct

SEQ ID NO: 3993754 - DNA, 25 bp, Homo sapien
gccccaggacggtgctgtgctccag

SEQ ID NO: 3993755 - DNA, 25 bp, Homo sapien
tcgccatctaatttcatgctctgtg

SEQ ID NO: 3993756 - DNA, 25 bp, Homo sapien
ggccataagcaaaggccccggacag

SEQ ID NO: 3993757 - DNA, 25 bp, Homo sapien
gaaaagagcatgcaagggccataag

SEQ ID NO: 3993758 - DNA, 25 bp, Homo sapien
ggagttctggaaacactcagatccc

SEQ ID NO: 3993759 - DNA, 25 bp, Homo sapien
aacacaagggcaggaaaacgtgagc

SEQ ID NO: 3993760 - DNA, 25 bp, Homo sapien
ctgcatgcagttggtgaacatgacg

SEQ ID NO: 3993761 - DNA, 25 bp, Homo sapien
tggtgaacatgacgcacacagacat

SEQ ID NO: 3993762 - DNA, 25 bp, Homo sapien
acatgacgcacacagacatgagctt

SEQ ID NO: 3993763 - DNA, 25 bp, Homo sapien
gcagttggtgaacatgacgcacaca

SEQ ID NO: 3993764 - DNA, 25 bp, Homo sapien
ggccaaggacgtcgtcaatgttgga

SEQ ID NO: 3993765 - DNA, 25 bp, Homo sapien
gccaaggacgtcgtcaatgttggag

SEQ ID NO: 3993766 - DNA, 25 bp, Homo sapien
tggccaaggacgtcgtcaatgttgg

SEQ ID NO: 3993767 - DNA, 25 bp, Homo sapien
gtggccaaggacgtcgtcaatgttg

SEQ ID NO: 3993768 - DNA, 25 bp, Homo sapien
cattcgctgccgcagagtgaaagcc

SEQ ID NO: 3993769 - DNA, 25 bp, Homo sapien
cacttcaaacatcatgtagtattga

SEQ ID NO: 3993770 - DNA, 25 bp, Homo sapien
gatgtgccaggtcggttccatcact

SEQ ID NO: 3993771 - DNA, 25 bp, Homo sapien
gaatattctggacgaagttgagcat

SEQ ID NO: 3993772 - DNA, 25 bp, Homo sapien
agcgcccaccaagtgacacggagga

SEQ ID NO: 3993773 - DNA, 25 bp, Homo sapien
agctgtcaccgtctaccaacctgtg

SEQ ID NO: 3993774 - DNA, 25 bp, Homo sapien
acagccatggaggacgttctctgga

SEQ ID NO: 3993775 - DNA, 25 bp, Homo sapien
tatttcctctgcagagcaagcgccc

SEQ ID NO: 3993776 - DNA, 25 bp, Homo sapien
gaggagctagtgtcctgcacaccga

SEQ ID NO: 3993777 - DNA, 25 bp, Homo sapien
ggatctaaagccaccaacgtgcgct

SEQ ID NO: 3993778 - DNA, 25 bp, Homo sapien
tttttcaacaccctagaggcacaga

SEQ ID NO: 3993779 - DNA, 25 bp, Homo sapien
tagaaagctgtctaccaggagggca

SEQ ID NO: 3993780 - DNA, 25 bp, Homo sapien
gctccacgtgcttgcagtagaacat

SEQ ID NO: 3993781 - DNA, 25 bp, Homo sapien
gcagagctgccgctccacgtgcttg

SEQ ID NO: 3993782 - DNA, 25 bp, Homo sapien
tgttgctgatccagacgctgcagag

SEQ ID NO: 3993783 - DNA, 25 bp, Homo sapien
tgctgcttggcggttttgttgctga

SEQ ID NO: 3993784 - DNA, 25 bp, Homo sapien
ctgaagagcatctggtagcgagtga

SEQ ID NO: 3993785 - DNA, 25 bp, Homo sapien
gaagagcatctggtagcgagtgagg

SEQ ID NO: 3993786 - DNA, 25 bp, Homo sapien
gagcatctggtagcgagtgagggct

SEQ ID NO: 3993787 - DNA, 25 bp, Homo sapien
agagcatctggtagcgagtgagggc

SEQ ID NO: 3993788 - DNA, 25 bp, Homo sapien
tgtactccacagtccgcaccgtggc

SEQ ID NO: 3993789 - DNA, 25 bp, Homo sapien
gaatctctcggacactgaaggccgg

SEQ ID NO: 3993790 - DNA, 25 bp, Homo sapien
gcgtcgtggacacggcgtctgtact

SEQ ID NO: 3993791 - DNA, 25 bp, Homo sapien
ggacagcccgtgaatctctcggaca

SEQ ID NO: 3993792 - DNA, 25 bp, Homo sapien
tggccaccgcgtggcacagttctcg

SEQ ID NO: 3993793 - DNA, 25 bp, Homo sapien
acagttctcgcttctgccaaacctg

SEQ ID NO: 3993794 - DNA, 25 bp, Homo sapien
ggacgaggtggccaccgcgtggcac

SEQ ID NO: 3993795 - DNA, 25 bp, Homo sapien
cttctgccaaacctgagtgaagatc

SEQ ID NO: 3993796 - DNA, 25 bp, Homo sapien
tgcgccatcgccttctcctgcttgg

SEQ ID NO: 3993797 - DNA, 25 bp, Homo sapien
tcctgcttggtctcgatggccagga

SEQ ID NO: 3993798 - DNA, 25 bp, Homo sapien
gatgtagtcgaaagagaaggcctcc

SEQ ID NO: 3993799 - DNA, 25 bp, Homo sapien
tgatgatgagcgaaaggggccactt

SEQ ID NO: 3993800 - DNA, 25 bp, Homo sapien
tgaggtcatggggcatcaggtcgat

SEQ ID NO: 3993801 - DNA, 25 bp, Homo sapien
atgaggtcatggggcatcaggtcga

SEQ ID NO: 3993802 - DNA, 25 bp, Homo sapien
caagcagcggacagacgaaatcgtg

SEQ ID NO: 3993803 - DNA, 25 bp, Homo sapien
ccaggcccaggttgaaaaatgaagc

SEQ ID NO: 3993804 - DNA, 25 bp, Homo sapien
ggtgccctacttctaaccacggaga

SEQ ID NO: 3993805 - DNA, 25 bp, Homo sapien
caaggtcagcctagtcatacaaggg

SEQ ID NO: 3993806 - DNA, 25 bp, Homo sapien
tgatgtcctccaccggcttccggag

SEQ ID NO: 3993807 - DNA, 25 bp, Homo sapien
tcctcctccgcgaggtccatgaagt

SEQ ID NO: 3993808 - DNA, 25 bp, Homo sapien
agcgccagctccaggagcgcttcca

SEQ ID NO: 3993809 - DNA, 25 bp, Homo sapien
tccatgaagtgcacgaagaagtcgc

SEQ ID NO: 3993810 - DNA, 25 bp, Homo sapien
tggtccatgaggaagtagcgcttga

SEQ ID NO: 3993811 - DNA, 25 bp, Homo sapien
catgaggaagtagcgcttgatggac

SEQ ID NO: 3993812 - DNA, 25 bp, Homo sapien
gtccatgaggaagtagcgcttgatg

SEQ ID NO: 3993813 - DNA, 25 bp, Homo sapien
ctggtccatgaggaagtagcgcttg

SEQ ID NO: 3993814 - DNA, 25 bp, Homo sapien
tagttaaacgccttctcgatctgct

SEQ ID NO: 3993815 - DNA, 25 bp, Homo sapien
tagatgatctctttagccaccgggc

SEQ ID NO: 3993816 - DNA, 25 bp, Homo sapien
cagcaccttgctggcgtagttaaac

SEQ ID NO: 3993817 - DNA, 25 bp, Homo sapien
tacgcccgctcttttaacgtgtaga

SEQ ID NO: 3993818 - DNA, 25 bp, Homo sapien
ctggacgatggtgtaccgctggtcc

SEQ ID NO: 3993819 - DNA, 25 bp, Homo sapien
gcagctcgtgctcctcgaccataaa

SEQ ID NO: 3993820 - DNA, 25 bp, Homo sapien
tacttgtcgttgtaatcctcctgga

SEQ ID NO: 3993821 - DNA, 25 bp, Homo sapien
gatcttgtccgccattttctgcagg

SEQ ID NO: 3993822 - DNA, 25 bp, Homo sapien
tacaaacctcgctctggaacggagt

SEQ ID NO: 3993823 - DNA, 25 bp, Homo sapien
ctcaactgtgggctaaaacgaacct

SEQ ID NO: 3993824 - DNA, 25 bp, Homo sapien
cgcgcagggacattaacagaggcca

SEQ ID NO: 3993825 - DNA, 25 bp, Homo sapien
caagggccgagcctaatctaccagt

SEQ ID NO: 3993826 - DNA, 25 bp, Homo sapien
caacggtatcttgacgtaatagaca

SEQ ID NO: 3993827 - DNA, 25 bp, Homo sapien
gcaccaaagaggttgaaggacctaa

SEQ ID NO: 3993828 - DNA, 25 bp, Homo sapien
gggtgtgctttcctgagaccacaag

SEQ ID NO: 3993829 - DNA, 25 bp, Homo sapien
taaggccataagcagctgggccatt

SEQ ID NO: 3993830 - DNA, 25 bp, Homo sapien
ccagaacctcgaagtagggagcact

SEQ ID NO: 3993831 - DNA, 25 bp, Homo sapien
taggtacaggcatagctcctgcgcc

SEQ ID NO: 3993832 - DNA, 25 bp, Homo sapien
cattcgcctttgtccaccgaggtgg

SEQ ID NO: 3993833 - DNA, 25 bp, Homo sapien
tgtatgggtcgtggatgatgcccct

SEQ ID NO: 3993834 - DNA, 25 bp, Homo sapien
tgcccgtactcgaaggaagacttct

SEQ ID NO: 3993835 - DNA, 25 bp, Homo sapien
tccagctgtgacaccagaatcaggt

SEQ ID NO: 3993836 - DNA, 25 bp, Homo sapien
agcttctgcagcgaaaggaggccct

SEQ ID NO: 3993837 - DNA, 25 bp, Homo sapien
gctggatgtagaaccagagcttctg

SEQ ID NO: 3993838 - DNA, 25 bp, Homo sapien
gacttcctcaaaaaggcaagctgca

SEQ ID NO: 3993839 - DNA, 25 bp, Homo sapien
gctgcaggcacatacaatgtccgat

SEQ ID NO: 3993840 - DNA, 25 bp, Homo sapien
acaatgtccgatattctgagtctca

SEQ ID NO: 3993841 - DNA, 25 bp, Homo sapien
tctcatcccaaacaggaagcaaatg

SEQ ID NO: 3993842 - DNA, 25 bp, Homo sapien
caaggcgggcgctctctttagaagc

SEQ ID NO: 3993843 - DNA, 25 bp, Homo sapien
actgagttgggcacggagttgtcac

SEQ ID NO: 3993844 - DNA, 25 bp, Homo sapien
ctctttagaagcgatgcagacgtcc

SEQ ID NO: 3993845 - DNA, 25 bp, Homo sapien
tcatcaggatgggacctaacccctc

SEQ ID NO: 3993846 - DNA, 25 bp, Homo sapien
acggccgactcctgcgaggccaggg

SEQ ID NO: 3993847 - DNA, 25 bp, Homo sapien
gtccacgaggaaggtccggctctgc

SEQ ID NO: 3993848 - DNA, 25 bp, Homo sapien
ggctgagcactgacgtacctcccgt

SEQ ID NO: 3993849 - DNA, 25 bp, Homo sapien
cacagcggagtagctggcggccact

SEQ ID NO: 3993850 - DNA, 25 bp, Homo sapien
tctgcgggtcagtctcactcttgct

SEQ ID NO: 3993851 - DNA, 25 bp, Homo sapien
aggctgagttccaaccgccgcagga

SEQ ID NO: 3993852 - DNA, 25 bp, Homo sapien
cttggctttgactgaccccactggg

SEQ ID NO: 3993853 - DNA, 25 bp, Homo sapien
gggtataaaaggtcagccactgcac

SEQ ID NO: 3993854 - DNA, 25 bp, Homo sapien
gcttcctcacgaggacggccacggg

SEQ ID NO: 3993855 - DNA, 25 bp, Homo sapien
ccaggaccaagttctcagtccacag

SEQ ID NO: 3993856 - DNA, 25 bp, Homo sapien
agctaagcttcctcacgaggacggc

SEQ ID NO: 3993857 - DNA, 25 bp, Homo sapien
ggaccaagttctcagtccacagcct

SEQ ID NO: 3993858 - DNA, 25 bp, Homo sapien
cgttttgggaacagcgagtgcatct

SEQ ID NO: 3993859 - DNA, 25 bp, Homo sapien
tattactccagtggccttctcagga

SEQ ID NO: 3993860 - DNA, 25 bp, Homo sapien
gatgaccaataaaaccgagacccca

SEQ ID NO: 3993861 - DNA, 25 bp, Homo sapien
tgtctaccatccctaaaggagtggg

SEQ ID NO: 3993862 - DNA, 25 bp, Homo sapien
atccacagccacgaagcctcggcca

SEQ ID NO: 3993863 - DNA, 25 bp, Homo sapien
catccacagccacgaagcctcggcc

SEQ ID NO: 3993864 - DNA, 25 bp, Homo sapien
cacagccacgaagcctcggccaatg

SEQ ID NO: 3993865 - DNA, 25 bp, Homo sapien
cagccacgaagcctcggccaatgcc

SEQ ID NO: 3993866 - DNA, 25 bp, Homo sapien
gggagaagcctcacggtggggtgga

SEQ ID NO: 3993867 - DNA, 25 bp, Homo sapien
gagaagcctcacggtggggtggagg

SEQ ID NO: 3993868 - DNA, 25 bp, Homo sapien
caagggttgctttaggccgggtatg

SEQ ID NO: 3993869 - DNA, 25 bp, Homo sapien
tgtggagggacctcaagggttgctt

SEQ ID NO: 3993870 - DNA, 25 bp, Homo sapien
aggtggacagatcgcttgactccag

SEQ ID NO: 3993871 - DNA, 25 bp, Homo sapien
caaggtggacagatcgcttgactcc

SEQ ID NO: 3993872 - DNA, 25 bp, Homo sapien
gagttcaagaccagcctgggcaaca

SEQ ID NO: 3993873 - DNA, 25 bp, Homo sapien
ctgggcaacacggcgaatccccgtc

SEQ ID NO: 3993874 - DNA, 25 bp, Homo sapien
gagtcagttgcttcacctccccaat

SEQ ID NO: 3993875 - DNA, 25 bp, Homo sapien
gtcatctcaacacctgcgatgtcac

SEQ ID NO: 3993876 - DNA, 25 bp, Homo sapien
gtcagttgcttcacctccccaatat

SEQ ID NO: 3993877 - DNA, 25 bp, Homo sapien
gttgcttcacctccccaatattcaa

SEQ ID NO: 3993878 - DNA, 25 bp, Homo sapien
gcctcgtgctcacaaggtcctgatg

SEQ ID NO: 3993879 - DNA, 25 bp, Homo sapien
aggacgcgggcagataacaccttcg

SEQ ID NO: 3993880 - DNA, 25 bp, Homo sapien
acacaaggtcccgtggtgtggcact

SEQ ID NO: 3993881 - DNA, 25 bp, Homo sapien
tctcaagtctgcacaggtggcacaa

SEQ ID NO: 3993882 - DNA, 25 bp, Homo sapien
gcgttactggacagtgcgttcctct

SEQ ID NO: 3993883 - DNA, 25 bp, Homo sapien
tcacacacttgctgccaatcaccgc

SEQ ID NO: 3993884 - DNA, 25 bp, Homo sapien
cagtgcgttcctcttttgtacaacc

SEQ ID NO: 3993885 - DNA, 25 bp, Homo sapien
cacggcgccgcagcgttactggaca

SEQ ID NO: 3993886 - DNA, 25 bp, Homo sapien
ttctccagggtttccggcaaaggca

SEQ ID NO: 3993887 - DNA, 25 bp, Homo sapien
gggaagcagaccacgctccatgctg

SEQ ID NO: 3993888 - DNA, 25 bp, Homo sapien
gatttcacgtcaccgttctccaggg

SEQ ID NO: 3993889 - DNA, 25 bp, Homo sapien
ccacattgcagagccgtgagtagtg

SEQ ID NO: 3993890 - DNA, 25 bp, Homo sapien
gctgtaacagaatctatgggagtca

SEQ ID NO: 3993891 - DNA, 25 bp, Homo sapien
gaaatgactgtgtggtctcacccgc

SEQ ID NO: 3993892 - DNA, 25 bp, Homo sapien
caggtccccaataacaacgtcttga

SEQ ID NO: 3993893 - DNA, 25 bp, Homo sapien
gaacactacttaagaggcctctgag

SEQ ID NO: 3993894 - DNA, 25 bp, Homo sapien
tgatgcctgcaggtctgcaccaggg

SEQ ID NO: 3993895 - DNA, 25 bp, Homo sapien
ccagggcaccaggatgccggctggg

SEQ ID NO: 3993896 - DNA, 25 bp, Homo sapien
aattctgatgcctgcaggtctgcac

SEQ ID NO: 3993897 - DNA, 25 bp, Homo sapien
tgcaccagggcaccaggatgccggc

SEQ ID NO: 3993898 - DNA, 25 bp, Homo sapien
ctgggatgggaatatggaggcggca

SEQ ID NO: 3993899 - DNA, 25 bp, Homo sapien
ggacccgggtgagccgttctctgct

SEQ ID NO: 3993900 - DNA, 25 bp, Homo sapien
ggaggcggcagccagtcagcattga

SEQ ID NO: 3993901 - DNA, 25 bp, Homo sapien
gcggcagccagtcagcattgagcct

SEQ ID NO: 3993902 - DNA, 25 bp, Homo sapien
aatccccgatcagggcaggtctctc

SEQ ID NO: 3993903 - DNA, 25 bp, Homo sapien
accaatcaggaaatccccgatcagg

SEQ ID NO: 3993904 - DNA, 25 bp, Homo sapien
gcaaagcggtgtctgtgctgatgcc

SEQ ID NO: 3993905 - DNA, 25 bp, Homo sapien
tcggcaaagcggtgtctgtgctgat

SEQ ID NO: 3993906 - DNA, 25 bp, Homo sapien
ttttttttgttctgcttgtctcgaa

SEQ ID NO: 3993907 - DNA, 25 bp, Homo sapien
ttttttgttctgcttgtctcgaagc

SEQ ID NO: 3993908 - DNA, 25 bp, Homo sapien
tggggaggtgctggcctgaattttt

SEQ ID NO: 3993909 - DNA, 25 bp, Homo sapien
ttttgttctgcttgtctcgaagcat

SEQ ID NO: 3993910 - DNA, 25 bp, Homo sapien
cagcagtgggaaccacgggagaggg

SEQ ID NO: 3993911 - DNA, 25 bp, Homo sapien
agcagtgggaaccacgggagagggt

SEQ ID NO: 3993912 - DNA, 25 bp, Homo sapien
cagtgggaaccacgggagagggtgc

SEQ ID NO: 3993913 - DNA, 25 bp, Homo sapien
gtgggaaccacgggagagggtgcac

SEQ ID NO: 3993914 - DNA, 25 bp, Homo sapien
gctgtttcaaaggagggcgccctgt

SEQ ID NO: 3993915 - DNA, 25 bp, Homo sapien
ggcacagagccgctgtttcaaagga

SEQ ID NO: 3993916 - DNA, 25 bp, Homo sapien
accacttgatgggtgaagacaggct

SEQ ID NO: 3993917 - DNA, 25 bp, Homo sapien
gactaggtctgaacaccacttgatg

SEQ ID NO: 3993918 - DNA, 25 bp, Homo sapien
cctgtggacagccatggacgcagta

SEQ ID NO: 3993919 - DNA, 25 bp, Homo sapien
ctgtggacagccatggacgcagtac

SEQ ID NO: 3993920 - DNA, 25 bp, Homo sapien
gcctgtggacagccatggacgcagt

SEQ ID NO: 3993921 - DNA, 25 bp, Homo sapien
cgtggagcctgtggccacgctgcca

SEQ ID NO: 3993922 - DNA, 25 bp, Homo sapien
gccgcggcagggacgttgatgctgg

SEQ ID NO: 3993923 - DNA, 25 bp, Homo sapien
gctgcagcgtggagcctgtggccac

SEQ ID NO: 3993924 - DNA, 25 bp, Homo sapien
gcagggacgttgatgctggtggtac

SEQ ID NO: 3993925 - DNA, 25 bp, Homo sapien
aacaggtacaccagcgggtcaaggt

SEQ ID NO: 3993926 - DNA, 25 bp, Homo sapien
tgtcttccgtgagctttgacaacag

SEQ ID NO: 3993927 - DNA, 25 bp, Homo sapien
acaggtacaccagcgggtcaaggtt

SEQ ID NO: 3993928 - DNA, 25 bp, Homo sapien
ctttgtcttccgtgagctttgacaa

SEQ ID NO: 3993929 - DNA, 25 bp, Homo sapien
gtcttctggagtacgagaaaactct

SEQ ID NO: 3993930 - DNA, 25 bp, Homo sapien
ctttagaaagtcttctggagtacga

SEQ ID NO: 3993931 - DNA, 25 bp, Homo sapien
gaaagtcttctggagtacgagaaaa

SEQ ID NO: 3993932 - DNA, 25 bp, Homo sapien
ctggagtacgagaaaactctgcaat

SEQ ID NO: 3993933 - DNA, 25 bp, Homo sapien
tgagactgcagtaagacaagatcgt

SEQ ID NO: 3993934 - DNA, 25 bp, Homo sapien
tacgaaaattgaacacaataagcca

SEQ ID NO: 3993935 - DNA, 25 bp, Homo sapien
caaacatgagtgatttaatgacggt

SEQ ID NO: 3993936 - DNA, 25 bp, Homo sapien
catgttttgagctaggcagtggctc

SEQ ID NO: 3993937 - DNA, 25 bp, Homo sapien
caggaatggtgctcaccctgtacca

SEQ ID NO: 3993938 - DNA, 25 bp, Homo sapien
ggaacagtgttcatcctgcaccctg

SEQ ID NO: 3993939 - DNA, 25 bp, Homo sapien
attgaggccacccaggaacgggcac

SEQ ID NO: 3993940 - DNA, 25 bp, Homo sapien
catcgttgccggtaccattgaggcc

SEQ ID NO: 3993941 - DNA, 25 bp, Homo sapien
caccctgacccaggaacagtgctca

SEQ ID NO: 3993942 - DNA, 25 bp, Homo sapien
tcaccctgcaccctgacccaggggt

SEQ ID NO: 3993943 - DNA, 25 bp, Homo sapien
tgggctcaccctgcaccaccctgac

SEQ ID NO: 3993944 - DNA, 25 bp, Homo sapien
caccaccctgacccaggaacagtgc

SEQ ID NO: 3993945 - DNA, 25 bp, Homo sapien
gcacagcgctacaccaagggcagtg

SEQ ID NO: 3993946 - DNA, 25 bp, Homo sapien
ctgcacagcgctacaccaagggcag

SEQ ID NO: 3993947 - DNA, 25 bp, Homo sapien
cctgcacagcgctacaccaagggca

SEQ ID NO: 3993948 - DNA, 25 bp, Homo sapien
cagttcattgacgtcatggtgaatc

SEQ ID NO: 3993949 - DNA, 25 bp, Homo sapien
cattgacgtcatggtgaatccgaaa

SEQ ID NO: 3993950 - DNA, 25 bp, Homo sapien
gctaagcagttcattgacgtcatgg

SEQ ID NO: 3993951 - DNA, 25 bp, Homo sapien
acacgcagcaggctaagcagttcat

SEQ ID NO: 3993952 - DNA, 25 bp, Homo sapien
ttttagctctgaggcacgaacatca

SEQ ID NO: 3993953 - DNA, 25 bp, Homo sapien
tctgaggcacgaacatcacaatatg

SEQ ID NO: 3993954 - DNA, 25 bp, Homo sapien
agttttagctctgaggcacgaacat

SEQ ID NO: 3993955 - DNA, 25 bp, Homo sapien
tagctctgaggcacgaacatcacaa

SEQ ID NO: 3993956 - DNA, 25 bp, Homo sapien
tgctcattagcctctgtcaccaaga

SEQ ID NO: 3993957 - DNA, 25 bp, Homo sapien
caaggccattaagacaaacacatgg

SEQ ID NO: 3993958 - DNA, 25 bp, Homo sapien
tctcccaccagtggctgctcattag

SEQ ID NO: 3993959 - DNA, 25 bp, Homo sapien
tcaccaagagttccgatacaaggcc

SEQ ID NO: 3993960 - DNA, 25 bp, Homo sapien
gcttcccgcgggagcaccagttctt

SEQ ID NO: 3993961 - DNA, 25 bp, Homo sapien
cgctgcctgtagagcgggatcccgc

SEQ ID NO: 3993962 - DNA, 25 bp, Homo sapien
aagtgagcgtgacgtcacgtccggc

SEQ ID NO: 3993963 - DNA, 25 bp, Homo sapien
cagttcttcgaggtgcgtgagcaaa

SEQ ID NO: 3993964 - DNA, 25 bp, Homo sapien
taagaaaatcggcttccgccagaga

SEQ ID NO: 3993965 - DNA, 25 bp, Homo sapien
ggtgagaggcggatctacagacata

SEQ ID NO: 3993966 - DNA, 25 bp, Homo sapien
tcaacatgtgttcggtgctgaggat

SEQ ID NO: 3993967 - DNA, 25 bp, Homo sapien
gccttcctagcatgacctgtgccgt

SEQ ID NO: 3993968 - DNA, 25 bp, Homo sapien
gagatctgccggaagtccattccct

SEQ ID NO: 3993969 - DNA, 25 bp, Homo sapien
tttaattcaaacatcggccatgcag

SEQ ID NO: 3993970 - DNA, 25 bp, Homo sapien
cattccctgtagtgttcagtgccgg

SEQ ID NO: 3993971 - DNA, 25 bp, Homo sapien
aatgcccttagaagcccagcagtga

SEQ ID NO: 3993972 - DNA, 25 bp, Homo sapien
ttggtcatttatgcctgtgggccac

SEQ ID NO: 3993973 - DNA, 25 bp, Homo sapien
tggtcatttatgcctgtgggccaca

SEQ ID NO: 3993974 - DNA, 25 bp, Homo sapien
tgggccacacatctaggaggcagga

SEQ ID NO: 3993975 - DNA, 25 bp, Homo sapien
ctgtgggccacacatctaggaggca

SEQ ID NO: 3993976 - DNA, 25 bp, Homo sapien
cccagcaccaggtagatgggggcgg

SEQ ID NO: 3993977 - DNA, 25 bp, Homo sapien
ggcccagcaccaggtagatgggggc

SEQ ID NO: 3993978 - DNA, 25 bp, Homo sapien
cagcaccaggtagatgggggcgggg

SEQ ID NO: 3993979 - DNA, 25 bp, Homo sapien
ccaggcccagcaccaggtagatggg

SEQ ID NO: 3993980 - DNA, 25 bp, Homo sapien
gggggagcacaatgccggcctcact

SEQ ID NO: 3993981 - DNA, 25 bp, Homo sapien
ccagcccggcagaggacgcgcagga

SEQ ID NO: 3993982 - DNA, 25 bp, Homo sapien
atggaagcctccggtggacgtgaaa

SEQ ID NO: 3993983 - DNA, 25 bp, Homo sapien
gcctcactcacaactggcggggtgg

SEQ ID NO: 3993984 - DNA, 25 bp, Homo sapien
agcatcgggagacgcgctggtcaca

SEQ ID NO: 3993985 - DNA, 25 bp, Homo sapien
gggacacgaacacggcggagagcat

SEQ ID NO: 3993986 - DNA, 25 bp, Homo sapien
cttagagaaaagcgacagagtcaga

SEQ ID NO: 3993987 - DNA, 25 bp, Homo sapien
acggcggagagcatcgggagacgcg

SEQ ID NO: 3993988 - DNA, 25 bp, Homo sapien
cgagggttgagagcggcgacgcggc

SEQ ID NO: 3993989 - DNA, 25 bp, Homo sapien
cagagcccgagggttgagagcggcg

SEQ ID NO: 3993990 - DNA, 25 bp, Homo sapien
gcgggctcggattcgcaacccccaa

SEQ ID NO: 3993991 - DNA, 25 bp, Homo sapien
ctttggctcagaagcggtggcggga

SEQ ID NO: 3993992 - DNA, 25 bp, Homo sapien
ccggagccccgcggcgcgcacctac

SEQ ID NO: 3993993 - DNA, 25 bp, Homo sapien
ggccggagccccgcggcgcgcacct

SEQ ID NO: 3993994 - DNA, 25 bp, Homo sapien
ctgggcagagccggccggagccccg

SEQ ID NO: 3993995 - DNA, 25 bp, Homo sapien
agagccggccggagccccgcggcgc

SEQ ID NO: 3993996 - DNA, 25 bp, Homo sapien
cccgggccgggctgcggggctggag

SEQ ID NO: 3993997 - DNA, 25 bp, Homo sapien
gggccgggctgcggggctggagacg

SEQ ID NO: 3993998 - DNA, 25 bp, Homo sapien
cgggccgggctgcggggctggagac

SEQ ID NO: 3993999 - DNA, 25 bp, Homo sapien
ccgggccgggctgcggggctggaga

SEQ ID NO: 3994000 - DNA, 25 bp, Homo sapien
gcgctcccggccgccttccgcgccg

SEQ ID NO: 3994001 - DNA, 25 bp, Homo sapien
gctcccggccgccttccgcgccgcc

SEQ ID NO: 3994002 - DNA, 25 bp, Homo sapien
ctcccggccgccttccgcgccgcct

SEQ ID NO: 3994003 - DNA, 25 bp, Homo sapien
gccgcgctcccggccgccttccgcg

SEQ ID NO: 3994004 - DNA, 25 bp, Homo sapien
tcctccttggctgcgcggtagccgt

SEQ ID NO: 3994005 - DNA, 25 bp, Homo sapien
tccgtgccgtgcttgcggctcagcg

SEQ ID NO: 3994006 - DNA, 25 bp, Homo sapien
ggtaggccccgatggccgccaggat

SEQ ID NO: 3994007 - DNA, 25 bp, Homo sapien
gggtcagcggcgtgcagatcttgtg

SEQ ID NO: 3994008 - DNA, 25 bp, Homo sapien
ggacagtttgtaatggagccatggc

SEQ ID NO: 3994009 - DNA, 25 bp, Homo sapien
gagccatggcttcaggacaccgaag

SEQ ID NO: 3994010 - DNA, 25 bp, Homo sapien
ggagcgcgctccagagcataaacca

SEQ ID NO: 3994011 - DNA, 25 bp, Homo sapien
cagcaaggactctgcggagcgcgct

SEQ ID NO: 3994012 - DNA, 25 bp, Homo sapien
tggtcgtaccagatggccttgtaca

SEQ ID NO: 3994013 - DNA, 25 bp, Homo sapien
agcacgcagcccagtagcgccatgg

SEQ ID NO: 3994014 - DNA, 25 bp, Homo sapien
ggcaggtgaactggtcgtaccagat

SEQ ID NO: 3994015 - DNA, 25 bp, Homo sapien
catggcgaaggcgatcatccgtgcg

SEQ ID NO: 3994016 - DNA, 25 bp, Homo sapien
tattacatagaaagcccgtaagtca

SEQ ID NO: 3994017 - DNA, 25 bp, Homo sapien
tctcaggagcgccactgtttggtca

SEQ ID NO: 3994018 - DNA, 25 bp, Homo sapien
tgtttggtcagtctgcacctgcagc

SEQ ID NO: 3994019 - DNA, 25 bp, Homo sapien
cactgaagatgagacaatgacccac

SEQ ID NO: 3994020 - DNA, 25 bp, Homo sapien
attctgtctgtgtcttgatgaccac

SEQ ID NO: 3994021 - DNA, 25 bp, Homo sapien
gggctgatcagaggcacactgtcca

SEQ ID NO: 3994022 - DNA, 25 bp, Homo sapien
ctggctgatgtccaaggggctgatc

SEQ ID NO: 3994023 - DNA, 25 bp, Homo sapien
agaggcacactgtccatggcagccc

SEQ ID NO: 3994024 - DNA, 25 bp, Homo sapien
gatcagaggcacactgtccatggca

SEQ ID NO: 3994025 - DNA, 25 bp, Homo sapien
tcagatacaggagcgatcggtggaa

SEQ ID NO: 3994026 - DNA, 25 bp, Homo sapien
cagagtcggagcagcggagggccga

SEQ ID NO: 3994027 - DNA, 25 bp, Homo sapien
atcggtggaagcagagtcggagcag

SEQ ID NO: 3994028 - DNA, 25 bp, Homo sapien
ccacggggctcagatacaggagcga

SEQ ID NO: 3994029 - DNA, 25 bp, Homo sapien
ccggagcggacgcccagagcaagcc

SEQ ID NO: 3994030 - DNA, 25 bp, Homo sapien
cggagcggacgcccagagcaagccc

SEQ ID NO: 3994031 - DNA, 25 bp, Homo sapien
gcggagaagggggcgcagtcccgca

SEQ ID NO: 3994032 - DNA, 25 bp, Homo sapien
cggagaagggggcgcagtcccgcac

SEQ ID NO: 3994033 - DNA, 25 bp, Homo sapien
ggcggagaagggggcgcagtcccgc

SEQ ID NO: 3994034 - DNA, 25 bp, Homo sapien
ccgcagcgccatagggtagggccac

SEQ ID NO: 3994035 - DNA, 25 bp, Homo sapien
cggccaatttacgtcatcgcgggtt

SEQ ID NO: 3994036 - DNA, 25 bp, Homo sapien
aaatccaactcctcggacggccaat

SEQ ID NO: 3994037 - DNA, 25 bp, Homo sapien
tttccatggcaacgcagacaggccc

SEQ ID NO: 3994038 - DNA, 25 bp, Homo sapien
cgctgtcgcggcatcttctgcgggt

SEQ ID NO: 3994039 - DNA, 25 bp, Homo sapien
tgtcgcggcatcttctgcgggtccc

SEQ ID NO: 3994040 - DNA, 25 bp, Homo sapien
ctgcgctgtcgcggcatcttctgcg

SEQ ID NO: 3994041 - DNA, 25 bp, Homo sapien
gctgtcgcggcatcttctgcgggtc

SEQ ID NO: 3994042 - DNA, 25 bp, Homo sapien
cccccaaccatggaatgctgcgtca

SEQ ID NO: 3994043 - DNA, 25 bp, Homo sapien
ggtgcgcgcaggtgggcttgtgcgg

SEQ ID NO: 3994044 - DNA, 25 bp, Homo sapien
atgcgccccccccaaccatggaatg

SEQ ID NO: 3994045 - DNA, 25 bp, Homo sapien
caggtgggcttgtgcgggccgggca

SEQ ID NO: 3994046 - DNA, 25 bp, Homo sapien
ctgtggctgccccgcttattaaaag

SEQ ID NO: 3994047 - DNA, 25 bp, Homo sapien
ctgccccgcttattaaaaggcagct

SEQ ID NO: 3994048 - DNA, 25 bp, Homo sapien
gtggctgccccgcttattaaaaggc

SEQ ID NO: 3994049 - DNA, 25 bp, Homo sapien
ggctgccccgcttattaaaaggcag

SEQ ID NO: 3994050 - DNA, 25 bp, Homo sapien
ccgccgtcacgggaagcctggagac

SEQ ID NO: 3994051 - DNA, 25 bp, Homo sapien
tccaggctgcgatcctcgtgccggg

SEQ ID NO: 3994052 - DNA, 25 bp, Homo sapien
tcggagacacccttaactccaggct

SEQ ID NO: 3994053 - DNA, 25 bp, Homo sapien
gcctggagaccaccgccctcgggtc

SEQ ID NO: 3994054 - DNA, 25 bp, Homo sapien
aggagggcggccgtgcagcgcgccc

SEQ ID NO: 3994055 - DNA, 25 bp, Homo sapien
agggcggccgtgcagcgcgccctgc

SEQ ID NO: 3994056 - DNA, 25 bp, Homo sapien
ggagggcggccgtgcagcgcgccct

SEQ ID NO: 3994057 - DNA, 25 bp, Homo sapien
ggaggagggcggccgtgcagcgcgc

SEQ ID NO: 3994058 - DNA, 25 bp, Homo sapien
gggaggacgacgatgcggatgtgga

SEQ ID NO: 3994059 - DNA, 25 bp, Homo sapien
atgtggatgcggaggatgcggttcc

SEQ ID NO: 3994060 - DNA, 25 bp, Homo sapien
acgacgatgcggatgtggatgcgga

SEQ ID NO: 3994061 - DNA, 25 bp, Homo sapien
gatgcggaggatgcggttccagacg

SEQ ID NO: 3994062 - DNA, 25 bp, Homo sapien
ggccgggcggggcgggggctgcagc

SEQ ID NO: 3994063 - DNA, 25 bp, Homo sapien
gcggccgggcggggcgggggctgca

SEQ ID NO: 3994064 - DNA, 25 bp, Homo sapien
ccgggcggggcgggggctgcagctg

SEQ ID NO: 3994065 - DNA, 25 bp, Homo sapien
gccgggcggggcgggggctgcagct

SEQ ID NO: 3994066 - DNA, 25 bp, Homo sapien
agtatcaaatggactgaaagtgagg

SEQ ID NO: 3994067 - DNA, 25 bp, Homo sapien
caaatggactgaaagtgagggtgga

SEQ ID NO: 3994068 - DNA, 25 bp, Homo sapien
aggagccaaatagtatcaaatggac

SEQ ID NO: 3994069 - DNA, 25 bp, Homo sapien
caaatagtatcaaatggactgaaag

SEQ ID NO: 3994070 - DNA, 25 bp, Homo sapien
gcttggtgttggcaccacgagtcct

SEQ ID NO: 3994071 - DNA, 25 bp, Homo sapien
agtcctttggccattcccggaacag

SEQ ID NO: 3994072 - DNA, 25 bp, Homo sapien
gcatcgcatgctctcgaaggcatcc

SEQ ID NO: 3994073 - DNA, 25 bp, Homo sapien
gaaggcatcgcatgctctcgaaggc

SEQ ID NO: 3994074 - DNA, 25 bp, Homo sapien
cctgaagtctcggtgcttttgggag

SEQ ID NO: 3994075 - DNA, 25 bp, Homo sapien
tgccctgaagtctcggtgcttttgg

SEQ ID NO: 3994076 - DNA, 25 bp, Homo sapien
ggctctgccctgaagtctcggtgct

SEQ ID NO: 3994077 - DNA, 25 bp, Homo sapien
gggctctgccctgaagtctcggtgc

SEQ ID NO: 3994078 - DNA, 25 bp, Homo sapien
tgtgtctgaacatgcagcttcggga

SEQ ID NO: 3994079 - DNA, 25 bp, Homo sapien
gaagcacggcctccaattgtgtctg

SEQ ID NO: 3994080 - DNA, 25 bp, Homo sapien
gagacatcactcagtacgtgggaga

SEQ ID NO: 3994081 - DNA, 25 bp, Homo sapien
caatagctcagacgctgtgggtcac

SEQ ID NO: 3994082 - DNA, 25 bp, Homo sapien
ttgacaattggtcaaaagagttaag

SEQ ID NO: 3994083 - DNA, 25 bp, Homo sapien
ccgcgcccggtcaacaagcatgttt

SEQ ID NO: 3994084 - DNA, 25 bp, Homo sapien
gagcactctctacagagacgcggac

SEQ ID NO: 3994085 - DNA, 25 bp, Homo sapien
caaatttcttcctcagtcgtgtggc

SEQ ID NO: 3994086 - DNA, 25 bp, Homo sapien
cagtcacctgagctacccagggtgg

SEQ ID NO: 3994087 - DNA, 25 bp, Homo sapien
agaggtgactccatgtgctagtggc

SEQ ID NO: 3994088 - DNA, 25 bp, Homo sapien
gactccatgtgctagtggctcagct

SEQ ID NO: 3994089 - DNA, 25 bp, Homo sapien
cctcagccgggactatgcctgggga

SEQ ID NO: 3994090 - DNA, 25 bp, Homo sapien
tatgcctggggacgggccctgttcc

SEQ ID NO: 3994091 - DNA, 25 bp, Homo sapien
cgacgcggccatcgggtctagagat

SEQ ID NO: 3994092 - DNA, 25 bp, Homo sapien
agggtgtgtgcaaccagctcgtaca

SEQ ID NO: 3994093 - DNA, 25 bp, Homo sapien
ggctgaccactagtgagcacagaga

SEQ ID NO: 3994094 - DNA, 25 bp, Homo sapien
tacaccgctgatgttaggccacgac

SEQ ID NO: 3994095 - DNA, 25 bp, Homo sapien
caaatcagggatactcgtcccaatt

SEQ ID NO: 3994096 - DNA, 25 bp, Homo sapien
gatactcgtcccaattggcagggcc

SEQ ID NO: 3994097 - DNA, 25 bp, Homo sapien
cactgggaggcctgttgtgagtggt

SEQ ID NO: 3994098 - DNA, 25 bp, Homo sapien
ctgttgtgagtggtggtactggagc

SEQ ID NO: 3994099 - DNA, 25 bp, Homo sapien
tgaggtttccgtagagggccgtctc

SEQ ID NO: 3994100 - DNA, 25 bp, Homo sapien
tcctgaggatgaggtttccgtagag

SEQ ID NO: 3994101 - DNA, 25 bp, Homo sapien
gatgaggtttccgtagagggccgtc

SEQ ID NO: 3994102 - DNA, 25 bp, Homo sapien
gaggatgaggtttccgtagagggcc

SEQ ID NO: 3994103 - DNA, 25 bp, Homo sapien
cagggccagggtgccgagaccctgc

SEQ ID NO: 3994104 - DNA, 25 bp, Homo sapien
tgcagaggagccaagcccagcactg

SEQ ID NO: 3994105 - DNA, 25 bp, Homo sapien
gctgcagggccagggtgccgagacc

SEQ ID NO: 3994106 - DNA, 25 bp, Homo sapien
gcagaggagccaagcccagcactga

SEQ ID NO: 3994107 - DNA, 25 bp, Homo sapien
ttgatgctcaggcaaatgggggccc

SEQ ID NO: 3994108 - DNA, 25 bp, Homo sapien
tctccactctgtgggacgtctagcc

SEQ ID NO: 3994109 - DNA, 25 bp, Homo sapien
cactctgtgggacgtctagcctcag

SEQ ID NO: 3994110 - DNA, 25 bp, Homo sapien
ggacgtctagcctcagccaggcaga

SEQ ID NO: 3994111 - DNA, 25 bp, Homo sapien
cccgttgccacaacagcaaaagcct

SEQ ID NO: 3994112 - DNA, 25 bp, Homo sapien
tcttagcccgttcataaaactcaaa

SEQ ID NO: 3994113 - DNA, 25 bp, Homo sapien
taaaactcaaacctctctatctttg

SEQ ID NO: 3994114 - DNA, 25 bp, Homo sapien
aacagcaaaagccttcttagcccgt

SEQ ID NO: 3994115 - DNA, 25 bp, Homo sapien
cggccctgcgtaggatggactcgta

SEQ ID NO: 3994116 - DNA, 25 bp, Homo sapien
cacagccggccctgcgtaggatgga

SEQ ID NO: 3994117 - DNA, 25 bp, Homo sapien
cctgcgtaggatggactcgtactcc

SEQ ID NO: 3994118 - DNA, 25 bp, Homo sapien
tgcgtaggatggactcgtactccgt

SEQ ID NO: 3994119 - DNA, 25 bp, Homo sapien
cccctctccttgtcgctgggcacca

SEQ ID NO: 3994120 - DNA, 25 bp, Homo sapien
gcaggcccctctccttgtcgctggg

SEQ ID NO: 3994121 - DNA, 25 bp, Homo sapien
aggcccctctccttgtcgctgggca

SEQ ID NO: 3994122 - DNA, 25 bp, Homo sapien
tgcaggcccctctccttgtcgctgg

SEQ ID NO: 3994123 - DNA, 25 bp, Homo sapien
agcagcttcagcacggcctccagga

SEQ ID NO: 3994124 - DNA, 25 bp, Homo sapien
cggactctccacataggtgtccagg

SEQ ID NO: 3994125 - DNA, 25 bp, Homo sapien
cacataggtgtccaggggcagcagc

SEQ ID NO: 3994126 - DNA, 25 bp, Homo sapien
cctccaggagctgcgggatgcccag

SEQ ID NO: 3994127 - DNA, 25 bp, Homo sapien
ggaggccgggaagttcaagtccgca

SEQ ID NO: 3994128 - DNA, 25 bp, Homo sapien
gtctgcacggatctccatgggccca

SEQ ID NO: 3994129 - DNA, 25 bp, Homo sapien
gccgggaagttcaagtccgcaagaa

SEQ ID NO: 3994130 - DNA, 25 bp, Homo sapien
catgggcccacactggcagatggag

SEQ ID NO: 3994131 - DNA, 25 bp, Homo sapien
ggaggacagcccgtgtcggcaccta

SEQ ID NO: 3994132 - DNA, 25 bp, Homo sapien
aacagccgggaggacagcccgtgtc

SEQ ID NO: 3994133 - DNA, 25 bp, Homo sapien
ctaaacagccgggaggacagcccgt

SEQ ID NO: 3994134 - DNA, 25 bp, Homo sapien
aggacagcccgtgtcggcacctatc

SEQ ID NO: 3994135 - DNA, 25 bp, Homo sapien
cacaagaggtctcaggtcagccagt

SEQ ID NO: 3994136 - DNA, 25 bp, Homo sapien
agtcagatccgcagggctggaagcc

SEQ ID NO: 3994137 - DNA, 25 bp, Homo sapien
ccacccagtcatggcggcagatcgt

SEQ ID NO: 3994138 - DNA, 25 bp, Homo sapien
atcgtgggtcacaagaggtctcagg

SEQ ID NO: 3994139 - DNA, 25 bp, Homo sapien
cgcgtagagcagctcgggggacagc

SEQ ID NO: 3994140 - DNA, 25 bp, Homo sapien
cccgtgccccatccgcgccagcgcg

SEQ ID NO: 3994141 - DNA, 25 bp, Homo sapien
gtgccccatccgcgccagcgcgtag

SEQ ID NO: 3994142 - DNA, 25 bp, Homo sapien
gccagcgcgtagagcagctcggggg

SEQ ID NO: 3994143 - DNA, 25 bp, Homo sapien
cactttaatcagcatctgtatgaag

SEQ ID NO: 3994144 - DNA, 25 bp, Homo sapien
tcactttaatcagcatctgtatgaa

SEQ ID NO: 3994145 - DNA, 25 bp, Homo sapien
actttaatcagcatctgtatgaagg

SEQ ID NO: 3994146 - DNA, 25 bp, Homo sapien
tatcactttaatcagcatctgtatg

SEQ ID NO: 3994147 - DNA, 25 bp, Homo sapien
caccacggacactgctcttgaaaag

SEQ ID NO: 3994148 - DNA, 25 bp, Homo sapien
ttctaaaactgacaggctgcacttg

SEQ ID NO: 3994149 - DNA, 25 bp, Homo sapien
caattggagaggaactgcacaccac

SEQ ID NO: 3994150 - DNA, 25 bp, Homo sapien
gccacgaccacgcagcaattggaga

SEQ ID NO: 3994151 - DNA, 25 bp, Homo sapien
caaacgcggtcatcccttctttccg

SEQ ID NO: 3994152 - DNA, 25 bp, Homo sapien
gcggtcatcccttctttccggtcat

SEQ ID NO: 3994153 - DNA, 25 bp, Homo sapien
tcttttccacaaacgcggtcatccc

SEQ ID NO: 3994154 - DNA, 25 bp, Homo sapien
tccacaaacgcggtcatcccttctt

SEQ ID NO: 3994155 - DNA, 25 bp, Homo sapien
ccactgtgtatgtccaacaagctca

SEQ ID NO: 3994156 - DNA, 25 bp, Homo sapien
tggacgcgcagtatcctcacagagc

SEQ ID NO: 3994157 - DNA, 25 bp, Homo sapien
taggtgacggtcattcaggagccac

SEQ ID NO: 3994158 - DNA, 25 bp, Homo sapien
tcacagagcctgatgccaatgtccg

SEQ ID NO: 3994159 - DNA, 25 bp, Homo sapien
cgaagtatgactttctcccagtgaa

SEQ ID NO: 3994160 - DNA, 25 bp, Homo sapien
tcaactggatgatgggtggcctgta

SEQ ID NO: 3994161 - DNA, 25 bp, Homo sapien
tcctcaggtgcccaaaccactttta

SEQ ID NO: 3994162 - DNA, 25 bp, Homo sapien
taggacgtgagaactcaactctgca

SEQ ID NO: 3994163 - DNA, 25 bp, Homo sapien
tcccgttaaaggtgaggctggcagt

SEQ ID NO: 3994164 - DNA, 25 bp, Homo sapien
acccacccggctgaaactgcatttt

SEQ ID NO: 3994165 - DNA, 25 bp, Homo sapien
tgcttgagggtgcaattcacagacc

SEQ ID NO: 3994166 - DNA, 25 bp, Homo sapien
tgatggaaccaatctgatcccgtta

SEQ ID NO: 3994167 - DNA, 25 bp, Homo sapien
ccttctgttaatgtcatttcaaaag

SEQ ID NO: 3994168 - DNA, 25 bp, Homo sapien
cttctccaacttacttccttctgtt

SEQ ID NO: 3994169 - DNA, 25 bp, Homo sapien
agtggcaaaggttgaataaaagagt

SEQ ID NO: 3994170 - DNA, 25 bp, Homo sapien
tgaataaaagagtttcttctccaac

SEQ ID NO: 3994171 - DNA, 25 bp, Homo sapien
cccagcggagacctggcagaaccaa

SEQ ID NO: 3994172 - DNA, 25 bp, Homo sapien
cctggcagaaccaacagctctgcta

SEQ ID NO: 3994173 - DNA, 25 bp, Homo sapien
gcagaaccaacagctctgctatggc

SEQ ID NO: 3994174 - DNA, 25 bp, Homo sapien
agacctggcagaaccaacagctctg

SEQ ID NO: 3994175 - DNA, 25 bp, Homo sapien
tagcccacggccccaagaagggaga

SEQ ID NO: 3994176 - DNA, 25 bp, Homo sapien
agcccacggccccaagaagggagag

SEQ ID NO: 3994177 - DNA, 25 bp, Homo sapien
aggtgcgcagatggaggcaggcgct

SEQ ID NO: 3994178 - DNA, 25 bp, Homo sapien
gccggcaccaagaacgcctttggct

SEQ ID NO: 3994179 - DNA, 25 bp, Homo sapien
gttctttgcacgaggccaagcagag

SEQ ID NO: 3994180 - DNA, 25 bp, Homo sapien
gggagcacgaccttgccaaacacct

SEQ ID NO: 3994181 - DNA, 25 bp, Homo sapien
ctgcacactggatggcttcttccac

SEQ ID NO: 3994182 - DNA, 25 bp, Homo sapien
gattctttggccatcgctactacaa

SEQ ID NO: 3994183 - DNA, 25 bp, Homo sapien
ctgcattcactgattctttggccat

SEQ ID NO: 3994184 - DNA, 25 bp, Homo sapien
ggccatcgctactacaattttagaa

SEQ ID NO: 3994185 - DNA, 25 bp, Homo sapien
aacacaagaaagtcagtgagtgatg

SEQ ID NO: 3994186 - DNA, 25 bp, Homo sapien
ccaaaagctcatgcaaccaccgtgg

SEQ ID NO: 3994187 - DNA, 25 bp, Homo sapien
ggagatgcccattgcttacactgca

SEQ ID NO: 3994188 - DNA, 25 bp, Homo sapien
cccacgagggagacaactggatgca

SEQ ID NO: 3994189 - DNA, 25 bp, Homo sapien
cgtgtggttcacttccgtacataca

SEQ ID NO: 3994190 - DNA, 25 bp, Homo sapien
agcgacttcccaacagcacgggtga

SEQ ID NO: 3994191 - DNA, 25 bp, Homo sapien
gtgagtctctgggtgccgcccgcac

SEQ ID NO: 3994192 - DNA, 25 bp, Homo sapien
cctgggctgagatccggtcaccagt

SEQ ID NO: 3994193 - DNA, 25 bp, Homo sapien
ctgcttgcttggcgtcctgggctga

SEQ ID NO: 3994194 - DNA, 25 bp, Homo sapien
tggcactgtgatgagtgaacccaag

SEQ ID NO: 3994195 - DNA, 25 bp, Homo sapien
ctgtgatgagtgaacccaagaagac

SEQ ID NO: 3994196 - DNA, 25 bp, Homo sapien
gataggccctgagactaggtccagg

SEQ ID NO: 3994197 - DNA, 25 bp, Homo sapien
tccaaggggcttaagataggccctg

SEQ ID NO: 3994198 - DNA, 25 bp, Homo sapien
aactgggccttctcaccggcataga

SEQ ID NO: 3994199 - DNA, 25 bp, Homo sapien
ctgggatggttcctattaagatctc

SEQ ID NO: 3994200 - DNA, 25 bp, Homo sapien
taagatctccggctgtgcaaactgg

SEQ ID NO: 3994201 - DNA, 25 bp, Homo sapien
tatcacacatcatggcaagctcaca

SEQ ID NO: 3994202 - DNA, 25 bp, Homo sapien
ggcatagccattgacagcagcgatg

SEQ ID NO: 3994203 - DNA, 25 bp, Homo sapien
tcaagaacttgctggagtaacagtc

SEQ ID NO: 3994204 - DNA, 25 bp, Homo sapien
tgaggtggtcccagtgcttcaagaa

SEQ ID NO: 3994205 - DNA, 25 bp, Homo sapien
gcgatgactggcttcttgacctggg

SEQ ID NO: 3994206 - DNA, 25 bp, Homo sapien
ccacgtggacagctgtagggacgct

SEQ ID NO: 3994207 - DNA, 25 bp, Homo sapien
acggctgacaccaggccacgtggac

SEQ ID NO: 3994208 - DNA, 25 bp, Homo sapien
cagctgtagggacgctgtaatgcca

SEQ ID NO: 3994209 - DNA, 25 bp, Homo sapien
tcctatatctctcagaccaacaagg

SEQ ID NO: 3994210 - DNA, 25 bp, Homo sapien
ctggttgagctcgtcaatcaggcca

SEQ ID NO: 3994211 - DNA, 25 bp, Homo sapien
ttatccccgccggtgaggacaatgg

SEQ ID NO: 3994212 - DNA, 25 bp, Homo sapien
gccgggtcctcctcgaaggtcttca

SEQ ID NO: 3994213 - DNA, 25 bp, Homo sapien
catcgcaaagtgcattgagggcctt

SEQ ID NO: 3994214 - DNA, 25 bp, Homo sapien
aaggagacaaaggacaatggcgttc

SEQ ID NO: 3994215 - DNA, 25 bp, Homo sapien
caggccagcccgaaaatgggagacg

SEQ ID NO: 3994216 - DNA, 25 bp, Homo sapien
gcattaagatcaggcacaggtccgg

SEQ ID NO: 3994217 - DNA, 25 bp, Homo sapien
gacgcaggcgcttctcggttggcct

SEQ ID NO: 3994218 - DNA, 25 bp, Homo sapien
acgccaggcgggacagcgaaccggg

SEQ ID NO: 3994219 - DNA, 25 bp, Homo sapien
ccgaggcgaagggacgccaggcggg

SEQ ID NO: 3994220 - DNA, 25 bp, Homo sapien
agcgggccgcggacgcaggacagca

SEQ ID NO: 3994221 - DNA, 25 bp, Homo sapien
ggacagcaggacacgcagggcggcc

SEQ ID NO: 3994222 - DNA, 25 bp, Homo sapien
ctcgcgagatcagcccgggcagagt

SEQ ID NO: 3994223 - DNA, 25 bp, Homo sapien
tatagcctttcagggctcgctccgc

SEQ ID NO: 3994224 - DNA, 25 bp, Homo sapien
tgccgctcgcggatctaaggccgag

SEQ ID NO: 3994225 - DNA, 25 bp, Homo sapien
cagagtgagcgggtcgctctccgcc

SEQ ID NO: 3994226 - DNA, 25 bp, Homo sapien
tctgaaggctttaaactacggtgaa

SEQ ID NO: 3994227 - DNA, 25 bp, Homo sapien
gctaattggagcattgttacagtca

SEQ ID NO: 3994228 - DNA, 25 bp, Homo sapien
tattaacaaacccattcatgatgtg

SEQ ID NO: 3994229 - DNA, 25 bp, Homo sapien
tatagggttatgcagccagcaccac

SEQ ID NO: 3994230 - DNA, 25 bp, Homo sapien
gaaacaaattatagccttgggaagc

SEQ ID NO: 3994231 - DNA, 25 bp, Homo sapien
cgcagtctgacagtgcctttccagt

SEQ ID NO: 3994232 - DNA, 25 bp, Homo sapien
ctctgtgtggcttggaaagtgccct

SEQ ID NO: 3994233 - DNA, 25 bp, Homo sapien
tgtcaagagctctgcaggcgtctgg

SEQ ID NO: 3994234 - DNA, 25 bp, Homo sapien
cagaagacaagctgttgggacctga

SEQ ID NO: 3994235 - DNA, 25 bp, Homo sapien
tcaggacagacctgagtgtggcgcc

SEQ ID NO: 3994236 - DNA, 25 bp, Homo sapien
tgttctccttgggagcagaagacaa

SEQ ID NO: 3994237 - DNA, 25 bp, Homo sapien
gccttcctcggagcattgggtgcca

SEQ ID NO: 3994238 - DNA, 25 bp, Homo sapien
taacagtgttttccgaggagtagaa

SEQ ID NO: 3994239 - DNA, 25 bp, Homo sapien
gaaatctttgcttaaaccagggtca

SEQ ID NO: 3994240 - DNA, 25 bp, Homo sapien
ttttggtatatggtacaagctgcag

SEQ ID NO: 3994241 - DNA, 25 bp, Homo sapien
catttagggctatgatcctttctga

SEQ ID NO: 3994242 - DNA, 25 bp, Homo sapien
tgttgtgggacagttagattattgg

SEQ ID NO: 3994243 - DNA, 25 bp, Homo sapien
acagtccggtcctttcaggagttct

SEQ ID NO: 3994244 - DNA, 25 bp, Homo sapien
ggtgatggatatctacattcctgta

SEQ ID NO: 3994245 - DNA, 25 bp, Homo sapien
tctctcctgggacagcttttttgga

SEQ ID NO: 3994246 - DNA, 25 bp, Homo sapien
tgaggagtcagagtgcccgttacaa

SEQ ID NO: 3994247 - DNA, 25 bp, Homo sapien
tggtccctgtgctaggaaaacaccg

SEQ ID NO: 3994248 - DNA, 25 bp, Homo sapien
tgtcctaccccggatagagtggatg

SEQ ID NO: 3994249 - DNA, 25 bp, Homo sapien
aatcactgggtgacgcttagcagcg

SEQ ID NO: 3994250 - DNA, 25 bp, Homo sapien
caagcactggcttcgcccctcagtg

SEQ ID NO: 3994251 - DNA, 25 bp, Homo sapien
gcccggcatgggcagtagagacccc

SEQ ID NO: 3994252 - DNA, 25 bp, Homo sapien
atgggcagtagagacccctggcctc

SEQ ID NO: 3994253 - DNA, 25 bp, Homo sapien
tgctgtgcaatgactggaaggccgc

SEQ ID NO: 3994254 - DNA, 25 bp, Homo sapien
tcacgggtagtgggattctgcatta

SEQ ID NO: 3994255 - DNA, 25 bp, Homo sapien
ccctccagccccattatagtgcacc

SEQ ID NO: 3994256 - DNA, 25 bp, Homo sapien
cacgggtagtgggattctgcattag

SEQ ID NO: 3994257 - DNA, 25 bp, Homo sapien
cagccccattatagtgcacctgaag

SEQ ID NO: 3994258 - DNA, 25 bp, Homo sapien
cagtcattgcagatcacgaagtgtc

SEQ ID NO: 3994259 - DNA, 25 bp, Homo sapien
cagtgctggaggcaagtccttgtcg

SEQ ID NO: 3994260 - DNA, 25 bp, Homo sapien
agcctgaagttagcccctgagtgcc

SEQ ID NO: 3994261 - DNA, 25 bp, Homo sapien
gactttggtgtccactgagtcccga

SEQ ID NO: 3994262 - DNA, 25 bp, Homo sapien
tcagcctcttgcatgggtgtcctgc

SEQ ID NO: 3994263 - DNA, 25 bp, Homo sapien
ttggggtctgagttagctcctggct

SEQ ID NO: 3994264 - DNA, 25 bp, Homo sapien
agcctcttgcatgggtgtcctgctg

SEQ ID NO: 3994265 - DNA, 25 bp, Homo sapien
tgcttgctttggggtctgagttagc

SEQ ID NO: 3994266 - DNA, 25 bp, Homo sapien
caggccctgttccgaggcctggaac

SEQ ID NO: 3994267 - DNA, 25 bp, Homo sapien
gcctggaacagctgcttccgaagaa

SEQ ID NO: 3994268 - DNA, 25 bp, Homo sapien
aggccctgttccgaggcctggaaca

SEQ ID NO: 3994269 - DNA, 25 bp, Homo sapien
tggaacagctgcttccgaagaaggg

SEQ ID NO: 3994270 - DNA, 25 bp, Homo sapien
tcagggaaatgcgtgcaccgtgcag

SEQ ID NO: 3994271 - DNA, 25 bp, Homo sapien
agggaaatgcgtgcaccgtgcagcc

SEQ ID NO: 3994272 - DNA, 25 bp, Homo sapien
cagggaaatgcgtgcaccgtgcagc

SEQ ID NO: 3994273 - DNA, 25 bp, Homo sapien
tcagcgggattggcagttgctgtgc

SEQ ID NO: 3994274 - DNA, 25 bp, Homo sapien
cagcgggattggcagttgctgtgcc

SEQ ID NO: 3994275 - DNA, 25 bp, Homo sapien
caggatggacgttcctcggacggac

SEQ ID NO: 3994276 - DNA, 25 bp, Homo sapien
tcagggcagggtgtgttttcccacc

SEQ ID NO: 3994277 - DNA, 25 bp, Homo sapien
tgatccctgaatgtgaacctgaagt

SEQ ID NO: 3994278 - DNA, 25 bp, Homo sapien
aaagtgggtctctcacggatctcgg

SEQ ID NO: 3994279 - DNA, 25 bp, Homo sapien
gtccacgcccggtagctgtagatgc

SEQ ID NO: 3994280 - DNA, 25 bp, Homo sapien
cgcccagcacgagacagagacgcgg

SEQ ID NO: 3994281 - DNA, 25 bp, Homo sapien
gggcctgtcccgttgcctccgggca

SEQ ID NO: 3994282 - DNA, 25 bp, Homo sapien
gatgccggggcctgtcccgttgcct

SEQ ID NO: 3994283 - DNA, 25 bp, Homo sapien
gaggccccgcgcgcacccccgcgga

SEQ ID NO: 3994284 - DNA, 25 bp, Homo sapien
ccctccccgggcactgccccgcgca

SEQ ID NO: 3994285 - DNA, 25 bp, Homo sapien
cctccccgggcactgccccgcgcac

SEQ ID NO: 3994286 - DNA, 25 bp, Homo sapien
cctcgaggccccgcgcgcacccccg

SEQ ID NO: 3994287 - DNA, 25 bp, Homo sapien
cgccagtagcagagcccagcacgtt

SEQ ID NO: 3994288 - DNA, 25 bp, Homo sapien
gccgccagtagcagagcccagcacg

SEQ ID NO: 3994289 - DNA, 25 bp, Homo sapien
aaggcggccgccagtagcagagccc

SEQ ID NO: 3994290 - DNA, 25 bp, Homo sapien
gcccagcacgttgcgggtgcccagt

SEQ ID NO: 3994291 - DNA, 25 bp, Homo sapien
cacgggcctcggttggaaccgcgcg

SEQ ID NO: 3994292 - DNA, 25 bp, Homo sapien
tggagtatccgtccctgaggccgcg

SEQ ID NO: 3994293 - DNA, 25 bp, Homo sapien
cgcctgggttttgcgcgaggcctcc

SEQ ID NO: 3994294 - DNA, 25 bp, Homo sapien
ggttttgcgcgaggcctccgccctg

SEQ ID NO: 3994295 - DNA, 25 bp, Homo sapien
gactgacaggtcttctggccctagg

SEQ ID NO: 3994296 - DNA, 25 bp, Homo sapien
cataggtctgcacactcgggttgag

SEQ ID NO: 3994297 - DNA, 25 bp, Homo sapien
gaagcttagctttttgggtgagacg

SEQ ID NO: 3994298 - DNA, 25 bp, Homo sapien
taccgttaaggattggacagaagct

SEQ ID NO: 3994299 - DNA, 25 bp, Homo sapien
tggagcctcacagggaatctgagat

SEQ ID NO: 3994300 - DNA, 25 bp, Homo sapien
tgaggttccggagtgaaacactgcc

SEQ ID NO: 3994301 - DNA, 25 bp, Homo sapien
catgtgaagccaagcgtggagcctc

SEQ ID NO: 3994302 - DNA, 25 bp, Homo sapien
gctcatgaggaacatctgtgaccgt

SEQ ID NO: 3994303 - DNA, 25 bp, Homo sapien
cttgatgaggttagaggagccgcca

SEQ ID NO: 3994304 - DNA, 25 bp, Homo sapien
gacccctgacaccagcttgatgagg

SEQ ID NO: 3994305 - DNA, 25 bp, Homo sapien
caagtagacccctgacaccagcttg

SEQ ID NO: 3994306 - DNA, 25 bp, Homo sapien
gcagtagatgatgggtttgagcaga

SEQ ID NO: 3994307 - DNA, 25 bp, Homo sapien
ggaatcctcagcgatctggccagga

SEQ ID NO: 3994308 - DNA, 25 bp, Homo sapien
aatcctcagcgatctggccaggatg

SEQ ID NO: 3994309 - DNA, 25 bp, Homo sapien
cctcagcgatctggccaggatgtgg

SEQ ID NO: 3994310 - DNA, 25 bp, Homo sapien
atctggccaggatgtgggtgtagga

SEQ ID NO: 3994311 - DNA, 25 bp, Homo sapien
tgagtccgcatttctatggtagtgg

SEQ ID NO: 3994312 - DNA, 25 bp, Homo sapien
gggctgcctgagtccgcatttctat

SEQ ID NO: 3994313 - DNA, 25 bp, Homo sapien
agttgagagccgtggacacaaagga

SEQ ID NO: 3994314 - DNA, 25 bp, Homo sapien
ttctatggtagtggtgctggagcaa

SEQ ID NO: 3994315 - DNA, 25 bp, Homo sapien
gagatagatggtcgtcgctcgtgct

SEQ ID NO: 3994316 - DNA, 25 bp, Homo sapien
gcagatgaccgggtgccagtcacag

SEQ ID NO: 3994317 - DNA, 25 bp, Homo sapien
cgctcgtgctgggagtccggccaac

SEQ ID NO: 3994318 - DNA, 25 bp, Homo sapien
cagtcacagtccatgttggccggga

SEQ ID NO: 3994319 - DNA, 25 bp, Homo sapien
tggtcaccacatagatgatgaggag

SEQ ID NO: 3994320 - DNA, 25 bp, Homo sapien
tggctggctctgatggtccccacga

SEQ ID NO: 3994321 - DNA, 25 bp, Homo sapien
ccacgacagccaggtcctctaggat

SEQ ID NO: 3994322 - DNA, 25 bp, Homo sapien
accgaggtgtacagggtctccagca

SEQ ID NO: 3994323 - DNA, 25 bp, Homo sapien
tctgggaagctcagaaagacaaact

SEQ ID NO: 3994324 - DNA, 25 bp, Homo sapien
tgggaagctcagaaagacaaactct

SEQ ID NO: 3994325 - DNA, 25 bp, Homo sapien
tgaagatggcgcagctctgggaagc

SEQ ID NO: 3994326 - DNA, 25 bp, Homo sapien
aactctgtcaccacagtattgctgg

SEQ ID NO: 3994327 - DNA, 25 bp, Homo sapien
cttttaggtcctgacatctttatct

SEQ ID NO: 3994328 - DNA, 25 bp, Homo sapien
tgagccagcaaaggggcggacgagg

SEQ ID NO: 3994329 - DNA, 25 bp, Homo sapien
gcctccaatgggtctgtgtggcgtg

SEQ ID NO: 3994330 - DNA, 25 bp, Homo sapien
cggacgagggaagggcgggagctgt

SEQ ID NO: 3994331 - DNA, 25 bp, Homo sapien
ctccaatgggtctgtgtggcgtggg

SEQ ID NO: 3994332 - DNA, 25 bp, Homo sapien
ctcgggggtctgagctggcggctgc

SEQ ID NO: 3994333 - DNA, 25 bp, Homo sapien
gggtctgagctggcggctgctccag

SEQ ID NO: 3994334 - DNA, 25 bp, Homo sapien
aggcccacctggtgaggcgacttca

SEQ ID NO: 3994335 - DNA, 25 bp, Homo sapien
tccaggcccacctggtgaggcgact

SEQ ID NO: 3994336 - DNA, 25 bp, Homo sapien
gcgggggcgaggacggagtgctggg

SEQ ID NO: 3994337 - DNA, 25 bp, Homo sapien
atggcgggggcgaggacggagtgct

SEQ ID NO: 3994338 - DNA, 25 bp, Homo sapien
ggcgccactggccagcctcaggaga

SEQ ID NO: 3994339 - DNA, 25 bp, Homo sapien
gagtgctggggggcgccactggcca

SEQ ID NO: 3994340 - DNA, 25 bp, Homo sapien
ctgcctccgctggtgtttcttattc

SEQ ID NO: 3994341 - DNA, 25 bp, Homo sapien
gctgctgaatgctacccagtaggct

SEQ ID NO: 3994342 - DNA, 25 bp, Homo sapien
acaggtcgcagactcgaggcccttc

SEQ ID NO: 3994343 - DNA, 25 bp, Homo sapien
ggacaggtcgcagactcgaggccct

SEQ ID NO: 3994344 - DNA, 25 bp, Homo sapien
taggctgcctttggaacacccattt

SEQ ID NO: 3994345 - DNA, 25 bp, Homo sapien
tgtactgctccacagctactatggc

SEQ ID NO: 3994346 - DNA, 25 bp, Homo sapien
cattctttgttcacggacacttgga

SEQ ID NO: 3994347 - DNA, 25 bp, Homo sapien
tgtaatccacccgtaagaatgggaa

SEQ ID NO: 3994348 - DNA, 25 bp, Homo sapien
acttggaacgatccccagtcctctg

SEQ ID NO: 3994349 - DNA, 25 bp, Homo sapien
gcttgtcgggtttatcctcattcct

SEQ ID NO: 3994350 - DNA, 25 bp, Homo sapien
ttatcctcattcctcgggggcatag

SEQ ID NO: 3994351 - DNA, 25 bp, Homo sapien
tcattcctcgggggcatagatgtgg

SEQ ID NO: 3994352 - DNA, 25 bp, Homo sapien
gctggggcttgtcgggtttatcctc

SEQ ID NO: 3994353 - DNA, 25 bp, Homo sapien
gcctgcaggctttcggtcagcacga

SEQ ID NO: 3994354 - DNA, 25 bp, Homo sapien
gctttcggtcagcacgaggcccacg

SEQ ID NO: 3994355 - DNA, 25 bp, Homo sapien
ccacggcctgcaggctttcggtcag

SEQ ID NO: 3994356 - DNA, 25 bp, Homo sapien
tgggcttggacggccctggcatctg

SEQ ID NO: 3994357 - DNA, 25 bp, Homo sapien
tgggtcggggtccatcggtgtctgg

SEQ ID NO: 3994358 - DNA, 25 bp, Homo sapien
gggtccatcggtgtctgggtcagcg

SEQ ID NO: 3994359 - DNA, 25 bp, Homo sapien
atcggtgtctgggtcagcgtctgtc

SEQ ID NO: 3994360 - DNA, 25 bp, Homo sapien
ccatcggtgtctgggtcagcgtctg

SEQ ID NO: 3994361 - DNA, 25 bp, Homo sapien
ccagccgtccatggagactgggtca

SEQ ID NO: 3994362 - DNA, 25 bp, Homo sapien
tggttcccaacagagccgggggcca

SEQ ID NO: 3994363 - DNA, 25 bp, Homo sapien
cgggggccagccgtccatggagact

SEQ ID NO: 3994364 - DNA, 25 bp, Homo sapien
gccgggggccagccgtccatggaga

SEQ ID NO: 3994365 - DNA, 25 bp, Homo sapien
cccggtgcttcccacagaaacaagt

SEQ ID NO: 3994366 - DNA, 25 bp, Homo sapien
tctggggcccggtgcttcccacaga

SEQ ID NO: 3994367 - DNA, 25 bp, Homo sapien
gaaacaagtggacagacaaggccat

SEQ ID NO: 3994368 - DNA, 25 bp, Homo sapien
tgcttcccacagaaacaagtggaca

SEQ ID NO: 3994369 - DNA, 25 bp, Homo sapien
tgtgcagaagatgacgtggttttta

SEQ ID NO: 3994370 - DNA, 25 bp, Homo sapien
gtttgagtcccagcatgtcacctgt

SEQ ID NO: 3994371 - DNA, 25 bp, Homo sapien
cagaagatgacgtggtttttaggtg

SEQ ID NO: 3994372 - DNA, 25 bp, Homo sapien
ttttaggtggtggatctcggtttga

SEQ ID NO: 3994373 - DNA, 25 bp, Homo sapien
tgcgtttccgcatttactcagatct

SEQ ID NO: 3994374 - DNA, 25 bp, Homo sapien
ggtctcggcattcccagcagcgtgt

SEQ ID NO: 3994375 - DNA, 25 bp, Homo sapien
taagtcagttctcaagtcccgtctc

SEQ ID NO: 3994376 - DNA, 25 bp, Homo sapien
taaacgttcccatgtcgctaactga

SEQ ID NO: 3994377 - DNA, 25 bp, Homo sapien
agagcactgctcttctcgagttaga

SEQ ID NO: 3994378 - DNA, 25 bp, Homo sapien
gctccccttggctctagtaaatggt

SEQ ID NO: 3994379 - DNA, 25 bp, Homo sapien
ggtgctgctgaacatccactgtaat

SEQ ID NO: 3994380 - DNA, 25 bp, Homo sapien
taatgctaggtcacataggcaggcc

SEQ ID NO: 3994381 - DNA, 25 bp, Homo sapien
tattttgacatctggtggacatcgc

SEQ ID NO: 3994382 - DNA, 25 bp, Homo sapien
gaaacgttctgtatcatgatgtgga

SEQ ID NO: 3994383 - DNA, 25 bp, Homo sapien
gaaggatttgtatcaaaagggcaga

SEQ ID NO: 3994384 - DNA, 25 bp, Homo sapien
aataggacttagcatgcattcatcc

SEQ ID NO: 3994385 - DNA, 25 bp, Homo sapien
gattaagtgaaagagagaaccagtg

SEQ ID NO: 3994386 - DNA, 25 bp, Homo sapien
aagtatttcaaaagcggccaataga

SEQ ID NO: 3994387 - DNA, 25 bp, Homo sapien
gcttacaggacttcaacaagcagaa

SEQ ID NO: 3994388 - DNA, 25 bp, Homo sapien
gatgtatgatctacccaatgaggaa

SEQ ID NO: 3994389 - DNA, 25 bp, Homo sapien
agggacagcaaatagttacacaaaa

SEQ ID NO: 3994390 - DNA, 25 bp, Homo sapien
ttttgaaagcaacaagggacagcaa

SEQ ID NO: 3994391 - DNA, 25 bp, Homo sapien
atagttacacaaaagggatgcccac

SEQ ID NO: 3994392 - DNA, 25 bp, Homo sapien
gaattttgaaagcaacaagggacag

SEQ ID NO: 3994393 - DNA, 25 bp, Homo sapien
tccagaaactttataggccaggaag

SEQ ID NO: 3994394 - DNA, 25 bp, Homo sapien
cagaaactttataggccaggaagga

SEQ ID NO: 3994395 - DNA, 25 bp, Homo sapien
ccagaaactttataggccaggaagg

SEQ ID NO: 3994396 - DNA, 25 bp, Homo sapien
tttccagaaactttataggccagga

SEQ ID NO: 3994397 - DNA, 25 bp, Homo sapien
gcagcagggaaattgccatgagcac

SEQ ID NO: 3994398 - DNA, 25 bp, Homo sapien
gaaattgccatgagcaccatcacat

SEQ ID NO: 3994399 - DNA, 25 bp, Homo sapien
tgaatcttagctttgaacaacttgt

SEQ ID NO: 3994400 - DNA, 25 bp, Homo sapien
catcacatcctgaatcttagctttg

SEQ ID NO: 3994401 - DNA, 25 bp, Homo sapien
catctcacatggtggtaggtaagag

SEQ ID NO: 3994402 - DNA, 25 bp, Homo sapien
atctcacatggtggtaggtaagaga

SEQ ID NO: 3994403 - DNA, 25 bp, Homo sapien
tcaaagggaaactgggagtcctgga

SEQ ID NO: 3994404 - DNA, 25 bp, Homo sapien
cactgtagtcaaacaatcaaaggga

SEQ ID NO: 3994405 - DNA, 25 bp, Homo sapien
gcagcaagagtgagatgagtcgtca

SEQ ID NO: 3994406 - DNA, 25 bp, Homo sapien
ggtaaatcagccctcgataaaatag

SEQ ID NO: 3994407 - DNA, 25 bp, Homo sapien
tgattatttcaccttgtcacgggca

SEQ ID NO: 3994408 - DNA, 25 bp, Homo sapien
gccaacagcagacgtgatggaagcc

SEQ ID NO: 3994409 - DNA, 25 bp, Homo sapien
gattatttcaccttgtcacggacag

SEQ ID NO: 3994410 - DNA, 25 bp, Homo sapien
gaaaattgtcccaatacagtcacct

SEQ ID NO: 3994411 - DNA, 25 bp, Homo sapien
acttgagaaagtggaatcgaattcc

SEQ ID NO: 3994412 - DNA, 25 bp, Homo sapien
cccgggatcaacaaagacaagatat

SEQ ID NO: 3994413 - DNA, 25 bp, Homo sapien
ggagctctattgtgtcccgggatca

SEQ ID NO: 3994414 - DNA, 25 bp, Homo sapien
gaagaagctagtcaatgtggagctc

SEQ ID NO: 3994415 - DNA, 25 bp, Homo sapien
taggttccagctacacagttcaggg

SEQ ID NO: 3994416 - DNA, 25 bp, Homo sapien
tgcatctgaaccacagggacctacg

SEQ ID NO: 3994417 - DNA, 25 bp, Homo sapien
caaggtgcgtatctgctgcctagca

SEQ ID NO: 3994418 - DNA, 25 bp, Homo sapien
cctacggacaaggagagggtctcgt

SEQ ID NO: 3994419 - DNA, 25 bp, Homo sapien
gccctgcaacgtcatagccgacatc

SEQ ID NO: 3994420 - DNA, 25 bp, Homo sapien
tgagaacttccacctactcagcact

SEQ ID NO: 3994421 - DNA, 25 bp, Homo sapien
ttcctcatcggctgcgcgccctgca

SEQ ID NO: 3994422 - DNA, 25 bp, Homo sapien
gccgacatcctcttccgcaagcatt

SEQ ID NO: 3994423 - DNA, 25 bp, Homo sapien
gactgcctgctcgtggaaatggaga

SEQ ID NO: 3994424 - DNA, 25 bp, Homo sapien
tgaaggagcaccatcaatctctgga

SEQ ID NO: 3994425 - DNA, 25 bp, Homo sapien
cctaacgtcaggatgtgtatcgacc

SEQ ID NO: 3994426 - DNA, 25 bp, Homo sapien
tgtgatagacaggactgcaaaagcc

SEQ ID NO: 3994427 - DNA, 25 bp, Homo sapien
agcacagtgcagagcgcttgtacac

SEQ ID NO: 3994428 - DNA, 25 bp, Homo sapien
gactgtggccgacctgttctttgcg

SEQ ID NO: 3994429 - DNA, 25 bp, Homo sapien
actctgagatatgggctcctgattc

SEQ ID NO: 3994430 - DNA, 25 bp, Homo sapien
tgtacacaatggacggtatcaccgt

SEQ ID NO: 3994431 - DNA, 25 bp, Homo sapien
gaactttcgactactctgcactagg

SEQ ID NO: 3994432 - DNA, 25 bp, Homo sapien
gaggaggttccaatatagacaaaag

SEQ ID NO: 3994433 - DNA, 25 bp, Homo sapien
tgtagcttctacctattgggctcaa

SEQ ID NO: 3994434 - DNA, 25 bp, Homo sapien
aaggaatcattgtatggatctgcag

SEQ ID NO: 3994435 - DNA, 25 bp, Homo sapien
cacagtcgtagtgccaactctggac

SEQ ID NO: 3994436 - DNA, 25 bp, Homo sapien
aacaaactatcacaaccagccctgg

SEQ ID NO: 3994437 - DNA, 25 bp, Homo sapien
ttgtttctcctagggcacagtcgta

SEQ ID NO: 3994438 - DNA, 25 bp, Homo sapien
tcctgtgagaagattagggctttca

SEQ ID NO: 3994439 - DNA, 25 bp, Homo sapien
tcgacctcagccctatacatattgg

SEQ ID NO: 3994440 - DNA, 25 bp, Homo sapien
tgtcattccccgctcatgagtgtgt

SEQ ID NO: 3994441 - DNA, 25 bp, Homo sapien
tgagtgtgtggaggacaccctgaac

SEQ ID NO: 3994442 - DNA, 25 bp, Homo sapien
ttgacccaaaggatatcgacctcag

SEQ ID NO: 3994443 - DNA, 25 bp, Homo sapien
cagtgtcagaatcatattgaggtgg

SEQ ID NO: 3994444 - DNA, 25 bp, Homo sapien
ccagccagagagaggttttaaatat

SEQ ID NO: 3994445 - DNA, 25 bp, Homo sapien
atctaggatcacacaacttcagtgt

SEQ ID NO: 3994446 - DNA, 25 bp, Homo sapien
ggaatttgtattagtcaggtttctc

SEQ ID NO: 3994447 - DNA, 25 bp, Homo sapien
tatactcctacactacgctccaaat

SEQ ID NO: 3994448 - DNA, 25 bp, Homo sapien
tagagaaccagaacagttctcccgt

SEQ ID NO: 3994449 - DNA, 25 bp, Homo sapien
tacgctccaaatagagtgtagagaa

SEQ ID NO: 3994450 - DNA, 25 bp, Homo sapien
gttctcccgttctgaggtattctac

SEQ ID NO: 3994451 - DNA, 25 bp, Homo sapien
taagggaagctgactatttattagt

SEQ ID NO: 3994452 - DNA, 25 bp, Homo sapien
aagggaagctgactatttattagtc

SEQ ID NO: 3994453 - DNA, 25 bp, Homo sapien
tttttttttcacatgaataggtgaa

SEQ ID NO: 3994454 - DNA, 25 bp, Homo sapien
tagagaactcgtctgtcctggactg

SEQ ID NO: 3994455 - DNA, 25 bp, Homo sapien
tgtggtgaaccaataaaagctaaag

SEQ ID NO: 3994456 - DNA, 25 bp, Homo sapien
tggactgactgaagaatttctgcac

SEQ ID NO: 3994457 - DNA, 25 bp, Homo sapien
ttccatggaaacagtgctctgcagt

SEQ ID NO: 3994458 - DNA, 25 bp, Homo sapien
caccatgtcactggtctacctggtc

SEQ ID NO: 3994459 - DNA, 25 bp, Homo sapien
catgtcactggtctacctggtctgg

SEQ ID NO: 3994460 - DNA, 25 bp, Homo sapien
gtcactggtctacctggtctgggag

SEQ ID NO: 3994461 - DNA, 25 bp, Homo sapien
tcaactccaccatgtcactggtcta

SEQ ID NO: 3994462 - DNA, 25 bp, Homo sapien
agggatcgctttgtcattacttcaa

SEQ ID NO: 3994463 - DNA, 25 bp, Homo sapien
tacttcaatgcattctgactcagga

SEQ ID NO: 3994464 - DNA, 25 bp, Homo sapien
ccattggtcttgattgggtcaacgc

SEQ ID NO: 3994465 - DNA, 25 bp, Homo sapien
gagatgcagactttgactcccacca

SEQ ID NO: 3994466 - DNA, 25 bp, Homo sapien
tgtgcagctccaggtctttctcctt

SEQ ID NO: 3994467 - DNA, 25 bp, Homo sapien
taaggtcggggtggagtgtgtcctc

SEQ ID NO: 3994468 - DNA, 25 bp, Homo sapien
tcctcctggcctatgaggacatcag

SEQ ID NO: 3994469 - DNA, 25 bp, Homo sapien
tatttcctgaaagccccttgggcta

SEQ ID NO: 3994470 - DNA, 25 bp, Homo sapien
gacttgcattccatgcttttccagc

SEQ ID NO: 3994471 - DNA, 25 bp, Homo sapien
gggcagggacttgcattccatgctt

SEQ ID NO: 3994472 - DNA, 25 bp, Homo sapien
cagggacttgcattccatgcttttc

SEQ ID NO: 3994473 - DNA, 25 bp, Homo sapien
gggacttgcattccatgcttttcca

SEQ ID NO: 3994474 - DNA, 25 bp, Homo sapien
tgggcagcagctgctaggagctcct

SEQ ID NO: 3994475 - DNA, 25 bp, Homo sapien
tgctgttgttggcacttctgctgca

SEQ ID NO: 3994476 - DNA, 25 bp, Homo sapien
agcagctgctaggagctcctcagcc

SEQ ID NO: 3994477 - DNA, 25 bp, Homo sapien
tcctgtgctcttcctgaaacagctg

SEQ ID NO: 3994478 - DNA, 25 bp, Homo sapien
gaaagagtccctcatcaagggtgga

SEQ ID NO: 3994479 - DNA, 25 bp, Homo sapien
tccagtgtcgccttgaccagcttct

SEQ ID NO: 3994480 - DNA, 25 bp, Homo sapien
cagctgatgcttcacgtcttccagt

SEQ ID NO: 3994481 - DNA, 25 bp, Homo sapien
aaagagtccctcatcaagggtggag

SEQ ID NO: 3994482 - DNA, 25 bp, Homo sapien
cttccttgagcagctgctccttgct

SEQ ID NO: 3994483 - DNA, 25 bp, Homo sapien
ttccttgagcagctgctccttgctg

SEQ ID NO: 3994484 - DNA, 25 bp, Homo sapien
cagggcacaaatctcctttgccagc

SEQ ID NO: 3994485 - DNA, 25 bp, Homo sapien
tccagggcacaaatctcctttgcca

SEQ ID NO: 3994486 - DNA, 25 bp, Homo sapien
gggcacaaatctcctttgccagccg

SEQ ID NO: 3994487 - DNA, 25 bp, Homo sapien
ctgtccagggcacaaatctcctttg

SEQ ID NO: 3994488 - DNA, 25 bp, Homo sapien
cagaggtccttgtgctggcccatca

SEQ ID NO: 3994489 - DNA, 25 bp, Homo sapien
agaggtccttgtgctggcccatcag

SEQ ID NO: 3994490 - DNA, 25 bp, Homo sapien
gaggtccttgtgctggcccatcaga

SEQ ID NO: 3994491 - DNA, 25 bp, Homo sapien
gaaattctctccttgcactcctgca

SEQ ID NO: 3994492 - DNA, 25 bp, Homo sapien
cttcttcaatctgcaagttcagggc

SEQ ID NO: 3994493 - DNA, 25 bp, Homo sapien
tctcttcttcaatctgcaagttcag

SEQ ID NO: 3994494 - DNA, 25 bp, Homo sapien
ctcagctgtctctgtttgttcttct

SEQ ID NO: 3994495 - DNA, 25 bp, Homo sapien
ttttcctggcaatgcagccggagga

SEQ ID NO: 3994496 - DNA, 25 bp, Homo sapien
tccttttcctggcaatgcagccgga

SEQ ID NO: 3994497 - DNA, 25 bp, Homo sapien
tttcctggcaatgcagccggaggat

SEQ ID NO: 3994498 - DNA, 25 bp, Homo sapien
ccttttcctggcaatgcagccggag

SEQ ID NO: 3994499 - DNA, 25 bp, Homo sapien
ctccttcaggtgtactttctctcca

SEQ ID NO: 3994500 - DNA, 25 bp, Homo sapien
agatggtccgggcctctcctaggtc

SEQ ID NO: 3994501 - DNA, 25 bp, Homo sapien
gggcctcacagatggtccgggcctc

SEQ ID NO: 3994502 - DNA, 25 bp, Homo sapien
ctctcctaggtctttattggctttc

SEQ ID NO: 3994503 - DNA, 25 bp, Homo sapien
tgcagggcctcacagatggtccggg

SEQ ID NO: 3994504 - DNA, 25 bp, Homo sapien
tatagagtaggaaacgaggcttcca

SEQ ID NO: 3994505 - DNA, 25 bp, Homo sapien
aaaaacattgtgtgagtgcagcctc

SEQ ID NO: 3994506 - DNA, 25 bp, Homo sapien
tggcagtcgcatgctgaaatgccct

SEQ ID NO: 3994507 - DNA, 25 bp, Homo sapien
tcatgggcatgtaactatggcagtc

SEQ ID NO: 3994508 - DNA, 25 bp, Homo sapien
ggacctcattaatccggttaatcag

SEQ ID NO: 3994509 - DNA, 25 bp, Homo sapien
cttgctggacctcattaatccggtt

SEQ ID NO: 3994510 - DNA, 25 bp, Homo sapien
aggacctcaactcggggctctaggc

SEQ ID NO: 3994511 - DNA, 25 bp, Homo sapien
tcaactcggggctctaggcttccca

SEQ ID NO: 3994512 - DNA, 25 bp, Homo sapien
ctgctgctttcacgcaacacagatc

SEQ ID NO: 3994513 - DNA, 25 bp, Homo sapien
gggcggttgccagccttgtgtctct

SEQ ID NO: 3994514 - DNA, 25 bp, Homo sapien
cacgcaacacagatctattgagtac

SEQ ID NO: 3994515 - DNA, 25 bp, Homo sapien
tgcacggaggaaaggaggttgagtt

SEQ ID NO: 3994516 - DNA, 25 bp, Homo sapien
aatggggctgcggtaaccgtgttca

SEQ ID NO: 3994517 - DNA, 25 bp, Homo sapien
gctgcggtaaccgtgttcaagagaa

SEQ ID NO: 3994518 - DNA, 25 bp, Homo sapien
cggtaaccgtgttcaagagaaatga

SEQ ID NO: 3994519 - DNA, 25 bp, Homo sapien
aataagataccgaatggggctgcgg

SEQ ID NO: 3994520 - DNA, 25 bp, Homo sapien
tcagtgcaaagacccatcatgaggt

SEQ ID NO: 3994521 - DNA, 25 bp, Homo sapien
ctggcaggagcctagcgagcaaaga

SEQ ID NO: 3994522 - DNA, 25 bp, Homo sapien
ggcctgaaattaaacccacatctgc

SEQ ID NO: 3994523 - DNA, 25 bp, Homo sapien
caacttctggatctaatggactgca

SEQ ID NO: 3994524 - DNA, 25 bp, Homo sapien
ttctgcagcttttgcaccatttcca

SEQ ID NO: 3994525 - DNA, 25 bp, Homo sapien
tttctgcagcttttgcaccatttcc

SEQ ID NO: 3994526 - DNA, 25 bp, Homo sapien
ctttctgcagcttttgcaccatttc

SEQ ID NO: 3994527 - DNA, 25 bp, Homo sapien
tctgcagcttttgcaccatttccat

SEQ ID NO: 3994528 - DNA, 25 bp, Homo sapien
attttctgtgaggacgtgtcctgcc

SEQ ID NO: 3994529 - DNA, 25 bp, Homo sapien
aattttctgtgaggacgtgtcctgc

SEQ ID NO: 3994530 - DNA, 25 bp, Homo sapien
tcccttgaacgctctgctgcatgag

SEQ ID NO: 3994531 - DNA, 25 bp, Homo sapien
cagaggcacctgaccaaagtttgta

SEQ ID NO: 3994532 - DNA, 25 bp, Homo sapien
taaaagcatccatgtggtcgagcct

SEQ ID NO: 3994533 - DNA, 25 bp, Homo sapien
cacggttgagaaggctcagaggcac

SEQ ID NO: 3994534 - DNA, 25 bp, Homo sapien
tacactgatgtatacaagatgccca

SEQ ID NO: 3994535 - DNA, 25 bp, Homo sapien
acactgatgtatacaagatgcccag

SEQ ID NO: 3994536 - DNA, 25 bp, Homo sapien
cttacactgatgtatacaagatgcc

SEQ ID NO: 3994537 - DNA, 25 bp, Homo sapien
ttacactgatgtatacaagatgccc

SEQ ID NO: 3994538 - DNA, 25 bp, Homo sapien
tatctttgtcaaccagatatgcaaa

SEQ ID NO: 3994539 - DNA, 25 bp, Homo sapien
tccaaacgtgtttatctttgtcaac

SEQ ID NO: 3994540 - DNA, 25 bp, Homo sapien
tgtcaaccagatatgcaaaattaag

SEQ ID NO: 3994541 - DNA, 25 bp, Homo sapien
gatatgcaaaattaaggtgtctcct

SEQ ID NO: 3994542 - DNA, 25 bp, Homo sapien
agtgattgtaccactgcactccagc

SEQ ID NO: 3994543 - DNA, 25 bp, Homo sapien
ggctgcagtgagcagtgattgtacc

SEQ ID NO: 3994544 - DNA, 25 bp, Homo sapien
cctgggcaacaaagcacaatctcgt

SEQ ID NO: 3994545 - DNA, 25 bp, Homo sapien
gaatctcttgaggccaggaggtcaa

SEQ ID NO: 3994546 - DNA, 25 bp, Homo sapien
tgggctcggccttcgatgtcaggga

SEQ ID NO: 3994547 - DNA, 25 bp, Homo sapien
tgtccacggctcctgcggtgggctc

SEQ ID NO: 3994548 - DNA, 25 bp, Homo sapien
atttcctctcagctcgccagcgagg

SEQ ID NO: 3994549 - DNA, 25 bp, Homo sapien
ctcggccttcgatgtcagggacctc

SEQ ID NO: 3994550 - DNA, 25 bp, Homo sapien
gcgcatgtgcgctggcttccgaggg

SEQ ID NO: 3994551 - DNA, 25 bp, Homo sapien
cggccgtccaggcttgcgattggcc

SEQ ID NO: 3994552 - DNA, 25 bp, Homo sapien
ggaagcccgccagggccacgtgcgg

SEQ ID NO: 3994553 - DNA, 25 bp, Homo sapien
caggcttgcgattggcccgctgccg

SEQ ID NO: 3994554 - DNA, 25 bp, Homo sapien
tgtgtagcgccgaagcttcctgtga

SEQ ID NO: 3994555 - DNA, 25 bp, Homo sapien
ccagcgagtgaaatctgcggcagcc

SEQ ID NO: 3994556 - DNA, 25 bp, Homo sapien
caacgagcagtacgcatgtgtagcg

SEQ ID NO: 3994557 - DNA, 25 bp, Homo sapien
gatgacgactccacaaggcgctgtg

SEQ ID NO: 3994558 - DNA, 25 bp, Homo sapien
taggccgcgttcccgtgagctccat

SEQ ID NO: 3994559 - DNA, 25 bp, Homo sapien
ggtcccttctgcacggtccctgccg

SEQ ID NO: 3994560 - DNA, 25 bp, Homo sapien
cacagtggccgaggccggccacaag

SEQ ID NO: 3994561 - DNA, 25 bp, Homo sapien
gcgcagaggagcgtagcctgcccct

SEQ ID NO: 3994562 - DNA, 25 bp, Homo sapien
gctttcgggagaacccagcccttca

SEQ ID NO: 3994563 - DNA, 25 bp, Homo sapien
tttaggcttagggtttagtgcttga

SEQ ID NO: 3994564 - DNA, 25 bp, Homo sapien
cttagtgttgttagggttagcttca

SEQ ID NO: 3994565 - DNA, 25 bp, Homo sapien
cattaggagttacagttgggttaag

SEQ ID NO: 3994566 - DNA, 25 bp, Homo sapien
ttagggttatgggttagtgttagca

SEQ ID NO: 3994567 - DNA, 25 bp, Homo sapien
cgtgggtccagcgcccgaagtccac

SEQ ID NO: 3994568 - DNA, 25 bp, Homo sapien
gtgggtccagcgcccgaagtccacg

SEQ ID NO: 3994569 - DNA, 25 bp, Homo sapien
tgtagatgccgagccggtcctgttg

SEQ ID NO: 3994570 - DNA, 25 bp, Homo sapien
tgttgcctccgggaacccagtcctc

SEQ ID NO: 3994571 - DNA, 25 bp, Homo sapien
tagctgtagatgccgagccggtcct

SEQ ID NO: 3994572 - DNA, 25 bp, Homo sapien
gatgccgagccggtcctgttgcctc

SEQ ID NO: 3994573 - DNA, 25 bp, Homo sapien
cgccccggccgcagccacgcgcagg

SEQ ID NO: 3994574 - DNA, 25 bp, Homo sapien
ccccggccgcagccacgcgcaggga

SEQ ID NO: 3994575 - DNA, 25 bp, Homo sapien
cggccgcagccacgcgcagggagga

SEQ ID NO: 3994576 - DNA, 25 bp, Homo sapien
ccggccgcagccacgcgcagggagg

SEQ ID NO: 3994577 - DNA, 25 bp, Homo sapien
agcacagcgccggcctcacacacac

SEQ ID NO: 3994578 - DNA, 25 bp, Homo sapien
cctccgcggccgcacgcagaggaag

SEQ ID NO: 3994579 - DNA, 25 bp, Homo sapien
aaggctgcctcctgtagcagagccc

SEQ ID NO: 3994580 - DNA, 25 bp, Homo sapien
tcgcgggtgcccagttcatcttcat

SEQ ID NO: 3994581 - DNA, 25 bp, Homo sapien
tcctgtagcagagcccagccattcg

SEQ ID NO: 3994582 - DNA, 25 bp, Homo sapien
gggtgcttgtaccagccccatggtg

SEQ ID NO: 3994583 - DNA, 25 bp, Homo sapien
tcaacctccggccttgtttcaggga

SEQ ID NO: 3994584 - DNA, 25 bp, Homo sapien
tcccgtggcaggtgcggtttctcca

SEQ ID NO: 3994585 - DNA, 25 bp, Homo sapien
gtttctccaccggttgtcagctgcg

SEQ ID NO: 3994586 - DNA, 25 bp, Homo sapien
gttcttgggcaacccctggtgctgg

SEQ ID NO: 3994587 - DNA, 25 bp, Homo sapien
tggagccggcagtggacagcaccgc

SEQ ID NO: 3994588 - DNA, 25 bp, Homo sapien
ggttcttgggcaacccctggtgctg

SEQ ID NO: 3994589 - DNA, 25 bp, Homo sapien
ggaatcctcagcgatctggccagga

SEQ ID NO: 3994590 - DNA, 25 bp, Homo sapien
aatcctcagcgatctggccaggatg

SEQ ID NO: 3994591 - DNA, 25 bp, Homo sapien
atctggccaggatgtgggtgtagga

SEQ ID NO: 3994592 - DNA, 25 bp, Homo sapien
cctcagcgatctggccaggatgtgg

SEQ ID NO: 3994593 - DNA, 25 bp, Homo sapien
tgagtccgcatttctatggtagtgg

SEQ ID NO: 3994594 - DNA, 25 bp, Homo sapien
gggctgcctgagtccgcatttctat

SEQ ID NO: 3994595 - DNA, 25 bp, Homo sapien
agttgagagccgtggacacaaagga

SEQ ID NO: 3994596 - DNA, 25 bp, Homo sapien
ttctatggtagtggtgctggagcaa

SEQ ID NO: 3994597 - DNA, 25 bp, Homo sapien
cttttaggtcctgacatctttatct

SEQ ID NO: 3994598 - DNA, 25 bp, Homo sapien
gcctccaatgggtctgtgtggcgtg

SEQ ID NO: 3994599 - DNA, 25 bp, Homo sapien
cggacgagggaagggcgggagctgt

SEQ ID NO: 3994600 - DNA, 25 bp, Homo sapien
tctgagccagcaaaggggcggacga

SEQ ID NO: 3994601 - DNA, 25 bp, Homo sapien
gcccacctggtgagacgacttcaga

SEQ ID NO: 3994602 - DNA, 25 bp, Homo sapien
cacctggtgagacgacttcagagac

SEQ ID NO: 3994603 - DNA, 25 bp, Homo sapien
cctggtgagacgacttcagagaccc

SEQ ID NO: 3994604 - DNA, 25 bp, Homo sapien
ccaggcccacctggtgagacgactt

SEQ ID NO: 3994605 - DNA, 25 bp, Homo sapien
gcgggggcgaggacggagtgctggg

SEQ ID NO: 3994606 - DNA, 25 bp, Homo sapien
atggcgggggcgaggacggagtgct

SEQ ID NO: 3994607 - DNA, 25 bp, Homo sapien
ggcgccactggccagcctcaggaga

SEQ ID NO: 3994608 - DNA, 25 bp, Homo sapien
gagtgctggggggcgccactggcca

SEQ ID NO: 3994609 - DNA, 25 bp, Homo sapien
ctgcctccgctggtgtttcttattc

SEQ ID NO: 3994610 - DNA, 25 bp, Homo sapien
acaggtcgcagactcgaggcccttc

SEQ ID NO: 3994611 - DNA, 25 bp, Homo sapien
ggacaggtcgcagactcgaggccct

SEQ ID NO: 3994612 - DNA, 25 bp, Homo sapien
taggctgcctttggaacacccattt

SEQ ID NO: 3994613 - DNA, 25 bp, Homo sapien
gctgctgaatgctacccagtaggct

SEQ ID NO: 3994614 - DNA, 25 bp, Homo sapien
acttggaacgatccccagtcctctg

SEQ ID NO: 3994615 - DNA, 25 bp, Homo sapien
cattctttgttcacggacacttgga

SEQ ID NO: 3994616 - DNA, 25 bp, Homo sapien
tgtaatccacccgtaagaatgggaa

SEQ ID NO: 3994617 - DNA, 25 bp, Homo sapien
tgtactgctccacagctactatggc

SEQ ID NO: 3994618 - DNA, 25 bp, Homo sapien
gcattcacggccatcctcatcatga

SEQ ID NO: 3994619 - DNA, 25 bp, Homo sapien
aaagccagagcatgatgattctgcc

SEQ ID NO: 3994620 - DNA, 25 bp, Homo sapien
gggatcagcttcataaaagccagag

SEQ ID NO: 3994621 - DNA, 25 bp, Homo sapien
tgttaacagatgaaatagtactccc

SEQ ID NO: 3994622 - DNA, 25 bp, Homo sapien
aggcccaagcgctcacagtggctct

SEQ ID NO: 3994623 - DNA, 25 bp, Homo sapien
tagagccattgatcttgggccccgc

SEQ ID NO: 3994624 - DNA, 25 bp, Homo sapien
cagctgttcgtaggcatcctcatgg

SEQ ID NO: 3994625 - DNA, 25 bp, Homo sapien
ttagcccagttgttcacagcatctt

SEQ ID NO: 3994626 - DNA, 25 bp, Homo sapien
ctagccctggtgttcatggcttttc

SEQ ID NO: 3994627 - DNA, 25 bp, Homo sapien
tagccctggtgttcatggcttttct

SEQ ID NO: 3994628 - DNA, 25 bp, Homo sapien
gccctggtgttcatggcttttctca

SEQ ID NO: 3994629 - DNA, 25 bp, Homo sapien
ccctggtgttcatggcttttctcac

SEQ ID NO: 3994630 - DNA, 25 bp, Homo sapien
cttcttcccgttggttccagcagtt

SEQ ID NO: 3994631 - DNA, 25 bp, Homo sapien
acttcttcccgttggttccagcagt

SEQ ID NO: 3994632 - DNA, 25 bp, Homo sapien
tcttcccgttggttccagcagtttc

SEQ ID NO: 3994633 - DNA, 25 bp, Homo sapien
tccaggcctgcacaggttttcacag

SEQ ID NO: 3994634 - DNA, 25 bp, Homo sapien
ctaagccagtcaaggagttctctgt

SEQ ID NO: 3994635 - DNA, 25 bp, Homo sapien
tcatccaggcctgcacaggttttca

SEQ ID NO: 3994636 - DNA, 25 bp, Homo sapien
cgtcctcatctaagccagtcaagga

SEQ ID NO: 3994637 - DNA, 25 bp, Homo sapien
cccgggtattcataggcatcctcat

SEQ ID NO: 3994638 - DNA, 25 bp, Homo sapien
ggccagatgttcacatccaatctca

SEQ ID NO: 3994639 - DNA, 25 bp, Homo sapien
taatccgagctgttctcctagggcc

SEQ ID NO: 3994640 - DNA, 25 bp, Homo sapien
cagcccaggtgttcgtagccatatg

SEQ ID NO: 3994641 - DNA, 25 bp, Homo sapien
gggccagtgcgggtgttcacagctt

SEQ ID NO: 3994642 - DNA, 25 bp, Homo sapien
agtgcgggtgttcacagctttcctc

SEQ ID NO: 3994643 - DNA, 25 bp, Homo sapien
ggccagtgcgggtgttcacagcttt

SEQ ID NO: 3994644 - DNA, 25 bp, Homo sapien
ccagtgcgggtgttcacagctttcc

SEQ ID NO: 3994645 - DNA, 25 bp, Homo sapien
tggctttcgttgaccccacaccagg

SEQ ID NO: 3994646 - DNA, 25 bp, Homo sapien
ctttcgttgaccccacaccaggtgt

SEQ ID NO: 3994647 - DNA, 25 bp, Homo sapien
ttcgttgaccccacaccaggtgttc

SEQ ID NO: 3994648 - DNA, 25 bp, Homo sapien
aatggctttcgttgaccccacacca

SEQ ID NO: 3994649 - DNA, 25 bp, Homo sapien
ttttcgtagctgtcttcattgtgca

SEQ ID NO: 3994650 - DNA, 25 bp, Homo sapien
tttcgtagctgtcttcattgtgcac

SEQ ID NO: 3994651 - DNA, 25 bp, Homo sapien
ttcgtagctgtcttcattgtgcaca

SEQ ID NO: 3994652 - DNA, 25 bp, Homo sapien
cttttcgtagctgtcttcattgtgc

SEQ ID NO: 3994653 - DNA, 25 bp, Homo sapien
tggaaaacggacaatcacccgcgtc

SEQ ID NO: 3994654 - DNA, 25 bp, Homo sapien
cgtgtcgtctgtgaaccacgtggat

SEQ ID NO: 3994655 - DNA, 25 bp, Homo sapien
cgtggatggaaaacggacaatcacc

SEQ ID NO: 3994656 - DNA, 25 bp, Homo sapien
cgcgtctcggctcattgctctcatt

SEQ ID NO: 3994657 - DNA, 25 bp, Homo sapien
ccccggagccgagtgagcagtgtca

SEQ ID NO: 3994658 - DNA, 25 bp, Homo sapien
agccgagtgagcagtgtcagctgct

SEQ ID NO: 3994659 - DNA, 25 bp, Homo sapien
agcttagcctcatctgatccactga

SEQ ID NO: 3994660 - DNA, 25 bp, Homo sapien
gagtgagcagtgtcagctgctcaca

SEQ ID NO: 3994661 - DNA, 25 bp, Homo sapien
tttattcaatgacaagctgcactcc

SEQ ID NO: 3994662 - DNA, 25 bp, Homo sapien
tcaatgacaagctgcactccttttc

SEQ ID NO: 3994663 - DNA, 25 bp, Homo sapien
tattcaatgacaagctgcactcctt

SEQ ID NO: 3994664 - DNA, 25 bp, Homo sapien
tgacaagctgcactccttttctgga

SEQ ID NO: 3994665 - DNA, 25 bp, Homo sapien
tcccgatatgagctggactctggtt

SEQ ID NO: 3994666 - DNA, 25 bp, Homo sapien
tttcccgatatgagctggactctgg

SEQ ID NO: 3994667 - DNA, 25 bp, Homo sapien
tcctgcagttttcccgatatgagct

SEQ ID NO: 3994668 - DNA, 25 bp, Homo sapien
cagttttcccgatatgagctggact

SEQ ID NO: 3994669 - DNA, 25 bp, Homo sapien
cagtgctgttcccggccttgagctt

SEQ ID NO: 3994670 - DNA, 25 bp, Homo sapien
gcagtgctgttcccggccttgagct

SEQ ID NO: 3994671 - DNA, 25 bp, Homo sapien
ctgtaaaggagatctgttggaaagg

SEQ ID NO: 3994672 - DNA, 25 bp, Homo sapien
ctggatggaggagcagtggagatcg

SEQ ID NO: 3994673 - DNA, 25 bp, Homo sapien
agcagtggagatcggggtcttcatt

SEQ ID NO: 3994674 - DNA, 25 bp, Homo sapien
tggaggagcagtggagatcggggtc

SEQ ID NO: 3994675 - DNA, 25 bp, Homo sapien
aggagcagtggagatcggggtcttc

SEQ ID NO: 3994676 - DNA, 25 bp, Homo sapien
cctccagtcccagatgacttgattg

SEQ ID NO: 3994677 - DNA, 25 bp, Homo sapien
agtcccagatgacttgattgactga

SEQ ID NO: 3994678 - DNA, 25 bp, Homo sapien
tccagtcccagatgacttgattgac

SEQ ID NO: 3994679 - DNA, 25 bp, Homo sapien
tcccagatgacttgattgactgatg

SEQ ID NO: 3994680 - DNA, 25 bp, Homo sapien
gtaagtacttgataagacatcgact

SEQ ID NO: 3994681 - DNA, 25 bp, Homo sapien
tacttgataagacatcgacttgcac

SEQ ID NO: 3994682 - DNA, 25 bp, Homo sapien
cttgataagacatcgacttgcacat

SEQ ID NO: 3994683 - DNA, 25 bp, Homo sapien
agtacttgataagacatcgacttgc

SEQ ID NO: 3994684 - DNA, 25 bp, Homo sapien
caacatgaataaaaccggaggccat

SEQ ID NO: 3994685 - DNA, 25 bp, Homo sapien
gagataccaacttacaccatgcaga

SEQ ID NO: 3994686 - DNA, 25 bp, Homo sapien
cagaagaatggaatgggacccctat

SEQ ID NO: 3994687 - DNA, 25 bp, Homo sapien
cactgatggtcaatggtcaacaagc

SEQ ID NO: 3994688 - DNA, 25 bp, Homo sapien
ggacaaactgaatagacctcataat

SEQ ID NO: 3994689 - DNA, 25 bp, Homo sapien
cttagcacatacaatatgttaggca

SEQ ID NO: 3994690 - DNA, 25 bp, Homo sapien
tcataaataattagattaggcaaaa

SEQ ID NO: 3994691 - DNA, 25 bp, Homo sapien
tatgttaggcaagattctaagccac

SEQ ID NO: 3994692 - DNA, 25 bp, Homo sapien
gggcagcgaaccatcctgcccagaa

SEQ ID NO: 3994693 - DNA, 25 bp, Homo sapien
cccgccgagtctgcgtctctggagg

SEQ ID NO: 3994694 - DNA, 25 bp, Homo sapien
tctctggagggcagcgaaccatcct

SEQ ID NO: 3994695 - DNA, 25 bp, Homo sapien
aggctcccgccgagtctgcgtctct

SEQ ID NO: 3994696 - DNA, 25 bp, Homo sapien
cagtccattttgacgcaggtcaggc

SEQ ID NO: 3994697 - DNA, 25 bp, Homo sapien
gcgggtgcttgcagattcctccagg

SEQ ID NO: 3994698 - DNA, 25 bp, Homo sapien
gagcttaaattccagcctcacagat

SEQ ID NO: 3994699 - DNA, 25 bp, Homo sapien
gcttccctgtctgccggagcttaaa

SEQ ID NO: 3994700 - DNA, 25 bp, Homo sapien
tgctgggtcctctccactccctccc

SEQ ID NO: 3994701 - DNA, 25 bp, Homo sapien
cttcgggtctgctgggtcctctcca

SEQ ID NO: 3994702 - DNA, 25 bp, Homo sapien
ctgggtcctctccactccctcccac

SEQ ID NO: 3994703 - DNA, 25 bp, Homo sapien
tctgctgggtcctctccactccctc

SEQ ID NO: 3994704 - DNA, 25 bp, Homo sapien
ccgggaagccgtcctgttgcccact

SEQ ID NO: 3994705 - DNA, 25 bp, Homo sapien
cgggaagccgtcctgttgcccactc

SEQ ID NO: 3994706 - DNA, 25 bp, Homo sapien
gccgggaagccgtcctgttgcccac

SEQ ID NO: 3994707 - DNA, 25 bp, Homo sapien
cgccgggaagccgtcctgttgccca

SEQ ID NO: 3994708 - DNA, 25 bp, Homo sapien
ctcagtagcttcaggttgcattttg

SEQ ID NO: 3994709 - DNA, 25 bp, Homo sapien
aaatactcagtagcttcaggttgca

SEQ ID NO: 3994710 - DNA, 25 bp, Homo sapien
ctaaatactcagtagcttcaggttg

SEQ ID NO: 3994711 - DNA, 25 bp, Homo sapien
tactcagtagcttcaggttgcattt

SEQ ID NO: 3994712 - DNA, 25 bp, Homo sapien
ggaaagttctcacgcagtttaggaa

SEQ ID NO: 3994713 - DNA, 25 bp, Homo sapien
aacaggctgagagtaggtaacggac

SEQ ID NO: 3994714 - DNA, 25 bp, Homo sapien
tcaaaaacggttgagtgcgtgctct

SEQ ID NO: 3994715 - DNA, 25 bp, Homo sapien
gcagaagacgtactcctctggaaag

SEQ ID NO: 3994716 - DNA, 25 bp, Homo sapien
tgattgcaggagctttcaggaaagc

SEQ ID NO: 3994717 - DNA, 25 bp, Homo sapien
acgaacattctgacctgtagttgat

SEQ ID NO: 3994718 - DNA, 25 bp, Homo sapien
gacctgtagttgattgcaggagctt

SEQ ID NO: 3994719 - DNA, 25 bp, Homo sapien
caggaaagcatcagggggaaataat

SEQ ID NO: 3994720 - DNA, 25 bp, Homo sapien
gctgaccactgagtcggccggaaga

SEQ ID NO: 3994721 - DNA, 25 bp, Homo sapien
ggccaaggtcaccaccctgatttgt

SEQ ID NO: 3994722 - DNA, 25 bp, Homo sapien
gccaaggtcaccaccctgatttgtc

SEQ ID NO: 3994723 - DNA, 25 bp, Homo sapien
ctgagtcggccggaagaagatagaa

SEQ ID NO: 3994724 - DNA, 25 bp, Homo sapien
cagccaaggagatgagcacaagcac

SEQ ID NO: 3994725 - DNA, 25 bp, Homo sapien
tgagcagtcacagcccggctttggg

SEQ ID NO: 3994726 - DNA, 25 bp, Homo sapien
gcaccgtgagcaagcgggtcctgta

SEQ ID NO: 3994727 - DNA, 25 bp, Homo sapien
gcacaagcactacttactggcctag

SEQ ID NO: 3994728 - DNA, 25 bp, Homo sapien
cccagtcgcgcctctgccttctcaa

SEQ ID NO: 3994729 - DNA, 25 bp, Homo sapien
acaggctcgctcgtgcccggtgagt

SEQ ID NO: 3994730 - DNA, 25 bp, Homo sapien
ctctgcacgtggagtatggccctgt

SEQ ID NO: 3994731 - DNA, 25 bp, Homo sapien
cccagtcgcgcctctgccttctcat

SEQ ID NO: 3994732 - DNA, 25 bp, Homo sapien
cctgtggacctcgaatgcagagctt

SEQ ID NO: 3994733 - DNA, 25 bp, Homo sapien
cagagcttatgcacctaccgaaggt

SEQ ID NO: 3994734 - DNA, 25 bp, Homo sapien
tgttcgcaactttgagtgatcagcc

SEQ ID NO: 3994735 - DNA, 25 bp, Homo sapien
tgtacatttcgagcagtgctggccc

SEQ ID NO: 3994736 - DNA, 25 bp, Homo sapien
agaaatgttgcaccttctctgaact

SEQ ID NO: 3994737 - DNA, 25 bp, Homo sapien
aagcaccttgtagggggtcagaaat

SEQ ID NO: 3994738 - DNA, 25 bp, Homo sapien
ggtcagaaatgttgcaccttctctg

SEQ ID NO: 3994739 - DNA, 25 bp, Homo sapien
gtatggaaagggtgcctggcaggta

SEQ ID NO: 3994740 - DNA, 25 bp, Homo sapien
aattttgatgcttaggtcagagtcc

SEQ ID NO: 3994741 - DNA, 25 bp, Homo sapien
tgtagcataagaaaataccgtctgc

SEQ ID NO: 3994742 - DNA, 25 bp, Homo sapien
aagctaccagatataggaagaaggg

SEQ ID NO: 3994743 - DNA, 25 bp, Homo sapien
tttggaatcacaggacgctgagtga

SEQ ID NO: 3994744 - DNA, 25 bp, Homo sapien
taggcaggaaatatcgcagacctag

SEQ ID NO: 3994745 - DNA, 25 bp, Homo sapien
cccactgtggaactgaggagctagg

SEQ ID NO: 3994746 - DNA, 25 bp, Homo sapien
ggtttctcataaaactccctgatag

SEQ ID NO: 3994747 - DNA, 25 bp, Homo sapien
tgaattacagttacccactgtggaa

SEQ ID NO: 3994748 - DNA, 25 bp, Homo sapien
agcacttcgaaagtataaaccgcgg

SEQ ID NO: 3994749 - DNA, 25 bp, Homo sapien
ccaaagaggcgtgctgtgtctgcat

SEQ ID NO: 3994750 - DNA, 25 bp, Homo sapien
gaagggctccgagcacttcgaaagt

SEQ ID NO: 3994751 - DNA, 25 bp, Homo sapien
cctgggagtgcacggtttacattct

SEQ ID NO: 3994752 - DNA, 25 bp, Homo sapien
ttctgggaagcctcgcgcggctctt

SEQ ID NO: 3994753 - DNA, 25 bp, Homo sapien
gttctgggaagcctcgcgcggctct

SEQ ID NO: 3994754 - DNA, 25 bp, Homo sapien
ggttctgggaagcctcgcgcggctc

SEQ ID NO: 3994755 - DNA, 25 bp, Homo sapien
agcctcgcgcggctcttccgcagct

SEQ ID NO: 3994756 - DNA, 25 bp, Homo sapien
agcgtgagttccgtgcccaggcccg

SEQ ID NO: 3994757 - DNA, 25 bp, Homo sapien
gaaggcagcgatgggacaaaggacg

SEQ ID NO: 3994758 - DNA, 25 bp, Homo sapien
cctgacgctcggaagacaacggatg

SEQ ID NO: 3994759 - DNA, 25 bp, Homo sapien
acggatgggagccgtgtgcacgtcg

SEQ ID NO: 3994760 - DNA, 25 bp, Homo sapien
ctcgatctaactcccccagaagagg

SEQ ID NO: 3994761 - DNA, 25 bp, Homo sapien
gttcttgttacaactcgatctaact

SEQ ID NO: 3994762 - DNA, 25 bp, Homo sapien
ttgttacaactcgatctaactcccc

SEQ ID NO: 3994763 - DNA, 25 bp, Homo sapien
aactcgatctaactcccccagaaga

SEQ ID NO: 3994764 - DNA, 25 bp, Homo sapien
tctggtaaggggaccacacgctgca

SEQ ID NO: 3994765 - DNA, 25 bp, Homo sapien
gctgcagccagcgagacagtggcat

SEQ ID NO: 3994766 - DNA, 25 bp, Homo sapien
cacgctgcagccagcgagacagtgg

SEQ ID NO: 3994767 - DNA, 25 bp, Homo sapien
cacacgctgcagccagcgagacagt

SEQ ID NO: 3994768 - DNA, 25 bp, Homo sapien
ctgtcagtagattaggtagggaact

SEQ ID NO: 3994769 - DNA, 25 bp, Homo sapien
ctagcagtgcatttgtgagaagaca

SEQ ID NO: 3994770 - DNA, 25 bp, Homo sapien
gaaccatctggagggtgaactggct

SEQ ID NO: 3994771 - DNA, 25 bp, Homo sapien
aagttgagggtgaaccatctggagg

SEQ ID NO: 3994772 - DNA, 25 bp, Homo sapien
gctgaggtccaggattcccattgca

SEQ ID NO: 3994773 - DNA, 25 bp, Homo sapien
tcccattgcagctcctaggaaatct

SEQ ID NO: 3994774 - DNA, 25 bp, Homo sapien
tgcagctcctaggaaatctttaaaa

SEQ ID NO: 3994775 - DNA, 25 bp, Homo sapien
cagctgttctttgtccaggctgagg

SEQ ID NO: 3994776 - DNA, 25 bp, Homo sapien
ttcttcctgtagatcggggcttagg

SEQ ID NO: 3994777 - DNA, 25 bp, Homo sapien
cctgtagatcggggcttaggacacc

SEQ ID NO: 3994778 - DNA, 25 bp, Homo sapien
cttcctgtagatcggggcttaggac

SEQ ID NO: 3994779 - DNA, 25 bp, Homo sapien
tttcttcctgtagatcggggcttag

SEQ ID NO: 3994780 - DNA, 25 bp, Homo sapien
tcaaatgctgttcatttccgataag

SEQ ID NO: 3994781 - DNA, 25 bp, Homo sapien
ctaagctgtctggtctgtcgggtga

SEQ ID NO: 3994782 - DNA, 25 bp, Homo sapien
catttccgataaggggaggttcctg

SEQ ID NO: 3994783 - DNA, 25 bp, Homo sapien
tggtctgtcgggtgaagcttcaaat

SEQ ID NO: 3994784 - DNA, 25 bp, Homo sapien
actataggtaagtctgagcaaatct

SEQ ID NO: 3994785 - DNA, 25 bp, Homo sapien
aagtctttcctgacccccgatgctg

SEQ ID NO: 3994786 - DNA, 25 bp, Homo sapien
cccgatgctgctgactataggtaag

SEQ ID NO: 3994787 - DNA, 25 bp, Homo sapien
aggtgctgccccgagaaggatgcat

SEQ ID NO: 3994788 - DNA, 25 bp, Homo sapien
cctacagagggcaggcccttcagct

SEQ ID NO: 3994789 - DNA, 25 bp, Homo sapien
ctacagagggcaggcccttcagctc

SEQ ID NO: 3994790 - DNA, 25 bp, Homo sapien
ggtccagaggccttctgctaacgaa

SEQ ID NO: 3994791 - DNA, 25 bp, Homo sapien
acgaagtagcaactcgagctctctt

SEQ ID NO: 3994792 - DNA, 25 bp, Homo sapien
gccttctgctaacgaagtagcaact

SEQ ID NO: 3994793 - DNA, 25 bp, Homo sapien
gacccctccaggatgggtccagagg

SEQ ID NO: 3994794 - DNA, 25 bp, Homo sapien
cacagtgaccctttgatgatagaca

SEQ ID NO: 3994795 - DNA, 25 bp, Homo sapien
gcagaggacctagctcagaaaaatt

SEQ ID NO: 3994796 - DNA, 25 bp, Homo sapien
tgaagtttaatgttgccaatggagg

SEQ ID NO: 3994797 - DNA, 25 bp, Homo sapien
tagtgaggtgcccaaagtgatccaa

SEQ ID NO: 3994798 - DNA, 25 bp, Homo sapien
tggacgactgattattggacagaat

SEQ ID NO: 3994799 - DNA, 25 bp, Homo sapien
acgactgattattggacagaatggc

SEQ ID NO: 3994800 - DNA, 25 bp, Homo sapien
agattggacgactgattattggaca

SEQ ID NO: 3994801 - DNA, 25 bp, Homo sapien
gattggacgactgattattggacag

SEQ ID NO: 3994802 - DNA, 25 bp, Homo sapien
ttcagcagcttcttagcaggtttat

SEQ ID NO: 3994803 - DNA, 25 bp, Homo sapien
agcttcttagcaggtttatgattaa

SEQ ID NO: 3994804 - DNA, 25 bp, Homo sapien
gtttatgattaaagaagaaagacat

SEQ ID NO: 3994805 - DNA, 25 bp, Homo sapien
ctgtcactaccatggacttcagcag

SEQ ID NO: 3994806 - DNA, 25 bp, Homo sapien
caggtcaggacaaggatgcagacat

SEQ ID NO: 3994807 - DNA, 25 bp, Homo sapien
cagtgccagtcggagacacagatgg

SEQ ID NO: 3994808 - DNA, 25 bp, Homo sapien
aagaagatgcaggtcaggacaagga

SEQ ID NO: 3994809 - DNA, 25 bp, Homo sapien
aagatgcaggtcaggacaaggatgc

SEQ ID NO: 3994810 - DNA, 25 bp, Homo sapien
aaacttctttcgcaggctcacaaca

SEQ ID NO: 3994811 - DNA, 25 bp, Homo sapien
cacacaaacttctttcgcaggctca

SEQ ID NO: 3994812 - DNA, 25 bp, Homo sapien
cacaaacttctttcgcaggctcaca

SEQ ID NO: 3994813 - DNA, 25 bp, Homo sapien
ttctttcgcaggctcacaacatagt

SEQ ID NO: 3994814 - DNA, 25 bp, Homo sapien
ccggccctgtagattccaaggcggc

SEQ ID NO: 3994815 - DNA, 25 bp, Homo sapien
gccctgtagattccaaggcggctcc

SEQ ID NO: 3994816 - DNA, 25 bp, Homo sapien
tgtagattccaaggcggctcccagt

SEQ ID NO: 3994817 - DNA, 25 bp, Homo sapien
tccaaggcggctcccagttttccat

SEQ ID NO: 3994818 - DNA, 25 bp, Homo sapien
agctacccgcccaacttcatccgga

SEQ ID NO: 3994819 - DNA, 25 bp, Homo sapien
ttcggcaggacggccgtcgaggtcg

SEQ ID NO: 3994820 - DNA, 25 bp, Homo sapien
atccggagcgcgctgtcgtccgtcg

SEQ ID NO: 3994821 - DNA, 25 bp, Homo sapien
cctgcgcgaccgtcagggccgcacc

SEQ ID NO: 3994822 - DNA, 25 bp, Homo sapien
tgtttttggctgaggctgttcgctg

SEQ ID NO: 3994823 - DNA, 25 bp, Homo sapien
ggagcccgcactctgcacgaagtct

SEQ ID NO: 3994824 - DNA, 25 bp, Homo sapien
gctgttcgctgatggcaaaaggttt

SEQ ID NO: 3994825 - DNA, 25 bp, Homo sapien
aaactggtgcgtgtaggctgcgcac

SEQ ID NO: 3994826 - DNA, 25 bp, Homo sapien
gaaagtgtgctgttttggaggaggc

SEQ ID NO: 3994827 - DNA, 25 bp, Homo sapien
ggaaagtgtgctgttttggaggagg

SEQ ID NO: 3994828 - DNA, 25 bp, Homo sapien
aaagtgtgctgttttggaggaggct

SEQ ID NO: 3994829 - DNA, 25 bp, Homo sapien
cggaaagtgtgctgttttggaggag

SEQ ID NO: 3994830 - DNA, 25 bp, Homo sapien
gcaatacataattcggacaggctga

SEQ ID NO: 3994831 - DNA, 25 bp, Homo sapien
catgctgtgctgtagatctcaacaa

SEQ ID NO: 3994832 - DNA, 25 bp, Homo sapien
tggctaaaaagtcccagcaggtttc

SEQ ID NO: 3994833 - DNA, 25 bp, Homo sapien
caggctgaaagtaccattgtaacca

SEQ ID NO: 3994834 - DNA, 25 bp, Homo sapien
attagttttgcccatcaccttctta

SEQ ID NO: 3994835 - DNA, 25 bp, Homo sapien
acagcattcaatattttaggtaggc

SEQ ID NO: 3994836 - DNA, 25 bp, Homo sapien
tcaccttcttatgctggcctcagga

SEQ ID NO: 3994837 - DNA, 25 bp, Homo sapien
ggcctcaggagatttattaacagca

SEQ ID NO: 3994838 - DNA, 25 bp, Homo sapien
tgttgaaaggaacgcagatacacaa

SEQ ID NO: 3994839 - DNA, 25 bp, Homo sapien
cacacttgttgaaaggaacgcagat

SEQ ID NO: 3994840 - DNA, 25 bp, Homo sapien
gctgagctctgtgttacgctcacga

SEQ ID NO: 3994841 - DNA, 25 bp, Homo sapien
ctctgtgttacgctcacgaatgatg

SEQ ID NO: 3994842 - DNA, 25 bp, Homo sapien
gcttatagaacagagcgagcaggag

SEQ ID NO: 3994843 - DNA, 25 bp, Homo sapien
tctattaggaagagcctctcagagc

SEQ ID NO: 3994844 - DNA, 25 bp, Homo sapien
tcttgctcgtgggaagacccggtgt

SEQ ID NO: 3994845 - DNA, 25 bp, Homo sapien
tcttcacagggagcaatctgtgggt

SEQ ID NO: 3994846 - DNA, 25 bp, Homo sapien
tattgcaatcagcaaatggatttac

SEQ ID NO: 3994847 - DNA, 25 bp, Homo sapien
attgcaatcagcaaatggatttact

SEQ ID NO: 3994848 - DNA, 25 bp, Homo sapien
gactccaggtttgcaaccttgagat

SEQ ID NO: 3994849 - DNA, 25 bp, Homo sapien
agacacatggagacaattctgactc

SEQ ID NO: 3994850 - DNA, 25 bp, Homo sapien
gatactcttcccattgagacacatg

SEQ ID NO: 3994851 - DNA, 25 bp, Homo sapien
tccttttgattagtagaatcaactt

SEQ ID NO: 3994852 - DNA, 25 bp, Homo sapien
tatctcactttaatcaggaaggacc

SEQ ID NO: 3994853 - DNA, 25 bp, Homo sapien
catacaccagatgtagtgcaggatc

SEQ ID NO: 3994854 - DNA, 25 bp, Homo sapien
catcctaatctttccgtgcagacag

SEQ ID NO: 3994855 - DNA, 25 bp, Homo sapien
tgcatactaggtgcacaggcgtcct

SEQ ID NO: 3994856 - DNA, 25 bp, Homo sapien
tcctcgagcggtttgggatggcttc

SEQ ID NO: 3994857 - DNA, 25 bp, Homo sapien
caaacttgctgtcctagtggtaaca

SEQ ID NO: 3994858 - DNA, 25 bp, Homo sapien
caggcaaacttgctgtcctagtggt

SEQ ID NO: 3994859 - DNA, 25 bp, Homo sapien
actcctcgagcggtttgggatggct

SEQ ID NO: 3994860 - DNA, 25 bp, Homo sapien
tttcttggggttgattttgcaggaa

SEQ ID NO: 3994861 - DNA, 25 bp, Homo sapien
gatttcttggggttgattttgcagg

SEQ ID NO: 3994862 - DNA, 25 bp, Homo sapien
atttcttggggttgattttgcagga

SEQ ID NO: 3994863 - DNA, 25 bp, Homo sapien
ggatttcttggggttgattttgcag

SEQ ID NO: 3994864 - DNA, 25 bp, Homo sapien
caagcgccttacgaaggctcagtga

SEQ ID NO: 3994865 - DNA, 25 bp, Homo sapien
cgaaggctcagtgaagagcgtgctt

SEQ ID NO: 3994866 - DNA, 25 bp, Homo sapien
caatagaggtgagcacaagcgcctt

SEQ ID NO: 3994867 - DNA, 25 bp, Homo sapien
ggagatggtcctttataatgcagtg

SEQ ID NO: 3994868 - DNA, 25 bp, Homo sapien
tctagctgagtgccacgtgctgaca

SEQ ID NO: 3994869 - DNA, 25 bp, Homo sapien
tgtctagctgagtgccacgtgctga

SEQ ID NO: 3994870 - DNA, 25 bp, Homo sapien
ctgagtgccacgtgctgacatcact

SEQ ID NO: 3994871 - DNA, 25 bp, Homo sapien
tctttgtctagctgagtgccacgtg

SEQ ID NO: 3994872 - DNA, 25 bp, Homo sapien
gtaacaccggatttttgcaagactc

SEQ ID NO: 3994873 - DNA, 25 bp, Homo sapien
tgcaagactccctgagtatttctcg

SEQ ID NO: 3994874 - DNA, 25 bp, Homo sapien
cgtggacttgcgaacaaatctgagc

SEQ ID NO: 3994875 - DNA, 25 bp, Homo sapien
tctgagcaagaaaaccacgtaattt

SEQ ID NO: 3994876 - DNA, 25 bp, Homo sapien
ctttgcaactagaaaggtttaagtg

SEQ ID NO: 3994877 - DNA, 25 bp, Homo sapien
gaatgtagtggccaacatgtactca

SEQ ID NO: 3994878 - DNA, 25 bp, Homo sapien
aatgtagtggccaacatgtactcag

SEQ ID NO: 3994879 - DNA, 25 bp, Homo sapien
ggaatgtagtggccaacatgtactc

SEQ ID NO: 3994880 - DNA, 25 bp, Homo sapien
tgaacgtaaccttcgcagggcgtca

SEQ ID NO: 3994881 - DNA, 25 bp, Homo sapien
cgctggagagcaaacacgaacttct

SEQ ID NO: 3994882 - DNA, 25 bp, Homo sapien
cccatactgggcgtgtgcatctgaa

SEQ ID NO: 3994883 - DNA, 25 bp, Homo sapien
gaaacagctggattacgttcctcta

SEQ ID NO: 3994884 - DNA, 25 bp, Homo sapien
tacagaagtcttagtggagagttgg

SEQ ID NO: 3994885 - DNA, 25 bp, Homo sapien
taaggaaaagagcaatacggatgtt

SEQ ID NO: 3994886 - DNA, 25 bp, Homo sapien
gagagttggtactggaatcctggtc

SEQ ID NO: 3994887 - DNA, 25 bp, Homo sapien
tcccactcaggtcaagatacaaaag

SEQ ID NO: 3994888 - DNA, 25 bp, Homo sapien
ctgtgaagtgtatttctgtagatta

SEQ ID NO: 3994889 - DNA, 25 bp, Homo sapien
taccttgaagttcctgacaaattct

SEQ ID NO: 3994890 - DNA, 25 bp, Homo sapien
gccaaaaaatacatggagtctttac

SEQ ID NO: 3994891 - DNA, 25 bp, Homo sapien
ctgttcctaaaacatctgtgaagtg

SEQ ID NO: 3994892 - DNA, 25 bp, Homo sapien
gaatttacacagtttgcttcattgt

SEQ ID NO: 3994893 - DNA, 25 bp, Homo sapien
tatttccagctttaattttcttgag

SEQ ID NO: 3994894 - DNA, 25 bp, Homo sapien
tgaagagtggctggaacttagaaac

SEQ ID NO: 3994895 - DNA, 25 bp, Homo sapien
ttagaaacggttgcctctgctgttc

SEQ ID NO: 3994896 - DNA, 25 bp, Homo sapien
tggtggttgttcaaaactgacgctt

SEQ ID NO: 3994897 - DNA, 25 bp, Homo sapien
tgttcaaaactgacgcttttcctgg

SEQ ID NO: 3994898 - DNA, 25 bp, Homo sapien
gcctggtggttgttcaaaactgacg

SEQ ID NO: 3994899 - DNA, 25 bp, Homo sapien
tggttgttcaaaactgacgcttttc

SEQ ID NO: 3994900 - DNA, 25 bp, Homo sapien
cagttggagtgtgctttgggctgtc

SEQ ID NO: 3994901 - DNA, 25 bp, Homo sapien
ttggagtgtgctttgggctgtccac

SEQ ID NO: 3994902 - DNA, 25 bp, Homo sapien
tccagttggagtgtgctttgggctg

SEQ ID NO: 3994903 - DNA, 25 bp, Homo sapien
agttggagtgtgctttgggctgtcc

SEQ ID NO: 3994904 - DNA, 25 bp, Homo sapien
gtcctcgcctcgcaccacatccagt

SEQ ID NO: 3994905 - DNA, 25 bp, Homo sapien
tgcccatccctcagggtctgagtca

SEQ ID NO: 3994906 - DNA, 25 bp, Homo sapien
tctgagtcaagctaccatgctccat

SEQ ID NO: 3994907 - DNA, 25 bp, Homo sapien
tgctgtcctcgcctcgcaccacatc

SEQ ID NO: 3994908 - DNA, 25 bp, Homo sapien
ttgtccctaaagcaggcggtgctcc

SEQ ID NO: 3994909 - DNA, 25 bp, Homo sapien
ttggagcagggaagatctccagctt

SEQ ID NO: 3994910 - DNA, 25 bp, Homo sapien
gcaggcggtgctcctgtctgcccag

SEQ ID NO: 3994911 - DNA, 25 bp, Homo sapien
tccagcttgtccctaaagcaggcgg

SEQ ID NO: 3994912 - DNA, 25 bp, Homo sapien
ttcattccggtccagcccttataaa

SEQ ID NO: 3994913 - DNA, 25 bp, Homo sapien
gtaaatatcactgttctcacagtgg

SEQ ID NO: 3994914 - DNA, 25 bp, Homo sapien
ttctcacagtggctttcattccggt

SEQ ID NO: 3994915 - DNA, 25 bp, Homo sapien
agtggctttcattccggtccagccc

SEQ ID NO: 3994916 - DNA, 25 bp, Homo sapien
ccgccggcggttcggtggcttctag

SEQ ID NO: 3994917 - DNA, 25 bp, Homo sapien
ctcgtctgtcggtcggcgctggaaa

SEQ ID NO: 3994918 - DNA, 25 bp, Homo sapien
gcgccgcagagtagccgcggaacat

SEQ ID NO: 3994919 - DNA, 25 bp, Homo sapien
agccaagcgcaaacctcgtctgtcg

SEQ ID NO: 3994920 - DNA, 25 bp, Homo sapien
ctgttgatcttgagcgcgaacgcgc

SEQ ID NO: 3994921 - DNA, 25 bp, Homo sapien
gcgcggcgctctgcgctcggcagag

SEQ ID NO: 3994922 - DNA, 25 bp, Homo sapien
gctctgcgctcggcagagtggccat

SEQ ID NO: 3994923 - DNA, 25 bp, Homo sapien
cttgagcgcgaacgcgcggcgctct

SEQ ID NO: 3994924 - DNA, 25 bp, Homo sapien
taaagctcgatatgccctctagaag

SEQ ID NO: 3994925 - DNA, 25 bp, Homo sapien
taaaaatagcgatgccaccaggagc

SEQ ID NO: 3994926 - DNA, 25 bp, Homo sapien
ttaacaaatcggacagccctgtggg

SEQ ID NO: 3994927 - DNA, 25 bp, Homo sapien
cgtttatgagacactccgtggcgcg

SEQ ID NO: 3994928 - DNA, 25 bp, Homo sapien
agccagtgcacccagctctgtttgt

SEQ ID NO: 3994929 - DNA, 25 bp, Homo sapien
gtgcacccagctctgtttgttcctt

SEQ ID NO: 3994930 - DNA, 25 bp, Homo sapien
cagtgcacccagctctgtttgttcc

SEQ ID NO: 3994931 - DNA, 25 bp, Homo sapien
gccagtgcacccagctctgtttgtt

SEQ ID NO: 3994932 - DNA, 25 bp, Homo sapien
tgagccgagatggccccactgtact

SEQ ID NO: 3994933 - DNA, 25 bp, Homo sapien
ctccagcctgggcgacagagcatga

SEQ ID NO: 3994934 - DNA, 25 bp, Homo sapien
ccgagatggccccactgtactccag

SEQ ID NO: 3994935 - DNA, 25 bp, Homo sapien
tactccagcctgggcgacagagcat

SEQ ID NO: 3994936 - DNA, 25 bp, Homo sapien
aggccaactttatcaatttgcttag

SEQ ID NO: 3994937 - DNA, 25 bp, Homo sapien
gagaaactggttctgttgccatcat

SEQ ID NO: 3994938 - DNA, 25 bp, Homo sapien
taatgtcttgtaccctaggccaact

SEQ ID NO: 3994939 - DNA, 25 bp, Homo sapien
cagggatgtgcccacagatgcagag

SEQ ID NO: 3994940 - DNA, 25 bp, Homo sapien
gatcaactagagacggactaggaag

SEQ ID NO: 3994941 - DNA, 25 bp, Homo sapien
catgcagacctgaataggtttggcc

SEQ ID NO: 3994942 - DNA, 25 bp, Homo sapien
tggaactctagggaggaaccatgca

SEQ ID NO: 3994943 - DNA, 25 bp, Homo sapien
caatagggccttcacgagctatggt

SEQ ID NO: 3994944 - DNA, 25 bp, Homo sapien
aggcatcagccagtcttcttcaaaa

SEQ ID NO: 3994945 - DNA, 25 bp, Homo sapien
tggtgaggcatcagccagtcttctt

SEQ ID NO: 3994946 - DNA, 25 bp, Homo sapien
tgaggcatcagccagtcttcttcaa

SEQ ID NO: 3994947 - DNA, 25 bp, Homo sapien
gtccccagaatttggtgaggcatca

SEQ ID NO: 3994948 - DNA, 25 bp, Homo sapien
catgaattcccctggagaaaggcac

SEQ ID NO: 3994949 - DNA, 25 bp, Homo sapien
tcatgaattcccctggagaaaggca

SEQ ID NO: 3994950 - DNA, 25 bp, Homo sapien
ttttcccagtggtctgccctgcccc

SEQ ID NO: 3994951 - DNA, 25 bp, Homo sapien
cttcatgaattcccctggagaaagg

SEQ ID NO: 3994952 - DNA, 25 bp, Homo sapien
tcttggtttgcatctctattctgcc

SEQ ID NO: 3994953 - DNA, 25 bp, Homo sapien
agttttagcatctacatcttggtgc

SEQ ID NO: 3994954 - DNA, 25 bp, Homo sapien
ttcaaagtcccctatcattttgtcc

SEQ ID NO: 3994955 - DNA, 25 bp, Homo sapien
cattttgtccagcaagtttaaagtt

SEQ ID NO: 3994956 - DNA, 25 bp, Homo sapien
tttgctgtcgaaaataccctctcag

SEQ ID NO: 3994957 - DNA, 25 bp, Homo sapien
aaaacactcaggtcattcagaatgc

SEQ ID NO: 3994958 - DNA, 25 bp, Homo sapien
tgtagctcgcatgtgatcctcaata

SEQ ID NO: 3994959 - DNA, 25 bp, Homo sapien
tggattcaacaacaagaccactaag

SEQ ID NO: 3994960 - DNA, 25 bp, Homo sapien
caatgaagtaggcaaggcaacaaac

SEQ ID NO: 3994961 - DNA, 25 bp, Homo sapien
taagcctaacaaatcttgcaggtgg

SEQ ID NO: 3994962 - DNA, 25 bp, Homo sapien
aaggtattccccacaagaagagagc

SEQ ID NO: 3994963 - DNA, 25 bp, Homo sapien
tagtcttatggaggcaaaccttccc

SEQ ID NO: 3994964 - DNA, 25 bp, Homo sapien
ttatatgtcatcatataagtttcct

SEQ ID NO: 3994965 - DNA, 25 bp, Homo sapien
ctctccccagcttttatatgtcatc

SEQ ID NO: 3994966 - DNA, 25 bp, Homo sapien
tctccccagcttttatatgtcatca

SEQ ID NO: 3994967 - DNA, 25 bp, Homo sapien
tatgtcatcatataagtttccttct

SEQ ID NO: 3994968 - DNA, 25 bp, Homo sapien
cttttcagtggcctgttagtggaca

SEQ ID NO: 3994969 - DNA, 25 bp, Homo sapien
ttttcagtggcctgttagtggacat

SEQ ID NO: 3994970 - DNA, 25 bp, Homo sapien
tactggccaaggtttggtgggagag

SEQ ID NO: 3994971 - DNA, 25 bp, Homo sapien
gaggtacttatgctctgtcgatggt

SEQ ID NO: 3994972 - DNA, 25 bp, Homo sapien
tatgctctgtcgatggtactggcca

SEQ ID NO: 3994973 - DNA, 25 bp, Homo sapien
gggaagccagaggtacttatgctct

SEQ ID NO: 3994974 - DNA, 25 bp, Homo sapien
cagagttaggatctggtgactggag

SEQ ID NO: 3994975 - DNA, 25 bp, Homo sapien
actggagaatgtgaggtgatggtag

SEQ ID NO: 3994976 - DNA, 25 bp, Homo sapien
ttaggatctggtgactggagaatgt

SEQ ID NO: 3994977 - DNA, 25 bp, Homo sapien
agttaggatctggtgactggagaat

SEQ ID NO: 3994978 - DNA, 25 bp, Homo sapien
gttacacggcgcgtaaattgttaca

SEQ ID NO: 3994979 - DNA, 25 bp, Homo sapien
gattcacagttacacggcgcgtaaa

SEQ ID NO: 3994980 - DNA, 25 bp, Homo sapien
ctttgaaagattcacagttacacgg

SEQ ID NO: 3994981 - DNA, 25 bp, Homo sapien
cacggcgcgtaaattgttacaggag

SEQ ID NO: 3994982 - DNA, 25 bp, Homo sapien
cctggacaacatggagaaactccgt

SEQ ID NO: 3994983 - DNA, 25 bp, Homo sapien
ttcaagaccagcctggacaacatgg

SEQ ID NO: 3994984 - DNA, 25 bp, Homo sapien
ggcaggcagatcactgaagctcagg

SEQ ID NO: 3994985 - DNA, 25 bp, Homo sapien
caggcagatcactgaagctcaggag

SEQ ID NO: 3994986 - DNA, 25 bp, Homo sapien
gaggactatagtccttacaagggtc

SEQ ID NO: 3994987 - DNA, 25 bp, Homo sapien
gagtcggttcccttggttctgactg

SEQ ID NO: 3994988 - DNA, 25 bp, Homo sapien
ggtgacaggacaacctcagtagctg

SEQ ID NO: 3994989 - DNA, 25 bp, Homo sapien
agaagggacagagtcggttcccttg

SEQ ID NO: 3994990 - DNA, 25 bp, Homo sapien
gcaaaatatgccctacttcctgtct

SEQ ID NO: 3994991 - DNA, 25 bp, Homo sapien
tggcgtaagttagggagtgaggatg

SEQ ID NO: 3994992 - DNA, 25 bp, Homo sapien
gacatgagtggcgtaagttagggag

SEQ ID NO: 3994993 - DNA, 25 bp, Homo sapien
tgccctacttcctgtctgggatttt

SEQ ID NO: 3994994 - DNA, 25 bp, Homo sapien
aatggagatgtggcaggcctcgtcc

SEQ ID NO: 3994995 - DNA, 25 bp, Homo sapien
ggagatgtggcaggcctcgtcccct

SEQ ID NO: 3994996 - DNA, 25 bp, Homo sapien
agatcagagaatggagatgtggcag

SEQ ID NO: 3994997 - DNA, 25 bp, Homo sapien
tcagagaatggagatgtggcaggcc

SEQ ID NO: 3994998 - DNA, 25 bp, Homo sapien
tcaagctggagaggagagacaaagc

SEQ ID NO: 3994999 - DNA, 25 bp, Homo sapien
cagagtaagggcttcaagctggaga

SEQ ID NO: 3995000 - DNA, 25 bp, Homo sapien
taagggcttcaagctggagaggaga

SEQ ID NO: 3995001 - DNA, 25 bp, Homo sapien
ttcaagctggagaggagagacaaag

SEQ ID NO: 3995002 - DNA, 25 bp, Homo sapien
ttttcatcgctttgaaatcacatac

SEQ ID NO: 3995003 - DNA, 25 bp, Homo sapien
ccagtttttcatcgctttgaaatca

SEQ ID NO: 3995004 - DNA, 25 bp, Homo sapien
aaccagtttttcatcgctttgaaat

SEQ ID NO: 3995005 - DNA, 25 bp, Homo sapien
agtttttcatcgctttgaaatcaca

SEQ ID NO: 3995006 - DNA, 25 bp, Homo sapien
aaatgagatcacaaagctttgctga

SEQ ID NO: 3995007 - DNA, 25 bp, Homo sapien
gaatcctgaggagatccaaaatgag

SEQ ID NO: 3995008 - DNA, 25 bp, Homo sapien
taatttctcccgcaaaggctctccg

SEQ ID NO: 3995009 - DNA, 25 bp, Homo sapien
tttctctccttaattgcaacttgat

SEQ ID NO: 3995010 - DNA, 25 bp, Homo sapien
ggcataaaacggagcgactctttgg

SEQ ID NO: 3995011 - DNA, 25 bp, Homo sapien
ctggcataaaacggagcgactcttt

SEQ ID NO: 3995012 - DNA, 25 bp, Homo sapien
ataaaacggagcgactctttggagg

SEQ ID NO: 3995013 - DNA, 25 bp, Homo sapien
gcataaaacggagcgactctttgga

SEQ ID NO: 3995014 - DNA, 25 bp, Homo sapien
ctttgacttagtaagtacttcgctc

SEQ ID NO: 3995015 - DNA, 25 bp, Homo sapien
tcctttgacttagtaagtacttcgc

SEQ ID NO: 3995016 - DNA, 25 bp, Homo sapien
cctttgacttagtaagtacttcgct

SEQ ID NO: 3995017 - DNA, 25 bp, Homo sapien
cagaagtccttcaaagtccactggc

SEQ ID NO: 3995018 - DNA, 25 bp, Homo sapien
actggctccacagggtcataaaact

SEQ ID NO: 3995019 - DNA, 25 bp, Homo sapien
aagtccttcaaagtccactggctcc

SEQ ID NO: 3995020 - DNA, 25 bp, Homo sapien
ccactggctccacagggtcataaaa

SEQ ID NO: 3995021 - DNA, 25 bp, Homo sapien
aagtcctacattcctttggcgtgaa

SEQ ID NO: 3995022 - DNA, 25 bp, Homo sapien
tcgtcatcagtgaagtccccgagct

SEQ ID NO: 3995023 - DNA, 25 bp, Homo sapien
ggcgtgaacaccacgtccaagtcgt

SEQ ID NO: 3995024 - DNA, 25 bp, Homo sapien
agagggctgcaaagtcctacattcc

SEQ ID NO: 3995025 - DNA, 25 bp, Homo sapien
gattagccactcacggatgtaggtc

SEQ ID NO: 3995026 - DNA, 25 bp, Homo sapien
tccggttcacgattagccactcacg

SEQ ID NO: 3995027 - DNA, 25 bp, Homo sapien
tgaacacagtccctgacatgagggt

SEQ ID NO: 3995028 - DNA, 25 bp, Homo sapien
ggatgtaggtctgaacacagtccct

SEQ ID NO: 3995029 - DNA, 25 bp, Homo sapien
gtgcatgtcatcatatccagttaat

SEQ ID NO: 3995030 - DNA, 25 bp, Homo sapien
aatgtttgatctagtattccaaatc

SEQ ID NO: 3995031 - DNA, 25 bp, Homo sapien
ttgtgcatatcctttgacatagaaa

SEQ ID NO: 3995032 - DNA, 25 bp, Homo sapien
ctgcgcccggcataatgtttgatct

SEQ ID NO: 3995033 - DNA, 25 bp, Homo sapien
ctggcaatggagtcaaataaagcca

SEQ ID NO: 3995034 - DNA, 25 bp, Homo sapien
cctggcaatggagtcaaataaagcc

SEQ ID NO: 3995035 - DNA, 25 bp, Homo sapien
tggcaatggagtcaaataaagccaa

SEQ ID NO: 3995036 - DNA, 25 bp, Homo sapien
tgtatgcatgatactgacgtcaccc

SEQ ID NO: 3995037 - DNA, 25 bp, Homo sapien
gaccatggtactcaataggcagttt

SEQ ID NO: 3995038 - DNA, 25 bp, Homo sapien
agtaatccctggtgtctaccgtgtt

SEQ ID NO: 3995039 - DNA, 25 bp, Homo sapien
gacgtcacccacatagtgaccatgg

SEQ ID NO: 3995040 - DNA, 25 bp, Homo sapien
tgaaaatcttttcgagatccagtct

SEQ ID NO: 3995041 - DNA, 25 bp, Homo sapien
tgcactccaaggtttccgactcaaa

SEQ ID NO: 3995042 - DNA, 25 bp, Homo sapien
ctgagcagcgggttcactgcactcc

SEQ ID NO: 3995043 - DNA, 25 bp, Homo sapien
gactcaaacgtctgtttcggaagcg

SEQ ID NO: 3995044 - DNA, 25 bp, Homo sapien
ctggtaaccatgtttgttgacagga

SEQ ID NO: 3995045 - DNA, 25 bp, Homo sapien
ggtaaccatgtttgttgacaggaaa

SEQ ID NO: 3995046 - DNA, 25 bp, Homo sapien
aaccatgtttgttgacaggaaatac

SEQ ID NO: 3995047 - DNA, 25 bp, Homo sapien
gtaaccatgtttgttgacaggaaat

SEQ ID NO: 3995048 - DNA, 25 bp, Homo sapien
tgggagtgggcaacacttttctacg

SEQ ID NO: 3995049 - DNA, 25 bp, Homo sapien
ccttaaatcagtcacaaagtggatg

SEQ ID NO: 3995050 - DNA, 25 bp, Homo sapien
aattgggaactgcatgctttgaacc

SEQ ID NO: 3995051 - DNA, 25 bp, Homo sapien
tgtgtccacttttggctgcggtgtg

SEQ ID NO: 3995052 - DNA, 25 bp, Homo sapien
gaccctgtcttaatctccactcaga

SEQ ID NO: 3995053 - DNA, 25 bp, Homo sapien
aataaatagataggagactgcactg

SEQ ID NO: 3995054 - DNA, 25 bp, Homo sapien
gatgacttcttctgcaatccagcct

SEQ ID NO: 3995055 - DNA, 25 bp, Homo sapien
gaaaccctggctcattaattaacta

SEQ ID NO: 3995056 - DNA, 25 bp, Homo sapien
aagagctcggcctgcctattggtcc

SEQ ID NO: 3995057 - DNA, 25 bp, Homo sapien
tctagccgcttgtcaggctgcaggc

SEQ ID NO: 3995058 - DNA, 25 bp, Homo sapien
cctcggcactcacttgctgcaggag

SEQ ID NO: 3995059 - DNA, 25 bp, Homo sapien
tcgcacagcacgtttaagtggcggg

SEQ ID NO: 3995060 - DNA, 25 bp, Homo sapien
caactgaactttcaataccatttgg

SEQ ID NO: 3995061 - DNA, 25 bp, Homo sapien
tctgttctggcaagacccagaagtg

SEQ ID NO: 3995062 - DNA, 25 bp, Homo sapien
aagtgtagataacctcacgcagagg

SEQ ID NO: 3995063 - DNA, 25 bp, Homo sapien
catttggacagcagagatatagcag

SEQ ID NO: 3995064 - DNA, 25 bp, Homo sapien
tattatctcagcagaagcgtgcttc

SEQ ID NO: 3995065 - DNA, 25 bp, Homo sapien
taaaacgtattcctcccgcctgaga

SEQ ID NO: 3995066 - DNA, 25 bp, Homo sapien
ggagtaaattcaggaccccaatcat

SEQ ID NO: 3995067 - DNA, 25 bp, Homo sapien
tattaactctggtcactgtgcagtg

SEQ ID NO: 3995068 - DNA, 25 bp, Homo sapien
gtctcactggacatattctctgcat

SEQ ID NO: 3995069 - DNA, 25 bp, Homo sapien
tctggcatccactttgggtccctct

SEQ ID NO: 3995070 - DNA, 25 bp, Homo sapien
tctgttcagatggaacattctcccc

SEQ ID NO: 3995071 - DNA, 25 bp, Homo sapien
cactgacaagcaaacgtctcactgg

SEQ ID NO: 3995072 - DNA, 25 bp, Homo sapien
ggtactggacgtatttccacagcat

SEQ ID NO: 3995073 - DNA, 25 bp, Homo sapien
cagcaacttgaccaatattctgttg

SEQ ID NO: 3995074 - DNA, 25 bp, Homo sapien
ttcaaggtcagcaacttgaccaata

SEQ ID NO: 3995075 - DNA, 25 bp, Homo sapien
ggtgttccttgggacattctggtac

SEQ ID NO: 3995076 - DNA, 25 bp, Homo sapien
ggtgtgtccctcagacaatagcgaa

SEQ ID NO: 3995077 - DNA, 25 bp, Homo sapien
ccagcgggaggagactataatatca

SEQ ID NO: 3995078 - DNA, 25 bp, Homo sapien
gaaggcttcctaaacaatgcagagg

SEQ ID NO: 3995079 - DNA, 25 bp, Homo sapien
tctagaaagcttggctatgagcacc

SEQ ID NO: 3995080 - DNA, 25 bp, Homo sapien
tccgtgagtgttcggtcaggttttg

SEQ ID NO: 3995081 - DNA, 25 bp, Homo sapien
agtgttcggtcaggttttgagccca

SEQ ID NO: 3995082 - DNA, 25 bp, Homo sapien
ctgggctttttccgtgagtgttcgg

SEQ ID NO: 3995083 - DNA, 25 bp, Homo sapien
ggctttttccgtgagtgttcggtca

SEQ ID NO: 3995084 - DNA, 25 bp, Homo sapien
tccgtgagtgttcggtcaggttttg

SEQ ID NO: 3995085 - DNA, 25 bp, Homo sapien
agtgttcggtcaggttttgagccca

SEQ ID NO: 3995086 - DNA, 25 bp, Homo sapien
ctgggctttttccgtgagtgttcgg

SEQ ID NO: 3995087 - DNA, 25 bp, Homo sapien
ctttttccgtgagtgttcggtcagg

SEQ ID NO: 3995088 - DNA, 25 bp, Homo sapien
cagggaataaggaacttgccaaagt

SEQ ID NO: 3995089 - DNA, 25 bp, Homo sapien
cacagttagggactggcacggtcag

SEQ ID NO: 3995090 - DNA, 25 bp, Homo sapien
gagcccagccatctctggtcacaga

SEQ ID NO: 3995091 - DNA, 25 bp, Homo sapien
tacacaactacagcgtaatgcagat

SEQ ID NO: 3995092 - DNA, 25 bp, Homo sapien
caaagggcctgaatattgctgtgat

SEQ ID NO: 3995093 - DNA, 25 bp, Homo sapien
tgctgtgatatacttaggttggtac

SEQ ID NO: 3995094 - DNA, 25 bp, Homo sapien
ttaattgtttactccctactacaca

SEQ ID NO: 3995095 - DNA, 25 bp, Homo sapien
tggcatgctcaatctatatttaatt

SEQ ID NO: 3995096 - DNA, 25 bp, Homo sapien
gtcaataaagtcatgttttgtctcc

SEQ ID NO: 3995097 - DNA, 25 bp, Homo sapien
tgtctccaggtatgtgtgagaggat

SEQ ID NO: 3995098 - DNA, 25 bp, Homo sapien
atgttttgtctccaggtatgtgtga

SEQ ID NO: 3995099 - DNA, 25 bp, Homo sapien
ggtatgtgtgagaggatgtcctcat

SEQ ID NO: 3995100 - DNA, 25 bp, Homo sapien
agggccccagtccaccattacctca

SEQ ID NO: 3995101 - DNA, 25 bp, Homo sapien
cccagtccaccattacctcagacat

SEQ ID NO: 3995102 - DNA, 25 bp, Homo sapien
caggaaaagggccccagtccaccat

SEQ ID NO: 3995103 - DNA, 25 bp, Homo sapien
ggccccagtccaccattacctcaga

SEQ ID NO: 3995104 - DNA, 25 bp, Homo sapien
tttctcagcttgatgtcccatggct

SEQ ID NO: 3995105 - DNA, 25 bp, Homo sapien
gcacatggaacactggtgaaggtct

SEQ ID NO: 3995106 - DNA, 25 bp, Homo sapien
tcagcttgatgtcccatggctttgg

SEQ ID NO: 3995107 - DNA, 25 bp, Homo sapien
catggaacactggtgaaggtcttcc

SEQ ID NO: 3995108 - DNA, 25 bp, Homo sapien
taacatcgtagagggcaatgctggc

SEQ ID NO: 3995109 - DNA, 25 bp, Homo sapien
tctttaacatcgtagagggcaatgc

SEQ ID NO: 3995110 - DNA, 25 bp, Homo sapien
tggcaaacaggggctcaatttcaat

SEQ ID NO: 3995111 - DNA, 25 bp, Homo sapien
tcctttctttaacatcgtagagggc

SEQ ID NO: 3995112 - DNA, 25 bp, Homo sapien
tgagaagactgcagatctcgcctga

SEQ ID NO: 3995113 - DNA, 25 bp, Homo sapien
cactgaaggcgtgtgagctcgcaga

SEQ ID NO: 3995114 - DNA, 25 bp, Homo sapien
ctcgcagaaatcctttgaactggtc

SEQ ID NO: 3995115 - DNA, 25 bp, Homo sapien
ttgactaccaggtagatgtctgagg

SEQ ID NO: 3995116 - DNA, 25 bp, Homo sapien
gtgtagggctctgcacagtctccaa

SEQ ID NO: 3995117 - DNA, 25 bp, Homo sapien
tttctttgataaccgtgtagggctc

SEQ ID NO: 3995118 - DNA, 25 bp, Homo sapien
catcactttctttgataaccgtgta

SEQ ID NO: 3995119 - DNA, 25 bp, Homo sapien
agtctccaatctctccctgctgcag

SEQ ID NO: 3995120 - DNA, 25 bp, Homo sapien
taagcttatgggtgcccaggcaaag

SEQ ID NO: 3995121 - DNA, 25 bp, Homo sapien
caaacgctggcagaaggattcagct

SEQ ID NO: 3995122 - DNA, 25 bp, Homo sapien
ccctctcaagggtggagacattgaa

SEQ ID NO: 3995123 - DNA, 25 bp, Homo sapien
ccaggcaaagggcatccggtatttc

SEQ ID NO: 3995124 - DNA, 25 bp, Homo sapien
caaccacagagtccacatcagttac

SEQ ID NO: 3995125 - DNA, 25 bp, Homo sapien
gaaaaagctgctaacgctcagagtg

SEQ ID NO: 3995126 - DNA, 25 bp, Homo sapien
gattgggccaatgtcctccgttcac

SEQ ID NO: 3995127 - DNA, 25 bp, Homo sapien
caaggagagggctctttcagaaagc

SEQ ID NO: 3995128 - DNA, 25 bp, Homo sapien
tgaagttggatccaaccccattttc

SEQ ID NO: 3995129 - DNA, 25 bp, Homo sapien
tgatcttttgtagtcagctaaaaac

SEQ ID NO: 3995130 - DNA, 25 bp, Homo sapien
tcttcatcgctaaggcgatctcctt

SEQ ID NO: 3995131 - DNA, 25 bp, Homo sapien
aacttgaataagtcttcatcgctaa

SEQ ID NO: 3995132 - DNA, 25 bp, Homo sapien
gtagtcagctaaaaacttgaataag

SEQ ID NO: 3995133 - DNA, 25 bp, Homo sapien
gggtttcacgggcagcatttcagga

SEQ ID NO: 3995134 - DNA, 25 bp, Homo sapien
caaaatctctttgtgcgggcgtgtc

SEQ ID NO: 3995135 - DNA, 25 bp, Homo sapien
cagtgtgagggacatatacttctcg

SEQ ID NO: 3995136 - DNA, 25 bp, Homo sapien
caattgatgatctctggagctgtag

SEQ ID NO: 3995137 - DNA, 25 bp, Homo sapien
cccagcccgagcctgtgtttcttac

SEQ ID NO: 3995138 - DNA, 25 bp, Homo sapien
gcccagcccgagcctgtgtttctta

SEQ ID NO: 3995139 - DNA, 25 bp, Homo sapien
aagttatgggattatggtgtaagcc

SEQ ID NO: 3995140 - DNA, 25 bp, Homo sapien
tacatctgaagtaaccctttcttgt

SEQ ID NO: 3995141 - DNA, 25 bp, Homo sapien
tcctaaactacaattacatctgaag

SEQ ID NO: 3995142 - DNA, 25 bp, Homo sapien
catttccctgaaacttaggaagtag

SEQ ID NO: 3995143 - DNA, 25 bp, Homo sapien
tggcaatcacctacggttacataaa

SEQ ID NO: 3995144 - DNA, 25 bp, Homo sapien
tttgcctgagtaaaagacgatctgg

SEQ ID NO: 3995145 - DNA, 25 bp, Homo sapien
cgatctggaagtataagacgattcc

SEQ ID NO: 3995146 - DNA, 25 bp, Homo sapien
gacacagcatctcatattttgcctg

SEQ ID NO: 3995147 - DNA, 25 bp, Homo sapien
tataagacgattcccgacttctgct

SEQ ID NO: 3995148 - DNA, 25 bp, Homo sapien
gaaacgctgctaaacttgtctttga

SEQ ID NO: 3995149 - DNA, 25 bp, Homo sapien
ttaactgacacttccagagaacaga

SEQ ID NO: 3995150 - DNA, 25 bp, Homo sapien
gattgacagaagtttagaaacgctg

SEQ ID NO: 3995151 - DNA, 25 bp, Homo sapien
ggataacgaaactggtctgtgtcct

SEQ ID NO: 3995152 - DNA, 25 bp, Homo sapien
gaactccaagtttgcgatgagccga

SEQ ID NO: 3995153 - DNA, 25 bp, Homo sapien
catgttttcaacaatgggagttagg

SEQ ID NO: 3995154 - DNA, 25 bp, Homo sapien
attcatccaagtctgagccaaagag

SEQ ID NO: 3995155 - DNA, 25 bp, Homo sapien
taattttcatgtccctactctgaga

SEQ ID NO: 3995156 - DNA, 25 bp, Homo sapien
ccccattaaggttgctatctacgtt

SEQ ID NO: 3995157 - DNA, 25 bp, Homo sapien
tgactggtcccccttcagtaattcc

SEQ ID NO: 3995158 - DNA, 25 bp, Homo sapien
tcctccccattaaggttgctatcta

SEQ ID NO: 3995159 - DNA, 25 bp, Homo sapien
gttgctgcctgacaggctgactggt

SEQ ID NO: 3995160 - DNA, 25 bp, Homo sapien
catagatcagcatggttgcctgtgg

SEQ ID NO: 3995161 - DNA, 25 bp, Homo sapien
gagactgggatttgccttccaagac

SEQ ID NO: 3995162 - DNA, 25 bp, Homo sapien
cacagggtgacgagtattgccaggc

SEQ ID NO: 3995163 - DNA, 25 bp, Homo sapien
caaagatctcaaggtggttgcagga

SEQ ID NO: 3995164 - DNA, 25 bp, Homo sapien
tcgagactagcctagcctggggaac

SEQ ID NO: 3995165 - DNA, 25 bp, Homo sapien
gttcgagactagcctagcctgggga

SEQ ID NO: 3995166 - DNA, 25 bp, Homo sapien
accccatctgtacaacagaattttt

SEQ ID NO: 3995167 - DNA, 25 bp, Homo sapien
agaccccatctgtacaacagaattt

SEQ ID NO: 3995168 - DNA, 25 bp, Homo sapien
aacttcaaatgcctactaatgtcag

SEQ ID NO: 3995169 - DNA, 25 bp, Homo sapien
taaggtacttatgcaaggaaaacag

SEQ ID NO: 3995170 - DNA, 25 bp, Homo sapien
tagactgatcccatcagagtgaact

SEQ ID NO: 3995171 - DNA, 25 bp, Homo sapien
ggcgctttttactctctatagcaat

SEQ ID NO: 3995172 - DNA, 25 bp, Homo sapien
gtgggcttccagtgacaaaggtgat

SEQ ID NO: 3995173 - DNA, 25 bp, Homo sapien
caagtgggcttccagtgacaaaggt

SEQ ID NO: 3995174 - DNA, 25 bp, Homo sapien
aaggcaagtgggcttccagtgacaa

SEQ ID NO: 3995175 - DNA, 25 bp, Homo sapien
ctttaaggcaagtgggcttccagtg

SEQ ID NO: 3995176 - DNA, 25 bp, Homo sapien
agagaggagcagctcgacaagagga

SEQ ID NO: 3995177 - DNA, 25 bp, Homo sapien
tgaaggcccctatcagctggctgct

SEQ ID NO: 3995178 - DNA, 25 bp, Homo sapien
gctgagcttctaggtcagccagcag

SEQ ID NO: 3995179 - DNA, 25 bp, Homo sapien
cagctcgacaagaggagtgaaggcc

SEQ ID NO: 3995180 - DNA, 25 bp, Homo sapien
gcaacagctgaaacctggaagactt

SEQ ID NO: 3995181 - DNA, 25 bp, Homo sapien
aacagctgaaacctggaagacttct

SEQ ID NO: 3995182 - DNA, 25 bp, Homo sapien
ttaatgagcaacagctgaaacctgg

SEQ ID NO: 3995183 - DNA, 25 bp, Homo sapien
aatgagcaacagctgaaacctggaa

SEQ ID NO: 3995184 - DNA, 25 bp, Homo sapien
gaacacacaggagccgttacgttgg

SEQ ID NO: 3995185 - DNA, 25 bp, Homo sapien
catgataaacgagccacagagcagg

SEQ ID NO: 3995186 - DNA, 25 bp, Homo sapien
ccctgatgcaggtcggtaagactga

SEQ ID NO: 3995187 - DNA, 25 bp, Homo sapien
caggccatgtcacaatgaagggatc

SEQ ID NO: 3995188 - DNA, 25 bp, Homo sapien
taaacaggttactgtgcactgagaa

SEQ ID NO: 3995189 - DNA, 25 bp, Homo sapien
caaggcaaagcgagataaacaggtt

SEQ ID NO: 3995190 - DNA, 25 bp, Homo sapien
agccctagtgctctgcaaagtgtta

SEQ ID NO: 3995191 - DNA, 25 bp, Homo sapien
cactgagaatgcctcagaaggagaa

SEQ ID NO: 3995192 - DNA, 25 bp, Homo sapien
ttttcttcctaatctttatgtaata

SEQ ID NO: 3995193 - DNA, 25 bp, Homo sapien
tcctaatctttatgtaatagtttcc

SEQ ID NO: 3995194 - DNA, 25 bp, Homo sapien
atgtaatagtttccttttcttactg

SEQ ID NO: 3995195 - DNA, 25 bp, Homo sapien
aatagtttccttttcttactggcat

SEQ ID NO: 3995196 - DNA, 25 bp, Homo sapien
cgggctgatgctagtttgtttacaa

SEQ ID NO: 3995197 - DNA, 25 bp, Homo sapien
tttattgtaatgttccgggctgatg

SEQ ID NO: 3995198 - DNA, 25 bp, Homo sapien
catcttctccacacataaactggat

SEQ ID NO: 3995199 - DNA, 25 bp, Homo sapien
ggcatcgcattgctagcatcttctc

SEQ ID NO: 3995200 - DNA, 25 bp, Homo sapien
gcctggaatagacggactttgtaca

SEQ ID NO: 3995201 - DNA, 25 bp, Homo sapien
tgtacactgatgagtcccggacttg

SEQ ID NO: 3995202 - DNA, 25 bp, Homo sapien
agaagcccttgcacatgctgagcag

SEQ ID NO: 3995203 - DNA, 25 bp, Homo sapien
tgctgagcagtattggcctggaata

SEQ ID NO: 3995204 - DNA, 25 bp, Homo sapien
gaacaaagatccactcctagaaggt

SEQ ID NO: 3995205 - DNA, 25 bp, Homo sapien
cctatgggcagtatggaaagacttt

SEQ ID NO: 3995206 - DNA, 25 bp, Homo sapien
caaacatggcgcacgtgttgagcca

SEQ ID NO: 3995207 - DNA, 25 bp, Homo sapien
acagtttgtgcatggaagacactca

SEQ ID NO: 3995208 - DNA, 25 bp, Homo sapien
accagaacccatggctcagtgaatg

SEQ ID NO: 3995209 - DNA, 25 bp, Homo sapien
aagaggaccccaccgctgtcttaag

SEQ ID NO: 3995210 - DNA, 25 bp, Homo sapien
acaagcatatctggcactcctggca

SEQ ID NO: 3995211 - DNA, 25 bp, Homo sapien
tgaagaacagactggactttagccc

SEQ ID NO: 3995212 - DNA, 25 bp, Homo sapien
caaaggaactggctatgaagggtga

SEQ ID NO: 3995213 - DNA, 25 bp, Homo sapien
tacaattaagagtgctgggttggcc

SEQ ID NO: 3995214 - DNA, 25 bp, Homo sapien
tagaggtctatccaacaggccaaag

SEQ ID NO: 3995215 - DNA, 25 bp, Homo sapien
aattgactatcatcaggccaacagg

SEQ ID NO: 3995216 - DNA, 25 bp, Homo sapien
gctgtgtacacttcctgcagaaatt

SEQ ID NO: 3995217 - DNA, 25 bp, Homo sapien
caggcccgctggattttccaaagat

SEQ ID NO: 3995218 - DNA, 25 bp, Homo sapien
tatggtatgtaacagctgtgtacac

SEQ ID NO: 3995219 - DNA, 25 bp, Homo sapien
tgcagaaattcaggcccgctggatt

SEQ ID NO: 3995220 - DNA, 25 bp, Homo sapien
gaggtggtgatttactgtgagctta

SEQ ID NO: 3995221 - DNA, 25 bp, Homo sapien
cttagcggggagcttaattttcact

SEQ ID NO: 3995222 - DNA, 25 bp, Homo sapien
tggtgatttactgtgagcttagcgg

SEQ ID NO: 3995223 - DNA, 25 bp, Homo sapien
agcttagcggggagcttaattttca

SEQ ID NO: 3995224 - DNA, 25 bp, Homo sapien
caggagagtttccacggaggctcct

SEQ ID NO: 3995225 - DNA, 25 bp, Homo sapien
aggagagtttccacggaggctcctt

SEQ ID NO: 3995226 - DNA, 25 bp, Homo sapien
ccaggagagtttccacggaggctcc

SEQ ID NO: 3995227 - DNA, 25 bp, Homo sapien
ggcaactgggagacagtaggatcca

SEQ ID NO: 3995228 - DNA, 25 bp, Homo sapien
gaagacgttcatttaagagaattgg

SEQ ID NO: 3995229 - DNA, 25 bp, Homo sapien
tccaaggcaactgggagacagtagg

SEQ ID NO: 3995230 - DNA, 25 bp, Homo sapien
ctcagcagaatgcatggagtagttg

SEQ ID NO: 3995231 - DNA, 25 bp, Homo sapien
taaatactcccttatgtccttcagc

SEQ ID NO: 3995232 - DNA, 25 bp, Homo sapien
gaagaaacagcttgcacttcaatat

SEQ ID NO: 3995233 - DNA, 25 bp, Homo sapien
tgggaggattctgtaatgggacttt

SEQ ID NO: 3995234 - DNA, 25 bp, Homo sapien
ttcagcccacttaatgggaggattc

SEQ ID NO: 3995235 - DNA, 25 bp, Homo sapien
acagctggaagagcttgtccagcac

SEQ ID NO: 3995236 - DNA, 25 bp, Homo sapien
ttttctgatccagcacgcggatggg

SEQ ID NO: 3995237 - DNA, 25 bp, Homo sapien
gcgccatctcgctgattttctgatc

SEQ ID NO: 3995238 - DNA, 25 bp, Homo sapien
tgtctggccagcgatgaccatgggc

SEQ ID NO: 3995239 - DNA, 25 bp, Homo sapien
gactcgaaggcaaactgggagaagt

SEQ ID NO: 3995240 - DNA, 25 bp, Homo sapien
ttgcacctctggcaggcggaagacg

SEQ ID NO: 3995241 - DNA, 25 bp, Homo sapien
tgtgcagactgttggcgatggccac

SEQ ID NO: 3995242 - DNA, 25 bp, Homo sapien
acgtagtgcacgtaggaagccagca

SEQ ID NO: 3995243 - DNA, 25 bp, Homo sapien
tagagtgctggggttgcagatgtga

SEQ ID NO: 3995244 - DNA, 25 bp, Homo sapien
gtgctggggttgcagatgtgagccc

SEQ ID NO: 3995245 - DNA, 25 bp, Homo sapien
gagtgctggggttgcagatgtgagc

SEQ ID NO: 3995246 - DNA, 25 bp, Homo sapien
ctagagtgctggggttgcagatgtg

SEQ ID NO: 3995247 - DNA, 25 bp, Homo sapien
tgagccactgctccaagcgatcctg

SEQ ID NO: 3995248 - DNA, 25 bp, Homo sapien
cactgctccaagcgatcctgccatc

SEQ ID NO: 3995249 - DNA, 25 bp, Homo sapien
gccactgctccaagcgatcctgcca

SEQ ID NO: 3995250 - DNA, 25 bp, Homo sapien
actgctccaagcgatcctgccatct

SEQ ID NO: 3995251 - DNA, 25 bp, Homo sapien
taaattagcaagtgggtaaagacca

SEQ ID NO: 3995252 - DNA, 25 bp, Homo sapien
tgtattgtcctgaaaacgaaaatgg

SEQ ID NO: 3995253 - DNA, 25 bp, Homo sapien
ccagtgagggattatcaaatgggca

SEQ ID NO: 3995254 - DNA, 25 bp, Homo sapien
tagaatcgtaggcatcagtcaccac

SEQ ID NO: 3995255 - DNA, 25 bp, Homo sapien
tgtgtccccgcgaggtctgggttac

SEQ ID NO: 3995256 - DNA, 25 bp, Homo sapien
acttcctcgtctgctgcggagtgtg

SEQ ID NO: 3995257 - DNA, 25 bp, Homo sapien
cagcagctgatgtgcggccatacgt

SEQ ID NO: 3995258 - DNA, 25 bp, Homo sapien
ccatacgtgtggtagctccgagggt

SEQ ID NO: 3995259 - DNA, 25 bp, Homo sapien
agacattcggctgcagttgcgatcg

SEQ ID NO: 3995260 - DNA, 25 bp, Homo sapien
caggtgaacttggagcatcactact

SEQ ID NO: 3995261 - DNA, 25 bp, Homo sapien
caatagtaagacattcggctgcagt

SEQ ID NO: 3995262 - DNA, 25 bp, Homo sapien
cactactgccagagcaatagtaaga

SEQ ID NO: 3995263 - DNA, 25 bp, Homo sapien
gctactataatggtgagattcttga

SEQ ID NO: 3995264 - DNA, 25 bp, Homo sapien
tttacattttaatacaggtcttcaa

SEQ ID NO: 3995265 - DNA, 25 bp, Homo sapien
tcttgagtgcctagaagagaggaaa

SEQ ID NO: 3995266 - DNA, 25 bp, Homo sapien
cattaaaaacttaagtagctactat

SEQ ID NO: 3995267 - DNA, 25 bp, Homo sapien
accaccatctgaagggcaagctcct

SEQ ID NO: 3995268 - DNA, 25 bp, Homo sapien
ggtgctgaccaccatctgaagggca

SEQ ID NO: 3995269 - DNA, 25 bp, Homo sapien
tgaccaccatctgaagggcaagctc

SEQ ID NO: 3995270 - DNA, 25 bp, Homo sapien
cattccggtgctgaccaccatctga

SEQ ID NO: 3995271 - DNA, 25 bp, Homo sapien
ctcaaagaagaaccaggcatacttg

SEQ ID NO: 3995272 - DNA, 25 bp, Homo sapien
gaagctcaaagaagaaccaggcata

SEQ ID NO: 3995273 - DNA, 25 bp, Homo sapien
agctcaaagaagaaccaggcatact

SEQ ID NO: 3995274 - DNA, 25 bp, Homo sapien
caaagaagaaccaggcatacttgaa

SEQ ID NO: 3995275 - DNA, 25 bp, Homo sapien
tgaaactacagtaaggagaacgtgg

SEQ ID NO: 3995276 - DNA, 25 bp, Homo sapien
gtgttctcaactgcctacatcctgg

SEQ ID NO: 3995277 - DNA, 25 bp, Homo sapien
agtttcagtgtttctcgagggagca

SEQ ID NO: 3995278 - DNA, 25 bp, Homo sapien
actatttagaacattgcctccaggg

SEQ ID NO: 3995279 - DNA, 25 bp, Homo sapien
catgaaacggtcagaaaaacgagtc

SEQ ID NO: 3995280 - DNA, 25 bp, Homo sapien
gaggtgaccacattaacaatagtag

SEQ ID NO: 3995281 - DNA, 25 bp, Homo sapien
aagggctgcaatttccgaggtgacc

SEQ ID NO: 3995282 - DNA, 25 bp, Homo sapien
tgttatgtacgtgctgggccatgct

SEQ ID NO: 3995283 - DNA, 25 bp, Homo sapien
aacccctggcctcatgtgtgtaatt

SEQ ID NO: 3995284 - DNA, 25 bp, Homo sapien
aagtaatatatgttccaggtaaaca

SEQ ID NO: 3995285 - DNA, 25 bp, Homo sapien
catactgcgtttaactgtcattaca

SEQ ID NO: 3995286 - DNA, 25 bp, Homo sapien
agggtccagtccagtataacatact

SEQ ID NO: 3995287 - DNA, 25 bp, Homo sapien
tcatttaaaccacagtccatattgc

SEQ ID NO: 3995288 - DNA, 25 bp, Homo sapien
ctgatatgatcatttaaaccacagt

SEQ ID NO: 3995289 - DNA, 25 bp, Homo sapien
gatatgatcatttaaaccacagtcc

SEQ ID NO: 3995290 - DNA, 25 bp, Homo sapien
atttaaaccacagtccatattgcaa

SEQ ID NO: 3995291 - DNA, 25 bp, Homo sapien
gaaccatttgagaatgggttgcaaa

SEQ ID NO: 3995292 - DNA, 25 bp, Homo sapien
ctactgtataccctttaacgaagct

SEQ ID NO: 3995293 - DNA, 25 bp, Homo sapien
cacttcaaggtgtatttcctaagag

SEQ ID NO: 3995294 - DNA, 25 bp, Homo sapien
taacgaagcttatcaatacttgaca

SEQ ID NO: 3995295 - DNA, 25 bp, Homo sapien
ttatttctcagtgctcctgtttatg

SEQ ID NO: 3995296 - DNA, 25 bp, Homo sapien
ttgtattatttctcagtgctcctgt

SEQ ID NO: 3995297 - DNA, 25 bp, Homo sapien
ttctcagtgctcctgtttatgaggg

SEQ ID NO: 3995298 - DNA, 25 bp, Homo sapien
tttctcagtgctcctgtttatgagg

SEQ ID NO: 3995299 - DNA, 25 bp, Homo sapien
gctgcaataatgtctgatgaggtta

SEQ ID NO: 3995300 - DNA, 25 bp, Homo sapien
agaaggtcatacaagaagaaagcca

SEQ ID NO: 3995301 - DNA, 25 bp, Homo sapien
gatgttcatcttttccgcctgttca

SEQ ID NO: 3995302 - DNA, 25 bp, Homo sapien
gttaaacacaaagccccgatccatg

SEQ ID NO: 3995303 - DNA, 25 bp, Homo sapien
tgactaaccacagagaacgtggtgg

SEQ ID NO: 3995304 - DNA, 25 bp, Homo sapien
tcttcactgtcgactggtgctgatc

SEQ ID NO: 3995305 - DNA, 25 bp, Homo sapien
tcttatgtaaccctgtccaagtgct

SEQ ID NO: 3995306 - DNA, 25 bp, Homo sapien
cttgcagatacagggccctaagctg

SEQ ID NO: 3995307 - DNA, 25 bp, Homo sapien
ggaactctagcctcatggaaatgag

SEQ ID NO: 3995308 - DNA, 25 bp, Homo sapien
gattgaggtaatgctcatggctaca

SEQ ID NO: 3995309 - DNA, 25 bp, Homo sapien
tacagaggattctcaggaactctag

SEQ ID NO: 3995310 - DNA, 25 bp, Homo sapien
ggaaggttactgagcttggctgaca

SEQ ID NO: 3995311 - DNA, 25 bp, Homo sapien
gcctcaagtattccactccctttgg

SEQ ID NO: 3995312 - DNA, 25 bp, Homo sapien
tcaagtattccactccctttggcct

SEQ ID NO: 3995313 - DNA, 25 bp, Homo sapien
actccctttggcctccgaagatgct

SEQ ID NO: 3995314 - DNA, 25 bp, Homo sapien
gtattccactccctttggcctccga

SEQ ID NO: 3995315 - DNA, 25 bp, Homo sapien
aagaggagcccggtgaggaagtgct

SEQ ID NO: 3995316 - DNA, 25 bp, Homo sapien
ctgctggcggtactcggaagtcaga

SEQ ID NO: 3995317 - DNA, 25 bp, Homo sapien
gaagtcagatcgaacatgctggcga

SEQ ID NO: 3995318 - DNA, 25 bp, Homo sapien
cttctggtcctggaagctggagcag

SEQ ID NO: 3995319 - DNA, 25 bp, Homo sapien
ctgcctgtgttctaaccctgggtct

SEQ ID NO: 3995320 - DNA, 25 bp, Homo sapien
ggaaaaccaagcaatataggataga

SEQ ID NO: 3995321 - DNA, 25 bp, Homo sapien
ggatagaactacatagaatccagaa

SEQ ID NO: 3995322 - DNA, 25 bp, Homo sapien
actgcctgtgttctaaccctgggtc

SEQ ID NO: 3995323 - DNA, 25 bp, Homo sapien
ctgcctgtgttctaaccctggaaaa

SEQ ID NO: 3995324 - DNA, 25 bp, Homo sapien
taaccctggaaaaccaagcaataca

SEQ ID NO: 3995325 - DNA, 25 bp, Homo sapien
agactgcctgtgttctaaccctgga

SEQ ID NO: 3995326 - DNA, 25 bp, Homo sapien
aaccctggaaaaccaagcaatacag

SEQ ID NO: 3995327 - DNA, 25 bp, Homo sapien
tgttggcacaacacaggaatcaaga

SEQ ID NO: 3995328 - DNA, 25 bp, Homo sapien
gttggcacaacacaggaatcaagag

SEQ ID NO: 3995329 - DNA, 25 bp, Homo sapien
ctgttggcacaacacaggaatcaag

SEQ ID NO: 3995330 - DNA, 25 bp, Homo sapien
tctggtttgacacagcgtgggtcca

SEQ ID NO: 3995331 - DNA, 25 bp, Homo sapien
caaaatgatgccaactaaaggtagg

SEQ ID NO: 3995332 - DNA, 25 bp, Homo sapien
taaagggcggcgattttgaccttca

SEQ ID NO: 3995333 - DNA, 25 bp, Homo sapien
tccaggtcgtgagaacttagcaggc

SEQ ID NO: 3995334 - DNA, 25 bp, Homo sapien
tttgtgaagaattgctcatatgaac

SEQ ID NO: 3995335 - DNA, 25 bp, Homo sapien
tatcagcactggaacgaatgacaga

SEQ ID NO: 3995336 - DNA, 25 bp, Homo sapien
cagtgttaaagaggtttggagacca

SEQ ID NO: 3995337 - DNA, 25 bp, Homo sapien
atgacagagatctcattcggatggg

SEQ ID NO: 3995338 - DNA, 25 bp, Homo sapien
caaggtgttagagcacgatctccaa

SEQ ID NO: 3995339 - DNA, 25 bp, Homo sapien
gatctccaaaggcagtaatcttgtt

SEQ ID NO: 3995340 - DNA, 25 bp, Homo sapien
tagtcacttagtgccaagggcaata

SEQ ID NO: 3995341 - DNA, 25 bp, Homo sapien
caattagttgggttcatttgagacc

SEQ ID NO: 3995342 - DNA, 25 bp, Homo sapien
gccactggtgcggtatctgcgagta

SEQ ID NO: 3995343 - DNA, 25 bp, Homo sapien
gaaattattccctgctatggccaga

SEQ ID NO: 3995344 - DNA, 25 bp, Homo sapien
cacattctggttaatggcaccggct

SEQ ID NO: 3995345 - DNA, 25 bp, Homo sapien
tcttgttcttcatccgagccactgg

SEQ ID NO: 3995346 - DNA, 25 bp, Homo sapien
tagtgtccgcgttcagcatgttgta

SEQ ID NO: 3995347 - DNA, 25 bp, Homo sapien
aatcctgttgagctgcgttgatggc

SEQ ID NO: 3995348 - DNA, 25 bp, Homo sapien
cagcatttttcatgatccagaggaa

SEQ ID NO: 3995349 - DNA, 25 bp, Homo sapien
tcatgaggttgcgagtagtgtccgc

SEQ ID NO: 3995350 - DNA, 25 bp, Homo sapien
ttgacttctgcaggacttgggtact

SEQ ID NO: 3995351 - DNA, 25 bp, Homo sapien
ctgactttgtcagaactctgttttc

SEQ ID NO: 3995352 - DNA, 25 bp, Homo sapien
cggcggcgcatcatctcccctctgg

SEQ ID NO: 3995353 - DNA, 25 bp, Homo sapien
gggccttgacatcccttgacttctg

SEQ ID NO: 3995354 - DNA, 25 bp, Homo sapien
catttctcgggctaattagagtcca

SEQ ID NO: 3995355 - DNA, 25 bp, Homo sapien
ggcccgctctttgattgatagacta

SEQ ID NO: 3995356 - DNA, 25 bp, Homo sapien
aggagacaaagtcgccacacctatg

SEQ ID NO: 3995357 - DNA, 25 bp, Homo sapien
tgaaaccctccaagataaccagaag

SEQ ID NO: 3995358 - DNA, 25 bp, Homo sapien
catttaggcctggaaatcggtcgtt

SEQ ID NO: 3995359 - DNA, 25 bp, Homo sapien
tcatttaggcctggaaatcggtcgt

SEQ ID NO: 3995360 - DNA, 25 bp, Homo sapien
ttagcttgccgccaatgtgtctgct

SEQ ID NO: 3995361 - DNA, 25 bp, Homo sapien
cttctcattagcttgccgccaatgt

SEQ ID NO: 3995362 - DNA, 25 bp, Homo sapien
tagcagaaagttgccgagtgactca

SEQ ID NO: 3995363 - DNA, 25 bp, Homo sapien
ggtccctggatgaattgtatttaca

SEQ ID NO: 3995364 - DNA, 25 bp, Homo sapien
cctttgattatcctgggtccctgga

SEQ ID NO: 3995365 - DNA, 25 bp, Homo sapien
tttgaaagtatacggtcctaggcac

SEQ ID NO: 3995366 - DNA, 25 bp, Homo sapien
cagattgccactgatcaaggcttct

SEQ ID NO: 3995367 - DNA, 25 bp, Homo sapien
aaatgtgcttctgtagccagattgc

SEQ ID NO: 3995368 - DNA, 25 bp, Homo sapien
gatgattaaatgtgcttctgtagcc

SEQ ID NO: 3995369 - DNA, 25 bp, Homo sapien
gcttcttgatctaactcggcctttg

SEQ ID NO: 3995370 - DNA, 25 bp, Homo sapien
tgttgcaaagcagtgagtcaggtag

SEQ ID NO: 3995371 - DNA, 25 bp, Homo sapien
tcaggtaggtggtactctgatcaca

SEQ ID NO: 3995372 - DNA, 25 bp, Homo sapien
gctgtctttacagtccagagccgag

SEQ ID NO: 3995373 - DNA, 25 bp, Homo sapien
agagcacggagtgttgcaaagcagt

SEQ ID NO: 3995374 - DNA, 25 bp, Homo sapien
taggtcgaaacactgttccacctcc

SEQ ID NO: 3995375 - DNA, 25 bp, Homo sapien
actggtggctccaaaactgaacctc

SEQ ID NO: 3995376 - DNA, 25 bp, Homo sapien
gcttggctccgggtgacatccatgc

SEQ ID NO: 3995377 - DNA, 25 bp, Homo sapien
ttggtgacataggtcgaaacactgt

SEQ ID NO: 3995378 - DNA, 25 bp, Homo sapien
ggttacttgcatctttactcttgca

SEQ ID NO: 3995379 - DNA, 25 bp, Homo sapien
gttacttgcatctttactcttgcaa

SEQ ID NO: 3995380 - DNA, 25 bp, Homo sapien
tacttgcatctttactcttgcaaaa

SEQ ID NO: 3995381 - DNA, 25 bp, Homo sapien
cttgcatctttactcttgcaaaatt

SEQ ID NO: 3995382 - DNA, 25 bp, Homo sapien
cctcaaggatcttctcaggtgctct

SEQ ID NO: 3995383 - DNA, 25 bp, Homo sapien
tcttctcaggtgctcttcattaaag

SEQ ID NO: 3995384 - DNA, 25 bp, Homo sapien
caaggatcttctcaggtgctcttca

SEQ ID NO: 3995385 - DNA, 25 bp, Homo sapien
ggatcttctcaggtgctcttcatta

SEQ ID NO: 3995386 - DNA, 25 bp, Homo sapien
atataagatgctattcagattacag

SEQ ID NO: 3995387 - DNA, 25 bp, Homo sapien
gagatgcctggtaactcttggcaat

SEQ ID NO: 3995388 - DNA, 25 bp, Homo sapien
atactcagccactaacgcagcggcg

SEQ ID NO: 3995389 - DNA, 25 bp, Homo sapien
cagatactcagccactaacgcagcg

SEQ ID NO: 3995390 - DNA, 25 bp, Homo sapien
cgcagatcaggagatgcctggtaac

SEQ ID NO: 3995391 - DNA, 25 bp, Homo sapien
gcctggaccataaatgctcacaata

SEQ ID NO: 3995392 - DNA, 25 bp, Homo sapien
tggaccataaatgctcacaatatct

SEQ ID NO: 3995393 - DNA, 25 bp, Homo sapien
cagggcctggaccataaatgctcac

SEQ ID NO: 3995394 - DNA, 25 bp, Homo sapien
gggcctggaccataaatgctcacaa

SEQ ID NO: 3995395 - DNA, 25 bp, Homo sapien
cccatcctcgtcaggtgacagggtg

SEQ ID NO: 3995396 - DNA, 25 bp, Homo sapien
taccaggccactctcggtgaagtac

SEQ ID NO: 3995397 - DNA, 25 bp, Homo sapien
tccaggaggcctaccaggccactct

SEQ ID NO: 3995398 - DNA, 25 bp, Homo sapien
tcggtgaagtactggcctgcgcaca

SEQ ID NO: 3995399 - DNA, 25 bp, Homo sapien
cccaagtccagctggagtatgggag

SEQ ID NO: 3995400 - DNA, 25 bp, Homo sapien
ggctgactgggccattaagaccagg

SEQ ID NO: 3995401 - DNA, 25 bp, Homo sapien
ctgggccattaagaccaggtgttcc

SEQ ID NO: 3995402 - DNA, 25 bp, Homo sapien
gccattaagaccaggtgttcccagc

SEQ ID NO: 3995403 - DNA, 25 bp, Homo sapien
cgatgctgtcgaaggctctctgcag

SEQ ID NO: 3995404 - DNA, 25 bp, Homo sapien
cggaattctcgatgcgcttctagga

SEQ ID NO: 3995405 - DNA, 25 bp, Homo sapien
cagcttgtagacctcattaactgtc

SEQ ID NO: 3995406 - DNA, 25 bp, Homo sapien
tgtgagtgagtgtcagcttccggaa

SEQ ID NO: 3995407 - DNA, 25 bp, Homo sapien
ggctctttgtagacaaactcctgtt

SEQ ID NO: 3995408 - DNA, 25 bp, Homo sapien
tctcaggaagcttggtaattgcagg

SEQ ID NO: 3995409 - DNA, 25 bp, Homo sapien
caactcggaagtaggttccaaacat

SEQ ID NO: 3995410 - DNA, 25 bp, Homo sapien
ctctagtctatgtgagatctcagga

SEQ ID NO: 3995411 - DNA, 25 bp, Homo sapien
tttaatcacttccacaaattctgca

SEQ ID NO: 3995412 - DNA, 25 bp, Homo sapien
taggatccaacttggttttgtccac

SEQ ID NO: 3995413 - DNA, 25 bp, Homo sapien
caggagtggagtctttaatcacttc

SEQ ID NO: 3995414 - DNA, 25 bp, Homo sapien
tctgcaccaaaacattgaccataaa

SEQ ID NO: 3995415 - DNA, 25 bp, Homo sapien
gactgtaaatcacgacttagtataa

SEQ ID NO: 3995416 - DNA, 25 bp, Homo sapien
gggtcactgacctcagactgtaaat

SEQ ID NO: 3995417 - DNA, 25 bp, Homo sapien
gtataatgaaatctggttgtaactc

SEQ ID NO: 3995418 - DNA, 25 bp, Homo sapien
cttagtataatgaaatctggttgta

SEQ ID NO: 3995419 - DNA, 25 bp, Homo sapien
atgaacctccggaggttgaaattct

SEQ ID NO: 3995420 - DNA, 25 bp, Homo sapien
tctcatactcatcaaagtagggctc

SEQ ID NO: 3995421 - DNA, 25 bp, Homo sapien
tctggatgacgctgatcctggtctt

SEQ ID NO: 3995422 - DNA, 25 bp, Homo sapien
tgcatagtggtcaggactgtgttcc

SEQ ID NO: 3995423 - DNA, 25 bp, Homo sapien
tagctgcctaaatgggattttctgg

SEQ ID NO: 3995424 - DNA, 25 bp, Homo sapien
tgttttcagtccaatccactgtgaa

SEQ ID NO: 3995425 - DNA, 25 bp, Homo sapien
agtggtggccaatcccttgggtgca

SEQ ID NO: 3995426 - DNA, 25 bp, Homo sapien
cactgtgaaagaggtttgtgggtcc

SEQ ID NO: 3995427 - DNA, 25 bp, Homo sapien
aacatgagacgtaaacatagggaag

SEQ ID NO: 3995428 - DNA, 25 bp, Homo sapien
ctgaacatgagacgtaaacataggg

SEQ ID NO: 3995429 - DNA, 25 bp, Homo sapien
gagacgtaaacatagggaagtcact

SEQ ID NO: 3995430 - DNA, 25 bp, Homo sapien
catgagacgtaaacatagggaagtc

SEQ ID NO: 3995431 - DNA, 25 bp, Homo sapien
tgtcttcaatggcaacttcaatcgg

SEQ ID NO: 3995432 - DNA, 25 bp, Homo sapien
tgatttacagtagctcccacagagc

SEQ ID NO: 3995433 - DNA, 25 bp, Homo sapien
aagcatctttgcatcaggcggctcc

SEQ ID NO: 3995434 - DNA, 25 bp, Homo sapien
taatggcaactgctaactgcagggt

SEQ ID NO: 3995435 - DNA, 25 bp, Homo sapien
cagcgttctaagaagtctgatagga

SEQ ID NO: 3995436 - DNA, 25 bp, Homo sapien
gaacttgggagtcagcgttctaaga

SEQ ID NO: 3995437 - DNA, 25 bp, Homo sapien
gtctgataggaagatctagtcttgt

SEQ ID NO: 3995438 - DNA, 25 bp, Homo sapien
ggagtcagcgttctaagaagtctga

SEQ ID NO: 3995439 - DNA, 25 bp, Homo sapien
tcagccaaaaacacttgggctactt

SEQ ID NO: 3995440 - DNA, 25 bp, Homo sapien
taaagcataacctcaacttgttgtg

SEQ ID NO: 3995441 - DNA, 25 bp, Homo sapien
tgaattccttaaagcataacctcaa

SEQ ID NO: 3995442 - DNA, 25 bp, Homo sapien
tcgatagagttttggatcagcagga

SEQ ID NO: 3995443 - DNA, 25 bp, Homo sapien
gagatactggattgcaagatttata

SEQ ID NO: 3995444 - DNA, 25 bp, Homo sapien
gtcatggaaaggatcatacccgtga

SEQ ID NO: 3995445 - DNA, 25 bp, Homo sapien
cgtgagatactggattgcaagattt

SEQ ID NO: 3995446 - DNA, 25 bp, Homo sapien
aggatcatacccgtgagatactgga

SEQ ID NO: 3995447 - DNA, 25 bp, Homo sapien
tgttggtaaattcaccgaacacaag

SEQ ID NO: 3995448 - DNA, 25 bp, Homo sapien
tcacttagtgatacaaccattccag

SEQ ID NO: 3995449 - DNA, 25 bp, Homo sapien
tctcaataggtccacaaacatctgt

SEQ ID NO: 3995450 - DNA, 25 bp, Homo sapien
gagaatagccacatcgcttggaaaa

SEQ ID NO: 3995451 - DNA, 25 bp, Homo sapien
cctgctacgtacatatggaagtgct

SEQ ID NO: 3995452 - DNA, 25 bp, Homo sapien
tgaagccaacctagccagaattgag

SEQ ID NO: 3995453 - DNA, 25 bp, Homo sapien
gaaaacttgctatcagcttagggcc

SEQ ID NO: 3995454 - DNA, 25 bp, Homo sapien
tgcatatcgtccagagccttgaaaa

SEQ ID NO: 3995455 - DNA, 25 bp, Homo sapien
ggggtagcacccagaaatctctgtg

SEQ ID NO: 3995456 - DNA, 25 bp, Homo sapien
tgaatcataactgctgaggggtagc

SEQ ID NO: 3995457 - DNA, 25 bp, Homo sapien
tatctcagacttaatgaatcataac

SEQ ID NO: 3995458 - DNA, 25 bp, Homo sapien
atttctgggatctatctcagactta

SEQ ID NO: 3995459 - DNA, 25 bp, Homo sapien
tggaattttccgctcgatcattggc

SEQ ID NO: 3995460 - DNA, 25 bp, Homo sapien
caactctgaatattggcttgtacag

SEQ ID NO: 3995461 - DNA, 25 bp, Homo sapien
tgatattccctctggtctgccgtga

SEQ ID NO: 3995462 - DNA, 25 bp, Homo sapien
tctgccgtgatgagacgcttgtttt

SEQ ID NO: 3995463 - DNA, 25 bp, Homo sapien
cctgaaactagatctgtggaaggag

SEQ ID NO: 3995464 - DNA, 25 bp, Homo sapien
cacatttcctgaaactagatctgtg

SEQ ID NO: 3995465 - DNA, 25 bp, Homo sapien
ttcctgaaactagatctgtggaagg

SEQ ID NO: 3995466 - DNA, 25 bp, Homo sapien
catttcctgaaactagatctgtgga

SEQ ID NO: 3995467 - DNA, 25 bp, Homo sapien
gaaacttggtcccagagaggagaaa

SEQ ID NO: 3995468 - DNA, 25 bp, Homo sapien
cagtctccacgaatgaagatggctt

SEQ ID NO: 3995469 - DNA, 25 bp, Homo sapien
tatgggccagaggaaatcatctctc

SEQ ID NO: 3995470 - DNA, 25 bp, Homo sapien
taataaatacgcagtcatgcctgag

SEQ ID NO: 3995471 - DNA, 25 bp, Homo sapien
catctttattatcagtcaaggtcac

SEQ ID NO: 3995472 - DNA, 25 bp, Homo sapien
tttgtagctgatatacatatgctga

SEQ ID NO: 3995473 - DNA, 25 bp, Homo sapien
cagtcaaggtcacagtcatattaaa

SEQ ID NO: 3995474 - DNA, 25 bp, Homo sapien
tatacatatgctgacagacagcaca

SEQ ID NO: 3995475 - DNA, 25 bp, Homo sapien
aagtcatcgttcattactagcaggg

SEQ ID NO: 3995476 - DNA, 25 bp, Homo sapien
tacgagcgagtaggtcatcaaaaca

SEQ ID NO: 3995477 - DNA, 25 bp, Homo sapien
aacattgcagaagaggtgccacctt

SEQ ID NO: 3995478 - DNA, 25 bp, Homo sapien
gaagtgccttacaaaacattacgag

SEQ ID NO: 3995479 - DNA, 25 bp, Homo sapien
tcaggcgccactgtatacactctca

SEQ ID NO: 3995480 - DNA, 25 bp, Homo sapien
ggcgccactgtatacactctcagtt

SEQ ID NO: 3995481 - DNA, 25 bp, Homo sapien
ggctctcgccagacaatgtaaactg

SEQ ID NO: 3995482 - DNA, 25 bp, Homo sapien
ggccctggtagttggctctcgccag

SEQ ID NO: 3995483 - DNA, 25 bp, Homo sapien
gtggctttgcttcaggcggaagtcc

SEQ ID NO: 3995484 - DNA, 25 bp, Homo sapien
tattgcagatccgtcacagctgcca

SEQ ID NO: 3995485 - DNA, 25 bp, Homo sapien
tcctctctgtcttcgttgttgttaa

SEQ ID NO: 3995486 - DNA, 25 bp, Homo sapien
gcggaagtccgcgtgctttgatacc

SEQ ID NO: 3995487 - DNA, 25 bp, Homo sapien
gcacgcccgcttcggacgccccgaa

SEQ ID NO: 3995488 - DNA, 25 bp, Homo sapien
agcaggctggagcacgcccgcttcg

SEQ ID NO: 3995489 - DNA, 25 bp, Homo sapien
ggagcacgcccgcttcggacgcccc

SEQ ID NO: 3995490 - DNA, 25 bp, Homo sapien
caggctggagcacgcccgcttcgga

SEQ ID NO: 3995491 - DNA, 25 bp, Homo sapien
catacattgagctgcacgttctggg

SEQ ID NO: 3995492 - DNA, 25 bp, Homo sapien
cgaaggagatttcaggtctatgccc

SEQ ID NO: 3995493 - DNA, 25 bp, Homo sapien
gcccacttgccacgattttacttta

SEQ ID NO: 3995494 - DNA, 25 bp, Homo sapien
ttctgggttccctcacgaaggagat

SEQ ID NO: 3995495 - DNA, 25 bp, Homo sapien
ctgtgtgcacgcgtgtccgttccca

SEQ ID NO: 3995496 - DNA, 25 bp, Homo sapien
tcccactggagtggcggtgctttct

SEQ ID NO: 3995497 - DNA, 25 bp, Homo sapien
gaagtcttcgctagaactccctcct

SEQ ID NO: 3995498 - DNA, 25 bp, Homo sapien
ggatgggttgcttccctccgaagtc

SEQ ID NO: 3995499 - DNA, 25 bp, Homo sapien
tcacattaactgtgcagggccctgt

SEQ ID NO: 3995500 - DNA, 25 bp, Homo sapien
gaatgagcttatttcccagtgacaa

SEQ ID NO: 3995501 - DNA, 25 bp, Homo sapien
tatgaccggctccttgcaaaacaat

SEQ ID NO: 3995502 - DNA, 25 bp, Homo sapien
tgcaatctagtgttctatgaccggc

SEQ ID NO: 3995503 - DNA, 25 bp, Homo sapien
tcagctggcactatcgctttccttg

SEQ ID NO: 3995504 - DNA, 25 bp, Homo sapien
ggcactatcgctttccttggcccag

SEQ ID NO: 3995505 - DNA, 25 bp, Homo sapien
gcacattccactcagctggcactat

SEQ ID NO: 3995506 - DNA, 25 bp, Homo sapien
ttttctccagtacatagtgcccctc

SEQ ID NO: 3995507 - DNA, 25 bp, Homo sapien
cttatttactttggtcctgctccaa

SEQ ID NO: 3995508 - DNA, 25 bp, Homo sapien
catggacttgggagtgtcatcacca

SEQ ID NO: 3995509 - DNA, 25 bp, Homo sapien
aggaagatgacagactgaggcccgc

SEQ ID NO: 3995510 - DNA, 25 bp, Homo sapien
cccgcataaggagggagtcccacat

SEQ ID NO: 3995511 - DNA, 25 bp, Homo sapien
gaatcccttgtccttggaactgctg

SEQ ID NO: 3995512 - DNA, 25 bp, Homo sapien
agtggtacgaatcccttgtccttgg

SEQ ID NO: 3995513 - DNA, 25 bp, Homo sapien
ttctgtctctgctatttactgagtg

SEQ ID NO: 3995514 - DNA, 25 bp, Homo sapien
gtgaggagcagtggtacgaatccct

SEQ ID NO: 3995515 - DNA, 25 bp, Homo sapien
gggtgcaagatagttcctgaacaca

SEQ ID NO: 3995516 - DNA, 25 bp, Homo sapien
gttctttctgggtgcaagatagttc

SEQ ID NO: 3995517 - DNA, 25 bp, Homo sapien
tttctgggtgcaagatagttcctga

SEQ ID NO: 3995518 - DNA, 25 bp, Homo sapien
gcaagatagttcctgaacacatacc

SEQ ID NO: 3995519 - DNA, 25 bp, Homo sapien
ggcaccttgtgagatcaagtgcaca

SEQ ID NO: 3995520 - DNA, 25 bp, Homo sapien
tgacctttgacttgcggtcttacag

SEQ ID NO: 3995521 - DNA, 25 bp, Homo sapien
gtcttacaggttggcatactttcgg

SEQ ID NO: 3995522 - DNA, 25 bp, Homo sapien
gtgggcaccttgtgagatcaagtgc

SEQ ID NO: 3995523 - DNA, 25 bp, Homo sapien
actagcttggtcaatgtggcgaaaa

SEQ ID NO: 3995524 - DNA, 25 bp, Homo sapien
cttggtcaatgtggcgaaaacttgt

SEQ ID NO: 3995525 - DNA, 25 bp, Homo sapien
caagactagcttggtcaatgtggcg

SEQ ID NO: 3995526 - DNA, 25 bp, Homo sapien
tagcttggtcaatgtggcgaaaact

SEQ ID NO: 3995527 - DNA, 25 bp, Homo sapien
gagaacagagtccatcatggccaaa

SEQ ID NO: 3995528 - DNA, 25 bp, Homo sapien
gccaaaatcttggtacagtttgata

SEQ ID NO: 3995529 - DNA, 25 bp, Homo sapien
acagctgggcaggaaagacggtaaa

SEQ ID NO: 3995530 - DNA, 25 bp, Homo sapien
attaatatttctactgatgatcagg

SEQ ID NO: 3995531 - DNA, 25 bp, Homo sapien
cctggcaggtatatgactgatctca

SEQ ID NO: 3995532 - DNA, 25 bp, Homo sapien
cacctggcaggtatatgactgatct

SEQ ID NO: 3995533 - DNA, 25 bp, Homo sapien
gatgtagtatgactgaagaaatgtg

SEQ ID NO: 3995534 - DNA, 25 bp, Homo sapien
aggtggctagatgaacccagatgta

SEQ ID NO: 3995535 - DNA, 25 bp, Homo sapien
tgatcttaagggctagggcagacat

SEQ ID NO: 3995536 - DNA, 25 bp, Homo sapien
gacaggtccagagggttgatcttaa

SEQ ID NO: 3995537 - DNA, 25 bp, Homo sapien
ccagagggttgatcttaagggctag

SEQ ID NO: 3995538 - DNA, 25 bp, Homo sapien
tcttaagggctagggcagacatggt

SEQ ID NO: 3995539 - DNA, 25 bp, Homo sapien
gaaagtaccacctcagtctgagcct

SEQ ID NO: 3995540 - DNA, 25 bp, Homo sapien
tcttgacagtgtcatgaaaaatggc

SEQ ID NO: 3995541 - DNA, 25 bp, Homo sapien
ggcagaaagtaccacctcagtctga

SEQ ID NO: 3995542 - DNA, 25 bp, Homo sapien
ctgtcatgcaatcttgacagtgtca

SEQ ID NO: 3995543 - DNA, 25 bp, Homo sapien
gatatttacttgcaccactgttgat

SEQ ID NO: 3995544 - DNA, 25 bp, Homo sapien
ggcagtctccaagatctctttacgg

SEQ ID NO: 3995545 - DNA, 25 bp, Homo sapien
tttacgggtcccagagagttctgtg

SEQ ID NO: 3995546 - DNA, 25 bp, Homo sapien
aggctggcgcccatcaacattggag

SEQ ID NO: 3995547 - DNA, 25 bp, Homo sapien
cagtagccccatggtaagccaagaa

SEQ ID NO: 3995548 - DNA, 25 bp, Homo sapien
aatttgagtgtcacccctaatctgc

SEQ ID NO: 3995549 - DNA, 25 bp, Homo sapien
gcattgtgtcagatgatgtagccca

SEQ ID NO: 3995550 - DNA, 25 bp, Homo sapien
tgaatgtctttaggtgggctgtgcc

SEQ ID NO: 3995551 - DNA, 25 bp, Homo sapien
tccctgagaagtggataattttttc

SEQ ID NO: 3995552 - DNA, 25 bp, Homo sapien
cctgagaagtggataattttttccg

SEQ ID NO: 3995553 - DNA, 25 bp, Homo sapien
agagaagttaggtgaggccacacag

SEQ ID NO: 3995554 - DNA, 25 bp, Homo sapien
tttacatgtgagcaatggttcagag

SEQ ID NO: 3995555 - DNA, 25 bp, Homo sapien
tcatttgaggtctgtgcagacatgc

SEQ ID NO: 3995556 - DNA, 25 bp, Homo sapien
ctccatcatttgaggtctgtgcaga

SEQ ID NO: 3995557 - DNA, 25 bp, Homo sapien
ccattaagtactccaatccacactt

SEQ ID NO: 3995558 - DNA, 25 bp, Homo sapien
ccaggtgccaccattaagtactcca

SEQ ID NO: 3995559 - DNA, 25 bp, Homo sapien
acttggcaaaacgatcagaaaggcc

SEQ ID NO: 3995560 - DNA, 25 bp, Homo sapien
tcttcaaaccccgtggagcagataa

SEQ ID NO: 3995561 - DNA, 25 bp, Homo sapien
tgcacgaggatttcagagtggaacc

SEQ ID NO: 3995562 - DNA, 25 bp, Homo sapien
tggcaactgcatgtgaagggacctt

SEQ ID NO: 3995563 - DNA, 25 bp, Homo sapien
ccaaagctttattgtcagctgtcat

SEQ ID NO: 3995564 - DNA, 25 bp, Homo sapien
ctgaaagagaaggaggcagaaactc

SEQ ID NO: 3995565 - DNA, 25 bp, Homo sapien
tgattgtagagtctgacaaaggaca

SEQ ID NO: 3995566 - DNA, 25 bp, Homo sapien
atgattgtagagtctgacaaaggac

SEQ ID NO: 3995567 - DNA, 25 bp, Homo sapien
ccttgatatatgaagtgcagctgcc

SEQ ID NO: 3995568 - DNA, 25 bp, Homo sapien
gaaactaagttggaggcacgatggc

SEQ ID NO: 3995569 - DNA, 25 bp, Homo sapien
taacgttgaagatagcatgcttacc

SEQ ID NO: 3995570 - DNA, 25 bp, Homo sapien
tctctgctcataggatctggttacg

SEQ ID NO: 3995571 - DNA, 25 bp, Homo sapien
tttattgaaggcctgctgtgctgaa

SEQ ID NO: 3995572 - DNA, 25 bp, Homo sapien
gaataatcccaagaaactatctgtc

SEQ ID NO: 3995573 - DNA, 25 bp, Homo sapien
tagactttggcttgagagacatata

SEQ ID NO: 3995574 - DNA, 25 bp, Homo sapien
gctgggttaggcttcataaaggaca

SEQ ID NO: 3995575 - DNA, 25 bp, Homo sapien
ctgcttcaagtacaaggtaaaagat

SEQ ID NO: 3995576 - DNA, 25 bp, Homo sapien
gttggtagcagccttgtcggcggtg

SEQ ID NO: 3995577 - DNA, 25 bp, Homo sapien
cttgtcggcggtggaggatctccaa

SEQ ID NO: 3995578 - DNA, 25 bp, Homo sapien
ggctggcaatagtggaactgtggca

SEQ ID NO: 3995579 - DNA, 25 bp, Homo sapien
gaagagccttatggagttaccagtt

SEQ ID NO: 3995580 - DNA, 25 bp, Homo sapien
cctaatggcatctgcagtccaggat

SEQ ID NO: 3995581 - DNA, 25 bp, Homo sapien
aatggcatctgcagtccaggataag

SEQ ID NO: 3995582 - DNA, 25 bp, Homo sapien
ccaggataagaaccaacttgctcat

SEQ ID NO: 3995583 - DNA, 25 bp, Homo sapien
tctacacgagatgtctgaagactca

SEQ ID NO: 3995584 - DNA, 25 bp, Homo sapien
gatgtctgaagactcagtgaatcag

SEQ ID NO: 3995585 - DNA, 25 bp, Homo sapien
tgaatcagaaagttttggctgtccc

SEQ ID NO: 3995586 - DNA, 25 bp, Homo sapien
tcaacttttatctacacgagatgtc

SEQ ID NO: 3995587 - DNA, 25 bp, Homo sapien
ggttcgctccttctgccaacccgta

SEQ ID NO: 3995588 - DNA, 25 bp, Homo sapien
cagaagaacttcctccaccgcggtt

SEQ ID NO: 3995589 - DNA, 25 bp, Homo sapien
tgccaacccgtatttaccacgtcca

SEQ ID NO: 3995590 - DNA, 25 bp, Homo sapien
cgccgcggcgagaactaagcagaag

SEQ ID NO: 3995591 - DNA, 25 bp, Homo sapien
tggcaagcgccagaattaaagcccg

SEQ ID NO: 3995592 - DNA, 25 bp, Homo sapien
ggcgcgtgagaagaacggcgcgggc

SEQ ID NO: 3995593 - DNA, 25 bp, Homo sapien
agccggggcggaccagcaagcctct

SEQ ID NO: 3995594 - DNA, 25 bp, Homo sapien
tctcacccgcggtgggcgacagctg

SEQ ID NO: 3995595 - DNA, 25 bp, Homo sapien
actccacggagagccgcttcagaga

SEQ ID NO: 3995596 - DNA, 25 bp, Homo sapien
ccgaagccacctcggagttggcgga

SEQ ID NO: 3995597 - DNA, 25 bp, Homo sapien
gataaaggggtcttgaccgccactc

SEQ ID NO: 3995598 - DNA, 25 bp, Homo sapien
agaggcatccgagggacagagcgcc

SEQ ID NO: 3995599 - DNA, 25 bp, Homo sapien
gagccaccaagaacagttgcctctg

SEQ ID NO: 3995600 - DNA, 25 bp, Homo sapien
ccactgcgtgttgcccaaagcggca

SEQ ID NO: 3995601 - DNA, 25 bp, Homo sapien
caaggccttcactaggtcacgctcg

SEQ ID NO: 3995602 - DNA, 25 bp, Homo sapien
tggcggacgccataaattgttaacg

SEQ ID NO: 3995603 - DNA, 25 bp, Homo sapien
gattacacatctggatgattaagct

SEQ ID NO: 3995604 - DNA, 25 bp, Homo sapien
gattaagcttccttattagcctcgg

SEQ ID NO: 3995605 - DNA, 25 bp, Homo sapien
ggaaaggaactgcacgattacacat

SEQ ID NO: 3995606 - DNA, 25 bp, Homo sapien
cgggtatcagggtctaatagaatcc

SEQ ID NO: 3995607 - DNA, 25 bp, Homo sapien
tgcttcagcagcacctttccccaaa

SEQ ID NO: 3995608 - DNA, 25 bp, Homo sapien
ttcttccattgcttcagcagcacct

SEQ ID NO: 3995609 - DNA, 25 bp, Homo sapien
tttttcttccattgcttcagcagca

SEQ ID NO: 3995610 - DNA, 25 bp, Homo sapien
cttcagcagcacctttccccaaacc

SEQ ID NO: 3995611 - DNA, 25 bp, Homo sapien
gatcaccatgtatgagctgcctgtg

SEQ ID NO: 3995612 - DNA, 25 bp, Homo sapien
gaaaggagcgttaggagtgctatcc

SEQ ID NO: 3995613 - DNA, 25 bp, Homo sapien
ttttctaataccaaggcctacagca

SEQ ID NO: 3995614 - DNA, 25 bp, Homo sapien
tatgtatctgtacccaaccttggtc

SEQ ID NO: 3995615 - DNA, 25 bp, Homo sapien
tagcagggcatggcggcgcatccca

SEQ ID NO: 3995616 - DNA, 25 bp, Homo sapien
ggactttcaaactagaactgtacac

SEQ ID NO: 3995617 - DNA, 25 bp, Homo sapien
aagctggaacttaagggaacaatct

SEQ ID NO: 3995618 - DNA, 25 bp, Homo sapien
ctggaacttaagggaacaatctctt

SEQ ID NO: 3995619 - DNA, 25 bp, Homo sapien
gactttcaaactagaactgtacacc

SEQ ID NO: 3995620 - DNA, 25 bp, Homo sapien
caagttgggtcagtctaaaggctca

SEQ ID NO: 3995621 - DNA, 25 bp, Homo sapien
ccagggaagacgtagggcctttgca

SEQ ID NO: 3995622 - DNA, 25 bp, Homo sapien
gggtgtcagctagtcaatctccagg

SEQ ID NO: 3995623 - DNA, 25 bp, Homo sapien
cattatcgtcggcaaaacacccggc

SEQ ID NO: 3995624 - DNA, 25 bp, Homo sapien
cacctcagcctcctgaagtgctggg

SEQ ID NO: 3995625 - DNA, 25 bp, Homo sapien
cgcccacctcagcctcctgaagtgc

SEQ ID NO: 3995626 - DNA, 25 bp, Homo sapien
cccacctcagcctcctgaagtgctg

SEQ ID NO: 3995627 - DNA, 25 bp, Homo sapien
catgttaaccaggatggtctttaac

SEQ ID NO: 3995628 - DNA, 25 bp, Homo sapien
ccaaacagccaaagcgttcttgagc

SEQ ID NO: 3995629 - DNA, 25 bp, Homo sapien
acactgttaaaactgttcatactcc

SEQ ID NO: 3995630 - DNA, 25 bp, Homo sapien
tcatactccccgaagtgacctacag

SEQ ID NO: 3995631 - DNA, 25 bp, Homo sapien
gacctacagatttaatactattcct

SEQ ID NO: 3995632 - DNA, 25 bp, Homo sapien
actgcactctagctcaggtgacaga

SEQ ID NO: 3995633 - DNA, 25 bp, Homo sapien
ccactgcactctagctcaggtgaca

SEQ ID NO: 3995634 - DNA, 25 bp, Homo sapien
tgcactctagctcaggtgacagagt

SEQ ID NO: 3995635 - DNA, 25 bp, Homo sapien
accactgcactctagctcaggtgac

SEQ ID NO: 3995636 - DNA, 25 bp, Homo sapien
gaatggacctcgacataataaaggc

SEQ ID NO: 3995637 - DNA, 25 bp, Homo sapien
gcctgggtaacgcagagatgtctct

SEQ ID NO: 3995638 - DNA, 25 bp, Homo sapien
caatgtccttgatgactagagaagc

SEQ ID NO: 3995639 - DNA, 25 bp, Homo sapien
taaaggccacatacggcatgcccgt

SEQ ID NO: 3995640 - DNA, 25 bp, Homo sapien
aggatgtcacggcttcactggtgaa

SEQ ID NO: 3995641 - DNA, 25 bp, Homo sapien
ggatggaatcaacccttccaaactc

SEQ ID NO: 3995642 - DNA, 25 bp, Homo sapien
tcaacaaagaatatcccaggatgtc

SEQ ID NO: 3995643 - DNA, 25 bp, Homo sapien
cttcttaaactctttccaacaactg

SEQ ID NO: 3995644 - DNA, 25 bp, Homo sapien
catgctgcgagggacacagaagtac

SEQ ID NO: 3995645 - DNA, 25 bp, Homo sapien
cagcaaaagcagcactacaaggaag

SEQ ID NO: 3995646 - DNA, 25 bp, Homo sapien
tgtcaaagagccaaccgactgtaaa

SEQ ID NO: 3995647 - DNA, 25 bp, Homo sapien
aagcgcccgttaccatgcacagcta

SEQ ID NO: 3995648 - DNA, 25 bp, Homo sapien
cctcctcaaccgccatactgagtag

SEQ ID NO: 3995649 - DNA, 25 bp, Homo sapien
ctcaaccgccatactgagtagcagc

SEQ ID NO: 3995650 - DNA, 25 bp, Homo sapien
tctcctcctcaaccgccatactgag

SEQ ID NO: 3995651 - DNA, 25 bp, Homo sapien
tcctcaaccgccatactgagtagca

SEQ ID NO: 3995652 - DNA, 25 bp, Homo sapien
tctgcaggagctaatgctggtaacc

SEQ ID NO: 3995653 - DNA, 25 bp, Homo sapien
gatcttatcacctcatccgctgcag

SEQ ID NO: 3995654 - DNA, 25 bp, Homo sapien
caggcttcctttcactgagtagcag

SEQ ID NO: 3995655 - DNA, 25 bp, Homo sapien
ttcaaatgcagggttcaagctcaca

SEQ ID NO: 3995656 - DNA, 25 bp, Homo sapien
gatactgccagcctgacgttagagg

SEQ ID NO: 3995657 - DNA, 25 bp, Homo sapien
agggctttccgagacagttctgtga

SEQ ID NO: 3995658 - DNA, 25 bp, Homo sapien
aacttagccagcaaccttttgtact

SEQ ID NO: 3995659 - DNA, 25 bp, Homo sapien
tgagcaaaacacagattatcaaatg

SEQ ID NO: 3995660 - DNA, 25 bp, Homo sapien
tctttcacagcatgggctagtccac

SEQ ID NO: 3995661 - DNA, 25 bp, Homo sapien
tattttgtggagtgccagaccaagc

SEQ ID NO: 3995662 - DNA, 25 bp, Homo sapien
gaccaagcagttatacagagacaca

SEQ ID NO: 3995663 - DNA, 25 bp, Homo sapien
taattcagaagggaatgtgcccaca

SEQ ID NO: 3995664 - DNA, 25 bp, Homo sapien
aaatcagagaaggtgaaaagctgaa

SEQ ID NO: 3995665 - DNA, 25 bp, Homo sapien
ggcaattctcactagcaagctggag

SEQ ID NO: 3995666 - DNA, 25 bp, Homo sapien
tgcttaacatgaacgggaccccgtc

SEQ ID NO: 3995667 - DNA, 25 bp, Homo sapien
tgaacgaagtcagccataggaggag

SEQ ID NO: 3995668 - DNA, 25 bp, Homo sapien
tctactctctcaggcggactgcgag

SEQ ID NO: 3995669 - DNA, 25 bp, Homo sapien
aacccagtggtgttgcgactgctga

SEQ ID NO: 3995670 - DNA, 25 bp, Homo sapien
tactgttcgagatctgcaatcaggc

SEQ ID NO: 3995671 - DNA, 25 bp, Homo sapien
ttgcttgcaaacaggtaactcgtga

SEQ ID NO: 3995672 - DNA, 25 bp, Homo sapien
ttcctcacgagaaagcaagtccttg

SEQ ID NO: 3995673 - DNA, 25 bp, Homo sapien
gatggaaacttacgccaggtgctcc

SEQ ID NO: 3995674 - DNA, 25 bp, Homo sapien
tcaccacgtagtcagaggagagcac

SEQ ID NO: 3995675 - DNA, 25 bp, Homo sapien
ggttaagaccgccaacatggatgct

SEQ ID NO: 3995676 - DNA, 25 bp, Homo sapien
tctgtaacaagcgagaaagcagctc

SEQ ID NO: 3995677 - DNA, 25 bp, Homo sapien
ttccccattgtcacttaaagttcat

SEQ ID NO: 3995678 - DNA, 25 bp, Homo sapien
tcacccaaggattagtactttcgtg

SEQ ID NO: 3995679 - DNA, 25 bp, Homo sapien
caggatgatatggacatttttcccc

SEQ ID NO: 3995680 - DNA, 25 bp, Homo sapien
gaattccctgccttaaactccagga

SEQ ID NO: 3995681 - DNA, 25 bp, Homo sapien
tcggttgacagctgacaaaatcgtt

SEQ ID NO: 3995682 - DNA, 25 bp, Homo sapien
gatacagtgctcttcgccatgaggt

SEQ ID NO: 3995683 - DNA, 25 bp, Homo sapien
cttaggaagaagagacgcattggct

SEQ ID NO: 3995684 - DNA, 25 bp, Homo sapien
aatcgttataaccagaggctcacag

SEQ ID NO: 3995685 - DNA, 25 bp, Homo sapien
tatatgtgccactgaagcaagtaca

SEQ ID NO: 3995686 - DNA, 25 bp, Homo sapien
gtatatgtgccactgaagcaagtac

SEQ ID NO: 3995687 - DNA, 25 bp, Homo sapien
agtatatgtgccactgaagcaagta

SEQ ID NO: 3995688 - DNA, 25 bp, Homo sapien
agtgaagccgccctgcacacactct

SEQ ID NO: 3995689 - DNA, 25 bp, Homo sapien
cactctttgttacctgaacagccat

SEQ ID NO: 3995690 - DNA, 25 bp, Homo sapien
ggctccttctcagtgaagccgccct

SEQ ID NO: 3995691 - DNA, 25 bp, Homo sapien
tgcacacactctttgttacctgaac

SEQ ID NO: 3995692 - DNA, 25 bp, Homo sapien
gggcacatagaggacaacaacagac

SEQ ID NO: 3995693 - DNA, 25 bp, Homo sapien
catttttgacgactggctgactcca

SEQ ID NO: 3995694 - DNA, 25 bp, Homo sapien
tagcatcactcttgcggaacctaag

SEQ ID NO: 3995695 - DNA, 25 bp, Homo sapien
gacctgcgactcatgactcaactgg

SEQ ID NO: 3995696 - DNA, 25 bp, Homo sapien
tctacaggtgggtagaagagcacca

SEQ ID NO: 3995697 - DNA, 25 bp, Homo sapien
tactgagggaccataaataggagac

SEQ ID NO: 3995698 - DNA, 25 bp, Homo sapien
caaatataccccgatgagtgtggaa

SEQ ID NO: 3995699 - DNA, 25 bp, Homo sapien
gaagatacctctgcactaacagcct

SEQ ID NO: 3995700 - DNA, 25 bp, Homo sapien
tttatacggcgagctgtacacccag

SEQ ID NO: 3995701 - DNA, 25 bp, Homo sapien
cagggtctaggtcacagattaggct

SEQ ID NO: 3995702 - DNA, 25 bp, Homo sapien
tggtaagagtacctcagagacaggg

SEQ ID NO: 3995703 - DNA, 25 bp, Homo sapien
tatgctcaaaaagcaagtcaaggct

SEQ ID NO: 3995704 - DNA, 25 bp, Homo sapien
tctctcataccacaacagaggtgca

SEQ ID NO: 3995705 - DNA, 25 bp, Homo sapien
taggtccccaaggagatgggcactc

SEQ ID NO: 3995706 - DNA, 25 bp, Homo sapien
accatcaaggggctaggtccccaag

SEQ ID NO: 3995707 - DNA, 25 bp, Homo sapien
atgggcactctctcataccacaaca

SEQ ID NO: 3995708 - DNA, 25 bp, Homo sapien
accccacagtggagctggttttcga

SEQ ID NO: 3995709 - DNA, 25 bp, Homo sapien
tcttgcagagaagacatatgacacc

SEQ ID NO: 3995710 - DNA, 25 bp, Homo sapien
caattgtcaacaatctctctggcaa

SEQ ID NO: 3995711 - DNA, 25 bp, Homo sapien
gctaacaatgccttttcttgcagag

SEQ ID NO: 3995712 - DNA, 25 bp, Homo sapien
aaaggaacactctgtaacttctgca

SEQ ID NO: 3995713 - DNA, 25 bp, Homo sapien
ggctccaacactggaacaaatccat

SEQ ID NO: 3995714 - DNA, 25 bp, Homo sapien
catagctgtttccttgcctactaca

SEQ ID NO: 3995715 - DNA, 25 bp, Homo sapien
cattaacacgtgttgccaaaggaac

SEQ ID NO: 3995716 - DNA, 25 bp, Homo sapien
ttaagacaagtaccctagactcctc

SEQ ID NO: 3995717 - DNA, 25 bp, Homo sapien
gtggcttttgtcaccaactgcgtga

SEQ ID NO: 3995718 - DNA, 25 bp, Homo sapien
cattaccaagtatcagctgctgcct

SEQ ID NO: 3995719 - DNA, 25 bp, Homo sapien
tgacctcaggcaaatactgtactaa

SEQ ID NO: 3995720 - DNA, 25 bp, Homo sapien
aagataactgacagttgactgcaaa

SEQ ID NO: 3995721 - DNA, 25 bp, Homo sapien
ctgaagataactgacagttgactgc

SEQ ID NO: 3995722 - DNA, 25 bp, Homo sapien
ataactgacagttgactgcaaaccc

SEQ ID NO: 3995723 - DNA, 25 bp, Homo sapien
gaaagctgaagataactgacagttg

SEQ ID NO: 3995724 - DNA, 25 bp, Homo sapien
tggttgaagctccaggggtaaatga

SEQ ID NO: 3995725 - DNA, 25 bp, Homo sapien
atgatggttgaagctccaggggtaa

SEQ ID NO: 3995726 - DNA, 25 bp, Homo sapien
gttgaagctccaggggtaaatgaaa

SEQ ID NO: 3995727 - DNA, 25 bp, Homo sapien
gaagatgatggttgaagctccaggg

SEQ ID NO: 3995728 - DNA, 25 bp, Homo sapien
aataaatatttcaactccgtggaca

SEQ ID NO: 3995729 - DNA, 25 bp, Homo sapien
aagtaattcactagttcagaagtcc

SEQ ID NO: 3995730 - DNA, 25 bp, Homo sapien
tcctagtgtgatcaaaagatgaaag

SEQ ID NO: 3995731 - DNA, 25 bp, Homo sapien
tccatccagtatagtgaccatcatt

SEQ ID NO: 3995732 - DNA, 25 bp, Homo sapien
aatggtgcaatctcagcacaatgca

SEQ ID NO: 3995733 - DNA, 25 bp, Homo sapien
atggtgcaatctcagcacaatgcaa

SEQ ID NO: 3995734 - DNA, 25 bp, Homo sapien
caatggtgcaatctcagcacaatgc

SEQ ID NO: 3995735 - DNA, 25 bp, Homo sapien
cctctgcctcccaggttcaagcaat

SEQ ID NO: 3995736 - DNA, 25 bp, Homo sapien
aggtccctgcccctatggtgttaca

SEQ ID NO: 3995737 - DNA, 25 bp, Homo sapien
taataagaaatgataattgtggctg

SEQ ID NO: 3995738 - DNA, 25 bp, Homo sapien
tgtggtcaacacagacaaggtccct

SEQ ID NO: 3995739 - DNA, 25 bp, Homo sapien
ttaagcactagagacctcgctgtgg

SEQ ID NO: 3995740 - DNA, 25 bp, Homo sapien
tataaactgatagcaccccacctgc

SEQ ID NO: 3995741 - DNA, 25 bp, Homo sapien
ttataaactgatagcaccccacctg

SEQ ID NO: 3995742 - DNA, 25 bp, Homo sapien
tttataaactgatagcaccccacct

SEQ ID NO: 3995743 - DNA, 25 bp, Homo sapien
taagcctattgccataaattgtccc

SEQ ID NO: 3995744 - DNA, 25 bp, Homo sapien
tttctaaaaccagtgtgaagggcac

SEQ ID NO: 3995745 - DNA, 25 bp, Homo sapien
ttctctcgagcgcagcaccatagat

SEQ ID NO: 3995746 - DNA, 25 bp, Homo sapien
tcaatgtaaatctccagccagcctc

SEQ ID NO: 3995747 - DNA, 25 bp, Homo sapien
tacacagtggctgaatcaaaaggat

SEQ ID NO: 3995748 - DNA, 25 bp, Homo sapien
tacattaaaggttgaaagaggagag

SEQ ID NO: 3995749 - DNA, 25 bp, Homo sapien
ttttgaaccttcagacacatctata

SEQ ID NO: 3995750 - DNA, 25 bp, Homo sapien
aaaaaacactcagggattctccatt

SEQ ID NO: 3995751 - DNA, 25 bp, Homo sapien
tccgtgacagcaaaatgatccattg

SEQ ID NO: 3995752 - DNA, 25 bp, Homo sapien
tctagagcccatacacagggatgtg

SEQ ID NO: 3995753 - DNA, 25 bp, Homo sapien
cagtggtaccagtgtaaacgggcat

SEQ ID NO: 3995754 - DNA, 25 bp, Homo sapien
catgacataacgagacagtggtacc

SEQ ID NO: 3995755 - DNA, 25 bp, Homo sapien
taaggcccacaaatgagctctgaag

SEQ ID NO: 3995756 - DNA, 25 bp, Homo sapien
cacgtggaatgtgccttgactgcat

SEQ ID NO: 3995757 - DNA, 25 bp, Homo sapien
tagatggaagacacacaaactgctc

SEQ ID NO: 3995758 - DNA, 25 bp, Homo sapien
tgccacggtccagaggaaaaacatc

SEQ ID NO: 3995759 - DNA, 25 bp, Homo sapien
cactctcagcaggaggtttctatta

SEQ ID NO: 3995760 - DNA, 25 bp, Homo sapien
ccttaggaaacttactattatcatt

SEQ ID NO: 3995761 - DNA, 25 bp, Homo sapien
cattgcccaattgcattagtccatt

SEQ ID NO: 3995762 - DNA, 25 bp, Homo sapien
aatgagatggtatttgcaaactgtc

SEQ ID NO: 3995763 - DNA, 25 bp, Homo sapien
cagaaccagaatttagggtgtggca

SEQ ID NO: 3995764 - DNA, 25 bp, Homo sapien
cacctattctaatgggaagggagtc

SEQ ID NO: 3995765 - DNA, 25 bp, Homo sapien
gaagggaagacatgatcatcttaat

SEQ ID NO: 3995766 - DNA, 25 bp, Homo sapien
tgactgaatagtaaaacccagaacc

SEQ ID NO: 3995767 - DNA, 25 bp, Homo sapien
tggcttagttcacctcccttggaaa

SEQ ID NO: 3995768 - DNA, 25 bp, Homo sapien
tgaccccgaaagctaacaacaagcg

SEQ ID NO: 3995769 - DNA, 25 bp, Homo sapien
gaaggatatcagcagtgaccccgaa

SEQ ID NO: 3995770 - DNA, 25 bp, Homo sapien
gaaacactctggaccatcaactggg

SEQ ID NO: 3995771 - DNA, 25 bp, Homo sapien
ccgcctgagatgtccggcttaaatt

SEQ ID NO: 3995772 - DNA, 25 bp, Homo sapien
aatttctcatcccacaaatcctgtc

SEQ ID NO: 3995773 - DNA, 25 bp, Homo sapien
cagtatggccgcctgagatgtccgg

SEQ ID NO: 3995774 - DNA, 25 bp, Homo sapien
gagatgtccggcttaaatttctaag

SEQ ID NO: 3995775 - DNA, 25 bp, Homo sapien
aagatcagtgtcagccaagatatgc

SEQ ID NO: 3995776 - DNA, 25 bp, Homo sapien
gataggaccaagatcagtgtcagcc

SEQ ID NO: 3995777 - DNA, 25 bp, Homo sapien
taagagattgccactaggataggac

SEQ ID NO: 3995778 - DNA, 25 bp, Homo sapien
tcagccaagatatgctgtaaaaatc

SEQ ID NO: 3995779 - DNA, 25 bp, Homo sapien
tgcacgcgtcacaaactggcctgct

SEQ ID NO: 3995780 - DNA, 25 bp, Homo sapien
tggaagaagcaatctgaagtgtgca

SEQ ID NO: 3995781 - DNA, 25 bp, Homo sapien
ggagcctactcctatgagaaacctg

SEQ ID NO: 3995782 - DNA, 25 bp, Homo sapien
actggcctgctgatcggaatgtctg

SEQ ID NO: 3995783 - DNA, 25 bp, Homo sapien
cctcagtctaatgggtaactgagac

SEQ ID NO: 3995784 - DNA, 25 bp, Homo sapien
gtctcgacctcttcgggttcaggtg

SEQ ID NO: 3995785 - DNA, 25 bp, Homo sapien
ccgtacctggcaagcatcttttcat

SEQ ID NO: 3995786 - DNA, 25 bp, Homo sapien
tgcagtctcgacctcttcgggttca

SEQ ID NO: 3995787 - DNA, 25 bp, Homo sapien
gaagctgggatagctcctctcctga

SEQ ID NO: 3995788 - DNA, 25 bp, Homo sapien
gaaagaggctaaactgtcacagact

SEQ ID NO: 3995789 - DNA, 25 bp, Homo sapien
gaaaacaagtgcaccgagctgtaga

SEQ ID NO: 3995790 - DNA, 25 bp, Homo sapien
agtacacagtgcaacaaactcaggg

SEQ ID NO: 3995791 - DNA, 25 bp, Homo sapien
tgttttcggacttcaagagtcagga

SEQ ID NO: 3995792 - DNA, 25 bp, Homo sapien
ggcttagtgctacagctccgtccac

SEQ ID NO: 3995793 - DNA, 25 bp, Homo sapien
agtcaatcaagactctgcagccagg

SEQ ID NO: 3995794 - DNA, 25 bp, Homo sapien
gaggcccattacaggagttattcag

SEQ ID NO: 3995795 - DNA, 25 bp, Homo sapien
catgcccggcccaagatggtaaact

SEQ ID NO: 3995796 - DNA, 25 bp, Homo sapien
tgaatccagggaaccaaatggccac

SEQ ID NO: 3995797 - DNA, 25 bp, Homo sapien
tgaacaggtatcagggaccacttga

SEQ ID NO: 3995798 - DNA, 25 bp, Homo sapien
gagccttggatgtttcaacctggga

SEQ ID NO: 3995799 - DNA, 25 bp, Homo sapien
caccagttacagtatatgtagtaat

SEQ ID NO: 3995800 - DNA, 25 bp, Homo sapien
accagttacagtatatgtagtaatt

SEQ ID NO: 3995801 - DNA, 25 bp, Homo sapien
tcaccagttacagtatatgtagtaa

SEQ ID NO: 3995802 - DNA, 25 bp, Homo sapien
gaaagttccatggagcaaagcgaac

SEQ ID NO: 3995803 - DNA, 25 bp, Homo sapien
cagggagtgcgcaaggaaagttcca

SEQ ID NO: 3995804 - DNA, 25 bp, Homo sapien
gcaaagcgaactcgggtataggcct

SEQ ID NO: 3995805 - DNA, 25 bp, Homo sapien
gggtagaacagggagtgcgcaagga

SEQ ID NO: 3995806 - DNA, 25 bp, Homo sapien
caagcgtgtgccatcatgcccgact

SEQ ID NO: 3995807 - DNA, 25 bp, Homo sapien
tgcaatggagtgatctccactcacc

SEQ ID NO: 3995808 - DNA, 25 bp, Homo sapien
caatggagtgatctccactcaccgc

SEQ ID NO: 3995809 - DNA, 25 bp, Homo sapien
tacaagcgtgtgccatcatgcccga

SEQ ID NO: 3995810 - DNA, 25 bp, Homo sapien
tgggaaaggcgccagactgtgggac

SEQ ID NO: 3995811 - DNA, 25 bp, Homo sapien
tctgacagcaaggtctcaactccac

SEQ ID NO: 3995812 - DNA, 25 bp, Homo sapien
gacctgccagataaaaggcttcacc

SEQ ID NO: 3995813 - DNA, 25 bp, Homo sapien
caggcctgaaaggttgggctcaagc

SEQ ID NO: 3995814 - DNA, 25 bp, Homo sapien
tggactgtggacatacgattgtttt

SEQ ID NO: 3995815 - DNA, 25 bp, Homo sapien
ggacatacgattgtttttcctcagt

SEQ ID NO: 3995816 - DNA, 25 bp, Homo sapien
tgtggacatacgattgtttttcctc

SEQ ID NO: 3995817 - DNA, 25 bp, Homo sapien
ttctggactgtggacatacgattgt

SEQ ID NO: 3995818 - DNA, 25 bp, Homo sapien
tcagtgccagcaggacaggtatcac

SEQ ID NO: 3995819 - DNA, 25 bp, Homo sapien
ggatataatcctcagtgccagcagg

SEQ ID NO: 3995820 - DNA, 25 bp, Homo sapien
ccagcaggacaggtatcacccttac

SEQ ID NO: 3995821 - DNA, 25 bp, Homo sapien
tgccagcaggacaggtatcaccctt

SEQ ID NO: 3995822 - DNA, 25 bp, Homo sapien
ataatcatcagcagtcccttggaca

SEQ ID NO: 3995823 - DNA, 25 bp, Homo sapien
agtatcattgcaggcaaatttcttt

SEQ ID NO: 3995824 - DNA, 25 bp, Homo sapien
cctgccatttctctgttggatgaat

SEQ ID NO: 3995825 - DNA, 25 bp, Homo sapien
tttttatcataatcatcagcagtcc

SEQ ID NO: 3995826 - DNA, 25 bp, Homo sapien
taaataccaccatgtaaaaccttga

SEQ ID NO: 3995827 - DNA, 25 bp, Homo sapien
actggccccttgctagccttgtgtg

SEQ ID NO: 3995828 - DNA, 25 bp, Homo sapien
tgcactcttgctccataacggcttg

SEQ ID NO: 3995829 - DNA, 25 bp, Homo sapien
agaagggacaagctgcatgtgctag

SEQ ID NO: 3995830 - DNA, 25 bp, Homo sapien
cattatctcccactgtgccgttgga

SEQ ID NO: 3995831 - DNA, 25 bp, Homo sapien
gtagcactctacgaaatatttttgg

SEQ ID NO: 3995832 - DNA, 25 bp, Homo sapien
gactattttaggaaagtggtcacca

SEQ ID NO: 3995833 - DNA, 25 bp, Homo sapien
caaattattagaggcattcggacca

SEQ ID NO: 3995834 - DNA, 25 bp, Homo sapien
atgcatcaagttctcaaaggcattc

SEQ ID NO: 3995835 - DNA, 25 bp, Homo sapien
ggcttgagtccaatgagagatccag

SEQ ID NO: 3995836 - DNA, 25 bp, Homo sapien
gtgaggagtcatgcaaattttatgc

SEQ ID NO: 3995837 - DNA, 25 bp, Homo sapien
agatccagaaaggagtgaggagtca

SEQ ID NO: 3995838 - DNA, 25 bp, Homo sapien
cgttaacctttgtggtgtgagccat

SEQ ID NO: 3995839 - DNA, 25 bp, Homo sapien
ggcactgccgttaacctttgtggtg

SEQ ID NO: 3995840 - DNA, 25 bp, Homo sapien
tgaggcactgccgttaacctttgtg

SEQ ID NO: 3995841 - DNA, 25 bp, Homo sapien
actgccgttaacctttgtggtgtga

SEQ ID NO: 3995842 - DNA, 25 bp, Homo sapien
tgaaagtcacaaatcggagagcttt

SEQ ID NO: 3995843 - DNA, 25 bp, Homo sapien
aacctcaatgcccagacctgttagg

SEQ ID NO: 3995844 - DNA, 25 bp, Homo sapien
cagtccagataactgtctgcagtaa

SEQ ID NO: 3995845 - DNA, 25 bp, Homo sapien
gcttatagatgtacatgggtcatgg

SEQ ID NO: 3995846 - DNA, 25 bp, Homo sapien
gaaaagtcacggagggtacccatga

SEQ ID NO: 3995847 - DNA, 25 bp, Homo sapien
tacctacgtgcttatggcaggctcc

SEQ ID NO: 3995848 - DNA, 25 bp, Homo sapien
tctgtttgagaaacgctcctgccca

SEQ ID NO: 3995849 - DNA, 25 bp, Homo sapien
aacaccaggtgggttctagccagac

SEQ ID NO: 3995850 - DNA, 25 bp, Homo sapien
gcaagacttcaaaacccagggtgtc

SEQ ID NO: 3995851 - DNA, 25 bp, Homo sapien
cattatgactggctcaaggcttggg

SEQ ID NO: 3995852 - DNA, 25 bp, Homo sapien
gcttataaggcgaagctggctacag

SEQ ID NO: 3995853 - DNA, 25 bp, Homo sapien
tgattaaccacacaggcaagacttc

SEQ ID NO: 3995854 - DNA, 25 bp, Homo sapien
taacacagcgaatctccctgttggg

SEQ ID NO: 3995855 - DNA, 25 bp, Homo sapien
gcaacagctcgagttcttaacacag

SEQ ID NO: 3995856 - DNA, 25 bp, Homo sapien
tcaaataggctggtactcactggaa

SEQ ID NO: 3995857 - DNA, 25 bp, Homo sapien
tatacctttgatgggctcagctagc

SEQ ID NO: 3995858 - DNA, 25 bp, Homo sapien
gtcaatccacctaaaaatgctgagg

SEQ ID NO: 3995859 - DNA, 25 bp, Homo sapien
aataaatcggctgcaccgtgttggg

SEQ ID NO: 3995860 - DNA, 25 bp, Homo sapien
ggtgcgtccctgagttgaataaagc

SEQ ID NO: 3995861 - DNA, 25 bp, Homo sapien
caaaaaacatattcgtggtgcgtcc

SEQ ID NO: 3995862 - DNA, 25 bp, Homo sapien
gaagctgtataaagtgtggtgctaa

SEQ ID NO: 3995863 - DNA, 25 bp, Homo sapien
ggctcataggtaacaatcattgcac

SEQ ID NO: 3995864 - DNA, 25 bp, Homo sapien
gggcagacttggaagctgtataaag

SEQ ID NO: 3995865 - DNA, 25 bp, Homo sapien
ttgcacttatgacgtgatgctgcca

SEQ ID NO: 3995866 - DNA, 25 bp, Homo sapien
gagaacactcagctccagcacgtgt

SEQ ID NO: 3995867 - DNA, 25 bp, Homo sapien
ctccagcacgtgtgtgatgcttggg

SEQ ID NO: 3995868 - DNA, 25 bp, Homo sapien
cagctccagcacgtgtgtgatgctt

SEQ ID NO: 3995869 - DNA, 25 bp, Homo sapien
cactcagctccagcacgtgtgtgat

SEQ ID NO: 3995870 - DNA, 25 bp, Homo sapien
ctgtagtcatggacctccggtaagg

SEQ ID NO: 3995871 - DNA, 25 bp, Homo sapien
ctccggtaaggcctactgtgatttt

SEQ ID NO: 3995872 - DNA, 25 bp, Homo sapien
tagtcatggacctccggtaaggcct

SEQ ID NO: 3995873 - DNA, 25 bp, Homo sapien
ggacctccggtaaggcctactgtga

SEQ ID NO: 3995874 - DNA, 25 bp, Homo sapien
caaatggcccctgacaataatcttc

SEQ ID NO: 3995875 - DNA, 25 bp, Homo sapien
ttaagacagccacaacatacctggt

SEQ ID NO: 3995876 - DNA, 25 bp, Homo sapien
tatctggttgtgctgctaacatgcc

SEQ ID NO: 3995877 - DNA, 25 bp, Homo sapien
ggaacccaaggcacttaacagacaa

SEQ ID NO: 3995878 - DNA, 25 bp, Homo sapien
gaaccttcagttcttacacttaaca

SEQ ID NO: 3995879 - DNA, 25 bp, Homo sapien
ttaacaggattactgcagcaacact

SEQ ID NO: 3995880 - DNA, 25 bp, Homo sapien
cttcagttcttacacttaacaggat

SEQ ID NO: 3995881 - DNA, 25 bp, Homo sapien
ttcttacacttaacaggattactgc

SEQ ID NO: 3995882 - DNA, 25 bp, Homo sapien
gatttttcaaactatcctcatactc

SEQ ID NO: 3995883 - DNA, 25 bp, Homo sapien
tactcttcaggcatatgaaatgctg

SEQ ID NO: 3995884 - DNA, 25 bp, Homo sapien
caggcatatgaaatgctgacctaga

SEQ ID NO: 3995885 - DNA, 25 bp, Homo sapien
aaactatcctcatactcttcaggca

SEQ ID NO: 3995886 - DNA, 25 bp, Homo sapien
ttcctgctgatgtaaggaagatgca

SEQ ID NO: 3995887 - DNA, 25 bp, Homo sapien
ctgttcctgctgatgtaaggaagat

SEQ ID NO: 3995888 - DNA, 25 bp, Homo sapien
gttcctgctgatgtaaggaagatgc

SEQ ID NO: 3995889 - DNA, 25 bp, Homo sapien
tgttcctgctgatgtaaggaagatg

SEQ ID NO: 3995890 - DNA, 25 bp, Homo sapien
tgtgtgttcttcactcccgctttgc

SEQ ID NO: 3995891 - DNA, 25 bp, Homo sapien
gcgaggtctccctccggctgcagtg

SEQ ID NO: 3995892 - DNA, 25 bp, Homo sapien
tcagctgttccgcattccctgtttt

SEQ ID NO: 3995893 - DNA, 25 bp, Homo sapien
catctctacagagaggctctgtttt

SEQ ID NO: 3995894 - DNA, 25 bp, Homo sapien
tcgtgtaaacttggccggccacgct

SEQ ID NO: 3995895 - DNA, 25 bp, Homo sapien
taaacttggccggccacgctcggat

SEQ ID NO: 3995896 - DNA, 25 bp, Homo sapien
gtgtaaacttggccggccacgctcg

SEQ ID NO: 3995897 - DNA, 25 bp, Homo sapien
tcggatgccataggctgagctttca

SEQ ID NO: 3995898 - DNA, 25 bp, Homo sapien
tcgctccagctcagccggacccggc

SEQ ID NO: 3995899 - DNA, 25 bp, Homo sapien
gcctcgggcgccctcgatcctcacc

SEQ ID NO: 3995900 - DNA, 25 bp, Homo sapien
gccctcgatcctcaccccgtgagga

SEQ ID NO: 3995901 - DNA, 25 bp, Homo sapien
cctcaccccgtgaggagaagtttca

SEQ ID NO: 3995902 - DNA, 25 bp, Homo sapien
agcactgccgaacatttacacccga

SEQ ID NO: 3995903 - DNA, 25 bp, Homo sapien
ttgaagtaacttccagcaaacctgg

SEQ ID NO: 3995904 - DNA, 25 bp, Homo sapien
gcaaacctggttgctgtctgccctc

SEQ ID NO: 3995905 - DNA, 25 bp, Homo sapien
tttacacccgacagtgtgaatgctg

SEQ ID NO: 3995906 - DNA, 25 bp, Homo sapien
cttgtcgctgacctgggctatgcat

SEQ ID NO: 3995907 - DNA, 25 bp, Homo sapien
cagctgtcgattttctgggatggta

SEQ ID NO: 3995908 - DNA, 25 bp, Homo sapien
gaagtccatataccttgctgaccag

SEQ ID NO: 3995909 - DNA, 25 bp, Homo sapien
ttctgggcatggcacggacggcttc

SEQ ID NO: 3995910 - DNA, 25 bp, Homo sapien
gacggcttccgcctcttctggatgt

SEQ ID NO: 3995911 - DNA, 25 bp, Homo sapien
tggagcctctgtggtacacgacgat

SEQ ID NO: 3995912 - DNA, 25 bp, Homo sapien
ttcaggcgtttcagagcaatggcca

SEQ ID NO: 3995913 - DNA, 25 bp, Homo sapien
cagacattgatctgggatgcagccc

SEQ ID NO: 3995914 - DNA, 25 bp, Homo sapien
gatgtcgttcatgttctcctcggca

SEQ ID NO: 3995915 - DNA, 25 bp, Homo sapien
cttacattcaggctggcaggagatg

SEQ ID NO: 3995916 - DNA, 25 bp, Homo sapien
attcaggctggcaggagatgcctac

SEQ ID NO: 3995917 - DNA, 25 bp, Homo sapien
tacattcaggctggcaggagatgcc

SEQ ID NO: 3995918 - DNA, 25 bp, Homo sapien
cattcaggctggcaggagatgccta

SEQ ID NO: 3995919 - DNA, 25 bp, Homo sapien
tcctttggagagcagacggtcacgt

SEQ ID NO: 3995920 - DNA, 25 bp, Homo sapien
tcaatgtagtgatccaggccagtca

SEQ ID NO: 3995921 - DNA, 25 bp, Homo sapien
tgaggttccccgaaagcttctgcca

SEQ ID NO: 3995922 - DNA, 25 bp, Homo sapien
caattcataggcagctcaggcccta

SEQ ID NO: 3995923 - DNA, 25 bp, Homo sapien
ttcttccagcgttagtcctcagcca

SEQ ID NO: 3995924 - DNA, 25 bp, Homo sapien
ggccagtgaggctaccagataataa

SEQ ID NO: 3995925 - DNA, 25 bp, Homo sapien
ttaccaaactagcagccccagaaga

SEQ ID NO: 3995926 - DNA, 25 bp, Homo sapien
gataataagcatcagcagaggtgct

SEQ ID NO: 3995927 - DNA, 25 bp, Homo sapien
caggtcttttcagtatgagagatga

SEQ ID NO: 3995928 - DNA, 25 bp, Homo sapien
catagttatgggaatgacttcgagt

SEQ ID NO: 3995929 - DNA, 25 bp, Homo sapien
ctaagagtataaatacggaagctga

SEQ ID NO: 3995930 - DNA, 25 bp, Homo sapien
cctagaaacgtattttgtaatgact

SEQ ID NO: 3995931 - DNA, 25 bp, Homo sapien
gttgtttctacgctctcctctcaga

SEQ ID NO: 3995932 - DNA, 25 bp, Homo sapien
tgctaatacatgtgtggtcaccaac

SEQ ID NO: 3995933 - DNA, 25 bp, Homo sapien
ggccatggaagtccacaatctccct

SEQ ID NO: 3995934 - DNA, 25 bp, Homo sapien
tacagaataatcctgctgaagggac

SEQ ID NO: 3995935 - DNA, 25 bp, Homo sapien
gatcatgccccacgaaaatgcactg

SEQ ID NO: 3995936 - DNA, 25 bp, Homo sapien
gacccaggtgcttgtgatcatgccc

SEQ ID NO: 3995937 - DNA, 25 bp, Homo sapien
tgtatacgcctgtgtaaccacctct

SEQ ID NO: 3995938 - DNA, 25 bp, Homo sapien
cagatagtgtcacccaggaatacca

SEQ ID NO: 3995939 - DNA, 25 bp, Homo sapien
gctttccttctgaggtccccacttc

SEQ ID NO: 3995940 - DNA, 25 bp, Homo sapien
cccacacttacaggtatatcccaaa

SEQ ID NO: 3995941 - DNA, 25 bp, Homo sapien
cacacttacaggtatatcccaaata

SEQ ID NO: 3995942 - DNA, 25 bp, Homo sapien
tgaaggcccccacacttacaggtat

SEQ ID NO: 3995943 - DNA, 25 bp, Homo sapien
gtcaggttcactggagacagcgtac

SEQ ID NO: 3995944 - DNA, 25 bp, Homo sapien
tgtcaggttcactggagacagcgta

SEQ ID NO: 3995945 - DNA, 25 bp, Homo sapien
ctgtcaggttcactggagacagcgt

SEQ ID NO: 3995946 - DNA, 25 bp, Homo sapien
tagaggccagcggcgatctggtcgt

SEQ ID NO: 3995947 - DNA, 25 bp, Homo sapien
atagaggccagcggcgatctggtcg

SEQ ID NO: 3995948 - DNA, 25 bp, Homo sapien
catagaggccagcggcgatctggtc

SEQ ID NO: 3995949 - DNA, 25 bp, Homo sapien
tcacgagcctcaaggaccatttacg

SEQ ID NO: 3995950 - DNA, 25 bp, Homo sapien
tatgcctgccagaacgtgaataaaa

SEQ ID NO: 3995951 - DNA, 25 bp, Homo sapien
taacctgaaaaaacttatgcctgcc

SEQ ID NO: 3995952 - DNA, 25 bp, Homo sapien
tatttaaagatattctgggcctacc

SEQ ID NO: 3995953 - DNA, 25 bp, Homo sapien
tcagtgtactttcattgtttgtaca

SEQ ID NO: 3995954 - DNA, 25 bp, Homo sapien
tggacttcagtgtactttcattgtt

SEQ ID NO: 3995955 - DNA, 25 bp, Homo sapien
agtgtactttcattgtttgtacatg

SEQ ID NO: 3995956 - DNA, 25 bp, Homo sapien
gatggacttcagtgtactttcattg

SEQ ID NO: 3995957 - DNA, 25 bp, Homo sapien
tcttttttgcgccatttgaatcttt

SEQ ID NO: 3995958 - DNA, 25 bp, Homo sapien
agattcttttttgcgccatttgaat

SEQ ID NO: 3995959 - DNA, 25 bp, Homo sapien
aaataatggcatctccggcttagca

SEQ ID NO: 3995960 - DNA, 25 bp, Homo sapien
gggaatctttcatcactgcgctgtg

SEQ ID NO: 3995961 - DNA, 25 bp, Homo sapien
aaaagatgacgatcgttggcccaga

SEQ ID NO: 3995962 - DNA, 25 bp, Homo sapien
gatgcaaggtgtgctcacgaagacc

SEQ ID NO: 3995963 - DNA, 25 bp, Homo sapien
tcaaaccttcaatattaactgcatg

SEQ ID NO: 3995964 - DNA, 25 bp, Homo sapien
accttcaatattaactgcatggtgc

SEQ ID NO: 3995965 - DNA, 25 bp, Homo sapien
ccttctgccattccccgagtgtctt

SEQ ID NO: 3995966 - DNA, 25 bp, Homo sapien
gacttcaaaccttcaatattaactg

SEQ ID NO: 3995967 - DNA, 25 bp, Homo sapien
taagggttacgtccactgtgcagag

SEQ ID NO: 3995968 - DNA, 25 bp, Homo sapien
tacaaaagctctgaactggccaact

SEQ ID NO: 3995969 - DNA, 25 bp, Homo sapien
gaaatcttaaagtaggctggccacc

SEQ ID NO: 3995970 - DNA, 25 bp, Homo sapien
ttaaaaggcaagtggccccaagcca

SEQ ID NO: 3995971 - DNA, 25 bp, Homo sapien
atttttcagtaagttgcatgcagac

SEQ ID NO: 3995972 - DNA, 25 bp, Homo sapien
tatctttgctggtcaaagctttggg

SEQ ID NO: 3995973 - DNA, 25 bp, Homo sapien
ttcagtaagttgcatgcagacaaca

SEQ ID NO: 3995974 - DNA, 25 bp, Homo sapien
ctggtcaaagctttggggtcattta

SEQ ID NO: 3995975 - DNA, 25 bp, Homo sapien
tcactaaggcaaccacaaactcttt

SEQ ID NO: 3995976 - DNA, 25 bp, Homo sapien
gatcactaaggcaaccacaaactct

SEQ ID NO: 3995977 - DNA, 25 bp, Homo sapien
atcactaaggcaaccacaaactctt

SEQ ID NO: 3995978 - DNA, 25 bp, Homo sapien
gttgggatcataggtgtcagccact

SEQ ID NO: 3995979 - DNA, 25 bp, Homo sapien
ccgaagtgttgggatcataggtgtc

SEQ ID NO: 3995980 - DNA, 25 bp, Homo sapien
ctcccgaagtgttgggatcataggt

SEQ ID NO: 3995981 - DNA, 25 bp, Homo sapien
ttgggatcataggtgtcagccactg

SEQ ID NO: 3995982 - DNA, 25 bp, Homo sapien
acattgtgttaagtttttgaggcca

SEQ ID NO: 3995983 - DNA, 25 bp, Homo sapien
tacattgtgttaagtttttgaggcc

SEQ ID NO: 3995984 - DNA, 25 bp, Homo sapien
ttacattgtgttaagtttttgaggc

SEQ ID NO: 3995985 - DNA, 25 bp, Homo sapien
atttacattgtgttaagtttttgag

SEQ ID NO: 3995986 - DNA, 25 bp, Homo sapien
tgtgcctggacttgaccagcaattt

SEQ ID NO: 3995987 - DNA, 25 bp, Homo sapien
aattttatttagtacagctggccct

SEQ ID NO: 3995988 - DNA, 25 bp, Homo sapien
ctgtgcctggacttgaccagcaatt

SEQ ID NO: 3995989 - DNA, 25 bp, Homo sapien
ctgccaaaacaccaagtggtcgtta

SEQ ID NO: 3995990 - DNA, 25 bp, Homo sapien
tgccaaaacaccaagtggtcgttag

SEQ ID NO: 3995991 - DNA, 25 bp, Homo sapien
ggctgacttctgactggacacgcgg

SEQ ID NO: 3995992 - DNA, 25 bp, Homo sapien
tctgactggacacgcggaaccactc

SEQ ID NO: 3995993 - DNA, 25 bp, Homo sapien
ggctggaatggctgacttctgactg

SEQ ID NO: 3995994 - DNA, 25 bp, Homo sapien
tgacttctgactggacacgcggaac

SEQ ID NO: 3995995 - DNA, 25 bp, Homo sapien
caaaagcagctatgtagtcccccac

SEQ ID NO: 3995996 - DNA, 25 bp, Homo sapien
caagttgatgacatagcggaggaca

SEQ ID NO: 3995997 - DNA, 25 bp, Homo sapien
tgccaagttgatgacatagcggagg

SEQ ID NO: 3995998 - DNA, 25 bp, Homo sapien
gttgatgacatagcggaggacatct

SEQ ID NO: 3995999 - DNA, 25 bp, Homo sapien
cgccaacatgatgggggtgtagcct

SEQ ID NO: 3996000 - DNA, 25 bp, Homo sapien
cgagggccgccaacatgatgggggt

SEQ ID NO: 3996001 - DNA, 25 bp, Homo sapien
tccccacagccgaagagttcttcca

SEQ ID NO: 3996002 - DNA, 25 bp, Homo sapien
gcggcgagggccgccaacatgatgg

SEQ ID NO: 3996003 - DNA, 25 bp, Homo sapien
caaaggaagggcataaagtaaggag

SEQ ID NO: 3996004 - DNA, 25 bp, Homo sapien
gagccaacttcattttagcgtggag

SEQ ID NO: 3996005 - DNA, 25 bp, Homo sapien
gttaaaagtcaagctgtgggcctgg

SEQ ID NO: 3996006 - DNA, 25 bp, Homo sapien
accagcttcccatgagctatgagca

SEQ ID NO: 3996007 - DNA, 25 bp, Homo sapien
tctaggtgaccgttgcagccgggct

SEQ ID NO: 3996008 - DNA, 25 bp, Homo sapien
gaaggcccttcaccatgtctatccg

SEQ ID NO: 3996009 - DNA, 25 bp, Homo sapien
gtggagccctcgtcatcctggatgt

SEQ ID NO: 3996010 - DNA, 25 bp, Homo sapien
gcttgacaatctccacgtgtccgtg

SEQ ID NO: 3996011 - DNA, 25 bp, Homo sapien
gaaagaagtcggtcagaagctctcc

SEQ ID NO: 3996012 - DNA, 25 bp, Homo sapien
cagcctatctagtcttgaaatacgg

SEQ ID NO: 3996013 - DNA, 25 bp, Homo sapien
gagtgtgaagctagtcagtccctca

SEQ ID NO: 3996014 - DNA, 25 bp, Homo sapien
tcataccagtgaaaaactccgctgg

SEQ ID NO: 3996015 - DNA, 25 bp, Homo sapien
tttgcaaagttgacatgggcataca

SEQ ID NO: 3996016 - DNA, 25 bp, Homo sapien
cttccagggcgattgagagcgcagt

SEQ ID NO: 3996017 - DNA, 25 bp, Homo sapien
ggcttttgcaaagttgacatgggca

SEQ ID NO: 3996018 - DNA, 25 bp, Homo sapien
gaagaacagcgatgtccttgtgtcc

SEQ ID NO: 3996019 - DNA, 25 bp, Homo sapien
tcaacataaaatctgtctcccgtca

SEQ ID NO: 3996020 - DNA, 25 bp, Homo sapien
gggtccaccagtctggtggatttca

SEQ ID NO: 3996021 - DNA, 25 bp, Homo sapien
tgtctcccgtcaattcctggaggaa

SEQ ID NO: 3996022 - DNA, 25 bp, Homo sapien
tcagcctatttacaaatgccaaatg

SEQ ID NO: 3996023 - DNA, 25 bp, Homo sapien
ccctgtgacataggatcttggccca

SEQ ID NO: 3996024 - DNA, 25 bp, Homo sapien
cactcagagtgaactgtggactaca

SEQ ID NO: 3996025 - DNA, 25 bp, Homo sapien
atggcgaaatatccccatgggctca

SEQ ID NO: 3996026 - DNA, 25 bp, Homo sapien
ggaacaatgccagaaccatggcgaa

SEQ ID NO: 3996027 - DNA, 25 bp, Homo sapien
gggccaggagacgtcttccttccaa

SEQ ID NO: 3996028 - DNA, 25 bp, Homo sapien
agacgtcttccttccaagcctaggg

SEQ ID NO: 3996029 - DNA, 25 bp, Homo sapien
aatcaaatgaacctcggtgggtggg

SEQ ID NO: 3996030 - DNA, 25 bp, Homo sapien
tcaatcaaatgaacctcggtgggtg

SEQ ID NO: 3996031 - DNA, 25 bp, Homo sapien
tgtgcccaggctagcagtctctgca

SEQ ID NO: 3996032 - DNA, 25 bp, Homo sapien
tgagaaccagacaccactttgtggg

SEQ ID NO: 3996033 - DNA, 25 bp, Homo sapien
cctgtgactgtacaaaacggagcag

SEQ ID NO: 3996034 - DNA, 25 bp, Homo sapien
tgagctcaggcacaatacgtataca

SEQ ID NO: 3996035 - DNA, 25 bp, Homo sapien
attttattttgaaaatatggcaaga

SEQ ID NO: 3996036 - DNA, 25 bp, Homo sapien
gaattttattttgaaaatatggcaa

SEQ ID NO: 3996037 - DNA, 25 bp, Homo sapien
gagcttaatggaattttattttgaa

SEQ ID NO: 3996038 - DNA, 25 bp, Homo sapien
tggaattttattttgaaaatatggc

SEQ ID NO: 3996039 - DNA, 25 bp, Homo sapien
tgtgctgccactgccgtaagtcaat

SEQ ID NO: 3996040 - DNA, 25 bp, Homo sapien
actgccgtaagtcaatcggctcggg

SEQ ID NO: 3996041 - DNA, 25 bp, Homo sapien
gctgccactgccgtaagtcaatcgg

SEQ ID NO: 3996042 - DNA, 25 bp, Homo sapien
tgccactgccgtaagtcaatcggct

SEQ ID NO: 3996043 - DNA, 25 bp, Homo sapien
tgtgaacacctaggatgaccgtttt

SEQ ID NO: 3996044 - DNA, 25 bp, Homo sapien
ggctttccaacacagatgactcagt

SEQ ID NO: 3996045 - DNA, 25 bp, Homo sapien
cccctgtggctttccaacacagatg

SEQ ID NO: 3996046 - DNA, 25 bp, Homo sapien
tcctgggttcattggacccctgtgg

SEQ ID NO: 3996047 - DNA, 25 bp, Homo sapien
gcatgttccaccttcagagcaggca

SEQ ID NO: 3996048 - DNA, 25 bp, Homo sapien
taaggctgttgttcatgtttgacca

SEQ ID NO: 3996049 - DNA, 25 bp, Homo sapien
gaggattcccttaacttcattagca

SEQ ID NO: 3996050 - DNA, 25 bp, Homo sapien
gcagaagagctgaaacgtccttgcg

SEQ ID NO: 3996051 - DNA, 25 bp, Homo sapien
tcatggacggttatctgcaaagact

SEQ ID NO: 3996052 - DNA, 25 bp, Homo sapien
gagcacttgcttgtggacccctctg

SEQ ID NO: 3996053 - DNA, 25 bp, Homo sapien
taactaggacggtgttgttgagcac

SEQ ID NO: 3996054 - DNA, 25 bp, Homo sapien
gccacatgacccgaatgtaactagg

SEQ ID NO: 3996055 - DNA, 25 bp, Homo sapien
gacgaagtagggtctgtccagtggc

SEQ ID NO: 3996056 - DNA, 25 bp, Homo sapien
ggacgaagtagggtctgtccagtgg

SEQ ID NO: 3996057 - DNA, 25 bp, Homo sapien
taggacgaagtagggtctgtccagt

SEQ ID NO: 3996058 - DNA, 25 bp, Homo sapien
tttaggacgaagtagggtctgtcca

SEQ ID NO: 3996059 - DNA, 25 bp, Homo sapien
tatgtttcttgaatcggcagccctg

SEQ ID NO: 3996060 - DNA, 25 bp, Homo sapien
tcagctcccacgagttgttccctgt

SEQ ID NO: 3996061 - DNA, 25 bp, Homo sapien
ctcttgcagagacggtatgtttctt

SEQ ID NO: 3996062 - DNA, 25 bp, Homo sapien
tcttgaatcggcagccctgggtcag

SEQ ID NO: 3996063 - DNA, 25 bp, Homo sapien
cattcttgtggcaagcataatgctt

SEQ ID NO: 3996064 - DNA, 25 bp, Homo sapien
tgcctttttacagttgagcttgagt

SEQ ID NO: 3996065 - DNA, 25 bp, Homo sapien
ggtgttgcccaaaatgccactctta

SEQ ID NO: 3996066 - DNA, 25 bp, Homo sapien
gagcttgagttcacagaatcccgtg

SEQ ID NO: 3996067 - DNA, 25 bp, Homo sapien
tgtcgagggcaccttcaaaggtctt

SEQ ID NO: 3996068 - DNA, 25 bp, Homo sapien
ctgtcgagggcaccttcaaaggtct

SEQ ID NO: 3996069 - DNA, 25 bp, Homo sapien
gctgtcgagggcaccttcaaaggtc

SEQ ID NO: 3996070 - DNA, 25 bp, Homo sapien
ctgagttggcaggtaaaattatggc

SEQ ID NO: 3996071 - DNA, 25 bp, Homo sapien
agagagtccagccttaccaggcaga

SEQ ID NO: 3996072 - DNA, 25 bp, Homo sapien
ggcatagtctaaaatggtcatcctg

SEQ ID NO: 3996073 - DNA, 25 bp, Homo sapien
acaatggcactttgaggagggagca

SEQ ID NO: 3996074 - DNA, 25 bp, Homo sapien
tagccgatgaacagggcgtagaccc

SEQ ID NO: 3996075 - DNA, 25 bp, Homo sapien
cagacctaggggattatttctccaa

SEQ ID NO: 3996076 - DNA, 25 bp, Homo sapien
cctaggggattatttctccaaagag

SEQ ID NO: 3996077 - DNA, 25 bp, Homo sapien
ccagacctaggggattatttctcca

SEQ ID NO: 3996078 - DNA, 25 bp, Homo sapien
ggggattatttctccaaagaggcat

SEQ ID NO: 3996079 - DNA, 25 bp, Homo sapien
gctgcttgcaaacttgcaccggctg

SEQ ID NO: 3996080 - DNA, 25 bp, Homo sapien
acttgcaccggctgcaagcatccag

SEQ ID NO: 3996081 - DNA, 25 bp, Homo sapien
ttgcaccggctgcaagcatccaggg

SEQ ID NO: 3996082 - DNA, 25 bp, Homo sapien
gcaccggctgcaagcatccagggct

SEQ ID NO: 3996083 - DNA, 25 bp, Homo sapien
ggcacgccacgcccggagtggtggg

SEQ ID NO: 3996084 - DNA, 25 bp, Homo sapien
tgggcacgccacgcccggagtggtg

SEQ ID NO: 3996085 - DNA, 25 bp, Homo sapien
cacgccacgcccggagtggtggggg

SEQ ID NO: 3996086 - DNA, 25 bp, Homo sapien
ctgggcacgccacgcccggagtggt

SEQ ID NO: 3996087 - DNA, 25 bp, Homo sapien
agggatgaacccgacggacagcgac

SEQ ID NO: 3996088 - DNA, 25 bp, Homo sapien
ggacagcgacgctccggaggaggag

SEQ ID NO: 3996089 - DNA, 25 bp, Homo sapien
tgcccctaggagaagtgcgagcact

SEQ ID NO: 3996090 - DNA, 25 bp, Homo sapien
tctctcgcctggagactgctgcgag

SEQ ID NO: 3996091 - DNA, 25 bp, Homo sapien
ttgctgaatgcctcgtcgttgggca

SEQ ID NO: 3996092 - DNA, 25 bp, Homo sapien
gcttccgacggtgtagagggcttgc

SEQ ID NO: 3996093 - DNA, 25 bp, Homo sapien
tcttgctcccggcacccaggtccga

SEQ ID NO: 3996094 - DNA, 25 bp, Homo sapien
ctgcagcgtgcgcacttgggcagcc

SEQ ID NO: 3996095 - DNA, 25 bp, Homo sapien
tggcagtcgcgccacatgcagaagc

SEQ ID NO: 3996096 - DNA, 25 bp, Homo sapien
ctctcggcgatcaggttgcacttct

SEQ ID NO: 3996097 - DNA, 25 bp, Homo sapien
tgtggcccttgagcggcgaggcgta

SEQ ID NO: 3996098 - DNA, 25 bp, Homo sapien
cgcgctgcctctcggcgatcaggtt

SEQ ID NO: 3996099 - DNA, 25 bp, Homo sapien
ctaaggctgaacccgggctcccgca

SEQ ID NO: 3996100 - DNA, 25 bp, Homo sapien
taaggctgaacccgggctcccgcac

SEQ ID NO: 3996101 - DNA, 25 bp, Homo sapien
cggcgatgtagcgtggccgggagcc

SEQ ID NO: 3996102 - DNA, 25 bp, Homo sapien
tctccacaacccaggacccgcatgg

SEQ ID NO: 3996103 - DNA, 25 bp, Homo sapien
aagcgccgccgctgtcggcaagtac

SEQ ID NO: 3996104 - DNA, 25 bp, Homo sapien
tgtcggcaagtaccgccgcatctct

SEQ ID NO: 3996105 - DNA, 25 bp, Homo sapien
tccgccgaaacacagggtgagagat

SEQ ID NO: 3996106 - DNA, 25 bp, Homo sapien
gagccgagcgaagcccgcaactctg

SEQ ID NO: 3996107 - DNA, 25 bp, Homo sapien
tcagggacccgggagcagagggaac

SEQ ID NO: 3996108 - DNA, 25 bp, Homo sapien
gggatcagacgcgtctccggcgctc

SEQ ID NO: 3996109 - DNA, 25 bp, Homo sapien
tctagcgcaataaaccctcccaatt

SEQ ID NO: 3996110 - DNA, 25 bp, Homo sapien
gagcgaagatcctgaagactcctct

SEQ ID NO: 3996111 - DNA, 25 bp, Homo sapien
aattctgttggaacgcgggctctgg

SEQ ID NO: 3996112 - DNA, 25 bp, Homo sapien
gcgggagcgaagatcctgaagactc

SEQ ID NO: 3996113 - DNA, 25 bp, Homo sapien
cactgcactcagtcatgaggcacgg

SEQ ID NO: 3996114 - DNA, 25 bp, Homo sapien
agctcggccgcactgggcagtggga

SEQ ID NO: 3996115 - DNA, 25 bp, Homo sapien
gcacgggttactgccattgttctct

SEQ ID NO: 3996116 - DNA, 25 bp, Homo sapien
gcggtggctgagaggtgccactgca

SEQ ID NO: 3996117 - DNA, 25 bp, Homo sapien
tcttcctgtgaagacccatggctgc

SEQ ID NO: 3996118 - DNA, 25 bp, Homo sapien
tttcttcctgtgaagacccatggct

SEQ ID NO: 3996119 - DNA, 25 bp, Homo sapien
cacatccagcattgacactgatccg

SEQ ID NO: 3996120 - DNA, 25 bp, Homo sapien
gacactgatccgtcactggcctttc

SEQ ID NO: 3996121 - DNA, 25 bp, Homo sapien
aaacatacgacacaatgtgtttccc

SEQ ID NO: 3996122 - DNA, 25 bp, Homo sapien
gacacaatgtgtttcccaactggcg

SEQ ID NO: 3996123 - DNA, 25 bp, Homo sapien
cgtgtgctctctcactgtgtgctct

SEQ ID NO: 3996124 - DNA, 25 bp, Homo sapien
tgtttcccaactggcgtgtgctctc

SEQ ID NO: 3996125 - DNA, 25 bp, Homo sapien
aactccagggggatgctgctgagta

SEQ ID NO: 3996126 - DNA, 25 bp, Homo sapien
gcaagtgacactgatgacacagatg

SEQ ID NO: 3996127 - DNA, 25 bp, Homo sapien
taggaatatgtgagtcaaagaactc

SEQ ID NO: 3996128 - DNA, 25 bp, Homo sapien
caaaccaccaagtaactaggaatat

SEQ ID NO: 3996129 - DNA, 25 bp, Homo sapien
gttaataacacagcacttacagaga

SEQ ID NO: 3996130 - DNA, 25 bp, Homo sapien
gatttcctaagtgagattgtacata

SEQ ID NO: 3996131 - DNA, 25 bp, Homo sapien
tcactatataaccacaaagatgact

SEQ ID NO: 3996132 - DNA, 25 bp, Homo sapien
tgtaccaagatacaaaccacctggc

SEQ ID NO: 3996133 - DNA, 25 bp, Homo sapien
caagacacaaacagcatgacagaag

SEQ ID NO: 3996134 - DNA, 25 bp, Homo sapien
gctgggcttgttagctaaaatgtct

SEQ ID NO: 3996135 - DNA, 25 bp, Homo sapien
atctaactggcccacaactatagtc

SEQ ID NO: 3996136 - DNA, 25 bp, Homo sapien
aatgactacaaagagccatgctggg

SEQ ID NO: 3996137 - DNA, 25 bp, Homo sapien
acacatgcacgtgtctcaaaatctt

SEQ ID NO: 3996138 - DNA, 25 bp, Homo sapien
ggcttttaaacaccggacgcagcta

SEQ ID NO: 3996139 - DNA, 25 bp, Homo sapien
cctgaaggctctggtaacttgggat

SEQ ID NO: 3996140 - DNA, 25 bp, Homo sapien
tccagcagttcaaaagccctgaagg

SEQ ID NO: 3996141 - DNA, 25 bp, Homo sapien
atacaggaagacccataaacttcca

SEQ ID NO: 3996142 - DNA, 25 bp, Homo sapien
catacaggaagacccataaacttcc

SEQ ID NO: 3996143 - DNA, 25 bp, Homo sapien
tacaggaagacccataaacttccat

SEQ ID NO: 3996144 - DNA, 25 bp, Homo sapien
tagtaggtggagtctgaaaccaggt

SEQ ID NO: 3996145 - DNA, 25 bp, Homo sapien
aggccccgaaggctgttcttcacag

SEQ ID NO: 3996146 - DNA, 25 bp, Homo sapien
aacagagacggctggtagaagctgc

SEQ ID NO: 3996147 - DNA, 25 bp, Homo sapien
tgtctgaccaggcacataaggtccg

SEQ ID NO: 3996148 - DNA, 25 bp, Homo sapien
gctaaagggcattattgacagagta

SEQ ID NO: 3996149 - DNA, 25 bp, Homo sapien
gcagccaacctttgaggctaaaggg

SEQ ID NO: 3996150 - DNA, 25 bp, Homo sapien
tgtgatctgcctgtgcccaactggt

SEQ ID NO: 3996151 - DNA, 25 bp, Homo sapien
gcacatgcatgtggctttcacacaa

SEQ ID NO: 3996152 - DNA, 25 bp, Homo sapien
ttcccaaggtgcaaattcatcacgc

SEQ ID NO: 3996153 - DNA, 25 bp, Homo sapien
ccatacagattatgacctgtttcct

SEQ ID NO: 3996154 - DNA, 25 bp, Homo sapien
cacccagaaggctttacccagcatt

SEQ ID NO: 3996155 - DNA, 25 bp, Homo sapien
aattcatcacgcagattactgccac

SEQ ID NO: 3996156 - DNA, 25 bp, Homo sapien
cagctcaacagtgaccgaattcctt

SEQ ID NO: 3996157 - DNA, 25 bp, Homo sapien
aaaatgcacccaggttgggtccagc

SEQ ID NO: 3996158 - DNA, 25 bp, Homo sapien
caaacttggagaatgaaagactgac

SEQ ID NO: 3996159 - DNA, 25 bp, Homo sapien
gaaagactgacctctattcctagcg

SEQ ID NO: 3996160 - DNA, 25 bp, Homo sapien
ctagaccagcatgagggtgttccca

SEQ ID NO: 3996161 - DNA, 25 bp, Homo sapien
cataggcatggctaagacttgacaa

SEQ ID NO: 3996162 - DNA, 25 bp, Homo sapien
tacctgacagcagaacctacttggg

SEQ ID NO: 3996163 - DNA, 25 bp, Homo sapien
catggctgtcataaaaaggagcgga

SEQ ID NO: 3996164 - DNA, 25 bp, Homo sapien
agccatagcacccggccacatgggt

SEQ ID NO: 3996165 - DNA, 25 bp, Homo sapien
caaatgcataaaggagtctctaacg

SEQ ID NO: 3996166 - DNA, 25 bp, Homo sapien
cttgagagtctctagcacagtgcca

SEQ ID NO: 3996167 - DNA, 25 bp, Homo sapien
acagtgccaggcacggagcagccac

SEQ ID NO: 3996168 - DNA, 25 bp, Homo sapien
tgctttctcttaggtggtcctgcta

SEQ ID NO: 3996169 - DNA, 25 bp, Homo sapien
tctcttaggtggtcctgctatggaa

SEQ ID NO: 3996170 - DNA, 25 bp, Homo sapien
ctatggaatgccctccacttccctc

SEQ ID NO: 3996171 - DNA, 25 bp, Homo sapien
ttaggtggtcctgctatggaatgcc

SEQ ID NO: 3996172 - DNA, 25 bp, Homo sapien
gcttcactggaggctctaagtaatg

SEQ ID NO: 3996173 - DNA, 25 bp, Homo sapien
taagaatgcatcctgtactgggagc

SEQ ID NO: 3996174 - DNA, 25 bp, Homo sapien
gagctcattgcatggcggttctcca

SEQ ID NO: 3996175 - DNA, 25 bp, Homo sapien
gctcgccctggcttccgggtaagag

SEQ ID NO: 3996176 - DNA, 25 bp, Homo sapien
ttccgggtaagagggagcatcctca

SEQ ID NO: 3996177 - DNA, 25 bp, Homo sapien
tccctgcagccacgccttctctcat

SEQ ID NO: 3996178 - DNA, 25 bp, Homo sapien
tatccctgcagccacgccttctctc

SEQ ID NO: 3996179 - DNA, 25 bp, Homo sapien
ttcactatccctgcagccacgcctt

SEQ ID NO: 3996180 - DNA, 25 bp, Homo sapien
ctttcactatccctgcagccacgcc

SEQ ID NO: 3996181 - DNA, 25 bp, Homo sapien
tggcacttcaggcactgcacagatg

SEQ ID NO: 3996182 - DNA, 25 bp, Homo sapien
tcaggcactgcacagatgctggatg

SEQ ID NO: 3996183 - DNA, 25 bp, Homo sapien
atgctggatggggcacctcccttac

SEQ ID NO: 3996184 - DNA, 25 bp, Homo sapien
cacttcaggcactgcacagatgctg

SEQ ID NO: 3996185 - DNA, 25 bp, Homo sapien
ttgtgtgaatctcaactactgccag

SEQ ID NO: 3996186 - DNA, 25 bp, Homo sapien
tgtaaacttgcagacctggacgtac

SEQ ID NO: 3996187 - DNA, 25 bp, Homo sapien
cagaaaggacgtattccccaatctt

SEQ ID NO: 3996188 - DNA, 25 bp, Homo sapien
gtacacacccattagcacagaaagg

SEQ ID NO: 3996189 - DNA, 25 bp, Homo sapien
agctaacatagaatccagctccggc

SEQ ID NO: 3996190 - DNA, 25 bp, Homo sapien
ctcctggaacatctaacagaaacac

SEQ ID NO: 3996191 - DNA, 25 bp, Homo sapien
tcctggaacatctaacagaaacaca

SEQ ID NO: 3996192 - DNA, 25 bp, Homo sapien
aaagaagctaacatagaatccagct

SEQ ID NO: 3996193 - DNA, 25 bp, Homo sapien
ttgaaagctaccagacacccagatg

SEQ ID NO: 3996194 - DNA, 25 bp, Homo sapien
cacccagatgtcaaagagttttcaa

SEQ ID NO: 3996195 - DNA, 25 bp, Homo sapien
tcgtttttcccagtagttcatgtcc

SEQ ID NO: 3996196 - DNA, 25 bp, Homo sapien
gatactgacttccacagactctagg

SEQ ID NO: 3996197 - DNA, 25 bp, Homo sapien
tgtcagcaatggtgatgctccagac

SEQ ID NO: 3996198 - DNA, 25 bp, Homo sapien
ccccaaactcagtcagttgtgggaa

SEQ ID NO: 3996199 - DNA, 25 bp, Homo sapien
aactcagtcagttgtgggaactttc

SEQ ID NO: 3996200 - DNA, 25 bp, Homo sapien
aatggtgatgctccagactgctccc

SEQ ID NO: 3996201 - DNA, 25 bp, Homo sapien
aagatgttagtgtactgctcttgtg

SEQ ID NO: 3996202 - DNA, 25 bp, Homo sapien
gaagatgttagtgtactgctcttgt

SEQ ID NO: 3996203 - DNA, 25 bp, Homo sapien
gatgttagtgtactgctcttgtgct

SEQ ID NO: 3996204 - DNA, 25 bp, Homo sapien
tgggcctgtttccagttagcagctg

SEQ ID NO: 3996205 - DNA, 25 bp, Homo sapien
cctctcctcatttagccaacttggg

SEQ ID NO: 3996206 - DNA, 25 bp, Homo sapien
aaggaataggtatgtgttctcccaa

SEQ ID NO: 3996207 - DNA, 25 bp, Homo sapien
gagatgccccgggagatgccctctc

SEQ ID NO: 3996208 - DNA, 25 bp, Homo sapien
tgagagaattactctccccgtttaa

SEQ ID NO: 3996209 - DNA, 25 bp, Homo sapien
tcctgtgcaagctgtcaagggcagc

SEQ ID NO: 3996210 - DNA, 25 bp, Homo sapien
actgattaggctgactctggcgtgc

SEQ ID NO: 3996211 - DNA, 25 bp, Homo sapien
tgtgcaagctgtcaagggcagcact

SEQ ID NO: 3996212 - DNA, 25 bp, Homo sapien
ggcttcttgtacaacaataatggtg

SEQ ID NO: 3996213 - DNA, 25 bp, Homo sapien
tctgccacggcttcttgtacaacaa

SEQ ID NO: 3996214 - DNA, 25 bp, Homo sapien
tacaacaataatggtgaaagggtac

SEQ ID NO: 3996215 - DNA, 25 bp, Homo sapien
tgtacaacaataatggtgaaagggt

SEQ ID NO: 3996216 - DNA, 25 bp, Homo sapien
aagctgctgggctccgacgcaggct

SEQ ID NO: 3996217 - DNA, 25 bp, Homo sapien
cctcgatgacgggagtgactgtgaa

SEQ ID NO: 3996218 - DNA, 25 bp, Homo sapien
ttgttactaataggagagctgctcg

SEQ ID NO: 3996219 - DNA, 25 bp, Homo sapien
gacgcaggctcacattcaagcactg

SEQ ID NO: 3996220 - DNA, 25 bp, Homo sapien
catgcagatggtagtcacggaccct

SEQ ID NO: 3996221 - DNA, 25 bp, Homo sapien
gttactccaagtgaaccgccatcgg

SEQ ID NO: 3996222 - DNA, 25 bp, Homo sapien
caggaactctgcatcactaaggtca

SEQ ID NO: 3996223 - DNA, 25 bp, Homo sapien
cacccgtcaggtaacttggctaaat

SEQ ID NO: 3996224 - DNA, 25 bp, Homo sapien
tccaattaagtcattatctgactga

SEQ ID NO: 3996225 - DNA, 25 bp, Homo sapien
taagtcattatctgactgattgtat

SEQ ID NO: 3996226 - DNA, 25 bp, Homo sapien
aattaagtcattatctgactgattg

SEQ ID NO: 3996227 - DNA, 25 bp, Homo sapien
ccaattaagtcattatctgactgat

SEQ ID NO: 3996228 - DNA, 25 bp, Homo sapien
cagcctgacaagtgtgataaaatga

SEQ ID NO: 3996229 - DNA, 25 bp, Homo sapien
gccgtcacaacagctacagctacag

SEQ ID NO: 3996230 - DNA, 25 bp, Homo sapien
taactaaactcgtaaagcactgggc

SEQ ID NO: 3996231 - DNA, 25 bp, Homo sapien
cttggaggtgacgactccgcggtcc

SEQ ID NO: 3996232 - DNA, 25 bp, Homo sapien
cgccggcaaggtgggcgcgggatca

SEQ ID NO: 3996233 - DNA, 25 bp, Homo sapien
aaggtgggcgcgggatcatcttcca

SEQ ID NO: 3996234 - DNA, 25 bp, Homo sapien
cgaacacgccggcaaggtgggcgcg

SEQ ID NO: 3996235 - DNA, 25 bp, Homo sapien
caaggtgggcgcgggatcatcttcc

SEQ ID NO: 3996236 - DNA, 25 bp, Homo sapien
cgggagctgcaagactccgggatcc

SEQ ID NO: 3996237 - DNA, 25 bp, Homo sapien
caccccgcgggtcacaattaagtgt

SEQ ID NO: 3996238 - DNA, 25 bp, Homo sapien
tttcccactgaggacgcgtgcggag

SEQ ID NO: 3996239 - DNA, 25 bp, Homo sapien
attaagtgtgcggaggttatctgcg

SEQ ID NO: 3996240 - DNA, 25 bp, Homo sapien
ctgggccccaattcagtggcgcagg

SEQ ID NO: 3996241 - DNA, 25 bp, Homo sapien
tgggccccaattcagtggcgcaggg

SEQ ID NO: 3996242 - DNA, 25 bp, Homo sapien
gggccccaattcagtggcgcagggt

SEQ ID NO: 3996243 - DNA, 25 bp, Homo sapien
ccccggctgcgggtatgacggtggt

SEQ ID NO: 3996244 - DNA, 25 bp, Homo sapien
caagcgtggttagcggagggagccc

SEQ ID NO: 3996245 - DNA, 25 bp, Homo sapien
cgggtatgacggtggttgtggcagc

SEQ ID NO: 3996246 - DNA, 25 bp, Homo sapien
tctgtccccgattggggtctccaag

SEQ ID NO: 3996247 - DNA, 25 bp, Homo sapien
cgcgaactttgcctggaggccaggc

SEQ ID NO: 3996248 - DNA, 25 bp, Homo sapien
gcttctgggaaagcgttcggattca

SEQ ID NO: 3996249 - DNA, 25 bp, Homo sapien
cgcgcttctgggaaagcgttcggat

SEQ ID NO: 3996250 - DNA, 25 bp, Homo sapien
ggaaagcaagcggatttgcgcgctt

SEQ ID NO: 3996251 - DNA, 25 bp, Homo sapien
ctggaagggagcgtcgcagaccctg

SEQ ID NO: 3996252 - DNA, 25 bp, Homo sapien
ggaagggagcgtcgcagaccctgtc

SEQ ID NO: 3996253 - DNA, 25 bp, Homo sapien
agggagcgtcgcagaccctgtccac

SEQ ID NO: 3996254 - DNA, 25 bp, Homo sapien
aagggagcgtcgcagaccctgtcca

SEQ ID NO: 3996255 - DNA, 25 bp, Homo sapien
ccagtagtaggagggcgtgagtccg

SEQ ID NO: 3996256 - DNA, 25 bp, Homo sapien
aagggaactggaaaagcgctagcct

SEQ ID NO: 3996257 - DNA, 25 bp, Homo sapien
tcagccccgcgctttcgaagggaac

SEQ ID NO: 3996258 - DNA, 25 bp, Homo sapien
cggcggagccgacgcccagtagtag

SEQ ID NO: 3996259 - DNA, 25 bp, Homo sapien
cataattttggtaggggaagagacg

SEQ ID NO: 3996260 - DNA, 25 bp, Homo sapien
taccgctgaacaggggaaggtcctg

SEQ ID NO: 3996261 - DNA, 25 bp, Homo sapien
agacgggtcgcagcctgaggcctgc

SEQ ID NO: 3996262 - DNA, 25 bp, Homo sapien
cctggaccgctgttcccacataatt

SEQ ID NO: 3996263 - DNA, 25 bp, Homo sapien
caaaccccccatgagatccccgaag

SEQ ID NO: 3996264 - DNA, 25 bp, Homo sapien
tgagatccccgaagccgccctccgg

SEQ ID NO: 3996265 - DNA, 25 bp, Homo sapien
ctccggggcgaggggtggaaagcag

SEQ ID NO: 3996266 - DNA, 25 bp, Homo sapien
tcatgcaaaccccccatgagatccc

SEQ ID NO: 3996267 - DNA, 25 bp, Homo sapien
tggtcagcttctcgacctcgctctt

SEQ ID NO: 3996268 - DNA, 25 bp, Homo sapien
tcggcccgcttcaaattgaaaggag

SEQ ID NO: 3996269 - DNA, 25 bp, Homo sapien
aatgtcttggttctccctcagttgg

SEQ ID NO: 3996270 - DNA, 25 bp, Homo sapien
caataatgtcttggttctccctcag

SEQ ID NO: 3996271 - DNA, 25 bp, Homo sapien
tggatggtgtgttctcaaaccgcaa

SEQ ID NO: 3996272 - DNA, 25 bp, Homo sapien
tcacatttaggaggagcggcctgct

SEQ ID NO: 3996273 - DNA, 25 bp, Homo sapien
tgtaaaagctcaggatgcaggtgcc

SEQ ID NO: 3996274 - DNA, 25 bp, Homo sapien
caatgtgcgtatgtgggtctttctc

SEQ ID NO: 3996275 - DNA, 25 bp, Homo sapien
taggcaagtccgctgcaatgtccga

SEQ ID NO: 3996276 - DNA, 25 bp, Homo sapien
attcgagtgctaaccctgggaggcc

SEQ ID NO: 3996277 - DNA, 25 bp, Homo sapien
tcaaatgctagatgagagcgtaggc

SEQ ID NO: 3996278 - DNA, 25 bp, Homo sapien
gaagcacctccaggcgttctagcag

SEQ ID NO: 3996279 - DNA, 25 bp, Homo sapien
gaaaggtcagggacgtacgtgctcc

SEQ ID NO: 3996280 - DNA, 25 bp, Homo sapien
cagctactggaagcaaacggaggtc

SEQ ID NO: 3996281 - DNA, 25 bp, Homo sapien
ttctcccaggagtagcgggcttggc

SEQ ID NO: 3996282 - DNA, 25 bp, Homo sapien
tatatatgcacaaagaaggccctcc

SEQ ID NO: 3996283 - DNA, 25 bp, Homo sapien
ccccgggctcccgaatgagttggca

SEQ ID NO: 3996284 - DNA, 25 bp, Homo sapien
ggctcccgaatgagttggcagcctg

SEQ ID NO: 3996285 - DNA, 25 bp, Homo sapien
cccgggctcccgaatgagttggcag

SEQ ID NO: 3996286 - DNA, 25 bp, Homo sapien
tcccgaatgagttggcagcctggct

SEQ ID NO: 3996287 - DNA, 25 bp, Homo sapien
tccttgaagcggcagtaacgcttgt

SEQ ID NO: 3996288 - DNA, 25 bp, Homo sapien
ccgctgccgctcgatgatgaggatg

SEQ ID NO: 3996289 - DNA, 25 bp, Homo sapien
acttctcgcaggtgcagtccttgaa

SEQ ID NO: 3996290 - DNA, 25 bp, Homo sapien
tggcccttgagccaggacaggacgc

SEQ ID NO: 3996291 - DNA, 25 bp, Homo sapien
cggctgcgacggctgagaggctggc

SEQ ID NO: 3996292 - DNA, 25 bp, Homo sapien
tgcggctcggcagtccaacgcagcg

SEQ ID NO: 3996293 - DNA, 25 bp, Homo sapien
ggatgaggctctccaagctctcgtt

SEQ ID NO: 3996294 - DNA, 25 bp, Homo sapien
ggctctccaagctctcgttggcctg

SEQ ID NO: 3996295 - DNA, 25 bp, Homo sapien
cgagctgcgcctgcagagccccggg

SEQ ID NO: 3996296 - DNA, 25 bp, Homo sapien
gcgagctgcgcctgcagagccccgg

SEQ ID NO: 3996297 - DNA, 25 bp, Homo sapien
gcttggcgagctgcgcctgcagagc

SEQ ID NO: 3996298 - DNA, 25 bp, Homo sapien
ctggcttggcgagctgcgcctgcag

SEQ ID NO: 3996299 - DNA, 25 bp, Homo sapien
ctgggtccagactcagccggcttct

SEQ ID NO: 3996300 - DNA, 25 bp, Homo sapien
tgggaaggcacctggcgatactgac

SEQ ID NO: 3996301 - DNA, 25 bp, Homo sapien
gcgagtgccactcgcgctgggtcca

SEQ ID NO: 3996302 - DNA, 25 bp, Homo sapien
agtcccgtcgtttggctgcccggag

SEQ ID NO: 3996303 - DNA, 25 bp, Homo sapien
aggatccagacaaagcagtcctggg

SEQ ID NO: 3996304 - DNA, 25 bp, Homo sapien
tgaaagcctttctccgaagctaggg

SEQ ID NO: 3996305 - DNA, 25 bp, Homo sapien
catgaaacaggtgagtccgcctcac

SEQ ID NO: 3996306 - DNA, 25 bp, Homo sapien
aggtgagtccgcctcacttcctcag

SEQ ID NO: 3996307 - DNA, 25 bp, Homo sapien
tcagattcgattcacactgtcctcc

SEQ ID NO: 3996308 - DNA, 25 bp, Homo sapien
tattgctatcagattcgattcacac

SEQ ID NO: 3996309 - DNA, 25 bp, Homo sapien
gttattgctatcagattcgattcac

SEQ ID NO: 3996310 - DNA, 25 bp, Homo sapien
gctatcagattcgattcacactgtc

SEQ ID NO: 3996311 - DNA, 25 bp, Homo sapien
cacaatcacaaggcggtggacctgt

SEQ ID NO: 3996312 - DNA, 25 bp, Homo sapien
aaggcgatgtgggacgtaactgaca

SEQ ID NO: 3996313 - DNA, 25 bp, Homo sapien
ggaccagctgtcctatcactgcatc

SEQ ID NO: 3996314 - DNA, 25 bp, Homo sapien
tctgccatgagcacccgtgcacaag

SEQ ID NO: 3996315 - DNA, 25 bp, Homo sapien
gctgagttaatcttttcctggtgtg

SEQ ID NO: 3996316 - DNA, 25 bp, Homo sapien
cagctgagttaatcttttcctggtg

SEQ ID NO: 3996317 - DNA, 25 bp, Homo sapien
aacagctgagttaatcttttcctgg

SEQ ID NO: 3996318 - DNA, 25 bp, Homo sapien
gagttaatcttttcctggtgtgcat

SEQ ID NO: 3996319 - DNA, 25 bp, Homo sapien
ttttaacacttcaagcggcggtctg

SEQ ID NO: 3996320 - DNA, 25 bp, Homo sapien
gaagacctctgtattgtctgccgac

SEQ ID NO: 3996321 - DNA, 25 bp, Homo sapien
ggtgattctgctccgcgtgacactt

SEQ ID NO: 3996322 - DNA, 25 bp, Homo sapien
gaggatgagctcaagcaccgttggc

SEQ ID NO: 3996323 - DNA, 25 bp, Homo sapien
cattggagggcaacgctagactctc

SEQ ID NO: 3996324 - DNA, 25 bp, Homo sapien
gactcgaaaggctgatcccacagac

SEQ ID NO: 3996325 - DNA, 25 bp, Homo sapien
aaacctcaacgtgtctgggactcga

SEQ ID NO: 3996326 - DNA, 25 bp, Homo sapien
gacaacgttgctagagtcggcagaa

SEQ ID NO: 3996327 - DNA, 25 bp, Homo sapien
cagggtgacatcattgggcaaaaag

SEQ ID NO: 3996328 - DNA, 25 bp, Homo sapien
ggacctcagctgatactgctgctgc

SEQ ID NO: 3996329 - DNA, 25 bp, Homo sapien
gctgctgcagcgtcatggtgttcca

SEQ ID NO: 3996330 - DNA, 25 bp, Homo sapien
ctggcttctcgccaaagtattcctc

SEQ ID NO: 3996331 - DNA, 25 bp, Homo sapien
ggagtcagacctctcgtcatagtcg

SEQ ID NO: 3996332 - DNA, 25 bp, Homo sapien
catagtcgtcctcggtgtaaatgga

SEQ ID NO: 3996333 - DNA, 25 bp, Homo sapien
taaatggactgctttgacacaaatg

SEQ ID NO: 3996334 - DNA, 25 bp, Homo sapien
cgagcttctgaagacgctggtagag

SEQ ID NO: 3996335 - DNA, 25 bp, Homo sapien
taaacattcagcactaaagccacag

SEQ ID NO: 3996336 - DNA, 25 bp, Homo sapien
gaaagggcatacacaagatgtggcc

SEQ ID NO: 3996337 - DNA, 25 bp, Homo sapien
tatagtccatttgcaacagaaccac

SEQ ID NO: 3996338 - DNA, 25 bp, Homo sapien
gggtcaaaacgcacagaaaatgtca

SEQ ID NO: 3996339 - DNA, 25 bp, Homo sapien
tctgagtttaatccgcaagccgtgg

SEQ ID NO: 3996340 - DNA, 25 bp, Homo sapien
tgaatcccatggtctgtagtcacag

SEQ ID NO: 3996341 - DNA, 25 bp, Homo sapien
agatccagtgagtcataggcgcccc

SEQ ID NO: 3996342 - DNA, 25 bp, Homo sapien
taggcgccccttggagaaactatgg

SEQ ID NO: 3996343 - DNA, 25 bp, Homo sapien
cagagcgctgccttgtttgtaaaaa

SEQ ID NO: 3996344 - DNA, 25 bp, Homo sapien
gataagttgagtcgatacacgcaca

SEQ ID NO: 3996345 - DNA, 25 bp, Homo sapien
tactatagctggtcaaattaaggcc

SEQ ID NO: 3996346 - DNA, 25 bp, Homo sapien
cattggttgcactcaggtagctcgg

SEQ ID NO: 3996347 - DNA, 25 bp, Homo sapien
tttgctgattcgaggagacagaccc

SEQ ID NO: 3996348 - DNA, 25 bp, Homo sapien
aatggactccgtttcctcacaaagg

SEQ ID NO: 3996349 - DNA, 25 bp, Homo sapien
tcctttcggaagtgacgcagtaggc

SEQ ID NO: 3996350 - DNA, 25 bp, Homo sapien
tagaaccaaatacagcgtgtggacc

SEQ ID NO: 3996351 - DNA, 25 bp, Homo sapien
catttgtaaccagctgcttcctagg

SEQ ID NO: 3996352 - DNA, 25 bp, Homo sapien
cctaggtgctttacccccagttgat

SEQ ID NO: 3996353 - DNA, 25 bp, Homo sapien
ttgtaaccagctgcttcctaggtgc

SEQ ID NO: 3996354 - DNA, 25 bp, Homo sapien
agcatttgtaaccagctgcttccta

SEQ ID NO: 3996355 - DNA, 25 bp, Homo sapien
ggtttctttagccctccaatatgag

SEQ ID NO: 3996356 - DNA, 25 bp, Homo sapien
gtttctttagccctccaatatgagg

SEQ ID NO: 3996357 - DNA, 25 bp, Homo sapien
ctttagccctccaatatgaggccca

SEQ ID NO: 3996358 - DNA, 25 bp, Homo sapien
ttctttagccctccaatatgaggcc

SEQ ID NO: 3996359 - DNA, 25 bp, Homo sapien
ttttgagttgtaagttcagtggact

SEQ ID NO: 3996360 - DNA, 25 bp, Homo sapien
cttctgagaccatctaatttcatgg

SEQ ID NO: 3996361 - DNA, 25 bp, Homo sapien
tctgagaccatctaatttcatggag

SEQ ID NO: 3996362 - DNA, 25 bp, Homo sapien
ggtgctgcaaaggaagttttgagtt

SEQ ID NO: 3996363 - DNA, 25 bp, Homo sapien
tccagtcacaatcatatacttaagt

SEQ ID NO: 3996364 - DNA, 25 bp, Homo sapien
tttccagtcacaatcatatacttaa

SEQ ID NO: 3996365 - DNA, 25 bp, Homo sapien
tgtttttccagtcacaatcatatac

SEQ ID NO: 3996366 - DNA, 25 bp, Homo sapien
ccagtcacaatcatatacttaagta

SEQ ID NO: 3996367 - DNA, 25 bp, Homo sapien
agcacccatcagaaccctcaatggg

SEQ ID NO: 3996368 - DNA, 25 bp, Homo sapien
caagcattggagcagagccggctgc

SEQ ID NO: 3996369 - DNA, 25 bp, Homo sapien
tttcatgacgatagtggcaagagtg

SEQ ID NO: 3996370 - DNA, 25 bp, Homo sapien
aaacagcaagcattggagcagagcc

SEQ ID NO: 3996371 - DNA, 25 bp, Homo sapien
catttggttgcattcgtaatgtttc

SEQ ID NO: 3996372 - DNA, 25 bp, Homo sapien
atttggttgcattcgtaatgtttcc

SEQ ID NO: 3996373 - DNA, 25 bp, Homo sapien
gcatttggttgcattcgtaatgttt

SEQ ID NO: 3996374 - DNA, 25 bp, Homo sapien
tgtggctattagataactttactct

SEQ ID NO: 3996375 - DNA, 25 bp, Homo sapien
cttgtggctattagataactttact

SEQ ID NO: 3996376 - DNA, 25 bp, Homo sapien
ttgtggctattagataactttactc

SEQ ID NO: 3996377 - DNA, 25 bp, Homo sapien
gtggctattagataactttactctc

SEQ ID NO: 3996378 - DNA, 25 bp, Homo sapien
gccatgagtcatcccttttctcttt

SEQ ID NO: 3996379 - DNA, 25 bp, Homo sapien
atgccatgagtcatcccttttctct

SEQ ID NO: 3996380 - DNA, 25 bp, Homo sapien
caggaaatgtatccttaagtgtggg

SEQ ID NO: 3996381 - DNA, 25 bp, Homo sapien
ataaagacaccaggaaatgtatcct

SEQ ID NO: 3996382 - DNA, 25 bp, Homo sapien
gaagaagattttctcaagttagcat

SEQ ID NO: 3996383 - DNA, 25 bp, Homo sapien
ctcaagttagcattgtgagtcattc

SEQ ID NO: 3996384 - DNA, 25 bp, Homo sapien
aggctaaggagcagcgcccctgaag

SEQ ID NO: 3996385 - DNA, 25 bp, Homo sapien
gcgcccctgaagaagattttctcaa

SEQ ID NO: 3996386 - DNA, 25 bp, Homo sapien
tgattatgagacaactaacaccatc

SEQ ID NO: 3996387 - DNA, 25 bp, Homo sapien
gcttgattatgagacaactaacacc

SEQ ID NO: 3996388 - DNA, 25 bp, Homo sapien
tgcttgattatgagacaactaacac

SEQ ID NO: 3996389 - DNA, 25 bp, Homo sapien
cttgattatgagacaactaacacca

SEQ ID NO: 3996390 - DNA, 25 bp, Homo sapien
ctgagaaacagaatttttatgcccc

SEQ ID NO: 3996391 - DNA, 25 bp, Homo sapien
tggacagtggttcccggcagctggg

SEQ ID NO: 3996392 - DNA, 25 bp, Homo sapien
gaaacagaatttttatgccccactc

SEQ ID NO: 3996393 - DNA, 25 bp, Homo sapien
tcattccctcgagaactgcctggac

SEQ ID NO: 3996394 - DNA, 25 bp, Homo sapien
tgaaggtcctatcccagaaggctcc

SEQ ID NO: 3996395 - DNA, 25 bp, Homo sapien
gctgttccctccatcggtcagtcaa

SEQ ID NO: 3996396 - DNA, 25 bp, Homo sapien
tcaacaattcaacaccaactgagtg

SEQ ID NO: 3996397 - DNA, 25 bp, Homo sapien
gaaaacttccactgccgtcaaacaa

SEQ ID NO: 3996398 - DNA, 25 bp, Homo sapien
cggcgggtcgccgtgcggggcgcag

SEQ ID NO: 3996399 - DNA, 25 bp, Homo sapien
ggacacgccggtccgcgctcagcat

SEQ ID NO: 3996400 - DNA, 25 bp, Homo sapien
ctgtggggaggacacgccggtccgc

SEQ ID NO: 3996401 - DNA, 25 bp, Homo sapien
gcgggtcgccgtgcggggcgcagcg

SEQ ID NO: 3996402 - DNA, 25 bp, Homo sapien
ttccagcgcgctccttgtaacaagg

SEQ ID NO: 3996403 - DNA, 25 bp, Homo sapien
aatgcaaaaggcctgctcgggggtt

SEQ ID NO: 3996404 - DNA, 25 bp, Homo sapien
tctttgataatgctgaccccggaga

SEQ ID NO: 3996405 - DNA, 25 bp, Homo sapien
ggacaaggagataccaaagccagct

SEQ ID NO: 3996406 - DNA, 25 bp, Homo sapien
gaaaacgtctgagcatcccgagaga

SEQ ID NO: 3996407 - DNA, 25 bp, Homo sapien
tccttctgcggaaagccgctcagcg

SEQ ID NO: 3996408 - DNA, 25 bp, Homo sapien
ggaaagccgctcagcgttgcaccgt

SEQ ID NO: 3996409 - DNA, 25 bp, Homo sapien
cccagggtggcgaccggcatttgaa

SEQ ID NO: 3996410 - DNA, 25 bp, Homo sapien
ctaagtcgcctgtggctaagtcaac

SEQ ID NO: 3996411 - DNA, 25 bp, Homo sapien
tgcagcctaagtcgcctgtggctaa

SEQ ID NO: 3996412 - DNA, 25 bp, Homo sapien
cagcctaagtcgcctgtggctaagt

SEQ ID NO: 3996413 - DNA, 25 bp, Homo sapien
gcctaagtcgcctgtggctaagtca

SEQ ID NO: 3996414 - DNA, 25 bp, Homo sapien
tgcaccccttctgatgtgagtacct

SEQ ID NO: 3996415 - DNA, 25 bp, Homo sapien
actgaaagtaaacgagcagccgagc

SEQ ID NO: 3996416 - DNA, 25 bp, Homo sapien
gccccgcgacgtgtatgcaaactac

SEQ ID NO: 3996417 - DNA, 25 bp, Homo sapien
tgtaacagggcccagcacgttttta

SEQ ID NO: 3996418 - DNA, 25 bp, Homo sapien
gtgcagccggctcgcctgtccagaa

SEQ ID NO: 3996419 - DNA, 25 bp, Homo sapien
caggcggtgtgaatactgattggcc

SEQ ID NO: 3996420 - DNA, 25 bp, Homo sapien
ttctctctgaagcgctccgccagag

SEQ ID NO: 3996421 - DNA, 25 bp, Homo sapien
tgtccagaatctaaacccgaggtat

SEQ ID NO: 3996422 - DNA, 25 bp, Homo sapien
ctagtactgtccgctcaggccccgg

SEQ ID NO: 3996423 - DNA, 25 bp, Homo sapien
tggctcagatcgctggctcacccgg

SEQ ID NO: 3996424 - DNA, 25 bp, Homo sapien
ggcgcgcgcagttgcattcagcgca

SEQ ID NO: 3996425 - DNA, 25 bp, Homo sapien
ttgcattcagcgcagcgccactggc

SEQ ID NO: 3996426 - DNA, 25 bp, Homo sapien
tgctgaggccgctttcggcttcctc

SEQ ID NO: 3996427 - DNA, 25 bp, Homo sapien
tgcaaagttctgctcggtcttctgc

SEQ ID NO: 3996428 - DNA, 25 bp, Homo sapien
gccagtcaagtcctcagcgacctag

SEQ ID NO: 3996429 - DNA, 25 bp, Homo sapien
gtcttctgcagcctcgggcgcctca

SEQ ID NO: 3996430 - DNA, 25 bp, Homo sapien
aaggagggaggaagccagtcaagtc

SEQ ID NO: 3996431 - DNA, 25 bp, Homo sapien
ctttaggatctggcgctagggctgc

SEQ ID NO: 3996432 - DNA, 25 bp, Homo sapien
catgcaaacagaaatcggggtcgct

SEQ ID NO: 3996433 - DNA, 25 bp, Homo sapien
ttaaaagatatccagctttaggatc

SEQ ID NO: 3996434 - DNA, 25 bp, Homo sapien
gggtcgctaccctcaaacacgagat

SEQ ID NO: 3996435 - DNA, 25 bp, Homo sapien
ggcttcgctggggcctgagcctggc

SEQ ID NO: 3996436 - DNA, 25 bp, Homo sapien
cgctcggggcttcgctggggcctga

SEQ ID NO: 3996437 - DNA, 25 bp, Homo sapien
gctggggcctgagcctggcggccct

SEQ ID NO: 3996438 - DNA, 25 bp, Homo sapien
gggcctgagcctggcggccctcact

SEQ ID NO: 3996439 - DNA, 25 bp, Homo sapien
tcgatctcccagtccccggccgcgg

SEQ ID NO: 3996440 - DNA, 25 bp, Homo sapien
ggccgcggagccagcctgcgggtcg

SEQ ID NO: 3996441 - DNA, 25 bp, Homo sapien
cggagccagcctgcgggtcggccat

SEQ ID NO: 3996442 - DNA, 25 bp, Homo sapien
atcgatctcccagtccccggccgcg

SEQ ID NO: 3996443 - DNA, 25 bp, Homo sapien
tcgccctcttcttccgcgtcttcgt

SEQ ID NO: 3996444 - DNA, 25 bp, Homo sapien
ttcgtccaccccgtcgtcatcttcg

SEQ ID NO: 3996445 - DNA, 25 bp, Homo sapien
cttcgtcgtcctcgcagtccccgtc

SEQ ID NO: 3996446 - DNA, 25 bp, Homo sapien
gccccgcagacgtcctcttccagct

SEQ ID NO: 3996447 - DNA, 25 bp, Homo sapien
cctcggctgcggtcccccccgctgc

SEQ ID NO: 3996448 - DNA, 25 bp, Homo sapien
ttgggcgtgcggctcagcttgcgcg

SEQ ID NO: 3996449 - DNA, 25 bp, Homo sapien
accagcaggcagttggcgcactggc

SEQ ID NO: 3996450 - DNA, 25 bp, Homo sapien
tggcagtcgcgccagcgacagaagc

SEQ ID NO: 3996451 - DNA, 25 bp, Homo sapien
cccgcgggagtgcagcgctctcggg

SEQ ID NO: 3996452 - DNA, 25 bp, Homo sapien
cacagctttgcgctcgaaattattc

SEQ ID NO: 3996453 - DNA, 25 bp, Homo sapien
gctttgcgctcgaaattattctgtt

SEQ ID NO: 3996454 - DNA, 25 bp, Homo sapien
ggtacacagctttgcgctcgaaatt

SEQ ID NO: 3996455 - DNA, 25 bp, Homo sapien
cctctggtacacagctttgcgctcg

SEQ ID NO: 3996456 - DNA, 25 bp, Homo sapien
acacataatagctgtagaataatcc

SEQ ID NO: 3996457 - DNA, 25 bp, Homo sapien
gtacacataatagctgtagaataat

SEQ ID NO: 3996458 - DNA, 25 bp, Homo sapien
tgtacacataatagctgtagaataa

SEQ ID NO: 3996459 - DNA, 25 bp, Homo sapien
tacacataatagctgtagaataatc

SEQ ID NO: 3996460 - DNA, 25 bp, Homo sapien
ctagagctgatgtcacttttatttt

SEQ ID NO: 3996461 - DNA, 25 bp, Homo sapien
tcaatcaatgttttattattatcca

SEQ ID NO: 3996462 - DNA, 25 bp, Homo sapien
tattatccatgtcatcttttttcat

SEQ ID NO: 3996463 - DNA, 25 bp, Homo sapien
attattatccatgtcatcttttttc

SEQ ID NO: 3996464 - DNA, 25 bp, Homo sapien
atgttttattattatccatgtcatc

SEQ ID NO: 3996465 - DNA, 25 bp, Homo sapien
aattatttacagttccatctcactg

SEQ ID NO: 3996466 - DNA, 25 bp, Homo sapien
aagtacagattaggtttgaaagagt

SEQ ID NO: 3996467 - DNA, 25 bp, Homo sapien
ttttatacagatgcaaaagtacaga

SEQ ID NO: 3996468 - DNA, 25 bp, Homo sapien
gagggtgaaagatatccatactgca

SEQ ID NO: 3996469 - DNA, 25 bp, Homo sapien
gattgcacatgaaagagattaacat

SEQ ID NO: 3996470 - DNA, 25 bp, Homo sapien
agcaaagattgcacatgaaagagat

SEQ ID NO: 3996471 - DNA, 25 bp, Homo sapien
caaagattgcacatgaaagagatta

SEQ ID NO: 3996472 - DNA, 25 bp, Homo sapien
aagattgcacatgaaagagattaac

SEQ ID NO: 3996473 - DNA, 25 bp, Homo sapien
cctgtcactaactgggggaggtaga

SEQ ID NO: 3996474 - DNA, 25 bp, Homo sapien
ggaaggtccctcctacataagtctc

SEQ ID NO: 3996475 - DNA, 25 bp, Homo sapien
cctcctacataagtctccgctggaa

SEQ ID NO: 3996476 - DNA, 25 bp, Homo sapien
ctacataagtctccgctggaatggg

SEQ ID NO: 3996477 - DNA, 25 bp, Homo sapien
gttgtggccacgctgacattagaag

SEQ ID NO: 3996478 - DNA, 25 bp, Homo sapien
catggttaaatcaaggcaggtgggc

SEQ ID NO: 3996479 - DNA, 25 bp, Homo sapien
gcaccatgcggttgggcagaaacag

SEQ ID NO: 3996480 - DNA, 25 bp, Homo sapien
cagggagtccgtgtcaacaatggga

SEQ ID NO: 3996481 - DNA, 25 bp, Homo sapien
gctgtgtaaagtgtggtacttaaca

SEQ ID NO: 3996482 - DNA, 25 bp, Homo sapien
tgctctaagactgcagaaaatccag

SEQ ID NO: 3996483 - DNA, 25 bp, Homo sapien
tacttaacaatttgcacattgggca

SEQ ID NO: 3996484 - DNA, 25 bp, Homo sapien
aaagtagcaaatggctataatgctc

SEQ ID NO: 3996485 - DNA, 25 bp, Homo sapien
acctttgaagcagtttaattaaatg

SEQ ID NO: 3996486 - DNA, 25 bp, Homo sapien
cctttgaagcagtttaattaaatgc

SEQ ID NO: 3996487 - DNA, 25 bp, Homo sapien
gctaaggatacatttaacacttgaa

SEQ ID NO: 3996488 - DNA, 25 bp, Homo sapien
taaatgctaaggatacatttaacac

SEQ ID NO: 3996489 - DNA, 25 bp, Homo sapien
ttttccttacaccttcaagagaagc

SEQ ID NO: 3996490 - DNA, 25 bp, Homo sapien
ttcaagagaagcagatgtaatggct

SEQ ID NO: 3996491 - DNA, 25 bp, Homo sapien
agatgtaatggctggacctgcagca

SEQ ID NO: 3996492 - DNA, 25 bp, Homo sapien
gaagcagatgtaatggctggacctg

SEQ ID NO: 3996493 - DNA, 25 bp, Homo sapien
ggtggtgcattggagacttattgtt

SEQ ID NO: 3996494 - DNA, 25 bp, Homo sapien
gtcactgtgtgctctttttccggtg

SEQ ID NO: 3996495 - DNA, 25 bp, Homo sapien
ctgtgtgctctttttccggtgggtg

SEQ ID NO: 3996496 - DNA, 25 bp, Homo sapien
tgggtggtggtgcattggagactta

SEQ ID NO: 3996497 - DNA, 25 bp, Homo sapien
ttagtgatttatagccaaagtgtta

SEQ ID NO: 3996498 - DNA, 25 bp, Homo sapien
gatttatagccaaagtgttagagat

SEQ ID NO: 3996499 - DNA, 25 bp, Homo sapien
gtgatttatagccaaagtgttagag

SEQ ID NO: 3996500 - DNA, 25 bp, Homo sapien
tagtgatttatagccaaagtgttag

SEQ ID NO: 3996501 - DNA, 25 bp, Homo sapien
aagagcttgtgatcccctctctcag

SEQ ID NO: 3996502 - DNA, 25 bp, Homo sapien
gcacagcacatccatccgaggtctt

SEQ ID NO: 3996503 - DNA, 25 bp, Homo sapien
gaggtcttcatacaactcccatttg

SEQ ID NO: 3996504 - DNA, 25 bp, Homo sapien
ctgaattggccctctttcagcatcc

SEQ ID NO: 3996505 - DNA, 25 bp, Homo sapien
cataccagcaagtcctttgcattca

SEQ ID NO: 3996506 - DNA, 25 bp, Homo sapien
tgcattcaacttcaagcaaccaaac

SEQ ID NO: 3996507 - DNA, 25 bp, Homo sapien
aacaacaaagctcattgtgtcaatg

SEQ ID NO: 3996508 - DNA, 25 bp, Homo sapien
tctcacattgcccataccagcaagt

SEQ ID NO: 3996509 - DNA, 25 bp, Homo sapien
tgtgtaggggcagctatacaaagct

SEQ ID NO: 3996510 - DNA, 25 bp, Homo sapien
cagctatacaaagctagacctttca

SEQ ID NO: 3996511 - DNA, 25 bp, Homo sapien
taggggcagctatacaaagctagac

SEQ ID NO: 3996512 - DNA, 25 bp, Homo sapien
gggcagctatacaaagctagacctt

SEQ ID NO: 3996513 - DNA, 25 bp, Homo sapien
ttccaaaggatttggagtgcaacaa

SEQ ID NO: 3996514 - DNA, 25 bp, Homo sapien
gggtagatgagtcccttttctgtag

SEQ ID NO: 3996515 - DNA, 25 bp, Homo sapien
cacctgctaactcttcatgggtaga

SEQ ID NO: 3996516 - DNA, 25 bp, Homo sapien
cttctggtgtcactgattcacctgc

SEQ ID NO: 3996517 - DNA, 25 bp, Homo sapien
cactccagacattacgtatctcctt

SEQ ID NO: 3996518 - DNA, 25 bp, Homo sapien
cagacattacgtatctccttatggc

SEQ ID NO: 3996519 - DNA, 25 bp, Homo sapien
tctgcaagcatgactttcccatcac

SEQ ID NO: 3996520 - DNA, 25 bp, Homo sapien
tcattttatgaggtagctccatctg

SEQ ID NO: 3996521 - DNA, 25 bp, Homo sapien
caccatcaatacagtagatgtatcc

SEQ ID NO: 3996522 - DNA, 25 bp, Homo sapien
cttgcactcaccatcaatacagtag

SEQ ID NO: 3996523 - DNA, 25 bp, Homo sapien
tcaccatcaatacagtagatgtatc

SEQ ID NO: 3996524 - DNA, 25 bp, Homo sapien
gcactcaccatcaatacagtagatg

SEQ ID NO: 3996525 - DNA, 25 bp, Homo sapien
gcaacccaggatgtattttaacttc

SEQ ID NO: 3996526 - DNA, 25 bp, Homo sapien
agcaacccaggatgtattttaactt

SEQ ID NO: 3996527 - DNA, 25 bp, Homo sapien
caacccaggatgtattttaacttct

SEQ ID NO: 3996528 - DNA, 25 bp, Homo sapien
catgaactcatacaagtgtccagag

SEQ ID NO: 3996529 - DNA, 25 bp, Homo sapien
tacaagtgtccagagtcgcaccatc

SEQ ID NO: 3996530 - DNA, 25 bp, Homo sapien
tctttccatgaactcatacaagtgt

SEQ ID NO: 3996531 - DNA, 25 bp, Homo sapien
ctcatacaagtgtccagagtcgcac

SEQ ID NO: 3996532 - DNA, 25 bp, Homo sapien
tgcaaaggggcatcagacagtgcag

SEQ ID NO: 3996533 - DNA, 25 bp, Homo sapien
cctgctcccagatgtcttttcatac

SEQ ID NO: 3996534 - DNA, 25 bp, Homo sapien
ttttcatacaactctgacccctttg

SEQ ID NO: 3996535 - DNA, 25 bp, Homo sapien
cagacagtgcagctgttgtgctgga

SEQ ID NO: 3996536 - DNA, 25 bp, Homo sapien
tgtgctggctcctgaaaaatgcaaa

SEQ ID NO: 3996537 - DNA, 25 bp, Homo sapien
gcaaaaaatgcaaatgctccttctg

SEQ ID NO: 3996538 - DNA, 25 bp, Homo sapien
tccttctgcaaaaagagctgctgct

SEQ ID NO: 3996539 - DNA, 25 bp, Homo sapien
aaatgctccttctgcaaaaagagct

SEQ ID NO: 3996540 - DNA, 25 bp, Homo sapien
cagatgaaccccgactggtcctggc

SEQ ID NO: 3996541 - DNA, 25 bp, Homo sapien
cggtcccagatgaaccccgactggt

SEQ ID NO: 3996542 - DNA, 25 bp, Homo sapien
ctcggtcccagatgaaccccgactg

SEQ ID NO: 3996543 - DNA, 25 bp, Homo sapien
cccagatgaaccccgactggtcctg

SEQ ID NO: 3996544 - DNA, 25 bp, Homo sapien
tgcaactgccatttcgggaaaggca

SEQ ID NO: 3996545 - DNA, 25 bp, Homo sapien
ggaaggccgtagaactttcagaaca

SEQ ID NO: 3996546 - DNA, 25 bp, Homo sapien
aaaggcaggcatgactgtggaaggc

SEQ ID NO: 3996547 - DNA, 25 bp, Homo sapien
tcttgcaactgccatttcgggaaag

SEQ ID NO: 3996548 - DNA, 25 bp, Homo sapien
tgcgtgtgatcgtggttttgaaacc

SEQ ID NO: 3996549 - DNA, 25 bp, Homo sapien
gaatcctgctgaaggtgtgtatgtg

SEQ ID NO: 3996550 - DNA, 25 bp, Homo sapien
aattgatctatgagctacatatggg

SEQ ID NO: 3996551 - DNA, 25 bp, Homo sapien
ggaagcaatatcttaagaatcctgc

SEQ ID NO: 3996552 - DNA, 25 bp, Homo sapien
ttatacaatgaaattctacacagca

SEQ ID NO: 3996553 - DNA, 25 bp, Homo sapien
tatacaatgaaattctacacagcaa

SEQ ID NO: 3996554 - DNA, 25 bp, Homo sapien
cttatacaatgaaattctacacagc

SEQ ID NO: 3996555 - DNA, 25 bp, Homo sapien
tacaatgaaattctacacagcaatg

SEQ ID NO: 3996556 - DNA, 25 bp, Homo sapien
tgcagccacaaggactagcagctgt

SEQ ID NO: 3996557 - DNA, 25 bp, Homo sapien
gcagctgtgccacatggacctctga

SEQ ID NO: 3996558 - DNA, 25 bp, Homo sapien
gactagcagctgtgccacatggacc

SEQ ID NO: 3996559 - DNA, 25 bp, Homo sapien
caaggactagcagctgtgccacatg

SEQ ID NO: 3996560 - DNA, 25 bp, Homo sapien
aaatgggaagaatgtttctgacttt

SEQ ID NO: 3996561 - DNA, 25 bp, Homo sapien
gaagaaatgggaagaatgtttctga

SEQ ID NO: 3996562 - DNA, 25 bp, Homo sapien
ctgggaagaaatgggaagaatgttt

SEQ ID NO: 3996563 - DNA, 25 bp, Homo sapien
gaaatgggaagaatgtttctgactt

SEQ ID NO: 3996564 - DNA, 25 bp, Homo sapien
tgtctaccactacagccaggactgc

SEQ ID NO: 3996565 - DNA, 25 bp, Homo sapien
tcctcaggatccaccagtgtctgca

SEQ ID NO: 3996566 - DNA, 25 bp, Homo sapien
ggtatcgtcacgctcaggtctggag

SEQ ID NO: 3996567 - DNA, 25 bp, Homo sapien
gccaaatttcgtccaactctgcctg

SEQ ID NO: 3996568 - DNA, 25 bp, Homo sapien
tcaatttgctcctaaataagccttg

SEQ ID NO: 3996569 - DNA, 25 bp, Homo sapien
aatttgctcctaaataagccttgtt

SEQ ID NO: 3996570 - DNA, 25 bp, Homo sapien
gctcctaaataagccttgttaacta

SEQ ID NO: 3996571 - DNA, 25 bp, Homo sapien
ttgctcctaaataagccttgttaac

SEQ ID NO: 3996572 - DNA, 25 bp, Homo sapien
ccataggtgattacactctgctcca

SEQ ID NO: 3996573 - DNA, 25 bp, Homo sapien
cactctccccataggtgattacact

SEQ ID NO: 3996574 - DNA, 25 bp, Homo sapien
gaatgtcactctccccataggtgat

SEQ ID NO: 3996575 - DNA, 25 bp, Homo sapien
gagaatgtcactctccccataggtg

SEQ ID NO: 3996576 - DNA, 25 bp, Homo sapien
tgccaccacttccaccaggtgctgc

SEQ ID NO: 3996577 - DNA, 25 bp, Homo sapien
caagcaccatcaaccttgctggcca

SEQ ID NO: 3996578 - DNA, 25 bp, Homo sapien
gcaccatcaaccttgctggccactg

SEQ ID NO: 3996579 - DNA, 25 bp, Homo sapien
ccatcaaccttgctggccactgcca

SEQ ID NO: 3996580 - DNA, 25 bp, Homo sapien
ccccaggtaatgatgtggcatcctc

SEQ ID NO: 3996581 - DNA, 25 bp, Homo sapien
caaccacttgccgtcccatttgttt

SEQ ID NO: 3996582 - DNA, 25 bp, Homo sapien
gttttccatatctcttttgccggag

SEQ ID NO: 3996583 - DNA, 25 bp, Homo sapien
tttgccggagacataacaaagcctt

SEQ ID NO: 3996584 - DNA, 25 bp, Homo sapien
catcaacagctgcttccatatgaaa

SEQ ID NO: 3996585 - DNA, 25 bp, Homo sapien
tgtgattcagataaaatgtccaact

SEQ ID NO: 3996586 - DNA, 25 bp, Homo sapien
tgtgaaatcacttggtggttttgtg

SEQ ID NO: 3996587 - DNA, 25 bp, Homo sapien
gtccaactctgaggaactagaatcc

SEQ ID NO: 3996588 - DNA, 25 bp, Homo sapien
ttgaccacacttcttgttcaccaca

SEQ ID NO: 3996589 - DNA, 25 bp, Homo sapien
gctgtttctgtgacatggcacagga

SEQ ID NO: 3996590 - DNA, 25 bp, Homo sapien
gagttgaccacacttcttgttcacc

SEQ ID NO: 3996591 - DNA, 25 bp, Homo sapien
ggaaattccagcgtcttccctttga

SEQ ID NO: 3996592 - DNA, 25 bp, Homo sapien
gccttcagctccagagcttctcgcc

SEQ ID NO: 3996593 - DNA, 25 bp, Homo sapien
ccgagccttcagctccagagcttct

SEQ ID NO: 3996594 - DNA, 25 bp, Homo sapien
gagccttcagctccagagcttctcg

SEQ ID NO: 3996595 - DNA, 25 bp, Homo sapien
agccttcagctccagagcttctcgc

SEQ ID NO: 3996596 - DNA, 25 bp, Homo sapien
gaaactacggcaatgaattcttgac

SEQ ID NO: 3996597 - DNA, 25 bp, Homo sapien
ataaaatgcatagggtcaaagtcat

SEQ ID NO: 3996598 - DNA, 25 bp, Homo sapien
aaatgcatagggtcaaagtcattga

SEQ ID NO: 3996599 - DNA, 25 bp, Homo sapien
taaatatagtgctacttttgaaact

SEQ ID NO: 3996600 - DNA, 25 bp, Homo sapien
aatcatacttttcaggttataaata

SEQ ID NO: 3996601 - DNA, 25 bp, Homo sapien
ctattgggttggtaattctccaaga

SEQ ID NO: 3996602 - DNA, 25 bp, Homo sapien
tgctattgggttggtaattctccaa

SEQ ID NO: 3996603 - DNA, 25 bp, Homo sapien
attgggttggtaattctccaagatg

SEQ ID NO: 3996604 - DNA, 25 bp, Homo sapien
agaacccaaaggttcataggcagag

SEQ ID NO: 3996605 - DNA, 25 bp, Homo sapien
agctactttgtaggcaagaacccaa

SEQ ID NO: 3996606 - DNA, 25 bp, Homo sapien
tccagcatgtgtgatatgggccagg

SEQ ID NO: 3996607 - DNA, 25 bp, Homo sapien
tgagtagacctccaattcaaggcat

SEQ ID NO: 3996608 - DNA, 25 bp, Homo sapien
gcatttctctggcaagataggtact

SEQ ID NO: 3996609 - DNA, 25 bp, Homo sapien
tattagactttgcaactgagatgtg

SEQ ID NO: 3996610 - DNA, 25 bp, Homo sapien
tctgtgtcatcagtcccctttatta

SEQ ID NO: 3996611 - DNA, 25 bp, Homo sapien
tctggcaagataggtactctatgca

SEQ ID NO: 3996612 - DNA, 25 bp, Homo sapien
ggtgcagtgtgtggcacctttagta

SEQ ID NO: 3996613 - DNA, 25 bp, Homo sapien
gcagtgtgtggcacctttagtatca

SEQ ID NO: 3996614 - DNA, 25 bp, Homo sapien
tgtggcacctttagtatcagaaagg

SEQ ID NO: 3996615 - DNA, 25 bp, Homo sapien
tgtgtggcacctttagtatcagaaa

SEQ ID NO: 3996616 - DNA, 25 bp, Homo sapien
tgagttttccacctcaaaatccaga

SEQ ID NO: 3996617 - DNA, 25 bp, Homo sapien
gctcctcctggaataatcaatctgt

SEQ ID NO: 3996618 - DNA, 25 bp, Homo sapien
tttcaggtccatttgcatctggagc

SEQ ID NO: 3996619 - DNA, 25 bp, Homo sapien
catgcctcaggaaccgtgtagtttc

SEQ ID NO: 3996620 - DNA, 25 bp, Homo sapien
tttcttgcacccgaagaggtagaat

SEQ ID NO: 3996621 - DNA, 25 bp, Homo sapien
ttcttgcacccgaagaggtagaatc

SEQ ID NO: 3996622 - DNA, 25 bp, Homo sapien
tcttgcacccgaagaggtagaatct

SEQ ID NO: 3996623 - DNA, 25 bp, Homo sapien
agtttcttgcacccgaagaggtaga

SEQ ID NO: 3996624 - DNA, 25 bp, Homo sapien
agctgaactgaagggtgttcccttg

SEQ ID NO: 3996625 - DNA, 25 bp, Homo sapien
ctgtgctttcacagacactgtgtga

SEQ ID NO: 3996626 - DNA, 25 bp, Homo sapien
ctgaagggtgttcccttgagctcag

SEQ ID NO: 3996627 - DNA, 25 bp, Homo sapien
tgacaccaagctcgtctttcagaga

SEQ ID NO: 3996628 - DNA, 25 bp, Homo sapien
tcgggtttccaaggatgtatgaact

SEQ ID NO: 3996629 - DNA, 25 bp, Homo sapien
caattagttgcggtcaaactgatca

SEQ ID NO: 3996630 - DNA, 25 bp, Homo sapien
gaaacatttggtgcggattgtaggc

SEQ ID NO: 3996631 - DNA, 25 bp, Homo sapien
gaagaggcctgttgcatgtgaaccc

SEQ ID NO: 3996632 - DNA, 25 bp, Homo sapien
ttggcagaccccagacacactgggc

SEQ ID NO: 3996633 - DNA, 25 bp, Homo sapien
ttatgacgacgttggcagaccccag

SEQ ID NO: 3996634 - DNA, 25 bp, Homo sapien
aggactctctggacagaggtcacct

SEQ ID NO: 3996635 - DNA, 25 bp, Homo sapien
agcatctggcccgtcatctgtccaa

SEQ ID NO: 3996636 - DNA, 25 bp, Homo sapien
gagatcagataagattgggcatgtt

SEQ ID NO: 3996637 - DNA, 25 bp, Homo sapien
tctgagatcagataagattgggcat

SEQ ID NO: 3996638 - DNA, 25 bp, Homo sapien
gcatgttcagggtggtaaggccata

SEQ ID NO: 3996639 - DNA, 25 bp, Homo sapien
ttctgagatcagataagattgggca

SEQ ID NO: 3996640 - DNA, 25 bp, Homo sapien
tgagttcctgactgagcaaccacca

SEQ ID NO: 3996641 - DNA, 25 bp, Homo sapien
gagttcctgactgagcaaccaccat

SEQ ID NO: 3996642 - DNA, 25 bp, Homo sapien
ttgagttcctgactgagcaaccacc

SEQ ID NO: 3996643 - DNA, 25 bp, Homo sapien
gaaacatcccttgaatgcctgccac

SEQ ID NO: 3996644 - DNA, 25 bp, Homo sapien
tctgtatctcaactcctttcaacca

SEQ ID NO: 3996645 - DNA, 25 bp, Homo sapien
tgcttccaagacactataggccacc

SEQ ID NO: 3996646 - DNA, 25 bp, Homo sapien
caagacactataggccaccgagagg

SEQ ID NO: 3996647 - DNA, 25 bp, Homo sapien
agacatcacaagtaacaagacagca

SEQ ID NO: 3996648 - DNA, 25 bp, Homo sapien
cagacatcacaagtaacaagacagc

SEQ ID NO: 3996649 - DNA, 25 bp, Homo sapien
agaccacagacatcacaagtaacaa

SEQ ID NO: 3996650 - DNA, 25 bp, Homo sapien
ctgagaccacagacatcacaagtaa

SEQ ID NO: 3996651 - DNA, 25 bp, Homo sapien
gggtaagagggtcttcagaatctca

SEQ ID NO: 3996652 - DNA, 25 bp, Homo sapien
gtgcgagtccttttataccacaaag

SEQ ID NO: 3996653 - DNA, 25 bp, Homo sapien
tcttccatggtaaactcttgcagag

SEQ ID NO: 3996654 - DNA, 25 bp, Homo sapien
ctcttgcagagtgcgagtcctttta

SEQ ID NO: 3996655 - DNA, 25 bp, Homo sapien
ctttgctttaagctgagatactcca

SEQ ID NO: 3996656 - DNA, 25 bp, Homo sapien
tcaagcaggataatgtggctttgct

SEQ ID NO: 3996657 - DNA, 25 bp, Homo sapien
taagctgagatactccacaaagcat

SEQ ID NO: 3996658 - DNA, 25 bp, Homo sapien
ggagatttagattcagctgaggttt

SEQ ID NO: 3996659 - DNA, 25 bp, Homo sapien
cattggcagttcctccggatgtcat

SEQ ID NO: 3996660 - DNA, 25 bp, Homo sapien
acattggcagttcctccggatgtca

SEQ ID NO: 3996661 - DNA, 25 bp, Homo sapien
cacattggcagttcctccggatgtc

SEQ ID NO: 3996662 - DNA, 25 bp, Homo sapien
agcagaggtcgcctctccatgggcc

SEQ ID NO: 3996663 - DNA, 25 bp, Homo sapien
gaagggagcagaggtcgcctctcca

SEQ ID NO: 3996664 - DNA, 25 bp, Homo sapien
gggagcagaggtcgcctctccatgg

SEQ ID NO: 3996665 - DNA, 25 bp, Homo sapien
gagcagaggtcgcctctccatgggc

SEQ ID NO: 3996666 - DNA, 25 bp, Homo sapien
tgatagtctttactgacatctgcta

SEQ ID NO: 3996667 - DNA, 25 bp, Homo sapien
ctgatagtctttactgacatctgct

SEQ ID NO: 3996668 - DNA, 25 bp, Homo sapien
atagtctttactgacatctgctaat

SEQ ID NO: 3996669 - DNA, 25 bp, Homo sapien
gatagtctttactgacatctgctaa

SEQ ID NO: 3996670 - DNA, 25 bp, Homo sapien
ctgtgcacatttaaattgcagacag

SEQ ID NO: 3996671 - DNA, 25 bp, Homo sapien
acatttaaattgcagacagtcctca

SEQ ID NO: 3996672 - DNA, 25 bp, Homo sapien
cacatctggtaaatacagataccaa

SEQ ID NO: 3996673 - DNA, 25 bp, Homo sapien
gtccctgaatctaccattcctgcag

SEQ ID NO: 3996674 - DNA, 25 bp, Homo sapien
cttcaaagcccttgatcacatctgg

SEQ ID NO: 3996675 - DNA, 25 bp, Homo sapien
tacagtgtccctgaatctaccattc

SEQ ID NO: 3996676 - DNA, 25 bp, Homo sapien
ggtggccatagaactattcccactg

SEQ ID NO: 3996677 - DNA, 25 bp, Homo sapien
gccatagaactattcccactggaag

SEQ ID NO: 3996678 - DNA, 25 bp, Homo sapien
cacaggtggccatagaactattccc

SEQ ID NO: 3996679 - DNA, 25 bp, Homo sapien
catagaactattcccactggaagtc

SEQ ID NO: 3996680 - DNA, 25 bp, Homo sapien
tcagaacctttgagttgactgcaat

SEQ ID NO: 3996681 - DNA, 25 bp, Homo sapien
ggcatggctcagaacctttgagttg

SEQ ID NO: 3996682 - DNA, 25 bp, Homo sapien
gagttgactgcaattccctgtggcc

SEQ ID NO: 3996683 - DNA, 25 bp, Homo sapien
agttgactgcaattccctgtggcct

SEQ ID NO: 3996684 - DNA, 25 bp, Homo sapien
tgggtctggtggtccaagtaacttc

SEQ ID NO: 3996685 - DNA, 25 bp, Homo sapien
agtagcttctgagtgcctcttaact

SEQ ID NO: 3996686 - DNA, 25 bp, Homo sapien
tagcttctgagtgcctcttaactca

SEQ ID NO: 3996687 - DNA, 25 bp, Homo sapien
gtagcttctgagtgcctcttaactc

SEQ ID NO: 3996688 - DNA, 25 bp, Homo sapien
agcttctgagtgcctcttaactcac

SEQ ID NO: 3996689 - DNA, 25 bp, Homo sapien
gggtacacagtttaggatcactggg

SEQ ID NO: 3996690 - DNA, 25 bp, Homo sapien
agacctgtgggtacacagtttagga

SEQ ID NO: 3996691 - DNA, 25 bp, Homo sapien
cacataactaaaagacctgtgggta

SEQ ID NO: 3996692 - DNA, 25 bp, Homo sapien
ggcactgtttccaaactaaacgcaa

SEQ ID NO: 3996693 - DNA, 25 bp, Homo sapien
tcctccagagtcatccccaacactc

SEQ ID NO: 3996694 - DNA, 25 bp, Homo sapien
cagttgctccaaagccctttgtgcc

SEQ ID NO: 3996695 - DNA, 25 bp, Homo sapien
ttcagttgctccaaagccctttgtg

SEQ ID NO: 3996696 - DNA, 25 bp, Homo sapien
tcagttgctccaaagccctttgtgc

SEQ ID NO: 3996697 - DNA, 25 bp, Homo sapien
tccccaagggagctcaggacaaaat

SEQ ID NO: 3996698 - DNA, 25 bp, Homo sapien
tgataggtccccaagggagctcagg

SEQ ID NO: 3996699 - DNA, 25 bp, Homo sapien
gacaaaatcactagaagctccagat

SEQ ID NO: 3996700 - DNA, 25 bp, Homo sapien
atcactagaagctccagattggcag

SEQ ID NO: 3996701 - DNA, 25 bp, Homo sapien
aggatggaccttcaatcattggcag

SEQ ID NO: 3996702 - DNA, 25 bp, Homo sapien
aacctaacctaagaagcatgtgtgc

SEQ ID NO: 3996703 - DNA, 25 bp, Homo sapien
tactgagctgtagttgttccaacat

SEQ ID NO: 3996704 - DNA, 25 bp, Homo sapien
acacagggcaagctgggagtgctaa

SEQ ID NO: 3996705 - DNA, 25 bp, Homo sapien
ttatgaaagcgctagatggcatatg

SEQ ID NO: 3996706 - DNA, 25 bp, Homo sapien
tatgtagtaggtgttagtgtccagg

SEQ ID NO: 3996707 - DNA, 25 bp, Homo sapien
tattttattgtagcacgtgcaactc

SEQ ID NO: 3996708 - DNA, 25 bp, Homo sapien
cacttggcatccaccattccagggt

SEQ ID NO: 3996709 - DNA, 25 bp, Homo sapien
gaaagctagaggtgaggccctccac

SEQ ID NO: 3996710 - DNA, 25 bp, Homo sapien
gagaattgggatagtcttggtccac

SEQ ID NO: 3996711 - DNA, 25 bp, Homo sapien
gcaagagccacagccgggagaaagc

SEQ ID NO: 3996712 - DNA, 25 bp, Homo sapien
aatggtcaggtacttgagaattggg

SEQ ID NO: 3996713 - DNA, 25 bp, Homo sapien
accaagagttggtagaaatcctgcc

SEQ ID NO: 3996714 - DNA, 25 bp, Homo sapien
taaatacagacgtgctgccttccgg

SEQ ID NO: 3996715 - DNA, 25 bp, Homo sapien
gaggcactggtattctgcactgcag

SEQ ID NO: 3996716 - DNA, 25 bp, Homo sapien
tccccagtgtaaggatatcggagct

SEQ ID NO: 3996717 - DNA, 25 bp, Homo sapien
tggttaatctctgaaaagtaatgca

SEQ ID NO: 3996718 - DNA, 25 bp, Homo sapien
ggttaatctctgaaaagtaatgcat

SEQ ID NO: 3996719 - DNA, 25 bp, Homo sapien
ctggttaatctctgaaaagtaatgc

SEQ ID NO: 3996720 - DNA, 25 bp, Homo sapien
gtctgtgtaggatggaaggcaggct

SEQ ID NO: 3996721 - DNA, 25 bp, Homo sapien
aaatttccaccgttgtctgtgtagg

SEQ ID NO: 3996722 - DNA, 25 bp, Homo sapien
tatacagctccataactaaatttcc

SEQ ID NO: 3996723 - DNA, 25 bp, Homo sapien
cataactaaatttccaccgttgtct

SEQ ID NO: 3996724 - DNA, 25 bp, Homo sapien
tggtgagtgttggttgtaaagaaga

SEQ ID NO: 3996725 - DNA, 25 bp, Homo sapien
gaaataagttttgacagccccgaga

SEQ ID NO: 3996726 - DNA, 25 bp, Homo sapien
ttctacatcagctttattcaccgtg

SEQ ID NO: 3996727 - DNA, 25 bp, Homo sapien
ctttattcaccgtgttgtgtggttg

SEQ ID NO: 3996728 - DNA, 25 bp, Homo sapien
ctgacatgcaggatgacagtatggc

SEQ ID NO: 3996729 - DNA, 25 bp, Homo sapien
caggatgacagtatggcatgggaat

SEQ ID NO: 3996730 - DNA, 25 bp, Homo sapien
gacagtatggcatgggaattggtat

SEQ ID NO: 3996731 - DNA, 25 bp, Homo sapien
tatggcatgggaattggtattccag

SEQ ID NO: 3996732 - DNA, 25 bp, Homo sapien
tgctgctgaaacctttatgtgcggg

SEQ ID NO: 3996733 - DNA, 25 bp, Homo sapien
gaaacattctcggacaagtgcggat

SEQ ID NO: 3996734 - DNA, 25 bp, Homo sapien
tatgtgcgggttttaacccagagga

SEQ ID NO: 3996735 - DNA, 25 bp, Homo sapien
taactccagaaagtggcccaaacag

SEQ ID NO: 3996736 - DNA, 25 bp, Homo sapien
gagggcagtatggattaatcgcttc

SEQ ID NO: 3996737 - DNA, 25 bp, Homo sapien
tccaaggaaatataactgaacccac

SEQ ID NO: 3996738 - DNA, 25 bp, Homo sapien
ggattaatcgcttcagcatccaaaa

SEQ ID NO: 3996739 - DNA, 25 bp, Homo sapien
caaggaaatataactgaacccacag

SEQ ID NO: 3996740 - DNA, 25 bp, Homo sapien
caacagcctgtgtgcttaggagtgg

SEQ ID NO: 3996741 - DNA, 25 bp, Homo sapien
catgtttgtccacgaagattgtcac

SEQ ID NO: 3996742 - DNA, 25 bp, Homo sapien
catgttaggtgaaagacacaggttc

SEQ ID NO: 3996743 - DNA, 25 bp, Homo sapien
caggttcacaaagtctgcggaggca

SEQ ID NO: 3996744 - DNA, 25 bp, Homo sapien
gactggtgtcacctgtcagcacttc

SEQ ID NO: 3996745 - DNA, 25 bp, Homo sapien
gggtgctgcaagtctgttttgtgac

SEQ ID NO: 3996746 - DNA, 25 bp, Homo sapien
aagctcctgcttgttgggacccaca

SEQ ID NO: 3996747 - DNA, 25 bp, Homo sapien
aattttggcacatctcccaagctgg

SEQ ID NO: 3996748 - DNA, 25 bp, Homo sapien
tctctttgaaagagctagtgcagta

SEQ ID NO: 3996749 - DNA, 25 bp, Homo sapien
taaagtgttcctgtgcaacttgggc

SEQ ID NO: 3996750 - DNA, 25 bp, Homo sapien
tgaaagagctagtgcagtagatcat

SEQ ID NO: 3996751 - DNA, 25 bp, Homo sapien
ggctgccagtgaaataccaatttct

SEQ ID NO: 3996752 - DNA, 25 bp, Homo sapien
ctttgcatggccatggtgcttagac

SEQ ID NO: 3996753 - DNA, 25 bp, Homo sapien
catggccatggtgcttagactcttg

SEQ ID NO: 3996754 - DNA, 25 bp, Homo sapien
ccatggtgcttagactcttgtgcca

SEQ ID NO: 3996755 - DNA, 25 bp, Homo sapien
cctttctttgcatggccatggtgct

SEQ ID NO: 3996756 - DNA, 25 bp, Homo sapien
agattgtcacacgtggctgaatggg

SEQ ID NO: 3996757 - DNA, 25 bp, Homo sapien
gggacagattgtcacacgtggctga

SEQ ID NO: 3996758 - DNA, 25 bp, Homo sapien
ctgggacagattgtcacacgtggct

SEQ ID NO: 3996759 - DNA, 25 bp, Homo sapien
gacagattgtcacacgtggctgaat

SEQ ID NO: 3996760 - DNA, 25 bp, Homo sapien
ttattccatttataagcagaacccg

SEQ ID NO: 3996761 - DNA, 25 bp, Homo sapien
cagaacccgaagagttagcacttct

SEQ ID NO: 3996762 - DNA, 25 bp, Homo sapien
tgtacaaggttaaagcgctcatggg

SEQ ID NO: 3996763 - DNA, 25 bp, Homo sapien
taaggatattgagcatgtacaaggt

SEQ ID NO: 3996764 - DNA, 25 bp, Homo sapien
ctcagactgatgctatagggaatac

SEQ ID NO: 3996765 - DNA, 25 bp, Homo sapien
ttagcccagaaggtagtaactgaca

SEQ ID NO: 3996766 - DNA, 25 bp, Homo sapien
tgacagagctagcacttgaccccat

SEQ ID NO: 3996767 - DNA, 25 bp, Homo sapien
tgtctgttacccacaacgtgctcag

SEQ ID NO: 3996768 - DNA, 25 bp, Homo sapien
ttatatttacccagagaacatgctg

SEQ ID NO: 3996769 - DNA, 25 bp, Homo sapien
cagttgaactatatgggccagtttc

SEQ ID NO: 3996770 - DNA, 25 bp, Homo sapien
tcaactagcatggaaatcctgggcc

SEQ ID NO: 3996771 - DNA, 25 bp, Homo sapien
gtttctcactaaagacagttgaact

SEQ ID NO: 3996772 - DNA, 25 bp, Homo sapien
gggaaatcacacctttgcagtgcat

SEQ ID NO: 3996773 - DNA, 25 bp, Homo sapien
aaatcacacctttgcagtgcatgtg

SEQ ID NO: 3996774 - DNA, 25 bp, Homo sapien
ataacgagcggcagttctcggccca

SEQ ID NO: 3996775 - DNA, 25 bp, Homo sapien
gggaaacagacataacgagcggcag

SEQ ID NO: 3996776 - DNA, 25 bp, Homo sapien
gggaagctttcagaacatgcacatc

SEQ ID NO: 3996777 - DNA, 25 bp, Homo sapien
cttcagcaatagagagggaagcttt

SEQ ID NO: 3996778 - DNA, 25 bp, Homo sapien
taaaactcgcaagtttccctgcaca

SEQ ID NO: 3996779 - DNA, 25 bp, Homo sapien
tccacacgggaatactggaaagtgt

SEQ ID NO: 3996780 - DNA, 25 bp, Homo sapien
tctactatctgatgctatggaggga

SEQ ID NO: 3996781 - DNA, 25 bp, Homo sapien
gaaagtgtgtccagctctactatct

SEQ ID NO: 3996782 - DNA, 25 bp, Homo sapien
gagtcttgatatcagatggcagatg

SEQ ID NO: 3996783 - DNA, 25 bp, Homo sapien
ttccattgcctcaaatgttgtagag

SEQ ID NO: 3996784 - DNA, 25 bp, Homo sapien
cattgcctcaaatgttgtagagaag

SEQ ID NO: 3996785 - DNA, 25 bp, Homo sapien
agtcttgatatcagatggcagatga

SEQ ID NO: 3996786 - DNA, 25 bp, Homo sapien
agtatggattttcttactactcagc

SEQ ID NO: 3996787 - DNA, 25 bp, Homo sapien
cctcttcagcttctgagtatggatt

SEQ ID NO: 3996788 - DNA, 25 bp, Homo sapien
ttctgagtatggattttcttactac

SEQ ID NO: 3996789 - DNA, 25 bp, Homo sapien
agcttctgagtatggattttcttac

SEQ ID NO: 3996790 - DNA, 25 bp, Homo sapien
catgtgtccttgagaactagctccc

SEQ ID NO: 3996791 - DNA, 25 bp, Homo sapien
tgtcaccaaagatgctactgtaccc

SEQ ID NO: 3996792 - DNA, 25 bp, Homo sapien
tactgtaccctcatgatccaaagca

SEQ ID NO: 3996793 - DNA, 25 bp, Homo sapien
tctgtttctggctgactactgctaa

SEQ ID NO: 3996794 - DNA, 25 bp, Homo sapien
gctgtcctggccaatgaataaaaat

SEQ ID NO: 3996795 - DNA, 25 bp, Homo sapien
ggctgtcctggccaatgaataaaaa

SEQ ID NO: 3996796 - DNA, 25 bp, Homo sapien
atttcaccttgtgttgctggtccat

SEQ ID NO: 3996797 - DNA, 25 bp, Homo sapien
attggattcaaaagaattaatttca

SEQ ID NO: 3996798 - DNA, 25 bp, Homo sapien
aagcgtgggtgatcgtgcaactgca

SEQ ID NO: 3996799 - DNA, 25 bp, Homo sapien
tgaaaaggctggtacatccgaatcc

SEQ ID NO: 3996800 - DNA, 25 bp, Homo sapien
catagcatgccaacaggagggtaaa

SEQ ID NO: 3996801 - DNA, 25 bp, Homo sapien
tccaaggagctgctagctgaagcgt

SEQ ID NO: 3996802 - DNA, 25 bp, Homo sapien
tgtttgctcgttcacgactgcagga

SEQ ID NO: 3996803 - DNA, 25 bp, Homo sapien
tttgctcgttcacgactgcaggagg

SEQ ID NO: 3996804 - DNA, 25 bp, Homo sapien
ttgctcgttcacgactgcaggaggg

SEQ ID NO: 3996805 - DNA, 25 bp, Homo sapien
tcttgtttgctcgttcacgactgca

SEQ ID NO: 3996806 - DNA, 25 bp, Homo sapien
cacgtccatagaaaccctactatgg

SEQ ID NO: 3996807 - DNA, 25 bp, Homo sapien
cagcatttgacacccacgtccatag

SEQ ID NO: 3996808 - DNA, 25 bp, Homo sapien
tagaaaccctactatggaacgtgga

SEQ ID NO: 3996809 - DNA, 25 bp, Homo sapien
ccctactatggaacgtggagagacc

SEQ ID NO: 3996810 - DNA, 25 bp, Homo sapien
gtcagatataattccgcctttgtag

SEQ ID NO: 3996811 - DNA, 25 bp, Homo sapien
agggcaggtcagatataattccgcc

SEQ ID NO: 3996812 - DNA, 25 bp, Homo sapien
gcctttgtagcaccgcaaagtgtat

SEQ ID NO: 3996813 - DNA, 25 bp, Homo sapien
taaagttgggtgtccttatcttggc

SEQ ID NO: 3996814 - DNA, 25 bp, Homo sapien
cattaaagacctcattttggccagc

SEQ ID NO: 3996815 - DNA, 25 bp, Homo sapien
gccatcagtgaagatccatctcact

SEQ ID NO: 3996816 - DNA, 25 bp, Homo sapien
agctggagtgtgctttttccttggt

SEQ ID NO: 3996817 - DNA, 25 bp, Homo sapien
cctgctggagtttggtcaggcatta

SEQ ID NO: 3996818 - DNA, 25 bp, Homo sapien
caacttacttaatgtggccctgaag

SEQ ID NO: 3996819 - DNA, 25 bp, Homo sapien
tcctgcattggctttgattgccaac

SEQ ID NO: 3996820 - DNA, 25 bp, Homo sapien
cagcgaaaagcagttgtgtggcaaa

SEQ ID NO: 3996821 - DNA, 25 bp, Homo sapien
ggcaaaggacatgatgactcctgca

SEQ ID NO: 3996822 - DNA, 25 bp, Homo sapien
tccatcctgcaacttaacatgtgag

SEQ ID NO: 3996823 - DNA, 25 bp, Homo sapien
caacttaacatgtgagtgcaagaca

SEQ ID NO: 3996824 - DNA, 25 bp, Homo sapien
catgtgagtgcaagacaaaggagga

SEQ ID NO: 3996825 - DNA, 25 bp, Homo sapien
cctgcaacttaacatgtgagtgcaa

SEQ ID NO: 3996826 - DNA, 25 bp, Homo sapien
cctgagtcttgtaggactactctct

SEQ ID NO: 3996827 - DNA, 25 bp, Homo sapien
tggtcccgtgaaaatgagccttgtc

SEQ ID NO: 3996828 - DNA, 25 bp, Homo sapien
gccttgtccgcatgaacttccacta

SEQ ID NO: 3996829 - DNA, 25 bp, Homo sapien
gactactctctgtggtcccgtgaaa

SEQ ID NO: 3996830 - DNA, 25 bp, Homo sapien
agagaaaaccttaattcgagcattt

SEQ ID NO: 3996831 - DNA, 25 bp, Homo sapien
ttggattgtttaaagaatccactgg

SEQ ID NO: 3996832 - DNA, 25 bp, Homo sapien
cactggtgttgacacgacgcgtagc

SEQ ID NO: 3996833 - DNA, 25 bp, Homo sapien
tgtttagtcaccattggattgttta

SEQ ID NO: 3996834 - DNA, 25 bp, Homo sapien
attgagagcacgtcgatcaactcac

SEQ ID NO: 3996835 - DNA, 25 bp, Homo sapien
tcatattgagagcacgtcgatcaac

SEQ ID NO: 3996836 - DNA, 25 bp, Homo sapien
tattgagagcacgtcgatcaactca

SEQ ID NO: 3996837 - DNA, 25 bp, Homo sapien
catattgagagcacgtcgatcaact

SEQ ID NO: 3996838 - DNA, 25 bp, Homo sapien
atctcccctgttggatttcccattc

SEQ ID NO: 3996839 - DNA, 25 bp, Homo sapien
tttgcagttcctttaggtccttgct

SEQ ID NO: 3996840 - DNA, 25 bp, Homo sapien
ccctgttggatttcccattccttca

SEQ ID NO: 3996841 - DNA, 25 bp, Homo sapien
ttttgcagttcctttaggtccttgc

SEQ ID NO: 3996842 - DNA, 25 bp, Homo sapien
tgtggacccctgcagtactgtgctt

SEQ ID NO: 3996843 - DNA, 25 bp, Homo sapien
ctgttgacattgaggtgtggacccc

SEQ ID NO: 3996844 - DNA, 25 bp, Homo sapien
gctttgtgggttccaagcaacttca

SEQ ID NO: 3996845 - DNA, 25 bp, Homo sapien
aatccttcatatgctcctggcttca

SEQ ID NO: 3996846 - DNA, 25 bp, Homo sapien
gaatctctaggcaatatgtgtcacc

SEQ ID NO: 3996847 - DNA, 25 bp, Homo sapien
tatgccctcgtggtcattgcgtttc

SEQ ID NO: 3996848 - DNA, 25 bp, Homo sapien
ttcctcttgccaacctggtactggg

SEQ ID NO: 3996849 - DNA, 25 bp, Homo sapien
tactattgggtcttcgtcaaaatcg

SEQ ID NO: 3996850 - DNA, 25 bp, Homo sapien
tgaactcagtaacacatcctgaggg

SEQ ID NO: 3996851 - DNA, 25 bp, Homo sapien
tgccttctatgtaaatcaacctatt

SEQ ID NO: 3996852 - DNA, 25 bp, Homo sapien
cacttgcctgccttctatgtaaatc

SEQ ID NO: 3996853 - DNA, 25 bp, Homo sapien
atcctgagggggcatattcgaggac

SEQ ID NO: 3996854 - DNA, 25 bp, Homo sapien
cccaactgcctgtcaggcattttgt

SEQ ID NO: 3996855 - DNA, 25 bp, Homo sapien
tgtggttgtattttctggcagaagg

SEQ ID NO: 3996856 - DNA, 25 bp, Homo sapien
cctttgccccatacgcgtagtgcaa

SEQ ID NO: 3996857 - DNA, 25 bp, Homo sapien
caaccgtcactgtcgtctgtgctca

SEQ ID NO: 3996858 - DNA, 25 bp, Homo sapien
tagtcctccttgttttagaagcaaa

SEQ ID NO: 3996859 - DNA, 25 bp, Homo sapien
atagtcctccttgttttagaagcaa

SEQ ID NO: 3996860 - DNA, 25 bp, Homo sapien
tctcaaataaagctcaaagcgagca

SEQ ID NO: 3996861 - DNA, 25 bp, Homo sapien
tgggaagccacaacatttattacat

SEQ ID NO: 3996862 - DNA, 25 bp, Homo sapien
cacacgggctatgtctgtgcacaca

SEQ ID NO: 3996863 - DNA, 25 bp, Homo sapien
caaatgccaactaagtcacacgggc

SEQ ID NO: 3996864 - DNA, 25 bp, Homo sapien
tcctttcctacttggagcttagggc

SEQ ID NO: 3996865 - DNA, 25 bp, Homo sapien
tacttggagcttagggccgaaacca

SEQ ID NO: 3996866 - DNA, 25 bp, Homo sapien
catgaggcgatttctctactttgct

SEQ ID NO: 3996867 - DNA, 25 bp, Homo sapien
ttagggccgaaaccatgaggcgatt

SEQ ID NO: 3996868 - DNA, 25 bp, Homo sapien
tgcctatgactatcaggcatctgaa

SEQ ID NO: 3996869 - DNA, 25 bp, Homo sapien
tcaatacatggttgagtgttcttct

SEQ ID NO: 3996870 - DNA, 25 bp, Homo sapien
tttgcctatgactatcaggcatctg

SEQ ID NO: 3996871 - DNA, 25 bp, Homo sapien
aatacatggttgagtgttcttcttc

SEQ ID NO: 3996872 - DNA, 25 bp, Homo sapien
cagctggccatatcagagacaacac

SEQ ID NO: 3996873 - DNA, 25 bp, Homo sapien
cacagttacacaaacctttgcctgt

SEQ ID NO: 3996874 - DNA, 25 bp, Homo sapien
cagttacacaaacctttgcctgttt

SEQ ID NO: 3996875 - DNA, 25 bp, Homo sapien
gttacacaaacctttgcctgtttga

SEQ ID NO: 3996876 - DNA, 25 bp, Homo sapien
tctttaagcccgttagacccacata

SEQ ID NO: 3996877 - DNA, 25 bp, Homo sapien
cccactgctatgatctttaagcccg

SEQ ID NO: 3996878 - DNA, 25 bp, Homo sapien
tggtctgagttacttcgatggccat

SEQ ID NO: 3996879 - DNA, 25 bp, Homo sapien
agacccacatattctttggtctgag

SEQ ID NO: 3996880 - DNA, 25 bp, Homo sapien
aacaaggtcatgaggcagctgggcc

SEQ ID NO: 3996881 - DNA, 25 bp, Homo sapien
gaaactgtccggttcgtgataggag

SEQ ID NO: 3996882 - DNA, 25 bp, Homo sapien
agccttggcaatcacatctcttccc

SEQ ID NO: 3996883 - DNA, 25 bp, Homo sapien
agaaagaaactgtccggttcgtgat

SEQ ID NO: 3996884 - DNA, 25 bp, Homo sapien
caggggctctacacaaactgatgtg

SEQ ID NO: 3996885 - DNA, 25 bp, Homo sapien
cattcaaactcccagtgtgcctcat

SEQ ID NO: 3996886 - DNA, 25 bp, Homo sapien
ctcagtgtgctaccccatgtgtcca

SEQ ID NO: 3996887 - DNA, 25 bp, Homo sapien
tagtggacatggctttctctcagtg

SEQ ID NO: 3996888 - DNA, 25 bp, Homo sapien
tagatctctgtcttcgaagtcatgc

SEQ ID NO: 3996889 - DNA, 25 bp, Homo sapien
catggctgattttcggtagtggaca

SEQ ID NO: 3996890 - DNA, 25 bp, Homo sapien
tctgccgagggtgtgactcattcca

SEQ ID NO: 3996891 - DNA, 25 bp, Homo sapien
gacagtgttctgtagatgggctcaa

SEQ ID NO: 3996892 - DNA, 25 bp, Homo sapien
gactgtttctacgtgtactgcccca

SEQ ID NO: 3996893 - DNA, 25 bp, Homo sapien
cactgtctcggaaaaaagctctagc

SEQ ID NO: 3996894 - DNA, 25 bp, Homo sapien
tgcggacactagtgtgttaatgtct

SEQ ID NO: 3996895 - DNA, 25 bp, Homo sapien
catgcaggaaatacccctagagctg

SEQ ID NO: 3996896 - DNA, 25 bp, Homo sapien
tacccctagagctgcggacactagt

SEQ ID NO: 3996897 - DNA, 25 bp, Homo sapien
cagtaccacatgcaggaaatacccc

SEQ ID NO: 3996898 - DNA, 25 bp, Homo sapien
ataatagcatttggggaatcatgaa

SEQ ID NO: 3996899 - DNA, 25 bp, Homo sapien
aaagttctacatgggccagacatgc

SEQ ID NO: 3996900 - DNA, 25 bp, Homo sapien
ggccagacatgctgaggctctgtca

SEQ ID NO: 3996901 - DNA, 25 bp, Homo sapien
catttggggaatcatgaaaagcttt

SEQ ID NO: 3996902 - DNA, 25 bp, Homo sapien
ccaaatagctttcaagaagcctcag

SEQ ID NO: 3996903 - DNA, 25 bp, Homo sapien
gatccaaatagctttcaagaagcct

SEQ ID NO: 3996904 - DNA, 25 bp, Homo sapien
tccaaatagctttcaagaagcctca

SEQ ID NO: 3996905 - DNA, 25 bp, Homo sapien
agatccaaatagctttcaagaagcc

SEQ ID NO: 3996906 - DNA, 25 bp, Homo sapien
ctgttgccagcagagactcatccat

SEQ ID NO: 3996907 - DNA, 25 bp, Homo sapien
ctccatgaatgccagccaaggtgtt

SEQ ID NO: 3996908 - DNA, 25 bp, Homo sapien
ctatagaagaaagcctcagaccact

SEQ ID NO: 3996909 - DNA, 25 bp, Homo sapien
gatgtcatgacttgtcctccatgaa

SEQ ID NO: 3996910 - DNA, 25 bp, Homo sapien
aaccctgtatctatagaagaaagcc

SEQ ID NO: 3996911 - DNA, 25 bp, Homo sapien
ttccttgctgcagaagccgcttggt

SEQ ID NO: 3996912 - DNA, 25 bp, Homo sapien
gatgaagaaggagattgtcctccac

SEQ ID NO: 3996913 - DNA, 25 bp, Homo sapien
ccttgctgcagaagccgcttggttg

SEQ ID NO: 3996914 - DNA, 25 bp, Homo sapien
gaagaaggagattgtcctccacttc

SEQ ID NO: 3996915 - DNA, 25 bp, Homo sapien
agcggcactgtatcaccagccctag

SEQ ID NO: 3996916 - DNA, 25 bp, Homo sapien
ggcactgtatcaccagccctagcag

SEQ ID NO: 3996917 - DNA, 25 bp, Homo sapien
tggagttcagtcatattggcatcag

SEQ ID NO: 3996918 - DNA, 25 bp, Homo sapien
ggcggtggcgacaacaaccacaaaa

SEQ ID NO: 3996919 - DNA, 25 bp, Homo sapien
caagcatattatagtatgtctgttt

SEQ ID NO: 3996920 - DNA, 25 bp, Homo sapien
ttaggtaactgtttgtgggcacatt

SEQ ID NO: 3996921 - DNA, 25 bp, Homo sapien
caaggggaacgtacaattgtaacat

SEQ ID NO: 3996922 - DNA, 25 bp, Homo sapien
ctgagccagatgtacaagcatatta

SEQ ID NO: 3996923 - DNA, 25 bp, Homo sapien
aaagcgactgctgagtatctaaggg

SEQ ID NO: 3996924 - DNA, 25 bp, Homo sapien
tggagtatacaaagcgactgctgag

SEQ ID NO: 3996925 - DNA, 25 bp, Homo sapien
gcttcctggagtatacaaagcgact

SEQ ID NO: 3996926 - DNA, 25 bp, Homo sapien
gactgctgagtatctaagggatctc

SEQ ID NO: 3996927 - DNA, 25 bp, Homo sapien
tactggcctcagtgacgtcagaccc

SEQ ID NO: 3996928 - DNA, 25 bp, Homo sapien
gcctcagtgacgtcagaccccaaag

SEQ ID NO: 3996929 - DNA, 25 bp, Homo sapien
ctcagtgacgtcagaccccaaagga

SEQ ID NO: 3996930 - DNA, 25 bp, Homo sapien
gaaatactggcctcagtgacgtcag

SEQ ID NO: 3996931 - DNA, 25 bp, Homo sapien
ggtgttgcctaggataaaatttcaa

SEQ ID NO: 3996932 - DNA, 25 bp, Homo sapien
gcaatagcagttttgttctggaaga

SEQ ID NO: 3996933 - DNA, 25 bp, Homo sapien
tactagttgcatgattacgggcaaa

SEQ ID NO: 3996934 - DNA, 25 bp, Homo sapien
gctttaacagtgagtaccagacgag

SEQ ID NO: 3996935 - DNA, 25 bp, Homo sapien
gattgataatgtgcttcggtaccaa

SEQ ID NO: 3996936 - DNA, 25 bp, Homo sapien
aatgtgcttcggtaccaatgtaaca

SEQ ID NO: 3996937 - DNA, 25 bp, Homo sapien
tcagctaaatccatatattcatctc

SEQ ID NO: 3996938 - DNA, 25 bp, Homo sapien
tgtagcttacctctaagcccctcag

SEQ ID NO: 3996939 - DNA, 25 bp, Homo sapien
gacgggctccgagtggcaccaaagc

SEQ ID NO: 3996940 - DNA, 25 bp, Homo sapien
ggacgggctccgagtggcaccaaag

SEQ ID NO: 3996941 - DNA, 25 bp, Homo sapien
gggggacgggctccgagtggcacca

SEQ ID NO: 3996942 - DNA, 25 bp, Homo sapien
gggacgggctccgagtggcaccaaa

SEQ ID NO: 3996943 - DNA, 25 bp, Homo sapien
tgtgtgactgcaaggcgccggctct

SEQ ID NO: 3996944 - DNA, 25 bp, Homo sapien
tgtatgcgtggatccgtgtgtgact

SEQ ID NO: 3996945 - DNA, 25 bp, Homo sapien
tagtaatagcgcgtagtagttcggg

SEQ ID NO: 3996946 - DNA, 25 bp, Homo sapien
ggaatttaactgtgcctccgcctgc

SEQ ID NO: 3996947 - DNA, 25 bp, Homo sapien
cggtgtgcaagaatgtggatctaga

SEQ ID NO: 3996948 - DNA, 25 bp, Homo sapien
cagctcagcgactccgggagcgcgg

SEQ ID NO: 3996949 - DNA, 25 bp, Homo sapien
agaatgtggatctagacagctctac

SEQ ID NO: 3996950 - DNA, 25 bp, Homo sapien
tgtgcaagaatgtggatctagacag

SEQ ID NO: 3996951 - DNA, 25 bp, Homo sapien
ctcctcttcctaaactcgggctccg

SEQ ID NO: 3996952 - DNA, 25 bp, Homo sapien
tcattgatgacagccgtcccctcct

SEQ ID NO: 3996953 - DNA, 25 bp, Homo sapien
ggcgccggaagacgcgccgcagttg

SEQ ID NO: 3996954 - DNA, 25 bp, Homo sapien
taaactcgggctccgcccagcgtcc

SEQ ID NO: 3996955 - DNA, 25 bp, Homo sapien
gaggagtgtgctggctgaatctctt

SEQ ID NO: 3996956 - DNA, 25 bp, Homo sapien
cttgctcgcgaggagtgtgctggct

SEQ ID NO: 3996957 - DNA, 25 bp, Homo sapien
tcgcgaggagtgtgctggctgaatc

SEQ ID NO: 3996958 - DNA, 25 bp, Homo sapien
gctcgcgaggagtgtgctggctgaa

SEQ ID NO: 3996959 - DNA, 25 bp, Homo sapien
gtggcaacagcgtccgttggcgccc

SEQ ID NO: 3996960 - DNA, 25 bp, Homo sapien
agggttgcccgggatgaacagtagc

SEQ ID NO: 3996961 - DNA, 25 bp, Homo sapien
gaagcgggtggcaacagcgtccgtt

SEQ ID NO: 3996962 - DNA, 25 bp, Homo sapien
ccgggatgaacagtagcgtttccat

SEQ ID NO: 3996963 - DNA, 25 bp, Homo sapien
aacgcggaaagtggaggtgacacct

SEQ ID NO: 3996964 - DNA, 25 bp, Homo sapien
gtctccgcagccggagccctttgaa

SEQ ID NO: 3996965 - DNA, 25 bp, Homo sapien
cttcgcgcgtcagctcaggcttctc

SEQ ID NO: 3996966 - DNA, 25 bp, Homo sapien
catccacgccggaggaaacgcggaa

SEQ ID NO: 3996967 - DNA, 25 bp, Homo sapien
ttatccggatcatggcctcccgggc

SEQ ID NO: 3996968 - DNA, 25 bp, Homo sapien
caggattatccggatcatggcctcc

SEQ ID NO: 3996969 - DNA, 25 bp, Homo sapien
tcaggcagacaggattatccggatc

SEQ ID NO: 3996970 - DNA, 25 bp, Homo sapien
cagacaggattatccggatcatggc

SEQ ID NO: 3996971 - DNA, 25 bp, Homo sapien
aggcgagcgatcagacactggcagg

SEQ ID NO: 3996972 - DNA, 25 bp, Homo sapien
agtgccccggccaaggcgcgggtgt

SEQ ID NO: 3996973 - DNA, 25 bp, Homo sapien
gcagcaaacggcaacccggataaaa

SEQ ID NO: 3996974 - DNA, 25 bp, Homo sapien
caggaggcgatttccccgcgtgtac

SEQ ID NO: 3996975 - DNA, 25 bp, Homo sapien
ggctcctgcgcgcacaacacacact

SEQ ID NO: 3996976 - DNA, 25 bp, Homo sapien
acactcacgcgcagacacactcgcg

SEQ ID NO: 3996977 - DNA, 25 bp, Homo sapien
tcacgcgcagacacactcgcgccgg

SEQ ID NO: 3996978 - DNA, 25 bp, Homo sapien
cgctgctcccgacgcactggctcct

SEQ ID NO: 3996979 - DNA, 25 bp, Homo sapien
cctgactttgcaggaaaggcgagcc

SEQ ID NO: 3996980 - DNA, 25 bp, Homo sapien
acaaggagcccatttcccccgcctg

SEQ ID NO: 3996981 - DNA, 25 bp, Homo sapien
cacgcaatcgatcggaggacaagga

SEQ ID NO: 3996982 - DNA, 25 bp, Homo sapien
ttccacgcaatcgatcggaggacaa

SEQ ID NO: 3996983 - DNA, 25 bp, Homo sapien
aactgacaagcaacagcggccagca

SEQ ID NO: 3996984 - DNA, 25 bp, Homo sapien
agaactgacaagcaacagcggccag

SEQ ID NO: 3996985 - DNA, 25 bp, Homo sapien
actgacaagcaacagcggccagcaa

SEQ ID NO: 3996986 - DNA, 25 bp, Homo sapien
tgacaagcaacagcggccagcaagg

SEQ ID NO: 3996987 - DNA, 25 bp, Homo sapien
agtttgaatgtgcaacagccccggg

SEQ ID NO: 3996988 - DNA, 25 bp, Homo sapien
gaagtttgaatgtgcaacagccccg

SEQ ID NO: 3996989 - DNA, 25 bp, Homo sapien
gcccgaagtttgaatgtgcaacagc

SEQ ID NO: 3996990 - DNA, 25 bp, Homo sapien
ttaggcccgaagtttgaatgtgcaa

SEQ ID NO: 3996991 - DNA, 25 bp, Homo sapien
cacccggtgcagacattgaataagg

SEQ ID NO: 3996992 - DNA, 25 bp, Homo sapien
tctgttcagacaagcaaggcacaca

SEQ ID NO: 3996993 - DNA, 25 bp, Homo sapien
taaaaataaccgctcagtgcagtca

SEQ ID NO: 3996994 - DNA, 25 bp, Homo sapien
tccaaaagattactagcccaggtcg

SEQ ID NO: 3996995 - DNA, 25 bp, Homo sapien
aacttcttgctccaggcaaccggtc

SEQ ID NO: 3996996 - DNA, 25 bp, Homo sapien
acaatctccgactttatcttctgaa

SEQ ID NO: 3996997 - DNA, 25 bp, Homo sapien
tctgaaaattctccccaactggaac

SEQ ID NO: 3996998 - DNA, 25 bp, Homo sapien
aaacaggtacattggtctttccacg

SEQ ID NO: 3996999 - DNA, 25 bp, Homo sapien
ttgctgattcagaacatctcccctg

SEQ ID NO: 3997000 - DNA, 25 bp, Homo sapien
tctggctgttacaggagaactgcaa

SEQ ID NO: 3997001 - DNA, 25 bp, Homo sapien
gaattgataattcacccacaagaag

SEQ ID NO: 3997002 - DNA, 25 bp, Homo sapien
gggcagcacaccaaccttgacaata

SEQ ID NO: 3997003 - DNA, 25 bp, Homo sapien
aaagcactaatgagacaatagagat

SEQ ID NO: 3997004 - DNA, 25 bp, Homo sapien
cgacagcagtaagcatagtagggtg

SEQ ID NO: 3997005 - DNA, 25 bp, Homo sapien
taatgagacaatagagatagggtgg

SEQ ID NO: 3997006 - DNA, 25 bp, Homo sapien
gatagggtggtgacgacagcagtaa

SEQ ID NO: 3997007 - DNA, 25 bp, Homo sapien
tcagggctactacaagatacaatgc

SEQ ID NO: 3997008 - DNA, 25 bp, Homo sapien
tataccacgagtttgaacaatgaag

SEQ ID NO: 3997009 - DNA, 25 bp, Homo sapien
taggaagctgacgtcgattcagggc

SEQ ID NO: 3997010 - DNA, 25 bp, Homo sapien
tagtcccataaaaatgctcctcgtt

SEQ ID NO: 3997011 - DNA, 25 bp, Homo sapien
ttggcatccccattggaaatgcctc

SEQ ID NO: 3997012 - DNA, 25 bp, Homo sapien
aaatgcctcatagagtgggtacaac

SEQ ID NO: 3997013 - DNA, 25 bp, Homo sapien
cagatgaggtgtggaaattctggtt

SEQ ID NO: 3997014 - DNA, 25 bp, Homo sapien
tacaatttcagcagaactatattcc

SEQ ID NO: 3997015 - DNA, 25 bp, Homo sapien
cctgtctctgccagtcagtagagta

SEQ ID NO: 3997016 - DNA, 25 bp, Homo sapien
gtctctgccagtcagtagagtaatg

SEQ ID NO: 3997017 - DNA, 25 bp, Homo sapien
tcctgtctctgccagtcagtagagt

SEQ ID NO: 3997018 - DNA, 25 bp, Homo sapien
ctgtctctgccagtcagtagagtaa

SEQ ID NO: 3997019 - DNA, 25 bp, Homo sapien
tggggcatcgcaccagggtctgtgg

SEQ ID NO: 3997020 - DNA, 25 bp, Homo sapien
caccagggtctgtgggcgtggacat

SEQ ID NO: 3997021 - DNA, 25 bp, Homo sapien
gggcatcgcaccagggtctgtgggc

SEQ ID NO: 3997022 - DNA, 25 bp, Homo sapien
tgggtggggcatcgcaccagggtct

SEQ ID NO: 3997023 - DNA, 25 bp, Homo sapien
cgtcggcataggatgggagacactt

SEQ ID NO: 3997024 - DNA, 25 bp, Homo sapien
ggtcctggactaggcccaagaattg

SEQ ID NO: 3997025 - DNA, 25 bp, Homo sapien
ttcctgtgggaagtctgtggacccc

SEQ ID NO: 3997026 - DNA, 25 bp, Homo sapien
ccatcatgctgtggacggaacctgg

SEQ ID NO: 3997027 - DNA, 25 bp, Homo sapien
tgaatcgacattaatccaatccaga

SEQ ID NO: 3997028 - DNA, 25 bp, Homo sapien
cgtgacagacatgcaataaacagct

SEQ ID NO: 3997029 - DNA, 25 bp, Homo sapien
tttctgcagagtcaaaagtatgcac

SEQ ID NO: 3997030 - DNA, 25 bp, Homo sapien
tagaaaccaaatgacttcaagcaag

SEQ ID NO: 3997031 - DNA, 25 bp, Homo sapien
tcttcattggaagggaaggaaccat

SEQ ID NO: 3997032 - DNA, 25 bp, Homo sapien
gaaggaaggctgtttgacacatctg

SEQ ID NO: 3997033 - DNA, 25 bp, Homo sapien
ccacagggttccatggcagttggaa

SEQ ID NO: 3997034 - DNA, 25 bp, Homo sapien
tataggctatttttccataccctgg

SEQ ID NO: 3997035 - DNA, 25 bp, Homo sapien
tgaggtggtcgcataccagtgccct

SEQ ID NO: 3997036 - DNA, 25 bp, Homo sapien
ccttgtcatgtataccatcgatggg

SEQ ID NO: 3997037 - DNA, 25 bp, Homo sapien
ccttcatggatccacaatggatgtc

SEQ ID NO: 3997038 - DNA, 25 bp, Homo sapien
cttggctgtgttgatccattggact

SEQ ID NO: 3997039 - DNA, 25 bp, Homo sapien
gactgaaagactatgctggggaacc

SEQ ID NO: 3997040 - DNA, 25 bp, Homo sapien
gaaccagtatcaggtgtgcagcgga

SEQ ID NO: 3997041 - DNA, 25 bp, Homo sapien
ctggggaaccagtatcaggtgtgca

SEQ ID NO: 3997042 - DNA, 25 bp, Homo sapien
tatcaggtgtgcagcggacacaaac

SEQ ID NO: 3997043 - DNA, 25 bp, Homo sapien
gagacgtgctctggggctcctaatg

SEQ ID NO: 3997044 - DNA, 25 bp, Homo sapien
gtggcatctgaggtggagttgggcc

SEQ ID NO: 3997045 - DNA, 25 bp, Homo sapien
tggtggcatctgaggtggagttggg

SEQ ID NO: 3997046 - DNA, 25 bp, Homo sapien
gcctcctccagacatagggctggag

SEQ ID NO: 3997047 - DNA, 25 bp, Homo sapien
gggctggctcatggcctgcggatca

SEQ ID NO: 3997048 - DNA, 25 bp, Homo sapien
ggctggcctcgggccagcattttat

SEQ ID NO: 3997049 - DNA, 25 bp, Homo sapien
taaaatctgagctcgaagctgatgc

SEQ ID NO: 3997050 - DNA, 25 bp, Homo sapien
aaaggtgagggacctctgttgggct

SEQ ID NO: 3997051 - DNA, 25 bp, Homo sapien
cagatggtctgttgtagttaacaag

SEQ ID NO: 3997052 - DNA, 25 bp, Homo sapien
gcgtctgtggttgcggcggctgctg

SEQ ID NO: 3997053 - DNA, 25 bp, Homo sapien
gctgcgtctgtggttgcggcggctg

SEQ ID NO: 3997054 - DNA, 25 bp, Homo sapien
tgttgtagttaacaagggccggctg

SEQ ID NO: 3997055 - DNA, 25 bp, Homo sapien
ctaagtggagcaaggatagagagcc

SEQ ID NO: 3997056 - DNA, 25 bp, Homo sapien
tccaaagggcgagacttagatacag

SEQ ID NO: 3997057 - DNA, 25 bp, Homo sapien
caacccggtgttttggtgagcagtc

SEQ ID NO: 3997058 - DNA, 25 bp, Homo sapien
tcaaagagaacgcaaaatcacaggt

SEQ ID NO: 3997059 - DNA, 25 bp, Homo sapien
actgagaatggcacatgagtaggcc

SEQ ID NO: 3997060 - DNA, 25 bp, Homo sapien
caatgcttgcatcttggtacacaga

SEQ ID NO: 3997061 - DNA, 25 bp, Homo sapien
caggcactcagggaggataagccac

SEQ ID NO: 3997062 - DNA, 25 bp, Homo sapien
aatgcctccatggtagccacacaga

SEQ ID NO: 3997063 - DNA, 25 bp, Homo sapien
tcttcacatactgagacatgggata

SEQ ID NO: 3997064 - DNA, 25 bp, Homo sapien
cagctggcctctacttgaaattctc

SEQ ID NO: 3997065 - DNA, 25 bp, Homo sapien
cagactactaccttttgggagttca

SEQ ID NO: 3997066 - DNA, 25 bp, Homo sapien
gaccaactgtgaggtatagcagatc

SEQ ID NO: 3997067 - DNA, 25 bp, Homo sapien
aaatagagccctctcctgaaaatga

SEQ ID NO: 3997068 - DNA, 25 bp, Homo sapien
agagccctctcctgaaaatgatcca

SEQ ID NO: 3997069 - DNA, 25 bp, Homo sapien
aatgatccagaaaaggcactcagga

SEQ ID NO: 3997070 - DNA, 25 bp, Homo sapien
atagagccctctcctgaaaatgatc

SEQ ID NO: 3997071 - DNA, 25 bp, Homo sapien
gggttagatttgagcggtgcccaca

SEQ ID NO: 3997072 - DNA, 25 bp, Homo sapien
gcaagggcacattccatcgtaagag

SEQ ID NO: 3997073 - DNA, 25 bp, Homo sapien
gcagagttatgtgttccatgggcaa

SEQ ID NO: 3997074 - DNA, 25 bp, Homo sapien
agtgccctctcagtgacagaaatgg

SEQ ID NO: 3997075 - DNA, 25 bp, Homo sapien
caaatcacattctttagcttatctc

SEQ ID NO: 3997076 - DNA, 25 bp, Homo sapien
tacgggttcgtttgcctggctggct

SEQ ID NO: 3997077 - DNA, 25 bp, Homo sapien
gtctgtccctcaggcggcttacggg

SEQ ID NO: 3997078 - DNA, 25 bp, Homo sapien
tctcctctacactagacaccggtgg

SEQ ID NO: 3997079 - DNA, 25 bp, Homo sapien
acaccggtggcctgctacttgacaa

SEQ ID NO: 3997080 - DNA, 25 bp, Homo sapien
aaatgactacttaacagaggccggg

SEQ ID NO: 3997081 - DNA, 25 bp, Homo sapien
ggaaattcggtaccatattagctgg

SEQ ID NO: 3997082 - DNA, 25 bp, Homo sapien
caagttcatttaccgtgtgggtcta

SEQ ID NO: 3997083 - DNA, 25 bp, Homo sapien
gatctgatatatgcatggaccgcct

SEQ ID NO: 3997084 - DNA, 25 bp, Homo sapien
tattaagtctcagggttactatgca

SEQ ID NO: 3997085 - DNA, 25 bp, Homo sapien
tcttaggaggaaaatgcacttcatt

SEQ ID NO: 3997086 - DNA, 25 bp, Homo sapien
tagatgtacctccataattaagaag

SEQ ID NO: 3997087 - DNA, 25 bp, Homo sapien
tatgcattggagtaagttatcaggg

SEQ ID NO: 3997088 - DNA, 25 bp, Homo sapien
aaacattttgacagggggatgtgaa

SEQ ID NO: 3997089 - DNA, 25 bp, Homo sapien
tagaaatgggcttaaatgacaatac

SEQ ID NO: 3997090 - DNA, 25 bp, Homo sapien
gaattagaacaaactgcttaggaaa

SEQ ID NO: 3997091 - DNA, 25 bp, Homo sapien
cttaggaaactacagtgtgtgcctg

SEQ ID NO: 3997092 - DNA, 25 bp, Homo sapien
tctgatgtgaactacaaggagcaca

SEQ ID NO: 3997093 - DNA, 25 bp, Homo sapien
gacagacctctatcgcaatctggaa

SEQ ID NO: 3997094 - DNA, 25 bp, Homo sapien
tggaagagccctgctgtcagaaccc

SEQ ID NO: 3997095 - DNA, 25 bp, Homo sapien
gatgcaatttgggtatggtcctaaa

SEQ ID NO: 3997096 - DNA, 25 bp, Homo sapien
gggtgctcgggccgctcagctccgg

SEQ ID NO: 3997097 - DNA, 25 bp, Homo sapien
cttctgcggggtgctcgggccgctc

SEQ ID NO: 3997098 - DNA, 25 bp, Homo sapien
gtgctcgggccgctcagctccggcc

SEQ ID NO: 3997099 - DNA, 25 bp, Homo sapien
ctgcggggtgctcgggccgctcagc

SEQ ID NO: 3997100 - DNA, 25 bp, Homo sapien
ctgagggcccgggcactgcggccgc

SEQ ID NO: 3997101 - DNA, 25 bp, Homo sapien
tggaggacgggcgagggctgccccg

SEQ ID NO: 3997102 - DNA, 25 bp, Homo sapien
gagggctgccccggggccggctgcg

SEQ ID NO: 3997103 - DNA, 25 bp, Homo sapien
ggctgccccggggccggctgcggca

SEQ ID NO: 3997104 - DNA, 25 bp, Homo sapien
ctggaggacgggcgagggctgcccc

SEQ ID NO: 3997105 - DNA, 25 bp, Homo sapien
gggtccaggccttgcggtttctgga

SEQ ID NO: 3997106 - DNA, 25 bp, Homo sapien
tgtattcccgctcttgcagaatttc

SEQ ID NO: 3997107 - DNA, 25 bp, Homo sapien
tgcagaatttccacggggtccaggc

SEQ ID NO: 3997108 - DNA, 25 bp, Homo sapien
ggtccaggccttgcggtttctggat

SEQ ID NO: 3997109 - DNA, 25 bp, Homo sapien
gattataccaagctaccgaaggatg

SEQ ID NO: 3997110 - DNA, 25 bp, Homo sapien
cacagtttggccaaccaaggaggca

SEQ ID NO: 3997111 - DNA, 25 bp, Homo sapien
ccgaccgcacgggtgaaaatcacag

SEQ ID NO: 3997112 - DNA, 25 bp, Homo sapien
aagacactcgcacagggtataccca

SEQ ID NO: 3997113 - DNA, 25 bp, Homo sapien
atgcaacagatacttgttcaggtcc

SEQ ID NO: 3997114 - DNA, 25 bp, Homo sapien
gattgaacagtaaatcacgaggggt

SEQ ID NO: 3997115 - DNA, 25 bp, Homo sapien
aaatcacgaggggttactgttctgg

SEQ ID NO: 3997116 - DNA, 25 bp, Homo sapien
cacgaggggttactgttctggcaag

SEQ ID NO: 3997117 - DNA, 25 bp, Homo sapien
tcccctaaatctgaggcaaactgta

SEQ ID NO: 3997118 - DNA, 25 bp, Homo sapien
cacttgggatactattactgttaga

SEQ ID NO: 3997119 - DNA, 25 bp, Homo sapien
gagttcacctgaatcctattctgac

SEQ ID NO: 3997120 - DNA, 25 bp, Homo sapien
taaaagacctctgactttagccatt

SEQ ID NO: 3997121 - DNA, 25 bp, Homo sapien
tgcttttagttccacggttgctttg

SEQ ID NO: 3997122 - DNA, 25 bp, Homo sapien
ttcttgtatcctatgagctatgcgg

SEQ ID NO: 3997123 - DNA, 25 bp, Homo sapien
cctatgagctatgcgggcctgaagt

SEQ ID NO: 3997124 - DNA, 25 bp, Homo sapien
tgtatcctatgagctatgcgggcct

SEQ ID NO: 3997125 - DNA, 25 bp, Homo sapien
cacagtcgtggcaagcactttacat

SEQ ID NO: 3997126 - DNA, 25 bp, Homo sapien
gatgaaccactaattcagtagcgtg

SEQ ID NO: 3997127 - DNA, 25 bp, Homo sapien
tgagctaccccacttgttcccaagg

SEQ ID NO: 3997128 - DNA, 25 bp, Homo sapien
gactttgtaacccatagtacaggag

SEQ ID NO: 3997129 - DNA, 25 bp, Homo sapien
tcggtcatgcgagcttctctcagag

SEQ ID NO: 3997130 - DNA, 25 bp, Homo sapien
tctctcagagtctggcgcttgctcc

SEQ ID NO: 3997131 - DNA, 25 bp, Homo sapien
ttctgacggcgtttcctctcctgct

SEQ ID NO: 3997132 - DNA, 25 bp, Homo sapien
ccagggtcgtgtccctgcgcatgca

SEQ ID NO: 3997133 - DNA, 25 bp, Homo sapien
agtgtcctctgagctatcagtgttg

SEQ ID NO: 3997134 - DNA, 25 bp, Homo sapien
agaaaactctcagtgtgtgtttaac

SEQ ID NO: 3997135 - DNA, 25 bp, Homo sapien
tcagtgttgtccaagaaaactctca

SEQ ID NO: 3997136 - DNA, 25 bp, Homo sapien
tgagctatcagtgttgtccaagaaa

SEQ ID NO: 3997137 - DNA, 25 bp, Homo sapien
tcagtgttggcatgccaagttgcca

SEQ ID NO: 3997138 - DNA, 25 bp, Homo sapien
gatctttccggccacagaccgatga

SEQ ID NO: 3997139 - DNA, 25 bp, Homo sapien
gcatgttgcaaaatactgttcaggt

SEQ ID NO: 3997140 - DNA, 25 bp, Homo sapien
atcagtcgccgcattctctcctttt

SEQ ID NO: 3997141 - DNA, 25 bp, Homo sapien
tgaatagcctttgaccataacaagg

SEQ ID NO: 3997142 - DNA, 25 bp, Homo sapien
caaggctatcacaaaaaaggcaaca

SEQ ID NO: 3997143 - DNA, 25 bp, Homo sapien
catctatgcaggcattacgtcctag

SEQ ID NO: 3997144 - DNA, 25 bp, Homo sapien
aaaaagaaagataagcaccagaggc

SEQ ID NO: 3997145 - DNA, 25 bp, Homo sapien
gatctgcactgagtaatgggcccag

SEQ ID NO: 3997146 - DNA, 25 bp, Homo sapien
catgtaatgccacgataaaaggagc

SEQ ID NO: 3997147 - DNA, 25 bp, Homo sapien
tctagctgccgtctgccctgtggat

SEQ ID NO: 3997148 - DNA, 25 bp, Homo sapien
cctgaagtctggtactgctgagcaa

SEQ ID NO: 3997149 - DNA, 25 bp, Homo sapien
tcagttttctataaccctcctcatc

SEQ ID NO: 3997150 - DNA, 25 bp, Homo sapien
gattggctacatactcatcggtctg

SEQ ID NO: 3997151 - DNA, 25 bp, Homo sapien
catcggtctgctgcaaaaggtaagc

SEQ ID NO: 3997152 - DNA, 25 bp, Homo sapien
gctaaacgcctgtctttcttttgat

SEQ ID NO: 3997153 - DNA, 25 bp, Homo sapien
tcttcttctctttggctgcctgggc

SEQ ID NO: 3997154 - DNA, 25 bp, Homo sapien
tggctgcctgggcttgcttgtgctc

SEQ ID NO: 3997155 - DNA, 25 bp, Homo sapien
tcttctctttggctgcctgggcttg

SEQ ID NO: 3997156 - DNA, 25 bp, Homo sapien
ctcttcttcttctctttggctgcct

SEQ ID NO: 3997157 - DNA, 25 bp, Homo sapien
caaggaagggtagatggctgaccat

SEQ ID NO: 3997158 - DNA, 25 bp, Homo sapien
tacgcgtttgccaagaaatcaggcc

SEQ ID NO: 3997159 - DNA, 25 bp, Homo sapien
gctgagggcacaaatgctaggcacc

SEQ ID NO: 3997160 - DNA, 25 bp, Homo sapien
taggcacccaagagcatgcaaggaa

SEQ ID NO: 3997161 - DNA, 25 bp, Homo sapien
ccatccggtcccagggcagactccc

SEQ ID NO: 3997162 - DNA, 25 bp, Homo sapien
tccatccggtcccagggcagactcc

SEQ ID NO: 3997163 - DNA, 25 bp, Homo sapien
ttccccttacaccctcaacaaagca

SEQ ID NO: 3997164 - DNA, 25 bp, Homo sapien
tctgtgtgagtcactttgacaggga

SEQ ID NO: 3997165 - DNA, 25 bp, Homo sapien
aggcgtccagctgacttgctttggg

SEQ ID NO: 3997166 - DNA, 25 bp, Homo sapien
tctggtccgaacagaaccttgccgg

SEQ ID NO: 3997167 - DNA, 25 bp, Homo sapien
accttgccggtttctgtgtgagtca

SEQ ID NO: 3997168 - DNA, 25 bp, Homo sapien
ctcttcactgtcagatctaggggca

SEQ ID NO: 3997169 - DNA, 25 bp, Homo sapien
tcttcgctatttggatccaggagta

SEQ ID NO: 3997170 - DNA, 25 bp, Homo sapien
tctcttcggtttcctgcctactgga

SEQ ID NO: 3997171 - DNA, 25 bp, Homo sapien
tttctcttcggtttcctgcctactg

SEQ ID NO: 3997172 - DNA, 25 bp, Homo sapien
ttcgctatttggatccaggagtatt

SEQ ID NO: 3997173 - DNA, 25 bp, Homo sapien
ctggtaatgctttagggtcccatta

SEQ ID NO: 3997174 - DNA, 25 bp, Homo sapien
tccaccctctccgagatggcatgag

SEQ ID NO: 3997175 - DNA, 25 bp, Homo sapien
catgagccacggtgtagtaggactg

SEQ ID NO: 3997176 - DNA, 25 bp, Homo sapien
catcatccacgtcttgcttagctgt

SEQ ID NO: 3997177 - DNA, 25 bp, Homo sapien
ggctaagattccgttcaagttgtta

SEQ ID NO: 3997178 - DNA, 25 bp, Homo sapien
caatggtctgtatggtctttccaag

SEQ ID NO: 3997179 - DNA, 25 bp, Homo sapien
ttgttattatacagggaaaccatcc

SEQ ID NO: 3997180 - DNA, 25 bp, Homo sapien
gataagtgatgagtgcaatggtctg

SEQ ID NO: 3997181 - DNA, 25 bp, Homo sapien
tgtcaaattcatatgtccagttaga

SEQ ID NO: 3997182 - DNA, 25 bp, Homo sapien
atttgtcaaattcatatgtccagtt

SEQ ID NO: 3997183 - DNA, 25 bp, Homo sapien
tttgtcaaattcatatgtccagtta

SEQ ID NO: 3997184 - DNA, 25 bp, Homo sapien
ttgtcaaattcatatgtccagttag

SEQ ID NO: 3997185 - DNA, 25 bp, Homo sapien
tttgcaggaacagtcagcacagtag

SEQ ID NO: 3997186 - DNA, 25 bp, Homo sapien
cagtcagcagcacgcagaatgtgtg

SEQ ID NO: 3997187 - DNA, 25 bp, Homo sapien
tgttgagaaagtacagcaggcagcc

SEQ ID NO: 3997188 - DNA, 25 bp, Homo sapien
catccgggtaattgcctgactttgc

SEQ ID NO: 3997189 - DNA, 25 bp, Homo sapien
atggaaagaaaaaaatacatgcatg

SEQ ID NO: 3997190 - DNA, 25 bp, Homo sapien
tgaatggaaagaaaaaaatacatgc

SEQ ID NO: 3997191 - DNA, 25 bp, Homo sapien
gaaagaaaaaaatacatgcatgatc

SEQ ID NO: 3997192 - DNA, 25 bp, Homo sapien
ctgaatggaaagaaaaaaatacatg

SEQ ID NO: 3997193 - DNA, 25 bp, Homo sapien
ggacaagggagcgacgcatggcagg

SEQ ID NO: 3997194 - DNA, 25 bp, Homo sapien
gggagcgacgcatggcaggagtacc

SEQ ID NO: 3997195 - DNA, 25 bp, Homo sapien
tgggggacaagggagcgacgcatgg

SEQ ID NO: 3997196 - DNA, 25 bp, Homo sapien
acaagggagcgacgcatggcaggag

SEQ ID NO: 3997197 - DNA, 25 bp, Homo sapien
caagaggacattgaatttgccactc

SEQ ID NO: 3997198 - DNA, 25 bp, Homo sapien
aatatactcataagtagtcaagagg

SEQ ID NO: 3997199 - DNA, 25 bp, Homo sapien
ctcataagtagtcaagaggacattg

SEQ ID NO: 3997200 - DNA, 25 bp, Homo sapien
tataatatactcataagtagtcaag

SEQ ID NO: 3997201 - DNA, 25 bp, Homo sapien
gccagatctaggacccctgttttat

SEQ ID NO: 3997202 - DNA, 25 bp, Homo sapien
tgccagatctaggacccctgtttta

SEQ ID NO: 3997203 - DNA, 25 bp, Homo sapien
ctgccagatctaggacccctgtttt

SEQ ID NO: 3997204 - DNA, 25 bp, Homo sapien
caagacctgagtcagcttgcagtgg

SEQ ID NO: 3997205 - DNA, 25 bp, Homo sapien
tccactatcatgtatttccaccgaa

SEQ ID NO: 3997206 - DNA, 25 bp, Homo sapien
gccacatagtgagtgttcaagacct

SEQ ID NO: 3997207 - DNA, 25 bp, Homo sapien
attcttcattcggtggccttcgtcc

SEQ ID NO: 3997208 - DNA, 25 bp, Homo sapien
caccagtcatggcaaatggagcatt

SEQ ID NO: 3997209 - DNA, 25 bp, Homo sapien
caaatggagcattgaaccattgttc

SEQ ID NO: 3997210 - DNA, 25 bp, Homo sapien
cctttcaccagtcatggcaaatgga

SEQ ID NO: 3997211 - DNA, 25 bp, Homo sapien
tcatggcaaatggagcattgaacca

SEQ ID NO: 3997212 - DNA, 25 bp, Homo sapien
caccttatgtagacgcctgatgatc

SEQ ID NO: 3997213 - DNA, 25 bp, Homo sapien
cagtctccttagtaaaaatggtctt

SEQ ID NO: 3997214 - DNA, 25 bp, Homo sapien
gacgcctgatgatcaatatagtttc

SEQ ID NO: 3997215 - DNA, 25 bp, Homo sapien
aaatggtcttaacaccttatgtaga

SEQ ID NO: 3997216 - DNA, 25 bp, Homo sapien
ttcccaatcacactatcagccaaag

SEQ ID NO: 3997217 - DNA, 25 bp, Homo sapien
caatcacactatcagccaaagccaa

SEQ ID NO: 3997218 - DNA, 25 bp, Homo sapien
actatcagccaaagccaatttccct

SEQ ID NO: 3997219 - DNA, 25 bp, Homo sapien
tctttcccaatcacactatcagcca

SEQ ID NO: 3997220 - DNA, 25 bp, Homo sapien
ctccctgctggcttgatcaaacctt

SEQ ID NO: 3997221 - DNA, 25 bp, Homo sapien
aatgtggaaggcatggctgatgctt

SEQ ID NO: 3997222 - DNA, 25 bp, Homo sapien
tggaaggcatggctgatgcttgtgc

SEQ ID NO: 3997223 - DNA, 25 bp, Homo sapien
gatcaaaccttcctgaatgtggaag

SEQ ID NO: 3997224 - DNA, 25 bp, Homo sapien
tggcttgcatatggcgatacagaat

SEQ ID NO: 3997225 - DNA, 25 bp, Homo sapien
catatggcgatacagaatcttctgc

SEQ ID NO: 3997226 - DNA, 25 bp, Homo sapien
gagaaggatccccttggcttgcata

SEQ ID NO: 3997227 - DNA, 25 bp, Homo sapien
tttctcagaaccatctgtgagaagg

SEQ ID NO: 3997228 - DNA, 25 bp, Homo sapien
cagttcctgagttagacataatgtc

SEQ ID NO: 3997229 - DNA, 25 bp, Homo sapien
gaattaattattaactggtcagaca

SEQ ID NO: 3997230 - DNA, 25 bp, Homo sapien
tacacaccttgtggttcaaagcttc

SEQ ID NO: 3997231 - DNA, 25 bp, Homo sapien
cacactgggcttcttatacaaagga

SEQ ID NO: 3997232 - DNA, 25 bp, Homo sapien
gctgaaacatatatgggtggttgca

SEQ ID NO: 3997233 - DNA, 25 bp, Homo sapien
caactgcataatagtgttcataagt

SEQ ID NO: 3997234 - DNA, 25 bp, Homo sapien
tggttgcagatttttctcaactgca

SEQ ID NO: 3997235 - DNA, 25 bp, Homo sapien
ctcaatgtgctgaaacatatatggg

SEQ ID NO: 3997236 - DNA, 25 bp, Homo sapien
ttaactagcattagtatgattagca

SEQ ID NO: 3997237 - DNA, 25 bp, Homo sapien
tttaactagcattagtatgattagc

SEQ ID NO: 3997238 - DNA, 25 bp, Homo sapien
taactagcattagtatgattagcac

SEQ ID NO: 3997239 - DNA, 25 bp, Homo sapien
ttttaactagcattagtatgattag

SEQ ID NO: 3997240 - DNA, 25 bp, Homo sapien
attcctgctccagtcaattgtgccc

SEQ ID NO: 3997241 - DNA, 25 bp, Homo sapien
gctccagtcaattgtgcccactggg

SEQ ID NO: 3997242 - DNA, 25 bp, Homo sapien
taattgccaccaggaccatttgcct

SEQ ID NO: 3997243 - DNA, 25 bp, Homo sapien
caaataattgccaccaggaccattt

SEQ ID NO: 3997244 - DNA, 25 bp, Homo sapien
ccatagttgtcaatagatttgccaa

SEQ ID NO: 3997245 - DNA, 25 bp, Homo sapien
catagttgtcaatagatttgccaat

SEQ ID NO: 3997246 - DNA, 25 bp, Homo sapien
tgtcaatagatttgccaataactgt

SEQ ID NO: 3997247 - DNA, 25 bp, Homo sapien
agttgtcaatagatttgccaataac

SEQ ID NO: 3997248 - DNA, 25 bp, Homo sapien
tcaactccatcccctagaaccaaac

SEQ ID NO: 3997249 - DNA, 25 bp, Homo sapien
ccaagcaggattgtcaaaaccaaag

SEQ ID NO: 3997250 - DNA, 25 bp, Homo sapien
gtctccaagcaggattgtcaaaacc

SEQ ID NO: 3997251 - DNA, 25 bp, Homo sapien
caaaaccaaagagaggggtcaatgg

SEQ ID NO: 3997252 - DNA, 25 bp, Homo sapien
atgatctacggtaggctccagccct

SEQ ID NO: 3997253 - DNA, 25 bp, Homo sapien
tcaaatatgctcatgatctacggta

SEQ ID NO: 3997254 - DNA, 25 bp, Homo sapien
aatatgctcatgatctacggtaggc

SEQ ID NO: 3997255 - DNA, 25 bp, Homo sapien
gctcatgatctacggtaggctccag

SEQ ID NO: 3997256 - DNA, 25 bp, Homo sapien
acacctggccagttaggtgaaatcc

SEQ ID NO: 3997257 - DNA, 25 bp, Homo sapien
tgtacagcacccctcaagtgtccag

SEQ ID NO: 3997258 - DNA, 25 bp, Homo sapien
tacagaacgtaatcacataactccg

SEQ ID NO: 3997259 - DNA, 25 bp, Homo sapien
aaataaggtcctagatgtacagcac

SEQ ID NO: 3997260 - DNA, 25 bp, Homo sapien
tggagatccaccctctagggtggat

SEQ ID NO: 3997261 - DNA, 25 bp, Homo sapien
gaactcaaggaatacagagtctaga

SEQ ID NO: 3997262 - DNA, 25 bp, Homo sapien
tctgaactcaaggaatacagagtct

SEQ ID NO: 3997263 - DNA, 25 bp, Homo sapien
atctgaactcaaggaatacagagtc

SEQ ID NO: 3997264 - DNA, 25 bp, Homo sapien
ctagtctctagactctcaggtaaca

SEQ ID NO: 3997265 - DNA, 25 bp, Homo sapien
cacgtaatgaaccagaaattcagta

SEQ ID NO: 3997266 - DNA, 25 bp, Homo sapien
tgtgagtttcttctagtctctagac

SEQ ID NO: 3997267 - DNA, 25 bp, Homo sapien
catgcagacttttgttccatcagaa

SEQ ID NO: 3997268 - DNA, 25 bp, Homo sapien
ttgatgaccccatttgaatagccta

SEQ ID NO: 3997269 - DNA, 25 bp, Homo sapien
cattgatgaccccatttgaatagcc

SEQ ID NO: 3997270 - DNA, 25 bp, Homo sapien
attgatgaccccatttgaatagcct

SEQ ID NO: 3997271 - DNA, 25 bp, Homo sapien
ccattgatgaccccatttgaatagc

SEQ ID NO: 3997272 - DNA, 25 bp, Homo sapien
ttggcagaatacgatcaagcagctc

SEQ ID NO: 3997273 - DNA, 25 bp, Homo sapien
catcaaggcgtaggtaaaggaagtt

SEQ ID NO: 3997274 - DNA, 25 bp, Homo sapien
tccctgaggcccgatacagttcagc

SEQ ID NO: 3997275 - DNA, 25 bp, Homo sapien
gattagtcgctctcaattttggcag

SEQ ID NO: 3997276 - DNA, 25 bp, Homo sapien
tatgcctgtgtagaacgaacctgtg

SEQ ID NO: 3997277 - DNA, 25 bp, Homo sapien
tatgtcctaggaaatgccatgaacc

SEQ ID NO: 3997278 - DNA, 25 bp, Homo sapien
cttaaactgggcctgagcgcaagtg

SEQ ID NO: 3997279 - DNA, 25 bp, Homo sapien
gataacatgcatacgtcaccatggt

SEQ ID NO: 3997280 - DNA, 25 bp, Homo sapien
cacacacgtgcacttaaaactgtaa

SEQ ID NO: 3997281 - DNA, 25 bp, Homo sapien
gaggcatcttcgcaacttcacaaat

SEQ ID NO: 3997282 - DNA, 25 bp, Homo sapien
catttggattactactaagtatggt

SEQ ID NO: 3997283 - DNA, 25 bp, Homo sapien
gccaataggcattaaagcaaggact

SEQ ID NO: 3997284 - DNA, 25 bp, Homo sapien
ggggatcagaaaaattaatttgcca

SEQ ID NO: 3997285 - DNA, 25 bp, Homo sapien
gatcagaaaaattaatttgccaatt

SEQ ID NO: 3997286 - DNA, 25 bp, Homo sapien
gggatcagaaaaattaatttgccaa

SEQ ID NO: 3997287 - DNA, 25 bp, Homo sapien
tcagaaaaattaatttgccaattaa

SEQ ID NO: 3997288 - DNA, 25 bp, Homo sapien
ccagtcgctgtcaaagatgaccact

SEQ ID NO: 3997289 - DNA, 25 bp, Homo sapien
aaagatgaccactgtatcagctgcc

SEQ ID NO: 3997290 - DNA, 25 bp, Homo sapien
cttcagcaaagcagcacgatcttca

SEQ ID NO: 3997291 - DNA, 25 bp, Homo sapien
agcagcacgatcttcagacttggtg

SEQ ID NO: 3997292 - DNA, 25 bp, Homo sapien
cttcaaaggcatatgtgggacctcg

SEQ ID NO: 3997293 - DNA, 25 bp, Homo sapien
tgacacagattaagggtcccatgaa

SEQ ID NO: 3997294 - DNA, 25 bp, Homo sapien
aaaatgcccaagaggctgacacaga

SEQ ID NO: 3997295 - DNA, 25 bp, Homo sapien
tgggacctcgtatctatgctctaag

SEQ ID NO: 3997296 - DNA, 25 bp, Homo sapien
cagtgccatgagagacccgctcaat

SEQ ID NO: 3997297 - DNA, 25 bp, Homo sapien
actgctttaaaaggatagccctgaa

SEQ ID NO: 3997298 - DNA, 25 bp, Homo sapien
tacccaatatcctacaggcagatgc

SEQ ID NO: 3997299 - DNA, 25 bp, Homo sapien
cctgctgaggaacttgggactacag

SEQ ID NO: 3997300 - DNA, 25 bp, Homo sapien
caacagtctctaaaatgggcgcaat

SEQ ID NO: 3997301 - DNA, 25 bp, Homo sapien
taaacgttctatgctgtctggccca

SEQ ID NO: 3997302 - DNA, 25 bp, Homo sapien
gaccgagcccgcgagtagtagattg

SEQ ID NO: 3997303 - DNA, 25 bp, Homo sapien
cacatggacaacataggaacacggt

SEQ ID NO: 3997304 - DNA, 25 bp, Homo sapien
gctatgaggactgagatgcctggca

SEQ ID NO: 3997305 - DNA, 25 bp, Homo sapien
tgtcattcctagttgaagaaacctg

SEQ ID NO: 3997306 - DNA, 25 bp, Homo sapien
taggttccccatcagatttagtcca

SEQ ID NO: 3997307 - DNA, 25 bp, Homo sapien
tgtatttcaccttcactaaggtaag

SEQ ID NO: 3997308 - DNA, 25 bp, Homo sapien
gaatgccctccgctcgtggcttgaa

SEQ ID NO: 3997309 - DNA, 25 bp, Homo sapien
ttttgcggccgcgaggatcttttcc

SEQ ID NO: 3997310 - DNA, 25 bp, Homo sapien
cacgttcagcttgtattttgcggcc

SEQ ID NO: 3997311 - DNA, 25 bp, Homo sapien
ttttggtcaaacatgcccgcctgga

SEQ ID NO: 3997312 - DNA, 25 bp, Homo sapien
catcgtccggtacttcatcttcttc

SEQ ID NO: 3997313 - DNA, 25 bp, Homo sapien
cagagtctcatcgtccggtacttca

SEQ ID NO: 3997314 - DNA, 25 bp, Homo sapien
catttggttcagagtctcatcgtcc

SEQ ID NO: 3997315 - DNA, 25 bp, Homo sapien
tcttctcgtcgagcaatcatttggt

SEQ ID NO: 3997316 - DNA, 25 bp, Homo sapien
tacttcagcgtcatccttaatgatc

SEQ ID NO: 3997317 - DNA, 25 bp, Homo sapien
ttccctccgccggtccatgtccatc

SEQ ID NO: 3997318 - DNA, 25 bp, Homo sapien
tctacttcagcgtcatccttaatga

SEQ ID NO: 3997319 - DNA, 25 bp, Homo sapien
cttcagcgtcatccttaatgatcca

SEQ ID NO: 3997320 - DNA, 25 bp, Homo sapien
tccgtgagggcgtcactgtagtcca

SEQ ID NO: 3997321 - DNA, 25 bp, Homo sapien
ccgtgagggcgtcactgtagtccac

SEQ ID NO: 3997322 - DNA, 25 bp, Homo sapien
tctccgtgagggcgtcactgtagtc

SEQ ID NO: 3997323 - DNA, 25 bp, Homo sapien
cttctccgtgagggcgtcactgtag

SEQ ID NO: 3997324 - DNA, 25 bp, Homo sapien
ccgccttgaagtgcagaacgccttt

SEQ ID NO: 3997325 - DNA, 25 bp, Homo sapien
tgattgcgaactcaacctcctcaga

SEQ ID NO: 3997326 - DNA, 25 bp, Homo sapien
caatggccaattctgctctagcaaa

SEQ ID NO: 3997327 - DNA, 25 bp, Homo sapien
gactttatgcaacagcagaatgact

SEQ ID NO: 3997328 - DNA, 25 bp, Homo sapien
tcatttccgtagcgtttactggggc

SEQ ID NO: 3997329 - DNA, 25 bp, Homo sapien
atcatttccgtagcgtttactgggg

SEQ ID NO: 3997330 - DNA, 25 bp, Homo sapien
catcatttccgtagcgtttactggg

SEQ ID NO: 3997331 - DNA, 25 bp, Homo sapien
cactaataaggtgggtctgccatga

SEQ ID NO: 3997332 - DNA, 25 bp, Homo sapien
cactggcggtgttaagaaggcttga

SEQ ID NO: 3997333 - DNA, 25 bp, Homo sapien
tggtagaaaccacacgagcactggc

SEQ ID NO: 3997334 - DNA, 25 bp, Homo sapien
gaagataaacccagttgcctgctgt

SEQ ID NO: 3997335 - DNA, 25 bp, Homo sapien
gagtggtcatcagggccgatttttg

SEQ ID NO: 3997336 - DNA, 25 bp, Homo sapien
gtagccacctgaactgttgtgaaca

SEQ ID NO: 3997337 - DNA, 25 bp, Homo sapien
catcagggccgatttttggtaagtt

SEQ ID NO: 3997338 - DNA, 25 bp, Homo sapien
aggaaaggtatcctccaaaatgcca

SEQ ID NO: 3997339 - DNA, 25 bp, Homo sapien
ctgcatttctgacgaccagctgact

SEQ ID NO: 3997340 - DNA, 25 bp, Homo sapien
ttctgcatttctgacgaccagctga

SEQ ID NO: 3997341 - DNA, 25 bp, Homo sapien
agaacctaagattggtgtcttgaga

SEQ ID NO: 3997342 - DNA, 25 bp, Homo sapien
gaacctaagattggtgtcttgagat

SEQ ID NO: 3997343 - DNA, 25 bp, Homo sapien
ggtcccctgttctcagagtaccctg

SEQ ID NO: 3997344 - DNA, 25 bp, Homo sapien
cctgcgctgccatcttctgtatcag

SEQ ID NO: 3997345 - DNA, 25 bp, Homo sapien
atcttctgtatcaggcagctgctat

SEQ ID NO: 3997346 - DNA, 25 bp, Homo sapien
ctagtctcacctgatggagatggga

SEQ ID NO: 3997347 - DNA, 25 bp, Homo sapien
gacggcaggtccagaaagtcagcct

SEQ ID NO: 3997348 - DNA, 25 bp, Homo sapien
cacatctttactgcgtgacggcagg

SEQ ID NO: 3997349 - DNA, 25 bp, Homo sapien
aacccggtggtgtaaagaattgctg

SEQ ID NO: 3997350 - DNA, 25 bp, Homo sapien
tatgaataggtaaacagggacacgc

SEQ ID NO: 3997351 - DNA, 25 bp, Homo sapien
gtgggtccagtcgtggccctctcat

SEQ ID NO: 3997352 - DNA, 25 bp, Homo sapien
gaagtttagtgaggcacctcttttc

SEQ ID NO: 3997353 - DNA, 25 bp, Homo sapien
ctaccgagacggtgaaacacaacta

SEQ ID NO: 3997354 - DNA, 25 bp, Homo sapien
cacaactacagcgaagtttagtgag

SEQ ID NO: 3997355 - DNA, 25 bp, Homo sapien
gaaacacaactacagcgaagtttag

SEQ ID NO: 3997356 - DNA, 25 bp, Homo sapien
tagatttaatgaagtgaataggaag

SEQ ID NO: 3997357 - DNA, 25 bp, Homo sapien
tgaagtgaataggaaggaagtcggg

SEQ ID NO: 3997358 - DNA, 25 bp, Homo sapien
taatgaagtgaataggaaggaagtc

SEQ ID NO: 3997359 - DNA, 25 bp, Homo sapien
ctagatttaatgaagtgaataggaa

SEQ ID NO: 3997360 - DNA, 25 bp, Homo sapien
atacagacggctcccatgctcaact

SEQ ID NO: 3997361 - DNA, 25 bp, Homo sapien
acgtgttgcgcaagagtgcgagccc

SEQ ID NO: 3997362 - DNA, 25 bp, Homo sapien
cccagtttccgactggtgacgtgtt

SEQ ID NO: 3997363 - DNA, 25 bp, Homo sapien
gagccctaattcaacatacagacgg

SEQ ID NO: 3997364 - DNA, 25 bp, Homo sapien
ttactaaactggctcaactgactca

SEQ ID NO: 3997365 - DNA, 25 bp, Homo sapien
gcttttcgcacataaagagtagagt

SEQ ID NO: 3997366 - DNA, 25 bp, Homo sapien
gctacacaatgctaaagtactaccc

SEQ ID NO: 3997367 - DNA, 25 bp, Homo sapien
gagtaagattactcctgcatgtaag

SEQ ID NO: 3997368 - DNA, 25 bp, Homo sapien
gaattacaaggaaacacacaaagta

SEQ ID NO: 3997369 - DNA, 25 bp, Homo sapien
tggaattacaaggaaacacacaaag

SEQ ID NO: 3997370 - DNA, 25 bp, Homo sapien
tacaaggaaacacacaaagtactga

SEQ ID NO: 3997371 - DNA, 25 bp, Homo sapien
ttttggaattacaaggaaacacaca

SEQ ID NO: 3997372 - DNA, 25 bp, Homo sapien
gctatcagaaatcacagttagtggg

SEQ ID NO: 3997373 - DNA, 25 bp, Homo sapien
tcagcaggccggctatcagaaatca

SEQ ID NO: 3997374 - DNA, 25 bp, Homo sapien
ggccggctatcagaaatcacagtta

SEQ ID NO: 3997375 - DNA, 25 bp, Homo sapien
cttaccactatcagcaggccggcta

SEQ ID NO: 3997376 - DNA, 25 bp, Homo sapien
aaagaacataaaatttgaacataga

SEQ ID NO: 3997377 - DNA, 25 bp, Homo sapien
tttcctggtaaatctcaaaactcaa

SEQ ID NO: 3997378 - DNA, 25 bp, Homo sapien
ctggtaaatctcaaaactcaaaaga

SEQ ID NO: 3997379 - DNA, 25 bp, Homo sapien
tcctggtaaatctcaaaactcaaaa

SEQ ID NO: 3997380 - DNA, 25 bp, Homo sapien
cgcttgctttaaaccagagccagca

SEQ ID NO: 3997381 - DNA, 25 bp, Homo sapien
ctgcaaacgcttgctttaaaccaga

SEQ ID NO: 3997382 - DNA, 25 bp, Homo sapien
ttgctttaaaccagagccagcagca

SEQ ID NO: 3997383 - DNA, 25 bp, Homo sapien
aacgcttgctttaaaccagagccag

SEQ ID NO: 3997384 - DNA, 25 bp, Homo sapien
tttctcagcgggagggcggcctctt

SEQ ID NO: 3997385 - DNA, 25 bp, Homo sapien
gcttcttaagccgtacttcctcttc

SEQ ID NO: 3997386 - DNA, 25 bp, Homo sapien
ttcctccaaattgccgtcttcgatg

SEQ ID NO: 3997387 - DNA, 25 bp, Homo sapien
cacagtatcgatgatagcgttcatc

SEQ ID NO: 3997388 - DNA, 25 bp, Homo sapien
agtaccactgaaacggcattttctg

SEQ ID NO: 3997389 - DNA, 25 bp, Homo sapien
aacagtaccactgaaacggcatttt

SEQ ID NO: 3997390 - DNA, 25 bp, Homo sapien
accactgaaacggcattttctgttt

SEQ ID NO: 3997391 - DNA, 25 bp, Homo sapien
acagtaccactgaaacggcattttc

SEQ ID NO: 3997392 - DNA, 25 bp, Homo sapien
aggggcaagaagaacacattcccag

SEQ ID NO: 3997393 - DNA, 25 bp, Homo sapien
ttaggggcaagaagaacacattccc

SEQ ID NO: 3997394 - DNA, 25 bp, Homo sapien
atttaggggcaagaagaacacattc

SEQ ID NO: 3997395 - DNA, 25 bp, Homo sapien
tttaggggcaagaagaacacattcc

SEQ ID NO: 3997396 - DNA, 25 bp, Homo sapien
aactgagaattactgggcaccttct

SEQ ID NO: 3997397 - DNA, 25 bp, Homo sapien
tccaactgagaattactgggcacct

SEQ ID NO: 3997398 - DNA, 25 bp, Homo sapien
tttccaactgagaattactgggcac

SEQ ID NO: 3997399 - DNA, 25 bp, Homo sapien
ttccaactgagaattactgggcacc

SEQ ID NO: 3997400 - DNA, 25 bp, Homo sapien
aggggaatacaagacagatcctgac

SEQ ID NO: 3997401 - DNA, 25 bp, Homo sapien
gataggggaatacaagacagatcct

SEQ ID NO: 3997402 - DNA, 25 bp, Homo sapien
agagataggggaatacaagacagat

SEQ ID NO: 3997403 - DNA, 25 bp, Homo sapien
taggggaatacaagacagatcctga

SEQ ID NO: 3997404 - DNA, 25 bp, Homo sapien
cagctcaggcttatgggaaaaggaa

SEQ ID NO: 3997405 - DNA, 25 bp, Homo sapien
tacatcatgccatttagccctaagg

SEQ ID NO: 3997406 - DNA, 25 bp, Homo sapien
caaacaccatgttgtcagctcaggc

SEQ ID NO: 3997407 - DNA, 25 bp, Homo sapien
tagttcctaaccatataccgtcatg

SEQ ID NO: 3997408 - DNA, 25 bp, Homo sapien
taaatggcaccgctgttcactgatc

SEQ ID NO: 3997409 - DNA, 25 bp, Homo sapien
gatgactacaggttgccctcaagac

SEQ ID NO: 3997410 - DNA, 25 bp, Homo sapien
tgtacgtgggcataactggctgagc

SEQ ID NO: 3997411 - DNA, 25 bp, Homo sapien
taatggccaagtagagagttcagct

SEQ ID NO: 3997412 - DNA, 25 bp, Homo sapien
gcctggagcttgagaggcagagacc

SEQ ID NO: 3997413 - DNA, 25 bp, Homo sapien
tcagccctgtaagaaaatccatttt

SEQ ID NO: 3997414 - DNA, 25 bp, Homo sapien
cctttatgctggtgttggcctggag

SEQ ID NO: 3997415 - DNA, 25 bp, Homo sapien
ccattttgttatttccagctgagcc

SEQ ID NO: 3997416 - DNA, 25 bp, Homo sapien
caaataactgcgatctctcagagca

SEQ ID NO: 3997417 - DNA, 25 bp, Homo sapien
atcttgcctcgggtggtctcggact

SEQ ID NO: 3997418 - DNA, 25 bp, Homo sapien
aagtcccacacgctgctttgttaaa

SEQ ID NO: 3997419 - DNA, 25 bp, Homo sapien
aaagcttttggctgaattgcgacca

SEQ ID NO: 3997420 - DNA, 25 bp, Homo sapien
tggatcactgcagcaagaaccaagg

SEQ ID NO: 3997421 - DNA, 25 bp, Homo sapien
gagaaatgcgttcgtccttccctaa

SEQ ID NO: 3997422 - DNA, 25 bp, Homo sapien
taagaagactgcattttactcagga

SEQ ID NO: 3997423 - DNA, 25 bp, Homo sapien
catatgggcctcatgagtacgaaaa

SEQ ID NO: 3997424 - DNA, 25 bp, Homo sapien
ggaaccccttcatcttgcctaactg

SEQ ID NO: 3997425 - DNA, 25 bp, Homo sapien
cttgccagaggaaccccttcatctt

SEQ ID NO: 3997426 - DNA, 25 bp, Homo sapien
tattacttgccagaggaaccccttc

SEQ ID NO: 3997427 - DNA, 25 bp, Homo sapien
agaggaaccccttcatcttgcctaa

SEQ ID NO: 3997428 - DNA, 25 bp, Homo sapien
gaagacttcactgagctgtcgccct

SEQ ID NO: 3997429 - DNA, 25 bp, Homo sapien
catagtattctggtaattctttcct

SEQ ID NO: 3997430 - DNA, 25 bp, Homo sapien
ccttgaaggtaactgaatgaagact

SEQ ID NO: 3997431 - DNA, 25 bp, Homo sapien
aatccactggcttcctaattaattc

SEQ ID NO: 3997432 - DNA, 25 bp, Homo sapien
taggctccggtacttatgattacga

SEQ ID NO: 3997433 - DNA, 25 bp, Homo sapien
ggtacttatgattacgaatcctttc

SEQ ID NO: 3997434 - DNA, 25 bp, Homo sapien
ccaggtcgcctaggctccggtactt

SEQ ID NO: 3997435 - DNA, 25 bp, Homo sapien
ggtcgcctaggctccggtacttatg

SEQ ID NO: 3997436 - DNA, 25 bp, Homo sapien
tccaggttgaacgtctgagcgttgt

SEQ ID NO: 3997437 - DNA, 25 bp, Homo sapien
gaacgtctgagcgttgtgacagaga

SEQ ID NO: 3997438 - DNA, 25 bp, Homo sapien
gatccctccaggttgaacgtctgag

SEQ ID NO: 3997439 - DNA, 25 bp, Homo sapien
tctgagcgttgtgacagagaagcat

SEQ ID NO: 3997440 - DNA, 25 bp, Homo sapien
catcaggccagagatacagacagga

SEQ ID NO: 3997441 - DNA, 25 bp, Homo sapien
caggccagagatacagacaggaaaa

SEQ ID NO: 3997442 - DNA, 25 bp, Homo sapien
tcaggccagagatacagacaggaaa

SEQ ID NO: 3997443 - DNA, 25 bp, Homo sapien
ggcatcaggccagagatacagacag

SEQ ID NO: 3997444 - DNA, 25 bp, Homo sapien
ggcagaagggtatgatcaggaaaca

SEQ ID NO: 3997445 - DNA, 25 bp, Homo sapien
gaatttaaaggtggcttgacactgc

SEQ ID NO: 3997446 - DNA, 25 bp, Homo sapien
gactgaaattgatgtgcaggcagaa

SEQ ID NO: 3997447 - DNA, 25 bp, Homo sapien
taacagaaggcttgctttcaagacc

SEQ ID NO: 3997448 - DNA, 25 bp, Homo sapien
gtaagacgatggagtcttcatagat

SEQ ID NO: 3997449 - DNA, 25 bp, Homo sapien
tgtaagacgatggagtcttcataga

SEQ ID NO: 3997450 - DNA, 25 bp, Homo sapien
tctgccgggcactcttaaacactga

SEQ ID NO: 3997451 - DNA, 25 bp, Homo sapien
ctgccgggcactcttaaacactgac

SEQ ID NO: 3997452 - DNA, 25 bp, Homo sapien
agccttgaacacctagactaagcaa

SEQ ID NO: 3997453 - DNA, 25 bp, Homo sapien
cagccttgaacacctagactaagca

SEQ ID NO: 3997454 - DNA, 25 bp, Homo sapien
gagatctttgtataggtggtaagac

SEQ ID NO: 3997455 - DNA, 25 bp, Homo sapien
gtgagtaatcacaaggagatctttg

SEQ ID NO: 3997456 - DNA, 25 bp, Homo sapien
tataggtggtaagactatcaccaac

SEQ ID NO: 3997457 - DNA, 25 bp, Homo sapien
aaatgaaatagacaccagtgagtaa

SEQ ID NO: 3997458 - DNA, 25 bp, Homo sapien
ttaattttcaccttgactgattttg

SEQ ID NO: 3997459 - DNA, 25 bp, Homo sapien
tcctcatcgctgtcaaaatcgctca

SEQ ID NO: 3997460 - DNA, 25 bp, Homo sapien
caggtttggcttttcctcgatttgg

SEQ ID NO: 3997461 - DNA, 25 bp, Homo sapien
tgtcaaaatcgctcactacaggttt

SEQ ID NO: 3997462 - DNA, 25 bp, Homo sapien
gcaactcgagccaataactctgacg

SEQ ID NO: 3997463 - DNA, 25 bp, Homo sapien
taatctactgttatgtaccaggcac

SEQ ID NO: 3997464 - DNA, 25 bp, Homo sapien
caaggcctggctcaatagatgctca

SEQ ID NO: 3997465 - DNA, 25 bp, Homo sapien
catggtcccttaagtagcaactcga

SEQ ID NO: 3997466 - DNA, 25 bp, Homo sapien
caaggtattaggagcttctgcccac

SEQ ID NO: 3997467 - DNA, 25 bp, Homo sapien
ccaaatctctttccgtgggaggaca

SEQ ID NO: 3997468 - DNA, 25 bp, Homo sapien
gaggcatcgacagtctctaagctga

SEQ ID NO: 3997469 - DNA, 25 bp, Homo sapien
caaaccatcaagaggccagtaggaa

SEQ ID NO: 3997470 - DNA, 25 bp, Homo sapien
ctcatcatccgtcccacttccttct

SEQ ID NO: 3997471 - DNA, 25 bp, Homo sapien
tcactcatcatccgtcccacttcct

SEQ ID NO: 3997472 - DNA, 25 bp, Homo sapien
tccgtcccacttccttctgactgtt

SEQ ID NO: 3997473 - DNA, 25 bp, Homo sapien
ccgtcccacttccttctgactgttc

SEQ ID NO: 3997474 - DNA, 25 bp, Homo sapien
ctttagggagaaggagacgatacac

SEQ ID NO: 3997475 - DNA, 25 bp, Homo sapien
cagggtgacaaaagaagccatccaa

SEQ ID NO: 3997476 - DNA, 25 bp, Homo sapien
tgacttgcaaccaaagacattgtgc

SEQ ID NO: 3997477 - DNA, 25 bp, Homo sapien
taaaaacctcgaaaattgcctgatg

SEQ ID NO: 3997478 - DNA, 25 bp, Homo sapien
ttattaggaaagcaccaacaccaca

SEQ ID NO: 3997479 - DNA, 25 bp, Homo sapien
cataggcacatgctcgggatggccc

SEQ ID NO: 3997480 - DNA, 25 bp, Homo sapien
cgtggtaaacaggtccgcataggca

SEQ ID NO: 3997481 - DNA, 25 bp, Homo sapien
gatggcccgtcttcttgttagtgca

SEQ ID NO: 3997482 - DNA, 25 bp, Homo sapien
tggaaagaactacgctgatgggctc

SEQ ID NO: 3997483 - DNA, 25 bp, Homo sapien
gctctagactctccacatgggaagt

SEQ ID NO: 3997484 - DNA, 25 bp, Homo sapien
cagtctggttggatatggaactgga

SEQ ID NO: 3997485 - DNA, 25 bp, Homo sapien
gatataattgcacgctaagcctact

SEQ ID NO: 3997486 - DNA, 25 bp, Homo sapien
ctggaggacttgaagatataattgc

SEQ ID NO: 3997487 - DNA, 25 bp, Homo sapien
gtgaagcagctaaactagtgcctga

SEQ ID NO: 3997488 - DNA, 25 bp, Homo sapien
tgaagcagctaaactagtgcctgag

SEQ ID NO: 3997489 - DNA, 25 bp, Homo sapien
tgtgaagcagctaaactagtgcctg

SEQ ID NO: 3997490 - DNA, 25 bp, Homo sapien
gccatggtgcttcaactgccaaacc

SEQ ID NO: 3997491 - DNA, 25 bp, Homo sapien
catggtgcttcaactgccaaaccca

SEQ ID NO: 3997492 - DNA, 25 bp, Homo sapien
tggccatggtgcttcaactgccaaa

SEQ ID NO: 3997493 - DNA, 25 bp, Homo sapien
gttggccatggtgcttcaactgcca

SEQ ID NO: 3997494 - DNA, 25 bp, Homo sapien
tctccctatctcagtcctgtttctc

SEQ ID NO: 3997495 - DNA, 25 bp, Homo sapien
tcagctccagatactcatgcccctc

SEQ ID NO: 3997496 - DNA, 25 bp, Homo sapien
gttgtgctctgtgcatttgtccact

SEQ ID NO: 3997497 - DNA, 25 bp, Homo sapien
gctctgtgcatttgtccactgacac

SEQ ID NO: 3997498 - DNA, 25 bp, Homo sapien
tatctcaacgttgtcacagttgtgc

SEQ ID NO: 3997499 - DNA, 25 bp, Homo sapien
taaccgcagcgctgctgcagtatct

SEQ ID NO: 3997500 - DNA, 25 bp, Homo sapien
ttggctttgacagtgtccagattgg

SEQ ID NO: 3997501 - DNA, 25 bp, Homo sapien
tgaccaggccaatcctattctctct

SEQ ID NO: 3997502 - DNA, 25 bp, Homo sapien
gaccaatagggaatatgaccaggcc

SEQ ID NO: 3997503 - DNA, 25 bp, Homo sapien
ggcctttgaagaatgacccctctct

SEQ ID NO: 3997504 - DNA, 25 bp, Homo sapien
tggagggctcgctagcggtgggaac

SEQ ID NO: 3997505 - DNA, 25 bp, Homo sapien
cagcacccggtttcttaggcgccga

SEQ ID NO: 3997506 - DNA, 25 bp, Homo sapien
gaaaggtccaccgtttgcacacacc

SEQ ID NO: 3997507 - DNA, 25 bp, Homo sapien
agcgctaggcaaaacccggagtgga

SEQ ID NO: 3997508 - DNA, 25 bp, Homo sapien
tactgacacacactctacacagatg

SEQ ID NO: 3997509 - DNA, 25 bp, Homo sapien
gaagccatactcaaaacatgacgta

SEQ ID NO: 3997510 - DNA, 25 bp, Homo sapien
gcaaacatgtatacacaggacagca

SEQ ID NO: 3997511 - DNA, 25 bp, Homo sapien
gcaatgctataaaatgggccaaggc

SEQ ID NO: 3997512 - DNA, 25 bp, Homo sapien
gatgagcaaggaatgtataatggac

SEQ ID NO: 3997513 - DNA, 25 bp, Homo sapien
tatgggaattcttctgtgatctgga

SEQ ID NO: 3997514 - DNA, 25 bp, Homo sapien
tctgattctgcttggtccttgtcat

SEQ ID NO: 3997515 - DNA, 25 bp, Homo sapien
gacatcctgtttgaatatgggaatt

SEQ ID NO: 3997516 - DNA, 25 bp, Homo sapien
ccatgaagtcaaatacagttgattc

SEQ ID NO: 3997517 - DNA, 25 bp, Homo sapien
ctgaataagtagacatccgaaaaca

SEQ ID NO: 3997518 - DNA, 25 bp, Homo sapien
gtcaaatacagttgattccccaggg

SEQ ID NO: 3997519 - DNA, 25 bp, Homo sapien
gaaaacatagccatccagctgacca

SEQ ID NO: 3997520 - DNA, 25 bp, Homo sapien
gcgccaatgttgagccttgctttca

SEQ ID NO: 3997521 - DNA, 25 bp, Homo sapien
ggtggttcctctacattcccaatca

SEQ ID NO: 3997522 - DNA, 25 bp, Homo sapien
tctgcaccagggcagattgcgccaa

SEQ ID NO: 3997523 - DNA, 25 bp, Homo sapien
tcactgctgatatgagcagggtggt

SEQ ID NO: 3997524 - DNA, 25 bp, Homo sapien
caactggcagaaactccaaggtcaa

SEQ ID NO: 3997525 - DNA, 25 bp, Homo sapien
ttccaactggcagaaactccaaggt

SEQ ID NO: 3997526 - DNA, 25 bp, Homo sapien
ggcagaaactccaaggtcaattcct

SEQ ID NO: 3997527 - DNA, 25 bp, Homo sapien
actggcagaaactccaaggtcaatt

SEQ ID NO: 3997528 - DNA, 25 bp, Homo sapien
aaataattttccaggggcaagcagt

SEQ ID NO: 3997529 - DNA, 25 bp, Homo sapien
agaaataattttccaggggcaagca

SEQ ID NO: 3997530 - DNA, 25 bp, Homo sapien
gaaataattttccaggggcaagcag

SEQ ID NO: 3997531 - DNA, 25 bp, Homo sapien
ggttggaggaagcatatactgattg

SEQ ID NO: 3997532 - DNA, 25 bp, Homo sapien
caaacaccaagggtcatccacattt

SEQ ID NO: 3997533 - DNA, 25 bp, Homo sapien
atatcctttttaaggatcacagctt

SEQ ID NO: 3997534 - DNA, 25 bp, Homo sapien
tcataggttttagctgcgatatcct

SEQ ID NO: 3997535 - DNA, 25 bp, Homo sapien
caggatgtctatacggtcagggtgc

SEQ ID NO: 3997536 - DNA, 25 bp, Homo sapien
gcacattggccgttatctccatgaa

SEQ ID NO: 3997537 - DNA, 25 bp, Homo sapien
ggtgccttgtagctgcctgtgtgcc

SEQ ID NO: 3997538 - DNA, 25 bp, Homo sapien
gaatcctctgcgagtaatgtgccca

SEQ ID NO: 3997539 - DNA, 25 bp, Homo sapien
gaacagtgcagcagcctgttgcagg

SEQ ID NO: 3997540 - DNA, 25 bp, Homo sapien
ggagaacagtgcagcagcctgttgc

SEQ ID NO: 3997541 - DNA, 25 bp, Homo sapien
tcttccaaaggtcttaagatgacaa

SEQ ID NO: 3997542 - DNA, 25 bp, Homo sapien
caaaccgcttctgccttgtggatga

SEQ ID NO: 3997543 - DNA, 25 bp, Homo sapien
ggcagtagatccatccagtcccata

SEQ ID NO: 3997544 - DNA, 25 bp, Homo sapien
tgacctctggcagtagatccatcca

SEQ ID NO: 3997545 - DNA, 25 bp, Homo sapien
tcagtctggcactacttgacctctg

SEQ ID NO: 3997546 - DNA, 25 bp, Homo sapien
catccagtcccataaaagctagagt

SEQ ID NO: 3997547 - DNA, 25 bp, Homo sapien
gtggcttctcagcgtccagcctcat

SEQ ID NO: 3997548 - DNA, 25 bp, Homo sapien
tgtggcttctcagcgtccagcctca

SEQ ID NO: 3997549 - DNA, 25 bp, Homo sapien
cacgaaacttcactcgcgtccgtgt

SEQ ID NO: 3997550 - DNA, 25 bp, Homo sapien
gcacgaaacttcactcgcgtccgtg

SEQ ID NO: 3997551 - DNA, 25 bp, Homo sapien
aggcagcgaccggccattgtcactt

SEQ ID NO: 3997552 - DNA, 25 bp, Homo sapien
agcgaccggccattgtcacttcttt

SEQ ID NO: 3997553 - DNA, 25 bp, Homo sapien
tgaggaagctttttagccaggatga

SEQ ID NO: 3997554 - DNA, 25 bp, Homo sapien
gcagcgaccggccattgtcacttct

SEQ ID NO: 3997555 - DNA, 25 bp, Homo sapien
cggtgacaatgtgaccaactgaagc

SEQ ID NO: 3997556 - DNA, 25 bp, Homo sapien
cagaatctctacattgtcggtgaca

SEQ ID NO: 3997557 - DNA, 25 bp, Homo sapien
gacaatgtgaccaactgaagccaac

SEQ ID NO: 3997558 - DNA, 25 bp, Homo sapien
cattgtcggtgacaatgtgaccaac

SEQ ID NO: 3997559 - DNA, 25 bp, Homo sapien
tcacacacgggcttgaaggatcaac

SEQ ID NO: 3997560 - DNA, 25 bp, Homo sapien
tcttgagtgcaaaaacaggaatgcc

SEQ ID NO: 3997561 - DNA, 25 bp, Homo sapien
tatcacctgtgggatgctagatgcg

SEQ ID NO: 3997562 - DNA, 25 bp, Homo sapien
gagttcttatccagcatcccgggag

SEQ ID NO: 3997563 - DNA, 25 bp, Homo sapien
agggaagggaccaagcaagagtact

SEQ ID NO: 3997564 - DNA, 25 bp, Homo sapien
gaagggaccaagcaagagtactcca

SEQ ID NO: 3997565 - DNA, 25 bp, Homo sapien
agggaccaagcaagagtactccagg

SEQ ID NO: 3997566 - DNA, 25 bp, Homo sapien
gggaagggaccaagcaagagtactc

SEQ ID NO: 3997567 - DNA, 25 bp, Homo sapien
ggaggtaacatgaagaatgggtaca

SEQ ID NO: 3997568 - DNA, 25 bp, Homo sapien
catatccgggcaaacttttgggagt

SEQ ID NO: 3997569 - DNA, 25 bp, Homo sapien
aagtaagccatatccgggcaaactt

SEQ ID NO: 3997570 - DNA, 25 bp, Homo sapien
aggaggtaacatgaagaatgggtac

SEQ ID NO: 3997571 - DNA, 25 bp, Homo sapien
tgcagtgacaatcatctccaaggct

SEQ ID NO: 3997572 - DNA, 25 bp, Homo sapien
cactgcagtgacaatcatctccaag

SEQ ID NO: 3997573 - DNA, 25 bp, Homo sapien
tctcctaagctaccaagcacaccct

SEQ ID NO: 3997574 - DNA, 25 bp, Homo sapien
tctttctcctaagctaccaagcaca

SEQ ID NO: 3997575 - DNA, 25 bp, Homo sapien
taagctaccaagcacaccctctcct

SEQ ID NO: 3997576 - DNA, 25 bp, Homo sapien
tcctaagctaccaagcacaccctct

SEQ ID NO: 3997577 - DNA, 25 bp, Homo sapien
atcctcctccacatgcttgctgaag

SEQ ID NO: 3997578 - DNA, 25 bp, Homo sapien
tcctcctccacatgcttgctgaaga

SEQ ID NO: 3997579 - DNA, 25 bp, Homo sapien
cctcctccacatgcttgctgaagaa

SEQ ID NO: 3997580 - DNA, 25 bp, Homo sapien
ctcctccacatgcttgctgaagaat

SEQ ID NO: 3997581 - DNA, 25 bp, Homo sapien
tccagtgtggcaaccatttagacca

SEQ ID NO: 3997582 - DNA, 25 bp, Homo sapien
tattgtggcccctgtttgaaaccac

SEQ ID NO: 3997583 - DNA, 25 bp, Homo sapien
gatgatcagtacttctaggcttgcc

SEQ ID NO: 3997584 - DNA, 25 bp, Homo sapien
ttagaccaccaatggctgttgtgcc

SEQ ID NO: 3997585 - DNA, 25 bp, Homo sapien
tctgtgaggcgttctcagggacaga

SEQ ID NO: 3997586 - DNA, 25 bp, Homo sapien
tttgctggttcagcgcagtctctgg

SEQ ID NO: 3997587 - DNA, 25 bp, Homo sapien
gcagtgccgtttccatagatccaat

SEQ ID NO: 3997588 - DNA, 25 bp, Homo sapien
cagttcattctttgctggttcagcg

SEQ ID NO: 3997589 - DNA, 25 bp, Homo sapien
taccggaagataattttcagcctcg

SEQ ID NO: 3997590 - DNA, 25 bp, Homo sapien
cacatcagggttctagactaaattc

SEQ ID NO: 3997591 - DNA, 25 bp, Homo sapien
tcagcctcgagtgcctagaggatat

SEQ ID NO: 3997592 - DNA, 25 bp, Homo sapien
aatgcattcactttttgcctggaga

SEQ ID NO: 3997593 - DNA, 25 bp, Homo sapien
cattgtcttactcctgcctgagtac

SEQ ID NO: 3997594 - DNA, 25 bp, Homo sapien
taggaagatcaccagccaggtgcat

SEQ ID NO: 3997595 - DNA, 25 bp, Homo sapien
tttctctagcaagggtgaatgcgta

SEQ ID NO: 3997596 - DNA, 25 bp, Homo sapien
gggcagcccttaggaagatcaccag

SEQ ID NO: 3997597 - DNA, 25 bp, Homo sapien
cgacatcttgtaactccttcagtct

SEQ ID NO: 3997598 - DNA, 25 bp, Homo sapien
aagaaggagcatcagtaggctcttc

SEQ ID NO: 3997599 - DNA, 25 bp, Homo sapien
agcatcagtaggctcttctctctga

SEQ ID NO: 3997600 - DNA, 25 bp, Homo sapien
aatacacctgaagtctcgacatctt

SEQ ID NO: 3997601 - DNA, 25 bp, Homo sapien
gaggcaaatcatcagcatagtccat

SEQ ID NO: 3997602 - DNA, 25 bp, Homo sapien
gcaacactctgtattccattagaag

SEQ ID NO: 3997603 - DNA, 25 bp, Homo sapien
cactctgtattccattagaagccat

SEQ ID NO: 3997604 - DNA, 25 bp, Homo sapien
tctccccgcaacactctgtattcca

SEQ ID NO: 3997605 - DNA, 25 bp, Homo sapien
cccgcaacactctgtattccattag

SEQ ID NO: 3997606 - DNA, 25 bp, Homo sapien
atgacacccggatgttcacaaccct

SEQ ID NO: 3997607 - DNA, 25 bp, Homo sapien
cggatgttcacaaccctcaggctgt

SEQ ID NO: 3997608 - DNA, 25 bp, Homo sapien
atgtagaaaagtgtcatgacacccg

SEQ ID NO: 3997609 - DNA, 25 bp, Homo sapien
tgtcatgacacccggatgttcacaa

SEQ ID NO: 3997610 - DNA, 25 bp, Homo sapien
cagtgtgagtgctgaggacctcaac

SEQ ID NO: 3997611 - DNA, 25 bp, Homo sapien
tgtgagtgctgaggacctcaacagg

SEQ ID NO: 3997612 - DNA, 25 bp, Homo sapien
tgagtgctgaggacctcaacaggtc

SEQ ID NO: 3997613 - DNA, 25 bp, Homo sapien
gacagtgtgagtgctgaggacctca

SEQ ID NO: 3997614 - DNA, 25 bp, Homo sapien
tggaacagctgtctctagctcagct

SEQ ID NO: 3997615 - DNA, 25 bp, Homo sapien
taggtctccctctgggtttctggaa

SEQ ID NO: 3997616 - DNA, 25 bp, Homo sapien
cctccatgctggctcgtcttgtggt

SEQ ID NO: 3997617 - DNA, 25 bp, Homo sapien
tctgtaccccagacaggaaaatgcc

SEQ ID NO: 3997618 - DNA, 25 bp, Homo sapien
agctaaagctgagctggaagttatg

SEQ ID NO: 3997619 - DNA, 25 bp, Homo sapien
aagctaaagctgagctggaagttat

SEQ ID NO: 3997620 - DNA, 25 bp, Homo sapien
aaagctaaagctgagctggaagtta

SEQ ID NO: 3997621 - DNA, 25 bp, Homo sapien
tggagcaagggcctcatggctgcta

SEQ ID NO: 3997622 - DNA, 25 bp, Homo sapien
gggcctcatggctgctaacataatt

SEQ ID NO: 3997623 - DNA, 25 bp, Homo sapien
tagaaccactgtagctggagcaagg

SEQ ID NO: 3997624 - DNA, 25 bp, Homo sapien
cttcattggcatgtaaatacttccc

SEQ ID NO: 3997625 - DNA, 25 bp, Homo sapien
gatgtgaggaacgtgattgttccac

SEQ ID NO: 3997626 - DNA, 25 bp, Homo sapien
cacttgaacttgctggccattggaa

SEQ ID NO: 3997627 - DNA, 25 bp, Homo sapien
gttccacttagaagagtaaggttgc

SEQ ID NO: 3997628 - DNA, 25 bp, Homo sapien
tagatttcttgtgtgagtgatggga

SEQ ID NO: 3997629 - DNA, 25 bp, Homo sapien
ttccctttgagaatggatccatcat

SEQ ID NO: 3997630 - DNA, 25 bp, Homo sapien
caggagactagcttcccttggaatg

SEQ ID NO: 3997631 - DNA, 25 bp, Homo sapien
gaacagagtgaccaattccctcgtg

SEQ ID NO: 3997632 - DNA, 25 bp, Homo sapien
ttgcataggtgaactgtcccgccac

SEQ ID NO: 3997633 - DNA, 25 bp, Homo sapien
ctgctggcaaatgaagcttaaaggt

SEQ ID NO: 3997634 - DNA, 25 bp, Homo sapien
tgctggcaaatgaagcttaaaggtt

SEQ ID NO: 3997635 - DNA, 25 bp, Homo sapien
aaagcacagttaaacgtggttatct

SEQ ID NO: 3997636 - DNA, 25 bp, Homo sapien
tcacaatggagagatgtcatcggtt

SEQ ID NO: 3997637 - DNA, 25 bp, Homo sapien
aagcacagttaaacgtggttatctc

SEQ ID NO: 3997638 - DNA, 25 bp, Homo sapien
caatggagagatgtcatcggttaag

SEQ ID NO: 3997639 - DNA, 25 bp, Homo sapien
tggtcccacggtcctgtgagaagcc

SEQ ID NO: 3997640 - DNA, 25 bp, Homo sapien
gcttaatgcttgtggctgagggaga

SEQ ID NO: 3997641 - DNA, 25 bp, Homo sapien
tgaggaatttgtctgggcttaatgc

SEQ ID NO: 3997642 - DNA, 25 bp, Homo sapien
gctgcggctgagtctcattatggcc

SEQ ID NO: 3997643 - DNA, 25 bp, Homo sapien
caaagcccctacttcagatactgct

SEQ ID NO: 3997644 - DNA, 25 bp, Homo sapien
tgcctttgctccaaagcccctactt

SEQ ID NO: 3997645 - DNA, 25 bp, Homo sapien
cccctacttcagatactgctcctct

SEQ ID NO: 3997646 - DNA, 25 bp, Homo sapien
gtgcctttgctccaaagcccctact

SEQ ID NO: 3997647 - DNA, 25 bp, Homo sapien
gtccataagcttgagcatcactaga

SEQ ID NO: 3997648 - DNA, 25 bp, Homo sapien
ggtcttgctggtccataagcttgag

SEQ ID NO: 3997649 - DNA, 25 bp, Homo sapien
tgagcatcactagaaattactctgt

SEQ ID NO: 3997650 - DNA, 25 bp, Homo sapien
cactagaaattactctgtcattcat

SEQ ID NO: 3997651 - DNA, 25 bp, Homo sapien
tccacaatgtgaatagacccgaggg

SEQ ID NO: 3997652 - DNA, 25 bp, Homo sapien
tagagttagtgggaattaggcagac

SEQ ID NO: 3997653 - DNA, 25 bp, Homo sapien
gcaaggccgcagacaggttcttttt

SEQ ID NO: 3997654 - DNA, 25 bp, Homo sapien
agaagccgctgatcctgcaaggccg

SEQ ID NO: 3997655 - DNA, 25 bp, Homo sapien
agactgatgatgctgggctagtgct

SEQ ID NO: 3997656 - DNA, 25 bp, Homo sapien
gggacactctagtcctggctagact

SEQ ID NO: 3997657 - DNA, 25 bp, Homo sapien
gactgggtccaccaccttcattgta

SEQ ID NO: 3997658 - DNA, 25 bp, Homo sapien
ctcttggtattgactctaggacctg

SEQ ID NO: 3997659 - DNA, 25 bp, Homo sapien
tattgcagcaaggattatttggaaa

SEQ ID NO: 3997660 - DNA, 25 bp, Homo sapien
gaaatattgcagcaaggattatttg

SEQ ID NO: 3997661 - DNA, 25 bp, Homo sapien
aatattgcagcaaggattatttgga

SEQ ID NO: 3997662 - DNA, 25 bp, Homo sapien
gcagcaaggattatttggaaattga

SEQ ID NO: 3997663 - DNA, 25 bp, Homo sapien
gatggtaacttcacaggcctccatt

SEQ ID NO: 3997664 - DNA, 25 bp, Homo sapien
tccttagactgataatattggcatc

SEQ ID NO: 3997665 - DNA, 25 bp, Homo sapien
tattggcatctgaaataatcttcaa

SEQ ID NO: 3997666 - DNA, 25 bp, Homo sapien
ccccttctgaagtgtttcgatggta

SEQ ID NO: 3997667 - DNA, 25 bp, Homo sapien
agtgaccgcggtcgtggtcgtggct

SEQ ID NO: 3997668 - DNA, 25 bp, Homo sapien
ctcgcctccaatcccgggtgcctgt

SEQ ID NO: 3997669 - DNA, 25 bp, Homo sapien
gggcgaccgctggttggctcgcgcg

SEQ ID NO: 3997670 - DNA, 25 bp, Homo sapien
gggagcgtgcgagtgtgagcgtgcg

SEQ ID NO: 3997671 - DNA, 25 bp, Homo sapien
aagagagcacagaacggagaggagc

SEQ ID NO: 3997672 - DNA, 25 bp, Homo sapien
gagcctgcgggcagaaaataatgca

SEQ ID NO: 3997673 - DNA, 25 bp, Homo sapien
gttcgctccgcacgacaagttacca

SEQ ID NO: 3997674 - DNA, 25 bp, Homo sapien
agcagcagtgcaagccgagcctgcg

SEQ ID NO: 3997675 - DNA, 25 bp, Homo sapien
gcgcccagagcgcggacgtgcccat

SEQ ID NO: 3997676 - DNA, 25 bp, Homo sapien
aggagaaccgagaggcgcctcctag

SEQ ID NO: 3997677 - DNA, 25 bp, Homo sapien
cagaagactagttcaggcgaggcgt

SEQ ID NO: 3997678 - DNA, 25 bp, Homo sapien
gtgggcaaacggagacctacgcctc

SEQ ID NO: 3997679 - DNA, 25 bp, Homo sapien
cgcctcctaggaggcgggtgggcaa

SEQ ID NO: 3997680 - DNA, 25 bp, Homo sapien
ctcggcgcccgtcaagagggcgaga

SEQ ID NO: 3997681 - DNA, 25 bp, Homo sapien
ggcgagaaacgaggcgaagcagcgg

SEQ ID NO: 3997682 - DNA, 25 bp, Homo sapien
cgcccgtcaagagggcgagaaacga

SEQ ID NO: 3997683 - DNA, 25 bp, Homo sapien
tcaagagggcgagaaacgaggcgaa

SEQ ID NO: 3997684 - DNA, 25 bp, Homo sapien
taagttccttgccagagtctcagtg

SEQ ID NO: 3997685 - DNA, 25 bp, Homo sapien
tcttttgagcatggagactgtcacc

SEQ ID NO: 3997686 - DNA, 25 bp, Homo sapien
ccaggagtattgtggaacagcacca

SEQ ID NO: 3997687 - DNA, 25 bp, Homo sapien
tgaagctgttactgccaaggagggc

SEQ ID NO: 3997688 - DNA, 25 bp, Homo sapien
agccacacggctgggtactatgtgt

SEQ ID NO: 3997689 - DNA, 25 bp, Homo sapien
acacggctgggtactatgtgttccc

SEQ ID NO: 3997690 - DNA, 25 bp, Homo sapien
atcaaaacccgaagccacacggctg

SEQ ID NO: 3997691 - DNA, 25 bp, Homo sapien
ttgggatcaaaacccgaagccacac

SEQ ID NO: 3997692 - DNA, 25 bp, Homo sapien
tacagcgaccatttgtgcactggaa

SEQ ID NO: 3997693 - DNA, 25 bp, Homo sapien
catttccacaacagcgtaatacagc

SEQ ID NO: 3997694 - DNA, 25 bp, Homo sapien
gaccatttgtgcactggaattggga

SEQ ID NO: 3997695 - DNA, 25 bp, Homo sapien
cagcgtaatacagcgaccatttgtg

SEQ ID NO: 3997696 - DNA, 25 bp, Homo sapien
cacagttcttttcatcactgccgtc

SEQ ID NO: 3997697 - DNA, 25 bp, Homo sapien
acatttgcagactaagataacatca

SEQ ID NO: 3997698 - DNA, 25 bp, Homo sapien
aaaatgcataagtcatcaaactctt

SEQ ID NO: 3997699 - DNA, 25 bp, Homo sapien
tattcctttacacagagaagtatag

SEQ ID NO: 3997700 - DNA, 25 bp, Homo sapien
gataaccccacgtcaaacattcaat

SEQ ID NO: 3997701 - DNA, 25 bp, Homo sapien
aacacactggccattgttgcacacg

SEQ ID NO: 3997702 - DNA, 25 bp, Homo sapien
gcagtcaggatctccatcacacttc

SEQ ID NO: 3997703 - DNA, 25 bp, Homo sapien
gttgcacacgaagtcagattcagca

SEQ ID NO: 3997704 - DNA, 25 bp, Homo sapien
cttccatcggctgggaacacactgg

SEQ ID NO: 3997705 - DNA, 25 bp, Homo sapien
tcatgtatgcggcatgttctcatat

SEQ ID NO: 3997706 - DNA, 25 bp, Homo sapien
tacactgagtagaatgggcgccaca

SEQ ID NO: 3997707 - DNA, 25 bp, Homo sapien
tgggcgccacagctgatttcatgta

SEQ ID NO: 3997708 - DNA, 25 bp, Homo sapien
gctgatttcatgtatgcggcatgtt

SEQ ID NO: 3997709 - DNA, 25 bp, Homo sapien
gagcaggtgaactcgtcgggactac

SEQ ID NO: 3997710 - DNA, 25 bp, Homo sapien
tacaaagttcctggagatgcagcgg

SEQ ID NO: 3997711 - DNA, 25 bp, Homo sapien
tcgtcgggactacatgttatattgc

SEQ ID NO: 3997712 - DNA, 25 bp, Homo sapien
cctggccattgcatacaaagttcct

SEQ ID NO: 3997713 - DNA, 25 bp, Homo sapien
catcgtcgcatacccagctgatggg

SEQ ID NO: 3997714 - DNA, 25 bp, Homo sapien
cacttggtgtgtatgactggctgac

SEQ ID NO: 3997715 - DNA, 25 bp, Homo sapien
gatttcgctggctggacacttggtg

SEQ ID NO: 3997716 - DNA, 25 bp, Homo sapien
tcttatggatgcactcgccagagcc

SEQ ID NO: 3997717 - DNA, 25 bp, Homo sapien
aaattgtcccagttgatacagggaa

SEQ ID NO: 3997718 - DNA, 25 bp, Homo sapien
tgtcccagttgatacagggaagaga

SEQ ID NO: 3997719 - DNA, 25 bp, Homo sapien
gcaaattgtcccagttgatacaggg

SEQ ID NO: 3997720 - DNA, 25 bp, Homo sapien
caaattgtcccagttgatacaggga

SEQ ID NO: 3997721 - DNA, 25 bp, Homo sapien
aattggtcaggtcggcaagttcgag

SEQ ID NO: 3997722 - DNA, 25 bp, Homo sapien
gtctcggataccattacactgcctg

SEQ ID NO: 3997723 - DNA, 25 bp, Homo sapien
ggaaccatcgacacagtctcggata

SEQ ID NO: 3997724 - DNA, 25 bp, Homo sapien
ctgccatcctcacattcaaattggt

SEQ ID NO: 3997725 - DNA, 25 bp, Homo sapien
ttgaattttccagggcccaagcact

SEQ ID NO: 3997726 - DNA, 25 bp, Homo sapien
atactttgctgatatctatgcattc

SEQ ID NO: 3997727 - DNA, 25 bp, Homo sapien
cttgaattttccagggcccaagcac

SEQ ID NO: 3997728 - DNA, 25 bp, Homo sapien
tagcctataactaggtctttgcaga

SEQ ID NO: 3997729 - DNA, 25 bp, Homo sapien
tatctatcagttcaaacccagctgc

SEQ ID NO: 3997730 - DNA, 25 bp, Homo sapien
tgcacagtcacactcgtagcctata

SEQ ID NO: 3997731 - DNA, 25 bp, Homo sapien
gaacatccaccattatttaccaagc

SEQ ID NO: 3997732 - DNA, 25 bp, Homo sapien
tatcctttcccatcacctgcagggt

SEQ ID NO: 3997733 - DNA, 25 bp, Homo sapien
gcagggtccaggttttcttcttaga

SEQ ID NO: 3997734 - DNA, 25 bp, Homo sapien
tcacctgcagggtccaggttttctt

SEQ ID NO: 3997735 - DNA, 25 bp, Homo sapien
ttcccatcacctgcagggtccaggt

SEQ ID NO: 3997736 - DNA, 25 bp, Homo sapien
gatacaaatttgactgcagattcct

SEQ ID NO: 3997737 - DNA, 25 bp, Homo sapien
gtagcaagatccatttgatagccac

SEQ ID NO: 3997738 - DNA, 25 bp, Homo sapien
tgatagccacgactacattcacact

SEQ ID NO: 3997739 - DNA, 25 bp, Homo sapien
tactgccttgcacacgccagtagca

SEQ ID NO: 3997740 - DNA, 25 bp, Homo sapien
agatggaagtctgggttacttagtt

SEQ ID NO: 3997741 - DNA, 25 bp, Homo sapien
gattagtgaagatcagacttggctc

SEQ ID NO: 3997742 - DNA, 25 bp, Homo sapien
tcagcatcgagagccacagtgtttc

SEQ ID NO: 3997743 - DNA, 25 bp, Homo sapien
tttggcttagatcggcccagaatag

SEQ ID NO: 3997744 - DNA, 25 bp, Homo sapien
tttctgggcagcaatgtcagcatcg

SEQ ID NO: 3997745 - DNA, 25 bp, Homo sapien
aagacaccacaaaaggaactgaaag

SEQ ID NO: 3997746 - DNA, 25 bp, Homo sapien
cttatgtcaagacaccacaaaagga

SEQ ID NO: 3997747 - DNA, 25 bp, Homo sapien
gacttatgtcaagacaccacaaaag

SEQ ID NO: 3997748 - DNA, 25 bp, Homo sapien
tcaagacaccacaaaaggaactgaa

SEQ ID NO: 3997749 - DNA, 25 bp, Homo sapien
ccagtagatggtcttgtacacccaa

SEQ ID NO: 3997750 - DNA, 25 bp, Homo sapien
tatggaggcaggctctcgcaagtca

SEQ ID NO: 3997751 - DNA, 25 bp, Homo sapien
cttggttccatctagggtagctact

SEQ ID NO: 3997752 - DNA, 25 bp, Homo sapien
ttagaagccgcatcagtccagtaga

SEQ ID NO: 3997753 - DNA, 25 bp, Homo sapien
caaagtctgtgatggaaaacagact

SEQ ID NO: 3997754 - DNA, 25 bp, Homo sapien
aagtctgtgatggaaaacagactac

SEQ ID NO: 3997755 - DNA, 25 bp, Homo sapien
ttccaaagtctgtgatggaaaacag

SEQ ID NO: 3997756 - DNA, 25 bp, Homo sapien
cattccaaagtctgtgatggaaaac

SEQ ID NO: 3997757 - DNA, 25 bp, Homo sapien
agaaataagcctcagtggtttagaa

SEQ ID NO: 3997758 - DNA, 25 bp, Homo sapien
gagaaataagcctcagtggtttaga

SEQ ID NO: 3997759 - DNA, 25 bp, Homo sapien
atgagaaataagcctcagtggttta

SEQ ID NO: 3997760 - DNA, 25 bp, Homo sapien
gaaataagcctcagtggtttagaag

SEQ ID NO: 3997761 - DNA, 25 bp, Homo sapien
aagtgtaattccgttaggccactgg

SEQ ID NO: 3997762 - DNA, 25 bp, Homo sapien
ggatatccgctgtcaccagtggacg

SEQ ID NO: 3997763 - DNA, 25 bp, Homo sapien
tattttagctggttcaccccagtct

SEQ ID NO: 3997764 - DNA, 25 bp, Homo sapien
tctatcgaatccattcattcctgct

SEQ ID NO: 3997765 - DNA, 25 bp, Homo sapien
agtagagtcatctgctagtccagaa

SEQ ID NO: 3997766 - DNA, 25 bp, Homo sapien
tacttgtgttgttcagttactccca

SEQ ID NO: 3997767 - DNA, 25 bp, Homo sapien
tgctagaatttaggcggaagcagta

SEQ ID NO: 3997768 - DNA, 25 bp, Homo sapien
gaattcaccatggagataaatggaa

SEQ ID NO: 3997769 - DNA, 25 bp, Homo sapien
caagaggatgagctaggaactccag

SEQ ID NO: 3997770 - DNA, 25 bp, Homo sapien
tagtactatcctacgatcttggcca

SEQ ID NO: 3997771 - DNA, 25 bp, Homo sapien
ttagaatcaagccaatagaggcgac

SEQ ID NO: 3997772 - DNA, 25 bp, Homo sapien
tccacgctggataacatgtgcaact

SEQ ID NO: 3997773 - DNA, 25 bp, Homo sapien
gagtggctagctctgatccagtgaa

SEQ ID NO: 3997774 - DNA, 25 bp, Homo sapien
cattcaggttgttgactagagtggc

SEQ ID NO: 3997775 - DNA, 25 bp, Homo sapien
ggctgtacaagttcatgatagacaa

SEQ ID NO: 3997776 - DNA, 25 bp, Homo sapien
tttattggcaccatagactgcttca

SEQ ID NO: 3997777 - DNA, 25 bp, Homo sapien
cagtctcggccattttcctctacat

SEQ ID NO: 3997778 - DNA, 25 bp, Homo sapien
ggtattcacatcctccattctccat

SEQ ID NO: 3997779 - DNA, 25 bp, Homo sapien
tttgacagtctcggccattttcctc

SEQ ID NO: 3997780 - DNA, 25 bp, Homo sapien
cataggtattcacatcctccattct

SEQ ID NO: 3997781 - DNA, 25 bp, Homo sapien
tccactagttgctgaaatttctgtt

SEQ ID NO: 3997782 - DNA, 25 bp, Homo sapien
cgtatcttttgtctcactgtaagtc

SEQ ID NO: 3997783 - DNA, 25 bp, Homo sapien
ctccaggaactagtccactagttgc

SEQ ID NO: 3997784 - DNA, 25 bp, Homo sapien
gttcgtatcttttgtctcactgtaa

SEQ ID NO: 3997785 - DNA, 25 bp, Homo sapien
tatctacaacaattgaacaccagga

SEQ ID NO: 3997786 - DNA, 25 bp, Homo sapien
tacccatcaggtaaggagccaaaac

SEQ ID NO: 3997787 - DNA, 25 bp, Homo sapien
gcttagaagtatttgagtcacatgc

SEQ ID NO: 3997788 - DNA, 25 bp, Homo sapien
aacaccaggaacaactctggcttag

SEQ ID NO: 3997789 - DNA, 25 bp, Homo sapien
tgatactgctgtggtcacattgatc

SEQ ID NO: 3997790 - DNA, 25 bp, Homo sapien
ctctgatactgctgtggtcacattg

SEQ ID NO: 3997791 - DNA, 25 bp, Homo sapien
tctgatactgctgtggtcacattga

SEQ ID NO: 3997792 - DNA, 25 bp, Homo sapien
gatactgctgtggtcacattgatcc

SEQ ID NO: 3997793 - DNA, 25 bp, Homo sapien
agaatggcccatgcggcagaagtcc

SEQ ID NO: 3997794 - DNA, 25 bp, Homo sapien
ccatgcggcagaagtcccttttggg

SEQ ID NO: 3997795 - DNA, 25 bp, Homo sapien
gaagaatggcccatgcggcagaagt

SEQ ID NO: 3997796 - DNA, 25 bp, Homo sapien
tggcccatgcggcagaagtcccttt

SEQ ID NO: 3997797 - DNA, 25 bp, Homo sapien
gggtagctccagatgaacaaaaaat

SEQ ID NO: 3997798 - DNA, 25 bp, Homo sapien
gagaaagcgaacgtaattcagtgtc

SEQ ID NO: 3997799 - DNA, 25 bp, Homo sapien
gaacacttatcattgccagttactg

SEQ ID NO: 3997800 - DNA, 25 bp, Homo sapien
tagacagcataaaggcccatgaaag

SEQ ID NO: 3997801 - DNA, 25 bp, Homo sapien
ctgtgtctaccaatgtctatggaga

SEQ ID NO: 3997802 - DNA, 25 bp, Homo sapien
tacgtgtgtccaacagaagcactgt

SEQ ID NO: 3997803 - DNA, 25 bp, Homo sapien
tgccaattccgccacatcaagtagc

SEQ ID NO: 3997804 - DNA, 25 bp, Homo sapien
aatgtctatggagaggtcctcttca

SEQ ID NO: 3997805 - DNA, 25 bp, Homo sapien
cttcaagccatggtgtataaagaca

SEQ ID NO: 3997806 - DNA, 25 bp, Homo sapien
tcacttcaagccatggtgtataaag

SEQ ID NO: 3997807 - DNA, 25 bp, Homo sapien
tcaagccatggtgtataaagacaca

SEQ ID NO: 3997808 - DNA, 25 bp, Homo sapien
caagccatggtgtataaagacacaa

SEQ ID NO: 3997809 - DNA, 25 bp, Homo sapien
gatcatcatctgtgcttacaactga

SEQ ID NO: 3997810 - DNA, 25 bp, Homo sapien
catcatctgtgcttacaactgatat

SEQ ID NO: 3997811 - DNA, 25 bp, Homo sapien
tcaagctagatcatcatctgtgctt

SEQ ID NO: 3997812 - DNA, 25 bp, Homo sapien
gctagatcatcatctgtgcttacaa

SEQ ID NO: 3997813 - DNA, 25 bp, Homo sapien
tacacaagcttgatccacgcaaagg

SEQ ID NO: 3997814 - DNA, 25 bp, Homo sapien
aagtgcatatttggccagaggtggc

SEQ ID NO: 3997815 - DNA, 25 bp, Homo sapien
tcttgatgttcttccagccgagagg

SEQ ID NO: 3997816 - DNA, 25 bp, Homo sapien
cagtctttgcaaacctccattgagg

SEQ ID NO: 3997817 - DNA, 25 bp, Homo sapien
gttagaacacttggtactactcagg

SEQ ID NO: 3997818 - DNA, 25 bp, Homo sapien
tctaggtacagactaagctagcttc

SEQ ID NO: 3997819 - DNA, 25 bp, Homo sapien
tatacaacatcaagaactacagctc

SEQ ID NO: 3997820 - DNA, 25 bp, Homo sapien
gaaaccagcccaattacaggcttag

SEQ ID NO: 3997821 - DNA, 25 bp, Homo sapien
gaaagtaatggccaacctgatggaa

SEQ ID NO: 3997822 - DNA, 25 bp, Homo sapien
gagtcatccactgattcacgtagca

SEQ ID NO: 3997823 - DNA, 25 bp, Homo sapien
tgtccatagtaagaatctgccccat

SEQ ID NO: 3997824 - DNA, 25 bp, Homo sapien
tttacatcagtatcgcctgaagggc

SEQ ID NO: 3997825 - DNA, 25 bp, Homo sapien
ccaaatagattagcttgcaaagggc

SEQ ID NO: 3997826 - DNA, 25 bp, Homo sapien
cactttgtgtgacaggctcatctaa

SEQ ID NO: 3997827 - DNA, 25 bp, Homo sapien
taaagccgaggcctgttatcattca

SEQ ID NO: 3997828 - DNA, 25 bp, Homo sapien
taaagaggcagcgatacctaggctt

SEQ ID NO: 3997829 - DNA, 25 bp, Homo sapien
ttaagttggtctaccatttctacag

SEQ ID NO: 3997830 - DNA, 25 bp, Homo sapien
taataccctgtagtttgctatttaa

SEQ ID NO: 3997831 - DNA, 25 bp, Homo sapien
agtttgctatttaaagcttggcttc

SEQ ID NO: 3997832 - DNA, 25 bp, Homo sapien
ttctacagtgttcttaactgaagag

SEQ ID NO: 3997833 - DNA, 25 bp, Homo sapien
cagcagcagttagcactgacgcaac

SEQ ID NO: 3997834 - DNA, 25 bp, Homo sapien
cgcaactatcgctgctattgccact

SEQ ID NO: 3997835 - DNA, 25 bp, Homo sapien
cagcagccgccaacagaacgggcag

SEQ ID NO: 3997836 - DNA, 25 bp, Homo sapien
cagccgccaacagaacgggcagcag

SEQ ID NO: 3997837 - DNA, 25 bp, Homo sapien
ctgtttcggctaaaaatcctccagg

SEQ ID NO: 3997838 - DNA, 25 bp, Homo sapien
tcctgtgtgaaggtagatgtgaaag

SEQ ID NO: 3997839 - DNA, 25 bp, Homo sapien
ggtagatgtgaaagggatatgcaaa

SEQ ID NO: 3997840 - DNA, 25 bp, Homo sapien
tcacatgcaactgtttcggctaaaa

SEQ ID NO: 3997841 - DNA, 25 bp, Homo sapien
aggtgtagtggagaacacttcggtc

SEQ ID NO: 3997842 - DNA, 25 bp, Homo sapien
taaatatcagacttagatctcttca

SEQ ID NO: 3997843 - DNA, 25 bp, Homo sapien
atatcagacttagatctcttcagac

SEQ ID NO: 3997844 - DNA, 25 bp, Homo sapien
cggtcaccatctaacacattacatt

SEQ ID NO: 3997845 - DNA, 25 bp, Homo sapien
tctaaagactatgcaggctcccaaa

SEQ ID NO: 3997846 - DNA, 25 bp, Homo sapien
gaaggatcctaacatcagcaatgag

SEQ ID NO: 3997847 - DNA, 25 bp, Homo sapien
tacagtactgcatccccttctaaga

SEQ ID NO: 3997848 - DNA, 25 bp, Homo sapien
gaagacggcagtaagcacataggat

SEQ ID NO: 3997849 - DNA, 25 bp, Homo sapien
tagaattctgaagatcctgagcatg

SEQ ID NO: 3997850 - DNA, 25 bp, Homo sapien
aatttggttgtatatgccggactcc

SEQ ID NO: 3997851 - DNA, 25 bp, Homo sapien
gcatcattgagttacaagccacagt

SEQ ID NO: 3997852 - DNA, 25 bp, Homo sapien
tattgacaggtcatcaggactctgc

SEQ ID NO: 3997853 - DNA, 25 bp, Homo sapien
gttttaatttgcctaatatggcctg

SEQ ID NO: 3997854 - DNA, 25 bp, Homo sapien
gtacgactgtagctgattgggccat

SEQ ID NO: 3997855 - DNA, 25 bp, Homo sapien
taatatggcctgtacgactgtagct

SEQ ID NO: 3997856 - DNA, 25 bp, Homo sapien
ggttgggctttcagccgctgtttta

SEQ ID NO: 3997857 - DNA, 25 bp, Homo sapien
ttttggaatgcttctgtcccaggtc

SEQ ID NO: 3997858 - DNA, 25 bp, Homo sapien
ttggaatgcttctgtcccaggtcct

SEQ ID NO: 3997859 - DNA, 25 bp, Homo sapien
aggtttttggaatgcttctgtccca

SEQ ID NO: 3997860 - DNA, 25 bp, Homo sapien
ggtcctgttcacctccattttccat

SEQ ID NO: 3997861 - DNA, 25 bp, Homo sapien
actgcagtgacgagggctccctgga

SEQ ID NO: 3997862 - DNA, 25 bp, Homo sapien
cactggcattactgcagtgacgagg

SEQ ID NO: 3997863 - DNA, 25 bp, Homo sapien
tctgacactggcattactgcagtga

SEQ ID NO: 3997864 - DNA, 25 bp, Homo sapien
attactgcagtgacgagggctccct

SEQ ID NO: 3997865 - DNA, 25 bp, Homo sapien
tgcactgtcttagagaggccagccc

SEQ ID NO: 3997866 - DNA, 25 bp, Homo sapien
gagatggtagcctctgccctaggta

SEQ ID NO: 3997867 - DNA, 25 bp, Homo sapien
taataaaaatgtcggtcaacctcgc

SEQ ID NO: 3997868 - DNA, 25 bp, Homo sapien
tatgcaaacacgatggagacacagt

SEQ ID NO: 3997869 - DNA, 25 bp, Homo sapien
ctgtccagccgtggatgctggcctg

SEQ ID NO: 3997870 - DNA, 25 bp, Homo sapien
tggctgccctcattctccgtcgtgt

SEQ ID NO: 3997871 - DNA, 25 bp, Homo sapien
ggcacccagggagcaaatgctcctg

SEQ ID NO: 3997872 - DNA, 25 bp, Homo sapien
tcctgcggtgttggctgccctcatt

SEQ ID NO: 3997873 - DNA, 25 bp, Homo sapien
caccccggacaggtagaaattgtag

SEQ ID NO: 3997874 - DNA, 25 bp, Homo sapien
gtactcgagcgtgaagaagcccatg

SEQ ID NO: 3997875 - DNA, 25 bp, Homo sapien
ttgtagaccagctggaagacggccg

SEQ ID NO: 3997876 - DNA, 25 bp, Homo sapien
cagcgtggcgtgtacttgagccgca

SEQ ID NO: 3997877 - DNA, 25 bp, Homo sapien
ctggccgcgttggtggccctcgccc

SEQ ID NO: 3997878 - DNA, 25 bp, Homo sapien
ggcacatcgtgctccacagagtaga

SEQ ID NO: 3997879 - DNA, 25 bp, Homo sapien
acctgctggtagcactggcgcagcg

SEQ ID NO: 3997880 - DNA, 25 bp, Homo sapien
gcatgaggcgcatgacgcgcaacac

SEQ ID NO: 3997881 - DNA, 25 bp, Homo sapien
cagagaaagtgaagatgcccatggc

SEQ ID NO: 3997882 - DNA, 25 bp, Homo sapien
tttgttagctgtatgcggcgattgg

SEQ ID NO: 3997883 - DNA, 25 bp, Homo sapien
acttttgacatccatcgccgttttg

SEQ ID NO: 3997884 - DNA, 25 bp, Homo sapien
aagccaaagcctggtggctgataac

SEQ ID NO: 3997885 - DNA, 25 bp, Homo sapien
ggggggaagacgaggatcagaagcc

SEQ ID NO: 3997886 - DNA, 25 bp, Homo sapien
ggctttgccacctctagctgtgagt

SEQ ID NO: 3997887 - DNA, 25 bp, Homo sapien
tttccagggattcagctaccacagc

SEQ ID NO: 3997888 - DNA, 25 bp, Homo sapien
cagatatttgagtaaacagcacaag

SEQ ID NO: 3997889 - DNA, 25 bp, Homo sapien
tcagatttaagtggaaccagaggtg

SEQ ID NO: 3997890 - DNA, 25 bp, Homo sapien
taaaatgcagataccatgggactag

SEQ ID NO: 3997891 - DNA, 25 bp, Homo sapien
cagtaccaggcatacaaaaggcatg

SEQ ID NO: 3997892 - DNA, 25 bp, Homo sapien
tactagaagccttttaagcagagct

SEQ ID NO: 3997893 - DNA, 25 bp, Homo sapien
tctgatccccagagtattggctaaa

SEQ ID NO: 3997894 - DNA, 25 bp, Homo sapien
ggtggtatactcataagccttcagc

SEQ ID NO: 3997895 - DNA, 25 bp, Homo sapien
gatcccaaaagcaatgcagaggaag

SEQ ID NO: 3997896 - DNA, 25 bp, Homo sapien
ggcatcccgttgagaatgatcccaa

SEQ ID NO: 3997897 - DNA, 25 bp, Homo sapien
gtgggtctctgggtacatgtctccg

SEQ ID NO: 3997898 - DNA, 25 bp, Homo sapien
actcagctatcttctttctggctct

SEQ ID NO: 3997899 - DNA, 25 bp, Homo sapien
ttctggctctctgcatgaagttcac

SEQ ID NO: 3997900 - DNA, 25 bp, Homo sapien
tttctggctctctgcatgaagttca

SEQ ID NO: 3997901 - DNA, 25 bp, Homo sapien
ttctttctggctctctgcatgaagt

SEQ ID NO: 3997902 - DNA, 25 bp, Homo sapien
cttgtcttggggtgagctgtgggtt

SEQ ID NO: 3997903 - DNA, 25 bp, Homo sapien
ctaattctcttgtcttggggtgagc

SEQ ID NO: 3997904 - DNA, 25 bp, Homo sapien
gtgagctgtgggttgcttccaagca

SEQ ID NO: 3997905 - DNA, 25 bp, Homo sapien
agctgtgggttgcttccaagcaaac

SEQ ID NO: 3997906 - DNA, 25 bp, Homo sapien
gagacattctgagtttgggccaaaa

SEQ ID NO: 3997907 - DNA, 25 bp, Homo sapien
tattgagctagatgccacgagaagc

SEQ ID NO: 3997908 - DNA, 25 bp, Homo sapien
gaagttcatggaatctaccagccac

SEQ ID NO: 3997909 - DNA, 25 bp, Homo sapien
gcagtactttgtgaacgaaatggcc

SEQ ID NO: 3997910 - DNA, 25 bp, Homo sapien
tgtataatttctgctgtaaccctcc

SEQ ID NO: 3997911 - DNA, 25 bp, Homo sapien
cctaaaagcatacagctggtagctc

SEQ ID NO: 3997912 - DNA, 25 bp, Homo sapien
ggttagagtcgcttgcctaaaagca

SEQ ID NO: 3997913 - DNA, 25 bp, Homo sapien
tctgactaaggttggtctaactcca

SEQ ID NO: 3997914 - DNA, 25 bp, Homo sapien
gctcccatattaaatctagacaaga

SEQ ID NO: 3997915 - DNA, 25 bp, Homo sapien
gcccctcacggtattggcaatcaaa

SEQ ID NO: 3997916 - DNA, 25 bp, Homo sapien
catttaggcatgtttcacaagtcca

SEQ ID NO: 3997917 - DNA, 25 bp, Homo sapien
tctaggcattagctggcctctgagg

SEQ ID NO: 3997918 - DNA, 25 bp, Homo sapien
gaaggccgtgctgagcagatgtggc

SEQ ID NO: 3997919 - DNA, 25 bp, Homo sapien
tttttcatcagacctctcccgaccc

SEQ ID NO: 3997920 - DNA, 25 bp, Homo sapien
ggccactgtcgtttccaagattccc

SEQ ID NO: 3997921 - DNA, 25 bp, Homo sapien
tgtggccagtgagattgggaggagt

SEQ ID NO: 3997922 - DNA, 25 bp, Homo sapien
gactctgtctggacttgtatagttt

SEQ ID NO: 3997923 - DNA, 25 bp, Homo sapien
ggctggcaacaggattcaaaagctg

SEQ ID NO: 3997924 - DNA, 25 bp, Homo sapien
cgatgacaggtgactctgtctggac

SEQ ID NO: 3997925 - DNA, 25 bp, Homo sapien
cacagaatcctgtcttcgatgacag

SEQ ID NO: 3997926 - DNA, 25 bp, Homo sapien
ggaactgggagctcaacaaaatgca

SEQ ID NO: 3997927 - DNA, 25 bp, Homo sapien
gctactcaactgagccacggctgta

SEQ ID NO: 3997928 - DNA, 25 bp, Homo sapien
tcttgaacctggaatctttggaggc

SEQ ID NO: 3997929 - DNA, 25 bp, Homo sapien
gaagagaaccaacaaggctcggtag

SEQ ID NO: 3997930 - DNA, 25 bp, Homo sapien
tgaccttgacacaatagctatctga

SEQ ID NO: 3997931 - DNA, 25 bp, Homo sapien
cacaatagctatctgactgcgtctt

SEQ ID NO: 3997932 - DNA, 25 bp, Homo sapien
cagctgccagacccctgtactgaag

SEQ ID NO: 3997933 - DNA, 25 bp, Homo sapien
ctgccagacccctgtactgaagagt

SEQ ID NO: 3997934 - DNA, 25 bp, Homo sapien
cctgcttatactcagcatggctgca

SEQ ID NO: 3997935 - DNA, 25 bp, Homo sapien
gtgatccaaatcctgcttatactca

SEQ ID NO: 3997936 - DNA, 25 bp, Homo sapien
gcttatactcagcatggctgcagag

SEQ ID NO: 3997937 - DNA, 25 bp, Homo sapien
caaatcctgcttatactcagcatgg

SEQ ID NO: 3997938 - DNA, 25 bp, Homo sapien
cttctgctaagtcatagattgtctg

SEQ ID NO: 3997939 - DNA, 25 bp, Homo sapien
gattttcttgtggtattagcaaagg

SEQ ID NO: 3997940 - DNA, 25 bp, Homo sapien
ggatctcagtattgctcaatattgg

SEQ ID NO: 3997941 - DNA, 25 bp, Homo sapien
cacttgaaatatggtaagactgacc

SEQ ID NO: 3997942 - DNA, 25 bp, Homo sapien
tcttctgttcaaaaccctgtagtga

SEQ ID NO: 3997943 - DNA, 25 bp, Homo sapien
cctgtagtgactctctgttttactc

SEQ ID NO: 3997944 - DNA, 25 bp, Homo sapien
ttctaaagcagccagattaatcctt

SEQ ID NO: 3997945 - DNA, 25 bp, Homo sapien
catgaatcagatcgtgttactcttc

SEQ ID NO: 3997946 - DNA, 25 bp, Homo sapien
aggagtttgagtggagcctgcacaa

SEQ ID NO: 3997947 - DNA, 25 bp, Homo sapien
ccgcagccaggagtacttcagtgtg

SEQ ID NO: 3997948 - DNA, 25 bp, Homo sapien
tcagaccttattcactacatcctgg

SEQ ID NO: 3997949 - DNA, 25 bp, Homo sapien
taaattcgttaacaagatcagacct

SEQ ID NO: 3997950 - DNA, 25 bp, Homo sapien
ttgttgttatatccctgccattttg

SEQ ID NO: 3997951 - DNA, 25 bp, Homo sapien
gttgttgttatatccctgccatttt

SEQ ID NO: 3997952 - DNA, 25 bp, Homo sapien
tgttgttatatccctgccattttgg

SEQ ID NO: 3997953 - DNA, 25 bp, Homo sapien
atgtcctaaatggtgttgccccgat

SEQ ID NO: 3997954 - DNA, 25 bp, Homo sapien
taagaagtaaggaaagcggccaggc

SEQ ID NO: 3997955 - DNA, 25 bp, Homo sapien
agaagtaaggaaagcggccaggcat

SEQ ID NO: 3997956 - DNA, 25 bp, Homo sapien
tgttgccccgatttacttctagagt

SEQ ID NO: 3997957 - DNA, 25 bp, Homo sapien
cataaatgtctcctcttgagaagag

SEQ ID NO: 3997958 - DNA, 25 bp, Homo sapien
tctaatggtcagtgacattgggctt

SEQ ID NO: 3997959 - DNA, 25 bp, Homo sapien
tatctgttatttcttgactgtttaa

SEQ ID NO: 3997960 - DNA, 25 bp, Homo sapien
gtctgtttgctctgatgataatttg

SEQ ID NO: 3997961 - DNA, 25 bp, Homo sapien
catagtggtacgtttgaggcattcc

SEQ ID NO: 3997962 - DNA, 25 bp, Homo sapien
tatgtatagaagtccagtctccatc

SEQ ID NO: 3997963 - DNA, 25 bp, Homo sapien
tagatctagtaccattaaggctttc

SEQ ID NO: 3997964 - DNA, 25 bp, Homo sapien
cagctggccatgagtattagtcaga

SEQ ID NO: 3997965 - DNA, 25 bp, Homo sapien
cattgatgggctcaaaaaccaggaa

SEQ ID NO: 3997966 - DNA, 25 bp, Homo sapien
tctgggagggtcctgaatgcaaagc

SEQ ID NO: 3997967 - DNA, 25 bp, Homo sapien
ggctggctcaaagtcccaaagctct

SEQ ID NO: 3997968 - DNA, 25 bp, Homo sapien
tcagatgtgatccaagaggttcatg

SEQ ID NO: 3997969 - DNA, 25 bp, Homo sapien
taagttgtacaagcctcaggtccca

SEQ ID NO: 3997970 - DNA, 25 bp, Homo sapien
tgatctaacgcaacccaaagaggtg

SEQ ID NO: 3997971 - DNA, 25 bp, Homo sapien
tcagcagttacgtggccagaggtca

SEQ ID NO: 3997972 - DNA, 25 bp, Homo sapien
caaatgagtactgagcgcctaggat

SEQ ID NO: 3997973 - DNA, 25 bp, Homo sapien
cagctggtgcttcggctaaggttgg

SEQ ID NO: 3997974 - DNA, 25 bp, Homo sapien
ctggtgcttcggctaaggttgggtt

SEQ ID NO: 3997975 - DNA, 25 bp, Homo sapien
ggcagctggtgcttcggctaaggtt

SEQ ID NO: 3997976 - DNA, 25 bp, Homo sapien
tgcttcggctaaggttgggtttgca

SEQ ID NO: 3997977 - DNA, 25 bp, Homo sapien
gagcgttaggttcccctccttgaga

SEQ ID NO: 3997978 - DNA, 25 bp, Homo sapien
tggaccctcctacagatgatcaggg

SEQ ID NO: 3997979 - DNA, 25 bp, Homo sapien
gctaagaagtcacataagaacaccc

SEQ ID NO: 3997980 - DNA, 25 bp, Homo sapien
tgtctataagtcacacccttttgga

SEQ ID NO: 3997981 - DNA, 25 bp, Homo sapien
catgcccgtggctgaatgtaagtgg

SEQ ID NO: 3997982 - DNA, 25 bp, Homo sapien
tatgtttgtaccgatgatgatgccc

SEQ ID NO: 3997983 - DNA, 25 bp, Homo sapien
gtttttaaacatgggctcatgcccg

SEQ ID NO: 3997984 - DNA, 25 bp, Homo sapien
aatagtaactaaatggctgctctgc

SEQ ID NO: 3997985 - DNA, 25 bp, Homo sapien
tttcgggatgtcctgaagaactgct

SEQ ID NO: 3997986 - DNA, 25 bp, Homo sapien
tgcagccaaaagtatgctaacctgg

SEQ ID NO: 3997987 - DNA, 25 bp, Homo sapien
taaagaccttgcaagtccgaatgtc

SEQ ID NO: 3997988 - DNA, 25 bp, Homo sapien
tccaacatgtcaagtcggcaagcat

SEQ ID NO: 3997989 - DNA, 25 bp, Homo sapien
tcagtgacggatttaggaaggagcc

SEQ ID NO: 3997990 - DNA, 25 bp, Homo sapien
gagcactggtatgaccgagtccgga

SEQ ID NO: 3997991 - DNA, 25 bp, Homo sapien
ctttggtatgtgcaggactaggccc

SEQ ID NO: 3997992 - DNA, 25 bp, Homo sapien
caaatatgccgaggatggctgagca

SEQ ID NO: 3997993 - DNA, 25 bp, Homo sapien
catgctaagcgctttgcacgtatca

SEQ ID NO: 3997994 - DNA, 25 bp, Homo sapien
ttatcctccacgctggactgctgag

SEQ ID NO: 3997995 - DNA, 25 bp, Homo sapien
tttgttcaggctacgggatgcaggc

SEQ ID NO: 3997996 - DNA, 25 bp, Homo sapien
ggatgcaggcctcttattaaccgcg

SEQ ID NO: 3997997 - DNA, 25 bp, Homo sapien
tgtgtatcacgcaagaagagcatct

SEQ ID NO: 3997998 - DNA, 25 bp, Homo sapien
gtccttggccatacagaatttagat

SEQ ID NO: 3997999 - DNA, 25 bp, Homo sapien
aactgaggcccatacaagttggcta

SEQ ID NO: 3998000 - DNA, 25 bp, Homo sapien
gcttgtaggagtacacctagtggtc

SEQ ID NO: 3998001 - DNA, 25 bp, Homo sapien
caggtcctcgaagtgggtgccgctc

SEQ ID NO: 3998002 - DNA, 25 bp, Homo sapien
agtgggtgccgctcccacttcttgc

SEQ ID NO: 3998003 - DNA, 25 bp, Homo sapien
ctcgaagtgggtgccgctcccactt

SEQ ID NO: 3998004 - DNA, 25 bp, Homo sapien
ggtcctcgaagtgggtgccgctccc

SEQ ID NO: 3998005 - DNA, 25 bp, Homo sapien
aacttggcgccatcggcgggttggg

SEQ ID NO: 3998006 - DNA, 25 bp, Homo sapien
ccatacggagcctcttcctgaggcg

SEQ ID NO: 3998007 - DNA, 25 bp, Homo sapien
tcaggattgtctggcttagcggtca

SEQ ID NO: 3998008 - DNA, 25 bp, Homo sapien
ttcctgaggcgcaggaacttggcgc

SEQ ID NO: 3998009 - DNA, 25 bp, Homo sapien
cctgcctcagtaccgcctcgccggc

SEQ ID NO: 3998010 - DNA, 25 bp, Homo sapien
gctgcccccttgaacagtgtgtctg

SEQ ID NO: 3998011 - DNA, 25 bp, Homo sapien
aaccgctgcccccttgaacagtgtg

SEQ ID NO: 3998012 - DNA, 25 bp, Homo sapien
tgaaactctccaatgaccaggacgc

SEQ ID NO: 3998013 - DNA, 25 bp, Homo sapien
gttgtcacgagttctccctgcggcc

SEQ ID NO: 3998014 - DNA, 25 bp, Homo sapien
gacgttgtcacgagttctccctgcg

SEQ ID NO: 3998015 - DNA, 25 bp, Homo sapien
caggggtgacgttgtcacgagttct

SEQ ID NO: 3998016 - DNA, 25 bp, Homo sapien
gggtgacgttgtcacgagttctccc

SEQ ID NO: 3998017 - DNA, 25 bp, Homo sapien
gtgcaactctggagcaaaaacacgc

SEQ ID NO: 3998018 - DNA, 25 bp, Homo sapien
gcacctaccacagttagaagtaaaa

SEQ ID NO: 3998019 - DNA, 25 bp, Homo sapien
aaacacgctgcatagtctcctcact

SEQ ID NO: 3998020 - DNA, 25 bp, Homo sapien
gctgtcactacagggtgcaactctg

SEQ ID NO: 3998021 - DNA, 25 bp, Homo sapien
gaggtggccatgactccttggcaca

SEQ ID NO: 3998022 - DNA, 25 bp, Homo sapien
aatatgagtcgccatgatgttctga

SEQ ID NO: 3998023 - DNA, 25 bp, Homo sapien
ttatgtagcctgtgaaaaacctggc

SEQ ID NO: 3998024 - DNA, 25 bp, Homo sapien
ccttggcacacctggtgacaagaag

SEQ ID NO: 3998025 - DNA, 25 bp, Homo sapien
gttctctgggactcagatttaacaa

SEQ ID NO: 3998026 - DNA, 25 bp, Homo sapien
cagatttaacaatgttcagaatcat

SEQ ID NO: 3998027 - DNA, 25 bp, Homo sapien
ctgggactcagatttaacaatgttc

SEQ ID NO: 3998028 - DNA, 25 bp, Homo sapien
tctctgggactcagatttaacaatg

SEQ ID NO: 3998029 - DNA, 25 bp, Homo sapien
tcactcctgcgtgggtgtcatgaga

SEQ ID NO: 3998030 - DNA, 25 bp, Homo sapien
tgtaccagctcgtggtttttgcttc

SEQ ID NO: 3998031 - DNA, 25 bp, Homo sapien
caacactcatctgtacagtttgtgg

SEQ ID NO: 3998032 - DNA, 25 bp, Homo sapien
gaccctttcaccttgtggaggacga

SEQ ID NO: 3998033 - DNA, 25 bp, Homo sapien
gatgatgaagcacatgatactgggc

SEQ ID NO: 3998034 - DNA, 25 bp, Homo sapien
taacctgtcagtccatagttcggat

SEQ ID NO: 3998035 - DNA, 25 bp, Homo sapien
tgaacaagatttaagtccaagctgc

SEQ ID NO: 3998036 - DNA, 25 bp, Homo sapien
gctgcaaaggccataagaggatgtc

SEQ ID NO: 3998037 - DNA, 25 bp, Homo sapien
gatacagcttatccaggcttgtgag

SEQ ID NO: 3998038 - DNA, 25 bp, Homo sapien
aaggaggacctagcaaatcacacag

SEQ ID NO: 3998039 - DNA, 25 bp, Homo sapien
taaccaagatatgtgcactcaaagc

SEQ ID NO: 3998040 - DNA, 25 bp, Homo sapien
tcctttcaagatggcgacatgtgac

SEQ ID NO: 3998041 - DNA, 25 bp, Homo sapien
gctttcaagtattgcatggtctcct

SEQ ID NO: 3998042 - DNA, 25 bp, Homo sapien
tatcgtctccagctttcaagtattg

SEQ ID NO: 3998043 - DNA, 25 bp, Homo sapien
gggaaggaggtatatcgtctccagc

SEQ ID NO: 3998044 - DNA, 25 bp, Homo sapien
ggaggtatatcgtctccagctttca

SEQ ID NO: 3998045 - DNA, 25 bp, Homo sapien
gctggtatgaatttcaatgctagat

SEQ ID NO: 3998046 - DNA, 25 bp, Homo sapien
cccttggctcaggttgttctgaggc

SEQ ID NO: 3998047 - DNA, 25 bp, Homo sapien
ccccttggctcaggttgttctgagg

SEQ ID NO: 3998048 - DNA, 25 bp, Homo sapien
gaggagcatgtctgcctcttagtgc

SEQ ID NO: 3998049 - DNA, 25 bp, Homo sapien
agccttgcatgtcaatctgtcttca

SEQ ID NO: 3998050 - DNA, 25 bp, Homo sapien
tcttcacttttggacagaggagcat

SEQ ID NO: 3998051 - DNA, 25 bp, Homo sapien
tgtctgcctcttagtgcgtctggac

SEQ ID NO: 3998052 - DNA, 25 bp, Homo sapien
tgtaggaggagccaaggagtatgat

SEQ ID NO: 3998053 - DNA, 25 bp, Homo sapien
ggaggagccaaggagtatgattttc

SEQ ID NO: 3998054 - DNA, 25 bp, Homo sapien
tatgattttctgtgcatgaccctct

SEQ ID NO: 3998055 - DNA, 25 bp, Homo sapien
gagtatgattttctgtgcatgaccc

SEQ ID NO: 3998056 - DNA, 25 bp, Homo sapien
cctgggtatcagacataaagaagct

SEQ ID NO: 3998057 - DNA, 25 bp, Homo sapien
cagattcagccaaactgtgccagaa

SEQ ID NO: 3998058 - DNA, 25 bp, Homo sapien
tgtgccagaatcagaataccgccaa

SEQ ID NO: 3998059 - DNA, 25 bp, Homo sapien
tcagctgctcagtactatgcctggg

SEQ ID NO: 3998060 - DNA, 25 bp, Homo sapien
ctggagtgatgctgatgtggttcca

SEQ ID NO: 3998061 - DNA, 25 bp, Homo sapien
tatacggtgaataggccatgtgcat

SEQ ID NO: 3998062 - DNA, 25 bp, Homo sapien
attctgggtcctttttgtgtaccag

SEQ ID NO: 3998063 - DNA, 25 bp, Homo sapien
tgtggttccagtcaactaaacaatt

SEQ ID NO: 3998064 - DNA, 25 bp, Homo sapien
gcctttcacatgtggtgccctctgc

SEQ ID NO: 3998065 - DNA, 25 bp, Homo sapien
taggcctgggtagtactggcatcct

SEQ ID NO: 3998066 - DNA, 25 bp, Homo sapien
acgaaggcggctctcacgtgcttac

SEQ ID NO: 3998067 - DNA, 25 bp, Homo sapien
tccagtcttttataggttcctccgc

SEQ ID NO: 3998068 - DNA, 25 bp, Homo sapien
gtgatctgacgggtaactggccaag

SEQ ID NO: 3998069 - DNA, 25 bp, Homo sapien
ttcagcaggaactccgccatttccc

SEQ ID NO: 3998070 - DNA, 25 bp, Homo sapien
aaggtcccgttgagcacaaaggtgg

SEQ ID NO: 3998071 - DNA, 25 bp, Homo sapien
atggcgttgaccacgtcctgtttca

SEQ ID NO: 3998072 - DNA, 25 bp, Homo sapien
gaacattccaagttgaccagcctgg

SEQ ID NO: 3998073 - DNA, 25 bp, Homo sapien
gacaagtcatcgatggctaagctgg

SEQ ID NO: 3998074 - DNA, 25 bp, Homo sapien
tctgggtgcagccactggaatcaca

SEQ ID NO: 3998075 - DNA, 25 bp, Homo sapien
gacacacatgggaaggaacctgggc

SEQ ID NO: 3998076 - DNA, 25 bp, Homo sapien
tgccctttccggtcgtggccaatgg

SEQ ID NO: 3998077 - DNA, 25 bp, Homo sapien
ctccgtttggccgtctgcatgaaag

SEQ ID NO: 3998078 - DNA, 25 bp, Homo sapien
ttggccgtctgcatgaaagagcacc

SEQ ID NO: 3998079 - DNA, 25 bp, Homo sapien
gtcgtggccaatggccgtcctggct

SEQ ID NO: 3998080 - DNA, 25 bp, Homo sapien
agagtcaccatggaggcccgttaaa

SEQ ID NO: 3998081 - DNA, 25 bp, Homo sapien
cgttaaaacatagactcttgggcct

SEQ ID NO: 3998082 - DNA, 25 bp, Homo sapien
caaccttgagtgtcggtcagagtca

SEQ ID NO: 3998083 - DNA, 25 bp, Homo sapien
tagcttactgcccactctaaaatgg

SEQ ID NO: 3998084 - DNA, 25 bp, Homo sapien
ttccattacgaatcagccacacgac

SEQ ID NO: 3998085 - DNA, 25 bp, Homo sapien
cagcagctgcacaaatgggttctca

SEQ ID NO: 3998086 - DNA, 25 bp, Homo sapien
gtggcttggctctcgttgatgtaga

SEQ ID NO: 3998087 - DNA, 25 bp, Homo sapien
tctcgttgatgtagatgcttccatt

SEQ ID NO: 3998088 - DNA, 25 bp, Homo sapien
gggaaggtgggaagctcactcacca

SEQ ID NO: 3998089 - DNA, 25 bp, Homo sapien
cagggtcccgtcgcggcggatcccg

SEQ ID NO: 3998090 - DNA, 25 bp, Homo sapien
ccgtcgcggcggatcccgaactgcg

SEQ ID NO: 3998091 - DNA, 25 bp, Homo sapien
ggatcccgaactgcgcgttctgcag

SEQ ID NO: 3998092 - DNA, 25 bp, Homo sapien
tcccgtcgcggcggatcccgaactg

SEQ ID NO: 3998093 - DNA, 25 bp, Homo sapien
aggcactcgcccgagttcatgcgga

SEQ ID NO: 3998094 - DNA, 25 bp, Homo sapien
ggtggcgcgtcgtctcgccgcgcag

SEQ ID NO: 3998095 - DNA, 25 bp, Homo sapien
ttcatgcggaagaagccgccgttct

SEQ ID NO: 3998096 - DNA, 25 bp, Homo sapien
agccgccgttctgggcgacacggca

SEQ ID NO: 3998097 - DNA, 25 bp, Homo sapien
ctgaagtgcgacacgaaggtgcgca

SEQ ID NO: 3998098 - DNA, 25 bp, Homo sapien
gcgcgcgcgcgtggatagggcagta

SEQ ID NO: 3998099 - DNA, 25 bp, Homo sapien
aactctcgtgctcgcggttgccggc

SEQ ID NO: 3998100 - DNA, 25 bp, Homo sapien
tagggcagtagcaagtcgtcgtcgc

SEQ ID NO: 3998101 - DNA, 25 bp, Homo sapien
gggctgtcctcgtgagctcggagga

SEQ ID NO: 3998102 - DNA, 25 bp, Homo sapien
agggggctgtcctcgtgagctcgga

SEQ ID NO: 3998103 - DNA, 25 bp, Homo sapien
tcagggggctgtcctcgtgagctcg

SEQ ID NO: 3998104 - DNA, 25 bp, Homo sapien
ggctgtcctcgtgagctcggaggac

SEQ ID NO: 3998105 - DNA, 25 bp, Homo sapien
ccgaatagtgcaagccggaggagaa

SEQ ID NO: 3998106 - DNA, 25 bp, Homo sapien
agaggaagccgaatagtgcaagccg

SEQ ID NO: 3998107 - DNA, 25 bp, Homo sapien
agccagcgacccgtggaggtcgcca

SEQ ID NO: 3998108 - DNA, 25 bp, Homo sapien
ggccgccggacgcttcccagaggaa

SEQ ID NO: 3998109 - DNA, 25 bp, Homo sapien
tgggctcgcctcacgtgactcaagt

SEQ ID NO: 3998110 - DNA, 25 bp, Homo sapien
ggtggccgctttcagctcggactga

SEQ ID NO: 3998111 - DNA, 25 bp, Homo sapien
aattacctgcgctcttttcggctgg

SEQ ID NO: 3998112 - DNA, 25 bp, Homo sapien
tgactcaagtcccagggtggccgct

SEQ ID NO: 3998113 - DNA, 25 bp, Homo sapien
cagggcttccaagattgggtgtcgg

SEQ ID NO: 3998114 - DNA, 25 bp, Homo sapien
gggtggctttgcttatcctccagat

SEQ ID NO: 3998115 - DNA, 25 bp, Homo sapien
tattcatccgttcacacctgggtcc

SEQ ID NO: 3998116 - DNA, 25 bp, Homo sapien
gccttcttcccaggatgtgatccgt

SEQ ID NO: 3998117 - DNA, 25 bp, Homo sapien
tcagcggctgcttggtggtggcggt

SEQ ID NO: 3998118 - DNA, 25 bp, Homo sapien
tgggtgtggctctctgtttgctggg

SEQ ID NO: 3998119 - DNA, 25 bp, Homo sapien
ggctctctgtttgctggggggtatt

SEQ ID NO: 3998120 - DNA, 25 bp, Homo sapien
gtggtggcggtgtggatgggtgtgg

SEQ ID NO: 3998121 - DNA, 25 bp, Homo sapien
gccaggatgtataggaagccaccca

SEQ ID NO: 3998122 - DNA, 25 bp, Homo sapien
ctgccaggatgtataggaagccacc

SEQ ID NO: 3998123 - DNA, 25 bp, Homo sapien
ctgtggctgtgttgtgggaggagca

SEQ ID NO: 3998124 - DNA, 25 bp, Homo sapien
caggatgtataggaagccacccagg

SEQ ID NO: 3998125 - DNA, 25 bp, Homo sapien
gccctttattcaacacagtctcatt

SEQ ID NO: 3998126 - DNA, 25 bp, Homo sapien
tttattcaacacagtctcattgaaa

SEQ ID NO: 3998127 - DNA, 25 bp, Homo sapien
gagagcccccatgagtgctgggtgg

SEQ ID NO: 3998128 - DNA, 25 bp, Homo sapien
cctttattcaacacagtctcattga

SEQ ID NO: 3998129 - DNA, 25 bp, Homo sapien
tcgagaccagcatgagcaacatgat

SEQ ID NO: 3998130 - DNA, 25 bp, Homo sapien
aatcccacactttgggagcctgagg

SEQ ID NO: 3998131 - DNA, 25 bp, Homo sapien
caggtatggtggcacgctcctgtag

SEQ ID NO: 3998132 - DNA, 25 bp, Homo sapien
gggcggatctcttgagatcaggagt

SEQ ID NO: 3998133 - DNA, 25 bp, Homo sapien
gatttctgctttcactctctcctgt

SEQ ID NO: 3998134 - DNA, 25 bp, Homo sapien
tctgctttcactctctcctgtccac

SEQ ID NO: 3998135 - DNA, 25 bp, Homo sapien
tggatttctgctttcactctctcct

SEQ ID NO: 3998136 - DNA, 25 bp, Homo sapien
atttctgctttcactctctcctgtc

SEQ ID NO: 3998137 - DNA, 25 bp, Homo sapien
tgctgctgatattgaatagctttag

SEQ ID NO: 3998138 - DNA, 25 bp, Homo sapien
ctgatattgaatagctttagataat

SEQ ID NO: 3998139 - DNA, 25 bp, Homo sapien
gaaattgtttttctcgcctcttcac

SEQ ID NO: 3998140 - DNA, 25 bp, Homo sapien
tcactctcctcgaaaaatgctgctg

SEQ ID NO: 3998141 - DNA, 25 bp, Homo sapien
caagctcacagaatccttcctgcct

SEQ ID NO: 3998142 - DNA, 25 bp, Homo sapien
ctccagccaccggagcttgtagaag

SEQ ID NO: 3998143 - DNA, 25 bp, Homo sapien
gcttgtagaagtcggagaagccgcc

SEQ ID NO: 3998144 - DNA, 25 bp, Homo sapien
cagccaccggagcttgtagaagtcg

SEQ ID NO: 3998145 - DNA, 25 bp, Homo sapien
caccggagcttgtagaagtcggaga

SEQ ID NO: 3998146 - DNA, 25 bp, Homo sapien
ggtccatctgtgtagagctccgtca

SEQ ID NO: 3998147 - DNA, 25 bp, Homo sapien
tccatctgtgtagagctccgtcact

SEQ ID NO: 3998148 - DNA, 25 bp, Homo sapien
ctggtccatctgtgtagagctccgt

SEQ ID NO: 3998149 - DNA, 25 bp, Homo sapien
catctgtgtagagctccgtcactgg

SEQ ID NO: 3998150 - DNA, 25 bp, Homo sapien
ctgtcacacagtggcaggtaaaata

SEQ ID NO: 3998151 - DNA, 25 bp, Homo sapien
ccatgaagatgtcccgggtagggta

SEQ ID NO: 3998152 - DNA, 25 bp, Homo sapien
agtccatcatgttggcgcagaagag

SEQ ID NO: 3998153 - DNA, 25 bp, Homo sapien
ggtagggtaggcgtatccgatggcc

SEQ ID NO: 3998154 - DNA, 25 bp, Homo sapien
tcagctctgcggttcaagtccatca

SEQ ID NO: 3998155 - DNA, 25 bp, Homo sapien
gttggagtggtccctgtgtgcaccc

SEQ ID NO: 3998156 - DNA, 25 bp, Homo sapien
ctgttggagtggtccctgtgtgcac

SEQ ID NO: 3998157 - DNA, 25 bp, Homo sapien
tgttggagtggtccctgtgtgcacc

SEQ ID NO: 3998158 - DNA, 25 bp, Homo sapien
agcagttggtgggacaggcagtagc

SEQ ID NO: 3998159 - DNA, 25 bp, Homo sapien
cagttggtgggacaggcagtagcct

SEQ ID NO: 3998160 - DNA, 25 bp, Homo sapien
cagaggtctgagaggccgcagggct

SEQ ID NO: 3998161 - DNA, 25 bp, Homo sapien
agtagcctgagcagccgggcttggt

SEQ ID NO: 3998162 - DNA, 25 bp, Homo sapien
aagtggttccaagctgttaaggatg

SEQ ID NO: 3998163 - DNA, 25 bp, Homo sapien
actcccagtagattccagacaccca

SEQ ID NO: 3998164 - DNA, 25 bp, Homo sapien
aaggatggagcgctgactctgccct

SEQ ID NO: 3998165 - DNA, 25 bp, Homo sapien
cagccccctagttgtagttgttgga

SEQ ID NO: 3998166 - DNA, 25 bp, Homo sapien
aatgagtcctggggcccgaacgtgg

SEQ ID NO: 3998167 - DNA, 25 bp, Homo sapien
ccaggcacacgtcacttctctcctc

SEQ ID NO: 3998168 - DNA, 25 bp, Homo sapien
gaggcatcagtgtggatccaggcat

SEQ ID NO: 3998169 - DNA, 25 bp, Homo sapien
ggggtacaccaaggaggcatcagtg

SEQ ID NO: 3998170 - DNA, 25 bp, Homo sapien
cttctcccggacactttttagctgc

SEQ ID NO: 3998171 - DNA, 25 bp, Homo sapien
cacttctcccggacactttttagct

SEQ ID NO: 3998172 - DNA, 25 bp, Homo sapien
ttctcccggacactttttagctgct

SEQ ID NO: 3998173 - DNA, 25 bp, Homo sapien
acttctcccggacactttttagctg

SEQ ID NO: 3998174 - DNA, 25 bp, Homo sapien
ctctctccagcgcagacaggatcag

SEQ ID NO: 3998175 - DNA, 25 bp, Homo sapien
aagacggtggctctctccagcgcag

SEQ ID NO: 3998176 - DNA, 25 bp, Homo sapien
ccacagcggtggcagtgctgtcagt

SEQ ID NO: 3998177 - DNA, 25 bp, Homo sapien
tgatttcaggcagcctctgttctag

SEQ ID NO: 3998178 - DNA, 25 bp, Homo sapien
ctctgctcactgctggtcacacgct

SEQ ID NO: 3998179 - DNA, 25 bp, Homo sapien
cactgctggtcacacgctcagcacc

SEQ ID NO: 3998180 - DNA, 25 bp, Homo sapien
ctgctcactgctggtcacacgctca

SEQ ID NO: 3998181 - DNA, 25 bp, Homo sapien
ctggtcacacgctcagcaccctgag

SEQ ID NO: 3998182 - DNA, 25 bp, Homo sapien
gctgccaagaagcctggggtggcct

SEQ ID NO: 3998183 - DNA, 25 bp, Homo sapien
gaagacaagtggcccggcagggctg

SEQ ID NO: 3998184 - DNA, 25 bp, Homo sapien
aagacaagtggcccggcagggctgc

SEQ ID NO: 3998185 - DNA, 25 bp, Homo sapien
ggctgtagtttgtgatccttgattc

SEQ ID NO: 3998186 - DNA, 25 bp, Homo sapien
tgtagtttgtgatccttgattcaga

SEQ ID NO: 3998187 - DNA, 25 bp, Homo sapien
caggctgtagtttgtgatccttgat

SEQ ID NO: 3998188 - DNA, 25 bp, Homo sapien
gcaggctgtagtttgtgatccttga

SEQ ID NO: 3998189 - DNA, 25 bp, Homo sapien
cagcagtggtactgcctggtaaaag

SEQ ID NO: 3998190 - DNA, 25 bp, Homo sapien
tactgcctggtaaaagaattggttc

SEQ ID NO: 3998191 - DNA, 25 bp, Homo sapien
ctgaaatgacagcagtggtactgcc

SEQ ID NO: 3998192 - DNA, 25 bp, Homo sapien
tttggttggccttgatttcttctct

SEQ ID NO: 3998193 - DNA, 25 bp, Homo sapien
gaaaatgctatttttggagccagaa

SEQ ID NO: 3998194 - DNA, 25 bp, Homo sapien
tatggtgattttcttaagaaccaga

SEQ ID NO: 3998195 - DNA, 25 bp, Homo sapien
agccagaattttcatgtctgattta

SEQ ID NO: 3998196 - DNA, 25 bp, Homo sapien
tctgatttatggtgattttcttaag

SEQ ID NO: 3998197 - DNA, 25 bp, Homo sapien
aaattcttcccatgagagtgacttg

SEQ ID NO: 3998198 - DNA, 25 bp, Homo sapien
tagatagccgatgtcttattagagg

SEQ ID NO: 3998199 - DNA, 25 bp, Homo sapien
ttagagggcagtttgtggttcctga

SEQ ID NO: 3998200 - DNA, 25 bp, Homo sapien
caatcccgttggagtcgtgtgtgag

SEQ ID NO: 3998201 - DNA, 25 bp, Homo sapien
tttctgctcatgacgaggttccact

SEQ ID NO: 3998202 - DNA, 25 bp, Homo sapien
acagtttctgctcatgacgaggttc

SEQ ID NO: 3998203 - DNA, 25 bp, Homo sapien
tctgctcatgacgaggttccacttc

SEQ ID NO: 3998204 - DNA, 25 bp, Homo sapien
agtttctgctcatgacgaggttcca

SEQ ID NO: 3998205 - DNA, 25 bp, Homo sapien
aagaagaatcgccttgggccacgca

SEQ ID NO: 3998206 - DNA, 25 bp, Homo sapien
gggaatataggtactcataaccatg

SEQ ID NO: 3998207 - DNA, 25 bp, Homo sapien
gccgcaagttggacaagactgctat

SEQ ID NO: 3998208 - DNA, 25 bp, Homo sapien
tatatgtatattctaggttttcccc

SEQ ID NO: 3998209 - DNA, 25 bp, Homo sapien
gcctccgtgtgtcctagtgtctttg

SEQ ID NO: 3998210 - DNA, 25 bp, Homo sapien
ccagcctcctgtgcgaggttgtggg

SEQ ID NO: 3998211 - DNA, 25 bp, Homo sapien
cagtctgcgggagctcgggggtctc

SEQ ID NO: 3998212 - DNA, 25 bp, Homo sapien
cttggcctccgtgtgtcctagtgtc

SEQ ID NO: 3998213 - DNA, 25 bp, Homo sapien
acggtaaaggccacgtagacctcag

SEQ ID NO: 3998214 - DNA, 25 bp, Homo sapien
ggaccccgaccagcgacatgatggc

SEQ ID NO: 3998215 - DNA, 25 bp, Homo sapien
accccgaccagcgacatgatggctt

SEQ ID NO: 3998216 - DNA, 25 bp, Homo sapien
ttgcggacggtaaaggccacgtaga

SEQ ID NO: 3998217 - DNA, 25 bp, Homo sapien
catttgggccattagatggaaaggc

SEQ ID NO: 3998218 - DNA, 25 bp, Homo sapien
gtccaggtcatgctgacgtcagcag

SEQ ID NO: 3998219 - DNA, 25 bp, Homo sapien
gagactagtagatgccatttgacca

SEQ ID NO: 3998220 - DNA, 25 bp, Homo sapien
ttactgaaagggaccagtggacagg

SEQ ID NO: 3998221 - DNA, 25 bp, Homo sapien
ggctgtctaacttggcagtgatgtc

SEQ ID NO: 3998222 - DNA, 25 bp, Homo sapien
aaggacattccctcggagctgctca

SEQ ID NO: 3998223 - DNA, 25 bp, Homo sapien
ctcggagctgctcaaggacccggct

SEQ ID NO: 3998224 - DNA, 25 bp, Homo sapien
gagagctgatggaccgtcgcgacgt

SEQ ID NO: 3998225 - DNA, 25 bp, Homo sapien
tctgcgactgcaccagggtaagcct

SEQ ID NO: 3998226 - DNA, 25 bp, Homo sapien
aaaggggaccgtgtctgcgactgca

SEQ ID NO: 3998227 - DNA, 25 bp, Homo sapien
cgtgtctgcgactgcaccagggtaa

SEQ ID NO: 3998228 - DNA, 25 bp, Homo sapien
accagggtaagcctgcctcggtgcc

SEQ ID NO: 3998229 - DNA, 25 bp, Homo sapien
taccgtaggagatgatggccgtgct

SEQ ID NO: 3998230 - DNA, 25 bp, Homo sapien
ctgttagtgaagactgccgggttct

SEQ ID NO: 3998231 - DNA, 25 bp, Homo sapien
tggtaccgtaggagatgatggccgt

SEQ ID NO: 3998232 - DNA, 25 bp, Homo sapien
gttagtgaagactgccgggttctcg

SEQ ID NO: 3998233 - DNA, 25 bp, Homo sapien
gggtctccgccagcgcttcatacag

SEQ ID NO: 3998234 - DNA, 25 bp, Homo sapien
atcagggtctccgccagcgcttcat

SEQ ID NO: 3998235 - DNA, 25 bp, Homo sapien
ccgccagcgcttcatacagctcgtc

SEQ ID NO: 3998236 - DNA, 25 bp, Homo sapien
ctccgccagcgcttcatacagctcg

SEQ ID NO: 3998237 - DNA, 25 bp, Homo sapien
gggcatatttgacggacggcgggtg

SEQ ID NO: 3998238 - DNA, 25 bp, Homo sapien
aagcaccgggcatatttgacggacg

SEQ ID NO: 3998239 - DNA, 25 bp, Homo sapien
caccgggcatatttgacggacggcg

SEQ ID NO: 3998240 - DNA, 25 bp, Homo sapien
ccgggcatatttgacggacggcggg

SEQ ID NO: 3998241 - DNA, 25 bp, Homo sapien
gcagcagctcagaatctgatgagtc

SEQ ID NO: 3998242 - DNA, 25 bp, Homo sapien
ttgtgcaaaatatcccgcagcagct

SEQ ID NO: 3998243 - DNA, 25 bp, Homo sapien
tgtgcaaaatatcccgcagcagctc

SEQ ID NO: 3998244 - DNA, 25 bp, Homo sapien
gagtctcttaactttgcttctaagc

SEQ ID NO: 3998245 - DNA, 25 bp, Homo sapien
caggaacattaaacacgcaatagaa

SEQ ID NO: 3998246 - DNA, 25 bp, Homo sapien
tgttggcaaagcgctgtgtgatccc

SEQ ID NO: 3998247 - DNA, 25 bp, Homo sapien
aatagaatgtgttggcaaagcgctg

SEQ ID NO: 3998248 - DNA, 25 bp, Homo sapien
aaagagagaaatctcaagggcgcat

SEQ ID NO: 3998249 - DNA, 25 bp, Homo sapien
gcggctgaaagcctgacattcagat

SEQ ID NO: 3998250 - DNA, 25 bp, Homo sapien
ccagttggaagtggaagccacagcg

SEQ ID NO: 3998251 - DNA, 25 bp, Homo sapien
gtggaagccacagcggctgaaagcc

SEQ ID NO: 3998252 - DNA, 25 bp, Homo sapien
gacattcagatgtcgcagggtgcac

SEQ ID NO: 3998253 - DNA, 25 bp, Homo sapien
actttttagaatgggcgagggcagc

SEQ ID NO: 3998254 - DNA, 25 bp, Homo sapien
agctgtgtcccagtgaccagaacga

SEQ ID NO: 3998255 - DNA, 25 bp, Homo sapien
ctgcggtcctgacggcgctgacttt

SEQ ID NO: 3998256 - DNA, 25 bp, Homo sapien
tgtcccagtgaccagaacgattact

SEQ ID NO: 3998257 - DNA, 25 bp, Homo sapien
cgggtcgcgcggccctgaccggcgg

SEQ ID NO: 3998258 - DNA, 25 bp, Homo sapien
gcgcggccctgaccggcgggagccc

SEQ ID NO: 3998259 - DNA, 25 bp, Homo sapien
tgtgcgtgccgccaggaagcggcgc

SEQ ID NO: 3998260 - DNA, 25 bp, Homo sapien
aaggagcgcagtgtgcgtgccgcca

SEQ ID NO: 3998261 - DNA, 25 bp, Homo sapien
gggaaggagcgcagtgtgcgtgccg

SEQ ID NO: 3998262 - DNA, 25 bp, Homo sapien
ggagcgcagtgtgcgtgccgccagg

SEQ ID NO: 3998263 - DNA, 25 bp, Homo sapien
gcagcgttgccggcagaccgggcgg

SEQ ID NO: 3998264 - DNA, 25 bp, Homo sapien
gttgccggcagaccgggcggaagcc

SEQ ID NO: 3998265 - DNA, 25 bp, Homo sapien
gcagaccgggcggaagcccggcctg

SEQ ID NO: 3998266 - DNA, 25 bp, Homo sapien
gggccgcagcgttgccggcagaccg

SEQ ID NO: 3998267 - DNA, 25 bp, Homo sapien
acggtctgccgacgcggggccaggg

SEQ ID NO: 3998268 - DNA, 25 bp, Homo sapien
aggcccagcagcgaggccacggtct

SEQ ID NO: 3998269 - DNA, 25 bp, Homo sapien
cagcgaggccacggtctgccgacgc

SEQ ID NO: 3998270 - DNA, 25 bp, Homo sapien
caggggcgggccccaggatccggag

SEQ ID NO: 3998271 - DNA, 25 bp, Homo sapien
tcctttatctctcctatggttaatg

SEQ ID NO: 3998272 - DNA, 25 bp, Homo sapien
cctttatctctcctatggttaatgg

SEQ ID NO: 3998273 - DNA, 25 bp, Homo sapien
tttatctctcctatggttaatggtt

SEQ ID NO: 3998274 - DNA, 25 bp, Homo sapien
tcaatcagtccattgaagtttttcc

SEQ ID NO: 3998275 - DNA, 25 bp, Homo sapien
tgtatgtcacactagcaacaaacag

SEQ ID NO: 3998276 - DNA, 25 bp, Homo sapien
tcagtcctttttccgatgaatggct

SEQ ID NO: 3998277 - DNA, 25 bp, Homo sapien
aaacagaaccgcaagagctcctgtg

SEQ ID NO: 3998278 - DNA, 25 bp, Homo sapien
tgacaatgctgagcccgatcactgc

SEQ ID NO: 3998279 - DNA, 25 bp, Homo sapien
ctgttacactctggagttgcaacaa

SEQ ID NO: 3998280 - DNA, 25 bp, Homo sapien
tgttacactctggagttgcaacaag

SEQ ID NO: 3998281 - DNA, 25 bp, Homo sapien
cctccttatagacgtggaggtgacg

SEQ ID NO: 3998282 - DNA, 25 bp, Homo sapien
tccttatagacgtggaggtgacggt

SEQ ID NO: 3998283 - DNA, 25 bp, Homo sapien
actcctccttatagacgtggaggtg

SEQ ID NO: 3998284 - DNA, 25 bp, Homo sapien
gaaactcctccttatagacgtggag

SEQ ID NO: 3998285 - DNA, 25 bp, Homo sapien
cttcatggttgtcatcccatggcct

SEQ ID NO: 3998286 - DNA, 25 bp, Homo sapien
tggttgtcatcccatggcctcatgt

SEQ ID NO: 3998287 - DNA, 25 bp, Homo sapien
tcatggttgtcatcccatggcctca

SEQ ID NO: 3998288 - DNA, 25 bp, Homo sapien
catggttgtcatcccatggcctcat

SEQ ID NO: 3998289 - DNA, 25 bp, Homo sapien
ccactctgtctcgttgctgtttggg

SEQ ID NO: 3998290 - DNA, 25 bp, Homo sapien
agtgggatgatgctgctttgttccc

SEQ ID NO: 3998291 - DNA, 25 bp, Homo sapien
gcttgacagcctcaccgtcgtattt

SEQ ID NO: 3998292 - DNA, 25 bp, Homo sapien
tgacggtatcgatgttctccctcca

SEQ ID NO: 3998293 - DNA, 25 bp, Homo sapien
gaaaattccatcagggccatttctc

SEQ ID NO: 3998294 - DNA, 25 bp, Homo sapien
aaattccatcagggccatttctcat

SEQ ID NO: 3998295 - DNA, 25 bp, Homo sapien
gcaaatacaagaagaaaattccatc

SEQ ID NO: 3998296 - DNA, 25 bp, Homo sapien
ctgcaaatacaagaagaaaattcca

SEQ ID NO: 3998297 - DNA, 25 bp, Homo sapien
ttctcacaatcagcaaagctcaatt

SEQ ID NO: 3998298 - DNA, 25 bp, Homo sapien
atcagcaaagctcaattgtctacat

SEQ ID NO: 3998299 - DNA, 25 bp, Homo sapien
tctcacaatcagcaaagctcaattg

SEQ ID NO: 3998300 - DNA, 25 bp, Homo sapien
acaatcagcaaagctcaattgtcta

SEQ ID NO: 3998301 - DNA, 25 bp, Homo sapien
agtgttaaacatcatgttgtgaatg

SEQ ID NO: 3998302 - DNA, 25 bp, Homo sapien
ttccagagcgtctcagtgttaaaca

SEQ ID NO: 3998303 - DNA, 25 bp, Homo sapien
catgttgtgaatgactccgtgagct

SEQ ID NO: 3998304 - DNA, 25 bp, Homo sapien
tgactccgtgagctctgacccagta

SEQ ID NO: 3998305 - DNA, 25 bp, Homo sapien
aatttttggaggacagtattcagtc

SEQ ID NO: 3998306 - DNA, 25 bp, Homo sapien
tttggaggacagtattcagtctagc

SEQ ID NO: 3998307 - DNA, 25 bp, Homo sapien
aaaggcagggcatcctcattttctt

SEQ ID NO: 3998308 - DNA, 25 bp, Homo sapien
tattcagtctagcaaaaggcagggc

SEQ ID NO: 3998309 - DNA, 25 bp, Homo sapien
ctcagaaataaggaagttaacttca

SEQ ID NO: 3998310 - DNA, 25 bp, Homo sapien
cagaaataaggaagttaacttcaat

SEQ ID NO: 3998311 - DNA, 25 bp, Homo sapien
tcagaaataaggaagttaacttcaa

SEQ ID NO: 3998312 - DNA, 25 bp, Homo sapien
aggtgaacgctaatcctgaatgagt

SEQ ID NO: 3998313 - DNA, 25 bp, Homo sapien
gcactaagggttgtgcacagcacaa

SEQ ID NO: 3998314 - DNA, 25 bp, Homo sapien
tcaattatccaaatattagtcgcgg

SEQ ID NO: 3998315 - DNA, 25 bp, Homo sapien
tcaagtttaaggtgaacgctaatcc

SEQ ID NO: 3998316 - DNA, 25 bp, Homo sapien
catttgctggccgactgagcctgcc

SEQ ID NO: 3998317 - DNA, 25 bp, Homo sapien
caagaggcgttttgaaaatagctcc

SEQ ID NO: 3998318 - DNA, 25 bp, Homo sapien
gatggccaatcctaaacaccccaat

SEQ ID NO: 3998319 - DNA, 25 bp, Homo sapien
tcttaaaaccccatggtgagcagat

SEQ ID NO: 3998320 - DNA, 25 bp, Homo sapien
cctgctatagaaagaggcttctccc

SEQ ID NO: 3998321 - DNA, 25 bp, Homo sapien
ggtagctccgtgtaccaatcagaat

SEQ ID NO: 3998322 - DNA, 25 bp, Homo sapien
aggaccaggattccacgaaggcagc

SEQ ID NO: 3998323 - DNA, 25 bp, Homo sapien
aaaactgtatcaattcctgctatag

SEQ ID NO: 3998324 - DNA, 25 bp, Homo sapien
gctggtatgagaaacgtcccttctt

SEQ ID NO: 3998325 - DNA, 25 bp, Homo sapien
tatgagaaacgtcccttctttccca

SEQ ID NO: 3998326 - DNA, 25 bp, Homo sapien
tggtatgagaaacgtcccttctttc

SEQ ID NO: 3998327 - DNA, 25 bp, Homo sapien
gagctggtatgagaaacgtcccttc

SEQ ID NO: 3998328 - DNA, 25 bp, Homo sapien
ggcctttttcagcagtgtcgtccct

SEQ ID NO: 3998329 - DNA, 25 bp, Homo sapien
caggatgggagctgatggcttctca

SEQ ID NO: 3998330 - DNA, 25 bp, Homo sapien
ttgctcagtgcgcttgtgtttgggg

SEQ ID NO: 3998331 - DNA, 25 bp, Homo sapien
ctttttcagcagtgtcgtccctgga

SEQ ID NO: 3998332 - DNA, 25 bp, Homo sapien
attggaggagagacaggtcttgcct

SEQ ID NO: 3998333 - DNA, 25 bp, Homo sapien
tcaatatgcagacttgcacagtcct

SEQ ID NO: 3998334 - DNA, 25 bp, Homo sapien
gtcttgccttgtaatggagagttac

SEQ ID NO: 3998335 - DNA, 25 bp, Homo sapien
taaggaagggagatgcttgatcaat

SEQ ID NO: 3998336 - DNA, 25 bp, Homo sapien
gaacaccctttggaagcatgcagaa

SEQ ID NO: 3998337 - DNA, 25 bp, Homo sapien
caccctttggaagcatgcagaaagt

SEQ ID NO: 3998338 - DNA, 25 bp, Homo sapien
aacgaacaccctttggaagcatgca

SEQ ID NO: 3998339 - DNA, 25 bp, Homo sapien
ccctttggaagcatgcagaaagttt

SEQ ID NO: 3998340 - DNA, 25 bp, Homo sapien
cggtgaagtgggacggggaggtcat

SEQ ID NO: 3998341 - DNA, 25 bp, Homo sapien
cgggatggcggtgaagtgggacggg

SEQ ID NO: 3998342 - DNA, 25 bp, Homo sapien
ccgggatggcggtgaagtgggacgg

SEQ ID NO: 3998343 - DNA, 25 bp, Homo sapien
atggcggtgaagtgggacggggagg

SEQ ID NO: 3998344 - DNA, 25 bp, Homo sapien
tccccagccagaccatccaggttgg

SEQ ID NO: 3998345 - DNA, 25 bp, Homo sapien
ccccagccagaccatccaggttggg

SEQ ID NO: 3998346 - DNA, 25 bp, Homo sapien
cagccagaccatccaggttgggggt

SEQ ID NO: 3998347 - DNA, 25 bp, Homo sapien
cctccccagccagaccatccaggtt

SEQ ID NO: 3998348 - DNA, 25 bp, Homo sapien
ccagcaggacaagcggtggcagcag

SEQ ID NO: 3998349 - DNA, 25 bp, Homo sapien
cccagcaggacaagcggtggcagca

SEQ ID NO: 3998350 - DNA, 25 bp, Homo sapien
tgccatgacaggctgggccaccctg

SEQ ID NO: 3998351 - DNA, 25 bp, Homo sapien
tccccatgccatgacaggctgggcc

SEQ ID NO: 3998352 - DNA, 25 bp, Homo sapien
tgacaggctgggccaccctgtccat

SEQ ID NO: 3998353 - DNA, 25 bp, Homo sapien
ctgtccccatgccatgacaggctgg

SEQ ID NO: 3998354 - DNA, 25 bp, Homo sapien
ttaaactccttgtttctcagattcc

SEQ ID NO: 3998355 - DNA, 25 bp, Homo sapien
aactccttgtttctcagattcccac

SEQ ID NO: 3998356 - DNA, 25 bp, Homo sapien
ccttaaactccttgtttctcagatt

SEQ ID NO: 3998357 - DNA, 25 bp, Homo sapien
aaactccttgtttctcagattccca

SEQ ID NO: 3998358 - DNA, 25 bp, Homo sapien
tcctcaagcatctggaagtgcttct

SEQ ID NO: 3998359 - DNA, 25 bp, Homo sapien
agcatctggaagtgcttcttcctga

SEQ ID NO: 3998360 - DNA, 25 bp, Homo sapien
tgcccactgttcgaagtatccttgg

SEQ ID NO: 3998361 - DNA, 25 bp, Homo sapien
tctttttatagaattgcaccagtgc

SEQ ID NO: 3998362 - DNA, 25 bp, Homo sapien
tctcaagagatcctggagttcacat

SEQ ID NO: 3998363 - DNA, 25 bp, Homo sapien
tctctcaagagatcctggagttcac

SEQ ID NO: 3998364 - DNA, 25 bp, Homo sapien
ctctcaagagatcctggagttcaca

SEQ ID NO: 3998365 - DNA, 25 bp, Homo sapien
gtctctcaagagatcctggagttca

SEQ ID NO: 3998366 - DNA, 25 bp, Homo sapien
tatcggtattaacatcaggtgcaga

SEQ ID NO: 3998367 - DNA, 25 bp, Homo sapien
ggtgcagatgaatcccatttggtca

SEQ ID NO: 3998368 - DNA, 25 bp, Homo sapien
tgcagctgagcatagcaggtatcgg

SEQ ID NO: 3998369 - DNA, 25 bp, Homo sapien
tctccatcagtcttgctgtgggaag

SEQ ID NO: 3998370 - DNA, 25 bp, Homo sapien
tttgtcaaagattgttgttggattt

SEQ ID NO: 3998371 - DNA, 25 bp, Homo sapien
tcctgggggaggcaatttgtcaaag

SEQ ID NO: 3998372 - DNA, 25 bp, Homo sapien
taatatgaagatgacacccattgtg

SEQ ID NO: 3998373 - DNA, 25 bp, Homo sapien
tatgaagatgacacccattgtggtc

SEQ ID NO: 3998374 - DNA, 25 bp, Homo sapien
tggtcttgtacatttagttgccttc

SEQ ID NO: 3998375 - DNA, 25 bp, Homo sapien
cttgtacatttagttgccttcccgg

SEQ ID NO: 3998376 - DNA, 25 bp, Homo sapien
ccgggtccagatagttactttgtca

SEQ ID NO: 3998377 - DNA, 25 bp, Homo sapien
tggtcatgaacttccgggtccagat

SEQ ID NO: 3998378 - DNA, 25 bp, Homo sapien
catttgtttcctctggagcggtcga

SEQ ID NO: 3998379 - DNA, 25 bp, Homo sapien
tggagcggtcgattggtcatgaact

SEQ ID NO: 3998380 - DNA, 25 bp, Homo sapien
ccatcatgagacgggcaggaggttt

SEQ ID NO: 3998381 - DNA, 25 bp, Homo sapien
agacgggcaggaggtttcatcattg

SEQ ID NO: 3998382 - DNA, 25 bp, Homo sapien
atgagacgggcaggaggtttcatca

SEQ ID NO: 3998383 - DNA, 25 bp, Homo sapien
tcatgagacgggcaggaggtttcat

SEQ ID NO: 3998384 - DNA, 25 bp, Homo sapien
tctggagccttatgaatcatgatgg

SEQ ID NO: 3998385 - DNA, 25 bp, Homo sapien
agaggaaggttcgatgaggcccatc

SEQ ID NO: 3998386 - DNA, 25 bp, Homo sapien
catgatggaaccatttggaagacgc

SEQ ID NO: 3998387 - DNA, 25 bp, Homo sapien
aaatggctctgtaccggagggaaga

SEQ ID NO: 3998388 - DNA, 25 bp, Homo sapien
tctttgctcaactgtgtgcctgtgt

SEQ ID NO: 3998389 - DNA, 25 bp, Homo sapien
gaggccagaggcttctgaatactct

SEQ ID NO: 3998390 - DNA, 25 bp, Homo sapien
tgcctgtgtgtctagtgcccagcac

SEQ ID NO: 3998391 - DNA, 25 bp, Homo sapien
atgggcagtctccagtgaataggtg

SEQ ID NO: 3998392 - DNA, 25 bp, Homo sapien
ttctgtgccaactggctgagtgtcc

SEQ ID NO: 3998393 - DNA, 25 bp, Homo sapien
ggttggccttactgatagttctgtg

SEQ ID NO: 3998394 - DNA, 25 bp, Homo sapien
ggttctgtgccaactggctgagtgt

SEQ ID NO: 3998395 - DNA, 25 bp, Homo sapien
tacacagctgtgacggttggcctta

SEQ ID NO: 3998396 - DNA, 25 bp, Homo sapien
gccgtggagacctgtgaaactggcc

SEQ ID NO: 3998397 - DNA, 25 bp, Homo sapien
agaccctgcaccaatctgctgaatg

SEQ ID NO: 3998398 - DNA, 25 bp, Homo sapien
caaaaatttggtgtgtagatcccct

SEQ ID NO: 3998399 - DNA, 25 bp, Homo sapien
cctgcatcaaaatgccgtggagacc

SEQ ID NO: 3998400 - DNA, 25 bp, Homo sapien
ggcaccaaactctgaggatctggag

SEQ ID NO: 3998401 - DNA, 25 bp, Homo sapien
ctacttggtatcaggcaccaaactc

SEQ ID NO: 3998402 - DNA, 25 bp, Homo sapien
tggtatcaggcaccaaactctgagg

SEQ ID NO: 3998403 - DNA, 25 bp, Homo sapien
caaactctgaggatctggaggtgat

SEQ ID NO: 3998404 - DNA, 25 bp, Homo sapien
ttactctctaagtgggtgaggagca

SEQ ID NO: 3998405 - DNA, 25 bp, Homo sapien
ggccggctggggacggctgcttcaa

SEQ ID NO: 3998406 - DNA, 25 bp, Homo sapien
cagaggcgagttctgcggagctgaa

SEQ ID NO: 3998407 - DNA, 25 bp, Homo sapien
cggagctgaagagatggccggctgg

SEQ ID NO: 3998408 - DNA, 25 bp, Homo sapien
agggaccagattgtgcaggacattt

SEQ ID NO: 3998409 - DNA, 25 bp, Homo sapien
gctttaaacctgatggaagaccatt

SEQ ID NO: 3998410 - DNA, 25 bp, Homo sapien
gatatctttagagttggagctgaca

SEQ ID NO: 3998411 - DNA, 25 bp, Homo sapien
ccaattatactagtccaggagagag

SEQ ID NO: 3998412 - DNA, 25 bp, Homo sapien
aagtttgaacccatcattgtacaag

SEQ ID NO: 3998413 - DNA, 25 bp, Homo sapien
gatttgaggtgactgagcaaccctg

SEQ ID NO: 3998414 - DNA, 25 bp, Homo sapien
tttgaggtgactgagcaaccctggc

SEQ ID NO: 3998415 - DNA, 25 bp, Homo sapien
gtttgaacccatcattgtacaagtg

SEQ ID NO: 3998416 - DNA, 25 bp, Homo sapien
ggcaccacgtggcatctgtctagtt

SEQ ID NO: 3998417 - DNA, 25 bp, Homo sapien
cccatcgtgaagacatcgttgttca

SEQ ID NO: 3998418 - DNA, 25 bp, Homo sapien
cagagtcatggagcccatcgtgaag

SEQ ID NO: 3998419 - DNA, 25 bp, Homo sapien
tgtctagttcttctgttcccgtcct

SEQ ID NO: 3998420 - DNA, 25 bp, Homo sapien
gggctgcctcgaccctctgtgaact

SEQ ID NO: 3998421 - DNA, 25 bp, Homo sapien
cagggggctgcctcgaccctctgtg

SEQ ID NO: 3998422 - DNA, 25 bp, Homo sapien
tgcctcgaccctctgtgaactgctt

SEQ ID NO: 3998423 - DNA, 25 bp, Homo sapien
ctcgaccctctgtgaactgcttgtc

SEQ ID NO: 3998424 - DNA, 25 bp, Homo sapien
agccagtccctttctttagttctca

SEQ ID NO: 3998425 - DNA, 25 bp, Homo sapien
ccttttcccttcctctccattgtgc

SEQ ID NO: 3998426 - DNA, 25 bp, Homo sapien
cccttttcccttcctctccattgtg

SEQ ID NO: 3998427 - DNA, 25 bp, Homo sapien
cttttcccttcctctccattgtgcc

SEQ ID NO: 3998428 - DNA, 25 bp, Homo sapien
ttttcccttcctctccattgtgccc

SEQ ID NO: 3998429 - DNA, 25 bp, Homo sapien
tggtcatgacgattttgatgatgat

SEQ ID NO: 3998430 - DNA, 25 bp, Homo sapien
gaagatgatgctggtcatgacgatt

SEQ ID NO: 3998431 - DNA, 25 bp, Homo sapien
gatgctggtcatgacgattttgatg

SEQ ID NO: 3998432 - DNA, 25 bp, Homo sapien
gatgatgctggtcatgacgattttg

SEQ ID NO: 3998433 - DNA, 25 bp, Homo sapien
tgctgttgtgtttctcagagaaagg

SEQ ID NO: 3998434 - DNA, 25 bp, Homo sapien
tctcagagaaaggtgtataggggaa

SEQ ID NO: 3998435 - DNA, 25 bp, Homo sapien
tgtttctcagagaaaggtgtatagg

SEQ ID NO: 3998436 - DNA, 25 bp, Homo sapien
tgtataggggaaggagcggtgggtg

SEQ ID NO: 3998437 - DNA, 25 bp, Homo sapien
cacatgctgcgggtaccattggttc

SEQ ID NO: 3998438 - DNA, 25 bp, Homo sapien
tctaagacgctagtgcagctgctgg

SEQ ID NO: 3998439 - DNA, 25 bp, Homo sapien
tgtccccttggaactcatcgtcttg

SEQ ID NO: 3998440 - DNA, 25 bp, Homo sapien
cagtgttgccgggagacattttcag

SEQ ID NO: 3998441 - DNA, 25 bp, Homo sapien
tataaagcgaccacctctgattgtt

SEQ ID NO: 3998442 - DNA, 25 bp, Homo sapien
ggatgttccatctgcctaatttcac

SEQ ID NO: 3998443 - DNA, 25 bp, Homo sapien
gatgcggcacagtccgttatttgga

SEQ ID NO: 3998444 - DNA, 25 bp, Homo sapien
gttgcttgatgccacagtttccaga

SEQ ID NO: 3998445 - DNA, 25 bp, Homo sapien
catgaatgtataagtggcgcccact

SEQ ID NO: 3998446 - DNA, 25 bp, Homo sapien
attcatgaatgtataagtggcgccc

SEQ ID NO: 3998447 - DNA, 25 bp, Homo sapien
gaatgtataagtggcgcccactggt

SEQ ID NO: 3998448 - DNA, 25 bp, Homo sapien
tctgaaattcatgaatgtataagtg

SEQ ID NO: 3998449 - DNA, 25 bp, Homo sapien
ctaaaagacctccgagcatgggaac

SEQ ID NO: 3998450 - DNA, 25 bp, Homo sapien
ggaagttcaggctcttcgtacattc

SEQ ID NO: 3998451 - DNA, 25 bp, Homo sapien
ggtctctgtgcatctcttctccatc

SEQ ID NO: 3998452 - DNA, 25 bp, Homo sapien
acaaagggtggctgcaaggcaactc

SEQ ID NO: 3998453 - DNA, 25 bp, Homo sapien
tgccaacttggatcggaagatttgt

SEQ ID NO: 3998454 - DNA, 25 bp, Homo sapien
ctcctagagaggccagtgatgggtt

SEQ ID NO: 3998455 - DNA, 25 bp, Homo sapien
gactcctagagaggccagtgatggg

SEQ ID NO: 3998456 - DNA, 25 bp, Homo sapien
actcctagagaggccagtgatgggt

SEQ ID NO: 3998457 - DNA, 25 bp, Homo sapien
cagtcatggactcatctgtatcgtg

SEQ ID NO: 3998458 - DNA, 25 bp, Homo sapien
gtcatggactcatctgtatcgtggc

SEQ ID NO: 3998459 - DNA, 25 bp, Homo sapien
catggactcatctgtatcgtggctt

SEQ ID NO: 3998460 - DNA, 25 bp, Homo sapien
ggactcatctgtatcgtggcttaac

SEQ ID NO: 3998461 - DNA, 25 bp, Homo sapien
tctgagttcatcacagagccctgaa

SEQ ID NO: 3998462 - DNA, 25 bp, Homo sapien
tgatggttcccacgttagctctgag

SEQ ID NO: 3998463 - DNA, 25 bp, Homo sapien
tgaacccctattctgtgcacagatg

SEQ ID NO: 3998464 - DNA, 25 bp, Homo sapien
tgtgcacagatgctgttgtgcatac

SEQ ID NO: 3998465 - DNA, 25 bp, Homo sapien
tcactcgctgaaggacgcaggtggg

SEQ ID NO: 3998466 - DNA, 25 bp, Homo sapien
aagccactctggcatgttttgaagt

SEQ ID NO: 3998467 - DNA, 25 bp, Homo sapien
tggcatgttttgaagtgaggttgcc

SEQ ID NO: 3998468 - DNA, 25 bp, Homo sapien
actctggcatgttttgaagtgaggt

SEQ ID NO: 3998469 - DNA, 25 bp, Homo sapien
tcagactttgtccttgtgaacctgg

SEQ ID NO: 3998470 - DNA, 25 bp, Homo sapien
cagactttgtccttgtgaacctggt

SEQ ID NO: 3998471 - DNA, 25 bp, Homo sapien
tcatgagtctcaggaggatcttggc

SEQ ID NO: 3998472 - DNA, 25 bp, Homo sapien
ggtgagttaggatgtcatgagtctc

SEQ ID NO: 3998473 - DNA, 25 bp, Homo sapien
cacgtgcaagtgtggctttgacttt

SEQ ID NO: 3998474 - DNA, 25 bp, Homo sapien
ggtgtccacgtgcaagtgtggcttt

SEQ ID NO: 3998475 - DNA, 25 bp, Homo sapien
ggctgttgctgcgtgtctctgaggc

SEQ ID NO: 3998476 - DNA, 25 bp, Homo sapien
ctgggctgttgctgcgtgtctctga

SEQ ID NO: 3998477 - DNA, 25 bp, Homo sapien
tgggctgttgctgcgtgtctctgag

SEQ ID NO: 3998478 - DNA, 25 bp, Homo sapien
gctgttgctgcgtgtctctgaggcc

SEQ ID NO: 3998479 - DNA, 25 bp, Homo sapien
aagcatgggacagaatcaaatcggc

SEQ ID NO: 3998480 - DNA, 25 bp, Homo sapien
cacagcgaggtgtggacatcacaac

SEQ ID NO: 3998481 - DNA, 25 bp, Homo sapien
aaatccaccaggattggcacagcga

SEQ ID NO: 3998482 - DNA, 25 bp, Homo sapien
ccttctagggccatgggtggtctct

SEQ ID NO: 3998483 - DNA, 25 bp, Homo sapien
cccctgtttacgctcttggtgcttc

SEQ ID NO: 3998484 - DNA, 25 bp, Homo sapien
gctggtgatgggtgcttctccatat

SEQ ID NO: 3998485 - DNA, 25 bp, Homo sapien
ctgtggttccccctgtttacgctct

SEQ ID NO: 3998486 - DNA, 25 bp, Homo sapien
ctgtttacgctcttggtgcttctca

SEQ ID NO: 3998487 - DNA, 25 bp, Homo sapien
ggttaaactgatatgtgcaaacagc

SEQ ID NO: 3998488 - DNA, 25 bp, Homo sapien
aggttaaactgatatgtgcaaacag

SEQ ID NO: 3998489 - DNA, 25 bp, Homo sapien
taaactgatatgtgcaaacagctgg

SEQ ID NO: 3998490 - DNA, 25 bp, Homo sapien
ttaaactgatatgtgcaaacagctg

SEQ ID NO: 3998491 - DNA, 25 bp, Homo sapien
tggatctgtttccccaccagacctc

SEQ ID NO: 3998492 - DNA, 25 bp, Homo sapien
gtggatctgtttccccaccagacct

SEQ ID NO: 3998493 - DNA, 25 bp, Homo sapien
atctgtttccccaccagacctccct

SEQ ID NO: 3998494 - DNA, 25 bp, Homo sapien
gatctgtttccccaccagacctccc

SEQ ID NO: 3998495 - DNA, 25 bp, Homo sapien
gatcgtgaaaatgaaggtctgtctc

SEQ ID NO: 3998496 - DNA, 25 bp, Homo sapien
gggccgtggttcagacctagaataa

SEQ ID NO: 3998497 - DNA, 25 bp, Homo sapien
gtttggactagtctggctgtgccca

SEQ ID NO: 3998498 - DNA, 25 bp, Homo sapien
taatggaagtagcttttcaagaaca

SEQ ID NO: 3998499 - DNA, 25 bp, Homo sapien
aaagggacaatgatctggttgctgg

SEQ ID NO: 3998500 - DNA, 25 bp, Homo sapien
aaaagggacaatgatctggttgctg

SEQ ID NO: 3998501 - DNA, 25 bp, Homo sapien
gctccagctgtatggctgtctctct

SEQ ID NO: 3998502 - DNA, 25 bp, Homo sapien
gagctccagctgtatggctgtctct

SEQ ID NO: 3998503 - DNA, 25 bp, Homo sapien
ccagctgtatggctgtctctctggg

SEQ ID NO: 3998504 - DNA, 25 bp, Homo sapien
ctgagctccagctgtatggctgtct

SEQ ID NO: 3998505 - DNA, 25 bp, Homo sapien
tctacattcgatttaagttgagcct

SEQ ID NO: 3998506 - DNA, 25 bp, Homo sapien
tttgaaggtaggcatcctgctatta

SEQ ID NO: 3998507 - DNA, 25 bp, Homo sapien
ggcatcctgctattaagtctacatt

SEQ ID NO: 3998508 - DNA, 25 bp, Homo sapien
aagtctacattcgatttaagttgag

SEQ ID NO: 3998509 - DNA, 25 bp, Homo sapien
tcaactataattgggaccttcagag

SEQ ID NO: 3998510 - DNA, 25 bp, Homo sapien
tcagagccagctaaatgtcaataat

SEQ ID NO: 3998511 - DNA, 25 bp, Homo sapien
gatgaggaaatttagctcagctgca

SEQ ID NO: 3998512 - DNA, 25 bp, Homo sapien
taaactgtgtccagataggatgagg

SEQ ID NO: 3998513 - DNA, 25 bp, Homo sapien
ttccacaatgggatagagccacttt

SEQ ID NO: 3998514 - DNA, 25 bp, Homo sapien
cacaatgggatagagccactttttc

SEQ ID NO: 3998515 - DNA, 25 bp, Homo sapien
tgatggcttggatttccacaatggg

SEQ ID NO: 3998516 - DNA, 25 bp, Homo sapien
tccagagtccttgatggcttggatt

SEQ ID NO: 3998517 - DNA, 25 bp, Homo sapien
tgtgaaatacggtgaacttgctacc

SEQ ID NO: 3998518 - DNA, 25 bp, Homo sapien
caggctctgcattttgaagtgtgaa

SEQ ID NO: 3998519 - DNA, 25 bp, Homo sapien
gatagcttcctgtctatcccagcca

SEQ ID NO: 3998520 - DNA, 25 bp, Homo sapien
gacgggattgcagctgaaattcgcc

SEQ ID NO: 3998521 - DNA, 25 bp, Homo sapien
gtcctcagcttctactgtggcagag

SEQ ID NO: 3998522 - DNA, 25 bp, Homo sapien
ttctactgtggcagagcttgatgaa

SEQ ID NO: 3998523 - DNA, 25 bp, Homo sapien
ctcagcttctactgtggcagagctt

SEQ ID NO: 3998524 - DNA, 25 bp, Homo sapien
ctggtctgaacctgtcctcagcttc

SEQ ID NO: 3998525 - DNA, 25 bp, Homo sapien
tgcagtggtctctctagtcacatct

SEQ ID NO: 3998526 - DNA, 25 bp, Homo sapien
attcagcttcatctcgaatgtgtcc

SEQ ID NO: 3998527 - DNA, 25 bp, Homo sapien
cagcttcatctcgaatgtgtccatc

SEQ ID NO: 3998528 - DNA, 25 bp, Homo sapien
gcttcatctcgaatgtgtccatctc

SEQ ID NO: 3998529 - DNA, 25 bp, Homo sapien
ccttcctggcatctggagcagcatc

SEQ ID NO: 3998530 - DNA, 25 bp, Homo sapien
ttcctggcatctggagcagcatctc

SEQ ID NO: 3998531 - DNA, 25 bp, Homo sapien
tggagcagcatctccagagggcgat

SEQ ID NO: 3998532 - DNA, 25 bp, Homo sapien
gagcagcatctccagagggcgatgg

SEQ ID NO: 3998533 - DNA, 25 bp, Homo sapien
ttgattgcatgggagtttgcacgag

SEQ ID NO: 3998534 - DNA, 25 bp, Homo sapien
atgtcttgtccggaggagggtactt

SEQ ID NO: 3998535 - DNA, 25 bp, Homo sapien
tcatattgatgataaaccttccctg

SEQ ID NO: 3998536 - DNA, 25 bp, Homo sapien
caagatggatgcacacggtggcaat

SEQ ID NO: 3998537 - DNA, 25 bp, Homo sapien
tagaagacctccagtggttggaggc

SEQ ID NO: 3998538 - DNA, 25 bp, Homo sapien
ttagaagacctccagtggttggagg

SEQ ID NO: 3998539 - DNA, 25 bp, Homo sapien
ttgcgcagaattgttcaggcccctt

SEQ ID NO: 3998540 - DNA, 25 bp, Homo sapien
ctgggaaatcagcagaattgcgcag

SEQ ID NO: 3998541 - DNA, 25 bp, Homo sapien
gcagaattgcgcagaattgttcagg

SEQ ID NO: 3998542 - DNA, 25 bp, Homo sapien
aatcagcagaattgcgcagaattgt

SEQ ID NO: 3998543 - DNA, 25 bp, Homo sapien
tcttgacatcctcaactgtgaagcg

SEQ ID NO: 3998544 - DNA, 25 bp, Homo sapien
ttgacatcctcaactgtgaagcgaa

SEQ ID NO: 3998545 - DNA, 25 bp, Homo sapien
gacatcctcaactgtgaagcgaagg

SEQ ID NO: 3998546 - DNA, 25 bp, Homo sapien
atctcttgacatcctcaactgtgaa

SEQ ID NO: 3998547 - DNA, 25 bp, Homo sapien
gaggatttggaagtaggaagagaac

SEQ ID NO: 3998548 - DNA, 25 bp, Homo sapien
ggctgttgtatccatcctggttcgg

SEQ ID NO: 3998549 - DNA, 25 bp, Homo sapien
ggaagagaacaagccgcagcggccc

SEQ ID NO: 3998550 - DNA, 25 bp, Homo sapien
tggaggaccaggtgtccttggggca

SEQ ID NO: 3998551 - DNA, 25 bp, Homo sapien
ctgacagcaaccctaagcaacagaa

SEQ ID NO: 3998552 - DNA, 25 bp, Homo sapien
cctttccaagatctttcatgccctg

SEQ ID NO: 3998553 - DNA, 25 bp, Homo sapien
ctttccaagatctttcatgccctga

SEQ ID NO: 3998554 - DNA, 25 bp, Homo sapien
acagcaaccctaagcaacagaaact

SEQ ID NO: 3998555 - DNA, 25 bp, Homo sapien
gactccttgcatgggaatctactgc

SEQ ID NO: 3998556 - DNA, 25 bp, Homo sapien
tcagcatagcgcttgggacggtgcc

SEQ ID NO: 3998557 - DNA, 25 bp, Homo sapien
gtaaagtacgtgacctactgcctgg

SEQ ID NO: 3998558 - DNA, 25 bp, Homo sapien
cataacgtgtttgtaggcaggaagc

SEQ ID NO: 3998559 - DNA, 25 bp, Homo sapien
gaggcttggcgagattgagtgctcc

SEQ ID NO: 3998560 - DNA, 25 bp, Homo sapien
taggtggcgacatattggaaaggct

SEQ ID NO: 3998561 - DNA, 25 bp, Homo sapien
aatgaaggcttgaggcttggcgaga

SEQ ID NO: 3998562 - DNA, 25 bp, Homo sapien
gtgttgtcctgatgaggacccgcga

SEQ ID NO: 3998563 - DNA, 25 bp, Homo sapien
ttaccaacagcttgcccacaaggaa

SEQ ID NO: 3998564 - DNA, 25 bp, Homo sapien
agtgatcatgtcctttttaccaaca

SEQ ID NO: 3998565 - DNA, 25 bp, Homo sapien
caacagcttgcccacaaggaagctg

SEQ ID NO: 3998566 - DNA, 25 bp, Homo sapien
aagtgatcatgtcctttttaccaac

SEQ ID NO: 3998567 - DNA, 25 bp, Homo sapien
gaaccttattcccagcagtccgagg

SEQ ID NO: 3998568 - DNA, 25 bp, Homo sapien
catacacccttagagcctgagagct

SEQ ID NO: 3998569 - DNA, 25 bp, Homo sapien
cagtccgaggtacagcaagacaaca

SEQ ID NO: 3998570 - DNA, 25 bp, Homo sapien
gctttcaggcttttagcatccagag

SEQ ID NO: 3998571 - DNA, 25 bp, Homo sapien
ggttgactcgagcaggaacattgag

SEQ ID NO: 3998572 - DNA, 25 bp, Homo sapien
tctttggtgacacacgagcctggag

SEQ ID NO: 3998573 - DNA, 25 bp, Homo sapien
cattgaggagacatcggtaactaga

SEQ ID NO: 3998574 - DNA, 25 bp, Homo sapien
tgaccccaaaggcacaaagttgtgg

SEQ ID NO: 3998575 - DNA, 25 bp, Homo sapien
ggctgtagcttgcagggtcttaata

SEQ ID NO: 3998576 - DNA, 25 bp, Homo sapien
ttggctgtagcttgcagggtcttaa

SEQ ID NO: 3998577 - DNA, 25 bp, Homo sapien
ctttgagcatagaattctccaagtt

SEQ ID NO: 3998578 - DNA, 25 bp, Homo sapien
agcttgcagggtcttaataggtata

SEQ ID NO: 3998579 - DNA, 25 bp, Homo sapien
tgccatctgtagaaagcgctatcaa

SEQ ID NO: 3998580 - DNA, 25 bp, Homo sapien
gctttgctttaaggctaattccaag

SEQ ID NO: 3998581 - DNA, 25 bp, Homo sapien
aaacggtggtattcgtgattggctc

SEQ ID NO: 3998582 - DNA, 25 bp, Homo sapien
tcaaagggatctcagtgtaaacggt

SEQ ID NO: 3998583 - DNA, 25 bp, Homo sapien
tccttgggacatgagatgcatgaca

SEQ ID NO: 3998584 - DNA, 25 bp, Homo sapien
tagtttagggttcatcttgttctgt

SEQ ID NO: 3998585 - DNA, 25 bp, Homo sapien
ggatagtttagggttcatcttgttc

SEQ ID NO: 3998586 - DNA, 25 bp, Homo sapien
tcctctttggatagtttagggttca

SEQ ID NO: 3998587 - DNA, 25 bp, Homo sapien
tttggatagtttagggttcatcttg

SEQ ID NO: 3998588 - DNA, 25 bp, Homo sapien
tcagccttcaaacatctgctttgtg

SEQ ID NO: 3998589 - DNA, 25 bp, Homo sapien
tcaaacatctgctttgtgtgggttt

SEQ ID NO: 3998590 - DNA, 25 bp, Homo sapien
gggttttgagctccccacactggat

SEQ ID NO: 3998591 - DNA, 25 bp, Homo sapien
ctttgtgtgggttttgagctcccca

SEQ ID NO: 3998592 - DNA, 25 bp, Homo sapien
tggaaaacatggaccacactggccg

SEQ ID NO: 3998593 - DNA, 25 bp, Homo sapien
cattggactggagccggtggaaaac

SEQ ID NO: 3998594 - DNA, 25 bp, Homo sapien
ccacacagggcattggactggagcc

SEQ ID NO: 3998595 - DNA, 25 bp, Homo sapien
ccacactggccgtcgtgattggcat

SEQ ID NO: 3998596 - DNA, 25 bp, Homo sapien
aacttttcccttgcgtggcagcaca

SEQ ID NO: 3998597 - DNA, 25 bp, Homo sapien
ttctggaacttttcccttgcgtggc

SEQ ID NO: 3998598 - DNA, 25 bp, Homo sapien
ctcctgagtgtggttaccctcaggt

SEQ ID NO: 3998599 - DNA, 25 bp, Homo sapien
tggaacttttcccttgcgtggcagc

SEQ ID NO: 3998600 - DNA, 25 bp, Homo sapien
ggtagcggactgtctgccaaagatt

SEQ ID NO: 3998601 - DNA, 25 bp, Homo sapien
taactggcatttcctacgaagggct

SEQ ID NO: 3998602 - DNA, 25 bp, Homo sapien
tcttggctgccgtactgtgattcgg

SEQ ID NO: 3998603 - DNA, 25 bp, Homo sapien
gtcattatgatgagcttggaagttg

SEQ ID NO: 3998604 - DNA, 25 bp, Homo sapien
gacagattgattcatgctgcctggg

SEQ ID NO: 3998605 - DNA, 25 bp, Homo sapien
gaattgggcaaggtactgggtcacc

SEQ ID NO: 3998606 - DNA, 25 bp, Homo sapien
tcctaaggctggtggttgctacgaa

SEQ ID NO: 3998607 - DNA, 25 bp, Homo sapien
gccaatactggcttcacatgcaagg

SEQ ID NO: 3998608 - DNA, 25 bp, Homo sapien
ctcgttgatcaagtgcagttttttc

SEQ ID NO: 3998609 - DNA, 25 bp, Homo sapien
gcttaactcgttgatcaagtgcagt

SEQ ID NO: 3998610 - DNA, 25 bp, Homo sapien
ttgaaatctgctattgcgcttaact

SEQ ID NO: 3998611 - DNA, 25 bp, Homo sapien
tattgcgcttaactcgttgatcaag

SEQ ID NO: 3998612 - DNA, 25 bp, Homo sapien
ggtgacaaggctgcaaattggtccc

SEQ ID NO: 3998613 - DNA, 25 bp, Homo sapien
ttggtggacagatccggggcacagt

SEQ ID NO: 3998614 - DNA, 25 bp, Homo sapien
ccccaggttgtgggagcacgtgaaa

SEQ ID NO: 3998615 - DNA, 25 bp, Homo sapien
tgcgccctggtgtgacggccccagg

SEQ ID NO: 3998616 - DNA, 25 bp, Homo sapien
tcacatcaagtctgtgaagtattct

SEQ ID NO: 3998617 - DNA, 25 bp, Homo sapien
catcaagtctgtgaagtattcttcc

SEQ ID NO: 3998618 - DNA, 25 bp, Homo sapien
ttcacatcaagtctgtgaagtattc

SEQ ID NO: 3998619 - DNA, 25 bp, Homo sapien
tagcctcagatgtcctatgccatcg

SEQ ID NO: 3998620 - DNA, 25 bp, Homo sapien
tatcccttagatgatgtagcctcag

SEQ ID NO: 3998621 - DNA, 25 bp, Homo sapien
gagcataccatacaagggcacgagt

SEQ ID NO: 3998622 - DNA, 25 bp, Homo sapien
cctcggaagactgtgggagcatacc

SEQ ID NO: 3998623 - DNA, 25 bp, Homo sapien
tcaaaccgtgccctcaaagcgcttg

SEQ ID NO: 3998624 - DNA, 25 bp, Homo sapien
aaaccgtgccctcaaagcgcttgca

SEQ ID NO: 3998625 - DNA, 25 bp, Homo sapien
accgtgccctcaaagcgcttgcagt

SEQ ID NO: 3998626 - DNA, 25 bp, Homo sapien
aaccgtgccctcaaagcgcttgcag

SEQ ID NO: 3998627 - DNA, 25 bp, Homo sapien
gcagcagccgtctgagcagtcatag

SEQ ID NO: 3998628 - DNA, 25 bp, Homo sapien
tagcataccatgattctgggaagct

SEQ ID NO: 3998629 - DNA, 25 bp, Homo sapien
tctgtttccgtaacagcagcagccg

SEQ ID NO: 3998630 - DNA, 25 bp, Homo sapien
tgcaagggtgtaggacgggaaccaa

SEQ ID NO: 3998631 - DNA, 25 bp, Homo sapien
gcagtctgtcccgttaccatcagtc

SEQ ID NO: 3998632 - DNA, 25 bp, Homo sapien
ccatcagtctgtcccattaccagtg

SEQ ID NO: 3998633 - DNA, 25 bp, Homo sapien
tatcttctctgcaacgttttccttg

SEQ ID NO: 3998634 - DNA, 25 bp, Homo sapien
tattttacttacttgccggcttgct

SEQ ID NO: 3998635 - DNA, 25 bp, Homo sapien
tataggcaggatggcggtttaccta

SEQ ID NO: 3998636 - DNA, 25 bp, Homo sapien
gaagagcaagttgatgcctcgtgag

SEQ ID NO: 3998637 - DNA, 25 bp, Homo sapien
tgtccccgtttaacagaagagcaag

SEQ ID NO: 3998638 - DNA, 25 bp, Homo sapien
gcctcgtgaggcaagggaacttccc

SEQ ID NO: 3998639 - DNA, 25 bp, Homo sapien
aagtgtcgatcactctgtattctaa

SEQ ID NO: 3998640 - DNA, 25 bp, Homo sapien
tttggcagtgggtttcatggacccc

SEQ ID NO: 3998641 - DNA, 25 bp, Homo sapien
tggaccccaggctccacttacttcc

SEQ ID NO: 3998642 - DNA, 25 bp, Homo sapien
ttccttcatcaaagtgtcgatcact

SEQ ID NO: 3998643 - DNA, 25 bp, Homo sapien
tgcaaccccagcatcacctcagtgc

SEQ ID NO: 3998644 - DNA, 25 bp, Homo sapien
gctcactgcaaccccagcatcacct

SEQ ID NO: 3998645 - DNA, 25 bp, Homo sapien
actgcaaccccagcatcacctcagt

SEQ ID NO: 3998646 - DNA, 25 bp, Homo sapien
tcactgcaaccccagcatcacctca

SEQ ID NO: 3998647 - DNA, 25 bp, Homo sapien
acttctgtgtactcaacttctttca

SEQ ID NO: 3998648 - DNA, 25 bp, Homo sapien
cttctgtgtactcaacttctttcaa

SEQ ID NO: 3998649 - DNA, 25 bp, Homo sapien
cccatatatgtagggatcttccact

SEQ ID NO: 3998650 - DNA, 25 bp, Homo sapien
gggtgcaacgttaccctcacctgca

SEQ ID NO: 3998651 - DNA, 25 bp, Homo sapien
catatttctgtacgtgggtgcaacg

SEQ ID NO: 3998652 - DNA, 25 bp, Homo sapien
gattatggctcccagaagctgagat

SEQ ID NO: 3998653 - DNA, 25 bp, Homo sapien
gaccgtggtgacagttcttgctccc

SEQ ID NO: 3998654 - DNA, 25 bp, Homo sapien
tgtgaaaggaccttcggcttcctgg

SEQ ID NO: 3998655 - DNA, 25 bp, Homo sapien
gaactgctgccaccgtgaatacgag

SEQ ID NO: 3998656 - DNA, 25 bp, Homo sapien
tgaatacgagctcttggagatgccg

SEQ ID NO: 3998657 - DNA, 25 bp, Homo sapien
gctctaaggctatgttcgttcttaa

SEQ ID NO: 3998658 - DNA, 25 bp, Homo sapien
tgtgaggcctcagctctaaggctat

SEQ ID NO: 3998659 - DNA, 25 bp, Homo sapien
ctaaggagtgtgtagggtgctgaca

SEQ ID NO: 3998660 - DNA, 25 bp, Homo sapien
aaaaacagtgttggccccactctct

SEQ ID NO: 3998661 - DNA, 25 bp, Homo sapien
cagtgctgacttcccctacggaaaa

SEQ ID NO: 3998662 - DNA, 25 bp, Homo sapien
ctccaaaagggcagtgaaaccatca

SEQ ID NO: 3998663 - DNA, 25 bp, Homo sapien
tcttgtaacaacacagaccttggcc

SEQ ID NO: 3998664 - DNA, 25 bp, Homo sapien
tgacctatcaaccacggatgaattg

SEQ ID NO: 3998665 - DNA, 25 bp, Homo sapien
cagtccccaacaaacacagtggcat

SEQ ID NO: 3998666 - DNA, 25 bp, Homo sapien
gtccccaacaaacacagtggcatct

SEQ ID NO: 3998667 - DNA, 25 bp, Homo sapien
tccccaacaaacacagtggcatctt

SEQ ID NO: 3998668 - DNA, 25 bp, Homo sapien
ccccagtccccaacaaacacagtgg

SEQ ID NO: 3998669 - DNA, 25 bp, Homo sapien
tagagcttgagtaggatcctgtact

SEQ ID NO: 3998670 - DNA, 25 bp, Homo sapien
gagcttgagtaggatcctgtactgg

SEQ ID NO: 3998671 - DNA, 25 bp, Homo sapien
catagagcttgagtaggatcctgta

SEQ ID NO: 3998672 - DNA, 25 bp, Homo sapien
cttgagtaggatcctgtactggttc

SEQ ID NO: 3998673 - DNA, 25 bp, Homo sapien
aaagaaccttctgtagcagctgagg

SEQ ID NO: 3998674 - DNA, 25 bp, Homo sapien
accttctgtagcagctgaggggtag

SEQ ID NO: 3998675 - DNA, 25 bp, Homo sapien
gcacatgcaggtcagggaaataaga

SEQ ID NO: 3998676 - DNA, 25 bp, Homo sapien
cttctgtagcagctgaggggtagaa

SEQ ID NO: 3998677 - DNA, 25 bp, Homo sapien
cctcagcattgagcaggacagcatt

SEQ ID NO: 3998678 - DNA, 25 bp, Homo sapien
ggacagcattgctctctggaggact

SEQ ID NO: 3998679 - DNA, 25 bp, Homo sapien
ccaggcgtgtgactggggccccttc

SEQ ID NO: 3998680 - DNA, 25 bp, Homo sapien
gggccccttcctcagcattgagcag

SEQ ID NO: 3998681 - DNA, 25 bp, Homo sapien
tacatgaagcattggccgtctgggc

SEQ ID NO: 3998682 - DNA, 25 bp, Homo sapien
gcctcgggagatgtgaagtgcccct

SEQ ID NO: 3998683 - DNA, 25 bp, Homo sapien
ggtttcgacagggactcaacagcct

SEQ ID NO: 3998684 - DNA, 25 bp, Homo sapien
caactcctggtgaaatagtcgtaag

SEQ ID NO: 3998685 - DNA, 25 bp, Homo sapien
tgcacactcaacctgctgagctgct

SEQ ID NO: 3998686 - DNA, 25 bp, Homo sapien
tctgtgcggaaagtggggtgctgag

SEQ ID NO: 3998687 - DNA, 25 bp, Homo sapien
tgcggaaccgtgtgctgcacttttg

SEQ ID NO: 3998688 - DNA, 25 bp, Homo sapien
caaggtggggtgctgagttgtgtgc

SEQ ID NO: 3998689 - DNA, 25 bp, Homo sapien
gtgaggaaggtggggtgtggagcca

SEQ ID NO: 3998690 - DNA, 25 bp, Homo sapien
tgtgaggaaggtggggtgtggagcc

SEQ ID NO: 3998691 - DNA, 25 bp, Homo sapien
tgaggaaggtggggtgtggagccat

SEQ ID NO: 3998692 - DNA, 25 bp, Homo sapien
ctgtgaggaaggtggggtgtggagc

SEQ ID NO: 3998693 - DNA, 25 bp, Homo sapien
ggttcagcgatgaatggtgctttaa

SEQ ID NO: 3998694 - DNA, 25 bp, Homo sapien
gaacactgaagatggggtgtggcta

SEQ ID NO: 3998695 - DNA, 25 bp, Homo sapien
atgacatctgtagcaacagctggct

SEQ ID NO: 3998696 - DNA, 25 bp, Homo sapien
gggtgtggctaggttcagcgatgaa

SEQ ID NO: 3998697 - DNA, 25 bp, Homo sapien
tgctttacctacatttgtgtatatt

SEQ ID NO: 3998698 - DNA, 25 bp, Homo sapien
ctgctttacctacatttgtgtatat

SEQ ID NO: 3998699 - DNA, 25 bp, Homo sapien
ctgttttcagcaggcctcagcttct

SEQ ID NO: 3998700 - DNA, 25 bp, Homo sapien
gctgttttcagcaggcctcagcttc

SEQ ID NO: 3998701 - DNA, 25 bp, Homo sapien
tgctgttttcagcaggcctcagctt

SEQ ID NO: 3998702 - DNA, 25 bp, Homo sapien
gatggcttccgcgtgtcatcgtgca

SEQ ID NO: 3998703 - DNA, 25 bp, Homo sapien
ttccgcgtgtcatcgtgcagcccgt

SEQ ID NO: 3998704 - DNA, 25 bp, Homo sapien
gtgtcatcgtgcagcccgtgtggct

SEQ ID NO: 3998705 - DNA, 25 bp, Homo sapien
cttggatggcttccgcgtgtcatcg

SEQ ID NO: 3998706 - DNA, 25 bp, Homo sapien
cagcagggagccgttgaagctatca

SEQ ID NO: 3998707 - DNA, 25 bp, Homo sapien
tagaatgctgcacttgagttccagg

SEQ ID NO: 3998708 - DNA, 25 bp, Homo sapien
tcccaggcacagatagataaagtca

SEQ ID NO: 3998709 - DNA, 25 bp, Homo sapien
taggatctggtgtaaagtgcatgcg

SEQ ID NO: 3998710 - DNA, 25 bp, Homo sapien
tcaaatcgttacatggtcgctcaga

SEQ ID NO: 3998711 - DNA, 25 bp, Homo sapien
gctgaatggtgctcttgggttgacc

SEQ ID NO: 3998712 - DNA, 25 bp, Homo sapien
tcttgggttgacctggtgaggtttc

SEQ ID NO: 3998713 - DNA, 25 bp, Homo sapien
cttcagagattagagcaagctgaat

SEQ ID NO: 3998714 - DNA, 25 bp, Homo sapien
tggtgaggtttccaggttcttatta

SEQ ID NO: 3998715 - DNA, 25 bp, Homo sapien
gcttgttgggccagtacagaagact

SEQ ID NO: 3998716 - DNA, 25 bp, Homo sapien
tgttgggccagtacagaagacttgg

SEQ ID NO: 3998717 - DNA, 25 bp, Homo sapien
ttgggccagtacagaagacttgggg

SEQ ID NO: 3998718 - DNA, 25 bp, Homo sapien
ttgttgggccagtacagaagacttg

SEQ ID NO: 3998719 - DNA, 25 bp, Homo sapien
cccctatgaatttgcaggaaggact

SEQ ID NO: 3998720 - DNA, 25 bp, Homo sapien
agcactggttgccaaatgaaatgat

SEQ ID NO: 3998721 - DNA, 25 bp, Homo sapien
tacgatggttgatggttgatttgtc

SEQ ID NO: 3998722 - DNA, 25 bp, Homo sapien
gtctttcctaaagcactggttgcca

SEQ ID NO: 3998723 - DNA, 25 bp, Homo sapien
cgcttgtttcgtgggctcttcctgg

SEQ ID NO: 3998724 - DNA, 25 bp, Homo sapien
ctgaaaacccgaagtagtcagactg

SEQ ID NO: 3998725 - DNA, 25 bp, Homo sapien
caaacaagacgcttgtttcgtgggc

SEQ ID NO: 3998726 - DNA, 25 bp, Homo sapien
ttctgaaaacccgaagtagtcagac

SEQ ID NO: 3998727 - DNA, 25 bp, Homo sapien
ttgttccagtggtatatctggcacc

SEQ ID NO: 3998728 - DNA, 25 bp, Homo sapien
tggtatatctggcaccggcttgggc

SEQ ID NO: 3998729 - DNA, 25 bp, Homo sapien
gtatatctggcaccggcttgggcaa

SEQ ID NO: 3998730 - DNA, 25 bp, Homo sapien
tccagtggtatatctggcaccggct

SEQ ID NO: 3998731 - DNA, 25 bp, Homo sapien
tggggatattcaaactgagcctggg

SEQ ID NO: 3998732 - DNA, 25 bp, Homo sapien
gatattcaaactgagcctgggagag

SEQ ID NO: 3998733 - DNA, 25 bp, Homo sapien
cttggggatattcaaactgagcctg

SEQ ID NO: 3998734 - DNA, 25 bp, Homo sapien
gggatattcaaactgagcctgggag

SEQ ID NO: 3998735 - DNA, 25 bp, Homo sapien
cctggcgttttctgggcttgttggc

SEQ ID NO: 3998736 - DNA, 25 bp, Homo sapien
gcttgttggcagtggttgcatttgt

SEQ ID NO: 3998737 - DNA, 25 bp, Homo sapien
aagagctgttgtggctctgcaagac

SEQ ID NO: 3998738 - DNA, 25 bp, Homo sapien
ttgtgtgccaggcagggcaagagct

SEQ ID NO: 3998739 - DNA, 25 bp, Homo sapien
tttggtcccaggaaggcatctttat

SEQ ID NO: 3998740 - DNA, 25 bp, Homo sapien
tggtcccaggaaggcatctttatca

SEQ ID NO: 3998741 - DNA, 25 bp, Homo sapien
agtaagtccccacggtggcattagg

SEQ ID NO: 3998742 - DNA, 25 bp, Homo sapien
tgagtaagtccccacggtggcatta

SEQ ID NO: 3998743 - DNA, 25 bp, Homo sapien
tttccttcctcataagggcagaggc

SEQ ID NO: 3998744 - DNA, 25 bp, Homo sapien
taaggctctcagttgtggtggtgcc

SEQ ID NO: 3998745 - DNA, 25 bp, Homo sapien
ccatattcgcatacttagggcacat

SEQ ID NO: 3998746 - DNA, 25 bp, Homo sapien
cagaggccctatttgtccactgcca

SEQ ID NO: 3998747 - DNA, 25 bp, Homo sapien
ctgttgggtctctgagataggtgtc

SEQ ID NO: 3998748 - DNA, 25 bp, Homo sapien
tgggtctctgagataggtgtcttgt

SEQ ID NO: 3998749 - DNA, 25 bp, Homo sapien
tgttgggtctctgagataggtgtct

SEQ ID NO: 3998750 - DNA, 25 bp, Homo sapien
ttgggtctctgagataggtgtcttg

SEQ ID NO: 3998751 - DNA, 25 bp, Homo sapien
taggccagcctagaagaacacatca

SEQ ID NO: 3998752 - DNA, 25 bp, Homo sapien
gaaatgtggtgtagacgtgacccag

SEQ ID NO: 3998753 - DNA, 25 bp, Homo sapien
ttctgaggctgaccacccatatgtg

SEQ ID NO: 3998754 - DNA, 25 bp, Homo sapien
gagttttgttggacagattgccaca

SEQ ID NO: 3998755 - DNA, 25 bp, Homo sapien
tcggctctattataacagtagtgcc

SEQ ID NO: 3998756 - DNA, 25 bp, Homo sapien
tgtaactgcgagcttggtccctagg

SEQ ID NO: 3998757 - DNA, 25 bp, Homo sapien
agacctggagatgctcttgtaactg

SEQ ID NO: 3998758 - DNA, 25 bp, Homo sapien
agtgccataattggagcacggagac

SEQ ID NO: 3998759 - DNA, 25 bp, Homo sapien
gccctgtctgttggatgagagcatt

SEQ ID NO: 3998760 - DNA, 25 bp, Homo sapien
attaaccccaaagcgcagcacagtg

SEQ ID NO: 3998761 - DNA, 25 bp, Homo sapien
ggcctcagcaattaaccccaaagcg

SEQ ID NO: 3998762 - DNA, 25 bp, Homo sapien
agaggttggcctcagcaattaaccc

SEQ ID NO: 3998763 - DNA, 25 bp, Homo sapien
ggcatgtgctagatctccatttggg

SEQ ID NO: 3998764 - DNA, 25 bp, Homo sapien
ccatttgggtagaagcaaagctctc

SEQ ID NO: 3998765 - DNA, 25 bp, Homo sapien
ttttcttggcatggcaagcacttct

SEQ ID NO: 3998766 - DNA, 25 bp, Homo sapien
cagttaccactttggctggctggca

SEQ ID NO: 3998767 - DNA, 25 bp, Homo sapien
tatagggtggctttccaatggactc

SEQ ID NO: 3998768 - DNA, 25 bp, Homo sapien
ggatttgccaggacattcttgatgt

SEQ ID NO: 3998769 - DNA, 25 bp, Homo sapien
ttggtatttatagggtggctttcca

SEQ ID NO: 3998770 - DNA, 25 bp, Homo sapien
ccaaggacacaacgggatttgccag

SEQ ID NO: 3998771 - DNA, 25 bp, Homo sapien
gccggaagaagagcatccacaatac

SEQ ID NO: 3998772 - DNA, 25 bp, Homo sapien
actgtttaggattgtgctgcttggg

SEQ ID NO: 3998773 - DNA, 25 bp, Homo sapien
tcatcataagcatcagaggtgtcct

SEQ ID NO: 3998774 - DNA, 25 bp, Homo sapien
caaggacactgtttaggattgtgct

SEQ ID NO: 3998775 - DNA, 25 bp, Homo sapien
cacagtgaattagacagaagaccaa

SEQ ID NO: 3998776 - DNA, 25 bp, Homo sapien
agcctccatgaggatcatttcccaa

SEQ ID NO: 3998777 - DNA, 25 bp, Homo sapien
tcctgaatcagaggtgttggcacaa

SEQ ID NO: 3998778 - DNA, 25 bp, Homo sapien
caattcagcccgttggcatgggtgc

SEQ ID NO: 3998779 - DNA, 25 bp, Homo sapien
tgatgtggcactggccagagtcctg

SEQ ID NO: 3998780 - DNA, 25 bp, Homo sapien
catgccgctaagaggtccaggaagc

SEQ ID NO: 3998781 - DNA, 25 bp, Homo sapien
tcccatttgcatagggctgtgcaat

SEQ ID NO: 3998782 - DNA, 25 bp, Homo sapien
gttgcatcaatagtccccacctttt

SEQ ID NO: 3998783 - DNA, 25 bp, Homo sapien
caaagactttggcagtacagttggg

SEQ ID NO: 3998784 - DNA, 25 bp, Homo sapien
tgcatagggctgtgcaatgcattgt

SEQ ID NO: 3998785 - DNA, 25 bp, Homo sapien
acttctgtcactttgtgaaggcatg

SEQ ID NO: 3998786 - DNA, 25 bp, Homo sapien
cattttcagcttgtagattggggga

SEQ ID NO: 3998787 - DNA, 25 bp, Homo sapien
tgaaggcatggttgaattttggtga

SEQ ID NO: 3998788 - DNA, 25 bp, Homo sapien
tcactttgtgaaggcatggttgaat

SEQ ID NO: 3998789 - DNA, 25 bp, Homo sapien
catacctcagtaccccgtgagtatg

SEQ ID NO: 3998790 - DNA, 25 bp, Homo sapien
ttttccatacctcagtaccccgtga

SEQ ID NO: 3998791 - DNA, 25 bp, Homo sapien
ctcatagccctttgttttccatacc

SEQ ID NO: 3998792 - DNA, 25 bp, Homo sapien
cgtgagtatgtcagcatcaggccca

SEQ ID NO: 3998793 - DNA, 25 bp, Homo sapien
tgtttttgccactaccagcatttct

SEQ ID NO: 3998794 - DNA, 25 bp, Homo sapien
gatgaagtgcaaagggctgctgtga

SEQ ID NO: 3998795 - DNA, 25 bp, Homo sapien
gaattgacggctcttgagaaatgtt

SEQ ID NO: 3998796 - DNA, 25 bp, Homo sapien
ctaccagcatttctctgacaggttt

SEQ ID NO: 3998797 - DNA, 25 bp, Homo sapien
ggttctcgcactccccatatgaggg

SEQ ID NO: 3998798 - DNA, 25 bp, Homo sapien
gcacatcatgccttgcaagggcttg

SEQ ID NO: 3998799 - DNA, 25 bp, Homo sapien
gataccattgtgtcctatttcctgc

SEQ ID NO: 3998800 - DNA, 25 bp, Homo sapien
ccccggcaggaaagcctgagtttca

SEQ ID NO: 3998801 - DNA, 25 bp, Homo sapien
gagacgtttgctaaaggaatcttac

SEQ ID NO: 3998802 - DNA, 25 bp, Homo sapien
ggcacagagacgtttgctaaaggaa

SEQ ID NO: 3998803 - DNA, 25 bp, Homo sapien
aatagggcacagagacgtttgctaa

SEQ ID NO: 3998804 - DNA, 25 bp, Homo sapien
cacagagacgtttgctaaaggaatc

SEQ ID NO: 3998805 - DNA, 25 bp, Homo sapien
tgtgtttttgcttggcggttgtcag

SEQ ID NO: 3998806 - DNA, 25 bp, Homo sapien
aatgagcttggtgagaaggaacgtt

SEQ ID NO: 3998807 - DNA, 25 bp, Homo sapien
gaaggaacgttttccccatgaatca

SEQ ID NO: 3998808 - DNA, 25 bp, Homo sapien
cttggcggttgtcagagggcacctg

SEQ ID NO: 3998809 - DNA, 25 bp, Homo sapien
gactgctcacggaggctgctctcct

SEQ ID NO: 3998810 - DNA, 25 bp, Homo sapien
actgtaagccgcagtcaccagtgct

SEQ ID NO: 3998811 - DNA, 25 bp, Homo sapien
ccgaggcatcggcaagtatttgttc

SEQ ID NO: 3998812 - DNA, 25 bp, Homo sapien
gaaatctggaagtgccgactgctca

SEQ ID NO: 3998813 - DNA, 25 bp, Homo sapien
tcacttgccatctcgaaagggcccc

SEQ ID NO: 3998814 - DNA, 25 bp, Homo sapien
cttgccatctcgaaagggccccggg

SEQ ID NO: 3998815 - DNA, 25 bp, Homo sapien
tgccatctcgaaagggccccgggcc

SEQ ID NO: 3998816 - DNA, 25 bp, Homo sapien
acttgccatctcgaaagggccccgg

SEQ ID NO: 3998817 - DNA, 25 bp, Homo sapien
caatcagcccaaaattctgggttgt

SEQ ID NO: 3998818 - DNA, 25 bp, Homo sapien
gaccctatgacggtagtaactctcc

SEQ ID NO: 3998819 - DNA, 25 bp, Homo sapien
gttgtgaagccagaccctatgacgg

SEQ ID NO: 3998820 - DNA, 25 bp, Homo sapien
gtaactctcccgctagttattatca

SEQ ID NO: 3998821 - DNA, 25 bp, Homo sapien
cgctttttgtggctaggtgaggacc

SEQ ID NO: 3998822 - DNA, 25 bp, Homo sapien
tcatggaaccatgtaggaggatctt

SEQ ID NO: 3998823 - DNA, 25 bp, Homo sapien
tgccagcattctatcaccaggagag

SEQ ID NO: 3998824 - DNA, 25 bp, Homo sapien
tacacggttggctacatgcttacac

SEQ ID NO: 3998825 - DNA, 25 bp, Homo sapien
gcagcagcgttgataattgcagcca

SEQ ID NO: 3998826 - DNA, 25 bp, Homo sapien
ttagcggggagatgagtaagaacct

SEQ ID NO: 3998827 - DNA, 25 bp, Homo sapien
ctgacatccaaaagcacttagcggg

SEQ ID NO: 3998828 - DNA, 25 bp, Homo sapien
gggagatgagtaagaaccttcccat

SEQ ID NO: 3998829 - DNA, 25 bp, Homo sapien
tgtagttgatgagtgaggtccagaa

SEQ ID NO: 3998830 - DNA, 25 bp, Homo sapien
tccagaaggtgctctcaagaggctc

SEQ ID NO: 3998831 - DNA, 25 bp, Homo sapien
ttttgccatagtctggtgcactcag

SEQ ID NO: 3998832 - DNA, 25 bp, Homo sapien
ctttagactctcctggaaagagctg

SEQ ID NO: 3998833 - DNA, 25 bp, Homo sapien
tgggtgagggtgcaccaggaagctc

SEQ ID NO: 3998834 - DNA, 25 bp, Homo sapien
gagactggactcatgaagggatcca

SEQ ID NO: 3998835 - DNA, 25 bp, Homo sapien
agagcagagactggactcatgaagg

SEQ ID NO: 3998836 - DNA, 25 bp, Homo sapien
aagctccgagggaatctctgggtcc

SEQ ID NO: 3998837 - DNA, 25 bp, Homo sapien
tgatgctccagaagtatgctcctca

SEQ ID NO: 3998838 - DNA, 25 bp, Homo sapien
gatgctccagaagtatgctcctcat

SEQ ID NO: 3998839 - DNA, 25 bp, Homo sapien
tcagctgatgctccagaagtatgct

SEQ ID NO: 3998840 - DNA, 25 bp, Homo sapien
gctgatgctccagaagtatgctcct

SEQ ID NO: 3998841 - DNA, 25 bp, Homo sapien
ggttttcagctctcttgtagtggga

SEQ ID NO: 3998842 - DNA, 25 bp, Homo sapien
ggaggataagaaggttttcagctct

SEQ ID NO: 3998843 - DNA, 25 bp, Homo sapien
ctctcttgtagtgggaattggctgc

SEQ ID NO: 3998844 - DNA, 25 bp, Homo sapien
tctctttttcccgacgatggaggat

SEQ ID NO: 3998845 - DNA, 25 bp, Homo sapien
cagagacctcttgctgttgagataa

SEQ ID NO: 3998846 - DNA, 25 bp, Homo sapien
cactggatacttgtggaagatccga

SEQ ID NO: 3998847 - DNA, 25 bp, Homo sapien
tgtgccacagccgtatcttcagaga

SEQ ID NO: 3998848 - DNA, 25 bp, Homo sapien
gaagatccgaagctctgaagttcct

SEQ ID NO: 3998849 - DNA, 25 bp, Homo sapien
accatcctagcatttcacgcttcat

SEQ ID NO: 3998850 - DNA, 25 bp, Homo sapien
gaccatgtgagtcttatcttcatga

SEQ ID NO: 3998851 - DNA, 25 bp, Homo sapien
tctgaccatgtgagtcttatcttca

SEQ ID NO: 3998852 - DNA, 25 bp, Homo sapien
aggaatcattctgaccatgtgagtc

SEQ ID NO: 3998853 - DNA, 25 bp, Homo sapien
gaatcattctgaccatgtgagtctt

SEQ ID NO: 3998854 - DNA, 25 bp, Homo sapien
ttccttcccaaggatggacgtgatg

SEQ ID NO: 3998855 - DNA, 25 bp, Homo sapien
ccagatactgtgttccttcccaagg

SEQ ID NO: 3998856 - DNA, 25 bp, Homo sapien
ctccagatactgtgttccttcccaa

SEQ ID NO: 3998857 - DNA, 25 bp, Homo sapien
gtctccagatactgtgttccttccc

SEQ ID NO: 3998858 - DNA, 25 bp, Homo sapien
gaccgtcagggttgaatctccttgt

SEQ ID NO: 3998859 - DNA, 25 bp, Homo sapien
tccttggcccgttttgagggatctc

SEQ ID NO: 3998860 - DNA, 25 bp, Homo sapien
ttcctgatgtgaaaaacggatgctc

SEQ ID NO: 3998861 - DNA, 25 bp, Homo sapien
tctttaggatcacagggaccgtcag

SEQ ID NO: 3998862 - DNA, 25 bp, Homo sapien
atgatgcatgcaaatcctggaacac

SEQ ID NO: 3998863 - DNA, 25 bp, Homo sapien
catccccagtaaagtagtttaatag

SEQ ID NO: 3998864 - DNA, 25 bp, Homo sapien
gaataacatacttatctactggtgg

SEQ ID NO: 3998865 - DNA, 25 bp, Homo sapien
gaagggcccaggagtgattgctcat

SEQ ID NO: 3998866 - DNA, 25 bp, Homo sapien
tactagataacaacgaccaccattg

SEQ ID NO: 3998867 - DNA, 25 bp, Homo sapien
gataacaacgaccaccattgttatg

SEQ ID NO: 3998868 - DNA, 25 bp, Homo sapien
ctatactagataacaacgaccacca

SEQ ID NO: 3998869 - DNA, 25 bp, Homo sapien
acaacgaccaccattgttatggtat

SEQ ID NO: 3998870 - DNA, 25 bp, Homo sapien
agggagactggagctctatgtaggt

SEQ ID NO: 3998871 - DNA, 25 bp, Homo sapien
tggtgcacatccatccaggcttaga

SEQ ID NO: 3998872 - DNA, 25 bp, Homo sapien
ctatgtaggtttaagggctgtgaaa

SEQ ID NO: 3998873 - DNA, 25 bp, Homo sapien
ggactgccgggcactccctggtgca

SEQ ID NO: 3998874 - DNA, 25 bp, Homo sapien
tggatttgggacagccattatactt

SEQ ID NO: 3998875 - DNA, 25 bp, Homo sapien
agtcatcatcgttgaggaacaaggg

SEQ ID NO: 3998876 - DNA, 25 bp, Homo sapien
taaaggtaactggatttgggacagc

SEQ ID NO: 3998877 - DNA, 25 bp, Homo sapien
tactttgaggaatggtattctgctg

SEQ ID NO: 3998878 - DNA, 25 bp, Homo sapien
gaacattcttaagggggtgtctcca

SEQ ID NO: 3998879 - DNA, 25 bp, Homo sapien
cttccttctctattgtaaatctgcc

SEQ ID NO: 3998880 - DNA, 25 bp, Homo sapien
ccctttttactatgtccaggaacat

SEQ ID NO: 3998881 - DNA, 25 bp, Homo sapien
taacagtgcaaggatacagctgccc

SEQ ID NO: 3998882 - DNA, 25 bp, Homo sapien
ccattaaacagaaggtggaaccgca

SEQ ID NO: 3998883 - DNA, 25 bp, Homo sapien
gacagagtgttgaccataagcccat

SEQ ID NO: 3998884 - DNA, 25 bp, Homo sapien
aaccgcaattgtggtcaaaggctcc

SEQ ID NO: 3998885 - DNA, 25 bp, Homo sapien
gccaagtgtctcttcttcccaacag

SEQ ID NO: 3998886 - DNA, 25 bp, Homo sapien
tcacggcatgaaggtgacatgggtg

SEQ ID NO: 3998887 - DNA, 25 bp, Homo sapien
cacggcatgaaggtgacatgggtga

SEQ ID NO: 3998888 - DNA, 25 bp, Homo sapien
gtctttctacgtcaatcctcctttc

SEQ ID NO: 3998889 - DNA, 25 bp, Homo sapien
tgtctttctacgtcaatcctccttt

SEQ ID NO: 3998890 - DNA, 25 bp, Homo sapien
catgttgtctttctacgtcaatcct

SEQ ID NO: 3998891 - DNA, 25 bp, Homo sapien
tgttgtctttctacgtcaatcctcc

SEQ ID NO: 3998892 - DNA, 25 bp, Homo sapien
ttataaatcagctgatccctgagat

SEQ ID NO: 3998893 - DNA, 25 bp, Homo sapien
cattataaatcagctgatccctgag

SEQ ID NO: 3998894 - DNA, 25 bp, Homo sapien
ataaatcagctgatccctgagatac

SEQ ID NO: 3998895 - DNA, 25 bp, Homo sapien
ctctcattataaatcagctgatccc

SEQ ID NO: 3998896 - DNA, 25 bp, Homo sapien
cctggctgtgaaatgtttcggccaa

SEQ ID NO: 3998897 - DNA, 25 bp, Homo sapien
ctccccagaagatctggatgttatc

SEQ ID NO: 3998898 - DNA, 25 bp, Homo sapien
cacctggctgtgaaatgtttcggcc

SEQ ID NO: 3998899 - DNA, 25 bp, Homo sapien
ccagaagatctggatgttatccacc

SEQ ID NO: 3998900 - DNA, 25 bp, Homo sapien
ccactgcctcttggtcacgatgggt

SEQ ID NO: 3998901 - DNA, 25 bp, Homo sapien
tcttggtcacgatgggtgtctcctt

SEQ ID NO: 3998902 - DNA, 25 bp, Homo sapien
gattggcactctacacattgctgcc

SEQ ID NO: 3998903 - DNA, 25 bp, Homo sapien
tgagtctgccgcatgacctgaggtt

SEQ ID NO: 3998904 - DNA, 25 bp, Homo sapien
catcatagttagtatgtcttgccat

SEQ ID NO: 3998905 - DNA, 25 bp, Homo sapien
ttccttcaaactcatcatagttagt

SEQ ID NO: 3998906 - DNA, 25 bp, Homo sapien
caaactcatcatagttagtatgtct

SEQ ID NO: 3998907 - DNA, 25 bp, Homo sapien
ttctgacattgtttccttcaaactc

SEQ ID NO: 3998908 - DNA, 25 bp, Homo sapien
acagcaggcaatgccagatccaatt

SEQ ID NO: 3998909 - DNA, 25 bp, Homo sapien
gatccaatttggtttagccctcaac

SEQ ID NO: 3998910 - DNA, 25 bp, Homo sapien
caggcaatgccagatccaatttggt

SEQ ID NO: 3998911 - DNA, 25 bp, Homo sapien
tggtttagccctcaactgcttcagc

SEQ ID NO: 3998912 - DNA, 25 bp, Homo sapien
ctggagtaaaggatgtcatgtcata

SEQ ID NO: 3998913 - DNA, 25 bp, Homo sapien
tggagtaaaggatgtcatgtcatag

SEQ ID NO: 3998914 - DNA, 25 bp, Homo sapien
gagtaaaggatgtcatgtcatagtc

SEQ ID NO: 3998915 - DNA, 25 bp, Homo sapien
agtaaaggatgtcatgtcatagtct

SEQ ID NO: 3998916 - DNA, 25 bp, Homo sapien
tctgggaacaactgcaaggctgctg

SEQ ID NO: 3998917 - DNA, 25 bp, Homo sapien
ggcgatgcttcggtttccatggaaa

SEQ ID NO: 3998918 - DNA, 25 bp, Homo sapien
tccagcttctgggaacaactgcaag

SEQ ID NO: 3998919 - DNA, 25 bp, Homo sapien
gggccttgccaagtcgctctggaga

SEQ ID NO: 3998920 - DNA, 25 bp, Homo sapien
ctgggacgactgagtgccgtgacac

SEQ ID NO: 3998921 - DNA, 25 bp, Homo sapien
ctgtgagcacgtccaagacctgcct

SEQ ID NO: 3998922 - DNA, 25 bp, Homo sapien
ttggcggcatgagcctccactggga

SEQ ID NO: 3998923 - DNA, 25 bp, Homo sapien
cggacagcctcgtatcctgtgagca

SEQ ID NO: 3998924 - DNA, 25 bp, Homo sapien
ccttgatgggcgctaggaaatacac

SEQ ID NO: 3998925 - DNA, 25 bp, Homo sapien
taaggaatctgctccttgatgggcg

SEQ ID NO: 3998926 - DNA, 25 bp, Homo sapien
tgggcgctaggaaatacacgtacat

SEQ ID NO: 3998927 - DNA, 25 bp, Homo sapien
tctgctccttgatgggcgctaggaa

SEQ ID NO: 3998928 - DNA, 25 bp, Homo sapien
agggctgcacgcgtgaccgcggcgg

SEQ ID NO: 3998929 - DNA, 25 bp, Homo sapien
ccagggctgcacgcgtgaccgcggc

SEQ ID NO: 3998930 - DNA, 25 bp, Homo sapien
cgccgccgcccgctggaatccaggg

SEQ ID NO: 3998931 - DNA, 25 bp, Homo sapien
gccgccgcccgctggaatccagggc

SEQ ID NO: 3998932 - DNA, 25 bp, Homo sapien
ctgcccgcgaagttgcggacagtgc

SEQ ID NO: 3998933 - DNA, 25 bp, Homo sapien
tgcggacagtgcgtgagaaaccagc

SEQ ID NO: 3998934 - DNA, 25 bp, Homo sapien
cctccagcttatggtgagtgtggct

SEQ ID NO: 3998935 - DNA, 25 bp, Homo sapien
ccgagaacgtgaccgcagccgggct

SEQ ID NO: 3998936 - DNA, 25 bp, Homo sapien
gggcttgtcagctccaatcaaccaa

SEQ ID NO: 3998937 - DNA, 25 bp, Homo sapien
caggggggggcttgtcagctccaat

SEQ ID NO: 3998938 - DNA, 25 bp, Homo sapien
cagctccaatcaaccaattgtccag

SEQ ID NO: 3998939 - DNA, 25 bp, Homo sapien
tgtcagctccaatcaaccaattgtc

SEQ ID NO: 3998940 - DNA, 25 bp, Homo sapien
ttccttgctgccagggaatggtcag

SEQ ID NO: 3998941 - DNA, 25 bp, Homo sapien
tcttccccaaggatggagcagatgg

SEQ ID NO: 3998942 - DNA, 25 bp, Homo sapien
ttcttccccaaggatggagcagatg

SEQ ID NO: 3998943 - DNA, 25 bp, Homo sapien
ggcatcttccattcagccgtctcag

SEQ ID NO: 3998944 - DNA, 25 bp, Homo sapien
catcttccattcagccgtctcagcc

SEQ ID NO: 3998945 - DNA, 25 bp, Homo sapien
tgctgctcccatgcctgatgtccct

SEQ ID NO: 3998946 - DNA, 25 bp, Homo sapien
catgcctgatgtccctgtattcctc

SEQ ID NO: 3998947 - DNA, 25 bp, Homo sapien
tcccatgcctgatgtccctgtattc

SEQ ID NO: 3998948 - DNA, 25 bp, Homo sapien
tgctcccatgcctgatgtccctgta

SEQ ID NO: 3998949 - DNA, 25 bp, Homo sapien
tatgaagtgattgcctgccagtgtc

SEQ ID NO: 3998950 - DNA, 25 bp, Homo sapien
aaaaggcataattcagacgtggcag

SEQ ID NO: 3998951 - DNA, 25 bp, Homo sapien
tccactcagaggtagagacatgggc

SEQ ID NO: 3998952 - DNA, 25 bp, Homo sapien
tgccagtgtcaacagaaggattcct

SEQ ID NO: 3998953 - DNA, 25 bp, Homo sapien
cctgaaaatacaagcgaatgcctgg

SEQ ID NO: 3998954 - DNA, 25 bp, Homo sapien
gattcttacctacagggcatgcagg

SEQ ID NO: 3998955 - DNA, 25 bp, Homo sapien
taagcattccgacactcagtttggc

SEQ ID NO: 3998956 - DNA, 25 bp, Homo sapien
tggaaaagtcactgccgagtccctc

SEQ ID NO: 3998957 - DNA, 25 bp, Homo sapien
tcagaagtcctaagtgggtctaact

SEQ ID NO: 3998958 - DNA, 25 bp, Homo sapien
ccttttatagccactagaggcctcc

SEQ ID NO: 3998959 - DNA, 25 bp, Homo sapien
tggctgctgtaataaatgatcacat

SEQ ID NO: 3998960 - DNA, 25 bp, Homo sapien
ggtctaactgggctaacatcacgag

SEQ ID NO: 3998961 - DNA, 25 bp, Homo sapien
cacagccaagggaaaggtaggcaga

SEQ ID NO: 3998962 - DNA, 25 bp, Homo sapien
agtttgaacctgataaagcctctgc

SEQ ID NO: 3998963 - DNA, 25 bp, Homo sapien
cattcatctaggaaggcagacgcct

SEQ ID NO: 3998964 - DNA, 25 bp, Homo sapien
gcaagtggaaatgctcggtctgcca

SEQ ID NO: 3998965 - DNA, 25 bp, Homo sapien
ctgagtctgggatcgttaccaacag

SEQ ID NO: 3998966 - DNA, 25 bp, Homo sapien
gggatcgttaccaacagtgcctggt

SEQ ID NO: 3998967 - DNA, 25 bp, Homo sapien
tctgggatcgttaccaacagtgcct

SEQ ID NO: 3998968 - DNA, 25 bp, Homo sapien
gagtctgggatcgttaccaacagtg

SEQ ID NO: 3998969 - DNA, 25 bp, Homo sapien
cagtggagtctggtcatcagtcttc

SEQ ID NO: 3998970 - DNA, 25 bp, Homo sapien
ccacagttagtgagagagttgcctt

SEQ ID NO: 3998971 - DNA, 25 bp, Homo sapien
gagttgccttgtctatctcctggcg

SEQ ID NO: 3998972 - DNA, 25 bp, Homo sapien
ctgtgacaaatatgaaggtaggccc

SEQ ID NO: 3998973 - DNA, 25 bp, Homo sapien
gcatggctattttgcgatttgccat

SEQ ID NO: 3998974 - DNA, 25 bp, Homo sapien
ggacgtgtctgatttgtgcatggct

SEQ ID NO: 3998975 - DNA, 25 bp, Homo sapien
tgtgcatggctattttgcgatttgc

SEQ ID NO: 3998976 - DNA, 25 bp, Homo sapien
cgtgtctgatttgtgcatggctatt

SEQ ID NO: 3998977 - DNA, 25 bp, Homo sapien
ggagcactaagtgtccaaccctgat

SEQ ID NO: 3998978 - DNA, 25 bp, Homo sapien
tggactgcacttcgtaagccacctt

SEQ ID NO: 3998979 - DNA, 25 bp, Homo sapien
ttcgttgaaggacggcctggactgc

SEQ ID NO: 3998980 - DNA, 25 bp, Homo sapien
taattcatgattcatatcaacagag

SEQ ID NO: 3998981 - DNA, 25 bp, Homo sapien
gggtgtaggcctctgggtctccatc

SEQ ID NO: 3998982 - DNA, 25 bp, Homo sapien
ggtgtaggcctctgggtctccatcc

SEQ ID NO: 3998983 - DNA, 25 bp, Homo sapien
gtgggtgtaggcctctgggtctcca

SEQ ID NO: 3998984 - DNA, 25 bp, Homo sapien
tcagtgggtgtaggcctctgggtct

SEQ ID NO: 3998985 - DNA, 25 bp, Homo sapien
ctcatactgaaccaagtcgttagca

SEQ ID NO: 3998986 - DNA, 25 bp, Homo sapien
tcctcatactgaaccaagtcgttag

SEQ ID NO: 3998987 - DNA, 25 bp, Homo sapien
tcatactgaaccaagtcgttagcat

SEQ ID NO: 3998988 - DNA, 25 bp, Homo sapien
gtcctcatactgaaccaagtcgtta

SEQ ID NO: 3998989 - DNA, 25 bp, Homo sapien
tcttgtttgatttctcaaagcccat

SEQ ID NO: 3998990 - DNA, 25 bp, Homo sapien
aatcttgtttgatttctcaaagccc

SEQ ID NO: 3998991 - DNA, 25 bp, Homo sapien
gaatcttgtttgatttctcaaagcc

SEQ ID NO: 3998992 - DNA, 25 bp, Homo sapien
ctgaatcttgtttgatttctcaaag

SEQ ID NO: 3998993 - DNA, 25 bp, Homo sapien
ggatccaagctgtgttctaactatg

SEQ ID NO: 3998994 - DNA, 25 bp, Homo sapien
tatatcaccccgaaaacagcaaaca

SEQ ID NO: 3998995 - DNA, 25 bp, Homo sapien
gcttacgtagcctgaagcacctttc

SEQ ID NO: 3998996 - DNA, 25 bp, Homo sapien
atttgttgaattcccatgggtctgg

SEQ ID NO: 3998997 - DNA, 25 bp, Homo sapien
cggcggggccttggacttgtctgaa

SEQ ID NO: 3998998 - DNA, 25 bp, Homo sapien
agacacaatgctggtctgaagaatg

SEQ ID NO: 3998999 - DNA, 25 bp, Homo sapien
ggtctgaagaatgtgatgcttgcaa

SEQ ID NO: 3999000 - DNA, 25 bp, Homo sapien
tgcttgcaactgtccggcggggcct

SEQ ID NO: 3999001 - DNA, 25 bp, Homo sapien
tcacttgcaatcgtgtagggagagt

SEQ ID NO: 3999002 - DNA, 25 bp, Homo sapien
gacagcggggagatacaacgtcctc

SEQ ID NO: 3999003 - DNA, 25 bp, Homo sapien
gagatacaacgtcctcatcttctgc

SEQ ID NO: 3999004 - DNA, 25 bp, Homo sapien
gatgtcacttgcaatcgtgtaggga

SEQ ID NO: 3999005 - DNA, 25 bp, Homo sapien
cgtagaaaaactcgaagtactggag

SEQ ID NO: 3999006 - DNA, 25 bp, Homo sapien
ctcgaagtactggagacctgacccc

SEQ ID NO: 3999007 - DNA, 25 bp, Homo sapien
tataaaggaataattctgatcgtag

SEQ ID NO: 3999008 - DNA, 25 bp, Homo sapien
gatgtttagagctaggtttatctgt

SEQ ID NO: 3999009 - DNA, 25 bp, Homo sapien
ggttgatgagcgtgagagtaggaga

SEQ ID NO: 3999010 - DNA, 25 bp, Homo sapien
aggaggagagttggatcttctttcc

SEQ ID NO: 3999011 - DNA, 25 bp, Homo sapien
tgagcgtgagagtaggagacaggag

SEQ ID NO: 3999012 - DNA, 25 bp, Homo sapien
gcgtgagagtaggagacaggaggag

SEQ ID NO: 3999013 - DNA, 25 bp, Homo sapien
tgttcgtaaacctggctggcaacct

SEQ ID NO: 3999014 - DNA, 25 bp, Homo sapien
tggcaacctttctctgatgttattg

SEQ ID NO: 3999015 - DNA, 25 bp, Homo sapien
tgttattgtctatttcagacaacgc

SEQ ID NO: 3999016 - DNA, 25 bp, Homo sapien
cgcaaagaggtgtatgaaaccagaa

SEQ ID NO: 3999017 - DNA, 25 bp, Homo sapien
agggggccctggagtccgcatcagg

SEQ ID NO: 3999018 - DNA, 25 bp, Homo sapien
gggccctggagtccgcatcaggaca

SEQ ID NO: 3999019 - DNA, 25 bp, Homo sapien
ctggagtccgcatcaggacactgag

SEQ ID NO: 3999020 - DNA, 25 bp, Homo sapien
ccctggagtccgcatcaggacactg

SEQ ID NO: 3999021 - DNA, 25 bp, Homo sapien
agaaacttgttgttcaggctctgca

SEQ ID NO: 3999022 - DNA, 25 bp, Homo sapien
tcagtttagaaacttgttgttcagg

SEQ ID NO: 3999023 - DNA, 25 bp, Homo sapien
ccccatctcaacctgaggtcctgca

SEQ ID NO: 3999024 - DNA, 25 bp, Homo sapien
cccccatctcaacctgaggtcctgc

SEQ ID NO: 3999025 - DNA, 25 bp, Homo sapien
gctgctgcaacgagcttctaattgg

SEQ ID NO: 3999026 - DNA, 25 bp, Homo sapien
caacgagcttctaattggcatttct

SEQ ID NO: 3999027 - DNA, 25 bp, Homo sapien
ccaggctgctgcaacgagcttctaa

SEQ ID NO: 3999028 - DNA, 25 bp, Homo sapien
gctgcaacgagcttctaattggcat

SEQ ID NO: 3999029 - DNA, 25 bp, Homo sapien
atcttggcaatgtttagagtccgcc

SEQ ID NO: 3999030 - DNA, 25 bp, Homo sapien
cttggcaatgtttagagtccgccat

SEQ ID NO: 3999031 - DNA, 25 bp, Homo sapien
tcttggcaatgtttagagtccgcca

SEQ ID NO: 3999032 - DNA, 25 bp, Homo sapien
ccttctctcccactgtctccatctc

SEQ ID NO: 3999033 - DNA, 25 bp, Homo sapien
ctccttctctcccactgtctccatc

SEQ ID NO: 3999034 - DNA, 25 bp, Homo sapien
ctctccttctctcccactgtctcca

SEQ ID NO: 3999035 - DNA, 25 bp, Homo sapien
tctcccactgtctccatctctctca

SEQ ID NO: 3999036 - DNA, 25 bp, Homo sapien
gccctcttcaggtaacctgttctga

SEQ ID NO: 3999037 - DNA, 25 bp, Homo sapien
ttcaggtaacctgttctgacatatc

SEQ ID NO: 3999038 - DNA, 25 bp, Homo sapien
cctcttcaggtaacctgttctgaca

SEQ ID NO: 3999039 - DNA, 25 bp, Homo sapien
aagccctcttcaggtaacctgttct

SEQ ID NO: 3999040 - DNA, 25 bp, Homo sapien
gtccccagtcctgtgtaggctcctt

SEQ ID NO: 3999041 - DNA, 25 bp, Homo sapien
gaatttggggctgtccccagtcctg

SEQ ID NO: 3999042 - DNA, 25 bp, Homo sapien
cccagtcctgtgtaggctcctttcc

SEQ ID NO: 3999043 - DNA, 25 bp, Homo sapien
gtcctgtgtaggctcctttccttct

SEQ ID NO: 3999044 - DNA, 25 bp, Homo sapien
ctgttcactgtactctgtgacatca

SEQ ID NO: 3999045 - DNA, 25 bp, Homo sapien
catgaagttcccattgacctctccc

SEQ ID NO: 3999046 - DNA, 25 bp, Homo sapien
cctgttcactgtactctgtgacatc

SEQ ID NO: 3999047 - DNA, 25 bp, Homo sapien
gttcagcatcacatatgtccgcgga

SEQ ID NO: 3999048 - DNA, 25 bp, Homo sapien
gcggacctgtttttcagctcagcag

SEQ ID NO: 3999049 - DNA, 25 bp, Homo sapien
cgcggacctgtttttcagctcagca

SEQ ID NO: 3999050 - DNA, 25 bp, Homo sapien
gcatcacatatgtccgcggacctgt

SEQ ID NO: 3999051 - DNA, 25 bp, Homo sapien
ggtggcattgtccaaagactctctg

SEQ ID NO: 3999052 - DNA, 25 bp, Homo sapien
ggataagctgcatcgtcccagaatc

SEQ ID NO: 3999053 - DNA, 25 bp, Homo sapien
gactctctgttggtccgtggcctga

SEQ ID NO: 3999054 - DNA, 25 bp, Homo sapien
ctacaggcagtctgcagggtggcat

SEQ ID NO: 3999055 - DNA, 25 bp, Homo sapien
aaagagtcactgtgctaatgaggcc

SEQ ID NO: 3999056 - DNA, 25 bp, Homo sapien
agctgccgatatttgaaagagtcac

SEQ ID NO: 3999057 - DNA, 25 bp, Homo sapien
gatgcttgctggtaagctgccgata

SEQ ID NO: 3999058 - DNA, 25 bp, Homo sapien
cagttcacacctgtacctaaaccaa

SEQ ID NO: 3999059 - DNA, 25 bp, Homo sapien
tcaataattcagtgtcaaatacata

SEQ ID NO: 3999060 - DNA, 25 bp, Homo sapien
caataattcagtgtcaaatacatac

SEQ ID NO: 3999061 - DNA, 25 bp, Homo sapien
gaaagcagcctcttaatatccatct

SEQ ID NO: 3999062 - DNA, 25 bp, Homo sapien
tgccttgtagatttttagataacgt

SEQ ID NO: 3999063 - DNA, 25 bp, Homo sapien
gctttgccttgtagatttttagata

SEQ ID NO: 3999064 - DNA, 25 bp, Homo sapien
atactgaaagcagcctcttaatatc

SEQ ID NO: 3999065 - DNA, 25 bp, Homo sapien
aatgaagctggtgatccagtgtgtg

SEQ ID NO: 3999066 - DNA, 25 bp, Homo sapien
tcacacatgtccaatgactggaatg

SEQ ID NO: 3999067 - DNA, 25 bp, Homo sapien
tccaatgactggaatgaagctggtg

SEQ ID NO: 3999068 - DNA, 25 bp, Homo sapien
tgactggaatgaagctggtgatcca

SEQ ID NO: 3999069 - DNA, 25 bp, Homo sapien
gaccccagcgtcatcgtcactctca

SEQ ID NO: 3999070 - DNA, 25 bp, Homo sapien
agaccccagcgtcatcgtcactctc

SEQ ID NO: 3999071 - DNA, 25 bp, Homo sapien
aagaccccagcgtcatcgtcactct

SEQ ID NO: 3999072 - DNA, 25 bp, Homo sapien
ccaagaccccagcgtcatcgtcact

SEQ ID NO: 3999073 - DNA, 25 bp, Homo sapien
cctgaacatttcgcaaacctttcat

SEQ ID NO: 3999074 - DNA, 25 bp, Homo sapien
tggcccctgaacatttcgcaaacct

SEQ ID NO: 3999075 - DNA, 25 bp, Homo sapien
ccctgaacatttcgcaaacctttca

SEQ ID NO: 3999076 - DNA, 25 bp, Homo sapien
gaggactatcttccctacagagccg

SEQ ID NO: 3999077 - DNA, 25 bp, Homo sapien
gatttagctccaaagctacctggta

SEQ ID NO: 3999078 - DNA, 25 bp, Homo sapien
tgctaacggaggaggaggacactta

SEQ ID NO: 3999079 - DNA, 25 bp, Homo sapien
gacacttagaatcttgaggactatc

SEQ ID NO: 3999080 - DNA, 25 bp, Homo sapien
atccacatctcagggaccttctttg

SEQ ID NO: 3999081 - DNA, 25 bp, Homo sapien
ctggaggctgtgctccaaatgctcg

SEQ ID NO: 3999082 - DNA, 25 bp, Homo sapien
tctttgtgctcgttttaaacttatc

SEQ ID NO: 3999083 - DNA, 25 bp, Homo sapien
tgtgctccaaatgctcgtctttcat

SEQ ID NO: 3999084 - DNA, 25 bp, Homo sapien
aaggtgctaaatttgtccaatatga

SEQ ID NO: 3999085 - DNA, 25 bp, Homo sapien
gttcggagacttaggcaaggtgcta

SEQ ID NO: 3999086 - DNA, 25 bp, Homo sapien
cactggctcacgcatttgtgtgcca

SEQ ID NO: 3999087 - DNA, 25 bp, Homo sapien
acctgctcgtatgtcatctgttggc

SEQ ID NO: 3999088 - DNA, 25 bp, Homo sapien
cagcggtgcatgtgaacacatgtgc

SEQ ID NO: 3999089 - DNA, 25 bp, Homo sapien
ttccccagcggtgcatgtgaacaca

SEQ ID NO: 3999090 - DNA, 25 bp, Homo sapien
cccagcggtgcatgtgaacacatgt

SEQ ID NO: 3999091 - DNA, 25 bp, Homo sapien
gcggtgcatgtgaacacatgtgcgt

SEQ ID NO: 3999092 - DNA, 25 bp, Homo sapien
gccaaagttccacctcgatgcaggt

SEQ ID NO: 3999093 - DNA, 25 bp, Homo sapien
aagccaaagttccacctcgatgcag

SEQ ID NO: 3999094 - DNA, 25 bp, Homo sapien
gaaagccaaagttccacctcgatgc

SEQ ID NO: 3999095 - DNA, 25 bp, Homo sapien
gtgaaagccaaagttccacctcgat

SEQ ID NO: 3999096 - DNA, 25 bp, Homo sapien
gtgtcttggtcaccccctcacacag

SEQ ID NO: 3999097 - DNA, 25 bp, Homo sapien
cttggtcaccccctcacacaggctc

SEQ ID NO: 3999098 - DNA, 25 bp, Homo sapien
ggctctctgaagttgtttccgtcat

SEQ ID NO: 3999099 - DNA, 25 bp, Homo sapien
acaggctctctgaagttgtttccgt

SEQ ID NO: 3999100 - DNA, 25 bp, Homo sapien
tatggaccatttgatcaaatcctgg

SEQ ID NO: 3999101 - DNA, 25 bp, Homo sapien
ggacaacttatggtctagagatggc

SEQ ID NO: 3999102 - DNA, 25 bp, Homo sapien
aattgtctgttgcacattcctcacc

SEQ ID NO: 3999103 - DNA, 25 bp, Homo sapien
tgttaagtataggaactctgggtcc

SEQ ID NO: 3999104 - DNA, 25 bp, Homo sapien
cactgcagattccacgagggcagag

SEQ ID NO: 3999105 - DNA, 25 bp, Homo sapien
tagggcacgggtttaatagctgtct

SEQ ID NO: 3999106 - DNA, 25 bp, Homo sapien
ggctggtcgatcatcctctcctagg

SEQ ID NO: 3999107 - DNA, 25 bp, Homo sapien
tcaactgcctttgtagcgtgaaagc

SEQ ID NO: 3999108 - DNA, 25 bp, Homo sapien
atgcatgctgcagggattcagaggg

SEQ ID NO: 3999109 - DNA, 25 bp, Homo sapien
ctccttcatagagcccatttttctg

SEQ ID NO: 3999110 - DNA, 25 bp, Homo sapien
atgctgcagggattcagagggagaa

SEQ ID NO: 3999111 - DNA, 25 bp, Homo sapien
gcatgctgcagggattcagagggag

SEQ ID NO: 3999112 - DNA, 25 bp, Homo sapien
taatgaaacgacatgcacagatgca

SEQ ID NO: 3999113 - DNA, 25 bp, Homo sapien
ataatgaaacgacatgcacagatgc

SEQ ID NO: 3999114 - DNA, 25 bp, Homo sapien
aataatgaaacgacatgcacagatg

SEQ ID NO: 3999115 - DNA, 25 bp, Homo sapien
gattcttattacttaaacctgccca

SEQ ID NO: 3999116 - DNA, 25 bp, Homo sapien
ctgtggagcttagcagtgcttcgga

SEQ ID NO: 3999117 - DNA, 25 bp, Homo sapien
aaaagggaccgctttgcaaattctg

SEQ ID NO: 3999118 - DNA, 25 bp, Homo sapien
cttagcagtgcttcggatacaggga

SEQ ID NO: 3999119 - DNA, 25 bp, Homo sapien
tgctcggtcaatttttggataagtc

SEQ ID NO: 3999120 - DNA, 25 bp, Homo sapien
tcggtcaatttttggataagtctga

SEQ ID NO: 3999121 - DNA, 25 bp, Homo sapien
ctatgctcggtcaatttttggataa

SEQ ID NO: 3999122 - DNA, 25 bp, Homo sapien
tatgctcggtcaatttttggataag

SEQ ID NO: 3999123 - DNA, 25 bp, Homo sapien
ttgttcggccttccgcaagctgcag

SEQ ID NO: 3999124 - DNA, 25 bp, Homo sapien
ccatgatccctgtaggaggcacgtc

SEQ ID NO: 3999125 - DNA, 25 bp, Homo sapien
tatctgaccaacattttgttcggcc

SEQ ID NO: 3999126 - DNA, 25 bp, Homo sapien
gtcaagtatgtcttcctacacaggg

SEQ ID NO: 3999127 - DNA, 25 bp, Homo sapien
gaattactgactaccgttccaggca

SEQ ID NO: 3999128 - DNA, 25 bp, Homo sapien
taaggacccgttttatgagcatagt

SEQ ID NO: 3999129 - DNA, 25 bp, Homo sapien
tattcgaagacctcccaattaagga

SEQ ID NO: 3999130 - DNA, 25 bp, Homo sapien
gatgaatgataatgtggaccccggt

SEQ ID NO: 3999131 - DNA, 25 bp, Homo sapien
gggcagaatttccattgacagcctg

SEQ ID NO: 3999132 - DNA, 25 bp, Homo sapien
ggcagaatttccattgacagcctga

SEQ ID NO: 3999133 - DNA, 25 bp, Homo sapien
tcttctgtatggtcccctttgctga

SEQ ID NO: 3999134 - DNA, 25 bp, Homo sapien
tctgcaaagaagatgtaagtactag

SEQ ID NO: 3999135 - DNA, 25 bp, Homo sapien
tggatttattgtggttagctgaatg

SEQ ID NO: 3999136 - DNA, 25 bp, Homo sapien
tgtggttagctgaatgtgtaagtac

SEQ ID NO: 3999137 - DNA, 25 bp, Homo sapien
tgtaagtacaggtcttccatttgta

SEQ ID NO: 3999138 - DNA, 25 bp, Homo sapien
tagcagtatgccttggagccttctc

SEQ ID NO: 3999139 - DNA, 25 bp, Homo sapien
gccaagatatgcatggtaaaagcca

SEQ ID NO: 3999140 - DNA, 25 bp, Homo sapien
gcacagttagtatctgatccctcaa

SEQ ID NO: 3999141 - DNA, 25 bp, Homo sapien
tataggcttatacggcaagtagcag

SEQ ID NO: 3999142 - DNA, 25 bp, Homo sapien
aaagccggcttttcagtcacctcaa

SEQ ID NO: 3999143 - DNA, 25 bp, Homo sapien
gaagccaactcccagtttcccgatg

SEQ ID NO: 3999144 - DNA, 25 bp, Homo sapien
tgatgacacgctgagtccctgacct

SEQ ID NO: 3999145 - DNA, 25 bp, Homo sapien
tcgtggaaggtcacatgtgatgcca

SEQ ID NO: 3999146 - DNA, 25 bp, Homo sapien
tttggtcacagaggagaccaggtga

SEQ ID NO: 3999147 - DNA, 25 bp, Homo sapien
cactgactacccaagcaattggagt

SEQ ID NO: 3999148 - DNA, 25 bp, Homo sapien
gttcactgactacccaagcaattgg

SEQ ID NO: 3999149 - DNA, 25 bp, Homo sapien
tgttcactgactacccaagcaattg

SEQ ID NO: 3999150 - DNA, 25 bp, Homo sapien
tcactgactacccaagcaattggag

SEQ ID NO: 3999151 - DNA, 25 bp, Homo sapien
cgtcaattaatcttaggcatgacag

SEQ ID NO: 3999152 - DNA, 25 bp, Homo sapien
aactggagggtcgtcaattaatctt

SEQ ID NO: 3999153 - DNA, 25 bp, Homo sapien
ttgcatcctgatccgaatacatctg

SEQ ID NO: 3999154 - DNA, 25 bp, Homo sapien
agagaattcccatttctgataccag

SEQ ID NO: 3999155 - DNA, 25 bp, Homo sapien
gtcttgcacgatggtttcaaaatta

SEQ ID NO: 3999156 - DNA, 25 bp, Homo sapien
caaaattatcctcctgcactttctg

SEQ ID NO: 3999157 - DNA, 25 bp, Homo sapien
gggccttaatacttgtggtgatgat

SEQ ID NO: 3999158 - DNA, 25 bp, Homo sapien
tcccttcatggccaagatttttcca

SEQ ID NO: 3999159 - DNA, 25 bp, Homo sapien
aatttgggctggtgtagttgagtac

SEQ ID NO: 3999160 - DNA, 25 bp, Homo sapien
cacttctcctgagcaagagcgtgag

SEQ ID NO: 3999161 - DNA, 25 bp, Homo sapien
agtatgtgatgttagagtttggaga

SEQ ID NO: 3999162 - DNA, 25 bp, Homo sapien
agagcgtgagctgagccatgaagca

SEQ ID NO: 3999163 - DNA, 25 bp, Homo sapien
cagaggctctcataaggataaaggc

SEQ ID NO: 3999164 - DNA, 25 bp, Homo sapien
tagggacgtgtggatgcacacagca

SEQ ID NO: 3999165 - DNA, 25 bp, Homo sapien
tgctgcctctgtagggtagggacgt

SEQ ID NO: 3999166 - DNA, 25 bp, Homo sapien
taatggttgccactccgagctgctg

SEQ ID NO: 3999167 - DNA, 25 bp, Homo sapien
atagttccagcagaaacagctgagc

SEQ ID NO: 3999168 - DNA, 25 bp, Homo sapien
gagcttgagccagtttggtgctaca

SEQ ID NO: 3999169 - DNA, 25 bp, Homo sapien
cagcagaaacagctgagcttgagcc

SEQ ID NO: 3999170 - DNA, 25 bp, Homo sapien
tggtgctacattccaagaggctcac

SEQ ID NO: 3999171 - DNA, 25 bp, Homo sapien
ttctatttttctccagcgctcaggg

SEQ ID NO: 3999172 - DNA, 25 bp, Homo sapien
catgcccagtagtaggatccaggtt

SEQ ID NO: 3999173 - DNA, 25 bp, Homo sapien
cagtagtaggatccaggttgtttcc

SEQ ID NO: 3999174 - DNA, 25 bp, Homo sapien
ttttctccagcgctcagggacatct

SEQ ID NO: 3999175 - DNA, 25 bp, Homo sapien
gtttgctgtgtctgtagacttctaa

SEQ ID NO: 3999176 - DNA, 25 bp, Homo sapien
ggtgatcgtctcttctcgagatttc

SEQ ID NO: 3999177 - DNA, 25 bp, Homo sapien
ttcctggtgatcgtctcttctcgag

SEQ ID NO: 3999178 - DNA, 25 bp, Homo sapien
cctggtgatcgtctcttctcgagat

SEQ ID NO: 3999179 - DNA, 25 bp, Homo sapien
tctggactgtgcacttttctgctct

SEQ ID NO: 3999180 - DNA, 25 bp, Homo sapien
gttaccagcactgtgatcactgcca

SEQ ID NO: 3999181 - DNA, 25 bp, Homo sapien
gaaactccctgctaaggatgctgtt

SEQ ID NO: 3999182 - DNA, 25 bp, Homo sapien
cattaggatccctgggtagaaactc

SEQ ID NO: 3999183 - DNA, 25 bp, Homo sapien
gatgaaggtaccattaggatccctg

SEQ ID NO: 3999184 - DNA, 25 bp, Homo sapien
cggccgggaccacagtcttaagacg

SEQ ID NO: 3999185 - DNA, 25 bp, Homo sapien
taagtctgtaaacttcattggcctg

SEQ ID NO: 3999186 - DNA, 25 bp, Homo sapien
taccatcttttgtaagtctgtaaac

SEQ ID NO: 3999187 - DNA, 25 bp, Homo sapien
cacagtcttaagacgctggctctgc

SEQ ID NO: 3999188 - DNA, 25 bp, Homo sapien
tgagctcagcaactctgggaattgg

SEQ ID NO: 3999189 - DNA, 25 bp, Homo sapien
catgccaccgttagctgtgagctca

SEQ ID NO: 3999190 - DNA, 25 bp, Homo sapien
taacattctttggatggcgtctcct

SEQ ID NO: 3999191 - DNA, 25 bp, Homo sapien
gaacagttgcccctccttgagactc

SEQ ID NO: 3999192 - DNA, 25 bp, Homo sapien
tccactgagtctctactcggtggct

SEQ ID NO: 3999193 - DNA, 25 bp, Homo sapien
atttccactgagtctctactcggtg

SEQ ID NO: 3999194 - DNA, 25 bp, Homo sapien
cttgacacaatggaagggcagattt

SEQ ID NO: 3999195 - DNA, 25 bp, Homo sapien
tggaagggcagatttccactgagtc

SEQ ID NO: 3999196 - DNA, 25 bp, Homo sapien
caaagacttccactgagactctgcg

SEQ ID NO: 3999197 - DNA, 25 bp, Homo sapien
tcaaagacttccactgagactctgc

SEQ ID NO: 3999198 - DNA, 25 bp, Homo sapien
agacttccactgagactctgcgcac

SEQ ID NO: 3999199 - DNA, 25 bp, Homo sapien
aaagacttccactgagactctgcgc

SEQ ID NO: 3999200 - DNA, 25 bp, Homo sapien
agatctttccgcctgcattttgggc

SEQ ID NO: 3999201 - DNA, 25 bp, Homo sapien
gatgccctcccggtctggaagattt

SEQ ID NO: 3999202 - DNA, 25 bp, Homo sapien
tattgggttggcctgattcaagcct

SEQ ID NO: 3999203 - DNA, 25 bp, Homo sapien
gactctgacatgtggctcagtttgg

SEQ ID NO: 3999204 - DNA, 25 bp, Homo sapien
cgaagcatcttagaagggttagaat

SEQ ID NO: 3999205 - DNA, 25 bp, Homo sapien
cacttagtaagacacgttttctgaa

SEQ ID NO: 3999206 - DNA, 25 bp, Homo sapien
ttttctgaagtgtcactacagagtc

SEQ ID NO: 3999207 - DNA, 25 bp, Homo sapien
gtcactacagagtctaccctggcag

SEQ ID NO: 3999208 - DNA, 25 bp, Homo sapien
catggtgtccccagaacccatgtta

SEQ ID NO: 3999209 - DNA, 25 bp, Homo sapien
tccccagaacccatgttagtggcat

SEQ ID NO: 3999210 - DNA, 25 bp, Homo sapien
gtgtccccagaacccatgttagtgg

SEQ ID NO: 3999211 - DNA, 25 bp, Homo sapien
tggtgtccccagaacccatgttagt

SEQ ID NO: 3999212 - DNA, 25 bp, Homo sapien
tcttctctctcagtgcgttggtcat

SEQ ID NO: 3999213 - DNA, 25 bp, Homo sapien
tggttcttctctctcagtgcgttgg

SEQ ID NO: 3999214 - DNA, 25 bp, Homo sapien
tgccaaggtggttcttctctctcag

SEQ ID NO: 3999215 - DNA, 25 bp, Homo sapien
ttctgccaaggtggttcttctctct

SEQ ID NO: 3999216 - DNA, 25 bp, Homo sapien
gcagcccagaagttgcataagcatt

SEQ ID NO: 3999217 - DNA, 25 bp, Homo sapien
tgaaagggtagttaagtatcgctga

SEQ ID NO: 3999218 - DNA, 25 bp, Homo sapien
tttctgtgggtgttgccgaagtcct

SEQ ID NO: 3999219 - DNA, 25 bp, Homo sapien
gttggcggctgtctgacgttcagaa

SEQ ID NO: 3999220 - DNA, 25 bp, Homo sapien
tgtgaaaaatttcagacggttccat

SEQ ID NO: 3999221 - DNA, 25 bp, Homo sapien
ttccacgaaagtctgtaagcttgat

SEQ ID NO: 3999222 - DNA, 25 bp, Homo sapien
tacactgtggattgttctaggctct

SEQ ID NO: 3999223 - DNA, 25 bp, Homo sapien
taagcttgatgaggataaaagccat

SEQ ID NO: 3999224 - DNA, 25 bp, Homo sapien
ctggatgttcttgtagcctacactg

SEQ ID NO: 3999225 - DNA, 25 bp, Homo sapien
ggctgagggcctgagaaccacagca

SEQ ID NO: 3999226 - DNA, 25 bp, Homo sapien
caaaaggcttcttcgaaaattgtca

SEQ ID NO: 3999227 - DNA, 25 bp, Homo sapien
ccgttgataatgtgagctgctgctc

SEQ ID NO: 3999228 - DNA, 25 bp, Homo sapien
tgtcagaggctcttgccgttgataa

SEQ ID NO: 3999229 - DNA, 25 bp, Homo sapien
gggggtgacggtgggcatccttcca

SEQ ID NO: 3999230 - DNA, 25 bp, Homo sapien
gagaagggcacatttgaaacctagg

SEQ ID NO: 3999231 - DNA, 25 bp, Homo sapien
acatttgaaacctaggagaccattc

SEQ ID NO: 3999232 - DNA, 25 bp, Homo sapien
gggcacatttgaaacctaggagacc

SEQ ID NO: 3999233 - DNA, 25 bp, Homo sapien
tcagctctaagaaatttctttacag

SEQ ID NO: 3999234 - DNA, 25 bp, Homo sapien
agctgttactttatcctggcctgtc

SEQ ID NO: 3999235 - DNA, 25 bp, Homo sapien
tgtgagtgcaaatctctgatattcc

SEQ ID NO: 3999236 - DNA, 25 bp, Homo sapien
tcactcagatcataatcagggagcc

SEQ ID NO: 3999237 - DNA, 25 bp, Homo sapien
gcattgaacgcagtccataactcac

SEQ ID NO: 3999238 - DNA, 25 bp, Homo sapien
caacaaagcattgaacgcagtccat

SEQ ID NO: 3999239 - DNA, 25 bp, Homo sapien
caaagcattgaacgcagtccataac

SEQ ID NO: 3999240 - DNA, 25 bp, Homo sapien
tcaacaaagcattgaacgcagtcca

SEQ ID NO: 3999241 - DNA, 25 bp, Homo sapien
tgctgatgaacacgaaatccaccag

SEQ ID NO: 3999242 - DNA, 25 bp, Homo sapien
tcccaaagcccagataactgcaaag

SEQ ID NO: 3999243 - DNA, 25 bp, Homo sapien
caatttagtaggacacagaatcaga

SEQ ID NO: 3999244 - DNA, 25 bp, Homo sapien
ttaccagacccatcacccaatttag

SEQ ID NO: 3999245 - DNA, 25 bp, Homo sapien
tttgagagtcactgtgatcaaccca

SEQ ID NO: 3999246 - DNA, 25 bp, Homo sapien
ttggcagtccagcttttgagagtca

SEQ ID NO: 3999247 - DNA, 25 bp, Homo sapien
gagtcactgtgatcaacccagcaat

SEQ ID NO: 3999248 - DNA, 25 bp, Homo sapien
tgttggcagcatcccctcgccttgg

SEQ ID NO: 3999249 - DNA, 25 bp, Homo sapien
gcagtgtccaccatggcacgtgacc

SEQ ID NO: 3999250 - DNA, 25 bp, Homo sapien
agagggcgtgagtggaaactctgaa

SEQ ID NO: 3999251 - DNA, 25 bp, Homo sapien
ggcgtgagtggaaactctgaatgca

SEQ ID NO: 3999252 - DNA, 25 bp, Homo sapien
accatggcacgtgaccctggtttct

SEQ ID NO: 3999253 - DNA, 25 bp, Homo sapien
ctcaattctgttaccgttccttctt

SEQ ID NO: 3999254 - DNA, 25 bp, Homo sapien
cattggttgcaagggttttggtagc

SEQ ID NO: 3999255 - DNA, 25 bp, Homo sapien
tctttggcctctcagatctcccgag

SEQ ID NO: 3999256 - DNA, 25 bp, Homo sapien
gatctcccgagtccccttgatgaaa

SEQ ID NO: 3999257 - DNA, 25 bp, Homo sapien
cacaaggcagccattagcatcagct

SEQ ID NO: 3999258 - DNA, 25 bp, Homo sapien
gattaatacttttgcactcgcggtg

SEQ ID NO: 3999259 - DNA, 25 bp, Homo sapien
taggcattatgcttgctgcgtgggt

SEQ ID NO: 3999260 - DNA, 25 bp, Homo sapien
gcttggctgtcatctttgctaaagg

SEQ ID NO: 3999261 - DNA, 25 bp, Homo sapien
tttcctttgaatgctcaggatggtg

SEQ ID NO: 3999262 - DNA, 25 bp, Homo sapien
ttcctttgaatgctcaggatggtgg

SEQ ID NO: 3999263 - DNA, 25 bp, Homo sapien
aatttcctttgaatgctcaggatgg

SEQ ID NO: 3999264 - DNA, 25 bp, Homo sapien
tcctttgaatgctcaggatggtggg

SEQ ID NO: 3999265 - DNA, 25 bp, Homo sapien
ggaactgcgtttccttgctcgcgaa

SEQ ID NO: 3999266 - DNA, 25 bp, Homo sapien
cactgtctgcttggcacgtggaact

SEQ ID NO: 3999267 - DNA, 25 bp, Homo sapien
tgctcgcgaatcctcatgtgatacg

SEQ ID NO: 3999268 - DNA, 25 bp, Homo sapien
tggatggagacacagccgcatttcc

SEQ ID NO: 3999269 - DNA, 25 bp, Homo sapien
ttctgaatccatatatagacgcagg

SEQ ID NO: 3999270 - DNA, 25 bp, Homo sapien
cggtcccttgacgttgtagcttgac

SEQ ID NO: 3999271 - DNA, 25 bp, Homo sapien
gaatccatatatagacgcagggaca

SEQ ID NO: 3999272 - DNA, 25 bp, Homo sapien
agcttgacttgctgaactctgattc

SEQ ID NO: 3999273 - DNA, 25 bp, Homo sapien
tgcgtttaggaaagtcagactgtca

SEQ ID NO: 3999274 - DNA, 25 bp, Homo sapien
gaaagtcagactgtcatcggtgtgg

SEQ ID NO: 3999275 - DNA, 25 bp, Homo sapien
ccagttttgcgtttaggaaagtcag

SEQ ID NO: 3999276 - DNA, 25 bp, Homo sapien
ctgcccagttttgcgtttaggaaag

SEQ ID NO: 3999277 - DNA, 25 bp, Homo sapien
taagacttaagtggtacaaggagag

SEQ ID NO: 3999278 - DNA, 25 bp, Homo sapien
ttaagaacgtagaggtgctttggcc

SEQ ID NO: 3999279 - DNA, 25 bp, Homo sapien
caccacgaagagttttggaagacgt

SEQ ID NO: 3999280 - DNA, 25 bp, Homo sapien
cagtgttgatctttgagcagggtac

SEQ ID NO: 3999281 - DNA, 25 bp, Homo sapien
tccttggagtccgtctgcgtgcctg

SEQ ID NO: 3999282 - DNA, 25 bp, Homo sapien
aaaattcacctctttggaccctgtg

SEQ ID NO: 3999283 - DNA, 25 bp, Homo sapien
tctttggaccctgtgttcactcttg

SEQ ID NO: 3999284 - DNA, 25 bp, Homo sapien
acacagtgtccttggagtccgtctg

SEQ ID NO: 3999285 - DNA, 25 bp, Homo sapien
ggaaacatatgggtggactggcaca

SEQ ID NO: 3999286 - DNA, 25 bp, Homo sapien
aacatatgggtggactggcacaggc

SEQ ID NO: 3999287 - DNA, 25 bp, Homo sapien
tgaagtattatggaaacgggaaaca

SEQ ID NO: 3999288 - DNA, 25 bp, Homo sapien
ctgctgtgtcccttgaagtattatg

SEQ ID NO: 3999289 - DNA, 25 bp, Homo sapien
aggagactcctacctgaaacaggga

SEQ ID NO: 3999290 - DNA, 25 bp, Homo sapien
gtgctgagccagcaaccctcgagtt

SEQ ID NO: 3999291 - DNA, 25 bp, Homo sapien
gatatggaagcctcttgtcctctca

SEQ ID NO: 3999292 - DNA, 25 bp, Homo sapien
ttctcggtactatgtttaattgtgc

SEQ ID NO: 3999293 - DNA, 25 bp, Homo sapien
ttttctcgggaatctttaagtgcca

SEQ ID NO: 3999294 - DNA, 25 bp, Homo sapien
cattgtgggcatgaataaccctgac

SEQ ID NO: 3999295 - DNA, 25 bp, Homo sapien
taagtgccagatacttcagagctgg

SEQ ID NO: 3999296 - DNA, 25 bp, Homo sapien
taagggatccgggatgctggcatcc

SEQ ID NO: 3999297 - DNA, 25 bp, Homo sapien
gggttgcagactccacgttgactag

SEQ ID NO: 3999298 - DNA, 25 bp, Homo sapien
taggaagttcctcatactcccctta

SEQ ID NO: 3999299 - DNA, 25 bp, Homo sapien
tatgtgcggatgagggaaatttgct

SEQ ID NO: 3999300 - DNA, 25 bp, Homo sapien
catactccccttatgtgcggatgag

SEQ ID NO: 3999301 - DNA, 25 bp, Homo sapien
acctggaggaaagggaaagcacctg

SEQ ID NO: 3999302 - DNA, 25 bp, Homo sapien
taaggaatacccactttgtcgaatg

SEQ ID NO: 3999303 - DNA, 25 bp, Homo sapien
taatcattgctcaccggttcagtcc

SEQ ID NO: 3999304 - DNA, 25 bp, Homo sapien
tgtggactgaccaaaccaccttgag

SEQ ID NO: 3999305 - DNA, 25 bp, Homo sapien
gctatcaattacttctagggctgca

SEQ ID NO: 3999306 - DNA, 25 bp, Homo sapien
tatcagtgtcttagaagttgatctg

SEQ ID NO: 3999307 - DNA, 25 bp, Homo sapien
cagcttgtgccatcttagaaattgc

SEQ ID NO: 3999308 - DNA, 25 bp, Homo sapien
aattgctgcagtggaaacaggcatg

SEQ ID NO: 3999309 - DNA, 25 bp, Homo sapien
gaaagcacaggtatctctccttgtc

SEQ ID NO: 3999310 - DNA, 25 bp, Homo sapien
cagcagtggagttgatagagcttcc

SEQ ID NO: 3999311 - DNA, 25 bp, Homo sapien
gagacacaaaggtaagcattttctt

SEQ ID NO: 3999312 - DNA, 25 bp, Homo sapien
aagggaacgcaattgtgagactaac

SEQ ID NO: 3999313 - DNA, 25 bp, Homo sapien
tgtttcaggccataactctttcctt

SEQ ID NO: 3999314 - DNA, 25 bp, Homo sapien
ttatgtttcaggccataactctttc

SEQ ID NO: 3999315 - DNA, 25 bp, Homo sapien
tatgtttcaggccataactctttcc

SEQ ID NO: 3999316 - DNA, 25 bp, Homo sapien
atgtttcaggccataactctttcct

SEQ ID NO: 3999317 - DNA, 25 bp, Homo sapien
tatgtcgtcatggaaaagcatggtt

SEQ ID NO: 3999318 - DNA, 25 bp, Homo sapien
tgagtgcttaagacaatgataatct

SEQ ID NO: 3999319 - DNA, 25 bp, Homo sapien
gaaacccacagattgcacgtccttt

SEQ ID NO: 3999320 - DNA, 25 bp, Homo sapien
gattctgctcgtaatgatatgatgt

SEQ ID NO: 3999321 - DNA, 25 bp, Homo sapien
atcctctctgtacttcttgtagcaa

SEQ ID NO: 3999322 - DNA, 25 bp, Homo sapien
caagaatcatgaatcctctctgtac

SEQ ID NO: 3999323 - DNA, 25 bp, Homo sapien
tcaagaatcatgaatcctctctgta

SEQ ID NO: 3999324 - DNA, 25 bp, Homo sapien
gtacttcttgtagcaaaagtaaata

SEQ ID NO: 3999325 - DNA, 25 bp, Homo sapien
aagtccatatctctacatggcccac

SEQ ID NO: 3999326 - DNA, 25 bp, Homo sapien
gaagtccatatctctacatggccca

SEQ ID NO: 3999327 - DNA, 25 bp, Homo sapien
tggaagtccatatctctacatggcc

SEQ ID NO: 3999328 - DNA, 25 bp, Homo sapien
ggaagtccatatctctacatggccc

SEQ ID NO: 3999329 - DNA, 25 bp, Homo sapien
tttagccttctccagggacaccaga

SEQ ID NO: 3999330 - DNA, 25 bp, Homo sapien
ttagccttctccagggacaccagat

SEQ ID NO: 3999331 - DNA, 25 bp, Homo sapien
ctttagccttctccagggacaccag

SEQ ID NO: 3999332 - DNA, 25 bp, Homo sapien
tccttctcttacgattggcaagaaa

SEQ ID NO: 3999333 - DNA, 25 bp, Homo sapien
cactcaccgtagcatccctgaataa

SEQ ID NO: 3999334 - DNA, 25 bp, Homo sapien
aacctctctctcatcaaatactctc

SEQ ID NO: 3999335 - DNA, 25 bp, Homo sapien
tctcttacgattggcaagaaaaagc

SEQ ID NO: 3999336 - DNA, 25 bp, Homo sapien
gtctctgcccacatggctctagctg

SEQ ID NO: 3999337 - DNA, 25 bp, Homo sapien
agcaggctgaacagcaaacccagag

SEQ ID NO: 3999338 - DNA, 25 bp, Homo sapien
tcacagcaggctgaacagcaaaccc

SEQ ID NO: 3999339 - DNA, 25 bp, Homo sapien
ctctgcccacatggctctagctggg

SEQ ID NO: 3999340 - DNA, 25 bp, Homo sapien
tgctgcccaatgagggtcctttaag

SEQ ID NO: 3999341 - DNA, 25 bp, Homo sapien
acatgctgcccaatgagggtccttt

SEQ ID NO: 3999342 - DNA, 25 bp, Homo sapien
tcctcttgctcttgtgttggacaat

SEQ ID NO: 3999343 - DNA, 25 bp, Homo sapien
ggacaatttcgcacaaatatgtttt

SEQ ID NO: 3999344 - DNA, 25 bp, Homo sapien
gctggtacacaaccggaaggtatgg

SEQ ID NO: 3999345 - DNA, 25 bp, Homo sapien
caattttgtgagttggcagacggca

SEQ ID NO: 3999346 - DNA, 25 bp, Homo sapien
ccagatggatcgctgttctaacggg

SEQ ID NO: 3999347 - DNA, 25 bp, Homo sapien
cagatcagaacgctggctggtacac

SEQ ID NO: 3999348 - DNA, 25 bp, Homo sapien
gggtaaggtggtcacaggagttgga

SEQ ID NO: 3999349 - DNA, 25 bp, Homo sapien
tagaggcaccttgaaggaattgtgg

SEQ ID NO: 3999350 - DNA, 25 bp, Homo sapien
ttaagcctcgaagatgggtaaggtg

SEQ ID NO: 3999351 - DNA, 25 bp, Homo sapien
agctgaagacttaagttgtagaggc

SEQ ID NO: 3999352 - DNA, 25 bp, Homo sapien
ataaacaacttccgatcccttctgt

SEQ ID NO: 3999353 - DNA, 25 bp, Homo sapien
tcataaacaacttccgatcccttct

SEQ ID NO: 3999354 - DNA, 25 bp, Homo sapien
taaacaacttccgatcccttctgtg

SEQ ID NO: 3999355 - DNA, 25 bp, Homo sapien
cataaacaacttccgatcccttctg

SEQ ID NO: 3999356 - DNA, 25 bp, Homo sapien
ctggcctctgcatttccacatccct

SEQ ID NO: 3999357 - DNA, 25 bp, Homo sapien
ggcctctgcatttccacatccctgc

SEQ ID NO: 3999358 - DNA, 25 bp, Homo sapien
tctgcatttccacatccctgctcaa

SEQ ID NO: 3999359 - DNA, 25 bp, Homo sapien
tgcatttccacatccctgctcaaag

SEQ ID NO: 3999360 - DNA, 25 bp, Homo sapien
tgatattgtcccctgtatctgatga

SEQ ID NO: 3999361 - DNA, 25 bp, Homo sapien
ccgtgtgtgctcttcaagcattggg

SEQ ID NO: 3999362 - DNA, 25 bp, Homo sapien
taagccattttctggcgccgtgtgt

SEQ ID NO: 3999363 - DNA, 25 bp, Homo sapien
tatcagagatgatacttggtaattc

SEQ ID NO: 3999364 - DNA, 25 bp, Homo sapien
cttgtgtcagagttagcggagcagc

SEQ ID NO: 3999365 - DNA, 25 bp, Homo sapien
aaagaaacgtacttctcgcctgcct

SEQ ID NO: 3999366 - DNA, 25 bp, Homo sapien
gcttgagggatttttgccgagctga

SEQ ID NO: 3999367 - DNA, 25 bp, Homo sapien
ctgtctccccgtgagaagcctcgtg

SEQ ID NO: 3999368 - DNA, 25 bp, Homo sapien
tgattaattgacgtgagagtccagc

SEQ ID NO: 3999369 - DNA, 25 bp, Homo sapien
gattaaccagaccaaagctatttgt

SEQ ID NO: 3999370 - DNA, 25 bp, Homo sapien
caaaatgttagacagagccttggca

SEQ ID NO: 3999371 - DNA, 25 bp, Homo sapien
tatttgtcatagcaacgggtgctag

SEQ ID NO: 3999372 - DNA, 25 bp, Homo sapien
gctcaagctcgacaactctacaggt

SEQ ID NO: 3999373 - DNA, 25 bp, Homo sapien
tacttaattgaacataccaccaccg

SEQ ID NO: 3999374 - DNA, 25 bp, Homo sapien
tctgctagttgagttaccttgggaa

SEQ ID NO: 3999375 - DNA, 25 bp, Homo sapien
tacgcccacggtcgttatgttcaaa

SEQ ID NO: 3999376 - DNA, 25 bp, Homo sapien
tgttcgtaatacagaattctctgag

SEQ ID NO: 3999377 - DNA, 25 bp, Homo sapien
ctgttcgtaatacagaattctctga

SEQ ID NO: 3999378 - DNA, 25 bp, Homo sapien
ttccaacacgaatcactagccttta

SEQ ID NO: 3999379 - DNA, 25 bp, Homo sapien
tttagttctaaaccatagaattcca

SEQ ID NO: 3999380 - DNA, 25 bp, Homo sapien
tagcctttactttccctgttgtatc

SEQ ID NO: 3999381 - DNA, 25 bp, Homo sapien
tgttgtcctcagcatctatctccgc

SEQ ID NO: 3999382 - DNA, 25 bp, Homo sapien
gctagttgcagctctataagaagtc

SEQ ID NO: 3999383 - DNA, 25 bp, Homo sapien
tatttgctagttgcagctctataag

SEQ ID NO: 3999384 - DNA, 25 bp, Homo sapien
tgctagttgcagctctataagaagt

SEQ ID NO: 3999385 - DNA, 25 bp, Homo sapien
tttgctagttgcagctctataagaa

SEQ ID NO: 3999386 - DNA, 25 bp, Homo sapien
gagagagttgcttttgtacaaatga

SEQ ID NO: 3999387 - DNA, 25 bp, Homo sapien
cagtccggtgcctttctggaagtta

SEQ ID NO: 3999388 - DNA, 25 bp, Homo sapien
aagatgagcctacccgcttgtcctg

SEQ ID NO: 3999389 - DNA, 25 bp, Homo sapien
gagttgagattgatatgatcagaca

SEQ ID NO: 3999390 - DNA, 25 bp, Homo sapien
tgaaacaaccctcttcgtttctagc

SEQ ID NO: 3999391 - DNA, 25 bp, Homo sapien
ccatcttgagaatgctcgtatgggt

SEQ ID NO: 3999392 - DNA, 25 bp, Homo sapien
tagcctccagttgaccacattcatg

SEQ ID NO: 3999393 - DNA, 25 bp, Homo sapien
tccggttccccagatagtattccag

SEQ ID NO: 3999394 - DNA, 25 bp, Homo sapien
actgaaatgccagccctgctggtat

SEQ ID NO: 3999395 - DNA, 25 bp, Homo sapien
tgctggtatttccacaatattgaac

SEQ ID NO: 3999396 - DNA, 25 bp, Homo sapien
cacaatattgaacttgtctttcggg

SEQ ID NO: 3999397 - DNA, 25 bp, Homo sapien
gagggtatctgagaacactgaaatg

SEQ ID NO: 3999398 - DNA, 25 bp, Homo sapien
tcctgccggctcttgagtagtaaca

SEQ ID NO: 3999399 - DNA, 25 bp, Homo sapien
taatgaggcgagtattaccacaggc

SEQ ID NO: 3999400 - DNA, 25 bp, Homo sapien
cacgaatgcttttggttcctgccgg

SEQ ID NO: 3999401 - DNA, 25 bp, Homo sapien
tactctcaaaactctcacgaatgct

SEQ ID NO: 3999402 - DNA, 25 bp, Homo sapien
tgatggaggcattgtcagggcacat

SEQ ID NO: 3999403 - DNA, 25 bp, Homo sapien
atgatggaggcattgtcagggcaca

SEQ ID NO: 3999404 - DNA, 25 bp, Homo sapien
aaaatgatggaggcattgtcagggc

SEQ ID NO: 3999405 - DNA, 25 bp, Homo sapien
aatgatggaggcattgtcagggcac

SEQ ID NO: 3999406 - DNA, 25 bp, Homo sapien
tggtctagcttgcactttctccctg

SEQ ID NO: 3999407 - DNA, 25 bp, Homo sapien
tatgcaatgggaggcttgaatcaaa

SEQ ID NO: 3999408 - DNA, 25 bp, Homo sapien
tgtaagacaaactcgataagctcca

SEQ ID NO: 3999409 - DNA, 25 bp, Homo sapien
ggatacttggaaaggatgcttcagc

SEQ ID NO: 3999410 - DNA, 25 bp, Homo sapien
atatcttctgctgctttgcacgctc

SEQ ID NO: 3999411 - DNA, 25 bp, Homo sapien
atcttctgctgctttgcacgctcat

SEQ ID NO: 3999412 - DNA, 25 bp, Homo sapien
ctgtcatatcttctgctgctttgca

SEQ ID NO: 3999413 - DNA, 25 bp, Homo sapien
gtcatatcttctgctgctttgcacg

SEQ ID NO: 3999414 - DNA, 25 bp, Homo sapien
ggatcaagtctggaaatgttgtcag

SEQ ID NO: 3999415 - DNA, 25 bp, Homo sapien
tcaaagtgcagttgctgcttagcct

SEQ ID NO: 3999416 - DNA, 25 bp, Homo sapien
cttccgctgattttaggatcaagtc

SEQ ID NO: 3999417 - DNA, 25 bp, Homo sapien
tatcgtgtcctaaatccgcatctga

SEQ ID NO: 3999418 - DNA, 25 bp, Homo sapien
gaactcggagaaggccagaatctgt

SEQ ID NO: 3999419 - DNA, 25 bp, Homo sapien
cgtgaactcggagaaggccagaatc

SEQ ID NO: 3999420 - DNA, 25 bp, Homo sapien
agcttcagacacgtgaactcggaga

SEQ ID NO: 3999421 - DNA, 25 bp, Homo sapien
tcagacacgtgaactcggagaaggc

SEQ ID NO: 3999422 - DNA, 25 bp, Homo sapien
ttgccacggtccaaagcgcagagga

SEQ ID NO: 3999423 - DNA, 25 bp, Homo sapien
ggtacaaatgacgttgctacttgcc

SEQ ID NO: 3999424 - DNA, 25 bp, Homo sapien
cggtggctgctgtgttatgcaagca

SEQ ID NO: 3999425 - DNA, 25 bp, Homo sapien
catccactgcagagcggtggctgct

SEQ ID NO: 3999426 - DNA, 25 bp, Homo sapien
ctgcgatgcgctgcagaagaagaga

SEQ ID NO: 3999427 - DNA, 25 bp, Homo sapien
gcagagctactgcagacagaagctg

SEQ ID NO: 3999428 - DNA, 25 bp, Homo sapien
agagaggcatctgatgctcgaccga

SEQ ID NO: 3999429 - DNA, 25 bp, Homo sapien
aagctgcttccgaggccccttctgc

SEQ ID NO: 3999430 - DNA, 25 bp, Homo sapien
ttcctggctcatgtgcagtcagcca

SEQ ID NO: 3999431 - DNA, 25 bp, Homo sapien
cctggctcatgtgcagtcagccatg

SEQ ID NO: 3999432 - DNA, 25 bp, Homo sapien
tcctggctcatgtgcagtcagccat

SEQ ID NO: 3999433 - DNA, 25 bp, Homo sapien
gcttcctggctcatgtgcagtcagc

SEQ ID NO: 3999434 - DNA, 25 bp, Homo sapien
taaggaaatgtcgtggctaacagca

SEQ ID NO: 3999435 - DNA, 25 bp, Homo sapien
gaaatgtcgtggctaacagcagcag

SEQ ID NO: 3999436 - DNA, 25 bp, Homo sapien
aggaaatgtcgtggctaacagcagc

SEQ ID NO: 3999437 - DNA, 25 bp, Homo sapien
aatgtcgtggctaacagcagcaggg

SEQ ID NO: 3999438 - DNA, 25 bp, Homo sapien
ctgtgcagagctccctgtgcccaga

SEQ ID NO: 3999439 - DNA, 25 bp, Homo sapien
agacctgagctctccacaccttcct

SEQ ID NO: 3999440 - DNA, 25 bp, Homo sapien
cacaccttcctgaatgctggcagca

SEQ ID NO: 3999441 - DNA, 25 bp, Homo sapien
agagctccctgtgcccagacctgag

SEQ ID NO: 3999442 - DNA, 25 bp, Homo sapien
agtccattgtggagtttgcacccat

SEQ ID NO: 3999443 - DNA, 25 bp, Homo sapien
tccacgacctctcagagcatagctt

SEQ ID NO: 3999444 - DNA, 25 bp, Homo sapien
cctgcccctccacgacctctcagag

SEQ ID NO: 3999445 - DNA, 25 bp, Homo sapien
ccctccacgacctctcagagcatag

SEQ ID NO: 3999446 - DNA, 25 bp, Homo sapien
gcccctccacgacctctcagagcat

SEQ ID NO: 3999447 - DNA, 25 bp, Homo sapien
ctgctttttcccgtcagtttctcct

SEQ ID NO: 3999448 - DNA, 25 bp, Homo sapien
tgcccgggctacttgtgttacacaa

SEQ ID NO: 3999449 - DNA, 25 bp, Homo sapien
gcccgggctacttgtgttacacaaa

SEQ ID NO: 3999450 - DNA, 25 bp, Homo sapien
ctgggaaggccagttcacctgcccg

SEQ ID NO: 3999451 - DNA, 25 bp, Homo sapien
gaaggccagttcacctgcccgggct

SEQ ID NO: 3999452 - DNA, 25 bp, Homo sapien
aattatgggaaaatagcctctggcc

SEQ ID NO: 3999453 - DNA, 25 bp, Homo sapien
gcagatttgtagaaggtgcccatcc

SEQ ID NO: 3999454 - DNA, 25 bp, Homo sapien
cctctggcctgtggaaatgcgactt

SEQ ID NO: 3999455 - DNA, 25 bp, Homo sapien
taaaaagagcctagttcagagcaga

SEQ ID NO: 3999456 - DNA, 25 bp, Homo sapien
tgcctccttcagtattcccagtgcc

SEQ ID NO: 3999457 - DNA, 25 bp, Homo sapien
cagagaaacagtgtatcgagctgtc

SEQ ID NO: 3999458 - DNA, 25 bp, Homo sapien
gcctccttcagtattcccagtgccc

SEQ ID NO: 3999459 - DNA, 25 bp, Homo sapien
gtgcctccttcagtattcccagtgc

SEQ ID NO: 3999460 - DNA, 25 bp, Homo sapien
tttcagagattacgatgcaggcatc

SEQ ID NO: 3999461 - DNA, 25 bp, Homo sapien
tcagctacctagaagcgagggacat

SEQ ID NO: 3999462 - DNA, 25 bp, Homo sapien
ttttgccaggcaaggtgacgtattc

SEQ ID NO: 3999463 - DNA, 25 bp, Homo sapien
ggaatcctatgtgcctaacacgtgg

SEQ ID NO: 3999464 - DNA, 25 bp, Homo sapien
gatattgtgcctgtacgtcccaccc

SEQ ID NO: 3999465 - DNA, 25 bp, Homo sapien
ggaaaaccttggtagcgtgcaaaga

SEQ ID NO: 3999466 - DNA, 25 bp, Homo sapien
ggctacaagtctcctaggaagggat

SEQ ID NO: 3999467 - DNA, 25 bp, Homo sapien
gggtaaaatcaaagcctcagcaggg

SEQ ID NO: 3999468 - DNA, 25 bp, Homo sapien
tctactaattccctccaagaagggc

SEQ ID NO: 3999469 - DNA, 25 bp, Homo sapien
agtggcggagccatgctctccagac

SEQ ID NO: 3999470 - DNA, 25 bp, Homo sapien
gactagggagctaactgcggttcct

SEQ ID NO: 3999471 - DNA, 25 bp, Homo sapien
cattctctgtgttgcggactaggga

SEQ ID NO: 3999472 - DNA, 25 bp, Homo sapien
ggtaatgtggtctaatacacctttg

SEQ ID NO: 3999473 - DNA, 25 bp, Homo sapien
gctaatgctgctttggacctctgtg

SEQ ID NO: 3999474 - DNA, 25 bp, Homo sapien
ctcttgaatatatccctaggtgtgg

SEQ ID NO: 3999475 - DNA, 25 bp, Homo sapien
tccaggaccattagtggcacagata

SEQ ID NO: 3999476 - DNA, 25 bp, Homo sapien
gtttttctggatggtcatcacgacc

SEQ ID NO: 3999477 - DNA, 25 bp, Homo sapien
tccatcttgcaacgctattggccgt

SEQ ID NO: 3999478 - DNA, 25 bp, Homo sapien
gctattggccgttctggcttgtgtt

SEQ ID NO: 3999479 - DNA, 25 bp, Homo sapien
cacttgtaaggccttccatcttgca

SEQ ID NO: 3999480 - DNA, 25 bp, Homo sapien
gctcggattacttccagcttttttc

SEQ ID NO: 3999481 - DNA, 25 bp, Homo sapien
tggccgcagttatgcccattcctac

SEQ ID NO: 3999482 - DNA, 25 bp, Homo sapien
cttaaaaactcttgcataagctcgg

SEQ ID NO: 3999483 - DNA, 25 bp, Homo sapien
tgaaggctgagttcaaacttcgaag

SEQ ID NO: 3999484 - DNA, 25 bp, Homo sapien
aaagtggctgtgatctagttacgca

SEQ ID NO: 3999485 - DNA, 25 bp, Homo sapien
gctgtgatctagttacgcagggtcc

SEQ ID NO: 3999486 - DNA, 25 bp, Homo sapien
tggctgtgatctagttacgcagggt

SEQ ID NO: 3999487 - DNA, 25 bp, Homo sapien
agtggctgtgatctagttacgcagg

SEQ ID NO: 3999488 - DNA, 25 bp, Homo sapien
tattgcaagccacaatattttcaga

SEQ ID NO: 3999489 - DNA, 25 bp, Homo sapien
cagaagcgtgcttttctgtattcta

SEQ ID NO: 3999490 - DNA, 25 bp, Homo sapien
tctgtattctaagcagtttttgaca

SEQ ID NO: 3999491 - DNA, 25 bp, Homo sapien
gaaggcttaaaaatccagttatgac

SEQ ID NO: 3999492 - DNA, 25 bp, Homo sapien
gaggccttgagggtaggcgtacgac

SEQ ID NO: 3999493 - DNA, 25 bp, Homo sapien
gtaggcgtacgacagcagcatttca

SEQ ID NO: 3999494 - DNA, 25 bp, Homo sapien
ctagagctgctgtccgagaggcctt

SEQ ID NO: 3999495 - DNA, 25 bp, Homo sapien
tttcagaggtagttggcaatgctcc

SEQ ID NO: 3999496 - DNA, 25 bp, Homo sapien
tgggtagctatgaatttgcagctct

SEQ ID NO: 3999497 - DNA, 25 bp, Homo sapien
tccaattagcaactccaattgattg

SEQ ID NO: 3999498 - DNA, 25 bp, Homo sapien
tcagaatccaattagcaactccaat

SEQ ID NO: 3999499 - DNA, 25 bp, Homo sapien
tgatgatggctgattcgtgggtagc

SEQ ID NO: 3999500 - DNA, 25 bp, Homo sapien
aagtggctgactgctgtatggagta

SEQ ID NO: 3999501 - DNA, 25 bp, Homo sapien
ctgaaaagtggctgactgctgtatg

SEQ ID NO: 3999502 - DNA, 25 bp, Homo sapien
tgactgctgtatggagtactctttg

SEQ ID NO: 3999503 - DNA, 25 bp, Homo sapien
tggctgactgctgtatggagtactc

SEQ ID NO: 3999504 - DNA, 25 bp, Homo sapien
gttatcagtcaaacatggcccattg

SEQ ID NO: 3999505 - DNA, 25 bp, Homo sapien
ctagggccagacagttaatgttatc

SEQ ID NO: 3999506 - DNA, 25 bp, Homo sapien
ttgctggtctgaacaacctgtgcca

SEQ ID NO: 3999507 - DNA, 25 bp, Homo sapien
tcagtcaaacatggcccattgctgg

SEQ ID NO: 3999508 - DNA, 25 bp, Homo sapien
ttcatccggctgagaacatatgttc

SEQ ID NO: 3999509 - DNA, 25 bp, Homo sapien
cttcaactggccgtatttcatccgg

SEQ ID NO: 3999510 - DNA, 25 bp, Homo sapien
tttgcatcttaatcgctctccctgg

SEQ ID NO: 3999511 - DNA, 25 bp, Homo sapien
tgagccttttgcatcttaatcgctc

SEQ ID NO: 3999512 - DNA, 25 bp, Homo sapien
gcggccaaagccagttgttgacgta

SEQ ID NO: 3999513 - DNA, 25 bp, Homo sapien
tctttgcccattggcggccaaagcc

SEQ ID NO: 3999514 - DNA, 25 bp, Homo sapien
ccaaagccagttgttgacgtaaagt

SEQ ID NO: 3999515 - DNA, 25 bp, Homo sapien
ccattggcggccaaagccagttgtt

SEQ ID NO: 3999516 - DNA, 25 bp, Homo sapien
aaattaatgacaaggcgtattctcc

SEQ ID NO: 3999517 - DNA, 25 bp, Homo sapien
agaaatgatacaggtaaaattaatg

SEQ ID NO: 3999518 - DNA, 25 bp, Homo sapien
gacaaggcgtattctccatcctgac

SEQ ID NO: 3999519 - DNA, 25 bp, Homo sapien
cgtattctccatcctgacataggca

SEQ ID NO: 3999520 - DNA, 25 bp, Homo sapien
ccctcggatgcatgagagagccact

SEQ ID NO: 3999521 - DNA, 25 bp, Homo sapien
cattgaacacggtaggtccttggtc

SEQ ID NO: 3999522 - DNA, 25 bp, Homo sapien
tgccccgggtgccagaaggataaaa

SEQ ID NO: 3999523 - DNA, 25 bp, Homo sapien
gatctgtggctctgaacttgcaacc

SEQ ID NO: 3999524 - DNA, 25 bp, Homo sapien
ttcccatccgagaggtgtcaagagc

SEQ ID NO: 3999525 - DNA, 25 bp, Homo sapien
aaagtcagaatgttagaatctccca

SEQ ID NO: 3999526 - DNA, 25 bp, Homo sapien
tcccacagtgaccagattagtgggt

SEQ ID NO: 3999527 - DNA, 25 bp, Homo sapien
gaaggctactcttgactcttggctc

SEQ ID NO: 3999528 - DNA, 25 bp, Homo sapien
cattttactcgcattcagtgctccc

SEQ ID NO: 3999529 - DNA, 25 bp, Homo sapien
accccctgtgtttgcaaaccttgat

SEQ ID NO: 3999530 - DNA, 25 bp, Homo sapien
aaaccttgatgaagtttgccagtca

SEQ ID NO: 3999531 - DNA, 25 bp, Homo sapien
ccctgtgtttgcaaaccttgatgaa

SEQ ID NO: 3999532 - DNA, 25 bp, Homo sapien
ctgcagagtgcattggaagggcaca

SEQ ID NO: 3999533 - DNA, 25 bp, Homo sapien
ccctgatgatgctttcggatgctgc

SEQ ID NO: 3999534 - DNA, 25 bp, Homo sapien
atgatgctttcggatgctgcagagt

SEQ ID NO: 3999535 - DNA, 25 bp, Homo sapien
atttttgccctgatgatgctttcgg

SEQ ID NO: 3999536 - DNA, 25 bp, Homo sapien
ggcaggcaaactgttgactctttct

SEQ ID NO: 3999537 - DNA, 25 bp, Homo sapien
gactctttctgacatccagatacaa

SEQ ID NO: 3999538 - DNA, 25 bp, Homo sapien
tgtgctaaggcaggcaaactgttga

SEQ ID NO: 3999539 - DNA, 25 bp, Homo sapien
gctaaggcaggcaaactgttgactc

SEQ ID NO: 3999540 - DNA, 25 bp, Homo sapien
tatcagcgtcttgtgtgggtgtagt

SEQ ID NO: 3999541 - DNA, 25 bp, Homo sapien
ccattctgagtggaatgaaacttgc

SEQ ID NO: 3999542 - DNA, 25 bp, Homo sapien
tcatccaagcgatctattagcagct

SEQ ID NO: 3999543 - DNA, 25 bp, Homo sapien
cagggtttgttggttagtccattct

SEQ ID NO: 3999544 - DNA, 25 bp, Homo sapien
aatatagctcatgactggggcctcc

SEQ ID NO: 3999545 - DNA, 25 bp, Homo sapien
aatggaatttccattccgttgaaat

SEQ ID NO: 3999546 - DNA, 25 bp, Homo sapien
ggaatttccattccgttgaaatata

SEQ ID NO: 3999547 - DNA, 25 bp, Homo sapien
tttccattccgttgaaatatagctc

SEQ ID NO: 3999548 - DNA, 25 bp, Homo sapien
tccctccaatccaatttgcgtgtgt

SEQ ID NO: 3999549 - DNA, 25 bp, Homo sapien
tttgcgtgtgtttggcagcagccca

SEQ ID NO: 3999550 - DNA, 25 bp, Homo sapien
gatcataaatctgccatcctggagc

SEQ ID NO: 3999551 - DNA, 25 bp, Homo sapien
gctgcatttgatagtatgcttgcat

SEQ ID NO: 3999552 - DNA, 25 bp, Homo sapien
gcacaggtgccataccaccttctct

SEQ ID NO: 3999553 - DNA, 25 bp, Homo sapien
tgcacaggtgccataccaccttctc

SEQ ID NO: 3999554 - DNA, 25 bp, Homo sapien
ttgcacaggtgccataccaccttct

SEQ ID NO: 3999555 - DNA, 25 bp, Homo sapien
gccattgaagcctgcacgctcctgt

SEQ ID NO: 3999556 - DNA, 25 bp, Homo sapien
aggctgctgccattgaagcctgcac

SEQ ID NO: 3999557 - DNA, 25 bp, Homo sapien
gaagcctgcacgctcctgtgcgttt

SEQ ID NO: 3999558 - DNA, 25 bp, Homo sapien
tgctgccattgaagcctgcacgctc

SEQ ID NO: 3999559 - DNA, 25 bp, Homo sapien
ttagagttgaccgagtccgtgagca

SEQ ID NO: 3999560 - DNA, 25 bp, Homo sapien
agttgaccgagtccgtgagcatccg

SEQ ID NO: 3999561 - DNA, 25 bp, Homo sapien
ttgaccgagtccgtgagcatccgag

SEQ ID NO: 3999562 - DNA, 25 bp, Homo sapien
cgtgagcatccgaggggctagatct

SEQ ID NO: 3999563 - DNA, 25 bp, Homo sapien
gccttcaatcatagatgacatggaa

SEQ ID NO: 3999564 - DNA, 25 bp, Homo sapien
tctatgaaagtactcatccttcagg

SEQ ID NO: 3999565 - DNA, 25 bp, Homo sapien
gacatggaaagtcgcatctgtctca

SEQ ID NO: 3999566 - DNA, 25 bp, Homo sapien
ccacatgggtgtgtcataggcaagg

SEQ ID NO: 3999567 - DNA, 25 bp, Homo sapien
tcagtataattacggaggccctgct

SEQ ID NO: 3999568 - DNA, 25 bp, Homo sapien
tctgggaaagaaagtcgattctcct

SEQ ID NO: 3999569 - DNA, 25 bp, Homo sapien
ctggctttgctcacatctgggaaag

SEQ ID NO: 3999570 - DNA, 25 bp, Homo sapien
caactttcggatggccgtagtgtcc

SEQ ID NO: 3999571 - DNA, 25 bp, Homo sapien
ctctatgagacacccccgccttggg

SEQ ID NO: 3999572 - DNA, 25 bp, Homo sapien
tatgagacacccccgccttgggtct

SEQ ID NO: 3999573 - DNA, 25 bp, Homo sapien
tgagacacccccgccttgggtctac

SEQ ID NO: 3999574 - DNA, 25 bp, Homo sapien
tctatgagacacccccgccttgggt

SEQ ID NO: 3999575 - DNA, 25 bp, Homo sapien
caagaaaggaatgccaactctctcc

SEQ ID NO: 3999576 - DNA, 25 bp, Homo sapien
tgtgtagagactgtccactagccct

SEQ ID NO: 3999577 - DNA, 25 bp, Homo sapien
aaaaatgcgtttggtgtctccaggc

SEQ ID NO: 3999578 - DNA, 25 bp, Homo sapien
gcaggaataacgctaaatggctgga

SEQ ID NO: 3999579 - DNA, 25 bp, Homo sapien
aagaaggaaagtgcagtaagcaggt

SEQ ID NO: 3999580 - DNA, 25 bp, Homo sapien
gaagaaggaaagtgcagtaagcagg

SEQ ID NO: 3999581 - DNA, 25 bp, Homo sapien
ggaagaaggaaagtgcagtaagcag

SEQ ID NO: 3999582 - DNA, 25 bp, Homo sapien
gaagtgaacaactccacgagactgc

SEQ ID NO: 3999583 - DNA, 25 bp, Homo sapien
aagtgaacaactccacgagactgca

SEQ ID NO: 3999584 - DNA, 25 bp, Homo sapien
agtgaacaactccacgagactgcat

SEQ ID NO: 3999585 - DNA, 25 bp, Homo sapien
caacaaagacaagagagtctgtggc

SEQ ID NO: 3999586 - DNA, 25 bp, Homo sapien
gagaaccgagtagctgcaacaaaga

SEQ ID NO: 3999587 - DNA, 25 bp, Homo sapien
gcttttccaccataatgggagaacc

SEQ ID NO: 3999588 - DNA, 25 bp, Homo sapien
cctatttggctcttaggagaaaaag

SEQ ID NO: 3999589 - DNA, 25 bp, Homo sapien
ttacctgaccctggaaactgtgtac

SEQ ID NO: 3999590 - DNA, 25 bp, Homo sapien
gaaacctagtcaacccatccagatg

SEQ ID NO: 3999591 - DNA, 25 bp, Homo sapien
cacctgctaaggacaagtgaggcgc

SEQ ID NO: 3999592 - DNA, 25 bp, Homo sapien
ggctaacagtgtaggtatccatggt

SEQ ID NO: 3999593 - DNA, 25 bp, Homo sapien
catgatgggattctgccgttttgtg

SEQ ID NO: 3999594 - DNA, 25 bp, Homo sapien
ttgtgcaatggacagctctttcttc

SEQ ID NO: 3999595 - DNA, 25 bp, Homo sapien
gtgctgtttgatgagcaaggttgca

SEQ ID NO: 3999596 - DNA, 25 bp, Homo sapien
gttgcagccgaaacacacaactcat

SEQ ID NO: 3999597 - DNA, 25 bp, Homo sapien
tcctggaaaaggagcctgattggct

SEQ ID NO: 3999598 - DNA, 25 bp, Homo sapien
gcatcctcgttacaaattcctggaa

SEQ ID NO: 3999599 - DNA, 25 bp, Homo sapien
tgaagcaacacagttgcccagggcc

SEQ ID NO: 3999600 - DNA, 25 bp, Homo sapien
tctggatcagttgttcactctgggc

SEQ ID NO: 3999601 - DNA, 25 bp, Homo sapien
agagaaccctcaggattcaggcctg

SEQ ID NO: 3999602 - DNA, 25 bp, Homo sapien
gagaaccctcaggattcaggcctga

SEQ ID NO: 3999603 - DNA, 25 bp, Homo sapien
tccctgtaggagtaagatattcccc

SEQ ID NO: 3999604 - DNA, 25 bp, Homo sapien
cctgatgcctctgtgaatcggcgct

SEQ ID NO: 3999605 - DNA, 25 bp, Homo sapien
tcagttctcagtcatcaagagcagg

SEQ ID NO: 3999606 - DNA, 25 bp, Homo sapien
gagctcttggtttagggcacacgca

SEQ ID NO: 3999607 - DNA, 25 bp, Homo sapien
tgcaaacatctaagtcacttcagag

SEQ ID NO: 3999608 - DNA, 25 bp, Homo sapien
tttgcatgagaatcttaaagcctat

SEQ ID NO: 3999609 - DNA, 25 bp, Homo sapien
tagtcattaggcacaaacaaatgct

SEQ ID NO: 3999610 - DNA, 25 bp, Homo sapien
aatgcacatattagtccagagattc

SEQ ID NO: 3999611 - DNA, 25 bp, Homo sapien
gagaaaggctggtaactccactgtt

SEQ ID NO: 3999612 - DNA, 25 bp, Homo sapien
gaaaggctggtaactccactgttca

SEQ ID NO: 3999613 - DNA, 25 bp, Homo sapien
aaaggctggtaactccactgttcat

SEQ ID NO: 3999614 - DNA, 25 bp, Homo sapien
tgagaaaggctggtaactccactgt

SEQ ID NO: 3999615 - DNA, 25 bp, Homo sapien
ttagaggtggtgtcacatctgtttc

SEQ ID NO: 3999616 - DNA, 25 bp, Homo sapien
cacaagcaagaatagagggagctat

SEQ ID NO: 3999617 - DNA, 25 bp, Homo sapien
tcagattgtaaattcttggagtatt

SEQ ID NO: 3999618 - DNA, 25 bp, Homo sapien
cacagtccttctttgtcaagttcag

SEQ ID NO: 3999619 - DNA, 25 bp, Homo sapien
agcaatttgctctctgggtatcctt

SEQ ID NO: 3999620 - DNA, 25 bp, Homo sapien
ctgttcagagattcctcagcaattt

SEQ ID NO: 3999621 - DNA, 25 bp, Homo sapien
cagcaatttgctctctgggtatcct

SEQ ID NO: 3999622 - DNA, 25 bp, Homo sapien
tgttcagagattcctcagcaatttg

SEQ ID NO: 3999623 - DNA, 25 bp, Homo sapien
tgatttgctgaattggcacacaggc

SEQ ID NO: 3999624 - DNA, 25 bp, Homo sapien
ggccttgacctgactggatgctgct

SEQ ID NO: 3999625 - DNA, 25 bp, Homo sapien
agagtcaccggctctgtgcagatgg

SEQ ID NO: 3999626 - DNA, 25 bp, Homo sapien
ttgcctcaagaggatcggccgcctt

SEQ ID NO: 3999627 - DNA, 25 bp, Homo sapien
ttatgccagtaaccaaagtccttgc

SEQ ID NO: 3999628 - DNA, 25 bp, Homo sapien
tttcaggtttagagcaggtgttccc

SEQ ID NO: 3999629 - DNA, 25 bp, Homo sapien
taagagcaatgaagtggtaacccgt

SEQ ID NO: 3999630 - DNA, 25 bp, Homo sapien
cgttgctcggcaggcttagaaaatc

SEQ ID NO: 3999631 - DNA, 25 bp, Homo sapien
gaagacgcttgcttcagaaacatcc

SEQ ID NO: 3999632 - DNA, 25 bp, Homo sapien
acagtaacgtggcttcacatacagc

SEQ ID NO: 3999633 - DNA, 25 bp, Homo sapien
tcgaagacgcttgcttcagaaacat

SEQ ID NO: 3999634 - DNA, 25 bp, Homo sapien
cagaaacatccctgactgctgtggc

SEQ ID NO: 3999635 - DNA, 25 bp, Homo sapien
gctgggcacagttcgtgcagcaaat

SEQ ID NO: 3999636 - DNA, 25 bp, Homo sapien
cacgcgctgggcacagttcgtgcag

SEQ ID NO: 3999637 - DNA, 25 bp, Homo sapien
cgcgctgggcacagttcgtgcagca

SEQ ID NO: 3999638 - DNA, 25 bp, Homo sapien
gcacgcgctgggcacagttcgtgca

SEQ ID NO: 3999639 - DNA, 25 bp, Homo sapien
cacgttagcacttggcagtttgtta

SEQ ID NO: 3999640 - DNA, 25 bp, Homo sapien
agtaaatttaatacgtgggcctcag

SEQ ID NO: 3999641 - DNA, 25 bp, Homo sapien
cctcagtaatggagggaatcacgtt

SEQ ID NO: 3999642 - DNA, 25 bp, Homo sapien
gttgataacattaggctctgcggca

SEQ ID NO: 3999643 - DNA, 25 bp, Homo sapien
tgcagattggccttttcaggtagtt

SEQ ID NO: 3999644 - DNA, 25 bp, Homo sapien
ggtagtttggatctagaataattca

SEQ ID NO: 3999645 - DNA, 25 bp, Homo sapien
tcatttttgcctaggtgctcttcct

SEQ ID NO: 3999646 - DNA, 25 bp, Homo sapien
taaagatccataacagttgcattca

SEQ ID NO: 3999647 - DNA, 25 bp, Homo sapien
tgtggtattgttggagcatatttgt

SEQ ID NO: 3999648 - DNA, 25 bp, Homo sapien
ggtattgttggagcatatttgtaac

SEQ ID NO: 3999649 - DNA, 25 bp, Homo sapien
tattgttggagcatatttgtaactg

SEQ ID NO: 3999650 - DNA, 25 bp, Homo sapien
gtaatgtggtattgttggagcatat

SEQ ID NO: 3999651 - DNA, 25 bp, Homo sapien
cagcaaaccagggaacctcctgacg

SEQ ID NO: 3999652 - DNA, 25 bp, Homo sapien
aacctcctgacgatgagctggggtg

SEQ ID NO: 3999653 - DNA, 25 bp, Homo sapien
gatgagctggggtggtttctgaacc

SEQ ID NO: 3999654 - DNA, 25 bp, Homo sapien
gcaaaccagggaacctcctgacgat

SEQ ID NO: 3999655 - DNA, 25 bp, Homo sapien
ttagaatctgtctggagtcaagcag

SEQ ID NO: 3999656 - DNA, 25 bp, Homo sapien
taagtgagcataaaagcaaggcatc

SEQ ID NO: 3999657 - DNA, 25 bp, Homo sapien
gagaaatgacaatgcgtccaactgt

SEQ ID NO: 3999658 - DNA, 25 bp, Homo sapien
ctctcagggagaggactgagccact

SEQ ID NO: 3999659 - DNA, 25 bp, Homo sapien
tctaaccggcatgtcaaggcagact

SEQ ID NO: 3999660 - DNA, 25 bp, Homo sapien
tgagtgtaaaccatctttgccccag

SEQ ID NO: 3999661 - DNA, 25 bp, Homo sapien
gatgcactaggatgactctaaccgg

SEQ ID NO: 3999662 - DNA, 25 bp, Homo sapien
catccttggatgagtgcgcactggg

SEQ ID NO: 3999663 - DNA, 25 bp, Homo sapien
ctaagctgtataattcagagttgtt

SEQ ID NO: 3999664 - DNA, 25 bp, Homo sapien
gaagtttccatacaccttggttgaa

SEQ ID NO: 3999665 - DNA, 25 bp, Homo sapien
acaccttggttgaatgaatgtcttc

SEQ ID NO: 3999666 - DNA, 25 bp, Homo sapien
ctgtatcctcacatacagtgaagtt

SEQ ID NO: 3999667 - DNA, 25 bp, Homo sapien
tcttatttcttgttggaggtccagc

SEQ ID NO: 3999668 - DNA, 25 bp, Homo sapien
tgaatcttatttcttgttggaggtc

SEQ ID NO: 3999669 - DNA, 25 bp, Homo sapien
catttccatttgtctgaatcttatt

SEQ ID NO: 3999670 - DNA, 25 bp, Homo sapien
ttatttcttgttggaggtccagctc

SEQ ID NO: 3999671 - DNA, 25 bp, Homo sapien
gttgctagtttaccttcgctttgta

SEQ ID NO: 3999672 - DNA, 25 bp, Homo sapien
gttgaattccgagagtcacctgccc

SEQ ID NO: 3999673 - DNA, 25 bp, Homo sapien
tttaccttcgctttgtaaacagtga

SEQ ID NO: 3999674 - DNA, 25 bp, Homo sapien
gatgtgaggttgaattccgagagtc

SEQ ID NO: 3999675 - DNA, 25 bp, Homo sapien
cttggctcgaaagttcttagcagca

SEQ ID NO: 3999676 - DNA, 25 bp, Homo sapien
ttgaagcctgatgaattcgttcatg

SEQ ID NO: 3999677 - DNA, 25 bp, Homo sapien
tcatgttcttggctcgaaagttctt

SEQ ID NO: 3999678 - DNA, 25 bp, Homo sapien
tgttcttggctcgaaagttcttagc

SEQ ID NO: 3999679 - DNA, 25 bp, Homo sapien
gtgacaaacagatgccgacgacatt

SEQ ID NO: 3999680 - DNA, 25 bp, Homo sapien
acagagtgaggatttacgaagtgac

SEQ ID NO: 3999681 - DNA, 25 bp, Homo sapien
gatgccgacgacatttactgtgaga

SEQ ID NO: 3999682 - DNA, 25 bp, Homo sapien
ttactgtgagatttctcatagctga

SEQ ID NO: 3999683 - DNA, 25 bp, Homo sapien
tagccccttgcagctcagtgcaatg

SEQ ID NO: 3999684 - DNA, 25 bp, Homo sapien
caatttagccccttgcagctcagtg

SEQ ID NO: 3999685 - DNA, 25 bp, Homo sapien
cagctcagtgcaatgccatgcttca

SEQ ID NO: 3999686 - DNA, 25 bp, Homo sapien
tttgcagccaatttagccccttgca

SEQ ID NO: 3999687 - DNA, 25 bp, Homo sapien
tacagcaggatttatgagcgaaagc

SEQ ID NO: 3999688 - DNA, 25 bp, Homo sapien
tcagtaaagattgcaaggagacatc

SEQ ID NO: 3999689 - DNA, 25 bp, Homo sapien
cctggtgttcgggagtctgctgtcc

SEQ ID NO: 3999690 - DNA, 25 bp, Homo sapien
gcatgacaaagggtcatgagaggcc

SEQ ID NO: 3999691 - DNA, 25 bp, Homo sapien
tgtagaaagaacaagcgtggcggat

SEQ ID NO: 3999692 - DNA, 25 bp, Homo sapien
cagacttgctattttgtagtgccca

SEQ ID NO: 3999693 - DNA, 25 bp, Homo sapien
gaaaatatgaggcatagctgttgta

SEQ ID NO: 3999694 - DNA, 25 bp, Homo sapien
agcgtggcggatttttcacacttga

SEQ ID NO: 3999695 - DNA, 25 bp, Homo sapien
ctctgccgtatagatccctgctctg

SEQ ID NO: 3999696 - DNA, 25 bp, Homo sapien
tcaaactcggagtaaaactggctcc

SEQ ID NO: 3999697 - DNA, 25 bp, Homo sapien
aactcggagtaaaactggctcctct

SEQ ID NO: 3999698 - DNA, 25 bp, Homo sapien
ggctcctctgccgtatagatccctg

SEQ ID NO: 3999699 - DNA, 25 bp, Homo sapien
gaagcagggaatctttaagagtggt

SEQ ID NO: 3999700 - DNA, 25 bp, Homo sapien
acaggaagcagggaatctttaagag

SEQ ID NO: 3999701 - DNA, 25 bp, Homo sapien
gggaatctttaagagtggtattgga

SEQ ID NO: 3999702 - DNA, 25 bp, Homo sapien
gcagggaatctttaagagtggtatt

SEQ ID NO: 3999703 - DNA, 25 bp, Homo sapien
tcttcctctggttgaggacttgtta

SEQ ID NO: 3999704 - DNA, 25 bp, Homo sapien
ggctcttggaaacgacactattttc

SEQ ID NO: 3999705 - DNA, 25 bp, Homo sapien
tgttacctggacttttgaattatct

SEQ ID NO: 3999706 - DNA, 25 bp, Homo sapien
tctgttgtgcaggtatcattgctgc

SEQ ID NO: 3999707 - DNA, 25 bp, Homo sapien
tctctactgaagtggtacttctgca

SEQ ID NO: 3999708 - DNA, 25 bp, Homo sapien
gtctctactgaagtggtacttctgc

SEQ ID NO: 3999709 - DNA, 25 bp, Homo sapien
tactgaagtggtacttctgcagctc

SEQ ID NO: 3999710 - DNA, 25 bp, Homo sapien
tctactgaagtggtacttctgcagc

SEQ ID NO: 3999711 - DNA, 25 bp, Homo sapien
agtccgaaagcattgactgaaatgc

SEQ ID NO: 3999712 - DNA, 25 bp, Homo sapien
gaaagcattgactgaaatgcaaagc

SEQ ID NO: 3999713 - DNA, 25 bp, Homo sapien
ccgaaagcattgactgaaatgcaaa

SEQ ID NO: 3999714 - DNA, 25 bp, Homo sapien
ctgaaatgcaaagcccggatgccag

SEQ ID NO: 3999715 - DNA, 25 bp, Homo sapien
tgcacgcgcaagcattccaagccca

SEQ ID NO: 3999716 - DNA, 25 bp, Homo sapien
cgcgcaagcattccaagcccagtca

SEQ ID NO: 3999717 - DNA, 25 bp, Homo sapien
ctgcacgcgcaagcattccaagccc

SEQ ID NO: 3999718 - DNA, 25 bp, Homo sapien
cacgcgcaagcattccaagcccagt

SEQ ID NO: 3999719 - DNA, 25 bp, Homo sapien
ccttccagcgggcatttgggtcatt

SEQ ID NO: 3999720 - DNA, 25 bp, Homo sapien
gggatttgagtggatgggtccttcc

SEQ ID NO: 3999721 - DNA, 25 bp, Homo sapien
catttgggtcatttggcccgtcgcc

SEQ ID NO: 3999722 - DNA, 25 bp, Homo sapien
acctggcctaggcaccctggaatct

SEQ ID NO: 3999723 - DNA, 25 bp, Homo sapien
ggtttccgaagctgggtctgagtcc

SEQ ID NO: 3999724 - DNA, 25 bp, Homo sapien
tgatgttaggtaaccagtcactggt

SEQ ID NO: 3999725 - DNA, 25 bp, Homo sapien
cttctgatgttaggtaaccagtcac

SEQ ID NO: 3999726 - DNA, 25 bp, Homo sapien
taaccagtcactggtttccgaagct

SEQ ID NO: 3999727 - DNA, 25 bp, Homo sapien
tacctgaacaagcacctctagcccc

SEQ ID NO: 3999728 - DNA, 25 bp, Homo sapien
ggtacctgaacaagcacctctagcc

SEQ ID NO: 3999729 - DNA, 25 bp, Homo sapien
gtacctgaacaagcacctctagccc

SEQ ID NO: 3999730 - DNA, 25 bp, Homo sapien
ggctgtgtcggccttacctgtctac

SEQ ID NO: 3999731 - DNA, 25 bp, Homo sapien
tggagtctgcggacagtttgcaagc

SEQ ID NO: 3999732 - DNA, 25 bp, Homo sapien
tgattcagacccgactgactttgcc

SEQ ID NO: 3999733 - DNA, 25 bp, Homo sapien
gaactggctaaacggctcagccaaa

SEQ ID NO: 3999734 - DNA, 25 bp, Homo sapien
tcattctaccaaagaatcaggcacc

SEQ ID NO: 3999735 - DNA, 25 bp, Homo sapien
gaagagtctttatataggagctctc

SEQ ID NO: 3999736 - DNA, 25 bp, Homo sapien
tccttgtgtctccaacactgagtcc

SEQ ID NO: 3999737 - DNA, 25 bp, Homo sapien
gaggatttaatattttgttcgttca

SEQ ID NO: 3999738 - DNA, 25 bp, Homo sapien
acactgagtccaaggtctgcacatg

SEQ ID NO: 3999739 - DNA, 25 bp, Homo sapien
ggtcactgcattttgtaccatcatt

SEQ ID NO: 3999740 - DNA, 25 bp, Homo sapien
tggctcaaccgttaataagaaggtg

SEQ ID NO: 3999741 - DNA, 25 bp, Homo sapien
tataggcattacgtctctgaagcat

SEQ ID NO: 3999742 - DNA, 25 bp, Homo sapien
gcattattgctcatacctagaaggg

SEQ ID NO: 3999743 - DNA, 25 bp, Homo sapien
agtcagcgagcagatctctgatgaa

SEQ ID NO: 3999744 - DNA, 25 bp, Homo sapien
cacagtcagcgagcagatctctgat

SEQ ID NO: 3999745 - DNA, 25 bp, Homo sapien
cagtcagcgagcagatctctgatga

SEQ ID NO: 3999746 - DNA, 25 bp, Homo sapien
tccacagtcagcgagcagatctctg

SEQ ID NO: 3999747 - DNA, 25 bp, Homo sapien
tcctctgtagccatccttgggtcca

SEQ ID NO: 3999748 - DNA, 25 bp, Homo sapien
caggaaatctctcccttgctctgtt

SEQ ID NO: 3999749 - DNA, 25 bp, Homo sapien
tgcatagatgttgcctgtgttagaa

SEQ ID NO: 3999750 - DNA, 25 bp, Homo sapien
tccaaagtgagattgtactcccaac

SEQ ID NO: 3999751 - DNA, 25 bp, Homo sapien
ctggagagaagctgttgacaccaca

SEQ ID NO: 3999752 - DNA, 25 bp, Homo sapien
cctggagagaagctgttgacaccac

SEQ ID NO: 3999753 - DNA, 25 bp, Homo sapien
cacctggagagaagctgttgacacc

SEQ ID NO: 3999754 - DNA, 25 bp, Homo sapien
gtcacctggagagaagctgttgaca

SEQ ID NO: 3999755 - DNA, 25 bp, Homo sapien
tttgcaggcatgcatagcaccccac

SEQ ID NO: 3999756 - DNA, 25 bp, Homo sapien
gatagctgtctcaaatacaatctgc

SEQ ID NO: 3999757 - DNA, 25 bp, Homo sapien
tacaatctgcaatctatcaaggagg

SEQ ID NO: 3999758 - DNA, 25 bp, Homo sapien
ggcgtggaggtgtcctgaataatca

SEQ ID NO: 3999759 - DNA, 25 bp, Homo sapien
cctggctgagtttgacttcgttgac

SEQ ID NO: 3999760 - DNA, 25 bp, Homo sapien
gagtttgacttcgttgaccacagag

SEQ ID NO: 3999761 - DNA, 25 bp, Homo sapien
aggtgtttggttcccgctgcgattg

SEQ ID NO: 3999762 - DNA, 25 bp, Homo sapien
gcgattggatctgtattcaaaacag

SEQ ID NO: 3999763 - DNA, 25 bp, Homo sapien
gggacaagcttgagtgacatctcag

SEQ ID NO: 3999764 - DNA, 25 bp, Homo sapien
ggagagctccgcacataaggacaga

SEQ ID NO: 3999765 - DNA, 25 bp, Homo sapien
ctagggctgtagtccagggacaagc

SEQ ID NO: 3999766 - DNA, 25 bp, Homo sapien
gggccgctaccttcggagagctccg

SEQ ID NO: 3999767 - DNA, 25 bp, Homo sapien
ccaggacagcgagtaggtgcaagct

SEQ ID NO: 3999768 - DNA, 25 bp, Homo sapien
gcaagctgatccttggtggaccaag

SEQ ID NO: 3999769 - DNA, 25 bp, Homo sapien
aaacttgctctaaaggaccaggaca

SEQ ID NO: 3999770 - DNA, 25 bp, Homo sapien
ggtggaccaagcctgtattccccac

SEQ ID NO: 3999771 - DNA, 25 bp, Homo sapien
tgccagggactaagaattcctgggg

SEQ ID NO: 3999772 - DNA, 25 bp, Homo sapien
tcatcagactttgaaggtatgcaat

SEQ ID NO: 3999773 - DNA, 25 bp, Homo sapien
ggggtgtctttgacctgtgttccag

SEQ ID NO: 3999774 - DNA, 25 bp, Homo sapien
tttgaaggtatgcaatgatgccagg

SEQ ID NO: 3999775 - DNA, 25 bp, Homo sapien
ttctcttcattgtgcctgcagggag

SEQ ID NO: 3999776 - DNA, 25 bp, Homo sapien
tctcttcattgtgcctgcagggagg

SEQ ID NO: 3999777 - DNA, 25 bp, Homo sapien
tgagcactgccaaaatcctggaccc

SEQ ID NO: 3999778 - DNA, 25 bp, Homo sapien
ttggttctgcctgggacgaagccct

SEQ ID NO: 3999779 - DNA, 25 bp, Homo sapien
tgatcgtgcttttgcctagagaaac

SEQ ID NO: 3999780 - DNA, 25 bp, Homo sapien
tactctgaaaaaggagcgctgtgct

SEQ ID NO: 3999781 - DNA, 25 bp, Homo sapien
cggttctcgtgtcaccttcacaggg

SEQ ID NO: 3999782 - DNA, 25 bp, Homo sapien
cactttccgggggatcaaaaagcag

SEQ ID NO: 3999783 - DNA, 25 bp, Homo sapien
ttccagagaagttccctctgccggt

SEQ ID NO: 3999784 - DNA, 25 bp, Homo sapien
aaagccagacgaccgcgcgaaggga

SEQ ID NO: 3999785 - DNA, 25 bp, Homo sapien
gaatactttaaaaccgcctgatgcc

SEQ ID NO: 3999786 - DNA, 25 bp, Homo sapien
ccgcgttgcgatggaaagggtggat

SEQ ID NO: 3999787 - DNA, 25 bp, Homo sapien
gtttctgcacctgtccgaatacttt

SEQ ID NO: 3999788 - DNA, 25 bp, Homo sapien
gcttcggtgccttatgtaggttctg

SEQ ID NO: 3999789 - DNA, 25 bp, Homo sapien
ctgatgcaaactgcgtgtcagattc

SEQ ID NO: 3999790 - DNA, 25 bp, Homo sapien
catggtaaggtatggtgaggcaaca

SEQ ID NO: 3999791 - DNA, 25 bp, Homo sapien
gatgatgagattcgttttctgatgc

SEQ ID NO: 3999792 - DNA, 25 bp, Homo sapien
ggatggatgatgagattcgttttct

SEQ ID NO: 3999793 - DNA, 25 bp, Homo sapien
gggccctgctaaagtgtagatcgtc

SEQ ID NO: 3999794 - DNA, 25 bp, Homo sapien
tgtagatcgtcacccaggagagtct

SEQ ID NO: 3999795 - DNA, 25 bp, Homo sapien
tctgtgatgccagagacttgggcac

SEQ ID NO: 3999796 - DNA, 25 bp, Homo sapien
gggcacacgttgaagtttattccca

SEQ ID NO: 3999797 - DNA, 25 bp, Homo sapien
tagtttcaggatggaccggggaagc

SEQ ID NO: 3999798 - DNA, 25 bp, Homo sapien
catgccctggatctgttgtaggaga

SEQ ID NO: 3999799 - DNA, 25 bp, Homo sapien
ttgtaggagaggcagcgtgttcccc

SEQ ID NO: 3999800 - DNA, 25 bp, Homo sapien
gggaagctgacacgtgcattttcat

SEQ ID NO: 3999801 - DNA, 25 bp, Homo sapien
ccagaaccgacacttagaaccacga

SEQ ID NO: 3999802 - DNA, 25 bp, Homo sapien
tttgccccagaaccgacacttagaa

SEQ ID NO: 3999803 - DNA, 25 bp, Homo sapien
cgacacttagaaccacgattctgca

SEQ ID NO: 3999804 - DNA, 25 bp, Homo sapien
ttttgccccagaaccgacacttaga

SEQ ID NO: 3999805 - DNA, 25 bp, Homo sapien
gcaggacttgccaaaagaggaaaga

SEQ ID NO: 3999806 - DNA, 25 bp, Homo sapien
tctgtatgatttacggagagacctc

SEQ ID NO: 3999807 - DNA, 25 bp, Homo sapien
tcaggcgacctgtcaactttgatgc

SEQ ID NO: 3999808 - DNA, 25 bp, Homo sapien
tgccaggttcctgcgttggaagaat

SEQ ID NO: 3999809 - DNA, 25 bp, Homo sapien
ccaaatctctgttgtactggggagc

SEQ ID NO: 3999810 - DNA, 25 bp, Homo sapien
aaagaacgaggctgtgagaatcatc

SEQ ID NO: 3999811 - DNA, 25 bp, Homo sapien
tatttctccgcaaccaattccaatc

SEQ ID NO: 3999812 - DNA, 25 bp, Homo sapien
cactgagaatgatggagtgtatttc

SEQ ID NO: 3999813 - DNA, 25 bp, Homo sapien
tgtgaaagttttagctatctggttc

SEQ ID NO: 3999814 - DNA, 25 bp, Homo sapien
ttgtggaagatagtcttttatagcc

SEQ ID NO: 3999815 - DNA, 25 bp, Homo sapien
tccagtatgcttgtcagtaatgatg

SEQ ID NO: 3999816 - DNA, 25 bp, Homo sapien
aattgaagcaaatattcattgtgga

SEQ ID NO: 3999817 - DNA, 25 bp, Homo sapien
tagcatcccacttctaatatggtgg

SEQ ID NO: 3999818 - DNA, 25 bp, Homo sapien
agcttggtaaggtgctctgtagcat

SEQ ID NO: 3999819 - DNA, 25 bp, Homo sapien
ccacttctaatatggtgggtgagaa

SEQ ID NO: 3999820 - DNA, 25 bp, Homo sapien
cttggtaaggtgctctgtagcatcc

SEQ ID NO: 3999821 - DNA, 25 bp, Homo sapien
agcaggctgaaaaggctgtctttgc

SEQ ID NO: 3999822 - DNA, 25 bp, Homo sapien
agtggcttctggacttctgctatat

SEQ ID NO: 3999823 - DNA, 25 bp, Homo sapien
gacttctgctatattcttgattttg

SEQ ID NO: 3999824 - DNA, 25 bp, Homo sapien
tttgctttttatagcaggctgaaaa

SEQ ID NO: 3999825 - DNA, 25 bp, Homo sapien
agctgcctggccatgacatcgcaga

SEQ ID NO: 3999826 - DNA, 25 bp, Homo sapien
ctgcctggccatgacatcgcagaga

SEQ ID NO: 3999827 - DNA, 25 bp, Homo sapien
tgcctggccatgacatcgcagagag

SEQ ID NO: 3999828 - DNA, 25 bp, Homo sapien
gctgcctggccatgacatcgcagag

SEQ ID NO: 3999829 - DNA, 25 bp, Homo sapien
tagccactaccagaactgccccact

SEQ ID NO: 3999830 - DNA, 25 bp, Homo sapien
ttagccactaccagaactgccccac

SEQ ID NO: 3999831 - DNA, 25 bp, Homo sapien
gccactaccagaactgccccactct

SEQ ID NO: 3999832 - DNA, 25 bp, Homo sapien
cactaccagaactgccccactctcc

SEQ ID NO: 3999833 - DNA, 25 bp, Homo sapien
aagttcctgcattacaccgtgagcg

SEQ ID NO: 3999834 - DNA, 25 bp, Homo sapien
cataatagatgttgagtagcccgac

SEQ ID NO: 3999835 - DNA, 25 bp, Homo sapien
gacatagtgtcgaccttctagagga

SEQ ID NO: 3999836 - DNA, 25 bp, Homo sapien
aatactaggtgcttcccatttggga

SEQ ID NO: 3999837 - DNA, 25 bp, Homo sapien
taagtaagtaagagctctcccctcc

SEQ ID NO: 3999838 - DNA, 25 bp, Homo sapien
ctaagtaagtaagagctctcccctc

SEQ ID NO: 3999839 - DNA, 25 bp, Homo sapien
tccagagtgctcagagtaataattg

SEQ ID NO: 3999840 - DNA, 25 bp, Homo sapien
tctgccagccagcaacttaactcca

SEQ ID NO: 3999841 - DNA, 25 bp, Homo sapien
gagtgctcagagtaataattggaat

SEQ ID NO: 3999842 - DNA, 25 bp, Homo sapien
actccagagtgctcagagtaataat

SEQ ID NO: 3999843 - DNA, 25 bp, Homo sapien
gagaacggtcctttgcagcgtggaa

SEQ ID NO: 3999844 - DNA, 25 bp, Homo sapien
tataaacaaatgggtcatctggaga

SEQ ID NO: 3999845 - DNA, 25 bp, Homo sapien
ggtcatctggagaacggtcctttgc

SEQ ID NO: 3999846 - DNA, 25 bp, Homo sapien
cagcgtggaacttgttgcgtcttcc

SEQ ID NO: 3999847 - DNA, 25 bp, Homo sapien
cagctctgagccgatgtttctgctg

SEQ ID NO: 3999848 - DNA, 25 bp, Homo sapien
tcagctctgagccgatgtttctgct

SEQ ID NO: 3999849 - DNA, 25 bp, Homo sapien
gctcagctctgagccgatgtttctg

SEQ ID NO: 3999850 - DNA, 25 bp, Homo sapien
ctcagctctgagccgatgtttctgc

SEQ ID NO: 3999851 - DNA, 25 bp, Homo sapien
ttcactattggacaaatcgttccca

SEQ ID NO: 3999852 - DNA, 25 bp, Homo sapien
catagatatgcccttgggccataca

SEQ ID NO: 3999853 - DNA, 25 bp, Homo sapien
tagagccatattcacctcatcatgc

SEQ ID NO: 3999854 - DNA, 25 bp, Homo sapien
gatggttgatggtgtaaatagagcc

SEQ ID NO: 3999855 - DNA, 25 bp, Homo sapien
tcttctccgttgcactaattacagt

SEQ ID NO: 3999856 - DNA, 25 bp, Homo sapien
taattacagtcatgtcttccactcg

SEQ ID NO: 3999857 - DNA, 25 bp, Homo sapien
ccaactctttttacagactagtaag

SEQ ID NO: 3999858 - DNA, 25 bp, Homo sapien
cgtgtatttgggatattccaactct

SEQ ID NO: 3999859 - DNA, 25 bp, Homo sapien
ctaatgcgatattgtgccgctgtca

SEQ ID NO: 3999860 - DNA, 25 bp, Homo sapien
cactgtctcacagcgggctgtcagg

SEQ ID NO: 3999861 - DNA, 25 bp, Homo sapien
tggctcctcgtggagaagatcaaac

SEQ ID NO: 3999862 - DNA, 25 bp, Homo sapien
gccgctgtcatttctgatcagtttt

SEQ ID NO: 3999863 - DNA, 25 bp, Homo sapien
acccatcatacagaacgccagtcat

SEQ ID NO: 3999864 - DNA, 25 bp, Homo sapien
tctacattgtaagggaccagagctc

SEQ ID NO: 3999865 - DNA, 25 bp, Homo sapien
cacttgctgccggtgatggagccgt

SEQ ID NO: 3999866 - DNA, 25 bp, Homo sapien
gaacgccagtcatcagccgccgagt

SEQ ID NO: 3999867 - DNA, 25 bp, Homo sapien
caagcacagatgttaccaagccact

SEQ ID NO: 3999868 - DNA, 25 bp, Homo sapien
gccatcctggtttactctatagaag

SEQ ID NO: 3999869 - DNA, 25 bp, Homo sapien
cctcccatgttagcattggttctaa

SEQ ID NO: 3999870 - DNA, 25 bp, Homo sapien
ctgtgtagaatgctcctctgccatc

SEQ ID NO: 3999871 - DNA, 25 bp, Homo sapien
cctcaccagggactttgatgccatt

SEQ ID NO: 3999872 - DNA, 25 bp, Homo sapien
accctcaccagggactttgatgcca

SEQ ID NO: 3999873 - DNA, 25 bp, Homo sapien
tgctgccaaggagtttccaacccca

SEQ ID NO: 3999874 - DNA, 25 bp, Homo sapien
tctgctgccaaggagtttccaaccc

SEQ ID NO: 3999875 - DNA, 25 bp, Homo sapien
gcctttcccaagaggtgaactggat

SEQ ID NO: 3999876 - DNA, 25 bp, Homo sapien
tacagctgtgcagtgtaacctaaat

SEQ ID NO: 3999877 - DNA, 25 bp, Homo sapien
gcagatttgcagctttgaggtggaa

SEQ ID NO: 3999878 - DNA, 25 bp, Homo sapien
aatctttgcacgtgtctttaaacag

SEQ ID NO: 3999879 - DNA, 25 bp, Homo sapien
ctgctctgcccaggcttctagctgc

SEQ ID NO: 3999880 - DNA, 25 bp, Homo sapien
ccaggcttctagctgctgacagcca

SEQ ID NO: 3999881 - DNA, 25 bp, Homo sapien
tctgcccaggcttctagctgctgac

SEQ ID NO: 3999882 - DNA, 25 bp, Homo sapien
tcaaccttcagggtcatttgcagct

SEQ ID NO: 3999883 - DNA, 25 bp, Homo sapien
ttcatacttacccatcttgttttgc

SEQ ID NO: 3999884 - DNA, 25 bp, Homo sapien
cctgcttactgctgtttgaagaaat

SEQ ID NO: 3999885 - DNA, 25 bp, Homo sapien
aactgtcctgcttactgctgtttga

SEQ ID NO: 3999886 - DNA, 25 bp, Homo sapien
gagccctatatgtgcatttcaccca

SEQ ID NO: 3999887 - DNA, 25 bp, Homo sapien
catagccatctaaggaggtacagaa

SEQ ID NO: 3999888 - DNA, 25 bp, Homo sapien
tcagctacagcatagccatctaagg

SEQ ID NO: 3999889 - DNA, 25 bp, Homo sapien
ttggtaattgtcagctacagcatag

SEQ ID NO: 3999890 - DNA, 25 bp, Homo sapien
tacagcatagccatctaaggaggta

SEQ ID NO: 3999891 - DNA, 25 bp, Homo sapien
gagaattcgaagatgcttgaggcat

SEQ ID NO: 3999892 - DNA, 25 bp, Homo sapien
ggaaggatgcttggatatggctgag

SEQ ID NO: 3999893 - DNA, 25 bp, Homo sapien
tcctgcctggtagtatgagaattcg

SEQ ID NO: 3999894 - DNA, 25 bp, Homo sapien
tgagccacgttcctgcctggtagta

SEQ ID NO: 3999895 - DNA, 25 bp, Homo sapien
agctttatcgttgctgagccggaag

SEQ ID NO: 3999896 - DNA, 25 bp, Homo sapien
caggaagctgcgatgagtgtgtaca

SEQ ID NO: 3999897 - DNA, 25 bp, Homo sapien
gtgtgtacacaaaccatctcctgat

SEQ ID NO: 3999898 - DNA, 25 bp, Homo sapien
gagccggaagttgttatgttatgca

SEQ ID NO: 3999899 - DNA, 25 bp, Homo sapien
ggaatccatttcatcgcagaactgc

SEQ ID NO: 3999900 - DNA, 25 bp, Homo sapien
ctgacaaggacgaggtgcaacactg

SEQ ID NO: 3999901 - DNA, 25 bp, Homo sapien
tatgtcatttctaccaagccagtgg

SEQ ID NO: 3999902 - DNA, 25 bp, Homo sapien
tgcaacactgttagcggaatccatt

SEQ ID NO: 3999903 - DNA, 25 bp, Homo sapien
gttttgtctttgctaggacgataac

SEQ ID NO: 3999904 - DNA, 25 bp, Homo sapien
gataacccagtcgtttcatacaact

SEQ ID NO: 3999905 - DNA, 25 bp, Homo sapien
tcgtttgcacctgaatattccatgg

SEQ ID NO: 3999906 - DNA, 25 bp, Homo sapien
ttcatacaactgttttcgtttgcac

SEQ ID NO: 3999907 - DNA, 25 bp, Homo sapien
ttaagagactgattaatgcgcaaga

SEQ ID NO: 3999908 - DNA, 25 bp, Homo sapien
gattaatgcgcaagatggcaagaac

SEQ ID NO: 3999909 - DNA, 25 bp, Homo sapien
ctgattaatgcgcaagatggcaaga

SEQ ID NO: 3999910 - DNA, 25 bp, Homo sapien
gagactgattaatgcgcaagatggc

SEQ ID NO: 3999911 - DNA, 25 bp, Homo sapien
cttcgtttctcaccgcaagagctct

SEQ ID NO: 3999912 - DNA, 25 bp, Homo sapien
ttcctccctttcttgcatagctaac

SEQ ID NO: 3999913 - DNA, 25 bp, Homo sapien
tctgctcttcgtttctcaccgcaag

SEQ ID NO: 3999914 - DNA, 25 bp, Homo sapien
cctttcttgcatagctaacacccat

SEQ ID NO: 3999915 - DNA, 25 bp, Homo sapien
tgatcaggcagtttcggagaccacg

SEQ ID NO: 3999916 - DNA, 25 bp, Homo sapien
cccggttgaggcatgaataacagca

SEQ ID NO: 3999917 - DNA, 25 bp, Homo sapien
gagaccacgccagggtttcatgtgc

SEQ ID NO: 3999918 - DNA, 25 bp, Homo sapien
tccaacgggtgccactacagtgtct

SEQ ID NO: 3999919 - DNA, 25 bp, Homo sapien
caaggcgagacaaaagcttattacc

SEQ ID NO: 3999920 - DNA, 25 bp, Homo sapien
tgtccaagggacaaatacatttctg

SEQ ID NO: 3999921 - DNA, 25 bp, Homo sapien
aatgctctatgaatatgtccaaggg

SEQ ID NO: 3999922 - DNA, 25 bp, Homo sapien
gataagccgctttgttcagctgtaa

SEQ ID NO: 3999923 - DNA, 25 bp, Homo sapien
tttgccaataaccagggcggaagga

SEQ ID NO: 3999924 - DNA, 25 bp, Homo sapien
tttccctggagttagcaaccctctg

SEQ ID NO: 3999925 - DNA, 25 bp, Homo sapien
aaggctgtggcagtacaactgtcta

SEQ ID NO: 3999926 - DNA, 25 bp, Homo sapien
gctgtgtctccaagagcaaggctgt

SEQ ID NO: 3999927 - DNA, 25 bp, Homo sapien
gccaccttcaatctctctaacattt

SEQ ID NO: 3999928 - DNA, 25 bp, Homo sapien
gatgttagttgtttgatccccagtg

SEQ ID NO: 3999929 - DNA, 25 bp, Homo sapien
atgttagttgtttgatccccagtgt

SEQ ID NO: 3999930 - DNA, 25 bp, Homo sapien
aatgccaccttcaatctctctaaca

SEQ ID NO: 3999931 - DNA, 25 bp, Homo sapien
ctcctggtcccttacaaatatattc

SEQ ID NO: 3999932 - DNA, 25 bp, Homo sapien
tcaagaacacagtttgtattaccat

SEQ ID NO: 3999933 - DNA, 25 bp, Homo sapien
cctggtcccttacaaatatattcct

SEQ ID NO: 3999934 - DNA, 25 bp, Homo sapien
tattcctttccggattcttcaagaa

SEQ ID NO: 3999935 - DNA, 25 bp, Homo sapien
gctcttgacgatacagcagtgtttg

SEQ ID NO: 3999936 - DNA, 25 bp, Homo sapien
gcagaaattagcacggcgcagcgct

SEQ ID NO: 3999937 - DNA, 25 bp, Homo sapien
cagcagaaattagcacggcgcagcg

SEQ ID NO: 3999938 - DNA, 25 bp, Homo sapien
ctagcaagaaagctcttgacgatac

SEQ ID NO: 3999939 - DNA, 25 bp, Homo sapien
cagagaacattgagcggagctgagc

SEQ ID NO: 3999940 - DNA, 25 bp, Homo sapien
cagttcactccaaggcgctgtgcag

SEQ ID NO: 3999941 - DNA, 25 bp, Homo sapien
tgagctccgggcgaagtgtgttccc

SEQ ID NO: 3999942 - DNA, 25 bp, Homo sapien
gccttcagctgcgatgagattagca

SEQ ID NO: 3999943 - DNA, 25 bp, Homo sapien
cagaaagtggacagtaagcttggat

SEQ ID NO: 3999944 - DNA, 25 bp, Homo sapien
ggatgacacagagggggttctcagt

SEQ ID NO: 3999945 - DNA, 25 bp, Homo sapien
tgctagggtttttgcctggtaagta

SEQ ID NO: 3999946 - DNA, 25 bp, Homo sapien
agtggacagtaagcttggatgacac

SEQ ID NO: 3999947 - DNA, 25 bp, Homo sapien
tgcctgtagctttgttctgaaccgt

SEQ ID NO: 3999948 - DNA, 25 bp, Homo sapien
tgatattataaacccacatgcctgt

SEQ ID NO: 3999949 - DNA, 25 bp, Homo sapien
accctgttagaggagctttgtccga

SEQ ID NO: 3999950 - DNA, 25 bp, Homo sapien
gctgagcctaatgtcaaccctgtta

SEQ ID NO: 3999951 - DNA, 25 bp, Homo sapien
aacctaggtccattagccatgctga

SEQ ID NO: 3999952 - DNA, 25 bp, Homo sapien
cattgctggtccatagtttccaccc

SEQ ID NO: 3999953 - DNA, 25 bp, Homo sapien
gcagaagaggtttgccagaggtaaa

SEQ ID NO: 3999954 - DNA, 25 bp, Homo sapien
tccatgccccatactggttaaaaag

SEQ ID NO: 3999955 - DNA, 25 bp, Homo sapien
tcaatcattgcaacagtgacactcc

SEQ ID NO: 3999956 - DNA, 25 bp, Homo sapien
tgttgttcctcttcaatcattgcaa

SEQ ID NO: 3999957 - DNA, 25 bp, Homo sapien
attgcaacagtgacactccccttag

SEQ ID NO: 3999958 - DNA, 25 bp, Homo sapien
atcattgcaacagtgacactcccct

SEQ ID NO: 3999959 - DNA, 25 bp, Homo sapien
ctttttccagatgcctaatggaggc

SEQ ID NO: 3999960 - DNA, 25 bp, Homo sapien
ttttccagatgcctaatggaggcat

SEQ ID NO: 3999961 - DNA, 25 bp, Homo sapien
taattaacacatcgcacactgaaga

SEQ ID NO: 3999962 - DNA, 25 bp, Homo sapien
ctcctatctggttgtaattaacaca

SEQ ID NO: 3999963 - DNA, 25 bp, Homo sapien
tttgctcatcttgcagtcttgtggc

SEQ ID NO: 3999964 - DNA, 25 bp, Homo sapien
agtcttgtggcggtgtcatttctac

SEQ ID NO: 3999965 - DNA, 25 bp, Homo sapien
gtgtcatttctacggttggcttttc

SEQ ID NO: 3999966 - DNA, 25 bp, Homo sapien
gctcatcttgcagtcttgtggcggt

SEQ ID NO: 3999967 - DNA, 25 bp, Homo sapien
cttgtttggttctgcgtttctgtac

SEQ ID NO: 3999968 - DNA, 25 bp, Homo sapien
caaagggcagtcatagaaataacaa

SEQ ID NO: 3999969 - DNA, 25 bp, Homo sapien
gccaaagggcagtcatagaaataac

SEQ ID NO: 3999970 - DNA, 25 bp, Homo sapien
aactccacatcattccttgtttggt

SEQ ID NO: 3999971 - DNA, 25 bp, Homo sapien
tgtaggcgtctataccatgccaccc

SEQ ID NO: 3999972 - DNA, 25 bp, Homo sapien
ctttcatatcatgtaggcgtctata

SEQ ID NO: 3999973 - DNA, 25 bp, Homo sapien
aaatggcggcaagcaatcggaggta

SEQ ID NO: 3999974 - DNA, 25 bp, Homo sapien
taatgtccgacaggcaagggaggct

SEQ ID NO: 3999975 - DNA, 25 bp, Homo sapien
gcagcaattcgattatggcatgatt

SEQ ID NO: 3999976 - DNA, 25 bp, Homo sapien
gggtggaattgcttgcactccgtga

SEQ ID NO: 3999977 - DNA, 25 bp, Homo sapien
ttataggttcgggaaataggcagca

SEQ ID NO: 3999978 - DNA, 25 bp, Homo sapien
ggaattgcttgcactccgtgacccc

SEQ ID NO: 3999979 - DNA, 25 bp, Homo sapien
aaccaaatagatgcgccaagggaga

SEQ ID NO: 3999980 - DNA, 25 bp, Homo sapien
aaaccaaatagatgcgccaagggag

SEQ ID NO: 3999981 - DNA, 25 bp, Homo sapien
tctcccccaataaaattaggcgcac

SEQ ID NO: 3999982 - DNA, 25 bp, Homo sapien
gagaggatctcccccaataaaatta

SEQ ID NO: 3999983 - DNA, 25 bp, Homo sapien
gcagtggatcttgggttagaagcta

SEQ ID NO: 3999984 - DNA, 25 bp, Homo sapien
ctagagtgaagtggtctgcagacag

SEQ ID NO: 3999985 - DNA, 25 bp, Homo sapien
gggacatgatgcgttgcatatttta

SEQ ID NO: 3999986 - DNA, 25 bp, Homo sapien
tcttggaggttgtgggttgacacaa

SEQ ID NO: 3999987 - DNA, 25 bp, Homo sapien
ttaacaactgtgtgtagctctccca

SEQ ID NO: 3999988 - DNA, 25 bp, Homo sapien
cagtctctaaccaacttctgagaca

SEQ ID NO: 3999989 - DNA, 25 bp, Homo sapien
caaatgtaccctccggtgacttgct

SEQ ID NO: 3999990 - DNA, 25 bp, Homo sapien
cggtgacttgcttaacaactgtgtg

SEQ ID NO: 3999991 - DNA, 25 bp, Homo sapien
taggtcgtaaagtacaacacagtac

SEQ ID NO: 3999992 - DNA, 25 bp, Homo sapien
aagtacaacacagtacaatgcctgg

SEQ ID NO: 3999993 - DNA, 25 bp, Homo sapien
tacaacacagtacaatgcctggcgc

SEQ ID NO: 3999994 - DNA, 25 bp, Homo sapien
ggtcgtaaagtacaacacagtacaa

SEQ ID NO: 3999995 - DNA, 25 bp, Homo sapien
gacaggaggatttctattgttgtcc

SEQ ID NO: 3999996 - DNA, 25 bp, Homo sapien
tccttgattctactgtgagacgtcc

SEQ ID NO: 3999997 - DNA, 25 bp, Homo sapien
aagtggagaggacccgactccagag

SEQ ID NO: 3999998 - DNA, 25 bp, Homo sapien
cacactggtggaaaggtgacctgtc

SEQ ID NO: 3999999 - DNA, 25 bp, Homo sapien
tcttgtgaaccagagcaagtggagg

SEQ ID NO: 4000000 - DNA, 25 bp, Homo sapien
cgagcggcataaggcttttctgaca

SEQ ID NO: 4000001 - DNA, 25 bp, Homo sapien
ctggtgggaaatcgagcggcataag

SEQ ID NO: 4000002 - DNA, 25 bp, Homo sapien
atataatcttgtgaaccagagcaag

SEQ ID NO: 4000003 - DNA, 25 bp, Homo sapien
tgagtttctcttggtctagggccat

SEQ ID NO: 4000004 - DNA, 25 bp, Homo sapien
tttctccctgcaatcattgagtttc

SEQ ID NO: 4000005 - DNA, 25 bp, Homo sapien
ctccctgcaatcattgagtttctct

SEQ ID NO: 4000006 - DNA, 25 bp, Homo sapien
ttgagtttctcttggtctagggcca

SEQ ID NO: 4000007 - DNA, 25 bp, Homo sapien
catccaactcattgtcaggtcagca

SEQ ID NO: 4000008 - DNA, 25 bp, Homo sapien
ggggcagatgggtcttcagatccca

SEQ ID NO: 4000009 - DNA, 25 bp, Homo sapien
cttcagatcccacaggatgccccca

SEQ ID NO: 4000010 - DNA, 25 bp, Homo sapien
ggaaggagggtgtcacttcagcagt

SEQ ID NO: 4000011 - DNA, 25 bp, Homo sapien
cctgtcaataattcaatagcgtagc

SEQ ID NO: 4000012 - DNA, 25 bp, Homo sapien
aatagcgtagccttgatgggcccag

SEQ ID NO: 4000013 - DNA, 25 bp, Homo sapien
cagtgagcgcctgtcaataattcaa

SEQ ID NO: 4000014 - DNA, 25 bp, Homo sapien
ttgcaccacagtgagcgcctgtcaa

SEQ ID NO: 4000015 - DNA, 25 bp, Homo sapien
ctctgtcaatggctgagtgatctat

SEQ ID NO: 4000016 - DNA, 25 bp, Homo sapien
tttcaaccacgccaagcagcttgtc

SEQ ID NO: 4000017 - DNA, 25 bp, Homo sapien
agtgatctatactgcatgaatcccc

SEQ ID NO: 4000018 - DNA, 25 bp, Homo sapien
ctagactttcaaccacgccaagcag

SEQ ID NO: 4000019 - DNA, 25 bp, Homo sapien
taagtcttctttacgcaggccttcg

SEQ ID NO: 4000020 - DNA, 25 bp, Homo sapien
cagtgtgcacagaggagcatggtcc

SEQ ID NO: 4000021 - DNA, 25 bp, Homo sapien
ttgttgagccaacgcagagtctctc

SEQ ID NO: 4000022 - DNA, 25 bp, Homo sapien
ggtcctcgcgctggcaaatggatgc

SEQ ID NO: 4000023 - DNA, 25 bp, Homo sapien
gcatttgcctccgtagtgctctcct

SEQ ID NO: 4000024 - DNA, 25 bp, Homo sapien
ggctgtcacaggcatttgcctccgt

SEQ ID NO: 4000025 - DNA, 25 bp, Homo sapien
aataaacgtgcccagagatgctggc

SEQ ID NO: 4000026 - DNA, 25 bp, Homo sapien
gcctgcttcacgatccactggctgt

SEQ ID NO: 4000027 - DNA, 25 bp, Homo sapien
gctggccagccttctggattccctc

SEQ ID NO: 4000028 - DNA, 25 bp, Homo sapien
cagccatccccaagcgagaagctgg

SEQ ID NO: 4000029 - DNA, 25 bp, Homo sapien
cagagctccggcttggtcctaaggg

SEQ ID NO: 4000030 - DNA, 25 bp, Homo sapien
gactactccaatgccaggtgttctc

SEQ ID NO: 4000031 - DNA, 25 bp, Homo sapien
aggcacacaaaggagaagacagaga

SEQ ID NO: 4000032 - DNA, 25 bp, Homo sapien
cttaggcacacaaaggagaagacag

SEQ ID NO: 4000033 - DNA, 25 bp, Homo sapien
ggcacacaaaggagaagacagagat

SEQ ID NO: 4000034 - DNA, 25 bp, Homo sapien
acacaaaggagaagacagagatcat

SEQ ID NO: 4000035 - DNA, 25 bp, Homo sapien
gagcatctagcctcacaccaagcag

SEQ ID NO: 4000036 - DNA, 25 bp, Homo sapien
ggttcttcttacgagcatctagcct

SEQ ID NO: 4000037 - DNA, 25 bp, Homo sapien
ttcttacgagcatctagcctcacac

SEQ ID NO: 4000038 - DNA, 25 bp, Homo sapien
tacgagcatctagcctcacaccaag

SEQ ID NO: 4000039 - DNA, 25 bp, Homo sapien
ctgtcctggagcatgtgctcctcaa

SEQ ID NO: 4000040 - DNA, 25 bp, Homo sapien
agtatgtttggttccgtgccttcct

SEQ ID NO: 4000041 - DNA, 25 bp, Homo sapien
attttggcatttcaaaatattgctt

SEQ ID NO: 4000042 - DNA, 25 bp, Homo sapien
tggcatttcaaaatattgcttgcac

SEQ ID NO: 4000043 - DNA, 25 bp, Homo sapien
ctagaaattgcaccattttggcatt

SEQ ID NO: 4000044 - DNA, 25 bp, Homo sapien
tttggcatttcaaaatattgcttgc

SEQ ID NO: 4000045 - DNA, 25 bp, Homo sapien
tcatatctcttagcgacttctggga

SEQ ID NO: 4000046 - DNA, 25 bp, Homo sapien
tcttagcgacttctgggatgtgagg

SEQ ID NO: 4000047 - DNA, 25 bp, Homo sapien
tatctcttagcgacttctgggatgt

SEQ ID NO: 4000048 - DNA, 25 bp, Homo sapien
ctctcatatctcttagcgacttctg

SEQ ID NO: 4000049 - DNA, 25 bp, Homo sapien
tcacatccagaaacacagtaaaatg

SEQ ID NO: 4000050 - DNA, 25 bp, Homo sapien
tccagaaacacagtaaaatgatcac

SEQ ID NO: 4000051 - DNA, 25 bp, Homo sapien
cacatccagaaacacagtaaaatga

SEQ ID NO: 4000052 - DNA, 25 bp, Homo sapien
catccagaaacacagtaaaatgatc

SEQ ID NO: 4000053 - DNA, 25 bp, Homo sapien
gaagctggtaaaacagtcgcatcca

SEQ ID NO: 4000054 - DNA, 25 bp, Homo sapien
tcaaacaagacatcggccactggag

SEQ ID NO: 4000055 - DNA, 25 bp, Homo sapien
tcttttccaaaggaatatcgcagaa

SEQ ID NO: 4000056 - DNA, 25 bp, Homo sapien
cgcaggtgaacgctgactcttttcc

SEQ ID NO: 4000057 - DNA, 25 bp, Homo sapien
caccgagcccagctattgtctctct

SEQ ID NO: 4000058 - DNA, 25 bp, Homo sapien
ttggaattgccttaagctagcatgt

SEQ ID NO: 4000059 - DNA, 25 bp, Homo sapien
gaattgccttaagctagcatgttac

SEQ ID NO: 4000060 - DNA, 25 bp, Homo sapien
ggaattgccttaagctagcatgtta

SEQ ID NO: 4000061 - DNA, 25 bp, Homo sapien
tattttctacgtcaggggctttgca

SEQ ID NO: 4000062 - DNA, 25 bp, Homo sapien
gcaaactctcagctcacatgtcact

SEQ ID NO: 4000063 - DNA, 25 bp, Homo sapien
gcccaattgaagtacacactcatta

SEQ ID NO: 4000064 - DNA, 25 bp, Homo sapien
tagaggatcctctgataagcccaat

SEQ ID NO: 4000065 - DNA, 25 bp, Homo sapien
tgagaacagaatcagcttagctgct

SEQ ID NO: 4000066 - DNA, 25 bp, Homo sapien
ttagctgcttgcaaataagcgagca

SEQ ID NO: 4000067 - DNA, 25 bp, Homo sapien
aataagcgagcatcacagaacttgg

SEQ ID NO: 4000068 - DNA, 25 bp, Homo sapien
tagccgctgaacttctgagaacaga

SEQ ID NO: 4000069 - DNA, 25 bp, Homo sapien
ggttgcgaggatcacagggtcccgt

SEQ ID NO: 4000070 - DNA, 25 bp, Homo sapien
agggtcccgtccaaatgacctgatt

SEQ ID NO: 4000071 - DNA, 25 bp, Homo sapien
tcaggaatttcgggtcttgagccat

SEQ ID NO: 4000072 - DNA, 25 bp, Homo sapien
gggaggttgcgaggatcacagggtc

SEQ ID NO: 4000073 - DNA, 25 bp, Homo sapien
ctttttgtgttccccagtgcacttc

SEQ ID NO: 4000074 - DNA, 25 bp, Homo sapien
tttgtgttccccagtgcacttcacc

SEQ ID NO: 4000075 - DNA, 25 bp, Homo sapien
acttcaccttcactgtgaaggtcat

SEQ ID NO: 4000076 - DNA, 25 bp, Homo sapien
cacttcaccttcactgtgaaggtca

SEQ ID NO: 4000077 - DNA, 25 bp, Homo sapien
ctagcctcagacttcaaggtggcat

SEQ ID NO: 4000078 - DNA, 25 bp, Homo sapien
tagcctcagacttcaaggtggcatt

SEQ ID NO: 4000079 - DNA, 25 bp, Homo sapien
ttgggccctggggactagcctcaga

SEQ ID NO: 4000080 - DNA, 25 bp, Homo sapien
gcctcagacttcaaggtggcattgg

SEQ ID NO: 4000081 - DNA, 25 bp, Homo sapien
cacggtattagcctctctgcagata

SEQ ID NO: 4000082 - DNA, 25 bp, Homo sapien
tcatttcgtttgttcccgtgcggac

SEQ ID NO: 4000083 - DNA, 25 bp, Homo sapien
caatctcacttagacgtaccagcca

SEQ ID NO: 4000084 - DNA, 25 bp, Homo sapien
ctagtttgttaattcgatgagtaaa

SEQ ID NO: 4000085 - DNA, 25 bp, Homo sapien
cacttcaagtctagcccctcttggg

SEQ ID NO: 4000086 - DNA, 25 bp, Homo sapien
tccacttcaagtctagcccctcttg

SEQ ID NO: 4000087 - DNA, 25 bp, Homo sapien
gttccacttcaagtctagcccctct

SEQ ID NO: 4000088 - DNA, 25 bp, Homo sapien
tgttccacttcaagtctagcccctc

SEQ ID NO: 4000089 - DNA, 25 bp, Homo sapien
tttgggaaagctgcaagccctgtct

SEQ ID NO: 4000090 - DNA, 25 bp, Homo sapien
aagctgcaagccctgtctccatcac

SEQ ID NO: 4000091 - DNA, 25 bp, Homo sapien
ggaaagctgcaagccctgtctccat

SEQ ID NO: 4000092 - DNA, 25 bp, Homo sapien
tgggaaagctgcaagccctgtctcc

SEQ ID NO: 4000093 - DNA, 25 bp, Homo sapien
tccgagggcacaggcttgactgcaa

SEQ ID NO: 4000094 - DNA, 25 bp, Homo sapien
ctgggaattgaaacagcctcttgga

SEQ ID NO: 4000095 - DNA, 25 bp, Homo sapien
ccttggcacttatggaggaagcaga

SEQ ID NO: 4000096 - DNA, 25 bp, Homo sapien
cgtaattaatgatctgctgggcctt

SEQ ID NO: 4000097 - DNA, 25 bp, Homo sapien
aggaatcttgcagataactacagca

SEQ ID NO: 4000098 - DNA, 25 bp, Homo sapien
ccttcagatgactaagggctattaa

SEQ ID NO: 4000099 - DNA, 25 bp, Homo sapien
gggctattaaatccctgaaggaatc

SEQ ID NO: 4000100 - DNA, 25 bp, Homo sapien
actacagcaaataacaatatcttct

SEQ ID NO: 4000101 - DNA, 25 bp, Homo sapien
catctgcagcgtgctcatccctgca

SEQ ID NO: 4000102 - DNA, 25 bp, Homo sapien
ttcatctgcagcgtgctcatccctg

SEQ ID NO: 4000103 - DNA, 25 bp, Homo sapien
tgcagcgtgctcatccctgcaggag

SEQ ID NO: 4000104 - DNA, 25 bp, Homo sapien
tctgcagcgtgctcatccctgcagg

SEQ ID NO: 4000105 - DNA, 25 bp, Homo sapien
gacagattctctgagccttgggagc

SEQ ID NO: 4000106 - DNA, 25 bp, Homo sapien
caaataggtgctttagacagattct

SEQ ID NO: 4000107 - DNA, 25 bp, Homo sapien
gcagccttctgtgaaggctgtcttg

SEQ ID NO: 4000108 - DNA, 25 bp, Homo sapien
agttatgttctgttccgaagcagcc

SEQ ID NO: 4000109 - DNA, 25 bp, Homo sapien
tccactaaatagatgtgaatgatac

SEQ ID NO: 4000110 - DNA, 25 bp, Homo sapien
gcttcttccactaaatagatgtgaa

SEQ ID NO: 4000111 - DNA, 25 bp, Homo sapien
tcttccactaaatagatgtgaatga

SEQ ID NO: 4000112 - DNA, 25 bp, Homo sapien
cagcttcttccactaaatagatgtg

SEQ ID NO: 4000113 - DNA, 25 bp, Homo sapien
gtgaggcgaatgcaagccaaccgat

SEQ ID NO: 4000114 - DNA, 25 bp, Homo sapien
tatcgtctttgcctgttgcagtaac

SEQ ID NO: 4000115 - DNA, 25 bp, Homo sapien
aaagacaaggtcatattttatcgtc

SEQ ID NO: 4000116 - DNA, 25 bp, Homo sapien
gccaaccgatatctatcatgtcaaa

SEQ ID NO: 4000117 - DNA, 25 bp, Homo sapien
ccactcggttggcttgtgtttctga

SEQ ID NO: 4000118 - DNA, 25 bp, Homo sapien
accgcccactcggttggcttgtgtt

SEQ ID NO: 4000119 - DNA, 25 bp, Homo sapien
gtcgaccgcccactcggttggcttg

SEQ ID NO: 4000120 - DNA, 25 bp, Homo sapien
ttctgaggctggtgtttgtcagcca

SEQ ID NO: 4000121 - DNA, 25 bp, Homo sapien
aaagcaacggtaggtgtagcattcc

SEQ ID NO: 4000122 - DNA, 25 bp, Homo sapien
agacaacagtgggtggcgccagctt

SEQ ID NO: 4000123 - DNA, 25 bp, Homo sapien
gggttccaggcggtgacattcatct

SEQ ID NO: 4000124 - DNA, 25 bp, Homo sapien
tagcattccaatgacaggaggtggg

SEQ ID NO: 4000125 - DNA, 25 bp, Homo sapien
gaccattgaggatgtgatgatgctc

SEQ ID NO: 4000126 - DNA, 25 bp, Homo sapien
tttaattctgagagtgaccattgag

SEQ ID NO: 4000127 - DNA, 25 bp, Homo sapien
ttttgtgacaatttgggacggtata

SEQ ID NO: 4000128 - DNA, 25 bp, Homo sapien
caatttgggacggtatagtcccttg

SEQ ID NO: 4000129 - DNA, 25 bp, Homo sapien
tgaggtcatagctgaacaagtctga

SEQ ID NO: 4000130 - DNA, 25 bp, Homo sapien
tagacctacacttataaccacaact

SEQ ID NO: 4000131 - DNA, 25 bp, Homo sapien
taatatgtctgactctagacctaca

SEQ ID NO: 4000132 - DNA, 25 bp, Homo sapien
tcagttgatgtgactcagtgtgttc

SEQ ID NO: 4000133 - DNA, 25 bp, Homo sapien
catgatagtcatgacctcttcaggc

SEQ ID NO: 4000134 - DNA, 25 bp, Homo sapien
taaaagatgtccgtaaacctgctca

SEQ ID NO: 4000135 - DNA, 25 bp, Homo sapien
caggcttaaccgttagtacttctgg

SEQ ID NO: 4000136 - DNA, 25 bp, Homo sapien
gctgtctctatggttgttgtcatgg

SEQ ID NO: 4000137 - DNA, 25 bp, Homo sapien
tgaatgcaacaagggctggagcaca

SEQ ID NO: 4000138 - DNA, 25 bp, Homo sapien
cacatgcctgcaaagaagtcttggg

SEQ ID NO: 4000139 - DNA, 25 bp, Homo sapien
tctaaaatagagcagcagttccctg

SEQ ID NO: 4000140 - DNA, 25 bp, Homo sapien
cattagagagatggccttggccggc

SEQ ID NO: 4000141 - DNA, 25 bp, Homo sapien
tctggacatactggaatgtcagcac

SEQ ID NO: 4000142 - DNA, 25 bp, Homo sapien
tggacatactggaatgtcagcacca

SEQ ID NO: 4000143 - DNA, 25 bp, Homo sapien
ctggacatactggaatgtcagcacc

SEQ ID NO: 4000144 - DNA, 25 bp, Homo sapien
gataggagacaaaacagaatggata

SEQ ID NO: 4000145 - DNA, 25 bp, Homo sapien
tcctgataggagacaaaacagaatg

SEQ ID NO: 4000146 - DNA, 25 bp, Homo sapien
ctatcctgataggagacaaaacaga

SEQ ID NO: 4000147 - DNA, 25 bp, Homo sapien
ataggagacaaaacagaatggatac

SEQ ID NO: 4000148 - DNA, 25 bp, Homo sapien
tattaaggatagactttagtaggcc

SEQ ID NO: 4000149 - DNA, 25 bp, Homo sapien
gaaatccaggtattaaggatagact

SEQ ID NO: 4000150 - DNA, 25 bp, Homo sapien
cgtgttcccgtttggctttgctcct

SEQ ID NO: 4000151 - DNA, 25 bp, Homo sapien
gctccttggtaatggaggaaatcca

SEQ ID NO: 4000152 - DNA, 25 bp, Homo sapien
gcatttgcccgtgtgtagtgcctgt

SEQ ID NO: 4000153 - DNA, 25 bp, Homo sapien
catttgcccgtgtgtagtgcctgtt

SEQ ID NO: 4000154 - DNA, 25 bp, Homo sapien
cagcatttgcccgtgtgtagtgcct

SEQ ID NO: 4000155 - DNA, 25 bp, Homo sapien
tcagcatttgcccgtgtgtagtgcc

SEQ ID NO: 4000156 - DNA, 25 bp, Homo sapien
tgcggttgcacggatgagcaggatg

SEQ ID NO: 4000157 - DNA, 25 bp, Homo sapien
tgctgttcacccatatctcccatcg

SEQ ID NO: 4000158 - DNA, 25 bp, Homo sapien
atctcccatcgcctgggagcaaaga

SEQ ID NO: 4000159 - DNA, 25 bp, Homo sapien
cctccagccagtttcggctgctgtt

SEQ ID NO: 4000160 - DNA, 25 bp, Homo sapien
gacctttatgatctgagagcccgtg

SEQ ID NO: 4000161 - DNA, 25 bp, Homo sapien
gacgaatatgcaccatgtctctgga

SEQ ID NO: 4000162 - DNA, 25 bp, Homo sapien
agagcccgtggaatgtttgtagcag

SEQ ID NO: 4000163 - DNA, 25 bp, Homo sapien
gaataggtactatgcctctggacga

SEQ ID NO: 4000164 - DNA, 25 bp, Homo sapien
tgctgctccggatttcacattgtca

SEQ ID NO: 4000165 - DNA, 25 bp, Homo sapien
gttgctgctccggatttcacattgt

SEQ ID NO: 4000166 - DNA, 25 bp, Homo sapien
tgttgctgctccggatttcacattg

SEQ ID NO: 4000167 - DNA, 25 bp, Homo sapien
ctgctccggatttcacattgtcatc

SEQ ID NO: 4000168 - DNA, 25 bp, Homo sapien
gtgagaatgcattagggtacctgcc

SEQ ID NO: 4000169 - DNA, 25 bp, Homo sapien
ggtacctgccgcctgttccctgtag

SEQ ID NO: 4000170 - DNA, 25 bp, Homo sapien
gccttgctggtgtcgtccaaaacag

SEQ ID NO: 4000171 - DNA, 25 bp, Homo sapien
cttgaaagagcctgaagttacagaa

SEQ ID NO: 4000172 - DNA, 25 bp, Homo sapien
gaccgtggaccctgtaaattcactc

SEQ ID NO: 4000173 - DNA, 25 bp, Homo sapien
tcggcgcccagcattactggctaaa

SEQ ID NO: 4000174 - DNA, 25 bp, Homo sapien
ggctaaatcaagaccgctcttcagt

SEQ ID NO: 4000175 - DNA, 25 bp, Homo sapien
tggaccctgtaaattcactcggcgc

SEQ ID NO: 4000176 - DNA, 25 bp, Homo sapien
aataacttgattggtggaggatgga

SEQ ID NO: 4000177 - DNA, 25 bp, Homo sapien
tttatcactgtgaagagttttgtgc

SEQ ID NO: 4000178 - DNA, 25 bp, Homo sapien
agaaataacttgattggtggaggat

SEQ ID NO: 4000179 - DNA, 25 bp, Homo sapien
tcactgtgaagagttttgtgcatgg

SEQ ID NO: 4000180 - DNA, 25 bp, Homo sapien
tcactagaagatgccacgcaggtgg

SEQ ID NO: 4000181 - DNA, 25 bp, Homo sapien
catcactagaagatgccacgcaggt

SEQ ID NO: 4000182 - DNA, 25 bp, Homo sapien
actagaagatgccacgcaggtggcc

SEQ ID NO: 4000183 - DNA, 25 bp, Homo sapien
ctagaagatgccacgcaggtggcct

SEQ ID NO: 4000184 - DNA, 25 bp, Homo sapien
tcacactgggcccgggtagaagctg

SEQ ID NO: 4000185 - DNA, 25 bp, Homo sapien
aagaaaaattctgccgcacagatcc

SEQ ID NO: 4000186 - DNA, 25 bp, Homo sapien
gcctcctaataaggccttcacactg

SEQ ID NO: 4000187 - DNA, 25 bp, Homo sapien
gcacagatcccgcctcctaataagg

SEQ ID NO: 4000188 - DNA, 25 bp, Homo sapien
gacttcccatctgtgtagggtcctg

SEQ ID NO: 4000189 - DNA, 25 bp, Homo sapien
gaggctgcgtctcagagttgtgcat

SEQ ID NO: 4000190 - DNA, 25 bp, Homo sapien
aatggacttcccatctgtgtagggt

SEQ ID NO: 4000191 - DNA, 25 bp, Homo sapien
gggttaatggacttcccatctgtgt

SEQ ID NO: 4000192 - DNA, 25 bp, Homo sapien
tacatcattagtagcgaacttccca

SEQ ID NO: 4000193 - DNA, 25 bp, Homo sapien
ttcccaattaaactgttgatactat

SEQ ID NO: 4000194 - DNA, 25 bp, Homo sapien
tgggcttgtttcaccggctttgaga

SEQ ID NO: 4000195 - DNA, 25 bp, Homo sapien
tgtgccagctgtgtttacatcatta

SEQ ID NO: 4000196 - DNA, 25 bp, Homo sapien
ttctctgcctaaaactagggcactg

SEQ ID NO: 4000197 - DNA, 25 bp, Homo sapien
aagatctaagtccacagattgcagg

SEQ ID NO: 4000198 - DNA, 25 bp, Homo sapien
ccacagattgcaggatgagtaagct

SEQ ID NO: 4000199 - DNA, 25 bp, Homo sapien
tgagtaagctgcacgtttgttggcg

SEQ ID NO: 4000200 - DNA, 25 bp, Homo sapien
caaaatacggattttgacaatatag

SEQ ID NO: 4000201 - DNA, 25 bp, Homo sapien
cgaaaggttggtgtatatttctgaa

SEQ ID NO: 4000202 - DNA, 25 bp, Homo sapien
gggttgatttttgaggctgaaatat

SEQ ID NO: 4000203 - DNA, 25 bp, Homo sapien
tctgtacttaggaacaatgtcagtg

SEQ ID NO: 4000204 - DNA, 25 bp, Homo sapien
cctgttcaatatctggcccctgttc

SEQ ID NO: 4000205 - DNA, 25 bp, Homo sapien
tcctgttcaatatctggcccctgtt

SEQ ID NO: 4000206 - DNA, 25 bp, Homo sapien
tgttcaatatctggcccctgttcac

SEQ ID NO: 4000207 - DNA, 25 bp, Homo sapien
gttcaatatctggcccctgttcact

SEQ ID NO: 4000208 - DNA, 25 bp, Homo sapien
cagttacaaatgctttagtctttgg

SEQ ID NO: 4000209 - DNA, 25 bp, Homo sapien
tagccacagggtcatatttgttaat

SEQ ID NO: 4000210 - DNA, 25 bp, Homo sapien
tgggatctcccgcaacatagccaca

SEQ ID NO: 4000211 - DNA, 25 bp, Homo sapien
cttcgacgataacgcttaggcccct

SEQ ID NO: 4000212 - DNA, 25 bp, Homo sapien
aagtttcaggtcatctccaggtgat

SEQ ID NO: 4000213 - DNA, 25 bp, Homo sapien
gcattacttcaatcatgtatccaga

SEQ ID NO: 4000214 - DNA, 25 bp, Homo sapien
caaagtttcaggtcatctccaggtg

SEQ ID NO: 4000215 - DNA, 25 bp, Homo sapien
ccttcatgcattacttcaatcatgt

SEQ ID NO: 4000216 - DNA, 25 bp, Homo sapien
caaagccttaagagaaagcctgtgc

SEQ ID NO: 4000217 - DNA, 25 bp, Homo sapien
cgtttctttgatatgtaacccagca

SEQ ID NO: 4000218 - DNA, 25 bp, Homo sapien
tctttagaaagcattgacaggcagt

SEQ ID NO: 4000219 - DNA, 25 bp, Homo sapien
cataagggtgctctctggaatgcgt

SEQ ID NO: 4000220 - DNA, 25 bp, Homo sapien
ggtgcagtctacagtcccgaattct

SEQ ID NO: 4000221 - DNA, 25 bp, Homo sapien
acagagtttctctttgcacgaagtc

SEQ ID NO: 4000222 - DNA, 25 bp, Homo sapien
gctttgcctgccaagaatgaatgag

SEQ ID NO: 4000223 - DNA, 25 bp, Homo sapien
cccgaattctatgcaggtacagagt

SEQ ID NO: 4000224 - DNA, 25 bp, Homo sapien
tagactcgaatcaatggccataggg

SEQ ID NO: 4000225 - DNA, 25 bp, Homo sapien
actcgaatcaatggccatagggagc

SEQ ID NO: 4000226 - DNA, 25 bp, Homo sapien
caggaggactagactcgaatcaatg

SEQ ID NO: 4000227 - DNA, 25 bp, Homo sapien
gactagactcgaatcaatggccata

SEQ ID NO: 4000228 - DNA, 25 bp, Homo sapien
tgcctccccttttagttgtaattca

SEQ ID NO: 4000229 - DNA, 25 bp, Homo sapien
gtcttatcagattttattccagccc

SEQ ID NO: 4000230 - DNA, 25 bp, Homo sapien
ttagttgtaattcacttcgcttctc

SEQ ID NO: 4000231 - DNA, 25 bp, Homo sapien
tcttatcagattttattccagccct

SEQ ID NO: 4000232 - DNA, 25 bp, Homo sapien
cacgagttatattcatggtcatcca

SEQ ID NO: 4000233 - DNA, 25 bp, Homo sapien
gctggcttggcaacattcacttagg

SEQ ID NO: 4000234 - DNA, 25 bp, Homo sapien
tctcttccagattaggtgcatattc

SEQ ID NO: 4000235 - DNA, 25 bp, Homo sapien
ctcccaacagtttcgatttgcacag

SEQ ID NO: 4000236 - DNA, 25 bp, Homo sapien
tgttccgtatgcttatcaatgccaa

SEQ ID NO: 4000237 - DNA, 25 bp, Homo sapien
aatgagcgcgttttccacagttcca

SEQ ID NO: 4000238 - DNA, 25 bp, Homo sapien
gttgaacagtagatccccatcagga

SEQ ID NO: 4000239 - DNA, 25 bp, Homo sapien
aaagccagagttgaacagtagatcc

SEQ ID NO: 4000240 - DNA, 25 bp, Homo sapien
ttcaacaatgctggctctaaaagat

SEQ ID NO: 4000241 - DNA, 25 bp, Homo sapien
atgctggctctaaaagatcctctgg

SEQ ID NO: 4000242 - DNA, 25 bp, Homo sapien
taaaagatcctctgggctggaccct

SEQ ID NO: 4000243 - DNA, 25 bp, Homo sapien
tctaaaagatcctctgggctggacc

SEQ ID NO: 4000244 - DNA, 25 bp, Homo sapien
tttgcttgtggttgagtacaaaaga

SEQ ID NO: 4000245 - DNA, 25 bp, Homo sapien
ggttgatgaacttagcgactttatt

SEQ ID NO: 4000246 - DNA, 25 bp, Homo sapien
tgaacttagcgactttattaaccac

SEQ ID NO: 4000247 - DNA, 25 bp, Homo sapien
tgtggttgagtacaaaagaagatcc

SEQ ID NO: 4000248 - DNA, 25 bp, Homo sapien
tcagtataatatttaggataacagc

SEQ ID NO: 4000249 - DNA, 25 bp, Homo sapien
tttcatgccaactaaagaccccact

SEQ ID NO: 4000250 - DNA, 25 bp, Homo sapien
gaaattgtctctcaagttctcgata

SEQ ID NO: 4000251 - DNA, 25 bp, Homo sapien
gaattaacccctcgatcaacttcag

SEQ ID NO: 4000252 - DNA, 25 bp, Homo sapien
atgatctcggaagaccaggttcaac

SEQ ID NO: 4000253 - DNA, 25 bp, Homo sapien
catcactgtggaaccttgaagaagt

SEQ ID NO: 4000254 - DNA, 25 bp, Homo sapien
gtctggtgacagcaattgaaagtga

SEQ ID NO: 4000255 - DNA, 25 bp, Homo sapien
caggttcaacatgaacatggtctgg

SEQ ID NO: 4000256 - DNA, 25 bp, Homo sapien
tatcagcggacactggatcctgttt

SEQ ID NO: 4000257 - DNA, 25 bp, Homo sapien
gtttgatcatcaacgctccactgaa

SEQ ID NO: 4000258 - DNA, 25 bp, Homo sapien
taactgtgctgagttcattgtacac

SEQ ID NO: 4000259 - DNA, 25 bp, Homo sapien
ttgtggtccactgagcaagaagctc

SEQ ID NO: 4000260 - DNA, 25 bp, Homo sapien
agcttgaaccaactgaagcatggca

SEQ ID NO: 4000261 - DNA, 25 bp, Homo sapien
gccacttggtgttgctgatgtgtct

SEQ ID NO: 4000262 - DNA, 25 bp, Homo sapien
tttggtcatccggtcattgcatgcc

SEQ ID NO: 4000263 - DNA, 25 bp, Homo sapien
cttgaaccaactgaagcatggcaga

SEQ ID NO: 4000264 - DNA, 25 bp, Homo sapien
gctgacagatgagaatcaaccccag

SEQ ID NO: 4000265 - DNA, 25 bp, Homo sapien
aaacaaagtattggctgggcagtca

SEQ ID NO: 4000266 - DNA, 25 bp, Homo sapien
catgggaaccactctcaaagatgct

SEQ ID NO: 4000267 - DNA, 25 bp, Homo sapien
tcaggcatatctgtacatgggaacc

SEQ ID NO: 4000268 - DNA, 25 bp, Homo sapien
gtctctttgatcatatgtgtctctg

SEQ ID NO: 4000269 - DNA, 25 bp, Homo sapien
gagacattcgtctctttgatcatat

SEQ ID NO: 4000270 - DNA, 25 bp, Homo sapien
ctgaagttgtttggatatagcggag

SEQ ID NO: 4000271 - DNA, 25 bp, Homo sapien
tggatatagcggagacattcgtctc

SEQ ID NO: 4000272 - DNA, 25 bp, Homo sapien
cattgttcagggaagtagtgatcac

SEQ ID NO: 4000273 - DNA, 25 bp, Homo sapien
gaaagcattgttcagggaagtagtg

SEQ ID NO: 4000274 - DNA, 25 bp, Homo sapien
cgattgatgaaagcattgttcaggg

SEQ ID NO: 4000275 - DNA, 25 bp, Homo sapien
ttcagggaagtagtgatcacacaga

SEQ ID NO: 4000276 - DNA, 25 bp, Homo sapien
gctactggggttatcagctatttgg

SEQ ID NO: 4000277 - DNA, 25 bp, Homo sapien
gggttatcagctatttgggaagagt

SEQ ID NO: 4000278 - DNA, 25 bp, Homo sapien
aagagtgtaagtgactacagtagtc

SEQ ID NO: 4000279 - DNA, 25 bp, Homo sapien
tatatgctgaatattaagctactgg

SEQ ID NO: 4000280 - DNA, 25 bp, Homo sapien
tcctatgtgcatgccgtaagatcag

SEQ ID NO: 4000281 - DNA, 25 bp, Homo sapien
cagagtgacacagccgaaaaattgc

SEQ ID NO: 4000282 - DNA, 25 bp, Homo sapien
tcatgtgtacagtgcaggccctgtg

SEQ ID NO: 4000283 - DNA, 25 bp, Homo sapien
ttctcggatgcagggccagagtgac

SEQ ID NO: 4000284 - DNA, 25 bp, Homo sapien
gccgaactgccgctcaagctggacg

SEQ ID NO: 4000285 - DNA, 25 bp, Homo sapien
cccaaacactcctaggctggcgagt

SEQ ID NO: 4000286 - DNA, 25 bp, Homo sapien
agcagccgaactgccgctcaagctg

SEQ ID NO: 4000287 - DNA, 25 bp, Homo sapien
gctggcgagtggcattgaaattcat

SEQ ID NO: 4000288 - DNA, 25 bp, Homo sapien
tctgggttgcaagaggactttttga

SEQ ID NO: 4000289 - DNA, 25 bp, Homo sapien
gactttttgaacctgtctataaatg

SEQ ID NO: 4000290 - DNA, 25 bp, Homo sapien
ctataaatgtccacatgttaaaaca

SEQ ID NO: 4000291 - DNA, 25 bp, Homo sapien
caaatcccttcttacacgtatcaag

SEQ ID NO: 4000292 - DNA, 25 bp, Homo sapien
taatgttagtattagcgggtcagca

SEQ ID NO: 4000293 - DNA, 25 bp, Homo sapien
gggcagtcccacactaatgttagta

SEQ ID NO: 4000294 - DNA, 25 bp, Homo sapien
gctccttgctacagatttggtttcc

SEQ ID NO: 4000295 - DNA, 25 bp, Homo sapien
taagggatcagcacgctagatctgg

SEQ ID NO: 4000296 - DNA, 25 bp, Homo sapien
tatctgtactatcatgtgataaatg

SEQ ID NO: 4000297 - DNA, 25 bp, Homo sapien
aatcaagtatctgtactatcatgtg

SEQ ID NO: 4000298 - DNA, 25 bp, Homo sapien
caagtatctgtactatcatgtgata

SEQ ID NO: 4000299 - DNA, 25 bp, Homo sapien
agtatctgtactatcatgtgataaa

SEQ ID NO: 4000300 - DNA, 25 bp, Homo sapien
tagcagtgggatttcagcacacaga

SEQ ID NO: 4000301 - DNA, 25 bp, Homo sapien
ttactctcccagtgctaaaagacat

SEQ ID NO: 4000302 - DNA, 25 bp, Homo sapien
cctttggtgccaaatgtatcttaat

SEQ ID NO: 4000303 - DNA, 25 bp, Homo sapien
caggcttttgtcaataagagggtac

SEQ ID NO: 4000304 - DNA, 25 bp, Homo sapien
actgatggctgcaaggtactgaata

SEQ ID NO: 4000305 - DNA, 25 bp, Homo sapien
gattccaagtcacggtcctgcatgg

SEQ ID NO: 4000306 - DNA, 25 bp, Homo sapien
ggtgcagcgagattccaagtcacgg

SEQ ID NO: 4000307 - DNA, 25 bp, Homo sapien
taactagttggtacgtgtgagagag

SEQ ID NO: 4000308 - DNA, 25 bp, Homo sapien
tggcattcagctcgtaacttcccgg

SEQ ID NO: 4000309 - DNA, 25 bp, Homo sapien
tacattggctgattgtggcattcag

SEQ ID NO: 4000310 - DNA, 25 bp, Homo sapien
cttcccggcaatggacctaagttga

SEQ ID NO: 4000311 - DNA, 25 bp, Homo sapien
gaggcaatgaacctagggtaagagc

SEQ ID NO: 4000312 - DNA, 25 bp, Homo sapien
gactggacccgaggaatgttggatt

SEQ ID NO: 4000313 - DNA, 25 bp, Homo sapien
gtttaaggaggacaaggcactcacc

SEQ ID NO: 4000314 - DNA, 25 bp, Homo sapien
cccaagggcggaaaacatgtcttca

SEQ ID NO: 4000315 - DNA, 25 bp, Homo sapien
cactggtggcacttggactggaccc

SEQ ID NO: 4000316 - DNA, 25 bp, Homo sapien
gcattaggttgcaattcaagttcaa

SEQ ID NO: 4000317 - DNA, 25 bp, Homo sapien
ggtaaaagcgttagcgttaaatgca

SEQ ID NO: 4000318 - DNA, 25 bp, Homo sapien
gcttataacggtgttgttaccttca

SEQ ID NO: 4000319 - DNA, 25 bp, Homo sapien
tttaacatctctagaaagcgctctg

SEQ ID NO: 4000320 - DNA, 25 bp, Homo sapien
gcgccatcgcctgctaatggaattt

SEQ ID NO: 4000321 - DNA, 25 bp, Homo sapien
gccatgctgtttgtttaaagcgcca

SEQ ID NO: 4000322 - DNA, 25 bp, Homo sapien
gctgatcagaggtaaagtggatgaa

SEQ ID NO: 4000323 - DNA, 25 bp, Homo sapien
aataattcctgacgagcagacaggc

SEQ ID NO: 4000324 - DNA, 25 bp, Homo sapien
atccaatcaagcctctccccggcca

SEQ ID NO: 4000325 - DNA, 25 bp, Homo sapien
ggtacgcagccagatctgaaaagct

SEQ ID NO: 4000326 - DNA, 25 bp, Homo sapien
gggaggtgtctctaacacagagatc

SEQ ID NO: 4000327 - DNA, 25 bp, Homo sapien
cacagagatctggtacgcagccaga

SEQ ID NO: 4000328 - DNA, 25 bp, Homo sapien
ttgaaaccacatttccccaggatcc

SEQ ID NO: 4000329 - DNA, 25 bp, Homo sapien
ccaggatccctgcaagagctgcctt

SEQ ID NO: 4000330 - DNA, 25 bp, Homo sapien
tttgaaaccacatttccccaggatc

SEQ ID NO: 4000331 - DNA, 25 bp, Homo sapien
catttccccaggatccctgcaagag

SEQ ID NO: 4000332 - DNA, 25 bp, Homo sapien
aagctgatattcgatgagaagggac

SEQ ID NO: 4000333 - DNA, 25 bp, Homo sapien
ccggatggtgaagctgatattcgat

SEQ ID NO: 4000334 - DNA, 25 bp, Homo sapien
cctttgtttccggatggtgaagctg

SEQ ID NO: 4000335 - DNA, 25 bp, Homo sapien
gctgatattcgatgagaagggacag

SEQ ID NO: 4000336 - DNA, 25 bp, Homo sapien
tggcaattgagattgaaatctggat

SEQ ID NO: 4000337 - DNA, 25 bp, Homo sapien
tggatctcttgtagaagattatccc

SEQ ID NO: 4000338 - DNA, 25 bp, Homo sapien
agacttattggcaattgagattgaa

SEQ ID NO: 4000339 - DNA, 25 bp, Homo sapien
tattggcaattgagattgaaatctg

SEQ ID NO: 4000340 - DNA, 25 bp, Homo sapien
ccacatgttcattttttttctccat

SEQ ID NO: 4000341 - DNA, 25 bp, Homo sapien
ctttatggtttccacatgttcattt

SEQ ID NO: 4000342 - DNA, 25 bp, Homo sapien
tttatggtttccacatgttcatttt

SEQ ID NO: 4000343 - DNA, 25 bp, Homo sapien
tttccacatgttcattttttttctc

SEQ ID NO: 4000344 - DNA, 25 bp, Homo sapien
aggctccacagacagtgatctaaga

SEQ ID NO: 4000345 - DNA, 25 bp, Homo sapien
tgatctaagaggatgatttgcaaat

SEQ ID NO: 4000346 - DNA, 25 bp, Homo sapien
atctaagaggatgatttgcaaatct

SEQ ID NO: 4000347 - DNA, 25 bp, Homo sapien
gctccacagacagtgatctaagagg

SEQ ID NO: 4000348 - DNA, 25 bp, Homo sapien
tcagcattgtgactcggcatgtgat

SEQ ID NO: 4000349 - DNA, 25 bp, Homo sapien
caccatgcaaagtatggtttcttgg

SEQ ID NO: 4000350 - DNA, 25 bp, Homo sapien
tggatgccgccaattccatttaccc

SEQ ID NO: 4000351 - DNA, 25 bp, Homo sapien
tatgctaactccctgaagccaccat

SEQ ID NO: 4000352 - DNA, 25 bp, Homo sapien
cctttcgtggcaggaatatcactaa

SEQ ID NO: 4000353 - DNA, 25 bp, Homo sapien
ttcgtggcaggaatatcactaatag

SEQ ID NO: 4000354 - DNA, 25 bp, Homo sapien
tggcaggaatatcactaatagctac

SEQ ID NO: 4000355 - DNA, 25 bp, Homo sapien
cgtggcaggaatatcactaatagct

SEQ ID NO: 4000356 - DNA, 25 bp, Homo sapien
cctgctaatgaagccagattctcaa

SEQ ID NO: 4000357 - DNA, 25 bp, Homo sapien
tgttgtgaggttatttagcatatcc

SEQ ID NO: 4000358 - DNA, 25 bp, Homo sapien
taagatgtgagtccgtttgtttgtt

SEQ ID NO: 4000359 - DNA, 25 bp, Homo sapien
ttatatgacttaagatgtgagtccg

SEQ ID NO: 4000360 - DNA, 25 bp, Homo sapien
aaggcttaatttctcctccggagct

SEQ ID NO: 4000361 - DNA, 25 bp, Homo sapien
gaggccatctgagatctttgtcttg

SEQ ID NO: 4000362 - DNA, 25 bp, Homo sapien
gcagggttattaacagtccctttca

SEQ ID NO: 4000363 - DNA, 25 bp, Homo sapien
aacagctccatgctgaatttgcaga

SEQ ID NO: 4000364 - DNA, 25 bp, Homo sapien
tatccatttcccacttttctgatag

SEQ ID NO: 4000365 - DNA, 25 bp, Homo sapien
atccatttcccacttttctgatagc

SEQ ID NO: 4000366 - DNA, 25 bp, Homo sapien
tggtatccatttcccacttttctga

SEQ ID NO: 4000367 - DNA, 25 bp, Homo sapien
gtatccatttcccacttttctgata

SEQ ID NO: 4000368 - DNA, 25 bp, Homo sapien
atgtgttctggtgcacaggagagca

SEQ ID NO: 4000369 - DNA, 25 bp, Homo sapien
caaggatgtgttctggtgcacagga

SEQ ID NO: 4000370 - DNA, 25 bp, Homo sapien
aggatgtgttctggtgcacaggaga

SEQ ID NO: 4000371 - DNA, 25 bp, Homo sapien
ccaaggatgtgttctggtgcacagg

SEQ ID NO: 4000372 - DNA, 25 bp, Homo sapien
gagcgctgagctcagaaacaccatt

SEQ ID NO: 4000373 - DNA, 25 bp, Homo sapien
tcttaattatgtcacgagcgctgag

SEQ ID NO: 4000374 - DNA, 25 bp, Homo sapien
tttttgataagaaccttgaacagtg

SEQ ID NO: 4000375 - DNA, 25 bp, Homo sapien
tatgcatgcagtacaaggagaaagt

SEQ ID NO: 4000376 - DNA, 25 bp, Homo sapien
cataaaaacttagaagcattgaaga

SEQ ID NO: 4000377 - DNA, 25 bp, Homo sapien
aaattatgaggcataaaaacttaga

SEQ ID NO: 4000378 - DNA, 25 bp, Homo sapien
ctatatgactagttttgcccagagc

SEQ ID NO: 4000379 - DNA, 25 bp, Homo sapien
ggaagttccactatgatgcatttgg

SEQ ID NO: 4000380 - DNA, 25 bp, Homo sapien
gagcttgagagtccatgaagaagcc

SEQ ID NO: 4000381 - DNA, 25 bp, Homo sapien
cagaactgggagcttgagagtccat

SEQ ID NO: 4000382 - DNA, 25 bp, Homo sapien
gagtccatgaagaagcctccaggaa

SEQ ID NO: 4000383 - DNA, 25 bp, Homo sapien
tccaggaagtttatcaccctcatca

SEQ ID NO: 4000384 - DNA, 25 bp, Homo sapien
ggggctcagtcacaagtccctcagc

SEQ ID NO: 4000385 - DNA, 25 bp, Homo sapien
ccggggctcagtcacaagtccctca

SEQ ID NO: 4000386 - DNA, 25 bp, Homo sapien
tgggattgttgcccggggctcagtc

SEQ ID NO: 4000387 - DNA, 25 bp, Homo sapien
ggctcagtcacaagtccctcagctt

SEQ ID NO: 4000388 - DNA, 25 bp, Homo sapien
cttgcagcagttctatttgcaattt

SEQ ID NO: 4000389 - DNA, 25 bp, Homo sapien
ttaattttatgcccacaccaatgca

SEQ ID NO: 4000390 - DNA, 25 bp, Homo sapien
attttatgcccacaccaatgcatat

SEQ ID NO: 4000391 - DNA, 25 bp, Homo sapien
ttgcagcagttctatttgcaatttg

SEQ ID NO: 4000392 - DNA, 25 bp, Homo sapien
gccaaaagtcacttggagaatatga

SEQ ID NO: 4000393 - DNA, 25 bp, Homo sapien
tctatagctcctgctaaaatttggg

SEQ ID NO: 4000394 - DNA, 25 bp, Homo sapien
taatgtgtatggaatgcagaagcca

SEQ ID NO: 4000395 - DNA, 25 bp, Homo sapien
gcataaacaagctctgacactcaca

SEQ ID NO: 4000396 - DNA, 25 bp, Homo sapien
ttgatcgctgacagccttttttttc

SEQ ID NO: 4000397 - DNA, 25 bp, Homo sapien
atttgatcgctgacagccttttttt

SEQ ID NO: 4000398 - DNA, 25 bp, Homo sapien
tttgatcgctgacagcctttttttt

SEQ ID NO: 4000399 - DNA, 25 bp, Homo sapien
atttcaaccgtcacactagcactgg

SEQ ID NO: 4000400 - DNA, 25 bp, Homo sapien
ccatgggtgctgactctttgcaccc

SEQ ID NO: 4000401 - DNA, 25 bp, Homo sapien
ttctggaccagaataatttcaaccg

SEQ ID NO: 4000402 - DNA, 25 bp, Homo sapien
ccatttctctaggatgggcaagact

SEQ ID NO: 4000403 - DNA, 25 bp, Homo sapien
ttgattatcttggaaagcaattaat

SEQ ID NO: 4000404 - DNA, 25 bp, Homo sapien
tgattatcttggaaagcaattaatc

SEQ ID NO: 4000405 - DNA, 25 bp, Homo sapien
attgattatcttggaaagcaattaa

SEQ ID NO: 4000406 - DNA, 25 bp, Homo sapien
cattgattatcttggaaagcaatta

SEQ ID NO: 4000407 - DNA, 25 bp, Homo sapien
tgcttgaggaatttggcaagggccc

SEQ ID NO: 4000408 - DNA, 25 bp, Homo sapien
tgaggaatttggcaagggccctgtc

SEQ ID NO: 4000409 - DNA, 25 bp, Homo sapien
aggaatttggcaagggccctgtcct

SEQ ID NO: 4000410 - DNA, 25 bp, Homo sapien
tcaggtgtgcttgaggaatttggca

SEQ ID NO: 4000411 - DNA, 25 bp, Homo sapien
cctagtgtggtagcaacaatgaact

SEQ ID NO: 4000412 - DNA, 25 bp, Homo sapien
tagtgtggtagcaacaatgaactct

SEQ ID NO: 4000413 - DNA, 25 bp, Homo sapien
ctagtgtggtagcaacaatgaactc

SEQ ID NO: 4000414 - DNA, 25 bp, Homo sapien
tcaggtcagcagcagcgttggcagc

SEQ ID NO: 4000415 - DNA, 25 bp, Homo sapien
gtcagcagcagcgttggcagcagtg

SEQ ID NO: 4000416 - DNA, 25 bp, Homo sapien
agcagcagcgttggcagcagtgtgg

SEQ ID NO: 4000417 - DNA, 25 bp, Homo sapien
caggtcagcagcagcgttggcagca

SEQ ID NO: 4000418 - DNA, 25 bp, Homo sapien
caaatacagttatgtagagaaagtc

SEQ ID NO: 4000419 - DNA, 25 bp, Homo sapien
atacagttatgtagagaaagtcgtc

SEQ ID NO: 4000420 - DNA, 25 bp, Homo sapien
tacaaatacagttatgtagagaaag

SEQ ID NO: 4000421 - DNA, 25 bp, Homo sapien
cagttatgtagagaaagtcgtccat

SEQ ID NO: 4000422 - DNA, 25 bp, Homo sapien
cggattcaaagggtaataagcgttg

SEQ ID NO: 4000423 - DNA, 25 bp, Homo sapien
gcaggcgatcggcagccactctgct

SEQ ID NO: 4000424 - DNA, 25 bp, Homo sapien
tttaagaagagctttcgaaatcgga

SEQ ID NO: 4000425 - DNA, 25 bp, Homo sapien
taagcgttgattaataatgtctgcc

SEQ ID NO: 4000426 - DNA, 25 bp, Homo sapien
gcacaacagggtgatcctagtcact

SEQ ID NO: 4000427 - DNA, 25 bp, Homo sapien
ggtgatcctagtcactaataagtta

SEQ ID NO: 4000428 - DNA, 25 bp, Homo sapien
agggtgatcctagtcactaataagt

SEQ ID NO: 4000429 - DNA, 25 bp, Homo sapien
acaacagggtgatcctagtcactaa

SEQ ID NO: 4000430 - DNA, 25 bp, Homo sapien
cattgtaggttttatcaccttccga

SEQ ID NO: 4000431 - DNA, 25 bp, Homo sapien
tcaatctcttgtaggctgcattctc

SEQ ID NO: 4000432 - DNA, 25 bp, Homo sapien
tcaccttccgatttgccaagtattt

SEQ ID NO: 4000433 - DNA, 25 bp, Homo sapien
agggctattaggcagagataagatg

SEQ ID NO: 4000434 - DNA, 25 bp, Homo sapien
tagcagggagagcacagagctaatc

SEQ ID NO: 4000435 - DNA, 25 bp, Homo sapien
gcagggagagcacagagctaatcat

SEQ ID NO: 4000436 - DNA, 25 bp, Homo sapien
ctagcagggagagcacagagctaat

SEQ ID NO: 4000437 - DNA, 25 bp, Homo sapien
agcagggagagcacagagctaatca

SEQ ID NO: 4000438 - DNA, 25 bp, Homo sapien
gtagcttggacttttcctgtgtttc

SEQ ID NO: 4000439 - DNA, 25 bp, Homo sapien
cctgtgtttcagcctctgggccact

SEQ ID NO: 4000440 - DNA, 25 bp, Homo sapien
tagcttggacttttcctgtgtttca

SEQ ID NO: 4000441 - DNA, 25 bp, Homo sapien
gtgtttcagcctctgggccactcat

SEQ ID NO: 4000442 - DNA, 25 bp, Homo sapien
aacaatgtacgattatggaaataag

SEQ ID NO: 4000443 - DNA, 25 bp, Homo sapien
gaggactgaagattggcacacagta

SEQ ID NO: 4000444 - DNA, 25 bp, Homo sapien
taatttagcaacacgtgtcaaatgc

SEQ ID NO: 4000445 - DNA, 25 bp, Homo sapien
gcttcaaagatgtgcataacctgtg

SEQ ID NO: 4000446 - DNA, 25 bp, Homo sapien
tgcaatgaccgggatcaaacgcgag

SEQ ID NO: 4000447 - DNA, 25 bp, Homo sapien
aatgaccgggatcaaacgcgagcat

SEQ ID NO: 4000448 - DNA, 25 bp, Homo sapien
tgtacagttcttgcaatgaccggga

SEQ ID NO: 4000449 - DNA, 25 bp, Homo sapien
cagttcttgcaatgaccgggatcaa

SEQ ID NO: 4000450 - DNA, 25 bp, Homo sapien
caaaaccgtaaatgaagaggcctgt

SEQ ID NO: 4000451 - DNA, 25 bp, Homo sapien
ggttttcatactggacagcccagga

SEQ ID NO: 4000452 - DNA, 25 bp, Homo sapien
cccaggacttgtttgtgcatacgaa

SEQ ID NO: 4000453 - DNA, 25 bp, Homo sapien
tatgacctaagatctgcaaaaccgt

SEQ ID NO: 4000454 - DNA, 25 bp, Homo sapien
atttcactgaggcatctcggcgctg

SEQ ID NO: 4000455 - DNA, 25 bp, Homo sapien
tgaaaagcctagtccagtggcagcc

SEQ ID NO: 4000456 - DNA, 25 bp, Homo sapien
tgtgaagtgccatcaatcctcggtc

SEQ ID NO: 4000457 - DNA, 25 bp, Homo sapien
cacaagtctggtaacggcccagcag

SEQ ID NO: 4000458 - DNA, 25 bp, Homo sapien
ttatccgagcaacagtgaagtttga

SEQ ID NO: 4000459 - DNA, 25 bp, Homo sapien
tttctctttgggactggttttggca

SEQ ID NO: 4000460 - DNA, 25 bp, Homo sapien
aaaagtattactgtgttatcaggtt

SEQ ID NO: 4000461 - DNA, 25 bp, Homo sapien
tcttcaccaaaagttatccgagcaa

SEQ ID NO: 4000462 - DNA, 25 bp, Homo sapien
aaatgcaccgaaggatccaaagccc

SEQ ID NO: 4000463 - DNA, 25 bp, Homo sapien
ttcaaatgcaccgaaggatccaaag

SEQ ID NO: 4000464 - DNA, 25 bp, Homo sapien
caccgaaggatccaaagccctcttt

SEQ ID NO: 4000465 - DNA, 25 bp, Homo sapien
aatgcaccgaaggatccaaagccct

SEQ ID NO: 4000466 - DNA, 25 bp, Homo sapien
gatgacaagcactcggcctctgttt

SEQ ID NO: 4000467 - DNA, 25 bp, Homo sapien
tcatcggatgacaagcactcggcct

SEQ ID NO: 4000468 - DNA, 25 bp, Homo sapien
atcggatgacaagcactcggcctct

SEQ ID NO: 4000469 - DNA, 25 bp, Homo sapien
cggatgacaagcactcggcctctgt

SEQ ID NO: 4000470 - DNA, 25 bp, Homo sapien
ggataatgacaagctgcgagttgct

SEQ ID NO: 4000471 - DNA, 25 bp, Homo sapien
taatgacaagctgcgagttgcttcc

SEQ ID NO: 4000472 - DNA, 25 bp, Homo sapien
ctctggataatgacaagctgcgagt

SEQ ID NO: 4000473 - DNA, 25 bp, Homo sapien
gacaagctgcgagttgcttcctctc

SEQ ID NO: 4000474 - DNA, 25 bp, Homo sapien
tgtcgtctgacatggaagcttgggt

SEQ ID NO: 4000475 - DNA, 25 bp, Homo sapien
tttgccagcaattgagccccatggg

SEQ ID NO: 4000476 - DNA, 25 bp, Homo sapien
caaaatagtgggtggtgtaactcct

SEQ ID NO: 4000477 - DNA, 25 bp, Homo sapien
gactcaagctgtccagtaccagagg

SEQ ID NO: 4000478 - DNA, 25 bp, Homo sapien
ctgggcttgctgccgagtccctgga

SEQ ID NO: 4000479 - DNA, 25 bp, Homo sapien
tggctgccaggtagcctctagggcc

SEQ ID NO: 4000480 - DNA, 25 bp, Homo sapien
cttgctgccgagtccctggaccttg

SEQ ID NO: 4000481 - DNA, 25 bp, Homo sapien
ctggctgccaggtagcctctagggc

SEQ ID NO: 4000482 - DNA, 25 bp, Homo sapien
aaggctgatgcaccagggccgagtt

SEQ ID NO: 4000483 - DNA, 25 bp, Homo sapien
gggcttcgcagattccttacacagg

SEQ ID NO: 4000484 - DNA, 25 bp, Homo sapien
ttcctggtccacatagtcaacggtt

SEQ ID NO: 4000485 - DNA, 25 bp, Homo sapien
ccacatagtcaacggttttctgaac

SEQ ID NO: 4000486 - DNA, 25 bp, Homo sapien
tggcggacaatgcagactttgcttc

SEQ ID NO: 4000487 - DNA, 25 bp, Homo sapien
gacatttggcggacaatgcagactt

SEQ ID NO: 4000488 - DNA, 25 bp, Homo sapien
taggagagacatttggcggacaatg

SEQ ID NO: 4000489 - DNA, 25 bp, Homo sapien
ggagagacatttggcggacaatgca

SEQ ID NO: 4000490 - DNA, 25 bp, Homo sapien
tctagtctgatatcttgtccggtgt

SEQ ID NO: 4000491 - DNA, 25 bp, Homo sapien
ggtcagcaatagacgtctagtctga

SEQ ID NO: 4000492 - DNA, 25 bp, Homo sapien
tgtagacattgcatggcttgaatat

SEQ ID NO: 4000493 - DNA, 25 bp, Homo sapien
cagattcatagttcttgataagcca

SEQ ID NO: 4000494 - DNA, 25 bp, Homo sapien
tcatacaccagctggattgtggatt

SEQ ID NO: 4000495 - DNA, 25 bp, Homo sapien
gctggattgtggattcagtatctcc

SEQ ID NO: 4000496 - DNA, 25 bp, Homo sapien
ttccctgtttcatacaccagctgga

SEQ ID NO: 4000497 - DNA, 25 bp, Homo sapien
tgttgccttccctgtttcatacacc

SEQ ID NO: 4000498 - DNA, 25 bp, Homo sapien
cttcttgctgttcttcttgaaagtc

SEQ ID NO: 4000499 - DNA, 25 bp, Homo sapien
cttgccatcactctgggcttcttgc

SEQ ID NO: 4000500 - DNA, 25 bp, Homo sapien
tgttcttcttgaaagtccctaccca

SEQ ID NO: 4000501 - DNA, 25 bp, Homo sapien
tgccatcactctgggcttcttgctg

SEQ ID NO: 4000502 - DNA, 25 bp, Homo sapien
gccatgttgcccaatgtggtctgaa

SEQ ID NO: 4000503 - DNA, 25 bp, Homo sapien
tcgccatgttgcccaatgtggtctg

SEQ ID NO: 4000504 - DNA, 25 bp, Homo sapien
cgccatgttgcccaatgtggtctga

SEQ ID NO: 4000505 - DNA, 25 bp, Homo sapien
ccatgttgcccaatgtggtctgaac

SEQ ID NO: 4000506 - DNA, 25 bp, Homo sapien
caggtgttgaggtagttgtaccctt

SEQ ID NO: 4000507 - DNA, 25 bp, Homo sapien
tagttgtacccttcggtgatgttta

SEQ ID NO: 4000508 - DNA, 25 bp, Homo sapien
aggtagttgtacccttcggtgatgt

SEQ ID NO: 4000509 - DNA, 25 bp, Homo sapien
ttgaggtagttgtacccttcggtga

SEQ ID NO: 4000510 - DNA, 25 bp, Homo sapien
gatttctcttgctaacgctggctgc

SEQ ID NO: 4000511 - DNA, 25 bp, Homo sapien
tgtcccaagtcctctaggctgtaaa

SEQ ID NO: 4000512 - DNA, 25 bp, Homo sapien
cagcattccgtggtttatggcccca

SEQ ID NO: 4000513 - DNA, 25 bp, Homo sapien
aagtcagtatcgctgtgccaccagg

SEQ ID NO: 4000514 - DNA, 25 bp, Homo sapien
cattgacctacaccctctctaagtt

SEQ ID NO: 4000515 - DNA, 25 bp, Homo sapien
tctgtagccacaggttggaatttgt

SEQ ID NO: 4000516 - DNA, 25 bp, Homo sapien
ggaatttgtgagtcgttattttgca

SEQ ID NO: 4000517 - DNA, 25 bp, Homo sapien
tcctccattgaatctgtagccacag

SEQ ID NO: 4000518 - DNA, 25 bp, Homo sapien
tggaagccctcgtttctaaaggcca

SEQ ID NO: 4000519 - DNA, 25 bp, Homo sapien
tatgcaaccgatacttgcttcctgg

SEQ ID NO: 4000520 - DNA, 25 bp, Homo sapien
tggtctccgttctcaaaaagtgcta

SEQ ID NO: 4000521 - DNA, 25 bp, Homo sapien
aagtgctataattgtttccatgagg

SEQ ID NO: 4000522 - DNA, 25 bp, Homo sapien
gactagagaggtaccaaccagggta

SEQ ID NO: 4000523 - DNA, 25 bp, Homo sapien
gaatcaaggatatttcaccactagt

SEQ ID NO: 4000524 - DNA, 25 bp, Homo sapien
gtggtgatattaccagtagcatggg

SEQ ID NO: 4000525 - DNA, 25 bp, Homo sapien
cctaattgctgttggccaagaatca

SEQ ID NO: 4000526 - DNA, 25 bp, Homo sapien
ttccaagagctaaatattaatgtgt

SEQ ID NO: 4000527 - DNA, 25 bp, Homo sapien
gagaaagagtgagatggttgtgtcc

SEQ ID NO: 4000528 - DNA, 25 bp, Homo sapien
ggtattccaagagctaaatattaat

SEQ ID NO: 4000529 - DNA, 25 bp, Homo sapien
gtgtcctttcagggtattccaagag

SEQ ID NO: 4000530 - DNA, 25 bp, Homo sapien
tcatagtccttggttgaacttttgc

SEQ ID NO: 4000531 - DNA, 25 bp, Homo sapien
tgaacttttgctcgaagcccttctg

SEQ ID NO: 4000532 - DNA, 25 bp, Homo sapien
cagcgaggcagtgtctttttgtatc

SEQ ID NO: 4000533 - DNA, 25 bp, Homo sapien
ggctagcctgtgtatattgtttcca

SEQ ID NO: 4000534 - DNA, 25 bp, Homo sapien
ggttctagccagacttttgccttca

SEQ ID NO: 4000535 - DNA, 25 bp, Homo sapien
cagcgatttgctccagttgacttgc

SEQ ID NO: 4000536 - DNA, 25 bp, Homo sapien
tcccgctgccaatttgaaagaaagg

SEQ ID NO: 4000537 - DNA, 25 bp, Homo sapien
ccagtgtggatcctgctgacgttga

SEQ ID NO: 4000538 - DNA, 25 bp, Homo sapien
gtaacatagttcaggccacttacat

SEQ ID NO: 4000539 - DNA, 25 bp, Homo sapien
catgtaacatagttcaggccactta

SEQ ID NO: 4000540 - DNA, 25 bp, Homo sapien
tgtaacatagttcaggccacttaca

SEQ ID NO: 4000541 - DNA, 25 bp, Homo sapien
tcatgtaacatagttcaggccactt

SEQ ID NO: 4000542 - DNA, 25 bp, Homo sapien
gctagctttattgaatccacgatgg

SEQ ID NO: 4000543 - DNA, 25 bp, Homo sapien
gaagattgcacagacgccggcatta

SEQ ID NO: 4000544 - DNA, 25 bp, Homo sapien
gccggcattaaccaggaccacgata

SEQ ID NO: 4000545 - DNA, 25 bp, Homo sapien
gaccacgatagaccaagcaaataag

SEQ ID NO: 4000546 - DNA, 25 bp, Homo sapien
agcaagtggtaggaatctgaggtga

SEQ ID NO: 4000547 - DNA, 25 bp, Homo sapien
caagtggtaggaatctgaggtgagt

SEQ ID NO: 4000548 - DNA, 25 bp, Homo sapien
aagtggtaggaatctgaggtgagtc

SEQ ID NO: 4000549 - DNA, 25 bp, Homo sapien
agtggtaggaatctgaggtgagtcg

SEQ ID NO: 4000550 - DNA, 25 bp, Homo sapien
ttagtcctgagaaccggcaggtgag

SEQ ID NO: 4000551 - DNA, 25 bp, Homo sapien
taatggcagagccttgcggatgcac

SEQ ID NO: 4000552 - DNA, 25 bp, Homo sapien
tcttctgaaccaaacggtgctcttg

SEQ ID NO: 4000553 - DNA, 25 bp, Homo sapien
ttggaagcaaagcagacaaggacga

SEQ ID NO: 4000554 - DNA, 25 bp, Homo sapien
atcagggtcccgggagacagaacct

SEQ ID NO: 4000555 - DNA, 25 bp, Homo sapien
atcggcatcagggtcccgggagaca

SEQ ID NO: 4000556 - DNA, 25 bp, Homo sapien
agacatcggcatcagggtcccggga

SEQ ID NO: 4000557 - DNA, 25 bp, Homo sapien
tgtaagacatcggcatcagggtccc

SEQ ID NO: 4000558 - DNA, 25 bp, Homo sapien
gcatccccaaggaaccttgaatcac

SEQ ID NO: 4000559 - DNA, 25 bp, Homo sapien
catccccaaggaaccttgaatcaca

SEQ ID NO: 4000560 - DNA, 25 bp, Homo sapien
atccccaaggaaccttgaatcacac

SEQ ID NO: 4000561 - DNA, 25 bp, Homo sapien
gttccatcaggattcagtccattca

SEQ ID NO: 4000562 - DNA, 25 bp, Homo sapien
tttccccagttccatcaggattcag

SEQ ID NO: 4000563 - DNA, 25 bp, Homo sapien
tcaccttagttttggcctcagtttc

SEQ ID NO: 4000564 - DNA, 25 bp, Homo sapien
cagtccattcaccttagttttggcc

SEQ ID NO: 4000565 - DNA, 25 bp, Homo sapien
caacaaaagtttccattcaaccctg

SEQ ID NO: 4000566 - DNA, 25 bp, Homo sapien
gacacggcaacaaaagtttccattc

SEQ ID NO: 4000567 - DNA, 25 bp, Homo sapien
cacggcaacaaaagtttccattcaa

SEQ ID NO: 4000568 - DNA, 25 bp, Homo sapien
ctgacacggcaacaaaagtttccat

SEQ ID NO: 4000569 - DNA, 25 bp, Homo sapien
atctcatctgaaaccggcattacca

SEQ ID NO: 4000570 - DNA, 25 bp, Homo sapien
cttctcccggcatcgcatttgtgcg

SEQ ID NO: 4000571 - DNA, 25 bp, Homo sapien
catttgtgcggacgagagctgtcaa

SEQ ID NO: 4000572 - DNA, 25 bp, Homo sapien
ccacgcgggcagagaaagaacctct

SEQ ID NO: 4000573 - DNA, 25 bp, Homo sapien
cattgaacgttggaagcctgaaaag

SEQ ID NO: 4000574 - DNA, 25 bp, Homo sapien
ttagggcgatgagcttgagtaaagc

SEQ ID NO: 4000575 - DNA, 25 bp, Homo sapien
taaaagccgtggatttagggcgatg

SEQ ID NO: 4000576 - DNA, 25 bp, Homo sapien
gcagatgcattcacactcacacaaa

SEQ ID NO: 4000577 - DNA, 25 bp, Homo sapien
caggttggggtctcatctgtccaaa

SEQ ID NO: 4000578 - DNA, 25 bp, Homo sapien
tcagcaaagcgtggcaggttggggt

SEQ ID NO: 4000579 - DNA, 25 bp, Homo sapien
tcatctgtccaaatgtagcacacac

SEQ ID NO: 4000580 - DNA, 25 bp, Homo sapien
gggtctcatctgtccaaatgtagca

SEQ ID NO: 4000581 - DNA, 25 bp, Homo sapien
ctgcctgcatatgcaatatcgcaca

SEQ ID NO: 4000582 - DNA, 25 bp, Homo sapien
cagctgtgtccaattcgctgcctgc

SEQ ID NO: 4000583 - DNA, 25 bp, Homo sapien
gcctgcatatgcaatatcgcacaca

SEQ ID NO: 4000584 - DNA, 25 bp, Homo sapien
gtgtccaattcgctgcctgcatatg

SEQ ID NO: 4000585 - DNA, 25 bp, Homo sapien
cccagtcatccagctggcgtggcag

SEQ ID NO: 4000586 - DNA, 25 bp, Homo sapien
caaagagaaacacttaatcggatgg

SEQ ID NO: 4000587 - DNA, 25 bp, Homo sapien
ggtaagaagagaacccccagtcatc

SEQ ID NO: 4000588 - DNA, 25 bp, Homo sapien
catgggtgttgacggcttcatgatg

SEQ ID NO: 4000589 - DNA, 25 bp, Homo sapien
ccccggactcgatggagatataatc

SEQ ID NO: 4000590 - DNA, 25 bp, Homo sapien
catcttatagtttgcagctgtgaaa

SEQ ID NO: 4000591 - DNA, 25 bp, Homo sapien
ccaaggaatagcattcaggcctggc

SEQ ID NO: 4000592 - DNA, 25 bp, Homo sapien
tctaggcgagtagcatatgtcctca

SEQ ID NO: 4000593 - DNA, 25 bp, Homo sapien
tacttttgtatggtacaggcttgag

SEQ ID NO: 4000594 - DNA, 25 bp, Homo sapien
ccttattgcatgagagggttttcca

SEQ ID NO: 4000595 - DNA, 25 bp, Homo sapien
tttttgcctgctgtcccactcatgt

SEQ ID NO: 4000596 - DNA, 25 bp, Homo sapien
ggattccagtttgtttcgctcaata

SEQ ID NO: 4000597 - DNA, 25 bp, Homo sapien
tgtccgcagatctggatgaactgga

SEQ ID NO: 4000598 - DNA, 25 bp, Homo sapien
caaggtctcacagagatgaacgaat

SEQ ID NO: 4000599 - DNA, 25 bp, Homo sapien
gaacacaggtggcaattcggtctct

SEQ ID NO: 4000600 - DNA, 25 bp, Homo sapien
tgttcgacgttcaaaatccaaggga

SEQ ID NO: 4000601 - DNA, 25 bp, Homo sapien
catctatcgcctctcaattgaaacc

SEQ ID NO: 4000602 - DNA, 25 bp, Homo sapien
cctggctgtttcacatctatcgcct

SEQ ID NO: 4000603 - DNA, 25 bp, Homo sapien
tcttcaccagggtgtgggtatcatc

SEQ ID NO: 4000604 - DNA, 25 bp, Homo sapien
tgggccggacacagtcctggctgtt

SEQ ID NO: 4000605 - DNA, 25 bp, Homo sapien
gaataaggcttgaatgacttgcgca

SEQ ID NO: 4000606 - DNA, 25 bp, Homo sapien
tgatgataaagaagagcccacgcta

SEQ ID NO: 4000607 - DNA, 25 bp, Homo sapien
ttagggcctttgcttccaaactgat

SEQ ID NO: 4000608 - DNA, 25 bp, Homo sapien
gacttgcgcaaggtcacaggtgtac

SEQ ID NO: 4000609 - DNA, 25 bp, Homo sapien
tattccagatcaatgctcagcggtc

SEQ ID NO: 4000610 - DNA, 25 bp, Homo sapien
ccatcactaacagggtgcctgcctt

SEQ ID NO: 4000611 - DNA, 25 bp, Homo sapien
tgatagataagtcctccgagaacat

SEQ ID NO: 4000612 - DNA, 25 bp, Homo sapien
cacagcctccgtgaaagcaatggaa

SEQ ID NO: 4000613 - DNA, 25 bp, Homo sapien
tgttcttgaggttttattacacttg

SEQ ID NO: 4000614 - DNA, 25 bp, Homo sapien
atttttatatttcacgatgtgtttg

SEQ ID NO: 4000615 - DNA, 25 bp, Homo sapien
ttatatttcacgatgtgtttgagct

SEQ ID NO: 4000616 - DNA, 25 bp, Homo sapien
ttttatatttcacgatgtgtttgag

SEQ ID NO: 4000617 - DNA, 25 bp, Homo sapien
catagaacctgatttgtagaatggg

SEQ ID NO: 4000618 - DNA, 25 bp, Homo sapien
ttgaacgtgggctgaaaggcaagct

SEQ ID NO: 4000619 - DNA, 25 bp, Homo sapien
cttgaacaccagtgtatctgtcctt

SEQ ID NO: 4000620 - DNA, 25 bp, Homo sapien
gctgaaaggcaagctgtatgtttct

SEQ ID NO: 4000621 - DNA, 25 bp, Homo sapien
aaaaatcgaaacttcctgcttgaag

SEQ ID NO: 4000622 - DNA, 25 bp, Homo sapien
ttgattccacattttagctatcatg

SEQ ID NO: 4000623 - DNA, 25 bp, Homo sapien
agtgtctcctcttcagatagcacct

SEQ ID NO: 4000624 - DNA, 25 bp, Homo sapien
tcagtggacgcttatattgattcca

SEQ ID NO: 4000625 - DNA, 25 bp, Homo sapien
attcagtgtggccaaacctataagg

SEQ ID NO: 4000626 - DNA, 25 bp, Homo sapien
caaacctataaggagacttagcact

SEQ ID NO: 4000627 - DNA, 25 bp, Homo sapien
tgatgcaggctatcacctgcaaatt

SEQ ID NO: 4000628 - DNA, 25 bp, Homo sapien
gccacaatgttgctgtgatgcaggc

SEQ ID NO: 4000629 - DNA, 25 bp, Homo sapien
ccaattagttagaggtgccatgttc

SEQ ID NO: 4000630 - DNA, 25 bp, Homo sapien
aatgatatgcctcaaagtccttgcc

SEQ ID NO: 4000631 - DNA, 25 bp, Homo sapien
ggtgaaattgttctacctcagacca

SEQ ID NO: 4000632 - DNA, 25 bp, Homo sapien
aaagacgccgcctagctcagtggtt

SEQ ID NO: 4000633 - DNA, 25 bp, Homo sapien
aaagcagctgaaaggaggttaaaag

SEQ ID NO: 4000634 - DNA, 25 bp, Homo sapien
taaagtgataaaatatccaagagat

SEQ ID NO: 4000635 - DNA, 25 bp, Homo sapien
agatgtttcaaaatgcaaggcctta

SEQ ID NO: 4000636 - DNA, 25 bp, Homo sapien
tagaggagcctgagtcctttcttta

SEQ ID NO: 4000637 - DNA, 25 bp, Homo sapien
gatcgaggctgacaaatcaaatcca

SEQ ID NO: 4000638 - DNA, 25 bp, Homo sapien
cctccactgtaatgcggtcatgtga

SEQ ID NO: 4000639 - DNA, 25 bp, Homo sapien
tcatgtgatcgaggctgacaaatca

SEQ ID NO: 4000640 - DNA, 25 bp, Homo sapien
taatgcggtcatgtgatcgaggctg

SEQ ID NO: 4000641 - DNA, 25 bp, Homo sapien
tgaaataggggatccatttttctaa

SEQ ID NO: 4000642 - DNA, 25 bp, Homo sapien
ttgaaataggggatccatttttcta

SEQ ID NO: 4000643 - DNA, 25 bp, Homo sapien
caagttttcattgcctaacaccaga

SEQ ID NO: 4000644 - DNA, 25 bp, Homo sapien
tttcattgcctaacaccagaaatcc

SEQ ID NO: 4000645 - DNA, 25 bp, Homo sapien
atccaagttttcattgcctaacacc

SEQ ID NO: 4000646 - DNA, 25 bp, Homo sapien
gttttcattgcctaacaccagaaat

SEQ ID NO: 4000647 - DNA, 25 bp, Homo sapien
tgtcagttgatacaagcttctccct

SEQ ID NO: 4000648 - DNA, 25 bp, Homo sapien
cattcccgcagaaatatggctggca

SEQ ID NO: 4000649 - DNA, 25 bp, Homo sapien
taagcagcctgccttgtctacattt

SEQ ID NO: 4000650 - DNA, 25 bp, Homo sapien
ccactattgatgaacgtcgtcagaa

SEQ ID NO: 4000651 - DNA, 25 bp, Homo sapien
cttagtggcttaagatgaactacca

SEQ ID NO: 4000652 - DNA, 25 bp, Homo sapien
tagtgaaatcccatgaactcctgtt

SEQ ID NO: 4000653 - DNA, 25 bp, Homo sapien
tggagcccaacatcttcacccttag

SEQ ID NO: 4000654 - DNA, 25 bp, Homo sapien
tgttccccggcattcatctcttctc

SEQ ID NO: 4000655 - DNA, 25 bp, Homo sapien
tctgcccccatattctctctaaaac

SEQ ID NO: 4000656 - DNA, 25 bp, Homo sapien
ctcagcaatcgaatctccaaactca

SEQ ID NO: 4000657 - DNA, 25 bp, Homo sapien
gaatctccaaactcaattcactctg

SEQ ID NO: 4000658 - DNA, 25 bp, Homo sapien
ctctctaaaacccacatttgtttca

SEQ ID NO: 4000659 - DNA, 25 bp, Homo sapien
cactgccattgcctcaagaagttcc

SEQ ID NO: 4000660 - DNA, 25 bp, Homo sapien
ccccactgccattgcctcaagaagt

SEQ ID NO: 4000661 - DNA, 25 bp, Homo sapien
cccactgccattgcctcaagaagtt

SEQ ID NO: 4000662 - DNA, 25 bp, Homo sapien
ctgccattgcctcaagaagttccat

SEQ ID NO: 4000663 - DNA, 25 bp, Homo sapien
tctgtcctcccccacaacacaattc

SEQ ID NO: 4000664 - DNA, 25 bp, Homo sapien
ctcatcccaagaactggaattcttg

SEQ ID NO: 4000665 - DNA, 25 bp, Homo sapien
ctgtcctcccccacaacacaattca

SEQ ID NO: 4000666 - DNA, 25 bp, Homo sapien
tgtcctcccccacaacacaattcaa

SEQ ID NO: 4000667 - DNA, 25 bp, Homo sapien
taaagcccttaggtttttctctgca

SEQ ID NO: 4000668 - DNA, 25 bp, Homo sapien
cttagtgggcggtttgaggacactc

SEQ ID NO: 4000669 - DNA, 25 bp, Homo sapien
gagtggttgaatctcctccaaaggc

SEQ ID NO: 4000670 - DNA, 25 bp, Homo sapien
cctgacagaaggtcttaaaataaag

SEQ ID NO: 4000671 - DNA, 25 bp, Homo sapien
ccctctttgccagtgctcagcatat

SEQ ID NO: 4000672 - DNA, 25 bp, Homo sapien
gctcccctctttgccagtgctcagc

SEQ ID NO: 4000673 - DNA, 25 bp, Homo sapien
tttgccagtgctcagcatatgtgta

SEQ ID NO: 4000674 - DNA, 25 bp, Homo sapien
tgtgtatgcactggggtgctgtgaa

SEQ ID NO: 4000675 - DNA, 25 bp, Homo sapien
agctagagcccctgcgttcttctgg

SEQ ID NO: 4000676 - DNA, 25 bp, Homo sapien
cattctgggagttttatgtgcctgc

SEQ ID NO: 4000677 - DNA, 25 bp, Homo sapien
tgcgctgtttccatagcaatgcggg

SEQ ID NO: 4000678 - DNA, 25 bp, Homo sapien
cagccccgttgtgacagctagagcc

SEQ ID NO: 4000679 - DNA, 25 bp, Homo sapien
cattccaggagtctgacacatccct

SEQ ID NO: 4000680 - DNA, 25 bp, Homo sapien
ctgggcaaattcatcatggccctga

SEQ ID NO: 4000681 - DNA, 25 bp, Homo sapien
tgacacatccctgtgcttacagatg

SEQ ID NO: 4000682 - DNA, 25 bp, Homo sapien
atcatggccctgaacataatgttga

SEQ ID NO: 4000683 - DNA, 25 bp, Homo sapien
aactgtccaatcagcaacacaagct

SEQ ID NO: 4000684 - DNA, 25 bp, Homo sapien
caatcagcaacacaagctgacccaa

SEQ ID NO: 4000685 - DNA, 25 bp, Homo sapien
aagaatgacgcttattttctcctcc

SEQ ID NO: 4000686 - DNA, 25 bp, Homo sapien
tttgaagagaaagaatgacgcttat

SEQ ID NO: 4000687 - DNA, 25 bp, Homo sapien
agggctcagcaagccgtcgtggtgg

SEQ ID NO: 4000688 - DNA, 25 bp, Homo sapien
taggtctttaatcagcatccagggc

SEQ ID NO: 4000689 - DNA, 25 bp, Homo sapien
agcaagccgtcgtggtggggactgc

SEQ ID NO: 4000690 - DNA, 25 bp, Homo sapien
ctcagcaagccgtcgtggtggggac

SEQ ID NO: 4000691 - DNA, 25 bp, Homo sapien
tttgtggacaaccaccctggtatct

SEQ ID NO: 4000692 - DNA, 25 bp, Homo sapien
gacaaccaccctggtatctgtggag

SEQ ID NO: 4000693 - DNA, 25 bp, Homo sapien
tgtggacaaccaccctggtatctgt

SEQ ID NO: 4000694 - DNA, 25 bp, Homo sapien
tggacaaccaccctggtatctgtgg

SEQ ID NO: 4000695 - DNA, 25 bp, Homo sapien
ttccacccccgtattgtcagcacat

SEQ ID NO: 4000696 - DNA, 25 bp, Homo sapien
ggagtactgggtgcttacccggcta

SEQ ID NO: 4000697 - DNA, 25 bp, Homo sapien
cggctatttaaaagcagtactttct

SEQ ID NO: 4000698 - DNA, 25 bp, Homo sapien
tactgggtgcttacccggctattta

SEQ ID NO: 4000699 - DNA, 25 bp, Homo sapien
catctagtgttttaccgccatgcac

SEQ ID NO: 4000700 - DNA, 25 bp, Homo sapien
ccatacgacgcataccagtctgcaa

SEQ ID NO: 4000701 - DNA, 25 bp, Homo sapien
cagtctgcaactatctttacaatca

SEQ ID NO: 4000702 - DNA, 25 bp, Homo sapien
catttctattccatacgacgcatac

SEQ ID NO: 4000703 - DNA, 25 bp, Homo sapien
ctaagtgtattcgacaaatgaatct

SEQ ID NO: 4000704 - DNA, 25 bp, Homo sapien
taatgctgcttatcctggacacaag

SEQ ID NO: 4000705 - DNA, 25 bp, Homo sapien
ggtaatgtgtacaaagccctagacc

SEQ ID NO: 4000706 - DNA, 25 bp, Homo sapien
tacagtgccatgtaaacctaagtgg

SEQ ID NO: 4000707 - DNA, 25 bp, Homo sapien
catgataaggtagaagaattgagcc

SEQ ID NO: 4000708 - DNA, 25 bp, Homo sapien
tcctttgcagggactagagaatgcg

SEQ ID NO: 4000709 - DNA, 25 bp, Homo sapien
gaaggaggcattggtttcagcacag

SEQ ID NO: 4000710 - DNA, 25 bp, Homo sapien
tcagacacatcgcaaggatggctgc

SEQ ID NO: 4000711 - DNA, 25 bp, Homo sapien
ttcgaatgttttccgcatgcagctg

SEQ ID NO: 4000712 - DNA, 25 bp, Homo sapien
ttccaattcatctgcccactcattc

SEQ ID NO: 4000713 - DNA, 25 bp, Homo sapien
tccaattcatctgcccactcattca

SEQ ID NO: 4000714 - DNA, 25 bp, Homo sapien
aattcatctgcccactcattcaccc

SEQ ID NO: 4000715 - DNA, 25 bp, Homo sapien
ccttccaattcatctgcccactcat

SEQ ID NO: 4000716 - DNA, 25 bp, Homo sapien
ctgtgatgctgaagaccccatccac

SEQ ID NO: 4000717 - DNA, 25 bp, Homo sapien
gctgtgatgctgaagaccccatcca

SEQ ID NO: 4000718 - DNA, 25 bp, Homo sapien
acaaaagactagaagctggcttcat

SEQ ID NO: 4000719 - DNA, 25 bp, Homo sapien
ctttccctgacaaaactcaaccaag

SEQ ID NO: 4000720 - DNA, 25 bp, Homo sapien
actcaaccaagagaacatgcattat

SEQ ID NO: 4000721 - DNA, 25 bp, Homo sapien
tttcaggtcttgtagcccctgctcc

SEQ ID NO: 4000722 - DNA, 25 bp, Homo sapien
tgctttctcagttggtctgcccacg

SEQ ID NO: 4000723 - DNA, 25 bp, Homo sapien
tttgccgcgtctggaaagcattttt

SEQ ID NO: 4000724 - DNA, 25 bp, Homo sapien
ctcagttggtctgcccacggtccag

SEQ ID NO: 4000725 - DNA, 25 bp, Homo sapien
ttgcaggtggttgtcttttgccgcg

SEQ ID NO: 4000726 - DNA, 25 bp, Homo sapien
ttctggatgtgtacaagcgactaga

SEQ ID NO: 4000727 - DNA, 25 bp, Homo sapien
ggatgtgtacaagcgactagactac

SEQ ID NO: 4000728 - DNA, 25 bp, Homo sapien
tacaagcgactagactactttgacc

SEQ ID NO: 4000729 - DNA, 25 bp, Homo sapien
ttcaggttaatttctggatgtgtac

SEQ ID NO: 4000730 - DNA, 25 bp, Homo sapien
cttcagagccattcagagtcattct

SEQ ID NO: 4000731 - DNA, 25 bp, Homo sapien
gtgcttcagagccattcagagtcat

SEQ ID NO: 4000732 - DNA, 25 bp, Homo sapien
ctgtgcttcagagccattcagagtc

SEQ ID NO: 4000733 - DNA, 25 bp, Homo sapien
agagccattcagagtcattctttcc

SEQ ID NO: 4000734 - DNA, 25 bp, Homo sapien
ttatcaaggtataaaggtgtaagac

SEQ ID NO: 4000735 - DNA, 25 bp, Homo sapien
cttatcaaggtataaaggtgtaaga

SEQ ID NO: 4000736 - DNA, 25 bp, Homo sapien
aggtgtaagacttctcctatgggaa

SEQ ID NO: 4000737 - DNA, 25 bp, Homo sapien
aaggtgtaagacttctcctatggga

SEQ ID NO: 4000738 - DNA, 25 bp, Homo sapien
tataaaaatgagctgagcgttatgg

SEQ ID NO: 4000739 - DNA, 25 bp, Homo sapien
tgagctgagcgttatggcacatgcc

SEQ ID NO: 4000740 - DNA, 25 bp, Homo sapien
aatataaaaatgagctgagcgttat

SEQ ID NO: 4000741 - DNA, 25 bp, Homo sapien
aaaatgagctgagcgttatggcaca

SEQ ID NO: 4000742 - DNA, 25 bp, Homo sapien
caacacagataagtagaaggaccag

SEQ ID NO: 4000743 - DNA, 25 bp, Homo sapien
tgcatcagtgcatgggtctttggaa

SEQ ID NO: 4000744 - DNA, 25 bp, Homo sapien
gatcgctcaagggttccaggcacta

SEQ ID NO: 4000745 - DNA, 25 bp, Homo sapien
tgagaaattataccccagacagtta

SEQ ID NO: 4000746 - DNA, 25 bp, Homo sapien
tgccttgttctaaggaggttgtgtt

SEQ ID NO: 4000747 - DNA, 25 bp, Homo sapien
cccatagcaccttgctttatgagct

SEQ ID NO: 4000748 - DNA, 25 bp, Homo sapien
acttttcgtgctttcccatagcacc

SEQ ID NO: 4000749 - DNA, 25 bp, Homo sapien
ccttgttctaaggaggttgtgtttg

SEQ ID NO: 4000750 - DNA, 25 bp, Homo sapien
taaattccagtctgtgatagtatca

SEQ ID NO: 4000751 - DNA, 25 bp, Homo sapien
tccagtctgtgatagtatcagcctg

SEQ ID NO: 4000752 - DNA, 25 bp, Homo sapien
agtctgtgatagtatcagcctgagg

SEQ ID NO: 4000753 - DNA, 25 bp, Homo sapien
attccagtctgtgatagtatcagcc

SEQ ID NO: 4000754 - DNA, 25 bp, Homo sapien
tggattttaacctgtgaggcgtatg

SEQ ID NO: 4000755 - DNA, 25 bp, Homo sapien
tttaacctgtgaggcgtatgggtgt

SEQ ID NO: 4000756 - DNA, 25 bp, Homo sapien
agcattccaatatagccttttccca

SEQ ID NO: 4000757 - DNA, 25 bp, Homo sapien
cttttcccatcaacgtagcctcttt

SEQ ID NO: 4000758 - DNA, 25 bp, Homo sapien
gtcctggccaccatcgtctcccacc

SEQ ID NO: 4000759 - DNA, 25 bp, Homo sapien
tcagcagtggatacagatttgccat

SEQ ID NO: 4000760 - DNA, 25 bp, Homo sapien
ctgtttcacccttgatggtttctct

SEQ ID NO: 4000761 - DNA, 25 bp, Homo sapien
ctcagcagcactccccctcctcgtc

SEQ ID NO: 4000762 - DNA, 25 bp, Homo sapien
tttattttgtatcgcgatcaagatg

SEQ ID NO: 4000763 - DNA, 25 bp, Homo sapien
tttgtatcgcgatcaagatgagagt

SEQ ID NO: 4000764 - DNA, 25 bp, Homo sapien
cgcgatcaagatgagagttcgggct

SEQ ID NO: 4000765 - DNA, 25 bp, Homo sapien
tgagagttcgggctttcaccttccg

SEQ ID NO: 4000766 - DNA, 25 bp, Homo sapien
catgtagatgagaagtaaagttgaa

SEQ ID NO: 4000767 - DNA, 25 bp, Homo sapien
ctcatgtagatgagaagtaaagttg

SEQ ID NO: 4000768 - DNA, 25 bp, Homo sapien
gtagatgagaagtaaagttgaattc

SEQ ID NO: 4000769 - DNA, 25 bp, Homo sapien
tgtagatgagaagtaaagttgaatt

SEQ ID NO: 4000770 - DNA, 25 bp, Homo sapien
ctgaataaacgtttgaggatccctg

SEQ ID NO: 4000771 - DNA, 25 bp, Homo sapien
tgttcggtcacaatctgggcattgc

SEQ ID NO: 4000772 - DNA, 25 bp, Homo sapien
tgaataacgtctgcctggtgtgcgg

SEQ ID NO: 4000773 - DNA, 25 bp, Homo sapien
tgggcattgccatggaacatgtgac

SEQ ID NO: 4000774 - DNA, 25 bp, Homo sapien
tggaagacacaagattcgggagtcc

SEQ ID NO: 4000775 - DNA, 25 bp, Homo sapien
aagacacaagattcgggagtccttt

SEQ ID NO: 4000776 - DNA, 25 bp, Homo sapien
gacacaagattcgggagtccttttc

SEQ ID NO: 4000777 - DNA, 25 bp, Homo sapien
ggaagacacaagattcgggagtcct

SEQ ID NO: 4000778 - DNA, 25 bp, Homo sapien
cctggacagatcttccctgcaggct

SEQ ID NO: 4000779 - DNA, 25 bp, Homo sapien
acagatcttccctgcaggctcacac

SEQ ID NO: 4000780 - DNA, 25 bp, Homo sapien
atgcctggacagatcttccctgcag

SEQ ID NO: 4000781 - DNA, 25 bp, Homo sapien
ttccctgcaggctcacaccaccctc

SEQ ID NO: 4000782 - DNA, 25 bp, Homo sapien
acactccagctcttggggctctgaa

SEQ ID NO: 4000783 - DNA, 25 bp, Homo sapien
ctaacactccagctcttggggctct

SEQ ID NO: 4000784 - DNA, 25 bp, Homo sapien
actccagctcttggggctctgaatg

SEQ ID NO: 4000785 - DNA, 25 bp, Homo sapien
taacactccagctcttggggctctg

SEQ ID NO: 4000786 - DNA, 25 bp, Homo sapien
tgtggtcctcgctgaacccacagga

SEQ ID NO: 4000787 - DNA, 25 bp, Homo sapien
ggatagaacatccactgctctcctc

SEQ ID NO: 4000788 - DNA, 25 bp, Homo sapien
ttcttcaccctgtggtcctcgctga

SEQ ID NO: 4000789 - DNA, 25 bp, Homo sapien
tatccacacatgcttgtggctgcta

SEQ ID NO: 4000790 - DNA, 25 bp, Homo sapien
agctcagtgcccctgctttccagac

SEQ ID NO: 4000791 - DNA, 25 bp, Homo sapien
acaggagagcacaagagtgccgatc

SEQ ID NO: 4000792 - DNA, 25 bp, Homo sapien
aagagtgccgatcgcagccgtttca

SEQ ID NO: 4000793 - DNA, 25 bp, Homo sapien
agccgtttcattcctctggtctgag

SEQ ID NO: 4000794 - DNA, 25 bp, Homo sapien
gtccatcaattctacctcgtaaatg

SEQ ID NO: 4000795 - DNA, 25 bp, Homo sapien
catcaattctacctcgtaaatgcca

SEQ ID NO: 4000796 - DNA, 25 bp, Homo sapien
aattctacctcgtaaatgccaagtc

SEQ ID NO: 4000797 - DNA, 25 bp, Homo sapien
tctacctcgtaaatgccaagtctga

SEQ ID NO: 4000798 - DNA, 25 bp, Homo sapien
tctctcatctacacaagtatcagcc

SEQ ID NO: 4000799 - DNA, 25 bp, Homo sapien
atctacacaagtatcagcccctctg

SEQ ID NO: 4000800 - DNA, 25 bp, Homo sapien
tctcatctacacaagtatcagcccc

SEQ ID NO: 4000801 - DNA, 25 bp, Homo sapien
tcatctacacaagtatcagcccctc

SEQ ID NO: 4000802 - DNA, 25 bp, Homo sapien
gacagacgtcgatgttctaacagaa

SEQ ID NO: 4000803 - DNA, 25 bp, Homo sapien
tgtgggctctgagtactctgttaaa

SEQ ID NO: 4000804 - DNA, 25 bp, Homo sapien
gaaatagaaatgaatgtgggacaga

SEQ ID NO: 4000805 - DNA, 25 bp, Homo sapien
tgttctaacagaatccccatgccac

SEQ ID NO: 4000806 - DNA, 25 bp, Homo sapien
acttcgttctgctgatgatggagga

SEQ ID NO: 4000807 - DNA, 25 bp, Homo sapien
gcgtgaagcccaggtttccatgaca

SEQ ID NO: 4000808 - DNA, 25 bp, Homo sapien
tgtgtgtgcgtgaagcccaggtttc

SEQ ID NO: 4000809 - DNA, 25 bp, Homo sapien
gcagttgcgatgctgccgacttcgt

SEQ ID NO: 4000810 - DNA, 25 bp, Homo sapien
aaaggtgagaagtcgggagcctggg

SEQ ID NO: 4000811 - DNA, 25 bp, Homo sapien
cccaaaggtgagaagtcgggagcct

SEQ ID NO: 4000812 - DNA, 25 bp, Homo sapien
ccaaaggtgagaagtcgggagcctg

SEQ ID NO: 4000813 - DNA, 25 bp, Homo sapien
caaaggtgagaagtcgggagcctgg

SEQ ID NO: 4000814 - DNA, 25 bp, Homo sapien
caggtactaggataacagccaggcc

SEQ ID NO: 4000815 - DNA, 25 bp, Homo sapien
ggatcgtttttatttctcgcgaagc

SEQ ID NO: 4000816 - DNA, 25 bp, Homo sapien
gaagcggtttggcactccctcgggc

SEQ ID NO: 4000817 - DNA, 25 bp, Homo sapien
cggacacacacggacataagcacac

SEQ ID NO: 4000818 - DNA, 25 bp, Homo sapien
ggcgatgaagctgatccagcccagg

SEQ ID NO: 4000819 - DNA, 25 bp, Homo sapien
tgtagacgctgatcccagcgagggt

SEQ ID NO: 4000820 - DNA, 25 bp, Homo sapien
gcagctcggcgatgaagctgatcca

SEQ ID NO: 4000821 - DNA, 25 bp, Homo sapien
aaggcggcggctgaatacgctatgt

SEQ ID NO: 4000822 - DNA, 25 bp, Homo sapien
gcctgtgagtgtccagagggcagac

SEQ ID NO: 4000823 - DNA, 25 bp, Homo sapien
atttaactaacatctgtctccccca

SEQ ID NO: 4000824 - DNA, 25 bp, Homo sapien
cagggatacagacagcctttaaggc

SEQ ID NO: 4000825 - DNA, 25 bp, Homo sapien
taggctgttgttaactgctgtcacc

SEQ ID NO: 4000826 - DNA, 25 bp, Homo sapien
aaactattcaacacaggcacggcct

SEQ ID NO: 4000827 - DNA, 25 bp, Homo sapien
tacactgtggagtggctcggtcaaa

SEQ ID NO: 4000828 - DNA, 25 bp, Homo sapien
aaccatcaggatcaggctgagcggc

SEQ ID NO: 4000829 - DNA, 25 bp, Homo sapien
gagcggcagcagaatcacaaatgtc

SEQ ID NO: 4000830 - DNA, 25 bp, Homo sapien
tgagcggcagcagaatcacaaatgt

SEQ ID NO: 4000831 - DNA, 25 bp, Homo sapien
accatcaggatcaggctgagcggca

SEQ ID NO: 4000832 - DNA, 25 bp, Homo sapien
ccatgtgagtttcccagtcgtgctg

SEQ ID NO: 4000833 - DNA, 25 bp, Homo sapien
tacttagaaatgctcccatcgctag

SEQ ID NO: 4000834 - DNA, 25 bp, Homo sapien
tcccagagttggtgcagccatggca

SEQ ID NO: 4000835 - DNA, 25 bp, Homo sapien
tgatgtccacattcgattaaacgcc

SEQ ID NO: 4000836 - DNA, 25 bp, Homo sapien
ccgcgcccggctctgtctcctgatt

SEQ ID NO: 4000837 - DNA, 25 bp, Homo sapien
gatgaggacgagagggagaaaggat

SEQ ID NO: 4000838 - DNA, 25 bp, Homo sapien
gggaagagttcaatctcagttcagg

SEQ ID NO: 4000839 - DNA, 25 bp, Homo sapien
gaagagttcaatctcagttcaggtt

SEQ ID NO: 4000840 - DNA, 25 bp, Homo sapien
tcttcttagtaccagagtaatatat

SEQ ID NO: 4000841 - DNA, 25 bp, Homo sapien
tagtgacattgtaaagtttatcctc

SEQ ID NO: 4000842 - DNA, 25 bp, Homo sapien
gatgaactacatttggtctatgagc

SEQ ID NO: 4000843 - DNA, 25 bp, Homo sapien
gagctatagtttgtcaacctttggc

SEQ ID NO: 4000844 - DNA, 25 bp, Homo sapien
ctgattggccgggacgctcggcgga

SEQ ID NO: 4000845 - DNA, 25 bp, Homo sapien
attggctgtggcgaaagcgagggcc

SEQ ID NO: 4000846 - DNA, 25 bp, Homo sapien
gagccagggagtccggcgagtcgct

SEQ ID NO: 4000847 - DNA, 25 bp, Homo sapien
gaagtcgagcagacacccagcgctg

SEQ ID NO: 4000848 - DNA, 25 bp, Homo sapien
tgggccttcttcagattagttatca

SEQ ID NO: 4000849 - DNA, 25 bp, Homo sapien
catccatgccagaaattgtttgaga

SEQ ID NO: 4000850 - DNA, 25 bp, Homo sapien
gagaaacaactgagttctgggcctt

SEQ ID NO: 4000851 - DNA, 25 bp, Homo sapien
tccaccaggcatcagagaaacatcc

SEQ ID NO: 4000852 - DNA, 25 bp, Homo sapien
cccagtgagggactactaggtcaca

SEQ ID NO: 4000853 - DNA, 25 bp, Homo sapien
actctgtgccacatagttttggttg

SEQ ID NO: 4000854 - DNA, 25 bp, Homo sapien
aagtagttacagaaccgccccagat

SEQ ID NO: 4000855 - DNA, 25 bp, Homo sapien
atgtgggaagagatagatgccacct

SEQ ID NO: 4000856 - DNA, 25 bp, Homo sapien
gagaacttgatagcctgacagcaga

SEQ ID NO: 4000857 - DNA, 25 bp, Homo sapien
gacactctgggaactgatttgacct

SEQ ID NO: 4000858 - DNA, 25 bp, Homo sapien
gattaccaggcagatgataccgaaa

SEQ ID NO: 4000859 - DNA, 25 bp, Homo sapien
ggcagcagagccatcgcatcatgtt

SEQ ID NO: 4000860 - DNA, 25 bp, Homo sapien
tagtaaccgtccagcaagtgtcatc

SEQ ID NO: 4000861 - DNA, 25 bp, Homo sapien
caaaggcgtatcagttcatggcatc

SEQ ID NO: 4000862 - DNA, 25 bp, Homo sapien
tcaggaaatcggatggagaaccacc

SEQ ID NO: 4000863 - DNA, 25 bp, Homo sapien
taaactaacaattcaagcaggcgcc

SEQ ID NO: 4000864 - DNA, 25 bp, Homo sapien
tacagaaggaatgaacagccacgtg

SEQ ID NO: 4000865 - DNA, 25 bp, Homo sapien
tctttgcaggcatctagggagaaag

SEQ ID NO: 4000866 - DNA, 25 bp, Homo sapien
cagccacgtgtaactgctatgcaca

SEQ ID NO: 4000867 - DNA, 25 bp, Homo sapien
ccctgttataccgagaggatactga

SEQ ID NO: 4000868 - DNA, 25 bp, Homo sapien
gctttattacactgcagggccatcc

SEQ ID NO: 4000869 - DNA, 25 bp, Homo sapien
tataaaataacgtaccagcatccgg

SEQ ID NO: 4000870 - DNA, 25 bp, Homo sapien
tagacctctgggtggtgaacaaatc

SEQ ID NO: 4000871 - DNA, 25 bp, Homo sapien
gacagacccttctgccgctggatat

SEQ ID NO: 4000872 - DNA, 25 bp, Homo sapien
acacccatcccatgaaacaagcagg

SEQ ID NO: 4000873 - DNA, 25 bp, Homo sapien
tcctgttaatccaggcgacccaggg

SEQ ID NO: 4000874 - DNA, 25 bp, Homo sapien
gagactcaataacctgctccaggac

SEQ ID NO: 4000875 - DNA, 25 bp, Homo sapien
ggcccaggcaaagtctccaagtacc

SEQ ID NO: 4000876 - DNA, 25 bp, Homo sapien
aatggactctatgggtgaccttggc

SEQ ID NO: 4000877 - DNA, 25 bp, Homo sapien
ttgagcatctgatgtaccccaaaca

SEQ ID NO: 4000878 - DNA, 25 bp, Homo sapien
tcacttgagcatctgatgtacccca

SEQ ID NO: 4000879 - DNA, 25 bp, Homo sapien
tgagcatctgatgtaccccaaacac

SEQ ID NO: 4000880 - DNA, 25 bp, Homo sapien
acttgagcatctgatgtaccccaaa

SEQ ID NO: 4000881 - DNA, 25 bp, Homo sapien
tctgtccaggatgcgtccatagcgc

SEQ ID NO: 4000882 - DNA, 25 bp, Homo sapien
cactgtaccgctggatacgcacaaa

SEQ ID NO: 4000883 - DNA, 25 bp, Homo sapien
ggtgccagactcattcagatacagg

SEQ ID NO: 4000884 - DNA, 25 bp, Homo sapien
tgtgccaacttcagtcgtgacagga

SEQ ID NO: 4000885 - DNA, 25 bp, Homo sapien
tctccttcgagatgggtgaactgct

SEQ ID NO: 4000886 - DNA, 25 bp, Homo sapien
tagtttctccttcgagatgggtgaa

SEQ ID NO: 4000887 - DNA, 25 bp, Homo sapien
tggtagtttctccttcgagatgggt

SEQ ID NO: 4000888 - DNA, 25 bp, Homo sapien
gcgtttggtagtttctccttcgaga

SEQ ID NO: 4000889 - DNA, 25 bp, Homo sapien
tttccccgaaacctacgcacagctc

SEQ ID NO: 4000890 - DNA, 25 bp, Homo sapien
cgaaacctacgcacagctcggagaa

SEQ ID NO: 4000891 - DNA, 25 bp, Homo sapien
acctacgcacagctcggagaagggc

SEQ ID NO: 4000892 - DNA, 25 bp, Homo sapien
gaggcctttcccacacagcttttcc

SEQ ID NO: 4000893 - DNA, 25 bp, Homo sapien
gtgggcatcacaacagctatctaag

SEQ ID NO: 4000894 - DNA, 25 bp, Homo sapien
agccagatgctatctcatgtgggca

SEQ ID NO: 4000895 - DNA, 25 bp, Homo sapien
tcacacggtgaacatctgcaaagca

SEQ ID NO: 4000896 - DNA, 25 bp, Homo sapien
aaccgttattgccagacgagggaag

SEQ ID NO: 4000897 - DNA, 25 bp, Homo sapien
tactactgtgcgcatgtgacccaag

SEQ ID NO: 4000898 - DNA, 25 bp, Homo sapien
ccaacacgtagcacaagggtattac

SEQ ID NO: 4000899 - DNA, 25 bp, Homo sapien
gctcggcgagttttagctactacta

SEQ ID NO: 4000900 - DNA, 25 bp, Homo sapien
ttagtacctaatgcactgtgagagc

SEQ ID NO: 4000901 - DNA, 25 bp, Homo sapien
ttctgattcaggaagcgagagagca

SEQ ID NO: 4000902 - DNA, 25 bp, Homo sapien
gaagcgagagagcaaagcttggaaa

SEQ ID NO: 4000903 - DNA, 25 bp, Homo sapien
cgagagagcaaagcttggaaatctg

SEQ ID NO: 4000904 - DNA, 25 bp, Homo sapien
ctgattcaggaagcgagagagcaaa

SEQ ID NO: 4000905 - DNA, 25 bp, Homo sapien
agaggagcactttgattactaaaga

SEQ ID NO: 4000906 - DNA, 25 bp, Homo sapien
aaaagaggagcactttgattactaa

SEQ ID NO: 4000907 - DNA, 25 bp, Homo sapien
gactcctctcatcaaaagaggagca

SEQ ID NO: 4000908 - DNA, 25 bp, Homo sapien
ctggactcctctcatcaaaagagga

SEQ ID NO: 4000909 - DNA, 25 bp, Homo sapien
ccaaattttatctcgcattagtgca

SEQ ID NO: 4000910 - DNA, 25 bp, Homo sapien
tagccacaatgataactcaaacatt

SEQ ID NO: 4000911 - DNA, 25 bp, Homo sapien
tagatatcacaaagtagaatcccag

SEQ ID NO: 4000912 - DNA, 25 bp, Homo sapien
taatagtttactccaaagccaaata

SEQ ID NO: 4000913 - DNA, 25 bp, Homo sapien
tcaagggaattagtggaatgactct

SEQ ID NO: 4000914 - DNA, 25 bp, Homo sapien
tctttgttgtgtcggtgtcatgagg

SEQ ID NO: 4000915 - DNA, 25 bp, Homo sapien
tcttctttgttgtgtcggtgtcatg

SEQ ID NO: 4000916 - DNA, 25 bp, Homo sapien
tgcgtaagggggttcagcgtaatta

SEQ ID NO: 4000917 - DNA, 25 bp, Homo sapien
tagcaagaccctatgtccgaaggaa

SEQ ID NO: 4000918 - DNA, 25 bp, Homo sapien
tactggaactagcttggcactgttg

SEQ ID NO: 4000919 - DNA, 25 bp, Homo sapien
tgtgtaaggccagtacaaggccctg

SEQ ID NO: 4000920 - DNA, 25 bp, Homo sapien
gagatgccaagttcatggcctccta

SEQ ID NO: 4000921 - DNA, 25 bp, Homo sapien
ccacagagctgtgagcaagcttcca

SEQ ID NO: 4000922 - DNA, 25 bp, Homo sapien
agcttccatcatgaccccattttgg

SEQ ID NO: 4000923 - DNA, 25 bp, Homo sapien
tgaggcctcggtttcgtcatcttac

SEQ ID NO: 4000924 - DNA, 25 bp, Homo sapien
tcatcttaccaaggtgtgaccccaa

SEQ ID NO: 4000925 - DNA, 25 bp, Homo sapien
tacttcgtgtctttccagggtggca

SEQ ID NO: 4000926 - DNA, 25 bp, Homo sapien
gtcacatcagcaatggcccgggaca

SEQ ID NO: 4000927 - DNA, 25 bp, Homo sapien
gggagccttcatctgtacttcgtgt

SEQ ID NO: 4000928 - DNA, 25 bp, Homo sapien
ggcaatgaccatgagatcttcacag

SEQ ID NO: 4000929 - DNA, 25 bp, Homo sapien
ctgaggacacgcgcaggatctgtga

SEQ ID NO: 4000930 - DNA, 25 bp, Homo sapien
tgaggacacgcgcaggatctgtgaa

SEQ ID NO: 4000931 - DNA, 25 bp, Homo sapien
cagcatagggcattcggtggccaga

SEQ ID NO: 4000932 - DNA, 25 bp, Homo sapien
gccaggcatgtgcagtctggacttc

SEQ ID NO: 4000933 - DNA, 25 bp, Homo sapien
cggggtcccggctgacaagccagca

SEQ ID NO: 4000934 - DNA, 25 bp, Homo sapien
caggcatgtgcagtctggacttcca

SEQ ID NO: 4000935 - DNA, 25 bp, Homo sapien
cagcccaggacgaagtttacaaaca

SEQ ID NO: 4000936 - DNA, 25 bp, Homo sapien
ttggtgctggcaaaacagtccttgc

SEQ ID NO: 4000937 - DNA, 25 bp, Homo sapien
gaccctagggagtttgcacctcggc

SEQ ID NO: 4000938 - DNA, 25 bp, Homo sapien
taatacccaccctgatacgtgcaat

SEQ ID NO: 4000939 - DNA, 25 bp, Homo sapien
cagagaaaccaacgcgggatgtcag

SEQ ID NO: 4000940 - DNA, 25 bp, Homo sapien
aggtccagagaaaccaacgcgggat

SEQ ID NO: 4000941 - DNA, 25 bp, Homo sapien
gaggcgttcgcctctagtttctcag

SEQ ID NO: 4000942 - DNA, 25 bp, Homo sapien
caacgcgggatgtcagacttcacca

SEQ ID NO: 4000943 - DNA, 25 bp, Homo sapien
gagtgcagctacagctaggtccgcg

SEQ ID NO: 4000944 - DNA, 25 bp, Homo sapien
ggtccgcgtccctcactcttttcat

SEQ ID NO: 4000945 - DNA, 25 bp, Homo sapien
ctttaccacggaggcggctgagtgc

SEQ ID NO: 4000946 - DNA, 25 bp, Homo sapien
cccagactttaccacggaggcggct

SEQ ID NO: 4000947 - DNA, 25 bp, Homo sapien
tagaacacggtggaagagaactttc

SEQ ID NO: 4000948 - DNA, 25 bp, Homo sapien
tctcagctagaacacggtggaagag

SEQ ID NO: 4000949 - DNA, 25 bp, Homo sapien
gaaggatcccgggtctcagctagaa

SEQ ID NO: 4000950 - DNA, 25 bp, Homo sapien
tcccgggtctcagctagaacacggt

SEQ ID NO: 4000951 - DNA, 25 bp, Homo sapien
gagccgctgacaaaggattctgcca

SEQ ID NO: 4000952 - DNA, 25 bp, Homo sapien
agcagatgggcccttgggaagccaa

SEQ ID NO: 4000953 - DNA, 25 bp, Homo sapien
tcgcaggcgaggaaacaatggccag

SEQ ID NO: 4000954 - DNA, 25 bp, Homo sapien
caggaaggacagagtaagagccgct

SEQ ID NO: 4000955 - DNA, 25 bp, Homo sapien
tactcttttctggatggatcgggac

SEQ ID NO: 4000956 - DNA, 25 bp, Homo sapien
caaaaagtttgcaatgtcggcagca

SEQ ID NO: 4000957 - DNA, 25 bp, Homo sapien
ttggagaagtcacgcaaggtccctg

SEQ ID NO: 4000958 - DNA, 25 bp, Homo sapien
tgaggcggaattgccagaaccctgg

SEQ ID NO: 4000959 - DNA, 25 bp, Homo sapien
agtctcccacaagcacaggacaagg

SEQ ID NO: 4000960 - DNA, 25 bp, Homo sapien
atacttgagagggaccatgcccggc

SEQ ID NO: 4000961 - DNA, 25 bp, Homo sapien
tgttgcaatggtcataggctgtgct

SEQ ID NO: 4000962 - DNA, 25 bp, Homo sapien
ccccgtctcgtgtggaagaatgtca

SEQ ID NO: 4000963 - DNA, 25 bp, Homo sapien
cattttataggtgacctcgtcgcct

SEQ ID NO: 4000964 - DNA, 25 bp, Homo sapien
tgccaggtgagtgatgacgacctcc

SEQ ID NO: 4000965 - DNA, 25 bp, Homo sapien
tcgtcgccttccactgggacatact

SEQ ID NO: 4000966 - DNA, 25 bp, Homo sapien
tccagaccaggtctcatgcttggtg

SEQ ID NO: 4000967 - DNA, 25 bp, Homo sapien
atagtcgggcacccccagatccatt

SEQ ID NO: 4000968 - DNA, 25 bp, Homo sapien
ataatgggcactcggactcacccca

SEQ ID NO: 4000969 - DNA, 25 bp, Homo sapien
acaagcatagtcgggcacccccaga

SEQ ID NO: 4000970 - DNA, 25 bp, Homo sapien
tataatgggcactcggactcacccc

SEQ ID NO: 4000971 - DNA, 25 bp, Homo sapien
aaaccttacacacccattcacaaag

SEQ ID NO: 4000972 - DNA, 25 bp, Homo sapien
gacaatcacaagtaccgtgtcgccc

SEQ ID NO: 4000973 - DNA, 25 bp, Homo sapien
gtagagtctcacaaccccaacccaa

SEQ ID NO: 4000974 - DNA, 25 bp, Homo sapien
cgcccagcacacacaaaaccttaca

SEQ ID NO: 4000975 - DNA, 25 bp, Homo sapien
agggccaaggaagcgcccaccccag

SEQ ID NO: 4000976 - DNA, 25 bp, Homo sapien
cagggccaaggaagcgcccacccca

SEQ ID NO: 4000977 - DNA, 25 bp, Homo sapien
atttgcagactcctttgtagacggg

SEQ ID NO: 4000978 - DNA, 25 bp, Homo sapien
tggaccggcagaagcatttgcagac

SEQ ID NO: 4000979 - DNA, 25 bp, Homo sapien
tcagctggagtaatgaagccatggc

SEQ ID NO: 4000980 - DNA, 25 bp, Homo sapien
cagagatgtgcaggaagatgtcggg

SEQ ID NO: 4000981 - DNA, 25 bp, Homo sapien
tgggcagtaccctgaatttacaagg

SEQ ID NO: 4000982 - DNA, 25 bp, Homo sapien
gcagtccgggacataggcccaaaaa

SEQ ID NO: 4000983 - DNA, 25 bp, Homo sapien
gactctcatgtgtggttaaagccca

SEQ ID NO: 4000984 - DNA, 25 bp, Homo sapien
aaaggactctttggatgaccctggc

SEQ ID NO: 4000985 - DNA, 25 bp, Homo sapien
gtccagcagcccgactgaagcttga

SEQ ID NO: 4000986 - DNA, 25 bp, Homo sapien
ggatggtgagcgctcacggctccga

SEQ ID NO: 4000987 - DNA, 25 bp, Homo sapien
ccgagaaggtcctcgtccggcgagt

SEQ ID NO: 4000988 - DNA, 25 bp, Homo sapien
cgtccggcgagtgggcagtgggctt

SEQ ID NO: 4000989 - DNA, 25 bp, Homo sapien
tgtggtggtgggggaggctcagatg

SEQ ID NO: 4000990 - DNA, 25 bp, Homo sapien
gtggtgggggaggctcagatgacat

SEQ ID NO: 4000991 - DNA, 25 bp, Homo sapien
ctgtggtggtgggggaggctcagat

SEQ ID NO: 4000992 - DNA, 25 bp, Homo sapien
tggtggtgggggaggctcagatgac

SEQ ID NO: 4000993 - DNA, 25 bp, Homo sapien
catgtccacgtctgacagtccagta

SEQ ID NO: 4000994 - DNA, 25 bp, Homo sapien
tgtccacgtctgacagtccagtatc

SEQ ID NO: 4000995 - DNA, 25 bp, Homo sapien
ccccatgtccacgtctgacagtcca

SEQ ID NO: 4000996 - DNA, 25 bp, Homo sapien
gtccacgtctgacagtccagtatct

SEQ ID NO: 4000997 - DNA, 25 bp, Homo sapien
gaacacgtcgcagagagctcaagcg

SEQ ID NO: 4000998 - DNA, 25 bp, Homo sapien
caagcgccacgtttggatccctgag

SEQ ID NO: 4000999 - DNA, 25 bp, Homo sapien
agctgtcacaagcctgcacccagga

SEQ ID NO: 4001000 - DNA, 25 bp, Homo sapien
cgcagtgtccgcctccagggaactg

SEQ ID NO: 4001001 - DNA, 25 bp, Homo sapien
tgcccggcctgaactatcttaaaca

SEQ ID NO: 4001002 - DNA, 25 bp, Homo sapien
cggcctgaactatcttaaacatccc

SEQ ID NO: 4001003 - DNA, 25 bp, Homo sapien
ggtttccagctgctcatggaaagaa

SEQ ID NO: 4001004 - DNA, 25 bp, Homo sapien
caggtttccagctgctcatggaaag

SEQ ID NO: 4001005 - DNA, 25 bp, Homo sapien
tcccttctctcagctacagccgcgg

SEQ ID NO: 4001006 - DNA, 25 bp, Homo sapien
tacagccgcggccaaggaggaactc

SEQ ID NO: 4001007 - DNA, 25 bp, Homo sapien
ccaaggaggaactcctgagtccggg

SEQ ID NO: 4001008 - DNA, 25 bp, Homo sapien
gccgcggccaaggaggaactcctga

SEQ ID NO: 4001009 - DNA, 25 bp, Homo sapien
caaggtgtcatgactgccaggctgc

SEQ ID NO: 4001010 - DNA, 25 bp, Homo sapien
tctccagacggtccaggaatggcca

SEQ ID NO: 4001011 - DNA, 25 bp, Homo sapien
tgggaatacacacgctaatcagggt

SEQ ID NO: 4001012 - DNA, 25 bp, Homo sapien
tgtatgcacacgtccatggagcggg

SEQ ID NO: 4001013 - DNA, 25 bp, Homo sapien
cgcacagcacgctgggcacctgtgc

SEQ ID NO: 4001014 - DNA, 25 bp, Homo sapien
gcccggctaacaaagaccctggtga

SEQ ID NO: 4001015 - DNA, 25 bp, Homo sapien
gcctcggccgaaaatagcctgggaa

SEQ ID NO: 4001016 - DNA, 25 bp, Homo sapien
ggaattttccgtaggctctgcagct

SEQ ID NO: 4001017 - DNA, 25 bp, Homo sapien
ttcagctgggtaccaagactctggc

SEQ ID NO: 4001018 - DNA, 25 bp, Homo sapien
aacccaccacccacatcaatgggag

SEQ ID NO: 4001019 - DNA, 25 bp, Homo sapien
tgcttactgcaaggagggctttagc

SEQ ID NO: 4001020 - DNA, 25 bp, Homo sapien
tctagtaagagggagctcattgaag

SEQ ID NO: 4001021 - DNA, 25 bp, Homo sapien
tgctatcagccatttacactctagt

SEQ ID NO: 4001022 - DNA, 25 bp, Homo sapien
gcgaagttaccttagtgcacctggg

SEQ ID NO: 4001023 - DNA, 25 bp, Homo sapien
tccctggaagcgatagaggccgaga

SEQ ID NO: 4001024 - DNA, 25 bp, Homo sapien
tctacatttctaaggcgctcccagt

SEQ ID NO: 4001025 - DNA, 25 bp, Homo sapien
gctgagcccagatagaagggtccct

SEQ ID NO: 4001026 - DNA, 25 bp, Homo sapien
tgaagggaccagcatcgagaactca

SEQ ID NO: 4001027 - DNA, 25 bp, Homo sapien
cagtccacaatagtgcggctgatgg

SEQ ID NO: 4001028 - DNA, 25 bp, Homo sapien
tgccactcggtggaacaaagaccga

SEQ ID NO: 4001029 - DNA, 25 bp, Homo sapien
gatggtgccgcgaaaatgccaagcg

SEQ ID NO: 4001030 - DNA, 25 bp, Homo sapien
tagtggcggaagataacaggaagcc

SEQ ID NO: 4001031 - DNA, 25 bp, Homo sapien
cttcggtggacgattttcagcgtgg

SEQ ID NO: 4001032 - DNA, 25 bp, Homo sapien
gggacttagacgacaatgggacttc

SEQ ID NO: 4001033 - DNA, 25 bp, Homo sapien
atctaagcggattgtttttctaagt

SEQ ID NO: 4001034 - DNA, 25 bp, Homo sapien
ccctctcatgccagaagaagtcaga

SEQ ID NO: 4001035 - DNA, 25 bp, Homo sapien
aagtcagagcccagtctgcagatgg

SEQ ID NO: 4001036 - DNA, 25 bp, Homo sapien
cctatttggcagagatttccccacc

SEQ ID NO: 4001037 - DNA, 25 bp, Homo sapien
ctgaggctccgagaggcctcctatt

SEQ ID NO: 4001038 - DNA, 25 bp, Homo sapien
gaagtttttctccagcgcctaaggc

SEQ ID NO: 4001039 - DNA, 25 bp, Homo sapien
agatgcggctaatcgcgcggcgcca

SEQ ID NO: 4001040 - DNA, 25 bp, Homo sapien
cagcctgcggaaagggggcctgtgg

SEQ ID NO: 4001041 - DNA, 25 bp, Homo sapien
cgggcgcaaacacccgggcccagcg

SEQ ID NO: 4001042 - DNA, 25 bp, Homo sapien
tggccgccgtcccaacctcgagcca

SEQ ID NO: 4001043 - DNA, 25 bp, Homo sapien
gccgtcccaacctcgagccacagct

SEQ ID NO: 4001044 - DNA, 25 bp, Homo sapien
aacctcgagccacagctggcgcggc

SEQ ID NO: 4001045 - DNA, 25 bp, Homo sapien
tcccaacctcgagccacagctggcg

SEQ ID NO: 4001046 - DNA, 25 bp, Homo sapien
agcttcccctgcacgcagagaacag

SEQ ID NO: 4001047 - DNA, 25 bp, Homo sapien
ggctcccgcccaaaggcaaaagcag

SEQ ID NO: 4001048 - DNA, 25 bp, Homo sapien
tggccaggcgggaagtactacccga

SEQ ID NO: 4001049 - DNA, 25 bp, Homo sapien
ccctgcacgcagagaacaggtggcc

SEQ ID NO: 4001050 - DNA, 25 bp, Homo sapien
aatccgttctgctccgccagccgct

SEQ ID NO: 4001051 - DNA, 25 bp, Homo sapien
tccgttctgctccgccagccgcttc

SEQ ID NO: 4001052 - DNA, 25 bp, Homo sapien
cgttctgctccgccagccgcttcgc

SEQ ID NO: 4001053 - DNA, 25 bp, Homo sapien
cctgcaatccgttctgctccgccag

SEQ ID NO: 4001054 - DNA, 25 bp, Homo sapien
aaggcctggctaaatcgggagaaca

SEQ ID NO: 4001055 - DNA, 25 bp, Homo sapien
ttccctggagtaaaatgccccaatg

SEQ ID NO: 4001056 - DNA, 25 bp, Homo sapien
tcttcagcaggtagaggttccggga

SEQ ID NO: 4001057 - DNA, 25 bp, Homo sapien
tggccaaaggcctagagggatagaa

SEQ ID NO: 4001058 - DNA, 25 bp, Homo sapien
cgaagggcctcgtgacacatcaggt

SEQ ID NO: 4001059 - DNA, 25 bp, Homo sapien
gctttctatcacacgggtcacaagg

SEQ ID NO: 4001060 - DNA, 25 bp, Homo sapien
tgttcaaagacaaacccacagcgaa

SEQ ID NO: 4001061 - DNA, 25 bp, Homo sapien
tccagggagagtagaaatcttcctc

SEQ ID NO: 4001062 - DNA, 25 bp, Homo sapien
tgagatcgtaagtctgccaaggcag

SEQ ID NO: 4001063 - DNA, 25 bp, Homo sapien
gagttggtgtacactgctcccacag

SEQ ID NO: 4001064 - DNA, 25 bp, Homo sapien
tactaaccactagtgagcatgccct

SEQ ID NO: 4001065 - DNA, 25 bp, Homo sapien
tcacctgctcgtatgaactgttgag

SEQ ID NO: 4001066 - DNA, 25 bp, Homo sapien
tggctgacgaggtgagacaagttta

SEQ ID NO: 4001067 - DNA, 25 bp, Homo sapien
cgaggaagggccgacaatgcacaca

SEQ ID NO: 4001068 - DNA, 25 bp, Homo sapien
agaacccgaggaagggccgacaatg

SEQ ID NO: 4001069 - DNA, 25 bp, Homo sapien
gctgacgaggtgagacaagtttatt

SEQ ID NO: 4001070 - DNA, 25 bp, Homo sapien
cattgcgctgacagttgccttgcac

SEQ ID NO: 4001071 - DNA, 25 bp, Homo sapien
tgaagacttcggctagagggcacgt

SEQ ID NO: 4001072 - DNA, 25 bp, Homo sapien
tcgccttgaacacaccagcttggaa

SEQ ID NO: 4001073 - DNA, 25 bp, Homo sapien
gagggcacgtgcaccaaagttctag

SEQ ID NO: 4001074 - DNA, 25 bp, Homo sapien
tcagttatggattttaatggccttt

SEQ ID NO: 4001075 - DNA, 25 bp, Homo sapien
caaggtaagtgtagcgactcctctt

SEQ ID NO: 4001076 - DNA, 25 bp, Homo sapien
tttcaaggtaagtgtagcgactcct

SEQ ID NO: 4001077 - DNA, 25 bp, Homo sapien
gtaagtgtagcgactcctctttggg

SEQ ID NO: 4001078 - DNA, 25 bp, Homo sapien
tagccaaggccgaggatgagacata

SEQ ID NO: 4001079 - DNA, 25 bp, Homo sapien
agccaaggccgaggatgagacatat

SEQ ID NO: 4001080 - DNA, 25 bp, Homo sapien
ctagccaaggccgaggatgagacat

SEQ ID NO: 4001081 - DNA, 25 bp, Homo sapien
tggaacccctcagcggggtggtggc

SEQ ID NO: 4001082 - DNA, 25 bp, Homo sapien
cctggaacccctcagcggggtggtg

SEQ ID NO: 4001083 - DNA, 25 bp, Homo sapien
tggccagtgaggcatgcatccctgt

SEQ ID NO: 4001084 - DNA, 25 bp, Homo sapien
gtggccagtgaggcatgcatccctg

SEQ ID NO: 4001085 - DNA, 25 bp, Homo sapien
catttatgtactggtgtcggcccat

SEQ ID NO: 4001086 - DNA, 25 bp, Homo sapien
tacttcatactcgtcttcatttatg

SEQ ID NO: 4001087 - DNA, 25 bp, Homo sapien
cgggctgtggctcaaagtctttcaa

SEQ ID NO: 4001088 - DNA, 25 bp, Homo sapien
tggtgtcggcccatcattacaattg

SEQ ID NO: 4001089 - DNA, 25 bp, Homo sapien
ggattcgcttcatcacttctcgaaa

SEQ ID NO: 4001090 - DNA, 25 bp, Homo sapien
tcatcacttctcgaaaatgctcgcc

SEQ ID NO: 4001091 - DNA, 25 bp, Homo sapien
tcgcttcatcacttctcgaaaatgc

SEQ ID NO: 4001092 - DNA, 25 bp, Homo sapien
aggctctggattcgcttcatcactt

SEQ ID NO: 4001093 - DNA, 25 bp, Homo sapien
cgaacgttccgaagacctctttgtg

SEQ ID NO: 4001094 - DNA, 25 bp, Homo sapien
tgtccacctggtccaaagggatttc

SEQ ID NO: 4001095 - DNA, 25 bp, Homo sapien
tgcgccactgtgacaagcatctcat

SEQ ID NO: 4001096 - DNA, 25 bp, Homo sapien
gacctctttgtggaaatgcgccact

SEQ ID NO: 4001097 - DNA, 25 bp, Homo sapien
ctctattcgaaacgtccggctcgtt

SEQ ID NO: 4001098 - DNA, 25 bp, Homo sapien
tttgtagcttacaatttctagcagc

SEQ ID NO: 4001099 - DNA, 25 bp, Homo sapien
tccggctcgttgcaggagataaaca

SEQ ID NO: 4001100 - DNA, 25 bp, Homo sapien
gagataaacattctaatagttcatc

SEQ ID NO: 4001101 - DNA, 25 bp, Homo sapien
tgtcctccaagcgactacagggcaa

SEQ ID NO: 4001102 - DNA, 25 bp, Homo sapien
tgggcctccgaaagttgcataaacc

SEQ ID NO: 4001103 - DNA, 25 bp, Homo sapien
cacagagatgtacagactgggcctc

SEQ ID NO: 4001104 - DNA, 25 bp, Homo sapien
cattcagctgatagtggcgttttcc

SEQ ID NO: 4001105 - DNA, 25 bp, Homo sapien
ctgggtctgtgttgagcttctgtgc

SEQ ID NO: 4001106 - DNA, 25 bp, Homo sapien
actgggtctgtgttgagcttctgtg

SEQ ID NO: 4001107 - DNA, 25 bp, Homo sapien
ttacattcttctaacaggtcccgga

SEQ ID NO: 4001108 - DNA, 25 bp, Homo sapien
cattcttctaacaggtcccggacac

SEQ ID NO: 4001109 - DNA, 25 bp, Homo sapien
tacattcttctaacaggtcccggac

SEQ ID NO: 4001110 - DNA, 25 bp, Homo sapien
ttcttctaacaggtcccggacacac

SEQ ID NO: 4001111 - DNA, 25 bp, Homo sapien
taggaccaaccaaatactgacggga

SEQ ID NO: 4001112 - DNA, 25 bp, Homo sapien
caccttctcaggaaatggtcccgag

SEQ ID NO: 4001113 - DNA, 25 bp, Homo sapien
gatacaagaccagaggcagactgtg

SEQ ID NO: 4001114 - DNA, 25 bp, Homo sapien
ggacactggccctaatctaggacca

SEQ ID NO: 4001115 - DNA, 25 bp, Homo sapien
aattggctgtttaaccatatacatt

SEQ ID NO: 4001116 - DNA, 25 bp, Homo sapien
tggctgtttaaccatatacatttaa

SEQ ID NO: 4001117 - DNA, 25 bp, Homo sapien
taaaacttcgcctgttctcaaagtc

SEQ ID NO: 4001118 - DNA, 25 bp, Homo sapien
tacatttaaaacttcgcctgttctc

SEQ ID NO: 4001119 - DNA, 25 bp, Homo sapien
tctttatgacccatagttacattaa

SEQ ID NO: 4001120 - DNA, 25 bp, Homo sapien
agattcacatcagataccgtcacca

SEQ ID NO: 4001121 - DNA, 25 bp, Homo sapien
tcacatcagataccgtcaccaaaac

SEQ ID NO: 4001122 - DNA, 25 bp, Homo sapien
agccttctctttatgacccatagtt

SEQ ID NO: 4001123 - DNA, 25 bp, Homo sapien
tatgtctaagaggattacctgggcc

SEQ ID NO: 4001124 - DNA, 25 bp, Homo sapien
gaagatctcttaaagtaccttcata

SEQ ID NO: 4001125 - DNA, 25 bp, Homo sapien
gcttgaagaactgtagaagatctct

SEQ ID NO: 4001126 - DNA, 25 bp, Homo sapien
tgatagtaaagtttcttaggttgtc

SEQ ID NO: 4001127 - DNA, 25 bp, Homo sapien
gcatataaataaatgacttgtttat

SEQ ID NO: 4001128 - DNA, 25 bp, Homo sapien
ctacacaagaaaacagcatataaat

SEQ ID NO: 4001129 - DNA, 25 bp, Homo sapien
taaatgacttgtttatttgcctaaa

SEQ ID NO: 4001130 - DNA, 25 bp, Homo sapien
taaataaatgacttgtttatttgcc

SEQ ID NO: 4001131 - DNA, 25 bp, Homo sapien
aaactgcagcaacattggatctgtg

SEQ ID NO: 4001132 - DNA, 25 bp, Homo sapien
tgttgagcctctgtgcaactgtctt

SEQ ID NO: 4001133 - DNA, 25 bp, Homo sapien
aaaactgcagcaacattggatctgt

SEQ ID NO: 4001134 - DNA, 25 bp, Homo sapien
aaaaactgcagcaacattggatctg

SEQ ID NO: 4001135 - DNA, 25 bp, Homo sapien
gagagcctgaatccatcagtgggag

SEQ ID NO: 4001136 - DNA, 25 bp, Homo sapien
gattattctagctcccaaggcagag

SEQ ID NO: 4001137 - DNA, 25 bp, Homo sapien
ttaaaatgtgccatgagcagcctga

SEQ ID NO: 4001138 - DNA, 25 bp, Homo sapien
tgggagatttcctcgggcatagccc

SEQ ID NO: 4001139 - DNA, 25 bp, Homo sapien
gagatctcggaaatactcctttgcg

SEQ ID NO: 4001140 - DNA, 25 bp, Homo sapien
aaaatgacatcaacgcggtggtaga

SEQ ID NO: 4001141 - DNA, 25 bp, Homo sapien
ttgataacgtaaccacaaatccagg

SEQ ID NO: 4001142 - DNA, 25 bp, Homo sapien
cattagggattgttttatcacagaa

SEQ ID NO: 4001143 - DNA, 25 bp, Homo sapien
ggagggagaaagtttgcagtctgaa

SEQ ID NO: 4001144 - DNA, 25 bp, Homo sapien
gtggagggagaaagtttgcagtctg

SEQ ID NO: 4001145 - DNA, 25 bp, Homo sapien
tggagggagaaagtttgcagtctga

SEQ ID NO: 4001146 - DNA, 25 bp, Homo sapien
cgtgtgccatcgagccactttcaga

SEQ ID NO: 4001147 - DNA, 25 bp, Homo sapien
gagcccagtctctgaccgtgagtca

SEQ ID NO: 4001148 - DNA, 25 bp, Homo sapien
caaaaacgtggctcgggatctaggt

SEQ ID NO: 4001149 - DNA, 25 bp, Homo sapien
gagtgtctaagaccaaagactggct

SEQ ID NO: 4001150 - DNA, 25 bp, Homo sapien
caagggctttatcaagagacacgtc

SEQ ID NO: 4001151 - DNA, 25 bp, Homo sapien
gatgtcaccatccattagttcatca

SEQ ID NO: 4001152 - DNA, 25 bp, Homo sapien
tgaaatactatgatgtcaccatcca

SEQ ID NO: 4001153 - DNA, 25 bp, Homo sapien
ggctttatcaagagacacgtcatag

SEQ ID NO: 4001154 - DNA, 25 bp, Homo sapien
ctctgtcacacataactgggagcaa

SEQ ID NO: 4001155 - DNA, 25 bp, Homo sapien
gaggataaggctagtatcttgaata

SEQ ID NO: 4001156 - DNA, 25 bp, Homo sapien
tcacacataactgggagcaagtcac

SEQ ID NO: 4001157 - DNA, 25 bp, Homo sapien
tatcttgaataaatcctgctctgtc

SEQ ID NO: 4001158 - DNA, 25 bp, Homo sapien
tattggtgtgtagatatgcccacag

SEQ ID NO: 4001159 - DNA, 25 bp, Homo sapien
atattggtgtgtagatatgcccaca

SEQ ID NO: 4001160 - DNA, 25 bp, Homo sapien
gatattggtgtgtagatatgcccac

SEQ ID NO: 4001161 - DNA, 25 bp, Homo sapien
gaaactcgcagccaagtcagtctta

SEQ ID NO: 4001162 - DNA, 25 bp, Homo sapien
tcatcaggaagtctagtgagctttt

SEQ ID NO: 4001163 - DNA, 25 bp, Homo sapien
ggaagtctagtgagcttttgtggaa

SEQ ID NO: 4001164 - DNA, 25 bp, Homo sapien
tttgtggaattgatcaacacatctt

SEQ ID NO: 4001165 - DNA, 25 bp, Homo sapien
caatccaggaatccaacgctactgc

SEQ ID NO: 4001166 - DNA, 25 bp, Homo sapien
taaccctgtgtgtttagaacaacaa

SEQ ID NO: 4001167 - DNA, 25 bp, Homo sapien
ccaacgctactgctctaagtgcagg

SEQ ID NO: 4001168 - DNA, 25 bp, Homo sapien
tctaagtgcaggcaggcgtctcgtg

SEQ ID NO: 4001169 - DNA, 25 bp, Homo sapien
caggaatattgtccaagggttttca

SEQ ID NO: 4001170 - DNA, 25 bp, Homo sapien
tatcaaacttgggtaaggtcgctcc

SEQ ID NO: 4001171 - DNA, 25 bp, Homo sapien
tgggtaaggtcgctccactagcagc

SEQ ID NO: 4001172 - DNA, 25 bp, Homo sapien
agccagctcgggatcaactgtttcc

SEQ ID NO: 4001173 - DNA, 25 bp, Homo sapien
gtcaagtattgaagaaaacgtccaa

SEQ ID NO: 4001174 - DNA, 25 bp, Homo sapien
taagtgcagaggactaacgccttct

SEQ ID NO: 4001175 - DNA, 25 bp, Homo sapien
aagggaaacaagctgcactaagtgc

SEQ ID NO: 4001176 - DNA, 25 bp, Homo sapien
gacagagcgaaaaactacagtcaag

SEQ ID NO: 4001177 - DNA, 25 bp, Homo sapien
ttttattgccgtcggcttcattatc

SEQ ID NO: 4001178 - DNA, 25 bp, Homo sapien
tgttttattgccgtcggcttcatta

SEQ ID NO: 4001179 - DNA, 25 bp, Homo sapien
gttttattgccgtcggcttcattat

SEQ ID NO: 4001180 - DNA, 25 bp, Homo sapien
gcaagcgaggagttcttcaatactt

SEQ ID NO: 4001181 - DNA, 25 bp, Homo sapien
agaggctctgaacaaactcagcaag

SEQ ID NO: 4001182 - DNA, 25 bp, Homo sapien
catcgtacatgtcattcccttggtg

SEQ ID NO: 4001183 - DNA, 25 bp, Homo sapien
cacaaaactggtcctctgcgactat

SEQ ID NO: 4001184 - DNA, 25 bp, Homo sapien
ctccaccaactgctgaggaatatca

SEQ ID NO: 4001185 - DNA, 25 bp, Homo sapien
ctcttcttgtaatcgctccaccaac

SEQ ID NO: 4001186 - DNA, 25 bp, Homo sapien
gtcggtgaccgcctgtaaaacttca

SEQ ID NO: 4001187 - DNA, 25 bp, Homo sapien
gaatatcatggtcggtgaccgcctg

SEQ ID NO: 4001188 - DNA, 25 bp, Homo sapien
tccctgatgtagactaacatgtaag

SEQ ID NO: 4001189 - DNA, 25 bp, Homo sapien
tagtgcagtgtcgaacagacaggtc

SEQ ID NO: 4001190 - DNA, 25 bp, Homo sapien
tgtcgaacagacaggtcgtcatcgt

SEQ ID NO: 4001191 - DNA, 25 bp, Homo sapien
gcttcctctttagtacaccttgaca

SEQ ID NO: 4001192 - DNA, 25 bp, Homo sapien
tcatcaagtggtaactgctctggga

SEQ ID NO: 4001193 - DNA, 25 bp, Homo sapien
ttgcaaaaattcatcaagtggtaac

SEQ ID NO: 4001194 - DNA, 25 bp, Homo sapien
caaaaattcatcaagtggtaactgc

SEQ ID NO: 4001195 - DNA, 25 bp, Homo sapien
attcatcaagtggtaactgctctgg

SEQ ID NO: 4001196 - DNA, 25 bp, Homo sapien
tcattgatcttgatattttggtccg

SEQ ID NO: 4001197 - DNA, 25 bp, Homo sapien
tattttggtccgtctgagggtcata

SEQ ID NO: 4001198 - DNA, 25 bp, Homo sapien
ggcaatgttaggaatttcacacctt

SEQ ID NO: 4001199 - DNA, 25 bp, Homo sapien
gttgtagatgtaacactggtggcaa

SEQ ID NO: 4001200 - DNA, 25 bp, Homo sapien
caacagcggttcagcaagattggaa

SEQ ID NO: 4001201 - DNA, 25 bp, Homo sapien
ggttcagcaagattggaacatgtct

SEQ ID NO: 4001202 - DNA, 25 bp, Homo sapien
caatgaaagcaacagcggttcagca

SEQ ID NO: 4001203 - DNA, 25 bp, Homo sapien
tggaagcaatgaaagcaacagcggt

SEQ ID NO: 4001204 - DNA, 25 bp, Homo sapien
gccatgttccccagcgtcgtattta

SEQ ID NO: 4001205 - DNA, 25 bp, Homo sapien
tgtccccatcgagctgttctactgc

SEQ ID NO: 4001206 - DNA, 25 bp, Homo sapien
atttattgtccccatcgagctgttc

SEQ ID NO: 4001207 - DNA, 25 bp, Homo sapien
tctactgccacataatccacaaatg

SEQ ID NO: 4001208 - DNA, 25 bp, Homo sapien
cttcagagctcacgacaggctggga

SEQ ID NO: 4001209 - DNA, 25 bp, Homo sapien
gaaaaaccgctgaacacctgggaga

SEQ ID NO: 4001210 - DNA, 25 bp, Homo sapien
ggatgtgcagtttcttccgaagctg

SEQ ID NO: 4001211 - DNA, 25 bp, Homo sapien
gatcagtgaactcgaggaaattacc

SEQ ID NO: 4001212 - DNA, 25 bp, Homo sapien
gaaaatgaaacaccatggatgggat

SEQ ID NO: 4001213 - DNA, 25 bp, Homo sapien
gcaattagtgaagatcaagacagag

SEQ ID NO: 4001214 - DNA, 25 bp, Homo sapien
ggatgggattcacagagaactagac

SEQ ID NO: 4001215 - DNA, 25 bp, Homo sapien
agacactgcaggcaattagtgaaga

SEQ ID NO: 4001216 - DNA, 25 bp, Homo sapien
tcagaccgatagtctacttctttac

SEQ ID NO: 4001217 - DNA, 25 bp, Homo sapien
aatcttctcttctatcagaccgata

SEQ ID NO: 4001218 - DNA, 25 bp, Homo sapien
tctatcagaccgatagtctacttct

SEQ ID NO: 4001219 - DNA, 25 bp, Homo sapien
ttctcttctatcagaccgatagtct

SEQ ID NO: 4001220 - DNA, 25 bp, Homo sapien
cgcggaataatttgggtatggtgcc

SEQ ID NO: 4001221 - DNA, 25 bp, Homo sapien
ggtatggtgccctctacacaggtgc

SEQ ID NO: 4001222 - DNA, 25 bp, Homo sapien
cattttgccgcggaataatttgggt

SEQ ID NO: 4001223 - DNA, 25 bp, Homo sapien
tgccctctacacaggtgcctttcat

SEQ ID NO: 4001224 - DNA, 25 bp, Homo sapien
gacaaagctcctgaacatcatgttg

SEQ ID NO: 4001225 - DNA, 25 bp, Homo sapien
aacatcatgttgcatgaagctatct

SEQ ID NO: 4001226 - DNA, 25 bp, Homo sapien
catgttgcatgaagctatctaaagt

SEQ ID NO: 4001227 - DNA, 25 bp, Homo sapien
cactcgacaaagctcctgaacatca

SEQ ID NO: 4001228 - DNA, 25 bp, Homo sapien
ttcctacaggtttatcactatgctg

SEQ ID NO: 4001229 - DNA, 25 bp, Homo sapien
tatgctgtaattcatagaacactct

SEQ ID NO: 4001230 - DNA, 25 bp, Homo sapien
aatgctaaagggacgcttttagacg

SEQ ID NO: 4001231 - DNA, 25 bp, Homo sapien
ttcatagaacactctttgtaatgct

SEQ ID NO: 4001232 - DNA, 25 bp, Homo sapien
taagccgacgtagcctgtgtgcttc

SEQ ID NO: 4001233 - DNA, 25 bp, Homo sapien
tcatgtaacaagtcgctccctgatt

SEQ ID NO: 4001234 - DNA, 25 bp, Homo sapien
cctgattctttaagccgacgtagcc

SEQ ID NO: 4001235 - DNA, 25 bp, Homo sapien
caagtcgctccctgattctttaagc

SEQ ID NO: 4001236 - DNA, 25 bp, Homo sapien
tggggagcatccgcctgtacaaaga

SEQ ID NO: 4001237 - DNA, 25 bp, Homo sapien
gggagcatccgcctgtacaaagact

SEQ ID NO: 4001238 - DNA, 25 bp, Homo sapien
gagcatccgcctgtacaaagacttc

SEQ ID NO: 4001239 - DNA, 25 bp, Homo sapien
tcaaaggtaactttgtcatcatcta

SEQ ID NO: 4001240 - DNA, 25 bp, Homo sapien
acgacgactgaacgacttttcatca

SEQ ID NO: 4001241 - DNA, 25 bp, Homo sapien
cgacgactgaacgacttttcatcat

SEQ ID NO: 4001242 - DNA, 25 bp, Homo sapien
cactgcttgtgcatggcaagaccat

SEQ ID NO: 4001243 - DNA, 25 bp, Homo sapien
gacgactgaacgacttttcatcatc

SEQ ID NO: 4001244 - DNA, 25 bp, Homo sapien
agagaaacacgtatttaatctaatt

SEQ ID NO: 4001245 - DNA, 25 bp, Homo sapien
caaaaggctatgtagaggcagcaaa

SEQ ID NO: 4001246 - DNA, 25 bp, Homo sapien
tgcactaggctgatcaaatttggct

SEQ ID NO: 4001247 - DNA, 25 bp, Homo sapien
acttttctagcttggatattataca

SEQ ID NO: 4001248 - DNA, 25 bp, Homo sapien
gcactggagaaagaatcctacgctt

SEQ ID NO: 4001249 - DNA, 25 bp, Homo sapien
gcttttttggtgtggtctgtctgga

SEQ ID NO: 4001250 - DNA, 25 bp, Homo sapien
tctgtctggataaaagcgtggcatc

SEQ ID NO: 4001251 - DNA, 25 bp, Homo sapien
tgtctggataaaagcgtggcatcac

SEQ ID NO: 4001252 - DNA, 25 bp, Homo sapien
atcttccatggcagatttcgcacaa

SEQ ID NO: 4001253 - DNA, 25 bp, Homo sapien
catggcagatttcgcacaaaacacg

SEQ ID NO: 4001254 - DNA, 25 bp, Homo sapien
tccatggcagatttcgcacaaaaca

SEQ ID NO: 4001255 - DNA, 25 bp, Homo sapien
ggcagatttcgcacaaaacacggag

SEQ ID NO: 4001256 - DNA, 25 bp, Homo sapien
ggaagagcagctgaaagaggcgcat

SEQ ID NO: 4001257 - DNA, 25 bp, Homo sapien
aggaagagcagctgaaagaggcgca

SEQ ID NO: 4001258 - DNA, 25 bp, Homo sapien
agcacaggaactttggaaggaagag

SEQ ID NO: 4001259 - DNA, 25 bp, Homo sapien
acaggaactttggaaggaagagcag

SEQ ID NO: 4001260 - DNA, 25 bp, Homo sapien
gagagaactctcaactacggctgca

SEQ ID NO: 4001261 - DNA, 25 bp, Homo sapien
ggtaaaccgcactgtgagagaactc

SEQ ID NO: 4001262 - DNA, 25 bp, Homo sapien
ttcctcagatattgcctcagccagc

SEQ ID NO: 4001263 - DNA, 25 bp, Homo sapien
agccagctgccaggggtaaaccgca

SEQ ID NO: 4001264 - DNA, 25 bp, Homo sapien
ggtgcagcccgtgactgatggtttc

SEQ ID NO: 4001265 - DNA, 25 bp, Homo sapien
caggaggtctgaacagcagtccttc

SEQ ID NO: 4001266 - DNA, 25 bp, Homo sapien
aacttttggcaggaggtctgaacag

SEQ ID NO: 4001267 - DNA, 25 bp, Homo sapien
gcagtccttctggtggtgcagcccg

SEQ ID NO: 4001268 - DNA, 25 bp, Homo sapien
caatggtgtaggcaatcttgaaact

SEQ ID NO: 4001269 - DNA, 25 bp, Homo sapien
tgtacccaagaagtaccaagcatgg

SEQ ID NO: 4001270 - DNA, 25 bp, Homo sapien
gattttcctcagttacagcctcctg

SEQ ID NO: 4001271 - DNA, 25 bp, Homo sapien
tacgctcagaagtacccaaggatgt

SEQ ID NO: 4001272 - DNA, 25 bp, Homo sapien
gcggtgttgtgtccatcactcaggg

SEQ ID NO: 4001273 - DNA, 25 bp, Homo sapien
cggtgttgtgtccatcactcagggc

SEQ ID NO: 4001274 - DNA, 25 bp, Homo sapien
cgcggtgttgtgtccatcactcagg

SEQ ID NO: 4001275 - DNA, 25 bp, Homo sapien
tccattattggtgattgctaggcct

SEQ ID NO: 4001276 - DNA, 25 bp, Homo sapien
gctaggccttttaacgcaatatgta

SEQ ID NO: 4001277 - DNA, 25 bp, Homo sapien
tggtgattgctaggccttttaacgc

SEQ ID NO: 4001278 - DNA, 25 bp, Homo sapien
tagaagacagtctccattattggtg

SEQ ID NO: 4001279 - DNA, 25 bp, Homo sapien
gatgggggaggttctctcacccaca

SEQ ID NO: 4001280 - DNA, 25 bp, Homo sapien
atgggggaggttctctcacccacat

SEQ ID NO: 4001281 - DNA, 25 bp, Homo sapien
tccagcccaagcctgtggttcccag

SEQ ID NO: 4001282 - DNA, 25 bp, Homo sapien
cactggcctataccccagccccaca

SEQ ID NO: 4001283 - DNA, 25 bp, Homo sapien
actggcctataccccagccccacac

SEQ ID NO: 4001284 - DNA, 25 bp, Homo sapien
tcactggcctataccccagccccac

SEQ ID NO: 4001285 - DNA, 25 bp, Homo sapien
tggcctataccccagccccacacac

SEQ ID NO: 4001286 - DNA, 25 bp, Homo sapien
cactcacgctcaaccactcagccat

SEQ ID NO: 4001287 - DNA, 25 bp, Homo sapien
agccactcacgctcaaccactcagc

SEQ ID NO: 4001288 - DNA, 25 bp, Homo sapien
actcagccatctgccagcacgcaga

SEQ ID NO: 4001289 - DNA, 25 bp, Homo sapien
ccacacagccactcacgctcaacca

SEQ ID NO: 4001290 - DNA, 25 bp, Homo sapien
tatttgctcatatgacctatctgaa

SEQ ID NO: 4001291 - DNA, 25 bp, Homo sapien
gctcatatgacctatctgaacccat

SEQ ID NO: 4001292 - DNA, 25 bp, Homo sapien
attcatcaccttctgccctcattat

SEQ ID NO: 4001293 - DNA, 25 bp, Homo sapien
tcaccttctgccctcattatttgct

SEQ ID NO: 4001294 - DNA, 25 bp, Homo sapien
gggctcgctcaactgctgctcgccc

SEQ ID NO: 4001295 - DNA, 25 bp, Homo sapien
cctcgggctcgctcaactgctgctc

SEQ ID NO: 4001296 - DNA, 25 bp, Homo sapien
tcaactgctgctcgcccgctttctg

SEQ ID NO: 4001297 - DNA, 25 bp, Homo sapien
tcgctcaactgctgctcgcccgctt

SEQ ID NO: 4001298 - DNA, 25 bp, Homo sapien
cgcgtcgtcggcgacggcggccccg

SEQ ID NO: 4001299 - DNA, 25 bp, Homo sapien
gcgcgtcgtcggcgacggcggcccc

SEQ ID NO: 4001300 - DNA, 25 bp, Homo sapien
cgcgcgtcgtcggcgacggcggccc

SEQ ID NO: 4001301 - DNA, 25 bp, Homo sapien
ccgcgcgtcgtcggcgacggcggcc

SEQ ID NO: 4001302 - DNA, 25 bp, Homo sapien
ctttgagtgtccctttcaccttacg

SEQ ID NO: 4001303 - DNA, 25 bp, Homo sapien
tcagatgtgtccgtgatgccaccag

SEQ ID NO: 4001304 - DNA, 25 bp, Homo sapien
tcatctttgagtgtccctttcacct

SEQ ID NO: 4001305 - DNA, 25 bp, Homo sapien
gactttcagatgtgtccgtgatgcc

SEQ ID NO: 4001306 - DNA, 25 bp, Homo sapien
gaaagtgagacaagaaatgaacaca

SEQ ID NO: 4001307 - DNA, 25 bp, Homo sapien
aaagtgagacaagaaatgaacacat

SEQ ID NO: 4001308 - DNA, 25 bp, Homo sapien
ggaaagtgagacaagaaatgaacac

SEQ ID NO: 4001309 - DNA, 25 bp, Homo sapien
taagtgacagcgctatccagtgttg

SEQ ID NO: 4001310 - DNA, 25 bp, Homo sapien
gattggccacacacagaagatcaag

SEQ ID NO: 4001311 - DNA, 25 bp, Homo sapien
ggatgtatgtgcaagtgacaattga

SEQ ID NO: 4001312 - DNA, 25 bp, Homo sapien
cctagaaatcaatgcacgggtgccc

SEQ ID NO: 4001313 - DNA, 25 bp, Homo sapien
ttagtcccagccctgggagatgatg

SEQ ID NO: 4001314 - DNA, 25 bp, Homo sapien
tcccagccctgggagatgatgtcag

SEQ ID NO: 4001315 - DNA, 25 bp, Homo sapien
ccctgggagatgatgtcaggaatca

SEQ ID NO: 4001316 - DNA, 25 bp, Homo sapien
ccagccctgggagatgatgtcagga

SEQ ID NO: 4001317 - DNA, 25 bp, Homo sapien
actcctaacgtgactggttgaggtg

SEQ ID NO: 4001318 - DNA, 25 bp, Homo sapien
tgaggtggccctccgtactggaact

SEQ ID NO: 4001319 - DNA, 25 bp, Homo sapien
gagcctgaggcttttatccaaacaa

SEQ ID NO: 4001320 - DNA, 25 bp, Homo sapien
tgtttggttgagctgaagagcgccc

SEQ ID NO: 4001321 - DNA, 25 bp, Homo sapien
tctgtcttccttcactagggtgaag

SEQ ID NO: 4001322 - DNA, 25 bp, Homo sapien
acgtttacttatgtatcgtctgtct

SEQ ID NO: 4001323 - DNA, 25 bp, Homo sapien
tttacttatgtatcgtctgtcttcc

SEQ ID NO: 4001324 - DNA, 25 bp, Homo sapien
cttccttcactagggtgaaggtcct

SEQ ID NO: 4001325 - DNA, 25 bp, Homo sapien
caggagccgcactcgactttgcatc

SEQ ID NO: 4001326 - DNA, 25 bp, Homo sapien
gtcgctgggcctcgtcacgtgatcc

SEQ ID NO: 4001327 - DNA, 25 bp, Homo sapien
ccagggcctgtacacgccggaaaag

SEQ ID NO: 4001328 - DNA, 25 bp, Homo sapien
tgtacacgccggaaaagctcccgcg

SEQ ID NO: 4001329 - DNA, 25 bp, Homo sapien
gagatccaggagcacgggcccgagc

SEQ ID NO: 4001330 - DNA, 25 bp, Homo sapien
ccgagatccaggagcacgggcccga

SEQ ID NO: 4001331 - DNA, 25 bp, Homo sapien
ggccgagatccaggagcacgggccc

SEQ ID NO: 4001332 - DNA, 25 bp, Homo sapien
gatccaggagcacgggcccgagcac

SEQ ID NO: 4001333 - DNA, 25 bp, Homo sapien
ttgcaacttgagaatcgcggcggtg

SEQ ID NO: 4001334 - DNA, 25 bp, Homo sapien
cattgccgattcagggaagggccgc

SEQ ID NO: 4001335 - DNA, 25 bp, Homo sapien
tctagctagatccaccggaggcgat

SEQ ID NO: 4001336 - DNA, 25 bp, Homo sapien
taaagataaccttgctgcattgccg

SEQ ID NO: 4001337 - DNA, 25 bp, Homo sapien
gaaagcgtggcagtctatatagttt

SEQ ID NO: 4001338 - DNA, 25 bp, Homo sapien
ttgagctggaagacggctgagcctt

SEQ ID NO: 4001339 - DNA, 25 bp, Homo sapien
tcttgagttaggcatttgaaagcgt

SEQ ID NO: 4001340 - DNA, 25 bp, Homo sapien
tactacagtcggaagtgggacgaac

SEQ ID NO: 4001341 - DNA, 25 bp, Homo sapien
catctatcagtgctgacggtcttga

SEQ ID NO: 4001342 - DNA, 25 bp, Homo sapien
tgaaacgggctatgaaggtgctgct

SEQ ID NO: 4001343 - DNA, 25 bp, Homo sapien
ggaaacatggttaaatagtgcctca

SEQ ID NO: 4001344 - DNA, 25 bp, Homo sapien
caaatggccgcagcatcttgtagga

SEQ ID NO: 4001345 - DNA, 25 bp, Homo sapien
gctctgcatggtaaagccgtttaaa

SEQ ID NO: 4001346 - DNA, 25 bp, Homo sapien
tatgggcgatttctgtcagctaacc

SEQ ID NO: 4001347 - DNA, 25 bp, Homo sapien
gactgactgtagtgtcccctaaccg

SEQ ID NO: 4001348 - DNA, 25 bp, Homo sapien
gactgatttgcaacccttccgggaa

SEQ ID NO: 4001349 - DNA, 25 bp, Homo sapien
taagcaggtagaagtaattaggtca

SEQ ID NO: 4001350 - DNA, 25 bp, Homo sapien
taatacagacttccaaatagagctg

SEQ ID NO: 4001351 - DNA, 25 bp, Homo sapien
cctgtgtgacagcattgaatactgc

SEQ ID NO: 4001352 - DNA, 25 bp, Homo sapien
gatggatcacgcagatggctaagca

SEQ ID NO: 4001353 - DNA, 25 bp, Homo sapien
catgtcctatgtatttaagagagga

SEQ ID NO: 4001354 - DNA, 25 bp, Homo sapien
tcctatgtatttaagagaggacagt

SEQ ID NO: 4001355 - DNA, 25 bp, Homo sapien
tgtcctatgtatttaagagaggaca

SEQ ID NO: 4001356 - DNA, 25 bp, Homo sapien
tcatgtcctatgtatttaagagagg

SEQ ID NO: 4001357 - DNA, 25 bp, Homo sapien
tggagtgtagtgctcactgcgactt

SEQ ID NO: 4001358 - DNA, 25 bp, Homo sapien
gagtgtagtgctcactgcgacttcc

SEQ ID NO: 4001359 - DNA, 25 bp, Homo sapien
agtgtagtgctcactgcgacttccg

SEQ ID NO: 4001360 - DNA, 25 bp, Homo sapien
gctggagtgtagtgctcactgcgac

SEQ ID NO: 4001361 - DNA, 25 bp, Homo sapien
tgccagatggcatgtcccactgtcc

SEQ ID NO: 4001362 - DNA, 25 bp, Homo sapien
cactgcttgcccctaagtggtggga

SEQ ID NO: 4001363 - DNA, 25 bp, Homo sapien
tgtcactgccctagattacgtttcc

SEQ ID NO: 4001364 - DNA, 25 bp, Homo sapien
tgtcctatgggacctagtcatctgt

SEQ ID NO: 4001365 - DNA, 25 bp, Homo sapien
gaaactggatgtagggccgtatgaa

SEQ ID NO: 4001366 - DNA, 25 bp, Homo sapien
aaaacattctttggccctatgcatg

SEQ ID NO: 4001367 - DNA, 25 bp, Homo sapien
tctgtggacttacatggaacttctt

SEQ ID NO: 4001368 - DNA, 25 bp, Homo sapien
cctatgcatgccagagtgatataga

SEQ ID NO: 4001369 - DNA, 25 bp, Homo sapien
tcattgcagtgaaaagggccatgta

SEQ ID NO: 4001370 - DNA, 25 bp, Homo sapien
catgtagcatgcctcaaagccaggt

SEQ ID NO: 4001371 - DNA, 25 bp, Homo sapien
taacgtcgtgagcaattttcccatg

SEQ ID NO: 4001372 - DNA, 25 bp, Homo sapien
tcagcctagtccttgtttaagcagt

SEQ ID NO: 4001373 - DNA, 25 bp, Homo sapien
taacttggattcttataacctggac

SEQ ID NO: 4001374 - DNA, 25 bp, Homo sapien
tgtcaattgatactctcatagccct

SEQ ID NO: 4001375 - DNA, 25 bp, Homo sapien
tatgccctcaggacgtacaacttgg

SEQ ID NO: 4001376 - DNA, 25 bp, Homo sapien
ctatgtgcctggaaactgaattaca

SEQ ID NO: 4001377 - DNA, 25 bp, Homo sapien
cctcaagtttagtcttgcggtagaa

SEQ ID NO: 4001378 - DNA, 25 bp, Homo sapien
aaagaaggcacatctctcccctcaa

SEQ ID NO: 4001379 - DNA, 25 bp, Homo sapien
tacaggctgagacactaggatgaaa

SEQ ID NO: 4001380 - DNA, 25 bp, Homo sapien
catgggcaccttgtaatatgttaca

SEQ ID NO: 4001381 - DNA, 25 bp, Homo sapien
tataagcgtgcgttcgagtacccca

SEQ ID NO: 4001382 - DNA, 25 bp, Homo sapien
caatggtggaactagaaagcgtacc

SEQ ID NO: 4001383 - DNA, 25 bp, Homo sapien
ccagtgtggcgatgtcattacagac

SEQ ID NO: 4001384 - DNA, 25 bp, Homo sapien
gaaatggcactccacttggacaatg

SEQ ID NO: 4001385 - DNA, 25 bp, Homo sapien
tgcttcaacagtattgccaggttcc

SEQ ID NO: 4001386 - DNA, 25 bp, Homo sapien
ccatttttgcagctgcactgtacca

SEQ ID NO: 4001387 - DNA, 25 bp, Homo sapien
aagaggtgctatgatggtcatgcaa

SEQ ID NO: 4001388 - DNA, 25 bp, Homo sapien
ttctaattattggactgtgccctgt

SEQ ID NO: 4001389 - DNA, 25 bp, Homo sapien
tagactgcagcgttctgagcatggc

SEQ ID NO: 4001390 - DNA, 25 bp, Homo sapien
taatgaatttgtcacccagtcgcaa

SEQ ID NO: 4001391 - DNA, 25 bp, Homo sapien
gaagctctcttcgtcttaagccaga

SEQ ID NO: 4001392 - DNA, 25 bp, Homo sapien
caatgtgttgctcacaagtggccag

SEQ ID NO: 4001393 - DNA, 25 bp, Homo sapien
tctgcagcttcagcaacaaggaggg

SEQ ID NO: 4001394 - DNA, 25 bp, Homo sapien
gagggccgtagcatttgcttgtgtt

SEQ ID NO: 4001395 - DNA, 25 bp, Homo sapien
tctcatcacttagtggaattgcctt

SEQ ID NO: 4001396 - DNA, 25 bp, Homo sapien
ttttaggcctggtgggcgtgttctc

SEQ ID NO: 4001397 - DNA, 25 bp, Homo sapien
ttaaaccaacttgcccagcttggct

SEQ ID NO: 4001398 - DNA, 25 bp, Homo sapien
cgtggttgctgtccttgcataggct

SEQ ID NO: 4001399 - DNA, 25 bp, Homo sapien
ccgaggacgtggttgctgtccttgc

SEQ ID NO: 4001400 - DNA, 25 bp, Homo sapien
ggcagccggcacgtcccgaggacgt

SEQ ID NO: 4001401 - DNA, 25 bp, Homo sapien
ttctcttgggtcaggacacctggga

SEQ ID NO: 4001402 - DNA, 25 bp, Homo sapien
tctcttgggtcaggacacctgggaa

SEQ ID NO: 4001403 - DNA, 25 bp, Homo sapien
ctcttgggtcaggacacctgggaaa

SEQ ID NO: 4001404 - DNA, 25 bp, Homo sapien
tccttcacacgtttcaggaagctat

SEQ ID NO: 4001405 - DNA, 25 bp, Homo sapien
gatcattttccttcacacgtttcag

SEQ ID NO: 4001406 - DNA, 25 bp, Homo sapien
ctcacaaagtgtgctactctgggtg

SEQ ID NO: 4001407 - DNA, 25 bp, Homo sapien
tggcgctttagttgaacccaggtac

SEQ ID NO: 4001408 - DNA, 25 bp, Homo sapien
tatcacctttcttatagattcgcat

SEQ ID NO: 4001409 - DNA, 25 bp, Homo sapien
aatatcacctttcttatagattcgc

SEQ ID NO: 4001410 - DNA, 25 bp, Homo sapien
caacagcatgctgggtaacattgta

SEQ ID NO: 4001411 - DNA, 25 bp, Homo sapien
tgctgggtaacattgtagactcttc

SEQ ID NO: 4001412 - DNA, 25 bp, Homo sapien
tccatgttttctaaaaggcctagag

SEQ ID NO: 4001413 - DNA, 25 bp, Homo sapien
tgttttctaaaaggcctagagaaca

SEQ ID NO: 4001414 - DNA, 25 bp, Homo sapien
tttctaaaaggcctagagaacatat

SEQ ID NO: 4001415 - DNA, 25 bp, Homo sapien
atatgtggccaaaggaacaactcca

SEQ ID NO: 4001416 - DNA, 25 bp, Homo sapien
ttggcgaattactggaagatggcag

SEQ ID NO: 4001417 - DNA, 25 bp, Homo sapien
ggcgaattactggaagatggcagtt

SEQ ID NO: 4001418 - DNA, 25 bp, Homo sapien
tttggcgaattactggaagatggca

SEQ ID NO: 4001419 - DNA, 25 bp, Homo sapien
gcgaattactggaagatggcagttc

SEQ ID NO: 4001420 - DNA, 25 bp, Homo sapien
tggcccagatgacctccgagtgtct

SEQ ID NO: 4001421 - DNA, 25 bp, Homo sapien
cagatgacctccgagtgtctttgct

SEQ ID NO: 4001422 - DNA, 25 bp, Homo sapien
gatcgccgtcctcggggagtctcag

SEQ ID NO: 4001423 - DNA, 25 bp, Homo sapien
tgacctccgagtgtctttgctgctg

SEQ ID NO: 4001424 - DNA, 25 bp, Homo sapien
cagaggaaggtagggggatgagccg

SEQ ID NO: 4001425 - DNA, 25 bp, Homo sapien
ctgttcgtttttgcagaggaaggta

SEQ ID NO: 4001426 - DNA, 25 bp, Homo sapien
gcagaggaaggtagggggatgagcc

SEQ ID NO: 4001427 - DNA, 25 bp, Homo sapien
tttgcagaggaaggtagggggatga

SEQ ID NO: 4001428 - DNA, 25 bp, Homo sapien
tcttgggtggtgataaacgtggtca

SEQ ID NO: 4001429 - DNA, 25 bp, Homo sapien
ataaacgtggtcagctccatgatgc

SEQ ID NO: 4001430 - DNA, 25 bp, Homo sapien
ggtgataaacgtggtcagctccatg

SEQ ID NO: 4001431 - DNA, 25 bp, Homo sapien
ggtggtgataaacgtggtcagctcc

SEQ ID NO: 4001432 - DNA, 25 bp, Homo sapien
ctaatccgcttccagtgaggataac

SEQ ID NO: 4001433 - DNA, 25 bp, Homo sapien
gaagggtgttctgagcattccgact

SEQ ID NO: 4001434 - DNA, 25 bp, Homo sapien
ttccgactgccccaagggtcgctgg

SEQ ID NO: 4001435 - DNA, 25 bp, Homo sapien
tccgcttccagtgaggataaccctg

SEQ ID NO: 4001436 - DNA, 25 bp, Homo sapien
taagaggcacttcccgttattaggc

SEQ ID NO: 4001437 - DNA, 25 bp, Homo sapien
tcatgcttgagggtggatggccttt

SEQ ID NO: 4001438 - DNA, 25 bp, Homo sapien
cacgactcggattcagctggagaca

SEQ ID NO: 4001439 - DNA, 25 bp, Homo sapien
gctggagacatcacggcaactttta

SEQ ID NO: 4001440 - DNA, 25 bp, Homo sapien
cccaggaccttccatcggcgagtac

SEQ ID NO: 4001441 - DNA, 25 bp, Homo sapien
tggtctactgcctgagtcccgctgg

SEQ ID NO: 4001442 - DNA, 25 bp, Homo sapien
tcattggtctactgcctgagtcccg

SEQ ID NO: 4001443 - DNA, 25 bp, Homo sapien
tcccaggaccttccatcggcgagta

SEQ ID NO: 4001444 - DNA, 25 bp, Homo sapien
gagcccgtgctgctccgcactgggc

SEQ ID NO: 4001445 - DNA, 25 bp, Homo sapien
tgctgctccgcactgggctgtcttt

SEQ ID NO: 4001446 - DNA, 25 bp, Homo sapien
cgtgctgctccgcactgggctgtct

SEQ ID NO: 4001447 - DNA, 25 bp, Homo sapien
gcccgtgctgctccgcactgggctg

SEQ ID NO: 4001448 - DNA, 25 bp, Homo sapien
cagggacagtgtgtgctgcacagac

SEQ ID NO: 4001449 - DNA, 25 bp, Homo sapien
tgcaggccgctcacatgttcttgtt

SEQ ID NO: 4001450 - DNA, 25 bp, Homo sapien
agcacacattcctgggcgcgatcat

SEQ ID NO: 4001451 - DNA, 25 bp, Homo sapien
tgtttctgctgtgataccgacagga

SEQ ID NO: 4001452 - DNA, 25 bp, Homo sapien
aacaatgaagatgctaagttgacaa

SEQ ID NO: 4001453 - DNA, 25 bp, Homo sapien
caatgaagatgctaagttgacaaat

SEQ ID NO: 4001454 - DNA, 25 bp, Homo sapien
atgaagatgctaagttgacaaatgc

SEQ ID NO: 4001455 - DNA, 25 bp, Homo sapien
aaacaatgaagatgctaagttgaca

SEQ ID NO: 4001456 - DNA, 25 bp, Homo sapien
gaaggaaaggcttttgatcttatct

SEQ ID NO: 4001457 - DNA, 25 bp, Homo sapien
gaagttcaccattgtgcatccaata

SEQ ID NO: 4001458 - DNA, 25 bp, Homo sapien
tgatattccctgagacatccggaag

SEQ ID NO: 4001459 - DNA, 25 bp, Homo sapien
gcatccaatattctgggtcacctgg

SEQ ID NO: 4001460 - DNA, 25 bp, Homo sapien
ctgaagcctggctccggcagaagca

SEQ ID NO: 4001461 - DNA, 25 bp, Homo sapien
tgaagcctggctccggcagaagcag

SEQ ID NO: 4001462 - DNA, 25 bp, Homo sapien
cagcttggtcactggttgcaggaat

SEQ ID NO: 4001463 - DNA, 25 bp, Homo sapien
gcagcttggtcactggttgcaggaa

SEQ ID NO: 4001464 - DNA, 25 bp, Homo sapien
ttctgttggggggtttgtcagcctc

SEQ ID NO: 4001465 - DNA, 25 bp, Homo sapien
taggtcccaggtaatgacttgtggc

SEQ ID NO: 4001466 - DNA, 25 bp, Homo sapien
ggtgccccagataggtcccaggtaa

SEQ ID NO: 4001467 - DNA, 25 bp, Homo sapien
atcctgggtgggcataatcttggcc

SEQ ID NO: 4001468 - DNA, 25 bp, Homo sapien
cttgtggctgctgtcggtcgagggc

SEQ ID NO: 4001469 - DNA, 25 bp, Homo sapien
tgaaggctcagttgactccacagta

SEQ ID NO: 4001470 - DNA, 25 bp, Homo sapien
gtgaaggctcagttgactccacagt

SEQ ID NO: 4001471 - DNA, 25 bp, Homo sapien
ccacagtactcctgagacacacttt

SEQ ID NO: 4001472 - DNA, 25 bp, Homo sapien
ttgactccacagtactcctgagaca

SEQ ID NO: 4001473 - DNA, 25 bp, Homo sapien
tttgaaatgcaaatgggcattgtgt

SEQ ID NO: 4001474 - DNA, 25 bp, Homo sapien
ggcattgtgttgccatgacgaagat

SEQ ID NO: 4001475 - DNA, 25 bp, Homo sapien
gcattgtgttgccatgacgaagatg

SEQ ID NO: 4001476 - DNA, 25 bp, Homo sapien
ttgaaatgcaaatgggcattgtgtt

SEQ ID NO: 4001477 - DNA, 25 bp, Homo sapien
atggctggaatctgcagaaaggcct

SEQ ID NO: 4001478 - DNA, 25 bp, Homo sapien
acatggctggaatctgcagaaaggc

SEQ ID NO: 4001479 - DNA, 25 bp, Homo sapien
catggctggaatctgcagaaaggcc

SEQ ID NO: 4001480 - DNA, 25 bp, Homo sapien
tcacatggctggaatctgcagaaag

SEQ ID NO: 4001481 - DNA, 25 bp, Homo sapien
aagctccttgagcatagtaggggcg

SEQ ID NO: 4001482 - DNA, 25 bp, Homo sapien
catagtaggggcgtcattcttgaat

SEQ ID NO: 4001483 - DNA, 25 bp, Homo sapien
cttgagcatagtaggggcgtcattc

SEQ ID NO: 4001484 - DNA, 25 bp, Homo sapien
agtaggggcgtcattcttgaattcc

SEQ ID NO: 4001485 - DNA, 25 bp, Homo sapien
tggcttctttggcaaagctgacttg

SEQ ID NO: 4001486 - DNA, 25 bp, Homo sapien
tcccatgaaggaatttccttttgcc

SEQ ID NO: 4001487 - DNA, 25 bp, Homo sapien
ctggagggctggacactggccatct

SEQ ID NO: 4001488 - DNA, 25 bp, Homo sapien
tgacttgatgagtcaaggagagctg

SEQ ID NO: 4001489 - DNA, 25 bp, Homo sapien
tctgtctctctctgctcggacacat

SEQ ID NO: 4001490 - DNA, 25 bp, Homo sapien
tgcttccctttgtcttgatcactct

SEQ ID NO: 4001491 - DNA, 25 bp, Homo sapien
ttttgcttccctttgtcttgatcac

SEQ ID NO: 4001492 - DNA, 25 bp, Homo sapien
ctccacatcttcacatttttgcttc

SEQ ID NO: 4001493 - DNA, 25 bp, Homo sapien
gatagttgcaaaatcactagatgtg

SEQ ID NO: 4001494 - DNA, 25 bp, Homo sapien
gaaaccagtgattgtacaagaaaag

SEQ ID NO: 4001495 - DNA, 25 bp, Homo sapien
agatgtgaaacttggttgtaatagg

SEQ ID NO: 4001496 - DNA, 25 bp, Homo sapien
aagtaagatattggcagttgaaacc

SEQ ID NO: 4001497 - DNA, 25 bp, Homo sapien
ggagaaagagcggatttcccctgag

SEQ ID NO: 4001498 - DNA, 25 bp, Homo sapien
aaagagcggatttcccctgagctgc

SEQ ID NO: 4001499 - DNA, 25 bp, Homo sapien
tcttccctgtgggagaaagagcgga

SEQ ID NO: 4001500 - DNA, 25 bp, Homo sapien
gaaagagcggatttcccctgagctg

SEQ ID NO: 4001501 - DNA, 25 bp, Homo sapien
gctgcaggtgtagaaagcgttccct

SEQ ID NO: 4001502 - DNA, 25 bp, Homo sapien
tggctgcaggtgtagaaagcgttcc

SEQ ID NO: 4001503 - DNA, 25 bp, Homo sapien
tgcaggtgtagaaagcgttccctac

SEQ ID NO: 4001504 - DNA, 25 bp, Homo sapien
ggctgcaggtgtagaaagcgttccc

SEQ ID NO: 4001505 - DNA, 25 bp, Homo sapien
tggcgagcagcttcaggacggtctc

SEQ ID NO: 4001506 - DNA, 25 bp, Homo sapien
aaggaatgcgagaagctggctgtct

SEQ ID NO: 4001507 - DNA, 25 bp, Homo sapien
acctcacaggcctcggagaagggtc

SEQ ID NO: 4001508 - DNA, 25 bp, Homo sapien
tgaacagatgcagccccgtggcgag

SEQ ID NO: 4001509 - DNA, 25 bp, Homo sapien
tttgggcttcaaagccatattaatc

SEQ ID NO: 4001510 - DNA, 25 bp, Homo sapien
cagctattctcacctagtttagaaa

SEQ ID NO: 4001511 - DNA, 25 bp, Homo sapien
tccaaagaatttcagctattctcac

SEQ ID NO: 4001512 - DNA, 25 bp, Homo sapien
gccatattaatcatcatcatacggg

SEQ ID NO: 4001513 - DNA, 25 bp, Homo sapien
gtttctgtatagagctctgatggtt

SEQ ID NO: 4001514 - DNA, 25 bp, Homo sapien
tgtttctgtatagagctctgatggt

SEQ ID NO: 4001515 - DNA, 25 bp, Homo sapien
cttgacagtggaataggatgagaat

SEQ ID NO: 4001516 - DNA, 25 bp, Homo sapien
cagtggaataggatgagaatgaata

SEQ ID NO: 4001517 - DNA, 25 bp, Homo sapien
gaataggatgagaatgaatagatgc

SEQ ID NO: 4001518 - DNA, 25 bp, Homo sapien
gacagtggaataggatgagaatgaa

SEQ ID NO: 4001519 - DNA, 25 bp, Homo sapien
tgaaggaaacatctggttgcgtttg

SEQ ID NO: 4001520 - DNA, 25 bp, Homo sapien
tgcgtttggagatcaactactaaaa

SEQ ID NO: 4001521 - DNA, 25 bp, Homo sapien
aagctgttctggagaccccgtgtgg

SEQ ID NO: 4001522 - DNA, 25 bp, Homo sapien
gacttcaaggagacatcccattgtg

SEQ ID NO: 4001523 - DNA, 25 bp, Homo sapien
cagtcatctctctggctaggtcatg

SEQ ID NO: 4001524 - DNA, 25 bp, Homo sapien
agaactagaatgatttgtccgtgaa

SEQ ID NO: 4001525 - DNA, 25 bp, Homo sapien
tctctctggctaggtcatgaagaac

SEQ ID NO: 4001526 - DNA, 25 bp, Homo sapien
gatttgtccgtgaagtttcaccttc

SEQ ID NO: 4001527 - DNA, 25 bp, Homo sapien
ggtaaccgagcttcccggcagtgtc

SEQ ID NO: 4001528 - DNA, 25 bp, Homo sapien
agaggagcacacatcgcggtaaccg

SEQ ID NO: 4001529 - DNA, 25 bp, Homo sapien
gaacagctgtcaagcatgtcttaca

SEQ ID NO: 4001530 - DNA, 25 bp, Homo sapien
taatgtagctcaggattgagaagag

SEQ ID NO: 4001531 - DNA, 25 bp, Homo sapien
atgacctcgaatgactgattgccac

SEQ ID NO: 4001532 - DNA, 25 bp, Homo sapien
cttcacaagtggctccgtgcagggc

SEQ ID NO: 4001533 - DNA, 25 bp, Homo sapien
ggcctccatgacctcgaatgactga

SEQ ID NO: 4001534 - DNA, 25 bp, Homo sapien
tccatgacctcgaatgactgattgc

SEQ ID NO: 4001535 - DNA, 25 bp, Homo sapien
aatctattctgcacacgactatcta

SEQ ID NO: 4001536 - DNA, 25 bp, Homo sapien
gactatctacaaacagagagcccgc

SEQ ID NO: 4001537 - DNA, 25 bp, Homo sapien
agagagcccgccaaaccaggcggct

SEQ ID NO: 4001538 - DNA, 25 bp, Homo sapien
aacccttcagcggatactcagtgcc

SEQ ID NO: 4001539 - DNA, 25 bp, Homo sapien
ttgcaccatcataatcgttgtgttc

SEQ ID NO: 4001540 - DNA, 25 bp, Homo sapien
atcataatcgttgtgttcctgagag

SEQ ID NO: 4001541 - DNA, 25 bp, Homo sapien
accatcataatcgttgtgttcctga

SEQ ID NO: 4001542 - DNA, 25 bp, Homo sapien
tgcaccatcataatcgttgtgttcc

SEQ ID NO: 4001543 - DNA, 25 bp, Homo sapien
tgctccttccaagctgacaccttca

SEQ ID NO: 4001544 - DNA, 25 bp, Homo sapien
gctccttccaagctgacaccttcac

SEQ ID NO: 4001545 - DNA, 25 bp, Homo sapien
tccttccaagctgacaccttcacca

SEQ ID NO: 4001546 - DNA, 25 bp, Homo sapien
ccttccaagctgacaccttcaccat

SEQ ID NO: 4001547 - DNA, 25 bp, Homo sapien
aaccgttgtaaagtaattgcagagc

SEQ ID NO: 4001548 - DNA, 25 bp, Homo sapien
cttgaggagtctccggagcggaatt

SEQ ID NO: 4001549 - DNA, 25 bp, Homo sapien
cggctggcgataaggatgttgctaa

SEQ ID NO: 4001550 - DNA, 25 bp, Homo sapien
cggaattccggctggcgataaggat

SEQ ID NO: 4001551 - DNA, 25 bp, Homo sapien
aaccaccagcgttttaatcttgtgc

SEQ ID NO: 4001552 - DNA, 25 bp, Homo sapien
caccagcgttttaatcttgtgcttc

SEQ ID NO: 4001553 - DNA, 25 bp, Homo sapien
aaaccaccagcgttttaatcttgtg

SEQ ID NO: 4001554 - DNA, 25 bp, Homo sapien
ccagcgttttaatcttgtgcttcat

SEQ ID NO: 4001555 - DNA, 25 bp, Homo sapien
ggatgcccatgacgatcctccagac

SEQ ID NO: 4001556 - DNA, 25 bp, Homo sapien
ttgtaggatgcccatgacgatcctc

SEQ ID NO: 4001557 - DNA, 25 bp, Homo sapien
tgccccagggcttctatgaggctgt

SEQ ID NO: 4001558 - DNA, 25 bp, Homo sapien
gcttctatgaggctgtcttgtagga

SEQ ID NO: 4001559 - DNA, 25 bp, Homo sapien
tggaagtatgcaagaccacgccagc

SEQ ID NO: 4001560 - DNA, 25 bp, Homo sapien
tcgggacctggcgatcgagttgcat

SEQ ID NO: 4001561 - DNA, 25 bp, Homo sapien
tcaagggctggctcattaagggctc

SEQ ID NO: 4001562 - DNA, 25 bp, Homo sapien
gatcgagttgcattgcagattttgg

SEQ ID NO: 4001563 - DNA, 25 bp, Homo sapien
ccatgcaaagaaggcaggtgatcca

SEQ ID NO: 4001564 - DNA, 25 bp, Homo sapien
gagagaccatgcaaagaaggcaggt

SEQ ID NO: 4001565 - DNA, 25 bp, Homo sapien
caaagaaggcaggtgatccaagggc

SEQ ID NO: 4001566 - DNA, 25 bp, Homo sapien
tttccagggagagaccatgcaaaga

SEQ ID NO: 4001567 - DNA, 25 bp, Homo sapien
caagtcttctgtacgtgtcaccttc

SEQ ID NO: 4001568 - DNA, 25 bp, Homo sapien
cagggttggacccaagtcttctgta

SEQ ID NO: 4001569 - DNA, 25 bp, Homo sapien
caggaccagggttggacccaagtct

SEQ ID NO: 4001570 - DNA, 25 bp, Homo sapien
agtgctacctgggattttaatttca

SEQ ID NO: 4001571 - DNA, 25 bp, Homo sapien
atatttctcctcttttactcagtaa

SEQ ID NO: 4001572 - DNA, 25 bp, Homo sapien
tctcctcttttactcagtaacttta

SEQ ID NO: 4001573 - DNA, 25 bp, Homo sapien
tttactcagtaactttaattcttca

SEQ ID NO: 4001574 - DNA, 25 bp, Homo sapien
ttactcagtaactttaattcttcat

SEQ ID NO: 4001575 - DNA, 25 bp, Homo sapien
tattccgatatcgagaatatttctg

SEQ ID NO: 4001576 - DNA, 25 bp, Homo sapien
tttattccgatatcgagaatatttc

SEQ ID NO: 4001577 - DNA, 25 bp, Homo sapien
atatcgagaatatttctgaagatgc

SEQ ID NO: 4001578 - DNA, 25 bp, Homo sapien
ccgatatcgagaatatttctgaaga

SEQ ID NO: 4001579 - DNA, 25 bp, Homo sapien
aataataatcttcagtggccttaga

SEQ ID NO: 4001580 - DNA, 25 bp, Homo sapien
ttaaagtccaggcaattccgaggaa

SEQ ID NO: 4001581 - DNA, 25 bp, Homo sapien
cagtggccttagaaaagcctctaat

SEQ ID NO: 4001582 - DNA, 25 bp, Homo sapien
gcctctaatctcagaggtgctgaca

SEQ ID NO: 4001583 - DNA, 25 bp, Homo sapien
tcttcaggagttgtattatgtggtc

SEQ ID NO: 4001584 - DNA, 25 bp, Homo sapien
tgagccctgggactcttcaggagtt

SEQ ID NO: 4001585 - DNA, 25 bp, Homo sapien
ccctgggactcttcaggagttgtat

SEQ ID NO: 4001586 - DNA, 25 bp, Homo sapien
agttgtattatgtggtcggtctctc

SEQ ID NO: 4001587 - DNA, 25 bp, Homo sapien
caaattgaggactcagcagaatgag

SEQ ID NO: 4001588 - DNA, 25 bp, Homo sapien
gattccgagcttttgcaaattgagg

SEQ ID NO: 4001589 - DNA, 25 bp, Homo sapien
gcctttgaattgcttctgtgggcag

SEQ ID NO: 4001590 - DNA, 25 bp, Homo sapien
tggaacggccctcatgtttatttcc

SEQ ID NO: 4001591 - DNA, 25 bp, Homo sapien
cagtgaacaatcagagagtaaaggg

SEQ ID NO: 4001592 - DNA, 25 bp, Homo sapien
tggtctgttgattttcagtgaacaa

SEQ ID NO: 4001593 - DNA, 25 bp, Homo sapien
ttcttctcttaatctgcctttggtc

SEQ ID NO: 4001594 - DNA, 25 bp, Homo sapien
cttaatctgcctttggtctgttgat

SEQ ID NO: 4001595 - DNA, 25 bp, Homo sapien
gcccctgtggagatgtctttcttca

SEQ ID NO: 4001596 - DNA, 25 bp, Homo sapien
gaaggtgttcgttggtgggctggcc

SEQ ID NO: 4001597 - DNA, 25 bp, Homo sapien
ctttccctgcatgttggtccggctt

SEQ ID NO: 4001598 - DNA, 25 bp, Homo sapien
cctcattcccttcacacacctggct

SEQ ID NO: 4001599 - DNA, 25 bp, Homo sapien
tgtgtcatgctgaagtataagcagc

SEQ ID NO: 4001600 - DNA, 25 bp, Homo sapien
caggctgtgtcatgctgaagtataa

SEQ ID NO: 4001601 - DNA, 25 bp, Homo sapien
catgctgaagtataagcagctccgg

SEQ ID NO: 4001602 - DNA, 25 bp, Homo sapien
aagtataagcagctccggaaatacc

SEQ ID NO: 4001603 - DNA, 25 bp, Homo sapien
cagggtagcaaatgggcaatgcaga

SEQ ID NO: 4001604 - DNA, 25 bp, Homo sapien
gacatccagggtagcaaatgggcaa

SEQ ID NO: 4001605 - DNA, 25 bp, Homo sapien
tcaggtgaagaatatctctttcacg

SEQ ID NO: 4001606 - DNA, 25 bp, Homo sapien
tcacgtggtcagcactgggcatttg

SEQ ID NO: 4001607 - DNA, 25 bp, Homo sapien
gcagcctctcctctgctgtcctgac

SEQ ID NO: 4001608 - DNA, 25 bp, Homo sapien
ctttcctgacccaggagcagcctct

SEQ ID NO: 4001609 - DNA, 25 bp, Homo sapien
ggagcagcctctcctctgctgtcct

SEQ ID NO: 4001610 - DNA, 25 bp, Homo sapien
tttcctgacccaggagcagcctctc

SEQ ID NO: 4001611 - DNA, 25 bp, Homo sapien
gcaagctgggaagttttaataagct

SEQ ID NO: 4001612 - DNA, 25 bp, Homo sapien
cagcaagctgggaagttttaataag

SEQ ID NO: 4001613 - DNA, 25 bp, Homo sapien
agcaagctgggaagttttaataagc

SEQ ID NO: 4001614 - DNA, 25 bp, Homo sapien
gaggaaagtgaagagcttgatgctt

SEQ ID NO: 4001615 - DNA, 25 bp, Homo sapien
ggaaagtgaagagcttgatgctttt

SEQ ID NO: 4001616 - DNA, 25 bp, Homo sapien
aaagtgaagagcttgatgctttttc

SEQ ID NO: 4001617 - DNA, 25 bp, Homo sapien
ccgaggaaagtgaagagcttgatgc

SEQ ID NO: 4001618 - DNA, 25 bp, Homo sapien
cttgattccctgagctttttcccat

SEQ ID NO: 4001619 - DNA, 25 bp, Homo sapien
gaaaacattgccagcgctggccctg

SEQ ID NO: 4001620 - DNA, 25 bp, Homo sapien
ggtgggtggttaccatggcatagga

SEQ ID NO: 4001621 - DNA, 25 bp, Homo sapien
ccatggcataggaaaacattgccag

SEQ ID NO: 4001622 - DNA, 25 bp, Homo sapien
attgccagcgctggccctgtcgtca

SEQ ID NO: 4001623 - DNA, 25 bp, Homo sapien
gatgggaccaatgttgagtttgacc

SEQ ID NO: 4001624 - DNA, 25 bp, Homo sapien
ctcgctgctcactagactgatggga

SEQ ID NO: 4001625 - DNA, 25 bp, Homo sapien
cactagactgatgggaccaatgttg

SEQ ID NO: 4001626 - DNA, 25 bp, Homo sapien
cttcatgctcgctgctcactagact

SEQ ID NO: 4001627 - DNA, 25 bp, Homo sapien
tgaaggagtggaccttgcagcattc

SEQ ID NO: 4001628 - DNA, 25 bp, Homo sapien
gatcatccagttaaggcccctaagg

SEQ ID NO: 4001629 - DNA, 25 bp, Homo sapien
gtcatccaagatcatccagttaagg

SEQ ID NO: 4001630 - DNA, 25 bp, Homo sapien
ggagtggaccttgcagcattcaagg

SEQ ID NO: 4001631 - DNA, 25 bp, Homo sapien
gagattctctgacctgcagcctcag

SEQ ID NO: 4001632 - DNA, 25 bp, Homo sapien
tctgatctgataggactgatgccct

SEQ ID NO: 4001633 - DNA, 25 bp, Homo sapien
ccccatgggatcgtatttggagaca

SEQ ID NO: 4001634 - DNA, 25 bp, Homo sapien
tattactgcaaactgagtggctcac

SEQ ID NO: 4001635 - DNA, 25 bp, Homo sapien
atgagatcgggagcgttcaaggtgg

SEQ ID NO: 4001636 - DNA, 25 bp, Homo sapien
tcagatgagatcgggagcgttcaag

SEQ ID NO: 4001637 - DNA, 25 bp, Homo sapien
agatgagatcgggagcgttcaaggt

SEQ ID NO: 4001638 - DNA, 25 bp, Homo sapien
atcagatgagatcgggagcgttcaa

SEQ ID NO: 4001639 - DNA, 25 bp, Homo sapien
cctgtaggctcatgagctgagcgcc

SEQ ID NO: 4001640 - DNA, 25 bp, Homo sapien
cataaaagtagcatctggagagcca

SEQ ID NO: 4001641 - DNA, 25 bp, Homo sapien
ctgcagcgagtgtgtcaccaagagc

SEQ ID NO: 4001642 - DNA, 25 bp, Homo sapien
gagagccattgacataatgttgaga

SEQ ID NO: 4001643 - DNA, 25 bp, Homo sapien
taggacttcccacacaacaggtgag

SEQ ID NO: 4001644 - DNA, 25 bp, Homo sapien
tgtgtttcataactccagagcgtcc

SEQ ID NO: 4001645 - DNA, 25 bp, Homo sapien
ggttgtgcagacttccaggtcctag

SEQ ID NO: 4001646 - DNA, 25 bp, Homo sapien
tcatctgcccggctagggtctaggg

SEQ ID NO: 4001647 - DNA, 25 bp, Homo sapien
gttattaaccaacatgtccaaatgg

SEQ ID NO: 4001648 - DNA, 25 bp, Homo sapien
gatcaaccctgagatctcagtggct

SEQ ID NO: 4001649 - DNA, 25 bp, Homo sapien
gccagtaggaatgccgaaaagaagt

SEQ ID NO: 4001650 - DNA, 25 bp, Homo sapien
cctacagggcttttgatcaaggcca

SEQ ID NO: 4001651 - DNA, 25 bp, Homo sapien
ggaaggtcaccttgctcttaagtgc

SEQ ID NO: 4001652 - DNA, 25 bp, Homo sapien
tcaccttgctcttaagtgccgcagc

SEQ ID NO: 4001653 - DNA, 25 bp, Homo sapien
gtgccgcagcccacaagtgatgtct

SEQ ID NO: 4001654 - DNA, 25 bp, Homo sapien
tctgtcagaactgcaacctggcaac

SEQ ID NO: 4001655 - DNA, 25 bp, Homo sapien
tgagaactggaagagtcttgttttc

SEQ ID NO: 4001656 - DNA, 25 bp, Homo sapien
gtgagaactggaagagtcttgtttt

SEQ ID NO: 4001657 - DNA, 25 bp, Homo sapien
tgtgagaactggaagagtcttgttt

SEQ ID NO: 4001658 - DNA, 25 bp, Homo sapien
tggttatgggtagcttggaaagccc

SEQ ID NO: 4001659 - DNA, 25 bp, Homo sapien
taagcccctgaatttcaagtaagcc

SEQ ID NO: 4001660 - DNA, 25 bp, Homo sapien
aagtgacttgtgcattccccatgag

SEQ ID NO: 4001661 - DNA, 25 bp, Homo sapien
caagtaagccatagacaagttgcct

SEQ ID NO: 4001662 - DNA, 25 bp, Homo sapien
caccctactgcccttctgcttgctg

SEQ ID NO: 4001663 - DNA, 25 bp, Homo sapien
ccaccctactgcccttctgcttgct

SEQ ID NO: 4001664 - DNA, 25 bp, Homo sapien
aggtacccagcggtattcagtaact

SEQ ID NO: 4001665 - DNA, 25 bp, Homo sapien
tgagcagtgaccttcttgcttaagt

SEQ ID NO: 4001666 - DNA, 25 bp, Homo sapien
cggtattcagtaactggctcaggaa

SEQ ID NO: 4001667 - DNA, 25 bp, Homo sapien
cagtgaccttcttgcttaagttggc

SEQ ID NO: 4001668 - DNA, 25 bp, Homo sapien
tgaaagtctgtaaacctatcttgcc

SEQ ID NO: 4001669 - DNA, 25 bp, Homo sapien
gtctgtaaacctatcttgcctctga

SEQ ID NO: 4001670 - DNA, 25 bp, Homo sapien
aactgaaagtctgtaaacctatctt

SEQ ID NO: 4001671 - DNA, 25 bp, Homo sapien
gaaagtctgtaaacctatcttgcct

SEQ ID NO: 4001672 - DNA, 25 bp, Homo sapien
tgctttcccggatggaagttcttga

SEQ ID NO: 4001673 - DNA, 25 bp, Homo sapien
tccatgatcagtacaagcttgggtc

SEQ ID NO: 4001674 - DNA, 25 bp, Homo sapien
gagactagcccaagacatcacattg

SEQ ID NO: 4001675 - DNA, 25 bp, Homo sapien
ttcttgatataacctggatttccat

SEQ ID NO: 4001676 - DNA, 25 bp, Homo sapien
tgtctttctgccaggtaagtcaagt

SEQ ID NO: 4001677 - DNA, 25 bp, Homo sapien
ttggtgtctttctgccaggtaagtc

SEQ ID NO: 4001678 - DNA, 25 bp, Homo sapien
gtgtctttctgccaggtaagtcaag

SEQ ID NO: 4001679 - DNA, 25 bp, Homo sapien
tggtgtctttctgccaggtaagtca

SEQ ID NO: 4001680 - DNA, 25 bp, Homo sapien
cagcttcctgtaagttctgcctggt

SEQ ID NO: 4001681 - DNA, 25 bp, Homo sapien
catacagctaccacccaaagtaaca

SEQ ID NO: 4001682 - DNA, 25 bp, Homo sapien
cataatctttatccccagtcagctt

SEQ ID NO: 4001683 - DNA, 25 bp, Homo sapien
gcctggtgctcctttcttgataatg

SEQ ID NO: 4001684 - DNA, 25 bp, Homo sapien
cagcacccaggaactttccctccat

SEQ ID NO: 4001685 - DNA, 25 bp, Homo sapien
caatactagtatgggtgtgctgatc

SEQ ID NO: 4001686 - DNA, 25 bp, Homo sapien
cgatcaatgctagtacggacgtgct

SEQ ID NO: 4001687 - DNA, 25 bp, Homo sapien
tatcaatgctagtataagcctgccg

SEQ ID NO: 4001688 - DNA, 25 bp, Homo sapien
gtataaacctgctgatgaacgctag

SEQ ID NO: 4001689 - DNA, 25 bp, Homo sapien
cagttgatagcctcagaaactcggt

SEQ ID NO: 4001690 - DNA, 25 bp, Homo sapien
tgatagcctcagaaactcggtttct

SEQ ID NO: 4001691 - DNA, 25 bp, Homo sapien
gacagccccagttgatagcctcaga

SEQ ID NO: 4001692 - DNA, 25 bp, Homo sapien
gccccagttgatagcctcagaaact

SEQ ID NO: 4001693 - DNA, 25 bp, Homo sapien
ctgaagatacagtgatggattttga

SEQ ID NO: 4001694 - DNA, 25 bp, Homo sapien
gacctaaatctgtgctgtaactgaa

SEQ ID NO: 4001695 - DNA, 25 bp, Homo sapien
caaggtaactagatatgacgggacc

SEQ ID NO: 4001696 - DNA, 25 bp, Homo sapien
gatatgacgggacctaaatctgtgc

SEQ ID NO: 4001697 - DNA, 25 bp, Homo sapien
taggttgcttattcttcggctgagg

SEQ ID NO: 4001698 - DNA, 25 bp, Homo sapien
gcagcactaggcatgagatcctggc

SEQ ID NO: 4001699 - DNA, 25 bp, Homo sapien
tatagctcagctgttcagagcaaga

SEQ ID NO: 4001700 - DNA, 25 bp, Homo sapien
catgtggtcacctgttgaaatggtc

SEQ ID NO: 4001701 - DNA, 25 bp, Homo sapien
agctgcaagggtgacctggatacag

SEQ ID NO: 4001702 - DNA, 25 bp, Homo sapien
catcctccacaaacagtgaacttga

SEQ ID NO: 4001703 - DNA, 25 bp, Homo sapien
tgctcatcctccacaaacagtgaac

SEQ ID NO: 4001704 - DNA, 25 bp, Homo sapien
ggatacagccactcatagaactgca

SEQ ID NO: 4001705 - DNA, 25 bp, Homo sapien
agtcaccgcaccaaatttcatgtgt

SEQ ID NO: 4001706 - DNA, 25 bp, Homo sapien
ccgcaccaaatttcatgtgtgtcca

SEQ ID NO: 4001707 - DNA, 25 bp, Homo sapien
ggatcttcctcatggagcaaaaaac

SEQ ID NO: 4001708 - DNA, 25 bp, Homo sapien
caccgcaccaaatttcatgtgtgtc

SEQ ID NO: 4001709 - DNA, 25 bp, Homo sapien
gaggatggttccacatacatacaac

SEQ ID NO: 4001710 - DNA, 25 bp, Homo sapien
ggttccacatacatacaacatcctg

SEQ ID NO: 4001711 - DNA, 25 bp, Homo sapien
gtgagtgaggatggttccacataca

SEQ ID NO: 4001712 - DNA, 25 bp, Homo sapien
acatacaacatcctgtatcatgaag

SEQ ID NO: 4001713 - DNA, 25 bp, Homo sapien
gcatgctgctcttccgatgatgtaa

SEQ ID NO: 4001714 - DNA, 25 bp, Homo sapien
gctcttccgatgatgtaattccaca

SEQ ID NO: 4001715 - DNA, 25 bp, Homo sapien
attcagtcagcatgctgctcttccg

SEQ ID NO: 4001716 - DNA, 25 bp, Homo sapien
ttccgatgatgtaattccacagtct

SEQ ID NO: 4001717 - DNA, 25 bp, Homo sapien
tacagaatttcatggtagcacttca

SEQ ID NO: 4001718 - DNA, 25 bp, Homo sapien
ttacagaatttcatggtagcacttc

SEQ ID NO: 4001719 - DNA, 25 bp, Homo sapien
tggcacacataggccaactgcatgt

SEQ ID NO: 4001720 - DNA, 25 bp, Homo sapien
caactgcatgttccttcttagacac

SEQ ID NO: 4001721 - DNA, 25 bp, Homo sapien
actgcatgttccttcttagacacat

SEQ ID NO: 4001722 - DNA, 25 bp, Homo sapien
gcacacataggccaactgcatgttc

SEQ ID NO: 4001723 - DNA, 25 bp, Homo sapien
tttctccaattctaagaggttgaag

SEQ ID NO: 4001724 - DNA, 25 bp, Homo sapien
tgagagatgtacttcctggtcacac

SEQ ID NO: 4001725 - DNA, 25 bp, Homo sapien
tatgcaatgtgaacctcatatcccc

SEQ ID NO: 4001726 - DNA, 25 bp, Homo sapien
tgaagtcccattcttgtgagagatg

SEQ ID NO: 4001727 - DNA, 25 bp, Homo sapien
cactatgaaccagcgtatagcttga

SEQ ID NO: 4001728 - DNA, 25 bp, Homo sapien
tgaaccagcgtatagcttgaacaca

SEQ ID NO: 4001729 - DNA, 25 bp, Homo sapien
ctgcactatgaaccagcgtatagct

SEQ ID NO: 4001730 - DNA, 25 bp, Homo sapien
tatgaaccagcgtatagcttgaaca

SEQ ID NO: 4001731 - DNA, 25 bp, Homo sapien
tgctctgaagtgacaacttttgttg

SEQ ID NO: 4001732 - DNA, 25 bp, Homo sapien
gacaacttttgttgtgatgtagagt

SEQ ID NO: 4001733 - DNA, 25 bp, Homo sapien
gtgatgtagagtagatctagggcac

SEQ ID NO: 4001734 - DNA, 25 bp, Homo sapien
tgtgatgtagagtagatctagggca

SEQ ID NO: 4001735 - DNA, 25 bp, Homo sapien
gaagaccattgcttagagcagacag

SEQ ID NO: 4001736 - DNA, 25 bp, Homo sapien
tttttacaccatatgaccgggcact

SEQ ID NO: 4001737 - DNA, 25 bp, Homo sapien
aactgctgcagttgatcagtgaaca

SEQ ID NO: 4001738 - DNA, 25 bp, Homo sapien
gcctcaggagttatatacatatcag

SEQ ID NO: 4001739 - DNA, 25 bp, Homo sapien
caaaatgtcagatcaatgggaagca

SEQ ID NO: 4001740 - DNA, 25 bp, Homo sapien
tggttccctggagagttgcatgctt

SEQ ID NO: 4001741 - DNA, 25 bp, Homo sapien
ggcaattagcatcccttcccagtga

SEQ ID NO: 4001742 - DNA, 25 bp, Homo sapien
catttacgtaagtggtcatggcccc

SEQ ID NO: 4001743 - DNA, 25 bp, Homo sapien
tagaaataagtcagcccggtcagag

SEQ ID NO: 4001744 - DNA, 25 bp, Homo sapien
aaattcaaagaagcatgggtaggtc

SEQ ID NO: 4001745 - DNA, 25 bp, Homo sapien
cattgcatgggtccttggttatcct

SEQ ID NO: 4001746 - DNA, 25 bp, Homo sapien
ccggtcagagaatcgagccagaaat

SEQ ID NO: 4001747 - DNA, 25 bp, Homo sapien
ttttcaagtatagaccccacagcac

SEQ ID NO: 4001748 - DNA, 25 bp, Homo sapien
tagggattgaatgggaaacagtaac

SEQ ID NO: 4001749 - DNA, 25 bp, Homo sapien
cagttgtattcacaggataagtgca

SEQ ID NO: 4001750 - DNA, 25 bp, Homo sapien
tatatcaagtggcaagctgacctca

SEQ ID NO: 4001751 - DNA, 25 bp, Homo sapien
ttgcaaataattcagggcatttgtc

SEQ ID NO: 4001752 - DNA, 25 bp, Homo sapien
cattagcaattctatttgcaaataa

SEQ ID NO: 4001753 - DNA, 25 bp, Homo sapien
tgcaaataattcagggcatttgtca

SEQ ID NO: 4001754 - DNA, 25 bp, Homo sapien
gaataaacaatgtgtgactatatga

SEQ ID NO: 4001755 - DNA, 25 bp, Homo sapien
tgaaactatttcatttgtaaacaag

SEQ ID NO: 4001756 - DNA, 25 bp, Homo sapien
tacacatcagtggtcgacatagcaa

SEQ ID NO: 4001757 - DNA, 25 bp, Homo sapien
acaatgtgtgactatatgacagctg

SEQ ID NO: 4001758 - DNA, 25 bp, Homo sapien
tcagggtagatccaagagtgcctcg

SEQ ID NO: 4001759 - DNA, 25 bp, Homo sapien
cgtaatggcccaaaacagactgagg

SEQ ID NO: 4001760 - DNA, 25 bp, Homo sapien
catacggctgttggtgcatgtcacc

SEQ ID NO: 4001761 - DNA, 25 bp, Homo sapien
taatgcaggcgactcagaaatgaca

SEQ ID NO: 4001762 - DNA, 25 bp, Homo sapien
tacataggcgtcttcgggataaact

SEQ ID NO: 4001763 - DNA, 25 bp, Homo sapien
tatgcagctctgaacaagaccatcg

SEQ ID NO: 4001764 - DNA, 25 bp, Homo sapien
tcttagcagggcactattggacatc

SEQ ID NO: 4001765 - DNA, 25 bp, Homo sapien
gcatgaagccgtgtgcaaaagagcc

SEQ ID NO: 4001766 - DNA, 25 bp, Homo sapien
gatagctgtcattcaccgcctggga

SEQ ID NO: 4001767 - DNA, 25 bp, Homo sapien
tcaaggacgaccgaagatagctgtc

SEQ ID NO: 4001768 - DNA, 25 bp, Homo sapien
tgtccctggaacagtacgatgccgt

SEQ ID NO: 4001769 - DNA, 25 bp, Homo sapien
tgtacacgcgtctattgctgcagga

SEQ ID NO: 4001770 - DNA, 25 bp, Homo sapien
tagctccctaggtttgtcgacaatg

SEQ ID NO: 4001771 - DNA, 25 bp, Homo sapien
tcgtaggaatgctgacggctaatcc

SEQ ID NO: 4001772 - DNA, 25 bp, Homo sapien
ctccgggagggcctgctaaggtcta

SEQ ID NO: 4001773 - DNA, 25 bp, Homo sapien
gggacactaaacaggctgccgtaaa

SEQ ID NO: 4001774 - DNA, 25 bp, Homo sapien
agttctgccggtatcgctcgctggt

SEQ ID NO: 4001775 - DNA, 25 bp, Homo sapien
tatactggtcgttgttggaaagccc

SEQ ID NO: 4001776 - DNA, 25 bp, Homo sapien
ggttcattggcagcgtggagtcccc

SEQ ID NO: 4001777 - DNA, 25 bp, Homo sapien
gaatcctggcgtatggaatccacgg

SEQ ID NO: 4001778 - DNA, 25 bp, Homo sapien
agatcccagtgagccacagggtctc

SEQ ID NO: 4001779 - DNA, 25 bp, Homo sapien
aagagcaacccaggccggtcggagc

SEQ ID NO: 4001780 - DNA, 25 bp, Homo sapien
agccagcatgtagaatacgcccgcc

SEQ ID NO: 4001781 - DNA, 25 bp, Homo sapien
gcccgtgaaacagaagcgcagcttc

SEQ ID NO: 4001782 - DNA, 25 bp, Homo sapien
tgcactttggggcagacgcttctgg

SEQ ID NO: 4001783 - DNA, 25 bp, Homo sapien
cagtgaggaccagaacatgcacttt

SEQ ID NO: 4001784 - DNA, 25 bp, Homo sapien
tgtgcaactcacagctatgtaacct

SEQ ID NO: 4001785 - DNA, 25 bp, Homo sapien
ggacagatcacaacattcacaggca

SEQ ID NO: 4001786 - DNA, 25 bp, Homo sapien
cagatagtctttggcctctaagagc

SEQ ID NO: 4001787 - DNA, 25 bp, Homo sapien
cagtagttacggcaaaatgagatga

SEQ ID NO: 4001788 - DNA, 25 bp, Homo sapien
acaaggagtgttgagatcagagagc

SEQ ID NO: 4001789 - DNA, 25 bp, Homo sapien
aagcacctgacccaaggcagtgatg

SEQ ID NO: 4001790 - DNA, 25 bp, Homo sapien
cgaggagaagcacggatggctctga

SEQ ID NO: 4001791 - DNA, 25 bp, Homo sapien
gagaagcacggatggctctgagaca

SEQ ID NO: 4001792 - DNA, 25 bp, Homo sapien
gccgaggagaagcacggatggctct

SEQ ID NO: 4001793 - DNA, 25 bp, Homo sapien
cggagccgaggagaagcacggatgg

SEQ ID NO: 4001794 - DNA, 25 bp, Homo sapien
tagatctggtggacatggaagaacc

SEQ ID NO: 4001795 - DNA, 25 bp, Homo sapien
ctgactattatgtgggaacgcctga

SEQ ID NO: 4001796 - DNA, 25 bp, Homo sapien
tggtactaatttctgggcccctgaa

SEQ ID NO: 4001797 - DNA, 25 bp, Homo sapien
ttaaattcttaggactgcagcagca

SEQ ID NO: 4001798 - DNA, 25 bp, Homo sapien
tcctgtttgctgaatagttcatccc

SEQ ID NO: 4001799 - DNA, 25 bp, Homo sapien
ttgttgtaatgctggaaataagact

SEQ ID NO: 4001800 - DNA, 25 bp, Homo sapien
agactcctgtttgctgaatagttca

SEQ ID NO: 4001801 - DNA, 25 bp, Homo sapien
tgtaatgctggaaataagactcctg

SEQ ID NO: 4001802 - DNA, 25 bp, Homo sapien
gcctctaagatctcacagcaaaaag

SEQ ID NO: 4001803 - DNA, 25 bp, Homo sapien
tgttgtacgcctctaagatctcaca

SEQ ID NO: 4001804 - DNA, 25 bp, Homo sapien
tacgcctctaagatctcacagcaaa

SEQ ID NO: 4001805 - DNA, 25 bp, Homo sapien
tgtacgcctctaagatctcacagca

SEQ ID NO: 4001806 - DNA, 25 bp, Homo sapien
acatgagttgccatgttggtacaac

SEQ ID NO: 4001807 - DNA, 25 bp, Homo sapien
tgactccaccgtgagtcatgcctga

SEQ ID NO: 4001808 - DNA, 25 bp, Homo sapien
taagtctaggaaagagtctttgacc

SEQ ID NO: 4001809 - DNA, 25 bp, Homo sapien
ttcctccacgggataagaacatgag

SEQ ID NO: 4001810 - DNA, 25 bp, Homo sapien
ggcaattccataaccggtggtggca

SEQ ID NO: 4001811 - DNA, 25 bp, Homo sapien
tgaagcaaggccaggtcgatctgcc

SEQ ID NO: 4001812 - DNA, 25 bp, Homo sapien
caaagatgtacccactcccgatggt

SEQ ID NO: 4001813 - DNA, 25 bp, Homo sapien
tgtaattcaagactgcggcatcgta

SEQ ID NO: 4001814 - DNA, 25 bp, Homo sapien
gaggaacagccagcaatagtgagac

SEQ ID NO: 4001815 - DNA, 25 bp, Homo sapien
aacctagagcttggcttgatgacag

SEQ ID NO: 4001816 - DNA, 25 bp, Homo sapien
ctggagcaacctagagcttggcttg

SEQ ID NO: 4001817 - DNA, 25 bp, Homo sapien
agaggaacagccagcaatagtgaga

SEQ ID NO: 4001818 - DNA, 25 bp, Homo sapien
gtctactccagtccatcggaagaca

SEQ ID NO: 4001819 - DNA, 25 bp, Homo sapien
cagtccatcggaagacatgtaggta

SEQ ID NO: 4001820 - DNA, 25 bp, Homo sapien
catcggaagacatgtaggtataggt

SEQ ID NO: 4001821 - DNA, 25 bp, Homo sapien
agaaaactcttgcccctaacatagt

SEQ ID NO: 4001822 - DNA, 25 bp, Homo sapien
ccactgggcaggaggacgttcagag

SEQ ID NO: 4001823 - DNA, 25 bp, Homo sapien
cactgggcaggaggacgttcagagg

SEQ ID NO: 4001824 - DNA, 25 bp, Homo sapien
aggaggacgttcagaggtcaggtct

SEQ ID NO: 4001825 - DNA, 25 bp, Homo sapien
tgggcaggaggacgttcagaggtca

SEQ ID NO: 4001826 - DNA, 25 bp, Homo sapien
gttattccgaatgtttctctccgtg

SEQ ID NO: 4001827 - DNA, 25 bp, Homo sapien
cactgtcccaaatcgaaaaggtggg

SEQ ID NO: 4001828 - DNA, 25 bp, Homo sapien
gatgcatgtagggatagttattccg

SEQ ID NO: 4001829 - DNA, 25 bp, Homo sapien
tcctttctgattaaatttggtcatg

SEQ ID NO: 4001830 - DNA, 25 bp, Homo sapien
cagatggagaggaaagcaaggtgac

SEQ ID NO: 4001831 - DNA, 25 bp, Homo sapien
ggagaggaaagcaaggtgaccttac

SEQ ID NO: 4001832 - DNA, 25 bp, Homo sapien
cctcagatggagaggaaagcaaggt

SEQ ID NO: 4001833 - DNA, 25 bp, Homo sapien
atggagaggaaagcaaggtgacctt

SEQ ID NO: 4001834 - DNA, 25 bp, Homo sapien
gaatatgacagcgaagaaggcccat

SEQ ID NO: 4001835 - DNA, 25 bp, Homo sapien
caggcacggagttattgaacaccag

SEQ ID NO: 4001836 - DNA, 25 bp, Homo sapien
tccaattgtaaaagaaggcccatgg

SEQ ID NO: 4001837 - DNA, 25 bp, Homo sapien
gaggccggtcacttggtccacaaat

SEQ ID NO: 4001838 - DNA, 25 bp, Homo sapien
ggcagaaacaatgagcagcatcaca

SEQ ID NO: 4001839 - DNA, 25 bp, Homo sapien
atcacccagacagaggcgctgaatg

SEQ ID NO: 4001840 - DNA, 25 bp, Homo sapien
acccagacagaggcgctgaatggtt

SEQ ID NO: 4001841 - DNA, 25 bp, Homo sapien
tttggctaagtttctgttgtatcca

SEQ ID NO: 4001842 - DNA, 25 bp, Homo sapien
gcagaaggtgagacggtgccattac

SEQ ID NO: 4001843 - DNA, 25 bp, Homo sapien
tcccgtttccacaaagggcacagag

SEQ ID NO: 4001844 - DNA, 25 bp, Homo sapien
ccatgactgcccgttgatagaccac

SEQ ID NO: 4001845 - DNA, 25 bp, Homo sapien
tgaaaccatgacactgattcccgtt

SEQ ID NO: 4001846 - DNA, 25 bp, Homo sapien
gaatatcaatgcagaaccccttgca

SEQ ID NO: 4001847 - DNA, 25 bp, Homo sapien
cagatagaggtcgtaagtaaacttc

SEQ ID NO: 4001848 - DNA, 25 bp, Homo sapien
cacagttctggaaagcttcttcaga

SEQ ID NO: 4001849 - DNA, 25 bp, Homo sapien
gcttcccattggtcaccagatagag

SEQ ID NO: 4001850 - DNA, 25 bp, Homo sapien
gtaccagccaccttgctgtattcac

SEQ ID NO: 4001851 - DNA, 25 bp, Homo sapien
tgtaccagccaccttgctgtattca

SEQ ID NO: 4001852 - DNA, 25 bp, Homo sapien
tgttttgtaccagccaccttgctgt

SEQ ID NO: 4001853 - DNA, 25 bp, Homo sapien
ttttgtaccagccaccttgctgtat

SEQ ID NO: 4001854 - DNA, 25 bp, Homo sapien
tgtatcaccttcattctatgttcct

SEQ ID NO: 4001855 - DNA, 25 bp, Homo sapien
tcatttgtatcaccttcattctatg

SEQ ID NO: 4001856 - DNA, 25 bp, Homo sapien
catttgtatcaccttcattctatgt

SEQ ID NO: 4001857 - DNA, 25 bp, Homo sapien
tttgtatcaccttcattctatgttc

SEQ ID NO: 4001858 - DNA, 25 bp, Homo sapien
gagatggttgtcatccggctcacag

SEQ ID NO: 4001859 - DNA, 25 bp, Homo sapien
tcaggctcagcgtatggttctccca

SEQ ID NO: 4001860 - DNA, 25 bp, Homo sapien
tttgacgaacttccgacatggcacg

SEQ ID NO: 4001861 - DNA, 25 bp, Homo sapien
tcctccagggtgacgatgctgagat

SEQ ID NO: 4001862 - DNA, 25 bp, Homo sapien
gctttcttccgccgctgatttctgg

SEQ ID NO: 4001863 - DNA, 25 bp, Homo sapien
tcttccgccgctgatttctggagag

SEQ ID NO: 4001864 - DNA, 25 bp, Homo sapien
gctgtgctttcttccgccgctgatt

SEQ ID NO: 4001865 - DNA, 25 bp, Homo sapien
ctgtgctttcttccgccgctgattt

SEQ ID NO: 4001866 - DNA, 25 bp, Homo sapien
gaggatagagcaactacaggcagta

SEQ ID NO: 4001867 - DNA, 25 bp, Homo sapien
gaagcactagatcccctgagtgcca

SEQ ID NO: 4001868 - DNA, 25 bp, Homo sapien
caggcagtatttgtgcattctaagc

SEQ ID NO: 4001869 - DNA, 25 bp, Homo sapien
gaagcacacggagttatttctgaag

SEQ ID NO: 4001870 - DNA, 25 bp, Homo sapien
tgaagaaaggcccacaaaatattaa

SEQ ID NO: 4001871 - DNA, 25 bp, Homo sapien
catatggcaatgactatggtacaca

SEQ ID NO: 4001872 - DNA, 25 bp, Homo sapien
gaaatgcgtgggagaaagaagcact

SEQ ID NO: 4001873 - DNA, 25 bp, Homo sapien
actgtgagcccctttattgcccatg

SEQ ID NO: 4001874 - DNA, 25 bp, Homo sapien
gacctttcctactgggatttgagaa

SEQ ID NO: 4001875 - DNA, 25 bp, Homo sapien
cttcctcagtgaaggataagtcttt

SEQ ID NO: 4001876 - DNA, 25 bp, Homo sapien
agcctggggtgcacctggtagcctt

SEQ ID NO: 4001877 - DNA, 25 bp, Homo sapien
ggtctttgttcagcacaatcaccac

SEQ ID NO: 4001878 - DNA, 25 bp, Homo sapien
gccatcccatgtaacattgaccata

SEQ ID NO: 4001879 - DNA, 25 bp, Homo sapien
tattcatcacaagaagcctctctgc

SEQ ID NO: 4001880 - DNA, 25 bp, Homo sapien
gctgtcttttgacggcagcaccttc

SEQ ID NO: 4001881 - DNA, 25 bp, Homo sapien
ttgcgctgtcttttgacggcagcac

SEQ ID NO: 4001882 - DNA, 25 bp, Homo sapien
ctctgaatatccttgcgctgtcttt

SEQ ID NO: 4001883 - DNA, 25 bp, Homo sapien
gtcttttgacggcagcaccttcctc

SEQ ID NO: 4001884 - DNA, 25 bp, Homo sapien
cccaatcagatgtacagcaaaggcc

SEQ ID NO: 4001885 - DNA, 25 bp, Homo sapien
gcttggcctctgaggtgcctgattt

SEQ ID NO: 4001886 - DNA, 25 bp, Homo sapien
ctgagttcagagtcccaatcagatg

SEQ ID NO: 4001887 - DNA, 25 bp, Homo sapien
atttactttgagactcagctgtttt

SEQ ID NO: 4001888 - DNA, 25 bp, Homo sapien
cactttgggagacaacaagcccttt

SEQ ID NO: 4001889 - DNA, 25 bp, Homo sapien
caatgagtatgtaagcaagcaaaca

SEQ ID NO: 4001890 - DNA, 25 bp, Homo sapien
tttcagtgcgtatttccaacaatga

SEQ ID NO: 4001891 - DNA, 25 bp, Homo sapien
caaagtctaatgtgacttttcttac

SEQ ID NO: 4001892 - DNA, 25 bp, Homo sapien
ggatgagctccgtgttcccagagac

SEQ ID NO: 4001893 - DNA, 25 bp, Homo sapien
caaactggaagaaggtagacgtcgg

SEQ ID NO: 4001894 - DNA, 25 bp, Homo sapien
cagaagaaatcatacccggtgaggc

SEQ ID NO: 4001895 - DNA, 25 bp, Homo sapien
ggctgtagtcccagtcatcgtagga

SEQ ID NO: 4001896 - DNA, 25 bp, Homo sapien
tggtttatatagaagcacaaactgc

SEQ ID NO: 4001897 - DNA, 25 bp, Homo sapien
gcaggaggtggtttatatagaagca

SEQ ID NO: 4001898 - DNA, 25 bp, Homo sapien
gaggtggtttatatagaagcacaaa

SEQ ID NO: 4001899 - DNA, 25 bp, Homo sapien
tttatatagaagcacaaactgcgtc

SEQ ID NO: 4001900 - DNA, 25 bp, Homo sapien
tgaatgctctcaccctagaaagtgg

SEQ ID NO: 4001901 - DNA, 25 bp, Homo sapien
caaagttggtattgctggcagggaa

SEQ ID NO: 4001902 - DNA, 25 bp, Homo sapien
acttatgtcaggttaaagggcctct

SEQ ID NO: 4001903 - DNA, 25 bp, Homo sapien
tattcagagcataagggagagtcac

SEQ ID NO: 4001904 - DNA, 25 bp, Homo sapien
ggaacagatgcttaaaccacgttgt

SEQ ID NO: 4001905 - DNA, 25 bp, Homo sapien
cagatgcttaaaccacgttgttgac

SEQ ID NO: 4001906 - DNA, 25 bp, Homo sapien
gcttaaaccacgttgttgacttgtg

SEQ ID NO: 4001907 - DNA, 25 bp, Homo sapien
ctgtatggaacagatgcttaaacca

SEQ ID NO: 4001908 - DNA, 25 bp, Homo sapien
aatgccaactaaacagaaggtatgc

SEQ ID NO: 4001909 - DNA, 25 bp, Homo sapien
tgccaactaaacagaaggtatgcct

SEQ ID NO: 4001910 - DNA, 25 bp, Homo sapien
gcaaaaatgccaactaaacagaagg

SEQ ID NO: 4001911 - DNA, 25 bp, Homo sapien
aaaatgccaactaaacagaaggtat

SEQ ID NO: 4001912 - DNA, 25 bp, Homo sapien
gactgcaaaaggtggtggatcagca

SEQ ID NO: 4001913 - DNA, 25 bp, Homo sapien
cttctgactgcaaaaggtggtggat

SEQ ID NO: 4001914 - DNA, 25 bp, Homo sapien
tgcaaaaggtggtggatcagcatct

SEQ ID NO: 4001915 - DNA, 25 bp, Homo sapien
aaaggtggtggatcagcatcttgca

SEQ ID NO: 4001916 - DNA, 25 bp, Homo sapien
tctcacttttccctgcatgagctct

SEQ ID NO: 4001917 - DNA, 25 bp, Homo sapien
ttccctgcatgagctcttcatcttt

SEQ ID NO: 4001918 - DNA, 25 bp, Homo sapien
aaatctcacttttccctgcatgagc

SEQ ID NO: 4001919 - DNA, 25 bp, Homo sapien
tcttcacaaatctcacttttccctg

SEQ ID NO: 4001920 - DNA, 25 bp, Homo sapien
gggtaatgagcaagagctccatgaa

SEQ ID NO: 4001921 - DNA, 25 bp, Homo sapien
atctgtaacagggtaatgagcaaga

SEQ ID NO: 4001922 - DNA, 25 bp, Homo sapien
gggtatctgtaacagggtaatgagc

SEQ ID NO: 4001923 - DNA, 25 bp, Homo sapien
aacagggtaatgagcaagagctcca

SEQ ID NO: 4001924 - DNA, 25 bp, Homo sapien
gaagttgtctatctgctgggggcgg

SEQ ID NO: 4001925 - DNA, 25 bp, Homo sapien
gcggtagttgttgacagctgtgcat

SEQ ID NO: 4001926 - DNA, 25 bp, Homo sapien
tgttgacagctgtgcatggcatccc

SEQ ID NO: 4001927 - DNA, 25 bp, Homo sapien
ctgctgggggcggtagttgttgaca

SEQ ID NO: 4001928 - DNA, 25 bp, Homo sapien
ctttaaggcaagtggagtaggtaga

SEQ ID NO: 4001929 - DNA, 25 bp, Homo sapien
cagtggaggacgttccaacactttc

SEQ ID NO: 4001930 - DNA, 25 bp, Homo sapien
agcacaacctcagagtggtccagag

SEQ ID NO: 4001931 - DNA, 25 bp, Homo sapien
ctgggactttaaggcaagtggagta

SEQ ID NO: 4001932 - DNA, 25 bp, Homo sapien
tcagtttcaattacatgcattgctt

SEQ ID NO: 4001933 - DNA, 25 bp, Homo sapien
tggtcaggcccttgcacttctccag

SEQ ID NO: 4001934 - DNA, 25 bp, Homo sapien
cagacaactgagatgctgtacgtct

SEQ ID NO: 4001935 - DNA, 25 bp, Homo sapien
gatgctgtacgtcttggtcaggccc

SEQ ID NO: 4001936 - DNA, 25 bp, Homo sapien
tgtaccagctccaacataaagagcc

SEQ ID NO: 4001937 - DNA, 25 bp, Homo sapien
cagaaacgtcatctctctaaggcag

SEQ ID NO: 4001938 - DNA, 25 bp, Homo sapien
atgggtgtcccttcacttcaaatgt

SEQ ID NO: 4001939 - DNA, 25 bp, Homo sapien
catttgccgtctctgtccttataca

SEQ ID NO: 4001940 - DNA, 25 bp, Homo sapien
aatatgctctagtctctcgccctgc

SEQ ID NO: 4001941 - DNA, 25 bp, Homo sapien
ttagttgatgtcataggcttcttca

SEQ ID NO: 4001942 - DNA, 25 bp, Homo sapien
gacagttccttgccaattggccgaa

SEQ ID NO: 4001943 - DNA, 25 bp, Homo sapien
acagttccttgccaattggccgaag

SEQ ID NO: 4001944 - DNA, 25 bp, Homo sapien
tgatgtcataggcttcttcaagttg

SEQ ID NO: 4001945 - DNA, 25 bp, Homo sapien
tcctggagtctaatcctgtctgtct

SEQ ID NO: 4001946 - DNA, 25 bp, Homo sapien
ggagggttgcctgaacactagctca

SEQ ID NO: 4001947 - DNA, 25 bp, Homo sapien
actagctcacgaagtggccgctggg

SEQ ID NO: 4001948 - DNA, 25 bp, Homo sapien
gcctttacttctgctacactgcaca

SEQ ID NO: 4001949 - DNA, 25 bp, Homo sapien
gacttggaaacatccatagctcctt

SEQ ID NO: 4001950 - DNA, 25 bp, Homo sapien
tcaatgagcccaggacaatctttca

SEQ ID NO: 4001951 - DNA, 25 bp, Homo sapien
tccatagctccttcaatgagcccag

SEQ ID NO: 4001952 - DNA, 25 bp, Homo sapien
tctggggacttggaaacatccatag

SEQ ID NO: 4001953 - DNA, 25 bp, Homo sapien
actgccctgcgaggcaacctcgagg

SEQ ID NO: 4001954 - DNA, 25 bp, Homo sapien
tgtgctctgccctcggttgctactg

SEQ ID NO: 4001955 - DNA, 25 bp, Homo sapien
gcaacctcgaggctgggaatctcct

SEQ ID NO: 4001956 - DNA, 25 bp, Homo sapien
catgtccccatggagaatgcagctg

SEQ ID NO: 4001957 - DNA, 25 bp, Homo sapien
tgggcatccccatagccttgtattc

SEQ ID NO: 4001958 - DNA, 25 bp, Homo sapien
cctgggcatccccatagccttgtat

SEQ ID NO: 4001959 - DNA, 25 bp, Homo sapien
ctcctgggcatccccatagccttgt

SEQ ID NO: 4001960 - DNA, 25 bp, Homo sapien
gggcatccccatagccttgtattcc

SEQ ID NO: 4001961 - DNA, 25 bp, Homo sapien
aagcaagggccagattgttgaagcc

SEQ ID NO: 4001962 - DNA, 25 bp, Homo sapien
gcaagggccagattgttgaagccat

SEQ ID NO: 4001963 - DNA, 25 bp, Homo sapien
agacaagcaagggccagattgttga

SEQ ID NO: 4001964 - DNA, 25 bp, Homo sapien
acaagcaagggccagattgttgaag

SEQ ID NO: 4001965 - DNA, 25 bp, Homo sapien
tatatcagctcgaccaattaagtgg

SEQ ID NO: 4001966 - DNA, 25 bp, Homo sapien
tgagcccctgaatcgtcacttgtca

SEQ ID NO: 4001967 - DNA, 25 bp, Homo sapien
ggattcagtttctgctattcaggga

SEQ ID NO: 4001968 - DNA, 25 bp, Homo sapien
cacatttgacttcagacgagtaaga

SEQ ID NO: 4001969 - DNA, 25 bp, Homo sapien
gaggtagacctaacttcagccctga

SEQ ID NO: 4001970 - DNA, 25 bp, Homo sapien
gcagcatggcgaaccatctgatcag

SEQ ID NO: 4001971 - DNA, 25 bp, Homo sapien
atcagtggcggcaccggctacgtgc

SEQ ID NO: 4001972 - DNA, 25 bp, Homo sapien
ccaggactggctcaccgtgcagcag

SEQ ID NO: 4001973 - DNA, 25 bp, Homo sapien
cggaagatcatgctgaagacaccac

SEQ ID NO: 4001974 - DNA, 25 bp, Homo sapien
ccggaagatcatgctgaagacacca

SEQ ID NO: 4001975 - DNA, 25 bp, Homo sapien
gatctcttcccctatggacactgag

SEQ ID NO: 4001976 - DNA, 25 bp, Homo sapien
cttcccctatggacactgagacaga

SEQ ID NO: 4001977 - DNA, 25 bp, Homo sapien
tccaggccaacgaggtgcataaggt

SEQ ID NO: 4001978 - DNA, 25 bp, Homo sapien
ccaacgaggtgcataaggtcaagaa

SEQ ID NO: 4001979 - DNA, 25 bp, Homo sapien
gttccaggccaacgaggtgcataag

SEQ ID NO: 4001980 - DNA, 25 bp, Homo sapien
caggccaacgaggtgcataaggtca

SEQ ID NO: 4001981 - DNA, 25 bp, Homo sapien
tcttgggcatctattagccattgag

SEQ ID NO: 4001982 - DNA, 25 bp, Homo sapien
cagccagtttcattaccgtatttca

SEQ ID NO: 4001983 - DNA, 25 bp, Homo sapien
gcagggtttactattttcttgggca

SEQ ID NO: 4001984 - DNA, 25 bp, Homo sapien
tccaagaaacagactacaggcgtgc

SEQ ID NO: 4001985 - DNA, 25 bp, Homo sapien
gtatgttcaagatgaatcacctgtg

SEQ ID NO: 4001986 - DNA, 25 bp, Homo sapien
gtggagctccttaccatcctcaaga

SEQ ID NO: 4001987 - DNA, 25 bp, Homo sapien
taaaagccttcctgacagcaacagg

SEQ ID NO: 4001988 - DNA, 25 bp, Homo sapien
cacctgccttggtacaagatgggaa

SEQ ID NO: 4001989 - DNA, 25 bp, Homo sapien
taggaatctatagccctgctgaaca

SEQ ID NO: 4001990 - DNA, 25 bp, Homo sapien
ggcacctgagatccagtaaatgaga

SEQ ID NO: 4001991 - DNA, 25 bp, Homo sapien
tataccatgacgataaaaagccgca

SEQ ID NO: 4001992 - DNA, 25 bp, Homo sapien
aaagccgcaggataagaagagtccc

SEQ ID NO: 4001993 - DNA, 25 bp, Homo sapien
taaagtcaatacaggctgggtgtgg

SEQ ID NO: 4001994 - DNA, 25 bp, Homo sapien
aaataaaaataagcaaccaggcatg

SEQ ID NO: 4001995 - DNA, 25 bp, Homo sapien
tgcactccatcttaggagacagagc

SEQ ID NO: 4001996 - DNA, 25 bp, Homo sapien
cttgaaccccggagggtgaggctgg

SEQ ID NO: 4001997 - DNA, 25 bp, Homo sapien
tgccggtcttaattgtactataaat

SEQ ID NO: 4001998 - DNA, 25 bp, Homo sapien
tccaattagatttgccggtcttaat

SEQ ID NO: 4001999 - DNA, 25 bp, Homo sapien
gaagatgactatgaagttgttgttc

SEQ ID NO: 4002000 - DNA, 25 bp, Homo sapien
gtgttgagctggtgaagatgactat

SEQ ID NO: 4002001 - DNA, 25 bp, Homo sapien
aggctgtgattcatcatagctctcc

SEQ ID NO: 4002002 - DNA, 25 bp, Homo sapien
ccaaaatcatactccaaggcgtggc

SEQ ID NO: 4002003 - DNA, 25 bp, Homo sapien
tctttagaagattggcccctcccat

SEQ ID NO: 4002004 - DNA, 25 bp, Homo sapien
agattggcccctcccatacaaaagc

SEQ ID NO: 4002005 - DNA, 25 bp, Homo sapien
tcagttttctgagcgcttcctggca

SEQ ID NO: 4002006 - DNA, 25 bp, Homo sapien
aagacctggttctcaccagggccag

SEQ ID NO: 4002007 - DNA, 25 bp, Homo sapien
tctgtgccccatggtactcgtaaat

SEQ ID NO: 4002008 - DNA, 25 bp, Homo sapien
gtgctcctgtgtacaccattttcag

SEQ ID NO: 4002009 - DNA, 25 bp, Homo sapien
cctggcagggcatcagtttccggcc

SEQ ID NO: 4002010 - DNA, 25 bp, Homo sapien
gcagggcatcagtttccggccttac

SEQ ID NO: 4002011 - DNA, 25 bp, Homo sapien
ggcagggcatcagtttccggcctta

SEQ ID NO: 4002012 - DNA, 25 bp, Homo sapien
tggcagggcatcagtttccggcctt

SEQ ID NO: 4002013 - DNA, 25 bp, Homo sapien
agttcgcgctctgtcacgtcgtggc

SEQ ID NO: 4002014 - DNA, 25 bp, Homo sapien
taaaatccagcatctgggctacggc

SEQ ID NO: 4002015 - DNA, 25 bp, Homo sapien
gccccacagtgttcgaagttcgcgc

SEQ ID NO: 4002016 - DNA, 25 bp, Homo sapien
aaacacgaggccgtggatgcgtgcc

SEQ ID NO: 4002017 - DNA, 25 bp, Homo sapien
caggcatggaactcagcagcaggat

SEQ ID NO: 4002018 - DNA, 25 bp, Homo sapien
gaattctggagagtaggcgcgtccc

SEQ ID NO: 4002019 - DNA, 25 bp, Homo sapien
ataggctgctgggatcacggactcc

SEQ ID NO: 4002020 - DNA, 25 bp, Homo sapien
gagaggaccaagttatcaaccccgc

SEQ ID NO: 4002021 - DNA, 25 bp, Homo sapien
acggccagccggagtcctcacatgt

SEQ ID NO: 4002022 - DNA, 25 bp, Homo sapien
tggtgcacacgcatgaactgcggca

SEQ ID NO: 4002023 - DNA, 25 bp, Homo sapien
tcctcagactgctgtagcggtgccc

SEQ ID NO: 4002024 - DNA, 25 bp, Homo sapien
agtgggccgcacacgctcataggca

SEQ ID NO: 4002025 - DNA, 25 bp, Homo sapien
tgcaaataccagcacggtcgtgcac

SEQ ID NO: 4002026 - DNA, 25 bp, Homo sapien
caaataccagcacggtcgtgcacgc

SEQ ID NO: 4002027 - DNA, 25 bp, Homo sapien
ataccagcacggtcgtgcacgcgtg

SEQ ID NO: 4002028 - DNA, 25 bp, Homo sapien
tgcacgcgtgccctgacgcgcgcct

SEQ ID NO: 4002029 - DNA, 25 bp, Homo sapien
tctccctctctagcctgatccctct

SEQ ID NO: 4002030 - DNA, 25 bp, Homo sapien
gcccaaggagccctgatctccctct

SEQ ID NO: 4002031 - DNA, 25 bp, Homo sapien
tcgggacggacgctgctggagccgg

SEQ ID NO: 4002032 - DNA, 25 bp, Homo sapien
actccaagaggcctcgacgttcctg

SEQ ID NO: 4002033 - DNA, 25 bp, Homo sapien
tgtagcccgagaaggtcgaggatgc

SEQ ID NO: 4002034 - DNA, 25 bp, Homo sapien
tagcccgagaaggtcgaggatgcag

SEQ ID NO: 4002035 - DNA, 25 bp, Homo sapien
gtcgaggatgcagtggggcgcgctg

SEQ ID NO: 4002036 - DNA, 25 bp, Homo sapien
atgcagtggggcgcgctgcgcgcac

SEQ ID NO: 4002037 - DNA, 25 bp, Homo sapien
cacggggggcggctatcccagccgg

SEQ ID NO: 4002038 - DNA, 25 bp, Homo sapien
ggctgtcccgcgctgtccgcatcgc

SEQ ID NO: 4002039 - DNA, 25 bp, Homo sapien
cgggtttagcgggttcccgcatgct

SEQ ID NO: 4002040 - DNA, 25 bp, Homo sapien
gtttagcgggttcccgcatgctgcg

SEQ ID NO: 4002041 - DNA, 25 bp, Homo sapien
ttggccacccacgagaagctaactg

SEQ ID NO: 4002042 - DNA, 25 bp, Homo sapien
ctgcagtctgcagtgctcacaagcc

SEQ ID NO: 4002043 - DNA, 25 bp, Homo sapien
tgagtttgtgacgagccagcagtag

SEQ ID NO: 4002044 - DNA, 25 bp, Homo sapien
gagggaggtggatctttcccacgca

SEQ ID NO: 4002045 - DNA, 25 bp, Homo sapien
atgatccggccaagccctaggagct

SEQ ID NO: 4002046 - DNA, 25 bp, Homo sapien
tggacaccctggttcacagcactgg

SEQ ID NO: 4002047 - DNA, 25 bp, Homo sapien
tctcctaggtgggtcgagacagacc

SEQ ID NO: 4002048 - DNA, 25 bp, Homo sapien
agcgcacggcggcaaataaggccag

SEQ ID NO: 4002049 - DNA, 25 bp, Homo sapien
gtgcggacacccaatagacacagtg

SEQ ID NO: 4002050 - DNA, 25 bp, Homo sapien
ctctagcagtcctccggcctcagta

SEQ ID NO: 4002051 - DNA, 25 bp, Homo sapien
cggacacccaatagacacagtgcat

SEQ ID NO: 4002052 - DNA, 25 bp, Homo sapien
tctagcagtcctccggcctcagtat

SEQ ID NO: 4002053 - DNA, 25 bp, Homo sapien
actggctctgcaggtggagacccga

SEQ ID NO: 4002054 - DNA, 25 bp, Homo sapien
ctatgactggctctgcaggtggaga

SEQ ID NO: 4002055 - DNA, 25 bp, Homo sapien
tatgactggctctgcaggtggagac

SEQ ID NO: 4002056 - DNA, 25 bp, Homo sapien
ctctgcaggtggagacccgagaaac

SEQ ID NO: 4002057 - DNA, 25 bp, Homo sapien
ctgggaacaggtttgaatccaacat

SEQ ID NO: 4002058 - DNA, 25 bp, Homo sapien
tttgtgatgtcaagcagatgcaatc

SEQ ID NO: 4002059 - DNA, 25 bp, Homo sapien
gatacccactgaagttagactccta

SEQ ID NO: 4002060 - DNA, 25 bp, Homo sapien
gaagtgcagctactataccaggcaa

SEQ ID NO: 4002061 - DNA, 25 bp, Homo sapien
ccttgaagcaataactcgccgtgag

SEQ ID NO: 4002062 - DNA, 25 bp, Homo sapien
gaaagattccacgtcctaggtggcc

SEQ ID NO: 4002063 - DNA, 25 bp, Homo sapien
gaggtctcaatagggccttccagca

SEQ ID NO: 4002064 - DNA, 25 bp, Homo sapien
agtcccggatccgtgcagctcgttg

SEQ ID NO: 4002065 - DNA, 25 bp, Homo sapien
tgagcggcaactccaagtcccggat

SEQ ID NO: 4002066 - DNA, 25 bp, Homo sapien
ggaaggatgtgtcctggtagtggga

SEQ ID NO: 4002067 - DNA, 25 bp, Homo sapien
gatgtgtcctggtagtgggatgtcc

SEQ ID NO: 4002068 - DNA, 25 bp, Homo sapien
gtgtcctggtagtgggatgtcccat

SEQ ID NO: 4002069 - DNA, 25 bp, Homo sapien
cctggtgttttattaagagtggaag

SEQ ID NO: 4002070 - DNA, 25 bp, Homo sapien
tcagctgggggtgggcgtagggaga

SEQ ID NO: 4002071 - DNA, 25 bp, Homo sapien
cagctgggggtgggcgtagggagac

SEQ ID NO: 4002072 - DNA, 25 bp, Homo sapien
tgcgtcgtcgctctaggtacgttgg

SEQ ID NO: 4002073 - DNA, 25 bp, Homo sapien
ttaacggctgcggttcgaagtggct

SEQ ID NO: 4002074 - DNA, 25 bp, Homo sapien
tcagcaggtcctggccggaccagca

SEQ ID NO: 4002075 - DNA, 25 bp, Homo sapien
aagtggctgtgggtattgctgcggc

SEQ ID NO: 4002076 - DNA, 25 bp, Homo sapien
ggtggcggctctaggagcgtcggtc

SEQ ID NO: 4002077 - DNA, 25 bp, Homo sapien
ggctctaggagcgtcggtcgcctct

SEQ ID NO: 4002078 - DNA, 25 bp, Homo sapien
taggagcgtcggtcgcctctctgag

SEQ ID NO: 4002079 - DNA, 25 bp, Homo sapien
agcgtcggtcgcctctctgagggcc

SEQ ID NO: 4002080 - DNA, 25 bp, Homo sapien
gccctgactgaaaagcgtccgcggg

SEQ ID NO: 4002081 - DNA, 25 bp, Homo sapien
gggcgcgtctccaccgttttcgcag

SEQ ID NO: 4002082 - DNA, 25 bp, Homo sapien
gggccgtctgacaggtccgggaaga

SEQ ID NO: 4002083 - DNA, 25 bp, Homo sapien
gacgtttgcggcgaagctgccctga

SEQ ID NO: 4002084 - DNA, 25 bp, Homo sapien
tattgtagccagtaaatgacctgcg

SEQ ID NO: 4002085 - DNA, 25 bp, Homo sapien
tacatgagccagtgccttattggaa

SEQ ID NO: 4002086 - DNA, 25 bp, Homo sapien
tgtacagaccacatcctaagattga

SEQ ID NO: 4002087 - DNA, 25 bp, Homo sapien
taagattgacttctgcctcaacaga

SEQ ID NO: 4002088 - DNA, 25 bp, Homo sapien
tgaaatctggtacgaaactattgca

SEQ ID NO: 4002089 - DNA, 25 bp, Homo sapien
tctggtacgaaactattgcatgatc

SEQ ID NO: 4002090 - DNA, 25 bp, Homo sapien
acttggtatcttgaaatctggtacg

SEQ ID NO: 4002091 - DNA, 25 bp, Homo sapien
cgaaactattgcatgatccctgcac

SEQ ID NO: 4002092 - DNA, 25 bp, Homo sapien
ctcttatagtgagtgtgcacaatct

SEQ ID NO: 4002093 - DNA, 25 bp, Homo sapien
gtgagtgtgcacaatctatttcatt

SEQ ID NO: 4002094 - DNA, 25 bp, Homo sapien
tagtgagtgtgcacaatctatttca

SEQ ID NO: 4002095 - DNA, 25 bp, Homo sapien
cttatagtgagtgtgcacaatctat

SEQ ID NO: 4002096 - DNA, 25 bp, Homo sapien
gactgcacattctaagttgacctga

SEQ ID NO: 4002097 - DNA, 25 bp, Homo sapien
aagggtgctgctcatgtcattcacg

SEQ ID NO: 4002098 - DNA, 25 bp, Homo sapien
gacctgattggctatttgtggatat

SEQ ID NO: 4002099 - DNA, 25 bp, Homo sapien
aaatgctcggttcgcaaagtgaaac

SEQ ID NO: 4002100 - DNA, 25 bp, Homo sapien
tcacatgctaagtatgatagataat

SEQ ID NO: 4002101 - DNA, 25 bp, Homo sapien
tctttctatagaattgacctgtaaa

SEQ ID NO: 4002102 - DNA, 25 bp, Homo sapien
attgacctgtaaatcacatgctaag

SEQ ID NO: 4002103 - DNA, 25 bp, Homo sapien
agccaaccctatttctttctataga

SEQ ID NO: 4002104 - DNA, 25 bp, Homo sapien
gtcatggtggtttgtcagacccatc

SEQ ID NO: 4002105 - DNA, 25 bp, Homo sapien
tggtagttctggttctatagatcct

SEQ ID NO: 4002106 - DNA, 25 bp, Homo sapien
catgtggtagttctggttctataga

SEQ ID NO: 4002107 - DNA, 25 bp, Homo sapien
actggcatgagttagtatcttactg

SEQ ID NO: 4002108 - DNA, 25 bp, Homo sapien
cccattcctatgtcctgtatgttat

SEQ ID NO: 4002109 - DNA, 25 bp, Homo sapien
cattcctatgtcctgtatgttattg

SEQ ID NO: 4002110 - DNA, 25 bp, Homo sapien
gatagtttcctttgctgcgcagaat

SEQ ID NO: 4002111 - DNA, 25 bp, Homo sapien
cctttgctgcgcagaatctctttag

SEQ ID NO: 4002112 - DNA, 25 bp, Homo sapien
aggctagttgcctttgggtttgtag

SEQ ID NO: 4002113 - DNA, 25 bp, Homo sapien
ctgaagaggctagttgcctttgggt

SEQ ID NO: 4002114 - DNA, 25 bp, Homo sapien
tgggtttgtaggtccccacagggca

SEQ ID NO: 4002115 - DNA, 25 bp, Homo sapien
aagaggctagttgcctttgggtttg

SEQ ID NO: 4002116 - DNA, 25 bp, Homo sapien
aattgtttgaggaaacgatgatcag

SEQ ID NO: 4002117 - DNA, 25 bp, Homo sapien
ttgaggaaacgatgatcaggttaca

SEQ ID NO: 4002118 - DNA, 25 bp, Homo sapien
cgatgatcaggttacattgataaaa

SEQ ID NO: 4002119 - DNA, 25 bp, Homo sapien
ggaaacgatgatcaggttacattga

SEQ ID NO: 4002120 - DNA, 25 bp, Homo sapien
agtgacaacctatgcctccaaaggg

SEQ ID NO: 4002121 - DNA, 25 bp, Homo sapien
tggcccgggagtgacaacctatgcc

SEQ ID NO: 4002122 - DNA, 25 bp, Homo sapien
gagggagcaaattagacaggttaag

SEQ ID NO: 4002123 - DNA, 25 bp, Homo sapien
ttggaaggtgttggcccgggagtga

SEQ ID NO: 4002124 - DNA, 25 bp, Homo sapien
tgagtgtgatgggtctaccctttct

SEQ ID NO: 4002125 - DNA, 25 bp, Homo sapien
tttcttaacggtccagactgctgtc

SEQ ID NO: 4002126 - DNA, 25 bp, Homo sapien
ttttgatgaggacgtaatctccaga

SEQ ID NO: 4002127 - DNA, 25 bp, Homo sapien
gaccttgggtcctaagagaagacaa

SEQ ID NO: 4002128 - DNA, 25 bp, Homo sapien
tcctcttgggaggtagggctcttac

SEQ ID NO: 4002129 - DNA, 25 bp, Homo sapien
gggcttccccattgattgactactg

SEQ ID NO: 4002130 - DNA, 25 bp, Homo sapien
gttctattgaaagctgacacatcca

SEQ ID NO: 4002131 - DNA, 25 bp, Homo sapien
tttggatctccagtcaagaaacctg

SEQ ID NO: 4002132 - DNA, 25 bp, Homo sapien
gcgtcagtcacaatcacaagagcac

SEQ ID NO: 4002133 - DNA, 25 bp, Homo sapien
tcagctacaagcttggtggatgcct

SEQ ID NO: 4002134 - DNA, 25 bp, Homo sapien
agagaaactgttcctaacacctagg

SEQ ID NO: 4002135 - DNA, 25 bp, Homo sapien
tcctaatgccgctcctgtttctgtg

SEQ ID NO: 4002136 - DNA, 25 bp, Homo sapien
cagagtcctgtccggcagggacatt

SEQ ID NO: 4002137 - DNA, 25 bp, Homo sapien
gagtcctgtccggcagggacattta

SEQ ID NO: 4002138 - DNA, 25 bp, Homo sapien
ttcagagtcctgtccggcagggaca

SEQ ID NO: 4002139 - DNA, 25 bp, Homo sapien
agtcctgtccggcagggacatttaa

SEQ ID NO: 4002140 - DNA, 25 bp, Homo sapien
cccacagctttcttcgtaagaaggc

SEQ ID NO: 4002141 - DNA, 25 bp, Homo sapien
tcttcgtaagaaggcttttacttga

SEQ ID NO: 4002142 - DNA, 25 bp, Homo sapien
ttcgtaggtacagagccattcagtt

SEQ ID NO: 4002143 - DNA, 25 bp, Homo sapien
aaatccaattctttcgtaggtacag

SEQ ID NO: 4002144 - DNA, 25 bp, Homo sapien
taatagtccaattgaaaagtcttct

SEQ ID NO: 4002145 - DNA, 25 bp, Homo sapien
gaatcttgagtcagttaatagtcca

SEQ ID NO: 4002146 - DNA, 25 bp, Homo sapien
atttgtcatcagatcaaaataagtc

SEQ ID NO: 4002147 - DNA, 25 bp, Homo sapien
tatgagccttctaacccttccgaaa

SEQ ID NO: 4002148 - DNA, 25 bp, Homo sapien
gggtaacaactcataatgcactggg

SEQ ID NO: 4002149 - DNA, 25 bp, Homo sapien
tattgccaagagtagcccgtggtgt

SEQ ID NO: 4002150 - DNA, 25 bp, Homo sapien
gaaggcctatccaactgcaatacag

SEQ ID NO: 4002151 - DNA, 25 bp, Homo sapien
gataatgcagtatgtgtccttcgga

SEQ ID NO: 4002152 - DNA, 25 bp, Homo sapien
tgaagatacaatgcaggtgaaagaa

SEQ ID NO: 4002153 - DNA, 25 bp, Homo sapien
cataccaagacataacatagtcaag

SEQ ID NO: 4002154 - DNA, 25 bp, Homo sapien
ttcataccaagacataacatagtca

SEQ ID NO: 4002155 - DNA, 25 bp, Homo sapien
attcataccaagacataacatagtc

SEQ ID NO: 4002156 - DNA, 25 bp, Homo sapien
gataccagatggaaagtagatctac

SEQ ID NO: 4002157 - DNA, 25 bp, Homo sapien
ggaaagtagatctacacaaagaata

SEQ ID NO: 4002158 - DNA, 25 bp, Homo sapien
ttcaaatgatagtaaaagataccag

SEQ ID NO: 4002159 - DNA, 25 bp, Homo sapien
caatgcaagccaaaagacaattgaa

SEQ ID NO: 4002160 - DNA, 25 bp, Homo sapien
ccaacctgtttgagttgagaatgca

SEQ ID NO: 4002161 - DNA, 25 bp, Homo sapien
ctaagtgggctattcatttgtgctc

SEQ ID NO: 4002162 - DNA, 25 bp, Homo sapien
gatttcctaaatgctaccctttgat

SEQ ID NO: 4002163 - DNA, 25 bp, Homo sapien
ttttatgaaacgaaatggcttccca

SEQ ID NO: 4002164 - DNA, 25 bp, Homo sapien
aaatgcttcctatacctccagtggg

SEQ ID NO: 4002165 - DNA, 25 bp, Homo sapien
ttgagaaaaggctacggagtggccc

SEQ ID NO: 4002166 - DNA, 25 bp, Homo sapien
catgctcgtaacacagtcacacagt

SEQ ID NO: 4002167 - DNA, 25 bp, Homo sapien
aggagctagccagcctaaggacaaa

SEQ ID NO: 4002168 - DNA, 25 bp, Homo sapien
actgtgaggtccaaccctagccaat

SEQ ID NO: 4002169 - DNA, 25 bp, Homo sapien
tcgccattgctccatccgtgagtca

SEQ ID NO: 4002170 - DNA, 25 bp, Homo sapien
cagtaggggctacctgcgtcaggaa

SEQ ID NO: 4002171 - DNA, 25 bp, Homo sapien
cagtcagaatcagcttagactgtga

SEQ ID NO: 4002172 - DNA, 25 bp, Homo sapien
cacacaagttatatcagagctggaa

SEQ ID NO: 4002173 - DNA, 25 bp, Homo sapien
tacaaaggtttgacaacaacagcaa

SEQ ID NO: 4002174 - DNA, 25 bp, Homo sapien
ctgggaactcttactttgggagatt

SEQ ID NO: 4002175 - DNA, 25 bp, Homo sapien
gaggttcttatggtctccttcacag

SEQ ID NO: 4002176 - DNA, 25 bp, Homo sapien
tatgatgcagatctgtgatatgtca

SEQ ID NO: 4002177 - DNA, 25 bp, Homo sapien
ggccaacaattttcaactcgtgtca

SEQ ID NO: 4002178 - DNA, 25 bp, Homo sapien
tgtataccttctcagctcccatcag

SEQ ID NO: 4002179 - DNA, 25 bp, Homo sapien
tgtgtcatctaaaccctgtatacct

SEQ ID NO: 4002180 - DNA, 25 bp, Homo sapien
ttagagaagtgcaagaactcaatgc

SEQ ID NO: 4002181 - DNA, 25 bp, Homo sapien
tgcaatattctctttaccatcagcc

SEQ ID NO: 4002182 - DNA, 25 bp, Homo sapien
caatctcgaactatggttccaggaa

SEQ ID NO: 4002183 - DNA, 25 bp, Homo sapien
gccagattctactcattaatggata

SEQ ID NO: 4002184 - DNA, 25 bp, Homo sapien
cagtgccaatgtagcaagtctctaa

SEQ ID NO: 4002185 - DNA, 25 bp, Homo sapien
gaattgccttacaagtcagtcagct

SEQ ID NO: 4002186 - DNA, 25 bp, Homo sapien
tagagcccaacatccttgctggcgg

SEQ ID NO: 4002187 - DNA, 25 bp, Homo sapien
tccaggcctccacgttgatctcagt

SEQ ID NO: 4002188 - DNA, 25 bp, Homo sapien
tgacctgctggctaaatctgctaag

SEQ ID NO: 4002189 - DNA, 25 bp, Homo sapien
gccagggaacgagctcagcagatga

SEQ ID NO: 4002190 - DNA, 25 bp, Homo sapien
gaagctccgatgctctgggtcataa

SEQ ID NO: 4002191 - DNA, 25 bp, Homo sapien
tcaagtacaacgagacagaaagcca

SEQ ID NO: 4002192 - DNA, 25 bp, Homo sapien
tttgagacagagtcactgtgtcacc

SEQ ID NO: 4002193 - DNA, 25 bp, Homo sapien
aactctgcctcctggtttcaaggga

SEQ ID NO: 4002194 - DNA, 25 bp, Homo sapien
accatatctggctaatttttgtgtt

SEQ ID NO: 4002195 - DNA, 25 bp, Homo sapien
caaactctgcctcctggtttcaagg

SEQ ID NO: 4002196 - DNA, 25 bp, Homo sapien
catagccatgttctagcagtaacag

SEQ ID NO: 4002197 - DNA, 25 bp, Homo sapien
catcagcttttatcaactgcgttgg

SEQ ID NO: 4002198 - DNA, 25 bp, Homo sapien
gctataccgtgttgtcacatgccac

SEQ ID NO: 4002199 - DNA, 25 bp, Homo sapien
tacactgacattccgttgcaaactg

SEQ ID NO: 4002200 - DNA, 25 bp, Homo sapien
caaataatctgctaagccctgctat

SEQ ID NO: 4002201 - DNA, 25 bp, Homo sapien
gcttgtaaaccatataaaagcaaat

SEQ ID NO: 4002202 - DNA, 25 bp, Homo sapien
agtcaccgtgcccaactattttcac

SEQ ID NO: 4002203 - DNA, 25 bp, Homo sapien
gaaggatcaatagtgtggcggcaaa

SEQ ID NO: 4002204 - DNA, 25 bp, Homo sapien
tcttctccatgactacgaaatattt

SEQ ID NO: 4002205 - DNA, 25 bp, Homo sapien
agaatgttctactttatgccggaca

SEQ ID NO: 4002206 - DNA, 25 bp, Homo sapien
tctccatgactacgaaatatttatt

SEQ ID NO: 4002207 - DNA, 25 bp, Homo sapien
attttaggagcgttcttctccatga

SEQ ID NO: 4002208 - DNA, 25 bp, Homo sapien
tgccctagatgtcatcaccgttggg

SEQ ID NO: 4002209 - DNA, 25 bp, Homo sapien
accgttgggaacattagagtcttgc

SEQ ID NO: 4002210 - DNA, 25 bp, Homo sapien
atggcagcattctgccctagatgtc

SEQ ID NO: 4002211 - DNA, 25 bp, Homo sapien
tacattattatcttgatgagaaatc

SEQ ID NO: 4002212 - DNA, 25 bp, Homo sapien
cctagagcgccagcctgttcatgag

SEQ ID NO: 4002213 - DNA, 25 bp, Homo sapien
gagtttagtaacatcccgcgaggca

SEQ ID NO: 4002214 - DNA, 25 bp, Homo sapien
ggtctccgatgttcctgtattcagg

SEQ ID NO: 4002215 - DNA, 25 bp, Homo sapien
tcatcatcagtgaacacagagcgtc

SEQ ID NO: 4002216 - DNA, 25 bp, Homo sapien
cataaaatgcgcaaactacagttcc

SEQ ID NO: 4002217 - DNA, 25 bp, Homo sapien
taagcaccaagtgagggctgattct

SEQ ID NO: 4002218 - DNA, 25 bp, Homo sapien
gcaaccagccgggaaaatccatagg

SEQ ID NO: 4002219 - DNA, 25 bp, Homo sapien
catgtagccccgacgtttcttgtga

SEQ ID NO: 4002220 - DNA, 25 bp, Homo sapien
ctagtgagagtatctcatggaggca

SEQ ID NO: 4002221 - DNA, 25 bp, Homo sapien
caggtcaccctgtactgcattggtg

SEQ ID NO: 4002222 - DNA, 25 bp, Homo sapien
ttgcccacaatatgactagtgagag

SEQ ID NO: 4002223 - DNA, 25 bp, Homo sapien
tcctccatgagcttgggtagcatcc

SEQ ID NO: 4002224 - DNA, 25 bp, Homo sapien
tatttaaatagcacgaggtcccaca

SEQ ID NO: 4002225 - DNA, 25 bp, Homo sapien
taataataggcacgcgtaaagcagc

SEQ ID NO: 4002226 - DNA, 25 bp, Homo sapien
gaaaactccagctctatgggaccct

SEQ ID NO: 4002227 - DNA, 25 bp, Homo sapien
gaagagatatccatggtggccctaa

SEQ ID NO: 4002228 - DNA, 25 bp, Homo sapien
ggattacaagcatgagccactgtac

SEQ ID NO: 4002229 - DNA, 25 bp, Homo sapien
atgcaccaccacgcccagctcattt

SEQ ID NO: 4002230 - DNA, 25 bp, Homo sapien
tgcaccaccacgcccagctcatttt

SEQ ID NO: 4002231 - DNA, 25 bp, Homo sapien
tagagacaggttttaccattttggc

SEQ ID NO: 4002232 - DNA, 25 bp, Homo sapien
gacgagtctaaatctggcacgcagg

SEQ ID NO: 4002233 - DNA, 25 bp, Homo sapien
ggttaagaaatgtcctgccgagtgc

SEQ ID NO: 4002234 - DNA, 25 bp, Homo sapien
gatacagacagaatgccagggacta

SEQ ID NO: 4002235 - DNA, 25 bp, Homo sapien
cacttggaacttgggtgaaacctct

SEQ ID NO: 4002236 - DNA, 25 bp, Homo sapien
ctgtctgtataaatggaggccgcaa

SEQ ID NO: 4002237 - DNA, 25 bp, Homo sapien
gaggccgcaatcatgacacacagac

SEQ ID NO: 4002238 - DNA, 25 bp, Homo sapien
cgcgtttttgtcgtgaatgtcttca

SEQ ID NO: 4002239 - DNA, 25 bp, Homo sapien
gccttctctggtcacgggatagaat

SEQ ID NO: 4002240 - DNA, 25 bp, Homo sapien
tcctgattggaaagcaccctagaag

SEQ ID NO: 4002241 - DNA, 25 bp, Homo sapien
tttaaaccagaggatggtcccaggc

SEQ ID NO: 4002242 - DNA, 25 bp, Homo sapien
caggtttggacttgaccctggcccg

SEQ ID NO: 4002243 - DNA, 25 bp, Homo sapien
aaagtgctcctgcacctgaccggga

SEQ ID NO: 4002244 - DNA, 25 bp, Homo sapien
tggaccgcctgcagcgtggagtact

SEQ ID NO: 4002245 - DNA, 25 bp, Homo sapien
atgacattagctggatgatggaggt

SEQ ID NO: 4002246 - DNA, 25 bp, Homo sapien
tggaggttaggacaaacctctctcc

SEQ ID NO: 4002247 - DNA, 25 bp, Homo sapien
aatggtggagaggatcatggtggcc

SEQ ID NO: 4002248 - DNA, 25 bp, Homo sapien
gggttcaggcggtcgtctacatggt

SEQ ID NO: 4002249 - DNA, 25 bp, Homo sapien
gaaggggttcaggcggtcgtctaca

SEQ ID NO: 4002250 - DNA, 25 bp, Homo sapien
tgtggggtacacagcgaccgcagca

SEQ ID NO: 4002251 - DNA, 25 bp, Homo sapien
ccagccggcactgtggggtacacag

SEQ ID NO: 4002252 - DNA, 25 bp, Homo sapien
acaagggcagccaaggcgtcttcca

SEQ ID NO: 4002253 - DNA, 25 bp, Homo sapien
tgagcacaagggcagccaaggcgtc

SEQ ID NO: 4002254 - DNA, 25 bp, Homo sapien
aagggcagccaaggcgtcttccaga

SEQ ID NO: 4002255 - DNA, 25 bp, Homo sapien
agcacaagggcagccaaggcgtctt

SEQ ID NO: 4002256 - DNA, 25 bp, Homo sapien
gtccatttgactggacaatcctcga

SEQ ID NO: 4002257 - DNA, 25 bp, Homo sapien
tcgaccccttatctggaagacgagg

SEQ ID NO: 4002258 - DNA, 25 bp, Homo sapien
tggaagacgaggcaagaaccacctg

SEQ ID NO: 4002259 - DNA, 25 bp, Homo sapien
gactggacaatcctcgaccccttat

SEQ ID NO: 4002260 - DNA, 25 bp, Homo sapien
taaatcagaacgtcgggcattgaga

SEQ ID NO: 4002261 - DNA, 25 bp, Homo sapien
aaactgagcccttaagaagcctgcg

SEQ ID NO: 4002262 - DNA, 25 bp, Homo sapien
caatatggagcccaagtggtgaccc

SEQ ID NO: 4002263 - DNA, 25 bp, Homo sapien
tacagattacggttgcttggagagc

SEQ ID NO: 4002264 - DNA, 25 bp, Homo sapien
atgactgtgcaattcgtgttgttgg

SEQ ID NO: 4002265 - DNA, 25 bp, Homo sapien
gcaattcgtgttgttggtacatatt

SEQ ID NO: 4002266 - DNA, 25 bp, Homo sapien
tgaaagctgtcattgatgactgtgc

SEQ ID NO: 4002267 - DNA, 25 bp, Homo sapien
atattctccagacatctgcaaaaaa

SEQ ID NO: 4002268 - DNA, 25 bp, Homo sapien
gaaaggccgtccgttcatgatgcaa

SEQ ID NO: 4002269 - DNA, 25 bp, Homo sapien
tgatgatccatcaacgggagccgta

SEQ ID NO: 4002270 - DNA, 25 bp, Homo sapien
tctcccaaaggataagaggtggtcc

SEQ ID NO: 4002271 - DNA, 25 bp, Homo sapien
taaactctgccaagtgcccgaatgg

SEQ ID NO: 4002272 - DNA, 25 bp, Homo sapien
atgtggaaggcgatgatgaaagcaa

SEQ ID NO: 4002273 - DNA, 25 bp, Homo sapien
tgtggaaggcgatgatgaaagcaag

SEQ ID NO: 4002274 - DNA, 25 bp, Homo sapien
gatgtggaaggcgatgatgaaagca

SEQ ID NO: 4002275 - DNA, 25 bp, Homo sapien
tgatgtggaaggcgatgatgaaagc

SEQ ID NO: 4002276 - DNA, 25 bp, Homo sapien
cgtttaaagcccagagcgggatgtg

SEQ ID NO: 4002277 - DNA, 25 bp, Homo sapien
acgtttaaagcccagagcgggatgt

SEQ ID NO: 4002278 - DNA, 25 bp, Homo sapien
tcacgtttaaagcccagagcgggat

SEQ ID NO: 4002279 - DNA, 25 bp, Homo sapien
gtcacgtttaaagcccagagcggga

SEQ ID NO: 4002280 - DNA, 25 bp, Homo sapien
gaagagggtaagaaagagaaattca

SEQ ID NO: 4002281 - DNA, 25 bp, Homo sapien
ctgaagagggtaagaaagagaaatt

SEQ ID NO: 4002282 - DNA, 25 bp, Homo sapien
tgaagagggtaagaaagagaaattc

SEQ ID NO: 4002283 - DNA, 25 bp, Homo sapien
ccagctgggatgacacaaatgcata

SEQ ID NO: 4002284 - DNA, 25 bp, Homo sapien
cagggccattaactccagggtgata

SEQ ID NO: 4002285 - DNA, 25 bp, Homo sapien
acccagtttggtgctagtcagtctc

SEQ ID NO: 4002286 - DNA, 25 bp, Homo sapien
aaaagggctcatgtaccacgctgaa

SEQ ID NO: 4002287 - DNA, 25 bp, Homo sapien
tctctgcctcgtcccgcccctcact

SEQ ID NO: 4002288 - DNA, 25 bp, Homo sapien
ctgcctcgtcccgcccctcactcat

SEQ ID NO: 4002289 - DNA, 25 bp, Homo sapien
cagagtaacactctctgcctcgtcc

SEQ ID NO: 4002290 - DNA, 25 bp, Homo sapien
ctctctgcctcgtcccgcccctcac

SEQ ID NO: 4002291 - DNA, 25 bp, Homo sapien
cgagccccagtcaactttctttggc

SEQ ID NO: 4002292 - DNA, 25 bp, Homo sapien
ccgctttctggattggtggagtgca

SEQ ID NO: 4002293 - DNA, 25 bp, Homo sapien
ggagtgcatttattcaggccccggt

SEQ ID NO: 4002294 - DNA, 25 bp, Homo sapien
gaggaaacgccactgtccgctttct

SEQ ID NO: 4002295 - DNA, 25 bp, Homo sapien
catgcacttctatttcttggttaac

SEQ ID NO: 4002296 - DNA, 25 bp, Homo sapien
tcctgcttagggaaaagtgtctctt

SEQ ID NO: 4002297 - DNA, 25 bp, Homo sapien
tttccaaacaatactcatgcacttc

SEQ ID NO: 4002298 - DNA, 25 bp, Homo sapien
acctcgccaaagcaatcacttttaa

SEQ ID NO: 4002299 - DNA, 25 bp, Homo sapien
tgactgggctaattaagagagggcc

SEQ ID NO: 4002300 - DNA, 25 bp, Homo sapien
tagggcctggtgaaaaccatgcagc

SEQ ID NO: 4002301 - DNA, 25 bp, Homo sapien
tgcactggcccattcgctaaggttg

SEQ ID NO: 4002302 - DNA, 25 bp, Homo sapien
ttcctctcacatgcttagggcctgg

SEQ ID NO: 4002303 - DNA, 25 bp, Homo sapien
agtggctcaaacattgctcacggca

SEQ ID NO: 4002304 - DNA, 25 bp, Homo sapien
cccagctggagtttcaagttctaca

SEQ ID NO: 4002305 - DNA, 25 bp, Homo sapien
caggaagaaggatagtgctcccaga

SEQ ID NO: 4002306 - DNA, 25 bp, Homo sapien
gtttcctaagtagaggtgccgtcca

SEQ ID NO: 4002307 - DNA, 25 bp, Homo sapien
gagatgttcggcgtctggaggtccg

SEQ ID NO: 4002308 - DNA, 25 bp, Homo sapien
agctcccgctccaacggccagggag

SEQ ID NO: 4002309 - DNA, 25 bp, Homo sapien
gcgtctggaggtccgaggcaatctc

SEQ ID NO: 4002310 - DNA, 25 bp, Homo sapien
ctggaggtccgaggcaatctcccaa

SEQ ID NO: 4002311 - DNA, 25 bp, Homo sapien
ggctggtgagcagtcacccaggcca

SEQ ID NO: 4002312 - DNA, 25 bp, Homo sapien
ctggggagggccgggctggtgagca

SEQ ID NO: 4002313 - DNA, 25 bp, Homo sapien
gctggtgagcagtcacccaggccac

SEQ ID NO: 4002314 - DNA, 25 bp, Homo sapien
cgggctggtgagcagtcacccaggc

SEQ ID NO: 4002315 - DNA, 25 bp, Homo sapien
gacagacaaggtttaccagtgaagg

SEQ ID NO: 4002316 - DNA, 25 bp, Homo sapien
ggtggtttgttacccagcaagagct

SEQ ID NO: 4002317 - DNA, 25 bp, Homo sapien
taagatgccacttggaagacagaca

SEQ ID NO: 4002318 - DNA, 25 bp, Homo sapien
ttctgggccaaagcctcaagaagcc

SEQ ID NO: 4002319 - DNA, 25 bp, Homo sapien
gtccatcagtgtgttcgctgagtac

SEQ ID NO: 4002320 - DNA, 25 bp, Homo sapien
ctgagtacacagagcatgcgaggct

SEQ ID NO: 4002321 - DNA, 25 bp, Homo sapien
gagcatgcgaggctctttgcaggca

SEQ ID NO: 4002322 - DNA, 25 bp, Homo sapien
tgttcgctgagtacacagagcatgc

SEQ ID NO: 4002323 - DNA, 25 bp, Homo sapien
ggaagaatgtgaccccatgtcacac

SEQ ID NO: 4002324 - DNA, 25 bp, Homo sapien
ctgggaagaatgtgaccccatgtca

SEQ ID NO: 4002325 - DNA, 25 bp, Homo sapien
tggtataaacggatgctgatcatgc

SEQ ID NO: 4002326 - DNA, 25 bp, Homo sapien
gatcatgccactcgggcctgatgtg

SEQ ID NO: 4002327 - DNA, 25 bp, Homo sapien
ctctggagtacctaggacgacaggt

SEQ ID NO: 4002328 - DNA, 25 bp, Homo sapien
tcaaaacagtccctaactggtccat

SEQ ID NO: 4002329 - DNA, 25 bp, Homo sapien
gacacctgctcacactggtcatcat

SEQ ID NO: 4002330 - DNA, 25 bp, Homo sapien
gtccctaactggtccatccatggag

SEQ ID NO: 4002331 - DNA, 25 bp, Homo sapien
tggcatctgcaatgtgatgttccaa

SEQ ID NO: 4002332 - DNA, 25 bp, Homo sapien
tctttttaactgcagtaaaatactc

SEQ ID NO: 4002333 - DNA, 25 bp, Homo sapien
tgttctttttaactgcagtaaaata

SEQ ID NO: 4002334 - DNA, 25 bp, Homo sapien
tttaactgcagtaaaatactctgca

SEQ ID NO: 4002335 - DNA, 25 bp, Homo sapien
ctgcagtaaaatactctgcaaaatg

SEQ ID NO: 4002336 - DNA, 25 bp, Homo sapien
ctatcattggatattctattccaat

SEQ ID NO: 4002337 - DNA, 25 bp, Homo sapien
tattccaataatgctccgtgagcat

SEQ ID NO: 4002338 - DNA, 25 bp, Homo sapien
ttctattccaataatgctccgtgag

SEQ ID NO: 4002339 - DNA, 25 bp, Homo sapien
ttggatattctattccaataatgct

SEQ ID NO: 4002340 - DNA, 25 bp, Homo sapien
aattccccactgtattgccaaagcc

SEQ ID NO: 4002341 - DNA, 25 bp, Homo sapien
tgcacagagttgcttaataataacc

SEQ ID NO: 4002342 - DNA, 25 bp, Homo sapien
tacaggcgtgaggagcttgcattct

SEQ ID NO: 4002343 - DNA, 25 bp, Homo sapien
catcgctagatgataacctcctctg

SEQ ID NO: 4002344 - DNA, 25 bp, Homo sapien
ccaccagtggtaacacattttggaa

SEQ ID NO: 4002345 - DNA, 25 bp, Homo sapien
acattcataagatcaacaaaaaaac

SEQ ID NO: 4002346 - DNA, 25 bp, Homo sapien
tgccaccagtggtaacacattttgg

SEQ ID NO: 4002347 - DNA, 25 bp, Homo sapien
tgtgccaccagtggtaacacatttt

SEQ ID NO: 4002348 - DNA, 25 bp, Homo sapien
gttcttatttattcactgcaaattt

SEQ ID NO: 4002349 - DNA, 25 bp, Homo sapien
ggttcttatttattcactgcaaatt

SEQ ID NO: 4002350 - DNA, 25 bp, Homo sapien
tcttatttattcactgcaaatttct

SEQ ID NO: 4002351 - DNA, 25 bp, Homo sapien
ttggttcttatttattcactgcaaa

SEQ ID NO: 4002352 - DNA, 25 bp, Homo sapien
ctatgagcggtctgcactgagacgc

SEQ ID NO: 4002353 - DNA, 25 bp, Homo sapien
gactttgctattgggaaaaacttgc

SEQ ID NO: 4002354 - DNA, 25 bp, Homo sapien
cagagaagtttgtgatcaggtcatc

SEQ ID NO: 4002355 - DNA, 25 bp, Homo sapien
tgtatatcctgcatggtgatggcga

SEQ ID NO: 4002356 - DNA, 25 bp, Homo sapien
tttagatcaacagaagcccagcttg

SEQ ID NO: 4002357 - DNA, 25 bp, Homo sapien
cccagagttccaggaagcttctaga

SEQ ID NO: 4002358 - DNA, 25 bp, Homo sapien
cagctactcattaagcaccggagat

SEQ ID NO: 4002359 - DNA, 25 bp, Homo sapien
gagcaggaaccggagaagtctcttc

SEQ ID NO: 4002360 - DNA, 25 bp, Homo sapien
tattttcatctcgacagacttccct

SEQ ID NO: 4002361 - DNA, 25 bp, Homo sapien
atctcgacagacttcccttcctggt

SEQ ID NO: 4002362 - DNA, 25 bp, Homo sapien
ctggtcccgtctggcggagtttact

SEQ ID NO: 4002363 - DNA, 25 bp, Homo sapien
atgacaaagaagtggcctttgctgt

SEQ ID NO: 4002364 - DNA, 25 bp, Homo sapien
cagctggatcgacggactggctggg

SEQ ID NO: 4002365 - DNA, 25 bp, Homo sapien
gctggcagctggatcgacggactgg

SEQ ID NO: 4002366 - DNA, 25 bp, Homo sapien
gaggccgccgggctgttttgaagct

SEQ ID NO: 4002367 - DNA, 25 bp, Homo sapien
gggctgttttgaagctctgggctgg

SEQ ID NO: 4002368 - DNA, 25 bp, Homo sapien
tgtctctgtttaccgtcaatgtcaa

SEQ ID NO: 4002369 - DNA, 25 bp, Homo sapien
gtcaatatgactgggagaacatcca

SEQ ID NO: 4002370 - DNA, 25 bp, Homo sapien
tatttgctaagcacatgcagggtcc

SEQ ID NO: 4002371 - DNA, 25 bp, Homo sapien
gcattgttccaattcctgcaggttt

SEQ ID NO: 4002372 - DNA, 25 bp, Homo sapien
tctttggtgaacatggtggcaggaa

SEQ ID NO: 4002373 - DNA, 25 bp, Homo sapien
tggaatcccctttctgtaactggag

SEQ ID NO: 4002374 - DNA, 25 bp, Homo sapien
catcaatcgggtacaatcatacagg

SEQ ID NO: 4002375 - DNA, 25 bp, Homo sapien
tcatacaggacttccatggagagag

SEQ ID NO: 4002376 - DNA, 25 bp, Homo sapien
tgaagccagccgtaaataagaccat

SEQ ID NO: 4002377 - DNA, 25 bp, Homo sapien
caaagtcagaatccaagatgccacc

SEQ ID NO: 4002378 - DNA, 25 bp, Homo sapien
gattgtacaggtgaatgtccatgaa

SEQ ID NO: 4002379 - DNA, 25 bp, Homo sapien
ttccaccctacctgagtcaggaggg

SEQ ID NO: 4002380 - DNA, 25 bp, Homo sapien
tcaagtcacccagttggccacactc

SEQ ID NO: 4002381 - DNA, 25 bp, Homo sapien
caagtcacccagttggccacactct

SEQ ID NO: 4002382 - DNA, 25 bp, Homo sapien
aagtcacccagttggccacactctc

SEQ ID NO: 4002383 - DNA, 25 bp, Homo sapien
aaggtcaccactgagaatcccagtc

SEQ ID NO: 4002384 - DNA, 25 bp, Homo sapien
ctgccccaaaggtcaccactgagaa

SEQ ID NO: 4002385 - DNA, 25 bp, Homo sapien
cactgagaatcccagtcccttgtcc

SEQ ID NO: 4002386 - DNA, 25 bp, Homo sapien
tcctttggggcactctcagagctgc

SEQ ID NO: 4002387 - DNA, 25 bp, Homo sapien
ccagagcagaggcgatgttcacaga

SEQ ID NO: 4002388 - DNA, 25 bp, Homo sapien
tccagagcagaggcgatgttcacag

SEQ ID NO: 4002389 - DNA, 25 bp, Homo sapien
ctccagagcagaggcgatgttcaca

SEQ ID NO: 4002390 - DNA, 25 bp, Homo sapien
gggctccgatggagagattggcagg

SEQ ID NO: 4002391 - DNA, 25 bp, Homo sapien
gagaggggctccgatggagagattg

SEQ ID NO: 4002392 - DNA, 25 bp, Homo sapien
gctccgatggagagattggcaggga

SEQ ID NO: 4002393 - DNA, 25 bp, Homo sapien
attaacaaatacagacggagagggg

SEQ ID NO: 4002394 - DNA, 25 bp, Homo sapien
tggtgaaaggaatacttcaattcca

SEQ ID NO: 4002395 - DNA, 25 bp, Homo sapien
cttcaattccaagtttaacacttgg

SEQ ID NO: 4002396 - DNA, 25 bp, Homo sapien
caattccaagtttaacacttggagg

SEQ ID NO: 4002397 - DNA, 25 bp, Homo sapien
cgtggtgaaaggaatacttcaattc

SEQ ID NO: 4002398 - DNA, 25 bp, Homo sapien
gcaggcatgcggctcctcgggcaga

SEQ ID NO: 4002399 - DNA, 25 bp, Homo sapien
agaggagcaggcatgcggctcctcg

SEQ ID NO: 4002400 - DNA, 25 bp, Homo sapien
ccaagacgctaactgatgggccgca

SEQ ID NO: 4002401 - DNA, 25 bp, Homo sapien
aagacgctaactgatgggccgcagg

SEQ ID NO: 4002402 - DNA, 25 bp, Homo sapien
ctcggatatccccaactcaggctgt

SEQ ID NO: 4002403 - DNA, 25 bp, Homo sapien
ggttctgcggcccatgggtgcccac

SEQ ID NO: 4002404 - DNA, 25 bp, Homo sapien
ggaggagcgccaggaatcccaagca

SEQ ID NO: 4002405 - DNA, 25 bp, Homo sapien
ccggaggagcgccaggaatcccaag

SEQ ID NO: 4002406 - DNA, 25 bp, Homo sapien
cttttccaattttacgccagcgcgg

SEQ ID NO: 4002407 - DNA, 25 bp, Homo sapien
tttccaattttacgccagcgcggaa

SEQ ID NO: 4002408 - DNA, 25 bp, Homo sapien
aattttacgccagcgcggaatgagg

SEQ ID NO: 4002409 - DNA, 25 bp, Homo sapien
tacgccagcgcggaatgaggcgcca

SEQ ID NO: 4002410 - DNA, 25 bp, Homo sapien
caggcgcggggtgcaggggaaggtc

SEQ ID NO: 4002411 - DNA, 25 bp, Homo sapien
gcgcggggtgcaggggaaggtctta

SEQ ID NO: 4002412 - DNA, 25 bp, Homo sapien
aggcgcggggtgcaggggaaggtct

SEQ ID NO: 4002413 - DNA, 25 bp, Homo sapien
gtgtcgtcgatggtgaacacctcgt

SEQ ID NO: 4002414 - DNA, 25 bp, Homo sapien
ttgatggcgagctcgtgctccagcc

SEQ ID NO: 4002415 - DNA, 25 bp, Homo sapien
ttctccttgtcgatgcagagggtgt

SEQ ID NO: 4002416 - DNA, 25 bp, Homo sapien
tgctccagccggcacttggtcatga

SEQ ID NO: 4002417 - DNA, 25 bp, Homo sapien
tgcgggatgtccctgcacagctcca

SEQ ID NO: 4002418 - DNA, 25 bp, Homo sapien
ttggccatgatggacctttccagca

SEQ ID NO: 4002419 - DNA, 25 bp, Homo sapien
ttcaactgcgggatgtccctgcaca

SEQ ID NO: 4002420 - DNA, 25 bp, Homo sapien
ccttggccatgatggacctttccag

SEQ ID NO: 4002421 - DNA, 25 bp, Homo sapien
cttctgacctcctctgactgggggc

SEQ ID NO: 4002422 - DNA, 25 bp, Homo sapien
ggcccttctgacctcctctgactgg

SEQ ID NO: 4002423 - DNA, 25 bp, Homo sapien
caggcccttctgacctcctctgact

SEQ ID NO: 4002424 - DNA, 25 bp, Homo sapien
gcccttctgacctcctctgactggg

SEQ ID NO: 4002425 - DNA, 25 bp, Homo sapien
taaagaagctattcatcagctccac

SEQ ID NO: 4002426 - DNA, 25 bp, Homo sapien
ctaaagaagctattcatcagctcca

SEQ ID NO: 4002427 - DNA, 25 bp, Homo sapien
cctaaagaagctattcatcagctcc

SEQ ID NO: 4002428 - DNA, 25 bp, Homo sapien
cacctaaagaagctattcatcagct

SEQ ID NO: 4002429 - DNA, 25 bp, Homo sapien
gatgcacctgctgttccatacaagg

SEQ ID NO: 4002430 - DNA, 25 bp, Homo sapien
ggtcacctgctagagatgcacctgc

SEQ ID NO: 4002431 - DNA, 25 bp, Homo sapien
gagatgcacctgctgttccatacaa

SEQ ID NO: 4002432 - DNA, 25 bp, Homo sapien
tgcacctgctgttccatacaagggc

SEQ ID NO: 4002433 - DNA, 25 bp, Homo sapien
aaagattcatcatcaaaaccatgga

SEQ ID NO: 4002434 - DNA, 25 bp, Homo sapien
gaaagattcatcatcaaaaccatgg

SEQ ID NO: 4002435 - DNA, 25 bp, Homo sapien
ctctttctttgttcactttctccat

SEQ ID NO: 4002436 - DNA, 25 bp, Homo sapien
tgtctctttctttgttcactttctc

SEQ ID NO: 4002437 - DNA, 25 bp, Homo sapien
cttgtctctttctttgttcactttc

SEQ ID NO: 4002438 - DNA, 25 bp, Homo sapien
gtctctttctttgttcactttctcc

SEQ ID NO: 4002439 - DNA, 25 bp, Homo sapien
cacacatgctgaacgggtaactcaa

SEQ ID NO: 4002440 - DNA, 25 bp, Homo sapien
tctaaacggagggagtgtagtccat

SEQ ID NO: 4002441 - DNA, 25 bp, Homo sapien
ggctagttgacacatagaaagggca

SEQ ID NO: 4002442 - DNA, 25 bp, Homo sapien
tcttatcgctcccagtctaaacgga

SEQ ID NO: 4002443 - DNA, 25 bp, Homo sapien
tgctggcagaattctgtgcagggtg

SEQ ID NO: 4002444 - DNA, 25 bp, Homo sapien
tgtcgggacacagaaggtggagatg

SEQ ID NO: 4002445 - DNA, 25 bp, Homo sapien
gtcgggacacagaaggtggagatgg

SEQ ID NO: 4002446 - DNA, 25 bp, Homo sapien
gacacagaaggtggagatggaaggg

SEQ ID NO: 4002447 - DNA, 25 bp, Homo sapien
acagaaggtggagatggaaggggag

SEQ ID NO: 4002448 - DNA, 25 bp, Homo sapien
cagcagatgtcaaagctggagcata

SEQ ID NO: 4002449 - DNA, 25 bp, Homo sapien
gtgaggctagccagtaggtcccatg

SEQ ID NO: 4002450 - DNA, 25 bp, Homo sapien
cataggtgaggctagccagtaggtc

SEQ ID NO: 4002451 - DNA, 25 bp, Homo sapien
gatgtcaaagctggagcataggtga

SEQ ID NO: 4002452 - DNA, 25 bp, Homo sapien
agtcaccctgaccagcccacctttt

SEQ ID NO: 4002453 - DNA, 25 bp, Homo sapien
agcccaccttttggcacagctctca

SEQ ID NO: 4002454 - DNA, 25 bp, Homo sapien
gaactgataagctgtgacacagtca

SEQ ID NO: 4002455 - DNA, 25 bp, Homo sapien
atgaactgataagctgtgacacagt

SEQ ID NO: 4002456 - DNA, 25 bp, Homo sapien
cacatgactaggaaggccttacaat

SEQ ID NO: 4002457 - DNA, 25 bp, Homo sapien
catgactaggaaggccttacaatca

SEQ ID NO: 4002458 - DNA, 25 bp, Homo sapien
ttccacatgactaggaaggccttac

SEQ ID NO: 4002459 - DNA, 25 bp, Homo sapien
tccacatgactaggaaggccttaca

SEQ ID NO: 4002460 - DNA, 25 bp, Homo sapien
cttccattcattgcagaaagatgta

SEQ ID NO: 4002461 - DNA, 25 bp, Homo sapien
acaaggttaaatcaggagcagtgct

SEQ ID NO: 4002462 - DNA, 25 bp, Homo sapien
caacattgtagattccttccattca

SEQ ID NO: 4002463 - DNA, 25 bp, Homo sapien
gagtaccaggcagttattaagcagt

SEQ ID NO: 4002464 - DNA, 25 bp, Homo sapien
agaagtggcagagactatggtgtgc

SEQ ID NO: 4002465 - DNA, 25 bp, Homo sapien
ggtgtgccgggctccgttctctgca

SEQ ID NO: 4002466 - DNA, 25 bp, Homo sapien
tgcactcgcgctcggccacatgggt

SEQ ID NO: 4002467 - DNA, 25 bp, Homo sapien
aagtggcagagactatggtgtgccg

SEQ ID NO: 4002468 - DNA, 25 bp, Homo sapien
aacttggcccaggtctcaggtacgg

SEQ ID NO: 4002469 - DNA, 25 bp, Homo sapien
tcacctcagagatgcgggcgttgaa

SEQ ID NO: 4002470 - DNA, 25 bp, Homo sapien
gcccgcatgttctgagagtgtttga

SEQ ID NO: 4002471 - DNA, 25 bp, Homo sapien
gatccgacaaggtctcaaagaggtg

SEQ ID NO: 4002472 - DNA, 25 bp, Homo sapien
gccgtcaattttctccatgccgtgg

SEQ ID NO: 4002473 - DNA, 25 bp, Homo sapien
cacgtgctgagcatcccggttatcc

SEQ ID NO: 4002474 - DNA, 25 bp, Homo sapien
aagcacttctcatcgatacactggg

SEQ ID NO: 4002475 - DNA, 25 bp, Homo sapien
tacactgggccgagcttttgtcttc

SEQ ID NO: 4002476 - DNA, 25 bp, Homo sapien
gcccttgtcatgaggcctagggaaa

SEQ ID NO: 4002477 - DNA, 25 bp, Homo sapien
aagtgaaatcctcacagtggtggcg

SEQ ID NO: 4002478 - DNA, 25 bp, Homo sapien
ggttcccacctatcaggaagctcgg

SEQ ID NO: 4002479 - DNA, 25 bp, Homo sapien
gtcatgtcggagcaggaggaacccc

SEQ ID NO: 4002480 - DNA, 25 bp, Homo sapien
tctgttcttggcaacattttagcaa

SEQ ID NO: 4002481 - DNA, 25 bp, Homo sapien
ctgttcttggcaacattttagcaaa

SEQ ID NO: 4002482 - DNA, 25 bp, Homo sapien
ttctctcgatggtacagacactcca

SEQ ID NO: 4002483 - DNA, 25 bp, Homo sapien
aaggtttttctccacgttgtcatgg

SEQ ID NO: 4002484 - DNA, 25 bp, Homo sapien
aatcccaatcctcttctctcgatgg

SEQ ID NO: 4002485 - DNA, 25 bp, Homo sapien
tgtcatggaccaaatcaatcccaat

SEQ ID NO: 4002486 - DNA, 25 bp, Homo sapien
aagcagcagaaagaacgtattcttc

SEQ ID NO: 4002487 - DNA, 25 bp, Homo sapien
gcagaaagaacgtattcttcctgta

SEQ ID NO: 4002488 - DNA, 25 bp, Homo sapien
aaagaacgtattcttcctgtagctg

SEQ ID NO: 4002489 - DNA, 25 bp, Homo sapien
agcagcagaaagaacgtattcttcc

SEQ ID NO: 4002490 - DNA, 25 bp, Homo sapien
catgaaaacccctctttgcagatct

SEQ ID NO: 4002491 - DNA, 25 bp, Homo sapien
gaatatgcatgaaaacccctctttg

SEQ ID NO: 4002492 - DNA, 25 bp, Homo sapien
ggggaagtggtcaggacaaccctgc

SEQ ID NO: 4002493 - DNA, 25 bp, Homo sapien
ctgtgaatatgcatgaaaacccctc

SEQ ID NO: 4002494 - DNA, 25 bp, Homo sapien
aatgggcagttcacctcattggccg

SEQ ID NO: 4002495 - DNA, 25 bp, Homo sapien
tcttgggaccacagtaactggcggt

SEQ ID NO: 4002496 - DNA, 25 bp, Homo sapien
gaggtcaagccacagcatttcttgg

SEQ ID NO: 4002497 - DNA, 25 bp, Homo sapien
tcatggagtcatccgtcagccggct

SEQ ID NO: 4002498 - DNA, 25 bp, Homo sapien
caaaactcagctcaaggagccaaag

SEQ ID NO: 4002499 - DNA, 25 bp, Homo sapien
gcaaaactcagctcaaggagccaaa

SEQ ID NO: 4002500 - DNA, 25 bp, Homo sapien
attatctgggtcgcttagaaggtca

SEQ ID NO: 4002501 - DNA, 25 bp, Homo sapien
gaatatctttgatcgtgcagtaggg

SEQ ID NO: 4002502 - DNA, 25 bp, Homo sapien
aataaatggtaaacagttgctggag

SEQ ID NO: 4002503 - DNA, 25 bp, Homo sapien
tgcagtaggggtggaaagtgatttt

SEQ ID NO: 4002504 - DNA, 25 bp, Homo sapien
taaagtcttgaatagatctcctgtt

SEQ ID NO: 4002505 - DNA, 25 bp, Homo sapien
gtaagtgtgaggctaccaataatta

SEQ ID NO: 4002506 - DNA, 25 bp, Homo sapien
gtgaggctaccaataattagggagg

SEQ ID NO: 4002507 - DNA, 25 bp, Homo sapien
cttgaatagatctcctgttttttgg

SEQ ID NO: 4002508 - DNA, 25 bp, Homo sapien
cctgagaccaatggataactcttat

SEQ ID NO: 4002509 - DNA, 25 bp, Homo sapien
ttgcaccgatgtttttggttcctga

SEQ ID NO: 4002510 - DNA, 25 bp, Homo sapien
caccgatgtttttggttcctgagac

SEQ ID NO: 4002511 - DNA, 25 bp, Homo sapien
ccgatgtttttggttcctgagacca

SEQ ID NO: 4002512 - DNA, 25 bp, Homo sapien
tgagaacgcaatgttgtgagacaca

SEQ ID NO: 4002513 - DNA, 25 bp, Homo sapien
gagaacgcaatgttgtgagacacag

SEQ ID NO: 4002514 - DNA, 25 bp, Homo sapien
gaacgcaatgttgtgagacacaggg

SEQ ID NO: 4002515 - DNA, 25 bp, Homo sapien
cgcaatgttgtgagacacaggggca

SEQ ID NO: 4002516 - DNA, 25 bp, Homo sapien
tattgttagattcatagtctaatgt

SEQ ID NO: 4002517 - DNA, 25 bp, Homo sapien
agttgcgggcttctattgttagatt

SEQ ID NO: 4002518 - DNA, 25 bp, Homo sapien
cttctattgttagattcatagtcta

SEQ ID NO: 4002519 - DNA, 25 bp, Homo sapien
tctattgttagattcatagtctaat

SEQ ID NO: 4002520 - DNA, 25 bp, Homo sapien
tttagtaaatatggtctatcataat

SEQ ID NO: 4002521 - DNA, 25 bp, Homo sapien
tgagtcaaaatcatttattttaact

SEQ ID NO: 4002522 - DNA, 25 bp, Homo sapien
ctatcataatctaatgagtcaaaat

SEQ ID NO: 4002523 - DNA, 25 bp, Homo sapien
aatctaatgagtcaaaatcatttat

SEQ ID NO: 4002524 - DNA, 25 bp, Homo sapien
tttgccttcgactactttctatcag

SEQ ID NO: 4002525 - DNA, 25 bp, Homo sapien
cggcggcggctttaaagccaaagtg

SEQ ID NO: 4002526 - DNA, 25 bp, Homo sapien
gagtgaagcagatacctaaggtaat

SEQ ID NO: 4002527 - DNA, 25 bp, Homo sapien
tgttgagtcataaattccatctgag

SEQ ID NO: 4002528 - DNA, 25 bp, Homo sapien
tgacagtactagtgtggcatctcct

SEQ ID NO: 4002529 - DNA, 25 bp, Homo sapien
gctgttaatcgcacagccaacgcta

SEQ ID NO: 4002530 - DNA, 25 bp, Homo sapien
taggtgaccagctgtaatggtggct

SEQ ID NO: 4002531 - DNA, 25 bp, Homo sapien
gaataagagctatgacgaattcgag

SEQ ID NO: 4002532 - DNA, 25 bp, Homo sapien
aacagccccaggactagtactagga

SEQ ID NO: 4002533 - DNA, 25 bp, Homo sapien
aataactgattcctaggccaggcgc

SEQ ID NO: 4002534 - DNA, 25 bp, Homo sapien
tgagacctcaggaaccactgggaga

SEQ ID NO: 4002535 - DNA, 25 bp, Homo sapien
tctgagggtcgtgatggctactaaa

SEQ ID NO: 4002536 - DNA, 25 bp, Homo sapien
gtacctaagtacctacatatgatcc

SEQ ID NO: 4002537 - DNA, 25 bp, Homo sapien
agtacctacatatgatccttgattt

SEQ ID NO: 4002538 - DNA, 25 bp, Homo sapien
cctaagtacctacatatgatccttg

SEQ ID NO: 4002539 - DNA, 25 bp, Homo sapien
aattagtacctaagtacctacatat

SEQ ID NO: 4002540 - DNA, 25 bp, Homo sapien
caggcagacctactcatgacagtga

SEQ ID NO: 4002541 - DNA, 25 bp, Homo sapien
ctgccctaaatccagcagggtggtg

SEQ ID NO: 4002542 - DNA, 25 bp, Homo sapien
ttggctctaactctgtgcaagacca

SEQ ID NO: 4002543 - DNA, 25 bp, Homo sapien
tgcctgccatctggtggaagcttgg

SEQ ID NO: 4002544 - DNA, 25 bp, Homo sapien
acataaaaaaagttagccaggtgtg

SEQ ID NO: 4002545 - DNA, 25 bp, Homo sapien
cacttgagcctgggaagtcaaggct

SEQ ID NO: 4002546 - DNA, 25 bp, Homo sapien
gtggtaagcacctgtagtcccagct

SEQ ID NO: 4002547 - DNA, 25 bp, Homo sapien
actcaggagactgaggtaggaggat

SEQ ID NO: 4002548 - DNA, 25 bp, Homo sapien
tcccgggctcaagcagttctgcctc

SEQ ID NO: 4002549 - DNA, 25 bp, Homo sapien
ggcgtgtgccaccacacccagctaa

SEQ ID NO: 4002550 - DNA, 25 bp, Homo sapien
agcctctggagtacctgggattaca

SEQ ID NO: 4002551 - DNA, 25 bp, Homo sapien
tgaggaaacgatcggaaggctgctc

SEQ ID NO: 4002552 - DNA, 25 bp, Homo sapien
tctgtcctaagtgcaaggtgagggc

SEQ ID NO: 4002553 - DNA, 25 bp, Homo sapien
ggatgtccggaaagaaatcaacttc

SEQ ID NO: 4002554 - DNA, 25 bp, Homo sapien
gctgccaggcgagcaagatcttgct

SEQ ID NO: 4002555 - DNA, 25 bp, Homo sapien
agtgtggggcggcacctcactcctc

SEQ ID NO: 4002556 - DNA, 25 bp, Homo sapien
cacaggcacgggtcgggcacaacag

SEQ ID NO: 4002557 - DNA, 25 bp, Homo sapien
cccctggatccgctcataggtgggt

SEQ ID NO: 4002558 - DNA, 25 bp, Homo sapien
ttggaggtccctctcctcggcagag

SEQ ID NO: 4002559 - DNA, 25 bp, Homo sapien
ggctcctgcggggcgtccagcactc

SEQ ID NO: 4002560 - DNA, 25 bp, Homo sapien
ctggggccctttagtggggctcctg

SEQ ID NO: 4002561 - DNA, 25 bp, Homo sapien
cctgcggggcgtccagcactcgcct

SEQ ID NO: 4002562 - DNA, 25 bp, Homo sapien
tggggccctttagtggggctcctgc

SEQ ID NO: 4002563 - DNA, 25 bp, Homo sapien
tccgtcaggagaaggtggttcatgt

SEQ ID NO: 4002564 - DNA, 25 bp, Homo sapien
gtccgtgcagttgagttttgaagcc

SEQ ID NO: 4002565 - DNA, 25 bp, Homo sapien
gccgtgcagaaagcgggagccagga

SEQ ID NO: 4002566 - DNA, 25 bp, Homo sapien
gatggctgcctcgaggaagtggtag

SEQ ID NO: 4002567 - DNA, 25 bp, Homo sapien
agtggccggaagtggtgatgagagc

SEQ ID NO: 4002568 - DNA, 25 bp, Homo sapien
aatggatgtgattggggacaggagc

SEQ ID NO: 4002569 - DNA, 25 bp, Homo sapien
cagcccagggcacatccattcctgc

SEQ ID NO: 4002570 - DNA, 25 bp, Homo sapien
gcagcttttgcagtggccggaagtg

SEQ ID NO: 4002571 - DNA, 25 bp, Homo sapien
gattggtgggcaggacgtttgtcag

SEQ ID NO: 4002572 - DNA, 25 bp, Homo sapien
ctctgccgagatgggattggtgggc

SEQ ID NO: 4002573 - DNA, 25 bp, Homo sapien
tctgccacagttcagctctgccgag

SEQ ID NO: 4002574 - DNA, 25 bp, Homo sapien
gcaggacgtttgtcaggggaaacat

SEQ ID NO: 4002575 - DNA, 25 bp, Homo sapien
ggcttttcttccaaagagccagcaa

SEQ ID NO: 4002576 - DNA, 25 bp, Homo sapien
gctactagatcctgatacggctttt

SEQ ID NO: 4002577 - DNA, 25 bp, Homo sapien
ctgacagatcaggaagtgaccttgg

SEQ ID NO: 4002578 - DNA, 25 bp, Homo sapien
acccaaatatgtccacgggcccagc

SEQ ID NO: 4002579 - DNA, 25 bp, Homo sapien
tctatagatggtccgaggaaggccg

SEQ ID NO: 4002580 - DNA, 25 bp, Homo sapien
cgcagccactggttatgagcaagat

SEQ ID NO: 4002581 - DNA, 25 bp, Homo sapien
tgaaagtcaactccacggtgtggga

SEQ ID NO: 4002582 - DNA, 25 bp, Homo sapien
tgatgagtgctaggtaggaacccct

SEQ ID NO: 4002583 - DNA, 25 bp, Homo sapien
cagttaccgagcgaggcactcactg

SEQ ID NO: 4002584 - DNA, 25 bp, Homo sapien
gggattctgctgtgtcggaagctta

SEQ ID NO: 4002585 - DNA, 25 bp, Homo sapien
gtgtggtccgaagccactttctcag

SEQ ID NO: 4002586 - DNA, 25 bp, Homo sapien
gaaacgagagaatgttcaggaccaa

SEQ ID NO: 4002587 - DNA, 25 bp, Homo sapien
cctcgaggccaggcttctgaaagtc

SEQ ID NO: 4002588 - DNA, 25 bp, Homo sapien
ctaatgctggtgaatctccagcccc

SEQ ID NO: 4002589 - DNA, 25 bp, Homo sapien
aatgctggtgaatctccagcccctc

SEQ ID NO: 4002590 - DNA, 25 bp, Homo sapien
cattacaaaccgcagttgccagcag

SEQ ID NO: 4002591 - DNA, 25 bp, Homo sapien
ttacaaaccgcagttgccagcaggc

SEQ ID NO: 4002592 - DNA, 25 bp, Homo sapien
ttacattacaaaccgcagttgccag

SEQ ID NO: 4002593 - DNA, 25 bp, Homo sapien
acaaaccgcagttgccagcaggcca

SEQ ID NO: 4002594 - DNA, 25 bp, Homo sapien
gccatacaggtttgcagcttggaga

SEQ ID NO: 4002595 - DNA, 25 bp, Homo sapien
tcccatcttacaaaggatgtagcca

SEQ ID NO: 4002596 - DNA, 25 bp, Homo sapien
tacaaaggatgtagccatacaggtt

SEQ ID NO: 4002597 - DNA, 25 bp, Homo sapien
tggaacactgtctgggacaggaaac

SEQ ID NO: 4002598 - DNA, 25 bp, Homo sapien
cagccactttagcttcaaggaaaat

SEQ ID NO: 4002599 - DNA, 25 bp, Homo sapien
ggcagattatgaggcccagccagaa

SEQ ID NO: 4002600 - DNA, 25 bp, Homo sapien
cacaatccatatcatggggcagatt

SEQ ID NO: 4002601 - DNA, 25 bp, Homo sapien
gccagaagattcgtgcttcagcttc

SEQ ID NO: 4002602 - DNA, 25 bp, Homo sapien
ctggcttcaaagatccagtggctct

SEQ ID NO: 4002603 - DNA, 25 bp, Homo sapien
cttcctggcttcaaagatccagtgg

SEQ ID NO: 4002604 - DNA, 25 bp, Homo sapien
atcttcatctatctggttccaccat

SEQ ID NO: 4002605 - DNA, 25 bp, Homo sapien
accatcgaaggcccaccaggagtct

SEQ ID NO: 4002606 - DNA, 25 bp, Homo sapien
aaagctcttgctgaaccagtcgcag

SEQ ID NO: 4002607 - DNA, 25 bp, Homo sapien
agcagcaccatgacaaaacagccca

SEQ ID NO: 4002608 - DNA, 25 bp, Homo sapien
ggcactcactcggaaaaacaggtgg

SEQ ID NO: 4002609 - DNA, 25 bp, Homo sapien
cagtcgcagctcacgtaggtgacga

SEQ ID NO: 4002610 - DNA, 25 bp, Homo sapien
caatggaatgttctccccggtgcat

SEQ ID NO: 4002611 - DNA, 25 bp, Homo sapien
gagctaagcggatggtcactgaact

SEQ ID NO: 4002612 - DNA, 25 bp, Homo sapien
gatgacggccagttccctaaaggta

SEQ ID NO: 4002613 - DNA, 25 bp, Homo sapien
catatgacgcagaaactcaggctgt

SEQ ID NO: 4002614 - DNA, 25 bp, Homo sapien
ttttttctttttggctgtggctctc

SEQ ID NO: 4002615 - DNA, 25 bp, Homo sapien
tcttttttctttttggctgtggctc

SEQ ID NO: 4002616 - DNA, 25 bp, Homo sapien
cttttttctttttggctgtggctct

SEQ ID NO: 4002617 - DNA, 25 bp, Homo sapien
tcaacttgaacaggtgctatttcca

SEQ ID NO: 4002618 - DNA, 25 bp, Homo sapien
caggtgctatttccacacagtatcc

SEQ ID NO: 4002619 - DNA, 25 bp, Homo sapien
cccagatgaaccttcatcatgttca

SEQ ID NO: 4002620 - DNA, 25 bp, Homo sapien
gaaccttcatcatgttcaacttgaa

SEQ ID NO: 4002621 - DNA, 25 bp, Homo sapien
ctgtgcctggattccaatgggagga

SEQ ID NO: 4002622 - DNA, 25 bp, Homo sapien
tgtttgtccagtattaaggtccctg

SEQ ID NO: 4002623 - DNA, 25 bp, Homo sapien
gcctgctatctgtgctgttgggatg

SEQ ID NO: 4002624 - DNA, 25 bp, Homo sapien
gtttagtcctcaaatgtagtttgcg

SEQ ID NO: 4002625 - DNA, 25 bp, Homo sapien
ccggtgatcctgactgcctggtggt

SEQ ID NO: 4002626 - DNA, 25 bp, Homo sapien
gcacagtggacacggtagataccca

SEQ ID NO: 4002627 - DNA, 25 bp, Homo sapien
tcctggtcatcagagtggccaataa

SEQ ID NO: 4002628 - DNA, 25 bp, Homo sapien
taggttatcaacgacatggcagctt

SEQ ID NO: 4002629 - DNA, 25 bp, Homo sapien
tgtgtctgctacctggctcttggga

SEQ ID NO: 4002630 - DNA, 25 bp, Homo sapien
ttgtgtctgctacctggctcttggg

SEQ ID NO: 4002631 - DNA, 25 bp, Homo sapien
agtcatctcggaagccggcttgctc

SEQ ID NO: 4002632 - DNA, 25 bp, Homo sapien
tctgagtcatctcggaagccggctt

SEQ ID NO: 4002633 - DNA, 25 bp, Homo sapien
tgtctctgagtcatctcggaagccg

SEQ ID NO: 4002634 - DNA, 25 bp, Homo sapien
tgagtcatctcggaagccggcttgc

SEQ ID NO: 4002635 - DNA, 25 bp, Homo sapien
acatcctcggtatcgtccaccaggg

SEQ ID NO: 4002636 - DNA, 25 bp, Homo sapien
cacatcctcggtatcgtccaccagg

SEQ ID NO: 4002637 - DNA, 25 bp, Homo sapien
catcctcggtatcgtccaccagggc

SEQ ID NO: 4002638 - DNA, 25 bp, Homo sapien
gtcctcctgggcttggactccactt

SEQ ID NO: 4002639 - DNA, 25 bp, Homo sapien
tcctgggcttggactccacttgcac

SEQ ID NO: 4002640 - DNA, 25 bp, Homo sapien
cctcctgggcttggactccacttgc

SEQ ID NO: 4002641 - DNA, 25 bp, Homo sapien
ctgtcctcctgggcttggactccac

SEQ ID NO: 4002642 - DNA, 25 bp, Homo sapien
cctcccgaccaccgggtgcagccca

SEQ ID NO: 4002643 - DNA, 25 bp, Homo sapien
cccgaccaccgggtgcagcccagcc

SEQ ID NO: 4002644 - DNA, 25 bp, Homo sapien
gttcccaagtggaccctccgagctg

SEQ ID NO: 4002645 - DNA, 25 bp, Homo sapien
ccaagtggaccctccgagctggcgg

SEQ ID NO: 4002646 - DNA, 25 bp, Homo sapien
agggtcggggcctgcgccctgtggg

SEQ ID NO: 4002647 - DNA, 25 bp, Homo sapien
agcagacggtggacgctgagggtcg

SEQ ID NO: 4002648 - DNA, 25 bp, Homo sapien
agctccgcccgtcgccgctgaaggg

SEQ ID NO: 4002649 - DNA, 25 bp, Homo sapien
cgggcggatgtaggcagcagacggt

SEQ ID NO: 4002650 - DNA, 25 bp, Homo sapien
accacatccggctgagatcctgcat

SEQ ID NO: 4002651 - DNA, 25 bp, Homo sapien
tctgagagcccgtgggagaagctga

SEQ ID NO: 4002652 - DNA, 25 bp, Homo sapien
agatcctgcatttctgagagcccgt

SEQ ID NO: 4002653 - DNA, 25 bp, Homo sapien
tgagatggagtcagtggctagatct

SEQ ID NO: 4002654 - DNA, 25 bp, Homo sapien
tctctgccactggcgagtttgccat

SEQ ID NO: 4002655 - DNA, 25 bp, Homo sapien
cattctctgccactggcgagtttgc

SEQ ID NO: 4002656 - DNA, 25 bp, Homo sapien
attctctgccactggcgagtttgcc

SEQ ID NO: 4002657 - DNA, 25 bp, Homo sapien
ttctctgccactggcgagtttgcca

SEQ ID NO: 4002658 - DNA, 25 bp, Homo sapien
caggtgtgattctaacagagggagc

SEQ ID NO: 4002659 - DNA, 25 bp, Homo sapien
gagatagtccaagcaaaccaggatg

SEQ ID NO: 4002660 - DNA, 25 bp, Homo sapien
tgagattggaaccacggctcaggca

SEQ ID NO: 4002661 - DNA, 25 bp, Homo sapien
tgtggagagggccatgaatcctgct

SEQ ID NO: 4002662 - DNA, 25 bp, Homo sapien
taacaatagggcaccttgaaaacca

SEQ ID NO: 4002663 - DNA, 25 bp, Homo sapien
agttgctggaatgtgtaacagtagc

SEQ ID NO: 4002664 - DNA, 25 bp, Homo sapien
aatgcctcgctcatttgtatatgac

SEQ ID NO: 4002665 - DNA, 25 bp, Homo sapien
tgttaccgataaaacacattcattt

SEQ ID NO: 4002666 - DNA, 25 bp, Homo sapien
tgaggttgggcattcgctgcagaac

SEQ ID NO: 4002667 - DNA, 25 bp, Homo sapien
cattcgctgcagaactagcattttt

SEQ ID NO: 4002668 - DNA, 25 bp, Homo sapien
gttgggcattcgctgcagaactagc

SEQ ID NO: 4002669 - DNA, 25 bp, Homo sapien
tgggcattcgctgcagaactagcat

SEQ ID NO: 4002670 - DNA, 25 bp, Homo sapien
gtactagtgtgtaggcaattcctgg

SEQ ID NO: 4002671 - DNA, 25 bp, Homo sapien
gaggtactagtgtgtaggcaattcc

SEQ ID NO: 4002672 - DNA, 25 bp, Homo sapien
aagaactgcctgtgtcgtactgaca

SEQ ID NO: 4002673 - DNA, 25 bp, Homo sapien
cctgtgtcgtactgacaagccaaag

SEQ ID NO: 4002674 - DNA, 25 bp, Homo sapien
aacgtcctgggctgagcattttggt

SEQ ID NO: 4002675 - DNA, 25 bp, Homo sapien
agatggaaacgtcctgggctgagca

SEQ ID NO: 4002676 - DNA, 25 bp, Homo sapien
agtctgagatggaaacgtcctgggc

SEQ ID NO: 4002677 - DNA, 25 bp, Homo sapien
tggaaacgtcctgggctgagcattt

SEQ ID NO: 4002678 - DNA, 25 bp, Homo sapien
actccgctcatgcgctttccaaaaa

SEQ ID NO: 4002679 - DNA, 25 bp, Homo sapien
ccaactccgctcatgcgctttccaa

SEQ ID NO: 4002680 - DNA, 25 bp, Homo sapien
aactccgctcatgcgctttccaaaa

SEQ ID NO: 4002681 - DNA, 25 bp, Homo sapien
tcccaactccgctcatgcgctttcc

SEQ ID NO: 4002682 - DNA, 25 bp, Homo sapien
ctggagagaatatcacatgtgatga

SEQ ID NO: 4002683 - DNA, 25 bp, Homo sapien
caaggatcagttcgcttttctcgtc

SEQ ID NO: 4002684 - DNA, 25 bp, Homo sapien
cagttcgcttttctcgtcgtctgcc

SEQ ID NO: 4002685 - DNA, 25 bp, Homo sapien
acaggccgcccttcaaggatcagtt

SEQ ID NO: 4002686 - DNA, 25 bp, Homo sapien
cgcccttcaaggatcagttcgcttt

SEQ ID NO: 4002687 - DNA, 25 bp, Homo sapien
ctggagtccaggctagtcaagtatg

SEQ ID NO: 4002688 - DNA, 25 bp, Homo sapien
ctcactatgtttcctttctatgccc

SEQ ID NO: 4002689 - DNA, 25 bp, Homo sapien
tctatgccctgctgaatttcttata

SEQ ID NO: 4002690 - DNA, 25 bp, Homo sapien
tgccctgctgaatttcttataacag

SEQ ID NO: 4002691 - DNA, 25 bp, Homo sapien
cctgctgaatttcttataacagttt

SEQ ID NO: 4002692 - DNA, 25 bp, Homo sapien
catgtctgctaacttttcgaatttg

SEQ ID NO: 4002693 - DNA, 25 bp, Homo sapien
caccatgtctgctaacttttcgaat

SEQ ID NO: 4002694 - DNA, 25 bp, Homo sapien
cttttcgaatttgtttatagcgatg

SEQ ID NO: 4002695 - DNA, 25 bp, Homo sapien
gaatttgtttatagcgatgaggtct

SEQ ID NO: 4002696 - DNA, 25 bp, Homo sapien
tcagcctgccatattaaagaaccat

SEQ ID NO: 4002697 - DNA, 25 bp, Homo sapien
caacaatggacacaatccgtgatgt

SEQ ID NO: 4002698 - DNA, 25 bp, Homo sapien
cacaccgtcaagagaattgaggcaa

SEQ ID NO: 4002699 - DNA, 25 bp, Homo sapien
gtaggtataaactcacacaccgtca

SEQ ID NO: 4002700 - DNA, 25 bp, Homo sapien
tctctgtcttgggaggaagttccat

SEQ ID NO: 4002701 - DNA, 25 bp, Homo sapien
ccctgtggtttctctgtcttgggag

SEQ ID NO: 4002702 - DNA, 25 bp, Homo sapien
gtttctctgtcttgggaggaagttc

SEQ ID NO: 4002703 - DNA, 25 bp, Homo sapien
cctgtggtttctctgtcttgggagg

SEQ ID NO: 4002704 - DNA, 25 bp, Homo sapien
tcttgggtcttccttggggtctgca

SEQ ID NO: 4002705 - DNA, 25 bp, Homo sapien
ttcttgggtcttccttggggtctgc

SEQ ID NO: 4002706 - DNA, 25 bp, Homo sapien
cctgtttctgttagtgccccactgg

SEQ ID NO: 4002707 - DNA, 25 bp, Homo sapien
gagtttgttagatggctactacacg

SEQ ID NO: 4002708 - DNA, 25 bp, Homo sapien
tgtaataaagcagggattcaaatcc

SEQ ID NO: 4002709 - DNA, 25 bp, Homo sapien
ttatactaacaacatggccaggcgc

SEQ ID NO: 4002710 - DNA, 25 bp, Homo sapien
caaggcgggtggattacatgaggcc

SEQ ID NO: 4002711 - DNA, 25 bp, Homo sapien
tcaaggcgggtggattacatgaggc

SEQ ID NO: 4002712 - DNA, 25 bp, Homo sapien
gtcaaggcgggtggattacatgagg

SEQ ID NO: 4002713 - DNA, 25 bp, Homo sapien
tttgactagtcttccacagtcacac

SEQ ID NO: 4002714 - DNA, 25 bp, Homo sapien
catcttgaggccagttttcactgat

SEQ ID NO: 4002715 - DNA, 25 bp, Homo sapien
ctgaagccagtaacattgtatctct

SEQ ID NO: 4002716 - DNA, 25 bp, Homo sapien
tcctccatggttataatcacagctt

SEQ ID NO: 4002717 - DNA, 25 bp, Homo sapien
gaagccagccagatatttagacaat

SEQ ID NO: 4002718 - DNA, 25 bp, Homo sapien
tagggacataacttggctggaatca

SEQ ID NO: 4002719 - DNA, 25 bp, Homo sapien
ggagtctgacctacgaatatataca

SEQ ID NO: 4002720 - DNA, 25 bp, Homo sapien
tatatacatggtccagaagccagcc

SEQ ID NO: 4002721 - DNA, 25 bp, Homo sapien
ggtagcgttgatcatatgggagctg

SEQ ID NO: 4002722 - DNA, 25 bp, Homo sapien
gtggtagcgttgatcatatgggagc

SEQ ID NO: 4002723 - DNA, 25 bp, Homo sapien
cctgtggtagcgttgatcatatggg

SEQ ID NO: 4002724 - DNA, 25 bp, Homo sapien
ctgtggtagcgttgatcatatggga

SEQ ID NO: 4002725 - DNA, 25 bp, Homo sapien
tgggtaggacccagagaatatctgt

SEQ ID NO: 4002726 - DNA, 25 bp, Homo sapien
tagcaatactagattggctccaaca

SEQ ID NO: 4002727 - DNA, 25 bp, Homo sapien
ggtcctctaaggaggcatgtcgcct

SEQ ID NO: 4002728 - DNA, 25 bp, Homo sapien
tgaacataggcagattagctccaag

SEQ ID NO: 4002729 - DNA, 25 bp, Homo sapien
gcccaacgtgcatggtggaaagatg

SEQ ID NO: 4002730 - DNA, 25 bp, Homo sapien
tacactccctgcaagaggaagctgg

SEQ ID NO: 4002731 - DNA, 25 bp, Homo sapien
tcagagtcactgatctaagggctca

SEQ ID NO: 4002732 - DNA, 25 bp, Homo sapien
ggctcagggacaccattcagtgtaa

SEQ ID NO: 4002733 - DNA, 25 bp, Homo sapien
agagatggtagtcctggctggccca

SEQ ID NO: 4002734 - DNA, 25 bp, Homo sapien
ggctggcccattctaagttccaaag

SEQ ID NO: 4002735 - DNA, 25 bp, Homo sapien
tactgaaacgaacctctggtacagg

SEQ ID NO: 4002736 - DNA, 25 bp, Homo sapien
catggtcaggttcaggtcttgtgga

SEQ ID NO: 4002737 - DNA, 25 bp, Homo sapien
aggagagcagcatctaagaagtccc

SEQ ID NO: 4002738 - DNA, 25 bp, Homo sapien
gggccacttatgatctccagagaaa

SEQ ID NO: 4002739 - DNA, 25 bp, Homo sapien
gcggagggctatgatactggcccca

SEQ ID NO: 4002740 - DNA, 25 bp, Homo sapien
cagcttgtcttgaggcatctgggcg

SEQ ID NO: 4002741 - DNA, 25 bp, Homo sapien
acacaatgcgttgcctggctccacg

SEQ ID NO: 4002742 - DNA, 25 bp, Homo sapien
tgcctggctgggattcctacacaat

SEQ ID NO: 4002743 - DNA, 25 bp, Homo sapien
ctgagctgggcatccgaaggcatcc

SEQ ID NO: 4002744 - DNA, 25 bp, Homo sapien
ctgggcatccgaaggcatccttggg

SEQ ID NO: 4002745 - DNA, 25 bp, Homo sapien
gagaaacctgttgatacccagtctg

SEQ ID NO: 4002746 - DNA, 25 bp, Homo sapien
ggacttagcctcagatttgccttga

SEQ ID NO: 4002747 - DNA, 25 bp, Homo sapien
tagcaagcagtttgcagacgcagga

SEQ ID NO: 4002748 - DNA, 25 bp, Homo sapien
tgcagcaagcagatgtgaacctcca

SEQ ID NO: 4002749 - DNA, 25 bp, Homo sapien
acaccatttggcccccggaagcagc

SEQ ID NO: 4002750 - DNA, 25 bp, Homo sapien
aacaccatttggcccccggaagcag

SEQ ID NO: 4002751 - DNA, 25 bp, Homo sapien
caacaccatttggcccccggaagca

SEQ ID NO: 4002752 - DNA, 25 bp, Homo sapien
tagtgcgttggtaggtagggataac

SEQ ID NO: 4002753 - DNA, 25 bp, Homo sapien
tgtagtgcgttggtaggtagggata

SEQ ID NO: 4002754 - DNA, 25 bp, Homo sapien
gcgttggtaggtagggataacctga

SEQ ID NO: 4002755 - DNA, 25 bp, Homo sapien
ccagattgtagtgcgttggtaggta

SEQ ID NO: 4002756 - DNA, 25 bp, Homo sapien
gatgcatgcactgatcttcagatag

SEQ ID NO: 4002757 - DNA, 25 bp, Homo sapien
tgtggcgacacctgatttccctcgg

SEQ ID NO: 4002758 - DNA, 25 bp, Homo sapien
gatggaacgttatgctgttcccaga

SEQ ID NO: 4002759 - DNA, 25 bp, Homo sapien
tctgagttagaacattgtggcgaca

SEQ ID NO: 4002760 - DNA, 25 bp, Homo sapien
tacgtgatgcgctactttgagagct

SEQ ID NO: 4002761 - DNA, 25 bp, Homo sapien
cagaagaagctgctccgaggttgca

SEQ ID NO: 4002762 - DNA, 25 bp, Homo sapien
catcttgaagagacctgaccgcgtt

SEQ ID NO: 4002763 - DNA, 25 bp, Homo sapien
tcaaagtaccctacaggaggaccag

SEQ ID NO: 4002764 - DNA, 25 bp, Homo sapien
gggacactgagatcctagaagcaat

SEQ ID NO: 4002765 - DNA, 25 bp, Homo sapien
caataactgcatctgcgacgtggga

SEQ ID NO: 4002766 - DNA, 25 bp, Homo sapien
caatggcctatgtaagtacttggca

SEQ ID NO: 4002767 - DNA, 25 bp, Homo sapien
agagcttggctcgtgtgcttccgga

SEQ ID NO: 4002768 - DNA, 25 bp, Homo sapien
cagcccttagcagggaaacagctaa

SEQ ID NO: 4002769 - DNA, 25 bp, Homo sapien
gctaattccccagattgcaacaggc

SEQ ID NO: 4002770 - DNA, 25 bp, Homo sapien
gcttttgtctatgggactcaatgca

SEQ ID NO: 4002771 - DNA, 25 bp, Homo sapien
tctccgaccagacaccttgacaggg

SEQ ID NO: 4002772 - DNA, 25 bp, Homo sapien
caataagtgatgactgtgtgccaga

SEQ ID NO: 4002773 - DNA, 25 bp, Homo sapien
tctagaacgagattgcctgggctca

SEQ ID NO: 4002774 - DNA, 25 bp, Homo sapien
gctaaactcctactcaagagggata

SEQ ID NO: 4002775 - DNA, 25 bp, Homo sapien
cacagtgcaagggaaattcaaagcg

SEQ ID NO: 4002776 - DNA, 25 bp, Homo sapien
aggagggcgggaaacatctcgcttt

SEQ ID NO: 4002777 - DNA, 25 bp, Homo sapien
tatgcagtctgctcttgtcctagga

SEQ ID NO: 4002778 - DNA, 25 bp, Homo sapien
catctcgctttgtacactgctgtgc

SEQ ID NO: 4002779 - DNA, 25 bp, Homo sapien
cagcaaggcgcctgtgtataatagg

SEQ ID NO: 4002780 - DNA, 25 bp, Homo sapien
gtaagcctcctaagtattgcttaga

SEQ ID NO: 4002781 - DNA, 25 bp, Homo sapien
tatcagaattaagtaggcacaacac

SEQ ID NO: 4002782 - DNA, 25 bp, Homo sapien
ttatcagaattaagtaggcacaaca

SEQ ID NO: 4002783 - DNA, 25 bp, Homo sapien
ttaatccaaagaagtaagcctccta

SEQ ID NO: 4002784 - DNA, 25 bp, Homo sapien
cagccaggggagtaacgtggcactc

SEQ ID NO: 4002785 - DNA, 25 bp, Homo sapien
gccaggggagtaacgtggcactcac

SEQ ID NO: 4002786 - DNA, 25 bp, Homo sapien
ggagtaacgtggcactcaccagcat

SEQ ID NO: 4002787 - DNA, 25 bp, Homo sapien
aggggagtaacgtggcactcaccag

SEQ ID NO: 4002788 - DNA, 25 bp, Homo sapien
taagaccagcctcgggctaaaccca

SEQ ID NO: 4002789 - DNA, 25 bp, Homo sapien
aaacagtcgctgcatctaagaccag

SEQ ID NO: 4002790 - DNA, 25 bp, Homo sapien
ctgaaacagtcgctgcatctaagac

SEQ ID NO: 4002791 - DNA, 25 bp, Homo sapien
tctaagaccagcctcgggctaaacc

SEQ ID NO: 4002792 - DNA, 25 bp, Homo sapien
caggccatcgatttgacactgcagg

SEQ ID NO: 4002793 - DNA, 25 bp, Homo sapien
gctgcaaataatcagaagccaaggc

SEQ ID NO: 4002794 - DNA, 25 bp, Homo sapien
ccaaggccaggccatcgatttgaca

SEQ ID NO: 4002795 - DNA, 25 bp, Homo sapien
tcgatttgacactgcaggcagatga

SEQ ID NO: 4002796 - DNA, 25 bp, Homo sapien
cacttggctctttctcccaggatgc

SEQ ID NO: 4002797 - DNA, 25 bp, Homo sapien
aggaaggcaatagccacagccaagt

SEQ ID NO: 4002798 - DNA, 25 bp, Homo sapien
aagttactcagcagccccacttggc

SEQ ID NO: 4002799 - DNA, 25 bp, Homo sapien
atagccacagccaagttactcagca

SEQ ID NO: 4002800 - DNA, 25 bp, Homo sapien
agtagcacccctggccactggaaca

SEQ ID NO: 4002801 - DNA, 25 bp, Homo sapien
tggctccaggccactaaatgccagt

SEQ ID NO: 4002802 - DNA, 25 bp, Homo sapien
aatgccctcctaccctatttccaag

SEQ ID NO: 4002803 - DNA, 25 bp, Homo sapien
tggaacaactaaaaatgccctccta

SEQ ID NO: 4002804 - DNA, 25 bp, Homo sapien
tcttgtgtgcagatctccagtctga

SEQ ID NO: 4002805 - DNA, 25 bp, Homo sapien
tccagtctgaatgggctacacgtgg

SEQ ID NO: 4002806 - DNA, 25 bp, Homo sapien
cacgtggaatttactaacactccgg

SEQ ID NO: 4002807 - DNA, 25 bp, Homo sapien
tggaatcactcggtgaggacctcac

SEQ ID NO: 4002808 - DNA, 25 bp, Homo sapien
tggagcttatagaacccagggcagc

SEQ ID NO: 4002809 - DNA, 25 bp, Homo sapien
ttggccaggctaaaatctcataacg

SEQ ID NO: 4002810 - DNA, 25 bp, Homo sapien
gccgcaccacggattgaacaagttt

SEQ ID NO: 4002811 - DNA, 25 bp, Homo sapien
cagtcaaagccgtcctgagctgtat

SEQ ID NO: 4002812 - DNA, 25 bp, Homo sapien
tcaggatgtggcttaagtaagaaga

SEQ ID NO: 4002813 - DNA, 25 bp, Homo sapien
ctctgaaagtggtagaagggaattc

SEQ ID NO: 4002814 - DNA, 25 bp, Homo sapien
tttcctagagttcagctgcccgctg

SEQ ID NO: 4002815 - DNA, 25 bp, Homo sapien
tggccctggcgttttacgcgcactg

SEQ ID NO: 4002816 - DNA, 25 bp, Homo sapien
tgtctgtgctgattgtggttctgcc

SEQ ID NO: 4002817 - DNA, 25 bp, Homo sapien
catggagtgcctgacaatacccagc

SEQ ID NO: 4002818 - DNA, 25 bp, Homo sapien
cgagacatcagtacagggtggttcc

SEQ ID NO: 4002819 - DNA, 25 bp, Homo sapien
caggtagaaaccaataccggcaggg

SEQ ID NO: 4002820 - DNA, 25 bp, Homo sapien
caggagggtctctaccttatctcag

SEQ ID NO: 4002821 - DNA, 25 bp, Homo sapien
cacgctggtgacaggctatgtggca

SEQ ID NO: 4002822 - DNA, 25 bp, Homo sapien
ctctaccttatctcagaatgaaggc

SEQ ID NO: 4002823 - DNA, 25 bp, Homo sapien
tggccggaaggagacagacggcaaa

SEQ ID NO: 4002824 - DNA, 25 bp, Homo sapien
gaagtctagcttgatacccttggcc

SEQ ID NO: 4002825 - DNA, 25 bp, Homo sapien
tctaatggaaccctccttggcggct

SEQ ID NO: 4002826 - DNA, 25 bp, Homo sapien
gcctgtataactgagccttgtgcca

SEQ ID NO: 4002827 - DNA, 25 bp, Homo sapien
gagggactcccagaaatgaagcctt

SEQ ID NO: 4002828 - DNA, 25 bp, Homo sapien
ctgaagaaggctcgagattaatgca

SEQ ID NO: 4002829 - DNA, 25 bp, Homo sapien
gatctgggattgcatcttggacctc

SEQ ID NO: 4002830 - DNA, 25 bp, Homo sapien
ggcatgtgcctctcgataagatgca

SEQ ID NO: 4002831 - DNA, 25 bp, Homo sapien
tcaaagttaacatcgccagaaaggg

SEQ ID NO: 4002832 - DNA, 25 bp, Homo sapien
gatttgctgattttgacaaccctac

SEQ ID NO: 4002833 - DNA, 25 bp, Homo sapien
caggcatgcatatacaaacagaggg

SEQ ID NO: 4002834 - DNA, 25 bp, Homo sapien
ggtgcataatgaacccattttcaaa

SEQ ID NO: 4002835 - DNA, 25 bp, Homo sapien
gcgtgtaccacaacacctcgctatt

SEQ ID NO: 4002836 - DNA, 25 bp, Homo sapien
gacaagctgactctggtggcaacgt

SEQ ID NO: 4002837 - DNA, 25 bp, Homo sapien
tgaagacgcagctggcaccaatgta

SEQ ID NO: 4002838 - DNA, 25 bp, Homo sapien
taggtttcccaaaagccgagtatgc

SEQ ID NO: 4002839 - DNA, 25 bp, Homo sapien
gaactgctgggacgtgaagactctc

SEQ ID NO: 4002840 - DNA, 25 bp, Homo sapien
tggcctggacaactaacagcatctg

SEQ ID NO: 4002841 - DNA, 25 bp, Homo sapien
tgtgaacccattaggagagccctct

SEQ ID NO: 4002842 - DNA, 25 bp, Homo sapien
tgcaaagggcctagacacaggagtg

SEQ ID NO: 4002843 - DNA, 25 bp, Homo sapien
gatttatcttgggatcgcaggccct

SEQ ID NO: 4002844 - DNA, 25 bp, Homo sapien
ggaaccatccccgtccagatggtgc

SEQ ID NO: 4002845 - DNA, 25 bp, Homo sapien
tggggaaccatccccgtccagatgg

SEQ ID NO: 4002846 - DNA, 25 bp, Homo sapien
gggaaccatccccgtccagatggtg

SEQ ID NO: 4002847 - DNA, 25 bp, Homo sapien
gaacaggcccacgtagaacatagag

SEQ ID NO: 4002848 - DNA, 25 bp, Homo sapien
tcagcacattgacgaagaacaggcc

SEQ ID NO: 4002849 - DNA, 25 bp, Homo sapien
tccgagtcagcatcgtaaaggcccg

SEQ ID NO: 4002850 - DNA, 25 bp, Homo sapien
tcaaagacgtcgagctccgagtcag

SEQ ID NO: 4002851 - DNA, 25 bp, Homo sapien
aaggatctctcgaccgcccgggcgg

SEQ ID NO: 4002852 - DNA, 25 bp, Homo sapien
gcgaggcgggcccccctgaagtggc

SEQ ID NO: 4002853 - DNA, 25 bp, Homo sapien
caccgcggctcagtgtctagggccg

SEQ ID NO: 4002854 - DNA, 25 bp, Homo sapien
tgtctagggccggtcccggcagcct

SEQ ID NO: 4002855 - DNA, 25 bp, Homo sapien
gatctcaaatcgaattcgctctgcg

SEQ ID NO: 4002856 - DNA, 25 bp, Homo sapien
tcccaaagcgccaattttcatggtg

SEQ ID NO: 4002857 - DNA, 25 bp, Homo sapien
tgctaaggccgcaaaagccgaagga

SEQ ID NO: 4002858 - DNA, 25 bp, Homo sapien
cggttgccctggaaattttggacat

SEQ ID NO: 4002859 - DNA, 25 bp, Homo sapien
tgctgggattatggccagaactgag

SEQ ID NO: 4002860 - DNA, 25 bp, Homo sapien
gggagattcctttcaaagcacactg

SEQ ID NO: 4002861 - DNA, 25 bp, Homo sapien
tgagcccaagggagattcctttcaa

SEQ ID NO: 4002862 - DNA, 25 bp, Homo sapien
gaactgaggttttgagcccaaggga

SEQ ID NO: 4002863 - DNA, 25 bp, Homo sapien
tctgcacgaggccaagtttgtctga

SEQ ID NO: 4002864 - DNA, 25 bp, Homo sapien
gtttccgcttttgcaatggcacagg

SEQ ID NO: 4002865 - DNA, 25 bp, Homo sapien
gcaggtaggccaatccggacatgtc

SEQ ID NO: 4002866 - DNA, 25 bp, Homo sapien
taagtagtccagcatttacccagaa

SEQ ID NO: 4002867 - DNA, 25 bp, Homo sapien
atattctggaccgattggcctggcc

SEQ ID NO: 4002868 - DNA, 25 bp, Homo sapien
cagtggctccctcagtaaaaaatga

SEQ ID NO: 4002869 - DNA, 25 bp, Homo sapien
gacaaatctatgctacagtggctcc

SEQ ID NO: 4002870 - DNA, 25 bp, Homo sapien
caatgcttgtgggtactgtgggcct

SEQ ID NO: 4002871 - DNA, 25 bp, Homo sapien
gcactaatatccacagaaggctttc

SEQ ID NO: 4002872 - DNA, 25 bp, Homo sapien
caaaatttagccttattctaagcac

SEQ ID NO: 4002873 - DNA, 25 bp, Homo sapien
cagctaatgtttgtgataggtttca

SEQ ID NO: 4002874 - DNA, 25 bp, Homo sapien
tctgtgtactgtttgctctgctgtt

SEQ ID NO: 4002875 - DNA, 25 bp, Homo sapien
tctatggtcaagtaaacagcgcgcg

SEQ ID NO: 4002876 - DNA, 25 bp, Homo sapien
gaagtgaaacctcatgccgtggaat

SEQ ID NO: 4002877 - DNA, 25 bp, Homo sapien
cctggaagcggtgcaacttttggca

SEQ ID NO: 4002878 - DNA, 25 bp, Homo sapien
taagtgaacgctgactgggtcctcc

SEQ ID NO: 4002879 - DNA, 25 bp, Homo sapien
ctggtgttctccatgggcttccttc

SEQ ID NO: 4002880 - DNA, 25 bp, Homo sapien
gtgtagatgccaggctccatgggac

SEQ ID NO: 4002881 - DNA, 25 bp, Homo sapien
tgggacagtgggcaagctcctcatc

SEQ ID NO: 4002882 - DNA, 25 bp, Homo sapien
tcttggtgactggtgttctccatgg

SEQ ID NO: 4002883 - DNA, 25 bp, Homo sapien
ctgcccgcaggagtgaggacccgtt

SEQ ID NO: 4002884 - DNA, 25 bp, Homo sapien
tcagcacaatagagggtcacttgcc

SEQ ID NO: 4002885 - DNA, 25 bp, Homo sapien
tgaggacccgtttcctgaggacacc

SEQ ID NO: 4002886 - DNA, 25 bp, Homo sapien
aggctgtcagcacaatagagggtca

SEQ ID NO: 4002887 - DNA, 25 bp, Homo sapien
tcctagggtgggaatcacagaggcc

SEQ ID NO: 4002888 - DNA, 25 bp, Homo sapien
gttaaacggaagctgccatcgccat

SEQ ID NO: 4002889 - DNA, 25 bp, Homo sapien
gcggaatcagctctcgttaaacgga

SEQ ID NO: 4002890 - DNA, 25 bp, Homo sapien
ccttaggtcacagcttgcagcggaa

SEQ ID NO: 4002891 - DNA, 25 bp, Homo sapien
tgagacttctgacgtaaccatggtg

SEQ ID NO: 4002892 - DNA, 25 bp, Homo sapien
tgcctggcataacctagctggctgt

SEQ ID NO: 4002893 - DNA, 25 bp, Homo sapien
gaactcttgtgtttagtagcctgca

SEQ ID NO: 4002894 - DNA, 25 bp, Homo sapien
gctgttcctcaaaagatcctcgcga

SEQ ID NO: 4002895 - DNA, 25 bp, Homo sapien
ttttaaacgagaagccagatcatgt

SEQ ID NO: 4002896 - DNA, 25 bp, Homo sapien
tgaattattgcagtagtctcttgcc

SEQ ID NO: 4002897 - DNA, 25 bp, Homo sapien
gttcaaagtgggctcccatgccagt

SEQ ID NO: 4002898 - DNA, 25 bp, Homo sapien
agtctcttgcccagtcacttgcttc

SEQ ID NO: 4002899 - DNA, 25 bp, Homo sapien
tcataaagattctgcaggatccaac

SEQ ID NO: 4002900 - DNA, 25 bp, Homo sapien
tgtttgaaatcctgaccacatcgcc

SEQ ID NO: 4002901 - DNA, 25 bp, Homo sapien
ggatccaacttcctagcattctgcg

SEQ ID NO: 4002902 - DNA, 25 bp, Homo sapien
ttttaggcagagtggaagtccctgg

SEQ ID NO: 4002903 - DNA, 25 bp, Homo sapien
ccctatctcttgtggttgttctgaa

SEQ ID NO: 4002904 - DNA, 25 bp, Homo sapien
aggagattcccttgcagaacttgaa

SEQ ID NO: 4002905 - DNA, 25 bp, Homo sapien
tgtataatcacttgcatgggctagg

SEQ ID NO: 4002906 - DNA, 25 bp, Homo sapien
cagctacatgtgtgctcagaaggta

SEQ ID NO: 4002907 - DNA, 25 bp, Homo sapien
ctggccaaggcagctcatcatgtgc

SEQ ID NO: 4002908 - DNA, 25 bp, Homo sapien
cctggccaaggcagctcatcatgtg

SEQ ID NO: 4002909 - DNA, 25 bp, Homo sapien
tgcctggccaaggcagctcatcatg

SEQ ID NO: 4002910 - DNA, 25 bp, Homo sapien
gcctggccaaggcagctcatcatgt

SEQ ID NO: 4002911 - DNA, 25 bp, Homo sapien
tgcccttgttcagcgcctctcgaag

SEQ ID NO: 4002912 - DNA, 25 bp, Homo sapien
aaatcattcgcgttccacctggtgc

SEQ ID NO: 4002913 - DNA, 25 bp, Homo sapien
attcccctgaaaaagcctgcccttg

SEQ ID NO: 4002914 - DNA, 25 bp, Homo sapien
ttaaactggaaaggtcaatcgacat

SEQ ID NO: 4002915 - DNA, 25 bp, Homo sapien
catttacagacgaggccatgaagcc

SEQ ID NO: 4002916 - DNA, 25 bp, Homo sapien
cacaggccttaattggatggtcaga

SEQ ID NO: 4002917 - DNA, 25 bp, Homo sapien
tgcacgcaggctggaataactcacg

SEQ ID NO: 4002918 - DNA, 25 bp, Homo sapien
tgtctgaagggttgaaaggcacctc

SEQ ID NO: 4002919 - DNA, 25 bp, Homo sapien
gcccactctcacgtccaggaggaag

SEQ ID NO: 4002920 - DNA, 25 bp, Homo sapien
ctgcctccccaggtgttaggctgga

SEQ ID NO: 4002921 - DNA, 25 bp, Homo sapien
ctccccaggtgttaggctggacttt

SEQ ID NO: 4002922 - DNA, 25 bp, Homo sapien
actctcacgtccaggaggaagccct

SEQ ID NO: 4002923 - DNA, 25 bp, Homo sapien
ctcaggcagcggagtgatgttgatg

SEQ ID NO: 4002924 - DNA, 25 bp, Homo sapien
cagatgtcctcaggcagcggagtga

SEQ ID NO: 4002925 - DNA, 25 bp, Homo sapien
tgatgttgatggctgtctgcagcat

SEQ ID NO: 4002926 - DNA, 25 bp, Homo sapien
agtgatgttgatggctgtctgcagc

SEQ ID NO: 4002927 - DNA, 25 bp, Homo sapien
gaaccgagaagaccttaagcagcat

SEQ ID NO: 4002928 - DNA, 25 bp, Homo sapien
ccaagcgagcaagatgtgtgtccaa

SEQ ID NO: 4002929 - DNA, 25 bp, Homo sapien
caaggaccatgtacccaggtgacag

SEQ ID NO: 4002930 - DNA, 25 bp, Homo sapien
tgcctgcgtgggaaccttctgtgct

SEQ ID NO: 4002931 - DNA, 25 bp, Homo sapien
gaattctgtgaatcaattcctcctt

SEQ ID NO: 4002932 - DNA, 25 bp, Homo sapien
ttcttcttgacgcacattatagaaa

SEQ ID NO: 4002933 - DNA, 25 bp, Homo sapien
agatacgttccttaaaagttgcctg

SEQ ID NO: 4002934 - DNA, 25 bp, Homo sapien
tcttcttgacgcacattatagaaaa

SEQ ID NO: 4002935 - DNA, 25 bp, Homo sapien
atgcccagagccacggcactctcct

SEQ ID NO: 4002936 - DNA, 25 bp, Homo sapien
tcacatgcccagagccacggcactc

SEQ ID NO: 4002937 - DNA, 25 bp, Homo sapien
acatgcccagagccacggcactctc

SEQ ID NO: 4002938 - DNA, 25 bp, Homo sapien
cccagagccacggcactctcctcac

SEQ ID NO: 4002939 - DNA, 25 bp, Homo sapien
gtgtccagccgtccggttagccatg

SEQ ID NO: 4002940 - DNA, 25 bp, Homo sapien
caccgtatcctgtagccagagtaaa

SEQ ID NO: 4002941 - DNA, 25 bp, Homo sapien
cgtccggttagccatgtcccacagg

SEQ ID NO: 4002942 - DNA, 25 bp, Homo sapien
cagatagcagaaggctcgtgtccag

SEQ ID NO: 4002943 - DNA, 25 bp, Homo sapien
gctgttatccatcacggcctttctg

SEQ ID NO: 4002944 - DNA, 25 bp, Homo sapien
gtggctccgcacatactccctgatt

SEQ ID NO: 4002945 - DNA, 25 bp, Homo sapien
tgtccacttaacaacctcagctgtg

SEQ ID NO: 4002946 - DNA, 25 bp, Homo sapien
tgccagggcagacgtcaacagagcc

SEQ ID NO: 4002947 - DNA, 25 bp, Homo sapien
gatgtgtcatagaacgtcatcagcc

SEQ ID NO: 4002948 - DNA, 25 bp, Homo sapien
gtcatcagccatcggtctggcctag

SEQ ID NO: 4002949 - DNA, 25 bp, Homo sapien
gatagtatcttcagttcttgttgta

SEQ ID NO: 4002950 - DNA, 25 bp, Homo sapien
tgtagatgatgtgtcatagaacgtc

SEQ ID NO: 4002951 - DNA, 25 bp, Homo sapien
tgttaaaacacacggtaggagagac

SEQ ID NO: 4002952 - DNA, 25 bp, Homo sapien
acacacggtaggagagactttggtg

SEQ ID NO: 4002953 - DNA, 25 bp, Homo sapien
ctgttaaaacacacggtaggagaga

SEQ ID NO: 4002954 - DNA, 25 bp, Homo sapien
aaaacacacggtaggagagactttg

SEQ ID NO: 4002955 - DNA, 25 bp, Homo sapien
tgcatttccacagtcggcagggtcc

SEQ ID NO: 4002956 - DNA, 25 bp, Homo sapien
agtgttcagcctgtcggaggccgac

SEQ ID NO: 4002957 - DNA, 25 bp, Homo sapien
cacgcacagtcaattcaggcaggtc

SEQ ID NO: 4002958 - DNA, 25 bp, Homo sapien
tttagtgctccgaacggcagctgcc

SEQ ID NO: 4002959 - DNA, 25 bp, Homo sapien
ggaaacgctgtccttctctgtgaca

SEQ ID NO: 4002960 - DNA, 25 bp, Homo sapien
tctgagccagacctgtacagcctgg

SEQ ID NO: 4002961 - DNA, 25 bp, Homo sapien
catgtgcaccagtgtcaggctcggc

SEQ ID NO: 4002962 - DNA, 25 bp, Homo sapien
gaagcagatgctcctgccaagtccc

SEQ ID NO: 4002963 - DNA, 25 bp, Homo sapien
ttttccacaatgaattccagctgca

SEQ ID NO: 4002964 - DNA, 25 bp, Homo sapien
tttgcctccaagcaggatgcccact

SEQ ID NO: 4002965 - DNA, 25 bp, Homo sapien
acacccggcatctgaagtgctggaa

SEQ ID NO: 4002966 - DNA, 25 bp, Homo sapien
aacacccggcatctgaagtgctgga

SEQ ID NO: 4002967 - DNA, 25 bp, Homo sapien
gaaccagttgggaccgtgaagactc

SEQ ID NO: 4002968 - DNA, 25 bp, Homo sapien
cagttgggaccgtgaagactcccga

SEQ ID NO: 4002969 - DNA, 25 bp, Homo sapien
ccagttgggaccgtgaagactcccg

SEQ ID NO: 4002970 - DNA, 25 bp, Homo sapien
cctggccatagggtagtctcgggag

SEQ ID NO: 4002971 - DNA, 25 bp, Homo sapien
gggcattaggtatccgccggagcct

SEQ ID NO: 4002972 - DNA, 25 bp, Homo sapien
ggagccgcgctgagatcttttgcca

SEQ ID NO: 4002973 - DNA, 25 bp, Homo sapien
tctggtcactggtgagaccttccac

SEQ ID NO: 4002974 - DNA, 25 bp, Homo sapien
ggacaaaccacgaccaccgtggcca

SEQ ID NO: 4002975 - DNA, 25 bp, Homo sapien
caaaccacgaccaccgtggccatct

SEQ ID NO: 4002976 - DNA, 25 bp, Homo sapien
gacaaaccacgaccaccgtggccat

SEQ ID NO: 4002977 - DNA, 25 bp, Homo sapien
aaaccacgaccaccgtggccatctg

SEQ ID NO: 4002978 - DNA, 25 bp, Homo sapien
cgcaggaactcccaaaccttggctt

SEQ ID NO: 4002979 - DNA, 25 bp, Homo sapien
ccttggctttgaatattgttgtgga

SEQ ID NO: 4002980 - DNA, 25 bp, Homo sapien
gaggtgtgctcgtccctttctggac

SEQ ID NO: 4002981 - DNA, 25 bp, Homo sapien
tctggacgtgcaaggtacctgtccc

SEQ ID NO: 4002982 - DNA, 25 bp, Homo sapien
cgtgccaaggggatcgaaggattcc

SEQ ID NO: 4002983 - DNA, 25 bp, Homo sapien
gatcgaaggattcccctgagtcatc

SEQ ID NO: 4002984 - DNA, 25 bp, Homo sapien
ccacatcgtgccaaggggatcgaag

SEQ ID NO: 4002985 - DNA, 25 bp, Homo sapien
taatcactcccccacatcgtgccaa

SEQ ID NO: 4002986 - DNA, 25 bp, Homo sapien
catccccattgctaggggtctgaag

SEQ ID NO: 4002987 - DNA, 25 bp, Homo sapien
ggggcatccccattgctaggggtct

SEQ ID NO: 4002988 - DNA, 25 bp, Homo sapien
ggcatccccattgctaggggtctga

SEQ ID NO: 4002989 - DNA, 25 bp, Homo sapien
tccccattgctaggggtctgaagac

SEQ ID NO: 4002990 - DNA, 25 bp, Homo sapien
tcggcgcactttgaccccaatagag

SEQ ID NO: 4002991 - DNA, 25 bp, Homo sapien
gatagcttggcagtaactcggcgca

SEQ ID NO: 4002992 - DNA, 25 bp, Homo sapien
tagcagatagccacactccttgcgg

SEQ ID NO: 4002993 - DNA, 25 bp, Homo sapien
tccttgcggcaggaagttctacaca

SEQ ID NO: 4002994 - DNA, 25 bp, Homo sapien
catcaaggtggacttcaggcatggc

SEQ ID NO: 4002995 - DNA, 25 bp, Homo sapien
gatcacacaatgcatcagggctctg

SEQ ID NO: 4002996 - DNA, 25 bp, Homo sapien
gaaatgtggcgcatggaacaaggac

SEQ ID NO: 4002997 - DNA, 25 bp, Homo sapien
ccaggactctgggttgtaagtgaca

SEQ ID NO: 4002998 - DNA, 25 bp, Homo sapien
tagacagcactcctgatgcacggga

SEQ ID NO: 4002999 - DNA, 25 bp, Homo sapien
cagtgtgacccaagcccgttattta

SEQ ID NO: 4003000 - DNA, 25 bp, Homo sapien
gactgggcacacatcacgtattaag

SEQ ID NO: 4003001 - DNA, 25 bp, Homo sapien
gcaggacgtaccacgagaactggga

SEQ ID NO: 4003002 - DNA, 25 bp, Homo sapien
tgttttacacaggtgatgcgggacc

SEQ ID NO: 4003003 - DNA, 25 bp, Homo sapien
tgttcacagtccctacatcggaagg

SEQ ID NO: 4003004 - DNA, 25 bp, Homo sapien
tggatacccaacacttgcgtaagga

SEQ ID NO: 4003005 - DNA, 25 bp, Homo sapien
cctgggagcagttcctgcacagaca

SEQ ID NO: 4003006 - DNA, 25 bp, Homo sapien
aagtatgacgtgtccaccaggctgc

SEQ ID NO: 4003007 - DNA, 25 bp, Homo sapien
tctatgatgcgcagaaagttgccct

SEQ ID NO: 4003008 - DNA, 25 bp, Homo sapien
gaatggaaataagagcccgtgcctc

SEQ ID NO: 4003009 - DNA, 25 bp, Homo sapien
caagcagatgtttagtggacagcca

SEQ ID NO: 4003010 - DNA, 25 bp, Homo sapien
gagggtacccacatggttccaggca

SEQ ID NO: 4003011 - DNA, 25 bp, Homo sapien
ccagttaatgctgcgtgcacggcgg

SEQ ID NO: 4003012 - DNA, 25 bp, Homo sapien
agttaagctgctacaacaaccaggg

SEQ ID NO: 4003013 - DNA, 25 bp, Homo sapien
taacaaaataacacggcatcccagt

SEQ ID NO: 4003014 - DNA, 25 bp, Homo sapien
gctaagggcgaaaaagcagttccgc

SEQ ID NO: 4003015 - DNA, 25 bp, Homo sapien
tcgaagaggcagtcgaagctctcgc

SEQ ID NO: 4003016 - DNA, 25 bp, Homo sapien
cctgaaagtgcacgcggatgctcgt

SEQ ID NO: 4003017 - DNA, 25 bp, Homo sapien
agtagaatccgcaggcgtccaggag

SEQ ID NO: 4003018 - DNA, 25 bp, Homo sapien
gagactgcattgtcggctgccacct

SEQ ID NO: 4003019 - DNA, 25 bp, Homo sapien
taatcggcgtgcgaacggaatgtgc

SEQ ID NO: 4003020 - DNA, 25 bp, Homo sapien
aggaggaaggttctggccgccgtcg

SEQ ID NO: 4003021 - DNA, 25 bp, Homo sapien
gaatgtgcggaagtgcgtgtcgccg

SEQ ID NO: 4003022 - DNA, 25 bp, Homo sapien
gtgggccatagcgtccgggggtgcg

SEQ ID NO: 4003023 - DNA, 25 bp, Homo sapien
ggtgggccatagcgtccgggggtgc

SEQ ID NO: 4003024 - DNA, 25 bp, Homo sapien
agccggaggggtgggccatagcgtc

SEQ ID NO: 4003025 - DNA, 25 bp, Homo sapien
cggaggggtgggccatagcgtccgg

SEQ ID NO: 4003026 - DNA, 25 bp, Homo sapien
ggacaactccggagggcggcgctcc

SEQ ID NO: 4003027 - DNA, 25 bp, Homo sapien
cggatccgttcagcctcagtggaca

SEQ ID NO: 4003028 - DNA, 25 bp, Homo sapien
ggcgagcacggagcaccaagtccgc

SEQ ID NO: 4003029 - DNA, 25 bp, Homo sapien
aggtgtgcgccggccggacaactcc

SEQ ID NO: 4003030 - DNA, 25 bp, Homo sapien
ggggccaggagccgtgcagctgcca

SEQ ID NO: 4003031 - DNA, 25 bp, Homo sapien
cggggccaggagccgtgcagctgcc

SEQ ID NO: 4003032 - DNA, 25 bp, Homo sapien
catgcagagccaagggcaaaatgcc

SEQ ID NO: 4003033 - DNA, 25 bp, Homo sapien
gagccaagggcaaaatgccaggcat

SEQ ID NO: 4003034 - DNA, 25 bp, Homo sapien
gccagacatgcagagccaagggcaa

SEQ ID NO: 4003035 - DNA, 25 bp, Homo sapien
cagacatgcagagccaagggcaaaa

SEQ ID NO: 4003036 - DNA, 25 bp, Homo sapien
cacgatgagctgtagtagtggcctt

SEQ ID NO: 4003037 - DNA, 25 bp, Homo sapien
gtagtagtggccttgggacactttc

SEQ ID NO: 4003038 - DNA, 25 bp, Homo sapien
gctttagccacgatgagctgtagta

SEQ ID NO: 4003039 - DNA, 25 bp, Homo sapien
tgctgggctttagccacgatgagct

SEQ ID NO: 4003040 - DNA, 25 bp, Homo sapien
gagtgcttgcctacatgtgtgtttc

SEQ ID NO: 4003041 - DNA, 25 bp, Homo sapien
ttttcctgtcatcattgtacgtctg

SEQ ID NO: 4003042 - DNA, 25 bp, Homo sapien
ctgactgtacaagggtggcgtgtat

SEQ ID NO: 4003043 - DNA, 25 bp, Homo sapien
ttgtgagtgcttgcctacatgtgtg

SEQ ID NO: 4003044 - DNA, 25 bp, Homo sapien
caaaatgactatgactactcaggga

SEQ ID NO: 4003045 - DNA, 25 bp, Homo sapien
aaaacacataacacctttattagtg

SEQ ID NO: 4003046 - DNA, 25 bp, Homo sapien
aaacacataacacctttattagtga

SEQ ID NO: 4003047 - DNA, 25 bp, Homo sapien
atcaaaatgactatgactactcagg

SEQ ID NO: 4003048 - DNA, 25 bp, Homo sapien
agtcttccaggtacaagctttaatt

SEQ ID NO: 4003049 - DNA, 25 bp, Homo sapien
gtcttccaggtacaagctttaatta

SEQ ID NO: 4003050 - DNA, 25 bp, Homo sapien
cacgcaggaacaagccaaggagtgc

SEQ ID NO: 4003051 - DNA, 25 bp, Homo sapien
ctcctttgggtgaaacacgcaggaa

SEQ ID NO: 4003052 - DNA, 25 bp, Homo sapien
gaaatcaccatagtaacatgttcct

SEQ ID NO: 4003053 - DNA, 25 bp, Homo sapien
gtgttgcgtagaaatcaccatagta

SEQ ID NO: 4003054 - DNA, 25 bp, Homo sapien
taatagctgagcacttcatgaagtc

SEQ ID NO: 4003055 - DNA, 25 bp, Homo sapien
tgctctccatcatctgtgggctcgg

SEQ ID NO: 4003056 - DNA, 25 bp, Homo sapien
taaccaaccaaataactagccagcc

SEQ ID NO: 4003057 - DNA, 25 bp, Homo sapien
tagagtttagactaccgtcagtgtc

SEQ ID NO: 4003058 - DNA, 25 bp, Homo sapien
tctgtctgcaactctggctgaaggt

SEQ ID NO: 4003059 - DNA, 25 bp, Homo sapien
gagttcatagtctttttgtggcgct

SEQ ID NO: 4003060 - DNA, 25 bp, Homo sapien
gctccgcgtcttggttttgtacacc

SEQ ID NO: 4003061 - DNA, 25 bp, Homo sapien
tggactagtgttgggactctggctc

SEQ ID NO: 4003062 - DNA, 25 bp, Homo sapien
ggcctagctttacagaggccctggc

SEQ ID NO: 4003063 - DNA, 25 bp, Homo sapien
tcccagcaggcctagctttacagag

SEQ ID NO: 4003064 - DNA, 25 bp, Homo sapien
catcctctcccagcaggcctagctt

SEQ ID NO: 4003065 - DNA, 25 bp, Homo sapien
aggcctagctttacagaggccctgg

SEQ ID NO: 4003066 - DNA, 25 bp, Homo sapien
ctggttatatagttggggctgatta

SEQ ID NO: 4003067 - DNA, 25 bp, Homo sapien
tcccagctactggttcagggtagga

SEQ ID NO: 4003068 - DNA, 25 bp, Homo sapien
taccctggggatagtcccagctact

SEQ ID NO: 4003069 - DNA, 25 bp, Homo sapien
gctactggttcagggtaggagccct

SEQ ID NO: 4003070 - DNA, 25 bp, Homo sapien
tctctgaacactgtcgccggagcag

SEQ ID NO: 4003071 - DNA, 25 bp, Homo sapien
actgtcgccggagcagcagtgggcg

SEQ ID NO: 4003072 - DNA, 25 bp, Homo sapien
tctgaacactgtcgccggagcagca

SEQ ID NO: 4003073 - DNA, 25 bp, Homo sapien
gcagcagtgggcgtcccttcctggg

SEQ ID NO: 4003074 - DNA, 25 bp, Homo sapien
ctgggcctcggcgttgtccttgtgg

SEQ ID NO: 4003075 - DNA, 25 bp, Homo sapien
tgtccgcttgggctcggggctctgc

SEQ ID NO: 4003076 - DNA, 25 bp, Homo sapien
ggcctcggcgttgtccttgtggccc

SEQ ID NO: 4003077 - DNA, 25 bp, Homo sapien
gagggtgtccgcttgggctcggggc

SEQ ID NO: 4003078 - DNA, 25 bp, Homo sapien
tctggcctgtgttgagcttggcaca

SEQ ID NO: 4003079 - DNA, 25 bp, Homo sapien
gttatcctgactcacacaggccatg

SEQ ID NO: 4003080 - DNA, 25 bp, Homo sapien
cctcgcccgctgatgacaaggagaa

SEQ ID NO: 4003081 - DNA, 25 bp, Homo sapien
ttttcatggaggattcgtggccccg

SEQ ID NO: 4003082 - DNA, 25 bp, Homo sapien
gtctacgttgcctgtctctctgggc

SEQ ID NO: 4003083 - DNA, 25 bp, Homo sapien
ggtctacgttgcctgtctctctggg

SEQ ID NO: 4003084 - DNA, 25 bp, Homo sapien
actggggccagttcggatgccacac

SEQ ID NO: 4003085 - DNA, 25 bp, Homo sapien
gggccagttcggatgccacaccata

SEQ ID NO: 4003086 - DNA, 25 bp, Homo sapien
tgccacaccatagtcctcatttgcc

SEQ ID NO: 4003087 - DNA, 25 bp, Homo sapien
gagcactggggccagttcggatgcc

SEQ ID NO: 4003088 - DNA, 25 bp, Homo sapien
tgggatgggagttagggattgaatt

SEQ ID NO: 4003089 - DNA, 25 bp, Homo sapien
ctgggatgggagttagggattgaat

SEQ ID NO: 4003090 - DNA, 25 bp, Homo sapien
gatgcaagatggacaccaccaacca

SEQ ID NO: 4003091 - DNA, 25 bp, Homo sapien
tgcaagatggacaccaccaaccaga

SEQ ID NO: 4003092 - DNA, 25 bp, Homo sapien
caggccagaaaccaagctgggatga

SEQ ID NO: 4003093 - DNA, 25 bp, Homo sapien
ttgtccaaggcatgggaacaggcca

SEQ ID NO: 4003094 - DNA, 25 bp, Homo sapien
gatcctggaatctatgatgtaagga

SEQ ID NO: 4003095 - DNA, 25 bp, Homo sapien
cagaaactcgttgcttcctaaagat

SEQ ID NO: 4003096 - DNA, 25 bp, Homo sapien
ggctaaggttggcactctccgaagt

SEQ ID NO: 4003097 - DNA, 25 bp, Homo sapien
tcagtggctatggttggctaaggtt

SEQ ID NO: 4003098 - DNA, 25 bp, Homo sapien
ctcactcggtgtttcttgggcaggt

SEQ ID NO: 4003099 - DNA, 25 bp, Homo sapien
tcttgtgggcttctcggcggcaact

SEQ ID NO: 4003100 - DNA, 25 bp, Homo sapien
tgctcgtttcactcagatcttgtgg

SEQ ID NO: 4003101 - DNA, 25 bp, Homo sapien
tgactttctcttaacttccagctgg

SEQ ID NO: 4003102 - DNA, 25 bp, Homo sapien
gctgggggtgaggggcccaggaagc

SEQ ID NO: 4003103 - DNA, 25 bp, Homo sapien
gcgactttttcttaatttccagctg

SEQ ID NO: 4003104 - DNA, 25 bp, Homo sapien
ttcttaatttccagctgggggtgag

SEQ ID NO: 4003105 - DNA, 25 bp, Homo sapien
agctgggggtgaggggcccaggaag

SEQ ID NO: 4003106 - DNA, 25 bp, Homo sapien
ttagtgccttctgcatgttctcttc

SEQ ID NO: 4003107 - DNA, 25 bp, Homo sapien
gccttctgcatgttctcttcctggt

SEQ ID NO: 4003108 - DNA, 25 bp, Homo sapien
gcatgttctcttcctggttctgcag

SEQ ID NO: 4003109 - DNA, 25 bp, Homo sapien
gtgccttctgcatgttctcttcctg

SEQ ID NO: 4003110 - DNA, 25 bp, Homo sapien
agttctggttgagggggtcacctag

SEQ ID NO: 4003111 - DNA, 25 bp, Homo sapien
tctggttgagggggtcacctaggga

SEQ ID NO: 4003112 - DNA, 25 bp, Homo sapien
ggtgcagcctccttcgagagcagtg

SEQ ID NO: 4003113 - DNA, 25 bp, Homo sapien
ccttctgcaggagcgatgctgccgc

SEQ ID NO: 4003114 - DNA, 25 bp, Homo sapien
gagagcagtgtctgcgcctatagtg

SEQ ID NO: 4003115 - DNA, 25 bp, Homo sapien
tgtacacctcgtgcgagcgttcgct

SEQ ID NO: 4003116 - DNA, 25 bp, Homo sapien
gctcctgggctgaggctgcagtggg

SEQ ID NO: 4003117 - DNA, 25 bp, Homo sapien
tgttgggagatctggtggctcctgg

SEQ ID NO: 4003118 - DNA, 25 bp, Homo sapien
tcctgggctgaggctgcagtgggcc

SEQ ID NO: 4003119 - DNA, 25 bp, Homo sapien
ggtgttgggagatctggtggctcct

SEQ ID NO: 4003120 - DNA, 25 bp, Homo sapien
tgcccttggtgttactgttggtctg

SEQ ID NO: 4003121 - DNA, 25 bp, Homo sapien
gaggagggcggaggcctgcccacct

SEQ ID NO: 4003122 - DNA, 25 bp, Homo sapien
tgcccacctgcccttggtgttactg

SEQ ID NO: 4003123 - DNA, 25 bp, Homo sapien
cacctgcccttggtgttactgttgg

SEQ ID NO: 4003124 - DNA, 25 bp, Homo sapien
tataacctaagagttcctttgttga

SEQ ID NO: 4003125 - DNA, 25 bp, Homo sapien
gggtgggcagctaggggacaggtca

SEQ ID NO: 4003126 - DNA, 25 bp, Homo sapien
cagctttgggctgaaataaacccgg

SEQ ID NO: 4003127 - DNA, 25 bp, Homo sapien
tttcagctttgggctgaaataaacc

SEQ ID NO: 4003128 - DNA, 25 bp, Homo sapien
atttattgacaggcggcattgttcc

SEQ ID NO: 4003129 - DNA, 25 bp, Homo sapien
caacatttattgacaggcggcattg

SEQ ID NO: 4003130 - DNA, 25 bp, Homo sapien
tcaacatttattgacaggcggcatt

SEQ ID NO: 4003131 - DNA, 25 bp, Homo sapien
ttcaacatttattgacaggcggcat

SEQ ID NO: 4003132 - DNA, 25 bp, Homo sapien
gcattttcaagatgtggcaagagga

SEQ ID NO: 4003133 - DNA, 25 bp, Homo sapien
tcttgaagtctggtaacattctcag

SEQ ID NO: 4003134 - DNA, 25 bp, Homo sapien
gagtttggtggatgtgctattttgt

SEQ ID NO: 4003135 - DNA, 25 bp, Homo sapien
gtctggtaacattctcaggcaggag

SEQ ID NO: 4003136 - DNA, 25 bp, Homo sapien
atcgcggtctgtacctggggcggca

SEQ ID NO: 4003137 - DNA, 25 bp, Homo sapien
tacatcgcggtctgtacctggggcg

SEQ ID NO: 4003138 - DNA, 25 bp, Homo sapien
catcgcggtctgtacctggggcggc

SEQ ID NO: 4003139 - DNA, 25 bp, Homo sapien
ctacatcgcggtctgtacctggggc

SEQ ID NO: 4003140 - DNA, 25 bp, Homo sapien
gcctccttcgtctgcgacttctttg

SEQ ID NO: 4003141 - DNA, 25 bp, Homo sapien
gcggtaatatctgctccggctctgg

SEQ ID NO: 4003142 - DNA, 25 bp, Homo sapien
cttctttgtctctggcggtaatatc

SEQ ID NO: 4003143 - DNA, 25 bp, Homo sapien
ctctcctccgtgtctggcagctccg

SEQ ID NO: 4003144 - DNA, 25 bp, Homo sapien
aggatgggcttggcctgaatgctca

SEQ ID NO: 4003145 - DNA, 25 bp, Homo sapien
cttggcctgaatgctcagagcaggg

SEQ ID NO: 4003146 - DNA, 25 bp, Homo sapien
tgggcttggcctgaatgctcagagc

SEQ ID NO: 4003147 - DNA, 25 bp, Homo sapien
ggcctgaatgctcagagcagggcac

SEQ ID NO: 4003148 - DNA, 25 bp, Homo sapien
aactctgtgggctgtgagtcagggg

SEQ ID NO: 4003149 - DNA, 25 bp, Homo sapien
tggaactctgtgggctgtgagtcag

SEQ ID NO: 4003150 - DNA, 25 bp, Homo sapien
cacaagacccagttttgcatcaaat

SEQ ID NO: 4003151 - DNA, 25 bp, Homo sapien
tgggtgttctgctctgacgaggagg

SEQ ID NO: 4003152 - DNA, 25 bp, Homo sapien
aggccagcaggcagtcatttcttgt

SEQ ID NO: 4003153 - DNA, 25 bp, Homo sapien
tgctctgacgaggaggccccaggta

SEQ ID NO: 4003154 - DNA, 25 bp, Homo sapien
tttctgtttggcagatggccagtgt

SEQ ID NO: 4003155 - DNA, 25 bp, Homo sapien
caagccccacttgtggacactttat

SEQ ID NO: 4003156 - DNA, 25 bp, Homo sapien
ttagtctcgttttctgtttggcaga

SEQ ID NO: 4003157 - DNA, 25 bp, Homo sapien
cagctgcttcaggtctgtacaagcc

SEQ ID NO: 4003158 - DNA, 25 bp, Homo sapien
tatggcttccccttttcaagcctct

SEQ ID NO: 4003159 - DNA, 25 bp, Homo sapien
ttatggcttccccttttcaagcctc

SEQ ID NO: 4003160 - DNA, 25 bp, Homo sapien
atggcttccccttttcaagcctctg

SEQ ID NO: 4003161 - DNA, 25 bp, Homo sapien
ctctgccttgggagcggacacctta

SEQ ID NO: 4003162 - DNA, 25 bp, Homo sapien
accttagcagaagggccgtcctcca

SEQ ID NO: 4003163 - DNA, 25 bp, Homo sapien
gagcggacaccttagcagaagggcc

SEQ ID NO: 4003164 - DNA, 25 bp, Homo sapien
gtcctccagaccctttgcagccagg

SEQ ID NO: 4003165 - DNA, 25 bp, Homo sapien
ctttggggctttggcaggtgttcat

SEQ ID NO: 4003166 - DNA, 25 bp, Homo sapien
tcagggcattctgggttggagaaac

SEQ ID NO: 4003167 - DNA, 25 bp, Homo sapien
ggcattctgggttggagaaactgct

SEQ ID NO: 4003168 - DNA, 25 bp, Homo sapien
gagaaactgctttggggctttggca

SEQ ID NO: 4003169 - DNA, 25 bp, Homo sapien
gcagcatgggggccattggccagtg

SEQ ID NO: 4003170 - DNA, 25 bp, Homo sapien
tttagggccagaggttggactcctg

SEQ ID NO: 4003171 - DNA, 25 bp, Homo sapien
tgttgaaagaggtggggtatgagga

SEQ ID NO: 4003172 - DNA, 25 bp, Homo sapien
tggggtatgaggatttccttgaacc

SEQ ID NO: 4003173 - DNA, 25 bp, Homo sapien
ggaattcattatcaagtctggctgt

SEQ ID NO: 4003174 - DNA, 25 bp, Homo sapien
cggcgtgaggctgcaatcgcaggca

SEQ ID NO: 4003175 - DNA, 25 bp, Homo sapien
tcaggcgtggcggcgtgaggctgca

SEQ ID NO: 4003176 - DNA, 25 bp, Homo sapien
aggggctcctctcttcctagatagg

SEQ ID NO: 4003177 - DNA, 25 bp, Homo sapien
gggctcctctcttcctagataggat

SEQ ID NO: 4003178 - DNA, 25 bp, Homo sapien
atctctaaagatccatcaccaaacc

SEQ ID NO: 4003179 - DNA, 25 bp, Homo sapien
aatgaccttgttggcccttgttgaa

SEQ ID NO: 4003180 - DNA, 25 bp, Homo sapien
tgtcttcactttttggataatgtcc

SEQ ID NO: 4003181 - DNA, 25 bp, Homo sapien
ttctatacatagacagagaggttga

SEQ ID NO: 4003182 - DNA, 25 bp, Homo sapien
gaaatcactactggtgcagagggct

SEQ ID NO: 4003183 - DNA, 25 bp, Homo sapien
aaacattctgttcacgccatggcag

SEQ ID NO: 4003184 - DNA, 25 bp, Homo sapien
tagagagtgtcagtcatcaggcact

SEQ ID NO: 4003185 - DNA, 25 bp, Homo sapien
catgacctggtgatactctgtgagt

SEQ ID NO: 4003186 - DNA, 25 bp, Homo sapien
gttgcatccaaagtaagtaagagac

SEQ ID NO: 4003187 - DNA, 25 bp, Homo sapien
tgtgttttcataaaacctgtatttc

SEQ ID NO: 4003188 - DNA, 25 bp, Homo sapien
tacagttcaaaatttgtgtgcgtgt

SEQ ID NO: 4003189 - DNA, 25 bp, Homo sapien
ccactgcccctttgcatactttggc

SEQ ID NO: 4003190 - DNA, 25 bp, Homo sapien
gcaggtggcaggaaaccgccttcca

SEQ ID NO: 4003191 - DNA, 25 bp, Homo sapien
gctggcacagggggttgcttcaggc

SEQ ID NO: 4003192 - DNA, 25 bp, Homo sapien
ggctggcacagggggttgcttcagg

SEQ ID NO: 4003193 - DNA, 25 bp, Homo sapien
aggtggcaggaaaccgccttccaag

SEQ ID NO: 4003194 - DNA, 25 bp, Homo sapien
taagccaggtttcaactgagagcga

SEQ ID NO: 4003195 - DNA, 25 bp, Homo sapien
caacacaagcaaaggtctagaggca

SEQ ID NO: 4003196 - DNA, 25 bp, Homo sapien
aaagattatccagccccagtgtcag

SEQ ID NO: 4003197 - DNA, 25 bp, Homo sapien
caggcacttgatgactaagccaggt

SEQ ID NO: 4003198 - DNA, 25 bp, Homo sapien
ctgcatccacgccaaattttgagat

SEQ ID NO: 4003199 - DNA, 25 bp, Homo sapien
aagatgaataatcatactctgtagg

SEQ ID NO: 4003200 - DNA, 25 bp, Homo sapien
acaaggcaatgtaaagatgaataat

SEQ ID NO: 4003201 - DNA, 25 bp, Homo sapien
tgtaggtgatctgcatccacgccaa

SEQ ID NO: 4003202 - DNA, 25 bp, Homo sapien
cattggctgtctggaaggacctgcc

SEQ ID NO: 4003203 - DNA, 25 bp, Homo sapien
tgttaaaactgggacacttgggcac

SEQ ID NO: 4003204 - DNA, 25 bp, Homo sapien
gaacccatgggcattggtgaacctg

SEQ ID NO: 4003205 - DNA, 25 bp, Homo sapien
tatctgtaaggaccaaccctcctgg

SEQ ID NO: 4003206 - DNA, 25 bp, Homo sapien
cgcgcttggatcaactgagttctgg

SEQ ID NO: 4003207 - DNA, 25 bp, Homo sapien
ctagatcgcgcttggatcaactgag

SEQ ID NO: 4003208 - DNA, 25 bp, Homo sapien
gccattggaatggtcatggcaaccg

SEQ ID NO: 4003209 - DNA, 25 bp, Homo sapien
ggatttgacaatgttgactgcagca

SEQ ID NO: 4003210 - DNA, 25 bp, Homo sapien
cactggttgtgaactggtgaaggct

SEQ ID NO: 4003211 - DNA, 25 bp, Homo sapien
agctgcccgtggcactggttgtgaa

SEQ ID NO: 4003212 - DNA, 25 bp, Homo sapien
tggttgtgaactggtgaaggcttcc

SEQ ID NO: 4003213 - DNA, 25 bp, Homo sapien
cccgtggcactggttgtgaactggt

SEQ ID NO: 4003214 - DNA, 25 bp, Homo sapien
ccggctgtaaactggaggctcctag

SEQ ID NO: 4003215 - DNA, 25 bp, Homo sapien
gaacgagccttgaatctgcctcctg

SEQ ID NO: 4003216 - DNA, 25 bp, Homo sapien
cactgcacagcaacacctagattcg

SEQ ID NO: 4003217 - DNA, 25 bp, Homo sapien
aagaatcccgaatgggcatccaggc

SEQ ID NO: 4003218 - DNA, 25 bp, Homo sapien
tataagcagagtgttgggtccttac

SEQ ID NO: 4003219 - DNA, 25 bp, Homo sapien
ttataagcagagtgttgggtcctta

SEQ ID NO: 4003220 - DNA, 25 bp, Homo sapien
tcagagacacggaagtcgatggtcc

SEQ ID NO: 4003221 - DNA, 25 bp, Homo sapien
ttttcagagacacggaagtcgatgg

SEQ ID NO: 4003222 - DNA, 25 bp, Homo sapien
tgttttcagagacacggaagtcgat

SEQ ID NO: 4003223 - DNA, 25 bp, Homo sapien
ttgttttcagagacacggaagtcga

SEQ ID NO: 4003224 - DNA, 25 bp, Homo sapien
agcgtgttgccagggacagatgatc

SEQ ID NO: 4003225 - DNA, 25 bp, Homo sapien
aaagcgtgttgccagggacagatga

SEQ ID NO: 4003226 - DNA, 25 bp, Homo sapien
acagatgatctgacggggccacagc

SEQ ID NO: 4003227 - DNA, 25 bp, Homo sapien
ggaaaagcgtgttgccagggacaga

SEQ ID NO: 4003228 - DNA, 25 bp, Homo sapien
ctccagggtctttaggctgtaacca

SEQ ID NO: 4003229 - DNA, 25 bp, Homo sapien
gcccccagatcaaacatctttcaag

SEQ ID NO: 4003230 - DNA, 25 bp, Homo sapien
aacatctttcaaggcacttggagca

SEQ ID NO: 4003231 - DNA, 25 bp, Homo sapien
agggtctttaggctgtaaccacagc

SEQ ID NO: 4003232 - DNA, 25 bp, Homo sapien
taccccaaagagagaagctgcctac

SEQ ID NO: 4003233 - DNA, 25 bp, Homo sapien
gtaaaacacttccaatgatgtagcc

SEQ ID NO: 4003234 - DNA, 25 bp, Homo sapien
tcacaggtgcccctaccaaaacaga

SEQ ID NO: 4003235 - DNA, 25 bp, Homo sapien
acaggtgcccctaccaaaacagagg

SEQ ID NO: 4003236 - DNA, 25 bp, Homo sapien
ccaccacgcagtcagcgttctgaag

SEQ ID NO: 4003237 - DNA, 25 bp, Homo sapien
ctgggcttctgattaagaggcttgg

SEQ ID NO: 4003238 - DNA, 25 bp, Homo sapien
gaaagccagtaccaagcagctgagg

SEQ ID NO: 4003239 - DNA, 25 bp, Homo sapien
atcacttcccttcaaggaaactcct

SEQ ID NO: 4003240 - DNA, 25 bp, Homo sapien
ctgcagagctggtacttgctggccg

SEQ ID NO: 4003241 - DNA, 25 bp, Homo sapien
tgtggaggaagggggagaattactc

SEQ ID NO: 4003242 - DNA, 25 bp, Homo sapien
ctggtttgcagtggaagtgtggagg

SEQ ID NO: 4003243 - DNA, 25 bp, Homo sapien
ggtttgcagtggaagtgtggaggaa

SEQ ID NO: 4003244 - DNA, 25 bp, Homo sapien
gaggaagggggagaattactcagac

SEQ ID NO: 4003245 - DNA, 25 bp, Homo sapien
aatgagccctgcttccgtgcgtttg

SEQ ID NO: 4003246 - DNA, 25 bp, Homo sapien
cagcacgtgcggttctgagtttccc

SEQ ID NO: 4003247 - DNA, 25 bp, Homo sapien
tgagtttcccggcattccatgctgg

SEQ ID NO: 4003248 - DNA, 25 bp, Homo sapien
ggaagtattttgagcccagtggcaa

SEQ ID NO: 4003249 - DNA, 25 bp, Homo sapien
aagtctggcagcctagtgctggcat

SEQ ID NO: 4003250 - DNA, 25 bp, Homo sapien
cagcctagtgctggcatagacaaaa

SEQ ID NO: 4003251 - DNA, 25 bp, Homo sapien
tctggcagcctagtgctggcataga

SEQ ID NO: 4003252 - DNA, 25 bp, Homo sapien
gtgctggcatagacaaaatctcaaa

SEQ ID NO: 4003253 - DNA, 25 bp, Homo sapien
cgaatccacgggcacacaggtggat

SEQ ID NO: 4003254 - DNA, 25 bp, Homo sapien
acacaggtggatgtaggcggccgcc

SEQ ID NO: 4003255 - DNA, 25 bp, Homo sapien
ccaggggtacgaatccacgggcaca

SEQ ID NO: 4003256 - DNA, 25 bp, Homo sapien
cgccaggttgcaggcaggctggagc

SEQ ID NO: 4003257 - DNA, 25 bp, Homo sapien
ggctgaggaatggtgtagggtctac

SEQ ID NO: 4003258 - DNA, 25 bp, Homo sapien
gctggagtgggggccctcgaagaag

SEQ ID NO: 4003259 - DNA, 25 bp, Homo sapien
acccggaagcagtccctcaagctgg

SEQ ID NO: 4003260 - DNA, 25 bp, Homo sapien
cggaagcagtccctcaagctggagt

SEQ ID NO: 4003261 - DNA, 25 bp, Homo sapien
gaagcagtccctcaagctggagtgg

SEQ ID NO: 4003262 - DNA, 25 bp, Homo sapien
gcttcattgtcattggtgcccagaa

SEQ ID NO: 4003263 - DNA, 25 bp, Homo sapien
aggctgcgggccatagagccatccg

SEQ ID NO: 4003264 - DNA, 25 bp, Homo sapien
tccggcaacatcagctcattgcctg

SEQ ID NO: 4003265 - DNA, 25 bp, Homo sapien
gtgcccagaaggccagcggatatgc

SEQ ID NO: 4003266 - DNA, 25 bp, Homo sapien
tcgctggccagctcaatcctggaga

SEQ ID NO: 4003267 - DNA, 25 bp, Homo sapien
gagacgtccttccttgtcgtggcag

SEQ ID NO: 4003268 - DNA, 25 bp, Homo sapien
cagggaggagttgtacagcctgtag

SEQ ID NO: 4003269 - DNA, 25 bp, Homo sapien
gcttgaggtccggacaactgtcccc

SEQ ID NO: 4003270 - DNA, 25 bp, Homo sapien
cagcgagaatgtgttgtgagcaaag

SEQ ID NO: 4003271 - DNA, 25 bp, Homo sapien
taagttccacgaacagggctgtgag

SEQ ID NO: 4003272 - DNA, 25 bp, Homo sapien
gccgtcgaaggtcaccacgtgctgg

SEQ ID NO: 4003273 - DNA, 25 bp, Homo sapien
ctgtccgactcagcgtcagcgagaa

SEQ ID NO: 4003274 - DNA, 25 bp, Homo sapien
ggcgtctgagccagtagtactcagc

SEQ ID NO: 4003275 - DNA, 25 bp, Homo sapien
agccagcacgttggccccagacagc

SEQ ID NO: 4003276 - DNA, 25 bp, Homo sapien
cccccgcaggcaacagtggcagcat

SEQ ID NO: 4003277 - DNA, 25 bp, Homo sapien
tctcctccatgaggtagctggtcac

SEQ ID NO: 4003278 - DNA, 25 bp, Homo sapien
agtgcccgtgagaacgtggcctcag

SEQ ID NO: 4003279 - DNA, 25 bp, Homo sapien
ccgtgagaacgtggcctcagcccaa

SEQ ID NO: 4003280 - DNA, 25 bp, Homo sapien
tgtacaggtccagcagtggtttgca

SEQ ID NO: 4003281 - DNA, 25 bp, Homo sapien
ggtttgcagagcctcttcagtgccc

SEQ ID NO: 4003282 - DNA, 25 bp, Homo sapien
tgagagctggctcagtcatcctcac

SEQ ID NO: 4003283 - DNA, 25 bp, Homo sapien
ggacagtgagagctggctcagtcat

SEQ ID NO: 4003284 - DNA, 25 bp, Homo sapien
acctgccaactacgccccatccttg

SEQ ID NO: 4003285 - DNA, 25 bp, Homo sapien
gagctggctcagtcatcctcacctg

SEQ ID NO: 4003286 - DNA, 25 bp, Homo sapien
cccccagggccgccctgatgggcct

SEQ ID NO: 4003287 - DNA, 25 bp, Homo sapien
ggccgccctgatgggccttggaccc

SEQ ID NO: 4003288 - DNA, 25 bp, Homo sapien
ccccctttgcctggcatcccgggca

SEQ ID NO: 4003289 - DNA, 25 bp, Homo sapien
cccctttgcctggcatcccgggcac

SEQ ID NO: 4003290 - DNA, 25 bp, Homo sapien
gcatggcctcctctgctcgctcccg

SEQ ID NO: 4003291 - DNA, 25 bp, Homo sapien
ctgcagccgccgcatggcctcctct

SEQ ID NO: 4003292 - DNA, 25 bp, Homo sapien
gcagccgccgcatggcctcctctgc

SEQ ID NO: 4003293 - DNA, 25 bp, Homo sapien
ccgccgcatggcctcctctgctcgc

SEQ ID NO: 4003294 - DNA, 25 bp, Homo sapien
gtgtcacctccaggtaggcatcctt

SEQ ID NO: 4003295 - DNA, 25 bp, Homo sapien
tccaggggccgcagtgtcacctcca

SEQ ID NO: 4003296 - DNA, 25 bp, Homo sapien
ccgcagtgtcacctccaggtaggca

SEQ ID NO: 4003297 - DNA, 25 bp, Homo sapien
tccaggtaggcatccttcagtgtgg

SEQ ID NO: 4003298 - DNA, 25 bp, Homo sapien
tggctccgggcccacaaagtggcta

SEQ ID NO: 4003299 - DNA, 25 bp, Homo sapien
aaggaggcctgccacgccgtccagg

SEQ ID NO: 4003300 - DNA, 25 bp, Homo sapien
gctgcagaaggaggcctgccacgcc

SEQ ID NO: 4003301 - DNA, 25 bp, Homo sapien
ctgccacgccgtccagggtgcctgc

SEQ ID NO: 4003302 - DNA, 25 bp, Homo sapien
gcctgccacgccgtccagggtgcct

SEQ ID NO: 4003303 - DNA, 25 bp, Homo sapien
ctggaaccttctcacagaggcaccc

SEQ ID NO: 4003304 - DNA, 25 bp, Homo sapien
gcacccaagccttgaaccttctctt

SEQ ID NO: 4003305 - DNA, 25 bp, Homo sapien
tgctggaaccttctcacagaggcac

SEQ ID NO: 4003306 - DNA, 25 bp, Homo sapien
tcacagaggcacccaagccttgaac

SEQ ID NO: 4003307 - DNA, 25 bp, Homo sapien
gaacaggacctccgcctcggctgtc

SEQ ID NO: 4003308 - DNA, 25 bp, Homo sapien
ggctgtccgcccatgggcacatgcc

SEQ ID NO: 4003309 - DNA, 25 bp, Homo sapien
gcctcggctgtccgcccatgggcac

SEQ ID NO: 4003310 - DNA, 25 bp, Homo sapien
tcggctgtccgcccatgggcacatg

SEQ ID NO: 4003311 - DNA, 25 bp, Homo sapien
aaccggaccaggctttgagaagtcg

SEQ ID NO: 4003312 - DNA, 25 bp, Homo sapien
ggagacacggcccagtaggccaacc

SEQ ID NO: 4003313 - DNA, 25 bp, Homo sapien
cctccaaccggaccaggctttgaga

SEQ ID NO: 4003314 - DNA, 25 bp, Homo sapien
ggccacagaggcctgcagacagctt

SEQ ID NO: 4003315 - DNA, 25 bp, Homo sapien
gggatgccgggatatctttcccagg

SEQ ID NO: 4003316 - DNA, 25 bp, Homo sapien
ggaggaaccgcagggatgccgggat

SEQ ID NO: 4003317 - DNA, 25 bp, Homo sapien
cagggatgccgggatatctttccca

SEQ ID NO: 4003318 - DNA, 25 bp, Homo sapien
aaccgcagggatgccgggatatctt

SEQ ID NO: 4003319 - DNA, 25 bp, Homo sapien
gggaacgcagcaggagtccaccctg

SEQ ID NO: 4003320 - DNA, 25 bp, Homo sapien
caggctgagatgcaggccgtggtct

SEQ ID NO: 4003321 - DNA, 25 bp, Homo sapien
gtgtgctccccgacgaccaagaggg

SEQ ID NO: 4003322 - DNA, 25 bp, Homo sapien
gctgaacgaggcctgctgtggtttt

SEQ ID NO: 4003323 - DNA, 25 bp, Homo sapien
ccgaggacgtgctccagcgtggcct

SEQ ID NO: 4003324 - DNA, 25 bp, Homo sapien
gccgcagccagcgtgcatagtcagt

SEQ ID NO: 4003325 - DNA, 25 bp, Homo sapien
aagaggccccgaggacgtgctccag

SEQ ID NO: 4003326 - DNA, 25 bp, Homo sapien
cagaagctctgacgggtacaagagg

SEQ ID NO: 4003327 - DNA, 25 bp, Homo sapien
tctgcgcatgcggtgctggccccag

SEQ ID NO: 4003328 - DNA, 25 bp, Homo sapien
tcaagttctgcgcatgcggtgctgg

SEQ ID NO: 4003329 - DNA, 25 bp, Homo sapien
caagttctgcgcatgcggtgctggc

SEQ ID NO: 4003330 - DNA, 25 bp, Homo sapien
agttctgcgcatgcggtgctggccc

SEQ ID NO: 4003331 - DNA, 25 bp, Homo sapien
tgagctgttcaacgaacacagctgg

SEQ ID NO: 4003332 - DNA, 25 bp, Homo sapien
gagctgttcaacgaacacagctggg

SEQ ID NO: 4003333 - DNA, 25 bp, Homo sapien
gttgagctgttcaacgaacacagct

SEQ ID NO: 4003334 - DNA, 25 bp, Homo sapien
ctgttcaacgaacacagctggggtc

SEQ ID NO: 4003335 - DNA, 25 bp, Homo sapien
ggtgctgtgtgctaaggacccgtca

SEQ ID NO: 4003336 - DNA, 25 bp, Homo sapien
aaggacccgtcagcccaggtgagct

SEQ ID NO: 4003337 - DNA, 25 bp, Homo sapien
gcagcgtcgcaggttgtcctctgtt

SEQ ID NO: 4003338 - DNA, 25 bp, Homo sapien
ggcagccgtcccaggcggtgctgtg

SEQ ID NO: 4003339 - DNA, 25 bp, Homo sapien
tcggcttgccgccaagggaggttga

SEQ ID NO: 4003340 - DNA, 25 bp, Homo sapien
ggcttgccgccaagggaggttgaat

SEQ ID NO: 4003341 - DNA, 25 bp, Homo sapien
ctggcctcggcttgccgccaaggga

SEQ ID NO: 4003342 - DNA, 25 bp, Homo sapien
cactggcctcggcttgccgccaagg

SEQ ID NO: 4003343 - DNA, 25 bp, Homo sapien
agccgacaaccaggccatcccggtg

SEQ ID NO: 4003344 - DNA, 25 bp, Homo sapien
cctgccatcccagccgacaaccagg

SEQ ID NO: 4003345 - DNA, 25 bp, Homo sapien
ggccatcccggtggctgcctcccaa

SEQ ID NO: 4003346 - DNA, 25 bp, Homo sapien
caaccaggccatcccggtggctgcc

SEQ ID NO: 4003347 - DNA, 25 bp, Homo sapien
gggcagcgggtgggtgagctccact

SEQ ID NO: 4003348 - DNA, 25 bp, Homo sapien
tagggcacgtgagctgaggtcagca

SEQ ID NO: 4003349 - DNA, 25 bp, Homo sapien
caaagggtagggcacgtgagctgag

SEQ ID NO: 4003350 - DNA, 25 bp, Homo sapien
cggaggctgcagtgtcgcggcaggg

SEQ ID NO: 4003351 - DNA, 25 bp, Homo sapien
aaggcccagaaaggctcccggtgag

SEQ ID NO: 4003352 - DNA, 25 bp, Homo sapien
gcaggctgaggttcctggtgggctt

SEQ ID NO: 4003353 - DNA, 25 bp, Homo sapien
ctgcaggctgaggttcctggtgggc

SEQ ID NO: 4003354 - DNA, 25 bp, Homo sapien
cagaaaggctcccggtgagggccac

SEQ ID NO: 4003355 - DNA, 25 bp, Homo sapien
ctcgtatgcggtctgcaggaacagc

SEQ ID NO: 4003356 - DNA, 25 bp, Homo sapien
acgggtcccatgagctcgctcgtat

SEQ ID NO: 4003357 - DNA, 25 bp, Homo sapien
caggacacgggtcccatgagctcgc

SEQ ID NO: 4003358 - DNA, 25 bp, Homo sapien
catgagctcgctcgtatgcggtctg

SEQ ID NO: 4003359 - DNA, 25 bp, Homo sapien
gggggaacccgacccatgcttctgc

SEQ ID NO: 4003360 - DNA, 25 bp, Homo sapien
gaatgacggcgtcatgggggaaccc

SEQ ID NO: 4003361 - DNA, 25 bp, Homo sapien
atgggggaacccgacccatgcttct

SEQ ID NO: 4003362 - DNA, 25 bp, Homo sapien
gcgtcatgggggaacccgacccatg

SEQ ID NO: 4003363 - DNA, 25 bp, Homo sapien
tacctgccgggtgctgatgtgaaaa

SEQ ID NO: 4003364 - DNA, 25 bp, Homo sapien
acgcccaaggcgaacatgctctgaa

SEQ ID NO: 4003365 - DNA, 25 bp, Homo sapien
gaaattgttgagaccggccttagca

SEQ ID NO: 4003366 - DNA, 25 bp, Homo sapien
gatgtgaaaatgacgctcctccacg

SEQ ID NO: 4003367 - DNA, 25 bp, Homo sapien
atgtaccaccacacccaactaattt

SEQ ID NO: 4003368 - DNA, 25 bp, Homo sapien
gacctgcccacctcggcctcccaaa

SEQ ID NO: 4003369 - DNA, 25 bp, Homo sapien
gagtaaccaagattacaggcatgta

SEQ ID NO: 4003370 - DNA, 25 bp, Homo sapien
tgacctgcccacctcggcctcccaa

SEQ ID NO: 4003371 - DNA, 25 bp, Homo sapien
aggcgatgccggcctgagaacagca

SEQ ID NO: 4003372 - DNA, 25 bp, Homo sapien
gcgatgccggcctgagaacagcagc

SEQ ID NO: 4003373 - DNA, 25 bp, Homo sapien
gaaggggaggcgatgccggcctgag

SEQ ID NO: 4003374 - DNA, 25 bp, Homo sapien
gggaggcgatgccggcctgagaaca

SEQ ID NO: 4003375 - DNA, 25 bp, Homo sapien
acacgtaagagcaccaagcgcctca

SEQ ID NO: 4003376 - DNA, 25 bp, Homo sapien
cacacgtaagagcaccaagcgcctc

SEQ ID NO: 4003377 - DNA, 25 bp, Homo sapien
tgcacacgtaagagcaccaagcgcc

SEQ ID NO: 4003378 - DNA, 25 bp, Homo sapien
gcacacgtaagagcaccaagcgcct

SEQ ID NO: 4003379 - DNA, 25 bp, Homo sapien
gggccttggatgcacttagtttctg

SEQ ID NO: 4003380 - DNA, 25 bp, Homo sapien
gcctaagggcagtaatagttattaa

SEQ ID NO: 4003381 - DNA, 25 bp, Homo sapien
ccccaggcctaagggcagtaatagt

SEQ ID NO: 4003382 - DNA, 25 bp, Homo sapien
gagactgagaactcatcagtgccct

SEQ ID NO: 4003383 - DNA, 25 bp, Homo sapien
tggccacggacgtcaaggaccaagg

SEQ ID NO: 4003384 - DNA, 25 bp, Homo sapien
ctgagaatcgcaggtcagctgcagt

SEQ ID NO: 4003385 - DNA, 25 bp, Homo sapien
tggttctggccacggacgtcaagga

SEQ ID NO: 4003386 - DNA, 25 bp, Homo sapien
gaccaaggtggcctgagaatcgcag

SEQ ID NO: 4003387 - DNA, 25 bp, Homo sapien
gccaggtccatgctgactccactgt

SEQ ID NO: 4003388 - DNA, 25 bp, Homo sapien
ctccactgtccccaccatggagggc

SEQ ID NO: 4003389 - DNA, 25 bp, Homo sapien
acgtcgtggccgagccaccagggct

SEQ ID NO: 4003390 - DNA, 25 bp, Homo sapien
accagctgcagtgggccacgtcgtg

SEQ ID NO: 4003391 - DNA, 25 bp, Homo sapien
agctcagcactaaggcaggcctcgc

SEQ ID NO: 4003392 - DNA, 25 bp, Homo sapien
ggaaccctgcccacaacaaagcctc

SEQ ID NO: 4003393 - DNA, 25 bp, Homo sapien
gaaccctgcccacaacaaagcctca

SEQ ID NO: 4003394 - DNA, 25 bp, Homo sapien
gcaggcctcgcctgggaaccctgcc

SEQ ID NO: 4003395 - DNA, 25 bp, Homo sapien
gagctgccattgtgaatgtccacag

SEQ ID NO: 4003396 - DNA, 25 bp, Homo sapien
tccagaatgctcgaagccggagctg

SEQ ID NO: 4003397 - DNA, 25 bp, Homo sapien
gggccccatcaggatgcgtccagaa

SEQ ID NO: 4003398 - DNA, 25 bp, Homo sapien
tggtaatagcagctcacagagtagt

SEQ ID NO: 4003399 - DNA, 25 bp, Homo sapien
ctggaatgacaccaaggagacgctg

SEQ ID NO: 4003400 - DNA, 25 bp, Homo sapien
cagatgggaccactcgatgaccatc

SEQ ID NO: 4003401 - DNA, 25 bp, Homo sapien
catcaggttgagctgatgcccctgg

SEQ ID NO: 4003402 - DNA, 25 bp, Homo sapien
ctcgatgaccatcaggttgagctga

SEQ ID NO: 4003403 - DNA, 25 bp, Homo sapien
gaccactcgatgaccatcaggttga

SEQ ID NO: 4003404 - DNA, 25 bp, Homo sapien
caagatcaccgtcagcccggccgcc

SEQ ID NO: 4003405 - DNA, 25 bp, Homo sapien
cggccgccagactacgtcccacact

SEQ ID NO: 4003406 - DNA, 25 bp, Homo sapien
agcccggccgccagactacgtccca

SEQ ID NO: 4003407 - DNA, 25 bp, Homo sapien
cccggccgccagactacgtcccaca

SEQ ID NO: 4003408 - DNA, 25 bp, Homo sapien
gttccacagcgccaggcgtgctgag

SEQ ID NO: 4003409 - DNA, 25 bp, Homo sapien
caggccaatggcaccgtctagctga

SEQ ID NO: 4003410 - DNA, 25 bp, Homo sapien
gcagttggaagccacgtgggtgaga

SEQ ID NO: 4003411 - DNA, 25 bp, Homo sapien
catggtgtgggtgtgacggaggctg

SEQ ID NO: 4003412 - DNA, 25 bp, Homo sapien
caggttcctcgtctgggcctgcagc

SEQ ID NO: 4003413 - DNA, 25 bp, Homo sapien
gcaaggacacaggtcacgctgcgca

SEQ ID NO: 4003414 - DNA, 25 bp, Homo sapien
ctgcatcactcagcgtgctgatatt

SEQ ID NO: 4003415 - DNA, 25 bp, Homo sapien
gtgtgtcgggccacccgcaagctgt

SEQ ID NO: 4003416 - DNA, 25 bp, Homo sapien
tcttgaagtgtctccttctgcttca

SEQ ID NO: 4003417 - DNA, 25 bp, Homo sapien
ctcttgaagtgtctccttctgcttc

SEQ ID NO: 4003418 - DNA, 25 bp, Homo sapien
cctcttgaagtgtctccttctgctt

SEQ ID NO: 4003419 - DNA, 25 bp, Homo sapien
tgcctcgaatccttttcagactggg

SEQ ID NO: 4003420 - DNA, 25 bp, Homo sapien
gggtctccttaaatccatgccaaag

SEQ ID NO: 4003421 - DNA, 25 bp, Homo sapien
gaagacaaggttatctaggaccatg

SEQ ID NO: 4003422 - DNA, 25 bp, Homo sapien
tggcaatgctgaagacaaggttatc

SEQ ID NO: 4003423 - DNA, 25 bp, Homo sapien
gctggggtgatctttgcagacagct

SEQ ID NO: 4003424 - DNA, 25 bp, Homo sapien
acagctgcagccgaacagccctggg

SEQ ID NO: 4003425 - DNA, 25 bp, Homo sapien
tggctggcgtcgacctccagcagaa

SEQ ID NO: 4003426 - DNA, 25 bp, Homo sapien
tcccggccagacatttgcacagata

SEQ ID NO: 4003427 - DNA, 25 bp, Homo sapien
atagagacccgttgaggctgcgcac

SEQ ID NO: 4003428 - DNA, 25 bp, Homo sapien
gctgctcctccgagtgtcctggctg

SEQ ID NO: 4003429 - DNA, 25 bp, Homo sapien
aaagtcggagtcagatccgttcagc

SEQ ID NO: 4003430 - DNA, 25 bp, Homo sapien
aatgcaaagtcggagtcagatccgt

SEQ ID NO: 4003431 - DNA, 25 bp, Homo sapien
tcggagtcagatccgttcagctgga

SEQ ID NO: 4003432 - DNA, 25 bp, Homo sapien
gtgaggatgcctgagttggaagaaa

SEQ ID NO: 4003433 - DNA, 25 bp, Homo sapien
ggactctgtctaaagatgatgcccc

SEQ ID NO: 4003434 - DNA, 25 bp, Homo sapien
ctgggatgtgacgttgtgattgacg

SEQ ID NO: 4003435 - DNA, 25 bp, Homo sapien
tgtgattgacggcagctcgtgcatc

SEQ ID NO: 4003436 - DNA, 25 bp, Homo sapien
gcagctcgtgcatccatgccaaagt

SEQ ID NO: 4003437 - DNA, 25 bp, Homo sapien
gccaggctgtgccggatttccccat

SEQ ID NO: 4003438 - DNA, 25 bp, Homo sapien
ccccatgctgagatctgtcatgatg

SEQ ID NO: 4003439 - DNA, 25 bp, Homo sapien
gatgcaaacccttcaagtgcaggac

SEQ ID NO: 4003440 - DNA, 25 bp, Homo sapien
ggactttcaaagtggcctcgacctc

SEQ ID NO: 4003441 - DNA, 25 bp, Homo sapien
tttattttagagacagcctcgctct

SEQ ID NO: 4003442 - DNA, 25 bp, Homo sapien
tattttagagacagcctcgctctgt

SEQ ID NO: 4003443 - DNA, 25 bp, Homo sapien
tacaggcgtgagccatctcgcccag

SEQ ID NO: 4003444 - DNA, 25 bp, Homo sapien
acagcttattttattctattttata

SEQ ID NO: 4003445 - DNA, 25 bp, Homo sapien
attgcactccagactccagcctaga

SEQ ID NO: 4003446 - DNA, 25 bp, Homo sapien
tgcactccagactccagcctagaca

SEQ ID NO: 4003447 - DNA, 25 bp, Homo sapien
tcattgcactccagactccagccta

SEQ ID NO: 4003448 - DNA, 25 bp, Homo sapien
gtcattgcactccagactccagcct

SEQ ID NO: 4003449 - DNA, 25 bp, Homo sapien
cctattgagcgatgacagcaacttg

SEQ ID NO: 4003450 - DNA, 25 bp, Homo sapien
ccatatgtcgcccagatggatctca

SEQ ID NO: 4003451 - DNA, 25 bp, Homo sapien
tgttttcaatcctattgagcgatga

SEQ ID NO: 4003452 - DNA, 25 bp, Homo sapien
tgcactcagtccagataacatgttt

SEQ ID NO: 4003453 - DNA, 25 bp, Homo sapien
gatgactttgccatcgtatggatgc

SEQ ID NO: 4003454 - DNA, 25 bp, Homo sapien
aagtaaccaggcacccctctgtgtt

SEQ ID NO: 4003455 - DNA, 25 bp, Homo sapien
ggggatgactttgccatcgtatgga

SEQ ID NO: 4003456 - DNA, 25 bp, Homo sapien
gtgtgctgattccaagtaaccaggc

SEQ ID NO: 4003457 - DNA, 25 bp, Homo sapien
atgtacacacgcatgcagggagtga

SEQ ID NO: 4003458 - DNA, 25 bp, Homo sapien
acatgtacacacgcatgcagggagt

SEQ ID NO: 4003459 - DNA, 25 bp, Homo sapien
tctcaggccccttccgggctatgcc

SEQ ID NO: 4003460 - DNA, 25 bp, Homo sapien
cttccgggctatgccccagacacac

SEQ ID NO: 4003461 - DNA, 25 bp, Homo sapien
tctccagggaatagcgctggtgtcg

SEQ ID NO: 4003462 - DNA, 25 bp, Homo sapien
cagggtttcctctcggccattcagg

SEQ ID NO: 4003463 - DNA, 25 bp, Homo sapien
cgcctatcagctgtgaaggtctcct

SEQ ID NO: 4003464 - DNA, 25 bp, Homo sapien
cattcaggacaaccctagtctccag

SEQ ID NO: 4003465 - DNA, 25 bp, Homo sapien
gcgggatgggcaggtgcaacgggtg

SEQ ID NO: 4003466 - DNA, 25 bp, Homo sapien
cgggatgggcaggtgcaacgggtgc

SEQ ID NO: 4003467 - DNA, 25 bp, Homo sapien
ggtgtgcagagggaaaaacaggcca

SEQ ID NO: 4003468 - DNA, 25 bp, Homo sapien
aaaacaggccaaagccattaaagca

SEQ ID NO: 4003469 - DNA, 25 bp, Homo sapien
cagagggaaaaacaggccaaagcca

SEQ ID NO: 4003470 - DNA, 25 bp, Homo sapien
ctggtgtgcagagggaaaaacaggc

SEQ ID NO: 4003471 - DNA, 25 bp, Homo sapien
tgccaggggacaattgtgccccacg

SEQ ID NO: 4003472 - DNA, 25 bp, Homo sapien
ctgggcctgtcacgagcttgcagag

SEQ ID NO: 4003473 - DNA, 25 bp, Homo sapien
gggacaattgtgccccacggtctca

SEQ ID NO: 4003474 - DNA, 25 bp, Homo sapien
cagagttaagactctgccacagaga

SEQ ID NO: 4003475 - DNA, 25 bp, Homo sapien
cagccgtgagcgacacctgggtctt

SEQ ID NO: 4003476 - DNA, 25 bp, Homo sapien
ccgtttccggtacaatgtcctgtct

SEQ ID NO: 4003477 - DNA, 25 bp, Homo sapien
caatgtcctgtcttgcctcagctcc

SEQ ID NO: 4003478 - DNA, 25 bp, Homo sapien
tgggcaccaatccgcacagccgtga

SEQ ID NO: 4003479 - DNA, 25 bp, Homo sapien
gactcgagttcgctccagctgtgga

SEQ ID NO: 4003480 - DNA, 25 bp, Homo sapien
gcagttcaggatcttacggtcccgg

SEQ ID NO: 4003481 - DNA, 25 bp, Homo sapien
gcctgtaggccgctgttaggttcag

SEQ ID NO: 4003482 - DNA, 25 bp, Homo sapien
tctgtgccaagactgtcactgtgga

SEQ ID NO: 4003483 - DNA, 25 bp, Homo sapien
gaatctgatcttgttgggccgctat

SEQ ID NO: 4003484 - DNA, 25 bp, Homo sapien
tctctgacgcctaacctgactggtg

SEQ ID NO: 4003485 - DNA, 25 bp, Homo sapien
tcaccatggtcttcgggagtcctag

SEQ ID NO: 4003486 - DNA, 25 bp, Homo sapien
tctgtaccctgaagggcacatgctg

SEQ ID NO: 4003487 - DNA, 25 bp, Homo sapien
tgcggtgtaaacctggatcttgcct

SEQ ID NO: 4003488 - DNA, 25 bp, Homo sapien
tcggtgtggccagtatagcctgtga

SEQ ID NO: 4003489 - DNA, 25 bp, Homo sapien
catggactatccaggttcaaggctc

SEQ ID NO: 4003490 - DNA, 25 bp, Homo sapien
tgtgagctgcagagaccatcagcca

SEQ ID NO: 4003491 - DNA, 25 bp, Homo sapien
tgggatcctttttacggcagcctta

SEQ ID NO: 4003492 - DNA, 25 bp, Homo sapien
tgtttcagcgggtctcttactcgaa

SEQ ID NO: 4003493 - DNA, 25 bp, Homo sapien
agcataagcacatatccaaggctgg

SEQ ID NO: 4003494 - DNA, 25 bp, Homo sapien
tgagcagccgactcaagcataagca

SEQ ID NO: 4003495 - DNA, 25 bp, Homo sapien
tctccacatagggcaggcggaggct

SEQ ID NO: 4003496 - DNA, 25 bp, Homo sapien
cacttccacagggtggcccgagatg

SEQ ID NO: 4003497 - DNA, 25 bp, Homo sapien
gtggtaaagctgcacgcggcaatcc

SEQ ID NO: 4003498 - DNA, 25 bp, Homo sapien
tggcccgagatgtgtccttccactg

SEQ ID NO: 4003499 - DNA, 25 bp, Homo sapien
caagatgccaatgggatcatgccac

SEQ ID NO: 4003500 - DNA, 25 bp, Homo sapien
catgccacccctggcgtagaatgtg

SEQ ID NO: 4003501 - DNA, 25 bp, Homo sapien
atgggatcatgccacccctggcgta

SEQ ID NO: 4003502 - DNA, 25 bp, Homo sapien
ccctggcgtagaatgtgcccgggaa

SEQ ID NO: 4003503 - DNA, 25 bp, Homo sapien
gaaagaatcgaaagcatcagatatt

SEQ ID NO: 4003504 - DNA, 25 bp, Homo sapien
acactcacgttcataacagcattta

SEQ ID NO: 4003505 - DNA, 25 bp, Homo sapien
aaatttgacacatgctacgatatgg

SEQ ID NO: 4003506 - DNA, 25 bp, Homo sapien
gaaatttgacacatgctacgatatg

SEQ ID NO: 4003507 - DNA, 25 bp, Homo sapien
tccatgaagtgattgctcagggcgg

SEQ ID NO: 4003508 - DNA, 25 bp, Homo sapien
agggcgggccccgagtcattcttga

SEQ ID NO: 4003509 - DNA, 25 bp, Homo sapien
ttcttgaaggtctggctgacacgga

SEQ ID NO: 4003510 - DNA, 25 bp, Homo sapien
tcttgtcccagtgcttcccgtagct

SEQ ID NO: 4003511 - DNA, 25 bp, Homo sapien
ctcgtgtgccgcctgctttgcctga

SEQ ID NO: 4003512 - DNA, 25 bp, Homo sapien
gtggcgcagctccagcctgtaggca

SEQ ID NO: 4003513 - DNA, 25 bp, Homo sapien
tgtgtgcagtggagctcgtggcgca

SEQ ID NO: 4003514 - DNA, 25 bp, Homo sapien
ctgaaggctaggatctgtgtgcagt

SEQ ID NO: 4003515 - DNA, 25 bp, Homo sapien
ggaggctgtactggatcctcaggga

SEQ ID NO: 4003516 - DNA, 25 bp, Homo sapien
gatcctcagggagttggtccagagc

SEQ ID NO: 4003517 - DNA, 25 bp, Homo sapien
ggatcctcagggagttggtccagag

SEQ ID NO: 4003518 - DNA, 25 bp, Homo sapien
cctgccgtgtgaggttcccggtgaa

SEQ ID NO: 4003519 - DNA, 25 bp, Homo sapien
ttcccggtgaagacgacggggctgc

SEQ ID NO: 4003520 - DNA, 25 bp, Homo sapien
gctgcccacctgccgtgtgaggttc

SEQ ID NO: 4003521 - DNA, 25 bp, Homo sapien
agctgcgcctggaaccgctcagcct

SEQ ID NO: 4003522 - DNA, 25 bp, Homo sapien
tgagccacggcgcccagctgccaag

SEQ ID NO: 4003523 - DNA, 25 bp, Homo sapien
cttgatgtagtagacgtccctgtca

SEQ ID NO: 4003524 - DNA, 25 bp, Homo sapien
agctccaagtgacccgtgtgggcac

SEQ ID NO: 4003525 - DNA, 25 bp, Homo sapien
cagctccaagtgacccgtgtgggca

SEQ ID NO: 4003526 - DNA, 25 bp, Homo sapien
tgtagtagacgtccctgtcatccag

SEQ ID NO: 4003527 - DNA, 25 bp, Homo sapien
tctgacccgggcgtgcccatgaaga

SEQ ID NO: 4003528 - DNA, 25 bp, Homo sapien
gcccatgaagacgtgggctgtggct

SEQ ID NO: 4003529 - DNA, 25 bp, Homo sapien
gggcaagctgtagctcatgtccacc

SEQ ID NO: 4003530 - DNA, 25 bp, Homo sapien
aagcttgagccggaacttgttctgg

SEQ ID NO: 4003531 - DNA, 25 bp, Homo sapien
tttctgcagcgtcacggccgcgaac

SEQ ID NO: 4003532 - DNA, 25 bp, Homo sapien
ggcaatgagagcaggtagggctggc

SEQ ID NO: 4003533 - DNA, 25 bp, Homo sapien
cttccagcaggtactgtcggagccc

SEQ ID NO: 4003534 - DNA, 25 bp, Homo sapien
gcagggtataggcagcttccagcag

SEQ ID NO: 4003535 - DNA, 25 bp, Homo sapien
ctcaccagtacaggactggacctca

SEQ ID NO: 4003536 - DNA, 25 bp, Homo sapien
cttcctcaccagtacaggactggac

SEQ ID NO: 4003537 - DNA, 25 bp, Homo sapien
tcctcaccagtacaggactggacct

SEQ ID NO: 4003538 - DNA, 25 bp, Homo sapien
gactggacctcagaagggccaggga

SEQ ID NO: 4003539 - DNA, 25 bp, Homo sapien
catccctggtgatgaggtacagctg

SEQ ID NO: 4003540 - DNA, 25 bp, Homo sapien
gcctcctcaggcgtgttcagatgca

SEQ ID NO: 4003541 - DNA, 25 bp, Homo sapien
agatgcaccttaaggacccggccct

SEQ ID NO: 4003542 - DNA, 25 bp, Homo sapien
tgttcagatgcaccttaaggacccg

SEQ ID NO: 4003543 - DNA, 25 bp, Homo sapien
ctggatcccgccatccaggctggcg

SEQ ID NO: 4003544 - DNA, 25 bp, Homo sapien
gcccgctgtgcccatctgagctgag

SEQ ID NO: 4003545 - DNA, 25 bp, Homo sapien
cgctgtgcccatctgagctgagatc

SEQ ID NO: 4003546 - DNA, 25 bp, Homo sapien
ctgagctgagatctggagcagggca

SEQ ID NO: 4003547 - DNA, 25 bp, Homo sapien
gctgtgcccatctgagctgagatct

SEQ ID NO: 4003548 - DNA, 25 bp, Homo sapien
tggttcctcggacccggatgctgat

SEQ ID NO: 4003549 - DNA, 25 bp, Homo sapien
gggcttgacataaccattcacagag

SEQ ID NO: 4003550 - DNA, 25 bp, Homo sapien
gaaagaccagttcctgtgcggccag

SEQ ID NO: 4003551 - DNA, 25 bp, Homo sapien
aaatccgagcgctgctggaagtcag

SEQ ID NO: 4003552 - DNA, 25 bp, Homo sapien
gtggccccgcagttcacaaagctca

SEQ ID NO: 4003553 - DNA, 25 bp, Homo sapien
tgatggcgagctcggccaagttaag

SEQ ID NO: 4003554 - DNA, 25 bp, Homo sapien
agtggttcacgtgactccccgtggc

SEQ ID NO: 4003555 - DNA, 25 bp, Homo sapien
ttcacgctcagctcgcatcgcagag

SEQ ID NO: 4003556 - DNA, 25 bp, Homo sapien
cttctgctgtaggtatctcatcctt

SEQ ID NO: 4003557 - DNA, 25 bp, Homo sapien
cccatggtgtggatggtcaggttga

SEQ ID NO: 4003558 - DNA, 25 bp, Homo sapien
cagaaggttgaaggcacggcccatg

SEQ ID NO: 4003559 - DNA, 25 bp, Homo sapien
ctccagaaggttgaaggcacggccc

SEQ ID NO: 4003560 - DNA, 25 bp, Homo sapien
cacggcccatggtgtggatggtcag

SEQ ID NO: 4003561 - DNA, 25 bp, Homo sapien
gagagaagagaagggtcccctccag

SEQ ID NO: 4003562 - DNA, 25 bp, Homo sapien
aggttggctcccaggctgccagaca

SEQ ID NO: 4003563 - DNA, 25 bp, Homo sapien
tggcagaacggggaagaaaggaggc

SEQ ID NO: 4003564 - DNA, 25 bp, Homo sapien
ctgtggcagaacggggaagaaagga

SEQ ID NO: 4003565 - DNA, 25 bp, Homo sapien
atgtaaatatttgaccccttgacac

SEQ ID NO: 4003566 - DNA, 25 bp, Homo sapien
acatgtaaatatttgaccccttgac

SEQ ID NO: 4003567 - DNA, 25 bp, Homo sapien
catgtaaatatttgaccccttgaca

SEQ ID NO: 4003568 - DNA, 25 bp, Homo sapien
tgacatcagaataggacgagtgttt

SEQ ID NO: 4003569 - DNA, 25 bp, Homo sapien
tcagaataggacgagtgtttccaca

SEQ ID NO: 4003570 - DNA, 25 bp, Homo sapien
aggacgagtgtttccacatttctgg

SEQ ID NO: 4003571 - DNA, 25 bp, Homo sapien
tttcagggggtcgtgcgtctccagc

SEQ ID NO: 4003572 - DNA, 25 bp, Homo sapien
ctggaatagagtcgtgggcagcagg

SEQ ID NO: 4003573 - DNA, 25 bp, Homo sapien
tggaatagagtcgtgggcagcaggg

SEQ ID NO: 4003574 - DNA, 25 bp, Homo sapien
caggtaggcattgatacggatctca

SEQ ID NO: 4003575 - DNA, 25 bp, Homo sapien
tggtatagacgggagagcaccgatc

SEQ ID NO: 4003576 - DNA, 25 bp, Homo sapien
tcctcactggggcatctcatcaggg

SEQ ID NO: 4003577 - DNA, 25 bp, Homo sapien
tggagagctcgcctgcctgggtgcg

SEQ ID NO: 4003578 - DNA, 25 bp, Homo sapien
ggatctcgggtgtgctgcttctcag

SEQ ID NO: 4003579 - DNA, 25 bp, Homo sapien
caagcccgcgttgccgactgccttc

SEQ ID NO: 4003580 - DNA, 25 bp, Homo sapien
gagatgcacaggcactcaacgtagg

SEQ ID NO: 4003581 - DNA, 25 bp, Homo sapien
gacccttcggaaggcctggatggcc

SEQ ID NO: 4003582 - DNA, 25 bp, Homo sapien
gtcatcatccgagggctcctggatg

SEQ ID NO: 4003583 - DNA, 25 bp, Homo sapien
cttgtcatcatccgagggctcctgg

SEQ ID NO: 4003584 - DNA, 25 bp, Homo sapien
ggctcctggatggtacagttctcac

SEQ ID NO: 4003585 - DNA, 25 bp, Homo sapien
agggctcctggatggtacagttctc

SEQ ID NO: 4003586 - DNA, 25 bp, Homo sapien
ccgcagggcccgtccagagaagcac

SEQ ID NO: 4003587 - DNA, 25 bp, Homo sapien
caggatcctcactagggagccgact

SEQ ID NO: 4003588 - DNA, 25 bp, Homo sapien
cactagggagccgactccaggcagc

SEQ ID NO: 4003589 - DNA, 25 bp, Homo sapien
aaggcgtctcccaggatcctcacta

SEQ ID NO: 4003590 - DNA, 25 bp, Homo sapien
gcagcatgtggaccatagcatctgt

SEQ ID NO: 4003591 - DNA, 25 bp, Homo sapien
gcatgtggaccatagcatctgtggg

SEQ ID NO: 4003592 - DNA, 25 bp, Homo sapien
cagcagcatgtggaccatagcatct

SEQ ID NO: 4003593 - DNA, 25 bp, Homo sapien
cagcatgtggaccatagcatctgtg

SEQ ID NO: 4003594 - DNA, 25 bp, Homo sapien
cctccaccgcggctgatgcgatgag

SEQ ID NO: 4003595 - DNA, 25 bp, Homo sapien
accgcggctgatgcgatgagttcct

SEQ ID NO: 4003596 - DNA, 25 bp, Homo sapien
aaggcagggcatccaacagtggctg

SEQ ID NO: 4003597 - DNA, 25 bp, Homo sapien
gagttccttcatgaggcccacacag

SEQ ID NO: 4003598 - DNA, 25 bp, Homo sapien
gcaaatgtcaccgagaaggggtaaa

SEQ ID NO: 4003599 - DNA, 25 bp, Homo sapien
ccattgtctcggcatttgaaggaag

SEQ ID NO: 4003600 - DNA, 25 bp, Homo sapien
agaatattgccagagttccatcagc

SEQ ID NO: 4003601 - DNA, 25 bp, Homo sapien
gaatattgccagagttccatcagct

SEQ ID NO: 4003602 - DNA, 25 bp, Homo sapien
gccagagttccatcagctcaccccc

SEQ ID NO: 4003603 - DNA, 25 bp, Homo sapien
cacccagcagtgcgggggatccccg

SEQ ID NO: 4003604 - DNA, 25 bp, Homo sapien
acacccagcagtgcgggggatcccc

SEQ ID NO: 4003605 - DNA, 25 bp, Homo sapien
acccagcagtgcgggggatccccga

SEQ ID NO: 4003606 - DNA, 25 bp, Homo sapien
cccagcagtgcgggggatccccgaa

SEQ ID NO: 4003607 - DNA, 25 bp, Homo sapien
tgtaagtaaaagacagccgcacagt

SEQ ID NO: 4003608 - DNA, 25 bp, Homo sapien
aaaagtggagatcgaggcccacagc

SEQ ID NO: 4003609 - DNA, 25 bp, Homo sapien
caccgccagcgtccaaaagtggaga

SEQ ID NO: 4003610 - DNA, 25 bp, Homo sapien
ctccacggtggcagtaacttccttt

SEQ ID NO: 4003611 - DNA, 25 bp, Homo sapien
tgtctcctcccactcatacagcagg

SEQ ID NO: 4003612 - DNA, 25 bp, Homo sapien
cttactaatgtggctgcggtggcca

SEQ ID NO: 4003613 - DNA, 25 bp, Homo sapien
aggcacagcctccttactaatgtgg

SEQ ID NO: 4003614 - DNA, 25 bp, Homo sapien
gtgtctcctcccactcatacagcag

SEQ ID NO: 4003615 - DNA, 25 bp, Homo sapien
ctggacgcaggtcaggcgggaggtc

SEQ ID NO: 4003616 - DNA, 25 bp, Homo sapien
catctcgtgcagcagactgagtgag

SEQ ID NO: 4003617 - DNA, 25 bp, Homo sapien
tggatcttggggcatctcgtgcagc

SEQ ID NO: 4003618 - DNA, 25 bp, Homo sapien
gcccggaagctctggacgcaggtca

SEQ ID NO: 4003619 - DNA, 25 bp, Homo sapien
gtgccaggtcctttgtcttgtgtag

SEQ ID NO: 4003620 - DNA, 25 bp, Homo sapien
tgtgtagccagtccccatggtgctg

SEQ ID NO: 4003621 - DNA, 25 bp, Homo sapien
tggtatgtggtaggacatcggccca

SEQ ID NO: 4003622 - DNA, 25 bp, Homo sapien
gaatggagtgatgagcgtcccctgc

SEQ ID NO: 4003623 - DNA, 25 bp, Homo sapien
ggctcagcacagcacgcttcacgtt

SEQ ID NO: 4003624 - DNA, 25 bp, Homo sapien
gacacaggtgggccacacgcccaga

SEQ ID NO: 4003625 - DNA, 25 bp, Homo sapien
agcgtggctcagtgggatggggaca

SEQ ID NO: 4003626 - DNA, 25 bp, Homo sapien
cccagagtgcaggatgaagcggagt

SEQ ID NO: 4003627 - DNA, 25 bp, Homo sapien
ctcaggctctccgactccttcagaa

SEQ ID NO: 4003628 - DNA, 25 bp, Homo sapien
gactccttcagaagctccaccttgg

SEQ ID NO: 4003629 - DNA, 25 bp, Homo sapien
caggatggatgtcacctggaagtct

SEQ ID NO: 4003630 - DNA, 25 bp, Homo sapien
tggatgtcacctggaagtcttggag

SEQ ID NO: 4003631 - DNA, 25 bp, Homo sapien
ccaagcacatcaaggacagccaagc

SEQ ID NO: 4003632 - DNA, 25 bp, Homo sapien
tggtggaaaaatgataggtgtatct

SEQ ID NO: 4003633 - DNA, 25 bp, Homo sapien
gcacatcaaggacagccaagccttg

SEQ ID NO: 4003634 - DNA, 25 bp, Homo sapien
catctggcacaggccaagcacatca

SEQ ID NO: 4003635 - DNA, 25 bp, Homo sapien
ttctgatctttatagaagataaagc

SEQ ID NO: 4003636 - DNA, 25 bp, Homo sapien
ctgatctttatagaagataaagctg

SEQ ID NO: 4003637 - DNA, 25 bp, Homo sapien
gttagggtgggttgttattctgatc

SEQ ID NO: 4003638 - DNA, 25 bp, Homo sapien
tagggtgggttgttattctgatctt

SEQ ID NO: 4003639 - DNA, 25 bp, Homo sapien
tgcacgcagtcatgcaggaggccac

SEQ ID NO: 4003640 - DNA, 25 bp, Homo sapien
gtgcacgcagtcatgcaggaggcca

SEQ ID NO: 4003641 - DNA, 25 bp, Homo sapien
ctgtgcacgcagtcatgcaggaggc

SEQ ID NO: 4003642 - DNA, 25 bp, Homo sapien
tgtgcacgcagtcatgcaggaggcc

SEQ ID NO: 4003643 - DNA, 25 bp, Homo sapien
agagcaggaccagaccgaggagtcc

SEQ ID NO: 4003644 - DNA, 25 bp, Homo sapien
ccagagcaggaccagaccgaggagt

SEQ ID NO: 4003645 - DNA, 25 bp, Homo sapien
agcaggaccagaccgaggagtccca

SEQ ID NO: 4003646 - DNA, 25 bp, Homo sapien
aggaccagaccgaggagtcccacgg

SEQ ID NO: 4003647 - DNA, 25 bp, Homo sapien
ttccaatgcacaggatggactcaga

SEQ ID NO: 4003648 - DNA, 25 bp, Homo sapien
ctggcatctatctctgggtagaggc

SEQ ID NO: 4003649 - DNA, 25 bp, Homo sapien
aacaaggaatgatctaccccaaggt

SEQ ID NO: 4003650 - DNA, 25 bp, Homo sapien
aatgcacaggatggactcagaacaa

SEQ ID NO: 4003651 - DNA, 25 bp, Homo sapien
caaggccaaggtgaattgtaggacc

SEQ ID NO: 4003652 - DNA, 25 bp, Homo sapien
aaatctgaatctccagccacgtagc

SEQ ID NO: 4003653 - DNA, 25 bp, Homo sapien
ttctgtggccccagtatggctgtgc

SEQ ID NO: 4003654 - DNA, 25 bp, Homo sapien
cccagggataggtcggcactgatgc

SEQ ID NO: 4003655 - DNA, 25 bp, Homo sapien
tagcctccccaaaaggcatgaagcc

SEQ ID NO: 4003656 - DNA, 25 bp, Homo sapien
ggattcagtaagaatctttcccatc

SEQ ID NO: 4003657 - DNA, 25 bp, Homo sapien
gccctggccctgtcgtacaggattc

SEQ ID NO: 4003658 - DNA, 25 bp, Homo sapien
cccaggggattctaaggtgcagcgt

SEQ ID NO: 4003659 - DNA, 25 bp, Homo sapien
gaaggcaggcagaacataaaatgag

SEQ ID NO: 4003660 - DNA, 25 bp, Homo sapien
gataaaggcctgaacggatttaaga

SEQ ID NO: 4003661 - DNA, 25 bp, Homo sapien
caaacaactaatgcagggaaaggca

SEQ ID NO: 4003662 - DNA, 25 bp, Homo sapien
ggaggccattaagttagacaaacaa

SEQ ID NO: 4003663 - DNA, 25 bp, Homo sapien
tttttacgatcctgaaatagggctc

SEQ ID NO: 4003664 - DNA, 25 bp, Homo sapien
gaatgtccaatgaacacttcacact

SEQ ID NO: 4003665 - DNA, 25 bp, Homo sapien
tccaggcatctgacatgaaagttcc

SEQ ID NO: 4003666 - DNA, 25 bp, Homo sapien
tgaaagttccgcataagacatgttt

SEQ ID NO: 4003667 - DNA, 25 bp, Homo sapien
tgggttccaatagcctcatgttcaa

SEQ ID NO: 4003668 - DNA, 25 bp, Homo sapien
aaaacttgaaagctatggcttgccg

SEQ ID NO: 4003669 - DNA, 25 bp, Homo sapien
tggcttgccgccatcaatgacgcct

SEQ ID NO: 4003670 - DNA, 25 bp, Homo sapien
tctgactcgttagcaaatccaccca

SEQ ID NO: 4003671 - DNA, 25 bp, Homo sapien
aatggctggaaatgcaacatgagcc

SEQ ID NO: 4003672 - DNA, 25 bp, Homo sapien
caaataaaggttctttgtagcaatg

SEQ ID NO: 4003673 - DNA, 25 bp, Homo sapien
aacatgagccctttcttcacaccaa

SEQ ID NO: 4003674 - DNA, 25 bp, Homo sapien
gcaagtctgaagtttttaatcggga

SEQ ID NO: 4003675 - DNA, 25 bp, Homo sapien
tagcatgcatttacgaccttgtgga

SEQ ID NO: 4003676 - DNA, 25 bp, Homo sapien
tcacagttagatggcaggactcagg

SEQ ID NO: 4003677 - DNA, 25 bp, Homo sapien
caggaaaccgtggaactgacactca

SEQ ID NO: 4003678 - DNA, 25 bp, Homo sapien
caaagccaagcctgtaaagtctgta

SEQ ID NO: 4003679 - DNA, 25 bp, Homo sapien
cagaacctccaccaggcgtgaagct

SEQ ID NO: 4003680 - DNA, 25 bp, Homo sapien
gatttgttagttttgcgacgtattc

SEQ ID NO: 4003681 - DNA, 25 bp, Homo sapien
gaggtgagaccaccagggcagaacc

SEQ ID NO: 4003682 - DNA, 25 bp, Homo sapien
tatgcacgactccaagcagcaattt

SEQ ID NO: 4003683 - DNA, 25 bp, Homo sapien
ggacagtaatggtccacgtcctgca

SEQ ID NO: 4003684 - DNA, 25 bp, Homo sapien
aaacgcttgtaggtgcccaggagag

SEQ ID NO: 4003685 - DNA, 25 bp, Homo sapien
gagagctctgcagttgggacagtaa

SEQ ID NO: 4003686 - DNA, 25 bp, Homo sapien
cctgcagggcatccacgcagaaggg

SEQ ID NO: 4003687 - DNA, 25 bp, Homo sapien
tcaaagctgcggagagctacgatcg

SEQ ID NO: 4003688 - DNA, 25 bp, Homo sapien
aagctgcggagagctacgatcgtac

SEQ ID NO: 4003689 - DNA, 25 bp, Homo sapien
aggagatcaaagctgcggagagcta

SEQ ID NO: 4003690 - DNA, 25 bp, Homo sapien
tgcggagagctacgatcgtaccact

SEQ ID NO: 4003691 - DNA, 25 bp, Homo sapien
tctgagtggctcacgtggccaggta

SEQ ID NO: 4003692 - DNA, 25 bp, Homo sapien
gttaactaaactctctgggactctg

SEQ ID NO: 4003693 - DNA, 25 bp, Homo sapien
gaacgtgccggttgcatgaggctcc

SEQ ID NO: 4003694 - DNA, 25 bp, Homo sapien
gaatcaggtgcccagaaagctgttt

SEQ ID NO: 4003695 - DNA, 25 bp, Homo sapien
gaagggcaggatggcttggggccaa

SEQ ID NO: 4003696 - DNA, 25 bp, Homo sapien
atggcttggggccaagtgggaggca

SEQ ID NO: 4003697 - DNA, 25 bp, Homo sapien
agggcaggatggcttggggccaagt

SEQ ID NO: 4003698 - DNA, 25 bp, Homo sapien
ttggggccaagtgggaggcagactc

SEQ ID NO: 4003699 - DNA, 25 bp, Homo sapien
ccggcgttataggacagctgactca

SEQ ID NO: 4003700 - DNA, 25 bp, Homo sapien
tcttgttgcaggaaggacaacacat

SEQ ID NO: 4003701 - DNA, 25 bp, Homo sapien
gctgactcacgatcatcttgttgca

SEQ ID NO: 4003702 - DNA, 25 bp, Homo sapien
gccaggtcagagcaccggcgttata

SEQ ID NO: 4003703 - DNA, 25 bp, Homo sapien
tctttggcagagtcacttcggtcac

SEQ ID NO: 4003704 - DNA, 25 bp, Homo sapien
taaaactggaacgtactggcacttc

SEQ ID NO: 4003705 - DNA, 25 bp, Homo sapien
tattacggaaaagctgtgagcctca

SEQ ID NO: 4003706 - DNA, 25 bp, Homo sapien
aaagactgcgtgtggaatttcaagg

SEQ ID NO: 4003707 - DNA, 25 bp, Homo sapien
aagccccgtagttggcccaggcatg

SEQ ID NO: 4003708 - DNA, 25 bp, Homo sapien
cgctggctgggtataatacgaagga

SEQ ID NO: 4003709 - DNA, 25 bp, Homo sapien
cgaaggaggattcatgcccttccca

SEQ ID NO: 4003710 - DNA, 25 bp, Homo sapien
ccagtggccgcctggtaaggtcctg

SEQ ID NO: 4003711 - DNA, 25 bp, Homo sapien
caggagttcaagtgagccgtgactg

SEQ ID NO: 4003712 - DNA, 25 bp, Homo sapien
catgattatggtatcgctcctgcta

SEQ ID NO: 4003713 - DNA, 25 bp, Homo sapien
tgattatggtatcgctcctgctaac

SEQ ID NO: 4003714 - DNA, 25 bp, Homo sapien
ggtatcgctcctgctaactaagtat

SEQ ID NO: 4003715 - DNA, 25 bp, Homo sapien
tatggtatcgctcctgctaactaag

SEQ ID NO: 4003716 - DNA, 25 bp, Homo sapien
gacagccctggaatgaacctcgaaa

SEQ ID NO: 4003717 - DNA, 25 bp, Homo sapien
ggtggccagcctagcagttttatca

SEQ ID NO: 4003718 - DNA, 25 bp, Homo sapien
gaaaagatcagacttcgggaagccc

SEQ ID NO: 4003719 - DNA, 25 bp, Homo sapien
tacaaagcacatcactggtggccag

SEQ ID NO: 4003720 - DNA, 25 bp, Homo sapien
gaggtcgtgttacaggagccttcac

SEQ ID NO: 4003721 - DNA, 25 bp, Homo sapien
gccaggaaagtgaggtcgtgttaca

SEQ ID NO: 4003722 - DNA, 25 bp, Homo sapien
ttcacatcacaaggtgggcaccagc

SEQ ID NO: 4003723 - DNA, 25 bp, Homo sapien
aaaccagcagtccaagaacaacttg

SEQ ID NO: 4003724 - DNA, 25 bp, Homo sapien
ggcccgcttcgctctctgattttca

SEQ ID NO: 4003725 - DNA, 25 bp, Homo sapien
gtgagcggcgtctgggcccagagct

SEQ ID NO: 4003726 - DNA, 25 bp, Homo sapien
gcagtaagaggacccctgcgctcgc

SEQ ID NO: 4003727 - DNA, 25 bp, Homo sapien
gtgtccttcccggatcttgcgcgaa

SEQ ID NO: 4003728 - DNA, 25 bp, Homo sapien
gcgccgcctgtcgagccgggaggtc

SEQ ID NO: 4003729 - DNA, 25 bp, Homo sapien
gtcgagccgggaggtctgagctggc

SEQ ID NO: 4003730 - DNA, 25 bp, Homo sapien
tggcctctcgggcgccccgagaaaa

SEQ ID NO: 4003731 - DNA, 25 bp, Homo sapien
aggtctgagctggcctctcgggcgc

SEQ ID NO: 4003732 - DNA, 25 bp, Homo sapien
ccccgagacgcctggcgcggacctg

SEQ ID NO: 4003733 - DNA, 25 bp, Homo sapien
cgagacgcctggcgcggacctggtg

SEQ ID NO: 4003734 - DNA, 25 bp, Homo sapien
gagacgcctggcgcggacctggtgt

SEQ ID NO: 4003735 - DNA, 25 bp, Homo sapien
acgcctggcgcggacctggtgtctc

SEQ ID NO: 4003736 - DNA, 25 bp, Homo sapien
tctggagggcggcccttctcttcct

SEQ ID NO: 4003737 - DNA, 25 bp, Homo sapien
cactctctgtgccttcgggcatgtt

SEQ ID NO: 4003738 - DNA, 25 bp, Homo sapien
gcgtccggacagaccaagacactct

SEQ ID NO: 4003739 - DNA, 25 bp, Homo sapien
ttcctgtaactctacagacgcgtcc

SEQ ID NO: 4003740 - DNA, 25 bp, Homo sapien
ttgggtctccatgcaagtttctctc

SEQ ID NO: 4003741 - DNA, 25 bp, Homo sapien
ctcttgggtctccatgcaagtttct

SEQ ID NO: 4003742 - DNA, 25 bp, Homo sapien
cttgggtctccatgcaagtttctct

SEQ ID NO: 4003743 - DNA, 25 bp, Homo sapien
tcttgggtctccatgcaagtttctc

SEQ ID NO: 4003744 - DNA, 25 bp, Homo sapien
tcagcggccacactcgaagcagccg

SEQ ID NO: 4003745 - DNA, 25 bp, Homo sapien
ccttcttcttctgccgaatgcctgg

SEQ ID NO: 4003746 - DNA, 25 bp, Homo sapien
tcttcttctgccgaatgcctggaat

SEQ ID NO: 4003747 - DNA, 25 bp, Homo sapien
tccttcttcttctgccgaatgcctg

SEQ ID NO: 4003748 - DNA, 25 bp, Homo sapien
ttcttcttctgccgaatgcctggaa

SEQ ID NO: 4003749 - DNA, 25 bp, Homo sapien
cgaagacctgtgtcgcaggtggcag

SEQ ID NO: 4003750 - DNA, 25 bp, Homo sapien
gaagacctgtgtcgcaggtggcagg

SEQ ID NO: 4003751 - DNA, 25 bp, Homo sapien
agacctgtgtcgcaggtggcagggt

SEQ ID NO: 4003752 - DNA, 25 bp, Homo sapien
aagacctgtgtcgcaggtggcaggg

SEQ ID NO: 4003753 - DNA, 25 bp, Homo sapien
gctctgggtagcacaaagacacggg

SEQ ID NO: 4003754 - DNA, 25 bp, Homo sapien
gggtatttacaggagatgtggctgg

SEQ ID NO: 4003755 - DNA, 25 bp, Homo sapien
ctacacgggcacatggggccagact

SEQ ID NO: 4003756 - DNA, 25 bp, Homo sapien
agactcgggctctgggtagcacaaa

SEQ ID NO: 4003757 - DNA, 25 bp, Homo sapien
tggaggcctttctgctggaggccat

SEQ ID NO: 4003758 - DNA, 25 bp, Homo sapien
caggctggaggcctttctgctggag

SEQ ID NO: 4003759 - DNA, 25 bp, Homo sapien
ctggaggcctttctgctggaggcca

SEQ ID NO: 4003760 - DNA, 25 bp, Homo sapien
gcccaggctggaggcctttctgctg

SEQ ID NO: 4003761 - DNA, 25 bp, Homo sapien
gagaacctccatcccattctgtaag

SEQ ID NO: 4003762 - DNA, 25 bp, Homo sapien
ctcctggctaatgagcatctgagaa

SEQ ID NO: 4003763 - DNA, 25 bp, Homo sapien
gctaatgagcatctgagaacctcca

SEQ ID NO: 4003764 - DNA, 25 bp, Homo sapien
catcccattctgtaaggacgaaccc

SEQ ID NO: 4003765 - DNA, 25 bp, Homo sapien
tcgaggagtatgcagcactcttccg

SEQ ID NO: 4003766 - DNA, 25 bp, Homo sapien
tatgcagcactcttccgtgcagcgt

SEQ ID NO: 4003767 - DNA, 25 bp, Homo sapien
cagctctcgaggagtatgcagcact

SEQ ID NO: 4003768 - DNA, 25 bp, Homo sapien
ctcttccgtgcagcgtgcctcagtt

SEQ ID NO: 4003769 - DNA, 25 bp, Homo sapien
gggcagtcccggttcagagctctgc

SEQ ID NO: 4003770 - DNA, 25 bp, Homo sapien
cagtcccggttcagagctctgcggg

SEQ ID NO: 4003771 - DNA, 25 bp, Homo sapien
gcgggctcccgcttcctcttttgcc

SEQ ID NO: 4003772 - DNA, 25 bp, Homo sapien
gggattctggagcgagtttcctctt

SEQ ID NO: 4003773 - DNA, 25 bp, Homo sapien
ccatcagtgtcagtcccactggcat

SEQ ID NO: 4003774 - DNA, 25 bp, Homo sapien
ggccttgtgtgatgcgtccttgtgt

SEQ ID NO: 4003775 - DNA, 25 bp, Homo sapien
tgatgcgtccttgtgtcccactggc

SEQ ID NO: 4003776 - DNA, 25 bp, Homo sapien
tggcatccggccgttcttggtcctg

SEQ ID NO: 4003777 - DNA, 25 bp, Homo sapien
cctcctggcgtctgtcaaggagcct

SEQ ID NO: 4003778 - DNA, 25 bp, Homo sapien
gcagtactgaaagccccgtagggat

SEQ ID NO: 4003779 - DNA, 25 bp, Homo sapien
caatgctcatgatgtgcccggttga

SEQ ID NO: 4003780 - DNA, 25 bp, Homo sapien
ttcgctgaagagtttgttggcaccc

SEQ ID NO: 4003781 - DNA, 25 bp, Homo sapien
gttgtggaaccggatggtggcaggg

SEQ ID NO: 4003782 - DNA, 25 bp, Homo sapien
gaacagctaagtggggttgtggaac

SEQ ID NO: 4003783 - DNA, 25 bp, Homo sapien
gtcccctgtccagtctggaggcgtg

SEQ ID NO: 4003784 - DNA, 25 bp, Homo sapien
ccctgtccagtctggaggcgtgaga

SEQ ID NO: 4003785 - DNA, 25 bp, Homo sapien
cagggaacatttctcacgtgcacat

SEQ ID NO: 4003786 - DNA, 25 bp, Homo sapien
tctctgatgaccgtccgcctatggg

SEQ ID NO: 4003787 - DNA, 25 bp, Homo sapien
tgacccagctctaaaggcacttagg

SEQ ID NO: 4003788 - DNA, 25 bp, Homo sapien
gcctatggggttctgacttcacttt

SEQ ID NO: 4003789 - DNA, 25 bp, Homo sapien
tgaatccacgttctggaaccccgag

SEQ ID NO: 4003790 - DNA, 25 bp, Homo sapien
gatttttaatcccaccacaagcaca

SEQ ID NO: 4003791 - DNA, 25 bp, Homo sapien
ttcaaatgtgactcgtgcctgccca

SEQ ID NO: 4003792 - DNA, 25 bp, Homo sapien
ttaagcagcatacacctaaattggg

SEQ ID NO: 4003793 - DNA, 25 bp, Homo sapien
tgagggacgcagcaacagctaggat

SEQ ID NO: 4003794 - DNA, 25 bp, Homo sapien
tgatccatcccctcacgtttcagaa

SEQ ID NO: 4003795 - DNA, 25 bp, Homo sapien
gagaacaagttccaaaggtgccgac

SEQ ID NO: 4003796 - DNA, 25 bp, Homo sapien
taggcgtgatgtcagcagaagccct

SEQ ID NO: 4003797 - DNA, 25 bp, Homo sapien
gagccacactcaaatggctaagtag

SEQ ID NO: 4003798 - DNA, 25 bp, Homo sapien
gcttctagaatgagtgaaccacatc

SEQ ID NO: 4003799 - DNA, 25 bp, Homo sapien
gagtttgaatcaggcccatttgagc

SEQ ID NO: 4003800 - DNA, 25 bp, Homo sapien
gctaagtaggttatgacctctctgg

SEQ ID NO: 4003801 - DNA, 25 bp, Homo sapien
ctagaccactgagaaaatctttatt

SEQ ID NO: 4003802 - DNA, 25 bp, Homo sapien
caatgtacaattttcacctctgatt

SEQ ID NO: 4003803 - DNA, 25 bp, Homo sapien
gaccactgagaaaatctttatttac

SEQ ID NO: 4003804 - DNA, 25 bp, Homo sapien
tgcataaatatattcccaatgtaca

SEQ ID NO: 4003805 - DNA, 25 bp, Homo sapien
ccagtttcctctccatggtcgccac

SEQ ID NO: 4003806 - DNA, 25 bp, Homo sapien
ggctgcttggggtggacctctctct

SEQ ID NO: 4003807 - DNA, 25 bp, Homo sapien
aggctgcttggggtggacctctctc

SEQ ID NO: 4003808 - DNA, 25 bp, Homo sapien
cacttgtgctcgctggaggctgctt

SEQ ID NO: 4003809 - DNA, 25 bp, Homo sapien
tgagccacgtgttctcggtaaggag

SEQ ID NO: 4003810 - DNA, 25 bp, Homo sapien
tgtaagactgcctcgctctgaagac

SEQ ID NO: 4003811 - DNA, 25 bp, Homo sapien
tccttggtaggagagttagccacat

SEQ ID NO: 4003812 - DNA, 25 bp, Homo sapien
gaaattctctacaaagctgaggctg

SEQ ID NO: 4003813 - DNA, 25 bp, Homo sapien
gcctctgtgtgctcggagatgccca

SEQ ID NO: 4003814 - DNA, 25 bp, Homo sapien
agaaagacaagagctcctaggccca

SEQ ID NO: 4003815 - DNA, 25 bp, Homo sapien
taggcccaggcctaaagccagtgat

SEQ ID NO: 4003816 - DNA, 25 bp, Homo sapien
catgctatctgctaactaagaggtc

SEQ ID NO: 4003817 - DNA, 25 bp, Homo sapien
cacaagcctggtcttgtaaggcaga

SEQ ID NO: 4003818 - DNA, 25 bp, Homo sapien
gaaaacacatcgtggccctgtcaag

SEQ ID NO: 4003819 - DNA, 25 bp, Homo sapien
aaagctgccaagatccctcaggatg

SEQ ID NO: 4003820 - DNA, 25 bp, Homo sapien
ccaggcagcctaagaacgaaggtca

SEQ ID NO: 4003821 - DNA, 25 bp, Homo sapien
ggccggagaaatgcgcacatcttca

SEQ ID NO: 4003822 - DNA, 25 bp, Homo sapien
catgatgtgacaagaccctactacc

SEQ ID NO: 4003823 - DNA, 25 bp, Homo sapien
tctggctaaaccaaacactcgcttg

SEQ ID NO: 4003824 - DNA, 25 bp, Homo sapien
gaatgatttacatcttaaacccatt

SEQ ID NO: 4003825 - DNA, 25 bp, Homo sapien
acataatgaatgatttacatcttaa

SEQ ID NO: 4003826 - DNA, 25 bp, Homo sapien
aatgaatgatttacatcttaaaccc

SEQ ID NO: 4003827 - DNA, 25 bp, Homo sapien
gaacataatgaatgatttacatctt

SEQ ID NO: 4003828 - DNA, 25 bp, Homo sapien
gacgatcgaccataaattcccaagg

SEQ ID NO: 4003829 - DNA, 25 bp, Homo sapien
aaggaaggtcattctgagacacgtc

SEQ ID NO: 4003830 - DNA, 25 bp, Homo sapien
ggaaggtcattctgagacacgtcaa

SEQ ID NO: 4003831 - DNA, 25 bp, Homo sapien
agtaggaagacgatcgaccataaat

SEQ ID NO: 4003832 - DNA, 25 bp, Homo sapien
ccgagctagctggatgaagatgtga

SEQ ID NO: 4003833 - DNA, 25 bp, Homo sapien
cacagtgaatgtgtccatgggcagg

SEQ ID NO: 4003834 - DNA, 25 bp, Homo sapien
ggatggacagaagccgcaccacgga

SEQ ID NO: 4003835 - DNA, 25 bp, Homo sapien
gcaccacggagcgtaatagagcagg

SEQ ID NO: 4003836 - DNA, 25 bp, Homo sapien
ccaatactgtgctttctggagcact

SEQ ID NO: 4003837 - DNA, 25 bp, Homo sapien
tacttgcaccgggaaatgggctctt

SEQ ID NO: 4003838 - DNA, 25 bp, Homo sapien
cataattgggccatcacgtggttac

SEQ ID NO: 4003839 - DNA, 25 bp, Homo sapien
gcacccgaaaaatgctacctatgca

SEQ ID NO: 4003840 - DNA, 25 bp, Homo sapien
ccacttccaatgagatgccttttca

SEQ ID NO: 4003841 - DNA, 25 bp, Homo sapien
caagggactatagagaacgctgaag

SEQ ID NO: 4003842 - DNA, 25 bp, Homo sapien
tgagacgggaactgggcagagccac

SEQ ID NO: 4003843 - DNA, 25 bp, Homo sapien
aggactacttcccaaaaggtatcag

SEQ ID NO: 4003844 - DNA, 25 bp, Homo sapien
aaataaagagaaaatgagatcaact

SEQ ID NO: 4003845 - DNA, 25 bp, Homo sapien
aagagaaaatgagatcaactctcct

SEQ ID NO: 4003846 - DNA, 25 bp, Homo sapien
taaagagaaaatgagatcaactctc

SEQ ID NO: 4003847 - DNA, 25 bp, Homo sapien
aataaagagaaaatgagatcaactc

SEQ ID NO: 4003848 - DNA, 25 bp, Homo sapien
cactaactgcaggacaaagaacagc

SEQ ID NO: 4003849 - DNA, 25 bp, Homo sapien
caatgaggctgaactaacgtggctt

SEQ ID NO: 4003850 - DNA, 25 bp, Homo sapien
tatgcccttcaaaaagtgactggtc

SEQ ID NO: 4003851 - DNA, 25 bp, Homo sapien
acttcattgtgtgtagtcaagggca

SEQ ID NO: 4003852 - DNA, 25 bp, Homo sapien
ggctcactttcatcagcccctagga

SEQ ID NO: 4003853 - DNA, 25 bp, Homo sapien
aatgagctacgaaggtgacatcacc

SEQ ID NO: 4003854 - DNA, 25 bp, Homo sapien
ccttagacatgtgacagaaatcgcc

SEQ ID NO: 4003855 - DNA, 25 bp, Homo sapien
taggacatcccaccagaatagctct

SEQ ID NO: 4003856 - DNA, 25 bp, Homo sapien
gcttggggaaataaactgcctgcag

SEQ ID NO: 4003857 - DNA, 25 bp, Homo sapien
cttggggaaataaactgcctgcagt

SEQ ID NO: 4003858 - DNA, 25 bp, Homo sapien
tggggaaataaactgcctgcagtac

SEQ ID NO: 4003859 - DNA, 25 bp, Homo sapien
ttggggaaataaactgcctgcagta

SEQ ID NO: 4003860 - DNA, 25 bp, Homo sapien
gctccttgaggtagaaagaatccag

SEQ ID NO: 4003861 - DNA, 25 bp, Homo sapien
cctcaatgtgaggaacggagcttgg

SEQ ID NO: 4003862 - DNA, 25 bp, Homo sapien
tcagagtcgatgaagcctgacacac

SEQ ID NO: 4003863 - DNA, 25 bp, Homo sapien
tgatgccacatgataaaaggtctgc

SEQ ID NO: 4003864 - DNA, 25 bp, Homo sapien
tgagggactagcaccccgttagcca

SEQ ID NO: 4003865 - DNA, 25 bp, Homo sapien
ttatccatggtcaactccggttcaa

SEQ ID NO: 4003866 - DNA, 25 bp, Homo sapien
cgttagccacgtttcactttctgta

SEQ ID NO: 4003867 - DNA, 25 bp, Homo sapien
ccatggtcaactccggttcaaaaat

SEQ ID NO: 4003868 - DNA, 25 bp, Homo sapien
ggtcaagcctatataatccgtgaag

SEQ ID NO: 4003869 - DNA, 25 bp, Homo sapien
tagattcaaagacgcagtaatagac

SEQ ID NO: 4003870 - DNA, 25 bp, Homo sapien
cgtgaagagcccagatgccctctgg

SEQ ID NO: 4003871 - DNA, 25 bp, Homo sapien
cagcatgcagtactaacaaggtcaa

SEQ ID NO: 4003872 - DNA, 25 bp, Homo sapien
ttctcagctgtgtagttcaggacct

SEQ ID NO: 4003873 - DNA, 25 bp, Homo sapien
tcttcagctcgttattcagcaggag

SEQ ID NO: 4003874 - DNA, 25 bp, Homo sapien
tatgaacagaaacagcgctggtcct

SEQ ID NO: 4003875 - DNA, 25 bp, Homo sapien
gccaccgaaagagcgtctcctggtt

SEQ ID NO: 4003876 - DNA, 25 bp, Homo sapien
actgtgcagctaacacccgcttctc

SEQ ID NO: 4003877 - DNA, 25 bp, Homo sapien
aaacccaggcgtggagcggggcctg

SEQ ID NO: 4003878 - DNA, 25 bp, Homo sapien
ccccactgtgcagctaacacccgct

SEQ ID NO: 4003879 - DNA, 25 bp, Homo sapien
cccaggcgtggagcggggcctggcc

SEQ ID NO: 4003880 - DNA, 25 bp, Homo sapien
taccaaatcgaagcagaaacctgat

SEQ ID NO: 4003881 - DNA, 25 bp, Homo sapien
ctaccaaatcgaagcagaaacctga

SEQ ID NO: 4003882 - DNA, 25 bp, Homo sapien
ccaaatcgtactgttcctaggtaat

SEQ ID NO: 4003883 - DNA, 25 bp, Homo sapien
cgcaagatgtttatttgtgataacc

SEQ ID NO: 4003884 - DNA, 25 bp, Homo sapien
taaggataccagtttcgcaagatgt

SEQ ID NO: 4003885 - DNA, 25 bp, Homo sapien
ttccagagtgtactaaggataccag

SEQ ID NO: 4003886 - DNA, 25 bp, Homo sapien
aaaccaagcgagatgtggcaaaccc

SEQ ID NO: 4003887 - DNA, 25 bp, Homo sapien
tccctcaggtaaggagtggccgaca

SEQ ID NO: 4003888 - DNA, 25 bp, Homo sapien
gagtgagtatgtccctactgccaga

SEQ ID NO: 4003889 - DNA, 25 bp, Homo sapien
catctttcagtggtgtggtcctctc

SEQ ID NO: 4003890 - DNA, 25 bp, Homo sapien
agaaaccagggcccttggagaagag

SEQ ID NO: 4003891 - DNA, 25 bp, Homo sapien
tttctaaatgccattctccagtaaa

SEQ ID NO: 4003892 - DNA, 25 bp, Homo sapien
tggtttctaaatgccattctccagt

SEQ ID NO: 4003893 - DNA, 25 bp, Homo sapien
gcccttggagaagaggttgattcca

SEQ ID NO: 4003894 - DNA, 25 bp, Homo sapien
gaataagataaatacccatgactcc

SEQ ID NO: 4003895 - DNA, 25 bp, Homo sapien
gagccaagctgaagccctcctagta

SEQ ID NO: 4003896 - DNA, 25 bp, Homo sapien
tgatggaggctaaaattcatgagca

SEQ ID NO: 4003897 - DNA, 25 bp, Homo sapien
gaacagtcagctcttctttaaggga

SEQ ID NO: 4003898 - DNA, 25 bp, Homo sapien
gaaatcttgaaggaacatctgggta

SEQ ID NO: 4003899 - DNA, 25 bp, Homo sapien
ggaaatcttgctagaagcagcagct

SEQ ID NO: 4003900 - DNA, 25 bp, Homo sapien
gttttctgataagcagagctccagg

SEQ ID NO: 4003901 - DNA, 25 bp, Homo sapien
gctccagggctttctacgacagaag

SEQ ID NO: 4003902 - DNA, 25 bp, Homo sapien
tattaaaatgactagagccaggcgc

SEQ ID NO: 4003903 - DNA, 25 bp, Homo sapien
gctgctaagcggaagacatggccta

SEQ ID NO: 4003904 - DNA, 25 bp, Homo sapien
ggaagataccactaaagcccaggga

SEQ ID NO: 4003905 - DNA, 25 bp, Homo sapien
cagtgtgccggacgtcatgctagat

SEQ ID NO: 4003906 - DNA, 25 bp, Homo sapien
taaaatctcaccatctggccgcgct

SEQ ID NO: 4003907 - DNA, 25 bp, Homo sapien
accgtgccccgccaagatcttttga

SEQ ID NO: 4003908 - DNA, 25 bp, Homo sapien
cacattgcgaaaggttggtctcaaa

SEQ ID NO: 4003909 - DNA, 25 bp, Homo sapien
atctggccgcgctcgttggctcacg

SEQ ID NO: 4003910 - DNA, 25 bp, Homo sapien
gaagaaggactagcatatgcaaagg

SEQ ID NO: 4003911 - DNA, 25 bp, Homo sapien
ttaattgtggaagcgatatttgggc

SEQ ID NO: 4003912 - DNA, 25 bp, Homo sapien
acatatttttggttgatctcctggg

SEQ ID NO: 4003913 - DNA, 25 bp, Homo sapien
cagaaagaacactaacatgaggaac

SEQ ID NO: 4003914 - DNA, 25 bp, Homo sapien
tctgcctcctacgttgaagcaagtc

SEQ ID NO: 4003915 - DNA, 25 bp, Homo sapien
caccgtgcccgacattcatatcata

SEQ ID NO: 4003916 - DNA, 25 bp, Homo sapien
tcctacgttgaagcaagtctcccac

SEQ ID NO: 4003917 - DNA, 25 bp, Homo sapien
cgtgcccgacattcatatcatatat

SEQ ID NO: 4003918 - DNA, 25 bp, Homo sapien
ggcaggcacctatgtaactccagct

SEQ ID NO: 4003919 - DNA, 25 bp, Homo sapien
gcggcaggcacctatgtaactccag

SEQ ID NO: 4003920 - DNA, 25 bp, Homo sapien
ggcggcaggcacctatgtaactcca

SEQ ID NO: 4003921 - DNA, 25 bp, Homo sapien
caggcacctatgtaactccagctac

SEQ ID NO: 4003922 - DNA, 25 bp, Homo sapien
gttgagaaaaggaatcaagcaaatt

SEQ ID NO: 4003923 - DNA, 25 bp, Homo sapien
aaatacgttgagaaaaggaatcaag

SEQ ID NO: 4003924 - DNA, 25 bp, Homo sapien
ttgagaaaaggaatcaagcaaatta

SEQ ID NO: 4003925 - DNA, 25 bp, Homo sapien
tacgttgagaaaaggaatcaagcaa

SEQ ID NO: 4003926 - DNA, 25 bp, Homo sapien
gagccactgaactcaaagtacccga

SEQ ID NO: 4003927 - DNA, 25 bp, Homo sapien
gaactcaaagtacccgagtactcca

SEQ ID NO: 4003928 - DNA, 25 bp, Homo sapien
taatgctgaggtgaagaaggtcaaa

SEQ ID NO: 4003929 - DNA, 25 bp, Homo sapien
ttctttaatgaatgtaatgctgagg

SEQ ID NO: 4003930 - DNA, 25 bp, Homo sapien
tgagatgggatgtagagaagtggtt

SEQ ID NO: 4003931 - DNA, 25 bp, Homo sapien
tctcaatgtaaacagcactcatggg

SEQ ID NO: 4003932 - DNA, 25 bp, Homo sapien
gggcctttgtattcgattggtccaa

SEQ ID NO: 4003933 - DNA, 25 bp, Homo sapien
aatctagtaattctgattgagatgg

SEQ ID NO: 4003934 - DNA, 25 bp, Homo sapien
tttctatagtgaatatctaatactt

SEQ ID NO: 4003935 - DNA, 25 bp, Homo sapien
ctggaatgagagacgctatttaaaa

SEQ ID NO: 4003936 - DNA, 25 bp, Homo sapien
tgagagacgctatttaaaaagttct

SEQ ID NO: 4003937 - DNA, 25 bp, Homo sapien
taaactggaatgagagacgctattt

SEQ ID NO: 4003938 - DNA, 25 bp, Homo sapien
caacagttaattgccacaaacaaca

SEQ ID NO: 4003939 - DNA, 25 bp, Homo sapien
ccctggttccaccaacagttaattg

SEQ ID NO: 4003940 - DNA, 25 bp, Homo sapien
ctccgatgatacagatatattacag

SEQ ID NO: 4003941 - DNA, 25 bp, Homo sapien
ccgatgatacagatatattacagga

SEQ ID NO: 4003942 - DNA, 25 bp, Homo sapien
tcaaggactggagacctcaaggaga

SEQ ID NO: 4003943 - DNA, 25 bp, Homo sapien
tctgccctggcagcgatggactgtc

SEQ ID NO: 4003944 - DNA, 25 bp, Homo sapien
gatctgaaagccgacttgctgcttg

SEQ ID NO: 4003945 - DNA, 25 bp, Homo sapien
gaacgtactctgcataatccagctg

SEQ ID NO: 4003946 - DNA, 25 bp, Homo sapien
acttccttgcaaagaccattcgagg

SEQ ID NO: 4003947 - DNA, 25 bp, Homo sapien
tgcagcatgccataattgcacctgt

SEQ ID NO: 4003948 - DNA, 25 bp, Homo sapien
cattcgaggcagctttgaaattaca

SEQ ID NO: 4003949 - DNA, 25 bp, Homo sapien
tgaagagacacaggtaagtaaagat

SEQ ID NO: 4003950 - DNA, 25 bp, Homo sapien
gaacttgagggcgaggagcagcgcg

SEQ ID NO: 4003951 - DNA, 25 bp, Homo sapien
ttgagggcgaggagcagcgcgcagc

SEQ ID NO: 4003952 - DNA, 25 bp, Homo sapien
acttgagggcgaggagcagcgcgca

SEQ ID NO: 4003953 - DNA, 25 bp, Homo sapien
caggtgaacttgagggcgaggagca

SEQ ID NO: 4003954 - DNA, 25 bp, Homo sapien
tccggccgctggcgcgccatgagga

SEQ ID NO: 4003955 - DNA, 25 bp, Homo sapien
cgctggcgcgccatgaggaaggcgc

SEQ ID NO: 4003956 - DNA, 25 bp, Homo sapien
acgcagcccgcgacggagccggccc

SEQ ID NO: 4003957 - DNA, 25 bp, Homo sapien
aaggcgccacgcagcccgcgacgga

SEQ ID NO: 4003958 - DNA, 25 bp, Homo sapien
gggtcgggctcgagctgaggcagtc

SEQ ID NO: 4003959 - DNA, 25 bp, Homo sapien
cagggtcgggctcgagctgaggcag

SEQ ID NO: 4003960 - DNA, 25 bp, Homo sapien
tgaggcagtctgagcccgcggggcc

SEQ ID NO: 4003961 - DNA, 25 bp, Homo sapien
gccagggtcgggctcgagctgaggc

SEQ ID NO: 4003962 - DNA, 25 bp, Homo sapien
catgctcccagtcgccggctttata

SEQ ID NO: 4003963 - DNA, 25 bp, Homo sapien
ccagtcgccggctttataccgccgc

SEQ ID NO: 4003964 - DNA, 25 bp, Homo sapien
gcagctcgccgcacccgctaacccg

SEQ ID NO: 4003965 - DNA, 25 bp, Homo sapien
gttgctccccaatcccgcagctcgc

SEQ ID NO: 4003966 - DNA, 25 bp, Homo sapien
ttaggagccgtaacgacaataatcg

SEQ ID NO: 4003967 - DNA, 25 bp, Homo sapien
ttgacaccgctgtagtctgctctcg

SEQ ID NO: 4003968 - DNA, 25 bp, Homo sapien
tacttggaaccttgacaccgctgta

SEQ ID NO: 4003969 - DNA, 25 bp, Homo sapien
tctcgccgcgctgggttttaggagc

SEQ ID NO: 4003970 - DNA, 25 bp, Homo sapien
gctgctcaggaggaacgatatacgc

SEQ ID NO: 4003971 - DNA, 25 bp, Homo sapien
cgatatacgccaatacaagcaggaa

SEQ ID NO: 4003972 - DNA, 25 bp, Homo sapien
catctgatgccagtggttccgtgag

SEQ ID NO: 4003973 - DNA, 25 bp, Homo sapien
tctgttcaacagatggcaaccgggt

SEQ ID NO: 4003974 - DNA, 25 bp, Homo sapien
catttgggccaattaagtgatcttt

SEQ ID NO: 4003975 - DNA, 25 bp, Homo sapien
ccattcatgaagttcggcatttcca

SEQ ID NO: 4003976 - DNA, 25 bp, Homo sapien
agtgatcttttcgtgctttgttgag

SEQ ID NO: 4003977 - DNA, 25 bp, Homo sapien
tttgttgagcttcatctttagggca

SEQ ID NO: 4003978 - DNA, 25 bp, Homo sapien
gaatctcaagcctagaatggtaaat

SEQ ID NO: 4003979 - DNA, 25 bp, Homo sapien
ttttagttaggaatctcaagcctag

SEQ ID NO: 4003980 - DNA, 25 bp, Homo sapien
gctttatgatttgcatacaactttt

SEQ ID NO: 4003981 - DNA, 25 bp, Homo sapien
gtttctaaaaatcgtgtcatgattc

SEQ ID NO: 4003982 - DNA, 25 bp, Homo sapien
accatgcccggctgcgttgaaaaat

SEQ ID NO: 4003983 - DNA, 25 bp, Homo sapien
ctgaagtgcagtaacgcaacctcgg

SEQ ID NO: 4003984 - DNA, 25 bp, Homo sapien
ccatgcccggctgcgttgaaaaatt

SEQ ID NO: 4003985 - DNA, 25 bp, Homo sapien
tgcccggctgcgttgaaaaattttc

SEQ ID NO: 4003986 - DNA, 25 bp, Homo sapien
ctgaaatagcctgttgggaagcggt

SEQ ID NO: 4003987 - DNA, 25 bp, Homo sapien
ggtgctgccagcagtactggtcgtc

SEQ ID NO: 4003988 - DNA, 25 bp, Homo sapien
ggtgtggaaaaccttctctttgtgc

SEQ ID NO: 4003989 - DNA, 25 bp, Homo sapien
ctcactgttgcagtttttcccacac

SEQ ID NO: 4003990 - DNA, 25 bp, Homo sapien
gcaggtacaaacaaggattcaggga

SEQ ID NO: 4003991 - DNA, 25 bp, Homo sapien
gccaggcaagacataaaactcaggt

SEQ ID NO: 4003992 - DNA, 25 bp, Homo sapien
gagatccagactcaattccagggag

SEQ ID NO: 4003993 - DNA, 25 bp, Homo sapien
tagggacaaggaaaggaccacagca

SEQ ID NO: 4003994 - DNA, 25 bp, Homo sapien
tttttgactcttgagccatagttcg

SEQ ID NO: 4003995 - DNA, 25 bp, Homo sapien
gccatagttcgtaaaattgctccat

SEQ ID NO: 4003996 - DNA, 25 bp, Homo sapien
cagcataatctgttggcatgtgaat

SEQ ID NO: 4003997 - DNA, 25 bp, Homo sapien
cttcagcataatctgttggcatgtg

SEQ ID NO: 4003998 - DNA, 25 bp, Homo sapien
gagctgatacactcctcactgctta

SEQ ID NO: 4003999 - DNA, 25 bp, Homo sapien
cctcaggactatgagcaaaggaaca

SEQ ID NO: 4004000 - DNA, 25 bp, Homo sapien
tttcctcaggactatgagcaaagga

SEQ ID NO: 4004001 - DNA, 25 bp, Homo sapien
ttccaacatattgacattttttccc

SEQ ID NO: 4004002 - DNA, 25 bp, Homo sapien
tctttcctcaggactatgagcaaag

SEQ ID NO: 4004003 - DNA, 25 bp, Homo sapien
agtactggaaactaacctcggccat

SEQ ID NO: 4004004 - DNA, 25 bp, Homo sapien
tgatcgtgatcagcagaacgcagac

SEQ ID NO: 4004005 - DNA, 25 bp, Homo sapien
gaaactgcaggctactccaaagggt

SEQ ID NO: 4004006 - DNA, 25 bp, Homo sapien
tcttagtttgtgcttcaacggcagc

SEQ ID NO: 4004007 - DNA, 25 bp, Homo sapien
caatgtcagtgaccccacccttaaa

SEQ ID NO: 4004008 - DNA, 25 bp, Homo sapien
tagcatctgtcacgtttttcagagt

SEQ ID NO: 4004009 - DNA, 25 bp, Homo sapien
ttttggctaaaactcgctcagcccc

SEQ ID NO: 4004010 - DNA, 25 bp, Homo sapien
tcctcccttggaccaatgtcagtga

SEQ ID NO: 4004011 - DNA, 25 bp, Homo sapien
ctgcataaagtcagtactggataaa

SEQ ID NO: 4004012 - DNA, 25 bp, Homo sapien
aattattcccaattacaggtgagca

SEQ ID NO: 4004013 - DNA, 25 bp, Homo sapien
gcactgtgccaggtgtttacataac

SEQ ID NO: 4004014 - DNA, 25 bp, Homo sapien
gggcccttctggcagactttgaagc

SEQ ID NO: 4004015 - DNA, 25 bp, Homo sapien
agaggacggatgttcatccacttct

SEQ ID NO: 4004016 - DNA, 25 bp, Homo sapien
ggagaggacggatgttcatccactt

SEQ ID NO: 4004017 - DNA, 25 bp, Homo sapien
gagaggacggatgttcatccacttc

SEQ ID NO: 4004018 - DNA, 25 bp, Homo sapien
tcaatagacatcactctcatcgcac

SEQ ID NO: 4004019 - DNA, 25 bp, Homo sapien
aatagacatcactctcatcgcacgc

SEQ ID NO: 4004020 - DNA, 25 bp, Homo sapien
gttcaatagacatcactctcatcgc

SEQ ID NO: 4004021 - DNA, 25 bp, Homo sapien
actctcatcgcacgccggtctttgg

SEQ ID NO: 4004022 - DNA, 25 bp, Homo sapien
gagaggcacaaagtttgtacctgag

SEQ ID NO: 4004023 - DNA, 25 bp, Homo sapien
gacacacgagcaaaagacataacac

SEQ ID NO: 4004024 - DNA, 25 bp, Homo sapien
caaagacacacgagcaaaagacata

SEQ ID NO: 4004025 - DNA, 25 bp, Homo sapien
cacaaagtttgtacctgaggaacca

SEQ ID NO: 4004026 - DNA, 25 bp, Homo sapien
atccaggcattatttgattaccaag

SEQ ID NO: 4004027 - DNA, 25 bp, Homo sapien
tgacttgaccgtttctcagacactg

SEQ ID NO: 4004028 - DNA, 25 bp, Homo sapien
ttaagaaatccaggcattatttgat

SEQ ID NO: 4004029 - DNA, 25 bp, Homo sapien
gacactgggcgcacacaaactttat

SEQ ID NO: 4004030 - DNA, 25 bp, Homo sapien
aagtgttaactgcatccaccaacaa

SEQ ID NO: 4004031 - DNA, 25 bp, Homo sapien
gaaaaacgagacatgccaggtggaa

SEQ ID NO: 4004032 - DNA, 25 bp, Homo sapien
catctattacgcaattccagaaagg

SEQ ID NO: 4004033 - DNA, 25 bp, Homo sapien
tacactcttggcaagcattgtgggc

SEQ ID NO: 4004034 - DNA, 25 bp, Homo sapien
ccaaattctgccaatatcgtttaga

SEQ ID NO: 4004035 - DNA, 25 bp, Homo sapien
atcgtttagactcttgagcaatagc

SEQ ID NO: 4004036 - DNA, 25 bp, Homo sapien
ctgcgctccaggtacatttgcttcc

SEQ ID NO: 4004037 - DNA, 25 bp, Homo sapien
gcgctccaggtacatttgcttccaa

SEQ ID NO: 4004038 - DNA, 25 bp, Homo sapien
agcgtagtgttgtgatcctggccca

SEQ ID NO: 4004039 - DNA, 25 bp, Homo sapien
tcagcaaggatgaataccacgtttc

SEQ ID NO: 4004040 - DNA, 25 bp, Homo sapien
tcaggacaaaatcaatagcgtcacc

SEQ ID NO: 4004041 - DNA, 25 bp, Homo sapien
tcagacgtggagaaccttcagcttc

SEQ ID NO: 4004042 - DNA, 25 bp, Homo sapien
tcatgtcgacataaatcaagctgac

SEQ ID NO: 4004043 - DNA, 25 bp, Homo sapien
taaacagccataccgaacttcatgt

SEQ ID NO: 4004044 - DNA, 25 bp, Homo sapien
caagactatgggcataaaagcactc

SEQ ID NO: 4004045 - DNA, 25 bp, Homo sapien
tatccagactttcagttccacaaga

SEQ ID NO: 4004046 - DNA, 25 bp, Homo sapien
tgtctctcgcaaaatgtggacaagg

SEQ ID NO: 4004047 - DNA, 25 bp, Homo sapien
gagtattttactgttgtctctcgca

SEQ ID NO: 4004048 - DNA, 25 bp, Homo sapien
tgaccatgaaaagaacgtattttgg

SEQ ID NO: 4004049 - DNA, 25 bp, Homo sapien
catgaaaagaacgtattttggagta

SEQ ID NO: 4004050 - DNA, 25 bp, Homo sapien
tctagaaaaagaatctattttgtca

SEQ ID NO: 4004051 - DNA, 25 bp, Homo sapien
attttgtcattacagaaattagaaa

SEQ ID NO: 4004052 - DNA, 25 bp, Homo sapien
gtttttattcagatctagaaaaaga

SEQ ID NO: 4004053 - DNA, 25 bp, Homo sapien
tttgtcattacagaaattagaaact

SEQ ID NO: 4004054 - DNA, 25 bp, Homo sapien
ctcatgctttgtaaccgggtgagaa

SEQ ID NO: 4004055 - DNA, 25 bp, Homo sapien
gaacaagcagtagaattatctttat

SEQ ID NO: 4004056 - DNA, 25 bp, Homo sapien
ctttgtaaccgggtgagaacaagca

SEQ ID NO: 4004057 - DNA, 25 bp, Homo sapien
gagaacaagcagtagaattatcttt

SEQ ID NO: 4004058 - DNA, 25 bp, Homo sapien
cagtaaggttaatctttccattgcc

SEQ ID NO: 4004059 - DNA, 25 bp, Homo sapien
aagcctcccggctgaatgctccttt

SEQ ID NO: 4004060 - DNA, 25 bp, Homo sapien
attgccgccaaagaaagcctcccgg

SEQ ID NO: 4004061 - DNA, 25 bp, Homo sapien
tggcaataagcaaacgtgcagtggc

SEQ ID NO: 4004062 - DNA, 25 bp, Homo sapien
gcatggtaagtgaaatccattaact

SEQ ID NO: 4004063 - DNA, 25 bp, Homo sapien
acatatataatatggtccttcataa

SEQ ID NO: 4004064 - DNA, 25 bp, Homo sapien
cattctttatcctaccgattaaaat

SEQ ID NO: 4004065 - DNA, 25 bp, Homo sapien
cacttatgatctatgttagcatggt

SEQ ID NO: 4004066 - DNA, 25 bp, Homo sapien
aacagatctggcaagcttgtctcaa

SEQ ID NO: 4004067 - DNA, 25 bp, Homo sapien
ctcaattcatgggttccttcgaggg

SEQ ID NO: 4004068 - DNA, 25 bp, Homo sapien
ggcaagcttgtctcaattcatgggt

SEQ ID NO: 4004069 - DNA, 25 bp, Homo sapien
cttcgaggggatgtcttggagtcac

SEQ ID NO: 4004070 - DNA, 25 bp, Homo sapien
acagccaacaaatattgcattatca

SEQ ID NO: 4004071 - DNA, 25 bp, Homo sapien
aaaaaaacagccaacaaatattgca

SEQ ID NO: 4004072 - DNA, 25 bp, Homo sapien
aaacagccaacaaatattgcattat

SEQ ID NO: 4004073 - DNA, 25 bp, Homo sapien
agccaacaaatattgcattatcact

SEQ ID NO: 4004074 - DNA, 25 bp, Homo sapien
tgttaagcggtgttccctctctaga

SEQ ID NO: 4004075 - DNA, 25 bp, Homo sapien
tactgttgttaagcggtgttccctc

SEQ ID NO: 4004076 - DNA, 25 bp, Homo sapien
tgttgttaagcggtgttccctctct

SEQ ID NO: 4004077 - DNA, 25 bp, Homo sapien
ttaagcggtgttccctctctagaag

SEQ ID NO: 4004078 - DNA, 25 bp, Homo sapien
gagggtggaggagcatacctcgcac

SEQ ID NO: 4004079 - DNA, 25 bp, Homo sapien
aatcttctaaggatgaagtcaaagg

SEQ ID NO: 4004080 - DNA, 25 bp, Homo sapien
ctcgtttggattcactcattgaaaa

SEQ ID NO: 4004081 - DNA, 25 bp, Homo sapien
ataaaattctgagaaggagggtgga

SEQ ID NO: 4004082 - DNA, 25 bp, Homo sapien
taaggttcctaacagcgatgccgaa

SEQ ID NO: 4004083 - DNA, 25 bp, Homo sapien
gggcatgctaggagagacactggct

SEQ ID NO: 4004084 - DNA, 25 bp, Homo sapien
caatgggtaaggttcctaacagcga

SEQ ID NO: 4004085 - DNA, 25 bp, Homo sapien
gttcctaacagcgatgccgaaaagg

SEQ ID NO: 4004086 - DNA, 25 bp, Homo sapien
caacaggaactgcttcttgccttgg

SEQ ID NO: 4004087 - DNA, 25 bp, Homo sapien
actgggtgccggtaaagagacaaca

SEQ ID NO: 4004088 - DNA, 25 bp, Homo sapien
tcaagcaggtcatctagttcatctc

SEQ ID NO: 4004089 - DNA, 25 bp, Homo sapien
gcttctggcatagtgaagggcatct

SEQ ID NO: 4004090 - DNA, 25 bp, Homo sapien
tggctcaatatcttccacagaatgg

SEQ ID NO: 4004091 - DNA, 25 bp, Homo sapien
ctggctcaatatcttccacagaatg

SEQ ID NO: 4004092 - DNA, 25 bp, Homo sapien
ggctcaatatcttccacagaatggt

SEQ ID NO: 4004093 - DNA, 25 bp, Homo sapien
atccccaggaactgattttaatgag

SEQ ID NO: 4004094 - DNA, 25 bp, Homo sapien
ccccaggaactgattttaatgagag

SEQ ID NO: 4004095 - DNA, 25 bp, Homo sapien
tccccaggaactgattttaatgaga

SEQ ID NO: 4004096 - DNA, 25 bp, Homo sapien
tcccaatttctgagctagttcttga

SEQ ID NO: 4004097 - DNA, 25 bp, Homo sapien
cagctctgacatacgcttttcttat

SEQ ID NO: 4004098 - DNA, 25 bp, Homo sapien
tctgacatacgcttttcttatttta

SEQ ID NO: 4004099 - DNA, 25 bp, Homo sapien
tctgagctagttcttgagttagttt

SEQ ID NO: 4004100 - DNA, 25 bp, Homo sapien
tacagagctttgcagttactggcat

SEQ ID NO: 4004101 - DNA, 25 bp, Homo sapien
taaagccttagatttccgatacaga

SEQ ID NO: 4004102 - DNA, 25 bp, Homo sapien
tgctacagcatcgtaagcctttttg

SEQ ID NO: 4004103 - DNA, 25 bp, Homo sapien
catttaaactgaggactatattgca

SEQ ID NO: 4004104 - DNA, 25 bp, Homo sapien
aaaagatttctcacgagagcacgca

SEQ ID NO: 4004105 - DNA, 25 bp, Homo sapien
tccaatcatgttcccgataaacgtc

SEQ ID NO: 4004106 - DNA, 25 bp, Homo sapien
tattcaaggcttccgtgtactggct

SEQ ID NO: 4004107 - DNA, 25 bp, Homo sapien
tgtactggcttatcgagttgttcca

SEQ ID NO: 4004108 - DNA, 25 bp, Homo sapien
cttcattatttctatcacgctttag

SEQ ID NO: 4004109 - DNA, 25 bp, Homo sapien
taccagtgaagttgaactattccac

SEQ ID NO: 4004110 - DNA, 25 bp, Homo sapien
tcttatcaagtaagtatacacattc

SEQ ID NO: 4004111 - DNA, 25 bp, Homo sapien
ttgctcaggtcatttactgatttgg

SEQ ID NO: 4004112 - DNA, 25 bp, Homo sapien
tgtgttcctggatatgacagcggtg

SEQ ID NO: 4004113 - DNA, 25 bp, Homo sapien
tcctgtgttcctggatatgacagcg

SEQ ID NO: 4004114 - DNA, 25 bp, Homo sapien
cctgtgttcctggatatgacagcgg

SEQ ID NO: 4004115 - DNA, 25 bp, Homo sapien
tgttcctggatatgacagcggtgac

SEQ ID NO: 4004116 - DNA, 25 bp, Homo sapien
cttctctcctcggacacattggaca

SEQ ID NO: 4004117 - DNA, 25 bp, Homo sapien
ttctctcctcggacacattggacat

SEQ ID NO: 4004118 - DNA, 25 bp, Homo sapien
ttttcttctctcctcggacacattg

SEQ ID NO: 4004119 - DNA, 25 bp, Homo sapien
caaaaaagcacataaggtaccaggg

SEQ ID NO: 4004120 - DNA, 25 bp, Homo sapien
ccagggtcctggacggcagggaccg

SEQ ID NO: 4004121 - DNA, 25 bp, Homo sapien
gcagggaccgtacaggagtcatctt

SEQ ID NO: 4004122 - DNA, 25 bp, Homo sapien
cagaccttgtcacacaatcagctgt

SEQ ID NO: 4004123 - DNA, 25 bp, Homo sapien
gttttgacaaactcatgtgacccag

SEQ ID NO: 4004124 - DNA, 25 bp, Homo sapien
gacccagagccctatcaggatatag

SEQ ID NO: 4004125 - DNA, 25 bp, Homo sapien
gatatagaccattaactgtcactct

SEQ ID NO: 4004126 - DNA, 25 bp, Homo sapien
aagtcagctgcagatacctaaacat

SEQ ID NO: 4004127 - DNA, 25 bp, Homo sapien
gagccctgaggacccactcttgaga

SEQ ID NO: 4004128 - DNA, 25 bp, Homo sapien
cctgaggacccactcttgagatctc

SEQ ID NO: 4004129 - DNA, 25 bp, Homo sapien
actcttgagatctccccgagccata

SEQ ID NO: 4004130 - DNA, 25 bp, Homo sapien
atctccccgagccatactctcccat

SEQ ID NO: 4004131 - DNA, 25 bp, Homo sapien
ttctttgagagcttaagggaaggag

SEQ ID NO: 4004132 - DNA, 25 bp, Homo sapien
cagtttggctcagtatgagaaggaa

SEQ ID NO: 4004133 - DNA, 25 bp, Homo sapien
aattcagttcaacagtttggctcag

SEQ ID NO: 4004134 - DNA, 25 bp, Homo sapien
cattgtgcaattcagttcaacagtt

SEQ ID NO: 4004135 - DNA, 25 bp, Homo sapien
acattttgccgagggaatggcaggc

SEQ ID NO: 4004136 - DNA, 25 bp, Homo sapien
aggcagaagtgggtcacgttattct

SEQ ID NO: 4004137 - DNA, 25 bp, Homo sapien
agacattttgccgagggaatggcag

SEQ ID NO: 4004138 - DNA, 25 bp, Homo sapien
aagtgggtcacgttattctcggtgg

SEQ ID NO: 4004139 - DNA, 25 bp, Homo sapien
tcgcagctctccctcggttagcggc

SEQ ID NO: 4004140 - DNA, 25 bp, Homo sapien
gggacgacgcgccggccggcggcag

SEQ ID NO: 4004141 - DNA, 25 bp, Homo sapien
cggcggcagaaggcaggcggaggcg

SEQ ID NO: 4004142 - DNA, 25 bp, Homo sapien
ggcggcggggcctgggtgctcgctc

SEQ ID NO: 4004143 - DNA, 25 bp, Homo sapien
ctgtattaggagtcagtataatagg

SEQ ID NO: 4004144 - DNA, 25 bp, Homo sapien
ttaggagtcagtataataggattat

SEQ ID NO: 4004145 - DNA, 25 bp, Homo sapien
aataggattatttccggttgccttg

SEQ ID NO: 4004146 - DNA, 25 bp, Homo sapien
tcagtataataggattatttccggt

SEQ ID NO: 4004147 - DNA, 25 bp, Homo sapien
tcacagtcgataaccctaagcaggt

SEQ ID NO: 4004148 - DNA, 25 bp, Homo sapien
tcgactgtaaccgtacacagggctg

SEQ ID NO: 4004149 - DNA, 25 bp, Homo sapien
tcaatgtacaactacagcgaggtgc

SEQ ID NO: 4004150 - DNA, 25 bp, Homo sapien
agcaagacaagcatcggaactcccg

SEQ ID NO: 4004151 - DNA, 25 bp, Homo sapien
gggaagaaaaagtctatgaaagctc

SEQ ID NO: 4004152 - DNA, 25 bp, Homo sapien
ttgcatctactatgcattctttttc

SEQ ID NO: 4004153 - DNA, 25 bp, Homo sapien
ccagccagagtgacaggacaagacc

SEQ ID NO: 4004154 - DNA, 25 bp, Homo sapien
attccagccagagtgacaggacaag

SEQ ID NO: 4004155 - DNA, 25 bp, Homo sapien
tgagctatgattacgccattgtatt

SEQ ID NO: 4004156 - DNA, 25 bp, Homo sapien
ctatgattacgccattgtattccag

SEQ ID NO: 4004157 - DNA, 25 bp, Homo sapien
gatagtgattgccaaacgctccccg

SEQ ID NO: 4004158 - DNA, 25 bp, Homo sapien
gtggcattttatcaacacatcacag

SEQ ID NO: 4004159 - DNA, 25 bp, Homo sapien
cataactcaagtcccggttgggctt

SEQ ID NO: 4004160 - DNA, 25 bp, Homo sapien
catcaattgtggattgcagaactcc

SEQ ID NO: 4004161 - DNA, 25 bp, Homo sapien
tacagcaggcaactttttagtcaaa

SEQ ID NO: 4004162 - DNA, 25 bp, Homo sapien
acagcaggcaactttttagtcaaaa

SEQ ID NO: 4004163 - DNA, 25 bp, Homo sapien
ccgtccttagataaaaagatgagca

SEQ ID NO: 4004164 - DNA, 25 bp, Homo sapien
tacctcagttctataaacgttgaag

SEQ ID NO: 4004165 - DNA, 25 bp, Homo sapien
aagatgagcaacaagctgctgtgtt

SEQ ID NO: 4004166 - DNA, 25 bp, Homo sapien
aaataacacggattctcacaagcag

SEQ ID NO: 4004167 - DNA, 25 bp, Homo sapien
atgcatatagcagttcacttgaatg

SEQ ID NO: 4004168 - DNA, 25 bp, Homo sapien
tatagcagttcacttgaatgtcccc

SEQ ID NO: 4004169 - DNA, 25 bp, Homo sapien
tcacttgaatgtccccacataaaaa

SEQ ID NO: 4004170 - DNA, 25 bp, Homo sapien
gcagttcacttgaatgtccccacat

SEQ ID NO: 4004171 - DNA, 25 bp, Homo sapien
cctggttggctttcagttgaccatt

SEQ ID NO: 4004172 - DNA, 25 bp, Homo sapien
tcggtaacgatgttactgtgaggca

SEQ ID NO: 4004173 - DNA, 25 bp, Homo sapien
gacttctagccactgtatccttctt

SEQ ID NO: 4004174 - DNA, 25 bp, Homo sapien
gcaggacgacaggacgacttctagc

SEQ ID NO: 4004175 - DNA, 25 bp, Homo sapien
tattcatggtcttcgatcagttgca

SEQ ID NO: 4004176 - DNA, 25 bp, Homo sapien
tccaaggattgatgaaggtttctcg

SEQ ID NO: 4004177 - DNA, 25 bp, Homo sapien
catggtcttcgatcagttgcactaa

SEQ ID NO: 4004178 - DNA, 25 bp, Homo sapien
ggctcataaagtccaaattgggaat

SEQ ID NO: 4004179 - DNA, 25 bp, Homo sapien
tccagaaacccagtgccaacaatga

SEQ ID NO: 4004180 - DNA, 25 bp, Homo sapien
tggctcctagcactatcagctggct

SEQ ID NO: 4004181 - DNA, 25 bp, Homo sapien
tataccatagtagagatttcgccct

SEQ ID NO: 4004182 - DNA, 25 bp, Homo sapien
tacttggcccacgagaacatcatat

SEQ ID NO: 4004183 - DNA, 25 bp, Homo sapien
tacgcaagacgtaaaaactggccag

SEQ ID NO: 4004184 - DNA, 25 bp, Homo sapien
caaaaacaggattggcatgctgcct

SEQ ID NO: 4004185 - DNA, 25 bp, Homo sapien
gaacagactggcacgattacatatg

SEQ ID NO: 4004186 - DNA, 25 bp, Homo sapien
caacaagactgaactacggagcaaa

SEQ ID NO: 4004187 - DNA, 25 bp, Homo sapien
tctgtgaacttactactacggatgc

SEQ ID NO: 4004188 - DNA, 25 bp, Homo sapien
tgaggaaaagggtcacatcacagac

SEQ ID NO: 4004189 - DNA, 25 bp, Homo sapien
gatgcataccaattcacaaccagtg

SEQ ID NO: 4004190 - DNA, 25 bp, Homo sapien
tatgtccagggtcaagggtctaaaa

SEQ ID NO: 4004191 - DNA, 25 bp, Homo sapien
aaatcttttaagtccaggcctgacg

SEQ ID NO: 4004192 - DNA, 25 bp, Homo sapien
gaaggttacaaaggcggccaggatc

SEQ ID NO: 4004193 - DNA, 25 bp, Homo sapien
accgcccctggactacttatggagg

SEQ ID NO: 4004194 - DNA, 25 bp, Homo sapien
gcagcattgaggtttccttccagtt

SEQ ID NO: 4004195 - DNA, 25 bp, Homo sapien
tgggggtgtgggaagcttttctcac

SEQ ID NO: 4004196 - DNA, 25 bp, Homo sapien
ttgggggtgtgggaagcttttctca

SEQ ID NO: 4004197 - DNA, 25 bp, Homo sapien
ttcttcccacgaggtgtgctgggat

SEQ ID NO: 4004198 - DNA, 25 bp, Homo sapien
cagactctgcagcttttggggtctc

SEQ ID NO: 4004199 - DNA, 25 bp, Homo sapien
tggagtctgtctcgcatcttttttc

SEQ ID NO: 4004200 - DNA, 25 bp, Homo sapien
ctctgggcttttccctggggtctca

SEQ ID NO: 4004201 - DNA, 25 bp, Homo sapien
taccagctgtgggatttcgtcttcg

SEQ ID NO: 4004202 - DNA, 25 bp, Homo sapien
gggtctgttccttctttgattcagg

SEQ ID NO: 4004203 - DNA, 25 bp, Homo sapien
ttcactgtagtatcaccactttcag

SEQ ID NO: 4004204 - DNA, 25 bp, Homo sapien
cttcggattcatttgttgctttaac

SEQ ID NO: 4004205 - DNA, 25 bp, Homo sapien
ctaagaactgatgcagtcttcctag

SEQ ID NO: 4004206 - DNA, 25 bp, Homo sapien
aagaactgatgcagtcttcctagcc

SEQ ID NO: 4004207 - DNA, 25 bp, Homo sapien
taagaactgatgcagtcttcctagc

SEQ ID NO: 4004208 - DNA, 25 bp, Homo sapien
gatgtaccacgtgcagttttgatta

SEQ ID NO: 4004209 - DNA, 25 bp, Homo sapien
caaccgcagtttttgactcacagcc

SEQ ID NO: 4004210 - DNA, 25 bp, Homo sapien
cagttctgttggttaacaaacggca

SEQ ID NO: 4004211 - DNA, 25 bp, Homo sapien
taaatggacctcgatctatacagag

SEQ ID NO: 4004212 - DNA, 25 bp, Homo sapien
cctacaaccgtggatgggaataact

SEQ ID NO: 4004213 - DNA, 25 bp, Homo sapien
gaaacagggcgaccatgtgtgtaca

SEQ ID NO: 4004214 - DNA, 25 bp, Homo sapien
ggattaaactccagccacctacaac

SEQ ID NO: 4004215 - DNA, 25 bp, Homo sapien
tatggtgatgtttctatgaccggaa

SEQ ID NO: 4004216 - DNA, 25 bp, Homo sapien
tctcctagtgactgaatttacaccc

SEQ ID NO: 4004217 - DNA, 25 bp, Homo sapien
aaaagtcgggcagcgatgatggtct

SEQ ID NO: 4004218 - DNA, 25 bp, Homo sapien
gatggtctacttctctcctagtgac

SEQ ID NO: 4004219 - DNA, 25 bp, Homo sapien
tagtgactgaatttacacccttcat

SEQ ID NO: 4004220 - DNA, 25 bp, Homo sapien
ttcttcttattaagcaaagatcttt

SEQ ID NO: 4004221 - DNA, 25 bp, Homo sapien
tcttcttattaagcaaagatctttt

SEQ ID NO: 4004222 - DNA, 25 bp, Homo sapien
aaagatgggaagtgcagccgatttc

SEQ ID NO: 4004223 - DNA, 25 bp, Homo sapien
atgggaagtgcagccgatttctcag

SEQ ID NO: 4004224 - DNA, 25 bp, Homo sapien
aggaaaagatgggaagtgcagccga

SEQ ID NO: 4004225 - DNA, 25 bp, Homo sapien
gaaaagatgggaagtgcagccgatt

SEQ ID NO: 4004226 - DNA, 25 bp, Homo sapien
tttcaatgatgtgctcaatttgcat

SEQ ID NO: 4004227 - DNA, 25 bp, Homo sapien
gttttcaatgatgtgctcaatttgc

SEQ ID NO: 4004228 - DNA, 25 bp, Homo sapien
ttttcaatgatgtgctcaatttgca

SEQ ID NO: 4004229 - DNA, 25 bp, Homo sapien
tccaacgtgaccaatacgtatagca

SEQ ID NO: 4004230 - DNA, 25 bp, Homo sapien
tacagtcattgatctctcttgataa

SEQ ID NO: 4004231 - DNA, 25 bp, Homo sapien
gacagaaggtttacagatactggaa

SEQ ID NO: 4004232 - DNA, 25 bp, Homo sapien
aattcttggacagaaggtttacaga

SEQ ID NO: 4004233 - DNA, 25 bp, Homo sapien
tagaaatgtttaagactgttccacc

SEQ ID NO: 4004234 - DNA, 25 bp, Homo sapien
taagagccgcctaattctggcatca

SEQ ID NO: 4004235 - DNA, 25 bp, Homo sapien
aaatgtctcccaatgagtgagggta

SEQ ID NO: 4004236 - DNA, 25 bp, Homo sapien
taggatttatattccttctttagag

SEQ ID NO: 4004237 - DNA, 25 bp, Homo sapien
cggagcttggcttcataggatttat

SEQ ID NO: 4004238 - DNA, 25 bp, Homo sapien
gaatctgatcgaatactatgaggca

SEQ ID NO: 4004239 - DNA, 25 bp, Homo sapien
tgatcgaatactatgaggcaaggtc

SEQ ID NO: 4004240 - DNA, 25 bp, Homo sapien
cttctgaatctgatcgaatactatg

SEQ ID NO: 4004241 - DNA, 25 bp, Homo sapien
tatcttctgaatctgatcgaatact

SEQ ID NO: 4004242 - DNA, 25 bp, Homo sapien
cacagatctcactattgtactccag

SEQ ID NO: 4004243 - DNA, 25 bp, Homo sapien
tgcagtgaacacagatctcactatt

SEQ ID NO: 4004244 - DNA, 25 bp, Homo sapien
cagctgggcaacagcgcaagatctc

SEQ ID NO: 4004245 - DNA, 25 bp, Homo sapien
atcacttgagtcaggtcagggaggt

SEQ ID NO: 4004246 - DNA, 25 bp, Homo sapien
agagagcgtccactgcctttctaac

SEQ ID NO: 4004247 - DNA, 25 bp, Homo sapien
acttgcaatgcgtcaagagagcgtc

SEQ ID NO: 4004248 - DNA, 25 bp, Homo sapien
tggacttgcaatgcgtcaagagagc

SEQ ID NO: 4004249 - DNA, 25 bp, Homo sapien
caagagagcgtccactgcctttcta

SEQ ID NO: 4004250 - DNA, 25 bp, Homo sapien
ccgctggagtcgaggtggaggttcc

SEQ ID NO: 4004251 - DNA, 25 bp, Homo sapien
tggaggttccagtagcggctgcaga

SEQ ID NO: 4004252 - DNA, 25 bp, Homo sapien
gctgcagaagacagcgaggccgagg

SEQ ID NO: 4004253 - DNA, 25 bp, Homo sapien
ctgcttccgtgctgtcggggccgct

SEQ ID NO: 4004254 - DNA, 25 bp, Homo sapien
ggcgcgtgtgcaaccccactgctgg

SEQ ID NO: 4004255 - DNA, 25 bp, Homo sapien
ctcgtgaagaggcgcgtgtgcaacc

SEQ ID NO: 4004256 - DNA, 25 bp, Homo sapien
cgggaaccgagcctctgtgcgtcat

SEQ ID NO: 4004257 - DNA, 25 bp, Homo sapien
ttctggtgcgcacgcgcgagcaagc

SEQ ID NO: 4004258 - DNA, 25 bp, Homo sapien
taaatctagtgtacgtaagtgtaca

SEQ ID NO: 4004259 - DNA, 25 bp, Homo sapien
aatctagtgtacgtaagtgtacagt

SEQ ID NO: 4004260 - DNA, 25 bp, Homo sapien
aaataaatctagtgtacgtaagtgt

SEQ ID NO: 4004261 - DNA, 25 bp, Homo sapien
tctagtgtacgtaagtgtacagtgt

SEQ ID NO: 4004262 - DNA, 25 bp, Homo sapien
gcccagggggttgacgctacattga

SEQ ID NO: 4004263 - DNA, 25 bp, Homo sapien
ggcatatgcctgtgtcccaaatact

SEQ ID NO: 4004264 - DNA, 25 bp, Homo sapien
aagtctagacgaataatagagttgt

SEQ ID NO: 4004265 - DNA, 25 bp, Homo sapien
cccaaatactcgtgatgctgaaatg

SEQ ID NO: 4004266 - DNA, 25 bp, Homo sapien
tcatcaatcagggatctataaaagg

SEQ ID NO: 4004267 - DNA, 25 bp, Homo sapien
cagggatctataaaaggacttagag

SEQ ID NO: 4004268 - DNA, 25 bp, Homo sapien
gctacgtcatcaatcagggatctat

SEQ ID NO: 4004269 - DNA, 25 bp, Homo sapien
ttatgctacgtcatcaatcagggat

SEQ ID NO: 4004270 - DNA, 25 bp, Homo sapien
tacaacacaggtaattacaaacgac

SEQ ID NO: 4004271 - DNA, 25 bp, Homo sapien
tgtgaatcccttatgtgacagagct

SEQ ID NO: 4004272 - DNA, 25 bp, Homo sapien
caagcagatgacgtttgtgaatccc

SEQ ID NO: 4004273 - DNA, 25 bp, Homo sapien
gatggttccagtacctgatacaaaa

SEQ ID NO: 4004274 - DNA, 25 bp, Homo sapien
ggaagatgacaacttttattgttat

SEQ ID NO: 4004275 - DNA, 25 bp, Homo sapien
gatgacaacttttattgttattaca

SEQ ID NO: 4004276 - DNA, 25 bp, Homo sapien
aagatgacaacttttattgttatta

SEQ ID NO: 4004277 - DNA, 25 bp, Homo sapien
tgacaacttttattgttattacaaa

SEQ ID NO: 4004278 - DNA, 25 bp, Homo sapien
tccatgccagtaagaaaaggtgcta

SEQ ID NO: 4004279 - DNA, 25 bp, Homo sapien
tcacctgaagagtgcaagcgctcca

SEQ ID NO: 4004280 - DNA, 25 bp, Homo sapien
taattgcaagagcagactaagggct

SEQ ID NO: 4004281 - DNA, 25 bp, Homo sapien
tgtgctgtccacaaacctgaggttt

SEQ ID NO: 4004282 - DNA, 25 bp, Homo sapien
ttacttagatgtttatttcaatatt

SEQ ID NO: 4004283 - DNA, 25 bp, Homo sapien
gcaattacttagatgtttatttcaa

SEQ ID NO: 4004284 - DNA, 25 bp, Homo sapien
aattacttagatgtttatttcaata

SEQ ID NO: 4004285 - DNA, 25 bp, Homo sapien
tggcaattacttagatgtttatttc

SEQ ID NO: 4004286 - DNA, 25 bp, Homo sapien
aggtaataccctaaatatgcagcca

SEQ ID NO: 4004287 - DNA, 25 bp, Homo sapien
gcactgttgaccatataagcacgtt

SEQ ID NO: 4004288 - DNA, 25 bp, Homo sapien
tagagcaacgttagagaacaaatgc

SEQ ID NO: 4004289 - DNA, 25 bp, Homo sapien
aatttgtattgctctataacggtcc

SEQ ID NO: 4004290 - DNA, 25 bp, Homo sapien
cagcctgtgtaagcaggattgaaaa

SEQ ID NO: 4004291 - DNA, 25 bp, Homo sapien
attttcaaagcccatagaacttatg

SEQ ID NO: 4004292 - DNA, 25 bp, Homo sapien
agaacttatgttgctggttaatttt

SEQ ID NO: 4004293 - DNA, 25 bp, Homo sapien
tttacttatccaaatgaacagcctg

SEQ ID NO: 4004294 - DNA, 25 bp, Homo sapien
gctttaaccagcaaggatcatccaa

SEQ ID NO: 4004295 - DNA, 25 bp, Homo sapien
gaagtggcacttgcaactgatacgg

SEQ ID NO: 4004296 - DNA, 25 bp, Homo sapien
gaggtaggcccttcacagttgatat

SEQ ID NO: 4004297 - DNA, 25 bp, Homo sapien
aattaactgggcctcgtggagggct

SEQ ID NO: 4004298 - DNA, 25 bp, Homo sapien
tacttataaaaactacagtatgctg

SEQ ID NO: 4004299 - DNA, 25 bp, Homo sapien
aaaagctaatgcaacaatgttacat

SEQ ID NO: 4004300 - DNA, 25 bp, Homo sapien
gggatttaactgcatgtatgcatta

SEQ ID NO: 4004301 - DNA, 25 bp, Homo sapien
gaatgtctcatttatagtgggtagg

SEQ ID NO: 4004302 - DNA, 25 bp, Homo sapien
gcacactcagaatgatctgcctggg

SEQ ID NO: 4004303 - DNA, 25 bp, Homo sapien
acactcgcacactcagaatgatctg

SEQ ID NO: 4004304 - DNA, 25 bp, Homo sapien
ttgcctttgtaacatgtgcacacac

SEQ ID NO: 4004305 - DNA, 25 bp, Homo sapien
tattaacatggtagttgcctttgta

SEQ ID NO: 4004306 - DNA, 25 bp, Homo sapien
gaaaaattcaacagtggcatagcag

SEQ ID NO: 4004307 - DNA, 25 bp, Homo sapien
agagtttgaagtgagggctagggac

SEQ ID NO: 4004308 - DNA, 25 bp, Homo sapien
agtggcatagcagagctctcaatat

SEQ ID NO: 4004309 - DNA, 25 bp, Homo sapien
gggaaaaattcaacagtggcatagc

SEQ ID NO: 4004310 - DNA, 25 bp, Homo sapien
aggcttctgcagtcaattttcctca

SEQ ID NO: 4004311 - DNA, 25 bp, Homo sapien
cacagtattgtgcagggtcatcaag

SEQ ID NO: 4004312 - DNA, 25 bp, Homo sapien
cggtgtgaagtaggcttctgcagtc

SEQ ID NO: 4004313 - DNA, 25 bp, Homo sapien
cagaaaataagagaaggcggtgtga

SEQ ID NO: 4004314 - DNA, 25 bp, Homo sapien
tttctctggaaccagtttcagaact

SEQ ID NO: 4004315 - DNA, 25 bp, Homo sapien
tgtggaatatccacccagtggagta

SEQ ID NO: 4004316 - DNA, 25 bp, Homo sapien
tgactacagtgcagtgaacacgtcc

SEQ ID NO: 4004317 - DNA, 25 bp, Homo sapien
cacactgggccaaaaaacctctttg

SEQ ID NO: 4004318 - DNA, 25 bp, Homo sapien
gaacacgtccttctggtagtaatcc

SEQ ID NO: 4004319 - DNA, 25 bp, Homo sapien
ccatctgagggaagtctttaaaggt

SEQ ID NO: 4004320 - DNA, 25 bp, Homo sapien
cgacccatctgagggaagtctttaa

SEQ ID NO: 4004321 - DNA, 25 bp, Homo sapien
acgacccatctgagggaagtcttta

SEQ ID NO: 4004322 - DNA, 25 bp, Homo sapien
acccatctgagggaagtctttaaag

SEQ ID NO: 4004323 - DNA, 25 bp, Homo sapien
tttccacctcctcaatacaggtatg

SEQ ID NO: 4004324 - DNA, 25 bp, Homo sapien
tatttccacctcctcaatacaggta

SEQ ID NO: 4004325 - DNA, 25 bp, Homo sapien
tgttatttccacctcctcaatacag

SEQ ID NO: 4004326 - DNA, 25 bp, Homo sapien
ccacctcctcaatacaggtatgaat

SEQ ID NO: 4004327 - DNA, 25 bp, Homo sapien
gtcaactttcaaaatacggcaggct

SEQ ID NO: 4004328 - DNA, 25 bp, Homo sapien
tggtcaactttcaaaatacggcagg

SEQ ID NO: 4004329 - DNA, 25 bp, Homo sapien
cctggtcaactttcaaaatacggca

SEQ ID NO: 4004330 - DNA, 25 bp, Homo sapien
ggtcaactttcaaaatacggcaggc

SEQ ID NO: 4004331 - DNA, 25 bp, Homo sapien
gggctacggtatcagtctctacatc

SEQ ID NO: 4004332 - DNA, 25 bp, Homo sapien
tgggcatcaaatgtgcgtccagaat

SEQ ID NO: 4004333 - DNA, 25 bp, Homo sapien
tacatcatcggaaagtattccaaga

SEQ ID NO: 4004334 - DNA, 25 bp, Homo sapien
caaatgtgcgtccagaatgacaaag

SEQ ID NO: 4004335 - DNA, 25 bp, Homo sapien
catagtgagagacccagcctggtct

SEQ ID NO: 4004336 - DNA, 25 bp, Homo sapien
ggcacaattttacatgaccaacagt

SEQ ID NO: 4004337 - DNA, 25 bp, Homo sapien
caacacgtgttactctgctttccaa

SEQ ID NO: 4004338 - DNA, 25 bp, Homo sapien
tatattttttcacggcacttggcac

SEQ ID NO: 4004339 - DNA, 25 bp, Homo sapien
tgtctgggcactaacttcacttatg

SEQ ID NO: 4004340 - DNA, 25 bp, Homo sapien
tgaggcttgctcaactctaggacat

SEQ ID NO: 4004341 - DNA, 25 bp, Homo sapien
taatttttgggacaactctacagac

SEQ ID NO: 4004342 - DNA, 25 bp, Homo sapien
tagctctgttccactgagattcagg

SEQ ID NO: 4004343 - DNA, 25 bp, Homo sapien
caactaactaagaactcaacctgag

SEQ ID NO: 4004344 - DNA, 25 bp, Homo sapien
taagaactcaacctgagaattattt

SEQ ID NO: 4004345 - DNA, 25 bp, Homo sapien
acagcagcaacaactaactaagaac

SEQ ID NO: 4004346 - DNA, 25 bp, Homo sapien
gcagcaacaactaactaagaactca

SEQ ID NO: 4004347 - DNA, 25 bp, Homo sapien
taaggtgccaattatgtctaaatat

SEQ ID NO: 4004348 - DNA, 25 bp, Homo sapien
tatatattctcatctccaatgcaca

SEQ ID NO: 4004349 - DNA, 25 bp, Homo sapien
gaaaccagataatacaatttgtaag

SEQ ID NO: 4004350 - DNA, 25 bp, Homo sapien
cactgaaatctagcaaaatctccat

SEQ ID NO: 4004351 - DNA, 25 bp, Homo sapien
tacaaatagatcctgattccagctt

SEQ ID NO: 4004352 - DNA, 25 bp, Homo sapien
ctggcctttacaaatagatcctgat

SEQ ID NO: 4004353 - DNA, 25 bp, Homo sapien
gcctttacaaatagatcctgattcc

SEQ ID NO: 4004354 - DNA, 25 bp, Homo sapien
aagctgctggcctttacaaatagat

SEQ ID NO: 4004355 - DNA, 25 bp, Homo sapien
aaaatccagtttcagacttcttggt

SEQ ID NO: 4004356 - DNA, 25 bp, Homo sapien
ctgatcaaatgtaaaataaaatcca

SEQ ID NO: 4004357 - DNA, 25 bp, Homo sapien
gatcaaatgtaaaataaaatccagt

SEQ ID NO: 4004358 - DNA, 25 bp, Homo sapien
aaataaaatccagtttcagacttct

SEQ ID NO: 4004359 - DNA, 25 bp, Homo sapien
aacagctcaatagcccaaagtgaaa

SEQ ID NO: 4004360 - DNA, 25 bp, Homo sapien
tataacagctcaatagcccaaagtg

SEQ ID NO: 4004361 - DNA, 25 bp, Homo sapien
ctgtataacagctcaatagcccaaa

SEQ ID NO: 4004362 - DNA, 25 bp, Homo sapien
tcaatagcccaaagtgaaattctac

SEQ ID NO: 4004363 - DNA, 25 bp, Homo sapien
aattatccagatatggaataaacgg

SEQ ID NO: 4004364 - DNA, 25 bp, Homo sapien
ctgatctattgaagttcggcaaatt

SEQ ID NO: 4004365 - DNA, 25 bp, Homo sapien
gaagttcggcaaattatccagatat

SEQ ID NO: 4004366 - DNA, 25 bp, Homo sapien
ccagatatggaataaacggtaatcc

SEQ ID NO: 4004367 - DNA, 25 bp, Homo sapien
tcaaaaatggcactagtttctcctt

SEQ ID NO: 4004368 - DNA, 25 bp, Homo sapien
atgtaccaaggacagaaatccgact

SEQ ID NO: 4004369 - DNA, 25 bp, Homo sapien
cagaaatccgactgctctttgagat

SEQ ID NO: 4004370 - DNA, 25 bp, Homo sapien
aaaatggcactagtttctccttaca

SEQ ID NO: 4004371 - DNA, 25 bp, Homo sapien
tataatgtaaaccaagaactctagt

SEQ ID NO: 4004372 - DNA, 25 bp, Homo sapien
aataactcaattataatgtaaacca

SEQ ID NO: 4004373 - DNA, 25 bp, Homo sapien
attataatgtaaccaaaataactca

SEQ ID NO: 4004374 - DNA, 25 bp, Homo sapien
ctgcaattataatgtaaccaaaata

SEQ ID NO: 4004375 - DNA, 25 bp, Homo sapien
tattaattagcacaattaggtgttt

SEQ ID NO: 4004376 - DNA, 25 bp, Homo sapien
cttattaattagcacaattaggtgt

SEQ ID NO: 4004377 - DNA, 25 bp, Homo sapien
aggtgttttacacctgctgtctttg

SEQ ID NO: 4004378 - DNA, 25 bp, Homo sapien
ggtgttttacacctgctgtctttgc

SEQ ID NO: 4004379 - DNA, 25 bp, Homo sapien
gacgtacctgcttttgaatgtcaca

SEQ ID NO: 4004380 - DNA, 25 bp, Homo sapien
gcgcaaaatgactgaagaccgtatg

SEQ ID NO: 4004381 - DNA, 25 bp, Homo sapien
caatgtctagatgcttccaatcccc

SEQ ID NO: 4004382 - DNA, 25 bp, Homo sapien
tacccatggtgcctaacggtgggct

SEQ ID NO: 4004383 - DNA, 25 bp, Homo sapien
aatcatatttgggacaaaactcttg

SEQ ID NO: 4004384 - DNA, 25 bp, Homo sapien
ccaatcatatttgggacaaaactct

SEQ ID NO: 4004385 - DNA, 25 bp, Homo sapien
tttgggacaaaactcttgtggccag

SEQ ID NO: 4004386 - DNA, 25 bp, Homo sapien
catatttgggacaaaactcttgtgg

SEQ ID NO: 4004387 - DNA, 25 bp, Homo sapien
catcagagtttttaggatattcttc

SEQ ID NO: 4004388 - DNA, 25 bp, Homo sapien
acatcagagtttttaggatattctt

SEQ ID NO: 4004389 - DNA, 25 bp, Homo sapien
ccggctactttttgtatatatattt

SEQ ID NO: 4004390 - DNA, 25 bp, Homo sapien
tttgagatggagtttagctcttgtt

SEQ ID NO: 4004391 - DNA, 25 bp, Homo sapien
ttgagatggagtttagctcttgttg

SEQ ID NO: 4004392 - DNA, 25 bp, Homo sapien
cgcccggctactttttgtatatata

SEQ ID NO: 4004393 - DNA, 25 bp, Homo sapien
cttgagtcaccgcgcctggcccaat

SEQ ID NO: 4004394 - DNA, 25 bp, Homo sapien
gcttgagtcaccgcgcctggcccaa

SEQ ID NO: 4004395 - DNA, 25 bp, Homo sapien
ttgagtcaccgcgcctggcccaata

SEQ ID NO: 4004396 - DNA, 25 bp, Homo sapien
gtgggcatcgtctccttaaaagtaa

SEQ ID NO: 4004397 - DNA, 25 bp, Homo sapien
tgtgatacgattttagacttcaaca

SEQ ID NO: 4004398 - DNA, 25 bp, Homo sapien
taaagcattaggaactcatctactg

SEQ ID NO: 4004399 - DNA, 25 bp, Homo sapien
tttctctgtgtaagttattaaagca

SEQ ID NO: 4004400 - DNA, 25 bp, Homo sapien
ttcaagcgtccttttgtcaaccatt

SEQ ID NO: 4004401 - DNA, 25 bp, Homo sapien
tacttttcaagcgtccttttgtcaa

SEQ ID NO: 4004402 - DNA, 25 bp, Homo sapien
ttcatacttttcaagcgtccttttg

SEQ ID NO: 4004403 - DNA, 25 bp, Homo sapien
ttttcaagcgtccttttgtcaacca

SEQ ID NO: 4004404 - DNA, 25 bp, Homo sapien
gaaccactggtggatgctaaaatta

SEQ ID NO: 4004405 - DNA, 25 bp, Homo sapien
gatatttacagtctcgaattaacag

SEQ ID NO: 4004406 - DNA, 25 bp, Homo sapien
tgggaatactggcatgagaaccacc

SEQ ID NO: 4004407 - DNA, 25 bp, Homo sapien
ctaaaattatggaaagtgtaagtgg

SEQ ID NO: 4004408 - DNA, 25 bp, Homo sapien
attatttgtcctccaatggttgact

SEQ ID NO: 4004409 - DNA, 25 bp, Homo sapien
ttgtcctccaatggttgacttgcca

SEQ ID NO: 4004410 - DNA, 25 bp, Homo sapien
cctccaatggttgacttgccagcat

SEQ ID NO: 4004411 - DNA, 25 bp, Homo sapien
tgtcctccaatggttgacttgccag

SEQ ID NO: 4004412 - DNA, 25 bp, Homo sapien
ttgaaaatgagcctcaaggctgggc

SEQ ID NO: 4004413 - DNA, 25 bp, Homo sapien
catgcaaaccataggttaaaaccaa

SEQ ID NO: 4004414 - DNA, 25 bp, Homo sapien
gggcataaatcctagttcattaccc

SEQ ID NO: 4004415 - DNA, 25 bp, Homo sapien
agcgagggcggatgacctcaggtca

SEQ ID NO: 4004416 - DNA, 25 bp, Homo sapien
tatgttacgtacaatatactgaagt

SEQ ID NO: 4004417 - DNA, 25 bp, Homo sapien
tctatgccgttacagaattattcat

SEQ ID NO: 4004418 - DNA, 25 bp, Homo sapien
taccatcaatggtcaatagactaat

SEQ ID NO: 4004419 - DNA, 25 bp, Homo sapien
cttccagcatctatgccgttacaga

SEQ ID NO: 4004420 - DNA, 25 bp, Homo sapien
catgctctttcttaggagcacctgg

SEQ ID NO: 4004421 - DNA, 25 bp, Homo sapien
gcactttcctctggcggccttccat

SEQ ID NO: 4004422 - DNA, 25 bp, Homo sapien
acctggcggtgcaaccacagactta

SEQ ID NO: 4004423 - DNA, 25 bp, Homo sapien
caaccacagacttaggttttgggat

SEQ ID NO: 4004424 - DNA, 25 bp, Homo sapien
tgactgttcctcttgagaggattcc

SEQ ID NO: 4004425 - DNA, 25 bp, Homo sapien
tcctcatctgctcaaaatctcataa

SEQ ID NO: 4004426 - DNA, 25 bp, Homo sapien
cttcctcatctgctcaaaatctcat

SEQ ID NO: 4004427 - DNA, 25 bp, Homo sapien
ttcctcatctgctcaaaatctcata

SEQ ID NO: 4004428 - DNA, 25 bp, Homo sapien
cctcatctgctcaaaatctcataat

SEQ ID NO: 4004429 - DNA, 25 bp, Homo sapien
gctccaaacattgaaatcgcagacg

SEQ ID NO: 4004430 - DNA, 25 bp, Homo sapien
tgaatgctccaaacattgaaatcgc

SEQ ID NO: 4004431 - DNA, 25 bp, Homo sapien
aaacattgaaatcgcagacgcttgg

SEQ ID NO: 4004432 - DNA, 25 bp, Homo sapien
ccatgaatgctccaaacattgaaat

SEQ ID NO: 4004433 - DNA, 25 bp, Homo sapien
gaaatgacctcgattccaagcctca

SEQ ID NO: 4004434 - DNA, 25 bp, Homo sapien
taaaaaggctcggtacagacagtgg

SEQ ID NO: 4004435 - DNA, 25 bp, Homo sapien
aaacattaggcaaatgccagggcca

SEQ ID NO: 4004436 - DNA, 25 bp, Homo sapien
cagagcactgcctacttatgacaaa

SEQ ID NO: 4004437 - DNA, 25 bp, Homo sapien
cctgggcgacatagagagattcatc

SEQ ID NO: 4004438 - DNA, 25 bp, Homo sapien
ctgggcgacatagagagattcatct

SEQ ID NO: 4004439 - DNA, 25 bp, Homo sapien
gggcgacatagagagattcatctca

SEQ ID NO: 4004440 - DNA, 25 bp, Homo sapien
gcgacatagagagattcatctcaaa

SEQ ID NO: 4004441 - DNA, 25 bp, Homo sapien
gaacaaagccatttacgaaggagcc

SEQ ID NO: 4004442 - DNA, 25 bp, Homo sapien
caggtgctcgggaaagccttattaa

SEQ ID NO: 4004443 - DNA, 25 bp, Homo sapien
gcgacatacaattacctagtgggaa

SEQ ID NO: 4004444 - DNA, 25 bp, Homo sapien
tattcaaccaggaaattacccagtg

SEQ ID NO: 4004445 - DNA, 25 bp, Homo sapien
tgtttactactgtgatactccaggg

SEQ ID NO: 4004446 - DNA, 25 bp, Homo sapien
tccactagagtacactgggcatctg

SEQ ID NO: 4004447 - DNA, 25 bp, Homo sapien
tgcagggctcacttaccacactgtg

SEQ ID NO: 4004448 - DNA, 25 bp, Homo sapien
taaacaactgctcaacttggcacag

SEQ ID NO: 4004449 - DNA, 25 bp, Homo sapien
gttttatggaggcctcaggcaatcc

SEQ ID NO: 4004450 - DNA, 25 bp, Homo sapien
tgcgcccagcttgtacagttgaaaa

SEQ ID NO: 4004451 - DNA, 25 bp, Homo sapien
tatgttttatggaggcctcaggcaa

SEQ ID NO: 4004452 - DNA, 25 bp, Homo sapien
aatgcgcccagcttgtacagttgaa

SEQ ID NO: 4004453 - DNA, 25 bp, Homo sapien
aatcagtacctgaaagcaagctacc

SEQ ID NO: 4004454 - DNA, 25 bp, Homo sapien
cttaagttcactcatttgacattcc

SEQ ID NO: 4004455 - DNA, 25 bp, Homo sapien
agtacctgaaagcaagctacctacc

SEQ ID NO: 4004456 - DNA, 25 bp, Homo sapien
taagcaccattaggaagagaatact

SEQ ID NO: 4004457 - DNA, 25 bp, Homo sapien
tagactgaactactgatgcacgaac

SEQ ID NO: 4004458 - DNA, 25 bp, Homo sapien
tactagctacggtcagaaagacacg

SEQ ID NO: 4004459 - DNA, 25 bp, Homo sapien
gaaaattctctaaacgtgtcgctga

SEQ ID NO: 4004460 - DNA, 25 bp, Homo sapien
tagtagaaaacgcagcagaagacgc

SEQ ID NO: 4004461 - DNA, 25 bp, Homo sapien
gggtccgggtctttgggcgcgctgc

SEQ ID NO: 4004462 - DNA, 25 bp, Homo sapien
tctcaagtgggtaactgcggactcc

SEQ ID NO: 4004463 - DNA, 25 bp, Homo sapien
gactcctggctccatctgtcctcat

SEQ ID NO: 4004464 - DNA, 25 bp, Homo sapien
cgttccatacggttcccatctcaag

SEQ ID NO: 4004465 - DNA, 25 bp, Homo sapien
gttgccggctgaaggccgcgctgag

SEQ ID NO: 4004466 - DNA, 25 bp, Homo sapien
cacgaactcggcggcgtggacgttg

SEQ ID NO: 4004467 - DNA, 25 bp, Homo sapien
aggccgcgctgaggttctcccgctg

SEQ ID NO: 4004468 - DNA, 25 bp, Homo sapien
tccgtggttattggcggcgccgcca

SEQ ID NO: 4004469 - DNA, 25 bp, Homo sapien
gccactgcccggatccatgatcggg

SEQ ID NO: 4004470 - DNA, 25 bp, Homo sapien
gagtgggcaacgctgactgagggaa

SEQ ID NO: 4004471 - DNA, 25 bp, Homo sapien
ggccgggagctagcgacaaagatcc

SEQ ID NO: 4004472 - DNA, 25 bp, Homo sapien
acactcgcgacgacgacagaggcgg

SEQ ID NO: 4004473 - DNA, 25 bp, Homo sapien
cggattgacccctcgccgccacccg

SEQ ID NO: 4004474 - DNA, 25 bp, Homo sapien
tcgccgccacccgtaccttcgcctc

SEQ ID NO: 4004475 - DNA, 25 bp, Homo sapien
caaccacctccgacggcctcacagc

SEQ ID NO: 4004476 - DNA, 25 bp, Homo sapien
cccggcgcggattgacccctcgccg

SEQ ID NO: 4004477 - DNA, 25 bp, Homo sapien
ccttttgaatggtctgatttgctca

SEQ ID NO: 4004478 - DNA, 25 bp, Homo sapien
cccatagtacttttcatcgactgca

SEQ ID NO: 4004479 - DNA, 25 bp, Homo sapien
tggtgagtctagcttccttatgcac

SEQ ID NO: 4004480 - DNA, 25 bp, Homo sapien
ccttatgcaccattacgtgaagtgg

SEQ ID NO: 4004481 - DNA, 25 bp, Homo sapien
tcctgcccatgtgacatccgcaggt

SEQ ID NO: 4004482 - DNA, 25 bp, Homo sapien
gcccatgtgacatccgcaggtgctg

SEQ ID NO: 4004483 - DNA, 25 bp, Homo sapien
tgtcctgcccatgtgacatccgcag

SEQ ID NO: 4004484 - DNA, 25 bp, Homo sapien
ctgcccatgtgacatccgcaggtgc

SEQ ID NO: 4004485 - DNA, 25 bp, Homo sapien
tctcagccgctctccacctcttggg

SEQ ID NO: 4004486 - DNA, 25 bp, Homo sapien
gggtggtgattccatctcagccgct

SEQ ID NO: 4004487 - DNA, 25 bp, Homo sapien
ggttcgggtggtgattccacctcag

SEQ ID NO: 4004488 - DNA, 25 bp, Homo sapien
tcttgggttcgggtggtgattccac

SEQ ID NO: 4004489 - DNA, 25 bp, Homo sapien
tctgttgctggtgatagatttttgc

SEQ ID NO: 4004490 - DNA, 25 bp, Homo sapien
atatcacccttccactgagtactgc

SEQ ID NO: 4004491 - DNA, 25 bp, Homo sapien
tgctggtgatagatttttgcacctt

SEQ ID NO: 4004492 - DNA, 25 bp, Homo sapien
tggacaaaattaccgccaccaacac

SEQ ID NO: 4004493 - DNA, 25 bp, Homo sapien
ccagttgcaaagagcctttcttgca

SEQ ID NO: 4004494 - DNA, 25 bp, Homo sapien
gcaaagagcctttcttgcagaaggg

SEQ ID NO: 4004495 - DNA, 25 bp, Homo sapien
tgcaaagagcctttcttgcagaagg

SEQ ID NO: 4004496 - DNA, 25 bp, Homo sapien
gttgcaaagagcctttcttgcagaa

SEQ ID NO: 4004497 - DNA, 25 bp, Homo sapien
atttgtggtagtcctctgcccgccg

SEQ ID NO: 4004498 - DNA, 25 bp, Homo sapien
gcatttgtggtagtcctctgcccgc

SEQ ID NO: 4004499 - DNA, 25 bp, Homo sapien
tgcatttgtggtagtcctctgcccg

SEQ ID NO: 4004500 - DNA, 25 bp, Homo sapien
tttgcatttgtggtagtcctctgcc

SEQ ID NO: 4004501 - DNA, 25 bp, Homo sapien
gaaatgcacacacatgatccaccag

SEQ ID NO: 4004502 - DNA, 25 bp, Homo sapien
tgaattcaacaatccaggctgggtg

SEQ ID NO: 4004503 - DNA, 25 bp, Homo sapien
aagaggctgtgggataagaatcgct

SEQ ID NO: 4004504 - DNA, 25 bp, Homo sapien
aaaaaagatcagtcatatggcagca

SEQ ID NO: 4004505 - DNA, 25 bp, Homo sapien
aaatgaatctggaggtgacccaagc

SEQ ID NO: 4004506 - DNA, 25 bp, Homo sapien
gagtaatgacgtctttcaggccaat

SEQ ID NO: 4004507 - DNA, 25 bp, Homo sapien
tgacgtctttcaggccaattttatt

SEQ ID NO: 4004508 - DNA, 25 bp, Homo sapien
gtaatgacgtctttcaggccaattt

SEQ ID NO: 4004509 - DNA, 25 bp, Homo sapien
tagagtaatgacgtctttcaggcca

SEQ ID NO: 4004510 - DNA, 25 bp, Homo sapien
ggacctcagcccttggtgagagtga

SEQ ID NO: 4004511 - DNA, 25 bp, Homo sapien
gacctcagcccttggtgagagtgag

SEQ ID NO: 4004512 - DNA, 25 bp, Homo sapien
gatacatcatgtccattttcagact

SEQ ID NO: 4004513 - DNA, 25 bp, Homo sapien
tctgtggatacatcatgtccatttt

SEQ ID NO: 4004514 - DNA, 25 bp, Homo sapien
tgtggatacatcatgtccattttca

SEQ ID NO: 4004515 - DNA, 25 bp, Homo sapien
tacatcatgtccattttcagactgg

SEQ ID NO: 4004516 - DNA, 25 bp, Homo sapien
cttctcggaaatgcaataatgatac

SEQ ID NO: 4004517 - DNA, 25 bp, Homo sapien
aatgcaataatgatacgtaaccaag

SEQ ID NO: 4004518 - DNA, 25 bp, Homo sapien
cggaaatgcaataatgatacgtaac

SEQ ID NO: 4004519 - DNA, 25 bp, Homo sapien
tgcaataatgatacgtaaccaagga

SEQ ID NO: 4004520 - DNA, 25 bp, Homo sapien
gccaaaagaggagccaaaagagcat

SEQ ID NO: 4004521 - DNA, 25 bp, Homo sapien
caaaagaggagccaaaagagcatcc

SEQ ID NO: 4004522 - DNA, 25 bp, Homo sapien
aagaggagccaaaagagcatccaca

SEQ ID NO: 4004523 - DNA, 25 bp, Homo sapien
agaggagccaaaagagcatccacag

SEQ ID NO: 4004524 - DNA, 25 bp, Homo sapien
tcaaggtcaagagcactagagtgct

SEQ ID NO: 4004525 - DNA, 25 bp, Homo sapien
catttgacggacttggaggacttca

SEQ ID NO: 4004526 - DNA, 25 bp, Homo sapien
tcaatgtttacatgtgcccagatgc

SEQ ID NO: 4004527 - DNA, 25 bp, Homo sapien
gaaccccaagtgtattccctgtgga

SEQ ID NO: 4004528 - DNA, 25 bp, Homo sapien
cagcaggtcgtaggtgtctctctct

SEQ ID NO: 4004529 - DNA, 25 bp, Homo sapien
gcaggtcgtaggtgtctctctctat

SEQ ID NO: 4004530 - DNA, 25 bp, Homo sapien
gctctgacagcaggtcgtaggtgtc

SEQ ID NO: 4004531 - DNA, 25 bp, Homo sapien
tgacagcaggtcgtaggtgtctctc

SEQ ID NO: 4004532 - DNA, 25 bp, Homo sapien
gggcagatcacctgaacccaggagg

SEQ ID NO: 4004533 - DNA, 25 bp, Homo sapien
gcagatcacctgaacccaggaggtg

SEQ ID NO: 4004534 - DNA, 25 bp, Homo sapien
caggcgtgctggcgcatgtctgtag

SEQ ID NO: 4004535 - DNA, 25 bp, Homo sapien
cccagctacttggaaggctgaggtg

SEQ ID NO: 4004536 - DNA, 25 bp, Homo sapien
acatgtcagcgttattgtaatgcaa

SEQ ID NO: 4004537 - DNA, 25 bp, Homo sapien
aacatgtcagcgttattgtaatgca

SEQ ID NO: 4004538 - DNA, 25 bp, Homo sapien
taacatgtcagcgttattgtaatgc

SEQ ID NO: 4004539 - DNA, 25 bp, Homo sapien
gaacgaatgcgattctctggacctg

SEQ ID NO: 4004540 - DNA, 25 bp, Homo sapien
tctttggcagttttcgtgctaatgt

SEQ ID NO: 4004541 - DNA, 25 bp, Homo sapien
acctgtttgggactgagcttaataa

SEQ ID NO: 4004542 - DNA, 25 bp, Homo sapien
gataaactctgaaccattaaaggac

SEQ ID NO: 4004543 - DNA, 25 bp, Homo sapien
tggtttgatggtgaatctttgaaat

SEQ ID NO: 4004544 - DNA, 25 bp, Homo sapien
gttggtttgatggtgaatctttgaa

SEQ ID NO: 4004545 - DNA, 25 bp, Homo sapien
ttggtttgatggtgaatctttgaaa

SEQ ID NO: 4004546 - DNA, 25 bp, Homo sapien
taattaaccatttcgactcgagcag

SEQ ID NO: 4004547 - DNA, 25 bp, Homo sapien
gcatcaagagcaaaccgaaggtcga

SEQ ID NO: 4004548 - DNA, 25 bp, Homo sapien
gaaattattcttccgagaggcctcg

SEQ ID NO: 4004549 - DNA, 25 bp, Homo sapien
gaggaaggcgcaaccattcttgtca

SEQ ID NO: 4004550 - DNA, 25 bp, Homo sapien
tacggaaaagcttcggatacagaca

SEQ ID NO: 4004551 - DNA, 25 bp, Homo sapien
aattttcatagagacgaggccttac

SEQ ID NO: 4004552 - DNA, 25 bp, Homo sapien
taactccctattgaagaagttgggc

SEQ ID NO: 4004553 - DNA, 25 bp, Homo sapien
taggacactgcaatacaaatcttcg

SEQ ID NO: 4004554 - DNA, 25 bp, Homo sapien
cagcaacactaaagtcatcattggg

SEQ ID NO: 4004555 - DNA, 25 bp, Homo sapien
acaatagcagcaacactaaagtcat

SEQ ID NO: 4004556 - DNA, 25 bp, Homo sapien
ggtagcgccgggcatcccagatgcc

SEQ ID NO: 4004557 - DNA, 25 bp, Homo sapien
gctggtagcgccgggcatcccagat

SEQ ID NO: 4004558 - DNA, 25 bp, Homo sapien
caggttgatgatgtccttgttccct

SEQ ID NO: 4004559 - DNA, 25 bp, Homo sapien
gtttgatcgctcctgtgtggcaaag

SEQ ID NO: 4004560 - DNA, 25 bp, Homo sapien
aagtgtttgctgaatttgcactggg

SEQ ID NO: 4004561 - DNA, 25 bp, Homo sapien
caggaacatggggtttgatcgctcc

SEQ ID NO: 4004562 - DNA, 25 bp, Homo sapien
gtttgctgaatttgcactgggccac

SEQ ID NO: 4004563 - DNA, 25 bp, Homo sapien
tccgcacaaccagatgactcatatg

SEQ ID NO: 4004564 - DNA, 25 bp, Homo sapien
gctgttgtaacgtcatagccagtca

SEQ ID NO: 4004565 - DNA, 25 bp, Homo sapien
gaagttgtaattatcgcccgtgaag

SEQ ID NO: 4004566 - DNA, 25 bp, Homo sapien
tccaaagggatccattcagcacagg

SEQ ID NO: 4004567 - DNA, 25 bp, Homo sapien
caatgttttcccacaaggcttgctt

SEQ ID NO: 4004568 - DNA, 25 bp, Homo sapien
tgcacagatggctgtgtgcttttgt

SEQ ID NO: 4004569 - DNA, 25 bp, Homo sapien
ttagcaatgttttcccacaaggctt

SEQ ID NO: 4004570 - DNA, 25 bp, Homo sapien
gagcagcttcctggataatgcacag

SEQ ID NO: 4004571 - DNA, 25 bp, Homo sapien
tggggtgcgcaccttcttaagtctt

SEQ ID NO: 4004572 - DNA, 25 bp, Homo sapien
gctggggtgcgcaccttcttaagtc

SEQ ID NO: 4004573 - DNA, 25 bp, Homo sapien
gggtgcgcaccttcttaagtcttgt

SEQ ID NO: 4004574 - DNA, 25 bp, Homo sapien
ggtgcgcaccttcttaagtcttgtg

SEQ ID NO: 4004575 - DNA, 25 bp, Homo sapien
gaaatgtatttgggtaaaggtggca

SEQ ID NO: 4004576 - DNA, 25 bp, Homo sapien
tgaaatgtatttgggtaaaggtggc

SEQ ID NO: 4004577 - DNA, 25 bp, Homo sapien
aaaggtccagtatgcttcctaccat

SEQ ID NO: 4004578 - DNA, 25 bp, Homo sapien
aagactggtcttttgtgatggatga

SEQ ID NO: 4004579 - DNA, 25 bp, Homo sapien
tggatgaagaaaggtccagtatgct

SEQ ID NO: 4004580 - DNA, 25 bp, Homo sapien
tgaagaaaggtccagtatgcttcct

SEQ ID NO: 4004581 - DNA, 25 bp, Homo sapien
ggttttaagccaatcaaggcaccag

SEQ ID NO: 4004582 - DNA, 25 bp, Homo sapien
tcattttgaggcagtagcccttggg

SEQ ID NO: 4004583 - DNA, 25 bp, Homo sapien
tgtgttaattgtcttgctgaggagc

SEQ ID NO: 4004584 - DNA, 25 bp, Homo sapien
tgtaaagaatagtccgcacagcagg

SEQ ID NO: 4004585 - DNA, 25 bp, Homo sapien
agtgtgtccagggaacgtagctccc

SEQ ID NO: 4004586 - DNA, 25 bp, Homo sapien
agggaacgtagctccccatcagcct

SEQ ID NO: 4004587 - DNA, 25 bp, Homo sapien
tgggctttctgtagcaagtgtgtcc

SEQ ID NO: 4004588 - DNA, 25 bp, Homo sapien
tttcctgtggtcccacacccggctg

SEQ ID NO: 4004589 - DNA, 25 bp, Homo sapien
ggccagcattcatgtcatggtcccc

SEQ ID NO: 4004590 - DNA, 25 bp, Homo sapien
ctagaaggtgcttacagtataccac

SEQ ID NO: 4004591 - DNA, 25 bp, Homo sapien
cagagggggcaattgttcttgataa

SEQ ID NO: 4004592 - DNA, 25 bp, Homo sapien
tataccactcgtgtcttgggccagc

SEQ ID NO: 4004593 - DNA, 25 bp, Homo sapien
ctggggtccgagttaaggttctcag

SEQ ID NO: 4004594 - DNA, 25 bp, Homo sapien
ggtgacatccctggggtccgagtta

SEQ ID NO: 4004595 - DNA, 25 bp, Homo sapien
ctgttggtgacatccctggggtccg

SEQ ID NO: 4004596 - DNA, 25 bp, Homo sapien
tggggtccgagttaaggttctcaga

SEQ ID NO: 4004597 - DNA, 25 bp, Homo sapien
taaacatgctcgagttaggccagtg

SEQ ID NO: 4004598 - DNA, 25 bp, Homo sapien
tttgtaggcaccgtaagtagggctg

SEQ ID NO: 4004599 - DNA, 25 bp, Homo sapien
tctcaggtccacatagagcatggtg

SEQ ID NO: 4004600 - DNA, 25 bp, Homo sapien
gagatcatgcctgcgagcctttgta

SEQ ID NO: 4004601 - DNA, 25 bp, Homo sapien
gtgcctgttgctctcgggaggccat

SEQ ID NO: 4004602 - DNA, 25 bp, Homo sapien
gcagccttctgaggtgtaggttata

SEQ ID NO: 4004603 - DNA, 25 bp, Homo sapien
tgccatgtatggtgctgaagcattt

SEQ ID NO: 4004604 - DNA, 25 bp, Homo sapien
gttttctcattgaatcccccagcag

SEQ ID NO: 4004605 - DNA, 25 bp, Homo sapien
tgcccaaggcctcatggctagtaga

SEQ ID NO: 4004606 - DNA, 25 bp, Homo sapien
tcattagatggtaaagcagccgtca

SEQ ID NO: 4004607 - DNA, 25 bp, Homo sapien
tggattaaatagtcccatgggtccc

SEQ ID NO: 4004608 - DNA, 25 bp, Homo sapien
ggctttacagcaacccagaaggtac

SEQ ID NO: 4004609 - DNA, 25 bp, Homo sapien
gcagaggccaaatacagtgctcaga

SEQ ID NO: 4004610 - DNA, 25 bp, Homo sapien
cttcctcctggttgacgtggctggg

SEQ ID NO: 4004611 - DNA, 25 bp, Homo sapien
gcagtgttttgtgttcgataggcta

SEQ ID NO: 4004612 - DNA, 25 bp, Homo sapien
tcctcctggttgacgtggctgggaa

SEQ ID NO: 4004613 - DNA, 25 bp, Homo sapien
gtgttcgataggctaagctggcaac

SEQ ID NO: 4004614 - DNA, 25 bp, Homo sapien
caatacgcttttgaaggaggacctg

SEQ ID NO: 4004615 - DNA, 25 bp, Homo sapien
tgcaatacgcttttgaaggaggacc

SEQ ID NO: 4004616 - DNA, 25 bp, Homo sapien
ccgcctctgcaatacgcttttgaag

SEQ ID NO: 4004617 - DNA, 25 bp, Homo sapien
ggaggacctgttgggcagtgggtcc

SEQ ID NO: 4004618 - DNA, 25 bp, Homo sapien
tgtgtctctaggctaggctgcatga

SEQ ID NO: 4004619 - DNA, 25 bp, Homo sapien
cctgtctcgttctggctttgcttgt

SEQ ID NO: 4004620 - DNA, 25 bp, Homo sapien
tgagcactgccctgtctcgttctgg

SEQ ID NO: 4004621 - DNA, 25 bp, Homo sapien
tctaggctaggctgcatgactggga

SEQ ID NO: 4004622 - DNA, 25 bp, Homo sapien
gagtcctgagttgacttagcggcca

SEQ ID NO: 4004623 - DNA, 25 bp, Homo sapien
ttcctcttgcgaagagcaggctctg

SEQ ID NO: 4004624 - DNA, 25 bp, Homo sapien
tcagcagtgcgttccttccgtcctt

SEQ ID NO: 4004625 - DNA, 25 bp, Homo sapien
tgccacgcagagcacactcagcagt

SEQ ID NO: 4004626 - DNA, 25 bp, Homo sapien
aggacattctcaccggcgtctcagg

SEQ ID NO: 4004627 - DNA, 25 bp, Homo sapien
taacacccgtgagtcatagagctgt

SEQ ID NO: 4004628 - DNA, 25 bp, Homo sapien
tgttctgaggtccaaacgtactagc

SEQ ID NO: 4004629 - DNA, 25 bp, Homo sapien
tagacttgagtgtggaaccgggcat

SEQ ID NO: 4004630 - DNA, 25 bp, Homo sapien
tgaactcgttttcccagtccttgaa

SEQ ID NO: 4004631 - DNA, 25 bp, Homo sapien
tcagatacctcttgcaattgtgtgc

SEQ ID NO: 4004632 - DNA, 25 bp, Homo sapien
tatctgggaacctcattggaggctc

SEQ ID NO: 4004633 - DNA, 25 bp, Homo sapien
gtttgtgcacatacgtggattttcc

SEQ ID NO: 4004634 - DNA, 25 bp, Homo sapien
tagtacccctctgacacagttgtga

SEQ ID NO: 4004635 - DNA, 25 bp, Homo sapien
tctgggccttattgttgaactgcaa

SEQ ID NO: 4004636 - DNA, 25 bp, Homo sapien
tacgttgctgacgaatcttcctgaa

SEQ ID NO: 4004637 - DNA, 25 bp, Homo sapien
tattagcagtgggaacctgggcaag

SEQ ID NO: 4004638 - DNA, 25 bp, Homo sapien
tggtgtttacaacagccttgtctcc

SEQ ID NO: 4004639 - DNA, 25 bp, Homo sapien
taccgtcactgctgcggaaaccagc

SEQ ID NO: 4004640 - DNA, 25 bp, Homo sapien
ccgtagctgcggaagtaccgtcact

SEQ ID NO: 4004641 - DNA, 25 bp, Homo sapien
taagtgatcctgactccgtagctgc

SEQ ID NO: 4004642 - DNA, 25 bp, Homo sapien
ccctttcagtggtgaggtcgcgagt

SEQ ID NO: 4004643 - DNA, 25 bp, Homo sapien
tttttcatgtccagcgcggtacccc

SEQ ID NO: 4004644 - DNA, 25 bp, Homo sapien
gggcgccctagtcttttctctgccg

SEQ ID NO: 4004645 - DNA, 25 bp, Homo sapien
ctgcgggtggtggttatctgaattt

SEQ ID NO: 4004646 - DNA, 25 bp, Homo sapien
tgtcgccattatgaagcccttgagg

SEQ ID NO: 4004647 - DNA, 25 bp, Homo sapien
gcttgaggagctgttgtcgccatta

SEQ ID NO: 4004648 - DNA, 25 bp, Homo sapien
ctaagcactgcaggatgtcgggatg

SEQ ID NO: 4004649 - DNA, 25 bp, Homo sapien
tgctgccgagtactgagtctgtcct

SEQ ID NO: 4004650 - DNA, 25 bp, Homo sapien
ggctgtatttcaggccgacttcccg

SEQ ID NO: 4004651 - DNA, 25 bp, Homo sapien
gggctgtatttcaggccgacttccc

SEQ ID NO: 4004652 - DNA, 25 bp, Homo sapien
tgtatttcaggccgacttcccgcat

SEQ ID NO: 4004653 - DNA, 25 bp, Homo sapien
gctgtatttcaggccgacttcccgc

SEQ ID NO: 4004654 - DNA, 25 bp, Homo sapien
ctggctggttgttccctgcctcacc

SEQ ID NO: 4004655 - DNA, 25 bp, Homo sapien
gctggttgttccctgcctcaccagg

SEQ ID NO: 4004656 - DNA, 25 bp, Homo sapien
tccctgcctcaccaggctctcactt

SEQ ID NO: 4004657 - DNA, 25 bp, Homo sapien
cctgcctcaccaggctctcacttgt

SEQ ID NO: 4004658 - DNA, 25 bp, Homo sapien
tcttgcctttccggtacggttcaca

SEQ ID NO: 4004659 - DNA, 25 bp, Homo sapien
ggtcttaaatatagccaggatgtga

SEQ ID NO: 4004660 - DNA, 25 bp, Homo sapien
acggttcacaaggtggcaatttcca

SEQ ID NO: 4004661 - DNA, 25 bp, Homo sapien
catgtcactgaacatgaagcctggg

SEQ ID NO: 4004662 - DNA, 25 bp, Homo sapien
cagatctttgcaggacggtttcttt

SEQ ID NO: 4004663 - DNA, 25 bp, Homo sapien
tcagatctttgcaggacggtttctt

SEQ ID NO: 4004664 - DNA, 25 bp, Homo sapien
cacatcctgcggtctctgttggaga

SEQ ID NO: 4004665 - DNA, 25 bp, Homo sapien
cggaccataagctgatgcaggctct

SEQ ID NO: 4004666 - DNA, 25 bp, Homo sapien
ggcttgctcgatggtggtactgttc

SEQ ID NO: 4004667 - DNA, 25 bp, Homo sapien
agagggtgtgtccagatttggacat

SEQ ID NO: 4004668 - DNA, 25 bp, Homo sapien
catgtgagtgaatcaagagtttgtc

SEQ ID NO: 4004669 - DNA, 25 bp, Homo sapien
tgtgagtgaatcaagagtttgtcgt

SEQ ID NO: 4004670 - DNA, 25 bp, Homo sapien
gaatcaagagtttgtcgtgttcggc

SEQ ID NO: 4004671 - DNA, 25 bp, Homo sapien
agtgaatcaagagtttgtcgtgttc

SEQ ID NO: 4004672 - DNA, 25 bp, Homo sapien
ttgcccttctttttgtcagggttga

SEQ ID NO: 4004673 - DNA, 25 bp, Homo sapien
tgcccttctttttgtcagggttgac

SEQ ID NO: 4004674 - DNA, 25 bp, Homo sapien
ctggttgcccttctttttgtcaggg

SEQ ID NO: 4004675 - DNA, 25 bp, Homo sapien
gcatactgcagcttgttttctgagc

SEQ ID NO: 4004676 - DNA, 25 bp, Homo sapien
ctcgctcctgctaaactgtgattct

SEQ ID NO: 4004677 - DNA, 25 bp, Homo sapien
ttctctaatgtctcgctcctgctaa

SEQ ID NO: 4004678 - DNA, 25 bp, Homo sapien
gctcttatcccccatttcatctgga

SEQ ID NO: 4004679 - DNA, 25 bp, Homo sapien
atccagttccctcatggtcttcaaa

SEQ ID NO: 4004680 - DNA, 25 bp, Homo sapien
cagttccctcatggtcttcaaactc

SEQ ID NO: 4004681 - DNA, 25 bp, Homo sapien
tggcatccagttccctcatggtctt

SEQ ID NO: 4004682 - DNA, 25 bp, Homo sapien
aatggcatccagttccctcatggtc

SEQ ID NO: 4004683 - DNA, 25 bp, Homo sapien
gtgatggtccccctccttcaatcac

SEQ ID NO: 4004684 - DNA, 25 bp, Homo sapien
tggtgatggtccccctccttcaatc

SEQ ID NO: 4004685 - DNA, 25 bp, Homo sapien
ggtgatggtccccctccttcaatca

SEQ ID NO: 4004686 - DNA, 25 bp, Homo sapien
tttttatccttactgcattcgcagt

SEQ ID NO: 4004687 - DNA, 25 bp, Homo sapien
tttatccttactgcattcgcagtcc

SEQ ID NO: 4004688 - DNA, 25 bp, Homo sapien
tgcatggcccacatcgttgtatttt

SEQ ID NO: 4004689 - DNA, 25 bp, Homo sapien
ggcccacatcgttgtattttgttgt

SEQ ID NO: 4004690 - DNA, 25 bp, Homo sapien
agaaggaatcgcagactctgtcacc

SEQ ID NO: 4004691 - DNA, 25 bp, Homo sapien
aagaaggaatcgcagactctgtcac

SEQ ID NO: 4004692 - DNA, 25 bp, Homo sapien
gaagttgcgtagtgtggccccactc

SEQ ID NO: 4004693 - DNA, 25 bp, Homo sapien
tatagtgtggccctgatgtcagatg

SEQ ID NO: 4004694 - DNA, 25 bp, Homo sapien
ttctgaagttgtgtagcatggcccc

SEQ ID NO: 4004695 - DNA, 25 bp, Homo sapien
ctcaagttgtgtagtgtggccccat

SEQ ID NO: 4004696 - DNA, 25 bp, Homo sapien
tcctctgtacttgctccagttttca

SEQ ID NO: 4004697 - DNA, 25 bp, Homo sapien
ccagttttcacttgaccagcgtcct

SEQ ID NO: 4004698 - DNA, 25 bp, Homo sapien
tggcaccttacctggatggctctgg

SEQ ID NO: 4004699 - DNA, 25 bp, Homo sapien
cagtcctgtgatgtcggtggcttca

SEQ ID NO: 4004700 - DNA, 25 bp, Homo sapien
gatgctccactgtcataactgttca

SEQ ID NO: 4004701 - DNA, 25 bp, Homo sapien
catagcgtagtcctgttcaatagca

SEQ ID NO: 4004702 - DNA, 25 bp, Homo sapien
acgagctctcctcggcatccccatt

SEQ ID NO: 4004703 - DNA, 25 bp, Homo sapien
gttcatggccaccatagcgtagtcc

SEQ ID NO: 4004704 - DNA, 25 bp, Homo sapien
ccagggagagagggaaaaggaatag

SEQ ID NO: 4004705 - DNA, 25 bp, Homo sapien
gagagagggaaaaggaatagaccat

SEQ ID NO: 4004706 - DNA, 25 bp, Homo sapien
ctgcagtcagcccagggagagaggg

SEQ ID NO: 4004707 - DNA, 25 bp, Homo sapien
tgcagtcagcccagggagagaggga

SEQ ID NO: 4004708 - DNA, 25 bp, Homo sapien
catttgtggtacgatccagctcttc

SEQ ID NO: 4004709 - DNA, 25 bp, Homo sapien
ctgttacgtttgtctcatgtgcccc

SEQ ID NO: 4004710 - DNA, 25 bp, Homo sapien
gaaactccgcttcccttatgcttgc

SEQ ID NO: 4004711 - DNA, 25 bp, Homo sapien
actttacgaccccactcttggctca

SEQ ID NO: 4004712 - DNA, 25 bp, Homo sapien
tctccatttatggagatccttgcac

SEQ ID NO: 4004713 - DNA, 25 bp, Homo sapien
gagatccttgcactactaggttgca

SEQ ID NO: 4004714 - DNA, 25 bp, Homo sapien
ccatttatggagatccttgcactac

SEQ ID NO: 4004715 - DNA, 25 bp, Homo sapien
tatggagatccttgcactactaggt

SEQ ID NO: 4004716 - DNA, 25 bp, Homo sapien
caccagttgcgatagagggaccatg

SEQ ID NO: 4004717 - DNA, 25 bp, Homo sapien
agaaggtctgttctgcacgggtaca

SEQ ID NO: 4004718 - DNA, 25 bp, Homo sapien
tgtggtgtcatttacattggaggca

SEQ ID NO: 4004719 - DNA, 25 bp, Homo sapien
tttggcttctcctgaaaatctcggt

SEQ ID NO: 4004720 - DNA, 25 bp, Homo sapien
cattgactttccgcttctcaggagc

SEQ ID NO: 4004721 - DNA, 25 bp, Homo sapien
attgactttccgcttctcaggagca

SEQ ID NO: 4004722 - DNA, 25 bp, Homo sapien
tctttgtccttgaaggctacttcgt

SEQ ID NO: 4004723 - DNA, 25 bp, Homo sapien
tgtccttgaaggctacttcgtccat

SEQ ID NO: 4004724 - DNA, 25 bp, Homo sapien
ctttgtccttgaaggctacttcgtc

SEQ ID NO: 4004725 - DNA, 25 bp, Homo sapien
tttgtccttgaaggctacttcgtcc

SEQ ID NO: 4004726 - DNA, 25 bp, Homo sapien
tgtttctgattttgtcctcgtaatc

SEQ ID NO: 4004727 - DNA, 25 bp, Homo sapien
gtcctcgtaatctcactgttttggg

SEQ ID NO: 4004728 - DNA, 25 bp, Homo sapien
tctgattttgtcctcgtaatctcac

SEQ ID NO: 4004729 - DNA, 25 bp, Homo sapien
gattttgtcctcgtaatctcactgt

SEQ ID NO: 4004730 - DNA, 25 bp, Homo sapien
catctggctgccctcattatagtgc

SEQ ID NO: 4004731 - DNA, 25 bp, Homo sapien
gcccatcaggagtggtgcgtgcaca

SEQ ID NO: 4004732 - DNA, 25 bp, Homo sapien
cctcattatagtgctattagcagag

SEQ ID NO: 4004733 - DNA, 25 bp, Homo sapien
ccatcaggagtggtgcgtgcacagt

SEQ ID NO: 4004734 - DNA, 25 bp, Homo sapien
aaagcaataaatcattggtagggag

SEQ ID NO: 4004735 - DNA, 25 bp, Homo sapien
gcaataaatcattggtagggagttt

SEQ ID NO: 4004736 - DNA, 25 bp, Homo sapien
tacaatgtgagtgtacataacatca

SEQ ID NO: 4004737 - DNA, 25 bp, Homo sapien
gaaaatcagatgaaggtacaatgtg

SEQ ID NO: 4004738 - DNA, 25 bp, Homo sapien
cgagatgacaagaagtcgggtttga

SEQ ID NO: 4004739 - DNA, 25 bp, Homo sapien
tgtccgagatgacaagaagtcgggt

SEQ ID NO: 4004740 - DNA, 25 bp, Homo sapien
gggcatgcaagctgaccactggtct

SEQ ID NO: 4004741 - DNA, 25 bp, Homo sapien
ggtttgatgggcatgcaagctgacc

SEQ ID NO: 4004742 - DNA, 25 bp, Homo sapien
tcggcattttctgcgaggcacacgt

SEQ ID NO: 4004743 - DNA, 25 bp, Homo sapien
gcaaattaattttagcgccctgaat

SEQ ID NO: 4004744 - DNA, 25 bp, Homo sapien
cctgaattgtttgtagttcttgccc

SEQ ID NO: 4004745 - DNA, 25 bp, Homo sapien
caaacttggcactgatacgcagcag

SEQ ID NO: 4004746 - DNA, 25 bp, Homo sapien
ctagaggggaccttttcatctgtca

SEQ ID NO: 4004747 - DNA, 25 bp, Homo sapien
cccagcgcttctgcatgtgatgagg

SEQ ID NO: 4004748 - DNA, 25 bp, Homo sapien
tgatgaggcattgagacctagaggg

SEQ ID NO: 4004749 - DNA, 25 bp, Homo sapien
ggcccagcgcttctgcatgtgatga

SEQ ID NO: 4004750 - DNA, 25 bp, Homo sapien
ttgccttgcccgtggtagccttcct

SEQ ID NO: 4004751 - DNA, 25 bp, Homo sapien
tcttgccttgcccgtggtagccttc

SEQ ID NO: 4004752 - DNA, 25 bp, Homo sapien
ctcttgccttgcccgtggtagcctt

SEQ ID NO: 4004753 - DNA, 25 bp, Homo sapien
tgccttgcccgtggtagccttcctc

SEQ ID NO: 4004754 - DNA, 25 bp, Homo sapien
taccggtggatctttgtctaggcaa

SEQ ID NO: 4004755 - DNA, 25 bp, Homo sapien
tgtttacagtaatgagcccaggcaa

SEQ ID NO: 4004756 - DNA, 25 bp, Homo sapien
gatagtccaccaagacaagcctgat

SEQ ID NO: 4004757 - DNA, 25 bp, Homo sapien
gaattctaaagagcctacatgtgca

SEQ ID NO: 4004758 - DNA, 25 bp, Homo sapien
atcatctgaagaacggtcgtgttcg

SEQ ID NO: 4004759 - DNA, 25 bp, Homo sapien
tcgtgttcgacattctggagatctg

SEQ ID NO: 4004760 - DNA, 25 bp, Homo sapien
ggagatctgaaaagtgctctatgtg

SEQ ID NO: 4004761 - DNA, 25 bp, Homo sapien
tgtgtttaatgttaataggcagcca

SEQ ID NO: 4004762 - DNA, 25 bp, Homo sapien
tgaatgttccgatcatgaccgtgtg

SEQ ID NO: 4004763 - DNA, 25 bp, Homo sapien
acagagctgaatgttccgatcatga

SEQ ID NO: 4004764 - DNA, 25 bp, Homo sapien
catgaccgtgtggttaggaacagcc

SEQ ID NO: 4004765 - DNA, 25 bp, Homo sapien
cagccctgtttagcgcatttctcac

SEQ ID NO: 4004766 - DNA, 25 bp, Homo sapien
tgtgatgttgctcatgttttatggt

SEQ ID NO: 4004767 - DNA, 25 bp, Homo sapien
cccagtgacaacgtggagtggctcc

SEQ ID NO: 4004768 - DNA, 25 bp, Homo sapien
tttatggttaactgcctggaattct

SEQ ID NO: 4004769 - DNA, 25 bp, Homo sapien
agatggatgatacacacttgtgatg

SEQ ID NO: 4004770 - DNA, 25 bp, Homo sapien
tttggtgaataatcagctcatttcc

SEQ ID NO: 4004771 - DNA, 25 bp, Homo sapien
gacttggtatcaataaagatgctgg

SEQ ID NO: 4004772 - DNA, 25 bp, Homo sapien
tttttcctctgggttatgtgaggac

SEQ ID NO: 4004773 - DNA, 25 bp, Homo sapien
ggtgaataatcagctcatttccttg

SEQ ID NO: 4004774 - DNA, 25 bp, Homo sapien
acagttctggatgagagatggaaga

SEQ ID NO: 4004775 - DNA, 25 bp, Homo sapien
gagagatggaagagcagcttgattt

SEQ ID NO: 4004776 - DNA, 25 bp, Homo sapien
gatggaagagcagcttgatttgctg

SEQ ID NO: 4004777 - DNA, 25 bp, Homo sapien
ttgatttgctggaaatgccttcctc

SEQ ID NO: 4004778 - DNA, 25 bp, Homo sapien
ggtcatccgtcctcccctagtggat

SEQ ID NO: 4004779 - DNA, 25 bp, Homo sapien
gcttcggtgatcaagcatttggtca

SEQ ID NO: 4004780 - DNA, 25 bp, Homo sapien
tctgagcactcgtcacatgcttcgg

SEQ ID NO: 4004781 - DNA, 25 bp, Homo sapien
cctagtggattctgagttgcttgga

SEQ ID NO: 4004782 - DNA, 25 bp, Homo sapien
ttgaaggttggtgcaggcttggacc

SEQ ID NO: 4004783 - DNA, 25 bp, Homo sapien
gacacgtggtgaaggtcagcaagtc

SEQ ID NO: 4004784 - DNA, 25 bp, Homo sapien
cctgccttgggaactgtgcttgaca

SEQ ID NO: 4004785 - DNA, 25 bp, Homo sapien
tatagaatatcttgggaaactgact

SEQ ID NO: 4004786 - DNA, 25 bp, Homo sapien
gttgctgttctgttgtgacagccat

SEQ ID NO: 4004787 - DNA, 25 bp, Homo sapien
catgttgctgttctgttgtgacagc

SEQ ID NO: 4004788 - DNA, 25 bp, Homo sapien
catcatgttgctgttctgttgtgac

SEQ ID NO: 4004789 - DNA, 25 bp, Homo sapien
ctgaccatcatgttgctgttctgtt

SEQ ID NO: 4004790 - DNA, 25 bp, Homo sapien
catgtccgtctttcacgtgtcctgg

SEQ ID NO: 4004791 - DNA, 25 bp, Homo sapien
gcagttcacatgtccgtctttcacg

SEQ ID NO: 4004792 - DNA, 25 bp, Homo sapien
tctttcacgtgtcctggcctgtggg

SEQ ID NO: 4004793 - DNA, 25 bp, Homo sapien
gggagtggcagttcacatgtccgtc

SEQ ID NO: 4004794 - DNA, 25 bp, Homo sapien
gccctgccctctgggctgcgggcca

SEQ ID NO: 4004795 - DNA, 25 bp, Homo sapien
cttcagggccctgccctctgggctg

SEQ ID NO: 4004796 - DNA, 25 bp, Homo sapien
gggccctgccctctgggctgcgggc

SEQ ID NO: 4004797 - DNA, 25 bp, Homo sapien
cagggccctgccctctgggctgcgg

SEQ ID NO: 4004798 - DNA, 25 bp, Homo sapien
tagctcagaggaaacgtggaacttg

SEQ ID NO: 4004799 - DNA, 25 bp, Homo sapien
tgacccatggcagtcgctcacaatg

SEQ ID NO: 4004800 - DNA, 25 bp, Homo sapien
gcatagaaattgttactcccggaaa

SEQ ID NO: 4004801 - DNA, 25 bp, Homo sapien
tgcaagccagatgtaagtgctcagc

SEQ ID NO: 4004802 - DNA, 25 bp, Homo sapien
tgatgcgcggccacgttcctccagt

SEQ ID NO: 4004803 - DNA, 25 bp, Homo sapien
tcaccgccacatccaaagtgccctg

SEQ ID NO: 4004804 - DNA, 25 bp, Homo sapien
gccccatgaatgcagccgctcaggt

SEQ ID NO: 4004805 - DNA, 25 bp, Homo sapien
ctttgctcctgctgatgcgcggcca

SEQ ID NO: 4004806 - DNA, 25 bp, Homo sapien
gatgtttgctatgagcttgggtctg

SEQ ID NO: 4004807 - DNA, 25 bp, Homo sapien
cccggctggagtggatgtttgctat

SEQ ID NO: 4004808 - DNA, 25 bp, Homo sapien
gtggatgtttgctatgagcttgggt

SEQ ID NO: 4004809 - DNA, 25 bp, Homo sapien
tggatgtttgctatgagcttgggtc

SEQ ID NO: 4004810 - DNA, 25 bp, Homo sapien
tttgctgagctcgggtctgtgtgcg

SEQ ID NO: 4004811 - DNA, 25 bp, Homo sapien
ctgagctcgggtctgtgtgcgcgcc

SEQ ID NO: 4004812 - DNA, 25 bp, Homo sapien
gagctcgggtctgtgtgcgcgcccc

SEQ ID NO: 4004813 - DNA, 25 bp, Homo sapien
gctgagctcgggtctgtgtgcgcgc

SEQ ID NO: 4004814 - DNA, 25 bp, Homo sapien
tgagtgtttgctgaggtgggatctg

SEQ ID NO: 4004815 - DNA, 25 bp, Homo sapien
gggtctgcgcatgagtccctggctg

SEQ ID NO: 4004816 - DNA, 25 bp, Homo sapien
gggatctgtgcatgagtccccggct

SEQ ID NO: 4004817 - DNA, 25 bp, Homo sapien
gtctgcgcatgagtccctggctgga

SEQ ID NO: 4004818 - DNA, 25 bp, Homo sapien
gctgagctcgggtctgtgtgcgcac

SEQ ID NO: 4004819 - DNA, 25 bp, Homo sapien
cccagctgaagtgagtggttgttga

SEQ ID NO: 4004820 - DNA, 25 bp, Homo sapien
cagctgaagtgagtggttgttgagc

SEQ ID NO: 4004821 - DNA, 25 bp, Homo sapien
tccccagctgaagtgagtggttgtt

SEQ ID NO: 4004822 - DNA, 25 bp, Homo sapien
gagtaagtgtttgctctgagcttcg

SEQ ID NO: 4004823 - DNA, 25 bp, Homo sapien
cagaattaattgaagatgaggcaaa

SEQ ID NO: 4004824 - DNA, 25 bp, Homo sapien
gaactttttggcacttatgataagg

SEQ ID NO: 4004825 - DNA, 25 bp, Homo sapien
ccagggtaggtccagcctattctaa

SEQ ID NO: 4004826 - DNA, 25 bp, Homo sapien
taaagacacgtgagcaaaacgacca

SEQ ID NO: 4004827 - DNA, 25 bp, Homo sapien
ccctctgagccaagtgccactagtt

SEQ ID NO: 4004828 - DNA, 25 bp, Homo sapien
tgagggtgcctacttcgcagggtcc

SEQ ID NO: 4004829 - DNA, 25 bp, Homo sapien
ggtccacaaaggcattgagtgctgg

SEQ ID NO: 4004830 - DNA, 25 bp, Homo sapien
cactagttcattcgtgggccgggtg

SEQ ID NO: 4004831 - DNA, 25 bp, Homo sapien
ctgcatcagaaacagcaagaacaga

SEQ ID NO: 4004832 - DNA, 25 bp, Homo sapien
tgcatcagaaacagcaagaacagag

SEQ ID NO: 4004833 - DNA, 25 bp, Homo sapien
gcatcagaaacagcaagaacagagg

SEQ ID NO: 4004834 - DNA, 25 bp, Homo sapien
tgtggagaggatcaggtcatgtggg

SEQ ID NO: 4004835 - DNA, 25 bp, Homo sapien
tgtgtggagaggatcaggtcatgtg

SEQ ID NO: 4004836 - DNA, 25 bp, Homo sapien
atcaggtcatgtggggagttactgc

SEQ ID NO: 4004837 - DNA, 25 bp, Homo sapien
gatgtgtggagaggatcaggtcatg

SEQ ID NO: 4004838 - DNA, 25 bp, Homo sapien
tttatcccgggagcagtagagatgc

SEQ ID NO: 4004839 - DNA, 25 bp, Homo sapien
gctcaaggttgaggcatgaaggttc

SEQ ID NO: 4004840 - DNA, 25 bp, Homo sapien
gaaggttcgtcttactggcctcaag

SEQ ID NO: 4004841 - DNA, 25 bp, Homo sapien
tggaaccaccaaacgggagggctca

SEQ ID NO: 4004842 - DNA, 25 bp, Homo sapien
ctgagagaagtgtgaggttgaagca

SEQ ID NO: 4004843 - DNA, 25 bp, Homo sapien
agagaagtgtgaggttgaagcagac

SEQ ID NO: 4004844 - DNA, 25 bp, Homo sapien
gagagaagtgtgaggttgaagcaga

SEQ ID NO: 4004845 - DNA, 25 bp, Homo sapien
gagaagtgtgaggttgaagcagaca

SEQ ID NO: 4004846 - DNA, 25 bp, Homo sapien
tgaggttgaaacagagacatccctg

SEQ ID NO: 4004847 - DNA, 25 bp, Homo sapien
ttgaaacagagacatccctgaaatg

SEQ ID NO: 4004848 - DNA, 25 bp, Homo sapien
ccaaggaagttgtgaggttgaaaca

SEQ ID NO: 4004849 - DNA, 25 bp, Homo sapien
gccaaggaagttgtgaggttgaaac

SEQ ID NO: 4004850 - DNA, 25 bp, Homo sapien
tgcttcaatattgccagtccatcct

SEQ ID NO: 4004851 - DNA, 25 bp, Homo sapien
agcagggcttagctccctcatgttg

SEQ ID NO: 4004852 - DNA, 25 bp, Homo sapien
tgcttgccggcaccgttttctagct

SEQ ID NO: 4004853 - DNA, 25 bp, Homo sapien
ctcatgttgtcttcgggctctccca

SEQ ID NO: 4004854 - DNA, 25 bp, Homo sapien
ttggcctctcagttactgtttgcat

SEQ ID NO: 4004855 - DNA, 25 bp, Homo sapien
gctgccttggatggcaggccccttc

SEQ ID NO: 4004856 - DNA, 25 bp, Homo sapien
ccttctgatgcctcttgtgctcact

SEQ ID NO: 4004857 - DNA, 25 bp, Homo sapien
gagaagggtccactactggcactgt

SEQ ID NO: 4004858 - DNA, 25 bp, Homo sapien
tggcgctgggccctgatctttgctg

SEQ ID NO: 4004859 - DNA, 25 bp, Homo sapien
ccccatgtgttctgtttcgcttcca

SEQ ID NO: 4004860 - DNA, 25 bp, Homo sapien
ttgctgtttctccaccccatgtgtt

SEQ ID NO: 4004861 - DNA, 25 bp, Homo sapien
atttcctggtgaggtcaccaccctc

SEQ ID NO: 4004862 - DNA, 25 bp, Homo sapien
ccagaaggagtcgtgtggccttgat

SEQ ID NO: 4004863 - DNA, 25 bp, Homo sapien
tcctgtcaaggttgggctcagagtt

SEQ ID NO: 4004864 - DNA, 25 bp, Homo sapien
gacgcgagtgaaagagatgtagtcc

SEQ ID NO: 4004865 - DNA, 25 bp, Homo sapien
tctttgaggcgggaagtggcttcaa

SEQ ID NO: 4004866 - DNA, 25 bp, Homo sapien
caggcaacataaagggctcgtcact

SEQ ID NO: 4004867 - DNA, 25 bp, Homo sapien
taaagggctcgtcactggcagtgtg

SEQ ID NO: 4004868 - DNA, 25 bp, Homo sapien
caacataaagggctcgtcactggca

SEQ ID NO: 4004869 - DNA, 25 bp, Homo sapien
ctgcaggcaacataaagggctcgtc

SEQ ID NO: 4004870 - DNA, 25 bp, Homo sapien
cagtggctcactttagcatttaggt

SEQ ID NO: 4004871 - DNA, 25 bp, Homo sapien
agtggctcactttagcatttaggtt

SEQ ID NO: 4004872 - DNA, 25 bp, Homo sapien
ctgacagtttttacttagatctgtt

SEQ ID NO: 4004873 - DNA, 25 bp, Homo sapien
gttctgacagtttttacttagatct

SEQ ID NO: 4004874 - DNA, 25 bp, Homo sapien
ttctgacagtttttacttagatctg

SEQ ID NO: 4004875 - DNA, 25 bp, Homo sapien
gacagtttttacttagatctgttaa

SEQ ID NO: 4004876 - DNA, 25 bp, Homo sapien
tctgagaggactctagtcgcggttt

SEQ ID NO: 4004877 - DNA, 25 bp, Homo sapien
ttctctgagaggactctagtcgcgg

SEQ ID NO: 4004878 - DNA, 25 bp, Homo sapien
gagaggactctagtcgcggtttgcc

SEQ ID NO: 4004879 - DNA, 25 bp, Homo sapien
gaggactctagtcgcggtttgcctt

SEQ ID NO: 4004880 - DNA, 25 bp, Homo sapien
ctaacattgcggctgctggtcctca

SEQ ID NO: 4004881 - DNA, 25 bp, Homo sapien
gctgctggtcctcatcccttgtacc

SEQ ID NO: 4004882 - DNA, 25 bp, Homo sapien
tgctggtcctcatcccttgtaccat

SEQ ID NO: 4004883 - DNA, 25 bp, Homo sapien
cggctgctggtcctcatcccttgta

SEQ ID NO: 4004884 - DNA, 25 bp, Homo sapien
tggagtaccgacgagctgtaacctg

SEQ ID NO: 4004885 - DNA, 25 bp, Homo sapien
cctgttcggatttaaaaggctctgt

SEQ ID NO: 4004886 - DNA, 25 bp, Homo sapien
taccgacgagctgtaacctgttcgg

SEQ ID NO: 4004887 - DNA, 25 bp, Homo sapien
ctgtacatcagggtggagtaccgac

SEQ ID NO: 4004888 - DNA, 25 bp, Homo sapien
ctccatcggtcagcaaagtcctgct

SEQ ID NO: 4004889 - DNA, 25 bp, Homo sapien
tcggtcagcaaagtcctgctaccct

SEQ ID NO: 4004890 - DNA, 25 bp, Homo sapien
gtcagcaaagtcctgctaccctgag

SEQ ID NO: 4004891 - DNA, 25 bp, Homo sapien
catcggtcagcaaagtcctgctacc

SEQ ID NO: 4004892 - DNA, 25 bp, Homo sapien
caatggaaaggttgtctctctttgg

SEQ ID NO: 4004893 - DNA, 25 bp, Homo sapien
gaggcaatggaaaggttgtctctct

SEQ ID NO: 4004894 - DNA, 25 bp, Homo sapien
attgacagaacctgctctcagatta

SEQ ID NO: 4004895 - DNA, 25 bp, Homo sapien
ccaccaagtgtgtttcggagttatt

SEQ ID NO: 4004896 - DNA, 25 bp, Homo sapien
aactctgggccattggtgagagtga

SEQ ID NO: 4004897 - DNA, 25 bp, Homo sapien
taactctgggccattggtgagagtg

SEQ ID NO: 4004898 - DNA, 25 bp, Homo sapien
actctgggccattggtgagagtgag

SEQ ID NO: 4004899 - DNA, 25 bp, Homo sapien
cttaactctgggccattggtgagag

SEQ ID NO: 4004900 - DNA, 25 bp, Homo sapien
cagtgatccttgaaggtggtggaaa

SEQ ID NO: 4004901 - DNA, 25 bp, Homo sapien
tgcacagtgatccttgaaggtggtg

SEQ ID NO: 4004902 - DNA, 25 bp, Homo sapien
cagggatggaaccatgagctccagg

SEQ ID NO: 4004903 - DNA, 25 bp, Homo sapien
tgctgcacagtgatccttgaaggtg

SEQ ID NO: 4004904 - DNA, 25 bp, Homo sapien
cctttattaaatggaatgtaacttg

SEQ ID NO: 4004905 - DNA, 25 bp, Homo sapien
cttaatgactcattgagagatgctg

SEQ ID NO: 4004906 - DNA, 25 bp, Homo sapien
agctgggccccacatcctagggtga

SEQ ID NO: 4004907 - DNA, 25 bp, Homo sapien
tcctagggtgacttgagaacctggt

SEQ ID NO: 4004908 - DNA, 25 bp, Homo sapien
gggcttaatgactcattgagagatg

SEQ ID NO: 4004909 - DNA, 25 bp, Homo sapien
gtgatgctaatgactccccgtgccg

SEQ ID NO: 4004910 - DNA, 25 bp, Homo sapien
tggttgtcatcacgccaccgatgga

SEQ ID NO: 4004911 - DNA, 25 bp, Homo sapien
ttggatgggagtggtaataacagcc

SEQ ID NO: 4004912 - DNA, 25 bp, Homo sapien
tgcaagtaaagcattcagcccagga

SEQ ID NO: 4004913 - DNA, 25 bp, Homo sapien
ccacgctggctcttggtgttcttcg

SEQ ID NO: 4004914 - DNA, 25 bp, Homo sapien
tgtgttcggccccacgctggctctt

SEQ ID NO: 4004915 - DNA, 25 bp, Homo sapien
tcttcgctgtcagcggtgctgtgac

SEQ ID NO: 4004916 - DNA, 25 bp, Homo sapien
gactgagacatccttggcccatttc

SEQ ID NO: 4004917 - DNA, 25 bp, Homo sapien
tgttgaaccgtaagcagcagcggcc

SEQ ID NO: 4004918 - DNA, 25 bp, Homo sapien
tgggagcctgcatgttcttgctaga

SEQ ID NO: 4004919 - DNA, 25 bp, Homo sapien
atcgtttgccggatgggaaccagca

SEQ ID NO: 4004920 - DNA, 25 bp, Homo sapien
tgctagattttacagccagcaggcc

SEQ ID NO: 4004921 - DNA, 25 bp, Homo sapien
tgagcaactcacaggtagaaccagg

SEQ ID NO: 4004922 - DNA, 25 bp, Homo sapien
ccgagggttgcgctgcttgttctta

SEQ ID NO: 4004923 - DNA, 25 bp, Homo sapien
gagggaggcatgacttgggagggca

SEQ ID NO: 4004924 - DNA, 25 bp, Homo sapien
ccaggacagtagtcagggctgttta

SEQ ID NO: 4004925 - DNA, 25 bp, Homo sapien
cttccagtggggcagacacagatgg

SEQ ID NO: 4004926 - DNA, 25 bp, Homo sapien
ctgcctcctccaggtctcagcttcc

SEQ ID NO: 4004927 - DNA, 25 bp, Homo sapien
cctcctccaggtctcagcttcccca

SEQ ID NO: 4004928 - DNA, 25 bp, Homo sapien
ctccgctgcctcctccaggtctcag

SEQ ID NO: 4004929 - DNA, 25 bp, Homo sapien
caccatcccggttccctccgctgcc

SEQ ID NO: 4004930 - DNA, 25 bp, Homo sapien
ctggagacctctattaggatgcagt

SEQ ID NO: 4004931 - DNA, 25 bp, Homo sapien
tcctgtgctggagacctctattagg

SEQ ID NO: 4004932 - DNA, 25 bp, Homo sapien
gagacctctattaggatgcagtcac

SEQ ID NO: 4004933 - DNA, 25 bp, Homo sapien
gtgctggagacctctattaggatgc

SEQ ID NO: 4004934 - DNA, 25 bp, Homo sapien
agaccaccgtcaggatgcagtcact

SEQ ID NO: 4004935 - DNA, 25 bp, Homo sapien
gaccaccgtcaggacttggtcactg

SEQ ID NO: 4004936 - DNA, 25 bp, Homo sapien
gtcgctggggaccaccgtcaggact

SEQ ID NO: 4004937 - DNA, 25 bp, Homo sapien
cactggagaccaccgtcaggatgca

SEQ ID NO: 4004938 - DNA, 25 bp, Homo sapien
actggagtcactagagtcatttctg

SEQ ID NO: 4004939 - DNA, 25 bp, Homo sapien
ctgtggcattttaatgtcgttactt

SEQ ID NO: 4004940 - DNA, 25 bp, Homo sapien
ggtcactggagtcactagagtcatt

SEQ ID NO: 4004941 - DNA, 25 bp, Homo sapien
cattttaatgtcgttactttgagtc

SEQ ID NO: 4004942 - DNA, 25 bp, Homo sapien
aacctgtggcccattgttctcaggt

SEQ ID NO: 4004943 - DNA, 25 bp, Homo sapien
tatcttgtgtgaggttgacatcttg

SEQ ID NO: 4004944 - DNA, 25 bp, Homo sapien
tggcccattgttctcaggtagtgaa

SEQ ID NO: 4004945 - DNA, 25 bp, Homo sapien
ggtagtgaagcagataaaatgcatt

SEQ ID NO: 4004946 - DNA, 25 bp, Homo sapien
cagcctttgtagcaggatgggcgtc

SEQ ID NO: 4004947 - DNA, 25 bp, Homo sapien
tactgtgggccaaggtccgaggcat

SEQ ID NO: 4004948 - DNA, 25 bp, Homo sapien
tcagtatcagtgaaatcgcagcccc

SEQ ID NO: 4004949 - DNA, 25 bp, Homo sapien
tcggaggtgtcatcctataggaacc

SEQ ID NO: 4004950 - DNA, 25 bp, Homo sapien
ctgtgtgcccagattcctcgttctc

SEQ ID NO: 4004951 - DNA, 25 bp, Homo sapien
cccagaggccttggttctctgactt

SEQ ID NO: 4004952 - DNA, 25 bp, Homo sapien
actgtcttaccacattcaaaccttt

SEQ ID NO: 4004953 - DNA, 25 bp, Homo sapien
ttggttctctgacttctcggtcagc

SEQ ID NO: 4004954 - DNA, 25 bp, Homo sapien
cactcagcagcccagtgtaggtctg

SEQ ID NO: 4004955 - DNA, 25 bp, Homo sapien
tccacacactgggagcaattcagtt

SEQ ID NO: 4004956 - DNA, 25 bp, Homo sapien
ttccctgcacttgcctgcaaaggct

SEQ ID NO: 4004957 - DNA, 25 bp, Homo sapien
gttggccactccaggcatgctagcc

SEQ ID NO: 4004958 - DNA, 25 bp, Homo sapien
actgatgctgttattaacattatta

SEQ ID NO: 4004959 - DNA, 25 bp, Homo sapien
taacattattactattatcctcatc

SEQ ID NO: 4004960 - DNA, 25 bp, Homo sapien
tgctgttactgatgctgttattaac

SEQ ID NO: 4004961 - DNA, 25 bp, Homo sapien
gttactgatgctgttattaacatta

SEQ ID NO: 4004962 - DNA, 25 bp, Homo sapien
ctcctgggcccgctttgagaccctc

SEQ ID NO: 4004963 - DNA, 25 bp, Homo sapien
acttctctcctgggcccgctttgag

SEQ ID NO: 4004964 - DNA, 25 bp, Homo sapien
cctgggcccgctttgagaccctcat

SEQ ID NO: 4004965 - DNA, 25 bp, Homo sapien
ttctctcctgggcccgctttgagac

SEQ ID NO: 4004966 - DNA, 25 bp, Homo sapien
gaggttgactgtcgcttcactaccg

SEQ ID NO: 4004967 - DNA, 25 bp, Homo sapien
ctttgggcctgtcatcgactgagca

SEQ ID NO: 4004968 - DNA, 25 bp, Homo sapien
tgagcattccgtcagcgaatatgcg

SEQ ID NO: 4004969 - DNA, 25 bp, Homo sapien
gaatatgcgtcagaaaacaaaccct

SEQ ID NO: 4004970 - DNA, 25 bp, Homo sapien
catggggatatgagtcacccagaga

SEQ ID NO: 4004971 - DNA, 25 bp, Homo sapien
gggatatgagtcacccagagaaaaa

SEQ ID NO: 4004972 - DNA, 25 bp, Homo sapien
cactgcgtatatcatggggatatga

SEQ ID NO: 4004973 - DNA, 25 bp, Homo sapien
cttcactgcgtatatcatggggata

SEQ ID NO: 4004974 - DNA, 25 bp, Homo sapien
tggctgctattgtaacatggtcatt

SEQ ID NO: 4004975 - DNA, 25 bp, Homo sapien
ggaaggtgttggctgctattgtaac

SEQ ID NO: 4004976 - DNA, 25 bp, Homo sapien
tattgtaacatggtcatttctgtgg

SEQ ID NO: 4004977 - DNA, 25 bp, Homo sapien
caaccaccaggaaggtgttggctgc

SEQ ID NO: 4004978 - DNA, 25 bp, Homo sapien
gagcatcattgtctccaggggggta

SEQ ID NO: 4004979 - DNA, 25 bp, Homo sapien
ccctccctggcttgcctgtgtatat

SEQ ID NO: 4004980 - DNA, 25 bp, Homo sapien
gcagctgctgctctatgaagcctcc

SEQ ID NO: 4004981 - DNA, 25 bp, Homo sapien
ctgttgtaggggccaggagagcatc

SEQ ID NO: 4004982 - DNA, 25 bp, Homo sapien
taggtgccccttcccttactgctag

SEQ ID NO: 4004983 - DNA, 25 bp, Homo sapien
tcccttactgctagggtccccctga

SEQ ID NO: 4004984 - DNA, 25 bp, Homo sapien
cttactgctagggtccccctgaggg

SEQ ID NO: 4004985 - DNA, 25 bp, Homo sapien
gtggcgttgacagcgcctttccccg

SEQ ID NO: 4004986 - DNA, 25 bp, Homo sapien
ctttgagatgctcccagccctccat

SEQ ID NO: 4004987 - DNA, 25 bp, Homo sapien
gatgcatggcgagctgattgagttc

SEQ ID NO: 4004988 - DNA, 25 bp, Homo sapien
gagctcatcgatctccggggaccgg

SEQ ID NO: 4004989 - DNA, 25 bp, Homo sapien
gattgagttcaacgagcgcctgcac

SEQ ID NO: 4004990 - DNA, 25 bp, Homo sapien
aaggaagccctcgtgtcccagatga

SEQ ID NO: 4004991 - DNA, 25 bp, Homo sapien
tggagctattttccgacgagtgcat

SEQ ID NO: 4004992 - DNA, 25 bp, Homo sapien
catggagctattttccgacgagtgc

SEQ ID NO: 4004993 - DNA, 25 bp, Homo sapien
tcatggagctattttccgacgagtg

SEQ ID NO: 4004994 - DNA, 25 bp, Homo sapien
atggagctattttccgacgagtgca

SEQ ID NO: 4004995 - DNA, 25 bp, Homo sapien
gctgacccctgatgagtgtttctgg

SEQ ID NO: 4004996 - DNA, 25 bp, Homo sapien
cactcagggagcatatgacgtatac

SEQ ID NO: 4004997 - DNA, 25 bp, Homo sapien
tacacctggagtatctctggcaaca

SEQ ID NO: 4004998 - DNA, 25 bp, Homo sapien
tcagagcctggaacacgtaatcact

SEQ ID NO: 4004999 - DNA, 25 bp, Homo sapien
atggcttgctcatcaccatgggtgg

SEQ ID NO: 4005000 - DNA, 25 bp, Homo sapien
catggcttgctcatcaccatgggtg

SEQ ID NO: 4005001 - DNA, 25 bp, Homo sapien
ttgagtttgccgctcacaacgtcac

SEQ ID NO: 4005002 - DNA, 25 bp, Homo sapien
gcatggtttgagtttgccgctcaca

SEQ ID NO: 4005003 - DNA, 25 bp, Homo sapien
tggtttgagtttgccgctcacaacg

SEQ ID NO: 4005004 - DNA, 25 bp, Homo sapien
ctcttctccagcatatgtttgtgaa

SEQ ID NO: 4005005 - DNA, 25 bp, Homo sapien
tggtattacctacaccccagtgttc

SEQ ID NO: 4005006 - DNA, 25 bp, Homo sapien
ccttggtattacctacaccccagtg

SEQ ID NO: 4005007 - DNA, 25 bp, Homo sapien
gtgggcaccaccttggtattaccta

SEQ ID NO: 4005008 - DNA, 25 bp, Homo sapien
ctggaaataacctcttcttgagggg

SEQ ID NO: 4005009 - DNA, 25 bp, Homo sapien
tcgccttcgccctatgtcttttcgt

SEQ ID NO: 4005010 - DNA, 25 bp, Homo sapien
gccttcgccctatgtcttttcgtct

SEQ ID NO: 4005011 - DNA, 25 bp, Homo sapien
tctcgccttcgccctatgtcttttc

SEQ ID NO: 4005012 - DNA, 25 bp, Homo sapien
cttcgccctatgtcttttcgtctgc

SEQ ID NO: 4005013 - DNA, 25 bp, Homo sapien
tcatgaatatatgtcgacttcctcc

SEQ ID NO: 4005014 - DNA, 25 bp, Homo sapien
ggaccgctcactttgtctaatctta

SEQ ID NO: 4005015 - DNA, 25 bp, Homo sapien
caatagtgagttttggtaggtacgt

SEQ ID NO: 4005016 - DNA, 25 bp, Homo sapien
ttgagaaagcccctagtggcgctgt

SEQ ID NO: 4005017 - DNA, 25 bp, Homo sapien
tgttgctctagtaacgggctttgcc

SEQ ID NO: 4005018 - DNA, 25 bp, Homo sapien
cttgtgtgtacagcaccgagggtgt

SEQ ID NO: 4005019 - DNA, 25 bp, Homo sapien
ttgctccagcatgattcaggaatcc

SEQ ID NO: 4005020 - DNA, 25 bp, Homo sapien
tccttgcacctgaagactgccgcgt

SEQ ID NO: 4005021 - DNA, 25 bp, Homo sapien
tattcatgttggggcagctgctggg

SEQ ID NO: 4005022 - DNA, 25 bp, Homo sapien
gcagctgctggggtcgggggtggcg

SEQ ID NO: 4005023 - DNA, 25 bp, Homo sapien
agctgctggggtcgggggtggcggt

SEQ ID NO: 4005024 - DNA, 25 bp, Homo sapien
tgttggggcagctgctggggtcggg

SEQ ID NO: 4005025 - DNA, 25 bp, Homo sapien
aacggcagagtccggcggagggcag

SEQ ID NO: 4005026 - DNA, 25 bp, Homo sapien
gaacggcagagtccggcggagggca

SEQ ID NO: 4005027 - DNA, 25 bp, Homo sapien
ggaacggcagagtccggcggagggc

SEQ ID NO: 4005028 - DNA, 25 bp, Homo sapien
ctctggcttcgttcccagcctttcc

SEQ ID NO: 4005029 - DNA, 25 bp, Homo sapien
tctggcttcgttcccagcctttccc

SEQ ID NO: 4005030 - DNA, 25 bp, Homo sapien
ctggcttcgttcccagcctttccca

SEQ ID NO: 4005031 - DNA, 25 bp, Homo sapien
tggcttcgttcccagcctttcccac

SEQ ID NO: 4005032 - DNA, 25 bp, Homo sapien
cattgtggtcatcagagagctggaa

SEQ ID NO: 4005033 - DNA, 25 bp, Homo sapien
cccttcaagttctgcattgtggtca

SEQ ID NO: 4005034 - DNA, 25 bp, Homo sapien
caactttcttatttgacccttcaag

SEQ ID NO: 4005035 - DNA, 25 bp, Homo sapien
ttgacccttcaagttctgcattgtg

SEQ ID NO: 4005036 - DNA, 25 bp, Homo sapien
gaggaatgttggtatcccaggaaaa

SEQ ID NO: 4005037 - DNA, 25 bp, Homo sapien
cagggtgttgtcttggcctgaggaa

SEQ ID NO: 4005038 - DNA, 25 bp, Homo sapien
ctgaggaatgttggtatcccaggaa

SEQ ID NO: 4005039 - DNA, 25 bp, Homo sapien
ggcctgaggaatgttggtatcccag

SEQ ID NO: 4005040 - DNA, 25 bp, Homo sapien
gccctcaagttctcttttacccaca

SEQ ID NO: 4005041 - DNA, 25 bp, Homo sapien
ccctcaagttctcttttacccacag

SEQ ID NO: 4005042 - DNA, 25 bp, Homo sapien
ctgttgtataccaggtagacaggag

SEQ ID NO: 4005043 - DNA, 25 bp, Homo sapien
cttgagagctttccaccccggcgtt

SEQ ID NO: 4005044 - DNA, 25 bp, Homo sapien
cagccgtttgctgtttgatttgtga

SEQ ID NO: 4005045 - DNA, 25 bp, Homo sapien
tcctgtgttgcaggccaagccagac

SEQ ID NO: 4005046 - DNA, 25 bp, Homo sapien
tgggcagctgatactggtgacaagg

SEQ ID NO: 4005047 - DNA, 25 bp, Homo sapien
aatatttttcacacgggagagagcg

SEQ ID NO: 4005048 - DNA, 25 bp, Homo sapien
taatatttttcacacgggagagagc

SEQ ID NO: 4005049 - DNA, 25 bp, Homo sapien
gtaatatttttcacacgggagagag

SEQ ID NO: 4005050 - DNA, 25 bp, Homo sapien
ttctggtaaaagtagaagtcctgca

SEQ ID NO: 4005051 - DNA, 25 bp, Homo sapien
tctggtaaaagtagaagtcctgcaa

SEQ ID NO: 4005052 - DNA, 25 bp, Homo sapien
tttctggtaaaagtagaagtcctgc

SEQ ID NO: 4005053 - DNA, 25 bp, Homo sapien
atttctggtaaaagtagaagtcctg

SEQ ID NO: 4005054 - DNA, 25 bp, Homo sapien
tttggccgcagcattgagtctctga

SEQ ID NO: 4005055 - DNA, 25 bp, Homo sapien
gatggcttcttggtactccgcactg

SEQ ID NO: 4005056 - DNA, 25 bp, Homo sapien
cctgggaagagaagcgctgtatgcc

SEQ ID NO: 4005057 - DNA, 25 bp, Homo sapien
tccgcactgtctgtctttggccgca

SEQ ID NO: 4005058 - DNA, 25 bp, Homo sapien
ccacgtgtcgggaaagtgcttccct

SEQ ID NO: 4005059 - DNA, 25 bp, Homo sapien
gattcccacgtgtcgggaaagtgct

SEQ ID NO: 4005060 - DNA, 25 bp, Homo sapien
aggattcccacgtgtcgggaaagtg

SEQ ID NO: 4005061 - DNA, 25 bp, Homo sapien
ttggaggattcccacgtgtcgggaa

SEQ ID NO: 4005062 - DNA, 25 bp, Homo sapien
gcagcagagttgagattcctcgtcc

SEQ ID NO: 4005063 - DNA, 25 bp, Homo sapien
tgttgtctgggccaagtcagtccag

SEQ ID NO: 4005064 - DNA, 25 bp, Homo sapien
tgggccaagtcagtccagcagcaga

SEQ ID NO: 4005065 - DNA, 25 bp, Homo sapien
cagagttgagattcctcgtcccatc

SEQ ID NO: 4005066 - DNA, 25 bp, Homo sapien
cctcagccttgtggggttcttttgc

SEQ ID NO: 4005067 - DNA, 25 bp, Homo sapien
catccagtagcccagtctgggtcct

SEQ ID NO: 4005068 - DNA, 25 bp, Homo sapien
ctgcatccagtagcccagtctgggt

SEQ ID NO: 4005069 - DNA, 25 bp, Homo sapien
gcagctgcatccagtagcccagtct

SEQ ID NO: 4005070 - DNA, 25 bp, Homo sapien
cagccactccatggtgaggatgcac

SEQ ID NO: 4005071 - DNA, 25 bp, Homo sapien
gcagagctagggagcagcacgctat

SEQ ID NO: 4005072 - DNA, 25 bp, Homo sapien
ggatgcactttgttggttcccctgg

SEQ ID NO: 4005073 - DNA, 25 bp, Homo sapien
tatctgtgggaacagcgacgccaca

SEQ ID NO: 4005074 - DNA, 25 bp, Homo sapien
gacgtagctgaaggttgattttcca

SEQ ID NO: 4005075 - DNA, 25 bp, Homo sapien
aagctcttttcctggcgatgcccga

SEQ ID NO: 4005076 - DNA, 25 bp, Homo sapien
caggaggccgcagcttaaggagctc

SEQ ID NO: 4005077 - DNA, 25 bp, Homo sapien
tatgttggtgatgcagacgtagctg

SEQ ID NO: 4005078 - DNA, 25 bp, Homo sapien
acacagcaccgtttttagtaccagg

SEQ ID NO: 4005079 - DNA, 25 bp, Homo sapien
tcagtgcgatgcgtgacatttccgt

SEQ ID NO: 4005080 - DNA, 25 bp, Homo sapien
ttccgtgtgtaaggtgtgctgctgc

SEQ ID NO: 4005081 - DNA, 25 bp, Homo sapien
gtaccaggagacagcgacagcttgg

SEQ ID NO: 4005082 - DNA, 25 bp, Homo sapien
ctggtggagtggcgcgcgagcacct

SEQ ID NO: 4005083 - DNA, 25 bp, Homo sapien
gcgcgcgagcacctggctgctttcc

SEQ ID NO: 4005084 - DNA, 25 bp, Homo sapien
gtggcgcgcgagcacctggctgctt

SEQ ID NO: 4005085 - DNA, 25 bp, Homo sapien
ggagtggcgcgcgagcacctggctg

SEQ ID NO: 4005086 - DNA, 25 bp, Homo sapien
catttcaggaaatcgcctttgttgc

SEQ ID NO: 4005087 - DNA, 25 bp, Homo sapien
tcaggaaatcgcctttgttgctcag

SEQ ID NO: 4005088 - DNA, 25 bp, Homo sapien
ccatttcaggaaatcgcctttgttg

SEQ ID NO: 4005089 - DNA, 25 bp, Homo sapien
atgccatttcaggaaatcgcctttg

SEQ ID NO: 4005090 - DNA, 25 bp, Homo sapien
gacccagagtccctgggaggggtca

SEQ ID NO: 4005091 - DNA, 25 bp, Homo sapien
ccccaggacccagagtccctgggag

SEQ ID NO: 4005092 - DNA, 25 bp, Homo sapien
tcatagccccaggacccagagtccc

SEQ ID NO: 4005093 - DNA, 25 bp, Homo sapien
caggacccagagtccctgggagggg

SEQ ID NO: 4005094 - DNA, 25 bp, Homo sapien
agcagcctcagagattcacctcttg

SEQ ID NO: 4005095 - DNA, 25 bp, Homo sapien
tgaaatctcaaaaatgcacgctggc

SEQ ID NO: 4005096 - DNA, 25 bp, Homo sapien
ccttgttgcttcaggtgaaatctca

SEQ ID NO: 4005097 - DNA, 25 bp, Homo sapien
tggctgctggcacttaatgtctttt

SEQ ID NO: 4005098 - DNA, 25 bp, Homo sapien
gcatcaggtgacttgaaggcagcca

SEQ ID NO: 4005099 - DNA, 25 bp, Homo sapien
gatgcatcaggtgacttgaaggcag

SEQ ID NO: 4005100 - DNA, 25 bp, Homo sapien
ttgatgcatcaggtgacttgaaggc

SEQ ID NO: 4005101 - DNA, 25 bp, Homo sapien
tgcatcaggtgacttgaaggcagcc

SEQ ID NO: 4005102 - DNA, 25 bp, Homo sapien
tattaggacgtcttggaatcaggaa

SEQ ID NO: 4005103 - DNA, 25 bp, Homo sapien
gaatcaggaagtgtctattcactct

SEQ ID NO: 4005104 - DNA, 25 bp, Homo sapien
caagttgactatagatgaatgggtt

SEQ ID NO: 4005105 - DNA, 25 bp, Homo sapien
ttgcatctctatgcctgtccttctg

SEQ ID NO: 4005106 - DNA, 25 bp, Homo sapien
gaacctagggtcgatcagggaccat

SEQ ID NO: 4005107 - DNA, 25 bp, Homo sapien
tggagaaaacccagaacacatgagg

SEQ ID NO: 4005108 - DNA, 25 bp, Homo sapien
tgcctggacttgatacagcatcccc

SEQ ID NO: 4005109 - DNA, 25 bp, Homo sapien
taagcaaaccgagatgagctccacc

SEQ ID NO: 4005110 - DNA, 25 bp, Homo sapien
tggtgtcgggaagaggtagcttgca

SEQ ID NO: 4005111 - DNA, 25 bp, Homo sapien
tgtcgggaagaggtagcttgcatct

SEQ ID NO: 4005112 - DNA, 25 bp, Homo sapien
ctggggactggtgtcgggaagaggt

SEQ ID NO: 4005113 - DNA, 25 bp, Homo sapien
gactggtgtcgggaagaggtagctt

SEQ ID NO: 4005114 - DNA, 25 bp, Homo sapien
gacttcccagttttcgctgctatga

SEQ ID NO: 4005115 - DNA, 25 bp, Homo sapien
gcaaagtctttatttgtgcagaagg

SEQ ID NO: 4005116 - DNA, 25 bp, Homo sapien
taggtgagacttttctgacttccca

SEQ ID NO: 4005117 - DNA, 25 bp, Homo sapien
tcatccagtaggctttgcaaagtct

SEQ ID NO: 4005118 - DNA, 25 bp, Homo sapien
aggaatttccagaggtggttttgct

SEQ ID NO: 4005119 - DNA, 25 bp, Homo sapien
cttggaaggaatttccagaggtggt

SEQ ID NO: 4005120 - DNA, 25 bp, Homo sapien
aatttccagaggtggttttgctgct

SEQ ID NO: 4005121 - DNA, 25 bp, Homo sapien
tgcagctgggctgacttggaaggaa

SEQ ID NO: 4005122 - DNA, 25 bp, Homo sapien
gaggggtagaggcacgtttggcttc

SEQ ID NO: 4005123 - DNA, 25 bp, Homo sapien
tgacgaggggtagaggcacgtttgg

SEQ ID NO: 4005124 - DNA, 25 bp, Homo sapien
ctgtgacgaggggtagaggcacgtt

SEQ ID NO: 4005125 - DNA, 25 bp, Homo sapien
ggtagaggcacgtttggcttcctgc

SEQ ID NO: 4005126 - DNA, 25 bp, Homo sapien
tcagcggtcgttgtcgctctgactt

SEQ ID NO: 4005127 - DNA, 25 bp, Homo sapien
tgaagatgccccttattaggacgcc

SEQ ID NO: 4005128 - DNA, 25 bp, Homo sapien
gactcagggactcgccccttgtgat

SEQ ID NO: 4005129 - DNA, 25 bp, Homo sapien
gggtggaggcggaggcactttctct

SEQ ID NO: 4005130 - DNA, 25 bp, Homo sapien
tgacagtcccatgctctgagcagcc

SEQ ID NO: 4005131 - DNA, 25 bp, Homo sapien
tagggcgaagatccatgctctcctt

SEQ ID NO: 4005132 - DNA, 25 bp, Homo sapien
ccccggttattgtatttgacatgta

SEQ ID NO: 4005133 - DNA, 25 bp, Homo sapien
tccaaatccataagagctgtagatg

SEQ ID NO: 4005134 - DNA, 25 bp, Homo sapien
ctcaggcttgtccttaacgcagtgt

SEQ ID NO: 4005135 - DNA, 25 bp, Homo sapien
ccaccaaatccagctgaaaccttct

SEQ ID NO: 4005136 - DNA, 25 bp, Homo sapien
tcaaatctctttcctcaggcttgtc

SEQ ID NO: 4005137 - DNA, 25 bp, Homo sapien
ccttaacgcagtgtgtatctgtttt

SEQ ID NO: 4005138 - DNA, 25 bp, Homo sapien
caggcagctgctccaatagcctcag

SEQ ID NO: 4005139 - DNA, 25 bp, Homo sapien
ccagaatatgttgggtgattgcatg

SEQ ID NO: 4005140 - DNA, 25 bp, Homo sapien
gctgctccaatagcctcagcatgta

SEQ ID NO: 4005141 - DNA, 25 bp, Homo sapien
gcctcagcatgtatctgtaaatttg

SEQ ID NO: 4005142 - DNA, 25 bp, Homo sapien
tgcctccgggactgttgattctgtt

SEQ ID NO: 4005143 - DNA, 25 bp, Homo sapien
cataccgcccaggacgagaattcct

SEQ ID NO: 4005144 - DNA, 25 bp, Homo sapien
tctttggcttggttcgcccagtgcc

SEQ ID NO: 4005145 - DNA, 25 bp, Homo sapien
tcatggcattgtgccgtagtcctca

SEQ ID NO: 4005146 - DNA, 25 bp, Homo sapien
gaattacagggtcatgtattctact

SEQ ID NO: 4005147 - DNA, 25 bp, Homo sapien
gatggatacagggatgaggtggacc

SEQ ID NO: 4005148 - DNA, 25 bp, Homo sapien
caaaatatggtagttttactgaggg

SEQ ID NO: 4005149 - DNA, 25 bp, Homo sapien
gaccaaatattgatagattgctcca

SEQ ID NO: 4005150 - DNA, 25 bp, Homo sapien
tcctgaatcttgtggtccccctaag

SEQ ID NO: 4005151 - DNA, 25 bp, Homo sapien
agctactgtctttggcatcttcagg

SEQ ID NO: 4005152 - DNA, 25 bp, Homo sapien
tggtccccctaagctactgtctttg

SEQ ID NO: 4005153 - DNA, 25 bp, Homo sapien
gaatcttgtggtccccctaagctac

SEQ ID NO: 4005154 - DNA, 25 bp, Homo sapien
ttgctccctggtgttcggctctctt

SEQ ID NO: 4005155 - DNA, 25 bp, Homo sapien
tgttcggctctctttggaatcaggg

SEQ ID NO: 4005156 - DNA, 25 bp, Homo sapien
cctggtgttcggctctctttggaat

SEQ ID NO: 4005157 - DNA, 25 bp, Homo sapien
gactttcgcaacatcctccaggcca

SEQ ID NO: 4005158 - DNA, 25 bp, Homo sapien
ctgacagattgtgactgagcccctg

SEQ ID NO: 4005159 - DNA, 25 bp, Homo sapien
ccagggcacgtgatgctaggtggtt

SEQ ID NO: 4005160 - DNA, 25 bp, Homo sapien
gacgagtgccccacctgatgtatgg

SEQ ID NO: 4005161 - DNA, 25 bp, Homo sapien
ggtttttctcgttgctgacagattg

SEQ ID NO: 4005162 - DNA, 25 bp, Homo sapien
cttgcttggtcttcggtccagaagg

SEQ ID NO: 4005163 - DNA, 25 bp, Homo sapien
gtccagaaggagcatgacggtctca

SEQ ID NO: 4005164 - DNA, 25 bp, Homo sapien
ggccccgatgctcactgcccagggt

SEQ ID NO: 4005165 - DNA, 25 bp, Homo sapien
actgcccagggtgtctttgttacaa

SEQ ID NO: 4005166 - DNA, 25 bp, Homo sapien
gtaagtactgctcccacggacatgg

SEQ ID NO: 4005167 - DNA, 25 bp, Homo sapien
tgttccaggtgccaaagtggaggtt

SEQ ID NO: 4005168 - DNA, 25 bp, Homo sapien
ctgcgcagcgtcatgaacaaagtca

SEQ ID NO: 4005169 - DNA, 25 bp, Homo sapien
gatgcccttcttcgtgtaagtactg

SEQ ID NO: 4005170 - DNA, 25 bp, Homo sapien
gctgacgaatctccatgtgatcgtg

SEQ ID NO: 4005171 - DNA, 25 bp, Homo sapien
gacgaatctccatgtgatcgtgtcc

SEQ ID NO: 4005172 - DNA, 25 bp, Homo sapien
ccgtgctgacgaatctccatgtgat

SEQ ID NO: 4005173 - DNA, 25 bp, Homo sapien
gaatctccatgtgatcgtgtccttt

SEQ ID NO: 4005174 - DNA, 25 bp, Homo sapien
gccactgatcagcttcaggaatggt

SEQ ID NO: 4005175 - DNA, 25 bp, Homo sapien
tgtggacatccacgttactcatgat

SEQ ID NO: 4005176 - DNA, 25 bp, Homo sapien
gcattcggtttgcacactgtgccac

SEQ ID NO: 4005177 - DNA, 25 bp, Homo sapien
tgtgaacagggccactgatcagctt

SEQ ID NO: 4005178 - DNA, 25 bp, Homo sapien
catgacttctaagtaatctgccatc

SEQ ID NO: 4005179 - DNA, 25 bp, Homo sapien
tttgacgtgtccatatttcactgtg

SEQ ID NO: 4005180 - DNA, 25 bp, Homo sapien
ttcactgtgttctgtaagaggcatc

SEQ ID NO: 4005181 - DNA, 25 bp, Homo sapien
ttaaattccatttgacgtgtccata

SEQ ID NO: 4005182 - DNA, 25 bp, Homo sapien
gcttcagtgatttgccgtgctgtca

SEQ ID NO: 4005183 - DNA, 25 bp, Homo sapien
cgcaaatcggtgacagcttcagtga

SEQ ID NO: 4005184 - DNA, 25 bp, Homo sapien
tcagtgagactggaccgcaaatcgg

SEQ ID NO: 4005185 - DNA, 25 bp, Homo sapien
cgtggagggaggctcggactccaag

SEQ ID NO: 4005186 - DNA, 25 bp, Homo sapien
cttgaacagttaagaggtttccaga

SEQ ID NO: 4005187 - DNA, 25 bp, Homo sapien
gactgtagtctggaacatctcgatg

SEQ ID NO: 4005188 - DNA, 25 bp, Homo sapien
caggtagagctacaggcttgatgtg

SEQ ID NO: 4005189 - DNA, 25 bp, Homo sapien
tctcgatggatacacattttggcag

SEQ ID NO: 4005190 - DNA, 25 bp, Homo sapien
ggatgaggacggtgagagttgagta

SEQ ID NO: 4005191 - DNA, 25 bp, Homo sapien
agagttgagtaggtgactaggctgc

SEQ ID NO: 4005192 - DNA, 25 bp, Homo sapien
tgaggacggtgagagttgagtaggt

SEQ ID NO: 4005193 - DNA, 25 bp, Homo sapien
acggtgagagttgagtaggtgacta

SEQ ID NO: 4005194 - DNA, 25 bp, Homo sapien
agatgccgagttttgaggctgaata

SEQ ID NO: 4005195 - DNA, 25 bp, Homo sapien
ggagcagcagaagatgccgagtttt

SEQ ID NO: 4005196 - DNA, 25 bp, Homo sapien
gcagaagatgccgagttttgaggct

SEQ ID NO: 4005197 - DNA, 25 bp, Homo sapien
gcagcagaagatgccgagttttgag

SEQ ID NO: 4005198 - DNA, 25 bp, Homo sapien
tagccccagagcgttaagaacagca

SEQ ID NO: 4005199 - DNA, 25 bp, Homo sapien
gcagcacggctgtggtggcatccct

SEQ ID NO: 4005200 - DNA, 25 bp, Homo sapien
agcgttaagaacagcaggccgtcct

SEQ ID NO: 4005201 - DNA, 25 bp, Homo sapien
tgctgccaagttggctgcggaccca

SEQ ID NO: 4005202 - DNA, 25 bp, Homo sapien
aacaagtcatcaagggcaggaaggg

SEQ ID NO: 4005203 - DNA, 25 bp, Homo sapien
gggagagtgccaccaacaagtcatc

SEQ ID NO: 4005204 - DNA, 25 bp, Homo sapien
gatggtgcctttgcaagccacagcc

SEQ ID NO: 4005205 - DNA, 25 bp, Homo sapien
gggaaacgatggtgcctttgcaagc

SEQ ID NO: 4005206 - DNA, 25 bp, Homo sapien
tcgacagctctgcttagaaacacgg

SEQ ID NO: 4005207 - DNA, 25 bp, Homo sapien
ctgcttagaaacacggccgcctttg

SEQ ID NO: 4005208 - DNA, 25 bp, Homo sapien
acacggccgcctttgccaggcaggg

SEQ ID NO: 4005209 - DNA, 25 bp, Homo sapien
ggagggacaggttcaactcgacagc

SEQ ID NO: 4005210 - DNA, 25 bp, Homo sapien
ggcagctgattctcctgtggagtgc

SEQ ID NO: 4005211 - DNA, 25 bp, Homo sapien
gctttgcagaatccgtagcagcttc

SEQ ID NO: 4005212 - DNA, 25 bp, Homo sapien
gctgctgttttgcccaaagggcagc

SEQ ID NO: 4005213 - DNA, 25 bp, Homo sapien
gtggagtgctttgcagaatccgtag

SEQ ID NO: 4005214 - DNA, 25 bp, Homo sapien
gtcctctgtgtagccagcggctgca

SEQ ID NO: 4005215 - DNA, 25 bp, Homo sapien
tctgtgtagccagcggctgcactcg

SEQ ID NO: 4005216 - DNA, 25 bp, Homo sapien
tgtagccagcggctgcactcggttg

SEQ ID NO: 4005217 - DNA, 25 bp, Homo sapien
gtagccagcggctgcactcggttgc

SEQ ID NO: 4005218 - DNA, 25 bp, Homo sapien
cctctggaggtcctcagagtataga

SEQ ID NO: 4005219 - DNA, 25 bp, Homo sapien
tcctctgtgccccttgtaaacaaag

SEQ ID NO: 4005220 - DNA, 25 bp, Homo sapien
aagccaggcttggtcacgctcgtct

SEQ ID NO: 4005221 - DNA, 25 bp, Homo sapien
tcctgcattgtaactgtgggtcctc

SEQ ID NO: 4005222 - DNA, 25 bp, Homo sapien
gagccctattggtgctgtccaaggt

SEQ ID NO: 4005223 - DNA, 25 bp, Homo sapien
gggagccctattggtgctgtccaag

SEQ ID NO: 4005224 - DNA, 25 bp, Homo sapien
cctattggtgctgtccaaggtccta

SEQ ID NO: 4005225 - DNA, 25 bp, Homo sapien
tggtgctgtccaaggtcctacccat

SEQ ID NO: 4005226 - DNA, 25 bp, Homo sapien
cttctttgaggttaattgaagaaag

SEQ ID NO: 4005227 - DNA, 25 bp, Homo sapien
tcagccagctcctaatgcagccgtg

SEQ ID NO: 4005228 - DNA, 25 bp, Homo sapien
gtccatcgcatcttcgttcagccag

SEQ ID NO: 4005229 - DNA, 25 bp, Homo sapien
aaattgctctccatgccagacctca

SEQ ID NO: 4005230 - DNA, 25 bp, Homo sapien
gccacatctctgtcggggtccatcg

SEQ ID NO: 4005231 - DNA, 25 bp, Homo sapien
ctgtgctggcgagtcattgtgtaag

SEQ ID NO: 4005232 - DNA, 25 bp, Homo sapien
tccgtggtgcgtcccagttcatcct

SEQ ID NO: 4005233 - DNA, 25 bp, Homo sapien
gcttgtgacacctttggcccagact

SEQ ID NO: 4005234 - DNA, 25 bp, Homo sapien
tgagccacgagatcacgcttccgtg

SEQ ID NO: 4005235 - DNA, 25 bp, Homo sapien
gagaaattggtttgccacttcgccc

SEQ ID NO: 4005236 - DNA, 25 bp, Homo sapien
gtacatacagagtgacaacccattg

SEQ ID NO: 4005237 - DNA, 25 bp, Homo sapien
aagggtgtcacatagttccaagtac

SEQ ID NO: 4005238 - DNA, 25 bp, Homo sapien
tggaagactcgcatccaccagagaa

SEQ ID NO: 4005239 - DNA, 25 bp, Homo sapien
gcaactgtggcaagaccgtgtgtcc

SEQ ID NO: 4005240 - DNA, 25 bp, Homo sapien
tatggagaaacgtttgagtagatgg

SEQ ID NO: 4005241 - DNA, 25 bp, Homo sapien
gacggataggatgccagtgactctc

SEQ ID NO: 4005242 - DNA, 25 bp, Homo sapien
cctttgccagcagacgacttatgga

SEQ ID NO: 4005243 - DNA, 25 bp, Homo sapien
caaggtgctcagtcttttgggagac

SEQ ID NO: 4005244 - DNA, 25 bp, Homo sapien
cactgctcatattggtaaggcaagc

SEQ ID NO: 4005245 - DNA, 25 bp, Homo sapien
tcgagtgaacgtggcatcctggact

SEQ ID NO: 4005246 - DNA, 25 bp, Homo sapien
tcatattggtaaggcaagcaccacc

SEQ ID NO: 4005247 - DNA, 25 bp, Homo sapien
gagaacagccaacagtgtgacacct

SEQ ID NO: 4005248 - DNA, 25 bp, Homo sapien
tgggctttcagtcatcctggaggag

SEQ ID NO: 4005249 - DNA, 25 bp, Homo sapien
tttcagtcatcctggaggagagaac

SEQ ID NO: 4005250 - DNA, 25 bp, Homo sapien
agtcatcctggaggagagaacagcc

SEQ ID NO: 4005251 - DNA, 25 bp, Homo sapien
gaaggtgtttctgtgccccgtgcat

SEQ ID NO: 4005252 - DNA, 25 bp, Homo sapien
tcttctgtaatgtcagcgtgtcctg

SEQ ID NO: 4005253 - DNA, 25 bp, Homo sapien
catgggtgtgcatcgtcttctgtaa

SEQ ID NO: 4005254 - DNA, 25 bp, Homo sapien
gcacataggcatggagtggtttcca

SEQ ID NO: 4005255 - DNA, 25 bp, Homo sapien
gtatcaaaaggcttattctcagact

SEQ ID NO: 4005256 - DNA, 25 bp, Homo sapien
gagtgacagggtctggcatcagtgg

SEQ ID NO: 4005257 - DNA, 25 bp, Homo sapien
tctcagacttggtccaggagtgaca

SEQ ID NO: 4005258 - DNA, 25 bp, Homo sapien
gggccaatcagggacaatctcagag

SEQ ID NO: 4005259 - DNA, 25 bp, Homo sapien
taattgtaggcactggcaatatagt

SEQ ID NO: 4005260 - DNA, 25 bp, Homo sapien
acttcagatggctacagatgctgtg

SEQ ID NO: 4005261 - DNA, 25 bp, Homo sapien
aatatagtacagaagatgacacttc

SEQ ID NO: 4005262 - DNA, 25 bp, Homo sapien
tggttgagtataccagtcgtaattg

SEQ ID NO: 4005263 - DNA, 25 bp, Homo sapien
tatctgcctgataagggctccctag

SEQ ID NO: 4005264 - DNA, 25 bp, Homo sapien
ggcccattgggtgatcatcccgcat

SEQ ID NO: 4005265 - DNA, 25 bp, Homo sapien
gtcaccaagagccacaagagggcca

SEQ ID NO: 4005266 - DNA, 25 bp, Homo sapien
cgcattgtacaacctgaagcagttt

SEQ ID NO: 4005267 - DNA, 25 bp, Homo sapien
tgatatcggccccatgtttcaggta

SEQ ID NO: 4005268 - DNA, 25 bp, Homo sapien
cggccccatgtttcaggtaacagag

SEQ ID NO: 4005269 - DNA, 25 bp, Homo sapien
cataggtgggttgatatcggcccca

SEQ ID NO: 4005270 - DNA, 25 bp, Homo sapien
tgtcttgtttaatctcataggtggg

SEQ ID NO: 4005271 - DNA, 25 bp, Homo sapien
accttgcacatggccctgtatccaa

SEQ ID NO: 4005272 - DNA, 25 bp, Homo sapien
tgaccttgcacatggccctgtatcc

SEQ ID NO: 4005273 - DNA, 25 bp, Homo sapien
gtgaccttgcacatggccctgtatc

SEQ ID NO: 4005274 - DNA, 25 bp, Homo sapien
gaccttgcacatggccctgtatcca

SEQ ID NO: 4005275 - DNA, 25 bp, Homo sapien
atgggcctggggcagtaacttctcg

SEQ ID NO: 4005276 - DNA, 25 bp, Homo sapien
gggcagtaacttctcgagcttccca

SEQ ID NO: 4005277 - DNA, 25 bp, Homo sapien
gcctggggcagtaacttctcgagct

SEQ ID NO: 4005278 - DNA, 25 bp, Homo sapien
cagtaacttctcgagcttcccatct

SEQ ID NO: 4005279 - DNA, 25 bp, Homo sapien
cacatggccggcttaaggatgttat

SEQ ID NO: 4005280 - DNA, 25 bp, Homo sapien
aattacagcacccatttcacatggc

SEQ ID NO: 4005281 - DNA, 25 bp, Homo sapien
gaattggtgttagtcctttagttca

SEQ ID NO: 4005282 - DNA, 25 bp, Homo sapien
catgcccttaagattaggatggtaa

SEQ ID NO: 4005283 - DNA, 25 bp, Homo sapien
tcacagtggaattagatttcacggg

SEQ ID NO: 4005284 - DNA, 25 bp, Homo sapien
gttgggatccggagaaccagaccca

SEQ ID NO: 4005285 - DNA, 25 bp, Homo sapien
caaggaacccttgggtactgccaga

SEQ ID NO: 4005286 - DNA, 25 bp, Homo sapien
tgatggatgtcagcatagttcacag

SEQ ID NO: 4005287 - DNA, 25 bp, Homo sapien
tgacaatggaccctgcaacccagga

SEQ ID NO: 4005288 - DNA, 25 bp, Homo sapien
atctgtgccgttttccttcccgtgt

SEQ ID NO: 4005289 - DNA, 25 bp, Homo sapien
ttctgcccagtagtttgaaccgcat

SEQ ID NO: 4005290 - DNA, 25 bp, Homo sapien
tccttcccgtgttttctgcccagta

SEQ ID NO: 4005291 - DNA, 25 bp, Homo sapien
gaccctgcaaagtcaatgctgtgta

SEQ ID NO: 4005292 - DNA, 25 bp, Homo sapien
taggcaggattctaacacgaaagct

SEQ ID NO: 4005293 - DNA, 25 bp, Homo sapien
tgttatccagcaagatgaccctgca

SEQ ID NO: 4005294 - DNA, 25 bp, Homo sapien
tgtcaggtgccgtacattattcgct

SEQ ID NO: 4005295 - DNA, 25 bp, Homo sapien
gggactcccctgatacagcagtctc

SEQ ID NO: 4005296 - DNA, 25 bp, Homo sapien
cagagcctggacagactctcgggtc

SEQ ID NO: 4005297 - DNA, 25 bp, Homo sapien
tcaagactcgctggagggagcagca

SEQ ID NO: 4005298 - DNA, 25 bp, Homo sapien
agcagtctctgcagttgcctccgag

SEQ ID NO: 4005299 - DNA, 25 bp, Homo sapien
taatacaatctacacctgttccagg

SEQ ID NO: 4005300 - DNA, 25 bp, Homo sapien
ctgggtcaccggagaaatgcacaca

SEQ ID NO: 4005301 - DNA, 25 bp, Homo sapien
ggataatccagcgagaaacgacggg

SEQ ID NO: 4005302 - DNA, 25 bp, Homo sapien
tctgcaagcccgtgacaaactcggg

SEQ ID NO: 4005303 - DNA, 25 bp, Homo sapien
tccaaggaacctactcttggggctg

SEQ ID NO: 4005304 - DNA, 25 bp, Homo sapien
gactatttacctctctgacttccaa

SEQ ID NO: 4005305 - DNA, 25 bp, Homo sapien
aaagggactatttacctctctgact

SEQ ID NO: 4005306 - DNA, 25 bp, Homo sapien
caaggaacctactcttggggctgtg

SEQ ID NO: 4005307 - DNA, 25 bp, Homo sapien
taatctgaattttggatgcctggca

SEQ ID NO: 4005308 - DNA, 25 bp, Homo sapien
aatctgaattttggatgcctggcaa

SEQ ID NO: 4005309 - DNA, 25 bp, Homo sapien
tggatgcctggcaaaatccatgcca

SEQ ID NO: 4005310 - DNA, 25 bp, Homo sapien
caaaatccatgccaatacaattagc

SEQ ID NO: 4005311 - DNA, 25 bp, Homo sapien
caaggtgtccacgacaaagaggagc

SEQ ID NO: 4005312 - DNA, 25 bp, Homo sapien
aaagaggagcagacatgagttccca

SEQ ID NO: 4005313 - DNA, 25 bp, Homo sapien
tggagccaagatcagcaaggtgtcc

SEQ ID NO: 4005314 - DNA, 25 bp, Homo sapien
ctgacggatccgactggagccaaga

SEQ ID NO: 4005315 - DNA, 25 bp, Homo sapien
aaacaagccagacgcggtgctgtga

SEQ ID NO: 4005316 - DNA, 25 bp, Homo sapien
gggcagaggccaccgctaattagac

SEQ ID NO: 4005317 - DNA, 25 bp, Homo sapien
ccatcatgtactgaaagggtgttaa

SEQ ID NO: 4005318 - DNA, 25 bp, Homo sapien
tgggagagctagttcataaagacgc

SEQ ID NO: 4005319 - DNA, 25 bp, Homo sapien
gactctccgtaggtgagtaacgttg

SEQ ID NO: 4005320 - DNA, 25 bp, Homo sapien
taacgttggcccagaaacgcctctg

SEQ ID NO: 4005321 - DNA, 25 bp, Homo sapien
gagatctttcgggtaatgtgtgact

SEQ ID NO: 4005322 - DNA, 25 bp, Homo sapien
taggagctgcagactctccgtaggt

SEQ ID NO: 4005323 - DNA, 25 bp, Homo sapien
cagtgtctgattccaagaggagcag

SEQ ID NO: 4005324 - DNA, 25 bp, Homo sapien
ccagtgtctgattccaagaggagca

SEQ ID NO: 4005325 - DNA, 25 bp, Homo sapien
attccagtgtctgattccaagagga

SEQ ID NO: 4005326 - DNA, 25 bp, Homo sapien
tccagtgtctgattccaagaggagc

SEQ ID NO: 4005327 - DNA, 25 bp, Homo sapien
aatgaatgtgattggtgtcggtcag

SEQ ID NO: 4005328 - DNA, 25 bp, Homo sapien
acagtaatgaatgtgattggtgtcg

SEQ ID NO: 4005329 - DNA, 25 bp, Homo sapien
cctaggaacgtcagggagcagagaa

SEQ ID NO: 4005330 - DNA, 25 bp, Homo sapien
tgtgattggtgtcggtcaggtttcc

SEQ ID NO: 4005331 - DNA, 25 bp, Homo sapien
ctcctcggcaagtctttggaatgga

SEQ ID NO: 4005332 - DNA, 25 bp, Homo sapien
tggtactcatcacctgtactttaga

SEQ ID NO: 4005333 - DNA, 25 bp, Homo sapien
ctgtttgttgagcatagagaattta

SEQ ID NO: 4005334 - DNA, 25 bp, Homo sapien
aaaatatgagaagttgttggctagc

SEQ ID NO: 4005335 - DNA, 25 bp, Homo sapien
gttctcctgcagtgataattccaac

SEQ ID NO: 4005336 - DNA, 25 bp, Homo sapien
ttcactctgaatcgccaggtaggtc

SEQ ID NO: 4005337 - DNA, 25 bp, Homo sapien
gaatcgccaggtaggtcttttcgtc

SEQ ID NO: 4005338 - DNA, 25 bp, Homo sapien
caggtaggtcttttcgtctataaag

SEQ ID NO: 4005339 - DNA, 25 bp, Homo sapien
gtcttcactctgaatcgccaggtag

SEQ ID NO: 4005340 - DNA, 25 bp, Homo sapien
cctcccctatcgattgagtgttcat

SEQ ID NO: 4005341 - DNA, 25 bp, Homo sapien
tcctcccctatcgattgagtgttca

SEQ ID NO: 4005342 - DNA, 25 bp, Homo sapien
ttcctcccctatcgattgagtgttc

SEQ ID NO: 4005343 - DNA, 25 bp, Homo sapien
tcttcctcccctatcgattgagtgt

SEQ ID NO: 4005344 - DNA, 25 bp, Homo sapien
caagaagccagtttctagagaggca

SEQ ID NO: 4005345 - DNA, 25 bp, Homo sapien
cagtggctcactcattctaagtgtg

SEQ ID NO: 4005346 - DNA, 25 bp, Homo sapien
aagagttcaagtaaggctgggtaca

SEQ ID NO: 4005347 - DNA, 25 bp, Homo sapien
tccctgatgtctattacagaaagct

SEQ ID NO: 4005348 - DNA, 25 bp, Homo sapien
caccctgtggtggtaactccagaca

SEQ ID NO: 4005349 - DNA, 25 bp, Homo sapien
tccaaggtgctgaataccgtactca

SEQ ID NO: 4005350 - DNA, 25 bp, Homo sapien
tgagaaacgttttccaagacaggac

SEQ ID NO: 4005351 - DNA, 25 bp, Homo sapien
aatcagggtctggtctaggctttgc

SEQ ID NO: 4005352 - DNA, 25 bp, Homo sapien
ttacaagtgaacacactagtcatgg

SEQ ID NO: 4005353 - DNA, 25 bp, Homo sapien
tagtcatggcccatcagaatgatag

SEQ ID NO: 4005354 - DNA, 25 bp, Homo sapien
cttgctgaacctcttgcctctggga

SEQ ID NO: 4005355 - DNA, 25 bp, Homo sapien
tattgcgaagtggtgaagtccaggc

SEQ ID NO: 4005356 - DNA, 25 bp, Homo sapien
tgacctcctatacctacacctgttg

SEQ ID NO: 4005357 - DNA, 25 bp, Homo sapien
gttattagctatgccctttaccgaa

SEQ ID NO: 4005358 - DNA, 25 bp, Homo sapien
ctggcccaatgtgtggttgttatta

SEQ ID NO: 4005359 - DNA, 25 bp, Homo sapien
tatacctacacctgttgtaaagaaa

SEQ ID NO: 4005360 - DNA, 25 bp, Homo sapien
cccatggttttgctacgttgactaa

SEQ ID NO: 4005361 - DNA, 25 bp, Homo sapien
gactttgcaggtcatgtgtaaccag

SEQ ID NO: 4005362 - DNA, 25 bp, Homo sapien
gctgctgagaagatgcggtaaaaca

SEQ ID NO: 4005363 - DNA, 25 bp, Homo sapien
tacctaggttatttgtccaccagaa

SEQ ID NO: 4005364 - DNA, 25 bp, Homo sapien
gcatttagtccaagtcagggccaat

SEQ ID NO: 4005365 - DNA, 25 bp, Homo sapien
tgtggctgaaggcaccgttttggcc

SEQ ID NO: 4005366 - DNA, 25 bp, Homo sapien
gagctctgcatacattcccactttt

SEQ ID NO: 4005367 - DNA, 25 bp, Homo sapien
tgtcaagggattttgcattagtgca

SEQ ID NO: 4005368 - DNA, 25 bp, Homo sapien
gacttttctaggcacccaggaaggc

SEQ ID NO: 4005369 - DNA, 25 bp, Homo sapien
gccagaatgtggatgtgaaccaact

SEQ ID NO: 4005370 - DNA, 25 bp, Homo sapien
tcagaattgaacagtaaatggtgcc

SEQ ID NO: 4005371 - DNA, 25 bp, Homo sapien
gaaggcaaatttaagctccgagctg

SEQ ID NO: 4005372 - DNA, 25 bp, Homo sapien
agtctgcatggctctcacaacaagg

SEQ ID NO: 4005373 - DNA, 25 bp, Homo sapien
gtcaaaataagtctgcatggctctc

SEQ ID NO: 4005374 - DNA, 25 bp, Homo sapien
tgcatggctctcacaacaagggaga

SEQ ID NO: 4005375 - DNA, 25 bp, Homo sapien
acaagggagacagctgttcgttccg

SEQ ID NO: 4005376 - DNA, 25 bp, Homo sapien
cagattggaattgaggtcgataggc

SEQ ID NO: 4005377 - DNA, 25 bp, Homo sapien
gatcatacttggctgtcagattgga

SEQ ID NO: 4005378 - DNA, 25 bp, Homo sapien
caatcaggtgtagtttgtttaagga

SEQ ID NO: 4005379 - DNA, 25 bp, Homo sapien
tagcgttttgggaatcgtgaccaca

SEQ ID NO: 4005380 - DNA, 25 bp, Homo sapien
tagtgcaagtgaaaagtgaacggga

SEQ ID NO: 4005381 - DNA, 25 bp, Homo sapien
tgatttccaggatcattcgctccat

SEQ ID NO: 4005382 - DNA, 25 bp, Homo sapien
gaatataattcaggacagggcccca

SEQ ID NO: 4005383 - DNA, 25 bp, Homo sapien
taaattcacaaacctgcctgggcta

SEQ ID NO: 4005384 - DNA, 25 bp, Homo sapien
tcttgatcaaatccatgagatcgtc

SEQ ID NO: 4005385 - DNA, 25 bp, Homo sapien
tgatcaaatccatgagatcgtcttc

SEQ ID NO: 4005386 - DNA, 25 bp, Homo sapien
aatccatgagatcgtcttctattcc

SEQ ID NO: 4005387 - DNA, 25 bp, Homo sapien
tcaaatccatgagatcgtcttctat

SEQ ID NO: 4005388 - DNA, 25 bp, Homo sapien
tggcctgagaacacgactttgacac

SEQ ID NO: 4005389 - DNA, 25 bp, Homo sapien
gcattcctgtggtagtggcctgaga

SEQ ID NO: 4005390 - DNA, 25 bp, Homo sapien
gaacaattttctcggcggtgaccac

SEQ ID NO: 4005391 - DNA, 25 bp, Homo sapien
tgacaccaccatgtcgaggttctgg

SEQ ID NO: 4005392 - DNA, 25 bp, Homo sapien
ctgaaatgacttccccgatattacc

SEQ ID NO: 4005393 - DNA, 25 bp, Homo sapien
gagagacacaggttcaagtctagga

SEQ ID NO: 4005394 - DNA, 25 bp, Homo sapien
caacctgagagtctaggaaggaagg

SEQ ID NO: 4005395 - DNA, 25 bp, Homo sapien
tctaggaactgaaatgacttccccg

SEQ ID NO: 4005396 - DNA, 25 bp, Homo sapien
ctgtgctggcaggaactggagattc

SEQ ID NO: 4005397 - DNA, 25 bp, Homo sapien
gtgctggcaggaactggagattcac

SEQ ID NO: 4005398 - DNA, 25 bp, Homo sapien
tgtgctggcaggaactggagattca

SEQ ID NO: 4005399 - DNA, 25 bp, Homo sapien
gaagagagtcaagtgtgtctaggaa

SEQ ID NO: 4005400 - DNA, 25 bp, Homo sapien
agtgttgaagcaggatctgaaccca

SEQ ID NO: 4005401 - DNA, 25 bp, Homo sapien
tgaaggaggcatggttattacctgt

SEQ ID NO: 4005402 - DNA, 25 bp, Homo sapien
gcctaactcagcctgtaagtgttga

SEQ ID NO: 4005403 - DNA, 25 bp, Homo sapien
cctgctgggcatccgaatttcctct

SEQ ID NO: 4005404 - DNA, 25 bp, Homo sapien
gcacctgctgggcatccgaatttcc

SEQ ID NO: 4005405 - DNA, 25 bp, Homo sapien
gctgggcatccgaatttcctcttca

SEQ ID NO: 4005406 - DNA, 25 bp, Homo sapien
gggcatccgaatttcctcttcagca

SEQ ID NO: 4005407 - DNA, 25 bp, Homo sapien
tggtgggtggtaccagaattccagt

SEQ ID NO: 4005408 - DNA, 25 bp, Homo sapien
atttcccagaggacacgactgaagg

SEQ ID NO: 4005409 - DNA, 25 bp, Homo sapien
gaattccagttcagattctggcttg

SEQ ID NO: 4005410 - DNA, 25 bp, Homo sapien
cagaggacacgactgaaggtcagct

SEQ ID NO: 4005411 - DNA, 25 bp, Homo sapien
tacggagtgcctaagccaagcagct

SEQ ID NO: 4005412 - DNA, 25 bp, Homo sapien
tcactgtgatgggtccacgtgctcc

SEQ ID NO: 4005413 - DNA, 25 bp, Homo sapien
gagagacactctcaggttacggagt

SEQ ID NO: 4005414 - DNA, 25 bp, Homo sapien
gctatgtaaaatctaggttgccgga

SEQ ID NO: 4005415 - DNA, 25 bp, Homo sapien
tctcactgatgaccaccggttctgt

SEQ ID NO: 4005416 - DNA, 25 bp, Homo sapien
tcctcctccagttaacagcttattc

SEQ ID NO: 4005417 - DNA, 25 bp, Homo sapien
cctgggcttcgaggcacttcctcct

SEQ ID NO: 4005418 - DNA, 25 bp, Homo sapien
tattcttcctgcatacatctccggc

SEQ ID NO: 4005419 - DNA, 25 bp, Homo sapien
cagagtctgcgggggtgggtacaga

SEQ ID NO: 4005420 - DNA, 25 bp, Homo sapien
tgaacggatgaacggagaggcttac

SEQ ID NO: 4005421 - DNA, 25 bp, Homo sapien
aaggcacaattcacatactcaagat

SEQ ID NO: 4005422 - DNA, 25 bp, Homo sapien
tctgcagaaggcacaattcacatac

SEQ ID NO: 4005423 - DNA, 25 bp, Homo sapien
atgaacggatgaacggagaggctta

SEQ ID NO: 4005424 - DNA, 25 bp, Homo sapien
ctgtattccacaccaagtaggctcc

SEQ ID NO: 4005425 - DNA, 25 bp, Homo sapien
gatccctttggatatcccagtgctg

SEQ ID NO: 4005426 - DNA, 25 bp, Homo sapien
ctgagcctctgtggttgcagcacca

SEQ ID NO: 4005427 - DNA, 25 bp, Homo sapien
ggaccctcacttggcagatcccttt

SEQ ID NO: 4005428 - DNA, 25 bp, Homo sapien
ggatgactctgcctctaggacctga

SEQ ID NO: 4005429 - DNA, 25 bp, Homo sapien
gaggtttgccacaccatgggagcag

SEQ ID NO: 4005430 - DNA, 25 bp, Homo sapien
gagtcacactgaccctcgaggaagg

SEQ ID NO: 4005431 - DNA, 25 bp, Homo sapien
gagaatactatagtccccagggaga

SEQ ID NO: 4005432 - DNA, 25 bp, Homo sapien
tcaccctgtaatgggaacatttctc

SEQ ID NO: 4005433 - DNA, 25 bp, Homo sapien
gggagagcaagagcgtcaccctgta

SEQ ID NO: 4005434 - DNA, 25 bp, Homo sapien
ttagacatcttacatgcaccatgga

SEQ ID NO: 4005435 - DNA, 25 bp, Homo sapien
cctaaacttagacacatacagaatg

SEQ ID NO: 4005436 - DNA, 25 bp, Homo sapien
taactgagtcatggatgcgtacagc

SEQ ID NO: 4005437 - DNA, 25 bp, Homo sapien
ctgagtcatggatgcgtacagccaa

SEQ ID NO: 4005438 - DNA, 25 bp, Homo sapien
ttctgcataactgagtcatggatgc

SEQ ID NO: 4005439 - DNA, 25 bp, Homo sapien
gcataactgagtcatggatgcgtac

SEQ ID NO: 4005440 - DNA, 25 bp, Homo sapien
aagtctatctgcctgcagcggagag

SEQ ID NO: 4005441 - DNA, 25 bp, Homo sapien
ggagagcctccacatccgactcata

SEQ ID NO: 4005442 - DNA, 25 bp, Homo sapien
tgcctgcagcggagagcctccacat

SEQ ID NO: 4005443 - DNA, 25 bp, Homo sapien
gagcctccacatccgactcatattt

SEQ ID NO: 4005444 - DNA, 25 bp, Homo sapien
caggccacggaaactgacagggaat

SEQ ID NO: 4005445 - DNA, 25 bp, Homo sapien
tgacagggaatttcgggaagggctc

SEQ ID NO: 4005446 - DNA, 25 bp, Homo sapien
agggaatttcgggaagggctctcat

SEQ ID NO: 4005447 - DNA, 25 bp, Homo sapien
ggcaggccacggaaactgacaggga

SEQ ID NO: 4005448 - DNA, 25 bp, Homo sapien
ggtttgtagctatcagtctctggga

SEQ ID NO: 4005449 - DNA, 25 bp, Homo sapien
attggagacacagaccagctcttgg

SEQ ID NO: 4005450 - DNA, 25 bp, Homo sapien
tagctctgcctacgggaagagaaag

SEQ ID NO: 4005451 - DNA, 25 bp, Homo sapien
attgggcttcccatgtagctctgcc

SEQ ID NO: 4005452 - DNA, 25 bp, Homo sapien
gagggtcttcattctgtgcgtgcac

SEQ ID NO: 4005453 - DNA, 25 bp, Homo sapien
gcaaaagatgggactaaatccgtta

SEQ ID NO: 4005454 - DNA, 25 bp, Homo sapien
ttgccaaatcactggtaacccaggg

SEQ ID NO: 4005455 - DNA, 25 bp, Homo sapien
catcagaaattgaggtgtgacctcc

SEQ ID NO: 4005456 - DNA, 25 bp, Homo sapien
agcttgactcttaaagatcgtctgc

SEQ ID NO: 4005457 - DNA, 25 bp, Homo sapien
cagctgatgaatactggagggcagc

SEQ ID NO: 4005458 - DNA, 25 bp, Homo sapien
actgtccgctaaagccacatcccag

SEQ ID NO: 4005459 - DNA, 25 bp, Homo sapien
gcttgactcttaaagatcgtctgcc

SEQ ID NO: 4005460 - DNA, 25 bp, Homo sapien
gaagtgaaagcagatgtccctggca

SEQ ID NO: 4005461 - DNA, 25 bp, Homo sapien
agagaagtgaaagcagatgtccctg

SEQ ID NO: 4005462 - DNA, 25 bp, Homo sapien
tgaaagcagatgtccctggcatctt

SEQ ID NO: 4005463 - DNA, 25 bp, Homo sapien
agtgaaagcagatgtccctggcatc

SEQ ID NO: 4005464 - DNA, 25 bp, Homo sapien
tggtatcagaactcccggcctagtc

SEQ ID NO: 4005465 - DNA, 25 bp, Homo sapien
cacaggaggattaactagccagaca

SEQ ID NO: 4005466 - DNA, 25 bp, Homo sapien
gacacattgcagagagacgggagaa

SEQ ID NO: 4005467 - DNA, 25 bp, Homo sapien
cacactgagtacttaggctagggtc

SEQ ID NO: 4005468 - DNA, 25 bp, Homo sapien
gaggttgaagtagtagtcgtcgtcc

SEQ ID NO: 4005469 - DNA, 25 bp, Homo sapien
atgtgctggaagacgatggcatgct

SEQ ID NO: 4005470 - DNA, 25 bp, Homo sapien
tctccaggaacagcgggatgtgctg

SEQ ID NO: 4005471 - DNA, 25 bp, Homo sapien
caacttcttccgagtggacttgctg

SEQ ID NO: 4005472 - DNA, 25 bp, Homo sapien
taagcactcgcttcaggtcctccgt

SEQ ID NO: 4005473 - DNA, 25 bp, Homo sapien
agaactcctcgacggtctcggccgt

SEQ ID NO: 4005474 - DNA, 25 bp, Homo sapien
tgacaaggaccagtgggatggccct

SEQ ID NO: 4005475 - DNA, 25 bp, Homo sapien
tgccaatgtcatggttgccgctgac

SEQ ID NO: 4005476 - DNA, 25 bp, Homo sapien
catccttccccaggataccttagaa

SEQ ID NO: 4005477 - DNA, 25 bp, Homo sapien
tggaaatccactccacctagcacat

SEQ ID NO: 4005478 - DNA, 25 bp, Homo sapien
tagaaattccatgactacatggccc

SEQ ID NO: 4005479 - DNA, 25 bp, Homo sapien
caaaatgcagtcacgtgctaaaagc

SEQ ID NO: 4005480 - DNA, 25 bp, Homo sapien
catcgaaggtgccattgattgacat

SEQ ID NO: 4005481 - DNA, 25 bp, Homo sapien
cgtctgcatcgaaggtgccattgat

SEQ ID NO: 4005482 - DNA, 25 bp, Homo sapien
tgcatcgaaggtgccattgattgac

SEQ ID NO: 4005483 - DNA, 25 bp, Homo sapien
tctgcatcgaaggtgccattgattg

SEQ ID NO: 4005484 - DNA, 25 bp, Homo sapien
ttctttagccgaacccggactgcag

SEQ ID NO: 4005485 - DNA, 25 bp, Homo sapien
tctttagccgaacccggactgcagg

SEQ ID NO: 4005486 - DNA, 25 bp, Homo sapien
ttagccgaacccggactgcaggcat

SEQ ID NO: 4005487 - DNA, 25 bp, Homo sapien
tgcttctttagccgaacccggactg

SEQ ID NO: 4005488 - DNA, 25 bp, Homo sapien
gcccaagacatcaagatgatacaca

SEQ ID NO: 4005489 - DNA, 25 bp, Homo sapien
catcaagatgatacacattttgtgt

SEQ ID NO: 4005490 - DNA, 25 bp, Homo sapien
ccaagacatcaagatgatacacatt

SEQ ID NO: 4005491 - DNA, 25 bp, Homo sapien
ctgccaagcccaagacatcaagatg

SEQ ID NO: 4005492 - DNA, 25 bp, Homo sapien
tctaacttccgtatgtgcgcacaca

SEQ ID NO: 4005493 - DNA, 25 bp, Homo sapien
cctcttcccctaacagagcagtggg

SEQ ID NO: 4005494 - DNA, 25 bp, Homo sapien
cgagccttaggcaattacaggtgtg

SEQ ID NO: 4005495 - DNA, 25 bp, Homo sapien
tcatatgactgcaactggacacggg

SEQ ID NO: 4005496 - DNA, 25 bp, Homo sapien
ccacctcttacctagctgtgtgctg

SEQ ID NO: 4005497 - DNA, 25 bp, Homo sapien
ggcaccaaggccaagtatttcacat

SEQ ID NO: 4005498 - DNA, 25 bp, Homo sapien
tctaggtataaagcagcaataggtc

SEQ ID NO: 4005499 - DNA, 25 bp, Homo sapien
ttagcgagtgcttccatctgccagg

SEQ ID NO: 4005500 - DNA, 25 bp, Homo sapien
tggggtatcactgtgttggccaagc

SEQ ID NO: 4005501 - DNA, 25 bp, Homo sapien
atggggtatcactgtgttggccaag

SEQ ID NO: 4005502 - DNA, 25 bp, Homo sapien
cagtattattgtagaaccctggatg

SEQ ID NO: 4005503 - DNA, 25 bp, Homo sapien
tattgtagaaccctggatgcaaaga

SEQ ID NO: 4005504 - DNA, 25 bp, Homo sapien
aagggcatgagtttaaacggactca

SEQ ID NO: 4005505 - DNA, 25 bp, Homo sapien
ggactcataccaaagtccctcacag

SEQ ID NO: 4005506 - DNA, 25 bp, Homo sapien
tgataatgactgacgccttcctggg

SEQ ID NO: 4005507 - DNA, 25 bp, Homo sapien
tggagctgcgcagcaaaagggctct

SEQ ID NO: 4005508 - DNA, 25 bp, Homo sapien
tatccgggagataatccgaatgtgc

SEQ ID NO: 4005509 - DNA, 25 bp, Homo sapien
cctgcctgcaaaaccgaggaatccg

SEQ ID NO: 4005510 - DNA, 25 bp, Homo sapien
tactgatatggtcatatgctactgg

SEQ ID NO: 4005511 - DNA, 25 bp, Homo sapien
gaatccggggactgctgtactacgg

SEQ ID NO: 4005512 - DNA, 25 bp, Homo sapien
tcatatgctactgggggcctgctgt

SEQ ID NO: 4005513 - DNA, 25 bp, Homo sapien
actacggtcatatactactgctggg

SEQ ID NO: 4005514 - DNA, 25 bp, Homo sapien
caaaatgggttaagacgccgagact

SEQ ID NO: 4005515 - DNA, 25 bp, Homo sapien
gatttcaccgggctcatactggatg

SEQ ID NO: 4005516 - DNA, 25 bp, Homo sapien
ttggaataaaggactgacagcagcc

SEQ ID NO: 4005517 - DNA, 25 bp, Homo sapien
cacgcgacctgctggaaaatctgag

SEQ ID NO: 4005518 - DNA, 25 bp, Homo sapien
tgtgctctcagtgcaaatggcgctg

SEQ ID NO: 4005519 - DNA, 25 bp, Homo sapien
gaactgctaagagaacggcctggtg

SEQ ID NO: 4005520 - DNA, 25 bp, Homo sapien
gaagaaaagtcctggtcagtccctg

SEQ ID NO: 4005521 - DNA, 25 bp, Homo sapien
tgttcaaattaactcccacctggcg

SEQ ID NO: 4005522 - DNA, 25 bp, Homo sapien
ttcattacagaattagaaacctccc

SEQ ID NO: 4005523 - DNA, 25 bp, Homo sapien
acagaattagaaacctcccagtggg

SEQ ID NO: 4005524 - DNA, 25 bp, Homo sapien
aaacctcccagtgggggtcaggcat

SEQ ID NO: 4005525 - DNA, 25 bp, Homo sapien
gaaacctcccagtgggggtcaggca

SEQ ID NO: 4005526 - DNA, 25 bp, Homo sapien
agaagagcagagacccgagttagca

SEQ ID NO: 4005527 - DNA, 25 bp, Homo sapien
gagcagagacccgagttagcacact

SEQ ID NO: 4005528 - DNA, 25 bp, Homo sapien
gagacccgagttagcacactcagcc

SEQ ID NO: 4005529 - DNA, 25 bp, Homo sapien
gccccctccccatgtgatgttctgt

SEQ ID NO: 4005530 - DNA, 25 bp, Homo sapien
tatacattctgcttgagttgcactg

SEQ ID NO: 4005531 - DNA, 25 bp, Homo sapien
tggccagggccaagatactatttat

SEQ ID NO: 4005532 - DNA, 25 bp, Homo sapien
tcacatttatgaagtcttgaccaac

SEQ ID NO: 4005533 - DNA, 25 bp, Homo sapien
gagctaaatgagagggaaaccactt

SEQ ID NO: 4005534 - DNA, 25 bp, Homo sapien
caggagcactctccgtttgcttata

SEQ ID NO: 4005535 - DNA, 25 bp, Homo sapien
tgcaatggtctaaggtcccctgcct

SEQ ID NO: 4005536 - DNA, 25 bp, Homo sapien
tatacctgcttgctgggctttatct

SEQ ID NO: 4005537 - DNA, 25 bp, Homo sapien
ttttctgcaatggtctaaggtcccc

SEQ ID NO: 4005538 - DNA, 25 bp, Homo sapien
aatctcgccaaactctaaatataac

SEQ ID NO: 4005539 - DNA, 25 bp, Homo sapien
tactgtgattaatctcgccaaactc

SEQ ID NO: 4005540 - DNA, 25 bp, Homo sapien
gattaatctcgccaaactctaaata

SEQ ID NO: 4005541 - DNA, 25 bp, Homo sapien
ctaattactgtgattaatctcgcca

SEQ ID NO: 4005542 - DNA, 25 bp, Homo sapien
gcaaagatgccttcgaagcaaaatc

SEQ ID NO: 4005543 - DNA, 25 bp, Homo sapien
catgactgagcaaagatgccttcga

SEQ ID NO: 4005544 - DNA, 25 bp, Homo sapien
tcatgaagcgaaagaacggtccatg

SEQ ID NO: 4005545 - DNA, 25 bp, Homo sapien
gaaagaacggtccatgactgagcaa

SEQ ID NO: 4005546 - DNA, 25 bp, Homo sapien
tcacaagcgatgacccgagtcttac

SEQ ID NO: 4005547 - DNA, 25 bp, Homo sapien
ggtcacaagcgatgacccgagtctt

SEQ ID NO: 4005548 - DNA, 25 bp, Homo sapien
tgaaggagaaaaggtcacaagcgat

SEQ ID NO: 4005549 - DNA, 25 bp, Homo sapien
aggtcacaagcgatgacccgagtct

SEQ ID NO: 4005550 - DNA, 25 bp, Homo sapien
tcgccgcacagaacgaagaatttgg

SEQ ID NO: 4005551 - DNA, 25 bp, Homo sapien
ctggcatggcgtggatgaggtcgcc

SEQ ID NO: 4005552 - DNA, 25 bp, Homo sapien
ggacggcttgctcagttagacggat

SEQ ID NO: 4005553 - DNA, 25 bp, Homo sapien
ctggacggcttgctcagttagacgg

SEQ ID NO: 4005554 - DNA, 25 bp, Homo sapien
ccaggatgaagtagaatgggccttt

SEQ ID NO: 4005555 - DNA, 25 bp, Homo sapien
tgttcccattcgtcaccgccattgt

SEQ ID NO: 4005556 - DNA, 25 bp, Homo sapien
aggccttgatcagcccaaactgtgg

SEQ ID NO: 4005557 - DNA, 25 bp, Homo sapien
caaactgtgggtctgcgcccaggat

SEQ ID NO: 4005558 - DNA, 25 bp, Homo sapien
ggattttgatttatactaattatgc

SEQ ID NO: 4005559 - DNA, 25 bp, Homo sapien
gatttatactaattatgcctgggac

SEQ ID NO: 4005560 - DNA, 25 bp, Homo sapien
tttgatttatactaattatgcctgg

SEQ ID NO: 4005561 - DNA, 25 bp, Homo sapien
tgtcatagtctagaggattttgatt

SEQ ID NO: 4005562 - DNA, 25 bp, Homo sapien
aactgtccacgtgggcttctgcagc

SEQ ID NO: 4005563 - DNA, 25 bp, Homo sapien
acaccaccaagctgtttgctgacaa

SEQ ID NO: 4005564 - DNA, 25 bp, Homo sapien
cagaactgtccacgtgggcttctgc

SEQ ID NO: 4005565 - DNA, 25 bp, Homo sapien
ccaaaggccagaactgtccacgtgg

SEQ ID NO: 4005566 - DNA, 25 bp, Homo sapien
gccaaaaggaagcacgggccacaag

SEQ ID NO: 4005567 - DNA, 25 bp, Homo sapien
cccaatgcagaagatattcgtgctc

SEQ ID NO: 4005568 - DNA, 25 bp, Homo sapien
tgcagaagatattcgtgctccataa

SEQ ID NO: 4005569 - DNA, 25 bp, Homo sapien
agaacccaatgcagaagatattcgt

SEQ ID NO: 4005570 - DNA, 25 bp, Homo sapien
tttctgtgaggcttcgtggcaccat

SEQ ID NO: 4005571 - DNA, 25 bp, Homo sapien
caatgggccagaagtcaatctgaac

SEQ ID NO: 4005572 - DNA, 25 bp, Homo sapien
cagtgttcaattacaatgggccaga

SEQ ID NO: 4005573 - DNA, 25 bp, Homo sapien
agcacagtgttcaattacaatgggc

SEQ ID NO: 4005574 - DNA, 25 bp, Homo sapien
ttcaattacaatgggccagaagtca

SEQ ID NO: 4005575 - DNA, 25 bp, Homo sapien
ttttgacagattcatagagaagtta

SEQ ID NO: 4005576 - DNA, 25 bp, Homo sapien
taatttagctgtctactgctgtgta

SEQ ID NO: 4005577 - DNA, 25 bp, Homo sapien
actgcagtgcggtggcgtggtctca

SEQ ID NO: 4005578 - DNA, 25 bp, Homo sapien
ccacacctggccagcgaatttaact

SEQ ID NO: 4005579 - DNA, 25 bp, Homo sapien
aaattctgccacagacatcactcgc

SEQ ID NO: 4005580 - DNA, 25 bp, Homo sapien
ccacatttcaggacagctgaaatta

SEQ ID NO: 4005581 - DNA, 25 bp, Homo sapien
gacatcactcgcccacatttcagga

SEQ ID NO: 4005582 - DNA, 25 bp, Homo sapien
ctcgcccacatttcaggacagctga

SEQ ID NO: 4005583 - DNA, 25 bp, Homo sapien
ctatctcttggttcccacagcacat

SEQ ID NO: 4005584 - DNA, 25 bp, Homo sapien
gcgggaaacgcggccagggtcctgc

SEQ ID NO: 4005585 - DNA, 25 bp, Homo sapien
aaccgctggacctgtcccgctttgg

SEQ ID NO: 4005586 - DNA, 25 bp, Homo sapien
ctgcgtgggtggaagccgcgcgact

SEQ ID NO: 4005587 - DNA, 25 bp, Homo sapien
ggcgagcgagtttctggccttcact

SEQ ID NO: 4005588 - DNA, 25 bp, Homo sapien
agccgcgcgacttcacacagaacaa

SEQ ID NO: 4005589 - DNA, 25 bp, Homo sapien
tttaaagcgtatttcctttgctcac

SEQ ID NO: 4005590 - DNA, 25 bp, Homo sapien
tgcctgagtttttaaagcgtatttc

SEQ ID NO: 4005591 - DNA, 25 bp, Homo sapien
ctttgctcacttgaatgatcaataa

SEQ ID NO: 4005592 - DNA, 25 bp, Homo sapien
ttgctcacttgaatgatcaataaag

SEQ ID NO: 4005593 - DNA, 25 bp, Homo sapien
cggtggttgaagctaatatcgttca

SEQ ID NO: 4005594 - DNA, 25 bp, Homo sapien
tatgcctggtattgggcagaatctg

SEQ ID NO: 4005595 - DNA, 25 bp, Homo sapien
gaaagaagcggtggttgaagctaat

SEQ ID NO: 4005596 - DNA, 25 bp, Homo sapien
gccaaaatctggaagtgaggagaca

SEQ ID NO: 4005597 - DNA, 25 bp, Homo sapien
ctaaggcgattggacacagaatctg

SEQ ID NO: 4005598 - DNA, 25 bp, Homo sapien
acagaatctgagtgatgctgtaccc

SEQ ID NO: 4005599 - DNA, 25 bp, Homo sapien
tggcatggttcatgccaaattctga

SEQ ID NO: 4005600 - DNA, 25 bp, Homo sapien
aaattctgatgcaatcttcctgcta

SEQ ID NO: 4005601 - DNA, 25 bp, Homo sapien
ccccgaccttctttgattcgttcat

SEQ ID NO: 4005602 - DNA, 25 bp, Homo sapien
tatgtgccgcaaacaaacgccaaat

SEQ ID NO: 4005603 - DNA, 25 bp, Homo sapien
taagcatatgcatgaacccacgaac

SEQ ID NO: 4005604 - DNA, 25 bp, Homo sapien
ggatgcaccgtaacatctgagaagc

SEQ ID NO: 4005605 - DNA, 25 bp, Homo sapien
taaccatcacagtacgcttagggtc

SEQ ID NO: 4005606 - DNA, 25 bp, Homo sapien
catgaaccatttccagtcccatggg

SEQ ID NO: 4005607 - DNA, 25 bp, Homo sapien
tgtccacgtccagcattatgagaac

SEQ ID NO: 4005608 - DNA, 25 bp, Homo sapien
taatcttcgtaagtacagctgcatg

SEQ ID NO: 4005609 - DNA, 25 bp, Homo sapien
tatgagaacatggacacgagaaccc

SEQ ID NO: 4005610 - DNA, 25 bp, Homo sapien
gatacttttagctagcagactgctc

SEQ ID NO: 4005611 - DNA, 25 bp, Homo sapien
gcctcctgaggtagaccagttgtga

SEQ ID NO: 4005612 - DNA, 25 bp, Homo sapien
gctagcttatacgtctgcctcctga

SEQ ID NO: 4005613 - DNA, 25 bp, Homo sapien
gtcaatctgttagccaatggtctgc

SEQ ID NO: 4005614 - DNA, 25 bp, Homo sapien
ggttcaggctgcatgtaggttccct

SEQ ID NO: 4005615 - DNA, 25 bp, Homo sapien
tgactgccagtgacacccctctccc

SEQ ID NO: 4005616 - DNA, 25 bp, Homo sapien
tcaggctgcatgtaggttccctttg

SEQ ID NO: 4005617 - DNA, 25 bp, Homo sapien
ctgccagtgacacccctctccccct

SEQ ID NO: 4005618 - DNA, 25 bp, Homo sapien
gcttgttccaatctgtatattttcc

SEQ ID NO: 4005619 - DNA, 25 bp, Homo sapien
ctatgcttgttccaatctgtatatt

SEQ ID NO: 4005620 - DNA, 25 bp, Homo sapien
gttccaatctgtatattttccgatg

SEQ ID NO: 4005621 - DNA, 25 bp, Homo sapien
atctgtatattttccgatgggtcag

SEQ ID NO: 4005622 - DNA, 25 bp, Homo sapien
ggatgctgtggaggacagttcttga

SEQ ID NO: 4005623 - DNA, 25 bp, Homo sapien
gctgtggaggacagttcttgacatc

SEQ ID NO: 4005624 - DNA, 25 bp, Homo sapien
tccctcctcgggacgggagagtgga

SEQ ID NO: 4005625 - DNA, 25 bp, Homo sapien
gaaccttcagaagttggtacaaatg

SEQ ID NO: 4005626 - DNA, 25 bp, Homo sapien
cagaagttggtacaaatgagcttgc

SEQ ID NO: 4005627 - DNA, 25 bp, Homo sapien
cgggagagtggaaccttcagaagtt

SEQ ID NO: 4005628 - DNA, 25 bp, Homo sapien
ttcatcaaagcagccaaagtaagga

SEQ ID NO: 4005629 - DNA, 25 bp, Homo sapien
gggctgtaggaacgacatatcgtac

SEQ ID NO: 4005630 - DNA, 25 bp, Homo sapien
cccatgctgttgtgtggatcatctc

SEQ ID NO: 4005631 - DNA, 25 bp, Homo sapien
gggtggatctttggtgcaattcatc

SEQ ID NO: 4005632 - DNA, 25 bp, Homo sapien
cattcagactgggttcgtgagacac

SEQ ID NO: 4005633 - DNA, 25 bp, Homo sapien
taggtcaggccaactcatcattcag

SEQ ID NO: 4005634 - DNA, 25 bp, Homo sapien
gccatatgccaagtgcacagctagt

SEQ ID NO: 4005635 - DNA, 25 bp, Homo sapien
ccagcagggcatgcatggtactttt

SEQ ID NO: 4005636 - DNA, 25 bp, Homo sapien
ctgttaaggtccctaagcctcagag

SEQ ID NO: 4005637 - DNA, 25 bp, Homo sapien
agcccagcagaaaggatgtgctcgg

SEQ ID NO: 4005638 - DNA, 25 bp, Homo sapien
gatgtgctcggattctgaatttcct

SEQ ID NO: 4005639 - DNA, 25 bp, Homo sapien
gttaaggtccctaagcctcagagga

SEQ ID NO: 4005640 - DNA, 25 bp, Homo sapien
ccacggctctgatggtgcttcttga

SEQ ID NO: 4005641 - DNA, 25 bp, Homo sapien
cctggtaatgcttgttgcataattc

SEQ ID NO: 4005642 - DNA, 25 bp, Homo sapien
tctgatggtgcttcttgagttgtgg

SEQ ID NO: 4005643 - DNA, 25 bp, Homo sapien
gagttgtggtttgtgcccatgtccc

SEQ ID NO: 4005644 - DNA, 25 bp, Homo sapien
atctttcccaggtcagcttgacttg

SEQ ID NO: 4005645 - DNA, 25 bp, Homo sapien
gctgacttgcccactttaccagcat

SEQ ID NO: 4005646 - DNA, 25 bp, Homo sapien
catctttcccaggtcagcttgactt

SEQ ID NO: 4005647 - DNA, 25 bp, Homo sapien
tcagcttgacttgctgacttgccca

SEQ ID NO: 4005648 - DNA, 25 bp, Homo sapien
gcccccagggtgactacattgcaca

SEQ ID NO: 4005649 - DNA, 25 bp, Homo sapien
cccccagggtgactacattgcacat

SEQ ID NO: 4005650 - DNA, 25 bp, Homo sapien
gggacccaccatcaaacctggctaa

SEQ ID NO: 4005651 - DNA, 25 bp, Homo sapien
gagattacagggacccaccatcaaa

SEQ ID NO: 4005652 - DNA, 25 bp, Homo sapien
agattacagggacccaccatcaaac

SEQ ID NO: 4005653 - DNA, 25 bp, Homo sapien
tacagggacccaccatcaaacctgg

SEQ ID NO: 4005654 - DNA, 25 bp, Homo sapien
ggaacaagctgtataagactgagag

SEQ ID NO: 4005655 - DNA, 25 bp, Homo sapien
catttaaactcagacacttggaaca

SEQ ID NO: 4005656 - DNA, 25 bp, Homo sapien
ccccttggcatttaaactcagacac

SEQ ID NO: 4005657 - DNA, 25 bp, Homo sapien
gctgtataagactgagaggctacaa

SEQ ID NO: 4005658 - DNA, 25 bp, Homo sapien
gggtgacctcggcatatgagcaggg

SEQ ID NO: 4005659 - DNA, 25 bp, Homo sapien
ttagaaaggcgttgctgccacatgg

SEQ ID NO: 4005660 - DNA, 25 bp, Homo sapien
tcttgggtgacctcggcatatgagc

SEQ ID NO: 4005661 - DNA, 25 bp, Homo sapien
tgccacatggcggttcttgggtgac

SEQ ID NO: 4005662 - DNA, 25 bp, Homo sapien
agagaaaaatatgcctgccagattc

SEQ ID NO: 4005663 - DNA, 25 bp, Homo sapien
atgtgagcgtttgcatgatttgaag

SEQ ID NO: 4005664 - DNA, 25 bp, Homo sapien
tctaagcacctgttccttgtcttct

SEQ ID NO: 4005665 - DNA, 25 bp, Homo sapien
tgcatgatttgaaggagagaaaaat

SEQ ID NO: 4005666 - DNA, 25 bp, Homo sapien
tttatcaagcacgttctctgtctct

SEQ ID NO: 4005667 - DNA, 25 bp, Homo sapien
tatttatcaagcacgttctctgtct

SEQ ID NO: 4005668 - DNA, 25 bp, Homo sapien
gtatttatcaagcacgttctctgtc

SEQ ID NO: 4005669 - DNA, 25 bp, Homo sapien
tatcaagcacgttctctgtctctcc

SEQ ID NO: 4005670 - DNA, 25 bp, Homo sapien
aaggcttcccagtgctcggtgctaa

SEQ ID NO: 4005671 - DNA, 25 bp, Homo sapien
tggagcctacagctttgaccggaat

SEQ ID NO: 4005672 - DNA, 25 bp, Homo sapien
gctttgaccggaatcacgtcctctg

SEQ ID NO: 4005673 - DNA, 25 bp, Homo sapien
tctgtgctaggatcagaggagtctt

SEQ ID NO: 4005674 - DNA, 25 bp, Homo sapien
gaaatagtgacttctactcttggct

SEQ ID NO: 4005675 - DNA, 25 bp, Homo sapien
tcttggctctctcgaatctagaagg

SEQ ID NO: 4005676 - DNA, 25 bp, Homo sapien
cctgctggattcttagctgtgacca

SEQ ID NO: 4005677 - DNA, 25 bp, Homo sapien
tctttgagagcattatacgcaaggg

SEQ ID NO: 4005678 - DNA, 25 bp, Homo sapien
cattcttttctccatgggctgaggg

SEQ ID NO: 4005679 - DNA, 25 bp, Homo sapien
ttcttttctccatgggctgaggggg

SEQ ID NO: 4005680 - DNA, 25 bp, Homo sapien
tcttttctccatgggctgagggggc

SEQ ID NO: 4005681 - DNA, 25 bp, Homo sapien
ttttctccatgggctgagggggcag

SEQ ID NO: 4005682 - DNA, 25 bp, Homo sapien
tggttcagatgcaacaccctttttg

SEQ ID NO: 4005683 - DNA, 25 bp, Homo sapien
gattttggctggttcagatgcaaca

SEQ ID NO: 4005684 - DNA, 25 bp, Homo sapien
agatgcaacaccctttttggcacct

SEQ ID NO: 4005685 - DNA, 25 bp, Homo sapien
tggctggttcagatgcaacaccctt

SEQ ID NO: 4005686 - DNA, 25 bp, Homo sapien
cagtgtggcattaactagtatgagg

SEQ ID NO: 4005687 - DNA, 25 bp, Homo sapien
tgtacagggaatgcacaaaccccac

SEQ ID NO: 4005688 - DNA, 25 bp, Homo sapien
tctttgtcaaagactgccaagagca

SEQ ID NO: 4005689 - DNA, 25 bp, Homo sapien
tggagctgccaaacatttgcctaaa

SEQ ID NO: 4005690 - DNA, 25 bp, Homo sapien
atgagaggcagtctggatatgggtt

SEQ ID NO: 4005691 - DNA, 25 bp, Homo sapien
gagtgtgaaacacaaaggccttctt

SEQ ID NO: 4005692 - DNA, 25 bp, Homo sapien
cttggggagtgtgaaacacaaaggc

SEQ ID NO: 4005693 - DNA, 25 bp, Homo sapien
agaggcagtctggatatgggtttca

SEQ ID NO: 4005694 - DNA, 25 bp, Homo sapien
gccttgcatgctgttccactcagtg

SEQ ID NO: 4005695 - DNA, 25 bp, Homo sapien
gctgttccactcagtgctggacaca

SEQ ID NO: 4005696 - DNA, 25 bp, Homo sapien
aagaagcctgataaatcgtattcat

SEQ ID NO: 4005697 - DNA, 25 bp, Homo sapien
tgcatgctgttccactcagtgctgg

SEQ ID NO: 4005698 - DNA, 25 bp, Homo sapien
actgttgggcctcagtgactgttac

SEQ ID NO: 4005699 - DNA, 25 bp, Homo sapien
cacggtctgcttggcgtctggtgca

SEQ ID NO: 4005700 - DNA, 25 bp, Homo sapien
ggcctcagtgactgttaccctcctt

SEQ ID NO: 4005701 - DNA, 25 bp, Homo sapien
tctgcttggcgtctggtgcactgtt

SEQ ID NO: 4005702 - DNA, 25 bp, Homo sapien
cagcaaatgatgactgttctatttt

SEQ ID NO: 4005703 - DNA, 25 bp, Homo sapien
tgatgactgttctattttgaactcc

SEQ ID NO: 4005704 - DNA, 25 bp, Homo sapien
agcaaatgatgactgttctattttg

SEQ ID NO: 4005705 - DNA, 25 bp, Homo sapien
gcagcaaatgatgactgttctattt

SEQ ID NO: 4005706 - DNA, 25 bp, Homo sapien
tcagacccattgaagtacgagccag

SEQ ID NO: 4005707 - DNA, 25 bp, Homo sapien
gaagtacgagccagcatcccactct

SEQ ID NO: 4005708 - DNA, 25 bp, Homo sapien
tgtaatgtaactttgtcagacccat

SEQ ID NO: 4005709 - DNA, 25 bp, Homo sapien
ccaattccaggagcactgtaatgta

SEQ ID NO: 4005710 - DNA, 25 bp, Homo sapien
tctcattggcttgaatgggatcagt

SEQ ID NO: 4005711 - DNA, 25 bp, Homo sapien
aggtacctccttctcatgtcccggc

SEQ ID NO: 4005712 - DNA, 25 bp, Homo sapien
ccttcagcacatcccgttcacagaa

SEQ ID NO: 4005713 - DNA, 25 bp, Homo sapien
tcccgttcacagaagagagagtgtc

SEQ ID NO: 4005714 - DNA, 25 bp, Homo sapien
gacataaagtgaaggtaagcaggaa

SEQ ID NO: 4005715 - DNA, 25 bp, Homo sapien
tgtggggcaggtaataggacaagac

SEQ ID NO: 4005716 - DNA, 25 bp, Homo sapien
ggtggattgagaaggatatccttac

SEQ ID NO: 4005717 - DNA, 25 bp, Homo sapien
taagcaggaaggtgtcccaaatgtg

SEQ ID NO: 4005718 - DNA, 25 bp, Homo sapien
tctatgtctatgtcgatacctatac

SEQ ID NO: 4005719 - DNA, 25 bp, Homo sapien
aaacacttagacctagttgagacta

SEQ ID NO: 4005720 - DNA, 25 bp, Homo sapien
ggtggactcaactggcagcattgca

SEQ ID NO: 4005721 - DNA, 25 bp, Homo sapien
gatacctatactccaaaagaaagaa

SEQ ID NO: 4005722 - DNA, 25 bp, Homo sapien
gaagggcctctctaagtacaccaca

SEQ ID NO: 4005723 - DNA, 25 bp, Homo sapien
gatttttgtccaggcgcccacatgt

SEQ ID NO: 4005724 - DNA, 25 bp, Homo sapien
ttccctttagtaactggtgctgcag

SEQ ID NO: 4005725 - DNA, 25 bp, Homo sapien
gtatttcgcttcgttgacctcccca

SEQ ID NO: 4005726 - DNA, 25 bp, Homo sapien
cagggccatcagtctagcaatctgc

SEQ ID NO: 4005727 - DNA, 25 bp, Homo sapien
ggtgtctagtctacttgaaatgctt

SEQ ID NO: 4005728 - DNA, 25 bp, Homo sapien
ttttgtgctttgaagctcagctgag

SEQ ID NO: 4005729 - DNA, 25 bp, Homo sapien
ttgtgggcaacgtgtatttggagct

SEQ ID NO: 4005730 - DNA, 25 bp, Homo sapien
acttcttgccaagccaccaacaatt

SEQ ID NO: 4005731 - DNA, 25 bp, Homo sapien
gcctctggcaagcagttatcttcag

SEQ ID NO: 4005732 - DNA, 25 bp, Homo sapien
cctcttctgatatccctttaggaca

SEQ ID NO: 4005733 - DNA, 25 bp, Homo sapien
ctgctcagccaaggttccccagaag

SEQ ID NO: 4005734 - DNA, 25 bp, Homo sapien
ctgtgagcccatgggcatccaccat

SEQ ID NO: 4005735 - DNA, 25 bp, Homo sapien
taactgtgagcccatgggcatccac

SEQ ID NO: 4005736 - DNA, 25 bp, Homo sapien
ccagacaggttaatgtaactgtgag

SEQ ID NO: 4005737 - DNA, 25 bp, Homo sapien
gacaggttaatgtaactgtgagccc

SEQ ID NO: 4005738 - DNA, 25 bp, Homo sapien
ttaagagtttggtgtatactggctg

SEQ ID NO: 4005739 - DNA, 25 bp, Homo sapien
tttctgagcccagaaccttgattag

SEQ ID NO: 4005740 - DNA, 25 bp, Homo sapien
ccttgattagcacaaaaaggctctc

SEQ ID NO: 4005741 - DNA, 25 bp, Homo sapien
tttggtgtatactggctggccctgg

SEQ ID NO: 4005742 - DNA, 25 bp, Homo sapien
ggaacttggcgctgccatatctgta

SEQ ID NO: 4005743 - DNA, 25 bp, Homo sapien
catgatggcacaggaacttggcgct

SEQ ID NO: 4005744 - DNA, 25 bp, Homo sapien
tggcgctgccatatctgtatatact

SEQ ID NO: 4005745 - DNA, 25 bp, Homo sapien
gtgtgttgtacccatgatggcacag

SEQ ID NO: 4005746 - DNA, 25 bp, Homo sapien
gaagctcctccactcttgtgaatcc

SEQ ID NO: 4005747 - DNA, 25 bp, Homo sapien
gagtgaagctcctccactcttgtga

SEQ ID NO: 4005748 - DNA, 25 bp, Homo sapien
gatctattgctctacttgtgtgcct

SEQ ID NO: 4005749 - DNA, 25 bp, Homo sapien
cccatgtccaaccagagactcagat

SEQ ID NO: 4005750 - DNA, 25 bp, Homo sapien
tgagaccccaatgaaggtctattgg

SEQ ID NO: 4005751 - DNA, 25 bp, Homo sapien
gtatgtctggtgactatcatgggtc

SEQ ID NO: 4005752 - DNA, 25 bp, Homo sapien
ctattggcaccatgggctctctgag

SEQ ID NO: 4005753 - DNA, 25 bp, Homo sapien
tcaagatctatttcatgagacccca

SEQ ID NO: 4005754 - DNA, 25 bp, Homo sapien
tggccattggcataggcagggcacc

SEQ ID NO: 4005755 - DNA, 25 bp, Homo sapien
tgtccccacatctcaggttgatgag

SEQ ID NO: 4005756 - DNA, 25 bp, Homo sapien
atttctatagctctggccattggca

SEQ ID NO: 4005757 - DNA, 25 bp, Homo sapien
ctcaggttgatgagtgatgcaagcc

SEQ ID NO: 4005758 - DNA, 25 bp, Homo sapien
ccagggctccactatcaggtccttt

SEQ ID NO: 4005759 - DNA, 25 bp, Homo sapien
tgtgcttctggggtagatattccag

SEQ ID NO: 4005760 - DNA, 25 bp, Homo sapien
tattccagggctccactatcaggtc

SEQ ID NO: 4005761 - DNA, 25 bp, Homo sapien
gatattccagggctccactatcagg

SEQ ID NO: 4005762 - DNA, 25 bp, Homo sapien
ttggagcatctattaggacaccctg

SEQ ID NO: 4005763 - DNA, 25 bp, Homo sapien
gctttttgattcattggacatcttg

SEQ ID NO: 4005764 - DNA, 25 bp, Homo sapien
tgggcttggagcatctattaggaca

SEQ ID NO: 4005765 - DNA, 25 bp, Homo sapien
gcatctattaggacaccctgaagca

SEQ ID NO: 4005766 - DNA, 25 bp, Homo sapien
ggctttatgctttggcttttgaccc

SEQ ID NO: 4005767 - DNA, 25 bp, Homo sapien
ttggctctggctttatgctttggct

SEQ ID NO: 4005768 - DNA, 25 bp, Homo sapien
gctttggcttttgaccctcggtcat

SEQ ID NO: 4005769 - DNA, 25 bp, Homo sapien
tatgctttggcttttgaccctcggt

SEQ ID NO: 4005770 - DNA, 25 bp, Homo sapien
gcacatcacatttcctacatgcatt

SEQ ID NO: 4005771 - DNA, 25 bp, Homo sapien
cttcccgtacttctggtgcatcacc

SEQ ID NO: 4005772 - DNA, 25 bp, Homo sapien
tcacccctgcacatcacatttccta

SEQ ID NO: 4005773 - DNA, 25 bp, Homo sapien
gtacttctggtgcatcacccctgca

SEQ ID NO: 4005774 - DNA, 25 bp, Homo sapien
aagcggtgatgttgccctggagcct

SEQ ID NO: 4005775 - DNA, 25 bp, Homo sapien
tgctagaaacatgcccacaggagag

SEQ ID NO: 4005776 - DNA, 25 bp, Homo sapien
tcctaattctgctgcgtctggctga

SEQ ID NO: 4005777 - DNA, 25 bp, Homo sapien
cagggtaggcaagaaatcaacactt

SEQ ID NO: 4005778 - DNA, 25 bp, Homo sapien
tagtttctcgtattctgcattctct

SEQ ID NO: 4005779 - DNA, 25 bp, Homo sapien
ctggatctcatcagcacctagtttc

SEQ ID NO: 4005780 - DNA, 25 bp, Homo sapien
ttaggagcagctagcgagctgggat

SEQ ID NO: 4005781 - DNA, 25 bp, Homo sapien
catcagcacctagtttctcgtattc

SEQ ID NO: 4005782 - DNA, 25 bp, Homo sapien
cgtccccagcaacacagacaacttc

SEQ ID NO: 4005783 - DNA, 25 bp, Homo sapien
catctagctccgagatgctgggaga

SEQ ID NO: 4005784 - DNA, 25 bp, Homo sapien
actcccaggtctctgctagtgccgg

SEQ ID NO: 4005785 - DNA, 25 bp, Homo sapien
tatttggcagagtcatctagctccg

SEQ ID NO: 4005786 - DNA, 25 bp, Homo sapien
gacagaaactcttattactggcagt

SEQ ID NO: 4005787 - DNA, 25 bp, Homo sapien
gactctgctggatttgttagcatta

SEQ ID NO: 4005788 - DNA, 25 bp, Homo sapien
tagtgaccatggattggatgtgaag

SEQ ID NO: 4005789 - DNA, 25 bp, Homo sapien
ttagcattatgttcttgtgggaggg

SEQ ID NO: 4005790 - DNA, 25 bp, Homo sapien
ttgtttccagactctatcaccgctg

SEQ ID NO: 4005791 - DNA, 25 bp, Homo sapien
atcttctgcagctgtactttctgcc

SEQ ID NO: 4005792 - DNA, 25 bp, Homo sapien
caccgctgggatgtttgagcctatc

SEQ ID NO: 4005793 - DNA, 25 bp, Homo sapien
tactttctgcctcagatcctgggct

SEQ ID NO: 4005794 - DNA, 25 bp, Homo sapien
caatgcgtggttcaatgctgaactt

SEQ ID NO: 4005795 - DNA, 25 bp, Homo sapien
ggtttaacttaagagatgtgaggga

SEQ ID NO: 4005796 - DNA, 25 bp, Homo sapien
gacatcaaatcctgatactgttata

SEQ ID NO: 4005797 - DNA, 25 bp, Homo sapien
gttttgccaacagacaaccttgaca

SEQ ID NO: 4005798 - DNA, 25 bp, Homo sapien
aagacgattgttggatatacgaggc

SEQ ID NO: 4005799 - DNA, 25 bp, Homo sapien
caatttgtcgtttgtggaccaaggg

SEQ ID NO: 4005800 - DNA, 25 bp, Homo sapien
gtaattgtatcttaaccttctttga

SEQ ID NO: 4005801 - DNA, 25 bp, Homo sapien
ttggcgcaagtctgccagatgcttc

SEQ ID NO: 4005802 - DNA, 25 bp, Homo sapien
acagaggtgggtaagatatctctgg

SEQ ID NO: 4005803 - DNA, 25 bp, Homo sapien
ccacagaggtgggtaagatatctct

SEQ ID NO: 4005804 - DNA, 25 bp, Homo sapien
ggaatgtctagaagggaacttctga

SEQ ID NO: 4005805 - DNA, 25 bp, Homo sapien
atgtctagaagggaacttctgagag

SEQ ID NO: 4005806 - DNA, 25 bp, Homo sapien
tatctgcggtcatcattttcccctg

SEQ ID NO: 4005807 - DNA, 25 bp, Homo sapien
tacgctggtacctggattaacatgc

SEQ ID NO: 4005808 - DNA, 25 bp, Homo sapien
ccctgatctcggagatacgctggta

SEQ ID NO: 4005809 - DNA, 25 bp, Homo sapien
ggattaacatgcaattgcccacatt

SEQ ID NO: 4005810 - DNA, 25 bp, Homo sapien
aattgtccctcttgtgagtgatgag

SEQ ID NO: 4005811 - DNA, 25 bp, Homo sapien
gcgatttgagcatcctttggcacgc

SEQ ID NO: 4005812 - DNA, 25 bp, Homo sapien
tacagttcagatccacgggggggat

SEQ ID NO: 4005813 - DNA, 25 bp, Homo sapien
tcttctgttgctccaattgtccctc

SEQ ID NO: 4005814 - DNA, 25 bp, Homo sapien
tttatcctgccttgtcgggggagag

SEQ ID NO: 4005815 - DNA, 25 bp, Homo sapien
ctaaaggcacctttatcctgccttg

SEQ ID NO: 4005816 - DNA, 25 bp, Homo sapien
tcctgctaaaggcacctttatcctg

SEQ ID NO: 4005817 - DNA, 25 bp, Homo sapien
ccagtgagaaccaagttcctctggg

SEQ ID NO: 4005818 - DNA, 25 bp, Homo sapien
caccgttgtccagtagcctttcaga

SEQ ID NO: 4005819 - DNA, 25 bp, Homo sapien
aaggcagtgagtggatgcagttcca

SEQ ID NO: 4005820 - DNA, 25 bp, Homo sapien
gcctttcagaagatgttgactgcac

SEQ ID NO: 4005821 - DNA, 25 bp, Homo sapien
cagaaccctgtgtgggaatcggtgg

SEQ ID NO: 4005822 - DNA, 25 bp, Homo sapien
gacaggaaaatggatcctagttcgc

SEQ ID NO: 4005823 - DNA, 25 bp, Homo sapien
cctgtctgcgacataaaagcactta

SEQ ID NO: 4005824 - DNA, 25 bp, Homo sapien
ctaggtctgctaaagagtatccagg

SEQ ID NO: 4005825 - DNA, 25 bp, Homo sapien
caggtctctgcaaattctcagacag

SEQ ID NO: 4005826 - DNA, 25 bp, Homo sapien
tctccctttccacggaagccaggct

SEQ ID NO: 4005827 - DNA, 25 bp, Homo sapien
ctccctttccacggaagccaggctc

SEQ ID NO: 4005828 - DNA, 25 bp, Homo sapien
tgggttttgcctccaagacctgaaa

SEQ ID NO: 4005829 - DNA, 25 bp, Homo sapien
tccacagttggaaaagtccacagga

SEQ ID NO: 4005830 - DNA, 25 bp, Homo sapien
tcttgaagacttgttgacattaaca

SEQ ID NO: 4005831 - DNA, 25 bp, Homo sapien
tcctctataaactgtatgtccctga

SEQ ID NO: 4005832 - DNA, 25 bp, Homo sapien
ttctttttctgcagtagtagaagat

SEQ ID NO: 4005833 - DNA, 25 bp, Homo sapien
ctgtgttcttttagccttccttcct

SEQ ID NO: 4005834 - DNA, 25 bp, Homo sapien
ctgcagtagtagaagatgtttccat

SEQ ID NO: 4005835 - DNA, 25 bp, Homo sapien
ttctgcagtagtagaagatgtttcc

SEQ ID NO: 4005836 - DNA, 25 bp, Homo sapien
cagcaactctggtgtcagaagctat

SEQ ID NO: 4005837 - DNA, 25 bp, Homo sapien
actcccagcagatacgaggacacca

SEQ ID NO: 4005838 - DNA, 25 bp, Homo sapien
tgacatcacgaaatcagcaaaacca

SEQ ID NO: 4005839 - DNA, 25 bp, Homo sapien
tggtctggccaaacaagactcagag

SEQ ID NO: 4005840 - DNA, 25 bp, Homo sapien
gtggttgctctttgcccccagtcca

SEQ ID NO: 4005841 - DNA, 25 bp, Homo sapien
taaatctgtagtattgtattccttc

SEQ ID NO: 4005842 - DNA, 25 bp, Homo sapien
acttcatcaattgaactgggctcct

SEQ ID NO: 4005843 - DNA, 25 bp, Homo sapien
cccttatctcaactctgattaagag

SEQ ID NO: 4005844 - DNA, 25 bp, Homo sapien
gacacgtactttccaagtagtcctg

SEQ ID NO: 4005845 - DNA, 25 bp, Homo sapien
tagtcctgtctaggatggaaagctc

SEQ ID NO: 4005846 - DNA, 25 bp, Homo sapien
gcccaagaaggacacgtactttcca

SEQ ID NO: 4005847 - DNA, 25 bp, Homo sapien
gatgtagccacaatgatggcccaag

SEQ ID NO: 4005848 - DNA, 25 bp, Homo sapien
caaatagagtctttcaggtggcaaa

SEQ ID NO: 4005849 - DNA, 25 bp, Homo sapien
cgagttattatgtcaccagccttgg

SEQ ID NO: 4005850 - DNA, 25 bp, Homo sapien
ggagactctgagacacccaattaga

SEQ ID NO: 4005851 - DNA, 25 bp, Homo sapien
tttccatccatcgtacagcgggctg

SEQ ID NO: 4005852 - DNA, 25 bp, Homo sapien
tctgccagtttaaataccgtggttc

SEQ ID NO: 4005853 - DNA, 25 bp, Homo sapien
taaagtacgggaatgttggcagata

SEQ ID NO: 4005854 - DNA, 25 bp, Homo sapien
tgtaaagtacgggaatgttggcaga

SEQ ID NO: 4005855 - DNA, 25 bp, Homo sapien
taagaaatactccacatgtctttgc

SEQ ID NO: 4005856 - DNA, 25 bp, Homo sapien
catgggggcacttctaggacctcat

SEQ ID NO: 4005857 - DNA, 25 bp, Homo sapien
tcatgggggcacttctaggacctca

SEQ ID NO: 4005858 - DNA, 25 bp, Homo sapien
caaatcaatgtttttgtgatagaca

SEQ ID NO: 4005859 - DNA, 25 bp, Homo sapien
ctgtttacttggtggaaactgcagt

SEQ ID NO: 4005860 - DNA, 25 bp, Homo sapien
aacagaatccaactgtttacttggt

SEQ ID NO: 4005861 - DNA, 25 bp, Homo sapien
caaggagtaggactttggagcattg

SEQ ID NO: 4005862 - DNA, 25 bp, Homo sapien
agacaaggagtaggactttggagca

SEQ ID NO: 4005863 - DNA, 25 bp, Homo sapien
ggacaccattgcaactctcctgggc

SEQ ID NO: 4005864 - DNA, 25 bp, Homo sapien
gcgaggggcagttaaggacaccatt

SEQ ID NO: 4005865 - DNA, 25 bp, Homo sapien
taaggacaccattgcaactctcctg

SEQ ID NO: 4005866 - DNA, 25 bp, Homo sapien
gggcagttaaggacaccattgcaac

SEQ ID NO: 4005867 - DNA, 25 bp, Homo sapien
gaaggctcgtaagatgaaagcataa

SEQ ID NO: 4005868 - DNA, 25 bp, Homo sapien
catcatttactgcaccactccagat

SEQ ID NO: 4005869 - DNA, 25 bp, Homo sapien
atttactgcaccactccagataaaa

SEQ ID NO: 4005870 - DNA, 25 bp, Homo sapien
ctcttacttgaaggctcgtaagatg

SEQ ID NO: 4005871 - DNA, 25 bp, Homo sapien
tatctttccaactctgtcaggggtt

SEQ ID NO: 4005872 - DNA, 25 bp, Homo sapien
tgcttgttctttaacccatctgttt

SEQ ID NO: 4005873 - DNA, 25 bp, Homo sapien
tccatcagaggatactggtggttct

SEQ ID NO: 4005874 - DNA, 25 bp, Homo sapien
tcttccatcagaggatactggtggt

SEQ ID NO: 4005875 - DNA, 25 bp, Homo sapien
gctgactgtagacatgactaattgg

SEQ ID NO: 4005876 - DNA, 25 bp, Homo sapien
gatgccaaccattatgctgactgta

SEQ ID NO: 4005877 - DNA, 25 bp, Homo sapien
tgttctagtagaagcacgtggtcgc

SEQ ID NO: 4005878 - DNA, 25 bp, Homo sapien
agttcttcccaaaacctgcgtgaag

SEQ ID NO: 4005879 - DNA, 25 bp, Homo sapien
ggatggatagctctcctatggagga

SEQ ID NO: 4005880 - DNA, 25 bp, Homo sapien
taaattgcatggaggagtgcctggt

SEQ ID NO: 4005881 - DNA, 25 bp, Homo sapien
tccagttagggagggatttctctca

SEQ ID NO: 4005882 - DNA, 25 bp, Homo sapien
tagcacagaggtttatgccccatat

SEQ ID NO: 4005883 - DNA, 25 bp, Homo sapien
tccctggttgctacccacagtctgg

SEQ ID NO: 4005884 - DNA, 25 bp, Homo sapien
ctaaagatgaaggatggcatttgga

SEQ ID NO: 4005885 - DNA, 25 bp, Homo sapien
ttggaaagggcatatcacagggact

SEQ ID NO: 4005886 - DNA, 25 bp, Homo sapien
tgagtccctggttgctacccacagt

SEQ ID NO: 4005887 - DNA, 25 bp, Homo sapien
ttatcgcacaagaataaagctggct

SEQ ID NO: 4005888 - DNA, 25 bp, Homo sapien
acaagaataaagctggctctttccc

SEQ ID NO: 4005889 - DNA, 25 bp, Homo sapien
ctttccccctgcttgacatagattt

SEQ ID NO: 4005890 - DNA, 25 bp, Homo sapien
ctctttccccctgcttgacatagat

SEQ ID NO: 4005891 - DNA, 25 bp, Homo sapien
gcaggggggttactcagaatctgat

SEQ ID NO: 4005892 - DNA, 25 bp, Homo sapien
gaggagccctgggaatggtctctca

SEQ ID NO: 4005893 - DNA, 25 bp, Homo sapien
gcctttccagggtgtacagtgcaga

SEQ ID NO: 4005894 - DNA, 25 bp, Homo sapien
tgatgcacagtcctgagcttgcaga

SEQ ID NO: 4005895 - DNA, 25 bp, Homo sapien
tttgcttgtgaagggaagctgacaa

SEQ ID NO: 4005896 - DNA, 25 bp, Homo sapien
ctttgcttgtgaagggaagctgaca

SEQ ID NO: 4005897 - DNA, 25 bp, Homo sapien
cctttgcttgtgaagggaagctgac

SEQ ID NO: 4005898 - DNA, 25 bp, Homo sapien
ttgcttgtgaagggaagctgacaag

SEQ ID NO: 4005899 - DNA, 25 bp, Homo sapien
gggatgtgggtggttgcaaagttgt

SEQ ID NO: 4005900 - DNA, 25 bp, Homo sapien
tgtgggtggttgcaaagttgtgttt

SEQ ID NO: 4005901 - DNA, 25 bp, Homo sapien
gatgtgggtggttgcaaagttgtgt

SEQ ID NO: 4005902 - DNA, 25 bp, Homo sapien
aagggatgaaattgggtggggatga

SEQ ID NO: 4005903 - DNA, 25 bp, Homo sapien
ttgggcaccaacactggaataaatg

SEQ ID NO: 4005904 - DNA, 25 bp, Homo sapien
tcagtggtttccagtctccttgcat

SEQ ID NO: 4005905 - DNA, 25 bp, Homo sapien
aacactggaataaatgaaggtcagt

SEQ ID NO: 4005906 - DNA, 25 bp, Homo sapien
ggaataaatgaaggtcagtggtttc

SEQ ID NO: 4005907 - DNA, 25 bp, Homo sapien
tggaccagtggtctctcataataac

SEQ ID NO: 4005908 - DNA, 25 bp, Homo sapien
cagtgctcggtgcacattcggcaga

SEQ ID NO: 4005909 - DNA, 25 bp, Homo sapien
taagatccggactctgattccaatg

SEQ ID NO: 4005910 - DNA, 25 bp, Homo sapien
taataatacttaccccatgttggga

SEQ ID NO: 4005911 - DNA, 25 bp, Homo sapien
caaatatccatttgtcttccaaaag

SEQ ID NO: 4005912 - DNA, 25 bp, Homo sapien
tcaaatatccatttgtcttccaaaa

SEQ ID NO: 4005913 - DNA, 25 bp, Homo sapien
acatccatacaagggtcaaacactc

SEQ ID NO: 4005914 - DNA, 25 bp, Homo sapien
caagggtcaaacactccatcttctc

SEQ ID NO: 4005915 - DNA, 25 bp, Homo sapien
gggtcctctgccgtgcccgtcgaag

SEQ ID NO: 4005916 - DNA, 25 bp, Homo sapien
cccgtcgaagtcagaggtccaggag

SEQ ID NO: 4005917 - DNA, 25 bp, Homo sapien
gccaagagccacatcatgttttcga

SEQ ID NO: 4005918 - DNA, 25 bp, Homo sapien
gcatccagggtgaataggtcctctg

SEQ ID NO: 4005919 - DNA, 25 bp, Homo sapien
gaagggataaattgtctaactttgc

SEQ ID NO: 4005920 - DNA, 25 bp, Homo sapien
tgcagagataatgatccaggtttca

SEQ ID NO: 4005921 - DNA, 25 bp, Homo sapien
ccctgcttgccgatataatttctgc

SEQ ID NO: 4005922 - DNA, 25 bp, Homo sapien
cccctgcttgccgatataatttctg

SEQ ID NO: 4005923 - DNA, 25 bp, Homo sapien
cctgcttgccgatataatttctgct

SEQ ID NO: 4005924 - DNA, 25 bp, Homo sapien
gcccctgcttgccgatataatttct

SEQ ID NO: 4005925 - DNA, 25 bp, Homo sapien
aaaagaggcaccacctttactctgg

SEQ ID NO: 4005926 - DNA, 25 bp, Homo sapien
atgcaagaatgcctaatacagcttt

SEQ ID NO: 4005927 - DNA, 25 bp, Homo sapien
gaatgcctaatacagctttcaagta

SEQ ID NO: 4005928 - DNA, 25 bp, Homo sapien
gccatgcatcctatacagcctttgg

SEQ ID NO: 4005929 - DNA, 25 bp, Homo sapien
acagtgcctttgctaacctgtattt

SEQ ID NO: 4005930 - DNA, 25 bp, Homo sapien
gcctttgctaacctgtatttgtttc

SEQ ID NO: 4005931 - DNA, 25 bp, Homo sapien
ttgctaacctgtatttgtttctcca

SEQ ID NO: 4005932 - DNA, 25 bp, Homo sapien
gtgcctttgctaacctgtatttgtt

SEQ ID NO: 4005933 - DNA, 25 bp, Homo sapien
tgggtccagagcattaaagaccatg

SEQ ID NO: 4005934 - DNA, 25 bp, Homo sapien
agcaaaaatcagcttagcaaatggg

SEQ ID NO: 4005935 - DNA, 25 bp, Homo sapien
cagagcattaaagaccatgcccttc

SEQ ID NO: 4005936 - DNA, 25 bp, Homo sapien
tcagcttagcaaatgggtccagagc

SEQ ID NO: 4005937 - DNA, 25 bp, Homo sapien
tagagcacctgatggtcaaggaagg

SEQ ID NO: 4005938 - DNA, 25 bp, Homo sapien
tattcatgggctaaagacccctaca

SEQ ID NO: 4005939 - DNA, 25 bp, Homo sapien
aaaagcttaaatcggctgcgacgcc

SEQ ID NO: 4005940 - DNA, 25 bp, Homo sapien
tgcgacgccaccagatattcatggg

SEQ ID NO: 4005941 - DNA, 25 bp, Homo sapien
cagggacaatagttgtttagagcgg

SEQ ID NO: 4005942 - DNA, 25 bp, Homo sapien
ctttttcagggcatagtgcagggac

SEQ ID NO: 4005943 - DNA, 25 bp, Homo sapien
tgtttagagcgggtgcaaaaggaaa

SEQ ID NO: 4005944 - DNA, 25 bp, Homo sapien
gcatagtgcagggacaatagttgtt

SEQ ID NO: 4005945 - DNA, 25 bp, Homo sapien
tctccatttgcctcggactaacatc

SEQ ID NO: 4005946 - DNA, 25 bp, Homo sapien
tgggtaggttagtggcccacagagt

SEQ ID NO: 4005947 - DNA, 25 bp, Homo sapien
ccctttgccagagtgggtaggttag

SEQ ID NO: 4005948 - DNA, 25 bp, Homo sapien
ctctccatttgcctcggactaacat

SEQ ID NO: 4005949 - DNA, 25 bp, Homo sapien
cagctctctggaggtcaagtgccag

SEQ ID NO: 4005950 - DNA, 25 bp, Homo sapien
aggtcaagtgccaggttcctgagaa

SEQ ID NO: 4005951 - DNA, 25 bp, Homo sapien
ttaagcaccagctctctggaggtca

SEQ ID NO: 4005952 - DNA, 25 bp, Homo sapien
gtcaagtgccaggttcctgagaaca

SEQ ID NO: 4005953 - DNA, 25 bp, Homo sapien
cagcacctccttgttacaatataag

SEQ ID NO: 4005954 - DNA, 25 bp, Homo sapien
gatcccagtggaaatgtaagggctc

SEQ ID NO: 4005955 - DNA, 25 bp, Homo sapien
aatgtaagggctcctgtgttgtcct

SEQ ID NO: 4005956 - DNA, 25 bp, Homo sapien
tgggagcgtagctatatccagcacc

SEQ ID NO: 4005957 - DNA, 25 bp, Homo sapien
aaatgcaattcccatccgttggact

SEQ ID NO: 4005958 - DNA, 25 bp, Homo sapien
aagaatttcttgattaggatgagaa

SEQ ID NO: 4005959 - DNA, 25 bp, Homo sapien
tgtattcctgaaggtaaagaatttc

SEQ ID NO: 4005960 - DNA, 25 bp, Homo sapien
gaactttaatagctctgtattcctg

SEQ ID NO: 4005961 - DNA, 25 bp, Homo sapien
gcatcacagctgagggactatggaa

SEQ ID NO: 4005962 - DNA, 25 bp, Homo sapien
tatggaaagccgtccacctgagttc

SEQ ID NO: 4005963 - DNA, 25 bp, Homo sapien
cacgggttaccaacttgcctgagtg

SEQ ID NO: 4005964 - DNA, 25 bp, Homo sapien
tgcccagggtggatagagtttcatc

SEQ ID NO: 4005965 - DNA, 25 bp, Homo sapien
ttcccatactcatggatgatttaat

SEQ ID NO: 4005966 - DNA, 25 bp, Homo sapien
ccatactcatggatgatttaatttc

SEQ ID NO: 4005967 - DNA, 25 bp, Homo sapien
tcccatactcatggatgatttaatt

SEQ ID NO: 4005968 - DNA, 25 bp, Homo sapien
ttcttcctcaagattaagaaggtac

SEQ ID NO: 4005969 - DNA, 25 bp, Homo sapien
tcaaaggcattgcaccctgatggtt

SEQ ID NO: 4005970 - DNA, 25 bp, Homo sapien
caaaggcattgcaccctgatggttg

SEQ ID NO: 4005971 - DNA, 25 bp, Homo sapien
aaggcattgcaccctgatggttgtt

SEQ ID NO: 4005972 - DNA, 25 bp, Homo sapien
cttcaaaggcattgcaccctgatgg

SEQ ID NO: 4005973 - DNA, 25 bp, Homo sapien
tgtgccaactgcatcataatgagca

SEQ ID NO: 4005974 - DNA, 25 bp, Homo sapien
caatcatgagcaacatgacaggtga

SEQ ID NO: 4005975 - DNA, 25 bp, Homo sapien
gggctctccgtctttgtgccaactg

SEQ ID NO: 4005976 - DNA, 25 bp, Homo sapien
gagcagaaccgcatgcattaaataa

SEQ ID NO: 4005977 - DNA, 25 bp, Homo sapien
gaggaacaacgtgttgccagctgag

SEQ ID NO: 4005978 - DNA, 25 bp, Homo sapien
gagtgtctgatggtcccggtttgct

SEQ ID NO: 4005979 - DNA, 25 bp, Homo sapien
tatctgtttatagccatctgctgcc

SEQ ID NO: 4005980 - DNA, 25 bp, Homo sapien
tcagacatttggtttgccccgagtg

SEQ ID NO: 4005981 - DNA, 25 bp, Homo sapien
ccctggaaatcagccgctctgcaag

SEQ ID NO: 4005982 - DNA, 25 bp, Homo sapien
tccctggaaatcagccgctctgcaa

SEQ ID NO: 4005983 - DNA, 25 bp, Homo sapien
gatagaaagatgctccctggaaatc

SEQ ID NO: 4005984 - DNA, 25 bp, Homo sapien
gtcttgcaaactgctgaacaccact

SEQ ID NO: 4005985 - DNA, 25 bp, Homo sapien
ttcactgtcagtgtcttgcaaactg

SEQ ID NO: 4005986 - DNA, 25 bp, Homo sapien
gctgaacaccactggatccctcatt

SEQ ID NO: 4005987 - DNA, 25 bp, Homo sapien
cctcattcctaaagcagaagtggct

SEQ ID NO: 4005988 - DNA, 25 bp, Homo sapien
ccaccattggaggctacctcagcag

SEQ ID NO: 4005989 - DNA, 25 bp, Homo sapien
ttgggcagaccccaccattggaggc

SEQ ID NO: 4005990 - DNA, 25 bp, Homo sapien
cgtagtgggaatcacacacattggg

SEQ ID NO: 4005991 - DNA, 25 bp, Homo sapien
aatcacacacattgggcagacccca

SEQ ID NO: 4005992 - DNA, 25 bp, Homo sapien
tttctgagcccactctgaaggtccc

SEQ ID NO: 4005993 - DNA, 25 bp, Homo sapien
ctgagcccactctgaaggtccctgc

SEQ ID NO: 4005994 - DNA, 25 bp, Homo sapien
cagacaacacagaacagttatcttc

SEQ ID NO: 4005995 - DNA, 25 bp, Homo sapien
taataggaacttcacagttcaaagg

SEQ ID NO: 4005996 - DNA, 25 bp, Homo sapien
tgattacaaagtagttggagcctgt

SEQ ID NO: 4005997 - DNA, 25 bp, Homo sapien
taagcaagtcggtagcattcaacca

SEQ ID NO: 4005998 - DNA, 25 bp, Homo sapien
ggagcctgttttgtttagaaagaga

SEQ ID NO: 4005999 - DNA, 25 bp, Homo sapien
cccattagccagtcttctgattaca

SEQ ID NO: 4006000 - DNA, 25 bp, Homo sapien
tctcaagtcattattgatatcagct

SEQ ID NO: 4006001 - DNA, 25 bp, Homo sapien
aagatcctgatagcttgcaattccc

SEQ ID NO: 4006002 - DNA, 25 bp, Homo sapien
ctcccaagccataaacaactcggtt

SEQ ID NO: 4006003 - DNA, 25 bp, Homo sapien
tgcaattccctctgctgtgaactcc

SEQ ID NO: 4006004 - DNA, 25 bp, Homo sapien
ggcttgacaattccaagtggtggat

SEQ ID NO: 4006005 - DNA, 25 bp, Homo sapien
aataatcaaaggcttgacaattcca

SEQ ID NO: 4006006 - DNA, 25 bp, Homo sapien
taatcaaaggcttgacaattccaag

SEQ ID NO: 4006007 - DNA, 25 bp, Homo sapien
aaaataatcaaaggcttgacaattc

SEQ ID NO: 4006008 - DNA, 25 bp, Homo sapien
ttacaagggccttcgtgagaaatga

SEQ ID NO: 4006009 - DNA, 25 bp, Homo sapien
aaccaattacaagggccttcgtgag

SEQ ID NO: 4006010 - DNA, 25 bp, Homo sapien
ctcattaaatgtctccgctgctgcc

SEQ ID NO: 4006011 - DNA, 25 bp, Homo sapien
gctgccagcgtgtgaaaaccaatta

SEQ ID NO: 4006012 - DNA, 25 bp, Homo sapien
atggcaataatgagagcaagaggtg

SEQ ID NO: 4006013 - DNA, 25 bp, Homo sapien
ggagtggagaggacagagatagcag

SEQ ID NO: 4006014 - DNA, 25 bp, Homo sapien
gagaggacagagatagcagagaaga

SEQ ID NO: 4006015 - DNA, 25 bp, Homo sapien
gtggagaggacagagatagcagaga

SEQ ID NO: 4006016 - DNA, 25 bp, Homo sapien
ggttggcagctgactgtttcctact

SEQ ID NO: 4006017 - DNA, 25 bp, Homo sapien
cagctgactgtttcctactctcctt

SEQ ID NO: 4006018 - DNA, 25 bp, Homo sapien
ggcagctgactgtttcctactctcc

SEQ ID NO: 4006019 - DNA, 25 bp, Homo sapien
taggttggcagctgactgtttccta

SEQ ID NO: 4006020 - DNA, 25 bp, Homo sapien
tgccagacacatacaccatcggact

SEQ ID NO: 4006021 - DNA, 25 bp, Homo sapien
cagacacatacaccatcggacttac

SEQ ID NO: 4006022 - DNA, 25 bp, Homo sapien
ctgtccacatgaacctcttgctgcc

SEQ ID NO: 4006023 - DNA, 25 bp, Homo sapien
tgtccacatgaacctcttgctgcca

SEQ ID NO: 4006024 - DNA, 25 bp, Homo sapien
cttttgaaagtctgccagaggtgag

SEQ ID NO: 4006025 - DNA, 25 bp, Homo sapien
tgagccttttgaaagtctgccagag

SEQ ID NO: 4006026 - DNA, 25 bp, Homo sapien
tgagttttcccactcatttggagaa

SEQ ID NO: 4006027 - DNA, 25 bp, Homo sapien
gtgagttttcccactcatttggaga

SEQ ID NO: 4006028 - DNA, 25 bp, Homo sapien
caccattatattgtagacatcttct

SEQ ID NO: 4006029 - DNA, 25 bp, Homo sapien
cattatattgtagacatcttctggg

SEQ ID NO: 4006030 - DNA, 25 bp, Homo sapien
atattgtagacatcttctggggaga

SEQ ID NO: 4006031 - DNA, 25 bp, Homo sapien
tatattgtagacatcttctggggag

SEQ ID NO: 4006032 - DNA, 25 bp, Homo sapien
agtttggaatcctggcaagtcgccg

SEQ ID NO: 4006033 - DNA, 25 bp, Homo sapien
tcaggagatgctgaagggacccttt

SEQ ID NO: 4006034 - DNA, 25 bp, Homo sapien
aaggaggtctttgccctgtgcataa

SEQ ID NO: 4006035 - DNA, 25 bp, Homo sapien
tcttctcagggcttcggattcaaat

SEQ ID NO: 4006036 - DNA, 25 bp, Homo sapien
tcaatgaatgggctggcttcccgaa

SEQ ID NO: 4006037 - DNA, 25 bp, Homo sapien
tttttccttcaatgaatgggctggc

SEQ ID NO: 4006038 - DNA, 25 bp, Homo sapien
ttctccagtgtctatggcaacctgg

SEQ ID NO: 4006039 - DNA, 25 bp, Homo sapien
tggcttcccgaagacaagtaaagcc

SEQ ID NO: 4006040 - DNA, 25 bp, Homo sapien
ctgttacagagggagggtgcacagg

SEQ ID NO: 4006041 - DNA, 25 bp, Homo sapien
ttacagagggagggtgcacaggggt

SEQ ID NO: 4006042 - DNA, 25 bp, Homo sapien
gttacagagggagggtgcacagggg

SEQ ID NO: 4006043 - DNA, 25 bp, Homo sapien
tgttacagagggagggtgcacaggg

SEQ ID NO: 4006044 - DNA, 25 bp, Homo sapien
gcttgagctggtttgccctcttccc

SEQ ID NO: 4006045 - DNA, 25 bp, Homo sapien
tccactgagctattactaggtcttc

SEQ ID NO: 4006046 - DNA, 25 bp, Homo sapien
tattactaggtcttccaatacacca

SEQ ID NO: 4006047 - DNA, 25 bp, Homo sapien
tgagctattactaggtcttccaata

SEQ ID NO: 4006048 - DNA, 25 bp, Homo sapien
gccaaccagccgctcagtatggcat

SEQ ID NO: 4006049 - DNA, 25 bp, Homo sapien
tctgccaaccagccgctcagtatgg

SEQ ID NO: 4006050 - DNA, 25 bp, Homo sapien
cttctgccaaccagccgctcagtat

SEQ ID NO: 4006051 - DNA, 25 bp, Homo sapien
tgccaaccagccgctcagtatggca

SEQ ID NO: 4006052 - DNA, 25 bp, Homo sapien
tcttaaggaagtattcacccaggaa

SEQ ID NO: 4006053 - DNA, 25 bp, Homo sapien
taaagaagaattgttgcatacctag

SEQ ID NO: 4006054 - DNA, 25 bp, Homo sapien
aagtattcacccaggaagtattcac

SEQ ID NO: 4006055 - DNA, 25 bp, Homo sapien
gcatacctagtattttccagtctta

SEQ ID NO: 4006056 - DNA, 25 bp, Homo sapien
cagtttggcagcgccctcatggttg

SEQ ID NO: 4006057 - DNA, 25 bp, Homo sapien
cgagcaaatgggctaatcagcaggc

SEQ ID NO: 4006058 - DNA, 25 bp, Homo sapien
tggctgctcaggaaatatcgagcaa

SEQ ID NO: 4006059 - DNA, 25 bp, Homo sapien
tcagcaggcaaagaattgattcccg

SEQ ID NO: 4006060 - DNA, 25 bp, Homo sapien
tcctagttacgttatgcccaaaggc

SEQ ID NO: 4006061 - DNA, 25 bp, Homo sapien
gcccaaaggcaatgctaattaacag

SEQ ID NO: 4006062 - DNA, 25 bp, Homo sapien
gcttctgaatccctgccgttggctc

SEQ ID NO: 4006063 - DNA, 25 bp, Homo sapien
cactatttagttggcaggattgttc

SEQ ID NO: 4006064 - DNA, 25 bp, Homo sapien
tgtggagtgacatcatgccgaagac

SEQ ID NO: 4006065 - DNA, 25 bp, Homo sapien
aagacgtcattagcagtcggtgcca

SEQ ID NO: 4006066 - DNA, 25 bp, Homo sapien
tggtcaaaaccaggaccactccagg

SEQ ID NO: 4006067 - DNA, 25 bp, Homo sapien
tcggtcactcttggcctctcttgaa

SEQ ID NO: 4006068 - DNA, 25 bp, Homo sapien
aggctctctgttccggtgtcaccat

SEQ ID NO: 4006069 - DNA, 25 bp, Homo sapien
tcccttggagcatcaggcaaggctc

SEQ ID NO: 4006070 - DNA, 25 bp, Homo sapien
aaccttcccttggagcatcaggcaa

SEQ ID NO: 4006071 - DNA, 25 bp, Homo sapien
cttcccttggagcatcaggcaaggc

SEQ ID NO: 4006072 - DNA, 25 bp, Homo sapien
aatggttgagcaggaacgatgtgcc

SEQ ID NO: 4006073 - DNA, 25 bp, Homo sapien
agcaggaacgatgtgcctggtactg

SEQ ID NO: 4006074 - DNA, 25 bp, Homo sapien
tgagcaggaacgatgtgcctggtac

SEQ ID NO: 4006075 - DNA, 25 bp, Homo sapien
aaagaacaatggttgagcaggaacg

SEQ ID NO: 4006076 - DNA, 25 bp, Homo sapien
ccctcagaggcttgatcctcacccc

SEQ ID NO: 4006077 - DNA, 25 bp, Homo sapien
gccctcagaggcttgatcctcaccc

SEQ ID NO: 4006078 - DNA, 25 bp, Homo sapien
ctcagaggcttgatcctcaccccaa

SEQ ID NO: 4006079 - DNA, 25 bp, Homo sapien
cctcagaggcttgatcctcacccca

SEQ ID NO: 4006080 - DNA, 25 bp, Homo sapien
gacaagattatggaaatcatcacca

SEQ ID NO: 4006081 - DNA, 25 bp, Homo sapien
cagcagcaattaaggtgacaagatt

SEQ ID NO: 4006082 - DNA, 25 bp, Homo sapien
ttaaggtgacaagattatggaaatc

SEQ ID NO: 4006083 - DNA, 25 bp, Homo sapien
gtgacagcagcaattaaggtgacaa

SEQ ID NO: 4006084 - DNA, 25 bp, Homo sapien
gaggagacagttgtacagagactgc

SEQ ID NO: 4006085 - DNA, 25 bp, Homo sapien
gagaggagacagttgtacagagact

SEQ ID NO: 4006086 - DNA, 25 bp, Homo sapien
ggagacagttgtacagagactgcca

SEQ ID NO: 4006087 - DNA, 25 bp, Homo sapien
agacagttgtacagagactgccagc

SEQ ID NO: 4006088 - DNA, 25 bp, Homo sapien
acctttcaaagttctgcatgttctg

SEQ ID NO: 4006089 - DNA, 25 bp, Homo sapien
gaagtgtctcgtccaagctgatctt

SEQ ID NO: 4006090 - DNA, 25 bp, Homo sapien
gcatggtaggctgctcaaaaacctt

SEQ ID NO: 4006091 - DNA, 25 bp, Homo sapien
gcagaggaagtgtctcgtccaagct

SEQ ID NO: 4006092 - DNA, 25 bp, Homo sapien
ggagacataacatcatataacctaa

SEQ ID NO: 4006093 - DNA, 25 bp, Homo sapien
tgtctgatcccagagcttgcctttg

SEQ ID NO: 4006094 - DNA, 25 bp, Homo sapien
ccagtggaatcaatggccgtgaaca

SEQ ID NO: 4006095 - DNA, 25 bp, Homo sapien
agtattgggtttacacactaccagc

SEQ ID NO: 4006096 - DNA, 25 bp, Homo sapien
tacagtggtcatggtagggctcttg

SEQ ID NO: 4006097 - DNA, 25 bp, Homo sapien
ggtttgtgccaaagcgtgctgatcc

SEQ ID NO: 4006098 - DNA, 25 bp, Homo sapien
cagacttcagaatagcgaggtgtgg

SEQ ID NO: 4006099 - DNA, 25 bp, Homo sapien
agcgtgctgatccttcaggactctg

SEQ ID NO: 4006100 - DNA, 25 bp, Homo sapien
tggaggaagtgctagctccatgagt

SEQ ID NO: 4006101 - DNA, 25 bp, Homo sapien
tgcggtgccatgcaggtcaaggtag

SEQ ID NO: 4006102 - DNA, 25 bp, Homo sapien
cggtgccatgcaggtcaaggtagtg

SEQ ID NO: 4006103 - DNA, 25 bp, Homo sapien
ctgcggtgccatgcaggtcaaggta

SEQ ID NO: 4006104 - DNA, 25 bp, Homo sapien
gtgccatgcaggtcaaggtagtgac

SEQ ID NO: 4006105 - DNA, 25 bp, Homo sapien
tgtgtggccctacgtgccaggtgat

SEQ ID NO: 4006106 - DNA, 25 bp, Homo sapien
tggactaggggaattgcttgcacaa

SEQ ID NO: 4006107 - DNA, 25 bp, Homo sapien
gatggactaggggaattgcttgcac

SEQ ID NO: 4006108 - DNA, 25 bp, Homo sapien
actaggggaattgcttgcacaagcc

SEQ ID NO: 4006109 - DNA, 25 bp, Homo sapien
gcatcttctgaactataatacggta

SEQ ID NO: 4006110 - DNA, 25 bp, Homo sapien
ttgatagcacaacagctccttgcat

SEQ ID NO: 4006111 - DNA, 25 bp, Homo sapien
gcattaggatagcagaacagctttg

SEQ ID NO: 4006112 - DNA, 25 bp, Homo sapien
taggatgaatactacacgctgcatc

SEQ ID NO: 4006113 - DNA, 25 bp, Homo sapien
gttcacagaaattgggagctaaaga

SEQ ID NO: 4006114 - DNA, 25 bp, Homo sapien
attatcacaagttcacagaaattgg

SEQ ID NO: 4006115 - DNA, 25 bp, Homo sapien
caagttcacagaaattgggagctaa

SEQ ID NO: 4006116 - DNA, 25 bp, Homo sapien
cacaagttcacagaaattgggagct

SEQ ID NO: 4006117 - DNA, 25 bp, Homo sapien
acacgatgctaacccatttttacat

SEQ ID NO: 4006118 - DNA, 25 bp, Homo sapien
agacacgatgctaacccatttttac

SEQ ID NO: 4006119 - DNA, 25 bp, Homo sapien
cagacacgatgctaacccattttta

SEQ ID NO: 4006120 - DNA, 25 bp, Homo sapien
cgatgctaacccatttttacatttt

SEQ ID NO: 4006121 - DNA, 25 bp, Homo sapien
caggttcctttttccttcctgtcat

SEQ ID NO: 4006122 - DNA, 25 bp, Homo sapien
gggagtcaggaccttcaaagctgac

SEQ ID NO: 4006123 - DNA, 25 bp, Homo sapien
tgggagtcaggaccttcaaagctga

SEQ ID NO: 4006124 - DNA, 25 bp, Homo sapien
ttcaacaagttttactggcggtgtg

SEQ ID NO: 4006125 - DNA, 25 bp, Homo sapien
caacaagttttactggcggtgtgaa

SEQ ID NO: 4006126 - DNA, 25 bp, Homo sapien
tcaacaagttttactggcggtgtga

SEQ ID NO: 4006127 - DNA, 25 bp, Homo sapien
gattcaacaagttttactggcggtg

SEQ ID NO: 4006128 - DNA, 25 bp, Homo sapien
aaggaatcattcggggggcctgcat

SEQ ID NO: 4006129 - DNA, 25 bp, Homo sapien
cggcaaggaatcattcggggggcct

SEQ ID NO: 4006130 - DNA, 25 bp, Homo sapien
caaggaatcattcggggggcctgca

SEQ ID NO: 4006131 - DNA, 25 bp, Homo sapien
ggcaaggaatcattcggggggcctg

SEQ ID NO: 4006132 - DNA, 25 bp, Homo sapien
ctccacccagattgtggtctcaatt

SEQ ID NO: 4006133 - DNA, 25 bp, Homo sapien
tcaattcccactgaggtagtccagt

SEQ ID NO: 4006134 - DNA, 25 bp, Homo sapien
tggactgaaggtctcccacctccac

SEQ ID NO: 4006135 - DNA, 25 bp, Homo sapien
agtcaaccagcactccacagggatt

SEQ ID NO: 4006136 - DNA, 25 bp, Homo sapien
cctttaagttgggcaaatgatcaaa

SEQ ID NO: 4006137 - DNA, 25 bp, Homo sapien
tacacctttaagttgggcaaatgat

SEQ ID NO: 4006138 - DNA, 25 bp, Homo sapien
tttaagttgggcaaatgatcaaaga

SEQ ID NO: 4006139 - DNA, 25 bp, Homo sapien
cacctttaagttgggcaaatgatca

SEQ ID NO: 4006140 - DNA, 25 bp, Homo sapien
cagggtcatataggaaaaacgtatg

SEQ ID NO: 4006141 - DNA, 25 bp, Homo sapien
ggtcatataggaaaaacgtatgatt

SEQ ID NO: 4006142 - DNA, 25 bp, Homo sapien
cacagggtcatataggaaaaacgta

SEQ ID NO: 4006143 - DNA, 25 bp, Homo sapien
gggtcatataggaaaaacgtatgat

SEQ ID NO: 4006144 - DNA, 25 bp, Homo sapien
cccaaagatccatcagcccacgcac

SEQ ID NO: 4006145 - DNA, 25 bp, Homo sapien
aaaatcccaaagatccatcagccca

SEQ ID NO: 4006146 - DNA, 25 bp, Homo sapien
tcccaaagatccatcagcccacgca

SEQ ID NO: 4006147 - DNA, 25 bp, Homo sapien
ctaaaaatcccaaagatccatcagc

SEQ ID NO: 4006148 - DNA, 25 bp, Homo sapien
agttacacccatggaaaaacaaatg

SEQ ID NO: 4006149 - DNA, 25 bp, Homo sapien
aacaaatgaagccaatagcatgttc

SEQ ID NO: 4006150 - DNA, 25 bp, Homo sapien
aaacaaatgaagccaatagcatgtt

SEQ ID NO: 4006151 - DNA, 25 bp, Homo sapien
ctggagaagttacacccatggaaaa

SEQ ID NO: 4006152 - DNA, 25 bp, Homo sapien
tctgtcctgtgtccggaatcaccca

SEQ ID NO: 4006153 - DNA, 25 bp, Homo sapien
cttctcaccttctctgtcctgtgtc

SEQ ID NO: 4006154 - DNA, 25 bp, Homo sapien
ctgtcctgtgtccggaatcacccat

SEQ ID NO: 4006155 - DNA, 25 bp, Homo sapien
ttctctgtcctgtgtccggaatcac

SEQ ID NO: 4006156 - DNA, 25 bp, Homo sapien
ctaacagggatgaggcaatatctca

SEQ ID NO: 4006157 - DNA, 25 bp, Homo sapien
aatgctgcaattaccgtgggagggc

SEQ ID NO: 4006158 - DNA, 25 bp, Homo sapien
gcaccaattcccaccgacagtgtat

SEQ ID NO: 4006159 - DNA, 25 bp, Homo sapien
tctttgccaacacctatcttccggg

SEQ ID NO: 4006160 - DNA, 25 bp, Homo sapien
tggtgcaagaaaatggtccagtttc

SEQ ID NO: 4006161 - DNA, 25 bp, Homo sapien
gtcttacaattaagcctttagccca

SEQ ID NO: 4006162 - DNA, 25 bp, Homo sapien
cttagctgaccacatgtaagtgggc

SEQ ID NO: 4006163 - DNA, 25 bp, Homo sapien
tctacccattggtttatgcatctgt

SEQ ID NO: 4006164 - DNA, 25 bp, Homo sapien
gggcaaattatcaagaccattgttg

SEQ ID NO: 4006165 - DNA, 25 bp, Homo sapien
tggtaacagcaggaatcggctttgt

SEQ ID NO: 4006166 - DNA, 25 bp, Homo sapien
aaatcaagattcatcaacatagcca

SEQ ID NO: 4006167 - DNA, 25 bp, Homo sapien
aacatagccatggtgcaaaacctgc

SEQ ID NO: 4006168 - DNA, 25 bp, Homo sapien
cttatccactgaaagaacatctgtt

SEQ ID NO: 4006169 - DNA, 25 bp, Homo sapien
atttttcaggtgatgaacggcctct

SEQ ID NO: 4006170 - DNA, 25 bp, Homo sapien
tcaggtgatgaacggcctctgaatt

SEQ ID NO: 4006171 - DNA, 25 bp, Homo sapien
tgaattgtggtttataaacctcagg

SEQ ID NO: 4006172 - DNA, 25 bp, Homo sapien
catttctctgtctcggtttggttga

SEQ ID NO: 4006173 - DNA, 25 bp, Homo sapien
gtactcaggttatattaggcgctca

SEQ ID NO: 4006174 - DNA, 25 bp, Homo sapien
gttttgttcacaactgcattcccag

SEQ ID NO: 4006175 - DNA, 25 bp, Homo sapien
tggttgacctgaccccactattaga

SEQ ID NO: 4006176 - DNA, 25 bp, Homo sapien
cagaccaggcacaaggtcttctctg

SEQ ID NO: 4006177 - DNA, 25 bp, Homo sapien
aggcacaaggtcttctctgacccca

SEQ ID NO: 4006178 - DNA, 25 bp, Homo sapien
cctctgatatgcaaaagccaggcct

SEQ ID NO: 4006179 - DNA, 25 bp, Homo sapien
tttcagtggcctccacggacctctg

SEQ ID NO: 4006180 - DNA, 25 bp, Homo sapien
agctgggtgagaatactcagaggcc

SEQ ID NO: 4006181 - DNA, 25 bp, Homo sapien
cctctatggagccagctgggtgaga

SEQ ID NO: 4006182 - DNA, 25 bp, Homo sapien
aacgccgtcagtggatcatccaaga

SEQ ID NO: 4006183 - DNA, 25 bp, Homo sapien
taaaatgaagagtgatcctctatgg

SEQ ID NO: 4006184 - DNA, 25 bp, Homo sapien
cttttctgggggtgaaaccatatct

SEQ ID NO: 4006185 - DNA, 25 bp, Homo sapien
tttctgggggtgaaaccatatctgt

SEQ ID NO: 4006186 - DNA, 25 bp, Homo sapien
ccaacactcccgcccttcctttgag

SEQ ID NO: 4006187 - DNA, 25 bp, Homo sapien
cactcccgcccttcctttgagcttt

SEQ ID NO: 4006188 - DNA, 25 bp, Homo sapien
gaagtgtcatccaagcaatgtgctt

SEQ ID NO: 4006189 - DNA, 25 bp, Homo sapien
aatgtgcttctctgttaatgggtac

SEQ ID NO: 4006190 - DNA, 25 bp, Homo sapien
tcatgagcttctcgtctctatggct

SEQ ID NO: 4006191 - DNA, 25 bp, Homo sapien
tcactgcaaaagtcctgtgaggagt

SEQ ID NO: 4006192 - DNA, 25 bp, Homo sapien
gttctgtttcaccgttccatgcctt

SEQ ID NO: 4006193 - DNA, 25 bp, Homo sapien
tgtttcaccgttccatgcctttttc

SEQ ID NO: 4006194 - DNA, 25 bp, Homo sapien
tgttctgtttcaccgttccatgcct

SEQ ID NO: 4006195 - DNA, 25 bp, Homo sapien
tctgtttcaccgttccatgcctttt

SEQ ID NO: 4006196 - DNA, 25 bp, Homo sapien
ctcctggttgcaagttaaaagcttc

SEQ ID NO: 4006197 - DNA, 25 bp, Homo sapien
tgatggagtgaagcacagccctcct

SEQ ID NO: 4006198 - DNA, 25 bp, Homo sapien
tgcaagttaaaagcttctccatgac

SEQ ID NO: 4006199 - DNA, 25 bp, Homo sapien
cctggttgcaagttaaaagcttctc

SEQ ID NO: 4006200 - DNA, 25 bp, Homo sapien
tgttgttaacgtggtaccttgtctc

SEQ ID NO: 4006201 - DNA, 25 bp, Homo sapien
tcagtcctgttgttaacgtggtacc

SEQ ID NO: 4006202 - DNA, 25 bp, Homo sapien
tctctgtactctgggcgaaatttca

SEQ ID NO: 4006203 - DNA, 25 bp, Homo sapien
ggcgaaatttcagtcctgttgttaa

SEQ ID NO: 4006204 - DNA, 25 bp, Homo sapien
ttttctgcacattacatctcaaggg

SEQ ID NO: 4006205 - DNA, 25 bp, Homo sapien
gaaatccaacgttagtagagctgtc

SEQ ID NO: 4006206 - DNA, 25 bp, Homo sapien
aaatgacaatccagcttctccgggc

SEQ ID NO: 4006207 - DNA, 25 bp, Homo sapien
tagagctgtctgactgaagaggtgc

SEQ ID NO: 4006208 - DNA, 25 bp, Homo sapien
ccaattcctcaaagagttttctctc

SEQ ID NO: 4006209 - DNA, 25 bp, Homo sapien
aaagagttttctctcactctcttgg

SEQ ID NO: 4006210 - DNA, 25 bp, Homo sapien
aagagttttctctcactctcttggc

SEQ ID NO: 4006211 - DNA, 25 bp, Homo sapien
agttttctctcactctcttggctcc

SEQ ID NO: 4006212 - DNA, 25 bp, Homo sapien
tcatctcctcgctggatgacaaacc

SEQ ID NO: 4006213 - DNA, 25 bp, Homo sapien
ctcatctcctcgctggatgacaaac

SEQ ID NO: 4006214 - DNA, 25 bp, Homo sapien
tctgagagctacgagacagaatctg

SEQ ID NO: 4006215 - DNA, 25 bp, Homo sapien
ccttggcttaatgaagcatctctgc

SEQ ID NO: 4006216 - DNA, 25 bp, Homo sapien
tccaaaatcaatgtgcgatggcagg

SEQ ID NO: 4006217 - DNA, 25 bp, Homo sapien
gttccatgcatcttgcctggtttct

SEQ ID NO: 4006218 - DNA, 25 bp, Homo sapien
ctgggactaggcatgttcaaaatga

SEQ ID NO: 4006219 - DNA, 25 bp, Homo sapien
gggactaggcatgttcaaaatgaca

SEQ ID NO: 4006220 - DNA, 25 bp, Homo sapien
ggactaggcatgttcaaaatgacag

SEQ ID NO: 4006221 - DNA, 25 bp, Homo sapien
tgggactaggcatgttcaaaatgac

SEQ ID NO: 4006222 - DNA, 25 bp, Homo sapien
cctctgcatttccttctgtagcaaa

SEQ ID NO: 4006223 - DNA, 25 bp, Homo sapien
ttctgtagcaaagataattttcaac

SEQ ID NO: 4006224 - DNA, 25 bp, Homo sapien
ccttctgtagcaaagataattttca

SEQ ID NO: 4006225 - DNA, 25 bp, Homo sapien
gcatttccttctgtagcaaagataa

SEQ ID NO: 4006226 - DNA, 25 bp, Homo sapien
gtgacccagaaatctcacgtggaaa

SEQ ID NO: 4006227 - DNA, 25 bp, Homo sapien
aaacatcagcgcctttcagcaacca

SEQ ID NO: 4006228 - DNA, 25 bp, Homo sapien
gatagaagtcagaggcacaagagtc

SEQ ID NO: 4006229 - DNA, 25 bp, Homo sapien
taatgcacagggacttaggatcaga

SEQ ID NO: 4006230 - DNA, 25 bp, Homo sapien
cattctttcatcaaaggccagactc

SEQ ID NO: 4006231 - DNA, 25 bp, Homo sapien
tgccctcaagaatcaaaggcaaacc

SEQ ID NO: 4006232 - DNA, 25 bp, Homo sapien
cataaaccctaacccatctgctgcc

SEQ ID NO: 4006233 - DNA, 25 bp, Homo sapien
catctgctgccctcaagaatcaaag

SEQ ID NO: 4006234 - DNA, 25 bp, Homo sapien
atgccacccattcaaccccacattc

SEQ ID NO: 4006235 - DNA, 25 bp, Homo sapien
cattctgcttctttggcagtgcccc

SEQ ID NO: 4006236 - DNA, 25 bp, Homo sapien
ccacattctgcttctttggcagtgc

SEQ ID NO: 4006237 - DNA, 25 bp, Homo sapien
acacatgccacccattcaaccccac

SEQ ID NO: 4006238 - DNA, 25 bp, Homo sapien
agcacggtgactcaacgctcggtag

SEQ ID NO: 4006239 - DNA, 25 bp, Homo sapien
gagcagcacggtgactcaacgctcg

SEQ ID NO: 4006240 - DNA, 25 bp, Homo sapien
tgactcaacgctcggtagtggcagc

SEQ ID NO: 4006241 - DNA, 25 bp, Homo sapien
tgacagagcagcacggtgactcaac

SEQ ID NO: 4006242 - DNA, 25 bp, Homo sapien
gccagccgaaaacggctcgctggtg

SEQ ID NO: 4006243 - DNA, 25 bp, Homo sapien
ctacacacagatgccagccgaaaac

SEQ ID NO: 4006244 - DNA, 25 bp, Homo sapien
ggtgcacaccttggtaacagctgct

SEQ ID NO: 4006245 - DNA, 25 bp, Homo sapien
acacagatgccagccgaaaacggct

SEQ ID NO: 4006246 - DNA, 25 bp, Homo sapien
caggataggagagcttgagaagatc

SEQ ID NO: 4006247 - DNA, 25 bp, Homo sapien
gataggagagcttgagaagatccca

SEQ ID NO: 4006248 - DNA, 25 bp, Homo sapien
ggataggagagcttgagaagatccc

SEQ ID NO: 4006249 - DNA, 25 bp, Homo sapien
taggagagcttgagaagatcccagg

SEQ ID NO: 4006250 - DNA, 25 bp, Homo sapien
tgctccaggacttctgtgtttacag

SEQ ID NO: 4006251 - DNA, 25 bp, Homo sapien
ccaggacttctgtgtttacagctca

SEQ ID NO: 4006252 - DNA, 25 bp, Homo sapien
ctggagcagctgagtatatactact

SEQ ID NO: 4006253 - DNA, 25 bp, Homo sapien
gcagctgagtatatactactctgca

SEQ ID NO: 4006254 - DNA, 25 bp, Homo sapien
aatgcatattgcctcggaaagcagg

SEQ ID NO: 4006255 - DNA, 25 bp, Homo sapien
tgaccagcttgccacaagtaatgca

SEQ ID NO: 4006256 - DNA, 25 bp, Homo sapien
acaaagctccatccgtctccaggtt

SEQ ID NO: 4006257 - DNA, 25 bp, Homo sapien
cacagtcctcagaagtggatgctga

SEQ ID NO: 4006258 - DNA, 25 bp, Homo sapien
cacaacctgaaagtcaatatccctt

SEQ ID NO: 4006259 - DNA, 25 bp, Homo sapien
ttactccaaaatgtacgcatagaca

SEQ ID NO: 4006260 - DNA, 25 bp, Homo sapien
ctccaaaatgtacgcatagacaaca

SEQ ID NO: 4006261 - DNA, 25 bp, Homo sapien
aatgtacgcatagacaacaaagcag

SEQ ID NO: 4006262 - DNA, 25 bp, Homo sapien
cctggaaagccatggtaagaactta

SEQ ID NO: 4006263 - DNA, 25 bp, Homo sapien
taaattgaaaatactgaccacttgg

SEQ ID NO: 4006264 - DNA, 25 bp, Homo sapien
ggagatcccgtctagtcccaactac

SEQ ID NO: 4006265 - DNA, 25 bp, Homo sapien
gcttgggctacagaaggagaccccg

SEQ ID NO: 4006266 - DNA, 25 bp, Homo sapien
tgaaagtaacccagaaggccatgaa

SEQ ID NO: 4006267 - DNA, 25 bp, Homo sapien
cattcggaggaataccataaacctt

SEQ ID NO: 4006268 - DNA, 25 bp, Homo sapien
gccatgaaatcagacacattcggag

SEQ ID NO: 4006269 - DNA, 25 bp, Homo sapien
aagaaaaacagttgtcaagttgatc

SEQ ID NO: 4006270 - DNA, 25 bp, Homo sapien
tcttttttggcagtgtgcccctcca

SEQ ID NO: 4006271 - DNA, 25 bp, Homo sapien
tttcttttttggcagtgtgcccctc

SEQ ID NO: 4006272 - DNA, 25 bp, Homo sapien
cttttttggcagtgtgcccctccat

SEQ ID NO: 4006273 - DNA, 25 bp, Homo sapien
tctttttcttttttggcagtgtgcc

SEQ ID NO: 4006274 - DNA, 25 bp, Homo sapien
gacactacgcgatgacacagagaag

SEQ ID NO: 4006275 - DNA, 25 bp, Homo sapien
tcgctaggaggataccggtcgctca

SEQ ID NO: 4006276 - DNA, 25 bp, Homo sapien
gaaggatgcaattccctgacaacac

SEQ ID NO: 4006277 - DNA, 25 bp, Homo sapien
cactgcgggaacacagacgtatgta

SEQ ID NO: 4006278 - DNA, 25 bp, Homo sapien
ctgtggcctccactgtgttttgaat

SEQ ID NO: 4006279 - DNA, 25 bp, Homo sapien
actgctgtggcctccactgtgtttt

SEQ ID NO: 4006280 - DNA, 25 bp, Homo sapien
acatcacctttggtaggggtcgtgg

SEQ ID NO: 4006281 - DNA, 25 bp, Homo sapien
ctacatcacctttggtaggggtcgt

SEQ ID NO: 4006282 - DNA, 25 bp, Homo sapien
ttattcttgttttagacaatccgcc

SEQ ID NO: 4006283 - DNA, 25 bp, Homo sapien
tttattcttgttttagacaatccgc

SEQ ID NO: 4006284 - DNA, 25 bp, Homo sapien
tctctctcagtatgattgtgtcaca

SEQ ID NO: 4006285 - DNA, 25 bp, Homo sapien
gaagatattacgaactttgctgcag

SEQ ID NO: 4006286 - DNA, 25 bp, Homo sapien
cagcttggagccaagactaaatcct

SEQ ID NO: 4006287 - DNA, 25 bp, Homo sapien
gatcctttgtggcaccagcttggag

SEQ ID NO: 4006288 - DNA, 25 bp, Homo sapien
cttattgaggctctacaggaaaacc

SEQ ID NO: 4006289 - DNA, 25 bp, Homo sapien
tatatcactcttggagcggaggcct

SEQ ID NO: 4006290 - DNA, 25 bp, Homo sapien
tactgatttgtgcaagtgatgaccg

SEQ ID NO: 4006291 - DNA, 25 bp, Homo sapien
tgatgaccgaacatgttcccagctg

SEQ ID NO: 4006292 - DNA, 25 bp, Homo sapien
tcgtcgagaaataagcagtagccca

SEQ ID NO: 4006293 - DNA, 25 bp, Homo sapien
tcatcggatgctgctttcggaatcc

SEQ ID NO: 4006294 - DNA, 25 bp, Homo sapien
tcatccatccgcttctgggttgcag

SEQ ID NO: 4006295 - DNA, 25 bp, Homo sapien
gctgcccggaagaaattaagcatga

SEQ ID NO: 4006296 - DNA, 25 bp, Homo sapien
ggattttgaactctacacaagggta

SEQ ID NO: 4006297 - DNA, 25 bp, Homo sapien
gaaccagattggttacagtagaact

SEQ ID NO: 4006298 - DNA, 25 bp, Homo sapien
ccaggattcaaaatatacccgctag

SEQ ID NO: 4006299 - DNA, 25 bp, Homo sapien
tctgaactgaacctctcacattggc

SEQ ID NO: 4006300 - DNA, 25 bp, Homo sapien
taagtcccacgtcctgaactacact

SEQ ID NO: 4006301 - DNA, 25 bp, Homo sapien
ctggagccctcggacactttaagga

SEQ ID NO: 4006302 - DNA, 25 bp, Homo sapien
gtgctcccggcctccattggtaggg

SEQ ID NO: 4006303 - DNA, 25 bp, Homo sapien
gaaggtagacctcaactccaagact

SEQ ID NO: 4006304 - DNA, 25 bp, Homo sapien
tcaacatacgcaagtgatttggaga

SEQ ID NO: 4006305 - DNA, 25 bp, Homo sapien
tttcccttcagtctcggtgaggcca

SEQ ID NO: 4006306 - DNA, 25 bp, Homo sapien
acaaattcaacatacgcaagtgatt

SEQ ID NO: 4006307 - DNA, 25 bp, Homo sapien
ctcggtgaggccagcattttcctgc

SEQ ID NO: 4006308 - DNA, 25 bp, Homo sapien
tattgaggacgtagttttttgtagc

SEQ ID NO: 4006309 - DNA, 25 bp, Homo sapien
tttcttgcaaggcttcactccctcc

SEQ ID NO: 4006310 - DNA, 25 bp, Homo sapien
ccccttgagctattgaggacgtagt

SEQ ID NO: 4006311 - DNA, 25 bp, Homo sapien
cttgaggggccacaaagatggtccc

SEQ ID NO: 4006312 - DNA, 25 bp, Homo sapien
tgcatttgagggttcgttgggtggt

SEQ ID NO: 4006313 - DNA, 25 bp, Homo sapien
ctgtggaggagagccaagcagggtc

SEQ ID NO: 4006314 - DNA, 25 bp, Homo sapien
cagggtccataatgcgggtttgtga

SEQ ID NO: 4006315 - DNA, 25 bp, Homo sapien
agaaggcttggtggcagccccggac

SEQ ID NO: 4006316 - DNA, 25 bp, Homo sapien
ttctgtaggaccttcatccagtgga

SEQ ID NO: 4006317 - DNA, 25 bp, Homo sapien
tggagggaatggactgtcacttttc

SEQ ID NO: 4006318 - DNA, 25 bp, Homo sapien
gagaatggctagctggaccgcagac

SEQ ID NO: 4006319 - DNA, 25 bp, Homo sapien
gctggaccgcagacaagtaaccggg

SEQ ID NO: 4006320 - DNA, 25 bp, Homo sapien
ctaccctggtcagcatagaaccagc

SEQ ID NO: 4006321 - DNA, 25 bp, Homo sapien
tggtcagcatagaaccagctcccat

SEQ ID NO: 4006322 - DNA, 25 bp, Homo sapien
accctggtcagcatagaaccagctc

SEQ ID NO: 4006323 - DNA, 25 bp, Homo sapien
cctggtcagcatagaaccagctccc

SEQ ID NO: 4006324 - DNA, 25 bp, Homo sapien
tgttgcggcagggatcagttcttca

SEQ ID NO: 4006325 - DNA, 25 bp, Homo sapien
tatatacctacgagggaagttgctg

SEQ ID NO: 4006326 - DNA, 25 bp, Homo sapien
tggctgcctcgtagaaaatcaattg

SEQ ID NO: 4006327 - DNA, 25 bp, Homo sapien
tgaatgtagctactccgttgtccta

SEQ ID NO: 4006328 - DNA, 25 bp, Homo sapien
cagtggcagtagtagacatcctttt

SEQ ID NO: 4006329 - DNA, 25 bp, Homo sapien
cactgtggtttgcaatgtcgacttt

SEQ ID NO: 4006330 - DNA, 25 bp, Homo sapien
caacatatagaagaactacagctgg

SEQ ID NO: 4006331 - DNA, 25 bp, Homo sapien
tatgtacaaggttatgacaactgtc

SEQ ID NO: 4006332 - DNA, 25 bp, Homo sapien
tcaggtccagatggcaaagggaaac

SEQ ID NO: 4006333 - DNA, 25 bp, Homo sapien
gattgtgcaatctctatccggaaat

SEQ ID NO: 4006334 - DNA, 25 bp, Homo sapien
gaattgctaggatttaggaggccag

SEQ ID NO: 4006335 - DNA, 25 bp, Homo sapien
taccgagctcccaggcagggatgag

SEQ ID NO: 4006336 - DNA, 25 bp, Homo sapien
ggaagtctcgctatcattcatcaag

SEQ ID NO: 4006337 - DNA, 25 bp, Homo sapien
tgaaagggccccgagaagagttcga

SEQ ID NO: 4006338 - DNA, 25 bp, Homo sapien
cagacaaattttgcgcttttctgga

SEQ ID NO: 4006339 - DNA, 25 bp, Homo sapien
gccgtattcctagccgaatcctgaa

SEQ ID NO: 4006340 - DNA, 25 bp, Homo sapien
ttgccttcacaatccttcatgttta

SEQ ID NO: 4006341 - DNA, 25 bp, Homo sapien
ccagagactaggctggctggttcat

SEQ ID NO: 4006342 - DNA, 25 bp, Homo sapien
cacttggagcttatgcatccagaga

SEQ ID NO: 4006343 - DNA, 25 bp, Homo sapien
taggctggctggttcatcttttgcc

SEQ ID NO: 4006344 - DNA, 25 bp, Homo sapien
ctggatctgtgaatcccggctaggg

SEQ ID NO: 4006345 - DNA, 25 bp, Homo sapien
tcaaaggcatgaagagccccaagtg

SEQ ID NO: 4006346 - DNA, 25 bp, Homo sapien
aattgagtcttcaaagggctgttac

SEQ ID NO: 4006347 - DNA, 25 bp, Homo sapien
cacagttactgatcattggctattc

SEQ ID NO: 4006348 - DNA, 25 bp, Homo sapien
cttgtcgtgtagtctttcatttgct

SEQ ID NO: 4006349 - DNA, 25 bp, Homo sapien
cacccattgttgtggctctagagat

SEQ ID NO: 4006350 - DNA, 25 bp, Homo sapien
tgctaactgtccatggtgtttcacc

SEQ ID NO: 4006351 - DNA, 25 bp, Homo sapien
tgcttcagtaaacaagccaggtccc

SEQ ID NO: 4006352 - DNA, 25 bp, Homo sapien
gacagtgtctgaacttaacaacaag

SEQ ID NO: 4006353 - DNA, 25 bp, Homo sapien
ggaggagatatttttagaccaagcc

SEQ ID NO: 4006354 - DNA, 25 bp, Homo sapien
tgtaggaagacaccttaatttcaag

SEQ ID NO: 4006355 - DNA, 25 bp, Homo sapien
cagcaggaatatcaacccatgtggt

SEQ ID NO: 4006356 - DNA, 25 bp, Homo sapien
tgtttgccctagtctgactctgaag

SEQ ID NO: 4006357 - DNA, 25 bp, Homo sapien
ctctgaaggtagcaaaaaagaggcc

SEQ ID NO: 4006358 - DNA, 25 bp, Homo sapien
ctagtgcaatgtttgccctagtctg

SEQ ID NO: 4006359 - DNA, 25 bp, Homo sapien
ccctagtctgactctgaaggtagca

SEQ ID NO: 4006360 - DNA, 25 bp, Homo sapien
tgcagaaaggctcgggtttcctgca

SEQ ID NO: 4006361 - DNA, 25 bp, Homo sapien
gcaggtgcagaaaggctcgggtttc

SEQ ID NO: 4006362 - DNA, 25 bp, Homo sapien
ggtgcagaaaggctcgggtttcctg

SEQ ID NO: 4006363 - DNA, 25 bp, Homo sapien
caggtgcagaaaggctcgggtttcc

SEQ ID NO: 4006364 - DNA, 25 bp, Homo sapien
tcccactgatgtctcctttgtatct

SEQ ID NO: 4006365 - DNA, 25 bp, Homo sapien
gccccagcatcgtggatgggtttgt

SEQ ID NO: 4006366 - DNA, 25 bp, Homo sapien
cgtggatgggtttgttcttcccact

SEQ ID NO: 4006367 - DNA, 25 bp, Homo sapien
cccactgatgtctcctttgtatcta

SEQ ID NO: 4006368 - DNA, 25 bp, Homo sapien
cgttccaggctgagtggttttgtca

SEQ ID NO: 4006369 - DNA, 25 bp, Homo sapien
ggaactgggccccagcgttccaggc

SEQ ID NO: 4006370 - DNA, 25 bp, Homo sapien
gagataacatcctctgcgtcctcag

SEQ ID NO: 4006371 - DNA, 25 bp, Homo sapien
cgtcctcagataccctgagagttgg

SEQ ID NO: 4006372 - DNA, 25 bp, Homo sapien
agtgagagctgcctgtgatcagcca

SEQ ID NO: 4006373 - DNA, 25 bp, Homo sapien
gagttgtgcctagatcccgacacag

SEQ ID NO: 4006374 - DNA, 25 bp, Homo sapien
aggagttgtgcctagatcccgacac

SEQ ID NO: 4006375 - DNA, 25 bp, Homo sapien
ttgtgcctagatcccgacacagctg

SEQ ID NO: 4006376 - DNA, 25 bp, Homo sapien
agttgtgcctagatcccgacacagc

SEQ ID NO: 4006377 - DNA, 25 bp, Homo sapien
tgtctctttttctacactctccact

SEQ ID NO: 4006378 - DNA, 25 bp, Homo sapien
tttctacactctccactccactggg

SEQ ID NO: 4006379 - DNA, 25 bp, Homo sapien
cactccactgggctgcaagacgtta

SEQ ID NO: 4006380 - DNA, 25 bp, Homo sapien
ctccactgggctgcaagacgttagc

SEQ ID NO: 4006381 - DNA, 25 bp, Homo sapien
aaatggtgactttcttccaactgcc

SEQ ID NO: 4006382 - DNA, 25 bp, Homo sapien
actttcttccaactgccacgatcat

SEQ ID NO: 4006383 - DNA, 25 bp, Homo sapien
tgtaaatggtgactttcttccaact

SEQ ID NO: 4006384 - DNA, 25 bp, Homo sapien
gactttcttccaactgccacgatca

SEQ ID NO: 4006385 - DNA, 25 bp, Homo sapien
gtcttttaaccatctcattgatttc

SEQ ID NO: 4006386 - DNA, 25 bp, Homo sapien
aaccatctcattgatttctgtcccc

SEQ ID NO: 4006387 - DNA, 25 bp, Homo sapien
ttttaaccatctcattgatttctgt

SEQ ID NO: 4006388 - DNA, 25 bp, Homo sapien
ttaaccatctcattgatttctgtcc

SEQ ID NO: 4006389 - DNA, 25 bp, Homo sapien
agagaatgaagactgcggctgagag

SEQ ID NO: 4006390 - DNA, 25 bp, Homo sapien
aatgaagactgcggctgagaggcag

SEQ ID NO: 4006391 - DNA, 25 bp, Homo sapien
tgaagactgcggctgagaggcagcg

SEQ ID NO: 4006392 - DNA, 25 bp, Homo sapien
agaatgaagactgcggctgagaggc

SEQ ID NO: 4006393 - DNA, 25 bp, Homo sapien
agcttggtatatgggtttcttggga

SEQ ID NO: 4006394 - DNA, 25 bp, Homo sapien
cctgaagttggatgcagcttggtat

SEQ ID NO: 4006395 - DNA, 25 bp, Homo sapien
tcttgggagagagtttttccagggc

SEQ ID NO: 4006396 - DNA, 25 bp, Homo sapien
tccagggcttttgtctcgttcctaa

SEQ ID NO: 4006397 - DNA, 25 bp, Homo sapien
cagaaccatcttcacttttcaaaat

SEQ ID NO: 4006398 - DNA, 25 bp, Homo sapien
acagaaccatcttcacttttcaaaa

SEQ ID NO: 4006399 - DNA, 25 bp, Homo sapien
aagtggtcctcctaagaagctggaa

SEQ ID NO: 4006400 - DNA, 25 bp, Homo sapien
tcaagtggtcctcctaagaagctgg

SEQ ID NO: 4006401 - DNA, 25 bp, Homo sapien
gtggtcctcctaagaagctggaacc

SEQ ID NO: 4006402 - DNA, 25 bp, Homo sapien
tggtcctcctaagaagctggaacca

SEQ ID NO: 4006403 - DNA, 25 bp, Homo sapien
tagttttggcaagtgttgctgacaa

SEQ ID NO: 4006404 - DNA, 25 bp, Homo sapien
tggtggtcatggtaactgtagctgt

SEQ ID NO: 4006405 - DNA, 25 bp, Homo sapien
taactgtagctgtaatagttttggc

SEQ ID NO: 4006406 - DNA, 25 bp, Homo sapien
tttgtggtggtcatggtaactgtag

SEQ ID NO: 4006407 - DNA, 25 bp, Homo sapien
gtgttgttgggatctgtagaagaca

SEQ ID NO: 4006408 - DNA, 25 bp, Homo sapien
tgttgttgggatctgtagaagacat

SEQ ID NO: 4006409 - DNA, 25 bp, Homo sapien
gtgtgaggtacaccaaggaagaggg

SEQ ID NO: 4006410 - DNA, 25 bp, Homo sapien
ggtgttgttgggatctgtagaagac

SEQ ID NO: 4006411 - DNA, 25 bp, Homo sapien
gaccagggtcacatgcttctgggag

SEQ ID NO: 4006412 - DNA, 25 bp, Homo sapien
cctggatctgaaagaactgctgggc

SEQ ID NO: 4006413 - DNA, 25 bp, Homo sapien
tggcttcagtctttagaccagggtc

SEQ ID NO: 4006414 - DNA, 25 bp, Homo sapien
gaactgctgggcccgatgctagatg

SEQ ID NO: 4006415 - DNA, 25 bp, Homo sapien
gaaccgtggaagctatgtttttgta

SEQ ID NO: 4006416 - DNA, 25 bp, Homo sapien
aagtccttgttgacaccgatggaga

SEQ ID NO: 4006417 - DNA, 25 bp, Homo sapien
cttgttaaagtccttgttgacaccg

SEQ ID NO: 4006418 - DNA, 25 bp, Homo sapien
tataagtaattgtccctggttacca

SEQ ID NO: 4006419 - DNA, 25 bp, Homo sapien
tctggagaagtctcaaagtctgagc

SEQ ID NO: 4006420 - DNA, 25 bp, Homo sapien
agctgggctccctatgaaggggcaa

SEQ ID NO: 4006421 - DNA, 25 bp, Homo sapien
ggtggctgagagctaatcctcctgg

SEQ ID NO: 4006422 - DNA, 25 bp, Homo sapien
caaggcaagcttatcttcaggaaag

SEQ ID NO: 4006423 - DNA, 25 bp, Homo sapien
taaaagctcgtttcctgcctgcact

SEQ ID NO: 4006424 - DNA, 25 bp, Homo sapien
tgcacttgaggctgcgttccaccat

SEQ ID NO: 4006425 - DNA, 25 bp, Homo sapien
tgggtaaaagctcgtttcctgcctg

SEQ ID NO: 4006426 - DNA, 25 bp, Homo sapien
tagtccaatttcaaataggatttct

SEQ ID NO: 4006427 - DNA, 25 bp, Homo sapien
ttctgattgcttgctgtccggtgtg

SEQ ID NO: 4006428 - DNA, 25 bp, Homo sapien
tacaggttaaggttggcatattgtc

SEQ ID NO: 4006429 - DNA, 25 bp, Homo sapien
ggttggcatattgtctttcactagt

SEQ ID NO: 4006430 - DNA, 25 bp, Homo sapien
cactagtgcagtaataatggttctg

SEQ ID NO: 4006431 - DNA, 25 bp, Homo sapien
gctgccagcccctccagcaaggcca

SEQ ID NO: 4006432 - DNA, 25 bp, Homo sapien
tgctgccagcccctccagcaaggcc

SEQ ID NO: 4006433 - DNA, 25 bp, Homo sapien
ctgctgccagcccctccagcaaggc

SEQ ID NO: 4006434 - DNA, 25 bp, Homo sapien
ctgccagcccctccagcaaggccat

SEQ ID NO: 4006435 - DNA, 25 bp, Homo sapien
tgtagaaggattgctttaaccactc

SEQ ID NO: 4006436 - DNA, 25 bp, Homo sapien
gttcataaaaccatcctactcaaag

SEQ ID NO: 4006437 - DNA, 25 bp, Homo sapien
cagttgtgcacaataatggtcttct

SEQ ID NO: 4006438 - DNA, 25 bp, Homo sapien
gccagaatataaggtggcaagccca

SEQ ID NO: 4006439 - DNA, 25 bp, Homo sapien
cttctcccgtttgtagctggcagtg

SEQ ID NO: 4006440 - DNA, 25 bp, Homo sapien
tgtagctggcagtgagtttgatctc

SEQ ID NO: 4006441 - DNA, 25 bp, Homo sapien
cccgtttgtagctggcagtgagttt

SEQ ID NO: 4006442 - DNA, 25 bp, Homo sapien
tctcccgtttgtagctggcagtgag

SEQ ID NO: 4006443 - DNA, 25 bp, Homo sapien
ttacatttccagatacgaagacctg

SEQ ID NO: 4006444 - DNA, 25 bp, Homo sapien
ccatgccatcatgaagtaggtgaac

SEQ ID NO: 4006445 - DNA, 25 bp, Homo sapien
cgaagacctgttataacatatagta

SEQ ID NO: 4006446 - DNA, 25 bp, Homo sapien
gccatgatttagtaggcagtgctag

SEQ ID NO: 4006447 - DNA, 25 bp, Homo sapien
taaaattcagagtgacaaaaggcaa

SEQ ID NO: 4006448 - DNA, 25 bp, Homo sapien
ggaatttcaataagctataagccct

SEQ ID NO: 4006449 - DNA, 25 bp, Homo sapien
taccactagataaccactgtaacat

SEQ ID NO: 4006450 - DNA, 25 bp, Homo sapien
tataagccctaccactagataacca

SEQ ID NO: 4006451 - DNA, 25 bp, Homo sapien
aagtaactataaagcttagaaatgg

SEQ ID NO: 4006452 - DNA, 25 bp, Homo sapien
gaaagtgtgttctgtcatttcttga

SEQ ID NO: 4006453 - DNA, 25 bp, Homo sapien
agtcagttgtatttatataagtaac

SEQ ID NO: 4006454 - DNA, 25 bp, Homo sapien
taaagcttagaaatggagacaggac

SEQ ID NO: 4006455 - DNA, 25 bp, Homo sapien
agtgtagtcagaacacttgtgttgc

SEQ ID NO: 4006456 - DNA, 25 bp, Homo sapien
agcacaggcctgtcatgggaccatg

SEQ ID NO: 4006457 - DNA, 25 bp, Homo sapien
gaggagccacgcaagctgtcctctg

SEQ ID NO: 4006458 - DNA, 25 bp, Homo sapien
tgtgttgcaggctgccgctgtcatg

SEQ ID NO: 4006459 - DNA, 25 bp, Homo sapien
tactcaaattgttatttattgtttg

SEQ ID NO: 4006460 - DNA, 25 bp, Homo sapien
ttatcatctgccacttcaggctgct

SEQ ID NO: 4006461 - DNA, 25 bp, Homo sapien
agattactcaaattgttatttattg

SEQ ID NO: 4006462 - DNA, 25 bp, Homo sapien
ttttatcatctgccacttcaggctg

SEQ ID NO: 4006463 - DNA, 25 bp, Homo sapien
tttcctgggatagaataaccaggaa

SEQ ID NO: 4006464 - DNA, 25 bp, Homo sapien
aggaaagtgttcgtggggctgctgt

SEQ ID NO: 4006465 - DNA, 25 bp, Homo sapien
ctgggatagaataaccaggaaagtg

SEQ ID NO: 4006466 - DNA, 25 bp, Homo sapien
ggtaaatactatttcacaggaggat

SEQ ID NO: 4006467 - DNA, 25 bp, Homo sapien
taaaactcagtattggtacccgcca

SEQ ID NO: 4006468 - DNA, 25 bp, Homo sapien
taaagctccgtttgacgcacttggc

SEQ ID NO: 4006469 - DNA, 25 bp, Homo sapien
gagtctgacaaacaatgagcccaca

SEQ ID NO: 4006470 - DNA, 25 bp, Homo sapien
tggtgatagccgtaaagctcccagg

SEQ ID NO: 4006471 - DNA, 25 bp, Homo sapien
gacttccttacaggcaagggatggt

SEQ ID NO: 4006472 - DNA, 25 bp, Homo sapien
gaagtttgcttacccagtgcagata

SEQ ID NO: 4006473 - DNA, 25 bp, Homo sapien
cattctagattgtgggacttcctta

SEQ ID NO: 4006474 - DNA, 25 bp, Homo sapien
gaattccgaggtctataccacctgc

SEQ ID NO: 4006475 - DNA, 25 bp, Homo sapien
gtaagctggactacagattggcaca

SEQ ID NO: 4006476 - DNA, 25 bp, Homo sapien
taagggcgtgttccattattagaaa

SEQ ID NO: 4006477 - DNA, 25 bp, Homo sapien
aaaacctggtagcttaagtatatga

SEQ ID NO: 4006478 - DNA, 25 bp, Homo sapien
tttataggtatatcatcaaaggatg

SEQ ID NO: 4006479 - DNA, 25 bp, Homo sapien
tggtagtgtggatggctacagttcc

SEQ ID NO: 4006480 - DNA, 25 bp, Homo sapien
cagttccgattgtcctctccaagtt

SEQ ID NO: 4006481 - DNA, 25 bp, Homo sapien
gatggctacagttccgattgtcctc

SEQ ID NO: 4006482 - DNA, 25 bp, Homo sapien
tgtggatggctacagttccgattgt

SEQ ID NO: 4006483 - DNA, 25 bp, Homo sapien
tcatattcgtagcccaaggggaaag

SEQ ID NO: 4006484 - DNA, 25 bp, Homo sapien
catattcgtagcccaaggggaaagg

SEQ ID NO: 4006485 - DNA, 25 bp, Homo sapien
ttcatattcgtagcccaaggggaaa

SEQ ID NO: 4006486 - DNA, 25 bp, Homo sapien
tttcatattcgtagcccaaggggaa

SEQ ID NO: 4006487 - DNA, 25 bp, Homo sapien
cttgaggttgaaaaacgagggcagc

SEQ ID NO: 4006488 - DNA, 25 bp, Homo sapien
gaaaaggatcgcaagcttcaggaga

SEQ ID NO: 4006489 - DNA, 25 bp, Homo sapien
gcactctgtcaaacctggaactgga

SEQ ID NO: 4006490 - DNA, 25 bp, Homo sapien
tgtcaagtcagatcagaagcacggc

SEQ ID NO: 4006491 - DNA, 25 bp, Homo sapien
caagctgctgcctatggaaggcaaa

SEQ ID NO: 4006492 - DNA, 25 bp, Homo sapien
taaaagccgcatggttctgtgatcc

SEQ ID NO: 4006493 - DNA, 25 bp, Homo sapien
gcagtcagcataccctgagtgatgg

SEQ ID NO: 4006494 - DNA, 25 bp, Homo sapien
ggctttcagtgctgtttagaaacag

SEQ ID NO: 4006495 - DNA, 25 bp, Homo sapien
tggcaatctcggatctacaaggtgc

SEQ ID NO: 4006496 - DNA, 25 bp, Homo sapien
aaggcctacaattcgaaaagctgca

SEQ ID NO: 4006497 - DNA, 25 bp, Homo sapien
gaagagctcttaccctccatgcaaa

SEQ ID NO: 4006498 - DNA, 25 bp, Homo sapien
tacaaggtgctgtcgggaatcaaat

SEQ ID NO: 4006499 - DNA, 25 bp, Homo sapien
gacacatccaccctccaggtatctg

SEQ ID NO: 4006500 - DNA, 25 bp, Homo sapien
acacatccaccctccaggtatctgt

SEQ ID NO: 4006501 - DNA, 25 bp, Homo sapien
cctccattcagcaaccctggctggg

SEQ ID NO: 4006502 - DNA, 25 bp, Homo sapien
ggaaacctgctaccattccttggct

SEQ ID NO: 4006503 - DNA, 25 bp, Homo sapien
gtgggctccctgcaaggcggcggtg

SEQ ID NO: 4006504 - DNA, 25 bp, Homo sapien
gcagtcgggccgataaggaaacctg

SEQ ID NO: 4006505 - DNA, 25 bp, Homo sapien
gtgcctcctccactttgatttcagt

SEQ ID NO: 4006506 - DNA, 25 bp, Homo sapien
gcctcctccactttgatttcagtgg

SEQ ID NO: 4006507 - DNA, 25 bp, Homo sapien
tgatttcagtggactgagtggcaag

SEQ ID NO: 4006508 - DNA, 25 bp, Homo sapien
agtggactgagtggcaaggatgaag

SEQ ID NO: 4006509 - DNA, 25 bp, Homo sapien
agcatagaccccagcatcaaagaca

SEQ ID NO: 4006510 - DNA, 25 bp, Homo sapien
ggggccagggggctagcagaagatg

SEQ ID NO: 4006511 - DNA, 25 bp, Homo sapien
catagaccccagcatcaaagacata

SEQ ID NO: 4006512 - DNA, 25 bp, Homo sapien
tagaccccagcatcaaagacataga

SEQ ID NO: 4006513 - DNA, 25 bp, Homo sapien
tgtgcaagtcacttcctgtctttgt

SEQ ID NO: 4006514 - DNA, 25 bp, Homo sapien
tgcaagtcacttcctgtctttgtct

SEQ ID NO: 4006515 - DNA, 25 bp, Homo sapien
ggaagctattaagatgccccaggga

SEQ ID NO: 4006516 - DNA, 25 bp, Homo sapien
ctgcttttggaagctattaagatgc

SEQ ID NO: 4006517 - DNA, 25 bp, Homo sapien
tgggccagaaagacatcagctcgga

SEQ ID NO: 4006518 - DNA, 25 bp, Homo sapien
gatgccttcttgtgctcaaaaccgg

SEQ ID NO: 4006519 - DNA, 25 bp, Homo sapien
cagctggttcgttaccgcagggaaa

SEQ ID NO: 4006520 - DNA, 25 bp, Homo sapien
gagagctaccacttcctgccagctg

SEQ ID NO: 4006521 - DNA, 25 bp, Homo sapien
tccaatccctggaaagaatccgagg

SEQ ID NO: 4006522 - DNA, 25 bp, Homo sapien
tgagacaagattcaagcccatttcg

SEQ ID NO: 4006523 - DNA, 25 bp, Homo sapien
gatgaccccagctgacgtgggtcat

SEQ ID NO: 4006524 - DNA, 25 bp, Homo sapien
gaatccgaggatagttgggtcttcc

SEQ ID NO: 4006525 - DNA, 25 bp, Homo sapien
cacttcccaggctgctatccatgat

SEQ ID NO: 4006526 - DNA, 25 bp, Homo sapien
agaaaccctccatagccaccagggt

SEQ ID NO: 4006527 - DNA, 25 bp, Homo sapien
caggctgctatccatgatgtcacag

SEQ ID NO: 4006528 - DNA, 25 bp, Homo sapien
gtcacaggatggaaaatgatcccag

SEQ ID NO: 4006529 - DNA, 25 bp, Homo sapien
agctgggaacctgacagctgctgca

SEQ ID NO: 4006530 - DNA, 25 bp, Homo sapien
tgcaggagccagcagggctgcccct

SEQ ID NO: 4006531 - DNA, 25 bp, Homo sapien
cgtgcaggagccagcagggctgccc

SEQ ID NO: 4006532 - DNA, 25 bp, Homo sapien
aggagccagcagggctgcccctcac

SEQ ID NO: 4006533 - DNA, 25 bp, Homo sapien
gcaggagccagcagggctgcccctc

SEQ ID NO: 4006534 - DNA, 25 bp, Homo sapien
gctgtttttcacagttagagtctgg

SEQ ID NO: 4006535 - DNA, 25 bp, Homo sapien
agagtctggtgacgtttaactaagg

SEQ ID NO: 4006536 - DNA, 25 bp, Homo sapien
tggccccagcccgtagggatgtgta

SEQ ID NO: 4006537 - DNA, 25 bp, Homo sapien
tatcggcaaactccttttgctgctg

SEQ ID NO: 4006538 - DNA, 25 bp, Homo sapien
tccacctgcatatatgggctttttg

SEQ ID NO: 4006539 - DNA, 25 bp, Homo sapien
ccacctgcatatatgggctttttgc

SEQ ID NO: 4006540 - DNA, 25 bp, Homo sapien
cacccataagttgagctccaaccca

SEQ ID NO: 4006541 - DNA, 25 bp, Homo sapien
gaaaagcaactgtccgggccctgcc

SEQ ID NO: 4006542 - DNA, 25 bp, Homo sapien
ccagaaaagcaactgtccgggccct

SEQ ID NO: 4006543 - DNA, 25 bp, Homo sapien
cagaaaagcaactgtccgggccctg

SEQ ID NO: 4006544 - DNA, 25 bp, Homo sapien
ctgaggacttataacactctaccct

SEQ ID NO: 4006545 - DNA, 25 bp, Homo sapien
cagacacatcaaatgatgtcagctc

SEQ ID NO: 4006546 - DNA, 25 bp, Homo sapien
tcatcttgcacagccggtgactgct

SEQ ID NO: 4006547 - DNA, 25 bp, Homo sapien
gcacagccggtgactgctgcagaca

SEQ ID NO: 4006548 - DNA, 25 bp, Homo sapien
tgcagacacatcaaatgatgtcagc

SEQ ID NO: 4006549 - DNA, 25 bp, Homo sapien
caggcagcccaggacggggaggaac

SEQ ID NO: 4006550 - DNA, 25 bp, Homo sapien
ccaggcccacgcccaacacgggcag

SEQ ID NO: 4006551 - DNA, 25 bp, Homo sapien
acgcccaacacgggcagcagagcaa

SEQ ID NO: 4006552 - DNA, 25 bp, Homo sapien
agcagagcaaggagccgggcacgga

SEQ ID NO: 4006553 - DNA, 25 bp, Homo sapien
cagcagagcaaggagccgggcacgg

SEQ ID NO: 4006554 - DNA, 25 bp, Homo sapien
ctggggaaacagaaaggcctgtctc

SEQ ID NO: 4006555 - DNA, 25 bp, Homo sapien
gatccttctagaagcccgaggtcct

SEQ ID NO: 4006556 - DNA, 25 bp, Homo sapien
tggtctgcacgctgatccttctaga

SEQ ID NO: 4006557 - DNA, 25 bp, Homo sapien
tatcaggggagctttatgcagaagc

SEQ ID NO: 4006558 - DNA, 25 bp, Homo sapien
aggcaggacacagcttggggtgcag

SEQ ID NO: 4006559 - DNA, 25 bp, Homo sapien
cagcttggggtgcagctgggttcat

SEQ ID NO: 4006560 - DNA, 25 bp, Homo sapien
cacagcttggggtgcagctgggttc

SEQ ID NO: 4006561 - DNA, 25 bp, Homo sapien
aggacacagcttggggtgcagctgg

SEQ ID NO: 4006562 - DNA, 25 bp, Homo sapien
ggacactgagacactgcgtcaggga

SEQ ID NO: 4006563 - DNA, 25 bp, Homo sapien
tgagggaagactggcttggcaggac

SEQ ID NO: 4006564 - DNA, 25 bp, Homo sapien
ggaagactggcttggcaggacactg

SEQ ID NO: 4006565 - DNA, 25 bp, Homo sapien
caaggggccagtccacaagagtgga

SEQ ID NO: 4006566 - DNA, 25 bp, Homo sapien
tgctgtcacatcctagttcaaggca

SEQ ID NO: 4006567 - DNA, 25 bp, Homo sapien
aagagacggaagaagtgtctatccc

SEQ ID NO: 4006568 - DNA, 25 bp, Homo sapien
agtgtctatcccttgcattggccag

SEQ ID NO: 4006569 - DNA, 25 bp, Homo sapien
gttcaaggcaaaaagagacggaaga

SEQ ID NO: 4006570 - DNA, 25 bp, Homo sapien
ttagagagggtttgttcaggcatgc

SEQ ID NO: 4006571 - DNA, 25 bp, Homo sapien
gcaggagtgactacgttacagagaa

SEQ ID NO: 4006572 - DNA, 25 bp, Homo sapien
ggtttcagaagatctcacactgcct

SEQ ID NO: 4006573 - DNA, 25 bp, Homo sapien
tcgtgtcgatgttaagaatgacccc

SEQ ID NO: 4006574 - DNA, 25 bp, Homo sapien
tttatcgacgggaaaacaggcatag

SEQ ID NO: 4006575 - DNA, 25 bp, Homo sapien
gaggccccgccccttaggcatgagg

SEQ ID NO: 4006576 - DNA, 25 bp, Homo sapien
ggctccgtccccagacagcttgagg

SEQ ID NO: 4006577 - DNA, 25 bp, Homo sapien
cctagaggaagcaaaagcactgcga

SEQ ID NO: 4006578 - DNA, 25 bp, Homo sapien
gatgtttccaaagcccggcaggtca

SEQ ID NO: 4006579 - DNA, 25 bp, Homo sapien
tgtttccaaagcccggcaggtcagg

SEQ ID NO: 4006580 - DNA, 25 bp, Homo sapien
tttccaaagcccggcaggtcagggc

SEQ ID NO: 4006581 - DNA, 25 bp, Homo sapien
tccaaagcccggcaggtcagggcct

SEQ ID NO: 4006582 - DNA, 25 bp, Homo sapien
tcacttgccaccagtaccctggcct

SEQ ID NO: 4006583 - DNA, 25 bp, Homo sapien
gccaccagtaccctggcctgatctc

SEQ ID NO: 4006584 - DNA, 25 bp, Homo sapien
acttgccaccagtaccctggcctga

SEQ ID NO: 4006585 - DNA, 25 bp, Homo sapien
caccagtaccctggcctgatctctg

SEQ ID NO: 4006586 - DNA, 25 bp, Homo sapien
gacttgctgtccaaacagtgcaccc

SEQ ID NO: 4006587 - DNA, 25 bp, Homo sapien
tgtccaaacagtgcaccctggtcat

SEQ ID NO: 4006588 - DNA, 25 bp, Homo sapien
ttgctgtccaaacagtgcaccctgg

SEQ ID NO: 4006589 - DNA, 25 bp, Homo sapien
cactgacttgctgtccaaacagtgc

SEQ ID NO: 4006590 - DNA, 25 bp, Homo sapien
agcttcccattgagattgactctcc

SEQ ID NO: 4006591 - DNA, 25 bp, Homo sapien
tagcttcccattgagattgactctc

SEQ ID NO: 4006592 - DNA, 25 bp, Homo sapien
ctagcttcccattgagattgactct

SEQ ID NO: 4006593 - DNA, 25 bp, Homo sapien
tgccgccaggtaaatatggattcct

SEQ ID NO: 4006594 - DNA, 25 bp, Homo sapien
tataattcactatatcttctgagca

SEQ ID NO: 4006595 - DNA, 25 bp, Homo sapien
taatgtttcctgtggtggacactac

SEQ ID NO: 4006596 - DNA, 25 bp, Homo sapien
ggctgtgtcgttgccgccaggtaaa

SEQ ID NO: 4006597 - DNA, 25 bp, Homo sapien
gttgacagttcttggccaccaagag

SEQ ID NO: 4006598 - DNA, 25 bp, Homo sapien
ctggatgttgacagttcttggccac

SEQ ID NO: 4006599 - DNA, 25 bp, Homo sapien
ggatgttgacagttcttggccacca

SEQ ID NO: 4006600 - DNA, 25 bp, Homo sapien
gatgttgacagttcttggccaccaa

SEQ ID NO: 4006601 - DNA, 25 bp, Homo sapien
accagggctcagctcggtactgagg

SEQ ID NO: 4006602 - DNA, 25 bp, Homo sapien
cagggctcagctcggtactgaggag

SEQ ID NO: 4006603 - DNA, 25 bp, Homo sapien
ggctcagctcggtactgaggagccg

SEQ ID NO: 4006604 - DNA, 25 bp, Homo sapien
ccagggctcagctcggtactgagga

SEQ ID NO: 4006605 - DNA, 25 bp, Homo sapien
tccactgggagactaaccgagggct

SEQ ID NO: 4006606 - DNA, 25 bp, Homo sapien
tctggaaagtgaacacagcgccacg

SEQ ID NO: 4006607 - DNA, 25 bp, Homo sapien
tatctgaagcgggtggagcaaagca

SEQ ID NO: 4006608 - DNA, 25 bp, Homo sapien
ggcacaaccgatttttccactggga

SEQ ID NO: 4006609 - DNA, 25 bp, Homo sapien
gaacttcaaagagtgtggcagggct

SEQ ID NO: 4006610 - DNA, 25 bp, Homo sapien
ggaacttcaaagagtgtggcagggc

SEQ ID NO: 4006611 - DNA, 25 bp, Homo sapien
gcagggctgttcttcgagatgcttc

SEQ ID NO: 4006612 - DNA, 25 bp, Homo sapien
gtggcagggctgttcttcgagatgc

SEQ ID NO: 4006613 - DNA, 25 bp, Homo sapien
tggaacctgctgctagggaccagcc

SEQ ID NO: 4006614 - DNA, 25 bp, Homo sapien
tttcacaatggtcagcccaggcagc

SEQ ID NO: 4006615 - DNA, 25 bp, Homo sapien
catgcggccctgagattctccagag

SEQ ID NO: 4006616 - DNA, 25 bp, Homo sapien
ttaaggagaccagtaacagcatgag

SEQ ID NO: 4006617 - DNA, 25 bp, Homo sapien
gattccacaggttctgcacctgata

SEQ ID NO: 4006618 - DNA, 25 bp, Homo sapien
tcttgctcgatgaatggtgctccag

SEQ ID NO: 4006619 - DNA, 25 bp, Homo sapien
gatatcctgacctatatcctgctga

SEQ ID NO: 4006620 - DNA, 25 bp, Homo sapien
ggatccattaagtttccacctggca

SEQ ID NO: 4006621 - DNA, 25 bp, Homo sapien
tttcagattatgctgatatagaggg

SEQ ID NO: 4006622 - DNA, 25 bp, Homo sapien
gctcaaatcttgtggcagtgacagc

SEQ ID NO: 4006623 - DNA, 25 bp, Homo sapien
tgacagctttactgtcaatgggagg

SEQ ID NO: 4006624 - DNA, 25 bp, Homo sapien
agtacgatctctagaaatcatgctg

SEQ ID NO: 4006625 - DNA, 25 bp, Homo sapien
gctgactgacaagatgcccttctgg

SEQ ID NO: 4006626 - DNA, 25 bp, Homo sapien
gacatgggattcagctcaggcagac

SEQ ID NO: 4006627 - DNA, 25 bp, Homo sapien
tggaaacagtgaaaacgctgctact

SEQ ID NO: 4006628 - DNA, 25 bp, Homo sapien
tgtgcttcttaagcgcagcatggcc

SEQ ID NO: 4006629 - DNA, 25 bp, Homo sapien
tgctcaagctcagtgtcggaaatct

SEQ ID NO: 4006630 - DNA, 25 bp, Homo sapien
caggaatcggtctgctcaagctcag

SEQ ID NO: 4006631 - DNA, 25 bp, Homo sapien
ctctgcacaggaatcggtctgctca

SEQ ID NO: 4006632 - DNA, 25 bp, Homo sapien
gctcagtgtcggaaatctcccctga

SEQ ID NO: 4006633 - DNA, 25 bp, Homo sapien
gaaatagccccaactgtacctagaa

SEQ ID NO: 4006634 - DNA, 25 bp, Homo sapien
tgaaaactcagctagaaccacgggc

SEQ ID NO: 4006635 - DNA, 25 bp, Homo sapien
gaagaggcctaaaaattccttcgca

SEQ ID NO: 4006636 - DNA, 25 bp, Homo sapien
taaattcaggaacctggtagcctct

SEQ ID NO: 4006637 - DNA, 25 bp, Homo sapien
accctctgaggatagactgaaattg

SEQ ID NO: 4006638 - DNA, 25 bp, Homo sapien
gctgcatgatagcactgggtaaatc

SEQ ID NO: 4006639 - DNA, 25 bp, Homo sapien
gaaccccttagtaggcttgcttctg

SEQ ID NO: 4006640 - DNA, 25 bp, Homo sapien
cagaaaggacgtagaagcagagaca

SEQ ID NO: 4006641 - DNA, 25 bp, Homo sapien
tatttatctgcagagagaagataac

SEQ ID NO: 4006642 - DNA, 25 bp, Homo sapien
tttatctgcagagagaagataacac

SEQ ID NO: 4006643 - DNA, 25 bp, Homo sapien
atttatctgcagagagaagataaca

SEQ ID NO: 4006644 - DNA, 25 bp, Homo sapien
ctatttatctgcagagagaagataa

SEQ ID NO: 4006645 - DNA, 25 bp, Homo sapien
tgtgctggcgttacttcttctggga

SEQ ID NO: 4006646 - DNA, 25 bp, Homo sapien
catttatgctgataagttgccttcg

SEQ ID NO: 4006647 - DNA, 25 bp, Homo sapien
tcaacattcccgtggtcagctaatt

SEQ ID NO: 4006648 - DNA, 25 bp, Homo sapien
aaagaatgttgcctgggtttatcac

SEQ ID NO: 4006649 - DNA, 25 bp, Homo sapien
cattaagtccactcacactgctggg

SEQ ID NO: 4006650 - DNA, 25 bp, Homo sapien
taacatctaagtatgctgagggcaa

SEQ ID NO: 4006651 - DNA, 25 bp, Homo sapien
tgggcaaccaatctcctgtagtact

SEQ ID NO: 4006652 - DNA, 25 bp, Homo sapien
tacaacaggtgagacgagaaaggcc

SEQ ID NO: 4006653 - DNA, 25 bp, Homo sapien
ggtttggatccgatagctttctgca

SEQ ID NO: 4006654 - DNA, 25 bp, Homo sapien
cggtaatagtgattctgcagggtgt

SEQ ID NO: 4006655 - DNA, 25 bp, Homo sapien
tctgcatatttgctggtattgacag

SEQ ID NO: 4006656 - DNA, 25 bp, Homo sapien
ggtttaaccgtttgctgtcagcctc

SEQ ID NO: 4006657 - DNA, 25 bp, Homo sapien
agcctggccacgctgttcagggcag

SEQ ID NO: 4006658 - DNA, 25 bp, Homo sapien
cagtctttgtacctggtagctgcaa

SEQ ID NO: 4006659 - DNA, 25 bp, Homo sapien
tggtagctgcaaagcgccatgatgt

SEQ ID NO: 4006660 - DNA, 25 bp, Homo sapien
tgccaacaactattacccacactgg

SEQ ID NO: 4006661 - DNA, 25 bp, Homo sapien
cactggacaagggactccagtttac

SEQ ID NO: 4006662 - DNA, 25 bp, Homo sapien
tgtgactgaatgcagagcagaatgc

SEQ ID NO: 4006663 - DNA, 25 bp, Homo sapien
cagaatgcagtgctggtgacgagca

SEQ ID NO: 4006664 - DNA, 25 bp, Homo sapien
ctgtgggcacgtcggcactggacaa

SEQ ID NO: 4006665 - DNA, 25 bp, Homo sapien
tcactgtgcccaagaacagcacggt

SEQ ID NO: 4006666 - DNA, 25 bp, Homo sapien
gtggtccagtctgatcccaaccggc

SEQ ID NO: 4006667 - DNA, 25 bp, Homo sapien
taagagtctcaaacactccggcttc

SEQ ID NO: 4006668 - DNA, 25 bp, Homo sapien
tccggggtggtccagtctgatccca

SEQ ID NO: 4006669 - DNA, 25 bp, Homo sapien
cggttgtctcttgacactgcacaca

SEQ ID NO: 4006670 - DNA, 25 bp, Homo sapien
gcatcaacgcggttgtctcttgaca

SEQ ID NO: 4006671 - DNA, 25 bp, Homo sapien
aagtcttcgccggaggatccgaagg

SEQ ID NO: 4006672 - DNA, 25 bp, Homo sapien
aggatccgaaggcagcatcaacgcg

SEQ ID NO: 4006673 - DNA, 25 bp, Homo sapien
gcgaaaagactggtagagcaacacc

SEQ ID NO: 4006674 - DNA, 25 bp, Homo sapien
caagctattaacaggctgactgaga

SEQ ID NO: 4006675 - DNA, 25 bp, Homo sapien
gagcaacaccaagtaggcaggtatc

SEQ ID NO: 4006676 - DNA, 25 bp, Homo sapien
gaagagctactgcttaggctgtaag

SEQ ID NO: 4006677 - DNA, 25 bp, Homo sapien
ttcctctgaagaggggtcgaggtca

SEQ ID NO: 4006678 - DNA, 25 bp, Homo sapien
ttcccaaaagcaccagggctggaac

SEQ ID NO: 4006679 - DNA, 25 bp, Homo sapien
ggagggatcttcccaaaagcaccag

SEQ ID NO: 4006680 - DNA, 25 bp, Homo sapien
ctggaagttcactgtttcctctgaa

SEQ ID NO: 4006681 - DNA, 25 bp, Homo sapien
tatgaagtattaaatctgccacaac

SEQ ID NO: 4006682 - DNA, 25 bp, Homo sapien
tcaagacaacacttttggacctagc

SEQ ID NO: 4006683 - DNA, 25 bp, Homo sapien
tggcaacttgttgggctgtttatga

SEQ ID NO: 4006684 - DNA, 25 bp, Homo sapien
gccacaacattagtgatacggtgat

SEQ ID NO: 4006685 - DNA, 25 bp, Homo sapien
aagacagcattcaggtctgaactgg

SEQ ID NO: 4006686 - DNA, 25 bp, Homo sapien
aagtaagctgcttccctgttacggg

SEQ ID NO: 4006687 - DNA, 25 bp, Homo sapien
ggatcttaggaggactattccagct

SEQ ID NO: 4006688 - DNA, 25 bp, Homo sapien
tgctgctgacaccagacctaaagac

SEQ ID NO: 4006689 - DNA, 25 bp, Homo sapien
cctctaacataagtaaagtctcatt

SEQ ID NO: 4006690 - DNA, 25 bp, Homo sapien
agcagccagggctataggcacgtgc

SEQ ID NO: 4006691 - DNA, 25 bp, Homo sapien
caccaagcctgcctacacttgtgga

SEQ ID NO: 4006692 - DNA, 25 bp, Homo sapien
tctaaagtgctacatctaatacctc

SEQ ID NO: 4006693 - DNA, 25 bp, Homo sapien
tttttccagtgagctcacagatagt

SEQ ID NO: 4006694 - DNA, 25 bp, Homo sapien
cagatagtaccctgtgccctatgtc

SEQ ID NO: 4006695 - DNA, 25 bp, Homo sapien
tcacagatagtaccctgtgccctat

SEQ ID NO: 4006696 - DNA, 25 bp, Homo sapien
gtgagctcacagatagtaccctgtg

SEQ ID NO: 4006697 - DNA, 25 bp, Homo sapien
tccagatctgttccaccaaaatcaa

SEQ ID NO: 4006698 - DNA, 25 bp, Homo sapien
atccagatctgttccaccaaaatca

SEQ ID NO: 4006699 - DNA, 25 bp, Homo sapien
aaccctcaggttaccaggcaatgtg

SEQ ID NO: 4006700 - DNA, 25 bp, Homo sapien
atgtgccaccatgttattaaagcca

SEQ ID NO: 4006701 - DNA, 25 bp, Homo sapien
gccaacagctgatagagggcttttc

SEQ ID NO: 4006702 - DNA, 25 bp, Homo sapien
gctgatagagggcttttcggtaaag

SEQ ID NO: 4006703 - DNA, 25 bp, Homo sapien
gaatttaagattggcatgagacctg

SEQ ID NO: 4006704 - DNA, 25 bp, Homo sapien
tcctgccatcaagaggtgcggtgta

SEQ ID NO: 4006705 - DNA, 25 bp, Homo sapien
ccagaagtgtgactgacgtcatcca

SEQ ID NO: 4006706 - DNA, 25 bp, Homo sapien
gacaagctggactagccatctacag

SEQ ID NO: 4006707 - DNA, 25 bp, Homo sapien
tgactttggaactacgacaatattt

SEQ ID NO: 4006708 - DNA, 25 bp, Homo sapien
gaatgttccagaagctatcagactg

SEQ ID NO: 4006709 - DNA, 25 bp, Homo sapien
tgtgcacccctagagatacactaag

SEQ ID NO: 4006710 - DNA, 25 bp, Homo sapien
aagacaaatcttaagccatcctcga

SEQ ID NO: 4006711 - DNA, 25 bp, Homo sapien
tgttacttttcccaagaacttgcca

SEQ ID NO: 4006712 - DNA, 25 bp, Homo sapien
atgagccaccacctataaccaaatt

SEQ ID NO: 4006713 - DNA, 25 bp, Homo sapien
attaaataaatcatccactgttttt

SEQ ID NO: 4006714 - DNA, 25 bp, Homo sapien
cctataaccaaattttctacatgtt

SEQ ID NO: 4006715 - DNA, 25 bp, Homo sapien
ttctcttggtgagcagcacagaagt

SEQ ID NO: 4006716 - DNA, 25 bp, Homo sapien
tggtgagcagcacagaagtctcctc

SEQ ID NO: 4006717 - DNA, 25 bp, Homo sapien
tcacgacatccttctcttggtgagc

SEQ ID NO: 4006718 - DNA, 25 bp, Homo sapien
ctcttggtgagcagcacagaagtct

SEQ ID NO: 4006719 - DNA, 25 bp, Homo sapien
catttatagatgtggcaggttccca

SEQ ID NO: 4006720 - DNA, 25 bp, Homo sapien
catagaaactgtttgggtacgtccg

SEQ ID NO: 4006721 - DNA, 25 bp, Homo sapien
cactgtcactgattcttggaagcca

SEQ ID NO: 4006722 - DNA, 25 bp, Homo sapien
agggcagctctatttggttgaccaa

SEQ ID NO: 4006723 - DNA, 25 bp, Homo sapien
ccggacagggcagctggccgggaga

SEQ ID NO: 4006724 - DNA, 25 bp, Homo sapien
gacagggcagctggccgggagaggg

SEQ ID NO: 4006725 - DNA, 25 bp, Homo sapien
agagacgttcctcacttcccagaag

SEQ ID NO: 4006726 - DNA, 25 bp, Homo sapien
cagagacgttcctcacttcccagaa

SEQ ID NO: 4006727 - DNA, 25 bp, Homo sapien
aaagtgtgctgtgcgatcttgatcc

SEQ ID NO: 4006728 - DNA, 25 bp, Homo sapien
tgatcctgcagatgtatcgtacact

SEQ ID NO: 4006729 - DNA, 25 bp, Homo sapien
taaataaggcacagtggtacctgct

SEQ ID NO: 4006730 - DNA, 25 bp, Homo sapien
ttctcagtggccgaagagcaaactg

SEQ ID NO: 4006731 - DNA, 25 bp, Homo sapien
tctgtactgatctatgttccctggc

SEQ ID NO: 4006732 - DNA, 25 bp, Homo sapien
tcttaggtccagctaacataggccc

SEQ ID NO: 4006733 - DNA, 25 bp, Homo sapien
tagattcccgtaagaacatgagccc

SEQ ID NO: 4006734 - DNA, 25 bp, Homo sapien
aaccgaagtcgccaatctgtactga

SEQ ID NO: 4006735 - DNA, 25 bp, Homo sapien
catgtggcaaactgggagcaatcta

SEQ ID NO: 4006736 - DNA, 25 bp, Homo sapien
gctacatgcagggtatgtcatgaaa

SEQ ID NO: 4006737 - DNA, 25 bp, Homo sapien
ggttgaccctaaaccatgcatgtgg

SEQ ID NO: 4006738 - DNA, 25 bp, Homo sapien
catattggtatatagacccagccca

SEQ ID NO: 4006739 - DNA, 25 bp, Homo sapien
atgttgaagctgagataaggcagga

SEQ ID NO: 4006740 - DNA, 25 bp, Homo sapien
tgttgaagctgagataaggcaggaa

SEQ ID NO: 4006741 - DNA, 25 bp, Homo sapien
cttgctcgggctggctaagggaaac

SEQ ID NO: 4006742 - DNA, 25 bp, Homo sapien
caaatgctgatgtgtcatcaatcca

SEQ ID NO: 4006743 - DNA, 25 bp, Homo sapien
acaaatgctgatgtgtcatcaatcc

SEQ ID NO: 4006744 - DNA, 25 bp, Homo sapien
caatctttacttgctcgggctggct

SEQ ID NO: 4006745 - DNA, 25 bp, Homo sapien
gctggtaaaggtcgctggttttcca

SEQ ID NO: 4006746 - DNA, 25 bp, Homo sapien
ctggtaaaggtcgctggttttccat

SEQ ID NO: 4006747 - DNA, 25 bp, Homo sapien
agaacatgatcacgtttaggctgca

SEQ ID NO: 4006748 - DNA, 25 bp, Homo sapien
gtcacatggagaacatgatcacgtt

SEQ ID NO: 4006749 - DNA, 25 bp, Homo sapien
catggagaacatgatcacgtttagg

SEQ ID NO: 4006750 - DNA, 25 bp, Homo sapien
ctttggggaatgtcacatggagaac

SEQ ID NO: 4006751 - DNA, 25 bp, Homo sapien
gaaatgactaatgaatgcccaagag

SEQ ID NO: 4006752 - DNA, 25 bp, Homo sapien
actgacagctagcatatcttaaaaa

SEQ ID NO: 4006753 - DNA, 25 bp, Homo sapien
gaccacacacttaaatgcacagatg

SEQ ID NO: 4006754 - DNA, 25 bp, Homo sapien
gcccaagagtcccattaacttaagc

SEQ ID NO: 4006755 - DNA, 25 bp, Homo sapien
ccaagtttagataggggatatccat

SEQ ID NO: 4006756 - DNA, 25 bp, Homo sapien
tccaagtttagataggggatatcca

SEQ ID NO: 4006757 - DNA, 25 bp, Homo sapien
tccagcctggcaacagagcgagact

SEQ ID NO: 4006758 - DNA, 25 bp, Homo sapien
ctccagcctggcaacagagcgagac

SEQ ID NO: 4006759 - DNA, 25 bp, Homo sapien
gagtcgagattgcgccattggactc

SEQ ID NO: 4006760 - DNA, 25 bp, Homo sapien
agtgagtcgagattgcgccattgga

SEQ ID NO: 4006761 - DNA, 25 bp, Homo sapien
cattccttgtctcatcggtagctca

SEQ ID NO: 4006762 - DNA, 25 bp, Homo sapien
gaccataaagcagtgtcattccagg

SEQ ID NO: 4006763 - DNA, 25 bp, Homo sapien
ggaccaatacagaaggtgaatcatt

SEQ ID NO: 4006764 - DNA, 25 bp, Homo sapien
catttgtccaagagcatatcattcc

SEQ ID NO: 4006765 - DNA, 25 bp, Homo sapien
aatgagttttgatctggcagacaca

SEQ ID NO: 4006766 - DNA, 25 bp, Homo sapien
tgagttttgatctggcagacacatg

SEQ ID NO: 4006767 - DNA, 25 bp, Homo sapien
atgagttttgatctggcagacacat

SEQ ID NO: 4006768 - DNA, 25 bp, Homo sapien
cctcgtggagttgttcagaggctgt

SEQ ID NO: 4006769 - DNA, 25 bp, Homo sapien
gtaattggccatggagatgaagcac

SEQ ID NO: 4006770 - DNA, 25 bp, Homo sapien
gccctgtgatgtaggcatcgtagcc

SEQ ID NO: 4006771 - DNA, 25 bp, Homo sapien
gaggctgtgtcataacttggaaaac

SEQ ID NO: 4006772 - DNA, 25 bp, Homo sapien
tccgcaagggatgtgttgttaatga

SEQ ID NO: 4006773 - DNA, 25 bp, Homo sapien
ttccaattccgcaagggatgtgttg

SEQ ID NO: 4006774 - DNA, 25 bp, Homo sapien
cgcttttccaattccgcaagggatg

SEQ ID NO: 4006775 - DNA, 25 bp, Homo sapien
caagggatgtgttgttaatgatatc

SEQ ID NO: 4006776 - DNA, 25 bp, Homo sapien
aaaggttgtgtgctggccatcaatt

SEQ ID NO: 4006777 - DNA, 25 bp, Homo sapien
aggttgtgtgctggccatcaattta

SEQ ID NO: 4006778 - DNA, 25 bp, Homo sapien
aaggttgtgtgctggccatcaattt

SEQ ID NO: 4006779 - DNA, 25 bp, Homo sapien
tcattgagcaactgcaggagagtcc

SEQ ID NO: 4006780 - DNA, 25 bp, Homo sapien
cacattggccattttgaacccagca

SEQ ID NO: 4006781 - DNA, 25 bp, Homo sapien
caccagcatccctgctacgttggag

SEQ ID NO: 4006782 - DNA, 25 bp, Homo sapien
gagtacaagttctagattcacctgg

SEQ ID NO: 4006783 - DNA, 25 bp, Homo sapien
taggctccacatggctgacctatga

SEQ ID NO: 4006784 - DNA, 25 bp, Homo sapien
caaacacttgttcggtaggctccac

SEQ ID NO: 4006785 - DNA, 25 bp, Homo sapien
taaaagcaagccatcacaacattgg

SEQ ID NO: 4006786 - DNA, 25 bp, Homo sapien
aaagagaaactgctcgaacaccacg

SEQ ID NO: 4006787 - DNA, 25 bp, Homo sapien
ggaaaacacatgttgtcatctcttt

SEQ ID NO: 4006788 - DNA, 25 bp, Homo sapien
tcatctctttaaactcacttaagtc

SEQ ID NO: 4006789 - DNA, 25 bp, Homo sapien
ctggggaaaacacatgttgtcatct

SEQ ID NO: 4006790 - DNA, 25 bp, Homo sapien
tgtcatctctttaaactcacttaag

SEQ ID NO: 4006791 - DNA, 25 bp, Homo sapien
gcatgacgtccaagagcatattgtg

SEQ ID NO: 4006792 - DNA, 25 bp, Homo sapien
gagcatattgtgtccaataacaagt

SEQ ID NO: 4006793 - DNA, 25 bp, Homo sapien
gatgaactgtgtgcatgacgtccaa

SEQ ID NO: 4006794 - DNA, 25 bp, Homo sapien
gagggcagtagaactgatgaactgt

SEQ ID NO: 4006795 - DNA, 25 bp, Homo sapien
cacaaatgttatcctaccactttgg

SEQ ID NO: 4006796 - DNA, 25 bp, Homo sapien
gctcacaaatgttatcctaccactt

SEQ ID NO: 4006797 - DNA, 25 bp, Homo sapien
tgaaagcgttgactcccttaaactg

SEQ ID NO: 4006798 - DNA, 25 bp, Homo sapien
gtggctcacaaatgttatcctacca

SEQ ID NO: 4006799 - DNA, 25 bp, Homo sapien
taatgagcattgattgaaaccacag

SEQ ID NO: 4006800 - DNA, 25 bp, Homo sapien
aaaaatcaggttaccacgatggagc

SEQ ID NO: 4006801 - DNA, 25 bp, Homo sapien
tgtaacactgcttgattcatgggac

SEQ ID NO: 4006802 - DNA, 25 bp, Homo sapien
tcaataaatgtacttctcgcgaggt

SEQ ID NO: 4006803 - DNA, 25 bp, Homo sapien
tctcaactttgtcaccaggctacag

SEQ ID NO: 4006804 - DNA, 25 bp, Homo sapien
ttttcattagagatggtatttcacc

SEQ ID NO: 4006805 - DNA, 25 bp, Homo sapien
ttgtattttcattagagatggtatt

SEQ ID NO: 4006806 - DNA, 25 bp, Homo sapien
ggtctcaactttgtcaccaggctac

SEQ ID NO: 4006807 - DNA, 25 bp, Homo sapien
ttgatcgacatcatgaaccatcatt

SEQ ID NO: 4006808 - DNA, 25 bp, Homo sapien
caactggcggacttctgacaaaaca

SEQ ID NO: 4006809 - DNA, 25 bp, Homo sapien
aaaaaattgatcgacatcatgaacc

SEQ ID NO: 4006810 - DNA, 25 bp, Homo sapien
tgagacaaattccaactggcggact

SEQ ID NO: 4006811 - DNA, 25 bp, Homo sapien
gcgtgaatgactctagaaaatccca

SEQ ID NO: 4006812 - DNA, 25 bp, Homo sapien
cgaattagcaatggcgtgaatgact

SEQ ID NO: 4006813 - DNA, 25 bp, Homo sapien
caatggcgtgaatgactctagaaaa

SEQ ID NO: 4006814 - DNA, 25 bp, Homo sapien
ttagcaatggcgtgaatgactctag

SEQ ID NO: 4006815 - DNA, 25 bp, Homo sapien
tttgctgataactatatatcgctcc

SEQ ID NO: 4006816 - DNA, 25 bp, Homo sapien
ttgctgataactatatatcgctcct

SEQ ID NO: 4006817 - DNA, 25 bp, Homo sapien
tgctgataactatatatcgctcctt

SEQ ID NO: 4006818 - DNA, 25 bp, Homo sapien
actttgctgataactatatatcgct

SEQ ID NO: 4006819 - DNA, 25 bp, Homo sapien
ctaaagtctcaacatgaatgccttt

SEQ ID NO: 4006820 - DNA, 25 bp, Homo sapien
ctcaacatgaatgcctttcggatac

SEQ ID NO: 4006821 - DNA, 25 bp, Homo sapien
aagtctcaacatgaatgcctttcgg

SEQ ID NO: 4006822 - DNA, 25 bp, Homo sapien
agtctcaacatgaatgcctttcgga

SEQ ID NO: 4006823 - DNA, 25 bp, Homo sapien
gtagtcaaatcactgagaaccgcag

SEQ ID NO: 4006824 - DNA, 25 bp, Homo sapien
ggaaatgagaactaagagattatat

SEQ ID NO: 4006825 - DNA, 25 bp, Homo sapien
cactgagaaccgcagaatttcaaaa

SEQ ID NO: 4006826 - DNA, 25 bp, Homo sapien
gtcaaatcactgagaaccgcagaat

SEQ ID NO: 4006827 - DNA, 25 bp, Homo sapien
agctcaaagtctgataaattagttt

SEQ ID NO: 4006828 - DNA, 25 bp, Homo sapien
gtctgataaattagttttctttgga

SEQ ID NO: 4006829 - DNA, 25 bp, Homo sapien
caaagtctgataaattagttttctt

SEQ ID NO: 4006830 - DNA, 25 bp, Homo sapien
ctcaaagtctgataaattagttttc

SEQ ID NO: 4006831 - DNA, 25 bp, Homo sapien
ggacatgcagaaatgttcaggacaa

SEQ ID NO: 4006832 - DNA, 25 bp, Homo sapien
tgcagaaatgttcaggacaactaac

SEQ ID NO: 4006833 - DNA, 25 bp, Homo sapien
atgcagaaatgttcaggacaactaa

SEQ ID NO: 4006834 - DNA, 25 bp, Homo sapien
aaaggacatgcagaaatgttcagga

SEQ ID NO: 4006835 - DNA, 25 bp, Homo sapien
cggtacatggctctaaatccaagtt

SEQ ID NO: 4006836 - DNA, 25 bp, Homo sapien
tacatggctctaaatccaagttctt

SEQ ID NO: 4006837 - DNA, 25 bp, Homo sapien
ggtacatggctctaaatccaagttc

SEQ ID NO: 4006838 - DNA, 25 bp, Homo sapien
ccggtacatggctctaaatccaagt

SEQ ID NO: 4006839 - DNA, 25 bp, Homo sapien
ttattttgacctaggcatagaatcc

SEQ ID NO: 4006840 - DNA, 25 bp, Homo sapien
tagctgggagtggtgcagtgtaact

SEQ ID NO: 4006841 - DNA, 25 bp, Homo sapien
tgacctaggcatagaatcccagcac

SEQ ID NO: 4006842 - DNA, 25 bp, Homo sapien
tgggaggtcgacgttgggtggatca

SEQ ID NO: 4006843 - DNA, 25 bp, Homo sapien
tcctcaggaatcgtgacaggacatt

SEQ ID NO: 4006844 - DNA, 25 bp, Homo sapien
tcatcatactgctctcttaactgtc

SEQ ID NO: 4006845 - DNA, 25 bp, Homo sapien
tcctgcaccattcgcctgtgaacgt

SEQ ID NO: 4006846 - DNA, 25 bp, Homo sapien
tgaagtgttaggagatacataggac

SEQ ID NO: 4006847 - DNA, 25 bp, Homo sapien
tcaaatccctggcttgctagaaagt

SEQ ID NO: 4006848 - DNA, 25 bp, Homo sapien
tccctggcttgctagaaagtcaatg

SEQ ID NO: 4006849 - DNA, 25 bp, Homo sapien
aatccctggcttgctagaaagtcaa

SEQ ID NO: 4006850 - DNA, 25 bp, Homo sapien
cctggcttgctagaaagtcaatgct

SEQ ID NO: 4006851 - DNA, 25 bp, Homo sapien
cctcgaggctttcataactgcatta

SEQ ID NO: 4006852 - DNA, 25 bp, Homo sapien
gctttcataactgcattaccattaa

SEQ ID NO: 4006853 - DNA, 25 bp, Homo sapien
tcgaggctttcataactgcattacc

SEQ ID NO: 4006854 - DNA, 25 bp, Homo sapien
gaggctttcataactgcattaccat

SEQ ID NO: 4006855 - DNA, 25 bp, Homo sapien
ggtgaggatctattgaagggtttcg

SEQ ID NO: 4006856 - DNA, 25 bp, Homo sapien
tggtgaggatctattgaagggtttc

SEQ ID NO: 4006857 - DNA, 25 bp, Homo sapien
tgaggatctattgaagggtttcggg

SEQ ID NO: 4006858 - DNA, 25 bp, Homo sapien
gaggatctattgaagggtttcggga

SEQ ID NO: 4006859 - DNA, 25 bp, Homo sapien
atctgtgtagtcatacttaaaagtg

SEQ ID NO: 4006860 - DNA, 25 bp, Homo sapien
tctgtgtagtcatacttaaaagtgc

SEQ ID NO: 4006861 - DNA, 25 bp, Homo sapien
tgtgtagtcatacttaaaagtgcaa

SEQ ID NO: 4006862 - DNA, 25 bp, Homo sapien
gtagtcatacttaaaagtgcaaagg

SEQ ID NO: 4006863 - DNA, 25 bp, Homo sapien
aaaccatttgttaatgcagagactg

SEQ ID NO: 4006864 - DNA, 25 bp, Homo sapien
gagactgaaggtccatcactgattc

SEQ ID NO: 4006865 - DNA, 25 bp, Homo sapien
tcttctggagtgtcaaaaccatttg

SEQ ID NO: 4006866 - DNA, 25 bp, Homo sapien
ctctcttctggagtgtcaaaaccat

SEQ ID NO: 4006867 - DNA, 25 bp, Homo sapien
ctgttgaggcaggcaatgaacacgt

SEQ ID NO: 4006868 - DNA, 25 bp, Homo sapien
tgttgaggcaggcaatgaacacgtc

SEQ ID NO: 4006869 - DNA, 25 bp, Homo sapien
ttgaggcaggcaatgaacacgtcca

SEQ ID NO: 4006870 - DNA, 25 bp, Homo sapien
gttgaggcaggcaatgaacacgtcc

SEQ ID NO: 4006871 - DNA, 25 bp, Homo sapien
actccccatcgatggcgaagaagtc

SEQ ID NO: 4006872 - DNA, 25 bp, Homo sapien
actttgtgaagattactcttaaaat

SEQ ID NO: 4006873 - DNA, 25 bp, Homo sapien
catcgatggcgaagaagtcggcctc

SEQ ID NO: 4006874 - DNA, 25 bp, Homo sapien
gaagaagtcggcctcctctatggcc

SEQ ID NO: 4006875 - DNA, 25 bp, Homo sapien
gcggagaaaccgaaaagaggctcag

SEQ ID NO: 4006876 - DNA, 25 bp, Homo sapien
tgcggagaaaccgaaaagaggctca

SEQ ID NO: 4006877 - DNA, 25 bp, Homo sapien
ctgcggagaaaccgaaaagaggctc

SEQ ID NO: 4006878 - DNA, 25 bp, Homo sapien
cagagtggccggaaccttggcccca

SEQ ID NO: 4006879 - DNA, 25 bp, Homo sapien
gcgcccgcctcagcggttctactcg

SEQ ID NO: 4006880 - DNA, 25 bp, Homo sapien
tctgcagagtggccggaaccttggc

SEQ ID NO: 4006881 - DNA, 25 bp, Homo sapien
cgcgcccgcctcagcggttctactc

SEQ ID NO: 4006882 - DNA, 25 bp, Homo sapien
gtgacgccggccgcgacttccggaa

SEQ ID NO: 4006883 - DNA, 25 bp, Homo sapien
gaattccgcggcgactgcggcagta

SEQ ID NO: 4006884 - DNA, 25 bp, Homo sapien
actgcggcagtagctgaggcagccg

SEQ ID NO: 4006885 - DNA, 25 bp, Homo sapien
cgccggccgcgacttccggaaacag

SEQ ID NO: 4006886 - DNA, 25 bp, Homo sapien
ggaccggcggtattacgcatgcgcc

SEQ ID NO: 4006887 - DNA, 25 bp, Homo sapien
ccttgggctgtgactgccgagcccg

SEQ ID NO: 4006888 - DNA, 25 bp, Homo sapien
cgggtactcggtctctgggtgaaga

SEQ ID NO: 4006889 - DNA, 25 bp, Homo sapien
gcggtattacgcatgcgcccacttc

SEQ ID NO: 4006890 - DNA, 25 bp, Homo sapien
gccatgggacctgtgttcctaacca

SEQ ID NO: 4006891 - DNA, 25 bp, Homo sapien
gagcctcaccgctggtaaatggcag

SEQ ID NO: 4006892 - DNA, 25 bp, Homo sapien
tccagagcatgaagcgtgagccctt

SEQ ID NO: 4006893 - DNA, 25 bp, Homo sapien
ggcggcggagagcaattttcagtct

SEQ ID NO: 4006894 - DNA, 25 bp, Homo sapien
atttctgtggcaccaagctggctgg

SEQ ID NO: 4006895 - DNA, 25 bp, Homo sapien
ggagggaaagggtatattgagccat

SEQ ID NO: 4006896 - DNA, 25 bp, Homo sapien
agcatttctgtggcaccaagctggc

SEQ ID NO: 4006897 - DNA, 25 bp, Homo sapien
tgagatgcattttttgggttgattt

SEQ ID NO: 4006898 - DNA, 25 bp, Homo sapien
tccttcgagtctatggaaccttcca

SEQ ID NO: 4006899 - DNA, 25 bp, Homo sapien
ggaaccttccactacacatattatt

SEQ ID NO: 4006900 - DNA, 25 bp, Homo sapien
ctgcccacatccttcgagtctatgg

SEQ ID NO: 4006901 - DNA, 25 bp, Homo sapien
cattttctaaggaagttagtgaagg

SEQ ID NO: 4006902 - DNA, 25 bp, Homo sapien
gaatctggtcgagaagtgaactgaa

SEQ ID NO: 4006903 - DNA, 25 bp, Homo sapien
gttactctcagttctggaattattc

SEQ ID NO: 4006904 - DNA, 25 bp, Homo sapien
tattctccttttggagaatctggtc

SEQ ID NO: 4006905 - DNA, 25 bp, Homo sapien
ctatgttactctcagttctggaatt

SEQ ID NO: 4006906 - DNA, 25 bp, Homo sapien
taaatgtaacaaagtgatgaagcag

SEQ ID NO: 4006907 - DNA, 25 bp, Homo sapien
gctccctgtaggtcatgtccttgag

SEQ ID NO: 4006908 - DNA, 25 bp, Homo sapien
ttaaaagatgggttgagtaggcaga

SEQ ID NO: 4006909 - DNA, 25 bp, Homo sapien
gaagacaaggacattcagcacgggc

SEQ ID NO: 4006910 - DNA, 25 bp, Homo sapien
gactgacatccgcacagggaggatt

SEQ ID NO: 4006911 - DNA, 25 bp, Homo sapien
ggtggcacgagcaaggactgacatc

SEQ ID NO: 4006912 - DNA, 25 bp, Homo sapien
catcagaagggtgccacatcagtcc

SEQ ID NO: 4006913 - DNA, 25 bp, Homo sapien
tcttgtggtcaaggaactccggcgg

SEQ ID NO: 4006914 - DNA, 25 bp, Homo sapien
gcctagaatgatggttagacttgta

SEQ ID NO: 4006915 - DNA, 25 bp, Homo sapien
caaaggattcagtttgagcctagaa

SEQ ID NO: 4006916 - DNA, 25 bp, Homo sapien
gaaatcattgaaggtctggatccct

SEQ ID NO: 4006917 - DNA, 25 bp, Homo sapien
tagacttgtagtcactgggcttttg

SEQ ID NO: 4006918 - DNA, 25 bp, Homo sapien
cagccatccaagcaggttagaagac

SEQ ID NO: 4006919 - DNA, 25 bp, Homo sapien
ggaaccgaccccaacacagtgataa

SEQ ID NO: 4006920 - DNA, 25 bp, Homo sapien
gctgcagcctagaacatagaacatg

SEQ ID NO: 4006921 - DNA, 25 bp, Homo sapien
ctggacttgaacttcaccgggtggg

SEQ ID NO: 4006922 - DNA, 25 bp, Homo sapien
tgagaggacgctttatttccttgtg

SEQ ID NO: 4006923 - DNA, 25 bp, Homo sapien
tcattactgagaggacgctttattt

SEQ ID NO: 4006924 - DNA, 25 bp, Homo sapien
actgagaggacgctttatttccttg

SEQ ID NO: 4006925 - DNA, 25 bp, Homo sapien
ttactgagaggacgctttatttcct

SEQ ID NO: 4006926 - DNA, 25 bp, Homo sapien
tcagtcacacttgggcgagtccggc

SEQ ID NO: 4006927 - DNA, 25 bp, Homo sapien
ctttaagttgtactcagtttgggct

SEQ ID NO: 4006928 - DNA, 25 bp, Homo sapien
cacacttgcacaacagttcttggca

SEQ ID NO: 4006929 - DNA, 25 bp, Homo sapien
gagtccggctcacataggaactggg

SEQ ID NO: 4006930 - DNA, 25 bp, Homo sapien
aagtgagccgagatcacaccactgc

SEQ ID NO: 4006931 - DNA, 25 bp, Homo sapien
ctccagcctgggtgacagagcaaga

SEQ ID NO: 4006932 - DNA, 25 bp, Homo sapien
gcactccagcctgggtgacagagca

SEQ ID NO: 4006933 - DNA, 25 bp, Homo sapien
gagcccaaaaggcagaggttgaagt

SEQ ID NO: 4006934 - DNA, 25 bp, Homo sapien
ggcacggaagtcatctggctatgcc

SEQ ID NO: 4006935 - DNA, 25 bp, Homo sapien
caggggcacggaagtcatctggcta

SEQ ID NO: 4006936 - DNA, 25 bp, Homo sapien
aggggcacggaagtcatctggctat

SEQ ID NO: 4006937 - DNA, 25 bp, Homo sapien
gggcacggaagtcatctggctatgc

SEQ ID NO: 4006938 - DNA, 25 bp, Homo sapien
aggacgctctgattgacgcactgcc

SEQ ID NO: 4006939 - DNA, 25 bp, Homo sapien
tgattgacgcactgccaggagtagc

SEQ ID NO: 4006940 - DNA, 25 bp, Homo sapien
tctgattgacgcactgccaggagta

SEQ ID NO: 4006941 - DNA, 25 bp, Homo sapien
cgctctgattgacgcactgccagga

SEQ ID NO: 4006942 - DNA, 25 bp, Homo sapien
ttcctttgagacagcgtatctctct

SEQ ID NO: 4006943 - DNA, 25 bp, Homo sapien
ctgaaaatccccgtcttgggtaatg

SEQ ID NO: 4006944 - DNA, 25 bp, Homo sapien
ggtaatgattccattggccccacca

SEQ ID NO: 4006945 - DNA, 25 bp, Homo sapien
tgaaaatccccgtcttgggtaatga

SEQ ID NO: 4006946 - DNA, 25 bp, Homo sapien
tccccgtcttgggtaatgattccat

SEQ ID NO: 4006947 - DNA, 25 bp, Homo sapien
atatttcatataggcgatgggggtt

SEQ ID NO: 4006948 - DNA, 25 bp, Homo sapien
catataggcgatgggggttcgggga

SEQ ID NO: 4006949 - DNA, 25 bp, Homo sapien
tttcatataggcgatgggggttcgg

SEQ ID NO: 4006950 - DNA, 25 bp, Homo sapien
tatttcatataggcgatgggggttc

SEQ ID NO: 4006951 - DNA, 25 bp, Homo sapien
ctcagggcccttggtatctcctctt

SEQ ID NO: 4006952 - DNA, 25 bp, Homo sapien
tcagggcccttggtatctcctctta

SEQ ID NO: 4006953 - DNA, 25 bp, Homo sapien
catctgtgtgctggcggtgtctgca

SEQ ID NO: 4006954 - DNA, 25 bp, Homo sapien
gtcctgtgcctgcgcatctgtgtgc

SEQ ID NO: 4006955 - DNA, 25 bp, Homo sapien
gcatagtactctgcgggtacatgta

SEQ ID NO: 4006956 - DNA, 25 bp, Homo sapien
tgtgctggcggtgtctgcatagtac

SEQ ID NO: 4006957 - DNA, 25 bp, Homo sapien
gaaatgggcagtcacccacgggacc

SEQ ID NO: 4006958 - DNA, 25 bp, Homo sapien
aaatgggcagtcacccacgggacct

SEQ ID NO: 4006959 - DNA, 25 bp, Homo sapien
aatgggcagtcacccacgggacctc

SEQ ID NO: 4006960 - DNA, 25 bp, Homo sapien
gacccggggccaggtagaagcagca

SEQ ID NO: 4006961 - DNA, 25 bp, Homo sapien
gattggcaggcacacaggtagcggc

SEQ ID NO: 4006962 - DNA, 25 bp, Homo sapien
tggcaggcacacaggtagcggcccc

SEQ ID NO: 4006963 - DNA, 25 bp, Homo sapien
gcaggcacacaggtagcggccccat

SEQ ID NO: 4006964 - DNA, 25 bp, Homo sapien
attggcaggcacacaggtagcggcc

SEQ ID NO: 4006965 - DNA, 25 bp, Homo sapien
ggaggcaccaagcccggcggacaca

SEQ ID NO: 4006966 - DNA, 25 bp, Homo sapien
ctcaccttccctcgcggcccaagca

SEQ ID NO: 4006967 - DNA, 25 bp, Homo sapien
gcagggccaccggaggcaccaagcc

SEQ ID NO: 4006968 - DNA, 25 bp, Homo sapien
acaccccggctgtcacgccccggct

SEQ ID NO: 4006969 - DNA, 25 bp, Homo sapien
ggcggcgcaaaggcgtcctgatctc

SEQ ID NO: 4006970 - DNA, 25 bp, Homo sapien
gcggcgcaaaggcgtcctgatctct

SEQ ID NO: 4006971 - DNA, 25 bp, Homo sapien
ggcccagggaagtctcctcggaata

SEQ ID NO: 4006972 - DNA, 25 bp, Homo sapien
aggcgctcttttgatgttattactc

SEQ ID NO: 4006973 - DNA, 25 bp, Homo sapien
cacctgggcgcccaaagggaacaga

SEQ ID NO: 4006974 - DNA, 25 bp, Homo sapien
aggaggggtagtcctgaatttgctt

SEQ ID NO: 4006975 - DNA, 25 bp, Homo sapien
agcggcgacccctgtaggctggtgt

SEQ ID NO: 4006976 - DNA, 25 bp, Homo sapien
ggtcagcgtagccaggccgacagac

SEQ ID NO: 4006977 - DNA, 25 bp, Homo sapien
ctgcggtgccgcctgtaggctggtg

SEQ ID NO: 4006978 - DNA, 25 bp, Homo sapien
tcggcggcgcagcagttgacgctca

SEQ ID NO: 4006979 - DNA, 25 bp, Homo sapien
agaggtggggagagagcgacctcca

SEQ ID NO: 4006980 - DNA, 25 bp, Homo sapien
gaggtggggagagagcgacctccag

SEQ ID NO: 4006981 - DNA, 25 bp, Homo sapien
gcagccggcggggcgatggagaaag

SEQ ID NO: 4006982 - DNA, 25 bp, Homo sapien
cggcggggcgatggagaaagacgcc

SEQ ID NO: 4006983 - DNA, 25 bp, Homo sapien
ccacggagcagctgccgggaccctc

SEQ ID NO: 4006984 - DNA, 25 bp, Homo sapien
cccacggagcagctgccgggaccct

SEQ ID NO: 4006985 - DNA, 25 bp, Homo sapien
gaacattgttgtgtagaaatttcat

SEQ ID NO: 4006986 - DNA, 25 bp, Homo sapien
ttcattgactgtgttaaaattattc

SEQ ID NO: 4006987 - DNA, 25 bp, Homo sapien
ttgactgtgttaaaattattctcca

SEQ ID NO: 4006988 - DNA, 25 bp, Homo sapien
tgagacaagaacattgttgtgtaga

SEQ ID NO: 4006989 - DNA, 25 bp, Homo sapien
agcagcacgtaaagtcagtgacatg

SEQ ID NO: 4006990 - DNA, 25 bp, Homo sapien
ctgcagcagcacgtaaagtcagtga

SEQ ID NO: 4006991 - DNA, 25 bp, Homo sapien
cacgtaaagtcagtgacatgcccat

SEQ ID NO: 4006992 - DNA, 25 bp, Homo sapien
cagcacgtaaagtcagtgacatgcc

SEQ ID NO: 4006993 - DNA, 25 bp, Homo sapien
ctcttgtctccaacagacaaaacgg

SEQ ID NO: 4006994 - DNA, 25 bp, Homo sapien
gctgcactcttgtctccaacagaca

SEQ ID NO: 4006995 - DNA, 25 bp, Homo sapien
agatggccccgctgcactcttgtct

SEQ ID NO: 4006996 - DNA, 25 bp, Homo sapien
gagatggccccgctgcactcttgtc

SEQ ID NO: 4006997 - DNA, 25 bp, Homo sapien
tagctcagattacaacgcctggcta

SEQ ID NO: 4006998 - DNA, 25 bp, Homo sapien
ctgagtagctcagattacaacgcct

SEQ ID NO: 4006999 - DNA, 25 bp, Homo sapien
agtagctcagattacaacgcctggc

SEQ ID NO: 4007000 - DNA, 25 bp, Homo sapien
gagtagctcagattacaacgcctgg

SEQ ID NO: 4007001 - DNA, 25 bp, Homo sapien
aacaccagggtggatggtttgcagt

SEQ ID NO: 4007002 - DNA, 25 bp, Homo sapien
tctctgtgaactgaaccttgttaaa

SEQ ID NO: 4007003 - DNA, 25 bp, Homo sapien
ttaaagtcagtcaacaccagggtgg

SEQ ID NO: 4007004 - DNA, 25 bp, Homo sapien
ccctcaatctctgtgaactgaacct

SEQ ID NO: 4007005 - DNA, 25 bp, Homo sapien
ggcagaggactactacagatgcaaa

SEQ ID NO: 4007006 - DNA, 25 bp, Homo sapien
cgggcagaggactactacagatgca

SEQ ID NO: 4007007 - DNA, 25 bp, Homo sapien
cggcgggcagaggactactacagat

SEQ ID NO: 4007008 - DNA, 25 bp, Homo sapien
gcgggcagaggactactacagatgc

SEQ ID NO: 4007009 - DNA, 25 bp, Homo sapien
aagcatcacagtcccatccctgttg

SEQ ID NO: 4007010 - DNA, 25 bp, Homo sapien
cccatccctgttggtaaccgtgttg

SEQ ID NO: 4007011 - DNA, 25 bp, Homo sapien
aaggctgcctacaagcatcacagtc

SEQ ID NO: 4007012 - DNA, 25 bp, Homo sapien
taagtgtcagaggttccgtatttgt

SEQ ID NO: 4007013 - DNA, 25 bp, Homo sapien
agccatgcctaactgacttcttgag

SEQ ID NO: 4007014 - DNA, 25 bp, Homo sapien
tcttgaggtaagattgttctgtcag

SEQ ID NO: 4007015 - DNA, 25 bp, Homo sapien
gcctaactgacttcttgaggtaaga

SEQ ID NO: 4007016 - DNA, 25 bp, Homo sapien
gtaagattgttctgtcagaaaaccc

SEQ ID NO: 4007017 - DNA, 25 bp, Homo sapien
tgacactgacactgctattttgaaa

SEQ ID NO: 4007018 - DNA, 25 bp, Homo sapien
tatgacactgacactgctattttga

SEQ ID NO: 4007019 - DNA, 25 bp, Homo sapien
ttatgacactgacactgctattttg

SEQ ID NO: 4007020 - DNA, 25 bp, Homo sapien
gacactgacactgctattttgaaac

SEQ ID NO: 4007021 - DNA, 25 bp, Homo sapien
cgcacaggacgctctgattgacgca

SEQ ID NO: 4007022 - DNA, 25 bp, Homo sapien
gcacaggacgctctgattgacgcac

SEQ ID NO: 4007023 - DNA, 25 bp, Homo sapien
cctcagctcgagtgtaacaacagtc

SEQ ID NO: 4007024 - DNA, 25 bp, Homo sapien
gagtgtaacaacagtcgtggccatg

SEQ ID NO: 4007025 - DNA, 25 bp, Homo sapien
gctcgagtgtaacaacagtcgtggc

SEQ ID NO: 4007026 - DNA, 25 bp, Homo sapien
agccggcctcctcagctcgagtgta

SEQ ID NO: 4007027 - DNA, 25 bp, Homo sapien
ttcctttgagacagcgtatctctct

SEQ ID NO: 4007028 - DNA, 25 bp, Homo sapien
ggtaatgattccattggccccacca

SEQ ID NO: 4007029 - DNA, 25 bp, Homo sapien
ctgaaaatccccgtcttgggtaatg

SEQ ID NO: 4007030 - DNA, 25 bp, Homo sapien
tgaaaatccccgtcttgggtaatga

SEQ ID NO: 4007031 - DNA, 25 bp, Homo sapien
tccccgtcttgggtaatgattccat

SEQ ID NO: 4007032 - DNA, 25 bp, Homo sapien
tatttcatataggcgatgggggttc

SEQ ID NO: 4007033 - DNA, 25 bp, Homo sapien
atatttcatataggcgatgggggtt

SEQ ID NO: 4007034 - DNA, 25 bp, Homo sapien
tttcatataggcgatgggggttcgg

SEQ ID NO: 4007035 - DNA, 25 bp, Homo sapien
catataggcgatgggggttcgggga

SEQ ID NO: 4007036 - DNA, 25 bp, Homo sapien
ctcagggcccttggtatctcctctt

SEQ ID NO: 4007037 - DNA, 25 bp, Homo sapien
tcagggcccttggtatctcctctta

SEQ ID NO: 4007038 - DNA, 25 bp, Homo sapien
tgtgctggcggtgtctgcatagtac

SEQ ID NO: 4007039 - DNA, 25 bp, Homo sapien
catctgtgtgctggcggtgtctgca

SEQ ID NO: 4007040 - DNA, 25 bp, Homo sapien
gtcctgtgcctgcgcatctgtgtgc

SEQ ID NO: 4007041 - DNA, 25 bp, Homo sapien
gcatagtactctgcgggtacatgta

SEQ ID NO: 4007042 - DNA, 25 bp, Homo sapien
gaaatgggcagtcacccacgggacc

SEQ ID NO: 4007043 - DNA, 25 bp, Homo sapien
aaatgggcagtcacccacgggacct

SEQ ID NO: 4007044 - DNA, 25 bp, Homo sapien
aatgggcagtcacccacgggacctc

SEQ ID NO: 4007045 - DNA, 25 bp, Homo sapien
gacccggggccaggtagaagcagca

SEQ ID NO: 4007046 - DNA, 25 bp, Homo sapien
ggaggcaccaagcccggcggacaca

SEQ ID NO: 4007047 - DNA, 25 bp, Homo sapien
gcagggccaccggaggcaccaagcc

SEQ ID NO: 4007048 - DNA, 25 bp, Homo sapien
acaccccggctgtcacgccccggct

SEQ ID NO: 4007049 - DNA, 25 bp, Homo sapien
ctcaccttccctcgcggcccaagca

SEQ ID NO: 4007050 - DNA, 25 bp, Homo sapien
ggcggcgcaaaggcgtcctgatctc

SEQ ID NO: 4007051 - DNA, 25 bp, Homo sapien
gcggcgcaaaggcgtcctgatctct

SEQ ID NO: 4007052 - DNA, 25 bp, Homo sapien
gaggaaaaggcgctcttttgatgtt

SEQ ID NO: 4007053 - DNA, 25 bp, Homo sapien
cacctgggcgcccaaagggaacaga

SEQ ID NO: 4007054 - DNA, 25 bp, Homo sapien
aggcgctcttttgatgttattactc

SEQ ID NO: 4007055 - DNA, 25 bp, Homo sapien
aggaggggtagtcctgaatttgctt

SEQ ID NO: 4007056 - DNA, 25 bp, Homo sapien
agcggcgacccctgtaggctggtgt

SEQ ID NO: 4007057 - DNA, 25 bp, Homo sapien
ggtcagcgtagccaggccgacagac

SEQ ID NO: 4007058 - DNA, 25 bp, Homo sapien
ctgcggtgccgcctgtaggctggtg

SEQ ID NO: 4007059 - DNA, 25 bp, Homo sapien
tcggcggcgcagcagttgacgctca

SEQ ID NO: 4007060 - DNA, 25 bp, Homo sapien
agaggtggggagagagcgacctcca

SEQ ID NO: 4007061 - DNA, 25 bp, Homo sapien
gaggtggggagagagcgacctccag

SEQ ID NO: 4007062 - DNA, 25 bp, Homo sapien
gcagccggcggggcgatggagaaag

SEQ ID NO: 4007063 - DNA, 25 bp, Homo sapien
cggcggggcgatggagaaagacgcc

SEQ ID NO: 4007064 - DNA, 25 bp, Homo sapien
ccacggagcagctgccgggaccctc

SEQ ID NO: 4007065 - DNA, 25 bp, Homo sapien
cccacggagcagctgccgggaccct

SEQ ID NO: 4007066 - DNA, 25 bp, Homo sapien
gaacattgttgtgtagaaatttcat

SEQ ID NO: 4007067 - DNA, 25 bp, Homo sapien
ttcattgactgtgttaaaattattc

SEQ ID NO: 4007068 - DNA, 25 bp, Homo sapien
ttgactgtgttaaaattattctcca

SEQ ID NO: 4007069 - DNA, 25 bp, Homo sapien
tgagacaagaacattgttgtgtaga

SEQ ID NO: 4007070 - DNA, 25 bp, Homo sapien
agcagcacgtaaagtcagtgacatg

SEQ ID NO: 4007071 - DNA, 25 bp, Homo sapien
ctgcagcagcacgtaaagtcagtga

SEQ ID NO: 4007072 - DNA, 25 bp, Homo sapien
cagcacgtaaagtcagtgacatgcc

SEQ ID NO: 4007073 - DNA, 25 bp, Homo sapien
cacgtaaagtcagtgacatgcccat

SEQ ID NO: 4007074 - DNA, 25 bp, Homo sapien
agtccacctgtgtgagtagacgctg

SEQ ID NO: 4007075 - DNA, 25 bp, Homo sapien
tgaaattacacagctcaggcctgta

SEQ ID NO: 4007076 - DNA, 25 bp, Homo sapien
actgggctgtgtcacgcggcatgaa

SEQ ID NO: 4007077 - DNA, 25 bp, Homo sapien
acctgtgtgagtagacgctggaccc

SEQ ID NO: 4007078 - DNA, 25 bp, Homo sapien
tagctcagattacaacgcctggcta

SEQ ID NO: 4007079 - DNA, 25 bp, Homo sapien
agtagctcagattacaacgcctggc

SEQ ID NO: 4007080 - DNA, 25 bp, Homo sapien
ctgagtagctcagattacaacgcct

SEQ ID NO: 4007081 - DNA, 25 bp, Homo sapien
gagtagctcagattacaacgcctgg

SEQ ID NO: 4007082 - DNA, 25 bp, Homo sapien
tctctgtgaactgaaccttgttaaa

SEQ ID NO: 4007083 - DNA, 25 bp, Homo sapien
aacaccagggtggatggtttgcagt

SEQ ID NO: 4007084 - DNA, 25 bp, Homo sapien
ccctcaatctctgtgaactgaacct

SEQ ID NO: 4007085 - DNA, 25 bp, Homo sapien
ttaaagtcagtcaacaccagggtgg

SEQ ID NO: 4007086 - DNA, 25 bp, Homo sapien
ggcagaggactactacagatgcaaa

SEQ ID NO: 4007087 - DNA, 25 bp, Homo sapien
cgggcagaggactactacagatgca

SEQ ID NO: 4007088 - DNA, 25 bp, Homo sapien
cggcgggcagaggactactacagat

SEQ ID NO: 4007089 - DNA, 25 bp, Homo sapien
gcgggcagaggactactacagatgc

SEQ ID NO: 4007090 - DNA, 25 bp, Homo sapien
tgacactgacactgctattttgaaa

SEQ ID NO: 4007091 - DNA, 25 bp, Homo sapien
ttatgacactgacactgctattttg

SEQ ID NO: 4007092 - DNA, 25 bp, Homo sapien
tatgacactgacactgctattttga

SEQ ID NO: 4007093 - DNA, 25 bp, Homo sapien
gacactgacactgctattttgaaac

SEQ ID NO: 4007094 - DNA, 25 bp, Homo sapien
cctcagcggatgataatctcaagac

SEQ ID NO: 4007095 - DNA, 25 bp, Homo sapien
ctcagcggatgataatctcaagaca

SEQ ID NO: 4007096 - DNA, 25 bp, Homo sapien
cgcacaggacgctctgattgacgca

SEQ ID NO: 4007097 - DNA, 25 bp, Homo sapien
gcacaggacgctctgattgacgcac

SEQ ID NO: 4007098 - DNA, 25 bp, Homo sapien
cctcagctcgagtgtaacaacagtc

SEQ ID NO: 4007099 - DNA, 25 bp, Homo sapien
gctcgagtgtaacaacagtcgtggc

SEQ ID NO: 4007100 - DNA, 25 bp, Homo sapien
gagtgtaacaacagtcgtggccatg

SEQ ID NO: 4007101 - DNA, 25 bp, Homo sapien
agccggcctcctcagctcgagtgta

SEQ ID NO: 4007102 - DNA, 25 bp, Homo sapien
ctgcggatgtcacatgggcaggaca

SEQ ID NO: 4007103 - DNA, 25 bp, Homo sapien
cagtcaatggcatcgcggggctggc

SEQ ID NO: 4007104 - DNA, 25 bp, Homo sapien
tcaatggcatcgcggggctggccat

SEQ ID NO: 4007105 - DNA, 25 bp, Homo sapien
gtcaatggcatcgcggggctggcca

SEQ ID NO: 4007106 - DNA, 25 bp, Homo sapien
agtcaatggcatcgcggggctggcc

SEQ ID NO: 4007107 - DNA, 25 bp, Homo sapien
gccggtgcacacgtaatatcctgga

SEQ ID NO: 4007108 - DNA, 25 bp, Homo sapien
gatcccacgccggtgcacacgtaat

SEQ ID NO: 4007109 - DNA, 25 bp, Homo sapien
cggtgcacacgtaatatcctggagg

SEQ ID NO: 4007110 - DNA, 25 bp, Homo sapien
cacgccggtgcacacgtaatatcct

SEQ ID NO: 4007111 - DNA, 25 bp, Homo sapien
gtgattccagccaatgtcctgttgg

SEQ ID NO: 4007112 - DNA, 25 bp, Homo sapien
ccagggcccagagtcaataagggag

SEQ ID NO: 4007113 - DNA, 25 bp, Homo sapien
tgaaggtgtgacttgtgattccagc

SEQ ID NO: 4007114 - DNA, 25 bp, Homo sapien
tgactcctctggtttactgaaggtg

SEQ ID NO: 4007115 - DNA, 25 bp, Homo sapien
catgaggctacccaagccatgtgat

SEQ ID NO: 4007116 - DNA, 25 bp, Homo sapien
taattgtcacgtcttattccggcag

SEQ ID NO: 4007117 - DNA, 25 bp, Homo sapien
tgactagaactaggtcgtgcaccaa

SEQ ID NO: 4007118 - DNA, 25 bp, Homo sapien
taattagggtgacatagactctgct

SEQ ID NO: 4007119 - DNA, 25 bp, Homo sapien
cacagtcatgccagaggttgggtcc

SEQ ID NO: 4007120 - DNA, 25 bp, Homo sapien
caagcaatagcccaagctggcattt

SEQ ID NO: 4007121 - DNA, 25 bp, Homo sapien
gctaagggaattagccttggttctc

SEQ ID NO: 4007122 - DNA, 25 bp, Homo sapien
tcatggatggaaagcggaggctcaa

SEQ ID NO: 4007123 - DNA, 25 bp, Homo sapien
tcggcagagtgttggaccacgagaa

SEQ ID NO: 4007124 - DNA, 25 bp, Homo sapien
tgttggaccacgagaaggcagatgt

SEQ ID NO: 4007125 - DNA, 25 bp, Homo sapien
ggattaactgagtcggcagagtgtt

SEQ ID NO: 4007126 - DNA, 25 bp, Homo sapien
cagcctgaagtttggaagtgatctt

SEQ ID NO: 4007127 - DNA, 25 bp, Homo sapien
cgctggtttgaatattcaagggtct

SEQ ID NO: 4007128 - DNA, 25 bp, Homo sapien
ctggtttgaatattcaagggtctca

SEQ ID NO: 4007129 - DNA, 25 bp, Homo sapien
gctggtttgaatattcaagggtctc

SEQ ID NO: 4007130 - DNA, 25 bp, Homo sapien
tggtttgaatattcaagggtctcac

SEQ ID NO: 4007131 - DNA, 25 bp, Homo sapien
atgttgggtgcaaatgaatagggct

SEQ ID NO: 4007132 - DNA, 25 bp, Homo sapien
gatgatgttgggtgcaaatgaatag

SEQ ID NO: 4007133 - DNA, 25 bp, Homo sapien
tgggtgcaaatgaatagggcttcag

SEQ ID NO: 4007134 - DNA, 25 bp, Homo sapien
tgatgatgttgggtgcaaatgaata

SEQ ID NO: 4007135 - DNA, 25 bp, Homo sapien
cctggcacttggtagaaattaaaca

SEQ ID NO: 4007136 - DNA, 25 bp, Homo sapien
gattggttcagctcgggtcacatag

SEQ ID NO: 4007137 - DNA, 25 bp, Homo sapien
gagaccttctcatgtggttatgatg

SEQ ID NO: 4007138 - DNA, 25 bp, Homo sapien
tctgtttcataatgggagaccttct

SEQ ID NO: 4007139 - DNA, 25 bp, Homo sapien
aagggtgacacaggttgacatggtt

SEQ ID NO: 4007140 - DNA, 25 bp, Homo sapien
aacaggaagcttgagcttcatgtct

SEQ ID NO: 4007141 - DNA, 25 bp, Homo sapien
cccaagtccctcaagggtgacacag

SEQ ID NO: 4007142 - DNA, 25 bp, Homo sapien
caacaggaagcttgagcttcatgtc

SEQ ID NO: 4007143 - DNA, 25 bp, Homo sapien
acagactgttgttgggatattcttc

SEQ ID NO: 4007144 - DNA, 25 bp, Homo sapien
ggcaatgagtctaggagccactgtt

SEQ ID NO: 4007145 - DNA, 25 bp, Homo sapien
gggagacttgctaagatgttcatag

SEQ ID NO: 4007146 - DNA, 25 bp, Homo sapien
tgccctgagcacatgcgacattctt

SEQ ID NO: 4007147 - DNA, 25 bp, Homo sapien
ccggaggcctgctgggcagcgttgg

SEQ ID NO: 4007148 - DNA, 25 bp, Homo sapien
actccggaggcctgctgggcagcgt

SEQ ID NO: 4007149 - DNA, 25 bp, Homo sapien
gaggcctgctgggcagcgttggtag

SEQ ID NO: 4007150 - DNA, 25 bp, Homo sapien
cactccggaggcctgctgggcagcg

SEQ ID NO: 4007151 - DNA, 25 bp, Homo sapien
tgtgaatcaggaacactgcgaagct

SEQ ID NO: 4007152 - DNA, 25 bp, Homo sapien
gtgtgaatcaggaacactgcgaagc

SEQ ID NO: 4007153 - DNA, 25 bp, Homo sapien
ggtgtgaatcaggaacactgcgaag

SEQ ID NO: 4007154 - DNA, 25 bp, Homo sapien
gacagccacgctggaggtacacagg

SEQ ID NO: 4007155 - DNA, 25 bp, Homo sapien
gggcctcaggcgttccctgttggat

SEQ ID NO: 4007156 - DNA, 25 bp, Homo sapien
ggtgagccacacagtaggatgaatg

SEQ ID NO: 4007157 - DNA, 25 bp, Homo sapien
tttccaaagagcgacagccacgctg

SEQ ID NO: 4007158 - DNA, 25 bp, Homo sapien
cgcatgcgtggattttcggaattac

SEQ ID NO: 4007159 - DNA, 25 bp, Homo sapien
tttaaaaggttcatcctaatgtggc

SEQ ID NO: 4007160 - DNA, 25 bp, Homo sapien
ttctacaccccgataggaggagtct

SEQ ID NO: 4007161 - DNA, 25 bp, Homo sapien
tggtagctataaactgtccaggaac

SEQ ID NO: 4007162 - DNA, 25 bp, Homo sapien
ttccaggctcccagggatggcagct

SEQ ID NO: 4007163 - DNA, 25 bp, Homo sapien
ctggttccaggctcccagggatggc

SEQ ID NO: 4007164 - DNA, 25 bp, Homo sapien
tggttccaggctcccagggatggca

SEQ ID NO: 4007165 - DNA, 25 bp, Homo sapien
ccaggctcccagggatggcagctac

SEQ ID NO: 4007166 - DNA, 25 bp, Homo sapien
gcggcaggttcaggctctgtctggt

SEQ ID NO: 4007167 - DNA, 25 bp, Homo sapien
cggcaggttcaggctctgtctggtt

SEQ ID NO: 4007168 - DNA, 25 bp, Homo sapien
cccctgccccgcgcagggctcagca

SEQ ID NO: 4007169 - DNA, 25 bp, Homo sapien
ccgcgcagggctcagcaggcgcggc

SEQ ID NO: 4007170 - DNA, 25 bp, Homo sapien
cgcagggctcagcaggcgcggccat

SEQ ID NO: 4007171 - DNA, 25 bp, Homo sapien
ccctgccccgcgcagggctcagcag

SEQ ID NO: 4007172 - DNA, 25 bp, Homo sapien
ggtcccagcgtctgtctgtcgctaa

SEQ ID NO: 4007173 - DNA, 25 bp, Homo sapien
gtcccagcgtctgtctgtcgctaag

SEQ ID NO: 4007174 - DNA, 25 bp, Homo sapien
ccttctgtcgtcgtgggtcccagcg

SEQ ID NO: 4007175 - DNA, 25 bp, Homo sapien
cggcgccttctgtcgtcgtgggtcc

SEQ ID NO: 4007176 - DNA, 25 bp, Homo sapien
ccttctgggtgtcagttcagctgcc

SEQ ID NO: 4007177 - DNA, 25 bp, Homo sapien
taattcagtggctcctctgtttggt

SEQ ID NO: 4007178 - DNA, 25 bp, Homo sapien
aaatccatacagcagtgccattggc

SEQ ID NO: 4007179 - DNA, 25 bp, Homo sapien
gccagcatgggttcagcagctggta

SEQ ID NO: 4007180 - DNA, 25 bp, Homo sapien
gaagtagttaaagctgtcatccata

SEQ ID NO: 4007181 - DNA, 25 bp, Homo sapien
cacagaatgttcttactgaggcgtt

SEQ ID NO: 4007182 - DNA, 25 bp, Homo sapien
aagaagcgtgctgcgattgtacaga

SEQ ID NO: 4007183 - DNA, 25 bp, Homo sapien
aattcatgcaagtaacgcaggtgac

SEQ ID NO: 4007184 - DNA, 25 bp, Homo sapien
tctgtgaaggccgttgatagctgca

SEQ ID NO: 4007185 - DNA, 25 bp, Homo sapien
tgagaatgtaagaaactgtgccctg

SEQ ID NO: 4007186 - DNA, 25 bp, Homo sapien
caagaaccacttacctttgcttggg

SEQ ID NO: 4007187 - DNA, 25 bp, Homo sapien
cagacaactcatccgggctcaggga

SEQ ID NO: 4007188 - DNA, 25 bp, Homo sapien
actgtggcatcctgcacccatcctc

SEQ ID NO: 4007189 - DNA, 25 bp, Homo sapien
tcacccctccgtagagcccctcgtg

SEQ ID NO: 4007190 - DNA, 25 bp, Homo sapien
tagagcccctcgtgcaatgcaatga

SEQ ID NO: 4007191 - DNA, 25 bp, Homo sapien
tccgtagagcccctcgtgcaatgca

SEQ ID NO: 4007192 - DNA, 25 bp, Homo sapien
tttacagtggagaacacggacagac

SEQ ID NO: 4007193 - DNA, 25 bp, Homo sapien
gagagaatgcgtgcctgatacagag

SEQ ID NO: 4007194 - DNA, 25 bp, Homo sapien
tatagctattccatcgtcaaggagg

SEQ ID NO: 4007195 - DNA, 25 bp, Homo sapien
caaagtcaacttcaatagcggcaag

SEQ ID NO: 4007196 - DNA, 25 bp, Homo sapien
tgaacactcagcagcgtatgagcgg

SEQ ID NO: 4007197 - DNA, 25 bp, Homo sapien
gcggttgaactacggcctctgggat

SEQ ID NO: 4007198 - DNA, 25 bp, Homo sapien
tatagaagtacgaagtcccactcag

SEQ ID NO: 4007199 - DNA, 25 bp, Homo sapien
tgatatagttcacggtggtcccagg

SEQ ID NO: 4007200 - DNA, 25 bp, Homo sapien
tcggccgactctacagtgcgacggg

SEQ ID NO: 4007201 - DNA, 25 bp, Homo sapien
agattgcgggagaaggatccacgcc

SEQ ID NO: 4007202 - DNA, 25 bp, Homo sapien
tccatgccgcgggagaaggatcaga

SEQ ID NO: 4007203 - DNA, 25 bp, Homo sapien
gtgaaaaatacctcgtgcgcctcgg

SEQ ID NO: 4007204 - DNA, 25 bp, Homo sapien
gccatgcgcgcgctgccctaacgat

SEQ ID NO: 4007205 - DNA, 25 bp, Homo sapien
cacagcgctgtgagtagcgggccca

SEQ ID NO: 4007206 - DNA, 25 bp, Homo sapien
tgccgcgtcaactgctcgggccgcg

SEQ ID NO: 4007207 - DNA, 25 bp, Homo sapien
cgggcccagcggcacccgggagagg

SEQ ID NO: 4007208 - DNA, 25 bp, Homo sapien
caggcttgctaaacattgggtgggt

SEQ ID NO: 4007209 - DNA, 25 bp, Homo sapien
gagtcttgggaccagtctgatgcct

SEQ ID NO: 4007210 - DNA, 25 bp, Homo sapien
tgtaacgtttctgggtcactcccgc

SEQ ID NO: 4007211 - DNA, 25 bp, Homo sapien
tggaactatgaggtgcccaggaccc

SEQ ID NO: 4007212 - DNA, 25 bp, Homo sapien
caaataaggtccacacactgcaatt

SEQ ID NO: 4007213 - DNA, 25 bp, Homo sapien
taatagtttgaattaagagccaaat

SEQ ID NO: 4007214 - DNA, 25 bp, Homo sapien
cacacactgcaattagttgatgtct

SEQ ID NO: 4007215 - DNA, 25 bp, Homo sapien
cagcgcgcccagacaaaaatgtgta

SEQ ID NO: 4007216 - DNA, 25 bp, Homo sapien
aatgaagaattctacctggctgtga

SEQ ID NO: 4007217 - DNA, 25 bp, Homo sapien
gcaaagcagtggaactggagaaaga

SEQ ID NO: 4007218 - DNA, 25 bp, Homo sapien
tgtgaacaccactgtgcttggacca

SEQ ID NO: 4007219 - DNA, 25 bp, Homo sapien
aaagaatgaagaattctacctggct

SEQ ID NO: 4007220 - DNA, 25 bp, Homo sapien
ctcttggccttaggtgatctgcttg

SEQ ID NO: 4007221 - DNA, 25 bp, Homo sapien
tcttggccttaggtgatctgcttgc

SEQ ID NO: 4007222 - DNA, 25 bp, Homo sapien
gcttgcctcggcctcccgaagtgct

SEQ ID NO: 4007223 - DNA, 25 bp, Homo sapien
actcttggccttaggtgatctgctt

SEQ ID NO: 4007224 - DNA, 25 bp, Homo sapien
agtatgtcgtctaagttgctagtgc

SEQ ID NO: 4007225 - DNA, 25 bp, Homo sapien
cccgagtagcctggactggtgcccg

SEQ ID NO: 4007226 - DNA, 25 bp, Homo sapien
tgctagtgcttttctgagattgtag

SEQ ID NO: 4007227 - DNA, 25 bp, Homo sapien
ttattagctgtgtgtcaggagggta

SEQ ID NO: 4007228 - DNA, 25 bp, Homo sapien
agtgcctggccgtcttggaggtctt

SEQ ID NO: 4007229 - DNA, 25 bp, Homo sapien
agtgggaccaccctgttgggttcag

SEQ ID NO: 4007230 - DNA, 25 bp, Homo sapien
ccgtcttggaggtcttgtttctctg

SEQ ID NO: 4007231 - DNA, 25 bp, Homo sapien
ccctgttgggttcagaacaggagat

SEQ ID NO: 4007232 - DNA, 25 bp, Homo sapien
agctcaggcaccgtggcagcagtgt

SEQ ID NO: 4007233 - DNA, 25 bp, Homo sapien
catgggagcctgtgagtgcggcggg

SEQ ID NO: 4007234 - DNA, 25 bp, Homo sapien
ggcctccgggccaagggaacagcat

SEQ ID NO: 4007235 - DNA, 25 bp, Homo sapien
tcttctaggtgaggagtatgtcgcc

SEQ ID NO: 4007236 - DNA, 25 bp, Homo sapien
tgggcaatggcgtgtccaggcacaa

SEQ ID NO: 4007237 - DNA, 25 bp, Homo sapien
gcagctttgacgtggtctccccagt

SEQ ID NO: 4007238 - DNA, 25 bp, Homo sapien
tgctccaggtggactctggtgccag

SEQ ID NO: 4007239 - DNA, 25 bp, Homo sapien
cggaacagctcaccgtgctgctggg

SEQ ID NO: 4007240 - DNA, 25 bp, Homo sapien
gcaggcatgtgactggtgctgcggc

SEQ ID NO: 4007241 - DNA, 25 bp, Homo sapien
tggtgctggatgagaccaccacatc

SEQ ID NO: 4007242 - DNA, 25 bp, Homo sapien
ccacgggcagcgcaggcatgtgact

SEQ ID NO: 4007243 - DNA, 25 bp, Homo sapien
gaccaccacatccacgggcagcgca

SEQ ID NO: 4007244 - DNA, 25 bp, Homo sapien
acatctatagcaagtgaagaggccg

SEQ ID NO: 4007245 - DNA, 25 bp, Homo sapien
agcaagtgaagaggccgagttagtc

SEQ ID NO: 4007246 - DNA, 25 bp, Homo sapien
gaagaggccgagttagtcccttaga

SEQ ID NO: 4007247 - DNA, 25 bp, Homo sapien
tctatagcaagtgaagaggccgagt

SEQ ID NO: 4007248 - DNA, 25 bp, Homo sapien
caccccttaggaatgcacacgtggg

SEQ ID NO: 4007249 - DNA, 25 bp, Homo sapien
cattcatacggaaacgggaggccgc

SEQ ID NO: 4007250 - DNA, 25 bp, Homo sapien
gttacatgcaaactaaccccagcag

SEQ ID NO: 4007251 - DNA, 25 bp, Homo sapien
ggctcagagccttcacgatagaatt

SEQ ID NO: 4007252 - DNA, 25 bp, Homo sapien
gaatcccacggtgatatctgaggga

SEQ ID NO: 4007253 - DNA, 25 bp, Homo sapien
tggctcaagacaactttgcttcttt

SEQ ID NO: 4007254 - DNA, 25 bp, Homo sapien
gctttataccaagaaagacaacacc

SEQ ID NO: 4007255 - DNA, 25 bp, Homo sapien
ttttttgtagcagtggaatcccacg

SEQ ID NO: 4007256 - DNA, 25 bp, Homo sapien
aggctagtctcaaaacccgacctca

SEQ ID NO: 4007257 - DNA, 25 bp, Homo sapien
ctagtctcaaaacccgacctcaaat

SEQ ID NO: 4007258 - DNA, 25 bp, Homo sapien
ggccaggctagtctcaaaacccgac

SEQ ID NO: 4007259 - DNA, 25 bp, Homo sapien
caggctagtctcaaaacccgacctc

SEQ ID NO: 4007260 - DNA, 25 bp, Homo sapien
ttcagcatggttgagtgacactccg

SEQ ID NO: 4007261 - DNA, 25 bp, Homo sapien
cagcatggttgagtgacactccgtc

SEQ ID NO: 4007262 - DNA, 25 bp, Homo sapien
tgcacttcagcatggttgagtgaca

SEQ ID NO: 4007263 - DNA, 25 bp, Homo sapien
catggttgagtgacactccgtctca

SEQ ID NO: 4007264 - DNA, 25 bp, Homo sapien
attttgagatagagtctcgctctgt

SEQ ID NO: 4007265 - DNA, 25 bp, Homo sapien
tttgggttcaagcaattctcctgcc

SEQ ID NO: 4007266 - DNA, 25 bp, Homo sapien
ttttgagatagagtctcgctctgtc

SEQ ID NO: 4007267 - DNA, 25 bp, Homo sapien
tctcagctcactgccttttgggttc

SEQ ID NO: 4007268 - DNA, 25 bp, Homo sapien
tcccagtttgaagcaattctgcctt

SEQ ID NO: 4007269 - DNA, 25 bp, Homo sapien
aaacgattcttatccctcagcctct

SEQ ID NO: 4007270 - DNA, 25 bp, Homo sapien
ctgacatcatgatccgcacaactcg

SEQ ID NO: 4007271 - DNA, 25 bp, Homo sapien
tgtgtgccaccacattcggccaatt

SEQ ID NO: 4007272 - DNA, 25 bp, Homo sapien
ttatcttgctgcagaagagatggga

SEQ ID NO: 4007273 - DNA, 25 bp, Homo sapien
cgctttcattggcagaccctcaatc

SEQ ID NO: 4007274 - DNA, 25 bp, Homo sapien
tcttctgggtctcaaccagagccag

SEQ ID NO: 4007275 - DNA, 25 bp, Homo sapien
gctttcattggcagaccctcaatcc

SEQ ID NO: 4007276 - DNA, 25 bp, Homo sapien
tattctgatgcatgactcttctggg

SEQ ID NO: 4007277 - DNA, 25 bp, Homo sapien
caagtggtgtgagggcaacacagca

SEQ ID NO: 4007278 - DNA, 25 bp, Homo sapien
accatgaatcaagtggtgtgagggc

SEQ ID NO: 4007279 - DNA, 25 bp, Homo sapien
tgaatcaagtggtgtgagggcaaca

SEQ ID NO: 4007280 - DNA, 25 bp, Homo sapien
aatcaagtggtgtgagggcaacaca

SEQ ID NO: 4007281 - DNA, 25 bp, Homo sapien
cgtttcctttttctgccctcaatct

SEQ ID NO: 4007282 - DNA, 25 bp, Homo sapien
ccctcaatctctgtgaactgaacct

SEQ ID NO: 4007283 - DNA, 25 bp, Homo sapien
caacaccagggtggatggtttgccg

SEQ ID NO: 4007284 - DNA, 25 bp, Homo sapien
ttaaagtcagtcaacaccagggtgg

SEQ ID NO: 4007285 - DNA, 25 bp, Homo sapien
ggcagaggactactacagatgcaaa

SEQ ID NO: 4007286 - DNA, 25 bp, Homo sapien
cggcgggcagaggactactacagat

SEQ ID NO: 4007287 - DNA, 25 bp, Homo sapien
gcgggcagaggactactacagatgc

SEQ ID NO: 4007288 - DNA, 25 bp, Homo sapien
cgggcagaggactactacagatgca

SEQ ID NO: 4007289 - DNA, 25 bp, Homo sapien
cccatccctgttggtaaccgtgttg

SEQ ID NO: 4007290 - DNA, 25 bp, Homo sapien
aagcatcacagtcccatccctgttg

SEQ ID NO: 4007291 - DNA, 25 bp, Homo sapien
taagtgtcagaggttccgtatttgt

SEQ ID NO: 4007292 - DNA, 25 bp, Homo sapien
aaggctgcctacaagcatcacagtc

SEQ ID NO: 4007293 - DNA, 25 bp, Homo sapien
aagggtgatattatgacactgacac

SEQ ID NO: 4007294 - DNA, 25 bp, Homo sapien
gaggatagacatagacactcctgtg

SEQ ID NO: 4007295 - DNA, 25 bp, Homo sapien
gaaaggtgcaaaaatctatcaccag

SEQ ID NO: 4007296 - DNA, 25 bp, Homo sapien
tggtggcggtaattttgtccatcaa

SEQ ID NO: 4007297 - DNA, 25 bp, Homo sapien
tgattgacgcactgccaggagtagc

SEQ ID NO: 4007298 - DNA, 25 bp, Homo sapien
tctgattgacgcactgccaggagta

SEQ ID NO: 4007299 - DNA, 25 bp, Homo sapien
aggacgctctgattgacgcactgcc

SEQ ID NO: 4007300 - DNA, 25 bp, Homo sapien
cgctctgattgacgcactgccagga

SEQ ID NO: 4007301 - DNA, 25 bp, Homo sapien
ggagggattgagcaccccgcgcaca

SEQ ID NO: 4007302 - DNA, 25 bp, Homo sapien
acaccatccaatccggaggccatgg

SEQ ID NO: 4007303 - DNA, 25 bp, Homo sapien
tgctccggagggattgagcaccccg

SEQ ID NO: 4007304 - DNA, 25 bp, Homo sapien
ccagatgctccggagggattgagca

SEQ ID NO: 4007305 - DNA, 25 bp, Homo sapien
gaccagcaaactagggcctgtgggc

SEQ ID NO: 4007306 - DNA, 25 bp, Homo sapien
agattcatctatgacagggaccagc

SEQ ID NO: 4007307 - DNA, 25 bp, Homo sapien
ttatgcaaaggcctaagagctcagc

SEQ ID NO: 4007308 - DNA, 25 bp, Homo sapien
ttggaacacagcaacgctcacttgt

SEQ ID NO: 4007309 - DNA, 25 bp, Homo sapien
ggcaagcataaccagaattttacag

SEQ ID NO: 4007310 - DNA, 25 bp, Homo sapien
aaaagtctacagttgaggctgggcc

SEQ ID NO: 4007311 - DNA, 25 bp, Homo sapien
tgggctataccatcgacaagggaaa

SEQ ID NO: 4007312 - DNA, 25 bp, Homo sapien
cagtctgaactctaaccaatgggct

SEQ ID NO: 4007313 - DNA, 25 bp, Homo sapien
cagatttcgggacgaagagtataaa

SEQ ID NO: 4007314 - DNA, 25 bp, Homo sapien
tttaccaaatacaacgtagatagct

SEQ ID NO: 4007315 - DNA, 25 bp, Homo sapien
gagttactgcgctgaaaatgtgacc

SEQ ID NO: 4007316 - DNA, 25 bp, Homo sapien
gatagctcaaaacatggagttactg

SEQ ID NO: 4007317 - DNA, 25 bp, Homo sapien
ttccattctcgagggatgccggcgg

SEQ ID NO: 4007318 - DNA, 25 bp, Homo sapien
tctgaacagcgttcactaagcagcc

SEQ ID NO: 4007319 - DNA, 25 bp, Homo sapien
cgaggacgctgcgagtcctgcgcat

SEQ ID NO: 4007320 - DNA, 25 bp, Homo sapien
cgcctccttggcgaatggcctgttc

SEQ ID NO: 4007321 - DNA, 25 bp, Homo sapien
gtcagcgctgccagcgtggaaggag

SEQ ID NO: 4007322 - DNA, 25 bp, Homo sapien
gctcccgcttccgaggcaactgttt

SEQ ID NO: 4007323 - DNA, 25 bp, Homo sapien
gcaactgtttcccagtcgcgagctg

SEQ ID NO: 4007324 - DNA, 25 bp, Homo sapien
agtagagcccgggaccgccaggcca

SEQ ID NO: 4007325 - DNA, 25 bp, Homo sapien
ctcagccatggacgcgtccctggag

SEQ ID NO: 4007326 - DNA, 25 bp, Homo sapien
tctgttatgtaaacgtgcagacctg

SEQ ID NO: 4007327 - DNA, 25 bp, Homo sapien
ctatgtgagcagttgtaaatgatcc

SEQ ID NO: 4007328 - DNA, 25 bp, Homo sapien
taacagagccattttctcgtcacga

SEQ ID NO: 4007329 - DNA, 25 bp, Homo sapien
tacagggccttagatggaataaacg

SEQ ID NO: 4007330 - DNA, 25 bp, Homo sapien
cctgttaggcaaggttgaaatgacc

SEQ ID NO: 4007331 - DNA, 25 bp, Homo sapien
tatagcagcatcaatggaacattcc

SEQ ID NO: 4007332 - DNA, 25 bp, Homo sapien
aaatgaccagtttccgtgtatggct

SEQ ID NO: 4007333 - DNA, 25 bp, Homo sapien
gaggcaactttgaccctgtttctga

SEQ ID NO: 4007334 - DNA, 25 bp, Homo sapien
tattaatcgaaggtgagctgtggtc

SEQ ID NO: 4007335 - DNA, 25 bp, Homo sapien
gctctatgcgacctctgccccactg

SEQ ID NO: 4007336 - DNA, 25 bp, Homo sapien
tttttattaatcgaaggtgagctgt

SEQ ID NO: 4007337 - DNA, 25 bp, Homo sapien
taatttttattaatcgaaggtgagc

SEQ ID NO: 4007338 - DNA, 25 bp, Homo sapien
aacacagtgagactcctatctctat

SEQ ID NO: 4007339 - DNA, 25 bp, Homo sapien
acacagtgagactcctatctctata

SEQ ID NO: 4007340 - DNA, 25 bp, Homo sapien
caacacagtgagactcctatctcta

SEQ ID NO: 4007341 - DNA, 25 bp, Homo sapien
cacagtgagactcctatctctataa

SEQ ID NO: 4007342 - DNA, 25 bp, Homo sapien
cgcacaccgccacgtccagctaata

SEQ ID NO: 4007343 - DNA, 25 bp, Homo sapien
tcttgacattgggtgatctgccctg

SEQ ID NO: 4007344 - DNA, 25 bp, Homo sapien
acaccgccacgtccagctaatattt

SEQ ID NO: 4007345 - DNA, 25 bp, Homo sapien
aaactcttgacattgggtgatctgc

SEQ ID NO: 4007346 - DNA, 25 bp, Homo sapien
gcgggtgcttccaaaggatcccttg

SEQ ID NO: 4007347 - DNA, 25 bp, Homo sapien
gctgaaagcaggactgttagttcac

SEQ ID NO: 4007348 - DNA, 25 bp, Homo sapien
tccaatgcaaactctggtgtatcca

SEQ ID NO: 4007349 - DNA, 25 bp, Homo sapien
aacaaggcacaaagggcgggtgctt

SEQ ID NO: 4007350 - DNA, 25 bp, Homo sapien
taatagagcgtcaggttcacggtga

SEQ ID NO: 4007351 - DNA, 25 bp, Homo sapien
tcatccagctgcgtcttgggagcca

SEQ ID NO: 4007352 - DNA, 25 bp, Homo sapien
tcttcatagttgagcgtcgactcca

SEQ ID NO: 4007353 - DNA, 25 bp, Homo sapien
tatggtcgttcttgtagcggatgcc

SEQ ID NO: 4007354 - DNA, 25 bp, Homo sapien
tggggtcggcccctgtgcgccagaa

SEQ ID NO: 4007355 - DNA, 25 bp, Homo sapien
gggtcggcccctgtgcgccagaaag

SEQ ID NO: 4007356 - DNA, 25 bp, Homo sapien
tagacgtggggtcggcccctgtgcg

SEQ ID NO: 4007357 - DNA, 25 bp, Homo sapien
caggtagacgtggggtcggcccctg

SEQ ID NO: 4007358 - DNA, 25 bp, Homo sapien
cagtcgcggccggaccccgcggcaa

SEQ ID NO: 4007359 - DNA, 25 bp, Homo sapien
cttgcagcagcacgcagtcgcggcc

SEQ ID NO: 4007360 - DNA, 25 bp, Homo sapien
agcagcacgcagtcgcggccggacc

SEQ ID NO: 4007361 - DNA, 25 bp, Homo sapien
cggaccccgcggcaaggccagagac

SEQ ID NO: 4007362 - DNA, 25 bp, Homo sapien
gggaccccagctgcaggcaacgcac

SEQ ID NO: 4007363 - DNA, 25 bp, Homo sapien
ggggaccccagctgcaggcaacgca

SEQ ID NO: 4007364 - DNA, 25 bp, Homo sapien
ctggggaccccagctgcaggcaacg

SEQ ID NO: 4007365 - DNA, 25 bp, Homo sapien
tggggaccccagctgcaggcaacgc

SEQ ID NO: 4007366 - DNA, 25 bp, Homo sapien
aagggcacaaagtccggcgccacgg

SEQ ID NO: 4007367 - DNA, 25 bp, Homo sapien
cagcttcagccagcgcgctcagcgg

SEQ ID NO: 4007368 - DNA, 25 bp, Homo sapien
acagccgattggcagccacgtccag

SEQ ID NO: 4007369 - DNA, 25 bp, Homo sapien
ccgggagtcacccacagccgattgg

SEQ ID NO: 4007370 - DNA, 25 bp, Homo sapien
gcgggcccagctgctcgacagcagt

SEQ ID NO: 4007371 - DNA, 25 bp, Homo sapien
agctgctcgacagcagtcccggcag

SEQ ID NO: 4007372 - DNA, 25 bp, Homo sapien
ggcggcgggcccagctgctcgacag

SEQ ID NO: 4007373 - DNA, 25 bp, Homo sapien
cagctgctcgacagcagtcccggca

SEQ ID NO: 4007374 - DNA, 25 bp, Homo sapien
cgccaggcgcgggcaagggcgcgag

SEQ ID NO: 4007375 - DNA, 25 bp, Homo sapien
cgggccgccaggcgcgggcaagggc

SEQ ID NO: 4007376 - DNA, 25 bp, Homo sapien
ccgccaggcgcgggcaagggcgcga

SEQ ID NO: 4007377 - DNA, 25 bp, Homo sapien
ggccgccaggcgcgggcaagggcgc

SEQ ID NO: 4007378 - DNA, 25 bp, Homo sapien
tgatgaagaaagtggtagctgcccc

SEQ ID NO: 4007379 - DNA, 25 bp, Homo sapien
gctattttggcattgcccacagcta

SEQ ID NO: 4007380 - DNA, 25 bp, Homo sapien
aacaaacacgtgagggtctatggca

SEQ ID NO: 4007381 - DNA, 25 bp, Homo sapien
ccagtagaagcttatgaagacgctg

SEQ ID NO: 4007382 - DNA, 25 bp, Homo sapien
tacaacctcatgagtcaaaagtgat

SEQ ID NO: 4007383 - DNA, 25 bp, Homo sapien
catctatttggtagactgagtttta

SEQ ID NO: 4007384 - DNA, 25 bp, Homo sapien
cattataactggtgtgtcatactta

SEQ ID NO: 4007385 - DNA, 25 bp, Homo sapien
catggagctaggcaccgtggtgcac

SEQ ID NO: 4007386 - DNA, 25 bp, Homo sapien
ggtgagcatcctccagttagttcag

SEQ ID NO: 4007387 - DNA, 25 bp, Homo sapien
tgaagcaacgctagttgaatgaggg

SEQ ID NO: 4007388 - DNA, 25 bp, Homo sapien
tagtgattgcgctctgacaagttgc

SEQ ID NO: 4007389 - DNA, 25 bp, Homo sapien
cagtgggcaagatatggtgagcatc

SEQ ID NO: 4007390 - DNA, 25 bp, Homo sapien
tacttagtgtctactgcaagccagg

SEQ ID NO: 4007391 - DNA, 25 bp, Homo sapien
catggtgcttctagcccaactggga

SEQ ID NO: 4007392 - DNA, 25 bp, Homo sapien
ccaactgggaggactacatcgagat

SEQ ID NO: 4007393 - DNA, 25 bp, Homo sapien
tcctctgaaacgtgaaatgaattac

SEQ ID NO: 4007394 - DNA, 25 bp, Homo sapien
ggtggattggtggcttatagggtag

SEQ ID NO: 4007395 - DNA, 25 bp, Homo sapien
gtggattggtggcttatagggtagg

SEQ ID NO: 4007396 - DNA, 25 bp, Homo sapien
tggattggtggcttatagggtaggg

SEQ ID NO: 4007397 - DNA, 25 bp, Homo sapien
gctaccaagtcttagtcatacagaa

SEQ ID NO: 4007398 - DNA, 25 bp, Homo sapien
cactaaaatgctcacgacccagttg

SEQ ID NO: 4007399 - DNA, 25 bp, Homo sapien
tatatcctcttataaggcacttgga

SEQ ID NO: 4007400 - DNA, 25 bp, Homo sapien
caaggacttggaggctaaacatgaa

SEQ ID NO: 4007401 - DNA, 25 bp, Homo sapien
tataaacacgatgaccctgccttgg

SEQ ID NO: 4007402 - DNA, 25 bp, Homo sapien
tcgtattgaaccagccactgtggcc

SEQ ID NO: 4007403 - DNA, 25 bp, Homo sapien
cacgaagggctctttgggtcacaga

SEQ ID NO: 4007404 - DNA, 25 bp, Homo sapien
tgaatctggcaacattggctctggg

SEQ ID NO: 4007405 - DNA, 25 bp, Homo sapien
gatcaagcatgcctgtcaactggtg

SEQ ID NO: 4007406 - DNA, 25 bp, Homo sapien
aatgaaagactccttggccacagca

SEQ ID NO: 4007407 - DNA, 25 bp, Homo sapien
tgctcagagctaccttcgaagtggg

SEQ ID NO: 4007408 - DNA, 25 bp, Homo sapien
tcttgctcagctaataatggccagg

SEQ ID NO: 4007409 - DNA, 25 bp, Homo sapien
actagtcctgtttgtgagggttcca

SEQ ID NO: 4007410 - DNA, 25 bp, Homo sapien
gtcgggcccgttcctcatagatagt

SEQ ID NO: 4007411 - DNA, 25 bp, Homo sapien
catagatagtgccttgcatgtggcc

SEQ ID NO: 4007412 - DNA, 25 bp, Homo sapien
tgccaggagattccatgtcgggccc

SEQ ID NO: 4007413 - DNA, 25 bp, Homo sapien
aatgaaaagtcactttgtgcctcag

SEQ ID NO: 4007414 - DNA, 25 bp, Homo sapien
tcatttgcatgaagtgggagaaaga

SEQ ID NO: 4007415 - DNA, 25 bp, Homo sapien
acagattgttccctaggcataacta

SEQ ID NO: 4007416 - DNA, 25 bp, Homo sapien
tcctgaagtgaatccaacagattgt

SEQ ID NO: 4007417 - DNA, 25 bp, Homo sapien
tgggcattaacacccaagaccctag

SEQ ID NO: 4007418 - DNA, 25 bp, Homo sapien
tcacgttactagaaccagaagtgtc

SEQ ID NO: 4007419 - DNA, 25 bp, Homo sapien
catagcagtcttggcactcacctca

SEQ ID NO: 4007420 - DNA, 25 bp, Homo sapien
tccttgcttattgggcgtgcgcccc

SEQ ID NO: 4007421 - DNA, 25 bp, Homo sapien
taagtcctggtacatccatgctggg

SEQ ID NO: 4007422 - DNA, 25 bp, Homo sapien
gaggcactcgtgtgacgcgctgaat

SEQ ID NO: 4007423 - DNA, 25 bp, Homo sapien
tcagtaatacgagtcagtgccctgg

SEQ ID NO: 4007424 - DNA, 25 bp, Homo sapien
agaagtcacctgaattggccgggca

SEQ ID NO: 4007425 - DNA, 25 bp, Homo sapien
caaatatgtgcctgaaaggtaggct

SEQ ID NO: 4007426 - DNA, 25 bp, Homo sapien
ggaccggagagcttaagatgagact

SEQ ID NO: 4007427 - DNA, 25 bp, Homo sapien
gaaccacgtttgctgtcctactacg

SEQ ID NO: 4007428 - DNA, 25 bp, Homo sapien
tgaccactcacaggtagaaggaccg

SEQ ID NO: 4007429 - DNA, 25 bp, Homo sapien
aataagagcatcagaagccctcccc

SEQ ID NO: 4007430 - DNA, 25 bp, Homo sapien
aagttgcaatatacagtgggactgc

SEQ ID NO: 4007431 - DNA, 25 bp, Homo sapien
taagagcttgctcttccgtgtgcta

SEQ ID NO: 4007432 - DNA, 25 bp, Homo sapien
tctgaaaacctgatagatgctaccc

SEQ ID NO: 4007433 - DNA, 25 bp, Homo sapien
gcctgggcccaactcagaaacagga

SEQ ID NO: 4007434 - DNA, 25 bp, Homo sapien
agagcactctctcacgctgatccag

SEQ ID NO: 4007435 - DNA, 25 bp, Homo sapien
ttaagtcagtagaagctcgctggca

SEQ ID NO: 4007436 - DNA, 25 bp, Homo sapien
ttgtcgtaagtaatggcccctgtgc

SEQ ID NO: 4007437 - DNA, 25 bp, Homo sapien
ttttggtgcagatgattaaacagtc

SEQ ID NO: 4007438 - DNA, 25 bp, Homo sapien
ttaaacagtcttccctatttggtgc

SEQ ID NO: 4007439 - DNA, 25 bp, Homo sapien
tctggactgtagtattggaagcctt

SEQ ID NO: 4007440 - DNA, 25 bp, Homo sapien
tatttggtgcaatgaagtatagcag

SEQ ID NO: 4007441 - DNA, 25 bp, Homo sapien
tccagatctggattcgtgccagccc

SEQ ID NO: 4007442 - DNA, 25 bp, Homo sapien
cagatgtaggatccagatctggatt

SEQ ID NO: 4007443 - DNA, 25 bp, Homo sapien
ctaagacccaacagatgtaggatcc

SEQ ID NO: 4007444 - DNA, 25 bp, Homo sapien
ggattcgtgccagccccaccaatgg

SEQ ID NO: 4007445 - DNA, 25 bp, Homo sapien
ctggagaagagatcttttcccacaa

SEQ ID NO: 4007446 - DNA, 25 bp, Homo sapien
gagaagagatcttttcccacaagcc

SEQ ID NO: 4007447 - DNA, 25 bp, Homo sapien
tggagaagagatcttttcccacaag

SEQ ID NO: 4007448 - DNA, 25 bp, Homo sapien
ggagaagagatcttttcccacaagc

SEQ ID NO: 4007449 - DNA, 25 bp, Homo sapien
cagccagaggcgaagtggaaagatt

SEQ ID NO: 4007450 - DNA, 25 bp, Homo sapien
tggctcagccagaggcgaagtggaa

SEQ ID NO: 4007451 - DNA, 25 bp, Homo sapien
ggctcagccagaggcgaagtggaaa

SEQ ID NO: 4007452 - DNA, 25 bp, Homo sapien
ctcagccagaggcgaagtggaaaga

SEQ ID NO: 4007453 - DNA, 25 bp, Homo sapien
gcttgtcatcttggtgcaaccagaa

SEQ ID NO: 4007454 - DNA, 25 bp, Homo sapien
caggagtacggtcctatacgaagtt

SEQ ID NO: 4007455 - DNA, 25 bp, Homo sapien
aaatggtgtccaggagtacggtcct

SEQ ID NO: 4007456 - DNA, 25 bp, Homo sapien
ggtgcaaccagaaatccacatgtgg

SEQ ID NO: 4007457 - DNA, 25 bp, Homo sapien
tacgtgtccagtaagcctcagagct

SEQ ID NO: 4007458 - DNA, 25 bp, Homo sapien
tgacccggtccaaaagaatgcatag

SEQ ID NO: 4007459 - DNA, 25 bp, Homo sapien
gcaaattgctcttcagtgacccggt

SEQ ID NO: 4007460 - DNA, 25 bp, Homo sapien
caaacccaggcgcttctgactaaag

SEQ ID NO: 4007461 - DNA, 25 bp, Homo sapien
ctcccacaccttttaggcagagaac

SEQ ID NO: 4007462 - DNA, 25 bp, Homo sapien
tggagctgatgacctaaagatgttc

SEQ ID NO: 4007463 - DNA, 25 bp, Homo sapien
ccacaccttttaggcagagaactgg

SEQ ID NO: 4007464 - DNA, 25 bp, Homo sapien
gctgatgacctaaagatgttcatta

SEQ ID NO: 4007465 - DNA, 25 bp, Homo sapien
ggtccctgataatgtacggctataa

SEQ ID NO: 4007466 - DNA, 25 bp, Homo sapien
ggccttgacatttgatgcctttttt

SEQ ID NO: 4007467 - DNA, 25 bp, Homo sapien
gaagctgacagcataaacttttcta

SEQ ID NO: 4007468 - DNA, 25 bp, Homo sapien
atatgtatgtgctggtccctgataa

SEQ ID NO: 4007469 - DNA, 25 bp, Homo sapien
atctctgcagtcttaatgttgacag

SEQ ID NO: 4007470 - DNA, 25 bp, Homo sapien
taaagttcgcgcagcacgaagctgc

SEQ ID NO: 4007471 - DNA, 25 bp, Homo sapien
ctccggaccccgatcttgaaaggat

SEQ ID NO: 4007472 - DNA, 25 bp, Homo sapien
tgaaaggatgctctgtaaatctctg

SEQ ID NO: 4007473 - DNA, 25 bp, Homo sapien
cagcagaagccctcggaaatagagc

SEQ ID NO: 4007474 - DNA, 25 bp, Homo sapien
catgatgccttttccgcgggagtcc

SEQ ID NO: 4007475 - DNA, 25 bp, Homo sapien
caagtatcaccgctacagcagaagc

SEQ ID NO: 4007476 - DNA, 25 bp, Homo sapien
gaaatagagccgattccatgatgcc

SEQ ID NO: 4007477 - DNA, 25 bp, Homo sapien
catatattactggaaagtggttttc

SEQ ID NO: 4007478 - DNA, 25 bp, Homo sapien
gccatatattactggaaagtggttt

SEQ ID NO: 4007479 - DNA, 25 bp, Homo sapien
tgccatatattactggaaagtggtt

SEQ ID NO: 4007480 - DNA, 25 bp, Homo sapien
aatgccatatattactggaaagtgg

SEQ ID NO: 4007481 - DNA, 25 bp, Homo sapien
tgtgcaccctgtctgccacacgggt

SEQ ID NO: 4007482 - DNA, 25 bp, Homo sapien
tgcaccctgtctgccacacgggtgg

SEQ ID NO: 4007483 - DNA, 25 bp, Homo sapien
caccctgtctgccacacgggtggca

SEQ ID NO: 4007484 - DNA, 25 bp, Homo sapien
accctgtctgccacacgggtggcag

SEQ ID NO: 4007485 - DNA, 25 bp, Homo sapien
cacacataatgtcactaagtgaatg

SEQ ID NO: 4007486 - DNA, 25 bp, Homo sapien
tgtcatcttcttgcctgtcaaattc

SEQ ID NO: 4007487 - DNA, 25 bp, Homo sapien
gtcacacataatgtcactaagtgaa

SEQ ID NO: 4007488 - DNA, 25 bp, Homo sapien
ctgtcacacataatgtcactaagtg

SEQ ID NO: 4007489 - DNA, 25 bp, Homo sapien
tgagtgagtttttgtgacaactgcc

SEQ ID NO: 4007490 - DNA, 25 bp, Homo sapien
atgagtgagtttttgtgacaactgc

SEQ ID NO: 4007491 - DNA, 25 bp, Homo sapien
cgtgccaccgcaaaagaaagtatcg

SEQ ID NO: 4007492 - DNA, 25 bp, Homo sapien
ttaggagtcacactgcgcattgcac

SEQ ID NO: 4007493 - DNA, 25 bp, Homo sapien
tcaagtgggcgaattcacgctcggc

SEQ ID NO: 4007494 - DNA, 25 bp, Homo sapien
gaacacaaatgtgatgccgcctcca

SEQ ID NO: 4007495 - DNA, 25 bp, Homo sapien
agtggtggcatcctgtgttccccta

SEQ ID NO: 4007496 - DNA, 25 bp, Homo sapien
tgcccacgtcgtgccaggttctgtt

SEQ ID NO: 4007497 - DNA, 25 bp, Homo sapien
ttcactcaaccactgctgacgcagt

SEQ ID NO: 4007498 - DNA, 25 bp, Homo sapien
tgtatgcgacggttccaagatctca

SEQ ID NO: 4007499 - DNA, 25 bp, Homo sapien
cacattgagcgtggtcagaaaagga

SEQ ID NO: 4007500 - DNA, 25 bp, Homo sapien
tccacattgagcgtggtcagaaaag

SEQ ID NO: 4007501 - DNA, 25 bp, Homo sapien
ccacattgagcgtggtcagaaaagg

SEQ ID NO: 4007502 - DNA, 25 bp, Homo sapien
ttccacattgagcgtggtcagaaaa

SEQ ID NO: 4007503 - DNA, 25 bp, Homo sapien
tgtgcctcaggaccacaatgtgaca

SEQ ID NO: 4007504 - DNA, 25 bp, Homo sapien
tgcctcaggaccacaatgtgacaag

SEQ ID NO: 4007505 - DNA, 25 bp, Homo sapien
ctgtgtgcctcaggaccacaatgtg

SEQ ID NO: 4007506 - DNA, 25 bp, Homo sapien
cctcaggaccacaatgtgacaagta

SEQ ID NO: 4007507 - DNA, 25 bp, Homo sapien
actgcaagctctctttgctgaacat

SEQ ID NO: 4007508 - DNA, 25 bp, Homo sapien
tgctgaacatacagaaggccctggg

SEQ ID NO: 4007509 - DNA, 25 bp, Homo sapien
tcctttggggaggtcactgcaagct

SEQ ID NO: 4007510 - DNA, 25 bp, Homo sapien
ggtcccacttgttgaacagactgac

SEQ ID NO: 4007511 - DNA, 25 bp, Homo sapien
gtatagtggtacaatttcaactcac

SEQ ID NO: 4007512 - DNA, 25 bp, Homo sapien
agtatagtggtacaatttcaactca

SEQ ID NO: 4007513 - DNA, 25 bp, Homo sapien
ctggagtatagtggtacaatttcaa

SEQ ID NO: 4007514 - DNA, 25 bp, Homo sapien
ggagtatagtggtacaatttcaact

SEQ ID NO: 4007515 - DNA, 25 bp, Homo sapien
ttcttctgtttataaacttccatta

SEQ ID NO: 4007516 - DNA, 25 bp, Homo sapien
tcttctgtttataaacttccattaa

SEQ ID NO: 4007517 - DNA, 25 bp, Homo sapien
ccctcaaggggaagacgcgagccga

SEQ ID NO: 4007518 - DNA, 25 bp, Homo sapien
cctcaaggggaagacgcgagccgac

SEQ ID NO: 4007519 - DNA, 25 bp, Homo sapien
actcgccgcccctcgacgagcagcg

SEQ ID NO: 4007520 - DNA, 25 bp, Homo sapien
ctcgccgcccctcgacgagcagcgg

SEQ ID NO: 4007521 - DNA, 25 bp, Homo sapien
cactcgccgcccctcgacgagcagc

SEQ ID NO: 4007522 - DNA, 25 bp, Homo sapien
gccgcccctcgacgagcagcggcat

SEQ ID NO: 4007523 - DNA, 25 bp, Homo sapien
ggaggcggcggccccccgctttgca

SEQ ID NO: 4007524 - DNA, 25 bp, Homo sapien
ggaggcggccgcccaggcaggccca

SEQ ID NO: 4007525 - DNA, 25 bp, Homo sapien
cgcggaggcggccgcccaggcaggc

SEQ ID NO: 4007526 - DNA, 25 bp, Homo sapien
gcggcggccccccgctttgcagccc

SEQ ID NO: 4007527 - DNA, 25 bp, Homo sapien
gaagatggtgttcccatcgccaggt

SEQ ID NO: 4007528 - DNA, 25 bp, Homo sapien
taagtcccaactaggaagctcggag

SEQ ID NO: 4007529 - DNA, 25 bp, Homo sapien
cagggtgatcaatgaccagcaggct

SEQ ID NO: 4007530 - DNA, 25 bp, Homo sapien
tagtagaacgaagactgaacctagc

SEQ ID NO: 4007531 - DNA, 25 bp, Homo sapien
caggttatcaatctcctaggctgag

SEQ ID NO: 4007532 - DNA, 25 bp, Homo sapien
taaatgagccagataacaagcagga

SEQ ID NO: 4007533 - DNA, 25 bp, Homo sapien
tttgaaaggccgaaggaggactcac

SEQ ID NO: 4007534 - DNA, 25 bp, Homo sapien
caaattttggtctacaggcaatgag

SEQ ID NO: 4007535 - DNA, 25 bp, Homo sapien
tcagtcgaacctggaagtgccacag

SEQ ID NO: 4007536 - DNA, 25 bp, Homo sapien
tgactcgatctaatggccaccaagg

SEQ ID NO: 4007537 - DNA, 25 bp, Homo sapien
tatacaagtgcatacaaagccctgg

SEQ ID NO: 4007538 - DNA, 25 bp, Homo sapien
tgttgtgagcaaaaccgtacaccaa

SEQ ID NO: 4007539 - DNA, 25 bp, Homo sapien
tcagaggggactgggttgcatgtac

SEQ ID NO: 4007540 - DNA, 25 bp, Homo sapien
tggtgtgatcccaatcacggtatca

SEQ ID NO: 4007541 - DNA, 25 bp, Homo sapien
cacggtatcattctggggcacttcg

SEQ ID NO: 4007542 - DNA, 25 bp, Homo sapien
cgtgtcaaaggagcttggtgtgatc

SEQ ID NO: 4007543 - DNA, 25 bp, Homo sapien
cttgaaggacttcggaaatgcgtgt

SEQ ID NO: 4007544 - DNA, 25 bp, Homo sapien
taaataggatcaatgaatttctttg

SEQ ID NO: 4007545 - DNA, 25 bp, Homo sapien
gataaataggatcaatgaatttctt

SEQ ID NO: 4007546 - DNA, 25 bp, Homo sapien
acctgataaataggatcaatgaatt

SEQ ID NO: 4007547 - DNA, 25 bp, Homo sapien
cctgataaataggatcaatgaattt

SEQ ID NO: 4007548 - DNA, 25 bp, Homo sapien
gtgtagcagaagacgagctggtact

SEQ ID NO: 4007549 - DNA, 25 bp, Homo sapien
gatggtgtagcagaagacgagctgg

SEQ ID NO: 4007550 - DNA, 25 bp, Homo sapien
gtagcagaagacgagctggtactta

SEQ ID NO: 4007551 - DNA, 25 bp, Homo sapien
tggtgtagcagaagacgagctggta

SEQ ID NO: 4007552 - DNA, 25 bp, Homo sapien
ttttcctaatcctttactatcactg

SEQ ID NO: 4007553 - DNA, 25 bp, Homo sapien
aagagaggacaccttgaaccagacg

SEQ ID NO: 4007554 - DNA, 25 bp, Homo sapien
atgccttttcctaatcctttactat

SEQ ID NO: 4007555 - DNA, 25 bp, Homo sapien
agagaggacaccttgaaccagacgc

SEQ ID NO: 4007556 - DNA, 25 bp, Homo sapien
tgattgcagcaaaaaagttaaccac

SEQ ID NO: 4007557 - DNA, 25 bp, Homo sapien
ggatttagctggctcatcactatcc

SEQ ID NO: 4007558 - DNA, 25 bp, Homo sapien
ggcaggcaaatcttcaggggattta

SEQ ID NO: 4007559 - DNA, 25 bp, Homo sapien
tgtgattgcagcaaaaaagttaacc

SEQ ID NO: 4007560 - DNA, 25 bp, Homo sapien
gaatgcctttgttcccgaatcctgg

SEQ ID NO: 4007561 - DNA, 25 bp, Homo sapien
tatgtgcagccagttaaccaaaaga

SEQ ID NO: 4007562 - DNA, 25 bp, Homo sapien
ggagagcaacatcgcagaatgcctt

SEQ ID NO: 4007563 - DNA, 25 bp, Homo sapien
ttcaggtttccgctcaaaagctgct

SEQ ID NO: 4007564 - DNA, 25 bp, Homo sapien
tccaatataatttccagcagcctgc

SEQ ID NO: 4007565 - DNA, 25 bp, Homo sapien
tttagctcttgccaaaaagcttcca

SEQ ID NO: 4007566 - DNA, 25 bp, Homo sapien
taagaggaataaatttagctcttgc

SEQ ID NO: 4007567 - DNA, 25 bp, Homo sapien
tcttgccaaaaagcttccaatataa

SEQ ID NO: 4007568 - DNA, 25 bp, Homo sapien
tgggtcctgcaattttttccagaga

SEQ ID NO: 4007569 - DNA, 25 bp, Homo sapien
tgttccaaaaatgcctctgcgaatc

SEQ ID NO: 4007570 - DNA, 25 bp, Homo sapien
agagatgttccaaaaatgcctctgc

SEQ ID NO: 4007571 - DNA, 25 bp, Homo sapien
ttgggtcctgcaattttttccagag

SEQ ID NO: 4007572 - DNA, 25 bp, Homo sapien
gatcctttgttttgccgttatcaac

SEQ ID NO: 4007573 - DNA, 25 bp, Homo sapien
gatgtttatcaggtcgcgatataga

SEQ ID NO: 4007574 - DNA, 25 bp, Homo sapien
catgggtgggcaacaggagtttgtc

SEQ ID NO: 4007575 - DNA, 25 bp, Homo sapien
gagtttgtcaaagatgtttatcagg

SEQ ID NO: 4007576 - DNA, 25 bp, Homo sapien
tactaacactggcacaacaatggtg

SEQ ID NO: 4007577 - DNA, 25 bp, Homo sapien
tcttcagcatccatgtaaagggcag

SEQ ID NO: 4007578 - DNA, 25 bp, Homo sapien
tatacagacgctaacagaaaaggga

SEQ ID NO: 4007579 - DNA, 25 bp, Homo sapien
aacaatggtgccaggcaaagaccct

SEQ ID NO: 4007580 - DNA, 25 bp, Homo sapien
ataaacagtagctactgtgatttac

SEQ ID NO: 4007581 - DNA, 25 bp, Homo sapien
caccatctggtcgagccgttcagga

SEQ ID NO: 4007582 - DNA, 25 bp, Homo sapien
gacatccttcatgtaggacaaaacc

SEQ ID NO: 4007583 - DNA, 25 bp, Homo sapien
ccaggcgctcggctacaggatgcac

SEQ ID NO: 4007584 - DNA, 25 bp, Homo sapien
aaaccaaagacatcaggatgtccag

SEQ ID NO: 4007585 - DNA, 25 bp, Homo sapien
cttcaataccctgccgggatgcatt

SEQ ID NO: 4007586 - DNA, 25 bp, Homo sapien
acaatccttccgtggaatctgtccc

SEQ ID NO: 4007587 - DNA, 25 bp, Homo sapien
aatccttccgtggaatctgtcccac

SEQ ID NO: 4007588 - DNA, 25 bp, Homo sapien
atcttcaataccctgccgggatgca

SEQ ID NO: 4007589 - DNA, 25 bp, Homo sapien
ccattaatggcaacaccaagattca

SEQ ID NO: 4007590 - DNA, 25 bp, Homo sapien
acctggccaagatggaactactctt

SEQ ID NO: 4007591 - DNA, 25 bp, Homo sapien
tcattcccactgcaccttagtgcgg

SEQ ID NO: 4007592 - DNA, 25 bp, Homo sapien
cacttccgtaagaatcccttcctga

SEQ ID NO: 4007593 - DNA, 25 bp, Homo sapien
aaaatatacactaatccttagtaag

SEQ ID NO: 4007594 - DNA, 25 bp, Homo sapien
gaatttcatgcctcaaggttggaaa

SEQ ID NO: 4007595 - DNA, 25 bp, Homo sapien
ccttagtaagttatgaacgtaacat

SEQ ID NO: 4007596 - DNA, 25 bp, Homo sapien
agaatttcatgcctcaaggttggaa

SEQ ID NO: 4007597 - DNA, 25 bp, Homo sapien
caacagagaataaacgtttcacagt

SEQ ID NO: 4007598 - DNA, 25 bp, Homo sapien
aacatttcaacagagaataaacgtt

SEQ ID NO: 4007599 - DNA, 25 bp, Homo sapien
cgtttcacagttatgtaagcaaaac

SEQ ID NO: 4007600 - DNA, 25 bp, Homo sapien
taaacgtttcacagttatgtaagca

SEQ ID NO: 4007601 - DNA, 25 bp, Homo sapien
tccaccagtattggcatgagaaacc

SEQ ID NO: 4007602 - DNA, 25 bp, Homo sapien
tttccaccagtattggcatgagaaa

SEQ ID NO: 4007603 - DNA, 25 bp, Homo sapien
ttccaccagtattggcatgagaaac

SEQ ID NO: 4007604 - DNA, 25 bp, Homo sapien
caccagtattggcatgagaaaccac

SEQ ID NO: 4007605 - DNA, 25 bp, Homo sapien
aatccatgttaactttactttctag

SEQ ID NO: 4007606 - DNA, 25 bp, Homo sapien
taaatcaatccatgttaactttact

SEQ ID NO: 4007607 - DNA, 25 bp, Homo sapien
tgatagacataggaggcaaacagga

SEQ ID NO: 4007608 - DNA, 25 bp, Homo sapien
atattgatagacataggaggcaaac

SEQ ID NO: 4007609 - DNA, 25 bp, Homo sapien
cttgctattatttgcaaggctctgt

SEQ ID NO: 4007610 - DNA, 25 bp, Homo sapien
tcttgctattatttgcaaggctctg

SEQ ID NO: 4007611 - DNA, 25 bp, Homo sapien
atatcttgctattatttgcaaggct

SEQ ID NO: 4007612 - DNA, 25 bp, Homo sapien
tatcttgctattatttgcaaggctc

SEQ ID NO: 4007613 - DNA, 25 bp, Homo sapien
cagaatctgaaacatctacatcgcc

SEQ ID NO: 4007614 - DNA, 25 bp, Homo sapien
gaatctgaaacatctacatcgcctt

SEQ ID NO: 4007615 - DNA, 25 bp, Homo sapien
tcagaatctgaaacatctacatcgc

SEQ ID NO: 4007616 - DNA, 25 bp, Homo sapien
tctgaaacatctacatcgccttcct

SEQ ID NO: 4007617 - DNA, 25 bp, Homo sapien
aaaagaaaatatgttattctgtcat

SEQ ID NO: 4007618 - DNA, 25 bp, Homo sapien
gaaaaagaaaatatgttattctgtc

SEQ ID NO: 4007619 - DNA, 25 bp, Homo sapien
gaaaatatgttattctgtcattgat

SEQ ID NO: 4007620 - DNA, 25 bp, Homo sapien
aagaaaatatgttattctgtcattg

SEQ ID NO: 4007621 - DNA, 25 bp, Homo sapien
gaagcaatcatgctgagacacggtc

SEQ ID NO: 4007622 - DNA, 25 bp, Homo sapien
gatacaagattaccaagaaaagcca

SEQ ID NO: 4007623 - DNA, 25 bp, Homo sapien
tgtttgacttctattcaaccaaggc

SEQ ID NO: 4007624 - DNA, 25 bp, Homo sapien
aaatactcttccactactgtttgac

SEQ ID NO: 4007625 - DNA, 25 bp, Homo sapien
tctagcagccagttgatgatctggt

SEQ ID NO: 4007626 - DNA, 25 bp, Homo sapien
gaagaacggaattctagcagccagt

SEQ ID NO: 4007627 - DNA, 25 bp, Homo sapien
gcagccagttgatgatctggtcatc

SEQ ID NO: 4007628 - DNA, 25 bp, Homo sapien
cggaattctagcagccagttgatga

SEQ ID NO: 4007629 - DNA, 25 bp, Homo sapien
cagctggttcttcaacaactcaaag

SEQ ID NO: 4007630 - DNA, 25 bp, Homo sapien
tatgtctggatctaacagctggttc

SEQ ID NO: 4007631 - DNA, 25 bp, Homo sapien
acaactcaaagtcatttgtttcacc

SEQ ID NO: 4007632 - DNA, 25 bp, Homo sapien
ctttatgtctggatctaacagctgg

SEQ ID NO: 4007633 - DNA, 25 bp, Homo sapien
ctggtatcttaattaatcttgctat

SEQ ID NO: 4007634 - DNA, 25 bp, Homo sapien
tctattggtctttagtataacagca

SEQ ID NO: 4007635 - DNA, 25 bp, Homo sapien
gacggcatcatgctattattaaata

SEQ ID NO: 4007636 - DNA, 25 bp, Homo sapien
tattactctaattttgcactgacgg

SEQ ID NO: 4007637 - DNA, 25 bp, Homo sapien
attctctaatgcacgcatatttgaa

SEQ ID NO: 4007638 - DNA, 25 bp, Homo sapien
gatttttgtcttcattcaagtggaa

SEQ ID NO: 4007639 - DNA, 25 bp, Homo sapien
cctagatttttgtcttcattcaagt

SEQ ID NO: 4007640 - DNA, 25 bp, Homo sapien
ccggcctagatttttgtcttcattc

SEQ ID NO: 4007641 - DNA, 25 bp, Homo sapien
tagatttttgtcttcattcaagtgg

SEQ ID NO: 4007642 - DNA, 25 bp, Homo sapien
catctcccggcaaacgcgtgtgaag

SEQ ID NO: 4007643 - DNA, 25 bp, Homo sapien
cccggcaaacgcgtgtgaagcagcg

SEQ ID NO: 4007644 - DNA, 25 bp, Homo sapien
tctcccggcaaacgcgtgtgaagca

SEQ ID NO: 4007645 - DNA, 25 bp, Homo sapien
cgcatctcccggcaaacgcgtgtga

SEQ ID NO: 4007646 - DNA, 25 bp, Homo sapien
ccgaactaacgcgaccgctgcgcct

SEQ ID NO: 4007647 - DNA, 25 bp, Homo sapien
tgggccgaactaacgcgaccgctgc

SEQ ID NO: 4007648 - DNA, 25 bp, Homo sapien
gaactaacgcgaccgctgcgcctca

SEQ ID NO: 4007649 - DNA, 25 bp, Homo sapien
gggccgaactaacgcgaccgctgcg

SEQ ID NO: 4007650 - DNA, 25 bp, Homo sapien
tcttcgttagtttcttcagattatc

SEQ ID NO: 4007651 - DNA, 25 bp, Homo sapien
tcgttagtttcttcagattatcatc

SEQ ID NO: 4007652 - DNA, 25 bp, Homo sapien
attcttcgttagtttcttcagatta

SEQ ID NO: 4007653 - DNA, 25 bp, Homo sapien
cttcgttagtttcttcagattatca

SEQ ID NO: 4007654 - DNA, 25 bp, Homo sapien
gggagtgagcagacacacttgggag

SEQ ID NO: 4007655 - DNA, 25 bp, Homo sapien
gaaggggagtgagcagacacacttg

SEQ ID NO: 4007656 - DNA, 25 bp, Homo sapien
tggaaggggagtgagcagacacact

SEQ ID NO: 4007657 - DNA, 25 bp, Homo sapien
aggggagtgagcagacacacttggg

SEQ ID NO: 4007658 - DNA, 25 bp, Homo sapien
gtcttgagattatcatccgctgagg

SEQ ID NO: 4007659 - DNA, 25 bp, Homo sapien
tgagattatcatccgctgagggtgg

SEQ ID NO: 4007660 - DNA, 25 bp, Homo sapien
gtgtcttgagattatcatccgctga

SEQ ID NO: 4007661 - DNA, 25 bp, Homo sapien
agattatcatccgctgagggtggag

SEQ ID NO: 4007662 - DNA, 25 bp, Homo sapien
aggggagtgagcagacacactcggg

SEQ ID NO: 4007663 - DNA, 25 bp, Homo sapien
gaaggggagtgagcagacacactcg

SEQ ID NO: 4007664 - DNA, 25 bp, Homo sapien
gggagtgagcagacacactcgggag

SEQ ID NO: 4007665 - DNA, 25 bp, Homo sapien
tggaaggggagtgagcagacacact

SEQ ID NO: 4007666 - DNA, 25 bp, Homo sapien
tgagattatcatccgctgagggtgg

SEQ ID NO: 4007667 - DNA, 25 bp, Homo sapien
gtcttgagattatcatccgctgagg

SEQ ID NO: 4007668 - DNA, 25 bp, Homo sapien
gtgtcttgagattatcatccgctga

SEQ ID NO: 4007669 - DNA, 25 bp, Homo sapien
agattatcatccgctgagggtggag

SEQ ID NO: 4007670 - DNA, 25 bp, Homo sapien
cactcggaggtgtcttgagattatc

SEQ ID NO: 4007671 - DNA, 25 bp, Homo sapien
ggatagagcagacactccgcaggtg

SEQ ID NO: 4007672 - DNA, 25 bp, Homo sapien
gggatagagcagacactccgcaggt

SEQ ID NO: 4007673 - DNA, 25 bp, Homo sapien
aaggggatagagcagacactccgca

SEQ ID NO: 4007674 - DNA, 25 bp, Homo sapien
gcagggcaatcctgaagaatgacga

SEQ ID NO: 4007675 - DNA, 25 bp, Homo sapien
gtagggccagcagggcaatcctgaa

SEQ ID NO: 4007676 - DNA, 25 bp, Homo sapien
tttcagctgtgaggtagggccagca

SEQ ID NO: 4007677 - DNA, 25 bp, Homo sapien
gtttcagctgtgaggtagggccagc

SEQ ID NO: 4007678 - DNA, 25 bp, Homo sapien
tctgttgctggtgatagatttttgc

SEQ ID NO: 4007679 - DNA, 25 bp, Homo sapien
atggacaaaattaccgccaccaaca

SEQ ID NO: 4007680 - DNA, 25 bp, Homo sapien
tgctggtgatagatttttgcacctt

SEQ ID NO: 4007681 - DNA, 25 bp, Homo sapien
tggacaaaattaccgccaccaacac

SEQ ID NO: 4007682 - DNA, 25 bp, Homo sapien
ttcactcccaggtaataccaaattg

SEQ ID NO: 4007683 - DNA, 25 bp, Homo sapien
tcactcccaggtaataccaaattgt

SEQ ID NO: 4007684 - DNA, 25 bp, Homo sapien
cactcccaggtaataccaaattgta

SEQ ID NO: 4007685 - DNA, 25 bp, Homo sapien
ctcccaggtaataccaaattgtaag

SEQ ID NO: 4007686 - DNA, 25 bp, Homo sapien
atttggaattgtccctgtgggtaat

SEQ ID NO: 4007687 - DNA, 25 bp, Homo sapien
ttgtccctgtgggtaataagttaca

SEQ ID NO: 4007688 - DNA, 25 bp, Homo sapien
ggtaataagttacattcactcttca

SEQ ID NO: 4007689 - DNA, 25 bp, Homo sapien
cctgtgggtaataagttacattcac

SEQ ID NO: 4007690 - DNA, 25 bp, Homo sapien
ccggttgcaaagaggctttcttgca

SEQ ID NO: 4007691 - DNA, 25 bp, Homo sapien
caaagaggctttcttgcagaagggg

SEQ ID NO: 4007692 - DNA, 25 bp, Homo sapien
aagaggctttcttgcagaaggggtg

SEQ ID NO: 4007693 - DNA, 25 bp, Homo sapien
gaggctttcttgcagaaggggtgat

SEQ ID NO: 4007694 - DNA, 25 bp, Homo sapien
agagagtctaagggccgtggcatca

SEQ ID NO: 4007695 - DNA, 25 bp, Homo sapien
aatgttgagagagtctaagggccgt

SEQ ID NO: 4007696 - DNA, 25 bp, Homo sapien
cagcactgaactatcctgcaactgc

SEQ ID NO: 4007697 - DNA, 25 bp, Homo sapien
ctgcatcagcactgaactatcctgc

SEQ ID NO: 4007698 - DNA, 25 bp, Homo sapien
cgccgcaacgcttgcgcacgttgaa

SEQ ID NO: 4007699 - DNA, 25 bp, Homo sapien
tgcatctgtagtagtcctctgcccg

SEQ ID NO: 4007700 - DNA, 25 bp, Homo sapien
tttgcatctgtagtagtcctctgcc

SEQ ID NO: 4007701 - DNA, 25 bp, Homo sapien
cgcttgcgcacgttgaaacatttcc

SEQ ID NO: 4007702 - DNA, 25 bp, Homo sapien
ttcatcagataaagcaccactttca

SEQ ID NO: 4007703 - DNA, 25 bp, Homo sapien
tgattttaaataatctgccatgttt

SEQ ID NO: 4007704 - DNA, 25 bp, Homo sapien
gataaagcaccactttcaggatgat

SEQ ID NO: 4007705 - DNA, 25 bp, Homo sapien
tatggattacaatcactttcatcag

SEQ ID NO: 4007706 - DNA, 25 bp, Homo sapien
gtaagagtacagtctgagccggtca

SEQ ID NO: 4007707 - DNA, 25 bp, Homo sapien
tcagatggctgtaagagtacagtct

SEQ ID NO: 4007708 - DNA, 25 bp, Homo sapien
tggctgtaagagtacagtctgagcc

SEQ ID NO: 4007709 - DNA, 25 bp, Homo sapien
ctagaaaacgtatttcagatggctg

SEQ ID NO: 4007710 - DNA, 25 bp, Homo sapien
gaatggctggtatgaaccgagtttc

SEQ ID NO: 4007711 - DNA, 25 bp, Homo sapien
ccctagaatggctggtatgaaccga

SEQ ID NO: 4007712 - DNA, 25 bp, Homo sapien
ctagaatggctggtatgaaccgagt

SEQ ID NO: 4007713 - DNA, 25 bp, Homo sapien
cccacccctagaatggctggtatga

SEQ ID NO: 4007714 - DNA, 25 bp, Homo sapien
tttctccgtgctcacgttctttcat

SEQ ID NO: 4007715 - DNA, 25 bp, Homo sapien
tccttttctccgtgctcacgttctt

SEQ ID NO: 4007716 - DNA, 25 bp, Homo sapien
cctctccttttctccgtgctcacgt

SEQ ID NO: 4007717 - DNA, 25 bp, Homo sapien
tctccgtgctcacgttctttcatgc

SEQ ID NO: 4007718 - DNA, 25 bp, Homo sapien
aaatacaaaaattatctgggcatgg

SEQ ID NO: 4007719 - DNA, 25 bp, Homo sapien
tatggtgaaaccccgcctctactaa

SEQ ID NO: 4007720 - DNA, 25 bp, Homo sapien
tgcggatcatgatgtcaggagttct

SEQ ID NO: 4007721 - DNA, 25 bp, Homo sapien
agaccagcttggccaatatggtgaa

SEQ ID NO: 4007722 - DNA, 25 bp, Homo sapien
agtaaagatgtcttccaggacaatt

SEQ ID NO: 4007723 - DNA, 25 bp, Homo sapien
tagctcgaaccttggtttccacctg

SEQ ID NO: 4007724 - DNA, 25 bp, Homo sapien
cttttgttgtcaccttcatcttacg

SEQ ID NO: 4007725 - DNA, 25 bp, Homo sapien
cacctgtctccataaagtaaagatg

SEQ ID NO: 4007726 - DNA, 25 bp, Homo sapien
ctttgtgtgcatacaaatggacttc

SEQ ID NO: 4007727 - DNA, 25 bp, Homo sapien
ttgtgtgcatacaaatggacttcag

SEQ ID NO: 4007728 - DNA, 25 bp, Homo sapien
tgtgtgcatacaaatggacttcagc

SEQ ID NO: 4007729 - DNA, 25 bp, Homo sapien
ttctttgtgtgcatacaaatggact

SEQ ID NO: 4007730 - DNA, 25 bp, Homo sapien
tatggggactccaacagaaccatac

SEQ ID NO: 4007731 - DNA, 25 bp, Homo sapien
cactatggggactccaacagaacca

SEQ ID NO: 4007732 - DNA, 25 bp, Homo sapien
cacactatggggactccaacagaac

SEQ ID NO: 4007733 - DNA, 25 bp, Homo sapien
ccacactatggggactccaacagaa

SEQ ID NO: 4007734 - DNA, 25 bp, Homo sapien
tgtccattttgagacgggaagatag

SEQ ID NO: 4007735 - DNA, 25 bp, Homo sapien
tccattttgagacgggaagatagtc

SEQ ID NO: 4007736 - DNA, 25 bp, Homo sapien
tttgagacgggaagatagtcttcag

SEQ ID NO: 4007737 - DNA, 25 bp, Homo sapien
ccatcatgtccattttgagacggga

SEQ ID NO: 4007738 - DNA, 25 bp, Homo sapien
ggaaaaagttgtgttgagctgagat

SEQ ID NO: 4007739 - DNA, 25 bp, Homo sapien
gcaggaaaaagttgtgttgagctga

SEQ ID NO: 4007740 - DNA, 25 bp, Homo sapien
cttgaacccagcaggaaaaagttgt

SEQ ID NO: 4007741 - DNA, 25 bp, Homo sapien
gaaaaagttgtgttgagctgagatt

SEQ ID NO: 4007742 - DNA, 25 bp, Homo sapien
ttaggaggtaatggtatagatgact

SEQ ID NO: 4007743 - DNA, 25 bp, Homo sapien
ccctgcttaggaggtaatggtatag

SEQ ID NO: 4007744 - DNA, 25 bp, Homo sapien
taatggtatagatgactagatgaca

SEQ ID NO: 4007745 - DNA, 25 bp, Homo sapien
gatgtccctgcttaggaggtaatgg

SEQ ID NO: 4007746 - DNA, 25 bp, Homo sapien
aagtccagaaacgtgaagtgtttca

SEQ ID NO: 4007747 - DNA, 25 bp, Homo sapien
gaagtccagaaacgtgaagtgtttc

SEQ ID NO: 4007748 - DNA, 25 bp, Homo sapien
agtccagaaacgtgaagtgtttcat

SEQ ID NO: 4007749 - DNA, 25 bp, Homo sapien
tccagaaacgtgaagtgtttcatat

SEQ ID NO: 4007750 - DNA, 25 bp, Homo sapien
atttataacttctcagaaacacagt

SEQ ID NO: 4007751 - DNA, 25 bp, Homo sapien
agagggagatggcaaatttataact

SEQ ID NO: 4007752 - DNA, 25 bp, Homo sapien
acacagtaatgataagtaaccaagg

SEQ ID NO: 4007753 - DNA, 25 bp, Homo sapien
cacagtaatgataagtaaccaagga

SEQ ID NO: 4007754 - DNA, 25 bp, Homo sapien
taaccacatccctcagatatcaccg

SEQ ID NO: 4007755 - DNA, 25 bp, Homo sapien
tccctcagatatcaccgtgggattc

SEQ ID NO: 4007756 - DNA, 25 bp, Homo sapien
cacatccctcagatatcaccgtggg

SEQ ID NO: 4007757 - DNA, 25 bp, Homo sapien
cagatatcaccgtgggattccactg

SEQ ID NO: 4007758 - DNA, 25 bp, Homo sapien
tctaaataatacttctctcttggat

SEQ ID NO: 4007759 - DNA, 25 bp, Homo sapien
ctaaataatacttctctcttggatt

SEQ ID NO: 4007760 - DNA, 25 bp, Homo sapien
aaataatacttctctcttggattat

SEQ ID NO: 4007761 - DNA, 25 bp, Homo sapien
atttataacttctcagaaacacagt

SEQ ID NO: 4007762 - DNA, 25 bp, Homo sapien
cacagtaatgataagtaaccaagga

SEQ ID NO: 4007763 - DNA, 25 bp, Homo sapien
agagggagatggcaaatttataact

SEQ ID NO: 4007764 - DNA, 25 bp, Homo sapien
acacagtaatgataagtaaccaagg

SEQ ID NO: 4007765 - DNA, 25 bp, Homo sapien
tttcactcagaaagaatcatcctta

SEQ ID NO: 4007766 - DNA, 25 bp, Homo sapien
cctgacagtgcactcagcaaatttt

SEQ ID NO: 4007767 - DNA, 25 bp, Homo sapien
tctaaataatacttctctcttggat

SEQ ID NO: 4007768 - DNA, 25 bp, Homo sapien
agtataggtgcctgacagtgcactc

SEQ ID NO: 4007769 - DNA, 25 bp, Homo sapien
gaatccctctaaataatacttctct

SEQ ID NO: 4007770 - DNA, 25 bp, Homo sapien
agcctccgctcagccattcatatcc

SEQ ID NO: 4007771 - DNA, 25 bp, Homo sapien
tccgctcagccattcatatcctaag

SEQ ID NO: 4007772 - DNA, 25 bp, Homo sapien
ctcagccattcatatcctaagcaac

SEQ ID NO: 4007773 - DNA, 25 bp, Homo sapien
cgctcagccattcatatcctaagca

SEQ ID NO: 4007774 - DNA, 25 bp, Homo sapien
acatccatgtagccatccgtccatc

SEQ ID NO: 4007775 - DNA, 25 bp, Homo sapien
aggtcccgatagtaaaccatctcca

SEQ ID NO: 4007776 - DNA, 25 bp, Homo sapien
gaaggtcccgatagtaaaccatctc

SEQ ID NO: 4007777 - DNA, 25 bp, Homo sapien
gcgttccctcgctggagggccagca

SEQ ID NO: 4007778 - DNA, 25 bp, Homo sapien
caactgggcgttccctcgctggagg

SEQ ID NO: 4007779 - DNA, 25 bp, Homo sapien
agcaggtccggccaactgggcgttc

SEQ ID NO: 4007780 - DNA, 25 bp, Homo sapien
ggccaactgggcgttccctcgctgg

SEQ ID NO: 4007781 - DNA, 25 bp, Homo sapien
ctgcaccagggctcgaggtttctct

SEQ ID NO: 4007782 - DNA, 25 bp, Homo sapien
gcaccagggctcgaggtttctctag

SEQ ID NO: 4007783 - DNA, 25 bp, Homo sapien
cagggctcgaggtttctctagggga

SEQ ID NO: 4007784 - DNA, 25 bp, Homo sapien
accagggctcgaggtttctctaggg

SEQ ID NO: 4007785 - DNA, 25 bp, Homo sapien
tagaatcatccagaaacaagtcact

SEQ ID NO: 4007786 - DNA, 25 bp, Homo sapien
tcttagaatcatccagaaacaagtc

SEQ ID NO: 4007787 - DNA, 25 bp, Homo sapien
catccagaaacaagtcactcttcac

SEQ ID NO: 4007788 - DNA, 25 bp, Homo sapien
atcatccagaaacaagtcactcttc

SEQ ID NO: 4007789 - DNA, 25 bp, Homo sapien
gtccaagctgcgccaaggcggcagg

SEQ ID NO: 4007790 - DNA, 25 bp, Homo sapien
tccaagctgcgccaaggcggcagga

SEQ ID NO: 4007791 - DNA, 25 bp, Homo sapien
agtccaagctgcgccaaggcggcag

SEQ ID NO: 4007792 - DNA, 25 bp, Homo sapien
gagtccaagctgcgccaaggcggca

SEQ ID NO: 4007793 - DNA, 25 bp, Homo sapien
ggcagctgtcgatgtccagcacctg

SEQ ID NO: 4007794 - DNA, 25 bp, Homo sapien
tgtccagcacggacgagtccaggca

SEQ ID NO: 4007795 - DNA, 25 bp, Homo sapien
cagcgtggaggcctgagaacgtgag

SEQ ID NO: 4007796 - DNA, 25 bp, Homo sapien
aggagctgtccagcacggacgagtc

SEQ ID NO: 4007797 - DNA, 25 bp, Homo sapien
gaacacttgacagcagactggtgca

SEQ ID NO: 4007798 - DNA, 25 bp, Homo sapien
tgacagaatgtcctagaatgctgga

SEQ ID NO: 4007799 - DNA, 25 bp, Homo sapien
agagcccggtgccatctgacagaat

SEQ ID NO: 4007800 - DNA, 25 bp, Homo sapien
tatgggacatctgcaccgtccgtga

SEQ ID NO: 4007801 - DNA, 25 bp, Homo sapien
tgcagcactggaaagtggcggctct

SEQ ID NO: 4007802 - DNA, 25 bp, Homo sapien
gaatgggaagagttcccacctgctg

SEQ ID NO: 4007803 - DNA, 25 bp, Homo sapien
tcttcacttgctatagacgtactga

SEQ ID NO: 4007804 - DNA, 25 bp, Homo sapien
aattctatcgtgaaggctctgagcc

SEQ ID NO: 4007805 - DNA, 25 bp, Homo sapien
tggccaggtagacgggatagacaac

SEQ ID NO: 4007806 - DNA, 25 bp, Homo sapien
cagcgactgtgtcgacgctcagcgg

SEQ ID NO: 4007807 - DNA, 25 bp, Homo sapien
tggacaccaggccaacagcgactgt

SEQ ID NO: 4007808 - DNA, 25 bp, Homo sapien
gggatagacaaccacgctggacacc

SEQ ID NO: 4007809 - DNA, 25 bp, Homo sapien
tggaggagaggaggccacacaggtg

SEQ ID NO: 4007810 - DNA, 25 bp, Homo sapien
aggagaggaggccacacaggtgagg

SEQ ID NO: 4007811 - DNA, 25 bp, Homo sapien
gtggaggagaggaggccacacaggt

SEQ ID NO: 4007812 - DNA, 25 bp, Homo sapien
ctgtgtggaggagaggaggccacac

SEQ ID NO: 4007813 - DNA, 25 bp, Homo sapien
aacagccccgtaccacacggcgttg

SEQ ID NO: 4007814 - DNA, 25 bp, Homo sapien
cagatgaggagaacgcagcaggtgg

SEQ ID NO: 4007815 - DNA, 25 bp, Homo sapien
accacacggcgttggcgcccaggaa

SEQ ID NO: 4007816 - DNA, 25 bp, Homo sapien
gcggccggtcccatatggagagcca

SEQ ID NO: 4007817 - DNA, 25 bp, Homo sapien
aagccagtcattgaccaggaagaag

SEQ ID NO: 4007818 - DNA, 25 bp, Homo sapien
aaagccagtcattgaccaggaagaa

SEQ ID NO: 4007819 - DNA, 25 bp, Homo sapien
tctccaccgaaagccagtcattgac

SEQ ID NO: 4007820 - DNA, 25 bp, Homo sapien
caccgaaagccagtcattgaccagg

SEQ ID NO: 4007821 - DNA, 25 bp, Homo sapien
tgttgcggtggaaggctctgtcgcc

SEQ ID NO: 4007822 - DNA, 25 bp, Homo sapien
tgccggtggccgctccggctgtcca

SEQ ID NO: 4007823 - DNA, 25 bp, Homo sapien
gctgtccaccccatacagcatgatg

SEQ ID NO: 4007824 - DNA, 25 bp, Homo sapien
tcggatcttccacacgctacccagg

SEQ ID NO: 4007825 - DNA, 25 bp, Homo sapien
gcacacagcacatgtcagcatgacg

SEQ ID NO: 4007826 - DNA, 25 bp, Homo sapien
tgtcttgacgaggatctcgtacttg

SEQ ID NO: 4007827 - DNA, 25 bp, Homo sapien
tgacgatgtagtttacatccgctgt

SEQ ID NO: 4007828 - DNA, 25 bp, Homo sapien
acgaggatctcgtacttgaagcggc

SEQ ID NO: 4007829 - DNA, 25 bp, Homo sapien
caggccctcctcgactctgcagagg

SEQ ID NO: 4007830 - DNA, 25 bp, Homo sapien
ggccctcctcgactctgcagaggct

SEQ ID NO: 4007831 - DNA, 25 bp, Homo sapien
aggccctcctcgactctgcagaggc

SEQ ID NO: 4007832 - DNA, 25 bp, Homo sapien
ccaggccctcctcgactctgcagag

SEQ ID NO: 4007833 - DNA, 25 bp, Homo sapien
gtcctcctcgctgaagtactggcac

SEQ ID NO: 4007834 - DNA, 25 bp, Homo sapien
aagtactggcacagggacgtgtaca

SEQ ID NO: 4007835 - DNA, 25 bp, Homo sapien
tgaggtggcgggtgaggcagacggc

SEQ ID NO: 4007836 - DNA, 25 bp, Homo sapien
ggcagacggcctggcggggcgaggt

SEQ ID NO: 4007837 - DNA, 25 bp, Homo sapien
tctgggcggatcctcctgctagccg

SEQ ID NO: 4007838 - DNA, 25 bp, Homo sapien
ctgggcggatcctcctgctagccga

SEQ ID NO: 4007839 - DNA, 25 bp, Homo sapien
cgtccagcagcgtatagttgagctg

SEQ ID NO: 4007840 - DNA, 25 bp, Homo sapien
ggtgaccacagcaccgacggaggcc

SEQ ID NO: 4007841 - DNA, 25 bp, Homo sapien
cccgggcagcccagtccgagttgtt

SEQ ID NO: 4007842 - DNA, 25 bp, Homo sapien
cagcccagtccgagttgttgggcac

SEQ ID NO: 4007843 - DNA, 25 bp, Homo sapien
ggaaagggattggagtccaccagaa

SEQ ID NO: 4007844 - DNA, 25 bp, Homo sapien
tgagctgcaccacgtcactgaggtt

SEQ ID NO: 4007845 - DNA, 25 bp, Homo sapien
cggtgtagttgctgatatagccaaa

SEQ ID NO: 4007846 - DNA, 25 bp, Homo sapien
tggagacggtgtagttgctgatata

SEQ ID NO: 4007847 - DNA, 25 bp, Homo sapien
taggggatggagaagtggcagccag

SEQ ID NO: 4007848 - DNA, 25 bp, Homo sapien
ggatggagaagtggcagccaggccc

SEQ ID NO: 4007849 - DNA, 25 bp, Homo sapien
gatggagaagtggcagccaggccct

SEQ ID NO: 4007850 - DNA, 25 bp, Homo sapien
ggggatggagaagtggcagccaggc

SEQ ID NO: 4007851 - DNA, 25 bp, Homo sapien
gctccgcgggtccgagcgcttgccc

SEQ ID NO: 4007852 - DNA, 25 bp, Homo sapien
ctcctcgttgagcacgcgggagcgc

SEQ ID NO: 4007853 - DNA, 25 bp, Homo sapien
ggctcctcgttgagcacgcgggagc

SEQ ID NO: 4007854 - DNA, 25 bp, Homo sapien
gctcctcgttgagcacgcgggagcg

SEQ ID NO: 4007855 - DNA, 25 bp, Homo sapien
gggctcctcgttgagcacgcgggag

SEQ ID NO: 4007856 - DNA, 25 bp, Homo sapien
cgcgatggtgactcggctcccagct

SEQ ID NO: 4007857 - DNA, 25 bp, Homo sapien
tccgcgatggtgactcggctcccag

SEQ ID NO: 4007858 - DNA, 25 bp, Homo sapien
gcgatggtgactcggctcccagctc

SEQ ID NO: 4007859 - DNA, 25 bp, Homo sapien
catccgcgatggtgactcggctccc

SEQ ID NO: 4007860 - DNA, 25 bp, Homo sapien
tgagctggccaggtggatgaggtct

SEQ ID NO: 4007861 - DNA, 25 bp, Homo sapien
ctgtggtgcccgcacgtctgagctg

SEQ ID NO: 4007862 - DNA, 25 bp, Homo sapien
gagctggccaggtggatgaggtctc

SEQ ID NO: 4007863 - DNA, 25 bp, Homo sapien
gtgcccgcacgtctgagctggccag

SEQ ID NO: 4007864 - DNA, 25 bp, Homo sapien
cagctcctcggccaagctgcccgtc

SEQ ID NO: 4007865 - DNA, 25 bp, Homo sapien
tcagctcctcggccaagctgcccgt

SEQ ID NO: 4007866 - DNA, 25 bp, Homo sapien
gctcagctcctcggccaagctgccc

SEQ ID NO: 4007867 - DNA, 25 bp, Homo sapien
agctcctcggccaagctgcccgtct

SEQ ID NO: 4007868 - DNA, 25 bp, Homo sapien
tcgtgcttgggctctgccgccacgt

SEQ ID NO: 4007869 - DNA, 25 bp, Homo sapien
tccgtgatgttcttgcgtatctggg

SEQ ID NO: 4007870 - DNA, 25 bp, Homo sapien
cagcgatctgctggatgtcatccac

SEQ ID NO: 4007871 - DNA, 25 bp, Homo sapien
gatgttcttgcgtatctgggctcgg

SEQ ID NO: 4007872 - DNA, 25 bp, Homo sapien
ctgtttcttcatgggcaaaacaggg

SEQ ID NO: 4007873 - DNA, 25 bp, Homo sapien
tgcattgtggaaagcagacgccgga

SEQ ID NO: 4007874 - DNA, 25 bp, Homo sapien
gtggaaagcagacgccggagagggc

SEQ ID NO: 4007875 - DNA, 25 bp, Homo sapien
cattgtggaaagcagacgccggaga

SEQ ID NO: 4007876 - DNA, 25 bp, Homo sapien
ttgtggaaagcagacgccggagagg

SEQ ID NO: 4007877 - DNA, 25 bp, Homo sapien
cggaacgtcggggtgctgcttcagg

SEQ ID NO: 4007878 - DNA, 25 bp, Homo sapien
tgctgggagcggaacgtcggggtgc

SEQ ID NO: 4007879 - DNA, 25 bp, Homo sapien
actgggatttatctctggggcccgg

SEQ ID NO: 4007880 - DNA, 25 bp, Homo sapien
agggtcactgggatttatctctggg

SEQ ID NO: 4007881 - DNA, 25 bp, Homo sapien
agtactcgatgacgtgctggggatc

SEQ ID NO: 4007882 - DNA, 25 bp, Homo sapien
acactagcggtgagcccgtgcagcc

SEQ ID NO: 4007883 - DNA, 25 bp, Homo sapien
cggtgagcccgtgcagccagactgt

SEQ ID NO: 4007884 - DNA, 25 bp, Homo sapien
gggagcacactagcggtgagcccgt

SEQ ID NO: 4007885 - DNA, 25 bp, Homo sapien
gagaggctgcccttgtagacacaga

SEQ ID NO: 4007886 - DNA, 25 bp, Homo sapien
ttgagggcgaccacagcggctccca

SEQ ID NO: 4007887 - DNA, 25 bp, Homo sapien
gcccacctcgaagtgtggcctgaaa

SEQ ID NO: 4007888 - DNA, 25 bp, Homo sapien
ctgttgagggcgaccacagcggctc

SEQ ID NO: 4007889 - DNA, 25 bp, Homo sapien
gcagcagggcgtacaccagcggggc

SEQ ID NO: 4007890 - DNA, 25 bp, Homo sapien
gcgtacaccagcggggcgccagcat

SEQ ID NO: 4007891 - DNA, 25 bp, Homo sapien
cagcggggcgccagcatcctccgcg

SEQ ID NO: 4007892 - DNA, 25 bp, Homo sapien
agggcgtacaccagcggggcgccag

SEQ ID NO: 4007893 - DNA, 25 bp, Homo sapien
gtggtgagggcgtgcacagcgccca

SEQ ID NO: 4007894 - DNA, 25 bp, Homo sapien
cgcccagtgggaagaggcggcaaga

SEQ ID NO: 4007895 - DNA, 25 bp, Homo sapien
cgtgcattcgaagtgcaccttggtg

SEQ ID NO: 4007896 - DNA, 25 bp, Homo sapien
aagaggcggcaagagccccccagcg

SEQ ID NO: 4007897 - DNA, 25 bp, Homo sapien
ccagcaccgtcagcgtgaaggtgta

SEQ ID NO: 4007898 - DNA, 25 bp, Homo sapien
agagcggcccagcaccgtcagcgtg

SEQ ID NO: 4007899 - DNA, 25 bp, Homo sapien
ggcccagcaccgtcagcgtgaaggt

SEQ ID NO: 4007900 - DNA, 25 bp, Homo sapien
gcaccgtcagcgtgaaggtgtatcc

SEQ ID NO: 4007901 - DNA, 25 bp, Homo sapien
tggatgtggtggtctcatccagcac

SEQ ID NO: 4007902 - DNA, 25 bp, Homo sapien
gtcttgttgctgaacgtacgtgcag

SEQ ID NO: 4007903 - DNA, 25 bp, Homo sapien
tgctgaacgtacgtgcagcccaccg

SEQ ID NO: 4007904 - DNA, 25 bp, Homo sapien
tcttgttgctgaacgtacgtgcagc

SEQ ID NO: 4007905 - DNA, 25 bp, Homo sapien
tgttgctgaacgtacgtgcagccca

SEQ ID NO: 4007906 - DNA, 25 bp, Homo sapien
gagccgctgctgcaattgaggcagc

SEQ ID NO: 4007907 - DNA, 25 bp, Homo sapien
ggctcacttcgtacacggcctgtgc

SEQ ID NO: 4007908 - DNA, 25 bp, Homo sapien
tgcggctcacttcgtacacggcctg

SEQ ID NO: 4007909 - DNA, 25 bp, Homo sapien
gctgcggctcacttcgtacacggcc

SEQ ID NO: 4007910 - DNA, 25 bp, Homo sapien
actccaaggacacaatgggcacccg

SEQ ID NO: 4007911 - DNA, 25 bp, Homo sapien
tgggcacccggccactgcggatcag

SEQ ID NO: 4007912 - DNA, 25 bp, Homo sapien
acacacactccaaggacacaatggg

SEQ ID NO: 4007913 - DNA, 25 bp, Homo sapien
ggacacaatgggcacccggccactg

SEQ ID NO: 4007914 - DNA, 25 bp, Homo sapien
caggatactcatccggtttgccacc

SEQ ID NO: 4007915 - DNA, 25 bp, Homo sapien
gatactcatccggtttgccaccttc

SEQ ID NO: 4007916 - DNA, 25 bp, Homo sapien
ggatactcatccggtttgccacctt

SEQ ID NO: 4007917 - DNA, 25 bp, Homo sapien
ccaggatactcatccggtttgccac

SEQ ID NO: 4007918 - DNA, 25 bp, Homo sapien
ctgggcggcggaagggcatacacag

SEQ ID NO: 4007919 - DNA, 25 bp, Homo sapien
tgtgcgttctggtgtactggagcca

SEQ ID NO: 4007920 - DNA, 25 bp, Homo sapien
aagggcatacacagggcagaggaca

SEQ ID NO: 4007921 - DNA, 25 bp, Homo sapien
cgttctggtgtactggagccagctg

SEQ ID NO: 4007922 - DNA, 25 bp, Homo sapien
caatcaggcccgttgaggaaagcag

SEQ ID NO: 4007923 - DNA, 25 bp, Homo sapien
gctgagccgggatggaacctgctcc

SEQ ID NO: 4007924 - DNA, 25 bp, Homo sapien
cactaaaacacggaaaacagtagat

SEQ ID NO: 4007925 - DNA, 25 bp, Homo sapien
gtgtgaggaccgcagttgccacgta

SEQ ID NO: 4007926 - DNA, 25 bp, Homo sapien
gggcccaaagttcagcgcacacccg

SEQ ID NO: 4007927 - DNA, 25 bp, Homo sapien
gcccaaagttcagcgcacacccgcc

SEQ ID NO: 4007928 - DNA, 25 bp, Homo sapien
aagttcagcgcacacccgccagcct

SEQ ID NO: 4007929 - DNA, 25 bp, Homo sapien
caaagttcagcgcacacccgccagc

SEQ ID NO: 4007930 - DNA, 25 bp, Homo sapien
ggtcgtaggactcgctcccatccag

SEQ ID NO: 4007931 - DNA, 25 bp, Homo sapien
tggggtcgtaggactcgctcccatc

SEQ ID NO: 4007932 - DNA, 25 bp, Homo sapien
ggaaactgagcggcgtctggtcgcc

SEQ ID NO: 4007933 - DNA, 25 bp, Homo sapien
tggaaactgagcggcgtctggtcgc

SEQ ID NO: 4007934 - DNA, 25 bp, Homo sapien
ctgaggccggctcacgtccacgccg

SEQ ID NO: 4007935 - DNA, 25 bp, Homo sapien
tgaggccggctcacgtccacgccgg

SEQ ID NO: 4007936 - DNA, 25 bp, Homo sapien
ctcacgtccacgccgggcagggcca

SEQ ID NO: 4007937 - DNA, 25 bp, Homo sapien
acgtccacgccgggcagggccacac

SEQ ID NO: 4007938 - DNA, 25 bp, Homo sapien
tggtgggcccgagccagatgcagtg

SEQ ID NO: 4007939 - DNA, 25 bp, Homo sapien
gcggcgctgggcccacctccacccg

SEQ ID NO: 4007940 - DNA, 25 bp, Homo sapien
ccctgcggcgctgggcccacctcca

SEQ ID NO: 4007941 - DNA, 25 bp, Homo sapien
ctgaaggcctcgccctgcggcgctg

SEQ ID NO: 4007942 - DNA, 25 bp, Homo sapien
ctgcggcgctgggcccacctccacc

SEQ ID NO: 4007943 - DNA, 25 bp, Homo sapien
cgagaagccgatccacacgtctagg

SEQ ID NO: 4007944 - DNA, 25 bp, Homo sapien
gaagccgatccacacgtctaggctc

SEQ ID NO: 4007945 - DNA, 25 bp, Homo sapien
gtcgagaagccgatccacacgtcta

SEQ ID NO: 4007946 - DNA, 25 bp, Homo sapien
agtcgagaagccgatccacacgtct

SEQ ID NO: 4007947 - DNA, 25 bp, Homo sapien
accggcagggatccccgcgcaggcc

SEQ ID NO: 4007948 - DNA, 25 bp, Homo sapien
aggccacctcccgtatggcgtgccc

SEQ ID NO: 4007949 - DNA, 25 bp, Homo sapien
cgggtgtgggatgccagggggctca

SEQ ID NO: 4007950 - DNA, 25 bp, Homo sapien
cccgtatggcgtgcccaggagtgtc

SEQ ID NO: 4007951 - DNA, 25 bp, Homo sapien
gcgggactgtccaccattgccaggg

SEQ ID NO: 4007952 - DNA, 25 bp, Homo sapien
tccaccaccaggcggtagcagtgcc

SEQ ID NO: 4007953 - DNA, 25 bp, Homo sapien
tctccgtgtccgaggggcagagcgg

SEQ ID NO: 4007954 - DNA, 25 bp, Homo sapien
aggaagcgctgcacggcgggactgt

SEQ ID NO: 4007955 - DNA, 25 bp, Homo sapien
gatgctgaggtcgaggctctcgtca

SEQ ID NO: 4007956 - DNA, 25 bp, Homo sapien
caggcagcacatagcgatgcgaggc

SEQ ID NO: 4007957 - DNA, 25 bp, Homo sapien
aaccaccgcggttctggatgctgag

SEQ ID NO: 4007958 - DNA, 25 bp, Homo sapien
agcacggccgtcacgtgatagcgcc

SEQ ID NO: 4007959 - DNA, 25 bp, Homo sapien
ggggaggcagggaagacgtgctgga

SEQ ID NO: 4007960 - DNA, 25 bp, Homo sapien
gaggcagggaagacgtgctggagga

SEQ ID NO: 4007961 - DNA, 25 bp, Homo sapien
agggaagacgtgctggaggagggtg

SEQ ID NO: 4007962 - DNA, 25 bp, Homo sapien
cagggaagacgtgctggaggagggt

SEQ ID NO: 4007963 - DNA, 25 bp, Homo sapien
ggaggcactagagggctgggccgcc

SEQ ID NO: 4007964 - DNA, 25 bp, Homo sapien
gcaggcgaaggaggcactagagggc

SEQ ID NO: 4007965 - DNA, 25 bp, Homo sapien
caggcaggcgaaggaggcactagag

SEQ ID NO: 4007966 - DNA, 25 bp, Homo sapien
cgaaggaggcactagagggctgggc

SEQ ID NO: 4007967 - DNA, 25 bp, Homo sapien
agcagaaggcgctgcaggcctctgg

SEQ ID NO: 4007968 - DNA, 25 bp, Homo sapien
gtcagggaggcaggcgacatactcc

SEQ ID NO: 4007969 - DNA, 25 bp, Homo sapien
cttcgtgggcagctgaaaaggacac

SEQ ID NO: 4007970 - DNA, 25 bp, Homo sapien
acactgctgccacggtgcctgagct

SEQ ID NO: 4007971 - DNA, 25 bp, Homo sapien
gccagggagtcaggcccagcacacg

SEQ ID NO: 4007972 - DNA, 25 bp, Homo sapien
gccagccagggagtcaggcccagca

SEQ ID NO: 4007973 - DNA, 25 bp, Homo sapien
agcacacgtggctgcctcgggctgc

SEQ ID NO: 4007974 - DNA, 25 bp, Homo sapien
caaggggatgccaagcagaggctgg

SEQ ID NO: 4007975 - DNA, 25 bp, Homo sapien
tcctccgcccatcgcggcagccacg

SEQ ID NO: 4007976 - DNA, 25 bp, Homo sapien
cgcccatcgcggcagccacgccagg

SEQ ID NO: 4007977 - DNA, 25 bp, Homo sapien
atcgcggcagccacgccaggccaca

SEQ ID NO: 4007978 - DNA, 25 bp, Homo sapien
gctcctccgcccatcgcggcagcca

SEQ ID NO: 4007979 - DNA, 25 bp, Homo sapien
tattccttcttctaacgtagaaatc

SEQ ID NO: 4007980 - DNA, 25 bp, Homo sapien
tccttcttctaacgtagaaatcttg

SEQ ID NO: 4007981 - DNA, 25 bp, Homo sapien
aacgtagaaatcttgttgttgctta

SEQ ID NO: 4007982 - DNA, 25 bp, Homo sapien
tcttctaacgtagaaatcttgttgt

SEQ ID NO: 4007983 - DNA, 25 bp, Homo sapien
agctctgccagcgccgagaggttcg

SEQ ID NO: 4007984 - DNA, 25 bp, Homo sapien
ggttcgccaggagcccaacgtccag

SEQ ID NO: 4007985 - DNA, 25 bp, Homo sapien
ctgccagcgccgagaggttcgccag

SEQ ID NO: 4007986 - DNA, 25 bp, Homo sapien
aggttcgccaggagcccaacgtcca

SEQ ID NO: 4007987 - DNA, 25 bp, Homo sapien
agggccagagcccttagtaggccag

SEQ ID NO: 4007988 - DNA, 25 bp, Homo sapien
gccagagcccttagtaggccagagg

SEQ ID NO: 4007989 - DNA, 25 bp, Homo sapien
cagagcccttagtaggccagaggcc

SEQ ID NO: 4007990 - DNA, 25 bp, Homo sapien
gagcccttagtaggccagaggccat

SEQ ID NO: 4007991 - DNA, 25 bp, Homo sapien
tgggcccatcccacacattgccagc

SEQ ID NO: 4007992 - DNA, 25 bp, Homo sapien
ccctgggcccatcccacacattgcc

SEQ ID NO: 4007993 - DNA, 25 bp, Homo sapien
ggcccatcccacacattgccagcat

SEQ ID NO: 4007994 - DNA, 25 bp, Homo sapien
ctgggcccatcccacacattgccag

SEQ ID NO: 4007995 - DNA, 25 bp, Homo sapien
acacgccggtaacacagcaccgtgg

SEQ ID NO: 4007996 - DNA, 25 bp, Homo sapien
aacccagagaaacaagacctccaag

SEQ ID NO: 4007997 - DNA, 25 bp, Homo sapien
agacctccaagacggccaggcactg

SEQ ID NO: 4007998 - DNA, 25 bp, Homo sapien
gcactggggcacacgccggtaacac

SEQ ID NO: 4007999 - DNA, 25 bp, Homo sapien
tggctcccggagcttctcgttccat

SEQ ID NO: 4008000 - DNA, 25 bp, Homo sapien
ctgggctgggcgcccagacagatga

SEQ ID NO: 4008001 - DNA, 25 bp, Homo sapien
tgggcgcccagacagatgagacgct

SEQ ID NO: 4008002 - DNA, 25 bp, Homo sapien
ggctgggcgcccagacagatgagac

SEQ ID NO: 4008003 - DNA, 25 bp, Homo sapien
acagggatccccgtggagtcctcac

SEQ ID NO: 4008004 - DNA, 25 bp, Homo sapien
gtacagggatccccgtggagtcctc

SEQ ID NO: 4008005 - DNA, 25 bp, Homo sapien
tacagggatccccgtggagtcctca

SEQ ID NO: 4008006 - DNA, 25 bp, Homo sapien
agtacagggatccccgtggagtcct

SEQ ID NO: 4008007 - DNA, 25 bp, Homo sapien
ttgctcccgtacttttccacgtctg

SEQ ID NO: 4008008 - DNA, 25 bp, Homo sapien
tacttttccacgtctgcatctgctt

SEQ ID NO: 4008009 - DNA, 25 bp, Homo sapien
tgcatctgcttttgccatcgccgtt

SEQ ID NO: 4008010 - DNA, 25 bp, Homo sapien
ccgcttgctcccgtacttttccacg

SEQ ID NO: 4008011 - DNA, 25 bp, Homo sapien
cccgcccctcgggcttcctctgcac

SEQ ID NO: 4008012 - DNA, 25 bp, Homo sapien
gccaggtgacatcatcgccgctgtc

SEQ ID NO: 4008013 - DNA, 25 bp, Homo sapien
aggtgacatcatcgccgctgtctga

SEQ ID NO: 4008014 - DNA, 25 bp, Homo sapien
ccaggtgacatcatcgccgctgtct

SEQ ID NO: 4008015 - DNA, 25 bp, Homo sapien
caggtgacatcatcgccgctgtctg

SEQ ID NO: 4008016 - DNA, 25 bp, Homo sapien
gtctgcgatgtccttgcctacacgg

SEQ ID NO: 4008017 - DNA, 25 bp, Homo sapien
agggatggagactccggcctcggag

SEQ ID NO: 4008018 - DNA, 25 bp, Homo sapien
gcctacacggatggaaaaacacagc

SEQ ID NO: 4008019 - DNA, 25 bp, Homo sapien
gaggctgaacgagggagatgagaaa

SEQ ID NO: 4008020 - DNA, 25 bp, Homo sapien
cagggtccagagtgtcaatggagga

SEQ ID NO: 4008021 - DNA, 25 bp, Homo sapien
tccagcggggcagccggaatcccat

SEQ ID NO: 4008022 - DNA, 25 bp, Homo sapien
aaactggccatctgcgcccggctgt

SEQ ID NO: 4008023 - DNA, 25 bp, Homo sapien
catcacccactcggctgtgggcaca

SEQ ID NO: 4008024 - DNA, 25 bp, Homo sapien
cagctggagcgcaggcagcagagtg

SEQ ID NO: 4008025 - DNA, 25 bp, Homo sapien
tgcagggagactgtgacgcccccgc

SEQ ID NO: 4008026 - DNA, 25 bp, Homo sapien
gcccagacggcagcgggctgttttc

SEQ ID NO: 4008027 - DNA, 25 bp, Homo sapien
gcgcaggcagcagagtgcaggccag

SEQ ID NO: 4008028 - DNA, 25 bp, Homo sapien
gaaactaccgtttctcacgcaggca

SEQ ID NO: 4008029 - DNA, 25 bp, Homo sapien
cacaagtttggcgagtttgcatccg

SEQ ID NO: 4008030 - DNA, 25 bp, Homo sapien
ccggcaatcgcgtacaggagtgagc

SEQ ID NO: 4008031 - DNA, 25 bp, Homo sapien
tgatctggatgcaagccgatactgc

SEQ ID NO: 4008032 - DNA, 25 bp, Homo sapien
ggaggccttggtgacaatccctagt

SEQ ID NO: 4008033 - DNA, 25 bp, Homo sapien
cgtgtttgttgaacgcgggctccag

SEQ ID NO: 4008034 - DNA, 25 bp, Homo sapien
cagttgcgctctaaggcatcaggcc

SEQ ID NO: 4008035 - DNA, 25 bp, Homo sapien
cagtgataacggagccctcgagggt

SEQ ID NO: 4008036 - DNA, 25 bp, Homo sapien
tatacatttttgtctgggcgcgctg

SEQ ID NO: 4008037 - DNA, 25 bp, Homo sapien
agttccactgctttgcttgaccagc

SEQ ID NO: 4008038 - DNA, 25 bp, Homo sapien
cacagccaggtagaattcttcattc

SEQ ID NO: 4008039 - DNA, 25 bp, Homo sapien
gctttgcttgaccagccttaaagac

SEQ ID NO: 4008040 - DNA, 25 bp, Homo sapien
catgccactgcactgcggcctggag

SEQ ID NO: 4008041 - DNA, 25 bp, Homo sapien
atgccactgcactgcggcctggaga

SEQ ID NO: 4008042 - DNA, 25 bp, Homo sapien
tgccactgcactgcggcctggagac

SEQ ID NO: 4008043 - DNA, 25 bp, Homo sapien
atcatgccactgcactgcggcctgg

SEQ ID NO: 4008044 - DNA, 25 bp, Homo sapien
agcgctgtggcgtccgcggggatgc

SEQ ID NO: 4008045 - DNA, 25 bp, Homo sapien
cgcggcccgagcagttgacgcggca

SEQ ID NO: 4008046 - DNA, 25 bp, Homo sapien
cagttgacgcggcaggcggcgccgg

SEQ ID NO: 4008047 - DNA, 25 bp, Homo sapien
tgcgcagcgcgggaccgagcgtccg

SEQ ID NO: 4008048 - DNA, 25 bp, Homo sapien
aggggggctcgcaaggcccgcagcc

SEQ ID NO: 4008049 - DNA, 25 bp, Homo sapien
cccgccagcgccccgagccacaggc

SEQ ID NO: 4008050 - DNA, 25 bp, Homo sapien
cagaggcaggggggctcgcaaggcc

SEQ ID NO: 4008051 - DNA, 25 bp, Homo sapien
tcgcaaggcccgcagccgcgcccgg

SEQ ID NO: 4008052 - DNA, 25 bp, Homo sapien
cgttagggcagcgcgcgcatggccc

SEQ ID NO: 4008053 - DNA, 25 bp, Homo sapien
gcgcgcatggccccgccgtccccag

SEQ ID NO: 4008054 - DNA, 25 bp, Homo sapien
gcgcatggccccgccgtccccaggc

SEQ ID NO: 4008055 - DNA, 25 bp, Homo sapien
gttagggcagcgcgcgcatggcccc

SEQ ID NO: 4008056 - DNA, 25 bp, Homo sapien
gccccgacccgtgcacgtgggagcc

SEQ ID NO: 4008057 - DNA, 25 bp, Homo sapien
agaatcaatacgctgtggggcctca

SEQ ID NO: 4008058 - DNA, 25 bp, Homo sapien
ctgaggcagacacacggccccgacc

SEQ ID NO: 4008059 - DNA, 25 bp, Homo sapien
gtttcgcagaatcaatacgctgtgg

SEQ ID NO: 4008060 - DNA, 25 bp, Homo sapien
cattctctcaagatgacttgccgct

SEQ ID NO: 4008061 - DNA, 25 bp, Homo sapien
gaggtagtgtctgtccgtgttctcc

SEQ ID NO: 4008062 - DNA, 25 bp, Homo sapien
tgacttgccgctattgatgttgact

SEQ ID NO: 4008063 - DNA, 25 bp, Homo sapien
ctgaggtagtgtctgtccgtgttct

SEQ ID NO: 4008064 - DNA, 25 bp, Homo sapien
tctgaacgtcaccaagccaaacaac

SEQ ID NO: 4008065 - DNA, 25 bp, Homo sapien
caaccttcagcagatggcagggagc

SEQ ID NO: 4008066 - DNA, 25 bp, Homo sapien
gccaaacaaccaaccttcagcagat

SEQ ID NO: 4008067 - DNA, 25 bp, Homo sapien
tgcttcagccacataagagagcggt

SEQ ID NO: 4008068 - DNA, 25 bp, Homo sapien
gtccttattgggcacgtaccagtcc

SEQ ID NO: 4008069 - DNA, 25 bp, Homo sapien
taccagtccataggtggaagcccca

SEQ ID NO: 4008070 - DNA, 25 bp, Homo sapien
ttcactgtccttattgggcacgtac

SEQ ID NO: 4008071 - DNA, 25 bp, Homo sapien
gcacgtaccagtccataggtggaag

SEQ ID NO: 4008072 - DNA, 25 bp, Homo sapien
ttcaatagcatcattaatagcccat

SEQ ID NO: 4008073 - DNA, 25 bp, Homo sapien
tctggcagagcactcttcaatagca

SEQ ID NO: 4008074 - DNA, 25 bp, Homo sapien
tcagaattacaatctcctgttcccc

SEQ ID NO: 4008075 - DNA, 25 bp, Homo sapien
gcccattgatccaattacatttctt

SEQ ID NO: 4008076 - DNA, 25 bp, Homo sapien
agcctcagaatattggaatccactt

SEQ ID NO: 4008077 - DNA, 25 bp, Homo sapien
tcccttgatgattttgtgcacacca

SEQ ID NO: 4008078 - DNA, 25 bp, Homo sapien
gatgattttgtgcacaccagtttcc

SEQ ID NO: 4008079 - DNA, 25 bp, Homo sapien
tgtgcacaccagtttcccatgtgct

SEQ ID NO: 4008080 - DNA, 25 bp, Homo sapien
tatgtagtttaacagcaattgccct

SEQ ID NO: 4008081 - DNA, 25 bp, Homo sapien
tcgataccattactcctaataaagc

SEQ ID NO: 4008082 - DNA, 25 bp, Homo sapien
ttactcctaataaagccaggcgaat

SEQ ID NO: 4008083 - DNA, 25 bp, Homo sapien
aaataccctcgataccattactcct

SEQ ID NO: 4008084 - DNA, 25 bp, Homo sapien
gatccttatggtattatcttagtct

SEQ ID NO: 4008085 - DNA, 25 bp, Homo sapien
ttcagactgctataagagaatgcca

SEQ ID NO: 4008086 - DNA, 25 bp, Homo sapien
gcacacagtcccaaaggtagatcct

SEQ ID NO: 4008087 - DNA, 25 bp, Homo sapien
gagcctttattataacagcacacag

SEQ ID NO: 4008088 - DNA, 25 bp, Homo sapien
ccacgttgacaggaagagtcaatgt

SEQ ID NO: 4008089 - DNA, 25 bp, Homo sapien
ctaaatgccccaggcggcattagag

SEQ ID NO: 4008090 - DNA, 25 bp, Homo sapien
agccttccacgttgacaggaagagt

SEQ ID NO: 4008091 - DNA, 25 bp, Homo sapien
tgccccaggcggcattagagccttc

SEQ ID NO: 4008092 - DNA, 25 bp, Homo sapien
tcatgattgaggatctaccctgcag

SEQ ID NO: 4008093 - DNA, 25 bp, Homo sapien
taccctgcagactgtatggagttat

SEQ ID NO: 4008094 - DNA, 25 bp, Homo sapien
cttttcatacatcatgattgaggat

SEQ ID NO: 4008095 - DNA, 25 bp, Homo sapien
gatctaccctgcagactgtatggag

SEQ ID NO: 4008096 - DNA, 25 bp, Homo sapien
tgttttccaaggctgggccttcagc

SEQ ID NO: 4008097 - DNA, 25 bp, Homo sapien
gttttccaaggctgggccttcagca

SEQ ID NO: 4008098 - DNA, 25 bp, Homo sapien
gtgttttccaaggctgggccttcag

SEQ ID NO: 4008099 - DNA, 25 bp, Homo sapien
tcctctacacgcttgtgtgtttcct

SEQ ID NO: 4008100 - DNA, 25 bp, Homo sapien
caatgttcctctacacgcttgtgtg

SEQ ID NO: 4008101 - DNA, 25 bp, Homo sapien
cagcaaacagcaatgttcctctaca

SEQ ID NO: 4008102 - DNA, 25 bp, Homo sapien
acagcaatgttcctctacacgcttg

SEQ ID NO: 4008103 - DNA, 25 bp, Homo sapien
gaaaggagacatggactcacactcc

SEQ ID NO: 4008104 - DNA, 25 bp, Homo sapien
ttctgaatttttgcccactaagcca

SEQ ID NO: 4008105 - DNA, 25 bp, Homo sapien
catttcacaggaagttagccatggt

SEQ ID NO: 4008106 - DNA, 25 bp, Homo sapien
cacatttattgatcaccgtgggcct

SEQ ID NO: 4008107 - DNA, 25 bp, Homo sapien
tctgaatttgccgaacagaaatgcg

SEQ ID NO: 4008108 - DNA, 25 bp, Homo sapien
aacatacagtgtatacaccagcacc

SEQ ID NO: 4008109 - DNA, 25 bp, Homo sapien
tttgccgaacagaaatgcgatcagg

SEQ ID NO: 4008110 - DNA, 25 bp, Homo sapien
gaaatgcgatcaggtgcctactaag

SEQ ID NO: 4008111 - DNA, 25 bp, Homo sapien
tattcttcattagtttcttgagatt

SEQ ID NO: 4008112 - DNA, 25 bp, Homo sapien
tcttcattagtttcttgagattatc

SEQ ID NO: 4008113 - DNA, 25 bp, Homo sapien
atttattcttcattagtttcttgag

SEQ ID NO: 4008114 - DNA, 25 bp, Homo sapien
cttcattagtttcttgagattatca

SEQ ID NO: 4008115 - DNA, 25 bp, Homo sapien
gattatcatccgctgagggtagagc

SEQ ID NO: 4008116 - DNA, 25 bp, Homo sapien
gggagtgagcagacactcggcaggt

SEQ ID NO: 4008117 - DNA, 25 bp, Homo sapien
gacactcggcaggtgtcttgagatt

SEQ ID NO: 4008118 - DNA, 25 bp, Homo sapien
tatcatccgctgagggtagagctga

SEQ ID NO: 4008119 - DNA, 25 bp, Homo sapien
gggaggtgtcttgagattatcatcc

SEQ ID NO: 4008120 - DNA, 25 bp, Homo sapien
ggaggtgtcttgagattatcatccg

SEQ ID NO: 4008121 - DNA, 25 bp, Homo sapien
cgggaggtgtcttgagattatcatc

SEQ ID NO: 4008122 - DNA, 25 bp, Homo sapien
ctcgggaggtgtcttgagattatca

SEQ ID NO: 4008123 - DNA, 25 bp, Homo sapien
ctgagggtggaaggggatagagcag

SEQ ID NO: 4008124 - DNA, 25 bp, Homo sapien
agggtggaaggggatagagcagacg

SEQ ID NO: 4008125 - DNA, 25 bp, Homo sapien
gagggtggaaggggatagagcagac

SEQ ID NO: 4008126 - DNA, 25 bp, Homo sapien
tgagggtggaaggggatagagcaga

SEQ ID NO: 4008127 - DNA, 25 bp, Homo sapien
gaggctcagggagttatcaattata

SEQ ID NO: 4008128 - DNA, 25 bp, Homo sapien
ggctcagggagttatcaattataga

SEQ ID NO: 4008129 - DNA, 25 bp, Homo sapien
atcctgaagaatgacgatgctccac

SEQ ID NO: 4008130 - DNA, 25 bp, Homo sapien
aagaatgacgatgctccactgccgc

SEQ ID NO: 4008131 - DNA, 25 bp, Homo sapien
atggacaaaattaccgccaccaaca

SEQ ID NO: 4008132 - DNA, 25 bp, Homo sapien
tgctggtgatagatttttgcacctt

SEQ ID NO: 4008133 - DNA, 25 bp, Homo sapien
tggacaaaattaccgccaccaacac

SEQ ID NO: 4008134 - DNA, 25 bp, Homo sapien
ttctgttgctggtgatagatttttg

SEQ ID NO: 4008135 - DNA, 25 bp, Homo sapien
agtgtgaccaccctgctccaaatct

SEQ ID NO: 4008136 - DNA, 25 bp, Homo sapien
tcagtgtgaccaccctgctccaaat

SEQ ID NO: 4008137 - DNA, 25 bp, Homo sapien
gtcagtgtgaccaccctgctccaaa

SEQ ID NO: 4008138 - DNA, 25 bp, Homo sapien
ctcccaggtaataccaaattgtaag

SEQ ID NO: 4008139 - DNA, 25 bp, Homo sapien
ttcactcccaggtaataccaaattg

SEQ ID NO: 4008140 - DNA, 25 bp, Homo sapien
cactcccaggtaataccaaattgta

SEQ ID NO: 4008141 - DNA, 25 bp, Homo sapien
tcactcccaggtaataccaaattgt

SEQ ID NO: 4008142 - DNA, 25 bp, Homo sapien
aatgtatccatgtcctgacctggca

SEQ ID NO: 4008143 - DNA, 25 bp, Homo sapien
aaaatgtatccatgtcctgacctgg

SEQ ID NO: 4008144 - DNA, 25 bp, Homo sapien
atgtatccatgtcctgacctggcag

SEQ ID NO: 4008145 - DNA, 25 bp, Homo sapien
aaatgtatccatgtcctgacctggc

SEQ ID NO: 4008146 - DNA, 25 bp, Homo sapien
ccggttgcaaagaggctttcttgca

SEQ ID NO: 4008147 - DNA, 25 bp, Homo sapien
gaggctttcttgcagaaggggtgat

SEQ ID NO: 4008148 - DNA, 25 bp, Homo sapien
caaagaggctttcttgcagaagggg

SEQ ID NO: 4008149 - DNA, 25 bp, Homo sapien
aagaggctttcttgcagaaggggtg

SEQ ID NO: 4008150 - DNA, 25 bp, Homo sapien
cagcactgaactatcctgcaactgc

SEQ ID NO: 4008151 - DNA, 25 bp, Homo sapien
aatgttgagagagtctaagggccgt

SEQ ID NO: 4008152 - DNA, 25 bp, Homo sapien
ctgcatcagcactgaactatcctgc

SEQ ID NO: 4008153 - DNA, 25 bp, Homo sapien
agagagtctaagggccgtggcatca

SEQ ID NO: 4008154 - DNA, 25 bp, Homo sapien
cgccgcaacgcttgcgcacgttgaa

SEQ ID NO: 4008155 - DNA, 25 bp, Homo sapien
tgcatctgtagtagtcctctgcccg

SEQ ID NO: 4008156 - DNA, 25 bp, Homo sapien
tttgcatctgtagtagtcctctgcc

SEQ ID NO: 4008157 - DNA, 25 bp, Homo sapien
cgcttgcgcacgttgaaacatttcc

SEQ ID NO: 4008158 - DNA, 25 bp, Homo sapien
ttcatcagataaagcaccactttca

SEQ ID NO: 4008159 - DNA, 25 bp, Homo sapien
tatggattacaatcactttcatcag

SEQ ID NO: 4008160 - DNA, 25 bp, Homo sapien
tgattttaaataatctgccatgttt

SEQ ID NO: 4008161 - DNA, 25 bp, Homo sapien
gataaagcaccactttcaggatgat

SEQ ID NO: 4008162 - DNA, 25 bp, Homo sapien
tctccgtgctcacgttctttcatgc

SEQ ID NO: 4008163 - DNA, 25 bp, Homo sapien
tttctccgtgctcacgttctttcat

SEQ ID NO: 4008164 - DNA, 25 bp, Homo sapien
cctctccttttctccgtgctcacgt

SEQ ID NO: 4008165 - DNA, 25 bp, Homo sapien
tccttttctccgtgctcacgttctt

SEQ ID NO: 4008166 - DNA, 25 bp, Homo sapien
tagctcgaactttggtttccacctg

SEQ ID NO: 4008167 - DNA, 25 bp, Homo sapien
cttttgttgtcaccttcatcttacg

SEQ ID NO: 4008168 - DNA, 25 bp, Homo sapien
ttggtttccacctgtctccataaag

SEQ ID NO: 4008169 - DNA, 25 bp, Homo sapien
cacctgtctccataaagtaaagatg

SEQ ID NO: 4008170 - DNA, 25 bp, Homo sapien
atacaaacggacctcagcccttggt

SEQ ID NO: 4008171 - DNA, 25 bp, Homo sapien
tgtgtgcatacaaacggacctcagc

SEQ ID NO: 4008172 - DNA, 25 bp, Homo sapien
cggacctcagcccttggtgagagtg

SEQ ID NO: 4008173 - DNA, 25 bp, Homo sapien
cactatggggactccaacagagcca

SEQ ID NO: 4008174 - DNA, 25 bp, Homo sapien
tgtccattttgagacgggaagatag

SEQ ID NO: 4008175 - DNA, 25 bp, Homo sapien
tttgagacgggaagatagtcttcag

SEQ ID NO: 4008176 - DNA, 25 bp, Homo sapien
tccattttgagacgggaagatagtc

SEQ ID NO: 4008177 - DNA, 25 bp, Homo sapien
ccatcatgtccattttgagacggga

SEQ ID NO: 4008178 - DNA, 25 bp, Homo sapien
tccctgcttaggaggtaatgactag

SEQ ID NO: 4008179 - DNA, 25 bp, Homo sapien
cctgcttaggaggtaatgactagat

SEQ ID NO: 4008180 - DNA, 25 bp, Homo sapien
gatgtccctgcttaggaggtaatga

SEQ ID NO: 4008181 - DNA, 25 bp, Homo sapien
cttaggaggtaatgactagatgaca

SEQ ID NO: 4008182 - DNA, 25 bp, Homo sapien
cctctacagaaagttagtatactca

SEQ ID NO: 4008183 - DNA, 25 bp, Homo sapien
ctctacagaaagttagtatactcac

SEQ ID NO: 4008184 - DNA, 25 bp, Homo sapien
gtatacctctacagaaagttagtat

SEQ ID NO: 4008185 - DNA, 25 bp, Homo sapien
tacctctacagaaagttagtatact

SEQ ID NO: 4008186 - DNA, 25 bp, Homo sapien
acacagtaatgataagtaaccaagg

SEQ ID NO: 4008187 - DNA, 25 bp, Homo sapien
agagggagatggcaaatttataact

SEQ ID NO: 4008188 - DNA, 25 bp, Homo sapien
cacagtaatgataagtaaccaagga

SEQ ID NO: 4008189 - DNA, 25 bp, Homo sapien
atttataacttctcagaaacacagt

SEQ ID NO: 4008190 - DNA, 25 bp, Homo sapien
cttaaggttatatattttggccagg

SEQ ID NO: 4008191 - DNA, 25 bp, Homo sapien
atattttggccaggcgcggtggctc

SEQ ID NO: 4008192 - DNA, 25 bp, Homo sapien
ttttggccaggcgcggtggctcacg

SEQ ID NO: 4008193 - DNA, 25 bp, Homo sapien
acttaaggttatatattttggccag

SEQ ID NO: 4008194 - DNA, 25 bp, Homo sapien
gccattcatatcctaagcaacaaaa

SEQ ID NO: 4008195 - DNA, 25 bp, Homo sapien
tcagccattcatatcctaagcaaca

SEQ ID NO: 4008196 - DNA, 25 bp, Homo sapien
agccattcatatcctaagcaacaaa

SEQ ID NO: 4008197 - DNA, 25 bp, Homo sapien
attcatatcctaagcaacaaaacat

SEQ ID NO: 4008198 - DNA, 25 bp, Homo sapien
aggtactcgcatgggcatgtcactg

SEQ ID NO: 4008199 - DNA, 25 bp, Homo sapien
ctcaggtactcgcatgggcatgtca

SEQ ID NO: 4008200 - DNA, 25 bp, Homo sapien
tcctcaggtactcgcatgggcatgt

SEQ ID NO: 4008201 - DNA, 25 bp, Homo sapien
cttcctcaggtactcgcatgggcat

SEQ ID NO: 4008202 - DNA, 25 bp, Homo sapien
tgtgaaacaggaacaatagtttcat

SEQ ID NO: 4008203 - DNA, 25 bp, Homo sapien
gtgtgaaacaggaacaatagtttca

SEQ ID NO: 4008204 - DNA, 25 bp, Homo sapien
tgaaacaggaacaatagtttcattc

SEQ ID NO: 4008205 - DNA, 25 bp, Homo sapien
tgtgtgaaacaggaacaatagtttc

SEQ ID NO: 4008206 - DNA, 25 bp, Homo sapien
ggtaaatagctttaccacctgcaaa

SEQ ID NO: 4008207 - DNA, 25 bp, Homo sapien
cacctgcaaaactgaccctagttag

SEQ ID NO: 4008208 - DNA, 25 bp, Homo sapien
tagttgctacccgatatggtttggc

SEQ ID NO: 4008209 - DNA, 25 bp, Homo sapien
tctcgtgatagggaatacatctcac

SEQ ID NO: 4008210 - DNA, 25 bp, Homo sapien
actaatacactacccgagacacctt

SEQ ID NO: 4008211 - DNA, 25 bp, Homo sapien
ggagatttgtaacagctgtaatgcc

SEQ ID NO: 4008212 - DNA, 25 bp, Homo sapien
actacccgagacaccttaggagatt

SEQ ID NO: 4008213 - DNA, 25 bp, Homo sapien
ccttaggagatttgtaacagctgta

SEQ ID NO: 4008214 - DNA, 25 bp, Homo sapien
gctaggctggtctctgtccgtcctc

SEQ ID NO: 4008215 - DNA, 25 bp, Homo sapien
gctggtctctgtccgtcctctgagc

SEQ ID NO: 4008216 - DNA, 25 bp, Homo sapien
tccgtcctctgagctcaagctaagc

SEQ ID NO: 4008217 - DNA, 25 bp, Homo sapien
tctgtccgtcctctgagctcaagct

SEQ ID NO: 4008218 - DNA, 25 bp, Homo sapien
gagaattccttgagacacagattgg

SEQ ID NO: 4008219 - DNA, 25 bp, Homo sapien
ggaaatcattcaatacagaggtcag

SEQ ID NO: 4008220 - DNA, 25 bp, Homo sapien
tggctttacagctatggcaacaggt

SEQ ID NO: 4008221 - DNA, 25 bp, Homo sapien
ggtttctgcaactgtacaacagtga

SEQ ID NO: 4008222 - DNA, 25 bp, Homo sapien
tgagcttcgctgcattggaggagtt

SEQ ID NO: 4008223 - DNA, 25 bp, Homo sapien
atttctggaggcgtgcatgagcttc

SEQ ID NO: 4008224 - DNA, 25 bp, Homo sapien
caaggaagaatggaggtgacgatga

SEQ ID NO: 4008225 - DNA, 25 bp, Homo sapien
gacgatgagcgtggagatttctgga

SEQ ID NO: 4008226 - DNA, 25 bp, Homo sapien
tactttggttctagagcttgttcac

SEQ ID NO: 4008227 - DNA, 25 bp, Homo sapien
tgactcttgcctccagttgtatctg

SEQ ID NO: 4008228 - DNA, 25 bp, Homo sapien
ttgtatctggtctcatgaatcttcc

SEQ ID NO: 4008229 - DNA, 25 bp, Homo sapien
aactggttgacctttgacaagcttc

SEQ ID NO: 4008230 - DNA, 25 bp, Homo sapien
tatcatactgaagtgcaccatagtg

SEQ ID NO: 4008231 - DNA, 25 bp, Homo sapien
tgtccactccattctaaggtgttat

SEQ ID NO: 4008232 - DNA, 25 bp, Homo sapien
cacagtagcactaacaggaaacatc

SEQ ID NO: 4008233 - DNA, 25 bp, Homo sapien
aagtgcaccatagtggtggtcttga

SEQ ID NO: 4008234 - DNA, 25 bp, Homo sapien
ccagtcccacatcgaggtttagttc

SEQ ID NO: 4008235 - DNA, 25 bp, Homo sapien
catcgaggtttagttctggacttct

SEQ ID NO: 4008236 - DNA, 25 bp, Homo sapien
gtttagttctggacttctgtgcagg

SEQ ID NO: 4008237 - DNA, 25 bp, Homo sapien
gtttggcaagcccagtcccacatcg

SEQ ID NO: 4008238 - DNA, 25 bp, Homo sapien
tgactcattaaaagcaacgggcggc

SEQ ID NO: 4008239 - DNA, 25 bp, Homo sapien
catctctttgggaaacggtgactca

SEQ ID NO: 4008240 - DNA, 25 bp, Homo sapien
ccgaggtcggccgttagaaagatgc

SEQ ID NO: 4008241 - DNA, 25 bp, Homo sapien
cgttatagcaagaaggcgaggcact

SEQ ID NO: 4008242 - DNA, 25 bp, Homo sapien
gggcgcagatctattcccttgggat

SEQ ID NO: 4008243 - DNA, 25 bp, Homo sapien
ctcttttgggtcaatagcagcaact

SEQ ID NO: 4008244 - DNA, 25 bp, Homo sapien
cccctctagattctcttctcagggc

SEQ ID NO: 4008245 - DNA, 25 bp, Homo sapien
caggcatgggtctgttggagctgcg

SEQ ID NO: 4008246 - DNA, 25 bp, Homo sapien
agtagaggggaattctttatgctct

SEQ ID NO: 4008247 - DNA, 25 bp, Homo sapien
caatagtggaaatttaatgaggagt

SEQ ID NO: 4008248 - DNA, 25 bp, Homo sapien
ctgaccattggtaaattgctaaaat

SEQ ID NO: 4008249 - DNA, 25 bp, Homo sapien
tgcaaatgtaacatctgaccattgg

SEQ ID NO: 4008250 - DNA, 25 bp, Homo sapien
gccaccgctcaggaagcatgcatct

SEQ ID NO: 4008251 - DNA, 25 bp, Homo sapien
gatgggaagatggatttagctgcct

SEQ ID NO: 4008252 - DNA, 25 bp, Homo sapien
gtttgctggtgccaccgctcaggaa

SEQ ID NO: 4008253 - DNA, 25 bp, Homo sapien
gctcctggaagctcaatgacagcag

SEQ ID NO: 4008254 - DNA, 25 bp, Homo sapien
caaggtgtatgatggtcgcagagca

SEQ ID NO: 4008255 - DNA, 25 bp, Homo sapien
ggagacaaccatgatgccagaggag

SEQ ID NO: 4008256 - DNA, 25 bp, Homo sapien
cccaaagggtgtgctcacgaataca

SEQ ID NO: 4008257 - DNA, 25 bp, Homo sapien
tggcaaaaattcagcgtctccggga

SEQ ID NO: 4008258 - DNA, 25 bp, Homo sapien
gagaaagggtctcaccacgttggcc

SEQ ID NO: 4008259 - DNA, 25 bp, Homo sapien
cttcagcctcctgagaactggggat

SEQ ID NO: 4008260 - DNA, 25 bp, Homo sapien
cacacctggctaatttttatatttt

SEQ ID NO: 4008261 - DNA, 25 bp, Homo sapien
tacaggcatgtgccaccacacctgg

SEQ ID NO: 4008262 - DNA, 25 bp, Homo sapien
tgtaggggcatatgcctaaagtcct

SEQ ID NO: 4008263 - DNA, 25 bp, Homo sapien
tttacccctggcgttcgaagctgca

SEQ ID NO: 4008264 - DNA, 25 bp, Homo sapien
tgaggcaggcaaatccttttacccc

SEQ ID NO: 4008265 - DNA, 25 bp, Homo sapien
gggcatttgactgtgtaggtcccag

SEQ ID NO: 4008266 - DNA, 25 bp, Homo sapien
ggcagccttctttactaatgctgtt

SEQ ID NO: 4008267 - DNA, 25 bp, Homo sapien
actgatgggagtacctcttagcatg

SEQ ID NO: 4008268 - DNA, 25 bp, Homo sapien
tggcagccttctttactaatgctgt

SEQ ID NO: 4008269 - DNA, 25 bp, Homo sapien
ggcactgatgggagtacctcttagc

SEQ ID NO: 4008270 - DNA, 25 bp, Homo sapien
tgaactctgcaaactacgtacctgg

SEQ ID NO: 4008271 - DNA, 25 bp, Homo sapien
gaaagaattgggtagctactgaggc

SEQ ID NO: 4008272 - DNA, 25 bp, Homo sapien
ggtagttgttcctccctaattgcaa

SEQ ID NO: 4008273 - DNA, 25 bp, Homo sapien
gaagccagaagcatatgtctcagaa

SEQ ID NO: 4008274 - DNA, 25 bp, Homo sapien
ccttctctattggattatgggtgga

SEQ ID NO: 4008275 - DNA, 25 bp, Homo sapien
aagaaatgattctggcgagaaatca

SEQ ID NO: 4008276 - DNA, 25 bp, Homo sapien
agcatcctcagtggaccctttcatg

SEQ ID NO: 4008277 - DNA, 25 bp, Homo sapien
aaggcacgtgatcactgccgaaggc

SEQ ID NO: 4008278 - DNA, 25 bp, Homo sapien
taaatagtgtcttggattagccagg

SEQ ID NO: 4008279 - DNA, 25 bp, Homo sapien
cactattggatgtgtagactggttc

SEQ ID NO: 4008280 - DNA, 25 bp, Homo sapien
gccaatgtctgtttagtaatccatc

SEQ ID NO: 4008281 - DNA, 25 bp, Homo sapien
ccactctgatgtttcgacgttttaa

SEQ ID NO: 4008282 - DNA, 25 bp, Homo sapien
cgtgttcgcggctttggtctgcaca

SEQ ID NO: 4008283 - DNA, 25 bp, Homo sapien
gaaatcaacctgtctgcggtgctct

SEQ ID NO: 4008284 - DNA, 25 bp, Homo sapien
ccaccattctgatgctgaaaagggt

SEQ ID NO: 4008285 - DNA, 25 bp, Homo sapien
gaagccagactcttcgtgtactggg

SEQ ID NO: 4008286 - DNA, 25 bp, Homo sapien
tgctacatgtaggatgacaccaccg

SEQ ID NO: 4008287 - DNA, 25 bp, Homo sapien
caccgacgtggctcaatggaagcaa

SEQ ID NO: 4008288 - DNA, 25 bp, Homo sapien
tcggaaacaccagtaagcaaaggct

SEQ ID NO: 4008289 - DNA, 25 bp, Homo sapien
gaagtccaagcgtgcaaactcagcc

SEQ ID NO: 4008290 - DNA, 25 bp, Homo sapien
taaagcttggttataggtgctaagg

SEQ ID NO: 4008291 - DNA, 25 bp, Homo sapien
tataggtgctaaggaaaagttggct

SEQ ID NO: 4008292 - DNA, 25 bp, Homo sapien
caatttgactctatttttgggttgc

SEQ ID NO: 4008293 - DNA, 25 bp, Homo sapien
gaaaagttggctgccaatttgactc

SEQ ID NO: 4008294 - DNA, 25 bp, Homo sapien
ctgagcagtgactcggaggtttccg

SEQ ID NO: 4008295 - DNA, 25 bp, Homo sapien
tgagcagtgactcggaggtttccga

SEQ ID NO: 4008296 - DNA, 25 bp, Homo sapien
gcagtgactcggaggtttccgagga

SEQ ID NO: 4008297 - DNA, 25 bp, Homo sapien
agtgactcggaggtttccgaggagg

SEQ ID NO: 4008298 - DNA, 25 bp, Homo sapien
ggagtcagaggtcagagttttgctc

SEQ ID NO: 4008299 - DNA, 25 bp, Homo sapien
tcctggtattggaatctccattttt

SEQ ID NO: 4008300 - DNA, 25 bp, Homo sapien
ctgagatgcaggacgagctggagtc

SEQ ID NO: 4008301 - DNA, 25 bp, Homo sapien
ttgctctttcctggtattggaatct

SEQ ID NO: 4008302 - DNA, 25 bp, Homo sapien
tatccgcaggcagttacttccccat

SEQ ID NO: 4008303 - DNA, 25 bp, Homo sapien
gtgctgaacgctgccaagaacaacc

SEQ ID NO: 4008304 - DNA, 25 bp, Homo sapien
agaacaaccaagatggtaaaagcca

SEQ ID NO: 4008305 - DNA, 25 bp, Homo sapien
caagccaggagtccacgggttgttc

SEQ ID NO: 4008306 - DNA, 25 bp, Homo sapien
tgccaaatcgcccttgcctgatgct

SEQ ID NO: 4008307 - DNA, 25 bp, Homo sapien
ccagagctgccaaatcgcccttgcc

SEQ ID NO: 4008308 - DNA, 25 bp, Homo sapien
tgtggactcgcccacagccccgagc

SEQ ID NO: 4008309 - DNA, 25 bp, Homo sapien
ctgatgctcgccaggcaacctcagg

SEQ ID NO: 4008310 - DNA, 25 bp, Homo sapien
agatcagcagattggaggataacgg

SEQ ID NO: 4008311 - DNA, 25 bp, Homo sapien
tcggtcaggcggagaagctcctgct

SEQ ID NO: 4008312 - DNA, 25 bp, Homo sapien
gataacggggtctggtctcagctga

SEQ ID NO: 4008313 - DNA, 25 bp, Homo sapien
tgagggcgctcctcaaactgaatga

SEQ ID NO: 4008314 - DNA, 25 bp, Homo sapien
tgggcaaacaaggagggccgtgaca

SEQ ID NO: 4008315 - DNA, 25 bp, Homo sapien
ctgggcaaacaaggagggccgtgac

SEQ ID NO: 4008316 - DNA, 25 bp, Homo sapien
caaacaaggagggccgtgacaccac

SEQ ID NO: 4008317 - DNA, 25 bp, Homo sapien
ggcaaacaaggagggccgtgacacc

SEQ ID NO: 4008318 - DNA, 25 bp, Homo sapien
aaagacgccttgaccagccatgagt

SEQ ID NO: 4008319 - DNA, 25 bp, Homo sapien
caggagggcgcttcataaaacgtca

SEQ ID NO: 4008320 - DNA, 25 bp, Homo sapien
gacggtaacgtgctatctcgccgca

SEQ ID NO: 4008321 - DNA, 25 bp, Homo sapien
gagctgtaatacgtgactgcctgag

SEQ ID NO: 4008322 - DNA, 25 bp, Homo sapien
ccaagcttgagttccgaggctgtgt

SEQ ID NO: 4008323 - DNA, 25 bp, Homo sapien
cgagggctggttttcatgattggca

SEQ ID NO: 4008324 - DNA, 25 bp, Homo sapien
gctgtgtgcgattcgggcacctcca

SEQ ID NO: 4008325 - DNA, 25 bp, Homo sapien
gagagactgagtgaactcaaacgac

SEQ ID NO: 4008326 - DNA, 25 bp, Homo sapien
acaggacaaagagcacccgtcagag

SEQ ID NO: 4008327 - DNA, 25 bp, Homo sapien
agagcacccgtcagagagaaatgtc

SEQ ID NO: 4008328 - DNA, 25 bp, Homo sapien
aggacaaagagcacccgtcagagag

SEQ ID NO: 4008329 - DNA, 25 bp, Homo sapien
cccgtcagagagaaatgtcagtgag

SEQ ID NO: 4008330 - DNA, 25 bp, Homo sapien
ttctcttatgaccatgtccttttat

SEQ ID NO: 4008331 - DNA, 25 bp, Homo sapien
tctcttatgaccatgtccttttatc

SEQ ID NO: 4008332 - DNA, 25 bp, Homo sapien
attctcttatgaccatgtcctttta

SEQ ID NO: 4008333 - DNA, 25 bp, Homo sapien
ctcttatgaccatgtccttttatcc

SEQ ID NO: 4008334 - DNA, 25 bp, Homo sapien
cacacaagacatactactggttaag

SEQ ID NO: 4008335 - DNA, 25 bp, Homo sapien
tactggttaagcagcggaaaaggag

SEQ ID NO: 4008336 - DNA, 25 bp, Homo sapien
tactactggttaagcagcggaaaag

SEQ ID NO: 4008337 - DNA, 25 bp, Homo sapien
gacatactactggttaagcagcgga

SEQ ID NO: 4008338 - DNA, 25 bp, Homo sapien
cagagtagttcaaaaatcatgagac

SEQ ID NO: 4008339 - DNA, 25 bp, Homo sapien
gtgtgacctacggagcctgccttag

SEQ ID NO: 4008340 - DNA, 25 bp, Homo sapien
gccttaggctagaatttaggagctg

SEQ ID NO: 4008341 - DNA, 25 bp, Homo sapien
gaagctgacagaaacatacccctat

SEQ ID NO: 4008342 - DNA, 25 bp, Homo sapien
aattaaggtagttctcacatgagag

SEQ ID NO: 4008343 - DNA, 25 bp, Homo sapien
taaggtagttctcacatgagagctc

SEQ ID NO: 4008344 - DNA, 25 bp, Homo sapien
gttctcacatgagagctctttgcca

SEQ ID NO: 4008345 - DNA, 25 bp, Homo sapien
ggtagttctcacatgagagctcttt

SEQ ID NO: 4008346 - DNA, 25 bp, Homo sapien
ccatctcagccaagcagagtggtag

SEQ ID NO: 4008347 - DNA, 25 bp, Homo sapien
agtggccaggatcctagcccagttc

SEQ ID NO: 4008348 - DNA, 25 bp, Homo sapien
acacctttctagagttacagcctga

SEQ ID NO: 4008349 - DNA, 25 bp, Homo sapien
tgaccgccctgactagttgcctgct

SEQ ID NO: 4008350 - DNA, 25 bp, Homo sapien
tgggctgcagagtttctccgacata

SEQ ID NO: 4008351 - DNA, 25 bp, Homo sapien
gaaaatctgctggtagtggtaagta

SEQ ID NO: 4008352 - DNA, 25 bp, Homo sapien
ggtaagtatgaagtaaagaccgcac

SEQ ID NO: 4008353 - DNA, 25 bp, Homo sapien
tccgacatacttggtataggccatg

SEQ ID NO: 4008354 - DNA, 25 bp, Homo sapien
tctatttgcaagtcgaaggctgcag

SEQ ID NO: 4008355 - DNA, 25 bp, Homo sapien
gaaggctatagcctccagcaaactt

SEQ ID NO: 4008356 - DNA, 25 bp, Homo sapien
cgaagacgacgaattggacaaagac

SEQ ID NO: 4008357 - DNA, 25 bp, Homo sapien
gaagaagacgaagacgacgataaag

SEQ ID NO: 4008358 - DNA, 25 bp, Homo sapien
aaccaagtatggcaggctcttcagc

SEQ ID NO: 4008359 - DNA, 25 bp, Homo sapien
tcttcagcagttcggtcaaggtcat

SEQ ID NO: 4008360 - DNA, 25 bp, Homo sapien
ggtactttcgtaatgtctcttgagc

SEQ ID NO: 4008361 - DNA, 25 bp, Homo sapien
tgagagatcgcagagactttcggtt

SEQ ID NO: 4008362 - DNA, 25 bp, Homo sapien
agtcttggagacgaaatgtataacc

SEQ ID NO: 4008363 - DNA, 25 bp, Homo sapien
ttcacgacatggcagagtttctgag

SEQ ID NO: 4008364 - DNA, 25 bp, Homo sapien
gatctgtcatcataaggcagttatc

SEQ ID NO: 4008365 - DNA, 25 bp, Homo sapien
ttaaagccgaaatggaactgacatc

SEQ ID NO: 4008366 - DNA, 25 bp, Homo sapien
tagtacgcaagtttgcactgccggc

SEQ ID NO: 4008367 - DNA, 25 bp, Homo sapien
tagtttggtaaacccatagtacgca

SEQ ID NO: 4008368 - DNA, 25 bp, Homo sapien
gcagcaaatcaacgacatccttgga

SEQ ID NO: 4008369 - DNA, 25 bp, Homo sapien
caggtatggcttcaaaaagttcaag

SEQ ID NO: 4008370 - DNA, 25 bp, Homo sapien
gtctggaatctctgatacgatgtca

SEQ ID NO: 4008371 - DNA, 25 bp, Homo sapien
caagcagatggttgtgtctggaatc

SEQ ID NO: 4008372 - DNA, 25 bp, Homo sapien
cacaaacaccatattcagtgacatc

SEQ ID NO: 4008373 - DNA, 25 bp, Homo sapien
tcagtgacatcccagtcctttgaga

SEQ ID NO: 4008374 - DNA, 25 bp, Homo sapien
ctgagtaaagcgcttcacctgggcc

SEQ ID NO: 4008375 - DNA, 25 bp, Homo sapien
cagtgataagcctgtgagaattctc

SEQ ID NO: 4008376 - DNA, 25 bp, Homo sapien
gagaattctctcacaatgacctgtt

SEQ ID NO: 4008377 - DNA, 25 bp, Homo sapien
gagaagttttagtaaatcctgagta

SEQ ID NO: 4008378 - DNA, 25 bp, Homo sapien
caatcacttctctactgaactggat

SEQ ID NO: 4008379 - DNA, 25 bp, Homo sapien
tggagtatccgtagtctgacactcg

SEQ ID NO: 4008380 - DNA, 25 bp, Homo sapien
tacctacaggactcttcgaacgcag

SEQ ID NO: 4008381 - DNA, 25 bp, Homo sapien
tgggtatgacacaagatggctggct

SEQ ID NO: 4008382 - DNA, 25 bp, Homo sapien
tgaagtgttctaagggaacacctcc

SEQ ID NO: 4008383 - DNA, 25 bp, Homo sapien
tctagatcgccaaactctgcaatgt

SEQ ID NO: 4008384 - DNA, 25 bp, Homo sapien
gagcagtggcaatgtttacacctgg

SEQ ID NO: 4008385 - DNA, 25 bp, Homo sapien
acctccttggttttcttgcactact

SEQ ID NO: 4008386 - DNA, 25 bp, Homo sapien
ggcagaaagggcaggcttcctataa

SEQ ID NO: 4008387 - DNA, 25 bp, Homo sapien
gtcctatatacagtccatggttggc

SEQ ID NO: 4008388 - DNA, 25 bp, Homo sapien
tgaaggctaaacacatgaggatgaa

SEQ ID NO: 4008389 - DNA, 25 bp, Homo sapien
cattatatcgacaaaggctttgaga

SEQ ID NO: 4008390 - DNA, 25 bp, Homo sapien
tcttgtaagagtctggatcaaattc

SEQ ID NO: 4008391 - DNA, 25 bp, Homo sapien
aataaaggcacggtgccctcgtggg

SEQ ID NO: 4008392 - DNA, 25 bp, Homo sapien
gaagactgtgaacctggggcgcaaa

SEQ ID NO: 4008393 - DNA, 25 bp, Homo sapien
gggcgcaaatgtcttcaaagaaaga

SEQ ID NO: 4008394 - DNA, 25 bp, Homo sapien
ctgcaattcgtggaggagccgtcgt

SEQ ID NO: 4008395 - DNA, 25 bp, Homo sapien
agccgtcgtgtgactgggaagaccc

SEQ ID NO: 4008396 - DNA, 25 bp, Homo sapien
tttccttgttcacggattgcgaccg

SEQ ID NO: 4008397 - DNA, 25 bp, Homo sapien
cagacaggctcgtgatattctaact

SEQ ID NO: 4008398 - DNA, 25 bp, Homo sapien
tgacatgtaaatctgaatgccagtg

SEQ ID NO: 4008399 - DNA, 25 bp, Homo sapien
taccaggctgaagttcctcaagagt

SEQ ID NO: 4008400 - DNA, 25 bp, Homo sapien
gcatgtaagccaccaatcagtactg

SEQ ID NO: 4008401 - DNA, 25 bp, Homo sapien
gcacaacactgaggaccaaaggtct

SEQ ID NO: 4008402 - DNA, 25 bp, Homo sapien
tcatagatatctgtaaatttaaaca

SEQ ID NO: 4008403 - DNA, 25 bp, Homo sapien
tttaaacagaggcaggcaacaggca

SEQ ID NO: 4008404 - DNA, 25 bp, Homo sapien
aggcaggggcatcctgaagaacaga

SEQ ID NO: 4008405 - DNA, 25 bp, Homo sapien
gggcatcctgaagaacagacattgt

SEQ ID NO: 4008406 - DNA, 25 bp, Homo sapien
gagtcaaatggcttgtttctaactg

SEQ ID NO: 4008407 - DNA, 25 bp, Homo sapien
tctaaaattgtttctgggtcaaatg

SEQ ID NO: 4008408 - DNA, 25 bp, Homo sapien
tattccacatgcaatcatcacaagg

SEQ ID NO: 4008409 - DNA, 25 bp, Homo sapien
gcctgtcaagtttaagctgtattcc

SEQ ID NO: 4008410 - DNA, 25 bp, Homo sapien
tggaggctattcactgcaccgatcg

SEQ ID NO: 4008411 - DNA, 25 bp, Homo sapien
agagagtgatttgctggcagccccg

SEQ ID NO: 4008412 - DNA, 25 bp, Homo sapien
gccaattttgtatctgtggaggcta

SEQ ID NO: 4008413 - DNA, 25 bp, Homo sapien
ccccggtggcaagtgagaccaggat

SEQ ID NO: 4008414 - DNA, 25 bp, Homo sapien
tgttcagtcacacttctatcccggc

SEQ ID NO: 4008415 - DNA, 25 bp, Homo sapien
tcccggctgtggttatgtatatcaa

SEQ ID NO: 4008416 - DNA, 25 bp, Homo sapien
gacaagagcttttcactgctaggcg

SEQ ID NO: 4008417 - DNA, 25 bp, Homo sapien
tggatttatagcaccaccctgagca

SEQ ID NO: 4008418 - DNA, 25 bp, Homo sapien
taatctgtagtctatgttgctgact

SEQ ID NO: 4008419 - DNA, 25 bp, Homo sapien
ttgcaaatgggtctgggcagtcggc

SEQ ID NO: 4008420 - DNA, 25 bp, Homo sapien
caaatgggtctgggcagtcggcttc

SEQ ID NO: 4008421 - DNA, 25 bp, Homo sapien
agctccttccgggataatctgtagt

SEQ ID NO: 4008422 - DNA, 25 bp, Homo sapien
tgctcgaatttgcaatgttgaaagc

SEQ ID NO: 4008423 - DNA, 25 bp, Homo sapien
caatgttgaaagcaagcggggatgc

SEQ ID NO: 4008424 - DNA, 25 bp, Homo sapien
ctgctcgaatttgcaatgttgaaag

SEQ ID NO: 4008425 - DNA, 25 bp, Homo sapien
aatgttgaaagcaagcggggatgct

SEQ ID NO: 4008426 - DNA, 25 bp, Homo sapien
gcccagctgtgtttttaatcttaaa

SEQ ID NO: 4008427 - DNA, 25 bp, Homo sapien
gtgcccagctgtgtttttaatctta

SEQ ID NO: 4008428 - DNA, 25 bp, Homo sapien
cccagctgtgtttttaatcttaaat

SEQ ID NO: 4008429 - DNA, 25 bp, Homo sapien
ctgtgcccagctgtgtttttaatct

SEQ ID NO: 4008430 - DNA, 25 bp, Homo sapien
tcaacacagcgaacatagggacatc

SEQ ID NO: 4008431 - DNA, 25 bp, Homo sapien
tcatgggaatgcaacacggccttac

SEQ ID NO: 4008432 - DNA, 25 bp, Homo sapien
tatgaatcagaaccaccaatgcacg

SEQ ID NO: 4008433 - DNA, 25 bp, Homo sapien
caagaattccttggtgtgagagaca

SEQ ID NO: 4008434 - DNA, 25 bp, Homo sapien
ggactgacttgcctggatgcaacta

SEQ ID NO: 4008435 - DNA, 25 bp, Homo sapien
cgggtaactcacttggaatacagtc

SEQ ID NO: 4008436 - DNA, 25 bp, Homo sapien
caagactgagatgcgagcagaggac

SEQ ID NO: 4008437 - DNA, 25 bp, Homo sapien
cttgctaaaagcagacgggtaactc

SEQ ID NO: 4008438 - DNA, 25 bp, Homo sapien
gagaactggtaacacttcgggcact

SEQ ID NO: 4008439 - DNA, 25 bp, Homo sapien
actggtaacacttcgggcactgagg

SEQ ID NO: 4008440 - DNA, 25 bp, Homo sapien
acacttcgggcactgaggttctcct

SEQ ID NO: 4008441 - DNA, 25 bp, Homo sapien
caggagaactggtaacacttcgggc

SEQ ID NO: 4008442 - DNA, 25 bp, Homo sapien
aaaaggtcatatgtcttccttcaca

SEQ ID NO: 4008443 - DNA, 25 bp, Homo sapien
taacagaaggggaaaattgaaggca

SEQ ID NO: 4008444 - DNA, 25 bp, Homo sapien
attgaaggcaaaaggtcatatgtct

SEQ ID NO: 4008445 - DNA, 25 bp, Homo sapien
tcatatgtcttccttcacattcaag

SEQ ID NO: 4008446 - DNA, 25 bp, Homo sapien
cagtttttgactccatgcggcacag

SEQ ID NO: 4008447 - DNA, 25 bp, Homo sapien
taccgtgagtgggtacgaccagcct

SEQ ID NO: 4008448 - DNA, 25 bp, Homo sapien
actgcagcacttgagttaccgtgag

SEQ ID NO: 4008449 - DNA, 25 bp, Homo sapien
gtttttcggcgtcgacactgcagca

SEQ ID NO: 4008450 - DNA, 25 bp, Homo sapien
tttttgtagcagatccagaatttgc

SEQ ID NO: 4008451 - DNA, 25 bp, Homo sapien
gtattttttgtagcagatccagaat

SEQ ID NO: 4008452 - DNA, 25 bp, Homo sapien
ttgtagcagatccagaatttgcctg

SEQ ID NO: 4008453 - DNA, 25 bp, Homo sapien
tattttttgtagcagatccagaatt

SEQ ID NO: 4008454 - DNA, 25 bp, Homo sapien
gatgaggcacaattttggattctta

SEQ ID NO: 4008455 - DNA, 25 bp, Homo sapien
ccttttccaggcgtggctttggcac

SEQ ID NO: 4008456 - DNA, 25 bp, Homo sapien
tccaggcgtggctttggcactggaa

SEQ ID NO: 4008457 - DNA, 25 bp, Homo sapien
ttttgggagacttcactttatcagc

SEQ ID NO: 4008458 - DNA, 25 bp, Homo sapien
tatgaagcggagaattgcactgcag

SEQ ID NO: 4008459 - DNA, 25 bp, Homo sapien
cactgcagcctgtgatactcagcac

SEQ ID NO: 4008460 - DNA, 25 bp, Homo sapien
caattatcggacaggcgtctgagcc

SEQ ID NO: 4008461 - DNA, 25 bp, Homo sapien
tgagcgcgctctgcactatcttggt

SEQ ID NO: 4008462 - DNA, 25 bp, Homo sapien
gatcttgctagtaaagttctaaccc

SEQ ID NO: 4008463 - DNA, 25 bp, Homo sapien
gtttttcacttactggcctggcaaa

SEQ ID NO: 4008464 - DNA, 25 bp, Homo sapien
gcagaaccattaaagcaccaggaga

SEQ ID NO: 4008465 - DNA, 25 bp, Homo sapien
taacccagaactcttatgccttgga

SEQ ID NO: 4008466 - DNA, 25 bp, Homo sapien
gtttcaacttaagccagaccgcagg

SEQ ID NO: 4008467 - DNA, 25 bp, Homo sapien
tcatttaacgtatgggattgcccac

SEQ ID NO: 4008468 - DNA, 25 bp, Homo sapien
gcaagtgccggaatcaggatacccg

SEQ ID NO: 4008469 - DNA, 25 bp, Homo sapien
cacaggtgactagcaggcaagtgcc

SEQ ID NO: 4008470 - DNA, 25 bp, Homo sapien
gcctccacaatgtaatattggaaaa

SEQ ID NO: 4008471 - DNA, 25 bp, Homo sapien
caatgtaatattggaaaatggcaaa

SEQ ID NO: 4008472 - DNA, 25 bp, Homo sapien
ccacaatgtaatattggaaaatggc

SEQ ID NO: 4008473 - DNA, 25 bp, Homo sapien
tcagcctccacaatgtaatattgga

SEQ ID NO: 4008474 - DNA, 25 bp, Homo sapien
caaatctgatcagctcgttagcatg

SEQ ID NO: 4008475 - DNA, 25 bp, Homo sapien
cctgtgtctcaggtcactaagttcc

SEQ ID NO: 4008476 - DNA, 25 bp, Homo sapien
gggcaagtcggaaatgaactcttca

SEQ ID NO: 4008477 - DNA, 25 bp, Homo sapien
cgttagcatgatgcagcagtgcttc

SEQ ID NO: 4008478 - DNA, 25 bp, Homo sapien
cagtgtgtgtatttgcaaatctgcg

SEQ ID NO: 4008479 - DNA, 25 bp, Homo sapien
tctgcggagactctgccgcagttta

SEQ ID NO: 4008480 - DNA, 25 bp, Homo sapien
tagcattgatgtgggcaacggttac

SEQ ID NO: 4008481 - DNA, 25 bp, Homo sapien
aaccactgtggctggagcagtgtgt

SEQ ID NO: 4008482 - DNA, 25 bp, Homo sapien
tgctctaatagcttctgccaacaat

SEQ ID NO: 4008483 - DNA, 25 bp, Homo sapien
tcttgatatgaactgggtttgtgac

SEQ ID NO: 4008484 - DNA, 25 bp, Homo sapien
ggtttgtgactaaccctgctctcat

SEQ ID NO: 4008485 - DNA, 25 bp, Homo sapien
cagatctcagtaatctcaacattgg

SEQ ID NO: 4008486 - DNA, 25 bp, Homo sapien
tcccctaagggagctaaaatgcatt

SEQ ID NO: 4008487 - DNA, 25 bp, Homo sapien
taaggaaggtgctttactagcccaa

SEQ ID NO: 4008488 - DNA, 25 bp, Homo sapien
tatcaggctcgcatataagtcccca

SEQ ID NO: 4008489 - DNA, 25 bp, Homo sapien
catgcaagcttgtgcaatctgcctt

SEQ ID NO: 4008490 - DNA, 25 bp, Homo sapien
ttattcagctcttgaataacttcct

SEQ ID NO: 4008491 - DNA, 25 bp, Homo sapien
ggcaattattcagctcttgaataac

SEQ ID NO: 4008492 - DNA, 25 bp, Homo sapien
ttcagctcttgaataacttccttgt

SEQ ID NO: 4008493 - DNA, 25 bp, Homo sapien
tggcaattattcagctcttgaataa

SEQ ID NO: 4008494 - DNA, 25 bp, Homo sapien
aaaaacttctcacggattctttgca

SEQ ID NO: 4008495 - DNA, 25 bp, Homo sapien
tttctagcacctgtccagctactgc

SEQ ID NO: 4008496 - DNA, 25 bp, Homo sapien
cttctcacggattctttgcacaaca

SEQ ID NO: 4008497 - DNA, 25 bp, Homo sapien
cagagggaacggagcagttttcaat

SEQ ID NO: 4008498 - DNA, 25 bp, Homo sapien
taaggctaccaacctcactggttga

SEQ ID NO: 4008499 - DNA, 25 bp, Homo sapien
caatcaagctgtcaaaaagtatcac

SEQ ID NO: 4008500 - DNA, 25 bp, Homo sapien
acattttcaattacttgtagtggaa

SEQ ID NO: 4008501 - DNA, 25 bp, Homo sapien
taaactacctatcattctcagtggt

SEQ ID NO: 4008502 - DNA, 25 bp, Homo sapien
gactttagccgcatcgattatgcta

SEQ ID NO: 4008503 - DNA, 25 bp, Homo sapien
tggtcgccaataacaacgtggtctc

SEQ ID NO: 4008504 - DNA, 25 bp, Homo sapien
tatttggaggtggtatatttggcca

SEQ ID NO: 4008505 - DNA, 25 bp, Homo sapien
cagctttgcctagactggtcgccaa

SEQ ID NO: 4008506 - DNA, 25 bp, Homo sapien
gggagattcccctataccatgggag

SEQ ID NO: 4008507 - DNA, 25 bp, Homo sapien
tgatctcccatcttaccctttgttt

SEQ ID NO: 4008508 - DNA, 25 bp, Homo sapien
taatgactctctacttttttgaatg

SEQ ID NO: 4008509 - DNA, 25 bp, Homo sapien
gagaatcttcaaccccatgtataat

SEQ ID NO: 4008510 - DNA, 25 bp, Homo sapien
tcttcgcagtaaagtgagcccttta

SEQ ID NO: 4008511 - DNA, 25 bp, Homo sapien
tttagacagtcttcgcagtaaagtg

SEQ ID NO: 4008512 - DNA, 25 bp, Homo sapien
cagtcttcgcagtaaagtgagccct

SEQ ID NO: 4008513 - DNA, 25 bp, Homo sapien
ttagacagtcttcgcagtaaagtga

SEQ ID NO: 4008514 - DNA, 25 bp, Homo sapien
tggagttttccacaacagggcaggt

SEQ ID NO: 4008515 - DNA, 25 bp, Homo sapien
caaagagttggtgcacaagtgaggc

SEQ ID NO: 4008516 - DNA, 25 bp, Homo sapien
cgttagctccgactgtgaaatgtgc

SEQ ID NO: 4008517 - DNA, 25 bp, Homo sapien
tggagccccgcttgtgaaatcagaa

SEQ ID NO: 4008518 - DNA, 25 bp, Homo sapien
ttgcgagtctaacagtgcgcccggg

SEQ ID NO: 4008519 - DNA, 25 bp, Homo sapien
tgcgcccgggtgaatcaagctactg

SEQ ID NO: 4008520 - DNA, 25 bp, Homo sapien
cattggcgaagtggagggttcatta

SEQ ID NO: 4008521 - DNA, 25 bp, Homo sapien
ccaccaccaaaacgcattggcgaag

SEQ ID NO: 4008522 - DNA, 25 bp, Homo sapien
ggtacatcctttagttccacagcaa

SEQ ID NO: 4008523 - DNA, 25 bp, Homo sapien
ggaaaaagcttagagccagcatgaa

SEQ ID NO: 4008524 - DNA, 25 bp, Homo sapien
ggctgctgaagagaacgaatatcag

SEQ ID NO: 4008525 - DNA, 25 bp, Homo sapien
gggtgatggtacatcctttagttcc

SEQ ID NO: 4008526 - DNA, 25 bp, Homo sapien
gaaatgtgaattttcagctaaactt

SEQ ID NO: 4008527 - DNA, 25 bp, Homo sapien
ctggaagaaatgtgaattttcagct

SEQ ID NO: 4008528 - DNA, 25 bp, Homo sapien
ggaagaaatgtgaattttcagctaa

SEQ ID NO: 4008529 - DNA, 25 bp, Homo sapien
aagaaatgtgaattttcagctaaac

SEQ ID NO: 4008530 - DNA, 25 bp, Homo sapien
cagcgtctgctcaggacgagaaaag

SEQ ID NO: 4008531 - DNA, 25 bp, Homo sapien
gggactatgtggcagcgtctgctca

SEQ ID NO: 4008532 - DNA, 25 bp, Homo sapien
cgtctgctcaggacgagaaaagcaa

SEQ ID NO: 4008533 - DNA, 25 bp, Homo sapien
ctcaggacgagaaaagcaattagag

SEQ ID NO: 4008534 - DNA, 25 bp, Homo sapien
gagttctcagttccgtttccttcca

SEQ ID NO: 4008535 - DNA, 25 bp, Homo sapien
actgcaggagttctcagttccgttt

SEQ ID NO: 4008536 - DNA, 25 bp, Homo sapien
gccatccacgtgttctactgcagga

SEQ ID NO: 4008537 - DNA, 25 bp, Homo sapien
gaagccatccacgtgttctactgca

SEQ ID NO: 4008538 - DNA, 25 bp, Homo sapien
catgcaaagtgattcaacatccttt

SEQ ID NO: 4008539 - DNA, 25 bp, Homo sapien
acagccatgcaaagtgattcaacat

SEQ ID NO: 4008540 - DNA, 25 bp, Homo sapien
aacatcctttcatctttcttttctt

SEQ ID NO: 4008541 - DNA, 25 bp, Homo sapien
gccatgcaaagtgattcaacatcct

SEQ ID NO: 4008542 - DNA, 25 bp, Homo sapien
ccgccgccgccaagcgcacccttca

SEQ ID NO: 4008543 - DNA, 25 bp, Homo sapien
ccgccaagcgcacccttcacttccg

SEQ ID NO: 4008544 - DNA, 25 bp, Homo sapien
gttttgattcccgactccgcagctc

SEQ ID NO: 4008545 - DNA, 25 bp, Homo sapien
acctccgctcacattccggccccgc

SEQ ID NO: 4008546 - DNA, 25 bp, Homo sapien
caaggtgtcaggtacaaatccacag

SEQ ID NO: 4008547 - DNA, 25 bp, Homo sapien
agggcttgctttacccccattctgg

SEQ ID NO: 4008548 - DNA, 25 bp, Homo sapien
cttaaagcaaggtgtcaggtacaaa

SEQ ID NO: 4008549 - DNA, 25 bp, Homo sapien
tgtcaggtacaaatccacagggctt

SEQ ID NO: 4008550 - DNA, 25 bp, Homo sapien
catttgctactggttgattctgggc

SEQ ID NO: 4008551 - DNA, 25 bp, Homo sapien
ggaatcattgagaagtgcgctggac

SEQ ID NO: 4008552 - DNA, 25 bp, Homo sapien
tgcagctggcaacagggaatcattg

SEQ ID NO: 4008553 - DNA, 25 bp, Homo sapien
aatagaatcgagagagcacgggaac

SEQ ID NO: 4008554 - DNA, 25 bp, Homo sapien
ttcctgccggaacctcgtgtacgat

SEQ ID NO: 4008555 - DNA, 25 bp, Homo sapien
tcagtccccaaaccgaacaggtggc

SEQ ID NO: 4008556 - DNA, 25 bp, Homo sapien
ctctgggcggagcagcaagaacaga

SEQ ID NO: 4008557 - DNA, 25 bp, Homo sapien
gcaccagcgtgcctttgggtgataa

SEQ ID NO: 4008558 - DNA, 25 bp, Homo sapien
gctttaggaaaaccacggaagctga

SEQ ID NO: 4008559 - DNA, 25 bp, Homo sapien
catagttagttagctttgcggccca

SEQ ID NO: 4008560 - DNA, 25 bp, Homo sapien
cctgccaccgtgtgcattgcaaaga

SEQ ID NO: 4008561 - DNA, 25 bp, Homo sapien
tctaagttgtcggtgatgaggctac

SEQ ID NO: 4008562 - DNA, 25 bp, Homo sapien
caaaggcctgacgtgagaagttgga

SEQ ID NO: 4008563 - DNA, 25 bp, Homo sapien
cagtcagggtgtaaacagtgcagca

SEQ ID NO: 4008564 - DNA, 25 bp, Homo sapien
tcttgccgtggtgcaaaactgtaga

SEQ ID NO: 4008565 - DNA, 25 bp, Homo sapien
tgtaaacagaattgccagggaccgg

SEQ ID NO: 4008566 - DNA, 25 bp, Homo sapien
aataactctacgtcctccagacctt

SEQ ID NO: 4008567 - DNA, 25 bp, Homo sapien
tgcattttcaataactctacgtcct

SEQ ID NO: 4008568 - DNA, 25 bp, Homo sapien
tgcgtctcgagtgtccgtttcctcc

SEQ ID NO: 4008569 - DNA, 25 bp, Homo sapien
gccttggttccattgaagtctgcgt

SEQ ID NO: 4008570 - DNA, 25 bp, Homo sapien
ctagaaggaacgaaagaggtctcgt

SEQ ID NO: 4008571 - DNA, 25 bp, Homo sapien
tcactgcgaagtttcctgtgggggg

SEQ ID NO: 4008572 - DNA, 25 bp, Homo sapien
cactgcgaagtttcctgtggggggg

SEQ ID NO: 4008573 - DNA, 25 bp, Homo sapien
gattacaggcaggccccacgtgctt

SEQ ID NO: 4008574 - DNA, 25 bp, Homo sapien
tctccaactcctgatgtcaatgatc

SEQ ID NO: 4008575 - DNA, 25 bp, Homo sapien
tcctgatgtcaatgatcttcctgcc

SEQ ID NO: 4008576 - DNA, 25 bp, Homo sapien
gcaggccccacgtgcttggctaatt

SEQ ID NO: 4008577 - DNA, 25 bp, Homo sapien
gcctcgttgctctccgtggcctcat

SEQ ID NO: 4008578 - DNA, 25 bp, Homo sapien
gctcttgagtgcgttcacctcgcgg

SEQ ID NO: 4008579 - DNA, 25 bp, Homo sapien
ggcgttgatgcgctgggactcctcc

SEQ ID NO: 4008580 - DNA, 25 bp, Homo sapien
cagcttcctgcggttggcgttgatg

SEQ ID NO: 4008581 - DNA, 25 bp, Homo sapien
tctttctgcttcagcgacttggtgg

SEQ ID NO: 4008582 - DNA, 25 bp, Homo sapien
ctgcttcagcgacttggtggccgcc

SEQ ID NO: 4008583 - DNA, 25 bp, Homo sapien
cttgtactgctcggccatcttgcgc

SEQ ID NO: 4008584 - DNA, 25 bp, Homo sapien
tactgctcggccatcttgcgctcgt

SEQ ID NO: 4008585 - DNA, 25 bp, Homo sapien
gggttcggaactccacacccgcata

SEQ ID NO: 4008586 - DNA, 25 bp, Homo sapien
tgggttcggaactccacacccgcat

SEQ ID NO: 4008587 - DNA, 25 bp, Homo sapien
gcaaactgggttcggaactccacac

SEQ ID NO: 4008588 - DNA, 25 bp, Homo sapien
cctgcaaactgggttcggaactcca

SEQ ID NO: 4008589 - DNA, 25 bp, Homo sapien
gcttgctccggagctccttgttctg

SEQ ID NO: 4008590 - DNA, 25 bp, Homo sapien
ctgcgctctgtggccagctcgttgc

SEQ ID NO: 4008591 - DNA, 25 bp, Homo sapien
cttgttctgccgctcgagctgctgc

SEQ ID NO: 4008592 - DNA, 25 bp, Homo sapien
ccagcgccgcgatggtggacttgaa

SEQ ID NO: 4008593 - DNA, 25 bp, Homo sapien
gggctcactggataaggtcagagct

SEQ ID NO: 4008594 - DNA, 25 bp, Homo sapien
tgctcagtgacatcaccaagggctc

SEQ ID NO: 4008595 - DNA, 25 bp, Homo sapien
catggaactagtgctcagtgacatc

SEQ ID NO: 4008596 - DNA, 25 bp, Homo sapien
tgacatcaccaagggctcactggat

SEQ ID NO: 4008597 - DNA, 25 bp, Homo sapien
caccctcttgtccctcaatccaggg

SEQ ID NO: 4008598 - DNA, 25 bp, Homo sapien
cttgtccctcaatccagggcctgca

SEQ ID NO: 4008599 - DNA, 25 bp, Homo sapien
ttgtccctcaatccagggcctgcac

SEQ ID NO: 4008600 - DNA, 25 bp, Homo sapien
cctcttgtccctcaatccagggcct

SEQ ID NO: 4008601 - DNA, 25 bp, Homo sapien
cgccacgcgtgtgttgactggtgca

SEQ ID NO: 4008602 - DNA, 25 bp, Homo sapien
cgtgtgttgactggtgcaggatcct

SEQ ID NO: 4008603 - DNA, 25 bp, Homo sapien
aggaagccgccacgcgtgtgttgac

SEQ ID NO: 4008604 - DNA, 25 bp, Homo sapien
aagccgccacgcgtgtgttgactgg

SEQ ID NO: 4008605 - DNA, 25 bp, Homo sapien
ttgcggacccggtcgctcatggcct

SEQ ID NO: 4008606 - DNA, 25 bp, Homo sapien
tgtggctttgcggacccggtcgctc

SEQ ID NO: 4008607 - DNA, 25 bp, Homo sapien
tggctttgcggacccggtcgctcat

SEQ ID NO: 4008608 - DNA, 25 bp, Homo sapien
tgctgtgtggctttgcggacccggt

SEQ ID NO: 4008609 - DNA, 25 bp, Homo sapien
ggcgcttctcgtcctggagtgcgtt

SEQ ID NO: 4008610 - DNA, 25 bp, Homo sapien
gcgcttctcgtcctggagtgcgttc

SEQ ID NO: 4008611 - DNA, 25 bp, Homo sapien
cggcgcttctcgtcctggagtgcgt

SEQ ID NO: 4008612 - DNA, 25 bp, Homo sapien
gcttgtttgcgagccctctcagcgg

SEQ ID NO: 4008613 - DNA, 25 bp, Homo sapien
agttcctccttctcgaggtccgctt

SEQ ID NO: 4008614 - DNA, 25 bp, Homo sapien
tccttctcgaggtccgcttgtttgc

SEQ ID NO: 4008615 - DNA, 25 bp, Homo sapien
cgaggtccgcttgtttgcgagccct

SEQ ID NO: 4008616 - DNA, 25 bp, Homo sapien
ggcaaagatctcatctctggaggca

SEQ ID NO: 4008617 - DNA, 25 bp, Homo sapien
atctctggaggcacgggcatcttcc

SEQ ID NO: 4008618 - DNA, 25 bp, Homo sapien
tttgcgtagctgcttgatggcttcc

SEQ ID NO: 4008619 - DNA, 25 bp, Homo sapien
cccttgatggcagagtcggcctgaa

SEQ ID NO: 4008620 - DNA, 25 bp, Homo sapien
tgatggcagagtcggcctgaagctc

SEQ ID NO: 4008621 - DNA, 25 bp, Homo sapien
ctgcagtttgcgtagctgcttgatg

SEQ ID NO: 4008622 - DNA, 25 bp, Homo sapien
gccagggcacgttgctttcgctcgt

SEQ ID NO: 4008623 - DNA, 25 bp, Homo sapien
ccagttccgtctcatactcgtgaag

SEQ ID NO: 4008624 - DNA, 25 bp, Homo sapien
gctcgtcttccagttccgtctcata

SEQ ID NO: 4008625 - DNA, 25 bp, Homo sapien
ggcacgttgctttcgctcgtcttcc

SEQ ID NO: 4008626 - DNA, 25 bp, Homo sapien
cgggcttggagatccctttcgaact

SEQ ID NO: 4008627 - DNA, 25 bp, Homo sapien
cattctgctcgtcccgggcttggag

SEQ ID NO: 4008628 - DNA, 25 bp, Homo sapien
actggcccttgagcgcctgcatgtt

SEQ ID NO: 4008629 - DNA, 25 bp, Homo sapien
tgttgacttccagccgcagtttggc

SEQ ID NO: 4008630 - DNA, 25 bp, Homo sapien
agagcgggcagccccattctatgag

SEQ ID NO: 4008631 - DNA, 25 bp, Homo sapien
gcgggcagccccattctatgaggct

SEQ ID NO: 4008632 - DNA, 25 bp, Homo sapien
agcgggcagccccattctatgaggc

SEQ ID NO: 4008633 - DNA, 25 bp, Homo sapien
ggcagccccattctatgaggctcaa

SEQ ID NO: 4008634 - DNA, 25 bp, Homo sapien
tgcccacgtcatccttggagctgac

SEQ ID NO: 4008635 - DNA, 25 bp, Homo sapien
caggtcttccatttcggctttgagc

SEQ ID NO: 4008636 - DNA, 25 bp, Homo sapien
ctctcatccgcgtatttggaagaga

SEQ ID NO: 4008637 - DNA, 25 bp, Homo sapien
cattttgttggtccgctcgagttcc

SEQ ID NO: 4008638 - DNA, 25 bp, Homo sapien
cacgagttgccgctggttgtccaaa

SEQ ID NO: 4008639 - DNA, 25 bp, Homo sapien
cagtttatcataagcggccgccttc

SEQ ID NO: 4008640 - DNA, 25 bp, Homo sapien
tccagagcttccacggtgctggcaa

SEQ ID NO: 4008641 - DNA, 25 bp, Homo sapien
tgtccaaatcaacaaccaggtcgtc

SEQ ID NO: 4008642 - DNA, 25 bp, Homo sapien
gaagttgagaggacccatgaaggaa

SEQ ID NO: 4008643 - DNA, 25 bp, Homo sapien
gggaccatgagtggcccctgtccct

SEQ ID NO: 4008644 - DNA, 25 bp, Homo sapien
cacagactctgagaagcgaagacca

SEQ ID NO: 4008645 - DNA, 25 bp, Homo sapien
ggatctcagcgcagagaagttgaga

SEQ ID NO: 4008646 - DNA, 25 bp, Homo sapien
ttctgccgggtttcttcttgaagca

SEQ ID NO: 4008647 - DNA, 25 bp, Homo sapien
cagcttcgtagacacgttgagcttc

SEQ ID NO: 4008648 - DNA, 25 bp, Homo sapien
cacgttgagcttctgccgggtttct

SEQ ID NO: 4008649 - DNA, 25 bp, Homo sapien
ctggcgcagcttcgtagacacgttg

SEQ ID NO: 4008650 - DNA, 25 bp, Homo sapien
ccaggtcccctggatgatgtggcag

SEQ ID NO: 4008651 - DNA, 25 bp, Homo sapien
ctggatgatgtggcaggacactcac

SEQ ID NO: 4008652 - DNA, 25 bp, Homo sapien
agaggtcccagggacctgccccgag

SEQ ID NO: 4008653 - DNA, 25 bp, Homo sapien
ctgcaaaagggatgcaaagaggtcc

SEQ ID NO: 4008654 - DNA, 25 bp, Homo sapien
ttggccagcttaatggccttcccct

SEQ ID NO: 4008655 - DNA, 25 bp, Homo sapien
ctcggcctcgttaagcatccctgtg

SEQ ID NO: 4008656 - DNA, 25 bp, Homo sapien
gaactgagggacgccacgtccttgg

SEQ ID NO: 4008657 - DNA, 25 bp, Homo sapien
gttaagcatccctgtgacgctctca

SEQ ID NO: 4008658 - DNA, 25 bp, Homo sapien
catgggctagtacttgaggtgttca

SEQ ID NO: 4008659 - DNA, 25 bp, Homo sapien
tggttagtcaaagcctctagaaggg

SEQ ID NO: 4008660 - DNA, 25 bp, Homo sapien
tttttactcaaaacacatgggctag

SEQ ID NO: 4008661 - DNA, 25 bp, Homo sapien
ctaagggtgccaagagactggttag

SEQ ID NO: 4008662 - DNA, 25 bp, Homo sapien
aagagagacctcagcgagccgggaa

SEQ ID NO: 4008663 - DNA, 25 bp, Homo sapien
acgcaactagaggaaaggacttgcc

SEQ ID NO: 4008664 - DNA, 25 bp, Homo sapien
taattgaacagggagatcatcgcct

SEQ ID NO: 4008665 - DNA, 25 bp, Homo sapien
cctccaggaacgcaactagaggaaa

SEQ ID NO: 4008666 - DNA, 25 bp, Homo sapien
ctttctccagcgtctgcttattctt

SEQ ID NO: 4008667 - DNA, 25 bp, Homo sapien
actttgtcattgagctccgcccggg

SEQ ID NO: 4008668 - DNA, 25 bp, Homo sapien
tattcttgtctaggttcgccttggc

SEQ ID NO: 4008669 - DNA, 25 bp, Homo sapien
tccccatcgctgcacttggactgca

SEQ ID NO: 4008670 - DNA, 25 bp, Homo sapien
tgtggccgggagaacgtttcaggcc

SEQ ID NO: 4008671 - DNA, 25 bp, Homo sapien
ccaggaaggcacacaacagggggca

SEQ ID NO: 4008672 - DNA, 25 bp, Homo sapien
caacagggggcacacaatcaccagt

SEQ ID NO: 4008673 - DNA, 25 bp, Homo sapien
gggggcacacaatcaccagtaagag

SEQ ID NO: 4008674 - DNA, 25 bp, Homo sapien
tgcaatctggaatcccacaagcggt

SEQ ID NO: 4008675 - DNA, 25 bp, Homo sapien
cacaagcggtatccaacctgctgac

SEQ ID NO: 4008676 - DNA, 25 bp, Homo sapien
gcggtatccaacctgctgacatgtc

SEQ ID NO: 4008677 - DNA, 25 bp, Homo sapien
tttcctaaagctcatgggttgcaat

SEQ ID NO: 4008678 - DNA, 25 bp, Homo sapien
aagcgcaagtatcccgagaggacga

SEQ ID NO: 4008679 - DNA, 25 bp, Homo sapien
aagtatcccgagaggacgagaccca

SEQ ID NO: 4008680 - DNA, 25 bp, Homo sapien
acgttgaccggtcagccctggatgc

SEQ ID NO: 4008681 - DNA, 25 bp, Homo sapien
caagacatgactaagagctgccaga

SEQ ID NO: 4008682 - DNA, 25 bp, Homo sapien
aatttgaggctgctgatgtcactct

SEQ ID NO: 4008683 - DNA, 25 bp, Homo sapien
tgtcatcaccaaaaagcatcaccaa

SEQ ID NO: 4008684 - DNA, 25 bp, Homo sapien
gtaatttgaggctgctgatgtcact

SEQ ID NO: 4008685 - DNA, 25 bp, Homo sapien
cctgacctgtagtaatttgaggctg

SEQ ID NO: 4008686 - DNA, 25 bp, Homo sapien
tgggaccgcgtctcttcatccaggg

SEQ ID NO: 4008687 - DNA, 25 bp, Homo sapien
agggccttcttcagcaccgtcacct

SEQ ID NO: 4008688 - DNA, 25 bp, Homo sapien
accgcctgtgcgtgtttctgcctca

SEQ ID NO: 4008689 - DNA, 25 bp, Homo sapien
ggacctgagcctcatgggaccgcgt

SEQ ID NO: 4008690 - DNA, 25 bp, Homo sapien
ggtcatctcagtgccgtgcaaaaga

SEQ ID NO: 4008691 - DNA, 25 bp, Homo sapien
tcacctaacatctctggacctaaaa

SEQ ID NO: 4008692 - DNA, 25 bp, Homo sapien
aaatgtggagcatatcacctgccta

SEQ ID NO: 4008693 - DNA, 25 bp, Homo sapien
tggagacagagggtcatctcagtgc

SEQ ID NO: 4008694 - DNA, 25 bp, Homo sapien
cagaacgctgtgctctatgtgcatg

SEQ ID NO: 4008695 - DNA, 25 bp, Homo sapien
caggattcgtgatctggcaggcagt

SEQ ID NO: 4008696 - DNA, 25 bp, Homo sapien
ttctgtatcaaaggccaagcggcaa

SEQ ID NO: 4008697 - DNA, 25 bp, Homo sapien
tggtgttggcacagctagcatagct

SEQ ID NO: 4008698 - DNA, 25 bp, Homo sapien
tggtatatactactcttctgatgag

SEQ ID NO: 4008699 - DNA, 25 bp, Homo sapien
caagcttaccaatgaggatggtttt

SEQ ID NO: 4008700 - DNA, 25 bp, Homo sapien
gcgtgagcccgaccctaaaggtgat

SEQ ID NO: 4008701 - DNA, 25 bp, Homo sapien
gcagcctgacacagagtcataaact

SEQ ID NO: 4008702 - DNA, 25 bp, Homo sapien
ctcgccgaggtctcgcttctgcttt

SEQ ID NO: 4008703 - DNA, 25 bp, Homo sapien
ttccagctctgtctttagggcctcc

SEQ ID NO: 4008704 - DNA, 25 bp, Homo sapien
agctcctcgccgaggtctcgcttct

SEQ ID NO: 4008705 - DNA, 25 bp, Homo sapien
tccagctctgtctttagggcctcca

SEQ ID NO: 4008706 - DNA, 25 bp, Homo sapien
gaggtctgagatgtggccctccagc

SEQ ID NO: 4008707 - DNA, 25 bp, Homo sapien
agggcattgttcttctgagcgattt

SEQ ID NO: 4008708 - DNA, 25 bp, Homo sapien
cttctgagcgatttcatcgtcaagc

SEQ ID NO: 4008709 - DNA, 25 bp, Homo sapien
cttgttcctggcggcccgctctgag

SEQ ID NO: 4008710 - DNA, 25 bp, Homo sapien
atcaccctccagcttccgtttcagc

SEQ ID NO: 4008711 - DNA, 25 bp, Homo sapien
gagctctgcgatctgcgcctggagg

SEQ ID NO: 4008712 - DNA, 25 bp, Homo sapien
gatctgctcgtggaagtcgctggca

SEQ ID NO: 4008713 - DNA, 25 bp, Homo sapien
gcctggaggtcagcgatctgctcgt

SEQ ID NO: 4008714 - DNA, 25 bp, Homo sapien
tcagcttggtaagattcttggcctt

SEQ ID NO: 4008715 - DNA, 25 bp, Homo sapien
tttcagcttggtaagattcttggcc

SEQ ID NO: 4008716 - DNA, 25 bp, Homo sapien
ttttcagcttggtaagattcttggc

SEQ ID NO: 4008717 - DNA, 25 bp, Homo sapien
gcttggtaagattcttggccttttc

SEQ ID NO: 4008718 - DNA, 25 bp, Homo sapien
cttctgcaagatttgtcgttaagtc

SEQ ID NO: 4008719 - DNA, 25 bp, Homo sapien
agtcactaatcctctcctcaaggag

SEQ ID NO: 4008720 - DNA, 25 bp, Homo sapien
gcaagatttgtcgttaagtcactaa

SEQ ID NO: 4008721 - DNA, 25 bp, Homo sapien
tgtcgttaagtcactaatcctctcc

SEQ ID NO: 4008722 - DNA, 25 bp, Homo sapien
cttgatcttggcctcagccgtgacc

SEQ ID NO: 4008723 - DNA, 25 bp, Homo sapien
ttggcctcagccgtgaccttctcaa

SEQ ID NO: 4008724 - DNA, 25 bp, Homo sapien
cagccgtgaccttctcaagttgcag

SEQ ID NO: 4008725 - DNA, 25 bp, Homo sapien
tgatcttggcctcagccgtgacctt

SEQ ID NO: 4008726 - DNA, 25 bp, Homo sapien
cttcctttcagcctgtagctgctgg

SEQ ID NO: 4008727 - DNA, 25 bp, Homo sapien
ctgttcctgtagcaggttcttctcc

SEQ ID NO: 4008728 - DNA, 25 bp, Homo sapien
ttcttggccgccagccgcacccgca

SEQ ID NO: 4008729 - DNA, 25 bp, Homo sapien
tctcatgcagtatctcctccagctc

SEQ ID NO: 4008730 - DNA, 25 bp, Homo sapien
cggggccaagtcctgttccccagca

SEQ ID NO: 4008731 - DNA, 25 bp, Homo sapien
ggccaagtcctgttccccagcaacc

SEQ ID NO: 4008732 - DNA, 25 bp, Homo sapien
gcaaccccagccatgcatccataca

SEQ ID NO: 4008733 - DNA, 25 bp, Homo sapien
cccagccatgcatccatacaggtac

SEQ ID NO: 4008734 - DNA, 25 bp, Homo sapien
tgttccagctccttaagctcattct

SEQ ID NO: 4008735 - DNA, 25 bp, Homo sapien
ctgttccagctccttaagctcattc

SEQ ID NO: 4008736 - DNA, 25 bp, Homo sapien
gttccagctccttaagctcattctc

SEQ ID NO: 4008737 - DNA, 25 bp, Homo sapien
cacctcctgtcccaaatgtgaaggc

SEQ ID NO: 4008738 - DNA, 25 bp, Homo sapien
ccacttgcgaccacctcctgtccca

SEQ ID NO: 4008739 - DNA, 25 bp, Homo sapien
ggcgcagttcctctgaatcaccttc

SEQ ID NO: 4008740 - DNA, 25 bp, Homo sapien
aatcaccttcatggcggtcagctgc

SEQ ID NO: 4008741 - DNA, 25 bp, Homo sapien
aggtaggcggcgcagttcctctgaa

SEQ ID NO: 4008742 - DNA, 25 bp, Homo sapien
tctgaatcaccttcatggcggtcag

SEQ ID NO: 4008743 - DNA, 25 bp, Homo sapien
agaaggtgcgggggtcatgaagcca

SEQ ID NO: 4008744 - DNA, 25 bp, Homo sapien
aaatctcgctcctcctctaggtggg

SEQ ID NO: 4008745 - DNA, 25 bp, Homo sapien
tgacatcggtgatcttcaaatctcg

SEQ ID NO: 4008746 - DNA, 25 bp, Homo sapien
cgccagttcggaagaagattttgct

SEQ ID NO: 4008747 - DNA, 25 bp, Homo sapien
agtagccacgacacatcgcctggaa

SEQ ID NO: 4008748 - DNA, 25 bp, Homo sapien
gggatggcattcgccgccaggatct

SEQ ID NO: 4008749 - DNA, 25 bp, Homo sapien
gatggcattcgccgccaggatctcg

SEQ ID NO: 4008750 - DNA, 25 bp, Homo sapien
ttggggatggcattcgccgccagga

SEQ ID NO: 4008751 - DNA, 25 bp, Homo sapien
ggcattcgccgccaggatctcgtag

SEQ ID NO: 4008752 - DNA, 25 bp, Homo sapien
agcaccccattgcaccgcagctgct

SEQ ID NO: 4008753 - DNA, 25 bp, Homo sapien
cagcaccaggaacgcatccagcttg

SEQ ID NO: 4008754 - DNA, 25 bp, Homo sapien
gaatgccttccagcaccccattgca

SEQ ID NO: 4008755 - DNA, 25 bp, Homo sapien
cctgccggcagatgcgaatgccttc

SEQ ID NO: 4008756 - DNA, 25 bp, Homo sapien
tacccactagatgctgactaacagc

SEQ ID NO: 4008757 - DNA, 25 bp, Homo sapien
tgtacaatgcttagggcatccctgg

SEQ ID NO: 4008758 - DNA, 25 bp, Homo sapien
gggcagagcccagtgaatacttcct

SEQ ID NO: 4008759 - DNA, 25 bp, Homo sapien
tgcctgcaccagattatgagaaacc

SEQ ID NO: 4008760 - DNA, 25 bp, Homo sapien
gggcagcgagctctccgtcatcttg

SEQ ID NO: 4008761 - DNA, 25 bp, Homo sapien
cgtcatcttggccatctggtccagg

SEQ ID NO: 4008762 - DNA, 25 bp, Homo sapien
gaagttgggcgtggtgttgcgtagc

SEQ ID NO: 4008763 - DNA, 25 bp, Homo sapien
tagcgtggtcatcagcttgcccagc

SEQ ID NO: 4008764 - DNA, 25 bp, Homo sapien
tcagcgggtccatattcttggtcag

SEQ ID NO: 4008765 - DNA, 25 bp, Homo sapien
aaacttgtcggaggaggcattgagc

SEQ ID NO: 4008766 - DNA, 25 bp, Homo sapien
ggtcagccaggcactcgcattatag

SEQ ID NO: 4008767 - DNA, 25 bp, Homo sapien
agcagggaagtcacgttgtcattca

SEQ ID NO: 4008768 - DNA, 25 bp, Homo sapien
agcttctccacgaaagacttgtccg

SEQ ID NO: 4008769 - DNA, 25 bp, Homo sapien
gcataatggatgatggagaactcag

SEQ ID NO: 4008770 - DNA, 25 bp, Homo sapien
gcttctccacgaaagacttgtccgt

SEQ ID NO: 4008771 - DNA, 25 bp, Homo sapien
ggagaactcagtcttgtccttgagc

SEQ ID NO: 4008772 - DNA, 25 bp, Homo sapien
tgtacaaggtgtgacggagccccgc

SEQ ID NO: 4008773 - DNA, 25 bp, Homo sapien
tacaaggtgtgacggagccccgcac

SEQ ID NO: 4008774 - DNA, 25 bp, Homo sapien
aaggtgtgacggagccccgcacgcc

SEQ ID NO: 4008775 - DNA, 25 bp, Homo sapien
gtgtacaaggtgtgacggagccccg

SEQ ID NO: 4008776 - DNA, 25 bp, Homo sapien
ctcgatgcagggctgtaggtccagc

SEQ ID NO: 4008777 - DNA, 25 bp, Homo sapien
tcgatgcagggctgtaggtccagcc

SEQ ID NO: 4008778 - DNA, 25 bp, Homo sapien
acagaagctccacccgacagcgccc

SEQ ID NO: 4008779 - DNA, 25 bp, Homo sapien
ggcgtgagcatcttggtatgaagtc

SEQ ID NO: 4008780 - DNA, 25 bp, Homo sapien
gagcatcttggtatgaagtcagaag

SEQ ID NO: 4008781 - DNA, 25 bp, Homo sapien
catggcccgcccacatcctgttctg

SEQ ID NO: 4008782 - DNA, 25 bp, Homo sapien
gcttatctcctccatctgcacaacc

SEQ ID NO: 4008783 - DNA, 25 bp, Homo sapien
atgcttatctcctccatctgcacaa

SEQ ID NO: 4008784 - DNA, 25 bp, Homo sapien
ttatctcctccatctgcacaaccat

SEQ ID NO: 4008785 - DNA, 25 bp, Homo sapien
cttaaagatgcttatctcctccatc

SEQ ID NO: 4008786 - DNA, 25 bp, Homo sapien
tagacagcctcctaccctacagtag

SEQ ID NO: 4008787 - DNA, 25 bp, Homo sapien
ggatttctgtctcttataccctcaa

SEQ ID NO: 4008788 - DNA, 25 bp, Homo sapien
tgcctacgggatccagctacatgtc

SEQ ID NO: 4008789 - DNA, 25 bp, Homo sapien
tgatccacccttaactagacagcct

SEQ ID NO: 4008790 - DNA, 25 bp, Homo sapien
tcagacaaccaagaccatggctctt

SEQ ID NO: 4008791 - DNA, 25 bp, Homo sapien
aaccaagaccatggctcttaggatc

SEQ ID NO: 4008792 - DNA, 25 bp, Homo sapien
ctcttaggatcccaccgagctgtac

SEQ ID NO: 4008793 - DNA, 25 bp, Homo sapien
ggctcttaggatcccaccgagctgt

SEQ ID NO: 4008794 - DNA, 25 bp, Homo sapien
aaatccagctatatccaggatcccc

SEQ ID NO: 4008795 - DNA, 25 bp, Homo sapien
gcgctcatatgttgccttggccaaa

SEQ ID NO: 4008796 - DNA, 25 bp, Homo sapien
gagtatccagcggaaaaggcgctca

SEQ ID NO: 4008797 - DNA, 25 bp, Homo sapien
ccagggctttgttcacgcgggtgag

SEQ ID NO: 4008798 - DNA, 25 bp, Homo sapien
catgaggtggcaaactttctgagca

SEQ ID NO: 4008799 - DNA, 25 bp, Homo sapien
atctgtcacattaattcccatgagg

SEQ ID NO: 4008800 - DNA, 25 bp, Homo sapien
caaccttgatacgaggagtgaggat

SEQ ID NO: 4008801 - DNA, 25 bp, Homo sapien
acatctcgcccaaccttgatacgag

SEQ ID NO: 4008802 - DNA, 25 bp, Homo sapien
atgcagtcttcctgtcgcccgggct

SEQ ID NO: 4008803 - DNA, 25 bp, Homo sapien
ccattaatttgccagatttagggac

SEQ ID NO: 4008804 - DNA, 25 bp, Homo sapien
tgctagagtcaacctaaatgctctt

SEQ ID NO: 4008805 - DNA, 25 bp, Homo sapien
tagggactctaatacataacaaaca

SEQ ID NO: 4008806 - DNA, 25 bp, Homo sapien
tgcaggaccgatgataccaccttca

SEQ ID NO: 4008807 - DNA, 25 bp, Homo sapien
agctgcaggaccgatgataccacct

SEQ ID NO: 4008808 - DNA, 25 bp, Homo sapien
gctgcaggaccgatgataccacctt

SEQ ID NO: 4008809 - DNA, 25 bp, Homo sapien
aagctgcaggaccgatgataccacc

SEQ ID NO: 4008810 - DNA, 25 bp, Homo sapien
cacaaaggtcaatgccaaggtaccc

SEQ ID NO: 4008811 - DNA, 25 bp, Homo sapien
gcagacacaaaggtcaatgccaagg

SEQ ID NO: 4008812 - DNA, 25 bp, Homo sapien
aaggtcaatgccaaggtaccctgga

SEQ ID NO: 4008813 - DNA, 25 bp, Homo sapien
agagcagacacaaaggtcaatgcca

SEQ ID NO: 4008814 - DNA, 25 bp, Homo sapien
gaaacacagtgtcccgaccaagaat

SEQ ID NO: 4008815 - DNA, 25 bp, Homo sapien
gagctgtcctgttctcaagacccag

SEQ ID NO: 4008816 - DNA, 25 bp, Homo sapien
tccattcaggaacttaagccgggaa

SEQ ID NO: 4008817 - DNA, 25 bp, Homo sapien
tgaggcacatctaacgcagaaggaa

SEQ ID NO: 4008818 - DNA, 25 bp, Homo sapien
agaaatctgtcctgaccagagaaga

SEQ ID NO: 4008819 - DNA, 25 bp, Homo sapien
cagaaatctgtcctgaccagagaag

SEQ ID NO: 4008820 - DNA, 25 bp, Homo sapien
ttccactggtatccaggcaagctac

SEQ ID NO: 4008821 - DNA, 25 bp, Homo sapien
ctccagactcaaggtgtgaggctta

SEQ ID NO: 4008822 - DNA, 25 bp, Homo sapien
cctccagactcaaggtgtgaggctt

SEQ ID NO: 4008823 - DNA, 25 bp, Homo sapien
tccagactcaaggtgtgaggcttac

SEQ ID NO: 4008824 - DNA, 25 bp, Homo sapien
gcacaaagccattggagaggaaggt

SEQ ID NO: 4008825 - DNA, 25 bp, Homo sapien
gaaggtgtagttgttgaagccctcc

SEQ ID NO: 4008826 - DNA, 25 bp, Homo sapien
tcctcctcgctgaaacccatgattg

SEQ ID NO: 4008827 - DNA, 25 bp, Homo sapien
tggaacatctcatcatcctgggctg

SEQ ID NO: 4008828 - DNA, 25 bp, Homo sapien
aggagaggaagacaggtcagggtca

SEQ ID NO: 4008829 - DNA, 25 bp, Homo sapien
ctagaaggagaggaagacaggtcag

SEQ ID NO: 4008830 - DNA, 25 bp, Homo sapien
gagaggaagacaggtcagggtcaat

SEQ ID NO: 4008831 - DNA, 25 bp, Homo sapien
agaaggagaggaagacaggtcaggg

SEQ ID NO: 4008832 - DNA, 25 bp, Homo sapien
tataaggcttatatcacaggttggc

SEQ ID NO: 4008833 - DNA, 25 bp, Homo sapien
tatatcacaggttggcaaatctggt

SEQ ID NO: 4008834 - DNA, 25 bp, Homo sapien
caggttggcaaatctggtcccctgt

SEQ ID NO: 4008835 - DNA, 25 bp, Homo sapien
aaacacagctgctctgatgtccttg

SEQ ID NO: 4008836 - DNA, 25 bp, Homo sapien
tagctgaggtctacaatacactccg

SEQ ID NO: 4008837 - DNA, 25 bp, Homo sapien
ctcatagcctatgttcctgaaagcc

SEQ ID NO: 4008838 - DNA, 25 bp, Homo sapien
aacttttccctacaacagaggtcag

SEQ ID NO: 4008839 - DNA, 25 bp, Homo sapien
tacactccgacacagcgaagttctg

SEQ ID NO: 4008840 - DNA, 25 bp, Homo sapien
ctggcttggcgaattgcccgtgatt

SEQ ID NO: 4008841 - DNA, 25 bp, Homo sapien
ggcgaattgcccgtgatttttctag

SEQ ID NO: 4008842 - DNA, 25 bp, Homo sapien
gtctctggcttggcgaattgcccgt

SEQ ID NO: 4008843 - DNA, 25 bp, Homo sapien
gaattgcccgtgatttttctagcag

SEQ ID NO: 4008844 - DNA, 25 bp, Homo sapien
cactgatctaaaaggaaggctgagg

SEQ ID NO: 4008845 - DNA, 25 bp, Homo sapien
caatagccaccacctatgagatgct

SEQ ID NO: 4008846 - DNA, 25 bp, Homo sapien
ctctggacttgaccgaagcctgaca

SEQ ID NO: 4008847 - DNA, 25 bp, Homo sapien
gggctcgctctaaacacaggaaatg

SEQ ID NO: 4008848 - DNA, 25 bp, Homo sapien
aagaggacgacaggtccagaatttg

SEQ ID NO: 4008849 - DNA, 25 bp, Homo sapien
ctaagaagtggagccgatcacagac

SEQ ID NO: 4008850 - DNA, 25 bp, Homo sapien
gatcacagaccaactctctaagagg

SEQ ID NO: 4008851 - DNA, 25 bp, Homo sapien
gaccaactctctaagaggacgacag

SEQ ID NO: 4008852 - DNA, 25 bp, Homo sapien
ccatttggcccaggctcagggaaag

SEQ ID NO: 4008853 - DNA, 25 bp, Homo sapien
atttggcccaggctcagggaaagga

SEQ ID NO: 4008854 - DNA, 25 bp, Homo sapien
ttggcccaggctcagggaaaggata

SEQ ID NO: 4008855 - DNA, 25 bp, Homo sapien
tggcccaggctcagggaaaggatac

SEQ ID NO: 4008856 - DNA, 25 bp, Homo sapien
ccgtgacgtcgaagttgatgcggat

SEQ ID NO: 4008857 - DNA, 25 bp, Homo sapien
cgtgacgtcgaagttgatgcggatg

SEQ ID NO: 4008858 - DNA, 25 bp, Homo sapien
gtatcggatataagggtctagccca

SEQ ID NO: 4008859 - DNA, 25 bp, Homo sapien
tacatgtaaaagtgcctaccagagt

SEQ ID NO: 4008860 - DNA, 25 bp, Homo sapien
caggagcccttgcaagattgtgaga

SEQ ID NO: 4008861 - DNA, 25 bp, Homo sapien
tgagatacagcccatctctccaggg

SEQ ID NO: 4008862 - DNA, 25 bp, Homo sapien
gaaagcctccagaatcgggtttgct

SEQ ID NO: 4008863 - DNA, 25 bp, Homo sapien
tcttcactgttttggcgttgccgaa

SEQ ID NO: 4008864 - DNA, 25 bp, Homo sapien
tcgggtttgcttgtagaagctgctt

SEQ ID NO: 4008865 - DNA, 25 bp, Homo sapien
tgaggagttgtcgttcttcactgtt

SEQ ID NO: 4008866 - DNA, 25 bp, Homo sapien
aaaacatggcggctgcagttgggcc

SEQ ID NO: 4008867 - DNA, 25 bp, Homo sapien
cgggatgcctttgcacaaacgcggt

SEQ ID NO: 4008868 - DNA, 25 bp, Homo sapien
ggaatcctcttagcggactgcggaa

SEQ ID NO: 4008869 - DNA, 25 bp, Homo sapien
gagaaagcaacctaggtcctgacag

SEQ ID NO: 4008870 - DNA, 25 bp, Homo sapien
tgtttaaactgccacacagcctctg

SEQ ID NO: 4008871 - DNA, 25 bp, Homo sapien
gacatctggaatggcgaacactgga

SEQ ID NO: 4008872 - DNA, 25 bp, Homo sapien
cctctgaggacgcaaagtgacatct

SEQ ID NO: 4008873 - DNA, 25 bp, Homo sapien
gagatgtgtttacgcatgcagccaa

SEQ ID NO: 4008874 - DNA, 25 bp, Homo sapien
ggagggatgcttctagctgagccaa

SEQ ID NO: 4008875 - DNA, 25 bp, Homo sapien
tgtatctcggttgggctgcaagctg

SEQ ID NO: 4008876 - DNA, 25 bp, Homo sapien
gatctcgctatggaaggaaagggct

SEQ ID NO: 4008877 - DNA, 25 bp, Homo sapien
cccgacgtggaggaagatctcgcta

SEQ ID NO: 4008878 - DNA, 25 bp, Homo sapien
tctttcttgcccttgtgggaggagg

SEQ ID NO: 4008879 - DNA, 25 bp, Homo sapien
accacggccaggtactgaatgacct

SEQ ID NO: 4008880 - DNA, 25 bp, Homo sapien
caccacggccaggtactgaatgacc

SEQ ID NO: 4008881 - DNA, 25 bp, Homo sapien
ctttcttgcccttgtgggaggaggc

SEQ ID NO: 4008882 - DNA, 25 bp, Homo sapien
cgggaacatcatctatgcacacgtt

SEQ ID NO: 4008883 - DNA, 25 bp, Homo sapien
tgaaagacacgggaacatcatctat

SEQ ID NO: 4008884 - DNA, 25 bp, Homo sapien
catcatctatgcacacgttccatgg

SEQ ID NO: 4008885 - DNA, 25 bp, Homo sapien
atctatgcacacgttccatggtgac

SEQ ID NO: 4008886 - DNA, 25 bp, Homo sapien
aaccggttatcccattggtcactgg

SEQ ID NO: 4008887 - DNA, 25 bp, Homo sapien
gatccgcctgcagacatcattagca

SEQ ID NO: 4008888 - DNA, 25 bp, Homo sapien
gatgtaagtgcctctggagtaccag

SEQ ID NO: 4008889 - DNA, 25 bp, Homo sapien
caagcccctttatcctctgaggaat

SEQ ID NO: 4008890 - DNA, 25 bp, Homo sapien
gatactgcctctatgttccaccact

SEQ ID NO: 4008891 - DNA, 25 bp, Homo sapien
ggccaccagaaatcatcacaatgga

SEQ ID NO: 4008892 - DNA, 25 bp, Homo sapien
ccaagatggctttcgtgcactagct

SEQ ID NO: 4008893 - DNA, 25 bp, Homo sapien
aagaatttgttcaccccgaggtcag

SEQ ID NO: 4008894 - DNA, 25 bp, Homo sapien
tctgccagttacctgggtgacctta

SEQ ID NO: 4008895 - DNA, 25 bp, Homo sapien
gaatagcataatgggctccaggacc

SEQ ID NO: 4008896 - DNA, 25 bp, Homo sapien
tgactggcaaagcaccctggcattt

SEQ ID NO: 4008897 - DNA, 25 bp, Homo sapien
tctcccctatagcatcaattggcag

SEQ ID NO: 4008898 - DNA, 25 bp, Homo sapien
gtgcatagaatggactggtcctccc

SEQ ID NO: 4008899 - DNA, 25 bp, Homo sapien
tgcatagaatggactggtcctcccg

SEQ ID NO: 4008900 - DNA, 25 bp, Homo sapien
catagaatggactggtcctcccgat

SEQ ID NO: 4008901 - DNA, 25 bp, Homo sapien
gcatagaatggactggtcctcccga

SEQ ID NO: 4008902 - DNA, 25 bp, Homo sapien
aggaagccttcacggcagaggtgac

SEQ ID NO: 4008903 - DNA, 25 bp, Homo sapien
gtgaccactgaacagcattaagaaa

SEQ ID NO: 4008904 - DNA, 25 bp, Homo sapien
gacaggaagccttcacggcagaggt

SEQ ID NO: 4008905 - DNA, 25 bp, Homo sapien
tgaccactgaacagcattaagaaaa

SEQ ID NO: 4008906 - DNA, 25 bp, Homo sapien
gagcttggtaattgccgttaatatc

SEQ ID NO: 4008907 - DNA, 25 bp, Homo sapien
agcttggtaattgccgttaatatca

SEQ ID NO: 4008908 - DNA, 25 bp, Homo sapien
ttggtaattgccgttaatatcatct

SEQ ID NO: 4008909 - DNA, 25 bp, Homo sapien
gtaattgccgttaatatcatcttta

SEQ ID NO: 4008910 - DNA, 25 bp, Homo sapien
ccaaactccacattcctggcaagaa

SEQ ID NO: 4008911 - DNA, 25 bp, Homo sapien
ctttttcagccacagtaactcctgg

SEQ ID NO: 4008912 - DNA, 25 bp, Homo sapien
tgcaaacacagatgttccttttgct

SEQ ID NO: 4008913 - DNA, 25 bp, Homo sapien
ctggtccctcgcagtgcctgccaaa

SEQ ID NO: 4008914 - DNA, 25 bp, Homo sapien
ttgaagcatgctccggtaggccgtg

SEQ ID NO: 4008915 - DNA, 25 bp, Homo sapien
gggttgaccaccacgcagaagaggc

SEQ ID NO: 4008916 - DNA, 25 bp, Homo sapien
tgcccttgtacatgtcgacgatctt

SEQ ID NO: 4008917 - DNA, 25 bp, Homo sapien
cgacgatcttctccgagtagatggg

SEQ ID NO: 4008918 - DNA, 25 bp, Homo sapien
agacagagaacccagcttacttcca

SEQ ID NO: 4008919 - DNA, 25 bp, Homo sapien
gcagacagagaacccagcttacttc

SEQ ID NO: 4008920 - DNA, 25 bp, Homo sapien
gacagagaacccagcttacttccag

SEQ ID NO: 4008921 - DNA, 25 bp, Homo sapien
ctgcagacagagaacccagcttact

SEQ ID NO: 4008922 - DNA, 25 bp, Homo sapien
tcccgccatgctgtacgtggtaagg

SEQ ID NO: 4008923 - DNA, 25 bp, Homo sapien
cgtggtaaggcactattgtcatgat

SEQ ID NO: 4008924 - DNA, 25 bp, Homo sapien
tagcagtcctctcctactgggtgaa

SEQ ID NO: 4008925 - DNA, 25 bp, Homo sapien
tactggatactagattttcccatgg

SEQ ID NO: 4008926 - DNA, 25 bp, Homo sapien
actgccacgccccttttgaatgtag

SEQ ID NO: 4008927 - DNA, 25 bp, Homo sapien
cttgcacggcggcagtaggtactca

SEQ ID NO: 4008928 - DNA, 25 bp, Homo sapien
aatgcttgctaaatgcatgccaggg

SEQ ID NO: 4008929 - DNA, 25 bp, Homo sapien
tcagtggactacactgagccaggcc

SEQ ID NO: 4008930 - DNA, 25 bp, Homo sapien
agagccctttgctactaatcatagg

SEQ ID NO: 4008931 - DNA, 25 bp, Homo sapien
cctagttaggtgctcaaggaatcat

SEQ ID NO: 4008932 - DNA, 25 bp, Homo sapien
tgctctaagcctattaccccaagag

SEQ ID NO: 4008933 - DNA, 25 bp, Homo sapien
tcaaagctaacaaggcctctggcac

SEQ ID NO: 4008934 - DNA, 25 bp, Homo sapien
gccactctaactccttctgaaatat

SEQ ID NO: 4008935 - DNA, 25 bp, Homo sapien
catttggctctttaaaaagccactc

SEQ ID NO: 4008936 - DNA, 25 bp, Homo sapien
tggctctttaaaaagccactctaac

SEQ ID NO: 4008937 - DNA, 25 bp, Homo sapien
gctctttaaaaagccactctaactc

SEQ ID NO: 4008938 - DNA, 25 bp, Homo sapien
tttccttatgaggccaggagtaggt

SEQ ID NO: 4008939 - DNA, 25 bp, Homo sapien
tccttatgaggccaggagtaggtac

SEQ ID NO: 4008940 - DNA, 25 bp, Homo sapien
ttccttatgaggccaggagtaggta

SEQ ID NO: 4008941 - DNA, 25 bp, Homo sapien
tcaggttgtgtagcacggaggcttc

SEQ ID NO: 4008942 - DNA, 25 bp, Homo sapien
gagaagtaccgctccctcaggttgt

SEQ ID NO: 4008943 - DNA, 25 bp, Homo sapien
tcgtcactgagttggcccttctgcg

SEQ ID NO: 4008944 - DNA, 25 bp, Homo sapien
aaagaggaacttctcatcgtcactg

SEQ ID NO: 4008945 - DNA, 25 bp, Homo sapien
ccatttggttgggcacgagagtggc

SEQ ID NO: 4008946 - DNA, 25 bp, Homo sapien
tttacccatttggttgggcacgaga

SEQ ID NO: 4008947 - DNA, 25 bp, Homo sapien
acccatttggttgggcacgagagtg

SEQ ID NO: 4008948 - DNA, 25 bp, Homo sapien
ttacccatttggttgggcacgagag

SEQ ID NO: 4008949 - DNA, 25 bp, Homo sapien
actggatggcgagctcggatctgac

SEQ ID NO: 4008950 - DNA, 25 bp, Homo sapien
aggaaactggatggcgagctcggat

SEQ ID NO: 4008951 - DNA, 25 bp, Homo sapien
ggagaggaaactggatggcgagctc

SEQ ID NO: 4008952 - DNA, 25 bp, Homo sapien
agatctccaactggggggactagtg

SEQ ID NO: 4008953 - DNA, 25 bp, Homo sapien
ctcccaggccggagcgtccaaatct

SEQ ID NO: 4008954 - DNA, 25 bp, Homo sapien
ggagcgtccaaatctccctgcgcgt

SEQ ID NO: 4008955 - DNA, 25 bp, Homo sapien
tcggacgcctctctttatagacccg

SEQ ID NO: 4008956 - DNA, 25 bp, Homo sapien
gacgcctctctttatagacccggag

SEQ ID NO: 4008957 - DNA, 25 bp, Homo sapien
tctgtgcgggatgcttgagaacgtc

SEQ ID NO: 4008958 - DNA, 25 bp, Homo sapien
cctgagtcggttccggccgcaaagg

SEQ ID NO: 4008959 - DNA, 25 bp, Homo sapien
tcccattttattggcatcgcactgt

SEQ ID NO: 4008960 - DNA, 25 bp, Homo sapien
gctgtggtggatctgacttgacatc

SEQ ID NO: 4008961 - DNA, 25 bp, Homo sapien
gcacagaattgacaccctaaagagg

SEQ ID NO: 4008962 - DNA, 25 bp, Homo sapien
tgaggtaaactaagtgtccactgcc

SEQ ID NO: 4008963 - DNA, 25 bp, Homo sapien
aaagcgctatggactacacgtgaca

SEQ ID NO: 4008964 - DNA, 25 bp, Homo sapien
taccatcgaacttttgccaatcagg

SEQ ID NO: 4008965 - DNA, 25 bp, Homo sapien
tcatctgtgattgcacaaccgaggg

SEQ ID NO: 4008966 - DNA, 25 bp, Homo sapien
gccacacggagattaaacaatgcca

SEQ ID NO: 4008967 - DNA, 25 bp, Homo sapien
tggtaagagtttcggagcccaaaca

SEQ ID NO: 4008968 - DNA, 25 bp, Homo sapien
atcgaagtagcgtattagagatagc

SEQ ID NO: 4008969 - DNA, 25 bp, Homo sapien
tggtaacattgggacaataaataag

SEQ ID NO: 4008970 - DNA, 25 bp, Homo sapien
tcacaaatgtagttaaacatgaggg

SEQ ID NO: 4008971 - DNA, 25 bp, Homo sapien
actccaatttctacaaacattagtg

SEQ ID NO: 4008972 - DNA, 25 bp, Homo sapien
aaacattagtggtgcattttggtaa

SEQ ID NO: 4008973 - DNA, 25 bp, Homo sapien
gactgcctgagaaacatgaagatct

SEQ ID NO: 4008974 - DNA, 25 bp, Homo sapien
catgaagatcttcaatgttagtact

SEQ ID NO: 4008975 - DNA, 25 bp, Homo sapien
gaagatcttcaatgttagtactttt

SEQ ID NO: 4008976 - DNA, 25 bp, Homo sapien
gttgactgcctgagaaacatgaaga

SEQ ID NO: 4008977 - DNA, 25 bp, Homo sapien
tagttacaaacctctctcttacatg

SEQ ID NO: 4008978 - DNA, 25 bp, Homo sapien
gccaaagctcttcaattacaacaca

SEQ ID NO: 4008979 - DNA, 25 bp, Homo sapien
gaaaggacaaggtgttcaatcagca

SEQ ID NO: 4008980 - DNA, 25 bp, Homo sapien
ctgcagtaaacccatgcataagtag

SEQ ID NO: 4008981 - DNA, 25 bp, Homo sapien
ttcagcactgaaaacttggatgaga

SEQ ID NO: 4008982 - DNA, 25 bp, Homo sapien
ggcatgctttggacttacttctttc

SEQ ID NO: 4008983 - DNA, 25 bp, Homo sapien
cagcagcagtacaaatgcactggct

SEQ ID NO: 4008984 - DNA, 25 bp, Homo sapien
tcaaaggtgggtgtgcctacataaa

SEQ ID NO: 4008985 - DNA, 25 bp, Homo sapien
attggctttcttctactaggttgtc

SEQ ID NO: 4008986 - DNA, 25 bp, Homo sapien
gaaatgcattctggatgccatcctt

SEQ ID NO: 4008987 - DNA, 25 bp, Homo sapien
ttctactaggttgtctgccaagact

SEQ ID NO: 4008988 - DNA, 25 bp, Homo sapien
cacgcaagaaatgggctaaaatccc

SEQ ID NO: 4008989 - DNA, 25 bp, Homo sapien
gacttcagaggccacgtggtaatgg

SEQ ID NO: 4008990 - DNA, 25 bp, Homo sapien
gcagccctggaaagttacatgcagt

SEQ ID NO: 4008991 - DNA, 25 bp, Homo sapien
ggagcctgagctagacttacgtgac

SEQ ID NO: 4008992 - DNA, 25 bp, Homo sapien
taatggtttacagtacgacgctccc

SEQ ID NO: 4008993 - DNA, 25 bp, Homo sapien
gtgtcatccctttgccggggccatg

SEQ ID NO: 4008994 - DNA, 25 bp, Homo sapien
atatcaaacatttcacgaatttgcg

SEQ ID NO: 4008995 - DNA, 25 bp, Homo sapien
atttgcgtgtcatccctttgccggg

SEQ ID NO: 4008996 - DNA, 25 bp, Homo sapien
tatcaaacatttcacgaatttgcgt

SEQ ID NO: 4008997 - DNA, 25 bp, Homo sapien
catagttggtgagaggaggtacaca

SEQ ID NO: 4008998 - DNA, 25 bp, Homo sapien
tcactgctgcacaccctggatttag

SEQ ID NO: 4008999 - DNA, 25 bp, Homo sapien
taggacaatgcttgacacacactag

SEQ ID NO: 4009000 - DNA, 25 bp, Homo sapien
gaaaactagaaagtggtcatcctcc

SEQ ID NO: 4009001 - DNA, 25 bp, Homo sapien
caaatgcatttagttcatggatgag

SEQ ID NO: 4009002 - DNA, 25 bp, Homo sapien
caacggaactacaggttgaccagat

SEQ ID NO: 4009003 - DNA, 25 bp, Homo sapien
catttagttcatggatgagaaactg

SEQ ID NO: 4009004 - DNA, 25 bp, Homo sapien
gagaaactgtctgtccaacggaact

SEQ ID NO: 4009005 - DNA, 25 bp, Homo sapien
gagatcacaatagagtgagactccg

SEQ ID NO: 4009006 - DNA, 25 bp, Homo sapien
agatcacaatagagtgagactccgt

SEQ ID NO: 4009007 - DNA, 25 bp, Homo sapien
tgagatcacaatagagtgagactcc

SEQ ID NO: 4009008 - DNA, 25 bp, Homo sapien
ctgagatcacaatagagtgagactc

SEQ ID NO: 4009009 - DNA, 25 bp, Homo sapien
ttgaaaacttcagctcggatccttg

SEQ ID NO: 4009010 - DNA, 25 bp, Homo sapien
tttgttgaattctaaatactctcga

SEQ ID NO: 4009011 - DNA, 25 bp, Homo sapien
gacagatgctgtatacttatatttg

SEQ ID NO: 4009012 - DNA, 25 bp, Homo sapien
gggttcacggtcatcatctagggca

SEQ ID NO: 4009013 - DNA, 25 bp, Homo sapien
caccactgtagctcattgtcacctc

SEQ ID NO: 4009014 - DNA, 25 bp, Homo sapien
accactgtagctcattgtcacctct

SEQ ID NO: 4009015 - DNA, 25 bp, Homo sapien
tggcaccactgtagctcattgtcac

SEQ ID NO: 4009016 - DNA, 25 bp, Homo sapien
gcaccactgtagctcattgtcacct

SEQ ID NO: 4009017 - DNA, 25 bp, Homo sapien
ggaattgtagtcatcagccctgagt

SEQ ID NO: 4009018 - DNA, 25 bp, Homo sapien
tgacgcctgtaaaagccaacccatg

SEQ ID NO: 4009019 - DNA, 25 bp, Homo sapien
tagggcagtgcctaacccaataggg

SEQ ID NO: 4009020 - DNA, 25 bp, Homo sapien
taaaactcgccagtgggcaacctct

SEQ ID NO: 4009021 - DNA, 25 bp, Homo sapien
gccttcaactctgccacagtcgcca

SEQ ID NO: 4009022 - DNA, 25 bp, Homo sapien
ccttcaactctgccacagtcgccat

SEQ ID NO: 4009023 - DNA, 25 bp, Homo sapien
agccttcaactctgccacagtcgcc

SEQ ID NO: 4009024 - DNA, 25 bp, Homo sapien
cagccttcaactctgccacagtcgc

SEQ ID NO: 4009025 - DNA, 25 bp, Homo sapien
ggtgtgtaagaacatatttatgctc

SEQ ID NO: 4009026 - DNA, 25 bp, Homo sapien
catggtctccattcttgtcgcctcg

SEQ ID NO: 4009027 - DNA, 25 bp, Homo sapien
gcctggattaggtgtgtaagaacat

SEQ ID NO: 4009028 - DNA, 25 bp, Homo sapien
ttgtcgcctcgacaccagatggcct

SEQ ID NO: 4009029 - DNA, 25 bp, Homo sapien
tattctcatggcttaccccaggctg

SEQ ID NO: 4009030 - DNA, 25 bp, Homo sapien
gcaggtttaagggttgacttatgcc

SEQ ID NO: 4009031 - DNA, 25 bp, Homo sapien
caggctggccacttgtaatatatgg

SEQ ID NO: 4009032 - DNA, 25 bp, Homo sapien
tatgcctgtgactgtggctatcttt

SEQ ID NO: 4009033 - DNA, 25 bp, Homo sapien
ttgcaatcagggagtgcgggcaact

SEQ ID NO: 4009034 - DNA, 25 bp, Homo sapien
ccgtgacattgacagggaccagctc

SEQ ID NO: 4009035 - DNA, 25 bp, Homo sapien
gctgagggttaacatcctgtcccag

SEQ ID NO: 4009036 - DNA, 25 bp, Homo sapien
ggcactagataaggcctggttgcaa

SEQ ID NO: 4009037 - DNA, 25 bp, Homo sapien
gtggtaacagtggagattgagagta

SEQ ID NO: 4009038 - DNA, 25 bp, Homo sapien
ttagtggtaacagtggagattgaga

SEQ ID NO: 4009039 - DNA, 25 bp, Homo sapien
ggtaacagtggagattgagagtatt

SEQ ID NO: 4009040 - DNA, 25 bp, Homo sapien
tagtggtaacagtggagattgagag

SEQ ID NO: 4009041 - DNA, 25 bp, Homo sapien
tttggcctgcacatgccagcccacg

SEQ ID NO: 4009042 - DNA, 25 bp, Homo sapien
tggcctgcacatgccagcccacgca

SEQ ID NO: 4009043 - DNA, 25 bp, Homo sapien
ctcttttggcctgcacatgccagcc

SEQ ID NO: 4009044 - DNA, 25 bp, Homo sapien
catggctcttttggcctgcacatgc

SEQ ID NO: 4009045 - DNA, 25 bp, Homo sapien
ggatcaatgaggataacctcaaaaa

SEQ ID NO: 4009046 - DNA, 25 bp, Homo sapien
acctcaaaaaatttgtgtgtggaat

SEQ ID NO: 4009047 - DNA, 25 bp, Homo sapien
aggataacctcaaaaaatttgtgtg

SEQ ID NO: 4009048 - DNA, 25 bp, Homo sapien
tatggaatggatcaatgaggataac

SEQ ID NO: 4009049 - DNA, 25 bp, Homo sapien
cttcacccatccagtaagaattcag

SEQ ID NO: 4009050 - DNA, 25 bp, Homo sapien
ttcacccatccagtaagaattcagg

SEQ ID NO: 4009051 - DNA, 25 bp, Homo sapien
caggactcttagagccccacagtgg

SEQ ID NO: 4009052 - DNA, 25 bp, Homo sapien
gaattcaggactcttagagccccac

SEQ ID NO: 4009053 - DNA, 25 bp, Homo sapien
tcactcctctgcaatcaactgtagg

SEQ ID NO: 4009054 - DNA, 25 bp, Homo sapien
ctcactcctctgcaatcaactgtag

SEQ ID NO: 4009055 - DNA, 25 bp, Homo sapien
actcctctgcaatcaactgtaggct

SEQ ID NO: 4009056 - DNA, 25 bp, Homo sapien
cactcctctgcaatcaactgtaggc

SEQ ID NO: 4009057 - DNA, 25 bp, Homo sapien
tacgaatcccgtagataacataacc

SEQ ID NO: 4009058 - DNA, 25 bp, Homo sapien
gcattttcggccatcacggagaata

SEQ ID NO: 4009059 - DNA, 25 bp, Homo sapien
gccatcacggagaatacgaatcccg

SEQ ID NO: 4009060 - DNA, 25 bp, Homo sapien
gaactgagcattttcggccatcacg

SEQ ID NO: 4009061 - DNA, 25 bp, Homo sapien
tgcgcccagtcccgatactttgttt

SEQ ID NO: 4009062 - DNA, 25 bp, Homo sapien
ctgcgcccagtcccgatactttgtt

SEQ ID NO: 4009063 - DNA, 25 bp, Homo sapien
actgcgcccagtcccgatactttgt

SEQ ID NO: 4009064 - DNA, 25 bp, Homo sapien
gacccgtgttggctgctttctgtaa

SEQ ID NO: 4009065 - DNA, 25 bp, Homo sapien
tgacctatgctgttggccgctgtag

SEQ ID NO: 4009066 - DNA, 25 bp, Homo sapien
cagatgatcttagctttgtgaccta

SEQ ID NO: 4009067 - DNA, 25 bp, Homo sapien
taacagtcatagttcacggtcagag

SEQ ID NO: 4009068 - DNA, 25 bp, Homo sapien
cgccctttgggtctgggctggccat

SEQ ID NO: 4009069 - DNA, 25 bp, Homo sapien
acagccgccctttgggtctgggctg

SEQ ID NO: 4009070 - DNA, 25 bp, Homo sapien
ccacagccgccctttgggtctgggc

SEQ ID NO: 4009071 - DNA, 25 bp, Homo sapien
ctccctcccacagccgccctttggg

SEQ ID NO: 4009072 - DNA, 25 bp, Homo sapien
catgatcattgcctctagagagagg

SEQ ID NO: 4009073 - DNA, 25 bp, Homo sapien
agggaatggaatgagaagacttgtc

SEQ ID NO: 4009074 - DNA, 25 bp, Homo sapien
tgtaacgtatgcttccttcgatttg

SEQ ID NO: 4009075 - DNA, 25 bp, Homo sapien
gaagacataagcaacccatgatcat

SEQ ID NO: 4009076 - DNA, 25 bp, Homo sapien
gatgtgagccatggtcactgcctag

SEQ ID NO: 4009077 - DNA, 25 bp, Homo sapien
gatctcatgaaaaaactgcaaccag

SEQ ID NO: 4009078 - DNA, 25 bp, Homo sapien
tgtcttgggaaaccaagagcaagga

SEQ ID NO: 4009079 - DNA, 25 bp, Homo sapien
tgaagaccacatcgtttgcaagtaa

SEQ ID NO: 4009080 - DNA, 25 bp, Homo sapien
tcgtgtttgattatagagggcttcc

SEQ ID NO: 4009081 - DNA, 25 bp, Homo sapien
cacacaggcctcatgatttaaccag

SEQ ID NO: 4009082 - DNA, 25 bp, Homo sapien
ggcactctttttgccaggtggcaca

SEQ ID NO: 4009083 - DNA, 25 bp, Homo sapien
cactcgggctccctacatggtgtgg

SEQ ID NO: 4009084 - DNA, 25 bp, Homo sapien
cctaggctaggagagcgcagtgtcc

SEQ ID NO: 4009085 - DNA, 25 bp, Homo sapien
tgggttcacttacatagcttctggg

SEQ ID NO: 4009086 - DNA, 25 bp, Homo sapien
tgggttgcaattaacgcccgtgccg

SEQ ID NO: 4009087 - DNA, 25 bp, Homo sapien
taggcaccttgtggaatcaggaacc

SEQ ID NO: 4009088 - DNA, 25 bp, Homo sapien
gagatcatcatcgatggcatcaaca

SEQ ID NO: 4009089 - DNA, 25 bp, Homo sapien
gaccctgggcttatttcggatcaac

SEQ ID NO: 4009090 - DNA, 25 bp, Homo sapien
tcaacatcgccaagatcggcctgca

SEQ ID NO: 4009091 - DNA, 25 bp, Homo sapien
cgagtctgccgaaggagagatcatc

SEQ ID NO: 4009092 - DNA, 25 bp, Homo sapien
tcccaggaaatagtgagaagctcgc

SEQ ID NO: 4009093 - DNA, 25 bp, Homo sapien
tccaggacacgaaaagaacccatct

SEQ ID NO: 4009094 - DNA, 25 bp, Homo sapien
caaccagctggaaggtactatgcca

SEQ ID NO: 4009095 - DNA, 25 bp, Homo sapien
gacttgctaagaattacgccgccga

SEQ ID NO: 4009096 - DNA, 25 bp, Homo sapien
tattgctaggtccttccggctctga

SEQ ID NO: 4009097 - DNA, 25 bp, Homo sapien
tgtcaatgtcaacaccctggctgtg

SEQ ID NO: 4009098 - DNA, 25 bp, Homo sapien
tggagctatcgatgaccacgggtca

SEQ ID NO: 4009099 - DNA, 25 bp, Homo sapien
tgatttaagggtctagccgggagcc

SEQ ID NO: 4009100 - DNA, 25 bp, Homo sapien
gccagtctgtaaaacaggcccttct

SEQ ID NO: 4009101 - DNA, 25 bp, Homo sapien
ctgccccttgtccatgaccagaacc

SEQ ID NO: 4009102 - DNA, 25 bp, Homo sapien
tcctgggccagtctgtaaaacaggc

SEQ ID NO: 4009103 - DNA, 25 bp, Homo sapien
tgactcctgggccagtctgtaaaac

SEQ ID NO: 4009104 - DNA, 25 bp, Homo sapien
cagtccatcacggagcgcaggcggt

SEQ ID NO: 4009105 - DNA, 25 bp, Homo sapien
gcaatgagcagcacagtgcactgtg

SEQ ID NO: 4009106 - DNA, 25 bp, Homo sapien
tgtgcaaaccagctcccgagcatgg

SEQ ID NO: 4009107 - DNA, 25 bp, Homo sapien
gtcttccggagaagggcacgtgcca

SEQ ID NO: 4009108 - DNA, 25 bp, Homo sapien
gtcccagccatggtgggacgaccat

SEQ ID NO: 4009109 - DNA, 25 bp, Homo sapien
tcccagccatggtgggacgaccata

SEQ ID NO: 4009110 - DNA, 25 bp, Homo sapien
aggtcccagccatggtgggacgacc

SEQ ID NO: 4009111 - DNA, 25 bp, Homo sapien
cccagccatggtgggacgaccatac

SEQ ID NO: 4009112 - DNA, 25 bp, Homo sapien
gtcctcgcctcggtcagcacacttg

SEQ ID NO: 4009113 - DNA, 25 bp, Homo sapien
aggctggccaccaaggctttgagct

SEQ ID NO: 4009114 - DNA, 25 bp, Homo sapien
tggccaccaaggctttgagctgcac

SEQ ID NO: 4009115 - DNA, 25 bp, Homo sapien
tcgcctcggtcagcacacttgtact

SEQ ID NO: 4009116 - DNA, 25 bp, Homo sapien
gcccagatagcctcgtccgagtgct

SEQ ID NO: 4009117 - DNA, 25 bp, Homo sapien
agggctgcccagatagcctcgtccg

SEQ ID NO: 4009118 - DNA, 25 bp, Homo sapien
tcctgcagcaggtcgaggttcatcc

SEQ ID NO: 4009119 - DNA, 25 bp, Homo sapien
ttcatccgcagagagccagggaaca

SEQ ID NO: 4009120 - DNA, 25 bp, Homo sapien
agcccactggccagggaggacttcc

SEQ ID NO: 4009121 - DNA, 25 bp, Homo sapien
tgtgtgcagccccacgtgggcaatg

SEQ ID NO: 4009122 - DNA, 25 bp, Homo sapien
gatgatgctgatcctggagcgcagt

SEQ ID NO: 4009123 - DNA, 25 bp, Homo sapien
aatggggaccccgtcgatccagatc

SEQ ID NO: 4009124 - DNA, 25 bp, Homo sapien
cctcattgtgtaaaggtctaccttc

SEQ ID NO: 4009125 - DNA, 25 bp, Homo sapien
tcttgctactattgcatcctcagtg

SEQ ID NO: 4009126 - DNA, 25 bp, Homo sapien
cattcatctgtctatccgtctctcg

SEQ ID NO: 4009127 - DNA, 25 bp, Homo sapien
ggagatctttctgctgtacccgaga

SEQ ID NO: 4009128 - DNA, 25 bp, Homo sapien
ccaaaactagaagctcatggagctc

SEQ ID NO: 4009129 - DNA, 25 bp, Homo sapien
caggaattcacactttaccccaagg

SEQ ID NO: 4009130 - DNA, 25 bp, Homo sapien
aatgttggctaagccctggcagagc

SEQ ID NO: 4009131 - DNA, 25 bp, Homo sapien
ctggaactagtagaaggttttgagc

SEQ ID NO: 4009132 - DNA, 25 bp, Homo sapien
ttctctcctgcgtggatcttgaagg

SEQ ID NO: 4009133 - DNA, 25 bp, Homo sapien
cgggagctcaggtcggtatcttagc

SEQ ID NO: 4009134 - DNA, 25 bp, Homo sapien
aaagtcccggaactcgatctgcccg

SEQ ID NO: 4009135 - DNA, 25 bp, Homo sapien
ggatcttgaaggacacgccctgcac

SEQ ID NO: 4009136 - DNA, 25 bp, Homo sapien
cacatgtgggcagcctccagggagc

SEQ ID NO: 4009137 - DNA, 25 bp, Homo sapien
tgcacatgtgggcagcctccaggga

SEQ ID NO: 4009138 - DNA, 25 bp, Homo sapien
aggggggctgagctgcacatgtggg

SEQ ID NO: 4009139 - DNA, 25 bp, Homo sapien
gccaggggggctgagctgcacatgt

SEQ ID NO: 4009140 - DNA, 25 bp, Homo sapien
ccttgggcgtccaggcatagtcctg

SEQ ID NO: 4009141 - DNA, 25 bp, Homo sapien
tgtccagttgcgaacaacccactgc

SEQ ID NO: 4009142 - DNA, 25 bp, Homo sapien
ctgcatccgctccactgacacgatg

SEQ ID NO: 4009143 - DNA, 25 bp, Homo sapien
gctgttctctaggtctgtccagttg

SEQ ID NO: 4009144 - DNA, 25 bp, Homo sapien
tggtgcaagaaagcctctctggctg

SEQ ID NO: 4009145 - DNA, 25 bp, Homo sapien
agggcttgcaacagcccccctggtt

SEQ ID NO: 4009146 - DNA, 25 bp, Homo sapien
ccacttgagggcttgcaacagcccc

SEQ ID NO: 4009147 - DNA, 25 bp, Homo sapien
gtgcaagaaagcctctctggctggg

SEQ ID NO: 4009148 - DNA, 25 bp, Homo sapien
agagaagcccacgaggccagcactg

SEQ ID NO: 4009149 - DNA, 25 bp, Homo sapien
cagagaagcccacgaggccagcact

SEQ ID NO: 4009150 - DNA, 25 bp, Homo sapien
agaagcccacgaggccagcactgag

SEQ ID NO: 4009151 - DNA, 25 bp, Homo sapien
gacagagaagcccacgaggccagca

SEQ ID NO: 4009152 - DNA, 25 bp, Homo sapien
agctgcaaacaccaggccattcccc

SEQ ID NO: 4009153 - DNA, 25 bp, Homo sapien
ggccattccccaggagctccacatt

SEQ ID NO: 4009154 - DNA, 25 bp, Homo sapien
ggagctccacattggccgcaagcca

SEQ ID NO: 4009155 - DNA, 25 bp, Homo sapien
aacaccaggccattccccaggagct

SEQ ID NO: 4009156 - DNA, 25 bp, Homo sapien
cctcaggtctcaccctctaaggata

SEQ ID NO: 4009157 - DNA, 25 bp, Homo sapien
gaattgcaaggtcttctctgccctg

SEQ ID NO: 4009158 - DNA, 25 bp, Homo sapien
ctgggtgacctctctaccatacaat

SEQ ID NO: 4009159 - DNA, 25 bp, Homo sapien
ctaaggatatggatgaattgcaagg

SEQ ID NO: 4009160 - DNA, 25 bp, Homo sapien
tagctggctgactccaagcgtctca

SEQ ID NO: 4009161 - DNA, 25 bp, Homo sapien
tggcatgagctaaccacatacaggc

SEQ ID NO: 4009162 - DNA, 25 bp, Homo sapien
cctggaacgtctcagccatgtggga

SEQ ID NO: 4009163 - DNA, 25 bp, Homo sapien
tacgcgagcattgttctgagccaca

SEQ ID NO: 4009164 - DNA, 25 bp, Homo sapien
acagacatagagaggtagtttccag

SEQ ID NO: 4009165 - DNA, 25 bp, Homo sapien
tgaccttgggctagttgcttgccct

SEQ ID NO: 4009166 - DNA, 25 bp, Homo sapien
cttgggctagttgcttgccctctct

SEQ ID NO: 4009167 - DNA, 25 bp, Homo sapien
gaagccacagacatagagaggtagt

SEQ ID NO: 4009168 - DNA, 25 bp, Homo sapien
tgtctggaatgtccacgtcaaccgt

SEQ ID NO: 4009169 - DNA, 25 bp, Homo sapien
caggagtccaaaggcgtacatcagc

SEQ ID NO: 4009170 - DNA, 25 bp, Homo sapien
catcagcagggaccggagtttgtct

SEQ ID NO: 4009171 - DNA, 25 bp, Homo sapien
gaaacccagcgtagaggagaaacag

SEQ ID NO: 4009172 - DNA, 25 bp, Homo sapien
gctgatgggagatcgcaccacatcc

SEQ ID NO: 4009173 - DNA, 25 bp, Homo sapien
gccatggaggcaaacagcccaatgg

SEQ ID NO: 4009174 - DNA, 25 bp, Homo sapien
ggtgaccaatgggtgtccgctcaaa

SEQ ID NO: 4009175 - DNA, 25 bp, Homo sapien
aagagcaacctggatgcccgggccc

SEQ ID NO: 4009176 - DNA, 25 bp, Homo sapien
aggctcagccagtagccccggcaga

SEQ ID NO: 4009177 - DNA, 25 bp, Homo sapien
tactgcagggtcgtccgcccacagg

SEQ ID NO: 4009178 - DNA, 25 bp, Homo sapien
cccacggcacgcaggtaggccaggt

SEQ ID NO: 4009179 - DNA, 25 bp, Homo sapien
cagaaggaggccacttgctggcaga

SEQ ID NO: 4009180 - DNA, 25 bp, Homo sapien
tgccaagtgctacatttggtgggaa

SEQ ID NO: 4009181 - DNA, 25 bp, Homo sapien
agaaaggtgagtatcactgccaagt

SEQ ID NO: 4009182 - DNA, 25 bp, Homo sapien
tcactgccaagtgctacatttggtg

SEQ ID NO: 4009183 - DNA, 25 bp, Homo sapien
caagaaaggtgagtatcactgccaa

SEQ ID NO: 4009184 - DNA, 25 bp, Homo sapien
gaagtggtacggtccttctcaggga

SEQ ID NO: 4009185 - DNA, 25 bp, Homo sapien
gcttctgaagtggtacggtccttct

SEQ ID NO: 4009186 - DNA, 25 bp, Homo sapien
ggcttctgaagtggtacggtccttc

SEQ ID NO: 4009187 - DNA, 25 bp, Homo sapien
tctgaagtggtacggtccttctcag

SEQ ID NO: 4009188 - DNA, 25 bp, Homo sapien
ctaagctcgggcctcctgcctgcag

SEQ ID NO: 4009189 - DNA, 25 bp, Homo sapien
cgcgtctaagctcgggcctcctgcc

SEQ ID NO: 4009190 - DNA, 25 bp, Homo sapien
ctctcgcgtctaagctcgggcctcc

SEQ ID NO: 4009191 - DNA, 25 bp, Homo sapien
ctcgcgtctaagctcgggcctcctg

SEQ ID NO: 4009192 - DNA, 25 bp, Homo sapien
tggcttgatccagaagacacatgag

SEQ ID NO: 4009193 - DNA, 25 bp, Homo sapien
agcactatgatccaatcagcctggg

SEQ ID NO: 4009194 - DNA, 25 bp, Homo sapien
tggagtgcgtgcgtcacgagaatcc

SEQ ID NO: 4009195 - DNA, 25 bp, Homo sapien
gcagaagctcctggtaggaacccat

SEQ ID NO: 4009196 - DNA, 25 bp, Homo sapien
tttctgtatacagcccgggccaggc

SEQ ID NO: 4009197 - DNA, 25 bp, Homo sapien
ggcccaatgacctggttgaagacat

SEQ ID NO: 4009198 - DNA, 25 bp, Homo sapien
acatgctggccaacgtgggcatcca

SEQ ID NO: 4009199 - DNA, 25 bp, Homo sapien
tctggcctccggagagattcatgcc

SEQ ID NO: 4009200 - DNA, 25 bp, Homo sapien
cttctagtactctctccagccaggg

SEQ ID NO: 4009201 - DNA, 25 bp, Homo sapien
gctcctgcccgaagcacacattctc

SEQ ID NO: 4009202 - DNA, 25 bp, Homo sapien
ccccaattgaagtgtggattccctc

SEQ ID NO: 4009203 - DNA, 25 bp, Homo sapien
tctctaccacagaggtgttctgcac

SEQ ID NO: 4009204 - DNA, 25 bp, Homo sapien
ctccacctttgacagctccccaagg

SEQ ID NO: 4009205 - DNA, 25 bp, Homo sapien
ctcgatgctcacgaacccctccacc

SEQ ID NO: 4009206 - DNA, 25 bp, Homo sapien
cgatgctcacgaacccctccacctt

SEQ ID NO: 4009207 - DNA, 25 bp, Homo sapien
ccctccacctttgacagctccccaa

SEQ ID NO: 4009208 - DNA, 25 bp, Homo sapien
tggaccgacaacagccagcagacag

SEQ ID NO: 4009209 - DNA, 25 bp, Homo sapien
cagcagacagccctggggcaccgtg

SEQ ID NO: 4009210 - DNA, 25 bp, Homo sapien
agccctggggcaccgtgaggtttat

SEQ ID NO: 4009211 - DNA, 25 bp, Homo sapien
ctggaccgacaacagccagcagaca

SEQ ID NO: 4009212 - DNA, 25 bp, Homo sapien
tatggtgatgcaatccttcccggca

SEQ ID NO: 4009213 - DNA, 25 bp, Homo sapien
ctgtgtatggtgatgcaatccttcc

SEQ ID NO: 4009214 - DNA, 25 bp, Homo sapien
ttcctgggaccaggcgaaggtggca

SEQ ID NO: 4009215 - DNA, 25 bp, Homo sapien
ctgggaccaggcgaaggtggcactg

SEQ ID NO: 4009216 - DNA, 25 bp, Homo sapien
ttgagtctacgacaccagggtcaac

SEQ ID NO: 4009217 - DNA, 25 bp, Homo sapien
ccagaggaacttgagtctacgacac

SEQ ID NO: 4009218 - DNA, 25 bp, Homo sapien
gaggaacttgagtctacgacaccag

SEQ ID NO: 4009219 - DNA, 25 bp, Homo sapien
gaacttgagtctacgacaccagggt

SEQ ID NO: 4009220 - DNA, 25 bp, Homo sapien
tgaccagacggtcaaaggacacccg

SEQ ID NO: 4009221 - DNA, 25 bp, Homo sapien
agaggaaggtgaccagacggtcaaa

SEQ ID NO: 4009222 - DNA, 25 bp, Homo sapien
ggtgaccagacggtcaaaggacacc

SEQ ID NO: 4009223 - DNA, 25 bp, Homo sapien
gaaggtgaccagacggtcaaaggac

SEQ ID NO: 4009224 - DNA, 25 bp, Homo sapien
gaggatgttgagaactgtgagagtc

SEQ ID NO: 4009225 - DNA, 25 bp, Homo sapien
ccagagtgtggacagcaaacaccac

SEQ ID NO: 4009226 - DNA, 25 bp, Homo sapien
tcggccaccagagtgtggacagcaa

SEQ ID NO: 4009227 - DNA, 25 bp, Homo sapien
ctgcattcatagcattctcggccac

SEQ ID NO: 4009228 - DNA, 25 bp, Homo sapien
ggaggccggaggtccgcaaggcgcc

SEQ ID NO: 4009229 - DNA, 25 bp, Homo sapien
gacaccagcgacacagagaagagga

SEQ ID NO: 4009230 - DNA, 25 bp, Homo sapien
acttgatggtcttcgagttcctgag

SEQ ID NO: 4009231 - DNA, 25 bp, Homo sapien
tcctgaggatagagctggtgagccg

SEQ ID NO: 4009232 - DNA, 25 bp, Homo sapien
agacgacaagaacaaagccagaccc

SEQ ID NO: 4009233 - DNA, 25 bp, Homo sapien
tctcccacaccaggacctgtggctt

SEQ ID NO: 4009234 - DNA, 25 bp, Homo sapien
cagacccgtgggctcgcactcagct

SEQ ID NO: 4009235 - DNA, 25 bp, Homo sapien
gtggcttcctccctacttcctgcct

SEQ ID NO: 4009236 - DNA, 25 bp, Homo sapien
cagcgatggcagtgagggcggaggg

SEQ ID NO: 4009237 - DNA, 25 bp, Homo sapien
tgccagagatagacgaagcagacca

SEQ ID NO: 4009238 - DNA, 25 bp, Homo sapien
gtagaggacgctctcggtcagccgc

SEQ ID NO: 4009239 - DNA, 25 bp, Homo sapien
acgatccagacgagaggcagccaca

SEQ ID NO: 4009240 - DNA, 25 bp, Homo sapien
cagccacagcccgttgaggtagagg

SEQ ID NO: 4009241 - DNA, 25 bp, Homo sapien
cagcctcacatctgccttaaccctg

SEQ ID NO: 4009242 - DNA, 25 bp, Homo sapien
ggggtcacagtggacctcttccagc

SEQ ID NO: 4009243 - DNA, 25 bp, Homo sapien
taaccctggggtcacagtggacctc

SEQ ID NO: 4009244 - DNA, 25 bp, Homo sapien
ctgccttaaccctggggtcacagtg

SEQ ID NO: 4009245 - DNA, 25 bp, Homo sapien
tccagagtcccaggaacggacaaga

SEQ ID NO: 4009246 - DNA, 25 bp, Homo sapien
ataccccacaggagccaatagctct

SEQ ID NO: 4009247 - DNA, 25 bp, Homo sapien
agtccagggacttagcttccagagt

SEQ ID NO: 4009248 - DNA, 25 bp, Homo sapien
tcagatgctccataccccacaggag

SEQ ID NO: 4009249 - DNA, 25 bp, Homo sapien
tggaggcttgggatcaccaataaac

SEQ ID NO: 4009250 - DNA, 25 bp, Homo sapien
tttctgtacaccaggccagtgatgg

SEQ ID NO: 4009251 - DNA, 25 bp, Homo sapien
tgctcaaacagcgtttgcaggcagg

SEQ ID NO: 4009252 - DNA, 25 bp, Homo sapien
gcaccttgagcctgtacatgttctg

SEQ ID NO: 4009253 - DNA, 25 bp, Homo sapien
gtagaatggaacacctgccagatgg

SEQ ID NO: 4009254 - DNA, 25 bp, Homo sapien
tcccttcttgccgtaggaagggctc

SEQ ID NO: 4009255 - DNA, 25 bp, Homo sapien
gccttcagcagtgggcgccactggc

SEQ ID NO: 4009256 - DNA, 25 bp, Homo sapien
ggacagtgaacctgaagacatcact

SEQ ID NO: 4009257 - DNA, 25 bp, Homo sapien
ttttaaatgctattgccttgttgtg

SEQ ID NO: 4009258 - DNA, 25 bp, Homo sapien
ccttttaaatgctattgccttgttg

SEQ ID NO: 4009259 - DNA, 25 bp, Homo sapien
tttaaatgctattgccttgttgtgc

SEQ ID NO: 4009260 - DNA, 25 bp, Homo sapien
ttccttttaaatgctattgccttgt

SEQ ID NO: 4009261 - DNA, 25 bp, Homo sapien
aggagttttctctcccaagcgacca

SEQ ID NO: 4009262 - DNA, 25 bp, Homo sapien
ccaagcgaccagaggtcttttggtc

SEQ ID NO: 4009263 - DNA, 25 bp, Homo sapien
ttttctctcccaagcgaccagaggt

SEQ ID NO: 4009264 - DNA, 25 bp, Homo sapien
gggctgcactgcggttcctcatcca

SEQ ID NO: 4009265 - DNA, 25 bp, Homo sapien
ctgccccagtctctggacaggggtt

SEQ ID NO: 4009266 - DNA, 25 bp, Homo sapien
ggctgccccagtctctggacagggg

SEQ ID NO: 4009267 - DNA, 25 bp, Homo sapien
cagaacgtggctttggaggggaagg

SEQ ID NO: 4009268 - DNA, 25 bp, Homo sapien
gctgccccagtctctggacaggggt

SEQ ID NO: 4009269 - DNA, 25 bp, Homo sapien
gtggcggacagggtcgctctggaag

SEQ ID NO: 4009270 - DNA, 25 bp, Homo sapien
aggtggcggacagggtcgctctgga

SEQ ID NO: 4009271 - DNA, 25 bp, Homo sapien
gggttgatccgccaggcaggacagc

SEQ ID NO: 4009272 - DNA, 25 bp, Homo sapien
agaaggggggttgatccgccaggca

SEQ ID NO: 4009273 - DNA, 25 bp, Homo sapien
tcaaggacacgcagatgatctggtc

SEQ ID NO: 4009274 - DNA, 25 bp, Homo sapien
tctggtcagaaacaccctaattttc

SEQ ID NO: 4009275 - DNA, 25 bp, Homo sapien
tgatctggtccaaattgtgatgctc

SEQ ID NO: 4009276 - DNA, 25 bp, Homo sapien
gctgccctgtcatctggtcagaaac

SEQ ID NO: 4009277 - DNA, 25 bp, Homo sapien
ggtgtgaatcaggaacactgcgaag

SEQ ID NO: 4009278 - DNA, 25 bp, Homo sapien
tgtgaatcaggaacactgcgaagct

SEQ ID NO: 4009279 - DNA, 25 bp, Homo sapien
gtgtgaatcaggaacactgcgaagc

SEQ ID NO: 4009280 - DNA, 25 bp, Homo sapien
cgggctccagactgaaggcatcatt

SEQ ID NO: 4009281 - DNA, 25 bp, Homo sapien
gaagccgggctccagactgaaggca

SEQ ID NO: 4009282 - DNA, 25 bp, Homo sapien
gaggaagccgggctccagactgaag

SEQ ID NO: 4009283 - DNA, 25 bp, Homo sapien
tctccactgtggcaggcaaagcagc

SEQ ID NO: 4009284 - DNA, 25 bp, Homo sapien
gacagccacgctggaggtacacagg

SEQ ID NO: 4009285 - DNA, 25 bp, Homo sapien
gggcctcaggcgttccctgttggat

SEQ ID NO: 4009286 - DNA, 25 bp, Homo sapien
ggtgagccacacagtaggatgaatg

SEQ ID NO: 4009287 - DNA, 25 bp, Homo sapien
tttccaaagagcgacagccacgctg

SEQ ID NO: 4009288 - DNA, 25 bp, Homo sapien
cgcatgcgtggattttcggaattac

SEQ ID NO: 4009289 - DNA, 25 bp, Homo sapien
tttaaaaggttcatcctaatgtggc

SEQ ID NO: 4009290 - DNA, 25 bp, Homo sapien
ttctacaccccgataggaggagtct

SEQ ID NO: 4009291 - DNA, 25 bp, Homo sapien
tggtagctataaactgtccaggaac

SEQ ID NO: 4009292 - DNA, 25 bp, Homo sapien
ttaagacttcaccaggttccagcct

SEQ ID NO: 4009293 - DNA, 25 bp, Homo sapien
cccgaacattgcctggttccaggct

SEQ ID NO: 4009294 - DNA, 25 bp, Homo sapien
cctgcctcccccgaacattgcctgg

SEQ ID NO: 4009295 - DNA, 25 bp, Homo sapien
tcccccgaacattgcctggttccag

SEQ ID NO: 4009296 - DNA, 25 bp, Homo sapien
gcggcaggttcaggctctgtctggt

SEQ ID NO: 4009297 - DNA, 25 bp, Homo sapien
cggcaggttcaggctctgtctggtt

SEQ ID NO: 4009298 - DNA, 25 bp, Homo sapien
cccctgccccgcgcagggctcagca

SEQ ID NO: 4009299 - DNA, 25 bp, Homo sapien
ccgcgcagggctcagcaggcgcggc

SEQ ID NO: 4009300 - DNA, 25 bp, Homo sapien
cgcagggctcagcaggcgcggccat

SEQ ID NO: 4009301 - DNA, 25 bp, Homo sapien
ccctgccccgcgcagggctcagcag

SEQ ID NO: 4009302 - DNA, 25 bp, Homo sapien
ggtcccagcgtctgtctgtcgctaa

SEQ ID NO: 4009303 - DNA, 25 bp, Homo sapien
gtcccagcgtctgtctgtcgctaag

SEQ ID NO: 4009304 - DNA, 25 bp, Homo sapien
ccttctgtcgtcgtgggtcccagcg

SEQ ID NO: 4009305 - DNA, 25 bp, Homo sapien
cggcgccttctgtcgtcgtgggtcc

SEQ ID NO: 4009306 - DNA, 25 bp, Homo sapien
tacttctgcttgactggtgcctctc

SEQ ID NO: 4009307 - DNA, 25 bp, Homo sapien
caagacctatccagttattgcaggc

SEQ ID NO: 4009308 - DNA, 25 bp, Homo sapien
acatgttagtatactggcagcagca

SEQ ID NO: 4009309 - DNA, 25 bp, Homo sapien
tcatagtttaccctgccctgtgtca

SEQ ID NO: 4009310 - DNA, 25 bp, Homo sapien
tcttgttgactgtggtctctgtggc

SEQ ID NO: 4009311 - DNA, 25 bp, Homo sapien
aaggcagtgtgaaatgggtttcagg

SEQ ID NO: 4009312 - DNA, 25 bp, Homo sapien
tctggtgtatttgttccagtgcagg

SEQ ID NO: 4009313 - DNA, 25 bp, Homo sapien
gggaagaagctgtaaacaggatctt

SEQ ID NO: 4009314 - DNA, 25 bp, Homo sapien
cataaccagggtttgttctcaaggc

SEQ ID NO: 4009315 - DNA, 25 bp, Homo sapien
tgttgaggaaacaatgagccagcct

SEQ ID NO: 4009316 - DNA, 25 bp, Homo sapien
tgagcacgttgccaccctcaacata

SEQ ID NO: 4009317 - DNA, 25 bp, Homo sapien
caggaaggatgcctgttgaggaaac

SEQ ID NO: 4009318 - DNA, 25 bp, Homo sapien
gaagtgtggccaaaatactggttaa

SEQ ID NO: 4009319 - DNA, 25 bp, Homo sapien
cagcagggtggttttagctaatttc

SEQ ID NO: 4009320 - DNA, 25 bp, Homo sapien
tctggcaagtgatgaaatgtacccc

SEQ ID NO: 4009321 - DNA, 25 bp, Homo sapien
tgttccttctcgtgcatgggtccgt

SEQ ID NO: 4009322 - DNA, 25 bp, Homo sapien
tactgtttacccagagagctgcgtg

SEQ ID NO: 4009323 - DNA, 25 bp, Homo sapien
caagcctgtgaagcctcagtctgac

SEQ ID NO: 4009324 - DNA, 25 bp, Homo sapien
tggatatgactcttccgtgggcccc

SEQ ID NO: 4009325 - DNA, 25 bp, Homo sapien
taatgtaaaacagtgctccgggctc

SEQ ID NO: 4009326 - DNA, 25 bp, Homo sapien
aagagcgtgacttctagcaggcagg

SEQ ID NO: 4009327 - DNA, 25 bp, Homo sapien
tatgtggttcgcgtttggaagcaga

SEQ ID NO: 4009328 - DNA, 25 bp, Homo sapien
cactctggcttcgttaagttgtggg

SEQ ID NO: 4009329 - DNA, 25 bp, Homo sapien
taaagtgttccctcctgatctgtgg

SEQ ID NO: 4009330 - DNA, 25 bp, Homo sapien
gatcccgaccttgccagtggtagaa

SEQ ID NO: 4009331 - DNA, 25 bp, Homo sapien
tgatcccgaccttgccagtggtaga

SEQ ID NO: 4009332 - DNA, 25 bp, Homo sapien
taggatttgccagcttacgagcctc

SEQ ID NO: 4009333 - DNA, 25 bp, Homo sapien
tcccttagaagtcagccccgttgtg

SEQ ID NO: 4009334 - DNA, 25 bp, Homo sapien
tgacagccttatcagaagccacagt

SEQ ID NO: 4009335 - DNA, 25 bp, Homo sapien
cgccactgatggaatagcccgctga

SEQ ID NO: 4009336 - DNA, 25 bp, Homo sapien
tcaccagctcacgtggagcagtgct

SEQ ID NO: 4009337 - DNA, 25 bp, Homo sapien
tagagacctggttagaaagtgctgg

SEQ ID NO: 4009338 - DNA, 25 bp, Homo sapien
ccttgttactcacagtagagacctg

SEQ ID NO: 4009339 - DNA, 25 bp, Homo sapien
gagtttttctcatgacccacgagga

SEQ ID NO: 4009340 - DNA, 25 bp, Homo sapien
cagtctcacttgggacaggccacag

SEQ ID NO: 4009341 - DNA, 25 bp, Homo sapien
gggcccgcaccccatgtcccttgtc

SEQ ID NO: 4009342 - DNA, 25 bp, Homo sapien
ggaaggggacagttgcagtctcact

SEQ ID NO: 4009343 - DNA, 25 bp, Homo sapien
ataaaagccaaaagcatgcgtcagc

SEQ ID NO: 4009344 - DNA, 25 bp, Homo sapien
gcaatgaatggaccctcctgtcact

SEQ ID NO: 4009345 - DNA, 25 bp, Homo sapien
gtcaaagaagtatttaagctgtgct

SEQ ID NO: 4009346 - DNA, 25 bp, Homo sapien
gaagtatttaagctgtgctgtggtg

SEQ ID NO: 4009347 - DNA, 25 bp, Homo sapien
gaatggaccctcctgtcactctgct

SEQ ID NO: 4009348 - DNA, 25 bp, Homo sapien
tcccggtttcaagcgatttcctgcc

SEQ ID NO: 4009349 - DNA, 25 bp, Homo sapien
tccctacctcaggtgattcatcaac

SEQ ID NO: 4009350 - DNA, 25 bp, Homo sapien
actccctacctcaggtgattcatca

SEQ ID NO: 4009351 - DNA, 25 bp, Homo sapien
ctacctcaggtgattcatcaacctt

SEQ ID NO: 4009352 - DNA, 25 bp, Homo sapien
tggagcacatgtggtaggatttttt

SEQ ID NO: 4009353 - DNA, 25 bp, Homo sapien
taatcatctggatttctgctcaggc

SEQ ID NO: 4009354 - DNA, 25 bp, Homo sapien
gctcaggctcctagagtctctgcca

SEQ ID NO: 4009355 - DNA, 25 bp, Homo sapien
aaggccaccttggagacagagcttg

SEQ ID NO: 4009356 - DNA, 25 bp, Homo sapien
cgggcccagcggcacccgggagagg

SEQ ID NO: 4009357 - DNA, 25 bp, Homo sapien
cacagcgctgtgagtagcgggccca

SEQ ID NO: 4009358 - DNA, 25 bp, Homo sapien
gccatgcgcgcgctgccctaacgat

SEQ ID NO: 4009359 - DNA, 25 bp, Homo sapien
tgccgcgtcaactgctcgggccgcg

SEQ ID NO: 4009360 - DNA, 25 bp, Homo sapien
cctgccttgtgttgtcctcttaggc

SEQ ID NO: 4009361 - DNA, 25 bp, Homo sapien
cctgagctggcaagattccgaatgc

SEQ ID NO: 4009362 - DNA, 25 bp, Homo sapien
agctgtccgggagagaagggcgctg

SEQ ID NO: 4009363 - DNA, 25 bp, Homo sapien
acagaattgcatcagacctacccca

SEQ ID NO: 4009364 - DNA, 25 bp, Homo sapien
ttgctcttgtctccaggccgcagtg

SEQ ID NO: 4009365 - DNA, 25 bp, Homo sapien
cgagtacctggtagctgggtttaca

SEQ ID NO: 4009366 - DNA, 25 bp, Homo sapien
ctcccgagtacctggtagctgggtt

SEQ ID NO: 4009367 - DNA, 25 bp, Homo sapien
agccagcgcgcccagacaaaaatgt

SEQ ID NO: 4009368 - DNA, 25 bp, Homo sapien
aatgaagaattctacctggctgtga

SEQ ID NO: 4009369 - DNA, 25 bp, Homo sapien
gcaaagcagtggaactggagaaaga

SEQ ID NO: 4009370 - DNA, 25 bp, Homo sapien
tgtgaacaccactgtgcttggacca

SEQ ID NO: 4009371 - DNA, 25 bp, Homo sapien
aaagaatgaagaattctacctggct

SEQ ID NO: 4009372 - DNA, 25 bp, Homo sapien
tcttggccttaggtgatctgcttgc

SEQ ID NO: 4009373 - DNA, 25 bp, Homo sapien
gcttgcctcggcctcccgaagtgct

SEQ ID NO: 4009374 - DNA, 25 bp, Homo sapien
ctcttggccttaggtgatctgcttg

SEQ ID NO: 4009375 - DNA, 25 bp, Homo sapien
actcttggccttaggtgatctgctt

SEQ ID NO: 4009376 - DNA, 25 bp, Homo sapien
tgtgtgtcaggagggtatttttggc

SEQ ID NO: 4009377 - DNA, 25 bp, Homo sapien
tagtatgtcgtctaagttgctagtg

SEQ ID NO: 4009378 - DNA, 25 bp, Homo sapien
ggcctttagtatgtcgtctaagttg

SEQ ID NO: 4009379 - DNA, 25 bp, Homo sapien
tatgtcgtctaagttgctagtgctt

SEQ ID NO: 4009380 - DNA, 25 bp, Homo sapien
ccacggtgctgtgttaccggcgtgt

SEQ ID NO: 4009381 - DNA, 25 bp, Homo sapien
tccttccgtctcagctcccacggtg

SEQ ID NO: 4009382 - DNA, 25 bp, Homo sapien
tgttaccggcgtgtgccccagtgcc

SEQ ID NO: 4009383 - DNA, 25 bp, Homo sapien
cgtctcagctcccacggtgctgtgt

SEQ ID NO: 4009384 - DNA, 25 bp, Homo sapien
cattagtagtactacatggctggct

SEQ ID NO: 4009385 - DNA, 25 bp, Homo sapien
ggtggaccatcaacgacaagcagtc

SEQ ID NO: 4009386 - DNA, 25 bp, Homo sapien
tgtcatttatcagagcgcggcggtc

SEQ ID NO: 4009387 - DNA, 25 bp, Homo sapien
tctccagcccgacgggaggtgtgtc

SEQ ID NO: 4009388 - DNA, 25 bp, Homo sapien
gaccaccacatccacgggcagcgca

SEQ ID NO: 4009389 - DNA, 25 bp, Homo sapien
gcaggcatgtgactggtgctgcggc

SEQ ID NO: 4009390 - DNA, 25 bp, Homo sapien
tggtgctggatgagaccaccacatc

SEQ ID NO: 4009391 - DNA, 25 bp, Homo sapien
ccacgggcagcgcaggcatgtgact

SEQ ID NO: 4009392 - DNA, 25 bp, Homo sapien
cagccaagatctacactattatgtc

SEQ ID NO: 4009393 - DNA, 25 bp, Homo sapien
gcccagccaagatctacactattat

SEQ ID NO: 4009394 - DNA, 25 bp, Homo sapien
gccaagatctacactattatgtcac

SEQ ID NO: 4009395 - DNA, 25 bp, Homo sapien
agatctacactattatgtcacccca

SEQ ID NO: 4009396 - DNA, 25 bp, Homo sapien
tggctcaagacaactttgcttcttt

SEQ ID NO: 4009397 - DNA, 25 bp, Homo sapien
gctttataccaagaaagacaacacc

SEQ ID NO: 4009398 - DNA, 25 bp, Homo sapien
gaatcccacggtgatatctgaggga

SEQ ID NO: 4009399 - DNA, 25 bp, Homo sapien
ttttttgtagcagtggaatcccacg

SEQ ID NO: 4009400 - DNA, 25 bp, Homo sapien
gtccagactggtctcgaacttctga

SEQ ID NO: 4009401 - DNA, 25 bp, Homo sapien
tccagactggtctcgaacttctgac

SEQ ID NO: 4009402 - DNA, 25 bp, Homo sapien
tttgggttcaagcaattctcctgcc

SEQ ID NO: 4009403 - DNA, 25 bp, Homo sapien
tctcagctcactgccttttgggttc

SEQ ID NO: 4009404 - DNA, 25 bp, Homo sapien
cctgacttaggagccattccgatca

SEQ ID NO: 4009405 - DNA, 25 bp, Homo sapien
tttctaattcaatagatgcgcccag

SEQ ID NO: 4009406 - DNA, 25 bp, Homo sapien
tagatgcgcccagcattcagattgc

SEQ ID NO: 4009407 - DNA, 25 bp, Homo sapien
ggagccattccgatcatttctaatt

SEQ ID NO: 4009408 - DNA, 25 bp, Homo sapien
ctaagctggttcttgtgtggcctct

SEQ ID NO: 4009409 - DNA, 25 bp, Homo sapien
agctgccgagtcctatgattacacg

SEQ ID NO: 4009410 - DNA, 25 bp, Homo sapien
gcctctgtaccttcaaaagctgccg

SEQ ID NO: 4009411 - DNA, 25 bp, Homo sapien
ttaaatgatgctcagctaagctggt

SEQ ID NO: 4009412 - DNA, 25 bp, Homo sapien
gaggatagacatagacactcctgtg

SEQ ID NO: 4009413 - DNA, 25 bp, Homo sapien
gaaaggtgcaaaaatctatcaccag

SEQ ID NO: 4009414 - DNA, 25 bp, Homo sapien
aagggtgatattatgacactgacac

SEQ ID NO: 4009415 - DNA, 25 bp, Homo sapien
tggtggcggtaattttgtccatcaa

SEQ ID NO: 4009416 - DNA, 25 bp, Homo sapien
cctcagcggatgataatctcaagac

SEQ ID NO: 4009417 - DNA, 25 bp, Homo sapien
ctcagcggatgataatctcaagaca

SEQ ID NO: 4009418 - DNA, 25 bp, Homo sapien
ctcagcggatgataatctcaagaca

SEQ ID NO: 4009419 - DNA, 25 bp, Homo sapien
cctcagcggatgataatctcaagac

SEQ ID NO: 4009420 - DNA, 25 bp, Homo sapien
tgattgacgcactgccaggagtagc

SEQ ID NO: 4009421 - DNA, 25 bp, Homo sapien
tctgattgacgcactgccaggagta

SEQ ID NO: 4009422 - DNA, 25 bp, Homo sapien
aggacgctctgattgacgcactgcc

SEQ ID NO: 4009423 - DNA, 25 bp, Homo sapien
cgctctgattgacgcactgccagga

SEQ ID NO: 4009424 - DNA, 25 bp, Homo sapien
ggagctactgtacacctggccttat

SEQ ID NO: 4009425 - DNA, 25 bp, Homo sapien
ggtaatgattccattggccccacca

SEQ ID NO: 4009426 - DNA, 25 bp, Homo sapien
tgaaaatccccgtcttgggtaatga

SEQ ID NO: 4009427 - DNA, 25 bp, Homo sapien
ggctacaccctctcgtaaaattgga

SEQ ID NO: 4009428 - DNA, 25 bp, Homo sapien
aggctagagtgcatgattttgggtc

SEQ ID NO: 4009429 - DNA, 25 bp, Homo sapien
taaacaaatctctactaaccccatc

SEQ ID NO: 4009430 - DNA, 25 bp, Homo sapien
gcaaaagcgagaccccaggctagag

SEQ ID NO: 4009431 - DNA, 25 bp, Homo sapien
cacgagaatcatttgcatcttggag

SEQ ID NO: 4009432 - DNA, 25 bp, Homo sapien
tagttggaactacagctccacacca

SEQ ID NO: 4009433 - DNA, 25 bp, Homo sapien
cgagtagttggaactacagctccac

SEQ ID NO: 4009434 - DNA, 25 bp, Homo sapien
ggtcttgctatgctgtccatcctgg

SEQ ID NO: 4009435 - DNA, 25 bp, Homo sapien
cctggctgattctttttttccttgt

SEQ ID NO: 4009436 - DNA, 25 bp, Homo sapien
gaggtagagtctcgccgtttcaccc

SEQ ID NO: 4009437 - DNA, 25 bp, Homo sapien
agagtctcgccgtttcaccccagct

SEQ ID NO: 4009438 - DNA, 25 bp, Homo sapien
ggtagagtctcgccgtttcacccca

SEQ ID NO: 4009439 - DNA, 25 bp, Homo sapien
gtagagtctcgccgtttcaccccag

SEQ ID NO: 4009440 - DNA, 25 bp, Homo sapien
agtgcctggccgtcttggaggtctt

SEQ ID NO: 4009441 - DNA, 25 bp, Homo sapien
agtgggaccaccctgttgggttcag

SEQ ID NO: 4009442 - DNA, 25 bp, Homo sapien
ccgtcttggaggtcttgtttctctg

SEQ ID NO: 4009443 - DNA, 25 bp, Homo sapien
ccctgttgggttcagaacaggagat

SEQ ID NO: 4009444 - DNA, 25 bp, Homo sapien
gcaggcatgtgactggtgctgcggc

SEQ ID NO: 4009445 - DNA, 25 bp, Homo sapien
gaccaccacatccacgggcagcgca

SEQ ID NO: 4009446 - DNA, 25 bp, Homo sapien
tggtgctggatgagaccaccacatc

SEQ ID NO: 4009447 - DNA, 25 bp, Homo sapien
ccacgggcagcgcaggcatgtgact

SEQ ID NO: 4009448 - DNA, 25 bp, Homo sapien
gatccccagcacgtcatcgagtact

SEQ ID NO: 4009449 - DNA, 25 bp, Homo sapien
ggacctcacatctgctgcatgcgtg

SEQ ID NO: 4009450 - DNA, 25 bp, Homo sapien
tctgctcgtaggtctctggccatca

SEQ ID NO: 4009451 - DNA, 25 bp, Homo sapien
tgtggtcgccctcaacaggtgagcc

SEQ ID NO: 4009452 - DNA, 25 bp, Homo sapien
tggctcaagacaactttgcttcttt

SEQ ID NO: 4009453 - DNA, 25 bp, Homo sapien
gctttataccaagaaagacaacacc

SEQ ID NO: 4009454 - DNA, 25 bp, Homo sapien
gaatcccacggtgatatctgaggga

SEQ ID NO: 4009455 - DNA, 25 bp, Homo sapien
ttttttgtagcagtggaatcccacg

SEQ ID NO: 4009456 - DNA, 25 bp, Homo sapien
ctgccaggtcaggacatggatacat

SEQ ID NO: 4009457 - DNA, 25 bp, Homo sapien
gccaggtcaggacatggatacattt

SEQ ID NO: 4009458 - DNA, 25 bp, Homo sapien
tgccaggtcaggacatggatacatt

SEQ ID NO: 4009459 - DNA, 25 bp, Homo sapien
ccaggtcaggacatggatacatttt

SEQ ID NO: 4009460 - DNA, 25 bp, Homo sapien
ctaagctggttcttgtgtggcctct

SEQ ID NO: 4009461 - DNA, 25 bp, Homo sapien
agctgccgagtcctatgattacacg

SEQ ID NO: 4009462 - DNA, 25 bp, Homo sapien
ttaaatgatgctcagctaagctggt

SEQ ID NO: 4009463 - DNA, 25 bp, Homo sapien
gcctctgtaccttcaaaagctgccg

SEQ ID NO: 4009464 - DNA, 25 bp, Homo sapien
agccatgcctaactgacttcttgag

SEQ ID NO: 4009465 - DNA, 25 bp, Homo sapien
gcctaactgacttcttgaggtaaga

SEQ ID NO: 4009466 - DNA, 25 bp, Homo sapien
tcttgaggtaagattgttctgtcag

SEQ ID NO: 4009467 - DNA, 25 bp, Homo sapien
gtaagattgttctgtcagaaaaccc

SEQ ID NO: 4009468 - DNA, 25 bp, Homo sapien
aagggtgatattatgacactgacac

SEQ ID NO: 4009469 - DNA, 25 bp, Homo sapien
ttactctgttatgactctgtcttcc

SEQ ID NO: 4009470 - DNA, 25 bp, Homo sapien
ggatagacatagacactcctgtgtc

SEQ ID NO: 4009471 - DNA, 25 bp, Homo sapien
tactgtctcttactgtctattgacc

SEQ ID NO: 4009472 - DNA, 25 bp, Homo sapien
gaaaggtgcaaaaatctatcaccag

SEQ ID NO: 4009473 - DNA, 25 bp, Homo sapien
gtgttggtggcggtaattttgtcca

SEQ ID NO: 4009474 - DNA, 25 bp, Homo sapien
gaaggtgcagactgtgttggtggcg

SEQ ID NO: 4009475 - DNA, 25 bp, Homo sapien
gcggtaattttgtccatcaaatgaa

SEQ ID NO: 4009476 - DNA, 25 bp, Homo sapien
ctcagcggatgataatctcaagaca

SEQ ID NO: 4009477 - DNA, 25 bp, Homo sapien
cctcagcggatgataatctcaagac

SEQ ID NO: 4009478 - DNA, 25 bp, Homo sapien
cctcagcggatgataatctcaagac

SEQ ID NO: 4009479 - DNA, 25 bp, Homo sapien
ctcagcggatgataatctcaagaca

SEQ ID NO: 4009480 - DNA, 25 bp, Homo sapien
tctgattgacgcactgccaggagta

SEQ ID NO: 4009481 - DNA, 25 bp, Homo sapien
tgattgacgcactgccaggagtagc

SEQ ID NO: 4009482 - DNA, 25 bp, Homo sapien
aggacgctctgattgacgcactgcc

SEQ ID NO: 4009483 - DNA, 25 bp, Homo sapien
cgctctgattgacgcactgccagga

SEQ ID NO: 4009484 - DNA, 25 bp, Homo sapien
ggtaatgattccattggccccacca

SEQ ID NO: 4009485 - DNA, 25 bp, Homo sapien
tgaaaatccccgtcttgggtaatga

SEQ ID NO: 4009486 - DNA, 25 bp, Homo sapien
ggagctactgtacacctggccttat

SEQ ID NO: 4009487 - DNA, 25 bp, Homo sapien
ggctacaccctctcgtaaaattgga

SEQ ID NO: 4009488 - DNA, 25 bp, Homo sapien
aggctagagtgcatgattttgggtc

SEQ ID NO: 4009489 - DNA, 25 bp, Homo sapien
taaacaaatctctactaaccccatc

SEQ ID NO: 4009490 - DNA, 25 bp, Homo sapien
gcaaaagcgagaccccaggctagag

SEQ ID NO: 4009491 - DNA, 25 bp, Homo sapien
cacgagaatcatttgcatcttggag

SEQ ID NO: 4009492 - DNA, 25 bp, Homo sapien
ccctgtgttgggcactcggcatcat

SEQ ID NO: 4009493 - DNA, 25 bp, Homo sapien
gagtcgtgcatgaaacctttgtcca

SEQ ID NO: 4009494 - DNA, 25 bp, Homo sapien
tcggcatcatatgagcctacaggtg

SEQ ID NO: 4009495 - DNA, 25 bp, Homo sapien
ccatttatctagatcctggcacagc

SEQ ID NO: 4009496 - DNA, 25 bp, Homo sapien
ttctcggagctaaggtctccctgct

SEQ ID NO: 4009497 - DNA, 25 bp, Homo sapien
agttgcttctcggagctaaggtctc

SEQ ID NO: 4009498 - DNA, 25 bp, Homo sapien
tcggagctaaggtctccctgctcct

SEQ ID NO: 4009499 - DNA, 25 bp, Homo sapien
gcttctcggagctaaggtctccctg

SEQ ID NO: 4009500 - DNA, 25 bp, Homo sapien
acagtgggtgcatccaagccaccag

SEQ ID NO: 4009501 - DNA, 25 bp, Homo sapien
tcccctggttccagaaggcctgtta

SEQ ID NO: 4009502 - DNA, 25 bp, Homo sapien
ctcacagtgggtgcatccaagccac

SEQ ID NO: 4009503 - DNA, 25 bp, Homo sapien
gttccagaaggcctgttagagacat

SEQ ID NO: 4009504 - DNA, 25 bp, Homo sapien
agatgaactcaaatgggctggcaga

SEQ ID NO: 4009505 - DNA, 25 bp, Homo sapien
cagatgaactcaaatgggctggcag

SEQ ID NO: 4009506 - DNA, 25 bp, Homo sapien
ctgacatccagaaaactattgccca

SEQ ID NO: 4009507 - DNA, 25 bp, Homo sapien
tgttgcgctcaccaaaattggctgg

SEQ ID NO: 4009508 - DNA, 25 bp, Homo sapien
cttgtgccagagtcccactgacatc

SEQ ID NO: 4009509 - DNA, 25 bp, Homo sapien
aagaatttcctgttgcgctcaccaa

SEQ ID NO: 4009510 - DNA, 25 bp, Homo sapien
tcggcagagtgttggaccacgagaa

SEQ ID NO: 4009511 - DNA, 25 bp, Homo sapien
tgttggaccacgagaaggcagatgt

SEQ ID NO: 4009512 - DNA, 25 bp, Homo sapien
ggattaactgagtcggcagagtgtt

SEQ ID NO: 4009513 - DNA, 25 bp, Homo sapien
cagcctgaagtttggaagtgatctt

SEQ ID NO: 4009514 - DNA, 25 bp, Homo sapien
actgtctttgcccacccgtatgatg

SEQ ID NO: 4009515 - DNA, 25 bp, Homo sapien
ctttttctggttgtactgtctttgc

SEQ ID NO: 4009516 - DNA, 25 bp, Homo sapien
cgtatgatggcttggaagtcttgga

SEQ ID NO: 4009517 - DNA, 25 bp, Homo sapien
ttggaggaatcaacacctgccctgg

SEQ ID NO: 4009518 - DNA, 25 bp, Homo sapien
atgttgggtgcaaatgaatagggct

SEQ ID NO: 4009519 - DNA, 25 bp, Homo sapien
gatgatgttgggtgcaaatgaatag

SEQ ID NO: 4009520 - DNA, 25 bp, Homo sapien
tgggtgcaaatgaatagggcttcag

SEQ ID NO: 4009521 - DNA, 25 bp, Homo sapien
tgatgatgttgggtgcaaatgaata

SEQ ID NO: 4009522 - DNA, 25 bp, Homo sapien
ttcccacaatcagcttgcctgaccc

SEQ ID NO: 4009523 - DNA, 25 bp, Homo sapien
tcccacaatcagcttgcctgacccc

SEQ ID NO: 4009524 - DNA, 25 bp, Homo sapien
tgaacgcctgctcttccttcagtcc

SEQ ID NO: 4009525 - DNA, 25 bp, Homo sapien
agtccccagttctctgcattcccca

SEQ ID NO: 4009526 - DNA, 25 bp, Homo sapien
tcttccttcagtccccagttctctg

SEQ ID NO: 4009527 - DNA, 25 bp, Homo sapien
tccttcagtccccagttctctgcat

SEQ ID NO: 4009528 - DNA, 25 bp, Homo sapien
aacaggaagcttgagcttcatgtct

SEQ ID NO: 4009529 - DNA, 25 bp, Homo sapien
aagggtgacacaggttgacatggtt

SEQ ID NO: 4009530 - DNA, 25 bp, Homo sapien
cccaagtccctcaagggtgacacag

SEQ ID NO: 4009531 - DNA, 25 bp, Homo sapien
caacaggaagcttgagcttcatgtc

SEQ ID NO: 4009532 - DNA, 25 bp, Homo sapien
aatgacagcccagggtattccaggc

SEQ ID NO: 4009533 - DNA, 25 bp, Homo sapien
ctccagccgaagacgtgtgtccact

SEQ ID NO: 4009534 - DNA, 25 bp, Homo sapien
ccttgcaacagaaatggaatcgttt

SEQ ID NO: 4009535 - DNA, 25 bp, Homo sapien
agcagatgctccagccgaagacgtg

SEQ ID NO: 4009536 - DNA, 25 bp, Homo sapien
ctttttcaccgaatgctatctgtga

SEQ ID NO: 4009537 - DNA, 25 bp, Homo sapien
ctaatgttaacagtgttgtcagatg

SEQ ID NO: 4009538 - DNA, 25 bp, Homo sapien
ttcaccgaatgctatctgtgagttt

SEQ ID NO: 4009539 - DNA, 25 bp, Homo sapien
tgttgtcagatgtgaaggcttcatt

SEQ ID NO: 4009540 - DNA, 25 bp, Homo sapien
gacatcgaggctggttctacctgga

SEQ ID NO: 4009541 - DNA, 25 bp, Homo sapien
gatgttgcatccgtaggtatcaaag

SEQ ID NO: 4009542 - DNA, 25 bp, Homo sapien
ggtcctgggctccagaagacatcga

SEQ ID NO: 4009543 - DNA, 25 bp, Homo sapien
ggagcttgaacagtggcactctgag

SEQ ID NO: 4009544 - DNA, 25 bp, Homo sapien
cctactgtcagaggcttggaataaa

SEQ ID NO: 4009545 - DNA, 25 bp, Homo sapien
actcctactgtcagaggcttggaat

SEQ ID NO: 4009546 - DNA, 25 bp, Homo sapien
cattctgtgattctgccaagtcctc

SEQ ID NO: 4009547 - DNA, 25 bp, Homo sapien
acattctgtgattctgccaagtcct

SEQ ID NO: 4009548 - DNA, 25 bp, Homo sapien
cgacaagatcatctagggttgtatg

SEQ ID NO: 4009549 - DNA, 25 bp, Homo sapien
catcttcacgacaagatcatctagg

SEQ ID NO: 4009550 - DNA, 25 bp, Homo sapien
tccttcatcttcacgacaagatcat

SEQ ID NO: 4009551 - DNA, 25 bp, Homo sapien
ttaaaactcagtccctggcaagatg

SEQ ID NO: 4009552 - DNA, 25 bp, Homo sapien
gatcaaaccctcatttaggcgttca

SEQ ID NO: 4009553 - DNA, 25 bp, Homo sapien
taatcttcagtatctatgagtgctg

SEQ ID NO: 4009554 - DNA, 25 bp, Homo sapien
tgctgggtgatttgcggaaactgca

SEQ ID NO: 4009555 - DNA, 25 bp, Homo sapien
gctttgtcaatatcagcttggcctc

SEQ ID NO: 4009556 - DNA, 25 bp, Homo sapien
tcccacctcaattttgtcctctttc

SEQ ID NO: 4009557 - DNA, 25 bp, Homo sapien
cctcccacctcaattttgtcctctt

SEQ ID NO: 4009558 - DNA, 25 bp, Homo sapien
ctctttctgcaggtatctaagtgtc

SEQ ID NO: 4009559 - DNA, 25 bp, Homo sapien
ctttctgcaggtatctaagtgtcat

SEQ ID NO: 4009560 - DNA, 25 bp, Homo sapien
gaaatctgattagctagttcactgg

SEQ ID NO: 4009561 - DNA, 25 bp, Homo sapien
caaggaaatctgattagctagttca

SEQ ID NO: 4009562 - DNA, 25 bp, Homo sapien
tctgattagctagttcactgggttc

SEQ ID NO: 4009563 - DNA, 25 bp, Homo sapien
aattatccaaggaaatctgattagc

SEQ ID NO: 4009564 - DNA, 25 bp, Homo sapien
gaatcaaattcctgactatctggtg

SEQ ID NO: 4009565 - DNA, 25 bp, Homo sapien
cagtgcatgtgccaatttttgggtt

SEQ ID NO: 4009566 - DNA, 25 bp, Homo sapien
tatctggtgcttcagagttatccag

SEQ ID NO: 4009567 - DNA, 25 bp, Homo sapien
gcaaggttttgcatctgtagaggaa

SEQ ID NO: 4009568 - DNA, 25 bp, Homo sapien
ggagaaggatcccacttggctccag

SEQ ID NO: 4009569 - DNA, 25 bp, Homo sapien
cgtggtgcaggagaaggatcccact

SEQ ID NO: 4009570 - DNA, 25 bp, Homo sapien
tgcaggagaaggatcccacttggct

SEQ ID NO: 4009571 - DNA, 25 bp, Homo sapien
ggcccctgggccctcgtggtgcagg

SEQ ID NO: 4009572 - DNA, 25 bp, Homo sapien
gaaatctttgcatccccgttgacac

SEQ ID NO: 4009573 - DNA, 25 bp, Homo sapien
cagacgcctgatagtagggcacagt

SEQ ID NO: 4009574 - DNA, 25 bp, Homo sapien
gatttccctgtgagagcagacgcct

SEQ ID NO: 4009575 - DNA, 25 bp, Homo sapien
ggcacagtgccagtcccgttgataa

SEQ ID NO: 4009576 - DNA, 25 bp, Homo sapien
tcccaagagccaagttaaatgtcac

SEQ ID NO: 4009577 - DNA, 25 bp, Homo sapien
gttcccaagagccaagttaaatgtc

SEQ ID NO: 4009578 - DNA, 25 bp, Homo sapien
caagagccaagttaaatgtcacttc

SEQ ID NO: 4009579 - DNA, 25 bp, Homo sapien
aagatgttcccaagagccaagttaa

SEQ ID NO: 4009580 - DNA, 25 bp, Homo sapien
cgattcttatgctccagccttctga

SEQ ID NO: 4009581 - DNA, 25 bp, Homo sapien
aagcgattcttatgctccagccttc

SEQ ID NO: 4009582 - DNA, 25 bp, Homo sapien
ggactaccagcacacatcaccacgc

SEQ ID NO: 4009583 - DNA, 25 bp, Homo sapien
gtgcagtggcatgagttcaagcgat

SEQ ID NO: 4009584 - DNA, 25 bp, Homo sapien
tatccccagcatctcgactctccac

SEQ ID NO: 4009585 - DNA, 25 bp, Homo sapien
cccagcatctcgactctccacgggc

SEQ ID NO: 4009586 - DNA, 25 bp, Homo sapien
cagcatctcgactctccacgggcat

SEQ ID NO: 4009587 - DNA, 25 bp, Homo sapien
tgtgtatccccagcatctcgactct

SEQ ID NO: 4009588 - DNA, 25 bp, Homo sapien
acaggatggcaccaggttttcacga

SEQ ID NO: 4009589 - DNA, 25 bp, Homo sapien
gcaccaggttttcacgatatggaga

SEQ ID NO: 4009590 - DNA, 25 bp, Homo sapien
accaggttttcacgatatggagaga

SEQ ID NO: 4009591 - DNA, 25 bp, Homo sapien
gatggcaccaggttttcacgatatg

SEQ ID NO: 4009592 - DNA, 25 bp, Homo sapien
cctgtggtctgagcatgggcgttag

SEQ ID NO: 4009593 - DNA, 25 bp, Homo sapien
cagcctgtggtctgagcatgggcgt

SEQ ID NO: 4009594 - DNA, 25 bp, Homo sapien
tggtctgagcatgggcgttagagcc

SEQ ID NO: 4009595 - DNA, 25 bp, Homo sapien
tgagcatgggcgttagagcccagtc

SEQ ID NO: 4009596 - DNA, 25 bp, Homo sapien
gctggctctacccactgtattcggg

SEQ ID NO: 4009597 - DNA, 25 bp, Homo sapien
gctacactgcgagcacagatcacag

SEQ ID NO: 4009598 - DNA, 25 bp, Homo sapien
ggccatggaagcgttctacacaaga

SEQ ID NO: 4009599 - DNA, 25 bp, Homo sapien
tgatgatgatgccatctctccggct

SEQ ID NO: 4009600 - DNA, 25 bp, Homo sapien
caggcatggcggcttgctcctataa

SEQ ID NO: 4009601 - DNA, 25 bp, Homo sapien
agcttgccttccaggattttatacc

SEQ ID NO: 4009602 - DNA, 25 bp, Homo sapien
tagcaactgcaattcaggggaaggc

SEQ ID NO: 4009603 - DNA, 25 bp, Homo sapien
gccttccaggattttataccaagct

SEQ ID NO: 4009604 - DNA, 25 bp, Homo sapien
gtaactggcacttgaacgtctccat

SEQ ID NO: 4009605 - DNA, 25 bp, Homo sapien
tgtaactggcacttgaacgtctcca

SEQ ID NO: 4009606 - DNA, 25 bp, Homo sapien
ggtgtaactggcacttgaacgtctc

SEQ ID NO: 4009607 - DNA, 25 bp, Homo sapien
tggtgtaactggcacttgaacgtct

SEQ ID NO: 4009608 - DNA, 25 bp, Homo sapien
tctcatgtaaagtaaggtagtccag

SEQ ID NO: 4009609 - DNA, 25 bp, Homo sapien
tgaaataatgcatgaggccgggtgc

SEQ ID NO: 4009610 - DNA, 25 bp, Homo sapien
gattgacctgtcagtaccaggccag

SEQ ID NO: 4009611 - DNA, 25 bp, Homo sapien
acattagcctcctatcttttgcggg

SEQ ID NO: 4009612 - DNA, 25 bp, Homo sapien
cactgggttctcacttttcagggtt

SEQ ID NO: 4009613 - DNA, 25 bp, Homo sapien
tcaaaatggcctgtaacttcagtgc

SEQ ID NO: 4009614 - DNA, 25 bp, Homo sapien
cagcagctgtgttccgggtgtcttt

SEQ ID NO: 4009615 - DNA, 25 bp, Homo sapien
aaataatgttggcactagtcagcca

SEQ ID NO: 4009616 - DNA, 25 bp, Homo sapien
gacatttgatcatgaaattgcctga

SEQ ID NO: 4009617 - DNA, 25 bp, Homo sapien
gatccttatgaatgcacaaatacct

SEQ ID NO: 4009618 - DNA, 25 bp, Homo sapien
cagtagatccttatgaatgcacaaa

SEQ ID NO: 4009619 - DNA, 25 bp, Homo sapien
gtagatcagtagatccttatgaatg

SEQ ID NO: 4009620 - DNA, 25 bp, Homo sapien
cttatgaatgcacaaatacctctct

SEQ ID NO: 4009621 - DNA, 25 bp, Homo sapien
tttggcattcttagaaggagtcctg

SEQ ID NO: 4009622 - DNA, 25 bp, Homo sapien
ttggcattcttagaaggagtcctgg

SEQ ID NO: 4009623 - DNA, 25 bp, Homo sapien
gtgtctagatttgtcactggttgtt

SEQ ID NO: 4009624 - DNA, 25 bp, Homo sapien
gctggggggagtgtctagatttgtc

SEQ ID NO: 4009625 - DNA, 25 bp, Homo sapien
tctgagagcaggagcgaatttcatt

SEQ ID NO: 4009626 - DNA, 25 bp, Homo sapien
catccaccatagtctttgctgatat

SEQ ID NO: 4009627 - DNA, 25 bp, Homo sapien
cagagaatgtatcctttcccagggg

SEQ ID NO: 4009628 - DNA, 25 bp, Homo sapien
gcgaatttcatttgctacctcgtaa

SEQ ID NO: 4009629 - DNA, 25 bp, Homo sapien
taaggtgaagggtctcagtgccaaa

SEQ ID NO: 4009630 - DNA, 25 bp, Homo sapien
ggtcaaaatttacaatgctagactg

SEQ ID NO: 4009631 - DNA, 25 bp, Homo sapien
tctgcttggatggtttacgggctaa

SEQ ID NO: 4009632 - DNA, 25 bp, Homo sapien
gactgtgccaggaggtctttctgct

SEQ ID NO: 4009633 - DNA, 25 bp, Homo sapien
ggatgtaccagaccagagcactcac

SEQ ID NO: 4009634 - DNA, 25 bp, Homo sapien
gaggcacatggggatgtaccagacc

SEQ ID NO: 4009635 - DNA, 25 bp, Homo sapien
cacatggggatgtaccagaccagag

SEQ ID NO: 4009636 - DNA, 25 bp, Homo sapien
tggggatgtaccagaccagagcact

SEQ ID NO: 4009637 - DNA, 25 bp, Homo sapien
gggatgtaagtcttgaccttattcc

SEQ ID NO: 4009638 - DNA, 25 bp, Homo sapien
catggagggtggtgtcttttttctg

SEQ ID NO: 4009639 - DNA, 25 bp, Homo sapien
tctgtgctgtccctagggatgtaag

SEQ ID NO: 4009640 - DNA, 25 bp, Homo sapien
cacacatggagggtggtgtcttttt

SEQ ID NO: 4009641 - DNA, 25 bp, Homo sapien
gatcttcgttcctgcagattcacag

SEQ ID NO: 4009642 - DNA, 25 bp, Homo sapien
ctccagatcttcgttcctgcagatt

SEQ ID NO: 4009643 - DNA, 25 bp, Homo sapien
tctgagtgcctcactacttccaaca

SEQ ID NO: 4009644 - DNA, 25 bp, Homo sapien
cttctgttgtattgtggccttctgt

SEQ ID NO: 4009645 - DNA, 25 bp, Homo sapien
actcatgtgatctgttttggtcttc

SEQ ID NO: 4009646 - DNA, 25 bp, Homo sapien
ttaactcatgtgatctgttttggtc

SEQ ID NO: 4009647 - DNA, 25 bp, Homo sapien
ctgttttggtcttctcattaaccct

SEQ ID NO: 4009648 - DNA, 25 bp, Homo sapien
tctgttttggtcttctcattaaccc

SEQ ID NO: 4009649 - DNA, 25 bp, Homo sapien
cctcttccaaggtgcattcattcat

SEQ ID NO: 4009650 - DNA, 25 bp, Homo sapien
tccacctcttccaaggtgcattcat

SEQ ID NO: 4009651 - DNA, 25 bp, Homo sapien
agagagtccacctcttccaaggtgc

SEQ ID NO: 4009652 - DNA, 25 bp, Homo sapien
agtccacctcttccaaggtgcattc

SEQ ID NO: 4009653 - DNA, 25 bp, Homo sapien
tgaagcgggacagctaacacagtga

SEQ ID NO: 4009654 - DNA, 25 bp, Homo sapien
cagtttccgaagtcacatgtaagcc

SEQ ID NO: 4009655 - DNA, 25 bp, Homo sapien
tccgtttcctggagaatcagtgaac

SEQ ID NO: 4009656 - DNA, 25 bp, Homo sapien
ttgtatctttaggtggagtgaagcg

SEQ ID NO: 4009657 - DNA, 25 bp, Homo sapien
gatattctgcgtttttgtcattccc

SEQ ID NO: 4009658 - DNA, 25 bp, Homo sapien
gtcattcccttgataaccaacgcag

SEQ ID NO: 4009659 - DNA, 25 bp, Homo sapien
cgcagaagtcgatcagtcctaagaa

SEQ ID NO: 4009660 - DNA, 25 bp, Homo sapien
tttatcgcagtttggatattctgcg

SEQ ID NO: 4009661 - DNA, 25 bp, Homo sapien
cattttctgggaaactggaattgca

SEQ ID NO: 4009662 - DNA, 25 bp, Homo sapien
attttctgggaaactggaattgcac

SEQ ID NO: 4009663 - DNA, 25 bp, Homo sapien
tcattttctgggaaactggaattgc

SEQ ID NO: 4009664 - DNA, 25 bp, Homo sapien
tggttatgggcagccagagcattgt

SEQ ID NO: 4009665 - DNA, 25 bp, Homo sapien
cagccagagcattgttgaggctgca

SEQ ID NO: 4009666 - DNA, 25 bp, Homo sapien
ctggttatgggcagccagagcattg

SEQ ID NO: 4009667 - DNA, 25 bp, Homo sapien
agagcattgttgaggctgcagtttc

SEQ ID NO: 4009668 - DNA, 25 bp, Homo sapien
ctgtggacaagatgcaaccactggt

SEQ ID NO: 4009669 - DNA, 25 bp, Homo sapien
tgtggacaagatgcaaccactggtg

SEQ ID NO: 4009670 - DNA, 25 bp, Homo sapien
ctgagattatctggggggactcttg

SEQ ID NO: 4009671 - DNA, 25 bp, Homo sapien
gagcagcgttggggaagtcacaacc

SEQ ID NO: 4009672 - DNA, 25 bp, Homo sapien
tctggggggactcttgagcagcgtt

SEQ ID NO: 4009673 - DNA, 25 bp, Homo sapien
gggaagtcacaaccagtggtgagag

SEQ ID NO: 4009674 - DNA, 25 bp, Homo sapien
tttttgcccttgatcttgattgtag

SEQ ID NO: 4009675 - DNA, 25 bp, Homo sapien
tttgcccttgatcttgattgtaggt

SEQ ID NO: 4009676 - DNA, 25 bp, Homo sapien
ttttgcccttgatcttgattgtagg

SEQ ID NO: 4009677 - DNA, 25 bp, Homo sapien
tttttgctattcgaaggggcacatg

SEQ ID NO: 4009678 - DNA, 25 bp, Homo sapien
ggcagtaatgtgaaagcaatgtgaa

SEQ ID NO: 4009679 - DNA, 25 bp, Homo sapien
gaagtggaagtttgtcatgggaaga

SEQ ID NO: 4009680 - DNA, 25 bp, Homo sapien
ggaggcagtaatgtgaaagcaatgt

SEQ ID NO: 4009681 - DNA, 25 bp, Homo sapien
ctgaaagccatcttcagtgtcccct

SEQ ID NO: 4009682 - DNA, 25 bp, Homo sapien
tgagtcatctgcctgaaagccatct

SEQ ID NO: 4009683 - DNA, 25 bp, Homo sapien
aaagccatcttcagtgtcccctggg

SEQ ID NO: 4009684 - DNA, 25 bp, Homo sapien
tgcctgaaagccatcttcagtgtcc

SEQ ID NO: 4009685 - DNA, 25 bp, Homo sapien
ccaccactttatcctgaatctctgt

SEQ ID NO: 4009686 - DNA, 25 bp, Homo sapien
tcctgggccatagtaagtcaatagc

SEQ ID NO: 4009687 - DNA, 25 bp, Homo sapien
taagcgttgtaggagctaagttcac

SEQ ID NO: 4009688 - DNA, 25 bp, Homo sapien
gctgttgaacaacggaatggatgca

SEQ ID NO: 4009689 - DNA, 25 bp, Homo sapien
actttgtattaagcgttgtaggagc

SEQ ID NO: 4009690 - DNA, 25 bp, Homo sapien
ctgtgccagtatcatgctcagggtc

SEQ ID NO: 4009691 - DNA, 25 bp, Homo sapien
tcatcatctctgagtcatctgctgc

SEQ ID NO: 4009692 - DNA, 25 bp, Homo sapien
gggtcatcatctctgagtcatctgc

SEQ ID NO: 4009693 - DNA, 25 bp, Homo sapien
gccagtatcatgctcagggtcatca

SEQ ID NO: 4009694 - DNA, 25 bp, Homo sapien
ccaatttatgagcttgttagttccc

SEQ ID NO: 4009695 - DNA, 25 bp, Homo sapien
tttatgagcttgttagttccccagc

SEQ ID NO: 4009696 - DNA, 25 bp, Homo sapien
catttccaatttatgagcttgttag

SEQ ID NO: 4009697 - DNA, 25 bp, Homo sapien
tgagcttgttagttccccagccagt

SEQ ID NO: 4009698 - DNA, 25 bp, Homo sapien
aaacacagacgtttccgctgaggag

SEQ ID NO: 4009699 - DNA, 25 bp, Homo sapien
tgctgacccggtggcagtatttgcc

SEQ ID NO: 4009700 - DNA, 25 bp, Homo sapien
tcatcttgctcagacaaacacagac

SEQ ID NO: 4009701 - DNA, 25 bp, Homo sapien
ggtggcagtatttgcctgtgtcatc

SEQ ID NO: 4009702 - DNA, 25 bp, Homo sapien
tggcagccccttgtgtagatactgg

SEQ ID NO: 4009703 - DNA, 25 bp, Homo sapien
acccagcatggggtttacagccgcc

SEQ ID NO: 4009704 - DNA, 25 bp, Homo sapien
atcccacggagaatgagcccgctca

SEQ ID NO: 4009705 - DNA, 25 bp, Homo sapien
tagatactggagtggatcccacgga

SEQ ID NO: 4009706 - DNA, 25 bp, Homo sapien
agccaaggtttcctcgcgctgaagc

SEQ ID NO: 4009707 - DNA, 25 bp, Homo sapien
gaagatttgcatctggtaagcccag

SEQ ID NO: 4009708 - DNA, 25 bp, Homo sapien
atcaggtagagggtccatgctgctt

SEQ ID NO: 4009709 - DNA, 25 bp, Homo sapien
gccaggccttaggaggcaagttctt

SEQ ID NO: 4009710 - DNA, 25 bp, Homo sapien
gttgcatgctctgagatgaggtcct

SEQ ID NO: 4009711 - DNA, 25 bp, Homo sapien
ttcttcgactgccatgaagaggttc

SEQ ID NO: 4009712 - DNA, 25 bp, Homo sapien
aactcaaagtgttcttcgactgcca

SEQ ID NO: 4009713 - DNA, 25 bp, Homo sapien
tatggagtcctggtaggtgttctca

SEQ ID NO: 4009714 - DNA, 25 bp, Homo sapien
ccaagaaaagctgcttgttgggcag

SEQ ID NO: 4009715 - DNA, 25 bp, Homo sapien
agaaaagctgcttgttgggcagcag

SEQ ID NO: 4009716 - DNA, 25 bp, Homo sapien
ctccaagaaaagctgcttgttgggc

SEQ ID NO: 4009717 - DNA, 25 bp, Homo sapien
caagaaaagctgcttgttgggcagc

SEQ ID NO: 4009718 - DNA, 25 bp, Homo sapien
ccagagacattgatgttacagcagc

SEQ ID NO: 4009719 - DNA, 25 bp, Homo sapien
ggccagcagccatcacagcagtatt

SEQ ID NO: 4009720 - DNA, 25 bp, Homo sapien
ctgggccagcagccatcacagcagt

SEQ ID NO: 4009721 - DNA, 25 bp, Homo sapien
gggccagcagccatcacagcagtat

SEQ ID NO: 4009722 - DNA, 25 bp, Homo sapien
ccagcagccatcacagcagtattac

SEQ ID NO: 4009723 - DNA, 25 bp, Homo sapien
ctttgtgctagggacattgatgttg

SEQ ID NO: 4009724 - DNA, 25 bp, Homo sapien
gggtcgttgacgttgcagcagccat

SEQ ID NO: 4009725 - DNA, 25 bp, Homo sapien
ctagggtcgttgacgttgcagcagc

SEQ ID NO: 4009726 - DNA, 25 bp, Homo sapien
acattgatgttgcagcagcagttgg

SEQ ID NO: 4009727 - DNA, 25 bp, Homo sapien
tgagcgttgcatccgttgaccaagg

SEQ ID NO: 4009728 - DNA, 25 bp, Homo sapien
cttggtgagacgcaaagagctgagc

SEQ ID NO: 4009729 - DNA, 25 bp, Homo sapien
tatttcacttggtgagacgcaaaga

SEQ ID NO: 4009730 - DNA, 25 bp, Homo sapien
agggaatcatagaccattccattgc

SEQ ID NO: 4009731 - DNA, 25 bp, Homo sapien
tgaagatcattgagtgtgagggcat

SEQ ID NO: 4009732 - DNA, 25 bp, Homo sapien
cgaaaagcctgagcgtgaagatcat

SEQ ID NO: 4009733 - DNA, 25 bp, Homo sapien
cctgagcgtgaagatcattgagtgt

SEQ ID NO: 4009734 - DNA, 25 bp, Homo sapien
cctggccacgaaaagcctgagcgtg

SEQ ID NO: 4009735 - DNA, 25 bp, Homo sapien
cttgcagccgcatagaaggtagtgg

SEQ ID NO: 4009736 - DNA, 25 bp, Homo sapien
gggtcaccaggtcaagctgttgata

SEQ ID NO: 4009737 - DNA, 25 bp, Homo sapien
ggtcaagctgttgataaaatggtgc

SEQ ID NO: 4009738 - DNA, 25 bp, Homo sapien
tgcagtaagctccaactgagccatg

SEQ ID NO: 4009739 - DNA, 25 bp, Homo sapien
tcagcatcttcccatccttgtatct

SEQ ID NO: 4009740 - DNA, 25 bp, Homo sapien
cttcccatccttgtatcttttctta

SEQ ID NO: 4009741 - DNA, 25 bp, Homo sapien
cccatccttgtatcttttcttaatc

SEQ ID NO: 4009742 - DNA, 25 bp, Homo sapien
gatttttaactttcagcatcttccc

SEQ ID NO: 4009743 - DNA, 25 bp, Homo sapien
aggcggtgcttcgacggctgatgat

SEQ ID NO: 4009744 - DNA, 25 bp, Homo sapien
tagaggcggtgcttcgacggctgat

SEQ ID NO: 4009745 - DNA, 25 bp, Homo sapien
tcagtagaggcggtgcttcgacggc

SEQ ID NO: 4009746 - DNA, 25 bp, Homo sapien
cagtagaggcggtgcttcgacggct

SEQ ID NO: 4009747 - DNA, 25 bp, Homo sapien
actctaagtgtgaacatactaaact

SEQ ID NO: 4009748 - DNA, 25 bp, Homo sapien
ctaaacttatgaagcgtggctatct

SEQ ID NO: 4009749 - DNA, 25 bp, Homo sapien
tgtgaacatactaaacttatgaagc

SEQ ID NO: 4009750 - DNA, 25 bp, Homo sapien
catactaaacttatgaagcgtggct

SEQ ID NO: 4009751 - DNA, 25 bp, Homo sapien
gaaaatggacctgtcttcacactta

SEQ ID NO: 4009752 - DNA, 25 bp, Homo sapien
catctgagtagtcgcagtgtcagta

SEQ ID NO: 4009753 - DNA, 25 bp, Homo sapien
gaatttgggcttccagctgcgggcc

SEQ ID NO: 4009754 - DNA, 25 bp, Homo sapien
tgcgggcctcagcaagtttatctct

SEQ ID NO: 4009755 - DNA, 25 bp, Homo sapien
tttctgaacttttcatcacggagga

SEQ ID NO: 4009756 - DNA, 25 bp, Homo sapien
ggtcccatgaacttatttctgaact

SEQ ID NO: 4009757 - DNA, 25 bp, Homo sapien
ctggtcccatgaacttatttctgaa

SEQ ID NO: 4009758 - DNA, 25 bp, Homo sapien
tatttctgaacttttcatcacggag

SEQ ID NO: 4009759 - DNA, 25 bp, Homo sapien
ggtcctgctttcagaggggtacttg

SEQ ID NO: 4009760 - DNA, 25 bp, Homo sapien
ttgatatctaaatttcttgggtgct

SEQ ID NO: 4009761 - DNA, 25 bp, Homo sapien
gatatctaaatttcttgggtgctgc

SEQ ID NO: 4009762 - DNA, 25 bp, Homo sapien
tcagaggggtacttgatagcttctc

SEQ ID NO: 4009763 - DNA, 25 bp, Homo sapien
ttctccagctggaatttctgaagga

SEQ ID NO: 4009764 - DNA, 25 bp, Homo sapien
gttctccagctggaatttctgaagg

SEQ ID NO: 4009765 - DNA, 25 bp, Homo sapien
ccgttctccagctggaatttctgaa

SEQ ID NO: 4009766 - DNA, 25 bp, Homo sapien
cgttctccagctggaatttctgaag

SEQ ID NO: 4009767 - DNA, 25 bp, Homo sapien
cctctagggaacctcggagagatgt

SEQ ID NO: 4009768 - DNA, 25 bp, Homo sapien
ctactccttgggcaacaggccttga

SEQ ID NO: 4009769 - DNA, 25 bp, Homo sapien
gccacatgtgatgaggaaagacaca

SEQ ID NO: 4009770 - DNA, 25 bp, Homo sapien
tctttagtgagcgtcaggatcatca

SEQ ID NO: 4009771 - DNA, 25 bp, Homo sapien
cctttccgaaggtgagattggcagt

SEQ ID NO: 4009772 - DNA, 25 bp, Homo sapien
tctcgccggtggcaagtgggattta

SEQ ID NO: 4009773 - DNA, 25 bp, Homo sapien
tcccatctgggcaaagtagacactc

SEQ ID NO: 4009774 - DNA, 25 bp, Homo sapien
tcatgcaatgggtccatgtaagtct

SEQ ID NO: 4009775 - DNA, 25 bp, Homo sapien
caatccttgttcaatcattgcttca

SEQ ID NO: 4009776 - DNA, 25 bp, Homo sapien
cttgccaaagctcagcaatccttgt

SEQ ID NO: 4009777 - DNA, 25 bp, Homo sapien
gctcagcaatccttgttcaatcatt

SEQ ID NO: 4009778 - DNA, 25 bp, Homo sapien
ccaaagctcagcaatccttgttcaa

SEQ ID NO: 4009779 - DNA, 25 bp, Homo sapien
gccagccctgtgataaacgcattat

SEQ ID NO: 4009780 - DNA, 25 bp, Homo sapien
gactcttgcgctaactctgggttca

SEQ ID NO: 4009781 - DNA, 25 bp, Homo sapien
tactaattggtgctgactccgctag

SEQ ID NO: 4009782 - DNA, 25 bp, Homo sapien
gaagagctccttataccttacgagg

SEQ ID NO: 4009783 - DNA, 25 bp, Homo sapien
cctctaagatccagacttttaatcg

SEQ ID NO: 4009784 - DNA, 25 bp, Homo sapien
gatccagacttttaatcgcttcaca

SEQ ID NO: 4009785 - DNA, 25 bp, Homo sapien
taagatccagacttttaatcgcttc

SEQ ID NO: 4009786 - DNA, 25 bp, Homo sapien
cagacttttaatcgcttcacaggct

SEQ ID NO: 4009787 - DNA, 25 bp, Homo sapien
aggtagaggtggaccctgacagtcc

SEQ ID NO: 4009788 - DNA, 25 bp, Homo sapien
ggtagaggtggaccctgacagtcca

SEQ ID NO: 4009789 - DNA, 25 bp, Homo sapien
gaggtagaggtggaccctgacagtc

SEQ ID NO: 4009790 - DNA, 25 bp, Homo sapien
cttgagctgcatattgccttgagta

SEQ ID NO: 4009791 - DNA, 25 bp, Homo sapien
tccttgagctgcatattgccttgag

SEQ ID NO: 4009792 - DNA, 25 bp, Homo sapien
gagctgcatattgccttgagtaatc

SEQ ID NO: 4009793 - DNA, 25 bp, Homo sapien
ctccttgagctgcatattgccttga

SEQ ID NO: 4009794 - DNA, 25 bp, Homo sapien
tgaagccaagtttgggccgataccc

SEQ ID NO: 4009795 - DNA, 25 bp, Homo sapien
tcctaggctccttgatgacaaaggt

SEQ ID NO: 4009796 - DNA, 25 bp, Homo sapien
tgatgcatctcatgcgaccgcacca

SEQ ID NO: 4009797 - DNA, 25 bp, Homo sapien
tctgctgatccaaaccatgaatagt

SEQ ID NO: 4009798 - DNA, 25 bp, Homo sapien
caatgttcttagttctgagaaattc

SEQ ID NO: 4009799 - DNA, 25 bp, Homo sapien
caatgtcaatgttcttagttctgag

SEQ ID NO: 4009800 - DNA, 25 bp, Homo sapien
cttagttctgagaaattcttgctcc

SEQ ID NO: 4009801 - DNA, 25 bp, Homo sapien
cttgcaatgtcaatgttcttagttc

SEQ ID NO: 4009802 - DNA, 25 bp, Homo sapien
tcagcaagccacaaacaccgtatca

SEQ ID NO: 4009803 - DNA, 25 bp, Homo sapien
tcatggatgcgctggctagcacgag

SEQ ID NO: 4009804 - DNA, 25 bp, Homo sapien
tggctagcacgagcattctgtgggc

SEQ ID NO: 4009805 - DNA, 25 bp, Homo sapien
cacaaacaccgtatcatggatgcgc

SEQ ID NO: 4009806 - DNA, 25 bp, Homo sapien
tcatggcaggtacgcaggccttgct

SEQ ID NO: 4009807 - DNA, 25 bp, Homo sapien
tggagagagatgccgctcttcatgg

SEQ ID NO: 4009808 - DNA, 25 bp, Homo sapien
atggcaggtacgcaggccttgcttc

SEQ ID NO: 4009809 - DNA, 25 bp, Homo sapien
cttcatggcaggtacgcaggccttg

SEQ ID NO: 4009810 - DNA, 25 bp, Homo sapien
caaccagttgggtataggaaactgc

SEQ ID NO: 4009811 - DNA, 25 bp, Homo sapien
ttttatgagggaaatgtgtccacac

SEQ ID NO: 4009812 - DNA, 25 bp, Homo sapien
ttttcccaggataggccatttatgc

SEQ ID NO: 4009813 - DNA, 25 bp, Homo sapien
caaccaggaggtacttataggaggt

SEQ ID NO: 4009814 - DNA, 25 bp, Homo sapien
caaaaaagggcaggtaatgcagtca

SEQ ID NO: 4009815 - DNA, 25 bp, Homo sapien
tatctacatatttcagcgtgtgcca

SEQ ID NO: 4009816 - DNA, 25 bp, Homo sapien
gagactcacattctacctcaaggaa

SEQ ID NO: 4009817 - DNA, 25 bp, Homo sapien
gaaagcatctatatacacctgcagt

SEQ ID NO: 4009818 - DNA, 25 bp, Homo sapien
caaatgctattgacaacataatatt

SEQ ID NO: 4009819 - DNA, 25 bp, Homo sapien
tatcaccacatgtctttgaaaacaa

SEQ ID NO: 4009820 - DNA, 25 bp, Homo sapien
gacaattgcgcacaattccagtgaa

SEQ ID NO: 4009821 - DNA, 25 bp, Homo sapien
caaaaggactacaaagacaattgcg

SEQ ID NO: 4009822 - DNA, 25 bp, Homo sapien
tggaatattcccagccaagtggaga

SEQ ID NO: 4009823 - DNA, 25 bp, Homo sapien
tagtgctatcactttccaggcagga

SEQ ID NO: 4009824 - DNA, 25 bp, Homo sapien
gatgacaaggtgcagaacccgcttt

SEQ ID NO: 4009825 - DNA, 25 bp, Homo sapien
gagaacgtctcctgatttacccttg

SEQ ID NO: 4009826 - DNA, 25 bp, Homo sapien
tcctcctcctagactgtctttgcca

SEQ ID NO: 4009827 - DNA, 25 bp, Homo sapien
tgccatttcggcctggtttgatgga

SEQ ID NO: 4009828 - DNA, 25 bp, Homo sapien
tgatggagtcccacaagctgtagcc

SEQ ID NO: 4009829 - DNA, 25 bp, Homo sapien
tggacctctgcatatctaaggggca

SEQ ID NO: 4009830 - DNA, 25 bp, Homo sapien
gaaactataaggagtgccgcagcct

SEQ ID NO: 4009831 - DNA, 25 bp, Homo sapien
tatttttgccctgacctgatgctgg

SEQ ID NO: 4009832 - DNA, 25 bp, Homo sapien
gcgtggccaccatagagtctgtaaa

SEQ ID NO: 4009833 - DNA, 25 bp, Homo sapien
cactgctttacgtgtggaccgggaa

SEQ ID NO: 4009834 - DNA, 25 bp, Homo sapien
cctccacgttttctgcctgtcacct

SEQ ID NO: 4009835 - DNA, 25 bp, Homo sapien
tatgttgcatgtcccgttgagcctg

SEQ ID NO: 4009836 - DNA, 25 bp, Homo sapien
catggtcatggctgtcaaagttccc

SEQ ID NO: 4009837 - DNA, 25 bp, Homo sapien
tatgactgtgctccgtaaacgaagt

SEQ ID NO: 4009838 - DNA, 25 bp, Homo sapien
gagaatagttcaacccaaggagggc

SEQ ID NO: 4009839 - DNA, 25 bp, Homo sapien
ctccagcgctgtgcccgtggaggct

SEQ ID NO: 4009840 - DNA, 25 bp, Homo sapien
tgagccggccatcaggtttgactgc

SEQ ID NO: 4009841 - DNA, 25 bp, Homo sapien
gggcccgtggcacagatgtccatgg

SEQ ID NO: 4009842 - DNA, 25 bp, Homo sapien
aggtctgcatgaccgggcaggctgt

SEQ ID NO: 4009843 - DNA, 25 bp, Homo sapien
aagcagcgaagacacagccatttac

SEQ ID NO: 4009844 - DNA, 25 bp, Homo sapien
tgaagcagcgaagacacagccattt

SEQ ID NO: 4009845 - DNA, 25 bp, Homo sapien
gaagcagcgaagacacagccattta

SEQ ID NO: 4009846 - DNA, 25 bp, Homo sapien
ctgaagcagcgaagacacagccatt

SEQ ID NO: 4009847 - DNA, 25 bp, Homo sapien
gtagtgggctggattggccaacttc

SEQ ID NO: 4009848 - DNA, 25 bp, Homo sapien
atatcttctactattatgtggttca

SEQ ID NO: 4009849 - DNA, 25 bp, Homo sapien
tagtgggctggattggccaacttct

SEQ ID NO: 4009850 - DNA, 25 bp, Homo sapien
gcaggtaggacattagatggtttct

SEQ ID NO: 4009851 - DNA, 25 bp, Homo sapien
atcatctccgtgtgcaggtaggaca

SEQ ID NO: 4009852 - DNA, 25 bp, Homo sapien
tgcaggtaggacattagatggtttc

SEQ ID NO: 4009853 - DNA, 25 bp, Homo sapien
atgacatcatctccgtgtgcaggta

SEQ ID NO: 4009854 - DNA, 25 bp, Homo sapien
gcttaccctatgtctgagcagtgct

SEQ ID NO: 4009855 - DNA, 25 bp, Homo sapien
agtgctgttctgtgaggccgctgct

SEQ ID NO: 4009856 - DNA, 25 bp, Homo sapien
agtgctgcctaccaacaccaaagac

SEQ ID NO: 4009857 - DNA, 25 bp, Homo sapien
aagtattgagagcaaggagtgctgt

SEQ ID NO: 4009858 - DNA, 25 bp, Homo sapien
gaatttggtctctgcaactggcacc

SEQ ID NO: 4009859 - DNA, 25 bp, Homo sapien
cctgttcgagaaggtcagaggcgca

SEQ ID NO: 4009860 - DNA, 25 bp, Homo sapien
tgacgggatccacccaaatgacggt

SEQ ID NO: 4009861 - DNA, 25 bp, Homo sapien
cggtcacggtcacattaggtccctt

SEQ ID NO: 4009862 - DNA, 25 bp, Homo sapien
aggggagtgaattctgaagtcactg

SEQ ID NO: 4009863 - DNA, 25 bp, Homo sapien
tctgaagtcactgggcctgaactag

SEQ ID NO: 4009864 - DNA, 25 bp, Homo sapien
gtgaattctgaagtcactgggcctg

SEQ ID NO: 4009865 - DNA, 25 bp, Homo sapien
aaacaggggagtgaattctgaagtc

SEQ ID NO: 4009866 - DNA, 25 bp, Homo sapien
cactgggtgggcttgcgatcttgaa

SEQ ID NO: 4009867 - DNA, 25 bp, Homo sapien
ccctggaagcggtcagcaaggaagt

SEQ ID NO: 4009868 - DNA, 25 bp, Homo sapien
gagtctctagtttgctcacagccag

SEQ ID NO: 4009869 - DNA, 25 bp, Homo sapien
ttttttcggcatcacccaggtctcc

SEQ ID NO: 4009870 - DNA, 25 bp, Homo sapien
cttacactggttatcatctttaacc

SEQ ID NO: 4009871 - DNA, 25 bp, Homo sapien
tacactggttatcatctttaaccat

SEQ ID NO: 4009872 - DNA, 25 bp, Homo sapien
acttacactggttatcatctttaac

SEQ ID NO: 4009873 - DNA, 25 bp, Homo sapien
cacttacactggttatcatctttaa

SEQ ID NO: 4009874 - DNA, 25 bp, Homo sapien
catcgtagacattctcccagtagga

SEQ ID NO: 4009875 - DNA, 25 bp, Homo sapien
tacctgcagggtagttcccgtacag

SEQ ID NO: 4009876 - DNA, 25 bp, Homo sapien
tacaaggtgagtgtcacgtcgctca

SEQ ID NO: 4009877 - DNA, 25 bp, Homo sapien
tggatgccgtcaggctcatcgtaga

SEQ ID NO: 4009878 - DNA, 25 bp, Homo sapien
cttgcgggcaaagaaggtaggccgg

SEQ ID NO: 4009879 - DNA, 25 bp, Homo sapien
atgtgcttgtactggcacttgcagc

SEQ ID NO: 4009880 - DNA, 25 bp, Homo sapien
ccagatcgtctgtggagaaggtcac

SEQ ID NO: 4009881 - DNA, 25 bp, Homo sapien
tacaaacctccggttcagcaggaac

SEQ ID NO: 4009882 - DNA, 25 bp, Homo sapien
acatgtgagcgtcgcactccaggaa

SEQ ID NO: 4009883 - DNA, 25 bp, Homo sapien
cagggtgtaggagtagaactgtttc

SEQ ID NO: 4009884 - DNA, 25 bp, Homo sapien
gaccgagtcagttagttactgctaa

SEQ ID NO: 4009885 - DNA, 25 bp, Homo sapien
tagatgattcctactggtgaccgag

SEQ ID NO: 4009886 - DNA, 25 bp, Homo sapien
ccatgaaccctagattaataactcc

SEQ ID NO: 4009887 - DNA, 25 bp, Homo sapien
ctgcaccaactataatgtgacagga

SEQ ID NO: 4009888 - DNA, 25 bp, Homo sapien
tcctcgcaggtagcctttattctca

SEQ ID NO: 4009889 - DNA, 25 bp, Homo sapien
ggtagcctttattctcactacaaca

SEQ ID NO: 4009890 - DNA, 25 bp, Homo sapien
ctacaacacactttggctctggact

SEQ ID NO: 4009891 - DNA, 25 bp, Homo sapien
tcactacaacacactttggctctgg

SEQ ID NO: 4009892 - DNA, 25 bp, Homo sapien
acaagaccccgggatgtcagagcca

SEQ ID NO: 4009893 - DNA, 25 bp, Homo sapien
gaaatgatcccaagcactgccaggt

SEQ ID NO: 4009894 - DNA, 25 bp, Homo sapien
cactgccaggttcaatgctagaaca

SEQ ID NO: 4009895 - DNA, 25 bp, Homo sapien
cactctgagagctaaaccatgcacg

SEQ ID NO: 4009896 - DNA, 25 bp, Homo sapien
tggagacttgggctcagctcaatgc

SEQ ID NO: 4009897 - DNA, 25 bp, Homo sapien
cattgttcattttaagcgagagagg

SEQ ID NO: 4009898 - DNA, 25 bp, Homo sapien
tatcccttccagttgatggaccatc

SEQ ID NO: 4009899 - DNA, 25 bp, Homo sapien
ccatcacgtgatgtcacctacaggg

SEQ ID NO: 4009900 - DNA, 25 bp, Homo sapien
cggccgtgtgacttcaagaaattca

SEQ ID NO: 4009901 - DNA, 25 bp, Homo sapien
ttgcattgtcccggccgtgtgactt

SEQ ID NO: 4009902 - DNA, 25 bp, Homo sapien
gaaattcatatctcggtatcgggag

SEQ ID NO: 4009903 - DNA, 25 bp, Homo sapien
tatcgggagagaaacgccaccaact

SEQ ID NO: 4009904 - DNA, 25 bp, Homo sapien
tcgttgccagcattgttatcccaaa

SEQ ID NO: 4009905 - DNA, 25 bp, Homo sapien
aaatttatccccatcaatctcagca

SEQ ID NO: 4009906 - DNA, 25 bp, Homo sapien
taatcacagctaatccgcttgcgca

SEQ ID NO: 4009907 - DNA, 25 bp, Homo sapien
tcagcactagcagtgtaatcacagc

SEQ ID NO: 4009908 - DNA, 25 bp, Homo sapien
gcttccacatgaaatcgtctcaaaa

SEQ ID NO: 4009909 - DNA, 25 bp, Homo sapien
catgaaatcgtctcaaaagatgaca

SEQ ID NO: 4009910 - DNA, 25 bp, Homo sapien
tgcttccacatgaaatcgtctcaaa

SEQ ID NO: 4009911 - DNA, 25 bp, Homo sapien
tccacatgaaatcgtctcaaaagat

SEQ ID NO: 4009912 - DNA, 25 bp, Homo sapien
acacgtttctcactctctttttctg

SEQ ID NO: 4009913 - DNA, 25 bp, Homo sapien
ttttctggtgaagtcatttgccaaa

SEQ ID NO: 4009914 - DNA, 25 bp, Homo sapien
ctttttctggtgaagtcatttgcca

SEQ ID NO: 4009915 - DNA, 25 bp, Homo sapien
ctctttttctggtgaagtcatttgc

SEQ ID NO: 4009916 - DNA, 25 bp, Homo sapien
gtgatggagttgggatgtcttgcag

SEQ ID NO: 4009917 - DNA, 25 bp, Homo sapien
ggtgatggagttgggatgtcttgca

SEQ ID NO: 4009918 - DNA, 25 bp, Homo sapien
caggctggtggggttaagcaggggc

SEQ ID NO: 4009919 - DNA, 25 bp, Homo sapien
agcaggctggtggggttaagcaggg

SEQ ID NO: 4009920 - DNA, 25 bp, Homo sapien
tattaagcgccactaatttcagttg

SEQ ID NO: 4009921 - DNA, 25 bp, Homo sapien
tatgacagttgaaccccaaaatttc

SEQ ID NO: 4009922 - DNA, 25 bp, Homo sapien
aaccatgtttggtgtatcctaccta

SEQ ID NO: 4009923 - DNA, 25 bp, Homo sapien
tgacctcaagttaccgccctctttg

SEQ ID NO: 4009924 - DNA, 25 bp, Homo sapien
atcttcaacctgaatcttccccgga

SEQ ID NO: 4009925 - DNA, 25 bp, Homo sapien
aacctgaatcttccccggacaatga

SEQ ID NO: 4009926 - DNA, 25 bp, Homo sapien
tcttccccggacaatgagaatcact

SEQ ID NO: 4009927 - DNA, 25 bp, Homo sapien
tttctttcccgttcagctgaggtcc

SEQ ID NO: 4009928 - DNA, 25 bp, Homo sapien
tcctgcagccaatctaaagtaggcc

SEQ ID NO: 4009929 - DNA, 25 bp, Homo sapien
taggccaggtataattccttgcctc

SEQ ID NO: 4009930 - DNA, 25 bp, Homo sapien
ccttgcctcggtaaatagaacatac

SEQ ID NO: 4009931 - DNA, 25 bp, Homo sapien
ccagccgaggtctcttactacaagt

SEQ ID NO: 4009932 - DNA, 25 bp, Homo sapien
gatgagaccttggatgtaccttacg

SEQ ID NO: 4009933 - DNA, 25 bp, Homo sapien
tgcttgatgcataaagtgcctctgg

SEQ ID NO: 4009934 - DNA, 25 bp, Homo sapien
caaaataggttgcacgcatggcctg

SEQ ID NO: 4009935 - DNA, 25 bp, Homo sapien
ggagcaccttccaagtgtccggcag

SEQ ID NO: 4009936 - DNA, 25 bp, Homo sapien
cagtctagggtctcccagcagatgg

SEQ ID NO: 4009937 - DNA, 25 bp, Homo sapien
gttcaaggatgtcaggtgtacccca

SEQ ID NO: 4009938 - DNA, 25 bp, Homo sapien
cgtttatccctctgtcttatggaca

SEQ ID NO: 4009939 - DNA, 25 bp, Homo sapien
cattcaaactgaccagagattgtgc

SEQ ID NO: 4009940 - DNA, 25 bp, Homo sapien
ccatgcttgtaccttgtttgggttc

SEQ ID NO: 4009941 - DNA, 25 bp, Homo sapien
caaaactcaaactcttgggaatatg

SEQ ID NO: 4009942 - DNA, 25 bp, Homo sapien
gaaagtccagatacaagaacaatgg

SEQ ID NO: 4009943 - DNA, 25 bp, Homo sapien
aagcagccacttctagctttaaaga

SEQ ID NO: 4009944 - DNA, 25 bp, Homo sapien
agacctggagcacttgccgatgcag

SEQ ID NO: 4009945 - DNA, 25 bp, Homo sapien
tagtcggccgcactcaggttgatga

SEQ ID NO: 4009946 - DNA, 25 bp, Homo sapien
gtcccgcatgctctgcaggtaggtg

SEQ ID NO: 4009947 - DNA, 25 bp, Homo sapien
gacgcggacattgctgtactgcctg

SEQ ID NO: 4009948 - DNA, 25 bp, Homo sapien
cactgcacgttcttgttggctttac

SEQ ID NO: 4009949 - DNA, 25 bp, Homo sapien
ggaccaccaggacaaaggcgattct

SEQ ID NO: 4009950 - DNA, 25 bp, Homo sapien
gaccgggttggctggcatgtactcc

SEQ ID NO: 4009951 - DNA, 25 bp, Homo sapien
tctttgtggtagatggccttgaaca

SEQ ID NO: 4009952 - DNA, 25 bp, Homo sapien
gatttagccagacagcttcatccac

SEQ ID NO: 4009953 - DNA, 25 bp, Homo sapien
gacagatttagccagacagcttcat

SEQ ID NO: 4009954 - DNA, 25 bp, Homo sapien
agttgaagactcaggcctgagaggt

SEQ ID NO: 4009955 - DNA, 25 bp, Homo sapien
gggcaaagttgaagactcaggcctg

SEQ ID NO: 4009956 - DNA, 25 bp, Homo sapien
ttaagtgagtaacactctaaagtta

SEQ ID NO: 4009957 - DNA, 25 bp, Homo sapien
taatgccaaattggttggaattttc

SEQ ID NO: 4009958 - DNA, 25 bp, Homo sapien
caactctccaaggattaagtgagta

SEQ ID NO: 4009959 - DNA, 25 bp, Homo sapien
ggattaagtgagtaacactctaaag

SEQ ID NO: 4009960 - DNA, 25 bp, Homo sapien
ttctttcacagtcttatttcgcagt

SEQ ID NO: 4009961 - DNA, 25 bp, Homo sapien
cacagtcttatttcgcagtcttatc

SEQ ID NO: 4009962 - DNA, 25 bp, Homo sapien
gagccatctgtgatttggcttgttt

SEQ ID NO: 4009963 - DNA, 25 bp, Homo sapien
cttatttcgcagtcttatcagtgta

SEQ ID NO: 4009964 - DNA, 25 bp, Homo sapien
agttttccaggcagacacacttggg

SEQ ID NO: 4009965 - DNA, 25 bp, Homo sapien
tgctccctaaaatgaacacctggtc

SEQ ID NO: 4009966 - DNA, 25 bp, Homo sapien
taaatctcgagacttcatggacagg

SEQ ID NO: 4009967 - DNA, 25 bp, Homo sapien
tagcaatgtctgctttggcccagga

SEQ ID NO: 4009968 - DNA, 25 bp, Homo sapien
gcttgtcttcatccattctccgttt

SEQ ID NO: 4009969 - DNA, 25 bp, Homo sapien
tccaaggtcatctgagcacctttca

SEQ ID NO: 4009970 - DNA, 25 bp, Homo sapien
ccttggctccgtgatagccttttct

SEQ ID NO: 4009971 - DNA, 25 bp, Homo sapien
tcctccggtcccttcaatgtaggca

SEQ ID NO: 4009972 - DNA, 25 bp, Homo sapien
gctccagaaggagatctgtgttttt

SEQ ID NO: 4009973 - DNA, 25 bp, Homo sapien
tgtaatatacgaagtttggtgcttc

SEQ ID NO: 4009974 - DNA, 25 bp, Homo sapien
tctaaggatgtgtaatatacgaagt

SEQ ID NO: 4009975 - DNA, 25 bp, Homo sapien
tattcaacttacaatcccaattatt

SEQ ID NO: 4009976 - DNA, 25 bp, Homo sapien
caccccacaagttggcctcccttgg

SEQ ID NO: 4009977 - DNA, 25 bp, Homo sapien
tggacttttctcaccccacaagttg

SEQ ID NO: 4009978 - DNA, 25 bp, Homo sapien
cactcagcaatgtgtcttggttgaa

SEQ ID NO: 4009979 - DNA, 25 bp, Homo sapien
acactcagcaatgtgtcttggttga

SEQ ID NO: 4009980 - DNA, 25 bp, Homo sapien
tccttcctgagagacgcagcggtgt

SEQ ID NO: 4009981 - DNA, 25 bp, Homo sapien
tcttaccagcgtttctacaggatgc

SEQ ID NO: 4009982 - DNA, 25 bp, Homo sapien
ggtgtaattagaatccggagacgga

SEQ ID NO: 4009983 - DNA, 25 bp, Homo sapien
gttcagtccattccaagcaagttag

SEQ ID NO: 4009984 - DNA, 25 bp, Homo sapien
ttagcacaaggagcggcaacggtca

SEQ ID NO: 4009985 - DNA, 25 bp, Homo sapien
tcaggacgcaaagggtcatcaaggg

SEQ ID NO: 4009986 - DNA, 25 bp, Homo sapien
gggtcttcaggacgcaaagggtcat

SEQ ID NO: 4009987 - DNA, 25 bp, Homo sapien
caatgtgaggtgtctcattatggac

SEQ ID NO: 4009988 - DNA, 25 bp, Homo sapien
gttttgttccatgggaagttgttca

SEQ ID NO: 4009989 - DNA, 25 bp, Homo sapien
cttaaatgctattaattgtaagccg

SEQ ID NO: 4009990 - DNA, 25 bp, Homo sapien
tgtaagccgttttgttccatgggaa

SEQ ID NO: 4009991 - DNA, 25 bp, Homo sapien
taattgtaagccgttttgttccatg

SEQ ID NO: 4009992 - DNA, 25 bp, Homo sapien
acacatcagatctcgtgtgctcatc

SEQ ID NO: 4009993 - DNA, 25 bp, Homo sapien
aacacatcagatctcgtgtgctcat

SEQ ID NO: 4009994 - DNA, 25 bp, Homo sapien
cagggagtactagaacacatcagat

SEQ ID NO: 4009995 - DNA, 25 bp, Homo sapien
gggagtactagaacacatcagatct

SEQ ID NO: 4009996 - DNA, 25 bp, Homo sapien
cctcgagggggcagaaccgagtcac

SEQ ID NO: 4009997 - DNA, 25 bp, Homo sapien
tttcggccgatgagaaaagtagcca

SEQ ID NO: 4009998 - DNA, 25 bp, Homo sapien
gtaagtctccccaatctcctggcgg

SEQ ID NO: 4009999 - DNA, 25 bp, Homo sapien
catgaggcggtctggacacatcctt

SEQ ID NO: 4010000 - DNA, 25 bp, Homo sapien
cagccctaacttgtggcggcagtaa

SEQ ID NO: 4010001 - DNA, 25 bp, Homo sapien
gcatatccaatgtcctacaacacgg

SEQ ID NO: 4010002 - DNA, 25 bp, Homo sapien
tgcttaaagctcattcccaaggcct

SEQ ID NO: 4010003 - DNA, 25 bp, Homo sapien
gagtcattctggagaccacgcatgg

SEQ ID NO: 4010004 - DNA, 25 bp, Homo sapien
aagcaaacttgcgacactcttgtgc

SEQ ID NO: 4010005 - DNA, 25 bp, Homo sapien
ataattaaatgcaataatgtcctcc

SEQ ID NO: 4010006 - DNA, 25 bp, Homo sapien
aattaaatgcaataatgtcctccat

SEQ ID NO: 4010007 - DNA, 25 bp, Homo sapien
aaataattaaatgcaataatgtcct

SEQ ID NO: 4010008 - DNA, 25 bp, Homo sapien
ctggagaaataattaaatgcaataa

SEQ ID NO: 4010009 - DNA, 25 bp, Homo sapien
ctgctgcaaagacacgtgggtctgt

SEQ ID NO: 4010010 - DNA, 25 bp, Homo sapien
gctgctgcaaagacacgtgggtctg

SEQ ID NO: 4010011 - DNA, 25 bp, Homo sapien
gctgcaaagacacgtgggtctgttt

SEQ ID NO: 4010012 - DNA, 25 bp, Homo sapien
tgcaaagacacgtgggtctgtttcc

SEQ ID NO: 4010013 - DNA, 25 bp, Homo sapien
taatcctagaccagcttagaggcag

SEQ ID NO: 4010014 - DNA, 25 bp, Homo sapien
gacatgacagcccaactgagatcag

SEQ ID NO: 4010015 - DNA, 25 bp, Homo sapien
tgtactgatggtcccaagcaatggc

SEQ ID NO: 4010016 - DNA, 25 bp, Homo sapien
tcatggcaagagtaacggcagctgg

SEQ ID NO: 4010017 - DNA, 25 bp, Homo sapien
actgagtgttgaggtgatttgttaa

SEQ ID NO: 4010018 - DNA, 25 bp, Homo sapien
ctgaaggtcaaatacggtgctgagg

SEQ ID NO: 4010019 - DNA, 25 bp, Homo sapien
ggccagaaatcctctgaggcccctg

SEQ ID NO: 4010020 - DNA, 25 bp, Homo sapien
ctgaggacctcacacttagaatgtg

SEQ ID NO: 4010021 - DNA, 25 bp, Homo sapien
tcaaatacggtgctgaggacctcac

SEQ ID NO: 4010022 - DNA, 25 bp, Homo sapien
caaaccatgtttagcaaggcctggg

SEQ ID NO: 4010023 - DNA, 25 bp, Homo sapien
ttatgtgggacctaaaaggatgcca

SEQ ID NO: 4010024 - DNA, 25 bp, Homo sapien
ggctcagcgcgtttatccccatgta

SEQ ID NO: 4010025 - DNA, 25 bp, Homo sapien
tcttggaaagctgcggtaacatgga

SEQ ID NO: 4010026 - DNA, 25 bp, Homo sapien
gctgttagcaagctgcaaagcctgc

SEQ ID NO: 4010027 - DNA, 25 bp, Homo sapien
cataagatgtcgagtctagaccagg

SEQ ID NO: 4010028 - DNA, 25 bp, Homo sapien
ggacaccgtcgtagcagacagccat

SEQ ID NO: 4010029 - DNA, 25 bp, Homo sapien
ctcctcttgtgaggccctctggaga

SEQ ID NO: 4010030 - DNA, 25 bp, Homo sapien
cttccagatggcacaggaatgatct

SEQ ID NO: 4010031 - DNA, 25 bp, Homo sapien
gcttccagatggcacaggaatgatc

SEQ ID NO: 4010032 - DNA, 25 bp, Homo sapien
agcttccagatggcacaggaatgat

SEQ ID NO: 4010033 - DNA, 25 bp, Homo sapien
ctgaatggaaataatggcctatgtc

SEQ ID NO: 4010034 - DNA, 25 bp, Homo sapien
agataccaagcctgaatttgaattc

SEQ ID NO: 4010035 - DNA, 25 bp, Homo sapien
tggcctatgtcatctggccccttcg

SEQ ID NO: 4010036 - DNA, 25 bp, Homo sapien
ggaacatctcatatcaagataccaa

SEQ ID NO: 4010037 - DNA, 25 bp, Homo sapien
tgggaacccctgcacacaaaaaatg

SEQ ID NO: 4010038 - DNA, 25 bp, Homo sapien
gaaggctaccccaacagattaatga

SEQ ID NO: 4010039 - DNA, 25 bp, Homo sapien
gcagtgctctgaagacccgacaagt

SEQ ID NO: 4010040 - DNA, 25 bp, Homo sapien
ttttggcatcttcgcgcagacggca

SEQ ID NO: 4010041 - DNA, 25 bp, Homo sapien
gagcgcgtcttcgtgcacacagtga

SEQ ID NO: 4010042 - DNA, 25 bp, Homo sapien
aaatggtaacgctagagacaggctc

SEQ ID NO: 4010043 - DNA, 25 bp, Homo sapien
aaagatcaggtagtgcccaagtccc

SEQ ID NO: 4010044 - DNA, 25 bp, Homo sapien
gacacagaaagttccgaagcgcaga

SEQ ID NO: 4010045 - DNA, 25 bp, Homo sapien
tgcccgtgcgcaaccatcagtgctt

SEQ ID NO: 4010046 - DNA, 25 bp, Homo sapien
cgtactctatttgagaaggcaggaa

SEQ ID NO: 4010047 - DNA, 25 bp, Homo sapien
aaagcctccaaaacgctccagatgg

SEQ ID NO: 4010048 - DNA, 25 bp, Homo sapien
tttcagtttagcaggccacgtgatc

SEQ ID NO: 4010049 - DNA, 25 bp, Homo sapien
ggtgacgacacagttcatctctgaa

SEQ ID NO: 4010050 - DNA, 25 bp, Homo sapien
caagcacctagtttggctgccaaaa

SEQ ID NO: 4010051 - DNA, 25 bp, Homo sapien
gaactgcacgcaggcaaaaaatgtc

SEQ ID NO: 4010052 - DNA, 25 bp, Homo sapien
aacatcctggtatttcaactcgtgc

SEQ ID NO: 4010053 - DNA, 25 bp, Homo sapien
tgcttggggttaccaggtccagact

SEQ ID NO: 4010054 - DNA, 25 bp, Homo sapien
gctgcttggggttaccaggtccaga

SEQ ID NO: 4010055 - DNA, 25 bp, Homo sapien
gggctgcttggggttaccaggtcca

SEQ ID NO: 4010056 - DNA, 25 bp, Homo sapien
gcttggggttaccaggtccagactg

SEQ ID NO: 4010057 - DNA, 25 bp, Homo sapien
aggacaaacaatacccaggggactg

SEQ ID NO: 4010058 - DNA, 25 bp, Homo sapien
acaaacaatacccaggggactgtca

SEQ ID NO: 4010059 - DNA, 25 bp, Homo sapien
gcaggggacaggacaaacaataccc

SEQ ID NO: 4010060 - DNA, 25 bp, Homo sapien
gacaggacaaacaatacccagggga

SEQ ID NO: 4010061 - DNA, 25 bp, Homo sapien
tactgagctgctgaacgactgggca

SEQ ID NO: 4010062 - DNA, 25 bp, Homo sapien
tcctggaccacggagacagtagctg

SEQ ID NO: 4010063 - DNA, 25 bp, Homo sapien
agagctcgtacaatccaccgttggg

SEQ ID NO: 4010064 - DNA, 25 bp, Homo sapien
tttcaagagcttcactgtcccatgg

SEQ ID NO: 4010065 - DNA, 25 bp, Homo sapien
cataagaattaatgggctggagact

SEQ ID NO: 4010066 - DNA, 25 bp, Homo sapien
tcaacagatgctgggcaccataaga

SEQ ID NO: 4010067 - DNA, 25 bp, Homo sapien
gactcaggtaagagccattcagaag

SEQ ID NO: 4010068 - DNA, 25 bp, Homo sapien
tcccgattactccaaaaactgctct

SEQ ID NO: 4010069 - DNA, 25 bp, Homo sapien
cactcactgaactccttttttattt

SEQ ID NO: 4010070 - DNA, 25 bp, Homo sapien
gagcattcatcactgcaagtcaggg

SEQ ID NO: 4010071 - DNA, 25 bp, Homo sapien
cagaggagcattcatcactgcaagt

SEQ ID NO: 4010072 - DNA, 25 bp, Homo sapien
ggagaccagaggagcattcatcact

SEQ ID NO: 4010073 - DNA, 25 bp, Homo sapien
cattcatcactgcaagtcagggctt

SEQ ID NO: 4010074 - DNA, 25 bp, Homo sapien
tcttggacaagcaaagcggctgatg

SEQ ID NO: 4010075 - DNA, 25 bp, Homo sapien
tctcagtgaaatctaacaggcaggc

SEQ ID NO: 4010076 - DNA, 25 bp, Homo sapien
tgaggaccgttgcaattcacacgag

SEQ ID NO: 4010077 - DNA, 25 bp, Homo sapien
taaccaagcgatggctgaggaccgt

SEQ ID NO: 4010078 - DNA, 25 bp, Homo sapien
gatggagcaggcgatgctgtcctta

SEQ ID NO: 4010079 - DNA, 25 bp, Homo sapien
ggagcaggcgatgctgtccttagaa

SEQ ID NO: 4010080 - DNA, 25 bp, Homo sapien
tgacagctgggctcaagatggagca

SEQ ID NO: 4010081 - DNA, 25 bp, Homo sapien
ctcaagatggagcaggcgatgctgt

SEQ ID NO: 4010082 - DNA, 25 bp, Homo sapien
tgggtaacatttgaggcactacttc

SEQ ID NO: 4010083 - DNA, 25 bp, Homo sapien
gacccagggctcagggtacatctgt

SEQ ID NO: 4010084 - DNA, 25 bp, Homo sapien
catcttgttcatggcatatgggtaa

SEQ ID NO: 4010085 - DNA, 25 bp, Homo sapien
gtacatctgtcacctaacctctgca

SEQ ID NO: 4010086 - DNA, 25 bp, Homo sapien
tggccacgggcttgtgccaacagtc

SEQ ID NO: 4010087 - DNA, 25 bp, Homo sapien
cagatctggccacgggcttgtgcca

SEQ ID NO: 4010088 - DNA, 25 bp, Homo sapien
ctgaggccagcacaaagtcagatct

SEQ ID NO: 4010089 - DNA, 25 bp, Homo sapien
ttcacctcacaatgggctgaggcca

SEQ ID NO: 4010090 - DNA, 25 bp, Homo sapien
tgcactttggttgggttccaacatc

SEQ ID NO: 4010091 - DNA, 25 bp, Homo sapien
cggacacagatgttcgcccatgggt

SEQ ID NO: 4010092 - DNA, 25 bp, Homo sapien
cccttgggctaacagattggacttt

SEQ ID NO: 4010093 - DNA, 25 bp, Homo sapien
gagagtctaccttgtgccattgctg

SEQ ID NO: 4010094 - DNA, 25 bp, Homo sapien
cactcccaggagataagatttgact

SEQ ID NO: 4010095 - DNA, 25 bp, Homo sapien
gacacgtttcccaaagggtagcaca

SEQ ID NO: 4010096 - DNA, 25 bp, Homo sapien
tggaagttctctcatagtccctggg

SEQ ID NO: 4010097 - DNA, 25 bp, Homo sapien
taggaagtttaggtgacatcagagg

SEQ ID NO: 4010098 - DNA, 25 bp, Homo sapien
ggtagactgggtagagacacgtttc

SEQ ID NO: 4010099 - DNA, 25 bp, Homo sapien
tgagtctccagggtgatgagcggac

SEQ ID NO: 4010100 - DNA, 25 bp, Homo sapien
agtctccagggtgatgagcggactt

SEQ ID NO: 4010101 - DNA, 25 bp, Homo sapien
gagtctccagggtgatgagcggact

SEQ ID NO: 4010102 - DNA, 25 bp, Homo sapien
agagccaggtatctccgtgaagccc

SEQ ID NO: 4010103 - DNA, 25 bp, Homo sapien
tccgtgaagcccaccaaatcaacaa

SEQ ID NO: 4010104 - DNA, 25 bp, Homo sapien
ccttcagagccaggtatctccgtga

SEQ ID NO: 4010105 - DNA, 25 bp, Homo sapien
cgtgaagcccaccaaatcaacaaca

SEQ ID NO: 4010106 - DNA, 25 bp, Homo sapien
gctctagccaagtctgaatgaccag

SEQ ID NO: 4010107 - DNA, 25 bp, Homo sapien
gccagaaacctaaagggacactgtc

SEQ ID NO: 4010108 - DNA, 25 bp, Homo sapien
ggagaatgtccagctctagccaagt

SEQ ID NO: 4010109 - DNA, 25 bp, Homo sapien
gaatgaccagccagaaacctaaagg

SEQ ID NO: 4010110 - DNA, 25 bp, Homo sapien
aaattcgggatcccgtgacttcaca

SEQ ID NO: 4010111 - DNA, 25 bp, Homo sapien
tcgggatcccgtgacttcacagcag

SEQ ID NO: 4010112 - DNA, 25 bp, Homo sapien
attcgggatcccgtgacttcacagc

SEQ ID NO: 4010113 - DNA, 25 bp, Homo sapien
cgggatcccgtgacttcacagcaga

SEQ ID NO: 4010114 - DNA, 25 bp, Homo sapien
gagttgacagtcacctatgagcagt

SEQ ID NO: 4010115 - DNA, 25 bp, Homo sapien
caatgcccatgcactagtttcacgg

SEQ ID NO: 4010116 - DNA, 25 bp, Homo sapien
caagtgcttccaatagtgcctgcca

SEQ ID NO: 4010117 - DNA, 25 bp, Homo sapien
gccacagagccaacacgatatgaat

SEQ ID NO: 4010118 - DNA, 25 bp, Homo sapien
cgcagtggtgaattatgcgctaatt

SEQ ID NO: 4010119 - DNA, 25 bp, Homo sapien
cgctaattagcaggatcagcagaga

SEQ ID NO: 4010120 - DNA, 25 bp, Homo sapien
gacattaaataaggtgcatcaacgc

SEQ ID NO: 4010121 - DNA, 25 bp, Homo sapien
tgttcaacaattgagcaatggtgac

SEQ ID NO: 4010122 - DNA, 25 bp, Homo sapien
ttccaggtggctggcgaggcctcac

SEQ ID NO: 4010123 - DNA, 25 bp, Homo sapien
gttccaggtggctggcgaggcctca

SEQ ID NO: 4010124 - DNA, 25 bp, Homo sapien
agttccaggtggctggcgaggcctc

SEQ ID NO: 4010125 - DNA, 25 bp, Homo sapien
tccaggtggctggcgaggcctcaca

SEQ ID NO: 4010126 - DNA, 25 bp, Homo sapien
tctccattgagagccgtcctccaag

SEQ ID NO: 4010127 - DNA, 25 bp, Homo sapien
cataagggctagaagagcagcttga

SEQ ID NO: 4010128 - DNA, 25 bp, Homo sapien
tccagacacaattctccattgagag

SEQ ID NO: 4010129 - DNA, 25 bp, Homo sapien
agcagcttgaaacgctggacttgcc

SEQ ID NO: 4010130 - DNA, 25 bp, Homo sapien
tagtttggatggcaggcgtatatca

SEQ ID NO: 4010131 - DNA, 25 bp, Homo sapien
ggatggcaggcgtatatcagcatgc

SEQ ID NO: 4010132 - DNA, 25 bp, Homo sapien
caggcgtatatcagcatgcccggct

SEQ ID NO: 4010133 - DNA, 25 bp, Homo sapien
agagcttgtgcgggaaatttccctt

SEQ ID NO: 4010134 - DNA, 25 bp, Homo sapien
tgtgttaacacatccagcagtaaag

SEQ ID NO: 4010135 - DNA, 25 bp, Homo sapien
agcagtaaagaaccagggccctcga

SEQ ID NO: 4010136 - DNA, 25 bp, Homo sapien
tacagaagtcaatttaaaccaagga

SEQ ID NO: 4010137 - DNA, 25 bp, Homo sapien
tgggccagttgtgaaacttacagaa

SEQ ID NO: 4010138 - DNA, 25 bp, Homo sapien
gggaaaagctaatccatggacctct

SEQ ID NO: 4010139 - DNA, 25 bp, Homo sapien
ctagttcgtgaagccatccatggtg

SEQ ID NO: 4010140 - DNA, 25 bp, Homo sapien
tggtacacagcataatacagtggcc

SEQ ID NO: 4010141 - DNA, 25 bp, Homo sapien
tagcagtagccacgcagtttgtaaa

SEQ ID NO: 4010142 - DNA, 25 bp, Homo sapien
ggtgcaatctcagtcttagctcact

SEQ ID NO: 4010143 - DNA, 25 bp, Homo sapien
tgcattggtgcaatctcagtcttag

SEQ ID NO: 4010144 - DNA, 25 bp, Homo sapien
cattggtgcaatctcagtcttagct

SEQ ID NO: 4010145 - DNA, 25 bp, Homo sapien
ttggtgcaatctcagtcttagctca

SEQ ID NO: 4010146 - DNA, 25 bp, Homo sapien
tcaatgtgtctgagcttttgagaca

SEQ ID NO: 4010147 - DNA, 25 bp, Homo sapien
tctcttgtcatcaatgtgtctgagc

SEQ ID NO: 4010148 - DNA, 25 bp, Homo sapien
tgtctgagcttttgagacatctgta

SEQ ID NO: 4010149 - DNA, 25 bp, Homo sapien
ctaaaagcatctcttgtcatcaatg

SEQ ID NO: 4010150 - DNA, 25 bp, Homo sapien
ctgggttcaccaaactaggtctctt

SEQ ID NO: 4010151 - DNA, 25 bp, Homo sapien
tccactgggttcaccaaactaggtc

SEQ ID NO: 4010152 - DNA, 25 bp, Homo sapien
aactgacatccccttgccgccaggg

SEQ ID NO: 4010153 - DNA, 25 bp, Homo sapien
tcgggaagctttcggccgtgtggta

SEQ ID NO: 4010154 - DNA, 25 bp, Homo sapien
caactgctccaaagactcagggacc

SEQ ID NO: 4010155 - DNA, 25 bp, Homo sapien
ggtcaatggatgaaatgcctcccca

SEQ ID NO: 4010156 - DNA, 25 bp, Homo sapien
gatgggagcccaatttctttaagaa

SEQ ID NO: 4010157 - DNA, 25 bp, Homo sapien
agaagcacccgtctttgaaaagcag

SEQ ID NO: 4010158 - DNA, 25 bp, Homo sapien
ccagggatggcgaattcttaagttc

SEQ ID NO: 4010159 - DNA, 25 bp, Homo sapien
aattctgccgcaggttaactcaacg

SEQ ID NO: 4010160 - DNA, 25 bp, Homo sapien
caagtatgttgctctcacctccagg

SEQ ID NO: 4010161 - DNA, 25 bp, Homo sapien
gaaatgcgacagcaataaaatcact

SEQ ID NO: 4010162 - DNA, 25 bp, Homo sapien
cacggacatatagcgatcaatgcag

SEQ ID NO: 4010163 - DNA, 25 bp, Homo sapien
ccatggatggtaaatcacgttgtcc

SEQ ID NO: 4010164 - DNA, 25 bp, Homo sapien
gaatccattcgaaggcaggccatgg

SEQ ID NO: 4010165 - DNA, 25 bp, Homo sapien
tttctggtggcagttaacacggaca

SEQ ID NO: 4010166 - DNA, 25 bp, Homo sapien
ccagcgagggacttaacagcatttc

SEQ ID NO: 4010167 - DNA, 25 bp, Homo sapien
aagaatggaatttgggctccagcga

SEQ ID NO: 4010168 - DNA, 25 bp, Homo sapien
caggaacactagcttcacagccaga

SEQ ID NO: 4010169 - DNA, 25 bp, Homo sapien
gcctcaaaggtatttgaatcaggaa

SEQ ID NO: 4010170 - DNA, 25 bp, Homo sapien
attgaaaaagaaaatatctaagata

SEQ ID NO: 4010171 - DNA, 25 bp, Homo sapien
ctttcattgaaaaagaaaatatcta

SEQ ID NO: 4010172 - DNA, 25 bp, Homo sapien
cattgaaaaagaaaatatctaagat

SEQ ID NO: 4010173 - DNA, 25 bp, Homo sapien
ttcattgaaaaagaaaatatctaag

SEQ ID NO: 4010174 - DNA, 25 bp, Homo sapien
cctttctgtctttcgtaagtatgca

SEQ ID NO: 4010175 - DNA, 25 bp, Homo sapien
gaagcatgtcccatccacaaagaag

SEQ ID NO: 4010176 - DNA, 25 bp, Homo sapien
gaaagtctgttatccacacaatgcc

SEQ ID NO: 4010177 - DNA, 25 bp, Homo sapien
tggtgacaagcgtgtcatcacctgc

SEQ ID NO: 4010178 - DNA, 25 bp, Homo sapien
gatgcctgtaagatgccttctgcgt

SEQ ID NO: 4010179 - DNA, 25 bp, Homo sapien
cctgtaagatgccttctgcgtacat

SEQ ID NO: 4010180 - DNA, 25 bp, Homo sapien
gagatgcctgtaagatgccttctgc

SEQ ID NO: 4010181 - DNA, 25 bp, Homo sapien
tgcctgtaagatgccttctgcgtac

SEQ ID NO: 4010182 - DNA, 25 bp, Homo sapien
tgcctggcacgtagaggctgctcca

SEQ ID NO: 4010183 - DNA, 25 bp, Homo sapien
cacgtagaggctgctccataaatat

SEQ ID NO: 4010184 - DNA, 25 bp, Homo sapien
acacttgttcactgatacgtcccaa

SEQ ID NO: 4010185 - DNA, 25 bp, Homo sapien
tacgtcccaagaacctagcccagtg

SEQ ID NO: 4010186 - DNA, 25 bp, Homo sapien
tacaaagtttggacactagcaggga

SEQ ID NO: 4010187 - DNA, 25 bp, Homo sapien
gatctagaaaagctcgtcaggcttg

SEQ ID NO: 4010188 - DNA, 25 bp, Homo sapien
ggccacggtggtcggtcaaacagta

SEQ ID NO: 4010189 - DNA, 25 bp, Homo sapien
gacatcctataaagggctgccaagc

SEQ ID NO: 4010190 - DNA, 25 bp, Homo sapien
tcaaaagatttgctctgaactggtg

SEQ ID NO: 4010191 - DNA, 25 bp, Homo sapien
gaactggtgaaagtctggggactcc

SEQ ID NO: 4010192 - DNA, 25 bp, Homo sapien
ctcagcggggaacagcccaacccaa

SEQ ID NO: 4010193 - DNA, 25 bp, Homo sapien
tggagactcaaccaaccctcagcgg

SEQ ID NO: 4010194 - DNA, 25 bp, Homo sapien
caggtaagttttgacatggagatga

SEQ ID NO: 4010195 - DNA, 25 bp, Homo sapien
aagttccgagttggggacatcatca

SEQ ID NO: 4010196 - DNA, 25 bp, Homo sapien
cttaggacaggaccaaagacaggta

SEQ ID NO: 4010197 - DNA, 25 bp, Homo sapien
caagctgaggggagtgtaagacacc

SEQ ID NO: 4010198 - DNA, 25 bp, Homo sapien
tcctctgggcacagttttaacctta

SEQ ID NO: 4010199 - DNA, 25 bp, Homo sapien
aatagactaccagttttcctctggg

SEQ ID NO: 4010200 - DNA, 25 bp, Homo sapien
tattgttttatgaaggaagcctgga

SEQ ID NO: 4010201 - DNA, 25 bp, Homo sapien
tatttaatgtcaaaacctaaagtgc

SEQ ID NO: 4010202 - DNA, 25 bp, Homo sapien
atgcccagtcaatttgtggacacaa

SEQ ID NO: 4010203 - DNA, 25 bp, Homo sapien
tagatgggaatactatcagcagcca

SEQ ID NO: 4010204 - DNA, 25 bp, Homo sapien
aatgataatctaggagacgctgctc

SEQ ID NO: 4010205 - DNA, 25 bp, Homo sapien
gtgcctgccacgtagtgacatctaa

SEQ ID NO: 4010206 - DNA, 25 bp, Homo sapien
gttacatctttctgtgcggcacatg

SEQ ID NO: 4010207 - DNA, 25 bp, Homo sapien
gagctctggggccattactttccat

SEQ ID NO: 4010208 - DNA, 25 bp, Homo sapien
acagaagacaggcatggggagctct

SEQ ID NO: 4010209 - DNA, 25 bp, Homo sapien
gctctggggccattactttccataa

SEQ ID NO: 4010210 - DNA, 25 bp, Homo sapien
agctctggggccattactttccata

SEQ ID NO: 4010211 - DNA, 25 bp, Homo sapien
caggatttgaaatccagttagagtt

SEQ ID NO: 4010212 - DNA, 25 bp, Homo sapien
gcacttccttgatcgtcattaacca

SEQ ID NO: 4010213 - DNA, 25 bp, Homo sapien
caagctgcaatcaggatttgaaatc

SEQ ID NO: 4010214 - DNA, 25 bp, Homo sapien
cccacttcttcttacttaaatgcca

SEQ ID NO: 4010215 - DNA, 25 bp, Homo sapien
cagagatgaaagtcacggtccgtcc

SEQ ID NO: 4010216 - DNA, 25 bp, Homo sapien
gctgcttgaagacatgagccccgtc

SEQ ID NO: 4010217 - DNA, 25 bp, Homo sapien
ccccacgggttacaagacgctgtga

SEQ ID NO: 4010218 - DNA, 25 bp, Homo sapien
cgctgtgaggaaggaacgcagacaa

SEQ ID NO: 4010219 - DNA, 25 bp, Homo sapien
gagaagagtatgaaggttcttcaca

SEQ ID NO: 4010220 - DNA, 25 bp, Homo sapien
acgaatggccaatggatatataaaa

SEQ ID NO: 4010221 - DNA, 25 bp, Homo sapien
catacgaatggccaatggatatata

SEQ ID NO: 4010222 - DNA, 25 bp, Homo sapien
agacatacgaatggccaatggatat

SEQ ID NO: 4010223 - DNA, 25 bp, Homo sapien
caaaggcgtcggataatacagaaac

SEQ ID NO: 4010224 - DNA, 25 bp, Homo sapien
tatacaaagtgtaatgcgtcgctca

SEQ ID NO: 4010225 - DNA, 25 bp, Homo sapien
aaataagaacttacgccatggctgg

SEQ ID NO: 4010226 - DNA, 25 bp, Homo sapien
gaagaaaagctatacctccaaggct

SEQ ID NO: 4010227 - DNA, 25 bp, Homo sapien
tgctgctgcgacaaccgcccaggaa

SEQ ID NO: 4010228 - DNA, 25 bp, Homo sapien
ccagctcggcaaaaaccagagagat

SEQ ID NO: 4010229 - DNA, 25 bp, Homo sapien
gagagatgctgctgcgacaaccgcc

SEQ ID NO: 4010230 - DNA, 25 bp, Homo sapien
gtctgcacccagctcggcaaaaacc

SEQ ID NO: 4010231 - DNA, 25 bp, Homo sapien
accccaaggggtccgtgctcagact

SEQ ID NO: 4010232 - DNA, 25 bp, Homo sapien
caaagcgcccccgctggagaaaact

SEQ ID NO: 4010233 - DNA, 25 bp, Homo sapien
agaccccaaggggtccgtgctcaga

SEQ ID NO: 4010234 - DNA, 25 bp, Homo sapien
ccagaccccaaggggtccgtgctca

SEQ ID NO: 4010235 - DNA, 25 bp, Homo sapien
cgggcgggcagtgccccccggctgg

SEQ ID NO: 4010236 - DNA, 25 bp, Homo sapien
ccccggagtcgaggctgctgaaatt

SEQ ID NO: 4010237 - DNA, 25 bp, Homo sapien
ctgcagccggctcggcgggcaggtc

SEQ ID NO: 4010238 - DNA, 25 bp, Homo sapien
gccggctgctgtccccgcggttctc

SEQ ID NO: 4010239 - DNA, 25 bp, Homo sapien
cagcgccgagtgcgagcgccgggcc

SEQ ID NO: 4010240 - DNA, 25 bp, Homo sapien
gcagcgccgagtgcgagcgccgggc

SEQ ID NO: 4010241 - DNA, 25 bp, Homo sapien
tgagcgccgcgagcagcgccgagtg

SEQ ID NO: 4010242 - DNA, 25 bp, Homo sapien
cggcgagcgaggcgcggggaccccg

SEQ ID NO: 4010243 - DNA, 25 bp, Homo sapien
gtgattctcctgcttcagcctccca

SEQ ID NO: 4010244 - DNA, 25 bp, Homo sapien
cttcccttcctgggttctaagtgat

SEQ ID NO: 4010245 - DNA, 25 bp, Homo sapien
agtagctagaattacaggcatgcac

SEQ ID NO: 4010246 - DNA, 25 bp, Homo sapien
ttacaggcgtgagacaccacgccca

SEQ ID NO: 4010247 - DNA, 25 bp, Homo sapien
gggctccatcttcaacactaaccaa

SEQ ID NO: 4010248 - DNA, 25 bp, Homo sapien
aagggctccatcttcaacactaacc

SEQ ID NO: 4010249 - DNA, 25 bp, Homo sapien
ctagggactaagggctccatcttca

SEQ ID NO: 4010250 - DNA, 25 bp, Homo sapien
ggactaagggctccatcttcaacac

SEQ ID NO: 4010251 - DNA, 25 bp, Homo sapien
ccagatttctctgctttaggagagt

SEQ ID NO: 4010252 - DNA, 25 bp, Homo sapien
tgctttaggagagtcagctaatcct

SEQ ID NO: 4010253 - DNA, 25 bp, Homo sapien
cagggctatggcctccagatttctc

SEQ ID NO: 4010254 - DNA, 25 bp, Homo sapien
gagtctcctcagcagggctatggcc

SEQ ID NO: 4010255 - DNA, 25 bp, Homo sapien
ccggcaccttgacttaaaccgtgtg

SEQ ID NO: 4010256 - DNA, 25 bp, Homo sapien
agagctgtcgatcaaaaaatgttca

SEQ ID NO: 4010257 - DNA, 25 bp, Homo sapien
agagttctctgtccagatgagacca

SEQ ID NO: 4010258 - DNA, 25 bp, Homo sapien
taaaccgtgtggttcatgcatctgt

SEQ ID NO: 4010259 - DNA, 25 bp, Homo sapien
ctcctaggtactttgtggcagccag

SEQ ID NO: 4010260 - DNA, 25 bp, Homo sapien
tgaactgaactccaacaagttccct

SEQ ID NO: 4010261 - DNA, 25 bp, Homo sapien
gccctgtgtatatagttccctcatc

SEQ ID NO: 4010262 - DNA, 25 bp, Homo sapien
tctgtataacacagtcgccaaggcc

SEQ ID NO: 4010263 - DNA, 25 bp, Homo sapien
gaaaaagtccaatctgtataacaca

SEQ ID NO: 4010264 - DNA, 25 bp, Homo sapien
gtcgccaaggccctgtgtatatagt

SEQ ID NO: 4010265 - DNA, 25 bp, Homo sapien
catttctggtttgtttgggcatcag

SEQ ID NO: 4010266 - DNA, 25 bp, Homo sapien
atttctggtttgtttgggcatcagt

SEQ ID NO: 4010267 - DNA, 25 bp, Homo sapien
ggaaggaccacttgacaaagatcca

SEQ ID NO: 4010268 - DNA, 25 bp, Homo sapien
cactgtggtcagagccagaggaccc

SEQ ID NO: 4010269 - DNA, 25 bp, Homo sapien
tggtcagagccagaggacccctgcc

SEQ ID NO: 4010270 - DNA, 25 bp, Homo sapien
cagagccagaggacccctgccgctg

SEQ ID NO: 4010271 - DNA, 25 bp, Homo sapien
ggtcagagccagaggacccctgccg

SEQ ID NO: 4010272 - DNA, 25 bp, Homo sapien
tccttctgtgattcataggctccaa

SEQ ID NO: 4010273 - DNA, 25 bp, Homo sapien
tacaacgctgcggtataaatgacca

SEQ ID NO: 4010274 - DNA, 25 bp, Homo sapien
taatgtcaagctttacaacgctgcg

SEQ ID NO: 4010275 - DNA, 25 bp, Homo sapien
taggctccaatagctccactaatgt

SEQ ID NO: 4010276 - DNA, 25 bp, Homo sapien
ttccttctggaggcggatgctggct

SEQ ID NO: 4010277 - DNA, 25 bp, Homo sapien
taaacgtcttatcaacaacagcacg

SEQ ID NO: 4010278 - DNA, 25 bp, Homo sapien
tgtgagttggttgcagatgccacgt

SEQ ID NO: 4010279 - DNA, 25 bp, Homo sapien
acgtgtgtgggccacggccgttcct

SEQ ID NO: 4010280 - DNA, 25 bp, Homo sapien
ccctgattattcacaattgaagcga

SEQ ID NO: 4010281 - DNA, 25 bp, Homo sapien
ctgctggtgaggacaactccaggag

SEQ ID NO: 4010282 - DNA, 25 bp, Homo sapien
caggaggcccgtaattagttccctg

SEQ ID NO: 4010283 - DNA, 25 bp, Homo sapien
cacaattgaagcgatcacggctaac

SEQ ID NO: 4010284 - DNA, 25 bp, Homo sapien
aaataacagataaacaatgcggagc

SEQ ID NO: 4010285 - DNA, 25 bp, Homo sapien
cagcaactgcgttcccaacaaggca

SEQ ID NO: 4010286 - DNA, 25 bp, Homo sapien
cagctcgcaaggtttgggttcctcc

SEQ ID NO: 4010287 - DNA, 25 bp, Homo sapien
caggccatttggcagcaactgcgtt

SEQ ID NO: 4010288 - DNA, 25 bp, Homo sapien
tgcccttgtggatacgggagtcctg

SEQ ID NO: 4010289 - DNA, 25 bp, Homo sapien
tgcatgcagaataggactggcacct

SEQ ID NO: 4010290 - DNA, 25 bp, Homo sapien
cctgttcggccgaggatggagtctc

SEQ ID NO: 4010291 - DNA, 25 bp, Homo sapien
catcattcacaggactgacggcaga

SEQ ID NO: 4010292 - DNA, 25 bp, Homo sapien
taatgggaccgaactaacaggatag

SEQ ID NO: 4010293 - DNA, 25 bp, Homo sapien
taacgacagaagcatcattattccc

SEQ ID NO: 4010294 - DNA, 25 bp, Homo sapien
cagttggaagactcacccgtagtta

SEQ ID NO: 4010295 - DNA, 25 bp, Homo sapien
tgtggtagcatgcatattcgattgg

SEQ ID NO: 4010296 - DNA, 25 bp, Homo sapien
ccgctcgcagagtgattatggcctt

SEQ ID NO: 4010297 - DNA, 25 bp, Homo sapien
tgctctggtccccacatggcttaga

SEQ ID NO: 4010298 - DNA, 25 bp, Homo sapien
tagatccttactcgggacccagctg

SEQ ID NO: 4010299 - DNA, 25 bp, Homo sapien
tatgtgccaacataaaactcggcgt

SEQ ID NO: 4010300 - DNA, 25 bp, Homo sapien
gagcaatttccaggtgatccaataa

SEQ ID NO: 4010301 - DNA, 25 bp, Homo sapien
ttggactggttagagagatctcgac

SEQ ID NO: 4010302 - DNA, 25 bp, Homo sapien
accgctgcagaaacgggcagatgca

SEQ ID NO: 4010303 - DNA, 25 bp, Homo sapien
cgacacttgtgttgcagatccatta

SEQ ID NO: 4010304 - DNA, 25 bp, Homo sapien
tgcaagaatctgtgatatgtttgat

SEQ ID NO: 4010305 - DNA, 25 bp, Homo sapien
caagaatctgtgatatgtttgatac

SEQ ID NO: 4010306 - DNA, 25 bp, Homo sapien
gttgcaagaatctgtgatatgtttg

SEQ ID NO: 4010307 - DNA, 25 bp, Homo sapien
tataggttgcaagaatctgtgatat

SEQ ID NO: 4010308 - DNA, 25 bp, Homo sapien
ccttttggacaacagggtcattgga

SEQ ID NO: 4010309 - DNA, 25 bp, Homo sapien
cacaagatcgggcaaatacgacgtg

SEQ ID NO: 4010310 - DNA, 25 bp, Homo sapien
tgtttggatactggcgccccttttg

SEQ ID NO: 4010311 - DNA, 25 bp, Homo sapien
tccaagttacactgagcacaagatc

SEQ ID NO: 4010312 - DNA, 25 bp, Homo sapien
tctttcaaagtagaccataagctct

SEQ ID NO: 4010313 - DNA, 25 bp, Homo sapien
tatgagaacggcgagggcgtctgaa

SEQ ID NO: 4010314 - DNA, 25 bp, Homo sapien
catgtttgcttaagtggtggtatga

SEQ ID NO: 4010315 - DNA, 25 bp, Homo sapien
ttgcttaagtggtggtatgagaacg

SEQ ID NO: 4010316 - DNA, 25 bp, Homo sapien
gtgccaagcatatggaggtgctcca

SEQ ID NO: 4010317 - DNA, 25 bp, Homo sapien
tgccaagcatatggaggtgctccat

SEQ ID NO: 4010318 - DNA, 25 bp, Homo sapien
ccaagcatatggaggtgctccatca

SEQ ID NO: 4010319 - DNA, 25 bp, Homo sapien
ggtgccaagcatatggaggtgctcc

SEQ ID NO: 4010320 - DNA, 25 bp, Homo sapien
gtgtggaggtgaggtcggctaacag

SEQ ID NO: 4010321 - DNA, 25 bp, Homo sapien
ggtgtggaggtgaggtcggctaaca

SEQ ID NO: 4010322 - DNA, 25 bp, Homo sapien
tctgctcaaggagaccctggttcac

SEQ ID NO: 4010323 - DNA, 25 bp, Homo sapien
cctggttcacttctcggtaattctg

SEQ ID NO: 4010324 - DNA, 25 bp, Homo sapien
gccatagagcaattctgctcaagga

SEQ ID NO: 4010325 - DNA, 25 bp, Homo sapien
tcagcaaaatctgtcgtgccagcac

SEQ ID NO: 4010326 - DNA, 25 bp, Homo sapien
catcagtcgaagtgcacggctgctt

SEQ ID NO: 4010327 - DNA, 25 bp, Homo sapien
tgcttctcgcagagagccttcttac

SEQ ID NO: 4010328 - DNA, 25 bp, Homo sapien
cccgcaggagcccatcagtcgaagt

SEQ ID NO: 4010329 - DNA, 25 bp, Homo sapien
tgcacggctgcttctcgcagagagc

SEQ ID NO: 4010330 - DNA, 25 bp, Homo sapien
gataatgctctgtgatcattttggt

SEQ ID NO: 4010331 - DNA, 25 bp, Homo sapien
ggaagataatgctctgtgatcattt

SEQ ID NO: 4010332 - DNA, 25 bp, Homo sapien
ataatgctctgtgatcattttggtt

SEQ ID NO: 4010333 - DNA, 25 bp, Homo sapien
gggaagataatgctctgtgatcatt

SEQ ID NO: 4010334 - DNA, 25 bp, Homo sapien
gaagtttcatcatcgaccctcagcc

SEQ ID NO: 4010335 - DNA, 25 bp, Homo sapien
taacgatgacatattaaacttggag

SEQ ID NO: 4010336 - DNA, 25 bp, Homo sapien
tggagagaaggcgtacactttcccg

SEQ ID NO: 4010337 - DNA, 25 bp, Homo sapien
ctctcagagggtttgatgtaacgat

SEQ ID NO: 4010338 - DNA, 25 bp, Homo sapien
cccggtgtcgaaaatgaatcagaaa

SEQ ID NO: 4010339 - DNA, 25 bp, Homo sapien
tagttttgccacaaaagtcatcccg

SEQ ID NO: 4010340 - DNA, 25 bp, Homo sapien
caatgttcttgttcccgccttttct

SEQ ID NO: 4010341 - DNA, 25 bp, Homo sapien
tttttaactttcatgctgctcttct

SEQ ID NO: 4010342 - DNA, 25 bp, Homo sapien
gccccagatacgtctccagtggaga

SEQ ID NO: 4010343 - DNA, 25 bp, Homo sapien
acatgtgcggtggatggtcaaagca

SEQ ID NO: 4010344 - DNA, 25 bp, Homo sapien
cctccatgccacatgtgcggtggat

SEQ ID NO: 4010345 - DNA, 25 bp, Homo sapien
tggtcaaagcaagccccagatacgt

SEQ ID NO: 4010346 - DNA, 25 bp, Homo sapien
tgtagacagcccagcaagaagtggt

SEQ ID NO: 4010347 - DNA, 25 bp, Homo sapien
ggctgggctgaaacaacaggaatgt

SEQ ID NO: 4010348 - DNA, 25 bp, Homo sapien
ccatgcttattctgggtcccaagga

SEQ ID NO: 4010349 - DNA, 25 bp, Homo sapien
tcagagtacacttgggaatcgaggg

SEQ ID NO: 4010350 - DNA, 25 bp, Homo sapien
ttaggctaaagaagattcaggatgc

SEQ ID NO: 4010351 - DNA, 25 bp, Homo sapien
tgatcgagtggaacaagataagctg

SEQ ID NO: 4010352 - DNA, 25 bp, Homo sapien
gatgcttcgaggagggaaacgattt

SEQ ID NO: 4010353 - DNA, 25 bp, Homo sapien
tgaccttgtggaaggagccggcact

SEQ ID NO: 4010354 - DNA, 25 bp, Homo sapien
gacgggtggccgcatcgactcagcc

SEQ ID NO: 4010355 - DNA, 25 bp, Homo sapien
ggaaagcgaaagctgctcttaacct

SEQ ID NO: 4010356 - DNA, 25 bp, Homo sapien
gaaagcgaaagctgctcttaacctt

SEQ ID NO: 4010357 - DNA, 25 bp, Homo sapien
tcatctggaggcctgacgggtggcc

SEQ ID NO: 4010358 - DNA, 25 bp, Homo sapien
caggtgatagtaatgagcagctaag

SEQ ID NO: 4010359 - DNA, 25 bp, Homo sapien
ttgcagcgttcaaacctgtcctcag

SEQ ID NO: 4010360 - DNA, 25 bp, Homo sapien
tctgggctgaagttcagacattgca

SEQ ID NO: 4010361 - DNA, 25 bp, Homo sapien
tcctcaggtgatagtaatgagcagc

SEQ ID NO: 4010362 - DNA, 25 bp, Homo sapien
tggaaactccttgtcaaaactctgt

SEQ ID NO: 4010363 - DNA, 25 bp, Homo sapien
ctgcaaggttcaccgtgggtgtttg

SEQ ID NO: 4010364 - DNA, 25 bp, Homo sapien
ttgtggaaactccttgtcaaaactc

SEQ ID NO: 4010365 - DNA, 25 bp, Homo sapien
caaggttcaccgtgggtgtttgtgg

SEQ ID NO: 4010366 - DNA, 25 bp, Homo sapien
ccacactgtcttggtgggaaactca

SEQ ID NO: 4010367 - DNA, 25 bp, Homo sapien
cttggtgggaaactcagtcaagtta

SEQ ID NO: 4010368 - DNA, 25 bp, Homo sapien
catccatggctacaccaggaaacca

SEQ ID NO: 4010369 - DNA, 25 bp, Homo sapien
cgacatccatggctacaccaggaaa

SEQ ID NO: 4010370 - DNA, 25 bp, Homo sapien
ttctccagtccaaaagagttccctg

SEQ ID NO: 4010371 - DNA, 25 bp, Homo sapien
gctcaaagccttagtcctggaatcc

SEQ ID NO: 4010372 - DNA, 25 bp, Homo sapien
tctgtcagactacgagctcaaagcc

SEQ ID NO: 4010373 - DNA, 25 bp, Homo sapien
ccagggaacttctaactactcagca

SEQ ID NO: 4010374 - DNA, 25 bp, Homo sapien
tcaggctgggcgcagatgacatctg

SEQ ID NO: 4010375 - DNA, 25 bp, Homo sapien
gattagtttcctgttaccaccacgc

SEQ ID NO: 4010376 - DNA, 25 bp, Homo sapien
catgtgggatatgctaggcaaccag

SEQ ID NO: 4010377 - DNA, 25 bp, Homo sapien
tgtgttaaacaagcctacctgaggc

SEQ ID NO: 4010378 - DNA, 25 bp, Homo sapien
tagccatgtgcttgaccgtctgggc

SEQ ID NO: 4010379 - DNA, 25 bp, Homo sapien
acgaacgcagcaccaagaaggcaga

SEQ ID NO: 4010380 - DNA, 25 bp, Homo sapien
gaatctgtgatgagcattgctgggc

SEQ ID NO: 4010381 - DNA, 25 bp, Homo sapien
gcagatgttgatgtttactacagaa

SEQ ID NO: 4010382 - DNA, 25 bp, Homo sapien
caagcaccatcttccatactcaggg

SEQ ID NO: 4010383 - DNA, 25 bp, Homo sapien
tactcaggggtccacattcattcca

SEQ ID NO: 4010384 - DNA, 25 bp, Homo sapien
cttgaacccatcctggcctcttgaa

SEQ ID NO: 4010385 - DNA, 25 bp, Homo sapien
tgcacggtccagagggatttgcctt

SEQ ID NO: 4010386 - DNA, 25 bp, Homo sapien
gccaatgcccaatagcccgatgttg

SEQ ID NO: 4010387 - DNA, 25 bp, Homo sapien
gaaaaagctggtctatgcagcagac

SEQ ID NO: 4010388 - DNA, 25 bp, Homo sapien
cttcgttattagctgggccaatgcc

SEQ ID NO: 4010389 - DNA, 25 bp, Homo sapien
cagcagacacttgataggtaccttc

SEQ ID NO: 4010390 - DNA, 25 bp, Homo sapien
cagagggagattagcttggtacacg

SEQ ID NO: 4010391 - DNA, 25 bp, Homo sapien
gcactgtcacaggtgcatggacaga

SEQ ID NO: 4010392 - DNA, 25 bp, Homo sapien
tggcccaatccagggtttatactct

SEQ ID NO: 4010393 - DNA, 25 bp, Homo sapien
gtctcttagaacacagcgaccctgg

SEQ ID NO: 4010394 - DNA, 25 bp, Homo sapien
agcacgcttgcacacatgggacacc

SEQ ID NO: 4010395 - DNA, 25 bp, Homo sapien
gcacgcttgcacacatgggacacca

SEQ ID NO: 4010396 - DNA, 25 bp, Homo sapien
cacgcttgcacacatgggacaccaa

SEQ ID NO: 4010397 - DNA, 25 bp, Homo sapien
aagcggaagcaaagccctcgtggct

SEQ ID NO: 4010398 - DNA, 25 bp, Homo sapien
caaaagcggaagcaaagccctcgtg

SEQ ID NO: 4010399 - DNA, 25 bp, Homo sapien
gcagatccaaaagcggaagcaaagc

SEQ ID NO: 4010400 - DNA, 25 bp, Homo sapien
gtgctggcagatccaaaagcggaag

SEQ ID NO: 4010401 - DNA, 25 bp, Homo sapien
gcaggctccgtcaattgttgattca

SEQ ID NO: 4010402 - DNA, 25 bp, Homo sapien
ctggcaggctccgtcaattgttgat

SEQ ID NO: 4010403 - DNA, 25 bp, Homo sapien
gccttttctggcaggctccgtcaat

SEQ ID NO: 4010404 - DNA, 25 bp, Homo sapien
ttttctggcaggctccgtcaattgt

SEQ ID NO: 4010405 - DNA, 25 bp, Homo sapien
tgaggaacaagccacaggtaaagag

SEQ ID NO: 4010406 - DNA, 25 bp, Homo sapien
ggtccaagagtattcaaagagtcca

SEQ ID NO: 4010407 - DNA, 25 bp, Homo sapien
gagcttcccagtaatagcaatcgca

SEQ ID NO: 4010408 - DNA, 25 bp, Homo sapien
tgagttcagcgctcttggttcagag

SEQ ID NO: 4010409 - DNA, 25 bp, Homo sapien
aggggatgtgaagcctctgattttc

SEQ ID NO: 4010410 - DNA, 25 bp, Homo sapien
tctgggctgagtggtgcataggatc

SEQ ID NO: 4010411 - DNA, 25 bp, Homo sapien
ccaggggatgtgaagcctctgattt

SEQ ID NO: 4010412 - DNA, 25 bp, Homo sapien
gctgagtggtgcataggatccaggg

SEQ ID NO: 4010413 - DNA, 25 bp, Homo sapien
tcctccttccaatgatcaggaactt

SEQ ID NO: 4010414 - DNA, 25 bp, Homo sapien
cacattaaaggtacagccccaacat

SEQ ID NO: 4010415 - DNA, 25 bp, Homo sapien
gatacccaatcctccacattaaagg

SEQ ID NO: 4010416 - DNA, 25 bp, Homo sapien
taaaccccaatgtactgaggtctag

SEQ ID NO: 4010417 - DNA, 25 bp, Homo sapien
tccatcacttcacccagaatcctca

SEQ ID NO: 4010418 - DNA, 25 bp, Homo sapien
gcccattttttcactaatctccatc

SEQ ID NO: 4010419 - DNA, 25 bp, Homo sapien
ttttttcactaatctccatcacttc

SEQ ID NO: 4010420 - DNA, 25 bp, Homo sapien
tgtctgcccattttttcactaatct

SEQ ID NO: 4010421 - DNA, 25 bp, Homo sapien
accgaaatggcttcggcactcaggt

SEQ ID NO: 4010422 - DNA, 25 bp, Homo sapien
tttctgtttcaggaactacagtaca

SEQ ID NO: 4010423 - DNA, 25 bp, Homo sapien
ggaactacagtacaatcactttcta

SEQ ID NO: 4010424 - DNA, 25 bp, Homo sapien
actttctaactatcatatagcaccg

SEQ ID NO: 4010425 - DNA, 25 bp, Homo sapien
gtaacaacagaagtcataagaggca

SEQ ID NO: 4010426 - DNA, 25 bp, Homo sapien
tatttctagacaggttccaaccacc

SEQ ID NO: 4010427 - DNA, 25 bp, Homo sapien
cttgcaaccaccatacaatgtaggt

SEQ ID NO: 4010428 - DNA, 25 bp, Homo sapien
tgctatatgattgacactggaccaa

SEQ ID NO: 4010429 - DNA, 25 bp, Homo sapien
agctgctgatcaaatctgagcattt

SEQ ID NO: 4010430 - DNA, 25 bp, Homo sapien
gaccctgggaatggttgtggtggct

SEQ ID NO: 4010431 - DNA, 25 bp, Homo sapien
ggtggtgaccctgggaatggttgtg

SEQ ID NO: 4010432 - DNA, 25 bp, Homo sapien
ggtggctatcttggcgaagagcccc

SEQ ID NO: 4010433 - DNA, 25 bp, Homo sapien
tggttgtggtggctatcttggcgaa

SEQ ID NO: 4010434 - DNA, 25 bp, Homo sapien
gcgatggtgacaattccaaggctat

SEQ ID NO: 4010435 - DNA, 25 bp, Homo sapien
cgatggtgacaattccaaggctatt

SEQ ID NO: 4010436 - DNA, 25 bp, Homo sapien
atggtgacaattccaaggctattag

SEQ ID NO: 4010437 - DNA, 25 bp, Homo sapien
ggcgatggtgacaattccaaggcta

SEQ ID NO: 4010438 - DNA, 25 bp, Homo sapien
cccatgtagctccgatcatcaggca

SEQ ID NO: 4010439 - DNA, 25 bp, Homo sapien
ccccatgtagctccgatcatcaggc

SEQ ID NO: 4010440 - DNA, 25 bp, Homo sapien
ccatgtagctccgatcatcaggcat

SEQ ID NO: 4010441 - DNA, 25 bp, Homo sapien
tccccatgtagctccgatcatcagg

SEQ ID NO: 4010442 - DNA, 25 bp, Homo sapien
agtcgaagaacaatgctggagcctg

SEQ ID NO: 4010443 - DNA, 25 bp, Homo sapien
gagaactcgtctcccacaaatcaaa

SEQ ID NO: 4010444 - DNA, 25 bp, Homo sapien
tattgacaattacatccggtgttgc

SEQ ID NO: 4010445 - DNA, 25 bp, Homo sapien
cggtgttgcacggaatttaatgcct

SEQ ID NO: 4010446 - DNA, 25 bp, Homo sapien
actcagttccccgattagcataatc

SEQ ID NO: 4010447 - DNA, 25 bp, Homo sapien
tgcagactagacatcctccagttga

SEQ ID NO: 4010448 - DNA, 25 bp, Homo sapien
tctgaggtcttggtctcccataggg

SEQ ID NO: 4010449 - DNA, 25 bp, Homo sapien
tcataaactgagatatgatggtccc

SEQ ID NO: 4010450 - DNA, 25 bp, Homo sapien
ccgtacactgtggaggaggtttcaa

SEQ ID NO: 4010451 - DNA, 25 bp, Homo sapien
cattagctgcagagtggtccttatc

SEQ ID NO: 4010452 - DNA, 25 bp, Homo sapien
tgctcagacacaattatgggccagt

SEQ ID NO: 4010453 - DNA, 25 bp, Homo sapien
gcacatcggcgagggaactctaaca

SEQ ID NO: 4010454 - DNA, 25 bp, Homo sapien
aaagtgtgatgggttagtccagctc

SEQ ID NO: 4010455 - DNA, 25 bp, Homo sapien
tgtgatgggttagtccagctccagg

SEQ ID NO: 4010456 - DNA, 25 bp, Homo sapien
tgatgggttagtccagctccaggaa

SEQ ID NO: 4010457 - DNA, 25 bp, Homo sapien
agtgtgatgggttagtccagctcca

SEQ ID NO: 4010458 - DNA, 25 bp, Homo sapien
ttcacagatcaggagtctagacagg

SEQ ID NO: 4010459 - DNA, 25 bp, Homo sapien
cttgcttcttcgaggccaacaggat

SEQ ID NO: 4010460 - DNA, 25 bp, Homo sapien
tgtggctgtagatctcatggtggct

SEQ ID NO: 4010461 - DNA, 25 bp, Homo sapien
caggttcattcggattgctggcaga

SEQ ID NO: 4010462 - DNA, 25 bp, Homo sapien
aagtgttgttaatcactattttatt

SEQ ID NO: 4010463 - DNA, 25 bp, Homo sapien
taatgggcaaagtcagaacatccac

SEQ ID NO: 4010464 - DNA, 25 bp, Homo sapien
cagggccccacgtgatttcggctgc

SEQ ID NO: 4010465 - DNA, 25 bp, Homo sapien
cccacgtgatttcggctgctcacag

SEQ ID NO: 4010466 - DNA, 25 bp, Homo sapien
cagaggacacttttcccacctaagg

SEQ ID NO: 4010467 - DNA, 25 bp, Homo sapien
aggctgggaagggtatcgagggtct

SEQ ID NO: 4010468 - DNA, 25 bp, Homo sapien
catagagagtagaagcatagttatc

SEQ ID NO: 4010469 - DNA, 25 bp, Homo sapien
ggctgggaagggtatcgagggtctg

SEQ ID NO: 4010470 - DNA, 25 bp, Homo sapien
caaccttcagcagatggcagggagc

SEQ ID NO: 4010471 - DNA, 25 bp, Homo sapien
gccaaacaaccaaccttcagcagat

SEQ ID NO: 4010472 - DNA, 25 bp, Homo sapien
tctgaacgtcaccaagccaaacaac

SEQ ID NO: 4010473 - DNA, 25 bp, Homo sapien
tgcttcagccacataagagagcggt

SEQ ID NO: 4010474 - DNA, 25 bp, Homo sapien
gtccttattgggcacgtaccagtcc

SEQ ID NO: 4010475 - DNA, 25 bp, Homo sapien
taccagtccataggtggaagcccca

SEQ ID NO: 4010476 - DNA, 25 bp, Homo sapien
ttcactgtccttattgggcacgtac

SEQ ID NO: 4010477 - DNA, 25 bp, Homo sapien
gcacgtaccagtccataggtggaag

SEQ ID NO: 4010478 - DNA, 25 bp, Homo sapien
ttcaatagcatcattaatagcccat

SEQ ID NO: 4010479 - DNA, 25 bp, Homo sapien
tcagaattacaatctcctgttcccc

SEQ ID NO: 4010480 - DNA, 25 bp, Homo sapien
tctggcagagcactcttcaatagca

SEQ ID NO: 4010481 - DNA, 25 bp, Homo sapien
gcccattgatccaattacatttctt

SEQ ID NO: 4010482 - DNA, 25 bp, Homo sapien
agcctcagaatattggaatccactt

SEQ ID NO: 4010483 - DNA, 25 bp, Homo sapien
tcccttgatgattttgtgcacacca

SEQ ID NO: 4010484 - DNA, 25 bp, Homo sapien
gatgattttgtgcacaccagtttcc

SEQ ID NO: 4010485 - DNA, 25 bp, Homo sapien
tgtgcacaccagtttcccatgtgct

SEQ ID NO: 4010486 - DNA, 25 bp, Homo sapien
tatgtagtttaacagcaattgccct

SEQ ID NO: 4010487 - DNA, 25 bp, Homo sapien
tcgataccattactcctaataaagc

SEQ ID NO: 4010488 - DNA, 25 bp, Homo sapien
ttactcctaataaagccaggcgaat

SEQ ID NO: 4010489 - DNA, 25 bp, Homo sapien
aaataccctcgataccattactcct

SEQ ID NO: 4010490 - DNA, 25 bp, Homo sapien
ccaactggaagatgcgaagcgcacc

SEQ ID NO: 4010491 - DNA, 25 bp, Homo sapien
tattaatcctcataagtgctcagtg

SEQ ID NO: 4010492 - DNA, 25 bp, Homo sapien
tcaggtacttgcctaaaaacatggg

SEQ ID NO: 4010493 - DNA, 25 bp, Homo sapien
tccagatctaggagtgctgaacact

SEQ ID NO: 4010494 - DNA, 25 bp, Homo sapien
gctgccacccagaagtcacatatgc

SEQ ID NO: 4010495 - DNA, 25 bp, Homo sapien
cggaggatctcaccccagtaattaa

SEQ ID NO: 4010496 - DNA, 25 bp, Homo sapien
tcgtgtggcacaactcaaggccaag

SEQ ID NO: 4010497 - DNA, 25 bp, Homo sapien
aagcccggcctctgtgtactaccag

SEQ ID NO: 4010498 - DNA, 25 bp, Homo sapien
gagaatgcaaccatgcaccaccacg

SEQ ID NO: 4010499 - DNA, 25 bp, Homo sapien
agctgagaatgcaaccatgcaccac

SEQ ID NO: 4010500 - DNA, 25 bp, Homo sapien
cacaagtagctgagaatgcaaccat

SEQ ID NO: 4010501 - DNA, 25 bp, Homo sapien
caagtagctgagaatgcaaccatgc

SEQ ID NO: 4010502 - DNA, 25 bp, Homo sapien
tcaatctccgtgcacactctcagaa

SEQ ID NO: 4010503 - DNA, 25 bp, Homo sapien
aatctccgtgcacactctcagaaac

SEQ ID NO: 4010504 - DNA, 25 bp, Homo sapien
caatctccgtgcacactctcagaaa

SEQ ID NO: 4010505 - DNA, 25 bp, Homo sapien
ctggctccgtgttcaacagtgccat

SEQ ID NO: 4010506 - DNA, 25 bp, Homo sapien
agcactggctccgtgttcaacagtg

SEQ ID NO: 4010507 - DNA, 25 bp, Homo sapien
cactggctccgtgttcaacagtgcc

SEQ ID NO: 4010508 - DNA, 25 bp, Homo sapien
gcagcactggctccgtgttcaacag

SEQ ID NO: 4010509 - DNA, 25 bp, Homo sapien
tcactctctgaatcagagaccctct

SEQ ID NO: 4010510 - DNA, 25 bp, Homo sapien
cactctctgaatcagagaccctctc

SEQ ID NO: 4010511 - DNA, 25 bp, Homo sapien
actctctgaatcagagaccctctcc

SEQ ID NO: 4010512 - DNA, 25 bp, Homo sapien
ctcactctctgaatcagagaccctc

SEQ ID NO: 4010513 - DNA, 25 bp, Homo sapien
tgccttcagactatgggttcctgga

SEQ ID NO: 4010514 - DNA, 25 bp, Homo sapien
cttgccttcagactatgggttcctg

SEQ ID NO: 4010515 - DNA, 25 bp, Homo sapien
tggaggacaggtgcacttctcagcc

SEQ ID NO: 4010516 - DNA, 25 bp, Homo sapien
ggacaggtgcacttctcagccatct

SEQ ID NO: 4010517 - DNA, 25 bp, Homo sapien
taccctgcagactgtatggagttat

SEQ ID NO: 4010518 - DNA, 25 bp, Homo sapien
tcatgattgaggatctaccctgcag

SEQ ID NO: 4010519 - DNA, 25 bp, Homo sapien
gatctaccctgcagactgtatggag

SEQ ID NO: 4010520 - DNA, 25 bp, Homo sapien
cttttcatacatcatgattgaggat

SEQ ID NO: 4010521 - DNA, 25 bp, Homo sapien
tgttttccaaggctgggccttcagc

SEQ ID NO: 4010522 - DNA, 25 bp, Homo sapien
gttttccaaggctgggccttcagca

SEQ ID NO: 4010523 - DNA, 25 bp, Homo sapien
gtgttttccaaggctgggccttcag

SEQ ID NO: 4010524 - DNA, 25 bp, Homo sapien
tcctctacacgcttgtgtgtttcct

SEQ ID NO: 4010525 - DNA, 25 bp, Homo sapien
caatgttcctctacacgcttgtgtg

SEQ ID NO: 4010526 - DNA, 25 bp, Homo sapien
cagcaaacagcaatgttcctctaca

SEQ ID NO: 4010527 - DNA, 25 bp, Homo sapien
acagcaatgttcctctacacgcttg

SEQ ID NO: 4010528 - DNA, 25 bp, Homo sapien
tgatggagggctggcaaaccattgc

SEQ ID NO: 4010529 - DNA, 25 bp, Homo sapien
ctgtgtggccacaagcctgaaatat

SEQ ID NO: 4010530 - DNA, 25 bp, Homo sapien
gaacagagtggttgctacagaaact

SEQ ID NO: 4010531 - DNA, 25 bp, Homo sapien
gatgaatcttgagcagtctgatgga

SEQ ID NO: 4010532 - DNA, 25 bp, Homo sapien
gcccctgttgcaataaccactgctt

SEQ ID NO: 4010533 - DNA, 25 bp, Homo sapien
agatgacttccgtgcccctgttgca

SEQ ID NO: 4010534 - DNA, 25 bp, Homo sapien
cgtgcccctgttgcaataaccactg

SEQ ID NO: 4010535 - DNA, 25 bp, Homo sapien
cctggcatagccagatgacttccgt

SEQ ID NO: 4010536 - DNA, 25 bp, Homo sapien
tgagcagacacactcaggaggtgtc

SEQ ID NO: 4010537 - DNA, 25 bp, Homo sapien
gacacactcaggaggtgtcttgaga

SEQ ID NO: 4010538 - DNA, 25 bp, Homo sapien
gattatcatccgctgagggtggagc

SEQ ID NO: 4010539 - DNA, 25 bp, Homo sapien
gaaggggagtgagcagacacactca

SEQ ID NO: 4010540 - DNA, 25 bp, Homo sapien
gattatcatccgctgagggtagagc

SEQ ID NO: 4010541 - DNA, 25 bp, Homo sapien
atcatccgctgagggtagagctgag

SEQ ID NO: 4010542 - DNA, 25 bp, Homo sapien
cactcggcaggtgtcttgagattat

SEQ ID NO: 4010543 - DNA, 25 bp, Homo sapien
aggggatagagcaggcactcggcag

SEQ ID NO: 4010544 - DNA, 25 bp, Homo sapien
gatagagcacacactcggaaggtgt

SEQ ID NO: 4010545 - DNA, 25 bp, Homo sapien
aggggatagagcacacactcggaag

SEQ ID NO: 4010546 - DNA, 25 bp, Homo sapien
aaggggatagagcacacactcggaa

SEQ ID NO: 4010547 - DNA, 25 bp, Homo sapien
gggatagagcacacactcggaaggt

SEQ ID NO: 4010548 - DNA, 25 bp, Homo sapien
tctgttgctggtgatagatttttgc

SEQ ID NO: 4010549 - DNA, 25 bp, Homo sapien
atatcacccttccactgagtactgc

SEQ ID NO: 4010550 - DNA, 25 bp, Homo sapien
tgctggtgatagatttttgcacctt

SEQ ID NO: 4010551 - DNA, 25 bp, Homo sapien
tggacaaaattaccgccaccaacac

SEQ ID NO: 4010552 - DNA, 25 bp, Homo sapien
ttcactcccaggtaataccaaattg

SEQ ID NO: 4010553 - DNA, 25 bp, Homo sapien
tcactcccaggtaataccaaattgt

SEQ ID NO: 4010554 - DNA, 25 bp, Homo sapien
ctcccaggtaataccaaattgtaag

SEQ ID NO: 4010555 - DNA, 25 bp, Homo sapien
cactcccaggtaataccaaattgta

SEQ ID NO: 4010556 - DNA, 25 bp, Homo sapien
atttggaattgtccctgtgggtaat

SEQ ID NO: 4010557 - DNA, 25 bp, Homo sapien
ggtaataagttacattcactcttca

SEQ ID NO: 4010558 - DNA, 25 bp, Homo sapien
ttgtccctgtgggtaataagttaca

SEQ ID NO: 4010559 - DNA, 25 bp, Homo sapien
cctgtgggtaataagttacattcac

SEQ ID NO: 4010560 - DNA, 25 bp, Homo sapien
caaagaggctttcttgcagaagggg

SEQ ID NO: 4010561 - DNA, 25 bp, Homo sapien
ccggttgcaaagaggctttcttgca

SEQ ID NO: 4010562 - DNA, 25 bp, Homo sapien
aagaggctttcttgcagaaggggtg

SEQ ID NO: 4010563 - DNA, 25 bp, Homo sapien
gaggctttcttgcagaaggggtgat

SEQ ID NO: 4010564 - DNA, 25 bp, Homo sapien
aatgttgagagagtctaagggccgt

SEQ ID NO: 4010565 - DNA, 25 bp, Homo sapien
agagagtctaagggccgtggcatca

SEQ ID NO: 4010566 - DNA, 25 bp, Homo sapien
ctgcatcagcactgaactatcctgc

SEQ ID NO: 4010567 - DNA, 25 bp, Homo sapien
cagcactgaactatcctgcaactgc

SEQ ID NO: 4010568 - DNA, 25 bp, Homo sapien
cgccgcaacgcttgcgcacgttgaa

SEQ ID NO: 4010569 - DNA, 25 bp, Homo sapien
gcatctgtagtagtcctctgcccgc

SEQ ID NO: 4010570 - DNA, 25 bp, Homo sapien
cgcttgcgcacgttgaaacatttcc

SEQ ID NO: 4010571 - DNA, 25 bp, Homo sapien
atctgtagtagtcctctgcccgccg

SEQ ID NO: 4010572 - DNA, 25 bp, Homo sapien
ttcatcagataaagcaccactttca

SEQ ID NO: 4010573 - DNA, 25 bp, Homo sapien
gataaagcaccactttcaggatgat

SEQ ID NO: 4010574 - DNA, 25 bp, Homo sapien
tgattttaaataatctgccatgttt

SEQ ID NO: 4010575 - DNA, 25 bp, Homo sapien
tatggattacaatcactttcatcag

SEQ ID NO: 4010576 - DNA, 25 bp, Homo sapien
tctgagatgatagtttccttcccca

SEQ ID NO: 4010577 - DNA, 25 bp, Homo sapien
aaactgttgctatattgattcctcc

SEQ ID NO: 4010578 - DNA, 25 bp, Homo sapien
agtatatccctaattcatccttcat

SEQ ID NO: 4010579 - DNA, 25 bp, Homo sapien
gcttactgcctgctgacttctgaga

SEQ ID NO: 4010580 - DNA, 25 bp, Homo sapien
tctgtgctcacgttctttcatgctt

SEQ ID NO: 4010581 - DNA, 25 bp, Homo sapien
ctcttctctgtgctcacgttctttc

SEQ ID NO: 4010582 - DNA, 25 bp, Homo sapien
tgtgctcacgttctttcatgcttag

SEQ ID NO: 4010583 - DNA, 25 bp, Homo sapien
cttctctgtgctcacgttctttcat

SEQ ID NO: 4010584 - DNA, 25 bp, Homo sapien
agtaaagatgtcttccaggacaatt

SEQ ID NO: 4010585 - DNA, 25 bp, Homo sapien
tagctcgaactttggtttccacctg

SEQ ID NO: 4010586 - DNA, 25 bp, Homo sapien
cttttgttgtcaccttcatcttacg

SEQ ID NO: 4010587 - DNA, 25 bp, Homo sapien
cacctgtctccataaagtaaagatg

SEQ ID NO: 4010588 - DNA, 25 bp, Homo sapien
atcatgtccattttgagatgggaag

SEQ ID NO: 4010589 - DNA, 25 bp, Homo sapien
catcatgtccattttgagatgggaa

SEQ ID NO: 4010590 - DNA, 25 bp, Homo sapien
ggatccatcatgtccattttgagat

SEQ ID NO: 4010591 - DNA, 25 bp, Homo sapien
tccatcatgtccattttgagatggg

SEQ ID NO: 4010592 - DNA, 25 bp, Homo sapien
accttccggcagtttgtcacctcgt

SEQ ID NO: 4010593 - DNA, 25 bp, Homo sapien
tctgttcaggactaagtggcataga

SEQ ID NO: 4010594 - DNA, 25 bp, Homo sapien
catcatgagacgcagtgcagttctg

SEQ ID NO: 4010595 - DNA, 25 bp, Homo sapien
cattgattctcttggagggcagttc

SEQ ID NO: 4010596 - DNA, 25 bp, Homo sapien
cctctacagaaagttagtatactca

SEQ ID NO: 4010597 - DNA, 25 bp, Homo sapien
gtatacctctacagaaagttagtat

SEQ ID NO: 4010598 - DNA, 25 bp, Homo sapien
ctctacagaaagttagtatactcac

SEQ ID NO: 4010599 - DNA, 25 bp, Homo sapien
tacctctacagaaagttagtatact

SEQ ID NO: 4010600 - DNA, 25 bp, Homo sapien
atttataacttctcagaaacacagt

SEQ ID NO: 4010601 - DNA, 25 bp, Homo sapien
agagggagatggcaaatttataact

SEQ ID NO: 4010602 - DNA, 25 bp, Homo sapien
acacagtaatgataagtaaccaagg

SEQ ID NO: 4010603 - DNA, 25 bp, Homo sapien
cacagtaatgataagtaaccaagga

SEQ ID NO: 4010604 - DNA, 25 bp, Homo sapien
cagatatcaccgtgggattccactg

SEQ ID NO: 4010605 - DNA, 25 bp, Homo sapien
tccctcagatatcaccgtgggattc

SEQ ID NO: 4010606 - DNA, 25 bp, Homo sapien
taaccacatccctcagatatcaccg

SEQ ID NO: 4010607 - DNA, 25 bp, Homo sapien
cacatccctcagatatcaccgtggg

SEQ ID NO: 4010608 - DNA, 25 bp, Homo sapien
tgcaaatgtggggtgttgtctttct

SEQ ID NO: 4010609 - DNA, 25 bp, Homo sapien
cattgcaaatgtggggtgttgtctt

SEQ ID NO: 4010610 - DNA, 25 bp, Homo sapien
gcattgcaaatgtggggtgttgtct

SEQ ID NO: 4010611 - DNA, 25 bp, Homo sapien
aggcattgcaaatgtggggtgttgt

SEQ ID NO: 4010612 - DNA, 25 bp, Homo sapien
aggtcccgatagtaaaccatctcca

SEQ ID NO: 4010613 - DNA, 25 bp, Homo sapien
gaaggtcccgatagtaaaccatctc

SEQ ID NO: 4010614 - DNA, 25 bp, Homo sapien
acatccatgtagccatccgtccatc

SEQ ID NO: 4010615 - DNA, 25 bp, Homo sapien
gcgttccctcgctggagggccagca

SEQ ID NO: 4010616 - DNA, 25 bp, Homo sapien
ggccaactgggcgttccctcgctgg

SEQ ID NO: 4010617 - DNA, 25 bp, Homo sapien
agcaggtccggccaactgggcgttc

SEQ ID NO: 4010618 - DNA, 25 bp, Homo sapien
caactgggcgttccctcgctggagg

SEQ ID NO: 4010619 - DNA, 25 bp, Homo sapien
tagaatcatccagaaacaagtcact

SEQ ID NO: 4010620 - DNA, 25 bp, Homo sapien
catccagaaacaagtcactcttcac

SEQ ID NO: 4010621 - DNA, 25 bp, Homo sapien
tcttagaatcatccagaaacaagtc

SEQ ID NO: 4010622 - DNA, 25 bp, Homo sapien
atcatccagaaacaagtcactcttc

SEQ ID NO: 4010623 - DNA, 25 bp, Homo sapien
gtccaagctgcgccaaggcggcagg

SEQ ID NO: 4010624 - DNA, 25 bp, Homo sapien
tccaagctgcgccaaggcggcagga

SEQ ID NO: 4010625 - DNA, 25 bp, Homo sapien
agtccaagctgcgccaaggcggcag

SEQ ID NO: 4010626 - DNA, 25 bp, Homo sapien
gagtccaagctgcgccaaggcggca

SEQ ID NO: 4010627 - DNA, 25 bp, Homo sapien
gagtccaggcagctgtcgatgtcca

SEQ ID NO: 4010628 - DNA, 25 bp, Homo sapien
gagctgtccagcacggacgagtcca

SEQ ID NO: 4010629 - DNA, 25 bp, Homo sapien
gtccaggcagctgtcgatgtccagc

SEQ ID NO: 4010630 - DNA, 25 bp, Homo sapien
aggagctgtccagcacggacgagtc

SEQ ID NO: 4010631 - DNA, 25 bp, Homo sapien
ctactgcccggcaggtgtggggctc

SEQ ID NO: 4010632 - DNA, 25 bp, Homo sapien
gcaggtgtggggctcaggctcccag

SEQ ID NO: 4010633 - DNA, 25 bp, Homo sapien
aggtgtggggctcaggctcccagcc

SEQ ID NO: 4010634 - DNA, 25 bp, Homo sapien
gtgtggggctcaggctcccagccac

SEQ ID NO: 4010635 - DNA, 25 bp, Homo sapien
ggacgacggcagtggtcagcgggcg

SEQ ID NO: 4010636 - DNA, 25 bp, Homo sapien
acgacggcagtggtcagcgggcggc

SEQ ID NO: 4010637 - DNA, 25 bp, Homo sapien
caggacgacggcagtggtcagcggg

SEQ ID NO: 4010638 - DNA, 25 bp, Homo sapien
cgacggcagtggtcagcgggcggca

SEQ ID NO: 4010639 - DNA, 25 bp, Homo sapien
cccgcgttcaggcgattgtcctggc

SEQ ID NO: 4010640 - DNA, 25 bp, Homo sapien
cgttcaggcgattgtcctggctcag

SEQ ID NO: 4010641 - DNA, 25 bp, Homo sapien
cgcgttcaggcgattgtcctggctc

SEQ ID NO: 4010642 - DNA, 25 bp, Homo sapien
cgcccggccatcgttccattttaat

SEQ ID NO: 4010643 - DNA, 25 bp, Homo sapien
tcttctgagttatctggcgtgctgc

SEQ ID NO: 4010644 - DNA, 25 bp, Homo sapien
cgtctgcttagcgaagtgccctcgt

SEQ ID NO: 4010645 - DNA, 25 bp, Homo sapien
tcaagtgtgttgacccttcccgagc

SEQ ID NO: 4010646 - DNA, 25 bp, Homo sapien
tgcagcactggaaagtggcggccct

SEQ ID NO: 4010647 - DNA, 25 bp, Homo sapien
cagcgactgtgtcgacgctcagcgg

SEQ ID NO: 4010648 - DNA, 25 bp, Homo sapien
tggacaccaggccaacagcgactgt

SEQ ID NO: 4010649 - DNA, 25 bp, Homo sapien
tggccaggtagacgggatagacaac

SEQ ID NO: 4010650 - DNA, 25 bp, Homo sapien
gggatagacaaccacgctggacacc

SEQ ID NO: 4010651 - DNA, 25 bp, Homo sapien
ctgtgtggaggagaggaggccacac

SEQ ID NO: 4010652 - DNA, 25 bp, Homo sapien
tggaggagaggaggccacacaggtg

SEQ ID NO: 4010653 - DNA, 25 bp, Homo sapien
gtggaggagaggaggccacacaggt

SEQ ID NO: 4010654 - DNA, 25 bp, Homo sapien
aggagaggaggccacacaggtgagg

SEQ ID NO: 4010655 - DNA, 25 bp, Homo sapien
agccaccagcaggcgccggaagcgc

SEQ ID NO: 4010656 - DNA, 25 bp, Homo sapien
aacagccccgtaccacacggcgttg

SEQ ID NO: 4010657 - DNA, 25 bp, Homo sapien
accacacggcgttggcgcccaggaa

SEQ ID NO: 4010658 - DNA, 25 bp, Homo sapien
agccccgtaccacacggcgttggcg

SEQ ID NO: 4010659 - DNA, 25 bp, Homo sapien
aagccagtcattgaccaggaagaag

SEQ ID NO: 4010660 - DNA, 25 bp, Homo sapien
aaagccagtcattgaccaggaagaa

SEQ ID NO: 4010661 - DNA, 25 bp, Homo sapien
tctccaccgaaagccagtcattgac

SEQ ID NO: 4010662 - DNA, 25 bp, Homo sapien
caccgaaagccagtcattgaccagg

SEQ ID NO: 4010663 - DNA, 25 bp, Homo sapien
gctgtccaccccatacagcatgatg

SEQ ID NO: 4010664 - DNA, 25 bp, Homo sapien
tgttgcggtggaaggctctgtcgcc

SEQ ID NO: 4010665 - DNA, 25 bp, Homo sapien
catgatgcccacgtgggccgtggta

SEQ ID NO: 4010666 - DNA, 25 bp, Homo sapien
tgtcgtgccacactcggatcttcca

SEQ ID NO: 4010667 - DNA, 25 bp, Homo sapien
gttctgacgcctgcgacgagactca

SEQ ID NO: 4010668 - DNA, 25 bp, Homo sapien
aaaaactgccttgttctgacgcctg

SEQ ID NO: 4010669 - DNA, 25 bp, Homo sapien
gccttgttctgacgcctgcgacgag

SEQ ID NO: 4010670 - DNA, 25 bp, Homo sapien
actgcaaaaactgccttgttctgac

SEQ ID NO: 4010671 - DNA, 25 bp, Homo sapien
gcacacagcacatgtcagcatgacg

SEQ ID NO: 4010672 - DNA, 25 bp, Homo sapien
tgtcttgacgaggatctcgtacttg

SEQ ID NO: 4010673 - DNA, 25 bp, Homo sapien
tgacgatgtagtttacatccgctgt

SEQ ID NO: 4010674 - DNA, 25 bp, Homo sapien
acgaggatctcgtacttgaagcggc

SEQ ID NO: 4010675 - DNA, 25 bp, Homo sapien
ccaggccctcctcgactctgcagag

SEQ ID NO: 4010676 - DNA, 25 bp, Homo sapien
caggccctcctcgactctgcagagg

SEQ ID NO: 4010677 - DNA, 25 bp, Homo sapien
ggccctcctcgactctgcagaggct

SEQ ID NO: 4010678 - DNA, 25 bp, Homo sapien
aggccctcctcgactctgcagaggc

SEQ ID NO: 4010679 - DNA, 25 bp, Homo sapien
aagtactggcacagggacgtgtaca

SEQ ID NO: 4010680 - DNA, 25 bp, Homo sapien
tcctcctcgctgaagtactggcaca

SEQ ID NO: 4010681 - DNA, 25 bp, Homo sapien
ggcagacggcctggcggggcgaggt

SEQ ID NO: 4010682 - DNA, 25 bp, Homo sapien
gtgaggtggcgggtgaggcagacgg

SEQ ID NO: 4010683 - DNA, 25 bp, Homo sapien
ctgggcggatcctcctgctagccga

SEQ ID NO: 4010684 - DNA, 25 bp, Homo sapien
tctgggcggatcctcctgctagccg

SEQ ID NO: 4010685 - DNA, 25 bp, Homo sapien
ttcaccagagacacccatggaagcc

SEQ ID NO: 4010686 - DNA, 25 bp, Homo sapien
ggcctgaaaggccataggagcctct

SEQ ID NO: 4010687 - DNA, 25 bp, Homo sapien
agcaaatttcaccagagacacccat

SEQ ID NO: 4010688 - DNA, 25 bp, Homo sapien
gaaaggccataggagcctctgcacc

SEQ ID NO: 4010689 - DNA, 25 bp, Homo sapien
gaaagggattggagtccaccagaaa

SEQ ID NO: 4010690 - DNA, 25 bp, Homo sapien
cagcccagtccgagttgttgggcac

SEQ ID NO: 4010691 - DNA, 25 bp, Homo sapien
cgtccagcagcgtatagttgagctg

SEQ ID NO: 4010692 - DNA, 25 bp, Homo sapien
gacggtgtagttgctgatatagcca

SEQ ID NO: 4010693 - DNA, 25 bp, Homo sapien
gctccgcgggtccgagcgcttgccc

SEQ ID NO: 4010694 - DNA, 25 bp, Homo sapien
gctcctcgttgagcacgcgggagcg

SEQ ID NO: 4010695 - DNA, 25 bp, Homo sapien
gggctcctcgttgagcacgcgggag

SEQ ID NO: 4010696 - DNA, 25 bp, Homo sapien
gttgtaggcctgggacgccaccatc

SEQ ID NO: 4010697 - DNA, 25 bp, Homo sapien
ctcctcgttgagcacgcgggagcgc

SEQ ID NO: 4010698 - DNA, 25 bp, Homo sapien
tgttgaggatgctgtctccgatggc

SEQ ID NO: 4010699 - DNA, 25 bp, Homo sapien
tcaggcacgagcggcatacgagctc

SEQ ID NO: 4010700 - DNA, 25 bp, Homo sapien
ctccgatggcggtgggcgtcacggt

SEQ ID NO: 4010701 - DNA, 25 bp, Homo sapien
tcacggtgcccgcggtggtctctgc

SEQ ID NO: 4010702 - DNA, 25 bp, Homo sapien
tcgtgcttgggctctgccgccacgt

SEQ ID NO: 4010703 - DNA, 25 bp, Homo sapien
cagcgatctgctggatgtcatccac

SEQ ID NO: 4010704 - DNA, 25 bp, Homo sapien
tccgtgatgttcttgcgtatctggg

SEQ ID NO: 4010705 - DNA, 25 bp, Homo sapien
gatgttcttgcgtatctgggctcgg

SEQ ID NO: 4010706 - DNA, 25 bp, Homo sapien
actgggatttatctctggggcccgg

SEQ ID NO: 4010707 - DNA, 25 bp, Homo sapien
cggaacgtcggggtgctgcttcagg

SEQ ID NO: 4010708 - DNA, 25 bp, Homo sapien
tgctgggagcggaacgtcggggtgc

SEQ ID NO: 4010709 - DNA, 25 bp, Homo sapien
agggtcactgggatttatctctggg

SEQ ID NO: 4010710 - DNA, 25 bp, Homo sapien
agtactcgatgacgtgctggggatc

SEQ ID NO: 4010711 - DNA, 25 bp, Homo sapien
acactagcggtgagcccgtgcagcc

SEQ ID NO: 4010712 - DNA, 25 bp, Homo sapien
cggtgagcccgtgcagccagactgt

SEQ ID NO: 4010713 - DNA, 25 bp, Homo sapien
gggagcacactagcggtgagcccgt

SEQ ID NO: 4010714 - DNA, 25 bp, Homo sapien
cccacctcgaagtgtggcctgaaac

SEQ ID NO: 4010715 - DNA, 25 bp, Homo sapien
aggcccacctcgaagtgtggcctga

SEQ ID NO: 4010716 - DNA, 25 bp, Homo sapien
ctgttgagggcgaccacagcggctc

SEQ ID NO: 4010717 - DNA, 25 bp, Homo sapien
ttgagggcgaccacagcggctccca

SEQ ID NO: 4010718 - DNA, 25 bp, Homo sapien
gcgtacaccagcggggcgccagcat

SEQ ID NO: 4010719 - DNA, 25 bp, Homo sapien
cagcggggcgccagcatcctccgcg

SEQ ID NO: 4010720 - DNA, 25 bp, Homo sapien
agggcgtacaccagcggggcgccag

SEQ ID NO: 4010721 - DNA, 25 bp, Homo sapien
gcagcagggcgtacaccagcggggc

SEQ ID NO: 4010722 - DNA, 25 bp, Homo sapien
agagcgtgcacagcgcccagtggga

SEQ ID NO: 4010723 - DNA, 25 bp, Homo sapien
catgcattcgaagtgcaccttggtg

SEQ ID NO: 4010724 - DNA, 25 bp, Homo sapien
aagaggcggcaagagccccccagcg

SEQ ID NO: 4010725 - DNA, 25 bp, Homo sapien
tgcaccttggtggtgagagcgtgca

SEQ ID NO: 4010726 - DNA, 25 bp, Homo sapien
ccagcaccgtcagcgtgaaggtgta

SEQ ID NO: 4010727 - DNA, 25 bp, Homo sapien
agagcggcccagcaccgtcagcgtg

SEQ ID NO: 4010728 - DNA, 25 bp, Homo sapien
ggcccagcaccgtcagcgtgaaggt

SEQ ID NO: 4010729 - DNA, 25 bp, Homo sapien
gcaccgtcagcgtgaaggtgtatcc

SEQ ID NO: 4010730 - DNA, 25 bp, Homo sapien
tggatgtggtggtctcatccagcac

SEQ ID NO: 4010731 - DNA, 25 bp, Homo sapien
gtcttgttgctgaacgtacgtgcag

SEQ ID NO: 4010732 - DNA, 25 bp, Homo sapien
tgctgaacgtacgtgcagcccaccg

SEQ ID NO: 4010733 - DNA, 25 bp, Homo sapien
tcttgttgctgaacgtacgtgcagc

SEQ ID NO: 4010734 - DNA, 25 bp, Homo sapien
tgttgctgaacgtacgtgcagccca

SEQ ID NO: 4010735 - DNA, 25 bp, Homo sapien
gagccgctgctgcaattgaggcagc

SEQ ID NO: 4010736 - DNA, 25 bp, Homo sapien
cgtacacggcctgtgccttgcagga

SEQ ID NO: 4010737 - DNA, 25 bp, Homo sapien
tcacttcgtacacggcctgtgcctt

SEQ ID NO: 4010738 - DNA, 25 bp, Homo sapien
tgcggctcacttcgtacacggcctg

SEQ ID NO: 4010739 - DNA, 25 bp, Homo sapien
ttacctccaacacaggtctatttgg

SEQ ID NO: 4010740 - DNA, 25 bp, Homo sapien
gttacctccaacacaggtctatttg

SEQ ID NO: 4010741 - DNA, 25 bp, Homo sapien
tggggttacctccaacacaggtcta

SEQ ID NO: 4010742 - DNA, 25 bp, Homo sapien
acctgggcggcggaagggcatacac

SEQ ID NO: 4010743 - DNA, 25 bp, Homo sapien
ttccaacctgggcggcggaagggca

SEQ ID NO: 4010744 - DNA, 25 bp, Homo sapien
gatactcatccggtttgccaccttc

SEQ ID NO: 4010745 - DNA, 25 bp, Homo sapien
ccaggatactcatccggtttgccac

SEQ ID NO: 4010746 - DNA, 25 bp, Homo sapien
agggaggcgcacacgctcacagagg

SEQ ID NO: 4010747 - DNA, 25 bp, Homo sapien
tcagggaggcgcacacgctcacaga

SEQ ID NO: 4010748 - DNA, 25 bp, Homo sapien
aggccccagtcagggaggcgcacac

SEQ ID NO: 4010749 - DNA, 25 bp, Homo sapien
aggcgcacacgctcacagagggcag

SEQ ID NO: 4010750 - DNA, 25 bp, Homo sapien
ttctcgaaggcattagatgccagca

SEQ ID NO: 4010751 - DNA, 25 bp, Homo sapien
ggttctcgaaggcattagatgccag

SEQ ID NO: 4010752 - DNA, 25 bp, Homo sapien
gttctcgaaggcattagatgccagc

SEQ ID NO: 4010753 - DNA, 25 bp, Homo sapien
tgacattgtgctccaccagcacctg

SEQ ID NO: 4010754 - DNA, 25 bp, Homo sapien
gacattgtgctccaccagcacctgg

SEQ ID NO: 4010755 - DNA, 25 bp, Homo sapien
acattgtgctccaccagcacctggg

SEQ ID NO: 4010756 - DNA, 25 bp, Homo sapien
cacggtgacgttgctcacgtggttg

SEQ ID NO: 4010757 - DNA, 25 bp, Homo sapien
ttgtagttcacggtgacgttgctca

SEQ ID NO: 4010758 - DNA, 25 bp, Homo sapien
tagttcacggtgacgttgctcacgt

SEQ ID NO: 4010759 - DNA, 25 bp, Homo sapien
ttgctcacgtggttggaggccgtca

SEQ ID NO: 4010760 - DNA, 25 bp, Homo sapien
ccatggcagcgtcctcgggcagcat

SEQ ID NO: 4010761 - DNA, 25 bp, Homo sapien
tggcagcgtcctcgggcagcatgaa

SEQ ID NO: 4010762 - DNA, 25 bp, Homo sapien
agcgtcctcgggcagcatgaagcag

SEQ ID NO: 4010763 - DNA, 25 bp, Homo sapien
gcgtcctcgggcagcatgaagcaga

SEQ ID NO: 4010764 - DNA, 25 bp, Homo sapien
gaccgccgcgctctgataaatgaca

SEQ ID NO: 4010765 - DNA, 25 bp, Homo sapien
tctggaaggtcagggactgcttgtc

SEQ ID NO: 4010766 - DNA, 25 bp, Homo sapien
gactgcttgtcgttgatggtccacc

SEQ ID NO: 4010767 - DNA, 25 bp, Homo sapien
cattgaagaccacgttctggaaggt

SEQ ID NO: 4010768 - DNA, 25 bp, Homo sapien
tagtaccagctacaaagagtccacc

SEQ ID NO: 4010769 - DNA, 25 bp, Homo sapien
tctgtaaagcaaacctagtaccagc

SEQ ID NO: 4010770 - DNA, 25 bp, Homo sapien
tgtggaggactctgcccttagcctg

SEQ ID NO: 4010771 - DNA, 25 bp, Homo sapien
cacacctcccgtcgggctggagagt

SEQ ID NO: 4010772 - DNA, 25 bp, Homo sapien
tgtcagagccgtgactttccaggaa

SEQ ID NO: 4010773 - DNA, 25 bp, Homo sapien
ggctggtggtggagcctcggccata

SEQ ID NO: 4010774 - DNA, 25 bp, Homo sapien
ctggtggtggagcctcggccatact

SEQ ID NO: 4010775 - DNA, 25 bp, Homo sapien
ggtggtggagcctcggccatactca

SEQ ID NO: 4010776 - DNA, 25 bp, Homo sapien
tggtggtggagcctcggccatactc

SEQ ID NO: 4010777 - DNA, 25 bp, Homo sapien
gcgtcgtgctgcaagccaacgaggt

SEQ ID NO: 4010778 - DNA, 25 bp, Homo sapien
tgttccgtggctgcaagcagccgca

SEQ ID NO: 4010779 - DNA, 25 bp, Homo sapien
caacgaggtcaccagggagcatgag

SEQ ID NO: 4010780 - DNA, 25 bp, Homo sapien
cagtgctaccactgagaacagggta

SEQ ID NO: 4010781 - DNA, 25 bp, Homo sapien
gcacgacggatgagggtggacacgc

SEQ ID NO: 4010782 - DNA, 25 bp, Homo sapien
agggctccccgcttcgtcagccaca

SEQ ID NO: 4010783 - DNA, 25 bp, Homo sapien
cccacagtgctcgtgacaaggacag

SEQ ID NO: 4010784 - DNA, 25 bp, Homo sapien
ggacacgcagggctccccgcttcgt

SEQ ID NO: 4010785 - DNA, 25 bp, Homo sapien
acgtgcagccattggcgcaggcctg

SEQ ID NO: 4010786 - DNA, 25 bp, Homo sapien
cgtccagcggcaagcagatgttggc

SEQ ID NO: 4010787 - DNA, 25 bp, Homo sapien
ggaactctctccatagcgcataggg

SEQ ID NO: 4010788 - DNA, 25 bp, Homo sapien
caagcagatgttggctccagggcac

SEQ ID NO: 4010789 - DNA, 25 bp, Homo sapien
aggctcgctgccgttctccggggtc

SEQ ID NO: 4010790 - DNA, 25 bp, Homo sapien
ctgttgtccggggacctgctctcag

SEQ ID NO: 4010791 - DNA, 25 bp, Homo sapien
tctcaggctcgctgccgttctccgg

SEQ ID NO: 4010792 - DNA, 25 bp, Homo sapien
ttgtccggggacctgctctcaggct

SEQ ID NO: 4010793 - DNA, 25 bp, Homo sapien
tgggtcccaaattcggccgtggtga

SEQ ID NO: 4010794 - DNA, 25 bp, Homo sapien
aaggcttcacggctcagacgcaggc

SEQ ID NO: 4010795 - DNA, 25 bp, Homo sapien
ggcgggccgccggagctcctgggtc

SEQ ID NO: 4010796 - DNA, 25 bp, Homo sapien
agacgcaggcccgggaataccatga

SEQ ID NO: 4010797 - DNA, 25 bp, Homo sapien
gggccgcctcagctccacagacccc

SEQ ID NO: 4010798 - DNA, 25 bp, Homo sapien
gccgcctcagctccacagaccccat

SEQ ID NO: 4010799 - DNA, 25 bp, Homo sapien
agggggccgcctcagctccacagac

SEQ ID NO: 4010800 - DNA, 25 bp, Homo sapien
gcagggggccgcctcagctccacag

SEQ ID NO: 4010801 - DNA, 25 bp, Homo sapien
ctgagaggccgtcctgccgtgccag

SEQ ID NO: 4010802 - DNA, 25 bp, Homo sapien
ggccgtcctgccgtgccagaggcat

SEQ ID NO: 4010803 - DNA, 25 bp, Homo sapien
tgagaggccgtcctgccgtgccaga

SEQ ID NO: 4010804 - DNA, 25 bp, Homo sapien
tcctgccgtgccagaggcatcaggg

SEQ ID NO: 4010805 - DNA, 25 bp, Homo sapien
cacgaggaggttctcggcatcctgc

SEQ ID NO: 4010806 - DNA, 25 bp, Homo sapien
tcccacgaggaggttctcggcatcc

SEQ ID NO: 4010807 - DNA, 25 bp, Homo sapien
gggcgctcccacgaggaggttctcg

SEQ ID NO: 4010808 - DNA, 25 bp, Homo sapien
gctcccacgaggaggttctcggcat

SEQ ID NO: 4010809 - DNA, 25 bp, Homo sapien
caccaggacgaacagactggggacc

SEQ ID NO: 4010810 - DNA, 25 bp, Homo sapien
gacaccaggacgaacagactgggga

SEQ ID NO: 4010811 - DNA, 25 bp, Homo sapien
ccaggacaccaggacgaacagactg

SEQ ID NO: 4010812 - DNA, 25 bp, Homo sapien
ccaggacgaacagactggggaccga

SEQ ID NO: 4010813 - DNA, 25 bp, Homo sapien
tcaggcccctgcctggcccctcgca

SEQ ID NO: 4010814 - DNA, 25 bp, Homo sapien
ctcaggcccctgcctggcccctcgc

SEQ ID NO: 4010815 - DNA, 25 bp, Homo sapien
ggcccctgcctggcccctcgcacac

SEQ ID NO: 4010816 - DNA, 25 bp, Homo sapien
cacagccagcgtctcaggcccctgc

SEQ ID NO: 4010817 - DNA, 25 bp, Homo sapien
acgtagctgtgcggcgctgagcaca

SEQ ID NO: 4010818 - DNA, 25 bp, Homo sapien
gcagctcgcagacgtagctgtgcgg

SEQ ID NO: 4010819 - DNA, 25 bp, Homo sapien
cggtgggcccgagccggacgcagtg

SEQ ID NO: 4010820 - DNA, 25 bp, Homo sapien
ccggtgggcccgagccggacgcagt

SEQ ID NO: 4010821 - DNA, 25 bp, Homo sapien
agagatctcccaacctatggcccct

SEQ ID NO: 4010822 - DNA, 25 bp, Homo sapien
tcagagatctcccaacctatggccc

SEQ ID NO: 4010823 - DNA, 25 bp, Homo sapien
agatctcccaacctatggcccctcg

SEQ ID NO: 4010824 - DNA, 25 bp, Homo sapien
gatctcccaacctatggcccctcgg

SEQ ID NO: 4010825 - DNA, 25 bp, Homo sapien
ctccgtgtccgaggggcagagcggg

SEQ ID NO: 4010826 - DNA, 25 bp, Homo sapien
atctccgtgtccgaggggcagagcg

SEQ ID NO: 4010827 - DNA, 25 bp, Homo sapien
tccaccaccaggcggtagcagtgcc

SEQ ID NO: 4010828 - DNA, 25 bp, Homo sapien
gcgggactgtccaccattgccaggg

SEQ ID NO: 4010829 - DNA, 25 bp, Homo sapien
gatgctgaggtcgaggctctcgtca

SEQ ID NO: 4010830 - DNA, 25 bp, Homo sapien
tctcgtcactctgcaccgaggacgg

SEQ ID NO: 4010831 - DNA, 25 bp, Homo sapien
cccaggcagcacatagcgatgcgag

SEQ ID NO: 4010832 - DNA, 25 bp, Homo sapien
aaccaccgcggttctggatgctgag

SEQ ID NO: 4010833 - DNA, 25 bp, Homo sapien
ggggaggcagggaagacgtgctgga

SEQ ID NO: 4010834 - DNA, 25 bp, Homo sapien
agggaagacgtgctggaggagggtg

SEQ ID NO: 4010835 - DNA, 25 bp, Homo sapien
gaggcagggaagacgtgctggagga

SEQ ID NO: 4010836 - DNA, 25 bp, Homo sapien
cagggaagacgtgctggaggagggt

SEQ ID NO: 4010837 - DNA, 25 bp, Homo sapien
ggacaggcaggcgaaggaggcactg

SEQ ID NO: 4010838 - DNA, 25 bp, Homo sapien
ccggagcagagggacaggcaggcga

SEQ ID NO: 4010839 - DNA, 25 bp, Homo sapien
ggcaggcgaaggaggcactggaggg

SEQ ID NO: 4010840 - DNA, 25 bp, Homo sapien
acaggcaggcgaaggaggcactgga

SEQ ID NO: 4010841 - DNA, 25 bp, Homo sapien
agcagaaggcgctgcaggcctctgg

SEQ ID NO: 4010842 - DNA, 25 bp, Homo sapien
gtcagggaggcaggcgacatactcc

SEQ ID NO: 4010843 - DNA, 25 bp, Homo sapien
cttcgtgggcagctgaaaaggacac

SEQ ID NO: 4010844 - DNA, 25 bp, Homo sapien
acactgctgccacggtgcctgagct

SEQ ID NO: 4010845 - DNA, 25 bp, Homo sapien
ctcgggctgcaccacccgcacctgc

SEQ ID NO: 4010846 - DNA, 25 bp, Homo sapien
gctcctccgcccatcgcggcagcca

SEQ ID NO: 4010847 - DNA, 25 bp, Homo sapien
atcgcggcagccacgccaggccaca

SEQ ID NO: 4010848 - DNA, 25 bp, Homo sapien
tgcaccacccgcacctgctgctcct

SEQ ID NO: 4010849 - DNA, 25 bp, Homo sapien
tattccttcttctaacgtagaaatc

SEQ ID NO: 4010850 - DNA, 25 bp, Homo sapien
aacgtagaaatcttgttgttgctta

SEQ ID NO: 4010851 - DNA, 25 bp, Homo sapien
tccttcttctaacgtagaaatcttg

SEQ ID NO: 4010852 - DNA, 25 bp, Homo sapien
tcttctaacgtagaaatcttgttgt

SEQ ID NO: 4010853 - DNA, 25 bp, Homo sapien
aggttcgccaggagcccaacgtcca

SEQ ID NO: 4010854 - DNA, 25 bp, Homo sapien
agctctgccagcgccgagaggttcg

SEQ ID NO: 4010855 - DNA, 25 bp, Homo sapien
ggttcgccaggagcccaacgtccag

SEQ ID NO: 4010856 - DNA, 25 bp, Homo sapien
ctgccagcgccgagaggttcgccag

SEQ ID NO: 4010857 - DNA, 25 bp, Homo sapien
gccagagcccttagtaggccagagg

SEQ ID NO: 4010858 - DNA, 25 bp, Homo sapien
cagagcccttagtaggccagaggcc

SEQ ID NO: 4010859 - DNA, 25 bp, Homo sapien
gagcccttagtaggccagaggccat

SEQ ID NO: 4010860 - DNA, 25 bp, Homo sapien
agggccagagcccttagtaggccag

SEQ ID NO: 4010861 - DNA, 25 bp, Homo sapien
tgggcccatcccacacattgccagc

SEQ ID NO: 4010862 - DNA, 25 bp, Homo sapien
ccctgggcccatcccacacattgcc

SEQ ID NO: 4010863 - DNA, 25 bp, Homo sapien
ggcccatcccacacattgccagcat

SEQ ID NO: 4010864 - DNA, 25 bp, Homo sapien
ctgggcccatcccacacattgccag

SEQ ID NO: 4010865 - DNA, 25 bp, Homo sapien
gcccctgttgcaataaccactgctt

SEQ ID NO: 4010866 - DNA, 25 bp, Homo sapien
cgtgcccctgttgcaataaccactg

SEQ ID NO: 4010867 - DNA, 25 bp, Homo sapien
agatgacttccgtgcccctgttgca

SEQ ID NO: 4010868 - DNA, 25 bp, Homo sapien
cctggcatagccagatgacttccgt

SEQ ID NO: 4010869 - DNA, 25 bp, Homo sapien
tgagcagacacactcaggaggtgtc

SEQ ID NO: 4010870 - DNA, 25 bp, Homo sapien
gattatcatccgctgagggtggagc

SEQ ID NO: 4010871 - DNA, 25 bp, Homo sapien
gacacactcaggaggtgtcttgaga

SEQ ID NO: 4010872 - DNA, 25 bp, Homo sapien
gaaggggagtgagcagacacactca

SEQ ID NO: 4010873 - DNA, 25 bp, Homo sapien
gattatcatccgctgagggtagagc

SEQ ID NO: 4010874 - DNA, 25 bp, Homo sapien
atcatccgctgagggtagagctgag

SEQ ID NO: 4010875 - DNA, 25 bp, Homo sapien
cactcggcaggtgtcttgagattat

SEQ ID NO: 4010876 - DNA, 25 bp, Homo sapien
aggggatagagcaggcactcggcag

SEQ ID NO: 4010877 - DNA, 25 bp, Homo sapien
aggggatagagcacacactcggaag

SEQ ID NO: 4010878 - DNA, 25 bp, Homo sapien
gggatagagcacacactcggaaggt

SEQ ID NO: 4010879 - DNA, 25 bp, Homo sapien
aaggggatagagcacacactcggaa

SEQ ID NO: 4010880 - DNA, 25 bp, Homo sapien
gatagagcacacactcggaaggtgt

SEQ ID NO: 4010881 - DNA, 25 bp, Homo sapien
atcctgaagaatgacgatgctccac

SEQ ID NO: 4010882 - DNA, 25 bp, Homo sapien
ctgaagaatgacgatgctccactgc

SEQ ID NO: 4010883 - DNA, 25 bp, Homo sapien
aatgacgatgctccactgccgccat

SEQ ID NO: 4010884 - DNA, 25 bp, Homo sapien
aagaatgacgatgctccactgccgc

SEQ ID NO: 4010885 - DNA, 25 bp, Homo sapien
atggacaaaattaccgccaccaaca

SEQ ID NO: 4010886 - DNA, 25 bp, Homo sapien
ttctgttgctggtgatagatttttg

SEQ ID NO: 4010887 - DNA, 25 bp, Homo sapien
tggacaaaattaccgccaccaacac

SEQ ID NO: 4010888 - DNA, 25 bp, Homo sapien
tgctggtgatagatttttgcacctt

SEQ ID NO: 4010889 - DNA, 25 bp, Homo sapien
acccttccactgagtactgccgaca

SEQ ID NO: 4010890 - DNA, 25 bp, Homo sapien
tcacccttccactgagtactgccga

SEQ ID NO: 4010891 - DNA, 25 bp, Homo sapien
cccttccactgagtactgccgacag

SEQ ID NO: 4010892 - DNA, 25 bp, Homo sapien
cacccttccactgagtactgccgac

SEQ ID NO: 4010893 - DNA, 25 bp, Homo sapien
atgttttccaggccttttatgttct

SEQ ID NO: 4010894 - DNA, 25 bp, Homo sapien
tgttttccaggccttttatgttctg

SEQ ID NO: 4010895 - DNA, 25 bp, Homo sapien
ctcccaggtaataccaaattgtaag

SEQ ID NO: 4010896 - DNA, 25 bp, Homo sapien
ttcactcccaggtaataccaaattg

SEQ ID NO: 4010897 - DNA, 25 bp, Homo sapien
tcactcccaggtaataccaaattgt

SEQ ID NO: 4010898 - DNA, 25 bp, Homo sapien
cactcccaggtaataccaaattgta

SEQ ID NO: 4010899 - DNA, 25 bp, Homo sapien
atttggaattgtccctgtgggtaat

SEQ ID NO: 4010900 - DNA, 25 bp, Homo sapien
ttgtccctgtgggtaataagttaca

SEQ ID NO: 4010901 - DNA, 25 bp, Homo sapien
ggtaataagttacattcactcttca

SEQ ID NO: 4010902 - DNA, 25 bp, Homo sapien
cctgtgggtaataagttacattcac

SEQ ID NO: 4010903 - DNA, 25 bp, Homo sapien
caaagaggctttcttgcagaagggg

SEQ ID NO: 4010904 - DNA, 25 bp, Homo sapien
ccggttgcaaagaggctttcttgca

SEQ ID NO: 4010905 - DNA, 25 bp, Homo sapien
aagaggctttcttgcagaaggggtg

SEQ ID NO: 4010906 - DNA, 25 bp, Homo sapien
gaggctttcttgcagaaggggtgat

SEQ ID NO: 4010907 - DNA, 25 bp, Homo sapien
cagcactgaactatcctgcaactgc

SEQ ID NO: 4010908 - DNA, 25 bp, Homo sapien
agagagtctaagggccgtggcatca

SEQ ID NO: 4010909 - DNA, 25 bp, Homo sapien
aatgttgagagagtctaagggccgt

SEQ ID NO: 4010910 - DNA, 25 bp, Homo sapien
ctgcatcagcactgaactatcctgc

SEQ ID NO: 4010911 - DNA, 25 bp, Homo sapien
cgccgcaacgcttgcgcacgttgaa

SEQ ID NO: 4010912 - DNA, 25 bp, Homo sapien
cgcttgcgcacgttgaaacatttcc

SEQ ID NO: 4010913 - DNA, 25 bp, Homo sapien
gcatctgtagtagtcctctgcccgc

SEQ ID NO: 4010914 - DNA, 25 bp, Homo sapien
atctgtagtagtcctctgcccgccg

SEQ ID NO: 4010915 - DNA, 25 bp, Homo sapien
ttcatcagataaagcaccactttca

SEQ ID NO: 4010916 - DNA, 25 bp, Homo sapien
gataaagcaccactttcaggatgat

SEQ ID NO: 4010917 - DNA, 25 bp, Homo sapien
tgattttaaataatctgccatgttt

SEQ ID NO: 4010918 - DNA, 25 bp, Homo sapien
tatggattacaatcactttcatcag

SEQ ID NO: 4010919 - DNA, 25 bp, Homo sapien
tctgagatgatagtttccttcccca

SEQ ID NO: 4010920 - DNA, 25 bp, Homo sapien
aaactgttgctatattgattcctcc

SEQ ID NO: 4010921 - DNA, 25 bp, Homo sapien
agtatatccctaattcatccttcat

SEQ ID NO: 4010922 - DNA, 25 bp, Homo sapien
gcttactgcctgctgacttctgaga

SEQ ID NO: 4010923 - DNA, 25 bp, Homo sapien
tctccgtgctcacgttctttcatgc

SEQ ID NO: 4010924 - DNA, 25 bp, Homo sapien
tttctccgtgctcacgttctttcat

SEQ ID NO: 4010925 - DNA, 25 bp, Homo sapien
tccttttctccgtgctcacgttctt

SEQ ID NO: 4010926 - DNA, 25 bp, Homo sapien
cctctccttttctccgtgctcacgt

SEQ ID NO: 4010927 - DNA, 25 bp, Homo sapien
aaatgatcggaatggctcctaagtc

SEQ ID NO: 4010928 - DNA, 25 bp, Homo sapien
aattagaaatgatcggaatggctcc

SEQ ID NO: 4010929 - DNA, 25 bp, Homo sapien
tgatcggaatggctcctaagtcagg

SEQ ID NO: 4010930 - DNA, 25 bp, Homo sapien
tctattgaattagaaatgatcggaa

SEQ ID NO: 4010931 - DNA, 25 bp, Homo sapien
catcagaatagaggtggacaggaaa

SEQ ID NO: 4010932 - DNA, 25 bp, Homo sapien
atagaggtggacaggaaataccctg

SEQ ID NO: 4010933 - DNA, 25 bp, Homo sapien
actggctctggttgagacccagaag

SEQ ID NO: 4010934 - DNA, 25 bp, Homo sapien
gctctggttgagacccagaagagtc

SEQ ID NO: 4010935 - DNA, 25 bp, Homo sapien
gaagccaaggcagaattgcttcaaa

SEQ ID NO: 4010936 - DNA, 25 bp, Homo sapien
aattggccgaatgtggtggcacaca

SEQ ID NO: 4010937 - DNA, 25 bp, Homo sapien
agaggctgagggataagaatcgttt

SEQ ID NO: 4010938 - DNA, 25 bp, Homo sapien
caaggcagaattgcttcaaactggg

SEQ ID NO: 4010939 - DNA, 25 bp, Homo sapien
agtaaagatgtcttccaggacaatt

SEQ ID NO: 4010940 - DNA, 25 bp, Homo sapien
cttttgttgtcaccttcatcttacg

SEQ ID NO: 4010941 - DNA, 25 bp, Homo sapien
tagctcgaactttggtttccacctg

SEQ ID NO: 4010942 - DNA, 25 bp, Homo sapien
cacctgtctccataaagtaaagatg

SEQ ID NO: 4010943 - DNA, 25 bp, Homo sapien
tttgagacgggaagatagtcttcag

SEQ ID NO: 4010944 - DNA, 25 bp, Homo sapien
tcatgtccattttgagacgggaaga

SEQ ID NO: 4010945 - DNA, 25 bp, Homo sapien
tccattttgagacgggaagatagtc

SEQ ID NO: 4010946 - DNA, 25 bp, Homo sapien
ccatcatgtccattttgagacggga

SEQ ID NO: 4010947 - DNA, 25 bp, Homo sapien
ctctacagaaagttagtatactcac

SEQ ID NO: 4010948 - DNA, 25 bp, Homo sapien
cctctacagaaagttagtatactca

SEQ ID NO: 4010949 - DNA, 25 bp, Homo sapien
gtatacctctacagaaagttagtat

SEQ ID NO: 4010950 - DNA, 25 bp, Homo sapien
tacctctacagaaagttagtatact

SEQ ID NO: 4010951 - DNA, 25 bp, Homo sapien
atttataacttctcagaaacacagt

SEQ ID NO: 4010952 - DNA, 25 bp, Homo sapien
agagggagatggcaaatttataact

SEQ ID NO: 4010953 - DNA, 25 bp, Homo sapien
acacagtaatgataagtaaccaagg

SEQ ID NO: 4010954 - DNA, 25 bp, Homo sapien
cacagtaatgataagtaaccaagga

SEQ ID NO: 4010955 - DNA, 25 bp, Homo sapien
tccctcagatatcaccgtgggattc

SEQ ID NO: 4010956 - DNA, 25 bp, Homo sapien
cagatatcaccgtgggattccactg

SEQ ID NO: 4010957 - DNA, 25 bp, Homo sapien
taaccacatccctcagatatcaccg

SEQ ID NO: 4010958 - DNA, 25 bp, Homo sapien
cacatccctcagatatcaccgtggg

SEQ ID NO: 4010959 - DNA, 25 bp, Homo sapien
tcctgacaggcgatctgcctgcctc

SEQ ID NO: 4010960 - DNA, 25 bp, Homo sapien
tacaggtctctgccaccatgcccga

SEQ ID NO: 4010961 - DNA, 25 bp, Homo sapien
cctgacaggcgatctgcctgcctcg

SEQ ID NO: 4010962 - DNA, 25 bp, Homo sapien
gtgagccaccgtgcccggccatttt

SEQ ID NO: 4010963 - DNA, 25 bp, Homo sapien
ggcatgaatagcgtgggatttctct

SEQ ID NO: 4010964 - DNA, 25 bp, Homo sapien
tgaatagcgtgggatttctctaaga

SEQ ID NO: 4010965 - DNA, 25 bp, Homo sapien
aatggcatgaatagcgtgggatttc

SEQ ID NO: 4010966 - DNA, 25 bp, Homo sapien
tagcgtgggatttctctaagattgt

SEQ ID NO: 4010967 - DNA, 25 bp, Homo sapien
tcaagacatggagactatcctggcg

SEQ ID NO: 4010968 - DNA, 25 bp, Homo sapien
cttaaggttatatattttggccagg

SEQ ID NO: 4010969 - DNA, 25 bp, Homo sapien
acttaaggttatatattttggccag

SEQ ID NO: 4010970 - DNA, 25 bp, Homo sapien
catggagactatcctggcgaacacg

SEQ ID NO: 4010971 - DNA, 25 bp, Homo sapien
cacccatctactcacacaggtggac

SEQ ID NO: 4010972 - DNA, 25 bp, Homo sapien
cccatctactcacacaggtggactg

SEQ ID NO: 4010973 - DNA, 25 bp, Homo sapien
ccatctactcacacaggtggactga

SEQ ID NO: 4010974 - DNA, 25 bp, Homo sapien
acagcacccatctactcacacaggt

SEQ ID NO: 4010975 - DNA, 25 bp, Homo sapien
tgatttctggtcctccccaaccagc

SEQ ID NO: 4010976 - DNA, 25 bp, Homo sapien
gagctcccagggttcctcaaggtca

SEQ ID NO: 4010977 - DNA, 25 bp, Homo sapien
tctgggtgctccttccttcctgagc

SEQ ID NO: 4010978 - DNA, 25 bp, Homo sapien
gcttctgggtgctccttccttcctg

SEQ ID NO: 4010979 - DNA, 25 bp, Homo sapien
ataaaaaacaaatgatggcaggatg

SEQ ID NO: 4010980 - DNA, 25 bp, Homo sapien
taaaaaacaaatgatggcaggatgg

SEQ ID NO: 4010981 - DNA, 25 bp, Homo sapien
aaaaaacaaatgatggcaggatggc

SEQ ID NO: 4010982 - DNA, 25 bp, Homo sapien
tccgctcagccattcatatcctaag

SEQ ID NO: 4010983 - DNA, 25 bp, Homo sapien
agcctccgctcagccattcatatcc

SEQ ID NO: 4010984 - DNA, 25 bp, Homo sapien
cattcatatcctaagcaacaaaaca

SEQ ID NO: 4010985 - DNA, 25 bp, Homo sapien
tcagccattcatatcctaagcaaca

SEQ ID NO: 4010986 - DNA, 25 bp, Homo sapien
acatccatgtagccatccgtccatc

SEQ ID NO: 4010987 - DNA, 25 bp, Homo sapien
aggtcccgatagtaaaccatctcca

SEQ ID NO: 4010988 - DNA, 25 bp, Homo sapien
gaaggtcccgatagtaaaccatctc

SEQ ID NO: 4010989 - DNA, 25 bp, Homo sapien
gcgttccctcgctggagggccagca

SEQ ID NO: 4010990 - DNA, 25 bp, Homo sapien
ggccaactgggcgttccctcgctgg

SEQ ID NO: 4010991 - DNA, 25 bp, Homo sapien
agcaggtccggccaactgggcgttc

SEQ ID NO: 4010992 - DNA, 25 bp, Homo sapien
caactgggcgttccctcgctggagg

SEQ ID NO: 4010993 - DNA, 25 bp, Homo sapien
gaaacaagtcactcttcatctgtcc

SEQ ID NO: 4010994 - DNA, 25 bp, Homo sapien
tccagaaacaagtcactcttcatct

SEQ ID NO: 4010995 - DNA, 25 bp, Homo sapien
catccagaaacaagtcactcttcat

SEQ ID NO: 4010996 - DNA, 25 bp, Homo sapien
aagtcactcttcatctgtccagcaa

SEQ ID NO: 4010997 - DNA, 25 bp, Homo sapien
gtccaagctgcgccaaggcggcagg

SEQ ID NO: 4010998 - DNA, 25 bp, Homo sapien
tccaagctgcgccaaggcggcagga

SEQ ID NO: 4010999 - DNA, 25 bp, Homo sapien
agtccaagctgcgccaaggcggcag

SEQ ID NO: 4011000 - DNA, 25 bp, Homo sapien
gagtccaagctgcgccaaggcggca

SEQ ID NO: 4011001 - DNA, 25 bp, Homo sapien
gtccaggcagctgtcgacgtccagc

SEQ ID NO: 4011002 - DNA, 25 bp, Homo sapien
gagctgtccagcacggatgagtcca

SEQ ID NO: 4011003 - DNA, 25 bp, Homo sapien
aaggagctgtccagcacggatgagt

SEQ ID NO: 4011004 - DNA, 25 bp, Homo sapien
gagtccaggcagctgtcgacgtcca

SEQ ID NO: 4011005 - DNA, 25 bp, Homo sapien
taacttaaatacgagcagccacatg

SEQ ID NO: 4011006 - DNA, 25 bp, Homo sapien
tcttgaggaccccacgtgtgcattc

SEQ ID NO: 4011007 - DNA, 25 bp, Homo sapien
gtgcggcctcccgtttccgtatgaa

SEQ ID NO: 4011008 - DNA, 25 bp, Homo sapien
aattctatcgtgaaggctctgagcc

SEQ ID NO: 4011009 - DNA, 25 bp, Homo sapien
cgtctgcttagcgaagtgccctcgt

SEQ ID NO: 4011010 - DNA, 25 bp, Homo sapien
tcttctgagttatctggcgtgctgc

SEQ ID NO: 4011011 - DNA, 25 bp, Homo sapien
tgcagcactggaaagtggcggccct

SEQ ID NO: 4011012 - DNA, 25 bp, Homo sapien
tcaagtgtgttgacccttcccgagc

SEQ ID NO: 4011013 - DNA, 25 bp, Homo sapien
tggccaggtagacgggatagacaac

SEQ ID NO: 4011014 - DNA, 25 bp, Homo sapien
cagcgactgtgtcgacgctcagcgg

SEQ ID NO: 4011015 - DNA, 25 bp, Homo sapien
tggacaccaggccaacagcgactgt

SEQ ID NO: 4011016 - DNA, 25 bp, Homo sapien
gggatagacaaccacgctggacacc

SEQ ID NO: 4011017 - DNA, 25 bp, Homo sapien
ctgtgtggaggagaggaggccacac

SEQ ID NO: 4011018 - DNA, 25 bp, Homo sapien
aggagaggaggccacacaggtgagg

SEQ ID NO: 4011019 - DNA, 25 bp, Homo sapien
gtggaggagaggaggccacacaggt

SEQ ID NO: 4011020 - DNA, 25 bp, Homo sapien
tggaggagaggaggccacacaggtg

SEQ ID NO: 4011021 - DNA, 25 bp, Homo sapien
aacagccccgtaccacacggcgttg

SEQ ID NO: 4011022 - DNA, 25 bp, Homo sapien
accacacggcgttggcgcccaggaa

SEQ ID NO: 4011023 - DNA, 25 bp, Homo sapien
agccccgtaccacacggcgttggcg

SEQ ID NO: 4011024 - DNA, 25 bp, Homo sapien
agccaccagcaggcgccggaagcgc

SEQ ID NO: 4011025 - DNA, 25 bp, Homo sapien
aagccagtcattgaccaggaagaag

SEQ ID NO: 4011026 - DNA, 25 bp, Homo sapien
tctccaccgaaagccagtcattgac

SEQ ID NO: 4011027 - DNA, 25 bp, Homo sapien
aaagccagtcattgaccaggaagaa

SEQ ID NO: 4011028 - DNA, 25 bp, Homo sapien
caccgaaagccagtcattgaccagg

SEQ ID NO: 4011029 - DNA, 25 bp, Homo sapien
catgatgcccacgtgggccgtggta

SEQ ID NO: 4011030 - DNA, 25 bp, Homo sapien
gctgtccaccccatacagcatgatg

SEQ ID NO: 4011031 - DNA, 25 bp, Homo sapien
tgtcgtgccacactcggatcttcca

SEQ ID NO: 4011032 - DNA, 25 bp, Homo sapien
tgttgcggtggaaggctctgtcgcc

SEQ ID NO: 4011033 - DNA, 25 bp, Homo sapien
gttctgacgcctgcgacgagactca

SEQ ID NO: 4011034 - DNA, 25 bp, Homo sapien
aaaaactgccttgttctgacgcctg

SEQ ID NO: 4011035 - DNA, 25 bp, Homo sapien
gccttgttctgacgcctgcgacgag

SEQ ID NO: 4011036 - DNA, 25 bp, Homo sapien
actgcaaaaactgccttgttctgac

SEQ ID NO: 4011037 - DNA, 25 bp, Homo sapien
gcacacagcacatgtcagcatgacg

SEQ ID NO: 4011038 - DNA, 25 bp, Homo sapien
tgtcttgacgaggatctcgtacttg

SEQ ID NO: 4011039 - DNA, 25 bp, Homo sapien
tgacgatgtagtttacatccgctgt

SEQ ID NO: 4011040 - DNA, 25 bp, Homo sapien
acgaggatctcgtacttgaagcggc

SEQ ID NO: 4011041 - DNA, 25 bp, Homo sapien
caggccctcctcgactctgcagagg

SEQ ID NO: 4011042 - DNA, 25 bp, Homo sapien
ggccctcctcgactctgcagaggct

SEQ ID NO: 4011043 - DNA, 25 bp, Homo sapien
aggccctcctcgactctgcagaggc

SEQ ID NO: 4011044 - DNA, 25 bp, Homo sapien
ccaggccctcctcgactctgcagag

SEQ ID NO: 4011045 - DNA, 25 bp, Homo sapien
aagtactggcacagggacgtgtaca

SEQ ID NO: 4011046 - DNA, 25 bp, Homo sapien
gtgaggtggcgggtgaggcagacgg

SEQ ID NO: 4011047 - DNA, 25 bp, Homo sapien
ggcagacggcctggcggggcgaggt

SEQ ID NO: 4011048 - DNA, 25 bp, Homo sapien
tcctcctcgctgaagtactggcaca

SEQ ID NO: 4011049 - DNA, 25 bp, Homo sapien
ctgggcggatcctcctgctagccga

SEQ ID NO: 4011050 - DNA, 25 bp, Homo sapien
tctgggcggatcctcctgctagccg

SEQ ID NO: 4011051 - DNA, 25 bp, Homo sapien
ggtcacacgcctgccgggaagctca

SEQ ID NO: 4011052 - DNA, 25 bp, Homo sapien
gcagaacgcgcaggtcacacgcctg

SEQ ID NO: 4011053 - DNA, 25 bp, Homo sapien
ctggggcagaacgcgcaggtcacac

SEQ ID NO: 4011054 - DNA, 25 bp, Homo sapien
acgcctgccgggaagctcaaccacc

SEQ ID NO: 4011055 - DNA, 25 bp, Homo sapien
ccacgatggccctcctgagcccacc

SEQ ID NO: 4011056 - DNA, 25 bp, Homo sapien
cctgagcccaccctctgccatgggc

SEQ ID NO: 4011057 - DNA, 25 bp, Homo sapien
ccctcctgagcccaccctctgccat

SEQ ID NO: 4011058 - DNA, 25 bp, Homo sapien
ctcctgagcccaccctctgccatgg

SEQ ID NO: 4011059 - DNA, 25 bp, Homo sapien
gaaaggccataggagcctctgcacc

SEQ ID NO: 4011060 - DNA, 25 bp, Homo sapien
tgaaaggccataggagcctctgcac

SEQ ID NO: 4011061 - DNA, 25 bp, Homo sapien
aaatttcaccagagacacccatgga

SEQ ID NO: 4011062 - DNA, 25 bp, Homo sapien
atttcaccagagacacccatggaag

SEQ ID NO: 4011063 - DNA, 25 bp, Homo sapien
agcaaatttcaccagagacacccat

SEQ ID NO: 4011064 - DNA, 25 bp, Homo sapien
ttcaccagagacacccatggaagcc

SEQ ID NO: 4011065 - DNA, 25 bp, Homo sapien
aggccagggggccgcgtgtgcccca

SEQ ID NO: 4011066 - DNA, 25 bp, Homo sapien
ggccagggggccgcgtgtgccccaa

SEQ ID NO: 4011067 - DNA, 25 bp, Homo sapien
agaacaaggccagggggccgcgtgt

SEQ ID NO: 4011068 - DNA, 25 bp, Homo sapien
ccaagaacaaggccagggggccgcg

SEQ ID NO: 4011069 - DNA, 25 bp, Homo sapien
cagcagcgtatagttgagctgcaga

SEQ ID NO: 4011070 - DNA, 25 bp, Homo sapien
ggtgaccacagcaccgacggaggcc

SEQ ID NO: 4011071 - DNA, 25 bp, Homo sapien
accacagcaccgacggaggcctggg

SEQ ID NO: 4011072 - DNA, 25 bp, Homo sapien
cgtccagcagcgtatagttgagctg

SEQ ID NO: 4011073 - DNA, 25 bp, Homo sapien
cagcccagtccgagttgttgggcac

SEQ ID NO: 4011074 - DNA, 25 bp, Homo sapien
gccccgggcagcccagtccgagttg

SEQ ID NO: 4011075 - DNA, 25 bp, Homo sapien
cccgggcagcccagtccgagttgtt

SEQ ID NO: 4011076 - DNA, 25 bp, Homo sapien
gcagcccagtccgagttgttgggca

SEQ ID NO: 4011077 - DNA, 25 bp, Homo sapien
cagccgctcgatggggatctgggcg

SEQ ID NO: 4011078 - DNA, 25 bp, Homo sapien
tcgatggggatctgggcgccggcct

SEQ ID NO: 4011079 - DNA, 25 bp, Homo sapien
tgaggccagccgctcgatggggatc

SEQ ID NO: 4011080 - DNA, 25 bp, Homo sapien
cgctcgatggggatctgggcgccgg

SEQ ID NO: 4011081 - DNA, 25 bp, Homo sapien
gaaagggattggagtccaccagaaa

SEQ ID NO: 4011082 - DNA, 25 bp, Homo sapien
ggtgtagttgctgatatagccaaag

SEQ ID NO: 4011083 - DNA, 25 bp, Homo sapien
aagggattggagtccaccagaaaga

SEQ ID NO: 4011084 - DNA, 25 bp, Homo sapien
tggagacggtgtagttgctgatata

SEQ ID NO: 4011085 - DNA, 25 bp, Homo sapien
taggggatggagaagtggcagccag

SEQ ID NO: 4011086 - DNA, 25 bp, Homo sapien
ggatggagaagtggcagccaggccc

SEQ ID NO: 4011087 - DNA, 25 bp, Homo sapien
gatggagaagtggcagccaggccct

SEQ ID NO: 4011088 - DNA, 25 bp, Homo sapien
ggggatggagaagtggcagccaggc

SEQ ID NO: 4011089 - DNA, 25 bp, Homo sapien
gctccgcgggtccgagcgcttgccc

SEQ ID NO: 4011090 - DNA, 25 bp, Homo sapien
ctcctcgttgagcacgcgggagcgc

SEQ ID NO: 4011091 - DNA, 25 bp, Homo sapien
gggctcctcgttgagcacgcgggag

SEQ ID NO: 4011092 - DNA, 25 bp, Homo sapien
ggctcctcgttgagcacgcgggagc

SEQ ID NO: 4011093 - DNA, 25 bp, Homo sapien
gctcctcgttgagcacgcgggagcg

SEQ ID NO: 4011094 - DNA, 25 bp, Homo sapien
ctgggacgccaccatccgcgatggt

SEQ ID NO: 4011095 - DNA, 25 bp, Homo sapien
ccgcgatggtgactcggctcccagc

SEQ ID NO: 4011096 - DNA, 25 bp, Homo sapien
gcgatggtgactcggctcccagctc

SEQ ID NO: 4011097 - DNA, 25 bp, Homo sapien
gggacgccaccatccgcgatggtga

SEQ ID NO: 4011098 - DNA, 25 bp, Homo sapien
gagctggccaggtggatgaggtctc

SEQ ID NO: 4011099 - DNA, 25 bp, Homo sapien
tctgagctggccaggtggatgaggt

SEQ ID NO: 4011100 - DNA, 25 bp, Homo sapien
ctgtggtgcccgcacgtctgagctg

SEQ ID NO: 4011101 - DNA, 25 bp, Homo sapien
gtctgagctggccaggtggatgagg

SEQ ID NO: 4011102 - DNA, 25 bp, Homo sapien
cagcgatctgctggatgtcatccac

SEQ ID NO: 4011103 - DNA, 25 bp, Homo sapien
tcgtgcttgggctctgccgccacgt

SEQ ID NO: 4011104 - DNA, 25 bp, Homo sapien
tccgtgatgttcttgcgtatctggg

SEQ ID NO: 4011105 - DNA, 25 bp, Homo sapien
gatgttcttgcgtatctgggctcgg

SEQ ID NO: 4011106 - DNA, 25 bp, Homo sapien
agtactcgatgacgtgctggggatc

SEQ ID NO: 4011107 - DNA, 25 bp, Homo sapien
cggtgagcccgtgcagccagactgt

SEQ ID NO: 4011108 - DNA, 25 bp, Homo sapien
acactagcggtgagcccgtgcagcc

SEQ ID NO: 4011109 - DNA, 25 bp, Homo sapien
gggagcacactagcggtgagcccgt

SEQ ID NO: 4011110 - DNA, 25 bp, Homo sapien
aggcccacctcgaagtgtggcctga

SEQ ID NO: 4011111 - DNA, 25 bp, Homo sapien
ttgagggcgaccacagcggctccca

SEQ ID NO: 4011112 - DNA, 25 bp, Homo sapien
ctgttgagggcgaccacagcggctc

SEQ ID NO: 4011113 - DNA, 25 bp, Homo sapien
cccacctcgaagtgtggcctgaaac

SEQ ID NO: 4011114 - DNA, 25 bp, Homo sapien
agggcgtacaccagcggggcgccag

SEQ ID NO: 4011115 - DNA, 25 bp, Homo sapien
cagcggggcgccagcatcctccgcg

SEQ ID NO: 4011116 - DNA, 25 bp, Homo sapien
gcgtacaccagcggggcgccagcat

SEQ ID NO: 4011117 - DNA, 25 bp, Homo sapien
gcagcagggcgtacaccagcggggc

SEQ ID NO: 4011118 - DNA, 25 bp, Homo sapien
tgagggcgtgcacagcgcccagtgg

SEQ ID NO: 4011119 - DNA, 25 bp, Homo sapien
cgtgcattcgaagtgcaccttggtg

SEQ ID NO: 4011120 - DNA, 25 bp, Homo sapien
aagaggcggcaagagccctccagcg

SEQ ID NO: 4011121 - DNA, 25 bp, Homo sapien
agtgggaagaggcggcaagagccct

SEQ ID NO: 4011122 - DNA, 25 bp, Homo sapien
agagcggcccagcaccgtcagcgtg

SEQ ID NO: 4011123 - DNA, 25 bp, Homo sapien
ccagcaccgtcagcgtgaaggtgta

SEQ ID NO: 4011124 - DNA, 25 bp, Homo sapien
ggcccagcaccgtcagcgtgaaggt

SEQ ID NO: 4011125 - DNA, 25 bp, Homo sapien
gcaccgtcagcgtgaaggtgtatcc

SEQ ID NO: 4011126 - DNA, 25 bp, Homo sapien
tggatgtggtggtctcatccagcac

SEQ ID NO: 4011127 - DNA, 25 bp, Homo sapien
gtcttgttgctgaacgtacgtgcag

SEQ ID NO: 4011128 - DNA, 25 bp, Homo sapien
tgctgaacgtacgtgcagcccaccg

SEQ ID NO: 4011129 - DNA, 25 bp, Homo sapien
tcttgttgctgaacgtacgtgcagc

SEQ ID NO: 4011130 - DNA, 25 bp, Homo sapien
tgttgctgaacgtacgtgcagccca

SEQ ID NO: 4011131 - DNA, 25 bp, Homo sapien
gagccgctgctgcaattgaggcagc

SEQ ID NO: 4011132 - DNA, 25 bp, Homo sapien
cgtacacggcctgtgccttgcagga

SEQ ID NO: 4011133 - DNA, 25 bp, Homo sapien
tgcggctcacttcgtacacggcctg

SEQ ID NO: 4011134 - DNA, 25 bp, Homo sapien
tcacttcgtacacggcctgtgcctt

SEQ ID NO: 4011135 - DNA, 25 bp, Homo sapien
gggcccaaagttcagcgcacacccg

SEQ ID NO: 4011136 - DNA, 25 bp, Homo sapien
gcccaaagttcagcgcacacccgcc

SEQ ID NO: 4011137 - DNA, 25 bp, Homo sapien
aagttcagcgcacacccgccagcct

SEQ ID NO: 4011138 - DNA, 25 bp, Homo sapien
caaagttcagcgcacacccgccagc

SEQ ID NO: 4011139 - DNA, 25 bp, Homo sapien
tggaaactgagcggcgtctggtcgc

SEQ ID NO: 4011140 - DNA, 25 bp, Homo sapien
tggggtcgtaggactcgctcccatc

SEQ ID NO: 4011141 - DNA, 25 bp, Homo sapien
ggaaactgagcggcgtctggtcgcc

SEQ ID NO: 4011142 - DNA, 25 bp, Homo sapien
ggtcgtaggactcgctcccatccag

SEQ ID NO: 4011143 - DNA, 25 bp, Homo sapien
ccacgccgggcagggccacacgcgc

SEQ ID NO: 4011144 - DNA, 25 bp, Homo sapien
cgtaggcatccaggcagttgcgctg

SEQ ID NO: 4011145 - DNA, 25 bp, Homo sapien
gcgcaggtcaacgtaggcatccagg

SEQ ID NO: 4011146 - DNA, 25 bp, Homo sapien
gcatccaggcagttgcgctgtgatc

SEQ ID NO: 4011147 - DNA, 25 bp, Homo sapien
cgcgcaggtcaacgtaggcatccag

SEQ ID NO: 4011148 - DNA, 25 bp, Homo sapien
caggttggaggcgttcacctgcacg

SEQ ID NO: 4011149 - DNA, 25 bp, Homo sapien
cctgcacgcggtagtccccaggcct

SEQ ID NO: 4011150 - DNA, 25 bp, Homo sapien
gcctcaggtaggagtgctcggccct

SEQ ID NO: 4011151 - DNA, 25 bp, Homo sapien
cctcaggtaggagtgctcggccctg

SEQ ID NO: 4011152 - DNA, 25 bp, Homo sapien
tactggacggcgtcctgaacctcca

SEQ ID NO: 4011153 - DNA, 25 bp, Homo sapien
tggacggcgtcctgaacctccagca

SEQ ID NO: 4011154 - DNA, 25 bp, Homo sapien
ccacatactggacggcgtcctgaac

SEQ ID NO: 4011155 - DNA, 25 bp, Homo sapien
cagggccacatactggacggcgtcc

SEQ ID NO: 4011156 - DNA, 25 bp, Homo sapien
ctgcccagggcgttgaaggcacgca

SEQ ID NO: 4011157 - DNA, 25 bp, Homo sapien
tgcccagggcgttgaaggcacgcac

SEQ ID NO: 4011158 - DNA, 25 bp, Homo sapien
cccgcggccacggcgtgtaggtgac

SEQ ID NO: 4011159 - DNA, 25 bp, Homo sapien
gccccgcggccacggcgtgtaggtg

SEQ ID NO: 4011160 - DNA, 25 bp, Homo sapien
ctccaacagccccgcggccacggcg

SEQ ID NO: 4011161 - DNA, 25 bp, Homo sapien
cagccccgcggccacggcgtgtagg

SEQ ID NO: 4011162 - DNA, 25 bp, Homo sapien
ggagatggtgccgtccctgaccacg

SEQ ID NO: 4011163 - DNA, 25 bp, Homo sapien
agatggtgccgtccctgaccacggc

SEQ ID NO: 4011164 - DNA, 25 bp, Homo sapien
gagatggtgccgtccctgaccacgg

SEQ ID NO: 4011165 - DNA, 25 bp, Homo sapien
gtaggagatggtgccgtccctgacc

SEQ ID NO: 4011166 - DNA, 25 bp, Homo sapien
cggaaggtgtaaagagatggcagga

SEQ ID NO: 4011167 - DNA, 25 bp, Homo sapien
ggagcggaaggtgtaaagagatggc

SEQ ID NO: 4011168 - DNA, 25 bp, Homo sapien
agcggaaggtgtaaagagatggcag

SEQ ID NO: 4011169 - DNA, 25 bp, Homo sapien
ggaaggtgtaaagagatggcaggac

SEQ ID NO: 4011170 - DNA, 25 bp, Homo sapien
ccagagatgggcgtgcagcggtcac

SEQ ID NO: 4011171 - DNA, 25 bp, Homo sapien
ccccagagatgggcgtgcagcggtc

SEQ ID NO: 4011172 - DNA, 25 bp, Homo sapien
cccagagatgggcgtgcagcggtca

SEQ ID NO: 4011173 - DNA, 25 bp, Homo sapien
gagcacccaggaatagcgcacatca

SEQ ID NO: 4011174 - DNA, 25 bp, Homo sapien
gcagctggcattgacgatgagcccc

SEQ ID NO: 4011175 - DNA, 25 bp, Homo sapien
ccaccgtgcagctggcattgacgat

SEQ ID NO: 4011176 - DNA, 25 bp, Homo sapien
cgtgcagctggcattgacgatgagc

SEQ ID NO: 4011177 - DNA, 25 bp, Homo sapien
caccgtgcagctggcattgacgatg

SEQ ID NO: 4011178 - DNA, 25 bp, Homo sapien
cacattgagccaggcctcgctgcgg

SEQ ID NO: 4011179 - DNA, 25 bp, Homo sapien
ttcaccgtcacattgagccaggcct

SEQ ID NO: 4011180 - DNA, 25 bp, Homo sapien
gtcacattgagccaggcctcgctgc

SEQ ID NO: 4011181 - DNA, 25 bp, Homo sapien
ttgagccaggcctcgctgcggctca

SEQ ID NO: 4011182 - DNA, 25 bp, Homo sapien
gccggccaccctaacggtgaagtca

SEQ ID NO: 4011183 - DNA, 25 bp, Homo sapien
cagccggccaccctaacggtgaagt

SEQ ID NO: 4011184 - DNA, 25 bp, Homo sapien
gtagatgaacgtcacctcagggccc

SEQ ID NO: 4011185 - DNA, 25 bp, Homo sapien
gaagttgtgtgtcaccgtcgggcac

SEQ ID NO: 4011186 - DNA, 25 bp, Homo sapien
gctgttgtaagcgtgggtgacctcc

SEQ ID NO: 4011187 - DNA, 25 bp, Homo sapien
tgactgtcacaagataggagcctgg

SEQ ID NO: 4011188 - DNA, 25 bp, Homo sapien
gacattgtgctccaccagcacctgg

SEQ ID NO: 4011189 - DNA, 25 bp, Homo sapien
acattgtgctccaccagcacctggg

SEQ ID NO: 4011190 - DNA, 25 bp, Homo sapien
tgacattgtgctccaccagcacctg

SEQ ID NO: 4011191 - DNA, 25 bp, Homo sapien
ttgtagttcacggtgacgttgctca

SEQ ID NO: 4011192 - DNA, 25 bp, Homo sapien
cacggtgacgttgctcacgtggttg

SEQ ID NO: 4011193 - DNA, 25 bp, Homo sapien
tagttcacggtgacgttgctcacgt

SEQ ID NO: 4011194 - DNA, 25 bp, Homo sapien
ttgctcacgtggttggaggccgtca

SEQ ID NO: 4011195 - DNA, 25 bp, Homo sapien
gagagcttgaagaccgccgcgctct

SEQ ID NO: 4011196 - DNA, 25 bp, Homo sapien
aagaccatgtccgagccggcctcca

SEQ ID NO: 4011197 - DNA, 25 bp, Homo sapien
tctggaaggtcagggactgcttgtc

SEQ ID NO: 4011198 - DNA, 25 bp, Homo sapien
attgaagaccacgttctggaaggtc

SEQ ID NO: 4011199 - DNA, 25 bp, Homo sapien
gactgcttgtcgttgatggtccacc

SEQ ID NO: 4011200 - DNA, 25 bp, Homo sapien
ggctggtggtggagcctcggccata

SEQ ID NO: 4011201 - DNA, 25 bp, Homo sapien
ggtggtggagcctcggccatactca

SEQ ID NO: 4011202 - DNA, 25 bp, Homo sapien
ctggtggtggagcctcggccatact

SEQ ID NO: 4011203 - DNA, 25 bp, Homo sapien
tggtggtggagcctcggccatactc

SEQ ID NO: 4011204 - DNA, 25 bp, Homo sapien
gcgtcgtgctgcaagccaacgaggt

SEQ ID NO: 4011205 - DNA, 25 bp, Homo sapien
tgttccgtggctgcaagcagccgca

SEQ ID NO: 4011206 - DNA, 25 bp, Homo sapien
caacgaggtcaccagggagcatgag

SEQ ID NO: 4011207 - DNA, 25 bp, Homo sapien
cagtgctaccactgagaacagggta

SEQ ID NO: 4011208 - DNA, 25 bp, Homo sapien
gcacgacggatgagggtggacacgc

SEQ ID NO: 4011209 - DNA, 25 bp, Homo sapien
agggctccccgcttcgtcagccaca

SEQ ID NO: 4011210 - DNA, 25 bp, Homo sapien
cccacagtgctcgtgacaaggacag

SEQ ID NO: 4011211 - DNA, 25 bp, Homo sapien
ggacacgcagggctccccgcttcgt

SEQ ID NO: 4011212 - DNA, 25 bp, Homo sapien
tgttgtccggggacctgctctcagg

SEQ ID NO: 4011213 - DNA, 25 bp, Homo sapien
ggaactctctccatagcgcataggg

SEQ ID NO: 4011214 - DNA, 25 bp, Homo sapien
acgtgcagccattggcgcaggcctg

SEQ ID NO: 4011215 - DNA, 25 bp, Homo sapien
caagcagatgttggctccagggcac

SEQ ID NO: 4011216 - DNA, 25 bp, Homo sapien
aaggcttcacggctcagacgcaggc

SEQ ID NO: 4011217 - DNA, 25 bp, Homo sapien
agacgcaggcccgggaataccatga

SEQ ID NO: 4011218 - DNA, 25 bp, Homo sapien
tgggtcccaaattcggccgtggtga

SEQ ID NO: 4011219 - DNA, 25 bp, Homo sapien
ggcgggccgccggagctcctgggtc

SEQ ID NO: 4011220 - DNA, 25 bp, Homo sapien
gggccgcctcagctccacagacccc

SEQ ID NO: 4011221 - DNA, 25 bp, Homo sapien
gccgcctcagctccacagaccccat

SEQ ID NO: 4011222 - DNA, 25 bp, Homo sapien
agggggccgcctcagctccacagac

SEQ ID NO: 4011223 - DNA, 25 bp, Homo sapien
gcagggggccgcctcagctccacag

SEQ ID NO: 4011224 - DNA, 25 bp, Homo sapien
tcccacgaggaggttctcggcatcc

SEQ ID NO: 4011225 - DNA, 25 bp, Homo sapien
gggcgctcccacgaggaggttctcg

SEQ ID NO: 4011226 - DNA, 25 bp, Homo sapien
gctcccacgaggaggttctcggcat

SEQ ID NO: 4011227 - DNA, 25 bp, Homo sapien
cacgaggaggttctcggcatcctgc

SEQ ID NO: 4011228 - DNA, 25 bp, Homo sapien
acgtagctgtgcggcgctgagcaca

SEQ ID NO: 4011229 - DNA, 25 bp, Homo sapien
cggtgggcccgagccggacgcagtg

SEQ ID NO: 4011230 - DNA, 25 bp, Homo sapien
ccggtgggcccgagccggacgcagt

SEQ ID NO: 4011231 - DNA, 25 bp, Homo sapien
gcagctcgcagacgtagctgtgcgg

SEQ ID NO: 4011232 - DNA, 25 bp, Homo sapien
ctccgtgtccgaggggcagagcggg

SEQ ID NO: 4011233 - DNA, 25 bp, Homo sapien
tccaccaccaggcggtagcagtgcc

SEQ ID NO: 4011234 - DNA, 25 bp, Homo sapien
atctccgtgtccgaggggcagagcg

SEQ ID NO: 4011235 - DNA, 25 bp, Homo sapien
gcgggactgtccaccattgccaggg

SEQ ID NO: 4011236 - DNA, 25 bp, Homo sapien
tgaaccaccgcggttctggatgctg

SEQ ID NO: 4011237 - DNA, 25 bp, Homo sapien
tcgcccagggccacgatgctgtagg

SEQ ID NO: 4011238 - DNA, 25 bp, Homo sapien
tgctgaggtcgaggctctcgtcact

SEQ ID NO: 4011239 - DNA, 25 bp, Homo sapien
caccgcggttctggatgctgaggtc

SEQ ID NO: 4011240 - DNA, 25 bp, Homo sapien
gtgccgcttccacctgcacgtctgt

SEQ ID NO: 4011241 - DNA, 25 bp, Homo sapien
gcccaggcagcacatagcgatgcga

SEQ ID NO: 4011242 - DNA, 25 bp, Homo sapien
ctgcaccgaggacgggcacacgagc

SEQ ID NO: 4011243 - DNA, 25 bp, Homo sapien
agcacatagcgatgcgaggcagccg

SEQ ID NO: 4011244 - DNA, 25 bp, Homo sapien
ggggaggcagggaagacgtgctgga

SEQ ID NO: 4011245 - DNA, 25 bp, Homo sapien
agggaagacgtgctggaggagggtg

SEQ ID NO: 4011246 - DNA, 25 bp, Homo sapien
gaggcagggaagacgtgctggagga

SEQ ID NO: 4011247 - DNA, 25 bp, Homo sapien
cagggaagacgtgctggaggagggt

SEQ ID NO: 4011248 - DNA, 25 bp, Homo sapien
acaggcaggcgaaggaggcactgga

SEQ ID NO: 4011249 - DNA, 25 bp, Homo sapien
ggacaggcaggcgaaggaggcactg

SEQ ID NO: 4011250 - DNA, 25 bp, Homo sapien
ccggagcagagggacaggcaggcga

SEQ ID NO: 4011251 - DNA, 25 bp, Homo sapien
ggcaggcgaaggaggcactggaggg

SEQ ID NO: 4011252 - DNA, 25 bp, Homo sapien
agcagaaggcgctgcaggcctctgg

SEQ ID NO: 4011253 - DNA, 25 bp, Homo sapien
gtcagggaggcaggcgacatactcc

SEQ ID NO: 4011254 - DNA, 25 bp, Homo sapien
cttcgtgggcagctgaaaaggacac

SEQ ID NO: 4011255 - DNA, 25 bp, Homo sapien
acactgctgccacggtgcctgagct

SEQ ID NO: 4011256 - DNA, 25 bp, Homo sapien
ctcgggctgcaccacccgcacctgc

SEQ ID NO: 4011257 - DNA, 25 bp, Homo sapien
gctcctccgcccatcgcggcagcca

SEQ ID NO: 4011258 - DNA, 25 bp, Homo sapien
atcgcggcagccacgccaggccaca

SEQ ID NO: 4011259 - DNA, 25 bp, Homo sapien
tgcaccacccgcacctgctgctcct

SEQ ID NO: 4011260 - DNA, 25 bp, Homo sapien
tattccttcttctaacgtagaaatc

SEQ ID NO: 4011261 - DNA, 25 bp, Homo sapien
tccttcttctaacgtagaaatcttg

SEQ ID NO: 4011262 - DNA, 25 bp, Homo sapien
aacgtagaaatcttgttgttgctta

SEQ ID NO: 4011263 - DNA, 25 bp, Homo sapien
tcttctaacgtagaaatcttgttgt

SEQ ID NO: 4011264 - DNA, 25 bp, Homo sapien
aggttcgccaggagcccaacgtcca

SEQ ID NO: 4011265 - DNA, 25 bp, Homo sapien
ggttcgccaggagcccaacgtccag

SEQ ID NO: 4011266 - DNA, 25 bp, Homo sapien
agctctgccagcgccgagaggttcg

SEQ ID NO: 4011267 - DNA, 25 bp, Homo sapien
ctgccagcgccgagaggttcgccag

SEQ ID NO: 4011268 - DNA, 25 bp, Homo sapien
agggccagagcccttagtaggccag

SEQ ID NO: 4011269 - DNA, 25 bp, Homo sapien
cagagcccttagtaggccagaggcc

SEQ ID NO: 4011270 - DNA, 25 bp, Homo sapien
gagcccttagtaggccagaggccat

SEQ ID NO: 4011271 - DNA, 25 bp, Homo sapien
gccagagcccttagtaggccagagg

SEQ ID NO: 4011272 - DNA, 25 bp, Homo sapien
tgggcccatcccacacatttccagc

SEQ ID NO: 4011273 - DNA, 25 bp, Homo sapien
ctgggcccatcccacacatttccag

SEQ ID NO: 4011274 - DNA, 25 bp, Homo sapien
ggcccatcccacacatttccagcat

SEQ ID NO: 4011275 - DNA, 25 bp, Homo sapien
ccctgggcccatcccacacatttcc

SEQ ID NO: 4011276 - DNA, 25 bp, Homo sapien
tctgaacccaacagggtggtcccac

SEQ ID NO: 4011277 - DNA, 25 bp, Homo sapien
tcccactgtgggaccacaaccaggt

SEQ ID NO: 4011278 - DNA, 25 bp, Homo sapien
agaagcaggctcactaccaggctac

SEQ ID NO: 4011279 - DNA, 25 bp, Homo sapien
tctcctgttctgaacccaacagggt

SEQ ID NO: 4011280 - DNA, 25 bp, Homo sapien
cagaagccccggctgtcctccacct

SEQ ID NO: 4011281 - DNA, 25 bp, Homo sapien
tgtccctgctgagcttcagcagcca

SEQ ID NO: 4011282 - DNA, 25 bp, Homo sapien
tggaactggacacagctgtccctgc

SEQ ID NO: 4011283 - DNA, 25 bp, Homo sapien
gtccctgctgagcttcagcagccag

SEQ ID NO: 4011284 - DNA, 25 bp, Homo sapien
agcgctgtggcgtccgcggggatgc

SEQ ID NO: 4011285 - DNA, 25 bp, Homo sapien
cgcggcccgagcagttgacgcggca

SEQ ID NO: 4011286 - DNA, 25 bp, Homo sapien
cagttgacgcggcaggcggcgccgg

SEQ ID NO: 4011287 - DNA, 25 bp, Homo sapien
tgcgcagcgcgggaccgagcgtccg

SEQ ID NO: 4011288 - DNA, 25 bp, Homo sapien
gcgggcggcatcgttagggcagcgc

SEQ ID NO: 4011289 - DNA, 25 bp, Homo sapien
cgcggcgggcggcatcgttagggca

SEQ ID NO: 4011290 - DNA, 25 bp, Homo sapien
cggcgggcggcatcgttagggcagc

SEQ ID NO: 4011291 - DNA, 25 bp, Homo sapien
cgggcggcatcgttagggcagcgcg

SEQ ID NO: 4011292 - DNA, 25 bp, Homo sapien
gaatttcagtaagcatgtgaggtgg

SEQ ID NO: 4011293 - DNA, 25 bp, Homo sapien
cttgcctcctttgccgacctgtaaa

SEQ ID NO: 4011294 - DNA, 25 bp, Homo sapien
tgccacatggatcactctagccttg

SEQ ID NO: 4011295 - DNA, 25 bp, Homo sapien
catgtgttcatactgatgcctgcca

SEQ ID NO: 4011296 - DNA, 25 bp, Homo sapien
gcactagcccagtctaagtcttgaa

SEQ ID NO: 4011297 - DNA, 25 bp, Homo sapien
taattcacagtgaggagttctccac

SEQ ID NO: 4011298 - DNA, 25 bp, Homo sapien
gaaacaggatgaaaacgcagcagct

SEQ ID NO: 4011299 - DNA, 25 bp, Homo sapien
tctcttgcaagactagacagggagg

SEQ ID NO: 4011300 - DNA, 25 bp, Homo sapien
aggcacgatgatcccttgaccctgg

SEQ ID NO: 4011301 - DNA, 25 bp, Homo sapien
gaggcacgatgatcccttgaccctg

SEQ ID NO: 4011302 - DNA, 25 bp, Homo sapien
tgacaattgtatctttcgcaagctc

SEQ ID NO: 4011303 - DNA, 25 bp, Homo sapien
tggcggcctccggaactggaaggag

SEQ ID NO: 4011304 - DNA, 25 bp, Homo sapien
tcgcaagctcttaacctttataccg

SEQ ID NO: 4011305 - DNA, 25 bp, Homo sapien
gctcttaacctttataccgtcaata

SEQ ID NO: 4011306 - DNA, 25 bp, Homo sapien
tgaatgggccattttattgattttt

SEQ ID NO: 4011307 - DNA, 25 bp, Homo sapien
gaatgggccattttattgattttta

SEQ ID NO: 4011308 - DNA, 25 bp, Homo sapien
ccagcaggatctcagatgcaaaggg

SEQ ID NO: 4011309 - DNA, 25 bp, Homo sapien
taccccgccatggaaccaaacacca

SEQ ID NO: 4011310 - DNA, 25 bp, Homo sapien
cagatgaatccctagggtaccccgc

SEQ ID NO: 4011311 - DNA, 25 bp, Homo sapien
gatctcagatgcaaagggaagtgaa

SEQ ID NO: 4011312 - DNA, 25 bp, Homo sapien
ggctgaagttagctgacgcatgctt

SEQ ID NO: 4011313 - DNA, 25 bp, Homo sapien
gatcaagaatgacattctcacacca

SEQ ID NO: 4011314 - DNA, 25 bp, Homo sapien
caggatgccacagtgacaagggaca

SEQ ID NO: 4011315 - DNA, 25 bp, Homo sapien
gagggtccattcattgcattgcacg

SEQ ID NO: 4011316 - DNA, 25 bp, Homo sapien
ccaagtgagactgcaactgtcccct

SEQ ID NO: 4011317 - DNA, 25 bp, Homo sapien
tgtcccaagtgagactgcaactgtc

SEQ ID NO: 4011318 - DNA, 25 bp, Homo sapien
tcccaagtgagactgcaactgtccc

SEQ ID NO: 4011319 - DNA, 25 bp, Homo sapien
caagtgagactgcaactgtcccctt

SEQ ID NO: 4011320 - DNA, 25 bp, Homo sapien
ccggcttgtcaactgcagcagcaaa

SEQ ID NO: 4011321 - DNA, 25 bp, Homo sapien
cctgtagccggcttgtcaactgcag

SEQ ID NO: 4011322 - DNA, 25 bp, Homo sapien
ctgtagccggcttgtcaactgcagc

SEQ ID NO: 4011323 - DNA, 25 bp, Homo sapien
gagagaggggtacaaagaggaggct

SEQ ID NO: 4011324 - DNA, 25 bp, Homo sapien
gatgaacagcggagcctcacttctc

SEQ ID NO: 4011325 - DNA, 25 bp, Homo sapien
ccagatgaacagcggagcctcactt

SEQ ID NO: 4011326 - DNA, 25 bp, Homo sapien
agagaggggtacaaagaggaggctt

SEQ ID NO: 4011327 - DNA, 25 bp, Homo sapien
ggcctcttactaatgagtccccagg

SEQ ID NO: 4011328 - DNA, 25 bp, Homo sapien
ttcagttcaaacgaggcaggcctct

SEQ ID NO: 4011329 - DNA, 25 bp, Homo sapien
ggcctctctccgggcctaatatgtc

SEQ ID NO: 4011330 - DNA, 25 bp, Homo sapien
gccacgtgctaatgggtgggtttca

SEQ ID NO: 4011331 - DNA, 25 bp, Homo sapien
atgttacagaagtttacagccttga

SEQ ID NO: 4011332 - DNA, 25 bp, Homo sapien
tcccgacccggaaatgtgatttctg

SEQ ID NO: 4011333 - DNA, 25 bp, Homo sapien
gaaaggagacctaagtctggacttg

SEQ ID NO: 4011334 - DNA, 25 bp, Homo sapien
gtgaccctggacatccctctgctat

SEQ ID NO: 4011335 - DNA, 25 bp, Homo sapien
aaccagcagcgtcaatggcagggca

SEQ ID NO: 4011336 - DNA, 25 bp, Homo sapien
ccttgtgcgatgtcctgttcaggca

SEQ ID NO: 4011337 - DNA, 25 bp, Homo sapien
tcatggttgtaaccggccagcagaa

SEQ ID NO: 4011338 - DNA, 25 bp, Homo sapien
caatgtaggatccttgtgcgatgtc

SEQ ID NO: 4011339 - DNA, 25 bp, Homo sapien
tacaggaacagaagcggtaagtgcc

SEQ ID NO: 4011340 - DNA, 25 bp, Homo sapien
tctgggccaccgacaatatagatca

SEQ ID NO: 4011341 - DNA, 25 bp, Homo sapien
tacggtctagtgaggaagcaaagca

SEQ ID NO: 4011342 - DNA, 25 bp, Homo sapien
gctattcccagccagtacggtctag

SEQ ID NO: 4011343 - DNA, 25 bp, Homo sapien
tggacacttgacatgagacagacat

SEQ ID NO: 4011344 - DNA, 25 bp, Homo sapien
tgacgccttggagctaccagactat

SEQ ID NO: 4011345 - DNA, 25 bp, Homo sapien
gctgggttctaaagcatcaagtgaa

SEQ ID NO: 4011346 - DNA, 25 bp, Homo sapien
ggaacagcacaatgagacagaaggg

SEQ ID NO: 4011347 - DNA, 25 bp, Homo sapien
actcctctcgcagaggttcccgagg

SEQ ID NO: 4011348 - DNA, 25 bp, Homo sapien
gtaggataccgggactcctctcgca

SEQ ID NO: 4011349 - DNA, 25 bp, Homo sapien
ggactcctctcgcagaggttcccga

SEQ ID NO: 4011350 - DNA, 25 bp, Homo sapien
tctcagtgtaggataccgggactcc

SEQ ID NO: 4011351 - DNA, 25 bp, Homo sapien
cctgggatgccctttcataaatgaa

SEQ ID NO: 4011352 - DNA, 25 bp, Homo sapien
tttcattcgcaagcacacagtggac

SEQ ID NO: 4011353 - DNA, 25 bp, Homo sapien
ccagagactacgcaccctgatgtca

SEQ ID NO: 4011354 - DNA, 25 bp, Homo sapien
tcacgcccacagctaacggaatgtg

SEQ ID NO: 4011355 - DNA, 25 bp, Homo sapien
gaatatcctacatgtagtgccagga

SEQ ID NO: 4011356 - DNA, 25 bp, Homo sapien
tgtcaagaggacaccctttttagga

SEQ ID NO: 4011357 - DNA, 25 bp, Homo sapien
taatgccccgtaagagtggcctgag

SEQ ID NO: 4011358 - DNA, 25 bp, Homo sapien
gattaagtcagggattaatgccccg

SEQ ID NO: 4011359 - DNA, 25 bp, Homo sapien
cattcctgagccaccgatctaaaca

SEQ ID NO: 4011360 - DNA, 25 bp, Homo sapien
gggaatcgcaggcatcagtgctcag

SEQ ID NO: 4011361 - DNA, 25 bp, Homo sapien
agaaagtgacccaatgccaggagcc

SEQ ID NO: 4011362 - DNA, 25 bp, Homo sapien
ggtttgcgtggccatgtaccatgtg

SEQ ID NO: 4011363 - DNA, 25 bp, Homo sapien
catgatcatggctcatcgaggcctc

SEQ ID NO: 4011364 - DNA, 25 bp, Homo sapien
tcatggctcatcgaggcctcaacct

SEQ ID NO: 4011365 - DNA, 25 bp, Homo sapien
caccaaacccagcccatggattttt

SEQ ID NO: 4011366 - DNA, 25 bp, Homo sapien
gccaccaaacccagcccatggattt

SEQ ID NO: 4011367 - DNA, 25 bp, Homo sapien
caagatgtagtcatactgggatctg

SEQ ID NO: 4011368 - DNA, 25 bp, Homo sapien
tatggtagcccactgcggtgaaaga

SEQ ID NO: 4011369 - DNA, 25 bp, Homo sapien
cggtgaaagaaacttgaggcaagat

SEQ ID NO: 4011370 - DNA, 25 bp, Homo sapien
tgatgtgtttatggtagcccactgc

SEQ ID NO: 4011371 - DNA, 25 bp, Homo sapien
tgcagcctttttatgagtacccaac

SEQ ID NO: 4011372 - DNA, 25 bp, Homo sapien
taaaacctaacgtatggctgtgatg

SEQ ID NO: 4011373 - DNA, 25 bp, Homo sapien
tcagcgggctattccatcagtggcg

SEQ ID NO: 4011374 - DNA, 25 bp, Homo sapien
tatgagccaattctgatgagggagg

SEQ ID NO: 4011375 - DNA, 25 bp, Homo sapien
tatgttcaaagtgcaagagtcgatc

SEQ ID NO: 4011376 - DNA, 25 bp, Homo sapien
gagagaacgttcaaagcagcaagag

SEQ ID NO: 4011377 - DNA, 25 bp, Homo sapien
agagtcgatcatgcccaacagtagg

SEQ ID NO: 4011378 - DNA, 25 bp, Homo sapien
ggacttcttagcaggaaagcatggg

SEQ ID NO: 4011379 - DNA, 25 bp, Homo sapien
tggattggattgtcgaggttttcgc

SEQ ID NO: 4011380 - DNA, 25 bp, Homo sapien
agggaaactgtctggattggattgt

SEQ ID NO: 4011381 - DNA, 25 bp, Homo sapien
aactgtctggattggattgtcgagg

SEQ ID NO: 4011382 - DNA, 25 bp, Homo sapien
gattgtcgaggttttcgcttttgta

SEQ ID NO: 4011383 - DNA, 25 bp, Homo sapien
cactggcacctttctacataacaca

SEQ ID NO: 4011384 - DNA, 25 bp, Homo sapien
acagtgcacctgccgcaagagaatg

SEQ ID NO: 4011385 - DNA, 25 bp, Homo sapien
cacactggcacctttctacataaca

SEQ ID NO: 4011386 - DNA, 25 bp, Homo sapien
ctgccgcaagagaatgccaggacca

SEQ ID NO: 4011387 - DNA, 25 bp, Homo sapien
tttacatcatcgatgtcattattcc

SEQ ID NO: 4011388 - DNA, 25 bp, Homo sapien
gtaggaaggtattcagaggaagtga

SEQ ID NO: 4011389 - DNA, 25 bp, Homo sapien
caaattgattaatctgccggaaaac

SEQ ID NO: 4011390 - DNA, 25 bp, Homo sapien
aaaactatgatgtttacatcatcga

SEQ ID NO: 4011391 - DNA, 25 bp, Homo sapien
tctgccttgagctgaacgtggtaca

SEQ ID NO: 4011392 - DNA, 25 bp, Homo sapien
ggagcgcccgctcaatgtggtcgtt

SEQ ID NO: 4011393 - DNA, 25 bp, Homo sapien
aatgtggtcgttgccttctgccttg

SEQ ID NO: 4011394 - DNA, 25 bp, Homo sapien
gccttctgccttgagctgaacgtgg

SEQ ID NO: 4011395 - DNA, 25 bp, Homo sapien
catggcaaccccttgttcgggctct

SEQ ID NO: 4011396 - DNA, 25 bp, Homo sapien
gaacttgccctcttcgtctgtcacg

SEQ ID NO: 4011397 - DNA, 25 bp, Homo sapien
gtcttctccgtaaatgctgcagtcg

SEQ ID NO: 4011398 - DNA, 25 bp, Homo sapien
tcgggctctccgtttaaggaagaca

SEQ ID NO: 4011399 - DNA, 25 bp, Homo sapien
gatgtaattcaggtttgaaactctt

SEQ ID NO: 4011400 - DNA, 25 bp, Homo sapien
aactggaagtactggttgtctccca

SEQ ID NO: 4011401 - DNA, 25 bp, Homo sapien
tatctatctatctacagctgggagc

SEQ ID NO: 4011402 - DNA, 25 bp, Homo sapien
ctgtgccttgccagacactcatgtg

SEQ ID NO: 4011403 - DNA, 25 bp, Homo sapien
cggttcggtaccccgtgatggtgat

SEQ ID NO: 4011404 - DNA, 25 bp, Homo sapien
ggatggctcaaaccggaactccttc

SEQ ID NO: 4011405 - DNA, 25 bp, Homo sapien
gtttgaagtaatactggccagggct

SEQ ID NO: 4011406 - DNA, 25 bp, Homo sapien
aactccttcatcatgggtttgaagt

SEQ ID NO: 4011407 - DNA, 25 bp, Homo sapien
tcacgatggaccagaattacaccag

SEQ ID NO: 4011408 - DNA, 25 bp, Homo sapien
agtaaccctctctctataatcacca

SEQ ID NO: 4011409 - DNA, 25 bp, Homo sapien
tccctggcagccaaaaatagtaacc

SEQ ID NO: 4011410 - DNA, 25 bp, Homo sapien
tctaggcatggcttaaaagtgaggg

SEQ ID NO: 4011411 - DNA, 25 bp, Homo sapien
gacgcctaagagagcagccgttgtg

SEQ ID NO: 4011412 - DNA, 25 bp, Homo sapien
gacaagcgggtgatcagaaaacaag

SEQ ID NO: 4011413 - DNA, 25 bp, Homo sapien
caacacataagtctcgcatgctgca

SEQ ID NO: 4011414 - DNA, 25 bp, Homo sapien
tctgtggcaaaacgagaagacgcct

SEQ ID NO: 4011415 - DNA, 25 bp, Homo sapien
ttgagaatgtcagaatgccgttgtc

SEQ ID NO: 4011416 - DNA, 25 bp, Homo sapien
ccgttgtcctgggtcaagaggttgg

SEQ ID NO: 4011417 - DNA, 25 bp, Homo sapien
gagaatgtcagaatgccgttgtcct

SEQ ID NO: 4011418 - DNA, 25 bp, Homo sapien
gtttgagaatgtcagaatgccgttg

SEQ ID NO: 4011419 - DNA, 25 bp, Homo sapien
ctcagggataagaggactcccggga

SEQ ID NO: 4011420 - DNA, 25 bp, Homo sapien
gtgagaccagagcaaggttaaactc

SEQ ID NO: 4011421 - DNA, 25 bp, Homo sapien
ttattgttactcaaaggaggacagg

SEQ ID NO: 4011422 - DNA, 25 bp, Homo sapien
gaaaataacagttccacaagtcaag

SEQ ID NO: 4011423 - DNA, 25 bp, Homo sapien
aagtcaagaggtcattttttcaagg

SEQ ID NO: 4011424 - DNA, 25 bp, Homo sapien
tctgtgaggtcaccgtgtactccag

SEQ ID NO: 4011425 - DNA, 25 bp, Homo sapien
gcagtcagaacatagccctccttct

SEQ ID NO: 4011426 - DNA, 25 bp, Homo sapien
agggcataggccttgaagtctccga

SEQ ID NO: 4011427 - DNA, 25 bp, Homo sapien
tgaagtctccgatggttccttccac

SEQ ID NO: 4011428 - DNA, 25 bp, Homo sapien
ctgtgatcagcggtgaacttgcccc

SEQ ID NO: 4011429 - DNA, 25 bp, Homo sapien
aactcggggtggatctggccttcta

SEQ ID NO: 4011430 - DNA, 25 bp, Homo sapien
ctttgtcatcagtaaagactgtgat

SEQ ID NO: 4011431 - DNA, 25 bp, Homo sapien
tgatgacaatctcgactccttccaa

SEQ ID NO: 4011432 - DNA, 25 bp, Homo sapien
agatgacggtgtaacagtgattttc

SEQ ID NO: 4011433 - DNA, 25 bp, Homo sapien
ctccactgacaacggcttccattga

SEQ ID NO: 4011434 - DNA, 25 bp, Homo sapien
cactgacaacggcttccattgaagg

SEQ ID NO: 4011435 - DNA, 25 bp, Homo sapien
aaagagcagctctttagatgacggt

SEQ ID NO: 4011436 - DNA, 25 bp, Homo sapien
taatatacttcagtttggcgggtcc

SEQ ID NO: 4011437 - DNA, 25 bp, Homo sapien
attaatatacttcagtttggcgggt

SEQ ID NO: 4011438 - DNA, 25 bp, Homo sapien
aatatacttcagtttggcgggtcct

SEQ ID NO: 4011439 - DNA, 25 bp, Homo sapien
ttaatatacttcagtttggcgggtc

SEQ ID NO: 4011440 - DNA, 25 bp, Homo sapien
acgagaaggggccttgtaactcatc

SEQ ID NO: 4011441 - DNA, 25 bp, Homo sapien
agtaagagaaatcatacgagaaggg

SEQ ID NO: 4011442 - DNA, 25 bp, Homo sapien
gaaggggccttgtaactcatctacc

SEQ ID NO: 4011443 - DNA, 25 bp, Homo sapien
ggggccttgtaactcatctaccatc

SEQ ID NO: 4011444 - DNA, 25 bp, Homo sapien
ctgcgggcctcgatctcagccagct

SEQ ID NO: 4011445 - DNA, 25 bp, Homo sapien
caaggcgggttcactgtcgatggaa

SEQ ID NO: 4011446 - DNA, 25 bp, Homo sapien
cagagggcctaagaccaaggcgggt

SEQ ID NO: 4011447 - DNA, 25 bp, Homo sapien
cagacttcagagggcctaagaccaa

SEQ ID NO: 4011448 - DNA, 25 bp, Homo sapien
catgaacgtgaccttcggtgaggga

SEQ ID NO: 4011449 - DNA, 25 bp, Homo sapien
tgaaacaagctgtcgcaacgctctt

SEQ ID NO: 4011450 - DNA, 25 bp, Homo sapien
tactctgcagggatgacggatggat

SEQ ID NO: 4011451 - DNA, 25 bp, Homo sapien
ggagacagggactgcaatgcccatt

SEQ ID NO: 4011452 - DNA, 25 bp, Homo sapien
tagttccaaggacatggtggcgaat

SEQ ID NO: 4011453 - DNA, 25 bp, Homo sapien
cattttgtcggtggtgatagttcca

SEQ ID NO: 4011454 - DNA, 25 bp, Homo sapien
tagtcacagtgacatccatcatttt

SEQ ID NO: 4011455 - DNA, 25 bp, Homo sapien
ggctgtcaatgtcaagatactaggt

SEQ ID NO: 4011456 - DNA, 25 bp, Homo sapien
tgtagaacgcttgctcaaaccggtg

SEQ ID NO: 4011457 - DNA, 25 bp, Homo sapien
gtgtcataggtgtagaacgcttgct

SEQ ID NO: 4011458 - DNA, 25 bp, Homo sapien
aacgcttgctcaaaccggtggcagg

SEQ ID NO: 4011459 - DNA, 25 bp, Homo sapien
gagcgaggggtcactttgtacacac

SEQ ID NO: 4011460 - DNA, 25 bp, Homo sapien
gagcaattccgacatctgaaatcga

SEQ ID NO: 4011461 - DNA, 25 bp, Homo sapien
ccgacatctgaaatcgagtggcagc

SEQ ID NO: 4011462 - DNA, 25 bp, Homo sapien
ctgaaatcgagtggcagctctttgc

SEQ ID NO: 4011463 - DNA, 25 bp, Homo sapien
ttttcagagaatggcatctattaca

SEQ ID NO: 4011464 - DNA, 25 bp, Homo sapien
ctggcagccacgcactgccacactt

SEQ ID NO: 4011465 - DNA, 25 bp, Homo sapien
tgctggcagccacgcactgccacac

SEQ ID NO: 4011466 - DNA, 25 bp, Homo sapien
ggcagccacgcactgccacacttct

SEQ ID NO: 4011467 - DNA, 25 bp, Homo sapien
atgctggcagccacgcactgccaca

SEQ ID NO: 4011468 - DNA, 25 bp, Homo sapien
aacaaatgttggcgaaggaggtgaa

SEQ ID NO: 4011469 - DNA, 25 bp, Homo sapien
caaatgttggcgaaggaggtgaaga

SEQ ID NO: 4011470 - DNA, 25 bp, Homo sapien
aaatgttggcgaaggaggtgaagaa

SEQ ID NO: 4011471 - DNA, 25 bp, Homo sapien
atgttggcgaaggaggtgaagaaac

SEQ ID NO: 4011472 - DNA, 25 bp, Homo sapien
gactcctttggagaggttataaatc

SEQ ID NO: 4011473 - DNA, 25 bp, Homo sapien
tctcacgcccatttccatcctgata

SEQ ID NO: 4011474 - DNA, 25 bp, Homo sapien
caggcttggacaggcagaatcggtt

SEQ ID NO: 4011475 - DNA, 25 bp, Homo sapien
gttataaatccccacattctcacgc

SEQ ID NO: 4011476 - DNA, 25 bp, Homo sapien
gccacagagaccacaatcaacaaga

SEQ ID NO: 4011477 - DNA, 25 bp, Homo sapien
gcgctggaacaaatacaccagagaa

SEQ ID NO: 4011478 - DNA, 25 bp, Homo sapien
tttcaggccacagagaccacaatca

SEQ ID NO: 4011479 - DNA, 25 bp, Homo sapien
ccctgcgctggaacaaatacaccag

SEQ ID NO: 4011480 - DNA, 25 bp, Homo sapien
tccaggctcttgttcttccagcacc

SEQ ID NO: 4011481 - DNA, 25 bp, Homo sapien
ccgtctgcctgaactcaactgcaga

SEQ ID NO: 4011482 - DNA, 25 bp, Homo sapien
tgtagcccgtctgcctgaactcaac

SEQ ID NO: 4011483 - DNA, 25 bp, Homo sapien
agggaacatctcagcatgtagcccg

SEQ ID NO: 4011484 - DNA, 25 bp, Homo sapien
catggcgttgaccttgccggagagc

SEQ ID NO: 4011485 - DNA, 25 bp, Homo sapien
gggactgtagagtcaccagcaagtc

SEQ ID NO: 4011486 - DNA, 25 bp, Homo sapien
gctcagggactgtagagtcaccagc

SEQ ID NO: 4011487 - DNA, 25 bp, Homo sapien
agcacgttgtcaaaggtgaaagtca

SEQ ID NO: 4011488 - DNA, 25 bp, Homo sapien
tctggggtttcaacgtcagccctgc

SEQ ID NO: 4011489 - DNA, 25 bp, Homo sapien
gaaatgtctggggtttcaacgtcag

SEQ ID NO: 4011490 - DNA, 25 bp, Homo sapien
tgtctggggtttcaacgtcagccct

SEQ ID NO: 4011491 - DNA, 25 bp, Homo sapien
aaactgatgccaagaactgtacaaa

SEQ ID NO: 4011492 - DNA, 25 bp, Homo sapien
tttttgagcggccattagtagagtt

SEQ ID NO: 4011493 - DNA, 25 bp, Homo sapien
ggccatttttgagcggccattagta

SEQ ID NO: 4011494 - DNA, 25 bp, Homo sapien
tatggccatttttgagcggccatta

SEQ ID NO: 4011495 - DNA, 25 bp, Homo sapien
gagcggccattagtagagttcattt

SEQ ID NO: 4011496 - DNA, 25 bp, Homo sapien
tccatgagcatctgtctccacggtg

SEQ ID NO: 4011497 - DNA, 25 bp, Homo sapien
aacaaaatgatccatgagcatctgt

SEQ ID NO: 4011498 - DNA, 25 bp, Homo sapien
tctccacggtgaccaaagacttgtc

SEQ ID NO: 4011499 - DNA, 25 bp, Homo sapien
aagacttgtccttgtcttgagatga

SEQ ID NO: 4011500 - DNA, 25 bp, Homo sapien
actggctgccagcatatttactggt

SEQ ID NO: 4011501 - DNA, 25 bp, Homo sapien
ttccaaatccacacgataagcttac

SEQ ID NO: 4011502 - DNA, 25 bp, Homo sapien
gcttccaaatccacacgataagctt

SEQ ID NO: 4011503 - DNA, 25 bp, Homo sapien
catatttactggtgcttccaaatcc

SEQ ID NO: 4011504 - DNA, 25 bp, Homo sapien
caaggcggaatgagccatcagcttt

SEQ ID NO: 4011505 - DNA, 25 bp, Homo sapien
tgatggtgaccgtttcaaagtagag

SEQ ID NO: 4011506 - DNA, 25 bp, Homo sapien
tgtggttatgttctcaaggcggaat

SEQ ID NO: 4011507 - DNA, 25 bp, Homo sapien
gtagaggtgctctttctgagcatgg

SEQ ID NO: 4011508 - DNA, 25 bp, Homo sapien
tacaccagaatacttggaccaaaag

SEQ ID NO: 4011509 - DNA, 25 bp, Homo sapien
cagtgtatccttacatgtacaccag

SEQ ID NO: 4011510 - DNA, 25 bp, Homo sapien
tcatatagtcatcagttcctctcca

SEQ ID NO: 4011511 - DNA, 25 bp, Homo sapien
ctgtgatccaaaaagagcgctggcc

SEQ ID NO: 4011512 - DNA, 25 bp, Homo sapien
ttcaagaccctcccggtgacggaga

SEQ ID NO: 4011513 - DNA, 25 bp, Homo sapien
catctccttcgggtccgttcaagac

SEQ ID NO: 4011514 - DNA, 25 bp, Homo sapien
ttctggaacaccatctccttcgggt

SEQ ID NO: 4011515 - DNA, 25 bp, Homo sapien
ccctcccggtgacggagaatcccat

SEQ ID NO: 4011516 - DNA, 25 bp, Homo sapien
caagaagaaggtgctcgaaggtgct

SEQ ID NO: 4011517 - DNA, 25 bp, Homo sapien
aaggtgctcctgtgccagagccaca

SEQ ID NO: 4011518 - DNA, 25 bp, Homo sapien
gaagaaggtgctcgaaggtgctcct

SEQ ID NO: 4011519 - DNA, 25 bp, Homo sapien
ggtgctcgaaggtgctcctgtgcca

SEQ ID NO: 4011520 - DNA, 25 bp, Homo sapien
ctcagtgccccggtcctgtgtgcca

SEQ ID NO: 4011521 - DNA, 25 bp, Homo sapien
agtgccccggtcctgtgtgccagcc

SEQ ID NO: 4011522 - DNA, 25 bp, Homo sapien
tgccccggtcctgtgtgccagccgg

SEQ ID NO: 4011523 - DNA, 25 bp, Homo sapien
actcagtgccccggtcctgtgtgcc

SEQ ID NO: 4011524 - DNA, 25 bp, Homo sapien
ctgtcatgctccactgtgaagtcaa

SEQ ID NO: 4011525 - DNA, 25 bp, Homo sapien
tgtcatgctccactgtgaagtcaag

SEQ ID NO: 4011526 - DNA, 25 bp, Homo sapien
gtcatgctccactgtgaagtcaagt

SEQ ID NO: 4011527 - DNA, 25 bp, Homo sapien
taatcctctcccctcgatagaacgg

SEQ ID NO: 4011528 - DNA, 25 bp, Homo sapien
ggcgccacatcaaaggtaatcctct

SEQ ID NO: 4011529 - DNA, 25 bp, Homo sapien
ctggaaggcgccacatcaaaggtaa

SEQ ID NO: 4011530 - DNA, 25 bp, Homo sapien
tcctctcccctcgatagaacggaat

SEQ ID NO: 4011531 - DNA, 25 bp, Homo sapien
gcgtgttcagagaactgcaggccaa

SEQ ID NO: 4011532 - DNA, 25 bp, Homo sapien
ttaacagcgtgttcagagaactgca

SEQ ID NO: 4011533 - DNA, 25 bp, Homo sapien
cgtgttcagagaactgcaggccaac

SEQ ID NO: 4011534 - DNA, 25 bp, Homo sapien
tgcttaacagcgtgttcagagaact

SEQ ID NO: 4011535 - DNA, 25 bp, Homo sapien
acagaacggaaatctgcttcactca

SEQ ID NO: 4011536 - DNA, 25 bp, Homo sapien
cctttaacacccaaacagcattggc

SEQ ID NO: 4011537 - DNA, 25 bp, Homo sapien
cccagacataaacagaacggaaatc

SEQ ID NO: 4011538 - DNA, 25 bp, Homo sapien
ttttactgtgtcatgagagtcccag

SEQ ID NO: 4011539 - DNA, 25 bp, Homo sapien
tctctggagaccgtgtagcacaaat

SEQ ID NO: 4011540 - DNA, 25 bp, Homo sapien
aaatacaccagactctcgtcttggg

SEQ ID NO: 4011541 - DNA, 25 bp, Homo sapien
cagtgtagcccccacttggcaagga

SEQ ID NO: 4011542 - DNA, 25 bp, Homo sapien
gaatagaaagagaacgagccatctt

SEQ ID NO: 4011543 - DNA, 25 bp, Homo sapien
caggcactggtgagacattgcagcc

SEQ ID NO: 4011544 - DNA, 25 bp, Homo sapien
aggcactggtgagacattgcagccc

SEQ ID NO: 4011545 - DNA, 25 bp, Homo sapien
cactggtgagacattgcagcccagg

SEQ ID NO: 4011546 - DNA, 25 bp, Homo sapien
ggcactggtgagacattgcagccca

SEQ ID NO: 4011547 - DNA, 25 bp, Homo sapien
cctcctacccttcacaccatctctt

SEQ ID NO: 4011548 - DNA, 25 bp, Homo sapien
aacagtatgttctggtctataatcc

SEQ ID NO: 4011549 - DNA, 25 bp, Homo sapien
tacccttcacaccatctcttttgtt

SEQ ID NO: 4011550 - DNA, 25 bp, Homo sapien
cctacccttcacaccatctcttttg

SEQ ID NO: 4011551 - DNA, 25 bp, Homo sapien
atcacttcggacagagccagacaca

SEQ ID NO: 4011552 - DNA, 25 bp, Homo sapien
gactggccgcattggcattggagtt

SEQ ID NO: 4011553 - DNA, 25 bp, Homo sapien
gagttggttacacgcactgtggtgc

SEQ ID NO: 4011554 - DNA, 25 bp, Homo sapien
cagcaactatgaggggactggccgc

SEQ ID NO: 4011555 - DNA, 25 bp, Homo sapien
caacatgaggacacgctgaagctaa

SEQ ID NO: 4011556 - DNA, 25 bp, Homo sapien
tgcctaacaacatgaggacacgctg

SEQ ID NO: 4011557 - DNA, 25 bp, Homo sapien
tgaagctaaaatattaactgggaaa

SEQ ID NO: 4011558 - DNA, 25 bp, Homo sapien
cttgcaaagtgcctaacaacatgag

SEQ ID NO: 4011559 - DNA, 25 bp, Homo sapien
tggaattacagcatgagcaactgca

SEQ ID NO: 4011560 - DNA, 25 bp, Homo sapien
tgctggaattacagcatgagcaact

SEQ ID NO: 4011561 - DNA, 25 bp, Homo sapien
ctggaattacagcatgagcaactgc

SEQ ID NO: 4011562 - DNA, 25 bp, Homo sapien
aatgctggaattacagcatgagcaa

SEQ ID NO: 4011563 - DNA, 25 bp, Homo sapien
tgagttgcgaggatttcataatctc

SEQ ID NO: 4011564 - DNA, 25 bp, Homo sapien
cccaggttggatgagttgcgaggat

SEQ ID NO: 4011565 - DNA, 25 bp, Homo sapien
gttggatgagttgcgaggatttcat

SEQ ID NO: 4011566 - DNA, 25 bp, Homo sapien
acgcccaggttggatgagttgcgag

SEQ ID NO: 4011567 - DNA, 25 bp, Homo sapien
cccttaatctcaaggatttctggca

SEQ ID NO: 4011568 - DNA, 25 bp, Homo sapien
atctcaaggatttctggcataaaac

SEQ ID NO: 4011569 - DNA, 25 bp, Homo sapien
gtttgacagaggtgacaggcatgaa

SEQ ID NO: 4011570 - DNA, 25 bp, Homo sapien
gtctcccttaatctcaaggatttct

SEQ ID NO: 4011571 - DNA, 25 bp, Homo sapien
gtgtaactgtggactggatctttgc

SEQ ID NO: 4011572 - DNA, 25 bp, Homo sapien
tttccgccaggctgtgtaactgtgg

SEQ ID NO: 4011573 - DNA, 25 bp, Homo sapien
agagacacctgaactcccgcaggac

SEQ ID NO: 4011574 - DNA, 25 bp, Homo sapien
atctttgcttcggtcccagtgtttc

SEQ ID NO: 4011575 - DNA, 25 bp, Homo sapien
catccacatggagctccacggtcgt

SEQ ID NO: 4011576 - DNA, 25 bp, Homo sapien
cacatggagctccacggtcgtcggc

SEQ ID NO: 4011577 - DNA, 25 bp, Homo sapien
acatggagctccacggtcgtcggct

SEQ ID NO: 4011578 - DNA, 25 bp, Homo sapien
tccacatggagctccacggtcgtcg

SEQ ID NO: 4011579 - DNA, 25 bp, Homo sapien
ccctaggggaggctcaatcttcaga

SEQ ID NO: 4011580 - DNA, 25 bp, Homo sapien
taggggaggctcaatcttcagaatg

SEQ ID NO: 4011581 - DNA, 25 bp, Homo sapien
aactccaccctaggggaggctcaat

SEQ ID NO: 4011582 - DNA, 25 bp, Homo sapien
tccaccctaggggaggctcaatctt

SEQ ID NO: 4011583 - DNA, 25 bp, Homo sapien
caaagtcccatgcttggtgtacagc

SEQ ID NO: 4011584 - DNA, 25 bp, Homo sapien
cagtctgtctggtatttcaaagtcc

SEQ ID NO: 4011585 - DNA, 25 bp, Homo sapien
gcacagtctgtctggtatttcaaag

SEQ ID NO: 4011586 - DNA, 25 bp, Homo sapien
gtaaccattattaggggcacagtct

SEQ ID NO: 4011587 - DNA, 25 bp, Homo sapien
catctgagtcttccacgtgttgtgt

SEQ ID NO: 4011588 - DNA, 25 bp, Homo sapien
tgagcattaccagacacgaagtgtt

SEQ ID NO: 4011589 - DNA, 25 bp, Homo sapien
tcttcaggtgtagacacagagccgc

SEQ ID NO: 4011590 - DNA, 25 bp, Homo sapien
caagctcgtgttcggtttcttcagg

SEQ ID NO: 4011591 - DNA, 25 bp, Homo sapien
aattcaccagcctagaccggttagg

SEQ ID NO: 4011592 - DNA, 25 bp, Homo sapien
cctaaagatcggctggttttccaga

SEQ ID NO: 4011593 - DNA, 25 bp, Homo sapien
ttagggaggcaacatcaagggacat

SEQ ID NO: 4011594 - DNA, 25 bp, Homo sapien
tagtgcagggactggaaattcacca

SEQ ID NO: 4011595 - DNA, 25 bp, Homo sapien
gtccgacttgacgaagccaccgcag

SEQ ID NO: 4011596 - DNA, 25 bp, Homo sapien
gcagcccaccacgatgtcctccgag

SEQ ID NO: 4011597 - DNA, 25 bp, Homo sapien
gatgtcctccgagccgtgcgccggc

SEQ ID NO: 4011598 - DNA, 25 bp, Homo sapien
gagtagttgatctccacgtccgact

SEQ ID NO: 4011599 - DNA, 25 bp, Homo sapien
accaccgcggcggtgaccaccgcgg

SEQ ID NO: 4011600 - DNA, 25 bp, Homo sapien
gcaccaccgcggcggtgaccaccgc

SEQ ID NO: 4011601 - DNA, 25 bp, Homo sapien
caccaccgcggcggtgaccaccgcg

SEQ ID NO: 4011602 - DNA, 25 bp, Homo sapien
ccgcccctcacactgcacgccgcag

SEQ ID NO: 4011603 - DNA, 25 bp, Homo sapien
cccctcacactgcacgccgcaggct

SEQ ID NO: 4011604 - DNA, 25 bp, Homo sapien
tcacactgcacgccgcaggctcctt

SEQ ID NO: 4011605 - DNA, 25 bp, Homo sapien
cctcacactgcacgccgcaggctcc

SEQ ID NO: 4011606 - DNA, 25 bp, Homo sapien
ctgggacccacgacgacagaaggcg

SEQ ID NO: 4011607 - DNA, 25 bp, Homo sapien
acagaaggcgccgatggccgcgcct

SEQ ID NO: 4011608 - DNA, 25 bp, Homo sapien
tcgcggccgagcagtctgcccagag

SEQ ID NO: 4011609 - DNA, 25 bp, Homo sapien
cttagcgacagacagacgctgggac

SEQ ID NO: 4011610 - DNA, 25 bp, Homo sapien
catggccggggctacctccggatgt

SEQ ID NO: 4011611 - DNA, 25 bp, Homo sapien
ggctacctccggatgttccccactc

SEQ ID NO: 4011612 - DNA, 25 bp, Homo sapien
cctccggatgttccccactcttcaa

SEQ ID NO: 4011613 - DNA, 25 bp, Homo sapien
tggccggggctacctccggatgttc

SEQ ID NO: 4011614 - DNA, 25 bp, Homo sapien
aataaacactggcattccaagtgtg

SEQ ID NO: 4011615 - DNA, 25 bp, Homo sapien
taaataaacactggcattccaagtg

SEQ ID NO: 4011616 - DNA, 25 bp, Homo sapien
gttaaataaacactggcattccaag

SEQ ID NO: 4011617 - DNA, 25 bp, Homo sapien
aaacactggcattccaagtgtgagc

SEQ ID NO: 4011618 - DNA, 25 bp, Homo sapien
ctccataagagctctgtagaccttg

SEQ ID NO: 4011619 - DNA, 25 bp, Homo sapien
caccaatctcttctagaagtgcctt

SEQ ID NO: 4011620 - DNA, 25 bp, Homo sapien
tgttttcatcaccaatctcttctag

SEQ ID NO: 4011621 - DNA, 25 bp, Homo sapien
gagctctgtagaccttgctgttttc

SEQ ID NO: 4011622 - DNA, 25 bp, Homo sapien
cactaacttaccatcggaaagaacg

SEQ ID NO: 4011623 - DNA, 25 bp, Homo sapien
gaaacagactgaaccaaggacaagc

SEQ ID NO: 4011624 - DNA, 25 bp, Homo sapien
gtgggtaactgactgggcctaagaa

SEQ ID NO: 4011625 - DNA, 25 bp, Homo sapien
aaggacaagcccactgttaccacct

SEQ ID NO: 4011626 - DNA, 25 bp, Homo sapien
catctttataaatctgcaggagctg

SEQ ID NO: 4011627 - DNA, 25 bp, Homo sapien
gtaaatatttcttgccgaccagccg

SEQ ID NO: 4011628 - DNA, 25 bp, Homo sapien
ctccaggcatctccatggcatcttt

SEQ ID NO: 4011629 - DNA, 25 bp, Homo sapien
ttcttgccgaccagccgctgaaatc

SEQ ID NO: 4011630 - DNA, 25 bp, Homo sapien
gaaagaggagaatgtccaagatgac

SEQ ID NO: 4011631 - DNA, 25 bp, Homo sapien
agggccacagcatgcagggccttga

SEQ ID NO: 4011632 - DNA, 25 bp, Homo sapien
gggccttgagagcacctaagagcag

SEQ ID NO: 4011633 - DNA, 25 bp, Homo sapien
agcatgcagggccttgagagcacct

SEQ ID NO: 4011634 - DNA, 25 bp, Homo sapien
taatgcaggaagcttcagataccag

SEQ ID NO: 4011635 - DNA, 25 bp, Homo sapien
gacctatgctggtaagaaagcagga

SEQ ID NO: 4011636 - DNA, 25 bp, Homo sapien
aagtagataagctgacataatgcag

SEQ ID NO: 4011637 - DNA, 25 bp, Homo sapien
ttagtagcgcagtgacctatgctgg

SEQ ID NO: 4011638 - DNA, 25 bp, Homo sapien
tttgacaataatggccttttctctc

SEQ ID NO: 4011639 - DNA, 25 bp, Homo sapien
taggacaggtgccttcttttgacaa

SEQ ID NO: 4011640 - DNA, 25 bp, Homo sapien
gacaggtgccttcttttgacaataa

SEQ ID NO: 4011641 - DNA, 25 bp, Homo sapien
ctctcctcagcagggtgactgaact

SEQ ID NO: 4011642 - DNA, 25 bp, Homo sapien
tcttctgagaaacttagatcacagg

SEQ ID NO: 4011643 - DNA, 25 bp, Homo sapien
ttctgagaaacttagatcacaggac

SEQ ID NO: 4011644 - DNA, 25 bp, Homo sapien
tctgagaaacttagatcacaggaca

SEQ ID NO: 4011645 - DNA, 25 bp, Homo sapien
ctgagaaacttagatcacaggacat

SEQ ID NO: 4011646 - DNA, 25 bp, Homo sapien
gccaaagacacctttgctggtttcc

SEQ ID NO: 4011647 - DNA, 25 bp, Homo sapien
ccaaatcaagagcactgccaaagac

SEQ ID NO: 4011648 - DNA, 25 bp, Homo sapien
ctcccaaatcaagagcactgccaaa

SEQ ID NO: 4011649 - DNA, 25 bp, Homo sapien
actgccaaagacacctttgctggtt

SEQ ID NO: 4011650 - DNA, 25 bp, Homo sapien
taaactgggtgacctgaagcaagcc

SEQ ID NO: 4011651 - DNA, 25 bp, Homo sapien
tgtgggtggctaactggccctcaac

SEQ ID NO: 4011652 - DNA, 25 bp, Homo sapien
aaaatgggttgcaagccaggcacgg

SEQ ID NO: 4011653 - DNA, 25 bp, Homo sapien
tcaagaccctgaatgaacggcacaa

SEQ ID NO: 4011654 - DNA, 25 bp, Homo sapien
ccaggtgccgagctgatacttcaaa

SEQ ID NO: 4011655 - DNA, 25 bp, Homo sapien
tgtgatctgtgctcgcagtgtagcc

SEQ ID NO: 4011656 - DNA, 25 bp, Homo sapien
tcatccagccccgaatacagtgggt

SEQ ID NO: 4011657 - DNA, 25 bp, Homo sapien
cagtgtagccggagagatggcatca

SEQ ID NO: 4011658 - DNA, 25 bp, Homo sapien
tcagggcagcgtcaagtatctcacc

SEQ ID NO: 4011659 - DNA, 25 bp, Homo sapien
aaattagccaagcgcggtggtgagc

SEQ ID NO: 4011660 - DNA, 25 bp, Homo sapien
cctgtagtcctagtctcccgagtag

SEQ ID NO: 4011661 - DNA, 25 bp, Homo sapien
tagccaagcgcggtggtgagcacct

SEQ ID NO: 4011662 - DNA, 25 bp, Homo sapien
acctgtagtcctagtctcccgagta

SEQ ID NO: 4011663 - DNA, 25 bp, Homo sapien
tgatccatgccccttaataaggtag

SEQ ID NO: 4011664 - DNA, 25 bp, Homo sapien
tctagggccgttctgtaacattctc

SEQ ID NO: 4011665 - DNA, 25 bp, Homo sapien
gggccgttatctgccccatctctag

SEQ ID NO: 4011666 - DNA, 25 bp, Homo sapien
tacagatacggatgctgaggttact

SEQ ID NO: 4011667 - DNA, 25 bp, Homo sapien
caccgataaacgaagcaactgcatg

SEQ ID NO: 4011668 - DNA, 25 bp, Homo sapien
ttagtcacttcagggaatcgcattc

SEQ ID NO: 4011669 - DNA, 25 bp, Homo sapien
gcatactggtttcataagaactttt

SEQ ID NO: 4011670 - DNA, 25 bp, Homo sapien
tcccttggctgtattagtcacttca

SEQ ID NO: 4011671 - DNA, 25 bp, Homo sapien
aaaggagtatctcaccactgccttt

SEQ ID NO: 4011672 - DNA, 25 bp, Homo sapien
aatgtgtccacacaaccacatctgc

SEQ ID NO: 4011673 - DNA, 25 bp, Homo sapien
gaggcacgttcatcaaacctgttac

SEQ ID NO: 4011674 - DNA, 25 bp, Homo sapien
gggcctatgggattgccatggtgac

SEQ ID NO: 4011675 - DNA, 25 bp, Homo sapien
aggaaatatattcttccctctctcc

SEQ ID NO: 4011676 - DNA, 25 bp, Homo sapien
gtctcttgacacctcagagtgactg

SEQ ID NO: 4011677 - DNA, 25 bp, Homo sapien
gtgacctcatccgtattctgagcaa

SEQ ID NO: 4011678 - DNA, 25 bp, Homo sapien
atagctcatccccatgtgtaaatgt

SEQ ID NO: 4011679 - DNA, 25 bp, Homo sapien
gaactgaacagcctcgttgggattg

SEQ ID NO: 4011680 - DNA, 25 bp, Homo sapien
ttccaacggggtgacctcatccgta

SEQ ID NO: 4011681 - DNA, 25 bp, Homo sapien
tgccagttactaccagggcctatgg

SEQ ID NO: 4011682 - DNA, 25 bp, Homo sapien
cagtcactctgaggtgtcaagagac

SEQ ID NO: 4011683 - DNA, 25 bp, Homo sapien
aaaggcagtggtgagatactccttt

SEQ ID NO: 4011684 - DNA, 25 bp, Homo sapien
acatttacacatggggatgagctat

SEQ ID NO: 4011685 - DNA, 25 bp, Homo sapien
caatcccaacgaggctgttcagttc

SEQ ID NO: 4011686 - DNA, 25 bp, Homo sapien
ccataggccctggtagtaactggca

SEQ ID NO: 4011687 - DNA, 25 bp, Homo sapien
gtaacaggtttgatgaacgtgcctc

SEQ ID NO: 4011688 - DNA, 25 bp, Homo sapien
ttgctcagaatacggatgaggtcac

SEQ ID NO: 4011689 - DNA, 25 bp, Homo sapien
tacggatgaggtcaccccgttggaa

SEQ ID NO: 4011690 - DNA, 25 bp, Homo sapien
gtcaccatggcaatcccataggccc

SEQ ID NO: 4011691 - DNA, 25 bp, Homo sapien
gcagatgtggttgtgtggacacatt

SEQ ID NO: 4011692 - DNA, 25 bp, Homo sapien
ggagagagggaagaatatatttcct

SEQ ID NO: 4011693 - DNA, 25 bp, Homo sapien
atttgtaaatatatgtattacatcc

SEQ ID NO: 4011694 - DNA, 25 bp, Homo sapien
tatttgtaaatatatgtattacatc

SEQ ID NO: 4011695 - DNA, 25 bp, Homo sapien
gaggcattttatttgtaaatatatg

SEQ ID NO: 4011696 - DNA, 25 bp, Homo sapien
ggcattttatttgtaaatatatgta

SEQ ID NO: 4011697 - DNA, 25 bp, Homo sapien
gtgtgttttcgtcttgcttcttcat

SEQ ID NO: 4011698 - DNA, 25 bp, Homo sapien
gtgttttcgtcttgcttcttcatgg

SEQ ID NO: 4011699 - DNA, 25 bp, Homo sapien
ttttcgtcttgcttcttcatggtcc

SEQ ID NO: 4011700 - DNA, 25 bp, Homo sapien
cgtcttgcttcttcatggtccatga

SEQ ID NO: 4011701 - DNA, 25 bp, Homo sapien
aagaaagtgctggtaagtttaatag

SEQ ID NO: 4011702 - DNA, 25 bp, Homo sapien
tagtgccttctagtgcagaaaaaca

SEQ ID NO: 4011703 - DNA, 25 bp, Homo sapien
gctggtaagtttaatagttcaacat

SEQ ID NO: 4011704 - DNA, 25 bp, Homo sapien
aatagttcaacatagtgccttctag

SEQ ID NO: 4011705 - DNA, 25 bp, Homo sapien
ctcatcagtggttaagggcgctttc

SEQ ID NO: 4011706 - DNA, 25 bp, Homo sapien
catgtagcgtatgagccatgactcc

SEQ ID NO: 4011707 - DNA, 25 bp, Homo sapien
caaagagccaaatccagagagccca

SEQ ID NO: 4011708 - DNA, 25 bp, Homo sapien
tggctgcttcatgagttactgtggg

SEQ ID NO: 4011709 - DNA, 25 bp, Homo sapien
gcatatagtatgcaaatgtgcggca

SEQ ID NO: 4011710 - DNA, 25 bp, Homo sapien
cagacgcataatttggagggtataa

SEQ ID NO: 4011711 - DNA, 25 bp, Homo sapien
caccagacgcataatttggagggta

SEQ ID NO: 4011712 - DNA, 25 bp, Homo sapien
caaccaaggcaccagacgcataatt

SEQ ID NO: 4011713 - DNA, 25 bp, Homo sapien
caaggcaccagacgcataatttgga

SEQ ID NO: 4011714 - DNA, 25 bp, Homo sapien
tgtagcgtgttatgaccgcacctgt

SEQ ID NO: 4011715 - DNA, 25 bp, Homo sapien
tctgggatcacagggaactatctgc

SEQ ID NO: 4011716 - DNA, 25 bp, Homo sapien
gaactattaccacttttacggatga

SEQ ID NO: 4011717 - DNA, 25 bp, Homo sapien
tgctcgaggccaagaagccaaggct

SEQ ID NO: 4011718 - DNA, 25 bp, Homo sapien
tttccaggtctttgagttgcacgtc

SEQ ID NO: 4011719 - DNA, 25 bp, Homo sapien
tccaggtctttgagttgcacgtcaa

SEQ ID NO: 4011720 - DNA, 25 bp, Homo sapien
tttttccaggtctttgagttgcacg

SEQ ID NO: 4011721 - DNA, 25 bp, Homo sapien
caggtctttgagttgcacgtcaaat

SEQ ID NO: 4011722 - DNA, 25 bp, Homo sapien
caaaaacattcttcactttaccaat

SEQ ID NO: 4011723 - DNA, 25 bp, Homo sapien
gatgacattcataaataaacagtcc

SEQ ID NO: 4011724 - DNA, 25 bp, Homo sapien
tcttcactttaccaataacagaaaa

SEQ ID NO: 4011725 - DNA, 25 bp, Homo sapien
actgagtaacacaagatgacattca

SEQ ID NO: 4011726 - DNA, 25 bp, Homo sapien
tcttcaaatcttagggagtcttgcc

SEQ ID NO: 4011727 - DNA, 25 bp, Homo sapien
tcagcagtcacagtggaatgcacct

SEQ ID NO: 4011728 - DNA, 25 bp, Homo sapien
tagcataccacagaacaagggtgcc

SEQ ID NO: 4011729 - DNA, 25 bp, Homo sapien
tcaaatttatttctcggctgggccc

SEQ ID NO: 4011730 - DNA, 25 bp, Homo sapien
tcccagctctgtggtcatcaatgat

SEQ ID NO: 4011731 - DNA, 25 bp, Homo sapien
gtcatcaatgatttcaaattcgcca

SEQ ID NO: 4011732 - DNA, 25 bp, Homo sapien
tttcccagctctgtggtcatcaatg

SEQ ID NO: 4011733 - DNA, 25 bp, Homo sapien
tggtcatcaatgatttcaaattcgc

SEQ ID NO: 4011734 - DNA, 25 bp, Homo sapien
atctgccaggacattcatgcgcacc

SEQ ID NO: 4011735 - DNA, 25 bp, Homo sapien
agcacggcctaataagcacctggcg

SEQ ID NO: 4011736 - DNA, 25 bp, Homo sapien
tcacagtgagaaaccggacgatgac

SEQ ID NO: 4011737 - DNA, 25 bp, Homo sapien
cacggcctaataagcacctggcgtt

SEQ ID NO: 4011738 - DNA, 25 bp, Homo sapien
caggaggttttactggcattgccaa

SEQ ID NO: 4011739 - DNA, 25 bp, Homo sapien
gacaccaaccattacactgcggaag

SEQ ID NO: 4011740 - DNA, 25 bp, Homo sapien
gaagttttctcaagtctaagcaggc

SEQ ID NO: 4011741 - DNA, 25 bp, Homo sapien
aggttatcgggacgtcagcctgcac

SEQ ID NO: 4011742 - DNA, 25 bp, Homo sapien
aaggcgctgcctcagcactaaaggg

SEQ ID NO: 4011743 - DNA, 25 bp, Homo sapien
ctaaagggagatccagacgctgcgg

SEQ ID NO: 4011744 - DNA, 25 bp, Homo sapien
tatgcctgtccaggaaccggcaagg

SEQ ID NO: 4011745 - DNA, 25 bp, Homo sapien
gagctaccgcctagctgggcagtcg

SEQ ID NO: 4011746 - DNA, 25 bp, Homo sapien
gcgccgatggcagacggatgaaatt

SEQ ID NO: 4011747 - DNA, 25 bp, Homo sapien
atggcagacggatgaaattggagct

SEQ ID NO: 4011748 - DNA, 25 bp, Homo sapien
cttagattgcaggatggcgccgatg

SEQ ID NO: 4011749 - DNA, 25 bp, Homo sapien
cagacggatgaaattggagctctca

SEQ ID NO: 4011750 - DNA, 25 bp, Homo sapien
aaagatggcggaaagaggacgggag

SEQ ID NO: 4011751 - DNA, 25 bp, Homo sapien
gaaagatggcggaaagaggacggga

SEQ ID NO: 4011752 - DNA, 25 bp, Homo sapien
tgaagccaactgctaagaacgcgct

SEQ ID NO: 4011753 - DNA, 25 bp, Homo sapien
tatgcacgaagccttacttggcgag

SEQ ID NO: 4011754 - DNA, 25 bp, Homo sapien
caactatacgcgacatgaagacact

SEQ ID NO: 4011755 - DNA, 25 bp, Homo sapien
ggagaagcctacatgtactagtgca

SEQ ID NO: 4011756 - DNA, 25 bp, Homo sapien
ttagtccaggaagcaatagtaagga

SEQ ID NO: 4011757 - DNA, 25 bp, Homo sapien
tagtccaggaagcaatagtaaggaa

SEQ ID NO: 4011758 - DNA, 25 bp, Homo sapien
gtccaggaagcaatagtaaggaagt

SEQ ID NO: 4011759 - DNA, 25 bp, Homo sapien
ccaggaagcaatagtaaggaagtca

SEQ ID NO: 4011760 - DNA, 25 bp, Homo sapien
aatgggaggaagcaacatgaaatca

SEQ ID NO: 4011761 - DNA, 25 bp, Homo sapien
catgaaatcaattacttccactggg

SEQ ID NO: 4011762 - DNA, 25 bp, Homo sapien
ttccactgggatgtatccccagaaa

SEQ ID NO: 4011763 - DNA, 25 bp, Homo sapien
ccgtgaccagccagttattacattt

SEQ ID NO: 4011764 - DNA, 25 bp, Homo sapien
cttgttgtcccacccaagcaaccgc

SEQ ID NO: 4011765 - DNA, 25 bp, Homo sapien
gacttgttgtcccacccaagcaacc

SEQ ID NO: 4011766 - DNA, 25 bp, Homo sapien
tgttgtcccacccaagcaaccgcag

SEQ ID NO: 4011767 - DNA, 25 bp, Homo sapien
gtggacttgttgtcccacccaagca

SEQ ID NO: 4011768 - DNA, 25 bp, Homo sapien
tctactttatagaatttggatacat

SEQ ID NO: 4011769 - DNA, 25 bp, Homo sapien
tcttcctagaattactgcaattctg

SEQ ID NO: 4011770 - DNA, 25 bp, Homo sapien
aaaaacctattccattggatctact

SEQ ID NO: 4011771 - DNA, 25 bp, Homo sapien
taaattatacgatcttttcagttaa

SEQ ID NO: 4011772 - DNA, 25 bp, Homo sapien
gattcagtctaattaatacaggtaa

SEQ ID NO: 4011773 - DNA, 25 bp, Homo sapien
caaaaaggcgaattgactcaaatct

SEQ ID NO: 4011774 - DNA, 25 bp, Homo sapien
ttactgtacttaagtcaaagcaaaa

SEQ ID NO: 4011775 - DNA, 25 bp, Homo sapien
tgtgcccggcctaaacagatgcttt

SEQ ID NO: 4011776 - DNA, 25 bp, Homo sapien
catggaatctttgctgttgttcagt

SEQ ID NO: 4011777 - DNA, 25 bp, Homo sapien
gaatctttgctgttgttcagtggtc

SEQ ID NO: 4011778 - DNA, 25 bp, Homo sapien
ctgcgtcgagtttttactagattgc

SEQ ID NO: 4011779 - DNA, 25 bp, Homo sapien
cgtcgagtttttactagattgctgc

SEQ ID NO: 4011780 - DNA, 25 bp, Homo sapien
acaggaaacgccggacagaacagat

SEQ ID NO: 4011781 - DNA, 25 bp, Homo sapien
ggaaacgccggacagaacagatgga

SEQ ID NO: 4011782 - DNA, 25 bp, Homo sapien
aggaaacgccggacagaacagatgg

SEQ ID NO: 4011783 - DNA, 25 bp, Homo sapien
aaacaggaaacgccggacagaacag

SEQ ID NO: 4011784 - DNA, 25 bp, Homo sapien
taagaagcacaacccatagtaatct

SEQ ID NO: 4011785 - DNA, 25 bp, Homo sapien
tattacagaagacttaaggcactcc

SEQ ID NO: 4011786 - DNA, 25 bp, Homo sapien
gcgagtcactgatttactcaagtgc

SEQ ID NO: 4011787 - DNA, 25 bp, Homo sapien
gaggacaaaaagtttgcgagtcact

SEQ ID NO: 4011788 - DNA, 25 bp, Homo sapien
aggctctttcccatcggaggacttt

SEQ ID NO: 4011789 - DNA, 25 bp, Homo sapien
ccatcggaggactttatcagccatc

SEQ ID NO: 4011790 - DNA, 25 bp, Homo sapien
ttcccatcggaggactttatcagcc

SEQ ID NO: 4011791 - DNA, 25 bp, Homo sapien
ggaggactttatcagccatcagcat

SEQ ID NO: 4011792 - DNA, 25 bp, Homo sapien
ggttccgtttttcattgctggtatg

SEQ ID NO: 4011793 - DNA, 25 bp, Homo sapien
ctgaagtcacgtcattggccagcgt

SEQ ID NO: 4011794 - DNA, 25 bp, Homo sapien
aaactgccctgaagtcacgtcattg

SEQ ID NO: 4011795 - DNA, 25 bp, Homo sapien
tccgtttttcattgctggtatgtga

SEQ ID NO: 4011796 - DNA, 25 bp, Homo sapien
caggttggtgctgcgattatctccc

SEQ ID NO: 4011797 - DNA, 25 bp, Homo sapien
cagcaggttggtgctgcgattatct

SEQ ID NO: 4011798 - DNA, 25 bp, Homo sapien
gttggtgctgcgattatctccctcc

SEQ ID NO: 4011799 - DNA, 25 bp, Homo sapien
ttggtgctgcgattatctccctccg

SEQ ID NO: 4011800 - DNA, 25 bp, Homo sapien
gagtcctccaaccgaaacccgcaca

SEQ ID NO: 4011801 - DNA, 25 bp, Homo sapien
cacaacccgagggaacgccccgcag

SEQ ID NO: 4011802 - DNA, 25 bp, Homo sapien
tcctccaaccgaaacccgcacacca

SEQ ID NO: 4011803 - DNA, 25 bp, Homo sapien
cgtttgatacaaacagaatcatgcc

SEQ ID NO: 4011804 - DNA, 25 bp, Homo sapien
aaacagaatcatgccaaatgtccgg

SEQ ID NO: 4011805 - DNA, 25 bp, Homo sapien
ccggccgatttttcatcgtttgata

SEQ ID NO: 4011806 - DNA, 25 bp, Homo sapien
aatgtccggatcagatgtttgtttc

SEQ ID NO: 4011807 - DNA, 25 bp, Homo sapien
tataaattgggccttaacacaaaga

SEQ ID NO: 4011808 - DNA, 25 bp, Homo sapien
tggctcggcttagtggctcaggctt

SEQ ID NO: 4011809 - DNA, 25 bp, Homo sapien
cacaaagaattttatcgttgaagta

SEQ ID NO: 4011810 - DNA, 25 bp, Homo sapien
tatctgtcaataatgatctacggga

SEQ ID NO: 4011811 - DNA, 25 bp, Homo sapien
caatctttgccatgttaatgcaaat

SEQ ID NO: 4011812 - DNA, 25 bp, Homo sapien
acaatctttgccatgttaatgcaaa

SEQ ID NO: 4011813 - DNA, 25 bp, Homo sapien
atacaatctttgccatgttaatgca

SEQ ID NO: 4011814 - DNA, 25 bp, Homo sapien
tacaatctttgccatgttaatgcaa

SEQ ID NO: 4011815 - DNA, 25 bp, Homo sapien
tgaagacggcaactagaaagtgacc

SEQ ID NO: 4011816 - DNA, 25 bp, Homo sapien
taaaaaggaccgaagattgcacatc

SEQ ID NO: 4011817 - DNA, 25 bp, Homo sapien
caaactatacagaccagggccttgt

SEQ ID NO: 4011818 - DNA, 25 bp, Homo sapien
cgaaagttcaaatggcaagtcacct

SEQ ID NO: 4011819 - DNA, 25 bp, Homo sapien
caagtgttacacgagaatctgaatg

SEQ ID NO: 4011820 - DNA, 25 bp, Homo sapien
aattcatatcgcatagcctttagcc

SEQ ID NO: 4011821 - DNA, 25 bp, Homo sapien
aaaaatttcagtctacctccaccag

SEQ ID NO: 4011822 - DNA, 25 bp, Homo sapien
aagttgttaacagcatcgagacgga

SEQ ID NO: 4011823 - DNA, 25 bp, Homo sapien
ggctgtgatttcttcgcgaccccag

SEQ ID NO: 4011824 - DNA, 25 bp, Homo sapien
tggattgtacacacagggtcaggtg

SEQ ID NO: 4011825 - DNA, 25 bp, Homo sapien
catcccgatttctttccgcagctaa

SEQ ID NO: 4011826 - DNA, 25 bp, Homo sapien
caaatcactctgtgctccgcggcat

SEQ ID NO: 4011827 - DNA, 25 bp, Homo sapien
gcagaaagacaatctccgtgttcag

SEQ ID NO: 4011828 - DNA, 25 bp, Homo sapien
caatctccgtgttcaggcggtgagc

SEQ ID NO: 4011829 - DNA, 25 bp, Homo sapien
gccatggtgttgggcgtatccctga

SEQ ID NO: 4011830 - DNA, 25 bp, Homo sapien
ttgggcgtatccctgagtgcagctg

SEQ ID NO: 4011831 - DNA, 25 bp, Homo sapien
tcctaggtttcctcagagtaagccc

SEQ ID NO: 4011832 - DNA, 25 bp, Homo sapien
ccagttgcatcaccaccgactgtgg

SEQ ID NO: 4011833 - DNA, 25 bp, Homo sapien
tagtgcaccgagatttcctaggttt

SEQ ID NO: 4011834 - DNA, 25 bp, Homo sapien
ggatgtctgacctcgcttaaccaga

SEQ ID NO: 4011835 - DNA, 25 bp, Homo sapien
gagccaagttatctagattagttgc

SEQ ID NO: 4011836 - DNA, 25 bp, Homo sapien
atacagctgagccaagttatctaga

SEQ ID NO: 4011837 - DNA, 25 bp, Homo sapien
cagctgagccaagttatctagatta

SEQ ID NO: 4011838 - DNA, 25 bp, Homo sapien
gttgcttccttaatgacatagtcaa

SEQ ID NO: 4011839 - DNA, 25 bp, Homo sapien
ccatggaagaacaggatattcagtc

SEQ ID NO: 4011840 - DNA, 25 bp, Homo sapien
tgaattacggatgccaaaccatgga

SEQ ID NO: 4011841 - DNA, 25 bp, Homo sapien
gagttcaagtctaggtcctatacaa

SEQ ID NO: 4011842 - DNA, 25 bp, Homo sapien
aaatctctcatggtttttgacaaac

SEQ ID NO: 4011843 - DNA, 25 bp, Homo sapien
tccacacactcactgcataggagtt

SEQ ID NO: 4011844 - DNA, 25 bp, Homo sapien
gcataggagtttctctcttgcaccg

SEQ ID NO: 4011845 - DNA, 25 bp, Homo sapien
tgacatcctcctattcggatcaaca

SEQ ID NO: 4011846 - DNA, 25 bp, Homo sapien
ggatcaacatctcggccctctaact

SEQ ID NO: 4011847 - DNA, 25 bp, Homo sapien
gactgcctttttaggactacaagca

SEQ ID NO: 4011848 - DNA, 25 bp, Homo sapien
ttggatcagctttctagcattctgt

SEQ ID NO: 4011849 - DNA, 25 bp, Homo sapien
ccagttcctggaacggtgcttggtg

SEQ ID NO: 4011850 - DNA, 25 bp, Homo sapien
tggagtatcagctgatgtagcaaga

SEQ ID NO: 4011851 - DNA, 25 bp, Homo sapien
gagaaagagttggtggctcaattta

SEQ ID NO: 4011852 - DNA, 25 bp, Homo sapien
agaaagagttggtggctcaatttac

SEQ ID NO: 4011853 - DNA, 25 bp, Homo sapien
aaatctgttcagtttaagattatag

SEQ ID NO: 4011854 - DNA, 25 bp, Homo sapien
catcgtgcctggcttacgagtattt

SEQ ID NO: 4011855 - DNA, 25 bp, Homo sapien
tatagaatgacaggccttaagtgtt

SEQ ID NO: 4011856 - DNA, 25 bp, Homo sapien
cttagcatctatgtgtaacattaac

SEQ ID NO: 4011857 - DNA, 25 bp, Homo sapien
gactaagggtgatgcaaaactcact

SEQ ID NO: 4011858 - DNA, 25 bp, Homo sapien
cattcatttgttgcatcggtgacta

SEQ ID NO: 4011859 - DNA, 25 bp, Homo sapien
taagtagcagatgacgttggactcg

SEQ ID NO: 4011860 - DNA, 25 bp, Homo sapien
agcgaaggatggctgataagtagca

SEQ ID NO: 4011861 - DNA, 25 bp, Homo sapien
gagataaacttcttataccagtagt

SEQ ID NO: 4011862 - DNA, 25 bp, Homo sapien
aagagataaacttcttataccagta

SEQ ID NO: 4011863 - DNA, 25 bp, Homo sapien
ataaaatggcttatttacgaaatgt

SEQ ID NO: 4011864 - DNA, 25 bp, Homo sapien
ttataccagtagttttgtacttatg

SEQ ID NO: 4011865 - DNA, 25 bp, Homo sapien
taacactgttctcatagggaacatc

SEQ ID NO: 4011866 - DNA, 25 bp, Homo sapien
tcttgacttcgaacctgacccatag

SEQ ID NO: 4011867 - DNA, 25 bp, Homo sapien
cctggagcatttcaacgtgttcttg

SEQ ID NO: 4011868 - DNA, 25 bp, Homo sapien
ttctttcaaggtgggagtgatttcc

SEQ ID NO: 4011869 - DNA, 25 bp, Homo sapien
tagtatcagtaattactctcaagac

SEQ ID NO: 4011870 - DNA, 25 bp, Homo sapien
taggaactttgtttccaccatcaaa

SEQ ID NO: 4011871 - DNA, 25 bp, Homo sapien
tgtttgtaatgatgaagtaatagcc

SEQ ID NO: 4011872 - DNA, 25 bp, Homo sapien
gtcacctagtgattaagtaacaaat

SEQ ID NO: 4011873 - DNA, 25 bp, Homo sapien
tgtgtgttcatggtattagtcttac

SEQ ID NO: 4011874 - DNA, 25 bp, Homo sapien
agatgtgatgagataaattgttatt

SEQ ID NO: 4011875 - DNA, 25 bp, Homo sapien
catagctttcaagagatgtttgaca

SEQ ID NO: 4011876 - DNA, 25 bp, Homo sapien
cacagaccgtttctatctgctgctc

SEQ ID NO: 4011877 - DNA, 25 bp, Homo sapien
gagcacagtctttatattatcaacc

SEQ ID NO: 4011878 - DNA, 25 bp, Homo sapien
ctgtcggttatgaccagtgagcaca

SEQ ID NO: 4011879 - DNA, 25 bp, Homo sapien
attcagagctgccaataggatgttc

SEQ ID NO: 4011880 - DNA, 25 bp, Homo sapien
ttcagagctgccaataggatgttca

SEQ ID NO: 4011881 - DNA, 25 bp, Homo sapien
aactgtttgtgtgctgacaaaagcc

SEQ ID NO: 4011882 - DNA, 25 bp, Homo sapien
ctgagtagacatatcctgggtcaac

SEQ ID NO: 4011883 - DNA, 25 bp, Homo sapien
tcacaaagatgactggcaatccagg

SEQ ID NO: 4011884 - DNA, 25 bp, Homo sapien
gagaacctccattgctaagtcatga

SEQ ID NO: 4011885 - DNA, 25 bp, Homo sapien
tcaagctgacacaaagagaacctcc

SEQ ID NO: 4011886 - DNA, 25 bp, Homo sapien
tgtttgacttcgagtatcagctgaa

SEQ ID NO: 4011887 - DNA, 25 bp, Homo sapien
taaggcttctgcagttcttgttcgt

SEQ ID NO: 4011888 - DNA, 25 bp, Homo sapien
tagttcaaataacgccgcatccagg

SEQ ID NO: 4011889 - DNA, 25 bp, Homo sapien
cgaagctctaactcagacactgaac

SEQ ID NO: 4011890 - DNA, 25 bp, Homo sapien
tgcaaacgaacacatctgctgacat

SEQ ID NO: 4011891 - DNA, 25 bp, Homo sapien
tgcccacttgagtcgctgttcaata

SEQ ID NO: 4011892 - DNA, 25 bp, Homo sapien
acttgattcaagtgcagctagcttc

SEQ ID NO: 4011893 - DNA, 25 bp, Homo sapien
tgcttcaaaatcttgtagtacaggg

SEQ ID NO: 4011894 - DNA, 25 bp, Homo sapien
ggccaatgcagggttggcaccacct

SEQ ID NO: 4011895 - DNA, 25 bp, Homo sapien
aaatatgctacaccaaattcttttt

SEQ ID NO: 4011896 - DNA, 25 bp, Homo sapien
caaacatgtatggagagagaggcaa

SEQ ID NO: 4011897 - DNA, 25 bp, Homo sapien
cagaatcttggtgaaggtatatgac

SEQ ID NO: 4011898 - DNA, 25 bp, Homo sapien
cagggtggacacatgtaatttagaa

SEQ ID NO: 4011899 - DNA, 25 bp, Homo sapien
ctgttgcaatagaagtttcaatctg

SEQ ID NO: 4011900 - DNA, 25 bp, Homo sapien
gtgtgactgacatggcttgtggtct

SEQ ID NO: 4011901 - DNA, 25 bp, Homo sapien
catgctggttaggatagcagaccgt

SEQ ID NO: 4011902 - DNA, 25 bp, Homo sapien
gacatggcttgtggtctattgataa

SEQ ID NO: 4011903 - DNA, 25 bp, Homo sapien
gaaatactggtttctagccttcgca

SEQ ID NO: 4011904 - DNA, 25 bp, Homo sapien
catggcaatatgcagctgaacccgc

SEQ ID NO: 4011905 - DNA, 25 bp, Homo sapien
tgagcaatgatgtctacacccagag

SEQ ID NO: 4011906 - DNA, 25 bp, Homo sapien
gaacccgctgcaggcttgtcttaca

SEQ ID NO: 4011907 - DNA, 25 bp, Homo sapien
gacaatctgtacaggcccattcaca

SEQ ID NO: 4011908 - DNA, 25 bp, Homo sapien
ctgtacaggcccattcacagtattc

SEQ ID NO: 4011909 - DNA, 25 bp, Homo sapien
tctaaaaagggttttcacattgaca

SEQ ID NO: 4011910 - DNA, 25 bp, Homo sapien
cattgacaatctgtacaggcccatt

SEQ ID NO: 4011911 - DNA, 25 bp, Homo sapien
gaactccttaatagtctgtagtctt

SEQ ID NO: 4011912 - DNA, 25 bp, Homo sapien
ctgaagaactccttaatagtctgta

SEQ ID NO: 4011913 - DNA, 25 bp, Homo sapien
aatagtctgtagtctttttagaaag

SEQ ID NO: 4011914 - DNA, 25 bp, Homo sapien
gaagaactccttaatagtctgtagt

SEQ ID NO: 4011915 - DNA, 25 bp, Homo sapien
tgccggtgattatcatcatcaaaaa

SEQ ID NO: 4011916 - DNA, 25 bp, Homo sapien
aattaacttgagtactcctggcttc

SEQ ID NO: 4011917 - DNA, 25 bp, Homo sapien
gatgtcaatctttcgccaagctatg

SEQ ID NO: 4011918 - DNA, 25 bp, Homo sapien
cctggcttcccttatgatgtcaatc

SEQ ID NO: 4011919 - DNA, 25 bp, Homo sapien
caactaataagctgaaagcagtttc

SEQ ID NO: 4011920 - DNA, 25 bp, Homo sapien
ttcaacttgagcaaacatgccatcg

SEQ ID NO: 4011921 - DNA, 25 bp, Homo sapien
catgccatcgaatgctaccaaaagc

SEQ ID NO: 4011922 - DNA, 25 bp, Homo sapien
aatgctaccaaaagcatctggccag

SEQ ID NO: 4011923 - DNA, 25 bp, Homo sapien
caactgaaccatttctcggttggat

SEQ ID NO: 4011924 - DNA, 25 bp, Homo sapien
ttcaccgtactgagcatgtagtagt

SEQ ID NO: 4011925 - DNA, 25 bp, Homo sapien
tttgggtgtttcatcaactgaacca

SEQ ID NO: 4011926 - DNA, 25 bp, Homo sapien
ggttggattaattcaccgtactgag

SEQ ID NO: 4011927 - DNA, 25 bp, Homo sapien
tgagtcactaggcacaaagaagctt

SEQ ID NO: 4011928 - DNA, 25 bp, Homo sapien
tttaaaccagactagcccagtgcag

SEQ ID NO: 4011929 - DNA, 25 bp, Homo sapien
ccagtgcagataattaccaaaggtg

SEQ ID NO: 4011930 - DNA, 25 bp, Homo sapien
catgggaggaaacggtgctacaatt

SEQ ID NO: 4011931 - DNA, 25 bp, Homo sapien
aaggaaacggcacagccagcattca

SEQ ID NO: 4011932 - DNA, 25 bp, Homo sapien
taagaccgtccagttcatgcagcat

SEQ ID NO: 4011933 - DNA, 25 bp, Homo sapien
ggaacgccatcggtggtctgctcaa

SEQ ID NO: 4011934 - DNA, 25 bp, Homo sapien
catagctgcgtttcttaagtaggcc

SEQ ID NO: 4011935 - DNA, 25 bp, Homo sapien
atcgatgtaatgagcatgtgtttct

SEQ ID NO: 4011936 - DNA, 25 bp, Homo sapien
tcattaaacatcgaagtgcttctgg

SEQ ID NO: 4011937 - DNA, 25 bp, Homo sapien
ttctggaaatatgatttgccggaaa

SEQ ID NO: 4011938 - DNA, 25 bp, Homo sapien
tttgccggaaattcgaattcaattc

SEQ ID NO: 4011939 - DNA, 25 bp, Homo sapien
tctaacgtgtattcccctttcatta

SEQ ID NO: 4011940 - DNA, 25 bp, Homo sapien
tgaaccaagcaggtgacgtttccgc

SEQ ID NO: 4011941 - DNA, 25 bp, Homo sapien
ggctccatcccgagaagtcagatca

SEQ ID NO: 4011942 - DNA, 25 bp, Homo sapien
gggatatctaagtcctgtggcacca

SEQ ID NO: 4011943 - DNA, 25 bp, Homo sapien
ggctaagtgaactgtctcagacgct

SEQ ID NO: 4011944 - DNA, 25 bp, Homo sapien
cacttgctagactcaaagatccttc

SEQ ID NO: 4011945 - DNA, 25 bp, Homo sapien
gctgcgtatcgctgcagggtcattt

SEQ ID NO: 4011946 - DNA, 25 bp, Homo sapien
tgtttcaagcgttccacttgtctaa

SEQ ID NO: 4011947 - DNA, 25 bp, Homo sapien
cagtggcagtgatgaactgacacac

SEQ ID NO: 4011948 - DNA, 25 bp, Homo sapien
gacaacgctctactgtggtgttaca

SEQ ID NO: 4011949 - DNA, 25 bp, Homo sapien
cagggccacggttgcatagtgatgc

SEQ ID NO: 4011950 - DNA, 25 bp, Homo sapien
gaaatatggccttcggatactgcag

SEQ ID NO: 4011951 - DNA, 25 bp, Homo sapien
tcgcactggctaatcaagtgggcct

SEQ ID NO: 4011952 - DNA, 25 bp, Homo sapien
gcttatctcttgaagcaagcttgca

SEQ ID NO: 4011953 - DNA, 25 bp, Homo sapien
caaggtccatttgtgtgcttatctc

SEQ ID NO: 4011954 - DNA, 25 bp, Homo sapien
gaagcaagcttgcaagctgtgttgc

SEQ ID NO: 4011955 - DNA, 25 bp, Homo sapien
gcctgataatgtgttatccattgtt

SEQ ID NO: 4011956 - DNA, 25 bp, Homo sapien
ctgtagttgggtgtgctcagaatac

SEQ ID NO: 4011957 - DNA, 25 bp, Homo sapien
ctaattaatggcacatatttagaag

SEQ ID NO: 4011958 - DNA, 25 bp, Homo sapien
aattaatggcacatatttagaagaa

SEQ ID NO: 4011959 - DNA, 25 bp, Homo sapien
atgaaaattctaattaatggcacat

SEQ ID NO: 4011960 - DNA, 25 bp, Homo sapien
gaaaattctaattaatggcacatat

SEQ ID NO: 4011961 - DNA, 25 bp, Homo sapien
gctcttgcaagcttaggtattcatc

SEQ ID NO: 4011962 - DNA, 25 bp, Homo sapien
taagctaccgtccaacttgggaagc

SEQ ID NO: 4011963 - DNA, 25 bp, Homo sapien
cagagtatgagaaggatgatccacc

SEQ ID NO: 4011964 - DNA, 25 bp, Homo sapien
tatttcctccagtagtttgccctgc

SEQ ID NO: 4011965 - DNA, 25 bp, Homo sapien
gatgagcatgtttactctattaata

SEQ ID NO: 4011966 - DNA, 25 bp, Homo sapien
gacttattccgtcactgggcttcac

SEQ ID NO: 4011967 - DNA, 25 bp, Homo sapien
caatgacttattccgtcactgggct

SEQ ID NO: 4011968 - DNA, 25 bp, Homo sapien
gaagacaatgacttattccgtcact

SEQ ID NO: 4011969 - DNA, 25 bp, Homo sapien
cagtccaccagagggtcgtacacaa

SEQ ID NO: 4011970 - DNA, 25 bp, Homo sapien
gagggtcgtacacaaaggcctccag

SEQ ID NO: 4011971 - DNA, 25 bp, Homo sapien
tgccacgccgcataatgtgtaaaac

SEQ ID NO: 4011972 - DNA, 25 bp, Homo sapien
aacaggctgcgggtgatctctcgct

SEQ ID NO: 4011973 - DNA, 25 bp, Homo sapien
aatacaccttctactccagttacac

SEQ ID NO: 4011974 - DNA, 25 bp, Homo sapien
gctcacatgaaagcctaaatacacc

SEQ ID NO: 4011975 - DNA, 25 bp, Homo sapien
aaggtactttctcaggaactctaag

SEQ ID NO: 4011976 - DNA, 25 bp, Homo sapien
tgttttgtgtcattcgaaaaggtac

SEQ ID NO: 4011977 - DNA, 25 bp, Homo sapien
cttgaaaagacaaatcattatattt

SEQ ID NO: 4011978 - DNA, 25 bp, Homo sapien
ttgaaaagacaaatcattatatttt

SEQ ID NO: 4011979 - DNA, 25 bp, Homo sapien
gaaaagacaaatcattatatttttg

SEQ ID NO: 4011980 - DNA, 25 bp, Homo sapien
aaagacaaatcattatatttttgcc

SEQ ID NO: 4011981 - DNA, 25 bp, Homo sapien
tggccctcataaatgtaaagtctac

SEQ ID NO: 4011982 - DNA, 25 bp, Homo sapien
ggccctcataaatgtaaagtctact

SEQ ID NO: 4011983 - DNA, 25 bp, Homo sapien
tatccaaccatagacatgactgcag

SEQ ID NO: 4011984 - DNA, 25 bp, Homo sapien
taatctatgtgaacaacttctccag

SEQ ID NO: 4011985 - DNA, 25 bp, Homo sapien
gatgtctgtctccaaggccaattat

SEQ ID NO: 4011986 - DNA, 25 bp, Homo sapien
tgactgcagtagatcttgcataaga

SEQ ID NO: 4011987 - DNA, 25 bp, Homo sapien
taactctccaccattcatcaggtgt

SEQ ID NO: 4011988 - DNA, 25 bp, Homo sapien
gagctctttggcaaggagattcggg

SEQ ID NO: 4011989 - DNA, 25 bp, Homo sapien
gattcgggggtgtggcctccattaa

SEQ ID NO: 4011990 - DNA, 25 bp, Homo sapien
catcaggtgttgtgcaagatgacca

SEQ ID NO: 4011991 - DNA, 25 bp, Homo sapien
gaggccaatcccgacgggacacatc

SEQ ID NO: 4011992 - DNA, 25 bp, Homo sapien
caaagcagggccaattttactgtaa

SEQ ID NO: 4011993 - DNA, 25 bp, Homo sapien
tttcaaagcagggccaattttactg

SEQ ID NO: 4011994 - DNA, 25 bp, Homo sapien
catgaagaggccaatcccgacggga

SEQ ID NO: 4011995 - DNA, 25 bp, Homo sapien
tctgaggagtttggtaggaatcttg

SEQ ID NO: 4011996 - DNA, 25 bp, Homo sapien
gggtacaattccaggattctgagga

SEQ ID NO: 4011997 - DNA, 25 bp, Homo sapien
gattctgaggagtttggtaggaatc

SEQ ID NO: 4011998 - DNA, 25 bp, Homo sapien
gacggggtacaattccaggattctg

SEQ ID NO: 4011999 - DNA, 25 bp, Homo sapien
tgcttgtaaggcagcttcccgttgt

SEQ ID NO: 4012000 - DNA, 25 bp, Homo sapien
caaataagggtgtggctccatctac

SEQ ID NO: 4012001 - DNA, 25 bp, Homo sapien
taaagaccaaataagggtgtggctc

SEQ ID NO: 4012002 - DNA, 25 bp, Homo sapien
tgttgccatcgtttgtaaagaccaa

SEQ ID NO: 4012003 - DNA, 25 bp, Homo sapien
cagaatagtgtcgagcatggaaccg

SEQ ID NO: 4012004 - DNA, 25 bp, Homo sapien
tggcgattaattgtagcaaacatgg

SEQ ID NO: 4012005 - DNA, 25 bp, Homo sapien
tctcatccagatgtaaatcctccag

SEQ ID NO: 4012006 - DNA, 25 bp, Homo sapien
ggtattcacaatagataggaactgc

SEQ ID NO: 4012007 - DNA, 25 bp, Homo sapien
ggtaagattgtgatggttccgccca

SEQ ID NO: 4012008 - DNA, 25 bp, Homo sapien
aatttcagtgttagtcatggcagcc

SEQ ID NO: 4012009 - DNA, 25 bp, Homo sapien
gccaaccatggactgatttcttcaa

SEQ ID NO: 4012010 - DNA, 25 bp, Homo sapien
gataaggatagctcttcccatctga

SEQ ID NO: 4012011 - DNA, 25 bp, Homo sapien
gggtttcctcctatatcctcttctg

SEQ ID NO: 4012012 - DNA, 25 bp, Homo sapien
agggtttcctcctatatcctcttct

SEQ ID NO: 4012013 - DNA, 25 bp, Homo sapien
tccttataagcaactggccacaggc

SEQ ID NO: 4012014 - DNA, 25 bp, Homo sapien
cacaggctgcctcctataggcttat

SEQ ID NO: 4012015 - DNA, 25 bp, Homo sapien
aatatttagctcagggtcacagccc

SEQ ID NO: 4012016 - DNA, 25 bp, Homo sapien
aaagattgggcacctttgccgtcca

SEQ ID NO: 4012017 - DNA, 25 bp, Homo sapien
aagaagtccacttattgaaatttcg

SEQ ID NO: 4012018 - DNA, 25 bp, Homo sapien
tagcatgcttgggattattctgtac

SEQ ID NO: 4012019 - DNA, 25 bp, Homo sapien
tgggaactgtgatgtgccatttcag

SEQ ID NO: 4012020 - DNA, 25 bp, Homo sapien
gaaatttcgtatctcatgggaactg

SEQ ID NO: 4012021 - DNA, 25 bp, Homo sapien
tgcagggttcaatggagtcttcagt

SEQ ID NO: 4012022 - DNA, 25 bp, Homo sapien
atgaggtgtttctgcaggagccgct

SEQ ID NO: 4012023 - DNA, 25 bp, Homo sapien
gagccgctgtgatactcctcacatg

SEQ ID NO: 4012024 - DNA, 25 bp, Homo sapien
ggcattttcaatggcatcaccatag

SEQ ID NO: 4012025 - DNA, 25 bp, Homo sapien
tcaggacaagtgtatggaaacatac

SEQ ID NO: 4012026 - DNA, 25 bp, Homo sapien
catgtgttgttgcagcaaaactccc

SEQ ID NO: 4012027 - DNA, 25 bp, Homo sapien
ttcaagctgctgaattcgtctcagg

SEQ ID NO: 4012028 - DNA, 25 bp, Homo sapien
taaggtgttgttgttctggactctc

SEQ ID NO: 4012029 - DNA, 25 bp, Homo sapien
agagcacagtgaccctgcgcagttc

SEQ ID NO: 4012030 - DNA, 25 bp, Homo sapien
aaaaattcttctacaacatgtgagt

SEQ ID NO: 4012031 - DNA, 25 bp, Homo sapien
aaaattcttctacaacatgtgagtt

SEQ ID NO: 4012032 - DNA, 25 bp, Homo sapien
tgctgtaacaatcctgcatcatggc

SEQ ID NO: 4012033 - DNA, 25 bp, Homo sapien
ggttcatccttattgctatcctgag

SEQ ID NO: 4012034 - DNA, 25 bp, Homo sapien
ggtttgcagaggacagcttatctac

SEQ ID NO: 4012035 - DNA, 25 bp, Homo sapien
tctccttgaatattgccaagtaaag

SEQ ID NO: 4012036 - DNA, 25 bp, Homo sapien
cacttcagggtggtttaagcgtgag

SEQ ID NO: 4012037 - DNA, 25 bp, Homo sapien
actttggcgcacatacacttcaggg

SEQ ID NO: 4012038 - DNA, 25 bp, Homo sapien
tcactactaagcgatatggtaccca

SEQ ID NO: 4012039 - DNA, 25 bp, Homo sapien
tatggtacccactattgcaggatac

SEQ ID NO: 4012040 - DNA, 25 bp, Homo sapien
tccatggtgcagtgggtgttgtctc

SEQ ID NO: 4012041 - DNA, 25 bp, Homo sapien
aagccgtgctccagatactgccgaa

SEQ ID NO: 4012042 - DNA, 25 bp, Homo sapien
atgcttcacgagcaaccgcagcagg

SEQ ID NO: 4012043 - DNA, 25 bp, Homo sapien
taaatgcagcctagggtcatcctca

SEQ ID NO: 4012044 - DNA, 25 bp, Homo sapien
ttaaggaaagtaaagtatgcactgc

SEQ ID NO: 4012045 - DNA, 25 bp, Homo sapien
tgaccagcgttgagtttaaggaaag

SEQ ID NO: 4012046 - DNA, 25 bp, Homo sapien
tattctatctacaactttcctccac

SEQ ID NO: 4012047 - DNA, 25 bp, Homo sapien
caagagagtttgtacaggctgaata

SEQ ID NO: 4012048 - DNA, 25 bp, Homo sapien
ttatctgaagtgttatatcttcatc

SEQ ID NO: 4012049 - DNA, 25 bp, Homo sapien
gcttgatatcaactgacgccagata

SEQ ID NO: 4012050 - DNA, 25 bp, Homo sapien
tgtcttcactctcagttatctgaag

SEQ ID NO: 4012051 - DNA, 25 bp, Homo sapien
tcagttgcactttcatcaagttctg

SEQ ID NO: 4012052 - DNA, 25 bp, Homo sapien
ctgaagaaaaattgtgcacaaaatg

SEQ ID NO: 4012053 - DNA, 25 bp, Homo sapien
agcctgtccaagaataccatatatt

SEQ ID NO: 4012054 - DNA, 25 bp, Homo sapien
tagtgtctggaagtagattctgaac

SEQ ID NO: 4012055 - DNA, 25 bp, Homo sapien
ttctcttcctcagttatagtgtctg

SEQ ID NO: 4012056 - DNA, 25 bp, Homo sapien
ctcagttatagtgtctggaagtaga

SEQ ID NO: 4012057 - DNA, 25 bp, Homo sapien
caacgctgcccaagatttggctact

SEQ ID NO: 4012058 - DNA, 25 bp, Homo sapien
ctggcattgtcaaccacctttctgc

SEQ ID NO: 4012059 - DNA, 25 bp, Homo sapien
tggccaacgctgcccaagatttggc

SEQ ID NO: 4012060 - DNA, 25 bp, Homo sapien
tggcattgtcaaccacctttctgcc

SEQ ID NO: 4012061 - DNA, 25 bp, Homo sapien
ggtgatacaactgtcccaaaatgaa

SEQ ID NO: 4012062 - DNA, 25 bp, Homo sapien
ctgaagacaggtgatacaactgtcc

SEQ ID NO: 4012063 - DNA, 25 bp, Homo sapien
tcaggttctccaactccaatatgca

SEQ ID NO: 4012064 - DNA, 25 bp, Homo sapien
aatgaagtcaggttctccaactcca

SEQ ID NO: 4012065 - DNA, 25 bp, Homo sapien
gacttgcagaaagatatggcacaag

SEQ ID NO: 4012066 - DNA, 25 bp, Homo sapien
tgtagattcactctcgatccgagga

SEQ ID NO: 4012067 - DNA, 25 bp, Homo sapien
tgcatattcagctttcacagacttg

SEQ ID NO: 4012068 - DNA, 25 bp, Homo sapien
gccagtgtcagaattgatttagcaa

SEQ ID NO: 4012069 - DNA, 25 bp, Homo sapien
ctgcaacagctggaaatgatcaact

SEQ ID NO: 4012070 - DNA, 25 bp, Homo sapien
aaattcagtgaccaatgatctccgg

SEQ ID NO: 4012071 - DNA, 25 bp, Homo sapien
taaaggtaagtcagtaataagcaac

SEQ ID NO: 4012072 - DNA, 25 bp, Homo sapien
tgatctccggaaatacttcttactg

SEQ ID NO: 4012073 - DNA, 25 bp, Homo sapien
gacacattccctcgttttctagcaa

SEQ ID NO: 4012074 - DNA, 25 bp, Homo sapien
cagctgaacttcactgcactgtgcc

SEQ ID NO: 4012075 - DNA, 25 bp, Homo sapien
tgttggactaaatcctgtgcagtgg

SEQ ID NO: 4012076 - DNA, 25 bp, Homo sapien
tgcagtggtggtctttcccagctga

SEQ ID NO: 4012077 - DNA, 25 bp, Homo sapien
tcatcctcaaatccctagcagctag

SEQ ID NO: 4012078 - DNA, 25 bp, Homo sapien
tattccccaactatccctcttctgc

SEQ ID NO: 4012079 - DNA, 25 bp, Homo sapien
tagcacagtgcttgagatacaatga

SEQ ID NO: 4012080 - DNA, 25 bp, Homo sapien
caatgaacaggttttgctaaattaa

SEQ ID NO: 4012081 - DNA, 25 bp, Homo sapien
ggtacttgtgaagccatattatatg

SEQ ID NO: 4012082 - DNA, 25 bp, Homo sapien
cgctctgtgctaggacttttatata

SEQ ID NO: 4012083 - DNA, 25 bp, Homo sapien
tgccctaaggttcctcaatttgcaa

SEQ ID NO: 4012084 - DNA, 25 bp, Homo sapien
cagttcagaagttcactgatttgcc

SEQ ID NO: 4012085 - DNA, 25 bp, Homo sapien
catgctgtttacatgaacgtaaagc

SEQ ID NO: 4012086 - DNA, 25 bp, Homo sapien
gctgtttacatgaacgtaaagcttc

SEQ ID NO: 4012087 - DNA, 25 bp, Homo sapien
tcatgctgtttacatgaacgtaaag

SEQ ID NO: 4012088 - DNA, 25 bp, Homo sapien
tgctgtttacatgaacgtaaagctt

SEQ ID NO: 4012089 - DNA, 25 bp, Homo sapien
gatgcgggatgtttgcttcaagtac

SEQ ID NO: 4012090 - DNA, 25 bp, Homo sapien
cggatccggacttaacatgttagga

SEQ ID NO: 4012091 - DNA, 25 bp, Homo sapien
ttctgaagttccctcggatccggac

SEQ ID NO: 4012092 - DNA, 25 bp, Homo sapien
ctgaagttccctcggatccggactt

SEQ ID NO: 4012093 - DNA, 25 bp, Homo sapien
ctcggatccggacttaacatgttag

SEQ ID NO: 4012094 - DNA, 25 bp, Homo sapien
tcacttgaactcagagggcagaggc

SEQ ID NO: 4012095 - DNA, 25 bp, Homo sapien
ttgaactcagagggcagaggctgca

SEQ ID NO: 4012096 - DNA, 25 bp, Homo sapien
cacttgaactcagagggcagaggct

SEQ ID NO: 4012097 - DNA, 25 bp, Homo sapien
gtgagccgagattgcgccactgcac

SEQ ID NO: 4012098 - DNA, 25 bp, Homo sapien
tgatattttctcctggtaacaattc

SEQ ID NO: 4012099 - DNA, 25 bp, Homo sapien
cagcaagtagattgatattttctcc

SEQ ID NO: 4012100 - DNA, 25 bp, Homo sapien
cctccagcaagtagattgatatttt

SEQ ID NO: 4012101 - DNA, 25 bp, Homo sapien
atattttctcctggtaacaattcta

SEQ ID NO: 4012102 - DNA, 25 bp, Homo sapien
actgccaaaattctgtctatagcaa

SEQ ID NO: 4012103 - DNA, 25 bp, Homo sapien
gtctatagcaactttgactgctttc

SEQ ID NO: 4012104 - DNA, 25 bp, Homo sapien
caatccaccatacactgccaaaatt

SEQ ID NO: 4012105 - DNA, 25 bp, Homo sapien
caaaattctgtctatagcaactttg

SEQ ID NO: 4012106 - DNA, 25 bp, Homo sapien
ggaagtgctactggtactctttttc

SEQ ID NO: 4012107 - DNA, 25 bp, Homo sapien
agtgctactggtactctttttcaag

SEQ ID NO: 4012108 - DNA, 25 bp, Homo sapien
tactggtactctttttcaagtcatg

SEQ ID NO: 4012109 - DNA, 25 bp, Homo sapien
gctactggtactctttttcaagtca

SEQ ID NO: 4012110 - DNA, 25 bp, Homo sapien
ataatttataacctcaggggaagag

SEQ ID NO: 4012111 - DNA, 25 bp, Homo sapien
agagtcagtcggtttggacagcaca

SEQ ID NO: 4012112 - DNA, 25 bp, Homo sapien
ggaagagtcagtcggtttggacagc

SEQ ID NO: 4012113 - DNA, 25 bp, Homo sapien
taacctcaggggaagagtcagtcgg

SEQ ID NO: 4012114 - DNA, 25 bp, Homo sapien
gttacgcccagcattggctaaggtg

SEQ ID NO: 4012115 - DNA, 25 bp, Homo sapien
cagagaatgtttcgggctggcactg

SEQ ID NO: 4012116 - DNA, 25 bp, Homo sapien
ggctggcactgttacgcccagcatt

SEQ ID NO: 4012117 - DNA, 25 bp, Homo sapien
ctggcactgttacgcccagcattgg

SEQ ID NO: 4012118 - DNA, 25 bp, Homo sapien
tgttgagccactgagttaatccaca

SEQ ID NO: 4012119 - DNA, 25 bp, Homo sapien
ttttccaacaatagatgatgaccag

SEQ ID NO: 4012120 - DNA, 25 bp, Homo sapien
atagcttcaggacaatgaagttcac

SEQ ID NO: 4012121 - DNA, 25 bp, Homo sapien
gatgatgaccagacagcaattccct

SEQ ID NO: 4012122 - DNA, 25 bp, Homo sapien
aactctggcagttgttgcttttaca

SEQ ID NO: 4012123 - DNA, 25 bp, Homo sapien
atagattaaatcataccaaaggaat

SEQ ID NO: 4012124 - DNA, 25 bp, Homo sapien
cggcctattttaacttctaacactg

SEQ ID NO: 4012125 - DNA, 25 bp, Homo sapien
tacaggatcaaaacctttgaaaatg

SEQ ID NO: 4012126 - DNA, 25 bp, Homo sapien
caggctggcctgccaacaatcctac

SEQ ID NO: 4012127 - DNA, 25 bp, Homo sapien
tcaaagccatgtctcactgtcactg

SEQ ID NO: 4012128 - DNA, 25 bp, Homo sapien
cctcatgatggagagtcgaatccgc

SEQ ID NO: 4012129 - DNA, 25 bp, Homo sapien
ggagagtcgaatccgcgttagccag

SEQ ID NO: 4012130 - DNA, 25 bp, Homo sapien
catgatggagagtcgaatccgcgtt

SEQ ID NO: 4012131 - DNA, 25 bp, Homo sapien
gatggagagtcgaatccgcgttagc

SEQ ID NO: 4012132 - DNA, 25 bp, Homo sapien
agaagaagaacaagtctaagttggt

SEQ ID NO: 4012133 - DNA, 25 bp, Homo sapien
taacatcctgatcagggtttaatgt

SEQ ID NO: 4012134 - DNA, 25 bp, Homo sapien
tgtctgcagttgtccactgactaac

SEQ ID NO: 4012135 - DNA, 25 bp, Homo sapien
ctgactaacatcctgatcagggttt

SEQ ID NO: 4012136 - DNA, 25 bp, Homo sapien
gcatctgtcttcaggagattgcgtg

SEQ ID NO: 4012137 - DNA, 25 bp, Homo sapien
cccagtggggttctcagcttagaaa

SEQ ID NO: 4012138 - DNA, 25 bp, Homo sapien
agattgcgtggaattgttgactggt

SEQ ID NO: 4012139 - DNA, 25 bp, Homo sapien
acagtgaattgtgcagcttcccata

SEQ ID NO: 4012140 - DNA, 25 bp, Homo sapien
ctcatgtgacttcttaatgctaaag

SEQ ID NO: 4012141 - DNA, 25 bp, Homo sapien
acttggtgctttactcatgtgactt

SEQ ID NO: 4012142 - DNA, 25 bp, Homo sapien
cttggtgctttactcatgtgacttc

SEQ ID NO: 4012143 - DNA, 25 bp, Homo sapien
tgtgacttcttaatgctaaagaaat

SEQ ID NO: 4012144 - DNA, 25 bp, Homo sapien
aatcattatgcttatgtattacaaa

SEQ ID NO: 4012145 - DNA, 25 bp, Homo sapien
tgagggaggcatatcaaacatgtga

SEQ ID NO: 4012146 - DNA, 25 bp, Homo sapien
cagttttccaaatgcttgtcgaata

SEQ ID NO: 4012147 - DNA, 25 bp, Homo sapien
agttttccaaatgcttgtcgaatac

SEQ ID NO: 4012148 - DNA, 25 bp, Homo sapien
tctgtaaaagatcatctggcaagga

SEQ ID NO: 4012149 - DNA, 25 bp, Homo sapien
aagatcatctggcaaggaagaggac

SEQ ID NO: 4012150 - DNA, 25 bp, Homo sapien
aagaggacagagcatgtagactgct

SEQ ID NO: 4012151 - DNA, 25 bp, Homo sapien
acagagcatgtagactgctgcatgc

SEQ ID NO: 4012152 - DNA, 25 bp, Homo sapien
cagatattcacatcttcaacgagag

SEQ ID NO: 4012153 - DNA, 25 bp, Homo sapien
tgcagacagatattcacatcttcaa

SEQ ID NO: 4012154 - DNA, 25 bp, Homo sapien
ctgcagacagatattcacatcttca

SEQ ID NO: 4012155 - DNA, 25 bp, Homo sapien
agacagatattcacatcttcaacga

SEQ ID NO: 4012156 - DNA, 25 bp, Homo sapien
ctaaaaggcctttgcaaaatttatg

SEQ ID NO: 4012157 - DNA, 25 bp, Homo sapien
tccaaagcccaagtcattaacagtt

SEQ ID NO: 4012158 - DNA, 25 bp, Homo sapien
ctcgtgtcctggttaaggttatctt

SEQ ID NO: 4012159 - DNA, 25 bp, Homo sapien
attcttactcagaagtgcaaagaca

SEQ ID NO: 4012160 - DNA, 25 bp, Homo sapien
gtgtagagcacagcatactgaatgg

SEQ ID NO: 4012161 - DNA, 25 bp, Homo sapien
tgaacagccaggtcactgtgcacaa

SEQ ID NO: 4012162 - DNA, 25 bp, Homo sapien
aagacagttggagatagcgcccaca

SEQ ID NO: 4012163 - DNA, 25 bp, Homo sapien
gagatatgtggaggatgggacccaa

SEQ ID NO: 4012164 - DNA, 25 bp, Homo sapien
tacacacagtgattctgcagacatc

SEQ ID NO: 4012165 - DNA, 25 bp, Homo sapien
tgtaatgagaaaaggcttaactgtg

SEQ ID NO: 4012166 - DNA, 25 bp, Homo sapien
acacaaatttgagctgtaagaaaca

SEQ ID NO: 4012167 - DNA, 25 bp, Homo sapien
tataagcatgctagagcaaatagga

SEQ ID NO: 4012168 - DNA, 25 bp, Homo sapien
aatattaacttataggcagtctcca

SEQ ID NO: 4012169 - DNA, 25 bp, Homo sapien
gtttagggcacaagtcatttctccc

SEQ ID NO: 4012170 - DNA, 25 bp, Homo sapien
tgtctacattgaacacatgattctt

SEQ ID NO: 4012171 - DNA, 25 bp, Homo sapien
ttttgcattgtctacattgaacaca

SEQ ID NO: 4012172 - DNA, 25 bp, Homo sapien
gatgatggcagtttcgtatttatct

SEQ ID NO: 4012173 - DNA, 25 bp, Homo sapien
taacgcaagaatagtagtttagatg

SEQ ID NO: 4012174 - DNA, 25 bp, Homo sapien
ctctttttctttatgataacgcaag

SEQ ID NO: 4012175 - DNA, 25 bp, Homo sapien
tgatggcagtttcgtatttatctgt

SEQ ID NO: 4012176 - DNA, 25 bp, Homo sapien
aaaatgagcttctccaattacaaaa

SEQ ID NO: 4012177 - DNA, 25 bp, Homo sapien
cttctccaattacaaaaagacatgg

SEQ ID NO: 4012178 - DNA, 25 bp, Homo sapien
tgagcttctccaattacaaaaagac

SEQ ID NO: 4012179 - DNA, 25 bp, Homo sapien
taaaaaatgagcttctccaattaca

SEQ ID NO: 4012180 - DNA, 25 bp, Homo sapien
caatgtatagtcatgctaggatcca

SEQ ID NO: 4012181 - DNA, 25 bp, Homo sapien
aaaaacacctggtttgcagccgtca

SEQ ID NO: 4012182 - DNA, 25 bp, Homo sapien
ggtaccacaagtctggcaattctcc

SEQ ID NO: 4012183 - DNA, 25 bp, Homo sapien
taggatccaagctgccgagcaaaac

SEQ ID NO: 4012184 - DNA, 25 bp, Homo sapien
ctgaagcgttccccaatgctcctca

SEQ ID NO: 4012185 - DNA, 25 bp, Homo sapien
atggaggagggacatcttcatccac

SEQ ID NO: 4012186 - DNA, 25 bp, Homo sapien
atcttcatccactgattccccagag

SEQ ID NO: 4012187 - DNA, 25 bp, Homo sapien
gggacatcttcatccactgattccc

SEQ ID NO: 4012188 - DNA, 25 bp, Homo sapien
gaggagggacatcttcatccactga

SEQ ID NO: 4012189 - DNA, 25 bp, Homo sapien
aaatgcaagatcagctacccaaaat

SEQ ID NO: 4012190 - DNA, 25 bp, Homo sapien
ctgcgtgagcgaaggtttctgagta

SEQ ID NO: 4012191 - DNA, 25 bp, Homo sapien
ctgctgcgtgagcgaaggtttctga

SEQ ID NO: 4012192 - DNA, 25 bp, Homo sapien
cgtgagcgaaggtttctgagtatga

SEQ ID NO: 4012193 - DNA, 25 bp, Homo sapien
gagcgaaggtttctgagtatgatct

SEQ ID NO: 4012194 - DNA, 25 bp, Homo sapien
gagggtaacatcgagccaccaaaag

SEQ ID NO: 4012195 - DNA, 25 bp, Homo sapien
aatatgagggtaacatcgagccacc

SEQ ID NO: 4012196 - DNA, 25 bp, Homo sapien
caccaaaagaatgcacttaacacat

SEQ ID NO: 4012197 - DNA, 25 bp, Homo sapien
tcgagccaccaaaagaatgcactta

SEQ ID NO: 4012198 - DNA, 25 bp, Homo sapien
catgcaggctcaggttaccattata

SEQ ID NO: 4012199 - DNA, 25 bp, Homo sapien
aacatgcaggctcaggttaccatta

SEQ ID NO: 4012200 - DNA, 25 bp, Homo sapien
gctttacatagcaatcttataaaag

SEQ ID NO: 4012201 - DNA, 25 bp, Homo sapien
ataacatgcaggctcaggttaccat

SEQ ID NO: 4012202 - DNA, 25 bp, Homo sapien
ctgttgcccaggcaatggtgtgatc

SEQ ID NO: 4012203 - DNA, 25 bp, Homo sapien
tctgttgcccaggcaatggtgtgat

SEQ ID NO: 4012204 - DNA, 25 bp, Homo sapien
ctttgtaggtggcacataagtagag

SEQ ID NO: 4012205 - DNA, 25 bp, Homo sapien
gtgctttgtaggtggcacataagta

SEQ ID NO: 4012206 - DNA, 25 bp, Homo sapien
ttgcagatgagctaaatttgctaaa

SEQ ID NO: 4012207 - DNA, 25 bp, Homo sapien
tgctttgtaggtggcacataagtag

SEQ ID NO: 4012208 - DNA, 25 bp, Homo sapien
tgtctcaactcctgaagcaatttgc

SEQ ID NO: 4012209 - DNA, 25 bp, Homo sapien
cattaagcacgtcatgtacagcagc

SEQ ID NO: 4012210 - DNA, 25 bp, Homo sapien
ctttcattaagcacgtcatgtacag

SEQ ID NO: 4012211 - DNA, 25 bp, Homo sapien
gccaagatattatccaattgtttaa

SEQ ID NO: 4012212 - DNA, 25 bp, Homo sapien
gtacagcagccaagatattatccaa

SEQ ID NO: 4012213 - DNA, 25 bp, Homo sapien
tcccgggtgatcctccgaagaagat

SEQ ID NO: 4012214 - DNA, 25 bp, Homo sapien
tcagggctggtcacattgttaaccc

SEQ ID NO: 4012215 - DNA, 25 bp, Homo sapien
acattgttaaccctcagctcttgcc

SEQ ID NO: 4012216 - DNA, 25 bp, Homo sapien
tccgaccataagtattttccccaga

SEQ ID NO: 4012217 - DNA, 25 bp, Homo sapien
ctcatgtctttggtggctaaagcac

SEQ ID NO: 4012218 - DNA, 25 bp, Homo sapien
tatcatcgtgcctttgccgagacac

SEQ ID NO: 4012219 - DNA, 25 bp, Homo sapien
cattctgtatgtcagcgtggactct

SEQ ID NO: 4012220 - DNA, 25 bp, Homo sapien
cgtggactctggtatcatcgtgcct

SEQ ID NO: 4012221 - DNA, 25 bp, Homo sapien
gacaccacagctgaatttgaaggtt

SEQ ID NO: 4012222 - DNA, 25 bp, Homo sapien
ggtttattaagggattttgctctca

SEQ ID NO: 4012223 - DNA, 25 bp, Homo sapien
gtttattaagggattttgctctcat

SEQ ID NO: 4012224 - DNA, 25 bp, Homo sapien
ttcctcacataagtaggtttttctg

SEQ ID NO: 4012225 - DNA, 25 bp, Homo sapien
taagtaggtttttctgtctggcaaa

SEQ ID NO: 4012226 - DNA, 25 bp, Homo sapien
agcctaatgatttcctcacataagt

SEQ ID NO: 4012227 - DNA, 25 bp, Homo sapien
cacataagtaggtttttctgtctgg

SEQ ID NO: 4012228 - DNA, 25 bp, Homo sapien
ctttaaatatgtgcacaaggtattt

SEQ ID NO: 4012229 - DNA, 25 bp, Homo sapien
tgtagacagatacaatagacccaag

SEQ ID NO: 4012230 - DNA, 25 bp, Homo sapien
ttgcttaaataatgtagacagatac

SEQ ID NO: 4012231 - DNA, 25 bp, Homo sapien
gataagtcaatgtgtaaaaagactt

SEQ ID NO: 4012232 - DNA, 25 bp, Homo sapien
taggagagttccatgaatcaattac

SEQ ID NO: 4012233 - DNA, 25 bp, Homo sapien
caattgtgctccaaagtaggagagt

SEQ ID NO: 4012234 - DNA, 25 bp, Homo sapien
tctgtatatttaaggagttctaagc

SEQ ID NO: 4012235 - DNA, 25 bp, Homo sapien
tccaaacagactctgaatacaagca

SEQ ID NO: 4012236 - DNA, 25 bp, Homo sapien
gggttgccagtcattccagctccgc

SEQ ID NO: 4012237 - DNA, 25 bp, Homo sapien
ggttgccagtcattccagctccgcg

SEQ ID NO: 4012238 - DNA, 25 bp, Homo sapien
ctgggttgccagtcattccagctcc

SEQ ID NO: 4012239 - DNA, 25 bp, Homo sapien
tgggttgccagtcattccagctccg

SEQ ID NO: 4012240 - DNA, 25 bp, Homo sapien
cgccgctgctcagccgagaccccgg

SEQ ID NO: 4012241 - DNA, 25 bp, Homo sapien
gctgctcagccgagaccccggggct

SEQ ID NO: 4012242 - DNA, 25 bp, Homo sapien
tgctcagccgagaccccggggctct

SEQ ID NO: 4012243 - DNA, 25 bp, Homo sapien
gagaccccggggctctgcggctcat

SEQ ID NO: 4012244 - DNA, 25 bp, Homo sapien
tccccgacacgacatggccaagcgc

SEQ ID NO: 4012245 - DNA, 25 bp, Homo sapien
cccgacacgacatggccaagcgccg

SEQ ID NO: 4012246 - DNA, 25 bp, Homo sapien
ccgacacgacatggccaagcgccgc

SEQ ID NO: 4012247 - DNA, 25 bp, Homo sapien
cttccccgacacgacatggccaagc

SEQ ID NO: 4012248 - DNA, 25 bp, Homo sapien
cggccgccgccgacaccccgctccg

SEQ ID NO: 4012249 - DNA, 25 bp, Homo sapien
gccgccgccgacaccccgctccggc

SEQ ID NO: 4012250 - DNA, 25 bp, Homo sapien
ggaggaagccgagaaggaggaggag

SEQ ID NO: 4012251 - DNA, 25 bp, Homo sapien
gaagccgagaaggaggaggaggagg

SEQ ID NO: 4012252 - DNA, 25 bp, Homo sapien
aggaagccgagaaggaggaggagga

SEQ ID NO: 4012253 - DNA, 25 bp, Homo sapien
ctgaggaggaagccgagaaggagga

SEQ ID NO: 4012254 - DNA, 25 bp, Homo sapien
agcccgcagcgcaggacgaggaggc

SEQ ID NO: 4012255 - DNA, 25 bp, Homo sapien
gcagcgcaggacgaggaggcgggag

SEQ ID NO: 4012256 - DNA, 25 bp, Homo sapien
cctgagcccgcagcgcaggacgagg

SEQ ID NO: 4012257 - DNA, 25 bp, Homo sapien
cccgcagcgcaggacgaggaggcgg

SEQ ID NO: 4012258 - DNA, 25 bp, Homo sapien
acgacgaggagcaggcggtggcggc

SEQ ID NO: 4012259 - DNA, 25 bp, Homo sapien
cgacgaggagcaggcggtggcggca

SEQ ID NO: 4012260 - DNA, 25 bp, Homo sapien
cgaggacgacgaggagcaggcggtg

SEQ ID NO: 4012261 - DNA, 25 bp, Homo sapien
aggacgacgaggagcaggcggtggc

SEQ ID NO: 4012262 - DNA, 25 bp, Homo sapien
tcacacggccactgcttccccgcct

SEQ ID NO: 4012263 - DNA, 25 bp, Homo sapien
cgctcacacggccactgcttccccg

SEQ ID NO: 4012264 - DNA, 25 bp, Homo sapien
ccgcgccgccgctgtcgcacggcat

SEQ ID NO: 4012265 - DNA, 25 bp, Homo sapien
tcacgctcacacggccactgcttcc

SEQ ID NO: 4012266 - DNA, 25 bp, Homo sapien
tgggagcgaggggcggggttggcgc

SEQ ID NO: 4012267 - DNA, 25 bp, Homo sapien
gtttctttgacgtcccttgcccata

SEQ ID NO: 4012268 - DNA, 25 bp, Homo sapien
tctccagacaggtttctttgacgtc

SEQ ID NO: 4012269 - DNA, 25 bp, Homo sapien
atgaggctctaggcaccacatttgc

SEQ ID NO: 4012270 - DNA, 25 bp, Homo sapien
acatttgccctactctggcccctgc

SEQ ID NO: 4012271 - DNA, 25 bp, Homo sapien
ccttctcatcccatcgtaggaaggg

SEQ ID NO: 4012272 - DNA, 25 bp, Homo sapien
tctcatcccatcgtaggaagggtgc

SEQ ID NO: 4012273 - DNA, 25 bp, Homo sapien
tgaggaatactaatcaggtattctg

SEQ ID NO: 4012274 - DNA, 25 bp, Homo sapien
ctaatcaggtattctgtagaatgcc

SEQ ID NO: 4012275 - DNA, 25 bp, Homo sapien
taatcattatctagcggaaggttgg

SEQ ID NO: 4012276 - DNA, 25 bp, Homo sapien
taattaaatttcttgcctctggcag

SEQ ID NO: 4012277 - DNA, 25 bp, Homo sapien
cctaccaagaacaagaagccatcct

SEQ ID NO: 4012278 - DNA, 25 bp, Homo sapien
tggctgggtaggtgctcatctgaca

SEQ ID NO: 4012279 - DNA, 25 bp, Homo sapien
tacaagaatgaaagagcggagacgg

SEQ ID NO: 4012280 - DNA, 25 bp, Homo sapien
gagccacgagtttatgtgcacaagt

SEQ ID NO: 4012281 - DNA, 25 bp, Homo sapien
gacggtagtttagtatttgagccac

SEQ ID NO: 4012282 - DNA, 25 bp, Homo sapien
tgttaatcagaccagcccatgagtg

SEQ ID NO: 4012283 - DNA, 25 bp, Homo sapien
tgtaatggacttttcaagccttcct

SEQ ID NO: 4012284 - DNA, 25 bp, Homo sapien
tcaagccttccttccattgtttttc

SEQ ID NO: 4012285 - DNA, 25 bp, Homo sapien
ctgtagttttgtaatggacttttca

SEQ ID NO: 4012286 - DNA, 25 bp, Homo sapien
ctccacacgtttcctggggagtagc

SEQ ID NO: 4012287 - DNA, 25 bp, Homo sapien
ttacaactcctgattaaacggcgtc

SEQ ID NO: 4012288 - DNA, 25 bp, Homo sapien
tgtgatcgtgtatactggaattcaa

SEQ ID NO: 4012289 - DNA, 25 bp, Homo sapien
taacttttaaagtgcagctctctct

SEQ ID NO: 4012290 - DNA, 25 bp, Homo sapien
tctaacaaatgtgccttacaactcc

SEQ ID NO: 4012291 - DNA, 25 bp, Homo sapien
taataagtaattccctcatgatcct

SEQ ID NO: 4012292 - DNA, 25 bp, Homo sapien
tgttaataagtaattccctcatgat

SEQ ID NO: 4012293 - DNA, 25 bp, Homo sapien
ttaataagtaattccctcatgatcc

SEQ ID NO: 4012294 - DNA, 25 bp, Homo sapien
cttgttaataagtaattccctcatg

SEQ ID NO: 4012295 - DNA, 25 bp, Homo sapien
agttccgttcaacgaagtggttgct

SEQ ID NO: 4012296 - DNA, 25 bp, Homo sapien
gtgcgtcatcagtccgagccaaggg

SEQ ID NO: 4012297 - DNA, 25 bp, Homo sapien
gtctgctgtgcgtcatcagtccgag

SEQ ID NO: 4012298 - DNA, 25 bp, Homo sapien
gagccaagggcactattggccagtt

SEQ ID NO: 4012299 - DNA, 25 bp, Homo sapien
gctgcaagcccctgagctagattat

SEQ ID NO: 4012300 - DNA, 25 bp, Homo sapien
aatcagcacctgatgacttggcagg

SEQ ID NO: 4012301 - DNA, 25 bp, Homo sapien
tcccaggtgattccggagtgagttg

SEQ ID NO: 4012302 - DNA, 25 bp, Homo sapien
tctggctttgaagggtagtggacac

SEQ ID NO: 4012303 - DNA, 25 bp, Homo sapien
cagctgtagaacttaggtgctctta

SEQ ID NO: 4012304 - DNA, 25 bp, Homo sapien
tcttgtgattcacagacaatcgtag

SEQ ID NO: 4012305 - DNA, 25 bp, Homo sapien
catgtttaattacatgggattgcca

SEQ ID NO: 4012306 - DNA, 25 bp, Homo sapien
cagacaatcgtagtcttgttttgat

SEQ ID NO: 4012307 - DNA, 25 bp, Homo sapien
agtccttgtacagggctcctaacct

SEQ ID NO: 4012308 - DNA, 25 bp, Homo sapien
ccagtttctgatagaagggtgtgct

SEQ ID NO: 4012309 - DNA, 25 bp, Homo sapien
tcaatattctagaggaggcggaggt

SEQ ID NO: 4012310 - DNA, 25 bp, Homo sapien
cctacttattctgtgaaccaaccag

SEQ ID NO: 4012311 - DNA, 25 bp, Homo sapien
acaatgctagcaggagaccaggaag

SEQ ID NO: 4012312 - DNA, 25 bp, Homo sapien
gcctgtcccctagtaaatgttcaag

SEQ ID NO: 4012313 - DNA, 25 bp, Homo sapien
gtgcctaattagaacactgcctgtc

SEQ ID NO: 4012314 - DNA, 25 bp, Homo sapien
cataacgttgttctttgccgggagg

SEQ ID NO: 4012315 - DNA, 25 bp, Homo sapien
tgggtacccaactgtattagtcagc

SEQ ID NO: 4012316 - DNA, 25 bp, Homo sapien
caaggtctggtagcattccgcttct

SEQ ID NO: 4012317 - DNA, 25 bp, Homo sapien
tttttccagccgcagcaacatgact

SEQ ID NO: 4012318 - DNA, 25 bp, Homo sapien
gagagttatccaaaagaggtggcca

SEQ ID NO: 4012319 - DNA, 25 bp, Homo sapien
cactccctcgggcacttttgtttat

SEQ ID NO: 4012320 - DNA, 25 bp, Homo sapien
ctgaacctgcctgagctgaacctgt

SEQ ID NO: 4012321 - DNA, 25 bp, Homo sapien
aagtctcaggccaaatgtcacccct

SEQ ID NO: 4012322 - DNA, 25 bp, Homo sapien
gggtgaaccagcatgttccgatgaa

SEQ ID NO: 4012323 - DNA, 25 bp, Homo sapien
tgctgtccacgtggcaaaggctgcc

SEQ ID NO: 4012324 - DNA, 25 bp, Homo sapien
tcatatgtgctcaagacagtgctgc

SEQ ID NO: 4012325 - DNA, 25 bp, Homo sapien
tgtcctgggcaaaccatgggaagac

SEQ ID NO: 4012326 - DNA, 25 bp, Homo sapien
cattggaaaatttggtggctgccac

SEQ ID NO: 4012327 - DNA, 25 bp, Homo sapien
gagacagcccttgacggcagtctgt

SEQ ID NO: 4012328 - DNA, 25 bp, Homo sapien
gaagatcagttactccctggtcgtg

SEQ ID NO: 4012329 - DNA, 25 bp, Homo sapien
tccaggcagtcttacgtggtccaag

SEQ ID NO: 4012330 - DNA, 25 bp, Homo sapien
catgtggtttgtgctgggtctctaa

SEQ ID NO: 4012331 - DNA, 25 bp, Homo sapien
tatatttccatactcaaccacaact

SEQ ID NO: 4012332 - DNA, 25 bp, Homo sapien
gatagaaactgcacggtatttttta

SEQ ID NO: 4012333 - DNA, 25 bp, Homo sapien
caatgttgggtcataaggtactgca

SEQ ID NO: 4012334 - DNA, 25 bp, Homo sapien
caaagaagtcagtctgctaacttta

SEQ ID NO: 4012335 - DNA, 25 bp, Homo sapien
tgtccaaaacaccatgtgggccaaa

SEQ ID NO: 4012336 - DNA, 25 bp, Homo sapien
gtttgcgaccactgccttacgtagt

SEQ ID NO: 4012337 - DNA, 25 bp, Homo sapien
gggtcgcaaactcagcagcctgtag

SEQ ID NO: 4012338 - DNA, 25 bp, Homo sapien
tgaaccaagagaaatccaaagacct

SEQ ID NO: 4012339 - DNA, 25 bp, Homo sapien
tatacctacatagcacatgactggg

SEQ ID NO: 4012340 - DNA, 25 bp, Homo sapien
ccttcaagagggaaacaagttcagt

SEQ ID NO: 4012341 - DNA, 25 bp, Homo sapien
caggcatagcgtcggttttgttcca

SEQ ID NO: 4012342 - DNA, 25 bp, Homo sapien
catccctgtctacatggaggaagat

SEQ ID NO: 4012343 - DNA, 25 bp, Homo sapien
gggatcaatgccccgtttgccgtta

SEQ ID NO: 4012344 - DNA, 25 bp, Homo sapien
gatcaatgccccgtttgccgttagt

SEQ ID NO: 4012345 - DNA, 25 bp, Homo sapien
cagggatcaatgccccgtttgccgt

SEQ ID NO: 4012346 - DNA, 25 bp, Homo sapien
tcagggatcaatgccccgtttgccg

SEQ ID NO: 4012347 - DNA, 25 bp, Homo sapien
ctggacgcagcacctccgtttggga

SEQ ID NO: 4012348 - DNA, 25 bp, Homo sapien
cagggcgcaactccggcaggtttag

SEQ ID NO: 4012349 - DNA, 25 bp, Homo sapien
tagacctgttgcgtccagggcgcaa

SEQ ID NO: 4012350 - DNA, 25 bp, Homo sapien
cagacttcatggcaggctgcactgt

SEQ ID NO: 4012351 - DNA, 25 bp, Homo sapien
tagagttgagatttttggtgaaagc

SEQ ID NO: 4012352 - DNA, 25 bp, Homo sapien
taagttgtggcctgaatcctacagg

SEQ ID NO: 4012353 - DNA, 25 bp, Homo sapien
ggtgaaagcaactcattaatcaaga

SEQ ID NO: 4012354 - DNA, 25 bp, Homo sapien
cgttggtgcctagagttccagttct

SEQ ID NO: 4012355 - DNA, 25 bp, Homo sapien
gatgcagggcacatttcagagtgtc

SEQ ID NO: 4012356 - DNA, 25 bp, Homo sapien
tgtctgacccagtctgtggagtgag

SEQ ID NO: 4012357 - DNA, 25 bp, Homo sapien
ggatgcagagaggtcggccgggctc

SEQ ID NO: 4012358 - DNA, 25 bp, Homo sapien
gagctgacacgtgagctgggagctg

SEQ ID NO: 4012359 - DNA, 25 bp, Homo sapien
acttggctggatcgtacacatccat

SEQ ID NO: 4012360 - DNA, 25 bp, Homo sapien
tctgccaacatccaccaggtggtag

SEQ ID NO: 4012361 - DNA, 25 bp, Homo sapien
ctgccaacatccaccaggtggtaga

SEQ ID NO: 4012362 - DNA, 25 bp, Homo sapien
agaacttggctggatcgtacacatc

SEQ ID NO: 4012363 - DNA, 25 bp, Homo sapien
cctatggtgaggaacaaattcgttt

SEQ ID NO: 4012364 - DNA, 25 bp, Homo sapien
ctgccttggcaaactaaattagcga

SEQ ID NO: 4012365 - DNA, 25 bp, Homo sapien
tgtaaaatgagccagtgaaagcaac

SEQ ID NO: 4012366 - DNA, 25 bp, Homo sapien
gggtacttaggttttgactggagca

SEQ ID NO: 4012367 - DNA, 25 bp, Homo sapien
tgtttttctgtgaacgaatgtcacg

SEQ ID NO: 4012368 - DNA, 25 bp, Homo sapien
ttagtgtagttagaatagatctctc

SEQ ID NO: 4012369 - DNA, 25 bp, Homo sapien
taatcatactctgaggatctttctg

SEQ ID NO: 4012370 - DNA, 25 bp, Homo sapien
ctctcgtgctaaggaattagtgtag

SEQ ID NO: 4012371 - DNA, 25 bp, Homo sapien
tctccatccaaactgaacacagaat

SEQ ID NO: 4012372 - DNA, 25 bp, Homo sapien
tgttctccatccaaactgaacacag

SEQ ID NO: 4012373 - DNA, 25 bp, Homo sapien
atgtgttctccatccaaactgaaca

SEQ ID NO: 4012374 - DNA, 25 bp, Homo sapien
aatggagatgtgttctccatccaaa

SEQ ID NO: 4012375 - DNA, 25 bp, Homo sapien
tggatgctgtcaggatcagacccat

SEQ ID NO: 4012376 - DNA, 25 bp, Homo sapien
cctcagcggtggatgctgtcaggat

SEQ ID NO: 4012377 - DNA, 25 bp, Homo sapien
gcggtggatgctgtcaggatcagac

SEQ ID NO: 4012378 - DNA, 25 bp, Homo sapien
ttcctcagcggtggatgctgtcagg

SEQ ID NO: 4012379 - DNA, 25 bp, Homo sapien
ttttagaagtcagaatatcgactgg

SEQ ID NO: 4012380 - DNA, 25 bp, Homo sapien
gaattgcatagatcataatgggaca

SEQ ID NO: 4012381 - DNA, 25 bp, Homo sapien
gtatatgttttttggacctcaagca

SEQ ID NO: 4012382 - DNA, 25 bp, Homo sapien
tatcgactggtatgtagagtaccat

SEQ ID NO: 4012383 - DNA, 25 bp, Homo sapien
gcctggcccattacatgacgtttac

SEQ ID NO: 4012384 - DNA, 25 bp, Homo sapien
ctatgcctggcccattacatgacgt

SEQ ID NO: 4012385 - DNA, 25 bp, Homo sapien
gcccattacatgacgtttacctcaa

SEQ ID NO: 4012386 - DNA, 25 bp, Homo sapien
gaaagaatgcatgccgggcaggaaa

SEQ ID NO: 4012387 - DNA, 25 bp, Homo sapien
gaatgcttaatgcacccagacatgg

SEQ ID NO: 4012388 - DNA, 25 bp, Homo sapien
gagcatagcgcccacagttgaaagg

SEQ ID NO: 4012389 - DNA, 25 bp, Homo sapien
tgggtcagagactcctcaagaatgc

SEQ ID NO: 4012390 - DNA, 25 bp, Homo sapien
tgcccataagaaagatgcactggct

SEQ ID NO: 4012391 - DNA, 25 bp, Homo sapien
ttaccacatccggaatcaaaaaggc

SEQ ID NO: 4012392 - DNA, 25 bp, Homo sapien
tctgggtggcgcatctccatgttac

SEQ ID NO: 4012393 - DNA, 25 bp, Homo sapien
gcggtctggaagtgtcaaactgaac

SEQ ID NO: 4012394 - DNA, 25 bp, Homo sapien
tgagctcatggaagtggcttaacct

SEQ ID NO: 4012395 - DNA, 25 bp, Homo sapien
tacctgataaggtaggactctaatc

SEQ ID NO: 4012396 - DNA, 25 bp, Homo sapien
tttacctgataaggtaggactctaa

SEQ ID NO: 4012397 - DNA, 25 bp, Homo sapien
ttacctgataaggtaggactctaat

SEQ ID NO: 4012398 - DNA, 25 bp, Homo sapien
tttatgcacaacgacaatctcctga

SEQ ID NO: 4012399 - DNA, 25 bp, Homo sapien
tagtctttgcttacagggcctcaag

SEQ ID NO: 4012400 - DNA, 25 bp, Homo sapien
caagtggcaactggaggctgtcgtt

SEQ ID NO: 4012401 - DNA, 25 bp, Homo sapien
tgcagtctggagaaatgcggcactc

SEQ ID NO: 4012402 - DNA, 25 bp, Homo sapien
gtctcccaggagcaaagaaactatg

SEQ ID NO: 4012403 - DNA, 25 bp, Homo sapien
gcttctggatcacatactcttggga

SEQ ID NO: 4012404 - DNA, 25 bp, Homo sapien
cacgggacatggattttaggcctca

SEQ ID NO: 4012405 - DNA, 25 bp, Homo sapien
atgcaggcagttctccacgggacat

SEQ ID NO: 4012406 - DNA, 25 bp, Homo sapien
tgttggtcagctgggactctacctt

SEQ ID NO: 4012407 - DNA, 25 bp, Homo sapien
tcagctgggactctaccttatgtca

SEQ ID NO: 4012408 - DNA, 25 bp, Homo sapien
ctcatgatacatctccactgttggt

SEQ ID NO: 4012409 - DNA, 25 bp, Homo sapien
gggactctaccttatgtcatcctca

SEQ ID NO: 4012410 - DNA, 25 bp, Homo sapien
agaccagcatctggcgagagccttc

SEQ ID NO: 4012411 - DNA, 25 bp, Homo sapien
tctggcgagagccttcttgtgcacc

SEQ ID NO: 4012412 - DNA, 25 bp, Homo sapien
tcacaagaccagcatctggcgagag

SEQ ID NO: 4012413 - DNA, 25 bp, Homo sapien
gtccaagatcacaagaccagcatct

SEQ ID NO: 4012414 - DNA, 25 bp, Homo sapien
tgtttaaaggtttcatatcccaggc

SEQ ID NO: 4012415 - DNA, 25 bp, Homo sapien
taaaggtttcatatcccaggccttc

SEQ ID NO: 4012416 - DNA, 25 bp, Homo sapien
tgatccctttccatgttggatggag

SEQ ID NO: 4012417 - DNA, 25 bp, Homo sapien
tccatgttggatggagctaagcgat

SEQ ID NO: 4012418 - DNA, 25 bp, Homo sapien
tgaccatcagggattatcatctggc

SEQ ID NO: 4012419 - DNA, 25 bp, Homo sapien
caatgatgcccgtgtctgatccctt

SEQ ID NO: 4012420 - DNA, 25 bp, Homo sapien
tctggaatttctataatagacccag

SEQ ID NO: 4012421 - DNA, 25 bp, Homo sapien
ttctataatagacccagagtcaaca

SEQ ID NO: 4012422 - DNA, 25 bp, Homo sapien
gaatttctataatagacccagagtc

SEQ ID NO: 4012423 - DNA, 25 bp, Homo sapien
tcatctggaatttctataatagacc

SEQ ID NO: 4012424 - DNA, 25 bp, Homo sapien
gagagcactctcaccgggttgtgtg

SEQ ID NO: 4012425 - DNA, 25 bp, Homo sapien
gatggccaggaaacaatcagtcagg

SEQ ID NO: 4012426 - DNA, 25 bp, Homo sapien
tagccccagggaccatattcattca

SEQ ID NO: 4012427 - DNA, 25 bp, Homo sapien
tcagtcagggactatagggttctca

SEQ ID NO: 4012428 - DNA, 25 bp, Homo sapien
ctaagacttctgagctgagcaacca

SEQ ID NO: 4012429 - DNA, 25 bp, Homo sapien
tgccgacagagcaaatgtgaggaga

SEQ ID NO: 4012430 - DNA, 25 bp, Homo sapien
gatgtcaagaatctggggaccggct

SEQ ID NO: 4012431 - DNA, 25 bp, Homo sapien
cctcttgtgacaccaggatttgccg

SEQ ID NO: 4012432 - DNA, 25 bp, Homo sapien
ctggtggagacataggagttagaaa

SEQ ID NO: 4012433 - DNA, 25 bp, Homo sapien
gccaaatttactggtttacaagctc

SEQ ID NO: 4012434 - DNA, 25 bp, Homo sapien
taccctgagtctggtggagacatag

SEQ ID NO: 4012435 - DNA, 25 bp, Homo sapien
gcccagagctcttgagctctgccaa

SEQ ID NO: 4012436 - DNA, 25 bp, Homo sapien
aggctcttcacctgcccccaggtca

SEQ ID NO: 4012437 - DNA, 25 bp, Homo sapien
ctgagccatctgatgaactgggggt

SEQ ID NO: 4012438 - DNA, 25 bp, Homo sapien
ggctcttcacctgcccccaggtcag

SEQ ID NO: 4012439 - DNA, 25 bp, Homo sapien
agccatctgatgaactgggggtgca

SEQ ID NO: 4012440 - DNA, 25 bp, Homo sapien
gtgggtaccccaagtctgacagaca

SEQ ID NO: 4012441 - DNA, 25 bp, Homo sapien
gtctgacagacacaaaggagttaga

SEQ ID NO: 4012442 - DNA, 25 bp, Homo sapien
cccagtgggtaccccaagtctgaca

SEQ ID NO: 4012443 - DNA, 25 bp, Homo sapien
aagtctgacagacacaaaggagtta

SEQ ID NO: 4012444 - DNA, 25 bp, Homo sapien
agaataatcgcacccgtttctcagg

SEQ ID NO: 4012445 - DNA, 25 bp, Homo sapien
gacaggttacttatgctctctgggc

SEQ ID NO: 4012446 - DNA, 25 bp, Homo sapien
gccgcgctctgtcactttgcattaa

SEQ ID NO: 4012447 - DNA, 25 bp, Homo sapien
gcttacttcaccatgtccgatccgg

SEQ ID NO: 4012448 - DNA, 25 bp, Homo sapien
ctcagaagggtgaacttgggtttgc

SEQ ID NO: 4012449 - DNA, 25 bp, Homo sapien
tctcagaagggtgaacttgggtttg

SEQ ID NO: 4012450 - DNA, 25 bp, Homo sapien
gggatccttttccctatctgtgaaa

SEQ ID NO: 4012451 - DNA, 25 bp, Homo sapien
gggtagacaatagcatctgccacat

SEQ ID NO: 4012452 - DNA, 25 bp, Homo sapien
gggaggcaggtagattcctaaacac

SEQ ID NO: 4012453 - DNA, 25 bp, Homo sapien
cctagagataggctccacctcaagg

SEQ ID NO: 4012454 - DNA, 25 bp, Homo sapien
caggaccgtgaggattggttcactc

SEQ ID NO: 4012455 - DNA, 25 bp, Homo sapien
ccagcttagaagtgacacacattag

SEQ ID NO: 4012456 - DNA, 25 bp, Homo sapien
gcttagaagtgacacacattagctg

SEQ ID NO: 4012457 - DNA, 25 bp, Homo sapien
cttagaagtgacacacattagctgg

SEQ ID NO: 4012458 - DNA, 25 bp, Homo sapien
ctccagcttagaagtgacacacatt

SEQ ID NO: 4012459 - DNA, 25 bp, Homo sapien
gagtgggacatacaggtgcctgaca

SEQ ID NO: 4012460 - DNA, 25 bp, Homo sapien
gtaaacagaacctgattcctggctg

SEQ ID NO: 4012461 - DNA, 25 bp, Homo sapien
gtgcctgacatactcaaagcgtgcg

SEQ ID NO: 4012462 - DNA, 25 bp, Homo sapien
aaagcgtgcgttgttccaagtctgc

SEQ ID NO: 4012463 - DNA, 25 bp, Homo sapien
gcaaaaatggagtcacactgcaaca

SEQ ID NO: 4012464 - DNA, 25 bp, Homo sapien
cactgcaacatattgtagaatttgc

SEQ ID NO: 4012465 - DNA, 25 bp, Homo sapien
tatattcctccagatttttctatgc

SEQ ID NO: 4012466 - DNA, 25 bp, Homo sapien
aaaaagaaatcttatccactgtaga

SEQ ID NO: 4012467 - DNA, 25 bp, Homo sapien
gaatagctgcctttgaatcatgttg

SEQ ID NO: 4012468 - DNA, 25 bp, Homo sapien
tagagacagtgaggacctttctttt

SEQ ID NO: 4012469 - DNA, 25 bp, Homo sapien
ccaatatgtcatacaacgggaaagt

SEQ ID NO: 4012470 - DNA, 25 bp, Homo sapien
ccatggtaaatgaaaacgctttgca

SEQ ID NO: 4012471 - DNA, 25 bp, Homo sapien
ctttacatggtcttcatttctgtgt

SEQ ID NO: 4012472 - DNA, 25 bp, Homo sapien
tctccctggtttatagacggccatc

SEQ ID NO: 4012473 - DNA, 25 bp, Homo sapien
taacaaagtctcacacactgagtgc

SEQ ID NO: 4012474 - DNA, 25 bp, Homo sapien
ggtcataagggagggatctgtctca

SEQ ID NO: 4012475 - DNA, 25 bp, Homo sapien
tcaatcagctttgttcagtcacctg

SEQ ID NO: 4012476 - DNA, 25 bp, Homo sapien
gaatttccagcctccgagcaaagcc

SEQ ID NO: 4012477 - DNA, 25 bp, Homo sapien
tccaaaaatgtgagtcagtccgaca

SEQ ID NO: 4012478 - DNA, 25 bp, Homo sapien
tctccctcacaggattggcatcttc

SEQ ID NO: 4012479 - DNA, 25 bp, Homo sapien
ggtcaggaatgaccatcactaaaaa

SEQ ID NO: 4012480 - DNA, 25 bp, Homo sapien
actctatgccacaagggaccacaca

SEQ ID NO: 4012481 - DNA, 25 bp, Homo sapien
tctatgccacaagggaccacacagg

SEQ ID NO: 4012482 - DNA, 25 bp, Homo sapien
ggcactctatgccacaagggaccac

SEQ ID NO: 4012483 - DNA, 25 bp, Homo sapien
aagagggggcactctatgccacaag

SEQ ID NO: 4012484 - DNA, 25 bp, Homo sapien
tgtcccaaaggtggaatacaaccag

SEQ ID NO: 4012485 - DNA, 25 bp, Homo sapien
gctttgcagtggcagtaccgtagcc

SEQ ID NO: 4012486 - DNA, 25 bp, Homo sapien
cccctgtgaggtgttatacatgacc

SEQ ID NO: 4012487 - DNA, 25 bp, Homo sapien
ccaatgagatttatccgagacgcga

SEQ ID NO: 4012488 - DNA, 25 bp, Homo sapien
tgctaagtgcttccatctagaatgc

SEQ ID NO: 4012489 - DNA, 25 bp, Homo sapien
tcagtgcaggcaacccatggaagtg

SEQ ID NO: 4012490 - DNA, 25 bp, Homo sapien
tgtacatgcagtggatagtggctca

SEQ ID NO: 4012491 - DNA, 25 bp, Homo sapien
tctgaagaagcacagggactaaggg

SEQ ID NO: 4012492 - DNA, 25 bp, Homo sapien
gcaaatgctgattcaaaacgtacca

SEQ ID NO: 4012493 - DNA, 25 bp, Homo sapien
ttttgcaaatgctgattcaaaacgt

SEQ ID NO: 4012494 - DNA, 25 bp, Homo sapien
ttgcaaatgctgattcaaaacgtac

SEQ ID NO: 4012495 - DNA, 25 bp, Homo sapien
aattcaagacaatttttttgcaaat

SEQ ID NO: 4012496 - DNA, 25 bp, Homo sapien
ttgaaaggtgagaagcggtaagcta

SEQ ID NO: 4012497 - DNA, 25 bp, Homo sapien
ctagaggagacagacggcgttgcca

SEQ ID NO: 4012498 - DNA, 25 bp, Homo sapien
agcaacccacggcagggatgcagga

SEQ ID NO: 4012499 - DNA, 25 bp, Homo sapien
gggactggtggccttctaaaatcac

SEQ ID NO: 4012500 - DNA, 25 bp, Homo sapien
gggtcatgggctcaacaatataaag

SEQ ID NO: 4012501 - DNA, 25 bp, Homo sapien
ccttaggatatgatgcttggcacac

SEQ ID NO: 4012502 - DNA, 25 bp, Homo sapien
ggttgctgtacactgaagcctcact

SEQ ID NO: 4012503 - DNA, 25 bp, Homo sapien
gaatgccagttgtaccagactcaag

SEQ ID NO: 4012504 - DNA, 25 bp, Homo sapien
gcctgggctagcacaaagggtattt

SEQ ID NO: 4012505 - DNA, 25 bp, Homo sapien
tgcatggtggcaacaccgggtttag

SEQ ID NO: 4012506 - DNA, 25 bp, Homo sapien
caatctgtgcttatcctcactgggt

SEQ ID NO: 4012507 - DNA, 25 bp, Homo sapien
tgatatccctgtatgaggcccctgg

SEQ ID NO: 4012508 - DNA, 25 bp, Homo sapien
gtcttctaccatgctgtcagtgata

SEQ ID NO: 4012509 - DNA, 25 bp, Homo sapien
ctagaagtgaggttcgcagtcttct

SEQ ID NO: 4012510 - DNA, 25 bp, Homo sapien
gaaccaagatgggattcgtagtaac

SEQ ID NO: 4012511 - DNA, 25 bp, Homo sapien
gctgtcagtgatatagctggaacca

SEQ ID NO: 4012512 - DNA, 25 bp, Homo sapien
ggtttcccatctcctgtatggctta

SEQ ID NO: 4012513 - DNA, 25 bp, Homo sapien
gatattatgcatgctccaatcgagc

SEQ ID NO: 4012514 - DNA, 25 bp, Homo sapien
gtatggcttaggctccaaggtctgt

SEQ ID NO: 4012515 - DNA, 25 bp, Homo sapien
gaaagtatcatagcgtggtttccca

SEQ ID NO: 4012516 - DNA, 25 bp, Homo sapien
acattttctttagagcctcagtagc

SEQ ID NO: 4012517 - DNA, 25 bp, Homo sapien
cagaccacactattattatacagtt

SEQ ID NO: 4012518 - DNA, 25 bp, Homo sapien
aacagaccacactattattatacag

SEQ ID NO: 4012519 - DNA, 25 bp, Homo sapien
gaacagaccacactattattataca

SEQ ID NO: 4012520 - DNA, 25 bp, Homo sapien
tgaggttatggtttaggcactctgc

SEQ ID NO: 4012521 - DNA, 25 bp, Homo sapien
tttaggcactctgcaacagcttccc

SEQ ID NO: 4012522 - DNA, 25 bp, Homo sapien
acagcttcccttagggtagggatct

SEQ ID NO: 4012523 - DNA, 25 bp, Homo sapien
tagggtagggatcttttcatcaggg

SEQ ID NO: 4012524 - DNA, 25 bp, Homo sapien
gtctgtggtttgctgcaggattcag

SEQ ID NO: 4012525 - DNA, 25 bp, Homo sapien
tggtttgctgcaggattcagcttcc

SEQ ID NO: 4012526 - DNA, 25 bp, Homo sapien
tgtcaaatcacacaatcgcccagtc

SEQ ID NO: 4012527 - DNA, 25 bp, Homo sapien
gtcctatctactgtgttatcgtgca

SEQ ID NO: 4012528 - DNA, 25 bp, Homo sapien
ttaagacaggaatcccgtcagaagt

SEQ ID NO: 4012529 - DNA, 25 bp, Homo sapien
taagacaggaatcccgtcagaagta

SEQ ID NO: 4012530 - DNA, 25 bp, Homo sapien
agtaaactcaatgtccaactccacg

SEQ ID NO: 4012531 - DNA, 25 bp, Homo sapien
aatgtccaactccacgcctgttgct

SEQ ID NO: 4012532 - DNA, 25 bp, Homo sapien
tggctccttataattccggtttctg

SEQ ID NO: 4012533 - DNA, 25 bp, Homo sapien
cccattccgatgtacactctgtaaa

SEQ ID NO: 4012534 - DNA, 25 bp, Homo sapien
aaatgttgcttcttcggagacgatt

SEQ ID NO: 4012535 - DNA, 25 bp, Homo sapien
aaatagcgtaactctttccttcgag

SEQ ID NO: 4012536 - DNA, 25 bp, Homo sapien
gaccttgttcctggctgtatgtaac

SEQ ID NO: 4012537 - DNA, 25 bp, Homo sapien
ctgggagcgatcaagggccgggagt

SEQ ID NO: 4012538 - DNA, 25 bp, Homo sapien
aagtccggagatccctagacactgg

SEQ ID NO: 4012539 - DNA, 25 bp, Homo sapien
gcgtcaggcgcacagaaactatata

SEQ ID NO: 4012540 - DNA, 25 bp, Homo sapien
cgaatggccgccagcgtgttctcgg

SEQ ID NO: 4012541 - DNA, 25 bp, Homo sapien
agacgcgcagtagaacgaagaggct

SEQ ID NO: 4012542 - DNA, 25 bp, Homo sapien
ggccctgcaagagggcaccggctca

SEQ ID NO: 4012543 - DNA, 25 bp, Homo sapien
tgggcgatggcagaaatgcggtccc

SEQ ID NO: 4012544 - DNA, 25 bp, Homo sapien
cgcccgcaccggcacggacgggagt

SEQ ID NO: 4012545 - DNA, 25 bp, Homo sapien
gcccgcaccggcacggacgggagtc

SEQ ID NO: 4012546 - DNA, 25 bp, Homo sapien
gcgcccgcaccggcacggacgggag

SEQ ID NO: 4012547 - DNA, 25 bp, Homo sapien
cgcaccggcacggacgggagtcccg

SEQ ID NO: 4012548 - DNA, 25 bp, Homo sapien
ctggggcagtagaacgagaagcgag

SEQ ID NO: 4012549 - DNA, 25 bp, Homo sapien
gaagcgagggggagggtccaaggca

SEQ ID NO: 4012550 - DNA, 25 bp, Homo sapien
ggggcagtagaacgagaagcgaggg

SEQ ID NO: 4012551 - DNA, 25 bp, Homo sapien
cagtagaacgagaagcgagggggag

SEQ ID NO: 4012552 - DNA, 25 bp, Homo sapien
gcacaatggcggcagcagacacatc

SEQ ID NO: 4012553 - DNA, 25 bp, Homo sapien
agacacatccagagagggagtcggc

SEQ ID NO: 4012554 - DNA, 25 bp, Homo sapien
tctgaggggaccagcgccgcacaat

SEQ ID NO: 4012555 - DNA, 25 bp, Homo sapien
cccagccaatcagggatcgggattc

SEQ ID NO: 4012556 - DNA, 25 bp, Homo sapien
tctagtctctagcttgcaaggaaga

SEQ ID NO: 4012557 - DNA, 25 bp, Homo sapien
taaattctagtctctagcttgcaag

SEQ ID NO: 4012558 - DNA, 25 bp, Homo sapien
taataaattctagtctctagcttgc

SEQ ID NO: 4012559 - DNA, 25 bp, Homo sapien
aattctagtctctagcttgcaagga

SEQ ID NO: 4012560 - DNA, 25 bp, Homo sapien
cgggaatcaaccaccggaagtgccg

SEQ ID NO: 4012561 - DNA, 25 bp, Homo sapien
atggtagtgttctggtggcccaacg

SEQ ID NO: 4012562 - DNA, 25 bp, Homo sapien
gtaagcattacgtcctccatcgcgg

SEQ ID NO: 4012563 - DNA, 25 bp, Homo sapien
ttgcagcctgagatccgtaatatgg

SEQ ID NO: 4012564 - DNA, 25 bp, Homo sapien
tgaggtgatgctccgatgctggccc

SEQ ID NO: 4012565 - DNA, 25 bp, Homo sapien
gtttggagtcttaaatcggaggagc

SEQ ID NO: 4012566 - DNA, 25 bp, Homo sapien
tctggcgaggcgaaattggcgccct

SEQ ID NO: 4012567 - DNA, 25 bp, Homo sapien
ggtgaataaaactcgggccagagcc

SEQ ID NO: 4012568 - DNA, 25 bp, Homo sapien
accgcactcagctaattttggattt

SEQ ID NO: 4012569 - DNA, 25 bp, Homo sapien
tcctgccttggcctaccagagttgc

SEQ ID NO: 4012570 - DNA, 25 bp, Homo sapien
tgccttggcctaccagagttgctgg

SEQ ID NO: 4012571 - DNA, 25 bp, Homo sapien
caccgcactcagctaattttggatt

SEQ ID NO: 4012572 - DNA, 25 bp, Homo sapien
taacctctttgaggctggcccactg

SEQ ID NO: 4012573 - DNA, 25 bp, Homo sapien
caaagctgggactgccacattggca

SEQ ID NO: 4012574 - DNA, 25 bp, Homo sapien
caatgtcagagaaggtgcggacccg

SEQ ID NO: 4012575 - DNA, 25 bp, Homo sapien
tattggtgcacgagaaaagccacct

SEQ ID NO: 4012576 - DNA, 25 bp, Homo sapien
tctgaggagctcagtttaagaaaca

SEQ ID NO: 4012577 - DNA, 25 bp, Homo sapien
gaagttgtttttgcggttaagcagc

SEQ ID NO: 4012578 - DNA, 25 bp, Homo sapien
tggcaccttctctatgattagtaaa

SEQ ID NO: 4012579 - DNA, 25 bp, Homo sapien
tgcagcccagcctacgaagttgttt

SEQ ID NO: 4012580 - DNA, 25 bp, Homo sapien
gggctccagggccaacaagccttat

SEQ ID NO: 4012581 - DNA, 25 bp, Homo sapien
ccagacacggtgatatatgcctata

SEQ ID NO: 4012582 - DNA, 25 bp, Homo sapien
gttggtgacttgatacaaacccata

SEQ ID NO: 4012583 - DNA, 25 bp, Homo sapien
caaacccatagaattgggctccagg

SEQ ID NO: 4012584 - DNA, 25 bp, Homo sapien
ctactcaggttgagaacaggagagc

SEQ ID NO: 4012585 - DNA, 25 bp, Homo sapien
tgtccttgcggaagtttcccgaata

SEQ ID NO: 4012586 - DNA, 25 bp, Homo sapien
gaataccgtgttctttcagtggtcc

SEQ ID NO: 4012587 - DNA, 25 bp, Homo sapien
caatcatttatagtagctaggcagc

SEQ ID NO: 4012588 - DNA, 25 bp, Homo sapien
gatttcaatttgtttggatatgtac

SEQ ID NO: 4012589 - DNA, 25 bp, Homo sapien
tttcaatttgtttggatatgtaccc

SEQ ID NO: 4012590 - DNA, 25 bp, Homo sapien
gagcatgggagtgtaggtatctcct

SEQ ID NO: 4012591 - DNA, 25 bp, Homo sapien
caatgagcatgggagtgtaggtatc

SEQ ID NO: 4012592 - DNA, 25 bp, Homo sapien
gctgttggcactgaaccatctgtac

SEQ ID NO: 4012593 - DNA, 25 bp, Homo sapien
agctgttggcactgaaccatctgta

SEQ ID NO: 4012594 - DNA, 25 bp, Homo sapien
gatacccgcgatcctgcttttgtgg

SEQ ID NO: 4012595 - DNA, 25 bp, Homo sapien
caaagctcgtttgcccagacaggag

SEQ ID NO: 4012596 - DNA, 25 bp, Homo sapien
taaccaggcttgtgagtgggtcttg

SEQ ID NO: 4012597 - DNA, 25 bp, Homo sapien
ccaaaaagggattctcaaagctcgt

SEQ ID NO: 4012598 - DNA, 25 bp, Homo sapien
tggcgttgctggctcataggatctg

SEQ ID NO: 4012599 - DNA, 25 bp, Homo sapien
tcatctgtgttggtatgcaaaacgg

SEQ ID NO: 4012600 - DNA, 25 bp, Homo sapien
tattctgcgttggaggatactgcct

SEQ ID NO: 4012601 - DNA, 25 bp, Homo sapien
caccaggcacgaatgaggcttccat

SEQ ID NO: 4012602 - DNA, 25 bp, Homo sapien
gaggcttttagacgatgttgacaca

SEQ ID NO: 4012603 - DNA, 25 bp, Homo sapien
gaatgtgcaactgtgacctgcccgg

SEQ ID NO: 4012604 - DNA, 25 bp, Homo sapien
cgtcttggtaggagacccagggaat

SEQ ID NO: 4012605 - DNA, 25 bp, Homo sapien
ttttacacgaggttacaagacagcg

SEQ ID NO: 4012606 - DNA, 25 bp, Homo sapien
tttatgagatatccacgcactcagg

SEQ ID NO: 4012607 - DNA, 25 bp, Homo sapien
caaaactggattagccgtgtgcact

SEQ ID NO: 4012608 - DNA, 25 bp, Homo sapien
actgggctccccagacagagtgctg

SEQ ID NO: 4012609 - DNA, 25 bp, Homo sapien
ccactgagtgctgtgttggctccag

SEQ ID NO: 4012610 - DNA, 25 bp, Homo sapien
cttactctaggcagtggttgtcaca

SEQ ID NO: 4012611 - DNA, 25 bp, Homo sapien
tggcaagagacattatcaaagggat

SEQ ID NO: 4012612 - DNA, 25 bp, Homo sapien
caaagtgtaaagcagcacagagtgt

SEQ ID NO: 4012613 - DNA, 25 bp, Homo sapien
gttgtcacaggacgagacccagcaa

SEQ ID NO: 4012614 - DNA, 25 bp, Homo sapien
tatctgaggctcatgaatcaagatg

SEQ ID NO: 4012615 - DNA, 25 bp, Homo sapien
ttttcaggagagagccctttcagcc

SEQ ID NO: 4012616 - DNA, 25 bp, Homo sapien
tcagcaagggttcatacctcttccg

SEQ ID NO: 4012617 - DNA, 25 bp, Homo sapien
aacatgcacaaacactcagcaaggg

SEQ ID NO: 4012618 - DNA, 25 bp, Homo sapien
cagacacgtctccaatgatttcact

SEQ ID NO: 4012619 - DNA, 25 bp, Homo sapien
tgctaattgagaagatatggaatgg

SEQ ID NO: 4012620 - DNA, 25 bp, Homo sapien
cacatgcgaattgagctttttgcta

SEQ ID NO: 4012621 - DNA, 25 bp, Homo sapien
cagtgaaaggtagtcaaagggcctc

SEQ ID NO: 4012622 - DNA, 25 bp, Homo sapien
ggtgtaagcccaatcaagccattct

SEQ ID NO: 4012623 - DNA, 25 bp, Homo sapien
gattcctgataagatgcgaccctga

SEQ ID NO: 4012624 - DNA, 25 bp, Homo sapien
ccaccgagagtagttgagaaaagca

SEQ ID NO: 4012625 - DNA, 25 bp, Homo sapien
taaatcagttggcatagcagctcgc

SEQ ID NO: 4012626 - DNA, 25 bp, Homo sapien
gaaatctaagctcacataatggctg

SEQ ID NO: 4012627 - DNA, 25 bp, Homo sapien
aaatctgatttttagggcaagctgc

SEQ ID NO: 4012628 - DNA, 25 bp, Homo sapien
tcagtcatttctggtcacgtccaaa

SEQ ID NO: 4012629 - DNA, 25 bp, Homo sapien
ggcaagctgcaatccaagaagttga

SEQ ID NO: 4012630 - DNA, 25 bp, Homo sapien
tgtgttacctgaacccctatggagg

SEQ ID NO: 4012631 - DNA, 25 bp, Homo sapien
gcacaagtggccttcggtctactca

SEQ ID NO: 4012632 - DNA, 25 bp, Homo sapien
aagttagagcacacccaaagtctgg

SEQ ID NO: 4012633 - DNA, 25 bp, Homo sapien
tggatcaaaggagaaagcgaggtca

SEQ ID NO: 4012634 - DNA, 25 bp, Homo sapien
tgagacagtttcactcttgttgccc

SEQ ID NO: 4012635 - DNA, 25 bp, Homo sapien
ctcccaagtggcctttatttcacaa

SEQ ID NO: 4012636 - DNA, 25 bp, Homo sapien
tttgagacagtttcactcttgttgc

SEQ ID NO: 4012637 - DNA, 25 bp, Homo sapien
agacagtttcactcttgttgcccag

SEQ ID NO: 4012638 - DNA, 25 bp, Homo sapien
tgaggtcgggcacccattatatcaa

SEQ ID NO: 4012639 - DNA, 25 bp, Homo sapien
tagttcccaagcctaggccagtgaa

SEQ ID NO: 4012640 - DNA, 25 bp, Homo sapien
tactgaatcaataagccggtctctg

SEQ ID NO: 4012641 - DNA, 25 bp, Homo sapien
gaacttggactttcacatgaggtcg

SEQ ID NO: 4012642 - DNA, 25 bp, Homo sapien
caatgcttgcggatcagggttcaga

SEQ ID NO: 4012643 - DNA, 25 bp, Homo sapien
tatccacctacagaagtcacctggg

SEQ ID NO: 4012644 - DNA, 25 bp, Homo sapien
gcatgttcaggccaaacgatcgtga

SEQ ID NO: 4012645 - DNA, 25 bp, Homo sapien
tatgagtagtaaacggccgattcca

SEQ ID NO: 4012646 - DNA, 25 bp, Homo sapien
aacaggaggttttagcactcactcg

SEQ ID NO: 4012647 - DNA, 25 bp, Homo sapien
tagtatgtccctagtacctgctaaa

SEQ ID NO: 4012648 - DNA, 25 bp, Homo sapien
tatatcttactgctcgaggtcctca

SEQ ID NO: 4012649 - DNA, 25 bp, Homo sapien
tcctggctcccgaaatatgagctgc

SEQ ID NO: 4012650 - DNA, 25 bp, Homo sapien
tcgtagtcccgctgcagattctgct

SEQ ID NO: 4012651 - DNA, 25 bp, Homo sapien
cagcttgactgacttggaagcgttc

SEQ ID NO: 4012652 - DNA, 25 bp, Homo sapien
tttgaagccacccataagtctgaga

SEQ ID NO: 4012653 - DNA, 25 bp, Homo sapien
ggaagcgttcctgtcaatgtaaaag

SEQ ID NO: 4012654 - DNA, 25 bp, Homo sapien
taactcatggcacacggcacagtgt

SEQ ID NO: 4012655 - DNA, 25 bp, Homo sapien
gagacagaaacctaactagtgaccc

SEQ ID NO: 4012656 - DNA, 25 bp, Homo sapien
aaatagaggtctgcagcttagctgg

SEQ ID NO: 4012657 - DNA, 25 bp, Homo sapien
gtgtgcctcacttcacaacagcgca

SEQ ID NO: 4012658 - DNA, 25 bp, Homo sapien
tcgcagagccctagccccaaactta

SEQ ID NO: 4012659 - DNA, 25 bp, Homo sapien
gccacctcctcgcagagccctagcc

SEQ ID NO: 4012660 - DNA, 25 bp, Homo sapien
cctcctcgcagagccctagccccaa

SEQ ID NO: 4012661 - DNA, 25 bp, Homo sapien
gtgccacctcctcgcagagccctag

SEQ ID NO: 4012662 - DNA, 25 bp, Homo sapien
aagcttccgttttgcctgactcgcg

SEQ ID NO: 4012663 - DNA, 25 bp, Homo sapien
ctcgcgatcgatctcttcttgcaag

SEQ ID NO: 4012664 - DNA, 25 bp, Homo sapien
tgcctgactcgcgatcgatctcttc

SEQ ID NO: 4012665 - DNA, 25 bp, Homo sapien
tccgttttgcctgactcgcgatcga

SEQ ID NO: 4012666 - DNA, 25 bp, Homo sapien
ccacctctaagtccgtgtctgtttc

SEQ ID NO: 4012667 - DNA, 25 bp, Homo sapien
ctggtctatgtgcgcctcatccatg

SEQ ID NO: 4012668 - DNA, 25 bp, Homo sapien
accacctctaagtccgtgtctgttt

SEQ ID NO: 4012669 - DNA, 25 bp, Homo sapien
gtgcgcctcatccatgttgcctttt

SEQ ID NO: 4012670 - DNA, 25 bp, Homo sapien
catcgtttcggcccacacgtccgtg

SEQ ID NO: 4012671 - DNA, 25 bp, Homo sapien
gtttcggcccacacgtccgtgcaca

SEQ ID NO: 4012672 - DNA, 25 bp, Homo sapien
ttcggcccacacgtccgtgcacaca

SEQ ID NO: 4012673 - DNA, 25 bp, Homo sapien
tcgtttcggcccacacgtccgtgca

SEQ ID NO: 4012674 - DNA, 25 bp, Homo sapien
ttaattctcccacggcaaagtccat

SEQ ID NO: 4012675 - DNA, 25 bp, Homo sapien
cttaattctcccacggcaaagtcca

SEQ ID NO: 4012676 - DNA, 25 bp, Homo sapien
tcagagctggctcctcgatgactgg

SEQ ID NO: 4012677 - DNA, 25 bp, Homo sapien
agctggctcctcgatgactggctgc

SEQ ID NO: 4012678 - DNA, 25 bp, Homo sapien
tggctcctcgatgactggctgctct

SEQ ID NO: 4012679 - DNA, 25 bp, Homo sapien
tttcagagctggctcctcgatgact

SEQ ID NO: 4012680 - DNA, 25 bp, Homo sapien
tttctttgcggaggccttagggtca

SEQ ID NO: 4012681 - DNA, 25 bp, Homo sapien
gggtcatcacttatggggatgtatt

SEQ ID NO: 4012682 - DNA, 25 bp, Homo sapien
tttgcggaggccttagggtcatcac

SEQ ID NO: 4012683 - DNA, 25 bp, Homo sapien
ggtcatcacttatggggatgtattc

SEQ ID NO: 4012684 - DNA, 25 bp, Homo sapien
tccctggcctcacagaaccaagggt

SEQ ID NO: 4012685 - DNA, 25 bp, Homo sapien
ctgagcaagtgtccccaacatccct

SEQ ID NO: 4012686 - DNA, 25 bp, Homo sapien
tcttctttttcttcactagaggcat

SEQ ID NO: 4012687 - DNA, 25 bp, Homo sapien
ttcttctttttcttcactagaggca

SEQ ID NO: 4012688 - DNA, 25 bp, Homo sapien
tagctcttaaaggagaaacatcagc

SEQ ID NO: 4012689 - DNA, 25 bp, Homo sapien
gtagctcttaaaggagaaacatcag

SEQ ID NO: 4012690 - DNA, 25 bp, Homo sapien
ccatgtttctttgagtgggtggtca

SEQ ID NO: 4012691 - DNA, 25 bp, Homo sapien
taaatccacacagccctaggttcaa

SEQ ID NO: 4012692 - DNA, 25 bp, Homo sapien
tcaaagcgttgtgggacagggaaaa

SEQ ID NO: 4012693 - DNA, 25 bp, Homo sapien
tatcccataccaagccatcctgtgt

SEQ ID NO: 4012694 - DNA, 25 bp, Homo sapien
tagtgtagtcaggagagccaagacg

SEQ ID NO: 4012695 - DNA, 25 bp, Homo sapien
agaacgttacagtgcatctcctgca

SEQ ID NO: 4012696 - DNA, 25 bp, Homo sapien
acaaagaatccaccgggaggttgcg

SEQ ID NO: 4012697 - DNA, 25 bp, Homo sapien
ttagccctgcgaccaaatgcattca

SEQ ID NO: 4012698 - DNA, 25 bp, Homo sapien
atcaccagcaggacgcgcgggagcc

SEQ ID NO: 4012699 - DNA, 25 bp, Homo sapien
gccagcaagtggaaaacggagactg

SEQ ID NO: 4012700 - DNA, 25 bp, Homo sapien
tgccctaggttccaaagccagcaag

SEQ ID NO: 4012701 - DNA, 25 bp, Homo sapien
ggaattccgcccacaggactccaaa

SEQ ID NO: 4012702 - DNA, 25 bp, Homo sapien
ggctctgaggcgggaaaactttctg

SEQ ID NO: 4012703 - DNA, 25 bp, Homo sapien
cggctctgaggcgggaaaactttct

SEQ ID NO: 4012704 - DNA, 25 bp, Homo sapien
gctctgaggcgggaaaactttctgg

SEQ ID NO: 4012705 - DNA, 25 bp, Homo sapien
cacttcctctggtgcaatctccaca

SEQ ID NO: 4012706 - DNA, 25 bp, Homo sapien
ttccccgccgcgcacttcctctggt

SEQ ID NO: 4012707 - DNA, 25 bp, Homo sapien
gatgtgggtggaccgcatttcccca

SEQ ID NO: 4012708 - DNA, 25 bp, Homo sapien
cagggatgtgggtggaccgcatttc

SEQ ID NO: 4012709 - DNA, 25 bp, Homo sapien
gtccacttcgagtcgccggcccacc

SEQ ID NO: 4012710 - DNA, 25 bp, Homo sapien
aagtccacttcgagtcgccggccca

SEQ ID NO: 4012711 - DNA, 25 bp, Homo sapien
cgagtcgccggcccaccctctcggg

SEQ ID NO: 4012712 - DNA, 25 bp, Homo sapien
ttcgagtcgccggcccaccctctcg

SEQ ID NO: 4012713 - DNA, 25 bp, Homo sapien
ccgagccgtcaagcaagaatctgtg

SEQ ID NO: 4012714 - DNA, 25 bp, Homo sapien
gcgagctgcctgtctcgtcgtggca

SEQ ID NO: 4012715 - DNA, 25 bp, Homo sapien
acatagtgcgcctcaagcccagctg

SEQ ID NO: 4012716 - DNA, 25 bp, Homo sapien
tctacagactcgtcgttcacccgga

SEQ ID NO: 4012717 - DNA, 25 bp, Homo sapien
ctgcaagggtaggaaacctgggctg

SEQ ID NO: 4012718 - DNA, 25 bp, Homo sapien
ggtaggaaacctgggctggccgaga

SEQ ID NO: 4012719 - DNA, 25 bp, Homo sapien
tgcaagggtaggaaacctgggctgg

SEQ ID NO: 4012720 - DNA, 25 bp, Homo sapien
taaagagaaccatgcggtgtggacc

SEQ ID NO: 4012721 - DNA, 25 bp, Homo sapien
cgatccgtagtgaggttaaaggcaa

SEQ ID NO: 4012722 - DNA, 25 bp, Homo sapien
ccgggctccgcattttacgcatggg

SEQ ID NO: 4012723 - DNA, 25 bp, Homo sapien
ttacgcagcgcggactccaatcgcg

SEQ ID NO: 4012724 - DNA, 25 bp, Homo sapien
cgcccacagagcttcaaattgggat

SEQ ID NO: 4012725 - DNA, 25 bp, Homo sapien
cccacagagcttcaaattgggatgc

SEQ ID NO: 4012726 - DNA, 25 bp, Homo sapien
gccccgcccacagagcttcaaattg

SEQ ID NO: 4012727 - DNA, 25 bp, Homo sapien
cccgcccacagagcttcaaattggg

SEQ ID NO: 4012728 - DNA, 25 bp, Homo sapien
gagatccagctggtgtgaacacagc

SEQ ID NO: 4012729 - DNA, 25 bp, Homo sapien
ggagatccagctggtgtgaacacag

SEQ ID NO: 4012730 - DNA, 25 bp, Homo sapien
ttatgatatcgaaggaccagaaaga

SEQ ID NO: 4012731 - DNA, 25 bp, Homo sapien
cagctttatgatatcgaaggaccag

SEQ ID NO: 4012732 - DNA, 25 bp, Homo sapien
gcagaggtcagattctgacatgaaa

SEQ ID NO: 4012733 - DNA, 25 bp, Homo sapien
ctgaaagcagaggtcagattctgac

SEQ ID NO: 4012734 - DNA, 25 bp, Homo sapien
gaaagcagaggtcagattctgacat

SEQ ID NO: 4012735 - DNA, 25 bp, Homo sapien
aagcagaggtcagattctgacatga

SEQ ID NO: 4012736 - DNA, 25 bp, Homo sapien
atgtagacaagaggcccacagggag

SEQ ID NO: 4012737 - DNA, 25 bp, Homo sapien
tccagcacagcttgatctggtgacc

SEQ ID NO: 4012738 - DNA, 25 bp, Homo sapien
ttccagcacagcttgatctggtgac

SEQ ID NO: 4012739 - DNA, 25 bp, Homo sapien
aaaatgtagacaagaggcccacagg

SEQ ID NO: 4012740 - DNA, 25 bp, Homo sapien
catcctacaattgccagattgttta

SEQ ID NO: 4012741 - DNA, 25 bp, Homo sapien
gtttaaattattatacggcaattca

SEQ ID NO: 4012742 - DNA, 25 bp, Homo sapien
caatgcatcttttgtagggcgggag

SEQ ID NO: 4012743 - DNA, 25 bp, Homo sapien
taaatgccaagggaacaatgcatct

SEQ ID NO: 4012744 - DNA, 25 bp, Homo sapien
tggtaccacccataggatggaccta

SEQ ID NO: 4012745 - DNA, 25 bp, Homo sapien
ggatctctccacatggcaacgaaca

SEQ ID NO: 4012746 - DNA, 25 bp, Homo sapien
tatgtgaaccatgaaaagcagcttc

SEQ ID NO: 4012747 - DNA, 25 bp, Homo sapien
ggtgatacaattcaacccctaatgt

SEQ ID NO: 4012748 - DNA, 25 bp, Homo sapien
ttagatgtccagagtagggcaggcc

SEQ ID NO: 4012749 - DNA, 25 bp, Homo sapien
agacacaggctctttctatcccctg

SEQ ID NO: 4012750 - DNA, 25 bp, Homo sapien
gcttaaggaagtcagcaaagacaca

SEQ ID NO: 4012751 - DNA, 25 bp, Homo sapien
ctggtgccgtggcttaaggaagtca

SEQ ID NO: 4012752 - DNA, 25 bp, Homo sapien
tccaaaagcatgtagtaagcctcga

SEQ ID NO: 4012753 - DNA, 25 bp, Homo sapien
cctttttcctactcagacatgggca

SEQ ID NO: 4012754 - DNA, 25 bp, Homo sapien
gaaggtggcacttagacccgaagga

SEQ ID NO: 4012755 - DNA, 25 bp, Homo sapien
ggttttatctcatcgggcagaactg

SEQ ID NO: 4012756 - DNA, 25 bp, Homo sapien
gtccacaggaagctcatgtaaatat

SEQ ID NO: 4012757 - DNA, 25 bp, Homo sapien
atgtccacaggaagctcatgtaaat

SEQ ID NO: 4012758 - DNA, 25 bp, Homo sapien
tccacaggaagctcatgtaaatata

SEQ ID NO: 4012759 - DNA, 25 bp, Homo sapien
tgtccacaggaagctcatgtaaata

SEQ ID NO: 4012760 - DNA, 25 bp, Homo sapien
gttcacattcatgtaggtgtgaagg

SEQ ID NO: 4012761 - DNA, 25 bp, Homo sapien
cacattcatgtaggtgtgaaggcat

SEQ ID NO: 4012762 - DNA, 25 bp, Homo sapien
tcacattcatgtaggtgtgaaggca

SEQ ID NO: 4012763 - DNA, 25 bp, Homo sapien
ttcacattcatgtaggtgtgaaggc

SEQ ID NO: 4012764 - DNA, 25 bp, Homo sapien
ttttaacaggggtagatgatgtcat

SEQ ID NO: 4012765 - DNA, 25 bp, Homo sapien
cttttaacaggggtagatgatgtca

SEQ ID NO: 4012766 - DNA, 25 bp, Homo sapien
gtggccctttctcaggcgcactcag

SEQ ID NO: 4012767 - DNA, 25 bp, Homo sapien
tgtttcctgaatttgggacgtgctg

SEQ ID NO: 4012768 - DNA, 25 bp, Homo sapien
gagtcccaagaggatagtaaatcgt

SEQ ID NO: 4012769 - DNA, 25 bp, Homo sapien
tgtataagttctctagtgcctctct

SEQ ID NO: 4012770 - DNA, 25 bp, Homo sapien
ttgggaactagacagcgccccatta

SEQ ID NO: 4012771 - DNA, 25 bp, Homo sapien
tctgggccactgtttcctgggcagt

SEQ ID NO: 4012772 - DNA, 25 bp, Homo sapien
gggccactgtttcctgggcagtttg

SEQ ID NO: 4012773 - DNA, 25 bp, Homo sapien
tctctgggccactgtttcctgggca

SEQ ID NO: 4012774 - DNA, 25 bp, Homo sapien
ccactgtttcctgggcagtttgcat

SEQ ID NO: 4012775 - DNA, 25 bp, Homo sapien
catgaagctcccattctaggtagca

SEQ ID NO: 4012776 - DNA, 25 bp, Homo sapien
gaaaggtcccagtggatttccatag

SEQ ID NO: 4012777 - DNA, 25 bp, Homo sapien
tgctacatgcccattagtggaactg

SEQ ID NO: 4012778 - DNA, 25 bp, Homo sapien
cattccagaaaccatgggctaaagg

SEQ ID NO: 4012779 - DNA, 25 bp, Homo sapien
ctcccacgtgcttagcgttccaata

SEQ ID NO: 4012780 - DNA, 25 bp, Homo sapien
cccacgtgcttagcgttccaataat

SEQ ID NO: 4012781 - DNA, 25 bp, Homo sapien
aactcccacgtgcttagcgttccaa

SEQ ID NO: 4012782 - DNA, 25 bp, Homo sapien
aaataactcccacgtgcttagcgtt

SEQ ID NO: 4012783 - DNA, 25 bp, Homo sapien
gaaaaatgctgctctagaacacact

SEQ ID NO: 4012784 - DNA, 25 bp, Homo sapien
gtaactctaagaggactactgtccc

SEQ ID NO: 4012785 - DNA, 25 bp, Homo sapien
tgtcccaccgcagtagaatatctgt

SEQ ID NO: 4012786 - DNA, 25 bp, Homo sapien
tgtaacacttccacaataccaggga

SEQ ID NO: 4012787 - DNA, 25 bp, Homo sapien
gattcattgcaaacaagctttaatg

SEQ ID NO: 4012788 - DNA, 25 bp, Homo sapien
taggattcattgcaaacaagcttta

SEQ ID NO: 4012789 - DNA, 25 bp, Homo sapien
cattgcaaacaagctttaatgcaaa

SEQ ID NO: 4012790 - DNA, 25 bp, Homo sapien
gataggattcattgcaaacaagctt

SEQ ID NO: 4012791 - DNA, 25 bp, Homo sapien
gagtattcttctacaccagctgctg

SEQ ID NO: 4012792 - DNA, 25 bp, Homo sapien
tgtggccgcctttgcaaagatccat

SEQ ID NO: 4012793 - DNA, 25 bp, Homo sapien
ctagtcccaaggaatacagaagtgc

SEQ ID NO: 4012794 - DNA, 25 bp, Homo sapien
gcagatccgaaagcctagtagttag

SEQ ID NO: 4012795 - DNA, 25 bp, Homo sapien
tgttcagtgggtcctgacggcatct

SEQ ID NO: 4012796 - DNA, 25 bp, Homo sapien
gaggcgttcaactcagccttggcca

SEQ ID NO: 4012797 - DNA, 25 bp, Homo sapien
aaaagcacctgctgagaactcctgt

SEQ ID NO: 4012798 - DNA, 25 bp, Homo sapien
tataagtatgcaacagtcagccggg

SEQ ID NO: 4012799 - DNA, 25 bp, Homo sapien
ccaggctagaatgacaattttctat

SEQ ID NO: 4012800 - DNA, 25 bp, Homo sapien
gggagaaatccaggctagaatgaca

SEQ ID NO: 4012801 - DNA, 25 bp, Homo sapien
gcttccaacaaccagatcttcaact

SEQ ID NO: 4012802 - DNA, 25 bp, Homo sapien
cagcttccaacaaccagatcttcaa

SEQ ID NO: 4012803 - DNA, 25 bp, Homo sapien
taataaccagacacggaacaatttg

SEQ ID NO: 4012804 - DNA, 25 bp, Homo sapien
gattttaataaccagacacggaaca

SEQ ID NO: 4012805 - DNA, 25 bp, Homo sapien
ccaaagcgattttaataaccagaca

SEQ ID NO: 4012806 - DNA, 25 bp, Homo sapien
tgttatagacccaaagcgattttaa

SEQ ID NO: 4012807 - DNA, 25 bp, Homo sapien
gaagcacgactttccatggcagcca

SEQ ID NO: 4012808 - DNA, 25 bp, Homo sapien
ttcttttcagaataccgggtccgca

SEQ ID NO: 4012809 - DNA, 25 bp, Homo sapien
cacgcaatgactggaacgggattct

SEQ ID NO: 4012810 - DNA, 25 bp, Homo sapien
gaaaacgaacgtgtgaattgctcca

SEQ ID NO: 4012811 - DNA, 25 bp, Homo sapien
catgacagaaacaatgggcttggaa

SEQ ID NO: 4012812 - DNA, 25 bp, Homo sapien
tagagtatctgcagaaggacccacc

SEQ ID NO: 4012813 - DNA, 25 bp, Homo sapien
tactggcttatgaagcggtcagtcc

SEQ ID NO: 4012814 - DNA, 25 bp, Homo sapien
catttatacattccatgccgtcagg

SEQ ID NO: 4012815 - DNA, 25 bp, Homo sapien
gacatcatcgcggaaaacctgccgt

SEQ ID NO: 4012816 - DNA, 25 bp, Homo sapien
tcaccatagcaacggaaaggacccg

SEQ ID NO: 4012817 - DNA, 25 bp, Homo sapien
gaagccctgctaggtgacatcatcg

SEQ ID NO: 4012818 - DNA, 25 bp, Homo sapien
tctgcatcctagtgggaacccctga

SEQ ID NO: 4012819 - DNA, 25 bp, Homo sapien
taaagctcaccccacgattcagttg

SEQ ID NO: 4012820 - DNA, 25 bp, Homo sapien
gagaggatttggagatacacccgta

SEQ ID NO: 4012821 - DNA, 25 bp, Homo sapien
caacgcaacggtcatctccaagagg

SEQ ID NO: 4012822 - DNA, 25 bp, Homo sapien
gagccccatagaaggaacagtggtt

SEQ ID NO: 4012823 - DNA, 25 bp, Homo sapien
ctgtgtgacttggcggagcagttgg

SEQ ID NO: 4012824 - DNA, 25 bp, Homo sapien
cttcctgtgtgacttggcggagcag

SEQ ID NO: 4012825 - DNA, 25 bp, Homo sapien
tgtgacttggcggagcagttgggat

SEQ ID NO: 4012826 - DNA, 25 bp, Homo sapien
ttcctgtgtgacttggcggagcagt

SEQ ID NO: 4012827 - DNA, 25 bp, Homo sapien
gctgccgttgggaaatcctgctgtt

SEQ ID NO: 4012828 - DNA, 25 bp, Homo sapien
tcagttggctgatacacgttgcttc

SEQ ID NO: 4012829 - DNA, 25 bp, Homo sapien
ggagcgctgggtcttttccccaagc

SEQ ID NO: 4012830 - DNA, 25 bp, Homo sapien
acgttgcttctaaacggagcgctgg

SEQ ID NO: 4012831 - DNA, 25 bp, Homo sapien
tctaggagcctgacccatctcagtg

SEQ ID NO: 4012832 - DNA, 25 bp, Homo sapien
gacaggcgccttctcactacagaaa

SEQ ID NO: 4012833 - DNA, 25 bp, Homo sapien
gagggattggcaagacaacattgcc

SEQ ID NO: 4012834 - DNA, 25 bp, Homo sapien
cagaaagccattcatgtaaagttca

SEQ ID NO: 4012835 - DNA, 25 bp, Homo sapien
tgcccaggctgactatatgtacttt

SEQ ID NO: 4012836 - DNA, 25 bp, Homo sapien
ttgggacccaggcaaggaatctgtg

SEQ ID NO: 4012837 - DNA, 25 bp, Homo sapien
gaaagattgtccgtggtgccaaaaa

SEQ ID NO: 4012838 - DNA, 25 bp, Homo sapien
cccgcaaccttgatccatggaaaga

SEQ ID NO: 4012839 - DNA, 25 bp, Homo sapien
gcaccggcgattctgtgagacccaa

SEQ ID NO: 4012840 - DNA, 25 bp, Homo sapien
ccaagatgtgattcgaggtgctaca

SEQ ID NO: 4012841 - DNA, 25 bp, Homo sapien
aactgggccaaccatagctcctggg

SEQ ID NO: 4012842 - DNA, 25 bp, Homo sapien
gccctaatgagatctgacagcccaa

SEQ ID NO: 4012843 - DNA, 25 bp, Homo sapien
cagtggatctcagggatggcgtgga

SEQ ID NO: 4012844 - DNA, 25 bp, Homo sapien
ttctccatataggcccgcggcagct

SEQ ID NO: 4012845 - DNA, 25 bp, Homo sapien
ggaagatgacgaagacccagccgct

SEQ ID NO: 4012846 - DNA, 25 bp, Homo sapien
gtcgaagtagttgggcgtgttctcc

SEQ ID NO: 4012847 - DNA, 25 bp, Homo sapien
tgcagcttgacattgccgaagaggt

SEQ ID NO: 4012848 - DNA, 25 bp, Homo sapien
ctgcagcttgacattgccgaagagg

SEQ ID NO: 4012849 - DNA, 25 bp, Homo sapien
gcagcttgacattgccgaagaggta

SEQ ID NO: 4012850 - DNA, 25 bp, Homo sapien
cagcttgacattgccgaagaggtac

SEQ ID NO: 4012851 - DNA, 25 bp, Homo sapien
tcctggatgatgaaggcaaacgtca

SEQ ID NO: 4012852 - DNA, 25 bp, Homo sapien
tgagggccatcacaaagtccatggg

SEQ ID NO: 4012853 - DNA, 25 bp, Homo sapien
cagtaccatgtcgtagatgagggcc

SEQ ID NO: 4012854 - DNA, 25 bp, Homo sapien
cacagcgatgatgacttgcaccagc

SEQ ID NO: 4012855 - DNA, 25 bp, Homo sapien
ctgggtgcagtgaagaaccgtgaat

SEQ ID NO: 4012856 - DNA, 25 bp, Homo sapien
cagtgaagaaccgtgaatcatcatc

SEQ ID NO: 4012857 - DNA, 25 bp, Homo sapien
ggtgcagtgaagaaccgtgaatcat

SEQ ID NO: 4012858 - DNA, 25 bp, Homo sapien
gaagaaccgtgaatcatcatcactg

SEQ ID NO: 4012859 - DNA, 25 bp, Homo sapien
tggttccgaaccagttgcagttttg

SEQ ID NO: 4012860 - DNA, 25 bp, Homo sapien
tcaatggccagctcagttaagagac

SEQ ID NO: 4012861 - DNA, 25 bp, Homo sapien
tcagcaagcaatgctgcaagcagcc

SEQ ID NO: 4012862 - DNA, 25 bp, Homo sapien
cacccagtaggccagtggttccgaa

SEQ ID NO: 4012863 - DNA, 25 bp, Homo sapien
gactagaccactggcccatttgagg

SEQ ID NO: 4012864 - DNA, 25 bp, Homo sapien
ctgactagaccactggcccatttga

SEQ ID NO: 4012865 - DNA, 25 bp, Homo sapien
cctctgatatcttttccgagttaca

SEQ ID NO: 4012866 - DNA, 25 bp, Homo sapien
tccgagttacaggatctcatcatct

SEQ ID NO: 4012867 - DNA, 25 bp, Homo sapien
tccactgcatcggcgcagctcgcac

SEQ ID NO: 4012868 - DNA, 25 bp, Homo sapien
ctccactgcatcggcgcagctcgca

SEQ ID NO: 4012869 - DNA, 25 bp, Homo sapien
ctgcatcggcgcagctcgcacttac

SEQ ID NO: 4012870 - DNA, 25 bp, Homo sapien
cactgcatcggcgcagctcgcactt

SEQ ID NO: 4012871 - DNA, 25 bp, Homo sapien
gccgacgctccagctggccttcggc

SEQ ID NO: 4012872 - DNA, 25 bp, Homo sapien
gctccagctggccttcggcccgagt

SEQ ID NO: 4012873 - DNA, 25 bp, Homo sapien
cccgcagcgccgacgctccagctgg

SEQ ID NO: 4012874 - DNA, 25 bp, Homo sapien
agctggccttcggcccgagtcacat

SEQ ID NO: 4012875 - DNA, 25 bp, Homo sapien
ccgctccacgcacgcccgcctgcgg

SEQ ID NO: 4012876 - DNA, 25 bp, Homo sapien
tgcagcgcctgccagagtcgctgcc

SEQ ID NO: 4012877 - DNA, 25 bp, Homo sapien
acgcacgcccgcctgcgggtccagc

SEQ ID NO: 4012878 - DNA, 25 bp, Homo sapien
gccagagtcgctgccgcgcgaggcg

SEQ ID NO: 4012879 - DNA, 25 bp, Homo sapien
gtaacttccccgaaacacaccagca

SEQ ID NO: 4012880 - DNA, 25 bp, Homo sapien
caaggggggttcataagcagtaact

SEQ ID NO: 4012881 - DNA, 25 bp, Homo sapien
ccaggacgcagagaggatcgatccc

SEQ ID NO: 4012882 - DNA, 25 bp, Homo sapien
tcgaagtcaccaacgccccggtata

SEQ ID NO: 4012883 - DNA, 25 bp, Homo sapien
cttcagggctcacacactcagcggc

SEQ ID NO: 4012884 - DNA, 25 bp, Homo sapien
acgcgtgtccgctgggcggccgtgg

SEQ ID NO: 4012885 - DNA, 25 bp, Homo sapien
tggccgtgcgctccgcagacggtca

SEQ ID NO: 4012886 - DNA, 25 bp, Homo sapien
ggcacagcccggacgcgtgtccgct

SEQ ID NO: 4012887 - DNA, 25 bp, Homo sapien
ctgagaaatggtcagtgcactgccc

SEQ ID NO: 4012888 - DNA, 25 bp, Homo sapien
gagaaatggtcagtgcactgcccat

SEQ ID NO: 4012889 - DNA, 25 bp, Homo sapien
tgagaaatggtcagtgcactgccca

SEQ ID NO: 4012890 - DNA, 25 bp, Homo sapien
gcagtgtttcctgcggatgtggctc

SEQ ID NO: 4012891 - DNA, 25 bp, Homo sapien
ctctgagcccgtggtgagcttcccg

SEQ ID NO: 4012892 - DNA, 25 bp, Homo sapien
ccccgtgcgcgccacttttgaatcc

SEQ ID NO: 4012893 - DNA, 25 bp, Homo sapien
atcctgcaacgggtttgcctctgag

SEQ ID NO: 4012894 - DNA, 25 bp, Homo sapien
caaggcgtaattggttaatgcaggt

SEQ ID NO: 4012895 - DNA, 25 bp, Homo sapien
ggcgctcaaggcgtaattggttaat

SEQ ID NO: 4012896 - DNA, 25 bp, Homo sapien
agttcaggggcgctcaaggcgtaat

SEQ ID NO: 4012897 - DNA, 25 bp, Homo sapien
cgctcaaggcgtaattggttaatgc

SEQ ID NO: 4012898 - DNA, 25 bp, Homo sapien
tgtgttttacggctttttgagtctc

SEQ ID NO: 4012899 - DNA, 25 bp, Homo sapien
ctttgagctccaaggagcagtcttc

SEQ ID NO: 4012900 - DNA, 25 bp, Homo sapien
ccgcctccccgggatgaggaatggt

SEQ ID NO: 4012901 - DNA, 25 bp, Homo sapien
cttgaaaagacagcaactttgagct

SEQ ID NO: 4012902 - DNA, 25 bp, Homo sapien
cgccatgcctagactttgttttaaa

SEQ ID NO: 4012903 - DNA, 25 bp, Homo sapien
ccgccatgcctagactttgttttaa

SEQ ID NO: 4012904 - DNA, 25 bp, Homo sapien
atggtagctgccatcccataaaccc

SEQ ID NO: 4012905 - DNA, 25 bp, Homo sapien
ctgccatcccataaaccccagtgcg

SEQ ID NO: 4012906 - DNA, 25 bp, Homo sapien
tagctgccatcccataaaccccagt

SEQ ID NO: 4012907 - DNA, 25 bp, Homo sapien
tggtagctgccatcccataaacccc

SEQ ID NO: 4012908 - DNA, 25 bp, Homo sapien
gagctttattcgagttcagggcggt

SEQ ID NO: 4012909 - DNA, 25 bp, Homo sapien
gagcctgagctgattgactccgaga

SEQ ID NO: 4012910 - DNA, 25 bp, Homo sapien
taaaaataggcttagaggatcgatg

SEQ ID NO: 4012911 - DNA, 25 bp, Homo sapien
tcagggcggtaagcgtttctgcatc

SEQ ID NO: 4012912 - DNA, 25 bp, Homo sapien
ccataattggcataactgattttcc

SEQ ID NO: 4012913 - DNA, 25 bp, Homo sapien
tcctgcagatgagaagaggctagac

SEQ ID NO: 4012914 - DNA, 25 bp, Homo sapien
cccggcgttaggagcacgcctttct

SEQ ID NO: 4012915 - DNA, 25 bp, Homo sapien
gaggctagacgaggtccagacagct

SEQ ID NO: 4012916 - DNA, 25 bp, Homo sapien
tcttcccagggaccaacaggctctt

SEQ ID NO: 4012917 - DNA, 25 bp, Homo sapien
gcagctggatcatagaggaacgtgg

SEQ ID NO: 4012918 - DNA, 25 bp, Homo sapien
tccaacgagactgtttcttcccagg

SEQ ID NO: 4012919 - DNA, 25 bp, Homo sapien
ttagctttcagagaggatccaacga

SEQ ID NO: 4012920 - DNA, 25 bp, Homo sapien
atgccgtggttgagagatcctgttc

SEQ ID NO: 4012921 - DNA, 25 bp, Homo sapien
aaaattggtccagccctaagtgtca

SEQ ID NO: 4012922 - DNA, 25 bp, Homo sapien
tacagtgcaccaaacagctcctaaa

SEQ ID NO: 4012923 - DNA, 25 bp, Homo sapien
gtgctgctaaatgccctacagtgca

SEQ ID NO: 4012924 - DNA, 25 bp, Homo sapien
aggacttgggataatggagcctctc

SEQ ID NO: 4012925 - DNA, 25 bp, Homo sapien
gatggaggacttgggataatggagc

SEQ ID NO: 4012926 - DNA, 25 bp, Homo sapien
tgggataatggagcctctcgaaggc

SEQ ID NO: 4012927 - DNA, 25 bp, Homo sapien
gagcctctcgaaggctttggttgga

SEQ ID NO: 4012928 - DNA, 25 bp, Homo sapien
tgcaaggtttttggttcttcttctc

SEQ ID NO: 4012929 - DNA, 25 bp, Homo sapien
ctggggggcatttggaatatagcca

SEQ ID NO: 4012930 - DNA, 25 bp, Homo sapien
gggcatttggaatatagccaggaca

SEQ ID NO: 4012931 - DNA, 25 bp, Homo sapien
gaatatagccaggacatgtcctttc

SEQ ID NO: 4012932 - DNA, 25 bp, Homo sapien
atttggaatatagccaggacatgtc

SEQ ID NO: 4012933 - DNA, 25 bp, Homo sapien
gaacaggattaggtttactgcagcc

SEQ ID NO: 4012934 - DNA, 25 bp, Homo sapien
gattaggtttactgcagccacatag

SEQ ID NO: 4012935 - DNA, 25 bp, Homo sapien
caggattaggtttactgcagccaca

SEQ ID NO: 4012936 - DNA, 25 bp, Homo sapien
tcaattgaacaggattaggtttact

SEQ ID NO: 4012937 - DNA, 25 bp, Homo sapien
ttttaaaacgttatatctgctgtaa

SEQ ID NO: 4012938 - DNA, 25 bp, Homo sapien
tcactgtggctgctgagttggtgcc

SEQ ID NO: 4012939 - DNA, 25 bp, Homo sapien
ggtcagggggttgtgtcctccactc

SEQ ID NO: 4012940 - DNA, 25 bp, Homo sapien
cctctgaaaatgccaagcccttggt

SEQ ID NO: 4012941 - DNA, 25 bp, Homo sapien
ggctgctgagttggtgcctctgaaa

SEQ ID NO: 4012942 - DNA, 25 bp, Homo sapien
tgggggaatggttaccagcaataag

SEQ ID NO: 4012943 - DNA, 25 bp, Homo sapien
gggaatggttaccagcaataaggaa

SEQ ID NO: 4012944 - DNA, 25 bp, Homo sapien
gaatggttaccagcaataaggaaat

SEQ ID NO: 4012945 - DNA, 25 bp, Homo sapien
aatggttaccagcaataaggaaata

SEQ ID NO: 4012946 - DNA, 25 bp, Homo sapien
tcttcacaagacacaggtatccttc

SEQ ID NO: 4012947 - DNA, 25 bp, Homo sapien
caagcctcttcacaagacacaggta

SEQ ID NO: 4012948 - DNA, 25 bp, Homo sapien
gccaagcctcttcacaagacacagg

SEQ ID NO: 4012949 - DNA, 25 bp, Homo sapien
gcctcttcacaagacacaggtatcc

SEQ ID NO: 4012950 - DNA, 25 bp, Homo sapien
ttctaatagtagagttgcagacact

SEQ ID NO: 4012951 - DNA, 25 bp, Homo sapien
tggtggccgccagtgaacaatggct

SEQ ID NO: 4012952 - DNA, 25 bp, Homo sapien
gaacctggttggtgaggcttttata

SEQ ID NO: 4012953 - DNA, 25 bp, Homo sapien
gatgtactgtttgctcgtttgcctc

SEQ ID NO: 4012954 - DNA, 25 bp, Homo sapien
cagtcctgctggtggtctctcgctt

SEQ ID NO: 4012955 - DNA, 25 bp, Homo sapien
tgctggtggtctctcgcttggccag

SEQ ID NO: 4012956 - DNA, 25 bp, Homo sapien
tcctgctggtggtctctcgcttggc

SEQ ID NO: 4012957 - DNA, 25 bp, Homo sapien
agtcctgctggtggtctctcgcttg

SEQ ID NO: 4012958 - DNA, 25 bp, Homo sapien
tctgtttccacagcgggagcagcac

SEQ ID NO: 4012959 - DNA, 25 bp, Homo sapien
agctctgtttccacagcgggagcag

SEQ ID NO: 4012960 - DNA, 25 bp, Homo sapien
aagctctgtttccacagcgggagca

SEQ ID NO: 4012961 - DNA, 25 bp, Homo sapien
tcagccttgtgcaggaagctctgtt

SEQ ID NO: 4012962 - DNA, 25 bp, Homo sapien
ccccgaatgtgcacgctgcttgtgc

SEQ ID NO: 4012963 - DNA, 25 bp, Homo sapien
agcgctggaccgcaggtgttctgca

SEQ ID NO: 4012964 - DNA, 25 bp, Homo sapien
tgccaggactggctgtatctcgagc

SEQ ID NO: 4012965 - DNA, 25 bp, Homo sapien
tgcatgacagcctcgccgtcacgta

SEQ ID NO: 4012966 - DNA, 25 bp, Homo sapien
agagaggaaatgcaattagggctgt

SEQ ID NO: 4012967 - DNA, 25 bp, Homo sapien
tgtacagttggcagacttcatctcc

SEQ ID NO: 4012968 - DNA, 25 bp, Homo sapien
gaaatgcaattagggctgtacagtt

SEQ ID NO: 4012969 - DNA, 25 bp, Homo sapien
gtacagttggcagacttcatctcca

SEQ ID NO: 4012970 - DNA, 25 bp, Homo sapien
acacagctctttgagtcccagcctc

SEQ ID NO: 4012971 - DNA, 25 bp, Homo sapien
cacacagctctttgagtcccagcct

SEQ ID NO: 4012972 - DNA, 25 bp, Homo sapien
agctctttgagtcccagcctctgac

SEQ ID NO: 4012973 - DNA, 25 bp, Homo sapien
acagctctttgagtcccagcctctg

SEQ ID NO: 4012974 - DNA, 25 bp, Homo sapien
ggcatgtcggggctctgctccactc

SEQ ID NO: 4012975 - DNA, 25 bp, Homo sapien
tccactcgcctgcatgaaaagccag

SEQ ID NO: 4012976 - DNA, 25 bp, Homo sapien
agagctgatggacaaggctgctatc

SEQ ID NO: 4012977 - DNA, 25 bp, Homo sapien
aaagccagagctgatggacaaggct

SEQ ID NO: 4012978 - DNA, 25 bp, Homo sapien
gctgacaggagactctctgcacctt

SEQ ID NO: 4012979 - DNA, 25 bp, Homo sapien
caggagactctctgcaccttgcaag

SEQ ID NO: 4012980 - DNA, 25 bp, Homo sapien
tctctgcaccttgcaaggtgcacct

SEQ ID NO: 4012981 - DNA, 25 bp, Homo sapien
actctctgcaccttgcaaggtgcac

SEQ ID NO: 4012982 - DNA, 25 bp, Homo sapien
ggagatctgtccctcagtcagacga

SEQ ID NO: 4012983 - DNA, 25 bp, Homo sapien
tgggagatgggagatctgtccctca

SEQ ID NO: 4012984 - DNA, 25 bp, Homo sapien
tcagtcagacgacttccatgaactt

SEQ ID NO: 4012985 - DNA, 25 bp, Homo sapien
gtccctcagtcagacgacttccatg

SEQ ID NO: 4012986 - DNA, 25 bp, Homo sapien
aggatgatgacacaagctccaatgg

SEQ ID NO: 4012987 - DNA, 25 bp, Homo sapien
caggatgatgacacaagctccaatg

SEQ ID NO: 4012988 - DNA, 25 bp, Homo sapien
ggatgatgacacaagctccaatggc

SEQ ID NO: 4012989 - DNA, 25 bp, Homo sapien
tccagatgaggacgtgatgcacaga

SEQ ID NO: 4012990 - DNA, 25 bp, Homo sapien
aacaagatggcggtggtcttccccg

SEQ ID NO: 4012991 - DNA, 25 bp, Homo sapien
cagtccagatgttgggccaccagta

SEQ ID NO: 4012992 - DNA, 25 bp, Homo sapien
tagccacggagacgaaaattgctct

SEQ ID NO: 4012993 - DNA, 25 bp, Homo sapien
tggagagaagaaaaactggtttagc

SEQ ID NO: 4012994 - DNA, 25 bp, Homo sapien
ctgtggagagaagaaaaactggttt

SEQ ID NO: 4012995 - DNA, 25 bp, Homo sapien
tgtggagagaagaaaaactggttta

SEQ ID NO: 4012996 - DNA, 25 bp, Homo sapien
aatcaatgcttttgagggacaacct

SEQ ID NO: 4012997 - DNA, 25 bp, Homo sapien
tgcactcccatggaagtgaaaatga

SEQ ID NO: 4012998 - DNA, 25 bp, Homo sapien
ggacaacctcagcattacaaatagc

SEQ ID NO: 4012999 - DNA, 25 bp, Homo sapien
tattctaacacaaccatgagaggtg

SEQ ID NO: 4013000 - DNA, 25 bp, Homo sapien
agattttcccccaggcaacatcagg

SEQ ID NO: 4013001 - DNA, 25 bp, Homo sapien
ggcaacatcaggaacatgtaggaga

SEQ ID NO: 4013002 - DNA, 25 bp, Homo sapien
tacaggtagattttcccccaggcaa

SEQ ID NO: 4013003 - DNA, 25 bp, Homo sapien
aacatcaggaacatgtaggagatcc

SEQ ID NO: 4013004 - DNA, 25 bp, Homo sapien
caaatcctttctgtcaatggtgtcg

SEQ ID NO: 4013005 - DNA, 25 bp, Homo sapien
cctgtcaaactgatccaaggattcc

SEQ ID NO: 4013006 - DNA, 25 bp, Homo sapien
gaagtggctgagagaacaacacagg

SEQ ID NO: 4013007 - DNA, 25 bp, Homo sapien
cacaggttttgttgtcagaccacac

SEQ ID NO: 4013008 - DNA, 25 bp, Homo sapien
gctccaaggatggatttttaggaag

SEQ ID NO: 4013009 - DNA, 25 bp, Homo sapien
ttctgggaggtgctccaaggatgga

SEQ ID NO: 4013010 - DNA, 25 bp, Homo sapien
ggaggtgctccaaggatggattttt

SEQ ID NO: 4013011 - DNA, 25 bp, Homo sapien
ggtgctccaaggatggatttttagg

SEQ ID NO: 4013012 - DNA, 25 bp, Homo sapien
ccgaattgtatgatggggcactgcc

SEQ ID NO: 4013013 - DNA, 25 bp, Homo sapien
gaagtcagcaatgccgttgtttaga

SEQ ID NO: 4013014 - DNA, 25 bp, Homo sapien
tgccgttgtttagatcagctgaggg

SEQ ID NO: 4013015 - DNA, 25 bp, Homo sapien
ctcactgttacctgccccactctgg

SEQ ID NO: 4013016 - DNA, 25 bp, Homo sapien
aggaggttcggtgttgagtggtctc

SEQ ID NO: 4013017 - DNA, 25 bp, Homo sapien
ccaggaggttcggtgttgagtggtc

SEQ ID NO: 4013018 - DNA, 25 bp, Homo sapien
ctccaggaggttcggtgttgagtgg

SEQ ID NO: 4013019 - DNA, 25 bp, Homo sapien
gtctccaggaggttcggtgttgagt

SEQ ID NO: 4013020 - DNA, 25 bp, Homo sapien
tttccagtatcaggcactgacaggt

SEQ ID NO: 4013021 - DNA, 25 bp, Homo sapien
ttccagtatcaggcactgacaggtg

SEQ ID NO: 4013022 - DNA, 25 bp, Homo sapien
gtttccagtatcaggcactgacagg

SEQ ID NO: 4013023 - DNA, 25 bp, Homo sapien
acagcagaattggttctggcttttt

SEQ ID NO: 4013024 - DNA, 25 bp, Homo sapien
ctgtccttgattaaaaataatctca

SEQ ID NO: 4013025 - DNA, 25 bp, Homo sapien
aaataatctcaagtaattaaaacat

SEQ ID NO: 4013026 - DNA, 25 bp, Homo sapien
taatctcaagtaattaaaacatcta

SEQ ID NO: 4013027 - DNA, 25 bp, Homo sapien
aatctcaagtaattaaaacatctac

SEQ ID NO: 4013028 - DNA, 25 bp, Homo sapien
gatgatgtcgggagaatcttcaatc

SEQ ID NO: 4013029 - DNA, 25 bp, Homo sapien
gatgtcgggagaatcttcaatcagg

SEQ ID NO: 4013030 - DNA, 25 bp, Homo sapien
tgtcgggagaatcttcaatcaggaa

SEQ ID NO: 4013031 - DNA, 25 bp, Homo sapien
ggatgatgtcgggagaatcttcaat

SEQ ID NO: 4013032 - DNA, 25 bp, Homo sapien
catttctctgggctgtctatatttt

SEQ ID NO: 4013033 - DNA, 25 bp, Homo sapien
gattcgcccactgctacgactggga

SEQ ID NO: 4013034 - DNA, 25 bp, Homo sapien
ctaggtcattagcaggattcgccca

SEQ ID NO: 4013035 - DNA, 25 bp, Homo sapien
cagacgtccttggtgtctgagaaca

SEQ ID NO: 4013036 - DNA, 25 bp, Homo sapien
cagcaagaggctgtagtagaccacg

SEQ ID NO: 4013037 - DNA, 25 bp, Homo sapien
ctggtaaaccgaggcacagcaagag

SEQ ID NO: 4013038 - DNA, 25 bp, Homo sapien
acgggcacgaaacccaagccgcagg

SEQ ID NO: 4013039 - DNA, 25 bp, Homo sapien
ggggaccaccaagacagcgagctgt

SEQ ID NO: 4013040 - DNA, 25 bp, Homo sapien
ctgcgaggtgggcgtgcgtgtgctc

SEQ ID NO: 4013041 - DNA, 25 bp, Homo sapien
cgaggtgggcgtgcgtgtgctccat

SEQ ID NO: 4013042 - DNA, 25 bp, Homo sapien
gcgaggtgggcgtgcgtgtgctcca

SEQ ID NO: 4013043 - DNA, 25 bp, Homo sapien
tgcgaggtgggcgtgcgtgtgctcc

SEQ ID NO: 4013044 - DNA, 25 bp, Homo sapien
gcctcgcttggctccactttcaggg

SEQ ID NO: 4013045 - DNA, 25 bp, Homo sapien
gccaatcagcggctgcctggaagcg

SEQ ID NO: 4013046 - DNA, 25 bp, Homo sapien
tgcctggaagcggagtgtgtgtggg

SEQ ID NO: 4013047 - DNA, 25 bp, Homo sapien
agccgcctcgcttggctccactttc

SEQ ID NO: 4013048 - DNA, 25 bp, Homo sapien
gatgaaagaaatcaggtatgccttt

SEQ ID NO: 4013049 - DNA, 25 bp, Homo sapien
caggtatgcctttgtcccaggaatg

SEQ ID NO: 4013050 - DNA, 25 bp, Homo sapien
gaaagaaatcaggtatgcctttgtc

SEQ ID NO: 4013051 - DNA, 25 bp, Homo sapien
gaaatcaggtatgcctttgtcccag

SEQ ID NO: 4013052 - DNA, 25 bp, Homo sapien
cagttctttgaggtgcacgacaatt

SEQ ID NO: 4013053 - DNA, 25 bp, Homo sapien
ctttgaggtgcacgacaattcttac

SEQ ID NO: 4013054 - DNA, 25 bp, Homo sapien
gttctttgaggtgcacgacaattct

SEQ ID NO: 4013055 - DNA, 25 bp, Homo sapien
aacagttctttgaggtgcacgacaa

SEQ ID NO: 4013056 - DNA, 25 bp, Homo sapien
gtcactgacttttcaaggtggtcag

SEQ ID NO: 4013057 - DNA, 25 bp, Homo sapien
gagccttttgttgcttgtcactgac

SEQ ID NO: 4013058 - DNA, 25 bp, Homo sapien
cgagtttggatagagccttttgttg

SEQ ID NO: 4013059 - DNA, 25 bp, Homo sapien
gttgcttgtcactgacttttcaagg

SEQ ID NO: 4013060 - DNA, 25 bp, Homo sapien
tttccacaattgcttgcctgcctgc

SEQ ID NO: 4013061 - DNA, 25 bp, Homo sapien
ctgggtaaatttcatcaggatatga

SEQ ID NO: 4013062 - DNA, 25 bp, Homo sapien
tcgtagacgaagtgaaggaaatagg

SEQ ID NO: 4013063 - DNA, 25 bp, Homo sapien
tatgaagaatgatcgtagacgaagt

SEQ ID NO: 4013064 - DNA, 25 bp, Homo sapien
tcatcaggatatgaagaatgatcgt

SEQ ID NO: 4013065 - DNA, 25 bp, Homo sapien
gaatcctccctgcggggataaaaca

SEQ ID NO: 4013066 - DNA, 25 bp, Homo sapien
cagaatcctccctgcggggataaaa

SEQ ID NO: 4013067 - DNA, 25 bp, Homo sapien
gctggttccgccaagcagcaacgat

SEQ ID NO: 4013068 - DNA, 25 bp, Homo sapien
tcaatgtacagataaggctggttcc

SEQ ID NO: 4013069 - DNA, 25 bp, Homo sapien
caagcagcaacgatgacaaaagcag

SEQ ID NO: 4013070 - DNA, 25 bp, Homo sapien
caaaagcagaatagccaggaaggcc

SEQ ID NO: 4013071 - DNA, 25 bp, Homo sapien
tttcctccttcttgagggaccgctg

SEQ ID NO: 4013072 - DNA, 25 bp, Homo sapien
ttaaatctggtagcaacatctccat

SEQ ID NO: 4013073 - DNA, 25 bp, Homo sapien
ctggaggtttaaatctggtagcaac

SEQ ID NO: 4013074 - DNA, 25 bp, Homo sapien
gaggtttaaatctggtagcaacatc

SEQ ID NO: 4013075 - DNA, 25 bp, Homo sapien
gatttgccttcatgccccaggctga

SEQ ID NO: 4013076 - DNA, 25 bp, Homo sapien
agtgttcctcccaaatacattctga

SEQ ID NO: 4013077 - DNA, 25 bp, Homo sapien
ccaccgctttgtcccttatcagatg

SEQ ID NO: 4013078 - DNA, 25 bp, Homo sapien
gaactggttttataatggcaatgcc

SEQ ID NO: 4013079 - DNA, 25 bp, Homo sapien
actccccatgggcatcttataagaa

SEQ ID NO: 4013080 - DNA, 25 bp, Homo sapien
ggttcaattctactccccatgggca

SEQ ID NO: 4013081 - DNA, 25 bp, Homo sapien
gggttcaattctactccccatgggc

SEQ ID NO: 4013082 - DNA, 25 bp, Homo sapien
catcttataagaactccatggtcca

SEQ ID NO: 4013083 - DNA, 25 bp, Homo sapien
gtgtattttacgcttacagctgacc

SEQ ID NO: 4013084 - DNA, 25 bp, Homo sapien
tacgcttacagctgacctcaataaa

SEQ ID NO: 4013085 - DNA, 25 bp, Homo sapien
actcaataaacctaagatacattaa

SEQ ID NO: 4013086 - DNA, 25 bp, Homo sapien
cagctgacctcaataaagactaacc

SEQ ID NO: 4013087 - DNA, 25 bp, Homo sapien
tccaagcattgtaggaaagtcaagc

SEQ ID NO: 4013088 - DNA, 25 bp, Homo sapien
tcctgttgggcacaatgtgttcaca

SEQ ID NO: 4013089 - DNA, 25 bp, Homo sapien
gagtggcgggaacatcaaaatggaa

SEQ ID NO: 4013090 - DNA, 25 bp, Homo sapien
ccgacccctgcgatgtttatgagag

SEQ ID NO: 4013091 - DNA, 25 bp, Homo sapien
cactggagctgcgaggatgtgtaaa

SEQ ID NO: 4013092 - DNA, 25 bp, Homo sapien
cacgtttggccatgtgcactgagaa

SEQ ID NO: 4013093 - DNA, 25 bp, Homo sapien
tggagctgcgaggatgtgtaaattc

SEQ ID NO: 4013094 - DNA, 25 bp, Homo sapien
ggacagccacgtttggccatgtgca

SEQ ID NO: 4013095 - DNA, 25 bp, Homo sapien
accaggtggtacagcaccaagcctg

SEQ ID NO: 4013096 - DNA, 25 bp, Homo sapien
ccaagcctggtatttgtggagcagc

SEQ ID NO: 4013097 - DNA, 25 bp, Homo sapien
ccagattggatcaacagactcttcc

SEQ ID NO: 4013098 - DNA, 25 bp, Homo sapien
ccagatgatgtggtcaccaggtggt

SEQ ID NO: 4013099 - DNA, 25 bp, Homo sapien
taaaagcagtggtgtcattctcttc

SEQ ID NO: 4013100 - DNA, 25 bp, Homo sapien
gctatatcccctgcacctcaaagtg

SEQ ID NO: 4013101 - DNA, 25 bp, Homo sapien
tcataagagcaggaacttggtctgg

SEQ ID NO: 4013102 - DNA, 25 bp, Homo sapien
taaacgtctcaatcttagggttggc

SEQ ID NO: 4013103 - DNA, 25 bp, Homo sapien
cagagccttcgtccagagactgtgc

SEQ ID NO: 4013104 - DNA, 25 bp, Homo sapien
ctgattggaactgccggcacagtct

SEQ ID NO: 4013105 - DNA, 25 bp, Homo sapien
gccggcacagtctattatcctcaac

SEQ ID NO: 4013106 - DNA, 25 bp, Homo sapien
gctctaatgagaacatagctcagag

SEQ ID NO: 4013107 - DNA, 25 bp, Homo sapien
gctttcgtatatgcacaaaggattt

SEQ ID NO: 4013108 - DNA, 25 bp, Homo sapien
tatgcacaaaggatttcatacatgc

SEQ ID NO: 4013109 - DNA, 25 bp, Homo sapien
cgtatatgcacaaaggatttcatac

SEQ ID NO: 4013110 - DNA, 25 bp, Homo sapien
ctctgctttcgtatatgcacaaagg

SEQ ID NO: 4013111 - DNA, 25 bp, Homo sapien
cagtgcggaaaacggagccctggat

SEQ ID NO: 4013112 - DNA, 25 bp, Homo sapien
gataccttgtccagtggtcgttgag

SEQ ID NO: 4013113 - DNA, 25 bp, Homo sapien
acccctgtgcctatgctctgggcag

SEQ ID NO: 4013114 - DNA, 25 bp, Homo sapien
ccagtggtcgttgaggacactgaca

SEQ ID NO: 4013115 - DNA, 25 bp, Homo sapien
cctccactctggccgtagcaatcat

SEQ ID NO: 4013116 - DNA, 25 bp, Homo sapien
ttcctccactctggccgtagcaatc

SEQ ID NO: 4013117 - DNA, 25 bp, Homo sapien
tcctccactctggccgtagcaatca

SEQ ID NO: 4013118 - DNA, 25 bp, Homo sapien
aataacgccactgtctccaacgcgg

SEQ ID NO: 4013119 - DNA, 25 bp, Homo sapien
taagaactcatatcctggccagacg

SEQ ID NO: 4013120 - DNA, 25 bp, Homo sapien
agcatgctcaatggtggtctggcca

SEQ ID NO: 4013121 - DNA, 25 bp, Homo sapien
acatgggccctgttttgtggaacca

SEQ ID NO: 4013122 - DNA, 25 bp, Homo sapien
aatgcaaagagctgcagcatctcaa

SEQ ID NO: 4013123 - DNA, 25 bp, Homo sapien
atgcaaagagctgcagcatctcaac

SEQ ID NO: 4013124 - DNA, 25 bp, Homo sapien
ctcatagaacatgtcgaattttacc

SEQ ID NO: 4013125 - DNA, 25 bp, Homo sapien
aaagaggctgtatgctggagaggtc

SEQ ID NO: 4013126 - DNA, 25 bp, Homo sapien
gaacatgtcgaattttaccaggtaa

SEQ ID NO: 4013127 - DNA, 25 bp, Homo sapien
tctagctgctatgcatttgagctgc

SEQ ID NO: 4013128 - DNA, 25 bp, Homo sapien
taaactttaattgccttatatgtag

SEQ ID NO: 4013129 - DNA, 25 bp, Homo sapien
ctttaattgccttatatgtaggcat

SEQ ID NO: 4013130 - DNA, 25 bp, Homo sapien
tcataaactttaattgccttatatg

SEQ ID NO: 4013131 - DNA, 25 bp, Homo sapien
aactttaattgccttatatgtaggc

SEQ ID NO: 4013132 - DNA, 25 bp, Homo sapien
agagtccctaaagccacttggtgga

SEQ ID NO: 4013133 - DNA, 25 bp, Homo sapien
cattccagtcaaagacttgctgtgc

SEQ ID NO: 4013134 - DNA, 25 bp, Homo sapien
tccattccagtcaaagacttgctgt

SEQ ID NO: 4013135 - DNA, 25 bp, Homo sapien
agccacttggtggacaggtccttcc

SEQ ID NO: 4013136 - DNA, 25 bp, Homo sapien
cctgctgccatgatgatgtattaga

SEQ ID NO: 4013137 - DNA, 25 bp, Homo sapien
gcctgctgccatgatgatgtattag

SEQ ID NO: 4013138 - DNA, 25 bp, Homo sapien
tgcctgctgccatgatgatgtatta

SEQ ID NO: 4013139 - DNA, 25 bp, Homo sapien
tgctgccatgatgatgtattagaat

SEQ ID NO: 4013140 - DNA, 25 bp, Homo sapien
taactgactccttccccttgagagt

SEQ ID NO: 4013141 - DNA, 25 bp, Homo sapien
cttgagagtccagggccataaggtc

SEQ ID NO: 4013142 - DNA, 25 bp, Homo sapien
ccaggcttgatctgaatccttcagc

SEQ ID NO: 4013143 - DNA, 25 bp, Homo sapien
ctcttggcgctggtaactgactcct

SEQ ID NO: 4013144 - DNA, 25 bp, Homo sapien
caacagcttggtgttaccagggaaa

SEQ ID NO: 4013145 - DNA, 25 bp, Homo sapien
tggatgggtagcaactcagttccca

SEQ ID NO: 4013146 - DNA, 25 bp, Homo sapien
catggatgggtagcaactcagttcc

SEQ ID NO: 4013147 - DNA, 25 bp, Homo sapien
atggatgggtagcaactcagttccc

SEQ ID NO: 4013148 - DNA, 25 bp, Homo sapien
ctgatccagcggcatgaagaagcta

SEQ ID NO: 4013149 - DNA, 25 bp, Homo sapien
gatccagcggcatgaagaagctaac

SEQ ID NO: 4013150 - DNA, 25 bp, Homo sapien
ggctgctgatccagcggcatgaaga

SEQ ID NO: 4013151 - DNA, 25 bp, Homo sapien
ccagcggcatgaagaagctaacaca

SEQ ID NO: 4013152 - DNA, 25 bp, Homo sapien
aagcagcttccaaattcttcctgca

SEQ ID NO: 4013153 - DNA, 25 bp, Homo sapien
caagcagcttccaaattcttcctgc

SEQ ID NO: 4013154 - DNA, 25 bp, Homo sapien
agcagcttccaaattcttcctgcat

SEQ ID NO: 4013155 - DNA, 25 bp, Homo sapien
cactggacagtatgcttcctgagga

SEQ ID NO: 4013156 - DNA, 25 bp, Homo sapien
ctgaggacaggacatgaggatgctt

SEQ ID NO: 4013157 - DNA, 25 bp, Homo sapien
gatgctttggtcgatgtcttcctca

SEQ ID NO: 4013158 - DNA, 25 bp, Homo sapien
catgtggtccttgcagcaaagagtc

SEQ ID NO: 4013159 - DNA, 25 bp, Homo sapien
ctcctccttgaagcgttcagttgcc

SEQ ID NO: 4013160 - DNA, 25 bp, Homo sapien
cctccttgaagcgttcagttgcctc

SEQ ID NO: 4013161 - DNA, 25 bp, Homo sapien
cagttgcctcccccacctccttcat

SEQ ID NO: 4013162 - DNA, 25 bp, Homo sapien
tccttgaagcgttcagttgcctccc

SEQ ID NO: 4013163 - DNA, 25 bp, Homo sapien
ttttagtatgatccgacccagttgt

SEQ ID NO: 4013164 - DNA, 25 bp, Homo sapien
tgtagcagaggaatattatctcctt

SEQ ID NO: 4013165 - DNA, 25 bp, Homo sapien
tctgcgtcatctaatacaagattca

SEQ ID NO: 4013166 - DNA, 25 bp, Homo sapien
cactttgtagcagaggaatattatc

SEQ ID NO: 4013167 - DNA, 25 bp, Homo sapien
ggcagtaccataaccctctgcactc

SEQ ID NO: 4013168 - DNA, 25 bp, Homo sapien
aaccctctgcactctctggtcctgg

SEQ ID NO: 4013169 - DNA, 25 bp, Homo sapien
agtaccataaccctctgcactctct

SEQ ID NO: 4013170 - DNA, 25 bp, Homo sapien
cataaccctctgcactctctggtcc

SEQ ID NO: 4013171 - DNA, 25 bp, Homo sapien
caatcttcttagcttctagacccat

SEQ ID NO: 4013172 - DNA, 25 bp, Homo sapien
tccacaatcttcttagcttctagac

SEQ ID NO: 4013173 - DNA, 25 bp, Homo sapien
tcttcttagcttctagacccatttt

SEQ ID NO: 4013174 - DNA, 25 bp, Homo sapien
cacaatcttcttagcttctagaccc

SEQ ID NO: 4013175 - DNA, 25 bp, Homo sapien
gacatcagagcttttggtccacagg

SEQ ID NO: 4013176 - DNA, 25 bp, Homo sapien
ggatagagtgaaggagatcaccctt

SEQ ID NO: 4013177 - DNA, 25 bp, Homo sapien
cacccttattaatgtggataggcct

SEQ ID NO: 4013178 - DNA, 25 bp, Homo sapien
gataggccttatcccatctgtggag

SEQ ID NO: 4013179 - DNA, 25 bp, Homo sapien
agggcattcgttttgcctgctcagc

SEQ ID NO: 4013180 - DNA, 25 bp, Homo sapien
cagcctcccagggaagatcatgtgc

SEQ ID NO: 4013181 - DNA, 25 bp, Homo sapien
tcactccgaagtgctgtccctcagc

SEQ ID NO: 4013182 - DNA, 25 bp, Homo sapien
tgtgctccacaccagtaggggcagc

SEQ ID NO: 4013183 - DNA, 25 bp, Homo sapien
cagggaagatcatgtgctccacacc

SEQ ID NO: 4013184 - DNA, 25 bp, Homo sapien
tacaaacaatgcgtatgagcggaca

SEQ ID NO: 4013185 - DNA, 25 bp, Homo sapien
tctggaaccataacgactctcatgg

SEQ ID NO: 4013186 - DNA, 25 bp, Homo sapien
ggatgtggagctccaagagactggc

SEQ ID NO: 4013187 - DNA, 25 bp, Homo sapien
tcatggcctcattgactcctacaaa

SEQ ID NO: 4013188 - DNA, 25 bp, Homo sapien
gcagctgctattagtgttcagacat

SEQ ID NO: 4013189 - DNA, 25 bp, Homo sapien
gctgctattagtgttcagacattct

SEQ ID NO: 4013190 - DNA, 25 bp, Homo sapien
cagcagctgctattagtgttcagac

SEQ ID NO: 4013191 - DNA, 25 bp, Homo sapien
gtccagcagctgctattagtgttca

SEQ ID NO: 4013192 - DNA, 25 bp, Homo sapien
aggaagattcagacatcagtcacct

SEQ ID NO: 4013193 - DNA, 25 bp, Homo sapien
gagccaggataaggaagattcagac

SEQ ID NO: 4013194 - DNA, 25 bp, Homo sapien
taaggaagattcagacatcagtcac

SEQ ID NO: 4013195 - DNA, 25 bp, Homo sapien
agattcagacatcagtcaccttgga

SEQ ID NO: 4013196 - DNA, 25 bp, Homo sapien
aaagtgttattccatgtgctgagcg

SEQ ID NO: 4013197 - DNA, 25 bp, Homo sapien
gctacccattgttaagccttagagt

SEQ ID NO: 4013198 - DNA, 25 bp, Homo sapien
tgaatgcttctctgggcctaataat

SEQ ID NO: 4013199 - DNA, 25 bp, Homo sapien
gactgatacaaagttctgccgcgga

SEQ ID NO: 4013200 - DNA, 25 bp, Homo sapien
atagtagagatggggattcaccatg

SEQ ID NO: 4013201 - DNA, 25 bp, Homo sapien
ctcgaactcctgaccaggtgtcagg

SEQ ID NO: 4013202 - DNA, 25 bp, Homo sapien
tatagtagagatggggattcaccat

SEQ ID NO: 4013203 - DNA, 25 bp, Homo sapien
ctgaccaggtgtcaggtgatccacc

SEQ ID NO: 4013204 - DNA, 25 bp, Homo sapien
tgcaaagtgactacacaaagtgacc

SEQ ID NO: 4013205 - DNA, 25 bp, Homo sapien
cagtccaagtcctggttcttagaga

SEQ ID NO: 4013206 - DNA, 25 bp, Homo sapien
gttattagggcagctactactctca

SEQ ID NO: 4013207 - DNA, 25 bp, Homo sapien
ggatccagatcctgtgtcttgtagg

SEQ ID NO: 4013208 - DNA, 25 bp, Homo sapien
ttaacatcagctaacagcataggag

SEQ ID NO: 4013209 - DNA, 25 bp, Homo sapien
gagcccagaattcctatttcacatt

SEQ ID NO: 4013210 - DNA, 25 bp, Homo sapien
cacagaaggtgagacctaagggaaa

SEQ ID NO: 4013211 - DNA, 25 bp, Homo sapien
cataggagtaaatgcctggtacaga

SEQ ID NO: 4013212 - DNA, 25 bp, Homo sapien
cagcaggatgatagaggaggtcaaa

SEQ ID NO: 4013213 - DNA, 25 bp, Homo sapien
aacaatttcagatgcagacgctaca

SEQ ID NO: 4013214 - DNA, 25 bp, Homo sapien
gaaaatgatgaagtccttgtcctca

SEQ ID NO: 4013215 - DNA, 25 bp, Homo sapien
tgaccaataatgtttgaaaatgatg

SEQ ID NO: 4013216 - DNA, 25 bp, Homo sapien
ggatccagatcctgtgtctcgtagg

SEQ ID NO: 4013217 - DNA, 25 bp, Homo sapien
cctgggtatggaagactagtcttca

SEQ ID NO: 4013218 - DNA, 25 bp, Homo sapien
tggaatttatcttgccccagagccc

SEQ ID NO: 4013219 - DNA, 25 bp, Homo sapien
ccagagcccagctgaacagcactgg

SEQ ID NO: 4013220 - DNA, 25 bp, Homo sapien
tggacccgggacataaaaactgcta

SEQ ID NO: 4013221 - DNA, 25 bp, Homo sapien
gatagacgcctctgggtatacaggc

SEQ ID NO: 4013222 - DNA, 25 bp, Homo sapien
attaattattgtacccaggcccttg

SEQ ID NO: 4013223 - DNA, 25 bp, Homo sapien
tctgccaggattgggaacattccta

SEQ ID NO: 4013224 - DNA, 25 bp, Homo sapien
ctgtttacagtgagaggtactccct

SEQ ID NO: 4013225 - DNA, 25 bp, Homo sapien
tgaacaaggcagcacattggaacgt

SEQ ID NO: 4013226 - DNA, 25 bp, Homo sapien
tcctccaagcagatacacaggctcg

SEQ ID NO: 4013227 - DNA, 25 bp, Homo sapien
ccaactttgcgaggccttatctgta

SEQ ID NO: 4013228 - DNA, 25 bp, Homo sapien
ctccatgctcatcccataccccagt

SEQ ID NO: 4013229 - DNA, 25 bp, Homo sapien
gctcatcccataccccagtgacagg

SEQ ID NO: 4013230 - DNA, 25 bp, Homo sapien
ttaggaaggaatcgtggctggtgcc

SEQ ID NO: 4013231 - DNA, 25 bp, Homo sapien
aggaaggaatcgtggctggtgcctc

SEQ ID NO: 4013232 - DNA, 25 bp, Homo sapien
tggagccacagagggcacctagcaa

SEQ ID NO: 4013233 - DNA, 25 bp, Homo sapien
cacttccggtaaaggctggagccac

SEQ ID NO: 4013234 - DNA, 25 bp, Homo sapien
tctattaataccaagcctgtgtgaa

SEQ ID NO: 4013235 - DNA, 25 bp, Homo sapien
tgacagaaaccccactatgttgctt

SEQ ID NO: 4013236 - DNA, 25 bp, Homo sapien
tcagaacagccaagccaggaggaca

SEQ ID NO: 4013237 - DNA, 25 bp, Homo sapien
aacagccaagccaggaggacagtca

SEQ ID NO: 4013238 - DNA, 25 bp, Homo sapien
aggacagtcaggaggaccataggcc

SEQ ID NO: 4013239 - DNA, 25 bp, Homo sapien
gtcaggaggaccataggccaggcca

SEQ ID NO: 4013240 - DNA, 25 bp, Homo sapien
tttagtgggaaacaatactgtcgtc

SEQ ID NO: 4013241 - DNA, 25 bp, Homo sapien
taacgactacatggagcagaactgc

SEQ ID NO: 4013242 - DNA, 25 bp, Homo sapien
agtcaggagcaaacataagttggcc

SEQ ID NO: 4013243 - DNA, 25 bp, Homo sapien
gatgcagaggatccaagataggact

SEQ ID NO: 4013244 - DNA, 25 bp, Homo sapien
ggcctaagctgcttttagaatgagc

SEQ ID NO: 4013245 - DNA, 25 bp, Homo sapien
taaccactcctctcaatgagcgtga

SEQ ID NO: 4013246 - DNA, 25 bp, Homo sapien
gtccatcttggacttatttgggaaa

SEQ ID NO: 4013247 - DNA, 25 bp, Homo sapien
tgctagcacggaacatagagagtcc

SEQ ID NO: 4013248 - DNA, 25 bp, Homo sapien
tgtccctagcatagggtctgggcca

SEQ ID NO: 4013249 - DNA, 25 bp, Homo sapien
tgccccgctagccttggacagcttg

SEQ ID NO: 4013250 - DNA, 25 bp, Homo sapien
gacagctttatggtgctgccccgct

SEQ ID NO: 4013251 - DNA, 25 bp, Homo sapien
taagctctatgagggtaggcacctg

SEQ ID NO: 4013252 - DNA, 25 bp, Homo sapien
taggggttccattcatgacaccggg

SEQ ID NO: 4013253 - DNA, 25 bp, Homo sapien
ccattcatgacaccgggagactgtg

SEQ ID NO: 4013254 - DNA, 25 bp, Homo sapien
gcagtgctaggggttccattcatga

SEQ ID NO: 4013255 - DNA, 25 bp, Homo sapien
gggttccattcatgacaccgggaga

SEQ ID NO: 4013256 - DNA, 25 bp, Homo sapien
gcagagcctacttcatgagacagcc

SEQ ID NO: 4013257 - DNA, 25 bp, Homo sapien
aagttaccctgtgatgccacctgag

SEQ ID NO: 4013258 - DNA, 25 bp, Homo sapien
cctgctgtgagccttcaaagtgatc

SEQ ID NO: 4013259 - DNA, 25 bp, Homo sapien
gccacctgaggcttcaagttgagag

SEQ ID NO: 4013260 - DNA, 25 bp, Homo sapien
tgatgggccccaaatctagaacccg

SEQ ID NO: 4013261 - DNA, 25 bp, Homo sapien
ggtcgatggccggtacttcactgcg

SEQ ID NO: 4013262 - DNA, 25 bp, Homo sapien
tagaacccgggctaggtcgatggcc

SEQ ID NO: 4013263 - DNA, 25 bp, Homo sapien
actgcggacttgacttcttgagcaa

SEQ ID NO: 4013264 - DNA, 25 bp, Homo sapien
tatggccctaattccgatgctgtgg

SEQ ID NO: 4013265 - DNA, 25 bp, Homo sapien
tattcacaggcagttccaaatgcag

SEQ ID NO: 4013266 - DNA, 25 bp, Homo sapien
cagaactggttcacgctatggccct

SEQ ID NO: 4013267 - DNA, 25 bp, Homo sapien
tatctagactgctcctacaatgggc

SEQ ID NO: 4013268 - DNA, 25 bp, Homo sapien
gctggcactgttcattaagagaatc

SEQ ID NO: 4013269 - DNA, 25 bp, Homo sapien
aggctggcactgttcattaagagaa

SEQ ID NO: 4013270 - DNA, 25 bp, Homo sapien
ggcactgttcattaagagaatcaca

SEQ ID NO: 4013271 - DNA, 25 bp, Homo sapien
agagaatcacagagatgaatctcac

SEQ ID NO: 4013272 - DNA, 25 bp, Homo sapien
gagaaccggctttccgaggactgcc

SEQ ID NO: 4013273 - DNA, 25 bp, Homo sapien
tgtccagcaaacatgaacatctgaa

SEQ ID NO: 4013274 - DNA, 25 bp, Homo sapien
tcctccacgtggatggtggaatcac

SEQ ID NO: 4013275 - DNA, 25 bp, Homo sapien
gaaaactaggtcataatgtccagca

SEQ ID NO: 4013276 - DNA, 25 bp, Homo sapien
ggagggtgacaggggcaaaggtgta

SEQ ID NO: 4013277 - DNA, 25 bp, Homo sapien
ctgggagggtgacaggggcaaaggt

SEQ ID NO: 4013278 - DNA, 25 bp, Homo sapien
gagggtgacaggggcaaaggtgtaa

SEQ ID NO: 4013279 - DNA, 25 bp, Homo sapien
tgggagggtgacaggggcaaaggtg

SEQ ID NO: 4013280 - DNA, 25 bp, Homo sapien
gttcaactgcatccccttcgtaagg

SEQ ID NO: 4013281 - DNA, 25 bp, Homo sapien
cagcacggactcaacagacagttca

SEQ ID NO: 4013282 - DNA, 25 bp, Homo sapien
gaggtgtccccttgttccaagatgg

SEQ ID NO: 4013283 - DNA, 25 bp, Homo sapien
ggcatagcagttcctcaacaccagg

SEQ ID NO: 4013284 - DNA, 25 bp, Homo sapien
gaaatcattgaccaaggagagggtg

SEQ ID NO: 4013285 - DNA, 25 bp, Homo sapien
ttgtagatggcatgggtttgatttc

SEQ ID NO: 4013286 - DNA, 25 bp, Homo sapien
tggaggctgactttcatgtccagtg

SEQ ID NO: 4013287 - DNA, 25 bp, Homo sapien
aagttgatgttgaggatggtgtctc

SEQ ID NO: 4013288 - DNA, 25 bp, Homo sapien
gagtcaggaaccaacaagcttgctt

SEQ ID NO: 4013289 - DNA, 25 bp, Homo sapien
tactgacactttatgggaaggcgaa

SEQ ID NO: 4013290 - DNA, 25 bp, Homo sapien
tctttatgtaaaccaacttgtgcac

SEQ ID NO: 4013291 - DNA, 25 bp, Homo sapien
tatgataggtcccatcagcccaaca

SEQ ID NO: 4013292 - DNA, 25 bp, Homo sapien
tccctgggcccacagtctagctgag

SEQ ID NO: 4013293 - DNA, 25 bp, Homo sapien
tcgcaggtaggcaatgacctcctcc

SEQ ID NO: 4013294 - DNA, 25 bp, Homo sapien
tttgggtctcgcaggtaggcaatga

SEQ ID NO: 4013295 - DNA, 25 bp, Homo sapien
aggcctcccagcaaacatttgtcca

SEQ ID NO: 4013296 - DNA, 25 bp, Homo sapien
gacttggcccatgaggatttcttgg

SEQ ID NO: 4013297 - DNA, 25 bp, Homo sapien
gacagaagtatgtacagatgcaggg

SEQ ID NO: 4013298 - DNA, 25 bp, Homo sapien
aagtgaacgcatcccaggctaaggg

SEQ ID NO: 4013299 - DNA, 25 bp, Homo sapien
gcaagtcagtaaagcaagtgaacgc

SEQ ID NO: 4013300 - DNA, 25 bp, Homo sapien
gaaattcatcacctcctgagcctgc

SEQ ID NO: 4013301 - DNA, 25 bp, Homo sapien
caaaggcccttgttagagttcagtg

SEQ ID NO: 4013302 - DNA, 25 bp, Homo sapien
gacagtagtgacttgtccccagaag

SEQ ID NO: 4013303 - DNA, 25 bp, Homo sapien
tctgcttgcttacctcctgggacga

SEQ ID NO: 4013304 - DNA, 25 bp, Homo sapien
aggtgctgttgagggcaaggcactc

SEQ ID NO: 4013305 - DNA, 25 bp, Homo sapien
gctgttgagggcaaggcactcctcc

SEQ ID NO: 4013306 - DNA, 25 bp, Homo sapien
agaactattgaggtcctgtctgcag

SEQ ID NO: 4013307 - DNA, 25 bp, Homo sapien
cagaactattgaggtcctgtctgca

SEQ ID NO: 4013308 - DNA, 25 bp, Homo sapien
cagtccaatgggataagtgagagcc

SEQ ID NO: 4013309 - DNA, 25 bp, Homo sapien
gatacttagtggaagcatcaagcct

SEQ ID NO: 4013310 - DNA, 25 bp, Homo sapien
tctgtgatactaggagagcccctta

SEQ ID NO: 4013311 - DNA, 25 bp, Homo sapien
ggcaagactctattctaaggacaag

SEQ ID NO: 4013312 - DNA, 25 bp, Homo sapien
tgtgagcattatgtattagctgtta

SEQ ID NO: 4013313 - DNA, 25 bp, Homo sapien
gcaacaaggacattgtgagcattat

SEQ ID NO: 4013314 - DNA, 25 bp, Homo sapien
gtacttaggatagcaacaaggacat

SEQ ID NO: 4013315 - DNA, 25 bp, Homo sapien
gatagcaacaaggacattgtgagca

SEQ ID NO: 4013316 - DNA, 25 bp, Homo sapien
tgcttcggaagggttcatccaggag

SEQ ID NO: 4013317 - DNA, 25 bp, Homo sapien
ggtacacatggtacccgcctgggca

SEQ ID NO: 4013318 - DNA, 25 bp, Homo sapien
tcagccacatgggagcgtctgtctg

SEQ ID NO: 4013319 - DNA, 25 bp, Homo sapien
tcagattacaccagggagtgccttc

SEQ ID NO: 4013320 - DNA, 25 bp, Homo sapien
cagcccatacgaactggcttcaatg

SEQ ID NO: 4013321 - DNA, 25 bp, Homo sapien
aggtccagcccatacgaactggctt

SEQ ID NO: 4013322 - DNA, 25 bp, Homo sapien
gcccatacgaactggcttcaatggg

SEQ ID NO: 4013323 - DNA, 25 bp, Homo sapien
tccagcccatacgaactggcttcaa

SEQ ID NO: 4013324 - DNA, 25 bp, Homo sapien
aaagtggtctccaggcattgccaaa

SEQ ID NO: 4013325 - DNA, 25 bp, Homo sapien
tttacaggcattgaggacatcaggg

SEQ ID NO: 4013326 - DNA, 25 bp, Homo sapien
tattttggctgtgctaaggactcca

SEQ ID NO: 4013327 - DNA, 25 bp, Homo sapien
gctaggtcattcttcactggaggag

SEQ ID NO: 4013328 - DNA, 25 bp, Homo sapien
tttgcctgtcctattattgacttaa

SEQ ID NO: 4013329 - DNA, 25 bp, Homo sapien
gtttgcctgtcctattattgactta

SEQ ID NO: 4013330 - DNA, 25 bp, Homo sapien
tgtttgcctgtcctattattgactt

SEQ ID NO: 4013331 - DNA, 25 bp, Homo sapien
ttgcctgtcctattattgacttaaa

SEQ ID NO: 4013332 - DNA, 25 bp, Homo sapien
tggaggcctccaatgagctcagtac

SEQ ID NO: 4013333 - DNA, 25 bp, Homo sapien
tgtgtaaaatgccaagcacagcacc

SEQ ID NO: 4013334 - DNA, 25 bp, Homo sapien
cagcaccagggtcaagctaattgtc

SEQ ID NO: 4013335 - DNA, 25 bp, Homo sapien
cctgaagaaggagctaagtgcacac

SEQ ID NO: 4013336 - DNA, 25 bp, Homo sapien
tctgcaagtatctgaattgcccact

SEQ ID NO: 4013337 - DNA, 25 bp, Homo sapien
gaaatttgcactctaattctaagcc

SEQ ID NO: 4013338 - DNA, 25 bp, Homo sapien
ggctgaaatttgcactctaattcta

SEQ ID NO: 4013339 - DNA, 25 bp, Homo sapien
tgcccacttcataaagagatcactt

SEQ ID NO: 4013340 - DNA, 25 bp, Homo sapien
ttcaggaaaaggagaaggcacttgc

SEQ ID NO: 4013341 - DNA, 25 bp, Homo sapien
ctttcaggaaaaggagaaggcactt

SEQ ID NO: 4013342 - DNA, 25 bp, Homo sapien
tcaggaaaaggagaaggcacttgcc

SEQ ID NO: 4013343 - DNA, 25 bp, Homo sapien
aggaaaaggagaaggcacttgccag

SEQ ID NO: 4013344 - DNA, 25 bp, Homo sapien
ctcacttgctaggtcttccttgaca

SEQ ID NO: 4013345 - DNA, 25 bp, Homo sapien
tctatcctcacttgctaggtcttcc

SEQ ID NO: 4013346 - DNA, 25 bp, Homo sapien
tcctcacttgctaggtcttccttga

SEQ ID NO: 4013347 - DNA, 25 bp, Homo sapien
acttgctaggtcttccttgacatct

SEQ ID NO: 4013348 - DNA, 25 bp, Homo sapien
gtcagaatgcaggagaccaaggcca

SEQ ID NO: 4013349 - DNA, 25 bp, Homo sapien
actgcagatgcctgggtcagaatgc

SEQ ID NO: 4013350 - DNA, 25 bp, Homo sapien
ctcgctgcactgcagatgcctgggt

SEQ ID NO: 4013351 - DNA, 25 bp, Homo sapien
agaccaaggccagccacaggaggcc

SEQ ID NO: 4013352 - DNA, 25 bp, Homo sapien
tgctgtatgcagacttcccatgcag

SEQ ID NO: 4013353 - DNA, 25 bp, Homo sapien
actttgctgtatgcagacttcccat

SEQ ID NO: 4013354 - DNA, 25 bp, Homo sapien
ctttgctgtatgcagacttcccatg

SEQ ID NO: 4013355 - DNA, 25 bp, Homo sapien
tttgctgtatgcagacttcccatgc

SEQ ID NO: 4013356 - DNA, 25 bp, Homo sapien
tcctggggcttaaagcaggacttac

SEQ ID NO: 4013357 - DNA, 25 bp, Homo sapien
ttcccaggattaggaggaagcctcc

SEQ ID NO: 4013358 - DNA, 25 bp, Homo sapien
ccaggattaggaggaagcctcctgg

SEQ ID NO: 4013359 - DNA, 25 bp, Homo sapien
cctcctggggcttaaagcaggactt

SEQ ID NO: 4013360 - DNA, 25 bp, Homo sapien
gatgagaacacaaagcgttcctcct

SEQ ID NO: 4013361 - DNA, 25 bp, Homo sapien
ctccgatgagaacacaaagcgttcc

SEQ ID NO: 4013362 - DNA, 25 bp, Homo sapien
cgatgagaacacaaagcgttcctcc

SEQ ID NO: 4013363 - DNA, 25 bp, Homo sapien
tccgatgagaacacaaagcgttcct

SEQ ID NO: 4013364 - DNA, 25 bp, Homo sapien
ggctcactgcagccttgatctcctg

SEQ ID NO: 4013365 - DNA, 25 bp, Homo sapien
cctcctgaatagctgggactacagt

SEQ ID NO: 4013366 - DNA, 25 bp, Homo sapien
gctacagtgcagtcacgtgatcata

SEQ ID NO: 4013367 - DNA, 25 bp, Homo sapien
ggctcaaataatcctcccacctcag

SEQ ID NO: 4013368 - DNA, 25 bp, Homo sapien
gaggcccttgacttaagacacactg

SEQ ID NO: 4013369 - DNA, 25 bp, Homo sapien
tgcatgtctgtgtgataagaggccc

SEQ ID NO: 4013370 - DNA, 25 bp, Homo sapien
gggatcagcccatagtcttcctcca

SEQ ID NO: 4013371 - DNA, 25 bp, Homo sapien
caagcacagatggatgtgtacgcca

SEQ ID NO: 4013372 - DNA, 25 bp, Homo sapien
gcagacagttcccatcgaaattggc

SEQ ID NO: 4013373 - DNA, 25 bp, Homo sapien
ggctttcttctaaccacttggcgca

SEQ ID NO: 4013374 - DNA, 25 bp, Homo sapien
tttccctgggatcagaaagttctaa

SEQ ID NO: 4013375 - DNA, 25 bp, Homo sapien
taatgtactaaggagggccttggcc

SEQ ID NO: 4013376 - DNA, 25 bp, Homo sapien
gggaatcttctggattgtgagggag

SEQ ID NO: 4013377 - DNA, 25 bp, Homo sapien
tctcttctccactgttgatgtatcc

SEQ ID NO: 4013378 - DNA, 25 bp, Homo sapien
agatgttcaatgattggagggagtc

SEQ ID NO: 4013379 - DNA, 25 bp, Homo sapien
gatgtatccctggaagttggttttc

SEQ ID NO: 4013380 - DNA, 25 bp, Homo sapien
gaatggatgacttcaaagactgaga

SEQ ID NO: 4013381 - DNA, 25 bp, Homo sapien
catagtgcctacatggtagagttca

SEQ ID NO: 4013382 - DNA, 25 bp, Homo sapien
gggcctcaggtacaccgtcacaagt

SEQ ID NO: 4013383 - DNA, 25 bp, Homo sapien
taggatccttagcaccatacatagt

SEQ ID NO: 4013384 - DNA, 25 bp, Homo sapien
gtcaaggtggccgagagaagcagag

SEQ ID NO: 4013385 - DNA, 25 bp, Homo sapien
tcaaggtggccgagagaagcagagg

SEQ ID NO: 4013386 - DNA, 25 bp, Homo sapien
caaggtggccgagagaagcagaggc

SEQ ID NO: 4013387 - DNA, 25 bp, Homo sapien
gggtcaaggtggccgagagaagcag

SEQ ID NO: 4013388 - DNA, 25 bp, Homo sapien
acagtgacagggcaactgctagtac

SEQ ID NO: 4013389 - DNA, 25 bp, Homo sapien
agggcaactgctagtactgctgtac

SEQ ID NO: 4013390 - DNA, 25 bp, Homo sapien
tgtgcaaattaacataagctgcctc

SEQ ID NO: 4013391 - DNA, 25 bp, Homo sapien
ttgtgcaaattaacataagctgcct

SEQ ID NO: 4013392 - DNA, 25 bp, Homo sapien
gctaaaagcccttgagactgtggcc

SEQ ID NO: 4013393 - DNA, 25 bp, Homo sapien
tgctaaaagcccttgagactgtggc

SEQ ID NO: 4013394 - DNA, 25 bp, Homo sapien
ctaaaagcccttgagactgtggcct

SEQ ID NO: 4013395 - DNA, 25 bp, Homo sapien
ctgctaaaagcccttgagactgtgg

SEQ ID NO: 4013396 - DNA, 25 bp, Homo sapien
gatctatgacactcccacttcggaa

SEQ ID NO: 4013397 - DNA, 25 bp, Homo sapien
gatgggacccaagttcaggacacgg

SEQ ID NO: 4013398 - DNA, 25 bp, Homo sapien
cccacttcggaatctggtcccagag

SEQ ID NO: 4013399 - DNA, 25 bp, Homo sapien
gacacgggattgatctatgacactc

SEQ ID NO: 4013400 - DNA, 25 bp, Homo sapien
atctggacggaaaatcggccctggg

SEQ ID NO: 4013401 - DNA, 25 bp, Homo sapien
taggtcatagtttccagcaaaccgg

SEQ ID NO: 4013402 - DNA, 25 bp, Homo sapien
catggtgtcacagagatagacttca

SEQ ID NO: 4013403 - DNA, 25 bp, Homo sapien
cacagtgcaggtagactaggtcata

SEQ ID NO: 4013404 - DNA, 25 bp, Homo sapien
tagaacaggaccatacaatgaggac

SEQ ID NO: 4013405 - DNA, 25 bp, Homo sapien
tattcccttggtgtaaccaggcaga

SEQ ID NO: 4013406 - DNA, 25 bp, Homo sapien
gaaacagaccactgtctctcaggaa

SEQ ID NO: 4013407 - DNA, 25 bp, Homo sapien
gattccaaagacgtgtgaacatcac

SEQ ID NO: 4013408 - DNA, 25 bp, Homo sapien
gagaaaagcctcagtggacagtgtc

SEQ ID NO: 4013409 - DNA, 25 bp, Homo sapien
ggtcatgagcagtgcaaatcgggac

SEQ ID NO: 4013410 - DNA, 25 bp, Homo sapien
ggtcccgcccactctgatgtttaga

SEQ ID NO: 4013411 - DNA, 25 bp, Homo sapien
atccgcacggtgaacatgccggtcc

SEQ ID NO: 4013412 - DNA, 25 bp, Homo sapien
agtcagctgtgcaccctcatcagtg

SEQ ID NO: 4013413 - DNA, 25 bp, Homo sapien
gccaacagcttgcaatgagcactct

SEQ ID NO: 4013414 - DNA, 25 bp, Homo sapien
ggttccagccaacagcttgcaatga

SEQ ID NO: 4013415 - DNA, 25 bp, Homo sapien
aagtcagctgtgcaccctcatcagt

SEQ ID NO: 4013416 - DNA, 25 bp, Homo sapien
cagttgacagggaagctcatggtta

SEQ ID NO: 4013417 - DNA, 25 bp, Homo sapien
tgaaccaggcagtgctttgactctg

SEQ ID NO: 4013418 - DNA, 25 bp, Homo sapien
agctccctgtgggtggcagttgaca

SEQ ID NO: 4013419 - DNA, 25 bp, Homo sapien
tgatttgcccagcattccatagcag

SEQ ID NO: 4013420 - DNA, 25 bp, Homo sapien
gatgatctcatctgccaggtagagg

SEQ ID NO: 4013421 - DNA, 25 bp, Homo sapien
gatgttgaggtcacggatgatgatc

SEQ ID NO: 4013422 - DNA, 25 bp, Homo sapien
gctgtaagtggcatgggtttcattc

SEQ ID NO: 4013423 - DNA, 25 bp, Homo sapien
ttcaggctgactttcatgtccaggg

SEQ ID NO: 4013424 - DNA, 25 bp, Homo sapien
ggaccactggagacaaatagactag

SEQ ID NO: 4013425 - DNA, 25 bp, Homo sapien
tggctgagacaatccctactatggc

SEQ ID NO: 4013426 - DNA, 25 bp, Homo sapien
gctcacacaaacatttacctctggg

SEQ ID NO: 4013427 - DNA, 25 bp, Homo sapien
cccaatgctgatgcctactggctga

SEQ ID NO: 4013428 - DNA, 25 bp, Homo sapien
gtgatagagctgaagcttgaaccag

SEQ ID NO: 4013429 - DNA, 25 bp, Homo sapien
ttcaatcctctcaatacacctgtgg

SEQ ID NO: 4013430 - DNA, 25 bp, Homo sapien
gtcactgtcctaatcacttcaacac

SEQ ID NO: 4013431 - DNA, 25 bp, Homo sapien
acagccaggctaaataactccccaa

SEQ ID NO: 4013432 - DNA, 25 bp, Homo sapien
attgaagcccgagcaccggctgtca

SEQ ID NO: 4013433 - DNA, 25 bp, Homo sapien
catgaagaccttgtcgaagcccaga

SEQ ID NO: 4013434 - DNA, 25 bp, Homo sapien
actacagacacccagtcccggttgt

SEQ ID NO: 4013435 - DNA, 25 bp, Homo sapien
ggctgtcactcaggtacatgaagac

SEQ ID NO: 4013436 - DNA, 25 bp, Homo sapien
cctggcccggagtactgagctgatt

SEQ ID NO: 4013437 - DNA, 25 bp, Homo sapien
gtcatggcacaggtaacacttggat

SEQ ID NO: 4013438 - DNA, 25 bp, Homo sapien
gcataacttgccacagacagatgaa

SEQ ID NO: 4013439 - DNA, 25 bp, Homo sapien
gataaagcaagtgaaccagggtgcc

SEQ ID NO: 4013440 - DNA, 25 bp, Homo sapien
ctgggtgcgaggaggtccccaaatc

SEQ ID NO: 4013441 - DNA, 25 bp, Homo sapien
cccagatggcagcaacgtgggtgcc

SEQ ID NO: 4013442 - DNA, 25 bp, Homo sapien
cagcaacgtgggtgcccactgtggt

SEQ ID NO: 4013443 - DNA, 25 bp, Homo sapien
gaggtccccaaatctttggcagctt

SEQ ID NO: 4013444 - DNA, 25 bp, Homo sapien
gcctcttgccggctttaatgggtat

SEQ ID NO: 4013445 - DNA, 25 bp, Homo sapien
tgcgtcatacccatatggccccaat

SEQ ID NO: 4013446 - DNA, 25 bp, Homo sapien
tgacaggtttctcaacaacccgctt

SEQ ID NO: 4013447 - DNA, 25 bp, Homo sapien
ttcactcaggttggatatatatccc

SEQ ID NO: 4013448 - DNA, 25 bp, Homo sapien
cagtgatgttgaagtcctgtttgca

SEQ ID NO: 4013449 - DNA, 25 bp, Homo sapien
gatttgcagtcctcgtctatactgc

SEQ ID NO: 4013450 - DNA, 25 bp, Homo sapien
gcagtgccatctgccattattcgat

SEQ ID NO: 4013451 - DNA, 25 bp, Homo sapien
tgatgttgaagtcctgtttgcactg

SEQ ID NO: 4013452 - DNA, 25 bp, Homo sapien
tcaggttgtagacgtagtagccgcc

SEQ ID NO: 4013453 - DNA, 25 bp, Homo sapien
gttgtagacgtagtagccgccggca

SEQ ID NO: 4013454 - DNA, 25 bp, Homo sapien
gtagacgtagtagccgccggcacag

SEQ ID NO: 4013455 - DNA, 25 bp, Homo sapien
gcgctgtcaggttgtagacgtagta

SEQ ID NO: 4013456 - DNA, 25 bp, Homo sapien
agtggccgctccagtgcgcgcaggc

SEQ ID NO: 4013457 - DNA, 25 bp, Homo sapien
cagtggccgctccagtgcgcgcagg

SEQ ID NO: 4013458 - DNA, 25 bp, Homo sapien
ccagtgcgcgcaggccttgcggctc

SEQ ID NO: 4013459 - DNA, 25 bp, Homo sapien
cagtgcgcgcaggccttgcggctca

SEQ ID NO: 4013460 - DNA, 25 bp, Homo sapien
atgccctcgtcgctggacggatgcg

SEQ ID NO: 4013461 - DNA, 25 bp, Homo sapien
ggacggatgcgtgccattgagccac

SEQ ID NO: 4013462 - DNA, 25 bp, Homo sapien
cgtcgctggacggatgcgtgccatt

SEQ ID NO: 4013463 - DNA, 25 bp, Homo sapien
gatgcgtgccattgagccacatggg

SEQ ID NO: 4013464 - DNA, 25 bp, Homo sapien
aggactggcacgcaggtctcggcca

SEQ ID NO: 4013465 - DNA, 25 bp, Homo sapien
tggcacgcaggtctcggccatgcgc

SEQ ID NO: 4013466 - DNA, 25 bp, Homo sapien
tgttgcagcgcaggactggcacgca

SEQ ID NO: 4013467 - DNA, 25 bp, Homo sapien
ggcggccgtgttgcagcgcaggact

SEQ ID NO: 4013468 - DNA, 25 bp, Homo sapien
ccgtactcggtgctgcgccagtact

SEQ ID NO: 4013469 - DNA, 25 bp, Homo sapien
ggtgcgcctggcacggatccgcgca

SEQ ID NO: 4013470 - DNA, 25 bp, Homo sapien
ccagtactcgtccagggtgcggtgc

SEQ ID NO: 4013471 - DNA, 25 bp, Homo sapien
caggtccgtgtcgcaggcgtagccc

SEQ ID NO: 4013472 - DNA, 25 bp, Homo sapien
tagcccgcggggcatacgcacaagt

SEQ ID NO: 4013473 - DNA, 25 bp, Homo sapien
gggagcactcacagtgccatccatc

SEQ ID NO: 4013474 - DNA, 25 bp, Homo sapien
gcggggcatacgcacaagtagctgc

SEQ ID NO: 4013475 - DNA, 25 bp, Homo sapien
cggggagcactcacagtgccatcca

SEQ ID NO: 4013476 - DNA, 25 bp, Homo sapien
gaccgggcgacaggcggaagccttc

SEQ ID NO: 4013477 - DNA, 25 bp, Homo sapien
ccaggctcagcgcactcatccacgt

SEQ ID NO: 4013478 - DNA, 25 bp, Homo sapien
tccacgtctgtgcagccgagaccgg

SEQ ID NO: 4013479 - DNA, 25 bp, Homo sapien
accacattgacacatgtggccaggg

SEQ ID NO: 4013480 - DNA, 25 bp, Homo sapien
gcgtgtttacgcagctgctgttggc

SEQ ID NO: 4013481 - DNA, 25 bp, Homo sapien
cctggcgtgtttacgcagctgctgt

SEQ ID NO: 4013482 - DNA, 25 bp, Homo sapien
aaggagcctggcgtgtttacgcagc

SEQ ID NO: 4013483 - DNA, 25 bp, Homo sapien
ttacgcagctgctgttggcggagca

SEQ ID NO: 4013484 - DNA, 25 bp, Homo sapien
caggtccacgcaggtcaggccatcg

SEQ ID NO: 4013485 - DNA, 25 bp, Homo sapien
aggtcaggccatcgccggtgaagcc

SEQ ID NO: 4013486 - DNA, 25 bp, Homo sapien
tcctgacaggtgcacgtcgtaacgg

SEQ ID NO: 4013487 - DNA, 25 bp, Homo sapien
gtgcacgtcgtaacggcctcatcct

SEQ ID NO: 4013488 - DNA, 25 bp, Homo sapien
cctgctcagtgtcgcctcctctctg

SEQ ID NO: 4013489 - DNA, 25 bp, Homo sapien
ggaccctgctcagtgtcgcctcctc

SEQ ID NO: 4013490 - DNA, 25 bp, Homo sapien
cacctggctgggcagttgtactttg

SEQ ID NO: 4013491 - DNA, 25 bp, Homo sapien
ttccctggctggtgaaatcttcatc

SEQ ID NO: 4013492 - DNA, 25 bp, Homo sapien
agtggctgcagttgtgatgaaccaa

SEQ ID NO: 4013493 - DNA, 25 bp, Homo sapien
tgaaccaagaggccaccaccaccat

SEQ ID NO: 4013494 - DNA, 25 bp, Homo sapien
tctgaggtgtcagtggctgcagttg

SEQ ID NO: 4013495 - DNA, 25 bp, Homo sapien
ttctgctcttcccgctacttcaggt

SEQ ID NO: 4013496 - DNA, 25 bp, Homo sapien
ctcttcccgctacttcaggtctaga

SEQ ID NO: 4013497 - DNA, 25 bp, Homo sapien
cctttctgctcttcccgctacttca

SEQ ID NO: 4013498 - DNA, 25 bp, Homo sapien
tgctcttcccgctacttcaggtcta

SEQ ID NO: 4013499 - DNA, 25 bp, Homo sapien
tctctctgtctctgatgtctggtgt

SEQ ID NO: 4013500 - DNA, 25 bp, Homo sapien
tttctctctgtctctgatgtctggt

SEQ ID NO: 4013501 - DNA, 25 bp, Homo sapien
ctctctgtctctgatgtctggtgtc

SEQ ID NO: 4013502 - DNA, 25 bp, Homo sapien
ttctctctgtctctgatgtctggtg

SEQ ID NO: 4013503 - DNA, 25 bp, Homo sapien
tggatgggacaaatgcatgatctaa

SEQ ID NO: 4013504 - DNA, 25 bp, Homo sapien
aaatgcatgatctaactctcctccc

SEQ ID NO: 4013505 - DNA, 25 bp, Homo sapien
gggacaaatgcatgatctaactctc

SEQ ID NO: 4013506 - DNA, 25 bp, Homo sapien
aacagagatggatgggacaaatgca

SEQ ID NO: 4013507 - DNA, 25 bp, Homo sapien
gccagaaaggtagagttagtctggt

SEQ ID NO: 4013508 - DNA, 25 bp, Homo sapien
aagccagaaaggtagagttagtctg

SEQ ID NO: 4013509 - DNA, 25 bp, Homo sapien
cagaaaggtagagttagtctggtca

SEQ ID NO: 4013510 - DNA, 25 bp, Homo sapien
agaaaggtagagttagtctggtcat

SEQ ID NO: 4013511 - DNA, 25 bp, Homo sapien
atatatacacatttgccccaggctg

SEQ ID NO: 4013512 - DNA, 25 bp, Homo sapien
atacacatttgccccaggctggcaa

SEQ ID NO: 4013513 - DNA, 25 bp, Homo sapien
atatacacatttgccccaggctggc

SEQ ID NO: 4013514 - DNA, 25 bp, Homo sapien
acacatttgccccaggctggcaatc

SEQ ID NO: 4013515 - DNA, 25 bp, Homo sapien
gacactcagaggctttattatccac

SEQ ID NO: 4013516 - DNA, 25 bp, Homo sapien
ggacactcagaggctttattatcca

SEQ ID NO: 4013517 - DNA, 25 bp, Homo sapien
aggacactcagaggctttattatcc

SEQ ID NO: 4013518 - DNA, 25 bp, Homo sapien
tcttcttttgcactggaggtccctt

SEQ ID NO: 4013519 - DNA, 25 bp, Homo sapien
ttcttcttttgcactggaggtccct

SEQ ID NO: 4013520 - DNA, 25 bp, Homo sapien
tcagctagcacttcctcttctatca

SEQ ID NO: 4013521 - DNA, 25 bp, Homo sapien
tccagctcaggcgactgctgttcag

SEQ ID NO: 4013522 - DNA, 25 bp, Homo sapien
gcgactgctgttcaggtaacccttt

SEQ ID NO: 4013523 - DNA, 25 bp, Homo sapien
cagcttggatacgtacttggtcatg

SEQ ID NO: 4013524 - DNA, 25 bp, Homo sapien
tcatcctcaatcttagttttgatgt

SEQ ID NO: 4013525 - DNA, 25 bp, Homo sapien
catcctcaatcttagttttgatgtg

SEQ ID NO: 4013526 - DNA, 25 bp, Homo sapien
tgtgttctcccttatacaggacagc

SEQ ID NO: 4013527 - DNA, 25 bp, Homo sapien
agaagcccttcagggtgtgttctcc

SEQ ID NO: 4013528 - DNA, 25 bp, Homo sapien
aatgggtaccggtccaggtacatca

SEQ ID NO: 4013529 - DNA, 25 bp, Homo sapien
gcaatgataattgtggagtggtttt

SEQ ID NO: 4013530 - DNA, 25 bp, Homo sapien
gctgtgacatcgatcttggcaatga

SEQ ID NO: 4013531 - DNA, 25 bp, Homo sapien
gcatcttgcactttttagaccaggg

SEQ ID NO: 4013532 - DNA, 25 bp, Homo sapien
catggctcaggctcacattgatgaa

SEQ ID NO: 4013533 - DNA, 25 bp, Homo sapien
gatccagaaagctggcgccacccta

SEQ ID NO: 4013534 - DNA, 25 bp, Homo sapien
tggtcctgctgttttgccaattgca

SEQ ID NO: 4013535 - DNA, 25 bp, Homo sapien
catcgctgtgttccacttgtggtcc

SEQ ID NO: 4013536 - DNA, 25 bp, Homo sapien
tgtgaccactataccacaggtaggc

SEQ ID NO: 4013537 - DNA, 25 bp, Homo sapien
catccccaagaagtgtgacaggtat

SEQ ID NO: 4013538 - DNA, 25 bp, Homo sapien
gtgcatatgtgttacagcacacggg

SEQ ID NO: 4013539 - DNA, 25 bp, Homo sapien
gggaacttgcccaaagctatgcagt

SEQ ID NO: 4013540 - DNA, 25 bp, Homo sapien
ttctttgtcaaagacgactacgttg

SEQ ID NO: 4013541 - DNA, 25 bp, Homo sapien
ttggaatctcttcactggattgatg

SEQ ID NO: 4013542 - DNA, 25 bp, Homo sapien
tcaaagacgactacgttgaagttct

SEQ ID NO: 4013543 - DNA, 25 bp, Homo sapien
ttccccacgagctgcttaaccagtc

SEQ ID NO: 4013544 - DNA, 25 bp, Homo sapien
gaagacacgtccatttctgggttcg

SEQ ID NO: 4013545 - DNA, 25 bp, Homo sapien
gaaggcattttgtacctggcgtcag

SEQ ID NO: 4013546 - DNA, 25 bp, Homo sapien
tgtgacccggaagtacttgaagaca

SEQ ID NO: 4013547 - DNA, 25 bp, Homo sapien
ggatgggatatcgacctctgtgacc

SEQ ID NO: 4013548 - DNA, 25 bp, Homo sapien
gatcctttgccagtggagaaaaact

SEQ ID NO: 4013549 - DNA, 25 bp, Homo sapien
tggatcctttgccagtggagaaaaa

SEQ ID NO: 4013550 - DNA, 25 bp, Homo sapien
acaaaacccttgtctctctggatcc

SEQ ID NO: 4013551 - DNA, 25 bp, Homo sapien
agaaaacaaaacccttgtctctctg

SEQ ID NO: 4013552 - DNA, 25 bp, Homo sapien
ggaattcctttgatgccagcttata

SEQ ID NO: 4013553 - DNA, 25 bp, Homo sapien
acagcagcatgtgactcatgatgtg

SEQ ID NO: 4013554 - DNA, 25 bp, Homo sapien
catatgactcggagcttttggagac

SEQ ID NO: 4013555 - DNA, 25 bp, Homo sapien
aatgctgaattatgataccatatga

SEQ ID NO: 4013556 - DNA, 25 bp, Homo sapien
tcctgtttgttggtactgtcattaa

SEQ ID NO: 4013557 - DNA, 25 bp, Homo sapien
tcgatcacaaaatctgtaaggtgct

SEQ ID NO: 4013558 - DNA, 25 bp, Homo sapien
cattaataagcttttggcggttcac

SEQ ID NO: 4013559 - DNA, 25 bp, Homo sapien
tatgacacgattgagttcctgtttg

SEQ ID NO: 4013560 - DNA, 25 bp, Homo sapien
gacattgccaatcgttatgactcca

SEQ ID NO: 4013561 - DNA, 25 bp, Homo sapien
ggtgacgtggaaacgcccaatgaca

SEQ ID NO: 4013562 - DNA, 25 bp, Homo sapien
tatgactccaaacgttagctctgga

SEQ ID NO: 4013563 - DNA, 25 bp, Homo sapien
caccaggacgctgtcaagggtgacg

SEQ ID NO: 4013564 - DNA, 25 bp, Homo sapien
ccaacgatgaccaagggcctggata

SEQ ID NO: 4013565 - DNA, 25 bp, Homo sapien
cgatgaccaagggcctggatatcac

SEQ ID NO: 4013566 - DNA, 25 bp, Homo sapien
aacgatgaccaagggcctggatatc

SEQ ID NO: 4013567 - DNA, 25 bp, Homo sapien
agccaacgatgaccaagggcctgga

SEQ ID NO: 4013568 - DNA, 25 bp, Homo sapien
tgtcgtctcaaccaaacgactaagg

SEQ ID NO: 4013569 - DNA, 25 bp, Homo sapien
tgctttctggctaatttgtcgtctc

SEQ ID NO: 4013570 - DNA, 25 bp, Homo sapien
tcaaccaaacgactaaggcagcaga

SEQ ID NO: 4013571 - DNA, 25 bp, Homo sapien
gctaatttgtcgtctcaaccaaacg

SEQ ID NO: 4013572 - DNA, 25 bp, Homo sapien
gctgatgggctctgacctgttgccc

SEQ ID NO: 4013573 - DNA, 25 bp, Homo sapien
ggccttggtaatcccaaactcctgc

SEQ ID NO: 4013574 - DNA, 25 bp, Homo sapien
tatggtaatgtccactttgccaaag

SEQ ID NO: 4013575 - DNA, 25 bp, Homo sapien
cagctcttccgccaagttcctggat

SEQ ID NO: 4013576 - DNA, 25 bp, Homo sapien
acaaaatttgagaggcctttcctcg

SEQ ID NO: 4013577 - DNA, 25 bp, Homo sapien
aaatttgagaggcctttcctcgctc

SEQ ID NO: 4013578 - DNA, 25 bp, Homo sapien
caaaatttgagaggcctttcctcgc

SEQ ID NO: 4013579 - DNA, 25 bp, Homo sapien
atttgagaggcctttcctcgctccc

SEQ ID NO: 4013580 - DNA, 25 bp, Homo sapien
ggagctggcacgtgaccttggcagt

SEQ ID NO: 4013581 - DNA, 25 bp, Homo sapien
cagggagctggcacgtgaccttggc

SEQ ID NO: 4013582 - DNA, 25 bp, Homo sapien
gaccttggcagtgcaagaggctttt

SEQ ID NO: 4013583 - DNA, 25 bp, Homo sapien
agctggcacgtgaccttggcagtgc

SEQ ID NO: 4013584 - DNA, 25 bp, Homo sapien
aggcgcccaagtgtgcctttcttcc

SEQ ID NO: 4013585 - DNA, 25 bp, Homo sapien
tgataacattgtgaggctgcaggtt

SEQ ID NO: 4013586 - DNA, 25 bp, Homo sapien
gggactaaaaggcgcccaagtgtgc

SEQ ID NO: 4013587 - DNA, 25 bp, Homo sapien
cctcctgataacattgtgaggctgc

SEQ ID NO: 4013588 - DNA, 25 bp, Homo sapien
ttttatctttttcactgccgcccac

SEQ ID NO: 4013589 - DNA, 25 bp, Homo sapien
tgcctttcaagccagaacattttat

SEQ ID NO: 4013590 - DNA, 25 bp, Homo sapien
attttatctttttcactgccgccca

SEQ ID NO: 4013591 - DNA, 25 bp, Homo sapien
cattttatctttttcactgccgccc

SEQ ID NO: 4013592 - DNA, 25 bp, Homo sapien
ggtcttttgtaaagtgccgctcaga

SEQ ID NO: 4013593 - DNA, 25 bp, Homo sapien
gctttgtcaccgtcatcgccttcga

SEQ ID NO: 4013594 - DNA, 25 bp, Homo sapien
gcctgctcctgcaatgggatcggaa

SEQ ID NO: 4013595 - DNA, 25 bp, Homo sapien
gagggcaagttccaagtccaacaga

SEQ ID NO: 4013596 - DNA, 25 bp, Homo sapien
cagcgggcgttagcactaggagact

SEQ ID NO: 4013597 - DNA, 25 bp, Homo sapien
caccatgaggaagcgggtctggttc

SEQ ID NO: 4013598 - DNA, 25 bp, Homo sapien
tggatgctggaaacaccggcgttaa

SEQ ID NO: 4013599 - DNA, 25 bp, Homo sapien
ccggcgttaacctctggtgagctgt

SEQ ID NO: 4013600 - DNA, 25 bp, Homo sapien
gacgactgggcattctaaagaatcc

SEQ ID NO: 4013601 - DNA, 25 bp, Homo sapien
tggcttctccttgtgatcagggcag

SEQ ID NO: 4013602 - DNA, 25 bp, Homo sapien
aactctgtggcccttaagaaggaag

SEQ ID NO: 4013603 - DNA, 25 bp, Homo sapien
gcaggacccgcagacgactgggcat

SEQ ID NO: 4013604 - DNA, 25 bp, Homo sapien
ttcactgtcagaaaagtatgctgca

SEQ ID NO: 4013605 - DNA, 25 bp, Homo sapien
taatgattttgctagcgacacctca

SEQ ID NO: 4013606 - DNA, 25 bp, Homo sapien
gacaatcttttgctagcaattcgag

SEQ ID NO: 4013607 - DNA, 25 bp, Homo sapien
ggctgaatggtgtcctagagctaga

SEQ ID NO: 4013608 - DNA, 25 bp, Homo sapien
tactcagcttacagatgcactaaaa

SEQ ID NO: 4013609 - DNA, 25 bp, Homo sapien
aactacgtattgggtataatgtaca

SEQ ID NO: 4013610 - DNA, 25 bp, Homo sapien
atgtacactactcagcttacagatg

SEQ ID NO: 4013611 - DNA, 25 bp, Homo sapien
cactactcagcttacagatgcacta

SEQ ID NO: 4013612 - DNA, 25 bp, Homo sapien
cattatttattgtcgacttcgtgcc

SEQ ID NO: 4013613 - DNA, 25 bp, Homo sapien
caacatagtaatcatgccaagctga

SEQ ID NO: 4013614 - DNA, 25 bp, Homo sapien
acttcgtgccgctcggtgtggagca

SEQ ID NO: 4013615 - DNA, 25 bp, Homo sapien
gcaggactctggtacttagtgtgga

SEQ ID NO: 4013616 - DNA, 25 bp, Homo sapien
cacccacgttaagtgtgtaagtcaa

SEQ ID NO: 4013617 - DNA, 25 bp, Homo sapien
ccagacccagcgattgatacattgt

SEQ ID NO: 4013618 - DNA, 25 bp, Homo sapien
gacttttaacacatgtccgcccctg

SEQ ID NO: 4013619 - DNA, 25 bp, Homo sapien
taactgccaccacagtcgaataggg

SEQ ID NO: 4013620 - DNA, 25 bp, Homo sapien
gatgaggacatagcaagcacaccag

SEQ ID NO: 4013621 - DNA, 25 bp, Homo sapien
ctacatataccagaaagatgggcca

SEQ ID NO: 4013622 - DNA, 25 bp, Homo sapien
gctgatggctgtaacctaagaggga

SEQ ID NO: 4013623 - DNA, 25 bp, Homo sapien
ttaaatggacacaactacatcccag

SEQ ID NO: 4013624 - DNA, 25 bp, Homo sapien
tggccctgatcacatagatgctgcg

SEQ ID NO: 4013625 - DNA, 25 bp, Homo sapien
aaattctatcttcgggagtcaccac

SEQ ID NO: 4013626 - DNA, 25 bp, Homo sapien
gctgcgccgcctagcaaatgcttgg

SEQ ID NO: 4013627 - DNA, 25 bp, Homo sapien
gatttccctccataggacaggttac

SEQ ID NO: 4013628 - DNA, 25 bp, Homo sapien
ccccaaagactgctgtattatgtct

SEQ ID NO: 4013629 - DNA, 25 bp, Homo sapien
gactgctgtattatgtctgtattag

SEQ ID NO: 4013630 - DNA, 25 bp, Homo sapien
agttcttcctccacatactcataca

SEQ ID NO: 4013631 - DNA, 25 bp, Homo sapien
gttcttcctccacatactcatacat

SEQ ID NO: 4013632 - DNA, 25 bp, Homo sapien
aaccccgtggtataattccatctga

SEQ ID NO: 4013633 - DNA, 25 bp, Homo sapien
aaaccccgtggtataattccatctg

SEQ ID NO: 4013634 - DNA, 25 bp, Homo sapien
ccccgtggtataattccatctgagt

SEQ ID NO: 4013635 - DNA, 25 bp, Homo sapien
accccgtggtataattccatctgag

SEQ ID NO: 4013636 - DNA, 25 bp, Homo sapien
tgtgtctggggcccaatctcctctt

SEQ ID NO: 4013637 - DNA, 25 bp, Homo sapien
gtgtctggggcccaatctcctcttc

SEQ ID NO: 4013638 - DNA, 25 bp, Homo sapien
gtgtgtctggggcccaatctcctct

SEQ ID NO: 4013639 - DNA, 25 bp, Homo sapien
tggtatttatcatatgcctcggctc

SEQ ID NO: 4013640 - DNA, 25 bp, Homo sapien
gagacttgaaaccacggccacttgt

SEQ ID NO: 4013641 - DNA, 25 bp, Homo sapien
aaaaaatgggactccagagacttga

SEQ ID NO: 4013642 - DNA, 25 bp, Homo sapien
tatcatatgcctcggctcctcaaac

SEQ ID NO: 4013643 - DNA, 25 bp, Homo sapien
cagctgcaggagcttagccaaattt

SEQ ID NO: 4013644 - DNA, 25 bp, Homo sapien
gagttcttgtttagattacatgtga

SEQ ID NO: 4013645 - DNA, 25 bp, Homo sapien
ggctctggatacctctcttgtagag

SEQ ID NO: 4013646 - DNA, 25 bp, Homo sapien
gcttagccaaatttctagtcctctc

SEQ ID NO: 4013647 - DNA, 25 bp, Homo sapien
ctgaatggagggatcggccagagct

SEQ ID NO: 4013648 - DNA, 25 bp, Homo sapien
ataagctcttatcatgttagtggct

SEQ ID NO: 4013649 - DNA, 25 bp, Homo sapien
ttcacctcaggactactattgcaca

SEQ ID NO: 4013650 - DNA, 25 bp, Homo sapien
tgacctgcaatgaaaggtgcatgca

SEQ ID NO: 4013651 - DNA, 25 bp, Homo sapien
gaaagcctatagaaggatgtgcaag

SEQ ID NO: 4013652 - DNA, 25 bp, Homo sapien
tgcagaaagcctatagaaggatgtg

SEQ ID NO: 4013653 - DNA, 25 bp, Homo sapien
cagaaagcctatagaaggatgtgca

SEQ ID NO: 4013654 - DNA, 25 bp, Homo sapien
gcagaaagcctatagaaggatgtgc

SEQ ID NO: 4013655 - DNA, 25 bp, Homo sapien
cacagcagttagaaaagacaaagag

SEQ ID NO: 4013656 - DNA, 25 bp, Homo sapien
tatgtaatgataaaaggtcttgtcc

SEQ ID NO: 4013657 - DNA, 25 bp, Homo sapien
ttaaactgtaccgtaaaacagatga

SEQ ID NO: 4013658 - DNA, 25 bp, Homo sapien
tacccaacaaccatggaatacacat

SEQ ID NO: 4013659 - DNA, 25 bp, Homo sapien
aagtatatgaacagatagttcacaa

SEQ ID NO: 4013660 - DNA, 25 bp, Homo sapien
aaaggtgcaactcattataaaacca

SEQ ID NO: 4013661 - DNA, 25 bp, Homo sapien
caaaaaagtgaactcaaatggccat

SEQ ID NO: 4013662 - DNA, 25 bp, Homo sapien
tataaagtgagcttgtagaaaccaa

SEQ ID NO: 4013663 - DNA, 25 bp, Homo sapien
ggacaggtaaagtcagttccttgct

SEQ ID NO: 4013664 - DNA, 25 bp, Homo sapien
caggtctaggtagtgtcagtaactt

SEQ ID NO: 4013665 - DNA, 25 bp, Homo sapien
cttcaagtgctgagtttgtttctgg

SEQ ID NO: 4013666 - DNA, 25 bp, Homo sapien
ggtgctactgattgcttaggaatga

SEQ ID NO: 4013667 - DNA, 25 bp, Homo sapien
agacagaaacggtacctgttcccag

SEQ ID NO: 4013668 - DNA, 25 bp, Homo sapien
gaagggacaggtactgagtattgaa

SEQ ID NO: 4013669 - DNA, 25 bp, Homo sapien
atggccagacagaaacggtacctgt

SEQ ID NO: 4013670 - DNA, 25 bp, Homo sapien
tgggctgtgtgcactttttgggctt

SEQ ID NO: 4013671 - DNA, 25 bp, Homo sapien
cgtggcaccttcttataccctagaa

SEQ ID NO: 4013672 - DNA, 25 bp, Homo sapien
tgccttggttattagcacaaaactt

SEQ ID NO: 4013673 - DNA, 25 bp, Homo sapien
cttggccttcctatgattatatgag

SEQ ID NO: 4013674 - DNA, 25 bp, Homo sapien
cgtgcgcagtgagacatctaagaga

SEQ ID NO: 4013675 - DNA, 25 bp, Homo sapien
gggccctggccagcagtatggccac

SEQ ID NO: 4013676 - DNA, 25 bp, Homo sapien
agagcaagaggttggagcagcatcc

SEQ ID NO: 4013677 - DNA, 25 bp, Homo sapien
gcagcatccacttcggggccctggc

SEQ ID NO: 4013678 - DNA, 25 bp, Homo sapien
ttcggggccctggccagcagtatgg

SEQ ID NO: 4013679 - DNA, 25 bp, Homo sapien
caggttcctgcacttcgggaagagg

SEQ ID NO: 4013680 - DNA, 25 bp, Homo sapien
acttgttgagggcaccaggttcctg

SEQ ID NO: 4013681 - DNA, 25 bp, Homo sapien
cacatcagggtgactactaagcctg

SEQ ID NO: 4013682 - DNA, 25 bp, Homo sapien
acctgcaattcactcctggaggtgc

SEQ ID NO: 4013683 - DNA, 25 bp, Homo sapien
tccaaagggtatgctgaggacagct

SEQ ID NO: 4013684 - DNA, 25 bp, Homo sapien
ccctctggacaggtgggaatccaaa

SEQ ID NO: 4013685 - DNA, 25 bp, Homo sapien
gaacacctacaagaggcacctgcat

SEQ ID NO: 4013686 - DNA, 25 bp, Homo sapien
gaaattacctaatcaatgagccgct

SEQ ID NO: 4013687 - DNA, 25 bp, Homo sapien
aattacctgcaaactggaaactata

SEQ ID NO: 4013688 - DNA, 25 bp, Homo sapien
ggtcatttgattagatgagctcttc

SEQ ID NO: 4013689 - DNA, 25 bp, Homo sapien
ttgattagatgagctcttcatccag

SEQ ID NO: 4013690 - DNA, 25 bp, Homo sapien
tgattagatgagctcttcatccagc

SEQ ID NO: 4013691 - DNA, 25 bp, Homo sapien
attgtgggtcatttgattagatgag

SEQ ID NO: 4013692 - DNA, 25 bp, Homo sapien
ctaacaagtagctggttatgccctt

SEQ ID NO: 4013693 - DNA, 25 bp, Homo sapien
aacaagtagctggttatgcccttat

SEQ ID NO: 4013694 - DNA, 25 bp, Homo sapien
acaagtagctggttatgcccttatg

SEQ ID NO: 4013695 - DNA, 25 bp, Homo sapien
taacaagtagctggttatgccctta

SEQ ID NO: 4013696 - DNA, 25 bp, Homo sapien
tgcatttctctgctatgggcaacaa

SEQ ID NO: 4013697 - DNA, 25 bp, Homo sapien
tgtgaggccttatcagcagatcatc

SEQ ID NO: 4013698 - DNA, 25 bp, Homo sapien
ccacatcaggtgtttctaaggcagc

SEQ ID NO: 4013699 - DNA, 25 bp, Homo sapien
catgaatccaagtgtcagaatgagc

SEQ ID NO: 4013700 - DNA, 25 bp, Homo sapien
cctgtgttagaacccggctctgtca

SEQ ID NO: 4013701 - DNA, 25 bp, Homo sapien
ctctggaggaccctaacaagtacag

SEQ ID NO: 4013702 - DNA, 25 bp, Homo sapien
cctgactcttggcaagtgcttgatg

SEQ ID NO: 4013703 - DNA, 25 bp, Homo sapien
taatagtgcctgaaccaaagggtaa

SEQ ID NO: 4013704 - DNA, 25 bp, Homo sapien
tcaaggtttggagtgacttgcggat

SEQ ID NO: 4013705 - DNA, 25 bp, Homo sapien
tatctaacatagtaatgttttgtgc

SEQ ID NO: 4013706 - DNA, 25 bp, Homo sapien
gtatttataatgtgtctgggtcagt

SEQ ID NO: 4013707 - DNA, 25 bp, Homo sapien
tcttatttcaatatctaacatagta

SEQ ID NO: 4013708 - DNA, 25 bp, Homo sapien
actgcgcacgggcttttccggacat

SEQ ID NO: 4013709 - DNA, 25 bp, Homo sapien
tcactgcgcacgggcttttccggac

SEQ ID NO: 4013710 - DNA, 25 bp, Homo sapien
gcgcacgggcttttccggacatctt

SEQ ID NO: 4013711 - DNA, 25 bp, Homo sapien
tgcgcacgggcttttccggacatct

SEQ ID NO: 4013712 - DNA, 25 bp, Homo sapien
tgggcaggttcaagacaaactctat

SEQ ID NO: 4013713 - DNA, 25 bp, Homo sapien
ttgggcaggttcaagacaaactcta

SEQ ID NO: 4013714 - DNA, 25 bp, Homo sapien
cttgggcaggttcaagacaaactct

SEQ ID NO: 4013715 - DNA, 25 bp, Homo sapien
tcttgggcaggttcaagacaaactc

SEQ ID NO: 4013716 - DNA, 25 bp, Homo sapien
taagaggatggctagaattgggcat

SEQ ID NO: 4013717 - DNA, 25 bp, Homo sapien
gccctgtgcaataagaagcttcaga

SEQ ID NO: 4013718 - DNA, 25 bp, Homo sapien
tgagccttgacatcagactctctgg

SEQ ID NO: 4013719 - DNA, 25 bp, Homo sapien
cagcataacagacacacatggcaca

SEQ ID NO: 4013720 - DNA, 25 bp, Homo sapien
catgtggtggactctgatatgcagc

SEQ ID NO: 4013721 - DNA, 25 bp, Homo sapien
gatccacctgtgaccgtaaagaccc

SEQ ID NO: 4013722 - DNA, 25 bp, Homo sapien
atgcagctaagatcctcctccaggg

SEQ ID NO: 4013723 - DNA, 25 bp, Homo sapien
gggattgcctcagccaaagacagct

SEQ ID NO: 4013724 - DNA, 25 bp, Homo sapien
tcatgggataggaactgcgaggcca

SEQ ID NO: 4013725 - DNA, 25 bp, Homo sapien
gccaggatcacaaatgccttcacca

SEQ ID NO: 4013726 - DNA, 25 bp, Homo sapien
tgcgaggccaggatcacaaatgcct

SEQ ID NO: 4013727 - DNA, 25 bp, Homo sapien
ctgttctgggtcatgggataggaac

SEQ ID NO: 4013728 - DNA, 25 bp, Homo sapien
catatgtattgggtacaagtgacat

SEQ ID NO: 4013729 - DNA, 25 bp, Homo sapien
taattatcaagttaggatacttggg

SEQ ID NO: 4013730 - DNA, 25 bp, Homo sapien
tattgaacattcgaacttattgctg

SEQ ID NO: 4013731 - DNA, 25 bp, Homo sapien
gacattttgttacacgcaaatatgg

SEQ ID NO: 4013732 - DNA, 25 bp, Homo sapien
ctgctgatcacagccgtctcaacca

SEQ ID NO: 4013733 - DNA, 25 bp, Homo sapien
gcattctctacctccgagggtccaa

SEQ ID NO: 4013734 - DNA, 25 bp, Homo sapien
atcacagccgtctcaaccacagcag

SEQ ID NO: 4013735 - DNA, 25 bp, Homo sapien
atcagtgcattctctacctccgagg

SEQ ID NO: 4013736 - DNA, 25 bp, Homo sapien
cttcagagaacactggacaccgaac

SEQ ID NO: 4013737 - DNA, 25 bp, Homo sapien
ctgcagaagaacctgtccttcagag

SEQ ID NO: 4013738 - DNA, 25 bp, Homo sapien
agaagaacctgtccttcagagaaca

SEQ ID NO: 4013739 - DNA, 25 bp, Homo sapien
gtccttcagagaacactggacaccg

SEQ ID NO: 4013740 - DNA, 25 bp, Homo sapien
caaaagtctcctcgaatgttggctg

SEQ ID NO: 4013741 - DNA, 25 bp, Homo sapien
tttgattccccggtctccaaggagc

SEQ ID NO: 4013742 - DNA, 25 bp, Homo sapien
cataaactggaaatacccatcttca

SEQ ID NO: 4013743 - DNA, 25 bp, Homo sapien
tgcccgtcccataaactggaaatac

SEQ ID NO: 4013744 - DNA, 25 bp, Homo sapien
ctggtgaccacagaaagacagagtc

SEQ ID NO: 4013745 - DNA, 25 bp, Homo sapien
ggtgaccacagaaagacagagtcat

SEQ ID NO: 4013746 - DNA, 25 bp, Homo sapien
tggtgaccacagaaagacagagtca

SEQ ID NO: 4013747 - DNA, 25 bp, Homo sapien
gaagtctcaacgtaaagtgcctggc

SEQ ID NO: 4013748 - DNA, 25 bp, Homo sapien
tagatggtgaagtctcaacgtaaag

SEQ ID NO: 4013749 - DNA, 25 bp, Homo sapien
aagtctcaacgtaaagtgcctggca

SEQ ID NO: 4013750 - DNA, 25 bp, Homo sapien
tggtgaagtctcaacgtaaagtgcc

SEQ ID NO: 4013751 - DNA, 25 bp, Homo sapien
gcaggacgttgcccttatcatctat

SEQ ID NO: 4013752 - DNA, 25 bp, Homo sapien
gccagagaagatgcctataggcctg

SEQ ID NO: 4013753 - DNA, 25 bp, Homo sapien
tgccaatgtctccttctgtgccggg

SEQ ID NO: 4013754 - DNA, 25 bp, Homo sapien
ggcctgatgggtttgaccctgatgc

SEQ ID NO: 4013755 - DNA, 25 bp, Homo sapien
aagcagccgttcccatgtatcctgg

SEQ ID NO: 4013756 - DNA, 25 bp, Homo sapien
agcagccgttcccatgtatcctggt

SEQ ID NO: 4013757 - DNA, 25 bp, Homo sapien
ctccagcgaggcagttctgtagatg

SEQ ID NO: 4013758 - DNA, 25 bp, Homo sapien
gggcacccatcatactcttgattgg

SEQ ID NO: 4013759 - DNA, 25 bp, Homo sapien
catactcttgattggataactggag

SEQ ID NO: 4013760 - DNA, 25 bp, Homo sapien
gctgtagcaacatccggtaaacaat

SEQ ID NO: 4013761 - DNA, 25 bp, Homo sapien
aaagatcctgctgtagcaacatccg

SEQ ID NO: 4013762 - DNA, 25 bp, Homo sapien
aaggtggtcagggtgcactttggtt

SEQ ID NO: 4013763 - DNA, 25 bp, Homo sapien
accatggccatgacagagccctcag

SEQ ID NO: 4013764 - DNA, 25 bp, Homo sapien
agccaaacatgagtaaccatggcca

SEQ ID NO: 4013765 - DNA, 25 bp, Homo sapien
gtaaccatggccatgacagagccct

SEQ ID NO: 4013766 - DNA, 25 bp, Homo sapien
ttgacttactagaagctcaacttgc

SEQ ID NO: 4013767 - DNA, 25 bp, Homo sapien
tgaacaaatgtgcatgctcctaatg

SEQ ID NO: 4013768 - DNA, 25 bp, Homo sapien
taaccagtgggtcaaactttggcaa

SEQ ID NO: 4013769 - DNA, 25 bp, Homo sapien
cacattatatcagaggcttgcaggc

SEQ ID NO: 4013770 - DNA, 25 bp, Homo sapien
aacctgtgtctgatatggtccacat

SEQ ID NO: 4013771 - DNA, 25 bp, Homo sapien
gtcccactagtgaagtagatggcag

SEQ ID NO: 4013772 - DNA, 25 bp, Homo sapien
cacagtgatgagtggtggatgcctc

SEQ ID NO: 4013773 - DNA, 25 bp, Homo sapien
accactggtcccactagtgaagtag

SEQ ID NO: 4013774 - DNA, 25 bp, Homo sapien
aggctcgagtaggaatgttctgcca

SEQ ID NO: 4013775 - DNA, 25 bp, Homo sapien
cagatatcaaagtgacccatctttt

SEQ ID NO: 4013776 - DNA, 25 bp, Homo sapien
ctggacaccagatatcaaagtgacc

SEQ ID NO: 4013777 - DNA, 25 bp, Homo sapien
gacaccagatatcaaagtgacccat

SEQ ID NO: 4013778 - DNA, 25 bp, Homo sapien
caccagatatcaaagtgacccatct

SEQ ID NO: 4013779 - DNA, 25 bp, Homo sapien
tagccttggccttagacatctgcaa

SEQ ID NO: 4013780 - DNA, 25 bp, Homo sapien
caccagtagcttaattctcagagaa

SEQ ID NO: 4013781 - DNA, 25 bp, Homo sapien
atggttccaggcataaagatgagac

SEQ ID NO: 4013782 - DNA, 25 bp, Homo sapien
tcatccccagcaacaatagccttgg

SEQ ID NO: 4013783 - DNA, 25 bp, Homo sapien
taaagaagccaacaatttagagaat

SEQ ID NO: 4013784 - DNA, 25 bp, Homo sapien
ctaaagaagccaacaatttagagaa

SEQ ID NO: 4013785 - DNA, 25 bp, Homo sapien
actgccacacgatccccacgctgca

SEQ ID NO: 4013786 - DNA, 25 bp, Homo sapien
acacgatccccacgctgcaggccac

SEQ ID NO: 4013787 - DNA, 25 bp, Homo sapien
tgaaattccacattaattccttccc

SEQ ID NO: 4013788 - DNA, 25 bp, Homo sapien
ctgctcgaatgcagcccaggatcac

SEQ ID NO: 4013789 - DNA, 25 bp, Homo sapien
cctcacagccttgctaatagagttg

SEQ ID NO: 4013790 - DNA, 25 bp, Homo sapien
gcaaggatgacaacagtctcttcct

SEQ ID NO: 4013791 - DNA, 25 bp, Homo sapien
ttttggtaacacatgagagtgtctg

SEQ ID NO: 4013792 - DNA, 25 bp, Homo sapien
tagaccaagctaactataggaggaa

SEQ ID NO: 4013793 - DNA, 25 bp, Homo sapien
ttctccatgtcagcccagtgatcca

SEQ ID NO: 4013794 - DNA, 25 bp, Homo sapien
agtgatccaacacatcactagcaaa

SEQ ID NO: 4013795 - DNA, 25 bp, Homo sapien
agcaaagttaaacttggccggcact

SEQ ID NO: 4013796 - DNA, 25 bp, Homo sapien
taaacttggccggcacttcctggtg

SEQ ID NO: 4013797 - DNA, 25 bp, Homo sapien
cacagggtgcaaagtccctgaactt

SEQ ID NO: 4013798 - DNA, 25 bp, Homo sapien
gacatctgagtaccccacagggtgc

SEQ ID NO: 4013799 - DNA, 25 bp, Homo sapien
gttgcctactattaatgtagagagt

SEQ ID NO: 4013800 - DNA, 25 bp, Homo sapien
gtccctgaacttttcgcagccaatg

SEQ ID NO: 4013801 - DNA, 25 bp, Homo sapien
tagtaccatctttgctgtatcctag

SEQ ID NO: 4013802 - DNA, 25 bp, Homo sapien
ttagtaccatctttgctgtatccta

SEQ ID NO: 4013803 - DNA, 25 bp, Homo sapien
atgttcccctgatgtagtactcttt

SEQ ID NO: 4013804 - DNA, 25 bp, Homo sapien
ggcagcacagagtttacctcctcag

SEQ ID NO: 4013805 - DNA, 25 bp, Homo sapien
acagagtttacctcctcagacaaag

SEQ ID NO: 4013806 - DNA, 25 bp, Homo sapien
gcacagagtttacctcctcagacaa

SEQ ID NO: 4013807 - DNA, 25 bp, Homo sapien
atagtggtaggactatgatggtgac

SEQ ID NO: 4013808 - DNA, 25 bp, Homo sapien
gagaacgagtacaaagacagaaatt

SEQ ID NO: 4013809 - DNA, 25 bp, Homo sapien
agttcattggagtttacaaagtcag

SEQ ID NO: 4013810 - DNA, 25 bp, Homo sapien
ctggggctgtcatcacatagtggta

SEQ ID NO: 4013811 - DNA, 25 bp, Homo sapien
agtagtcctgaggtgaattacattc

SEQ ID NO: 4013812 - DNA, 25 bp, Homo sapien
cagaccttatagttatcttccattg

SEQ ID NO: 4013813 - DNA, 25 bp, Homo sapien
ttgagaacagagaaccactctgact

SEQ ID NO: 4013814 - DNA, 25 bp, Homo sapien
ggttcttccatgctgggaaaagaat

SEQ ID NO: 4013815 - DNA, 25 bp, Homo sapien
ctgggagatagaatccccgagttca

SEQ ID NO: 4013816 - DNA, 25 bp, Homo sapien
tgggagatagaatccccgagttcat

SEQ ID NO: 4013817 - DNA, 25 bp, Homo sapien
gctgggagatagaatccccgagttc

SEQ ID NO: 4013818 - DNA, 25 bp, Homo sapien
agctgggagatagaatccccgagtt

SEQ ID NO: 4013819 - DNA, 25 bp, Homo sapien
atgagtttactaagtattaacatat

SEQ ID NO: 4013820 - DNA, 25 bp, Homo sapien
tgagtttactaagtattaacatatg

SEQ ID NO: 4013821 - DNA, 25 bp, Homo sapien
atatgagtttactaagtattaacat

SEQ ID NO: 4013822 - DNA, 25 bp, Homo sapien
tatgagtttactaagtattaacata

SEQ ID NO: 4013823 - DNA, 25 bp, Homo sapien
ggtgcaaggagagccagtttgagtt

SEQ ID NO: 4013824 - DNA, 25 bp, Homo sapien
ctgaggtgcaaggagagccagtttg

SEQ ID NO: 4013825 - DNA, 25 bp, Homo sapien
gaggtgcaaggagagccagtttgag

SEQ ID NO: 4013826 - DNA, 25 bp, Homo sapien
gtgcaaggagagccagtttgagttc

SEQ ID NO: 4013827 - DNA, 25 bp, Homo sapien
agacttggcaggtactgtctttcat

SEQ ID NO: 4013828 - DNA, 25 bp, Homo sapien
ctcctaagacttggcaggtactgtc

SEQ ID NO: 4013829 - DNA, 25 bp, Homo sapien
ttcctcctaagacttggcaggtact

SEQ ID NO: 4013830 - DNA, 25 bp, Homo sapien
taagacttggcaggtactgtctttc

SEQ ID NO: 4013831 - DNA, 25 bp, Homo sapien
gtccctaggaatttctgcttttctg

SEQ ID NO: 4013832 - DNA, 25 bp, Homo sapien
ctgcttttctgtgaggatttttgct

SEQ ID NO: 4013833 - DNA, 25 bp, Homo sapien
ttttctgtgaggatttttgctcttc

SEQ ID NO: 4013834 - DNA, 25 bp, Homo sapien
gcttttctgtgaggatttttgctct

SEQ ID NO: 4013835 - DNA, 25 bp, Homo sapien
ggattatgaccccatcagcccattc

SEQ ID NO: 4013836 - DNA, 25 bp, Homo sapien
ttatcatggattatgaccccatcag

SEQ ID NO: 4013837 - DNA, 25 bp, Homo sapien
taaaagattggtgaggttatcatgg

SEQ ID NO: 4013838 - DNA, 25 bp, Homo sapien
ctctaaaagattggtgaggttatca

SEQ ID NO: 4013839 - DNA, 25 bp, Homo sapien
gaagagagcacagtaactcaagcag

SEQ ID NO: 4013840 - DNA, 25 bp, Homo sapien
gagagcacagtaactcaagcagaca

SEQ ID NO: 4013841 - DNA, 25 bp, Homo sapien
cagcagctccagaactcctacagcc

SEQ ID NO: 4013842 - DNA, 25 bp, Homo sapien
ggaagagagcacagtaactcaagca

SEQ ID NO: 4013843 - DNA, 25 bp, Homo sapien
gacttttaacggtagctagcacaca

SEQ ID NO: 4013844 - DNA, 25 bp, Homo sapien
cactgcatgtcaactacaagggctt

SEQ ID NO: 4013845 - DNA, 25 bp, Homo sapien
tcaaggtctggtaagattttcacac

SEQ ID NO: 4013846 - DNA, 25 bp, Homo sapien
gcctttagggtatctgcacttgctg

SEQ ID NO: 4013847 - DNA, 25 bp, Homo sapien
agcagcactgggattgcttcagttt

SEQ ID NO: 4013848 - DNA, 25 bp, Homo sapien
ttctcgtggactcttaggaggtcta

SEQ ID NO: 4013849 - DNA, 25 bp, Homo sapien
tcgtggactcttaggaggtctacgg

SEQ ID NO: 4013850 - DNA, 25 bp, Homo sapien
tctcgtggactcttaggaggtctac

SEQ ID NO: 4013851 - DNA, 25 bp, Homo sapien
gtttctcgtggactcttaggaggtc

SEQ ID NO: 4013852 - DNA, 25 bp, Homo sapien
cgcaatttactcctttggatctttc

SEQ ID NO: 4013853 - DNA, 25 bp, Homo sapien
tggatctttccagaaaccgtctttg

SEQ ID NO: 4013854 - DNA, 25 bp, Homo sapien
ttcgcaatttactcctttggatctt

SEQ ID NO: 4013855 - DNA, 25 bp, Homo sapien
tctttccagaaaccgtctttggcag

SEQ ID NO: 4013856 - DNA, 25 bp, Homo sapien
taaggactataaatgcctttaccac

SEQ ID NO: 4013857 - DNA, 25 bp, Homo sapien
ttcctggggtatttgtatggagcag

SEQ ID NO: 4013858 - DNA, 25 bp, Homo sapien
tatttgtatggagcagtcacccttt

SEQ ID NO: 4013859 - DNA, 25 bp, Homo sapien
gtaggctggagtaaggactataaat

SEQ ID NO: 4013860 - DNA, 25 bp, Homo sapien
gggtctgggctgctgaccacagccg

SEQ ID NO: 4013861 - DNA, 25 bp, Homo sapien
ctctcccctgatggggtctgggctg

SEQ ID NO: 4013862 - DNA, 25 bp, Homo sapien
ctcccctgatggggtctgggctgct

SEQ ID NO: 4013863 - DNA, 25 bp, Homo sapien
gtctgggctgctgaccacagccgac

SEQ ID NO: 4013864 - DNA, 25 bp, Homo sapien
gcactttctacttcaacaggcccga

SEQ ID NO: 4013865 - DNA, 25 bp, Homo sapien
ctttctacttcaacaggcccgatct

SEQ ID NO: 4013866 - DNA, 25 bp, Homo sapien
tctacttcaacaggcccgatctggt

SEQ ID NO: 4013867 - DNA, 25 bp, Homo sapien
gccagggcactttctacttcaacag

SEQ ID NO: 4013868 - DNA, 25 bp, Homo sapien
ccccttgttctgatgcagctgtctt

SEQ ID NO: 4013869 - DNA, 25 bp, Homo sapien
cccttgttctgatgcagctgtcttc

SEQ ID NO: 4013870 - DNA, 25 bp, Homo sapien
atcgtcgtttcttcccatgaaccaa

SEQ ID NO: 4013871 - DNA, 25 bp, Homo sapien
aattgatcacatcgtcgtttcttcc

SEQ ID NO: 4013872 - DNA, 25 bp, Homo sapien
gccttttggattggcacagatgaca

SEQ ID NO: 4013873 - DNA, 25 bp, Homo sapien
gattttcatgccttttggattggca

SEQ ID NO: 4013874 - DNA, 25 bp, Homo sapien
ggatccagacttgattttcatgcct

SEQ ID NO: 4013875 - DNA, 25 bp, Homo sapien
ccatggatccagacttgattttcat

SEQ ID NO: 4013876 - DNA, 25 bp, Homo sapien
gggttgagggcctctcctccggtca

SEQ ID NO: 4013877 - DNA, 25 bp, Homo sapien
ctccggtcagacagtgcctcaggct

SEQ ID NO: 4013878 - DNA, 25 bp, Homo sapien
tggccatagccttcgtacagctcca

SEQ ID NO: 4013879 - DNA, 25 bp, Homo sapien
cacttctccctcacgtcagggttga

SEQ ID NO: 4013880 - DNA, 25 bp, Homo sapien
ggagccatcatcagtgccttgtccc

SEQ ID NO: 4013881 - DNA, 25 bp, Homo sapien
gagccatcatcagtgccttgtccct

SEQ ID NO: 4013882 - DNA, 25 bp, Homo sapien
ggccctcaaagcacgaaatagatgg

SEQ ID NO: 4013883 - DNA, 25 bp, Homo sapien
aaagcacgaaatagatgggctgtac

SEQ ID NO: 4013884 - DNA, 25 bp, Homo sapien
cctcaaagcacgaaatagatgggct

SEQ ID NO: 4013885 - DNA, 25 bp, Homo sapien
ttaggccctcaaagcacgaaataga

SEQ ID NO: 4013886 - DNA, 25 bp, Homo sapien
gcacaagcagccgaaagatggttgg

SEQ ID NO: 4013887 - DNA, 25 bp, Homo sapien
cctgcacaagcagccgaaagatggt

SEQ ID NO: 4013888 - DNA, 25 bp, Homo sapien
tcctgcacaagcagccgaaagatgg

SEQ ID NO: 4013889 - DNA, 25 bp, Homo sapien
tgcacaagcagccgaaagatggttg

SEQ ID NO: 4013890 - DNA, 25 bp, Homo sapien
aacacatatggggtattactggttt

SEQ ID NO: 4013891 - DNA, 25 bp, Homo sapien
ccaacacatatggggtattactggt

SEQ ID NO: 4013892 - DNA, 25 bp, Homo sapien
acacatatggggtattactggtttt

SEQ ID NO: 4013893 - DNA, 25 bp, Homo sapien
cacatatggggtattactggttttt

SEQ ID NO: 4013894 - DNA, 25 bp, Homo sapien
acaaaaatgcaagatccattaggcc

SEQ ID NO: 4013895 - DNA, 25 bp, Homo sapien
tgcacaaaaatgcaagatccattag

SEQ ID NO: 4013896 - DNA, 25 bp, Homo sapien
tcatgcacaaaaatgcaagatccat

SEQ ID NO: 4013897 - DNA, 25 bp, Homo sapien
cacaaaaatgcaagatccattaggc

SEQ ID NO: 4013898 - DNA, 25 bp, Homo sapien
ttaatgacattaaactgtacactta

SEQ ID NO: 4013899 - DNA, 25 bp, Homo sapien
atggttaaaagggtacatttatgat

SEQ ID NO: 4013900 - DNA, 25 bp, Homo sapien
tgtatttaatgacattaaactgtac

SEQ ID NO: 4013901 - DNA, 25 bp, Homo sapien
tggttaaaagggtacatttatgata

SEQ ID NO: 4013902 - DNA, 25 bp, Homo sapien
gatccttcctaagctgctcctattg

SEQ ID NO: 4013903 - DNA, 25 bp, Homo sapien
ggcttttcacctcgctcagagtaaa

SEQ ID NO: 4013904 - DNA, 25 bp, Homo sapien
taaaatccagaaccatcaagatcct

SEQ ID NO: 4013905 - DNA, 25 bp, Homo sapien
tagcacgatttaacaagaaacctcc

SEQ ID NO: 4013906 - DNA, 25 bp, Homo sapien
tccgctggtgaagtagatagccagt

SEQ ID NO: 4013907 - DNA, 25 bp, Homo sapien
gtgggtcttgacactttgtcctcac

SEQ ID NO: 4013908 - DNA, 25 bp, Homo sapien
tgacactttgtcctcacgcagttgt

SEQ ID NO: 4013909 - DNA, 25 bp, Homo sapien
ggtcttgacactttgtcctcacgca

SEQ ID NO: 4013910 - DNA, 25 bp, Homo sapien
tgcagccggtacttgaggtccttct

SEQ ID NO: 4013911 - DNA, 25 bp, Homo sapien
tcactggtgataatggacttggccc

SEQ ID NO: 4013912 - DNA, 25 bp, Homo sapien
ggagttccctgaagttcaaccagcc

SEQ ID NO: 4013913 - DNA, 25 bp, Homo sapien
tccacccttggagctagggagtcac

SEQ ID NO: 4013914 - DNA, 25 bp, Homo sapien
gatgttgagtggatagtagggaaga

SEQ ID NO: 4013915 - DNA, 25 bp, Homo sapien
cataaaacagaaggggatgttgagt

SEQ ID NO: 4013916 - DNA, 25 bp, Homo sapien
cagaaggggatgttgagtggatagt

SEQ ID NO: 4013917 - DNA, 25 bp, Homo sapien
gggatgttgagtggatagtagggaa

SEQ ID NO: 4013918 - DNA, 25 bp, Homo sapien
aggtaagagatgaaggcaggaaggg

SEQ ID NO: 4013919 - DNA, 25 bp, Homo sapien
ggtatagaggtaagagatgaaggca

SEQ ID NO: 4013920 - DNA, 25 bp, Homo sapien
tagaggtaagagatgaaggcaggaa

SEQ ID NO: 4013921 - DNA, 25 bp, Homo sapien
ctttgggtatagaggtaagagatga

SEQ ID NO: 4013922 - DNA, 25 bp, Homo sapien
agaacaggcttcatctcttccagcc

SEQ ID NO: 4013923 - DNA, 25 bp, Homo sapien
taggacagaacaggcttcatctctt

SEQ ID NO: 4013924 - DNA, 25 bp, Homo sapien
acaggcttcatctcttccagccgac

SEQ ID NO: 4013925 - DNA, 25 bp, Homo sapien
ctaggacagaacaggcttcatctct

SEQ ID NO: 4013926 - DNA, 25 bp, Homo sapien
cacatccagcacatcatgggcaaag

SEQ ID NO: 4013927 - DNA, 25 bp, Homo sapien
catccagcacatcatgggcaaagtt

SEQ ID NO: 4013928 - DNA, 25 bp, Homo sapien
cacacatccagcacatcatgggcaa

SEQ ID NO: 4013929 - DNA, 25 bp, Homo sapien
ccagcacatcatgggcaaagttgaa

SEQ ID NO: 4013930 - DNA, 25 bp, Homo sapien
aggctgatggcttcccaggtggcca

SEQ ID NO: 4013931 - DNA, 25 bp, Homo sapien
caggctgatggcttcccaggtggcc

SEQ ID NO: 4013932 - DNA, 25 bp, Homo sapien
cagtgcctggaggactaggtgtctc

SEQ ID NO: 4013933 - DNA, 25 bp, Homo sapien
tgcctggaggactaggtgtctcagc

SEQ ID NO: 4013934 - DNA, 25 bp, Homo sapien
gccctggagttcctcagtgcctgga

SEQ ID NO: 4013935 - DNA, 25 bp, Homo sapien
ctggaggactaggtgtctcagccat

SEQ ID NO: 4013936 - DNA, 25 bp, Homo sapien
ttttgacctctcactgacttgtggg

SEQ ID NO: 4013937 - DNA, 25 bp, Homo sapien
gtccttttgacctctcactgacttg

SEQ ID NO: 4013938 - DNA, 25 bp, Homo sapien
cgaggtccgtccttttgacctctca

SEQ ID NO: 4013939 - DNA, 25 bp, Homo sapien
gtccgtccttttgacctctcactga

SEQ ID NO: 4013940 - DNA, 25 bp, Homo sapien
gactcttgtgtatctccatgactct

SEQ ID NO: 4013941 - DNA, 25 bp, Homo sapien
tgtgtatctccatgactctctgctt

SEQ ID NO: 4013942 - DNA, 25 bp, Homo sapien
gctcctgactcttgtgtatctccat

SEQ ID NO: 4013943 - DNA, 25 bp, Homo sapien
tatctccatgactctctgcttttcc

SEQ ID NO: 4013944 - DNA, 25 bp, Homo sapien
gtgctgcttgtaggcagccttcctc

SEQ ID NO: 4013945 - DNA, 25 bp, Homo sapien
gctgcttgtaggcagccttcctctc

SEQ ID NO: 4013946 - DNA, 25 bp, Homo sapien
tgtaggcagccttcctctctgccat

SEQ ID NO: 4013947 - DNA, 25 bp, Homo sapien
ctgtgctgcttgtaggcagccttcc

SEQ ID NO: 4013948 - DNA, 25 bp, Homo sapien
tccctctacaaggcttttgcacaga

SEQ ID NO: 4013949 - DNA, 25 bp, Homo sapien
ctccctctacaaggcttttgcacag

SEQ ID NO: 4013950 - DNA, 25 bp, Homo sapien
tgcaatgaggaaaacttatccaagt

SEQ ID NO: 4013951 - DNA, 25 bp, Homo sapien
aaagcttaggttctgacagtcgacg

SEQ ID NO: 4013952 - DNA, 25 bp, Homo sapien
aatgcaatgaggaaaacttatccaa

SEQ ID NO: 4013953 - DNA, 25 bp, Homo sapien
ttctgacagtcgacggccatgagca

SEQ ID NO: 4013954 - DNA, 25 bp, Homo sapien
gccaccacgcaggtatgtcctggtc

SEQ ID NO: 4013955 - DNA, 25 bp, Homo sapien
ccaccacgcaggtatgtcctggtcc

SEQ ID NO: 4013956 - DNA, 25 bp, Homo sapien
gttgatggctagaaaacccctgcag

SEQ ID NO: 4013957 - DNA, 25 bp, Homo sapien
tgggttgatggctagaaaacccctg

SEQ ID NO: 4013958 - DNA, 25 bp, Homo sapien
ccagggatttgccttaggtgtgcag

SEQ ID NO: 4013959 - DNA, 25 bp, Homo sapien
attacttgcgttatgagtgctcacc

SEQ ID NO: 4013960 - DNA, 25 bp, Homo sapien
gaaaacattggaatcatggcactcc

SEQ ID NO: 4013961 - DNA, 25 bp, Homo sapien
gtgctcacctgggaaattctaaaga

SEQ ID NO: 4013962 - DNA, 25 bp, Homo sapien
agttccttccgttcaatcttgccag

SEQ ID NO: 4013963 - DNA, 25 bp, Homo sapien
ccgaagttccttccgttcaatcttg

SEQ ID NO: 4013964 - DNA, 25 bp, Homo sapien
gaagttccttccgttcaatcttgcc

SEQ ID NO: 4013965 - DNA, 25 bp, Homo sapien
ccttccgttcaatcttgccagtgat

SEQ ID NO: 4013966 - DNA, 25 bp, Homo sapien
tgaggataaagcaaatccacagtga

SEQ ID NO: 4013967 - DNA, 25 bp, Homo sapien
ctgacaccatatggtggccttaatg

SEQ ID NO: 4013968 - DNA, 25 bp, Homo sapien
ggctgacaccatatggtggccttaa

SEQ ID NO: 4013969 - DNA, 25 bp, Homo sapien
gaggataaagcaaatccacagtgat

SEQ ID NO: 4013970 - DNA, 25 bp, Homo sapien
gctgatccttgtcatgggacaggaa

SEQ ID NO: 4013971 - DNA, 25 bp, Homo sapien
tggtcagctgatccttgtcatggga

SEQ ID NO: 4013972 - DNA, 25 bp, Homo sapien
gctgcagttccttggtcagctgatc

SEQ ID NO: 4013973 - DNA, 25 bp, Homo sapien
tgtatggggctgtcactgacttgac

SEQ ID NO: 4013974 - DNA, 25 bp, Homo sapien
tggggtcaggacaataaaggccttc

SEQ ID NO: 4013975 - DNA, 25 bp, Homo sapien
tgtggggtcaggacaataaaggcct

SEQ ID NO: 4013976 - DNA, 25 bp, Homo sapien
tcaggacaataaaggccttcaccac

SEQ ID NO: 4013977 - DNA, 25 bp, Homo sapien
gggtcaggacaataaaggccttcac

SEQ ID NO: 4013978 - DNA, 25 bp, Homo sapien
accaaagcgctttcaacctctgcag

SEQ ID NO: 4013979 - DNA, 25 bp, Homo sapien
gctgactccgccaccgctgggtgct

SEQ ID NO: 4013980 - DNA, 25 bp, Homo sapien
ctgggtgctccaccaaagcgctttc

SEQ ID NO: 4013981 - DNA, 25 bp, Homo sapien
aaagcgctttcaacctctgcaggcc

SEQ ID NO: 4013982 - DNA, 25 bp, Homo sapien
ggcattaatgatgtcatcactcctc

SEQ ID NO: 4013983 - DNA, 25 bp, Homo sapien
gcattaatgatgtcatcactcctcc

SEQ ID NO: 4013984 - DNA, 25 bp, Homo sapien
atgatgtcatcactcctccccagga

SEQ ID NO: 4013985 - DNA, 25 bp, Homo sapien
ttaatgatgtcatcactcctcccca

SEQ ID NO: 4013986 - DNA, 25 bp, Homo sapien
tccccagtgttgtagaagtccccac

SEQ ID NO: 4013987 - DNA, 25 bp, Homo sapien
gtccccagtgttgtagaagtcccca

SEQ ID NO: 4013988 - DNA, 25 bp, Homo sapien
cccagtgttgtagaagtccccacat

SEQ ID NO: 4013989 - DNA, 25 bp, Homo sapien
tgtccccagtgttgtagaagtcccc

SEQ ID NO: 4013990 - DNA, 25 bp, Homo sapien
ctttagctgtcttctctgggtcacc

SEQ ID NO: 4013991 - DNA, 25 bp, Homo sapien
ctgacaggtttgattctgatgccaa

SEQ ID NO: 4013992 - DNA, 25 bp, Homo sapien
ccttctgtgttaggtggcaggatgc

SEQ ID NO: 4013993 - DNA, 25 bp, Homo sapien
cacaggcctgacaggtttgattctg

SEQ ID NO: 4013994 - DNA, 25 bp, Homo sapien
tccttctgtgttaggtggcaggatg

SEQ ID NO: 4013995 - DNA, 25 bp, Homo sapien
cactgtctggtttatgcatgggaca

SEQ ID NO: 4013996 - DNA, 25 bp, Homo sapien
accacttgctagagagggctcccag

SEQ ID NO: 4013997 - DNA, 25 bp, Homo sapien
agttagtagatgtcaccaatgtgtc

SEQ ID NO: 4013998 - DNA, 25 bp, Homo sapien
caagccaagggtctatgtttcatga

SEQ ID NO: 4013999 - DNA, 25 bp, Homo sapien
ctgccagggtcagcggtgttcatgc

SEQ ID NO: 4014000 - DNA, 25 bp, Homo sapien
gttttcaactgaggcctccatatga

SEQ ID NO: 4014001 - DNA, 25 bp, Homo sapien
gcagttttcaactgaggcctccata

SEQ ID NO: 4014002 - DNA, 25 bp, Homo sapien
catgctcacaataatgcagttttca

SEQ ID NO: 4014003 - DNA, 25 bp, Homo sapien
ggaggaaggatgactggagcaggga

SEQ ID NO: 4014004 - DNA, 25 bp, Homo sapien
tggtgtcaaattgtccaacccccgc

SEQ ID NO: 4014005 - DNA, 25 bp, Homo sapien
cctgccaatgcccttaggaccagac

SEQ ID NO: 4014006 - DNA, 25 bp, Homo sapien
gctggtgttgtcacctggtgtcaaa

SEQ ID NO: 4014007 - DNA, 25 bp, Homo sapien
ttccccatgaaacccggcttgatct

SEQ ID NO: 4014008 - DNA, 25 bp, Homo sapien
cattccccagtaggtggcacaaatt

SEQ ID NO: 4014009 - DNA, 25 bp, Homo sapien
ttgatcttcattccccagtaggtgg

SEQ ID NO: 4014010 - DNA, 25 bp, Homo sapien
gacgtcgtagggtggagtggccttc

SEQ ID NO: 4014011 - DNA, 25 bp, Homo sapien
atactctggaatgacactgtttgtg

SEQ ID NO: 4014012 - DNA, 25 bp, Homo sapien
accctgctagtatcccacagtcaaa

SEQ ID NO: 4014013 - DNA, 25 bp, Homo sapien
cacagtcaaacctgcgagttgtcct

SEQ ID NO: 4014014 - DNA, 25 bp, Homo sapien
caaacctgcgagttgtcctcctaaa

SEQ ID NO: 4014015 - DNA, 25 bp, Homo sapien
ctgatccttgggcaacacgacctcc

SEQ ID NO: 4014016 - DNA, 25 bp, Homo sapien
tttccgactgcccatagttctcgta

SEQ ID NO: 4014017 - DNA, 25 bp, Homo sapien
ccgccagtatagcagtgctccaggg

SEQ ID NO: 4014018 - DNA, 25 bp, Homo sapien
gcagaaggcccgtccgtcttttcca

SEQ ID NO: 4014019 - DNA, 25 bp, Homo sapien
tggttaatggggtatttcaacaatg

SEQ ID NO: 4014020 - DNA, 25 bp, Homo sapien
tcattcgatatatagatgatacccc

SEQ ID NO: 4014021 - DNA, 25 bp, Homo sapien
gctgcagaatcattcgatatataga

SEQ ID NO: 4014022 - DNA, 25 bp, Homo sapien
atatagatgataccccccaaaagtg

SEQ ID NO: 4014023 - DNA, 25 bp, Homo sapien
ccttggtgtcaaactgtggcagatg

SEQ ID NO: 4014024 - DNA, 25 bp, Homo sapien
atggttctaccagggtccaaatggt

SEQ ID NO: 4014025 - DNA, 25 bp, Homo sapien
tggtagccacaatccatcctgagtc

SEQ ID NO: 4014026 - DNA, 25 bp, Homo sapien
tggataaagactgtacaacccgctg

SEQ ID NO: 4014027 - DNA, 25 bp, Homo sapien
ctaactccaaaatgcagtggcctca

SEQ ID NO: 4014028 - DNA, 25 bp, Homo sapien
aaatgcagtggcctcagctgtgtga

SEQ ID NO: 4014029 - DNA, 25 bp, Homo sapien
gcagtggcctcagctgtgtgatcat

SEQ ID NO: 4014030 - DNA, 25 bp, Homo sapien
taactccaaaatgcagtggcctcag

SEQ ID NO: 4014031 - DNA, 25 bp, Homo sapien
gaagatgaccattgggtccaaggtc

SEQ ID NO: 4014032 - DNA, 25 bp, Homo sapien
aacccatgggagtgttttgccatct

SEQ ID NO: 4014033 - DNA, 25 bp, Homo sapien
aggagggttgtaaggccaacccatg

SEQ ID NO: 4014034 - DNA, 25 bp, Homo sapien
ggtgaagaagatgaccattgggtcc

SEQ ID NO: 4014035 - DNA, 25 bp, Homo sapien
gagaaggagaaattagagctccagg

SEQ ID NO: 4014036 - DNA, 25 bp, Homo sapien
tgagaaggagaaattagagctccag

SEQ ID NO: 4014037 - DNA, 25 bp, Homo sapien
ctgagaaggagaaattagagctcca

SEQ ID NO: 4014038 - DNA, 25 bp, Homo sapien
ttaaccagcgatcggaagtccagcc

SEQ ID NO: 4014039 - DNA, 25 bp, Homo sapien
agagaatgtctttggccttcaacag

SEQ ID NO: 4014040 - DNA, 25 bp, Homo sapien
tatggagtccacctctgaggcaagg

SEQ ID NO: 4014041 - DNA, 25 bp, Homo sapien
tcaacaggatggtcgcaggaatgaa

SEQ ID NO: 4014042 - DNA, 25 bp, Homo sapien
gatggtctccctgttgtaggccaca

SEQ ID NO: 4014043 - DNA, 25 bp, Homo sapien
ggcagcatcaaggccagatggtctc

SEQ ID NO: 4014044 - DNA, 25 bp, Homo sapien
ggccagatggtctccctgttgtagg

SEQ ID NO: 4014045 - DNA, 25 bp, Homo sapien
cagatggtctccctgttgtaggcca

SEQ ID NO: 4014046 - DNA, 25 bp, Homo sapien
tgtgtgaagacgttggctacacggc

SEQ ID NO: 4014047 - DNA, 25 bp, Homo sapien
gctacacggcgggttaggtctccca

SEQ ID NO: 4014048 - DNA, 25 bp, Homo sapien
acacggcgggttaggtctcccatct

SEQ ID NO: 4014049 - DNA, 25 bp, Homo sapien
tctctctgaagctccactttacttc

SEQ ID NO: 4014050 - DNA, 25 bp, Homo sapien
ctggatttggacctctcttgccctc

SEQ ID NO: 4014051 - DNA, 25 bp, Homo sapien
tgtgcaaaaacatcagacctgcagg

SEQ ID NO: 4014052 - DNA, 25 bp, Homo sapien
ggaaaacatggctcattcaagggag

SEQ ID NO: 4014053 - DNA, 25 bp, Homo sapien
gaagattagtgaaggtctacccctg

SEQ ID NO: 4014054 - DNA, 25 bp, Homo sapien
catttatacgggaaaattagcgagg

SEQ ID NO: 4014055 - DNA, 25 bp, Homo sapien
cttggtctgtgtcttgtgagaagac

SEQ ID NO: 4014056 - DNA, 25 bp, Homo sapien
tctcttggtctgtgtcttgtgagaa

SEQ ID NO: 4014057 - DNA, 25 bp, Homo sapien
ctcttggtctgtgtcttgtgagaag

SEQ ID NO: 4014058 - DNA, 25 bp, Homo sapien
tctctcttggtctgtgtcttgtgag

SEQ ID NO: 4014059 - DNA, 25 bp, Homo sapien
tccttttgagcccagtagtccagta

SEQ ID NO: 4014060 - DNA, 25 bp, Homo sapien
tacttcatagtcattccatcttggg

SEQ ID NO: 4014061 - DNA, 25 bp, Homo sapien
aattctgataaagaccggcagcgca

SEQ ID NO: 4014062 - DNA, 25 bp, Homo sapien
agagggtccggaacctcattagcca

SEQ ID NO: 4014063 - DNA, 25 bp, Homo sapien
acagagttctcaagtcaccacctgc

SEQ ID NO: 4014064 - DNA, 25 bp, Homo sapien
caggcacagagttctcaagtcacca

SEQ ID NO: 4014065 - DNA, 25 bp, Homo sapien
gaaaccaggcacagagttctcaagt

SEQ ID NO: 4014066 - DNA, 25 bp, Homo sapien
aaccaggcacagagttctcaagtca

SEQ ID NO: 4014067 - DNA, 25 bp, Homo sapien
tttgtggctgacaattgggtgagtt

SEQ ID NO: 4014068 - DNA, 25 bp, Homo sapien
tattgtgcaccggtatctctcagac

SEQ ID NO: 4014069 - DNA, 25 bp, Homo sapien
agacaccagacgtcagagagagagc

SEQ ID NO: 4014070 - DNA, 25 bp, Homo sapien
tgtggctgacaattgggtgagttta

SEQ ID NO: 4014071 - DNA, 25 bp, Homo sapien
ttgtagggcataactccctaagccc

SEQ ID NO: 4014072 - DNA, 25 bp, Homo sapien
tgtagggcataactccctaagcccc

SEQ ID NO: 4014073 - DNA, 25 bp, Homo sapien
ggcataactccctaagccccttaga

SEQ ID NO: 4014074 - DNA, 25 bp, Homo sapien
aacttcagagccagatagaccaaac

SEQ ID NO: 4014075 - DNA, 25 bp, Homo sapien
gacaatgtctaccatacagcaagtg

SEQ ID NO: 4014076 - DNA, 25 bp, Homo sapien
gcttttcaaagggtggctgttacaa

SEQ ID NO: 4014077 - DNA, 25 bp, Homo sapien
catggacttgtatactgtggaagga

SEQ ID NO: 4014078 - DNA, 25 bp, Homo sapien
accaactgatgactcttatccttta

SEQ ID NO: 4014079 - DNA, 25 bp, Homo sapien
ctaagaccaactgatgactcttatc

SEQ ID NO: 4014080 - DNA, 25 bp, Homo sapien
ttcctaagaccaactgatgactctt

SEQ ID NO: 4014081 - DNA, 25 bp, Homo sapien
ccaactgatgactcttatcctttaa

SEQ ID NO: 4014082 - DNA, 25 bp, Homo sapien
aaagccatgttattaaacatggtgg

SEQ ID NO: 4014083 - DNA, 25 bp, Homo sapien
tgttattaaacatggtggcatgagt

SEQ ID NO: 4014084 - DNA, 25 bp, Homo sapien
catgttattaaacatggtggcatga

SEQ ID NO: 4014085 - DNA, 25 bp, Homo sapien
attaaacatggtggcatgagttagc

SEQ ID NO: 4014086 - DNA, 25 bp, Homo sapien
ctgttcatatccttcacctgctttt

SEQ ID NO: 4014087 - DNA, 25 bp, Homo sapien
atatccttcacctgctttttgatgg

SEQ ID NO: 4014088 - DNA, 25 bp, Homo sapien
gttcatatccttcacctgctttttg

SEQ ID NO: 4014089 - DNA, 25 bp, Homo sapien
tcatatccttcacctgctttttgat

SEQ ID NO: 4014090 - DNA, 25 bp, Homo sapien
tagtcagtgtcaacgcctttggtcc

SEQ ID NO: 4014091 - DNA, 25 bp, Homo sapien
caatttaagaagtgcaggcttgtcc

SEQ ID NO: 4014092 - DNA, 25 bp, Homo sapien
ttttgccaacaaagtgtggatgccc

SEQ ID NO: 4014093 - DNA, 25 bp, Homo sapien
ggcagggccctactacttactaata

SEQ ID NO: 4014094 - DNA, 25 bp, Homo sapien
caggttacaaccgaacacaggattt

SEQ ID NO: 4014095 - DNA, 25 bp, Homo sapien
taaatgaacatagccacttgtgcag

SEQ ID NO: 4014096 - DNA, 25 bp, Homo sapien
taaagctatagaaggaaggtcctgc

SEQ ID NO: 4014097 - DNA, 25 bp, Homo sapien
gacttatggagacaaccactgatgg

SEQ ID NO: 4014098 - DNA, 25 bp, Homo sapien
gagagcttggactgagtccacataa

SEQ ID NO: 4014099 - DNA, 25 bp, Homo sapien
tccaaaattgcgacactggactgtc

SEQ ID NO: 4014100 - DNA, 25 bp, Homo sapien
cctttcctgagataagttctgctac

SEQ ID NO: 4014101 - DNA, 25 bp, Homo sapien
taaaatggttctcgtctctctcaca

SEQ ID NO: 4014102 - DNA, 25 bp, Homo sapien
tgtttacaacaaagtggcaggcaga

SEQ ID NO: 4014103 - DNA, 25 bp, Homo sapien
aaactgttaacagggctgcgcaatc

SEQ ID NO: 4014104 - DNA, 25 bp, Homo sapien
tagttcactcccttaagtcagctgg

SEQ ID NO: 4014105 - DNA, 25 bp, Homo sapien
tggagccccagcaacatctcgtaga

SEQ ID NO: 4014106 - DNA, 25 bp, Homo sapien
catttgacttggatccttctgtggc

SEQ ID NO: 4014107 - DNA, 25 bp, Homo sapien
tcatttgacttggatccttctgtgg

SEQ ID NO: 4014108 - DNA, 25 bp, Homo sapien
ttgacttggatccttctgtggcttg

SEQ ID NO: 4014109 - DNA, 25 bp, Homo sapien
ctatgagaagtcattttcatttgac

SEQ ID NO: 4014110 - DNA, 25 bp, Homo sapien
ctttgagttaagctgtgacggatcc

SEQ ID NO: 4014111 - DNA, 25 bp, Homo sapien
gatttgtccgcagattccagtttag

SEQ ID NO: 4014112 - DNA, 25 bp, Homo sapien
ttcacaacactcaggcaacagacag

SEQ ID NO: 4014113 - DNA, 25 bp, Homo sapien
ttaccacctgtggattagacgttgg

SEQ ID NO: 4014114 - DNA, 25 bp, Homo sapien
acattcgcaaaataactcgagtctt

SEQ ID NO: 4014115 - DNA, 25 bp, Homo sapien
gactgttatttcgagatttgtacac

SEQ ID NO: 4014116 - DNA, 25 bp, Homo sapien
cattcgcaaaataactcgagtcttc

SEQ ID NO: 4014117 - DNA, 25 bp, Homo sapien
tctctattcacatgactgttatttc

SEQ ID NO: 4014118 - DNA, 25 bp, Homo sapien
tctcagacatcttaaagatcgaact

SEQ ID NO: 4014119 - DNA, 25 bp, Homo sapien
actggcaatgacataagttgacaga

SEQ ID NO: 4014120 - DNA, 25 bp, Homo sapien
gacataagttgacagaagaaattct

SEQ ID NO: 4014121 - DNA, 25 bp, Homo sapien
cttaaagatcgaactctaaaatgaa

SEQ ID NO: 4014122 - DNA, 25 bp, Homo sapien
tgtgatgtcctgagttatccaaccg

SEQ ID NO: 4014123 - DNA, 25 bp, Homo sapien
gaaatgactgtttaggtagacaccg

SEQ ID NO: 4014124 - DNA, 25 bp, Homo sapien
tttcttcagtgcctaatacgtacta

SEQ ID NO: 4014125 - DNA, 25 bp, Homo sapien
ttactgcttgcactagaaatgactg

SEQ ID NO: 4014126 - DNA, 25 bp, Homo sapien
gctaatacagtgtacagaagctgcc

SEQ ID NO: 4014127 - DNA, 25 bp, Homo sapien
tgctgggcacaacatcatgaaaggg

SEQ ID NO: 4014128 - DNA, 25 bp, Homo sapien
tctaaatctcagacccaagaggaat

SEQ ID NO: 4014129 - DNA, 25 bp, Homo sapien
taactgagtcatgcccaagaagcca

SEQ ID NO: 4014130 - DNA, 25 bp, Homo sapien
ccactgactggaatcttcttaacct

SEQ ID NO: 4014131 - DNA, 25 bp, Homo sapien
cctcatctctgtagatgccttaatg

SEQ ID NO: 4014132 - DNA, 25 bp, Homo sapien
tcctgatgaagacaacgttatttgc

SEQ ID NO: 4014133 - DNA, 25 bp, Homo sapien
tgtagatgccttaatgtcaccaact

SEQ ID NO: 4014134 - DNA, 25 bp, Homo sapien
cagtatgtattttatgtacataagc

SEQ ID NO: 4014135 - DNA, 25 bp, Homo sapien
tgtattttatgtacataagcaactc

SEQ ID NO: 4014136 - DNA, 25 bp, Homo sapien
tatgtattttatgtacataagcaac

SEQ ID NO: 4014137 - DNA, 25 bp, Homo sapien
tattttatgtacataagcaactcac

SEQ ID NO: 4014138 - DNA, 25 bp, Homo sapien
tagccagtcttaaagtattctcttt

SEQ ID NO: 4014139 - DNA, 25 bp, Homo sapien
atgtgcccatgtccgagtccccaag

SEQ ID NO: 4014140 - DNA, 25 bp, Homo sapien
ctcttttttatctagctcagcagca

SEQ ID NO: 4014141 - DNA, 25 bp, Homo sapien
tcagcagcatcaaataatgtgccca

SEQ ID NO: 4014142 - DNA, 25 bp, Homo sapien
catgtcgtcgccgtattcgttgagg

SEQ ID NO: 4014143 - DNA, 25 bp, Homo sapien
caggctgagtagtctgctgggcagg

SEQ ID NO: 4014144 - DNA, 25 bp, Homo sapien
ctgtagcccgggctctagctgacgg

SEQ ID NO: 4014145 - DNA, 25 bp, Homo sapien
tgcgctcgttcatattgcaggtgat

SEQ ID NO: 4014146 - DNA, 25 bp, Homo sapien
tgacgtcggatatgagcgacggcct

SEQ ID NO: 4014147 - DNA, 25 bp, Homo sapien
taaggccggtctgcaatcgtgaaag

SEQ ID NO: 4014148 - DNA, 25 bp, Homo sapien
caacctgaatccagtagaggcagca

SEQ ID NO: 4014149 - DNA, 25 bp, Homo sapien
tatcgccggcgcgaactggtgacgt

SEQ ID NO: 4014150 - DNA, 25 bp, Homo sapien
gctcctcaagcccttgaagctggct

SEQ ID NO: 4014151 - DNA, 25 bp, Homo sapien
ggctcctcaagcccttgaagctggc

SEQ ID NO: 4014152 - DNA, 25 bp, Homo sapien
tggctcctcaagcccttgaagctgg

SEQ ID NO: 4014153 - DNA, 25 bp, Homo sapien
agaagtcctcagttgtttgtgaaga

SEQ ID NO: 4014154 - DNA, 25 bp, Homo sapien
tttgtgaagagcagtgtcatgacac

SEQ ID NO: 4014155 - DNA, 25 bp, Homo sapien
tcctcagttgtttgtgaagagcagt

SEQ ID NO: 4014156 - DNA, 25 bp, Homo sapien
cagttgtttgtgaagagcagtgtca

SEQ ID NO: 4014157 - DNA, 25 bp, Homo sapien
catgacctggctgtgaaactctgag

SEQ ID NO: 4014158 - DNA, 25 bp, Homo sapien
tatcaagtacgattaaaagcccagg

SEQ ID NO: 4014159 - DNA, 25 bp, Homo sapien
tcttgttacccagcatcttcaggga

SEQ ID NO: 4014160 - DNA, 25 bp, Homo sapien
tacagaacccaggtaggagatgctc

SEQ ID NO: 4014161 - DNA, 25 bp, Homo sapien
taataatttgctttctccgcccctc

SEQ ID NO: 4014162 - DNA, 25 bp, Homo sapien
tacagaactaaccacttcggcaact

SEQ ID NO: 4014163 - DNA, 25 bp, Homo sapien
tccgcccctcaaaagcttgctgttt

SEQ ID NO: 4014164 - DNA, 25 bp, Homo sapien
taggccaacccataaccgcccctca

SEQ ID NO: 4014165 - DNA, 25 bp, Homo sapien
tgagaactcaaggttcagggctgct

SEQ ID NO: 4014166 - DNA, 25 bp, Homo sapien
tgctcctccggattgtcagactgct

SEQ ID NO: 4014167 - DNA, 25 bp, Homo sapien
tttagactgccacgaggaaaaagca

SEQ ID NO: 4014168 - DNA, 25 bp, Homo sapien
gaatgtctccaccaatcaaggaaag

SEQ ID NO: 4014169 - DNA, 25 bp, Homo sapien
agtaatgaaagaatcaggacgttcc

SEQ ID NO: 4014170 - DNA, 25 bp, Homo sapien
gaatcaggacgttccttttggaaga

SEQ ID NO: 4014171 - DNA, 25 bp, Homo sapien
taatgaaagaatcaggacgttcctt

SEQ ID NO: 4014172 - DNA, 25 bp, Homo sapien
tgaaagaatcaggacgttccttttg

SEQ ID NO: 4014173 - DNA, 25 bp, Homo sapien
cttctggtggatcaacagaaatgga

SEQ ID NO: 4014174 - DNA, 25 bp, Homo sapien
gttggcccagaatttagctgtataa

SEQ ID NO: 4014175 - DNA, 25 bp, Homo sapien
gaatttagctgtataacaaccttta

SEQ ID NO: 4014176 - DNA, 25 bp, Homo sapien
tgcgatggagttttgaggaactggg

SEQ ID NO: 4014177 - DNA, 25 bp, Homo sapien
taggccgtggtaggctaattcctta

SEQ ID NO: 4014178 - DNA, 25 bp, Homo sapien
tcttgcctactgtgtcgcctgggaa

SEQ ID NO: 4014179 - DNA, 25 bp, Homo sapien
cccaaagtgaaaggatgagccagtg

SEQ ID NO: 4014180 - DNA, 25 bp, Homo sapien
tgagccagtgtcaagagtccaggaa

SEQ ID NO: 4014181 - DNA, 25 bp, Homo sapien
caatctctagagagtgctcccagca

SEQ ID NO: 4014182 - DNA, 25 bp, Homo sapien
tcacagtcagtccttcagtgttggc

SEQ ID NO: 4014183 - DNA, 25 bp, Homo sapien
aaagctttcagtcaacccactggga

SEQ ID NO: 4014184 - DNA, 25 bp, Homo sapien
gaggtcctggcctttatatacccac

SEQ ID NO: 4014185 - DNA, 25 bp, Homo sapien
taattcaagctaagccactggcacc

SEQ ID NO: 4014186 - DNA, 25 bp, Homo sapien
gattgcaagatcacacagactcctt

SEQ ID NO: 4014187 - DNA, 25 bp, Homo sapien
gattttgccagtaggctgtagtgtg

SEQ ID NO: 4014188 - DNA, 25 bp, Homo sapien
tgttggcccatcagtacccatggct

SEQ ID NO: 4014189 - DNA, 25 bp, Homo sapien
cctttgcagacatgccagtgacagc

SEQ ID NO: 4014190 - DNA, 25 bp, Homo sapien
ttttcctttgcagacatgccagtga

SEQ ID NO: 4014191 - DNA, 25 bp, Homo sapien
gggtgcactacctttccggcacgtg

SEQ ID NO: 4014192 - DNA, 25 bp, Homo sapien
ctttccggcacgtggtgctctccaa

SEQ ID NO: 4014193 - DNA, 25 bp, Homo sapien
agtgcagcagcttctatccctgtgg

SEQ ID NO: 4014194 - DNA, 25 bp, Homo sapien
gttacagatgaatagctagccagat

SEQ ID NO: 4014195 - DNA, 25 bp, Homo sapien
tctaacttatctggttttctgagaa

SEQ ID NO: 4014196 - DNA, 25 bp, Homo sapien
aatggtttgttttgtgctagggaga

SEQ ID NO: 4014197 - DNA, 25 bp, Homo sapien
cccctgacgtgactgaaaaatggag

SEQ ID NO: 4014198 - DNA, 25 bp, Homo sapien
gtgttattatggtgctcacttcagc

SEQ ID NO: 4014199 - DNA, 25 bp, Homo sapien
actcatattgggcttctgaagtaag

SEQ ID NO: 4014200 - DNA, 25 bp, Homo sapien
tcctgtttactcatattgggcttct

SEQ ID NO: 4014201 - DNA, 25 bp, Homo sapien
cattgtcaaccagagaatattcccc

SEQ ID NO: 4014202 - DNA, 25 bp, Homo sapien
gaagtaaggttctgtaggttccaca

SEQ ID NO: 4014203 - DNA, 25 bp, Homo sapien
ttcttgagagattggttgtcctgaa

SEQ ID NO: 4014204 - DNA, 25 bp, Homo sapien
gtaatccaaaagacaagaaattgaa

SEQ ID NO: 4014205 - DNA, 25 bp, Homo sapien
attggttgtcctgaatagtaatcca

SEQ ID NO: 4014206 - DNA, 25 bp, Homo sapien
gagagattggttgtcctgaatagta

SEQ ID NO: 4014207 - DNA, 25 bp, Homo sapien
gatcactgttccaggtccacgaagg

SEQ ID NO: 4014208 - DNA, 25 bp, Homo sapien
aagaaaagcatgctggtcccctgag

SEQ ID NO: 4014209 - DNA, 25 bp, Homo sapien
caactaataaaggagattcaggagc

SEQ ID NO: 4014210 - DNA, 25 bp, Homo sapien
tctctagaaaccacaagatgatgga

SEQ ID NO: 4014211 - DNA, 25 bp, Homo sapien
caaactgaactgatgacatatgggt

SEQ ID NO: 4014212 - DNA, 25 bp, Homo sapien
tatcccagaaaggtaggcatcctaa

SEQ ID NO: 4014213 - DNA, 25 bp, Homo sapien
tgggagacgcctccaggaagaactt

SEQ ID NO: 4014214 - DNA, 25 bp, Homo sapien
tccgaccacacttgcataatggagg

SEQ ID NO: 4014215 - DNA, 25 bp, Homo sapien
cccgatagggcaacaatagaagact

SEQ ID NO: 4014216 - DNA, 25 bp, Homo sapien
tctggagaactaaaagtgagtcccc

SEQ ID NO: 4014217 - DNA, 25 bp, Homo sapien
ttcaaggtaggagactgcaactgcc

SEQ ID NO: 4014218 - DNA, 25 bp, Homo sapien
cactaatgggaactgtacagtctac

SEQ ID NO: 4014219 - DNA, 25 bp, Homo sapien
tctctaagtctgagtcactaatggg

SEQ ID NO: 4014220 - DNA, 25 bp, Homo sapien
caggtaaacagtccagagtagagct

SEQ ID NO: 4014221 - DNA, 25 bp, Homo sapien
cctgttgtgcctttataggagaatt

SEQ ID NO: 4014222 - DNA, 25 bp, Homo sapien
tgttttttacttgtaattgatcctg

SEQ ID NO: 4014223 - DNA, 25 bp, Homo sapien
aattgatcctgttgtgcctttatag

SEQ ID NO: 4014224 - DNA, 25 bp, Homo sapien
tacttgtaattgatcctgttgtgcc

SEQ ID NO: 4014225 - DNA, 25 bp, Homo sapien
tgctaatgttacaggcagacatttc

SEQ ID NO: 4014226 - DNA, 25 bp, Homo sapien
tattatatatgctgggaccctggat

SEQ ID NO: 4014227 - DNA, 25 bp, Homo sapien
gggaccctggatgctaatgttacag

SEQ ID NO: 4014228 - DNA, 25 bp, Homo sapien
tccttattatatatgctgggaccct

SEQ ID NO: 4014229 - DNA, 25 bp, Homo sapien
gcacacattaaatctacgtttcaaa

SEQ ID NO: 4014230 - DNA, 25 bp, Homo sapien
aaactgtgcattcgttaatttcttc

SEQ ID NO: 4014231 - DNA, 25 bp, Homo sapien
ttgatttataaatgactgcacacat

SEQ ID NO: 4014232 - DNA, 25 bp, Homo sapien
caaagaacgtatgactgtttatgaa

SEQ ID NO: 4014233 - DNA, 25 bp, Homo sapien
gcagtattccgagaatcgtccaacc

SEQ ID NO: 4014234 - DNA, 25 bp, Homo sapien
tgttcaacgaccttgtaattttcat

SEQ ID NO: 4014235 - DNA, 25 bp, Homo sapien
agcaagaagggcagtattccgagaa

SEQ ID NO: 4014236 - DNA, 25 bp, Homo sapien
gaagggcagtattccgagaatcgtc

SEQ ID NO: 4014237 - DNA, 25 bp, Homo sapien
gataaactggtcttggaagtggaag

SEQ ID NO: 4014238 - DNA, 25 bp, Homo sapien
tgcaggaaccaggatttgtgaataa

SEQ ID NO: 4014239 - DNA, 25 bp, Homo sapien
gaaggctatggcagcattaccagtg

SEQ ID NO: 4014240 - DNA, 25 bp, Homo sapien
cagtgaaagacaagctcgtccacat

SEQ ID NO: 4014241 - DNA, 25 bp, Homo sapien
ttcctgcaaggcaccacttagtcct

SEQ ID NO: 4014242 - DNA, 25 bp, Homo sapien
tcctgagaattctattcctacttcc

SEQ ID NO: 4014243 - DNA, 25 bp, Homo sapien
caaggcaccacttagtccttttggt

SEQ ID NO: 4014244 - DNA, 25 bp, Homo sapien
cagaatgttctcgtcctgagaattc

SEQ ID NO: 4014245 - DNA, 25 bp, Homo sapien
cttgtaagttgctctgagatcaatc

SEQ ID NO: 4014246 - DNA, 25 bp, Homo sapien
tttacactcatactccaggcaaacc

SEQ ID NO: 4014247 - DNA, 25 bp, Homo sapien
ttcttttacactcatactccaggca

SEQ ID NO: 4014248 - DNA, 25 bp, Homo sapien
gctctgagatcaatccaagaattta

SEQ ID NO: 4014249 - DNA, 25 bp, Homo sapien
tagtggtaatgctacccatctgtga

SEQ ID NO: 4014250 - DNA, 25 bp, Homo sapien
ttcctagcccagaagattaacaaac

SEQ ID NO: 4014251 - DNA, 25 bp, Homo sapien
tttcttggctaacatctgctaggca

SEQ ID NO: 4014252 - DNA, 25 bp, Homo sapien
gcttaattcttaacagtggaactct

SEQ ID NO: 4014253 - DNA, 25 bp, Homo sapien
gaactgagataagcaaatcttcaga

SEQ ID NO: 4014254 - DNA, 25 bp, Homo sapien
tgaaatcccagtagcaaaaataatg

SEQ ID NO: 4014255 - DNA, 25 bp, Homo sapien
tctgttgctgaatcttatgaatcca

SEQ ID NO: 4014256 - DNA, 25 bp, Homo sapien
tttacagaactgagataagcaaatc

SEQ ID NO: 4014257 - DNA, 25 bp, Homo sapien
ggaactcagagtcaatctgtccagt

SEQ ID NO: 4014258 - DNA, 25 bp, Homo sapien
tctgtccagttgatgtgttcagcaa

SEQ ID NO: 4014259 - DNA, 25 bp, Homo sapien
ggttgaacataagcctggaactcag

SEQ ID NO: 4014260 - DNA, 25 bp, Homo sapien
tctgaaagaattggatgttcctgag

SEQ ID NO: 4014261 - DNA, 25 bp, Homo sapien
ccagcatgtcgattcaaaatcaatg

SEQ ID NO: 4014262 - DNA, 25 bp, Homo sapien
cccatcattccagcatgtcgattca

SEQ ID NO: 4014263 - DNA, 25 bp, Homo sapien
caaaatcaatgacaattaagtagtc

SEQ ID NO: 4014264 - DNA, 25 bp, Homo sapien
gacaattaagtagtcaaacaactgc

SEQ ID NO: 4014265 - DNA, 25 bp, Homo sapien
ggcgcaattgactttctcctaatta

SEQ ID NO: 4014266 - DNA, 25 bp, Homo sapien
tggatttgcttcttccgagatttcc

SEQ ID NO: 4014267 - DNA, 25 bp, Homo sapien
atttccatttgctggcgcaattgac

SEQ ID NO: 4014268 - DNA, 25 bp, Homo sapien
gatttgcttcttccgagatttccat

SEQ ID NO: 4014269 - DNA, 25 bp, Homo sapien
caagacaatgtaggacatggttcag

SEQ ID NO: 4014270 - DNA, 25 bp, Homo sapien
cagtgcagttttaagaagacaagac

SEQ ID NO: 4014271 - DNA, 25 bp, Homo sapien
taggacatggttcagtcttccagtt

SEQ ID NO: 4014272 - DNA, 25 bp, Homo sapien
taagctcttgctatgtgtacagtgc

SEQ ID NO: 4014273 - DNA, 25 bp, Homo sapien
gggtggacgcgccacgttataaatg

SEQ ID NO: 4014274 - DNA, 25 bp, Homo sapien
agtagggtggacgcgccacgttata

SEQ ID NO: 4014275 - DNA, 25 bp, Homo sapien
gacgcgccacgttataaatgaccct

SEQ ID NO: 4014276 - DNA, 25 bp, Homo sapien
tggacgcgccacgttataaatgacc

SEQ ID NO: 4014277 - DNA, 25 bp, Homo sapien
ggaacgagcatttcgaacaggttga

SEQ ID NO: 4014278 - DNA, 25 bp, Homo sapien
cgaggaacgagcatttcgaacaggt

SEQ ID NO: 4014279 - DNA, 25 bp, Homo sapien
accgaggaacgagcatttcgaacag

SEQ ID NO: 4014280 - DNA, 25 bp, Homo sapien
cgagcatttcgaacaggttgaacac

SEQ ID NO: 4014281 - DNA, 25 bp, Homo sapien
tgagacctccaaccagtctgcaggg

SEQ ID NO: 4014282 - DNA, 25 bp, Homo sapien
tagaaggtggcccaaggctgaagac

SEQ ID NO: 4014283 - DNA, 25 bp, Homo sapien
tgtcacgtccagtcgtttcccaagg

SEQ ID NO: 4014284 - DNA, 25 bp, Homo sapien
ttcccaaggcctaaaataggcaggc

SEQ ID NO: 4014285 - DNA, 25 bp, Homo sapien
cccgacactccttgcttttccaagt

SEQ ID NO: 4014286 - DNA, 25 bp, Homo sapien
acactccttgcttttccaagtccag

SEQ ID NO: 4014287 - DNA, 25 bp, Homo sapien
cgacactccttgcttttccaagtcc

SEQ ID NO: 4014288 - DNA, 25 bp, Homo sapien
tcccgacactccttgcttttccaag

SEQ ID NO: 4014289 - DNA, 25 bp, Homo sapien
tgtttctacctttgactatcatgaa

SEQ ID NO: 4014290 - DNA, 25 bp, Homo sapien
ttgtttctacctttgactatcatga

SEQ ID NO: 4014291 - DNA, 25 bp, Homo sapien
tgtgcctgaccctgggttgtttcta

SEQ ID NO: 4014292 - DNA, 25 bp, Homo sapien
aagaggcccacgcacaagactttgt

SEQ ID NO: 4014293 - DNA, 25 bp, Homo sapien
tttgcttgggtctggcctaccacag

SEQ ID NO: 4014294 - DNA, 25 bp, Homo sapien
gacatataggaaacactctcaagag

SEQ ID NO: 4014295 - DNA, 25 bp, Homo sapien
catcctgggctagatttgggtcttc

SEQ ID NO: 4014296 - DNA, 25 bp, Homo sapien
taagagcgccttatggattcactat

SEQ ID NO: 4014297 - DNA, 25 bp, Homo sapien
tacgaacacatgcttttaactccag

SEQ ID NO: 4014298 - DNA, 25 bp, Homo sapien
tccatactgaatttttaagagcgcc

SEQ ID NO: 4014299 - DNA, 25 bp, Homo sapien
gaataccctttagattggcatcctg

SEQ ID NO: 4014300 - DNA, 25 bp, Homo sapien
taaacaagatactgctggagtcctc

SEQ ID NO: 4014301 - DNA, 25 bp, Homo sapien
taactgagtctacaccttttgggct

SEQ ID NO: 4014302 - DNA, 25 bp, Homo sapien
taagagcaattaagcacagacggag

SEQ ID NO: 4014303 - DNA, 25 bp, Homo sapien
tcatgaaagagtcaagcattggccc

SEQ ID NO: 4014304 - DNA, 25 bp, Homo sapien
tcaaaacatgcaattcctgcccagg

SEQ ID NO: 4014305 - DNA, 25 bp, Homo sapien
agaaacatacctgggacgcagcggg

SEQ ID NO: 4014306 - DNA, 25 bp, Homo sapien
aataatccttaagatgggagcccag

SEQ ID NO: 4014307 - DNA, 25 bp, Homo sapien
ggctgctcacaatggaactcaaaac

SEQ ID NO: 4014308 - DNA, 25 bp, Homo sapien
caaagtgttggaagctgaactatac

SEQ ID NO: 4014309 - DNA, 25 bp, Homo sapien
agctgaactatacaagttcctgcca

SEQ ID NO: 4014310 - DNA, 25 bp, Homo sapien
tgttggaagctgaactatacaagtt

SEQ ID NO: 4014311 - DNA, 25 bp, Homo sapien
tccaaagtgttggaagctgaactat

SEQ ID NO: 4014312 - DNA, 25 bp, Homo sapien
tccttcaagtcagttggccggcagg

SEQ ID NO: 4014313 - DNA, 25 bp, Homo sapien
ggttaagtgacaacatgggtgcagc

SEQ ID NO: 4014314 - DNA, 25 bp, Homo sapien
aaactttggctccaaggcaaatgaa

SEQ ID NO: 4014315 - DNA, 25 bp, Homo sapien
ggcttctgcccttgccagacaagta

SEQ ID NO: 4014316 - DNA, 25 bp, Homo sapien
caatgcttaagtggttctcagtaca

SEQ ID NO: 4014317 - DNA, 25 bp, Homo sapien
caagagctctaaatcgcctgggaat

SEQ ID NO: 4014318 - DNA, 25 bp, Homo sapien
caatatgcgaaactgagatctggca

SEQ ID NO: 4014319 - DNA, 25 bp, Homo sapien
tacttccagcaaaactgaggtagca

SEQ ID NO: 4014320 - DNA, 25 bp, Homo sapien
gggacacaagccctcaggccctgag

SEQ ID NO: 4014321 - DNA, 25 bp, Homo sapien
cggaggattgttctgggtaaagact

SEQ ID NO: 4014322 - DNA, 25 bp, Homo sapien
gcaatggctatttcccgatgcagtg

SEQ ID NO: 4014323 - DNA, 25 bp, Homo sapien
ggtaaagactagtttccacagggca

SEQ ID NO: 4014324 - DNA, 25 bp, Homo sapien
tcttggtcccgttgacgaggatatc

SEQ ID NO: 4014325 - DNA, 25 bp, Homo sapien
tccatttttgctgcccagggtcgat

SEQ ID NO: 4014326 - DNA, 25 bp, Homo sapien
tccacctggcttgccacagggtggt

SEQ ID NO: 4014327 - DNA, 25 bp, Homo sapien
gctatgtgacttgttgctgggctca

SEQ ID NO: 4014328 - DNA, 25 bp, Homo sapien
tggcccatgtacctcaacatgccat

SEQ ID NO: 4014329 - DNA, 25 bp, Homo sapien
tggacccctctggattggatgccct

SEQ ID NO: 4014330 - DNA, 25 bp, Homo sapien
gagtggacccctctggattggatgc

SEQ ID NO: 4014331 - DNA, 25 bp, Homo sapien
tctggattggatgccctcgctgccg

SEQ ID NO: 4014332 - DNA, 25 bp, Homo sapien
caaatgccagaaggttggatcgttc

SEQ ID NO: 4014333 - DNA, 25 bp, Homo sapien
ggatcgttcttccactctggtctct

SEQ ID NO: 4014334 - DNA, 25 bp, Homo sapien
ccagaaggttggatcgttcttccac

SEQ ID NO: 4014335 - DNA, 25 bp, Homo sapien
cattccattgagtgttgaggcgagt

SEQ ID NO: 4014336 - DNA, 25 bp, Homo sapien
ctcagcttctgctggaccaagatca

SEQ ID NO: 4014337 - DNA, 25 bp, Homo sapien
tcagcttctgctggaccaagatcag

SEQ ID NO: 4014338 - DNA, 25 bp, Homo sapien
ctgctggaccaagatcagcctccag

SEQ ID NO: 4014339 - DNA, 25 bp, Homo sapien
ttctgctggaccaagatcagcctcc

SEQ ID NO: 4014340 - DNA, 25 bp, Homo sapien
aaatagtttgtagagctagctgggt

SEQ ID NO: 4014341 - DNA, 25 bp, Homo sapien
atagtttgtagagctagctgggtgc

SEQ ID NO: 4014342 - DNA, 25 bp, Homo sapien
aatagtttgtagagctagctgggtg

SEQ ID NO: 4014343 - DNA, 25 bp, Homo sapien
tagtttgtagagctagctgggtgca

SEQ ID NO: 4014344 - DNA, 25 bp, Homo sapien
ctgaggcggttgtactggcacagcc

SEQ ID NO: 4014345 - DNA, 25 bp, Homo sapien
gacagcttttctacagctgccaggg

SEQ ID NO: 4014346 - DNA, 25 bp, Homo sapien
ggccagagaacataagtacatgaat

SEQ ID NO: 4014347 - DNA, 25 bp, Homo sapien
tcctccggagagtctcaaggaccac

SEQ ID NO: 4014348 - DNA, 25 bp, Homo sapien
tgtggtactgcaagctttgcaaagt

SEQ ID NO: 4014349 - DNA, 25 bp, Homo sapien
agtaagacatctgatgattcgttcc

SEQ ID NO: 4014350 - DNA, 25 bp, Homo sapien
tctgatgattcgttcctgcccactt

SEQ ID NO: 4014351 - DNA, 25 bp, Homo sapien
tggaaggcactgtggtactgcaagc

SEQ ID NO: 4014352 - DNA, 25 bp, Homo sapien
gagggtaagtgatacagacaataaa

SEQ ID NO: 4014353 - DNA, 25 bp, Homo sapien
gaaaggccaacaactaaagtcctca

SEQ ID NO: 4014354 - DNA, 25 bp, Homo sapien
gccagaggtacttgctgagaaagca

SEQ ID NO: 4014355 - DNA, 25 bp, Homo sapien
ctttgtttcacatgactgcgagaaa

SEQ ID NO: 4014356 - DNA, 25 bp, Homo sapien
taaatcttcaactggcacgataatg

SEQ ID NO: 4014357 - DNA, 25 bp, Homo sapien
taagtttgttatctgaccttcccag

SEQ ID NO: 4014358 - DNA, 25 bp, Homo sapien
gcactaggctccaagagaccagact

SEQ ID NO: 4014359 - DNA, 25 bp, Homo sapien
catggttctggactaagctcctgca

SEQ ID NO: 4014360 - DNA, 25 bp, Homo sapien
tgttcgagaacaggcccacttgctt

SEQ ID NO: 4014361 - DNA, 25 bp, Homo sapien
cttacagtgcactgaccattttggg

SEQ ID NO: 4014362 - DNA, 25 bp, Homo sapien
tagcattttgcactggtgttcgaga

SEQ ID NO: 4014363 - DNA, 25 bp, Homo sapien
tacagggataatgcctcaactccta

SEQ ID NO: 4014364 - DNA, 25 bp, Homo sapien
aaacactgcatagagttcaaaccca

SEQ ID NO: 4014365 - DNA, 25 bp, Homo sapien
taatgctatgacttgagactcgttc

SEQ ID NO: 4014366 - DNA, 25 bp, Homo sapien
catacttcaacaatggcggagaggg

SEQ ID NO: 4014367 - DNA, 25 bp, Homo sapien
tagggtagcccaatataacagaata

SEQ ID NO: 4014368 - DNA, 25 bp, Homo sapien
gctttctaggttgcccacctttcag

SEQ ID NO: 4014369 - DNA, 25 bp, Homo sapien
tcaactggctttctaggttgcccac

SEQ ID NO: 4014370 - DNA, 25 bp, Homo sapien
ccacaactccaatagcaagtggcat

SEQ ID NO: 4014371 - DNA, 25 bp, Homo sapien
ccaatagcaagtggcatcaactggc

SEQ ID NO: 4014372 - DNA, 25 bp, Homo sapien
ggtactcccaacgtgacagcctgta

SEQ ID NO: 4014373 - DNA, 25 bp, Homo sapien
ggtaagttttctgagccctgcggct

SEQ ID NO: 4014374 - DNA, 25 bp, Homo sapien
taatcggagcgtaagaggtactccc

SEQ ID NO: 4014375 - DNA, 25 bp, Homo sapien
cctatagaggatacaggcaaagcct

SEQ ID NO: 4014376 - DNA, 25 bp, Homo sapien
ccaaaccacctaccatccccgctcg

SEQ ID NO: 4014377 - DNA, 25 bp, Homo sapien
cgctcgcgtttccaggctccctacc

SEQ ID NO: 4014378 - DNA, 25 bp, Homo sapien
ctaccatccccgctcgcgtttccag

SEQ ID NO: 4014379 - DNA, 25 bp, Homo sapien
atccccgctcgcgtttccaggctcc

SEQ ID NO: 4014380 - DNA, 25 bp, Homo sapien
gaagccgtcgccaagtaagggcaaa

SEQ ID NO: 4014381 - DNA, 25 bp, Homo sapien
ctcagcttattgttggatgcggcgg

SEQ ID NO: 4014382 - DNA, 25 bp, Homo sapien
ctggaactggtgctcccacagaggt

SEQ ID NO: 4014383 - DNA, 25 bp, Homo sapien
cacataaagacgtacgaagccgtcg

SEQ ID NO: 4014384 - DNA, 25 bp, Homo sapien
gaaaagtacaaggtccaagctggct

SEQ ID NO: 4014385 - DNA, 25 bp, Homo sapien
taaagcctgtcattacttaggatgc

SEQ ID NO: 4014386 - DNA, 25 bp, Homo sapien
gatgcacttataggatctgaaaagc

SEQ ID NO: 4014387 - DNA, 25 bp, Homo sapien
ttattccacccctgcaagggtagag

SEQ ID NO: 4014388 - DNA, 25 bp, Homo sapien
agaatgaaatgccttcgttctcact

SEQ ID NO: 4014389 - DNA, 25 bp, Homo sapien
aatgaaatgccttcgttctcactca

SEQ ID NO: 4014390 - DNA, 25 bp, Homo sapien
gaaatgccttcgttctcactcatag

SEQ ID NO: 4014391 - DNA, 25 bp, Homo sapien
tgaaatgccttcgttctcactcata

SEQ ID NO: 4014392 - DNA, 25 bp, Homo sapien
tttttattttctgtcttgagacaaa

SEQ ID NO: 4014393 - DNA, 25 bp, Homo sapien
attttctgtcttgagacaaatgcca

SEQ ID NO: 4014394 - DNA, 25 bp, Homo sapien
tattttctgtcttgagacaaatgcc

SEQ ID NO: 4014395 - DNA, 25 bp, Homo sapien
tttattttctgtcttgagacaaatg

SEQ ID NO: 4014396 - DNA, 25 bp, Homo sapien
agagggttcctctgcgggcacttgt

SEQ ID NO: 4014397 - DNA, 25 bp, Homo sapien
aagagccctttgatgtaggccccat

SEQ ID NO: 4014398 - DNA, 25 bp, Homo sapien
tgtcctgatgcagaaacattgcgct

SEQ ID NO: 4014399 - DNA, 25 bp, Homo sapien
catcgttttcctgtcccaacgggca

SEQ ID NO: 4014400 - DNA, 25 bp, Homo sapien
tccaagcaaaggactacctaagggc

SEQ ID NO: 4014401 - DNA, 25 bp, Homo sapien
ggcaaccagtttgtgacctctggac

SEQ ID NO: 4014402 - DNA, 25 bp, Homo sapien
tctctatatatgacaggctgatgct

SEQ ID NO: 4014403 - DNA, 25 bp, Homo sapien
gctgatgcttgactgttggccatgc

SEQ ID NO: 4014404 - DNA, 25 bp, Homo sapien
actcaaatccaatgtggtcaatggg

SEQ ID NO: 4014405 - DNA, 25 bp, Homo sapien
cataattttgagagacgccagtcaa

SEQ ID NO: 4014406 - DNA, 25 bp, Homo sapien
tgtgtgaagtagaatccagagatcc

SEQ ID NO: 4014407 - DNA, 25 bp, Homo sapien
tccagagatccaaaataccacaggg

SEQ ID NO: 4014408 - DNA, 25 bp, Homo sapien
atcaatgtttacatgctggctcaaa

SEQ ID NO: 4014409 - DNA, 25 bp, Homo sapien
ctcatgagccaccagtttgtgacat

SEQ ID NO: 4014410 - DNA, 25 bp, Homo sapien
cataattattgtccaaatctatctc

SEQ ID NO: 4014411 - DNA, 25 bp, Homo sapien
aaatcaatgtttacatgctggctca

SEQ ID NO: 4014412 - DNA, 25 bp, Homo sapien
ctaagcaagcatgccaggttcccgg

SEQ ID NO: 4014413 - DNA, 25 bp, Homo sapien
caagcatgccaggttcccggttacc

SEQ ID NO: 4014414 - DNA, 25 bp, Homo sapien
ccacctaagcaagcatgccaggttc

SEQ ID NO: 4014415 - DNA, 25 bp, Homo sapien
agcaagcatgccaggttcccggtta

SEQ ID NO: 4014416 - DNA, 25 bp, Homo sapien
tgatggctcggccaagattgatgag

SEQ ID NO: 4014417 - DNA, 25 bp, Homo sapien
tacccacaagcatgctgttaaagac

SEQ ID NO: 4014418 - DNA, 25 bp, Homo sapien
taaagacttcctctagctccgagga

SEQ ID NO: 4014419 - DNA, 25 bp, Homo sapien
gaggctcctccgaaccactttggtc

SEQ ID NO: 4014420 - DNA, 25 bp, Homo sapien
tggagagaatgtcttgtgccaactc

SEQ ID NO: 4014421 - DNA, 25 bp, Homo sapien
ggtcaaagtctctgggaagcttgga

SEQ ID NO: 4014422 - DNA, 25 bp, Homo sapien
gccttaggacggtattcatggattc

SEQ ID NO: 4014423 - DNA, 25 bp, Homo sapien
gaccacggggtacaacttcatgacc

SEQ ID NO: 4014424 - DNA, 25 bp, Homo sapien
cctggttgtctttggtgatgtctgc

SEQ ID NO: 4014425 - DNA, 25 bp, Homo sapien
gggagattcctgagatagtcgatat

SEQ ID NO: 4014426 - DNA, 25 bp, Homo sapien
catggaggccgaacacttctgggtg

SEQ ID NO: 4014427 - DNA, 25 bp, Homo sapien
tgtctagggagggtcagcaggaccc

SEQ ID NO: 4014428 - DNA, 25 bp, Homo sapien
aggagggatgtagtaagtgtctcca

SEQ ID NO: 4014429 - DNA, 25 bp, Homo sapien
caggagacgccggtctttgtcatca

SEQ ID NO: 4014430 - DNA, 25 bp, Homo sapien
ccttacagtagaacatggacagaag

SEQ ID NO: 4014431 - DNA, 25 bp, Homo sapien
tctccaggagcgagggagtaatagt

SEQ ID NO: 4014432 - DNA, 25 bp, Homo sapien
cagagcatcaaagggcacctccttg

SEQ ID NO: 4014433 - DNA, 25 bp, Homo sapien
gatctgccacatactaatcctcagg

SEQ ID NO: 4014434 - DNA, 25 bp, Homo sapien
tcagattcgttgaattcatagggaa

SEQ ID NO: 4014435 - DNA, 25 bp, Homo sapien
ggtaggtcagagcatcaaagggcac

SEQ ID NO: 4014436 - DNA, 25 bp, Homo sapien
tccaagggtgtaatgataaatgccc

SEQ ID NO: 4014437 - DNA, 25 bp, Homo sapien
catacatgtgtaaaccaggcatggt

SEQ ID NO: 4014438 - DNA, 25 bp, Homo sapien
gggaaacctgtgctcaatagggaag

SEQ ID NO: 4014439 - DNA, 25 bp, Homo sapien
ttgggggctgaacaagtgacataca

SEQ ID NO: 4014440 - DNA, 25 bp, Homo sapien
tctctgatggatagctggttagcca

SEQ ID NO: 4014441 - DNA, 25 bp, Homo sapien
gggctcattggtcattttgattcca

SEQ ID NO: 4014442 - DNA, 25 bp, Homo sapien
tcattgaggtaggagcgcaacaggt

SEQ ID NO: 4014443 - DNA, 25 bp, Homo sapien
tctctcttgaacaacggcgtggaag

SEQ ID NO: 4014444 - DNA, 25 bp, Homo sapien
ggcagttctgtaagaccacccaggt

SEQ ID NO: 4014445 - DNA, 25 bp, Homo sapien
gtaggcatccagcttgcggccaggt

SEQ ID NO: 4014446 - DNA, 25 bp, Homo sapien
cacccaggtcccgtctttgatggca

SEQ ID NO: 4014447 - DNA, 25 bp, Homo sapien
caaatcttctccagggtaggcatcc

SEQ ID NO: 4014448 - DNA, 25 bp, Homo sapien
tcagattagtatagcggatccccag

SEQ ID NO: 4014449 - DNA, 25 bp, Homo sapien
tacccttggacatggagagaacctc

SEQ ID NO: 4014450 - DNA, 25 bp, Homo sapien
gataatccactgtaaaagcgcccag

SEQ ID NO: 4014451 - DNA, 25 bp, Homo sapien
ttcaaagtcgtcattcagggcctgg

SEQ ID NO: 4014452 - DNA, 25 bp, Homo sapien
cctggtgggttctgcatcgacttca

SEQ ID NO: 4014453 - DNA, 25 bp, Homo sapien
gctagtgcagcctcgagtgcaggca

SEQ ID NO: 4014454 - DNA, 25 bp, Homo sapien
tccatgaccagtttgacagggcctg

SEQ ID NO: 4014455 - DNA, 25 bp, Homo sapien
acttcaccagcgagatgtcggccgg

SEQ ID NO: 4014456 - DNA, 25 bp, Homo sapien
cctcagctaggtccccctcacattc

SEQ ID NO: 4014457 - DNA, 25 bp, Homo sapien
tgcctcagctaggtccccctcacat

SEQ ID NO: 4014458 - DNA, 25 bp, Homo sapien
cagctaggtccccctcacattcgtt

SEQ ID NO: 4014459 - DNA, 25 bp, Homo sapien
tcagctaggtccccctcacattcgt

SEQ ID NO: 4014460 - DNA, 25 bp, Homo sapien
tgaccgttaaccagcagccggaaca

SEQ ID NO: 4014461 - DNA, 25 bp, Homo sapien
gctggacaatggctctgaccgttaa

SEQ ID NO: 4014462 - DNA, 25 bp, Homo sapien
tccagataccctttaacatggtgcc

SEQ ID NO: 4014463 - DNA, 25 bp, Homo sapien
gagctccactcctacatgaggaaga

SEQ ID NO: 4014464 - DNA, 25 bp, Homo sapien
gctgtggtctggatgtcccgaacat

SEQ ID NO: 4014465 - DNA, 25 bp, Homo sapien
taaagagcagggaactaactttgtc

SEQ ID NO: 4014466 - DNA, 25 bp, Homo sapien
ttcctactgtgcattcggtacccta

SEQ ID NO: 4014467 - DNA, 25 bp, Homo sapien
tcttaaaggcaaattaggatcaaac

SEQ ID NO: 4014468 - DNA, 25 bp, Homo sapien
gatcaaacagaaactcctaatatgg

SEQ ID NO: 4014469 - DNA, 25 bp, Homo sapien
cgaaacctgatgtggcagttattgc

SEQ ID NO: 4014470 - DNA, 25 bp, Homo sapien
ggaaagctgcacaatcagacaccgg

SEQ ID NO: 4014471 - DNA, 25 bp, Homo sapien
ttgagcctcaccctttgcaccgaaa

SEQ ID NO: 4014472 - DNA, 25 bp, Homo sapien
gctgcacaatcagacaccggtttct

SEQ ID NO: 4014473 - DNA, 25 bp, Homo sapien
agttgccaattcatgcgcctcaggg

SEQ ID NO: 4014474 - DNA, 25 bp, Homo sapien
caacaagtcgctgtttggcctgaca

SEQ ID NO: 4014475 - DNA, 25 bp, Homo sapien
taataccgaagatgagtgcaacccg

SEQ ID NO: 4014476 - DNA, 25 bp, Homo sapien
tggtcacataggcaagtccccttgg

SEQ ID NO: 4014477 - DNA, 25 bp, Homo sapien
gtctccgcttcaattttcaccatca

SEQ ID NO: 4014478 - DNA, 25 bp, Homo sapien
gcttctctcgtctccgcttcaattt

SEQ ID NO: 4014479 - DNA, 25 bp, Homo sapien
tgaagagctgtcagttctctttgca

SEQ ID NO: 4014480 - DNA, 25 bp, Homo sapien
atcatcttggcagtttcctcggagg

SEQ ID NO: 4014481 - DNA, 25 bp, Homo sapien
ctgaacacatgcctcggcacatcca

SEQ ID NO: 4014482 - DNA, 25 bp, Homo sapien
acatgcctcggcacatccacctcgt

SEQ ID NO: 4014483 - DNA, 25 bp, Homo sapien
cctcggcacatccacctcgtcccgg

SEQ ID NO: 4014484 - DNA, 25 bp, Homo sapien
gaacacatgcctcggcacatccacc

SEQ ID NO: 4014485 - DNA, 25 bp, Homo sapien
taatcgagtgacagcttcttgacgc

SEQ ID NO: 4014486 - DNA, 25 bp, Homo sapien
caaagtcgagtttctgcaagcctgt

SEQ ID NO: 4014487 - DNA, 25 bp, Homo sapien
tcttgcctcttgctattcaggagcg

SEQ ID NO: 4014488 - DNA, 25 bp, Homo sapien
caagcctgtcaggtagcggttcctc

SEQ ID NO: 4014489 - DNA, 25 bp, Homo sapien
gacaccaaggcggttaggcaggacc

SEQ ID NO: 4014490 - DNA, 25 bp, Homo sapien
cgttagaatccaaactctctgagga

SEQ ID NO: 4014491 - DNA, 25 bp, Homo sapien
ggcacatacactgactgtgacacgt

SEQ ID NO: 4014492 - DNA, 25 bp, Homo sapien
ttccagggagatccagtacagcttt

SEQ ID NO: 4014493 - DNA, 25 bp, Homo sapien
ggactggaaccaatcaatcgtacag

SEQ ID NO: 4014494 - DNA, 25 bp, Homo sapien
catccgcaggcggttcctgaaggca

SEQ ID NO: 4014495 - DNA, 25 bp, Homo sapien
ttgatcagcgaagggaacatccgca

SEQ ID NO: 4014496 - DNA, 25 bp, Homo sapien
tagccaccaactctagggcatctgt

SEQ ID NO: 4014497 - DNA, 25 bp, Homo sapien
ctaatgaaaaggagattttgttaat

SEQ ID NO: 4014498 - DNA, 25 bp, Homo sapien
gtatttgtgctgatacacgggagcc

SEQ ID NO: 4014499 - DNA, 25 bp, Homo sapien
ttccgcatccttcgggtcacgtagc

SEQ ID NO: 4014500 - DNA, 25 bp, Homo sapien
tacacactattgttccttccgcatc

SEQ ID NO: 4014501 - DNA, 25 bp, Homo sapien
gctggagccctttgattgacttgct

SEQ ID NO: 4014502 - DNA, 25 bp, Homo sapien
cattgtaagggattggcctgctcag

SEQ ID NO: 4014503 - DNA, 25 bp, Homo sapien
ctcagggcactcagaagaccccaaa

SEQ ID NO: 4014504 - DNA, 25 bp, Homo sapien
caaaacacccagaagaacaagggca

SEQ ID NO: 4014505 - DNA, 25 bp, Homo sapien
ccagaagaacaagggcaaatggagt

SEQ ID NO: 4014506 - DNA, 25 bp, Homo sapien
gaggacaatgtgaaggttctttctc

SEQ ID NO: 4014507 - DNA, 25 bp, Homo sapien
aggacaatgtgaaggttctttctca

SEQ ID NO: 4014508 - DNA, 25 bp, Homo sapien
cgaggacaatgtgaaggttctttct

SEQ ID NO: 4014509 - DNA, 25 bp, Homo sapien
ggacaatgtgaaggttctttctcac

SEQ ID NO: 4014510 - DNA, 25 bp, Homo sapien
gatgtgctcaatggcaaacctgaac

SEQ ID NO: 4014511 - DNA, 25 bp, Homo sapien
gaagatgttaggcacgtcacctgtg

SEQ ID NO: 4014512 - DNA, 25 bp, Homo sapien
tcagaagcatgttgatgtcctccac

SEQ ID NO: 4014513 - DNA, 25 bp, Homo sapien
tcagccttctcgtcagcagggaaga

SEQ ID NO: 4014514 - DNA, 25 bp, Homo sapien
taaacctcatggatccaaagccgga

SEQ ID NO: 4014515 - DNA, 25 bp, Homo sapien
caatcagacgatcatagaagacccg

SEQ ID NO: 4014516 - DNA, 25 bp, Homo sapien
ttccttcaccatgttgaaaaagacc

SEQ ID NO: 4014517 - DNA, 25 bp, Homo sapien
agcaattggaggtggtttccttcac

SEQ ID NO: 4014518 - DNA, 25 bp, Homo sapien
gaatcactcgtgagaagtcccgcag

SEQ ID NO: 4014519 - DNA, 25 bp, Homo sapien
taatgtgacttcgagggagttggca

SEQ ID NO: 4014520 - DNA, 25 bp, Homo sapien
ggcacagcaggaccccttgaatcac

SEQ ID NO: 4014521 - DNA, 25 bp, Homo sapien
tcccgcaggttaaagacgtaatgtg

SEQ ID NO: 4014522 - DNA, 25 bp, Homo sapien
tgatattcagatggcgagtgaatcg

SEQ ID NO: 4014523 - DNA, 25 bp, Homo sapien
atcaaaccctttcccgaagtgccag

SEQ ID NO: 4014524 - DNA, 25 bp, Homo sapien
gaagtgccagtcaacaatcgaactg

SEQ ID NO: 4014525 - DNA, 25 bp, Homo sapien
caacaatcgaactgaaaatcttggt

SEQ ID NO: 4014526 - DNA, 25 bp, Homo sapien
gcttgggccgcacagagcccatgga

SEQ ID NO: 4014527 - DNA, 25 bp, Homo sapien
cccaagccctgccccgcggcaaggc

SEQ ID NO: 4014528 - DNA, 25 bp, Homo sapien
caagccctgccccgcggcaaggcag

SEQ ID NO: 4014529 - DNA, 25 bp, Homo sapien
aggtcccaagccctgccccgcggca

SEQ ID NO: 4014530 - DNA, 25 bp, Homo sapien
gatgactgtcatgcacccctagttg

SEQ ID NO: 4014531 - DNA, 25 bp, Homo sapien
tttcataaaggtggcccagctctgc

SEQ ID NO: 4014532 - DNA, 25 bp, Homo sapien
gggttaggcattctgtctctggcaa

SEQ ID NO: 4014533 - DNA, 25 bp, Homo sapien
caacatgaagcctgtagcctacaca

SEQ ID NO: 4014534 - DNA, 25 bp, Homo sapien
gctgtcacgagcagcatgtccacga

SEQ ID NO: 4014535 - DNA, 25 bp, Homo sapien
gggccccatggctgtcacgagcagc

SEQ ID NO: 4014536 - DNA, 25 bp, Homo sapien
gcatgtccacgatgtccagcctggt

SEQ ID NO: 4014537 - DNA, 25 bp, Homo sapien
cgatgtccagcctggttgtgtcttt

SEQ ID NO: 4014538 - DNA, 25 bp, Homo sapien
gtggctgggccccatacacctcttt

SEQ ID NO: 4014539 - DNA, 25 bp, Homo sapien
tgggccccatacacctctttggctg

SEQ ID NO: 4014540 - DNA, 25 bp, Homo sapien
ctgggccccatacacctctttggct

SEQ ID NO: 4014541 - DNA, 25 bp, Homo sapien
tcttacagaggtaacagatggcaat

SEQ ID NO: 4014542 - DNA, 25 bp, Homo sapien
acagaggtaacagatggcaattccc

SEQ ID NO: 4014543 - DNA, 25 bp, Homo sapien
ttacagaggtaacagatggcaattc

SEQ ID NO: 4014544 - DNA, 25 bp, Homo sapien
tgctcttacagaggtaacagatggc

SEQ ID NO: 4014545 - DNA, 25 bp, Homo sapien
tgtgggacccacgaacagcattgga

SEQ ID NO: 4014546 - DNA, 25 bp, Homo sapien
gctttcttccctatgggaggcccga

SEQ ID NO: 4014547 - DNA, 25 bp, Homo sapien
ccttccgtcgtcgatccagcttgga

SEQ ID NO: 4014548 - DNA, 25 bp, Homo sapien
tttcaagaagaaggactgccgggct

SEQ ID NO: 4014549 - DNA, 25 bp, Homo sapien
tgtccactagcttgtttgataaaat

SEQ ID NO: 4014550 - DNA, 25 bp, Homo sapien
tgatatactgtgtccacgtttccca

SEQ ID NO: 4014551 - DNA, 25 bp, Homo sapien
tcctcctctttggtgatatactgtg

SEQ ID NO: 4014552 - DNA, 25 bp, Homo sapien
cacgtttcccaatgtccactagctt

SEQ ID NO: 4014553 - DNA, 25 bp, Homo sapien
agaatgaacttcatacccaccacaa

SEQ ID NO: 4014554 - DNA, 25 bp, Homo sapien
aacatacagagagaatacaagcact

SEQ ID NO: 4014555 - DNA, 25 bp, Homo sapien
ggtacaatgttgcagcctctatgga

SEQ ID NO: 4014556 - DNA, 25 bp, Homo sapien
gaacttctgtgtatcgctggtggga

SEQ ID NO: 4014557 - DNA, 25 bp, Homo sapien
tatactagaacataacaaacaggtt

SEQ ID NO: 4014558 - DNA, 25 bp, Homo sapien
ccttctgtggcttttgtaaagggct

SEQ ID NO: 4014559 - DNA, 25 bp, Homo sapien
gtgtttagaacatgtaattccaact

SEQ ID NO: 4014560 - DNA, 25 bp, Homo sapien
cacctgtctgcacattctggttgtg

SEQ ID NO: 4014561 - DNA, 25 bp, Homo sapien
catccatgcccatgatcaggttgcg

SEQ ID NO: 4014562 - DNA, 25 bp, Homo sapien
tctgctgtctgcgttgatggtgcca

SEQ ID NO: 4014563 - DNA, 25 bp, Homo sapien
tgagtttgacgcttttgggccttgg

SEQ ID NO: 4014564 - DNA, 25 bp, Homo sapien
gaaagatctgttgacttgacaggcc

SEQ ID NO: 4014565 - DNA, 25 bp, Homo sapien
caaggtggatgggagatgtctggac

SEQ ID NO: 4014566 - DNA, 25 bp, Homo sapien
gatgggagatgtctggacaacaaat

SEQ ID NO: 4014567 - DNA, 25 bp, Homo sapien
tacaatgaaggcgaccaaattccag

SEQ ID NO: 4014568 - DNA, 25 bp, Homo sapien
gagaagagtacagtctcatcattga

SEQ ID NO: 4014569 - DNA, 25 bp, Homo sapien
acaagccacatgaacatgtcattga

SEQ ID NO: 4014570 - DNA, 25 bp, Homo sapien
caagccacatgaacatgtcattgac

SEQ ID NO: 4014571 - DNA, 25 bp, Homo sapien
gaaggtgaagatgtacctagaagac

SEQ ID NO: 4014572 - DNA, 25 bp, Homo sapien
gaagaccctcgagatgaaaagcagg

SEQ ID NO: 4014573 - DNA, 25 bp, Homo sapien
tggggacaacaagggaattccctgc

SEQ ID NO: 4014574 - DNA, 25 bp, Homo sapien
gaagaaagttcgaaaaatggcaggc

SEQ ID NO: 4014575 - DNA, 25 bp, Homo sapien
aattctttgtgctccttggtgagac

SEQ ID NO: 4014576 - DNA, 25 bp, Homo sapien
caattctttgtgctccttggtgaga

SEQ ID NO: 4014577 - DNA, 25 bp, Homo sapien
tgtaggaatccttcaggggcttcca

SEQ ID NO: 4014578 - DNA, 25 bp, Homo sapien
ggcttccagcctagttgatggggct

SEQ ID NO: 4014579 - DNA, 25 bp, Homo sapien
catgtaggaatccttcaggggcttc

SEQ ID NO: 4014580 - DNA, 25 bp, Homo sapien
gggctccatgtagatcatcccacac

SEQ ID NO: 4014581 - DNA, 25 bp, Homo sapien
gcttgctcgaggtcggcgggctcga

SEQ ID NO: 4014582 - DNA, 25 bp, Homo sapien
gggctcgaagatcaggctcatcttg

SEQ ID NO: 4014583 - DNA, 25 bp, Homo sapien
tcggcgggctcgaagatcaggctca

SEQ ID NO: 4014584 - DNA, 25 bp, Homo sapien
tggctggagaggcttgctcgaggtc

SEQ ID NO: 4014585 - DNA, 25 bp, Homo sapien
ttggcctgcatcaaacacaacttga

SEQ ID NO: 4014586 - DNA, 25 bp, Homo sapien
ggcctgcatcaaacacaacttgaaa

SEQ ID NO: 4014587 - DNA, 25 bp, Homo sapien
cccaggaagatcacagctgttacaa

SEQ ID NO: 4014588 - DNA, 25 bp, Homo sapien
caggaagatcacagctgttacaagg

SEQ ID NO: 4014589 - DNA, 25 bp, Homo sapien
tcagagagtgaagacgcttgctccc

SEQ ID NO: 4014590 - DNA, 25 bp, Homo sapien
taatccacttgcgatcatcagagag

SEQ ID NO: 4014591 - DNA, 25 bp, Homo sapien
ttgctcccggaaagcattggcaagg

SEQ ID NO: 4014592 - DNA, 25 bp, Homo sapien
cactcgtggctcacttggtcaaagc

SEQ ID NO: 4014593 - DNA, 25 bp, Homo sapien
tgtaaatcgccgagagctgcagcca

SEQ ID NO: 4014594 - DNA, 25 bp, Homo sapien
gagctgcagccaacactttataagc

SEQ ID NO: 4014595 - DNA, 25 bp, Homo sapien
taagcagaggtcttgccgcccatgg

SEQ ID NO: 4014596 - DNA, 25 bp, Homo sapien
tagccatgtctcaccagcatcattt

SEQ ID NO: 4014597 - DNA, 25 bp, Homo sapien
catagtctggctttggaagaacaac

SEQ ID NO: 4014598 - DNA, 25 bp, Homo sapien
gaagaacaactccaggaaataaatc

SEQ ID NO: 4014599 - DNA, 25 bp, Homo sapien
caaggtactggctggagtttcatct

SEQ ID NO: 4014600 - DNA, 25 bp, Homo sapien
tgttatcattcagcactttcagaaa

SEQ ID NO: 4014601 - DNA, 25 bp, Homo sapien
tcctgcggcagtaagcacagacttg

SEQ ID NO: 4014602 - DNA, 25 bp, Homo sapien
cacaggcggtaggtcgcaacgatct

SEQ ID NO: 4014603 - DNA, 25 bp, Homo sapien
gacagcgcgcataccgtagtcatag

SEQ ID NO: 4014604 - DNA, 25 bp, Homo sapien
tgacatcaagcaatgcccggagcag

SEQ ID NO: 4014605 - DNA, 25 bp, Homo sapien
ccatcatggccactgtccggaacaa

SEQ ID NO: 4014606 - DNA, 25 bp, Homo sapien
gggagatttctccaatgagggcgta

SEQ ID NO: 4014607 - DNA, 25 bp, Homo sapien
tcatggccactgtccggaacaaggc

SEQ ID NO: 4014608 - DNA, 25 bp, Homo sapien
aatgagggcgtaatctgggaccatc

SEQ ID NO: 4014609 - DNA, 25 bp, Homo sapien
cccacatgtatatctgctggcattt

SEQ ID NO: 4014610 - DNA, 25 bp, Homo sapien
cacatgtatatctgctggcatttac

SEQ ID NO: 4014611 - DNA, 25 bp, Homo sapien
ccacatgtatatctgctggcattta

SEQ ID NO: 4014612 - DNA, 25 bp, Homo sapien
tgaggatctgctgagcgaccacaga

SEQ ID NO: 4014613 - DNA, 25 bp, Homo sapien
gaatgtctttagcttccgaatgatg

SEQ ID NO: 4014614 - DNA, 25 bp, Homo sapien
cgaatgatggcttgttggatgctga

SEQ ID NO: 4014615 - DNA, 25 bp, Homo sapien
gagattgtcgggcagttcagccctg

SEQ ID NO: 4014616 - DNA, 25 bp, Homo sapien
gtaatccaaaccatcggagcagttg

SEQ ID NO: 4014617 - DNA, 25 bp, Homo sapien
tagctttgtaatccaaaccatcgga

SEQ ID NO: 4014618 - DNA, 25 bp, Homo sapien
ccatagctttgtaatccaaaccatc

SEQ ID NO: 4014619 - DNA, 25 bp, Homo sapien
tttgtaatccaaaccatcggagcag

SEQ ID NO: 4014620 - DNA, 25 bp, Homo sapien
tggccaaatctttggtggtttctgt

SEQ ID NO: 4014621 - DNA, 25 bp, Homo sapien
ggccaaatctttggtggtttctgtc

SEQ ID NO: 4014622 - DNA, 25 bp, Homo sapien
cagcttcaaagctcccatcagtgtc

SEQ ID NO: 4014623 - DNA, 25 bp, Homo sapien
tggagcacccccaaggttcagcttc

SEQ ID NO: 4014624 - DNA, 25 bp, Homo sapien
ggagcacccccaaggttcagcttca

SEQ ID NO: 4014625 - DNA, 25 bp, Homo sapien
ctggagcacccccaaggttcagctt

SEQ ID NO: 4014626 - DNA, 25 bp, Homo sapien
ttggccacccagtagtagcgcagct

SEQ ID NO: 4014627 - DNA, 25 bp, Homo sapien
gaaatcattcagatcggagaccctg

SEQ ID NO: 4014628 - DNA, 25 bp, Homo sapien
tagcgcagctgtgagatccattgga

SEQ ID NO: 4014629 - DNA, 25 bp, Homo sapien
gagaccctgtcctcagataacttgg

SEQ ID NO: 4014630 - DNA, 25 bp, Homo sapien
tcgcaccagctggacaatctgcgca

SEQ ID NO: 4014631 - DNA, 25 bp, Homo sapien
gctggacaatctgcgcaatctgatc

SEQ ID NO: 4014632 - DNA, 25 bp, Homo sapien
tggacatcgatgaccgtgagggccc

SEQ ID NO: 4014633 - DNA, 25 bp, Homo sapien
cgagagtgagtcgagctccactgct

SEQ ID NO: 4014634 - DNA, 25 bp, Homo sapien
gtattttccgccagggcttgggaca

SEQ ID NO: 4014635 - DNA, 25 bp, Homo sapien
cagtaaggtattttccgccagggct

SEQ ID NO: 4014636 - DNA, 25 bp, Homo sapien
ccaggccactgtaagacccagtgat

SEQ ID NO: 4014637 - DNA, 25 bp, Homo sapien
gccactgtaagacccagtgatttcg

SEQ ID NO: 4014638 - DNA, 25 bp, Homo sapien
agtccaatgacttctcgcatactgg

SEQ ID NO: 4014639 - DNA, 25 bp, Homo sapien
tgacttctcgcatactggccagcat

SEQ ID NO: 4014640 - DNA, 25 bp, Homo sapien
caatcccaagtccaatgacttctcg

SEQ ID NO: 4014641 - DNA, 25 bp, Homo sapien
tgacatatgcttcaatcccaagtcc

SEQ ID NO: 4014642 - DNA, 25 bp, Homo sapien
gattgtctgtaaactcaagcttggc

SEQ ID NO: 4014643 - DNA, 25 bp, Homo sapien
tctttttccgagctgatcatgccca

SEQ ID NO: 4014644 - DNA, 25 bp, Homo sapien
gagagggtcctttgtctcggacaag

SEQ ID NO: 4014645 - DNA, 25 bp, Homo sapien
ccagcagctcatcgtttgataggaa

SEQ ID NO: 4014646 - DNA, 25 bp, Homo sapien
tatgtcttgcggtcttcacaaaggc

SEQ ID NO: 4014647 - DNA, 25 bp, Homo sapien
gaataccagttatgtcttgcggtct

SEQ ID NO: 4014648 - DNA, 25 bp, Homo sapien
ctacgtgaataccagttatgtcttg

SEQ ID NO: 4014649 - DNA, 25 bp, Homo sapien
tcacttttcatctggggcatggaag

SEQ ID NO: 4014650 - DNA, 25 bp, Homo sapien
tggctggtcggctgccaccagaatc

SEQ ID NO: 4014651 - DNA, 25 bp, Homo sapien
gtcggctgccaccagaatcctgtta

SEQ ID NO: 4014652 - DNA, 25 bp, Homo sapien
cattcagccctttctggatgtcctc

SEQ ID NO: 4014653 - DNA, 25 bp, Homo sapien
tgccatccgtggctggtcggctgcc

SEQ ID NO: 4014654 - DNA, 25 bp, Homo sapien
tggttccaggtacagccaggtggct

SEQ ID NO: 4014655 - DNA, 25 bp, Homo sapien
gtatgcgaattagcttttcttccca

SEQ ID NO: 4014656 - DNA, 25 bp, Homo sapien
tgatttccagtaactatcaacaatg

SEQ ID NO: 4014657 - DNA, 25 bp, Homo sapien
cgcttgggacataagtgatttccag

SEQ ID NO: 4014658 - DNA, 25 bp, Homo sapien
tcttttggcagacagttgcaaaggc

SEQ ID NO: 4014659 - DNA, 25 bp, Homo sapien
gcatgccatatgctttcttggatgg

SEQ ID NO: 4014660 - DNA, 25 bp, Homo sapien
tatgctttcttggatggttattgct

SEQ ID NO: 4014661 - DNA, 25 bp, Homo sapien
tgctttcagccttgtgtcattaatt

SEQ ID NO: 4014662 - DNA, 25 bp, Homo sapien
cacacatggtctgggtctttatcac

SEQ ID NO: 4014663 - DNA, 25 bp, Homo sapien
cacgtgatcatcaagtagcatttga

SEQ ID NO: 4014664 - DNA, 25 bp, Homo sapien
atgtcatcaattgcacacaagatgt

SEQ ID NO: 4014665 - DNA, 25 bp, Homo sapien
cattctgcttctattggtttgatga

SEQ ID NO: 4014666 - DNA, 25 bp, Homo sapien
agtgtccctgtatttcacgaagctg

SEQ ID NO: 4014667 - DNA, 25 bp, Homo sapien
tatttcacgaagctgaacgtcacgt

SEQ ID NO: 4014668 - DNA, 25 bp, Homo sapien
tgaacgtcacgttaacccaatccaa

SEQ ID NO: 4014669 - DNA, 25 bp, Homo sapien
gtcacgttaacccaatccaacttca

SEQ ID NO: 4014670 - DNA, 25 bp, Homo sapien
ggcagctgcaccaatgggctccaat

SEQ ID NO: 4014671 - DNA, 25 bp, Homo sapien
ctggcagctgcaccaatgggctcca

SEQ ID NO: 4014672 - DNA, 25 bp, Homo sapien
cagagagtattccttgctggcagct

SEQ ID NO: 4014673 - DNA, 25 bp, Homo sapien
tttctccagagagtattccttgctg

SEQ ID NO: 4014674 - DNA, 25 bp, Homo sapien
aattcgagcatatttgagaggcagg

SEQ ID NO: 4014675 - DNA, 25 bp, Homo sapien
ggtcgtttcggtgggctttatctca

SEQ ID NO: 4014676 - DNA, 25 bp, Homo sapien
ttttcaacgaatttgccgaatccaa

SEQ ID NO: 4014677 - DNA, 25 bp, Homo sapien
tatctcatagccaacaatctcactg

SEQ ID NO: 4014678 - DNA, 25 bp, Homo sapien
ggtgcaggcacatcagacaaggtct

SEQ ID NO: 4014679 - DNA, 25 bp, Homo sapien
gatcagtttatacgttgtcctccac

SEQ ID NO: 4014680 - DNA, 25 bp, Homo sapien
tcacattctctgctaagcgcctggg

SEQ ID NO: 4014681 - DNA, 25 bp, Homo sapien
tactgaggatgggaatgtactgctt

SEQ ID NO: 4014682 - DNA, 25 bp, Homo sapien
ccctccacaggtgttatcattcatg

SEQ ID NO: 4014683 - DNA, 25 bp, Homo sapien
ggctttgattgtaatctacacatca

SEQ ID NO: 4014684 - DNA, 25 bp, Homo sapien
cattcatggctttgattgtaatcta

SEQ ID NO: 4014685 - DNA, 25 bp, Homo sapien
tgcacccagacaaggatctctgatt

SEQ ID NO: 4014686 - DNA, 25 bp, Homo sapien
gcctgcagaagagggtaagtactct

SEQ ID NO: 4014687 - DNA, 25 bp, Homo sapien
tgaactcataggctgtcgaccacag

SEQ ID NO: 4014688 - DNA, 25 bp, Homo sapien
agctgctcataaggtactttgttct

SEQ ID NO: 4014689 - DNA, 25 bp, Homo sapien
catggcctgcagaagagggtaagta

SEQ ID NO: 4014690 - DNA, 25 bp, Homo sapien
cagtacagtgtcataagtccccatc

SEQ ID NO: 4014691 - DNA, 25 bp, Homo sapien
agtacagtgtcataagtccccatct

SEQ ID NO: 4014692 - DNA, 25 bp, Homo sapien
tcttctgtagtcatcacttcgcgct

SEQ ID NO: 4014693 - DNA, 25 bp, Homo sapien
caaactctgcaaacgcccgatttag

SEQ ID NO: 4014694 - DNA, 25 bp, Homo sapien
cttcgcgcttcctaaaactttccag

SEQ ID NO: 4014695 - DNA, 25 bp, Homo sapien
tctgtggtagccctcaagtctcaac

SEQ ID NO: 4014696 - DNA, 25 bp, Homo sapien
tgtggtctccaatgtaaggctgaca

SEQ ID NO: 4014697 - DNA, 25 bp, Homo sapien
gaagaagtcaggtctcatttccaag

SEQ ID NO: 4014698 - DNA, 25 bp, Homo sapien
ttcgcccacacgttgccatggagtg

SEQ ID NO: 4014699 - DNA, 25 bp, Homo sapien
gggaggccgttataacatgccacta

SEQ ID NO: 4014700 - DNA, 25 bp, Homo sapien
ttgtcaaagatatcttcaatctggt

SEQ ID NO: 4014701 - DNA, 25 bp, Homo sapien
catttctgcctgatccctcttgtga

SEQ ID NO: 4014702 - DNA, 25 bp, Homo sapien
gatccctcttgtgaaggagcaagtt

SEQ ID NO: 4014703 - DNA, 25 bp, Homo sapien
agcaagttccggctgttgtcaaaga

SEQ ID NO: 4014704 - DNA, 25 bp, Homo sapien
aacagagtgctgttcaatttgatgt

SEQ ID NO: 4014705 - DNA, 25 bp, Homo sapien
gaggaacagagtgctgttcaatttg

SEQ ID NO: 4014706 - DNA, 25 bp, Homo sapien
gccagaggaacagagtgctgttcaa

SEQ ID NO: 4014707 - DNA, 25 bp, Homo sapien
ccagaggaacagagtgctgttcaat

SEQ ID NO: 4014708 - DNA, 25 bp, Homo sapien
acggcaagtctgcatagtccatcag

SEQ ID NO: 4014709 - DNA, 25 bp, Homo sapien
aattcaatgagggataccagctcct

SEQ ID NO: 4014710 - DNA, 25 bp, Homo sapien
ttgcatctctaagttgcctcctgag

SEQ ID NO: 4014711 - DNA, 25 bp, Homo sapien
actgactttgtctgcgatgtggctg

SEQ ID NO: 4014712 - DNA, 25 bp, Homo sapien
tgtctgcattcttagatattcctgg

SEQ ID NO: 4014713 - DNA, 25 bp, Homo sapien
tattcctgggttcagaatgaggctc

SEQ ID NO: 4014714 - DNA, 25 bp, Homo sapien
gatgaatgcactgatcaactaaggc

SEQ ID NO: 4014715 - DNA, 25 bp, Homo sapien
caactaaggcaccatgttgctttga

SEQ ID NO: 4014716 - DNA, 25 bp, Homo sapien
catggctaaaggcacggtgatgttc

SEQ ID NO: 4014717 - DNA, 25 bp, Homo sapien
cgctcacagagatcatgatttaggg

SEQ ID NO: 4014718 - DNA, 25 bp, Homo sapien
taagattttgagctcgctcacagag

SEQ ID NO: 4014719 - DNA, 25 bp, Homo sapien
tagggccgtagcatcaaggcagaac

SEQ ID NO: 4014720 - DNA, 25 bp, Homo sapien
tctccgtttctttatggcattgatc

SEQ ID NO: 4014721 - DNA, 25 bp, Homo sapien
catttctccgtttctttatggcatt

SEQ ID NO: 4014722 - DNA, 25 bp, Homo sapien
ttcatttctccgtttctttatggca

SEQ ID NO: 4014723 - DNA, 25 bp, Homo sapien
tccgtttctttatggcattgatctt

SEQ ID NO: 4014724 - DNA, 25 bp, Homo sapien
ttcaggaacgcagcgatgttttgct

SEQ ID NO: 4014725 - DNA, 25 bp, Homo sapien
gccgtgttatccaataagtcaacat

SEQ ID NO: 4014726 - DNA, 25 bp, Homo sapien
gatgttttgctctgccgtgttatcc

SEQ ID NO: 4014727 - DNA, 25 bp, Homo sapien
caataagtcaacatactttttgtag

SEQ ID NO: 4014728 - DNA, 25 bp, Homo sapien
ttacagtgtgatgattaaaggacat

SEQ ID NO: 4014729 - DNA, 25 bp, Homo sapien
gctgtgagatgttttacagtgtgat

SEQ ID NO: 4014730 - DNA, 25 bp, Homo sapien
ttttacagtgtgatgattaaaggac

SEQ ID NO: 4014731 - DNA, 25 bp, Homo sapien
tgttttacagtgtgatgattaaagg

SEQ ID NO: 4014732 - DNA, 25 bp, Homo sapien
gggccaacttgatttttctgaaata

SEQ ID NO: 4014733 - DNA, 25 bp, Homo sapien
ttgcaggggccaacttgatttttct

SEQ ID NO: 4014734 - DNA, 25 bp, Homo sapien
caggggccaacttgatttttctgaa

SEQ ID NO: 4014735 - DNA, 25 bp, Homo sapien
ggccaacttgatttttctgaaatac

SEQ ID NO: 4014736 - DNA, 25 bp, Homo sapien
cagttccaaggagcagattatatcc

SEQ ID NO: 4014737 - DNA, 25 bp, Homo sapien
caagtttttcttctgcgttaacagt

SEQ ID NO: 4014738 - DNA, 25 bp, Homo sapien
aaggagcagattatatcctttcagc

SEQ ID NO: 4014739 - DNA, 25 bp, Homo sapien
tgcgttaacagttccaaggagcaga

SEQ ID NO: 4014740 - DNA, 25 bp, Homo sapien
gccttctctaatgcactcatttcca

SEQ ID NO: 4014741 - DNA, 25 bp, Homo sapien
atgcaaagccttctctaatgcactc

SEQ ID NO: 4014742 - DNA, 25 bp, Homo sapien
ccaaatgcaaagccttctctaatgc

SEQ ID NO: 4014743 - DNA, 25 bp, Homo sapien
aaatgcaaagccttctctaatgcac

SEQ ID NO: 4014744 - DNA, 25 bp, Homo sapien
taagtcttcactaaccagttcagag

SEQ ID NO: 4014745 - DNA, 25 bp, Homo sapien
tcttagtcaacctgcaggactatgt

SEQ ID NO: 4014746 - DNA, 25 bp, Homo sapien
gagtgaaggtaacacccaccagttg

SEQ ID NO: 4014747 - DNA, 25 bp, Homo sapien
tatatacggcagatcttgcagtgag

SEQ ID NO: 4014748 - DNA, 25 bp, Homo sapien
aagtcattggtattcacataggcct

SEQ ID NO: 4014749 - DNA, 25 bp, Homo sapien
tttcaaacctggtacaaaccatgtc

SEQ ID NO: 4014750 - DNA, 25 bp, Homo sapien
catcaaatgtagtaccggccctggt

SEQ ID NO: 4014751 - DNA, 25 bp, Homo sapien
cttcttggcattgtaattcatcaaa

SEQ ID NO: 4014752 - DNA, 25 bp, Homo sapien
agccgcgtgcatgctgggctctcct

SEQ ID NO: 4014753 - DNA, 25 bp, Homo sapien
gcagtgaaggagaacttaagtggta

SEQ ID NO: 4014754 - DNA, 25 bp, Homo sapien
agaacttaagtggtatgtatttcag

SEQ ID NO: 4014755 - DNA, 25 bp, Homo sapien
gctttcacacattgccgatcagcag

SEQ ID NO: 4014756 - DNA, 25 bp, Homo sapien
cacacacccagttttaatggagtac

SEQ ID NO: 4014757 - DNA, 25 bp, Homo sapien
tcgtttcacatgagcaaggcccatg

SEQ ID NO: 4014758 - DNA, 25 bp, Homo sapien
tactggttgtaggagagctgcccag

SEQ ID NO: 4014759 - DNA, 25 bp, Homo sapien
tagaaccctgtaagtaccagattgc

SEQ ID NO: 4014760 - DNA, 25 bp, Homo sapien
cccacagatcccttccctatatgga

SEQ ID NO: 4014761 - DNA, 25 bp, Homo sapien
tccctatatggaactggacaatggc

SEQ ID NO: 4014762 - DNA, 25 bp, Homo sapien
ccctatatggaactggacaatggcc

SEQ ID NO: 4014763 - DNA, 25 bp, Homo sapien
cttccctatatggaactggacaatg

SEQ ID NO: 4014764 - DNA, 25 bp, Homo sapien
tatggcttgggacctatctgattca

SEQ ID NO: 4014765 - DNA, 25 bp, Homo sapien
gacatcatggaggacactatactct

SEQ ID NO: 4014766 - DNA, 25 bp, Homo sapien
ggattattaacccacagatatggct

SEQ ID NO: 4014767 - DNA, 25 bp, Homo sapien
tattctctctagaagcctacagtgg

SEQ ID NO: 4014768 - DNA, 25 bp, Homo sapien
gatatatctccaaagtgaagctccc

SEQ ID NO: 4014769 - DNA, 25 bp, Homo sapien
tctgggctgcgtgaatatttcttta

SEQ ID NO: 4014770 - DNA, 25 bp, Homo sapien
gcagctcttcgtgctcttgttagaa

SEQ ID NO: 4014771 - DNA, 25 bp, Homo sapien
cttgttagaagcacaattctgggct

SEQ ID NO: 4014772 - DNA, 25 bp, Homo sapien
gacaataatgggttcactgacttca

SEQ ID NO: 4014773 - DNA, 25 bp, Homo sapien
gattagctgaggtatgaaaaacttc

SEQ ID NO: 4014774 - DNA, 25 bp, Homo sapien
gagtcacgtattaattcccagcagc

SEQ ID NO: 4014775 - DNA, 25 bp, Homo sapien
tcatctcttggtagggctccttaaa

SEQ ID NO: 4014776 - DNA, 25 bp, Homo sapien
cagagtcctggctctaaccaagtaa

SEQ ID NO: 4014777 - DNA, 25 bp, Homo sapien
acagagtcctggctctaaccaagta

SEQ ID NO: 4014778 - DNA, 25 bp, Homo sapien
agagtcctggctctaaccaagtaac

SEQ ID NO: 4014779 - DNA, 25 bp, Homo sapien
tgagtcatagttgctcttgggagca

SEQ ID NO: 4014780 - DNA, 25 bp, Homo sapien
gaaacgaggtcctcaagtgacttaa

SEQ ID NO: 4014781 - DNA, 25 bp, Homo sapien
gctccttccgtgaggtaaaaagctg

SEQ ID NO: 4014782 - DNA, 25 bp, Homo sapien
taagctgcagcgacatgaatgatgc

SEQ ID NO: 4014783 - DNA, 25 bp, Homo sapien
agaagagtctggtgtgcctccaggc

SEQ ID NO: 4014784 - DNA, 25 bp, Homo sapien
agaggcaattttcccgctagtattt

SEQ ID NO: 4014785 - DNA, 25 bp, Homo sapien
tagtatttctgctgttcgaacaaac

SEQ ID NO: 4014786 - DNA, 25 bp, Homo sapien
acatcccaaaattcctgaggctgca

SEQ ID NO: 4014787 - DNA, 25 bp, Homo sapien
tattccagtgcttagagacaggcac

SEQ ID NO: 4014788 - DNA, 25 bp, Homo sapien
cagaataggcttgcttacacgtgga

SEQ ID NO: 4014789 - DNA, 25 bp, Homo sapien
aaaggagggccacgtaagcctgcaa

SEQ ID NO: 4014790 - DNA, 25 bp, Homo sapien
tatgcctgtaaagcagcagagctag

SEQ ID NO: 4014791 - DNA, 25 bp, Homo sapien
gggcccggatcactctttgaggaaa

SEQ ID NO: 4014792 - DNA, 25 bp, Homo sapien
ggttcaccgtgtgcagatgctcctc

SEQ ID NO: 4014793 - DNA, 25 bp, Homo sapien
gggatgctctcaataaagagccgtt

SEQ ID NO: 4014794 - DNA, 25 bp, Homo sapien
tcttggcgctcctgtagacactgtg

SEQ ID NO: 4014795 - DNA, 25 bp, Homo sapien
cgatgcttttcatgaggctacagta

SEQ ID NO: 4014796 - DNA, 25 bp, Homo sapien
tcagctttgaaatccgaaccatcac

SEQ ID NO: 4014797 - DNA, 25 bp, Homo sapien
catgtctttgcgaattccattggtc

SEQ ID NO: 4014798 - DNA, 25 bp, Homo sapien
gaagggactcgtcagcagcgtgtta

SEQ ID NO: 4014799 - DNA, 25 bp, Homo sapien
ctccaggtccgattcagatggcttc

SEQ ID NO: 4014800 - DNA, 25 bp, Homo sapien
atctcctgctgtaacatgacatcga

SEQ ID NO: 4014801 - DNA, 25 bp, Homo sapien
tgctgttctggactcattggtctgc

SEQ ID NO: 4014802 - DNA, 25 bp, Homo sapien
ctgtaacatgacatcgagctgctgt

SEQ ID NO: 4014803 - DNA, 25 bp, Homo sapien
tgacgtcttgaaggccaacttgatc

SEQ ID NO: 4014804 - DNA, 25 bp, Homo sapien
caaagatgtctttacctccttcttc

SEQ ID NO: 4014805 - DNA, 25 bp, Homo sapien
ctgggaacgtcaaagatgtctttac

SEQ ID NO: 4014806 - DNA, 25 bp, Homo sapien
ttcatgggtgagaagattgacgtct

SEQ ID NO: 4014807 - DNA, 25 bp, Homo sapien
ttttttcctcatgggctctgatgag

SEQ ID NO: 4014808 - DNA, 25 bp, Homo sapien
ggacactgatggtggccggttggta

SEQ ID NO: 4014809 - DNA, 25 bp, Homo sapien
gccggttggtagaccttcagcagat

SEQ ID NO: 4014810 - DNA, 25 bp, Homo sapien
tggtagaccttcagcagatctttca

SEQ ID NO: 4014811 - DNA, 25 bp, Homo sapien
atggtggccggttggtagaccttca

SEQ ID NO: 4014812 - DNA, 25 bp, Homo sapien
tccacggtggtgatgctgttctttg

SEQ ID NO: 4014813 - DNA, 25 bp, Homo sapien
catcaagggcgggtaaaagctgtgt

SEQ ID NO: 4014814 - DNA, 25 bp, Homo sapien
tagttgttggcgatggaatcactgg

SEQ ID NO: 4014815 - DNA, 25 bp, Homo sapien
tgcagccaaggtccatgacgtgcgt

SEQ ID NO: 4014816 - DNA, 25 bp, Homo sapien
ctgatagagtccagacggttcctca

SEQ ID NO: 4014817 - DNA, 25 bp, Homo sapien
ctcatgtgatgtatggagtcacttt

SEQ ID NO: 4014818 - DNA, 25 bp, Homo sapien
ggctcatgtgatgtatggagtcact

SEQ ID NO: 4014819 - DNA, 25 bp, Homo sapien
tccagacggttcctcattagcagaa

SEQ ID NO: 4014820 - DNA, 25 bp, Homo sapien
gagatgagcaatccatgtcacccat

SEQ ID NO: 4014821 - DNA, 25 bp, Homo sapien
tgtgcctctcctatccagttggtct

SEQ ID NO: 4014822 - DNA, 25 bp, Homo sapien
gatgacaccaacaatggaactttcc

SEQ ID NO: 4014823 - DNA, 25 bp, Homo sapien
gaggtcatagactttggcccgctga

SEQ ID NO: 4014824 - DNA, 25 bp, Homo sapien
tcacacttccttatagcataatggg

SEQ ID NO: 4014825 - DNA, 25 bp, Homo sapien
agtgcttgtatgcaggcgctgggca

SEQ ID NO: 4014826 - DNA, 25 bp, Homo sapien
acactggcagtgcttgtatgcaggc

SEQ ID NO: 4014827 - DNA, 25 bp, Homo sapien
atcctggcagcccgaactgttctcc

SEQ ID NO: 4014828 - DNA, 25 bp, Homo sapien
ctggcagtgcttgtatgcaggcgct

SEQ ID NO: 4014829 - DNA, 25 bp, Homo sapien
gcgggcccacggcgcgggactggca

SEQ ID NO: 4014830 - DNA, 25 bp, Homo sapien
gagtgcgggcccacggcgcgggact

SEQ ID NO: 4014831 - DNA, 25 bp, Homo sapien
tgcagccccggtgcaggagccactg

SEQ ID NO: 4014832 - DNA, 25 bp, Homo sapien
ctgaggagtgcgggcccacggcgcg

SEQ ID NO: 4014833 - DNA, 25 bp, Homo sapien
gctccctctcgggacgctctttcct

SEQ ID NO: 4014834 - DNA, 25 bp, Homo sapien
ctagtggctccgaaagccagtggga

SEQ ID NO: 4014835 - DNA, 25 bp, Homo sapien
ttggcgcgcctttgccggatccttc

SEQ ID NO: 4014836 - DNA, 25 bp, Homo sapien
cgagcgcgctttgcaaagccttggg

SEQ ID NO: 4014837 - DNA, 25 bp, Homo sapien
ccagcccctcttctccaccgaggtc

SEQ ID NO: 4014838 - DNA, 25 bp, Homo sapien
cagcccctcttctccaccgaggtcc

SEQ ID NO: 4014839 - DNA, 25 bp, Homo sapien
cccagcccctcttctccaccgaggt

SEQ ID NO: 4014840 - DNA, 25 bp, Homo sapien
cacccagcccctcttctccaccgag

SEQ ID NO: 4014841 - DNA, 25 bp, Homo sapien
ttttgaacgctgaaaggctgggccc

SEQ ID NO: 4014842 - DNA, 25 bp, Homo sapien
gcggccagtgtgagctcgaggcgcc

SEQ ID NO: 4014843 - DNA, 25 bp, Homo sapien
cagtgtgagctcgaggcgccctgta

SEQ ID NO: 4014844 - DNA, 25 bp, Homo sapien
tccctggcttttgaacgctgaaagg

SEQ ID NO: 4014845 - DNA, 25 bp, Homo sapien
gccgttcctgttggattcttcctgc

SEQ ID NO: 4014846 - DNA, 25 bp, Homo sapien
atcgtggtgcttaccaccctggctg

SEQ ID NO: 4014847 - DNA, 25 bp, Homo sapien
tgctcatcgtggtgcttaccaccct

SEQ ID NO: 4014848 - DNA, 25 bp, Homo sapien
ctggtgttcattgtcatgtcggccg

SEQ ID NO: 4014849 - DNA, 25 bp, Homo sapien
tttgactgctttatttagaagccca

SEQ ID NO: 4014850 - DNA, 25 bp, Homo sapien
ttgactgctttatttagaagcccat

SEQ ID NO: 4014851 - DNA, 25 bp, Homo sapien
ttttgactgctttatttagaagccc

SEQ ID NO: 4014852 - DNA, 25 bp, Homo sapien
attttgactgctttatttagaagcc

SEQ ID NO: 4014853 - DNA, 25 bp, Homo sapien
gacacagtccttttctcgtacaggt

SEQ ID NO: 4014854 - DNA, 25 bp, Homo sapien
tagatgaagcctagagttgccacca

SEQ ID NO: 4014855 - DNA, 25 bp, Homo sapien
tttctcgtacaggtagtagatgaag

SEQ ID NO: 4014856 - DNA, 25 bp, Homo sapien
gatgaagcctagagttgccaccaca

SEQ ID NO: 4014857 - DNA, 25 bp, Homo sapien
ccctgtttcactcctactcttctcc

SEQ ID NO: 4014858 - DNA, 25 bp, Homo sapien
gcttttagatcagatgagccgacac

SEQ ID NO: 4014859 - DNA, 25 bp, Homo sapien
tcccctgtttcactcctactcttct

SEQ ID NO: 4014860 - DNA, 25 bp, Homo sapien
cactgctcccacttgcttttagatc

SEQ ID NO: 4014861 - DNA, 25 bp, Homo sapien
agtactccaggctttaggtccatac

SEQ ID NO: 4014862 - DNA, 25 bp, Homo sapien
ggaagtactccaggctttaggtcca

SEQ ID NO: 4014863 - DNA, 25 bp, Homo sapien
tccaggaagtactccaggctttagg

SEQ ID NO: 4014864 - DNA, 25 bp, Homo sapien
tgaatccaggaagtactccaggctt

SEQ ID NO: 4014865 - DNA, 25 bp, Homo sapien
ctctgaatgaggagtcatctgacaa

SEQ ID NO: 4014866 - DNA, 25 bp, Homo sapien
ctgaatgaggagtcatctgacaaca

SEQ ID NO: 4014867 - DNA, 25 bp, Homo sapien
tctgaatgaggagtcatctgacaac

SEQ ID NO: 4014868 - DNA, 25 bp, Homo sapien
ctggagacagatgatcaagtttgtg

SEQ ID NO: 4014869 - DNA, 25 bp, Homo sapien
agatgatcaagtttgtgtttggcct

SEQ ID NO: 4014870 - DNA, 25 bp, Homo sapien
ggagacagatgatcaagtttgtgtt

SEQ ID NO: 4014871 - DNA, 25 bp, Homo sapien
gacagatgatcaagtttgtgtttgg

SEQ ID NO: 4014872 - DNA, 25 bp, Homo sapien
gggagagtcgattacagattaaggc

SEQ ID NO: 4014873 - DNA, 25 bp, Homo sapien
agtcgattacagattaaggcactgc

SEQ ID NO: 4014874 - DNA, 25 bp, Homo sapien
gagagtcgattacagattaaggcac

SEQ ID NO: 4014875 - DNA, 25 bp, Homo sapien
agtcaggggagagtcgattacagat

SEQ ID NO: 4014876 - DNA, 25 bp, Homo sapien
ggcaaaagccttcatgtcaaacctc

SEQ ID NO: 4014877 - DNA, 25 bp, Homo sapien
agtgatcaggatgggtcacagagga

SEQ ID NO: 4014878 - DNA, 25 bp, Homo sapien
caggctagagagcacgtgggcttct

SEQ ID NO: 4014879 - DNA, 25 bp, Homo sapien
gaaggtggtctggtagttgtccagg

SEQ ID NO: 4014880 - DNA, 25 bp, Homo sapien
gcggaggaatctcactagagggtac

SEQ ID NO: 4014881 - DNA, 25 bp, Homo sapien
gacgtcgcccagcagtcatctaaga

SEQ ID NO: 4014882 - DNA, 25 bp, Homo sapien
catgtaaattggttggcggaggaat

SEQ ID NO: 4014883 - DNA, 25 bp, Homo sapien
tctggatccatggtggacgtcgccc

SEQ ID NO: 4014884 - DNA, 25 bp, Homo sapien
ctttcaacgttgatgtttagtagca

SEQ ID NO: 4014885 - DNA, 25 bp, Homo sapien
tcactgaggccactggaggagtaag

SEQ ID NO: 4014886 - DNA, 25 bp, Homo sapien
gatgtttagtagcatgtcattcctg

SEQ ID NO: 4014887 - DNA, 25 bp, Homo sapien
ggtaaatggacccaacttcactgag

SEQ ID NO: 4014888 - DNA, 25 bp, Homo sapien
tccgtccagagagcatgtatttcgt

SEQ ID NO: 4014889 - DNA, 25 bp, Homo sapien
gttttcatagacgactttatcatct

SEQ ID NO: 4014890 - DNA, 25 bp, Homo sapien
catgtatttcgttttcatagacgac

SEQ ID NO: 4014891 - DNA, 25 bp, Homo sapien
cttggaggaaaatccgtccagagag

SEQ ID NO: 4014892 - DNA, 25 bp, Homo sapien
aagatgagacttaacctcgtgccat

SEQ ID NO: 4014893 - DNA, 25 bp, Homo sapien
cagttatgtcaaagatgagacttaa

SEQ ID NO: 4014894 - DNA, 25 bp, Homo sapien
cagagaaagtgggttagcagccagt

SEQ ID NO: 4014895 - DNA, 25 bp, Homo sapien
acctcgtgccatctgccagtactaa

SEQ ID NO: 4014896 - DNA, 25 bp, Homo sapien
atgtggaaccgtaccagcccctgag

SEQ ID NO: 4014897 - DNA, 25 bp, Homo sapien
tacccaggtcaagagctggttgtgt

SEQ ID NO: 4014898 - DNA, 25 bp, Homo sapien
tgtttggtagctgtagacctcgacg

SEQ ID NO: 4014899 - DNA, 25 bp, Homo sapien
tcgacgtccataaacccatcctggg

SEQ ID NO: 4014900 - DNA, 25 bp, Homo sapien
aataagtttgtctgccctgtgatac

SEQ ID NO: 4014901 - DNA, 25 bp, Homo sapien
agacagcggtgaaagtttagagaaa

SEQ ID NO: 4014902 - DNA, 25 bp, Homo sapien
ctagacagcggtgaaagtttagaga

SEQ ID NO: 4014903 - DNA, 25 bp, Homo sapien
aaataagtttgtctgccctgtgata

SEQ ID NO: 4014904 - DNA, 25 bp, Homo sapien
caggatagatcaccatggatactgt

SEQ ID NO: 4014905 - DNA, 25 bp, Homo sapien
gcttgagtgaagctaagtagaactg

SEQ ID NO: 4014906 - DNA, 25 bp, Homo sapien
tctctggccgaaggagaaaggtcag

SEQ ID NO: 4014907 - DNA, 25 bp, Homo sapien
tagaaacgggtgactcacagagaca

SEQ ID NO: 4014908 - DNA, 25 bp, Homo sapien
catgccatttgttgcttctagatca

SEQ ID NO: 4014909 - DNA, 25 bp, Homo sapien
tcacagacttaagcttcccaggaaa

SEQ ID NO: 4014910 - DNA, 25 bp, Homo sapien
caggaaactctggtatggtgagagt

SEQ ID NO: 4014911 - DNA, 25 bp, Homo sapien
cagctggctcacatcaatgttctgg

SEQ ID NO: 4014912 - DNA, 25 bp, Homo sapien
cagagacaccatgtagagatgactg

SEQ ID NO: 4014913 - DNA, 25 bp, Homo sapien
caaatagcttgtgaagagaagatca

SEQ ID NO: 4014914 - DNA, 25 bp, Homo sapien
gtaagcttcagagacaccatgtaga

SEQ ID NO: 4014915 - DNA, 25 bp, Homo sapien
tccaggagatataaatgtaagcttc

SEQ ID NO: 4014916 - DNA, 25 bp, Homo sapien
tgtcaatcaagaggctgaagccttc

SEQ ID NO: 4014917 - DNA, 25 bp, Homo sapien
gaatggcacatggaaggtcatcctg

SEQ ID NO: 4014918 - DNA, 25 bp, Homo sapien
tagtgagtcactccagtggcattga

SEQ ID NO: 4014919 - DNA, 25 bp, Homo sapien
gttttggctcttgcaccatcaccaa

SEQ ID NO: 4014920 - DNA, 25 bp, Homo sapien
cttactgtcgtcagccaagccagag

SEQ ID NO: 4014921 - DNA, 25 bp, Homo sapien
ttactgtcgtcagccaagccagaga

SEQ ID NO: 4014922 - DNA, 25 bp, Homo sapien
cagagaagacccgtggcaaggaaaa

SEQ ID NO: 4014923 - DNA, 25 bp, Homo sapien
gccaagccagagaagacccgtggca

SEQ ID NO: 4014924 - DNA, 25 bp, Homo sapien
gatgtttccgaattcatgccagaaa

SEQ ID NO: 4014925 - DNA, 25 bp, Homo sapien
ttggaggtagatgtttccgaattca

SEQ ID NO: 4014926 - DNA, 25 bp, Homo sapien
ctttgatttggaggtagatgtttcc

SEQ ID NO: 4014927 - DNA, 25 bp, Homo sapien
cgaattcatgccagaaattgctgtg

SEQ ID NO: 4014928 - DNA, 25 bp, Homo sapien
gcagcactgttgttcatgactctga

SEQ ID NO: 4014929 - DNA, 25 bp, Homo sapien
tctacttgcatagctggacagaaga

SEQ ID NO: 4014930 - DNA, 25 bp, Homo sapien
gctccgtgtcttaaggcagcactgt

SEQ ID NO: 4014931 - DNA, 25 bp, Homo sapien
cagattgtagatgctgaaagcccct

SEQ ID NO: 4014932 - DNA, 25 bp, Homo sapien
gatgtaagtgcagttcggcatgtcg

SEQ ID NO: 4014933 - DNA, 25 bp, Homo sapien
acagttatcataggtagccctcagg

SEQ ID NO: 4014934 - DNA, 25 bp, Homo sapien
cactctcctggtacagttatcatag

SEQ ID NO: 4014935 - DNA, 25 bp, Homo sapien
ttcggcatgtcgagaccaagaggat

SEQ ID NO: 4014936 - DNA, 25 bp, Homo sapien
ggactgcttgggaactccactgtta

SEQ ID NO: 4014937 - DNA, 25 bp, Homo sapien
tttccctttcatcgcaagtgacagt

SEQ ID NO: 4014938 - DNA, 25 bp, Homo sapien
ccaggactgcttgggaactccactg

SEQ ID NO: 4014939 - DNA, 25 bp, Homo sapien
actgttatttccctttcatcgcaag

SEQ ID NO: 4014940 - DNA, 25 bp, Homo sapien
cacaagggcgaagaagagagaaatc

SEQ ID NO: 4014941 - DNA, 25 bp, Homo sapien
ctgaagtcacaagggcgaagaagag

SEQ ID NO: 4014942 - DNA, 25 bp, Homo sapien
gaagagagaaatcgacctgtaggtg

SEQ ID NO: 4014943 - DNA, 25 bp, Homo sapien
acatctatggagttccctgaagtca

SEQ ID NO: 4014944 - DNA, 25 bp, Homo sapien
cattgaaccagcctgagggactcca

SEQ ID NO: 4014945 - DNA, 25 bp, Homo sapien
tccagcctgcattgaaccagcctga

SEQ ID NO: 4014946 - DNA, 25 bp, Homo sapien
tgaaccagcctgagggactccaaga

SEQ ID NO: 4014947 - DNA, 25 bp, Homo sapien
ccagcctgcattgaaccagcctgag

SEQ ID NO: 4014948 - DNA, 25 bp, Homo sapien
tagcaggaagccagccgcatccaca

SEQ ID NO: 4014949 - DNA, 25 bp, Homo sapien
tagagggtaggctgctctgtgtttt

SEQ ID NO: 4014950 - DNA, 25 bp, Homo sapien
ggtaggctgctctgtgtttttatag

SEQ ID NO: 4014951 - DNA, 25 bp, Homo sapien
aaccaggtagagggtaggctgctct

SEQ ID NO: 4014952 - DNA, 25 bp, Homo sapien
ttgcgccgggtattctgccagctgc

SEQ ID NO: 4014953 - DNA, 25 bp, Homo sapien
ttcctgacagcttgcgccgggtatt

SEQ ID NO: 4014954 - DNA, 25 bp, Homo sapien
ctgattcctgacagcttgcgccggg

SEQ ID NO: 4014955 - DNA, 25 bp, Homo sapien
agcttgcgccgggtattctgccagc

SEQ ID NO: 4014956 - DNA, 25 bp, Homo sapien
agtttttgccttggaaagggcagct

SEQ ID NO: 4014957 - DNA, 25 bp, Homo sapien
ctccagagcgggaagtttttgcctt

SEQ ID NO: 4014958 - DNA, 25 bp, Homo sapien
agggcagctttggtcagagccccca

SEQ ID NO: 4014959 - DNA, 25 bp, Homo sapien
tccagagcgggaagtttttgccttg

SEQ ID NO: 4014960 - DNA, 25 bp, Homo sapien
cagccaccgaacaaatggctctggg

SEQ ID NO: 4014961 - DNA, 25 bp, Homo sapien
ggacagccaccgaacaaatggctct

SEQ ID NO: 4014962 - DNA, 25 bp, Homo sapien
ggggacagccaccgaacaaatggct

SEQ ID NO: 4014963 - DNA, 25 bp, Homo sapien
gacagccaccgaacaaatggctctg

SEQ ID NO: 4014964 - DNA, 25 bp, Homo sapien
ctgttacaatgtatgccatctggga

SEQ ID NO: 4014965 - DNA, 25 bp, Homo sapien
gaaacaaaatggcacctaacatagg

SEQ ID NO: 4014966 - DNA, 25 bp, Homo sapien
ttccaatgattgtcgttcctgcagt

SEQ ID NO: 4014967 - DNA, 25 bp, Homo sapien
cagttaagagatgccaagagattcc

SEQ ID NO: 4014968 - DNA, 25 bp, Homo sapien
gggtcatctcaggtgtactgttctt

SEQ ID NO: 4014969 - DNA, 25 bp, Homo sapien
tttaatagcttaaagccactaggaa

SEQ ID NO: 4014970 - DNA, 25 bp, Homo sapien
ttaagattcagtgaaatgggtgcag

SEQ ID NO: 4014971 - DNA, 25 bp, Homo sapien
gccactaggaaaacccatgaattgt

SEQ ID NO: 4014972 - DNA, 25 bp, Homo sapien
tttcccatctcttaggcgtgtaacc

SEQ ID NO: 4014973 - DNA, 25 bp, Homo sapien
ggtacgctactgtgtatctcttcca

SEQ ID NO: 4014974 - DNA, 25 bp, Homo sapien
cgtgtaacctagtgctggccaatga

SEQ ID NO: 4014975 - DNA, 25 bp, Homo sapien
gaaatagttgataatggtacgctac

SEQ ID NO: 4014976 - DNA, 25 bp, Homo sapien
cagaaagactccatagtcacttgag

SEQ ID NO: 4014977 - DNA, 25 bp, Homo sapien
gtcacttgagatatgcagaatcaga

SEQ ID NO: 4014978 - DNA, 25 bp, Homo sapien
caggaggagtatggtcaggaaaaca

SEQ ID NO: 4014979 - DNA, 25 bp, Homo sapien
aacttttggctaaaccatctggagc

SEQ ID NO: 4014980 - DNA, 25 bp, Homo sapien
cagaagaaatggctacctagctttg

SEQ ID NO: 4014981 - DNA, 25 bp, Homo sapien
ctattataacttggtagaacagaag

SEQ ID NO: 4014982 - DNA, 25 bp, Homo sapien
ctagaaattatgagaaccagcagca

SEQ ID NO: 4014983 - DNA, 25 bp, Homo sapien
gctttgctttccaactacaaacata

SEQ ID NO: 4014984 - DNA, 25 bp, Homo sapien
tggctgcaactgtgtcttccactgc

SEQ ID NO: 4014985 - DNA, 25 bp, Homo sapien
catagatgagtttggctgcaactgt

SEQ ID NO: 4014986 - DNA, 25 bp, Homo sapien
aatcatagatgagtttggctgcaac

SEQ ID NO: 4014987 - DNA, 25 bp, Homo sapien
caggaatcatagatgagtttggctg

SEQ ID NO: 4014988 - DNA, 25 bp, Homo sapien
cagaaatttggttcgcctttggtca

SEQ ID NO: 4014989 - DNA, 25 bp, Homo sapien
tgccaatgcctattggaataacagg

SEQ ID NO: 4014990 - DNA, 25 bp, Homo sapien
ttcttgaaacaacccaggccccatg

SEQ ID NO: 4014991 - DNA, 25 bp, Homo sapien
gaagtttcctgatacatgtccatgt

SEQ ID NO: 4014992 - DNA, 25 bp, Homo sapien
accaacaaattgtgcatctttctaa

SEQ ID NO: 4014993 - DNA, 25 bp, Homo sapien
tgatagtaagaaacacccaccaaca

SEQ ID NO: 4014994 - DNA, 25 bp, Homo sapien
gaaacacccaccaacaaattgtgca

SEQ ID NO: 4014995 - DNA, 25 bp, Homo sapien
ggcagagaatatgatagtaagaaac

SEQ ID NO: 4014996 - DNA, 25 bp, Homo sapien
ggtttcactcccttaatcacttctc

SEQ ID NO: 4014997 - DNA, 25 bp, Homo sapien
ccaaagacttgaacacggtggtctt

SEQ ID NO: 4014998 - DNA, 25 bp, Homo sapien
tcacagtgggctggtttcactccct

SEQ ID NO: 4014999 - DNA, 25 bp, Homo sapien
cttgaacacggtggtcttctcacag

SEQ ID NO: 4015000 - DNA, 25 bp, Homo sapien
tgacagcaggacatctccagactcc

SEQ ID NO: 4015001 - DNA, 25 bp, Homo sapien
acatctccagactccttcagggcag

SEQ ID NO: 4015002 - DNA, 25 bp, Homo sapien
tgggaatccacgtacagcacagctt

SEQ ID NO: 4015003 - DNA, 25 bp, Homo sapien
ccagttctctccagtcaggtctgct

SEQ ID NO: 4015004 - DNA, 25 bp, Homo sapien
ctgcattttctttggtgcggttcca

SEQ ID NO: 4015005 - DNA, 25 bp, Homo sapien
tctttggtgcggttccatatcctca

SEQ ID NO: 4015006 - DNA, 25 bp, Homo sapien
acagcctcctggaccgaagaacaga

SEQ ID NO: 4015007 - DNA, 25 bp, Homo sapien
gtacctctccttgcactgtgtctgc

SEQ ID NO: 4015008 - DNA, 25 bp, Homo sapien
gagtaacaagaaggatattggcgcc

SEQ ID NO: 4015009 - DNA, 25 bp, Homo sapien
taacaagaaggatattggcgccatt

SEQ ID NO: 4015010 - DNA, 25 bp, Homo sapien
gatattggcgccattttttggctgc

SEQ ID NO: 4015011 - DNA, 25 bp, Homo sapien
tgggagtaacaagaaggatattggc

SEQ ID NO: 4015012 - DNA, 25 bp, Homo sapien
aagtgcatggttaacctcttcaccc

SEQ ID NO: 4015013 - DNA, 25 bp, Homo sapien
tctaagcaagttcaccaagcaaggt

SEQ ID NO: 4015014 - DNA, 25 bp, Homo sapien
cccttcttgatagaagactatgcaa

SEQ ID NO: 4015015 - DNA, 25 bp, Homo sapien
acaggacattttgcccggccggaag

SEQ ID NO: 4015016 - DNA, 25 bp, Homo sapien
aatggctgtaggcctggaccccagc

SEQ ID NO: 4015017 - DNA, 25 bp, Homo sapien
ataatggctgtaggcctggacccca

SEQ ID NO: 4015018 - DNA, 25 bp, Homo sapien
ctcataatggctgtaggcctggacc

SEQ ID NO: 4015019 - DNA, 25 bp, Homo sapien
cataatggctgtaggcctggacccc

SEQ ID NO: 4015020 - DNA, 25 bp, Homo sapien
tattatgttcatcagaccctagagc

SEQ ID NO: 4015021 - DNA, 25 bp, Homo sapien
caatgaagcttatgtgagacccaag

SEQ ID NO: 4015022 - DNA, 25 bp, Homo sapien
gcgcccagcctattgatgtgatctt

SEQ ID NO: 4015023 - DNA, 25 bp, Homo sapien
gaaccttgcatttggtggacactca

SEQ ID NO: 4015024 - DNA, 25 bp, Homo sapien
cagctgttctctttgcagttatgac

SEQ ID NO: 4015025 - DNA, 25 bp, Homo sapien
ttctctttgcagttatgacatttcc

SEQ ID NO: 4015026 - DNA, 25 bp, Homo sapien
cagttatgacatttccatccatgac

SEQ ID NO: 4015027 - DNA, 25 bp, Homo sapien
cttggtggcaatggcagaaactgca

SEQ ID NO: 4015028 - DNA, 25 bp, Homo sapien
ctgggctcaaagagtagcacagtag

SEQ ID NO: 4015029 - DNA, 25 bp, Homo sapien
tgggctcaaagagtagcacagtagc

SEQ ID NO: 4015030 - DNA, 25 bp, Homo sapien
ctggtgggaagggacgaccgaggtg

SEQ ID NO: 4015031 - DNA, 25 bp, Homo sapien
cctcgtagaaggtgaccaacttggt

SEQ ID NO: 4015032 - DNA, 25 bp, Homo sapien
gacgaccgaggtgatgccgcggtcc

SEQ ID NO: 4015033 - DNA, 25 bp, Homo sapien
aggtgatgccgcggtcctcgtagaa

SEQ ID NO: 4015034 - DNA, 25 bp, Homo sapien
atgacccctccttcgggaccgctgg

SEQ ID NO: 4015035 - DNA, 25 bp, Homo sapien
cacggtgcgcacgggctgcatgacc

SEQ ID NO: 4015036 - DNA, 25 bp, Homo sapien
gggctgcatgacccctccttcggga

SEQ ID NO: 4015037 - DNA, 25 bp, Homo sapien
cttcgggaccgctggagaagttggc

SEQ ID NO: 4015038 - DNA, 25 bp, Homo sapien
ctcggccgcgctcaggaacgctggt

SEQ ID NO: 4015039 - DNA, 25 bp, Homo sapien
ctggagctgcggaggtgttcctcca

SEQ ID NO: 4015040 - DNA, 25 bp, Homo sapien
cgctcaggaacgctggtacccggct

SEQ ID NO: 4015041 - DNA, 25 bp, Homo sapien
tcaggaacgctggtacccggctcat

SEQ ID NO: 4015042 - DNA, 25 bp, Homo sapien
acgtaccctcggctgtgccctttat

SEQ ID NO: 4015043 - DNA, 25 bp, Homo sapien
gtgccctttatgagcgcgcccgctg

SEQ ID NO: 4015044 - DNA, 25 bp, Homo sapien
tcagtctccgcaccgcgatccacgt

SEQ ID NO: 4015045 - DNA, 25 bp, Homo sapien
cgcgatccacgtaccctcggctgtg

SEQ ID NO: 4015046 - DNA, 25 bp, Homo sapien
gcacagttttctcacaggctaacta

SEQ ID NO: 4015047 - DNA, 25 bp, Homo sapien
tagagtctcttatcctagtcttcct

SEQ ID NO: 4015048 - DNA, 25 bp, Homo sapien
agatgtctggcctttgattgctaag

SEQ ID NO: 4015049 - DNA, 25 bp, Homo sapien
aattctgtccccgtctagagtctct

SEQ ID NO: 4015050 - DNA, 25 bp, Homo sapien
ggcaaggtgtaatcttttccatctc

SEQ ID NO: 4015051 - DNA, 25 bp, Homo sapien
aggtgtaatcttttccatctcacaa

SEQ ID NO: 4015052 - DNA, 25 bp, Homo sapien
gcagggcaaggtgtaatcttttcca

SEQ ID NO: 4015053 - DNA, 25 bp, Homo sapien
agtttgcagggcaaggtgtaatctt

SEQ ID NO: 4015054 - DNA, 25 bp, Homo sapien
aatcggaaaggaatgatgtaaagct

SEQ ID NO: 4015055 - DNA, 25 bp, Homo sapien
tagataagggcttcatgaaagagtg

SEQ ID NO: 4015056 - DNA, 25 bp, Homo sapien
taaatcctagtcatcaaatcagtga

SEQ ID NO: 4015057 - DNA, 25 bp, Homo sapien
agagatgattttgacctggagtggt

SEQ ID NO: 4015058 - DNA, 25 bp, Homo sapien
caaggcgcgtgtctcattcccctta

SEQ ID NO: 4015059 - DNA, 25 bp, Homo sapien
taacctctgtcgtcctagagttggg

SEQ ID NO: 4015060 - DNA, 25 bp, Homo sapien
tgggccaggacaagcaacggatgaa

SEQ ID NO: 4015061 - DNA, 25 bp, Homo sapien
tgaagtatctcggaagccggagaag

SEQ ID NO: 4015062 - DNA, 25 bp, Homo sapien
gcaggatcaggctacagactcgccc

SEQ ID NO: 4015063 - DNA, 25 bp, Homo sapien
agatggacgcgcaccccgcagcggc

SEQ ID NO: 4015064 - DNA, 25 bp, Homo sapien
agccccaaccagatggacgcgcacc

SEQ ID NO: 4015065 - DNA, 25 bp, Homo sapien
ctcctggtgtgcctctggcgggtcc

SEQ ID NO: 4015066 - DNA, 25 bp, Homo sapien
gttttgtatattagacccttgtcag

SEQ ID NO: 4015067 - DNA, 25 bp, Homo sapien
attctttacttagtgcaagcacaga

SEQ ID NO: 4015068 - DNA, 25 bp, Homo sapien
caaaatatactgaggctcgtggccc

SEQ ID NO: 4015069 - DNA, 25 bp, Homo sapien
aaacacagtgggcatagtgaatggc

SEQ ID NO: 4015070 - DNA, 25 bp, Homo sapien
caagcaaggtttttacctccagtcg

SEQ ID NO: 4015071 - DNA, 25 bp, Homo sapien
acctccagtcgaagtgaccttcaag

SEQ ID NO: 4015072 - DNA, 25 bp, Homo sapien
acacaagcaaggtttttacctccag

SEQ ID NO: 4015073 - DNA, 25 bp, Homo sapien
tttacctccagtcgaagtgaccttc

SEQ ID NO: 4015074 - DNA, 25 bp, Homo sapien
agtagcttgcattacaggagtgcac

SEQ ID NO: 4015075 - DNA, 25 bp, Homo sapien
gagtgcaccaccactgctcggctaa

SEQ ID NO: 4015076 - DNA, 25 bp, Homo sapien
aggagtgcaccaccactgctcggct

SEQ ID NO: 4015077 - DNA, 25 bp, Homo sapien
cccgagtagcttgcattacaggagt

SEQ ID NO: 4015078 - DNA, 25 bp, Homo sapien
attgctgttgttaaaggtgtttggc

SEQ ID NO: 4015079 - DNA, 25 bp, Homo sapien
gagattgcaatggtaactgtgtttt

SEQ ID NO: 4015080 - DNA, 25 bp, Homo sapien
ctgaaggggagattgcaatggtaac

SEQ ID NO: 4015081 - DNA, 25 bp, Homo sapien
ccaacatacacttgataggagtggg

SEQ ID NO: 4015082 - DNA, 25 bp, Homo sapien
aaaggtatatctcacatagtggcag

SEQ ID NO: 4015083 - DNA, 25 bp, Homo sapien
ggtgaaaggtatatctcacatagtg

SEQ ID NO: 4015084 - DNA, 25 bp, Homo sapien
tgaaaggtatatctcacatagtggc

SEQ ID NO: 4015085 - DNA, 25 bp, Homo sapien
aggtgaaaggtatatctcacatagt

SEQ ID NO: 4015086 - DNA, 25 bp, Homo sapien
gcatgctcctgaccttcatcggtgt

SEQ ID NO: 4015087 - DNA, 25 bp, Homo sapien
tcacgcaggacagcgaggtgagtca

SEQ ID NO: 4015088 - DNA, 25 bp, Homo sapien
gggagcaagtccagatcacgcagga

SEQ ID NO: 4015089 - DNA, 25 bp, Homo sapien
gtcttttcttgctgcggatcccaca

SEQ ID NO: 4015090 - DNA, 25 bp, Homo sapien
ctgcttctggctcgaagtgccctct

SEQ ID NO: 4015091 - DNA, 25 bp, Homo sapien
cttctggctcgaagtgccctctgag

SEQ ID NO: 4015092 - DNA, 25 bp, Homo sapien
ctcctgtccgttggtctccacagct

SEQ ID NO: 4015093 - DNA, 25 bp, Homo sapien
tccacagcttctggtctgtcttggc

SEQ ID NO: 4015094 - DNA, 25 bp, Homo sapien
ctgccatgtggccccagcttcctgg

SEQ ID NO: 4015095 - DNA, 25 bp, Homo sapien
catgtggccccagcttcctggtggc

SEQ ID NO: 4015096 - DNA, 25 bp, Homo sapien
gccatgtggccccagcttcctggtg

SEQ ID NO: 4015097 - DNA, 25 bp, Homo sapien
ccatgtggccccagcttcctggtgg

SEQ ID NO: 4015098 - DNA, 25 bp, Homo sapien
ctacgggattagtgccgatttcata

SEQ ID NO: 4015099 - DNA, 25 bp, Homo sapien
aatcccacaaggtgatgctgccagt

SEQ ID NO: 4015100 - DNA, 25 bp, Homo sapien
cacaaggtgatgctgccagtcctga

SEQ ID NO: 4015101 - DNA, 25 bp, Homo sapien
ctctacgggattagtgccgatttca

SEQ ID NO: 4015102 - DNA, 25 bp, Homo sapien
gaggccggccggttgcgatgctccg

SEQ ID NO: 4015103 - DNA, 25 bp, Homo sapien
cagtaagcagcgcacacgtgctgta

SEQ ID NO: 4015104 - DNA, 25 bp, Homo sapien
gtaagcagcgcacacgtgctgtact

SEQ ID NO: 4015105 - DNA, 25 bp, Homo sapien
cggttgcgatgctccgtgtttgcgt

SEQ ID NO: 4015106 - DNA, 25 bp, Homo sapien
ggatggaaggaagcaccagggcggg

SEQ ID NO: 4015107 - DNA, 25 bp, Homo sapien
cactaagaaacatatggtcagatgg

SEQ ID NO: 4015108 - DNA, 25 bp, Homo sapien
gtgtctgtgggtgggccagggacca

SEQ ID NO: 4015109 - DNA, 25 bp, Homo sapien
gagcaggtaggggacggtcccagga

SEQ ID NO: 4015110 - DNA, 25 bp, Homo sapien
aattctcccaactctactgtgggga

SEQ ID NO: 4015111 - DNA, 25 bp, Homo sapien
taaagatagaaccaggcttttacac

SEQ ID NO: 4015112 - DNA, 25 bp, Homo sapien
tttgcactgcaagcagggtcgcaac

SEQ ID NO: 4015113 - DNA, 25 bp, Homo sapien
cagtgcttctgtttgtgattgtaga

SEQ ID NO: 4015114 - DNA, 25 bp, Homo sapien
ctccattcttagttccacggaggga

SEQ ID NO: 4015115 - DNA, 25 bp, Homo sapien
atagcctccattcttagttccacgg

SEQ ID NO: 4015116 - DNA, 25 bp, Homo sapien
cattcttagttccacggagggaggg

SEQ ID NO: 4015117 - DNA, 25 bp, Homo sapien
tagcctccattcttagttccacgga

SEQ ID NO: 4015118 - DNA, 25 bp, Homo sapien
attctgcggcgatgctgcctctgga

SEQ ID NO: 4015119 - DNA, 25 bp, Homo sapien
gatagaccagttggccacttcaggg

SEQ ID NO: 4015120 - DNA, 25 bp, Homo sapien
gctttgctgccgtgggtaccctgag

SEQ ID NO: 4015121 - DNA, 25 bp, Homo sapien
agcatctgcgcaagccacagcagga

SEQ ID NO: 4015122 - DNA, 25 bp, Homo sapien
aacctccgcttcctgggttcaggtg

SEQ ID NO: 4015123 - DNA, 25 bp, Homo sapien
caatggcaccttcttggctcaatgc

SEQ ID NO: 4015124 - DNA, 25 bp, Homo sapien
tgcaatggcaccttcttggctcaat

SEQ ID NO: 4015125 - DNA, 25 bp, Homo sapien
ttgtgatctgctcacttcggccttc

SEQ ID NO: 4015126 - DNA, 25 bp, Homo sapien
tgaagagaggtccagtatgcttcct

SEQ ID NO: 4015127 - DNA, 25 bp, Homo sapien
tgatggatgaagagaggtccagtat

SEQ ID NO: 4015128 - DNA, 25 bp, Homo sapien
aagactggtcttttgtgatggatga

SEQ ID NO: 4015129 - DNA, 25 bp, Homo sapien
gagaggtccagtatgcttcctacca

SEQ ID NO: 4015130 - DNA, 25 bp, Homo sapien
cactcatgggagctcgtggttagat

SEQ ID NO: 4015131 - DNA, 25 bp, Homo sapien
tggactctcatcctccagtcggctg

SEQ ID NO: 4015132 - DNA, 25 bp, Homo sapien
gggctgctcagattctactcatgga

SEQ ID NO: 4015133 - DNA, 25 bp, Homo sapien
tgagaccttttaacgcctagctact

SEQ ID NO: 4015134 - DNA, 25 bp, Homo sapien
ttacggtcacgtcaccatgggagag

SEQ ID NO: 4015135 - DNA, 25 bp, Homo sapien
acagaggttttgatttggaggcgaa

SEQ ID NO: 4015136 - DNA, 25 bp, Homo sapien
tagaggtaattactggcagctgagg

SEQ ID NO: 4015137 - DNA, 25 bp, Homo sapien
catagatgactactcaacttacggt

SEQ ID NO: 4015138 - DNA, 25 bp, Homo sapien
cacaagtccattcgagtttggtgtc

SEQ ID NO: 4015139 - DNA, 25 bp, Homo sapien
tgagcccttctgtgagtagatgcac

SEQ ID NO: 4015140 - DNA, 25 bp, Homo sapien
tagatgcacacctctgaggctaaga

SEQ ID NO: 4015141 - DNA, 25 bp, Homo sapien
tcctgtgcaatccagtaaccttgaa

SEQ ID NO: 4015142 - DNA, 25 bp, Homo sapien
atccaattttacgagagggtgtagc

SEQ ID NO: 4015143 - DNA, 25 bp, Homo sapien
ccaattttacgagagggtgtagcct

SEQ ID NO: 4015144 - DNA, 25 bp, Homo sapien
gaatccaattttacgagagggtgta

SEQ ID NO: 4015145 - DNA, 25 bp, Homo sapien
gggtgtagcctggtgaggcctggat

SEQ ID NO: 4015146 - DNA, 25 bp, Homo sapien
gacagagcgctactcctggcagtgc

SEQ ID NO: 4015147 - DNA, 25 bp, Homo sapien
agagcgtcctgtgcggtgagtcccc

SEQ ID NO: 4015148 - DNA, 25 bp, Homo sapien
tcctggcagtgcgtcaatcagagcg

SEQ ID NO: 4015149 - DNA, 25 bp, Homo sapien
tcaatcagagcgtcctgtgcggtga

SEQ ID NO: 4015150 - DNA, 25 bp, Homo sapien
attctttgttagtttttggagtgtg

SEQ ID NO: 4015151 - DNA, 25 bp, Homo sapien
gttcgggtaatgatggttccacgtc

SEQ ID NO: 4015152 - DNA, 25 bp, Homo sapien
cttgggtttgcgtgacggttccaca

SEQ ID NO: 4015153 - DNA, 25 bp, Homo sapien
tcttgggtttgcgtgacggttccac

SEQ ID NO: 4015154 - DNA, 25 bp, Homo sapien
tgcgtgacggttccacgtcaccgac

SEQ ID NO: 4015155 - DNA, 25 bp, Homo sapien
tgggtttgcgtgacggttccacgtc

SEQ ID NO: 4015156 - DNA, 25 bp, Homo sapien
ctcttgggtttgcgtgacggttcca

SEQ ID NO: 4015157 - DNA, 25 bp, Homo sapien
tttgcgtgacggttccacgtcaccg

SEQ ID NO: 4015158 - DNA, 25 bp, Homo sapien
tgcgtgacggttccacgtcaccgac

SEQ ID NO: 4015159 - DNA, 25 bp, Homo sapien
gggaggtggttccatctcagccgcc

SEQ ID NO: 4015160 - DNA, 25 bp, Homo sapien
agctgagggtggaaggggagtgagc

SEQ ID NO: 4015161 - DNA, 25 bp, Homo sapien
ctgctgagggtggagctgagggtgg

SEQ ID NO: 4015162 - DNA, 25 bp, Homo sapien
gagggtggaaggggagtgagctgac

SEQ ID NO: 4015163 - DNA, 25 bp, Homo sapien
ctgagggtggaaggggagtgagctg

SEQ ID NO: 4015164 - DNA, 25 bp, Homo sapien
gctcggaaggtgtcttgagattatc

SEQ ID NO: 4015165 - DNA, 25 bp, Homo sapien
ctcggaaggtgtcttgagattatca

SEQ ID NO: 4015166 - DNA, 25 bp, Homo sapien
ctgagggtggaagcggcccccgcag

SEQ ID NO: 4015167 - DNA, 25 bp, Homo sapien
atcatccgctgagggtggaagcggc

SEQ ID NO: 4015168 - DNA, 25 bp, Homo sapien
aaggggagtgagctgacgctcggaa

SEQ ID NO: 4015169 - DNA, 25 bp, Homo sapien
ggtggaaggggagtgagctgacgct

SEQ ID NO: 4015170 - DNA, 25 bp, Homo sapien
tattatcatctgctgagggtggagc

SEQ ID NO: 4015171 - DNA, 25 bp, Homo sapien
cagcaggtgtcttgatattatcatc

SEQ ID NO: 4015172 - DNA, 25 bp, Homo sapien
gtcttgagattatcatccgctgagg

SEQ ID NO: 4015173 - DNA, 25 bp, Homo sapien
atcatccgctgagggtggaagcggc

SEQ ID NO: 4015174 - DNA, 25 bp, Homo sapien
gtgtcttgagattatcatccgctga

SEQ ID NO: 4015175 - DNA, 25 bp, Homo sapien
attatcatccgctgagggtggaagc

SEQ ID NO: 4015176 - DNA, 25 bp, Homo sapien
ggagtgagctgacgctcggaaggtg

SEQ ID NO: 4015177 - DNA, 25 bp, Homo sapien
gaaggggagtgagctgacgctcgga

SEQ ID NO: 4015178 - DNA, 25 bp, Homo sapien
aggggagtgagctgacgctcggaag

SEQ ID NO: 4015179 - DNA, 25 bp, Homo sapien
tgagctgacgctcggaaggtgtctt

SEQ ID NO: 4015180 - DNA, 25 bp, Homo sapien
aggggagtgagctgacgctcggaag

SEQ ID NO: 4015181 - DNA, 25 bp, Homo sapien
cccgcagacgctcggcaggtgtctt

SEQ ID NO: 4015182 - DNA, 25 bp, Homo sapien
tgtcttgatattatcatctgctgag

SEQ ID NO: 4015183 - DNA, 25 bp, Homo sapien
gaaggggagtgagctgacgctcgga

SEQ ID NO: 4015184 - DNA, 25 bp, Homo sapien
cccccgcagacgctcggcaggtgtc

SEQ ID NO: 4015185 - DNA, 25 bp, Homo sapien
ctgagggtggaagcggcccccgcag

SEQ ID NO: 4015186 - DNA, 25 bp, Homo sapien
cccgcagacgctcggcaggtgtctt

SEQ ID NO: 4015187 - DNA, 25 bp, Homo sapien
cgctgagggtggaagcggcccccgc

SEQ ID NO: 4015188 - DNA, 25 bp, Homo sapien
ctgacgctcggaaggtgtcttgaga

SEQ ID NO: 4015189 - DNA, 25 bp, Homo sapien
ctgagggtggaagcggcccccgcag

SEQ ID NO: 4015190 - DNA, 25 bp, Homo sapien
tgacgctcggaaggtgtcttgagat

SEQ ID NO: 4015191 - DNA, 25 bp, Homo sapien
atcatccgctgagggtggaagcggc

SEQ ID NO: 4015192 - DNA, 25 bp, Homo sapien
tgagggtggagctgagggtggaaag

SEQ ID NO: 4015193 - DNA, 25 bp, Homo sapien
tgtcttgatattatcatctgctgag

SEQ ID NO: 4015194 - DNA, 25 bp, Homo sapien
cccgcagacgctcggcaggtgtctt

SEQ ID NO: 4015195 - DNA, 25 bp, Homo sapien
gctccccgcagacgctcggcaggtg

SEQ ID NO: 4015196 - DNA, 25 bp, Homo sapien
aaggggagtgagctgacgctcggaa

SEQ ID NO: 4015197 - DNA, 25 bp, Homo sapien
ctgagggtggaagcggcccccgcag

SEQ ID NO: 4015198 - DNA, 25 bp, Homo sapien
cccgcagacgctcggcaggtgtctt

SEQ ID NO: 4015199 - DNA, 25 bp, Homo sapien
tgctgagggtggaagcggcccccgc

SEQ ID NO: 4015200 - DNA, 25 bp, Homo sapien
tgagctgacgctcggaaggtgtctt

SEQ ID NO: 4015201 - DNA, 25 bp, Homo sapien
atcatccgctcagggtggaagcggc

SEQ ID NO: 4015202 - DNA, 25 bp, Homo sapien
gaaggggagtgagctgacgctcgga

SEQ ID NO: 4015203 - DNA, 25 bp, Homo sapien
attatcatccgctcagggtggaagc

SEQ ID NO: 4015204 - DNA, 25 bp, Homo sapien
ctcagcaggtgtcttgatattatca

SEQ ID NO: 4015205 - DNA, 25 bp, Homo sapien
gctcagcaggtgtcttgatattatc

SEQ ID NO: 4015206 - DNA, 25 bp, Homo sapien
tcagcaggtgtcttgatattatcat

SEQ ID NO: 4015207 - DNA, 25 bp, Homo sapien
agctgagggtggaaggggagtgagc

SEQ ID NO: 4015208 - DNA, 25 bp, Homo sapien
ctgctgagggtggagctgagggtgg

SEQ ID NO: 4015209 - DNA, 25 bp, Homo sapien
ctgagggtggaaggggagtgagctg

SEQ ID NO: 4015210 - DNA, 25 bp, Homo sapien
gagggtggaaggggagtgagctgac

SEQ ID NO: 4015211 - DNA, 25 bp, Homo sapien
ggctgatggtggaagcggaatccgc

SEQ ID NO: 4015212 - DNA, 25 bp, Homo sapien
tggaagcggaatccgcagacgctca

SEQ ID NO: 4015213 - DNA, 25 bp, Homo sapien
tcagcaggtatcttgatattatcat

SEQ ID NO: 4015214 - DNA, 25 bp, Homo sapien
tggtggaagcggaatccgcagacgc

SEQ ID NO: 4015215 - DNA, 25 bp, Homo sapien
gacgctcggaaggtgtcttgagatc

SEQ ID NO: 4015216 - DNA, 25 bp, Homo sapien
gaaggggagtgagctgacgctcgga

SEQ ID NO: 4015217 - DNA, 25 bp, Homo sapien
gctcggaaggtgtcttgagatcatc

SEQ ID NO: 4015218 - DNA, 25 bp, Homo sapien
aaggggagtgagctgacgctcggaa

SEQ ID NO: 4015219 - DNA, 25 bp, Homo sapien
gtggaaggcaggtgtcttgatatta

SEQ ID NO: 4015220 - DNA, 25 bp, Homo sapien
ggaaggcaggtgtcttgatattatc

SEQ ID NO: 4015221 - DNA, 25 bp, Homo sapien
gaaggcaggtgtcttgatattatca

SEQ ID NO: 4015222 - DNA, 25 bp, Homo sapien
gggtggaaggcaggtgtcttgatat

SEQ ID NO: 4015223 - DNA, 25 bp, Homo sapien
gctcggaaggtgtcttgagattatc

SEQ ID NO: 4015224 - DNA, 25 bp, Homo sapien
atcatccgctgagggtggaagcggc

SEQ ID NO: 4015225 - DNA, 25 bp, Homo sapien
ctgagggtggaagcggcccccgcag

SEQ ID NO: 4015226 - DNA, 25 bp, Homo sapien
ctcggaaggtgtcttgagattatca

SEQ ID NO: 4015227 - DNA, 25 bp, Homo sapien
caggtgtcttgatattatcatctgc

SEQ ID NO: 4015228 - DNA, 25 bp, Homo sapien
gcaggtgtcttgatattatcatctg

SEQ ID NO: 4015229 - DNA, 25 bp, Homo sapien
cggcaggtgtcttgatattatcatc

SEQ ID NO: 4015230 - DNA, 25 bp, Homo sapien
ggcaggtgtcttgatattatcatct

SEQ ID NO: 4015231 - DNA, 25 bp, Homo sapien
agctgagggtggaaggggagtgagc

SEQ ID NO: 4015232 - DNA, 25 bp, Homo sapien
gagggtggaaggggagtgagctgac

SEQ ID NO: 4015233 - DNA, 25 bp, Homo sapien
ctgagggtggagctgagggtggaag

SEQ ID NO: 4015234 - DNA, 25 bp, Homo sapien
ctgagggtggaaggggagtgagctg

SEQ ID NO: 4015235 - DNA, 25 bp, Homo sapien
gacgctcggcaggtgtattgatatt

SEQ ID NO: 4015236 - DNA, 25 bp, Homo sapien
gctcggcaggtgtattgatattatc

SEQ ID NO: 4015237 - DNA, 25 bp, Homo sapien
ctgagggtggaagcggcccccgaag

SEQ ID NO: 4015238 - DNA, 25 bp, Homo sapien
ctgagggtggaagggcatgatatga

SEQ ID NO: 4015239 - DNA, 25 bp, Homo sapien
cccccgcagacgctcggcaggtgtc

SEQ ID NO: 4015240 - DNA, 25 bp, Homo sapien
ctgagggtggaagcggcccccgcag

SEQ ID NO: 4015241 - DNA, 25 bp, Homo sapien
cccgcagacgctcggcaggtgtctt

SEQ ID NO: 4015242 - DNA, 25 bp, Homo sapien
cgctgagggtggaagcggcccccgc

SEQ ID NO: 4015243 - DNA, 25 bp, Homo sapien
gctcggaaggtgtcttgagattatc

SEQ ID NO: 4015244 - DNA, 25 bp, Homo sapien
ctcggaaggtgtcttgagattatca

SEQ ID NO: 4015245 - DNA, 25 bp, Homo sapien
atcatccgctgagggtggaagcggc

SEQ ID NO: 4015246 - DNA, 25 bp, Homo sapien
attatcatccgctgagggtggaagc

SEQ ID NO: 4015247 - DNA, 25 bp, Homo sapien
gctcggcaggtgtcttgatattatc

SEQ ID NO: 4015248 - DNA, 25 bp, Homo sapien
ctcggcaggtgtcttgatattatca

SEQ ID NO: 4015249 - DNA, 25 bp, Homo sapien
tcggcaggtgtcttgatattatcat

SEQ ID NO: 4015250 - DNA, 25 bp, Homo sapien
cccgcagacgctcggcaggtgtctt

SEQ ID NO: 4015251 - DNA, 25 bp, Homo sapien
tgagctgacgctcggaaggtgtctt

SEQ ID NO: 4015252 - DNA, 25 bp, Homo sapien
ctgagggtggaagcggcccccgcag

SEQ ID NO: 4015253 - DNA, 25 bp, Homo sapien
aaggggagtgagctgacgctcggaa

SEQ ID NO: 4015254 - DNA, 25 bp, Homo sapien
aaggggagtgagctgacgctcggaa

SEQ ID NO: 4015255 - DNA, 25 bp, Homo sapien
gctcggaaggtgtcttgagattatc

SEQ ID NO: 4015256 - DNA, 25 bp, Homo sapien
ctcggaaggtgtcttgagattatca

SEQ ID NO: 4015257 - DNA, 25 bp, Homo sapien
ggtggaaggggagtgagctgacgct

SEQ ID NO: 4015258 - DNA, 25 bp, Homo sapien
agggtggaaggggatggagcagaca

SEQ ID NO: 4015259 - DNA, 25 bp, Homo sapien
gagggtggaaggggatggagcagac

SEQ ID NO: 4015260 - DNA, 25 bp, Homo sapien
gggtggaaggggatggagcagacac

SEQ ID NO: 4015261 - DNA, 25 bp, Homo sapien
ctgagggtggaaggggatggagcag

SEQ ID NO: 4015262 - DNA, 25 bp, Homo sapien
gtggagctgagggtagagctgaggg

SEQ ID NO: 4015263 - DNA, 25 bp, Homo sapien
tgagtagacactcgggaggtgtctt

SEQ ID NO: 4015264 - DNA, 25 bp, Homo sapien
cagacactcaggaggtgtcttgaga

SEQ ID NO: 4015265 - DNA, 25 bp, Homo sapien
gattatcatccgctgagggtggagc

SEQ ID NO: 4015266 - DNA, 25 bp, Homo sapien
actcgggaggtgtcttgagattatc

SEQ ID NO: 4015267 - DNA, 25 bp, Homo sapien
ctcgggaggtgtcttgagattatca

SEQ ID NO: 4015268 - DNA, 25 bp, Homo sapien
agattatcatccgctgagggtggaa

SEQ ID NO: 4015269 - DNA, 25 bp, Homo sapien
gagggtggaaggggagtgagcacac

SEQ ID NO: 4015270 - DNA, 25 bp, Homo sapien
actcgggaggtgtcttgagattatc

SEQ ID NO: 4015271 - DNA, 25 bp, Homo sapien
tgagcagacactcgggaggtgtctt

SEQ ID NO: 4015272 - DNA, 25 bp, Homo sapien
attatcatccgctgagggtggaagg

SEQ ID NO: 4015273 - DNA, 25 bp, Homo sapien
gggagtgagcagacactcgggaggt

SEQ ID NO: 4015274 - DNA, 25 bp, Homo sapien
atgttttccaggccttttatgttct

SEQ ID NO: 4015275 - DNA, 25 bp, Homo sapien
tgttttccaggccttttatgttctg

SEQ ID NO: 4015276 - DNA, 25 bp, Homo sapien
aaggtacagaggccacacaagaacc

SEQ ID NO: 4015277 - DNA, 25 bp, Homo sapien
taggactcggcagcttttgaaggta

SEQ ID NO: 4015278 - DNA, 25 bp, Homo sapien
aatcataggactcggcagcttttga

SEQ ID NO: 4015279 - DNA, 25 bp, Homo sapien
aggtacagaggccacacaagaacca

SEQ ID NO: 4015280 - DNA, 25 bp, Homo sapien
ggtggggatgaaggtgtttttgcgc

SEQ ID NO: 4015281 - DNA, 25 bp, Homo sapien
gggatgaaggtgtttttgcgcaaca

SEQ ID NO: 4015282 - DNA, 25 bp, Homo sapien
gatgaaggtgtttttgcgcaacacg

SEQ ID NO: 4015283 - DNA, 25 bp, Homo sapien
tgaaggtgtttttgcgcaacacggt

SEQ ID NO: 4015284 - DNA, 25 bp, Homo sapien
tgggactgtgatgcttgtaggcagc

SEQ ID NO: 4015285 - DNA, 25 bp, Homo sapien
caacagggatgggactgtgatgctt

SEQ ID NO: 4015286 - DNA, 25 bp, Homo sapien
actgtgatgcttgtaggcagccttt

SEQ ID NO: 4015287 - DNA, 25 bp, Homo sapien
tgtgatgcttgtaggcagcctttct

SEQ ID NO: 4015288 - DNA, 25 bp, Homo sapien
atgtatccatgtcctgacctggcag

SEQ ID NO: 4015289 - DNA, 25 bp, Homo sapien
aatgtatccatgtcctgacctggca

SEQ ID NO: 4015290 - DNA, 25 bp, Homo sapien
aaaatgtatccatgtcctgacctgg

SEQ ID NO: 4015291 - DNA, 25 bp, Homo sapien
aaatgtatccatgtcctgacctggc

SEQ ID NO: 4015292 - DNA, 25 bp, Homo sapien
ccagttgcaaagagcctttcttgca

SEQ ID NO: 4015293 - DNA, 25 bp, Homo sapien
gcaaagagcctttcttgcagaaggg

SEQ ID NO: 4015294 - DNA, 25 bp, Homo sapien
gttgcaaagagcctttcttgcagaa

SEQ ID NO: 4015295 - DNA, 25 bp, Homo sapien
tgcaaagagcctttcttgcagaagg

SEQ ID NO: 4015296 - DNA, 25 bp, Homo sapien
ttgagagagtctaagggccgtggca

SEQ ID NO: 4015297 - DNA, 25 bp, Homo sapien
gaatgttgagagagtctaagggccg

SEQ ID NO: 4015298 - DNA, 25 bp, Homo sapien
aatgttgagagagtctaagggccgt

SEQ ID NO: 4015299 - DNA, 25 bp, Homo sapien
agagagtctaagggccgtggcatca

SEQ ID NO: 4015300 - DNA, 25 bp, Homo sapien
ctcttgcgcacgttgaaacattttc

SEQ ID NO: 4015301 - DNA, 25 bp, Homo sapien
tcgccgccgcaactcttgcgcacgt

SEQ ID NO: 4015302 - DNA, 25 bp, Homo sapien
tctgctcgccgccgcaactcttgcg

SEQ ID NO: 4015303 - DNA, 25 bp, Homo sapien
tttgcatttgtggtagtcctctgct

SEQ ID NO: 4015304 - DNA, 25 bp, Homo sapien
aatctatctctacctagaaaacgta

SEQ ID NO: 4015305 - DNA, 25 bp, Homo sapien
gaagagtacagtctgagccggtcac

SEQ ID NO: 4015306 - DNA, 25 bp, Homo sapien
caactgtacccttacacaatctatc

SEQ ID NO: 4015307 - DNA, 25 bp, Homo sapien
gaaaacgtatttcagatggctagaa

SEQ ID NO: 4015308 - DNA, 25 bp, Homo sapien
tcctaaggatgacaacaactcaccc

SEQ ID NO: 4015309 - DNA, 25 bp, Homo sapien
tttcctaaggatgacaacaactcac

SEQ ID NO: 4015310 - DNA, 25 bp, Homo sapien
ctaaggatgacaacaactcacccca

SEQ ID NO: 4015311 - DNA, 25 bp, Homo sapien
taaggatgacaacaactcaccccac

SEQ ID NO: 4015312 - DNA, 25 bp, Homo sapien
ctctccttttctgcatgctcacatt

SEQ ID NO: 4015313 - DNA, 25 bp, Homo sapien
catgctcacattctttcacgcttag

SEQ ID NO: 4015314 - DNA, 25 bp, Homo sapien
tccttttctgcatgctcacattctt

SEQ ID NO: 4015315 - DNA, 25 bp, Homo sapien
ttctgcatgctcacattctttcacg

SEQ ID NO: 4015316 - DNA, 25 bp, Homo sapien
ccttccagaataaccccgcagttca

SEQ ID NO: 4015317 - DNA, 25 bp, Homo sapien
cacaccacttgattcatggtcctga

SEQ ID NO: 4015318 - DNA, 25 bp, Homo sapien
tgttgccctcacaccacttgattca

SEQ ID NO: 4015319 - DNA, 25 bp, Homo sapien
catggtcctgatcctaaggatctca

SEQ ID NO: 4015320 - DNA, 25 bp, Homo sapien
tgctgtgttgccctcacaccacttg

SEQ ID NO: 4015321 - DNA, 25 bp, Homo sapien
ctgatacttggctttataggaagga

SEQ ID NO: 4015322 - DNA, 25 bp, Homo sapien
gatacttggctttataggaaggatg

SEQ ID NO: 4015323 - DNA, 25 bp, Homo sapien
tacttggctttataggaaggatgtg

SEQ ID NO: 4015324 - DNA, 25 bp, Homo sapien
cttggctttataggaaggatgtgta

SEQ ID NO: 4015325 - DNA, 25 bp, Homo sapien
tctgaagcttctgatctccgatgag

SEQ ID NO: 4015326 - DNA, 25 bp, Homo sapien
gagttgacataagtgcatctgaagc

SEQ ID NO: 4015327 - DNA, 25 bp, Homo sapien
gaagcattctactcttgagttgaca

SEQ ID NO: 4015328 - DNA, 25 bp, Homo sapien
gtcctgtccccacgctaaagaagct

SEQ ID NO: 4015329 - DNA, 25 bp, Homo sapien
aaacccaggacgaaagtcagcctcg

SEQ ID NO: 4015330 - DNA, 25 bp, Homo sapien
gaaacccaggacgaaagtcagcctc

SEQ ID NO: 4015331 - DNA, 25 bp, Homo sapien
ttgtagggactgagcctgcaccgat

SEQ ID NO: 4015332 - DNA, 25 bp, Homo sapien
gactgagcctgcaccgatgacttca

SEQ ID NO: 4015333 - DNA, 25 bp, Homo sapien
gcctgtatggaggacccctgaccat

SEQ ID NO: 4015334 - DNA, 25 bp, Homo sapien
atgacttcaattgcagcctgtatgg

SEQ ID NO: 4015335 - DNA, 25 bp, Homo sapien
caacagtatttgtgtcaaggcacat

SEQ ID NO: 4015336 - DNA, 25 bp, Homo sapien
acaacagtatttgtgtcaaggcaca

SEQ ID NO: 4015337 - DNA, 25 bp, Homo sapien
agtaatgacgtctttcaggccaatt

SEQ ID NO: 4015338 - DNA, 25 bp, Homo sapien
gagtaatgacgtctttcaggccaat

SEQ ID NO: 4015339 - DNA, 25 bp, Homo sapien
taatgacgtctttcaggccaatttt

SEQ ID NO: 4015340 - DNA, 25 bp, Homo sapien
tagagtaatgacgtctttcaggcca

SEQ ID NO: 4015341 - DNA, 25 bp, Homo sapien
tttgtgtgcatacaaatggacctca

SEQ ID NO: 4015342 - DNA, 25 bp, Homo sapien
tcttttctttgtgtgcatacaaatg

SEQ ID NO: 4015343 - DNA, 25 bp, Homo sapien
tctttgtgtgcatacaaatggacct

SEQ ID NO: 4015344 - DNA, 25 bp, Homo sapien
tttctttgtgtgcatacaaatggac

SEQ ID NO: 4015345 - DNA, 25 bp, Homo sapien
tcatttccacactatgcggattcca

SEQ ID NO: 4015346 - DNA, 25 bp, Homo sapien
aaactcatttccacactatgcggat

SEQ ID NO: 4015347 - DNA, 25 bp, Homo sapien
cacactatgcggattccaacagagc

SEQ ID NO: 4015348 - DNA, 25 bp, Homo sapien
tatgcggattccaacagagccatac

SEQ ID NO: 4015349 - DNA, 25 bp, Homo sapien
ctgtctacggcggttggacctccag

SEQ ID NO: 4015350 - DNA, 25 bp, Homo sapien
tacggcggttggacctccaggctct

SEQ ID NO: 4015351 - DNA, 25 bp, Homo sapien
tctacggcggttggacctccaggct

SEQ ID NO: 4015352 - DNA, 25 bp, Homo sapien
cggcggttggacctccaggctctct

SEQ ID NO: 4015353 - DNA, 25 bp, Homo sapien
agaagatagtcttcaggagagacac

SEQ ID NO: 4015354 - DNA, 25 bp, Homo sapien
ttcgagaccagaagatagtcttcag

SEQ ID NO: 4015355 - DNA, 25 bp, Homo sapien
gaccagaagatagtcttcaggagag

SEQ ID NO: 4015356 - DNA, 25 bp, Homo sapien
ccagaagatagtcttcaggagagac

SEQ ID NO: 4015357 - DNA, 25 bp, Homo sapien
cattgttcagaaggaggttcagccc

SEQ ID NO: 4015358 - DNA, 25 bp, Homo sapien
gacaaattatggcacaacttagcag

SEQ ID NO: 4015359 - DNA, 25 bp, Homo sapien
ggcagtgccaaatgacgtgtaatta

SEQ ID NO: 4015360 - DNA, 25 bp, Homo sapien
gaatggcaagacaaaatgtagagct

SEQ ID NO: 4015361 - DNA, 25 bp, Homo sapien
ccacatattcataatgaagtccaga

SEQ ID NO: 4015362 - DNA, 25 bp, Homo sapien
ctatccagagggtaatgacaacttt

SEQ ID NO: 4015363 - DNA, 25 bp, Homo sapien
cggaaacgcaataatgacatgtaac

SEQ ID NO: 4015364 - DNA, 25 bp, Homo sapien
ctttataacttgtcggaaacgcaat

SEQ ID NO: 4015365 - DNA, 25 bp, Homo sapien
gtaatgacaactttataacttgtcg

SEQ ID NO: 4015366 - DNA, 25 bp, Homo sapien
tttcactcagaaagaatcatcctta

SEQ ID NO: 4015367 - DNA, 25 bp, Homo sapien
cacatgcagcccgtcactcatgggt

SEQ ID NO: 4015368 - DNA, 25 bp, Homo sapien
cactcatgggtaagacaagctaagt

SEQ ID NO: 4015369 - DNA, 25 bp, Homo sapien
aaattgatgtataacattggatgca

SEQ ID NO: 4015370 - DNA, 25 bp, Homo sapien
tatatatcacatggtaaaagaatcc

SEQ ID NO: 4015371 - DNA, 25 bp, Homo sapien
gccacgtgatacagcccagtaaaaa

SEQ ID NO: 4015372 - DNA, 25 bp, Homo sapien
taatttcatgccacgtgatacagcc

SEQ ID NO: 4015373 - DNA, 25 bp, Homo sapien
gcctgagctgtgtaatttcatgcca

SEQ ID NO: 4015374 - DNA, 25 bp, Homo sapien
gctgtgtaatttcatgccacgtgat

SEQ ID NO: 4015375 - DNA, 25 bp, Homo sapien
attccagtaggagcccaaagaggag

SEQ ID NO: 4015376 - DNA, 25 bp, Homo sapien
gataaattccagtaggagcccaaag

SEQ ID NO: 4015377 - DNA, 25 bp, Homo sapien
ggctgataaattccagtaggagccc

SEQ ID NO: 4015378 - DNA, 25 bp, Homo sapien
taaattccagtaggagcccaaagag

SEQ ID NO: 4015379 - DNA, 25 bp, Homo sapien
ataaaaaacaaatgatggcaggatg

SEQ ID NO: 4015380 - DNA, 25 bp, Homo sapien
taaaaaacaaatgatggcaggatgg

SEQ ID NO: 4015381 - DNA, 25 bp, Homo sapien
aaaaaacaaatgatggcaggatggc

SEQ ID NO: 4015382 - DNA, 25 bp, Homo sapien
acatccatgtagccatccgtccatc

SEQ ID NO: 4015383 - DNA, 25 bp, Homo sapien
aggtcccgatagtaaaccatctcca

SEQ ID NO: 4015384 - DNA, 25 bp, Homo sapien
gaaggtcccgatagtaaaccatctc

SEQ ID NO: 4015385 - DNA, 25 bp, Homo sapien
tctgaacccaaatgagggggagaaa

SEQ ID NO: 4015386 - DNA, 25 bp, Homo sapien
attctgaacccaaatgagggggaga

SEQ ID NO: 4015387 - DNA, 25 bp, Homo sapien
ttctgaacccaaatgagggggagaa

SEQ ID NO: 4015388 - DNA, 25 bp, Homo sapien
aattctgaacccaaatgagggggag

SEQ ID NO: 4015389 - DNA, 25 bp, Homo sapien
aagttcatcagcttctctcctaagg

SEQ ID NO: 4015390 - DNA, 25 bp, Homo sapien
tctcagggacgtccaaggaatctgt

SEQ ID NO: 4015391 - DNA, 25 bp, Homo sapien
cttggcagcatcatgtgtgatgggt

SEQ ID NO: 4015392 - DNA, 25 bp, Homo sapien
tctcctaaggtatttgcccacaata

SEQ ID NO: 4015393 - DNA, 25 bp, Homo sapien
cctgccctagatttggctgggcatg

SEQ ID NO: 4015394 - DNA, 25 bp, Homo sapien
tttttatatgctgcagccatgttcc

SEQ ID NO: 4015395 - DNA, 25 bp, Homo sapien
ttaacaaaagtatggaattcaattc

SEQ ID NO: 4015396 - DNA, 25 bp, Homo sapien
gttcctgccctagatttggctgggc

SEQ ID NO: 4015397 - DNA, 25 bp, Homo sapien
gcatgcatgcaaagaccgtctgagg

SEQ ID NO: 4015398 - DNA, 25 bp, Homo sapien
acccgtgtacctgagtgtcatcacc

SEQ ID NO: 4015399 - DNA, 25 bp, Homo sapien
gcacccgtgtacctgagtgtcatca

SEQ ID NO: 4015400 - DNA, 25 bp, Homo sapien
tgagcacccgtgtacctgagtgtca

SEQ ID NO: 4015401 - DNA, 25 bp, Homo sapien
gggatgctgagttatccactggagc

SEQ ID NO: 4015402 - DNA, 25 bp, Homo sapien
gatgctgagttatccactggagcat

SEQ ID NO: 4015403 - DNA, 25 bp, Homo sapien
ctgggatgctgagttatccactgga

SEQ ID NO: 4015404 - DNA, 25 bp, Homo sapien
gggacagctgagtggtaggactcct

SEQ ID NO: 4015405 - DNA, 25 bp, Homo sapien
gattttgtgcggctctgggacaaac

SEQ ID NO: 4015406 - DNA, 25 bp, Homo sapien
gaagtctactccgtttaatcatgct

SEQ ID NO: 4015407 - DNA, 25 bp, Homo sapien
tgatgattttgtgcggctctgggac

SEQ ID NO: 4015408 - DNA, 25 bp, Homo sapien
ctccgtttaatcatgctggtgatga

SEQ ID NO: 4015409 - DNA, 25 bp, Homo sapien
agcaaatctgcggtgacttagtcct

SEQ ID NO: 4015410 - DNA, 25 bp, Homo sapien
tctgcggtgacttagtcctcctgtc

SEQ ID NO: 4015411 - DNA, 25 bp, Homo sapien
cggtgacttagtcctcctgtcattt

SEQ ID NO: 4015412 - DNA, 25 bp, Homo sapien
gataaagcaaatctgcggtgactta

SEQ ID NO: 4015413 - DNA, 25 bp, Homo sapien
tgatctcggcccactaaaaccccca

SEQ ID NO: 4015414 - DNA, 25 bp, Homo sapien
aacccccacctcctgaatctaagca

SEQ ID NO: 4015415 - DNA, 25 bp, Homo sapien
aattctcctgtctcagcctcctgag

SEQ ID NO: 4015416 - DNA, 25 bp, Homo sapien
gcgtgatctcggcccactaaaaccc
